United States Patent Application Publication US 2018/0305689 A1 - sequence listing, part 68

SEQ ID NO: 927064 - RNA, 19 nt, Artificial Sequence
  Description of Artificial Sequence: Synthetic oligonucleotide
  Sense strand starting at position 1752 of SEQ ID NO: 913435
ucuuucugacauggacaga

SEQ ID NO: 927065 - RNA, 19 nt, Artificial Sequence
  Description of Artificial Sequence: Synthetic oligonucleotide
  Antisense strand to SEQ ID NO: 927064
ucuguccaugucagaaaga

SEQ ID NO: 927066 - RNA, 19 nt, Artificial Sequence
  Description of Artificial Sequence: Synthetic oligonucleotide
  Sense strand starting at position 3238 of SEQ ID NO: 913435
agauauugucuugaaugua

SEQ ID NO: 927067 - RNA, 19 nt, Artificial Sequence
  Description of Artificial Sequence: Synthetic oligonucleotide
  Antisense strand to SEQ ID NO: 927066
uacauucaagacaauaucu

SEQ ID NO: 927068 - RNA, 19 nt, Artificial Sequence
  Description of Artificial Sequence: Synthetic oligonucleotide
  Sense strand starting at position 3929 of SEQ ID NO: 913435
uccagauauuuagauggaa

SEQ ID NO: 927069 - RNA, 19 nt, Artificial Sequence
  Description of Artificial Sequence: Synthetic oligonucleotide
  Antisense strand to SEQ ID NO: 927068
uuccaucuaaauaucugga

SEQ ID NO: 927070 - RNA, 19 nt, Artificial Sequence
  Description of Artificial Sequence: Synthetic oligonucleotide
  Sense strand starting at position 3380 of SEQ ID NO: 913435
gaaauccaugguggauauu

SEQ ID NO: 927071 - RNA, 19 nt, Artificial Sequence
  Description of Artificial Sequence: Synthetic oligonucleotide
  Antisense strand to SEQ ID NO: 927070
aauauccaccauggauuuc

SEQ ID NO: 927072 - RNA, 19 nt, Artificial Sequence
  Description of Artificial Sequence: Synthetic oligonucleotide
  Sense strand starting at position 3377 of SEQ ID NO: 913435
ccagaaauccaugguggau

SEQ ID NO: 927073 - RNA, 19 nt, Artificial Sequence
  Description of Artificial Sequence: Synthetic oligonucleotide
  Antisense strand to SEQ ID NO: 927072
auccaccauggauuucugg

SEQ ID NO: 927074 - RNA, 19 nt, Artificial Sequence
  Description of Artificial Sequence: Synthetic oligonucleotide
  Sense strand starting at position 663 of SEQ ID NO: 913435
gacgcugacaauggagaaa

SEQ ID NO: 927075 - RNA, 19 nt, Artificial Sequence
  Description of Artificial Sequence: Synthetic oligonucleotide
  Antisense strand to SEQ ID NO: 927074
uuucuccauugucagcguc

SEQ ID NO: 927076 - RNA, 19 nt, Artificial Sequence
  Description of Artificial Sequence: Synthetic oligonucleotide
  Sense strand starting at position 3170 of SEQ ID NO: 913435
cuaguaagacaguagguau

SEQ ID NO: 927077 - RNA, 19 nt, Artificial Sequence
  Description of Artificial Sequence: Synthetic oligonucleotide
  Antisense strand to SEQ ID NO: 927076
auaccuacugucuuacuag

SEQ ID NO: 927078 - RNA, 19 nt, Artificial Sequence
  Description of Artificial Sequence: Synthetic oligonucleotide
  Sense strand starting at position 2749 of SEQ ID NO: 913435
acuggugggaauugauauu

SEQ ID NO: 927079 - RNA, 19 nt, Artificial Sequence
  Description of Artificial Sequence: Synthetic oligonucleotide
  Antisense strand to SEQ ID NO: 927078
aauaucaauucccaccagu

SEQ ID NO: 927080 - RNA, 19 nt, Artificial Sequence
  Description of Artificial Sequence: Synthetic oligonucleotide
  Sense strand starting at position 3235 of SEQ ID NO: 913435
ugaagauauugucuugaau

SEQ ID NO: 927081 - RNA, 19 nt, Artificial Sequence
  Description of Artificial Sequence: Synthetic oligonucleotide
  Antisense strand to SEQ ID NO: 927080
auucaagacaauaucuuca

SEQ ID NO: 927082 - RNA, 19 nt, Artificial Sequence
  Description of Artificial Sequence: Synthetic oligonucleotide
  Sense strand starting at position 1561 of SEQ ID NO: 913435
gggucugaucuguagaauu

SEQ ID NO: 927083 - RNA, 19 nt, Artificial Sequence
  Description of Artificial Sequence: Synthetic oligonucleotide
  Antisense strand to SEQ ID NO: 927082
aauucuacagaucagaccc

SEQ ID NO: 927084 - RNA, 19 nt, Artificial Sequence
  Description of Artificial Sequence: Synthetic oligonucleotide
  Sense strand starting at position 2927 of SEQ ID NO: 913435
accaguaauuggucagaga

SEQ ID NO: 927085 - RNA, 19 nt, Artificial Sequence
  Description of Artificial Sequence: Synthetic oligonucleotide
  Antisense strand to SEQ ID NO: 927084
ucucugaccaauuacuggu

SEQ ID NO: 927086 - RNA, 19 nt, Artificial Sequence
  Description of Artificial Sequence: Synthetic oligonucleotide
  Sense strand starting at position 2205 of SEQ ID NO: 913435
aggcaaucugaccauguca

SEQ ID NO: 927087 - RNA, 19 nt, Artificial Sequence
  Description of Artificial Sequence: Synthetic oligonucleotide
  Antisense strand to SEQ ID NO: 927086
ugacauggucagauugccu

SEQ ID NO: 927088 - RNA, 19 nt, Artificial Sequence
  Description of Artificial Sequence: Synthetic oligonucleotide
  Sense strand starting at position 2372 of SEQ ID NO: 913435
gcgucugagcuauuguuca

SEQ ID NO: 927089 - RNA, 19 nt, Artificial Sequence
  Description of Artificial Sequence: Synthetic oligonucleotide
  Antisense strand to SEQ ID NO: 927088
ugaacaauagcucagacgc

SEQ ID NO: 927090 - RNA, 19 nt, Artificial Sequence
  Description of Artificial Sequence: Synthetic oligonucleotide
  Sense strand starting at position 3655 of SEQ ID NO: 913435
gaacaaucgaugggauugu

SEQ ID NO: 927091 - RNA, 19 nt, Artificial Sequence
  Description of Artificial Sequence: Synthetic oligonucleotide
  Antisense strand to SEQ ID NO: 927090
acaaucccaucgauuguuc

SEQ ID NO: 927092 - RNA, 19 nt, Artificial Sequence
  Description of Artificial Sequence: Synthetic oligonucleotide
  Sense strand starting at position 3181 of SEQ ID NO: 913435
guagguauucagcagauga

SEQ ID NO: 927093 - RNA, 19 nt, Artificial Sequence
  Description of Artificial Sequence: Synthetic oligonucleotide
  Antisense strand to SEQ ID NO: 927092
ucaucugcugaauaccuac

SEQ ID NO: 927094 - RNA, 19 nt, Artificial Sequence
  Description of Artificial Sequence: Synthetic oligonucleotide
  Sense strand starting at position 890 of SEQ ID NO: 913435
uggugaagccucgacaaga

SEQ ID NO: 927095 - RNA, 19 nt, Artificial Sequence
  Description of Artificial Sequence: Synthetic oligonucleotide
  Antisense strand to SEQ ID NO: 927094
ucuugucgaggcuucacca

SEQ ID NO: 927096 - RNA, 19 nt, Artificial Sequence
  Description of Artificial Sequence: Synthetic oligonucleotide
  Sense strand starting at position 2701 of SEQ ID NO: 913435
guaaacaauuguccugaga

SEQ ID NO: 927097 - RNA, 19 nt, Artificial Sequence
  Description of Artificial Sequence: Synthetic oligonucleotide
  Antisense strand to SEQ ID NO: 927096
ucucaggacaauuguuuac

SEQ ID NO: 927098 - RNA, 19 nt, Artificial Sequence
  Description of Artificial Sequence: Synthetic oligonucleotide
  Sense strand starting at position 2477 of SEQ ID NO: 913435
ugucuccuugcagaauaaa

SEQ ID NO: 927099 - RNA, 19 nt, Artificial Sequence
  Description of Artificial Sequence: Synthetic oligonucleotide
  Antisense strand to SEQ ID NO: 927098
uuuauucugcaaggagaca

SEQ ID NO: 927100 - RNA, 19 nt, Artificial Sequence
  Description of Artificial Sequence: Synthetic oligonucleotide
  Sense strand starting at position 2948 of SEQ ID NO: 913435
ucuaguuagccauacaaug

SEQ ID NO: 927101 - RNA, 19 nt, Artificial Sequence
  Description of Artificial Sequence: Synthetic oligonucleotide
  Antisense strand to SEQ ID NO: 927100
cauuguauggcuaacuaga

SEQ ID NO: 927102 - RNA, 19 nt, Artificial Sequence
  Description of Artificial Sequence: Synthetic oligonucleotide
  Sense strand starting at position 3887 of SEQ ID NO: 913435
gggauauuccagggcugau

SEQ ID NO: 927103 - RNA, 19 nt, Artificial Sequence
  Description of Artificial Sequence: Synthetic oligonucleotide
  Antisense strand to SEQ ID NO: 927102
aucagcccuggaauauccc

SEQ ID NO: 927104 - RNA, 19 nt, Artificial Sequence
  Description of Artificial Sequence: Synthetic oligonucleotide
  Sense strand starting at position 32 of SEQ ID NO: 913435
agcauuaagucaccaggga

SEQ ID NO: 927105 - RNA, 19 nt, Artificial Sequence
  Description of Artificial Sequence: Synthetic oligonucleotide
  Antisense strand to SEQ ID NO: 927104
ucccuggugacuuaaugcu

SEQ ID NO: 927106 - RNA, 19 nt, Artificial Sequence
  Description of Artificial Sequence: Synthetic oligonucleotide
  Sense strand starting at position 2396 of SEQ ID NO: 913435
cccucauguguugaauaac

SEQ ID NO: 927107 - RNA, 19 nt, Artificial Sequence
  Description of Artificial Sequence: Synthetic oligonucleotide
  Antisense strand to SEQ ID NO: 927106
guuauucaacacaugaggg

SEQ ID NO: 927108 - RNA, 19 nt, Artificial Sequence
  Description of Artificial Sequence: Synthetic oligonucleotide
  Sense strand starting at position 2399 of SEQ ID NO: 913435
ucauguguugaauaacucu

SEQ ID NO: 927109 - RNA, 19 nt, Artificial Sequence
  Description of Artificial Sequence: Synthetic oligonucleotide
  Antisense strand to SEQ ID NO: 927108
agaguuauucaacacauga

SEQ ID NO: 927110 - RNA, 19 nt, Artificial Sequence
  Description of Artificial Sequence: Synthetic oligonucleotide
  Sense strand starting at position 2164 of SEQ ID NO: 913435
uguguuggagucgaagaga

SEQ ID NO: 927111 - RNA, 19 nt, Artificial Sequence
  Description of Artificial Sequence: Synthetic oligonucleotide
  Antisense strand to SEQ ID NO: 927110
ucucuucgacuccaacaca

SEQ ID NO: 927112 - RNA, 19 nt, Artificial Sequence
  Description of Artificial Sequence: Synthetic oligonucleotide
  Sense strand starting at position 2941 of SEQ ID NO: 913435
agagaauucuaguuagcca

SEQ ID NO: 927113 - RNA, 19 nt, Artificial Sequence
  Description of Artificial Sequence: Synthetic oligonucleotide
  Antisense strand to SEQ ID NO: 927112
uggcuaacuagaauucucu

SEQ ID NO: 927114 - RNA, 19 nt, Artificial Sequence
  Description of Artificial Sequence: Synthetic oligonucleotide
  Sense strand starting at position 471 of SEQ ID NO: 913435
gcgcaaucaccuuugcugu

SEQ ID NO: 927115 - RNA, 19 nt, Artificial Sequence
  Description of Artificial Sequence: Synthetic oligonucleotide
  Antisense strand to SEQ ID NO: 927114
acagcaaaggugauugcgc

SEQ ID NO: 927116 - RNA, 19 nt, Artificial Sequence
  Description of Artificial Sequence: Synthetic oligonucleotide
  Sense strand starting at position 3565 of SEQ ID NO: 913435
ccaugugucccacacucaa

SEQ ID NO: 927117 - RNA, 19 nt, Artificial Sequence
  Description of Artificial Sequence: Synthetic oligonucleotide
  Antisense strand to SEQ ID NO: 927116
uugagugugggacacaugg

SEQ ID NO: 927118 - RNA, 19 nt, Artificial Sequence
  Description of Artificial Sequence: Synthetic oligonucleotide
  Sense strand starting at position 1397 of SEQ ID NO: 913435
ggagucuacuguuugagag

SEQ ID NO: 927119 - RNA, 19 nt, Artificial Sequence
  Description of Artificial Sequence: Synthetic oligonucleotide
  Antisense strand to SEQ ID NO: 927118
cucucaaacaguagacucc

SEQ ID NO: 927120 - RNA, 19 nt, Artificial Sequence
  Description of Artificial Sequence: Synthetic oligonucleotide
  Sense strand starting at position 3241 of SEQ ID NO: 913435
uauugucuugaauguagaa

SEQ ID NO: 927121 - RNA, 19 nt, Artificial Sequence
  Description of Artificial Sequence: Synthetic oligonucleotide
  Antisense strand to SEQ ID NO: 927120
uucuacauucaagacaaua

SEQ ID NO: 927122 - RNA, 19 nt, Artificial Sequence
  Description of Artificial Sequence: Synthetic oligonucleotide
  Sense strand starting at position 258 of SEQ ID NO: 913435
cacaauuaugggugucaua

SEQ ID NO: 927123 - RNA, 19 nt, Artificial Sequence
  Description of Artificial Sequence: Synthetic oligonucleotide
  Antisense strand to SEQ ID NO: 927122
uaugacacccauaauugug

SEQ ID NO: 927124 - RNA, 19 nt, Artificial Sequence
  Description of Artificial Sequence: Synthetic oligonucleotide
  Sense strand starting at position 798 of SEQ ID NO: 913435
aaccuuuggcgucagauaa

SEQ ID NO: 927125 - RNA, 19 nt, Artificial Sequence
  Description of Artificial Sequence: Synthetic oligonucleotide
  Antisense strand to SEQ ID NO: 927124
uuaucugacgccaaagguu

SEQ ID NO: 927126 - RNA, 19 nt, Artificial Sequence
  Description of Artificial Sequence: Synthetic oligonucleotide
  Sense strand starting at position 243 of SEQ ID NO: 913435
cuugguuggcaucaucaca

SEQ ID NO: 927127 - RNA, 19 nt, Artificial Sequence
  Description of Artificial Sequence: Synthetic oligonucleotide
  Antisense strand to SEQ ID NO: 927126
ugugaugaugccaaccaag

SEQ ID NO: 927128 - RNA, 19 nt, Artificial Sequence
  Description of Artificial Sequence: Synthetic oligonucleotide
  Sense strand starting at position 1502 of SEQ ID NO: 913435
gcgggacacuuacuaggau

SEQ ID NO: 927129 - RNA, 19 nt, Artificial Sequence
  Description of Artificial Sequence: Synthetic oligonucleotide
  Antisense strand to SEQ ID NO: 927128
auccuaguaagugucccgc

SEQ ID NO: 927130 - RNA, 19 nt, Artificial Sequence
  Description of Artificial Sequence: Synthetic oligonucleotide
  Sense strand starting at position 3688 of SEQ ID NO: 913435
uggaauaucguguacccau

SEQ ID NO: 927131 - RNA, 19 nt, Artificial Sequence
  Description of Artificial Sequence: Synthetic oligonucleotide
  Antisense strand to SEQ ID NO: 927130
auggguacacgauauucca

SEQ ID NO: 927132 - RNA, 19 nt, Artificial Sequence
  Description of Artificial Sequence: Synthetic oligonucleotide
  Sense strand starting at position 2881 of SEQ ID NO: 913435
cuuuguuugaggugacaaa

SEQ ID NO: 927133 - RNA, 19 nt, Artificial Sequence
  Description of Artificial Sequence: Synthetic oligonucleotide
  Antisense strand to SEQ ID NO: 927132
uuugucaccucaaacaaag

SEQ ID NO: 927134 - RNA, 19 nt, Artificial Sequence
  Description of Artificial Sequence: Synthetic oligonucleotide
  Sense strand starting at position 1560 of SEQ ID NO: 913435
ugggucugaucuguagaau

SEQ ID NO: 927135 - RNA, 19 nt, Artificial Sequence
  Description of Artificial Sequence: Synthetic oligonucleotide
  Antisense strand to SEQ ID NO: 927134
auucuacagaucagaccca

SEQ ID NO: 927136 - RNA, 19 nt, Artificial Sequence
  Description of Artificial Sequence: Synthetic oligonucleotide
  Sense strand starting at position 1623 of SEQ ID NO: 913435
uggaaaggcucuuccuacu

SEQ ID NO: 927137 - RNA, 19 nt, Artificial Sequence
  Description of Artificial Sequence: Synthetic oligonucleotide
  Antisense strand to SEQ ID NO: 927136
aguaggaagagccuuucca

SEQ ID NO: 927138 - RNA, 19 nt, Artificial Sequence
  Description of Artificial Sequence: Synthetic oligonucleotide
  Sense strand starting at position 1473 of SEQ ID NO: 913436
acaagaggacauugcuuaa

SEQ ID NO: 927139 - RNA, 19 nt, Artificial Sequence
  Description of Artificial Sequence: Synthetic oligonucleotide
  Antisense strand to SEQ ID NO: 927138
uuaagcaauguccucuugu

SEQ ID NO: 927140 - RNA, 19 nt, Artificial Sequence
  Description of Artificial Sequence: Synthetic oligonucleotide
  Sense strand starting at position 1410 of SEQ ID NO: 913436
aagguuucuggagaggcau

SEQ ID NO: 927141 - RNA, 19 nt, Artificial Sequence
  Description of Artificial Sequence: Synthetic oligonucleotide
  Antisense strand to SEQ ID NO: 927140
augccucuccagaaaccuu

SEQ ID NO: 927142 - RNA, 19 nt, Artificial Sequence
  Description of Artificial Sequence: Synthetic oligonucleotide
  Sense strand starting at position 3824 of SEQ ID NO: 913436
uaguuaguugaugacaauu

SEQ ID NO: 927143 - RNA, 19 nt, Artificial Sequence
  Description of Artificial Sequence: Synthetic oligonucleotide
  Antisense strand to SEQ ID NO: 927142
aauugucaucaacuaacua

SEQ ID NO: 927144 - RNA, 19 nt, Artificial Sequence
  Description of Artificial Sequence: Synthetic oligonucleotide
  Sense strand starting at position 1485 of SEQ ID NO: 913436
ugcuuaaagaggugagaaa

SEQ ID NO: 927145 - RNA, 19 nt, Artificial Sequence
  Description of Artificial Sequence: Synthetic oligonucleotide
  Antisense strand to SEQ ID NO: 927144
uuucucaccucuuuaagca

SEQ ID NO: 927146 - RNA, 19 nt, Artificial Sequence
  Description of Artificial Sequence: Synthetic oligonucleotide
  Sense strand starting at position 2685 of SEQ ID NO: 913436
cugaaacugucccuagaaa

SEQ ID NO: 927147 - RNA, 19 nt, Artificial Sequence
  Description of Artificial Sequence: Synthetic oligonucleotide
  Antisense strand to SEQ ID NO: 927146
uuucuagggacaguuucag

SEQ ID NO: 927148 - RNA, 19 nt, Artificial Sequence
  Description of Artificial Sequence: Synthetic oligonucleotide
  Sense strand starting at position 2192 of SEQ ID NO: 913436
acugacucuucccugagga

SEQ ID NO: 927149 - RNA, 19 nt, Artificial Sequence
  Description of Artificial Sequence: Synthetic oligonucleotide
  Antisense strand to SEQ ID NO: 927148
uccucagggaagagucagu

SEQ ID NO: 927150 - RNA, 19 nt, Artificial Sequence
  Description of Artificial Sequence: Synthetic oligonucleotide
  Sense strand starting at position 3834 of SEQ ID NO: 913436
augacaauuucguccuugu

SEQ ID NO: 927151 - RNA, 19 nt, Artificial Sequence
  Description of Artificial Sequence: Synthetic oligonucleotide
  Antisense strand to SEQ ID NO: 927150
acaaggacgaaauugucau

SEQ ID NO: 927152 - RNA, 19 nt, Artificial Sequence
  Description of Artificial Sequence: Synthetic oligonucleotide
  Sense strand starting at position 911 of SEQ ID NO: 913436
auuggauguggaugugaga

SEQ ID NO: 927153 - RNA, 19 nt, Artificial Sequence
  Description of Artificial Sequence: Synthetic oligonucleotide
  Antisense strand to SEQ ID NO: 927152
ucucacauccacauccaau

SEQ ID NO: 927154 - RNA, 19 nt, Artificial Sequence
  Description of Artificial Sequence: Synthetic oligonucleotide
  Sense strand starting at position 1483 of SEQ ID NO: 913436
auugcuuaaagaggugaga

SEQ ID NO: 927155 - RNA, 19 nt, Artificial Sequence
  Description of Artificial Sequence: Synthetic oligonucleotide
  Antisense strand to SEQ ID NO: 927154
ucucaccucuuuaagcaau

SEQ ID NO: 927156 - RNA, 19 nt, Artificial Sequence
  Description of Artificial Sequence: Synthetic oligonucleotide
  Sense strand starting at position 1838 of SEQ ID NO: 913436
ggaaguuagaaguauugcu

SEQ ID NO: 927157 - RNA, 19 nt, Artificial Sequence
  Description of Artificial Sequence: Synthetic oligonucleotide
  Antisense strand to SEQ ID NO: 927156
agcaauacuucuaacuucc

SEQ ID NO: 927158 - RNA, 19 nt, Artificial Sequence
  Description of Artificial Sequence: Synthetic oligonucleotide
  Sense strand starting at position 1075 of SEQ ID NO: 913436
uuaugaaaguugucagaau

SEQ ID NO: 927159 - RNA, 19 nt, Artificial Sequence
  Description of Artificial Sequence: Synthetic oligonucleotide
  Antisense strand to SEQ ID NO: 927158
auucugacaacuuucauaa

SEQ ID NO: 927160 - RNA, 19 nt, Artificial Sequence
  Description of Artificial Sequence: Synthetic oligonucleotide
  Sense strand starting at position 2193 of SEQ ID NO: 913436
cugacucuucccugaggac

SEQ ID NO: 927161 - RNA, 19 nt, Artificial Sequence
  Description of Artificial Sequence: Synthetic oligonucleotide
  Antisense strand to SEQ ID NO: 927160
guccucagggaagagucag

SEQ ID NO: 927162 - RNA, 19 nt, Artificial Sequence
  Description of Artificial Sequence: Synthetic oligonucleotide
  Sense strand starting at position 3402 of SEQ ID NO: 913436
ccaccaucauaggucauua

SEQ ID NO: 927163 - RNA, 19 nt, Artificial Sequence
  Description of Artificial Sequence: Synthetic oligonucleotide
  Antisense strand to SEQ ID NO: 927162
uaaugaccuaugauggugg

SEQ ID NO: 927164 - RNA, 19 nt, Artificial Sequence
  Description of Artificial Sequence: Synthetic oligonucleotide
  Sense strand starting at position 303 of SEQ ID NO: 913436
ugauaaucaucuuugaagc

SEQ ID NO: 927165 - RNA, 19 nt, Artificial Sequence
  Description of Artificial Sequence: Synthetic oligonucleotide
  Antisense strand to SEQ ID NO: 927164
gcuucaaagaugauuauca

SEQ ID NO: 927166 - RNA, 19 nt, Artificial Sequence
  Description of Artificial Sequence: Synthetic oligonucleotide
  Sense strand starting at position 288 of SEQ ID NO: 913436
cugaucuuuguguaaugau

SEQ ID NO: 927167 - RNA, 19 nt, Artificial Sequence
  Description of Artificial Sequence: Synthetic oligonucleotide
  Antisense strand to SEQ ID NO: 927166
aucauuacacaaagaucag

SEQ ID NO: 927168 - RNA, 19 nt, Artificial Sequence
  Description of Artificial Sequence: Synthetic oligonucleotide
  Sense strand starting at position 2683 of SEQ ID NO: 913436
cccugaaacugucccuaga

SEQ ID NO: 927169 - RNA, 19 nt, Artificial Sequence
  Description of Artificial Sequence: Synthetic oligonucleotide
  Antisense strand to SEQ ID NO: 927168
ucuagggacaguuucaggg

SEQ ID NO: 927170 - RNA, 19 nt, Artificial Sequence
  Description of Artificial Sequence: Synthetic oligonucleotide
  Sense strand starting at position 1825 of SEQ ID NO: 913436
guaaguacagauuggaagu

SEQ ID NO: 927171 - RNA, 19 nt, Artificial Sequence
  Description of Artificial Sequence: Synthetic oligonucleotide
  Antisense strand to SEQ ID NO: 927170
acuuccaaucuguacuuac

SEQ ID NO: 927172 - RNA, 19 nt, Artificial Sequence
  Description of Artificial Sequence: Synthetic oligonucleotide
  Sense strand starting at position 3472 of SEQ ID NO: 913436
acucacuuugauggcaaua

SEQ ID NO: 927173 - RNA, 19 nt, Artificial Sequence
  Description of Artificial Sequence: Synthetic oligonucleotide
  Antisense strand to SEQ ID NO: 927172
uauugccaucaaagugagu

SEQ ID NO: 927174 - RNA, 19 nt, Artificial Sequence
  Description of Artificial Sequence: Synthetic oligonucleotide
  Sense strand starting at position 1012 of SEQ ID NO: 913436
ugcccaugggcuuauaaau

SEQ ID NO: 927175 - RNA, 19 nt, Artificial Sequence
  Description of Artificial Sequence: Synthetic oligonucleotide
  Antisense strand to SEQ ID NO: 927174
auuuauaagcccaugggca

SEQ ID NO: 927176 - RNA, 19 nt, Artificial Sequence
  Description of Artificial Sequence: Synthetic oligonucleotide
  Sense strand starting at position 2937 of SEQ ID NO: 913436
guaggucaugcauacugau

SEQ ID NO: 927177 - RNA, 19 nt, Artificial Sequence
  Description of Artificial Sequence: Synthetic oligonucleotide
  Antisense strand to SEQ ID NO: 927176
aucaguaugcaugaccuac

SEQ ID NO: 927178 - RNA, 19 nt, Artificial Sequence
  Description of Artificial Sequence: Synthetic oligonucleotide
  Sense strand starting at position 297 of SEQ ID NO: 913436
guguaaugauaaucaucuu

SEQ ID NO: 927179 - RNA, 19 nt, Artificial Sequence
  Description of Artificial Sequence: Synthetic oligonucleotide
  Antisense strand to SEQ ID NO: 927178
aagaugauuaucauuacac

SEQ ID NO: 927180 - RNA, 19 nt, Artificial Sequence
  Description of Artificial Sequence: Synthetic oligonucleotide
  Sense strand starting at position 1843 of SEQ ID NO: 913436
uuagaaguauugcuauuga

SEQ ID NO: 927181 - RNA, 19 nt, Artificial Sequence
  Description of Artificial Sequence: Synthetic oligonucleotide
  Antisense strand to SEQ ID NO: 927180
ucaauagcaauacuucuaa

SEQ ID NO: 927182 - RNA, 19 nt, Artificial Sequence
  Description of Artificial Sequence: Synthetic oligonucleotide
  Sense strand starting at position 1328 of SEQ ID NO: 913436
ucuugagauuaaggauuua

SEQ ID NO: 927183 - RNA, 19 nt, Artificial Sequence
  Description of Artificial Sequence: Synthetic oligonucleotide
  Antisense strand to SEQ ID NO: 927182
uaaauccuuaaucucaaga

SEQ ID NO: 927184 - RNA, 19 nt, Artificial Sequence
  Description of Artificial Sequence: Synthetic oligonucleotide
  Sense strand starting at position 1630 of SEQ ID NO: 913436
aggagauaaugugugcauu

SEQ ID NO: 927185 - RNA, 19 nt, Artificial Sequence
  Description of Artificial Sequence: Synthetic oligonucleotide
  Antisense strand to SEQ ID NO: 927184
aaugcacacauuaucuccu

SEQ ID NO: 927186 - RNA, 19 nt, Artificial Sequence
  Description of Artificial Sequence: Synthetic oligonucleotide
  Sense strand starting at position 287 of SEQ ID NO: 913436
ucugaucuuuguguaauga

SEQ ID NO: 927187 - RNA, 19 nt, Artificial Sequence
  Description of Artificial Sequence: Synthetic oligonucleotide
  Antisense strand to SEQ ID NO: 927186
ucauuacacaaagaucaga

SEQ ID NO: 927188 - RNA, 19 nt, Artificial Sequence
  Description of Artificial Sequence: Synthetic oligonucleotide
  Sense strand starting at position 255 of SEQ ID NO: 913436
gcacaagagcuccauguuu

SEQ ID NO: 927189 - RNA, 19 nt, Artificial Sequence
  Description of Artificial Sequence: Synthetic oligonucleotide
  Antisense strand to SEQ ID NO: 927188
aaacauggagcucuugugc

SEQ ID NO: 927190 - RNA, 19 nt, Artificial Sequence
  Description of Artificial Sequence: Synthetic oligonucleotide
  Sense strand starting at position 3819 of SEQ ID NO: 913436
cauguuaguuaguugauga

SEQ ID NO: 927191 - RNA, 19 nt, Artificial Sequence
  Description of Artificial Sequence: Synthetic oligonucleotide
  Antisense strand to SEQ ID NO: 927190
ucaucaacuaacuaacaug

SEQ ID NO: 927192 - RNA, 19 nt, Artificial Sequence
  Description of Artificial Sequence: Synthetic oligonucleotide
  Sense strand starting at position 34 of SEQ ID NO: 913436
gcgacuuaccucuagugau

SEQ ID NO: 927193 - RNA, 19 nt, Artificial Sequence
  Description of Artificial Sequence: Synthetic oligonucleotide
  Antisense strand to SEQ ID NO: 927192
aucacuagagguaagucgc

SEQ ID NO: 927194 - RNA, 19 nt, Artificial Sequence
  Description of Artificial Sequence: Synthetic oligonucleotide
  Sense strand starting at position 2797 of SEQ ID NO: 913436
ucugauccuuccucauagu

SEQ ID NO: 927195 - RNA, 19 nt, Artificial Sequence
  Description of Artificial Sequence: Synthetic oligonucleotide
  Antisense strand to SEQ ID NO: 927194
acuaugaggaaggaucaga

SEQ ID NO: 927196 - RNA, 19 nt, Artificial Sequence
  Description of Artificial Sequence: Synthetic oligonucleotide
  Sense strand starting at position 1660 of SEQ ID NO: 913436
cuaauauuguuucugcaag

SEQ ID NO: 927197 - RNA, 19 nt, Artificial Sequence
  Description of Artificial Sequence: Synthetic oligonucleotide
  Antisense strand to SEQ ID NO: 927196
cuugcagaaacaauauuag

SEQ ID NO: 927198 - RNA, 19 nt, Artificial Sequence
  Description of Artificial Sequence: Synthetic oligonucleotide
  Sense strand starting at position 9 of SEQ ID NO: 913436
auaauauucuuggcuuggu

SEQ ID NO: 927199 - RNA, 19 nt, Artificial Sequence
  Description of Artificial Sequence: Synthetic oligonucleotide
  Antisense strand to SEQ ID NO: 927198
accaagccaagaauauuau

SEQ ID NO: 927200 - RNA, 19 nt, Artificial Sequence
  Description of Artificial Sequence: Synthetic oligonucleotide
  Sense strand starting at position 3253 of SEQ ID NO: 913436
caaacauguugguccugua

SEQ ID NO: 927201 - RNA, 19 nt, Artificial Sequence
  Description of Artificial Sequence: Synthetic oligonucleotide
  Antisense strand to SEQ ID NO: 927200
uacaggaccaacauguuug

SEQ ID NO: 927202 - RNA, 19 nt, Artificial Sequence
  Description of Artificial Sequence: Synthetic oligonucleotide
  Sense strand starting at position 2821 of SEQ ID NO: 913436
gcuaccuauugcuccagaa

SEQ ID NO: 927203 - RNA, 19 nt, Artificial Sequence
  Description of Artificial Sequence: Synthetic oligonucleotide
  Antisense strand to SEQ ID NO: 927202
uucuggagcaauagguagc

SEQ ID NO: 927204 - RNA, 19 nt, Artificial Sequence
  Description of Artificial Sequence: Synthetic oligonucleotide
  Sense strand starting at position 12 of SEQ ID NO: 913436
auauucuuggcuuggugau

SEQ ID NO: 927205 - RNA, 19 nt, Artificial Sequence
  Description of Artificial Sequence: Synthetic oligonucleotide
  Antisense strand to SEQ ID NO: 927204
aucaccaagccaagaauau

SEQ ID NO: 927206 - RNA, 19 nt, Artificial Sequence
  Description of Artificial Sequence: Synthetic oligonucleotide
  Sense strand starting at position 3700 of SEQ ID NO: 913436
cugcauauccaauagcgua

SEQ ID NO: 927207 - RNA, 19 nt, Artificial Sequence
  Description of Artificial Sequence: Synthetic oligonucleotide
  Antisense strand to SEQ ID NO: 927206
uacgcuauuggauaugcag

SEQ ID NO: 927208 - RNA, 19 nt, Artificial Sequence
  Description of Artificial Sequence: Synthetic oligonucleotide
  Sense strand starting at position 1422 of SEQ ID NO: 913436
gaggcauucuguuucucau

SEQ ID NO: 927209 - RNA, 19 nt, Artificial Sequence
  Description of Artificial Sequence: Synthetic oligonucleotide
  Antisense strand to SEQ ID NO: 927208
augagaaacagaaugccuc

SEQ ID NO: 927210 - RNA, 19 nt, Artificial Sequence
  Description of Artificial Sequence: Synthetic oligonucleotide
  Sense strand starting at position 2914 of SEQ ID NO: 913436
ugcuuuccauuugagauau

SEQ ID NO: 927211 - RNA, 19 nt, Artificial Sequence
  Description of Artificial Sequence: Synthetic oligonucleotide
  Antisense strand to SEQ ID NO: 927210
auaucucaaauggaaagca

SEQ ID NO: 927212 - RNA, 19 nt, Artificial Sequence
  Description of Artificial Sequence: Synthetic oligonucleotide
  Sense strand starting at position 3613 of SEQ ID NO: 913436
gugguuccauggcuuuaaa

SEQ ID NO: 927213 - RNA, 19 nt, Artificial Sequence
  Description of Artificial Sequence: Synthetic oligonucleotide
  Antisense strand to SEQ ID NO: 927212
uuuaaagccauggaaccac

SEQ ID NO: 927214 - RNA, 19 nt, Artificial Sequence
  Description of Artificial Sequence: Synthetic oligonucleotide
  Sense strand starting at position 3708 of SEQ ID NO: 913436
ccaauagcguacucaucau

SEQ ID NO: 927215 - RNA, 19 nt, Artificial Sequence
  Description of Artificial Sequence: Synthetic oligonucleotide
  Antisense strand to SEQ ID NO: 927214
augaugaguacgcuauugg

SEQ ID NO: 927216 - RNA, 19 nt, Artificial Sequence
  Description of Artificial Sequence: Synthetic oligonucleotide
  Sense strand starting at position 6 of SEQ ID NO: 913436
gccauaauauucuuggcuu

SEQ ID NO: 927217 - RNA, 19 nt, Artificial Sequence
  Description of Artificial Sequence: Synthetic oligonucleotide
  Antisense strand to SEQ ID NO: 927216
aagccaagaauauuauggc

SEQ ID NO: 927218 - RNA, 19 nt, Artificial Sequence
  Description of Artificial Sequence: Synthetic oligonucleotide
  Sense strand starting at position 472 of SEQ ID NO: 913437
accaaaugagcucauguaa

SEQ ID NO: 927219 - RNA, 19 nt, Artificial Sequence
  Description of Artificial Sequence: Synthetic oligonucleotide
  Antisense strand to SEQ ID NO: 927218
uuacaugagcucauuuggu

SEQ ID NO: 927220 - RNA, 19 nt, Artificial Sequence
  Description of Artificial Sequence: Synthetic oligonucleotide
  Sense strand starting at position 844 of SEQ ID NO: 913437
gcccguuuccauguguaaa

SEQ ID NO: 927221 - RNA, 19 nt, Artificial Sequence
  Description of Artificial Sequence: Synthetic oligonucleotide
  Antisense strand to SEQ ID NO: 927220
uuuacacauggaaacgggc

SEQ ID NO: 927222 - RNA, 19 nt, Artificial Sequence
  Description of Artificial Sequence: Synthetic oligonucleotide
  Sense strand starting at position 1377 of SEQ ID NO: 913437
caaagauaccucugaguag

SEQ ID NO: 927223 - RNA, 19 nt, Artificial Sequence
  Description of Artificial Sequence: Synthetic oligonucleotide
  Antisense strand to SEQ ID NO: 927222
cuacucagagguaucuuug

SEQ ID NO: 927224 - RNA, 19 nt, Artificial Sequence
  Description of Artificial Sequence: Synthetic oligonucleotide
  Sense strand starting at position 1381 of SEQ ID NO: 913437
gauaccucugaguagcaaa

SEQ ID NO: 927225 - RNA, 19 nt, Artificial Sequence
  Description of Artificial Sequence: Synthetic oligonucleotide
  Antisense strand to SEQ ID NO: 927224
uuugcuacucagagguauc

SEQ ID NO: 927226 - RNA, 19 nt, Artificial Sequence
  Description of Artificial Sequence: Synthetic oligonucleotide
  Sense strand starting at position 712 of SEQ ID NO: 913437
agcagaaauaaggguuaca

SEQ ID NO: 927227 - RNA, 19 nt, Artificial Sequence
  Description of Artificial Sequence: Synthetic oligonucleotide
  Antisense strand to SEQ ID NO: 927226
uguaacccuuauuucugcu

SEQ ID NO: 927228 - RNA, 19 nt, Artificial Sequence
  Description of Artificial Sequence: Synthetic oligonucleotide
  Sense strand starting at position 940 of SEQ ID NO: 913437
gcagacuuuagauggaaac

SEQ ID NO: 927229 - RNA, 19 nt, Artificial Sequence
  Description of Artificial Sequence: Synthetic oligonucleotide
  Antisense strand to SEQ ID NO: 927228
guuuccaucuaaagucugc

SEQ ID NO: 927230 - RNA, 19 nt, Artificial Sequence
  Description of Artificial Sequence: Synthetic oligonucleotide
  Sense strand starting at position 2494 of SEQ ID NO: 913437
aguagaaaucaguaguauu

SEQ ID NO: 927231 - RNA, 19 nt, Artificial Sequence
  Description of Artificial Sequence: Synthetic oligonucleotide
  Antisense strand to SEQ ID NO: 927230
aauacuacugauuucuacu

SEQ ID NO: 927232 - RNA, 19 nt, Artificial Sequence
  Description of Artificial Sequence: Synthetic oligonucleotide
  Sense strand starting at position 1900 of SEQ ID NO: 913437
ggaagaggauccucagcau

SEQ ID NO: 927233 - RNA, 19 nt, Artificial Sequence
  Description of Artificial Sequence: Synthetic oligonucleotide
  Antisense strand to SEQ ID NO: 927232
augcugaggauccucuucc

SEQ ID NO: 927234 - RNA, 19 nt, Artificial Sequence
  Description of Artificial Sequence: Synthetic oligonucleotide
  Sense strand starting at position 2624 of SEQ ID NO: 913437
ucucgacauggugauaaau

SEQ ID NO: 927235 - RNA, 19 nt, Artificial Sequence
  Description of Artificial Sequence: Synthetic oligonucleotide
  Antisense strand to SEQ ID NO: 927234
auuuaucaccaugucgaga

SEQ ID NO: 927236 - RNA, 19 nt, Artificial Sequence
  Description of Artificial Sequence: Synthetic oligonucleotide
  Sense strand starting at position 3628 of SEQ ID NO: 913437
accugacaaucuguagaca

SEQ ID NO: 927237 - RNA, 19 nt, Artificial Sequence
  Description of Artificial Sequence: Synthetic oligonucleotide
  Antisense strand to SEQ ID NO: 927236
ugucuacagauugucaggu

SEQ ID NO: 927238 - RNA, 19 nt, Artificial Sequence
  Description of Artificial Sequence: Synthetic oligonucleotide
  Sense strand starting at position 1090 of SEQ ID NO: 913437
guauauaugagggacguau

SEQ ID NO: 927239 - RNA, 19 nt, Artificial Sequence
  Description of Artificial Sequence: Synthetic oligonucleotide
  Antisense strand to SEQ ID NO: 927238
auacgucccucauauauac

SEQ ID NO: 927240 - RNA, 19 nt, Artificial Sequence
  Description of Artificial Sequence: Synthetic oligonucleotide
  Sense strand starting at position 1600 of SEQ ID NO: 913437
cuaguuuaucagcaaugga

SEQ ID NO: 927241 - RNA, 19 nt, Artificial Sequence
  Description of Artificial Sequence: Synthetic oligonucleotide
  Antisense strand to SEQ ID NO: 927240
uccauugcugauaaacuag

SEQ ID NO: 927242 - RNA, 19 nt, Artificial Sequence
  Description of Artificial Sequence: Synthetic oligonucleotide
  Sense strand starting at position 3389 of SEQ ID NO: 913437
ggagaaggcuggucaugag

SEQ ID NO: 927243 - RNA, 19 nt, Artificial Sequence
  Description of Artificial Sequence: Synthetic oligonucleotide
  Antisense strand to SEQ ID NO: 927242
cucaugaccagccuucucc

SEQ ID NO: 927244 - RNA, 19 nt, Artificial Sequence
  Description of Artificial Sequence: Synthetic oligonucleotide
  Sense strand starting at position 2970 of SEQ ID NO: 913437
ccaaaugugcaggaaaugu

SEQ ID NO: 927245 - RNA, 19 nt, Artificial Sequence
  Description of Artificial Sequence: Synthetic oligonucleotide
  Antisense strand to SEQ ID NO: 927244
acauuuccugcacauuugg

SEQ ID NO: 927246 - RNA, 19 nt, Artificial Sequence
  Description of Artificial Sequence: Synthetic oligonucleotide
  Sense strand starting at position 996 of SEQ ID NO: 913437
aaccuauuggucuggagac

SEQ ID NO: 927247 - RNA, 19 nt, Artificial Sequence
  Description of Artificial Sequence: Synthetic oligonucleotide
  Antisense strand to SEQ ID NO: 927246
gucuccagaccaauagguu

SEQ ID NO: 927248 - RNA, 19 nt, Artificial Sequence
  Description of Artificial Sequence: Synthetic oligonucleotide
  Sense strand starting at position 2412 of SEQ ID NO: 913437
agccucugagucuaggaau

SEQ ID NO: 927249 - RNA, 19 nt, Artificial Sequence
  Description of Artificial Sequence: Synthetic oligonucleotide
  Antisense strand to SEQ ID NO: 927248
auuccuagacucagaggcu

SEQ ID NO: 927250 - RNA, 19 nt, Artificial Sequence
  Description of Artificial Sequence: Synthetic oligonucleotide
  Sense strand starting at position 856 of SEQ ID NO: 913437
guguaaacugauggaugau

SEQ ID NO: 927251 - RNA, 19 nt, Artificial Sequence
  Description of Artificial Sequence: Synthetic oligonucleotide
  Antisense strand to SEQ ID NO: 927250
aucauccaucaguuuacac

SEQ ID NO: 927252 - RNA, 19 nt, Artificial Sequence
  Description of Artificial Sequence: Synthetic oligonucleotide
  Sense strand starting at position 2860 of SEQ ID NO: 913437
ggaggaacuuugguaguca

SEQ ID NO: 927253 - RNA, 19 nt, Artificial Sequence
  Description of Artificial Sequence: Synthetic oligonucleotide
  Antisense strand to SEQ ID NO: 927252
ugacuaccaaaguuccucc

SEQ ID NO: 927254 - RNA, 19 nt, Artificial Sequence
  Description of Artificial Sequence: Synthetic oligonucleotide
  Sense strand starting at position 1624 of SEQ ID NO: 913437
aguuuacacccagauguuu

SEQ ID NO: 927255 - RNA, 19 nt, Artificial Sequence
  Description of Artificial Sequence: Synthetic oligonucleotide
  Antisense strand to SEQ ID NO: 927254
aaacaucuggguguaaacu

SEQ ID NO: 927256 - RNA, 19 nt, Artificial Sequence
  Description of Artificial Sequence: Synthetic oligonucleotide
  Sense strand starting at position 3592 of SEQ ID NO: 913437
uuccucuaaguguauugaa

SEQ ID NO: 927257 - RNA, 19 nt, Artificial Sequence
  Description of Artificial Sequence: Synthetic oligonucleotide
  Antisense strand to SEQ ID NO: 927256
uucaauacacuuagaggaa

SEQ ID NO: 927258 - RNA, 19 nt, Artificial Sequence
  Description of Artificial Sequence: Synthetic oligonucleotide
  Sense strand starting at position 2969 of SEQ ID NO: 913437
cccaaaugugcaggaaaug

SEQ ID NO: 927259 - RNA, 19 nt, Artificial Sequence
  Description of Artificial Sequence: Synthetic oligonucleotide
  Antisense strand to SEQ ID NO: 927258
cauuuccugcacauuuggg

SEQ ID NO: 927260 - RNA, 19 nt, Artificial Sequence
  Description of Artificial Sequence: Synthetic oligonucleotide
  Sense strand starting at position 2338 of SEQ ID NO: 913437
ucugccuuggagcagaaau

SEQ ID NO: 927261 - RNA, 19 nt, Artificial Sequence
  Description of Artificial Sequence: Synthetic oligonucleotide
  Antisense strand to SEQ ID NO: 927260
auuucugcuccaaggcaga

SEQ ID NO: 927262 - RNA, 19 nt, Artificial Sequence
  Description of Artificial Sequence: Synthetic oligonucleotide
  Sense strand starting at position 852 of SEQ ID NO: 913437
ccauguguaaacugaugga

SEQ ID NO: 927263 - RNA, 19 nt, Artificial Sequence
  Description of Artificial Sequence: Synthetic oligonucleotide
  Antisense strand to SEQ ID NO: 927262
uccaucaguuuacacaugg

SEQ ID NO: 927264 - RNA, 19 nt, Artificial Sequence
  Description of Artificial Sequence: Synthetic oligonucleotide
  Sense strand starting at position 1984 of SEQ ID NO: 913437
ggcacaaugagccauguga

SEQ ID NO: 927265 - RNA, 19 nt, Artificial Sequence
  Description of Artificial Sequence: Synthetic oligonucleotide
  Antisense strand to SEQ ID NO: 927264
ucacauggcucauugugcc

SEQ ID NO: 927266 - RNA, 19 nt, Artificial Sequence
  Description of Artificial Sequence: Synthetic oligonucleotide
  Sense strand starting at position 253 of SEQ ID NO: 913437
aggauuaauucuuugucca

SEQ ID NO: 927267 - RNA, 19 nt, Artificial Sequence
  Description of Artificial Sequence: Synthetic oligonucleotide
  Antisense strand to SEQ ID NO: 927266
uggacaaagaauuaauccu

SEQ ID NO: 927268 - RNA, 19 nt, Artificial Sequence
  Description of Artificial Sequence: Synthetic oligonucleotide
  Sense strand starting at position 1380 of SEQ ID NO: 913437
agauaccucugaguagcaa

SEQ ID NO: 927269 - RNA, 19 nt, Artificial Sequence
  Description of Artificial Sequence: Synthetic oligonucleotide
  Antisense strand to SEQ ID NO: 927268
uugcuacucagagguaucu

SEQ ID NO: 927270 - RNA, 19 nt, Artificial Sequence
  Description of Artificial Sequence: Synthetic oligonucleotide
  Sense strand starting at position 1030 of SEQ ID NO: 913437
gagacagacugcuucccau

SEQ ID NO: 927271 - RNA, 19 nt, Artificial Sequence
  Description of Artificial Sequence: Synthetic oligonucleotide
  Antisense strand to SEQ ID NO: 927270
augggaagcagucugucuc

SEQ ID NO: 927272 - RNA, 19 nt, Artificial Sequence
  Description of Artificial Sequence: Synthetic oligonucleotide
  Sense strand starting at position 2864 of SEQ ID NO: 913437
gaacuuugguagucacaca

SEQ ID NO: 927273 - RNA, 19 nt, Artificial Sequence
  Description of Artificial Sequence: Synthetic oligonucleotide
  Antisense strand to SEQ ID NO: 927272
ugugugacuaccaaaguuc

SEQ ID NO: 927274 - RNA, 19 nt, Artificial Sequence
  Description of Artificial Sequence: Synthetic oligonucleotide
  Sense strand starting at position 1765 of SEQ ID NO: 913437
ugagaaacaucaucugugu

SEQ ID NO: 927275 - RNA, 19 nt, Artificial Sequence
  Description of Artificial Sequence: Synthetic oligonucleotide
  Antisense strand to SEQ ID NO: 927274
acacagaugauguuucuca

SEQ ID NO: 927276 - RNA, 19 nt, Artificial Sequence
  Description of Artificial Sequence: Synthetic oligonucleotide
  Sense strand starting at position 254 of SEQ ID NO: 913437
ggauuaauucuuuguccaa

SEQ ID NO: 927277 - RNA, 19 nt, Artificial Sequence
  Description of Artificial Sequence: Synthetic oligonucleotide
  Antisense strand to SEQ ID NO: 927276
uuggacaaagaauuaaucc

SEQ ID NO: 927278 - RNA, 19 nt, Artificial Sequence
  Description of Artificial Sequence: Synthetic oligonucleotide
  Sense strand starting at position 3085 of SEQ ID NO: 913437
cagucaaaucccuaacggu

SEQ ID NO: 927279 - RNA, 19 nt, Artificial Sequence
  Description of Artificial Sequence: Synthetic oligonucleotide
  Antisense strand to SEQ ID NO: 927278
accguuagggauuugacug

SEQ ID NO: 927280 - RNA, 19 nt, Artificial Sequence
  Description of Artificial Sequence: Synthetic oligonucleotide
  Sense strand starting at position 1081 of SEQ ID NO: 913437
aacgucuuuguauauauga

SEQ ID NO: 927281 - RNA, 19 nt, Artificial Sequence
  Description of Artificial Sequence: Synthetic oligonucleotide
  Antisense strand to SEQ ID NO: 927280
ucauauauacaaagacguu

SEQ ID NO: 927282 - RNA, 19 nt, Artificial Sequence
  Description of Artificial Sequence: Synthetic oligonucleotide
  Sense strand starting at position 677 of SEQ ID NO: 913437
aggacagacuaguuuguuu

SEQ ID NO: 927283 - RNA, 19 nt, Artificial Sequence
  Description of Artificial Sequence: Synthetic oligonucleotide
  Antisense strand to SEQ ID NO: 927282
aaacaaacuagucuguccu

SEQ ID NO: 927284 - RNA, 19 nt, Artificial Sequence
  Description of Artificial Sequence: Synthetic oligonucleotide
  Sense strand starting at position 691 of SEQ ID NO: 913437
uguuuaucuagguaaguca

SEQ ID NO: 927285 - RNA, 19 nt, Artificial Sequence
  Description of Artificial Sequence: Synthetic oligonucleotide
  Antisense strand to SEQ ID NO: 927284
ugacuuaccuagauaaaca

SEQ ID NO: 927286 - RNA, 19 nt, Artificial Sequence
  Description of Artificial Sequence: Synthetic oligonucleotide
  Sense strand starting at position 2713 of SEQ ID NO: 913437
uaaaguuacugggugguaa

SEQ ID NO: 927287 - RNA, 19 nt, Artificial Sequence
  Description of Artificial Sequence: Synthetic oligonucleotide
  Antisense strand to SEQ ID NO: 927286
uuaccacccaguaacuuua

SEQ ID NO: 927288 - RNA, 19 nt, Artificial Sequence
  Description of Artificial Sequence: Synthetic oligonucleotide
  Sense strand starting at position 1033 of SEQ ID NO: 913437
acagacugcuucccauuga

SEQ ID NO: 927289 - RNA, 19 nt, Artificial Sequence
  Description of Artificial Sequence: Synthetic oligonucleotide
  Antisense strand to SEQ ID NO: 927288
ucaaugggaagcagucugu

SEQ ID NO: 927290 - RNA, 19 nt, Artificial Sequence
  Description of Artificial Sequence: Synthetic oligonucleotide
  Sense strand starting at position 422 of SEQ ID NO: 913437
cuauaacaugcagguaauu

SEQ ID NO: 927291 - RNA, 19 nt, Artificial Sequence
  Description of Artificial Sequence: Synthetic oligonucleotide
  Antisense strand to SEQ ID NO: 927290
aauuaccugcauguuauag

SEQ ID NO: 927292 - RNA, 19 nt, Artificial Sequence
  Description of Artificial Sequence: Synthetic oligonucleotide
  Sense strand starting at position 2178 of SEQ ID NO: 913437
ggguauuauacccaguguu

SEQ ID NO: 927293 - RNA, 19 nt, Artificial Sequence
  Description of Artificial Sequence: Synthetic oligonucleotide
  Antisense strand to SEQ ID NO: 927292
aacacuggguauaauaccc

SEQ ID NO: 927294 - RNA, 19 nt, Artificial Sequence
  Description of Artificial Sequence: Synthetic oligonucleotide
  Sense strand starting at position 2775 of SEQ ID NO: 913437
cuaaguguuccuuagaggu

SEQ ID NO: 927295 - RNA, 19 nt, Artificial Sequence
  Description of Artificial Sequence: Synthetic oligonucleotide
  Antisense strand to SEQ ID NO: 927294
accucuaaggaacacuuag

SEQ ID NO: 927296 - RNA, 19 nt, Artificial Sequence
  Description of Artificial Sequence: Synthetic oligonucleotide
  Sense strand starting at position 2714 of SEQ ID NO: 913437
aaaguuacugggugguaau

SEQ ID NO: 927297 - RNA, 19 nt, Artificial Sequence
  Description of Artificial Sequence: Synthetic oligonucleotide
  Antisense strand to SEQ ID NO: 927296
auuaccacccaguaacuuu

SEQ ID NO: 927298 - RNA, 19 nt, Artificial Sequence
  Description of Artificial Sequence: Synthetic oligonucleotide
  Sense strand starting at position 149 of SEQ ID NO: 913438
ccugaaucagcacagacuu

SEQ ID NO: 927299 - RNA, 19 nt, Artificial Sequence
  Description of Artificial Sequence: Synthetic oligonucleotide
  Antisense strand to SEQ ID NO: 927298
aagucugugcugauucagg

SEQ ID NO: 927300 - RNA, 19 nt, Artificial Sequence
  Description of Artificial Sequence: Synthetic oligonucleotide
  Sense strand starting at position 950 of SEQ ID NO: 913438
gcuccuguagaucaagaaa

SEQ ID NO: 927301 - RNA, 19 nt, Artificial Sequence
  Description of Artificial Sequence: Synthetic oligonucleotide
  Antisense strand to SEQ ID NO: 927300
uuucuugaucuacaggagc

SEQ ID NO: 927302 - RNA, 19 nt, Artificial Sequence
  Description of Artificial Sequence: Synthetic oligonucleotide
  Sense strand starting at position 3886 of SEQ ID NO: 913438
gugguaucuguauucgcca

SEQ ID NO: 927303 - RNA, 19 nt, Artificial Sequence
  Description of Artificial Sequence: Synthetic oligonucleotide
  Antisense strand to SEQ ID NO: 927302
uggcgaauacagauaccac

SEQ ID NO: 927304 - RNA, 19 nt, Artificial Sequence
  Description of Artificial Sequence: Synthetic oligonucleotide
  Sense strand starting at position 2762 of SEQ ID NO: 913438
uugggaacuuguucaggga

SEQ ID NO: 927305 - RNA, 19 nt, Artificial Sequence
  Description of Artificial Sequence: Synthetic oligonucleotide
  Antisense strand to SEQ ID NO: 927304
ucccugaacaaguucccaa

SEQ ID NO: 927306 - RNA, 19 nt, Artificial Sequence
  Description of Artificial Sequence: Synthetic oligonucleotide
  Sense strand starting at position 549 of SEQ ID NO: 913438
augcuauguccagaauuaa

SEQ ID NO: 927307 - RNA, 19 nt, Artificial Sequence
  Description of Artificial Sequence: Synthetic oligonucleotide
  Antisense strand to SEQ ID NO: 927306
uuaauucuggacauagcau

SEQ ID NO: 927308 - RNA, 19 nt, Artificial Sequence
  Description of Artificial Sequence: Synthetic oligonucleotide
  Sense strand starting at position 2586 of SEQ ID NO: 913438
cuugcuguuagcguacuaa

SEQ ID NO: 927309 - RNA, 19 nt, Artificial Sequence
  Description of Artificial Sequence: Synthetic oligonucleotide
  Antisense strand to SEQ ID NO: 927308
uuaguacgcuaacagcaag

SEQ ID NO: 927310 - RNA, 19 nt, Artificial Sequence
  Description of Artificial Sequence: Synthetic oligonucleotide
  Sense strand starting at position 519 of SEQ ID NO: 913438
ugaugccuuccagacuuaa

SEQ ID NO: 927311 - RNA, 19 nt, Artificial Sequence
  Description of Artificial Sequence: Synthetic oligonucleotide
  Antisense strand to SEQ ID NO: 927310
uuaagucuggaaggcauca

SEQ ID NO: 927312 - RNA, 19 nt, Artificial Sequence
  Description of Artificial Sequence: Synthetic oligonucleotide
  Sense strand starting at position 547 of SEQ ID NO: 913438
ggaugcuauguccagaauu

SEQ ID NO: 927313 - RNA, 19 nt, Artificial Sequence
  Description of Artificial Sequence: Synthetic oligonucleotide
  Antisense strand to SEQ ID NO: 927312
aauucuggacauagcaucc

SEQ ID NO: 927314 - RNA, 19 nt, Artificial Sequence
  Description of Artificial Sequence: Synthetic oligonucleotide
  Sense strand starting at position 2589 of SEQ ID NO: 913438
gcuguuagcguacuaaugu

SEQ ID NO: 927315 - RNA, 19 nt, Artificial Sequence
  Description of Artificial Sequence: Synthetic oligonucleotide
  Antisense strand to SEQ ID NO: 927314
acauuaguacgcuaacagc

SEQ ID NO: 927316 - RNA, 19 nt, Artificial Sequence
  Description of Artificial Sequence: Synthetic oligonucleotide
  Sense strand starting at position 3077 of SEQ ID NO: 913438
aguguuuaaccuuaguaag

SEQ ID NO: 927317 - RNA, 19 nt, Artificial Sequence
  Description of Artificial Sequence: Synthetic oligonucleotide
  Antisense strand to SEQ ID NO: 927316
cuuacuaagguuaaacacu

SEQ ID NO: 927318 - RNA, 19 nt, Artificial Sequence
  Description of Artificial Sequence: Synthetic oligonucleotide
  Sense strand starting at position 129 of SEQ ID NO: 913438
ggcacaagacuauguggau

SEQ ID NO: 927319 - RNA, 19 nt, Artificial Sequence
  Description of Artificial Sequence: Synthetic oligonucleotide
  Antisense strand to SEQ ID NO: 927318
auccacauagucuugugcc

SEQ ID NO: 927320 - RNA, 19 nt, Artificial Sequence
  Description of Artificial Sequence: Synthetic oligonucleotide
  Sense strand starting at position 697 of SEQ ID NO: 913438
uucuuuacuuaguuaagag

SEQ ID NO: 927321 - RNA, 19 nt, Artificial Sequence
  Description of Artificial Sequence: Synthetic oligonucleotide
  Antisense strand to SEQ ID NO: 927320
cucuuaacuaaguaaagaa

SEQ ID NO: 927322 - RNA, 19 nt, Artificial Sequence
  Description of Artificial Sequence: Synthetic oligonucleotide
  Sense strand starting at position 57 of SEQ ID NO: 913438
cucucaaagcauuggaauu

SEQ ID NO: 927323 - RNA, 19 nt, Artificial Sequence
  Description of Artificial Sequence: Synthetic oligonucleotide
  Antisense strand to SEQ ID NO: 927322
aauuccaaugcuuugagag

SEQ ID NO: 927324 - RNA, 19 nt, Artificial Sequence
  Description of Artificial Sequence: Synthetic oligonucleotide
  Sense strand starting at position 1639 of SEQ ID NO: 913438
cacaguaggcacugaauua

SEQ ID NO: 927325 - RNA, 19 nt, Artificial Sequence
  Description of Artificial Sequence: Synthetic oligonucleotide
  Antisense strand to SEQ ID NO: 927324
uaauucagugccuacugug

SEQ ID NO: 927326 - RNA, 19 nt, Artificial Sequence
  Description of Artificial Sequence: Synthetic oligonucleotide
  Sense strand starting at position 254 of SEQ ID NO: 913438
aaaccucuagcauguggaa

SEQ ID NO: 927327 - RNA, 19 nt, Artificial Sequence
  Description of Artificial Sequence: Synthetic oligonucleotide
  Antisense strand to SEQ ID NO: 927326
uuccacaugcuagagguuu

SEQ ID NO: 927328 - RNA, 19 nt, Artificial Sequence
  Description of Artificial Sequence: Synthetic oligonucleotide
  Sense strand starting at position 2519 of SEQ ID NO: 913438
ggugauuuccuuuguggcu

SEQ ID NO: 927329 - RNA, 19 nt, Artificial Sequence
  Description of Artificial Sequence: Synthetic oligonucleotide
  Antisense strand to SEQ ID NO: 927328
agccacaaaggaaaucacc

SEQ ID NO: 927330 - RNA, 19 nt, Artificial Sequence
  Description of Artificial Sequence: Synthetic oligonucleotide
  Sense strand starting at position 119 of SEQ ID NO: 913438
caauucugcgggcacaaga

SEQ ID NO: 927331 - RNA, 19 nt, Artificial Sequence
  Description of Artificial Sequence: Synthetic oligonucleotide
  Antisense strand to SEQ ID NO: 927330
ucuugugcccgcagaauug

SEQ ID NO: 927332 - RNA, 19 nt, Artificial Sequence
  Description of Artificial Sequence: Synthetic oligonucleotide
  Sense strand starting at position 2872 of SEQ ID NO: 913438
guuuaacugcguucugugu

SEQ ID NO: 927333 - RNA, 19 nt, Artificial Sequence
  Description of Artificial Sequence: Synthetic oligonucleotide
  Antisense strand to SEQ ID NO: 927332
acacagaacgcaguuaaac

SEQ ID NO: 927334 - RNA, 19 nt, Artificial Sequence
  Description of Artificial Sequence: Synthetic oligonucleotide
  Sense strand starting at position 3173 of SEQ ID NO: 913438
cugucauacuugguaacaa

SEQ ID NO: 927335 - RNA, 19 nt, Artificial Sequence
  Description of Artificial Sequence: Synthetic oligonucleotide
  Antisense strand to SEQ ID NO: 927334
uuguuaccaaguaugacag

SEQ ID NO: 927336 - RNA, 19 nt, Artificial Sequence
  Description of Artificial Sequence: Synthetic oligonucleotide
  Sense strand starting at position 650 of SEQ ID NO: 913438
ccuuuauuguuauuaggau

SEQ ID NO: 927337 - RNA, 19 nt, Artificial Sequence
  Description of Artificial Sequence: Synthetic oligonucleotide
  Antisense strand to SEQ ID NO: 927336
auccuaauaacaauaaagg

SEQ ID NO: 927338 - RNA, 19 nt, Artificial Sequence
  Description of Artificial Sequence: Synthetic oligonucleotide
  Sense strand starting at position 273 of SEQ ID NO: 913438
augguuacacaaugcauau

SEQ ID NO: 927339 - RNA, 19 nt, Artificial Sequence
  Description of Artificial Sequence: Synthetic oligonucleotide
  Antisense strand to SEQ ID NO: 927338
auaugcauuguguaaccau

SEQ ID NO: 927340 - RNA, 19 nt, Artificial Sequence
  Description of Artificial Sequence: Synthetic oligonucleotide
  Sense strand starting at position 753 of SEQ ID NO: 913438
uuaugacuuccauguauug

SEQ ID NO: 927341 - RNA, 19 nt, Artificial Sequence
  Description of Artificial Sequence: Synthetic oligonucleotide
  Antisense strand to SEQ ID NO: 927340
caauacauggaagucauaa

SEQ ID NO: 927342 - RNA, 19 nt, Artificial Sequence
  Description of Artificial Sequence: Synthetic oligonucleotide
  Sense strand starting at position 1435 of SEQ ID NO: 913438
cccgcaaauggauagcauu

SEQ ID NO: 927343 - RNA, 19 nt, Artificial Sequence
  Description of Artificial Sequence: Synthetic oligonucleotide
  Antisense strand to SEQ ID NO: 927342
aaugcuauccauuugcggg

SEQ ID NO: 927344 - RNA, 19 nt, Artificial Sequence
  Description of Artificial Sequence: Synthetic oligonucleotide
  Sense strand starting at position 544 of SEQ ID NO: 913438
uuaggaugcuauguccaga

SEQ ID NO: 927345 - RNA, 19 nt, Artificial Sequence
  Description of Artificial Sequence: Synthetic oligonucleotide
  Antisense strand to SEQ ID NO: 927344
ucuggacauagcauccuaa

SEQ ID NO: 927346 - RNA, 19 nt, Artificial Sequence
  Description of Artificial Sequence: Synthetic oligonucleotide
  Sense strand starting at position 835 of SEQ ID NO: 913438
gaacaaacggcgugacaaa

SEQ ID NO: 927347 - RNA, 19 nt, Artificial Sequence
  Description of Artificial Sequence: Synthetic oligonucleotide
  Antisense strand to SEQ ID NO: 927346
uuugucacgccguuuguuc

SEQ ID NO: 927348 - RNA, 19 nt, Artificial Sequence
  Description of Artificial Sequence: Synthetic oligonucleotide
  Sense strand starting at position 1690 of SEQ ID NO: 913438
aacacugcucucgagugau

SEQ ID NO: 927349 - RNA, 19 nt, Artificial Sequence
  Description of Artificial Sequence: Synthetic oligonucleotide
  Antisense strand to SEQ ID NO: 927348
aucacucgagagcaguguu

SEQ ID NO: 927350 - RNA, 19 nt, Artificial Sequence
  Description of Artificial Sequence: Synthetic oligonucleotide
  Sense strand starting at position 3007 of SEQ ID NO: 913438
ugauauuaauugccuaagu

SEQ ID NO: 927351 - RNA, 19 nt, Artificial Sequence
  Description of Artificial Sequence: Synthetic oligonucleotide
  Antisense strand to SEQ ID NO: 927350
acuuaggcaauuaauauca

SEQ ID NO: 927352 - RNA, 19 nt, Artificial Sequence
  Description of Artificial Sequence: Synthetic oligonucleotide
  Sense strand starting at position 263 of SEQ ID NO: 913438
gcauguggaaaugguuaca

SEQ ID NO: 927353 - RNA, 19 nt, Artificial Sequence
  Description of Artificial Sequence: Synthetic oligonucleotide
  Antisense strand to SEQ ID NO: 927352
uguaaccauuuccacaugc

SEQ ID NO: 927354 - RNA, 19 nt, Artificial Sequence
  Description of Artificial Sequence: Synthetic oligonucleotide
  Sense strand starting at position 3172 of SEQ ID NO: 913438
ucugucauacuugguaaca

SEQ ID NO: 927355 - RNA, 19 nt, Artificial Sequence
  Description of Artificial Sequence: Synthetic oligonucleotide
  Antisense strand to SEQ ID NO: 927354
uguuaccaaguaugacaga

SEQ ID NO: 927356 - RNA, 19 nt, Artificial Sequence
  Description of Artificial Sequence: Synthetic oligonucleotide
  Sense strand starting at position 2883 of SEQ ID NO: 913438
uucugugucaggcauuaug

SEQ ID NO: 927357 - RNA, 19 nt, Artificial Sequence
  Description of Artificial Sequence: Synthetic oligonucleotide
  Antisense strand to SEQ ID NO: 927356
cauaaugccugacacagaa

SEQ ID NO: 927358 - RNA, 19 nt, Artificial Sequence
  Description of Artificial Sequence: Synthetic oligonucleotide
  Sense strand starting at position 3882 of SEQ ID NO: 913438
agaggugguaucuguauuc

SEQ ID NO: 927359 - RNA, 19 nt, Artificial Sequence
  Description of Artificial Sequence: Synthetic oligonucleotide
  Antisense strand to SEQ ID NO: 927358
gaauacagauaccaccucu

SEQ ID NO: 927360 - RNA, 19 nt, Artificial Sequence
  Description of Artificial Sequence: Synthetic oligonucleotide
  Sense strand starting at position 3163 of SEQ ID NO: 913438
ucuauagucucugucauac

SEQ ID NO: 927361 - RNA, 19 nt, Artificial Sequence
  Description of Artificial Sequence: Synthetic oligonucleotide
  Antisense strand to SEQ ID NO: 927360
guaugacagagacuauaga

SEQ ID NO: 927362 - RNA, 19 nt, Artificial Sequence
  Description of Artificial Sequence: Synthetic oligonucleotide
  Sense strand starting at position 797 of SEQ ID NO: 913438
acuuaacuguuaucuuguu

SEQ ID NO: 927363 - RNA, 19 nt, Artificial Sequence
  Description of Artificial Sequence: Synthetic oligonucleotide
  Antisense strand to SEQ ID NO: 927362
aacaagauaacaguuaagu

SEQ ID NO: 927364 - RNA, 19 nt, Artificial Sequence
  Description of Artificial Sequence: Synthetic oligonucleotide
  Sense strand starting at position 3079 of SEQ ID NO: 913438
uguuuaaccuuaguaagca

SEQ ID NO: 927365 - RNA, 19 nt, Artificial Sequence
  Description of Artificial Sequence: Synthetic oligonucleotide
  Antisense strand to SEQ ID NO: 927364
ugcuuacuaagguuaaaca

SEQ ID NO: 927366 - RNA, 19 nt, Artificial Sequence
  Description of Artificial Sequence: Synthetic oligonucleotide
  Sense strand starting at position 3074 of SEQ ID NO: 913438
acuaguguuuaaccuuagu

SEQ ID NO: 927367 - RNA, 19 nt, Artificial Sequence
  Description of Artificial Sequence: Synthetic oligonucleotide
  Antisense strand to SEQ ID NO: 927366
acuaagguuaaacacuagu

SEQ ID NO: 927368 - RNA, 19 nt, Artificial Sequence
  Description of Artificial Sequence: Synthetic oligonucleotide
  Sense strand starting at position 117 of SEQ ID NO: 913438
aucaauucugcgggcacaa

SEQ ID NO: 927369 - RNA, 19 nt, Artificial Sequence
  Description of Artificial Sequence: Synthetic oligonucleotide
  Antisense strand to SEQ ID NO: 927368
uugugcccgcagaauugau

SEQ ID NO: 927370 - RNA, 19 nt, Artificial Sequence
  Description of Artificial Sequence: Synthetic oligonucleotide
  Sense strand starting at position 1211 of SEQ ID NO: 913438
agauguaucucugugucua

SEQ ID NO: 927371 - RNA, 19 nt, Artificial Sequence
  Description of Artificial Sequence: Synthetic oligonucleotide
  Antisense strand to SEQ ID NO: 927370
uagacacagagauacaucu

SEQ ID NO: 927372 - RNA, 19 nt, Artificial Sequence
  Description of Artificial Sequence: Synthetic oligonucleotide
  Sense strand starting at position 1381 of SEQ ID NO: 913438
uggaguucuuguuuauucu

SEQ ID NO: 927373 - RNA, 19 nt, Artificial Sequence
  Description of Artificial Sequence: Synthetic oligonucleotide
  Antisense strand to SEQ ID NO: 927372
agaauaaacaagaacucca

SEQ ID NO: 927374 - RNA, 19 nt, Artificial Sequence
  Description of Artificial Sequence: Synthetic oligonucleotide
  Sense strand starting at position 3950 of SEQ ID NO: 913438
cagagcugguaucuguauu

SEQ ID NO: 927375 - RNA, 19 nt, Artificial Sequence
  Description of Artificial Sequence: Synthetic oligonucleotide
  Antisense strand to SEQ ID NO: 927374
aauacagauaccagcucug

SEQ ID NO: 927376 - RNA, 19 nt, Artificial Sequence
  Description of Artificial Sequence: Synthetic oligonucleotide
  Sense strand starting at position 1853 of SEQ ID NO: 913438
gggaaugucugacagggaa

SEQ ID NO: 927377 - RNA, 19 nt, Artificial Sequence
  Description of Artificial Sequence: Synthetic oligonucleotide
  Antisense strand to SEQ ID NO: 927376
uucccugucagacauuccc

SEQ ID NO: 927378 - RNA, 19 nt, Artificial Sequence
  Description of Artificial Sequence: Synthetic oligonucleotide
  Sense strand starting at position 3373 of SEQ ID NO: 913439
aggccaagugauuaaucua

SEQ ID NO: 927379 - RNA, 19 nt, Artificial Sequence
  Description of Artificial Sequence: Synthetic oligonucleotide
  Antisense strand to SEQ ID NO: 927378
uagauuaaucacuuggccu

SEQ ID NO: 927380 - RNA, 19 nt, Artificial Sequence
  Description of Artificial Sequence: Synthetic oligonucleotide
  Sense strand starting at position 3661 of SEQ ID NO: 913439
guaagaauucuugaacugu

SEQ ID NO: 927381 - RNA, 19 nt, Artificial Sequence
  Description of Artificial Sequence: Synthetic oligonucleotide
  Antisense strand to SEQ ID NO: 927380
acaguucaagaauucuuac

SEQ ID NO: 927382 - RNA, 19 nt, Artificial Sequence
  Description of Artificial Sequence: Synthetic oligonucleotide
  Sense strand starting at position 3659 of SEQ ID NO: 913439
cuguaagaauucuugaacu

SEQ ID NO: 927383 - RNA, 19 nt, Artificial Sequence
  Description of Artificial Sequence: Synthetic oligonucleotide
  Antisense strand to SEQ ID NO: 927382
aguucaagaauucuuacag

SEQ ID NO: 927384 - RNA, 19 nt, Artificial Sequence
  Description of Artificial Sequence: Synthetic oligonucleotide
  Sense strand starting at position 75 of SEQ ID NO: 913439
aaggguuaccugugaagac

SEQ ID NO: 927385 - RNA, 19 nt, Artificial Sequence
  Description of Artificial Sequence: Synthetic oligonucleotide
  Antisense strand to SEQ ID NO: 927384
gucuucacagguaacccuu

SEQ ID NO: 927386 - RNA, 19 nt, Artificial Sequence
  Description of Artificial Sequence: Synthetic oligonucleotide
  Sense strand starting at position 3722 of SEQ ID NO: 913439
gugugaaccuuacuaaaga

SEQ ID NO: 927387 - RNA, 19 nt, Artificial Sequence
  Description of Artificial Sequence: Synthetic oligonucleotide
  Antisense strand to SEQ ID NO: 927386
ucuuuaguaagguucacac

SEQ ID NO: 927388 - RNA, 19 nt, Artificial Sequence
  Description of Artificial Sequence: Synthetic oligonucleotide
  Sense strand starting at position 2655 of SEQ ID NO: 913439
acgugauccgcauccgcaa

SEQ ID NO: 927389 - RNA, 19 nt, Artificial Sequence
  Description of Artificial Sequence: Synthetic oligonucleotide
  Antisense strand to SEQ ID NO: 927388
uugcggaugcggaucacgu

SEQ ID NO: 927390 - RNA, 19 nt, Artificial Sequence
  Description of Artificial Sequence: Synthetic oligonucleotide
  Sense strand starting at position 3132 of SEQ ID NO: 913439
ucugaagaaucccugaugu

SEQ ID NO: 927391 - RNA, 19 nt, Artificial Sequence
  Description of Artificial Sequence: Synthetic oligonucleotide
  Antisense strand to SEQ ID NO: 927390
acaucagggauucuucaga

SEQ ID NO: 927392 - RNA, 19 nt, Artificial Sequence
  Description of Artificial Sequence: Synthetic oligonucleotide
  Sense strand starting at position 3713 of SEQ ID NO: 913439
caaugaauagugugaaccu

SEQ ID NO: 927393 - RNA, 19 nt, Artificial Sequence
  Description of Artificial Sequence: Synthetic oligonucleotide
  Antisense strand to SEQ ID NO: 927392
agguucacacuauucauug

SEQ ID NO: 927394 - RNA, 19 nt, Artificial Sequence
  Description of Artificial Sequence: Synthetic oligonucleotide
  Sense strand starting at position 3143 of SEQ ID NO: 913439
ccugaugucuuauuggaac

SEQ ID NO: 927395 - RNA, 19 nt, Artificial Sequence
  Description of Artificial Sequence: Synthetic oligonucleotide
  Antisense strand to SEQ ID NO: 927394
guuccaauaagacaucagg

SEQ ID NO: 927396 - RNA, 19 nt, Artificial Sequence
  Description of Artificial Sequence: Synthetic oligonucleotide
  Sense strand starting at position 2920 of SEQ ID NO: 913439
agagguucugcuugggaua

SEQ ID NO: 927397 - RNA, 19 nt, Artificial Sequence
  Description of Artificial Sequence: Synthetic oligonucleotide
  Antisense strand to SEQ ID NO: 927396
uaucccaagcagaaccucu

SEQ ID NO: 927398 - RNA, 19 nt, Artificial Sequence
  Description of Artificial Sequence: Synthetic oligonucleotide
  Sense strand starting at position 2921 of SEQ ID NO: 913439
gagguucugcuugggauaa

SEQ ID NO: 927399 - RNA, 19 nt, Artificial Sequence
  Description of Artificial Sequence: Synthetic oligonucleotide
  Antisense strand to SEQ ID NO: 927398
uuaucccaagcagaaccuc

SEQ ID NO: 927400 - RNA, 19 nt, Artificial Sequence
  Description of Artificial Sequence: Synthetic oligonucleotide
  Sense strand starting at position 3489 of SEQ ID NO: 913439
ucccucuuugugcagaaau

SEQ ID NO: 927401 - RNA, 19 nt, Artificial Sequence
  Description of Artificial Sequence: Synthetic oligonucleotide
  Antisense strand to SEQ ID NO: 927400
auuucugcacaaagaggga

SEQ ID NO: 927402 - RNA, 19 nt, Artificial Sequence
  Description of Artificial Sequence: Synthetic oligonucleotide
  Sense strand starting at position 3457 of SEQ ID NO: 913439
uggucuuagcuauacaucu

SEQ ID NO: 927403 - RNA, 19 nt, Artificial Sequence
  Description of Artificial Sequence: Synthetic oligonucleotide
  Antisense strand to SEQ ID NO: 927402
agauguauagcuaagacca

SEQ ID NO: 927404 - RNA, 19 nt, Artificial Sequence
  Description of Artificial Sequence: Synthetic oligonucleotide
  Sense strand starting at position 3204 of SEQ ID NO: 913439
cuuuauaucugugugaaua

SEQ ID NO: 927405 - RNA, 19 nt, Artificial Sequence
  Description of Artificial Sequence: Synthetic oligonucleotide
  Antisense strand to SEQ ID NO: 927404
uauucacacagauauaaag

SEQ ID NO: 927406 - RNA, 19 nt, Artificial Sequence
  Description of Artificial Sequence: Synthetic oligonucleotide
  Sense strand starting at position 49 of SEQ ID NO: 913439
ccuuuacucuaaguaguga

SEQ ID NO: 927407 - RNA, 19 nt, Artificial Sequence
  Description of Artificial Sequence: Synthetic oligonucleotide
  Antisense strand to SEQ ID NO: 927406
ucacuacuuagaguaaagg

SEQ ID NO: 927408 - RNA, 19 nt, Artificial Sequence
  Description of Artificial Sequence: Synthetic oligonucleotide
  Sense strand starting at position 3203 of SEQ ID NO: 913439
acuuuauaucugugugaau

SEQ ID NO: 927409 - RNA, 19 nt, Artificial Sequence
  Description of Artificial Sequence: Synthetic oligonucleotide
  Antisense strand to SEQ ID NO: 927408
auucacacagauauaaagu

SEQ ID NO: 927410 - RNA, 19 nt, Artificial Sequence
  Description of Artificial Sequence: Synthetic oligonucleotide
  Sense strand starting at position 2840 of SEQ ID NO: 913439
cuguuacuccgguaaaggu

SEQ ID NO: 927411 - RNA, 19 nt, Artificial Sequence
  Description of Artificial Sequence: Synthetic oligonucleotide
  Antisense strand to SEQ ID NO: 927410
accuuuaccggaguaacag

SEQ ID NO: 927412 - RNA, 19 nt, Artificial Sequence
  Description of Artificial Sequence: Synthetic oligonucleotide
  Sense strand starting at position 2021 of SEQ ID NO: 913439
accggaagccucgagguuu

SEQ ID NO: 927413 - RNA, 19 nt, Artificial Sequence
  Description of Artificial Sequence: Synthetic oligonucleotide
  Antisense strand to SEQ ID NO: 927412
aaaccucgaggcuuccggu

SEQ ID NO: 927414 - RNA, 19 nt, Artificial Sequence
  Description of Artificial Sequence: Synthetic oligonucleotide
  Sense strand starting at position 2389 of SEQ ID NO: 913439
ggucguaauauauguaaac

SEQ ID NO: 927415 - RNA, 19 nt, Artificial Sequence
  Description of Artificial Sequence: Synthetic oligonucleotide
  Antisense strand to SEQ ID NO: 927414
guuuacauauauuacgacc

SEQ ID NO: 927416 - RNA, 19 nt, Artificial Sequence
  Description of Artificial Sequence: Synthetic oligonucleotide
  Sense strand starting at position 2129 of SEQ ID NO: 913439
cagcguucuccacaacgga

SEQ ID NO: 927417 - RNA, 19 nt, Artificial Sequence
  Description of Artificial Sequence: Synthetic oligonucleotide
  Antisense strand to SEQ ID NO: 927416
uccguuguggagaacgcug

SEQ ID NO: 927418 - RNA, 19 nt, Artificial Sequence
  Description of Artificial Sequence: Synthetic oligonucleotide
  Sense strand starting at position 2829 of SEQ ID NO: 913439
caggcuuuggacuguuacu

SEQ ID NO: 927419 - RNA, 19 nt, Artificial Sequence
  Description of Artificial Sequence: Synthetic oligonucleotide
  Antisense strand to SEQ ID NO: 927418
aguaacaguccaaagccug

SEQ ID NO: 927420 - RNA, 19 nt, Artificial Sequence
  Description of Artificial Sequence: Synthetic oligonucleotide
  Sense strand starting at position 2390 of SEQ ID NO: 913439
gucguaauauauguaaacu

SEQ ID NO: 927421 - RNA, 19 nt, Artificial Sequence
  Description of Artificial Sequence: Synthetic oligonucleotide
  Antisense strand to SEQ ID NO: 927420
aguuuacauauauuacgac

SEQ ID NO: 927422 - RNA, 19 nt, Artificial Sequence
  Description of Artificial Sequence: Synthetic oligonucleotide
  Sense strand starting at position 3351 of SEQ ID NO: 913439
acugucaggugguuaguau

SEQ ID NO: 927423 - RNA, 19 nt, Artificial Sequence
  Description of Artificial Sequence: Synthetic oligonucleotide
  Antisense strand to SEQ ID NO: 927422
auacuaaccaccugacagu

SEQ ID NO: 927424 - RNA, 19 nt, Artificial Sequence
  Description of Artificial Sequence: Synthetic oligonucleotide
  Sense strand starting at position 3488 of SEQ ID NO: 913439
gucccucuuugugcagaaa

SEQ ID NO: 927425 - RNA, 19 nt, Artificial Sequence
  Description of Artificial Sequence: Synthetic oligonucleotide
  Antisense strand to SEQ ID NO: 927424
uuucugcacaaagagggac

SEQ ID NO: 927426 - RNA, 19 nt, Artificial Sequence
  Description of Artificial Sequence: Synthetic oligonucleotide
  Sense strand starting at position 2308 of SEQ ID NO: 913439
gggucauacugcucacugu

SEQ ID NO: 927427 - RNA, 19 nt, Artificial Sequence
  Description of Artificial Sequence: Synthetic oligonucleotide
  Antisense strand to SEQ ID NO: 927426
acagugagcaguaugaccc

SEQ ID NO: 927428 - RNA, 19 nt, Artificial Sequence
  Description of Artificial Sequence: Synthetic oligonucleotide
  Sense strand starting at position 3564 of SEQ ID NO: 913439
caggaaggcugauauuaau

SEQ ID NO: 927429 - RNA, 19 nt, Artificial Sequence
  Description of Artificial Sequence: Synthetic oligonucleotide
  Antisense strand to SEQ ID NO: 927428
auuaauaucagccuuccug

SEQ ID NO: 927430 - RNA, 19 nt, Artificial Sequence
  Description of Artificial Sequence: Synthetic oligonucleotide
  Sense strand starting at position 3417 of SEQ ID NO: 913439
gagugauucucagaccaag

SEQ ID NO: 927431 - RNA, 19 nt, Artificial Sequence
  Description of Artificial Sequence: Synthetic oligonucleotide
  Antisense strand to SEQ ID NO: 927430
cuuggucugagaaucacuc

SEQ ID NO: 927432 - RNA, 19 nt, Artificial Sequence
  Description of Artificial Sequence: Synthetic oligonucleotide
  Sense strand starting at position 3415 of SEQ ID NO: 913439
gggagugauucucagacca

SEQ ID NO: 927433 - RNA, 19 nt, Artificial Sequence
  Description of Artificial Sequence: Synthetic oligonucleotide
  Antisense strand to SEQ ID NO: 927432
uggucugagaaucacuccc

SEQ ID NO: 927434 - RNA, 19 nt, Artificial Sequence
  Description of Artificial Sequence: Synthetic oligonucleotide
  Sense strand starting at position 3146 of SEQ ID NO: 913439
gaugucuuauuggaacaac

SEQ ID NO: 927435 - RNA, 19 nt, Artificial Sequence
  Description of Artificial Sequence: Synthetic oligonucleotide
  Antisense strand to SEQ ID NO: 927434
guuguuccaauaagacauc

SEQ ID NO: 927436 - RNA, 19 nt, Artificial Sequence
  Description of Artificial Sequence: Synthetic oligonucleotide
  Sense strand starting at position 3714 of SEQ ID NO: 913439
aaugaauagugugaaccuu

SEQ ID NO: 927437 - RNA, 19 nt, Artificial Sequence
  Description of Artificial Sequence: Synthetic oligonucleotide
  Antisense strand to SEQ ID NO: 927436
aagguucacacuauucauu

SEQ ID NO: 927438 - RNA, 19 nt, Artificial Sequence
  Description of Artificial Sequence: Synthetic oligonucleotide
  Sense strand starting at position 2595 of SEQ ID NO: 913439
gcaagucggucgaggagau

SEQ ID NO: 927439 - RNA, 19 nt, Artificial Sequence
  Description of Artificial Sequence: Synthetic oligonucleotide
  Antisense strand to SEQ ID NO: 927438
aucuccucgaccgacuugc

SEQ ID NO: 927440 - RNA, 19 nt, Artificial Sequence
  Description of Artificial Sequence: Synthetic oligonucleotide
  Sense strand starting at position 2022 of SEQ ID NO: 913439
ccggaagccucgagguuua

SEQ ID NO: 927441 - RNA, 19 nt, Artificial Sequence
  Description of Artificial Sequence: Synthetic oligonucleotide
  Antisense strand to SEQ ID NO: 927440
uaaaccucgaggcuuccgg

SEQ ID NO: 927442 - RNA, 19 nt, Artificial Sequence
  Description of Artificial Sequence: Synthetic oligonucleotide
  Sense strand starting at position 3355 of SEQ ID NO: 913439
ucaggugguuaguaucaaa

SEQ ID NO: 927443 - RNA, 19 nt, Artificial Sequence
  Description of Artificial Sequence: Synthetic oligonucleotide
  Antisense strand to SEQ ID NO: 927442
uuugauacuaaccaccuga

SEQ ID NO: 927444 - RNA, 19 nt, Artificial Sequence
  Description of Artificial Sequence: Synthetic oligonucleotide
  Sense strand starting at position 2923 of SEQ ID NO: 913439
gguucugcuugggauaaug

SEQ ID NO: 927445 - RNA, 19 nt, Artificial Sequence
  Description of Artificial Sequence: Synthetic oligonucleotide
  Antisense strand to SEQ ID NO: 927444
cauuaucccaagcagaacc

SEQ ID NO: 927446 - RNA, 19 nt, Artificial Sequence
  Description of Artificial Sequence: Synthetic oligonucleotide
  Sense strand starting at position 3570 of SEQ ID NO: 913439
ggcugauauuaaugaguau

SEQ ID NO: 927447 - RNA, 19 nt, Artificial Sequence
  Description of Artificial Sequence: Synthetic oligonucleotide
  Antisense strand to SEQ ID NO: 927446
auacucauuaauaucagcc

SEQ ID NO: 927448 - RNA, 19 nt, Artificial Sequence
  Description of Artificial Sequence: Synthetic oligonucleotide
  Sense strand starting at position 3122 of SEQ ID NO: 913439
aaggcuggcuucugaagaa

SEQ ID NO: 927449 - RNA, 19 nt, Artificial Sequence
  Description of Artificial Sequence: Synthetic oligonucleotide
  Antisense strand to SEQ ID NO: 927448
uucuucagaagccagccuu

SEQ ID NO: 927450 - RNA, 19 nt, Artificial Sequence
  Description of Artificial Sequence: Synthetic oligonucleotide
  Sense strand starting at position 2922 of SEQ ID NO: 913439
agguucugcuugggauaau

SEQ ID NO: 927451 - RNA, 19 nt, Artificial Sequence
  Description of Artificial Sequence: Synthetic oligonucleotide
  Antisense strand to SEQ ID NO: 927450
auuaucccaagcagaaccu

SEQ ID NO: 927452 - RNA, 19 nt, Artificial Sequence
  Description of Artificial Sequence: Synthetic oligonucleotide
  Sense strand starting at position 2838 of SEQ ID NO: 913439
gacuguuacuccgguaaag

SEQ ID NO: 927453 - RNA, 19 nt, Artificial Sequence
  Description of Artificial Sequence: Synthetic oligonucleotide
  Antisense strand to SEQ ID NO: 927452
cuuuaccggaguaacaguc

SEQ ID NO: 927454 - RNA, 19 nt, Artificial Sequence
  Description of Artificial Sequence: Synthetic oligonucleotide
  Sense strand starting at position 3451 of SEQ ID NO: 913439
uuucucuggucuuagcuau

SEQ ID NO: 927455 - RNA, 19 nt, Artificial Sequence
  Description of Artificial Sequence: Synthetic oligonucleotide
  Antisense strand to SEQ ID NO: 927454
auagcuaagaccagagaaa

SEQ ID NO: 927456 - RNA, 19 nt, Artificial Sequence
  Description of Artificial Sequence: Synthetic oligonucleotide
  Sense strand starting at position 3905 of SEQ ID NO: 913439
gcagacuagucauagcugu

SEQ ID NO: 927457 - RNA, 19 nt, Artificial Sequence
  Description of Artificial Sequence: Synthetic oligonucleotide
  Antisense strand to SEQ ID NO: 927456
acagcuaugacuagucugc

SEQ ID NO: 927458 - RNA, 19 nt, Artificial Sequence
  Description of Artificial Sequence: Synthetic oligonucleotide
  Sense strand starting at position 3120 of SEQ ID NO: 913440
auaauuacagcugauguaa

SEQ ID NO: 927459 - RNA, 19 nt, Artificial Sequence
  Description of Artificial Sequence: Synthetic oligonucleotide
  Antisense strand to SEQ ID NO: 927458
uuacaucagcuguaauuau

SEQ ID NO: 927460 - RNA, 19 nt, Artificial Sequence
  Description of Artificial Sequence: Synthetic oligonucleotide
  Sense strand starting at position 3091 of SEQ ID NO: 913440
guuauaugcggcuuacucu

SEQ ID NO: 927461 - RNA, 19 nt, Artificial Sequence
  Description of Artificial Sequence: Synthetic oligonucleotide
  Antisense strand to SEQ ID NO: 927460
agaguaagccgcauauaac

SEQ ID NO: 927462 - RNA, 19 nt, Artificial Sequence
  Description of Artificial Sequence: Synthetic oligonucleotide
  Sense strand starting at position 3152 of SEQ ID NO: 913440
agauaaaguccuggaccua

SEQ ID NO: 927463 - RNA, 19 nt, Artificial Sequence
  Description of Artificial Sequence: Synthetic oligonucleotide
  Antisense strand to SEQ ID NO: 927462
uagguccaggacuuuaucu

SEQ ID NO: 927464 - RNA, 19 nt, Artificial Sequence
  Description of Artificial Sequence: Synthetic oligonucleotide
  Sense strand starting at position 764 of SEQ ID NO: 913440
gucuguucccugcugagca

SEQ ID NO: 927465 - RNA, 19 nt, Artificial Sequence
  Description of Artificial Sequence: Synthetic oligonucleotide
  Antisense strand to SEQ ID NO: 927464
ugcucagcagggaacagac

SEQ ID NO: 927466 - RNA, 19 nt, Artificial Sequence
  Description of Artificial Sequence: Synthetic oligonucleotide
  Sense strand starting at position 126 of SEQ ID NO: 913440
guagacauuaaaggaguua

SEQ ID NO: 927467 - RNA, 19 nt, Artificial Sequence
  Description of Artificial Sequence: Synthetic oligonucleotide
  Antisense strand to SEQ ID NO: 927466
uaacuccuuuaaugucuac

SEQ ID NO: 927468 - RNA, 19 nt, Artificial Sequence
  Description of Artificial Sequence: Synthetic oligonucleotide
  Sense strand starting at position 2899 of SEQ ID NO: 913440
ugaguuucugacuagaucu

SEQ ID NO: 927469 - RNA, 19 nt, Artificial Sequence
  Description of Artificial Sequence: Synthetic oligonucleotide
  Antisense strand to SEQ ID NO: 927468
agaucuagucagaaacuca

SEQ ID NO: 927470 - RNA, 19 nt, Artificial Sequence
  Description of Artificial Sequence: Synthetic oligonucleotide
  Sense strand starting at position 3800 of SEQ ID NO: 913440
gucaucuagagcuauggaa

SEQ ID NO: 927471 - RNA, 19 nt, Artificial Sequence
  Description of Artificial Sequence: Synthetic oligonucleotide
  Antisense strand to SEQ ID NO: 927470
uuccauagcucuagaugac

SEQ ID NO: 927472 - RNA, 19 nt, Artificial Sequence
  Description of Artificial Sequence: Synthetic oligonucleotide
  Sense strand starting at position 2417 of SEQ ID NO: 913440
ggacuagauacguggaaca

SEQ ID NO: 927473 - RNA, 19 nt, Artificial Sequence
  Description of Artificial Sequence: Synthetic oligonucleotide
  Antisense strand to SEQ ID NO: 927472
uguuccacguaucuagucc

SEQ ID NO: 927474 - RNA, 19 nt, Artificial Sequence
  Description of Artificial Sequence: Synthetic oligonucleotide
  Sense strand starting at position 2929 of SEQ ID NO: 913440
uauuaaaugcgugugcuuu

SEQ ID NO: 927475 - RNA, 19 nt, Artificial Sequence
  Description of Artificial Sequence: Synthetic oligonucleotide
  Antisense strand to SEQ ID NO: 927474
aaagcacacgcauuuaaua

SEQ ID NO: 927476 - RNA, 19 nt, Artificial Sequence
  Description of Artificial Sequence: Synthetic oligonucleotide
  Sense strand starting at position 918 of SEQ ID NO: 913440
gaucuaacuuagguuuaag

SEQ ID NO: 927477 - RNA, 19 nt, Artificial Sequence
  Description of Artificial Sequence: Synthetic oligonucleotide
  Antisense strand to SEQ ID NO: 927476
cuuaaaccuaaguuagauc

SEQ ID NO: 927478 - RNA, 19 nt, Artificial Sequence
  Description of Artificial Sequence: Synthetic oligonucleotide
  Sense strand starting at position 3813 of SEQ ID NO: 913440
auggaaaucgaaugcuaaa

SEQ ID NO: 927479 - RNA, 19 nt, Artificial Sequence
  Description of Artificial Sequence: Synthetic oligonucleotide
  Antisense strand to SEQ ID NO: 927478
uuuagcauucgauuuccau

SEQ ID NO: 927480 - RNA, 19 nt, Artificial Sequence
  Description of Artificial Sequence: Synthetic oligonucleotide
  Sense strand starting at position 3670 of SEQ ID NO: 913440
uuucuuggaucauuaggau

SEQ ID NO: 927481 - RNA, 19 nt, Artificial Sequence
  Description of Artificial Sequence: Synthetic oligonucleotide
  Antisense strand to SEQ ID NO: 927480
auccuaaugauccaagaaa

SEQ ID NO: 927482 - RNA, 19 nt, Artificial Sequence
  Description of Artificial Sequence: Synthetic oligonucleotide
  Sense strand starting at position 363 of SEQ ID NO: 913440
ucauuucuucuguguuaua

SEQ ID NO: 927483 - RNA, 19 nt, Artificial Sequence
  Description of Artificial Sequence: Synthetic oligonucleotide
  Antisense strand to SEQ ID NO: 927482
uauaacacagaagaaauga

SEQ ID NO: 927484 - RNA, 19 nt, Artificial Sequence
  Description of Artificial Sequence: Synthetic oligonucleotide
  Sense strand starting at position 3089 of SEQ ID NO: 913440
guguuauaugcggcuuacu

SEQ ID NO: 927485 - RNA, 19 nt, Artificial Sequence
  Description of Artificial Sequence: Synthetic oligonucleotide
  Antisense strand to SEQ ID NO: 927484
aguaagccgcauauaacac

SEQ ID NO: 927486 - RNA, 19 nt, Artificial Sequence
  Description of Artificial Sequence: Synthetic oligonucleotide
  Sense strand starting at position 1077 of SEQ ID NO: 913440
cgaugaagccgacagaauu

SEQ ID NO: 927487 - RNA, 19 nt, Artificial Sequence
  Description of Artificial Sequence: Synthetic oligonucleotide
  Antisense strand to SEQ ID NO: 927486
aauucugucggcuucaucg

SEQ ID NO: 927488 - RNA, 19 nt, Artificial Sequence
  Description of Artificial Sequence: Synthetic oligonucleotide
  Sense strand starting at position 3858 of SEQ ID NO: 913440
aguaguguaauuugucauu

SEQ ID NO: 927489 - RNA, 19 nt, Artificial Sequence
  Description of Artificial Sequence: Synthetic oligonucleotide
  Antisense strand to SEQ ID NO: 927488
aaugacaaauuacacuacu

SEQ ID NO: 927490 - RNA, 19 nt, Artificial Sequence
  Description of Artificial Sequence: Synthetic oligonucleotide
  Sense strand starting at position 362 of SEQ ID NO: 913440
cucauuucuucuguguuau

SEQ ID NO: 927491 - RNA, 19 nt, Artificial Sequence
  Description of Artificial Sequence: Synthetic oligonucleotide
  Antisense strand to SEQ ID NO: 927490
auaacacagaagaaaugag

SEQ ID NO: 927492 - RNA, 19 nt, Artificial Sequence
  Description of Artificial Sequence: Synthetic oligonucleotide
  Sense strand starting at position 420 of SEQ ID NO: 913440
ugcaauaguccagauacuc

SEQ ID NO: 927493 - RNA, 19 nt, Artificial Sequence
  Description of Artificial Sequence: Synthetic oligonucleotide
  Antisense strand to SEQ ID NO: 927492
gaguaucuggacuauugca

SEQ ID NO: 927494 - RNA, 19 nt, Artificial Sequence
  Description of Artificial Sequence: Synthetic oligonucleotide
  Sense strand starting at position 114 of SEQ ID NO: 913440
auccaucuuuauguagaca

SEQ ID NO: 927495 - RNA, 19 nt, Artificial Sequence
  Description of Artificial Sequence: Synthetic oligonucleotide
  Antisense strand to SEQ ID NO: 927494
ugucuacauaaagauggau

SEQ ID NO: 927496 - RNA, 19 nt, Artificial Sequence
  Description of Artificial Sequence: Synthetic oligonucleotide
  Sense strand starting at position 868 of SEQ ID NO: 913440
gcucuaauaaguugggaag

SEQ ID NO: 927497 - RNA, 19 nt, Artificial Sequence
  Description of Artificial Sequence: Synthetic oligonucleotide
  Antisense strand to SEQ ID NO: 927496
cuucccaacuuauuagagc

SEQ ID NO: 927498 - RNA, 19 nt, Artificial Sequence
  Description of Artificial Sequence: Synthetic oligonucleotide
  Sense strand starting at position 1558 of SEQ ID NO: 913440
guguguugaaaucagacuu

SEQ ID NO: 927499 - RNA, 19 nt, Artificial Sequence
  Description of Artificial Sequence: Synthetic oligonucleotide
  Antisense strand to SEQ ID NO: 927498
aagucugauuucaacacac

SEQ ID NO: 927500 - RNA, 19 nt, Artificial Sequence
  Description of Artificial Sequence: Synthetic oligonucleotide
  Sense strand starting at position 457 of SEQ ID NO: 913440
cuucuuuguccagaccuca

SEQ ID NO: 927501 - RNA, 19 nt, Artificial Sequence
  Description of Artificial Sequence: Synthetic oligonucleotide
  Antisense strand to SEQ ID NO: 927500
ugaggucuggacaaagaag

SEQ ID NO: 927502 - RNA, 19 nt, Artificial Sequence
  Description of Artificial Sequence: Synthetic oligonucleotide
  Sense strand starting at position 2898 of SEQ ID NO: 913440
cugaguuucugacuagauc

SEQ ID NO: 927503 - RNA, 19 nt, Artificial Sequence
  Description of Artificial Sequence: Synthetic oligonucleotide
  Antisense strand to SEQ ID NO: 927502
gaucuagucagaaacucag

SEQ ID NO: 927504 - RNA, 19 nt, Artificial Sequence
  Description of Artificial Sequence: Synthetic oligonucleotide
  Sense strand starting at position 975 of SEQ ID NO: 913440
ccgucuggaagccaauaua

SEQ ID NO: 927505 - RNA, 19 nt, Artificial Sequence
  Description of Artificial Sequence: Synthetic oligonucleotide
  Antisense strand to SEQ ID NO: 927504
uauauuggcuuccagacgg

SEQ ID NO: 927506 - RNA, 19 nt, Artificial Sequence
  Description of Artificial Sequence: Synthetic oligonucleotide
  Sense strand starting at position 1045 of SEQ ID NO: 913440
uugaaaguggcuugauaau

SEQ ID NO: 927507 - RNA, 19 nt, Artificial Sequence
  Description of Artificial Sequence: Synthetic oligonucleotide
  Antisense strand to SEQ ID NO: 927506
auuaucaagccacuuucaa

SEQ ID NO: 927508 - RNA, 19 nt, Artificial Sequence
  Description of Artificial Sequence: Synthetic oligonucleotide
  Sense strand starting at position 2406 of SEQ ID NO: 913440
ggagcguucgaggacuaga

SEQ ID NO: 927509 - RNA, 19 nt, Artificial Sequence
  Description of Artificial Sequence: Synthetic oligonucleotide
  Antisense strand to SEQ ID NO: 927508
ucuaguccucgaacgcucc

SEQ ID NO: 927510 - RNA, 19 nt, Artificial Sequence
  Description of Artificial Sequence: Synthetic oligonucleotide
  Sense strand starting at position 3661 of SEQ ID NO: 913440
acaaauugcuuucuuggau

SEQ ID NO: 927511 - RNA, 19 nt, Artificial Sequence
  Description of Artificial Sequence: Synthetic oligonucleotide
  Antisense strand to SEQ ID NO: 927510
auccaagaaagcaauuugu

SEQ ID NO: 927512 - RNA, 19 nt, Artificial Sequence
  Description of Artificial Sequence: Synthetic oligonucleotide
  Sense strand starting at position 1087 of SEQ ID NO: 913440
gacagaauuuguggauaaa

SEQ ID NO: 927513 - RNA, 19 nt, Artificial Sequence
  Description of Artificial Sequence: Synthetic oligonucleotide
  Antisense strand to SEQ ID NO: 927512
uuuauccacaaauucuguc

SEQ ID NO: 927514 - RNA, 19 nt, Artificial Sequence
  Description of Artificial Sequence: Synthetic oligonucleotide
  Sense strand starting at position 3861 of SEQ ID NO: 913440
aguguaauuugucauuucu

SEQ ID NO: 927515 - RNA, 19 nt, Artificial Sequence
  Description of Artificial Sequence: Synthetic oligonucleotide
  Antisense strand to SEQ ID NO: 927514
agaaaugacaaauuacacu

SEQ ID NO: 927516 - RNA, 19 nt, Artificial Sequence
  Description of Artificial Sequence: Synthetic oligonucleotide
  Sense strand starting at position 3792 of SEQ ID NO: 913440
gcuaaacugucaucuagag

SEQ ID NO: 927517 - RNA, 19 nt, Artificial Sequence
  Description of Artificial Sequence: Synthetic oligonucleotide
  Antisense strand to SEQ ID NO: 927516
cucuagaugacaguuuagc

SEQ ID NO: 927518 - RNA, 19 nt, Artificial Sequence
  Description of Artificial Sequence: Synthetic oligonucleotide
  Sense strand starting at position 1295 of SEQ ID NO: 913440
aaugcagcucuugaguaau

SEQ ID NO: 927519 - RNA, 19 nt, Artificial Sequence
  Description of Artificial Sequence: Synthetic oligonucleotide
  Antisense strand to SEQ ID NO: 927518
auuacucaagagcugcauu

SEQ ID NO: 927520 - RNA, 19 nt, Artificial Sequence
  Description of Artificial Sequence: Synthetic oligonucleotide
  Sense strand starting at position 860 of SEQ ID NO: 913440
uuggcuuugcucuaauaag

SEQ ID NO: 927521 - RNA, 19 nt, Artificial Sequence
  Description of Artificial Sequence: Synthetic oligonucleotide
  Antisense strand to SEQ ID NO: 927520
cuuauuagagcaaagccaa

SEQ ID NO: 927522 - RNA, 19 nt, Artificial Sequence
  Description of Artificial Sequence: Synthetic oligonucleotide
  Sense strand starting at position 1307 of SEQ ID NO: 913440
gaguaaucaguucgauaua

SEQ ID NO: 927523 - RNA, 19 nt, Artificial Sequence
  Description of Artificial Sequence: Synthetic oligonucleotide
  Antisense strand to SEQ ID NO: 927522
uauaucgaacugauuacuc

SEQ ID NO: 927524 - RNA, 19 nt, Artificial Sequence
  Description of Artificial Sequence: Synthetic oligonucleotide
  Sense strand starting at position 3029 of SEQ ID NO: 913440
gguagauguucuguaaaua

SEQ ID NO: 927525 - RNA, 19 nt, Artificial Sequence
  Description of Artificial Sequence: Synthetic oligonucleotide
  Antisense strand to SEQ ID NO: 927524
uauuuacagaacaucuacc

SEQ ID NO: 927526 - RNA, 19 nt, Artificial Sequence
  Description of Artificial Sequence: Synthetic oligonucleotide
  Sense strand starting at position 1298 of SEQ ID NO: 913440
gcagcucuugaguaaucag

SEQ ID NO: 927527 - RNA, 19 nt, Artificial Sequence
  Description of Artificial Sequence: Synthetic oligonucleotide
  Antisense strand to SEQ ID NO: 927526
cugauuacucaagagcugc

SEQ ID NO: 927528 - RNA, 19 nt, Artificial Sequence
  Description of Artificial Sequence: Synthetic oligonucleotide
  Sense strand starting at position 3900 of SEQ ID NO: 913440
gcaguuacuaguuaguaga

SEQ ID NO: 927529 - RNA, 19 nt, Artificial Sequence
  Description of Artificial Sequence: Synthetic oligonucleotide
  Antisense strand to SEQ ID NO: 927528
ucuacuaacuaguaacugc

SEQ ID NO: 927530 - RNA, 19 nt, Artificial Sequence
  Description of Artificial Sequence: Synthetic oligonucleotide
  Sense strand starting at position 2915 of SEQ ID NO: 913440
ucugacuuccauuguauua

SEQ ID NO: 927531 - RNA, 19 nt, Artificial Sequence
  Description of Artificial Sequence: Synthetic oligonucleotide
  Antisense strand to SEQ ID NO: 927530
uaauacaauggaagucaga

SEQ ID NO: 927532 - RNA, 19 nt, Artificial Sequence
  Description of Artificial Sequence: Synthetic oligonucleotide
  Sense strand starting at position 3242 of SEQ ID NO: 913440
auauguuuguaugcaaaga

SEQ ID NO: 927533 - RNA, 19 nt, Artificial Sequence
  Description of Artificial Sequence: Synthetic oligonucleotide
  Antisense strand to SEQ ID NO: 927532
ucuuugcauacaaacauau

SEQ ID NO: 927534 - RNA, 19 nt, Artificial Sequence
  Description of Artificial Sequence: Synthetic oligonucleotide
  Sense strand starting at position 3841 of SEQ ID NO: 913440
acaggaauauaucauaaag

SEQ ID NO: 927535 - RNA, 19 nt, Artificial Sequence
  Description of Artificial Sequence: Synthetic oligonucleotide
  Antisense strand to SEQ ID NO: 927534
cuuuaugauauauuccugu

SEQ ID NO: 927536 - RNA, 19 nt, Artificial Sequence
  Description of Artificial Sequence: Synthetic oligonucleotide
  Sense strand starting at position 1266 of SEQ ID NO: 913440
uuagguuugggauguccau

SEQ ID NO: 927537 - RNA, 19 nt, Artificial Sequence
  Description of Artificial Sequence: Synthetic oligonucleotide
  Antisense strand to SEQ ID NO: 927536
auggacaucccaaaccuaa

SEQ ID NO: 927538 - RNA, 19 nt, Artificial Sequence
  Description of Artificial Sequence: Synthetic oligonucleotide
  Sense strand starting at position 642 of SEQ ID NO: 913441
gcagacacccaauaaguau

SEQ ID NO: 927539 - RNA, 19 nt, Artificial Sequence
  Description of Artificial Sequence: Synthetic oligonucleotide
  Antisense strand to SEQ ID NO: 927538
auacuuauugggugucugc

SEQ ID NO: 927540 - RNA, 19 nt, Artificial Sequence
  Description of Artificial Sequence: Synthetic oligonucleotide
  Sense strand starting at position 121 of SEQ ID NO: 913441
ugaucaucuguuuaagauu

SEQ ID NO: 927541 - RNA, 19 nt, Artificial Sequence
  Description of Artificial Sequence: Synthetic oligonucleotide
  Antisense strand to SEQ ID NO: 927540
aaucuuaaacagaugauca

SEQ ID NO: 927542 - RNA, 19 nt, Artificial Sequence
  Description of Artificial Sequence: Synthetic oligonucleotide
  Sense strand starting at position 1182 of SEQ ID NO: 913441
acaggugguuaacuauaaa

SEQ ID NO: 927543 - RNA, 19 nt, Artificial Sequence
  Description of Artificial Sequence: Synthetic oligonucleotide
  Antisense strand to SEQ ID NO: 927542
uuuauaguuaaccaccugu

SEQ ID NO: 927544 - RNA, 19 nt, Artificial Sequence
  Description of Artificial Sequence: Synthetic oligonucleotide
  Sense strand starting at position 1179 of SEQ ID NO: 913441
uuuacaggugguuaacuau

SEQ ID NO: 927545 - RNA, 19 nt, Artificial Sequence
  Description of Artificial Sequence: Synthetic oligonucleotide
  Antisense strand to SEQ ID NO: 927544
auaguuaaccaccuguaaa

SEQ ID NO: 927546 - RNA, 19 nt, Artificial Sequence
  Description of Artificial Sequence: Synthetic oligonucleotide
  Sense strand starting at position 2005 of SEQ ID NO: 913441
ucucuuccuccaugggaaa

SEQ ID NO: 927547 - RNA, 19 nt, Artificial Sequence
  Description of Artificial Sequence: Synthetic oligonucleotide
  Antisense strand to SEQ ID NO: 927546
uuucccauggaggaagaga

SEQ ID NO: 927548 - RNA, 19 nt, Artificial Sequence
  Description of Artificial Sequence: Synthetic oligonucleotide
  Sense strand starting at position 1111 of SEQ ID NO: 913441
gacaacagugucuagcaua

SEQ ID NO: 927549 - RNA, 19 nt, Artificial Sequence
  Description of Artificial Sequence: Synthetic oligonucleotide
  Antisense strand to SEQ ID NO: 927548
uaugcuagacacuguuguc

SEQ ID NO: 927550 - RNA, 19 nt, Artificial Sequence
  Description of Artificial Sequence: Synthetic oligonucleotide
  Sense strand starting at position 1748 of SEQ ID NO: 913441
ggacuaucaggccgggaga

SEQ ID NO: 927551 - RNA, 19 nt, Artificial Sequence
  Description of Artificial Sequence: Synthetic oligonucleotide
  Antisense strand to SEQ ID NO: 927550
ucucccggccugauagucc

SEQ ID NO: 927552 - RNA, 19 nt, Artificial Sequence
  Description of Artificial Sequence: Synthetic oligonucleotide
  Sense strand starting at position 28 of SEQ ID NO: 913441
gagacaagccuaugaguca

SEQ ID NO: 927553 - RNA, 19 nt, Artificial Sequence
  Description of Artificial Sequence: Synthetic oligonucleotide
  Antisense strand to SEQ ID NO: 927552
ugacucauaggcuugucuc

SEQ ID NO: 927554 - RNA, 19 nt, Artificial Sequence
  Description of Artificial Sequence: Synthetic oligonucleotide
  Sense strand starting at position 3380 of SEQ ID NO: 913441
cuggcugauaaaugugaaa

SEQ ID NO: 927555 - RNA, 19 nt, Artificial Sequence
  Description of Artificial Sequence: Synthetic oligonucleotide
  Antisense strand to SEQ ID NO: 927554
uuucacauuuaucagccag

SEQ ID NO: 927556 - RNA, 19 nt, Artificial Sequence
  Description of Artificial Sequence: Synthetic oligonucleotide
  Sense strand starting at position 730 of SEQ ID NO: 913441
uguggagacugcucaagaa

SEQ ID NO: 927557 - RNA, 19 nt, Artificial Sequence
  Description of Artificial Sequence: Synthetic oligonucleotide
  Antisense strand to SEQ ID NO: 927556
uucuugagcagucuccaca

SEQ ID NO: 927558 - RNA, 19 nt, Artificial Sequence
  Description of Artificial Sequence: Synthetic oligonucleotide
  Sense strand starting at position 31 of SEQ ID NO: 913441
acaagccuaugagucauaa

SEQ ID NO: 927559 - RNA, 19 nt, Artificial Sequence
  Description of Artificial Sequence: Synthetic oligonucleotide
  Antisense strand to SEQ ID NO: 927558
uuaugacucauaggcuugu

SEQ ID NO: 927560 - RNA, 19 nt, Artificial Sequence
  Description of Artificial Sequence: Synthetic oligonucleotide
  Sense strand starting at position 671 of SEQ ID NO: 913441
aauacuguggaaugaguuu

SEQ ID NO: 927561 - RNA, 19 nt, Artificial Sequence
  Description of Artificial Sequence: Synthetic oligonucleotide
  Antisense strand to SEQ ID NO: 927560
aaacucauuccacaguauu

SEQ ID NO: 927562 - RNA, 19 nt, Artificial Sequence
  Description of Artificial Sequence: Synthetic oligonucleotide
  Sense strand starting at position 120 of SEQ ID NO: 913441
cugaucaucuguuuaagau

SEQ ID NO: 927563 - RNA, 19 nt, Artificial Sequence
  Description of Artificial Sequence: Synthetic oligonucleotide
  Antisense strand to SEQ ID NO: 927562
aucuuaaacagaugaucag

SEQ ID NO: 927564 - RNA, 19 nt, Artificial Sequence
  Description of Artificial Sequence: Synthetic oligonucleotide
  Sense strand starting at position 3466 of SEQ ID NO: 913441
accaccuuguaagugaauu

SEQ ID NO: 927565 - RNA, 19 nt, Artificial Sequence
  Description of Artificial Sequence: Synthetic oligonucleotide
  Antisense strand to SEQ ID NO: 927564
aauucacuuacaagguggu

SEQ ID NO: 927566 - RNA, 19 nt, Artificial Sequence
  Description of Artificial Sequence: Synthetic oligonucleotide
  Sense strand starting at position 118 of SEQ ID NO: 913441
cccugaucaucuguuuaag

SEQ ID NO: 927567 - RNA, 19 nt, Artificial Sequence
  Description of Artificial Sequence: Synthetic oligonucleotide
  Antisense strand to SEQ ID NO: 927566
cuuaaacagaugaucaggg

SEQ ID NO: 927568 - RNA, 19 nt, Artificial Sequence
  Description of Artificial Sequence: Synthetic oligonucleotide
  Sense strand starting at position 3845 of SEQ ID NO: 913441
gugagaauguuauuguauu

SEQ ID NO: 927569 - RNA, 19 nt, Artificial Sequence
  Description of Artificial Sequence: Synthetic oligonucleotide
  Antisense strand to SEQ ID NO: 927568
aauacaauaacauucucac

SEQ ID NO: 927570 - RNA, 19 nt, Artificial Sequence
  Description of Artificial Sequence: Synthetic oligonucleotide
  Sense strand starting at position 2413 of SEQ ID NO: 913441
gucuuauauuccucaucug

SEQ ID NO: 927571 - RNA, 19 nt, Artificial Sequence
  Description of Artificial Sequence: Synthetic oligonucleotide
  Antisense strand to SEQ ID NO: 927570
cagaugaggaauauaagac

SEQ ID NO: 927572 - RNA, 19 nt, Artificial Sequence
  Description of Artificial Sequence: Synthetic oligonucleotide
  Sense strand starting at position 3286 of SEQ ID NO: 913441
ggcagauaggccuguaaac

SEQ ID NO: 927573 - RNA, 19 nt, Artificial Sequence
  Description of Artificial Sequence: Synthetic oligonucleotide
  Antisense strand to SEQ ID NO: 927572
guuuacaggccuaucugcc

SEQ ID NO: 927574 - RNA, 19 nt, Artificial Sequence
  Description of Artificial Sequence: Synthetic oligonucleotide
  Sense strand starting at position 3911 of SEQ ID NO: 913441
ucuuccaagugucuagauu

SEQ ID NO: 927575 - RNA, 19 nt, Artificial Sequence
  Description of Artificial Sequence: Synthetic oligonucleotide
  Antisense strand to SEQ ID NO: 927574
aaucuagacacuuggaaga

SEQ ID NO: 927576 - RNA, 19 nt, Artificial Sequence
  Description of Artificial Sequence: Synthetic oligonucleotide
  Sense strand starting at position 3461 of SEQ ID NO: 913441
ugguaaccaccuuguaagu

SEQ ID NO: 927577 - RNA, 19 nt, Artificial Sequence
  Description of Artificial Sequence: Synthetic oligonucleotide
  Antisense strand to SEQ ID NO: 927576
acuuacaaggugguuacca

SEQ ID NO: 927578 - RNA, 19 nt, Artificial Sequence
  Description of Artificial Sequence: Synthetic oligonucleotide
  Sense strand starting at position 2051 of SEQ ID NO: 913441
guugaccuuugcucacuaa

SEQ ID NO: 927579 - RNA, 19 nt, Artificial Sequence
  Description of Artificial Sequence: Synthetic oligonucleotide
  Antisense strand to SEQ ID NO: 927578
uuagugagcaaaggucaac

SEQ ID NO: 927580 - RNA, 19 nt, Artificial Sequence
  Description of Artificial Sequence: Synthetic oligonucleotide
  Sense strand starting at position 2050 of SEQ ID NO: 913441
gguugaccuuugcucacua

SEQ ID NO: 927581 - RNA, 19 nt, Artificial Sequence
  Description of Artificial Sequence: Synthetic oligonucleotide
  Antisense strand to SEQ ID NO: 927580
uagugagcaaaggucaacc

SEQ ID NO: 927582 - RNA, 19 nt, Artificial Sequence
  Description of Artificial Sequence: Synthetic oligonucleotide
  Sense strand starting at position 55 of SEQ ID NO: 913441
cauuaugcugugggcaaau

SEQ ID NO: 927583 - RNA, 19 nt, Artificial Sequence
  Description of Artificial Sequence: Synthetic oligonucleotide
  Antisense strand to SEQ ID NO: 927582
auuugcccacagcauaaug

SEQ ID NO: 927584 - RNA, 19 nt, Artificial Sequence
  Description of Artificial Sequence: Synthetic oligonucleotide
  Sense strand starting at position 605 of SEQ ID NO: 913441
guuuauuccguguaccuag

SEQ ID NO: 927585 - RNA, 19 nt, Artificial Sequence
  Description of Artificial Sequence: Synthetic oligonucleotide
  Antisense strand to SEQ ID NO: 927584
cuagguacacggaauaaac

SEQ ID NO: 927586 - RNA, 19 nt, Artificial Sequence
  Description of Artificial Sequence: Synthetic oligonucleotide
  Sense strand starting at position 3252 of SEQ ID NO: 913441
aguucuugucucuguggaa

SEQ ID NO: 927587 - RNA, 19 nt, Artificial Sequence
  Description of Artificial Sequence: Synthetic oligonucleotide
  Antisense strand to SEQ ID NO: 927586
uuccacagagacaagaacu

SEQ ID NO: 927588 - RNA, 19 nt, Artificial Sequence
  Description of Artificial Sequence: Synthetic oligonucleotide
  Sense strand starting at position 3929 of SEQ ID NO: 913441
ucauaugucuccguugaau

SEQ ID NO: 927589 - RNA, 19 nt, Artificial Sequence
  Description of Artificial Sequence: Synthetic oligonucleotide
  Antisense strand to SEQ ID NO: 927588
auucaacggagacauauga

SEQ ID NO: 927590 - RNA, 19 nt, Artificial Sequence
  Description of Artificial Sequence: Synthetic oligonucleotide
  Sense strand starting at position 3931 of SEQ ID NO: 913441
auaugucuccguugaaucu

SEQ ID NO: 927591 - RNA, 19 nt, Artificial Sequence
  Description of Artificial Sequence: Synthetic oligonucleotide
  Antisense strand to SEQ ID NO: 927590
agauucaacggagacauau

SEQ ID NO: 927592 - RNA, 19 nt, Artificial Sequence
  Description of Artificial Sequence: Synthetic oligonucleotide
  Sense strand starting at position 53 of SEQ ID NO: 913441
cucauuaugcugugggcaa

SEQ ID NO: 927593 - RNA, 19 nt, Artificial Sequence
  Description of Artificial Sequence: Synthetic oligonucleotide
  Antisense strand to SEQ ID NO: 927592
uugcccacagcauaaugag

SEQ ID NO: 927594 - RNA, 19 nt, Artificial Sequence
  Description of Artificial Sequence: Synthetic oligonucleotide
  Sense strand starting at position 2403 of SEQ ID NO: 913441
cucagcuucugucuuauau

SEQ ID NO: 927595 - RNA, 19 nt, Artificial Sequence
  Description of Artificial Sequence: Synthetic oligonucleotide
  Antisense strand to SEQ ID NO: 927594
auauaagacagaagcugag

SEQ ID NO: 927596 - RNA, 19 nt, Artificial Sequence
  Description of Artificial Sequence: Synthetic oligonucleotide
  Sense strand starting at position 76 of SEQ ID NO: 913441
caguguguuucuccucaca

SEQ ID NO: 927597 - RNA, 19 nt, Artificial Sequence
  Description of Artificial Sequence: Synthetic oligonucleotide
  Antisense strand to SEQ ID NO: 927596
ugugaggagaaacacacug

SEQ ID NO: 927598 - RNA, 19 nt, Artificial Sequence
  Description of Artificial Sequence: Synthetic oligonucleotide
  Sense strand starting at position 1485 of SEQ ID NO: 913441
uugucaggcuaguuucgaa

SEQ ID NO: 927599 - RNA, 19 nt, Artificial Sequence
  Description of Artificial Sequence: Synthetic oligonucleotide
  Antisense strand to SEQ ID NO: 927598
uucgaaacuagccugacaa

SEQ ID NO: 927600 - RNA, 19 nt, Artificial Sequence
  Description of Artificial Sequence: Synthetic oligonucleotide
  Sense strand starting at position 2392 of SEQ ID NO: 913441
gcugcaaauuacucagcuu

SEQ ID NO: 927601 - RNA, 19 nt, Artificial Sequence
  Description of Artificial Sequence: Synthetic oligonucleotide
  Antisense strand to SEQ ID NO: 927600
aagcugaguaauuugcagc

SEQ ID NO: 927602 - RNA, 19 nt, Artificial Sequence
  Description of Artificial Sequence: Synthetic oligonucleotide
  Sense strand starting at position 66 of SEQ ID NO: 913441
gggcaaaugucaguguguu

SEQ ID NO: 927603 - RNA, 19 nt, Artificial Sequence
  Description of Artificial Sequence: Synthetic oligonucleotide
  Antisense strand to SEQ ID NO: 927602
aacacacugacauuugccc

SEQ ID NO: 927604 - RNA, 19 nt, Artificial Sequence
  Description of Artificial Sequence: Synthetic oligonucleotide
  Sense strand starting at position 667 of SEQ ID NO: 913441
aaugaauacuguggaauga

SEQ ID NO: 927605 - RNA, 19 nt, Artificial Sequence
  Description of Artificial Sequence: Synthetic oligonucleotide
  Antisense strand to SEQ ID NO: 927604
ucauuccacaguauucauu

SEQ ID NO: 927606 - RNA, 19 nt, Artificial Sequence
  Description of Artificial Sequence: Synthetic oligonucleotide
  Sense strand starting at position 67 of SEQ ID NO: 913441
ggcaaaugucaguguguuu

SEQ ID NO: 927607 - RNA, 19 nt, Artificial Sequence
  Description of Artificial Sequence: Synthetic oligonucleotide
  Antisense strand to SEQ ID NO: 927606
aaacacacugacauuugcc

SEQ ID NO: 927608 - RNA, 19 nt, Artificial Sequence
  Description of Artificial Sequence: Synthetic oligonucleotide
  Sense strand starting at position 664 of SEQ ID NO: 913441
uuaaaugaauacuguggaa

SEQ ID NO: 927609 - RNA, 19 nt, Artificial Sequence
  Description of Artificial Sequence: Synthetic oligonucleotide
  Antisense strand to SEQ ID NO: 927608
uuccacaguauucauuuaa

SEQ ID NO: 927610 - RNA, 19 nt, Artificial Sequence
  Description of Artificial Sequence: Synthetic oligonucleotide
  Sense strand starting at position 29 of SEQ ID NO: 913441
agacaagccuaugagucau

SEQ ID NO: 927611 - RNA, 19 nt, Artificial Sequence
  Description of Artificial Sequence: Synthetic oligonucleotide
  Antisense strand to SEQ ID NO: 927610
augacucauaggcuugucu

SEQ ID NO: 927612 - RNA, 19 nt, Artificial Sequence
  Description of Artificial Sequence: Synthetic oligonucleotide
  Sense strand starting at position 603 of SEQ ID NO: 913441
uuguuuauuccguguaccu

SEQ ID NO: 927613 - RNA, 19 nt, Artificial Sequence
  Description of Artificial Sequence: Synthetic oligonucleotide
  Antisense strand to SEQ ID NO: 927612
agguacacggaauaaacaa

SEQ ID NO: 927614 - RNA, 19 nt, Artificial Sequence
  Description of Artificial Sequence: Synthetic oligonucleotide
  Sense strand starting at position 3376 of SEQ ID NO: 913441
ucaacuggcugauaaaugu

SEQ ID NO: 927615 - RNA, 19 nt, Artificial Sequence
  Description of Artificial Sequence: Synthetic oligonucleotide
  Antisense strand to SEQ ID NO: 927614
acauuuaucagccaguuga

SEQ ID NO: 927616 - RNA, 19 nt, Artificial Sequence
  Description of Artificial Sequence: Synthetic oligonucleotide
  Sense strand starting at position 3843 of SEQ ID NO: 913441
augugagaauguuauugua

SEQ ID NO: 927617 - RNA, 19 nt, Artificial Sequence
  Description of Artificial Sequence: Synthetic oligonucleotide
  Antisense strand to SEQ ID NO: 927616
uacaauaacauucucacau

SEQ ID NO: 927618 - RNA, 19 nt, Artificial Sequence
  Description of Artificial Sequence: Synthetic oligonucleotide
  Sense strand starting at position 1735 of SEQ ID NO: 913442
ucccuuugugcuuugucau

SEQ ID NO: 927619 - RNA, 19 nt, Artificial Sequence
  Description of Artificial Sequence: Synthetic oligonucleotide
  Antisense strand to SEQ ID NO: 927618
augacaaagcacaaaggga

SEQ ID NO: 927620 - RNA, 19 nt, Artificial Sequence
  Description of Artificial Sequence: Synthetic oligonucleotide
  Sense strand starting at position 3569 of SEQ ID NO: 913442
acugccuuccaugaacaga

SEQ ID NO: 927621 - RNA, 19 nt, Artificial Sequence
  Description of Artificial Sequence: Synthetic oligonucleotide
  Antisense strand to SEQ ID NO: 927620
ucuguucauggaaggcagu

SEQ ID NO: 927622 - RNA, 19 nt, Artificial Sequence
  Description of Artificial Sequence: Synthetic oligonucleotide
  Sense strand starting at position 3002 of SEQ ID NO: 913442
ugguaucuguaucuuauuu

SEQ ID NO: 927623 - RNA, 19 nt, Artificial Sequence
  Description of Artificial Sequence: Synthetic oligonucleotide
  Antisense strand to SEQ ID NO: 927622
aaauaagauacagauacca

SEQ ID NO: 927624 - RNA, 19 nt, Artificial Sequence
  Description of Artificial Sequence: Synthetic oligonucleotide
  Sense strand starting at position 2739 of SEQ ID NO: 913442
uucugugaagauuaaguau

SEQ ID NO: 927625 - RNA, 19 nt, Artificial Sequence
  Description of Artificial Sequence: Synthetic oligonucleotide
  Antisense strand to SEQ ID NO: 927624
auacuuaaucuucacagaa

SEQ ID NO: 927626 - RNA, 19 nt, Artificial Sequence
  Description of Artificial Sequence: Synthetic oligonucleotide
  Sense strand starting at position 3143 of SEQ ID NO: 913442
uggcacuuucgugucaagu

SEQ ID NO: 927627 - RNA, 19 nt, Artificial Sequence
  Description of Artificial Sequence: Synthetic oligonucleotide
  Antisense strand to SEQ ID NO: 927626
acuugacacgaaagugcca

SEQ ID NO: 927628 - RNA, 19 nt, Artificial Sequence
  Description of Artificial Sequence: Synthetic oligonucleotide
  Sense strand starting at position 2732 of SEQ ID NO: 913442
acaggacuucugugaagau

SEQ ID NO: 927629 - RNA, 19 nt, Artificial Sequence
  Description of Artificial Sequence: Synthetic oligonucleotide
  Antisense strand to SEQ ID NO: 927628
aucuucacagaaguccugu

SEQ ID NO: 927630 - RNA, 19 nt, Artificial Sequence
  Description of Artificial Sequence: Synthetic oligonucleotide
  Sense strand starting at position 2062 of SEQ ID NO: 913442
guaggccgccugaggaauu

SEQ ID NO: 927631 - RNA, 19 nt, Artificial Sequence
  Description of Artificial Sequence: Synthetic oligonucleotide
  Antisense strand to SEQ ID NO: 927630
aauuccucaggcggccuac

SEQ ID NO: 927632 - RNA, 19 nt, Artificial Sequence
  Description of Artificial Sequence: Synthetic oligonucleotide
  Sense strand starting at position 318 of SEQ ID NO: 913442
guuagugaccagcaagaga

SEQ ID NO: 927633 - RNA, 19 nt, Artificial Sequence
  Description of Artificial Sequence: Synthetic oligonucleotide
  Antisense strand to SEQ ID NO: 927632
ucucuugcuggucacuaac

SEQ ID NO: 927634 - RNA, 19 nt, Artificial Sequence
  Description of Artificial Sequence: Synthetic oligonucleotide
  Sense strand starting at position 2742 of SEQ ID NO: 913442
ugugaagauuaaguaugau

SEQ ID NO: 927635 - RNA, 19 nt, Artificial Sequence
  Description of Artificial Sequence: Synthetic oligonucleotide
  Antisense strand to SEQ ID NO: 927634
aucauacuuaaucuucaca

SEQ ID NO: 927636 - RNA, 19 nt, Artificial Sequence
  Description of Artificial Sequence: Synthetic oligonucleotide
  Sense strand starting at position 402 of SEQ ID NO: 913442
uaccuaccugucgaggaau

SEQ ID NO: 927637 - RNA, 19 nt, Artificial Sequence
  Description of Artificial Sequence: Synthetic oligonucleotide
  Antisense strand to SEQ ID NO: 927636
auuccucgacagguaggua

SEQ ID NO: 927638 - RNA, 19 nt, Artificial Sequence
  Description of Artificial Sequence: Synthetic oligonucleotide
  Sense strand starting at position 2745 of SEQ ID NO: 913442
gaagauuaaguaugauguc

SEQ ID NO: 927639 - RNA, 19 nt, Artificial Sequence
  Description of Artificial Sequence: Synthetic oligonucleotide
  Antisense strand to SEQ ID NO: 927638
gacaucauacuuaaucuuc

SEQ ID NO: 927640 - RNA, 19 nt, Artificial Sequence
  Description of Artificial Sequence: Synthetic oligonucleotide
  Sense strand starting at position 3426 of SEQ ID NO: 913442
uuggaauuaccuggaaugu

SEQ ID NO: 927641 - RNA, 19 nt, Artificial Sequence
  Description of Artificial Sequence: Synthetic oligonucleotide
  Antisense strand to SEQ ID NO: 927640
acauuccagguaauuccaa

SEQ ID NO: 927642 - RNA, 19 nt, Artificial Sequence
  Description of Artificial Sequence: Synthetic oligonucleotide
  Sense strand starting at position 3493 of SEQ ID NO: 913442
guugaucuggguuacaauc

SEQ ID NO: 927643 - RNA, 19 nt, Artificial Sequence
  Description of Artificial Sequence: Synthetic oligonucleotide
  Antisense strand to SEQ ID NO: 927642
gauuguaacccagaucaac

SEQ ID NO: 927644 - RNA, 19 nt, Artificial Sequence
  Description of Artificial Sequence: Synthetic oligonucleotide
  Sense strand starting at position 3350 of SEQ ID NO: 913442
gcaugaaagcaguaaucac

SEQ ID NO: 927645 - RNA, 19 nt, Artificial Sequence
  Description of Artificial Sequence: Synthetic oligonucleotide
  Antisense strand to SEQ ID NO: 927644
gugauuacugcuuucaugc

SEQ ID NO: 927646 - RNA, 19 nt, Artificial Sequence
  Description of Artificial Sequence: Synthetic oligonucleotide
  Sense strand starting at position 314 of SEQ ID NO: 913442
aaagguuagugaccagcaa

SEQ ID NO: 927647 - RNA, 19 nt, Artificial Sequence
  Description of Artificial Sequence: Synthetic oligonucleotide
  Antisense strand to SEQ ID NO: 927646
uugcuggucacuaaccuuu

SEQ ID NO: 927648 - RNA, 19 nt, Artificial Sequence
  Description of Artificial Sequence: Synthetic oligonucleotide
  Sense strand starting at position 2791 of SEQ ID NO: 913442
guuagcuaugauuaucauu

SEQ ID NO: 927649 - RNA, 19 nt, Artificial Sequence
  Description of Artificial Sequence: Synthetic oligonucleotide
  Antisense strand to SEQ ID NO: 927648
aaugauaaucauagcuaac

SEQ ID NO: 927650 - RNA, 19 nt, Artificial Sequence
  Description of Artificial Sequence: Synthetic oligonucleotide
  Sense strand starting at position 3229 of SEQ ID NO: 913442
uacuaucaagucgauugua

SEQ ID NO: 927651 - RNA, 19 nt, Artificial Sequence
  Description of Artificial Sequence: Synthetic oligonucleotide
  Antisense strand to SEQ ID NO: 927650
uacaaucgacuugauagua

SEQ ID NO: 927652 - RNA, 19 nt, Artificial Sequence
  Description of Artificial Sequence: Synthetic oligonucleotide
  Sense strand starting at position 3810 of SEQ ID NO: 913442
gugauagugcuugacugga

SEQ ID NO: 927653 - RNA, 19 nt, Artificial Sequence
  Description of Artificial Sequence: Synthetic oligonucleotide
  Antisense strand to SEQ ID NO: 927652
uccagucaagcacuaucac

SEQ ID NO: 927654 - RNA, 19 nt, Artificial Sequence
  Description of Artificial Sequence: Synthetic oligonucleotide
  Sense strand starting at position 1592 of SEQ ID NO: 913442
ccagauagcacuggugaca

SEQ ID NO: 927655 - RNA, 19 nt, Artificial Sequence
  Description of Artificial Sequence: Synthetic oligonucleotide
  Antisense strand to SEQ ID NO: 927654
ugucaccagugcuaucugg

SEQ ID NO: 927656 - RNA, 19 nt, Artificial Sequence
  Description of Artificial Sequence: Synthetic oligonucleotide
  Sense strand starting at position 2498 of SEQ ID NO: 913442
aaggucacucuuggcagaa

SEQ ID NO: 927657 - RNA, 19 nt, Artificial Sequence
  Description of Artificial Sequence: Synthetic oligonucleotide
  Antisense strand to SEQ ID NO: 927656
uucugccaagagugaccuu

SEQ ID NO: 927658 - RNA, 19 nt, Artificial Sequence
  Description of Artificial Sequence: Synthetic oligonucleotide
  Sense strand starting at position 3507 of SEQ ID NO: 913442
caaucugugcauggagaca

SEQ ID NO: 927659 - RNA, 19 nt, Artificial Sequence
  Description of Artificial Sequence: Synthetic oligonucleotide
  Antisense strand to SEQ ID NO: 927658
ugucuccaugcacagauug

SEQ ID NO: 927660 - RNA, 19 nt, Artificial Sequence
  Description of Artificial Sequence: Synthetic oligonucleotide
  Sense strand starting at position 2499 of SEQ ID NO: 913442
aggucacucuuggcagaag

SEQ ID NO: 927661 - RNA, 19 nt, Artificial Sequence
  Description of Artificial Sequence: Synthetic oligonucleotide
  Antisense strand to SEQ ID NO: 927660
cuucugccaagagugaccu

SEQ ID NO: 927662 - RNA, 19 nt, Artificial Sequence
  Description of Artificial Sequence: Synthetic oligonucleotide
  Sense strand starting at position 641 of SEQ ID NO: 913442
cgugaagaucuguggagga

SEQ ID NO: 927663 - RNA, 19 nt, Artificial Sequence
  Description of Artificial Sequence: Synthetic oligonucleotide
  Antisense strand to SEQ ID NO: 927662
uccuccacagaucuucacg

SEQ ID NO: 927664 - RNA, 19 nt, Artificial Sequence
  Description of Artificial Sequence: Synthetic oligonucleotide
  Sense strand starting at position 2314 of SEQ ID NO: 913442
ucagaugaccaguguuaug

SEQ ID NO: 927665 - RNA, 19 nt, Artificial Sequence
  Description of Artificial Sequence: Synthetic oligonucleotide
  Antisense strand to SEQ ID NO: 927664
cauaacacuggucaucuga

SEQ ID NO: 927666 - RNA, 19 nt, Artificial Sequence
  Description of Artificial Sequence: Synthetic oligonucleotide
  Sense strand starting at position 3634 of SEQ ID NO: 913442
accucugugggcugggaaa

SEQ ID NO: 927667 - RNA, 19 nt, Artificial Sequence
  Description of Artificial Sequence: Synthetic oligonucleotide
  Antisense strand to SEQ ID NO: 927666
uuucccagcccacagaggu

SEQ ID NO: 927668 - RNA, 19 nt, Artificial Sequence
  Description of Artificial Sequence: Synthetic oligonucleotide
  Sense strand starting at position 3415 of SEQ ID NO: 913442
caaugugcacauuggaauu

SEQ ID NO: 927669 - RNA, 19 nt, Artificial Sequence
  Description of Artificial Sequence: Synthetic oligonucleotide
  Antisense strand to SEQ ID NO: 927668
aauuccaaugugcacauug

SEQ ID NO: 927670 - RNA, 19 nt, Artificial Sequence
  Description of Artificial Sequence: Synthetic oligonucleotide
  Sense strand starting at position 3232 of SEQ ID NO: 913442
uaucaagucgauuguaaag

SEQ ID NO: 927671 - RNA, 19 nt, Artificial Sequence
  Description of Artificial Sequence: Synthetic oligonucleotide
  Antisense strand to SEQ ID NO: 927670
cuuuacaaucgacuugaua

SEQ ID NO: 927672 - RNA, 19 nt, Artificial Sequence
  Description of Artificial Sequence: Synthetic oligonucleotide
  Sense strand starting at position 3207 of SEQ ID NO: 913442
cuguuaugaucauuaccuc

SEQ ID NO: 927673 - RNA, 19 nt, Artificial Sequence
  Description of Artificial Sequence: Synthetic oligonucleotide
  Antisense strand to SEQ ID NO: 927672
gagguaaugaucauaacag

SEQ ID NO: 927674 - RNA, 19 nt, Artificial Sequence
  Description of Artificial Sequence: Synthetic oligonucleotide
  Sense strand starting at position 3054 of SEQ ID NO: 913442
acauguguacugugagaac

SEQ ID NO: 927675 - RNA, 19 nt, Artificial Sequence
  Description of Artificial Sequence: Synthetic oligonucleotide
  Antisense strand to SEQ ID NO: 927674
guucucacaguacacaugu

SEQ ID NO: 927676 - RNA, 19 nt, Artificial Sequence
  Description of Artificial Sequence: Synthetic oligonucleotide
  Sense strand starting at position 2783 of SEQ ID NO: 913442
ugauaaacguuagcuauga

SEQ ID NO: 927677 - RNA, 19 nt, Artificial Sequence
  Description of Artificial Sequence: Synthetic oligonucleotide
  Antisense strand to SEQ ID NO: 927676
ucauagcuaacguuuauca

SEQ ID NO: 927678 - RNA, 19 nt, Artificial Sequence
  Description of Artificial Sequence: Synthetic oligonucleotide
  Sense strand starting at position 2784 of SEQ ID NO: 913442
gauaaacguuagcuaugau

SEQ ID NO: 927679 - RNA, 19 nt, Artificial Sequence
  Description of Artificial Sequence: Synthetic oligonucleotide
  Antisense strand to SEQ ID NO: 927678
aucauagcuaacguuuauc

SEQ ID NO: 927680 - RNA, 19 nt, Artificial Sequence
  Description of Artificial Sequence: Synthetic oligonucleotide
  Sense strand starting at position 3477 of SEQ ID NO: 913442
cagagaucacaaugucguu

SEQ ID NO: 927681 - RNA, 19 nt, Artificial Sequence
  Description of Artificial Sequence: Synthetic oligonucleotide
  Antisense strand to SEQ ID NO: 927680
aacgacauugugaucucug

SEQ ID NO: 927682 - RNA, 19 nt, Artificial Sequence
  Description of Artificial Sequence: Synthetic oligonucleotide
  Sense strand starting at position 2781 of SEQ ID NO: 913442
guugauaaacguuagcuau

SEQ ID NO: 927683 - RNA, 19 nt, Artificial Sequence
  Description of Artificial Sequence: Synthetic oligonucleotide
  Antisense strand to SEQ ID NO: 927682
auagcuaacguuuaucaac

SEQ ID NO: 927684 - RNA, 19 nt, Artificial Sequence
  Description of Artificial Sequence: Synthetic oligonucleotide
  Sense strand starting at position 3808 of SEQ ID NO: 913442
aagugauagugcuugacug

SEQ ID NO: 927685 - RNA, 19 nt, Artificial Sequence
  Description of Artificial Sequence: Synthetic oligonucleotide
  Antisense strand to SEQ ID NO: 927684
cagucaagcacuaucacuu

SEQ ID NO: 927686 - RNA, 19 nt, Artificial Sequence
  Description of Artificial Sequence: Synthetic oligonucleotide
  Sense strand starting at position 615 of SEQ ID NO: 913442
agcuguuagugaucuggga

SEQ ID NO: 927687 - RNA, 19 nt, Artificial Sequence
  Description of Artificial Sequence: Synthetic oligonucleotide
  Antisense strand to SEQ ID NO: 927686
ucccagaucacuaacagcu

SEQ ID NO: 927688 - RNA, 19 nt, Artificial Sequence
  Description of Artificial Sequence: Synthetic oligonucleotide
  Sense strand starting at position 2787 of SEQ ID NO: 913442
aaacguuagcuaugauuau

SEQ ID NO: 927689 - RNA, 19 nt, Artificial Sequence
  Description of Artificial Sequence: Synthetic oligonucleotide
  Antisense strand to SEQ ID NO: 927688
auaaucauagcuaacguuu

SEQ ID NO: 927690 - RNA, 19 nt, Artificial Sequence
  Description of Artificial Sequence: Synthetic oligonucleotide
  Sense strand starting at position 2938 of SEQ ID NO: 913442
gccaccauagucugauuau

SEQ ID NO: 927691 - RNA, 19 nt, Artificial Sequence
  Description of Artificial Sequence: Synthetic oligonucleotide
  Antisense strand to SEQ ID NO: 927690
auaaucagacuaugguggc

SEQ ID NO: 927692 - RNA, 19 nt, Artificial Sequence
  Description of Artificial Sequence: Synthetic oligonucleotide
  Sense strand starting at position 3241 of SEQ ID NO: 913442
gauuguaaagcaugcacau

SEQ ID NO: 927693 - RNA, 19 nt, Artificial Sequence
  Description of Artificial Sequence: Synthetic oligonucleotide
  Antisense strand to SEQ ID NO: 927692
augugcaugcuuuacaauc

SEQ ID NO: 927694 - RNA, 19 nt, Artificial Sequence
  Description of Artificial Sequence: Synthetic oligonucleotide
  Sense strand starting at position 173 of SEQ ID NO: 913442
gagguuugcuaaccaaguu

SEQ ID NO: 927695 - RNA, 19 nt, Artificial Sequence
  Description of Artificial Sequence: Synthetic oligonucleotide
  Antisense strand to SEQ ID NO: 927694
aacuugguuagcaaaccuc

SEQ ID NO: 927696 - RNA, 19 nt, Artificial Sequence
  Description of Artificial Sequence: Synthetic oligonucleotide
  Sense strand starting at position 3503 of SEQ ID NO: 913442
guuacaaucugugcaugga

SEQ ID NO: 927697 - RNA, 19 nt, Artificial Sequence
  Description of Artificial Sequence: Synthetic oligonucleotide
  Antisense strand to SEQ ID NO: 927696
uccaugcacagauuguaac

SEQ ID NO: 927698 - RNA, 19 nt, Artificial Sequence
  Description of Artificial Sequence: Synthetic oligonucleotide
  Sense strand starting at position 553 of SEQ ID NO: 913443
ccuggauaagcccaucaua

SEQ ID NO: 927699 - RNA, 19 nt, Artificial Sequence
  Description of Artificial Sequence: Synthetic oligonucleotide
  Antisense strand to SEQ ID NO: 927698
uaugaugggcuuauccagg

SEQ ID NO: 927700 - RNA, 19 nt, Artificial Sequence
  Description of Artificial Sequence: Synthetic oligonucleotide
  Sense strand starting at position 311 of SEQ ID NO: 913443
augggaguucaucaauggu

SEQ ID NO: 927701 - RNA, 19 nt, Artificial Sequence
  Description of Artificial Sequence: Synthetic oligonucleotide
  Antisense strand to SEQ ID NO: 927700
accauugaugaacucccau

SEQ ID NO: 927702 - RNA, 19 nt, Artificial Sequence
  Description of Artificial Sequence: Synthetic oligonucleotide
  Sense strand starting at position 2926 of SEQ ID NO: 913443
acguaugcuacuguguauu

SEQ ID NO: 927703 - RNA, 19 nt, Artificial Sequence
  Description of Artificial Sequence: Synthetic oligonucleotide
  Antisense strand to SEQ ID NO: 927702
aauacacaguagcauacgu

SEQ ID NO: 927704 - RNA, 19 nt, Artificial Sequence
  Description of Artificial Sequence: Synthetic oligonucleotide
  Sense strand starting at position 813 of SEQ ID NO: 913443
acugauuagauccggauaa

SEQ ID NO: 927705 - RNA, 19 nt, Artificial Sequence
  Description of Artificial Sequence: Synthetic oligonucleotide
  Antisense strand to SEQ ID NO: 927704
uuauccggaucuaaucagu

SEQ ID NO: 927706 - RNA, 19 nt, Artificial Sequence
  Description of Artificial Sequence: Synthetic oligonucleotide
  Sense strand starting at position 1518 of SEQ ID NO: 913443
ccagccauuugaguuguga

SEQ ID NO: 927707 - RNA, 19 nt, Artificial Sequence
  Description of Artificial Sequence: Synthetic oligonucleotide
  Antisense strand to SEQ ID NO: 927706
ucacaacucaaauggcugg

SEQ ID NO: 927708 - RNA, 19 nt, Artificial Sequence
  Description of Artificial Sequence: Synthetic oligonucleotide
  Sense strand starting at position 659 of SEQ ID NO: 913443
agucaagaagucuaaguug

SEQ ID NO: 927709 - RNA, 19 nt, Artificial Sequence
  Description of Artificial Sequence: Synthetic oligonucleotide
  Antisense strand to SEQ ID NO: 927708
caacuuagacuucuugacu

SEQ ID NO: 927710 - RNA, 19 nt, Artificial Sequence
  Description of Artificial Sequence: Synthetic oligonucleotide
  Sense strand starting at position 2131 of SEQ ID NO: 913443
guggcaaguguuagugaua

SEQ ID NO: 927711 - RNA, 19 nt, Artificial Sequence
  Description of Artificial Sequence: Synthetic oligonucleotide
  Antisense strand to SEQ ID NO: 927710
uaucacuaacacuugccac

SEQ ID NO: 927712 - RNA, 19 nt, Artificial Sequence
  Description of Artificial Sequence: Synthetic oligonucleotide
  Sense strand starting at position 806 of SEQ ID NO: 913443
gucagacacugauuagauc

SEQ ID NO: 927713 - RNA, 19 nt, Artificial Sequence
  Description of Artificial Sequence: Synthetic oligonucleotide
  Antisense strand to SEQ ID NO: 927712
gaucuaaucagugucugac

SEQ ID NO: 927714 - RNA, 19 nt, Artificial Sequence
  Description of Artificial Sequence: Synthetic oligonucleotide
  Sense strand starting at position 2316 of SEQ ID NO: 913443
ggguguaguauggauugga

SEQ ID NO: 927715 - RNA, 19 nt, Artificial Sequence
  Description of Artificial Sequence: Synthetic oligonucleotide
  Antisense strand to SEQ ID NO: 927714
uccaauccauacuacaccc

SEQ ID NO: 927716 - RNA, 19 nt, Artificial Sequence
  Description of Artificial Sequence: Synthetic oligonucleotide
  Sense strand starting at position 293 of SEQ ID NO: 913443
cuuaguuugggucauagga

SEQ ID NO: 927717 - RNA, 19 nt, Artificial Sequence
  Description of Artificial Sequence: Synthetic oligonucleotide
  Antisense strand to SEQ ID NO: 927716
uccuaugacccaaacuaag

SEQ ID NO: 927718 - RNA, 19 nt, Artificial Sequence
  Description of Artificial Sequence: Synthetic oligonucleotide
  Sense strand starting at position 679 of SEQ ID NO: 913443
ggacuaucuguaugaccaa

SEQ ID NO: 927719 - RNA, 19 nt, Artificial Sequence
  Description of Artificial Sequence: Synthetic oligonucleotide
  Antisense strand to SEQ ID NO: 927718
uuggucauacagauagucc

SEQ ID NO: 927720 - RNA, 19 nt, Artificial Sequence
  Description of Artificial Sequence: Synthetic oligonucleotide
  Sense strand starting at position 3973 of SEQ ID NO: 913443
aauuccauuguuuggagaa

SEQ ID NO: 927721 - RNA, 19 nt, Artificial Sequence
  Description of Artificial Sequence: Synthetic oligonucleotide
  Antisense strand to SEQ ID NO: 927720
uucuccaaacaauggaauu

SEQ ID NO: 927722 - RNA, 19 nt, Artificial Sequence
  Description of Artificial Sequence: Synthetic oligonucleotide
  Sense strand starting at position 3972 of SEQ ID NO: 913443
gaauuccauuguuuggaga

SEQ ID NO: 927723 - RNA, 19 nt, Artificial Sequence
  Description of Artificial Sequence: Synthetic oligonucleotide
  Antisense strand to SEQ ID NO: 927722
ucuccaaacaauggaauuc

SEQ ID NO: 927724 - RNA, 19 nt, Artificial Sequence
  Description of Artificial Sequence: Synthetic oligonucleotide
  Sense strand starting at position 1368 of SEQ ID NO: 913443
agcaguuaacaaggagauu

SEQ ID NO: 927725 - RNA, 19 nt, Artificial Sequence
  Description of Artificial Sequence: Synthetic oligonucleotide
  Antisense strand to SEQ ID NO: 927724
aaucuccuuguuaacugcu

SEQ ID NO: 927726 - RNA, 19 nt, Artificial Sequence
  Description of Artificial Sequence: Synthetic oligonucleotide
  Sense strand starting at position 2675 of SEQ ID NO: 913443
ugaguagcugcgccgaaua

SEQ ID NO: 927727 - RNA, 19 nt, Artificial Sequence
  Description of Artificial Sequence: Synthetic oligonucleotide
  Antisense strand to SEQ ID NO: 927726
uauucggcgcagcuacuca

SEQ ID NO: 927728 - RNA, 19 nt, Artificial Sequence
  Description of Artificial Sequence: Synthetic oligonucleotide
  Sense strand starting at position 544 of SEQ ID NO: 913443
ggcuuaauaccuggauaag

SEQ ID NO: 927729 - RNA, 19 nt, Artificial Sequence
  Description of Artificial Sequence: Synthetic oligonucleotide
  Antisense strand to SEQ ID NO: 927728
cuuauccagguauuaagcc

SEQ ID NO: 927730 - RNA, 19 nt, Artificial Sequence
  Description of Artificial Sequence: Synthetic oligonucleotide
  Sense strand starting at position 2229 of SEQ ID NO: 913443
aguuuaccaucccuaggaa

SEQ ID NO: 927731 - RNA, 19 nt, Artificial Sequence
  Description of Artificial Sequence: Synthetic oligonucleotide
  Antisense strand to SEQ ID NO: 927730
uuccuagggaugguaaacu

SEQ ID NO: 927732 - RNA, 19 nt, Artificial Sequence
  Description of Artificial Sequence: Synthetic oligonucleotide
  Sense strand starting at position 3050 of SEQ ID NO: 913443
acauuauuaugggucauac

SEQ ID NO: 927733 - RNA, 19 nt, Artificial Sequence
  Description of Artificial Sequence: Synthetic oligonucleotide
  Antisense strand to SEQ ID NO: 927732
guaugacccauaauaaugu

SEQ ID NO: 927734 - RNA, 19 nt, Artificial Sequence
  Description of Artificial Sequence: Synthetic oligonucleotide
  Sense strand starting at position 301 of SEQ ID NO: 913443
gggucauaggaugggaguu

SEQ ID NO: 927735 - RNA, 19 nt, Artificial Sequence
  Description of Artificial Sequence: Synthetic oligonucleotide
  Antisense strand to SEQ ID NO: 927734
aacucccauccuaugaccc

SEQ ID NO: 927736 - RNA, 19 nt, Artificial Sequence
  Description of Artificial Sequence: Synthetic oligonucleotide
  Sense strand starting at position 2319 of SEQ ID NO: 913443
uguaguauggauuggaaac

SEQ ID NO: 927737 - RNA, 19 nt, Artificial Sequence
  Description of Artificial Sequence: Synthetic oligonucleotide
  Antisense strand to SEQ ID NO: 927736
guuuccaauccauacuaca

SEQ ID NO: 927738 - RNA, 19 nt, Artificial Sequence
  Description of Artificial Sequence: Synthetic oligonucleotide
  Sense strand starting at position 2232 of SEQ ID NO: 913443
uuaccaucccuaggaagua

SEQ ID NO: 927739 - RNA, 19 nt, Artificial Sequence
  Description of Artificial Sequence: Synthetic oligonucleotide
  Antisense strand to SEQ ID NO: 927738
uacuuccuagggaugguaa

SEQ ID NO: 927740 - RNA, 19 nt, Artificial Sequence
  Description of Artificial Sequence: Synthetic oligonucleotide
  Sense strand starting at position 699 of SEQ ID NO: 913443
auagacuguuccuuuggaa

SEQ ID NO: 927741 - RNA, 19 nt, Artificial Sequence
  Description of Artificial Sequence: Synthetic oligonucleotide
  Antisense strand to SEQ ID NO: 927740
uuccaaaggaacagucuau

SEQ ID NO: 927742 - RNA, 19 nt, Artificial Sequence
  Description of Artificial Sequence: Synthetic oligonucleotide
  Sense strand starting at position 698 of SEQ ID NO: 913443
aauagacuguuccuuugga

SEQ ID NO: 927743 - RNA, 19 nt, Artificial Sequence
  Description of Artificial Sequence: Synthetic oligonucleotide
  Antisense strand to SEQ ID NO: 927742
uccaaaggaacagucuauu

SEQ ID NO: 927744 - RNA, 19 nt, Artificial Sequence
  Description of Artificial Sequence: Synthetic oligonucleotide
  Sense strand starting at position 154 of SEQ ID NO: 913443
acuuccucugcugauugaa

SEQ ID NO: 927745 - RNA, 19 nt, Artificial Sequence
  Description of Artificial Sequence: Synthetic oligonucleotide
  Antisense strand to SEQ ID NO: 927744
uucaaucagcagaggaagu

SEQ ID NO: 927746 - RNA, 19 nt, Artificial Sequence
  Description of Artificial Sequence: Synthetic oligonucleotide
  Sense strand starting at position 545 of SEQ ID NO: 913443
gcuuaauaccuggauaagc

SEQ ID NO: 927747 - RNA, 19 nt, Artificial Sequence
  Description of Artificial Sequence: Synthetic oligonucleotide
  Antisense strand to SEQ ID NO: 927746
gcuuauccagguauuaagc

SEQ ID NO: 927748 - RNA, 19 nt, Artificial Sequence
  Description of Artificial Sequence: Synthetic oligonucleotide
  Sense strand starting at position 2221 of SEQ ID NO: 913443
guugaaucaguuuaccauc

SEQ ID NO: 927749 - RNA, 19 nt, Artificial Sequence
  Description of Artificial Sequence: Synthetic oligonucleotide
  Antisense strand to SEQ ID NO: 927748
gaugguaaacugauucaac

SEQ ID NO: 927750 - RNA, 19 nt, Artificial Sequence
  Description of Artificial Sequence: Synthetic oligonucleotide
  Sense strand starting at position 653 of SEQ ID NO: 913443
ugcuaaagucaagaagucu

SEQ ID NO: 927751 - RNA, 19 nt, Artificial Sequence
  Description of Artificial Sequence: Synthetic oligonucleotide
  Antisense strand to SEQ ID NO: 927750
agacuucuugacuuuagca

SEQ ID NO: 927752 - RNA, 19 nt, Artificial Sequence
  Description of Artificial Sequence: Synthetic oligonucleotide
  Sense strand starting at position 2980 of SEQ ID NO: 913443
acauauuucuuugaugaga

SEQ ID NO: 927753 - RNA, 19 nt, Artificial Sequence
  Description of Artificial Sequence: Synthetic oligonucleotide
  Antisense strand to SEQ ID NO: 927752
ucucaucaaagaaauaugu

SEQ ID NO: 927754 - RNA, 19 nt, Artificial Sequence
  Description of Artificial Sequence: Synthetic oligonucleotide
  Sense strand starting at position 3956 of SEQ ID NO: 913443
uauagacuguguuugagaa

SEQ ID NO: 927755 - RNA, 19 nt, Artificial Sequence
  Description of Artificial Sequence: Synthetic oligonucleotide
  Antisense strand to SEQ ID NO: 927754
uucucaaacacagucuaua

SEQ ID NO: 927756 - RNA, 19 nt, Artificial Sequence
  Description of Artificial Sequence: Synthetic oligonucleotide
  Sense strand starting at position 3957 of SEQ ID NO: 913443
auagacuguguuugagaau

SEQ ID NO: 927757 - RNA, 19 nt, Artificial Sequence
  Description of Artificial Sequence: Synthetic oligonucleotide
  Antisense strand to SEQ ID NO: 927756
auucucaaacacagucuau

SEQ ID NO: 927758 - RNA, 19 nt, Artificial Sequence
  Description of Artificial Sequence: Synthetic oligonucleotide
  Sense strand starting at position 3969 of SEQ ID NO: 913443
ugagaauuccauuguuugg

SEQ ID NO: 927759 - RNA, 19 nt, Artificial Sequence
  Description of Artificial Sequence: Synthetic oligonucleotide
  Antisense strand to SEQ ID NO: 927758
ccaaacaauggaauucuca

SEQ ID NO: 927760 - RNA, 19 nt, Artificial Sequence
  Description of Artificial Sequence: Synthetic oligonucleotide
  Sense strand starting at position 1531 of SEQ ID NO: 913443
uugugaaagucacuuaaua

SEQ ID NO: 927761 - RNA, 19 nt, Artificial Sequence
  Description of Artificial Sequence: Synthetic oligonucleotide
  Antisense strand to SEQ ID NO: 927760
uauuaagugacuuucacaa

SEQ ID NO: 927762 - RNA, 19 nt, Artificial Sequence
  Description of Artificial Sequence: Synthetic oligonucleotide
  Sense strand starting at position 1615 of SEQ ID NO: 913443
cuguaauuugcugggcacu

SEQ ID NO: 927763 - RNA, 19 nt, Artificial Sequence
  Description of Artificial Sequence: Synthetic oligonucleotide
  Antisense strand to SEQ ID NO: 927762
agugcccagcaaauuacag

SEQ ID NO: 927764 - RNA, 19 nt, Artificial Sequence
  Description of Artificial Sequence: Synthetic oligonucleotide
  Sense strand starting at position 3780 of SEQ ID NO: 913443
uuuggcucuuaacugagaa

SEQ ID NO: 927765 - RNA, 19 nt, Artificial Sequence
  Description of Artificial Sequence: Synthetic oligonucleotide
  Antisense strand to SEQ ID NO: 927764
uucucaguuaagagccaaa

SEQ ID NO: 927766 - RNA, 19 nt, Artificial Sequence
  Description of Artificial Sequence: Synthetic oligonucleotide
  Sense strand starting at position 355 of SEQ ID NO: 913443
auauguucucuccaaguca

SEQ ID NO: 927767 - RNA, 19 nt, Artificial Sequence
  Description of Artificial Sequence: Synthetic oligonucleotide
  Antisense strand to SEQ ID NO: 927766
ugacuuggagagaacauau

SEQ ID NO: 927768 - RNA, 19 nt, Artificial Sequence
  Description of Artificial Sequence: Synthetic oligonucleotide
  Sense strand starting at position 1357 of SEQ ID NO: 913443
agcugucauuuagcaguua

SEQ ID NO: 927769 - RNA, 19 nt, Artificial Sequence
  Description of Artificial Sequence: Synthetic oligonucleotide
  Antisense strand to SEQ ID NO: 927768
uaacugcuaaaugacagcu

SEQ ID NO: 927770 - RNA, 19 nt, Artificial Sequence
  Description of Artificial Sequence: Synthetic oligonucleotide
  Sense strand starting at position 607 of SEQ ID NO: 913443
ucagaugugccucaacuua

SEQ ID NO: 927771 - RNA, 19 nt, Artificial Sequence
  Description of Artificial Sequence: Synthetic oligonucleotide
  Antisense strand to SEQ ID NO: 927770
uaaguugaggcacaucuga

SEQ ID NO: 927772 - RNA, 19 nt, Artificial Sequence
  Description of Artificial Sequence: Synthetic oligonucleotide
  Sense strand starting at position 2372 of SEQ ID NO: 913443
auugauugggaguauucgu

SEQ ID NO: 927773 - RNA, 19 nt, Artificial Sequence
  Description of Artificial Sequence: Synthetic oligonucleotide
  Antisense strand to SEQ ID NO: 927772
acgaauacucccaaucaau

SEQ ID NO: 927774 - RNA, 19 nt, Artificial Sequence
  Description of Artificial Sequence: Synthetic oligonucleotide
  Sense strand starting at position 1645 of SEQ ID NO: 913443
cagcucacucuuggauaga

SEQ ID NO: 927775 - RNA, 19 nt, Artificial Sequence
  Description of Artificial Sequence: Synthetic oligonucleotide
  Antisense strand to SEQ ID NO: 927774
ucuauccaagagugagcug

SEQ ID NO: 927776 - RNA, 19 nt, Artificial Sequence
  Description of Artificial Sequence: Synthetic oligonucleotide
  Sense strand starting at position 3755 of SEQ ID NO: 913443
uguaauccagucuacgaau

SEQ ID NO: 927777 - RNA, 19 nt, Artificial Sequence
  Description of Artificial Sequence: Synthetic oligonucleotide
  Antisense strand to SEQ ID NO: 927776
auucguagacuggauuaca

SEQ ID NO: 927778 - RNA, 19 nt, Artificial Sequence
  Description of Artificial Sequence: Synthetic oligonucleotide
  Sense strand starting at position 3043 of SEQ ID NO: 913444
caaugagugagugagugau

SEQ ID NO: 927779 - RNA, 19 nt, Artificial Sequence
  Description of Artificial Sequence: Synthetic oligonucleotide
  Antisense strand to SEQ ID NO: 927778
aucacucacucacucauug

SEQ ID NO: 927780 - RNA, 19 nt, Artificial Sequence
  Description of Artificial Sequence: Synthetic oligonucleotide
  Sense strand starting at position 146 of SEQ ID NO: 913444
ccaagaccucugggaguaa

SEQ ID NO: 927781 - RNA, 19 nt, Artificial Sequence
  Description of Artificial Sequence: Synthetic oligonucleotide
  Antisense strand to SEQ ID NO: 927780
uuacucccagaggucuugg

SEQ ID NO: 927782 - RNA, 19 nt, Artificial Sequence
  Description of Artificial Sequence: Synthetic oligonucleotide
  Sense strand starting at position 3185 of SEQ ID NO: 913444
uagggaucuuggguuaaua

SEQ ID NO: 927783 - RNA, 19 nt, Artificial Sequence
  Description of Artificial Sequence: Synthetic oligonucleotide
  Antisense strand to SEQ ID NO: 927782
uauuaacccaagaucccua

SEQ ID NO: 927784 - RNA, 19 nt, Artificial Sequence
  Description of Artificial Sequence: Synthetic oligonucleotide
  Sense strand starting at position 2288 of SEQ ID NO: 913444
agagacuuguacccuacau

SEQ ID NO: 927785 - RNA, 19 nt, Artificial Sequence
  Description of Artificial Sequence: Synthetic oligonucleotide
  Antisense strand to SEQ ID NO: 927784
auguaggguacaagucucu

SEQ ID NO: 927786 - RNA, 19 nt, Artificial Sequence
  Description of Artificial Sequence: Synthetic oligonucleotide
  Sense strand starting at position 1172 of SEQ ID NO: 913444
ggaaucagcugaccacuua

SEQ ID NO: 927787 - RNA, 19 nt, Artificial Sequence
  Description of Artificial Sequence: Synthetic oligonucleotide
  Antisense strand to SEQ ID NO: 927786
uaaguggucagcugauucc

SEQ ID NO: 927788 - RNA, 19 nt, Artificial Sequence
  Description of Artificial Sequence: Synthetic oligonucleotide
  Sense strand starting at position 1360 of SEQ ID NO: 913444
acacuagagcccugagacu

SEQ ID NO: 927789 - RNA, 19 nt, Artificial Sequence
  Description of Artificial Sequence: Synthetic oligonucleotide
  Antisense strand to SEQ ID NO: 927788
agucucagggcucuagugu

SEQ ID NO: 927790 - RNA, 19 nt, Artificial Sequence
  Description of Artificial Sequence: Synthetic oligonucleotide
  Sense strand starting at position 2419 of SEQ ID NO: 913444
ccaguuuaacuguagauuc

SEQ ID NO: 927791 - RNA, 19 nt, Artificial Sequence
  Description of Artificial Sequence: Synthetic oligonucleotide
  Antisense strand to SEQ ID NO: 927790
gaaucuacaguuaaacugg

SEQ ID NO: 927792 - RNA, 19 nt, Artificial Sequence
  Description of Artificial Sequence: Synthetic oligonucleotide
  Sense strand starting at position 1025 of SEQ ID NO: 913444
uguguuugagcugaggaaa

SEQ ID NO: 927793 - RNA, 19 nt, Artificial Sequence
  Description of Artificial Sequence: Synthetic oligonucleotide
  Antisense strand to SEQ ID NO: 927792
uuuccucagcucaaacaca

SEQ ID NO: 927794 - RNA, 19 nt, Artificial Sequence
  Description of Artificial Sequence: Synthetic oligonucleotide
  Sense strand starting at position 2825 of SEQ ID NO: 913444
acgaaauguccugacccuu

SEQ ID NO: 927795 - RNA, 19 nt, Artificial Sequence
  Description of Artificial Sequence: Synthetic oligonucleotide
  Antisense strand to SEQ ID NO: 927794
aagggucaggacauuucgu

SEQ ID NO: 927796 - RNA, 19 nt, Artificial Sequence
  Description of Artificial Sequence: Synthetic oligonucleotide
  Sense strand starting at position 2679 of SEQ ID NO: 913444
uggauaucugcaggacacu

SEQ ID NO: 927797 - RNA, 19 nt, Artificial Sequence
  Description of Artificial Sequence: Synthetic oligonucleotide
  Antisense strand to SEQ ID NO: 927796
aguguccugcagauaucca

SEQ ID NO: 927798 - RNA, 19 nt, Artificial Sequence
  Description of Artificial Sequence: Synthetic oligonucleotide
  Sense strand starting at position 837 of SEQ ID NO: 913444
uccacaggcucuuugaaga

SEQ ID NO: 927799 - RNA, 19 nt, Artificial Sequence
  Description of Artificial Sequence: Synthetic oligonucleotide
  Antisense strand to SEQ ID NO: 927798
ucuucaaagagccugugga

SEQ ID NO: 927800 - RNA, 19 nt, Artificial Sequence
  Description of Artificial Sequence: Synthetic oligonucleotide
  Sense strand starting at position 258 of SEQ ID NO: 913444
ugcccuggaucucuagaaa

SEQ ID NO: 927801 - RNA, 19 nt, Artificial Sequence
  Description of Artificial Sequence: Synthetic oligonucleotide
  Antisense strand to SEQ ID NO: 927800
uuucuagagauccagggca

SEQ ID NO: 927802 - RNA, 19 nt, Artificial Sequence
  Description of Artificial Sequence: Synthetic oligonucleotide
  Sense strand starting at position 814 of SEQ ID NO: 913444
gggcccucccuauaaaguu

SEQ ID NO: 927803 - RNA, 19 nt, Artificial Sequence
  Description of Artificial Sequence: Synthetic oligonucleotide
  Antisense strand to SEQ ID NO: 927802
aacuuuauagggagggccc

SEQ ID NO: 927804 - RNA, 19 nt, Artificial Sequence
  Description of Artificial Sequence: Synthetic oligonucleotide
  Sense strand starting at position 3398 of SEQ ID NO: 913444
uguuauuacuaagugaacu

SEQ ID NO: 927805 - RNA, 19 nt, Artificial Sequence
  Description of Artificial Sequence: Synthetic oligonucleotide
  Antisense strand to SEQ ID NO: 927804
aguucacuuaguaauaaca

SEQ ID NO: 927806 - RNA, 19 nt, Artificial Sequence
  Description of Artificial Sequence: Synthetic oligonucleotide
  Sense strand starting at position 3204 of SEQ ID NO: 913444
ggugacuccuaggcugaga

SEQ ID NO: 927807 - RNA, 19 nt, Artificial Sequence
  Description of Artificial Sequence: Synthetic oligonucleotide
  Antisense strand to SEQ ID NO: 927806
ucucagccuaggagucacc

SEQ ID NO: 927808 - RNA, 19 nt, Artificial Sequence
  Description of Artificial Sequence: Synthetic oligonucleotide
  Sense strand starting at position 2888 of SEQ ID NO: 913444
ccaccuccagccugagaua

SEQ ID NO: 927809 - RNA, 19 nt, Artificial Sequence
  Description of Artificial Sequence: Synthetic oligonucleotide
  Antisense strand to SEQ ID NO: 927808
uaucucaggcuggaggugg

SEQ ID NO: 927810 - RNA, 19 nt, Artificial Sequence
  Description of Artificial Sequence: Synthetic oligonucleotide
  Sense strand starting at position 3391 of SEQ ID NO: 913444
ggcaucauguuauuacuaa

SEQ ID NO: 927811 - RNA, 19 nt, Artificial Sequence
  Description of Artificial Sequence: Synthetic oligonucleotide
  Antisense strand to SEQ ID NO: 927810
uuaguaauaacaugaugcc

SEQ ID NO: 927812 - RNA, 19 nt, Artificial Sequence
  Description of Artificial Sequence: Synthetic oligonucleotide
  Sense strand starting at position 1186 of SEQ ID NO: 913444
acuuauuccugggccauca

SEQ ID NO: 927813 - RNA, 19 nt, Artificial Sequence
  Description of Artificial Sequence: Synthetic oligonucleotide
  Antisense strand to SEQ ID NO: 927812
ugauggcccaggaauaagu

SEQ ID NO: 927814 - RNA, 19 nt, Artificial Sequence
  Description of Artificial Sequence: Synthetic oligonucleotide
  Sense strand starting at position 3916 of SEQ ID NO: 913444
ggguugcaucagggugaga

SEQ ID NO: 927815 - RNA, 19 nt, Artificial Sequence
  Description of Artificial Sequence: Synthetic oligonucleotide
  Antisense strand to SEQ ID NO: 927814
ucucacccugaugcaaccc

SEQ ID NO: 927816 - RNA, 19 nt, Artificial Sequence
  Description of Artificial Sequence: Synthetic oligonucleotide
  Sense strand starting at position 49 of SEQ ID NO: 913444
ggcuccuuucaguggaaag

SEQ ID NO: 927817 - RNA, 19 nt, Artificial Sequence
  Description of Artificial Sequence: Synthetic oligonucleotide
  Antisense strand to SEQ ID NO: 927816
cuuuccacugaaaggagcc

SEQ ID NO: 927818 - RNA, 19 nt, Artificial Sequence
  Description of Artificial Sequence: Synthetic oligonucleotide
  Sense strand starting at position 1457 of SEQ ID NO: 913444
uccuucuuugcagaagcua

SEQ ID NO: 927819 - RNA, 19 nt, Artificial Sequence
  Description of Artificial Sequence: Synthetic oligonucleotide
  Antisense strand to SEQ ID NO: 927818
uagcuucugcaaagaagga

SEQ ID NO: 927820 - RNA, 19 nt, Artificial Sequence
  Description of Artificial Sequence: Synthetic oligonucleotide
  Sense strand starting at position 3918 of SEQ ID NO: 913444
guugcaucagggugagaca

SEQ ID NO: 927821 - RNA, 19 nt, Artificial Sequence
  Description of Artificial Sequence: Synthetic oligonucleotide
  Antisense strand to SEQ ID NO: 927820
ugucucacccugaugcaac

SEQ ID NO: 927822 - RNA, 19 nt, Artificial Sequence
  Description of Artificial Sequence: Synthetic oligonucleotide
  Sense strand starting at position 2416 of SEQ ID NO: 913444
gagccaguuuaacuguaga

SEQ ID NO: 927823 - RNA, 19 nt, Artificial Sequence
  Description of Artificial Sequence: Synthetic oligonucleotide
  Antisense strand to SEQ ID NO: 927822
ucuacaguuaaacuggcuc

SEQ ID NO: 927824 - RNA, 19 nt, Artificial Sequence
  Description of Artificial Sequence: Synthetic oligonucleotide
  Sense strand starting at position 2122 of SEQ ID NO: 913444
ccacuugaucggcaguuua

SEQ ID NO: 927825 - RNA, 19 nt, Artificial Sequence
  Description of Artificial Sequence: Synthetic oligonucleotide
  Antisense strand to SEQ ID NO: 927824
uaaacugccgaucaagugg

SEQ ID NO: 927826 - RNA, 19 nt, Artificial Sequence
  Description of Artificial Sequence: Synthetic oligonucleotide
  Sense strand starting at position 1184 of SEQ ID NO: 913444
ccacuuauuccugggccau

SEQ ID NO: 927827 - RNA, 19 nt, Artificial Sequence
  Description of Artificial Sequence: Synthetic oligonucleotide
  Antisense strand to SEQ ID NO: 927826
auggcccaggaauaagugg

SEQ ID NO: 927828 - RNA, 19 nt, Artificial Sequence
  Description of Artificial Sequence: Synthetic oligonucleotide
  Sense strand starting at position 126 of SEQ ID NO: 913444
auaccauguuguuugagua

SEQ ID NO: 927829 - RNA, 19 nt, Artificial Sequence
  Description of Artificial Sequence: Synthetic oligonucleotide
  Antisense strand to SEQ ID NO: 927828
uacucaaacaacaugguau

SEQ ID NO: 927830 - RNA, 19 nt, Artificial Sequence
  Description of Artificial Sequence: Synthetic oligonucleotide
  Sense strand starting at position 1024 of SEQ ID NO: 913444
cuguguuugagcugaggaa

SEQ ID NO: 927831 - RNA, 19 nt, Artificial Sequence
  Description of Artificial Sequence: Synthetic oligonucleotide
  Antisense strand to SEQ ID NO: 927830
uuccucagcucaaacacag

SEQ ID NO: 927832 - RNA, 19 nt, Artificial Sequence
  Description of Artificial Sequence: Synthetic oligonucleotide
  Sense strand starting at position 2214 of SEQ ID NO: 913444
ccucuaacagcgugauaga

SEQ ID NO: 927833 - RNA, 19 nt, Artificial Sequence
  Description of Artificial Sequence: Synthetic oligonucleotide
  Antisense strand to SEQ ID NO: 927832
ucuaucacgcuguuagagg

SEQ ID NO: 927834 - RNA, 19 nt, Artificial Sequence
  Description of Artificial Sequence: Synthetic oligonucleotide
  Sense strand starting at position 1101 of SEQ ID NO: 913444
gcugaagagugucccacau

SEQ ID NO: 927835 - RNA, 19 nt, Artificial Sequence
  Description of Artificial Sequence: Synthetic oligonucleotide
  Antisense strand to SEQ ID NO: 927834
augugggacacucuucagc

SEQ ID NO: 927836 - RNA, 19 nt, Artificial Sequence
  Description of Artificial Sequence: Synthetic oligonucleotide
  Sense strand starting at position 2212 of SEQ ID NO: 913444
uaccucuaacagcgugaua

SEQ ID NO: 927837 - RNA, 19 nt, Artificial Sequence
  Description of Artificial Sequence: Synthetic oligonucleotide
  Antisense strand to SEQ ID NO: 927836
uaucacgcuguuagaggua

SEQ ID NO: 927838 - RNA, 19 nt, Artificial Sequence
  Description of Artificial Sequence: Synthetic oligonucleotide
  Sense strand starting at position 1346 of SEQ ID NO: 913444
cuguguccucugcaacacu

SEQ ID NO: 927839 - RNA, 19 nt, Artificial Sequence
  Description of Artificial Sequence: Synthetic oligonucleotide
  Antisense strand to SEQ ID NO: 927838
aguguugcagaggacacag

SEQ ID NO: 927840 - RNA, 19 nt, Artificial Sequence
  Description of Artificial Sequence: Synthetic oligonucleotide
  Sense strand starting at position 2111 of SEQ ID NO: 913444
gcgagucagcuccacuuga

SEQ ID NO: 927841 - RNA, 19 nt, Artificial Sequence
  Description of Artificial Sequence: Synthetic oligonucleotide
  Antisense strand to SEQ ID NO: 927840
ucaaguggagcugacucgc

SEQ ID NO: 927842 - RNA, 19 nt, Artificial Sequence
  Description of Artificial Sequence: Synthetic oligonucleotide
  Sense strand starting at position 120 of SEQ ID NO: 913444
uuuaguauaccauguuguu

SEQ ID NO: 927843 - RNA, 19 nt, Artificial Sequence
  Description of Artificial Sequence: Synthetic oligonucleotide
  Antisense strand to SEQ ID NO: 927842
aacaacaugguauacuaaa

SEQ ID NO: 927844 - RNA, 19 nt, Artificial Sequence
  Description of Artificial Sequence: Synthetic oligonucleotide
  Sense strand starting at position 147 of SEQ ID NO: 913444
caagaccucugggaguaaa

SEQ ID NO: 927845 - RNA, 19 nt, Artificial Sequence
  Description of Artificial Sequence: Synthetic oligonucleotide
  Antisense strand to SEQ ID NO: 927844
uuuacucccagaggucuug

SEQ ID NO: 927846 - RNA, 19 nt, Artificial Sequence
  Description of Artificial Sequence: Synthetic oligonucleotide
  Sense strand starting at position 2380 of SEQ ID NO: 913444
aaugaaaucugacauugug

SEQ ID NO: 927847 - RNA, 19 nt, Artificial Sequence
  Description of Artificial Sequence: Synthetic oligonucleotide
  Antisense strand to SEQ ID NO: 927846
cacaaugucagauuucauu

SEQ ID NO: 927848 - RNA, 19 nt, Artificial Sequence
  Description of Artificial Sequence: Synthetic oligonucleotide
  Sense strand starting at position 1452 of SEQ ID NO: 913444
gccucuccuucuuugcaga

SEQ ID NO: 927849 - RNA, 19 nt, Artificial Sequence
  Description of Artificial Sequence: Synthetic oligonucleotide
  Antisense strand to SEQ ID NO: 927848
ucugcaaagaaggagaggc

SEQ ID NO: 927850 - RNA, 19 nt, Artificial Sequence
  Description of Artificial Sequence: Synthetic oligonucleotide
  Sense strand starting at position 2134 of SEQ ID NO: 913444
caguuuaaagcccguucua

SEQ ID NO: 927851 - RNA, 19 nt, Artificial Sequence
  Description of Artificial Sequence: Synthetic oligonucleotide
  Antisense strand to SEQ ID NO: 927850
uagaacgggcuuuaaacug

SEQ ID NO: 927852 - RNA, 19 nt, Artificial Sequence
  Description of Artificial Sequence: Synthetic oligonucleotide
  Sense strand starting at position 272 of SEQ ID NO: 913444
agaaauguuucucaaauug

SEQ ID NO: 927853 - RNA, 19 nt, Artificial Sequence
  Description of Artificial Sequence: Synthetic oligonucleotide
  Antisense strand to SEQ ID NO: 927852
caauuugagaaacauuucu

SEQ ID NO: 927854 - RNA, 19 nt, Artificial Sequence
  Description of Artificial Sequence: Synthetic oligonucleotide
  Sense strand starting at position 1344 of SEQ ID NO: 913444
cucuguguccucugcaaca

SEQ ID NO: 927855 - RNA, 19 nt, Artificial Sequence
  Description of Artificial Sequence: Synthetic oligonucleotide
  Antisense strand to SEQ ID NO: 927854
uguugcagaggacacagag

SEQ ID NO: 927856 - RNA, 19 nt, Artificial Sequence
  Description of Artificial Sequence: Synthetic oligonucleotide
  Sense strand starting at position 2285 of SEQ ID NO: 913444
gacagagacuuguacccua

SEQ ID NO: 927857 - RNA, 19 nt, Artificial Sequence
  Description of Artificial Sequence: Synthetic oligonucleotide
  Antisense strand to SEQ ID NO: 927856
uaggguacaagucucuguc

SEQ ID NO: 927858 - RNA, 19 nt, Artificial Sequence
  Description of Artificial Sequence: Synthetic oligonucleotide
  Sense strand starting at position 441 of SEQ ID NO: 913445
cagacagauugagugacuu

SEQ ID NO: 927859 - RNA, 19 nt, Artificial Sequence
  Description of Artificial Sequence: Synthetic oligonucleotide
  Antisense strand to SEQ ID NO: 927858
aagucacucaaucugucug

SEQ ID NO: 927860 - RNA, 19 nt, Artificial Sequence
  Description of Artificial Sequence: Synthetic oligonucleotide
  Sense strand starting at position 1294 of SEQ ID NO: 913445
agaagauucccaggccaga

SEQ ID NO: 927861 - RNA, 19 nt, Artificial Sequence
  Description of Artificial Sequence: Synthetic oligonucleotide
  Antisense strand to SEQ ID NO: 927860
ucuggccugggaaucuucu

SEQ ID NO: 927862 - RNA, 19 nt, Artificial Sequence
  Description of Artificial Sequence: Synthetic oligonucleotide
  Sense strand starting at position 3014 of SEQ ID NO: 913445
ggugaagucaaugacgacu

SEQ ID NO: 927863 - RNA, 19 nt, Artificial Sequence
  Description of Artificial Sequence: Synthetic oligonucleotide
  Antisense strand to SEQ ID NO: 927862
agucgucauugacuucacc

SEQ ID NO: 927864 - RNA, 19 nt, Artificial Sequence
  Description of Artificial Sequence: Synthetic oligonucleotide
  Sense strand starting at position 3169 of SEQ ID NO: 913445
uccauugugguggagaacu

SEQ ID NO: 927865 - RNA, 19 nt, Artificial Sequence
  Description of Artificial Sequence: Synthetic oligonucleotide
  Antisense strand to SEQ ID NO: 927864
aguucuccaccacaaugga

SEQ ID NO: 927866 - RNA, 19 nt, Artificial Sequence
  Description of Artificial Sequence: Synthetic oligonucleotide
  Sense strand starting at position 1917 of SEQ ID NO: 913445
acuccuaggccagagugau

SEQ ID NO: 927867 - RNA, 19 nt, Artificial Sequence
  Description of Artificial Sequence: Synthetic oligonucleotide
  Antisense strand to SEQ ID NO: 927866
aucacucuggccuaggagu

SEQ ID NO: 927868 - RNA, 19 nt, Artificial Sequence
  Description of Artificial Sequence: Synthetic oligonucleotide
  Sense strand starting at position 364 of SEQ ID NO: 913445
cugaguuaauccucccaag

SEQ ID NO: 927869 - RNA, 19 nt, Artificial Sequence
  Description of Artificial Sequence: Synthetic oligonucleotide
  Antisense strand to SEQ ID NO: 927868
cuugggaggauuaacucag

SEQ ID NO: 927870 - RNA, 19 nt, Artificial Sequence
  Description of Artificial Sequence: Synthetic oligonucleotide
  Sense strand starting at position 330 of SEQ ID NO: 913445
agaccaacacugugcuaaa

SEQ ID NO: 927871 - RNA, 19 nt, Artificial Sequence
  Description of Artificial Sequence: Synthetic oligonucleotide
  Antisense strand to SEQ ID NO: 927870
uuuagcacaguguuggucu

SEQ ID NO: 927872 - RNA, 19 nt, Artificial Sequence
  Description of Artificial Sequence: Synthetic oligonucleotide
  Sense strand starting at position 2362 of SEQ ID NO: 913445
ggcucacaucuguaaauuc

SEQ ID NO: 927873 - RNA, 19 nt, Artificial Sequence
  Description of Artificial Sequence: Synthetic oligonucleotide
  Antisense strand to SEQ ID NO: 927872
gaauuuacagaugugagcc

SEQ ID NO: 927874 - RNA, 19 nt, Artificial Sequence
  Description of Artificial Sequence: Synthetic oligonucleotide
  Sense strand starting at position 2946 of SEQ ID NO: 913445
ugcaaagugcuauacuaag

SEQ ID NO: 927875 - RNA, 19 nt, Artificial Sequence
  Description of Artificial Sequence: Synthetic oligonucleotide
  Antisense strand to SEQ ID NO: 927874
cuuaguauagcacuuugca

SEQ ID NO: 927876 - RNA, 19 nt, Artificial Sequence
  Description of Artificial Sequence: Synthetic oligonucleotide
  Sense strand starting at position 3304 of SEQ ID NO: 913445
aacagaugcuguccugaga

SEQ ID NO: 927877 - RNA, 19 nt, Artificial Sequence
  Description of Artificial Sequence: Synthetic oligonucleotide
  Antisense strand to SEQ ID NO: 927876
ucucaggacagcaucuguu

SEQ ID NO: 927878 - RNA, 19 nt, Artificial Sequence
  Description of Artificial Sequence: Synthetic oligonucleotide
  Sense strand starting at position 3753 of SEQ ID NO: 913445
agcuuucucccuuaggauc

SEQ ID NO: 927879 - RNA, 19 nt, Artificial Sequence
  Description of Artificial Sequence: Synthetic oligonucleotide
  Antisense strand to SEQ ID NO: 927878
gauccuaagggagaaagcu

SEQ ID NO: 927880 - RNA, 19 nt, Artificial Sequence
  Description of Artificial Sequence: Synthetic oligonucleotide
  Sense strand starting at position 1442 of SEQ ID NO: 913445
guauucucagcccauuaua

SEQ ID NO: 927881 - RNA, 19 nt, Artificial Sequence
  Description of Artificial Sequence: Synthetic oligonucleotide
  Antisense strand to SEQ ID NO: 927880
uauaaugggcugagaauac

SEQ ID NO: 927882 - RNA, 19 nt, Artificial Sequence
  Description of Artificial Sequence: Synthetic oligonucleotide
  Sense strand starting at position 2916 of SEQ ID NO: 913445
caguccuaguccucaagga

SEQ ID NO: 927883 - RNA, 19 nt, Artificial Sequence
  Description of Artificial Sequence: Synthetic oligonucleotide
  Antisense strand to SEQ ID NO: 927882
uccuugaggacuaggacug

SEQ ID NO: 927884 - RNA, 19 nt, Artificial Sequence
  Description of Artificial Sequence: Synthetic oligonucleotide
  Sense strand starting at position 1644 of SEQ ID NO: 913445
aaucaauucugggcuaggu

SEQ ID NO: 927885 - RNA, 19 nt, Artificial Sequence
  Description of Artificial Sequence: Synthetic oligonucleotide
  Antisense strand to SEQ ID NO: 927884
accuagcccagaauugauu

SEQ ID NO: 927886 - RNA, 19 nt, Artificial Sequence
  Description of Artificial Sequence: Synthetic oligonucleotide
  Sense strand starting at position 3403 of SEQ ID NO: 913445
agcaaaggccucugagauc

SEQ ID NO: 927887 - RNA, 19 nt, Artificial Sequence
  Description of Artificial Sequence: Synthetic oligonucleotide
  Antisense strand to SEQ ID NO: 927886
gaucucagaggccuuugcu

SEQ ID NO: 927888 - RNA, 19 nt, Artificial Sequence
  Description of Artificial Sequence: Synthetic oligonucleotide
  Sense strand starting at position 3975 of SEQ ID NO: 913445
aucacuuucugucucagau

SEQ ID NO: 927889 - RNA, 19 nt, Artificial Sequence
  Description of Artificial Sequence: Synthetic oligonucleotide
  Antisense strand to SEQ ID NO: 927888
aucugagacagaaagugau

SEQ ID NO: 927890 - RNA, 19 nt, Artificial Sequence
  Description of Artificial Sequence: Synthetic oligonucleotide
  Sense strand starting at position 3000 of SEQ ID NO: 913445
aauugauucugccugguga

SEQ ID NO: 927891 - RNA, 19 nt, Artificial Sequence
  Description of Artificial Sequence: Synthetic oligonucleotide
  Antisense strand to SEQ ID NO: 927890
ucaccaggcagaaucaauu

SEQ ID NO: 927892 - RNA, 19 nt, Artificial Sequence
  Description of Artificial Sequence: Synthetic oligonucleotide
  Sense strand starting at position 3162 of SEQ ID NO: 913445
ggaauaguccauuguggug

SEQ ID NO: 927893 - RNA, 19 nt, Artificial Sequence
  Description of Artificial Sequence: Synthetic oligonucleotide
  Antisense strand to SEQ ID NO: 927892
caccacaauggacuauucc

SEQ ID NO: 927894 - RNA, 19 nt, Artificial Sequence
  Description of Artificial Sequence: Synthetic oligonucleotide
  Sense strand starting at position 3168 of SEQ ID NO: 913445
guccauugugguggagaac

SEQ ID NO: 927895 - RNA, 19 nt, Artificial Sequence
  Description of Artificial Sequence: Synthetic oligonucleotide
  Antisense strand to SEQ ID NO: 927894
guucuccaccacaauggac

SEQ ID NO: 927896 - RNA, 19 nt, Artificial Sequence
  Description of Artificial Sequence: Synthetic oligonucleotide
  Sense strand starting at position 379 of SEQ ID NO: 913445
caagaauccuaugaggaag

SEQ ID NO: 927897 - RNA, 19 nt, Artificial Sequence
  Description of Artificial Sequence: Synthetic oligonucleotide
  Antisense strand to SEQ ID NO: 927896
cuuccucauaggauucuug

SEQ ID NO: 927898 - RNA, 19 nt, Artificial Sequence
  Description of Artificial Sequence: Synthetic oligonucleotide
  Sense strand starting at position 3001 of SEQ ID NO: 913445
auugauucugccuggugaa

SEQ ID NO: 927899 - RNA, 19 nt, Artificial Sequence
  Description of Artificial Sequence: Synthetic oligonucleotide
  Antisense strand to SEQ ID NO: 927898
uucaccaggcagaaucaau

SEQ ID NO: 927900 - RNA, 19 nt, Artificial Sequence
  Description of Artificial Sequence: Synthetic oligonucleotide
  Sense strand starting at position 2361 of SEQ ID NO: 913445
uggcucacaucuguaaauu

SEQ ID NO: 927901 - RNA, 19 nt, Artificial Sequence
  Description of Artificial Sequence: Synthetic oligonucleotide
  Antisense strand to SEQ ID NO: 927900
aauuuacagaugugagcca

SEQ ID NO: 927902 - RNA, 19 nt, Artificial Sequence
  Description of Artificial Sequence: Synthetic oligonucleotide
  Sense strand starting at position 358 of SEQ ID NO: 913445
uguugucugaguuaauccu

SEQ ID NO: 927903 - RNA, 19 nt, Artificial Sequence
  Description of Artificial Sequence: Synthetic oligonucleotide
  Antisense strand to SEQ ID NO: 927902
aggauuaacucagacaaca

SEQ ID NO: 927904 - RNA, 19 nt, Artificial Sequence
  Description of Artificial Sequence: Synthetic oligonucleotide
  Sense strand starting at position 447 of SEQ ID NO: 913445
gauugagugacuugcacga

SEQ ID NO: 927905 - RNA, 19 nt, Artificial Sequence
  Description of Artificial Sequence: Synthetic oligonucleotide
  Antisense strand to SEQ ID NO: 927904
ucgugcaagucacucaauc

SEQ ID NO: 927906 - RNA, 19 nt, Artificial Sequence
  Description of Artificial Sequence: Synthetic oligonucleotide
  Sense strand starting at position 3002 of SEQ ID NO: 913445
uugauucugccuggugaag

SEQ ID NO: 927907 - RNA, 19 nt, Artificial Sequence
  Description of Artificial Sequence: Synthetic oligonucleotide
  Antisense strand to SEQ ID NO: 927906
cuucaccaggcagaaucaa

SEQ ID NO: 927908 - RNA, 19 nt, Artificial Sequence
  Description of Artificial Sequence: Synthetic oligonucleotide
  Sense strand starting at position 3101 of SEQ ID NO: 913445
gcauuguaggcguagggaa

SEQ ID NO: 927909 - RNA, 19 nt, Artificial Sequence
  Description of Artificial Sequence: Synthetic oligonucleotide
  Antisense strand to SEQ ID NO: 927908
uucccuacgccuacaaugc

SEQ ID NO: 927910 - RNA, 19 nt, Artificial Sequence
  Description of Artificial Sequence: Synthetic oligonucleotide
  Sense strand starting at position 3667 of SEQ ID NO: 913445
guuccuuuguaaucucaac

SEQ ID NO: 927911 - RNA, 19 nt, Artificial Sequence
  Description of Artificial Sequence: Synthetic oligonucleotide
  Antisense strand to SEQ ID NO: 927910
guugagauuacaaaggaac

SEQ ID NO: 927912 - RNA, 19 nt, Artificial Sequence
  Description of Artificial Sequence: Synthetic oligonucleotide
  Sense strand starting at position 3286 of SEQ ID NO: 913445
gguucugcucagugacuaa

SEQ ID NO: 927913 - RNA, 19 nt, Artificial Sequence
  Description of Artificial Sequence: Synthetic oligonucleotide
  Antisense strand to SEQ ID NO: 927912
uuagucacugagcagaacc

SEQ ID NO: 927914 - RNA, 19 nt, Artificial Sequence
  Description of Artificial Sequence: Synthetic oligonucleotide
  Sense strand starting at position 2292 of SEQ ID NO: 913445
gcaugugucagugagguug

SEQ ID NO: 927915 - RNA, 19 nt, Artificial Sequence
  Description of Artificial Sequence: Synthetic oligonucleotide
  Antisense strand to SEQ ID NO: 927914
caaccucacugacacaugc

SEQ ID NO: 927916 - RNA, 19 nt, Artificial Sequence
  Description of Artificial Sequence: Synthetic oligonucleotide
  Sense strand starting at position 1483 of SEQ ID NO: 913445
ccacguaugcccuaucuuu

SEQ ID NO: 927917 - RNA, 19 nt, Artificial Sequence
  Description of Artificial Sequence: Synthetic oligonucleotide
  Antisense strand to SEQ ID NO: 927916
aaagauagggcauacgugg

SEQ ID NO: 927918 - RNA, 19 nt, Artificial Sequence
  Description of Artificial Sequence: Synthetic oligonucleotide
  Sense strand starting at position 2034 of SEQ ID NO: 913445
acagaauugugagacauca

SEQ ID NO: 927919 - RNA, 19 nt, Artificial Sequence
  Description of Artificial Sequence: Synthetic oligonucleotide
  Antisense strand to SEQ ID NO: 927918
ugaugucucacaauucugu

SEQ ID NO: 927920 - RNA, 19 nt, Artificial Sequence
  Description of Artificial Sequence: Synthetic oligonucleotide
  Sense strand starting at position 3285 of SEQ ID NO: 913445
ugguucugcucagugacua

SEQ ID NO: 927921 - RNA, 19 nt, Artificial Sequence
  Description of Artificial Sequence: Synthetic oligonucleotide
  Antisense strand to SEQ ID NO: 927920
uagucacugagcagaacca

SEQ ID NO: 927922 - RNA, 19 nt, Artificial Sequence
  Description of Artificial Sequence: Synthetic oligonucleotide
  Sense strand starting at position 3383 of SEQ ID NO: 913445
aggguuaaugccuguggca

SEQ ID NO: 927923 - RNA, 19 nt, Artificial Sequence
  Description of Artificial Sequence: Synthetic oligonucleotide
  Antisense strand to SEQ ID NO: 927922
ugccacaggcauuaacccu

SEQ ID NO: 927924 - RNA, 19 nt, Artificial Sequence
  Description of Artificial Sequence: Synthetic oligonucleotide
  Sense strand starting at position 351 of SEQ ID NO: 913445
auucauguguugucugagu

SEQ ID NO: 927925 - RNA, 19 nt, Artificial Sequence
  Description of Artificial Sequence: Synthetic oligonucleotide
  Antisense strand to SEQ ID NO: 927924
acucagacaacacaugaau

SEQ ID NO: 927926 - RNA, 19 nt, Artificial Sequence
  Description of Artificial Sequence: Synthetic oligonucleotide
  Sense strand starting at position 356 of SEQ ID NO: 913445
uguguugucugaguuaauc

SEQ ID NO: 927927 - RNA, 19 nt, Artificial Sequence
  Description of Artificial Sequence: Synthetic oligonucleotide
  Antisense strand to SEQ ID NO: 927926
gauuaacucagacaacaca

SEQ ID NO: 927928 - RNA, 19 nt, Artificial Sequence
  Description of Artificial Sequence: Synthetic oligonucleotide
  Sense strand starting at position 3385 of SEQ ID NO: 913445
gguuaaugccuguggcaca

SEQ ID NO: 927929 - RNA, 19 nt, Artificial Sequence
  Description of Artificial Sequence: Synthetic oligonucleotide
  Antisense strand to SEQ ID NO: 927928
ugugccacaggcauuaacc

SEQ ID NO: 927930 - RNA, 19 nt, Artificial Sequence
  Description of Artificial Sequence: Synthetic oligonucleotide
  Sense strand starting at position 353 of SEQ ID NO: 913445
ucauguguugucugaguua

SEQ ID NO: 927931 - RNA, 19 nt, Artificial Sequence
  Description of Artificial Sequence: Synthetic oligonucleotide
  Antisense strand to SEQ ID NO: 927930
uaacucagacaacacauga

SEQ ID NO: 927932 - RNA, 19 nt, Artificial Sequence
  Description of Artificial Sequence: Synthetic oligonucleotide
  Sense strand starting at position 546 of SEQ ID NO: 913445
uuuaucaccucucaggaga

SEQ ID NO: 927933 - RNA, 19 nt, Artificial Sequence
  Description of Artificial Sequence: Synthetic oligonucleotide
  Antisense strand to SEQ ID NO: 927932
ucuccugagaggugauaaa

SEQ ID NO: 927934 - RNA, 19 nt, Artificial Sequence
  Description of Artificial Sequence: Synthetic oligonucleotide
  Sense strand starting at position 3962 of SEQ ID NO: 913445
ggagacaucucccaucacu

SEQ ID NO: 927935 - RNA, 19 nt, Artificial Sequence
  Description of Artificial Sequence: Synthetic oligonucleotide
  Antisense strand to SEQ ID NO: 927934
agugaugggagaugucucc

SEQ ID NO: 927936 - RNA, 19 nt, Artificial Sequence
  Description of Artificial Sequence: Synthetic oligonucleotide
  Sense strand starting at position 390 of SEQ ID NO: 913445
ugaggaagguaguaucacu

SEQ ID NO: 927937 - RNA, 19 nt, Artificial Sequence
  Description of Artificial Sequence: Synthetic oligonucleotide
  Antisense strand to SEQ ID NO: 927936
agugauacuaccuuccuca

SEQ ID NO: 927938 - RNA, 19 nt, Artificial Sequence
  Description of Artificial Sequence: Synthetic oligonucleotide
  Sense strand starting at position 2900 of SEQ ID NO: 913446
ucuuuaacagaguaauggu

SEQ ID NO: 927939 - RNA, 19 nt, Artificial Sequence
  Description of Artificial Sequence: Synthetic oligonucleotide
  Antisense strand to SEQ ID NO: 927938
accauuacucuguuaaaga

SEQ ID NO: 927940 - RNA, 19 nt, Artificial Sequence
  Description of Artificial Sequence: Synthetic oligonucleotide
  Sense strand starting at position 2939 of SEQ ID NO: 913446
auaucuuugcaagaaagca

SEQ ID NO: 927941 - RNA, 19 nt, Artificial Sequence
  Description of Artificial Sequence: Synthetic oligonucleotide
  Antisense strand to SEQ ID NO: 927940
ugcuuucuugcaaagauau

SEQ ID NO: 927942 - RNA, 19 nt, Artificial Sequence
  Description of Artificial Sequence: Synthetic oligonucleotide
  Sense strand starting at position 2951 of SEQ ID NO: 913446
gaaagcaugguccacucua

SEQ ID NO: 927943 - RNA, 19 nt, Artificial Sequence
  Description of Artificial Sequence: Synthetic oligonucleotide
  Antisense strand to SEQ ID NO: 927942
uagaguggaccaugcuuuc

SEQ ID NO: 927944 - RNA, 19 nt, Artificial Sequence
  Description of Artificial Sequence: Synthetic oligonucleotide
  Sense strand starting at position 2492 of SEQ ID NO: 913446
gagcucauucuggaguaac

SEQ ID NO: 927945 - RNA, 19 nt, Artificial Sequence
  Description of Artificial Sequence: Synthetic oligonucleotide
  Antisense strand to SEQ ID NO: 927944
guuacuccagaaugagcuc

SEQ ID NO: 927946 - RNA, 19 nt, Artificial Sequence
  Description of Artificial Sequence: Synthetic oligonucleotide
  Sense strand starting at position 392 of SEQ ID NO: 913446
agagaacugccuuguagga

SEQ ID NO: 927947 - RNA, 19 nt, Artificial Sequence
  Description of Artificial Sequence: Synthetic oligonucleotide
  Antisense strand to SEQ ID NO: 927946
uccuacaaggcaguucucu

SEQ ID NO: 927948 - RNA, 19 nt, Artificial Sequence
  Description of Artificial Sequence: Synthetic oligonucleotide
  Sense strand starting at position 3146 of SEQ ID NO: 913446
cuagucucuggucauaauu

SEQ ID NO: 927949 - RNA, 19 nt, Artificial Sequence
  Description of Artificial Sequence: Synthetic oligonucleotide
  Antisense strand to SEQ ID NO: 927948
aauuaugaccagagacuag

SEQ ID NO: 927950 - RNA, 19 nt, Artificial Sequence
  Description of Artificial Sequence: Synthetic oligonucleotide
  Sense strand starting at position 2765 of SEQ ID NO: 913446
aaggccucucaggguauaa

SEQ ID NO: 927951 - RNA, 19 nt, Artificial Sequence
  Description of Artificial Sequence: Synthetic oligonucleotide
  Antisense strand to SEQ ID NO: 927950
uuauacccugagaggccuu

SEQ ID NO: 927952 - RNA, 19 nt, Artificial Sequence
  Description of Artificial Sequence: Synthetic oligonucleotide
  Sense strand starting at position 559 of SEQ ID NO: 913446
uguugagacgucuagaggu

SEQ ID NO: 927953 - RNA, 19 nt, Artificial Sequence
  Description of Artificial Sequence: Synthetic oligonucleotide
  Antisense strand to SEQ ID NO: 927952
accucuagacgucucaaca

SEQ ID NO: 927954 - RNA, 19 nt, Artificial Sequence
  Description of Artificial Sequence: Synthetic oligonucleotide
  Sense strand starting at position 3118 of SEQ ID NO: 913446
uagagcccuucuguaauga

SEQ ID NO: 927955 - RNA, 19 nt, Artificial Sequence
  Description of Artificial Sequence: Synthetic oligonucleotide
  Antisense strand to SEQ ID NO: 927954
ucauuacagaagggcucua

SEQ ID NO: 927956 - RNA, 19 nt, Artificial Sequence
  Description of Artificial Sequence: Synthetic oligonucleotide
  Sense strand starting at position 2864 of SEQ ID NO: 913446
gguuguaaacauugugaug

SEQ ID NO: 927957 - RNA, 19 nt, Artificial Sequence
  Description of Artificial Sequence: Synthetic oligonucleotide
  Antisense strand to SEQ ID NO: 927956
caucacaauguuuacaacc

SEQ ID NO: 927958 - RNA, 19 nt, Artificial Sequence
  Description of Artificial Sequence: Synthetic oligonucleotide
  Sense strand starting at position 472 of SEQ ID NO: 913446
cuuaguuacucuccucuga

SEQ ID NO: 927959 - RNA, 19 nt, Artificial Sequence
  Description of Artificial Sequence: Synthetic oligonucleotide
  Antisense strand to SEQ ID NO: 927958
ucagaggagaguaacuaag

SEQ ID NO: 927960 - RNA, 19 nt, Artificial Sequence
  Description of Artificial Sequence: Synthetic oligonucleotide
  Sense strand starting at position 3080 of SEQ ID NO: 913446
caucuuugaggguguuuau

SEQ ID NO: 927961 - RNA, 19 nt, Artificial Sequence
  Description of Artificial Sequence: Synthetic oligonucleotide
  Antisense strand to SEQ ID NO: 927960
auaaacacccucaaagaug

SEQ ID NO: 927962 - RNA, 19 nt, Artificial Sequence
  Description of Artificial Sequence: Synthetic oligonucleotide
  Sense strand starting at position 3145 of SEQ ID NO: 913446
ucuagucucuggucauaau

SEQ ID NO: 927963 - RNA, 19 nt, Artificial Sequence
  Description of Artificial Sequence: Synthetic oligonucleotide
  Antisense strand to SEQ ID NO: 927962
auuaugaccagagacuaga

SEQ ID NO: 927964 - RNA, 19 nt, Artificial Sequence
  Description of Artificial Sequence: Synthetic oligonucleotide
  Sense strand starting at position 3781 of SEQ ID NO: 913446
gcuuuagucccaggaggca

SEQ ID NO: 927965 - RNA, 19 nt, Artificial Sequence
  Description of Artificial Sequence: Synthetic oligonucleotide
  Antisense strand to SEQ ID NO: 927964
ugccuccugggacuaaagc

SEQ ID NO: 927966 - RNA, 19 nt, Artificial Sequence
  Description of Artificial Sequence: Synthetic oligonucleotide
  Sense strand starting at position 3101 of SEQ ID NO: 913446
gugugaguucagggccaua

SEQ ID NO: 927967 - RNA, 19 nt, Artificial Sequence
  Description of Artificial Sequence: Synthetic oligonucleotide
  Antisense strand to SEQ ID NO: 927966
uauggcccugaacucacac

SEQ ID NO: 927968 - RNA, 19 nt, Artificial Sequence
  Description of Artificial Sequence: Synthetic oligonucleotide
  Sense strand starting at position 2205 of SEQ ID NO: 913446
ucugccuucugcuuggaau

SEQ ID NO: 927969 - RNA, 19 nt, Artificial Sequence
  Description of Artificial Sequence: Synthetic oligonucleotide
  Antisense strand to SEQ ID NO: 927968
auuccaagcagaaggcaga

SEQ ID NO: 927970 - RNA, 19 nt, Artificial Sequence
  Description of Artificial Sequence: Synthetic oligonucleotide
  Sense strand starting at position 2206 of SEQ ID NO: 913446
cugccuucugcuuggaauc

SEQ ID NO: 927971 - RNA, 19 nt, Artificial Sequence
  Description of Artificial Sequence: Synthetic oligonucleotide
  Antisense strand to SEQ ID NO: 927970
gauuccaagcagaaggcag

SEQ ID NO: 927972 - RNA, 19 nt, Artificial Sequence
  Description of Artificial Sequence: Synthetic oligonucleotide
  Sense strand starting at position 3092 of SEQ ID NO: 913446
uguuuaugggugugaguuc

SEQ ID NO: 927973 - RNA, 19 nt, Artificial Sequence
  Description of Artificial Sequence: Synthetic oligonucleotide
  Antisense strand to SEQ ID NO: 927972
gaacucacacccauaaaca

SEQ ID NO: 927974 - RNA, 19 nt, Artificial Sequence
  Description of Artificial Sequence: Synthetic oligonucleotide
  Sense strand starting at position 3033 of SEQ ID NO: 913446
uaguucugugguuggcuaa

SEQ ID NO: 927975 - RNA, 19 nt, Artificial Sequence
  Description of Artificial Sequence: Synthetic oligonucleotide
  Antisense strand to SEQ ID NO: 927974
uuagccaaccacagaacua

SEQ ID NO: 927976 - RNA, 19 nt, Artificial Sequence
  Description of Artificial Sequence: Synthetic oligonucleotide
  Sense strand starting at position 3090 of SEQ ID NO: 913446
gguguuuaugggugugagu

SEQ ID NO: 927977 - RNA, 19 nt, Artificial Sequence
  Description of Artificial Sequence: Synthetic oligonucleotide
  Antisense strand to SEQ ID NO: 927976
acucacacccauaaacacc

SEQ ID NO: 927978 - RNA, 19 nt, Artificial Sequence
  Description of Artificial Sequence: Synthetic oligonucleotide
  Sense strand starting at position 3032 of SEQ ID NO: 913446
cuaguucugugguuggcua

SEQ ID NO: 927979 - RNA, 19 nt, Artificial Sequence
  Description of Artificial Sequence: Synthetic oligonucleotide
  Antisense strand to SEQ ID NO: 927978
uagccaaccacagaacuag

SEQ ID NO: 927980 - RNA, 19 nt, Artificial Sequence
  Description of Artificial Sequence: Synthetic oligonucleotide
  Sense strand starting at position 105 of SEQ ID NO: 913446
ccaagaugaucagguuaaa

SEQ ID NO: 927981 - RNA, 19 nt, Artificial Sequence
  Description of Artificial Sequence: Synthetic oligonucleotide
  Antisense strand to SEQ ID NO: 927980
uuuaaccugaucaucuugg

SEQ ID NO: 927982 - RNA, 19 nt, Artificial Sequence
  Description of Artificial Sequence: Synthetic oligonucleotide
  Sense strand starting at position 2490 of SEQ ID NO: 913446
aggagcucauucuggagua

SEQ ID NO: 927983 - RNA, 19 nt, Artificial Sequence
  Description of Artificial Sequence: Synthetic oligonucleotide
  Antisense strand to SEQ ID NO: 927982
uacuccagaaugagcuccu

SEQ ID NO: 927984 - RNA, 19 nt, Artificial Sequence
  Description of Artificial Sequence: Synthetic oligonucleotide
  Sense strand starting at position 2491 of SEQ ID NO: 913446
ggagcucauucuggaguaa

SEQ ID NO: 927985 - RNA, 19 nt, Artificial Sequence
  Description of Artificial Sequence: Synthetic oligonucleotide
  Antisense strand to SEQ ID NO: 927984
uuacuccagaaugagcucc

SEQ ID NO: 927986 - RNA, 19 nt, Artificial Sequence
  Description of Artificial Sequence: Synthetic oligonucleotide
  Sense strand starting at position 2352 of SEQ ID NO: 913446
gguauccauuccuagccau

SEQ ID NO: 927987 - RNA, 19 nt, Artificial Sequence
  Description of Artificial Sequence: Synthetic oligonucleotide
  Antisense strand to SEQ ID NO: 927986
auggcuaggaauggauacc

SEQ ID NO: 927988 - RNA, 19 nt, Artificial Sequence
  Description of Artificial Sequence: Synthetic oligonucleotide
  Sense strand starting at position 2867 of SEQ ID NO: 913446
uguaaacauugugaugcuu

SEQ ID NO: 927989 - RNA, 19 nt, Artificial Sequence
  Description of Artificial Sequence: Synthetic oligonucleotide
  Antisense strand to SEQ ID NO: 927988
aagcaucacaauguuuaca

SEQ ID NO: 927990 - RNA, 19 nt, Artificial Sequence
  Description of Artificial Sequence: Synthetic oligonucleotide
  Sense strand starting at position 3093 of SEQ ID NO: 913446
guuuaugggugugaguuca

SEQ ID NO: 927991 - RNA, 19 nt, Artificial Sequence
  Description of Artificial Sequence: Synthetic oligonucleotide
  Antisense strand to SEQ ID NO: 927990
ugaacucacacccauaaac

SEQ ID NO: 927992 - RNA, 19 nt, Artificial Sequence
  Description of Artificial Sequence: Synthetic oligonucleotide
  Sense strand starting at position 2242 of SEQ ID NO: 913446
cuuuguaucuuccagucuu

SEQ ID NO: 927993 - RNA, 19 nt, Artificial Sequence
  Description of Artificial Sequence: Synthetic oligonucleotide
  Antisense strand to SEQ ID NO: 927992
aagacuggaagauacaaag

SEQ ID NO: 927994 - RNA, 19 nt, Artificial Sequence
  Description of Artificial Sequence: Synthetic oligonucleotide
  Sense strand starting at position 3143 of SEQ ID NO: 913446
ccucuagucucuggucaua

SEQ ID NO: 927995 - RNA, 19 nt, Artificial Sequence
  Description of Artificial Sequence: Synthetic oligonucleotide
  Antisense strand to SEQ ID NO: 927994
uaugaccagagacuagagg

SEQ ID NO: 927996 - RNA, 19 nt, Artificial Sequence
  Description of Artificial Sequence: Synthetic oligonucleotide
  Sense strand starting at position 2866 of SEQ ID NO: 913446
uuguaaacauugugaugcu

SEQ ID NO: 927997 - RNA, 19 nt, Artificial Sequence
  Description of Artificial Sequence: Synthetic oligonucleotide
  Antisense strand to SEQ ID NO: 927996
agcaucacaauguuuacaa

SEQ ID NO: 927998 - RNA, 19 nt, Artificial Sequence
  Description of Artificial Sequence: Synthetic oligonucleotide
  Sense strand starting at position 3027 of SEQ ID NO: 913446
cuggacuaguucugugguu

SEQ ID NO: 927999 - RNA, 19 nt, Artificial Sequence
  Description of Artificial Sequence: Synthetic oligonucleotide
  Antisense strand to SEQ ID NO: 927998
aaccacagaacuaguccag

SEQ ID NO: 928000 - RNA, 19 nt, Artificial Sequence
  Description of Artificial Sequence: Synthetic oligonucleotide
  Sense strand starting at position 2623 of SEQ ID NO: 913446
gcugcuaccucuugccuua

SEQ ID NO: 928001 - RNA, 19 nt, Artificial Sequence
  Description of Artificial Sequence: Synthetic oligonucleotide
  Antisense strand to SEQ ID NO: 928000
uaaggcaagagguagcagc

SEQ ID NO: 928002 - RNA, 19 nt, Artificial Sequence
  Description of Artificial Sequence: Synthetic oligonucleotide
  Sense strand starting at position 688 of SEQ ID NO: 913447
guccuagauuagcucauuu

SEQ ID NO: 928003 - RNA, 19 nt, Artificial Sequence
  Description of Artificial Sequence: Synthetic oligonucleotide
  Antisense strand to SEQ ID NO: 928002
aaaugagcuaaucuaggac

SEQ ID NO: 928004 - RNA, 19 nt, Artificial Sequence
  Description of Artificial Sequence: Synthetic oligonucleotide
  Sense strand starting at position 2603 of SEQ ID NO: 913447
cccaaagugcuagauaaca

SEQ ID NO: 928005 - RNA, 19 nt, Artificial Sequence
  Description of Artificial Sequence: Synthetic oligonucleotide
  Antisense strand to SEQ ID NO: 928004
uguuaucuagcacuuuggg

SEQ ID NO: 928006 - RNA, 19 nt, Artificial Sequence
  Description of Artificial Sequence: Synthetic oligonucleotide
  Sense strand starting at position 2642 of SEQ ID NO: 913447
gccucuucucugucuugua

SEQ ID NO: 928007 - RNA, 19 nt, Artificial Sequence
  Description of Artificial Sequence: Synthetic oligonucleotide
  Antisense strand to SEQ ID NO: 928006
uacaagacagagaagaggc

SEQ ID NO: 928008 - RNA, 19 nt, Artificial Sequence
  Description of Artificial Sequence: Synthetic oligonucleotide
  Sense strand starting at position 3272 of SEQ ID NO: 913447
agaacaucuuuguuugaaa

SEQ ID NO: 928009 - RNA, 19 nt, Artificial Sequence
  Description of Artificial Sequence: Synthetic oligonucleotide
  Antisense strand to SEQ ID NO: 928008
uuucaaacaaagauguucu

SEQ ID NO: 928010 - RNA, 19 nt, Artificial Sequence
  Description of Artificial Sequence: Synthetic oligonucleotide
  Sense strand starting at position 755 of SEQ ID NO: 913447
aacgauuauuucccgcuga

SEQ ID NO: 928011 - RNA, 19 nt, Artificial Sequence
  Description of Artificial Sequence: Synthetic oligonucleotide
  Antisense strand to SEQ ID NO: 928010
ucagcgggaaauaaucguu

SEQ ID NO: 928012 - RNA, 19 nt, Artificial Sequence
  Description of Artificial Sequence: Synthetic oligonucleotide
  Sense strand starting at position 3567 of SEQ ID NO: 913447
ugaacucugcaguaaauau

SEQ ID NO: 928013 - RNA, 19 nt, Artificial Sequence
  Description of Artificial Sequence: Synthetic oligonucleotide
  Antisense strand to SEQ ID NO: 928012
auauuuacugcagaguuca

SEQ ID NO: 928014 - RNA, 19 nt, Artificial Sequence
  Description of Artificial Sequence: Synthetic oligonucleotide
  Sense strand starting at position 3564 of SEQ ID NO: 913447
ucaugaacucugcaguaaa

SEQ ID NO: 928015 - RNA, 19 nt, Artificial Sequence
  Description of Artificial Sequence: Synthetic oligonucleotide
  Antisense strand to SEQ ID NO: 928014
uuuacugcagaguucauga

SEQ ID NO: 928016 - RNA, 19 nt, Artificial Sequence
  Description of Artificial Sequence: Synthetic oligonucleotide
  Sense strand starting at position 3765 of SEQ ID NO: 913447
caacuaggccuuugaagga

SEQ ID NO: 928017 - RNA, 19 nt, Artificial Sequence
  Description of Artificial Sequence: Synthetic oligonucleotide
  Antisense strand to SEQ ID NO: 928016
uccuucaaaggccuaguug

SEQ ID NO: 928018 - RNA, 19 nt, Artificial Sequence
  Description of Artificial Sequence: Synthetic oligonucleotide
  Sense strand starting at position 423 of SEQ ID NO: 913447
gcccuauaaaugggauuag

SEQ ID NO: 928019 - RNA, 19 nt, Artificial Sequence
  Description of Artificial Sequence: Synthetic oligonucleotide
  Antisense strand to SEQ ID NO: 928018
cuaaucccauuuauagggc

SEQ ID NO: 928020 - RNA, 19 nt, Artificial Sequence
  Description of Artificial Sequence: Synthetic oligonucleotide
  Sense strand starting at position 3628 of SEQ ID NO: 913447
gggcaaguaaguuaacauu

SEQ ID NO: 928021 - RNA, 19 nt, Artificial Sequence
  Description of Artificial Sequence: Synthetic oligonucleotide
  Antisense strand to SEQ ID NO: 928020
aauguuaacuuacuugccc

SEQ ID NO: 928022 - RNA, 19 nt, Artificial Sequence
  Description of Artificial Sequence: Synthetic oligonucleotide
  Sense strand starting at position 3591 of SEQ ID NO: 913447
auauacaggcuuugaaacu

SEQ ID NO: 928023 - RNA, 19 nt, Artificial Sequence
  Description of Artificial Sequence: Synthetic oligonucleotide
  Antisense strand to SEQ ID NO: 928022
aguuucaaagccuguauau

SEQ ID NO: 928024 - RNA, 19 nt, Artificial Sequence
  Description of Artificial Sequence: Synthetic oligonucleotide
  Sense strand starting at position 2196 of SEQ ID NO: 913447
uucuaauaucaguauguca

SEQ ID NO: 928025 - RNA, 19 nt, Artificial Sequence
  Description of Artificial Sequence: Synthetic oligonucleotide
  Antisense strand to SEQ ID NO: 928024
ugacauacugauauuagaa

SEQ ID NO: 928026 - RNA, 19 nt, Artificial Sequence
  Description of Artificial Sequence: Synthetic oligonucleotide
  Sense strand starting at position 3541 of SEQ ID NO: 913447
cauugauggcuuuagugga

SEQ ID NO: 928027 - RNA, 19 nt, Artificial Sequence
  Description of Artificial Sequence: Synthetic oligonucleotide
  Antisense strand to SEQ ID NO: 928026
uccacuaaagccaucaaug

SEQ ID NO: 928028 - RNA, 19 nt, Artificial Sequence
  Description of Artificial Sequence: Synthetic oligonucleotide
  Sense strand starting at position 3270 of SEQ ID NO: 913447
acagaacaucuuuguuuga

SEQ ID NO: 928029 - RNA, 19 nt, Artificial Sequence
  Description of Artificial Sequence: Synthetic oligonucleotide
  Antisense strand to SEQ ID NO: 928028
ucaaacaaagauguucugu

SEQ ID NO: 928030 - RNA, 19 nt, Artificial Sequence
  Description of Artificial Sequence: Synthetic oligonucleotide
  Sense strand starting at position 3362 of SEQ ID NO: 913447
ugaaaccguuaacuacaua

SEQ ID NO: 928031 - RNA, 19 nt, Artificial Sequence
  Description of Artificial Sequence: Synthetic oligonucleotide
  Antisense strand to SEQ ID NO: 928030
uauguaguuaacgguuuca

SEQ ID NO: 928032 - RNA, 19 nt, Artificial Sequence
  Description of Artificial Sequence: Synthetic oligonucleotide
  Sense strand starting at position 3598 of SEQ ID NO: 913447
ggcuuugaaacuuacucga

SEQ ID NO: 928033 - RNA, 19 nt, Artificial Sequence
  Description of Artificial Sequence: Synthetic oligonucleotide
  Antisense strand to SEQ ID NO: 928032
ucgaguaaguuucaaagcc

SEQ ID NO: 928034 - RNA, 19 nt, Artificial Sequence
  Description of Artificial Sequence: Synthetic oligonucleotide
  Sense strand starting at position 3338 of SEQ ID NO: 913447
ccacgcuaugaugaugauu

SEQ ID NO: 928035 - RNA, 19 nt, Artificial Sequence
  Description of Artificial Sequence: Synthetic oligonucleotide
  Antisense strand to SEQ ID NO: 928034
aaucaucaucauagcgugg

SEQ ID NO: 928036 - RNA, 19 nt, Artificial Sequence
  Description of Artificial Sequence: Synthetic oligonucleotide
  Sense strand starting at position 2258 of SEQ ID NO: 913447
cauugucugguuuagaacu

SEQ ID NO: 928037 - RNA, 19 nt, Artificial Sequence
  Description of Artificial Sequence: Synthetic oligonucleotide
  Antisense strand to SEQ ID NO: 928036
aguucuaaaccagacaaug

SEQ ID NO: 928038 - RNA, 19 nt, Artificial Sequence
  Description of Artificial Sequence: Synthetic oligonucleotide
  Sense strand starting at position 3453 of SEQ ID NO: 913447
aucagauucucaccuguag

SEQ ID NO: 928039 - RNA, 19 nt, Artificial Sequence
  Description of Artificial Sequence: Synthetic oligonucleotide
  Antisense strand to SEQ ID NO: 928038
cuacaggugagaaucugau

SEQ ID NO: 928040 - RNA, 19 nt, Artificial Sequence
  Description of Artificial Sequence: Synthetic oligonucleotide
  Sense strand starting at position 3298 of SEQ ID NO: 913447
auagcauaucaaggaguuu

SEQ ID NO: 928041 - RNA, 19 nt, Artificial Sequence
  Description of Artificial Sequence: Synthetic oligonucleotide
  Antisense strand to SEQ ID NO: 928040
aaacuccuugauaugcuau

SEQ ID NO: 928042 - RNA, 19 nt, Artificial Sequence
  Description of Artificial Sequence: Synthetic oligonucleotide
  Sense strand starting at position 3334 of SEQ ID NO: 913447
gagaccacgcuaugaugau

SEQ ID NO: 928043 - RNA, 19 nt, Artificial Sequence
  Description of Artificial Sequence: Synthetic oligonucleotide
  Antisense strand to SEQ ID NO: 928042
aucaucauagcguggucuc

SEQ ID NO: 928044 - RNA, 19 nt, Artificial Sequence
  Description of Artificial Sequence: Synthetic oligonucleotide
  Sense strand starting at position 3600 of SEQ ID NO: 913447
cuuugaaacuuacucgauu

SEQ ID NO: 928045 - RNA, 19 nt, Artificial Sequence
  Description of Artificial Sequence: Synthetic oligonucleotide
  Antisense strand to SEQ ID NO: 928044
aaucgaguaaguuucaaag

SEQ ID NO: 928046 - RNA, 19 nt, Artificial Sequence
  Description of Artificial Sequence: Synthetic oligonucleotide
  Sense strand starting at position 3222 of SEQ ID NO: 913447
acugauauagucugcauag

SEQ ID NO: 928047 - RNA, 19 nt, Artificial Sequence
  Description of Artificial Sequence: Synthetic oligonucleotide
  Antisense strand to SEQ ID NO: 928046
cuaugcagacuauaucagu

SEQ ID NO: 928048 - RNA, 19 nt, Artificial Sequence
  Description of Artificial Sequence: Synthetic oligonucleotide
  Sense strand starting at position 2073 of SEQ ID NO: 913447
uaccaucuaguguggaauu

SEQ ID NO: 928049 - RNA, 19 nt, Artificial Sequence
  Description of Artificial Sequence: Synthetic oligonucleotide
  Antisense strand to SEQ ID NO: 928048
aauuccacacuagauggua

SEQ ID NO: 928050 - RNA, 19 nt, Artificial Sequence
  Description of Artificial Sequence: Synthetic oligonucleotide
  Sense strand starting at position 3224 of SEQ ID NO: 913447
ugauauagucugcauaguu

SEQ ID NO: 928051 - RNA, 19 nt, Artificial Sequence
  Description of Artificial Sequence: Synthetic oligonucleotide
  Antisense strand to SEQ ID NO: 928050
aacuaugcagacuauauca

SEQ ID NO: 928052 - RNA, 19 nt, Artificial Sequence
  Description of Artificial Sequence: Synthetic oligonucleotide
  Sense strand starting at position 2160 of SEQ ID NO: 913447
auguaucacucauugucaa

SEQ ID NO: 928053 - RNA, 19 nt, Artificial Sequence
  Description of Artificial Sequence: Synthetic oligonucleotide
  Antisense strand to SEQ ID NO: 928052
uugacaaugagugauacau

SEQ ID NO: 928054 - RNA, 19 nt, Artificial Sequence
  Description of Artificial Sequence: Synthetic oligonucleotide
  Sense strand starting at position 2198 of SEQ ID NO: 913447
cuaauaucaguaugucauu

SEQ ID NO: 928055 - RNA, 19 nt, Artificial Sequence
  Description of Artificial Sequence: Synthetic oligonucleotide
  Antisense strand to SEQ ID NO: 928054
aaugacauacugauauuag

SEQ ID NO: 928056 - RNA, 19 nt, Artificial Sequence
  Description of Artificial Sequence: Synthetic oligonucleotide
  Sense strand starting at position 2225 of SEQ ID NO: 913447
guaaacgacuggcuaaauu

SEQ ID NO: 928057 - RNA, 19 nt, Artificial Sequence
  Description of Artificial Sequence: Synthetic oligonucleotide
  Antisense strand to SEQ ID NO: 928056
aauuuagccagucguuuac

SEQ ID NO: 928058 - RNA, 19 nt, Artificial Sequence
  Description of Artificial Sequence: Synthetic oligonucleotide
  Sense strand starting at position 2223 of SEQ ID NO: 913447
cuguaaacgacuggcuaaa

SEQ ID NO: 928059 - RNA, 19 nt, Artificial Sequence
  Description of Artificial Sequence: Synthetic oligonucleotide
  Antisense strand to SEQ ID NO: 928058
uuuagccagucguuuacag

SEQ ID NO: 928060 - RNA, 19 nt, Artificial Sequence
  Description of Artificial Sequence: Synthetic oligonucleotide
  Sense strand starting at position 2721 of SEQ ID NO: 913447
guagcauuaucacuacuau

SEQ ID NO: 928061 - RNA, 19 nt, Artificial Sequence
  Description of Artificial Sequence: Synthetic oligonucleotide
  Antisense strand to SEQ ID NO: 928060
auaguagugauaaugcuac

SEQ ID NO: 928062 - RNA, 19 nt, Artificial Sequence
  Description of Artificial Sequence: Synthetic oligonucleotide
  Sense strand starting at position 3821 of SEQ ID NO: 913447
auuguuuaaagaugucagu

SEQ ID NO: 928063 - RNA, 19 nt, Artificial Sequence
  Description of Artificial Sequence: Synthetic oligonucleotide
  Antisense strand to SEQ ID NO: 928062
acugacaucuuuaaacaau

SEQ ID NO: 928064 - RNA, 19 nt, Artificial Sequence
  Description of Artificial Sequence: Synthetic oligonucleotide
  Sense strand starting at position 94 of SEQ ID NO: 913447
aacgguaaguucucccaua

SEQ ID NO: 928065 - RNA, 19 nt, Artificial Sequence
  Description of Artificial Sequence: Synthetic oligonucleotide
  Antisense strand to SEQ ID NO: 928064
uaugggagaacuuaccguu

SEQ ID NO: 928066 - RNA, 19 nt, Artificial Sequence
  Description of Artificial Sequence: Synthetic oligonucleotide
  Sense strand starting at position 2161 of SEQ ID NO: 913447
uguaucacucauugucaac

SEQ ID NO: 928067 - RNA, 19 nt, Artificial Sequence
  Description of Artificial Sequence: Synthetic oligonucleotide
  Antisense strand to SEQ ID NO: 928066
guugacaaugagugauaca

SEQ ID NO: 928068 - RNA, 19 nt, Artificial Sequence
  Description of Artificial Sequence: Synthetic oligonucleotide
  Sense strand starting at position 1941 of SEQ ID NO: 913447
agagcaggcugccuaauaa

SEQ ID NO: 928069 - RNA, 19 nt, Artificial Sequence
  Description of Artificial Sequence: Synthetic oligonucleotide
  Antisense strand to SEQ ID NO: 928068
uuauuaggcagccugcucu

SEQ ID NO: 928070 - RNA, 19 nt, Artificial Sequence
  Description of Artificial Sequence: Synthetic oligonucleotide
  Sense strand starting at position 2044 of SEQ ID NO: 913447
cagaaugugaggcguuaag

SEQ ID NO: 928071 - RNA, 19 nt, Artificial Sequence
  Description of Artificial Sequence: Synthetic oligonucleotide
  Antisense strand to SEQ ID NO: 928070
cuuaacgccucacauucug

SEQ ID NO: 928072 - RNA, 19 nt, Artificial Sequence
  Description of Artificial Sequence: Synthetic oligonucleotide
  Sense strand starting at position 95 of SEQ ID NO: 913447
acgguaaguucucccauag

SEQ ID NO: 928073 - RNA, 19 nt, Artificial Sequence
  Description of Artificial Sequence: Synthetic oligonucleotide
  Antisense strand to SEQ ID NO: 928072
cuaugggagaacuuaccgu

SEQ ID NO: 928074 - RNA, 19 nt, Artificial Sequence
  Description of Artificial Sequence: Synthetic oligonucleotide
  Sense strand starting at position 819 of SEQ ID NO: 913447
gugagagggucgccaagau

SEQ ID NO: 928075 - RNA, 19 nt, Artificial Sequence
  Description of Artificial Sequence: Synthetic oligonucleotide
  Antisense strand to SEQ ID NO: 928074
aucuuggcgacccucucac

SEQ ID NO: 928076 - RNA, 19 nt, Artificial Sequence
  Description of Artificial Sequence: Synthetic oligonucleotide
  Sense strand starting at position 2222 of SEQ ID NO: 913447
ucuguaaacgacuggcuaa

SEQ ID NO: 928077 - RNA, 19 nt, Artificial Sequence
  Description of Artificial Sequence: Synthetic oligonucleotide
  Antisense strand to SEQ ID NO: 928076
uuagccagucguuuacaga

SEQ ID NO: 928078 - RNA, 19 nt, Artificial Sequence
  Description of Artificial Sequence: Synthetic oligonucleotide
  Sense strand starting at position 2256 of SEQ ID NO: 913447
gucauugucugguuuagaa

SEQ ID NO: 928079 - RNA, 19 nt, Artificial Sequence
  Description of Artificial Sequence: Synthetic oligonucleotide
  Antisense strand to SEQ ID NO: 928078
uucuaaaccagacaaugac

SEQ ID NO: 928080 - RNA, 19 nt, Artificial Sequence
  Description of Artificial Sequence: Synthetic oligonucleotide
  Sense strand starting at position 324 of SEQ ID NO: 913447
cugagugugucuccugaaa

SEQ ID NO: 928081 - RNA, 19 nt, Artificial Sequence
  Description of Artificial Sequence: Synthetic oligonucleotide
  Antisense strand to SEQ ID NO: 928080
uuucaggagacacacucag

SEQ ID NO: 928082 - RNA, 19 nt, Artificial Sequence
  Description of Artificial Sequence: Synthetic oligonucleotide
  Sense strand starting at position 3419 of SEQ ID NO: 913448
ccauuauuuccuggucagu

SEQ ID NO: 928083 - RNA, 19 nt, Artificial Sequence
  Description of Artificial Sequence: Synthetic oligonucleotide
  Antisense strand to SEQ ID NO: 928082
acugaccaggaaauaaugg

SEQ ID NO: 928084 - RNA, 19 nt, Artificial Sequence
  Description of Artificial Sequence: Synthetic oligonucleotide
  Sense strand starting at position 3529 of SEQ ID NO: 913448
ggagcucauguacaugaau

SEQ ID NO: 928085 - RNA, 19 nt, Artificial Sequence
  Description of Artificial Sequence: Synthetic oligonucleotide
  Antisense strand to SEQ ID NO: 928084
auucauguacaugagcucc

SEQ ID NO: 928086 - RNA, 19 nt, Artificial Sequence
  Description of Artificial Sequence: Synthetic oligonucleotide
  Sense strand starting at position 352 of SEQ ID NO: 913448
acaaacuuguucccagaga

SEQ ID NO: 928087 - RNA, 19 nt, Artificial Sequence
  Description of Artificial Sequence: Synthetic oligonucleotide
  Antisense strand to SEQ ID NO: 928086
ucucugggaacaaguuugu

SEQ ID NO: 928088 - RNA, 19 nt, Artificial Sequence
  Description of Artificial Sequence: Synthetic oligonucleotide
  Sense strand starting at position 350 of SEQ ID NO: 913448
agacaaacuuguucccaga

SEQ ID NO: 928089 - RNA, 19 nt, Artificial Sequence
  Description of Artificial Sequence: Synthetic oligonucleotide
  Antisense strand to SEQ ID NO: 928088
ucugggaacaaguuugucu

SEQ ID NO: 928090 - RNA, 19 nt, Artificial Sequence
  Description of Artificial Sequence: Synthetic oligonucleotide
  Sense strand starting at position 813 of SEQ ID NO: 913448
agcuuuagacaauaugcaa

SEQ ID NO: 928091 - RNA, 19 nt, Artificial Sequence
  Description of Artificial Sequence: Synthetic oligonucleotide
  Antisense strand to SEQ ID NO: 928090
uugcauauugucuaaagcu

SEQ ID NO: 928092 - RNA, 19 nt, Artificial Sequence
  Description of Artificial Sequence: Synthetic oligonucleotide
  Sense strand starting at position 3900 of SEQ ID NO: 913448
ugaguaacaugagcugaaa

SEQ ID NO: 928093 - RNA, 19 nt, Artificial Sequence
  Description of Artificial Sequence: Synthetic oligonucleotide
  Antisense strand to SEQ ID NO: 928092
uuucagcucauguuacuca

SEQ ID NO: 928094 - RNA, 19 nt, Artificial Sequence
  Description of Artificial Sequence: Synthetic oligonucleotide
  Sense strand starting at position 3930 of SEQ ID NO: 913448
gccgcuggucuuccuaauu

SEQ ID NO: 928095 - RNA, 19 nt, Artificial Sequence
  Description of Artificial Sequence: Synthetic oligonucleotide
  Antisense strand to SEQ ID NO: 928094
aauuaggaagaccagcggc

SEQ ID NO: 928096 - RNA, 19 nt, Artificial Sequence
  Description of Artificial Sequence: Synthetic oligonucleotide
  Sense strand starting at position 3532 of SEQ ID NO: 913448
gcucauguacaugaauaug

SEQ ID NO: 928097 - RNA, 19 nt, Artificial Sequence
  Description of Artificial Sequence: Synthetic oligonucleotide
  Antisense strand to SEQ ID NO: 928096
cauauucauguacaugagc

SEQ ID NO: 928098 - RNA, 19 nt, Artificial Sequence
  Description of Artificial Sequence: Synthetic oligonucleotide
  Sense strand starting at position 692 of SEQ ID NO: 913448
gacccaucucaagaugugu

SEQ ID NO: 928099 - RNA, 19 nt, Artificial Sequence
  Description of Artificial Sequence: Synthetic oligonucleotide
  Antisense strand to SEQ ID NO: 928098
acacaucuugagauggguc

SEQ ID NO: 928100 - RNA, 19 nt, Artificial Sequence
  Description of Artificial Sequence: Synthetic oligonucleotide
  Sense strand starting at position 3733 of SEQ ID NO: 913448
gaucauggauuugacauau

SEQ ID NO: 928101 - RNA, 19 nt, Artificial Sequence
  Description of Artificial Sequence: Synthetic oligonucleotide
  Antisense strand to SEQ ID NO: 928100
auaugucaaauccaugauc

SEQ ID NO: 928102 - RNA, 19 nt, Artificial Sequence
  Description of Artificial Sequence: Synthetic oligonucleotide
  Sense strand starting at position 3122 of SEQ ID NO: 913448
cagacuaaggugugagauu

SEQ ID NO: 928103 - RNA, 19 nt, Artificial Sequence
  Description of Artificial Sequence: Synthetic oligonucleotide
  Antisense strand to SEQ ID NO: 928102
aaucucacaccuuagucug

SEQ ID NO: 928104 - RNA, 19 nt, Artificial Sequence
  Description of Artificial Sequence: Synthetic oligonucleotide
  Sense strand starting at position 3903 of SEQ ID NO: 913448
guaacaugagcugaaagcu

SEQ ID NO: 928105 - RNA, 19 nt, Artificial Sequence
  Description of Artificial Sequence: Synthetic oligonucleotide
  Antisense strand to SEQ ID NO: 928104
agcuuucagcucauguuac

SEQ ID NO: 928106 - RNA, 19 nt, Artificial Sequence
  Description of Artificial Sequence: Synthetic oligonucleotide
  Sense strand starting at position 2737 of SEQ ID NO: 913448
ccaagcuggcccuaggaua

SEQ ID NO: 928107 - RNA, 19 nt, Artificial Sequence
  Description of Artificial Sequence: Synthetic oligonucleotide
  Antisense strand to SEQ ID NO: 928106
uauccuagggccagcuugg

SEQ ID NO: 928108 - RNA, 19 nt, Artificial Sequence
  Description of Artificial Sequence: Synthetic oligonucleotide
  Sense strand starting at position 785 of SEQ ID NO: 913448
augguuucugcugauauag

SEQ ID NO: 928109 - RNA, 19 nt, Artificial Sequence
  Description of Artificial Sequence: Synthetic oligonucleotide
  Antisense strand to SEQ ID NO: 928108
cuauaucagcagaaaccau

SEQ ID NO: 928110 - RNA, 19 nt, Artificial Sequence
  Description of Artificial Sequence: Synthetic oligonucleotide
  Sense strand starting at position 2324 of SEQ ID NO: 913448
gcauuccucgaguaaggag

SEQ ID NO: 928111 - RNA, 19 nt, Artificial Sequence
  Description of Artificial Sequence: Synthetic oligonucleotide
  Antisense strand to SEQ ID NO: 928110
cuccuuacucgaggaaugc

SEQ ID NO: 928112 - RNA, 19 nt, Artificial Sequence
  Description of Artificial Sequence: Synthetic oligonucleotide
  Sense strand starting at position 719 of SEQ ID NO: 913448
cacaguggucagcaaacuu

SEQ ID NO: 928113 - RNA, 19 nt, Artificial Sequence
  Description of Artificial Sequence: Synthetic oligonucleotide
  Antisense strand to SEQ ID NO: 928112
aaguuugcugaccacugug

SEQ ID NO: 928114 - RNA, 19 nt, Artificial Sequence
  Description of Artificial Sequence: Synthetic oligonucleotide
  Sense strand starting at position 2833 of SEQ ID NO: 913448
cugacuguggccugagaaa

SEQ ID NO: 928115 - RNA, 19 nt, Artificial Sequence
  Description of Artificial Sequence: Synthetic oligonucleotide
  Antisense strand to SEQ ID NO: 928114
uuucucaggccacagucag

SEQ ID NO: 928116 - RNA, 19 nt, Artificial Sequence
  Description of Artificial Sequence: Synthetic oligonucleotide
  Sense strand starting at position 36 of SEQ ID NO: 913448
ugagauuucuggcagagac

SEQ ID NO: 928117 - RNA, 19 nt, Artificial Sequence
  Description of Artificial Sequence: Synthetic oligonucleotide
  Antisense strand to SEQ ID NO: 928116
gucucugccagaaaucuca

SEQ ID NO: 928118 - RNA, 19 nt, Artificial Sequence
  Description of Artificial Sequence: Synthetic oligonucleotide
  Sense strand starting at position 2045 of SEQ ID NO: 913448
ccaaaucagccacgaguaa

SEQ ID NO: 928119 - RNA, 19 nt, Artificial Sequence
  Description of Artificial Sequence: Synthetic oligonucleotide
  Antisense strand to SEQ ID NO: 928118
uuacucguggcugauuugg

SEQ ID NO: 928120 - RNA, 19 nt, Artificial Sequence
  Description of Artificial Sequence: Synthetic oligonucleotide
  Sense strand starting at position 23 of SEQ ID NO: 913448
aggcuuggguucuugagau

SEQ ID NO: 928121 - RNA, 19 nt, Artificial Sequence
  Description of Artificial Sequence: Synthetic oligonucleotide
  Antisense strand to SEQ ID NO: 928120
aucucaagaacccaagccu

SEQ ID NO: 928122 - RNA, 19 nt, Artificial Sequence
  Description of Artificial Sequence: Synthetic oligonucleotide
  Sense strand starting at position 3726 of SEQ ID NO: 913448
cuuaauagaucauggauuu

SEQ ID NO: 928123 - RNA, 19 nt, Artificial Sequence
  Description of Artificial Sequence: Synthetic oligonucleotide
  Antisense strand to SEQ ID NO: 928122
aaauccaugaucuauuaag

SEQ ID NO: 928124 - RNA, 19 nt, Artificial Sequence
  Description of Artificial Sequence: Synthetic oligonucleotide
  Sense strand starting at position 3408 of SEQ ID NO: 913448
gagcccuggcuccauuauu

SEQ ID NO: 928125 - RNA, 19 nt, Artificial Sequence
  Description of Artificial Sequence: Synthetic oligonucleotide
  Antisense strand to SEQ ID NO: 928124
aauaauggagccagggcuc

SEQ ID NO: 928126 - RNA, 19 nt, Artificial Sequence
  Description of Artificial Sequence: Synthetic oligonucleotide
  Sense strand starting at position 2199 of SEQ ID NO: 913448
aacauuuguuuagggaaac

SEQ ID NO: 928127 - RNA, 19 nt, Artificial Sequence
  Description of Artificial Sequence: Synthetic oligonucleotide
  Antisense strand to SEQ ID NO: 928126
guuucccuaaacaaauguu

SEQ ID NO: 928128 - RNA, 19 nt, Artificial Sequence
  Description of Artificial Sequence: Synthetic oligonucleotide
  Sense strand starting at position 2200 of SEQ ID NO: 913448
acauuuguuuagggaaaca

SEQ ID NO: 928129 - RNA, 19 nt, Artificial Sequence
  Description of Artificial Sequence: Synthetic oligonucleotide
  Antisense strand to SEQ ID NO: 928128
uguuucccuaaacaaaugu

SEQ ID NO: 928130 - RNA, 19 nt, Artificial Sequence
  Description of Artificial Sequence: Synthetic oligonucleotide
  Sense strand starting at position 3061 of SEQ ID NO: 913448
gacccaggucuauguacuu

SEQ ID NO: 928131 - RNA, 19 nt, Artificial Sequence
  Description of Artificial Sequence: Synthetic oligonucleotide
  Antisense strand to SEQ ID NO: 928130
aaguacauagaccuggguc

SEQ ID NO: 928132 - RNA, 19 nt, Artificial Sequence
  Description of Artificial Sequence: Synthetic oligonucleotide
  Sense strand starting at position 2397 of SEQ ID NO: 913448
gcugggucucagggugaga

SEQ ID NO: 928133 - RNA, 19 nt, Artificial Sequence
  Description of Artificial Sequence: Synthetic oligonucleotide
  Antisense strand to SEQ ID NO: 928132
ucucacccugagacccagc

SEQ ID NO: 928134 - RNA, 19 nt, Artificial Sequence
  Description of Artificial Sequence: Synthetic oligonucleotide
  Sense strand starting at position 612 of SEQ ID NO: 913448
uccugaagggucuggcuua

SEQ ID NO: 928135 - RNA, 19 nt, Artificial Sequence
  Description of Artificial Sequence: Synthetic oligonucleotide
  Antisense strand to SEQ ID NO: 928134
uaagccagacccuucagga

SEQ ID NO: 928136 - RNA, 19 nt, Artificial Sequence
  Description of Artificial Sequence: Synthetic oligonucleotide
  Sense strand starting at position 701 of SEQ ID NO: 913448
caagauguguucuuguaac

SEQ ID NO: 928137 - RNA, 19 nt, Artificial Sequence
  Description of Artificial Sequence: Synthetic oligonucleotide
  Antisense strand to SEQ ID NO: 928136
guuacaagaacacaucuug

SEQ ID NO: 928138 - RNA, 19 nt, Artificial Sequence
  Description of Artificial Sequence: Synthetic oligonucleotide
  Sense strand starting at position 3807 of SEQ ID NO: 913448
augucaucuguuugaccca

SEQ ID NO: 928139 - RNA, 19 nt, Artificial Sequence
  Description of Artificial Sequence: Synthetic oligonucleotide
  Antisense strand to SEQ ID NO: 928138
ugggucaaacagaugacau

SEQ ID NO: 928140 - RNA, 19 nt, Artificial Sequence
  Description of Artificial Sequence: Synthetic oligonucleotide
  Sense strand starting at position 2366 of SEQ ID NO: 913448
gcagaauaaucugcagcua

SEQ ID NO: 928141 - RNA, 19 nt, Artificial Sequence
  Description of Artificial Sequence: Synthetic oligonucleotide
  Antisense strand to SEQ ID NO: 928140
uagcugcagauuauucugc

SEQ ID NO: 928142 - RNA, 19 nt, Artificial Sequence
  Description of Artificial Sequence: Synthetic oligonucleotide
  Sense strand starting at position 1426 of SEQ ID NO: 913448
agagaucccugacagauga

SEQ ID NO: 928143 - RNA, 19 nt, Artificial Sequence
  Description of Artificial Sequence: Synthetic oligonucleotide
  Antisense strand to SEQ ID NO: 928142
ucaucugucagggaucucu

SEQ ID NO: 928144 - RNA, 19 nt, Artificial Sequence
  Description of Artificial Sequence: Synthetic oligonucleotide
  Sense strand starting at position 3540 of SEQ ID NO: 913448
acaugaauaugcucgucua

SEQ ID NO: 928145 - RNA, 19 nt, Artificial Sequence
  Description of Artificial Sequence: Synthetic oligonucleotide
  Antisense strand to SEQ ID NO: 928144
uagacgagcauauucaugu

SEQ ID NO: 928146 - RNA, 19 nt, Artificial Sequence
  Description of Artificial Sequence: Synthetic oligonucleotide
  Sense strand starting at position 27 of SEQ ID NO: 913448
uuggguucuugagauuucu

SEQ ID NO: 928147 - RNA, 19 nt, Artificial Sequence
  Description of Artificial Sequence: Synthetic oligonucleotide
  Antisense strand to SEQ ID NO: 928146
agaaaucucaagaacccaa

SEQ ID NO: 928148 - RNA, 19 nt, Artificial Sequence
  Description of Artificial Sequence: Synthetic oligonucleotide
  Sense strand starting at position 2321 of SEQ ID NO: 913448
cccgcauuccucgaguaag

SEQ ID NO: 928149 - RNA, 19 nt, Artificial Sequence
  Description of Artificial Sequence: Synthetic oligonucleotide
  Antisense strand to SEQ ID NO: 928148
cuuacucgaggaaugcggg

SEQ ID NO: 928150 - RNA, 19 nt, Artificial Sequence
  Description of Artificial Sequence: Synthetic oligonucleotide
  Sense strand starting at position 3360 of SEQ ID NO: 913448
ccaucaacuugagauggga

SEQ ID NO: 928151 - RNA, 19 nt, Artificial Sequence
  Description of Artificial Sequence: Synthetic oligonucleotide
  Antisense strand to SEQ ID NO: 928150
ucccaucucaaguugaugg

SEQ ID NO: 928152 - RNA, 19 nt, Artificial Sequence
  Description of Artificial Sequence: Synthetic oligonucleotide
  Sense strand starting at position 3493 of SEQ ID NO: 913448
agagaaugccugugcucug

SEQ ID NO: 928153 - RNA, 19 nt, Artificial Sequence
  Description of Artificial Sequence: Synthetic oligonucleotide
  Antisense strand to SEQ ID NO: 928152
cagagcacaggcauucucu

SEQ ID NO: 928154 - RNA, 19 nt, Artificial Sequence
  Description of Artificial Sequence: Synthetic oligonucleotide
  Sense strand starting at position 3541 of SEQ ID NO: 913448
caugaauaugcucgucuau

SEQ ID NO: 928155 - RNA, 19 nt, Artificial Sequence
  Description of Artificial Sequence: Synthetic oligonucleotide
  Antisense strand to SEQ ID NO: 928154
auagacgagcauauucaug

SEQ ID NO: 928156 - RNA, 19 nt, Artificial Sequence
  Description of Artificial Sequence: Synthetic oligonucleotide
  Sense strand starting at position 3543 of SEQ ID NO: 913448
ugaauaugcucgucuauug

SEQ ID NO: 928157 - RNA, 19 nt, Artificial Sequence
  Description of Artificial Sequence: Synthetic oligonucleotide
  Antisense strand to SEQ ID NO: 928156
caauagacgagcauauuca

SEQ ID NO: 928158 - RNA, 19 nt, Artificial Sequence
  Description of Artificial Sequence: Synthetic oligonucleotide
  Sense strand starting at position 2750 of SEQ ID NO: 913448
aggauagucugcuugcuac

SEQ ID NO: 928159 - RNA, 19 nt, Artificial Sequence
  Description of Artificial Sequence: Synthetic oligonucleotide
  Antisense strand to SEQ ID NO: 928158
guagcaagcagacuauccu

SEQ ID NO: 928160 - RNA, 19 nt, Artificial Sequence
  Description of Artificial Sequence: Synthetic oligonucleotide
  Sense strand starting at position 1989 of SEQ ID NO: 913448
cguggugucaaguaacagu

SEQ ID NO: 928161 - RNA, 19 nt, Artificial Sequence
  Description of Artificial Sequence: Synthetic oligonucleotide
  Antisense strand to SEQ ID NO: 928160
acuguuacuugacaccacg

SEQ ID NO: 928162 - RNA, 19 nt, Artificial Sequence
  Description of Artificial Sequence: Synthetic oligonucleotide
  Sense strand starting at position 2420 of SEQ ID NO: 913449
uuaacuuggccagaaaucu

SEQ ID NO: 928163 - RNA, 19 nt, Artificial Sequence
  Description of Artificial Sequence: Synthetic oligonucleotide
  Antisense strand to SEQ ID NO: 928162
agauuucuggccaaguuaa

SEQ ID NO: 928164 - RNA, 19 nt, Artificial Sequence
  Description of Artificial Sequence: Synthetic oligonucleotide
  Sense strand starting at position 3754 of SEQ ID NO: 913449
gggccuuucccugaggaag

SEQ ID NO: 928165 - RNA, 19 nt, Artificial Sequence
  Description of Artificial Sequence: Synthetic oligonucleotide
  Antisense strand to SEQ ID NO: 928164
cuuccucagggaaaggccc

SEQ ID NO: 928166 - RNA, 19 nt, Artificial Sequence
  Description of Artificial Sequence: Synthetic oligonucleotide
  Sense strand starting at position 2395 of SEQ ID NO: 913449
gugcaaaguagcguguaaa

SEQ ID NO: 928167 - RNA, 19 nt, Artificial Sequence
  Description of Artificial Sequence: Synthetic oligonucleotide
  Antisense strand to SEQ ID NO: 928166
uuuacacgcuacuuugcac

SEQ ID NO: 928168 - RNA, 19 nt, Artificial Sequence
  Description of Artificial Sequence: Synthetic oligonucleotide
  Sense strand starting at position 2335 of SEQ ID NO: 913449
uuguacgugaaagauugaa

SEQ ID NO: 928169 - RNA, 19 nt, Artificial Sequence
  Description of Artificial Sequence: Synthetic oligonucleotide
  Antisense strand to SEQ ID NO: 928168
uucaaucuuucacguacaa

SEQ ID NO: 928170 - RNA, 19 nt, Artificial Sequence
  Description of Artificial Sequence: Synthetic oligonucleotide
  Sense strand starting at position 353 of SEQ ID NO: 913449
gugaucugauauccugaaa

SEQ ID NO: 928171 - RNA, 19 nt, Artificial Sequence
  Description of Artificial Sequence: Synthetic oligonucleotide
  Antisense strand to SEQ ID NO: 928170
uuucaggauaucagaucac

SEQ ID NO: 928172 - RNA, 19 nt, Artificial Sequence
  Description of Artificial Sequence: Synthetic oligonucleotide
  Sense strand starting at position 2175 of SEQ ID NO: 913449
aguggacuugucuauugag

SEQ ID NO: 928173 - RNA, 19 nt, Artificial Sequence
  Description of Artificial Sequence: Synthetic oligonucleotide
  Antisense strand to SEQ ID NO: 928172
cucaauagacaaguccacu

SEQ ID NO: 928174 - RNA, 19 nt, Artificial Sequence
  Description of Artificial Sequence: Synthetic oligonucleotide
  Sense strand starting at position 2331 of SEQ ID NO: 913449
aacuuuguacgugaaagau

SEQ ID NO: 928175 - RNA, 19 nt, Artificial Sequence
  Description of Artificial Sequence: Synthetic oligonucleotide
  Antisense strand to SEQ ID NO: 928174
aucuuucacguacaaaguu

SEQ ID NO: 928176 - RNA, 19 nt, Artificial Sequence
  Description of Artificial Sequence: Synthetic oligonucleotide
  Sense strand starting at position 2417 of SEQ ID NO: 913449
cuauuaacuuggccagaaa

SEQ ID NO: 928177 - RNA, 19 nt, Artificial Sequence
  Description of Artificial Sequence: Synthetic oligonucleotide
  Antisense strand to SEQ ID NO: 928176
uuucuggccaaguuaauag

SEQ ID NO: 928178 - RNA, 19 nt, Artificial Sequence
  Description of Artificial Sequence: Synthetic oligonucleotide
  Sense strand starting at position 2313 of SEQ ID NO: 913449
uuuccaaauguguauuaca

SEQ ID NO: 928179 - RNA, 19 nt, Artificial Sequence
  Description of Artificial Sequence: Synthetic oligonucleotide
  Antisense strand to SEQ ID NO: 928178
uguaauacacauuuggaaa

SEQ ID NO: 928180 - RNA, 19 nt, Artificial Sequence
  Description of Artificial Sequence: Synthetic oligonucleotide
  Sense strand starting at position 2977 of SEQ ID NO: 913449
gugcuauaacagcaagaau

SEQ ID NO: 928181 - RNA, 19 nt, Artificial Sequence
  Description of Artificial Sequence: Synthetic oligonucleotide
  Antisense strand to SEQ ID NO: 928180
auucuugcuguuauagcac

SEQ ID NO: 928182 - RNA, 19 nt, Artificial Sequence
  Description of Artificial Sequence: Synthetic oligonucleotide
  Sense strand starting at position 1400 of SEQ ID NO: 913449
ugugaagaguggguuaaag

SEQ ID NO: 928183 - RNA, 19 nt, Artificial Sequence
  Description of Artificial Sequence: Synthetic oligonucleotide
  Antisense strand to SEQ ID NO: 928182
cuuuaacccacucuucaca

SEQ ID NO: 928184 - RNA, 19 nt, Artificial Sequence
  Description of Artificial Sequence: Synthetic oligonucleotide
  Sense strand starting at position 2150 of SEQ ID NO: 913449
aaggcaucgcgagaaauaa

SEQ ID NO: 928185 - RNA, 19 nt, Artificial Sequence
  Description of Artificial Sequence: Synthetic oligonucleotide
  Antisense strand to SEQ ID NO: 928184
uuauuucucgcgaugccuu

SEQ ID NO: 928186 - RNA, 19 nt, Artificial Sequence
  Description of Artificial Sequence: Synthetic oligonucleotide
  Sense strand starting at position 3917 of SEQ ID NO: 913449
ccuagauagcaguagcaga

SEQ ID NO: 928187 - RNA, 19 nt, Artificial Sequence
  Description of Artificial Sequence: Synthetic oligonucleotide
  Antisense strand to SEQ ID NO: 928186
ucugcuacugcuaucuagg

SEQ ID NO: 928188 - RNA, 19 nt, Artificial Sequence
  Description of Artificial Sequence: Synthetic oligonucleotide
  Sense strand starting at position 3657 of SEQ ID NO: 913449
gcgguaaugccagugccua

SEQ ID NO: 928189 - RNA, 19 nt, Artificial Sequence
  Description of Artificial Sequence: Synthetic oligonucleotide
  Antisense strand to SEQ ID NO: 928188
uaggcacuggcauuaccgc

SEQ ID NO: 928190 - RNA, 19 nt, Artificial Sequence
  Description of Artificial Sequence: Synthetic oligonucleotide
  Sense strand starting at position 2416 of SEQ ID NO: 913449
ucuauuaacuuggccagaa

SEQ ID NO: 928191 - RNA, 19 nt, Artificial Sequence
  Description of Artificial Sequence: Synthetic oligonucleotide
  Antisense strand to SEQ ID NO: 928190
uucuggccaaguuaauaga

SEQ ID NO: 928192 - RNA, 19 nt, Artificial Sequence
  Description of Artificial Sequence: Synthetic oligonucleotide
  Sense strand starting at position 283 of SEQ ID NO: 913449
uucucuagucacugaaaug

SEQ ID NO: 928193 - RNA, 19 nt, Artificial Sequence
  Description of Artificial Sequence: Synthetic oligonucleotide
  Antisense strand to SEQ ID NO: 928192
cauuucagugacuagagaa

SEQ ID NO: 928194 - RNA, 19 nt, Artificial Sequence
  Description of Artificial Sequence: Synthetic oligonucleotide
  Sense strand starting at position 3848 of SEQ ID NO: 913449
cuuaaaccucuccgagaug

SEQ ID NO: 928195 - RNA, 19 nt, Artificial Sequence
  Description of Artificial Sequence: Synthetic oligonucleotide
  Antisense strand to SEQ ID NO: 928194
caucucggagagguuuaag

SEQ ID NO: 928196 - RNA, 19 nt, Artificial Sequence
  Description of Artificial Sequence: Synthetic oligonucleotide
  Sense strand starting at position 345 of SEQ ID NO: 913449
ccuugacugugaucugaua

SEQ ID NO: 928197 - RNA, 19 nt, Artificial Sequence
  Description of Artificial Sequence: Synthetic oligonucleotide
  Antisense strand to SEQ ID NO: 928196
uaucagaucacagucaagg

SEQ ID NO: 928198 - RNA, 19 nt, Artificial Sequence
  Description of Artificial Sequence: Synthetic oligonucleotide
  Sense strand starting at position 383 of SEQ ID NO: 913449
gaagcuauugugcacacaa

SEQ ID NO: 928199 - RNA, 19 nt, Artificial Sequence
  Description of Artificial Sequence: Synthetic oligonucleotide
  Antisense strand to SEQ ID NO: 928198
uugugugcacaauagcuuc

SEQ ID NO: 928200 - RNA, 19 nt, Artificial Sequence
  Description of Artificial Sequence: Synthetic oligonucleotide
  Sense strand starting at position 1357 of SEQ ID NO: 913449
cgccgaguaacccaaagaa

SEQ ID NO: 928201 - RNA, 19 nt, Artificial Sequence
  Description of Artificial Sequence: Synthetic oligonucleotide
  Antisense strand to SEQ ID NO: 928200
uucuuuggguuacucggcg

SEQ ID NO: 928202 - RNA, 19 nt, Artificial Sequence
  Description of Artificial Sequence: Synthetic oligonucleotide
  Sense strand starting at position 1465 of SEQ ID NO: 913449
ccugaagacuucgcacaaa

SEQ ID NO: 928203 - RNA, 19 nt, Artificial Sequence
  Description of Artificial Sequence: Synthetic oligonucleotide
  Antisense strand to SEQ ID NO: 928202
uuugugcgaagucuucagg

SEQ ID NO: 928204 - RNA, 19 nt, Artificial Sequence
  Description of Artificial Sequence: Synthetic oligonucleotide
  Sense strand starting at position 1464 of SEQ ID NO: 913449
accugaagacuucgcacaa

SEQ ID NO: 928205 - RNA, 19 nt, Artificial Sequence
  Description of Artificial Sequence: Synthetic oligonucleotide
  Antisense strand to SEQ ID NO: 928204
uugugcgaagucuucaggu

SEQ ID NO: 928206 - RNA, 19 nt, Artificial Sequence
  Description of Artificial Sequence: Synthetic oligonucleotide
  Sense strand starting at position 385 of SEQ ID NO: 913449
agcuauugugcacacaaau

SEQ ID NO: 928207 - RNA, 19 nt, Artificial Sequence
  Description of Artificial Sequence: Synthetic oligonucleotide
  Antisense strand to SEQ ID NO: 928206
auuugugugcacaauagcu

SEQ ID NO: 928208 - RNA, 19 nt, Artificial Sequence
  Description of Artificial Sequence: Synthetic oligonucleotide
  Sense strand starting at position 2329 of SEQ ID NO: 913449
acaacuuuguacgugaaag

SEQ ID NO: 928209 - RNA, 19 nt, Artificial Sequence
  Description of Artificial Sequence: Synthetic oligonucleotide
  Antisense strand to SEQ ID NO: 928208
cuuucacguacaaaguugu

SEQ ID NO: 928210 - RNA, 19 nt, Artificial Sequence
  Description of Artificial Sequence: Synthetic oligonucleotide
  Sense strand starting at position 2386 of SEQ ID NO: 913449
gccugauaagugcaaagua

SEQ ID NO: 928211 - RNA, 19 nt, Artificial Sequence
  Description of Artificial Sequence: Synthetic oligonucleotide
  Antisense strand to SEQ ID NO: 928210
uacuuugcacuuaucaggc

SEQ ID NO: 928212 - RNA, 19 nt, Artificial Sequence
  Description of Artificial Sequence: Synthetic oligonucleotide
  Sense strand starting at position 1399 of SEQ ID NO: 913449
gugugaagaguggguuaaa

SEQ ID NO: 928213 - RNA, 19 nt, Artificial Sequence
  Description of Artificial Sequence: Synthetic oligonucleotide
  Antisense strand to SEQ ID NO: 928212
uuuaacccacucuucacac

SEQ ID NO: 928214 - RNA, 19 nt, Artificial Sequence
  Description of Artificial Sequence: Synthetic oligonucleotide
  Sense strand starting at position 1390 of SEQ ID NO: 913449
acugauuccgugugaagag

SEQ ID NO: 928215 - RNA, 19 nt, Artificial Sequence
  Description of Artificial Sequence: Synthetic oligonucleotide
  Antisense strand to SEQ ID NO: 928214
cucuucacacggaaucagu

SEQ ID NO: 928216 - RNA, 19 nt, Artificial Sequence
  Description of Artificial Sequence: Synthetic oligonucleotide
  Sense strand starting at position 2328 of SEQ ID NO: 913449
uacaacuuuguacgugaaa

SEQ ID NO: 928217 - RNA, 19 nt, Artificial Sequence
  Description of Artificial Sequence: Synthetic oligonucleotide
  Antisense strand to SEQ ID NO: 928216
uuucacguacaaaguugua

SEQ ID NO: 928218 - RNA, 19 nt, Artificial Sequence
  Description of Artificial Sequence: Synthetic oligonucleotide
  Sense strand starting at position 1219 of SEQ ID NO: 913449
uuggguauggcccaaguuu

SEQ ID NO: 928219 - RNA, 19 nt, Artificial Sequence
  Description of Artificial Sequence: Synthetic oligonucleotide
  Antisense strand to SEQ ID NO: 928218
aaacuugggccauacccaa

SEQ ID NO: 928220 - RNA, 19 nt, Artificial Sequence
  Description of Artificial Sequence: Synthetic oligonucleotide
  Sense strand starting at position 727 of SEQ ID NO: 913449
ggaagaaucgcucgaaccu

SEQ ID NO: 928221 - RNA, 19 nt, Artificial Sequence
  Description of Artificial Sequence: Synthetic oligonucleotide
  Antisense strand to SEQ ID NO: 928220
agguucgagcgauucuucc

SEQ ID NO: 928222 - RNA, 19 nt, Artificial Sequence
  Description of Artificial Sequence: Synthetic oligonucleotide
  Sense strand starting at position 3847 of SEQ ID NO: 913449
gcuuaaaccucuccgagau

SEQ ID NO: 928223 - RNA, 19 nt, Artificial Sequence
  Description of Artificial Sequence: Synthetic oligonucleotide
  Antisense strand to SEQ ID NO: 928222
aucucggagagguuuaagc

SEQ ID NO: 928224 - RNA, 19 nt, Artificial Sequence
  Description of Artificial Sequence: Synthetic oligonucleotide
  Sense strand starting at position 1409 of SEQ ID NO: 913449
uggguuaaagccugucaga

SEQ ID NO: 928225 - RNA, 19 nt, Artificial Sequence
  Description of Artificial Sequence: Synthetic oligonucleotide
  Antisense strand to SEQ ID NO: 928224
ucugacaggcuuuaaccca

SEQ ID NO: 928226 - RNA, 19 nt, Artificial Sequence
  Description of Artificial Sequence: Synthetic oligonucleotide
  Sense strand starting at position 3753 of SEQ ID NO: 913449
cgggccuuucccugaggaa

SEQ ID NO: 928227 - RNA, 19 nt, Artificial Sequence
  Description of Artificial Sequence: Synthetic oligonucleotide
  Antisense strand to SEQ ID NO: 928226
uuccucagggaaaggcccg

SEQ ID NO: 928228 - RNA, 19 nt, Artificial Sequence
  Description of Artificial Sequence: Synthetic oligonucleotide
  Sense strand starting at position 279 of SEQ ID NO: 913449
aggcuucucuagucacuga

SEQ ID NO: 928229 - RNA, 19 nt, Artificial Sequence
  Description of Artificial Sequence: Synthetic oligonucleotide
  Antisense strand to SEQ ID NO: 928228
ucagugacuagagaagccu

SEQ ID NO: 928230 - RNA, 19 nt, Artificial Sequence
  Description of Artificial Sequence: Synthetic oligonucleotide
  Sense strand starting at position 2406 of SEQ ID NO: 913449
cguguaaagcucuauuaac

SEQ ID NO: 928231 - RNA, 19 nt, Artificial Sequence
  Description of Artificial Sequence: Synthetic oligonucleotide
  Antisense strand to SEQ ID NO: 928230
guuaauagagcuuuacacg

SEQ ID NO: 928232 - RNA, 19 nt, Artificial Sequence
  Description of Artificial Sequence: Synthetic oligonucleotide
  Sense strand starting at position 2165 of SEQ ID NO: 913449
auaaauucgcaguggacuu

SEQ ID NO: 928233 - RNA, 19 nt, Artificial Sequence
  Description of Artificial Sequence: Synthetic oligonucleotide
  Antisense strand to SEQ ID NO: 928232
aaguccacugcgaauuuau

SEQ ID NO: 928234 - RNA, 19 nt, Artificial Sequence
  Description of Artificial Sequence: Synthetic oligonucleotide
  Sense strand starting at position 1292 of SEQ ID NO: 913449
ccagguuucucucuacuuu

SEQ ID NO: 928235 - RNA, 19 nt, Artificial Sequence
  Description of Artificial Sequence: Synthetic oligonucleotide
  Antisense strand to SEQ ID NO: 928234
aaaguagagagaaaccugg

SEQ ID NO: 928236 - RNA, 19 nt, Artificial Sequence
  Description of Artificial Sequence: Synthetic oligonucleotide
  Sense strand starting at position 2384 of SEQ ID NO: 913449
gugccugauaagugcaaag

SEQ ID NO: 928237 - RNA, 19 nt, Artificial Sequence
  Description of Artificial Sequence: Synthetic oligonucleotide
  Antisense strand to SEQ ID NO: 928236
cuuugcacuuaucaggcac

SEQ ID NO: 928238 - RNA, 19 nt, Artificial Sequence
  Description of Artificial Sequence: Synthetic oligonucleotide
  Sense strand starting at position 2398 of SEQ ID NO: 913449
caaaguagcguguaaagcu

SEQ ID NO: 928239 - RNA, 19 nt, Artificial Sequence
  Description of Artificial Sequence: Synthetic oligonucleotide
  Antisense strand to SEQ ID NO: 928238
agcuuuacacgcuacuuug

SEQ ID NO: 928240 - RNA, 19 nt, Artificial Sequence
  Description of Artificial Sequence: Synthetic oligonucleotide
  Sense strand starting at position 1397 of SEQ ID NO: 913449
ccgugugaagaguggguua

SEQ ID NO: 928241 - RNA, 19 nt, Artificial Sequence
  Description of Artificial Sequence: Synthetic oligonucleotide
  Antisense strand to SEQ ID NO: 928240
uaacccacucuucacacgg

SEQ ID NO: 928242 - RNA, 19 nt, Artificial Sequence
  Description of Artificial Sequence: Synthetic oligonucleotide
  Sense strand starting at position 678 of SEQ ID NO: 913450
caugauagaggcugggaau

SEQ ID NO: 928243 - RNA, 19 nt, Artificial Sequence
  Description of Artificial Sequence: Synthetic oligonucleotide
  Antisense strand to SEQ ID NO: 928242
auucccagccucuaucaug

SEQ ID NO: 928244 - RNA, 19 nt, Artificial Sequence
  Description of Artificial Sequence: Synthetic oligonucleotide
  Sense strand starting at position 3815 of SEQ ID NO: 913450
auaauaugccagggacaau

SEQ ID NO: 928245 - RNA, 19 nt, Artificial Sequence
  Description of Artificial Sequence: Synthetic oligonucleotide
  Antisense strand to SEQ ID NO: 928244
auugucccuggcauauuau

SEQ ID NO: 928246 - RNA, 19 nt, Artificial Sequence
  Description of Artificial Sequence: Synthetic oligonucleotide
  Sense strand starting at position 1012 of SEQ ID NO: 913450
aagaaauucuggcuugaag

SEQ ID NO: 928247 - RNA, 19 nt, Artificial Sequence
  Description of Artificial Sequence: Synthetic oligonucleotide
  Antisense strand to SEQ ID NO: 928246
cuucaagccagaauuucuu

SEQ ID NO: 928248 - RNA, 19 nt, Artificial Sequence
  Description of Artificial Sequence: Synthetic oligonucleotide
  Sense strand starting at position 566 of SEQ ID NO: 913450
uguuaacuuggauaacagu

SEQ ID NO: 928249 - RNA, 19 nt, Artificial Sequence
  Description of Artificial Sequence: Synthetic oligonucleotide
  Antisense strand to SEQ ID NO: 928248
acuguuauccaaguuaaca

SEQ ID NO: 928250 - RNA, 19 nt, Artificial Sequence
  Description of Artificial Sequence: Synthetic oligonucleotide
  Sense strand starting at position 288 of SEQ ID NO: 913450
cgcuauagccuggugugau

SEQ ID NO: 928251 - RNA, 19 nt, Artificial Sequence
  Description of Artificial Sequence: Synthetic oligonucleotide
  Antisense strand to SEQ ID NO: 928250
aucacaccaggcuauagcg

SEQ ID NO: 928252 - RNA, 19 nt, Artificial Sequence
  Description of Artificial Sequence: Synthetic oligonucleotide
  Sense strand starting at position 871 of SEQ ID NO: 913450
gaggcauauuuggcuguca

SEQ ID NO: 928253 - RNA, 19 nt, Artificial Sequence
  Description of Artificial Sequence: Synthetic oligonucleotide
  Antisense strand to SEQ ID NO: 928252
ugacagccaaauaugccuc

SEQ ID NO: 928254 - RNA, 19 nt, Artificial Sequence
  Description of Artificial Sequence: Synthetic oligonucleotide
  Sense strand starting at position 1108 of SEQ ID NO: 913450
acugaaacaucaguuuaug

SEQ ID NO: 928255 - RNA, 19 nt, Artificial Sequence
  Description of Artificial Sequence: Synthetic oligonucleotide
  Antisense strand to SEQ ID NO: 928254
cauaaacugauguuucagu

SEQ ID NO: 928256 - RNA, 19 nt, Artificial Sequence
  Description of Artificial Sequence: Synthetic oligonucleotide
  Sense strand starting at position 328 of SEQ ID NO: 913450
cuuggaaggcuccaugauu

SEQ ID NO: 928257 - RNA, 19 nt, Artificial Sequence
  Description of Artificial Sequence: Synthetic oligonucleotide
  Antisense strand to SEQ ID NO: 928256
aaucauggagccuuccaag

SEQ ID NO: 928258 - RNA, 19 nt, Artificial Sequence
  Description of Artificial Sequence: Synthetic oligonucleotide
  Sense strand starting at position 1014 of SEQ ID NO: 913450
gaaauucuggcuugaagga

SEQ ID NO: 928259 - RNA, 19 nt, Artificial Sequence
  Description of Artificial Sequence: Synthetic oligonucleotide
  Antisense strand to SEQ ID NO: 928258
uccuucaagccagaauuuc

SEQ ID NO: 928260 - RNA, 19 nt, Artificial Sequence
  Description of Artificial Sequence: Synthetic oligonucleotide
  Sense strand starting at position 576 of SEQ ID NO: 913450
gauaacaguguguagauca

SEQ ID NO: 928261 - RNA, 19 nt, Artificial Sequence
  Description of Artificial Sequence: Synthetic oligonucleotide
  Antisense strand to SEQ ID NO: 928260
ugaucuacacacuguuauc

SEQ ID NO: 928262 - RNA, 19 nt, Artificial Sequence
  Description of Artificial Sequence: Synthetic oligonucleotide
  Sense strand starting at position 873 of SEQ ID NO: 913450
ggcauauuuggcugucaga

SEQ ID NO: 928263 - RNA, 19 nt, Artificial Sequence
  Description of Artificial Sequence: Synthetic oligonucleotide
  Antisense strand to SEQ ID NO: 928262
ucugacagccaaauaugcc

SEQ ID NO: 928264 - RNA, 19 nt, Artificial Sequence
  Description of Artificial Sequence: Synthetic oligonucleotide
  Sense strand starting at position 3260 of SEQ ID NO: 913450
acaagagaguuugcagaca

SEQ ID NO: 928265 - RNA, 19 nt, Artificial Sequence
  Description of Artificial Sequence: Synthetic oligonucleotide
  Antisense strand to SEQ ID NO: 928264
ugucugcaaacucucuugu

SEQ ID NO: 928266 - RNA, 19 nt, Artificial Sequence
  Description of Artificial Sequence: Synthetic oligonucleotide
  Sense strand starting at position 3793 of SEQ ID NO: 913450
uuccaagaaacgugaagau

SEQ ID NO: 928267 - RNA, 19 nt, Artificial Sequence
  Description of Artificial Sequence: Synthetic oligonucleotide
  Antisense strand to SEQ ID NO: 928266
aucuucacguuucuuggaa

SEQ ID NO: 928268 - RNA, 19 nt, Artificial Sequence
  Description of Artificial Sequence: Synthetic oligonucleotide
  Sense strand starting at position 353 of SEQ ID NO: 913450
ucuguuaguggagggaaga

SEQ ID NO: 928269 - RNA, 19 nt, Artificial Sequence
  Description of Artificial Sequence: Synthetic oligonucleotide
  Antisense strand to SEQ ID NO: 928268
ucuucccuccacuaacaga

SEQ ID NO: 928270 - RNA, 19 nt, Artificial Sequence
  Description of Artificial Sequence: Synthetic oligonucleotide
  Sense strand starting at position 668 of SEQ ID NO: 913450
ggcugugaaacaugauaga

SEQ ID NO: 928271 - RNA, 19 nt, Artificial Sequence
  Description of Artificial Sequence: Synthetic oligonucleotide
  Antisense strand to SEQ ID NO: 928270
ucuaucauguuucacagcc

SEQ ID NO: 928272 - RNA, 19 nt, Artificial Sequence
  Description of Artificial Sequence: Synthetic oligonucleotide
  Sense strand starting at position 3364 of SEQ ID NO: 913450
uuagaauacugguccauau

SEQ ID NO: 928273 - RNA, 19 nt, Artificial Sequence
  Description of Artificial Sequence: Synthetic oligonucleotide
  Antisense strand to SEQ ID NO: 928272
auauggaccaguauucuaa

SEQ ID NO: 928274 - RNA, 19 nt, Artificial Sequence
  Description of Artificial Sequence: Synthetic oligonucleotide
  Sense strand starting at position 3717 of SEQ ID NO: 913450
gucuguuacucagcauuua

SEQ ID NO: 928275 - RNA, 19 nt, Artificial Sequence
  Description of Artificial Sequence: Synthetic oligonucleotide
  Antisense strand to SEQ ID NO: 928274
uaaaugcugaguaacagac

SEQ ID NO: 928276 - RNA, 19 nt, Artificial Sequence
  Description of Artificial Sequence: Synthetic oligonucleotide
  Sense strand starting at position 563 of SEQ ID NO: 913450
uuauguuaacuuggauaac

SEQ ID NO: 928277 - RNA, 19 nt, Artificial Sequence
  Description of Artificial Sequence: Synthetic oligonucleotide
  Antisense strand to SEQ ID NO: 928276
guuauccaaguuaacauaa

SEQ ID NO: 928278 - RNA, 19 nt, Artificial Sequence
  Description of Artificial Sequence: Synthetic oligonucleotide
  Sense strand starting at position 3039 of SEQ ID NO: 913450
cuugguucccagcaaacaa

SEQ ID NO: 928279 - RNA, 19 nt, Artificial Sequence
  Description of Artificial Sequence: Synthetic oligonucleotide
  Antisense strand to SEQ ID NO: 928278
uuguuugcugggaaccaag

SEQ ID NO: 928280 - RNA, 19 nt, Artificial Sequence
  Description of Artificial Sequence: Synthetic oligonucleotide
  Sense strand starting at position 1133 of SEQ ID NO: 913450
cuguuucugcaauaagaca

SEQ ID NO: 928281 - RNA, 19 nt, Artificial Sequence
  Description of Artificial Sequence: Synthetic oligonucleotide
  Antisense strand to SEQ ID NO: 928280
ugucuuauugcagaaacag

SEQ ID NO: 928282 - RNA, 19 nt, Artificial Sequence
  Description of Artificial Sequence: Synthetic oligonucleotide
  Sense strand starting at position 788 of SEQ ID NO: 913450
cuucuugauccaggugaaa

SEQ ID NO: 928283 - RNA, 19 nt, Artificial Sequence
  Description of Artificial Sequence: Synthetic oligonucleotide
  Antisense strand to SEQ ID NO: 928282
uuucaccuggaucaagaag

SEQ ID NO: 928284 - RNA, 19 nt, Artificial Sequence
  Description of Artificial Sequence: Synthetic oligonucleotide
  Sense strand starting at position 432 of SEQ ID NO: 913450
agcucuugggaguggaaga

SEQ ID NO: 928285 - RNA, 19 nt, Artificial Sequence
  Description of Artificial Sequence: Synthetic oligonucleotide
  Antisense strand to SEQ ID NO: 928284
ucuuccacucccaagagcu

SEQ ID NO: 928286 - RNA, 19 nt, Artificial Sequence
  Description of Artificial Sequence: Synthetic oligonucleotide
  Sense strand starting at position 433 of SEQ ID NO: 913450
gcucuugggaguggaagaa

SEQ ID NO: 928287 - RNA, 19 nt, Artificial Sequence
  Description of Artificial Sequence: Synthetic oligonucleotide
  Antisense strand to SEQ ID NO: 928286
uucuuccacucccaagagc

SEQ ID NO: 928288 - RNA, 19 nt, Artificial Sequence
  Description of Artificial Sequence: Synthetic oligonucleotide
  Sense strand starting at position 3503 of SEQ ID NO: 913450
uucgaucuuugacuaauaa

SEQ ID NO: 928289 - RNA, 19 nt, Artificial Sequence
  Description of Artificial Sequence: Synthetic oligonucleotide
  Antisense strand to SEQ ID NO: 928288
uuauuagucaaagaucgaa

SEQ ID NO: 928290 - RNA, 19 nt, Artificial Sequence
  Description of Artificial Sequence: Synthetic oligonucleotide
  Sense strand starting at position 449 of SEQ ID NO: 913450
gaaugacugccaggaguug

SEQ ID NO: 928291 - RNA, 19 nt, Artificial Sequence
  Description of Artificial Sequence: Synthetic oligonucleotide
  Antisense strand to SEQ ID NO: 928290
caacuccuggcagucauuc

SEQ ID NO: 928292 - RNA, 19 nt, Artificial Sequence
  Description of Artificial Sequence: Synthetic oligonucleotide
  Sense strand starting at position 661 of SEQ ID NO: 913450
auacuauggcugugaaaca

SEQ ID NO: 928293 - RNA, 19 nt, Artificial Sequence
  Description of Artificial Sequence: Synthetic oligonucleotide
  Antisense strand to SEQ ID NO: 928292
uguuucacagccauaguau

SEQ ID NO: 928294 - RNA, 19 nt, Artificial Sequence
  Description of Artificial Sequence: Synthetic oligonucleotide
  Sense strand starting at position 3598 of SEQ ID NO: 913450
agcuaaacuuggucuaaau

SEQ ID NO: 928295 - RNA, 19 nt, Artificial Sequence
  Description of Artificial Sequence: Synthetic oligonucleotide
  Antisense strand to SEQ ID NO: 928294
auuuagaccaaguuuagcu

SEQ ID NO: 928296 - RNA, 19 nt, Artificial Sequence
  Description of Artificial Sequence: Synthetic oligonucleotide
  Sense strand starting at position 1869 of SEQ ID NO: 913450
aggcgguguccugagaaag

SEQ ID NO: 928297 - RNA, 19 nt, Artificial Sequence
  Description of Artificial Sequence: Synthetic oligonucleotide
  Antisense strand to SEQ ID NO: 928296
cuuucucaggacaccgccu

SEQ ID NO: 928298 - RNA, 19 nt, Artificial Sequence
  Description of Artificial Sequence: Synthetic oligonucleotide
  Sense strand starting at position 575 of SEQ ID NO: 913450
ggauaacaguguguagauc

SEQ ID NO: 928299 - RNA, 19 nt, Artificial Sequence
  Description of Artificial Sequence: Synthetic oligonucleotide
  Antisense strand to SEQ ID NO: 928298
gaucuacacacuguuaucc

SEQ ID NO: 928300 - RNA, 19 nt, Artificial Sequence
  Description of Artificial Sequence: Synthetic oligonucleotide
  Sense strand starting at position 859 of SEQ ID NO: 913450
uggcaauguccagaggcau

SEQ ID NO: 928301 - RNA, 19 nt, Artificial Sequence
  Description of Artificial Sequence: Synthetic oligonucleotide
  Antisense strand to SEQ ID NO: 928300
augccucuggacauugcca

SEQ ID NO: 928302 - RNA, 19 nt, Artificial Sequence
  Description of Artificial Sequence: Synthetic oligonucleotide
  Sense strand starting at position 148 of SEQ ID NO: 913450
cucaaugcaugucugagaa

SEQ ID NO: 928303 - RNA, 19 nt, Artificial Sequence
  Description of Artificial Sequence: Synthetic oligonucleotide
  Antisense strand to SEQ ID NO: 928302
uucucagacaugcauugag

SEQ ID NO: 928304 - RNA, 19 nt, Artificial Sequence
  Description of Artificial Sequence: Synthetic oligonucleotide
  Sense strand starting at position 574 of SEQ ID NO: 913450
uggauaacaguguguagau

SEQ ID NO: 928305 - RNA, 19 nt, Artificial Sequence
  Description of Artificial Sequence: Synthetic oligonucleotide
  Antisense strand to SEQ ID NO: 928304
aucuacacacuguuaucca

SEQ ID NO: 928306 - RNA, 19 nt, Artificial Sequence
  Description of Artificial Sequence: Synthetic oligonucleotide
  Sense strand starting at position 1248 of SEQ ID NO: 913450
gccuuugaggcuggaagaa

SEQ ID NO: 928307 - RNA, 19 nt, Artificial Sequence
  Description of Artificial Sequence: Synthetic oligonucleotide
  Antisense strand to SEQ ID NO: 928306
uucuuccagccucaaaggc

SEQ ID NO: 928308 - RNA, 19 nt, Artificial Sequence
  Description of Artificial Sequence: Synthetic oligonucleotide
  Sense strand starting at position 3781 of SEQ ID NO: 913450
ugaugauucugcuuccaag

SEQ ID NO: 928309 - RNA, 19 nt, Artificial Sequence
  Description of Artificial Sequence: Synthetic oligonucleotide
  Antisense strand to SEQ ID NO: 928308
cuuggaagcagaaucauca

SEQ ID NO: 928310 - RNA, 19 nt, Artificial Sequence
  Description of Artificial Sequence: Synthetic oligonucleotide
  Sense strand starting at position 659 of SEQ ID NO: 913450
ucauacuauggcugugaaa

SEQ ID NO: 928311 - RNA, 19 nt, Artificial Sequence
  Description of Artificial Sequence: Synthetic oligonucleotide
  Antisense strand to SEQ ID NO: 928310
uuucacagccauaguauga

SEQ ID NO: 928312 - RNA, 19 nt, Artificial Sequence
  Description of Artificial Sequence: Synthetic oligonucleotide
  Sense strand starting at position 2618 of SEQ ID NO: 913450
ggcugcucccuuuacagaa

SEQ ID NO: 928313 - RNA, 19 nt, Artificial Sequence
  Description of Artificial Sequence: Synthetic oligonucleotide
  Antisense strand to SEQ ID NO: 928312
uucuguaaagggagcagcc

SEQ ID NO: 928314 - RNA, 19 nt, Artificial Sequence
  Description of Artificial Sequence: Synthetic oligonucleotide
  Sense strand starting at position 1241 of SEQ ID NO: 913450
aagaaaugccuuugaggcu

SEQ ID NO: 928315 - RNA, 19 nt, Artificial Sequence
  Description of Artificial Sequence: Synthetic oligonucleotide
  Antisense strand to SEQ ID NO: 928314
agccucaaaggcauuucuu

SEQ ID NO: 928316 - RNA, 19 nt, Artificial Sequence
  Description of Artificial Sequence: Synthetic oligonucleotide
  Sense strand starting at position 3390 of SEQ ID NO: 913450
agaugagagguguggcauu

SEQ ID NO: 928317 - RNA, 19 nt, Artificial Sequence
  Description of Artificial Sequence: Synthetic oligonucleotide
  Antisense strand to SEQ ID NO: 928316
aaugccacaccucucaucu

SEQ ID NO: 928318 - RNA, 19 nt, Artificial Sequence
  Description of Artificial Sequence: Synthetic oligonucleotide
  Sense strand starting at position 2588 of SEQ ID NO: 913450
agauguccgcccuaugaac

SEQ ID NO: 928319 - RNA, 19 nt, Artificial Sequence
  Description of Artificial Sequence: Synthetic oligonucleotide
  Antisense strand to SEQ ID NO: 928318
guucauagggcggacaucu

SEQ ID NO: 928320 - RNA, 19 nt, Artificial Sequence
  Description of Artificial Sequence: Synthetic oligonucleotide
  Sense strand starting at position 2512 of SEQ ID NO: 913450
gaaggugagucauccuucu

SEQ ID NO: 928321 - RNA, 19 nt, Artificial Sequence
  Description of Artificial Sequence: Synthetic oligonucleotide
  Antisense strand to SEQ ID NO: 928320
agaaggaugacucaccuuc

SEQ ID NO: 928322 - RNA, 19 nt, Artificial Sequence
  Description of Artificial Sequence: Synthetic oligonucleotide
  Sense strand starting at position 3194 of SEQ ID NO: 913451
uguaaaguccucguuugca

SEQ ID NO: 928323 - RNA, 19 nt, Artificial Sequence
  Description of Artificial Sequence: Synthetic oligonucleotide
  Antisense strand to SEQ ID NO: 928322
ugcaaacgaggacuuuaca

SEQ ID NO: 928324 - RNA, 19 nt, Artificial Sequence
  Description of Artificial Sequence: Synthetic oligonucleotide
  Sense strand starting at position 1144 of SEQ ID NO: 913451
uugacucucggauaauuac

SEQ ID NO: 928325 - RNA, 19 nt, Artificial Sequence
  Description of Artificial Sequence: Synthetic oligonucleotide
  Antisense strand to SEQ ID NO: 928324
guaauuauccgagagucaa

SEQ ID NO: 928326 - RNA, 19 nt, Artificial Sequence
  Description of Artificial Sequence: Synthetic oligonucleotide
  Sense strand starting at position 1816 of SEQ ID NO: 913451
ucuuccagugcuugaauuu

SEQ ID NO: 928327 - RNA, 19 nt, Artificial Sequence
  Description of Artificial Sequence: Synthetic oligonucleotide
  Antisense strand to SEQ ID NO: 928326
aaauucaagcacuggaaga

SEQ ID NO: 928328 - RNA, 19 nt, Artificial Sequence
  Description of Artificial Sequence: Synthetic oligonucleotide
  Sense strand starting at position 3570 of SEQ ID NO: 913451
ugaacaauuccaggaguuu

SEQ ID NO: 928329 - RNA, 19 nt, Artificial Sequence
  Description of Artificial Sequence: Synthetic oligonucleotide
  Antisense strand to SEQ ID NO: 928328
aaacuccuggaauuguuca

SEQ ID NO: 928330 - RNA, 19 nt, Artificial Sequence
  Description of Artificial Sequence: Synthetic oligonucleotide
  Sense strand starting at position 1147 of SEQ ID NO: 913451
acucucggauaauuacaua

SEQ ID NO: 928331 - RNA, 19 nt, Artificial Sequence
  Description of Artificial Sequence: Synthetic oligonucleotide
  Antisense strand to SEQ ID NO: 928330
uauguaauuauccgagagu

SEQ ID NO: 928332 - RNA, 19 nt, Artificial Sequence
  Description of Artificial Sequence: Synthetic oligonucleotide
  Sense strand starting at position 425 of SEQ ID NO: 913451
ccugucauccaggacagua

SEQ ID NO: 928333 - RNA, 19 nt, Artificial Sequence
  Description of Artificial Sequence: Synthetic oligonucleotide
  Antisense strand to SEQ ID NO: 928332
uacuguccuggaugacagg

SEQ ID NO: 928334 - RNA, 19 nt, Artificial Sequence
  Description of Artificial Sequence: Synthetic oligonucleotide
  Sense strand starting at position 3981 of SEQ ID NO: 913451
aauugauagguuggugaca

SEQ ID NO: 928335 - RNA, 19 nt, Artificial Sequence
  Description of Artificial Sequence: Synthetic oligonucleotide
  Antisense strand to SEQ ID NO: 928334
ugucaccaaccuaucaauu

SEQ ID NO: 928336 - RNA, 19 nt, Artificial Sequence
  Description of Artificial Sequence: Synthetic oligonucleotide
  Sense strand starting at position 2878 of SEQ ID NO: 913451
guauccucucuaggaaaua

SEQ ID NO: 928337 - RNA, 19 nt, Artificial Sequence
  Description of Artificial Sequence: Synthetic oligonucleotide
  Antisense strand to SEQ ID NO: 928336
uauuuccuagagaggauac

SEQ ID NO: 928338 - RNA, 19 nt, Artificial Sequence
  Description of Artificial Sequence: Synthetic oligonucleotide
  Sense strand starting at position 2736 of SEQ ID NO: 913451
acgggaugggacuguauau

SEQ ID NO: 928339 - RNA, 19 nt, Artificial Sequence
  Description of Artificial Sequence: Synthetic oligonucleotide
  Antisense strand to SEQ ID NO: 928338
auauacagucccaucccgu

SEQ ID NO: 928340 - RNA, 19 nt, Artificial Sequence
  Description of Artificial Sequence: Synthetic oligonucleotide
  Sense strand starting at position 3945 of SEQ ID NO: 913451
gauagacauuauguugagu

SEQ ID NO: 928341 - RNA, 19 nt, Artificial Sequence
  Description of Artificial Sequence: Synthetic oligonucleotide
  Antisense strand to SEQ ID NO: 928340
acucaacauaaugucuauc

SEQ ID NO: 928342 - RNA, 19 nt, Artificial Sequence
  Description of Artificial Sequence: Synthetic oligonucleotide
  Sense strand starting at position 3641 of SEQ ID NO: 913451
ucuccuucuggugaucaau

SEQ ID NO: 928343 - RNA, 19 nt, Artificial Sequence
  Description of Artificial Sequence: Synthetic oligonucleotide
  Antisense strand to SEQ ID NO: 928342
auugaucaccagaaggaga

SEQ ID NO: 928344 - RNA, 19 nt, Artificial Sequence
  Description of Artificial Sequence: Synthetic oligonucleotide
  Sense strand starting at position 2666 of SEQ ID NO: 913451
cucagucuugaaggaacuu

SEQ ID NO: 928345 - RNA, 19 nt, Artificial Sequence
  Description of Artificial Sequence: Synthetic oligonucleotide
  Antisense strand to SEQ ID NO: 928344
aaguuccuucaagacugag

SEQ ID NO: 928346 - RNA, 19 nt, Artificial Sequence
  Description of Artificial Sequence: Synthetic oligonucleotide
  Sense strand starting at position 1036 of SEQ ID NO: 913451
ccaagaagcgcucaacaca

SEQ ID NO: 928347 - RNA, 19 nt, Artificial Sequence
  Description of Artificial Sequence: Synthetic oligonucleotide
  Antisense strand to SEQ ID NO: 928346
uguguugagcgcuucuugg

SEQ ID NO: 928348 - RNA, 19 nt, Artificial Sequence
  Description of Artificial Sequence: Synthetic oligonucleotide
  Sense strand starting at position 1064 of SEQ ID NO: 913451
cggaaaugaaggugucaca

SEQ ID NO: 928349 - RNA, 19 nt, Artificial Sequence
  Description of Artificial Sequence: Synthetic oligonucleotide
  Antisense strand to SEQ ID NO: 928348
ugugacaccuucauuuccg

SEQ ID NO: 928350 - RNA, 19 nt, Artificial Sequence
  Description of Artificial Sequence: Synthetic oligonucleotide
  Sense strand starting at position 3652 of SEQ ID NO: 913451
ugaucaauguuccugacug

SEQ ID NO: 928351 - RNA, 19 nt, Artificial Sequence
  Description of Artificial Sequence: Synthetic oligonucleotide
  Antisense strand to SEQ ID NO: 928350
cagucaggaacauugauca

SEQ ID NO: 928352 - RNA, 19 nt, Artificial Sequence
  Description of Artificial Sequence: Synthetic oligonucleotide
  Sense strand starting at position 3968 of SEQ ID NO: 913451
guuuguuguauggaauuga

SEQ ID NO: 928353 - RNA, 19 nt, Artificial Sequence
  Description of Artificial Sequence: Synthetic oligonucleotide
  Antisense strand to SEQ ID NO: 928352
ucaauuccauacaacaaac

SEQ ID NO: 928354 - RNA, 19 nt, Artificial Sequence
  Description of Artificial Sequence: Synthetic oligonucleotide
  Sense strand starting at position 1225 of SEQ ID NO: 913451
aaauuaagucgacagcgau

SEQ ID NO: 928355 - RNA, 19 nt, Artificial Sequence
  Description of Artificial Sequence: Synthetic oligonucleotide
  Antisense strand to SEQ ID NO: 928354
aucgcugucgacuuaauuu

SEQ ID NO: 928356 - RNA, 19 nt, Artificial Sequence
  Description of Artificial Sequence: Synthetic oligonucleotide
  Sense strand starting at position 3421 of SEQ ID NO: 913451
gcugaauguccaggaauca

SEQ ID NO: 928357 - RNA, 19 nt, Artificial Sequence
  Description of Artificial Sequence: Synthetic oligonucleotide
  Antisense strand to SEQ ID NO: 928356
ugauuccuggacauucagc

SEQ ID NO: 928358 - RNA, 19 nt, Artificial Sequence
  Description of Artificial Sequence: Synthetic oligonucleotide
  Sense strand starting at position 1827 of SEQ ID NO: 913451
uugaauuuccgccgguaca

SEQ ID NO: 928359 - RNA, 19 nt, Artificial Sequence
  Description of Artificial Sequence: Synthetic oligonucleotide
  Antisense strand to SEQ ID NO: 928358
uguaccggcggaaauucaa

SEQ ID NO: 928360 - RNA, 19 nt, Artificial Sequence
  Description of Artificial Sequence: Synthetic oligonucleotide
  Sense strand starting at position 3644 of SEQ ID NO: 913451
ccuucuggugaucaauguu

SEQ ID NO: 928361 - RNA, 19 nt, Artificial Sequence
  Description of Artificial Sequence: Synthetic oligonucleotide
  Antisense strand to SEQ ID NO: 928360
aacauugaucaccagaagg

SEQ ID NO: 928362 - RNA, 19 nt, Artificial Sequence
  Description of Artificial Sequence: Synthetic oligonucleotide
  Sense strand starting at position 658 of SEQ ID NO: 913451
acaguauaguucucugaac

SEQ ID NO: 928363 - RNA, 19 nt, Artificial Sequence
  Description of Artificial Sequence: Synthetic oligonucleotide
  Antisense strand to SEQ ID NO: 928362
guucagagaacuauacugu

SEQ ID NO: 928364 - RNA, 19 nt, Artificial Sequence
  Description of Artificial Sequence: Synthetic oligonucleotide
  Sense strand starting at position 3117 of SEQ ID NO: 913451
ccagaauguacguauggua

SEQ ID NO: 928365 - RNA, 19 nt, Artificial Sequence
  Description of Artificial Sequence: Synthetic oligonucleotide
  Antisense strand to SEQ ID NO: 928364
uaccauacguacauucugg

SEQ ID NO: 928366 - RNA, 19 nt, Artificial Sequence
  Description of Artificial Sequence: Synthetic oligonucleotide
  Sense strand starting at position 3872 of SEQ ID NO: 913451
guauaauucuccuuugaug

SEQ ID NO: 928367 - RNA, 19 nt, Artificial Sequence
  Description of Artificial Sequence: Synthetic oligonucleotide
  Antisense strand to SEQ ID NO: 928366
caucaaaggagaauuauac

SEQ ID NO: 928368 - RNA, 19 nt, Artificial Sequence
  Description of Artificial Sequence: Synthetic oligonucleotide
  Sense strand starting at position 3293 of SEQ ID NO: 913451
guaaguuaacuuugaucca

SEQ ID NO: 928369 - RNA, 19 nt, Artificial Sequence
  Description of Artificial Sequence: Synthetic oligonucleotide
  Antisense strand to SEQ ID NO: 928368
uggaucaaaguuaacuuac

SEQ ID NO: 928370 - RNA, 19 nt, Artificial Sequence
  Description of Artificial Sequence: Synthetic oligonucleotide
  Sense strand starting at position 2859 of SEQ ID NO: 913451
caaaguuguguuuaaggug

SEQ ID NO: 928371 - RNA, 19 nt, Artificial Sequence
  Description of Artificial Sequence: Synthetic oligonucleotide
  Antisense strand to SEQ ID NO: 928370
caccuuaaacacaacuuug

SEQ ID NO: 928372 - RNA, 19 nt, Artificial Sequence
  Description of Artificial Sequence: Synthetic oligonucleotide
  Sense strand starting at position 2635 of SEQ ID NO: 913451
gucucagaacucuguugaa

SEQ ID NO: 928373 - RNA, 19 nt, Artificial Sequence
  Description of Artificial Sequence: Synthetic oligonucleotide
  Antisense strand to SEQ ID NO: 928372
uucaacagaguucugagac

SEQ ID NO: 928374 - RNA, 19 nt, Artificial Sequence
  Description of Artificial Sequence: Synthetic oligonucleotide
  Sense strand starting at position 424 of SEQ ID NO: 913451
accugucauccaggacagu

SEQ ID NO: 928375 - RNA, 19 nt, Artificial Sequence
  Description of Artificial Sequence: Synthetic oligonucleotide
  Antisense strand to SEQ ID NO: 928374
acuguccuggaugacaggu

SEQ ID NO: 928376 - RNA, 19 nt, Artificial Sequence
  Description of Artificial Sequence: Synthetic oligonucleotide
  Sense strand starting at position 2875 of SEQ ID NO: 913451
gugguauccucucuaggaa

SEQ ID NO: 928377 - RNA, 19 nt, Artificial Sequence
  Description of Artificial Sequence: Synthetic oligonucleotide
  Antisense strand to SEQ ID NO: 928376
uuccuagagaggauaccac

SEQ ID NO: 928378 - RNA, 19 nt, Artificial Sequence
  Description of Artificial Sequence: Synthetic oligonucleotide
  Sense strand starting at position 1220 of SEQ ID NO: 913451
uuucgaaauuaagucgaca

SEQ ID NO: 928379 - RNA, 19 nt, Artificial Sequence
  Description of Artificial Sequence: Synthetic oligonucleotide
  Antisense strand to SEQ ID NO: 928378
ugucgacuuaauuucgaaa

SEQ ID NO: 928380 - RNA, 19 nt, Artificial Sequence
  Description of Artificial Sequence: Synthetic oligonucleotide
  Sense strand starting at position 201 of SEQ ID NO: 913451
cuugauuguuaguucuaaa

SEQ ID NO: 928381 - RNA, 19 nt, Artificial Sequence
  Description of Artificial Sequence: Synthetic oligonucleotide
  Antisense strand to SEQ ID NO: 928380
uuuagaacuaacaaucaag

SEQ ID NO: 928382 - RNA, 19 nt, Artificial Sequence
  Description of Artificial Sequence: Synthetic oligonucleotide
  Sense strand starting at position 2782 of SEQ ID NO: 913451
gaggcuugugcagauuauu

SEQ ID NO: 928383 - RNA, 19 nt, Artificial Sequence
  Description of Artificial Sequence: Synthetic oligonucleotide
  Antisense strand to SEQ ID NO: 928382
aauaaucugcacaagccuc

SEQ ID NO: 928384 - RNA, 19 nt, Artificial Sequence
  Description of Artificial Sequence: Synthetic oligonucleotide
  Sense strand starting at position 3912 of SEQ ID NO: 913451
aucuguguucccuacuauc

SEQ ID NO: 928385 - RNA, 19 nt, Artificial Sequence
  Description of Artificial Sequence: Synthetic oligonucleotide
  Antisense strand to SEQ ID NO: 928384
gauaguagggaacacagau

SEQ ID NO: 928386 - RNA, 19 nt, Artificial Sequence
  Description of Artificial Sequence: Synthetic oligonucleotide
  Sense strand starting at position 2521 of SEQ ID NO: 913451
ggacgcucuaggugacaga

SEQ ID NO: 928387 - RNA, 19 nt, Artificial Sequence
  Description of Artificial Sequence: Synthetic oligonucleotide
  Antisense strand to SEQ ID NO: 928386
ucugucaccuagagcgucc

SEQ ID NO: 928388 - RNA, 19 nt, Artificial Sequence
  Description of Artificial Sequence: Synthetic oligonucleotide
  Sense strand starting at position 622 of SEQ ID NO: 913451
gauccugacugagaagaaa

SEQ ID NO: 928389 - RNA, 19 nt, Artificial Sequence
  Description of Artificial Sequence: Synthetic oligonucleotide
  Antisense strand to SEQ ID NO: 928388
uuucuucucagucaggauc

SEQ ID NO: 928390 - RNA, 19 nt, Artificial Sequence
  Description of Artificial Sequence: Synthetic oligonucleotide
  Sense strand starting at position 1286 of SEQ ID NO: 913451
ggaggugucuuguuugagg

SEQ ID NO: 928391 - RNA, 19 nt, Artificial Sequence
  Description of Artificial Sequence: Synthetic oligonucleotide
  Antisense strand to SEQ ID NO: 928390
ccucaaacaagacaccucc

SEQ ID NO: 928392 - RNA, 19 nt, Artificial Sequence
  Description of Artificial Sequence: Synthetic oligonucleotide
  Sense strand starting at position 200 of SEQ ID NO: 913451
ccuugauuguuaguucuaa

SEQ ID NO: 928393 - RNA, 19 nt, Artificial Sequence
  Description of Artificial Sequence: Synthetic oligonucleotide
  Antisense strand to SEQ ID NO: 928392
uuagaacuaacaaucaagg

SEQ ID NO: 928394 - RNA, 19 nt, Artificial Sequence
  Description of Artificial Sequence: Synthetic oligonucleotide
  Sense strand starting at position 3287 of SEQ ID NO: 913451
gugguuguaaguuaacuuu

SEQ ID NO: 928395 - RNA, 19 nt, Artificial Sequence
  Description of Artificial Sequence: Synthetic oligonucleotide
  Antisense strand to SEQ ID NO: 928394
aaaguuaacuuacaaccac

SEQ ID NO: 928396 - RNA, 19 nt, Artificial Sequence
  Description of Artificial Sequence: Synthetic oligonucleotide
  Sense strand starting at position 3966 of SEQ ID NO: 913451
agguuuguuguauggaauu

SEQ ID NO: 928397 - RNA, 19 nt, Artificial Sequence
  Description of Artificial Sequence: Synthetic oligonucleotide
  Antisense strand to SEQ ID NO: 928396
aauuccauacaacaaaccu

SEQ ID NO: 928398 - RNA, 19 nt, Artificial Sequence
  Description of Artificial Sequence: Synthetic oligonucleotide
  Sense strand starting at position 3290 of SEQ ID NO: 913451
guuguaaguuaacuuugau

SEQ ID NO: 928399 - RNA, 19 nt, Artificial Sequence
  Description of Artificial Sequence: Synthetic oligonucleotide
  Antisense strand to SEQ ID NO: 928398
aucaaaguuaacuuacaac

SEQ ID NO: 928400 - RNA, 19 nt, Artificial Sequence
  Description of Artificial Sequence: Synthetic oligonucleotide
  Sense strand starting at position 2856 of SEQ ID NO: 913451
uuccaaaguuguguuuaag

SEQ ID NO: 928401 - RNA, 19 nt, Artificial Sequence
  Description of Artificial Sequence: Synthetic oligonucleotide
  Antisense strand to SEQ ID NO: 928400
cuuaaacacaacuuuggaa

SEQ ID NO: 928402 - RNA, 19 nt, Artificial Sequence
  Description of Artificial Sequence: Synthetic oligonucleotide
  Sense strand starting at position 199 of SEQ ID NO: 913452
aacagauguuucucagaga

SEQ ID NO: 928403 - RNA, 19 nt, Artificial Sequence
  Description of Artificial Sequence: Synthetic oligonucleotide
  Antisense strand to SEQ ID NO: 928402
ucucugagaaacaucuguu

SEQ ID NO: 928404 - RNA, 19 nt, Artificial Sequence
  Description of Artificial Sequence: Synthetic oligonucleotide
  Sense strand starting at position 117 of SEQ ID NO: 913452
ucuuauuuguagucuuaug

SEQ ID NO: 928405 - RNA, 19 nt, Artificial Sequence
  Description of Artificial Sequence: Synthetic oligonucleotide
  Antisense strand to SEQ ID NO: 928404
cauaagacuacaaauaaga

SEQ ID NO: 928406 - RNA, 19 nt, Artificial Sequence
  Description of Artificial Sequence: Synthetic oligonucleotide
  Sense strand starting at position 2494 of SEQ ID NO: 913452
uggagaagucauugacuca

SEQ ID NO: 928407 - RNA, 19 nt, Artificial Sequence
  Description of Artificial Sequence: Synthetic oligonucleotide
  Antisense strand to SEQ ID NO: 928406
ugagucaaugacuucucca

SEQ ID NO: 928408 - RNA, 19 nt, Artificial Sequence
  Description of Artificial Sequence: Synthetic oligonucleotide
  Sense strand starting at position 2995 of SEQ ID NO: 913452
gggauaaagccucagucau

SEQ ID NO: 928409 - RNA, 19 nt, Artificial Sequence
  Description of Artificial Sequence: Synthetic oligonucleotide
  Antisense strand to SEQ ID NO: 928408
augacugaggcuuuauccc

SEQ ID NO: 928410 - RNA, 19 nt, Artificial Sequence
  Description of Artificial Sequence: Synthetic oligonucleotide
  Sense strand starting at position 3135 of SEQ ID NO: 913452
acgcauugcacguuuauca

SEQ ID NO: 928411 - RNA, 19 nt, Artificial Sequence
  Description of Artificial Sequence: Synthetic oligonucleotide
  Antisense strand to SEQ ID NO: 928410
ugauaaacgugcaaugcgu

SEQ ID NO: 928412 - RNA, 19 nt, Artificial Sequence
  Description of Artificial Sequence: Synthetic oligonucleotide
  Sense strand starting at position 2358 of SEQ ID NO: 913452
agugaaauaucuuugacac

SEQ ID NO: 928413 - RNA, 19 nt, Artificial Sequence
  Description of Artificial Sequence: Synthetic oligonucleotide
  Antisense strand to SEQ ID NO: 928412
gugucaaagauauuucacu

SEQ ID NO: 928414 - RNA, 19 nt, Artificial Sequence
  Description of Artificial Sequence: Synthetic oligonucleotide
  Sense strand starting at position 1854 of SEQ ID NO: 913452
auaccuucuccagacaguu

SEQ ID NO: 928415 - RNA, 19 nt, Artificial Sequence
  Description of Artificial Sequence: Synthetic oligonucleotide
  Antisense strand to SEQ ID NO: 928414
aacugucuggagaagguau

SEQ ID NO: 928416 - RNA, 19 nt, Artificial Sequence
  Description of Artificial Sequence: Synthetic oligonucleotide
  Sense strand starting at position 258 of SEQ ID NO: 913452
gugauuuggcgcuauugac

SEQ ID NO: 928417 - RNA, 19 nt, Artificial Sequence
  Description of Artificial Sequence: Synthetic oligonucleotide
  Antisense strand to SEQ ID NO: 928416
gucaauagcgccaaaucac

SEQ ID NO: 928418 - RNA, 19 nt, Artificial Sequence
  Description of Artificial Sequence: Synthetic oligonucleotide
  Sense strand starting at position 3185 of SEQ ID NO: 913452
uguuaucuccuuuaaugga

SEQ ID NO: 928419 - RNA, 19 nt, Artificial Sequence
  Description of Artificial Sequence: Synthetic oligonucleotide
  Antisense strand to SEQ ID NO: 928418
uccauuaaaggagauaaca

SEQ ID NO: 928420 - RNA, 19 nt, Artificial Sequence
  Description of Artificial Sequence: Synthetic oligonucleotide
  Sense strand starting at position 1452 of SEQ ID NO: 913452
gacaccagucauuggacau

SEQ ID NO: 928421 - RNA, 19 nt, Artificial Sequence
  Description of Artificial Sequence: Synthetic oligonucleotide
  Antisense strand to SEQ ID NO: 928420
auguccaaugacugguguc

SEQ ID NO: 928422 - RNA, 19 nt, Artificial Sequence
  Description of Artificial Sequence: Synthetic oligonucleotide
  Sense strand starting at position 1508 of SEQ ID NO: 913452
ccaugacaucugcaaaggu

SEQ ID NO: 928423 - RNA, 19 nt, Artificial Sequence
  Description of Artificial Sequence: Synthetic oligonucleotide
  Antisense strand to SEQ ID NO: 928422
accuuugcagaugucaugg

SEQ ID NO: 928424 - RNA, 19 nt, Artificial Sequence
  Description of Artificial Sequence: Synthetic oligonucleotide
  Sense strand starting at position 3766 of SEQ ID NO: 913452
gguuguuccagcuuugcuu

SEQ ID NO: 928425 - RNA, 19 nt, Artificial Sequence
  Description of Artificial Sequence: Synthetic oligonucleotide
  Antisense strand to SEQ ID NO: 928424
aagcaaagcuggaacaacc

SEQ ID NO: 928426 - RNA, 19 nt, Artificial Sequence
  Description of Artificial Sequence: Synthetic oligonucleotide
  Sense strand starting at position 2054 of SEQ ID NO: 913452
uaaugaagucaccggaaug

SEQ ID NO: 928427 - RNA, 19 nt, Artificial Sequence
  Description of Artificial Sequence: Synthetic oligonucleotide
  Antisense strand to SEQ ID NO: 928426
cauuccggugacuucauua

SEQ ID NO: 928428 - RNA, 19 nt, Artificial Sequence
  Description of Artificial Sequence: Synthetic oligonucleotide
  Sense strand starting at position 1824 of SEQ ID NO: 913452
aggguuauaucuguggaaa

SEQ ID NO: 928429 - RNA, 19 nt, Artificial Sequence
  Description of Artificial Sequence: Synthetic oligonucleotide
  Antisense strand to SEQ ID NO: 928428
uuuccacagauauaacccu

SEQ ID NO: 928430 - RNA, 19 nt, Artificial Sequence
  Description of Artificial Sequence: Synthetic oligonucleotide
  Sense strand starting at position 1993 of SEQ ID NO: 913452
cucagaaugagucaggcuu

SEQ ID NO: 928431 - RNA, 19 nt, Artificial Sequence
  Description of Artificial Sequence: Synthetic oligonucleotide
  Antisense strand to SEQ ID NO: 928430
aagccugacucauucugag

SEQ ID NO: 928432 - RNA, 19 nt, Artificial Sequence
  Description of Artificial Sequence: Synthetic oligonucleotide
  Sense strand starting at position 2162 of SEQ ID NO: 913452
ggcuucuuugaugaguaaa

SEQ ID NO: 928433 - RNA, 19 nt, Artificial Sequence
  Description of Artificial Sequence: Synthetic oligonucleotide
  Antisense strand to SEQ ID NO: 928432
uuuacucaucaaagaagcc

SEQ ID NO: 928434 - RNA, 19 nt, Artificial Sequence
  Description of Artificial Sequence: Synthetic oligonucleotide
  Sense strand starting at position 2851 of SEQ ID NO: 913452
aagagauggcacugguaca

SEQ ID NO: 928435 - RNA, 19 nt, Artificial Sequence
  Description of Artificial Sequence: Synthetic oligonucleotide
  Antisense strand to SEQ ID NO: 928434
uguaccagugccaucucuu

SEQ ID NO: 928436 - RNA, 19 nt, Artificial Sequence
  Description of Artificial Sequence: Synthetic oligonucleotide
  Sense strand starting at position 3136 of SEQ ID NO: 913452
cgcauugcacguuuaucau

SEQ ID NO: 928437 - RNA, 19 nt, Artificial Sequence
  Description of Artificial Sequence: Synthetic oligonucleotide
  Antisense strand to SEQ ID NO: 928436
augauaaacgugcaaugcg

SEQ ID NO: 928438 - RNA, 19 nt, Artificial Sequence
  Description of Artificial Sequence: Synthetic oligonucleotide
  Sense strand starting at position 1258 of SEQ ID NO: 913452
cagaaauccaggugucagg

SEQ ID NO: 928439 - RNA, 19 nt, Artificial Sequence
  Description of Artificial Sequence: Synthetic oligonucleotide
  Antisense strand to SEQ ID NO: 928438
ccugacaccuggauuucug

SEQ ID NO: 928440 - RNA, 19 nt, Artificial Sequence
  Description of Artificial Sequence: Synthetic oligonucleotide
  Sense strand starting at position 1708 of SEQ ID NO: 913452
ggcccaggucuuuagagau

SEQ ID NO: 928441 - RNA, 19 nt, Artificial Sequence
  Description of Artificial Sequence: Synthetic oligonucleotide
  Antisense strand to SEQ ID NO: 928440
aucucuaaagaccugggcc

SEQ ID NO: 928442 - RNA, 19 nt, Artificial Sequence
  Description of Artificial Sequence: Synthetic oligonucleotide
  Sense strand starting at position 2359 of SEQ ID NO: 913452
gugaaauaucuuugacacu

SEQ ID NO: 928443 - RNA, 19 nt, Artificial Sequence
  Description of Artificial Sequence: Synthetic oligonucleotide
  Antisense strand to SEQ ID NO: 928442
agugucaaagauauuucac

SEQ ID NO: 928444 - RNA, 19 nt, Artificial Sequence
  Description of Artificial Sequence: Synthetic oligonucleotide
  Sense strand starting at position 1518 of SEQ ID NO: 913452
ugcaaagguccuuauccaa

SEQ ID NO: 928445 - RNA, 19 nt, Artificial Sequence
  Description of Artificial Sequence: Synthetic oligonucleotide
  Antisense strand to SEQ ID NO: 928444
uuggauaaggaccuuugca

SEQ ID NO: 928446 - RNA, 19 nt, Artificial Sequence
  Description of Artificial Sequence: Synthetic oligonucleotide
  Sense strand starting at position 1867 of SEQ ID NO: 913452
acaguuugagcauauucua

SEQ ID NO: 928447 - RNA, 19 nt, Artificial Sequence
  Description of Artificial Sequence: Synthetic oligonucleotide
  Antisense strand to SEQ ID NO: 928446
uagaauaugcucaaacugu

SEQ ID NO: 928448 - RNA, 19 nt, Artificial Sequence
  Description of Artificial Sequence: Synthetic oligonucleotide
  Sense strand starting at position 2332 of SEQ ID NO: 913452
uuauaagacugauugguuu

SEQ ID NO: 928449 - RNA, 19 nt, Artificial Sequence
  Description of Artificial Sequence: Synthetic oligonucleotide
  Antisense strand to SEQ ID NO: 928448
aaaccaaucagucuuauaa

SEQ ID NO: 928450 - RNA, 19 nt, Artificial Sequence
  Description of Artificial Sequence: Synthetic oligonucleotide
  Sense strand starting at position 277 of SEQ ID NO: 913452
uacacaguuucucugggaa

SEQ ID NO: 928451 - RNA, 19 nt, Artificial Sequence
  Description of Artificial Sequence: Synthetic oligonucleotide
  Antisense strand to SEQ ID NO: 928450
uucccagagaaacugugua

SEQ ID NO: 928452 - RNA, 19 nt, Artificial Sequence
  Description of Artificial Sequence: Synthetic oligonucleotide
  Sense strand starting at position 3902 of SEQ ID NO: 913452
cacugaugugaucaugcca

SEQ ID NO: 928453 - RNA, 19 nt, Artificial Sequence
  Description of Artificial Sequence: Synthetic oligonucleotide
  Antisense strand to SEQ ID NO: 928452
uggcaugaucacaucagug

SEQ ID NO: 928454 - RNA, 19 nt, Artificial Sequence
  Description of Artificial Sequence: Synthetic oligonucleotide
  Sense strand starting at position 3467 of SEQ ID NO: 913452
uuuguuccucuguaagaga

SEQ ID NO: 928455 - RNA, 19 nt, Artificial Sequence
  Description of Artificial Sequence: Synthetic oligonucleotide
  Antisense strand to SEQ ID NO: 928454
ucucuuacagaggaacaaa

SEQ ID NO: 928456 - RNA, 19 nt, Artificial Sequence
  Description of Artificial Sequence: Synthetic oligonucleotide
  Sense strand starting at position 2181 of SEQ ID NO: 913452
acaaguuugcaugagaguu

SEQ ID NO: 928457 - RNA, 19 nt, Artificial Sequence
  Description of Artificial Sequence: Synthetic oligonucleotide
  Antisense strand to SEQ ID NO: 928456
aacucucaugcaaacuugu

SEQ ID NO: 928458 - RNA, 19 nt, Artificial Sequence
  Description of Artificial Sequence: Synthetic oligonucleotide
  Sense strand starting at position 713 of SEQ ID NO: 913452
ugguuugcuccugagacaa

SEQ ID NO: 928459 - RNA, 19 nt, Artificial Sequence
  Description of Artificial Sequence: Synthetic oligonucleotide
  Antisense strand to SEQ ID NO: 928458
uugucucaggagcaaacca

SEQ ID NO: 928460 - RNA, 19 nt, Artificial Sequence
  Description of Artificial Sequence: Synthetic oligonucleotide
  Sense strand starting at position 2245 of SEQ ID NO: 913452
acuggugauuaaucuacuu

SEQ ID NO: 928461 - RNA, 19 nt, Artificial Sequence
  Description of Artificial Sequence: Synthetic oligonucleotide
  Antisense strand to SEQ ID NO: 928460
aaguagauuaaucaccagu

SEQ ID NO: 928462 - RNA, 19 nt, Artificial Sequence
  Description of Artificial Sequence: Synthetic oligonucleotide
  Sense strand starting at position 124 of SEQ ID NO: 913452
uguagucuuauggaaguca

SEQ ID NO: 928463 - RNA, 19 nt, Artificial Sequence
  Description of Artificial Sequence: Synthetic oligonucleotide
  Antisense strand to SEQ ID NO: 928462
ugacuuccauaagacuaca

SEQ ID NO: 928464 - RNA, 19 nt, Artificial Sequence
  Description of Artificial Sequence: Synthetic oligonucleotide
  Sense strand starting at position 138 of SEQ ID NO: 913452
agucaagguuuauucugaa

SEQ ID NO: 928465 - RNA, 19 nt, Artificial Sequence
  Description of Artificial Sequence: Synthetic oligonucleotide
  Antisense strand to SEQ ID NO: 928464
uucagaauaaaccuugacu

SEQ ID NO: 928466 - RNA, 19 nt, Artificial Sequence
  Description of Artificial Sequence: Synthetic oligonucleotide
  Sense strand starting at position 3591 of SEQ ID NO: 913452
uguguuauuagauacaguu

SEQ ID NO: 928467 - RNA, 19 nt, Artificial Sequence
  Description of Artificial Sequence: Synthetic oligonucleotide
  Antisense strand to SEQ ID NO: 928466
aacuguaucuaauaacaca

SEQ ID NO: 928468 - RNA, 19 nt, Artificial Sequence
  Description of Artificial Sequence: Synthetic oligonucleotide
  Sense strand starting at position 2239 of SEQ ID NO: 913452
cgucacacuggugauuaau

SEQ ID NO: 928469 - RNA, 19 nt, Artificial Sequence
  Description of Artificial Sequence: Synthetic oligonucleotide
  Antisense strand to SEQ ID NO: 928468
auuaaucaccagugugacg

SEQ ID NO: 928470 - RNA, 19 nt, Artificial Sequence
  Description of Artificial Sequence: Synthetic oligonucleotide
  Sense strand starting at position 1864 of SEQ ID NO: 913452
cagacaguuugagcauauu

SEQ ID NO: 928471 - RNA, 19 nt, Artificial Sequence
  Description of Artificial Sequence: Synthetic oligonucleotide
  Antisense strand to SEQ ID NO: 928470
aauaugcucaaacugucug

SEQ ID NO: 928472 - RNA, 19 nt, Artificial Sequence
  Description of Artificial Sequence: Synthetic oligonucleotide
  Sense strand starting at position 3586 of SEQ ID NO: 913452
aacaguguguuauuagaua

SEQ ID NO: 928473 - RNA, 19 nt, Artificial Sequence
  Description of Artificial Sequence: Synthetic oligonucleotide
  Antisense strand to SEQ ID NO: 928472
uaucuaauaacacacuguu

SEQ ID NO: 928474 - RNA, 19 nt, Artificial Sequence
  Description of Artificial Sequence: Synthetic oligonucleotide
  Sense strand starting at position 3933 of SEQ ID NO: 913452
agcaaacauuuauggagaa

SEQ ID NO: 928475 - RNA, 19 nt, Artificial Sequence
  Description of Artificial Sequence: Synthetic oligonucleotide
  Antisense strand to SEQ ID NO: 928474
uucuccauaaauguuugcu

SEQ ID NO: 928476 - RNA, 19 nt, Artificial Sequence
  Description of Artificial Sequence: Synthetic oligonucleotide
  Sense strand starting at position 1707 of SEQ ID NO: 913452
uggcccaggucuuuagaga

SEQ ID NO: 928477 - RNA, 19 nt, Artificial Sequence
  Description of Artificial Sequence: Synthetic oligonucleotide
  Antisense strand to SEQ ID NO: 928476
ucucuaaagaccugggcca

SEQ ID NO: 928478 - RNA, 19 nt, Artificial Sequence
  Description of Artificial Sequence: Synthetic oligonucleotide
  Sense strand starting at position 1577 of SEQ ID NO: 913452
ggguuaggccuggaacgua

SEQ ID NO: 928479 - RNA, 19 nt, Artificial Sequence
  Description of Artificial Sequence: Synthetic oligonucleotide
  Antisense strand to SEQ ID NO: 928478
uacguuccaggccuaaccc

SEQ ID NO: 928480 - RNA, 19 nt, Artificial Sequence
  Description of Artificial Sequence: Synthetic oligonucleotide
  Sense strand starting at position 1405 of SEQ ID NO: 913452
auggccaucuucccugaau

SEQ ID NO: 928481 - RNA, 19 nt, Artificial Sequence
  Description of Artificial Sequence: Synthetic oligonucleotide
  Antisense strand to SEQ ID NO: 928480
auucagggaagauggccau

SEQ ID NO: 928482 - RNA, 19 nt, Artificial Sequence
  Description of Artificial Sequence: Synthetic oligonucleotide
  Sense strand starting at position 2516 of SEQ ID NO: 913453
uaggcuggugcucagaaau

SEQ ID NO: 928483 - RNA, 19 nt, Artificial Sequence
  Description of Artificial Sequence: Synthetic oligonucleotide
  Antisense strand to SEQ ID NO: 928482
auuucugagcaccagccua

SEQ ID NO: 928484 - RNA, 19 nt, Artificial Sequence
  Description of Artificial Sequence: Synthetic oligonucleotide
  Sense strand starting at position 3517 of SEQ ID NO: 913453
agagcuaacucauugcuga

SEQ ID NO: 928485 - RNA, 19 nt, Artificial Sequence
  Description of Artificial Sequence: Synthetic oligonucleotide
  Antisense strand to SEQ ID NO: 928484
ucagcaaugaguuagcucu

SEQ ID NO: 928486 - RNA, 19 nt, Artificial Sequence
  Description of Artificial Sequence: Synthetic oligonucleotide
  Sense strand starting at position 2515 of SEQ ID NO: 913453
cuaggcuggugcucagaaa

SEQ ID NO: 928487 - RNA, 19 nt, Artificial Sequence
  Description of Artificial Sequence: Synthetic oligonucleotide
  Antisense strand to SEQ ID NO: 928486
uuucugagcaccagccuag

SEQ ID NO: 928488 - RNA, 19 nt, Artificial Sequence
  Description of Artificial Sequence: Synthetic oligonucleotide
  Sense strand starting at position 1382 of SEQ ID NO: 913453
gaacaaacgucauagggaa

SEQ ID NO: 928489 - RNA, 19 nt, Artificial Sequence
  Description of Artificial Sequence: Synthetic oligonucleotide
  Antisense strand to SEQ ID NO: 928488
uucccuaugacguuuguuc

SEQ ID NO: 928490 - RNA, 19 nt, Artificial Sequence
  Description of Artificial Sequence: Synthetic oligonucleotide
  Sense strand starting at position 1776 of SEQ ID NO: 913453
cugagaguuuaggaauaac

SEQ ID NO: 928491 - RNA, 19 nt, Artificial Sequence
  Description of Artificial Sequence: Synthetic oligonucleotide
  Antisense strand to SEQ ID NO: 928490
guuauuccuaaacucucag

SEQ ID NO: 928492 - RNA, 19 nt, Artificial Sequence
  Description of Artificial Sequence: Synthetic oligonucleotide
  Sense strand starting at position 3475 of SEQ ID NO: 913453
accaacagcugagaaauau

SEQ ID NO: 928493 - RNA, 19 nt, Artificial Sequence
  Description of Artificial Sequence: Synthetic oligonucleotide
  Antisense strand to SEQ ID NO: 928492
auauuucucagcuguuggu

SEQ ID NO: 928494 - RNA, 19 nt, Artificial Sequence
  Description of Artificial Sequence: Synthetic oligonucleotide
  Sense strand starting at position 1583 of SEQ ID NO: 913453
gggugcggcucuuuccaaa

SEQ ID NO: 928495 - RNA, 19 nt, Artificial Sequence
  Description of Artificial Sequence: Synthetic oligonucleotide
  Antisense strand to SEQ ID NO: 928494
uuuggaaagagccgcaccc

SEQ ID NO: 928496 - RNA, 19 nt, Artificial Sequence
  Description of Artificial Sequence: Synthetic oligonucleotide
  Sense strand starting at position 2037 of SEQ ID NO: 913453
ccuggccucuuggaaauaa

SEQ ID NO: 928497 - RNA, 19 nt, Artificial Sequence
  Description of Artificial Sequence: Synthetic oligonucleotide
  Antisense strand to SEQ ID NO: 928496
uuauuuccaagaggccagg

SEQ ID NO: 928498 - RNA, 19 nt, Artificial Sequence
  Description of Artificial Sequence: Synthetic oligonucleotide
  Sense strand starting at position 1768 of SEQ ID NO: 913453
ggugcuuccugagaguuua

SEQ ID NO: 928499 - RNA, 19 nt, Artificial Sequence
  Description of Artificial Sequence: Synthetic oligonucleotide
  Antisense strand to SEQ ID NO: 928498
uaaacucucaggaagcacc

SEQ ID NO: 928500 - RNA, 19 nt, Artificial Sequence
  Description of Artificial Sequence: Synthetic oligonucleotide
  Sense strand starting at position 380 of SEQ ID NO: 913453
ugcuguggcucuggagaaa

SEQ ID NO: 928501 - RNA, 19 nt, Artificial Sequence
  Description of Artificial Sequence: Synthetic oligonucleotide
  Antisense strand to SEQ ID NO: 928500
uuucuccagagccacagca

SEQ ID NO: 928502 - RNA, 19 nt, Artificial Sequence
  Description of Artificial Sequence: Synthetic oligonucleotide
  Sense strand starting at position 2713 of SEQ ID NO: 913453
guucucuugucccaucagu

SEQ ID NO: 928503 - RNA, 19 nt, Artificial Sequence
  Description of Artificial Sequence: Synthetic oligonucleotide
  Antisense strand to SEQ ID NO: 928502
acugaugggacaagagaac

SEQ ID NO: 928504 - RNA, 19 nt, Artificial Sequence
  Description of Artificial Sequence: Synthetic oligonucleotide
  Sense strand starting at position 1765 of SEQ ID NO: 913453
guaggugcuuccugagagu

SEQ ID NO: 928505 - RNA, 19 nt, Artificial Sequence
  Description of Artificial Sequence: Synthetic oligonucleotide
  Antisense strand to SEQ ID NO: 928504
acucucaggaagcaccuac

SEQ ID NO: 928506 - RNA, 19 nt, Artificial Sequence
  Description of Artificial Sequence: Synthetic oligonucleotide
  Sense strand starting at position 3402 of SEQ ID NO: 913454
gagagugguaguuauggau

SEQ ID NO: 928507 - RNA, 19 nt, Artificial Sequence
  Description of Artificial Sequence: Synthetic oligonucleotide
  Antisense strand to SEQ ID NO: 928506
auccauaacuaccacucuc

SEQ ID NO: 928508 - RNA, 19 nt, Artificial Sequence
  Description of Artificial Sequence: Synthetic oligonucleotide
  Sense strand starting at position 3785 of SEQ ID NO: 913454
ggccaaacagugggagaua

SEQ ID NO: 928509 - RNA, 19 nt, Artificial Sequence
  Description of Artificial Sequence: Synthetic oligonucleotide
  Antisense strand to SEQ ID NO: 928508
uaucucccacuguuuggcc

SEQ ID NO: 928510 - RNA, 19 nt, Artificial Sequence
  Description of Artificial Sequence: Synthetic oligonucleotide
  Sense strand starting at position 560 of SEQ ID NO: 913454
gggcaagcuccuuaggaga

SEQ ID NO: 928511 - RNA, 19 nt, Artificial Sequence
  Description of Artificial Sequence: Synthetic oligonucleotide
  Antisense strand to SEQ ID NO: 928510
ucuccuaaggagcuugccc

SEQ ID NO: 928512 - RNA, 19 nt, Artificial Sequence
  Description of Artificial Sequence: Synthetic oligonucleotide
  Sense strand starting at position 3408 of SEQ ID NO: 913454
gguaguuauggaugauuaa

SEQ ID NO: 928513 - RNA, 19 nt, Artificial Sequence
  Description of Artificial Sequence: Synthetic oligonucleotide
  Antisense strand to SEQ ID NO: 928512
uuaaucauccauaacuacc

SEQ ID NO: 928514 - RNA, 19 nt, Artificial Sequence
  Description of Artificial Sequence: Synthetic oligonucleotide
  Sense strand starting at position 3726 of SEQ ID NO: 913454
ggacucuaacacugucaua

SEQ ID NO: 928515 - RNA, 19 nt, Artificial Sequence
  Description of Artificial Sequence: Synthetic oligonucleotide
  Antisense strand to SEQ ID NO: 928514
uaugacaguguuagagucc

SEQ ID NO: 928516 - RNA, 19 nt, Artificial Sequence
  Description of Artificial Sequence: Synthetic oligonucleotide
  Sense strand starting at position 3236 of SEQ ID NO: 913454
uaaguaccacaguggaauu

SEQ ID NO: 928517 - RNA, 19 nt, Artificial Sequence
  Description of Artificial Sequence: Synthetic oligonucleotide
  Antisense strand to SEQ ID NO: 928516
aauuccacugugguacuua

SEQ ID NO: 928518 - RNA, 19 nt, Artificial Sequence
  Description of Artificial Sequence: Synthetic oligonucleotide
  Sense strand starting at position 2318 of SEQ ID NO: 913454
gcuuauguagguuaaauaa

SEQ ID NO: 928519 - RNA, 19 nt, Artificial Sequence
  Description of Artificial Sequence: Synthetic oligonucleotide
  Antisense strand to SEQ ID NO: 928518
uuauuuaaccuacauaagc

SEQ ID NO: 928520 - RNA, 19 nt, Artificial Sequence
  Description of Artificial Sequence: Synthetic oligonucleotide
  Sense strand starting at position 3406 of SEQ ID NO: 913454
gugguaguuauggaugauu

SEQ ID NO: 928521 - RNA, 19 nt, Artificial Sequence
  Description of Artificial Sequence: Synthetic oligonucleotide
  Antisense strand to SEQ ID NO: 928520
aaucauccauaacuaccac

SEQ ID NO: 928522 - RNA, 19 nt, Artificial Sequence
  Description of Artificial Sequence: Synthetic oligonucleotide
  Sense strand starting at position 3401 of SEQ ID NO: 913454
ggagagugguaguuaugga

SEQ ID NO: 928523 - RNA, 19 nt, Artificial Sequence
  Description of Artificial Sequence: Synthetic oligonucleotide
  Antisense strand to SEQ ID NO: 928522
uccauaacuaccacucucc

SEQ ID NO: 928524 - RNA, 19 nt, Artificial Sequence
  Description of Artificial Sequence: Synthetic oligonucleotide
  Sense strand starting at position 238 of SEQ ID NO: 913454
gugggacuacaguagugua

SEQ ID NO: 928525 - RNA, 19 nt, Artificial Sequence
  Description of Artificial Sequence: Synthetic oligonucleotide
  Antisense strand to SEQ ID NO: 928524
uacacuacuguagucccac

SEQ ID NO: 928526 - RNA, 19 nt, Artificial Sequence
  Description of Artificial Sequence: Synthetic oligonucleotide
  Sense strand starting at position 3521 of SEQ ID NO: 913454
cagaaagguucuucugggu

SEQ ID NO: 928527 - RNA, 19 nt, Artificial Sequence
  Description of Artificial Sequence: Synthetic oligonucleotide
  Antisense strand to SEQ ID NO: 928526
acccagaagaaccuuucug

SEQ ID NO: 928528 - RNA, 19 nt, Artificial Sequence
  Description of Artificial Sequence: Synthetic oligonucleotide
  Sense strand starting at position 3750 of SEQ ID NO: 913454
ccagauucaggcuggugaa

SEQ ID NO: 928529 - RNA, 19 nt, Artificial Sequence
  Description of Artificial Sequence: Synthetic oligonucleotide
  Antisense strand to SEQ ID NO: 928528
uucaccagccugaaucugg

SEQ ID NO: 928530 - RNA, 19 nt, Artificial Sequence
  Description of Artificial Sequence: Synthetic oligonucleotide
  Sense strand starting at position 2201 of SEQ ID NO: 913454
agcaucuaacugcaaguua

SEQ ID NO: 928531 - RNA, 19 nt, Artificial Sequence
  Description of Artificial Sequence: Synthetic oligonucleotide
  Antisense strand to SEQ ID NO: 928530
uaacuugcaguuagaugcu

SEQ ID NO: 928532 - RNA, 19 nt, Artificial Sequence
  Description of Artificial Sequence: Synthetic oligonucleotide
  Sense strand starting at position 3143 of SEQ ID NO: 913454
augugaagugcauagugau

SEQ ID NO: 928533 - RNA, 19 nt, Artificial Sequence
  Description of Artificial Sequence: Synthetic oligonucleotide
  Antisense strand to SEQ ID NO: 928532
aucacuaugcacuucacau

SEQ ID NO: 928534 - RNA, 19 nt, Artificial Sequence
  Description of Artificial Sequence: Synthetic oligonucleotide
  Sense strand starting at position 2191 of SEQ ID NO: 913454
guugucugggagcaucuaa

SEQ ID NO: 928535 - RNA, 19 nt, Artificial Sequence
  Description of Artificial Sequence: Synthetic oligonucleotide
  Antisense strand to SEQ ID NO: 928534
uuagaugcucccagacaac

SEQ ID NO: 928536 - RNA, 19 nt, Artificial Sequence
  Description of Artificial Sequence: Synthetic oligonucleotide
  Sense strand starting at position 3132 of SEQ ID NO: 913454
ucuuaauagcuaugugaag

SEQ ID NO: 928537 - RNA, 19 nt, Artificial Sequence
  Description of Artificial Sequence: Synthetic oligonucleotide
  Antisense strand to SEQ ID NO: 928536
cuucacauagcuauuaaga

SEQ ID NO: 928538 - RNA, 19 nt, Artificial Sequence
  Description of Artificial Sequence: Synthetic oligonucleotide
  Sense strand starting at position 2315 of SEQ ID NO: 913454
ggagcuuauguagguuaaa

SEQ ID NO: 928539 - RNA, 19 nt, Artificial Sequence
  Description of Artificial Sequence: Synthetic oligonucleotide
  Antisense strand to SEQ ID NO: 928538
uuuaaccuacauaagcucc

SEQ ID NO: 928540 - RNA, 19 nt, Artificial Sequence
  Description of Artificial Sequence: Synthetic oligonucleotide
  Sense strand starting at position 2051 of SEQ ID NO: 913454
augcccuuccuacaguauu

SEQ ID NO: 928541 - RNA, 19 nt, Artificial Sequence
  Description of Artificial Sequence: Synthetic oligonucleotide
  Antisense strand to SEQ ID NO: 928540
aauacuguaggaagggcau

SEQ ID NO: 928542 - RNA, 19 nt, Artificial Sequence
  Description of Artificial Sequence: Synthetic oligonucleotide
  Sense strand starting at position 2183 of SEQ ID NO: 913454
ugaaucgaguugucuggga

SEQ ID NO: 928543 - RNA, 19 nt, Artificial Sequence
  Description of Artificial Sequence: Synthetic oligonucleotide
  Antisense strand to SEQ ID NO: 928542
ucccagacaacucgauuca

SEQ ID NO: 928544 - RNA, 19 nt, Artificial Sequence
  Description of Artificial Sequence: Synthetic oligonucleotide
  Sense strand starting at position 3589 of SEQ ID NO: 913454
ggugacucacccuggugau

SEQ ID NO: 928545 - RNA, 19 nt, Artificial Sequence
  Description of Artificial Sequence: Synthetic oligonucleotide
  Antisense strand to SEQ ID NO: 928544
aucaccagggugagucacc

SEQ ID NO: 928546 - RNA, 19 nt, Artificial Sequence
  Description of Artificial Sequence: Synthetic oligonucleotide
  Sense strand starting at position 506 of SEQ ID NO: 913454
gggcgacgacucugauaga

SEQ ID NO: 928547 - RNA, 19 nt, Artificial Sequence
  Description of Artificial Sequence: Synthetic oligonucleotide
  Antisense strand to SEQ ID NO: 928546
ucuaucagagucgucgccc

SEQ ID NO: 928548 - RNA, 19 nt, Artificial Sequence
  Description of Artificial Sequence: Synthetic oligonucleotide
  Sense strand starting at position 2316 of SEQ ID NO: 913454
gagcuuauguagguuaaau

SEQ ID NO: 928549 - RNA, 19 nt, Artificial Sequence
  Description of Artificial Sequence: Synthetic oligonucleotide
  Antisense strand to SEQ ID NO: 928548
auuuaaccuacauaagcuc

SEQ ID NO: 928550 - RNA, 19 nt, Artificial Sequence
  Description of Artificial Sequence: Synthetic oligonucleotide
  Sense strand starting at position 2067 of SEQ ID NO: 913454
auuacugauggcugucuaa

SEQ ID NO: 928551 - RNA, 19 nt, Artificial Sequence
  Description of Artificial Sequence: Synthetic oligonucleotide
  Antisense strand to SEQ ID NO: 928550
uuagacagccaucaguaau

SEQ ID NO: 928552 - RNA, 19 nt, Artificial Sequence
  Description of Artificial Sequence: Synthetic oligonucleotide
  Sense strand starting at position 3134 of SEQ ID NO: 913454
uuaauagcuaugugaagug

SEQ ID NO: 928553 - RNA, 19 nt, Artificial Sequence
  Description of Artificial Sequence: Synthetic oligonucleotide
  Antisense strand to SEQ ID NO: 928552
cacuucacauagcuauuaa

SEQ ID NO: 928554 - RNA, 19 nt, Artificial Sequence
  Description of Artificial Sequence: Synthetic oligonucleotide
  Sense strand starting at position 2140 of SEQ ID NO: 913454
ggguuauccucacauuuga

SEQ ID NO: 928555 - RNA, 19 nt, Artificial Sequence
  Description of Artificial Sequence: Synthetic oligonucleotide
  Antisense strand to SEQ ID NO: 928554
ucaaaugugaggauaaccc

SEQ ID NO: 928556 - RNA, 19 nt, Artificial Sequence
  Description of Artificial Sequence: Synthetic oligonucleotide
  Sense strand starting at position 2407 of SEQ ID NO: 913454
cucacaauguuggucuuau

SEQ ID NO: 928557 - RNA, 19 nt, Artificial Sequence
  Description of Artificial Sequence: Synthetic oligonucleotide
  Antisense strand to SEQ ID NO: 928556
auaagaccaacauugugag

SEQ ID NO: 928558 - RNA, 19 nt, Artificial Sequence
  Description of Artificial Sequence: Synthetic oligonucleotide
  Sense strand starting at position 2408 of SEQ ID NO: 913454
ucacaauguuggucuuauu

SEQ ID NO: 928559 - RNA, 19 nt, Artificial Sequence
  Description of Artificial Sequence: Synthetic oligonucleotide
  Antisense strand to SEQ ID NO: 928558
aauaagaccaacauuguga

SEQ ID NO: 928560 - RNA, 19 nt, Artificial Sequence
  Description of Artificial Sequence: Synthetic oligonucleotide
  Sense strand starting at position 3133 of SEQ ID NO: 913454
cuuaauagcuaugugaagu

SEQ ID NO: 928561 - RNA, 19 nt, Artificial Sequence
  Description of Artificial Sequence: Synthetic oligonucleotide
  Antisense strand to SEQ ID NO: 928560
acuucacauagcuauuaag

SEQ ID NO: 928562 - RNA, 19 nt, Artificial Sequence
  Description of Artificial Sequence: Synthetic oligonucleotide
  Sense strand starting at position 2199 of SEQ ID NO: 913454
ggagcaucuaacugcaagu

SEQ ID NO: 928563 - RNA, 19 nt, Artificial Sequence
  Description of Artificial Sequence: Synthetic oligonucleotide
  Antisense strand to SEQ ID NO: 928562
acuugcaguuagaugcucc

SEQ ID NO: 928564 - RNA, 19 nt, Artificial Sequence
  Description of Artificial Sequence: Synthetic oligonucleotide
  Sense strand starting at position 2286 of SEQ ID NO: 913454
acaguugguguccagugua

SEQ ID NO: 928565 - RNA, 19 nt, Artificial Sequence
  Description of Artificial Sequence: Synthetic oligonucleotide
  Antisense strand to SEQ ID NO: 928564
uacacuggacaccaacugu

SEQ ID NO: 928566 - RNA, 19 nt, Artificial Sequence
  Description of Artificial Sequence: Synthetic oligonucleotide
  Sense strand starting at position 3530 of SEQ ID NO: 913454
ucuucuggguucucaguau

SEQ ID NO: 928567 - RNA, 19 nt, Artificial Sequence
  Description of Artificial Sequence: Synthetic oligonucleotide
  Antisense strand to SEQ ID NO: 928566
auacugagaacccagaaga

SEQ ID NO: 928568 - RNA, 19 nt, Artificial Sequence
  Description of Artificial Sequence: Synthetic oligonucleotide
  Sense strand starting at position 74 of SEQ ID NO: 913454
auacuugacuucgcucauu

SEQ ID NO: 928569 - RNA, 19 nt, Artificial Sequence
  Description of Artificial Sequence: Synthetic oligonucleotide
  Antisense strand to SEQ ID NO: 928568
aaugagcgaagucaaguau

SEQ ID NO: 928570 - RNA, 19 nt, Artificial Sequence
  Description of Artificial Sequence: Synthetic oligonucleotide
  Sense strand starting at position 2212 of SEQ ID NO: 913454
gcaaguuaugucgauccga

SEQ ID NO: 928571 - RNA, 19 nt, Artificial Sequence
  Description of Artificial Sequence: Synthetic oligonucleotide
  Antisense strand to SEQ ID NO: 928570
ucggaucgacauaacuugc

SEQ ID NO: 928572 - RNA, 19 nt, Artificial Sequence
  Description of Artificial Sequence: Synthetic oligonucleotide
  Sense strand starting at position 2406 of SEQ ID NO: 913454
gcucacaauguuggucuua

SEQ ID NO: 928573 - RNA, 19 nt, Artificial Sequence
  Description of Artificial Sequence: Synthetic oligonucleotide
  Antisense strand to SEQ ID NO: 928572
uaagaccaacauugugagc

SEQ ID NO: 928574 - RNA, 19 nt, Artificial Sequence
  Description of Artificial Sequence: Synthetic oligonucleotide
  Sense strand starting at position 2294 of SEQ ID NO: 913454
uguccaguguauucaguga

SEQ ID NO: 928575 - RNA, 19 nt, Artificial Sequence
  Description of Artificial Sequence: Synthetic oligonucleotide
  Antisense strand to SEQ ID NO: 928574
ucacugaauacacuggaca

SEQ ID NO: 928576 - RNA, 19 nt, Artificial Sequence
  Description of Artificial Sequence: Synthetic oligonucleotide
  Sense strand starting at position 2187 of SEQ ID NO: 913454
ucgaguugucugggagcau

SEQ ID NO: 928577 - RNA, 19 nt, Artificial Sequence
  Description of Artificial Sequence: Synthetic oligonucleotide
  Antisense strand to SEQ ID NO: 928576
augcucccagacaacucga

SEQ ID NO: 928578 - RNA, 19 nt, Artificial Sequence
  Description of Artificial Sequence: Synthetic oligonucleotide
  Sense strand starting at position 1810 of SEQ ID NO: 913454
ccgggaugcucuucccagu

SEQ ID NO: 928579 - RNA, 19 nt, Artificial Sequence
  Description of Artificial Sequence: Synthetic oligonucleotide
  Antisense strand to SEQ ID NO: 928578
acugggaagagcaucccgg

SEQ ID NO: 928580 - RNA, 19 nt, Artificial Sequence
  Description of Artificial Sequence: Synthetic oligonucleotide
  Sense strand starting at position 66 of SEQ ID NO: 913454
cgcaguguauacuugacuu

SEQ ID NO: 928581 - RNA, 19 nt, Artificial Sequence
  Description of Artificial Sequence: Synthetic oligonucleotide
  Antisense strand to SEQ ID NO: 928580
aagucaaguauacacugcg

SEQ ID NO: 928582 - RNA, 19 nt, Artificial Sequence
  Description of Artificial Sequence: Synthetic oligonucleotide
  Sense strand starting at position 3613 of SEQ ID NO: 913454
gcuauucgugacugagcca

SEQ ID NO: 928583 - RNA, 19 nt, Artificial Sequence
  Description of Artificial Sequence: Synthetic oligonucleotide
  Antisense strand to SEQ ID NO: 928582
uggcucagucacgaauagc

SEQ ID NO: 928584 - RNA, 19 nt, Artificial Sequence
  Description of Artificial Sequence: Synthetic oligonucleotide
  Sense strand starting at position 3607 of SEQ ID NO: 913454
ugucaugcuauucgugacu

SEQ ID NO: 928585 - RNA, 19 nt, Artificial Sequence
  Description of Artificial Sequence: Synthetic oligonucleotide
  Antisense strand to SEQ ID NO: 928584
agucacgaauagcaugaca

SEQ ID NO: 928586 - RNA, 19 nt, Artificial Sequence
  Description of Artificial Sequence: Synthetic oligonucleotide
  Sense strand starting at position 3682 of SEQ ID NO: 913455
aggaacagaaauuguguau

SEQ ID NO: 928587 - RNA, 19 nt, Artificial Sequence
  Description of Artificial Sequence: Synthetic oligonucleotide
  Antisense strand to SEQ ID NO: 928586
auacacaauuucuguuccu

SEQ ID NO: 928588 - RNA, 19 nt, Artificial Sequence
  Description of Artificial Sequence: Synthetic oligonucleotide
  Sense strand starting at position 1565 of SEQ ID NO: 913455
ucuagauagguaggacuua

SEQ ID NO: 928589 - RNA, 19 nt, Artificial Sequence
  Description of Artificial Sequence: Synthetic oligonucleotide
  Antisense strand to SEQ ID NO: 928588
uaaguccuaccuaucuaga

SEQ ID NO: 928590 - RNA, 19 nt, Artificial Sequence
  Description of Artificial Sequence: Synthetic oligonucleotide
  Sense strand starting at position 2894 of SEQ ID NO: 913455
gcugucuauacugaaggaa

SEQ ID NO: 928591 - RNA, 19 nt, Artificial Sequence
  Description of Artificial Sequence: Synthetic oligonucleotide
  Antisense strand to SEQ ID NO: 928590
uuccuucaguauagacagc

SEQ ID NO: 928592 - RNA, 19 nt, Artificial Sequence
  Description of Artificial Sequence: Synthetic oligonucleotide
  Sense strand starting at position 787 of SEQ ID NO: 913455
uucuacaugcaaggaaaua

SEQ ID NO: 928593 - RNA, 19 nt, Artificial Sequence
  Description of Artificial Sequence: Synthetic oligonucleotide
  Antisense strand to SEQ ID NO: 928592
uauuuccuugcauguagaa

SEQ ID NO: 928594 - RNA, 19 nt, Artificial Sequence
  Description of Artificial Sequence: Synthetic oligonucleotide
  Sense strand starting at position 2137 of SEQ ID NO: 913455
uuuaguaaccuguaacaca

SEQ ID NO: 928595 - RNA, 19 nt, Artificial Sequence
  Description of Artificial Sequence: Synthetic oligonucleotide
  Antisense strand to SEQ ID NO: 928594
uguguuacagguuacuaaa

SEQ ID NO: 928596 - RNA, 19 nt, Artificial Sequence
  Description of Artificial Sequence: Synthetic oligonucleotide
  Sense strand starting at position 1468 of SEQ ID NO: 913455
agacuuagauggucuacua

SEQ ID NO: 928597 - RNA, 19 nt, Artificial Sequence
  Description of Artificial Sequence: Synthetic oligonucleotide
  Antisense strand to SEQ ID NO: 928596
uaguagaccaucuaagucu

SEQ ID NO: 928598 - RNA, 19 nt, Artificial Sequence
  Description of Artificial Sequence: Synthetic oligonucleotide
  Sense strand starting at position 545 of SEQ ID NO: 913455
gaggaauucuaaucacugu

SEQ ID NO: 928599 - RNA, 19 nt, Artificial Sequence
  Description of Artificial Sequence: Synthetic oligonucleotide
  Antisense strand to SEQ ID NO: 928598
acagugauuagaauuccuc

SEQ ID NO: 928600 - RNA, 19 nt, Artificial Sequence
  Description of Artificial Sequence: Synthetic oligonucleotide
  Sense strand starting at position 821 of SEQ ID NO: 913455
auggcuacucuugaaucau

SEQ ID NO: 928601 - RNA, 19 nt, Artificial Sequence
  Description of Artificial Sequence: Synthetic oligonucleotide
  Antisense strand to SEQ ID NO: 928600
augauucaagaguagccau

SEQ ID NO: 928602 - RNA, 19 nt, Artificial Sequence
  Description of Artificial Sequence: Synthetic oligonucleotide
  Sense strand starting at position 2973 of SEQ ID NO: 913455
auaagauugggucggagau

SEQ ID NO: 928603 - RNA, 19 nt, Artificial Sequence
  Description of Artificial Sequence: Synthetic oligonucleotide
  Antisense strand to SEQ ID NO: 928602
aucuccgacccaaucuuau

SEQ ID NO: 928604 - RNA, 19 nt, Artificial Sequence
  Description of Artificial Sequence: Synthetic oligonucleotide
  Sense strand starting at position 2611 of SEQ ID NO: 913455
ggacuuugauguuuaagac

SEQ ID NO: 928605 - RNA, 19 nt, Artificial Sequence
  Description of Artificial Sequence: Synthetic oligonucleotide
  Antisense strand to SEQ ID NO: 928604
gucuuaaacaucaaagucc

SEQ ID NO: 928606 - RNA, 19 nt, Artificial Sequence
  Description of Artificial Sequence: Synthetic oligonucleotide
  Sense strand starting at position 2974 of SEQ ID NO: 913455
uaagauugggucggagaug

SEQ ID NO: 928607 - RNA, 19 nt, Artificial Sequence
  Description of Artificial Sequence: Synthetic oligonucleotide
  Antisense strand to SEQ ID NO: 928606
caucuccgacccaaucuua

SEQ ID NO: 928608 - RNA, 19 nt, Artificial Sequence
  Description of Artificial Sequence: Synthetic oligonucleotide
  Sense strand starting at position 458 of SEQ ID NO: 913455
uuuaauugucacuagggua

SEQ ID NO: 928609 - RNA, 19 nt, Artificial Sequence
  Description of Artificial Sequence: Synthetic oligonucleotide
  Antisense strand to SEQ ID NO: 928608
uacccuagugacaauuaaa

SEQ ID NO: 928610 - RNA, 19 nt, Artificial Sequence
  Description of Artificial Sequence: Synthetic oligonucleotide
  Sense strand starting at position 2620 of SEQ ID NO: 913455
uguuuaagacagugaugaa

SEQ ID NO: 928611 - RNA, 19 nt, Artificial Sequence
  Description of Artificial Sequence: Synthetic oligonucleotide
  Antisense strand to SEQ ID NO: 928610
uucaucacugucuuaaaca

SEQ ID NO: 928612 - RNA, 19 nt, Artificial Sequence
  Description of Artificial Sequence: Synthetic oligonucleotide
  Sense strand starting at position 1589 of SEQ ID NO: 913455
aguaaucuagcugagaggu

SEQ ID NO: 928613 - RNA, 19 nt, Artificial Sequence
  Description of Artificial Sequence: Synthetic oligonucleotide
  Antisense strand to SEQ ID NO: 928612
accucucagcuagauuacu

SEQ ID NO: 928614 - RNA, 19 nt, Artificial Sequence
  Description of Artificial Sequence: Synthetic oligonucleotide
  Sense strand starting at position 2367 of SEQ ID NO: 913455
agucuugaguaaccaauga

SEQ ID NO: 928615 - RNA, 19 nt, Artificial Sequence
  Description of Artificial Sequence: Synthetic oligonucleotide
  Antisense strand to SEQ ID NO: 928614
ucauugguuacucaagacu

SEQ ID NO: 928616 - RNA, 19 nt, Artificial Sequence
  Description of Artificial Sequence: Synthetic oligonucleotide
  Sense strand starting at position 1814 of SEQ ID NO: 913455
ugaucagagucuucccaga

SEQ ID NO: 928617 - RNA, 19 nt, Artificial Sequence
  Description of Artificial Sequence: Synthetic oligonucleotide
  Antisense strand to SEQ ID NO: 928616
ucugggaagacucugauca

SEQ ID NO: 928618 - RNA, 19 nt, Artificial Sequence
  Description of Artificial Sequence: Synthetic oligonucleotide
  Sense strand starting at position 1816 of SEQ ID NO: 913455
aucagagucuucccagaug

SEQ ID NO: 928619 - RNA, 19 nt, Artificial Sequence
  Description of Artificial Sequence: Synthetic oligonucleotide
  Antisense strand to SEQ ID NO: 928618
caucugggaagacucugau

SEQ ID NO: 928620 - RNA, 19 nt, Artificial Sequence
  Description of Artificial Sequence: Synthetic oligonucleotide
  Sense strand starting at position 1587 of SEQ ID NO: 913455
acaguaaucuagcugagag

SEQ ID NO: 928621 - RNA, 19 nt, Artificial Sequence
  Description of Artificial Sequence: Synthetic oligonucleotide
  Antisense strand to SEQ ID NO: 928620
cucucagcuagauuacugu

SEQ ID NO: 928622 - RNA, 19 nt, Artificial Sequence
  Description of Artificial Sequence: Synthetic oligonucleotide
  Sense strand starting at position 1835 of SEQ ID NO: 913455
cugaaauccugcucaggga

SEQ ID NO: 928623 - RNA, 19 nt, Artificial Sequence
  Description of Artificial Sequence: Synthetic oligonucleotide
  Antisense strand to SEQ ID NO: 928622
ucccugagcaggauuucag

SEQ ID NO: 928624 - RNA, 19 nt, Artificial Sequence
  Description of Artificial Sequence: Synthetic oligonucleotide
  Sense strand starting at position 2245 of SEQ ID NO: 913455
agaguugaacguuaacuuu

SEQ ID NO: 928625 - RNA, 19 nt, Artificial Sequence
  Description of Artificial Sequence: Synthetic oligonucleotide
  Antisense strand to SEQ ID NO: 928624
aaaguuaacguucaacucu

SEQ ID NO: 928626 - RNA, 19 nt, Artificial Sequence
  Description of Artificial Sequence: Synthetic oligonucleotide
  Sense strand starting at position 2460 of SEQ ID NO: 913455
ucaaacuuguccuugaaug

SEQ ID NO: 928627 - RNA, 19 nt, Artificial Sequence
  Description of Artificial Sequence: Synthetic oligonucleotide
  Antisense strand to SEQ ID NO: 928626
cauucaaggacaaguuuga

SEQ ID NO: 928628 - RNA, 19 nt, Artificial Sequence
  Description of Artificial Sequence: Synthetic oligonucleotide
  Sense strand starting at position 1606 of SEQ ID NO: 913455
guuguauguguguuugcau

SEQ ID NO: 928629 - RNA, 19 nt, Artificial Sequence
  Description of Artificial Sequence: Synthetic oligonucleotide
  Antisense strand to SEQ ID NO: 928628
augcaaacacacauacaac

SEQ ID NO: 928630 - RNA, 19 nt, Artificial Sequence
  Description of Artificial Sequence: Synthetic oligonucleotide
  Sense strand starting at position 943 of SEQ ID NO: 913455
caguuucuagaggguuaga

SEQ ID NO: 928631 - RNA, 19 nt, Artificial Sequence
  Description of Artificial Sequence: Synthetic oligonucleotide
  Antisense strand to SEQ ID NO: 928630
ucuaacccucuagaaacug

SEQ ID NO: 928632 - RNA, 19 nt, Artificial Sequence
  Description of Artificial Sequence: Synthetic oligonucleotide
  Sense strand starting at position 2862 of SEQ ID NO: 913455
cagacaagugacugucuca

SEQ ID NO: 928633 - RNA, 19 nt, Artificial Sequence
  Description of Artificial Sequence: Synthetic oligonucleotide
  Antisense strand to SEQ ID NO: 928632
ugagacagucacuugucug

SEQ ID NO: 928634 - RNA, 19 nt, Artificial Sequence
  Description of Artificial Sequence: Synthetic oligonucleotide
  Sense strand starting at position 2890 of SEQ ID NO: 913455
aagugcugucuauacugaa

SEQ ID NO: 928635 - RNA, 19 nt, Artificial Sequence
  Description of Artificial Sequence: Synthetic oligonucleotide
  Antisense strand to SEQ ID NO: 928634
uucaguauagacagcacuu

SEQ ID NO: 928636 - RNA, 19 nt, Artificial Sequence
  Description of Artificial Sequence: Synthetic oligonucleotide
  Sense strand starting at position 1872 of SEQ ID NO: 913455
cccuaccuucuguggagaa

SEQ ID NO: 928637 - RNA, 19 nt, Artificial Sequence
  Description of Artificial Sequence: Synthetic oligonucleotide
  Antisense strand to SEQ ID NO: 928636
uucuccacagaagguaggg

SEQ ID NO: 928638 - RNA, 19 nt, Artificial Sequence
  Description of Artificial Sequence: Synthetic oligonucleotide
  Sense strand starting at position 401 of SEQ ID NO: 913455
ugcuacagauaguccuaaa

SEQ ID NO: 928639 - RNA, 19 nt, Artificial Sequence
  Description of Artificial Sequence: Synthetic oligonucleotide
  Antisense strand to SEQ ID NO: 928638
uuuaggacuaucuguagca

SEQ ID NO: 928640 - RNA, 19 nt, Artificial Sequence
  Description of Artificial Sequence: Synthetic oligonucleotide
  Sense strand starting at position 654 of SEQ ID NO: 913455
cugacacuggguuguaaau

SEQ ID NO: 928641 - RNA, 19 nt, Artificial Sequence
  Description of Artificial Sequence: Synthetic oligonucleotide
  Antisense strand to SEQ ID NO: 928640
auuuacaacccagugucag

SEQ ID NO: 928642 - RNA, 19 nt, Artificial Sequence
  Description of Artificial Sequence: Synthetic oligonucleotide
  Sense strand starting at position 930 of SEQ ID NO: 913455
aaauaaauguaggcaguuu

SEQ ID NO: 928643 - RNA, 19 nt, Artificial Sequence
  Description of Artificial Sequence: Synthetic oligonucleotide
  Antisense strand to SEQ ID NO: 928642
aaacugccuacauuuauuu

SEQ ID NO: 928644 - RNA, 19 nt, Artificial Sequence
  Description of Artificial Sequence: Synthetic oligonucleotide
  Sense strand starting at position 2029 of SEQ ID NO: 913455
gagucauagagagguguuu

SEQ ID NO: 928645 - RNA, 19 nt, Artificial Sequence
  Description of Artificial Sequence: Synthetic oligonucleotide
  Antisense strand to SEQ ID NO: 928644
aaacaccucucuaugacuc

SEQ ID NO: 928646 - RNA, 19 nt, Artificial Sequence
  Description of Artificial Sequence: Synthetic oligonucleotide
  Sense strand starting at position 2534 of SEQ ID NO: 913455
ccuguauugaggcauguau

SEQ ID NO: 928647 - RNA, 19 nt, Artificial Sequence
  Description of Artificial Sequence: Synthetic oligonucleotide
  Antisense strand to SEQ ID NO: 928646
auacaugccucaauacagg

SEQ ID NO: 928648 - RNA, 19 nt, Artificial Sequence
  Description of Artificial Sequence: Synthetic oligonucleotide
  Sense strand starting at position 2242 of SEQ ID NO: 913455
ucuagaguugaacguuaac

SEQ ID NO: 928649 - RNA, 19 nt, Artificial Sequence
  Description of Artificial Sequence: Synthetic oligonucleotide
  Antisense strand to SEQ ID NO: 928648
guuaacguucaacucuaga

SEQ ID NO: 928650 - RNA, 19 nt, Artificial Sequence
  Description of Artificial Sequence: Synthetic oligonucleotide
  Sense strand starting at position 3131 of SEQ ID NO: 913455
gggucugaguucccuuuaa

SEQ ID NO: 928651 - RNA, 19 nt, Artificial Sequence
  Description of Artificial Sequence: Synthetic oligonucleotide
  Antisense strand to SEQ ID NO: 928650
uuaaagggaacucagaccc

SEQ ID NO: 928652 - RNA, 19 nt, Artificial Sequence
  Description of Artificial Sequence: Synthetic oligonucleotide
  Sense strand starting at position 1611 of SEQ ID NO: 913455
auguguguuugcauggcga

SEQ ID NO: 928653 - RNA, 19 nt, Artificial Sequence
  Description of Artificial Sequence: Synthetic oligonucleotide
  Antisense strand to SEQ ID NO: 928652
ucgccaugcaaacacacau

SEQ ID NO: 928654 - RNA, 19 nt, Artificial Sequence
  Description of Artificial Sequence: Synthetic oligonucleotide
  Sense strand starting at position 308 of SEQ ID NO: 913455
cuaaaugucuaagcaugua

SEQ ID NO: 928655 - RNA, 19 nt, Artificial Sequence
  Description of Artificial Sequence: Synthetic oligonucleotide
  Antisense strand to SEQ ID NO: 928654
uacaugcuuagacauuuag

SEQ ID NO: 928656 - RNA, 19 nt, Artificial Sequence
  Description of Artificial Sequence: Synthetic oligonucleotide
  Sense strand starting at position 2536 of SEQ ID NO: 913455
uguauugaggcauguauga

SEQ ID NO: 928657 - RNA, 19 nt, Artificial Sequence
  Description of Artificial Sequence: Synthetic oligonucleotide
  Antisense strand to SEQ ID NO: 928656
ucauacaugccucaauaca

SEQ ID NO: 928658 - RNA, 19 nt, Artificial Sequence
  Description of Artificial Sequence: Synthetic oligonucleotide
  Sense strand starting at position 3267 of SEQ ID NO: 913455
uuaggauguuucccaugca

SEQ ID NO: 928659 - RNA, 19 nt, Artificial Sequence
  Description of Artificial Sequence: Synthetic oligonucleotide
  Antisense strand to SEQ ID NO: 928658
ugcaugggaaacauccuaa

SEQ ID NO: 928660 - RNA, 19 nt, Artificial Sequence
  Description of Artificial Sequence: Synthetic oligonucleotide
  Sense strand starting at position 1105 of SEQ ID NO: 913455
gauggugaaaccugucugu

SEQ ID NO: 928661 - RNA, 19 nt, Artificial Sequence
  Description of Artificial Sequence: Synthetic oligonucleotide
  Antisense strand to SEQ ID NO: 928660
acagacagguuucaccauc

SEQ ID NO: 928662 - RNA, 19 nt, Artificial Sequence
  Description of Artificial Sequence: Synthetic oligonucleotide
  Sense strand starting at position 942 of SEQ ID NO: 913455
gcaguuucuagaggguuag

SEQ ID NO: 928663 - RNA, 19 nt, Artificial Sequence
  Description of Artificial Sequence: Synthetic oligonucleotide
  Antisense strand to SEQ ID NO: 928662
cuaacccucuagaaacugc

SEQ ID NO: 928664 - RNA, 19 nt, Artificial Sequence
  Description of Artificial Sequence: Synthetic oligonucleotide
  Sense strand starting at position 2470 of SEQ ID NO: 913455
ccuugaaugucuuugaguc

SEQ ID NO: 928665 - RNA, 19 nt, Artificial Sequence
  Description of Artificial Sequence: Synthetic oligonucleotide
  Antisense strand to SEQ ID NO: 928664
gacucaaagacauucaagg

SEQ ID NO: 928666 - RNA, 19 nt, Artificial Sequence
  Description of Artificial Sequence: Synthetic oligonucleotide
  Sense strand starting at position 2730 of SEQ ID NO: 913456
gaaagaguucuauaagcuc

SEQ ID NO: 928667 - RNA, 19 nt, Artificial Sequence
  Description of Artificial Sequence: Synthetic oligonucleotide
  Antisense strand to SEQ ID NO: 928666
gagcuuauagaacucuuuc

SEQ ID NO: 928668 - RNA, 19 nt, Artificial Sequence
  Description of Artificial Sequence: Synthetic oligonucleotide
  Sense strand starting at position 3921 of SEQ ID NO: 913456
acgcuuaagauauauugga

SEQ ID NO: 928669 - RNA, 19 nt, Artificial Sequence
  Description of Artificial Sequence: Synthetic oligonucleotide
  Antisense strand to SEQ ID NO: 928668
uccaauauaucuuaagcgu

SEQ ID NO: 928670 - RNA, 19 nt, Artificial Sequence
  Description of Artificial Sequence: Synthetic oligonucleotide
  Sense strand starting at position 3012 of SEQ ID NO: 913456
ggugacauuugcuugucaa

SEQ ID NO: 928671 - RNA, 19 nt, Artificial Sequence
  Description of Artificial Sequence: Synthetic oligonucleotide
  Antisense strand to SEQ ID NO: 928670
uugacaagcaaaugucacc

SEQ ID NO: 928672 - RNA, 19 nt, Artificial Sequence
  Description of Artificial Sequence: Synthetic oligonucleotide
  Sense strand starting at position 3061 of SEQ ID NO: 913456
uuauuacaucagggugaga

SEQ ID NO: 928673 - RNA, 19 nt, Artificial Sequence
  Description of Artificial Sequence: Synthetic oligonucleotide
  Antisense strand to SEQ ID NO: 928672
ucucacccugauguaauaa

SEQ ID NO: 928674 - RNA, 19 nt, Artificial Sequence
  Description of Artificial Sequence: Synthetic oligonucleotide
  Sense strand starting at position 3011 of SEQ ID NO: 913456
gggugacauuugcuuguca

SEQ ID NO: 928675 - RNA, 19 nt, Artificial Sequence
  Description of Artificial Sequence: Synthetic oligonucleotide
  Antisense strand to SEQ ID NO: 928674
ugacaagcaaaugucaccc

SEQ ID NO: 928676 - RNA, 19 nt, Artificial Sequence
  Description of Artificial Sequence: Synthetic oligonucleotide
  Sense strand starting at position 2629 of SEQ ID NO: 913456
ucgcuaaauguacaagaaa

SEQ ID NO: 928677 - RNA, 19 nt, Artificial Sequence
  Description of Artificial Sequence: Synthetic oligonucleotide
  Antisense strand to SEQ ID NO: 928676
uuucuuguacauuuagcga

SEQ ID NO: 928678 - RNA, 19 nt, Artificial Sequence
  Description of Artificial Sequence: Synthetic oligonucleotide
  Sense strand starting at position 3914 of SEQ ID NO: 913456
uugacuaacgcuuaagaua

SEQ ID NO: 928679 - RNA, 19 nt, Artificial Sequence
  Description of Artificial Sequence: Synthetic oligonucleotide
  Antisense strand to SEQ ID NO: 928678
uaucuuaagcguuagucaa

SEQ ID NO: 928680 - RNA, 19 nt, Artificial Sequence
  Description of Artificial Sequence: Synthetic oligonucleotide
  Sense strand starting at position 2985 of SEQ ID NO: 913456
aggagcaacagaugucaau

SEQ ID NO: 928681 - RNA, 19 nt, Artificial Sequence
  Description of Artificial Sequence: Synthetic oligonucleotide
  Antisense strand to SEQ ID NO: 928680
auugacaucuguugcuccu

SEQ ID NO: 928682 - RNA, 19 nt, Artificial Sequence
  Description of Artificial Sequence: Synthetic oligonucleotide
  Sense strand starting at position 3818 of SEQ ID NO: 913456
ugaagaguucuguagguga

SEQ ID NO: 928683 - RNA, 19 nt, Artificial Sequence
  Description of Artificial Sequence: Synthetic oligonucleotide
  Antisense strand to SEQ ID NO: 928682
ucaccuacagaacucuuca

SEQ ID NO: 928684 - RNA, 19 nt, Artificial Sequence
  Description of Artificial Sequence: Synthetic oligonucleotide
  Sense strand starting at position 3531 of SEQ ID NO: 913456
uuauaaaugcgcgccuauu

SEQ ID NO: 928685 - RNA, 19 nt, Artificial Sequence
  Description of Artificial Sequence: Synthetic oligonucleotide
  Antisense strand to SEQ ID NO: 928684
aauaggcgcgcauuuauaa

SEQ ID NO: 928686 - RNA, 19 nt, Artificial Sequence
  Description of Artificial Sequence: Synthetic oligonucleotide
  Sense strand starting at position 3013 of SEQ ID NO: 913456
gugacauuugcuugucaau

SEQ ID NO: 928687 - RNA, 19 nt, Artificial Sequence
  Description of Artificial Sequence: Synthetic oligonucleotide
  Antisense strand to SEQ ID NO: 928686
auugacaagcaaaugucac

SEQ ID NO: 928688 - RNA, 19 nt, Artificial Sequence
  Description of Artificial Sequence: Synthetic oligonucleotide
  Sense strand starting at position 2883 of SEQ ID NO: 913456
guagauaucaggcaaguua

SEQ ID NO: 928689 - RNA, 19 nt, Artificial Sequence
  Description of Artificial Sequence: Synthetic oligonucleotide
  Antisense strand to SEQ ID NO: 928688
uaacuugccugauaucuac

SEQ ID NO: 928690 - RNA, 19 nt, Artificial Sequence
  Description of Artificial Sequence: Synthetic oligonucleotide
  Sense strand starting at position 3048 of SEQ ID NO: 913456
ggaagacggugacuuauua

SEQ ID NO: 928691 - RNA, 19 nt, Artificial Sequence
  Description of Artificial Sequence: Synthetic oligonucleotide
  Antisense strand to SEQ ID NO: 928690
uaauaagucaccgucuucc

SEQ ID NO: 928692 - RNA, 19 nt, Artificial Sequence
  Description of Artificial Sequence: Synthetic oligonucleotide
  Sense strand starting at position 2840 of SEQ ID NO: 913456
gaaggaacagcaugguuua

SEQ ID NO: 928693 - RNA, 19 nt, Artificial Sequence
  Description of Artificial Sequence: Synthetic oligonucleotide
  Antisense strand to SEQ ID NO: 928692
uaaaccaugcuguuccuuc

SEQ ID NO: 928694 - RNA, 19 nt, Artificial Sequence
  Description of Artificial Sequence: Synthetic oligonucleotide
  Sense strand starting at position 3823 of SEQ ID NO: 913456
aguucuguaggugacacaa

SEQ ID NO: 928695 - RNA, 19 nt, Artificial Sequence
  Description of Artificial Sequence: Synthetic oligonucleotide
  Antisense strand to SEQ ID NO: 928694
uugugucaccuacagaacu

SEQ ID NO: 928696 - RNA, 19 nt, Artificial Sequence
  Description of Artificial Sequence: Synthetic oligonucleotide
  Sense strand starting at position 2739 of SEQ ID NO: 913456
cuauaagcuccauagcaga

SEQ ID NO: 928697 - RNA, 19 nt, Artificial Sequence
  Description of Artificial Sequence: Synthetic oligonucleotide
  Antisense strand to SEQ ID NO: 928696
ucugcuauggagcuuauag

SEQ ID NO: 928698 - RNA, 19 nt, Artificial Sequence
  Description of Artificial Sequence: Synthetic oligonucleotide
  Sense strand starting at position 1931 of SEQ ID NO: 913456
gccgcuuuggcaucucauu

SEQ ID NO: 928699 - RNA, 19 nt, Artificial Sequence
  Description of Artificial Sequence: Synthetic oligonucleotide
  Antisense strand to SEQ ID NO: 928698
aaugagaugccaaagcggc

SEQ ID NO: 928700 - RNA, 19 nt, Artificial Sequence
  Description of Artificial Sequence: Synthetic oligonucleotide
  Sense strand starting at position 3045 of SEQ ID NO: 913456
cugggaagacggugacuua

SEQ ID NO: 928701 - RNA, 19 nt, Artificial Sequence
  Description of Artificial Sequence: Synthetic oligonucleotide
  Antisense strand to SEQ ID NO: 928700
uaagucaccgucuucccag

SEQ ID NO: 928702 - RNA, 19 nt, Artificial Sequence
  Description of Artificial Sequence: Synthetic oligonucleotide
  Sense strand starting at position 3024 of SEQ ID NO: 913456
uugucaauacgaggaugau

SEQ ID NO: 928703 - RNA, 19 nt, Artificial Sequence
  Description of Artificial Sequence: Synthetic oligonucleotide
  Antisense strand to SEQ ID NO: 928702
aucauccucguauugacaa

SEQ ID NO: 928704 - RNA, 19 nt, Artificial Sequence
  Description of Artificial Sequence: Synthetic oligonucleotide
  Sense strand starting at position 2420 of SEQ ID NO: 913456
aacagugagguauguugaa

SEQ ID NO: 928705 - RNA, 19 nt, Artificial Sequence
  Description of Artificial Sequence: Synthetic oligonucleotide
  Antisense strand to SEQ ID NO: 928704
uucaacauaccucacuguu

SEQ ID NO: 928706 - RNA, 19 nt, Artificial Sequence
  Description of Artificial Sequence: Synthetic oligonucleotide
  Sense strand starting at position 2341 of SEQ ID NO: 913456
ccagaugguagaugugauu

SEQ ID NO: 928707 - RNA, 19 nt, Artificial Sequence
  Description of Artificial Sequence: Synthetic oligonucleotide
  Antisense strand to SEQ ID NO: 928706
aaucacaucuaccaucugg

SEQ ID NO: 928708 - RNA, 19 nt, Artificial Sequence
  Description of Artificial Sequence: Synthetic oligonucleotide
  Sense strand starting at position 2843 of SEQ ID NO: 913456
ggaacagcaugguuuauca

SEQ ID NO: 928709 - RNA, 19 nt, Artificial Sequence
  Description of Artificial Sequence: Synthetic oligonucleotide
  Antisense strand to SEQ ID NO: 928708
ugauaaaccaugcuguucc

SEQ ID NO: 928710 - RNA, 19 nt, Artificial Sequence
  Description of Artificial Sequence: Synthetic oligonucleotide
  Sense strand starting at position 3806 of SEQ ID NO: 913456
ucucuauugcuaugaagag

SEQ ID NO: 928711 - RNA, 19 nt, Artificial Sequence
  Description of Artificial Sequence: Synthetic oligonucleotide
  Antisense strand to SEQ ID NO: 928710
cucuucauagcaauagaga

SEQ ID NO: 928712 - RNA, 19 nt, Artificial Sequence
  Description of Artificial Sequence: Synthetic oligonucleotide
  Sense strand starting at position 3547 of SEQ ID NO: 913456
auugcuugggcauaauuau

SEQ ID NO: 928713 - RNA, 19 nt, Artificial Sequence
  Description of Artificial Sequence: Synthetic oligonucleotide
  Antisense strand to SEQ ID NO: 928712
auaauuaugcccaagcaau

SEQ ID NO: 928714 - RNA, 19 nt, Artificial Sequence
  Description of Artificial Sequence: Synthetic oligonucleotide
  Sense strand starting at position 3001 of SEQ ID NO: 913456
aaucaaacgugggugacau

SEQ ID NO: 928715 - RNA, 19 nt, Artificial Sequence
  Description of Artificial Sequence: Synthetic oligonucleotide
  Antisense strand to SEQ ID NO: 928714
augucacccacguuugauu

SEQ ID NO: 928716 - RNA, 19 nt, Artificial Sequence
  Description of Artificial Sequence: Synthetic oligonucleotide
  Sense strand starting at position 3000 of SEQ ID NO: 913456
caaucaaacgugggugaca

SEQ ID NO: 928717 - RNA, 19 nt, Artificial Sequence
  Description of Artificial Sequence: Synthetic oligonucleotide
  Antisense strand to SEQ ID NO: 928716
ugucacccacguuugauug

SEQ ID NO: 928718 - RNA, 19 nt, Artificial Sequence
  Description of Artificial Sequence: Synthetic oligonucleotide
  Sense strand starting at position 529 of SEQ ID NO: 913456
ggacgugguaggugaagaa

SEQ ID NO: 928719 - RNA, 19 nt, Artificial Sequence
  Description of Artificial Sequence: Synthetic oligonucleotide
  Antisense strand to SEQ ID NO: 928718
uucuucaccuaccacgucc

SEQ ID NO: 928720 - RNA, 19 nt, Artificial Sequence
  Description of Artificial Sequence: Synthetic oligonucleotide
  Sense strand starting at position 3820 of SEQ ID NO: 913456
aagaguucuguaggugaca

SEQ ID NO: 928721 - RNA, 19 nt, Artificial Sequence
  Description of Artificial Sequence: Synthetic oligonucleotide
  Antisense strand to SEQ ID NO: 928720
ugucaccuacagaacucuu

SEQ ID NO: 928722 - RNA, 19 nt, Artificial Sequence
  Description of Artificial Sequence: Synthetic oligonucleotide
  Sense strand starting at position 1986 of SEQ ID NO: 913456
uuggcauuacucugacaau

SEQ ID NO: 928723 - RNA, 19 nt, Artificial Sequence
  Description of Artificial Sequence: Synthetic oligonucleotide
  Antisense strand to SEQ ID NO: 928722
auugucagaguaaugccaa

SEQ ID NO: 928724 - RNA, 19 nt, Artificial Sequence
  Description of Artificial Sequence: Synthetic oligonucleotide
  Sense strand starting at position 2074 of SEQ ID NO: 913456
ugaauacucccuugcugaa

SEQ ID NO: 928725 - RNA, 19 nt, Artificial Sequence
  Description of Artificial Sequence: Synthetic oligonucleotide
  Antisense strand to SEQ ID NO: 928724
uucagcaagggaguauuca

SEQ ID NO: 928726 - RNA, 19 nt, Artificial Sequence
  Description of Artificial Sequence: Synthetic oligonucleotide
  Sense strand starting at position 3052 of SEQ ID NO: 913456
gacggugacuuauuacauc

SEQ ID NO: 928727 - RNA, 19 nt, Artificial Sequence
  Description of Artificial Sequence: Synthetic oligonucleotide
  Antisense strand to SEQ ID NO: 928726
gauguaauaagucaccguc

SEQ ID NO: 928728 - RNA, 19 nt, Artificial Sequence
  Description of Artificial Sequence: Synthetic oligonucleotide
  Sense strand starting at position 3347 of SEQ ID NO: 913456
agagaaaugucaguagcuc

SEQ ID NO: 928729 - RNA, 19 nt, Artificial Sequence
  Description of Artificial Sequence: Synthetic oligonucleotide
  Antisense strand to SEQ ID NO: 928728
gagcuacugacauuucucu

SEQ ID NO: 928730 - RNA, 19 nt, Artificial Sequence
  Description of Artificial Sequence: Synthetic oligonucleotide
  Sense strand starting at position 3642 of SEQ ID NO: 913456
uugucuccuggccauaaua

SEQ ID NO: 928731 - RNA, 19 nt, Artificial Sequence
  Description of Artificial Sequence: Synthetic oligonucleotide
  Antisense strand to SEQ ID NO: 928730
uauuauggccaggagacaa

SEQ ID NO: 928732 - RNA, 19 nt, Artificial Sequence
  Description of Artificial Sequence: Synthetic oligonucleotide
  Sense strand starting at position 3644 of SEQ ID NO: 913456
gucuccuggccauaauacu

SEQ ID NO: 928733 - RNA, 19 nt, Artificial Sequence
  Description of Artificial Sequence: Synthetic oligonucleotide
  Antisense strand to SEQ ID NO: 928732
aguauuauggccaggagac

SEQ ID NO: 928734 - RNA, 19 nt, Artificial Sequence
  Description of Artificial Sequence: Synthetic oligonucleotide
  Sense strand starting at position 3370 of SEQ ID NO: 913456
aggccuuggcugggagaau

SEQ ID NO: 928735 - RNA, 19 nt, Artificial Sequence
  Description of Artificial Sequence: Synthetic oligonucleotide
  Antisense strand to SEQ ID NO: 928734
auucucccagccaaggccu

SEQ ID NO: 928736 - RNA, 19 nt, Artificial Sequence
  Description of Artificial Sequence: Synthetic oligonucleotide
  Sense strand starting at position 2733 of SEQ ID NO: 913456
agaguucuauaagcuccau

SEQ ID NO: 928737 - RNA, 19 nt, Artificial Sequence
  Description of Artificial Sequence: Synthetic oligonucleotide
  Antisense strand to SEQ ID NO: 928736
auggagcuuauagaacucu

SEQ ID NO: 928738 - RNA, 19 nt, Artificial Sequence
  Description of Artificial Sequence: Synthetic oligonucleotide
  Sense strand starting at position 3002 of SEQ ID NO: 913456
aucaaacgugggugacauu

SEQ ID NO: 928739 - RNA, 19 nt, Artificial Sequence
  Description of Artificial Sequence: Synthetic oligonucleotide
  Antisense strand to SEQ ID NO: 928738
aaugucacccacguuugau

SEQ ID NO: 928740 - RNA, 19 nt, Artificial Sequence
  Description of Artificial Sequence: Synthetic oligonucleotide
  Sense strand starting at position 3128 of SEQ ID NO: 913456
guaacauccugggugacga

SEQ ID NO: 928741 - RNA, 19 nt, Artificial Sequence
  Description of Artificial Sequence: Synthetic oligonucleotide
  Antisense strand to SEQ ID NO: 928740
ucgucacccaggauguuac

SEQ ID NO: 928742 - RNA, 19 nt, Artificial Sequence
  Description of Artificial Sequence: Synthetic oligonucleotide
  Sense strand starting at position 3822 of SEQ ID NO: 913456
gaguucuguaggugacaca

SEQ ID NO: 928743 - RNA, 19 nt, Artificial Sequence
  Description of Artificial Sequence: Synthetic oligonucleotide
  Antisense strand to SEQ ID NO: 928742
ugugucaccuacagaacuc

SEQ ID NO: 928744 - RNA, 19 nt, Artificial Sequence
  Description of Artificial Sequence: Synthetic oligonucleotide
  Sense strand starting at position 2621 of SEQ ID NO: 913456
acuuaaagucgcuaaaugu

SEQ ID NO: 928745 - RNA, 19 nt, Artificial Sequence
  Description of Artificial Sequence: Synthetic oligonucleotide
  Antisense strand to SEQ ID NO: 928744
acauuuagcgacuuuaagu

SEQ ID NO: 928746 - RNA, 19 nt, Artificial Sequence
  Description of Artificial Sequence: Synthetic oligonucleotide
  Sense strand starting at position 3664 of SEQ ID NO: 913457
aaggacacuuuagugauua

SEQ ID NO: 928747 - RNA, 19 nt, Artificial Sequence
  Description of Artificial Sequence: Synthetic oligonucleotide
  Antisense strand to SEQ ID NO: 928746
uaaucacuaaaguguccuu

SEQ ID NO: 928748 - RNA, 19 nt, Artificial Sequence
  Description of Artificial Sequence: Synthetic oligonucleotide
  Sense strand starting at position 3427 of SEQ ID NO: 913457
gguugauagaggugacaaa

SEQ ID NO: 928749 - RNA, 19 nt, Artificial Sequence
  Description of Artificial Sequence: Synthetic oligonucleotide
  Antisense strand to SEQ ID NO: 928748
uuugucaccucuaucaacc

SEQ ID NO: 928750 - RNA, 19 nt, Artificial Sequence
  Description of Artificial Sequence: Synthetic oligonucleotide
  Sense strand starting at position 3425 of SEQ ID NO: 913457
gagguugauagaggugaca

SEQ ID NO: 928751 - RNA, 19 nt, Artificial Sequence
  Description of Artificial Sequence: Synthetic oligonucleotide
  Antisense strand to SEQ ID NO: 928750
ugucaccucuaucaaccuc

SEQ ID NO: 928752 - RNA, 19 nt, Artificial Sequence
  Description of Artificial Sequence: Synthetic oligonucleotide
  Sense strand starting at position 2264 of SEQ ID NO: 913457
gcgaauuugauccgacuca

SEQ ID NO: 928753 - RNA, 19 nt, Artificial Sequence
  Description of Artificial Sequence: Synthetic oligonucleotide
  Antisense strand to SEQ ID NO: 928752
ugagucggaucaaauucgc

SEQ ID NO: 928754 - RNA, 19 nt, Artificial Sequence
  Description of Artificial Sequence: Synthetic oligonucleotide
  Sense strand starting at position 1048 of SEQ ID NO: 913457
gaggcagaucucugagaca

SEQ ID NO: 928755 - RNA, 19 nt, Artificial Sequence
  Description of Artificial Sequence: Synthetic oligonucleotide
  Antisense strand to SEQ ID NO: 928754
ugucucagagaucugccuc

SEQ ID NO: 928756 - RNA, 19 nt, Artificial Sequence
  Description of Artificial Sequence: Synthetic oligonucleotide
  Sense strand starting at position 1313 of SEQ ID NO: 913457
gcaauucuacagcaauaga

SEQ ID NO: 928757 - RNA, 19 nt, Artificial Sequence
  Description of Artificial Sequence: Synthetic oligonucleotide
  Antisense strand to SEQ ID NO: 928756
ucuauugcuguagaauugc

SEQ ID NO: 928758 - RNA, 19 nt, Artificial Sequence
  Description of Artificial Sequence: Synthetic oligonucleotide
  Sense strand starting at position 3418 of SEQ ID NO: 913457
agucuaagagguugauaga

SEQ ID NO: 928759 - RNA, 19 nt, Artificial Sequence
  Description of Artificial Sequence: Synthetic oligonucleotide
  Antisense strand to SEQ ID NO: 928758
ucuaucaaccucuuagacu

SEQ ID NO: 928760 - RNA, 19 nt, Artificial Sequence
  Description of Artificial Sequence: Synthetic oligonucleotide
  Sense strand starting at position 1040 of SEQ ID NO: 913457
guuugaaugaggcagaucu

SEQ ID NO: 928761 - RNA, 19 nt, Artificial Sequence
  Description of Artificial Sequence: Synthetic oligonucleotide
  Antisense strand to SEQ ID NO: 928760
agaucugccucauucaaac

SEQ ID NO: 928762 - RNA, 19 nt, Artificial Sequence
  Description of Artificial Sequence: Synthetic oligonucleotide
  Sense strand starting at position 2625 of SEQ ID NO: 913457
cuaagaagguauguuaaug

SEQ ID NO: 928763 - RNA, 19 nt, Artificial Sequence
  Description of Artificial Sequence: Synthetic oligonucleotide
  Antisense strand to SEQ ID NO: 928762
cauuaacauaccuucuuag

SEQ ID NO: 928764 - RNA, 19 nt, Artificial Sequence
  Description of Artificial Sequence: Synthetic oligonucleotide
  Sense strand starting at position 2608 of SEQ ID NO: 913457
ccauauucuguugagaccu

SEQ ID NO: 928765 - RNA, 19 nt, Artificial Sequence
  Description of Artificial Sequence: Synthetic oligonucleotide
  Antisense strand to SEQ ID NO: 928764
aggucucaacagaauaugg

SEQ ID NO: 928766 - RNA, 19 nt, Artificial Sequence
  Description of Artificial Sequence: Synthetic oligonucleotide
  Sense strand starting at position 732 of SEQ ID NO: 913457
ucaauauuugugugagccu

SEQ ID NO: 928767 - RNA, 19 nt, Artificial Sequence
  Description of Artificial Sequence: Synthetic oligonucleotide
  Antisense strand to SEQ ID NO: 928766
aggcucacacaaauauuga

SEQ ID NO: 928768 - RNA, 19 nt, Artificial Sequence
  Description of Artificial Sequence: Synthetic oligonucleotide
  Sense strand starting at position 297 of SEQ ID NO: 913457
aagguuugacaguauaguu

SEQ ID NO: 928769 - RNA, 19 nt, Artificial Sequence
  Description of Artificial Sequence: Synthetic oligonucleotide
  Antisense strand to SEQ ID NO: 928768
aacuauacugucaaaccuu

SEQ ID NO: 928770 - RNA, 19 nt, Artificial Sequence
  Description of Artificial Sequence: Synthetic oligonucleotide
  Sense strand starting at position 792 of SEQ ID NO: 913457
acagcagggccaugaaaua

SEQ ID NO: 928771 - RNA, 19 nt, Artificial Sequence
  Description of Artificial Sequence: Synthetic oligonucleotide
  Antisense strand to SEQ ID NO: 928770
uauuucauggcccugcugu

SEQ ID NO: 928772 - RNA, 19 nt, Artificial Sequence
  Description of Artificial Sequence: Synthetic oligonucleotide
  Sense strand starting at position 123 of SEQ ID NO: 913457
agaugucgucuuuagaaau

SEQ ID NO: 928773 - RNA, 19 nt, Artificial Sequence
  Description of Artificial Sequence: Synthetic oligonucleotide
  Antisense strand to SEQ ID NO: 928772
auuucuaaagacgacaucu

SEQ ID NO: 928774 - RNA, 19 nt, Artificial Sequence
  Description of Artificial Sequence: Synthetic oligonucleotide
  Sense strand starting at position 1027 of SEQ ID NO: 913457
agaguaucaacugguuuga

SEQ ID NO: 928775 - RNA, 19 nt, Artificial Sequence
  Description of Artificial Sequence: Synthetic oligonucleotide
  Antisense strand to SEQ ID NO: 928774
ucaaaccaguugauacucu

SEQ ID NO: 928776 - RNA, 19 nt, Artificial Sequence
  Description of Artificial Sequence: Synthetic oligonucleotide
  Sense strand starting at position 2057 of SEQ ID NO: 913457
uguggauuccuaggacuac

SEQ ID NO: 928777 - RNA, 19 nt, Artificial Sequence
  Description of Artificial Sequence: Synthetic oligonucleotide
  Antisense strand to SEQ ID NO: 928776
guaguccuaggaauccaca

SEQ ID NO: 928778 - RNA, 19 nt, Artificial Sequence
  Description of Artificial Sequence: Synthetic oligonucleotide
  Sense strand starting at position 952 of SEQ ID NO: 913457
gucaaacuccgugguauuu

SEQ ID NO: 928779 - RNA, 19 nt, Artificial Sequence
  Description of Artificial Sequence: Synthetic oligonucleotide
  Antisense strand to SEQ ID NO: 928778
aaauaccacggaguuugac

SEQ ID NO: 928780 - RNA, 19 nt, Artificial Sequence
  Description of Artificial Sequence: Synthetic oligonucleotide
  Sense strand starting at position 2605 of SEQ ID NO: 913457
auuccauauucuguugaga

SEQ ID NO: 928781 - RNA, 19 nt, Artificial Sequence
  Description of Artificial Sequence: Synthetic oligonucleotide
  Antisense strand to SEQ ID NO: 928780
ucucaacagaauauggaau

SEQ ID NO: 928782 - RNA, 19 nt, Artificial Sequence
  Description of Artificial Sequence: Synthetic oligonucleotide
  Sense strand starting at position 283 of SEQ ID NO: 913457
ugaauacucucuuuaaggu

SEQ ID NO: 928783 - RNA, 19 nt, Artificial Sequence
  Description of Artificial Sequence: Synthetic oligonucleotide
  Antisense strand to SEQ ID NO: 928782
accuuaaagagaguauuca

SEQ ID NO: 928784 - RNA, 19 nt, Artificial Sequence
  Description of Artificial Sequence: Synthetic oligonucleotide
  Sense strand starting at position 2561 of SEQ ID NO: 913457
gugugucacagauauugau

SEQ ID NO: 928785 - RNA, 19 nt, Artificial Sequence
  Description of Artificial Sequence: Synthetic oligonucleotide
  Antisense strand to SEQ ID NO: 928784
aucaauaucugugacacac

SEQ ID NO: 928786 - RNA, 19 nt, Artificial Sequence
  Description of Artificial Sequence: Synthetic oligonucleotide
  Sense strand starting at position 1026 of SEQ ID NO: 913457
gagaguaucaacugguuug

SEQ ID NO: 928787 - RNA, 19 nt, Artificial Sequence
  Description of Artificial Sequence: Synthetic oligonucleotide
  Antisense strand to SEQ ID NO: 928786
caaaccaguugauacucuc

SEQ ID NO: 928788 - RNA, 19 nt, Artificial Sequence
  Description of Artificial Sequence: Synthetic oligonucleotide
  Sense strand starting at position 3560 of SEQ ID NO: 913457
aucuacauagucugugaaa

SEQ ID NO: 928789 - RNA, 19 nt, Artificial Sequence
  Description of Artificial Sequence: Synthetic oligonucleotide
  Antisense strand to SEQ ID NO: 928788
uuucacagacuauguagau

SEQ ID NO: 928790 - RNA, 19 nt, Artificial Sequence
  Description of Artificial Sequence: Synthetic oligonucleotide
  Sense strand starting at position 1029 of SEQ ID NO: 913457
aguaucaacugguuugaau

SEQ ID NO: 928791 - RNA, 19 nt, Artificial Sequence
  Description of Artificial Sequence: Synthetic oligonucleotide
  Antisense strand to SEQ ID NO: 928790
auucaaaccaguugauacu

SEQ ID NO: 928792 - RNA, 19 nt, Artificial Sequence
  Description of Artificial Sequence: Synthetic oligonucleotide
  Sense strand starting at position 3370 of SEQ ID NO: 913457
gccuuuaaagucuaugauu

SEQ ID NO: 928793 - RNA, 19 nt, Artificial Sequence
  Description of Artificial Sequence: Synthetic oligonucleotide
  Antisense strand to SEQ ID NO: 928792
aaucauagacuuuaaaggc

SEQ ID NO: 928794 - RNA, 19 nt, Artificial Sequence
  Description of Artificial Sequence: Synthetic oligonucleotide
  Sense strand starting at position 868 of SEQ ID NO: 913457
uccauccagugauuauuau

SEQ ID NO: 928795 - RNA, 19 nt, Artificial Sequence
  Description of Artificial Sequence: Synthetic oligonucleotide
  Antisense strand to SEQ ID NO: 928794
auaauaaucacuggaugga

SEQ ID NO: 928796 - RNA, 19 nt, Artificial Sequence
  Description of Artificial Sequence: Synthetic oligonucleotide
  Sense strand starting at position 2371 of SEQ ID NO: 913457
agucaauauucuuuguaag

SEQ ID NO: 928797 - RNA, 19 nt, Artificial Sequence
  Description of Artificial Sequence: Synthetic oligonucleotide
  Antisense strand to SEQ ID NO: 928796
cuuacaaagaauauugacu

SEQ ID NO: 928798 - RNA, 19 nt, Artificial Sequence
  Description of Artificial Sequence: Synthetic oligonucleotide
  Sense strand starting at position 707 of SEQ ID NO: 913457
caaucauguuaaguaguga

SEQ ID NO: 928799 - RNA, 19 nt, Artificial Sequence
  Description of Artificial Sequence: Synthetic oligonucleotide
  Antisense strand to SEQ ID NO: 928798
ucacuacuuaacaugauug

SEQ ID NO: 928800 - RNA, 19 nt, Artificial Sequence
  Description of Artificial Sequence: Synthetic oligonucleotide
  Sense strand starting at position 3602 of SEQ ID NO: 913457
aguuaaaccuuuguggauu

SEQ ID NO: 928801 - RNA, 19 nt, Artificial Sequence
  Description of Artificial Sequence: Synthetic oligonucleotide
  Antisense strand to SEQ ID NO: 928800
aauccacaaagguuuaacu

SEQ ID NO: 928802 - RNA, 19 nt, Artificial Sequence
  Description of Artificial Sequence: Synthetic oligonucleotide
  Sense strand starting at position 524 of SEQ ID NO: 913457
augucaaaccaguguuaag

SEQ ID NO: 928803 - RNA, 19 nt, Artificial Sequence
  Description of Artificial Sequence: Synthetic oligonucleotide
  Antisense strand to SEQ ID NO: 928802
cuuaacacugguuugacau

SEQ ID NO: 928804 - RNA, 19 nt, Artificial Sequence
  Description of Artificial Sequence: Synthetic oligonucleotide
  Sense strand starting at position 3601 of SEQ ID NO: 913457
uaguuaaaccuuuguggau

SEQ ID NO: 928805 - RNA, 19 nt, Artificial Sequence
  Description of Artificial Sequence: Synthetic oligonucleotide
  Antisense strand to SEQ ID NO: 928804
auccacaaagguuuaacua

SEQ ID NO: 928806 - RNA, 19 nt, Artificial Sequence
  Description of Artificial Sequence: Synthetic oligonucleotide
  Sense strand starting at position 513 of SEQ ID NO: 913457
ugcagucaggaaugucaaa

SEQ ID NO: 928807 - RNA, 19 nt, Artificial Sequence
  Description of Artificial Sequence: Synthetic oligonucleotide
  Antisense strand to SEQ ID NO: 928806
uuugacauuccugacugca

SEQ ID NO: 928808 - RNA, 19 nt, Artificial Sequence
  Description of Artificial Sequence: Synthetic oligonucleotide
  Sense strand starting at position 2227 of SEQ ID NO: 913457
uggguuaaagcauguuaaa

SEQ ID NO: 928809 - RNA, 19 nt, Artificial Sequence
  Description of Artificial Sequence: Synthetic oligonucleotide
  Antisense strand to SEQ ID NO: 928808
uuuaacaugcuuuaaccca

SEQ ID NO: 928810 - RNA, 19 nt, Artificial Sequence
  Description of Artificial Sequence: Synthetic oligonucleotide
  Sense strand starting at position 862 of SEQ ID NO: 913457
gugucauccauccagugau

SEQ ID NO: 928811 - RNA, 19 nt, Artificial Sequence
  Description of Artificial Sequence: Synthetic oligonucleotide
  Antisense strand to SEQ ID NO: 928810
aucacuggauggaugacac

SEQ ID NO: 928812 - RNA, 19 nt, Artificial Sequence
  Description of Artificial Sequence: Synthetic oligonucleotide
  Sense strand starting at position 3721 of SEQ ID NO: 913457
acuguaaauuggcucuuga

SEQ ID NO: 928813 - RNA, 19 nt, Artificial Sequence
  Description of Artificial Sequence: Synthetic oligonucleotide
  Antisense strand to SEQ ID NO: 928812
ucaagagccaauuuacagu

SEQ ID NO: 928814 - RNA, 19 nt, Artificial Sequence
  Description of Artificial Sequence: Synthetic oligonucleotide
  Sense strand starting at position 135 of SEQ ID NO: 913457
uagaaaucuuggcuggcua

SEQ ID NO: 928815 - RNA, 19 nt, Artificial Sequence
  Description of Artificial Sequence: Synthetic oligonucleotide
  Antisense strand to SEQ ID NO: 928814
uagccagccaagauuucua

SEQ ID NO: 928816 - RNA, 19 nt, Artificial Sequence
  Description of Artificial Sequence: Synthetic oligonucleotide
  Sense strand starting at position 166 of SEQ ID NO: 913457
auugauuucugauauguca

SEQ ID NO: 928817 - RNA, 19 nt, Artificial Sequence
  Description of Artificial Sequence: Synthetic oligonucleotide
  Antisense strand to SEQ ID NO: 928816
ugacauaucagaaaucaau

SEQ ID NO: 928818 - RNA, 19 nt, Artificial Sequence
  Description of Artificial Sequence: Synthetic oligonucleotide
  Sense strand starting at position 291 of SEQ ID NO: 913457
cucuuuaagguuugacagu

SEQ ID NO: 928819 - RNA, 19 nt, Artificial Sequence
  Description of Artificial Sequence: Synthetic oligonucleotide
  Antisense strand to SEQ ID NO: 928818
acugucaaaccuuaaagag

SEQ ID NO: 928820 - RNA, 19 nt, Artificial Sequence
  Description of Artificial Sequence: Synthetic oligonucleotide
  Sense strand starting at position 837 of SEQ ID NO: 913457
ggaugauaaagcuguugca

SEQ ID NO: 928821 - RNA, 19 nt, Artificial Sequence
  Description of Artificial Sequence: Synthetic oligonucleotide
  Antisense strand to SEQ ID NO: 928820
ugcaacagcuuuaucaucc

SEQ ID NO: 928822 - RNA, 19 nt, Artificial Sequence
  Description of Artificial Sequence: Synthetic oligonucleotide
  Sense strand starting at position 1310 of SEQ ID NO: 913457
gcugcaauucuacagcaau

SEQ ID NO: 928823 - RNA, 19 nt, Artificial Sequence
  Description of Artificial Sequence: Synthetic oligonucleotide
  Antisense strand to SEQ ID NO: 928822
auugcuguagaauugcagc

SEQ ID NO: 928824 - RNA, 19 nt, Artificial Sequence
  Description of Artificial Sequence: Synthetic oligonucleotide
  Sense strand starting at position 1088 of SEQ ID NO: 913457
ccgcgcaaguuauuuccaa

SEQ ID NO: 928825 - RNA, 19 nt, Artificial Sequence
  Description of Artificial Sequence: Synthetic oligonucleotide
  Antisense strand to SEQ ID NO: 928824
uuggaaauaacuugcgcgg

SEQ ID NO: 928826 - RNA, 19 nt, Artificial Sequence
  Description of Artificial Sequence: Synthetic oligonucleotide
  Sense strand starting at position 1266 of SEQ ID NO: 913458
cccugaaauggcuaacauu

SEQ ID NO: 928827 - RNA, 19 nt, Artificial Sequence
  Description of Artificial Sequence: Synthetic oligonucleotide
  Antisense strand to SEQ ID NO: 928826
aauguuagccauuucaggg

SEQ ID NO: 928828 - RNA, 19 nt, Artificial Sequence
  Description of Artificial Sequence: Synthetic oligonucleotide
  Sense strand starting at position 308 of SEQ ID NO: 913458
ccuagaauaaccgaggucu

SEQ ID NO: 928829 - RNA, 19 nt, Artificial Sequence
  Description of Artificial Sequence: Synthetic oligonucleotide
  Antisense strand to SEQ ID NO: 928828
agaccucgguuauucuagg

SEQ ID NO: 928830 - RNA, 19 nt, Artificial Sequence
  Description of Artificial Sequence: Synthetic oligonucleotide
  Sense strand starting at position 913 of SEQ ID NO: 913458
gcuugaaaucaacaagcca

SEQ ID NO: 928831 - RNA, 19 nt, Artificial Sequence
  Description of Artificial Sequence: Synthetic oligonucleotide
  Antisense strand to SEQ ID NO: 928830
uggcuuguugauuucaagc

SEQ ID NO: 928832 - RNA, 19 nt, Artificial Sequence
  Description of Artificial Sequence: Synthetic oligonucleotide
  Sense strand starting at position 2769 of SEQ ID NO: 913458
agcaaaugucugcaaagaa

SEQ ID NO: 928833 - RNA, 19 nt, Artificial Sequence
  Description of Artificial Sequence: Synthetic oligonucleotide
  Antisense strand to SEQ ID NO: 928832
uucuuugcagacauuugcu

SEQ ID NO: 928834 - RNA, 19 nt, Artificial Sequence
  Description of Artificial Sequence: Synthetic oligonucleotide
  Sense strand starting at position 3484 of SEQ ID NO: 913458
caugauugagugcaacuua

SEQ ID NO: 928835 - RNA, 19 nt, Artificial Sequence
  Description of Artificial Sequence: Synthetic oligonucleotide
  Antisense strand to SEQ ID NO: 928834
uaaguugcacucaaucaug

SEQ ID NO: 928836 - RNA, 19 nt, Artificial Sequence
  Description of Artificial Sequence: Synthetic oligonucleotide
  Sense strand starting at position 152 of SEQ ID NO: 913458
ugacuuugauguccaggaa

SEQ ID NO: 928837 - RNA, 19 nt, Artificial Sequence
  Description of Artificial Sequence: Synthetic oligonucleotide
  Antisense strand to SEQ ID NO: 928836
uuccuggacaucaaaguca

SEQ ID NO: 928838 - RNA, 19 nt, Artificial Sequence
  Description of Artificial Sequence: Synthetic oligonucleotide
  Sense strand starting at position 164 of SEQ ID NO: 913458
ccaggaauuuaggaacucu

SEQ ID NO: 928839 - RNA, 19 nt, Artificial Sequence
  Description of Artificial Sequence: Synthetic oligonucleotide
  Antisense strand to SEQ ID NO: 928838
agaguuccuaaauuccugg

SEQ ID NO: 928840 - RNA, 19 nt, Artificial Sequence
  Description of Artificial Sequence: Synthetic oligonucleotide
  Sense strand starting at position 2813 of SEQ ID NO: 913458
ugcuaaugucaguaauaag

SEQ ID NO: 928841 - RNA, 19 nt, Artificial Sequence
  Description of Artificial Sequence: Synthetic oligonucleotide
  Antisense strand to SEQ ID NO: 928840
cuuauuacugacauuagca

SEQ ID NO: 928842 - RNA, 19 nt, Artificial Sequence
  Description of Artificial Sequence: Synthetic oligonucleotide
  Sense strand starting at position 3523 of SEQ ID NO: 913458
guggaaacuucuguaauga

SEQ ID NO: 928843 - RNA, 19 nt, Artificial Sequence
  Description of Artificial Sequence: Synthetic oligonucleotide
  Antisense strand to SEQ ID NO: 928842
ucauuacagaaguuuccac

SEQ ID NO: 928844 - RNA, 19 nt, Artificial Sequence
  Description of Artificial Sequence: Synthetic oligonucleotide
  Sense strand starting at position 674 of SEQ ID NO: 913458
uuggaacugccaugauuac

SEQ ID NO: 928845 - RNA, 19 nt, Artificial Sequence
  Description of Artificial Sequence: Synthetic oligonucleotide
  Antisense strand to SEQ ID NO: 928844
guaaucauggcaguuccaa

SEQ ID NO: 928846 - RNA, 19 nt, Artificial Sequence
  Description of Artificial Sequence: Synthetic oligonucleotide
  Sense strand starting at position 2716 of SEQ ID NO: 913458
ggguuccuacacugaaagu

SEQ ID NO: 928847 - RNA, 19 nt, Artificial Sequence
  Description of Artificial Sequence: Synthetic oligonucleotide
  Antisense strand to SEQ ID NO: 928846
acuuucaguguaggaaccc

SEQ ID NO: 928848 - RNA, 19 nt, Artificial Sequence
  Description of Artificial Sequence: Synthetic oligonucleotide
  Sense strand starting at position 589 of SEQ ID NO: 913458
gucaaagugaauuaugugu

SEQ ID NO: 928849 - RNA, 19 nt, Artificial Sequence
  Description of Artificial Sequence: Synthetic oligonucleotide
  Antisense strand to SEQ ID NO: 928848
acacauaauucacuuugac

SEQ ID NO: 928850 - RNA, 19 nt, Artificial Sequence
  Description of Artificial Sequence: Synthetic oligonucleotide
  Sense strand starting at position 2766 of SEQ ID NO: 913458
gagagcaaaugucugcaaa

SEQ ID NO: 928851 - RNA, 19 nt, Artificial Sequence
  Description of Artificial Sequence: Synthetic oligonucleotide
  Antisense strand to SEQ ID NO: 928850
uuugcagacauuugcucuc

SEQ ID NO: 928852 - RNA, 19 nt, Artificial Sequence
  Description of Artificial Sequence: Synthetic oligonucleotide
  Sense strand starting at position 2768 of SEQ ID NO: 913458
gagcaaaugucugcaaaga

SEQ ID NO: 928853 - RNA, 19 nt, Artificial Sequence
  Description of Artificial Sequence: Synthetic oligonucleotide
  Antisense strand to SEQ ID NO: 928852
ucuuugcagacauuugcuc

SEQ ID NO: 928854 - RNA, 19 nt, Artificial Sequence
  Description of Artificial Sequence: Synthetic oligonucleotide
  Sense strand starting at position 2767 of SEQ ID NO: 913458
agagcaaaugucugcaaag

SEQ ID NO: 928855 - RNA, 19 nt, Artificial Sequence
  Description of Artificial Sequence: Synthetic oligonucleotide
  Antisense strand to SEQ ID NO: 928854
cuuugcagacauuugcucu

SEQ ID NO: 928856 - RNA, 19 nt, Artificial Sequence
  Description of Artificial Sequence: Synthetic oligonucleotide
  Sense strand starting at position 959 of SEQ ID NO: 913458
cagaaugcugccugaaaug

SEQ ID NO: 928857 - RNA, 19 nt, Artificial Sequence
  Description of Artificial Sequence: Synthetic oligonucleotide
  Antisense strand to SEQ ID NO: 928856
cauuucaggcagcauucug

SEQ ID NO: 928858 - RNA, 19 nt, Artificial Sequence
  Description of Artificial Sequence: Synthetic oligonucleotide
  Sense strand starting at position 958 of SEQ ID NO: 913458
ccagaaugcugccugaaau

SEQ ID NO: 928859 - RNA, 19 nt, Artificial Sequence
  Description of Artificial Sequence: Synthetic oligonucleotide
  Antisense strand to SEQ ID NO: 928858
auuucaggcagcauucugg

SEQ ID NO: 928860 - RNA, 19 nt, Artificial Sequence
  Description of Artificial Sequence: Synthetic oligonucleotide
  Sense strand starting at position 2898 of SEQ ID NO: 913458
ucgucaacuaggugggaau

SEQ ID NO: 928861 - RNA, 19 nt, Artificial Sequence
  Description of Artificial Sequence: Synthetic oligonucleotide
  Antisense strand to SEQ ID NO: 928860
auucccaccuaguugacga

SEQ ID NO: 928862 - RNA, 19 nt, Artificial Sequence
  Description of Artificial Sequence: Synthetic oligonucleotide
  Sense strand starting at position 901 of SEQ ID NO: 913458
uggcaaauguaggcuugaa

SEQ ID NO: 928863 - RNA, 19 nt, Artificial Sequence
  Description of Artificial Sequence: Synthetic oligonucleotide
  Antisense strand to SEQ ID NO: 928862
uucaagccuacauuugcca

SEQ ID NO: 928864 - RNA, 19 nt, Artificial Sequence
  Description of Artificial Sequence: Synthetic oligonucleotide
  Sense strand starting at position 255 of SEQ ID NO: 913458
uguccuuuccuuugaugga

SEQ ID NO: 928865 - RNA, 19 nt, Artificial Sequence
  Description of Artificial Sequence: Synthetic oligonucleotide
  Antisense strand to SEQ ID NO: 928864
uccaucaaaggaaaggaca

SEQ ID NO: 928866 - RNA, 19 nt, Artificial Sequence
  Description of Artificial Sequence: Synthetic oligonucleotide
  Sense strand starting at position 2812 of SEQ ID NO: 913458
uugcuaaugucaguaauaa

SEQ ID NO: 928867 - RNA, 19 nt, Artificial Sequence
  Description of Artificial Sequence: Synthetic oligonucleotide
  Antisense strand to SEQ ID NO: 928866
uuauuacugacauuagcaa

SEQ ID NO: 928868 - RNA, 19 nt, Artificial Sequence
  Description of Artificial Sequence: Synthetic oligonucleotide
  Sense strand starting at position 441 of SEQ ID NO: 913458
gggaauguagcugguucau

SEQ ID NO: 928869 - RNA, 19 nt, Artificial Sequence
  Description of Artificial Sequence: Synthetic oligonucleotide
  Antisense strand to SEQ ID NO: 928868
augaaccagcuacauuccc

SEQ ID NO: 928870 - RNA, 19 nt, Artificial Sequence
  Description of Artificial Sequence: Synthetic oligonucleotide
  Sense strand starting at position 123 of SEQ ID NO: 913458
cucuuaucugaaugcaguu

SEQ ID NO: 928871 - RNA, 19 nt, Artificial Sequence
  Description of Artificial Sequence: Synthetic oligonucleotide
  Antisense strand to SEQ ID NO: 928870
aacugcauucagauaagag

SEQ ID NO: 928872 - RNA, 19 nt, Artificial Sequence
  Description of Artificial Sequence: Synthetic oligonucleotide
  Sense strand starting at position 3424 of SEQ ID NO: 913458
uggugaggguguuucacuu

SEQ ID NO: 928873 - RNA, 19 nt, Artificial Sequence
  Description of Artificial Sequence: Synthetic oligonucleotide
  Antisense strand to SEQ ID NO: 928872
aagugaaacacccucacca

SEQ ID NO: 928874 - RNA, 19 nt, Artificial Sequence
  Description of Artificial Sequence: Synthetic oligonucleotide
  Sense strand starting at position 140 of SEQ ID NO: 913458
uuaugugagcccugacuuu

SEQ ID NO: 928875 - RNA, 19 nt, Artificial Sequence
  Description of Artificial Sequence: Synthetic oligonucleotide
  Antisense strand to SEQ ID NO: 928874
aaagucagggcucacauaa

SEQ ID NO: 928876 - RNA, 19 nt, Artificial Sequence
  Description of Artificial Sequence: Synthetic oligonucleotide
  Sense strand starting at position 760 of SEQ ID NO: 913458
uuuauuagcuugucacacu

SEQ ID NO: 928877 - RNA, 19 nt, Artificial Sequence
  Description of Artificial Sequence: Synthetic oligonucleotide
  Antisense strand to SEQ ID NO: 928876
agugugacaagcuaauaaa

SEQ ID NO: 928878 - RNA, 19 nt, Artificial Sequence
  Description of Artificial Sequence: Synthetic oligonucleotide
  Sense strand starting at position 248 of SEQ ID NO: 913458
gucuaaauguccuuuccuu

SEQ ID NO: 928879 - RNA, 19 nt, Artificial Sequence
  Description of Artificial Sequence: Synthetic oligonucleotide
  Antisense strand to SEQ ID NO: 928878
aaggaaaggacauuuagac

SEQ ID NO: 928880 - RNA, 19 nt, Artificial Sequence
  Description of Artificial Sequence: Synthetic oligonucleotide
  Sense strand starting at position 758 of SEQ ID NO: 913458
ccuuuauuagcuugucaca

SEQ ID NO: 928881 - RNA, 19 nt, Artificial Sequence
  Description of Artificial Sequence: Synthetic oligonucleotide
  Antisense strand to SEQ ID NO: 928880
ugugacaagcuaauaaagg

SEQ ID NO: 928882 - RNA, 19 nt, Artificial Sequence
  Description of Artificial Sequence: Synthetic oligonucleotide
  Sense strand starting at position 1537 of SEQ ID NO: 913458
gagagucggcaucguagaa

SEQ ID NO: 928883 - RNA, 19 nt, Artificial Sequence
  Description of Artificial Sequence: Synthetic oligonucleotide
  Antisense strand to SEQ ID NO: 928882
uucuacgaugccgacucuc

SEQ ID NO: 928884 - RNA, 19 nt, Artificial Sequence
  Description of Artificial Sequence: Synthetic oligonucleotide
  Sense strand starting at position 556 of SEQ ID NO: 913458
aguccuugguguccacauu

SEQ ID NO: 928885 - RNA, 19 nt, Artificial Sequence
  Description of Artificial Sequence: Synthetic oligonucleotide
  Antisense strand to SEQ ID NO: 928884
aauguggacaccaaggacu

SEQ ID NO: 928886 - RNA, 19 nt, Artificial Sequence
  Description of Artificial Sequence: Synthetic oligonucleotide
  Sense strand starting at position 809 of SEQ ID NO: 913458
cuaacaugcucucuagugu

SEQ ID NO: 928887 - RNA, 19 nt, Artificial Sequence
  Description of Artificial Sequence: Synthetic oligonucleotide
  Antisense strand to SEQ ID NO: 928886
acacuagagagcauguuag

SEQ ID NO: 928888 - RNA, 19 nt, Artificial Sequence
  Description of Artificial Sequence: Synthetic oligonucleotide
  Sense strand starting at position 2801 of SEQ ID NO: 913458
gcugaaagcccuugcuaau

SEQ ID NO: 928889 - RNA, 19 nt, Artificial Sequence
  Description of Artificial Sequence: Synthetic oligonucleotide
  Antisense strand to SEQ ID NO: 928888
auuagcaagggcuuucagc

SEQ ID NO: 928890 - RNA, 19 nt, Artificial Sequence
  Description of Artificial Sequence: Synthetic oligonucleotide
  Sense strand starting at position 136 of SEQ ID NO: 913458
gcaguuaugugagcccuga

SEQ ID NO: 928891 - RNA, 19 nt, Artificial Sequence
  Description of Artificial Sequence: Synthetic oligonucleotide
  Antisense strand to SEQ ID NO: 928890
ucagggcucacauaacugc

SEQ ID NO: 928892 - RNA, 19 nt, Artificial Sequence
  Description of Artificial Sequence: Synthetic oligonucleotide
  Sense strand starting at position 95 of SEQ ID NO: 913458
guacauaaaucacaaagua

SEQ ID NO: 928893 - RNA, 19 nt, Artificial Sequence
  Description of Artificial Sequence: Synthetic oligonucleotide
  Antisense strand to SEQ ID NO: 928892
uacuuugugauuuauguac

SEQ ID NO: 928894 - RNA, 19 nt, Artificial Sequence
  Description of Artificial Sequence: Synthetic oligonucleotide
  Sense strand starting at position 832 of SEQ ID NO: 913458
augugugucuacguauuaa

SEQ ID NO: 928895 - RNA, 19 nt, Artificial Sequence
  Description of Artificial Sequence: Synthetic oligonucleotide
  Antisense strand to SEQ ID NO: 928894
uuaauacguagacacacau

SEQ ID NO: 928896 - RNA, 19 nt, Artificial Sequence
  Description of Artificial Sequence: Synthetic oligonucleotide
  Sense strand starting at position 2816 of SEQ ID NO: 913458
uaaugucaguaauaaggau

SEQ ID NO: 928897 - RNA, 19 nt, Artificial Sequence
  Description of Artificial Sequence: Synthetic oligonucleotide
  Antisense strand to SEQ ID NO: 928896
auccuuauuacugacauua

SEQ ID NO: 928898 - RNA, 19 nt, Artificial Sequence
  Description of Artificial Sequence: Synthetic oligonucleotide
  Sense strand starting at position 115 of SEQ ID NO: 913458
auuaguaucucuuaucuga

SEQ ID NO: 928899 - RNA, 19 nt, Artificial Sequence
  Description of Artificial Sequence: Synthetic oligonucleotide
  Antisense strand to SEQ ID NO: 928898
ucagauaagagauacuaau

SEQ ID NO: 928900 - RNA, 19 nt, Artificial Sequence
  Description of Artificial Sequence: Synthetic oligonucleotide
  Sense strand starting at position 277 of SEQ ID NO: 913458
cucgaauacugauaguauu

SEQ ID NO: 928901 - RNA, 19 nt, Artificial Sequence
  Description of Artificial Sequence: Synthetic oligonucleotide
  Antisense strand to SEQ ID NO: 928900
aauacuaucaguauucgag

SEQ ID NO: 928902 - RNA, 19 nt, Artificial Sequence
  Description of Artificial Sequence: Synthetic oligonucleotide
  Sense strand starting at position 3522 of SEQ ID NO: 913458
aguggaaacuucuguaaug

SEQ ID NO: 928903 - RNA, 19 nt, Artificial Sequence
  Description of Artificial Sequence: Synthetic oligonucleotide
  Antisense strand to SEQ ID NO: 928902
cauuacagaaguuuccacu

SEQ ID NO: 928904 - RNA, 19 nt, Artificial Sequence
  Description of Artificial Sequence: Synthetic oligonucleotide
  Sense strand starting at position 274 of SEQ ID NO: 913458
ggacucgaauacugauagu

SEQ ID NO: 928905 - RNA, 19 nt, Artificial Sequence
  Description of Artificial Sequence: Synthetic oligonucleotide
  Antisense strand to SEQ ID NO: 928904
acuaucaguauucgagucc

SEQ ID NO: 928906 - RNA, 19 nt, Artificial Sequence
  Description of Artificial Sequence: Synthetic oligonucleotide
  Sense strand starting at position 2465 of SEQ ID NO: 913459
ccgcuuuauaaagcguuga

SEQ ID NO: 928907 - RNA, 19 nt, Artificial Sequence
  Description of Artificial Sequence: Synthetic oligonucleotide
  Antisense strand to SEQ ID NO: 928906
ucaacgcuuuauaaagcgg

SEQ ID NO: 928908 - RNA, 19 nt, Artificial Sequence
  Description of Artificial Sequence: Synthetic oligonucleotide
  Sense strand starting at position 3135 of SEQ ID NO: 913459
gaaugaaaguuagugauca

SEQ ID NO: 928909 - RNA, 19 nt, Artificial Sequence
  Description of Artificial Sequence: Synthetic oligonucleotide
  Antisense strand to SEQ ID NO: 928908
ugaucacuaacuuucauuc

SEQ ID NO: 928910 - RNA, 19 nt, Artificial Sequence
  Description of Artificial Sequence: Synthetic oligonucleotide
  Sense strand starting at position 3137 of SEQ ID NO: 913459
augaaaguuagugaucagu

SEQ ID NO: 928911 - RNA, 19 nt, Artificial Sequence
  Description of Artificial Sequence: Synthetic oligonucleotide
  Antisense strand to SEQ ID NO: 928910
acugaucacuaacuuucau

SEQ ID NO: 928912 - RNA, 19 nt, Artificial Sequence
  Description of Artificial Sequence: Synthetic oligonucleotide
  Sense strand starting at position 3582 of SEQ ID NO: 913459
ucgcauucccggucucauu

SEQ ID NO: 928913 - RNA, 19 nt, Artificial Sequence
  Description of Artificial Sequence: Synthetic oligonucleotide
  Antisense strand to SEQ ID NO: 928912
aaugagaccgggaaugcga

SEQ ID NO: 928914 - RNA, 19 nt, Artificial Sequence
  Description of Artificial Sequence: Synthetic oligonucleotide
  Sense strand starting at position 3486 of SEQ ID NO: 913459
agcuucuaucaguaagaac

SEQ ID NO: 928915 - RNA, 19 nt, Artificial Sequence
  Description of Artificial Sequence: Synthetic oligonucleotide
  Antisense strand to SEQ ID NO: 928914
guucuuacugauagaagcu

SEQ ID NO: 928916 - RNA, 19 nt, Artificial Sequence
  Description of Artificial Sequence: Synthetic oligonucleotide
  Sense strand starting at position 2441 of SEQ ID NO: 913459
uuaauuaggacacgaaagu

SEQ ID NO: 928917 - RNA, 19 nt, Artificial Sequence
  Description of Artificial Sequence: Synthetic oligonucleotide
  Antisense strand to SEQ ID NO: 928916
acuuucguguccuaauuaa

SEQ ID NO: 928918 - RNA, 19 nt, Artificial Sequence
  Description of Artificial Sequence: Synthetic oligonucleotide
  Sense strand starting at position 2524 of SEQ ID NO: 913459
cugagaaacuaccauuuga

SEQ ID NO: 928919 - RNA, 19 nt, Artificial Sequence
  Description of Artificial Sequence: Synthetic oligonucleotide
  Antisense strand to SEQ ID NO: 928918
ucaaaugguaguuucucag

SEQ ID NO: 928920 - RNA, 19 nt, Artificial Sequence
  Description of Artificial Sequence: Synthetic oligonucleotide
  Sense strand starting at position 3505 of SEQ ID NO: 913459
ccagcaaugacaggaagua

SEQ ID NO: 928921 - RNA, 19 nt, Artificial Sequence
  Description of Artificial Sequence: Synthetic oligonucleotide
  Antisense strand to SEQ ID NO: 928920
uacuuccugucauugcugg

SEQ ID NO: 928922 - RNA, 19 nt, Artificial Sequence
  Description of Artificial Sequence: Synthetic oligonucleotide
  Sense strand starting at position 969 of SEQ ID NO: 913459
ggacaacgauggguuucaa

SEQ ID NO: 928923 - RNA, 19 nt, Artificial Sequence
  Description of Artificial Sequence: Synthetic oligonucleotide
  Antisense strand to SEQ ID NO: 928922
uugaaacccaucguugucc

SEQ ID NO: 928924 - RNA, 19 nt, Artificial Sequence
  Description of Artificial Sequence: Synthetic oligonucleotide
  Sense strand starting at position 3939 of SEQ ID NO: 913459
cuugauagacugcagugau

SEQ ID NO: 928925 - RNA, 19 nt, Artificial Sequence
  Description of Artificial Sequence: Synthetic oligonucleotide
  Antisense strand to SEQ ID NO: 928924
aucacugcagucuaucaag

SEQ ID NO: 928926 - RNA, 19 nt, Artificial Sequence
  Description of Artificial Sequence: Synthetic oligonucleotide
  Sense strand starting at position 3771 of SEQ ID NO: 913459
accaauugaucuuuagagu

SEQ ID NO: 928927 - RNA, 19 nt, Artificial Sequence
  Description of Artificial Sequence: Synthetic oligonucleotide
  Antisense strand to SEQ ID NO: 928926
acucuaaagaucaauuggu

SEQ ID NO: 928928 - RNA, 19 nt, Artificial Sequence
  Description of Artificial Sequence: Synthetic oligonucleotide
  Sense strand starting at position 3278 of SEQ ID NO: 913459
agaaaugagugugucaaca

SEQ ID NO: 928929 - RNA, 19 nt, Artificial Sequence
  Description of Artificial Sequence: Synthetic oligonucleotide
  Antisense strand to SEQ ID NO: 928928
uguugacacacucauuucu

SEQ ID NO: 928930 - RNA, 19 nt, Artificial Sequence
  Description of Artificial Sequence: Synthetic oligonucleotide
  Sense strand starting at position 3581 of SEQ ID NO: 913459
gucgcauucccggucucau

SEQ ID NO: 928931 - RNA, 19 nt, Artificial Sequence
  Description of Artificial Sequence: Synthetic oligonucleotide
  Antisense strand to SEQ ID NO: 928930
augagaccgggaaugcgac

SEQ ID NO: 928932 - RNA, 19 nt, Artificial Sequence
  Description of Artificial Sequence: Synthetic oligonucleotide
  Sense strand starting at position 2186 of SEQ ID NO: 913459
gugguaugugugucuguuu

SEQ ID NO: 928933 - RNA, 19 nt, Artificial Sequence
  Description of Artificial Sequence: Synthetic oligonucleotide
  Antisense strand to SEQ ID NO: 928932
aaacagacacacauaccac

SEQ ID NO: 928934 - RNA, 19 nt, Artificial Sequence
  Description of Artificial Sequence: Synthetic oligonucleotide
  Sense strand starting at position 3275 of SEQ ID NO: 913459
gggagaaaugaguguguca

SEQ ID NO: 928935 - RNA, 19 nt, Artificial Sequence
  Description of Artificial Sequence: Synthetic oligonucleotide
  Antisense strand to SEQ ID NO: 928934
ugacacacucauuucuccc

SEQ ID NO: 928936 - RNA, 19 nt, Artificial Sequence
  Description of Artificial Sequence: Synthetic oligonucleotide
  Sense strand starting at position 3170 of SEQ ID NO: 913459
gguaucuugacguaaauua

SEQ ID NO: 928937 - RNA, 19 nt, Artificial Sequence
  Description of Artificial Sequence: Synthetic oligonucleotide
  Antisense strand to SEQ ID NO: 928936
uaauuuacgucaagauacc

SEQ ID NO: 928938 - RNA, 19 nt, Artificial Sequence
  Description of Artificial Sequence: Synthetic oligonucleotide
  Sense strand starting at position 3277 of SEQ ID NO: 913459
gagaaaugagugugucaac

SEQ ID NO: 928939 - RNA, 19 nt, Artificial Sequence
  Description of Artificial Sequence: Synthetic oligonucleotide
  Antisense strand to SEQ ID NO: 928938
guugacacacucauuucuc

SEQ ID NO: 928940 - RNA, 19 nt, Artificial Sequence
  Description of Artificial Sequence: Synthetic oligonucleotide
  Sense strand starting at position 3070 of SEQ ID NO: 913459
ggcacucugcacuaauaua

SEQ ID NO: 928941 - RNA, 19 nt, Artificial Sequence
  Description of Artificial Sequence: Synthetic oligonucleotide
  Antisense strand to SEQ ID NO: 928940
uauauuagugcagagugcc

SEQ ID NO: 928942 - RNA, 19 nt, Artificial Sequence
  Description of Artificial Sequence: Synthetic oligonucleotide
  Sense strand starting at position 2475 of SEQ ID NO: 913459
aagcguugaguuuaaagga

SEQ ID NO: 928943 - RNA, 19 nt, Artificial Sequence
  Description of Artificial Sequence: Synthetic oligonucleotide
  Antisense strand to SEQ ID NO: 928942
uccuuuaaacucaacgcuu

SEQ ID NO: 928944 - RNA, 19 nt, Artificial Sequence
  Description of Artificial Sequence: Synthetic oligonucleotide
  Sense strand starting at position 1342 of SEQ ID NO: 913459
agaggaaucucccuagcuu

SEQ ID NO: 928945 - RNA, 19 nt, Artificial Sequence
  Description of Artificial Sequence: Synthetic oligonucleotide
  Antisense strand to SEQ ID NO: 928944
aagcuagggagauuccucu

SEQ ID NO: 928946 - RNA, 19 nt, Artificial Sequence
  Description of Artificial Sequence: Synthetic oligonucleotide
  Sense strand starting at position 282 of SEQ ID NO: 913459
uuuguauguguccaaauaa

SEQ ID NO: 928947 - RNA, 19 nt, Artificial Sequence
  Description of Artificial Sequence: Synthetic oligonucleotide
  Antisense strand to SEQ ID NO: 928946
uuauuuggacacauacaaa

SEQ ID NO: 928948 - RNA, 19 nt, Artificial Sequence
  Description of Artificial Sequence: Synthetic oligonucleotide
  Sense strand starting at position 205 of SEQ ID NO: 913459
uauaguuuacuguggaaau

SEQ ID NO: 928949 - RNA, 19 nt, Artificial Sequence
  Description of Artificial Sequence: Synthetic oligonucleotide
  Antisense strand to SEQ ID NO: 928948
auuuccacaguaaacuaua

SEQ ID NO: 928950 - RNA, 19 nt, Artificial Sequence
  Description of Artificial Sequence: Synthetic oligonucleotide
  Sense strand starting at position 795 of SEQ ID NO: 913459
gcagcaaccuaucuagaaa

SEQ ID NO: 928951 - RNA, 19 nt, Artificial Sequence
  Description of Artificial Sequence: Synthetic oligonucleotide
  Antisense strand to SEQ ID NO: 928950
uuucuagauagguugcugc

SEQ ID NO: 928952 - RNA, 19 nt, Artificial Sequence
  Description of Artificial Sequence: Synthetic oligonucleotide
  Sense strand starting at position 3732 of SEQ ID NO: 913459
uggcaauggcuugacuauu

SEQ ID NO: 928953 - RNA, 19 nt, Artificial Sequence
  Description of Artificial Sequence: Synthetic oligonucleotide
  Antisense strand to SEQ ID NO: 928952
aauagucaagccauugcca

SEQ ID NO: 928954 - RNA, 19 nt, Artificial Sequence
  Description of Artificial Sequence: Synthetic oligonucleotide
  Sense strand starting at position 3139 of SEQ ID NO: 913459
gaaaguuagugaucaguug

SEQ ID NO: 928955 - RNA, 19 nt, Artificial Sequence
  Description of Artificial Sequence: Synthetic oligonucleotide
  Antisense strand to SEQ ID NO: 928954
caacugaucacuaacuuuc

SEQ ID NO: 928956 - RNA, 19 nt, Artificial Sequence
  Description of Artificial Sequence: Synthetic oligonucleotide
  Sense strand starting at position 2333 of SEQ ID NO: 913459
ugcaauauugcauagcaaa

SEQ ID NO: 928957 - RNA, 19 nt, Artificial Sequence
  Description of Artificial Sequence: Synthetic oligonucleotide
  Antisense strand to SEQ ID NO: 928956
uuugcuaugcaauauugca

SEQ ID NO: 928958 - RNA, 19 nt, Artificial Sequence
  Description of Artificial Sequence: Synthetic oligonucleotide
  Sense strand starting at position 3140 of SEQ ID NO: 913459
aaaguuagugaucaguugu

SEQ ID NO: 928959 - RNA, 19 nt, Artificial Sequence
  Description of Artificial Sequence: Synthetic oligonucleotide
  Antisense strand to SEQ ID NO: 928958
acaacugaucacuaacuuu

SEQ ID NO: 928960 - RNA, 19 nt, Artificial Sequence
  Description of Artificial Sequence: Synthetic oligonucleotide
  Sense strand starting at position 2827 of SEQ ID NO: 913459
uugaguguggugggagaau

SEQ ID NO: 928961 - RNA, 19 nt, Artificial Sequence
  Description of Artificial Sequence: Synthetic oligonucleotide
  Antisense strand to SEQ ID NO: 928960
auucucccaccacacucaa

SEQ ID NO: 928962 - RNA, 19 nt, Artificial Sequence
  Description of Artificial Sequence: Synthetic oligonucleotide
  Sense strand starting at position 2816 of SEQ ID NO: 913459
acugcauuuguuugagugu

SEQ ID NO: 928963 - RNA, 19 nt, Artificial Sequence
  Description of Artificial Sequence: Synthetic oligonucleotide
  Antisense strand to SEQ ID NO: 928962
acacucaaacaaaugcagu

SEQ ID NO: 928964 - RNA, 19 nt, Artificial Sequence
  Description of Artificial Sequence: Synthetic oligonucleotide
  Sense strand starting at position 2557 of SEQ ID NO: 913459
cauaaacagcagugugaau

SEQ ID NO: 928965 - RNA, 19 nt, Artificial Sequence
  Description of Artificial Sequence: Synthetic oligonucleotide
  Antisense strand to SEQ ID NO: 928964
auucacacugcuguuuaug

SEQ ID NO: 928966 - RNA, 19 nt, Artificial Sequence
  Description of Artificial Sequence: Synthetic oligonucleotide
  Sense strand starting at position 748 of SEQ ID NO: 913459
cggauuguucuauacuuuc

SEQ ID NO: 928967 - RNA, 19 nt, Artificial Sequence
  Description of Artificial Sequence: Synthetic oligonucleotide
  Antisense strand to SEQ ID NO: 928966
gaaaguauagaacaauccg

SEQ ID NO: 928968 - RNA, 19 nt, Artificial Sequence
  Description of Artificial Sequence: Synthetic oligonucleotide
  Sense strand starting at position 2240 of SEQ ID NO: 913459
augagaucguuuccuuuaa

SEQ ID NO: 928969 - RNA, 19 nt, Artificial Sequence
  Description of Artificial Sequence: Synthetic oligonucleotide
  Antisense strand to SEQ ID NO: 928968
uuaaaggaaacgaucucau

SEQ ID NO: 928970 - RNA, 19 nt, Artificial Sequence
  Description of Artificial Sequence: Synthetic oligonucleotide
  Sense strand starting at position 2242 of SEQ ID NO: 913459
gagaucguuuccuuuaaua

SEQ ID NO: 928971 - RNA, 19 nt, Artificial Sequence
  Description of Artificial Sequence: Synthetic oligonucleotide
  Antisense strand to SEQ ID NO: 928970
uauuaaaggaaacgaucuc

SEQ ID NO: 928972 - RNA, 19 nt, Artificial Sequence
  Description of Artificial Sequence: Synthetic oligonucleotide
  Sense strand starting at position 2566 of SEQ ID NO: 913459
cagugugaauuguuauaac

SEQ ID NO: 928973 - RNA, 19 nt, Artificial Sequence
  Description of Artificial Sequence: Synthetic oligonucleotide
  Antisense strand to SEQ ID NO: 928972
guuauaacaauucacacug

SEQ ID NO: 928974 - RNA, 19 nt, Artificial Sequence
  Description of Artificial Sequence: Synthetic oligonucleotide
  Sense strand starting at position 2819 of SEQ ID NO: 913459
gcauuuguuugaguguggu

SEQ ID NO: 928975 - RNA, 19 nt, Artificial Sequence
  Description of Artificial Sequence: Synthetic oligonucleotide
  Antisense strand to SEQ ID NO: 928974
accacacucaaacaaaugc

SEQ ID NO: 928976 - RNA, 19 nt, Artificial Sequence
  Description of Artificial Sequence: Synthetic oligonucleotide
  Sense strand starting at position 3151 of SEQ ID NO: 913459
ucaguuguaccucaauugu

SEQ ID NO: 928977 - RNA, 19 nt, Artificial Sequence
  Description of Artificial Sequence: Synthetic oligonucleotide
  Antisense strand to SEQ ID NO: 928976
acaauugagguacaacuga

SEQ ID NO: 928978 - RNA, 19 nt, Artificial Sequence
  Description of Artificial Sequence: Synthetic oligonucleotide
  Sense strand starting at position 2470 of SEQ ID NO: 913459
uuauaaagcguugaguuua

SEQ ID NO: 928979 - RNA, 19 nt, Artificial Sequence
  Description of Artificial Sequence: Synthetic oligonucleotide
  Antisense strand to SEQ ID NO: 928978
uaaacucaacgcuuuauaa

SEQ ID NO: 928980 - RNA, 19 nt, Artificial Sequence
  Description of Artificial Sequence: Synthetic oligonucleotide
  Sense strand starting at position 1287 of SEQ ID NO: 913459
ugggauagcucaucuggca

SEQ ID NO: 928981 - RNA, 19 nt, Artificial Sequence
  Description of Artificial Sequence: Synthetic oligonucleotide
  Antisense strand to SEQ ID NO: 928980
ugccagaugagcuauccca

SEQ ID NO: 928982 - RNA, 19 nt, Artificial Sequence
  Description of Artificial Sequence: Synthetic oligonucleotide
  Sense strand starting at position 2397 of SEQ ID NO: 913459
gcuugugacuuuccaaaca

SEQ ID NO: 928983 - RNA, 19 nt, Artificial Sequence
  Description of Artificial Sequence: Synthetic oligonucleotide
  Antisense strand to SEQ ID NO: 928982
uguuuggaaagucacaagc

SEQ ID NO: 928984 - RNA, 19 nt, Artificial Sequence
  Description of Artificial Sequence: Synthetic oligonucleotide
  Sense strand starting at position 1368 of SEQ ID NO: 913459
cugcaaucaugauccgauu

SEQ ID NO: 928985 - RNA, 19 nt, Artificial Sequence
  Description of Artificial Sequence: Synthetic oligonucleotide
  Antisense strand to SEQ ID NO: 928984
aaucggaucaugauugcag

SEQ ID NO: 928986 - RNA, 19 nt, Artificial Sequence
  Description of Artificial Sequence: Synthetic oligonucleotide
  Sense strand starting at position 2231 of SEQ ID NO: 913460
cuugaaagucugcaauaaa

SEQ ID NO: 928987 - RNA, 19 nt, Artificial Sequence
  Description of Artificial Sequence: Synthetic oligonucleotide
  Antisense strand to SEQ ID NO: 928986
uuuauugcagacuuucaag

SEQ ID NO: 928988 - RNA, 19 nt, Artificial Sequence
  Description of Artificial Sequence: Synthetic oligonucleotide
  Sense strand starting at position 2520 of SEQ ID NO: 913460
agguauuacuauccaggaa

SEQ ID NO: 928989 - RNA, 19 nt, Artificial Sequence
  Description of Artificial Sequence: Synthetic oligonucleotide
  Antisense strand to SEQ ID NO: 928988
uuccuggauaguaauaccu

SEQ ID NO: 928990 - RNA, 19 nt, Artificial Sequence
  Description of Artificial Sequence: Synthetic oligonucleotide
  Sense strand starting at position 440 of SEQ ID NO: 913460
gaauguauuuggcaauuug

SEQ ID NO: 928991 - RNA, 19 nt, Artificial Sequence
  Description of Artificial Sequence: Synthetic oligonucleotide
  Antisense strand to SEQ ID NO: 928990
caaauugccaaauacauuc

SEQ ID NO: 928992 - RNA, 19 nt, Artificial Sequence
  Description of Artificial Sequence: Synthetic oligonucleotide
  Sense strand starting at position 659 of SEQ ID NO: 913460
ccagaaaccguugauaauu

SEQ ID NO: 928993 - RNA, 19 nt, Artificial Sequence
  Description of Artificial Sequence: Synthetic oligonucleotide
  Antisense strand to SEQ ID NO: 928992
aauuaucaacgguuucugg

SEQ ID NO: 928994 - RNA, 19 nt, Artificial Sequence
  Description of Artificial Sequence: Synthetic oligonucleotide
  Sense strand starting at position 2710 of SEQ ID NO: 913460
auccaucaugguggaaaua

SEQ ID NO: 928995 - RNA, 19 nt, Artificial Sequence
  Description of Artificial Sequence: Synthetic oligonucleotide
  Antisense strand to SEQ ID NO: 928994
uauuuccaccaugauggau

SEQ ID NO: 928996 - RNA, 19 nt, Artificial Sequence
  Description of Artificial Sequence: Synthetic oligonucleotide
  Sense strand starting at position 1190 of SEQ ID NO: 913460
ucguguggcaaagcuuuau

SEQ ID NO: 928997 - RNA, 19 nt, Artificial Sequence
  Description of Artificial Sequence: Synthetic oligonucleotide
  Antisense strand to SEQ ID NO: 928996
auaaagcuuugccacacga

SEQ ID NO: 928998 - RNA, 19 nt, Artificial Sequence
  Description of Artificial Sequence: Synthetic oligonucleotide
  Sense strand starting at position 2386 of SEQ ID NO: 913460
ugaguaucacuuggagaca

SEQ ID NO: 928999 - RNA, 19 nt, Artificial Sequence
  Description of Artificial Sequence: Synthetic oligonucleotide
  Antisense strand to SEQ ID NO: 928998
ugucuccaagugauacuca

SEQ ID NO: 929000 - RNA, 19 nt, Artificial Sequence
  Description of Artificial Sequence: Synthetic oligonucleotide
  Sense strand starting at position 2385 of SEQ ID NO: 913460
augaguaucacuuggagac

SEQ ID NO: 929001 - RNA, 19 nt, Artificial Sequence
  Description of Artificial Sequence: Synthetic oligonucleotide
  Antisense strand to SEQ ID NO: 929000
gucuccaagugauacucau

SEQ ID NO: 929002 - RNA, 19 nt, Artificial Sequence
  Description of Artificial Sequence: Synthetic oligonucleotide
  Sense strand starting at position 612 of SEQ ID NO: 913460
auuggacaugaguagcauu

SEQ ID NO: 929003 - RNA, 19 nt, Artificial Sequence
  Description of Artificial Sequence: Synthetic oligonucleotide
  Antisense strand to SEQ ID NO: 929002
aaugcuacucauguccaau

SEQ ID NO: 929004 - RNA, 19 nt, Artificial Sequence
  Description of Artificial Sequence: Synthetic oligonucleotide
  Sense strand starting at position 2747 of SEQ ID NO: 913460
aucucagaucuuggugaaa

SEQ ID NO: 929005 - RNA, 19 nt, Artificial Sequence
  Description of Artificial Sequence: Synthetic oligonucleotide
  Antisense strand to SEQ ID NO: 929004
uuucaccaagaucugagau

SEQ ID NO: 929006 - RNA, 19 nt, Artificial Sequence
  Description of Artificial Sequence: Synthetic oligonucleotide
  Sense strand starting at position 3582 of SEQ ID NO: 913460
cagggaggugcaugaauga

SEQ ID NO: 929007 - RNA, 19 nt, Artificial Sequence
  Description of Artificial Sequence: Synthetic oligonucleotide
  Antisense strand to SEQ ID NO: 929006
ucauucaugcaccucccug

SEQ ID NO: 929008 - RNA, 19 nt, Artificial Sequence
  Description of Artificial Sequence: Synthetic oligonucleotide
  Sense strand starting at position 921 of SEQ ID NO: 913460
uuaguauagguuggaacaa

SEQ ID NO: 929009 - RNA, 19 nt, Artificial Sequence
  Description of Artificial Sequence: Synthetic oligonucleotide
  Antisense strand to SEQ ID NO: 929008
uuguuccaaccuauacuaa

SEQ ID NO: 929010 - RNA, 19 nt, Artificial Sequence
  Description of Artificial Sequence: Synthetic oligonucleotide
  Sense strand starting at position 1230 of SEQ ID NO: 913460
gacugucauguuuguauuu

SEQ ID NO: 929011 - RNA, 19 nt, Artificial Sequence
  Description of Artificial Sequence: Synthetic oligonucleotide
  Antisense strand to SEQ ID NO: 929010
aaauacaaacaugacaguc

SEQ ID NO: 929012 - RNA, 19 nt, Artificial Sequence
  Description of Artificial Sequence: Synthetic oligonucleotide
  Sense strand starting at position 1182 of SEQ ID NO: 913460
gucaguccucguguggcaa

SEQ ID NO: 929013 - RNA, 19 nt, Artificial Sequence
  Description of Artificial Sequence: Synthetic oligonucleotide
  Antisense strand to SEQ ID NO: 929012
uugccacacgaggacugac

SEQ ID NO: 929014 - RNA, 19 nt, Artificial Sequence
  Description of Artificial Sequence: Synthetic oligonucleotide
  Sense strand starting at position 3597 of SEQ ID NO: 913460
augaaaugucccuagcuac

SEQ ID NO: 929015 - RNA, 19 nt, Artificial Sequence
  Description of Artificial Sequence: Synthetic oligonucleotide
  Antisense strand to SEQ ID NO: 929014
guagcuagggacauuucau

SEQ ID NO: 929016 - RNA, 19 nt, Artificial Sequence
  Description of Artificial Sequence: Synthetic oligonucleotide
  Sense strand starting at position 1007 of SEQ ID NO: 913460
guccuauuagcacagauau

SEQ ID NO: 929017 - RNA, 19 nt, Artificial Sequence
  Description of Artificial Sequence: Synthetic oligonucleotide
  Antisense strand to SEQ ID NO: 929016
auaucugugcuaauaggac

SEQ ID NO: 929018 - RNA, 19 nt, Artificial Sequence
  Description of Artificial Sequence: Synthetic oligonucleotide
  Sense strand starting at position 1455 of SEQ ID NO: 913460
ggacucucucccuaagcua

SEQ ID NO: 929019 - RNA, 19 nt, Artificial Sequence
  Description of Artificial Sequence: Synthetic oligonucleotide
  Antisense strand to SEQ ID NO: 929018
uagcuuagggagagagucc

SEQ ID NO: 929020 - RNA, 19 nt, Artificial Sequence
  Description of Artificial Sequence: Synthetic oligonucleotide
  Sense strand starting at position 335 of SEQ ID NO: 913460
cuggccucgugacuauuua

SEQ ID NO: 929021 - RNA, 19 nt, Artificial Sequence
  Description of Artificial Sequence: Synthetic oligonucleotide
  Antisense strand to SEQ ID NO: 929020
uaaauagucacgaggccag

SEQ ID NO: 929022 - RNA, 19 nt, Artificial Sequence
  Description of Artificial Sequence: Synthetic oligonucleotide
  Sense strand starting at position 744 of SEQ ID NO: 913460
gggccaacucagcaaguaa

SEQ ID NO: 929023 - RNA, 19 nt, Artificial Sequence
  Description of Artificial Sequence: Synthetic oligonucleotide
  Antisense strand to SEQ ID NO: 929022
uuacuugcugaguuggccc

SEQ ID NO: 929024 - RNA, 19 nt, Artificial Sequence
  Description of Artificial Sequence: Synthetic oligonucleotide
  Sense strand starting at position 491 of SEQ ID NO: 913460
agaauuccgcugcaggaaa

SEQ ID NO: 929025 - RNA, 19 nt, Artificial Sequence
  Description of Artificial Sequence: Synthetic oligonucleotide
  Antisense strand to SEQ ID NO: 929024
uuuccugcagcggaauucu

SEQ ID NO: 929026 - RNA, 19 nt, Artificial Sequence
  Description of Artificial Sequence: Synthetic oligonucleotide
  Sense strand starting at position 920 of SEQ ID NO: 913460
uuuaguauagguuggaaca

SEQ ID NO: 929027 - RNA, 19 nt, Artificial Sequence
  Description of Artificial Sequence: Synthetic oligonucleotide
  Antisense strand to SEQ ID NO: 929026
uguuccaaccuauacuaaa

SEQ ID NO: 929028 - RNA, 19 nt, Artificial Sequence
  Description of Artificial Sequence: Synthetic oligonucleotide
  Sense strand starting at position 3138 of SEQ ID NO: 913460
gugggagaauaucuuaguu

SEQ ID NO: 929029 - RNA, 19 nt, Artificial Sequence
  Description of Artificial Sequence: Synthetic oligonucleotide
  Antisense strand to SEQ ID NO: 929028
aacuaagauauucucccac

SEQ ID NO: 929030 - RNA, 19 nt, Artificial Sequence
  Description of Artificial Sequence: Synthetic oligonucleotide
  Sense strand starting at position 712 of SEQ ID NO: 913460
gaaauagaauugucacgua

SEQ ID NO: 929031 - RNA, 19 nt, Artificial Sequence
  Description of Artificial Sequence: Synthetic oligonucleotide
  Antisense strand to SEQ ID NO: 929030
uacgugacaauucuauuuc

SEQ ID NO: 929032 - RNA, 19 nt, Artificial Sequence
  Description of Artificial Sequence: Synthetic oligonucleotide
  Sense strand starting at position 658 of SEQ ID NO: 913460
cccagaaaccguugauaau

SEQ ID NO: 929033 - RNA, 19 nt, Artificial Sequence
  Description of Artificial Sequence: Synthetic oligonucleotide
  Antisense strand to SEQ ID NO: 929032
auuaucaacgguuucuggg

SEQ ID NO: 929034 - RNA, 19 nt, Artificial Sequence
  Description of Artificial Sequence: Synthetic oligonucleotide
  Sense strand starting at position 3480 of SEQ ID NO: 913460
uuagauauuuagcaggaua

SEQ ID NO: 929035 - RNA, 19 nt, Artificial Sequence
  Description of Artificial Sequence: Synthetic oligonucleotide
  Antisense strand to SEQ ID NO: 929034
uauccugcuaaauaucuaa

SEQ ID NO: 929036 - RNA, 19 nt, Artificial Sequence
  Description of Artificial Sequence: Synthetic oligonucleotide
  Sense strand starting at position 357 of SEQ ID NO: 913460
ucauauagauugucauucu

SEQ ID NO: 929037 - RNA, 19 nt, Artificial Sequence
  Description of Artificial Sequence: Synthetic oligonucleotide
  Antisense strand to SEQ ID NO: 929036
agaaugacaaucuauauga

SEQ ID NO: 929038 - RNA, 19 nt, Artificial Sequence
  Description of Artificial Sequence: Synthetic oligonucleotide
  Sense strand starting at position 2230 of SEQ ID NO: 913460
ucuugaaagucugcaauaa

SEQ ID NO: 929039 - RNA, 19 nt, Artificial Sequence
  Description of Artificial Sequence: Synthetic oligonucleotide
  Antisense strand to SEQ ID NO: 929038
uuauugcagacuuucaaga

SEQ ID NO: 929040 - RNA, 19 nt, Artificial Sequence
  Description of Artificial Sequence: Synthetic oligonucleotide
  Sense strand starting at position 391 of SEQ ID NO: 913460
acauaauugugaccaguuu

SEQ ID NO: 929041 - RNA, 19 nt, Artificial Sequence
  Description of Artificial Sequence: Synthetic oligonucleotide
  Antisense strand to SEQ ID NO: 929040
aaacuggucacaauuaugu

SEQ ID NO: 929042 - RNA, 19 nt, Artificial Sequence
  Description of Artificial Sequence: Synthetic oligonucleotide
  Sense strand starting at position 3471 of SEQ ID NO: 913460
acagucacauuagauauuu

SEQ ID NO: 929043 - RNA, 19 nt, Artificial Sequence
  Description of Artificial Sequence: Synthetic oligonucleotide
  Antisense strand to SEQ ID NO: 929042
aaauaucuaaugugacugu

SEQ ID NO: 929044 - RNA, 19 nt, Artificial Sequence
  Description of Artificial Sequence: Synthetic oligonucleotide
  Sense strand starting at position 1372 of SEQ ID NO: 913460
ggcugucagagugauacuc

SEQ ID NO: 929045 - RNA, 19 nt, Artificial Sequence
  Description of Artificial Sequence: Synthetic oligonucleotide
  Antisense strand to SEQ ID NO: 929044
gaguaucacucugacagcc

SEQ ID NO: 929046 - RNA, 19 nt, Artificial Sequence
  Description of Artificial Sequence: Synthetic oligonucleotide
  Sense strand starting at position 2613 of SEQ ID NO: 913460
auagauaaaucauaggaga

SEQ ID NO: 929047 - RNA, 19 nt, Artificial Sequence
  Description of Artificial Sequence: Synthetic oligonucleotide
  Antisense strand to SEQ ID NO: 929046
ucuccuaugauuuaucuau

SEQ ID NO: 929048 - RNA, 19 nt, Artificial Sequence
  Description of Artificial Sequence: Synthetic oligonucleotide
  Sense strand starting at position 2063 of SEQ ID NO: 913460
gacagacgccugcaaacuu

SEQ ID NO: 929049 - RNA, 19 nt, Artificial Sequence
  Description of Artificial Sequence: Synthetic oligonucleotide
  Antisense strand to SEQ ID NO: 929048
aaguuugcaggcgucuguc

SEQ ID NO: 929050 - RNA, 19 nt, Artificial Sequence
  Description of Artificial Sequence: Synthetic oligonucleotide
  Sense strand starting at position 633 of SEQ ID NO: 913460
auaggugggcgugacauau

SEQ ID NO: 929051 - RNA, 19 nt, Artificial Sequence
  Description of Artificial Sequence: Synthetic oligonucleotide
  Antisense strand to SEQ ID NO: 929050
auaugucacgcccaccuau

SEQ ID NO: 929052 - RNA, 19 nt, Artificial Sequence
  Description of Artificial Sequence: Synthetic oligonucleotide
  Sense strand starting at position 665 of SEQ ID NO: 913460
accguugauaauuagugua

SEQ ID NO: 929053 - RNA, 19 nt, Artificial Sequence
  Description of Artificial Sequence: Synthetic oligonucleotide
  Antisense strand to SEQ ID NO: 929052
uacacuaauuaucaacggu

SEQ ID NO: 929054 - RNA, 19 nt, Artificial Sequence
  Description of Artificial Sequence: Synthetic oligonucleotide
  Sense strand starting at position 161 of SEQ ID NO: 913460
acuuaaagauaggacuaaa

SEQ ID NO: 929055 - RNA, 19 nt, Artificial Sequence
  Description of Artificial Sequence: Synthetic oligonucleotide
  Antisense strand to SEQ ID NO: 929054
uuuaguccuaucuuuaagu

SEQ ID NO: 929056 - RNA, 19 nt, Artificial Sequence
  Description of Artificial Sequence: Synthetic oligonucleotide
  Sense strand starting at position 3015 of SEQ ID NO: 913460
aagagcagucauugcaaca

SEQ ID NO: 929057 - RNA, 19 nt, Artificial Sequence
  Description of Artificial Sequence: Synthetic oligonucleotide
  Antisense strand to SEQ ID NO: 929056
uguugcaaugacugcucuu

SEQ ID NO: 929058 - RNA, 19 nt, Artificial Sequence
  Description of Artificial Sequence: Synthetic oligonucleotide
  Sense strand starting at position 637 of SEQ ID NO: 913460
gugggcgugacauaucuaa

SEQ ID NO: 929059 - RNA, 19 nt, Artificial Sequence
  Description of Artificial Sequence: Synthetic oligonucleotide
  Antisense strand to SEQ ID NO: 929058
uuagauaugucacgcccac

SEQ ID NO: 929060 - RNA, 19 nt, Artificial Sequence
  Description of Artificial Sequence: Synthetic oligonucleotide
  Sense strand starting at position 615 of SEQ ID NO: 913460
ggacaugaguagcauuuga

SEQ ID NO: 929061 - RNA, 19 nt, Artificial Sequence
  Description of Artificial Sequence: Synthetic oligonucleotide
  Antisense strand to SEQ ID NO: 929060
ucaaaugcuacucaugucc

SEQ ID NO: 929062 - RNA, 19 nt, Artificial Sequence
  Description of Artificial Sequence: Synthetic oligonucleotide
  Sense strand starting at position 2103 of SEQ ID NO: 913460
auuaguaucagaugcgaca

SEQ ID NO: 929063 - RNA, 19 nt, Artificial Sequence
  Description of Artificial Sequence: Synthetic oligonucleotide
  Antisense strand to SEQ ID NO: 929062
ugucgcaucugauacuaau

SEQ ID NO: 929064 - RNA, 19 nt, Artificial Sequence
  Description of Artificial Sequence: Synthetic oligonucleotide
  Sense strand starting at position 2343 of SEQ ID NO: 913460
guucucaguguguauggaa

SEQ ID NO: 929065 - RNA, 19 nt, Artificial Sequence
  Description of Artificial Sequence: Synthetic oligonucleotide
  Antisense strand to SEQ ID NO: 929064
uuccauacacacugagaac

SEQ ID NO: 929066 - RNA, 19 nt, Artificial Sequence
  Description of Artificial Sequence: Synthetic oligonucleotide
  Sense strand starting at position 1130 of SEQ ID NO: 913461
cccugaaauggcuaacauu

SEQ ID NO: 929067 - RNA, 19 nt, Artificial Sequence
  Description of Artificial Sequence: Synthetic oligonucleotide
  Antisense strand to SEQ ID NO: 929066
aauguuagccauuucaggg

SEQ ID NO: 929068 - RNA, 19 nt, Artificial Sequence
  Description of Artificial Sequence: Synthetic oligonucleotide
  Sense strand starting at position 172 of SEQ ID NO: 913461
ccuagaauaaccgaggucu

SEQ ID NO: 929069 - RNA, 19 nt, Artificial Sequence
  Description of Artificial Sequence: Synthetic oligonucleotide
  Antisense strand to SEQ ID NO: 929068
agaccucgguuauucuagg

SEQ ID NO: 929070 - RNA, 19 nt, Artificial Sequence
  Description of Artificial Sequence: Synthetic oligonucleotide
  Sense strand starting at position 777 of SEQ ID NO: 913461
gcuugaaaucaacaagcca

SEQ ID NO: 929071 - RNA, 19 nt, Artificial Sequence
  Description of Artificial Sequence: Synthetic oligonucleotide
  Antisense strand to SEQ ID NO: 929070
uggcuuguugauuucaagc

SEQ ID NO: 929072 - RNA, 19 nt, Artificial Sequence
  Description of Artificial Sequence: Synthetic oligonucleotide
  Sense strand starting at position 2633 of SEQ ID NO: 913461
agcaaaugucugcaaagaa

SEQ ID NO: 929073 - RNA, 19 nt, Artificial Sequence
  Description of Artificial Sequence: Synthetic oligonucleotide
  Antisense strand to SEQ ID NO: 929072
uucuuugcagacauuugcu

SEQ ID NO: 929074 - RNA, 19 nt, Artificial Sequence
  Description of Artificial Sequence: Synthetic oligonucleotide
  Sense strand starting at position 3348 of SEQ ID NO: 913461
caugauugagugcaacuua

SEQ ID NO: 929075 - RNA, 19 nt, Artificial Sequence
  Description of Artificial Sequence: Synthetic oligonucleotide
  Antisense strand to SEQ ID NO: 929074
uaaguugcacucaaucaug

SEQ ID NO: 929076 - RNA, 19 nt, Artificial Sequence
  Description of Artificial Sequence: Synthetic oligonucleotide
  Sense strand starting at position 16 of SEQ ID NO: 913461
ugacuuugauguccaggaa

SEQ ID NO: 929077 - RNA, 19 nt, Artificial Sequence
  Description of Artificial Sequence: Synthetic oligonucleotide
  Antisense strand to SEQ ID NO: 929076
uuccuggacaucaaaguca

SEQ ID NO: 929078 - RNA, 19 nt, Artificial Sequence
  Description of Artificial Sequence: Synthetic oligonucleotide
  Sense strand starting at position 28 of SEQ ID NO: 913461
ccaggaauuuaggaacucu

SEQ ID NO: 929079 - RNA, 19 nt, Artificial Sequence
  Description of Artificial Sequence: Synthetic oligonucleotide
  Antisense strand to SEQ ID NO: 929078
agaguuccuaaauuccugg

SEQ ID NO: 929080 - RNA, 19 nt, Artificial Sequence
  Description of Artificial Sequence: Synthetic oligonucleotide
  Sense strand starting at position 2677 of SEQ ID NO: 913461
ugcuaaugucaguaauaag

SEQ ID NO: 929081 - RNA, 19 nt, Artificial Sequence
  Description of Artificial Sequence: Synthetic oligonucleotide
  Antisense strand to SEQ ID NO: 929080
cuuauuacugacauuagca

SEQ ID NO: 929082 - RNA, 19 nt, Artificial Sequence
  Description of Artificial Sequence: Synthetic oligonucleotide
  Sense strand starting at position 3387 of SEQ ID NO: 913461
guggaaacuucuguaauga

SEQ ID NO: 929083 - RNA, 19 nt, Artificial Sequence
  Description of Artificial Sequence: Synthetic oligonucleotide
  Antisense strand to SEQ ID NO: 929082
ucauuacagaaguuuccac

SEQ ID NO: 929084 - RNA, 19 nt, Artificial Sequence
  Description of Artificial Sequence: Synthetic oligonucleotide
  Sense strand starting at position 3897 of SEQ ID NO: 913461
acugaaaguuugguauauu

SEQ ID NO: 929085 - RNA, 19 nt, Artificial Sequence
  Description of Artificial Sequence: Synthetic oligonucleotide
  Antisense strand to SEQ ID NO: 929084
aauauaccaaacuuucagu

SEQ ID NO: 929086 - RNA, 19 nt, Artificial Sequence
  Description of Artificial Sequence: Synthetic oligonucleotide
  Sense strand starting at position 538 of SEQ ID NO: 913461
uuggaacugccaugauuac

SEQ ID NO: 929087 - RNA, 19 nt, Artificial Sequence
  Description of Artificial Sequence: Synthetic oligonucleotide
  Antisense strand to SEQ ID NO: 929086
guaaucauggcaguuccaa

SEQ ID NO: 929088 - RNA, 19 nt, Artificial Sequence
  Description of Artificial Sequence: Synthetic oligonucleotide
  Sense strand starting at position 2580 of SEQ ID NO: 913461
ggguuccuacacugaaagu

SEQ ID NO: 929089 - RNA, 19 nt, Artificial Sequence
  Description of Artificial Sequence: Synthetic oligonucleotide
  Antisense strand to SEQ ID NO: 929088
acuuucaguguaggaaccc

SEQ ID NO: 929090 - RNA, 19 nt, Artificial Sequence
  Description of Artificial Sequence: Synthetic oligonucleotide
  Sense strand starting at position 453 of SEQ ID NO: 913461
gucaaagugaauuaugugu

SEQ ID NO: 929091 - RNA, 19 nt, Artificial Sequence
  Description of Artificial Sequence: Synthetic oligonucleotide
  Antisense strand to SEQ ID NO: 929090
acacauaauucacuuugac

SEQ ID NO: 929092 - RNA, 19 nt, Artificial Sequence
  Description of Artificial Sequence: Synthetic oligonucleotide
  Sense strand starting at position 2630 of SEQ ID NO: 913461
gagagcaaaugucugcaaa

SEQ ID NO: 929093 - RNA, 19 nt, Artificial Sequence
  Description of Artificial Sequence: Synthetic oligonucleotide
  Antisense strand to SEQ ID NO: 929092
uuugcagacauuugcucuc

SEQ ID NO: 929094 - RNA, 19 nt, Artificial Sequence
  Description of Artificial Sequence: Synthetic oligonucleotide
  Sense strand starting at position 2632 of SEQ ID NO: 913461
gagcaaaugucugcaaaga

SEQ ID NO: 929095 - RNA, 19 nt, Artificial Sequence
  Description of Artificial Sequence: Synthetic oligonucleotide
  Antisense strand to SEQ ID NO: 929094
ucuuugcagacauuugcuc

SEQ ID NO: 929096 - RNA, 19 nt, Artificial Sequence
  Description of Artificial Sequence: Synthetic oligonucleotide
  Sense strand starting at position 2631 of SEQ ID NO: 913461
agagcaaaugucugcaaag

SEQ ID NO: 929097 - RNA, 19 nt, Artificial Sequence
  Description of Artificial Sequence: Synthetic oligonucleotide
  Antisense strand to SEQ ID NO: 929096
cuuugcagacauuugcucu

SEQ ID NO: 929098 - RNA, 19 nt, Artificial Sequence
  Description of Artificial Sequence: Synthetic oligonucleotide
  Sense strand starting at position 823 of SEQ ID NO: 913461
cagaaugcugccugaaaug

SEQ ID NO: 929099 - RNA, 19 nt, Artificial Sequence
  Description of Artificial Sequence: Synthetic oligonucleotide
  Antisense strand to SEQ ID NO: 929098
cauuucaggcagcauucug

SEQ ID NO: 929100 - RNA, 19 nt, Artificial Sequence
  Description of Artificial Sequence: Synthetic oligonucleotide
  Sense strand starting at position 822 of SEQ ID NO: 913461
ccagaaugcugccugaaau

SEQ ID NO: 929101 - RNA, 19 nt, Artificial Sequence
  Description of Artificial Sequence: Synthetic oligonucleotide
  Antisense strand to SEQ ID NO: 929100
auuucaggcagcauucugg

SEQ ID NO: 929102 - RNA, 19 nt, Artificial Sequence
  Description of Artificial Sequence: Synthetic oligonucleotide
  Sense strand starting at position 2762 of SEQ ID NO: 913461
ucgucaacuaggugggaau

SEQ ID NO: 929103 - RNA, 19 nt, Artificial Sequence
  Description of Artificial Sequence: Synthetic oligonucleotide
  Antisense strand to SEQ ID NO: 929102
auucccaccuaguugacga

SEQ ID NO: 929104 - RNA, 19 nt, Artificial Sequence
  Description of Artificial Sequence: Synthetic oligonucleotide
  Sense strand starting at position 765 of SEQ ID NO: 913461
uggcaaauguaggcuugaa

SEQ ID NO: 929105 - RNA, 19 nt, Artificial Sequence
  Description of Artificial Sequence: Synthetic oligonucleotide
  Antisense strand to SEQ ID NO: 929104
uucaagccuacauuugcca

SEQ ID NO: 929106 - RNA, 19 nt, Artificial Sequence
  Description of Artificial Sequence: Synthetic oligonucleotide
  Sense strand starting at position 119 of SEQ ID NO: 913461
uguccuuuccuuugaugga

SEQ ID NO: 929107 - RNA, 19 nt, Artificial Sequence
  Description of Artificial Sequence: Synthetic oligonucleotide
  Antisense strand to SEQ ID NO: 929106
uccaucaaaggaaaggaca

SEQ ID NO: 929108 - RNA, 19 nt, Artificial Sequence
  Description of Artificial Sequence: Synthetic oligonucleotide
  Sense strand starting at position 2676 of SEQ ID NO: 913461
uugcuaaugucaguaauaa

SEQ ID NO: 929109 - RNA, 19 nt, Artificial Sequence
  Description of Artificial Sequence: Synthetic oligonucleotide
  Antisense strand to SEQ ID NO: 929108
uuauuacugacauuagcaa

SEQ ID NO: 929110 - RNA, 19 nt, Artificial Sequence
  Description of Artificial Sequence: Synthetic oligonucleotide
  Sense strand starting at position 305 of SEQ ID NO: 913461
gggaauguagcugguucau

SEQ ID NO: 929111 - RNA, 19 nt, Artificial Sequence
  Description of Artificial Sequence: Synthetic oligonucleotide
  Antisense strand to SEQ ID NO: 929110
augaaccagcuacauuccc

SEQ ID NO: 929112 - RNA, 19 nt, Artificial Sequence
  Description of Artificial Sequence: Synthetic oligonucleotide
  Sense strand starting at position 3288 of SEQ ID NO: 913461
uggugaggguguuucacuu

SEQ ID NO: 929113 - RNA, 19 nt, Artificial Sequence
  Description of Artificial Sequence: Synthetic oligonucleotide
  Antisense strand to SEQ ID NO: 929112
aagugaaacacccucacca

SEQ ID NO: 929114 - RNA, 19 nt, Artificial Sequence
  Description of Artificial Sequence: Synthetic oligonucleotide
  Sense strand starting at position 4 of SEQ ID NO: 913461
uuaugugagcccugacuuu

SEQ ID NO: 929115 - RNA, 19 nt, Artificial Sequence
  Description of Artificial Sequence: Synthetic oligonucleotide
  Antisense strand to SEQ ID NO: 929114
aaagucagggcucacauaa

SEQ ID NO: 929116 - RNA, 19 nt, Artificial Sequence
  Description of Artificial Sequence: Synthetic oligonucleotide
  Sense strand starting at position 624 of SEQ ID NO: 913461
uuuauuagcuugucacacu

SEQ ID NO: 929117 - RNA, 19 nt, Artificial Sequence
  Description of Artificial Sequence: Synthetic oligonucleotide
  Antisense strand to SEQ ID NO: 929116
agugugacaagcuaauaaa

SEQ ID NO: 929118 - RNA, 19 nt, Artificial Sequence
  Description of Artificial Sequence: Synthetic oligonucleotide
  Sense strand starting at position 3955 of SEQ ID NO: 913461
ugccuucuauaguuuacua

SEQ ID NO: 929119 - RNA, 19 nt, Artificial Sequence
  Description of Artificial Sequence: Synthetic oligonucleotide
  Antisense strand to SEQ ID NO: 929118
uaguaaacuauagaaggca

SEQ ID NO: 929120 - RNA, 19 nt, Artificial Sequence
  Description of Artificial Sequence: Synthetic oligonucleotide
  Sense strand starting at position 112 of SEQ ID NO: 913461
gucuaaauguccuuuccuu

SEQ ID NO: 929121 - RNA, 19 nt, Artificial Sequence
  Description of Artificial Sequence: Synthetic oligonucleotide
  Antisense strand to SEQ ID NO: 929120
aaggaaaggacauuuagac

SEQ ID NO: 929122 - RNA, 19 nt, Artificial Sequence
  Description of Artificial Sequence: Synthetic oligonucleotide
  Sense strand starting at position 622 of SEQ ID NO: 913461
ccuuuauuagcuugucaca

SEQ ID NO: 929123 - RNA, 19 nt, Artificial Sequence
  Description of Artificial Sequence: Synthetic oligonucleotide
  Antisense strand to SEQ ID NO: 929122
ugugacaagcuaauaaagg

SEQ ID NO: 929124 - RNA, 19 nt, Artificial Sequence
  Description of Artificial Sequence: Synthetic oligonucleotide
  Sense strand starting at position 1401 of SEQ ID NO: 913461
gagagucggcaucguagaa

SEQ ID NO: 929125 - RNA, 19 nt, Artificial Sequence
  Description of Artificial Sequence: Synthetic oligonucleotide
  Antisense strand to SEQ ID NO: 929124
uucuacgaugccgacucuc

SEQ ID NO: 929126 - RNA, 19 nt, Artificial Sequence
  Description of Artificial Sequence: Synthetic oligonucleotide
  Sense strand starting at position 420 of SEQ ID NO: 913461
aguccuugguguccacauu

SEQ ID NO: 929127 - RNA, 19 nt, Artificial Sequence
  Description of Artificial Sequence: Synthetic oligonucleotide
  Antisense strand to SEQ ID NO: 929126
aauguggacaccaaggacu

SEQ ID NO: 929128 - RNA, 19 nt, Artificial Sequence
  Description of Artificial Sequence: Synthetic oligonucleotide
  Sense strand starting at position 673 of SEQ ID NO: 913461
cuaacaugcucucuagugu

SEQ ID NO: 929129 - RNA, 19 nt, Artificial Sequence
  Description of Artificial Sequence: Synthetic oligonucleotide
  Antisense strand to SEQ ID NO: 929128
acacuagagagcauguuag

SEQ ID NO: 929130 - RNA, 19 nt, Artificial Sequence
  Description of Artificial Sequence: Synthetic oligonucleotide
  Sense strand starting at position 2665 of SEQ ID NO: 913461
gcugaaagcccuugcuaau

SEQ ID NO: 929131 - RNA, 19 nt, Artificial Sequence
  Description of Artificial Sequence: Synthetic oligonucleotide
  Antisense strand to SEQ ID NO: 929130
auuagcaagggcuuucagc

SEQ ID NO: 929132 - RNA, 19 nt, Artificial Sequence
  Description of Artificial Sequence: Synthetic oligonucleotide
  Sense strand starting at position 696 of SEQ ID NO: 913461
augugugucuacguauuaa

SEQ ID NO: 929133 - RNA, 19 nt, Artificial Sequence
  Description of Artificial Sequence: Synthetic oligonucleotide
  Antisense strand to SEQ ID NO: 929132
uuaauacguagacacacau

SEQ ID NO: 929134 - RNA, 19 nt, Artificial Sequence
  Description of Artificial Sequence: Synthetic oligonucleotide
  Sense strand starting at position 2680 of SEQ ID NO: 913461
uaaugucaguaauaaggau

SEQ ID NO: 929135 - RNA, 19 nt, Artificial Sequence
  Description of Artificial Sequence: Synthetic oligonucleotide
  Antisense strand to SEQ ID NO: 929134
auccuuauuacugacauua

SEQ ID NO: 929136 - RNA, 19 nt, Artificial Sequence
  Description of Artificial Sequence: Synthetic oligonucleotide
  Sense strand starting at position 3898 of SEQ ID NO: 913461
cugaaaguuugguauauug

SEQ ID NO: 929137 - RNA, 19 nt, Artificial Sequence
  Description of Artificial Sequence: Synthetic oligonucleotide
  Antisense strand to SEQ ID NO: 929136
caauauaccaaacuuucag

SEQ ID NO: 929138 - RNA, 19 nt, Artificial Sequence
  Description of Artificial Sequence: Synthetic oligonucleotide
  Sense strand starting at position 141 of SEQ ID NO: 913461
cucgaauacugauaguauu

SEQ ID NO: 929139 - RNA, 19 nt, Artificial Sequence
  Description of Artificial Sequence: Synthetic oligonucleotide
  Antisense strand to SEQ ID NO: 929138
aauacuaucaguauucgag

SEQ ID NO: 929140 - RNA, 19 nt, Artificial Sequence
  Description of Artificial Sequence: Synthetic oligonucleotide
  Sense strand starting at position 3386 of SEQ ID NO: 913461
aguggaaacuucuguaaug

SEQ ID NO: 929141 - RNA, 19 nt, Artificial Sequence
  Description of Artificial Sequence: Synthetic oligonucleotide
  Antisense strand to SEQ ID NO: 929140
cauuacagaaguuuccacu

SEQ ID NO: 929142 - RNA, 19 nt, Artificial Sequence
  Description of Artificial Sequence: Synthetic oligonucleotide
  Sense strand starting at position 138 of SEQ ID NO: 913461
ggacucgaauacugauagu

SEQ ID NO: 929143 - RNA, 19 nt, Artificial Sequence
  Description of Artificial Sequence: Synthetic oligonucleotide
  Antisense strand to SEQ ID NO: 929142
acuaucaguauucgagucc

SEQ ID NO: 929144 - RNA, 19 nt, Artificial Sequence
  Description of Artificial Sequence: Synthetic oligonucleotide
  Sense strand starting at position 575 of SEQ ID NO: 913461
gcacucauguuccaccuau

SEQ ID NO: 929145 - RNA, 19 nt, Artificial Sequence
  Description of Artificial Sequence: Synthetic oligonucleotide
  Antisense strand to SEQ ID NO: 929144
auagguggaacaugagugc

SEQ ID NO: 929146 - RNA, 19 nt, Artificial Sequence
  Description of Artificial Sequence: Synthetic oligonucleotide
  Sense strand starting at position 642 of SEQ ID NO: 913462
guagauauaggucaacuuu

SEQ ID NO: 929147 - RNA, 19 nt, Artificial Sequence
  Description of Artificial Sequence: Synthetic oligonucleotide
  Antisense strand to SEQ ID NO: 929146
aaaguugaccuauaucuac

SEQ ID NO: 929148 - RNA, 19 nt, Artificial Sequence
  Description of Artificial Sequence: Synthetic oligonucleotide
  Sense strand starting at position 8 of SEQ ID NO: 913462
aaugucuuugacuaaggca

SEQ ID NO: 929149 - RNA, 19 nt, Artificial Sequence
  Description of Artificial Sequence: Synthetic oligonucleotide
  Antisense strand to SEQ ID NO: 929148
ugccuuagucaaagacauu

SEQ ID NO: 929150 - RNA, 19 nt, Artificial Sequence
  Description of Artificial Sequence: Synthetic oligonucleotide
  Sense strand starting at position 340 of SEQ ID NO: 913462
cauauauccuggucagagg

SEQ ID NO: 929151 - RNA, 19 nt, Artificial Sequence
  Description of Artificial Sequence: Synthetic oligonucleotide
  Antisense strand to SEQ ID NO: 929150
ccucugaccaggauauaug

SEQ ID NO: 929152 - RNA, 19 nt, Artificial Sequence
  Description of Artificial Sequence: Synthetic oligonucleotide
  Sense strand starting at position 62 of SEQ ID NO: 913462
acacacaguguguaagauu

SEQ ID NO: 929153 - RNA, 19 nt, Artificial Sequence
  Description of Artificial Sequence: Synthetic oligonucleotide
  Antisense strand to SEQ ID NO: 929152
aaucuuacacacugugugu

SEQ ID NO: 929154 - RNA, 19 nt, Artificial Sequence
  Description of Artificial Sequence: Synthetic oligonucleotide
  Sense strand starting at position 791 of SEQ ID NO: 913462
ccucacuuugagggugaaa

SEQ ID NO: 929155 - RNA, 19 nt, Artificial Sequence
  Description of Artificial Sequence: Synthetic oligonucleotide
  Antisense strand to SEQ ID NO: 929154
uuucacccucaaagugagg

SEQ ID NO: 929156 - RNA, 19 nt, Artificial Sequence
  Description of Artificial Sequence: Synthetic oligonucleotide
  Sense strand starting at position 793 of SEQ ID NO: 913462
ucacuuugagggugaaacu

SEQ ID NO: 929157 - RNA, 19 nt, Artificial Sequence
  Description of Artificial Sequence: Synthetic oligonucleotide
  Antisense strand to SEQ ID NO: 929156
aguuucacccucaaaguga

SEQ ID NO: 929158 - RNA, 19 nt, Artificial Sequence
  Description of Artificial Sequence: Synthetic oligonucleotide
  Sense strand starting at position 3302 of SEQ ID NO: 913462
gucuuuacauaucuaagga

SEQ ID NO: 929159 - RNA, 19 nt, Artificial Sequence
  Description of Artificial Sequence: Synthetic oligonucleotide
  Antisense strand to SEQ ID NO: 929158
uccuuagauauguaaagac

SEQ ID NO: 929160 - RNA, 19 nt, Artificial Sequence
  Description of Artificial Sequence: Synthetic oligonucleotide
  Sense strand starting at position 486 of SEQ ID NO: 913462
uccugaaaggcuuauucuu

SEQ ID NO: 929161 - RNA, 19 nt, Artificial Sequence
  Description of Artificial Sequence: Synthetic oligonucleotide
  Antisense strand to SEQ ID NO: 929160
aagaauaagccuuucagga

SEQ ID NO: 929162 - RNA, 19 nt, Artificial Sequence
  Description of Artificial Sequence: Synthetic oligonucleotide
  Sense strand starting at position 412 of SEQ ID NO: 913462
agcguuaagacagacuacu

SEQ ID NO: 929163 - RNA, 19 nt, Artificial Sequence
  Description of Artificial Sequence: Synthetic oligonucleotide
  Antisense strand to SEQ ID NO: 929162
aguagucugucuuaacgcu

SEQ ID NO: 929164 - RNA, 19 nt, Artificial Sequence
  Description of Artificial Sequence: Synthetic oligonucleotide
  Sense strand starting at position 3961 of SEQ ID NO: 913462
uugccuuaaugaccauaga

SEQ ID NO: 929165 - RNA, 19 nt, Artificial Sequence
  Description of Artificial Sequence: Synthetic oligonucleotide
  Antisense strand to SEQ ID NO: 929164
ucuauggucauuaaggcaa

SEQ ID NO: 929166 - RNA, 19 nt, Artificial Sequence
  Description of Artificial Sequence: Synthetic oligonucleotide
  Sense strand starting at position 2109 of SEQ ID NO: 913462
guggacuggccagagugau

SEQ ID NO: 929167 - RNA, 19 nt, Artificial Sequence
  Description of Artificial Sequence: Synthetic oligonucleotide
  Antisense strand to SEQ ID NO: 929166
aucacucuggccaguccac

SEQ ID NO: 929168 - RNA, 19 nt, Artificial Sequence
  Description of Artificial Sequence: Synthetic oligonucleotide
  Sense strand starting at position 703 of SEQ ID NO: 913462
gaacacaaguugccagauu

SEQ ID NO: 929169 - RNA, 19 nt, Artificial Sequence
  Description of Artificial Sequence: Synthetic oligonucleotide
  Antisense strand to SEQ ID NO: 929168
aaucuggcaacuuguguuc

SEQ ID NO: 929170 - RNA, 19 nt, Artificial Sequence
  Description of Artificial Sequence: Synthetic oligonucleotide
  Sense strand starting at position 3593 of SEQ ID NO: 913462
aaugauaggugucuuuaua

SEQ ID NO: 929171 - RNA, 19 nt, Artificial Sequence
  Description of Artificial Sequence: Synthetic oligonucleotide
  Antisense strand to SEQ ID NO: 929170
uauaaagacaccuaucauu

SEQ ID NO: 929172 - RNA, 19 nt, Artificial Sequence
  Description of Artificial Sequence: Synthetic oligonucleotide
  Sense strand starting at position 3278 of SEQ ID NO: 913462
cuaacauacugugucauaa

SEQ ID NO: 929173 - RNA, 19 nt, Artificial Sequence
  Description of Artificial Sequence: Synthetic oligonucleotide
  Antisense strand to SEQ ID NO: 929172
uuaugacacaguauguuag

SEQ ID NO: 929174 - RNA, 19 nt, Artificial Sequence
  Description of Artificial Sequence: Synthetic oligonucleotide
  Sense strand starting at position 1088 of SEQ ID NO: 913462
guggauucggcguccgagu

SEQ ID NO: 929175 - RNA, 19 nt, Artificial Sequence
  Description of Artificial Sequence: Synthetic oligonucleotide
  Antisense strand to SEQ ID NO: 929174
acucggacgccgaauccac

SEQ ID NO: 929176 - RNA, 19 nt, Artificial Sequence
  Description of Artificial Sequence: Synthetic oligonucleotide
  Sense strand starting at position 488 of SEQ ID NO: 913462
cugaaaggcuuauucuuau

SEQ ID NO: 929177 - RNA, 19 nt, Artificial Sequence
  Description of Artificial Sequence: Synthetic oligonucleotide
  Antisense strand to SEQ ID NO: 929176
auaagaauaagccuuucag

SEQ ID NO: 929178 - RNA, 19 nt, Artificial Sequence
  Description of Artificial Sequence: Synthetic oligonucleotide
  Sense strand starting at position 3429 of SEQ ID NO: 913462
ucuaauugcagugaguuga

SEQ ID NO: 929179 - RNA, 19 nt, Artificial Sequence
  Description of Artificial Sequence: Synthetic oligonucleotide
  Antisense strand to SEQ ID NO: 929178
ucaacucacugcaauuaga

SEQ ID NO: 929180 - RNA, 19 nt, Artificial Sequence
  Description of Artificial Sequence: Synthetic oligonucleotide
  Sense strand starting at position 2243 of SEQ ID NO: 913462
gcagguuauaaacggauga

SEQ ID NO: 929181 - RNA, 19 nt, Artificial Sequence
  Description of Artificial Sequence: Synthetic oligonucleotide
  Antisense strand to SEQ ID NO: 929180
ucauccguuuauaaccugc

SEQ ID NO: 929182 - RNA, 19 nt, Artificial Sequence
  Description of Artificial Sequence: Synthetic oligonucleotide
  Sense strand starting at position 3953 of SEQ ID NO: 913462
guagaauauugccuuaaug

SEQ ID NO: 929183 - RNA, 19 nt, Artificial Sequence
  Description of Artificial Sequence: Synthetic oligonucleotide
  Antisense strand to SEQ ID NO: 929182
cauuaaggcaauauucuac

SEQ ID NO: 929184 - RNA, 19 nt, Artificial Sequence
  Description of Artificial Sequence: Synthetic oligonucleotide
  Sense strand starting at position 639 of SEQ ID NO: 913462
gguguagauauaggucaac

SEQ ID NO: 929185 - RNA, 19 nt, Artificial Sequence
  Description of Artificial Sequence: Synthetic oligonucleotide
  Antisense strand to SEQ ID NO: 929184
guugaccuauaucuacacc

SEQ ID NO: 929186 - RNA, 19 nt, Artificial Sequence
  Description of Artificial Sequence: Synthetic oligonucleotide
  Sense strand starting at position 229 of SEQ ID NO: 913462
ggcugugauggucacaauc

SEQ ID NO: 929187 - RNA, 19 nt, Artificial Sequence
  Description of Artificial Sequence: Synthetic oligonucleotide
  Antisense strand to SEQ ID NO: 929186
gauugugaccaucacagcc

SEQ ID NO: 929188 - RNA, 19 nt, Artificial Sequence
  Description of Artificial Sequence: Synthetic oligonucleotide
  Sense strand starting at position 497 of SEQ ID NO: 913462
uuauucuuaugaguguaag

SEQ ID NO: 929189 - RNA, 19 nt, Artificial Sequence
  Description of Artificial Sequence: Synthetic oligonucleotide
  Antisense strand to SEQ ID NO: 929188
cuuacacucauaagaauaa

SEQ ID NO: 929190 - RNA, 19 nt, Artificial Sequence
  Description of Artificial Sequence: Synthetic oligonucleotide
  Sense strand starting at position 3097 of SEQ ID NO: 913462
agaauuacauguguggcaa

SEQ ID NO: 929191 - RNA, 19 nt, Artificial Sequence
  Description of Artificial Sequence: Synthetic oligonucleotide
  Antisense strand to SEQ ID NO: 929190
uugccacacauguaauucu

SEQ ID NO: 929192 - RNA, 19 nt, Artificial Sequence
  Description of Artificial Sequence: Synthetic oligonucleotide
  Sense strand starting at position 861 of SEQ ID NO: 913462
aguugugauagggaucgca

SEQ ID NO: 929193 - RNA, 19 nt, Artificial Sequence
  Description of Artificial Sequence: Synthetic oligonucleotide
  Antisense strand to SEQ ID NO: 929192
ugcgaucccuaucacaacu

SEQ ID NO: 929194 - RNA, 19 nt, Artificial Sequence
  Description of Artificial Sequence: Synthetic oligonucleotide
  Sense strand starting at position 3098 of SEQ ID NO: 913462
gaauuacauguguggcaaa

SEQ ID NO: 929195 - RNA, 19 nt, Artificial Sequence
  Description of Artificial Sequence: Synthetic oligonucleotide
  Antisense strand to SEQ ID NO: 929194
uuugccacacauguaauuc

SEQ ID NO: 929196 - RNA, 19 nt, Artificial Sequence
  Description of Artificial Sequence: Synthetic oligonucleotide
  Sense strand starting at position 3059 of SEQ ID NO: 913462
aauuaagugguaugcugaa

SEQ ID NO: 929197 - RNA, 19 nt, Artificial Sequence
  Description of Artificial Sequence: Synthetic oligonucleotide
  Antisense strand to SEQ ID NO: 929196
uucagcauaccacuuaauu

SEQ ID NO: 929198 - RNA, 19 nt, Artificial Sequence
  Description of Artificial Sequence: Synthetic oligonucleotide
  Sense strand starting at position 405 of SEQ ID NO: 913462
gcaauugagcguuaagaca

SEQ ID NO: 929199 - RNA, 19 nt, Artificial Sequence
  Description of Artificial Sequence: Synthetic oligonucleotide
  Antisense strand to SEQ ID NO: 929198
ugucuuaacgcucaauugc

SEQ ID NO: 929200 - RNA, 19 nt, Artificial Sequence
  Description of Artificial Sequence: Synthetic oligonucleotide
  Sense strand starting at position 3952 of SEQ ID NO: 913462
uguagaauauugccuuaau

SEQ ID NO: 929201 - RNA, 19 nt, Artificial Sequence
  Description of Artificial Sequence: Synthetic oligonucleotide
  Antisense strand to SEQ ID NO: 929200
auuaaggcaauauucuaca

SEQ ID NO: 929202 - RNA, 19 nt, Artificial Sequence
  Description of Artificial Sequence: Synthetic oligonucleotide
  Sense strand starting at position 3277 of SEQ ID NO: 913462
ucuaacauacugugucaua

SEQ ID NO: 929203 - RNA, 19 nt, Artificial Sequence
  Description of Artificial Sequence: Synthetic oligonucleotide
  Antisense strand to SEQ ID NO: 929202
uaugacacaguauguuaga

SEQ ID NO: 929204 - RNA, 19 nt, Artificial Sequence
  Description of Artificial Sequence: Synthetic oligonucleotide
  Sense strand starting at position 916 of SEQ ID NO: 913462
cucucuaggccagguaaua

SEQ ID NO: 929205 - RNA, 19 nt, Artificial Sequence
  Description of Artificial Sequence: Synthetic oligonucleotide
  Antisense strand to SEQ ID NO: 929204
uauuaccuggccuagagag

SEQ ID NO: 929206 - RNA, 19 nt, Artificial Sequence
  Description of Artificial Sequence: Synthetic oligonucleotide
  Sense strand starting at position 3195 of SEQ ID NO: 913462
gugagugcgaugggauaaa

SEQ ID NO: 929207 - RNA, 19 nt, Artificial Sequence
  Description of Artificial Sequence: Synthetic oligonucleotide
  Antisense strand to SEQ ID NO: 929206
uuuaucccaucgcacucac

SEQ ID NO: 929208 - RNA, 19 nt, Artificial Sequence
  Description of Artificial Sequence: Synthetic oligonucleotide
  Sense strand starting at position 2028 of SEQ ID NO: 913462
cgcguucgcaaucugguua

SEQ ID NO: 929209 - RNA, 19 nt, Artificial Sequence
  Description of Artificial Sequence: Synthetic oligonucleotide
  Antisense strand to SEQ ID NO: 929208
uaaccagauugcgaacgcg

SEQ ID NO: 929210 - RNA, 19 nt, Artificial Sequence
  Description of Artificial Sequence: Synthetic oligonucleotide
  Sense strand starting at position 204 of SEQ ID NO: 913462
aguuaauaauaggagagaa

SEQ ID NO: 929211 - RNA, 19 nt, Artificial Sequence
  Description of Artificial Sequence: Synthetic oligonucleotide
  Antisense strand to SEQ ID NO: 929210
uucucuccuauuauuaacu

SEQ ID NO: 929212 - RNA, 19 nt, Artificial Sequence
  Description of Artificial Sequence: Synthetic oligonucleotide
  Sense strand starting at position 3433 of SEQ ID NO: 913462
auugcagugaguugaauac

SEQ ID NO: 929213 - RNA, 19 nt, Artificial Sequence
  Description of Artificial Sequence: Synthetic oligonucleotide
  Antisense strand to SEQ ID NO: 929212
guauucaacucacugcaau

SEQ ID NO: 929214 - RNA, 19 nt, Artificial Sequence
  Description of Artificial Sequence: Synthetic oligonucleotide
  Sense strand starting at position 3194 of SEQ ID NO: 913462
ggugagugcgaugggauaa

SEQ ID NO: 929215 - RNA, 19 nt, Artificial Sequence
  Description of Artificial Sequence: Synthetic oligonucleotide
  Antisense strand to SEQ ID NO: 929214
uuaucccaucgcacucacc

SEQ ID NO: 929216 - RNA, 19 nt, Artificial Sequence
  Description of Artificial Sequence: Synthetic oligonucleotide
  Sense strand starting at position 3332 of SEQ ID NO: 913462
gcgacuauauggccacaaa

SEQ ID NO: 929217 - RNA, 19 nt, Artificial Sequence
  Description of Artificial Sequence: Synthetic oligonucleotide
  Antisense strand to SEQ ID NO: 929216
uuuguggccauauagucgc

SEQ ID NO: 929218 - RNA, 19 nt, Artificial Sequence
  Description of Artificial Sequence: Synthetic oligonucleotide
  Sense strand starting at position 852 of SEQ ID NO: 913462
gagacugccaguugugaua

SEQ ID NO: 929219 - RNA, 19 nt, Artificial Sequence
  Description of Artificial Sequence: Synthetic oligonucleotide
  Antisense strand to SEQ ID NO: 929218
uaucacaacuggcagucuc

SEQ ID NO: 929220 - RNA, 19 nt, Artificial Sequence
  Description of Artificial Sequence: Synthetic oligonucleotide
  Sense strand starting at position 3193 of SEQ ID NO: 913462
gggugagugcgaugggaua

SEQ ID NO: 929221 - RNA, 19 nt, Artificial Sequence
  Description of Artificial Sequence: Synthetic oligonucleotide
  Antisense strand to SEQ ID NO: 929220
uaucccaucgcacucaccc

SEQ ID NO: 929222 - RNA, 19 nt, Artificial Sequence
  Description of Artificial Sequence: Synthetic oligonucleotide
  Sense strand starting at position 503 of SEQ ID NO: 913462
uuaugaguguaagcucuga

SEQ ID NO: 929223 - RNA, 19 nt, Artificial Sequence
  Description of Artificial Sequence: Synthetic oligonucleotide
  Antisense strand to SEQ ID NO: 929222
ucagagcuuacacucauaa

SEQ ID NO: 929224 - RNA, 19 nt, Artificial Sequence
  Description of Artificial Sequence: Synthetic oligonucleotide
  Sense strand starting at position 79 of SEQ ID NO: 913462
uuccgacuaucugcaucaa

SEQ ID NO: 929225 - RNA, 19 nt, Artificial Sequence
  Description of Artificial Sequence: Synthetic oligonucleotide
  Antisense strand to SEQ ID NO: 929224
uugaugcagauagucggaa

SEQ ID NO: 929226 - RNA, 19 nt, Artificial Sequence
  Description of Artificial Sequence: Synthetic oligonucleotide
  Sense strand starting at position 3874 of SEQ ID NO: 913463
auucuaagcgcaguguuau

SEQ ID NO: 929227 - RNA, 19 nt, Artificial Sequence
  Description of Artificial Sequence: Synthetic oligonucleotide
  Antisense strand to SEQ ID NO: 929226
auaacacugcgcuuagaau

SEQ ID NO: 929228 - RNA, 19 nt, Artificial Sequence
  Description of Artificial Sequence: Synthetic oligonucleotide
  Sense strand starting at position 3229 of SEQ ID NO: 913463
cuuacaauccuaugggaca

SEQ ID NO: 929229 - RNA, 19 nt, Artificial Sequence
  Description of Artificial Sequence: Synthetic oligonucleotide
  Antisense strand to SEQ ID NO: 929228
ugucccauaggauuguaag

SEQ ID NO: 929230 - RNA, 19 nt, Artificial Sequence
  Description of Artificial Sequence: Synthetic oligonucleotide
  Sense strand starting at position 1743 of SEQ ID NO: 913463
agucgaaggccgaguacau

SEQ ID NO: 929231 - RNA, 19 nt, Artificial Sequence
  Description of Artificial Sequence: Synthetic oligonucleotide
  Antisense strand to SEQ ID NO: 929230
auguacucggccuucgacu

SEQ ID NO: 929232 - RNA, 19 nt, Artificial Sequence
  Description of Artificial Sequence: Synthetic oligonucleotide
  Sense strand starting at position 455 of SEQ ID NO: 913463
ggaugcuuagagcaugaca

SEQ ID NO: 929233 - RNA, 19 nt, Artificial Sequence
  Description of Artificial Sequence: Synthetic oligonucleotide
  Antisense strand to SEQ ID NO: 929232
ugucaugcucuaagcaucc

SEQ ID NO: 929234 - RNA, 19 nt, Artificial Sequence
  Description of Artificial Sequence: Synthetic oligonucleotide
  Sense strand starting at position 3289 of SEQ ID NO: 913463
uggagagguuaaguuauca

SEQ ID NO: 929235 - RNA, 19 nt, Artificial Sequence
  Description of Artificial Sequence: Synthetic oligonucleotide
  Antisense strand to SEQ ID NO: 929234
ugauaacuuaaccucucca

SEQ ID NO: 929236 - RNA, 19 nt, Artificial Sequence
  Description of Artificial Sequence: Synthetic oligonucleotide
  Sense strand starting at position 1007 of SEQ ID NO: 913463
agcuuccaagcucagaaau

SEQ ID NO: 929237 - RNA, 19 nt, Artificial Sequence
  Description of Artificial Sequence: Synthetic oligonucleotide
  Antisense strand to SEQ ID NO: 929236
auuucugagcuuggaagcu

SEQ ID NO: 929238 - RNA, 19 nt, Artificial Sequence
  Description of Artificial Sequence: Synthetic oligonucleotide
  Sense strand starting at position 3420 of SEQ ID NO: 913463
uucucuucugggcaaauca

SEQ ID NO: 929239 - RNA, 19 nt, Artificial Sequence
  Description of Artificial Sequence: Synthetic oligonucleotide
  Antisense strand to SEQ ID NO: 929238
ugauuugcccagaagagaa

SEQ ID NO: 929240 - RNA, 19 nt, Artificial Sequence
  Description of Artificial Sequence: Synthetic oligonucleotide
  Sense strand starting at position 3299 of SEQ ID NO: 913463
aaguuaucagcugagaguu

SEQ ID NO: 929241 - RNA, 19 nt, Artificial Sequence
  Description of Artificial Sequence: Synthetic oligonucleotide
  Antisense strand to SEQ ID NO: 929240
aacucucagcugauaacuu

SEQ ID NO: 929242 - RNA, 19 nt, Artificial Sequence
  Description of Artificial Sequence: Synthetic oligonucleotide
  Sense strand starting at position 2018 of SEQ ID NO: 913463
gaggaaucuuuagucaggu

SEQ ID NO: 929243 - RNA, 19 nt, Artificial Sequence
  Description of Artificial Sequence: Synthetic oligonucleotide
  Antisense strand to SEQ ID NO: 929242
accugacuaaagauuccuc

SEQ ID NO: 929244 - RNA, 19 nt, Artificial Sequence
  Description of Artificial Sequence: Synthetic oligonucleotide
  Sense strand starting at position 2557 of SEQ ID NO: 913463
ggacuugaauuugauaagu

SEQ ID NO: 929245 - RNA, 19 nt, Artificial Sequence
  Description of Artificial Sequence: Synthetic oligonucleotide
  Antisense strand to SEQ ID NO: 929244
acuuaucaaauucaagucc

SEQ ID NO: 929246 - RNA, 19 nt, Artificial Sequence
  Description of Artificial Sequence: Synthetic oligonucleotide
  Sense strand starting at position 2559 of SEQ ID NO: 913463
acuugaauuugauaaguug

SEQ ID NO: 929247 - RNA, 19 nt, Artificial Sequence
  Description of Artificial Sequence: Synthetic oligonucleotide
  Antisense strand to SEQ ID NO: 929246
caacuuaucaaauucaagu

SEQ ID NO: 929248 - RNA, 19 nt, Artificial Sequence
  Description of Artificial Sequence: Synthetic oligonucleotide
  Sense strand starting at position 2354 of SEQ ID NO: 913463
uccuccaugcuguaucaga

SEQ ID NO: 929249 - RNA, 19 nt, Artificial Sequence
  Description of Artificial Sequence: Synthetic oligonucleotide
  Antisense strand to SEQ ID NO: 929248
ucugauacagcauggagga

SEQ ID NO: 929250 - RNA, 19 nt, Artificial Sequence
  Description of Artificial Sequence: Synthetic oligonucleotide
  Sense strand starting at position 2516 of SEQ ID NO: 913463
ggacguggcguagaaugaa

SEQ ID NO: 929251 - RNA, 19 nt, Artificial Sequence
  Description of Artificial Sequence: Synthetic oligonucleotide
  Antisense strand to SEQ ID NO: 929250
uucauucuacgccacgucc

SEQ ID NO: 929252 - RNA, 19 nt, Artificial Sequence
  Description of Artificial Sequence: Synthetic oligonucleotide
  Sense strand starting at position 457 of SEQ ID NO: 913463
augcuuagagcaugacauu

SEQ ID NO: 929253 - RNA, 19 nt, Artificial Sequence
  Description of Artificial Sequence: Synthetic oligonucleotide
  Antisense strand to SEQ ID NO: 929252
aaugucaugcucuaagcau

SEQ ID NO: 929254 - RNA, 19 nt, Artificial Sequence
  Description of Artificial Sequence: Synthetic oligonucleotide
  Sense strand starting at position 3218 of SEQ ID NO: 913463
uguguaaucuucuuacaau

SEQ ID NO: 929255 - RNA, 19 nt, Artificial Sequence
  Description of Artificial Sequence: Synthetic oligonucleotide
  Antisense strand to SEQ ID NO: 929254
auuguaagaagauuacaca

SEQ ID NO: 929256 - RNA, 19 nt, Artificial Sequence
  Description of Artificial Sequence: Synthetic oligonucleotide
  Sense strand starting at position 3469 of SEQ ID NO: 913463
gcuggagugucaccaauag

SEQ ID NO: 929257 - RNA, 19 nt, Artificial Sequence
  Description of Artificial Sequence: Synthetic oligonucleotide
  Antisense strand to SEQ ID NO: 929256
cuauuggugacacuccagc

SEQ ID NO: 929258 - RNA, 19 nt, Artificial Sequence
  Description of Artificial Sequence: Synthetic oligonucleotide
  Sense strand starting at position 2009 of SEQ ID NO: 913463
ugucgcuuugaggaaucuu

SEQ ID NO: 929259 - RNA, 19 nt, Artificial Sequence
  Description of Artificial Sequence: Synthetic oligonucleotide
  Antisense strand to SEQ ID NO: 929258
aagauuccucaaagcgaca

SEQ ID NO: 929260 - RNA, 19 nt, Artificial Sequence
  Description of Artificial Sequence: Synthetic oligonucleotide
  Sense strand starting at position 1842 of SEQ ID NO: 913463
uccggaacuuguccaucau

SEQ ID NO: 929261 - RNA, 19 nt, Artificial Sequence
  Description of Artificial Sequence: Synthetic oligonucleotide
  Antisense strand to SEQ ID NO: 929260
augauggacaaguuccgga

SEQ ID NO: 929262 - RNA, 19 nt, Artificial Sequence
  Description of Artificial Sequence: Synthetic oligonucleotide
  Sense strand starting at position 3418 of SEQ ID NO: 913463
cuuucucuucugggcaaau

SEQ ID NO: 929263 - RNA, 19 nt, Artificial Sequence
  Description of Artificial Sequence: Synthetic oligonucleotide
  Antisense strand to SEQ ID NO: 929262
auuugcccagaagagaaag

SEQ ID NO: 929264 - RNA, 19 nt, Artificial Sequence
  Description of Artificial Sequence: Synthetic oligonucleotide
  Sense strand starting at position 3768 of SEQ ID NO: 913463
cuggaauucugucuuguau

SEQ ID NO: 929265 - RNA, 19 nt, Artificial Sequence
  Description of Artificial Sequence: Synthetic oligonucleotide
  Antisense strand to SEQ ID NO: 929264
auacaagacagaauuccag

SEQ ID NO: 929266 - RNA, 19 nt, Artificial Sequence
  Description of Artificial Sequence: Synthetic oligonucleotide
  Sense strand starting at position 3499 of SEQ ID NO: 913463
gaaggauguugcuccucuu

SEQ ID NO: 929267 - RNA, 19 nt, Artificial Sequence
  Description of Artificial Sequence: Synthetic oligonucleotide
  Antisense strand to SEQ ID NO: 929266
aagaggagcaacauccuuc

SEQ ID NO: 929268 - RNA, 19 nt, Artificial Sequence
  Description of Artificial Sequence: Synthetic oligonucleotide
  Sense strand starting at position 444 of SEQ ID NO: 913463
gaguucagucgggaugcuu

SEQ ID NO: 929269 - RNA, 19 nt, Artificial Sequence
  Description of Artificial Sequence: Synthetic oligonucleotide
  Antisense strand to SEQ ID NO: 929268
aagcaucccgacugaacuc

SEQ ID NO: 929270 - RNA, 19 nt, Artificial Sequence
  Description of Artificial Sequence: Synthetic oligonucleotide
  Sense strand starting at position 326 of SEQ ID NO: 913463
uuaugaugugguggcuuaa

SEQ ID NO: 929271 - RNA, 19 nt, Artificial Sequence
  Description of Artificial Sequence: Synthetic oligonucleotide
  Antisense strand to SEQ ID NO: 929270
uuaagccaccacaucauaa

SEQ ID NO: 929272 - RNA, 19 nt, Artificial Sequence
  Description of Artificial Sequence: Synthetic oligonucleotide
  Sense strand starting at position 1488 of SEQ ID NO: 913463
agcauuugccgucgaguag

SEQ ID NO: 929273 - RNA, 19 nt, Artificial Sequence
  Description of Artificial Sequence: Synthetic oligonucleotide
  Antisense strand to SEQ ID NO: 929272
cuacucgacggcaaaugcu

SEQ ID NO: 929274 - RNA, 19 nt, Artificial Sequence
  Description of Artificial Sequence: Synthetic oligonucleotide
  Sense strand starting at position 3102 of SEQ ID NO: 913463
gugugaccacguuagugau

SEQ ID NO: 929275 - RNA, 19 nt, Artificial Sequence
  Description of Artificial Sequence: Synthetic oligonucleotide
  Antisense strand to SEQ ID NO: 929274
aucacuaacguggucacac

SEQ ID NO: 929276 - RNA, 19 nt, Artificial Sequence
  Description of Artificial Sequence: Synthetic oligonucleotide
  Sense strand starting at position 3118 of SEQ ID NO: 913463
gaucuuugugucugagggu

SEQ ID NO: 929277 - RNA, 19 nt, Artificial Sequence
  Description of Artificial Sequence: Synthetic oligonucleotide
  Antisense strand to SEQ ID NO: 929276
acccucagacacaaagauc

SEQ ID NO: 929278 - RNA, 19 nt, Artificial Sequence
  Description of Artificial Sequence: Synthetic oligonucleotide
  Sense strand starting at position 3794 of SEQ ID NO: 913463
acagcucccuguuuguaga

SEQ ID NO: 929279 - RNA, 19 nt, Artificial Sequence
  Description of Artificial Sequence: Synthetic oligonucleotide
  Antisense strand to SEQ ID NO: 929278
ucuacaaacagggagcugu

SEQ ID NO: 929280 - RNA, 19 nt, Artificial Sequence
  Description of Artificial Sequence: Synthetic oligonucleotide
  Sense strand starting at position 3796 of SEQ ID NO: 913463
agcucccuguuuguagaua

SEQ ID NO: 929281 - RNA, 19 nt, Artificial Sequence
  Description of Artificial Sequence: Synthetic oligonucleotide
  Antisense strand to SEQ ID NO: 929280
uaucuacaaacagggagcu

SEQ ID NO: 929282 - RNA, 19 nt, Artificial Sequence
  Description of Artificial Sequence: Synthetic oligonucleotide
  Sense strand starting at position 2787 of SEQ ID NO: 913463
ggguuucaugccuggaguu

SEQ ID NO: 929283 - RNA, 19 nt, Artificial Sequence
  Description of Artificial Sequence: Synthetic oligonucleotide
  Antisense strand to SEQ ID NO: 929282
aacuccaggcaugaaaccc

SEQ ID NO: 929284 - RNA, 19 nt, Artificial Sequence
  Description of Artificial Sequence: Synthetic oligonucleotide
  Sense strand starting at position 2788 of SEQ ID NO: 913463
gguuucaugccuggaguuu

SEQ ID NO: 929285 - RNA, 19 nt, Artificial Sequence
  Description of Artificial Sequence: Synthetic oligonucleotide
  Antisense strand to SEQ ID NO: 929284
aaacuccaggcaugaaacc

SEQ ID NO: 929286 - RNA, 19 nt, Artificial Sequence
  Description of Artificial Sequence: Synthetic oligonucleotide
  Sense strand starting at position 3555 of SEQ ID NO: 913463
gcugguagccuccggaaga

SEQ ID NO: 929287 - RNA, 19 nt, Artificial Sequence
  Description of Artificial Sequence: Synthetic oligonucleotide
  Antisense strand to SEQ ID NO: 929286
ucuuccggaggcuaccagc

SEQ ID NO: 929288 - RNA, 19 nt, Artificial Sequence
  Description of Artificial Sequence: Synthetic oligonucleotide
  Sense strand starting at position 3462 of SEQ ID NO: 913463
uggagaugcuggaguguca

SEQ ID NO: 929289 - RNA, 19 nt, Artificial Sequence
  Description of Artificial Sequence: Synthetic oligonucleotide
  Antisense strand to SEQ ID NO: 929288
ugacacuccagcaucucca

SEQ ID NO: 929290 - RNA, 19 nt, Artificial Sequence
  Description of Artificial Sequence: Synthetic oligonucleotide
  Sense strand starting at position 913 of SEQ ID NO: 913463
ggcauuugcuagggaaaug

SEQ ID NO: 929291 - RNA, 19 nt, Artificial Sequence
  Description of Artificial Sequence: Synthetic oligonucleotide
  Antisense strand to SEQ ID NO: 929290
cauuucccuagcaaaugcc

SEQ ID NO: 929292 - RNA, 19 nt, Artificial Sequence
  Description of Artificial Sequence: Synthetic oligonucleotide
  Sense strand starting at position 2349 of SEQ ID NO: 913463
gggucuccuccaugcugua

SEQ ID NO: 929293 - RNA, 19 nt, Artificial Sequence
  Description of Artificial Sequence: Synthetic oligonucleotide
  Antisense strand to SEQ ID NO: 929292
uacagcauggaggagaccc

SEQ ID NO: 929294 - RNA, 19 nt, Artificial Sequence
  Description of Artificial Sequence: Synthetic oligonucleotide
  Sense strand starting at position 3206 of SEQ ID NO: 913463
acaugcauugccuguguaa

SEQ ID NO: 929295 - RNA, 19 nt, Artificial Sequence
  Description of Artificial Sequence: Synthetic oligonucleotide
  Antisense strand to SEQ ID NO: 929294
uuacacaggcaaugcaugu

SEQ ID NO: 929296 - RNA, 19 nt, Artificial Sequence
  Description of Artificial Sequence: Synthetic oligonucleotide
  Sense strand starting at position 3227 of SEQ ID NO: 913463
uucuuacaauccuauggga

SEQ ID NO: 929297 - RNA, 19 nt, Artificial Sequence
  Description of Artificial Sequence: Synthetic oligonucleotide
  Antisense strand to SEQ ID NO: 929296
ucccauaggauuguaagaa

SEQ ID NO: 929298 - RNA, 19 nt, Artificial Sequence
  Description of Artificial Sequence: Synthetic oligonucleotide
  Sense strand starting at position 3108 of SEQ ID NO: 913463
ccacguuagugaucuuugu

SEQ ID NO: 929299 - RNA, 19 nt, Artificial Sequence
  Description of Artificial Sequence: Synthetic oligonucleotide
  Antisense strand to SEQ ID NO: 929298
acaaagaucacuaacgugg

SEQ ID NO: 929300 - RNA, 19 nt, Artificial Sequence
  Description of Artificial Sequence: Synthetic oligonucleotide
  Sense strand starting at position 3112 of SEQ ID NO: 913463
guuagugaucuuugugucu

SEQ ID NO: 929301 - RNA, 19 nt, Artificial Sequence
  Description of Artificial Sequence: Synthetic oligonucleotide
  Antisense strand to SEQ ID NO: 929300
agacacaaagaucacuaac

SEQ ID NO: 929302 - RNA, 19 nt, Artificial Sequence
  Description of Artificial Sequence: Synthetic oligonucleotide
  Sense strand starting at position 3208 of SEQ ID NO: 913463
augcauugccuguguaauc

SEQ ID NO: 929303 - RNA, 19 nt, Artificial Sequence
  Description of Artificial Sequence: Synthetic oligonucleotide
  Antisense strand to SEQ ID NO: 929302
gauuacacaggcaaugcau

SEQ ID NO: 929304 - RNA, 19 nt, Artificial Sequence
  Description of Artificial Sequence: Synthetic oligonucleotide
  Sense strand starting at position 2658 of SEQ ID NO: 913463
guguuugugggcuguggau

SEQ ID NO: 929305 - RNA, 19 nt, Artificial Sequence
  Description of Artificial Sequence: Synthetic oligonucleotide
  Antisense strand to SEQ ID NO: 929304
auccacagcccacaaacac

SEQ ID NO: 929306 - RNA, 19 nt, Artificial Sequence
  Description of Artificial Sequence: Synthetic oligonucleotide
  Sense strand starting at position 3698 of SEQ ID NO: 913464
gaaggaaguccuuagguuc

SEQ ID NO: 929307 - RNA, 19 nt, Artificial Sequence
  Description of Artificial Sequence: Synthetic oligonucleotide
  Antisense strand to SEQ ID NO: 929306
gaaccuaaggacuuccuuc

SEQ ID NO: 929308 - RNA, 19 nt, Artificial Sequence
  Description of Artificial Sequence: Synthetic oligonucleotide
  Sense strand starting at position 2689 of SEQ ID NO: 913464
cuagaugacccuuagcaug

SEQ ID NO: 929309 - RNA, 19 nt, Artificial Sequence
  Description of Artificial Sequence: Synthetic oligonucleotide
  Antisense strand to SEQ ID NO: 929308
caugcuaagggucaucuag

SEQ ID NO: 929310 - RNA, 19 nt, Artificial Sequence
  Description of Artificial Sequence: Synthetic oligonucleotide
  Sense strand starting at position 2805 of SEQ ID NO: 913464
ugaccauauguacgaagga

SEQ ID NO: 929311 - RNA, 19 nt, Artificial Sequence
  Description of Artificial Sequence: Synthetic oligonucleotide
  Antisense strand to SEQ ID NO: 929310
uccuucguacauaugguca

SEQ ID NO: 929312 - RNA, 19 nt, Artificial Sequence
  Description of Artificial Sequence: Synthetic oligonucleotide
  Sense strand starting at position 272 of SEQ ID NO: 913464
ggaguucgcaaggacauua

SEQ ID NO: 929313 - RNA, 19 nt, Artificial Sequence
  Description of Artificial Sequence: Synthetic oligonucleotide
  Antisense strand to SEQ ID NO: 929312
uaauguccuugcgaacucc

SEQ ID NO: 929314 - RNA, 19 nt, Artificial Sequence
  Description of Artificial Sequence: Synthetic oligonucleotide
  Sense strand starting at position 620 of SEQ ID NO: 913464
aguggauaagggugauucu

SEQ ID NO: 929315 - RNA, 19 nt, Artificial Sequence
  Description of Artificial Sequence: Synthetic oligonucleotide
  Antisense strand to SEQ ID NO: 929314
agaaucacccuuauccacu

SEQ ID NO: 929316 - RNA, 19 nt, Artificial Sequence
  Description of Artificial Sequence: Synthetic oligonucleotide
  Sense strand starting at position 828 of SEQ ID NO: 913464
agcucauccggagauuauu

SEQ ID NO: 929317 - RNA, 19 nt, Artificial Sequence
  Description of Artificial Sequence: Synthetic oligonucleotide
  Antisense strand to SEQ ID NO: 929316
aauaaucuccggaugagcu

SEQ ID NO: 929318 - RNA, 19 nt, Artificial Sequence
  Description of Artificial Sequence: Synthetic oligonucleotide
  Sense strand starting at position 826 of SEQ ID NO: 913464
ccagcucauccggagauua

SEQ ID NO: 929319 - RNA, 19 nt, Artificial Sequence
  Description of Artificial Sequence: Synthetic oligonucleotide
  Antisense strand to SEQ ID NO: 929318
uaaucuccggaugagcugg

SEQ ID NO: 929320 - RNA, 19 nt, Artificial Sequence
  Description of Artificial Sequence: Synthetic oligonucleotide
  Sense strand starting at position 2387 of SEQ ID NO: 913464
cucagaguuguccauugac

SEQ ID NO: 929321 - RNA, 19 nt, Artificial Sequence
  Description of Artificial Sequence: Synthetic oligonucleotide
  Antisense strand to SEQ ID NO: 929320
gucaauggacaacucugag

SEQ ID NO: 929322 - RNA, 19 nt, Artificial Sequence
  Description of Artificial Sequence: Synthetic oligonucleotide
  Sense strand starting at position 2579 of SEQ ID NO: 913464
ggaagcccuguguaauaau

SEQ ID NO: 929323 - RNA, 19 nt, Artificial Sequence
  Description of Artificial Sequence: Synthetic oligonucleotide
  Antisense strand to SEQ ID NO: 929322
auuauuacacagggcuucc

SEQ ID NO: 929324 - RNA, 19 nt, Artificial Sequence
  Description of Artificial Sequence: Synthetic oligonucleotide
  Sense strand starting at position 3701 of SEQ ID NO: 913464
ggaaguccuuagguucaga

SEQ ID NO: 929325 - RNA, 19 nt, Artificial Sequence
  Description of Artificial Sequence: Synthetic oligonucleotide
  Antisense strand to SEQ ID NO: 929324
ucugaaccuaaggacuucc

SEQ ID NO: 929326 - RNA, 19 nt, Artificial Sequence
  Description of Artificial Sequence: Synthetic oligonucleotide
  Sense strand starting at position 343 of SEQ ID NO: 913464
ucagauuccucaucaguga

SEQ ID NO: 929327 - RNA, 19 nt, Artificial Sequence
  Description of Artificial Sequence: Synthetic oligonucleotide
  Antisense strand to SEQ ID NO: 929326
ucacugaugaggaaucuga

SEQ ID NO: 929328 - RNA, 19 nt, Artificial Sequence
  Description of Artificial Sequence: Synthetic oligonucleotide
  Sense strand starting at position 623 of SEQ ID NO: 913464
ggauaagggugauucugca

SEQ ID NO: 929329 - RNA, 19 nt, Artificial Sequence
  Description of Artificial Sequence: Synthetic oligonucleotide
  Antisense strand to SEQ ID NO: 929328
ugcagaaucacccuuaucc

SEQ ID NO: 929330 - RNA, 19 nt, Artificial Sequence
  Description of Artificial Sequence: Synthetic oligonucleotide
  Sense strand starting at position 277 of SEQ ID NO: 913464
ucgcaaggacauuaucuuu

SEQ ID NO: 929331 - RNA, 19 nt, Artificial Sequence
  Description of Artificial Sequence: Synthetic oligonucleotide
  Antisense strand to SEQ ID NO: 929330
aaagauaauguccuugcga

SEQ ID NO: 929332 - RNA, 19 nt, Artificial Sequence
  Description of Artificial Sequence: Synthetic oligonucleotide
  Sense strand starting at position 627 of SEQ ID NO: 913464
aagggugauucugcacuaa

SEQ ID NO: 929333 - RNA, 19 nt, Artificial Sequence
  Description of Artificial Sequence: Synthetic oligonucleotide
  Antisense strand to SEQ ID NO: 929332
uuagugcagaaucacccuu

SEQ ID NO: 929334 - RNA, 19 nt, Artificial Sequence
  Description of Artificial Sequence: Synthetic oligonucleotide
  Sense strand starting at position 631 of SEQ ID NO: 913464
gugauucugcacuaaguga

SEQ ID NO: 929335 - RNA, 19 nt, Artificial Sequence
  Description of Artificial Sequence: Synthetic oligonucleotide
  Antisense strand to SEQ ID NO: 929334
ucacuuagugcagaaucac

SEQ ID NO: 929336 - RNA, 19 nt, Artificial Sequence
  Description of Artificial Sequence: Synthetic oligonucleotide
  Sense strand starting at position 2145 of SEQ ID NO: 913464
ggccaugcuccacaccaau

SEQ ID NO: 929337 - RNA, 19 nt, Artificial Sequence
  Description of Artificial Sequence: Synthetic oligonucleotide
  Antisense strand to SEQ ID NO: 929336
auugguguggagcauggcc

SEQ ID NO: 929338 - RNA, 19 nt, Artificial Sequence
  Description of Artificial Sequence: Synthetic oligonucleotide
  Sense strand starting at position 448 of SEQ ID NO: 913464
cgugaaacucuccaucucu

SEQ ID NO: 929339 - RNA, 19 nt, Artificial Sequence
  Description of Artificial Sequence: Synthetic oligonucleotide
  Antisense strand to SEQ ID NO: 929338
agagauggagaguuucacg

SEQ ID NO: 929340 - RNA, 19 nt, Artificial Sequence
  Description of Artificial Sequence: Synthetic oligonucleotide
  Sense strand starting at position 2538 of SEQ ID NO: 913464
ccaacuggugggugaaagu

SEQ ID NO: 929341 - RNA, 19 nt, Artificial Sequence
  Description of Artificial Sequence: Synthetic oligonucleotide
  Antisense strand to SEQ ID NO: 929340
acuuucacccaccaguugg

SEQ ID NO: 929342 - RNA, 19 nt, Artificial Sequence
  Description of Artificial Sequence: Synthetic oligonucleotide
  Sense strand starting at position 2577 of SEQ ID NO: 913464
aaggaagcccuguguaaua

SEQ ID NO: 929343 - RNA, 19 nt, Artificial Sequence
  Description of Artificial Sequence: Synthetic oligonucleotide
  Antisense strand to SEQ ID NO: 929342
uauuacacagggcuuccuu

SEQ ID NO: 929344 - RNA, 19 nt, Artificial Sequence
  Description of Artificial Sequence: Synthetic oligonucleotide
  Sense strand starting at position 3810 of SEQ ID NO: 913464
gggccucauccucauugua

SEQ ID NO: 929345 - RNA, 19 nt, Artificial Sequence
  Description of Artificial Sequence: Synthetic oligonucleotide
  Antisense strand to SEQ ID NO: 929344
uacaaugaggaugaggccc

SEQ ID NO: 929346 - RNA, 19 nt, Artificial Sequence
  Description of Artificial Sequence: Synthetic oligonucleotide
  Sense strand starting at position 3154 of SEQ ID NO: 913464
ccaagcaggucuucuaaua

SEQ ID NO: 929347 - RNA, 19 nt, Artificial Sequence
  Description of Artificial Sequence: Synthetic oligonucleotide
  Antisense strand to SEQ ID NO: 929346
uauuagaagaccugcuugg

SEQ ID NO: 929348 - RNA, 19 nt, Artificial Sequence
  Description of Artificial Sequence: Synthetic oligonucleotide
  Sense strand starting at position 340 of SEQ ID NO: 913464
gccucagauuccucaucag

SEQ ID NO: 929349 - RNA, 19 nt, Artificial Sequence
  Description of Artificial Sequence: Synthetic oligonucleotide
  Antisense strand to SEQ ID NO: 929348
cugaugaggaaucugaggc

SEQ ID NO: 929350 - RNA, 19 nt, Artificial Sequence
  Description of Artificial Sequence: Synthetic oligonucleotide
  Sense strand starting at position 499 of SEQ ID NO: 913464
uucuccugccugcaaagau

SEQ ID NO: 929351 - RNA, 19 nt, Artificial Sequence
  Description of Artificial Sequence: Synthetic oligonucleotide
  Antisense strand to SEQ ID NO: 929350
aucuuugcaggcaggagaa

SEQ ID NO: 929352 - RNA, 19 nt, Artificial Sequence
  Description of Artificial Sequence: Synthetic oligonucleotide
  Sense strand starting at position 3656 of SEQ ID NO: 913464
cgaguguuuguguugcugu

SEQ ID NO: 929353 - RNA, 19 nt, Artificial Sequence
  Description of Artificial Sequence: Synthetic oligonucleotide
  Antisense strand to SEQ ID NO: 929352
acagcaacacaaacacucg

SEQ ID NO: 929354 - RNA, 19 nt, Artificial Sequence
  Description of Artificial Sequence: Synthetic oligonucleotide
  Sense strand starting at position 260 of SEQ ID NO: 913464
gccagaaucccuggaguuc

SEQ ID NO: 929355 - RNA, 19 nt, Artificial Sequence
  Description of Artificial Sequence: Synthetic oligonucleotide
  Antisense strand to SEQ ID NO: 929354
gaacuccagggauucuggc

SEQ ID NO: 929356 - RNA, 19 nt, Artificial Sequence
  Description of Artificial Sequence: Synthetic oligonucleotide
  Sense strand starting at position 271 of SEQ ID NO: 913464
uggaguucgcaaggacauu

SEQ ID NO: 929357 - RNA, 19 nt, Artificial Sequence
  Description of Artificial Sequence: Synthetic oligonucleotide
  Antisense strand to SEQ ID NO: 929356
aauguccuugcgaacucca

SEQ ID NO: 929358 - RNA, 19 nt, Artificial Sequence
  Description of Artificial Sequence: Synthetic oligonucleotide
  Sense strand starting at position 3877 of SEQ ID NO: 913464
aggguuugugagugguaga

SEQ ID NO: 929359 - RNA, 19 nt, Artificial Sequence
  Description of Artificial Sequence: Synthetic oligonucleotide
  Antisense strand to SEQ ID NO: 929358
ucuaccacucacaaacccu

SEQ ID NO: 929360 - RNA, 19 nt, Artificial Sequence
  Description of Artificial Sequence: Synthetic oligonucleotide
  Sense strand starting at position 2802 of SEQ ID NO: 913464
gcuugaccauauguacgaa

SEQ ID NO: 929361 - RNA, 19 nt, Artificial Sequence
  Description of Artificial Sequence: Synthetic oligonucleotide
  Antisense strand to SEQ ID NO: 929360
uucguacauauggucaagc

SEQ ID NO: 929362 - RNA, 19 nt, Artificial Sequence
  Description of Artificial Sequence: Synthetic oligonucleotide
  Sense strand starting at position 1412 of SEQ ID NO: 913464
cuaauuagcucccugugga

SEQ ID NO: 929363 - RNA, 19 nt, Artificial Sequence
  Description of Artificial Sequence: Synthetic oligonucleotide
  Antisense strand to SEQ ID NO: 929362
uccacagggagcuaauuag

SEQ ID NO: 929364 - RNA, 19 nt, Artificial Sequence
  Description of Artificial Sequence: Synthetic oligonucleotide
  Sense strand starting at position 3878 of SEQ ID NO: 913464
ggguuugugagugguagag

SEQ ID NO: 929365 - RNA, 19 nt, Artificial Sequence
  Description of Artificial Sequence: Synthetic oligonucleotide
  Antisense strand to SEQ ID NO: 929364
cucuaccacucacaaaccc

SEQ ID NO: 929366 - RNA, 19 nt, Artificial Sequence
  Description of Artificial Sequence: Synthetic oligonucleotide
  Sense strand starting at position 2377 of SEQ ID NO: 913464
gcccuucucccucagaguu

SEQ ID NO: 929367 - RNA, 19 nt, Artificial Sequence
  Description of Artificial Sequence: Synthetic oligonucleotide
  Antisense strand to SEQ ID NO: 929366
aacucugagggagaagggc

SEQ ID NO: 929368 - RNA, 19 nt, Artificial Sequence
  Description of Artificial Sequence: Synthetic oligonucleotide
  Sense strand starting at position 191 of SEQ ID NO: 913464
ugaguguccggguggauaa

SEQ ID NO: 929369 - RNA, 19 nt, Artificial Sequence
  Description of Artificial Sequence: Synthetic oligonucleotide
  Antisense strand to SEQ ID NO: 929368
uuauccacccggacacuca

SEQ ID NO: 929370 - RNA, 19 nt, Artificial Sequence
  Description of Artificial Sequence: Synthetic oligonucleotide
  Sense strand starting at position 540 of SEQ ID NO: 913464
gauaaagugccuugcugag

SEQ ID NO: 929371 - RNA, 19 nt, Artificial Sequence
  Description of Artificial Sequence: Synthetic oligonucleotide
  Antisense strand to SEQ ID NO: 929370
cucagcaaggcacuuuauc

SEQ ID NO: 929372 - RNA, 19 nt, Artificial Sequence
  Description of Artificial Sequence: Synthetic oligonucleotide
  Sense strand starting at position 3924 of SEQ ID NO: 913464
ucuggaaucugagcugcuu

SEQ ID NO: 929373 - RNA, 19 nt, Artificial Sequence
  Description of Artificial Sequence: Synthetic oligonucleotide
  Antisense strand to SEQ ID NO: 929372
aagcagcucagauuccaga

SEQ ID NO: 929374 - RNA, 19 nt, Artificial Sequence
  Description of Artificial Sequence: Synthetic oligonucleotide
  Sense strand starting at position 3812 of SEQ ID NO: 913464
gccucauccucauuguaua

SEQ ID NO: 929375 - RNA, 19 nt, Artificial Sequence
  Description of Artificial Sequence: Synthetic oligonucleotide
  Antisense strand to SEQ ID NO: 929374
uauacaaugaggaugaggc

SEQ ID NO: 929376 - RNA, 19 nt, Artificial Sequence
  Description of Artificial Sequence: Synthetic oligonucleotide
  Sense strand starting at position 387 of SEQ ID NO: 913464
ugcucuuuccuagggaugu

SEQ ID NO: 929377 - RNA, 19 nt, Artificial Sequence
  Description of Artificial Sequence: Synthetic oligonucleotide
  Antisense strand to SEQ ID NO: 929376
acaucccuaggaaagagca

SEQ ID NO: 929378 - RNA, 19 nt, Artificial Sequence
  Description of Artificial Sequence: Synthetic oligonucleotide
  Sense strand starting at position 447 of SEQ ID NO: 913464
gcgugaaacucuccaucuc

SEQ ID NO: 929379 - RNA, 19 nt, Artificial Sequence
  Description of Artificial Sequence: Synthetic oligonucleotide
  Antisense strand to SEQ ID NO: 929378
gagauggagaguuucacgc

SEQ ID NO: 929380 - RNA, 19 nt, Artificial Sequence
  Description of Artificial Sequence: Synthetic oligonucleotide
  Sense strand starting at position 189 of SEQ ID NO: 913464
agugaguguccggguggau

SEQ ID NO: 929381 - RNA, 19 nt, Artificial Sequence
  Description of Artificial Sequence: Synthetic oligonucleotide
  Antisense strand to SEQ ID NO: 929380
auccacccggacacucacu

SEQ ID NO: 929382 - RNA, 19 nt, Artificial Sequence
  Description of Artificial Sequence: Synthetic oligonucleotide
  Sense strand starting at position 2806 of SEQ ID NO: 913464
gaccauauguacgaaggaa

SEQ ID NO: 929383 - RNA, 19 nt, Artificial Sequence
  Description of Artificial Sequence: Synthetic oligonucleotide
  Antisense strand to SEQ ID NO: 929382
uuccuucguacauaugguc

SEQ ID NO: 929384 - RNA, 19 nt, Artificial Sequence
  Description of Artificial Sequence: Synthetic oligonucleotide
  Sense strand starting at position 496 of SEQ ID NO: 913464
cgauucuccugccugcaaa

SEQ ID NO: 929385 - RNA, 19 nt, Artificial Sequence
  Description of Artificial Sequence: Synthetic oligonucleotide
  Antisense strand to SEQ ID NO: 929384
uuugcaggcaggagaaucg

SEQ ID NO: 929386 - RNA, 19 nt, Artificial Sequence
  Description of Artificial Sequence: Synthetic oligonucleotide
  Sense strand starting at position 3927 of SEQ ID NO: 913465
aagggauauuaucugucaa

SEQ ID NO: 929387 - RNA, 19 nt, Artificial Sequence
  Description of Artificial Sequence: Synthetic oligonucleotide
  Antisense strand to SEQ ID NO: 929386
uugacagauaauaucccuu

SEQ ID NO: 929388 - RNA, 19 nt, Artificial Sequence
  Description of Artificial Sequence: Synthetic oligonucleotide
  Sense strand starting at position 45 of SEQ ID NO: 913465
ggguauuggccacaggaca

SEQ ID NO: 929389 - RNA, 19 nt, Artificial Sequence
  Description of Artificial Sequence: Synthetic oligonucleotide
  Antisense strand to SEQ ID NO: 929388
uguccuguggccaauaccc

SEQ ID NO: 929390 - RNA, 19 nt, Artificial Sequence
  Description of Artificial Sequence: Synthetic oligonucleotide
  Sense strand starting at position 3929 of SEQ ID NO: 913465
gggauauuaucugucaaag

SEQ ID NO: 929391 - RNA, 19 nt, Artificial Sequence
  Description of Artificial Sequence: Synthetic oligonucleotide
  Antisense strand to SEQ ID NO: 929390
cuuugacagauaauauccc

SEQ ID NO: 929392 - RNA, 19 nt, Artificial Sequence
  Description of Artificial Sequence: Synthetic oligonucleotide
  Sense strand starting at position 2871 of SEQ ID NO: 913465
gacagaaaccugggucuua

SEQ ID NO: 929393 - RNA, 19 nt, Artificial Sequence
  Description of Artificial Sequence: Synthetic oligonucleotide
  Antisense strand to SEQ ID NO: 929392
uaagacccagguuucuguc

SEQ ID NO: 929394 - RNA, 19 nt, Artificial Sequence
  Description of Artificial Sequence: Synthetic oligonucleotide
  Sense strand starting at position 2822 of SEQ ID NO: 913465
cuugcaaauuucguaacca

SEQ ID NO: 929395 - RNA, 19 nt, Artificial Sequence
  Description of Artificial Sequence: Synthetic oligonucleotide
  Antisense strand to SEQ ID NO: 929394
ugguuacgaaauuugcaag

SEQ ID NO: 929396 - RNA, 19 nt, Artificial Sequence
  Description of Artificial Sequence: Synthetic oligonucleotide
  Sense strand starting at position 2224 of SEQ ID NO: 913465
ucuggguguggugaggaaa

SEQ ID NO: 929397 - RNA, 19 nt, Artificial Sequence
  Description of Artificial Sequence: Synthetic oligonucleotide
  Antisense strand to SEQ ID NO: 929396
uuuccucaccacacccaga

SEQ ID NO: 929398 - RNA, 19 nt, Artificial Sequence
  Description of Artificial Sequence: Synthetic oligonucleotide
  Sense strand starting at position 2723 of SEQ ID NO: 913465
gaugacagcccagauguuu

SEQ ID NO: 929399 - RNA, 19 nt, Artificial Sequence
  Description of Artificial Sequence: Synthetic oligonucleotide
  Antisense strand to SEQ ID NO: 929398
aaacaucugggcugucauc

SEQ ID NO: 929400 - RNA, 19 nt, Artificial Sequence
  Description of Artificial Sequence: Synthetic oligonucleotide
  Sense strand starting at position 1283 of SEQ ID NO: 913465
agaaauauguuuccagagu

SEQ ID NO: 929401 - RNA, 19 nt, Artificial Sequence
  Description of Artificial Sequence: Synthetic oligonucleotide
  Antisense strand to SEQ ID NO: 929400
acucuggaaacauauuucu

SEQ ID NO: 929402 - RNA, 19 nt, Artificial Sequence
  Description of Artificial Sequence: Synthetic oligonucleotide
  Sense strand starting at position 3209 of SEQ ID NO: 913465
uccauauuuguacguuacu

SEQ ID NO: 929403 - RNA, 19 nt, Artificial Sequence
  Description of Artificial Sequence: Synthetic oligonucleotide
  Antisense strand to SEQ ID NO: 929402
aguaacguacaaauaugga

SEQ ID NO: 929404 - RNA, 19 nt, Artificial Sequence
  Description of Artificial Sequence: Synthetic oligonucleotide
  Sense strand starting at position 2306 of SEQ ID NO: 913465
gucucacaggcauaguaaa

SEQ ID NO: 929405 - RNA, 19 nt, Artificial Sequence
  Description of Artificial Sequence: Synthetic oligonucleotide
  Antisense strand to SEQ ID NO: 929404
uuuacuaugccugugagac

SEQ ID NO: 929406 - RNA, 19 nt, Artificial Sequence
  Description of Artificial Sequence: Synthetic oligonucleotide
  Sense strand starting at position 144 of SEQ ID NO: 913465
agcugaauugcagggagau

SEQ ID NO: 929407 - RNA, 19 nt, Artificial Sequence
  Description of Artificial Sequence: Synthetic oligonucleotide
  Antisense strand to SEQ ID NO: 929406
aucucccugcaauucagcu

SEQ ID NO: 929408 - RNA, 19 nt, Artificial Sequence
  Description of Artificial Sequence: Synthetic oligonucleotide
  Sense strand starting at position 3667 of SEQ ID NO: 913465
ccacucuaaccuugagagu

SEQ ID NO: 929409 - RNA, 19 nt, Artificial Sequence
  Description of Artificial Sequence: Synthetic oligonucleotide
  Antisense strand to SEQ ID NO: 929408
acucucaagguuagagugg

SEQ ID NO: 929410 - RNA, 19 nt, Artificial Sequence
  Description of Artificial Sequence: Synthetic oligonucleotide
  Sense strand starting at position 2415 of SEQ ID NO: 913465
gcaccuauuccugaccgaa

SEQ ID NO: 929411 - RNA, 19 nt, Artificial Sequence
  Description of Artificial Sequence: Synthetic oligonucleotide
  Antisense strand to SEQ ID NO: 929410
uucggucaggaauaggugc

SEQ ID NO: 929412 - RNA, 19 nt, Artificial Sequence
  Description of Artificial Sequence: Synthetic oligonucleotide
  Sense strand starting at position 145 of SEQ ID NO: 913465
gcugaauugcagggagaug

SEQ ID NO: 929413 - RNA, 19 nt, Artificial Sequence
  Description of Artificial Sequence: Synthetic oligonucleotide
  Antisense strand to SEQ ID NO: 929412
caucucccugcaauucagc

SEQ ID NO: 929414 - RNA, 19 nt, Artificial Sequence
  Description of Artificial Sequence: Synthetic oligonucleotide
  Sense strand starting at position 2789 of SEQ ID NO: 913465
cccauauuguaagucagau

SEQ ID NO: 929415 - RNA, 19 nt, Artificial Sequence
  Description of Artificial Sequence: Synthetic oligonucleotide
  Antisense strand to SEQ ID NO: 929414
aucugacuuacaauauggg

SEQ ID NO: 929416 - RNA, 19 nt, Artificial Sequence
  Description of Artificial Sequence: Synthetic oligonucleotide
  Sense strand starting at position 2882 of SEQ ID NO: 913465
gggucuuacuuauuauuau

SEQ ID NO: 929417 - RNA, 19 nt, Artificial Sequence
  Description of Artificial Sequence: Synthetic oligonucleotide
  Antisense strand to SEQ ID NO: 929416
auaauaauaaguaagaccc

SEQ ID NO: 929418 - RNA, 19 nt, Artificial Sequence
  Description of Artificial Sequence: Synthetic oligonucleotide
  Sense strand starting at position 2781 of SEQ ID NO: 913465
ucacuuggcccauauugua

SEQ ID NO: 929419 - RNA, 19 nt, Artificial Sequence
  Description of Artificial Sequence: Synthetic oligonucleotide
  Antisense strand to SEQ ID NO: 929418
uacaauaugggccaaguga

SEQ ID NO: 929420 - RNA, 19 nt, Artificial Sequence
  Description of Artificial Sequence: Synthetic oligonucleotide
  Sense strand starting at position 2360 of SEQ ID NO: 913465
agcucagcccagggagauu

SEQ ID NO: 929421 - RNA, 19 nt, Artificial Sequence
  Description of Artificial Sequence: Synthetic oligonucleotide
  Antisense strand to SEQ ID NO: 929420
aaucucccugggcugagcu

SEQ ID NO: 929422 - RNA, 19 nt, Artificial Sequence
  Description of Artificial Sequence: Synthetic oligonucleotide
  Sense strand starting at position 284 of SEQ ID NO: 913465
cagugugagcuguaaauau

SEQ ID NO: 929423 - RNA, 19 nt, Artificial Sequence
  Description of Artificial Sequence: Synthetic oligonucleotide
  Antisense strand to SEQ ID NO: 929422
auauuuacagcucacacug

SEQ ID NO: 929424 - RNA, 19 nt, Artificial Sequence
  Description of Artificial Sequence: Synthetic oligonucleotide
  Sense strand starting at position 1218 of SEQ ID NO: 913465
ugggaauccugugucauuc

SEQ ID NO: 929425 - RNA, 19 nt, Artificial Sequence
  Description of Artificial Sequence: Synthetic oligonucleotide
  Antisense strand to SEQ ID NO: 929424
gaaugacacaggauuccca

SEQ ID NO: 929426 - RNA, 19 nt, Artificial Sequence
  Description of Artificial Sequence: Synthetic oligonucleotide
  Sense strand starting at position 2461 of SEQ ID NO: 913465
aggagucuucaacgauguu

SEQ ID NO: 929427 - RNA, 19 nt, Artificial Sequence
  Description of Artificial Sequence: Synthetic oligonucleotide
  Antisense strand to SEQ ID NO: 929426
aacaucguugaagacuccu

SEQ ID NO: 929428 - RNA, 19 nt, Artificial Sequence
  Description of Artificial Sequence: Synthetic oligonucleotide
  Sense strand starting at position 1217 of SEQ ID NO: 913465
uugggaauccugugucauu

SEQ ID NO: 929429 - RNA, 19 nt, Artificial Sequence
  Description of Artificial Sequence: Synthetic oligonucleotide
  Antisense strand to SEQ ID NO: 929428
aaugacacaggauucccaa

SEQ ID NO: 929430 - RNA, 19 nt, Artificial Sequence
  Description of Artificial Sequence: Synthetic oligonucleotide
  Sense strand starting at position 1198 of SEQ ID NO: 913465
ccuagaguggccuggguaa

SEQ ID NO: 929431 - RNA, 19 nt, Artificial Sequence
  Description of Artificial Sequence: Synthetic oligonucleotide
  Antisense strand to SEQ ID NO: 929430
uuacccaggccacucuagg

SEQ ID NO: 929432 - RNA, 19 nt, Artificial Sequence
  Description of Artificial Sequence: Synthetic oligonucleotide
  Sense strand starting at position 1200 of SEQ ID NO: 913465
uagaguggccuggguaauu

SEQ ID NO: 929433 - RNA, 19 nt, Artificial Sequence
  Description of Artificial Sequence: Synthetic oligonucleotide
  Antisense strand to SEQ ID NO: 929432
aauuacccaggccacucua

SEQ ID NO: 929434 - RNA, 19 nt, Artificial Sequence
  Description of Artificial Sequence: Synthetic oligonucleotide
  Sense strand starting at position 987 of SEQ ID NO: 913465
uucuauuucugcguggcua

SEQ ID NO: 929435 - RNA, 19 nt, Artificial Sequence
  Description of Artificial Sequence: Synthetic oligonucleotide
  Antisense strand to SEQ ID NO: 929434
uagccacgcagaaauagaa

SEQ ID NO: 929436 - RNA, 19 nt, Artificial Sequence
  Description of Artificial Sequence: Synthetic oligonucleotide
  Sense strand starting at position 2534 of SEQ ID NO: 913465
gcuaaacauugugcauuaa

SEQ ID NO: 929437 - RNA, 19 nt, Artificial Sequence
  Description of Artificial Sequence: Synthetic oligonucleotide
  Antisense strand to SEQ ID NO: 929436
uuaaugcacaauguuuagc

SEQ ID NO: 929438 - RNA, 19 nt, Artificial Sequence
  Description of Artificial Sequence: Synthetic oligonucleotide
  Sense strand starting at position 988 of SEQ ID NO: 913465
ucuauuucugcguggcuau

SEQ ID NO: 929439 - RNA, 19 nt, Artificial Sequence
  Description of Artificial Sequence: Synthetic oligonucleotide
  Antisense strand to SEQ ID NO: 929438
auagccacgcagaaauaga

SEQ ID NO: 929440 - RNA, 19 nt, Artificial Sequence
  Description of Artificial Sequence: Synthetic oligonucleotide
  Sense strand starting at position 1229 of SEQ ID NO: 913465
ugucauuccuauguuuaca

SEQ ID NO: 929441 - RNA, 19 nt, Artificial Sequence
  Description of Artificial Sequence: Synthetic oligonucleotide
  Antisense strand to SEQ ID NO: 929440
uguaaacauaggaaugaca

SEQ ID NO: 929442 - RNA, 19 nt, Artificial Sequence
  Description of Artificial Sequence: Synthetic oligonucleotide
  Sense strand starting at position 1049 of SEQ ID NO: 913465
cuguaucuuuaggucuuua

SEQ ID NO: 929443 - RNA, 19 nt, Artificial Sequence
  Description of Artificial Sequence: Synthetic oligonucleotide
  Antisense strand to SEQ ID NO: 929442
uaaagaccuaaagauacag

SEQ ID NO: 929444 - RNA, 19 nt, Artificial Sequence
  Description of Artificial Sequence: Synthetic oligonucleotide
  Sense strand starting at position 1507 of SEQ ID NO: 913465
ugaugaugccuggguccuu

SEQ ID NO: 929445 - RNA, 19 nt, Artificial Sequence
  Description of Artificial Sequence: Synthetic oligonucleotide
  Antisense strand to SEQ ID NO: 929444
aaggacccaggcaucauca

SEQ ID NO: 929446 - RNA, 19 nt, Artificial Sequence
  Description of Artificial Sequence: Synthetic oligonucleotide
  Sense strand starting at position 33 of SEQ ID NO: 913465
gugaccucgacuggguauu

SEQ ID NO: 929447 - RNA, 19 nt, Artificial Sequence
  Description of Artificial Sequence: Synthetic oligonucleotide
  Antisense strand to SEQ ID NO: 929446
aauacccagucgaggucac

SEQ ID NO: 929448 - RNA, 19 nt, Artificial Sequence
  Description of Artificial Sequence: Synthetic oligonucleotide
  Sense strand starting at position 206 of SEQ ID NO: 913465
ugcagauguuguuucugaa

SEQ ID NO: 929449 - RNA, 19 nt, Artificial Sequence
  Description of Artificial Sequence: Synthetic oligonucleotide
  Antisense strand to SEQ ID NO: 929448
uucagaaacaacaucugca

SEQ ID NO: 929450 - RNA, 19 nt, Artificial Sequence
  Description of Artificial Sequence: Synthetic oligonucleotide
  Sense strand starting at position 2254 of SEQ ID NO: 913465
gagccaagguaguauauuu

SEQ ID NO: 929451 - RNA, 19 nt, Artificial Sequence
  Description of Artificial Sequence: Synthetic oligonucleotide
  Antisense strand to SEQ ID NO: 929450
aaauauacuaccuuggcuc

SEQ ID NO: 929452 - RNA, 19 nt, Artificial Sequence
  Description of Artificial Sequence: Synthetic oligonucleotide
  Sense strand starting at position 2217 of SEQ ID NO: 913465
ggcaaauucuggguguggu

SEQ ID NO: 929453 - RNA, 19 nt, Artificial Sequence
  Description of Artificial Sequence: Synthetic oligonucleotide
  Antisense strand to SEQ ID NO: 929452
accacacccagaauuugcc

SEQ ID NO: 929454 - RNA, 19 nt, Artificial Sequence
  Description of Artificial Sequence: Synthetic oligonucleotide
  Sense strand starting at position 1318 of SEQ ID NO: 913465
cucucugugagccgauaau

SEQ ID NO: 929455 - RNA, 19 nt, Artificial Sequence
  Description of Artificial Sequence: Synthetic oligonucleotide
  Antisense strand to SEQ ID NO: 929454
auuaucggcucacagagag

SEQ ID NO: 929456 - RNA, 19 nt, Artificial Sequence
  Description of Artificial Sequence: Synthetic oligonucleotide
  Sense strand starting at position 2845 of SEQ ID NO: 913465
uguggucuguacuucugau

SEQ ID NO: 929457 - RNA, 19 nt, Artificial Sequence
  Description of Artificial Sequence: Synthetic oligonucleotide
  Antisense strand to SEQ ID NO: 929456
aucagaaguacagaccaca

SEQ ID NO: 929458 - RNA, 19 nt, Artificial Sequence
  Description of Artificial Sequence: Synthetic oligonucleotide
  Sense strand starting at position 282 of SEQ ID NO: 913465
cccagugugagcuguaaau

SEQ ID NO: 929459 - RNA, 19 nt, Artificial Sequence
  Description of Artificial Sequence: Synthetic oligonucleotide
  Antisense strand to SEQ ID NO: 929458
auuuacagcucacacuggg

SEQ ID NO: 929460 - RNA, 19 nt, Artificial Sequence
  Description of Artificial Sequence: Synthetic oligonucleotide
  Sense strand starting at position 1228 of SEQ ID NO: 913465
gugucauuccuauguuuac

SEQ ID NO: 929461 - RNA, 19 nt, Artificial Sequence
  Description of Artificial Sequence: Synthetic oligonucleotide
  Antisense strand to SEQ ID NO: 929460
guaaacauaggaaugacac

SEQ ID NO: 929462 - RNA, 19 nt, Artificial Sequence
  Description of Artificial Sequence: Synthetic oligonucleotide
  Sense strand starting at position 221 of SEQ ID NO: 913465
ugaauuggauuguacacaa

SEQ ID NO: 929463 - RNA, 19 nt, Artificial Sequence
  Description of Artificial Sequence: Synthetic oligonucleotide
  Antisense strand to SEQ ID NO: 929462
uuguguacaauccaauuca

SEQ ID NO: 929464 - RNA, 19 nt, Artificial Sequence
  Description of Artificial Sequence: Synthetic oligonucleotide
  Sense strand starting at position 3931 of SEQ ID NO: 913465
gauauuaucugucaaagag

SEQ ID NO: 929465 - RNA, 19 nt, Artificial Sequence
  Description of Artificial Sequence: Synthetic oligonucleotide
  Antisense strand to SEQ ID NO: 929464
cucuuugacagauaauauc

SEQ ID NO: 929466 - RNA, 19 nt, Artificial Sequence
  Description of Artificial Sequence: Synthetic oligonucleotide
  Sense strand starting at position 3813 of SEQ ID NO: 913466
gugugcuuugcuccuggga

SEQ ID NO: 929467 - RNA, 19 nt, Artificial Sequence
  Description of Artificial Sequence: Synthetic oligonucleotide
  Antisense strand to SEQ ID NO: 929466
ucccaggagcaaagcacac

SEQ ID NO: 929468 - RNA, 19 nt, Artificial Sequence
  Description of Artificial Sequence: Synthetic oligonucleotide
  Sense strand starting at position 2626 of SEQ ID NO: 913466
auaaaugcugauggacaua

SEQ ID NO: 929469 - RNA, 19 nt, Artificial Sequence
  Description of Artificial Sequence: Synthetic oligonucleotide
  Antisense strand to SEQ ID NO: 929468
uauguccaucagcauuuau

SEQ ID NO: 929470 - RNA, 19 nt, Artificial Sequence
  Description of Artificial Sequence: Synthetic oligonucleotide
  Sense strand starting at position 430 of SEQ ID NO: 913466
agcguauccauuugauuga

SEQ ID NO: 929471 - RNA, 19 nt, Artificial Sequence
  Description of Artificial Sequence: Synthetic oligonucleotide
  Antisense strand to SEQ ID NO: 929470
ucaaucaaauggauacgcu

SEQ ID NO: 929472 - RNA, 19 nt, Artificial Sequence
  Description of Artificial Sequence: Synthetic oligonucleotide
  Sense strand starting at position 3705 of SEQ ID NO: 913466
aguuuagauuuagagagaa

SEQ ID NO: 929473 - RNA, 19 nt, Artificial Sequence
  Description of Artificial Sequence: Synthetic oligonucleotide
  Antisense strand to SEQ ID NO: 929472
uucucucuaaaucuaaacu

SEQ ID NO: 929474 - RNA, 19 nt, Artificial Sequence
  Description of Artificial Sequence: Synthetic oligonucleotide
  Sense strand starting at position 2580 of SEQ ID NO: 913466
aggucaacugaucgaggaa

SEQ ID NO: 929475 - RNA, 19 nt, Artificial Sequence
  Description of Artificial Sequence: Synthetic oligonucleotide
  Antisense strand to SEQ ID NO: 929474
uuccucgaucaguugaccu

SEQ ID NO: 929476 - RNA, 19 nt, Artificial Sequence
  Description of Artificial Sequence: Synthetic oligonucleotide
  Sense strand starting at position 571 of SEQ ID NO: 913466
cccugaauuuaacaaggau

SEQ ID NO: 929477 - RNA, 19 nt, Artificial Sequence
  Description of Artificial Sequence: Synthetic oligonucleotide
  Antisense strand to SEQ ID NO: 929476
auccuuguuaaauucaggg

SEQ ID NO: 929478 - RNA, 19 nt, Artificial Sequence
  Description of Artificial Sequence: Synthetic oligonucleotide
  Sense strand starting at position 3176 of SEQ ID NO: 913466
aggagaagggcucggauau

SEQ ID NO: 929479 - RNA, 19 nt, Artificial Sequence
  Description of Artificial Sequence: Synthetic oligonucleotide
  Antisense strand to SEQ ID NO: 929478
auauccgagcccuucuccu

SEQ ID NO: 929480 - RNA, 19 nt, Artificial Sequence
  Description of Artificial Sequence: Synthetic oligonucleotide
  Sense strand starting at position 42 of SEQ ID NO: 913466
ggaggaaacacuggguguu

SEQ ID NO: 929481 - RNA, 19 nt, Artificial Sequence
  Description of Artificial Sequence: Synthetic oligonucleotide
  Antisense strand to SEQ ID NO: 929480
aacacccaguguuuccucc

SEQ ID NO: 929482 - RNA, 19 nt, Artificial Sequence
  Description of Artificial Sequence: Synthetic oligonucleotide
  Sense strand starting at position 3975 of SEQ ID NO: 913466
gggcuaauucugggacaug

SEQ ID NO: 929483 - RNA, 19 nt, Artificial Sequence
  Description of Artificial Sequence: Synthetic oligonucleotide
  Antisense strand to SEQ ID NO: 929482
caugucccagaauuagccc

SEQ ID NO: 929484 - RNA, 19 nt, Artificial Sequence
  Description of Artificial Sequence: Synthetic oligonucleotide
  Sense strand starting at position 3150 of SEQ ID NO: 913466
uggacuugccgaggagaga

SEQ ID NO: 929485 - RNA, 19 nt, Artificial Sequence
  Description of Artificial Sequence: Synthetic oligonucleotide
  Antisense strand to SEQ ID NO: 929484
ucucuccucggcaagucca

SEQ ID NO: 929486 - RNA, 19 nt, Artificial Sequence
  Description of Artificial Sequence: Synthetic oligonucleotide
  Sense strand starting at position 3177 of SEQ ID NO: 913466
ggagaagggcucggauauu

SEQ ID NO: 929487 - RNA, 19 nt, Artificial Sequence
  Description of Artificial Sequence: Synthetic oligonucleotide
  Antisense strand to SEQ ID NO: 929486
aauauccgagcccuucucc

SEQ ID NO: 929488 - RNA, 19 nt, Artificial Sequence
  Description of Artificial Sequence: Synthetic oligonucleotide
  Sense strand starting at position 2145 of SEQ ID NO: 913466
ugagcuuuggagcaaucca

SEQ ID NO: 929489 - RNA, 19 nt, Artificial Sequence
  Description of Artificial Sequence: Synthetic oligonucleotide
  Antisense strand to SEQ ID NO: 929488
uggauugcuccaaagcuca

SEQ ID NO: 929490 - RNA, 19 nt, Artificial Sequence
  Description of Artificial Sequence: Synthetic oligonucleotide
  Sense strand starting at position 3379 of SEQ ID NO: 913466
guugaagaaucccuccauc

SEQ ID NO: 929491 - RNA, 19 nt, Artificial Sequence
  Description of Artificial Sequence: Synthetic oligonucleotide
  Antisense strand to SEQ ID NO: 929490
gauggagggauucuucaac

SEQ ID NO: 929492 - RNA, 19 nt, Artificial Sequence
  Description of Artificial Sequence: Synthetic oligonucleotide
  Sense strand starting at position 2167 of SEQ ID NO: 913466
uggacuccuuccuccugaa

SEQ ID NO: 929493 - RNA, 19 nt, Artificial Sequence
  Description of Artificial Sequence: Synthetic oligonucleotide
  Antisense strand to SEQ ID NO: 929492
uucaggaggaaggagucca

SEQ ID NO: 929494 - RNA, 19 nt, Artificial Sequence
  Description of Artificial Sequence: Synthetic oligonucleotide
  Sense strand starting at position 236 of SEQ ID NO: 913466
gacuaacggcucugaauug

SEQ ID NO: 929495 - RNA, 19 nt, Artificial Sequence
  Description of Artificial Sequence: Synthetic oligonucleotide
  Antisense strand to SEQ ID NO: 929494
caauucagagccguuaguc

SEQ ID NO: 929496 - RNA, 19 nt, Artificial Sequence
  Description of Artificial Sequence: Synthetic oligonucleotide
  Sense strand starting at position 2849 of SEQ ID NO: 913466
aucauucucugguccacau

SEQ ID NO: 929497 - RNA, 19 nt, Artificial Sequence
  Description of Artificial Sequence: Synthetic oligonucleotide
  Antisense strand to SEQ ID NO: 929496
auguggaccagagaaugau

SEQ ID NO: 929498 - RNA, 19 nt, Artificial Sequence
  Description of Artificial Sequence: Synthetic oligonucleotide
  Sense strand starting at position 3803 of SEQ ID NO: 913466
aagaaagagugugugcuuu

SEQ ID NO: 929499 - RNA, 19 nt, Artificial Sequence
  Description of Artificial Sequence: Synthetic oligonucleotide
  Antisense strand to SEQ ID NO: 929498
aaagcacacacucuuucuu

SEQ ID NO: 929500 - RNA, 19 nt, Artificial Sequence
  Description of Artificial Sequence: Synthetic oligonucleotide
  Sense strand starting at position 2302 of SEQ ID NO: 913466
aaagaaacguccuugccuu

SEQ ID NO: 929501 - RNA, 19 nt, Artificial Sequence
  Description of Artificial Sequence: Synthetic oligonucleotide
  Antisense strand to SEQ ID NO: 929500
aaggcaaggacguuucuuu

SEQ ID NO: 929502 - RNA, 19 nt, Artificial Sequence
  Description of Artificial Sequence: Synthetic oligonucleotide
  Sense strand starting at position 3802 of SEQ ID NO: 913466
caagaaagagugugugcuu

SEQ ID NO: 929503 - RNA, 19 nt, Artificial Sequence
  Description of Artificial Sequence: Synthetic oligonucleotide
  Antisense strand to SEQ ID NO: 929502
aagcacacacucuuucuug

SEQ ID NO: 929504 - RNA, 19 nt, Artificial Sequence
  Description of Artificial Sequence: Synthetic oligonucleotide
  Sense strand starting at position 2539 of SEQ ID NO: 913466
cccaguccucgugagguua

SEQ ID NO: 929505 - RNA, 19 nt, Artificial Sequence
  Description of Artificial Sequence: Synthetic oligonucleotide
  Antisense strand to SEQ ID NO: 929504
uaaccucacgaggacuggg

SEQ ID NO: 929506 - RNA, 19 nt, Artificial Sequence
  Description of Artificial Sequence: Synthetic oligonucleotide
  Sense strand starting at position 2547 of SEQ ID NO: 913466
ucgugagguuaacuagcaa

SEQ ID NO: 929507 - RNA, 19 nt, Artificial Sequence
  Description of Artificial Sequence: Synthetic oligonucleotide
  Antisense strand to SEQ ID NO: 929506
uugcuaguuaaccucacga

SEQ ID NO: 929508 - RNA, 19 nt, Artificial Sequence
  Description of Artificial Sequence: Synthetic oligonucleotide
  Sense strand starting at position 3835 of SEQ ID NO: 913466
ccgcccuuccucgaauauu

SEQ ID NO: 929509 - RNA, 19 nt, Artificial Sequence
  Description of Artificial Sequence: Synthetic oligonucleotide
  Antisense strand to SEQ ID NO: 929508
aauauucgaggaagggcgg

SEQ ID NO: 929510 - RNA, 19 nt, Artificial Sequence
  Description of Artificial Sequence: Synthetic oligonucleotide
  Sense strand starting at position 2303 of SEQ ID NO: 913466
aagaaacguccuugccuuu

SEQ ID NO: 929511 - RNA, 19 nt, Artificial Sequence
  Description of Artificial Sequence: Synthetic oligonucleotide
  Antisense strand to SEQ ID NO: 929510
aaaggcaaggacguuucuu

SEQ ID NO: 929512 - RNA, 19 nt, Artificial Sequence
  Description of Artificial Sequence: Synthetic oligonucleotide
  Sense strand starting at position 549 of SEQ ID NO: 913466
ggagauuccugccucguuu

SEQ ID NO: 929513 - RNA, 19 nt, Artificial Sequence
  Description of Artificial Sequence: Synthetic oligonucleotide
  Antisense strand to SEQ ID NO: 929512
aaacgaggcaggaaucucc

SEQ ID NO: 929514 - RNA, 19 nt, Artificial Sequence
  Description of Artificial Sequence: Synthetic oligonucleotide
  Sense strand starting at position 2615 of SEQ ID NO: 913466
agggauuauugauaaaugc

SEQ ID NO: 929515 - RNA, 19 nt, Artificial Sequence
  Description of Artificial Sequence: Synthetic oligonucleotide
  Antisense strand to SEQ ID NO: 929514
gcauuuaucaauaaucccu

SEQ ID NO: 929516 - RNA, 19 nt, Artificial Sequence
  Description of Artificial Sequence: Synthetic oligonucleotide
  Sense strand starting at position 2252 of SEQ ID NO: 913466
gcccuuucuucccuugagu

SEQ ID NO: 929517 - RNA, 19 nt, Artificial Sequence
  Description of Artificial Sequence: Synthetic oligonucleotide
  Antisense strand to SEQ ID NO: 929516
acucaagggaagaaagggc

SEQ ID NO: 929518 - RNA, 19 nt, Artificial Sequence
  Description of Artificial Sequence: Synthetic oligonucleotide
  Sense strand starting at position 2551 of SEQ ID NO: 913466
gagguuaacuagcaagaca

SEQ ID NO: 929519 - RNA, 19 nt, Artificial Sequence
  Description of Artificial Sequence: Synthetic oligonucleotide
  Antisense strand to SEQ ID NO: 929518
ugucuugcuaguuaaccuc

SEQ ID NO: 929520 - RNA, 19 nt, Artificial Sequence
  Description of Artificial Sequence: Synthetic oligonucleotide
  Sense strand starting at position 3022 of SEQ ID NO: 913466
gcgcuucaccugugggaau

SEQ ID NO: 929521 - RNA, 19 nt, Artificial Sequence
  Description of Artificial Sequence: Synthetic oligonucleotide
  Antisense strand to SEQ ID NO: 929520
auucccacaggugaagcgc

SEQ ID NO: 929522 - RNA, 19 nt, Artificial Sequence
  Description of Artificial Sequence: Synthetic oligonucleotide
  Sense strand starting at position 2605 of SEQ ID NO: 913466
caaggugacuagggauuau

SEQ ID NO: 929523 - RNA, 19 nt, Artificial Sequence
  Description of Artificial Sequence: Synthetic oligonucleotide
  Antisense strand to SEQ ID NO: 929522
auaaucccuagucaccuug

SEQ ID NO: 929524 - RNA, 19 nt, Artificial Sequence
  Description of Artificial Sequence: Synthetic oligonucleotide
  Sense strand starting at position 2622 of SEQ ID NO: 913466
auugauaaaugcugaugga

SEQ ID NO: 929525 - RNA, 19 nt, Artificial Sequence
  Description of Artificial Sequence: Synthetic oligonucleotide
  Antisense strand to SEQ ID NO: 929524
uccaucagcauuuaucaau

SEQ ID NO: 929526 - RNA, 19 nt, Artificial Sequence
  Description of Artificial Sequence: Synthetic oligonucleotide
  Sense strand starting at position 2625 of SEQ ID NO: 913466
gauaaaugcugauggacau

SEQ ID NO: 929527 - RNA, 19 nt, Artificial Sequence
  Description of Artificial Sequence: Synthetic oligonucleotide
  Antisense strand to SEQ ID NO: 929526
auguccaucagcauuuauc

SEQ ID NO: 929528 - RNA, 19 nt, Artificial Sequence
  Description of Artificial Sequence: Synthetic oligonucleotide
  Sense strand starting at position 3243 of SEQ ID NO: 913466
gcaaguguguccuucuggu

SEQ ID NO: 929529 - RNA, 19 nt, Artificial Sequence
  Description of Artificial Sequence: Synthetic oligonucleotide
  Antisense strand to SEQ ID NO: 929528
accagaaggacacacuugc

SEQ ID NO: 929530 - RNA, 19 nt, Artificial Sequence
  Description of Artificial Sequence: Synthetic oligonucleotide
  Sense strand starting at position 247 of SEQ ID NO: 913466
cugaauugcucuuacacug

SEQ ID NO: 929531 - RNA, 19 nt, Artificial Sequence
  Description of Artificial Sequence: Synthetic oligonucleotide
  Antisense strand to SEQ ID NO: 929530
caguguaagagcaauucag

SEQ ID NO: 929532 - RNA, 19 nt, Artificial Sequence
  Description of Artificial Sequence: Synthetic oligonucleotide
  Sense strand starting at position 3843 of SEQ ID NO: 913466
ccucgaauauucuggagau

SEQ ID NO: 929533 - RNA, 19 nt, Artificial Sequence
  Description of Artificial Sequence: Synthetic oligonucleotide
  Antisense strand to SEQ ID NO: 929532
aucuccagaauauucgagg

SEQ ID NO: 929534 - RNA, 19 nt, Artificial Sequence
  Description of Artificial Sequence: Synthetic oligonucleotide
  Sense strand starting at position 3844 of SEQ ID NO: 913466
cucgaauauucuggagauc

SEQ ID NO: 929535 - RNA, 19 nt, Artificial Sequence
  Description of Artificial Sequence: Synthetic oligonucleotide
  Antisense strand to SEQ ID NO: 929534
gaucuccagaauauucgag

SEQ ID NO: 929536 - RNA, 19 nt, Artificial Sequence
  Description of Artificial Sequence: Synthetic oligonucleotide
  Sense strand starting at position 2142 of SEQ ID NO: 913466
gggugagcuuuggagcaau

SEQ ID NO: 929537 - RNA, 19 nt, Artificial Sequence
  Description of Artificial Sequence: Synthetic oligonucleotide
  Antisense strand to SEQ ID NO: 929536
auugcuccaaagcucaccc

SEQ ID NO: 929538 - RNA, 19 nt, Artificial Sequence
  Description of Artificial Sequence: Synthetic oligonucleotide
  Sense strand starting at position 2629 of SEQ ID NO: 913467
ugagaugguguuuaucaag

SEQ ID NO: 929539 - RNA, 19 nt, Artificial Sequence
  Description of Artificial Sequence: Synthetic oligonucleotide
  Antisense strand to SEQ ID NO: 929538
cuugauaaacaccaucuca

SEQ ID NO: 929540 - RNA, 19 nt, Artificial Sequence
  Description of Artificial Sequence: Synthetic oligonucleotide
  Sense strand starting at position 3774 of SEQ ID NO: 913467
caccucagugguggaauaa

SEQ ID NO: 929541 - RNA, 19 nt, Artificial Sequence
  Description of Artificial Sequence: Synthetic oligonucleotide
  Antisense strand to SEQ ID NO: 929540
uuauuccaccacugaggug

SEQ ID NO: 929542 - RNA, 19 nt, Artificial Sequence
  Description of Artificial Sequence: Synthetic oligonucleotide
  Sense strand starting at position 2628 of SEQ ID NO: 913467
cugagaugguguuuaucaa

SEQ ID NO: 929543 - RNA, 19 nt, Artificial Sequence
  Description of Artificial Sequence: Synthetic oligonucleotide
  Antisense strand to SEQ ID NO: 929542
uugauaaacaccaucucag

SEQ ID NO: 929544 - RNA, 19 nt, Artificial Sequence
  Description of Artificial Sequence: Synthetic oligonucleotide
  Sense strand starting at position 3109 of SEQ ID NO: 913467
ugaugugaucuacaguugu

SEQ ID NO: 929545 - RNA, 19 nt, Artificial Sequence
  Description of Artificial Sequence: Synthetic oligonucleotide
  Antisense strand to SEQ ID NO: 929544
acaacuguagaucacauca

SEQ ID NO: 929546 - RNA, 19 nt, Artificial Sequence
  Description of Artificial Sequence: Synthetic oligonucleotide
  Sense strand starting at position 3008 of SEQ ID NO: 913467
ucugaucuguucucuggaa

SEQ ID NO: 929547 - RNA, 19 nt, Artificial Sequence
  Description of Artificial Sequence: Synthetic oligonucleotide
  Antisense strand to SEQ ID NO: 929546
uuccagagaacagaucaga

SEQ ID NO: 929548 - RNA, 19 nt, Artificial Sequence
  Description of Artificial Sequence: Synthetic oligonucleotide
  Sense strand starting at position 2563 of SEQ ID NO: 913467
gggcucacugccuauaacu

SEQ ID NO: 929549 - RNA, 19 nt, Artificial Sequence
  Description of Artificial Sequence: Synthetic oligonucleotide
  Antisense strand to SEQ ID NO: 929548
aguuauaggcagugagccc

SEQ ID NO: 929550 - RNA, 19 nt, Artificial Sequence
  Description of Artificial Sequence: Synthetic oligonucleotide
  Sense strand starting at position 779 of SEQ ID NO: 913467
gacguacacguauauuauu

SEQ ID NO: 929551 - RNA, 19 nt, Artificial Sequence
  Description of Artificial Sequence: Synthetic oligonucleotide
  Antisense strand to SEQ ID NO: 929550
aauaauauacguguacguc

SEQ ID NO: 929552 - RNA, 19 nt, Artificial Sequence
  Description of Artificial Sequence: Synthetic oligonucleotide
  Sense strand starting at position 1709 of SEQ ID NO: 913467
agaugaguuuccuuagcug

SEQ ID NO: 929553 - RNA, 19 nt, Artificial Sequence
  Description of Artificial Sequence: Synthetic oligonucleotide
  Antisense strand to SEQ ID NO: 929552
cagcuaaggaaacucaucu

SEQ ID NO: 929554 - RNA, 19 nt, Artificial Sequence
  Description of Artificial Sequence: Synthetic oligonucleotide
  Sense strand starting at position 3723 of SEQ ID NO: 913467
gucccaguugucuaacuca

SEQ ID NO: 929555 - RNA, 19 nt, Artificial Sequence
  Description of Artificial Sequence: Synthetic oligonucleotide
  Antisense strand to SEQ ID NO: 929554
ugaguuagacaacugggac

SEQ ID NO: 929556 - RNA, 19 nt, Artificial Sequence
  Description of Artificial Sequence: Synthetic oligonucleotide
  Sense strand starting at position 2915 of SEQ ID NO: 913467
gguggcugccaucaaacuu

SEQ ID NO: 929557 - RNA, 19 nt, Artificial Sequence
  Description of Artificial Sequence: Synthetic oligonucleotide
  Antisense strand to SEQ ID NO: 929556
aaguuugauggcagccacc

SEQ ID NO: 929558 - RNA, 19 nt, Artificial Sequence
  Description of Artificial Sequence: Synthetic oligonucleotide
  Sense strand starting at position 3863 of SEQ ID NO: 913467
cgugguucuggccaggaga

SEQ ID NO: 929559 - RNA, 19 nt, Artificial Sequence
  Description of Artificial Sequence: Synthetic oligonucleotide
  Antisense strand to SEQ ID NO: 929558
ucuccuggccagaaccacg

SEQ ID NO: 929560 - RNA, 19 nt, Artificial Sequence
  Description of Artificial Sequence: Synthetic oligonucleotide
  Sense strand starting at position 2509 of SEQ ID NO: 913467
gcacaacuguggguaucau

SEQ ID NO: 929561 - RNA, 19 nt, Artificial Sequence
  Description of Artificial Sequence: Synthetic oligonucleotide
  Antisense strand to SEQ ID NO: 929560
augauacccacaguugugc

SEQ ID NO: 929562 - RNA, 19 nt, Artificial Sequence
  Description of Artificial Sequence: Synthetic oligonucleotide
  Sense strand starting at position 2817 of SEQ ID NO: 913467
acaguuacagcuggaguuu

SEQ ID NO: 929563 - RNA, 19 nt, Artificial Sequence
  Description of Artificial Sequence: Synthetic oligonucleotide
  Antisense strand to SEQ ID NO: 929562
aaacuccagcuguaacugu

SEQ ID NO: 929564 - RNA, 19 nt, Artificial Sequence
  Description of Artificial Sequence: Synthetic oligonucleotide
  Sense strand starting at position 3039 of SEQ ID NO: 913467
ggccacuugccuugaccaa

SEQ ID NO: 929565 - RNA, 19 nt, Artificial Sequence
  Description of Artificial Sequence: Synthetic oligonucleotide
  Antisense strand to SEQ ID NO: 929564
uuggucaaggcaaguggcc

SEQ ID NO: 929566 - RNA, 19 nt, Artificial Sequence
  Description of Artificial Sequence: Synthetic oligonucleotide
  Sense strand starting at position 1694 of SEQ ID NO: 913467
cgcugucaaccucggagau

SEQ ID NO: 929567 - RNA, 19 nt, Artificial Sequence
  Description of Artificial Sequence: Synthetic oligonucleotide
  Antisense strand to SEQ ID NO: 929566
aucuccgagguugacagcg

SEQ ID NO: 929568 - RNA, 19 nt, Artificial Sequence
  Description of Artificial Sequence: Synthetic oligonucleotide
  Sense strand starting at position 1980 of SEQ ID NO: 913467
gcgucugucccagacaguu

SEQ ID NO: 929569 - RNA, 19 nt, Artificial Sequence
  Description of Artificial Sequence: Synthetic oligonucleotide
  Antisense strand to SEQ ID NO: 929568
aacugucugggacagacgc

SEQ ID NO: 929570 - RNA, 19 nt, Artificial Sequence
  Description of Artificial Sequence: Synthetic oligonucleotide
  Sense strand starting at position 2649 of SEQ ID NO: 913467
gaacaugugacgugcaguu

SEQ ID NO: 929571 - RNA, 19 nt, Artificial Sequence
  Description of Artificial Sequence: Synthetic oligonucleotide
  Antisense strand to SEQ ID NO: 929570
aacugcacgucacauguuc

SEQ ID NO: 929572 - RNA, 19 nt, Artificial Sequence
  Description of Artificial Sequence: Synthetic oligonucleotide
  Sense strand starting at position 3721 of SEQ ID NO: 913467
gugucccaguugucuaacu

SEQ ID NO: 929573 - RNA, 19 nt, Artificial Sequence
  Description of Artificial Sequence: Synthetic oligonucleotide
  Antisense strand to SEQ ID NO: 929572
aguuagacaacugggacac

SEQ ID NO: 929574 - RNA, 19 nt, Artificial Sequence
  Description of Artificial Sequence: Synthetic oligonucleotide
  Sense strand starting at position 3253 of SEQ ID NO: 913467
ugggaaaguuuauacauuc

SEQ ID NO: 929575 - RNA, 19 nt, Artificial Sequence
  Description of Artificial Sequence: Synthetic oligonucleotide
  Antisense strand to SEQ ID NO: 929574
gaauguauaaacuuuccca

SEQ ID NO: 929576 - RNA, 19 nt, Artificial Sequence
  Description of Artificial Sequence: Synthetic oligonucleotide
  Sense strand starting at position 1803 of SEQ ID NO: 913467
cgugucaaccgcggagaaa

SEQ ID NO: 929577 - RNA, 19 nt, Artificial Sequence
  Description of Artificial Sequence: Synthetic oligonucleotide
  Antisense strand to SEQ ID NO: 929576
uuucuccgcgguugacacg

SEQ ID NO: 929578 - RNA, 19 nt, Artificial Sequence
  Description of Artificial Sequence: Synthetic oligonucleotide
  Sense strand starting at position 2513 of SEQ ID NO: 913467
aacuguggguaucaugaga

SEQ ID NO: 929579 - RNA, 19 nt, Artificial Sequence
  Description of Artificial Sequence: Synthetic oligonucleotide
  Antisense strand to SEQ ID NO: 929578
ucucaugauacccacaguu

SEQ ID NO: 929580 - RNA, 19 nt, Artificial Sequence
  Description of Artificial Sequence: Synthetic oligonucleotide
  Sense strand starting at position 2524 of SEQ ID NO: 913467
ucaugagauucccaggcca

SEQ ID NO: 929581 - RNA, 19 nt, Artificial Sequence
  Description of Artificial Sequence: Synthetic oligonucleotide
  Antisense strand to SEQ ID NO: 929580
uggccugggaaucucauga

SEQ ID NO: 929582 - RNA, 19 nt, Artificial Sequence
  Description of Artificial Sequence: Synthetic oligonucleotide
  Sense strand starting at position 1696 of SEQ ID NO: 913467
cugucaaccucggagauga

SEQ ID NO: 929583 - RNA, 19 nt, Artificial Sequence
  Description of Artificial Sequence: Synthetic oligonucleotide
  Antisense strand to SEQ ID NO: 929582
ucaucuccgagguugacag

SEQ ID NO: 929584 - RNA, 19 nt, Artificial Sequence
  Description of Artificial Sequence: Synthetic oligonucleotide
  Sense strand starting at position 1792 of SEQ ID NO: 913467
ccguuuccauccgugucaa

SEQ ID NO: 929585 - RNA, 19 nt, Artificial Sequence
  Description of Artificial Sequence: Synthetic oligonucleotide
  Antisense strand to SEQ ID NO: 929584
uugacacggauggaaacgg

SEQ ID NO: 929586 - RNA, 19 nt, Artificial Sequence
  Description of Artificial Sequence: Synthetic oligonucleotide
  Sense strand starting at position 2403 of SEQ ID NO: 913467
aguguuugguguuuccgua

SEQ ID NO: 929587 - RNA, 19 nt, Artificial Sequence
  Description of Artificial Sequence: Synthetic oligonucleotide
  Antisense strand to SEQ ID NO: 929586
uacggaaacaccaaacacu

SEQ ID NO: 929588 - RNA, 19 nt, Artificial Sequence
  Description of Artificial Sequence: Synthetic oligonucleotide
  Sense strand starting at position 2632 of SEQ ID NO: 913467
gaugguguuuaucaaguga

SEQ ID NO: 929589 - RNA, 19 nt, Artificial Sequence
  Description of Artificial Sequence: Synthetic oligonucleotide
  Antisense strand to SEQ ID NO: 929588
ucacuugauaaacaccauc

SEQ ID NO: 929590 - RNA, 19 nt, Artificial Sequence
  Description of Artificial Sequence: Synthetic oligonucleotide
  Sense strand starting at position 2912 of SEQ ID NO: 913467
acagguggcugccaucaaa

SEQ ID NO: 929591 - RNA, 19 nt, Artificial Sequence
  Description of Artificial Sequence: Synthetic oligonucleotide
  Antisense strand to SEQ ID NO: 929590
uuugauggcagccaccugu

SEQ ID NO: 929592 - RNA, 19 nt, Artificial Sequence
  Description of Artificial Sequence: Synthetic oligonucleotide
  Sense strand starting at position 1448 of SEQ ID NO: 913467
ucgcgaacuccucguaguu

SEQ ID NO: 929593 - RNA, 19 nt, Artificial Sequence
  Description of Artificial Sequence: Synthetic oligonucleotide
  Antisense strand to SEQ ID NO: 929592
aacuacgaggaguucgcga

SEQ ID NO: 929594 - RNA, 19 nt, Artificial Sequence
  Description of Artificial Sequence: Synthetic oligonucleotide
  Sense strand starting at position 3773 of SEQ ID NO: 913467
ucaccucagugguggaaua

SEQ ID NO: 929595 - RNA, 19 nt, Artificial Sequence
  Description of Artificial Sequence: Synthetic oligonucleotide
  Antisense strand to SEQ ID NO: 929594
uauuccaccacugagguga

SEQ ID NO: 929596 - RNA, 19 nt, Artificial Sequence
  Description of Artificial Sequence: Synthetic oligonucleotide
  Sense strand starting at position 2659 of SEQ ID NO: 913467
cgugcaguuucagaggaga

SEQ ID NO: 929597 - RNA, 19 nt, Artificial Sequence
  Description of Artificial Sequence: Synthetic oligonucleotide
  Antisense strand to SEQ ID NO: 929596
ucuccucugaaacugcacg

SEQ ID NO: 929598 - RNA, 19 nt, Artificial Sequence
  Description of Artificial Sequence: Synthetic oligonucleotide
  Sense strand starting at position 1791 of SEQ ID NO: 913467
gccguuuccauccguguca

SEQ ID NO: 929599 - RNA, 19 nt, Artificial Sequence
  Description of Artificial Sequence: Synthetic oligonucleotide
  Antisense strand to SEQ ID NO: 929598
ugacacggauggaaacggc

SEQ ID NO: 929600 - RNA, 19 nt, Artificial Sequence
  Description of Artificial Sequence: Synthetic oligonucleotide
  Sense strand starting at position 2493 of SEQ ID NO: 913467
uguugauucugccagggca

SEQ ID NO: 929601 - RNA, 19 nt, Artificial Sequence
  Description of Artificial Sequence: Synthetic oligonucleotide
  Antisense strand to SEQ ID NO: 929600
ugcccuggcagaaucaaca

SEQ ID NO: 929602 - RNA, 19 nt, Artificial Sequence
  Description of Artificial Sequence: Synthetic oligonucleotide
  Sense strand starting at position 2278 of SEQ ID NO: 913467
gcagcugauucucggagau

SEQ ID NO: 929603 - RNA, 19 nt, Artificial Sequence
  Description of Artificial Sequence: Synthetic oligonucleotide
  Antisense strand to SEQ ID NO: 929602
aucuccgagaaucagcugc

SEQ ID NO: 929604 - RNA, 19 nt, Artificial Sequence
  Description of Artificial Sequence: Synthetic oligonucleotide
  Sense strand starting at position 1450 of SEQ ID NO: 913467
gcgaacuccucguaguuca

SEQ ID NO: 929605 - RNA, 19 nt, Artificial Sequence
  Description of Artificial Sequence: Synthetic oligonucleotide
  Antisense strand to SEQ ID NO: 929604
ugaacuacgaggaguucgc

SEQ ID NO: 929606 - RNA, 19 nt, Artificial Sequence
  Description of Artificial Sequence: Synthetic oligonucleotide
  Sense strand starting at position 1837 of SEQ ID NO: 913468
cugcaagaaauguggaaau

SEQ ID NO: 929607 - RNA, 19 nt, Artificial Sequence
  Description of Artificial Sequence: Synthetic oligonucleotide
  Antisense strand to SEQ ID NO: 929606
auuuccacauuucuugcag

SEQ ID NO: 929608 - RNA, 19 nt, Artificial Sequence
  Description of Artificial Sequence: Synthetic oligonucleotide
  Sense strand starting at position 1828 of SEQ ID NO: 913468
gcccacauucugcaagaaa

SEQ ID NO: 929609 - RNA, 19 nt, Artificial Sequence
  Description of Artificial Sequence: Synthetic oligonucleotide
  Antisense strand to SEQ ID NO: 929608
uuucuugcagaaugugggc

SEQ ID NO: 929610 - RNA, 19 nt, Artificial Sequence
  Description of Artificial Sequence: Synthetic oligonucleotide
  Sense strand starting at position 1835 of SEQ ID NO: 913468
uucugcaagaaauguggaa

SEQ ID NO: 929611 - RNA, 19 nt, Artificial Sequence
  Description of Artificial Sequence: Synthetic oligonucleotide
  Antisense strand to SEQ ID NO: 929610
uuccacauuucuugcagaa

SEQ ID NO: 929612 - RNA, 19 nt, Artificial Sequence
  Description of Artificial Sequence: Synthetic oligonucleotide
  Sense strand starting at position 531 of SEQ ID NO: 913468
acgcgucuucaggaagaaa

SEQ ID NO: 929613 - RNA, 19 nt, Artificial Sequence
  Description of Artificial Sequence: Synthetic oligonucleotide
  Antisense strand to SEQ ID NO: 929612
uuucuuccugaagacgcgu

SEQ ID NO: 929614 - RNA, 19 nt, Artificial Sequence
  Description of Artificial Sequence: Synthetic oligonucleotide
  Sense strand starting at position 3624 of SEQ ID NO: 913468
gcucuugacccauacaguu

SEQ ID NO: 929615 - RNA, 19 nt, Artificial Sequence
  Description of Artificial Sequence: Synthetic oligonucleotide
  Antisense strand to SEQ ID NO: 929614
aacuguaugggucaagagc

SEQ ID NO: 929616 - RNA, 19 nt, Artificial Sequence
  Description of Artificial Sequence: Synthetic oligonucleotide
  Sense strand starting at position 1827 of SEQ ID NO: 913468
cgcccacauucugcaagaa

SEQ ID NO: 929617 - RNA, 19 nt, Artificial Sequence
  Description of Artificial Sequence: Synthetic oligonucleotide
  Antisense strand to SEQ ID NO: 929616
uucuugcagaaugugggcg

SEQ ID NO: 929618 - RNA, 19 nt, Artificial Sequence
  Description of Artificial Sequence: Synthetic oligonucleotide
  Sense strand starting at position 1990 of SEQ ID NO: 913468
ggcuguggucgccauggaa

SEQ ID NO: 929619 - RNA, 19 nt, Artificial Sequence
  Description of Artificial Sequence: Synthetic oligonucleotide
  Antisense strand to SEQ ID NO: 929618
uuccauggcgaccacagcc

SEQ ID NO: 929620 - RNA, 19 nt, Artificial Sequence
  Description of Artificial Sequence: Synthetic oligonucleotide
  Sense strand starting at position 963 of SEQ ID NO: 913468
caggcucucagucgaaagu

SEQ ID NO: 929621 - RNA, 19 nt, Artificial Sequence
  Description of Artificial Sequence: Synthetic oligonucleotide
  Antisense strand to SEQ ID NO: 929620
acuuucgacugagagccug

SEQ ID NO: 929622 - RNA, 19 nt, Artificial Sequence
  Description of Artificial Sequence: Synthetic oligonucleotide
  Sense strand starting at position 377 of SEQ ID NO: 913468
ccaggagucuccgcccgaa

SEQ ID NO: 929623 - RNA, 19 nt, Artificial Sequence
  Description of Artificial Sequence: Synthetic oligonucleotide
  Antisense strand to SEQ ID NO: 929622
uucgggcggagacuccugg

SEQ ID NO: 929624 - RNA, 19 nt, Artificial Sequence
  Description of Artificial Sequence: Synthetic oligonucleotide
  Sense strand starting at position 527 of SEQ ID NO: 913468
cgagacgcgucuucaggaa

SEQ ID NO: 929625 - RNA, 19 nt, Artificial Sequence
  Description of Artificial Sequence: Synthetic oligonucleotide
  Antisense strand to SEQ ID NO: 929624
uuccugaagacgcgucucg

SEQ ID NO: 929626 - RNA, 19 nt, Artificial Sequence
  Description of Artificial Sequence: Synthetic oligonucleotide
  Sense strand starting at position 916 of SEQ ID NO: 913468
ugagugaggccgugcagau

SEQ ID NO: 929627 - RNA, 19 nt, Artificial Sequence
  Description of Artificial Sequence: Synthetic oligonucleotide
  Antisense strand to SEQ ID NO: 929626
aucugcacggccucacuca

SEQ ID NO: 929628 - RNA, 19 nt, Artificial Sequence
  Description of Artificial Sequence: Synthetic oligonucleotide
  Sense strand starting at position 720 of SEQ ID NO: 913469
gugaauccacacugacaga

SEQ ID NO: 929629 - RNA, 19 nt, Artificial Sequence
  Description of Artificial Sequence: Synthetic oligonucleotide
  Antisense strand to SEQ ID NO: 929628
ucugucaguguggauucac

SEQ ID NO: 929630 - RNA, 19 nt, Artificial Sequence
  Description of Artificial Sequence: Synthetic oligonucleotide
  Sense strand starting at position 3470 of SEQ ID NO: 913469
gauuuacuugccgguuaga

SEQ ID NO: 929631 - RNA, 19 nt, Artificial Sequence
  Description of Artificial Sequence: Synthetic oligonucleotide
  Antisense strand to SEQ ID NO: 929630
ucuaaccggcaaguaaauc

SEQ ID NO: 929632 - RNA, 19 nt, Artificial Sequence
  Description of Artificial Sequence: Synthetic oligonucleotide
  Sense strand starting at position 3468 of SEQ ID NO: 913469
gggauuuacuugccgguua

SEQ ID NO: 929633 - RNA, 19 nt, Artificial Sequence
  Description of Artificial Sequence: Synthetic oligonucleotide
  Antisense strand to SEQ ID NO: 929632
uaaccggcaaguaaauccc

SEQ ID NO: 929634 - RNA, 19 nt, Artificial Sequence
  Description of Artificial Sequence: Synthetic oligonucleotide
  Sense strand starting at position 2574 of SEQ ID NO: 913469
gcgggagcucauucgcauu

SEQ ID NO: 929635 - RNA, 19 nt, Artificial Sequence
  Description of Artificial Sequence: Synthetic oligonucleotide
  Antisense strand to SEQ ID NO: 929634
aaugcgaaugagcucccgc

SEQ ID NO: 929636 - RNA, 19 nt, Artificial Sequence
  Description of Artificial Sequence: Synthetic oligonucleotide
  Sense strand starting at position 3642 of SEQ ID NO: 913469
ugugccaaagguuagauaa

SEQ ID NO: 929637 - RNA, 19 nt, Artificial Sequence
  Description of Artificial Sequence: Synthetic oligonucleotide
  Antisense strand to SEQ ID NO: 929636
uuaucuaaccuuuggcaca

SEQ ID NO: 929638 - RNA, 19 nt, Artificial Sequence
  Description of Artificial Sequence: Synthetic oligonucleotide
  Sense strand starting at position 3791 of SEQ ID NO: 913469
ccuauuugguucucugcua

SEQ ID NO: 929639 - RNA, 19 nt, Artificial Sequence
  Description of Artificial Sequence: Synthetic oligonucleotide
  Antisense strand to SEQ ID NO: 929638
uagcagagaaccaaauagg

SEQ ID NO: 929640 - RNA, 19 nt, Artificial Sequence
  Description of Artificial Sequence: Synthetic oligonucleotide
  Sense strand starting at position 3792 of SEQ ID NO: 913469
cuauuugguucucugcuau

SEQ ID NO: 929641 - RNA, 19 nt, Artificial Sequence
  Description of Artificial Sequence: Synthetic oligonucleotide
  Antisense strand to SEQ ID NO: 929640
auagcagagaaccaaauag

SEQ ID NO: 929642 - RNA, 19 nt, Artificial Sequence
  Description of Artificial Sequence: Synthetic oligonucleotide
  Sense strand starting at position 950 of SEQ ID NO: 913469
cggauuauuucugcuuucu

SEQ ID NO: 929643 - RNA, 19 nt, Artificial Sequence
  Description of Artificial Sequence: Synthetic oligonucleotide
  Antisense strand to SEQ ID NO: 929642
agaaagcagaaauaauccg

SEQ ID NO: 929644 - RNA, 19 nt, Artificial Sequence
  Description of Artificial Sequence: Synthetic oligonucleotide
  Sense strand starting at position 948 of SEQ ID NO: 913469
uucggauuauuucugcuuu

SEQ ID NO: 929645 - RNA, 19 nt, Artificial Sequence
  Description of Artificial Sequence: Synthetic oligonucleotide
  Antisense strand to SEQ ID NO: 929644
aaagcagaaauaauccgaa

SEQ ID NO: 929646 - RNA, 19 nt, Artificial Sequence
  Description of Artificial Sequence: Synthetic oligonucleotide
  Sense strand starting at position 2972 of SEQ ID NO: 913469
gagaauucccuccggacuc

SEQ ID NO: 929647 - RNA, 19 nt, Artificial Sequence
  Description of Artificial Sequence: Synthetic oligonucleotide
  Antisense strand to SEQ ID NO: 929646
gaguccggagggaauucuc

SEQ ID NO: 929648 - RNA, 19 nt, Artificial Sequence
  Description of Artificial Sequence: Synthetic oligonucleotide
  Sense strand starting at position 1074 of SEQ ID NO: 913469
ggccgagcccgcgugaaau

SEQ ID NO: 929649 - RNA, 19 nt, Artificial Sequence
  Description of Artificial Sequence: Synthetic oligonucleotide
  Antisense strand to SEQ ID NO: 929648
auuucacgcgggcucggcc

SEQ ID NO: 929650 - RNA, 19 nt, Artificial Sequence
  Description of Artificial Sequence: Synthetic oligonucleotide
  Sense strand starting at position 2944 of SEQ ID NO: 913469
uuuccuauggacugccaaa

SEQ ID NO: 929651 - RNA, 19 nt, Artificial Sequence
  Description of Artificial Sequence: Synthetic oligonucleotide
  Antisense strand to SEQ ID NO: 929650
uuuggcaguccauaggaaa

SEQ ID NO: 929652 - RNA, 19 nt, Artificial Sequence
  Description of Artificial Sequence: Synthetic oligonucleotide
  Sense strand starting at position 3479 of SEQ ID NO: 913469
gccgguuagauguagaaua

SEQ ID NO: 929653 - RNA, 19 nt, Artificial Sequence
  Description of Artificial Sequence: Synthetic oligonucleotide
  Antisense strand to SEQ ID NO: 929652
uauucuacaucuaaccggc

SEQ ID NO: 929654 - RNA, 19 nt, Artificial Sequence
  Description of Artificial Sequence: Synthetic oligonucleotide
  Sense strand starting at position 3639 of SEQ ID NO: 913469
acuugugccaaagguuaga

SEQ ID NO: 929655 - RNA, 19 nt, Artificial Sequence
  Description of Artificial Sequence: Synthetic oligonucleotide
  Antisense strand to SEQ ID NO: 929654
ucuaaccuuuggcacaagu

SEQ ID NO: 929656 - RNA, 19 nt, Artificial Sequence
  Description of Artificial Sequence: Synthetic oligonucleotide
  Sense strand starting at position 3092 of SEQ ID NO: 913469
gcgaccucuugaucggaaa

SEQ ID NO: 929657 - RNA, 19 nt, Artificial Sequence
  Description of Artificial Sequence: Synthetic oligonucleotide
  Antisense strand to SEQ ID NO: 929656
uuuccgaucaagaggucgc

SEQ ID NO: 929658 - RNA, 19 nt, Artificial Sequence
  Description of Artificial Sequence: Synthetic oligonucleotide
  Sense strand starting at position 3840 of SEQ ID NO: 913469
gccgccagagcucaugaaa

SEQ ID NO: 929659 - RNA, 19 nt, Artificial Sequence
  Description of Artificial Sequence: Synthetic oligonucleotide
  Antisense strand to SEQ ID NO: 929658
uuucaugagcucuggcggc

SEQ ID NO: 929660 - RNA, 19 nt, Artificial Sequence
  Description of Artificial Sequence: Synthetic oligonucleotide
  Sense strand starting at position 3213 of SEQ ID NO: 913469
ccaggacuguuccaauuuc

SEQ ID NO: 929661 - RNA, 19 nt, Artificial Sequence
  Description of Artificial Sequence: Synthetic oligonucleotide
  Antisense strand to SEQ ID NO: 929660
gaaauuggaacaguccugg

SEQ ID NO: 929662 - RNA, 19 nt, Artificial Sequence
  Description of Artificial Sequence: Synthetic oligonucleotide
  Sense strand starting at position 3157 of SEQ ID NO: 913469
ccucguaguuggguaaaca

SEQ ID NO: 929663 - RNA, 19 nt, Artificial Sequence
  Description of Artificial Sequence: Synthetic oligonucleotide
  Antisense strand to SEQ ID NO: 929662
uguuuacccaacuacgagg

SEQ ID NO: 929664 - RNA, 19 nt, Artificial Sequence
  Description of Artificial Sequence: Synthetic oligonucleotide
  Sense strand starting at position 142 of SEQ ID NO: 913469
ucuugucucucaguaacuu

SEQ ID NO: 929665 - RNA, 19 nt, Artificial Sequence
  Description of Artificial Sequence: Synthetic oligonucleotide
  Antisense strand to SEQ ID NO: 929664
aaguuacugagagacaaga

SEQ ID NO: 929666 - RNA, 19 nt, Artificial Sequence
  Description of Artificial Sequence: Synthetic oligonucleotide
  Sense strand starting at position 3473 of SEQ ID NO: 913469
uuacuugccgguuagaugu

SEQ ID NO: 929667 - RNA, 19 nt, Artificial Sequence
  Description of Artificial Sequence: Synthetic oligonucleotide
  Antisense strand to SEQ ID NO: 929666
acaucuaaccggcaaguaa

SEQ ID NO: 929668 - RNA, 19 nt, Artificial Sequence
  Description of Artificial Sequence: Synthetic oligonucleotide
  Sense strand starting at position 938 of SEQ ID NO: 913469
ugccaucgacuucggauua

SEQ ID NO: 929669 - RNA, 19 nt, Artificial Sequence
  Description of Artificial Sequence: Synthetic oligonucleotide
  Antisense strand to SEQ ID NO: 929668
uaauccgaagucgauggca

SEQ ID NO: 929670 - RNA, 19 nt, Artificial Sequence
  Description of Artificial Sequence: Synthetic oligonucleotide
  Sense strand starting at position 3521 of SEQ ID NO: 913469
acggaugggugagaagaau

SEQ ID NO: 929671 - RNA, 19 nt, Artificial Sequence
  Description of Artificial Sequence: Synthetic oligonucleotide
  Antisense strand to SEQ ID NO: 929670
auucuucucacccauccgu

SEQ ID NO: 929672 - RNA, 19 nt, Artificial Sequence
  Description of Artificial Sequence: Synthetic oligonucleotide
  Sense strand starting at position 3709 of SEQ ID NO: 913469
gcuuucucaugccuacagu

SEQ ID NO: 929673 - RNA, 19 nt, Artificial Sequence
  Description of Artificial Sequence: Synthetic oligonucleotide
  Antisense strand to SEQ ID NO: 929672
acuguaggcaugagaaagc

SEQ ID NO: 929674 - RNA, 19 nt, Artificial Sequence
  Description of Artificial Sequence: Synthetic oligonucleotide
  Sense strand starting at position 138 of SEQ ID NO: 913469
gcuuucuugucucucagua

SEQ ID NO: 929675 - RNA, 19 nt, Artificial Sequence
  Description of Artificial Sequence: Synthetic oligonucleotide
  Antisense strand to SEQ ID NO: 929674
uacugagagacaagaaagc

SEQ ID NO: 929676 - RNA, 19 nt, Artificial Sequence
  Description of Artificial Sequence: Synthetic oligonucleotide
  Sense strand starting at position 3644 of SEQ ID NO: 913469
ugccaaagguuagauaaua

SEQ ID NO: 929677 - RNA, 19 nt, Artificial Sequence
  Description of Artificial Sequence: Synthetic oligonucleotide
  Antisense strand to SEQ ID NO: 929676
uauuaucuaaccuuuggca

SEQ ID NO: 929678 - RNA, 19 nt, Artificial Sequence
  Description of Artificial Sequence: Synthetic oligonucleotide
  Sense strand starting at position 756 of SEQ ID NO: 913469
uacugauugugugagggaa

SEQ ID NO: 929679 - RNA, 19 nt, Artificial Sequence
  Description of Artificial Sequence: Synthetic oligonucleotide
  Antisense strand to SEQ ID NO: 929678
uucccucacacaaucagua

SEQ ID NO: 929680 - RNA, 19 nt, Artificial Sequence
  Description of Artificial Sequence: Synthetic oligonucleotide
  Sense strand starting at position 3564 of SEQ ID NO: 913469
gaggcacauuaccaaaguu

SEQ ID NO: 929681 - RNA, 19 nt, Artificial Sequence
  Description of Artificial Sequence: Synthetic oligonucleotide
  Antisense strand to SEQ ID NO: 929680
aacuuugguaaugugccuc

SEQ ID NO: 929682 - RNA, 19 nt, Artificial Sequence
  Description of Artificial Sequence: Synthetic oligonucleotide
  Sense strand starting at position 707 of SEQ ID NO: 913469
ugcacaccugugcgugaau

SEQ ID NO: 929683 - RNA, 19 nt, Artificial Sequence
  Description of Artificial Sequence: Synthetic oligonucleotide
  Antisense strand to SEQ ID NO: 929682
auucacgcacaggugugca

SEQ ID NO: 929684 - RNA, 19 nt, Artificial Sequence
  Description of Artificial Sequence: Synthetic oligonucleotide
  Sense strand starting at position 140 of SEQ ID NO: 913469
uuucuugucucucaguaac

SEQ ID NO: 929685 - RNA, 19 nt, Artificial Sequence
  Description of Artificial Sequence: Synthetic oligonucleotide
  Antisense strand to SEQ ID NO: 929684
guuacugagagacaagaaa

SEQ ID NO: 929686 - RNA, 19 nt, Artificial Sequence
  Description of Artificial Sequence: Synthetic oligonucleotide
  Sense strand starting at position 3295 of SEQ ID NO: 913469
aguucugacucuggcugaa

SEQ ID NO: 929687 - RNA, 19 nt, Artificial Sequence
  Description of Artificial Sequence: Synthetic oligonucleotide
  Antisense strand to SEQ ID NO: 929686
uucagccagagucagaacu

SEQ ID NO: 929688 - RNA, 19 nt, Artificial Sequence
  Description of Artificial Sequence: Synthetic oligonucleotide
  Sense strand starting at position 2609 of SEQ ID NO: 913469
acgucaguuucgggacaga

SEQ ID NO: 929689 - RNA, 19 nt, Artificial Sequence
  Description of Artificial Sequence: Synthetic oligonucleotide
  Antisense strand to SEQ ID NO: 929688
ucugucccgaaacugacgu

SEQ ID NO: 929690 - RNA, 19 nt, Artificial Sequence
  Description of Artificial Sequence: Synthetic oligonucleotide
  Sense strand starting at position 939 of SEQ ID NO: 913469
gccaucgacuucggauuau

SEQ ID NO: 929691 - RNA, 19 nt, Artificial Sequence
  Description of Artificial Sequence: Synthetic oligonucleotide
  Antisense strand to SEQ ID NO: 929690
auaauccgaagucgauggc

SEQ ID NO: 929692 - RNA, 19 nt, Artificial Sequence
  Description of Artificial Sequence: Synthetic oligonucleotide
  Sense strand starting at position 2577 of SEQ ID NO: 913469
ggagcucauucgcauugca

SEQ ID NO: 929693 - RNA, 19 nt, Artificial Sequence
  Description of Artificial Sequence: Synthetic oligonucleotide
  Antisense strand to SEQ ID NO: 929692
ugcaaugcgaaugagcucc

SEQ ID NO: 929694 - RNA, 19 nt, Artificial Sequence
  Description of Artificial Sequence: Synthetic oligonucleotide
  Sense strand starting at position 3244 of SEQ ID NO: 913470
cauuaaauggucuaaggca

SEQ ID NO: 929695 - RNA, 19 nt, Artificial Sequence
  Description of Artificial Sequence: Synthetic oligonucleotide
  Antisense strand to SEQ ID NO: 929694
ugccuuagaccauuuaaug

SEQ ID NO: 929696 - RNA, 19 nt, Artificial Sequence
  Description of Artificial Sequence: Synthetic oligonucleotide
  Sense strand starting at position 2616 of SEQ ID NO: 913470
augaaagaguauucucuau

SEQ ID NO: 929697 - RNA, 19 nt, Artificial Sequence
  Description of Artificial Sequence: Synthetic oligonucleotide
  Antisense strand to SEQ ID NO: 929696
auagagaauacucuuucau

SEQ ID NO: 929698 - RNA, 19 nt, Artificial Sequence
  Description of Artificial Sequence: Synthetic oligonucleotide
  Sense strand starting at position 2903 of SEQ ID NO: 913470
ggguaagucacugaaucuu

SEQ ID NO: 929699 - RNA, 19 nt, Artificial Sequence
  Description of Artificial Sequence: Synthetic oligonucleotide
  Antisense strand to SEQ ID NO: 929698
aagauucagugacuuaccc

SEQ ID NO: 929700 - RNA, 19 nt, Artificial Sequence
  Description of Artificial Sequence: Synthetic oligonucleotide
  Sense strand starting at position 3718 of SEQ ID NO: 913470
ccacucagucuugauuaca

SEQ ID NO: 929701 - RNA, 19 nt, Artificial Sequence
  Description of Artificial Sequence: Synthetic oligonucleotide
  Antisense strand to SEQ ID NO: 929700
uguaaucaagacugagugg

SEQ ID NO: 929702 - RNA, 19 nt, Artificial Sequence
  Description of Artificial Sequence: Synthetic oligonucleotide
  Sense strand starting at position 2599 of SEQ ID NO: 913470
gcaccauaacugcagagau

SEQ ID NO: 929703 - RNA, 19 nt, Artificial Sequence
  Description of Artificial Sequence: Synthetic oligonucleotide
  Antisense strand to SEQ ID NO: 929702
aucucugcaguuauggugc

SEQ ID NO: 929704 - RNA, 19 nt, Artificial Sequence
  Description of Artificial Sequence: Synthetic oligonucleotide
  Sense strand starting at position 3132 of SEQ ID NO: 913470
guauguaguacauacauga

SEQ ID NO: 929705 - RNA, 19 nt, Artificial Sequence
  Description of Artificial Sequence: Synthetic oligonucleotide
  Antisense strand to SEQ ID NO: 929704
ucauguauguacuacauac

SEQ ID NO: 929706 - RNA, 19 nt, Artificial Sequence
  Description of Artificial Sequence: Synthetic oligonucleotide
  Sense strand starting at position 406 of SEQ ID NO: 913470
gacaacuucuugguauuga

SEQ ID NO: 929707 - RNA, 19 nt, Artificial Sequence
  Description of Artificial Sequence: Synthetic oligonucleotide
  Antisense strand to SEQ ID NO: 929706
ucaauaccaagaaguuguc

SEQ ID NO: 929708 - RNA, 19 nt, Artificial Sequence
  Description of Artificial Sequence: Synthetic oligonucleotide
  Sense strand starting at position 405 of SEQ ID NO: 913470
agacaacuucuugguauug

SEQ ID NO: 929709 - RNA, 19 nt, Artificial Sequence
  Description of Artificial Sequence: Synthetic oligonucleotide
  Antisense strand to SEQ ID NO: 929708
caauaccaagaaguugucu

SEQ ID NO: 929710 - RNA, 19 nt, Artificial Sequence
  Description of Artificial Sequence: Synthetic oligonucleotide
  Sense strand starting at position 3117 of SEQ ID NO: 913470
guaguaaugaaguauguau

SEQ ID NO: 929711 - RNA, 19 nt, Artificial Sequence
  Description of Artificial Sequence: Synthetic oligonucleotide
  Antisense strand to SEQ ID NO: 929710
auacauacuucauuacuac

SEQ ID NO: 929712 - RNA, 19 nt, Artificial Sequence
  Description of Artificial Sequence: Synthetic oligonucleotide
  Sense strand starting at position 2628 of SEQ ID NO: 913470
ucucuauccggccagaaau

SEQ ID NO: 929713 - RNA, 19 nt, Artificial Sequence
  Description of Artificial Sequence: Synthetic oligonucleotide
  Antisense strand to SEQ ID NO: 929712
auuucuggccggauagaga

SEQ ID NO: 929714 - RNA, 19 nt, Artificial Sequence
  Description of Artificial Sequence: Synthetic oligonucleotide
  Sense strand starting at position 3136 of SEQ ID NO: 913470
guaguacauacaugaagua

SEQ ID NO: 929715 - RNA, 19 nt, Artificial Sequence
  Description of Artificial Sequence: Synthetic oligonucleotide
  Antisense strand to SEQ ID NO: 929714
uacuucauguauguacuac

SEQ ID NO: 929716 - RNA, 19 nt, Artificial Sequence
  Description of Artificial Sequence: Synthetic oligonucleotide
  Sense strand starting at position 3977 of SEQ ID NO: 913470
agcaguucucuugggagaa

SEQ ID NO: 929717 - RNA, 19 nt, Artificial Sequence
  Description of Artificial Sequence: Synthetic oligonucleotide
  Antisense strand to SEQ ID NO: 929716
uucucccaagagaacugcu

SEQ ID NO: 929718 - RNA, 19 nt, Artificial Sequence
  Description of Artificial Sequence: Synthetic oligonucleotide
  Sense strand starting at position 3113 of SEQ ID NO: 913470
uguuguaguaaugaaguau

SEQ ID NO: 929719 - RNA, 19 nt, Artificial Sequence
  Description of Artificial Sequence: Synthetic oligonucleotide
  Antisense strand to SEQ ID NO: 929718
auacuucauuacuacaaca

SEQ ID NO: 929720 - RNA, 19 nt, Artificial Sequence
  Description of Artificial Sequence: Synthetic oligonucleotide
  Sense strand starting at position 265 of SEQ ID NO: 913470
guccaaccagucugaaauu

SEQ ID NO: 929721 - RNA, 19 nt, Artificial Sequence
  Description of Artificial Sequence: Synthetic oligonucleotide
  Antisense strand to SEQ ID NO: 929720
aauuucagacugguuggac

SEQ ID NO: 929722 - RNA, 19 nt, Artificial Sequence
  Description of Artificial Sequence: Synthetic oligonucleotide
  Sense strand starting at position 3848 of SEQ ID NO: 913470
ggcagagcucuccaggagu

SEQ ID NO: 929723 - RNA, 19 nt, Artificial Sequence
  Description of Artificial Sequence: Synthetic oligonucleotide
  Antisense strand to SEQ ID NO: 929722
acuccuggagagcucugcc

SEQ ID NO: 929724 - RNA, 19 nt, Artificial Sequence
  Description of Artificial Sequence: Synthetic oligonucleotide
  Sense strand starting at position 3232 of SEQ ID NO: 913470
uaggccugucagcauuaaa

SEQ ID NO: 929725 - RNA, 19 nt, Artificial Sequence
  Description of Artificial Sequence: Synthetic oligonucleotide
  Antisense strand to SEQ ID NO: 929724
uuuaaugcugacaggccua

SEQ ID NO: 929726 - RNA, 19 nt, Artificial Sequence
  Description of Artificial Sequence: Synthetic oligonucleotide
  Sense strand starting at position 2785 of SEQ ID NO: 913470
ugaugcauugacugguaua

SEQ ID NO: 929727 - RNA, 19 nt, Artificial Sequence
  Description of Artificial Sequence: Synthetic oligonucleotide
  Antisense strand to SEQ ID NO: 929726
uauaccagucaaugcauca

SEQ ID NO: 929728 - RNA, 19 nt, Artificial Sequence
  Description of Artificial Sequence: Synthetic oligonucleotide
  Sense strand starting at position 1113 of SEQ ID NO: 913470
cucugagcucuggaaacgu

SEQ ID NO: 929729 - RNA, 19 nt, Artificial Sequence
  Description of Artificial Sequence: Synthetic oligonucleotide
  Antisense strand to SEQ ID NO: 929728
acguuuccagagcucagag

SEQ ID NO: 929730 - RNA, 19 nt, Artificial Sequence
  Description of Artificial Sequence: Synthetic oligonucleotide
  Sense strand starting at position 3598 of SEQ ID NO: 913470
gcacauaacugucuugaug

SEQ ID NO: 929731 - RNA, 19 nt, Artificial Sequence
  Description of Artificial Sequence: Synthetic oligonucleotide
  Antisense strand to SEQ ID NO: 929730
caucaagacaguuaugugc

SEQ ID NO: 929732 - RNA, 19 nt, Artificial Sequence
  Description of Artificial Sequence: Synthetic oligonucleotide
  Sense strand starting at position 403 of SEQ ID NO: 913470
gcagacaacuucuugguau

SEQ ID NO: 929733 - RNA, 19 nt, Artificial Sequence
  Description of Artificial Sequence: Synthetic oligonucleotide
  Antisense strand to SEQ ID NO: 929732
auaccaagaaguugucugc

SEQ ID NO: 929734 - RNA, 19 nt, Artificial Sequence
  Description of Artificial Sequence: Synthetic oligonucleotide
  Sense strand starting at position 3524 of SEQ ID NO: 913470
aaauauuugugggauggca

SEQ ID NO: 929735 - RNA, 19 nt, Artificial Sequence
  Description of Artificial Sequence: Synthetic oligonucleotide
  Antisense strand to SEQ ID NO: 929734
ugccaucccacaaauauuu

SEQ ID NO: 929736 - RNA, 19 nt, Artificial Sequence
  Description of Artificial Sequence: Synthetic oligonucleotide
  Sense strand starting at position 2293 of SEQ ID NO: 913470
guguuaggaguguaggagu

SEQ ID NO: 929737 - RNA, 19 nt, Artificial Sequence
  Description of Artificial Sequence: Synthetic oligonucleotide
  Antisense strand to SEQ ID NO: 929736
acuccuacacuccuaacac

SEQ ID NO: 929738 - RNA, 19 nt, Artificial Sequence
  Description of Artificial Sequence: Synthetic oligonucleotide
  Sense strand starting at position 2291 of SEQ ID NO: 913470
auguguuaggaguguagga

SEQ ID NO: 929739 - RNA, 19 nt, Artificial Sequence
  Description of Artificial Sequence: Synthetic oligonucleotide
  Antisense strand to SEQ ID NO: 929738
uccuacacuccuaacacau

SEQ ID NO: 929740 - RNA, 19 nt, Artificial Sequence
  Description of Artificial Sequence: Synthetic oligonucleotide
  Sense strand starting at position 3119 of SEQ ID NO: 913470
aguaaugaaguauguaugu

SEQ ID NO: 929741 - RNA, 19 nt, Artificial Sequence
  Description of Artificial Sequence: Synthetic oligonucleotide
  Antisense strand to SEQ ID NO: 929740
acauacauacuucauuacu

SEQ ID NO: 929742 - RNA, 19 nt, Artificial Sequence
  Description of Artificial Sequence: Synthetic oligonucleotide
  Sense strand starting at position 3231 of SEQ ID NO: 913470
auaggccugucagcauuaa

SEQ ID NO: 929743 - RNA, 19 nt, Artificial Sequence
  Description of Artificial Sequence: Synthetic oligonucleotide
  Antisense strand to SEQ ID NO: 929742
uuaaugcugacaggccuau

SEQ ID NO: 929744 - RNA, 19 nt, Artificial Sequence
  Description of Artificial Sequence: Synthetic oligonucleotide
  Sense strand starting at position 868 of SEQ ID NO: 913470
gcccuucucucagcaggaa

SEQ ID NO: 929745 - RNA, 19 nt, Artificial Sequence
  Description of Artificial Sequence: Synthetic oligonucleotide
  Antisense strand to SEQ ID NO: 929744
uuccugcugagagaagggc

SEQ ID NO: 929746 - RNA, 19 nt, Artificial Sequence
  Description of Artificial Sequence: Synthetic oligonucleotide
  Sense strand starting at position 3271 of SEQ ID NO: 913470
aguacuuggugccuaauua

SEQ ID NO: 929747 - RNA, 19 nt, Artificial Sequence
  Description of Artificial Sequence: Synthetic oligonucleotide
  Antisense strand to SEQ ID NO: 929746
uaauuaggcaccaaguacu

SEQ ID NO: 929748 - RNA, 19 nt, Artificial Sequence
  Description of Artificial Sequence: Synthetic oligonucleotide
  Sense strand starting at position 3521 of SEQ ID NO: 913470
aguaaauauuugugggaug

SEQ ID NO: 929749 - RNA, 19 nt, Artificial Sequence
  Description of Artificial Sequence: Synthetic oligonucleotide
  Antisense strand to SEQ ID NO: 929748
caucccacaaauauuuacu

SEQ ID NO: 929750 - RNA, 19 nt, Artificial Sequence
  Description of Artificial Sequence: Synthetic oligonucleotide
  Sense strand starting at position 3446 of SEQ ID NO: 913470
gcugaauuguaggcuccaa

SEQ ID NO: 929751 - RNA, 19 nt, Artificial Sequence
  Description of Artificial Sequence: Synthetic oligonucleotide
  Antisense strand to SEQ ID NO: 929750
uuggagccuacaauucagc

SEQ ID NO: 929752 - RNA, 19 nt, Artificial Sequence
  Description of Artificial Sequence: Synthetic oligonucleotide
  Sense strand starting at position 1806 of SEQ ID NO: 913470
uugccaagcuccucgaaga

SEQ ID NO: 929753 - RNA, 19 nt, Artificial Sequence
  Description of Artificial Sequence: Synthetic oligonucleotide
  Antisense strand to SEQ ID NO: 929752
ucuucgaggagcuuggcaa

SEQ ID NO: 929754 - RNA, 19 nt, Artificial Sequence
  Description of Artificial Sequence: Synthetic oligonucleotide
  Sense strand starting at position 2510 of SEQ ID NO: 913470
gggccauuauuagaaagaa

SEQ ID NO: 929755 - RNA, 19 nt, Artificial Sequence
  Description of Artificial Sequence: Synthetic oligonucleotide
  Antisense strand to SEQ ID NO: 929754
uucuuucuaauaauggccc

SEQ ID NO: 929756 - RNA, 19 nt, Artificial Sequence
  Description of Artificial Sequence: Synthetic oligonucleotide
  Sense strand starting at position 2824 of SEQ ID NO: 913470
auagcugucuaagcgugaa

SEQ ID NO: 929757 - RNA, 19 nt, Artificial Sequence
  Description of Artificial Sequence: Synthetic oligonucleotide
  Antisense strand to SEQ ID NO: 929756
uucacgcuuagacagcuau

SEQ ID NO: 929758 - RNA, 19 nt, Artificial Sequence
  Description of Artificial Sequence: Synthetic oligonucleotide
  Sense strand starting at position 1827 of SEQ ID NO: 913470
ugguagucgucggugaaac

SEQ ID NO: 929759 - RNA, 19 nt, Artificial Sequence
  Description of Artificial Sequence: Synthetic oligonucleotide
  Antisense strand to SEQ ID NO: 929758
guuucaccgacgacuacca

SEQ ID NO: 929760 - RNA, 19 nt, Artificial Sequence
  Description of Artificial Sequence: Synthetic oligonucleotide
  Sense strand starting at position 1826 of SEQ ID NO: 913470
cugguagucgucggugaaa

SEQ ID NO: 929761 - RNA, 19 nt, Artificial Sequence
  Description of Artificial Sequence: Synthetic oligonucleotide
  Antisense strand to SEQ ID NO: 929760
uuucaccgacgacuaccag

SEQ ID NO: 929762 - RNA, 19 nt, Artificial Sequence
  Description of Artificial Sequence: Synthetic oligonucleotide
  Sense strand starting at position 2215 of SEQ ID NO: 913470
gcuggaagguucgcgacuu

SEQ ID NO: 929763 - RNA, 19 nt, Artificial Sequence
  Description of Artificial Sequence: Synthetic oligonucleotide
  Antisense strand to SEQ ID NO: 929762
aagucgcgaaccuuccagc

SEQ ID NO: 929764 - RNA, 19 nt, Artificial Sequence
  Description of Artificial Sequence: Synthetic oligonucleotide
  Sense strand starting at position 407 of SEQ ID NO: 913470
acaacuucuugguauugau

SEQ ID NO: 929765 - RNA, 19 nt, Artificial Sequence
  Description of Artificial Sequence: Synthetic oligonucleotide
  Antisense strand to SEQ ID NO: 929764
aucaauaccaagaaguugu

SEQ ID NO: 929766 - RNA, 19 nt, Artificial Sequence
  Description of Artificial Sequence: Synthetic oligonucleotide
  Sense strand starting at position 2827 of SEQ ID NO: 913470
gcugucuaagcgugaacuu

SEQ ID NO: 929767 - RNA, 19 nt, Artificial Sequence
  Description of Artificial Sequence: Synthetic oligonucleotide
  Antisense strand to SEQ ID NO: 929766
aaguucacgcuuagacagc

SEQ ID NO: 929768 - RNA, 19 nt, Artificial Sequence
  Description of Artificial Sequence: Synthetic oligonucleotide
  Sense strand starting at position 1825 of SEQ ID NO: 913470
gcugguagucgucggugaa

SEQ ID NO: 929769 - RNA, 19 nt, Artificial Sequence
  Description of Artificial Sequence: Synthetic oligonucleotide
  Antisense strand to SEQ ID NO: 929768
uucaccgacgacuaccagc

SEQ ID NO: 929770 - RNA, 19 nt, Artificial Sequence
  Description of Artificial Sequence: Synthetic oligonucleotide
  Sense strand starting at position 410 of SEQ ID NO: 913470
acuucuugguauugaugau

SEQ ID NO: 929771 - RNA, 19 nt, Artificial Sequence
  Description of Artificial Sequence: Synthetic oligonucleotide
  Antisense strand to SEQ ID NO: 929770
aucaucaauaccaagaagu

SEQ ID NO: 929772 - RNA, 19 nt, Artificial Sequence
  Description of Artificial Sequence: Synthetic oligonucleotide
  Sense strand starting at position 3978 of SEQ ID NO: 913470
gcaguucucuugggagaag

SEQ ID NO: 929773 - RNA, 19 nt, Artificial Sequence
  Description of Artificial Sequence: Synthetic oligonucleotide
  Antisense strand to SEQ ID NO: 929772
cuucucccaagagaacugc

SEQ ID NO: 929774 - RNA, 19 nt, Artificial Sequence
  Description of Artificial Sequence: Synthetic oligonucleotide
  Sense strand starting at position 3304 of SEQ ID NO: 913471
ugaagagaguucucacaau

SEQ ID NO: 929775 - RNA, 19 nt, Artificial Sequence
  Description of Artificial Sequence: Synthetic oligonucleotide
  Antisense strand to SEQ ID NO: 929774
auugugagaacucucuuca

SEQ ID NO: 929776 - RNA, 19 nt, Artificial Sequence
  Description of Artificial Sequence: Synthetic oligonucleotide
  Sense strand starting at position 1520 of SEQ ID NO: 913471
cgcgauugcaucuucuuga

SEQ ID NO: 929777 - RNA, 19 nt, Artificial Sequence
  Description of Artificial Sequence: Synthetic oligonucleotide
  Antisense strand to SEQ ID NO: 929776
ucaagaagaugcaaucgcg

SEQ ID NO: 929778 - RNA, 19 nt, Artificial Sequence
  Description of Artificial Sequence: Synthetic oligonucleotide
  Sense strand starting at position 2706 of SEQ ID NO: 913471
cgcugagacacugaaacau

SEQ ID NO: 929779 - RNA, 19 nt, Artificial Sequence
  Description of Artificial Sequence: Synthetic oligonucleotide
  Antisense strand to SEQ ID NO: 929778
auguuucagugucucagcg

SEQ ID NO: 929780 - RNA, 19 nt, Artificial Sequence
  Description of Artificial Sequence: Synthetic oligonucleotide
  Sense strand starting at position 1660 of SEQ ID NO: 913471
ggagacuuggcugaggcaa

SEQ ID NO: 929781 - RNA, 19 nt, Artificial Sequence
  Description of Artificial Sequence: Synthetic oligonucleotide
  Antisense strand to SEQ ID NO: 929780
uugccucagccaagucucc

SEQ ID NO: 929782 - RNA, 19 nt, Artificial Sequence
  Description of Artificial Sequence: Synthetic oligonucleotide
  Sense strand starting at position 3582 of SEQ ID NO: 913471
uguuguauaccacacaaau

SEQ ID NO: 929783 - RNA, 19 nt, Artificial Sequence
  Description of Artificial Sequence: Synthetic oligonucleotide
  Antisense strand to SEQ ID NO: 929782
auuugugugguauacaaca

SEQ ID NO: 929784 - RNA, 19 nt, Artificial Sequence
  Description of Artificial Sequence: Synthetic oligonucleotide
  Sense strand starting at position 2561 of SEQ ID NO: 913471
gaaugaucuuuguuuaaga

SEQ ID NO: 929785 - RNA, 19 nt, Artificial Sequence
  Description of Artificial Sequence: Synthetic oligonucleotide
  Antisense strand to SEQ ID NO: 929784
ucuuaaacaaagaucauuc

SEQ ID NO: 929786 - RNA, 19 nt, Artificial Sequence
  Description of Artificial Sequence: Synthetic oligonucleotide
  Sense strand starting at position 3577 of SEQ ID NO: 913471
ugacauguuguauaccaca

SEQ ID NO: 929787 - RNA, 19 nt, Artificial Sequence
  Description of Artificial Sequence: Synthetic oligonucleotide
  Antisense strand to SEQ ID NO: 929786
ugugguauacaacauguca

SEQ ID NO: 929788 - RNA, 19 nt, Artificial Sequence
  Description of Artificial Sequence: Synthetic oligonucleotide
  Sense strand starting at position 297 of SEQ ID NO: 913471
auauacucgcccggaauuu

SEQ ID NO: 929789 - RNA, 19 nt, Artificial Sequence
  Description of Artificial Sequence: Synthetic oligonucleotide
  Antisense strand to SEQ ID NO: 929788
aaauuccgggcgaguauau

SEQ ID NO: 929790 - RNA, 19 nt, Artificial Sequence
  Description of Artificial Sequence: Synthetic oligonucleotide
  Sense strand starting at position 3721 of SEQ ID NO: 913471
ucaauauauaacggaguga

SEQ ID NO: 929791 - RNA, 19 nt, Artificial Sequence
  Description of Artificial Sequence: Synthetic oligonucleotide
  Antisense strand to SEQ ID NO: 929790
ucacuccguuauauauuga

SEQ ID NO: 929792 - RNA, 19 nt, Artificial Sequence
  Description of Artificial Sequence: Synthetic oligonucleotide
  Sense strand starting at position 2349 of SEQ ID NO: 913471
aggacuugacuuugcaaag

SEQ ID NO: 929793 - RNA, 19 nt, Artificial Sequence
  Description of Artificial Sequence: Synthetic oligonucleotide
  Antisense strand to SEQ ID NO: 929792
cuuugcaaagucaaguccu

SEQ ID NO: 929794 - RNA, 19 nt, Artificial Sequence
  Description of Artificial Sequence: Synthetic oligonucleotide
  Sense strand starting at position 2168 of SEQ ID NO: 913471
uugggacucgcuuacaaag

SEQ ID NO: 929795 - RNA, 19 nt, Artificial Sequence
  Description of Artificial Sequence: Synthetic oligonucleotide
  Antisense strand to SEQ ID NO: 929794
cuuuguaagcgagucccaa

SEQ ID NO: 929796 - RNA, 19 nt, Artificial Sequence
  Description of Artificial Sequence: Synthetic oligonucleotide
  Sense strand starting at position 3450 of SEQ ID NO: 913471
uucuuagccucaguuauuu

SEQ ID NO: 929797 - RNA, 19 nt, Artificial Sequence
  Description of Artificial Sequence: Synthetic oligonucleotide
  Antisense strand to SEQ ID NO: 929796
aaauaacugaggcuaagaa

SEQ ID NO: 929798 - RNA, 19 nt, Artificial Sequence
  Description of Artificial Sequence: Synthetic oligonucleotide
  Sense strand starting at position 245 of SEQ ID NO: 913471
aaagaaaugucauucuggu

SEQ ID NO: 929799 - RNA, 19 nt, Artificial Sequence
  Description of Artificial Sequence: Synthetic oligonucleotide
  Antisense strand to SEQ ID NO: 929798
accagaaugacauuucuuu

SEQ ID NO: 929800 - RNA, 19 nt, Artificial Sequence
  Description of Artificial Sequence: Synthetic oligonucleotide
  Sense strand starting at position 3411 of SEQ ID NO: 913471
cauggaaauuuagacugua

SEQ ID NO: 929801 - RNA, 19 nt, Artificial Sequence
  Description of Artificial Sequence: Synthetic oligonucleotide
  Antisense strand to SEQ ID NO: 929800
uacagucuaaauuuccaug

SEQ ID NO: 929802 - RNA, 19 nt, Artificial Sequence
  Description of Artificial Sequence: Synthetic oligonucleotide
  Sense strand starting at position 3968 of SEQ ID NO: 913471
gaguucucugaucagucau

SEQ ID NO: 929803 - RNA, 19 nt, Artificial Sequence
  Description of Artificial Sequence: Synthetic oligonucleotide
  Antisense strand to SEQ ID NO: 929802
augacugaucagagaacuc

SEQ ID NO: 929804 - RNA, 19 nt, Artificial Sequence
  Description of Artificial Sequence: Synthetic oligonucleotide
  Sense strand starting at position 3328 of SEQ ID NO: 913471
ggguuaaauguacaugcua

SEQ ID NO: 929805 - RNA, 19 nt, Artificial Sequence
  Description of Artificial Sequence: Synthetic oligonucleotide
  Antisense strand to SEQ ID NO: 929804
uagcauguacauuuaaccc

SEQ ID NO: 929806 - RNA, 19 nt, Artificial Sequence
  Description of Artificial Sequence: Synthetic oligonucleotide
  Sense strand starting at position 2715 of SEQ ID NO: 913471
acugaaacaucaguuguau

SEQ ID NO: 929807 - RNA, 19 nt, Artificial Sequence
  Description of Artificial Sequence: Synthetic oligonucleotide
  Antisense strand to SEQ ID NO: 929806
auacaacugauguuucagu

SEQ ID NO: 929808 - RNA, 19 nt, Artificial Sequence
  Description of Artificial Sequence: Synthetic oligonucleotide
  Sense strand starting at position 3976 of SEQ ID NO: 913471
ugaucagucauucggaaua

SEQ ID NO: 929809 - RNA, 19 nt, Artificial Sequence
  Description of Artificial Sequence: Synthetic oligonucleotide
  Antisense strand to SEQ ID NO: 929808
uauuccgaaugacugauca

SEQ ID NO: 929810 - RNA, 19 nt, Artificial Sequence
  Description of Artificial Sequence: Synthetic oligonucleotide
  Sense strand starting at position 3725 of SEQ ID NO: 913471
uauauaacggagugauucu

SEQ ID NO: 929811 - RNA, 19 nt, Artificial Sequence
  Description of Artificial Sequence: Synthetic oligonucleotide
  Antisense strand to SEQ ID NO: 929810
agaaucacuccguuauaua

SEQ ID NO: 929812 - RNA, 19 nt, Artificial Sequence
  Description of Artificial Sequence: Synthetic oligonucleotide
  Sense strand starting at position 2687 of SEQ ID NO: 913471
agaagaugguaucuguucu

SEQ ID NO: 929813 - RNA, 19 nt, Artificial Sequence
  Description of Artificial Sequence: Synthetic oligonucleotide
  Antisense strand to SEQ ID NO: 929812
agaacagauaccaucuucu

SEQ ID NO: 929814 - RNA, 19 nt, Artificial Sequence
  Description of Artificial Sequence: Synthetic oligonucleotide
  Sense strand starting at position 3563 of SEQ ID NO: 913471
gugucucccaaguaugaca

SEQ ID NO: 929815 - RNA, 19 nt, Artificial Sequence
  Description of Artificial Sequence: Synthetic oligonucleotide
  Antisense strand to SEQ ID NO: 929814
ugucauacuugggagacac

SEQ ID NO: 929816 - RNA, 19 nt, Artificial Sequence
  Description of Artificial Sequence: Synthetic oligonucleotide
  Sense strand starting at position 2524 of SEQ ID NO: 913471
auugccuaccucgauuaau

SEQ ID NO: 929817 - RNA, 19 nt, Artificial Sequence
  Description of Artificial Sequence: Synthetic oligonucleotide
  Antisense strand to SEQ ID NO: 929816
auuaaucgagguaggcaau

SEQ ID NO: 929818 - RNA, 19 nt, Artificial Sequence
  Description of Artificial Sequence: Synthetic oligonucleotide
  Sense strand starting at position 3974 of SEQ ID NO: 913471
ucugaucagucauucggaa

SEQ ID NO: 929819 - RNA, 19 nt, Artificial Sequence
  Description of Artificial Sequence: Synthetic oligonucleotide
  Antisense strand to SEQ ID NO: 929818
uuccgaaugacugaucaga

SEQ ID NO: 929820 - RNA, 19 nt, Artificial Sequence
  Description of Artificial Sequence: Synthetic oligonucleotide
  Sense strand starting at position 2350 of SEQ ID NO: 913471
ggacuugacuuugcaaagu

SEQ ID NO: 929821 - RNA, 19 nt, Artificial Sequence
  Description of Artificial Sequence: Synthetic oligonucleotide
  Antisense strand to SEQ ID NO: 929820
acuuugcaaagucaagucc

SEQ ID NO: 929822 - RNA, 19 nt, Artificial Sequence
  Description of Artificial Sequence: Synthetic oligonucleotide
  Sense strand starting at position 3967 of SEQ ID NO: 913471
ggaguucucugaucaguca

SEQ ID NO: 929823 - RNA, 19 nt, Artificial Sequence
  Description of Artificial Sequence: Synthetic oligonucleotide
  Antisense strand to SEQ ID NO: 929822
ugacugaucagagaacucc

SEQ ID NO: 929824 - RNA, 19 nt, Artificial Sequence
  Description of Artificial Sequence: Synthetic oligonucleotide
  Sense strand starting at position 3191 of SEQ ID NO: 913471
ugaaguugccauggauuau

SEQ ID NO: 929825 - RNA, 19 nt, Artificial Sequence
  Description of Artificial Sequence: Synthetic oligonucleotide
  Antisense strand to SEQ ID NO: 929824
auaauccauggcaacuuca

SEQ ID NO: 929826 - RNA, 19 nt, Artificial Sequence
  Description of Artificial Sequence: Synthetic oligonucleotide
  Sense strand starting at position 1848 of SEQ ID NO: 913471
gcaccauccuggucacaaa

SEQ ID NO: 929827 - RNA, 19 nt, Artificial Sequence
  Description of Artificial Sequence: Synthetic oligonucleotide
  Antisense strand to SEQ ID NO: 929826
uuugugaccaggauggugc

SEQ ID NO: 929828 - RNA, 19 nt, Artificial Sequence
  Description of Artificial Sequence: Synthetic oligonucleotide
  Sense strand starting at position 3430 of SEQ ID NO: 913471
gcuuuaagguaucuaauua

SEQ ID NO: 929829 - RNA, 19 nt, Artificial Sequence
  Description of Artificial Sequence: Synthetic oligonucleotide
  Antisense strand to SEQ ID NO: 929828
uaauuagauaccuuaaagc

SEQ ID NO: 929830 - RNA, 19 nt, Artificial Sequence
  Description of Artificial Sequence: Synthetic oligonucleotide
  Sense strand starting at position 3964 of SEQ ID NO: 913471
accggaguucucugaucag

SEQ ID NO: 929831 - RNA, 19 nt, Artificial Sequence
  Description of Artificial Sequence: Synthetic oligonucleotide
  Antisense strand to SEQ ID NO: 929830
cugaucagagaacuccggu

SEQ ID NO: 929832 - RNA, 19 nt, Artificial Sequence
  Description of Artificial Sequence: Synthetic oligonucleotide
  Sense strand starting at position 3834 of SEQ ID NO: 913471
guguauucaccguaaugag

SEQ ID NO: 929833 - RNA, 19 nt, Artificial Sequence
  Description of Artificial Sequence: Synthetic oligonucleotide
  Antisense strand to SEQ ID NO: 929832
cucauuacggugaauacac

SEQ ID NO: 929834 - RNA, 19 nt, Artificial Sequence
  Description of Artificial Sequence: Synthetic oligonucleotide
  Sense strand starting at position 2806 of SEQ ID NO: 913471
ggugauuauugagcuccua

SEQ ID NO: 929835 - RNA, 19 nt, Artificial Sequence
  Description of Artificial Sequence: Synthetic oligonucleotide
  Antisense strand to SEQ ID NO: 929834
uaggagcucaauaaucacc

SEQ ID NO: 929836 - RNA, 19 nt, Artificial Sequence
  Description of Artificial Sequence: Synthetic oligonucleotide
  Sense strand starting at position 3570 of SEQ ID NO: 913471
ccaaguaugacauguugua

SEQ ID NO: 929837 - RNA, 19 nt, Artificial Sequence
  Description of Artificial Sequence: Synthetic oligonucleotide
  Antisense strand to SEQ ID NO: 929836
uacaacaugucauacuugg

SEQ ID NO: 929838 - RNA, 19 nt, Artificial Sequence
  Description of Artificial Sequence: Synthetic oligonucleotide
  Sense strand starting at position 3809 of SEQ ID NO: 913471
aguucuaaucuugguugau

SEQ ID NO: 929839 - RNA, 19 nt, Artificial Sequence
  Description of Artificial Sequence: Synthetic oligonucleotide
  Antisense strand to SEQ ID NO: 929838
aucaaccaagauuagaacu

SEQ ID NO: 929840 - RNA, 19 nt, Artificial Sequence
  Description of Artificial Sequence: Synthetic oligonucleotide
  Sense strand starting at position 3810 of SEQ ID NO: 913471
guucuaaucuugguugaug

SEQ ID NO: 929841 - RNA, 19 nt, Artificial Sequence
  Description of Artificial Sequence: Synthetic oligonucleotide
  Antisense strand to SEQ ID NO: 929840
caucaaccaagauuagaac

SEQ ID NO: 929842 - RNA, 19 nt, Artificial Sequence
  Description of Artificial Sequence: Synthetic oligonucleotide
  Sense strand starting at position 2887 of SEQ ID NO: 913471
ugcagaggcuucucauuaa

SEQ ID NO: 929843 - RNA, 19 nt, Artificial Sequence
  Description of Artificial Sequence: Synthetic oligonucleotide
  Antisense strand to SEQ ID NO: 929842
uuaaugagaagccucugca

SEQ ID NO: 929844 - RNA, 19 nt, Artificial Sequence
  Description of Artificial Sequence: Synthetic oligonucleotide
  Sense strand starting at position 3639 of SEQ ID NO: 913471
cugucagugcucuaucuaa

SEQ ID NO: 929845 - RNA, 19 nt, Artificial Sequence
  Description of Artificial Sequence: Synthetic oligonucleotide
  Antisense strand to SEQ ID NO: 929844
uuagauagagcacugacag

SEQ ID NO: 929846 - RNA, 19 nt, Artificial Sequence
  Description of Artificial Sequence: Synthetic oligonucleotide
  Sense strand starting at position 3811 of SEQ ID NO: 913471
uucuaaucuugguugaugu

SEQ ID NO: 929847 - RNA, 19 nt, Artificial Sequence
  Description of Artificial Sequence: Synthetic oligonucleotide
  Antisense strand to SEQ ID NO: 929846
acaucaaccaagauuagaa

SEQ ID NO: 929848 - RNA, 19 nt, Artificial Sequence
  Description of Artificial Sequence: Synthetic oligonucleotide
  Sense strand starting at position 3905 of SEQ ID NO: 913471
cagaaaugccauuguucga

SEQ ID NO: 929849 - RNA, 19 nt, Artificial Sequence
  Description of Artificial Sequence: Synthetic oligonucleotide
  Antisense strand to SEQ ID NO: 929848
ucgaacaauggcauuucug

SEQ ID NO: 929850 - RNA, 19 nt, Artificial Sequence
  Description of Artificial Sequence: Synthetic oligonucleotide
  Sense strand starting at position 3734 of SEQ ID NO: 913471
gagugauucucugcacuug

SEQ ID NO: 929851 - RNA, 19 nt, Artificial Sequence
  Description of Artificial Sequence: Synthetic oligonucleotide
  Antisense strand to SEQ ID NO: 929850
caagugcagagaaucacuc

SEQ ID NO: 929852 - RNA, 19 nt, Artificial Sequence
  Description of Artificial Sequence: Synthetic oligonucleotide
  Sense strand starting at position 2425 of SEQ ID NO: 913471
aagacauguuuguuugguu

SEQ ID NO: 929853 - RNA, 19 nt, Artificial Sequence
  Description of Artificial Sequence: Synthetic oligonucleotide
  Antisense strand to SEQ ID NO: 929852
aaccaaacaaacaugucuu

SEQ ID NO: 929854 - RNA, 19 nt, Artificial Sequence
  Description of Artificial Sequence: Synthetic oligonucleotide
  Sense strand starting at position 143 of SEQ ID NO: 913472
ccaagagggugguugagaa

SEQ ID NO: 929855 - RNA, 19 nt, Artificial Sequence
  Description of Artificial Sequence: Synthetic oligonucleotide
  Antisense strand to SEQ ID NO: 929854
uucucaaccacccucuugg

SEQ ID NO: 929856 - RNA, 19 nt, Artificial Sequence
  Description of Artificial Sequence: Synthetic oligonucleotide
  Sense strand starting at position 3301 of SEQ ID NO: 913472
cucaaaucucuccagguga

SEQ ID NO: 929857 - RNA, 19 nt, Artificial Sequence
  Description of Artificial Sequence: Synthetic oligonucleotide
  Antisense strand to SEQ ID NO: 929856
ucaccuggagagauuugag

SEQ ID NO: 929858 - RNA, 19 nt, Artificial Sequence
  Description of Artificial Sequence: Synthetic oligonucleotide
  Sense strand starting at position 153 of SEQ ID NO: 913472
gguugagaacccugagauc

SEQ ID NO: 929859 - RNA, 19 nt, Artificial Sequence
  Description of Artificial Sequence: Synthetic oligonucleotide
  Antisense strand to SEQ ID NO: 929858
gaucucaggguucucaacc

SEQ ID NO: 929860 - RNA, 19 nt, Artificial Sequence
  Description of Artificial Sequence: Synthetic oligonucleotide
  Sense strand starting at position 3291 of SEQ ID NO: 913472
guauuugucgcucaaaucu

SEQ ID NO: 929861 - RNA, 19 nt, Artificial Sequence
  Description of Artificial Sequence: Synthetic oligonucleotide
  Antisense strand to SEQ ID NO: 929860
agauuugagcgacaaauac

SEQ ID NO: 929862 - RNA, 19 nt, Artificial Sequence
  Description of Artificial Sequence: Synthetic oligonucleotide
  Sense strand starting at position 2700 of SEQ ID NO: 913472
acggauuccaguuauccag

SEQ ID NO: 929863 - RNA, 19 nt, Artificial Sequence
  Description of Artificial Sequence: Synthetic oligonucleotide
  Antisense strand to SEQ ID NO: 929862
cuggauaacuggaauccgu

SEQ ID NO: 929864 - RNA, 19 nt, Artificial Sequence
  Description of Artificial Sequence: Synthetic oligonucleotide
  Sense strand starting at position 3128 of SEQ ID NO: 913472
cugagaagaaauuguaguu

SEQ ID NO: 929865 - RNA, 19 nt, Artificial Sequence
  Description of Artificial Sequence: Synthetic oligonucleotide
  Antisense strand to SEQ ID NO: 929864
aacuacaauuucuucucag

SEQ ID NO: 929866 - RNA, 19 nt, Artificial Sequence
  Description of Artificial Sequence: Synthetic oligonucleotide
  Sense strand starting at position 963 of SEQ ID NO: 913472
ggaaauagccuguaaguug

SEQ ID NO: 929867 - RNA, 19 nt, Artificial Sequence
  Description of Artificial Sequence: Synthetic oligonucleotide
  Antisense strand to SEQ ID NO: 929866
caacuuacaggcuauuucc

SEQ ID NO: 929868 - RNA, 19 nt, Artificial Sequence
  Description of Artificial Sequence: Synthetic oligonucleotide
  Sense strand starting at position 1414 of SEQ ID NO: 913472
cuccuaaaucucgaauagu

SEQ ID NO: 929869 - RNA, 19 nt, Artificial Sequence
  Description of Artificial Sequence: Synthetic oligonucleotide
  Antisense strand to SEQ ID NO: 929868
acuauucgagauuuaggag

SEQ ID NO: 929870 - RNA, 19 nt, Artificial Sequence
  Description of Artificial Sequence: Synthetic oligonucleotide
  Sense strand starting at position 3867 of SEQ ID NO: 913472
uugugagucaucugagaaa

SEQ ID NO: 929871 - RNA, 19 nt, Artificial Sequence
  Description of Artificial Sequence: Synthetic oligonucleotide
  Antisense strand to SEQ ID NO: 929870
uuucucagaugacucacaa

SEQ ID NO: 929872 - RNA, 19 nt, Artificial Sequence
  Description of Artificial Sequence: Synthetic oligonucleotide
  Sense strand starting at position 3189 of SEQ ID NO: 913472
aaauccuugcgugaaugga

SEQ ID NO: 929873 - RNA, 19 nt, Artificial Sequence
  Description of Artificial Sequence: Synthetic oligonucleotide
  Antisense strand to SEQ ID NO: 929872
uccauucacgcaaggauuu

SEQ ID NO: 929874 - RNA, 19 nt, Artificial Sequence
  Description of Artificial Sequence: Synthetic oligonucleotide
  Sense strand starting at position 3865 of SEQ ID NO: 913472
gauugugagucaucugaga

SEQ ID NO: 929875 - RNA, 19 nt, Artificial Sequence
  Description of Artificial Sequence: Synthetic oligonucleotide
  Antisense strand to SEQ ID NO: 929874
ucucagaugacucacaauc

SEQ ID NO: 929876 - RNA, 19 nt, Artificial Sequence
  Description of Artificial Sequence: Synthetic oligonucleotide
  Sense strand starting at position 3289 of SEQ ID NO: 913472
caguauuugucgcucaaau

SEQ ID NO: 929877 - RNA, 19 nt, Artificial Sequence
  Description of Artificial Sequence: Synthetic oligonucleotide
  Antisense strand to SEQ ID NO: 929876
auuugagcgacaaauacug

SEQ ID NO: 929878 - RNA, 19 nt, Artificial Sequence
  Description of Artificial Sequence: Synthetic oligonucleotide
  Sense strand starting at position 3935 of SEQ ID NO: 913472
uuuguaaaucuaggaucuu

SEQ ID NO: 929879 - RNA, 19 nt, Artificial Sequence
  Description of Artificial Sequence: Synthetic oligonucleotide
  Antisense strand to SEQ ID NO: 929878
aagauccuagauuuacaaa

SEQ ID NO: 929880 - RNA, 19 nt, Artificial Sequence
  Description of Artificial Sequence: Synthetic oligonucleotide
  Sense strand starting at position 961 of SEQ ID NO: 913472
gaggaaauagccuguaagu

SEQ ID NO: 929881 - RNA, 19 nt, Artificial Sequence
  Description of Artificial Sequence: Synthetic oligonucleotide
  Antisense strand to SEQ ID NO: 929880
acuuacaggcuauuuccuc

SEQ ID NO: 929882 - RNA, 19 nt, Artificial Sequence
  Description of Artificial Sequence: Synthetic oligonucleotide
  Sense strand starting at position 3863 of SEQ ID NO: 913472
ucgauugugagucaucuga

SEQ ID NO: 929883 - RNA, 19 nt, Artificial Sequence
  Description of Artificial Sequence: Synthetic oligonucleotide
  Antisense strand to SEQ ID NO: 929882
ucagaugacucacaaucga

SEQ ID NO: 929884 - RNA, 19 nt, Artificial Sequence
  Description of Artificial Sequence: Synthetic oligonucleotide
  Sense strand starting at position 817 of SEQ ID NO: 913472
uuugcuauugcagaaacuu

SEQ ID NO: 929885 - RNA, 19 nt, Artificial Sequence
  Description of Artificial Sequence: Synthetic oligonucleotide
  Antisense strand to SEQ ID NO: 929884
aaguuucugcaauagcaaa

SEQ ID NO: 929886 - RNA, 19 nt, Artificial Sequence
  Description of Artificial Sequence: Synthetic oligonucleotide
  Sense strand starting at position 3856 of SEQ ID NO: 913472
aauaaauucgauugugagu

SEQ ID NO: 929887 - RNA, 19 nt, Artificial Sequence
  Description of Artificial Sequence: Synthetic oligonucleotide
  Antisense strand to SEQ ID NO: 929886
acucacaaucgaauuuauu

SEQ ID NO: 929888 - RNA, 19 nt, Artificial Sequence
  Description of Artificial Sequence: Synthetic oligonucleotide
  Sense strand starting at position 472 of SEQ ID NO: 913472
aguuccuguagugauuauu

SEQ ID NO: 929889 - RNA, 19 nt, Artificial Sequence
  Description of Artificial Sequence: Synthetic oligonucleotide
  Antisense strand to SEQ ID NO: 929888
aauaaucacuacaggaacu

SEQ ID NO: 929890 - RNA, 19 nt, Artificial Sequence
  Description of Artificial Sequence: Synthetic oligonucleotide
  Sense strand starting at position 2702 of SEQ ID NO: 913472
ggauuccaguuauccaguu

SEQ ID NO: 929891 - RNA, 19 nt, Artificial Sequence
  Description of Artificial Sequence: Synthetic oligonucleotide
  Antisense strand to SEQ ID NO: 929890
aacuggauaacuggaaucc

SEQ ID NO: 929892 - RNA, 19 nt, Artificial Sequence
  Description of Artificial Sequence: Synthetic oligonucleotide
  Sense strand starting at position 3945 of SEQ ID NO: 913472
uaggaucuugcagguuauu

SEQ ID NO: 929893 - RNA, 19 nt, Artificial Sequence
  Description of Artificial Sequence: Synthetic oligonucleotide
  Antisense strand to SEQ ID NO: 929892
aauaaccugcaagauccua

SEQ ID NO: 929894 - RNA, 19 nt, Artificial Sequence
  Description of Artificial Sequence: Synthetic oligonucleotide
  Sense strand starting at position 3322 of SEQ ID NO: 913472
augcuuccuugguuugaaa

SEQ ID NO: 929895 - RNA, 19 nt, Artificial Sequence
  Description of Artificial Sequence: Synthetic oligonucleotide
  Antisense strand to SEQ ID NO: 929894
uuucaaaccaaggaagcau

SEQ ID NO: 929896 - RNA, 19 nt, Artificial Sequence
  Description of Artificial Sequence: Synthetic oligonucleotide
  Sense strand starting at position 3951 of SEQ ID NO: 913472
cuugcagguuauuccugaa

SEQ ID NO: 929897 - RNA, 19 nt, Artificial Sequence
  Description of Artificial Sequence: Synthetic oligonucleotide
  Antisense strand to SEQ ID NO: 929896
uucaggaauaaccugcaag

SEQ ID NO: 929898 - RNA, 19 nt, Artificial Sequence
  Description of Artificial Sequence: Synthetic oligonucleotide
  Sense strand starting at position 3321 of SEQ ID NO: 913472
gaugcuuccuugguuugaa

SEQ ID NO: 929899 - RNA, 19 nt, Artificial Sequence
  Description of Artificial Sequence: Synthetic oligonucleotide
  Antisense strand to SEQ ID NO: 929898
uucaaaccaaggaagcauc

SEQ ID NO: 929900 - RNA, 19 nt, Artificial Sequence
  Description of Artificial Sequence: Synthetic oligonucleotide
  Sense strand starting at position 826 of SEQ ID NO: 913472
gcagaaacuuuagcuucuu

SEQ ID NO: 929901 - RNA, 19 nt, Artificial Sequence
  Description of Artificial Sequence: Synthetic oligonucleotide
  Antisense strand to SEQ ID NO: 929900
aagaagcuaaaguuucugc

SEQ ID NO: 929902 - RNA, 19 nt, Artificial Sequence
  Description of Artificial Sequence: Synthetic oligonucleotide
  Sense strand starting at position 558 of SEQ ID NO: 913472
cccagcuauugucugaacu

SEQ ID NO: 929903 - RNA, 19 nt, Artificial Sequence
  Description of Artificial Sequence: Synthetic oligonucleotide
  Antisense strand to SEQ ID NO: 929902
aguucagacaauagcuggg

SEQ ID NO: 929904 - RNA, 19 nt, Artificial Sequence
  Description of Artificial Sequence: Synthetic oligonucleotide
  Sense strand starting at position 3320 of SEQ ID NO: 913472
ggaugcuuccuugguuuga

SEQ ID NO: 929905 - RNA, 19 nt, Artificial Sequence
  Description of Artificial Sequence: Synthetic oligonucleotide
  Antisense strand to SEQ ID NO: 929904
ucaaaccaaggaagcaucc

SEQ ID NO: 929906 - RNA, 19 nt, Artificial Sequence
  Description of Artificial Sequence: Synthetic oligonucleotide
  Sense strand starting at position 3187 of SEQ ID NO: 913472
ccaaauccuugcgugaaug

SEQ ID NO: 929907 - RNA, 19 nt, Artificial Sequence
  Description of Artificial Sequence: Synthetic oligonucleotide
  Antisense strand to SEQ ID NO: 929906
cauucacgcaaggauuugg

SEQ ID NO: 929908 - RNA, 19 nt, Artificial Sequence
  Description of Artificial Sequence: Synthetic oligonucleotide
  Sense strand starting at position 559 of SEQ ID NO: 913472
ccagcuauugucugaacuu

SEQ ID NO: 929909 - RNA, 19 nt, Artificial Sequence
  Description of Artificial Sequence: Synthetic oligonucleotide
  Antisense strand to SEQ ID NO: 929908
aaguucagacaauagcugg

SEQ ID NO: 929910 - RNA, 19 nt, Artificial Sequence
  Description of Artificial Sequence: Synthetic oligonucleotide
  Sense strand starting at position 3861 of SEQ ID NO: 913472
auucgauugugagucaucu

SEQ ID NO: 929911 - RNA, 19 nt, Artificial Sequence
  Description of Artificial Sequence: Synthetic oligonucleotide
  Antisense strand to SEQ ID NO: 929910
agaugacucacaaucgaau

SEQ ID NO: 929912 - RNA, 19 nt, Artificial Sequence
  Description of Artificial Sequence: Synthetic oligonucleotide
  Sense strand starting at position 1031 of SEQ ID NO: 913472
gaauaaagaucuggaaaug

SEQ ID NO: 929913 - RNA, 19 nt, Artificial Sequence
  Description of Artificial Sequence: Synthetic oligonucleotide
  Antisense strand to SEQ ID NO: 929912
cauuuccagaucuuuauuc

SEQ ID NO: 929914 - RNA, 19 nt, Artificial Sequence
  Description of Artificial Sequence: Synthetic oligonucleotide
  Sense strand starting at position 384 of SEQ ID NO: 913472
agacuaagauaauaugcaa

SEQ ID NO: 929915 - RNA, 19 nt, Artificial Sequence
  Description of Artificial Sequence: Synthetic oligonucleotide
  Antisense strand to SEQ ID NO: 929914
uugcauauuaucuuagucu

SEQ ID NO: 929916 - RNA, 19 nt, Artificial Sequence
  Description of Artificial Sequence: Synthetic oligonucleotide
  Sense strand starting at position 379 of SEQ ID NO: 913472
ccacgagacuaagauaaua

SEQ ID NO: 929917 - RNA, 19 nt, Artificial Sequence
  Description of Artificial Sequence: Synthetic oligonucleotide
  Antisense strand to SEQ ID NO: 929916
uauuaucuuagucucgugg

SEQ ID NO: 929918 - RNA, 19 nt, Artificial Sequence
  Description of Artificial Sequence: Synthetic oligonucleotide
  Sense strand starting at position 3184 of SEQ ID NO: 913472
ccaccaaauccuugcguga

SEQ ID NO: 929919 - RNA, 19 nt, Artificial Sequence
  Description of Artificial Sequence: Synthetic oligonucleotide
  Antisense strand to SEQ ID NO: 929918
ucacgcaaggauuuggugg

SEQ ID NO: 929920 - RNA, 19 nt, Artificial Sequence
  Description of Artificial Sequence: Synthetic oligonucleotide
  Sense strand starting at position 1199 of SEQ ID NO: 913472
gcuccaguguacucagacu

SEQ ID NO: 929921 - RNA, 19 nt, Artificial Sequence
  Description of Artificial Sequence: Synthetic oligonucleotide
  Antisense strand to SEQ ID NO: 929920
agucugaguacacuggagc

SEQ ID NO: 929922 - RNA, 19 nt, Artificial Sequence
  Description of Artificial Sequence: Synthetic oligonucleotide
  Sense strand starting at position 3870 of SEQ ID NO: 913472
ugagucaucugagaaacaa

SEQ ID NO: 929923 - RNA, 19 nt, Artificial Sequence
  Description of Artificial Sequence: Synthetic oligonucleotide
  Antisense strand to SEQ ID NO: 929922
uuguuucucagaugacuca

SEQ ID NO: 929924 - RNA, 19 nt, Artificial Sequence
  Description of Artificial Sequence: Synthetic oligonucleotide
  Sense strand starting at position 785 of SEQ ID NO: 913472
ggcucauggcacugcuaga

SEQ ID NO: 929925 - RNA, 19 nt, Artificial Sequence
  Description of Artificial Sequence: Synthetic oligonucleotide
  Antisense strand to SEQ ID NO: 929924
ucuagcagugccaugagcc

SEQ ID NO: 929926 - RNA, 19 nt, Artificial Sequence
  Description of Artificial Sequence: Synthetic oligonucleotide
  Sense strand starting at position 3211 of SEQ ID NO: 913472
caugcuuaguggucggaua

SEQ ID NO: 929927 - RNA, 19 nt, Artificial Sequence
  Description of Artificial Sequence: Synthetic oligonucleotide
  Antisense strand to SEQ ID NO: 929926
uauccgaccacuaagcaug

SEQ ID NO: 929928 - RNA, 19 nt, Artificial Sequence
  Description of Artificial Sequence: Synthetic oligonucleotide
  Sense strand starting at position 403 of SEQ ID NO: 913472
cugucaaccuuugccgaua

SEQ ID NO: 929929 - RNA, 19 nt, Artificial Sequence
  Description of Artificial Sequence: Synthetic oligonucleotide
  Antisense strand to SEQ ID NO: 929928
uaucggcaaagguugacag

SEQ ID NO: 929930 - RNA, 19 nt, Artificial Sequence
  Description of Artificial Sequence: Synthetic oligonucleotide
  Sense strand starting at position 404 of SEQ ID NO: 913472
ugucaaccuuugccgauau

SEQ ID NO: 929931 - RNA, 19 nt, Artificial Sequence
  Description of Artificial Sequence: Synthetic oligonucleotide
  Antisense strand to SEQ ID NO: 929930
auaucggcaaagguugaca

SEQ ID NO: 929932 - RNA, 19 nt, Artificial Sequence
  Description of Artificial Sequence: Synthetic oligonucleotide
  Sense strand starting at position 807 of SEQ ID NO: 913472
gggccuuuacuuugcuauu

SEQ ID NO: 929933 - RNA, 19 nt, Artificial Sequence
  Description of Artificial Sequence: Synthetic oligonucleotide
  Antisense strand to SEQ ID NO: 929932
aauagcaaaguaaaggccc

SEQ ID NO: 929934 - RNA, 19 nt, Artificial Sequence
  Description of Artificial Sequence: Synthetic oligonucleotide
  Sense strand starting at position 2794 of SEQ ID NO: 913473
cucaaaucucuccagguga

SEQ ID NO: 929935 - RNA, 19 nt, Artificial Sequence
  Description of Artificial Sequence: Synthetic oligonucleotide
  Antisense strand to SEQ ID NO: 929934
ucaccuggagagauuugag

SEQ ID NO: 929936 - RNA, 19 nt, Artificial Sequence
  Description of Artificial Sequence: Synthetic oligonucleotide
  Sense strand starting at position 2784 of SEQ ID NO: 913473
guauuugucgcucaaaucu

SEQ ID NO: 929937 - RNA, 19 nt, Artificial Sequence
  Description of Artificial Sequence: Synthetic oligonucleotide
  Antisense strand to SEQ ID NO: 929936
agauuugagcgacaaauac

SEQ ID NO: 929938 - RNA, 19 nt, Artificial Sequence
  Description of Artificial Sequence: Synthetic oligonucleotide
  Sense strand starting at position 2193 of SEQ ID NO: 913473
acggauuccaguuauccag

SEQ ID NO: 929939 - RNA, 19 nt, Artificial Sequence
  Description of Artificial Sequence: Synthetic oligonucleotide
  Antisense strand to SEQ ID NO: 929938
cuggauaacuggaauccgu

SEQ ID NO: 929940 - RNA, 19 nt, Artificial Sequence
  Description of Artificial Sequence: Synthetic oligonucleotide
  Sense strand starting at position 2621 of SEQ ID NO: 913473
cugagaagaaauuguaguu

SEQ ID NO: 929941 - RNA, 19 nt, Artificial Sequence
  Description of Artificial Sequence: Synthetic oligonucleotide
  Antisense strand to SEQ ID NO: 929940
aacuacaauuucuucucag

SEQ ID NO: 929942 - RNA, 19 nt, Artificial Sequence
  Description of Artificial Sequence: Synthetic oligonucleotide
  Sense strand starting at position 456 of SEQ ID NO: 913473
ggaaauagccuguaaguug

SEQ ID NO: 929943 - RNA, 19 nt, Artificial Sequence
  Description of Artificial Sequence: Synthetic oligonucleotide
  Antisense strand to SEQ ID NO: 929942
caacuuacaggcuauuucc

SEQ ID NO: 929944 - RNA, 19 nt, Artificial Sequence
  Description of Artificial Sequence: Synthetic oligonucleotide
  Sense strand starting at position 907 of SEQ ID NO: 913473
cuccuaaaucucgaauagu

SEQ ID NO: 929945 - RNA, 19 nt, Artificial Sequence
  Description of Artificial Sequence: Synthetic oligonucleotide
  Antisense strand to SEQ ID NO: 929944
acuauucgagauuuaggag

SEQ ID NO: 929946 - RNA, 19 nt, Artificial Sequence
  Description of Artificial Sequence: Synthetic oligonucleotide
  Sense strand starting at position 3360 of SEQ ID NO: 913473
uugugagucaucugagaaa

SEQ ID NO: 929947 - RNA, 19 nt, Artificial Sequence
  Description of Artificial Sequence: Synthetic oligonucleotide
  Antisense strand to SEQ ID NO: 929946
uuucucagaugacucacaa

SEQ ID NO: 929948 - RNA, 19 nt, Artificial Sequence
  Description of Artificial Sequence: Synthetic oligonucleotide
  Sense strand starting at position 2682 of SEQ ID NO: 913473
aaauccuugcgugaaugga

SEQ ID NO: 929949 - RNA, 19 nt, Artificial Sequence
  Description of Artificial Sequence: Synthetic oligonucleotide
  Antisense strand to SEQ ID NO: 929948
uccauucacgcaaggauuu

SEQ ID NO: 929950 - RNA, 19 nt, Artificial Sequence
  Description of Artificial Sequence: Synthetic oligonucleotide
  Sense strand starting at position 3358 of SEQ ID NO: 913473
gauugugagucaucugaga

SEQ ID NO: 929951 - RNA, 19 nt, Artificial Sequence
  Description of Artificial Sequence: Synthetic oligonucleotide
  Antisense strand to SEQ ID NO: 929950
ucucagaugacucacaauc

SEQ ID NO: 929952 - RNA, 19 nt, Artificial Sequence
  Description of Artificial Sequence: Synthetic oligonucleotide
  Sense strand starting at position 2782 of SEQ ID NO: 913473
caguauuugucgcucaaau

SEQ ID NO: 929953 - RNA, 19 nt, Artificial Sequence
  Description of Artificial Sequence: Synthetic oligonucleotide
  Antisense strand to SEQ ID NO: 929952
auuugagcgacaaauacug

SEQ ID NO: 929954 - RNA, 19 nt, Artificial Sequence
  Description of Artificial Sequence: Synthetic oligonucleotide
  Sense strand starting at position 3428 of SEQ ID NO: 913473
uuuguaaaucuaggaucuu

SEQ ID NO: 929955 - RNA, 19 nt, Artificial Sequence
  Description of Artificial Sequence: Synthetic oligonucleotide
  Antisense strand to SEQ ID NO: 929954
aagauccuagauuuacaaa

SEQ ID NO: 929956 - RNA, 19 nt, Artificial Sequence
  Description of Artificial Sequence: Synthetic oligonucleotide
  Sense strand starting at position 3553 of SEQ ID NO: 913473
ccgucacagauuugcuagu

SEQ ID NO: 929957 - RNA, 19 nt, Artificial Sequence
  Description of Artificial Sequence: Synthetic oligonucleotide
  Antisense strand to SEQ ID NO: 929956
acuagcaaaucugugacgg

SEQ ID NO: 929958 - RNA, 19 nt, Artificial Sequence
  Description of Artificial Sequence: Synthetic oligonucleotide
  Sense strand starting at position 454 of SEQ ID NO: 913473
gaggaaauagccuguaagu

SEQ ID NO: 929959 - RNA, 19 nt, Artificial Sequence
  Description of Artificial Sequence: Synthetic oligonucleotide
  Antisense strand to SEQ ID NO: 929958
acuuacaggcuauuuccuc

SEQ ID NO: 929960 - RNA, 19 nt, Artificial Sequence
  Description of Artificial Sequence: Synthetic oligonucleotide
  Sense strand starting at position 3356 of SEQ ID NO: 913473
ucgauugugagucaucuga

SEQ ID NO: 929961 - RNA, 19 nt, Artificial Sequence
  Description of Artificial Sequence: Synthetic oligonucleotide
  Antisense strand to SEQ ID NO: 929960
ucagaugacucacaaucga

SEQ ID NO: 929962 - RNA, 19 nt, Artificial Sequence
  Description of Artificial Sequence: Synthetic oligonucleotide
  Sense strand starting at position 310 of SEQ ID NO: 913473
uuugcuauugcagaaacuu

SEQ ID NO: 929963 - RNA, 19 nt, Artificial Sequence
  Description of Artificial Sequence: Synthetic oligonucleotide
  Antisense strand to SEQ ID NO: 929962
aaguuucugcaauagcaaa

SEQ ID NO: 929964 - RNA, 19 nt, Artificial Sequence
  Description of Artificial Sequence: Synthetic oligonucleotide
  Sense strand starting at position 3349 of SEQ ID NO: 913473
aauaaauucgauugugagu

SEQ ID NO: 929965 - RNA, 19 nt, Artificial Sequence
  Description of Artificial Sequence: Synthetic oligonucleotide
  Antisense strand to SEQ ID NO: 929964
acucacaaucgaauuuauu

SEQ ID NO: 929966 - RNA, 19 nt, Artificial Sequence
  Description of Artificial Sequence: Synthetic oligonucleotide
  Sense strand starting at position 2195 of SEQ ID NO: 913473
ggauuccaguuauccaguu

SEQ ID NO: 929967 - RNA, 19 nt, Artificial Sequence
  Description of Artificial Sequence: Synthetic oligonucleotide
  Antisense strand to SEQ ID NO: 929966
aacuggauaacuggaaucc

SEQ ID NO: 929968 - RNA, 19 nt, Artificial Sequence
  Description of Artificial Sequence: Synthetic oligonucleotide
  Sense strand starting at position 3438 of SEQ ID NO: 913473
uaggaucuugcagguuauu

SEQ ID NO: 929969 - RNA, 19 nt, Artificial Sequence
  Description of Artificial Sequence: Synthetic oligonucleotide
  Antisense strand to SEQ ID NO: 929968
aauaaccugcaagauccua

SEQ ID NO: 929970 - RNA, 19 nt, Artificial Sequence
  Description of Artificial Sequence: Synthetic oligonucleotide
  Sense strand starting at position 2815 of SEQ ID NO: 913473
augcuuccuugguuugaaa

SEQ ID NO: 929971 - RNA, 19 nt, Artificial Sequence
  Description of Artificial Sequence: Synthetic oligonucleotide
  Antisense strand to SEQ ID NO: 929970
uuucaaaccaaggaagcau

SEQ ID NO: 929972 - RNA, 19 nt, Artificial Sequence
  Description of Artificial Sequence: Synthetic oligonucleotide
  Sense strand starting at position 3444 of SEQ ID NO: 913473
cuugcagguuauuccugaa

SEQ ID NO: 929973 - RNA, 19 nt, Artificial Sequence
  Description of Artificial Sequence: Synthetic oligonucleotide
  Antisense strand to SEQ ID NO: 929972
uucaggaauaaccugcaag

SEQ ID NO: 929974 - RNA, 19 nt, Artificial Sequence
  Description of Artificial Sequence: Synthetic oligonucleotide
  Sense strand starting at position 2814 of SEQ ID NO: 913473
gaugcuuccuugguuugaa

SEQ ID NO: 929975 - RNA, 19 nt, Artificial Sequence
  Description of Artificial Sequence: Synthetic oligonucleotide
  Antisense strand to SEQ ID NO: 929974
uucaaaccaaggaagcauc

SEQ ID NO: 929976 - RNA, 19 nt, Artificial Sequence
  Description of Artificial Sequence: Synthetic oligonucleotide
  Sense strand starting at position 319 of SEQ ID NO: 913473
gcagaaacuuuagcuucuu

SEQ ID NO: 929977 - RNA, 19 nt, Artificial Sequence
  Description of Artificial Sequence: Synthetic oligonucleotide
  Antisense strand to SEQ ID NO: 929976
aagaagcuaaaguuucugc

SEQ ID NO: 929978 - RNA, 19 nt, Artificial Sequence
  Description of Artificial Sequence: Synthetic oligonucleotide
  Sense strand starting at position 51 of SEQ ID NO: 913473
cccagcuauugucugaacu

SEQ ID NO: 929979 - RNA, 19 nt, Artificial Sequence
  Description of Artificial Sequence: Synthetic oligonucleotide
  Antisense strand to SEQ ID NO: 929978
aguucagacaauagcuggg

SEQ ID NO: 929980 - RNA, 19 nt, Artificial Sequence
  Description of Artificial Sequence: Synthetic oligonucleotide
  Sense strand starting at position 2813 of SEQ ID NO: 913473
ggaugcuuccuugguuuga

SEQ ID NO: 929981 - RNA, 19 nt, Artificial Sequence
  Description of Artificial Sequence: Synthetic oligonucleotide
  Antisense strand to SEQ ID NO: 929980
ucaaaccaaggaagcaucc

SEQ ID NO: 929982 - RNA, 19 nt, Artificial Sequence
  Description of Artificial Sequence: Synthetic oligonucleotide
  Sense strand starting at position 2680 of SEQ ID NO: 913473
ccaaauccuugcgugaaug

SEQ ID NO: 929983 - RNA, 19 nt, Artificial Sequence
  Description of Artificial Sequence: Synthetic oligonucleotide
  Antisense strand to SEQ ID NO: 929982
cauucacgcaaggauuugg

SEQ ID NO: 929984 - RNA, 19 nt, Artificial Sequence
  Description of Artificial Sequence: Synthetic oligonucleotide
  Sense strand starting at position 52 of SEQ ID NO: 913473
ccagcuauugucugaacuu

SEQ ID NO: 929985 - RNA, 19 nt, Artificial Sequence
  Description of Artificial Sequence: Synthetic oligonucleotide
  Antisense strand to SEQ ID NO: 929984
aaguucagacaauagcugg

SEQ ID NO: 929986 - RNA, 19 nt, Artificial Sequence
  Description of Artificial Sequence: Synthetic oligonucleotide
  Sense strand starting at position 3706 of SEQ ID NO: 913473
cucguuauuuaacauuaga

SEQ ID NO: 929987 - RNA, 19 nt, Artificial Sequence
  Description of Artificial Sequence: Synthetic oligonucleotide
  Antisense strand to SEQ ID NO: 929986
ucuaauguuaaauaacgag

SEQ ID NO: 929988 - RNA, 19 nt, Artificial Sequence
  Description of Artificial Sequence: Synthetic oligonucleotide
  Sense strand starting at position 3354 of SEQ ID NO: 913473
auucgauugugagucaucu

SEQ ID NO: 929989 - RNA, 19 nt, Artificial Sequence
  Description of Artificial Sequence: Synthetic oligonucleotide
  Antisense strand to SEQ ID NO: 929988
agaugacucacaaucgaau

SEQ ID NO: 929990 - RNA, 19 nt, Artificial Sequence
  Description of Artificial Sequence: Synthetic oligonucleotide
  Sense strand starting at position 524 of SEQ ID NO: 913473
gaauaaagaucuggaaaug

SEQ ID NO: 929991 - RNA, 19 nt, Artificial Sequence
  Description of Artificial Sequence: Synthetic oligonucleotide
  Antisense strand to SEQ ID NO: 929990
cauuuccagaucuuuauuc

SEQ ID NO: 929992 - RNA, 19 nt, Artificial Sequence
  Description of Artificial Sequence: Synthetic oligonucleotide
  Sense strand starting at position 2677 of SEQ ID NO: 913473
ccaccaaauccuugcguga

SEQ ID NO: 929993 - RNA, 19 nt, Artificial Sequence
  Description of Artificial Sequence: Synthetic oligonucleotide
  Antisense strand to SEQ ID NO: 929992
ucacgcaaggauuuggugg

SEQ ID NO: 929994 - RNA, 19 nt, Artificial Sequence
  Description of Artificial Sequence: Synthetic oligonucleotide
  Sense strand starting at position 692 of SEQ ID NO: 913473
gcuccaguguacucagacu

SEQ ID NO: 929995 - RNA, 19 nt, Artificial Sequence
  Description of Artificial Sequence: Synthetic oligonucleotide
  Antisense strand to SEQ ID NO: 929994
agucugaguacacuggagc

SEQ ID NO: 929996 - RNA, 19 nt, Artificial Sequence
  Description of Artificial Sequence: Synthetic oligonucleotide
  Sense strand starting at position 3363 of SEQ ID NO: 913473
ugagucaucugagaaacaa

SEQ ID NO: 929997 - RNA, 19 nt, Artificial Sequence
  Description of Artificial Sequence: Synthetic oligonucleotide
  Antisense strand to SEQ ID NO: 929996
uuguuucucagaugacuca

SEQ ID NO: 929998 - RNA, 19 nt, Artificial Sequence
  Description of Artificial Sequence: Synthetic oligonucleotide
  Sense strand starting at position 278 of SEQ ID NO: 913473
ggcucauggcacugcuaga

SEQ ID NO: 929999 - RNA, 19 nt, Artificial Sequence
  Description of Artificial Sequence: Synthetic oligonucleotide
  Antisense strand to SEQ ID NO: 929998
ucuagcagugccaugagcc

SEQ ID NO: 930000 - RNA, 19 nt, Artificial Sequence
  Description of Artificial Sequence: Synthetic oligonucleotide
  Sense strand starting at position 2704 of SEQ ID NO: 913473
caugcuuaguggucggaua

SEQ ID NO: 930001 - RNA, 19 nt, Artificial Sequence
  Description of Artificial Sequence: Synthetic oligonucleotide
  Antisense strand to SEQ ID NO: 930000
uauccgaccacuaagcaug

SEQ ID NO: 930002 - RNA, 19 nt, Artificial Sequence
  Description of Artificial Sequence: Synthetic oligonucleotide
  Sense strand starting at position 300 of SEQ ID NO: 913473
gggccuuuacuuugcuauu

SEQ ID NO: 930003 - RNA, 19 nt, Artificial Sequence
  Description of Artificial Sequence: Synthetic oligonucleotide
  Antisense strand to SEQ ID NO: 930002
aauagcaaaguaaaggccc

SEQ ID NO: 930004 - RNA, 19 nt, Artificial Sequence
  Description of Artificial Sequence: Synthetic oligonucleotide
  Sense strand starting at position 3470 of SEQ ID NO: 913473
gaaucaguguuagaacuaa

SEQ ID NO: 930005 - RNA, 19 nt, Artificial Sequence
  Description of Artificial Sequence: Synthetic oligonucleotide
  Antisense strand to SEQ ID NO: 930004
uuaguucuaacacugauuc

SEQ ID NO: 930006 - RNA, 19 nt, Artificial Sequence
  Description of Artificial Sequence: Synthetic oligonucleotide
  Sense strand starting at position 782 of SEQ ID NO: 913473
caccgugguucccauuuaa

SEQ ID NO: 930007 - RNA, 19 nt, Artificial Sequence
  Description of Artificial Sequence: Synthetic oligonucleotide
  Antisense strand to SEQ ID NO: 930006
uuaaaugggaaccacggug

SEQ ID NO: 930008 - RNA, 19 nt, Artificial Sequence
  Description of Artificial Sequence: Synthetic oligonucleotide
  Sense strand starting at position 464 of SEQ ID NO: 913473
ccuguaaguugagacaaca

SEQ ID NO: 930009 - RNA, 19 nt, Artificial Sequence
  Description of Artificial Sequence: Synthetic oligonucleotide
  Antisense strand to SEQ ID NO: 930008
uguugucucaacuuacagg

SEQ ID NO: 930010 - RNA, 19 nt, Artificial Sequence
  Description of Artificial Sequence: Synthetic oligonucleotide
  Sense strand starting at position 3559 of SEQ ID NO: 913473
cagauuugcuaguggcaga

SEQ ID NO: 930011 - RNA, 19 nt, Artificial Sequence
  Description of Artificial Sequence: Synthetic oligonucleotide
  Antisense strand to SEQ ID NO: 930010
ucugccacuagcaaaucug

SEQ ID NO: 930012 - RNA, 19 nt, Artificial Sequence
  Description of Artificial Sequence: Synthetic oligonucleotide
  Sense strand starting at position 3457 of SEQ ID NO: 913473
ccugaaauauagugaauca

SEQ ID NO: 930013 - RNA, 19 nt, Artificial Sequence
  Description of Artificial Sequence: Synthetic oligonucleotide
  Antisense strand to SEQ ID NO: 930012
ugauucacuauauuucagg

SEQ ID NO: 930014 - RNA, 19 nt, Artificial Sequence
  Description of Artificial Sequence: Synthetic oligonucleotide
  Sense strand starting at position 991 of SEQ ID NO: 913474
uagaaugacuuauuaagug

SEQ ID NO: 930015 - RNA, 19 nt, Artificial Sequence
  Description of Artificial Sequence: Synthetic oligonucleotide
  Antisense strand to SEQ ID NO: 930014
cacuuaauaagucauucua

SEQ ID NO: 930016 - RNA, 19 nt, Artificial Sequence
  Description of Artificial Sequence: Synthetic oligonucleotide
  Sense strand starting at position 2668 of SEQ ID NO: 913474
aagugaacgauccaggagu

SEQ ID NO: 930017 - RNA, 19 nt, Artificial Sequence
  Description of Artificial Sequence: Synthetic oligonucleotide
  Antisense strand to SEQ ID NO: 930016
acuccuggaucguucacuu

SEQ ID NO: 930018 - RNA, 19 nt, Artificial Sequence
  Description of Artificial Sequence: Synthetic oligonucleotide
  Sense strand starting at position 2294 of SEQ ID NO: 913474
ggagcacaaucuuuaagag

SEQ ID NO: 930019 - RNA, 19 nt, Artificial Sequence
  Description of Artificial Sequence: Synthetic oligonucleotide
  Antisense strand to SEQ ID NO: 930018
cucuuaaagauugugcucc

SEQ ID NO: 930020 - RNA, 19 nt, Artificial Sequence
  Description of Artificial Sequence: Synthetic oligonucleotide
  Sense strand starting at position 3929 of SEQ ID NO: 913474
gugcuugcugcuccugaaa

SEQ ID NO: 930021 - RNA, 19 nt, Artificial Sequence
  Description of Artificial Sequence: Synthetic oligonucleotide
  Antisense strand to SEQ ID NO: 930020
uuucaggagcagcaagcac

SEQ ID NO: 930022 - RNA, 19 nt, Artificial Sequence
  Description of Artificial Sequence: Synthetic oligonucleotide
  Sense strand starting at position 824 of SEQ ID NO: 913474
aagugcaaaguccaagaua

SEQ ID NO: 930023 - RNA, 19 nt, Artificial Sequence
  Description of Artificial Sequence: Synthetic oligonucleotide
  Antisense strand to SEQ ID NO: 930022
uaucuuggacuuugcacuu

SEQ ID NO: 930024 - RNA, 19 nt, Artificial Sequence
  Description of Artificial Sequence: Synthetic oligonucleotide
  Sense strand starting at position 2654 of SEQ ID NO: 913474
aaugaucuugcauaaagug

SEQ ID NO: 930025 - RNA, 19 nt, Artificial Sequence
  Description of Artificial Sequence: Synthetic oligonucleotide
  Antisense strand to SEQ ID NO: 930024
cacuuuaugcaagaucauu

SEQ ID NO: 930026 - RNA, 19 nt, Artificial Sequence
  Description of Artificial Sequence: Synthetic oligonucleotide
  Sense strand starting at position 2295 of SEQ ID NO: 913474
gagcacaaucuuuaagagu

SEQ ID NO: 930027 - RNA, 19 nt, Artificial Sequence
  Description of Artificial Sequence: Synthetic oligonucleotide
  Antisense strand to SEQ ID NO: 930026
acucuuaaagauugugcuc

SEQ ID NO: 930028 - RNA, 19 nt, Artificial Sequence
  Description of Artificial Sequence: Synthetic oligonucleotide
  Sense strand starting at position 3666 of SEQ ID NO: 913474
acauuuccugucugugauc

SEQ ID NO: 930029 - RNA, 19 nt, Artificial Sequence
  Description of Artificial Sequence: Synthetic oligonucleotide
  Antisense strand to SEQ ID NO: 930028
gaucacagacaggaaaugu

SEQ ID NO: 930030 - RNA, 19 nt, Artificial Sequence
  Description of Artificial Sequence: Synthetic oligonucleotide
  Sense strand starting at position 1500 of SEQ ID NO: 913474
ccaucacuggaguggauaa

SEQ ID NO: 930031 - RNA, 19 nt, Artificial Sequence
  Description of Artificial Sequence: Synthetic oligonucleotide
  Antisense strand to SEQ ID NO: 930030
uuauccacuccagugaugg

SEQ ID NO: 930032 - RNA, 19 nt, Artificial Sequence
  Description of Artificial Sequence: Synthetic oligonucleotide
  Sense strand starting at position 977 of SEQ ID NO: 913474
cuacaauaucuugguagaa

SEQ ID NO: 930033 - RNA, 19 nt, Artificial Sequence
  Description of Artificial Sequence: Synthetic oligonucleotide
  Antisense strand to SEQ ID NO: 930032
uucuaccaagauauuguag

SEQ ID NO: 930034 - RNA, 19 nt, Artificial Sequence
  Description of Artificial Sequence: Synthetic oligonucleotide
  Sense strand starting at position 778 of SEQ ID NO: 913474
uuacuuugcgaagaaacau

SEQ ID NO: 930035 - RNA, 19 nt, Artificial Sequence
  Description of Artificial Sequence: Synthetic oligonucleotide
  Antisense strand to SEQ ID NO: 930034
auguuucuucgcaaaguaa

SEQ ID NO: 930036 - RNA, 19 nt, Artificial Sequence
  Description of Artificial Sequence: Synthetic oligonucleotide
  Sense strand starting at position 1224 of SEQ ID NO: 913474
cuaacuucuuagguagaga

SEQ ID NO: 930037 - RNA, 19 nt, Artificial Sequence
  Description of Artificial Sequence: Synthetic oligonucleotide
  Antisense strand to SEQ ID NO: 930036
ucucuaccuaagaaguuag

SEQ ID NO: 930038 - RNA, 19 nt, Artificial Sequence
  Description of Artificial Sequence: Synthetic oligonucleotide
  Sense strand starting at position 987 of SEQ ID NO: 913474
uugguagaaugacuuauua

SEQ ID NO: 930039 - RNA, 19 nt, Artificial Sequence
  Description of Artificial Sequence: Synthetic oligonucleotide
  Antisense strand to SEQ ID NO: 930038
uaauaagucauucuaccaa

SEQ ID NO: 930040 - RNA, 19 nt, Artificial Sequence
  Description of Artificial Sequence: Synthetic oligonucleotide
  Sense strand starting at position 440 of SEQ ID NO: 913474
cagaucaacggguaugagu

SEQ ID NO: 930041 - RNA, 19 nt, Artificial Sequence
  Description of Artificial Sequence: Synthetic oligonucleotide
  Antisense strand to SEQ ID NO: 930040
acucauacccguugaucug

SEQ ID NO: 930042 - RNA, 19 nt, Artificial Sequence
  Description of Artificial Sequence: Synthetic oligonucleotide
  Sense strand starting at position 2389 of SEQ ID NO: 913474
guugaugagcaucacacau

SEQ ID NO: 930043 - RNA, 19 nt, Artificial Sequence
  Description of Artificial Sequence: Synthetic oligonucleotide
  Antisense strand to SEQ ID NO: 930042
augugugaugcucaucaac

SEQ ID NO: 930044 - RNA, 19 nt, Artificial Sequence
  Description of Artificial Sequence: Synthetic oligonucleotide
  Sense strand starting at position 1575 of SEQ ID NO: 913474
uuucuauauuuggaaagga

SEQ ID NO: 930045 - RNA, 19 nt, Artificial Sequence
  Description of Artificial Sequence: Synthetic oligonucleotide
  Antisense strand to SEQ ID NO: 930044
uccuuuccaaauauagaaa

SEQ ID NO: 930046 - RNA, 19 nt, Artificial Sequence
  Description of Artificial Sequence: Synthetic oligonucleotide
  Sense strand starting at position 2818 of SEQ ID NO: 913474
aggguaugaagcugauaca

SEQ ID NO: 930047 - RNA, 19 nt, Artificial Sequence
  Description of Artificial Sequence: Synthetic oligonucleotide
  Antisense strand to SEQ ID NO: 930046
uguaucagcuucauacccu

SEQ ID NO: 930048 - RNA, 19 nt, Artificial Sequence
  Description of Artificial Sequence: Synthetic oligonucleotide
  Sense strand starting at position 354 of SEQ ID NO: 913474
gcagaagaugcugaagcau

SEQ ID NO: 930049 - RNA, 19 nt, Artificial Sequence
  Description of Artificial Sequence: Synthetic oligonucleotide
  Antisense strand to SEQ ID NO: 930048
augcuucagcaucuucugc

SEQ ID NO: 930050 - RNA, 19 nt, Artificial Sequence
  Description of Artificial Sequence: Synthetic oligonucleotide
  Sense strand starting at position 438 of SEQ ID NO: 913474
uccagaucaacggguauga

SEQ ID NO: 930051 - RNA, 19 nt, Artificial Sequence
  Description of Artificial Sequence: Synthetic oligonucleotide
  Antisense strand to SEQ ID NO: 930050
ucauacccguugaucugga

SEQ ID NO: 930052 - RNA, 19 nt, Artificial Sequence
  Description of Artificial Sequence: Synthetic oligonucleotide
  Sense strand starting at position 847 of SEQ ID NO: 913474
agagcagugaauugaaagu

SEQ ID NO: 930053 - RNA, 19 nt, Artificial Sequence
  Description of Artificial Sequence: Synthetic oligonucleotide
  Antisense strand to SEQ ID NO: 930052
acuuucaauucacugcucu

SEQ ID NO: 930054 - RNA, 19 nt, Artificial Sequence
  Description of Artificial Sequence: Synthetic oligonucleotide
  Sense strand starting at position 773 of SEQ ID NO: 913474
uaagauuacuuugcgaaga

SEQ ID NO: 930055 - RNA, 19 nt, Artificial Sequence
  Description of Artificial Sequence: Synthetic oligonucleotide
  Antisense strand to SEQ ID NO: 930054
ucuucgcaaaguaaucuua

SEQ ID NO: 930056 - RNA, 19 nt, Artificial Sequence
  Description of Artificial Sequence: Synthetic oligonucleotide
  Sense strand starting at position 550 of SEQ ID NO: 913474
aggcuuaugcuuuacaaau

SEQ ID NO: 930057 - RNA, 19 nt, Artificial Sequence
  Description of Artificial Sequence: Synthetic oligonucleotide
  Antisense strand to SEQ ID NO: 930056
auuuguaaagcauaagccu

SEQ ID NO: 930058 - RNA, 19 nt, Artificial Sequence
  Description of Artificial Sequence: Synthetic oligonucleotide
  Sense strand starting at position 1211 of SEQ ID NO: 913474
gaaccagaguguccuaacu

SEQ ID NO: 930059 - RNA, 19 nt, Artificial Sequence
  Description of Artificial Sequence: Synthetic oligonucleotide
  Antisense strand to SEQ ID NO: 930058
aguuaggacacucugguuc

SEQ ID NO: 930060 - RNA, 19 nt, Artificial Sequence
  Description of Artificial Sequence: Synthetic oligonucleotide
  Sense strand starting at position 71 of SEQ ID NO: 913474
cgagcagaucaucagcuaa

SEQ ID NO: 930061 - RNA, 19 nt, Artificial Sequence
  Description of Artificial Sequence: Synthetic oligonucleotide
  Antisense strand to SEQ ID NO: 930060
uuagcugaugaucugcucg

SEQ ID NO: 930062 - RNA, 19 nt, Artificial Sequence
  Description of Artificial Sequence: Synthetic oligonucleotide
  Sense strand starting at position 3082 of SEQ ID NO: 913474
ccaguagggucccugacaa

SEQ ID NO: 930063 - RNA, 19 nt, Artificial Sequence
  Description of Artificial Sequence: Synthetic oligonucleotide
  Antisense strand to SEQ ID NO: 930062
uugucagggacccuacugg

SEQ ID NO: 930064 - RNA, 19 nt, Artificial Sequence
  Description of Artificial Sequence: Synthetic oligonucleotide
  Sense strand starting at position 3699 of SEQ ID NO: 913474
gaagcaacugguuauguuu

SEQ ID NO: 930065 - RNA, 19 nt, Artificial Sequence
  Description of Artificial Sequence: Synthetic oligonucleotide
  Antisense strand to SEQ ID NO: 930064
aaacauaaccaguugcuuc

SEQ ID NO: 930066 - RNA, 19 nt, Artificial Sequence
  Description of Artificial Sequence: Synthetic oligonucleotide
  Sense strand starting at position 2886 of SEQ ID NO: 913474
auccucaggucugugaaca

SEQ ID NO: 930067 - RNA, 19 nt, Artificial Sequence
  Description of Artificial Sequence: Synthetic oligonucleotide
  Antisense strand to SEQ ID NO: 930066
uguucacagaccugaggau

SEQ ID NO: 930068 - RNA, 19 nt, Artificial Sequence
  Description of Artificial Sequence: Synthetic oligonucleotide
  Sense strand starting at position 772 of SEQ ID NO: 913474
cuaagauuacuuugcgaag

SEQ ID NO: 930069 - RNA, 19 nt, Artificial Sequence
  Description of Artificial Sequence: Synthetic oligonucleotide
  Antisense strand to SEQ ID NO: 930068
cuucgcaaaguaaucuuag

SEQ ID NO: 930070 - RNA, 19 nt, Artificial Sequence
  Description of Artificial Sequence: Synthetic oligonucleotide
  Sense strand starting at position 129 of SEQ ID NO: 913474
ccaggagauugugcuaauu

SEQ ID NO: 930071 - RNA, 19 nt, Artificial Sequence
  Description of Artificial Sequence: Synthetic oligonucleotide
  Antisense strand to SEQ ID NO: 930070
aauuagcacaaucuccugg

SEQ ID NO: 930072 - RNA, 19 nt, Artificial Sequence
  Description of Artificial Sequence: Synthetic oligonucleotide
  Sense strand starting at position 2153 of SEQ ID NO: 913474
ucugcugaccggcagaaau

SEQ ID NO: 930073 - RNA, 19 nt, Artificial Sequence
  Description of Artificial Sequence: Synthetic oligonucleotide
  Antisense strand to SEQ ID NO: 930072
auuucugccggucagcaga

SEQ ID NO: 930074 - RNA, 19 nt, Artificial Sequence
  Description of Artificial Sequence: Synthetic oligonucleotide
  Sense strand starting at position 3150 of SEQ ID NO: 913474
gcugaauugucuuuaaaua

SEQ ID NO: 930075 - RNA, 19 nt, Artificial Sequence
  Description of Artificial Sequence: Synthetic oligonucleotide
  Antisense strand to SEQ ID NO: 930074
uauuuaaagacaauucagc

SEQ ID NO: 930076 - RNA, 19 nt, Artificial Sequence
  Description of Artificial Sequence: Synthetic oligonucleotide
  Sense strand starting at position 146 of SEQ ID NO: 913474
uuaauuagccaauggcaca

SEQ ID NO: 930077 - RNA, 19 nt, Artificial Sequence
  Description of Artificial Sequence: Synthetic oligonucleotide
  Antisense strand to SEQ ID NO: 930076
ugugccauuggcuaauuaa

SEQ ID NO: 930078 - RNA, 19 nt, Artificial Sequence
  Description of Artificial Sequence: Synthetic oligonucleotide
  Sense strand starting at position 2475 of SEQ ID NO: 913474
gucaaacuauauguaaguu

SEQ ID NO: 930079 - RNA, 19 nt, Artificial Sequence
  Description of Artificial Sequence: Synthetic oligonucleotide
  Antisense strand to SEQ ID NO: 930078
aacuuacauauaguuugac

SEQ ID NO: 930080 - RNA, 19 nt, Artificial Sequence
  Description of Artificial Sequence: Synthetic oligonucleotide
  Sense strand starting at position 1159 of SEQ ID NO: 913474
gcauaaaucucugcuagga

SEQ ID NO: 930081 - RNA, 19 nt, Artificial Sequence
  Description of Artificial Sequence: Synthetic oligonucleotide
  Antisense strand to SEQ ID NO: 930080
uccuagcagagauuuaugc

SEQ ID NO: 930082 - RNA, 19 nt, Artificial Sequence
  Description of Artificial Sequence: Synthetic oligonucleotide
  Sense strand starting at position 3695 of SEQ ID NO: 913474
gugagaagcaacugguuau

SEQ ID NO: 930083 - RNA, 19 nt, Artificial Sequence
  Description of Artificial Sequence: Synthetic oligonucleotide
  Antisense strand to SEQ ID NO: 930082
auaaccaguugcuucucac

SEQ ID NO: 930084 - RNA, 19 nt, Artificial Sequence
  Description of Artificial Sequence: Synthetic oligonucleotide
  Sense strand starting at position 360 of SEQ ID NO: 913474
gaugcugaagcaugugaga

SEQ ID NO: 930085 - RNA, 19 nt, Artificial Sequence
  Description of Artificial Sequence: Synthetic oligonucleotide
  Antisense strand to SEQ ID NO: 930084
ucucacaugcuucagcauc

SEQ ID NO: 930086 - RNA, 19 nt, Artificial Sequence
  Description of Artificial Sequence: Synthetic oligonucleotide
  Sense strand starting at position 1664 of SEQ ID NO: 913474
ucuaucugccugcagacau

SEQ ID NO: 930087 - RNA, 19 nt, Artificial Sequence
  Description of Artificial Sequence: Synthetic oligonucleotide
  Antisense strand to SEQ ID NO: 930086
augucugcaggcagauaga

SEQ ID NO: 930088 - RNA, 19 nt, Artificial Sequence
  Description of Artificial Sequence: Synthetic oligonucleotide
  Sense strand starting at position 453 of SEQ ID NO: 913474
augagucuuucuuccgaag

SEQ ID NO: 930089 - RNA, 19 nt, Artificial Sequence
  Description of Artificial Sequence: Synthetic oligonucleotide
  Antisense strand to SEQ ID NO: 930088
cuucggaagaaagacucau

SEQ ID NO: 930090 - RNA, 19 nt, Artificial Sequence
  Description of Artificial Sequence: Synthetic oligonucleotide
  Sense strand starting at position 3698 of SEQ ID NO: 913474
agaagcaacugguuauguu

SEQ ID NO: 930091 - RNA, 19 nt, Artificial Sequence
  Description of Artificial Sequence: Synthetic oligonucleotide
  Antisense strand to SEQ ID NO: 930090
aacauaaccaguugcuucu

SEQ ID NO: 930092 - RNA, 19 nt, Artificial Sequence
  Description of Artificial Sequence: Synthetic oligonucleotide
  Sense strand starting at position 3606 of SEQ ID NO: 913474
acagauccuugagagaaag

SEQ ID NO: 930093 - RNA, 19 nt, Artificial Sequence
  Description of Artificial Sequence: Synthetic oligonucleotide
  Antisense strand to SEQ ID NO: 930092
cuuucucucaaggaucugu

SEQ ID NO: 930094 - RNA, 19 nt, Artificial Sequence
  Description of Artificial Sequence: Synthetic oligonucleotide
  Sense strand starting at position 2477 of SEQ ID NO: 913475
auguauuucuugcuuagau

SEQ ID NO: 930095 - RNA, 19 nt, Artificial Sequence
  Description of Artificial Sequence: Synthetic oligonucleotide
  Antisense strand to SEQ ID NO: 930094
aucuaagcaagaaauacau

SEQ ID NO: 930096 - RNA, 19 nt, Artificial Sequence
  Description of Artificial Sequence: Synthetic oligonucleotide
  Sense strand starting at position 2927 of SEQ ID NO: 913475
gagacacaguuucuagaua

SEQ ID NO: 930097 - RNA, 19 nt, Artificial Sequence
  Description of Artificial Sequence: Synthetic oligonucleotide
  Antisense strand to SEQ ID NO: 930096
uaucuagaaacugugucuc

SEQ ID NO: 930098 - RNA, 19 nt, Artificial Sequence
  Description of Artificial Sequence: Synthetic oligonucleotide
  Sense strand starting at position 270 of SEQ ID NO: 913475
acaagaauaucuguuuagg

SEQ ID NO: 930099 - RNA, 19 nt, Artificial Sequence
  Description of Artificial Sequence: Synthetic oligonucleotide
  Antisense strand to SEQ ID NO: 930098
ccuaaacagauauucuugu

SEQ ID NO: 930100 - RNA, 19 nt, Artificial Sequence
  Description of Artificial Sequence: Synthetic oligonucleotide
  Sense strand starting at position 534 of SEQ ID NO: 913475
uuauauagccuccaagaug

SEQ ID NO: 930101 - RNA, 19 nt, Artificial Sequence
  Description of Artificial Sequence: Synthetic oligonucleotide
  Antisense strand to SEQ ID NO: 930100
caucuuggaggcuauauaa

SEQ ID NO: 930102 - RNA, 19 nt, Artificial Sequence
  Description of Artificial Sequence: Synthetic oligonucleotide
  Sense strand starting at position 2478 of SEQ ID NO: 913475
uguauuucuugcuuagaug

SEQ ID NO: 930103 - RNA, 19 nt, Artificial Sequence
  Description of Artificial Sequence: Synthetic oligonucleotide
  Antisense strand to SEQ ID NO: 930102
caucuaagcaagaaauaca

SEQ ID NO: 930104 - RNA, 19 nt, Artificial Sequence
  Description of Artificial Sequence: Synthetic oligonucleotide
  Sense strand starting at position 2856 of SEQ ID NO: 913475
cugaaauggcuccauacug

SEQ ID NO: 930105 - RNA, 19 nt, Artificial Sequence
  Description of Artificial Sequence: Synthetic oligonucleotide
  Antisense strand to SEQ ID NO: 930104
caguauggagccauuucag

SEQ ID NO: 930106 - RNA, 19 nt, Artificial Sequence
  Description of Artificial Sequence: Synthetic oligonucleotide
  Sense strand starting at position 324 of SEQ ID NO: 913475
cuauguugaaucuggaaga

SEQ ID NO: 930107 - RNA, 19 nt, Artificial Sequence
  Description of Artificial Sequence: Synthetic oligonucleotide
  Antisense strand to SEQ ID NO: 930106
ucuuccagauucaacauag

SEQ ID NO: 930108 - RNA, 19 nt, Artificial Sequence
  Description of Artificial Sequence: Synthetic oligonucleotide
  Sense strand starting at position 1378 of SEQ ID NO: 913475
agggcugguauccauaaua

SEQ ID NO: 930109 - RNA, 19 nt, Artificial Sequence
  Description of Artificial Sequence: Synthetic oligonucleotide
  Antisense strand to SEQ ID NO: 930108
uauuauggauaccagcccu

SEQ ID NO: 930110 - RNA, 19 nt, Artificial Sequence
  Description of Artificial Sequence: Synthetic oligonucleotide
  Sense strand starting at position 2731 of SEQ ID NO: 913475
auaaguaaacugugauaca

SEQ ID NO: 930111 - RNA, 19 nt, Artificial Sequence
  Description of Artificial Sequence: Synthetic oligonucleotide
  Antisense strand to SEQ ID NO: 930110
uguaucacaguuuacuuau

SEQ ID NO: 930112 - RNA, 19 nt, Artificial Sequence
  Description of Artificial Sequence: Synthetic oligonucleotide
  Sense strand starting at position 3582 of SEQ ID NO: 913475
ugauguacacaaugacauu

SEQ ID NO: 930113 - RNA, 19 nt, Artificial Sequence
  Description of Artificial Sequence: Synthetic oligonucleotide
  Antisense strand to SEQ ID NO: 930112
aaugucauuguguacauca

SEQ ID NO: 930114 - RNA, 19 nt, Artificial Sequence
  Description of Artificial Sequence: Synthetic oligonucleotide
  Sense strand starting at position 915 of SEQ ID NO: 913475
ggaaguggcaauggaauua

SEQ ID NO: 930115 - RNA, 19 nt, Artificial Sequence
  Description of Artificial Sequence: Synthetic oligonucleotide
  Antisense strand to SEQ ID NO: 930114
uaauuccauugccacuucc

SEQ ID NO: 930116 - RNA, 19 nt, Artificial Sequence
  Description of Artificial Sequence: Synthetic oligonucleotide
  Sense strand starting at position 3784 of SEQ ID NO: 913475
aagaguaaacccuaacguu

SEQ ID NO: 930117 - RNA, 19 nt, Artificial Sequence
  Description of Artificial Sequence: Synthetic oligonucleotide
  Antisense strand to SEQ ID NO: 930116
aacguuaggguuuacucuu

SEQ ID NO: 930118 - RNA, 19 nt, Artificial Sequence
  Description of Artificial Sequence: Synthetic oligonucleotide
  Sense strand starting at position 2710 of SEQ ID NO: 913475
aaagaagcucaauguggau

SEQ ID NO: 930119 - RNA, 19 nt, Artificial Sequence
  Description of Artificial Sequence: Synthetic oligonucleotide
  Antisense strand to SEQ ID NO: 930118
auccacauugagcuucuuu

SEQ ID NO: 930120 - RNA, 19 nt, Artificial Sequence
  Description of Artificial Sequence: Synthetic oligonucleotide
  Sense strand starting at position 2712 of SEQ ID NO: 913475
agaagcucaauguggauaa

SEQ ID NO: 930121 - RNA, 19 nt, Artificial Sequence
  Description of Artificial Sequence: Synthetic oligonucleotide
  Antisense strand to SEQ ID NO: 930120
uuauccacauugagcuucu

SEQ ID NO: 930122 - RNA, 19 nt, Artificial Sequence
  Description of Artificial Sequence: Synthetic oligonucleotide
  Sense strand starting at position 3570 of SEQ ID NO: 913475
ucuggagaaccuugaugua

SEQ ID NO: 930123 - RNA, 19 nt, Artificial Sequence
  Description of Artificial Sequence: Synthetic oligonucleotide
  Antisense strand to SEQ ID NO: 930122
uacaucaagguucuccaga

SEQ ID NO: 930124 - RNA, 19 nt, Artificial Sequence
  Description of Artificial Sequence: Synthetic oligonucleotide
  Sense strand starting at position 1617 of SEQ ID NO: 913475
aggagaaugguucgaaccu

SEQ ID NO: 930125 - RNA, 19 nt, Artificial Sequence
  Description of Artificial Sequence: Synthetic oligonucleotide
  Antisense strand to SEQ ID NO: 930124
agguucgaaccauucuccu

SEQ ID NO: 930126 - RNA, 19 nt, Artificial Sequence
  Description of Artificial Sequence: Synthetic oligonucleotide
  Sense strand starting at position 229 of SEQ ID NO: 913475
ggcaaagugagagguacaa

SEQ ID NO: 930127 - RNA, 19 nt, Artificial Sequence
  Description of Artificial Sequence: Synthetic oligonucleotide
  Antisense strand to SEQ ID NO: 930126
uuguaccucucacuuugcc

SEQ ID NO: 930128 - RNA, 19 nt, Artificial Sequence
  Description of Artificial Sequence: Synthetic oligonucleotide
  Sense strand starting at position 744 of SEQ ID NO: 913475
uggcuaauccacgacaauc

SEQ ID NO: 930129 - RNA, 19 nt, Artificial Sequence
  Description of Artificial Sequence: Synthetic oligonucleotide
  Antisense strand to SEQ ID NO: 930128
gauugucguggauuagcca

SEQ ID NO: 930130 - RNA, 19 nt, Artificial Sequence
  Description of Artificial Sequence: Synthetic oligonucleotide
  Sense strand starting at position 3814 of SEQ ID NO: 913475
augguugauagugauguau

SEQ ID NO: 930131 - RNA, 19 nt, Artificial Sequence
  Description of Artificial Sequence: Synthetic oligonucleotide
  Antisense strand to SEQ ID NO: 930130
auacaucacuaucaaccau

SEQ ID NO: 930132 - RNA, 19 nt, Artificial Sequence
  Description of Artificial Sequence: Synthetic oligonucleotide
  Sense strand starting at position 522 of SEQ ID NO: 913475
ggaugugaauguuuauaua

SEQ ID NO: 930133 - RNA, 19 nt, Artificial Sequence
  Description of Artificial Sequence: Synthetic oligonucleotide
  Antisense strand to SEQ ID NO: 930132
uauauaaacauucacaucc

SEQ ID NO: 930134 - RNA, 19 nt, Artificial Sequence
  Description of Artificial Sequence: Synthetic oligonucleotide
  Sense strand starting at position 472 of SEQ ID NO: 913475
gcaaauccuguuuaggauc

SEQ ID NO: 930135 - RNA, 19 nt, Artificial Sequence
  Description of Artificial Sequence: Synthetic oligonucleotide
  Antisense strand to SEQ ID NO: 930134
gauccuaaacaggauuugc

SEQ ID NO: 930136 - RNA, 19 nt, Artificial Sequence
  Description of Artificial Sequence: Synthetic oligonucleotide
  Sense strand starting at position 3735 of SEQ ID NO: 913475
agauacaugucacuguaca

SEQ ID NO: 930137 - RNA, 19 nt, Artificial Sequence
  Description of Artificial Sequence: Synthetic oligonucleotide
  Antisense strand to SEQ ID NO: 930136
uguacagugacauguaucu

SEQ ID NO: 930138 - RNA, 19 nt, Artificial Sequence
  Description of Artificial Sequence: Synthetic oligonucleotide
  Sense strand starting at position 993 of SEQ ID NO: 913475
ggauuauucuagucuauau

SEQ ID NO: 930139 - RNA, 19 nt, Artificial Sequence
  Description of Artificial Sequence: Synthetic oligonucleotide
  Antisense strand to SEQ ID NO: 930138
auauagacuagaauaaucc

SEQ ID NO: 930140 - RNA, 19 nt, Artificial Sequence
  Description of Artificial Sequence: Synthetic oligonucleotide
  Sense strand starting at position 2300 of SEQ ID NO: 913475
cuauaaagucauggcauaa

SEQ ID NO: 930141 - RNA, 19 nt, Artificial Sequence
  Description of Artificial Sequence: Synthetic oligonucleotide
  Antisense strand to SEQ ID NO: 930140
uuaugccaugacuuuauag

SEQ ID NO: 930142 - RNA, 19 nt, Artificial Sequence
  Description of Artificial Sequence: Synthetic oligonucleotide
  Sense strand starting at position 3807 of SEQ ID NO: 913475
auggacuaugguugauagu

SEQ ID NO: 930143 - RNA, 19 nt, Artificial Sequence
  Description of Artificial Sequence: Synthetic oligonucleotide
  Antisense strand to SEQ ID NO: 930142
acuaucaaccauaguccau

SEQ ID NO: 930144 - RNA, 19 nt, Artificial Sequence
  Description of Artificial Sequence: Synthetic oligonucleotide
  Sense strand starting at position 1188 of SEQ ID NO: 913475
guugacauauguucuaaag

SEQ ID NO: 930145 - RNA, 19 nt, Artificial Sequence
  Description of Artificial Sequence: Synthetic oligonucleotide
  Antisense strand to SEQ ID NO: 930144
cuuuagaacauaugucaac

SEQ ID NO: 930146 - RNA, 19 nt, Artificial Sequence
  Description of Artificial Sequence: Synthetic oligonucleotide
  Sense strand starting at position 2962 of SEQ ID NO: 913475
ucuagauguuucucugaag

SEQ ID NO: 930147 - RNA, 19 nt, Artificial Sequence
  Description of Artificial Sequence: Synthetic oligonucleotide
  Antisense strand to SEQ ID NO: 930146
cuucagagaaacaucuaga

SEQ ID NO: 930148 - RNA, 19 nt, Artificial Sequence
  Description of Artificial Sequence: Synthetic oligonucleotide
  Sense strand starting at position 2124 of SEQ ID NO: 913475
acauaagugcucuaagagc

SEQ ID NO: 930149 - RNA, 19 nt, Artificial Sequence
  Description of Artificial Sequence: Synthetic oligonucleotide
  Antisense strand to SEQ ID NO: 930148
gcucuuagagcacuuaugu

SEQ ID NO: 930150 - RNA, 19 nt, Artificial Sequence
  Description of Artificial Sequence: Synthetic oligonucleotide
  Sense strand starting at position 1377 of SEQ ID NO: 913475
aagggcugguauccauaau

SEQ ID NO: 930151 - RNA, 19 nt, Artificial Sequence
  Description of Artificial Sequence: Synthetic oligonucleotide
  Antisense strand to SEQ ID NO: 930150
auuauggauaccagcccuu

SEQ ID NO: 930152 - RNA, 19 nt, Artificial Sequence
  Description of Artificial Sequence: Synthetic oligonucleotide
  Sense strand starting at position 365 of SEQ ID NO: 913475
gcagaaguuccauaguauc

SEQ ID NO: 930153 - RNA, 19 nt, Artificial Sequence
  Description of Artificial Sequence: Synthetic oligonucleotide
  Antisense strand to SEQ ID NO: 930152
gauacuauggaacuucugc

SEQ ID NO: 930154 - RNA, 19 nt, Artificial Sequence
  Description of Artificial Sequence: Synthetic oligonucleotide
  Sense strand starting at position 1037 of SEQ ID NO: 913475
gcaggaacauagguguaua

SEQ ID NO: 930155 - RNA, 19 nt, Artificial Sequence
  Description of Artificial Sequence: Synthetic oligonucleotide
  Antisense strand to SEQ ID NO: 930154
uauacaccuauguuccugc

SEQ ID NO: 930156 - RNA, 19 nt, Artificial Sequence
  Description of Artificial Sequence: Synthetic oligonucleotide
  Sense strand starting at position 2243 of SEQ ID NO: 913475
agaagcacccuuugugaga

SEQ ID NO: 930157 - RNA, 19 nt, Artificial Sequence
  Description of Artificial Sequence: Synthetic oligonucleotide
  Antisense strand to SEQ ID NO: 930156
ucucacaaagggugcuucu

SEQ ID NO: 930158 - RNA, 19 nt, Artificial Sequence
  Description of Artificial Sequence: Synthetic oligonucleotide
  Sense strand starting at position 562 of SEQ ID NO: 913475
auaugcaagugauuauauc

SEQ ID NO: 930159 - RNA, 19 nt, Artificial Sequence
  Description of Artificial Sequence: Synthetic oligonucleotide
  Antisense strand to SEQ ID NO: 930158
gauauaaucacuugcauau

SEQ ID NO: 930160 - RNA, 19 nt, Artificial Sequence
  Description of Artificial Sequence: Synthetic oligonucleotide
  Sense strand starting at position 743 of SEQ ID NO: 913475
auggcuaauccacgacaau

SEQ ID NO: 930161 - RNA, 19 nt, Artificial Sequence
  Description of Artificial Sequence: Synthetic oligonucleotide
  Antisense strand to SEQ ID NO: 930160
auugucguggauuagccau

SEQ ID NO: 930162 - RNA, 19 nt, Artificial Sequence
  Description of Artificial Sequence: Synthetic oligonucleotide
  Sense strand starting at position 316 of SEQ ID NO: 913475
aauugagccuauguugaau

SEQ ID NO: 930163 - RNA, 19 nt, Artificial Sequence
  Description of Artificial Sequence: Synthetic oligonucleotide
  Antisense strand to SEQ ID NO: 930162
auucaacauaggcucaauu

SEQ ID NO: 930164 - RNA, 19 nt, Artificial Sequence
  Description of Artificial Sequence: Synthetic oligonucleotide
  Sense strand starting at position 2143 of SEQ ID NO: 913475
ugagauagcuucccgaaac

SEQ ID NO: 930165 - RNA, 19 nt, Artificial Sequence
  Description of Artificial Sequence: Synthetic oligonucleotide
  Antisense strand to SEQ ID NO: 930164
guuucgggaagcuaucuca

SEQ ID NO: 930166 - RNA, 19 nt, Artificial Sequence
  Description of Artificial Sequence: Synthetic oligonucleotide
  Sense strand starting at position 890 of SEQ ID NO: 913475
agcaguaaagcauagcaau

SEQ ID NO: 930167 - RNA, 19 nt, Artificial Sequence
  Description of Artificial Sequence: Synthetic oligonucleotide
  Antisense strand to SEQ ID NO: 930166
auugcuaugcuuuacugcu

SEQ ID NO: 930168 - RNA, 19 nt, Artificial Sequence
  Description of Artificial Sequence: Synthetic oligonucleotide
  Sense strand starting at position 519 of SEQ ID NO: 913475
cugggaugugaauguuuau

SEQ ID NO: 930169 - RNA, 19 nt, Artificial Sequence
  Description of Artificial Sequence: Synthetic oligonucleotide
  Antisense strand to SEQ ID NO: 930168
auaaacauucacaucccag

SEQ ID NO: 930170 - RNA, 19 nt, Artificial Sequence
  Description of Artificial Sequence: Synthetic oligonucleotide
  Sense strand starting at position 2131 of SEQ ID NO: 913475
ugcucuaagagcugagaua

SEQ ID NO: 930171 - RNA, 19 nt, Artificial Sequence
  Description of Artificial Sequence: Synthetic oligonucleotide
  Antisense strand to SEQ ID NO: 930170
uaucucagcucuuagagca

SEQ ID NO: 930172 - RNA, 19 nt, Artificial Sequence
  Description of Artificial Sequence: Synthetic oligonucleotide
  Sense strand starting at position 2113 of SEQ ID NO: 913475
guguauugagcacauaagu

SEQ ID NO: 930173 - RNA, 19 nt, Artificial Sequence
  Description of Artificial Sequence: Synthetic oligonucleotide
  Antisense strand to SEQ ID NO: 930172
acuuaugugcucaauacac

SEQ ID NO: 930174 - RNA, 19 nt, Artificial Sequence
  Description of Artificial Sequence: Synthetic oligonucleotide
  Sense strand starting at position 3714 of SEQ ID NO: 913476
cuaacauuucugugucuua

SEQ ID NO: 930175 - RNA, 19 nt, Artificial Sequence
  Description of Artificial Sequence: Synthetic oligonucleotide
  Antisense strand to SEQ ID NO: 930174
uaagacacagaaauguuag

SEQ ID NO: 930176 - RNA, 19 nt, Artificial Sequence
  Description of Artificial Sequence: Synthetic oligonucleotide
  Sense strand starting at position 1240 of SEQ ID NO: 913476
gauaauggaugucccuuaa

SEQ ID NO: 930177 - RNA, 19 nt, Artificial Sequence
  Description of Artificial Sequence: Synthetic oligonucleotide
  Antisense strand to SEQ ID NO: 930176
uuaagggacauccauuauc

SEQ ID NO: 930178 - RNA, 19 nt, Artificial Sequence
  Description of Artificial Sequence: Synthetic oligonucleotide
  Sense strand starting at position 3178 of SEQ ID NO: 913476
aguuauacccuguaacauu

SEQ ID NO: 930179 - RNA, 19 nt, Artificial Sequence
  Description of Artificial Sequence: Synthetic oligonucleotide
  Antisense strand to SEQ ID NO: 930178
aauguuacaggguauaacu

SEQ ID NO: 930180 - RNA, 19 nt, Artificial Sequence
  Description of Artificial Sequence: Synthetic oligonucleotide
  Sense strand starting at position 2378 of SEQ ID NO: 913476
ucgucauuuacaugacgua

SEQ ID NO: 930181 - RNA, 19 nt, Artificial Sequence
  Description of Artificial Sequence: Synthetic oligonucleotide
  Antisense strand to SEQ ID NO: 930180
uacgucauguaaaugacga

SEQ ID NO: 930182 - RNA, 19 nt, Artificial Sequence
  Description of Artificial Sequence: Synthetic oligonucleotide
  Sense strand starting at position 946 of SEQ ID NO: 913476
gggacuacaaguugucaca

SEQ ID NO: 930183 - RNA, 19 nt, Artificial Sequence
  Description of Artificial Sequence: Synthetic oligonucleotide
  Antisense strand to SEQ ID NO: 930182
ugugacaacuuguaguccc

SEQ ID NO: 930184 - RNA, 19 nt, Artificial Sequence
  Description of Artificial Sequence: Synthetic oligonucleotide
  Sense strand starting at position 1782 of SEQ ID NO: 913476
ggcccuuccacagauucga

SEQ ID NO: 930185 - RNA, 19 nt, Artificial Sequence
  Description of Artificial Sequence: Synthetic oligonucleotide
  Antisense strand to SEQ ID NO: 930184
ucgaaucuguggaagggcc

SEQ ID NO: 930186 - RNA, 19 nt, Artificial Sequence
  Description of Artificial Sequence: Synthetic oligonucleotide
  Sense strand starting at position 2231 of SEQ ID NO: 913476
guuccauuauuugagagaa

SEQ ID NO: 930187 - RNA, 19 nt, Artificial Sequence
  Description of Artificial Sequence: Synthetic oligonucleotide
  Antisense strand to SEQ ID NO: 930186
uucucucaaauaauggaac

SEQ ID NO: 930188 - RNA, 19 nt, Artificial Sequence
  Description of Artificial Sequence: Synthetic oligonucleotide
  Sense strand starting at position 1071 of SEQ ID NO: 913476
ggagugaggccaggguaau

SEQ ID NO: 930189 - RNA, 19 nt, Artificial Sequence
  Description of Artificial Sequence: Synthetic oligonucleotide
  Antisense strand to SEQ ID NO: 930188
auuacccuggccucacucc

SEQ ID NO: 930190 - RNA, 19 nt, Artificial Sequence
  Description of Artificial Sequence: Synthetic oligonucleotide
  Sense strand starting at position 2537 of SEQ ID NO: 913476
ugcgauacuuuacucagaa

SEQ ID NO: 930191 - RNA, 19 nt, Artificial Sequence
  Description of Artificial Sequence: Synthetic oligonucleotide
  Antisense strand to SEQ ID NO: 930190
uucugaguaaaguaucgca

SEQ ID NO: 930192 - RNA, 19 nt, Artificial Sequence
  Description of Artificial Sequence: Synthetic oligonucleotide
  Sense strand starting at position 2538 of SEQ ID NO: 913476
gcgauacuuuacucagaau

SEQ ID NO: 930193 - RNA, 19 nt, Artificial Sequence
  Description of Artificial Sequence: Synthetic oligonucleotide
  Antisense strand to SEQ ID NO: 930192
auucugaguaaaguaucgc

SEQ ID NO: 930194 - RNA, 19 nt, Artificial Sequence
  Description of Artificial Sequence: Synthetic oligonucleotide
  Sense strand starting at position 3176 of SEQ ID NO: 913476
cuaguuauacccuguaaca

SEQ ID NO: 930195 - RNA, 19 nt, Artificial Sequence
  Description of Artificial Sequence: Synthetic oligonucleotide
  Antisense strand to SEQ ID NO: 930194
uguuacaggguauaacuag

SEQ ID NO: 930196 - RNA, 19 nt, Artificial Sequence
  Description of Artificial Sequence: Synthetic oligonucleotide
  Sense strand starting at position 2390 of SEQ ID NO: 913476
ugacguaucucuccuaaug

SEQ ID NO: 930197 - RNA, 19 nt, Artificial Sequence
  Description of Artificial Sequence: Synthetic oligonucleotide
  Antisense strand to SEQ ID NO: 930196
cauuaggagagauacguca

SEQ ID NO: 930198 - RNA, 19 nt, Artificial Sequence
  Description of Artificial Sequence: Synthetic oligonucleotide
  Sense strand starting at position 563 of SEQ ID NO: 913476
cugaccuggcugugauacu

SEQ ID NO: 930199 - RNA, 19 nt, Artificial Sequence
  Description of Artificial Sequence: Synthetic oligonucleotide
  Antisense strand to SEQ ID NO: 930198
aguaucacagccaggucag

SEQ ID NO: 930200 - RNA, 19 nt, Artificial Sequence
  Description of Artificial Sequence: Synthetic oligonucleotide
  Sense strand starting at position 2081 of SEQ ID NO: 913476
cuuggccucgcuuaacaau

SEQ ID NO: 930201 - RNA, 19 nt, Artificial Sequence
  Description of Artificial Sequence: Synthetic oligonucleotide
  Antisense strand to SEQ ID NO: 930200
auuguuaagcgaggccaag

SEQ ID NO: 930202 - RNA, 19 nt, Artificial Sequence
  Description of Artificial Sequence: Synthetic oligonucleotide
  Sense strand starting at position 949 of SEQ ID NO: 913476
acuacaaguugucacauuu

SEQ ID NO: 930203 - RNA, 19 nt, Artificial Sequence
  Description of Artificial Sequence: Synthetic oligonucleotide
  Antisense strand to SEQ ID NO: 930202
aaaugugacaacuuguagu

SEQ ID NO: 930204 - RNA, 19 nt, Artificial Sequence
  Description of Artificial Sequence: Synthetic oligonucleotide
  Sense strand starting at position 2530 of SEQ ID NO: 913476
cuguccuugcgauacuuua

SEQ ID NO: 930205 - RNA, 19 nt, Artificial Sequence
  Description of Artificial Sequence: Synthetic oligonucleotide
  Antisense strand to SEQ ID NO: 930204
uaaaguaucgcaaggacag

SEQ ID NO: 930206 - RNA, 19 nt, Artificial Sequence
  Description of Artificial Sequence: Synthetic oligonucleotide
  Sense strand starting at position 3589 of SEQ ID NO: 913476
uagucauaagguugugcaa

SEQ ID NO: 930207 - RNA, 19 nt, Artificial Sequence
  Description of Artificial Sequence: Synthetic oligonucleotide
  Antisense strand to SEQ ID NO: 930206
uugcacaaccuuaugacua

SEQ ID NO: 930208 - RNA, 19 nt, Artificial Sequence
  Description of Artificial Sequence: Synthetic oligonucleotide
  Sense strand starting at position 2034 of SEQ ID NO: 913476
uggcccuuucgcuacgaaa

SEQ ID NO: 930209 - RNA, 19 nt, Artificial Sequence
  Description of Artificial Sequence: Synthetic oligonucleotide
  Antisense strand to SEQ ID NO: 930208
uuucguagcgaaagggcca

SEQ ID NO: 930210 - RNA, 19 nt, Artificial Sequence
  Description of Artificial Sequence: Synthetic oligonucleotide
  Sense strand starting at position 3719 of SEQ ID NO: 913476
auuucugugucuuagacau

SEQ ID NO: 930211 - RNA, 19 nt, Artificial Sequence
  Description of Artificial Sequence: Synthetic oligonucleotide
  Antisense strand to SEQ ID NO: 930210
augucuaagacacagaaau

SEQ ID NO: 930212 - RNA, 19 nt, Artificial Sequence
  Description of Artificial Sequence: Synthetic oligonucleotide
  Sense strand starting at position 781 of SEQ ID NO: 913476
gaggacgucuucgcagauu

SEQ ID NO: 930213 - RNA, 19 nt, Artificial Sequence
  Description of Artificial Sequence: Synthetic oligonucleotide
  Antisense strand to SEQ ID NO: 930212
aaucugcgaagacguccuc

SEQ ID NO: 930214 - RNA, 19 nt, Artificial Sequence
  Description of Artificial Sequence: Synthetic oligonucleotide
  Sense strand starting at position 561 of SEQ ID NO: 913476
gccugaccuggcugugaua

SEQ ID NO: 930215 - RNA, 19 nt, Artificial Sequence
  Description of Artificial Sequence: Synthetic oligonucleotide
  Antisense strand to SEQ ID NO: 930214
uaucacagccaggucaggc

SEQ ID NO: 930216 - RNA, 19 nt, Artificial Sequence
  Description of Artificial Sequence: Synthetic oligonucleotide
  Sense strand starting at position 3721 of SEQ ID NO: 913476
uucugugucuuagacauuu

SEQ ID NO: 930217 - RNA, 19 nt, Artificial Sequence
  Description of Artificial Sequence: Synthetic oligonucleotide
  Antisense strand to SEQ ID NO: 930216
aaaugucuaagacacagaa

SEQ ID NO: 930218 - RNA, 19 nt, Artificial Sequence
  Description of Artificial Sequence: Synthetic oligonucleotide
  Sense strand starting at position 1797 of SEQ ID NO: 913476
ucgacaagauguuaagaga

SEQ ID NO: 930219 - RNA, 19 nt, Artificial Sequence
  Description of Artificial Sequence: Synthetic oligonucleotide
  Antisense strand to SEQ ID NO: 930218
ucucuuaacaucuugucga

SEQ ID NO: 930220 - RNA, 19 nt, Artificial Sequence
  Description of Artificial Sequence: Synthetic oligonucleotide
  Sense strand starting at position 133 of SEQ ID NO: 913476
agagaaaguuaaugaauuc

SEQ ID NO: 930221 - RNA, 19 nt, Artificial Sequence
  Description of Artificial Sequence: Synthetic oligonucleotide
  Antisense strand to SEQ ID NO: 930220
gaauucauuaacuuucucu

SEQ ID NO: 930222 - RNA, 19 nt, Artificial Sequence
  Description of Artificial Sequence: Synthetic oligonucleotide
  Sense strand starting at position 780 of SEQ ID NO: 913476
cgaggacgucuucgcagau

SEQ ID NO: 930223 - RNA, 19 nt, Artificial Sequence
  Description of Artificial Sequence: Synthetic oligonucleotide
  Antisense strand to SEQ ID NO: 930222
aucugcgaagacguccucg

SEQ ID NO: 930224 - RNA, 19 nt, Artificial Sequence
  Description of Artificial Sequence: Synthetic oligonucleotide
  Sense strand starting at position 936 of SEQ ID NO: 913476
acuccuuucugggacuaca

SEQ ID NO: 930225 - RNA, 19 nt, Artificial Sequence
  Description of Artificial Sequence: Synthetic oligonucleotide
  Antisense strand to SEQ ID NO: 930224
uguagucccagaaaggagu

SEQ ID NO: 930226 - RNA, 19 nt, Artificial Sequence
  Description of Artificial Sequence: Synthetic oligonucleotide
  Sense strand starting at position 2117 of SEQ ID NO: 913476
uugcgcuugcucugaagga

SEQ ID NO: 930227 - RNA, 19 nt, Artificial Sequence
  Description of Artificial Sequence: Synthetic oligonucleotide
  Antisense strand to SEQ ID NO: 930226
uccuucagagcaagcgcaa

SEQ ID NO: 930228 - RNA, 19 nt, Artificial Sequence
  Description of Artificial Sequence: Synthetic oligonucleotide
  Sense strand starting at position 71 of SEQ ID NO: 913476
uguccaaacuacuauguaa

SEQ ID NO: 930229 - RNA, 19 nt, Artificial Sequence
  Description of Artificial Sequence: Synthetic oligonucleotide
  Antisense strand to SEQ ID NO: 930228
uuacauaguaguuuggaca

SEQ ID NO: 930230 - RNA, 19 nt, Artificial Sequence
  Description of Artificial Sequence: Synthetic oligonucleotide
  Sense strand starting at position 3827 of SEQ ID NO: 913476
uggcauguaucagaacuca

SEQ ID NO: 930231 - RNA, 19 nt, Artificial Sequence
  Description of Artificial Sequence: Synthetic oligonucleotide
  Antisense strand to SEQ ID NO: 930230
ugaguucugauacaugcca

SEQ ID NO: 930232 - RNA, 19 nt, Artificial Sequence
  Description of Artificial Sequence: Synthetic oligonucleotide
  Sense strand starting at position 770 of SEQ ID NO: 913476
uuuaaugugucgaggacgu

SEQ ID NO: 930233 - RNA, 19 nt, Artificial Sequence
  Description of Artificial Sequence: Synthetic oligonucleotide
  Antisense strand to SEQ ID NO: 930232
acguccucgacacauuaaa

SEQ ID NO: 930234 - RNA, 19 nt, Artificial Sequence
  Description of Artificial Sequence: Synthetic oligonucleotide
  Sense strand starting at position 2989 of SEQ ID NO: 913476
uuggguuaguuccaagacu

SEQ ID NO: 930235 - RNA, 19 nt, Artificial Sequence
  Description of Artificial Sequence: Synthetic oligonucleotide
  Antisense strand to SEQ ID NO: 930234
agucuuggaacuaacccaa

SEQ ID NO: 930236 - RNA, 19 nt, Artificial Sequence
  Description of Artificial Sequence: Synthetic oligonucleotide
  Sense strand starting at position 3583 of SEQ ID NO: 913476
uuaguauagucauaagguu

SEQ ID NO: 930237 - RNA, 19 nt, Artificial Sequence
  Description of Artificial Sequence: Synthetic oligonucleotide
  Antisense strand to SEQ ID NO: 930236
aaccuuaugacuauacuaa

SEQ ID NO: 930238 - RNA, 19 nt, Artificial Sequence
  Description of Artificial Sequence: Synthetic oligonucleotide
  Sense strand starting at position 1043 of SEQ ID NO: 913476
cugcguguuucuucuggca

SEQ ID NO: 930239 - RNA, 19 nt, Artificial Sequence
  Description of Artificial Sequence: Synthetic oligonucleotide
  Antisense strand to SEQ ID NO: 930238
ugccagaagaaacacgcag

SEQ ID NO: 930240 - RNA, 19 nt, Artificial Sequence
  Description of Artificial Sequence: Synthetic oligonucleotide
  Sense strand starting at position 3015 of SEQ ID NO: 913476
uguggauagugccacuaua

SEQ ID NO: 930241 - RNA, 19 nt, Artificial Sequence
  Description of Artificial Sequence: Synthetic oligonucleotide
  Antisense strand to SEQ ID NO: 930240
uauaguggcacuauccaca

SEQ ID NO: 930242 - RNA, 19 nt, Artificial Sequence
  Description of Artificial Sequence: Synthetic oligonucleotide
  Sense strand starting at position 1077 of SEQ ID NO: 913476
aggccaggguaauguuaaa

SEQ ID NO: 930243 - RNA, 19 nt, Artificial Sequence
  Description of Artificial Sequence: Synthetic oligonucleotide
  Antisense strand to SEQ ID NO: 930242
uuuaacauuacccuggccu

SEQ ID NO: 930244 - RNA, 19 nt, Artificial Sequence
  Description of Artificial Sequence: Synthetic oligonucleotide
  Sense strand starting at position 934 of SEQ ID NO: 913476
gcacuccuuucugggacua

SEQ ID NO: 930245 - RNA, 19 nt, Artificial Sequence
  Description of Artificial Sequence: Synthetic oligonucleotide
  Antisense strand to SEQ ID NO: 930244
uagucccagaaaggagugc

SEQ ID NO: 930246 - RNA, 19 nt, Artificial Sequence
  Description of Artificial Sequence: Synthetic oligonucleotide
  Sense strand starting at position 2118 of SEQ ID NO: 913476
ugcgcuugcucugaaggaa

SEQ ID NO: 930247 - RNA, 19 nt, Artificial Sequence
  Description of Artificial Sequence: Synthetic oligonucleotide
  Antisense strand to SEQ ID NO: 930246
uuccuucagagcaagcgca

SEQ ID NO: 930248 - RNA, 19 nt, Artificial Sequence
  Description of Artificial Sequence: Synthetic oligonucleotide
  Sense strand starting at position 768 of SEQ ID NO: 913476
uguuuaaugugucgaggac

SEQ ID NO: 930249 - RNA, 19 nt, Artificial Sequence
  Description of Artificial Sequence: Synthetic oligonucleotide
  Antisense strand to SEQ ID NO: 930248
guccucgacacauuaaaca

SEQ ID NO: 930250 - RNA, 19 nt, Artificial Sequence
  Description of Artificial Sequence: Synthetic oligonucleotide
  Sense strand starting at position 1046 of SEQ ID NO: 913476
cguguuucuucuggcaaug

SEQ ID NO: 930251 - RNA, 19 nt, Artificial Sequence
  Description of Artificial Sequence: Synthetic oligonucleotide
  Antisense strand to SEQ ID NO: 930250
cauugccagaagaaacacg

SEQ ID NO: 930252 - RNA, 19 nt, Artificial Sequence
  Description of Artificial Sequence: Synthetic oligonucleotide
  Sense strand starting at position 1045 of SEQ ID NO: 913476
gcguguuucuucuggcaau

SEQ ID NO: 930253 - RNA, 19 nt, Artificial Sequence
  Description of Artificial Sequence: Synthetic oligonucleotide
  Antisense strand to SEQ ID NO: 930252
auugccagaagaaacacgc

SEQ ID NO: 930254 - RNA, 19 nt, Artificial Sequence
  Description of Artificial Sequence: Synthetic oligonucleotide
  Sense strand starting at position 1653 of SEQ ID NO: 913477
cuuuguuucccguuacagu

SEQ ID NO: 930255 - RNA, 19 nt, Artificial Sequence
  Description of Artificial Sequence: Synthetic oligonucleotide
  Antisense strand to SEQ ID NO: 930254
acuguaacgggaaacaaag

SEQ ID NO: 930256 - RNA, 19 nt, Artificial Sequence
  Description of Artificial Sequence: Synthetic oligonucleotide
  Sense strand starting at position 2606 of SEQ ID NO: 913477
uugacauugguugaacuuu

SEQ ID NO: 930257 - RNA, 19 nt, Artificial Sequence
  Description of Artificial Sequence: Synthetic oligonucleotide
  Antisense strand to SEQ ID NO: 930256
aaaguucaaccaaugucaa

SEQ ID NO: 930258 - RNA, 19 nt, Artificial Sequence
  Description of Artificial Sequence: Synthetic oligonucleotide
  Sense strand starting at position 30 of SEQ ID NO: 913477
aucacuggguacuuaauaa

SEQ ID NO: 930259 - RNA, 19 nt, Artificial Sequence
  Description of Artificial Sequence: Synthetic oligonucleotide
  Antisense strand to SEQ ID NO: 930258
uuauuaaguacccagugau

SEQ ID NO: 930260 - RNA, 19 nt, Artificial Sequence
  Description of Artificial Sequence: Synthetic oligonucleotide
  Sense strand starting at position 1118 of SEQ ID NO: 913477
ccgaccuuacuguaauaaa

SEQ ID NO: 930261 - RNA, 19 nt, Artificial Sequence
  Description of Artificial Sequence: Synthetic oligonucleotide
  Antisense strand to SEQ ID NO: 930260
uuuauuacaguaaggucgg

SEQ ID NO: 930262 - RNA, 19 nt, Artificial Sequence
  Description of Artificial Sequence: Synthetic oligonucleotide
  Sense strand starting at position 2604 of SEQ ID NO: 913477
aauugacauugguugaacu

SEQ ID NO: 930263 - RNA, 19 nt, Artificial Sequence
  Description of Artificial Sequence: Synthetic oligonucleotide
  Antisense strand to SEQ ID NO: 930262
aguucaaccaaugucaauu

SEQ ID NO: 930264 - RNA, 19 nt, Artificial Sequence
  Description of Artificial Sequence: Synthetic oligonucleotide
  Sense strand starting at position 2409 of SEQ ID NO: 913477
ggacuucugcgugggauuu

SEQ ID NO: 930265 - RNA, 19 nt, Artificial Sequence
  Description of Artificial Sequence: Synthetic oligonucleotide
  Antisense strand to SEQ ID NO: 930264
aaaucccacgcagaagucc

SEQ ID NO: 930266 - RNA, 19 nt, Artificial Sequence
  Description of Artificial Sequence: Synthetic oligonucleotide
  Sense strand starting at position 3085 of SEQ ID NO: 913477
cggaacaauuaaguauauu

SEQ ID NO: 930267 - RNA, 19 nt, Artificial Sequence
  Description of Artificial Sequence: Synthetic oligonucleotide
  Antisense strand to SEQ ID NO: 930266
aauauacuuaauuguuccg

SEQ ID NO: 930268 - RNA, 19 nt, Artificial Sequence
  Description of Artificial Sequence: Synthetic oligonucleotide
  Sense strand starting at position 3358 of SEQ ID NO: 913477
gaaauugugguuugaacag

SEQ ID NO: 930269 - RNA, 19 nt, Artificial Sequence
  Description of Artificial Sequence: Synthetic oligonucleotide
  Antisense strand to SEQ ID NO: 930268
cuguucaaaccacaauuuc

SEQ ID NO: 930270 - RNA, 19 nt, Artificial Sequence
  Description of Artificial Sequence: Synthetic oligonucleotide
  Sense strand starting at position 744 of SEQ ID NO: 913477
guggaauaaugauucuucu

SEQ ID NO: 930271 - RNA, 19 nt, Artificial Sequence
  Description of Artificial Sequence: Synthetic oligonucleotide
  Antisense strand to SEQ ID NO: 930270
agaagaaucauuauuccac

SEQ ID NO: 930272 - RNA, 19 nt, Artificial Sequence
  Description of Artificial Sequence: Synthetic oligonucleotide
  Sense strand starting at position 3119 of SEQ ID NO: 913477
cucauauaggguggugaga

SEQ ID NO: 930273 - RNA, 19 nt, Artificial Sequence
  Description of Artificial Sequence: Synthetic oligonucleotide
  Antisense strand to SEQ ID NO: 930272
ucucaccacccuauaugag

SEQ ID NO: 930274 - RNA, 19 nt, Artificial Sequence
  Description of Artificial Sequence: Synthetic oligonucleotide
  Sense strand starting at position 3484 of SEQ ID NO: 913477
agaauuauuucccauggac

SEQ ID NO: 930275 - RNA, 19 nt, Artificial Sequence
  Description of Artificial Sequence: Synthetic oligonucleotide
  Antisense strand to SEQ ID NO: 930274
guccaugggaaauaauucu

SEQ ID NO: 930276 - RNA, 19 nt, Artificial Sequence
  Description of Artificial Sequence: Synthetic oligonucleotide
  Sense strand starting at position 2605 of SEQ ID NO: 913477
auugacauugguugaacuu

SEQ ID NO: 930277 - RNA, 19 nt, Artificial Sequence
  Description of Artificial Sequence: Synthetic oligonucleotide
  Antisense strand to SEQ ID NO: 930276
aaguucaaccaaugucaau

SEQ ID NO: 930278 - RNA, 19 nt, Artificial Sequence
  Description of Artificial Sequence: Synthetic oligonucleotide
  Sense strand starting at position 2257 of SEQ ID NO: 913477
guaaucagggcauaucuuu

SEQ ID NO: 930279 - RNA, 19 nt, Artificial Sequence
  Description of Artificial Sequence: Synthetic oligonucleotide
  Antisense strand to SEQ ID NO: 930278
aaagauaugcccugauuac

SEQ ID NO: 930280 - RNA, 19 nt, Artificial Sequence
  Description of Artificial Sequence: Synthetic oligonucleotide
  Sense strand starting at position 2255 of SEQ ID NO: 913477
uuguaaucagggcauaucu

SEQ ID NO: 930281 - RNA, 19 nt, Artificial Sequence
  Description of Artificial Sequence: Synthetic oligonucleotide
  Antisense strand to SEQ ID NO: 930280
agauaugcccugauuacaa

SEQ ID NO: 930282 - RNA, 19 nt, Artificial Sequence
  Description of Artificial Sequence: Synthetic oligonucleotide
  Sense strand starting at position 3694 of SEQ ID NO: 913477
gaaagagcugcuggaaauu

SEQ ID NO: 930283 - RNA, 19 nt, Artificial Sequence
  Description of Artificial Sequence: Synthetic oligonucleotide
  Antisense strand to SEQ ID NO: 930282
aauuuccagcagcucuuuc

SEQ ID NO: 930284 - RNA, 19 nt, Artificial Sequence
  Description of Artificial Sequence: Synthetic oligonucleotide
  Sense strand starting at position 3822 of SEQ ID NO: 913477
guaucauaacuauacacgu

SEQ ID NO: 930285 - RNA, 19 nt, Artificial Sequence
  Description of Artificial Sequence: Synthetic oligonucleotide
  Antisense strand to SEQ ID NO: 930284
acguguauaguuaugauac

SEQ ID NO: 930286 - RNA, 19 nt, Artificial Sequence
  Description of Artificial Sequence: Synthetic oligonucleotide
  Sense strand starting at position 2189 of SEQ ID NO: 913477
auacuuugacgauggcaaa

SEQ ID NO: 930287 - RNA, 19 nt, Artificial Sequence
  Description of Artificial Sequence: Synthetic oligonucleotide
  Antisense strand to SEQ ID NO: 930286
uuugccaucgucaaaguau

SEQ ID NO: 930288 - RNA, 19 nt, Artificial Sequence
  Description of Artificial Sequence: Synthetic oligonucleotide
  Sense strand starting at position 2199 of SEQ ID NO: 913477
gauggcaaagacugcuaua

SEQ ID NO: 930289 - RNA, 19 nt, Artificial Sequence
  Description of Artificial Sequence: Synthetic oligonucleotide
  Antisense strand to SEQ ID NO: 930288
uauagcagucuuugccauc

SEQ ID NO: 930290 - RNA, 19 nt, Artificial Sequence
  Description of Artificial Sequence: Synthetic oligonucleotide
  Sense strand starting at position 3356 of SEQ ID NO: 913477
cugaaauugugguuugaac

SEQ ID NO: 930291 - RNA, 19 nt, Artificial Sequence
  Description of Artificial Sequence: Synthetic oligonucleotide
  Antisense strand to SEQ ID NO: 930290
guucaaaccacaauuucag

SEQ ID NO: 930292 - RNA, 19 nt, Artificial Sequence
  Description of Artificial Sequence: Synthetic oligonucleotide
  Sense strand starting at position 3281 of SEQ ID NO: 913477
cauaaagaggcauguguaa

SEQ ID NO: 930293 - RNA, 19 nt, Artificial Sequence
  Description of Artificial Sequence: Synthetic oligonucleotide
  Antisense strand to SEQ ID NO: 930292
uuacacaugccucuuuaug

SEQ ID NO: 930294 - RNA, 19 nt, Artificial Sequence
  Description of Artificial Sequence: Synthetic oligonucleotide
  Sense strand starting at position 2361 of SEQ ID NO: 913477
agaccaaagugguugcuaa

SEQ ID NO: 930295 - RNA, 19 nt, Artificial Sequence
  Description of Artificial Sequence: Synthetic oligonucleotide
  Antisense strand to SEQ ID NO: 930294
uuagcaaccacuuuggucu

SEQ ID NO: 930296 - RNA, 19 nt, Artificial Sequence
  Description of Artificial Sequence: Synthetic oligonucleotide
  Sense strand starting at position 843 of SEQ ID NO: 913477
caaauucgucuuggaauug

SEQ ID NO: 930297 - RNA, 19 nt, Artificial Sequence
  Description of Artificial Sequence: Synthetic oligonucleotide
  Antisense strand to SEQ ID NO: 930296
caauuccaagacgaauuug

SEQ ID NO: 930298 - RNA, 19 nt, Artificial Sequence
  Description of Artificial Sequence: Synthetic oligonucleotide
  Sense strand starting at position 1008 of SEQ ID NO: 913477
aagugauaauuaguaugcu

SEQ ID NO: 930299 - RNA, 19 nt, Artificial Sequence
  Description of Artificial Sequence: Synthetic oligonucleotide
  Antisense strand to SEQ ID NO: 930298
agcauacuaauuaucacuu

SEQ ID NO: 930300 - RNA, 19 nt, Artificial Sequence
  Description of Artificial Sequence: Synthetic oligonucleotide
  Sense strand starting at position 2336 of SEQ ID NO: 913477
ucaauaucugcgcaauaug

SEQ ID NO: 930301 - RNA, 19 nt, Artificial Sequence
  Description of Artificial Sequence: Synthetic oligonucleotide
  Antisense strand to SEQ ID NO: 930300
cauauugcgcagauauuga

SEQ ID NO: 930302 - RNA, 19 nt, Artificial Sequence
  Description of Artificial Sequence: Synthetic oligonucleotide
  Sense strand starting at position 2183 of SEQ ID NO: 913477
agucuuauacuuugacgau

SEQ ID NO: 930303 - RNA, 19 nt, Artificial Sequence
  Description of Artificial Sequence: Synthetic oligonucleotide
  Antisense strand to SEQ ID NO: 930302
aucgucaaaguauaagacu

SEQ ID NO: 930304 - RNA, 19 nt, Artificial Sequence
  Description of Artificial Sequence: Synthetic oligonucleotide
  Sense strand starting at position 2215 of SEQ ID NO: 913477
auaaaugugcaaugucuga

SEQ ID NO: 930305 - RNA, 19 nt, Artificial Sequence
  Description of Artificial Sequence: Synthetic oligonucleotide
  Antisense strand to SEQ ID NO: 930304
ucagacauugcacauuuau

SEQ ID NO: 930306 - RNA, 19 nt, Artificial Sequence
  Description of Artificial Sequence: Synthetic oligonucleotide
  Sense strand starting at position 2308 of SEQ ID NO: 913477
guaaucaagcugcaguaau

SEQ ID NO: 930307 - RNA, 19 nt, Artificial Sequence
  Description of Artificial Sequence: Synthetic oligonucleotide
  Antisense strand to SEQ ID NO: 930306
auuacugcagcuugauuac

SEQ ID NO: 930308 - RNA, 19 nt, Artificial Sequence
  Description of Artificial Sequence: Synthetic oligonucleotide
  Sense strand starting at position 2253 of SEQ ID NO: 913477
cuuuguaaucagggcauau

SEQ ID NO: 930309 - RNA, 19 nt, Artificial Sequence
  Description of Artificial Sequence: Synthetic oligonucleotide
  Antisense strand to SEQ ID NO: 930308
auaugcccugauuacaaag

SEQ ID NO: 930310 - RNA, 19 nt, Artificial Sequence
  Description of Artificial Sequence: Synthetic oligonucleotide
  Sense strand starting at position 2362 of SEQ ID NO: 913477
gaccaaagugguugcuaau

SEQ ID NO: 930311 - RNA, 19 nt, Artificial Sequence
  Description of Artificial Sequence: Synthetic oligonucleotide
  Antisense strand to SEQ ID NO: 930310
auuagcaaccacuuugguc

SEQ ID NO: 930312 - RNA, 19 nt, Artificial Sequence
  Description of Artificial Sequence: Synthetic oligonucleotide
  Sense strand starting at position 839 of SEQ ID NO: 913477
agggcaaauucgucuugga

SEQ ID NO: 930313 - RNA, 19 nt, Artificial Sequence
  Description of Artificial Sequence: Synthetic oligonucleotide
  Antisense strand to SEQ ID NO: 930312
uccaagacgaauuugcccu

SEQ ID NO: 930314 - RNA, 19 nt, Artificial Sequence
  Description of Artificial Sequence: Synthetic oligonucleotide
  Sense strand starting at position 934 of SEQ ID NO: 913477
gugcuuccuacuugaagga

SEQ ID NO: 930315 - RNA, 19 nt, Artificial Sequence
  Description of Artificial Sequence: Synthetic oligonucleotide
  Antisense strand to SEQ ID NO: 930314
uccuucaaguaggaagcac

SEQ ID NO: 930316 - RNA, 19 nt, Artificial Sequence
  Description of Artificial Sequence: Synthetic oligonucleotide
  Sense strand starting at position 2776 of SEQ ID NO: 913477
ccaucaagccauugaugca

SEQ ID NO: 930317 - RNA, 19 nt, Artificial Sequence
  Description of Artificial Sequence: Synthetic oligonucleotide
  Antisense strand to SEQ ID NO: 930316
ugcaucaauggcuugaugg

SEQ ID NO: 930318 - RNA, 19 nt, Artificial Sequence
  Description of Artificial Sequence: Synthetic oligonucleotide
  Sense strand starting at position 2713 of SEQ ID NO: 913477
ucauuaaugcugcagucua

SEQ ID NO: 930319 - RNA, 19 nt, Artificial Sequence
  Description of Artificial Sequence: Synthetic oligonucleotide
  Antisense strand to SEQ ID NO: 930318
uagacugcagcauuaauga

SEQ ID NO: 930320 - RNA, 19 nt, Artificial Sequence
  Description of Artificial Sequence: Synthetic oligonucleotide
  Sense strand starting at position 2101 of SEQ ID NO: 913477
aggguugcccgguauccaa

SEQ ID NO: 930321 - RNA, 19 nt, Artificial Sequence
  Description of Artificial Sequence: Synthetic oligonucleotide
  Antisense strand to SEQ ID NO: 930320
uuggauaccgggcaacccu

SEQ ID NO: 930322 - RNA, 19 nt, Artificial Sequence
  Description of Artificial Sequence: Synthetic oligonucleotide
  Sense strand starting at position 651 of SEQ ID NO: 913477
guuugaaauuuacaugcaa

SEQ ID NO: 930323 - RNA, 19 nt, Artificial Sequence
  Description of Artificial Sequence: Synthetic oligonucleotide
  Antisense strand to SEQ ID NO: 930322
uugcauguaaauuucaaac

SEQ ID NO: 930324 - RNA, 19 nt, Artificial Sequence
  Description of Artificial Sequence: Synthetic oligonucleotide
  Sense strand starting at position 2872 of SEQ ID NO: 913477
ucaugucauuuagaaguac

SEQ ID NO: 930325 - RNA, 19 nt, Artificial Sequence
  Description of Artificial Sequence: Synthetic oligonucleotide
  Antisense strand to SEQ ID NO: 930324
guacuucuaaaugacauga

SEQ ID NO: 930326 - RNA, 19 nt, Artificial Sequence
  Description of Artificial Sequence: Synthetic oligonucleotide
  Sense strand starting at position 1252 of SEQ ID NO: 913477
gaccacugccuucgggauu

SEQ ID NO: 930327 - RNA, 19 nt, Artificial Sequence
  Description of Artificial Sequence: Synthetic oligonucleotide
  Antisense strand to SEQ ID NO: 930326
aaucccgaaggcagugguc

SEQ ID NO: 930328 - RNA, 19 nt, Artificial Sequence
  Description of Artificial Sequence: Synthetic oligonucleotide
  Sense strand starting at position 2629 of SEQ ID NO: 913477
aguaauuugucagaaugua

SEQ ID NO: 930329 - RNA, 19 nt, Artificial Sequence
  Description of Artificial Sequence: Synthetic oligonucleotide
  Antisense strand to SEQ ID NO: 930328
uacauucugacaaauuacu

SEQ ID NO: 930330 - RNA, 19 nt, Artificial Sequence
  Description of Artificial Sequence: Synthetic oligonucleotide
  Sense strand starting at position 3093 of SEQ ID NO: 913477
uuaaguauauugccauagu

SEQ ID NO: 930331 - RNA, 19 nt, Artificial Sequence
  Description of Artificial Sequence: Synthetic oligonucleotide
  Antisense strand to SEQ ID NO: 930330
acuauggcaauauacuuaa

SEQ ID NO: 930332 - RNA, 19 nt, Artificial Sequence
  Description of Artificial Sequence: Synthetic oligonucleotide
  Sense strand starting at position 2724 of SEQ ID NO: 913477
gcagucuaaucaguuauac

SEQ ID NO: 930333 - RNA, 19 nt, Artificial Sequence
  Description of Artificial Sequence: Synthetic oligonucleotide
  Antisense strand to SEQ ID NO: 930332
guauaacugauuagacugc

SEQ ID NO: 930334 - RNA, 19 nt, Artificial Sequence
  Description of Artificial Sequence: Synthetic oligonucleotide
  Sense strand starting at position 940 of SEQ ID NO: 913478
aauggaaguguuuggaaga

SEQ ID NO: 930335 - RNA, 19 nt, Artificial Sequence
  Description of Artificial Sequence: Synthetic oligonucleotide
  Antisense strand to SEQ ID NO: 930334
ucuuccaaacacuuccauu

SEQ ID NO: 930336 - RNA, 19 nt, Artificial Sequence
  Description of Artificial Sequence: Synthetic oligonucleotide
  Sense strand starting at position 2445 of SEQ ID NO: 913478
cuguuaagcgucuucgaua

SEQ ID NO: 930337 - RNA, 19 nt, Artificial Sequence
  Description of Artificial Sequence: Synthetic oligonucleotide
  Antisense strand to SEQ ID NO: 930336
uaucgaagacgcuuaacag

SEQ ID NO: 930338 - RNA, 19 nt, Artificial Sequence
  Description of Artificial Sequence: Synthetic oligonucleotide
  Sense strand starting at position 677 of SEQ ID NO: 913478
ugggaauauuaggugaagu

SEQ ID NO: 930339 - RNA, 19 nt, Artificial Sequence
  Description of Artificial Sequence: Synthetic oligonucleotide
  Antisense strand to SEQ ID NO: 930338
acuucaccuaauauuccca

SEQ ID NO: 930340 - RNA, 19 nt, Artificial Sequence
  Description of Artificial Sequence: Synthetic oligonucleotide
  Sense strand starting at position 587 of SEQ ID NO: 913478
guaacaagauuaucaagug

SEQ ID NO: 930341 - RNA, 19 nt, Artificial Sequence
  Description of Artificial Sequence: Synthetic oligonucleotide
  Antisense strand to SEQ ID NO: 930340
cacuugauaaucuuguuac

SEQ ID NO: 930342 - RNA, 19 nt, Artificial Sequence
  Description of Artificial Sequence: Synthetic oligonucleotide
  Sense strand starting at position 300 of SEQ ID NO: 913478
gaugaacacucgguaaaua

SEQ ID NO: 930343 - RNA, 19 nt, Artificial Sequence
  Description of Artificial Sequence: Synthetic oligonucleotide
  Antisense strand to SEQ ID NO: 930342
uauuuaccgaguguucauc

SEQ ID NO: 930344 - RNA, 19 nt, Artificial Sequence
  Description of Artificial Sequence: Synthetic oligonucleotide
  Sense strand starting at position 2905 of SEQ ID NO: 913478
cucuuagaacagugaccaa

SEQ ID NO: 930345 - RNA, 19 nt, Artificial Sequence
  Description of Artificial Sequence: Synthetic oligonucleotide
  Antisense strand to SEQ ID NO: 930344
uuggucacuguucuaagag

SEQ ID NO: 930346 - RNA, 19 nt, Artificial Sequence
  Description of Artificial Sequence: Synthetic oligonucleotide
  Sense strand starting at position 612 of SEQ ID NO: 913478
guaggauucuaauccagau

SEQ ID NO: 930347 - RNA, 19 nt, Artificial Sequence
  Description of Artificial Sequence: Synthetic oligonucleotide
  Antisense strand to SEQ ID NO: 930346
aucuggauuagaauccuac

SEQ ID NO: 930348 - RNA, 19 nt, Artificial Sequence
  Description of Artificial Sequence: Synthetic oligonucleotide
  Sense strand starting at position 743 of SEQ ID NO: 913478
caagauugcuacuuaggga

SEQ ID NO: 930349 - RNA, 19 nt, Artificial Sequence
  Description of Artificial Sequence: Synthetic oligonucleotide
  Antisense strand to SEQ ID NO: 930348
ucccuaaguagcaaucuug

SEQ ID NO: 930350 - RNA, 19 nt, Artificial Sequence
  Description of Artificial Sequence: Synthetic oligonucleotide
  Sense strand starting at position 678 of SEQ ID NO: 913478
gggaauauuaggugaaguu

SEQ ID NO: 930351 - RNA, 19 nt, Artificial Sequence
  Description of Artificial Sequence: Synthetic oligonucleotide
  Antisense strand to SEQ ID NO: 930350
aacuucaccuaauauuccc

SEQ ID NO: 930352 - RNA, 19 nt, Artificial Sequence
  Description of Artificial Sequence: Synthetic oligonucleotide
  Sense strand starting at position 3376 of SEQ ID NO: 913478
ucuguagaacuccauguaa

SEQ ID NO: 930353 - RNA, 19 nt, Artificial Sequence
  Description of Artificial Sequence: Synthetic oligonucleotide
  Antisense strand to SEQ ID NO: 930352
uuacauggaguucuacaga

SEQ ID NO: 930354 - RNA, 19 nt, Artificial Sequence
  Description of Artificial Sequence: Synthetic oligonucleotide
  Sense strand starting at position 2444 of SEQ ID NO: 913478
ucuguuaagcgucuucgau

SEQ ID NO: 930355 - RNA, 19 nt, Artificial Sequence
  Description of Artificial Sequence: Synthetic oligonucleotide
  Antisense strand to SEQ ID NO: 930354
aucgaagacgcuuaacaga

SEQ ID NO: 930356 - RNA, 19 nt, Artificial Sequence
  Description of Artificial Sequence: Synthetic oligonucleotide
  Sense strand starting at position 2443 of SEQ ID NO: 913478
uucuguuaagcgucuucga

SEQ ID NO: 930357 - RNA, 19 nt, Artificial Sequence
  Description of Artificial Sequence: Synthetic oligonucleotide
  Antisense strand to SEQ ID NO: 930356
ucgaagacgcuuaacagaa

SEQ ID NO: 930358 - RNA, 19 nt, Artificial Sequence
  Description of Artificial Sequence: Synthetic oligonucleotide
  Sense strand starting at position 1030 of SEQ ID NO: 913478
ggcgauugagucuaggaaa

SEQ ID NO: 930359 - RNA, 19 nt, Artificial Sequence
  Description of Artificial Sequence: Synthetic oligonucleotide
  Antisense strand to SEQ ID NO: 930358
uuuccuagacucaaucgcc

SEQ ID NO: 930360 - RNA, 19 nt, Artificial Sequence
  Description of Artificial Sequence: Synthetic oligonucleotide
  Sense strand starting at position 299 of SEQ ID NO: 913478
agaugaacacucgguaaau

SEQ ID NO: 930361 - RNA, 19 nt, Artificial Sequence
  Description of Artificial Sequence: Synthetic oligonucleotide
  Antisense strand to SEQ ID NO: 930360
auuuaccgaguguucaucu

SEQ ID NO: 930362 - RNA, 19 nt, Artificial Sequence
  Description of Artificial Sequence: Synthetic oligonucleotide
  Sense strand starting at position 3798 of SEQ ID NO: 913478
ugauacugauuugaacaua

SEQ ID NO: 930363 - RNA, 19 nt, Artificial Sequence
  Description of Artificial Sequence: Synthetic oligonucleotide
  Antisense strand to SEQ ID NO: 930362
uauguucaaaucaguauca

SEQ ID NO: 930364 - RNA, 19 nt, Artificial Sequence
  Description of Artificial Sequence: Synthetic oligonucleotide
  Sense strand starting at position 2677 of SEQ ID NO: 913478
guaauaacauagguauuac

SEQ ID NO: 930365 - RNA, 19 nt, Artificial Sequence
  Description of Artificial Sequence: Synthetic oligonucleotide
  Antisense strand to SEQ ID NO: 930364
guaauaccuauguuauuac

SEQ ID NO: 930366 - RNA, 19 nt, Artificial Sequence
  Description of Artificial Sequence: Synthetic oligonucleotide
  Sense strand starting at position 326 of SEQ ID NO: 913478
guacuugauaguugggaaa

SEQ ID NO: 930367 - RNA, 19 nt, Artificial Sequence
  Description of Artificial Sequence: Synthetic oligonucleotide
  Antisense strand to SEQ ID NO: 930366
uuucccaacuaucaaguac

SEQ ID NO: 930368 - RNA, 19 nt, Artificial Sequence
  Description of Artificial Sequence: Synthetic oligonucleotide
  Sense strand starting at position 637 of SEQ ID NO: 913478
acucgaaauccaggacuuu

SEQ ID NO: 930369 - RNA, 19 nt, Artificial Sequence
  Description of Artificial Sequence: Synthetic oligonucleotide
  Antisense strand to SEQ ID NO: 930368
aaaguccuggauuucgagu

SEQ ID NO: 930370 - RNA, 19 nt, Artificial Sequence
  Description of Artificial Sequence: Synthetic oligonucleotide
  Sense strand starting at position 1042 of SEQ ID NO: 913478
uaggaaagauucucgagca

SEQ ID NO: 930371 - RNA, 19 nt, Artificial Sequence
  Description of Artificial Sequence: Synthetic oligonucleotide
  Antisense strand to SEQ ID NO: 930370
ugcucgagaaucuuuccua

SEQ ID NO: 930372 - RNA, 19 nt, Artificial Sequence
  Description of Artificial Sequence: Synthetic oligonucleotide
  Sense strand starting at position 3512 of SEQ ID NO: 913478
cguauuguaauggauggau

SEQ ID NO: 930373 - RNA, 19 nt, Artificial Sequence
  Description of Artificial Sequence: Synthetic oligonucleotide
  Antisense strand to SEQ ID NO: 930372
auccauccauuacaauacg

SEQ ID NO: 930374 - RNA, 19 nt, Artificial Sequence
  Description of Artificial Sequence: Synthetic oligonucleotide
  Sense strand starting at position 285 of SEQ ID NO: 913478
gaauccuucccacgagaug

SEQ ID NO: 930375 - RNA, 19 nt, Artificial Sequence
  Description of Artificial Sequence: Synthetic oligonucleotide
  Antisense strand to SEQ ID NO: 930374
caucucgugggaaggauuc

SEQ ID NO: 930376 - RNA, 19 nt, Artificial Sequence
  Description of Artificial Sequence: Synthetic oligonucleotide
  Sense strand starting at position 3767 of SEQ ID NO: 913478
auauaucacugagugcaaa

SEQ ID NO: 930377 - RNA, 19 nt, Artificial Sequence
  Description of Artificial Sequence: Synthetic oligonucleotide
  Antisense strand to SEQ ID NO: 930376
uuugcacucagugauauau

SEQ ID NO: 930378 - RNA, 19 nt, Artificial Sequence
  Description of Artificial Sequence: Synthetic oligonucleotide
  Sense strand starting at position 325 of SEQ ID NO: 913478
uguacuugauaguugggaa

SEQ ID NO: 930379 - RNA, 19 nt, Artificial Sequence
  Description of Artificial Sequence: Synthetic oligonucleotide
  Antisense strand to SEQ ID NO: 930378
uucccaacuaucaaguaca

SEQ ID NO: 930380 - RNA, 19 nt, Artificial Sequence
  Description of Artificial Sequence: Synthetic oligonucleotide
  Sense strand starting at position 89 of SEQ ID NO: 913478
caagauucgugaucuaaua

SEQ ID NO: 930381 - RNA, 19 nt, Artificial Sequence
  Description of Artificial Sequence: Synthetic oligonucleotide
  Antisense strand to SEQ ID NO: 930380
uauuagaucacgaaucuug

SEQ ID NO: 930382 - RNA, 19 nt, Artificial Sequence
  Description of Artificial Sequence: Synthetic oligonucleotide
  Sense strand starting at position 320 of SEQ ID NO: 913478
uaagguguacuugauaguu

SEQ ID NO: 930383 - RNA, 19 nt, Artificial Sequence
  Description of Artificial Sequence: Synthetic oligonucleotide
  Antisense strand to SEQ ID NO: 930382
aacuaucaaguacaccuua

SEQ ID NO: 930384 - RNA, 19 nt, Artificial Sequence
  Description of Artificial Sequence: Synthetic oligonucleotide
  Sense strand starting at position 3806 of SEQ ID NO: 913478
auuugaacauaucaacgau

SEQ ID NO: 930385 - RNA, 19 nt, Artificial Sequence
  Description of Artificial Sequence: Synthetic oligonucleotide
  Antisense strand to SEQ ID NO: 930384
aucguugauauguucaaau

SEQ ID NO: 930386 - RNA, 19 nt, Artificial Sequence
  Description of Artificial Sequence: Synthetic oligonucleotide
  Sense strand starting at position 3378 of SEQ ID NO: 913478
uguagaacuccauguaaua

SEQ ID NO: 930387 - RNA, 19 nt, Artificial Sequence
  Description of Artificial Sequence: Synthetic oligonucleotide
  Antisense strand to SEQ ID NO: 930386
uauuacauggaguucuaca

SEQ ID NO: 930388 - RNA, 19 nt, Artificial Sequence
  Description of Artificial Sequence: Synthetic oligonucleotide
  Sense strand starting at position 538 of SEQ ID NO: 913478
gggacuguacugcguauuu

SEQ ID NO: 930389 - RNA, 19 nt, Artificial Sequence
  Description of Artificial Sequence: Synthetic oligonucleotide
  Antisense strand to SEQ ID NO: 930388
aaauacgcaguacaguccc

SEQ ID NO: 930390 - RNA, 19 nt, Artificial Sequence
  Description of Artificial Sequence: Synthetic oligonucleotide
  Sense strand starting at position 1094 of SEQ ID NO: 913478
ggcaaugggcucgaauuca

SEQ ID NO: 930391 - RNA, 19 nt, Artificial Sequence
  Description of Artificial Sequence: Synthetic oligonucleotide
  Antisense strand to SEQ ID NO: 930390
ugaauucgagcccauugcc

SEQ ID NO: 930392 - RNA, 19 nt, Artificial Sequence
  Description of Artificial Sequence: Synthetic oligonucleotide
  Sense strand starting at position 3330 of SEQ ID NO: 913478
uugcaaacugaaugucaau

SEQ ID NO: 930393 - RNA, 19 nt, Artificial Sequence
  Description of Artificial Sequence: Synthetic oligonucleotide
  Antisense strand to SEQ ID NO: 930392
auugacauucaguuugcaa

SEQ ID NO: 930394 - RNA, 19 nt, Artificial Sequence
  Description of Artificial Sequence: Synthetic oligonucleotide
  Sense strand starting at position 2247 of SEQ ID NO: 913478
aaguguauuggguacaguu

SEQ ID NO: 930395 - RNA, 19 nt, Artificial Sequence
  Description of Artificial Sequence: Synthetic oligonucleotide
  Antisense strand to SEQ ID NO: 930394
aacuguacccaauacacuu

SEQ ID NO: 930396 - RNA, 19 nt, Artificial Sequence
  Description of Artificial Sequence: Synthetic oligonucleotide
  Sense strand starting at position 734 of SEQ ID NO: 913478
acuguuucccaagauugcu

SEQ ID NO: 930397 - RNA, 19 nt, Artificial Sequence
  Description of Artificial Sequence: Synthetic oligonucleotide
  Antisense strand to SEQ ID NO: 930396
agcaaucuugggaaacagu

SEQ ID NO: 930398 - RNA, 19 nt, Artificial Sequence
  Description of Artificial Sequence: Synthetic oligonucleotide
  Sense strand starting at position 3460 of SEQ ID NO: 913478
aauggucaucugugaaucu

SEQ ID NO: 930399 - RNA, 19 nt, Artificial Sequence
  Description of Artificial Sequence: Synthetic oligonucleotide
  Antisense strand to SEQ ID NO: 930398
agauucacagaugaccauu

SEQ ID NO: 930400 - RNA, 19 nt, Artificial Sequence
  Description of Artificial Sequence: Synthetic oligonucleotide
  Sense strand starting at position 859 of SEQ ID NO: 913478
ccuugacguccuugaaaga

SEQ ID NO: 930401 - RNA, 19 nt, Artificial Sequence
  Description of Artificial Sequence: Synthetic oligonucleotide
  Antisense strand to SEQ ID NO: 930400
ucuuucaaggacgucaagg

SEQ ID NO: 930402 - RNA, 19 nt, Artificial Sequence
  Description of Artificial Sequence: Synthetic oligonucleotide
  Sense strand starting at position 2666 of SEQ ID NO: 913478
gguacucgucaguaauaac

SEQ ID NO: 930403 - RNA, 19 nt, Artificial Sequence
  Description of Artificial Sequence: Synthetic oligonucleotide
  Antisense strand to SEQ ID NO: 930402
guuauuacugacgaguacc

SEQ ID NO: 930404 - RNA, 19 nt, Artificial Sequence
  Description of Artificial Sequence: Synthetic oligonucleotide
  Sense strand starting at position 3456 of SEQ ID NO: 913478
agguaauggucaucuguga

SEQ ID NO: 930405 - RNA, 19 nt, Artificial Sequence
  Description of Artificial Sequence: Synthetic oligonucleotide
  Antisense strand to SEQ ID NO: 930404
ucacagaugaccauuaccu

SEQ ID NO: 930406 - RNA, 19 nt, Artificial Sequence
  Description of Artificial Sequence: Synthetic oligonucleotide
  Sense strand starting at position 1024 of SEQ ID NO: 913478
gaaauaggcgauugagucu

SEQ ID NO: 930407 - RNA, 19 nt, Artificial Sequence
  Description of Artificial Sequence: Synthetic oligonucleotide
  Antisense strand to SEQ ID NO: 930406
agacucaaucgccuauuuc

SEQ ID NO: 930408 - RNA, 19 nt, Artificial Sequence
  Description of Artificial Sequence: Synthetic oligonucleotide
  Sense strand starting at position 3511 of SEQ ID NO: 913478
ucguauuguaauggaugga

SEQ ID NO: 930409 - RNA, 19 nt, Artificial Sequence
  Description of Artificial Sequence: Synthetic oligonucleotide
  Antisense strand to SEQ ID NO: 930408
uccauccauuacaauacga

SEQ ID NO: 930410 - RNA, 19 nt, Artificial Sequence
  Description of Artificial Sequence: Synthetic oligonucleotide
  Sense strand starting at position 2549 of SEQ ID NO: 913478
uaaagugucuugucauaga

SEQ ID NO: 930411 - RNA, 19 nt, Artificial Sequence
  Description of Artificial Sequence: Synthetic oligonucleotide
  Antisense strand to SEQ ID NO: 930410
ucuaugacaagacacuuua

SEQ ID NO: 930412 - RNA, 19 nt, Artificial Sequence
  Description of Artificial Sequence: Synthetic oligonucleotide
  Sense strand starting at position 2399 of SEQ ID NO: 913478
acgauucugcaauguaaga

SEQ ID NO: 930413 - RNA, 19 nt, Artificial Sequence
  Description of Artificial Sequence: Synthetic oligonucleotide
  Antisense strand to SEQ ID NO: 930412
ucuuacauugcagaaucgu

SEQ ID NO: 930414 - RNA, 19 nt, Artificial Sequence
  Description of Artificial Sequence: Synthetic oligonucleotide
  Sense strand starting at position 1303 of SEQ ID NO: 913479
aggcucacuccuuauaaag

SEQ ID NO: 930415 - RNA, 19 nt, Artificial Sequence
  Description of Artificial Sequence: Synthetic oligonucleotide
  Antisense strand to SEQ ID NO: 930414
cuuuauaaggagugagccu

SEQ ID NO: 930416 - RNA, 19 nt, Artificial Sequence
  Description of Artificial Sequence: Synthetic oligonucleotide
  Sense strand starting at position 3730 of SEQ ID NO: 913479
aaguauucuggccaugaaa

SEQ ID NO: 930417 - RNA, 19 nt, Artificial Sequence
  Description of Artificial Sequence: Synthetic oligonucleotide
  Antisense strand to SEQ ID NO: 930416
uuucauggccagaauacuu

SEQ ID NO: 930418 - RNA, 19 nt, Artificial Sequence
  Description of Artificial Sequence: Synthetic oligonucleotide
  Sense strand starting at position 3943 of SEQ ID NO: 913479
aagugauacccagauggcu

SEQ ID NO: 930419 - RNA, 19 nt, Artificial Sequence
  Description of Artificial Sequence: Synthetic oligonucleotide
  Antisense strand to SEQ ID NO: 930418
agccaucuggguaucacuu

SEQ ID NO: 930420 - RNA, 19 nt, Artificial Sequence
  Description of Artificial Sequence: Synthetic oligonucleotide
  Sense strand starting at position 917 of SEQ ID NO: 913479
aucaguuauuuccugcacu

SEQ ID NO: 930421 - RNA, 19 nt, Artificial Sequence
  Description of Artificial Sequence: Synthetic oligonucleotide
  Antisense strand to SEQ ID NO: 930420
agugcaggaaauaacugau

SEQ ID NO: 930422 - RNA, 19 nt, Artificial Sequence
  Description of Artificial Sequence: Synthetic oligonucleotide
  Sense strand starting at position 3084 of SEQ ID NO: 913479
guaaacaucgcucaaagaa

SEQ ID NO: 930423 - RNA, 19 nt, Artificial Sequence
  Description of Artificial Sequence: Synthetic oligonucleotide
  Antisense strand to SEQ ID NO: 930422
uucuuugagcgauguuuac

SEQ ID NO: 930424 - RNA, 19 nt, Artificial Sequence
  Description of Artificial Sequence: Synthetic oligonucleotide
  Sense strand starting at position 3912 of SEQ ID NO: 913479
guguaugaggagcauuaga

SEQ ID NO: 930425 - RNA, 19 nt, Artificial Sequence
  Description of Artificial Sequence: Synthetic oligonucleotide
  Antisense strand to SEQ ID NO: 930424
ucuaaugcuccucauacac

SEQ ID NO: 930426 - RNA, 19 nt, Artificial Sequence
  Description of Artificial Sequence: Synthetic oligonucleotide
  Sense strand starting at position 857 of SEQ ID NO: 913479
auuagagaucgucauucca

SEQ ID NO: 930427 - RNA, 19 nt, Artificial Sequence
  Description of Artificial Sequence: Synthetic oligonucleotide
  Antisense strand to SEQ ID NO: 930426
uggaaugacgaucucuaau

SEQ ID NO: 930428 - RNA, 19 nt, Artificial Sequence
  Description of Artificial Sequence: Synthetic oligonucleotide
  Sense strand starting at position 32 of SEQ ID NO: 913479
ugggauuuauaucacauaa

SEQ ID NO: 930429 - RNA, 19 nt, Artificial Sequence
  Description of Artificial Sequence: Synthetic oligonucleotide
  Antisense strand to SEQ ID NO: 930428
uuaugugauauaaauccca

SEQ ID NO: 930430 - RNA, 19 nt, Artificial Sequence
  Description of Artificial Sequence: Synthetic oligonucleotide
  Sense strand starting at position 3370 of SEQ ID NO: 913479
ggagaagucccagggcaga

SEQ ID NO: 930431 - RNA, 19 nt, Artificial Sequence
  Description of Artificial Sequence: Synthetic oligonucleotide
  Antisense strand to SEQ ID NO: 930430
ucugcccugggacuucucc

SEQ ID NO: 930432 - RNA, 19 nt, Artificial Sequence
  Description of Artificial Sequence: Synthetic oligonucleotide
  Sense strand starting at position 186 of SEQ ID NO: 913479
agguuugguccuuagaacu

SEQ ID NO: 930433 - RNA, 19 nt, Artificial Sequence
  Description of Artificial Sequence: Synthetic oligonucleotide
  Antisense strand to SEQ ID NO: 930432
aguucuaaggaccaaaccu

SEQ ID NO: 930434 - RNA, 19 nt, Artificial Sequence
  Description of Artificial Sequence: Synthetic oligonucleotide
  Sense strand starting at position 3783 of SEQ ID NO: 913479
gauauauguucuuuggaau

SEQ ID NO: 930435 - RNA, 19 nt, Artificial Sequence
  Description of Artificial Sequence: Synthetic oligonucleotide
  Antisense strand to SEQ ID NO: 930434
auuccaaagaacauauauc

SEQ ID NO: 930436 - RNA, 19 nt, Artificial Sequence
  Description of Artificial Sequence: Synthetic oligonucleotide
  Sense strand starting at position 1802 of SEQ ID NO: 913479
acaagaauagccgagccua

SEQ ID NO: 930437 - RNA, 19 nt, Artificial Sequence
  Description of Artificial Sequence: Synthetic oligonucleotide
  Antisense strand to SEQ ID NO: 930436
uaggcucggcuauucuugu

SEQ ID NO: 930438 - RNA, 19 nt, Artificial Sequence
  Description of Artificial Sequence: Synthetic oligonucleotide
  Sense strand starting at position 3654 of SEQ ID NO: 913479
aacuuuauucucgagggca

SEQ ID NO: 930439 - RNA, 19 nt, Artificial Sequence
  Description of Artificial Sequence: Synthetic oligonucleotide
  Antisense strand to SEQ ID NO: 930438
ugcccucgagaauaaaguu

SEQ ID NO: 930440 - RNA, 19 nt, Artificial Sequence
  Description of Artificial Sequence: Synthetic oligonucleotide
  Sense strand starting at position 3925 of SEQ ID NO: 913479
auuagaaucuguguuauga

SEQ ID NO: 930441 - RNA, 19 nt, Artificial Sequence
  Description of Artificial Sequence: Synthetic oligonucleotide
  Antisense strand to SEQ ID NO: 930440
ucauaacacagauucuaau

SEQ ID NO: 930442 - RNA, 19 nt, Artificial Sequence
  Description of Artificial Sequence: Synthetic oligonucleotide
  Sense strand starting at position 1915 of SEQ ID NO: 913479
aguuaacuaugucuagaug

SEQ ID NO: 930443 - RNA, 19 nt, Artificial Sequence
  Description of Artificial Sequence: Synthetic oligonucleotide
  Antisense strand to SEQ ID NO: 930442
caucuagacauaguuaacu

SEQ ID NO: 930444 - RNA, 19 nt, Artificial Sequence
  Description of Artificial Sequence: Synthetic oligonucleotide
  Sense strand starting at position 2975 of SEQ ID NO: 913479
gacugcugugucuaggaga

SEQ ID NO: 930445 - RNA, 19 nt, Artificial Sequence
  Description of Artificial Sequence: Synthetic oligonucleotide
  Antisense strand to SEQ ID NO: 930444
ucuccuagacacagcaguc

SEQ ID NO: 930446 - RNA, 19 nt, Artificial Sequence
  Description of Artificial Sequence: Synthetic oligonucleotide
  Sense strand starting at position 407 of SEQ ID NO: 913479
gacugcuuucuguaccaga

SEQ ID NO: 930447 - RNA, 19 nt, Artificial Sequence
  Description of Artificial Sequence: Synthetic oligonucleotide
  Antisense strand to SEQ ID NO: 930446
ucugguacagaaagcaguc

SEQ ID NO: 930448 - RNA, 19 nt, Artificial Sequence
  Description of Artificial Sequence: Synthetic oligonucleotide
  Sense strand starting at position 1490 of SEQ ID NO: 913479
agcagaauccuucggagau

SEQ ID NO: 930449 - RNA, 19 nt, Artificial Sequence
  Description of Artificial Sequence: Synthetic oligonucleotide
  Antisense strand to SEQ ID NO: 930448
aucuccgaaggauucugcu

SEQ ID NO: 930450 - RNA, 19 nt, Artificial Sequence
  Description of Artificial Sequence: Synthetic oligonucleotide
  Sense strand starting at position 1916 of SEQ ID NO: 913479
guuaacuaugucuagaugu

SEQ ID NO: 930451 - RNA, 19 nt, Artificial Sequence
  Description of Artificial Sequence: Synthetic oligonucleotide
  Antisense strand to SEQ ID NO: 930450
acaucuagacauaguuaac

SEQ ID NO: 930452 - RNA, 19 nt, Artificial Sequence
  Description of Artificial Sequence: Synthetic oligonucleotide
  Sense strand starting at position 2994 of SEQ ID NO: 913479
guguguacacucuauauag

SEQ ID NO: 930453 - RNA, 19 nt, Artificial Sequence
  Description of Artificial Sequence: Synthetic oligonucleotide
  Antisense strand to SEQ ID NO: 930452
cuauauagaguguacacac

SEQ ID NO: 930454 - RNA, 19 nt, Artificial Sequence
  Description of Artificial Sequence: Synthetic oligonucleotide
  Sense strand starting at position 185 of SEQ ID NO: 913479
gagguuugguccuuagaac

SEQ ID NO: 930455 - RNA, 19 nt, Artificial Sequence
  Description of Artificial Sequence: Synthetic oligonucleotide
  Antisense strand to SEQ ID NO: 930454
guucuaaggaccaaaccuc

SEQ ID NO: 930456 - RNA, 19 nt, Artificial Sequence
  Description of Artificial Sequence: Synthetic oligonucleotide
  Sense strand starting at position 1913 of SEQ ID NO: 913479
ucaguuaacuaugucuaga

SEQ ID NO: 930457 - RNA, 19 nt, Artificial Sequence
  Description of Artificial Sequence: Synthetic oligonucleotide
  Antisense strand to SEQ ID NO: 930456
ucuagacauaguuaacuga

SEQ ID NO: 930458 - RNA, 19 nt, Artificial Sequence
  Description of Artificial Sequence: Synthetic oligonucleotide
  Sense strand starting at position 3957 of SEQ ID NO: 913479
uggcuuugcagugacagaa

SEQ ID NO: 930459 - RNA, 19 nt, Artificial Sequence
  Description of Artificial Sequence: Synthetic oligonucleotide
  Antisense strand to SEQ ID NO: 930458
uucugucacugcaaagcca

SEQ ID NO: 930460 - RNA, 19 nt, Artificial Sequence
  Description of Artificial Sequence: Synthetic oligonucleotide
  Sense strand starting at position 3729 of SEQ ID NO: 913479
uaaguauucuggccaugaa

SEQ ID NO: 930461 - RNA, 19 nt, Artificial Sequence
  Description of Artificial Sequence: Synthetic oligonucleotide
  Antisense strand to SEQ ID NO: 930460
uucauggccagaauacuua

SEQ ID NO: 930462 - RNA, 19 nt, Artificial Sequence
  Description of Artificial Sequence: Synthetic oligonucleotide
  Sense strand starting at position 3080 of SEQ ID NO: 913479
ggaaguaaacaucgcucaa

SEQ ID NO: 930463 - RNA, 19 nt, Artificial Sequence
  Description of Artificial Sequence: Synthetic oligonucleotide
  Antisense strand to SEQ ID NO: 930462
uugagcgauguuuacuucc

SEQ ID NO: 930464 - RNA, 19 nt, Artificial Sequence
  Description of Artificial Sequence: Synthetic oligonucleotide
  Sense strand starting at position 3732 of SEQ ID NO: 913479
guauucuggccaugaaaua

SEQ ID NO: 930465 - RNA, 19 nt, Artificial Sequence
  Description of Artificial Sequence: Synthetic oligonucleotide
  Antisense strand to SEQ ID NO: 930464
uauuucauggccagaauac

SEQ ID NO: 930466 - RNA, 19 nt, Artificial Sequence
  Description of Artificial Sequence: Synthetic oligonucleotide
  Sense strand starting at position 3231 of SEQ ID NO: 913479
cucagaagccuuuggaucu

SEQ ID NO: 930467 - RNA, 19 nt, Artificial Sequence
  Description of Artificial Sequence: Synthetic oligonucleotide
  Antisense strand to SEQ ID NO: 930466
agauccaaaggcuucugag

SEQ ID NO: 930468 - RNA, 19 nt, Artificial Sequence
  Description of Artificial Sequence: Synthetic oligonucleotide
  Sense strand starting at position 3398 of SEQ ID NO: 913479
cagggauugcccuggagug

SEQ ID NO: 930469 - RNA, 19 nt, Artificial Sequence
  Description of Artificial Sequence: Synthetic oligonucleotide
  Antisense strand to SEQ ID NO: 930468
cacuccagggcaaucccug

SEQ ID NO: 930470 - RNA, 19 nt, Artificial Sequence
  Description of Artificial Sequence: Synthetic oligonucleotide
  Sense strand starting at position 148 of SEQ ID NO: 913479
guaaauagcuuuccaucag

SEQ ID NO: 930471 - RNA, 19 nt, Artificial Sequence
  Description of Artificial Sequence: Synthetic oligonucleotide
  Antisense strand to SEQ ID NO: 930470
cugauggaaagcuauuuac

SEQ ID NO: 930472 - RNA, 19 nt, Artificial Sequence
  Description of Artificial Sequence: Synthetic oligonucleotide
  Sense strand starting at position 3147 of SEQ ID NO: 913479
guuguauggaaauguacac

SEQ ID NO: 930473 - RNA, 19 nt, Artificial Sequence
  Description of Artificial Sequence: Synthetic oligonucleotide
  Antisense strand to SEQ ID NO: 930472
guguacauuuccauacaac

SEQ ID NO: 930474 - RNA, 19 nt, Artificial Sequence
  Description of Artificial Sequence: Synthetic oligonucleotide
  Sense strand starting at position 859 of SEQ ID NO: 913479
uagagaucgucauuccauu

SEQ ID NO: 930475 - RNA, 19 nt, Artificial Sequence
  Description of Artificial Sequence: Synthetic oligonucleotide
  Antisense strand to SEQ ID NO: 930474
aauggaaugacgaucucua

SEQ ID NO: 930476 - RNA, 19 nt, Artificial Sequence
  Description of Artificial Sequence: Synthetic oligonucleotide
  Sense strand starting at position 732 of SEQ ID NO: 913479
ccuagugaaguacgacuua

SEQ ID NO: 930477 - RNA, 19 nt, Artificial Sequence
  Description of Artificial Sequence: Synthetic oligonucleotide
  Antisense strand to SEQ ID NO: 930476
uaagucguacuucacuagg

SEQ ID NO: 930478 - RNA, 19 nt, Artificial Sequence
  Description of Artificial Sequence: Synthetic oligonucleotide
  Sense strand starting at position 3945 of SEQ ID NO: 913479
gugauacccagauggcuuu

SEQ ID NO: 930479 - RNA, 19 nt, Artificial Sequence
  Description of Artificial Sequence: Synthetic oligonucleotide
  Antisense strand to SEQ ID NO: 930478
aaagccaucuggguaucac

SEQ ID NO: 930480 - RNA, 19 nt, Artificial Sequence
  Description of Artificial Sequence: Synthetic oligonucleotide
  Sense strand starting at position 3717 of SEQ ID NO: 913479
gguagaggcgcauaaguau

SEQ ID NO: 930481 - RNA, 19 nt, Artificial Sequence
  Description of Artificial Sequence: Synthetic oligonucleotide
  Antisense strand to SEQ ID NO: 930480
auacuuaugcgccucuacc

SEQ ID NO: 930482 - RNA, 19 nt, Artificial Sequence
  Description of Artificial Sequence: Synthetic oligonucleotide
  Sense strand starting at position 3508 of SEQ ID NO: 913479
uuaggcguucuuuauauau

SEQ ID NO: 930483 - RNA, 19 nt, Artificial Sequence
  Description of Artificial Sequence: Synthetic oligonucleotide
  Antisense strand to SEQ ID NO: 930482
auauauaaagaacgccuaa

SEQ ID NO: 930484 - RNA, 19 nt, Artificial Sequence
  Description of Artificial Sequence: Synthetic oligonucleotide
  Sense strand starting at position 3656 of SEQ ID NO: 913479
cuuuauucucgagggcaac

SEQ ID NO: 930485 - RNA, 19 nt, Artificial Sequence
  Description of Artificial Sequence: Synthetic oligonucleotide
  Antisense strand to SEQ ID NO: 930484
guugcccucgagaauaaag

SEQ ID NO: 930486 - RNA, 19 nt, Artificial Sequence
  Description of Artificial Sequence: Synthetic oligonucleotide
  Sense strand starting at position 3657 of SEQ ID NO: 913479
uuuauucucgagggcaacu

SEQ ID NO: 930487 - RNA, 19 nt, Artificial Sequence
  Description of Artificial Sequence: Synthetic oligonucleotide
  Antisense strand to SEQ ID NO: 930486
aguugcccucgagaauaaa

SEQ ID NO: 930488 - RNA, 19 nt, Artificial Sequence
  Description of Artificial Sequence: Synthetic oligonucleotide
  Sense strand starting at position 2589 of SEQ ID NO: 913479
gcgcuuccgcggccugaaa

SEQ ID NO: 930489 - RNA, 19 nt, Artificial Sequence
  Description of Artificial Sequence: Synthetic oligonucleotide
  Antisense strand to SEQ ID NO: 930488
uuucaggccgcggaagcgc

SEQ ID NO: 930490 - RNA, 19 nt, Artificial Sequence
  Description of Artificial Sequence: Synthetic oligonucleotide
  Sense strand starting at position 197 of SEQ ID NO: 913479
uuagaacuuucuggauuug

SEQ ID NO: 930491 - RNA, 19 nt, Artificial Sequence
  Description of Artificial Sequence: Synthetic oligonucleotide
  Antisense strand to SEQ ID NO: 930490
caaauccagaaaguucuaa

SEQ ID NO: 930492 - RNA, 19 nt, Artificial Sequence
  Description of Artificial Sequence: Synthetic oligonucleotide
  Sense strand starting at position 3956 of SEQ ID NO: 913479
auggcuuugcagugacaga

SEQ ID NO: 930493 - RNA, 19 nt, Artificial Sequence
  Description of Artificial Sequence: Synthetic oligonucleotide
  Antisense strand to SEQ ID NO: 930492
ucugucacugcaaagccau

SEQ ID NO: 930494 - RNA, 19 nt, Artificial Sequence
  Description of Artificial Sequence: Synthetic oligonucleotide
  Sense strand starting at position 2438 of SEQ ID NO: 913480
cucucagauuugcuaguua

SEQ ID NO: 930495 - RNA, 19 nt, Artificial Sequence
  Description of Artificial Sequence: Synthetic oligonucleotide
  Antisense strand to SEQ ID NO: 930494
uaacuagcaaaucugagag

SEQ ID NO: 930496 - RNA, 19 nt, Artificial Sequence
  Description of Artificial Sequence: Synthetic oligonucleotide
  Sense strand starting at position 1235 of SEQ ID NO: 913480
ugcaaugcucuucugugua

SEQ ID NO: 930497 - RNA, 19 nt, Artificial Sequence
  Description of Artificial Sequence: Synthetic oligonucleotide
  Antisense strand to SEQ ID NO: 930496
uacacagaagagcauugca

SEQ ID NO: 930498 - RNA, 19 nt, Artificial Sequence
  Description of Artificial Sequence: Synthetic oligonucleotide
  Sense strand starting at position 2501 of SEQ ID NO: 913480
gcaaucauuuggcccugau

SEQ ID NO: 930499 - RNA, 19 nt, Artificial Sequence
  Description of Artificial Sequence: Synthetic oligonucleotide
  Antisense strand to SEQ ID NO: 930498
aucagggccaaaugauugc

SEQ ID NO: 930500 - RNA, 19 nt, Artificial Sequence
  Description of Artificial Sequence: Synthetic oligonucleotide
  Sense strand starting at position 1304 of SEQ ID NO: 913480
ucaggaugucuguagagac

SEQ ID NO: 930501 - RNA, 19 nt, Artificial Sequence
  Description of Artificial Sequence: Synthetic oligonucleotide
  Antisense strand to SEQ ID NO: 930500
gucucuacagacauccuga

SEQ ID NO: 930502 - RNA, 19 nt, Artificial Sequence
  Description of Artificial Sequence: Synthetic oligonucleotide
  Sense strand starting at position 508 of SEQ ID NO: 913480
cuugauagauagguuagau

SEQ ID NO: 930503 - RNA, 19 nt, Artificial Sequence
  Description of Artificial Sequence: Synthetic oligonucleotide
  Antisense strand to SEQ ID NO: 930502
aucuaaccuaucuaucaag

SEQ ID NO: 930504 - RNA, 19 nt, Artificial Sequence
  Description of Artificial Sequence: Synthetic oligonucleotide
  Sense strand starting at position 3551 of SEQ ID NO: 913480
uuguaaggacuguacauau

SEQ ID NO: 930505 - RNA, 19 nt, Artificial Sequence
  Description of Artificial Sequence: Synthetic oligonucleotide
  Antisense strand to SEQ ID NO: 930504
auauguacaguccuuacaa

SEQ ID NO: 930506 - RNA, 19 nt, Artificial Sequence
  Description of Artificial Sequence: Synthetic oligonucleotide
  Sense strand starting at position 2703 of SEQ ID NO: 913480
agacaaggucuauaucugu

SEQ ID NO: 930507 - RNA, 19 nt, Artificial Sequence
  Description of Artificial Sequence: Synthetic oligonucleotide
  Antisense strand to SEQ ID NO: 930506
acagauauagaccuugucu

SEQ ID NO: 930508 - RNA, 19 nt, Artificial Sequence
  Description of Artificial Sequence: Synthetic oligonucleotide
  Sense strand starting at position 507 of SEQ ID NO: 913480
ucuugauagauagguuaga

SEQ ID NO: 930509 - RNA, 19 nt, Artificial Sequence
  Description of Artificial Sequence: Synthetic oligonucleotide
  Antisense strand to SEQ ID NO: 930508
ucuaaccuaucuaucaaga

SEQ ID NO: 930510 - RNA, 19 nt, Artificial Sequence
  Description of Artificial Sequence: Synthetic oligonucleotide
  Sense strand starting at position 3441 of SEQ ID NO: 913480
agggaucccaaaugguuua

SEQ ID NO: 930511 - RNA, 19 nt, Artificial Sequence
  Description of Artificial Sequence: Synthetic oligonucleotide
  Antisense strand to SEQ ID NO: 930510
uaaaccauuugggaucccu

SEQ ID NO: 930512 - RNA, 19 nt, Artificial Sequence
  Description of Artificial Sequence: Synthetic oligonucleotide
  Sense strand starting at position 735 of SEQ ID NO: 913480
aguggucuauaaucaaaga

SEQ ID NO: 930513 - RNA, 19 nt, Artificial Sequence
  Description of Artificial Sequence: Synthetic oligonucleotide
  Antisense strand to SEQ ID NO: 930512
ucuuugauuauagaccacu

SEQ ID NO: 930514 - RNA, 19 nt, Artificial Sequence
  Description of Artificial Sequence: Synthetic oligonucleotide
  Sense strand starting at position 732 of SEQ ID NO: 913480
uccaguggucuauaaucaa

SEQ ID NO: 930515 - RNA, 19 nt, Artificial Sequence
  Description of Artificial Sequence: Synthetic oligonucleotide
  Antisense strand to SEQ ID NO: 930514
uugauuauagaccacugga

SEQ ID NO: 930516 - RNA, 19 nt, Artificial Sequence
  Description of Artificial Sequence: Synthetic oligonucleotide
  Sense strand starting at position 2250 of SEQ ID NO: 913480
cgagcuugccaggcguaaa

SEQ ID NO: 930517 - RNA, 19 nt, Artificial Sequence
  Description of Artificial Sequence: Synthetic oligonucleotide
  Antisense strand to SEQ ID NO: 930516
uuuacgccuggcaagcucg

SEQ ID NO: 930518 - RNA, 19 nt, Artificial Sequence
  Description of Artificial Sequence: Synthetic oligonucleotide
  Sense strand starting at position 1629 of SEQ ID NO: 913480
cgaccucggccgaguagaa

SEQ ID NO: 930519 - RNA, 19 nt, Artificial Sequence
  Description of Artificial Sequence: Synthetic oligonucleotide
  Antisense strand to SEQ ID NO: 930518
uucuacucggccgaggucg

SEQ ID NO: 930520 - RNA, 19 nt, Artificial Sequence
  Description of Artificial Sequence: Synthetic oligonucleotide
  Sense strand starting at position 3410 of SEQ ID NO: 913480
guguucugcagguuugcua

SEQ ID NO: 930521 - RNA, 19 nt, Artificial Sequence
  Description of Artificial Sequence: Synthetic oligonucleotide
  Antisense strand to SEQ ID NO: 930520
uagcaaaccugcagaacac

SEQ ID NO: 930522 - RNA, 19 nt, Artificial Sequence
  Description of Artificial Sequence: Synthetic oligonucleotide
  Sense strand starting at position 3921 of SEQ ID NO: 913480
aguccuauacuguaacuca

SEQ ID NO: 930523 - RNA, 19 nt, Artificial Sequence
  Description of Artificial Sequence: Synthetic oligonucleotide
  Antisense strand to SEQ ID NO: 930522
ugaguuacaguauaggacu

SEQ ID NO: 930524 - RNA, 19 nt, Artificial Sequence
  Description of Artificial Sequence: Synthetic oligonucleotide
  Sense strand starting at position 3417 of SEQ ID NO: 913480
gcagguuugcuagagaaag

SEQ ID NO: 930525 - RNA, 19 nt, Artificial Sequence
  Description of Artificial Sequence: Synthetic oligonucleotide
  Antisense strand to SEQ ID NO: 930524
cuuucucuagcaaaccugc

SEQ ID NO: 930526 - RNA, 19 nt, Artificial Sequence
  Description of Artificial Sequence: Synthetic oligonucleotide
  Sense strand starting at position 2262 of SEQ ID NO: 913480
gcguaaagccuguuugcaa

SEQ ID NO: 930527 - RNA, 19 nt, Artificial Sequence
  Description of Artificial Sequence: Synthetic oligonucleotide
  Antisense strand to SEQ ID NO: 930526
uugcaaacaggcuuuacgc

SEQ ID NO: 930528 - RNA, 19 nt, Artificial Sequence
  Description of Artificial Sequence: Synthetic oligonucleotide
  Sense strand starting at position 1073 of SEQ ID NO: 913480
aagaaaugcgcucagaauc

SEQ ID NO: 930529 - RNA, 19 nt, Artificial Sequence
  Description of Artificial Sequence: Synthetic oligonucleotide
  Antisense strand to SEQ ID NO: 930528
gauucugagcgcauuucuu

SEQ ID NO: 930530 - RNA, 19 nt, Artificial Sequence
  Description of Artificial Sequence: Synthetic oligonucleotide
  Sense strand starting at position 730 of SEQ ID NO: 913480
auuccaguggucuauaauc

SEQ ID NO: 930531 - RNA, 19 nt, Artificial Sequence
  Description of Artificial Sequence: Synthetic oligonucleotide
  Antisense strand to SEQ ID NO: 930530
gauuauagaccacuggaau

SEQ ID NO: 930532 - RNA, 19 nt, Artificial Sequence
  Description of Artificial Sequence: Synthetic oligonucleotide
  Sense strand starting at position 725 of SEQ ID NO: 913480
agaagauuccaguggucua

SEQ ID NO: 930533 - RNA, 19 nt, Artificial Sequence
  Description of Artificial Sequence: Synthetic oligonucleotide
  Antisense strand to SEQ ID NO: 930532
uagaccacuggaaucuucu

SEQ ID NO: 930534 - RNA, 19 nt, Artificial Sequence
  Description of Artificial Sequence: Synthetic oligonucleotide
  Sense strand starting at position 3793 of SEQ ID NO: 913480
gcccuuuaaccaggauaua

SEQ ID NO: 930535 - RNA, 19 nt, Artificial Sequence
  Description of Artificial Sequence: Synthetic oligonucleotide
  Antisense strand to SEQ ID NO: 930534
uauauccugguuaaagggc

SEQ ID NO: 930536 - RNA, 19 nt, Artificial Sequence
  Description of Artificial Sequence: Synthetic oligonucleotide
  Sense strand starting at position 656 of SEQ ID NO: 913480
uugacugaauucuuaggca

SEQ ID NO: 930537 - RNA, 19 nt, Artificial Sequence
  Description of Artificial Sequence: Synthetic oligonucleotide
  Antisense strand to SEQ ID NO: 930536
ugccuaagaauucagucaa

SEQ ID NO: 930538 - RNA, 19 nt, Artificial Sequence
  Description of Artificial Sequence: Synthetic oligonucleotide
  Sense strand starting at position 728 of SEQ ID NO: 913480
agauuccaguggucuauaa

SEQ ID NO: 930539 - RNA, 19 nt, Artificial Sequence
  Description of Artificial Sequence: Synthetic oligonucleotide
  Antisense strand to SEQ ID NO: 930538
uuauagaccacuggaaucu

SEQ ID NO: 930540 - RNA, 19 nt, Artificial Sequence
  Description of Artificial Sequence: Synthetic oligonucleotide
  Sense strand starting at position 2606 of SEQ ID NO: 913480
ucacaucagugagugaauu

SEQ ID NO: 930541 - RNA, 19 nt, Artificial Sequence
  Description of Artificial Sequence: Synthetic oligonucleotide
  Antisense strand to SEQ ID NO: 930540
aauucacucacugauguga

SEQ ID NO: 930542 - RNA, 19 nt, Artificial Sequence
  Description of Artificial Sequence: Synthetic oligonucleotide
  Sense strand starting at position 493 of SEQ ID NO: 913480
ggauuaauuuacuaucuug

SEQ ID NO: 930543 - RNA, 19 nt, Artificial Sequence
  Description of Artificial Sequence: Synthetic oligonucleotide
  Antisense strand to SEQ ID NO: 930542
caagauaguaaauuaaucc

SEQ ID NO: 930544 - RNA, 19 nt, Artificial Sequence
  Description of Artificial Sequence: Synthetic oligonucleotide
  Sense strand starting at position 2614 of SEQ ID NO: 913480
gugagugaauuugaggaua

SEQ ID NO: 930545 - RNA, 19 nt, Artificial Sequence
  Description of Artificial Sequence: Synthetic oligonucleotide
  Antisense strand to SEQ ID NO: 930544
uauccucaaauucacucac

SEQ ID NO: 930546 - RNA, 19 nt, Artificial Sequence
  Description of Artificial Sequence: Synthetic oligonucleotide
  Sense strand starting at position 3719 of SEQ ID NO: 913480
acuccagauccauguacuu

SEQ ID NO: 930547 - RNA, 19 nt, Artificial Sequence
  Description of Artificial Sequence: Synthetic oligonucleotide
  Antisense strand to SEQ ID NO: 930546
aaguacauggaucuggagu

SEQ ID NO: 930548 - RNA, 19 nt, Artificial Sequence
  Description of Artificial Sequence: Synthetic oligonucleotide
  Sense strand starting at position 105 of SEQ ID NO: 913480
uauagaugguuucucagua

SEQ ID NO: 930549 - RNA, 19 nt, Artificial Sequence
  Description of Artificial Sequence: Synthetic oligonucleotide
  Antisense strand to SEQ ID NO: 930548
uacugagaaaccaucuaua

SEQ ID NO: 930550 - RNA, 19 nt, Artificial Sequence
  Description of Artificial Sequence: Synthetic oligonucleotide
  Sense strand starting at position 106 of SEQ ID NO: 913480
auagaugguuucucaguau

SEQ ID NO: 930551 - RNA, 19 nt, Artificial Sequence
  Description of Artificial Sequence: Synthetic oligonucleotide
  Antisense strand to SEQ ID NO: 930550
auacugagaaaccaucuau

SEQ ID NO: 930552 - RNA, 19 nt, Artificial Sequence
  Description of Artificial Sequence: Synthetic oligonucleotide
  Sense strand starting at position 110 of SEQ ID NO: 913480
augguuucucaguaucuuu

SEQ ID NO: 930553 - RNA, 19 nt, Artificial Sequence
  Description of Artificial Sequence: Synthetic oligonucleotide
  Antisense strand to SEQ ID NO: 930552
aaagauacugagaaaccau

SEQ ID NO: 930554 - RNA, 19 nt, Artificial Sequence
  Description of Artificial Sequence: Synthetic oligonucleotide
  Sense strand starting at position 3562 of SEQ ID NO: 913480
guacauaugucaucuuaau

SEQ ID NO: 930555 - RNA, 19 nt, Artificial Sequence
  Description of Artificial Sequence: Synthetic oligonucleotide
  Antisense strand to SEQ ID NO: 930554
auuaagaugacauauguac

SEQ ID NO: 930556 - RNA, 19 nt, Artificial Sequence
  Description of Artificial Sequence: Synthetic oligonucleotide
  Sense strand starting at position 1055 of SEQ ID NO: 913480
aguucuugagaagguguca

SEQ ID NO: 930557 - RNA, 19 nt, Artificial Sequence
  Description of Artificial Sequence: Synthetic oligonucleotide
  Antisense strand to SEQ ID NO: 930556
ugacaccuucucaagaacu

SEQ ID NO: 930558 - RNA, 19 nt, Artificial Sequence
  Description of Artificial Sequence: Synthetic oligonucleotide
  Sense strand starting at position 997 of SEQ ID NO: 913480
aguuacguuccucacucaa

SEQ ID NO: 930559 - RNA, 19 nt, Artificial Sequence
  Description of Artificial Sequence: Synthetic oligonucleotide
  Antisense strand to SEQ ID NO: 930558
uugagugaggaacguaacu

SEQ ID NO: 930560 - RNA, 19 nt, Artificial Sequence
  Description of Artificial Sequence: Synthetic oligonucleotide
  Sense strand starting at position 2318 of SEQ ID NO: 913480
acgauuacugccuaaguuu

SEQ ID NO: 930561 - RNA, 19 nt, Artificial Sequence
  Description of Artificial Sequence: Synthetic oligonucleotide
  Antisense strand to SEQ ID NO: 930560
aaacuuaggcaguaaucgu

SEQ ID NO: 930562 - RNA, 19 nt, Artificial Sequence
  Description of Artificial Sequence: Synthetic oligonucleotide
  Sense strand starting at position 192 of SEQ ID NO: 913480
uggcuuuauuuagaaacua

SEQ ID NO: 930563 - RNA, 19 nt, Artificial Sequence
  Description of Artificial Sequence: Synthetic oligonucleotide
  Antisense strand to SEQ ID NO: 930562
uaguuucuaaauaaagcca

SEQ ID NO: 930564 - RNA, 19 nt, Artificial Sequence
  Description of Artificial Sequence: Synthetic oligonucleotide
  Sense strand starting at position 3549 of SEQ ID NO: 913480
uguuguaaggacuguacau

SEQ ID NO: 930565 - RNA, 19 nt, Artificial Sequence
  Description of Artificial Sequence: Synthetic oligonucleotide
  Antisense strand to SEQ ID NO: 930564
auguacaguccuuacaaca

SEQ ID NO: 930566 - RNA, 19 nt, Artificial Sequence
  Description of Artificial Sequence: Synthetic oligonucleotide
  Sense strand starting at position 109 of SEQ ID NO: 913480
gaugguuucucaguaucuu

SEQ ID NO: 930567 - RNA, 19 nt, Artificial Sequence
  Description of Artificial Sequence: Synthetic oligonucleotide
  Antisense strand to SEQ ID NO: 930566
aagauacugagaaaccauc

SEQ ID NO: 930568 - RNA, 19 nt, Artificial Sequence
  Description of Artificial Sequence: Synthetic oligonucleotide
  Sense strand starting at position 883 of SEQ ID NO: 913480
gaagcaaucccgggcuaca

SEQ ID NO: 930569 - RNA, 19 nt, Artificial Sequence
  Description of Artificial Sequence: Synthetic oligonucleotide
  Antisense strand to SEQ ID NO: 930568
uguagcccgggauugcuuc

SEQ ID NO: 930570 - RNA, 19 nt, Artificial Sequence
  Description of Artificial Sequence: Synthetic oligonucleotide
  Sense strand starting at position 147 of SEQ ID NO: 913480
acccuaaguuucucuguau

SEQ ID NO: 930571 - RNA, 19 nt, Artificial Sequence
  Description of Artificial Sequence: Synthetic oligonucleotide
  Antisense strand to SEQ ID NO: 930570
auacagagaaacuuagggu

SEQ ID NO: 930572 - RNA, 19 nt, Artificial Sequence
  Description of Artificial Sequence: Synthetic oligonucleotide
  Sense strand starting at position 3041 of SEQ ID NO: 913480
cuagucugguggcuuaaau

SEQ ID NO: 930573 - RNA, 19 nt, Artificial Sequence
  Description of Artificial Sequence: Synthetic oligonucleotide
  Antisense strand to SEQ ID NO: 930572
auuuaagccaccagacuag

SEQ ID NO: 930574 - RNA, 19 nt, Artificial Sequence
  Description of Artificial Sequence: Synthetic oligonucleotide
  Sense strand starting at position 2779 of SEQ ID NO: 913481
aaaguaacugcggacauaa

SEQ ID NO: 930575 - RNA, 19 nt, Artificial Sequence
  Description of Artificial Sequence: Synthetic oligonucleotide
  Antisense strand to SEQ ID NO: 930574
uuauguccgcaguuacuuu

SEQ ID NO: 930576 - RNA, 19 nt, Artificial Sequence
  Description of Artificial Sequence: Synthetic oligonucleotide
  Sense strand starting at position 484 of SEQ ID NO: 913481
ugagcuggcagggaugaua

SEQ ID NO: 930577 - RNA, 19 nt, Artificial Sequence
  Description of Artificial Sequence: Synthetic oligonucleotide
  Antisense strand to SEQ ID NO: 930576
uaucaucccugccagcuca

SEQ ID NO: 930578 - RNA, 19 nt, Artificial Sequence
  Description of Artificial Sequence: Synthetic oligonucleotide
  Sense strand starting at position 3669 of SEQ ID NO: 913481
ucacuugaggguugaaaug

SEQ ID NO: 930579 - RNA, 19 nt, Artificial Sequence
  Description of Artificial Sequence: Synthetic oligonucleotide
  Antisense strand to SEQ ID NO: 930578
cauuucaacccucaaguga

SEQ ID NO: 930580 - RNA, 19 nt, Artificial Sequence
  Description of Artificial Sequence: Synthetic oligonucleotide
  Sense strand starting at position 2789 of SEQ ID NO: 913481
cggacauaacauuaugcua

SEQ ID NO: 930581 - RNA, 19 nt, Artificial Sequence
  Description of Artificial Sequence: Synthetic oligonucleotide
  Antisense strand to SEQ ID NO: 930580
uagcauaauguuauguccg

SEQ ID NO: 930582 - RNA, 19 nt, Artificial Sequence
  Description of Artificial Sequence: Synthetic oligonucleotide
  Sense strand starting at position 1949 of SEQ ID NO: 913481
ccuccucugccagagaaca

SEQ ID NO: 930583 - RNA, 19 nt, Artificial Sequence
  Description of Artificial Sequence: Synthetic oligonucleotide
  Antisense strand to SEQ ID NO: 930582
uguucucuggcagaggagg

SEQ ID NO: 930584 - RNA, 19 nt, Artificial Sequence
  Description of Artificial Sequence: Synthetic oligonucleotide
  Sense strand starting at position 3209 of SEQ ID NO: 913481
cugaaagauuucuaaagug

SEQ ID NO: 930585 - RNA, 19 nt, Artificial Sequence
  Description of Artificial Sequence: Synthetic oligonucleotide
  Antisense strand to SEQ ID NO: 930584
cacuuuagaaaucuuucag

SEQ ID NO: 930586 - RNA, 19 nt, Artificial Sequence
  Description of Artificial Sequence: Synthetic oligonucleotide
  Sense strand starting at position 2937 of SEQ ID NO: 913481
agcuuugcaguuuaagaaa

SEQ ID NO: 930587 - RNA, 19 nt, Artificial Sequence
  Description of Artificial Sequence: Synthetic oligonucleotide
  Antisense strand to SEQ ID NO: 930586
uuucuuaaacugcaaagcu

SEQ ID NO: 930588 - RNA, 19 nt, Artificial Sequence
  Description of Artificial Sequence: Synthetic oligonucleotide
  Sense strand starting at position 2521 of SEQ ID NO: 913481
acagguuaaccuuguuaag

SEQ ID NO: 930589 - RNA, 19 nt, Artificial Sequence
  Description of Artificial Sequence: Synthetic oligonucleotide
  Antisense strand to SEQ ID NO: 930588
cuuaacaagguuaaccugu

SEQ ID NO: 930590 - RNA, 19 nt, Artificial Sequence
  Description of Artificial Sequence: Synthetic oligonucleotide
  Sense strand starting at position 3292 of SEQ ID NO: 913481
ucaugauuaaacggugauu

SEQ ID NO: 930591 - RNA, 19 nt, Artificial Sequence
  Description of Artificial Sequence: Synthetic oligonucleotide
  Antisense strand to SEQ ID NO: 930590
aaucaccguuuaaucauga

SEQ ID NO: 930592 - RNA, 19 nt, Artificial Sequence
  Description of Artificial Sequence: Synthetic oligonucleotide
  Sense strand starting at position 36 of SEQ ID NO: 913481
acaugaaaguugcuccaau

SEQ ID NO: 930593 - RNA, 19 nt, Artificial Sequence
  Description of Artificial Sequence: Synthetic oligonucleotide
  Antisense strand to SEQ ID NO: 930592
auuggagcaacuuucaugu

SEQ ID NO: 930594 - RNA, 19 nt, Artificial Sequence
  Description of Artificial Sequence: Synthetic oligonucleotide
  Sense strand starting at position 3522 of SEQ ID NO: 913481
ggcuuugcucuugagaaac

SEQ ID NO: 930595 - RNA, 19 nt, Artificial Sequence
  Description of Artificial Sequence: Synthetic oligonucleotide
  Antisense strand to SEQ ID NO: 930594
guuucucaagagcaaagcc

SEQ ID NO: 930596 - RNA, 19 nt, Artificial Sequence
  Description of Artificial Sequence: Synthetic oligonucleotide
  Sense strand starting at position 2595 of SEQ ID NO: 913481
cgcucaauuguuuaaacaa

SEQ ID NO: 930597 - RNA, 19 nt, Artificial Sequence
  Description of Artificial Sequence: Synthetic oligonucleotide
  Antisense strand to SEQ ID NO: 930596
uuguuuaaacaauugagcg

SEQ ID NO: 930598 - RNA, 19 nt, Artificial Sequence
  Description of Artificial Sequence: Synthetic oligonucleotide
  Sense strand starting at position 3666 of SEQ ID NO: 913481
agcucacuugaggguugaa

SEQ ID NO: 930599 - RNA, 19 nt, Artificial Sequence
  Description of Artificial Sequence: Synthetic oligonucleotide
  Antisense strand to SEQ ID NO: 930598
uucaacccucaagugagcu

SEQ ID NO: 930600 - RNA, 19 nt, Artificial Sequence
  Description of Artificial Sequence: Synthetic oligonucleotide
  Sense strand starting at position 2458 of SEQ ID NO: 913481
ggauaaaccuaagagaaca

SEQ ID NO: 930601 - RNA, 19 nt, Artificial Sequence
  Description of Artificial Sequence: Synthetic oligonucleotide
  Antisense strand to SEQ ID NO: 930600
uguucucuuagguuuaucc

SEQ ID NO: 930602 - RNA, 19 nt, Artificial Sequence
  Description of Artificial Sequence: Synthetic oligonucleotide
  Sense strand starting at position 3759 of SEQ ID NO: 913481
agcacugugaucgaaucuu

SEQ ID NO: 930603 - RNA, 19 nt, Artificial Sequence
  Description of Artificial Sequence: Synthetic oligonucleotide
  Antisense strand to SEQ ID NO: 930602
aagauucgaucacagugcu

SEQ ID NO: 930604 - RNA, 19 nt, Artificial Sequence
  Description of Artificial Sequence: Synthetic oligonucleotide
  Sense strand starting at position 506 of SEQ ID NO: 913481
gagaguacacaguguacuu

SEQ ID NO: 930605 - RNA, 19 nt, Artificial Sequence
  Description of Artificial Sequence: Synthetic oligonucleotide
  Antisense strand to SEQ ID NO: 930604
aaguacacuguguacucuc

SEQ ID NO: 930606 - RNA, 19 nt, Artificial Sequence
  Description of Artificial Sequence: Synthetic oligonucleotide
  Sense strand starting at position 2523 of SEQ ID NO: 913481
agguuaaccuuguuaagua

SEQ ID NO: 930607 - RNA, 19 nt, Artificial Sequence
  Description of Artificial Sequence: Synthetic oligonucleotide
  Antisense strand to SEQ ID NO: 930606
uacuuaacaagguuaaccu

SEQ ID NO: 930608 - RNA, 19 nt, Artificial Sequence
  Description of Artificial Sequence: Synthetic oligonucleotide
  Sense strand starting at position 1339 of SEQ ID NO: 913481
cagggagugugcucucaga

SEQ ID NO: 930609 - RNA, 19 nt, Artificial Sequence
  Description of Artificial Sequence: Synthetic oligonucleotide
  Antisense strand to SEQ ID NO: 930608
ucugagagcacacucccug

SEQ ID NO: 930610 - RNA, 19 nt, Artificial Sequence
  Description of Artificial Sequence: Synthetic oligonucleotide
  Sense strand starting at position 3563 of SEQ ID NO: 913481
uguuacaagugauccaguu

SEQ ID NO: 930611 - RNA, 19 nt, Artificial Sequence
  Description of Artificial Sequence: Synthetic oligonucleotide
  Antisense strand to SEQ ID NO: 930610
aacuggaucacuuguaaca

SEQ ID NO: 930612 - RNA, 19 nt, Artificial Sequence
  Description of Artificial Sequence: Synthetic oligonucleotide
  Sense strand starting at position 1214 of SEQ ID NO: 913481
caugaaugguugccacagu

SEQ ID NO: 930613 - RNA, 19 nt, Artificial Sequence
  Description of Artificial Sequence: Synthetic oligonucleotide
  Antisense strand to SEQ ID NO: 930612
acuguggcaaccauucaug

SEQ ID NO: 930614 - RNA, 19 nt, Artificial Sequence
  Description of Artificial Sequence: Synthetic oligonucleotide
  Sense strand starting at position 3757 of SEQ ID NO: 913481
ucagcacugugaucgaauc

SEQ ID NO: 930615 - RNA, 19 nt, Artificial Sequence
  Description of Artificial Sequence: Synthetic oligonucleotide
  Antisense strand to SEQ ID NO: 930614
gauucgaucacagugcuga

SEQ ID NO: 930616 - RNA, 19 nt, Artificial Sequence
  Description of Artificial Sequence: Synthetic oligonucleotide
  Sense strand starting at position 3911 of SEQ ID NO: 913481
cucuuagcgucaccacaaa

SEQ ID NO: 930617 - RNA, 19 nt, Artificial Sequence
  Description of Artificial Sequence: Synthetic oligonucleotide
  Antisense strand to SEQ ID NO: 930616
uuuguggugacgcuaagag

SEQ ID NO: 930618 - RNA, 19 nt, Artificial Sequence
  Description of Artificial Sequence: Synthetic oligonucleotide
  Sense strand starting at position 437 of SEQ ID NO: 913481
uuugaauacaguugucugu

SEQ ID NO: 930619 - RNA, 19 nt, Artificial Sequence
  Description of Artificial Sequence: Synthetic oligonucleotide
  Antisense strand to SEQ ID NO: 930618
acagacaacuguauucaaa

SEQ ID NO: 930620 - RNA, 19 nt, Artificial Sequence
  Description of Artificial Sequence: Synthetic oligonucleotide
  Sense strand starting at position 2668 of SEQ ID NO: 913481
ugucucguaguaggauuaa

SEQ ID NO: 930621 - RNA, 19 nt, Artificial Sequence
  Description of Artificial Sequence: Synthetic oligonucleotide
  Antisense strand to SEQ ID NO: 930620
uuaauccuacuacgagaca

SEQ ID NO: 930622 - RNA, 19 nt, Artificial Sequence
  Description of Artificial Sequence: Synthetic oligonucleotide
  Sense strand starting at position 3474 of SEQ ID NO: 913481
gcuucugaacucugucacu

SEQ ID NO: 930623 - RNA, 19 nt, Artificial Sequence
  Description of Artificial Sequence: Synthetic oligonucleotide
  Antisense strand to SEQ ID NO: 930622
agugacagaguucagaagc

SEQ ID NO: 930624 - RNA, 19 nt, Artificial Sequence
  Description of Artificial Sequence: Synthetic oligonucleotide
  Sense strand starting at position 3480 of SEQ ID NO: 913481
gaacucugucacuguuugu

SEQ ID NO: 930625 - RNA, 19 nt, Artificial Sequence
  Description of Artificial Sequence: Synthetic oligonucleotide
  Antisense strand to SEQ ID NO: 930624
acaaacagugacagaguuc

SEQ ID NO: 930626 - RNA, 19 nt, Artificial Sequence
  Description of Artificial Sequence: Synthetic oligonucleotide
  Sense strand starting at position 167 of SEQ ID NO: 913481
gccaucuaguucucaugua

SEQ ID NO: 930627 - RNA, 19 nt, Artificial Sequence
  Description of Artificial Sequence: Synthetic oligonucleotide
  Antisense strand to SEQ ID NO: 930626
uacaugagaacuagauggc

SEQ ID NO: 930628 - RNA, 19 nt, Artificial Sequence
  Description of Artificial Sequence: Synthetic oligonucleotide
  Sense strand starting at position 2447 of SEQ ID NO: 913481
uaggaaggcuuggauaaac

SEQ ID NO: 930629 - RNA, 19 nt, Artificial Sequence
  Description of Artificial Sequence: Synthetic oligonucleotide
  Antisense strand to SEQ ID NO: 930628
guuuauccaagccuuccua

SEQ ID NO: 930630 - RNA, 19 nt, Artificial Sequence
  Description of Artificial Sequence: Synthetic oligonucleotide
  Sense strand starting at position 3483 of SEQ ID NO: 913481
cucugucacuguuuguaua

SEQ ID NO: 930631 - RNA, 19 nt, Artificial Sequence
  Description of Artificial Sequence: Synthetic oligonucleotide
  Antisense strand to SEQ ID NO: 930630
uauacaaacagugacagag

SEQ ID NO: 930632 - RNA, 19 nt, Artificial Sequence
  Description of Artificial Sequence: Synthetic oligonucleotide
  Sense strand starting at position 657 of SEQ ID NO: 913481
auggccuguucuccaguau

SEQ ID NO: 930633 - RNA, 19 nt, Artificial Sequence
  Description of Artificial Sequence: Synthetic oligonucleotide
  Antisense strand to SEQ ID NO: 930632
auacuggagaacaggccau

SEQ ID NO: 930634 - RNA, 19 nt, Artificial Sequence
  Description of Artificial Sequence: Synthetic oligonucleotide
  Sense strand starting at position 496 of SEQ ID NO: 913481
gaugauaggugagaguaca

SEQ ID NO: 930635 - RNA, 19 nt, Artificial Sequence
  Description of Artificial Sequence: Synthetic oligonucleotide
  Antisense strand to SEQ ID NO: 930634
uguacucucaccuaucauc

SEQ ID NO: 930636 - RNA, 19 nt, Artificial Sequence
  Description of Artificial Sequence: Synthetic oligonucleotide
  Sense strand starting at position 3026 of SEQ ID NO: 913481
gugagaugauucuaaacac

SEQ ID NO: 930637 - RNA, 19 nt, Artificial Sequence
  Description of Artificial Sequence: Synthetic oligonucleotide
  Antisense strand to SEQ ID NO: 930636
guguuuagaaucaucucac

SEQ ID NO: 930638 - RNA, 19 nt, Artificial Sequence
  Description of Artificial Sequence: Synthetic oligonucleotide
  Sense strand starting at position 2594 of SEQ ID NO: 913481
gcgcucaauuguuuaaaca

SEQ ID NO: 930639 - RNA, 19 nt, Artificial Sequence
  Description of Artificial Sequence: Synthetic oligonucleotide
  Antisense strand to SEQ ID NO: 930638
uguuuaaacaauugagcgc

SEQ ID NO: 930640 - RNA, 19 nt, Artificial Sequence
  Description of Artificial Sequence: Synthetic oligonucleotide
  Sense strand starting at position 3326 of SEQ ID NO: 913481
acuggcaccucagaauaaa

SEQ ID NO: 930641 - RNA, 19 nt, Artificial Sequence
  Description of Artificial Sequence: Synthetic oligonucleotide
  Antisense strand to SEQ ID NO: 930640
uuuauucugaggugccagu

SEQ ID NO: 930642 - RNA, 19 nt, Artificial Sequence
  Description of Artificial Sequence: Synthetic oligonucleotide
  Sense strand starting at position 3199 of SEQ ID NO: 913481
guugaacuuucugaaagau

SEQ ID NO: 930643 - RNA, 19 nt, Artificial Sequence
  Description of Artificial Sequence: Synthetic oligonucleotide
  Antisense strand to SEQ ID NO: 930642
aucuuucagaaaguucaac

SEQ ID NO: 930644 - RNA, 19 nt, Artificial Sequence
  Description of Artificial Sequence: Synthetic oligonucleotide
  Sense strand starting at position 245 of SEQ ID NO: 913481
gaaggcauuuccuggcaca

SEQ ID NO: 930645 - RNA, 19 nt, Artificial Sequence
  Description of Artificial Sequence: Synthetic oligonucleotide
  Antisense strand to SEQ ID NO: 930644
ugugccaggaaaugccuuc

SEQ ID NO: 930646 - RNA, 19 nt, Artificial Sequence
  Description of Artificial Sequence: Synthetic oligonucleotide
  Sense strand starting at position 539 of SEQ ID NO: 913481
ucgccucaucacugcuaua

SEQ ID NO: 930647 - RNA, 19 nt, Artificial Sequence
  Description of Artificial Sequence: Synthetic oligonucleotide
  Antisense strand to SEQ ID NO: 930646
uauagcagugaugaggcga

SEQ ID NO: 930648 - RNA, 19 nt, Artificial Sequence
  Description of Artificial Sequence: Synthetic oligonucleotide
  Sense strand starting at position 809 of SEQ ID NO: 913481
gcacucuccucgcuguaaa

SEQ ID NO: 930649 - RNA, 19 nt, Artificial Sequence
  Description of Artificial Sequence: Synthetic oligonucleotide
  Antisense strand to SEQ ID NO: 930648
uuuacagcgaggagagugc

SEQ ID NO: 930650 - RNA, 19 nt, Artificial Sequence
  Description of Artificial Sequence: Synthetic oligonucleotide
  Sense strand starting at position 3217 of SEQ ID NO: 913481
uuucuaaaguguuaggaag

SEQ ID NO: 930651 - RNA, 19 nt, Artificial Sequence
  Description of Artificial Sequence: Synthetic oligonucleotide
  Antisense strand to SEQ ID NO: 930650
cuuccuaacacuuuagaaa

SEQ ID NO: 930652 - RNA, 19 nt, Artificial Sequence
  Description of Artificial Sequence: Synthetic oligonucleotide
  Sense strand starting at position 116 of SEQ ID NO: 913481
ggcuacugaucacacuuaa

SEQ ID NO: 930653 - RNA, 19 nt, Artificial Sequence
  Description of Artificial Sequence: Synthetic oligonucleotide
  Antisense strand to SEQ ID NO: 930652
uuaagugugaucaguagcc

SEQ ID NO: 930654 - RNA, 19 nt, Artificial Sequence
  Description of Artificial Sequence: Synthetic oligonucleotide
  Sense strand starting at position 3776 of SEQ ID NO: 913482
gugacaugaaucgauuauu

SEQ ID NO: 930655 - RNA, 19 nt, Artificial Sequence
  Description of Artificial Sequence: Synthetic oligonucleotide
  Antisense strand to SEQ ID NO: 930654
aauaaucgauucaugucac

SEQ ID NO: 930656 - RNA, 19 nt, Artificial Sequence
  Description of Artificial Sequence: Synthetic oligonucleotide
  Sense strand starting at position 886 of SEQ ID NO: 913482
uagaaugaucgagguaaau

SEQ ID NO: 930657 - RNA, 19 nt, Artificial Sequence
  Description of Artificial Sequence: Synthetic oligonucleotide
  Antisense strand to SEQ ID NO: 930656
auuuaccucgaucauucua

SEQ ID NO: 930658 - RNA, 19 nt, Artificial Sequence
  Description of Artificial Sequence: Synthetic oligonucleotide
  Sense strand starting at position 3955 of SEQ ID NO: 913482
aguauuauacuggaggucu

SEQ ID NO: 930659 - RNA, 19 nt, Artificial Sequence
  Description of Artificial Sequence: Synthetic oligonucleotide
  Antisense strand to SEQ ID NO: 930658
agaccuccaguauaauacu

SEQ ID NO: 930660 - RNA, 19 nt, Artificial Sequence
  Description of Artificial Sequence: Synthetic oligonucleotide
  Sense strand starting at position 949 of SEQ ID NO: 913482
gaauauaagcacuguagag

SEQ ID NO: 930661 - RNA, 19 nt, Artificial Sequence
  Description of Artificial Sequence: Synthetic oligonucleotide
  Antisense strand to SEQ ID NO: 930660
cucuacagugcuuauauuc

SEQ ID NO: 930662 - RNA, 19 nt, Artificial Sequence
  Description of Artificial Sequence: Synthetic oligonucleotide
  Sense strand starting at position 3856 of SEQ ID NO: 913482
gugaacuaucuccagcuaa

SEQ ID NO: 930663 - RNA, 19 nt, Artificial Sequence
  Description of Artificial Sequence: Synthetic oligonucleotide
  Antisense strand to SEQ ID NO: 930662
uuagcuggagauaguucac

SEQ ID NO: 930664 - RNA, 19 nt, Artificial Sequence
  Description of Artificial Sequence: Synthetic oligonucleotide
  Sense strand starting at position 3957 of SEQ ID NO: 913482
uauuauacuggaggucuua

SEQ ID NO: 930665 - RNA, 19 nt, Artificial Sequence
  Description of Artificial Sequence: Synthetic oligonucleotide
  Antisense strand to SEQ ID NO: 930664
uaagaccuccaguauaaua

SEQ ID NO: 930666 - RNA, 19 nt, Artificial Sequence
  Description of Artificial Sequence: Synthetic oligonucleotide
  Sense strand starting at position 2515 of SEQ ID NO: 913482
ugucuuuaaguugaacgaa

SEQ ID NO: 930667 - RNA, 19 nt, Artificial Sequence
  Description of Artificial Sequence: Synthetic oligonucleotide
  Antisense strand to SEQ ID NO: 930666
uucguucaacuuaaagaca

SEQ ID NO: 930668 - RNA, 19 nt, Artificial Sequence
  Description of Artificial Sequence: Synthetic oligonucleotide
  Sense strand starting at position 75 of SEQ ID NO: 913482
acacaaugcucucuuggaa

SEQ ID NO: 930669 - RNA, 19 nt, Artificial Sequence
  Description of Artificial Sequence: Synthetic oligonucleotide
  Antisense strand to SEQ ID NO: 930668
uuccaagagagcauugugu

SEQ ID NO: 930670 - RNA, 19 nt, Artificial Sequence
  Description of Artificial Sequence: Synthetic oligonucleotide
  Sense strand starting at position 3240 of SEQ ID NO: 913482
gcauaugcuuauuuaugca

SEQ ID NO: 930671 - RNA, 19 nt, Artificial Sequence
  Description of Artificial Sequence: Synthetic oligonucleotide
  Antisense strand to SEQ ID NO: 930670
ugcauaaauaagcauaugc

SEQ ID NO: 930672 - RNA, 19 nt, Artificial Sequence
  Description of Artificial Sequence: Synthetic oligonucleotide
  Sense strand starting at position 3782 of SEQ ID NO: 913482
ugaaucgauuauucuuuga

SEQ ID NO: 930673 - RNA, 19 nt, Artificial Sequence
  Description of Artificial Sequence: Synthetic oligonucleotide
  Antisense strand to SEQ ID NO: 930672
ucaaagaauaaucgauuca

SEQ ID NO: 930674 - RNA, 19 nt, Artificial Sequence
  Description of Artificial Sequence: Synthetic oligonucleotide
  Sense strand starting at position 2866 of SEQ ID NO: 913482
ucugguguaccagaaaugu

SEQ ID NO: 930675 - RNA, 19 nt, Artificial Sequence
  Description of Artificial Sequence: Synthetic oligonucleotide
  Antisense strand to SEQ ID NO: 930674
acauuucugguacaccaga

SEQ ID NO: 930676 - RNA, 19 nt, Artificial Sequence
  Description of Artificial Sequence: Synthetic oligonucleotide
  Sense strand starting at position 895 of SEQ ID NO: 913482
cgagguaaauaucugacuu

SEQ ID NO: 930677 - RNA, 19 nt, Artificial Sequence
  Description of Artificial Sequence: Synthetic oligonucleotide
  Antisense strand to SEQ ID NO: 930676
aagucagauauuuaccucg

SEQ ID NO: 930678 - RNA, 19 nt, Artificial Sequence
  Description of Artificial Sequence: Synthetic oligonucleotide
  Sense strand starting at position 1230 of SEQ ID NO: 913482
ugacaaaugcuccgaugaa

SEQ ID NO: 930679 - RNA, 19 nt, Artificial Sequence
  Description of Artificial Sequence: Synthetic oligonucleotide
  Antisense strand to SEQ ID NO: 930678
uucaucggagcauuuguca

SEQ ID NO: 930680 - RNA, 19 nt, Artificial Sequence
  Description of Artificial Sequence: Synthetic oligonucleotide
  Sense strand starting at position 774 of SEQ ID NO: 913482
agugaugaacuacgucaaa

SEQ ID NO: 930681 - RNA, 19 nt, Artificial Sequence
  Description of Artificial Sequence: Synthetic oligonucleotide
  Antisense strand to SEQ ID NO: 930680
uuugacguaguucaucacu

SEQ ID NO: 930682 - RNA, 19 nt, Artificial Sequence
  Description of Artificial Sequence: Synthetic oligonucleotide
  Sense strand starting at position 3775 of SEQ ID NO: 913482
ugugacaugaaucgauuau

SEQ ID NO: 930683 - RNA, 19 nt, Artificial Sequence
  Description of Artificial Sequence: Synthetic oligonucleotide
  Antisense strand to SEQ ID NO: 930682
auaaucgauucaugucaca

SEQ ID NO: 930684 - RNA, 19 nt, Artificial Sequence
  Description of Artificial Sequence: Synthetic oligonucleotide
  Sense strand starting at position 1358 of SEQ ID NO: 913482
aguggaugucagcauuacu

SEQ ID NO: 930685 - RNA, 19 nt, Artificial Sequence
  Description of Artificial Sequence: Synthetic oligonucleotide
  Antisense strand to SEQ ID NO: 930684
aguaaugcugacauccacu

SEQ ID NO: 930686 - RNA, 19 nt, Artificial Sequence
  Description of Artificial Sequence: Synthetic oligonucleotide
  Sense strand starting at position 3687 of SEQ ID NO: 913482
guuaucagugcugacaaug

SEQ ID NO: 930687 - RNA, 19 nt, Artificial Sequence
  Description of Artificial Sequence: Synthetic oligonucleotide
  Antisense strand to SEQ ID NO: 930686
cauugucagcacugauaac

SEQ ID NO: 930688 - RNA, 19 nt, Artificial Sequence
  Description of Artificial Sequence: Synthetic oligonucleotide
  Sense strand starting at position 3614 of SEQ ID NO: 913482
ucagcaugagucuagccaa

SEQ ID NO: 930689 - RNA, 19 nt, Artificial Sequence
  Description of Artificial Sequence: Synthetic oligonucleotide
  Antisense strand to SEQ ID NO: 930688
uuggcuagacucaugcuga

SEQ ID NO: 930690 - RNA, 19 nt, Artificial Sequence
  Description of Artificial Sequence: Synthetic oligonucleotide
  Sense strand starting at position 2518 of SEQ ID NO: 913482
cuuuaaguugaacgaagua

SEQ ID NO: 930691 - RNA, 19 nt, Artificial Sequence
  Description of Artificial Sequence: Synthetic oligonucleotide
  Antisense strand to SEQ ID NO: 930690
uacuucguucaacuuaaag

SEQ ID NO: 930692 - RNA, 19 nt, Artificial Sequence
  Description of Artificial Sequence: Synthetic oligonucleotide
  Sense strand starting at position 785 of SEQ ID NO: 913482
acgucaaaugcugagucaa

SEQ ID NO: 930693 - RNA, 19 nt, Artificial Sequence
  Description of Artificial Sequence: Synthetic oligonucleotide
  Antisense strand to SEQ ID NO: 930692
uugacucagcauuugacgu

SEQ ID NO: 930694 - RNA, 19 nt, Artificial Sequence
  Description of Artificial Sequence: Synthetic oligonucleotide
  Sense strand starting at position 2587 of SEQ ID NO: 913482
aaugccuguguguaaauga

SEQ ID NO: 930695 - RNA, 19 nt, Artificial Sequence
  Description of Artificial Sequence: Synthetic oligonucleotide
  Antisense strand to SEQ ID NO: 930694
ucauuuacacacaggcauu

SEQ ID NO: 930696 - RNA, 19 nt, Artificial Sequence
  Description of Artificial Sequence: Synthetic oligonucleotide
  Sense strand starting at position 3655 of SEQ ID NO: 913482
gccuuaauagcacagcuaa

SEQ ID NO: 930697 - RNA, 19 nt, Artificial Sequence
  Description of Artificial Sequence: Synthetic oligonucleotide
  Antisense strand to SEQ ID NO: 930696
uuagcugugcuauuaaggc

SEQ ID NO: 930698 - RNA, 19 nt, Artificial Sequence
  Description of Artificial Sequence: Synthetic oligonucleotide
  Sense strand starting at position 2440 of SEQ ID NO: 913482
cacgcacugcuuuaagaug

SEQ ID NO: 930699 - RNA, 19 nt, Artificial Sequence
  Description of Artificial Sequence: Synthetic oligonucleotide
  Antisense strand to SEQ ID NO: 930698
caucuuaaagcagugcgug

SEQ ID NO: 930700 - RNA, 19 nt, Artificial Sequence
  Description of Artificial Sequence: Synthetic oligonucleotide
  Sense strand starting at position 3855 of SEQ ID NO: 913482
ugugaacuaucuccagcua

SEQ ID NO: 930701 - RNA, 19 nt, Artificial Sequence
  Description of Artificial Sequence: Synthetic oligonucleotide
  Antisense strand to SEQ ID NO: 930700
uagcuggagauaguucaca

SEQ ID NO: 930702 - RNA, 19 nt, Artificial Sequence
  Description of Artificial Sequence: Synthetic oligonucleotide
  Sense strand starting at position 2514 of SEQ ID NO: 913482
uugucuuuaaguugaacga

SEQ ID NO: 930703 - RNA, 19 nt, Artificial Sequence
  Description of Artificial Sequence: Synthetic oligonucleotide
  Antisense strand to SEQ ID NO: 930702
ucguucaacuuaaagacaa

SEQ ID NO: 930704 - RNA, 19 nt, Artificial Sequence
  Description of Artificial Sequence: Synthetic oligonucleotide
  Sense strand starting at position 3644 of SEQ ID NO: 913482
ucauaucuguggccuuaau

SEQ ID NO: 930705 - RNA, 19 nt, Artificial Sequence
  Description of Artificial Sequence: Synthetic oligonucleotide
  Antisense strand to SEQ ID NO: 930704
auuaaggccacagauauga

SEQ ID NO: 930706 - RNA, 19 nt, Artificial Sequence
  Description of Artificial Sequence: Synthetic oligonucleotide
  Sense strand starting at position 3764 of SEQ ID NO: 913482
ugguuugagucugugacau

SEQ ID NO: 930707 - RNA, 19 nt, Artificial Sequence
  Description of Artificial Sequence: Synthetic oligonucleotide
  Antisense strand to SEQ ID NO: 930706
augucacagacucaaacca

SEQ ID NO: 930708 - RNA, 19 nt, Artificial Sequence
  Description of Artificial Sequence: Synthetic oligonucleotide
  Sense strand starting at position 2584 of SEQ ID NO: 913482
aauaaugccuguguguaaa

SEQ ID NO: 930709 - RNA, 19 nt, Artificial Sequence
  Description of Artificial Sequence: Synthetic oligonucleotide
  Antisense strand to SEQ ID NO: 930708
uuuacacacaggcauuauu

SEQ ID NO: 930710 - RNA, 19 nt, Artificial Sequence
  Description of Artificial Sequence: Synthetic oligonucleotide
  Sense strand starting at position 1300 of SEQ ID NO: 913482
gcaaauauuuaaggacuuu

SEQ ID NO: 930711 - RNA, 19 nt, Artificial Sequence
  Description of Artificial Sequence: Synthetic oligonucleotide
  Antisense strand to SEQ ID NO: 930710
aaaguccuuaaauauuugc

SEQ ID NO: 930712 - RNA, 19 nt, Artificial Sequence
  Description of Artificial Sequence: Synthetic oligonucleotide
  Sense strand starting at position 787 of SEQ ID NO: 913482
gucaaaugcugagucaagu

SEQ ID NO: 930713 - RNA, 19 nt, Artificial Sequence
  Description of Artificial Sequence: Synthetic oligonucleotide
  Antisense strand to SEQ ID NO: 930712
acuugacucagcauuugac

SEQ ID NO: 930714 - RNA, 19 nt, Artificial Sequence
  Description of Artificial Sequence: Synthetic oligonucleotide
  Sense strand starting at position 3374 of SEQ ID NO: 913482
gaaaguaguuuagaaagaa

SEQ ID NO: 930715 - RNA, 19 nt, Artificial Sequence
  Description of Artificial Sequence: Synthetic oligonucleotide
  Antisense strand to SEQ ID NO: 930714
uucuuucuaaacuacuuuc

SEQ ID NO: 930716 - RNA, 19 nt, Artificial Sequence
  Description of Artificial Sequence: Synthetic oligonucleotide
  Sense strand starting at position 2342 of SEQ ID NO: 913482
ccagcuucgugaucuuaaa

SEQ ID NO: 930717 - RNA, 19 nt, Artificial Sequence
  Description of Artificial Sequence: Synthetic oligonucleotide
  Antisense strand to SEQ ID NO: 930716
uuuaagaucacgaagcugg

SEQ ID NO: 930718 - RNA, 19 nt, Artificial Sequence
  Description of Artificial Sequence: Synthetic oligonucleotide
  Sense strand starting at position 1026 of SEQ ID NO: 913482
agaggaaaguucgauggaa

SEQ ID NO: 930719 - RNA, 19 nt, Artificial Sequence
  Description of Artificial Sequence: Synthetic oligonucleotide
  Antisense strand to SEQ ID NO: 930718
uuccaucgaacuuuccucu

SEQ ID NO: 930720 - RNA, 19 nt, Artificial Sequence
  Description of Artificial Sequence: Synthetic oligonucleotide
  Sense strand starting at position 2583 of SEQ ID NO: 913482
uaauaaugccuguguguaa

SEQ ID NO: 930721 - RNA, 19 nt, Artificial Sequence
  Description of Artificial Sequence: Synthetic oligonucleotide
  Antisense strand to SEQ ID NO: 930720
uuacacacaggcauuauua

SEQ ID NO: 930722 - RNA, 19 nt, Artificial Sequence
  Description of Artificial Sequence: Synthetic oligonucleotide
  Sense strand starting at position 480 of SEQ ID NO: 913482
ucucaugccgauugugaca

SEQ ID NO: 930723 - RNA, 19 nt, Artificial Sequence
  Description of Artificial Sequence: Synthetic oligonucleotide
  Antisense strand to SEQ ID NO: 930722
ugucacaaucggcaugaga

SEQ ID NO: 930724 - RNA, 19 nt, Artificial Sequence
  Description of Artificial Sequence: Synthetic oligonucleotide
  Sense strand starting at position 3763 of SEQ ID NO: 913482
gugguuugagucugugaca

SEQ ID NO: 930725 - RNA, 19 nt, Artificial Sequence
  Description of Artificial Sequence: Synthetic oligonucleotide
  Antisense strand to SEQ ID NO: 930724
ugucacagacucaaaccac

SEQ ID NO: 930726 - RNA, 19 nt, Artificial Sequence
  Description of Artificial Sequence: Synthetic oligonucleotide
  Sense strand starting at position 1276 of SEQ ID NO: 913482
cgcaaugaauacucguauu

SEQ ID NO: 930727 - RNA, 19 nt, Artificial Sequence
  Description of Artificial Sequence: Synthetic oligonucleotide
  Antisense strand to SEQ ID NO: 930726
aauacgaguauucauugcg

SEQ ID NO: 930728 - RNA, 19 nt, Artificial Sequence
  Description of Artificial Sequence: Synthetic oligonucleotide
  Sense strand starting at position 2414 of SEQ ID NO: 913482
uuaagugguuucuugccau

SEQ ID NO: 930729 - RNA, 19 nt, Artificial Sequence
  Description of Artificial Sequence: Synthetic oligonucleotide
  Antisense strand to SEQ ID NO: 930728
auggcaagaaaccacuuaa

SEQ ID NO: 930730 - RNA, 19 nt, Artificial Sequence
  Description of Artificial Sequence: Synthetic oligonucleotide
  Sense strand starting at position 90 of SEQ ID NO: 913482
ggaaauuacugaugauaau

SEQ ID NO: 930731 - RNA, 19 nt, Artificial Sequence
  Description of Artificial Sequence: Synthetic oligonucleotide
  Antisense strand to SEQ ID NO: 930730
auuaucaucaguaauuucc

SEQ ID NO: 930732 - RNA, 19 nt, Artificial Sequence
  Description of Artificial Sequence: Synthetic oligonucleotide
  Sense strand starting at position 3846 of SEQ ID NO: 913482
aaggacaucugugaacuau

SEQ ID NO: 930733 - RNA, 19 nt, Artificial Sequence
  Description of Artificial Sequence: Synthetic oligonucleotide
  Antisense strand to SEQ ID NO: 930732
auaguucacagauguccuu

SEQ ID NO: 930734 - RNA, 19 nt, Artificial Sequence
  Description of Artificial Sequence: Synthetic oligonucleotide
  Sense strand starting at position 1219 of SEQ ID NO: 913483
uuuaucuuuccaggaagaa

SEQ ID NO: 930735 - RNA, 19 nt, Artificial Sequence
  Description of Artificial Sequence: Synthetic oligonucleotide
  Antisense strand to SEQ ID NO: 930734
uucuuccuggaaagauaaa

SEQ ID NO: 930736 - RNA, 19 nt, Artificial Sequence
  Description of Artificial Sequence: Synthetic oligonucleotide
  Sense strand starting at position 1228 of SEQ ID NO: 913483
ccaggaagaaguugaggua

SEQ ID NO: 930737 - RNA, 19 nt, Artificial Sequence
  Description of Artificial Sequence: Synthetic oligonucleotide
  Antisense strand to SEQ ID NO: 930736
uaccucaacuucuuccugg

SEQ ID NO: 930738 - RNA, 19 nt, Artificial Sequence
  Description of Artificial Sequence: Synthetic oligonucleotide
  Sense strand starting at position 3528 of SEQ ID NO: 913483
gugaaagguugcucauuuc

SEQ ID NO: 930739 - RNA, 19 nt, Artificial Sequence
  Description of Artificial Sequence: Synthetic oligonucleotide
  Antisense strand to SEQ ID NO: 930738
gaaaugagcaaccuuucac

SEQ ID NO: 930740 - RNA, 19 nt, Artificial Sequence
  Description of Artificial Sequence: Synthetic oligonucleotide
  Sense strand starting at position 589 of SEQ ID NO: 913483
aagacagguguguauugau

SEQ ID NO: 930741 - RNA, 19 nt, Artificial Sequence
  Description of Artificial Sequence: Synthetic oligonucleotide
  Antisense strand to SEQ ID NO: 930740
aucaauacacaccugucuu

SEQ ID NO: 930742 - RNA, 19 nt, Artificial Sequence
  Description of Artificial Sequence: Synthetic oligonucleotide
  Sense strand starting at position 3515 of SEQ ID NO: 913483
auaauagaaguacgugaaa

SEQ ID NO: 930743 - RNA, 19 nt, Artificial Sequence
  Description of Artificial Sequence: Synthetic oligonucleotide
  Antisense strand to SEQ ID NO: 930742
uuucacguacuucuauuau

SEQ ID NO: 930744 - RNA, 19 nt, Artificial Sequence
  Description of Artificial Sequence: Synthetic oligonucleotide
  Sense strand starting at position 3854 of SEQ ID NO: 913483
agaugaauagauugccuuu

SEQ ID NO: 930745 - RNA, 19 nt, Artificial Sequence
  Description of Artificial Sequence: Synthetic oligonucleotide
  Antisense strand to SEQ ID NO: 930744
aaaggcaaucuauucaucu

SEQ ID NO: 930746 - RNA, 19 nt, Artificial Sequence
  Description of Artificial Sequence: Synthetic oligonucleotide
  Sense strand starting at position 3527 of SEQ ID NO: 913483
cgugaaagguugcucauuu

SEQ ID NO: 930747 - RNA, 19 nt, Artificial Sequence
  Description of Artificial Sequence: Synthetic oligonucleotide
  Antisense strand to SEQ ID NO: 930746
aaaugagcaaccuuucacg

SEQ ID NO: 930748 - RNA, 19 nt, Artificial Sequence
  Description of Artificial Sequence: Synthetic oligonucleotide
  Sense strand starting at position 3856 of SEQ ID NO: 913483
augaauagauugccuuuau

SEQ ID NO: 930749 - RNA, 19 nt, Artificial Sequence
  Description of Artificial Sequence: Synthetic oligonucleotide
  Antisense strand to SEQ ID NO: 930748
auaaaggcaaucuauucau

SEQ ID NO: 930750 - RNA, 19 nt, Artificial Sequence
  Description of Artificial Sequence: Synthetic oligonucleotide
  Sense strand starting at position 930 of SEQ ID NO: 913483
ucagaauggaggugcuaau

SEQ ID NO: 930751 - RNA, 19 nt, Artificial Sequence
  Description of Artificial Sequence: Synthetic oligonucleotide
  Antisense strand to SEQ ID NO: 930750
auuagcaccuccauucuga

SEQ ID NO: 930752 - RNA, 19 nt, Artificial Sequence
  Description of Artificial Sequence: Synthetic oligonucleotide
  Sense strand starting at position 957 of SEQ ID NO: 913483
uauggucuuguguaaauga

SEQ ID NO: 930753 - RNA, 19 nt, Artificial Sequence
  Description of Artificial Sequence: Synthetic oligonucleotide
  Antisense strand to SEQ ID NO: 930752
ucauuuacacaagaccaua

SEQ ID NO: 930754 - RNA, 19 nt, Artificial Sequence
  Description of Artificial Sequence: Synthetic oligonucleotide
  Sense strand starting at position 585 of SEQ ID NO: 913483
uaagaagacagguguguau

SEQ ID NO: 930755 - RNA, 19 nt, Artificial Sequence
  Description of Artificial Sequence: Synthetic oligonucleotide
  Antisense strand to SEQ ID NO: 930754
auacacaccugucuucuua

SEQ ID NO: 930756 - RNA, 19 nt, Artificial Sequence
  Description of Artificial Sequence: Synthetic oligonucleotide
  Sense strand starting at position 3786 of SEQ ID NO: 913483
gcuuaucagcuugaaauac

SEQ ID NO: 930757 - RNA, 19 nt, Artificial Sequence
  Description of Artificial Sequence: Synthetic oligonucleotide
  Antisense strand to SEQ ID NO: 930756
guauuucaagcugauaagc

SEQ ID NO: 930758 - RNA, 19 nt, Artificial Sequence
  Description of Artificial Sequence: Synthetic oligonucleotide
  Sense strand starting at position 3857 of SEQ ID NO: 913483
ugaauagauugccuuuauu

SEQ ID NO: 930759 - RNA, 19 nt, Artificial Sequence
  Description of Artificial Sequence: Synthetic oligonucleotide
  Antisense strand to SEQ ID NO: 930758
aauaaaggcaaucuauuca

SEQ ID NO: 930760 - RNA, 19 nt, Artificial Sequence
  Description of Artificial Sequence: Synthetic oligonucleotide
  Sense strand starting at position 641 of SEQ ID NO: 913483
augugaaagcaaugugaug

SEQ ID NO: 930761 - RNA, 19 nt, Artificial Sequence
  Description of Artificial Sequence: Synthetic oligonucleotide
  Antisense strand to SEQ ID NO: 930760
caucacauugcuuucacau

SEQ ID NO: 930762 - RNA, 19 nt, Artificial Sequence
  Description of Artificial Sequence: Synthetic oligonucleotide
  Sense strand starting at position 741 of SEQ ID NO: 913483
gauaaauacugggaaauag

SEQ ID NO: 930763 - RNA, 19 nt, Artificial Sequence
  Description of Artificial Sequence: Synthetic oligonucleotide
  Antisense strand to SEQ ID NO: 930762
cuauuucccaguauuuauc

SEQ ID NO: 930764 - RNA, 19 nt, Artificial Sequence
  Description of Artificial Sequence: Synthetic oligonucleotide
  Sense strand starting at position 2374 of SEQ ID NO: 913483
gauagacuauaagaaggau

SEQ ID NO: 930765 - RNA, 19 nt, Artificial Sequence
  Description of Artificial Sequence: Synthetic oligonucleotide
  Antisense strand to SEQ ID NO: 930764
auccuucuuauagucuauc

SEQ ID NO: 930766 - RNA, 19 nt, Artificial Sequence
  Description of Artificial Sequence: Synthetic oligonucleotide
  Sense strand starting at position 3013 of SEQ ID NO: 913483
gcaaauucuugggcucaaa

SEQ ID NO: 930767 - RNA, 19 nt, Artificial Sequence
  Description of Artificial Sequence: Synthetic oligonucleotide
  Antisense strand to SEQ ID NO: 930766
uuugagcccaagaauuugc

SEQ ID NO: 930768 - RNA, 19 nt, Artificial Sequence
  Description of Artificial Sequence: Synthetic oligonucleotide
  Sense strand starting at position 3169 of SEQ ID NO: 913483
ugucauagauauguuucua

SEQ ID NO: 930769 - RNA, 19 nt, Artificial Sequence
  Description of Artificial Sequence: Synthetic oligonucleotide
  Antisense strand to SEQ ID NO: 930768
uagaaacauaucuaugaca

SEQ ID NO: 930770 - RNA, 19 nt, Artificial Sequence
  Description of Artificial Sequence: Synthetic oligonucleotide
  Sense strand starting at position 1824 of SEQ ID NO: 913483
uuuccucaccuguggauau

SEQ ID NO: 930771 - RNA, 19 nt, Artificial Sequence
  Description of Artificial Sequence: Synthetic oligonucleotide
  Antisense strand to SEQ ID NO: 930770
auauccacaggugaggaaa

SEQ ID NO: 930772 - RNA, 19 nt, Artificial Sequence
  Description of Artificial Sequence: Synthetic oligonucleotide
  Sense strand starting at position 1188 of SEQ ID NO: 913483
uuuauugcccucggagaaa

SEQ ID NO: 930773 - RNA, 19 nt, Artificial Sequence
  Description of Artificial Sequence: Synthetic oligonucleotide
  Antisense strand to SEQ ID NO: 930772
uuucuccgagggcaauaaa

SEQ ID NO: 930774 - RNA, 19 nt, Artificial Sequence
  Description of Artificial Sequence: Synthetic oligonucleotide
  Sense strand starting at position 3750 of SEQ ID NO: 913483
uuggaaugccugcaguauu

SEQ ID NO: 930775 - RNA, 19 nt, Artificial Sequence
  Description of Artificial Sequence: Synthetic oligonucleotide
  Antisense strand to SEQ ID NO: 930774
aauacugcaggcauuccaa

SEQ ID NO: 930776 - RNA, 19 nt, Artificial Sequence
  Description of Artificial Sequence: Synthetic oligonucleotide
  Sense strand starting at position 3785 of SEQ ID NO: 913483
ugcuuaucagcuugaaaua

SEQ ID NO: 930777 - RNA, 19 nt, Artificial Sequence
  Description of Artificial Sequence: Synthetic oligonucleotide
  Antisense strand to SEQ ID NO: 930776
uauuucaagcugauaagca

SEQ ID NO: 930778 - RNA, 19 nt, Artificial Sequence
  Description of Artificial Sequence: Synthetic oligonucleotide
  Sense strand starting at position 2881 of SEQ ID NO: 913483
gucuccugggcuuaaguua

SEQ ID NO: 930779 - RNA, 19 nt, Artificial Sequence
  Description of Artificial Sequence: Synthetic oligonucleotide
  Antisense strand to SEQ ID NO: 930778
uaacuuaagcccaggagac

SEQ ID NO: 930780 - RNA, 19 nt, Artificial Sequence
  Description of Artificial Sequence: Synthetic oligonucleotide
  Sense strand starting at position 374 of SEQ ID NO: 913483
uacagugauugagaaagaa

SEQ ID NO: 930781 - RNA, 19 nt, Artificial Sequence
  Description of Artificial Sequence: Synthetic oligonucleotide
  Antisense strand to SEQ ID NO: 930780
uucuuucucaaucacugua

SEQ ID NO: 930782 - RNA, 19 nt, Artificial Sequence
  Description of Artificial Sequence: Synthetic oligonucleotide
  Sense strand starting at position 3866 of SEQ ID NO: 913483
ugccuuuauuagcuuaaga

SEQ ID NO: 930783 - RNA, 19 nt, Artificial Sequence
  Description of Artificial Sequence: Synthetic oligonucleotide
  Antisense strand to SEQ ID NO: 930782
ucuuaagcuaauaaaggca

SEQ ID NO: 930784 - RNA, 19 nt, Artificial Sequence
  Description of Artificial Sequence: Synthetic oligonucleotide
  Sense strand starting at position 738 of SEQ ID NO: 913483
ggagauaaauacugggaaa

SEQ ID NO: 930785 - RNA, 19 nt, Artificial Sequence
  Description of Artificial Sequence: Synthetic oligonucleotide
  Antisense strand to SEQ ID NO: 930784
uuucccaguauuuaucucc

SEQ ID NO: 930786 - RNA, 19 nt, Artificial Sequence
  Description of Artificial Sequence: Synthetic oligonucleotide
  Sense strand starting at position 643 of SEQ ID NO: 913483
gugaaagcaaugugauguu

SEQ ID NO: 930787 - RNA, 19 nt, Artificial Sequence
  Description of Artificial Sequence: Synthetic oligonucleotide
  Antisense strand to SEQ ID NO: 930786
aacaucacauugcuuucac

SEQ ID NO: 930788 - RNA, 19 nt, Artificial Sequence
  Description of Artificial Sequence: Synthetic oligonucleotide
  Sense strand starting at position 2877 of SEQ ID NO: 913483
ucuagucuccugggcuuaa

SEQ ID NO: 930789 - RNA, 19 nt, Artificial Sequence
  Description of Artificial Sequence: Synthetic oligonucleotide
  Antisense strand to SEQ ID NO: 930788
uuaagcccaggagacuaga

SEQ ID NO: 930790 - RNA, 19 nt, Artificial Sequence
  Description of Artificial Sequence: Synthetic oligonucleotide
  Sense strand starting at position 940 of SEQ ID NO: 913483
ggugcuaauagcuagcuua

SEQ ID NO: 930791 - RNA, 19 nt, Artificial Sequence
  Description of Artificial Sequence: Synthetic oligonucleotide
  Antisense strand to SEQ ID NO: 930790
uaagcuagcuauuagcacc

SEQ ID NO: 930792 - RNA, 19 nt, Artificial Sequence
  Description of Artificial Sequence: Synthetic oligonucleotide
  Sense strand starting at position 386 of SEQ ID NO: 913483
gaaagaagguuacaguuaa

SEQ ID NO: 930793 - RNA, 19 nt, Artificial Sequence
  Description of Artificial Sequence: Synthetic oligonucleotide
  Antisense strand to SEQ ID NO: 930792
uuaacuguaaccuucuuuc

SEQ ID NO: 930794 - RNA, 19 nt, Artificial Sequence
  Description of Artificial Sequence: Synthetic oligonucleotide
  Sense strand starting at position 3211 of SEQ ID NO: 913483
cagaauagguaauagaagu

SEQ ID NO: 930795 - RNA, 19 nt, Artificial Sequence
  Description of Artificial Sequence: Synthetic oligonucleotide
  Antisense strand to SEQ ID NO: 930794
acuucuauuaccuauucug

SEQ ID NO: 930796 - RNA, 19 nt, Artificial Sequence
  Description of Artificial Sequence: Synthetic oligonucleotide
  Sense strand starting at position 2235 of SEQ ID NO: 913483
aucagaaguugugaagaaa

SEQ ID NO: 930797 - RNA, 19 nt, Artificial Sequence
  Description of Artificial Sequence: Synthetic oligonucleotide
  Antisense strand to SEQ ID NO: 930796
uuucuucacaacuucugau

SEQ ID NO: 930798 - RNA, 19 nt, Artificial Sequence
  Description of Artificial Sequence: Synthetic oligonucleotide
  Sense strand starting at position 1143 of SEQ ID NO: 913483
guaccuuacuucguuuaua

SEQ ID NO: 930799 - RNA, 19 nt, Artificial Sequence
  Description of Artificial Sequence: Synthetic oligonucleotide
  Antisense strand to SEQ ID NO: 930798
uauaaacgaaguaagguac

SEQ ID NO: 930800 - RNA, 19 nt, Artificial Sequence
  Description of Artificial Sequence: Synthetic oligonucleotide
  Sense strand starting at position 3779 of SEQ ID NO: 913483
guauauugcuuaucagcuu

SEQ ID NO: 930801 - RNA, 19 nt, Artificial Sequence
  Description of Artificial Sequence: Synthetic oligonucleotide
  Antisense strand to SEQ ID NO: 930800
aagcugauaagcaauauac

SEQ ID NO: 930802 - RNA, 19 nt, Artificial Sequence
  Description of Artificial Sequence: Synthetic oligonucleotide
  Sense strand starting at position 3981 of SEQ ID NO: 913483
cuagccaaauaguagaaua

SEQ ID NO: 930803 - RNA, 19 nt, Artificial Sequence
  Description of Artificial Sequence: Synthetic oligonucleotide
  Antisense strand to SEQ ID NO: 930802
uauucuacuauuuggcuag

SEQ ID NO: 930804 - RNA, 19 nt, Artificial Sequence
  Description of Artificial Sequence: Synthetic oligonucleotide
  Sense strand starting at position 630 of SEQ ID NO: 913483
gagaaucacuuaugugaaa

SEQ ID NO: 930805 - RNA, 19 nt, Artificial Sequence
  Description of Artificial Sequence: Synthetic oligonucleotide
  Antisense strand to SEQ ID NO: 930804
uuucacauaagugauucuc

SEQ ID NO: 930806 - RNA, 19 nt, Artificial Sequence
  Description of Artificial Sequence: Synthetic oligonucleotide
  Sense strand starting at position 1358 of SEQ ID NO: 913483
ucaagauaauaaugaguug

SEQ ID NO: 930807 - RNA, 19 nt, Artificial Sequence
  Description of Artificial Sequence: Synthetic oligonucleotide
  Antisense strand to SEQ ID NO: 930806
caacucauuauuaucuuga

SEQ ID NO: 930808 - RNA, 19 nt, Artificial Sequence
  Description of Artificial Sequence: Synthetic oligonucleotide
  Sense strand starting at position 887 of SEQ ID NO: 913483
uguaaugcggcauggcuaa

SEQ ID NO: 930809 - RNA, 19 nt, Artificial Sequence
  Description of Artificial Sequence: Synthetic oligonucleotide
  Antisense strand to SEQ ID NO: 930808
uuagccaugccgcauuaca

SEQ ID NO: 930810 - RNA, 19 nt, Artificial Sequence
  Description of Artificial Sequence: Synthetic oligonucleotide
  Sense strand starting at position 2682 of SEQ ID NO: 913483
uuagcuauauuagaaaggu

SEQ ID NO: 930811 - RNA, 19 nt, Artificial Sequence
  Description of Artificial Sequence: Synthetic oligonucleotide
  Antisense strand to SEQ ID NO: 930810
accuuucuaauauagcuaa

SEQ ID NO: 930812 - RNA, 19 nt, Artificial Sequence
  Description of Artificial Sequence: Synthetic oligonucleotide
  Sense strand starting at position 2069 of SEQ ID NO: 913483
guaccaguuuauuaagcau

SEQ ID NO: 930813 - RNA, 19 nt, Artificial Sequence
  Description of Artificial Sequence: Synthetic oligonucleotide
  Antisense strand to SEQ ID NO: 930812
augcuuaauaaacugguac

SEQ ID NO: 930814 - RNA, 19 nt, Artificial Sequence
  Description of Artificial Sequence: Synthetic oligonucleotide
  Sense strand starting at position 390 of SEQ ID NO: 913484
acuauauaccaagagcagu

SEQ ID NO: 930815 - RNA, 19 nt, Artificial Sequence
  Description of Artificial Sequence: Synthetic oligonucleotide
  Antisense strand to SEQ ID NO: 930814
acugcucuugguauauagu

SEQ ID NO: 930816 - RNA, 19 nt, Artificial Sequence
  Description of Artificial Sequence: Synthetic oligonucleotide
  Sense strand starting at position 3078 of SEQ ID NO: 913484
caggguccucuagagugaa

SEQ ID NO: 930817 - RNA, 19 nt, Artificial Sequence
  Description of Artificial Sequence: Synthetic oligonucleotide
  Antisense strand to SEQ ID NO: 930816
uucacucuagaggacccug

SEQ ID NO: 930818 - RNA, 19 nt, Artificial Sequence
  Description of Artificial Sequence: Synthetic oligonucleotide
  Sense strand starting at position 523 of SEQ ID NO: 913484
ccacgucucacggcaaguu

SEQ ID NO: 930819 - RNA, 19 nt, Artificial Sequence
  Description of Artificial Sequence: Synthetic oligonucleotide
  Antisense strand to SEQ ID NO: 930818
aacuugccgugagacgugg

SEQ ID NO: 930820 - RNA, 19 nt, Artificial Sequence
  Description of Artificial Sequence: Synthetic oligonucleotide
  Sense strand starting at position 542 of SEQ ID NO: 913484
agcggaaaggcugaggaau

SEQ ID NO: 930821 - RNA, 19 nt, Artificial Sequence
  Description of Artificial Sequence: Synthetic oligonucleotide
  Antisense strand to SEQ ID NO: 930820
auuccucagccuuuccgcu

SEQ ID NO: 930822 - RNA, 19 nt, Artificial Sequence
  Description of Artificial Sequence: Synthetic oligonucleotide
  Sense strand starting at position 3033 of SEQ ID NO: 913484
cgacauaguccagggagaa

SEQ ID NO: 930823 - RNA, 19 nt, Artificial Sequence
  Description of Artificial Sequence: Synthetic oligonucleotide
  Antisense strand to SEQ ID NO: 930822
uucucccuggacuaugucg

SEQ ID NO: 930824 - RNA, 19 nt, Artificial Sequence
  Description of Artificial Sequence: Synthetic oligonucleotide
  Sense strand starting at position 3367 of SEQ ID NO: 913484
uugccuugugaugagaaga

SEQ ID NO: 930825 - RNA, 19 nt, Artificial Sequence
  Description of Artificial Sequence: Synthetic oligonucleotide
  Antisense strand to SEQ ID NO: 930824
ucuucucaucacaaggcaa

SEQ ID NO: 930826 - RNA, 19 nt, Artificial Sequence
  Description of Artificial Sequence: Synthetic oligonucleotide
  Sense strand starting at position 2676 of SEQ ID NO: 913484
uuugguggauuaucacaaa

SEQ ID NO: 930827 - RNA, 19 nt, Artificial Sequence
  Description of Artificial Sequence: Synthetic oligonucleotide
  Antisense strand to SEQ ID NO: 930826
uuugugauaauccaccaaa

SEQ ID NO: 930828 - RNA, 19 nt, Artificial Sequence
  Description of Artificial Sequence: Synthetic oligonucleotide
  Sense strand starting at position 2926 of SEQ ID NO: 913484
guacccuauccauagacga

SEQ ID NO: 930829 - RNA, 19 nt, Artificial Sequence
  Description of Artificial Sequence: Synthetic oligonucleotide
  Antisense strand to SEQ ID NO: 930828
ucgucuauggauaggguac

SEQ ID NO: 930830 - RNA, 19 nt, Artificial Sequence
  Description of Artificial Sequence: Synthetic oligonucleotide
  Sense strand starting at position 97 of SEQ ID NO: 913484
gugaaacugaguuaagcua

SEQ ID NO: 930831 - RNA, 19 nt, Artificial Sequence
  Description of Artificial Sequence: Synthetic oligonucleotide
  Antisense strand to SEQ ID NO: 930830
uagcuuaacucaguuucac

SEQ ID NO: 930832 - RNA, 19 nt, Artificial Sequence
  Description of Artificial Sequence: Synthetic oligonucleotide
  Sense strand starting at position 1037 of SEQ ID NO: 913484
gcggcaacucgagucugua

SEQ ID NO: 930833 - RNA, 19 nt, Artificial Sequence
  Description of Artificial Sequence: Synthetic oligonucleotide
  Antisense strand to SEQ ID NO: 930832
uacagacucgaguugccgc

SEQ ID NO: 930834 - RNA, 19 nt, Artificial Sequence
  Description of Artificial Sequence: Synthetic oligonucleotide
  Sense strand starting at position 441 of SEQ ID NO: 913484
ucacaaucgccagaaucau

SEQ ID NO: 930835 - RNA, 19 nt, Artificial Sequence
  Description of Artificial Sequence: Synthetic oligonucleotide
  Antisense strand to SEQ ID NO: 930834
augauucuggcgauuguga

SEQ ID NO: 930836 - RNA, 19 nt, Artificial Sequence
  Description of Artificial Sequence: Synthetic oligonucleotide
  Sense strand starting at position 2630 of SEQ ID NO: 913484
gcugaaaugugauuagagg

SEQ ID NO: 930837 - RNA, 19 nt, Artificial Sequence
  Description of Artificial Sequence: Synthetic oligonucleotide
  Antisense strand to SEQ ID NO: 930836
ccucuaaucacauuucagc

SEQ ID NO: 930838 - RNA, 19 nt, Artificial Sequence
  Description of Artificial Sequence: Synthetic oligonucleotide
  Sense strand starting at position 596 of SEQ ID NO: 913484
acggcaacucucgaacaaa

SEQ ID NO: 930839 - RNA, 19 nt, Artificial Sequence
  Description of Artificial Sequence: Synthetic oligonucleotide
  Antisense strand to SEQ ID NO: 930838
uuuguucgagaguugccgu

SEQ ID NO: 930840 - RNA, 19 nt, Artificial Sequence
  Description of Artificial Sequence: Synthetic oligonucleotide
  Sense strand starting at position 84 of SEQ ID NO: 913484
uucuuuauccaaggugaaa

SEQ ID NO: 930841 - RNA, 19 nt, Artificial Sequence
  Description of Artificial Sequence: Synthetic oligonucleotide
  Antisense strand to SEQ ID NO: 930840
uuucaccuuggauaaagaa

SEQ ID NO: 930842 - RNA, 19 nt, Artificial Sequence
  Description of Artificial Sequence: Synthetic oligonucleotide
  Sense strand starting at position 3082 of SEQ ID NO: 913484
guccucuagagugaaggua

SEQ ID NO: 930843 - RNA, 19 nt, Artificial Sequence
  Description of Artificial Sequence: Synthetic oligonucleotide
  Antisense strand to SEQ ID NO: 930842
uaccuucacucuagaggac

SEQ ID NO: 930844 - RNA, 19 nt, Artificial Sequence
  Description of Artificial Sequence: Synthetic oligonucleotide
  Sense strand starting at position 2251 of SEQ ID NO: 913484
auggauucgguuuaccuua

SEQ ID NO: 930845 - RNA, 19 nt, Artificial Sequence
  Description of Artificial Sequence: Synthetic oligonucleotide
  Antisense strand to SEQ ID NO: 930844
uaagguaaaccgaauccau

SEQ ID NO: 930846 - RNA, 19 nt, Artificial Sequence
  Description of Artificial Sequence: Synthetic oligonucleotide
  Sense strand starting at position 3750 of SEQ ID NO: 913484
uuaccuaaggucgagaguu

SEQ ID NO: 930847 - RNA, 19 nt, Artificial Sequence
  Description of Artificial Sequence: Synthetic oligonucleotide
  Antisense strand to SEQ ID NO: 930846
aacucucgaccuuagguaa

SEQ ID NO: 930848 - RNA, 19 nt, Artificial Sequence
  Description of Artificial Sequence: Synthetic oligonucleotide
  Sense strand starting at position 2104 of SEQ ID NO: 913484
cagagagcgccggagaaau

SEQ ID NO: 930849 - RNA, 19 nt, Artificial Sequence
  Description of Artificial Sequence: Synthetic oligonucleotide
  Antisense strand to SEQ ID NO: 930848
auuucuccggcgcucucug

SEQ ID NO: 930850 - RNA, 19 nt, Artificial Sequence
  Description of Artificial Sequence: Synthetic oligonucleotide
  Sense strand starting at position 182 of SEQ ID NO: 913484
uugccacaugcagaguaaa

SEQ ID NO: 930851 - RNA, 19 nt, Artificial Sequence
  Description of Artificial Sequence: Synthetic oligonucleotide
  Antisense strand to SEQ ID NO: 930850
uuuacucugcauguggcaa

SEQ ID NO: 930852 - RNA, 19 nt, Artificial Sequence
  Description of Artificial Sequence: Synthetic oligonucleotide
  Sense strand starting at position 2670 of SEQ ID NO: 913484
aaccucuuugguggauuau

SEQ ID NO: 930853 - RNA, 19 nt, Artificial Sequence
  Description of Artificial Sequence: Synthetic oligonucleotide
  Antisense strand to SEQ ID NO: 930852
auaauccaccaaagagguu

SEQ ID NO: 930854 - RNA, 19 nt, Artificial Sequence
  Description of Artificial Sequence: Synthetic oligonucleotide
  Sense strand starting at position 2564 of SEQ ID NO: 913484
gugcucguaaaucaggaaa

SEQ ID NO: 930855 - RNA, 19 nt, Artificial Sequence
  Description of Artificial Sequence: Synthetic oligonucleotide
  Antisense strand to SEQ ID NO: 930854
uuuccugauuuacgagcac

SEQ ID NO: 930856 - RNA, 19 nt, Artificial Sequence
  Description of Artificial Sequence: Synthetic oligonucleotide
  Sense strand starting at position 2537 of SEQ ID NO: 913484
acccaugguggauguaauu

SEQ ID NO: 930857 - RNA, 19 nt, Artificial Sequence
  Description of Artificial Sequence: Synthetic oligonucleotide
  Antisense strand to SEQ ID NO: 930856
aauuacauccaccaugggu

SEQ ID NO: 930858 - RNA, 19 nt, Artificial Sequence
  Description of Artificial Sequence: Synthetic oligonucleotide
  Sense strand starting at position 3290 of SEQ ID NO: 913484
cuguauuuaucgcuucuac

SEQ ID NO: 930859 - RNA, 19 nt, Artificial Sequence
  Description of Artificial Sequence: Synthetic oligonucleotide
  Antisense strand to SEQ ID NO: 930858
guagaagcgauaaauacag

SEQ ID NO: 930860 - RNA, 19 nt, Artificial Sequence
  Description of Artificial Sequence: Synthetic oligonucleotide
  Sense strand starting at position 1241 of SEQ ID NO: 913484
gccgaaggacucugagacu

SEQ ID NO: 930861 - RNA, 19 nt, Artificial Sequence
  Description of Artificial Sequence: Synthetic oligonucleotide
  Antisense strand to SEQ ID NO: 930860
agucucagaguccuucggc

SEQ ID NO: 930862 - RNA, 19 nt, Artificial Sequence
  Description of Artificial Sequence: Synthetic oligonucleotide
  Sense strand starting at position 3445 of SEQ ID NO: 913484
gugugucuuagauaguaaa

SEQ ID NO: 930863 - RNA, 19 nt, Artificial Sequence
  Description of Artificial Sequence: Synthetic oligonucleotide
  Antisense strand to SEQ ID NO: 930862
uuuacuaucuaagacacac

SEQ ID NO: 930864 - RNA, 19 nt, Artificial Sequence
  Description of Artificial Sequence: Synthetic oligonucleotide
  Sense strand starting at position 377 of SEQ ID NO: 913484
ucacuuagugcuuacuaua

SEQ ID NO: 930865 - RNA, 19 nt, Artificial Sequence
  Description of Artificial Sequence: Synthetic oligonucleotide
  Antisense strand to SEQ ID NO: 930864
uauaguaagcacuaaguga

SEQ ID NO: 930866 - RNA, 19 nt, Artificial Sequence
  Description of Artificial Sequence: Synthetic oligonucleotide
  Sense strand starting at position 791 of SEQ ID NO: 913484
guuaauuaaccuugagcaa

SEQ ID NO: 930867 - RNA, 19 nt, Artificial Sequence
  Description of Artificial Sequence: Synthetic oligonucleotide
  Antisense strand to SEQ ID NO: 930866
uugcucaagguuaauuaac

SEQ ID NO: 930868 - RNA, 19 nt, Artificial Sequence
  Description of Artificial Sequence: Synthetic oligonucleotide
  Sense strand starting at position 3224 of SEQ ID NO: 913484
gggccuauuuaagaacacu

SEQ ID NO: 930869 - RNA, 19 nt, Artificial Sequence
  Description of Artificial Sequence: Synthetic oligonucleotide
  Antisense strand to SEQ ID NO: 930868
aguguucuuaaauaggccc

SEQ ID NO: 930870 - RNA, 19 nt, Artificial Sequence
  Description of Artificial Sequence: Synthetic oligonucleotide
  Sense strand starting at position 3141 of SEQ ID NO: 913484
uuuaaauagugucuacauc

SEQ ID NO: 930871 - RNA, 19 nt, Artificial Sequence
  Description of Artificial Sequence: Synthetic oligonucleotide
  Antisense strand to SEQ ID NO: 930870
gauguagacacuauuuaaa

SEQ ID NO: 930872 - RNA, 19 nt, Artificial Sequence
  Description of Artificial Sequence: Synthetic oligonucleotide
  Sense strand starting at position 867 of SEQ ID NO: 913484
cuucuagagagccgagauu

SEQ ID NO: 930873 - RNA, 19 nt, Artificial Sequence
  Description of Artificial Sequence: Synthetic oligonucleotide
  Antisense strand to SEQ ID NO: 930872
aaucucggcucucuagaag

SEQ ID NO: 930874 - RNA, 19 nt, Artificial Sequence
  Description of Artificial Sequence: Synthetic oligonucleotide
  Sense strand starting at position 1254 of SEQ ID NO: 913484
gagacucacugcucgacua

SEQ ID NO: 930875 - RNA, 19 nt, Artificial Sequence
  Description of Artificial Sequence: Synthetic oligonucleotide
  Antisense strand to SEQ ID NO: 930874
uagucgagcagugagucuc

SEQ ID NO: 930876 - RNA, 19 nt, Artificial Sequence
  Description of Artificial Sequence: Synthetic oligonucleotide
  Sense strand starting at position 2608 of SEQ ID NO: 913484
cgucaauugaggugauaug

SEQ ID NO: 930877 - RNA, 19 nt, Artificial Sequence
  Description of Artificial Sequence: Synthetic oligonucleotide
  Antisense strand to SEQ ID NO: 930876
cauaucaccucaauugacg

SEQ ID NO: 930878 - RNA, 19 nt, Artificial Sequence
  Description of Artificial Sequence: Synthetic oligonucleotide
  Sense strand starting at position 2596 of SEQ ID NO: 913484
agaacacuccgacgucaau

SEQ ID NO: 930879 - RNA, 19 nt, Artificial Sequence
  Description of Artificial Sequence: Synthetic oligonucleotide
  Antisense strand to SEQ ID NO: 930878
auugacgucggaguguucu

SEQ ID NO: 930880 - RNA, 19 nt, Artificial Sequence
  Description of Artificial Sequence: Synthetic oligonucleotide
  Sense strand starting at position 2718 of SEQ ID NO: 913484
cagugagacuguccacuuu

SEQ ID NO: 930881 - RNA, 19 nt, Artificial Sequence
  Description of Artificial Sequence: Synthetic oligonucleotide
  Antisense strand to SEQ ID NO: 930880
aaaguggacagucucacug

SEQ ID NO: 930882 - RNA, 19 nt, Artificial Sequence
  Description of Artificial Sequence: Synthetic oligonucleotide
  Sense strand starting at position 1255 of SEQ ID NO: 913484
agacucacugcucgacuau

SEQ ID NO: 930883 - RNA, 19 nt, Artificial Sequence
  Description of Artificial Sequence: Synthetic oligonucleotide
  Antisense strand to SEQ ID NO: 930882
auagucgagcagugagucu

SEQ ID NO: 930884 - RNA, 19 nt, Artificial Sequence
  Description of Artificial Sequence: Synthetic oligonucleotide
  Sense strand starting at position 376 of SEQ ID NO: 913484
aucacuuagugcuuacuau

SEQ ID NO: 930885 - RNA, 19 nt, Artificial Sequence
  Description of Artificial Sequence: Synthetic oligonucleotide
  Antisense strand to SEQ ID NO: 930884
auaguaagcacuaagugau

SEQ ID NO: 930886 - RNA, 19 nt, Artificial Sequence
  Description of Artificial Sequence: Synthetic oligonucleotide
  Sense strand starting at position 2915 of SEQ ID NO: 913484
guauaugagccguacccua

SEQ ID NO: 930887 - RNA, 19 nt, Artificial Sequence
  Description of Artificial Sequence: Synthetic oligonucleotide
  Antisense strand to SEQ ID NO: 930886
uaggguacggcucauauac

SEQ ID NO: 930888 - RNA, 19 nt, Artificial Sequence
  Description of Artificial Sequence: Synthetic oligonucleotide
  Sense strand starting at position 2377 of SEQ ID NO: 913484
cugugaaauuaugcucuuu

SEQ ID NO: 930889 - RNA, 19 nt, Artificial Sequence
  Description of Artificial Sequence: Synthetic oligonucleotide
  Antisense strand to SEQ ID NO: 930888
aaagagcauaauuucacag

SEQ ID NO: 930890 - RNA, 19 nt, Artificial Sequence
  Description of Artificial Sequence: Synthetic oligonucleotide
  Sense strand starting at position 2519 of SEQ ID NO: 913484
aguaaccuugcuugucaaa

SEQ ID NO: 930891 - RNA, 19 nt, Artificial Sequence
  Description of Artificial Sequence: Synthetic oligonucleotide
  Antisense strand to SEQ ID NO: 930890
uuugacaagcaagguuacu

SEQ ID NO: 930892 - RNA, 19 nt, Artificial Sequence
  Description of Artificial Sequence: Synthetic oligonucleotide
  Sense strand starting at position 3361 of SEQ ID NO: 913484
cuggacuugccuugugaug

SEQ ID NO: 930893 - RNA, 19 nt, Artificial Sequence
  Description of Artificial Sequence: Synthetic oligonucleotide
  Antisense strand to SEQ ID NO: 930892
caucacaaggcaaguccag

SEQ ID NO: 930894 - RNA, 19 nt, Artificial Sequence
  Description of Artificial Sequence: Synthetic oligonucleotide
  Sense strand starting at position 490 of SEQ ID NO: 913485
cguuguguuacucccuuua

SEQ ID NO: 930895 - RNA, 19 nt, Artificial Sequence
  Description of Artificial Sequence: Synthetic oligonucleotide
  Antisense strand to SEQ ID NO: 930894
uaaagggaguaacacaacg

SEQ ID NO: 930896 - RNA, 19 nt, Artificial Sequence
  Description of Artificial Sequence: Synthetic oligonucleotide
  Sense strand starting at position 3604 of SEQ ID NO: 913485
agaucaagguaugugaaca

SEQ ID NO: 930897 - RNA, 19 nt, Artificial Sequence
  Description of Artificial Sequence: Synthetic oligonucleotide
  Antisense strand to SEQ ID NO: 930896
uguucacauaccuugaucu

SEQ ID NO: 930898 - RNA, 19 nt, Artificial Sequence
  Description of Artificial Sequence: Synthetic oligonucleotide
  Sense strand starting at position 3590 of SEQ ID NO: 913485
aggccaguugacuaagauc

SEQ ID NO: 930899 - RNA, 19 nt, Artificial Sequence
  Description of Artificial Sequence: Synthetic oligonucleotide
  Antisense strand to SEQ ID NO: 930898
gaucuuagucaacuggccu

SEQ ID NO: 930900 - RNA, 19 nt, Artificial Sequence
  Description of Artificial Sequence: Synthetic oligonucleotide
  Sense strand starting at position 185 of SEQ ID NO: 913485
auaguauaggacuggguaa

SEQ ID NO: 930901 - RNA, 19 nt, Artificial Sequence
  Description of Artificial Sequence: Synthetic oligonucleotide
  Antisense strand to SEQ ID NO: 930900
uuacccaguccuauacuau

SEQ ID NO: 930902 - RNA, 19 nt, Artificial Sequence
  Description of Artificial Sequence: Synthetic oligonucleotide
  Sense strand starting at position 298 of SEQ ID NO: 913485
ggcugugaaagugaucaag

SEQ ID NO: 930903 - RNA, 19 nt, Artificial Sequence
  Description of Artificial Sequence: Synthetic oligonucleotide
  Antisense strand to SEQ ID NO: 930902
cuugaucacuuucacagcc

SEQ ID NO: 930904 - RNA, 19 nt, Artificial Sequence
  Description of Artificial Sequence: Synthetic oligonucleotide
  Sense strand starting at position 300 of SEQ ID NO: 913485
cugugaaagugaucaagac

SEQ ID NO: 930905 - RNA, 19 nt, Artificial Sequence
  Description of Artificial Sequence: Synthetic oligonucleotide
  Antisense strand to SEQ ID NO: 930904
gucuugaucacuuucacag

SEQ ID NO: 930906 - RNA, 19 nt, Artificial Sequence
  Description of Artificial Sequence: Synthetic oligonucleotide
  Sense strand starting at position 3257 of SEQ ID NO: 913485
gacuccucccaugggauua

SEQ ID NO: 930907 - RNA, 19 nt, Artificial Sequence
  Description of Artificial Sequence: Synthetic oligonucleotide
  Antisense strand to SEQ ID NO: 930906
uaaucccaugggaggaguc

SEQ ID NO: 930908 - RNA, 19 nt, Artificial Sequence
  Description of Artificial Sequence: Synthetic oligonucleotide
  Sense strand starting at position 3599 of SEQ ID NO: 913485
gacuaagaucaagguaugu

SEQ ID NO: 930909 - RNA, 19 nt, Artificial Sequence
  Description of Artificial Sequence: Synthetic oligonucleotide
  Antisense strand to SEQ ID NO: 930908
acauaccuugaucuuaguc

SEQ ID NO: 930910 - RNA, 19 nt, Artificial Sequence
  Description of Artificial Sequence: Synthetic oligonucleotide
  Sense strand starting at position 1070 of SEQ ID NO: 913485
aagagcauucucgggagaa

SEQ ID NO: 930911 - RNA, 19 nt, Artificial Sequence
  Description of Artificial Sequence: Synthetic oligonucleotide
  Antisense strand to SEQ ID NO: 930910
uucucccgagaaugcucuu

SEQ ID NO: 930912 - RNA, 19 nt, Artificial Sequence
  Description of Artificial Sequence: Synthetic oligonucleotide
  Sense strand starting at position 3256 of SEQ ID NO: 913485
ggacuccucccaugggauu

SEQ ID NO: 930913 - RNA, 19 nt, Artificial Sequence
  Description of Artificial Sequence: Synthetic oligonucleotide
  Antisense strand to SEQ ID NO: 930912
aaucccaugggaggagucc

SEQ ID NO: 930914 - RNA, 19 nt, Artificial Sequence
  Description of Artificial Sequence: Synthetic oligonucleotide
  Sense strand starting at position 186 of SEQ ID NO: 913485
uaguauaggacuggguaau

SEQ ID NO: 930915 - RNA, 19 nt, Artificial Sequence
  Description of Artificial Sequence: Synthetic oligonucleotide
  Antisense strand to SEQ ID NO: 930914
auuacccaguccuauacua

SEQ ID NO: 930916 - RNA, 19 nt, Artificial Sequence
  Description of Artificial Sequence: Synthetic oligonucleotide
  Sense strand starting at position 735 of SEQ ID NO: 913485
augagaagauguuuggguu

SEQ ID NO: 930917 - RNA, 19 nt, Artificial Sequence
  Description of Artificial Sequence: Synthetic oligonucleotide
  Antisense strand to SEQ ID NO: 930916
aacccaaacaucuucucau

SEQ ID NO: 930918 - RNA, 19 nt, Artificial Sequence
  Description of Artificial Sequence: Synthetic oligonucleotide
  Sense strand starting at position 1044 of SEQ ID NO: 913485
acccaaaggugucugacaa

SEQ ID NO: 930919 - RNA, 19 nt, Artificial Sequence
  Description of Artificial Sequence: Synthetic oligonucleotide
  Antisense strand to SEQ ID NO: 930918
uugucagacaccuuugggu

SEQ ID NO: 930920 - RNA, 19 nt, Artificial Sequence
  Description of Artificial Sequence: Synthetic oligonucleotide
  Sense strand starting at position 736 of SEQ ID NO: 913485
ugagaagauguuuggguua

SEQ ID NO: 930921 - RNA, 19 nt, Artificial Sequence
  Description of Artificial Sequence: Synthetic oligonucleotide
  Antisense strand to SEQ ID NO: 930920
uaacccaaacaucuucuca

SEQ ID NO: 930922 - RNA, 19 nt, Artificial Sequence
  Description of Artificial Sequence: Synthetic oligonucleotide
  Sense strand starting at position 3913 of SEQ ID NO: 913485
augaaaucaugccuugauu

SEQ ID NO: 930923 - RNA, 19 nt, Artificial Sequence
  Description of Artificial Sequence: Synthetic oligonucleotide
  Antisense strand to SEQ ID NO: 930922
aaucaaggcaugauuucau

SEQ ID NO: 930924 - RNA, 19 nt, Artificial Sequence
  Description of Artificial Sequence: Synthetic oligonucleotide
  Sense strand starting at position 1072 of SEQ ID NO: 913485
gagcauucucgggagaagc

SEQ ID NO: 930925 - RNA, 19 nt, Artificial Sequence
  Description of Artificial Sequence: Synthetic oligonucleotide
  Antisense strand to SEQ ID NO: 930924
gcuucucccgagaaugcuc

SEQ ID NO: 930926 - RNA, 19 nt, Artificial Sequence
  Description of Artificial Sequence: Synthetic oligonucleotide
  Sense strand starting at position 1045 of SEQ ID NO: 913485
cccaaaggugucugacaau

SEQ ID NO: 930927 - RNA, 19 nt, Artificial Sequence
  Description of Artificial Sequence: Synthetic oligonucleotide
  Antisense strand to SEQ ID NO: 930926
auugucagacaccuuuggg

SEQ ID NO: 930928 - RNA, 19 nt, Artificial Sequence
  Description of Artificial Sequence: Synthetic oligonucleotide
  Sense strand starting at position 858 of SEQ ID NO: 913485
guuaucacugagcaacagu

SEQ ID NO: 930929 - RNA, 19 nt, Artificial Sequence
  Description of Artificial Sequence: Synthetic oligonucleotide
  Antisense strand to SEQ ID NO: 930928
acuguugcucagugauaac

SEQ ID NO: 930930 - RNA, 19 nt, Artificial Sequence
  Description of Artificial Sequence: Synthetic oligonucleotide
  Sense strand starting at position 3103 of SEQ ID NO: 913485
gggaucucccuuuguaaca

SEQ ID NO: 930931 - RNA, 19 nt, Artificial Sequence
  Description of Artificial Sequence: Synthetic oligonucleotide
  Antisense strand to SEQ ID NO: 930930
uguuacaaagggagauccc

SEQ ID NO: 930932 - RNA, 19 nt, Artificial Sequence
  Description of Artificial Sequence: Synthetic oligonucleotide
  Sense strand starting at position 3704 of SEQ ID NO: 913485
cuugccuuuauugggaaga

SEQ ID NO: 930933 - RNA, 19 nt, Artificial Sequence
  Description of Artificial Sequence: Synthetic oligonucleotide
  Antisense strand to SEQ ID NO: 930932
ucuucccaauaaaggcaag

SEQ ID NO: 930934 - RNA, 19 nt, Artificial Sequence
  Description of Artificial Sequence: Synthetic oligonucleotide
  Sense strand starting at position 2799 of SEQ ID NO: 913485
agguaugauuucgcucugu

SEQ ID NO: 930935 - RNA, 19 nt, Artificial Sequence
  Description of Artificial Sequence: Synthetic oligonucleotide
  Antisense strand to SEQ ID NO: 930934
acagagcgaaaucauaccu

SEQ ID NO: 930936 - RNA, 19 nt, Artificial Sequence
  Description of Artificial Sequence: Synthetic oligonucleotide
  Sense strand starting at position 1074 of SEQ ID NO: 913485
gcauucucgggagaagcua

SEQ ID NO: 930937 - RNA, 19 nt, Artificial Sequence
  Description of Artificial Sequence: Synthetic oligonucleotide
  Antisense strand to SEQ ID NO: 930936
uagcuucucccgagaaugc

SEQ ID NO: 930938 - RNA, 19 nt, Artificial Sequence
  Description of Artificial Sequence: Synthetic oligonucleotide
  Sense strand starting at position 32 of SEQ ID NO: 913485
gcagccuggcucuaagaaa

SEQ ID NO: 930939 - RNA, 19 nt, Artificial Sequence
  Description of Artificial Sequence: Synthetic oligonucleotide
  Antisense strand to SEQ ID NO: 930938
uuucuuagagccaggcugc

SEQ ID NO: 930940 - RNA, 19 nt, Artificial Sequence
  Description of Artificial Sequence: Synthetic oligonucleotide
  Sense strand starting at position 247 of SEQ ID NO: 913485
guacaauacuuacuguuua

SEQ ID NO: 930941 - RNA, 19 nt, Artificial Sequence
  Description of Artificial Sequence: Synthetic oligonucleotide
  Antisense strand to SEQ ID NO: 930940
uaaacaguaaguauuguac

SEQ ID NO: 930942 - RNA, 19 nt, Artificial Sequence
  Description of Artificial Sequence: Synthetic oligonucleotide
  Sense strand starting at position 367 of SEQ ID NO: 913485
aagaaaguauggcuguagu

SEQ ID NO: 930943 - RNA, 19 nt, Artificial Sequence
  Description of Artificial Sequence: Synthetic oligonucleotide
  Antisense strand to SEQ ID NO: 930942
acuacagccauacuuucuu

SEQ ID NO: 930944 - RNA, 19 nt, Artificial Sequence
  Description of Artificial Sequence: Synthetic oligonucleotide
  Sense strand starting at position 727 of SEQ ID NO: 913485
gauuaacuaugagaagaug

SEQ ID NO: 930945 - RNA, 19 nt, Artificial Sequence
  Description of Artificial Sequence: Synthetic oligonucleotide
  Antisense strand to SEQ ID NO: 930944
caucuucucauaguuaauc

SEQ ID NO: 930946 - RNA, 19 nt, Artificial Sequence
  Description of Artificial Sequence: Synthetic oligonucleotide
  Sense strand starting at position 3945 of SEQ ID NO: 913485
guaccuguucgugacaaau

SEQ ID NO: 930947 - RNA, 19 nt, Artificial Sequence
  Description of Artificial Sequence: Synthetic oligonucleotide
  Antisense strand to SEQ ID NO: 930946
auuugucacgaacagguac

SEQ ID NO: 930948 - RNA, 19 nt, Artificial Sequence
  Description of Artificial Sequence: Synthetic oligonucleotide
  Sense strand starting at position 3362 of SEQ ID NO: 913485
uugagcuuugccgaggacu

SEQ ID NO: 930949 - RNA, 19 nt, Artificial Sequence
  Description of Artificial Sequence: Synthetic oligonucleotide
  Antisense strand to SEQ ID NO: 930948
aguccucggcaaagcucaa

SEQ ID NO: 930950 - RNA, 19 nt, Artificial Sequence
  Description of Artificial Sequence: Synthetic oligonucleotide
  Sense strand starting at position 855 of SEQ ID NO: 913485
gucguuaucacugagcaac

SEQ ID NO: 930951 - RNA, 19 nt, Artificial Sequence
  Description of Artificial Sequence: Synthetic oligonucleotide
  Antisense strand to SEQ ID NO: 930950
guugcucagugauaacgac

SEQ ID NO: 930952 - RNA, 19 nt, Artificial Sequence
  Description of Artificial Sequence: Synthetic oligonucleotide
  Sense strand starting at position 391 of SEQ ID NO: 913485
gacaucuaagcguauguuu

SEQ ID NO: 930953 - RNA, 19 nt, Artificial Sequence
  Description of Artificial Sequence: Synthetic oligonucleotide
  Antisense strand to SEQ ID NO: 930952
aaacauacgcuuagauguc

SEQ ID NO: 930954 - RNA, 19 nt, Artificial Sequence
  Description of Artificial Sequence: Synthetic oligonucleotide
  Sense strand starting at position 3476 of SEQ ID NO: 913485
agguuaacaugagauagaa

SEQ ID NO: 930955 - RNA, 19 nt, Artificial Sequence
  Description of Artificial Sequence: Synthetic oligonucleotide
  Antisense strand to SEQ ID NO: 930954
uucuaucucauguuaaccu

SEQ ID NO: 930956 - RNA, 19 nt, Artificial Sequence
  Description of Artificial Sequence: Synthetic oligonucleotide
  Sense strand starting at position 481 of SEQ ID NO: 913485
gaaaccagacguuguguua

SEQ ID NO: 930957 - RNA, 19 nt, Artificial Sequence
  Description of Artificial Sequence: Synthetic oligonucleotide
  Antisense strand to SEQ ID NO: 930956
uaacacaacgucugguuuc

SEQ ID NO: 930958 - RNA, 19 nt, Artificial Sequence
  Description of Artificial Sequence: Synthetic oligonucleotide
  Sense strand starting at position 3439 of SEQ ID NO: 913485
uauugaauucgcuguggag

SEQ ID NO: 930959 - RNA, 19 nt, Artificial Sequence
  Description of Artificial Sequence: Synthetic oligonucleotide
  Antisense strand to SEQ ID NO: 930958
cuccacagcgaauucaaua

SEQ ID NO: 930960 - RNA, 19 nt, Artificial Sequence
  Description of Artificial Sequence: Synthetic oligonucleotide
  Sense strand starting at position 3393 of SEQ ID NO: 913485
ugcuuuaagcugugaaaua

SEQ ID NO: 930961 - RNA, 19 nt, Artificial Sequence
  Description of Artificial Sequence: Synthetic oligonucleotide
  Antisense strand to SEQ ID NO: 930960
uauuucacagcuuaaagca

SEQ ID NO: 930962 - RNA, 19 nt, Artificial Sequence
  Description of Artificial Sequence: Synthetic oligonucleotide
  Sense strand starting at position 289 of SEQ ID NO: 913485
ggugcuagaggcugugaaa

SEQ ID NO: 930963 - RNA, 19 nt, Artificial Sequence
  Description of Artificial Sequence: Synthetic oligonucleotide
  Antisense strand to SEQ ID NO: 930962
uuucacagccucuagcacc

SEQ ID NO: 930964 - RNA, 19 nt, Artificial Sequence
  Description of Artificial Sequence: Synthetic oligonucleotide
  Sense strand starting at position 199 of SEQ ID NO: 913485
gguaauggcuuucuguaau

SEQ ID NO: 930965 - RNA, 19 nt, Artificial Sequence
  Description of Artificial Sequence: Synthetic oligonucleotide
  Antisense strand to SEQ ID NO: 930964
auuacagaaagccauuacc

SEQ ID NO: 930966 - RNA, 19 nt, Artificial Sequence
  Description of Artificial Sequence: Synthetic oligonucleotide
  Sense strand starting at position 3546 of SEQ ID NO: 913485
uuagaaugccaucggguuu

SEQ ID NO: 930967 - RNA, 19 nt, Artificial Sequence
  Description of Artificial Sequence: Synthetic oligonucleotide
  Antisense strand to SEQ ID NO: 930966
aaacccgauggcauucuaa

SEQ ID NO: 930968 - RNA, 19 nt, Artificial Sequence
  Description of Artificial Sequence: Synthetic oligonucleotide
  Sense strand starting at position 394 of SEQ ID NO: 913485
aucuaagcguauguuuaaa

SEQ ID NO: 930969 - RNA, 19 nt, Artificial Sequence
  Description of Artificial Sequence: Synthetic oligonucleotide
  Antisense strand to SEQ ID NO: 930968
uuuaaacauacgcuuagau

SEQ ID NO: 930970 - RNA, 19 nt, Artificial Sequence
  Description of Artificial Sequence: Synthetic oligonucleotide
  Sense strand starting at position 492 of SEQ ID NO: 913485
uuguguuacucccuuuaua

SEQ ID NO: 930971 - RNA, 19 nt, Artificial Sequence
  Description of Artificial Sequence: Synthetic oligonucleotide
  Antisense strand to SEQ ID NO: 930970
uauaaagggaguaacacaa

SEQ ID NO: 930972 - RNA, 19 nt, Artificial Sequence
  Description of Artificial Sequence: Synthetic oligonucleotide
  Sense strand starting at position 464 of SEQ ID NO: 913485
uuacuaagcgcguacuaga

SEQ ID NO: 930973 - RNA, 19 nt, Artificial Sequence
  Description of Artificial Sequence: Synthetic oligonucleotide
  Antisense strand to SEQ ID NO: 930972
ucuaguacgcgcuuaguaa

SEQ ID NO: 930974 - RNA, 19 nt, Artificial Sequence
  Description of Artificial Sequence: Synthetic oligonucleotide
  Sense strand starting at position 3142 of SEQ ID NO: 913486
ugaacaauacgggagugua

SEQ ID NO: 930975 - RNA, 19 nt, Artificial Sequence
  Description of Artificial Sequence: Synthetic oligonucleotide
  Antisense strand to SEQ ID NO: 930974
uacacucccguauuguuca

SEQ ID NO: 930976 - RNA, 19 nt, Artificial Sequence
  Description of Artificial Sequence: Synthetic oligonucleotide
  Sense strand starting at position 2886 of SEQ ID NO: 913486
gugcuaguucucgcaagau

SEQ ID NO: 930977 - RNA, 19 nt, Artificial Sequence
  Description of Artificial Sequence: Synthetic oligonucleotide
  Antisense strand to SEQ ID NO: 930976
aucuugcgagaacuagcac

SEQ ID NO: 930978 - RNA, 19 nt, Artificial Sequence
  Description of Artificial Sequence: Synthetic oligonucleotide
  Sense strand starting at position 2128 of SEQ ID NO: 913486
augguaauuagagguuaga

SEQ ID NO: 930979 - RNA, 19 nt, Artificial Sequence
  Description of Artificial Sequence: Synthetic oligonucleotide
  Antisense strand to SEQ ID NO: 930978
ucuaaccucuaauuaccau

SEQ ID NO: 930980 - RNA, 19 nt, Artificial Sequence
  Description of Artificial Sequence: Synthetic oligonucleotide
  Sense strand starting at position 3676 of SEQ ID NO: 913486
agaaucaaugaaugucuuu

SEQ ID NO: 930981 - RNA, 19 nt, Artificial Sequence
  Description of Artificial Sequence: Synthetic oligonucleotide
  Antisense strand to SEQ ID NO: 930980
aaagacauucauugauucu

SEQ ID NO: 930982 - RNA, 19 nt, Artificial Sequence
  Description of Artificial Sequence: Synthetic oligonucleotide
  Sense strand starting at position 3683 of SEQ ID NO: 913486
augaaugucuuucugaaau

SEQ ID NO: 930983 - RNA, 19 nt, Artificial Sequence
  Description of Artificial Sequence: Synthetic oligonucleotide
  Antisense strand to SEQ ID NO: 930982
auuucagaaagacauucau

SEQ ID NO: 930984 - RNA, 19 nt, Artificial Sequence
  Description of Artificial Sequence: Synthetic oligonucleotide
  Sense strand starting at position 2717 of SEQ ID NO: 913486
agcuuaguauuuguccuua

SEQ ID NO: 930985 - RNA, 19 nt, Artificial Sequence
  Description of Artificial Sequence: Synthetic oligonucleotide
  Antisense strand to SEQ ID NO: 930984
uaaggacaaauacuaagcu

SEQ ID NO: 930986 - RNA, 19 nt, Artificial Sequence
  Description of Artificial Sequence: Synthetic oligonucleotide
  Sense strand starting at position 909 of SEQ ID NO: 913486
ccaaguguugcacauaaag

SEQ ID NO: 930987 - RNA, 19 nt, Artificial Sequence
  Description of Artificial Sequence: Synthetic oligonucleotide
  Antisense strand to SEQ ID NO: 930986
cuuuaugugcaacacuugg

SEQ ID NO: 930988 - RNA, 19 nt, Artificial Sequence
  Description of Artificial Sequence: Synthetic oligonucleotide
  Sense strand starting at position 2476 of SEQ ID NO: 913486
ccgaauagccgagaucaca

SEQ ID NO: 930989 - RNA, 19 nt, Artificial Sequence
  Description of Artificial Sequence: Synthetic oligonucleotide
  Antisense strand to SEQ ID NO: 930988
ugugaucucggcuauucgg

SEQ ID NO: 930990 - RNA, 19 nt, Artificial Sequence
  Description of Artificial Sequence: Synthetic oligonucleotide
  Sense strand starting at position 375 of SEQ ID NO: 913486
gaaugaugaccuuggcuca

SEQ ID NO: 930991 - RNA, 19 nt, Artificial Sequence
  Description of Artificial Sequence: Synthetic oligonucleotide
  Antisense strand to SEQ ID NO: 930990
ugagccaaggucaucauuc

SEQ ID NO: 930992 - RNA, 19 nt, Artificial Sequence
  Description of Artificial Sequence: Synthetic oligonucleotide
  Sense strand starting at position 103 of SEQ ID NO: 913486
aggaaaccaaaguguuagu

SEQ ID NO: 930993 - RNA, 19 nt, Artificial Sequence
  Description of Artificial Sequence: Synthetic oligonucleotide
  Antisense strand to SEQ ID NO: 930992
acuaacacuuugguuuccu

SEQ ID NO: 930994 - RNA, 19 nt, Artificial Sequence
  Description of Artificial Sequence: Synthetic oligonucleotide
  Sense strand starting at position 3269 of SEQ ID NO: 913486
ccaccaguccuuuggaaau

SEQ ID NO: 930995 - RNA, 19 nt, Artificial Sequence
  Description of Artificial Sequence: Synthetic oligonucleotide
  Antisense strand to SEQ ID NO: 930994
auuuccaaaggacuggugg

SEQ ID NO: 930996 - RNA, 19 nt, Artificial Sequence
  Description of Artificial Sequence: Synthetic oligonucleotide
  Sense strand starting at position 2137 of SEQ ID NO: 913486
agagguuagacuugucauu

SEQ ID NO: 930997 - RNA, 19 nt, Artificial Sequence
  Description of Artificial Sequence: Synthetic oligonucleotide
  Antisense strand to SEQ ID NO: 930996
aaugacaagucuaaccucu

SEQ ID NO: 930998 - RNA, 19 nt, Artificial Sequence
  Description of Artificial Sequence: Synthetic oligonucleotide
  Sense strand starting at position 3775 of SEQ ID NO: 913486
aaagcaucgugauugaaua

SEQ ID NO: 930999 - RNA, 19 nt, Artificial Sequence
  Description of Artificial Sequence: Synthetic oligonucleotide
  Antisense strand to SEQ ID NO: 930998
uauucaaucacgaugcuuu

SEQ ID NO: 931000 - RNA, 19 nt, Artificial Sequence
  Description of Artificial Sequence: Synthetic oligonucleotide
  Sense strand starting at position 3831 of SEQ ID NO: 913486
cuugucucucaguaguaga

SEQ ID NO: 931001 - RNA, 19 nt, Artificial Sequence
  Description of Artificial Sequence: Synthetic oligonucleotide
  Antisense strand to SEQ ID NO: 931000
ucuacuacugagagacaag

SEQ ID NO: 931002 - RNA, 19 nt, Artificial Sequence
  Description of Artificial Sequence: Synthetic oligonucleotide
  Sense strand starting at position 3150 of SEQ ID NO: 913486
acgggaguguauccauaug

SEQ ID NO: 931003 - RNA, 19 nt, Artificial Sequence
  Description of Artificial Sequence: Synthetic oligonucleotide
  Antisense strand to SEQ ID NO: 931002
cauauggauacacucccgu

SEQ ID NO: 931004 - RNA, 19 nt, Artificial Sequence
  Description of Artificial Sequence: Synthetic oligonucleotide
  Sense strand starting at position 3823 of SEQ ID NO: 913486
uuggaauucuugucucuca

SEQ ID NO: 931005 - RNA, 19 nt, Artificial Sequence
  Description of Artificial Sequence: Synthetic oligonucleotide
  Antisense strand to SEQ ID NO: 931004
ugagagacaagaauuccaa

SEQ ID NO: 931006 - RNA, 19 nt, Artificial Sequence
  Description of Artificial Sequence: Synthetic oligonucleotide
  Sense strand starting at position 108 of SEQ ID NO: 913486
accaaaguguuaguuugau

SEQ ID NO: 931007 - RNA, 19 nt, Artificial Sequence
  Description of Artificial Sequence: Synthetic oligonucleotide
  Antisense strand to SEQ ID NO: 931006
aucaaacuaacacuuuggu

SEQ ID NO: 931008 - RNA, 19 nt, Artificial Sequence
  Description of Artificial Sequence: Synthetic oligonucleotide
  Sense strand starting at position 2709 of SEQ ID NO: 913486
aucauuguagcuuaguauu

SEQ ID NO: 931009 - RNA, 19 nt, Artificial Sequence
  Description of Artificial Sequence: Synthetic oligonucleotide
  Antisense strand to SEQ ID NO: 931008
aauacuaagcuacaaugau

SEQ ID NO: 931010 - RNA, 19 nt, Artificial Sequence
  Description of Artificial Sequence: Synthetic oligonucleotide
  Sense strand starting at position 2139 of SEQ ID NO: 913486
agguuagacuugucauucu

SEQ ID NO: 931011 - RNA, 19 nt, Artificial Sequence
  Description of Artificial Sequence: Synthetic oligonucleotide
  Antisense strand to SEQ ID NO: 931010
agaaugacaagucuaaccu

SEQ ID NO: 931012 - RNA, 19 nt, Artificial Sequence
  Description of Artificial Sequence: Synthetic oligonucleotide
  Sense strand starting at position 3855 of SEQ ID NO: 913486
agaugauacuuuguccugu

SEQ ID NO: 931013 - RNA, 19 nt, Artificial Sequence
  Description of Artificial Sequence: Synthetic oligonucleotide
  Antisense strand to SEQ ID NO: 931012
acaggacaaaguaucaucu

SEQ ID NO: 931014 - RNA, 19 nt, Artificial Sequence
  Description of Artificial Sequence: Synthetic oligonucleotide
  Sense strand starting at position 3776 of SEQ ID NO: 913486
aagcaucgugauugaauau

SEQ ID NO: 931015 - RNA, 19 nt, Artificial Sequence
  Description of Artificial Sequence: Synthetic oligonucleotide
  Antisense strand to SEQ ID NO: 931014
auauucaaucacgaugcuu

SEQ ID NO: 931016 - RNA, 19 nt, Artificial Sequence
  Description of Artificial Sequence: Synthetic oligonucleotide
  Sense strand starting at position 3271 of SEQ ID NO: 913486
accaguccuuuggaaauuu

SEQ ID NO: 931017 - RNA, 19 nt, Artificial Sequence
  Description of Artificial Sequence: Synthetic oligonucleotide
  Antisense strand to SEQ ID NO: 931016
aaauuuccaaaggacuggu

SEQ ID NO: 931018 - RNA, 19 nt, Artificial Sequence
  Description of Artificial Sequence: Synthetic oligonucleotide
  Sense strand starting at position 3241 of SEQ ID NO: 913486
agugacauuucuggauaaa

SEQ ID NO: 931019 - RNA, 19 nt, Artificial Sequence
  Description of Artificial Sequence: Synthetic oligonucleotide
  Antisense strand to SEQ ID NO: 931018
uuuauccagaaaugucacu

SEQ ID NO: 931020 - RNA, 19 nt, Artificial Sequence
  Description of Artificial Sequence: Synthetic oligonucleotide
  Sense strand starting at position 3240 of SEQ ID NO: 913486
aagugacauuucuggauaa

SEQ ID NO: 931021 - RNA, 19 nt, Artificial Sequence
  Description of Artificial Sequence: Synthetic oligonucleotide
  Antisense strand to SEQ ID NO: 931020
uuauccagaaaugucacuu

SEQ ID NO: 931022 - RNA, 19 nt, Artificial Sequence
  Description of Artificial Sequence: Synthetic oligonucleotide
  Sense strand starting at position 3839 of SEQ ID NO: 913486
ucaguaguagauugccaga

SEQ ID NO: 931023 - RNA, 19 nt, Artificial Sequence
  Description of Artificial Sequence: Synthetic oligonucleotide
  Antisense strand to SEQ ID NO: 931022
ucuggcaaucuacuacuga

SEQ ID NO: 931024 - RNA, 19 nt, Artificial Sequence
  Description of Artificial Sequence: Synthetic oligonucleotide
  Sense strand starting at position 1575 of SEQ ID NO: 913486
ucacuauguuguucuugaa

SEQ ID NO: 931025 - RNA, 19 nt, Artificial Sequence
  Description of Artificial Sequence: Synthetic oligonucleotide
  Antisense strand to SEQ ID NO: 931024
uucaagaacaacauaguga

SEQ ID NO: 931026 - RNA, 19 nt, Artificial Sequence
  Description of Artificial Sequence: Synthetic oligonucleotide
  Sense strand starting at position 2017 of SEQ ID NO: 913486
gugugucaucacuagguca

SEQ ID NO: 931027 - RNA, 19 nt, Artificial Sequence
  Description of Artificial Sequence: Synthetic oligonucleotide
  Antisense strand to SEQ ID NO: 931026
ugaccuagugaugacacac

SEQ ID NO: 931028 - RNA, 19 nt, Artificial Sequence
  Description of Artificial Sequence: Synthetic oligonucleotide
  Sense strand starting at position 1991 of SEQ ID NO: 913486
cugcguacacuguaauaau

SEQ ID NO: 931029 - RNA, 19 nt, Artificial Sequence
  Description of Artificial Sequence: Synthetic oligonucleotide
  Antisense strand to SEQ ID NO: 931028
auuauuacaguguacgcag

SEQ ID NO: 931030 - RNA, 19 nt, Artificial Sequence
  Description of Artificial Sequence: Synthetic oligonucleotide
  Sense strand starting at position 3856 of SEQ ID NO: 913486
gaugauacuuuguccuguu

SEQ ID NO: 931031 - RNA, 19 nt, Artificial Sequence
  Description of Artificial Sequence: Synthetic oligonucleotide
  Antisense strand to SEQ ID NO: 931030
aacaggacaaaguaucauc

SEQ ID NO: 931032 - RNA, 19 nt, Artificial Sequence
  Description of Artificial Sequence: Synthetic oligonucleotide
  Sense strand starting at position 3770 of SEQ ID NO: 913486
cacugaaagcaucgugauu

SEQ ID NO: 931033 - RNA, 19 nt, Artificial Sequence
  Description of Artificial Sequence: Synthetic oligonucleotide
  Antisense strand to SEQ ID NO: 931032
aaucacgaugcuuucagug

SEQ ID NO: 931034 - RNA, 19 nt, Artificial Sequence
  Description of Artificial Sequence: Synthetic oligonucleotide
  Sense strand starting at position 2707 of SEQ ID NO: 913486
auaucauuguagcuuagua

SEQ ID NO: 931035 - RNA, 19 nt, Artificial Sequence
  Description of Artificial Sequence: Synthetic oligonucleotide
  Antisense strand to SEQ ID NO: 931034
uacuaagcuacaaugauau

SEQ ID NO: 931036 - RNA, 19 nt, Artificial Sequence
  Description of Artificial Sequence: Synthetic oligonucleotide
  Sense strand starting at position 2019 of SEQ ID NO: 913486
gugucaucacuaggucaug

SEQ ID NO: 931037 - RNA, 19 nt, Artificial Sequence
  Description of Artificial Sequence: Synthetic oligonucleotide
  Antisense strand to SEQ ID NO: 931036
caugaccuagugaugacac

SEQ ID NO: 931038 - RNA, 19 nt, Artificial Sequence
  Description of Artificial Sequence: Synthetic oligonucleotide
  Sense strand starting at position 3610 of SEQ ID NO: 913486
ccauauuuguuagaagucu

SEQ ID NO: 931039 - RNA, 19 nt, Artificial Sequence
  Description of Artificial Sequence: Synthetic oligonucleotide
  Antisense strand to SEQ ID NO: 931038
agacuucuaacaaauaugg

SEQ ID NO: 931040 - RNA, 19 nt, Artificial Sequence
  Description of Artificial Sequence: Synthetic oligonucleotide
  Sense strand starting at position 2013 of SEQ ID NO: 913486
ccuugugugucaucacuag

SEQ ID NO: 931041 - RNA, 19 nt, Artificial Sequence
  Description of Artificial Sequence: Synthetic oligonucleotide
  Antisense strand to SEQ ID NO: 931040
cuagugaugacacacaagg

SEQ ID NO: 931042 - RNA, 19 nt, Artificial Sequence
  Description of Artificial Sequence: Synthetic oligonucleotide
  Sense strand starting at position 3954 of SEQ ID NO: 913486
uagaaacaugcucgugcau

SEQ ID NO: 931043 - RNA, 19 nt, Artificial Sequence
  Description of Artificial Sequence: Synthetic oligonucleotide
  Antisense strand to SEQ ID NO: 931042
augcacgagcauguuucua

SEQ ID NO: 931044 - RNA, 19 nt, Artificial Sequence
  Description of Artificial Sequence: Synthetic oligonucleotide
  Sense strand starting at position 982 of SEQ ID NO: 913486
ggcucugccauucggauua

SEQ ID NO: 931045 - RNA, 19 nt, Artificial Sequence
  Description of Artificial Sequence: Synthetic oligonucleotide
  Antisense strand to SEQ ID NO: 931044
uaauccgaauggcagagcc

SEQ ID NO: 931046 - RNA, 19 nt, Artificial Sequence
  Description of Artificial Sequence: Synthetic oligonucleotide
  Sense strand starting at position 2170 of SEQ ID NO: 913486
ccuguaaauuuggguugau

SEQ ID NO: 931047 - RNA, 19 nt, Artificial Sequence
  Description of Artificial Sequence: Synthetic oligonucleotide
  Antisense strand to SEQ ID NO: 931046
aucaacccaaauuuacagg

SEQ ID NO: 931048 - RNA, 19 nt, Artificial Sequence
  Description of Artificial Sequence: Synthetic oligonucleotide
  Sense strand starting at position 1989 of SEQ ID NO: 913486
uccugcguacacuguaaua

SEQ ID NO: 931049 - RNA, 19 nt, Artificial Sequence
  Description of Artificial Sequence: Synthetic oligonucleotide
  Antisense strand to SEQ ID NO: 931048
uauuacaguguacgcagga

SEQ ID NO: 931050 - RNA, 19 nt, Artificial Sequence
  Description of Artificial Sequence: Synthetic oligonucleotide
  Sense strand starting at position 3685 of SEQ ID NO: 913486
gaaugucuuucugaaauag

SEQ ID NO: 931051 - RNA, 19 nt, Artificial Sequence
  Description of Artificial Sequence: Synthetic oligonucleotide
  Antisense strand to SEQ ID NO: 931050
cuauuucagaaagacauuc

SEQ ID NO: 931052 - RNA, 19 nt, Artificial Sequence
  Description of Artificial Sequence: Synthetic oligonucleotide
  Sense strand starting at position 975 of SEQ ID NO: 913486
uuccgauggcucugccauu

SEQ ID NO: 931053 - RNA, 19 nt, Artificial Sequence
  Description of Artificial Sequence: Synthetic oligonucleotide
  Antisense strand to SEQ ID NO: 931052
aauggcagagccaucggaa

SEQ ID NO: 931054 - RNA, 19 nt, Artificial Sequence
  Description of Artificial Sequence: Synthetic oligonucleotide
  Sense strand starting at position 3076 of SEQ ID NO: 913487
cugucuccagaucaaugau

SEQ ID NO: 931055 - RNA, 19 nt, Artificial Sequence
  Description of Artificial Sequence: Synthetic oligonucleotide
  Antisense strand to SEQ ID NO: 931054
aucauugaucuggagacag

SEQ ID NO: 931056 - RNA, 19 nt, Artificial Sequence
  Description of Artificial Sequence: Synthetic oligonucleotide
  Sense strand starting at position 149 of SEQ ID NO: 913487
guacgaaucaguuaagaca

SEQ ID NO: 931057 - RNA, 19 nt, Artificial Sequence
  Description of Artificial Sequence: Synthetic oligonucleotide
  Antisense strand to SEQ ID NO: 931056
ugucuuaacugauucguac

SEQ ID NO: 931058 - RNA, 19 nt, Artificial Sequence
  Description of Artificial Sequence: Synthetic oligonucleotide
  Sense strand starting at position 3115 of SEQ ID NO: 913487
cggaaugccugauuuguau

SEQ ID NO: 931059 - RNA, 19 nt, Artificial Sequence
  Description of Artificial Sequence: Synthetic oligonucleotide
  Antisense strand to SEQ ID NO: 931058
auacaaaucaggcauuccg

SEQ ID NO: 931060 - RNA, 19 nt, Artificial Sequence
  Description of Artificial Sequence: Synthetic oligonucleotide
  Sense strand starting at position 2524 of SEQ ID NO: 913487
gcgcuaucacagcucacuu

SEQ ID NO: 931061 - RNA, 19 nt, Artificial Sequence
  Description of Artificial Sequence: Synthetic oligonucleotide
  Antisense strand to SEQ ID NO: 931060
aagugagcugugauagcgc

SEQ ID NO: 931062 - RNA, 19 nt, Artificial Sequence
  Description of Artificial Sequence: Synthetic oligonucleotide
  Sense strand starting at position 3273 of SEQ ID NO: 913487
cucucuuuggauuaaguga

SEQ ID NO: 931063 - RNA, 19 nt, Artificial Sequence
  Description of Artificial Sequence: Synthetic oligonucleotide
  Antisense strand to SEQ ID NO: 931062
ucacuuaauccaaagagag

SEQ ID NO: 931064 - RNA, 19 nt, Artificial Sequence
  Description of Artificial Sequence: Synthetic oligonucleotide
  Sense strand starting at position 3975 of SEQ ID NO: 913487
gcagaaucacaauagcauu

SEQ ID NO: 931065 - RNA, 19 nt, Artificial Sequence
  Description of Artificial Sequence: Synthetic oligonucleotide
  Antisense strand to SEQ ID NO: 931064
aaugcuauugugauucugc

SEQ ID NO: 931066 - RNA, 19 nt, Artificial Sequence
  Description of Artificial Sequence: Synthetic oligonucleotide
  Sense strand starting at position 1494 of SEQ ID NO: 913487
cgcccugauuucuccugaa

SEQ ID NO: 931067 - RNA, 19 nt, Artificial Sequence
  Description of Artificial Sequence: Synthetic oligonucleotide
  Antisense strand to SEQ ID NO: 931066
uucaggagaaaucagggcg

SEQ ID NO: 931068 - RNA, 19 nt, Artificial Sequence
  Description of Artificial Sequence: Synthetic oligonucleotide
  Sense strand starting at position 2615 of SEQ ID NO: 913487
agaccacacuagucaaagu

SEQ ID NO: 931069 - RNA, 19 nt, Artificial Sequence
  Description of Artificial Sequence: Synthetic oligonucleotide
  Antisense strand to SEQ ID NO: 931068
acuuugacuaguguggucu

SEQ ID NO: 931070 - RNA, 19 nt, Artificial Sequence
  Description of Artificial Sequence: Synthetic oligonucleotide
  Sense strand starting at position 372 of SEQ ID NO: 913487
gcuaaucaugaaggacuuu

SEQ ID NO: 931071 - RNA, 19 nt, Artificial Sequence
  Description of Artificial Sequence: Synthetic oligonucleotide
  Antisense strand to SEQ ID NO: 931070
aaaguccuucaugauuagc

SEQ ID NO: 931072 - RNA, 19 nt, Artificial Sequence
  Description of Artificial Sequence: Synthetic oligonucleotide
  Sense strand starting at position 145 of SEQ ID NO: 913487
gaguguacgaaucaguuaa

SEQ ID NO: 931073 - RNA, 19 nt, Artificial Sequence
  Description of Artificial Sequence: Synthetic oligonucleotide
  Antisense strand to SEQ ID NO: 931072
uuaacugauucguacacuc

SEQ ID NO: 931074 - RNA, 19 nt, Artificial Sequence
  Description of Artificial Sequence: Synthetic oligonucleotide
  Sense strand starting at position 467 of SEQ ID NO: 913487
agucaaaggaguugaguca

SEQ ID NO: 931075 - RNA, 19 nt, Artificial Sequence
  Description of Artificial Sequence: Synthetic oligonucleotide
  Antisense strand to SEQ ID NO: 931074
ugacucaacuccuuugacu

SEQ ID NO: 931076 - RNA, 19 nt, Artificial Sequence
  Description of Artificial Sequence: Synthetic oligonucleotide
  Sense strand starting at position 902 of SEQ ID NO: 913487
cucuaaagucucuagucua

SEQ ID NO: 931077 - RNA, 19 nt, Artificial Sequence
  Description of Artificial Sequence: Synthetic oligonucleotide
  Antisense strand to SEQ ID NO: 931076
uagacuagagacuuuagag

SEQ ID NO: 931078 - RNA, 19 nt, Artificial Sequence
  Description of Artificial Sequence: Synthetic oligonucleotide
  Sense strand starting at position 2806 of SEQ ID NO: 913487
guuucuuugccagaaacca

SEQ ID NO: 931079 - RNA, 19 nt, Artificial Sequence
  Description of Artificial Sequence: Synthetic oligonucleotide
  Antisense strand to SEQ ID NO: 931078
ugguuucuggcaaagaaac

SEQ ID NO: 931080 - RNA, 19 nt, Artificial Sequence
  Description of Artificial Sequence: Synthetic oligonucleotide
  Sense strand starting at position 677 of SEQ ID NO: 913487
gccaauguuguuuagaaca

SEQ ID NO: 931081 - RNA, 19 nt, Artificial Sequence
  Description of Artificial Sequence: Synthetic oligonucleotide
  Antisense strand to SEQ ID NO: 931080
uguucuaaacaacauuggc

SEQ ID NO: 931082 - RNA, 19 nt, Artificial Sequence
  Description of Artificial Sequence: Synthetic oligonucleotide
  Sense strand starting at position 2327 of SEQ ID NO: 913487
ccuccuccuggaugugaaa

SEQ ID NO: 931083 - RNA, 19 nt, Artificial Sequence
  Description of Artificial Sequence: Synthetic oligonucleotide
  Antisense strand to SEQ ID NO: 931082
uuucacauccaggaggagg

SEQ ID NO: 931084 - RNA, 19 nt, Artificial Sequence
  Description of Artificial Sequence: Synthetic oligonucleotide
  Sense strand starting at position 662 of SEQ ID NO: 913487
ugaagauuauuugaagcca

SEQ ID NO: 931085 - RNA, 19 nt, Artificial Sequence
  Description of Artificial Sequence: Synthetic oligonucleotide
  Antisense strand to SEQ ID NO: 931084
uggcuucaaauaaucuuca

SEQ ID NO: 931086 - RNA, 19 nt, Artificial Sequence
  Description of Artificial Sequence: Synthetic oligonucleotide
  Sense strand starting at position 1041 of SEQ ID NO: 913487
cucuuacaggagugagcua

SEQ ID NO: 931087 - RNA, 19 nt, Artificial Sequence
  Description of Artificial Sequence: Synthetic oligonucleotide
  Antisense strand to SEQ ID NO: 931086
uagcucacuccuguaagag

SEQ ID NO: 931088 - RNA, 19 nt, Artificial Sequence
  Description of Artificial Sequence: Synthetic oligonucleotide
  Sense strand starting at position 3219 of SEQ ID NO: 913487
acaauaaugugugcuuaaa

SEQ ID NO: 931089 - RNA, 19 nt, Artificial Sequence
  Description of Artificial Sequence: Synthetic oligonucleotide
  Antisense strand to SEQ ID NO: 931088
uuuaagcacacauuauugu

SEQ ID NO: 931090 - RNA, 19 nt, Artificial Sequence
  Description of Artificial Sequence: Synthetic oligonucleotide
  Sense strand starting at position 2586 of SEQ ID NO: 913487
ucaccaagccuccgaaaua

SEQ ID NO: 931091 - RNA, 19 nt, Artificial Sequence
  Description of Artificial Sequence: Synthetic oligonucleotide
  Antisense strand to SEQ ID NO: 931090
uauuucggaggcuugguga

SEQ ID NO: 931092 - RNA, 19 nt, Artificial Sequence
  Description of Artificial Sequence: Synthetic oligonucleotide
  Sense strand starting at position 2704 of SEQ ID NO: 913487
cuuacaggcuagucucaaa

SEQ ID NO: 931093 - RNA, 19 nt, Artificial Sequence
  Description of Artificial Sequence: Synthetic oligonucleotide
  Antisense strand to SEQ ID NO: 931092
uuugagacuagccuguaag

SEQ ID NO: 931094 - RNA, 19 nt, Artificial Sequence
  Description of Artificial Sequence: Synthetic oligonucleotide
  Sense strand starting at position 230 of SEQ ID NO: 913487
guuguuuacuagguagaga

SEQ ID NO: 931095 - RNA, 19 nt, Artificial Sequence
  Description of Artificial Sequence: Synthetic oligonucleotide
  Antisense strand to SEQ ID NO: 931094
ucucuaccuaguaaacaac

SEQ ID NO: 931096 - RNA, 19 nt, Artificial Sequence
  Description of Artificial Sequence: Synthetic oligonucleotide
  Sense strand starting at position 675 of SEQ ID NO: 913487
aagccaauguuguuuagaa

SEQ ID NO: 931097 - RNA, 19 nt, Artificial Sequence
  Description of Artificial Sequence: Synthetic oligonucleotide
  Antisense strand to SEQ ID NO: 931096
uucuaaacaacauuggcuu

SEQ ID NO: 931098 - RNA, 19 nt, Artificial Sequence
  Description of Artificial Sequence: Synthetic oligonucleotide
  Sense strand starting at position 229 of SEQ ID NO: 913487
aguuguuuacuagguagag

SEQ ID NO: 931099 - RNA, 19 nt, Artificial Sequence
  Description of Artificial Sequence: Synthetic oligonucleotide
  Antisense strand to SEQ ID NO: 931098
cucuaccuaguaaacaacu

SEQ ID NO: 931100 - RNA, 19 nt, Artificial Sequence
  Description of Artificial Sequence: Synthetic oligonucleotide
  Sense strand starting at position 3268 of SEQ ID NO: 913487
gcaaucucucuuuggauua

SEQ ID NO: 931101 - RNA, 19 nt, Artificial Sequence
  Description of Artificial Sequence: Synthetic oligonucleotide
  Antisense strand to SEQ ID NO: 931100
uaauccaaagagagauugc

SEQ ID NO: 931102 - RNA, 19 nt, Artificial Sequence
  Description of Artificial Sequence: Synthetic oligonucleotide
  Sense strand starting at position 3218 of SEQ ID NO: 913487
gacaauaaugugugcuuaa

SEQ ID NO: 931103 - RNA, 19 nt, Artificial Sequence
  Description of Artificial Sequence: Synthetic oligonucleotide
  Antisense strand to SEQ ID NO: 931102
uuaagcacacauuauuguc

SEQ ID NO: 931104 - RNA, 19 nt, Artificial Sequence
  Description of Artificial Sequence: Synthetic oligonucleotide
  Sense strand starting at position 222 of SEQ ID NO: 913487
aagggcaaguuguuuacua

SEQ ID NO: 931105 - RNA, 19 nt, Artificial Sequence
  Description of Artificial Sequence: Synthetic oligonucleotide
  Antisense strand to SEQ ID NO: 931104
uaguaaacaacuugcccuu

SEQ ID NO: 931106 - RNA, 19 nt, Artificial Sequence
  Description of Artificial Sequence: Synthetic oligonucleotide
  Sense strand starting at position 147 of SEQ ID NO: 913487
guguacgaaucaguuaaga

SEQ ID NO: 931107 - RNA, 19 nt, Artificial Sequence
  Description of Artificial Sequence: Synthetic oligonucleotide
  Antisense strand to SEQ ID NO: 931106
ucuuaacugauucguacac

SEQ ID NO: 931108 - RNA, 19 nt, Artificial Sequence
  Description of Artificial Sequence: Synthetic oligonucleotide
  Sense strand starting at position 2348 of SEQ ID NO: 913487
ugaggaguggucugagcau

SEQ ID NO: 931109 - RNA, 19 nt, Artificial Sequence
  Description of Artificial Sequence: Synthetic oligonucleotide
  Antisense strand to SEQ ID NO: 931108
augcucagaccacuccuca

SEQ ID NO: 931110 - RNA, 19 nt, Artificial Sequence
  Description of Artificial Sequence: Synthetic oligonucleotide
  Sense strand starting at position 1303 of SEQ ID NO: 913487
gagagaagaucugaaccua

SEQ ID NO: 931111 - RNA, 19 nt, Artificial Sequence
  Description of Artificial Sequence: Synthetic oligonucleotide
  Antisense strand to SEQ ID NO: 931110
uagguucagaucuucucuc

SEQ ID NO: 931112 - RNA, 19 nt, Artificial Sequence
  Description of Artificial Sequence: Synthetic oligonucleotide
  Sense strand starting at position 2986 of SEQ ID NO: 913487
acuugcaguucucugaaau

SEQ ID NO: 931113 - RNA, 19 nt, Artificial Sequence
  Description of Artificial Sequence: Synthetic oligonucleotide
  Antisense strand to SEQ ID NO: 931112
auuucagagaacugcaagu

SEQ ID NO: 931114 - RNA, 19 nt, Artificial Sequence
  Description of Artificial Sequence: Synthetic oligonucleotide
  Sense strand starting at position 3267 of SEQ ID NO: 913487
ugcaaucucucuuuggauu

SEQ ID NO: 931115 - RNA, 19 nt, Artificial Sequence
  Description of Artificial Sequence: Synthetic oligonucleotide
  Antisense strand to SEQ ID NO: 931114
aauccaaagagagauugca

SEQ ID NO: 931116 - RNA, 19 nt, Artificial Sequence
  Description of Artificial Sequence: Synthetic oligonucleotide
  Sense strand starting at position 676 of SEQ ID NO: 913487
agccaauguuguuuagaac

SEQ ID NO: 931117 - RNA, 19 nt, Artificial Sequence
  Description of Artificial Sequence: Synthetic oligonucleotide
  Antisense strand to SEQ ID NO: 931116
guucuaaacaacauuggcu

SEQ ID NO: 931118 - RNA, 19 nt, Artificial Sequence
  Description of Artificial Sequence: Synthetic oligonucleotide
  Sense strand starting at position 955 of SEQ ID NO: 913487
ugaauagguuccgucauau

SEQ ID NO: 931119 - RNA, 19 nt, Artificial Sequence
  Description of Artificial Sequence: Synthetic oligonucleotide
  Antisense strand to SEQ ID NO: 931118
auaugacggaaccuauuca

SEQ ID NO: 931120 - RNA, 19 nt, Artificial Sequence
  Description of Artificial Sequence: Synthetic oligonucleotide
  Sense strand starting at position 3216 of SEQ ID NO: 913487
uggacaauaaugugugcuu

SEQ ID NO: 931121 - RNA, 19 nt, Artificial Sequence
  Description of Artificial Sequence: Synthetic oligonucleotide
  Antisense strand to SEQ ID NO: 931120
aagcacacauuauugucca

SEQ ID NO: 931122 - RNA, 19 nt, Artificial Sequence
  Description of Artificial Sequence: Synthetic oligonucleotide
  Sense strand starting at position 1497 of SEQ ID NO: 913487
ccugauuucuccugaaagg

SEQ ID NO: 931123 - RNA, 19 nt, Artificial Sequence
  Description of Artificial Sequence: Synthetic oligonucleotide
  Antisense strand to SEQ ID NO: 931122
ccuuucaggagaaaucagg

SEQ ID NO: 931124 - RNA, 19 nt, Artificial Sequence
  Description of Artificial Sequence: Synthetic oligonucleotide
  Sense strand starting at position 901 of SEQ ID NO: 913487
ucucuaaagucucuagucu

SEQ ID NO: 931125 - RNA, 19 nt, Artificial Sequence
  Description of Artificial Sequence: Synthetic oligonucleotide
  Antisense strand to SEQ ID NO: 931124
agacuagagacuuuagaga

SEQ ID NO: 931126 - RNA, 19 nt, Artificial Sequence
  Description of Artificial Sequence: Synthetic oligonucleotide
  Sense strand starting at position 2987 of SEQ ID NO: 913487
cuugcaguucucugaaauc

SEQ ID NO: 931127 - RNA, 19 nt, Artificial Sequence
  Description of Artificial Sequence: Synthetic oligonucleotide
  Antisense strand to SEQ ID NO: 931126
gauuucagagaacugcaag

SEQ ID NO: 931128 - RNA, 19 nt, Artificial Sequence
  Description of Artificial Sequence: Synthetic oligonucleotide
  Sense strand starting at position 3265 of SEQ ID NO: 913487
ugugcaaucucucuuugga

SEQ ID NO: 931129 - RNA, 19 nt, Artificial Sequence
  Description of Artificial Sequence: Synthetic oligonucleotide
  Antisense strand to SEQ ID NO: 931128
uccaaagagagauugcaca

SEQ ID NO: 931130 - RNA, 19 nt, Artificial Sequence
  Description of Artificial Sequence: Synthetic oligonucleotide
  Sense strand starting at position 2803 of SEQ ID NO: 913487
gugguuucuuugccagaaa

SEQ ID NO: 931131 - RNA, 19 nt, Artificial Sequence
  Description of Artificial Sequence: Synthetic oligonucleotide
  Antisense strand to SEQ ID NO: 931130
uuucuggcaaagaaaccac

SEQ ID NO: 931132 - RNA, 19 nt, Artificial Sequence
  Description of Artificial Sequence: Synthetic oligonucleotide
  Sense strand starting at position 1084 of SEQ ID NO: 913487
gucccugcgucagucauuu

SEQ ID NO: 931133 - RNA, 19 nt, Artificial Sequence
  Description of Artificial Sequence: Synthetic oligonucleotide
  Antisense strand to SEQ ID NO: 931132
aaaugacugacgcagggac

SEQ ID NO: 931134 - RNA, 19 nt, Artificial Sequence
  Description of Artificial Sequence: Synthetic oligonucleotide
  Sense strand starting at position 3000 of SEQ ID NO: 913488
uaaucaucucgagaagguu

SEQ ID NO: 931135 - RNA, 19 nt, Artificial Sequence
  Description of Artificial Sequence: Synthetic oligonucleotide
  Antisense strand to SEQ ID NO: 931134
aaccuucucgagaugauua

SEQ ID NO: 931136 - RNA, 19 nt, Artificial Sequence
  Description of Artificial Sequence: Synthetic oligonucleotide
  Sense strand starting at position 3792 of SEQ ID NO: 913488
augguaaguaagcauuaga

SEQ ID NO: 931137 - RNA, 19 nt, Artificial Sequence
  Description of Artificial Sequence: Synthetic oligonucleotide
  Antisense strand to SEQ ID NO: 931136
ucuaaugcuuacuuaccau

SEQ ID NO: 931138 - RNA, 19 nt, Artificial Sequence
  Description of Artificial Sequence: Synthetic oligonucleotide
  Sense strand starting at position 533 of SEQ ID NO: 913488
aucccuguggaaugagaua

SEQ ID NO: 931139 - RNA, 19 nt, Artificial Sequence
  Description of Artificial Sequence: Synthetic oligonucleotide
  Antisense strand to SEQ ID NO: 931138
uaucucauuccacagggau

SEQ ID NO: 931140 - RNA, 19 nt, Artificial Sequence
  Description of Artificial Sequence: Synthetic oligonucleotide
  Sense strand starting at position 281 of SEQ ID NO: 913488
ggaacacaguuguuugaaa

SEQ ID NO: 931141 - RNA, 19 nt, Artificial Sequence
  Description of Artificial Sequence: Synthetic oligonucleotide
  Antisense strand to SEQ ID NO: 931140
uuucaaacaacuguguucc

SEQ ID NO: 931142 - RNA, 19 nt, Artificial Sequence
  Description of Artificial Sequence: Synthetic oligonucleotide
  Sense strand starting at position 526 of SEQ ID NO: 913488
accugaaaucccuguggaa

SEQ ID NO: 931143 - RNA, 19 nt, Artificial Sequence
  Description of Artificial Sequence: Synthetic oligonucleotide
  Antisense strand to SEQ ID NO: 931142
uuccacagggauuucaggu

SEQ ID NO: 931144 - RNA, 19 nt, Artificial Sequence
  Description of Artificial Sequence: Synthetic oligonucleotide
  Sense strand starting at position 1 of SEQ ID NO: 913488
cuaagaaugcugugcauuu

SEQ ID NO: 931145 - RNA, 19 nt, Artificial Sequence
  Description of Artificial Sequence: Synthetic oligonucleotide
  Antisense strand to SEQ ID NO: 931144
aaaugcacagcauucuuag

SEQ ID NO: 931146 - RNA, 19 nt, Artificial Sequence
  Description of Artificial Sequence: Synthetic oligonucleotide
  Sense strand starting at position 528 of SEQ ID NO: 913488
cugaaaucccuguggaaug

SEQ ID NO: 931147 - RNA, 19 nt, Artificial Sequence
  Description of Artificial Sequence: Synthetic oligonucleotide
  Antisense strand to SEQ ID NO: 931146
cauuccacagggauuucag

SEQ ID NO: 931148 - RNA, 19 nt, Artificial Sequence
  Description of Artificial Sequence: Synthetic oligonucleotide
  Sense strand starting at position 752 of SEQ ID NO: 913488
ugauuccagguuugaauga

SEQ ID NO: 931149 - RNA, 19 nt, Artificial Sequence
  Description of Artificial Sequence: Synthetic oligonucleotide
  Antisense strand to SEQ ID NO: 931148
ucauucaaaccuggaauca

SEQ ID NO: 931150 - RNA, 19 nt, Artificial Sequence
  Description of Artificial Sequence: Synthetic oligonucleotide
  Sense strand starting at position 3721 of SEQ ID NO: 913488
aguuaugggcuccacauau

SEQ ID NO: 931151 - RNA, 19 nt, Artificial Sequence
  Description of Artificial Sequence: Synthetic oligonucleotide
  Antisense strand to SEQ ID NO: 931150
auauguggagcccauaacu

SEQ ID NO: 931152 - RNA, 19 nt, Artificial Sequence
  Description of Artificial Sequence: Synthetic oligonucleotide
  Sense strand starting at position 3892 of SEQ ID NO: 913488
caagauucugcaggaagua

SEQ ID NO: 931153 - RNA, 19 nt, Artificial Sequence
  Description of Artificial Sequence: Synthetic oligonucleotide
  Antisense strand to SEQ ID NO: 931152
uacuuccugcagaaucuug

SEQ ID NO: 931154 - RNA, 19 nt, Artificial Sequence
  Description of Artificial Sequence: Synthetic oligonucleotide
  Sense strand starting at position 2754 of SEQ ID NO: 913488
ucauuauagucaccuugag

SEQ ID NO: 931155 - RNA, 19 nt, Artificial Sequence
  Description of Artificial Sequence: Synthetic oligonucleotide
  Antisense strand to SEQ ID NO: 931154
cucaaggugacuauaauga

SEQ ID NO: 931156 - RNA, 19 nt, Artificial Sequence
  Description of Artificial Sequence: Synthetic oligonucleotide
  Sense strand starting at position 2938 of SEQ ID NO: 913488
ggugaccauuauguccaaa

SEQ ID NO: 931157 - RNA, 19 nt, Artificial Sequence
  Description of Artificial Sequence: Synthetic oligonucleotide
  Antisense strand to SEQ ID NO: 931156
uuuggacauaauggucacc

SEQ ID NO: 931158 - RNA, 19 nt, Artificial Sequence
  Description of Artificial Sequence: Synthetic oligonucleotide
  Sense strand starting at position 2931 of SEQ ID NO: 913488
aaggcauggugaccauuau

SEQ ID NO: 931159 - RNA, 19 nt, Artificial Sequence
  Description of Artificial Sequence: Synthetic oligonucleotide
  Antisense strand to SEQ ID NO: 931158
auaauggucaccaugccuu

SEQ ID NO: 931160 - RNA, 19 nt, Artificial Sequence
  Description of Artificial Sequence: Synthetic oligonucleotide
  Sense strand starting at position 2400 of SEQ ID NO: 913488
caggaaagguuucucuagu

SEQ ID NO: 931161 - RNA, 19 nt, Artificial Sequence
  Description of Artificial Sequence: Synthetic oligonucleotide
  Antisense strand to SEQ ID NO: 931160
acuagagaaaccuuuccug

SEQ ID NO: 931162 - RNA, 19 nt, Artificial Sequence
  Description of Artificial Sequence: Synthetic oligonucleotide
  Sense strand starting at position 2401 of SEQ ID NO: 913488
aggaaagguuucucuaguc

SEQ ID NO: 931163 - RNA, 19 nt, Artificial Sequence
  Description of Artificial Sequence: Synthetic oligonucleotide
  Antisense strand to SEQ ID NO: 931162
gacuagagaaaccuuuccu

SEQ ID NO: 931164 - RNA, 19 nt, Artificial Sequence
  Description of Artificial Sequence: Synthetic oligonucleotide
  Sense strand starting at position 3982 of SEQ ID NO: 913488
guggaauaacacugcugau

SEQ ID NO: 931165 - RNA, 19 nt, Artificial Sequence
  Description of Artificial Sequence: Synthetic oligonucleotide
  Antisense strand to SEQ ID NO: 931164
aucagcaguguuauuccac

SEQ ID NO: 931166 - RNA, 19 nt, Artificial Sequence
  Description of Artificial Sequence: Synthetic oligonucleotide
  Sense strand starting at position 1506 of SEQ ID NO: 913488
ugacucuuauagcuugaua

SEQ ID NO: 931167 - RNA, 19 nt, Artificial Sequence
  Description of Artificial Sequence: Synthetic oligonucleotide
  Antisense strand to SEQ ID NO: 931166
uaucaagcuauaagaguca

SEQ ID NO: 931168 - RNA, 19 nt, Artificial Sequence
  Description of Artificial Sequence: Synthetic oligonucleotide
  Sense strand starting at position 882 of SEQ ID NO: 913488
uuuaaugguacuuguggaa

SEQ ID NO: 931169 - RNA, 19 nt, Artificial Sequence
  Description of Artificial Sequence: Synthetic oligonucleotide
  Antisense strand to SEQ ID NO: 931168
uuccacaaguaccauuaaa

SEQ ID NO: 931170 - RNA, 19 nt, Artificial Sequence
  Description of Artificial Sequence: Synthetic oligonucleotide
  Sense strand starting at position 2038 of SEQ ID NO: 913488
aguaguuugcagcaacaaa

SEQ ID NO: 931171 - RNA, 19 nt, Artificial Sequence
  Description of Artificial Sequence: Synthetic oligonucleotide
  Antisense strand to SEQ ID NO: 931170
uuuguugcugcaaacuacu

SEQ ID NO: 931172 - RNA, 19 nt, Artificial Sequence
  Description of Artificial Sequence: Synthetic oligonucleotide
  Sense strand starting at position 2406 of SEQ ID NO: 913488
agguuucucuagucugaga

SEQ ID NO: 931173 - RNA, 19 nt, Artificial Sequence
  Description of Artificial Sequence: Synthetic oligonucleotide
  Antisense strand to SEQ ID NO: 931172
ucucagacuagagaaaccu

SEQ ID NO: 931174 - RNA, 19 nt, Artificial Sequence
  Description of Artificial Sequence: Synthetic oligonucleotide
  Sense strand starting at position 2408 of SEQ ID NO: 913488
guuucucuagucugagaac

SEQ ID NO: 931175 - RNA, 19 nt, Artificial Sequence
  Description of Artificial Sequence: Synthetic oligonucleotide
  Antisense strand to SEQ ID NO: 931174
guucucagacuagagaaac

SEQ ID NO: 931176 - RNA, 19 nt, Artificial Sequence
  Description of Artificial Sequence: Synthetic oligonucleotide
  Sense strand starting at position 3937 of SEQ ID NO: 913488
ucaaucacguguuuauaua

SEQ ID NO: 931177 - RNA, 19 nt, Artificial Sequence
  Description of Artificial Sequence: Synthetic oligonucleotide
  Antisense strand to SEQ ID NO: 931176
uauauaaacacgugauuga

SEQ ID NO: 931178 - RNA, 19 nt, Artificial Sequence
  Description of Artificial Sequence: Synthetic oligonucleotide
  Sense strand starting at position 1794 of SEQ ID NO: 913488
gucacaaguuggcucugau

SEQ ID NO: 931179 - RNA, 19 nt, Artificial Sequence
  Description of Artificial Sequence: Synthetic oligonucleotide
  Antisense strand to SEQ ID NO: 931178
aucagagccaacuugugac

SEQ ID NO: 931180 - RNA, 19 nt, Artificial Sequence
  Description of Artificial Sequence: Synthetic oligonucleotide
  Sense strand starting at position 2573 of SEQ ID NO: 913488
acgaguguuucauuacagu

SEQ ID NO: 931181 - RNA, 19 nt, Artificial Sequence
  Description of Artificial Sequence: Synthetic oligonucleotide
  Antisense strand to SEQ ID NO: 931180
acuguaaugaaacacucgu

SEQ ID NO: 931182 - RNA, 19 nt, Artificial Sequence
  Description of Artificial Sequence: Synthetic oligonucleotide
  Sense strand starting at position 349 of SEQ ID NO: 913488
uuaucuuaugcguacugua

SEQ ID NO: 931183 - RNA, 19 nt, Artificial Sequence
  Description of Artificial Sequence: Synthetic oligonucleotide
  Antisense strand to SEQ ID NO: 931182
uacaguacgcauaagauaa

SEQ ID NO: 931184 - RNA, 19 nt, Artificial Sequence
  Description of Artificial Sequence: Synthetic oligonucleotide
  Sense strand starting at position 885 of SEQ ID NO: 913488
aaugguacuuguggaauuu

SEQ ID NO: 931185 - RNA, 19 nt, Artificial Sequence
  Description of Artificial Sequence: Synthetic oligonucleotide
  Antisense strand to SEQ ID NO: 931184
aaauuccacaaguaccauu

SEQ ID NO: 931186 - RNA, 19 nt, Artificial Sequence
  Description of Artificial Sequence: Synthetic oligonucleotide
  Sense strand starting at position 2425 of SEQ ID NO: 913488
acuacuacaugagaaaguu

SEQ ID NO: 931187 - RNA, 19 nt, Artificial Sequence
  Description of Artificial Sequence: Synthetic oligonucleotide
  Antisense strand to SEQ ID NO: 931186
aacuuucucauguaguagu

SEQ ID NO: 931188 - RNA, 19 nt, Artificial Sequence
  Description of Artificial Sequence: Synthetic oligonucleotide
  Sense strand starting at position 2853 of SEQ ID NO: 913488
ucaauuuguugucaucuua

SEQ ID NO: 931189 - RNA, 19 nt, Artificial Sequence
  Description of Artificial Sequence: Synthetic oligonucleotide
  Antisense strand to SEQ ID NO: 931188
uaagaugacaacaaauuga

SEQ ID NO: 931190 - RNA, 19 nt, Artificial Sequence
  Description of Artificial Sequence: Synthetic oligonucleotide
  Sense strand starting at position 3969 of SEQ ID NO: 913488
uuaagaagauaauguggaa

SEQ ID NO: 931191 - RNA, 19 nt, Artificial Sequence
  Description of Artificial Sequence: Synthetic oligonucleotide
  Antisense strand to SEQ ID NO: 931190
uuccacauuaucuucuuaa

SEQ ID NO: 931192 - RNA, 19 nt, Artificial Sequence
  Description of Artificial Sequence: Synthetic oligonucleotide
  Sense strand starting at position 3784 of SEQ ID NO: 913488
uggacauaaugguaaguaa

SEQ ID NO: 931193 - RNA, 19 nt, Artificial Sequence
  Description of Artificial Sequence: Synthetic oligonucleotide
  Antisense strand to SEQ ID NO: 931192
uuacuuaccauuaugucca

SEQ ID NO: 931194 - RNA, 19 nt, Artificial Sequence
  Description of Artificial Sequence: Synthetic oligonucleotide
  Sense strand starting at position 406 of SEQ ID NO: 913488
ugcaaagaaucuuagaauc

SEQ ID NO: 931195 - RNA, 19 nt, Artificial Sequence
  Description of Artificial Sequence: Synthetic oligonucleotide
  Antisense strand to SEQ ID NO: 931194
gauucuaagauucuuugca

SEQ ID NO: 931196 - RNA, 19 nt, Artificial Sequence
  Description of Artificial Sequence: Synthetic oligonucleotide
  Sense strand starting at position 359 of SEQ ID NO: 913488
cguacuguauauguuguaa

SEQ ID NO: 931197 - RNA, 19 nt, Artificial Sequence
  Description of Artificial Sequence: Synthetic oligonucleotide
  Antisense strand to SEQ ID NO: 931196
uuacaacauauacaguacg

SEQ ID NO: 931198 - RNA, 19 nt, Artificial Sequence
  Description of Artificial Sequence: Synthetic oligonucleotide
  Sense strand starting at position 2299 of SEQ ID NO: 913488
cccaguuugcccugugacu

SEQ ID NO: 931199 - RNA, 19 nt, Artificial Sequence
  Description of Artificial Sequence: Synthetic oligonucleotide
  Antisense strand to SEQ ID NO: 931198
agucacagggcaaacuggg

SEQ ID NO: 931200 - RNA, 19 nt, Artificial Sequence
  Description of Artificial Sequence: Synthetic oligonucleotide
  Sense strand starting at position 346 of SEQ ID NO: 913488
ccuuuaucuuaugcguacu

SEQ ID NO: 931201 - RNA, 19 nt, Artificial Sequence
  Description of Artificial Sequence: Synthetic oligonucleotide
  Antisense strand to SEQ ID NO: 931200
aguacgcauaagauaaagg

SEQ ID NO: 931202 - RNA, 19 nt, Artificial Sequence
  Description of Artificial Sequence: Synthetic oligonucleotide
  Sense strand starting at position 3753 of SEQ ID NO: 913488
aggaaucuuuauugaaacu

SEQ ID NO: 931203 - RNA, 19 nt, Artificial Sequence
  Description of Artificial Sequence: Synthetic oligonucleotide
  Antisense strand to SEQ ID NO: 931202
aguuucaauaaagauuccu

SEQ ID NO: 931204 - RNA, 19 nt, Artificial Sequence
  Description of Artificial Sequence: Synthetic oligonucleotide
  Sense strand starting at position 3961 of SEQ ID NO: 913488
aaacgcuguuaagaagaua

SEQ ID NO: 931205 - RNA, 19 nt, Artificial Sequence
  Description of Artificial Sequence: Synthetic oligonucleotide
  Antisense strand to SEQ ID NO: 931204
uaucuucuuaacagcguuu

SEQ ID NO: 931206 - RNA, 19 nt, Artificial Sequence
  Description of Artificial Sequence: Synthetic oligonucleotide
  Sense strand starting at position 2411 of SEQ ID NO: 913488
ucucuagucugagaacuac

SEQ ID NO: 931207 - RNA, 19 nt, Artificial Sequence
  Description of Artificial Sequence: Synthetic oligonucleotide
  Antisense strand to SEQ ID NO: 931206
guaguucucagacuagaga

SEQ ID NO: 931208 - RNA, 19 nt, Artificial Sequence
  Description of Artificial Sequence: Synthetic oligonucleotide
  Sense strand starting at position 529 of SEQ ID NO: 913488
ugaaaucccuguggaauga

SEQ ID NO: 931209 - RNA, 19 nt, Artificial Sequence
  Description of Artificial Sequence: Synthetic oligonucleotide
  Antisense strand to SEQ ID NO: 931208
ucauuccacagggauuuca

SEQ ID NO: 931210 - RNA, 19 nt, Artificial Sequence
  Description of Artificial Sequence: Synthetic oligonucleotide
  Sense strand starting at position 2997 of SEQ ID NO: 913488
aaguaaucaucucgagaag

SEQ ID NO: 931211 - RNA, 19 nt, Artificial Sequence
  Description of Artificial Sequence: Synthetic oligonucleotide
  Antisense strand to SEQ ID NO: 931210
cuucucgagaugauuacuu

SEQ ID NO: 931212 - RNA, 19 nt, Artificial Sequence
  Description of Artificial Sequence: Synthetic oligonucleotide
  Sense strand starting at position 2409 of SEQ ID NO: 913488
uuucucuagucugagaacu

SEQ ID NO: 931213 - RNA, 19 nt, Artificial Sequence
  Description of Artificial Sequence: Synthetic oligonucleotide
  Antisense strand to SEQ ID NO: 931212
aguucucagacuagagaaa

SEQ ID NO: 931214 - RNA, 19 nt, Artificial Sequence
  Description of Artificial Sequence: Synthetic oligonucleotide
  Sense strand starting at position 2757 of SEQ ID NO: 913489
uaaucaucucgagaagguu

SEQ ID NO: 931215 - RNA, 19 nt, Artificial Sequence
  Description of Artificial Sequence: Synthetic oligonucleotide
  Antisense strand to SEQ ID NO: 931214
aaccuucucgagaugauua

SEQ ID NO: 931216 - RNA, 19 nt, Artificial Sequence
  Description of Artificial Sequence: Synthetic oligonucleotide
  Sense strand starting at position 3549 of SEQ ID NO: 913489
augguaaguaagcauuaga

SEQ ID NO: 931217 - RNA, 19 nt, Artificial Sequence
  Description of Artificial Sequence: Synthetic oligonucleotide
  Antisense strand to SEQ ID NO: 931216
ucuaaugcuuacuuaccau

SEQ ID NO: 931218 - RNA, 19 nt, Artificial Sequence
  Description of Artificial Sequence: Synthetic oligonucleotide
  Sense strand starting at position 290 of SEQ ID NO: 913489
aucccuguggaaugagaua

SEQ ID NO: 931219 - RNA, 19 nt, Artificial Sequence
  Description of Artificial Sequence: Synthetic oligonucleotide
  Antisense strand to SEQ ID NO: 931218
uaucucauuccacagggau

SEQ ID NO: 931220 - RNA, 19 nt, Artificial Sequence
  Description of Artificial Sequence: Synthetic oligonucleotide
  Sense strand starting at position 3773 of SEQ ID NO: 913489
auuaaagguucccugacaa

SEQ ID NO: 931221 - RNA, 19 nt, Artificial Sequence
  Description of Artificial Sequence: Synthetic oligonucleotide
  Antisense strand to SEQ ID NO: 931220
uugucagggaaccuuuaau

SEQ ID NO: 931222 - RNA, 19 nt, Artificial Sequence
  Description of Artificial Sequence: Synthetic oligonucleotide
  Sense strand starting at position 3772 of SEQ ID NO: 913489
gauuaaagguucccugaca

SEQ ID NO: 931223 - RNA, 19 nt, Artificial Sequence
  Description of Artificial Sequence: Synthetic oligonucleotide
  Antisense strand to SEQ ID NO: 931222
ugucagggaaccuuuaauc

SEQ ID NO: 931224 - RNA, 19 nt, Artificial Sequence
  Description of Artificial Sequence: Synthetic oligonucleotide
  Sense strand starting at position 38 of SEQ ID NO: 913489
ggaacacaguuguuugaaa

SEQ ID NO: 931225 - RNA, 19 nt, Artificial Sequence
  Description of Artificial Sequence: Synthetic oligonucleotide
  Antisense strand to SEQ ID NO: 931224
uuucaaacaacuguguucc

SEQ ID NO: 931226 - RNA, 19 nt, Artificial Sequence
  Description of Artificial Sequence: Synthetic oligonucleotide
  Sense strand starting at position 283 of SEQ ID NO: 913489
accugaaaucccuguggaa

SEQ ID NO: 931227 - RNA, 19 nt, Artificial Sequence
  Description of Artificial Sequence: Synthetic oligonucleotide
  Antisense strand to SEQ ID NO: 931226
uuccacagggauuucaggu

SEQ ID NO: 931228 - RNA, 19 nt, Artificial Sequence
  Description of Artificial Sequence: Synthetic oligonucleotide
  Sense strand starting at position 3853 of SEQ ID NO: 913489
ucgguuuccagagacaauu

SEQ ID NO: 931229 - RNA, 19 nt, Artificial Sequence
  Description of Artificial Sequence: Synthetic oligonucleotide
  Antisense strand to SEQ ID NO: 931228
aauugucucuggaaaccga

SEQ ID NO: 931230 - RNA, 19 nt, Artificial Sequence
  Description of Artificial Sequence: Synthetic oligonucleotide
  Sense strand starting at position 285 of SEQ ID NO: 913489
cugaaaucccuguggaaug

SEQ ID NO: 931231 - RNA, 19 nt, Artificial Sequence
  Description of Artificial Sequence: Synthetic oligonucleotide
  Antisense strand to SEQ ID NO: 931230
cauuccacagggauuucag

SEQ ID NO: 931232 - RNA, 19 nt, Artificial Sequence
  Description of Artificial Sequence: Synthetic oligonucleotide
  Sense strand starting at position 509 of SEQ ID NO: 913489
ugauuccagguuugaauga

SEQ ID NO: 931233 - RNA, 19 nt, Artificial Sequence
  Description of Artificial Sequence: Synthetic oligonucleotide
  Antisense strand to SEQ ID NO: 931232
ucauucaaaccuggaauca

SEQ ID NO: 931234 - RNA, 19 nt, Artificial Sequence
  Description of Artificial Sequence: Synthetic oligonucleotide
  Sense strand starting at position 3478 of SEQ ID NO: 913489
aguuaugggcuccacauau

SEQ ID NO: 931235 - RNA, 19 nt, Artificial Sequence
  Description of Artificial Sequence: Synthetic oligonucleotide
  Antisense strand to SEQ ID NO: 931234
auauguggagcccauaacu

SEQ ID NO: 931236 - RNA, 19 nt, Artificial Sequence
  Description of Artificial Sequence: Synthetic oligonucleotide
  Sense strand starting at position 3649 of SEQ ID NO: 913489
caagauucugcaggaagua

SEQ ID NO: 931237 - RNA, 19 nt, Artificial Sequence
  Description of Artificial Sequence: Synthetic oligonucleotide
  Antisense strand to SEQ ID NO: 931236
uacuuccugcagaaucuug

SEQ ID NO: 931238 - RNA, 19 nt, Artificial Sequence
  Description of Artificial Sequence: Synthetic oligonucleotide
  Sense strand starting at position 2511 of SEQ ID NO: 913489
ucauuauagucaccuugag

SEQ ID NO: 931239 - RNA, 19 nt, Artificial Sequence
  Description of Artificial Sequence: Synthetic oligonucleotide
  Antisense strand to SEQ ID NO: 931238
cucaaggugacuauaauga

SEQ ID NO: 931240 - RNA, 19 nt, Artificial Sequence
  Description of Artificial Sequence: Synthetic oligonucleotide
  Sense strand starting at position 2695 of SEQ ID NO: 913489
ggugaccauuauguccaaa

SEQ ID NO: 931241 - RNA, 19 nt, Artificial Sequence
  Description of Artificial Sequence: Synthetic oligonucleotide
  Antisense strand to SEQ ID NO: 931240
uuuggacauaauggucacc

SEQ ID NO: 931242 - RNA, 19 nt, Artificial Sequence
  Description of Artificial Sequence: Synthetic oligonucleotide
  Sense strand starting at position 3844 of SEQ ID NO: 913489
gagacaaauucgguuucca

SEQ ID NO: 931243 - RNA, 19 nt, Artificial Sequence
  Description of Artificial Sequence: Synthetic oligonucleotide
  Antisense strand to SEQ ID NO: 931242
uggaaaccgaauuugucuc

SEQ ID NO: 931244 - RNA, 19 nt, Artificial Sequence
  Description of Artificial Sequence: Synthetic oligonucleotide
  Sense strand starting at position 3848 of SEQ ID NO: 913489
caaauucgguuuccagaga

SEQ ID NO: 931245 - RNA, 19 nt, Artificial Sequence
  Description of Artificial Sequence: Synthetic oligonucleotide
  Antisense strand to SEQ ID NO: 931244
ucucuggaaaccgaauuug

SEQ ID NO: 931246 - RNA, 19 nt, Artificial Sequence
  Description of Artificial Sequence: Synthetic oligonucleotide
  Sense strand starting at position 2688 of SEQ ID NO: 913489
aaggcauggugaccauuau

SEQ ID NO: 931247 - RNA, 19 nt, Artificial Sequence
  Description of Artificial Sequence: Synthetic oligonucleotide
  Antisense strand to SEQ ID NO: 931246
auaauggucaccaugccuu

SEQ ID NO: 931248 - RNA, 19 nt, Artificial Sequence
  Description of Artificial Sequence: Synthetic oligonucleotide
  Sense strand starting at position 2157 of SEQ ID NO: 913489
caggaaagguuucucuagu

SEQ ID NO: 931249 - RNA, 19 nt, Artificial Sequence
  Description of Artificial Sequence: Synthetic oligonucleotide
  Antisense strand to SEQ ID NO: 931248
acuagagaaaccuuuccug

SEQ ID NO: 931250 - RNA, 19 nt, Artificial Sequence
  Description of Artificial Sequence: Synthetic oligonucleotide
  Sense strand starting at position 2158 of SEQ ID NO: 913489
aggaaagguuucucuaguc

SEQ ID NO: 931251 - RNA, 19 nt, Artificial Sequence
  Description of Artificial Sequence: Synthetic oligonucleotide
  Antisense strand to SEQ ID NO: 931250
gacuagagaaaccuuuccu

SEQ ID NO: 931252 - RNA, 19 nt, Artificial Sequence
  Description of Artificial Sequence: Synthetic oligonucleotide
  Sense strand starting at position 3739 of SEQ ID NO: 913489
guggaauaacacugcugau

SEQ ID NO: 931253 - RNA, 19 nt, Artificial Sequence
  Description of Artificial Sequence: Synthetic oligonucleotide
  Antisense strand to SEQ ID NO: 931252
aucagcaguguuauuccac

SEQ ID NO: 931254 - RNA, 19 nt, Artificial Sequence
  Description of Artificial Sequence: Synthetic oligonucleotide
  Sense strand starting at position 1263 of SEQ ID NO: 913489
ugacucuuauagcuugaua

SEQ ID NO: 931255 - RNA, 19 nt, Artificial Sequence
  Description of Artificial Sequence: Synthetic oligonucleotide
  Antisense strand to SEQ ID NO: 931254
uaucaagcuauaagaguca

SEQ ID NO: 931256 - RNA, 19 nt, Artificial Sequence
  Description of Artificial Sequence: Synthetic oligonucleotide
  Sense strand starting at position 639 of SEQ ID NO: 913489
uuuaaugguacuuguggaa

SEQ ID NO: 931257 - RNA, 19 nt, Artificial Sequence
  Description of Artificial Sequence: Synthetic oligonucleotide
  Antisense strand to SEQ ID NO: 931256
uuccacaaguaccauuaaa

SEQ ID NO: 931258 - RNA, 19 nt, Artificial Sequence
  Description of Artificial Sequence: Synthetic oligonucleotide
  Sense strand starting at position 1795 of SEQ ID NO: 913489
aguaguuugcagcaacaaa

SEQ ID NO: 931259 - RNA, 19 nt, Artificial Sequence
  Description of Artificial Sequence: Synthetic oligonucleotide
  Antisense strand to SEQ ID NO: 931258
uuuguugcugcaaacuacu

SEQ ID NO: 931260 - RNA, 19 nt, Artificial Sequence
  Description of Artificial Sequence: Synthetic oligonucleotide
  Sense strand starting at position 2163 of SEQ ID NO: 913489
agguuucucuagucugaga

SEQ ID NO: 931261 - RNA, 19 nt, Artificial Sequence
  Description of Artificial Sequence: Synthetic oligonucleotide
  Antisense strand to SEQ ID NO: 931260
ucucagacuagagaaaccu

SEQ ID NO: 931262 - RNA, 19 nt, Artificial Sequence
  Description of Artificial Sequence: Synthetic oligonucleotide
  Sense strand starting at position 2165 of SEQ ID NO: 913489
guuucucuagucugagaac

SEQ ID NO: 931263 - RNA, 19 nt, Artificial Sequence
  Description of Artificial Sequence: Synthetic oligonucleotide
  Antisense strand to SEQ ID NO: 931262
guucucagacuagagaaac

SEQ ID NO: 931264 - RNA, 19 nt, Artificial Sequence
  Description of Artificial Sequence: Synthetic oligonucleotide
  Sense strand starting at position 3694 of SEQ ID NO: 913489
ucaaucacguguuuauaua

SEQ ID NO: 931265 - RNA, 19 nt, Artificial Sequence
  Description of Artificial Sequence: Synthetic oligonucleotide
  Antisense strand to SEQ ID NO: 931264
uauauaaacacgugauuga

SEQ ID NO: 931266 - RNA, 19 nt, Artificial Sequence
  Description of Artificial Sequence: Synthetic oligonucleotide
  Sense strand starting at position 1551 of SEQ ID NO: 913489
gucacaaguuggcucugau

SEQ ID NO: 931267 - RNA, 19 nt, Artificial Sequence
  Description of Artificial Sequence: Synthetic oligonucleotide
  Antisense strand to SEQ ID NO: 931266
aucagagccaacuugugac

SEQ ID NO: 931268 - RNA, 19 nt, Artificial Sequence
  Description of Artificial Sequence: Synthetic oligonucleotide
  Sense strand starting at position 2330 of SEQ ID NO: 913489
acgaguguuucauuacagu

SEQ ID NO: 931269 - RNA, 19 nt, Artificial Sequence
  Description of Artificial Sequence: Synthetic oligonucleotide
  Antisense strand to SEQ ID NO: 931268
acuguaaugaaacacucgu

SEQ ID NO: 931270 - RNA, 19 nt, Artificial Sequence
  Description of Artificial Sequence: Synthetic oligonucleotide
  Sense strand starting at position 106 of SEQ ID NO: 913489
uuaucuuaugcguacugua

SEQ ID NO: 931271 - RNA, 19 nt, Artificial Sequence
  Description of Artificial Sequence: Synthetic oligonucleotide
  Antisense strand to SEQ ID NO: 931270
uacaguacgcauaagauaa

SEQ ID NO: 931272 - RNA, 19 nt, Artificial Sequence
  Description of Artificial Sequence: Synthetic oligonucleotide
  Sense strand starting at position 642 of SEQ ID NO: 913489
aaugguacuuguggaauuu

SEQ ID NO: 931273 - RNA, 19 nt, Artificial Sequence
  Description of Artificial Sequence: Synthetic oligonucleotide
  Antisense strand to SEQ ID NO: 931272
aaauuccacaaguaccauu

SEQ ID NO: 931274 - RNA, 19 nt, Artificial Sequence
  Description of Artificial Sequence: Synthetic oligonucleotide
  Sense strand starting at position 2182 of SEQ ID NO: 913489
acuacuacaugagaaaguu

SEQ ID NO: 931275 - RNA, 19 nt, Artificial Sequence
  Description of Artificial Sequence: Synthetic oligonucleotide
  Antisense strand to SEQ ID NO: 931274
aacuuucucauguaguagu

SEQ ID NO: 931276 - RNA, 19 nt, Artificial Sequence
  Description of Artificial Sequence: Synthetic oligonucleotide
  Sense strand starting at position 2610 of SEQ ID NO: 913489
ucaauuuguugucaucuua

SEQ ID NO: 931277 - RNA, 19 nt, Artificial Sequence
  Description of Artificial Sequence: Synthetic oligonucleotide
  Antisense strand to SEQ ID NO: 931276
uaagaugacaacaaauuga

SEQ ID NO: 931278 - RNA, 19 nt, Artificial Sequence
  Description of Artificial Sequence: Synthetic oligonucleotide
  Sense strand starting at position 3726 of SEQ ID NO: 913489
uuaagaagauaauguggaa

SEQ ID NO: 931279 - RNA, 19 nt, Artificial Sequence
  Description of Artificial Sequence: Synthetic oligonucleotide
  Antisense strand to SEQ ID NO: 931278
uuccacauuaucuucuuaa

SEQ ID NO: 931280 - RNA, 19 nt, Artificial Sequence
  Description of Artificial Sequence: Synthetic oligonucleotide
  Sense strand starting at position 3541 of SEQ ID NO: 913489
uggacauaaugguaaguaa

SEQ ID NO: 931281 - RNA, 19 nt, Artificial Sequence
  Description of Artificial Sequence: Synthetic oligonucleotide
  Antisense strand to SEQ ID NO: 931280
uuacuuaccauuaugucca

SEQ ID NO: 931282 - RNA, 19 nt, Artificial Sequence
  Description of Artificial Sequence: Synthetic oligonucleotide
  Sense strand starting at position 163 of SEQ ID NO: 913489
ugcaaagaaucuuagaauc

SEQ ID NO: 931283 - RNA, 19 nt, Artificial Sequence
  Description of Artificial Sequence: Synthetic oligonucleotide
  Antisense strand to SEQ ID NO: 931282
gauucuaagauucuuugca

SEQ ID NO: 931284 - RNA, 19 nt, Artificial Sequence
  Description of Artificial Sequence: Synthetic oligonucleotide
  Sense strand starting at position 116 of SEQ ID NO: 913489
cguacuguauauguuguaa

SEQ ID NO: 931285 - RNA, 19 nt, Artificial Sequence
  Description of Artificial Sequence: Synthetic oligonucleotide
  Antisense strand to SEQ ID NO: 931284
uuacaacauauacaguacg

SEQ ID NO: 931286 - RNA, 19 nt, Artificial Sequence
  Description of Artificial Sequence: Synthetic oligonucleotide
  Sense strand starting at position 2056 of SEQ ID NO: 913489
cccaguuugcccugugacu

SEQ ID NO: 931287 - RNA, 19 nt, Artificial Sequence
  Description of Artificial Sequence: Synthetic oligonucleotide
  Antisense strand to SEQ ID NO: 931286
agucacagggcaaacuggg

SEQ ID NO: 931288 - RNA, 19 nt, Artificial Sequence
  Description of Artificial Sequence: Synthetic oligonucleotide
  Sense strand starting at position 103 of SEQ ID NO: 913489
ccuuuaucuuaugcguacu

SEQ ID NO: 931289 - RNA, 19 nt, Artificial Sequence
  Description of Artificial Sequence: Synthetic oligonucleotide
  Antisense strand to SEQ ID NO: 931288
aguacgcauaagauaaagg

SEQ ID NO: 931290 - RNA, 19 nt, Artificial Sequence
  Description of Artificial Sequence: Synthetic oligonucleotide
  Sense strand starting at position 3510 of SEQ ID NO: 913489
aggaaucuuuauugaaacu

SEQ ID NO: 931291 - RNA, 19 nt, Artificial Sequence
  Description of Artificial Sequence: Synthetic oligonucleotide
  Antisense strand to SEQ ID NO: 931290
aguuucaauaaagauuccu

SEQ ID NO: 931292 - RNA, 19 nt, Artificial Sequence
  Description of Artificial Sequence: Synthetic oligonucleotide
  Sense strand starting at position 3718 of SEQ ID NO: 913489
aaacgcuguuaagaagaua

SEQ ID NO: 931293 - RNA, 19 nt, Artificial Sequence
  Description of Artificial Sequence: Synthetic oligonucleotide
  Antisense strand to SEQ ID NO: 931292
uaucuucuuaacagcguuu

SEQ ID NO: 931294 - RNA, 19 nt, Artificial Sequence
  Description of Artificial Sequence: Synthetic oligonucleotide
  Sense strand starting at position 733 of SEQ ID NO: 913490
auaugucuauuugcugauu

SEQ ID NO: 931295 - RNA, 19 nt, Artificial Sequence
  Description of Artificial Sequence: Synthetic oligonucleotide
  Antisense strand to SEQ ID NO: 931294
aaucagcaaauagacauau

SEQ ID NO: 931296 - RNA, 19 nt, Artificial Sequence
  Description of Artificial Sequence: Synthetic oligonucleotide
  Sense strand starting at position 1566 of SEQ ID NO: 913490
uuuggauagcaguaagauu

SEQ ID NO: 931297 - RNA, 19 nt, Artificial Sequence
  Description of Artificial Sequence: Synthetic oligonucleotide
  Antisense strand to SEQ ID NO: 931296
aaucuuacugcuauccaaa

SEQ ID NO: 931298 - RNA, 19 nt, Artificial Sequence
  Description of Artificial Sequence: Synthetic oligonucleotide
  Sense strand starting at position 2582 of SEQ ID NO: 913490
cgcugaauucguuuagucu

SEQ ID NO: 931299 - RNA, 19 nt, Artificial Sequence
  Description of Artificial Sequence: Synthetic oligonucleotide
  Antisense strand to SEQ ID NO: 931298
agacuaaacgaauucagcg

SEQ ID NO: 931300 - RNA, 19 nt, Artificial Sequence
  Description of Artificial Sequence: Synthetic oligonucleotide
  Sense strand starting at position 2387 of SEQ ID NO: 913490
ggcuacuccgaguaaagaa

SEQ ID NO: 931301 - RNA, 19 nt, Artificial Sequence
  Description of Artificial Sequence: Synthetic oligonucleotide
  Antisense strand to SEQ ID NO: 931300
uucuuuacucggaguagcc

SEQ ID NO: 931302 - RNA, 19 nt, Artificial Sequence
  Description of Artificial Sequence: Synthetic oligonucleotide
  Sense strand starting at position 2472 of SEQ ID NO: 913490
augcuugguagagggaaua

SEQ ID NO: 931303 - RNA, 19 nt, Artificial Sequence
  Description of Artificial Sequence: Synthetic oligonucleotide
  Antisense strand to SEQ ID NO: 931302
uauucccucuaccaagcau

SEQ ID NO: 931304 - RNA, 19 nt, Artificial Sequence
  Description of Artificial Sequence: Synthetic oligonucleotide
  Sense strand starting at position 2430 of SEQ ID NO: 913490
uuaguuccaguguaaagau

SEQ ID NO: 931305 - RNA, 19 nt, Artificial Sequence
  Description of Artificial Sequence: Synthetic oligonucleotide
  Antisense strand to SEQ ID NO: 931304
aucuuuacacuggaacuaa

SEQ ID NO: 931306 - RNA, 19 nt, Artificial Sequence
  Description of Artificial Sequence: Synthetic oligonucleotide
  Sense strand starting at position 3608 of SEQ ID NO: 913490
ugauuugacuuagaaagua

SEQ ID NO: 931307 - RNA, 19 nt, Artificial Sequence
  Description of Artificial Sequence: Synthetic oligonucleotide
  Antisense strand to SEQ ID NO: 931306
uacuuucuaagucaaauca

SEQ ID NO: 931308 - RNA, 19 nt, Artificial Sequence
  Description of Artificial Sequence: Synthetic oligonucleotide
  Sense strand starting at position 3429 of SEQ ID NO: 913490
uauaauguugcagaguaug

SEQ ID NO: 931309 - RNA, 19 nt, Artificial Sequence
  Description of Artificial Sequence: Synthetic oligonucleotide
  Antisense strand to SEQ ID NO: 931308
cauacucugcaacauuaua

SEQ ID NO: 931310 - RNA, 19 nt, Artificial Sequence
  Description of Artificial Sequence: Synthetic oligonucleotide
  Sense strand starting at position 917 of SEQ ID NO: 913490
auccgaucuuuauugaaug

SEQ ID NO: 931311 - RNA, 19 nt, Artificial Sequence
  Description of Artificial Sequence: Synthetic oligonucleotide
  Antisense strand to SEQ ID NO: 931310
cauucaauaaagaucggau

SEQ ID NO: 931312 - RNA, 19 nt, Artificial Sequence
  Description of Artificial Sequence: Synthetic oligonucleotide
  Sense strand starting at position 484 of SEQ ID NO: 913490
gcgugaacucgggaaggga

SEQ ID NO: 931313 - RNA, 19 nt, Artificial Sequence
  Description of Artificial Sequence: Synthetic oligonucleotide
  Antisense strand to SEQ ID NO: 931312
ucccuucccgaguucacgc

SEQ ID NO: 931314 - RNA, 19 nt, Artificial Sequence
  Description of Artificial Sequence: Synthetic oligonucleotide
  Sense strand starting at position 3506 of SEQ ID NO: 913490
ccuuucugauuugagggaa

SEQ ID NO: 931315 - RNA, 19 nt, Artificial Sequence
  Description of Artificial Sequence: Synthetic oligonucleotide
  Antisense strand to SEQ ID NO: 931314
uucccucaaaucagaaagg

SEQ ID NO: 931316 - RNA, 19 nt, Artificial Sequence
  Description of Artificial Sequence: Synthetic oligonucleotide
  Sense strand starting at position 803 of SEQ ID NO: 913490
uguuaaguacaaugaaucu

SEQ ID NO: 931317 - RNA, 19 nt, Artificial Sequence
  Description of Artificial Sequence: Synthetic oligonucleotide
  Antisense strand to SEQ ID NO: 931316
agauucauuguacuuaaca

SEQ ID NO: 931318 - RNA, 19 nt, Artificial Sequence
  Description of Artificial Sequence: Synthetic oligonucleotide
  Sense strand starting at position 963 of SEQ ID NO: 913490
acugaaauguuggcucaga

SEQ ID NO: 931319 - RNA, 19 nt, Artificial Sequence
  Description of Artificial Sequence: Synthetic oligonucleotide
  Antisense strand to SEQ ID NO: 931318
ucugagccaacauuucagu

SEQ ID NO: 931320 - RNA, 19 nt, Artificial Sequence
  Description of Artificial Sequence: Synthetic oligonucleotide
  Sense strand starting at position 964 of SEQ ID NO: 913490
cugaaauguuggcucagaa

SEQ ID NO: 931321 - RNA, 19 nt, Artificial Sequence
  Description of Artificial Sequence: Synthetic oligonucleotide
  Antisense strand to SEQ ID NO: 931320
uucugagccaacauuucag

SEQ ID NO: 931322 - RNA, 19 nt, Artificial Sequence
  Description of Artificial Sequence: Synthetic oligonucleotide
  Sense strand starting at position 3482 of SEQ ID NO: 913490
ugccuugauccggaacuau

SEQ ID NO: 931323 - RNA, 19 nt, Artificial Sequence
  Description of Artificial Sequence: Synthetic oligonucleotide
  Antisense strand to SEQ ID NO: 931322
auaguuccggaucaaggca

SEQ ID NO: 931324 - RNA, 19 nt, Artificial Sequence
  Description of Artificial Sequence: Synthetic oligonucleotide
  Sense strand starting at position 1394 of SEQ ID NO: 913490
agccuaaacuagguuaauc

SEQ ID NO: 931325 - RNA, 19 nt, Artificial Sequence
  Description of Artificial Sequence: Synthetic oligonucleotide
  Antisense strand to SEQ ID NO: 931324
gauuaaccuaguuuaggcu

SEQ ID NO: 931326 - RNA, 19 nt, Artificial Sequence
  Description of Artificial Sequence: Synthetic oligonucleotide
  Sense strand starting at position 797 of SEQ ID NO: 913490
cgaaauuguuaaguacaau

SEQ ID NO: 931327 - RNA, 19 nt, Artificial Sequence
  Description of Artificial Sequence: Synthetic oligonucleotide
  Antisense strand to SEQ ID NO: 931326
auuguacuuaacaauuucg

SEQ ID NO: 931328 - RNA, 19 nt, Artificial Sequence
  Description of Artificial Sequence: Synthetic oligonucleotide
  Sense strand starting at position 1221 of SEQ ID NO: 913490
uacgacauaucugugaacu

SEQ ID NO: 931329 - RNA, 19 nt, Artificial Sequence
  Description of Artificial Sequence: Synthetic oligonucleotide
  Antisense strand to SEQ ID NO: 931328
aguucacagauaugucgua

SEQ ID NO: 931330 - RNA, 19 nt, Artificial Sequence
  Description of Artificial Sequence: Synthetic oligonucleotide
  Sense strand starting at position 2150 of SEQ ID NO: 913490
cuaguuauuucguccucuu

SEQ ID NO: 931331 - RNA, 19 nt, Artificial Sequence
  Description of Artificial Sequence: Synthetic oligonucleotide
  Antisense strand to SEQ ID NO: 931330
aagaggacgaaauaacuag

SEQ ID NO: 931332 - RNA, 19 nt, Artificial Sequence
  Description of Artificial Sequence: Synthetic oligonucleotide
  Sense strand starting at position 1246 of SEQ ID NO: 913490
cguaucuaacuguaauuac

SEQ ID NO: 931333 - RNA, 19 nt, Artificial Sequence
  Description of Artificial Sequence: Synthetic oligonucleotide
  Antisense strand to SEQ ID NO: 931332
guaauuacaguuagauacg

SEQ ID NO: 931334 - RNA, 19 nt, Artificial Sequence
  Description of Artificial Sequence: Synthetic oligonucleotide
  Sense strand starting at position 1189 of SEQ ID NO: 913490
guauaucgucauuaacuau

SEQ ID NO: 931335 - RNA, 19 nt, Artificial Sequence
  Description of Artificial Sequence: Synthetic oligonucleotide
  Antisense strand to SEQ ID NO: 931334
auaguuaaugacgauauac

SEQ ID NO: 931336 - RNA, 19 nt, Artificial Sequence
  Description of Artificial Sequence: Synthetic oligonucleotide
  Sense strand starting at position 2466 of SEQ ID NO: 913490
aguagaaugcuugguagag

SEQ ID NO: 931337 - RNA, 19 nt, Artificial Sequence
  Description of Artificial Sequence: Synthetic oligonucleotide
  Antisense strand to SEQ ID NO: 931336
cucuaccaagcauucuacu

SEQ ID NO: 931338 - RNA, 19 nt, Artificial Sequence
  Description of Artificial Sequence: Synthetic oligonucleotide
  Sense strand starting at position 1222 of SEQ ID NO: 913490
acgacauaucugugaacuu

SEQ ID NO: 931339 - RNA, 19 nt, Artificial Sequence
  Description of Artificial Sequence: Synthetic oligonucleotide
  Antisense strand to SEQ ID NO: 931338
aaguucacagauaugucgu

SEQ ID NO: 931340 - RNA, 19 nt, Artificial Sequence
  Description of Artificial Sequence: Synthetic oligonucleotide
  Sense strand starting at position 2464 of SEQ ID NO: 913490
ggaguagaaugcuugguag

SEQ ID NO: 931341 - RNA, 19 nt, Artificial Sequence
  Description of Artificial Sequence: Synthetic oligonucleotide
  Antisense strand to SEQ ID NO: 931340
cuaccaagcauucuacucc

SEQ ID NO: 931342 - RNA, 19 nt, Artificial Sequence
  Description of Artificial Sequence: Synthetic oligonucleotide
  Sense strand starting at position 1180 of SEQ ID NO: 913490
caagaauacguauaucguc

SEQ ID NO: 931343 - RNA, 19 nt, Artificial Sequence
  Description of Artificial Sequence: Synthetic oligonucleotide
  Antisense strand to SEQ ID NO: 931342
gacgauauacguauucuug

SEQ ID NO: 931344 - RNA, 19 nt, Artificial Sequence
  Description of Artificial Sequence: Synthetic oligonucleotide
  Sense strand starting at position 2534 of SEQ ID NO: 913490
gcgagagguaaaugugaga

SEQ ID NO: 931345 - RNA, 19 nt, Artificial Sequence
  Description of Artificial Sequence: Synthetic oligonucleotide
  Antisense strand to SEQ ID NO: 931344
ucucacauuuaccucucgc

SEQ ID NO: 931346 - RNA, 19 nt, Artificial Sequence
  Description of Artificial Sequence: Synthetic oligonucleotide
  Sense strand starting at position 3583 of SEQ ID NO: 913490
ggagcagucgcucaaauaa

SEQ ID NO: 931347 - RNA, 19 nt, Artificial Sequence
  Description of Artificial Sequence: Synthetic oligonucleotide
  Antisense strand to SEQ ID NO: 931346
uuauuugagcgacugcucc

SEQ ID NO: 931348 - RNA, 19 nt, Artificial Sequence
  Description of Artificial Sequence: Synthetic oligonucleotide
  Sense strand starting at position 1577 of SEQ ID NO: 913490
guaagauucgcucagaagu

SEQ ID NO: 931349 - RNA, 19 nt, Artificial Sequence
  Description of Artificial Sequence: Synthetic oligonucleotide
  Antisense strand to SEQ ID NO: 931348
acuucugagcgaaucuuac

SEQ ID NO: 931350 - RNA, 19 nt, Artificial Sequence
  Description of Artificial Sequence: Synthetic oligonucleotide
  Sense strand starting at position 1575 of SEQ ID NO: 913490
caguaagauucgcucagaa

SEQ ID NO: 931351 - RNA, 19 nt, Artificial Sequence
  Description of Artificial Sequence: Synthetic oligonucleotide
  Antisense strand to SEQ ID NO: 931350
uucugagcgaaucuuacug

SEQ ID NO: 931352 - RNA, 19 nt, Artificial Sequence
  Description of Artificial Sequence: Synthetic oligonucleotide
  Sense strand starting at position 1220 of SEQ ID NO: 913490
guacgacauaucugugaac

SEQ ID NO: 931353 - RNA, 19 nt, Artificial Sequence
  Description of Artificial Sequence: Synthetic oligonucleotide
  Antisense strand to SEQ ID NO: 931352
guucacagauaugucguac

SEQ ID NO: 931354 - RNA, 19 nt, Artificial Sequence
  Description of Artificial Sequence: Synthetic oligonucleotide
  Sense strand starting at position 1249 of SEQ ID NO: 913490
aucuaacuguaauuacgua

SEQ ID NO: 931355 - RNA, 19 nt, Artificial Sequence
  Description of Artificial Sequence: Synthetic oligonucleotide
  Antisense strand to SEQ ID NO: 931354
uacguaauuacaguuagau

SEQ ID NO: 931356 - RNA, 19 nt, Artificial Sequence
  Description of Artificial Sequence: Synthetic oligonucleotide
  Sense strand starting at position 1186 of SEQ ID NO: 913490
uacguauaucgucauuaac

SEQ ID NO: 931357 - RNA, 19 nt, Artificial Sequence
  Description of Artificial Sequence: Synthetic oligonucleotide
  Antisense strand to SEQ ID NO: 931356
guuaaugacgauauacgua

SEQ ID NO: 931358 - RNA, 19 nt, Artificial Sequence
  Description of Artificial Sequence: Synthetic oligonucleotide
  Sense strand starting at position 2685 of SEQ ID NO: 913490
ucgaaucgaacuuguacua

SEQ ID NO: 931359 - RNA, 19 nt, Artificial Sequence
  Description of Artificial Sequence: Synthetic oligonucleotide
  Antisense strand to SEQ ID NO: 931358
uaguacaaguucgauucga

SEQ ID NO: 931360 - RNA, 19 nt, Artificial Sequence
  Description of Artificial Sequence: Synthetic oligonucleotide
  Sense strand starting at position 2149 of SEQ ID NO: 913490
gcuaguuauuucguccucu

SEQ ID NO: 931361 - RNA, 19 nt, Artificial Sequence
  Description of Artificial Sequence: Synthetic oligonucleotide
  Antisense strand to SEQ ID NO: 931360
agaggacgaaauaacuagc

SEQ ID NO: 931362 - RNA, 19 nt, Artificial Sequence
  Description of Artificial Sequence: Synthetic oligonucleotide
  Sense strand starting at position 1312 of SEQ ID NO: 913490
agcaauuaauucuccgagu

SEQ ID NO: 931363 - RNA, 19 nt, Artificial Sequence
  Description of Artificial Sequence: Synthetic oligonucleotide
  Antisense strand to SEQ ID NO: 931362
acucggagaauuaauugcu

SEQ ID NO: 931364 - RNA, 19 nt, Artificial Sequence
  Description of Artificial Sequence: Synthetic oligonucleotide
  Sense strand starting at position 2773 of SEQ ID NO: 913490
agaaguaacuagcugcuuu

SEQ ID NO: 931365 - RNA, 19 nt, Artificial Sequence
  Description of Artificial Sequence: Synthetic oligonucleotide
  Antisense strand to SEQ ID NO: 931364
aaagcagcuaguuacuucu

SEQ ID NO: 931366 - RNA, 19 nt, Artificial Sequence
  Description of Artificial Sequence: Synthetic oligonucleotide
  Sense strand starting at position 1313 of SEQ ID NO: 913490
gcaauuaauucuccgagug

SEQ ID NO: 931367 - RNA, 19 nt, Artificial Sequence
  Description of Artificial Sequence: Synthetic oligonucleotide
  Antisense strand to SEQ ID NO: 931366
cacucggagaauuaauugc

SEQ ID NO: 931368 - RNA, 19 nt, Artificial Sequence
  Description of Artificial Sequence: Synthetic oligonucleotide
  Sense strand starting at position 1331 of SEQ ID NO: 913490
gcacuuaggcagugaucac

SEQ ID NO: 931369 - RNA, 19 nt, Artificial Sequence
  Description of Artificial Sequence: Synthetic oligonucleotide
  Antisense strand to SEQ ID NO: 931368
gugaucacugccuaagugc

SEQ ID NO: 931370 - RNA, 19 nt, Artificial Sequence
  Description of Artificial Sequence: Synthetic oligonucleotide
  Sense strand starting at position 1185 of SEQ ID NO: 913490
auacguauaucgucauuaa

SEQ ID NO: 931371 - RNA, 19 nt, Artificial Sequence
  Description of Artificial Sequence: Synthetic oligonucleotide
  Antisense strand to SEQ ID NO: 931370
uuaaugacgauauacguau

SEQ ID NO: 931372 - RNA, 19 nt, Artificial Sequence
  Description of Artificial Sequence: Synthetic oligonucleotide
  Sense strand starting at position 1216 of SEQ ID NO: 913490
ugcuguacgacauaucugu

SEQ ID NO: 931373 - RNA, 19 nt, Artificial Sequence
  Description of Artificial Sequence: Synthetic oligonucleotide
  Antisense strand to SEQ ID NO: 931372
acagauaugucguacagca

SEQ ID NO: 931374 - RNA, 19 nt, Artificial Sequence
  Description of Artificial Sequence: Synthetic oligonucleotide
  Sense strand starting at position 685 of SEQ ID NO: 913491
aggcuaauuuccucccagu

SEQ ID NO: 931375 - RNA, 19 nt, Artificial Sequence
  Description of Artificial Sequence: Synthetic oligonucleotide
  Antisense strand to SEQ ID NO: 931374
acugggaggaaauuagccu

SEQ ID NO: 931376 - RNA, 19 nt, Artificial Sequence
  Description of Artificial Sequence: Synthetic oligonucleotide
  Sense strand starting at position 3596 of SEQ ID NO: 913491
gucgcaaucaacuugugca

SEQ ID NO: 931377 - RNA, 19 nt, Artificial Sequence
  Description of Artificial Sequence: Synthetic oligonucleotide
  Antisense strand to SEQ ID NO: 931376
ugcacaaguugauugcgac

SEQ ID NO: 931378 - RNA, 19 nt, Artificial Sequence
  Description of Artificial Sequence: Synthetic oligonucleotide
  Sense strand starting at position 3270 of SEQ ID NO: 913491
cugaaauaguuucuaggaa

SEQ ID NO: 931379 - RNA, 19 nt, Artificial Sequence
  Description of Artificial Sequence: Synthetic oligonucleotide
  Antisense strand to SEQ ID NO: 931378
uuccuagaaacuauuucag

SEQ ID NO: 931380 - RNA, 19 nt, Artificial Sequence
  Description of Artificial Sequence: Synthetic oligonucleotide
  Sense strand starting at position 1378 of SEQ ID NO: 913491
ucgaguucccaggaaucaa

SEQ ID NO: 931381 - RNA, 19 nt, Artificial Sequence
  Description of Artificial Sequence: Synthetic oligonucleotide
  Antisense strand to SEQ ID NO: 931380
uugauuccugggaacucga

SEQ ID NO: 931382 - RNA, 19 nt, Artificial Sequence
  Description of Artificial Sequence: Synthetic oligonucleotide
  Sense strand starting at position 3857 of SEQ ID NO: 913491
ggaguugaucuuuauccua

SEQ ID NO: 931383 - RNA, 19 nt, Artificial Sequence
  Description of Artificial Sequence: Synthetic oligonucleotide
  Antisense strand to SEQ ID NO: 931382
uaggauaaagaucaacucc

SEQ ID NO: 931384 - RNA, 19 nt, Artificial Sequence
  Description of Artificial Sequence: Synthetic oligonucleotide
  Sense strand starting at position 2872 of SEQ ID NO: 913491
uccauaugcagguaaugga

SEQ ID NO: 931385 - RNA, 19 nt, Artificial Sequence
  Description of Artificial Sequence: Synthetic oligonucleotide
  Antisense strand to SEQ ID NO: 931384
uccauuaccugcauaugga

SEQ ID NO: 931386 - RNA, 19 nt, Artificial Sequence
  Description of Artificial Sequence: Synthetic oligonucleotide
  Sense strand starting at position 3396 of SEQ ID NO: 913491
gaaucagugcuaggaagaa

SEQ ID NO: 931387 - RNA, 19 nt, Artificial Sequence
  Description of Artificial Sequence: Synthetic oligonucleotide
  Antisense strand to SEQ ID NO: 931386
uucuuccuagcacugauuc

SEQ ID NO: 931388 - RNA, 19 nt, Artificial Sequence
  Description of Artificial Sequence: Synthetic oligonucleotide
  Sense strand starting at position 3846 of SEQ ID NO: 913491
ggccuuaaucaggaguuga

SEQ ID NO: 931389 - RNA, 19 nt, Artificial Sequence
  Description of Artificial Sequence: Synthetic oligonucleotide
  Antisense strand to SEQ ID NO: 931388
ucaacuccugauuaaggcc

SEQ ID NO: 931390 - RNA, 19 nt, Artificial Sequence
  Description of Artificial Sequence: Synthetic oligonucleotide
  Sense strand starting at position 2697 of SEQ ID NO: 913491
agugcuuagaaauggagga

SEQ ID NO: 931391 - RNA, 19 nt, Artificial Sequence
  Description of Artificial Sequence: Synthetic oligonucleotide
  Antisense strand to SEQ ID NO: 931390
uccuccauuucuaagcacu

SEQ ID NO: 931392 - RNA, 19 nt, Artificial Sequence
  Description of Artificial Sequence: Synthetic oligonucleotide
  Sense strand starting at position 3409 of SEQ ID NO: 913491
gaagaagagugcuuuaaug

SEQ ID NO: 931393 - RNA, 19 nt, Artificial Sequence
  Description of Artificial Sequence: Synthetic oligonucleotide
  Antisense strand to SEQ ID NO: 931392
cauuaaagcacucuucuuc

SEQ ID NO: 931394 - RNA, 19 nt, Artificial Sequence
  Description of Artificial Sequence: Synthetic oligonucleotide
  Sense strand starting at position 3904 of SEQ ID NO: 913491
guggcugacaccuauaaug

SEQ ID NO: 931395 - RNA, 19 nt, Artificial Sequence
  Description of Artificial Sequence: Synthetic oligonucleotide
  Antisense strand to SEQ ID NO: 931394
cauuauaggugucagccac

SEQ ID NO: 931396 - RNA, 19 nt, Artificial Sequence
  Description of Artificial Sequence: Synthetic oligonucleotide
  Sense strand starting at position 3406 of SEQ ID NO: 913491
uaggaagaagagugcuuua

SEQ ID NO: 931397 - RNA, 19 nt, Artificial Sequence
  Description of Artificial Sequence: Synthetic oligonucleotide
  Antisense strand to SEQ ID NO: 931396
uaaagcacucuucuuccua

SEQ ID NO: 931398 - RNA, 19 nt, Artificial Sequence
  Description of Artificial Sequence: Synthetic oligonucleotide
  Sense strand starting at position 2971 of SEQ ID NO: 913491
ggauuuccgagcugucacu

SEQ ID NO: 931399 - RNA, 19 nt, Artificial Sequence
  Description of Artificial Sequence: Synthetic oligonucleotide
  Antisense strand to SEQ ID NO: 931398
agugacagcucggaaaucc

SEQ ID NO: 931400 - RNA, 19 nt, Artificial Sequence
  Description of Artificial Sequence: Synthetic oligonucleotide
  Sense strand starting at position 2691 of SEQ ID NO: 913491
ccuccaagugcuuagaaau

SEQ ID NO: 931401 - RNA, 19 nt, Artificial Sequence
  Description of Artificial Sequence: Synthetic oligonucleotide
  Antisense strand to SEQ ID NO: 931400
auuucuaagcacuuggagg

SEQ ID NO: 931402 - RNA, 19 nt, Artificial Sequence
  Description of Artificial Sequence: Synthetic oligonucleotide
  Sense strand starting at position 1374 of SEQ ID NO: 913491
gaauucgaguucccaggaa

SEQ ID NO: 931403 - RNA, 19 nt, Artificial Sequence
  Description of Artificial Sequence: Synthetic oligonucleotide
  Antisense strand to SEQ ID NO: 931402
uuccugggaacucgaauuc

SEQ ID NO: 931404 - RNA, 19 nt, Artificial Sequence
  Description of Artificial Sequence: Synthetic oligonucleotide
  Sense strand starting at position 3859 of SEQ ID NO: 913491
aguugaucuuuauccuaag

SEQ ID NO: 931405 - RNA, 19 nt, Artificial Sequence
  Description of Artificial Sequence: Synthetic oligonucleotide
  Antisense strand to SEQ ID NO: 931404
cuuaggauaaagaucaacu

SEQ ID NO: 931406 - RNA, 19 nt, Artificial Sequence
  Description of Artificial Sequence: Synthetic oligonucleotide
  Sense strand starting at position 3860 of SEQ ID NO: 913491
guugaucuuuauccuaaga

SEQ ID NO: 931407 - RNA, 19 nt, Artificial Sequence
  Description of Artificial Sequence: Synthetic oligonucleotide
  Antisense strand to SEQ ID NO: 931406
ucuuaggauaaagaucaac

SEQ ID NO: 931408 - RNA, 19 nt, Artificial Sequence
  Description of Artificial Sequence: Synthetic oligonucleotide
  Sense strand starting at position 3156 of SEQ ID NO: 913491
gguggagucggguauugaa

SEQ ID NO: 931409 - RNA, 19 nt, Artificial Sequence
  Description of Artificial Sequence: Synthetic oligonucleotide
  Antisense strand to SEQ ID NO: 931408
uucaauacccgacuccacc

SEQ ID NO: 931410 - RNA, 19 nt, Artificial Sequence
  Description of Artificial Sequence: Synthetic oligonucleotide
  Sense strand starting at position 3856 of SEQ ID NO: 913491
aggaguugaucuuuauccu

SEQ ID NO: 931411 - RNA, 19 nt, Artificial Sequence
  Description of Artificial Sequence: Synthetic oligonucleotide
  Antisense strand to SEQ ID NO: 931410
aggauaaagaucaacuccu

SEQ ID NO: 931412 - RNA, 19 nt, Artificial Sequence
  Description of Artificial Sequence: Synthetic oligonucleotide
  Sense strand starting at position 511 of SEQ ID NO: 913491
gugucucucuagcuuauuu

SEQ ID NO: 931413 - RNA, 19 nt, Artificial Sequence
  Description of Artificial Sequence: Synthetic oligonucleotide
  Antisense strand to SEQ ID NO: 931412
aaauaagcuagagagacac

SEQ ID NO: 931414 - RNA, 19 nt, Artificial Sequence
  Description of Artificial Sequence: Synthetic oligonucleotide
  Sense strand starting at position 2235 of SEQ ID NO: 913491
cgcucagggcaugaauauu

SEQ ID NO: 931415 - RNA, 19 nt, Artificial Sequence
  Description of Artificial Sequence: Synthetic oligonucleotide
  Antisense strand to SEQ ID NO: 931414
aauauucaugcccugagcg

SEQ ID NO: 931416 - RNA, 19 nt, Artificial Sequence
  Description of Artificial Sequence: Synthetic oligonucleotide
  Sense strand starting at position 3070 of SEQ ID NO: 913491
ucaauaaagucuuucuggu

SEQ ID NO: 931417 - RNA, 19 nt, Artificial Sequence
  Description of Artificial Sequence: Synthetic oligonucleotide
  Antisense strand to SEQ ID NO: 931416
accagaaagacuuuauuga

SEQ ID NO: 931418 - RNA, 19 nt, Artificial Sequence
  Description of Artificial Sequence: Synthetic oligonucleotide
  Sense strand starting at position 2994 of SEQ ID NO: 913491
cagucaguacauugacagu

SEQ ID NO: 931419 - RNA, 19 nt, Artificial Sequence
  Description of Artificial Sequence: Synthetic oligonucleotide
  Antisense strand to SEQ ID NO: 931418
acugucaauguacugacug

SEQ ID NO: 931420 - RNA, 19 nt, Artificial Sequence
  Description of Artificial Sequence: Synthetic oligonucleotide
  Sense strand starting at position 3325 of SEQ ID NO: 913491
ccaugaagcuucucuagua

SEQ ID NO: 931421 - RNA, 19 nt, Artificial Sequence
  Description of Artificial Sequence: Synthetic oligonucleotide
  Antisense strand to SEQ ID NO: 931420
uacuagagaagcuucaugg

SEQ ID NO: 931422 - RNA, 19 nt, Artificial Sequence
  Description of Artificial Sequence: Synthetic oligonucleotide
  Sense strand starting at position 190 of SEQ ID NO: 913491
agaaccaagccuugcuauu

SEQ ID NO: 931423 - RNA, 19 nt, Artificial Sequence
  Description of Artificial Sequence: Synthetic oligonucleotide
  Antisense strand to SEQ ID NO: 931422
aauagcaaggcuugguucu

SEQ ID NO: 931424 - RNA, 19 nt, Artificial Sequence
  Description of Artificial Sequence: Synthetic oligonucleotide
  Sense strand starting at position 2870 of SEQ ID NO: 913491
gguccauaugcagguaaug

SEQ ID NO: 931425 - RNA, 19 nt, Artificial Sequence
  Description of Artificial Sequence: Synthetic oligonucleotide
  Antisense strand to SEQ ID NO: 931424
cauuaccugcauauggacc

SEQ ID NO: 931426 - RNA, 19 nt, Artificial Sequence
  Description of Artificial Sequence: Synthetic oligonucleotide
  Sense strand starting at position 3198 of SEQ ID NO: 913491
gcuccaguuccuuaccauu

SEQ ID NO: 931427 - RNA, 19 nt, Artificial Sequence
  Description of Artificial Sequence: Synthetic oligonucleotide
  Antisense strand to SEQ ID NO: 931426
aaugguaaggaacuggagc

SEQ ID NO: 931428 - RNA, 19 nt, Artificial Sequence
  Description of Artificial Sequence: Synthetic oligonucleotide
  Sense strand starting at position 688 of SEQ ID NO: 913491
cuaauuuccucccagugga

SEQ ID NO: 931429 - RNA, 19 nt, Artificial Sequence
  Description of Artificial Sequence: Synthetic oligonucleotide
  Antisense strand to SEQ ID NO: 931428
uccacugggaggaaauuag

SEQ ID NO: 931430 - RNA, 19 nt, Artificial Sequence
  Description of Artificial Sequence: Synthetic oligonucleotide
  Sense strand starting at position 2690 of SEQ ID NO: 913491
gccuccaagugcuuagaaa

SEQ ID NO: 931431 - RNA, 19 nt, Artificial Sequence
  Description of Artificial Sequence: Synthetic oligonucleotide
  Antisense strand to SEQ ID NO: 931430
uuucuaagcacuuggaggc

SEQ ID NO: 931432 - RNA, 19 nt, Artificial Sequence
  Description of Artificial Sequence: Synthetic oligonucleotide
  Sense strand starting at position 3258 of SEQ ID NO: 913491
ugugcuagcuaacugaaau

SEQ ID NO: 931433 - RNA, 19 nt, Artificial Sequence
  Description of Artificial Sequence: Synthetic oligonucleotide
  Antisense strand to SEQ ID NO: 931432
auuucaguuagcuagcaca

SEQ ID NO: 931434 - RNA, 19 nt, Artificial Sequence
  Description of Artificial Sequence: Synthetic oligonucleotide
  Sense strand starting at position 572 of SEQ ID NO: 913491
aggcgaggucaaugucaau

SEQ ID NO: 931435 - RNA, 19 nt, Artificial Sequence
  Description of Artificial Sequence: Synthetic oligonucleotide
  Antisense strand to SEQ ID NO: 931434
auugacauugaccucgccu

SEQ ID NO: 931436 - RNA, 19 nt, Artificial Sequence
  Description of Artificial Sequence: Synthetic oligonucleotide
  Sense strand starting at position 1108 of SEQ ID NO: 913491
gggagaacuacgugccuuu

SEQ ID NO: 931437 - RNA, 19 nt, Artificial Sequence
  Description of Artificial Sequence: Synthetic oligonucleotide
  Antisense strand to SEQ ID NO: 931436
aaaggcacguaguucuccc

SEQ ID NO: 931438 - RNA, 19 nt, Artificial Sequence
  Description of Artificial Sequence: Synthetic oligonucleotide
  Sense strand starting at position 3839 of SEQ ID NO: 913491
guguguuggccuuaaucag

SEQ ID NO: 931439 - RNA, 19 nt, Artificial Sequence
  Description of Artificial Sequence: Synthetic oligonucleotide
  Antisense strand to SEQ ID NO: 931438
cugauuaaggccaacacac

SEQ ID NO: 931440 - RNA, 19 nt, Artificial Sequence
  Description of Artificial Sequence: Synthetic oligonucleotide
  Sense strand starting at position 423 of SEQ ID NO: 913491
cuaauucuucccuguguga

SEQ ID NO: 931441 - RNA, 19 nt, Artificial Sequence
  Description of Artificial Sequence: Synthetic oligonucleotide
  Antisense strand to SEQ ID NO: 931440
ucacacagggaagaauuag

SEQ ID NO: 931442 - RNA, 19 nt, Artificial Sequence
  Description of Artificial Sequence: Synthetic oligonucleotide
  Sense strand starting at position 566 of SEQ ID NO: 913491
gcuggaaggcgaggucaau

SEQ ID NO: 931443 - RNA, 19 nt, Artificial Sequence
  Description of Artificial Sequence: Synthetic oligonucleotide
  Antisense strand to SEQ ID NO: 931442
auugaccucgccuuccagc

SEQ ID NO: 931444 - RNA, 19 nt, Artificial Sequence
  Description of Artificial Sequence: Synthetic oligonucleotide
  Sense strand starting at position 631 of SEQ ID NO: 913491
aggcucugcuuucugaauu

SEQ ID NO: 931445 - RNA, 19 nt, Artificial Sequence
  Description of Artificial Sequence: Synthetic oligonucleotide
  Antisense strand to SEQ ID NO: 931444
aauucagaaagcagagccu

SEQ ID NO: 931446 - RNA, 19 nt, Artificial Sequence
  Description of Artificial Sequence: Synthetic oligonucleotide
  Sense strand starting at position 2000 of SEQ ID NO: 913491
gcucaaguccgcgaucaac

SEQ ID NO: 931447 - RNA, 19 nt, Artificial Sequence
  Description of Artificial Sequence: Synthetic oligonucleotide
  Antisense strand to SEQ ID NO: 931446
guugaucgcggacuugagc

SEQ ID NO: 931448 - RNA, 19 nt, Artificial Sequence
  Description of Artificial Sequence: Synthetic oligonucleotide
  Sense strand starting at position 3271 of SEQ ID NO: 913491
ugaaauaguuucuaggaau

SEQ ID NO: 931449 - RNA, 19 nt, Artificial Sequence
  Description of Artificial Sequence: Synthetic oligonucleotide
  Antisense strand to SEQ ID NO: 931448
auuccuagaaacuauuuca

SEQ ID NO: 931450 - RNA, 19 nt, Artificial Sequence
  Description of Artificial Sequence: Synthetic oligonucleotide
  Sense strand starting at position 2234 of SEQ ID NO: 913491
gcgcucagggcaugaauau

SEQ ID NO: 931451 - RNA, 19 nt, Artificial Sequence
  Description of Artificial Sequence: Synthetic oligonucleotide
  Antisense strand to SEQ ID NO: 931450
auauucaugcccugagcgc

SEQ ID NO: 931452 - RNA, 19 nt, Artificial Sequence
  Description of Artificial Sequence: Synthetic oligonucleotide
  Sense strand starting at position 643 of SEQ ID NO: 913491
cugaauuacuagggaggau

SEQ ID NO: 931453 - RNA, 19 nt, Artificial Sequence
  Description of Artificial Sequence: Synthetic oligonucleotide
  Antisense strand to SEQ ID NO: 931452
auccucccuaguaauucag

SEQ ID NO: 931454 - RNA, 19 nt, Artificial Sequence
  Description of Artificial Sequence: Synthetic oligonucleotide
  Sense strand starting at position 1302 of SEQ ID NO: 913492
cuuugucuugauuaaauag

SEQ ID NO: 931455 - RNA, 19 nt, Artificial Sequence
  Description of Artificial Sequence: Synthetic oligonucleotide
  Antisense strand to SEQ ID NO: 931454
cuauuuaaucaagacaaag

SEQ ID NO: 931456 - RNA, 19 nt, Artificial Sequence
  Description of Artificial Sequence: Synthetic oligonucleotide
  Sense strand starting at position 2947 of SEQ ID NO: 913492
ugagacuuucucuggaaca

SEQ ID NO: 931457 - RNA, 19 nt, Artificial Sequence
  Description of Artificial Sequence: Synthetic oligonucleotide
  Antisense strand to SEQ ID NO: 931456
uguuccagagaaagucuca

SEQ ID NO: 931458 - RNA, 19 nt, Artificial Sequence
  Description of Artificial Sequence: Synthetic oligonucleotide
  Sense strand starting at position 2946 of SEQ ID NO: 913492
cugagacuuucucuggaac

SEQ ID NO: 931459 - RNA, 19 nt, Artificial Sequence
  Description of Artificial Sequence: Synthetic oligonucleotide
  Antisense strand to SEQ ID NO: 931458
guuccagagaaagucucag

SEQ ID NO: 931460 - RNA, 19 nt, Artificial Sequence
  Description of Artificial Sequence: Synthetic oligonucleotide
  Sense strand starting at position 1149 of SEQ ID NO: 913492
gguaaauuucguuaugugu

SEQ ID NO: 931461 - RNA, 19 nt, Artificial Sequence
  Description of Artificial Sequence: Synthetic oligonucleotide
  Antisense strand to SEQ ID NO: 931460
acacauaacgaaauuuacc

SEQ ID NO: 931462 - RNA, 19 nt, Artificial Sequence
  Description of Artificial Sequence: Synthetic oligonucleotide
  Sense strand starting at position 3375 of SEQ ID NO: 913492
augcaacuugcagaggauu

SEQ ID NO: 931463 - RNA, 19 nt, Artificial Sequence
  Description of Artificial Sequence: Synthetic oligonucleotide
  Antisense strand to SEQ ID NO: 931462
aauccucugcaaguugcau

SEQ ID NO: 931464 - RNA, 19 nt, Artificial Sequence
  Description of Artificial Sequence: Synthetic oligonucleotide
  Sense strand starting at position 3853 of SEQ ID NO: 913492
gcaugauguggugagauag

SEQ ID NO: 931465 - RNA, 19 nt, Artificial Sequence
  Description of Artificial Sequence: Synthetic oligonucleotide
  Antisense strand to SEQ ID NO: 931464
cuaucucaccacaucaugc

SEQ ID NO: 931466 - RNA, 19 nt, Artificial Sequence
  Description of Artificial Sequence: Synthetic oligonucleotide
  Sense strand starting at position 2474 of SEQ ID NO: 913492
gcagauugaguuuaucaug

SEQ ID NO: 931467 - RNA, 19 nt, Artificial Sequence
  Description of Artificial Sequence: Synthetic oligonucleotide
  Antisense strand to SEQ ID NO: 931466
caugauaaacucaaucugc

SEQ ID NO: 931468 - RNA, 19 nt, Artificial Sequence
  Description of Artificial Sequence: Synthetic oligonucleotide
  Sense strand starting at position 3340 of SEQ ID NO: 913492
ugguuucgugauaguguaa

SEQ ID NO: 931469 - RNA, 19 nt, Artificial Sequence
  Description of Artificial Sequence: Synthetic oligonucleotide
  Antisense strand to SEQ ID NO: 931468
uuacacuaucacgaaacca

SEQ ID NO: 931470 - RNA, 19 nt, Artificial Sequence
  Description of Artificial Sequence: Synthetic oligonucleotide
  Sense strand starting at position 3393 of SEQ ID NO: 913492
uuaaauggccagcauacau

SEQ ID NO: 931471 - RNA, 19 nt, Artificial Sequence
  Description of Artificial Sequence: Synthetic oligonucleotide
  Antisense strand to SEQ ID NO: 931470
auguaugcuggccauuuaa

SEQ ID NO: 931472 - RNA, 19 nt, Artificial Sequence
  Description of Artificial Sequence: Synthetic oligonucleotide
  Sense strand starting at position 2944 of SEQ ID NO: 913492
cccugagacuuucucugga

SEQ ID NO: 931473 - RNA, 19 nt, Artificial Sequence
  Description of Artificial Sequence: Synthetic oligonucleotide
  Antisense strand to SEQ ID NO: 931472
uccagagaaagucucaggg

SEQ ID NO: 931474 - RNA, 19 nt, Artificial Sequence
  Description of Artificial Sequence: Synthetic oligonucleotide
  Sense strand starting at position 508 of SEQ ID NO: 913492
uuggcucugagugaccaau

SEQ ID NO: 931475 - RNA, 19 nt, Artificial Sequence
  Description of Artificial Sequence: Synthetic oligonucleotide
  Antisense strand to SEQ ID NO: 931474
auuggucacucagagccaa

SEQ ID NO: 931476 - RNA, 19 nt, Artificial Sequence
  Description of Artificial Sequence: Synthetic oligonucleotide
  Sense strand starting at position 3001 of SEQ ID NO: 913492
cuggauugcuauccagaca

SEQ ID NO: 931477 - RNA, 19 nt, Artificial Sequence
  Description of Artificial Sequence: Synthetic oligonucleotide
  Antisense strand to SEQ ID NO: 931476
ugucuggauagcaauccag

SEQ ID NO: 931478 - RNA, 19 nt, Artificial Sequence
  Description of Artificial Sequence: Synthetic oligonucleotide
  Sense strand starting at position 3319 of SEQ ID NO: 913492
aaagauaagccaugguucu

SEQ ID NO: 931479 - RNA, 19 nt, Artificial Sequence
  Description of Artificial Sequence: Synthetic oligonucleotide
  Antisense strand to SEQ ID NO: 931478
agaaccauggcuuaucuuu

SEQ ID NO: 931480 - RNA, 19 nt, Artificial Sequence
  Description of Artificial Sequence: Synthetic oligonucleotide
  Sense strand starting at position 154 of SEQ ID NO: 913492
uguggcuuccuauaagauc

SEQ ID NO: 931481 - RNA, 19 nt, Artificial Sequence
  Description of Artificial Sequence: Synthetic oligonucleotide
  Antisense strand to SEQ ID NO: 931480
gaucuuauaggaagccaca

SEQ ID NO: 931482 - RNA, 19 nt, Artificial Sequence
  Description of Artificial Sequence: Synthetic oligonucleotide
  Sense strand starting at position 510 of SEQ ID NO: 913492
ggcucugagugaccaauga

SEQ ID NO: 931483 - RNA, 19 nt, Artificial Sequence
  Description of Artificial Sequence: Synthetic oligonucleotide
  Antisense strand to SEQ ID NO: 931482
ucauuggucacucagagcc

SEQ ID NO: 931484 - RNA, 19 nt, Artificial Sequence
  Description of Artificial Sequence: Synthetic oligonucleotide
  Sense strand starting at position 1217 of SEQ ID NO: 913492
aaggaaagucaugguagcu

SEQ ID NO: 931485 - RNA, 19 nt, Artificial Sequence
  Description of Artificial Sequence: Synthetic oligonucleotide
  Antisense strand to SEQ ID NO: 931484
agcuaccaugacuuuccuu

SEQ ID NO: 931486 - RNA, 19 nt, Artificial Sequence
  Description of Artificial Sequence: Synthetic oligonucleotide
  Sense strand starting at position 686 of SEQ ID NO: 913492
ccagguucagccugagaag

SEQ ID NO: 931487 - RNA, 19 nt, Artificial Sequence
  Description of Artificial Sequence: Synthetic oligonucleotide
  Antisense strand to SEQ ID NO: 931486
cuucucaggcugaaccugg

SEQ ID NO: 931488 - RNA, 19 nt, Artificial Sequence
  Description of Artificial Sequence: Synthetic oligonucleotide
  Sense strand starting at position 2913 of SEQ ID NO: 913492
cagugagcauccucagaca

SEQ ID NO: 931489 - RNA, 19 nt, Artificial Sequence
  Description of Artificial Sequence: Synthetic oligonucleotide
  Antisense strand to SEQ ID NO: 931488
ugucugaggaugcucacug

SEQ ID NO: 931490 - RNA, 19 nt, Artificial Sequence
  Description of Artificial Sequence: Synthetic oligonucleotide
  Sense strand starting at position 2935 of SEQ ID NO: 913492
ucauuaaugcccugagacu

SEQ ID NO: 931491 - RNA, 19 nt, Artificial Sequence
  Description of Artificial Sequence: Synthetic oligonucleotide
  Antisense strand to SEQ ID NO: 931490
agucucagggcauuaauga

SEQ ID NO: 931492 - RNA, 19 nt, Artificial Sequence
  Description of Artificial Sequence: Synthetic oligonucleotide
  Sense strand starting at position 2468 of SEQ ID NO: 913492
ucaaaugcagauugaguuu

SEQ ID NO: 931493 - RNA, 19 nt, Artificial Sequence
  Description of Artificial Sequence: Synthetic oligonucleotide
  Antisense strand to SEQ ID NO: 931492
aaacucaaucugcauuuga

SEQ ID NO: 931494 - RNA, 19 nt, Artificial Sequence
  Description of Artificial Sequence: Synthetic oligonucleotide
  Sense strand starting at position 3864 of SEQ ID NO: 913492
ugagauaggugcucucaua

SEQ ID NO: 931495 - RNA, 19 nt, Artificial Sequence
  Description of Artificial Sequence: Synthetic oligonucleotide
  Antisense strand to SEQ ID NO: 931494
uaugagagcaccuaucuca

SEQ ID NO: 931496 - RNA, 19 nt, Artificial Sequence
  Description of Artificial Sequence: Synthetic oligonucleotide
  Sense strand starting at position 2970 of SEQ ID NO: 913492
cuggguaauggugguacaa

SEQ ID NO: 931497 - RNA, 19 nt, Artificial Sequence
  Description of Artificial Sequence: Synthetic oligonucleotide
  Antisense strand to SEQ ID NO: 931496
uuguaccaccauuacccag

SEQ ID NO: 931498 - RNA, 19 nt, Artificial Sequence
  Description of Artificial Sequence: Synthetic oligonucleotide
  Sense strand starting at position 3842 of SEQ ID NO: 913492
auuuaauacuggcaugaug

SEQ ID NO: 931499 - RNA, 19 nt, Artificial Sequence
  Description of Artificial Sequence: Synthetic oligonucleotide
  Antisense strand to SEQ ID NO: 931498
caucaugccaguauuaaau

SEQ ID NO: 931500 - RNA, 19 nt, Artificial Sequence
  Description of Artificial Sequence: Synthetic oligonucleotide
  Sense strand starting at position 3428 of SEQ ID NO: 913492
gccaccuaguuaguaaaga

SEQ ID NO: 931501 - RNA, 19 nt, Artificial Sequence
  Description of Artificial Sequence: Synthetic oligonucleotide
  Antisense strand to SEQ ID NO: 931500
ucuuuacuaacuagguggc

SEQ ID NO: 931502 - RNA, 19 nt, Artificial Sequence
  Description of Artificial Sequence: Synthetic oligonucleotide
  Sense strand starting at position 31 of SEQ ID NO: 913492
gcccgauuggcagaaggua

SEQ ID NO: 931503 - RNA, 19 nt, Artificial Sequence
  Description of Artificial Sequence: Synthetic oligonucleotide
  Antisense strand to SEQ ID NO: 931502
uaccuucugccaaucgggc

SEQ ID NO: 931504 - RNA, 19 nt, Artificial Sequence
  Description of Artificial Sequence: Synthetic oligonucleotide
  Sense strand starting at position 856 of SEQ ID NO: 913492
ccaugaugcuuacuaagca

SEQ ID NO: 931505 - RNA, 19 nt, Artificial Sequence
  Description of Artificial Sequence: Synthetic oligonucleotide
  Antisense strand to SEQ ID NO: 931504
ugcuuaguaagcaucaugg

SEQ ID NO: 931506 - RNA, 19 nt, Artificial Sequence
  Description of Artificial Sequence: Synthetic oligonucleotide
  Sense strand starting at position 2386 of SEQ ID NO: 913492
uuugcuaaccugggaugua

SEQ ID NO: 931507 - RNA, 19 nt, Artificial Sequence
  Description of Artificial Sequence: Synthetic oligonucleotide
  Antisense strand to SEQ ID NO: 931506
uacaucccagguuagcaaa

SEQ ID NO: 931508 - RNA, 19 nt, Artificial Sequence
  Description of Artificial Sequence: Synthetic oligonucleotide
  Sense strand starting at position 3168 of SEQ ID NO: 913492
ccauguugauucuucuauc

SEQ ID NO: 931509 - RNA, 19 nt, Artificial Sequence
  Description of Artificial Sequence: Synthetic oligonucleotide
  Antisense strand to SEQ ID NO: 931508
gauagaagaaucaacaugg

SEQ ID NO: 931510 - RNA, 19 nt, Artificial Sequence
  Description of Artificial Sequence: Synthetic oligonucleotide
  Sense strand starting at position 503 of SEQ ID NO: 913492
ccugauuggcucugaguga

SEQ ID NO: 931511 - RNA, 19 nt, Artificial Sequence
  Description of Artificial Sequence: Synthetic oligonucleotide
  Antisense strand to SEQ ID NO: 931510
ucacucagagccaaucagg

SEQ ID NO: 931512 - RNA, 19 nt, Artificial Sequence
  Description of Artificial Sequence: Synthetic oligonucleotide
  Sense strand starting at position 865 of SEQ ID NO: 913492
uuacuaagcaggugauguu

SEQ ID NO: 931513 - RNA, 19 nt, Artificial Sequence
  Description of Artificial Sequence: Synthetic oligonucleotide
  Antisense strand to SEQ ID NO: 931512
aacaucaccugcuuaguaa

SEQ ID NO: 931514 - RNA, 19 nt, Artificial Sequence
  Description of Artificial Sequence: Synthetic oligonucleotide
  Sense strand starting at position 2396 of SEQ ID NO: 913492
ugggauguagcugguucua

SEQ ID NO: 931515 - RNA, 19 nt, Artificial Sequence
  Description of Artificial Sequence: Synthetic oligonucleotide
  Antisense strand to SEQ ID NO: 931514
uagaaccagcuacauccca

SEQ ID NO: 931516 - RNA, 19 nt, Artificial Sequence
  Description of Artificial Sequence: Synthetic oligonucleotide
  Sense strand starting at position 3159 of SEQ ID NO: 913492
uugucacagccauguugau

SEQ ID NO: 931517 - RNA, 19 nt, Artificial Sequence
  Description of Artificial Sequence: Synthetic oligonucleotide
  Antisense strand to SEQ ID NO: 931516
aucaacauggcugugacaa

SEQ ID NO: 931518 - RNA, 19 nt, Artificial Sequence
  Description of Artificial Sequence: Synthetic oligonucleotide
  Sense strand starting at position 1010 of SEQ ID NO: 913492
aguuuccauuuguaaagua

SEQ ID NO: 931519 - RNA, 19 nt, Artificial Sequence
  Description of Artificial Sequence: Synthetic oligonucleotide
  Antisense strand to SEQ ID NO: 931518
uacuuuacaaauggaaacu

SEQ ID NO: 931520 - RNA, 19 nt, Artificial Sequence
  Description of Artificial Sequence: Synthetic oligonucleotide
  Sense strand starting at position 211 of SEQ ID NO: 913492
accaguucugcuggcugaa

SEQ ID NO: 931521 - RNA, 19 nt, Artificial Sequence
  Description of Artificial Sequence: Synthetic oligonucleotide
  Antisense strand to SEQ ID NO: 931520
uucagccagcagaacuggu

SEQ ID NO: 931522 - RNA, 19 nt, Artificial Sequence
  Description of Artificial Sequence: Synthetic oligonucleotide
  Sense strand starting at position 1056 of SEQ ID NO: 913492
cuauguaacugcuuguuua

SEQ ID NO: 931523 - RNA, 19 nt, Artificial Sequence
  Description of Artificial Sequence: Synthetic oligonucleotide
  Antisense strand to SEQ ID NO: 931522
uaaacaagcaguuacauag

SEQ ID NO: 931524 - RNA, 19 nt, Artificial Sequence
  Description of Artificial Sequence: Synthetic oligonucleotide
  Sense strand starting at position 906 of SEQ ID NO: 913492
gcaccucuguguccacauu

SEQ ID NO: 931525 - RNA, 19 nt, Artificial Sequence
  Description of Artificial Sequence: Synthetic oligonucleotide
  Antisense strand to SEQ ID NO: 931524
aauguggacacagaggugc

SEQ ID NO: 931526 - RNA, 19 nt, Artificial Sequence
  Description of Artificial Sequence: Synthetic oligonucleotide
  Sense strand starting at position 162 of SEQ ID NO: 913492
ccuauaagaucauaggguu

SEQ ID NO: 931527 - RNA, 19 nt, Artificial Sequence
  Description of Artificial Sequence: Synthetic oligonucleotide
  Antisense strand to SEQ ID NO: 931526
aacccuaugaucuuauagg

SEQ ID NO: 931528 - RNA, 19 nt, Artificial Sequence
  Description of Artificial Sequence: Synthetic oligonucleotide
  Sense strand starting at position 1518 of SEQ ID NO: 913492
cuuguuccugccuguuaga

SEQ ID NO: 931529 - RNA, 19 nt, Artificial Sequence
  Description of Artificial Sequence: Synthetic oligonucleotide
  Antisense strand to SEQ ID NO: 931528
ucuaacaggcaggaacaag

SEQ ID NO: 931530 - RNA, 19 nt, Artificial Sequence
  Description of Artificial Sequence: Synthetic oligonucleotide
  Sense strand starting at position 1146 of SEQ ID NO: 913492
aaugguaaauuucguuaug

SEQ ID NO: 931531 - RNA, 19 nt, Artificial Sequence
  Description of Artificial Sequence: Synthetic oligonucleotide
  Antisense strand to SEQ ID NO: 931530
cauaacgaaauuuaccauu

SEQ ID NO: 931532 - RNA, 19 nt, Artificial Sequence
  Description of Artificial Sequence: Synthetic oligonucleotide
  Sense strand starting at position 1309 of SEQ ID NO: 913492
uugauuaaauagggaguga

SEQ ID NO: 931533 - RNA, 19 nt, Artificial Sequence
  Description of Artificial Sequence: Synthetic oligonucleotide
  Antisense strand to SEQ ID NO: 931532
ucacucccuauuuaaucaa

SEQ ID NO: 931534 - RNA, 19 nt, Artificial Sequence
  Description of Artificial Sequence: Synthetic oligonucleotide
  Sense strand starting at position 3647 of SEQ ID NO: 913493
gggagaacuuuaucaaagc

SEQ ID NO: 931535 - RNA, 19 nt, Artificial Sequence
  Description of Artificial Sequence: Synthetic oligonucleotide
  Antisense strand to SEQ ID NO: 931534
gcuuugauaaaguucuccc

SEQ ID NO: 931536 - RNA, 19 nt, Artificial Sequence
  Description of Artificial Sequence: Synthetic oligonucleotide
  Sense strand starting at position 300 of SEQ ID NO: 913493
gaggucuuccucuaaucag

SEQ ID NO: 931537 - RNA, 19 nt, Artificial Sequence
  Description of Artificial Sequence: Synthetic oligonucleotide
  Antisense strand to SEQ ID NO: 931536
cugauuagaggaagaccuc

SEQ ID NO: 931538 - RNA, 19 nt, Artificial Sequence
  Description of Artificial Sequence: Synthetic oligonucleotide
  Sense strand starting at position 432 of SEQ ID NO: 913493
ugcagagcuccagagacau

SEQ ID NO: 931539 - RNA, 19 nt, Artificial Sequence
  Description of Artificial Sequence: Synthetic oligonucleotide
  Antisense strand to SEQ ID NO: 931538
augucucuggagcucugca

SEQ ID NO: 931540 - RNA, 19 nt, Artificial Sequence
  Description of Artificial Sequence: Synthetic oligonucleotide
  Sense strand starting at position 981 of SEQ ID NO: 913493
agggaaggcucaccuugau

SEQ ID NO: 931541 - RNA, 19 nt, Artificial Sequence
  Description of Artificial Sequence: Synthetic oligonucleotide
  Antisense strand to SEQ ID NO: 931540
aucaaggugagccuucccu

SEQ ID NO: 931542 - RNA, 19 nt, Artificial Sequence
  Description of Artificial Sequence: Synthetic oligonucleotide
  Sense strand starting at position 1486 of SEQ ID NO: 913493
gcccauuucccuggccaua

SEQ ID NO: 931543 - RNA, 19 nt, Artificial Sequence
  Description of Artificial Sequence: Synthetic oligonucleotide
  Antisense strand to SEQ ID NO: 931542
uauggccagggaaaugggc

SEQ ID NO: 931544 - RNA, 19 nt, Artificial Sequence
  Description of Artificial Sequence: Synthetic oligonucleotide
  Sense strand starting at position 1128 of SEQ ID NO: 913493
ggauguuagcuggagcaga

SEQ ID NO: 931545 - RNA, 19 nt, Artificial Sequence
  Description of Artificial Sequence: Synthetic oligonucleotide
  Antisense strand to SEQ ID NO: 931544
ucugcuccagcuaacaucc

SEQ ID NO: 931546 - RNA, 19 nt, Artificial Sequence
  Description of Artificial Sequence: Synthetic oligonucleotide
  Sense strand starting at position 303 of SEQ ID NO: 913493
gucuuccucuaaucagaga

SEQ ID NO: 931547 - RNA, 19 nt, Artificial Sequence
  Description of Artificial Sequence: Synthetic oligonucleotide
  Antisense strand to SEQ ID NO: 931546
ucucugauuagaggaagac

SEQ ID NO: 931548 - RNA, 19 nt, Artificial Sequence
  Description of Artificial Sequence: Synthetic oligonucleotide
  Sense strand starting at position 731 of SEQ ID NO: 913493
acaucugauccuggugauc

SEQ ID NO: 931549 - RNA, 19 nt, Artificial Sequence
  Description of Artificial Sequence: Synthetic oligonucleotide
  Antisense strand to SEQ ID NO: 931548
gaucaccaggaucagaugu

SEQ ID NO: 931550 - RNA, 19 nt, Artificial Sequence
  Description of Artificial Sequence: Synthetic oligonucleotide
  Sense strand starting at position 288 of SEQ ID NO: 913493
agguauguucuugaggucu

SEQ ID NO: 931551 - RNA, 19 nt, Artificial Sequence
  Description of Artificial Sequence: Synthetic oligonucleotide
  Antisense strand to SEQ ID NO: 931550
agaccucaagaacauaccu

SEQ ID NO: 931552 - RNA, 19 nt, Artificial Sequence
  Description of Artificial Sequence: Synthetic oligonucleotide
  Sense strand starting at position 3533 of SEQ ID NO: 913493
uuugaauguuugcugagga

SEQ ID NO: 931553 - RNA, 19 nt, Artificial Sequence
  Description of Artificial Sequence: Synthetic oligonucleotide
  Antisense strand to SEQ ID NO: 931552
uccucagcaaacauucaaa

SEQ ID NO: 931554 - RNA, 19 nt, Artificial Sequence
  Description of Artificial Sequence: Synthetic oligonucleotide
  Sense strand starting at position 2642 of SEQ ID NO: 913493
gccucaagccuccaaaguu

SEQ ID NO: 931555 - RNA, 19 nt, Artificial Sequence
  Description of Artificial Sequence: Synthetic oligonucleotide
  Antisense strand to SEQ ID NO: 931554
aacuuuggaggcuugaggc

SEQ ID NO: 931556 - RNA, 19 nt, Artificial Sequence
  Description of Artificial Sequence: Synthetic oligonucleotide
  Sense strand starting at position 3530 of SEQ ID NO: 913493
auguuugaauguuugcuga

SEQ ID NO: 931557 - RNA, 19 nt, Artificial Sequence
  Description of Artificial Sequence: Synthetic oligonucleotide
  Antisense strand to SEQ ID NO: 931556
ucagcaaacauucaaacau

SEQ ID NO: 931558 - RNA, 19 nt, Artificial Sequence
  Description of Artificial Sequence: Synthetic oligonucleotide
  Sense strand starting at position 306 of SEQ ID NO: 913493
uuccucuaaucagagaaag

SEQ ID NO: 931559 - RNA, 19 nt, Artificial Sequence
  Description of Artificial Sequence: Synthetic oligonucleotide
  Antisense strand to SEQ ID NO: 931558
cuuucucugauuagaggaa

SEQ ID NO: 931560 - RNA, 19 nt, Artificial Sequence
  Description of Artificial Sequence: Synthetic oligonucleotide
  Sense strand starting at position 3075 of SEQ ID NO: 913493
ugcgcauggccugaauacu

SEQ ID NO: 931561 - RNA, 19 nt, Artificial Sequence
  Description of Artificial Sequence: Synthetic oligonucleotide
  Antisense strand to SEQ ID NO: 931560
aguauucaggccaugcgca

SEQ ID NO: 931562 - RNA, 19 nt, Artificial Sequence
  Description of Artificial Sequence: Synthetic oligonucleotide
  Sense strand starting at position 2698 of SEQ ID NO: 913493
cugggacagcuuuguguuu

SEQ ID NO: 931563 - RNA, 19 nt, Artificial Sequence
  Description of Artificial Sequence: Synthetic oligonucleotide
  Antisense strand to SEQ ID NO: 931562
aaacacaaagcugucccag

SEQ ID NO: 931564 - RNA, 19 nt, Artificial Sequence
  Description of Artificial Sequence: Synthetic oligonucleotide
  Sense strand starting at position 3648 of SEQ ID NO: 913493
ggagaacuuuaucaaagcu

SEQ ID NO: 931565 - RNA, 19 nt, Artificial Sequence
  Description of Artificial Sequence: Synthetic oligonucleotide
  Antisense strand to SEQ ID NO: 931564
agcuuugauaaaguucucc

SEQ ID NO: 931566 - RNA, 19 nt, Artificial Sequence
  Description of Artificial Sequence: Synthetic oligonucleotide
  Sense strand starting at position 730 of SEQ ID NO: 913493
gacaucugauccuggugau

SEQ ID NO: 931567 - RNA, 19 nt, Artificial Sequence
  Description of Artificial Sequence: Synthetic oligonucleotide
  Antisense strand to SEQ ID NO: 931566
aucaccaggaucagauguc

SEQ ID NO: 931568 - RNA, 19 nt, Artificial Sequence
  Description of Artificial Sequence: Synthetic oligonucleotide
  Sense strand starting at position 733 of SEQ ID NO: 913493
aucugauccuggugauccu

SEQ ID NO: 931569 - RNA, 19 nt, Artificial Sequence
  Description of Artificial Sequence: Synthetic oligonucleotide
  Antisense strand to SEQ ID NO: 931568
aggaucaccaggaucagau

SEQ ID NO: 931570 - RNA, 19 nt, Artificial Sequence
  Description of Artificial Sequence: Synthetic oligonucleotide
  Sense strand starting at position 3534 of SEQ ID NO: 913493
uugaauguuugcugaggac

SEQ ID NO: 931571 - RNA, 19 nt, Artificial Sequence
  Description of Artificial Sequence: Synthetic oligonucleotide
  Antisense strand to SEQ ID NO: 931570
guccucagcaaacauucaa

SEQ ID NO: 931572 - RNA, 19 nt, Artificial Sequence
  Description of Artificial Sequence: Synthetic oligonucleotide
  Sense strand starting at position 2162 of SEQ ID NO: 913493
ccucuugugucuggagaga

SEQ ID NO: 931573 - RNA, 19 nt, Artificial Sequence
  Description of Artificial Sequence: Synthetic oligonucleotide
  Antisense strand to SEQ ID NO: 931572
ucucuccagacacaagagg

SEQ ID NO: 931574 - RNA, 19 nt, Artificial Sequence
  Description of Artificial Sequence: Synthetic oligonucleotide
  Sense strand starting at position 287 of SEQ ID NO: 913493
aagguauguucuugagguc

SEQ ID NO: 931575 - RNA, 19 nt, Artificial Sequence
  Description of Artificial Sequence: Synthetic oligonucleotide
  Antisense strand to SEQ ID NO: 931574
gaccucaagaacauaccuu

SEQ ID NO: 931576 - RNA, 19 nt, Artificial Sequence
  Description of Artificial Sequence: Synthetic oligonucleotide
  Sense strand starting at position 2289 of SEQ ID NO: 913493
cucacacaguccuguagua

SEQ ID NO: 931577 - RNA, 19 nt, Artificial Sequence
  Description of Artificial Sequence: Synthetic oligonucleotide
  Antisense strand to SEQ ID NO: 931576
uacuacaggacugugugag

SEQ ID NO: 931578 - RNA, 19 nt, Artificial Sequence
  Description of Artificial Sequence: Synthetic oligonucleotide
  Sense strand starting at position 375 of SEQ ID NO: 913493
agcagauccugcugucuga

SEQ ID NO: 931579 - RNA, 19 nt, Artificial Sequence
  Description of Artificial Sequence: Synthetic oligonucleotide
  Antisense strand to SEQ ID NO: 931578
ucagacagcaggaucugcu

SEQ ID NO: 931580 - RNA, 19 nt, Artificial Sequence
  Description of Artificial Sequence: Synthetic oligonucleotide
  Sense strand starting at position 290 of SEQ ID NO: 913493
guauguucuugaggucuuc

SEQ ID NO: 931581 - RNA, 19 nt, Artificial Sequence
  Description of Artificial Sequence: Synthetic oligonucleotide
  Antisense strand to SEQ ID NO: 931580
gaagaccucaagaacauac

SEQ ID NO: 931582 - RNA, 19 nt, Artificial Sequence
  Description of Artificial Sequence: Synthetic oligonucleotide
  Sense strand starting at position 3063 of SEQ ID NO: 913494
uguguucucagauagagga

SEQ ID NO: 931583 - RNA, 19 nt, Artificial Sequence
  Description of Artificial Sequence: Synthetic oligonucleotide
  Antisense strand to SEQ ID NO: 931582
uccucuaucugagaacaca

SEQ ID NO: 931584 - RNA, 19 nt, Artificial Sequence
  Description of Artificial Sequence: Synthetic oligonucleotide
  Sense strand starting at position 3486 of SEQ ID NO: 913494
caagguuuccuggaguaga

SEQ ID NO: 931585 - RNA, 19 nt, Artificial Sequence
  Description of Artificial Sequence: Synthetic oligonucleotide
  Antisense strand to SEQ ID NO: 931584
ucuacuccaggaaaccuug

SEQ ID NO: 931586 - RNA, 19 nt, Artificial Sequence
  Description of Artificial Sequence: Synthetic oligonucleotide
  Sense strand starting at position 296 of SEQ ID NO: 913494
ggcugcuucccucuuugua

SEQ ID NO: 931587 - RNA, 19 nt, Artificial Sequence
  Description of Artificial Sequence: Synthetic oligonucleotide
  Antisense strand to SEQ ID NO: 931586
uacaaagagggaagcagcc

SEQ ID NO: 931588 - RNA, 19 nt, Artificial Sequence
  Description of Artificial Sequence: Synthetic oligonucleotide
  Sense strand starting at position 361 of SEQ ID NO: 913494
gauuguaaucuauaacacg

SEQ ID NO: 931589 - RNA, 19 nt, Artificial Sequence
  Description of Artificial Sequence: Synthetic oligonucleotide
  Antisense strand to SEQ ID NO: 931588
cguguuauagauuacaauc

SEQ ID NO: 931590 - RNA, 19 nt, Artificial Sequence
  Description of Artificial Sequence: Synthetic oligonucleotide
  Sense strand starting at position 3419 of SEQ ID NO: 913494
gcaagucccauauagggau

SEQ ID NO: 931591 - RNA, 19 nt, Artificial Sequence
  Description of Artificial Sequence: Synthetic oligonucleotide
  Antisense strand to SEQ ID NO: 931590
aucccuauaugggacuugc

SEQ ID NO: 931592 - RNA, 19 nt, Artificial Sequence
  Description of Artificial Sequence: Synthetic oligonucleotide
  Sense strand starting at position 297 of SEQ ID NO: 913494
gcugcuucccucuuuguau

SEQ ID NO: 931593 - RNA, 19 nt, Artificial Sequence
  Description of Artificial Sequence: Synthetic oligonucleotide
  Antisense strand to SEQ ID NO: 931592
auacaaagagggaagcagc

SEQ ID NO: 931594 - RNA, 19 nt, Artificial Sequence
  Description of Artificial Sequence: Synthetic oligonucleotide
  Sense strand starting at position 3104 of SEQ ID NO: 913494
gggagaggucuccacagcu

SEQ ID NO: 931595 - RNA, 19 nt, Artificial Sequence
  Description of Artificial Sequence: Synthetic oligonucleotide
  Antisense strand to SEQ ID NO: 931594
agcuguggagaccucuccc

SEQ ID NO: 931596 - RNA, 19 nt, Artificial Sequence
  Description of Artificial Sequence: Synthetic oligonucleotide
  Sense strand starting at position 3351 of SEQ ID NO: 913494
cuuuaaauugcacagaugu

SEQ ID NO: 931597 - RNA, 19 nt, Artificial Sequence
  Description of Artificial Sequence: Synthetic oligonucleotide
  Antisense strand to SEQ ID NO: 931596
acaucugugcaauuuaaag

SEQ ID NO: 931598 - RNA, 19 nt, Artificial Sequence
  Description of Artificial Sequence: Synthetic oligonucleotide
  Sense strand starting at position 1722 of SEQ ID NO: 913494
ggaagugguccaggaccau

SEQ ID NO: 931599 - RNA, 19 nt, Artificial Sequence
  Description of Artificial Sequence: Synthetic oligonucleotide
  Antisense strand to SEQ ID NO: 931598
augguccuggaccacuucc

SEQ ID NO: 931600 - RNA, 19 nt, Artificial Sequence
  Description of Artificial Sequence: Synthetic oligonucleotide
  Sense strand starting at position 349 of SEQ ID NO: 913494
agccacuuuccagauugua

SEQ ID NO: 931601 - RNA, 19 nt, Artificial Sequence
  Description of Artificial Sequence: Synthetic oligonucleotide
  Antisense strand to SEQ ID NO: 931600
uacaaucuggaaaguggcu

SEQ ID NO: 931602 - RNA, 19 nt, Artificial Sequence
  Description of Artificial Sequence: Synthetic oligonucleotide
  Sense strand starting at position 3191 of SEQ ID NO: 913494
ggucuagcccuacaugauc

SEQ ID NO: 931603 - RNA, 19 nt, Artificial Sequence
  Description of Artificial Sequence: Synthetic oligonucleotide
  Antisense strand to SEQ ID NO: 931602
gaucauguagggcuagacc

SEQ ID NO: 931604 - RNA, 19 nt, Artificial Sequence
  Description of Artificial Sequence: Synthetic oligonucleotide
  Sense strand starting at position 3189 of SEQ ID NO: 913494
uuggucuagcccuacauga

SEQ ID NO: 931605 - RNA, 19 nt, Artificial Sequence
  Description of Artificial Sequence: Synthetic oligonucleotide
  Antisense strand to SEQ ID NO: 931604
ucauguagggcuagaccaa

SEQ ID NO: 931606 - RNA, 19 nt, Artificial Sequence
  Description of Artificial Sequence: Synthetic oligonucleotide
  Sense strand starting at position 3658 of SEQ ID NO: 913494
gcuguaugugugcuuaugu

SEQ ID NO: 931607 - RNA, 19 nt, Artificial Sequence
  Description of Artificial Sequence: Synthetic oligonucleotide
  Antisense strand to SEQ ID NO: 931606
acauaagcacacauacagc

SEQ ID NO: 931608 - RNA, 19 nt, Artificial Sequence
  Description of Artificial Sequence: Synthetic oligonucleotide
  Sense strand starting at position 1596 of SEQ ID NO: 913494
ggaugccagcucuggagaa

SEQ ID NO: 931609 - RNA, 19 nt, Artificial Sequence
  Description of Artificial Sequence: Synthetic oligonucleotide
  Antisense strand to SEQ ID NO: 931608
uucuccagagcuggcaucc

SEQ ID NO: 931610 - RNA, 19 nt, Artificial Sequence
  Description of Artificial Sequence: Synthetic oligonucleotide
  Sense strand starting at position 3783 of SEQ ID NO: 913494
gugacuuauucucucugag

SEQ ID NO: 931611 - RNA, 19 nt, Artificial Sequence
  Description of Artificial Sequence: Synthetic oligonucleotide
  Antisense strand to SEQ ID NO: 931610
cucagagagaauaagucac

SEQ ID NO: 931612 - RNA, 19 nt, Artificial Sequence
  Description of Artificial Sequence: Synthetic oligonucleotide
  Sense strand starting at position 3785 of SEQ ID NO: 913494
gacuuauucucucugaggu

SEQ ID NO: 931613 - RNA, 19 nt, Artificial Sequence
  Description of Artificial Sequence: Synthetic oligonucleotide
  Antisense strand to SEQ ID NO: 931612
accucagagagaauaaguc

SEQ ID NO: 931614 - RNA, 19 nt, Artificial Sequence
  Description of Artificial Sequence: Synthetic oligonucleotide
  Sense strand starting at position 3447 of SEQ ID NO: 913494
gagucuugccguggauuuc

SEQ ID NO: 931615 - RNA, 19 nt, Artificial Sequence
  Description of Artificial Sequence: Synthetic oligonucleotide
  Antisense strand to SEQ ID NO: 931614
gaaauccacggcaagacuc

SEQ ID NO: 931616 - RNA, 19 nt, Artificial Sequence
  Description of Artificial Sequence: Synthetic oligonucleotide
  Sense strand starting at position 3446 of SEQ ID NO: 913494
ugagucuugccguggauuu

SEQ ID NO: 931617 - RNA, 19 nt, Artificial Sequence
  Description of Artificial Sequence: Synthetic oligonucleotide
  Antisense strand to SEQ ID NO: 931616
aaauccacggcaagacuca

SEQ ID NO: 931618 - RNA, 19 nt, Artificial Sequence
  Description of Artificial Sequence: Synthetic oligonucleotide
  Sense strand starting at position 3358 of SEQ ID NO: 913494
uugcacagauguucugaau

SEQ ID NO: 931619 - RNA, 19 nt, Artificial Sequence
  Description of Artificial Sequence: Synthetic oligonucleotide
  Antisense strand to SEQ ID NO: 931618
auucagaacaucugugcaa

SEQ ID NO: 931620 - RNA, 19 nt, Artificial Sequence
  Description of Artificial Sequence: Synthetic oligonucleotide
  Sense strand starting at position 3772 of SEQ ID NO: 913494
cgaccaagcaagugacuua

SEQ ID NO: 931621 - RNA, 19 nt, Artificial Sequence
  Description of Artificial Sequence: Synthetic oligonucleotide
  Antisense strand to SEQ ID NO: 931620
uaagucacuugcuuggucg

SEQ ID NO: 931622 - RNA, 19 nt, Artificial Sequence
  Description of Artificial Sequence: Synthetic oligonucleotide
  Sense strand starting at position 249 of SEQ ID NO: 913494
aagguacugcccugaacuu

SEQ ID NO: 931623 - RNA, 19 nt, Artificial Sequence
  Description of Artificial Sequence: Synthetic oligonucleotide
  Antisense strand to SEQ ID NO: 931622
aaguucagggcaguaccuu

SEQ ID NO: 931624 - RNA, 19 nt, Artificial Sequence
  Description of Artificial Sequence: Synthetic oligonucleotide
  Sense strand starting at position 691 of SEQ ID NO: 913494
ugcauaucucagcaaguug

SEQ ID NO: 931625 - RNA, 19 nt, Artificial Sequence
  Description of Artificial Sequence: Synthetic oligonucleotide
  Antisense strand to SEQ ID NO: 931624
caacuugcugagauaugca

SEQ ID NO: 931626 - RNA, 19 nt, Artificial Sequence
  Description of Artificial Sequence: Synthetic oligonucleotide
  Sense strand starting at position 3592 of SEQ ID NO: 913494
ucaguucccucagucaaca

SEQ ID NO: 931627 - RNA, 19 nt, Artificial Sequence
  Description of Artificial Sequence: Synthetic oligonucleotide
  Antisense strand to SEQ ID NO: 931626
uguugacugagggaacuga

SEQ ID NO: 931628 - RNA, 19 nt, Artificial Sequence
  Description of Artificial Sequence: Synthetic oligonucleotide
  Sense strand starting at position 3058 of SEQ ID NO: 913494
guggauguguucucagaua

SEQ ID NO: 931629 - RNA, 19 nt, Artificial Sequence
  Description of Artificial Sequence: Synthetic oligonucleotide
  Antisense strand to SEQ ID NO: 931628
uaucugagaacacauccac

SEQ ID NO: 931630 - RNA, 19 nt, Artificial Sequence
  Description of Artificial Sequence: Synthetic oligonucleotide
  Sense strand starting at position 2244 of SEQ ID NO: 913494
ccaaguuguccugaggcuu

SEQ ID NO: 931631 - RNA, 19 nt, Artificial Sequence
  Description of Artificial Sequence: Synthetic oligonucleotide
  Antisense strand to SEQ ID NO: 931630
aagccucaggacaacuugg

SEQ ID NO: 931632 - RNA, 19 nt, Artificial Sequence
  Description of Artificial Sequence: Synthetic oligonucleotide
  Sense strand starting at position 2256 of SEQ ID NO: 913494
gaggcuuucccaggguacu

SEQ ID NO: 931633 - RNA, 19 nt, Artificial Sequence
  Description of Artificial Sequence: Synthetic oligonucleotide
  Antisense strand to SEQ ID NO: 931632
aguacccugggaaagccuc

SEQ ID NO: 931634 - RNA, 19 nt, Artificial Sequence
  Description of Artificial Sequence: Synthetic oligonucleotide
  Sense strand starting at position 338 of SEQ ID NO: 913494
uugugaugaucagccacuu

SEQ ID NO: 931635 - RNA, 19 nt, Artificial Sequence
  Description of Artificial Sequence: Synthetic oligonucleotide
  Antisense strand to SEQ ID NO: 931634
aaguggcugaucaucacaa

SEQ ID NO: 931636 - RNA, 19 nt, Artificial Sequence
  Description of Artificial Sequence: Synthetic oligonucleotide
  Sense strand starting at position 865 of SEQ ID NO: 913494
gacuuaagucgccauggca

SEQ ID NO: 931637 - RNA, 19 nt, Artificial Sequence
  Description of Artificial Sequence: Synthetic oligonucleotide
  Antisense strand to SEQ ID NO: 931636
ugccauggcgacuuaaguc

SEQ ID NO: 931638 - RNA, 19 nt, Artificial Sequence
  Description of Artificial Sequence: Synthetic oligonucleotide
  Sense strand starting at position 3296 of SEQ ID NO: 913494
ggccgaaacccuuguugag

SEQ ID NO: 931639 - RNA, 19 nt, Artificial Sequence
  Description of Artificial Sequence: Synthetic oligonucleotide
  Antisense strand to SEQ ID NO: 931638
cucaacaaggguuucggcc

SEQ ID NO: 931640 - RNA, 19 nt, Artificial Sequence
  Description of Artificial Sequence: Synthetic oligonucleotide
  Sense strand starting at position 3506 of SEQ ID NO: 913494
gucuuggugggccgagaaa

SEQ ID NO: 931641 - RNA, 19 nt, Artificial Sequence
  Description of Artificial Sequence: Synthetic oligonucleotide
  Antisense strand to SEQ ID NO: 931640
uuucucggcccaccaagac

SEQ ID NO: 931642 - RNA, 19 nt, Artificial Sequence
  Description of Artificial Sequence: Synthetic oligonucleotide
  Sense strand starting at position 3216 of SEQ ID NO: 913494
gagcaagggucagggauuu

SEQ ID NO: 931643 - RNA, 19 nt, Artificial Sequence
  Description of Artificial Sequence: Synthetic oligonucleotide
  Antisense strand to SEQ ID NO: 931642
aaaucccugacccuugcuc

SEQ ID NO: 931644 - RNA, 19 nt, Artificial Sequence
  Description of Artificial Sequence: Synthetic oligonucleotide
  Sense strand starting at position 3709 of SEQ ID NO: 913494
cugcucucccaaugugauu

SEQ ID NO: 931645 - RNA, 19 nt, Artificial Sequence
  Description of Artificial Sequence: Synthetic oligonucleotide
  Antisense strand to SEQ ID NO: 931644
aaucacauugggagagcag

SEQ ID NO: 931646 - RNA, 19 nt, Artificial Sequence
  Description of Artificial Sequence: Synthetic oligonucleotide
  Sense strand starting at position 690 of SEQ ID NO: 913494
cugcauaucucagcaaguu

SEQ ID NO: 931647 - RNA, 19 nt, Artificial Sequence
  Description of Artificial Sequence: Synthetic oligonucleotide
  Antisense strand to SEQ ID NO: 931646
aacuugcugagauaugcag

SEQ ID NO: 931648 - RNA, 19 nt, Artificial Sequence
  Description of Artificial Sequence: Synthetic oligonucleotide
  Sense strand starting at position 304 of SEQ ID NO: 913494
cccucuuuguauguuuauu

SEQ ID NO: 931649 - RNA, 19 nt, Artificial Sequence
  Description of Artificial Sequence: Synthetic oligonucleotide
  Antisense strand to SEQ ID NO: 931648
aauaaacauacaaagaggg

SEQ ID NO: 931650 - RNA, 19 nt, Artificial Sequence
  Description of Artificial Sequence: Synthetic oligonucleotide
  Sense strand starting at position 2909 of SEQ ID NO: 913494
gguaaagcuccuugggcuu

SEQ ID NO: 931651 - RNA, 19 nt, Artificial Sequence
  Description of Artificial Sequence: Synthetic oligonucleotide
  Antisense strand to SEQ ID NO: 931650
aagcccaaggagcuuuacc

SEQ ID NO: 931652 - RNA, 19 nt, Artificial Sequence
  Description of Artificial Sequence: Synthetic oligonucleotide
  Sense strand starting at position 2395 of SEQ ID NO: 913494
ccgagagggccuugccuua

SEQ ID NO: 931653 - RNA, 19 nt, Artificial Sequence
  Description of Artificial Sequence: Synthetic oligonucleotide
  Antisense strand to SEQ ID NO: 931652
uaaggcaaggcccucucgg

SEQ ID NO: 931654 - RNA, 19 nt, Artificial Sequence
  Description of Artificial Sequence: Synthetic oligonucleotide
  Sense strand starting at position 3443 of SEQ ID NO: 913494
gacugagucuugccgugga

SEQ ID NO: 931655 - RNA, 19 nt, Artificial Sequence
  Description of Artificial Sequence: Synthetic oligonucleotide
  Antisense strand to SEQ ID NO: 931654
uccacggcaagacucaguc

SEQ ID NO: 931656 - RNA, 19 nt, Artificial Sequence
  Description of Artificial Sequence: Synthetic oligonucleotide
  Sense strand starting at position 429 of SEQ ID NO: 913494
ucugcucagccugguaaua

SEQ ID NO: 931657 - RNA, 19 nt, Artificial Sequence
  Description of Artificial Sequence: Synthetic oligonucleotide
  Antisense strand to SEQ ID NO: 931656
uauuaccaggcugagcaga

SEQ ID NO: 931658 - RNA, 19 nt, Artificial Sequence
  Description of Artificial Sequence: Synthetic oligonucleotide
  Sense strand starting at position 3308 of SEQ ID NO: 913494
uguugagucuccuuaggcu

SEQ ID NO: 931659 - RNA, 19 nt, Artificial Sequence
  Description of Artificial Sequence: Synthetic oligonucleotide
  Antisense strand to SEQ ID NO: 931658
agccuaaggagacucaaca

SEQ ID NO: 931660 - RNA, 19 nt, Artificial Sequence
  Description of Artificial Sequence: Synthetic oligonucleotide
  Sense strand starting at position 3663 of SEQ ID NO: 913494
augugugcuuauguauauu

SEQ ID NO: 931661 - RNA, 19 nt, Artificial Sequence
  Description of Artificial Sequence: Synthetic oligonucleotide
  Antisense strand to SEQ ID NO: 931660
aauauacauaagcacacau

SEQ ID NO: 931662 - RNA, 19 nt, Artificial Sequence
  Description of Artificial Sequence: Synthetic oligonucleotide
  Sense strand starting at position 842 of SEQ ID NO: 913495
agugcaauuccacagauaa

SEQ ID NO: 931663 - RNA, 19 nt, Artificial Sequence
  Description of Artificial Sequence: Synthetic oligonucleotide
  Antisense strand to SEQ ID NO: 931662
uuaucuguggaauugcacu

SEQ ID NO: 931664 - RNA, 19 nt, Artificial Sequence
  Description of Artificial Sequence: Synthetic oligonucleotide
  Sense strand starting at position 2761 of SEQ ID NO: 913495
ccaucauauccuugagaga

SEQ ID NO: 931665 - RNA, 19 nt, Artificial Sequence
  Description of Artificial Sequence: Synthetic oligonucleotide
  Antisense strand to SEQ ID NO: 931664
ucucucaaggauaugaugg

SEQ ID NO: 931666 - RNA, 19 nt, Artificial Sequence
  Description of Artificial Sequence: Synthetic oligonucleotide
  Sense strand starting at position 176 of SEQ ID NO: 913495
auggguaugguagauccua

SEQ ID NO: 931667 - RNA, 19 nt, Artificial Sequence
  Description of Artificial Sequence: Synthetic oligonucleotide
  Antisense strand to SEQ ID NO: 931666
uaggaucuaccauacccau

SEQ ID NO: 931668 - RNA, 19 nt, Artificial Sequence
  Description of Artificial Sequence: Synthetic oligonucleotide
  Sense strand starting at position 1464 of SEQ ID NO: 913495
caggcaguuccugagaaca

SEQ ID NO: 931669 - RNA, 19 nt, Artificial Sequence
  Description of Artificial Sequence: Synthetic oligonucleotide
  Antisense strand to SEQ ID NO: 931668
uguucucaggaacugccug

SEQ ID NO: 931670 - RNA, 19 nt, Artificial Sequence
  Description of Artificial Sequence: Synthetic oligonucleotide
  Sense strand starting at position 24 of SEQ ID NO: 913495
acaacuuaaugguugaauu

SEQ ID NO: 931671 - RNA, 19 nt, Artificial Sequence
  Description of Artificial Sequence: Synthetic oligonucleotide
  Antisense strand to SEQ ID NO: 931670
aauucaaccauuaaguugu

SEQ ID NO: 931672 - RNA, 19 nt, Artificial Sequence
  Description of Artificial Sequence: Synthetic oligonucleotide
  Sense strand starting at position 2760 of SEQ ID NO: 913495
uccaucauauccuugagag

SEQ ID NO: 931673 - RNA, 19 nt, Artificial Sequence
  Description of Artificial Sequence: Synthetic oligonucleotide
  Antisense strand to SEQ ID NO: 931672
cucucaaggauaugaugga

SEQ ID NO: 931674 - RNA, 19 nt, Artificial Sequence
  Description of Artificial Sequence: Synthetic oligonucleotide
  Sense strand starting at position 3280 of SEQ ID NO: 913495
uggcucaaccuugacaauu

SEQ ID NO: 931675 - RNA, 19 nt, Artificial Sequence
  Description of Artificial Sequence: Synthetic oligonucleotide
  Antisense strand to SEQ ID NO: 931674
aauugucaagguugagcca

SEQ ID NO: 931676 - RNA, 19 nt, Artificial Sequence
  Description of Artificial Sequence: Synthetic oligonucleotide
  Sense strand starting at position 537 of SEQ ID NO: 913495
gcgugugccaaaguuauac

SEQ ID NO: 931677 - RNA, 19 nt, Artificial Sequence
  Description of Artificial Sequence: Synthetic oligonucleotide
  Antisense strand to SEQ ID NO: 931676
guauaacuuuggcacacgc

SEQ ID NO: 931678 - RNA, 19 nt, Artificial Sequence
  Description of Artificial Sequence: Synthetic oligonucleotide
  Sense strand starting at position 1004 of SEQ ID NO: 913495
aggcauaauuaccuagauu

SEQ ID NO: 931679 - RNA, 19 nt, Artificial Sequence
  Description of Artificial Sequence: Synthetic oligonucleotide
  Antisense strand to SEQ ID NO: 931678
aaucuagguaauuaugccu

SEQ ID NO: 931680 - RNA, 19 nt, Artificial Sequence
  Description of Artificial Sequence: Synthetic oligonucleotide
  Sense strand starting at position 2268 of SEQ ID NO: 913495
uuucuaaaugcgugauuug

SEQ ID NO: 931681 - RNA, 19 nt, Artificial Sequence
  Description of Artificial Sequence: Synthetic oligonucleotide
  Antisense strand to SEQ ID NO: 931680
caaaucacgcauuuagaaa

SEQ ID NO: 931682 - RNA, 19 nt, Artificial Sequence
  Description of Artificial Sequence: Synthetic oligonucleotide
  Sense strand starting at position 2211 of SEQ ID NO: 913495
ucgagauuccauuacuuuc

SEQ ID NO: 931683 - RNA, 19 nt, Artificial Sequence
  Description of Artificial Sequence: Synthetic oligonucleotide
  Antisense strand to SEQ ID NO: 931682
gaaaguaauggaaucucga

SEQ ID NO: 931684 - RNA, 19 nt, Artificial Sequence
  Description of Artificial Sequence: Synthetic oligonucleotide
  Sense strand starting at position 2203 of SEQ ID NO: 913495
uguuuacaucgagauucca

SEQ ID NO: 931685 - RNA, 19 nt, Artificial Sequence
  Description of Artificial Sequence: Synthetic oligonucleotide
  Antisense strand to SEQ ID NO: 931684
uggaaucucgauguaaaca

SEQ ID NO: 931686 - RNA, 19 nt, Artificial Sequence
  Description of Artificial Sequence: Synthetic oligonucleotide
  Sense strand starting at position 1169 of SEQ ID NO: 913495
uacacugcucaugagaguu

SEQ ID NO: 931687 - RNA, 19 nt, Artificial Sequence
  Description of Artificial Sequence: Synthetic oligonucleotide
  Antisense strand to SEQ ID NO: 931686
aacucucaugagcagugua

SEQ ID NO: 931688 - RNA, 19 nt, Artificial Sequence
  Description of Artificial Sequence: Synthetic oligonucleotide
  Sense strand starting at position 393 of SEQ ID NO: 913495
uggaaacguguauauucua

SEQ ID NO: 931689 - RNA, 19 nt, Artificial Sequence
  Description of Artificial Sequence: Synthetic oligonucleotide
  Antisense strand to SEQ ID NO: 931688
uagaauauacacguuucca

SEQ ID NO: 931690 - RNA, 19 nt, Artificial Sequence
  Description of Artificial Sequence: Synthetic oligonucleotide
  Sense strand starting at position 391 of SEQ ID NO: 913495
auuggaaacguguauauuc

SEQ ID NO: 931691 - RNA, 19 nt, Artificial Sequence
  Description of Artificial Sequence: Synthetic oligonucleotide
  Antisense strand to SEQ ID NO: 931690
gaauauacacguuuccaau

SEQ ID NO: 931692 - RNA, 19 nt, Artificial Sequence
  Description of Artificial Sequence: Synthetic oligonucleotide
  Sense strand starting at position 993 of SEQ ID NO: 913495
gucagaacuccaggcauaa

SEQ ID NO: 931693 - RNA, 19 nt, Artificial Sequence
  Description of Artificial Sequence: Synthetic oligonucleotide
  Antisense strand to SEQ ID NO: 931692
uuaugccuggaguucugac

SEQ ID NO: 931694 - RNA, 19 nt, Artificial Sequence
  Description of Artificial Sequence: Synthetic oligonucleotide
  Sense strand starting at position 3846 of SEQ ID NO: 913495
ugggaauucucuucuggua

SEQ ID NO: 931695 - RNA, 19 nt, Artificial Sequence
  Description of Artificial Sequence: Synthetic oligonucleotide
  Antisense strand to SEQ ID NO: 931694
uaccagaagagaauuccca

SEQ ID NO: 931696 - RNA, 19 nt, Artificial Sequence
  Description of Artificial Sequence: Synthetic oligonucleotide
  Sense strand starting at position 387 of SEQ ID NO: 913495
agacauuggaaacguguau

SEQ ID NO: 931697 - RNA, 19 nt, Artificial Sequence
  Description of Artificial Sequence: Synthetic oligonucleotide
  Antisense strand to SEQ ID NO: 931696
auacacguuuccaaugucu

SEQ ID NO: 931698 - RNA, 19 nt, Artificial Sequence
  Description of Artificial Sequence: Synthetic oligonucleotide
  Sense strand starting at position 3627 of SEQ ID NO: 913495
ugaugcuagguguaucaau

SEQ ID NO: 931699 - RNA, 19 nt, Artificial Sequence
  Description of Artificial Sequence: Synthetic oligonucleotide
  Antisense strand to SEQ ID NO: 931698
auugauacaccuagcauca

SEQ ID NO: 931700 - RNA, 19 nt, Artificial Sequence
  Description of Artificial Sequence: Synthetic oligonucleotide
  Sense strand starting at position 3130 of SEQ ID NO: 913495
ccacuacaaguauguauua

SEQ ID NO: 931701 - RNA, 19 nt, Artificial Sequence
  Description of Artificial Sequence: Synthetic oligonucleotide
  Antisense strand to SEQ ID NO: 931700
uaauacauacuuguagugg

SEQ ID NO: 931702 - RNA, 19 nt, Artificial Sequence
  Description of Artificial Sequence: Synthetic oligonucleotide
  Sense strand starting at position 2244 of SEQ ID NO: 913495
ggguuaggaguguauaguu

SEQ ID NO: 931703 - RNA, 19 nt, Artificial Sequence
  Description of Artificial Sequence: Synthetic oligonucleotide
  Antisense strand to SEQ ID NO: 931702
aacuauacacuccuaaccc

SEQ ID NO: 931704 - RNA, 19 nt, Artificial Sequence
  Description of Artificial Sequence: Synthetic oligonucleotide
  Sense strand starting at position 573 of SEQ ID NO: 913495
uuuauaccgcuuuaugaua

SEQ ID NO: 931705 - RNA, 19 nt, Artificial Sequence
  Description of Artificial Sequence: Synthetic oligonucleotide
  Antisense strand to SEQ ID NO: 931704
uaucauaaagcgguauaaa

SEQ ID NO: 931706 - RNA, 19 nt, Artificial Sequence
  Description of Artificial Sequence: Synthetic oligonucleotide
  Sense strand starting at position 3279 of SEQ ID NO: 913495
cuggcucaaccuugacaau

SEQ ID NO: 931707 - RNA, 19 nt, Artificial Sequence
  Description of Artificial Sequence: Synthetic oligonucleotide
  Antisense strand to SEQ ID NO: 931706
auugucaagguugagccag

SEQ ID NO: 931708 - RNA, 19 nt, Artificial Sequence
  Description of Artificial Sequence: Synthetic oligonucleotide
  Sense strand starting at position 2877 of SEQ ID NO: 913495
cggagacaaugucuccuua

SEQ ID NO: 931709 - RNA, 19 nt, Artificial Sequence
  Description of Artificial Sequence: Synthetic oligonucleotide
  Antisense strand to SEQ ID NO: 931708
uaaggagacauugucuccg

SEQ ID NO: 931710 - RNA, 19 nt, Artificial Sequence
  Description of Artificial Sequence: Synthetic oligonucleotide
  Sense strand starting at position 3507 of SEQ ID NO: 913495
augucuuucucuuugagag

SEQ ID NO: 931711 - RNA, 19 nt, Artificial Sequence
  Description of Artificial Sequence: Synthetic oligonucleotide
  Antisense strand to SEQ ID NO: 931710
cucucaaagagaaagacau

SEQ ID NO: 931712 - RNA, 19 nt, Artificial Sequence
  Description of Artificial Sequence: Synthetic oligonucleotide
  Sense strand starting at position 400 of SEQ ID NO: 913495
guguauauucuauacuagu

SEQ ID NO: 931713 - RNA, 19 nt, Artificial Sequence
  Description of Artificial Sequence: Synthetic oligonucleotide
  Antisense strand to SEQ ID NO: 931712
acuaguauagaauauacac

SEQ ID NO: 931714 - RNA, 19 nt, Artificial Sequence
  Description of Artificial Sequence: Synthetic oligonucleotide
  Sense strand starting at position 408 of SEQ ID NO: 913495
ucuauacuaguguaguauu

SEQ ID NO: 931715 - RNA, 19 nt, Artificial Sequence
  Description of Artificial Sequence: Synthetic oligonucleotide
  Antisense strand to SEQ ID NO: 931714
aauacuacacuaguauaga

SEQ ID NO: 931716 - RNA, 19 nt, Artificial Sequence
  Description of Artificial Sequence: Synthetic oligonucleotide
  Sense strand starting at position 975 of SEQ ID NO: 913495
gaaguuugccaaugaaacg

SEQ ID NO: 931717 - RNA, 19 nt, Artificial Sequence
  Description of Artificial Sequence: Synthetic oligonucleotide
  Antisense strand to SEQ ID NO: 931716
cguuucauuggcaaacuuc

SEQ ID NO: 931718 - RNA, 19 nt, Artificial Sequence
  Description of Artificial Sequence: Synthetic oligonucleotide
  Sense strand starting at position 2201 of SEQ ID NO: 913495
uguguuuacaucgagauuc

SEQ ID NO: 931719 - RNA, 19 nt, Artificial Sequence
  Description of Artificial Sequence: Synthetic oligonucleotide
  Antisense strand to SEQ ID NO: 931718
gaaucucgauguaaacaca

SEQ ID NO: 931720 - RNA, 19 nt, Artificial Sequence
  Description of Artificial Sequence: Synthetic oligonucleotide
  Sense strand starting at position 3508 of SEQ ID NO: 913495
ugucuuucucuuugagagg

SEQ ID NO: 931721 - RNA, 19 nt, Artificial Sequence
  Description of Artificial Sequence: Synthetic oligonucleotide
  Antisense strand to SEQ ID NO: 931720
ccucucaaagagaaagaca

SEQ ID NO: 931722 - RNA, 19 nt, Artificial Sequence
  Description of Artificial Sequence: Synthetic oligonucleotide
  Sense strand starting at position 971 of SEQ ID NO: 913495
cucugaaguuugccaauga

SEQ ID NO: 931723 - RNA, 19 nt, Artificial Sequence
  Description of Artificial Sequence: Synthetic oligonucleotide
  Antisense strand to SEQ ID NO: 931722
ucauuggcaaacuucagag

SEQ ID NO: 931724 - RNA, 19 nt, Artificial Sequence
  Description of Artificial Sequence: Synthetic oligonucleotide
  Sense strand starting at position 2192 of SEQ ID NO: 913495
aagugauauuguguuuaca

SEQ ID NO: 931725 - RNA, 19 nt, Artificial Sequence
  Description of Artificial Sequence: Synthetic oligonucleotide
  Antisense strand to SEQ ID NO: 931724
uguaaacacaauaucacuu

SEQ ID NO: 931726 - RNA, 19 nt, Artificial Sequence
  Description of Artificial Sequence: Synthetic oligonucleotide
  Sense strand starting at position 980 of SEQ ID NO: 913495
uugccaaugaaacgucaga

SEQ ID NO: 931727 - RNA, 19 nt, Artificial Sequence
  Description of Artificial Sequence: Synthetic oligonucleotide
  Antisense strand to SEQ ID NO: 931726
ucugacguuucauuggcaa

SEQ ID NO: 931728 - RNA, 19 nt, Artificial Sequence
  Description of Artificial Sequence: Synthetic oligonucleotide
  Sense strand starting at position 1197 of SEQ ID NO: 913495
ggcugacuguucuuaacag

SEQ ID NO: 931729 - RNA, 19 nt, Artificial Sequence
  Description of Artificial Sequence: Synthetic oligonucleotide
  Antisense strand to SEQ ID NO: 931728
cuguuaagaacagucagcc

SEQ ID NO: 931730 - RNA, 19 nt, Artificial Sequence
  Description of Artificial Sequence: Synthetic oligonucleotide
  Sense strand starting at position 2706 of SEQ ID NO: 913495
ggcuuaaauuaugcuuuaa

SEQ ID NO: 931731 - RNA, 19 nt, Artificial Sequence
  Description of Artificial Sequence: Synthetic oligonucleotide
  Antisense strand to SEQ ID NO: 931730
uuaaagcauaauuuaagcc

SEQ ID NO: 931732 - RNA, 19 nt, Artificial Sequence
  Description of Artificial Sequence: Synthetic oligonucleotide
  Sense strand starting at position 3697 of SEQ ID NO: 913495
gcuaucaucuuggcaaaua

SEQ ID NO: 931733 - RNA, 19 nt, Artificial Sequence
  Description of Artificial Sequence: Synthetic oligonucleotide
  Antisense strand to SEQ ID NO: 931732
uauuugccaagaugauagc

SEQ ID NO: 931734 - RNA, 19 nt, Artificial Sequence
  Description of Artificial Sequence: Synthetic oligonucleotide
  Sense strand starting at position 461 of SEQ ID NO: 913495
gguaucaacuugucuauuc

SEQ ID NO: 931735 - RNA, 19 nt, Artificial Sequence
  Description of Artificial Sequence: Synthetic oligonucleotide
  Antisense strand to SEQ ID NO: 931734
gaauagacaaguugauacc

SEQ ID NO: 931736 - RNA, 19 nt, Artificial Sequence
  Description of Artificial Sequence: Synthetic oligonucleotide
  Sense strand starting at position 3858 of SEQ ID NO: 913495
ucugguacuuaccuuguaa

SEQ ID NO: 931737 - RNA, 19 nt, Artificial Sequence
  Description of Artificial Sequence: Synthetic oligonucleotide
  Antisense strand to SEQ ID NO: 931736
uuacaagguaaguaccaga

SEQ ID NO: 931738 - RNA, 19 nt, Artificial Sequence
  Description of Artificial Sequence: Synthetic oligonucleotide
  Sense strand starting at position 3178 of SEQ ID NO: 913495
cuuccuuacccuugugaua

SEQ ID NO: 931739 - RNA, 19 nt, Artificial Sequence
  Description of Artificial Sequence: Synthetic oligonucleotide
  Antisense strand to SEQ ID NO: 931738
uaucacaaggguaaggaag

SEQ ID NO: 931740 - RNA, 19 nt, Artificial Sequence
  Description of Artificial Sequence: Synthetic oligonucleotide
  Sense strand starting at position 2376 of SEQ ID NO: 913495
uuauuuauaucgcugugcu

SEQ ID NO: 931741 - RNA, 19 nt, Artificial Sequence
  Description of Artificial Sequence: Synthetic oligonucleotide
  Antisense strand to SEQ ID NO: 931740
agcacagcgauauaaauaa

SEQ ID NO: 931742 - RNA, 19 nt, Artificial Sequence
  Description of Artificial Sequence: Synthetic oligonucleotide
  Sense strand starting at position 965 of SEQ ID NO: 913496
agugcaauuccacagauaa

SEQ ID NO: 931743 - RNA, 19 nt, Artificial Sequence
  Description of Artificial Sequence: Synthetic oligonucleotide
  Antisense strand to SEQ ID NO: 931742
uuaucuguggaauugcacu

SEQ ID NO: 931744 - RNA, 19 nt, Artificial Sequence
  Description of Artificial Sequence: Synthetic oligonucleotide
  Sense strand starting at position 2884 of SEQ ID NO: 913496
ccaucauauccuugagaga

SEQ ID NO: 931745 - RNA, 19 nt, Artificial Sequence
  Description of Artificial Sequence: Synthetic oligonucleotide
  Antisense strand to SEQ ID NO: 931744
ucucucaaggauaugaugg

SEQ ID NO: 931746 - RNA, 19 nt, Artificial Sequence
  Description of Artificial Sequence: Synthetic oligonucleotide
  Sense strand starting at position 299 of SEQ ID NO: 913496
auggguaugguagauccua

SEQ ID NO: 931747 - RNA, 19 nt, Artificial Sequence
  Description of Artificial Sequence: Synthetic oligonucleotide
  Antisense strand to SEQ ID NO: 931746
uaggaucuaccauacccau

SEQ ID NO: 931748 - RNA, 19 nt, Artificial Sequence
  Description of Artificial Sequence: Synthetic oligonucleotide
  Sense strand starting at position 11 of SEQ ID NO: 913496
guaucagaagacuguaaga

SEQ ID NO: 931749 - RNA, 19 nt, Artificial Sequence
  Description of Artificial Sequence: Synthetic oligonucleotide
  Antisense strand to SEQ ID NO: 931748
ucuuacagucuucugauac

SEQ ID NO: 931750 - RNA, 19 nt, Artificial Sequence
  Description of Artificial Sequence: Synthetic oligonucleotide
  Sense strand starting at position 1587 of SEQ ID NO: 913496
caggcaguuccugagaaca

SEQ ID NO: 931751 - RNA, 19 nt, Artificial Sequence
  Description of Artificial Sequence: Synthetic oligonucleotide
  Antisense strand to SEQ ID NO: 931750
uguucucaggaacugccug

SEQ ID NO: 931752 - RNA, 19 nt, Artificial Sequence
  Description of Artificial Sequence: Synthetic oligonucleotide
  Sense strand starting at position 147 of SEQ ID NO: 913496
acaacuuaaugguugaauu

SEQ ID NO: 931753 - RNA, 19 nt, Artificial Sequence
  Description of Artificial Sequence: Synthetic oligonucleotide
  Antisense strand to SEQ ID NO: 931752
aauucaaccauuaaguugu

SEQ ID NO: 931754 - RNA, 19 nt, Artificial Sequence
  Description of Artificial Sequence: Synthetic oligonucleotide
  Sense strand starting at position 2883 of SEQ ID NO: 913496
uccaucauauccuugagag

SEQ ID NO: 931755 - RNA, 19 nt, Artificial Sequence
  Description of Artificial Sequence: Synthetic oligonucleotide
  Antisense strand to SEQ ID NO: 931754
cucucaaggauaugaugga

SEQ ID NO: 931756 - RNA, 19 nt, Artificial Sequence
  Description of Artificial Sequence: Synthetic oligonucleotide
  Sense strand starting at position 3403 of SEQ ID NO: 913496
uggcucaaccuugacaauu

SEQ ID NO: 931757 - RNA, 19 nt, Artificial Sequence
  Description of Artificial Sequence: Synthetic oligonucleotide
  Antisense strand to SEQ ID NO: 931756
aauugucaagguugagcca

SEQ ID NO: 931758 - RNA, 19 nt, Artificial Sequence
  Description of Artificial Sequence: Synthetic oligonucleotide
  Sense strand starting at position 660 of SEQ ID NO: 913496
gcgugugccaaaguuauac

SEQ ID NO: 931759 - RNA, 19 nt, Artificial Sequence
  Description of Artificial Sequence: Synthetic oligonucleotide
  Antisense strand to SEQ ID NO: 931758
guauaacuuuggcacacgc

SEQ ID NO: 931760 - RNA, 19 nt, Artificial Sequence
  Description of Artificial Sequence: Synthetic oligonucleotide
  Sense strand starting at position 1127 of SEQ ID NO: 913496
aggcauaauuaccuagauu

SEQ ID NO: 931761 - RNA, 19 nt, Artificial Sequence
  Description of Artificial Sequence: Synthetic oligonucleotide
  Antisense strand to SEQ ID NO: 931760
aaucuagguaauuaugccu

SEQ ID NO: 931762 - RNA, 19 nt, Artificial Sequence
  Description of Artificial Sequence: Synthetic oligonucleotide
  Sense strand starting at position 2391 of SEQ ID NO: 913496
uuucuaaaugcgugauuug

SEQ ID NO: 931763 - RNA, 19 nt, Artificial Sequence
  Description of Artificial Sequence: Synthetic oligonucleotide
  Antisense strand to SEQ ID NO: 931762
caaaucacgcauuuagaaa

SEQ ID NO: 931764 - RNA, 19 nt, Artificial Sequence
  Description of Artificial Sequence: Synthetic oligonucleotide
  Sense strand starting at position 2334 of SEQ ID NO: 913496
ucgagauuccauuacuuuc

SEQ ID NO: 931765 - RNA, 19 nt, Artificial Sequence
  Description of Artificial Sequence: Synthetic oligonucleotide
  Antisense strand to SEQ ID NO: 931764
gaaaguaauggaaucucga

SEQ ID NO: 931766 - RNA, 19 nt, Artificial Sequence
  Description of Artificial Sequence: Synthetic oligonucleotide
  Sense strand starting at position 2326 of SEQ ID NO: 913496
uguuuacaucgagauucca

SEQ ID NO: 931767 - RNA, 19 nt, Artificial Sequence
  Description of Artificial Sequence: Synthetic oligonucleotide
  Antisense strand to SEQ ID NO: 931766
uggaaucucgauguaaaca

SEQ ID NO: 931768 - RNA, 19 nt, Artificial Sequence
  Description of Artificial Sequence: Synthetic oligonucleotide
  Sense strand starting at position 1292 of SEQ ID NO: 913496
uacacugcucaugagaguu

SEQ ID NO: 931769 - RNA, 19 nt, Artificial Sequence
  Description of Artificial Sequence: Synthetic oligonucleotide
  Antisense strand to SEQ ID NO: 931768
aacucucaugagcagugua

SEQ ID NO: 931770 - RNA, 19 nt, Artificial Sequence
  Description of Artificial Sequence: Synthetic oligonucleotide
  Sense strand starting at position 516 of SEQ ID NO: 913496
uggaaacguguauauucua

SEQ ID NO: 931771 - RNA, 19 nt, Artificial Sequence
  Description of Artificial Sequence: Synthetic oligonucleotide
  Antisense strand to SEQ ID NO: 931770
uagaauauacacguuucca

SEQ ID NO: 931772 - RNA, 19 nt, Artificial Sequence
  Description of Artificial Sequence: Synthetic oligonucleotide
  Sense strand starting at position 514 of SEQ ID NO: 913496
auuggaaacguguauauuc

SEQ ID NO: 931773 - RNA, 19 nt, Artificial Sequence
  Description of Artificial Sequence: Synthetic oligonucleotide
  Antisense strand to SEQ ID NO: 931772
gaauauacacguuuccaau

SEQ ID NO: 931774 - RNA, 19 nt, Artificial Sequence
  Description of Artificial Sequence: Synthetic oligonucleotide
  Sense strand starting at position 79 of SEQ ID NO: 913496
cuugaaaugugagcaaauu

SEQ ID NO: 931775 - RNA, 19 nt, Artificial Sequence
  Description of Artificial Sequence: Synthetic oligonucleotide
  Antisense strand to SEQ ID NO: 931774
aauuugcucacauuucaag

SEQ ID NO: 931776 - RNA, 19 nt, Artificial Sequence
  Description of Artificial Sequence: Synthetic oligonucleotide
  Sense strand starting at position 89 of SEQ ID NO: 913496
gagcaaauuugcguuuauu

SEQ ID NO: 931777 - RNA, 19 nt, Artificial Sequence
  Description of Artificial Sequence: Synthetic oligonucleotide
  Antisense strand to SEQ ID NO: 931776
aauaaacgcaaauuugcuc

SEQ ID NO: 931778 - RNA, 19 nt, Artificial Sequence
  Description of Artificial Sequence: Synthetic oligonucleotide
  Sense strand starting at position 1116 of SEQ ID NO: 913496
gucagaacuccaggcauaa

SEQ ID NO: 931779 - RNA, 19 nt, Artificial Sequence
  Description of Artificial Sequence: Synthetic oligonucleotide
  Antisense strand to SEQ ID NO: 931778
uuaugccuggaguucugac

SEQ ID NO: 931780 - RNA, 19 nt, Artificial Sequence
  Description of Artificial Sequence: Synthetic oligonucleotide
  Sense strand starting at position 99 of SEQ ID NO: 913496
gcguuuauuaaguaaagaa

SEQ ID NO: 931781 - RNA, 19 nt, Artificial Sequence
  Description of Artificial Sequence: Synthetic oligonucleotide
  Antisense strand to SEQ ID NO: 931780
uucuuuacuuaauaaacgc

SEQ ID NO: 931782 - RNA, 19 nt, Artificial Sequence
  Description of Artificial Sequence: Synthetic oligonucleotide
  Sense strand starting at position 3969 of SEQ ID NO: 913496
ugggaauucucuucuggua

SEQ ID NO: 931783 - RNA, 19 nt, Artificial Sequence
  Description of Artificial Sequence: Synthetic oligonucleotide
  Antisense strand to SEQ ID NO: 931782
uaccagaagagaauuccca

SEQ ID NO: 931784 - RNA, 19 nt, Artificial Sequence
  Description of Artificial Sequence: Synthetic oligonucleotide
  Sense strand starting at position 510 of SEQ ID NO: 913496
agacauuggaaacguguau

SEQ ID NO: 931785 - RNA, 19 nt, Artificial Sequence
  Description of Artificial Sequence: Synthetic oligonucleotide
  Antisense strand to SEQ ID NO: 931784
auacacguuuccaaugucu

SEQ ID NO: 931786 - RNA, 19 nt, Artificial Sequence
  Description of Artificial Sequence: Synthetic oligonucleotide
  Sense strand starting at position 51 of SEQ ID NO: 913496
ucauuagggauucgguaau

SEQ ID NO: 931787 - RNA, 19 nt, Artificial Sequence
  Description of Artificial Sequence: Synthetic oligonucleotide
  Antisense strand to SEQ ID NO: 931786
auuaccgaaucccuaauga

SEQ ID NO: 931788 - RNA, 19 nt, Artificial Sequence
  Description of Artificial Sequence: Synthetic oligonucleotide
  Sense strand starting at position 3750 of SEQ ID NO: 913496
ugaugcuagguguaucaau

SEQ ID NO: 931789 - RNA, 19 nt, Artificial Sequence
  Description of Artificial Sequence: Synthetic oligonucleotide
  Antisense strand to SEQ ID NO: 931788
auugauacaccuagcauca

SEQ ID NO: 931790 - RNA, 19 nt, Artificial Sequence
  Description of Artificial Sequence: Synthetic oligonucleotide
  Sense strand starting at position 3253 of SEQ ID NO: 913496
ccacuacaaguauguauua

SEQ ID NO: 931791 - RNA, 19 nt, Artificial Sequence
  Description of Artificial Sequence: Synthetic oligonucleotide
  Antisense strand to SEQ ID NO: 931790
uaauacauacuuguagugg

SEQ ID NO: 931792 - RNA, 19 nt, Artificial Sequence
  Description of Artificial Sequence: Synthetic oligonucleotide
  Sense strand starting at position 2367 of SEQ ID NO: 913496
ggguuaggaguguauaguu

SEQ ID NO: 931793 - RNA, 19 nt, Artificial Sequence
  Description of Artificial Sequence: Synthetic oligonucleotide
  Antisense strand to SEQ ID NO: 931792
aacuauacacuccuaaccc

SEQ ID NO: 931794 - RNA, 19 nt, Artificial Sequence
  Description of Artificial Sequence: Synthetic oligonucleotide
  Sense strand starting at position 696 of SEQ ID NO: 913496
uuuauaccgcuuuaugaua

SEQ ID NO: 931795 - RNA, 19 nt, Artificial Sequence
  Description of Artificial Sequence: Synthetic oligonucleotide
  Antisense strand to SEQ ID NO: 931794
uaucauaaagcgguauaaa

SEQ ID NO: 931796 - RNA, 19 nt, Artificial Sequence
  Description of Artificial Sequence: Synthetic oligonucleotide
  Sense strand starting at position 3402 of SEQ ID NO: 913496
cuggcucaaccuugacaau

SEQ ID NO: 931797 - RNA, 19 nt, Artificial Sequence
  Description of Artificial Sequence: Synthetic oligonucleotide
  Antisense strand to SEQ ID NO: 931796
auugucaagguugagccag

SEQ ID NO: 931798 - RNA, 19 nt, Artificial Sequence
  Description of Artificial Sequence: Synthetic oligonucleotide
  Sense strand starting at position 3000 of SEQ ID NO: 913496
cggagacaaugucuccuua

SEQ ID NO: 931799 - RNA, 19 nt, Artificial Sequence
  Description of Artificial Sequence: Synthetic oligonucleotide
  Antisense strand to SEQ ID NO: 931798
uaaggagacauugucuccg

SEQ ID NO: 931800 - RNA, 19 nt, Artificial Sequence
  Description of Artificial Sequence: Synthetic oligonucleotide
  Sense strand starting at position 3630 of SEQ ID NO: 913496
augucuuucucuuugagag

SEQ ID NO: 931801 - RNA, 19 nt, Artificial Sequence
  Description of Artificial Sequence: Synthetic oligonucleotide
  Antisense strand to SEQ ID NO: 931800
cucucaaagagaaagacau

SEQ ID NO: 931802 - RNA, 19 nt, Artificial Sequence
  Description of Artificial Sequence: Synthetic oligonucleotide
  Sense strand starting at position 523 of SEQ ID NO: 913496
guguauauucuauacuagu

SEQ ID NO: 931803 - RNA, 19 nt, Artificial Sequence
  Description of Artificial Sequence: Synthetic oligonucleotide
  Antisense strand to SEQ ID NO: 931802
acuaguauagaauauacac

SEQ ID NO: 931804 - RNA, 19 nt, Artificial Sequence
  Description of Artificial Sequence: Synthetic oligonucleotide
  Sense strand starting at position 531 of SEQ ID NO: 913496
ucuauacuaguguaguauu

SEQ ID NO: 931805 - RNA, 19 nt, Artificial Sequence
  Description of Artificial Sequence: Synthetic oligonucleotide
  Antisense strand to SEQ ID NO: 931804
aauacuacacuaguauaga

SEQ ID NO: 931806 - RNA, 19 nt, Artificial Sequence
  Description of Artificial Sequence: Synthetic oligonucleotide
  Sense strand starting at position 43 of SEQ ID NO: 913496
gcgaacggucauuagggau

SEQ ID NO: 931807 - RNA, 19 nt, Artificial Sequence
  Description of Artificial Sequence: Synthetic oligonucleotide
  Antisense strand to SEQ ID NO: 931806
aucccuaaugaccguucgc

SEQ ID NO: 931808 - RNA, 19 nt, Artificial Sequence
  Description of Artificial Sequence: Synthetic oligonucleotide
  Sense strand starting at position 87 of SEQ ID NO: 913496
gugagcaaauuugcguuua

SEQ ID NO: 931809 - RNA, 19 nt, Artificial Sequence
  Description of Artificial Sequence: Synthetic oligonucleotide
  Antisense strand to SEQ ID NO: 931808
uaaacgcaaauuugcucac

SEQ ID NO: 931810 - RNA, 19 nt, Artificial Sequence
  Description of Artificial Sequence: Synthetic oligonucleotide
  Sense strand starting at position 1098 of SEQ ID NO: 913496
gaaguuugccaaugaaacg

SEQ ID NO: 931811 - RNA, 19 nt, Artificial Sequence
  Description of Artificial Sequence: Synthetic oligonucleotide
  Antisense strand to SEQ ID NO: 931810
cguuucauuggcaaacuuc

SEQ ID NO: 931812 - RNA, 19 nt, Artificial Sequence
  Description of Artificial Sequence: Synthetic oligonucleotide
  Sense strand starting at position 2324 of SEQ ID NO: 913496
uguguuuacaucgagauuc

SEQ ID NO: 931813 - RNA, 19 nt, Artificial Sequence
  Description of Artificial Sequence: Synthetic oligonucleotide
  Antisense strand to SEQ ID NO: 931812
gaaucucgauguaaacaca

SEQ ID NO: 931814 - RNA, 19 nt, Artificial Sequence
  Description of Artificial Sequence: Synthetic oligonucleotide
  Sense strand starting at position 3631 of SEQ ID NO: 913496
ugucuuucucuuugagagg

SEQ ID NO: 931815 - RNA, 19 nt, Artificial Sequence
  Description of Artificial Sequence: Synthetic oligonucleotide
  Antisense strand to SEQ ID NO: 931814
ccucucaaagagaaagaca

SEQ ID NO: 931816 - RNA, 19 nt, Artificial Sequence
  Description of Artificial Sequence: Synthetic oligonucleotide
  Sense strand starting at position 1094 of SEQ ID NO: 913496
cucugaaguuugccaauga

SEQ ID NO: 931817 - RNA, 19 nt, Artificial Sequence
  Description of Artificial Sequence: Synthetic oligonucleotide
  Antisense strand to SEQ ID NO: 931816
ucauuggcaaacuucagag

SEQ ID NO: 931818 - RNA, 19 nt, Artificial Sequence
  Description of Artificial Sequence: Synthetic oligonucleotide
  Sense strand starting at position 2315 of SEQ ID NO: 913496
aagugauauuguguuuaca

SEQ ID NO: 931819 - RNA, 19 nt, Artificial Sequence
  Description of Artificial Sequence: Synthetic oligonucleotide
  Antisense strand to SEQ ID NO: 931818
uguaaacacaauaucacuu

SEQ ID NO: 931820 - RNA, 19 nt, Artificial Sequence
  Description of Artificial Sequence: Synthetic oligonucleotide
  Sense strand starting at position 1103 of SEQ ID NO: 913496
uugccaaugaaacgucaga

SEQ ID NO: 931821 - RNA, 19 nt, Artificial Sequence
  Description of Artificial Sequence: Synthetic oligonucleotide
  Antisense strand to SEQ ID NO: 931820
ucugacguuucauuggcaa

SEQ ID NO: 931822 - RNA, 19 nt, Artificial Sequence
  Description of Artificial Sequence: Synthetic oligonucleotide
  Sense strand starting at position 3241 of SEQ ID NO: 913497
ucaaaugacuuguuaggaa

SEQ ID NO: 931823 - RNA, 19 nt, Artificial Sequence
  Description of Artificial Sequence: Synthetic oligonucleotide
  Antisense strand to SEQ ID NO: 931822
uuccuaacaagucauuuga

SEQ ID NO: 931824 - RNA, 19 nt, Artificial Sequence
  Description of Artificial Sequence: Synthetic oligonucleotide
  Sense strand starting at position 403 of SEQ ID NO: 913497
uuaauuaauccagaugcug

SEQ ID NO: 931825 - RNA, 19 nt, Artificial Sequence
  Description of Artificial Sequence: Synthetic oligonucleotide
  Antisense strand to SEQ ID NO: 931824
cagcaucuggauuaauuaa

SEQ ID NO: 931826 - RNA, 19 nt, Artificial Sequence
  Description of Artificial Sequence: Synthetic oligonucleotide
  Sense strand starting at position 2035 of SEQ ID NO: 913497
agaauucgagguuggaaag

SEQ ID NO: 931827 - RNA, 19 nt, Artificial Sequence
  Description of Artificial Sequence: Synthetic oligonucleotide
  Antisense strand to SEQ ID NO: 931826
cuuuccaaccucgaauucu

SEQ ID NO: 931828 - RNA, 19 nt, Artificial Sequence
  Description of Artificial Sequence: Synthetic oligonucleotide
  Sense strand starting at position 2036 of SEQ ID NO: 913497
gaauucgagguuggaaaga

SEQ ID NO: 931829 - RNA, 19 nt, Artificial Sequence
  Description of Artificial Sequence: Synthetic oligonucleotide
  Antisense strand to SEQ ID NO: 931828
ucuuuccaaccucgaauuc

SEQ ID NO: 931830 - RNA, 19 nt, Artificial Sequence
  Description of Artificial Sequence: Synthetic oligonucleotide
  Sense strand starting at position 1404 of SEQ ID NO: 913497
agcuauguccucugauuua

SEQ ID NO: 931831 - RNA, 19 nt, Artificial Sequence
  Description of Artificial Sequence: Synthetic oligonucleotide
  Antisense strand to SEQ ID NO: 931830
uaaaucagaggacauagcu

SEQ ID NO: 931832 - RNA, 19 nt, Artificial Sequence
  Description of Artificial Sequence: Synthetic oligonucleotide
  Sense strand starting at position 3883 of SEQ ID NO: 913497
gucuaaugagacuauguau

SEQ ID NO: 931833 - RNA, 19 nt, Artificial Sequence
  Description of Artificial Sequence: Synthetic oligonucleotide
  Antisense strand to SEQ ID NO: 931832
auacauagucucauuagac

SEQ ID NO: 931834 - RNA, 19 nt, Artificial Sequence
  Description of Artificial Sequence: Synthetic oligonucleotide
  Sense strand starting at position 3874 of SEQ ID NO: 913497
ucugaauacgucuaaugag

SEQ ID NO: 931835 - RNA, 19 nt, Artificial Sequence
  Description of Artificial Sequence: Synthetic oligonucleotide
  Antisense strand to SEQ ID NO: 931834
cucauuagacguauucaga

SEQ ID NO: 931836 - RNA, 19 nt, Artificial Sequence
  Description of Artificial Sequence: Synthetic oligonucleotide
  Sense strand starting at position 1269 of SEQ ID NO: 913497
cguauucugacugcgaguu

SEQ ID NO: 931837 - RNA, 19 nt, Artificial Sequence
  Description of Artificial Sequence: Synthetic oligonucleotide
  Antisense strand to SEQ ID NO: 931836
aacucgcagucagaauacg

SEQ ID NO: 931838 - RNA, 19 nt, Artificial Sequence
  Description of Artificial Sequence: Synthetic oligonucleotide
  Sense strand starting at position 452 of SEQ ID NO: 913497
ccagaugagucaucaaauc

SEQ ID NO: 931839 - RNA, 19 nt, Artificial Sequence
  Description of Artificial Sequence: Synthetic oligonucleotide
  Antisense strand to SEQ ID NO: 931838
gauuugaugacucaucugg

SEQ ID NO: 931840 - RNA, 19 nt, Artificial Sequence
  Description of Artificial Sequence: Synthetic oligonucleotide
  Sense strand starting at position 563 of SEQ ID NO: 913497
cuuuauaucgaguaauaac

SEQ ID NO: 931841 - RNA, 19 nt, Artificial Sequence
  Description of Artificial Sequence: Synthetic oligonucleotide
  Antisense strand to SEQ ID NO: 931840
guuauuacucgauauaaag

SEQ ID NO: 931842 - RNA, 19 nt, Artificial Sequence
  Description of Artificial Sequence: Synthetic oligonucleotide
  Sense strand starting at position 328 of SEQ ID NO: 913497
uagacagguuagucagaca

SEQ ID NO: 931843 - RNA, 19 nt, Artificial Sequence
  Description of Artificial Sequence: Synthetic oligonucleotide
  Antisense strand to SEQ ID NO: 931842
ugucugacuaaccugucua

SEQ ID NO: 931844 - RNA, 19 nt, Artificial Sequence
  Description of Artificial Sequence: Synthetic oligonucleotide
  Sense strand starting at position 1472 of SEQ ID NO: 913497
cuagcuuggacuugaaaga

SEQ ID NO: 931845 - RNA, 19 nt, Artificial Sequence
  Description of Artificial Sequence: Synthetic oligonucleotide
  Antisense strand to SEQ ID NO: 931844
ucuuucaaguccaagcuag

SEQ ID NO: 931846 - RNA, 19 nt, Artificial Sequence
  Description of Artificial Sequence: Synthetic oligonucleotide
  Sense strand starting at position 333 of SEQ ID NO: 913497
agguuagucagacaugcaa

SEQ ID NO: 931847 - RNA, 19 nt, Artificial Sequence
  Description of Artificial Sequence: Synthetic oligonucleotide
  Antisense strand to SEQ ID NO: 931846
uugcaugucugacuaaccu

SEQ ID NO: 931848 - RNA, 19 nt, Artificial Sequence
  Description of Artificial Sequence: Synthetic oligonucleotide
  Sense strand starting at position 2062 of SEQ ID NO: 913497
aguaguugccaggacaaau

SEQ ID NO: 931849 - RNA, 19 nt, Artificial Sequence
  Description of Artificial Sequence: Synthetic oligonucleotide
  Antisense strand to SEQ ID NO: 931848
auuuguccuggcaacuacu

SEQ ID NO: 931850 - RNA, 19 nt, Artificial Sequence
  Description of Artificial Sequence: Synthetic oligonucleotide
  Sense strand starting at position 3890 of SEQ ID NO: 913497
gagacuauguauuucgugu

SEQ ID NO: 931851 - RNA, 19 nt, Artificial Sequence
  Description of Artificial Sequence: Synthetic oligonucleotide
  Antisense strand to SEQ ID NO: 931850
acacgaaauacauagucuc

SEQ ID NO: 931852 - RNA, 19 nt, Artificial Sequence
  Description of Artificial Sequence: Synthetic oligonucleotide
  Sense strand starting at position 1734 of SEQ ID NO: 913497
ugcauuuccugggcggaau

SEQ ID NO: 931853 - RNA, 19 nt, Artificial Sequence
  Description of Artificial Sequence: Synthetic oligonucleotide
  Antisense strand to SEQ ID NO: 931852
auuccgcccaggaaaugca

SEQ ID NO: 931854 - RNA, 19 nt, Artificial Sequence
  Description of Artificial Sequence: Synthetic oligonucleotide
  Sense strand starting at position 1733 of SEQ ID NO: 913497
cugcauuuccugggcggaa

SEQ ID NO: 931855 - RNA, 19 nt, Artificial Sequence
  Description of Artificial Sequence: Synthetic oligonucleotide
  Antisense strand to SEQ ID NO: 931854
uuccgcccaggaaaugcag

SEQ ID NO: 931856 - RNA, 19 nt, Artificial Sequence
  Description of Artificial Sequence: Synthetic oligonucleotide
  Sense strand starting at position 1617 of SEQ ID NO: 913497
acugcugaaguuuaauauu

SEQ ID NO: 931857 - RNA, 19 nt, Artificial Sequence
  Description of Artificial Sequence: Synthetic oligonucleotide
  Antisense strand to SEQ ID NO: 931856
aauauuaaacuucagcagu

SEQ ID NO: 931858 - RNA, 19 nt, Artificial Sequence
  Description of Artificial Sequence: Synthetic oligonucleotide
  Sense strand starting at position 2047 of SEQ ID NO: 913497
uggaaagaaucugccagua

SEQ ID NO: 931859 - RNA, 19 nt, Artificial Sequence
  Description of Artificial Sequence: Synthetic oligonucleotide
  Antisense strand to SEQ ID NO: 931858
uacuggcagauucuuucca

SEQ ID NO: 931860 - RNA, 19 nt, Artificial Sequence
  Description of Artificial Sequence: Synthetic oligonucleotide
  Sense strand starting at position 3749 of SEQ ID NO: 913497
auuauaggcuuucuaugaa

SEQ ID NO: 931861 - RNA, 19 nt, Artificial Sequence
  Description of Artificial Sequence: Synthetic oligonucleotide
  Antisense strand to SEQ ID NO: 931860
uucauagaaagccuauaau

SEQ ID NO: 931862 - RNA, 19 nt, Artificial Sequence
  Description of Artificial Sequence: Synthetic oligonucleotide
  Sense strand starting at position 613 of SEQ ID NO: 913497
uuaauuauugcagagcuca

SEQ ID NO: 931863 - RNA, 19 nt, Artificial Sequence
  Description of Artificial Sequence: Synthetic oligonucleotide
  Antisense strand to SEQ ID NO: 931862
ugagcucugcaauaauuaa

SEQ ID NO: 931864 - RNA, 19 nt, Artificial Sequence
  Description of Artificial Sequence: Synthetic oligonucleotide
  Sense strand starting at position 571 of SEQ ID NO: 913497
cgaguaauaacauguagau

SEQ ID NO: 931865 - RNA, 19 nt, Artificial Sequence
  Description of Artificial Sequence: Synthetic oligonucleotide
  Antisense strand to SEQ ID NO: 931864
aucuacauguuauuacucg

SEQ ID NO: 931866 - RNA, 19 nt, Artificial Sequence
  Description of Artificial Sequence: Synthetic oligonucleotide
  Sense strand starting at position 367 of SEQ ID NO: 913497
guaauaaauuuaggacaga

SEQ ID NO: 931867 - RNA, 19 nt, Artificial Sequence
  Description of Artificial Sequence: Synthetic oligonucleotide
  Antisense strand to SEQ ID NO: 931866
ucuguccuaaauuuauuac

SEQ ID NO: 931868 - RNA, 19 nt, Artificial Sequence
  Description of Artificial Sequence: Synthetic oligonucleotide
  Sense strand starting at position 1185 of SEQ ID NO: 913497
gcuaacagaucucuaaagu

SEQ ID NO: 931869 - RNA, 19 nt, Artificial Sequence
  Description of Artificial Sequence: Synthetic oligonucleotide
  Antisense strand to SEQ ID NO: 931868
acuuuagagaucuguuagc

SEQ ID NO: 931870 - RNA, 19 nt, Artificial Sequence
  Description of Artificial Sequence: Synthetic oligonucleotide
  Sense strand starting at position 991 of SEQ ID NO: 913497
acaacuuuaguacgacuau

SEQ ID NO: 931871 - RNA, 19 nt, Artificial Sequence
  Description of Artificial Sequence: Synthetic oligonucleotide
  Antisense strand to SEQ ID NO: 931870
auagucguacuaaaguugu

SEQ ID NO: 931872 - RNA, 19 nt, Artificial Sequence
  Description of Artificial Sequence: Synthetic oligonucleotide
  Sense strand starting at position 3702 of SEQ ID NO: 913497
guugacuuugcagagcaga

SEQ ID NO: 931873 - RNA, 19 nt, Artificial Sequence
  Description of Artificial Sequence: Synthetic oligonucleotide
  Antisense strand to SEQ ID NO: 931872
ucugcucugcaaagucaac

SEQ ID NO: 931874 - RNA, 19 nt, Artificial Sequence
  Description of Artificial Sequence: Synthetic oligonucleotide
  Sense strand starting at position 282 of SEQ ID NO: 913497
uuccucugcgauuacacaa

SEQ ID NO: 931875 - RNA, 19 nt, Artificial Sequence
  Description of Artificial Sequence: Synthetic oligonucleotide
  Antisense strand to SEQ ID NO: 931874
uuguguaaucgcagaggaa

SEQ ID NO: 931876 - RNA, 19 nt, Artificial Sequence
  Description of Artificial Sequence: Synthetic oligonucleotide
  Sense strand starting at position 2032 of SEQ ID NO: 913497
agcagaauucgagguugga

SEQ ID NO: 931877 - RNA, 19 nt, Artificial Sequence
  Description of Artificial Sequence: Synthetic oligonucleotide
  Antisense strand to SEQ ID NO: 931876
uccaaccucgaauucugcu

SEQ ID NO: 931878 - RNA, 19 nt, Artificial Sequence
  Description of Artificial Sequence: Synthetic oligonucleotide
  Sense strand starting at position 3218 of SEQ ID NO: 913497
gccacuagucccgcguuua

SEQ ID NO: 931879 - RNA, 19 nt, Artificial Sequence
  Description of Artificial Sequence: Synthetic oligonucleotide
  Antisense strand to SEQ ID NO: 931878
uaaacgcgggacuaguggc

SEQ ID NO: 931880 - RNA, 19 nt, Artificial Sequence
  Description of Artificial Sequence: Synthetic oligonucleotide
  Sense strand starting at position 473 of SEQ ID NO: 913497
uugucuuugccucacaaag

SEQ ID NO: 931881 - RNA, 19 nt, Artificial Sequence
  Description of Artificial Sequence: Synthetic oligonucleotide
  Antisense strand to SEQ ID NO: 931880
cuuugugaggcaaagacaa

SEQ ID NO: 931882 - RNA, 19 nt, Artificial Sequence
  Description of Artificial Sequence: Synthetic oligonucleotide
  Sense strand starting at position 418 of SEQ ID NO: 913497
gcugucucucuugaaacau

SEQ ID NO: 931883 - RNA, 19 nt, Artificial Sequence
  Description of Artificial Sequence: Synthetic oligonucleotide
  Antisense strand to SEQ ID NO: 931882
auguuucaagagagacagc

SEQ ID NO: 931884 - RNA, 19 nt, Artificial Sequence
  Description of Artificial Sequence: Synthetic oligonucleotide
  Sense strand starting at position 3670 of SEQ ID NO: 913497
guagaaagguuguuauuac

SEQ ID NO: 931885 - RNA, 19 nt, Artificial Sequence
  Description of Artificial Sequence: Synthetic oligonucleotide
  Antisense strand to SEQ ID NO: 931884
guaauaacaaccuuucuac

SEQ ID NO: 931886 - RNA, 19 nt, Artificial Sequence
  Description of Artificial Sequence: Synthetic oligonucleotide
  Sense strand starting at position 3127 of SEQ ID NO: 913497
guggccuuucuggaaguga

SEQ ID NO: 931887 - RNA, 19 nt, Artificial Sequence
  Description of Artificial Sequence: Synthetic oligonucleotide
  Antisense strand to SEQ ID NO: 931886
ucacuuccagaaaggccac

SEQ ID NO: 931888 - RNA, 19 nt, Artificial Sequence
  Description of Artificial Sequence: Synthetic oligonucleotide
  Sense strand starting at position 3730 of SEQ ID NO: 913497
ugaggcaguucuucaugga

SEQ ID NO: 931889 - RNA, 19 nt, Artificial Sequence
  Description of Artificial Sequence: Synthetic oligonucleotide
  Antisense strand to SEQ ID NO: 931888
uccaugaagaacugccuca

SEQ ID NO: 931890 - RNA, 19 nt, Artificial Sequence
  Description of Artificial Sequence: Synthetic oligonucleotide
  Sense strand starting at position 227 of SEQ ID NO: 913497
aguaauagagcuggaugca

SEQ ID NO: 931891 - RNA, 19 nt, Artificial Sequence
  Description of Artificial Sequence: Synthetic oligonucleotide
  Antisense strand to SEQ ID NO: 931890
ugcauccagcucuauuacu

SEQ ID NO: 931892 - RNA, 19 nt, Artificial Sequence
  Description of Artificial Sequence: Synthetic oligonucleotide
  Sense strand starting at position 2022 of SEQ ID NO: 913497
aagcgagcugagcagaauu

SEQ ID NO: 931893 - RNA, 19 nt, Artificial Sequence
  Description of Artificial Sequence: Synthetic oligonucleotide
  Antisense strand to SEQ ID NO: 931892
aauucugcucagcucgcuu

SEQ ID NO: 931894 - RNA, 19 nt, Artificial Sequence
  Description of Artificial Sequence: Synthetic oligonucleotide
  Sense strand starting at position 2534 of SEQ ID NO: 913497
gggucauccacaggcuuga

SEQ ID NO: 931895 - RNA, 19 nt, Artificial Sequence
  Description of Artificial Sequence: Synthetic oligonucleotide
  Antisense strand to SEQ ID NO: 931894
ucaagccuguggaugaccc

SEQ ID NO: 931896 - RNA, 19 nt, Artificial Sequence
  Description of Artificial Sequence: Synthetic oligonucleotide
  Sense strand starting at position 1699 of SEQ ID NO: 913497
cugggcuugggcgaucuaa

SEQ ID NO: 931897 - RNA, 19 nt, Artificial Sequence
  Description of Artificial Sequence: Synthetic oligonucleotide
  Antisense strand to SEQ ID NO: 931896
uuagaucgcccaagcccag

SEQ ID NO: 931898 - RNA, 19 nt, Artificial Sequence
  Description of Artificial Sequence: Synthetic oligonucleotide
  Sense strand starting at position 126 of SEQ ID NO: 913497
gcucuagaguauguauaau

SEQ ID NO: 931899 - RNA, 19 nt, Artificial Sequence
  Description of Artificial Sequence: Synthetic oligonucleotide
  Antisense strand to SEQ ID NO: 931898
auuauacauacucuagagc

SEQ ID NO: 931900 - RNA, 19 nt, Artificial Sequence
  Description of Artificial Sequence: Synthetic oligonucleotide
  Sense strand starting at position 158 of SEQ ID NO: 913497
cuuauacauugagaagaaa

SEQ ID NO: 931901 - RNA, 19 nt, Artificial Sequence
  Description of Artificial Sequence: Synthetic oligonucleotide
  Antisense strand to SEQ ID NO: 931900
uuucuucucaauguauaag

SEQ ID NO: 931902 - RNA, 19 nt, Artificial Sequence
  Description of Artificial Sequence: Synthetic oligonucleotide
  Sense strand starting at position 2664 of SEQ ID NO: 913498
caaguaauacgaugaugaa

SEQ ID NO: 931903 - RNA, 19 nt, Artificial Sequence
  Description of Artificial Sequence: Synthetic oligonucleotide
  Antisense strand to SEQ ID NO: 931902
uucaucaucguauuacuug

SEQ ID NO: 931904 - RNA, 19 nt, Artificial Sequence
  Description of Artificial Sequence: Synthetic oligonucleotide
  Sense strand starting at position 2975 of SEQ ID NO: 913498
gggacaugcuaacuaauac

SEQ ID NO: 931905 - RNA, 19 nt, Artificial Sequence
  Description of Artificial Sequence: Synthetic oligonucleotide
  Antisense strand to SEQ ID NO: 931904
guauuaguuagcauguccc

SEQ ID NO: 931906 - RNA, 19 nt, Artificial Sequence
  Description of Artificial Sequence: Synthetic oligonucleotide
  Sense strand starting at position 2652 of SEQ ID NO: 913498
ucuagucaccaucaaguaa

SEQ ID NO: 931907 - RNA, 19 nt, Artificial Sequence
  Description of Artificial Sequence: Synthetic oligonucleotide
  Antisense strand to SEQ ID NO: 931906
uuacuugauggugacuaga

SEQ ID NO: 931908 - RNA, 19 nt, Artificial Sequence
  Description of Artificial Sequence: Synthetic oligonucleotide
  Sense strand starting at position 2094 of SEQ ID NO: 913498
caagaugcgggugaugaau

SEQ ID NO: 931909 - RNA, 19 nt, Artificial Sequence
  Description of Artificial Sequence: Synthetic oligonucleotide
  Antisense strand to SEQ ID NO: 931908
auucaucacccgcaucuug

SEQ ID NO: 931910 - RNA, 19 nt, Artificial Sequence
  Description of Artificial Sequence: Synthetic oligonucleotide
  Sense strand starting at position 3475 of SEQ ID NO: 913498
auauuagagccagauuguu

SEQ ID NO: 931911 - RNA, 19 nt, Artificial Sequence
  Description of Artificial Sequence: Synthetic oligonucleotide
  Antisense strand to SEQ ID NO: 931910
aacaaucuggcucuaauau

SEQ ID NO: 931912 - RNA, 19 nt, Artificial Sequence
  Description of Artificial Sequence: Synthetic oligonucleotide
  Sense strand starting at position 227 of SEQ ID NO: 913498
ucaccuugccaguaaggaa

SEQ ID NO: 931913 - RNA, 19 nt, Artificial Sequence
  Description of Artificial Sequence: Synthetic oligonucleotide
  Antisense strand to SEQ ID NO: 931912
uuccuuacuggcaagguga

SEQ ID NO: 931914 - RNA, 19 nt, Artificial Sequence
  Description of Artificial Sequence: Synthetic oligonucleotide
  Sense strand starting at position 2708 of SEQ ID NO: 913498
cccuccuuugagcaggaau

SEQ ID NO: 931915 - RNA, 19 nt, Artificial Sequence
  Description of Artificial Sequence: Synthetic oligonucleotide
  Antisense strand to SEQ ID NO: 931914
auuccugcucaaaggaggg

SEQ ID NO: 931916 - RNA, 19 nt, Artificial Sequence
  Description of Artificial Sequence: Synthetic oligonucleotide
  Sense strand starting at position 3669 of SEQ ID NO: 913498
acaggaaagacuugugguu

SEQ ID NO: 931917 - RNA, 19 nt, Artificial Sequence
  Description of Artificial Sequence: Synthetic oligonucleotide
  Antisense strand to SEQ ID NO: 931916
aaccacaagucuuuccugu

SEQ ID NO: 931918 - RNA, 19 nt, Artificial Sequence
  Description of Artificial Sequence: Synthetic oligonucleotide
  Sense strand starting at position 3656 of SEQ ID NO: 913498
acuuauuucugggacagga

SEQ ID NO: 931919 - RNA, 19 nt, Artificial Sequence
  Description of Artificial Sequence: Synthetic oligonucleotide
  Antisense strand to SEQ ID NO: 931918
uccugucccagaaauaagu

SEQ ID NO: 931920 - RNA, 19 nt, Artificial Sequence
  Description of Artificial Sequence: Synthetic oligonucleotide
  Sense strand starting at position 2710 of SEQ ID NO: 913498
cuccuuugagcaggaauaa

SEQ ID NO: 931921 - RNA, 19 nt, Artificial Sequence
  Description of Artificial Sequence: Synthetic oligonucleotide
  Antisense strand to SEQ ID NO: 931920
uuauuccugcucaaaggag

SEQ ID NO: 931922 - RNA, 19 nt, Artificial Sequence
  Description of Artificial Sequence: Synthetic oligonucleotide
  Sense strand starting at position 2482 of SEQ ID NO: 913498
caaucacacguuugggaga

SEQ ID NO: 931923 - RNA, 19 nt, Artificial Sequence
  Description of Artificial Sequence: Synthetic oligonucleotide
  Antisense strand to SEQ ID NO: 931922
ucucccaaacgugugauug

SEQ ID NO: 931924 - RNA, 19 nt, Artificial Sequence
  Description of Artificial Sequence: Synthetic oligonucleotide
  Sense strand starting at position 3733 of SEQ ID NO: 913498
acaggucucggcuaacaga

SEQ ID NO: 931925 - RNA, 19 nt, Artificial Sequence
  Description of Artificial Sequence: Synthetic oligonucleotide
  Antisense strand to SEQ ID NO: 931924
ucuguuagccgagaccugu

SEQ ID NO: 931926 - RNA, 19 nt, Artificial Sequence
  Description of Artificial Sequence: Synthetic oligonucleotide
  Sense strand starting at position 1016 of SEQ ID NO: 913498
cgauuccucggagaagcaa

SEQ ID NO: 931927 - RNA, 19 nt, Artificial Sequence
  Description of Artificial Sequence: Synthetic oligonucleotide
  Antisense strand to SEQ ID NO: 931926
uugcuucuccgaggaaucg

SEQ ID NO: 931928 - RNA, 19 nt, Artificial Sequence
  Description of Artificial Sequence: Synthetic oligonucleotide
  Sense strand starting at position 3934 of SEQ ID NO: 913498
gcaucaaguaagggaagua

SEQ ID NO: 931929 - RNA, 19 nt, Artificial Sequence
  Description of Artificial Sequence: Synthetic oligonucleotide
  Antisense strand to SEQ ID NO: 931928
uacuucccuuacuugaugc

SEQ ID NO: 931930 - RNA, 19 nt, Artificial Sequence
  Description of Artificial Sequence: Synthetic oligonucleotide
  Sense strand starting at position 2077 of SEQ ID NO: 913498
ccgucagaugacuaaugca

SEQ ID NO: 931931 - RNA, 19 nt, Artificial Sequence
  Description of Artificial Sequence: Synthetic oligonucleotide
  Antisense strand to SEQ ID NO: 931930
ugcauuagucaucugacgg

SEQ ID NO: 931932 - RNA, 19 nt, Artificial Sequence
  Description of Artificial Sequence: Synthetic oligonucleotide
  Sense strand starting at position 936 of SEQ ID NO: 913498
augcaauuguaauuacaug

SEQ ID NO: 931933 - RNA, 19 nt, Artificial Sequence
  Description of Artificial Sequence: Synthetic oligonucleotide
  Antisense strand to SEQ ID NO: 931932
cauguaauuacaauugcau

SEQ ID NO: 931934 - RNA, 19 nt, Artificial Sequence
  Description of Artificial Sequence: Synthetic oligonucleotide
  Sense strand starting at position 743 of SEQ ID NO: 913498
agguguccuaacuauguca

SEQ ID NO: 931935 - RNA, 19 nt, Artificial Sequence
  Description of Artificial Sequence: Synthetic oligonucleotide
  Antisense strand to SEQ ID NO: 931934
ugacauaguuaggacaccu

SEQ ID NO: 931936 - RNA, 19 nt, Artificial Sequence
  Description of Artificial Sequence: Synthetic oligonucleotide
  Sense strand starting at position 2625 of SEQ ID NO: 913498
aagagaaugcuguguacag

SEQ ID NO: 931937 - RNA, 19 nt, Artificial Sequence
  Description of Artificial Sequence: Synthetic oligonucleotide
  Antisense strand to SEQ ID NO: 931936
cuguacacagcauucucuu

SEQ ID NO: 931938 - RNA, 19 nt, Artificial Sequence
  Description of Artificial Sequence: Synthetic oligonucleotide
  Sense strand starting at position 517 of SEQ ID NO: 913498
guagcagcagaguagauau

SEQ ID NO: 931939 - RNA, 19 nt, Artificial Sequence
  Description of Artificial Sequence: Synthetic oligonucleotide
  Antisense strand to SEQ ID NO: 931938
auaucuacucugcugcuac

SEQ ID NO: 931940 - RNA, 19 nt, Artificial Sequence
  Description of Artificial Sequence: Synthetic oligonucleotide
  Sense strand starting at position 2133 of SEQ ID NO: 913498
ccaugugugcaucaaauua

SEQ ID NO: 931941 - RNA, 19 nt, Artificial Sequence
  Description of Artificial Sequence: Synthetic oligonucleotide
  Antisense strand to SEQ ID NO: 931940
uaauuugaugcacacaugg

SEQ ID NO: 931942 - RNA, 19 nt, Artificial Sequence
  Description of Artificial Sequence: Synthetic oligonucleotide
  Sense strand starting at position 1678 of SEQ ID NO: 913498
guagaaauuugaugaacua

SEQ ID NO: 931943 - RNA, 19 nt, Artificial Sequence
  Description of Artificial Sequence: Synthetic oligonucleotide
  Antisense strand to SEQ ID NO: 931942
uaguucaucaaauuucuac

SEQ ID NO: 931944 - RNA, 19 nt, Artificial Sequence
  Description of Artificial Sequence: Synthetic oligonucleotide
  Sense strand starting at position 2435 of SEQ ID NO: 913498
uuguucucuguauaucuga

SEQ ID NO: 931945 - RNA, 19 nt, Artificial Sequence
  Description of Artificial Sequence: Synthetic oligonucleotide
  Antisense strand to SEQ ID NO: 931944
ucagauauacagagaacaa

SEQ ID NO: 931946 - RNA, 19 nt, Artificial Sequence
  Description of Artificial Sequence: Synthetic oligonucleotide
  Sense strand starting at position 2156 of SEQ ID NO: 913498
guuguugcuacucagaaug

SEQ ID NO: 931947 - RNA, 19 nt, Artificial Sequence
  Description of Artificial Sequence: Synthetic oligonucleotide
  Antisense strand to SEQ ID NO: 931946
cauucugaguagcaacaac

SEQ ID NO: 931948 - RNA, 19 nt, Artificial Sequence
  Description of Artificial Sequence: Synthetic oligonucleotide
  Sense strand starting at position 3654 of SEQ ID NO: 913498
agacuuauuucugggacag

SEQ ID NO: 931949 - RNA, 19 nt, Artificial Sequence
  Description of Artificial Sequence: Synthetic oligonucleotide
  Antisense strand to SEQ ID NO: 931948
cugucccagaaauaagucu

SEQ ID NO: 931950 - RNA, 19 nt, Artificial Sequence
  Description of Artificial Sequence: Synthetic oligonucleotide
  Sense strand starting at position 611 of SEQ ID NO: 913498
cugggucucuaucucauua

SEQ ID NO: 931951 - RNA, 19 nt, Artificial Sequence
  Description of Artificial Sequence: Synthetic oligonucleotide
  Antisense strand to SEQ ID NO: 931950
uaaugagauagagacccag

SEQ ID NO: 931952 - RNA, 19 nt, Artificial Sequence
  Description of Artificial Sequence: Synthetic oligonucleotide
  Sense strand starting at position 3070 of SEQ ID NO: 913498
agcuacuuacuugguuaaa

SEQ ID NO: 931953 - RNA, 19 nt, Artificial Sequence
  Description of Artificial Sequence: Synthetic oligonucleotide
  Antisense strand to SEQ ID NO: 931952
uuuaaccaaguaaguagcu

SEQ ID NO: 931954 - RNA, 19 nt, Artificial Sequence
  Description of Artificial Sequence: Synthetic oligonucleotide
  Sense strand starting at position 3068 of SEQ ID NO: 913498
agagcuacuuacuugguua

SEQ ID NO: 931955 - RNA, 19 nt, Artificial Sequence
  Description of Artificial Sequence: Synthetic oligonucleotide
  Antisense strand to SEQ ID NO: 931954
uaaccaaguaaguagcucu

SEQ ID NO: 931956 - RNA, 19 nt, Artificial Sequence
  Description of Artificial Sequence: Synthetic oligonucleotide
  Sense strand starting at position 3051 of SEQ ID NO: 913498
agacaaagaucuuacagag

SEQ ID NO: 931957 - RNA, 19 nt, Artificial Sequence
  Description of Artificial Sequence: Synthetic oligonucleotide
  Antisense strand to SEQ ID NO: 931956
cucuguaagaucuuugucu

SEQ ID NO: 931958 - RNA, 19 nt, Artificial Sequence
  Description of Artificial Sequence: Synthetic oligonucleotide
  Sense strand starting at position 603 of SEQ ID NO: 913498
aaugguuucugggucucua

SEQ ID NO: 931959 - RNA, 19 nt, Artificial Sequence
  Description of Artificial Sequence: Synthetic oligonucleotide
  Antisense strand to SEQ ID NO: 931958
uagagacccagaaaccauu

SEQ ID NO: 931960 - RNA, 19 nt, Artificial Sequence
  Description of Artificial Sequence: Synthetic oligonucleotide
  Sense strand starting at position 881 of SEQ ID NO: 913498
cacgucaacuguuuauaag

SEQ ID NO: 931961 - RNA, 19 nt, Artificial Sequence
  Description of Artificial Sequence: Synthetic oligonucleotide
  Antisense strand to SEQ ID NO: 931960
cuuauaaacaguugacgug

SEQ ID NO: 931962 - RNA, 19 nt, Artificial Sequence
  Description of Artificial Sequence: Synthetic oligonucleotide
  Sense strand starting at position 3481 of SEQ ID NO: 913498
gagccagauuguuuaucuu

SEQ ID NO: 931963 - RNA, 19 nt, Artificial Sequence
  Description of Artificial Sequence: Synthetic oligonucleotide
  Antisense strand to SEQ ID NO: 931962
aagauaaacaaucuggcuc

SEQ ID NO: 931964 - RNA, 19 nt, Artificial Sequence
  Description of Artificial Sequence: Synthetic oligonucleotide
  Sense strand starting at position 2069 of SEQ ID NO: 913498
uuggcaguccgucagauga

SEQ ID NO: 931965 - RNA, 19 nt, Artificial Sequence
  Description of Artificial Sequence: Synthetic oligonucleotide
  Antisense strand to SEQ ID NO: 931964
ucaucugacggacugccaa

SEQ ID NO: 931966 - RNA, 19 nt, Artificial Sequence
  Description of Artificial Sequence: Synthetic oligonucleotide
  Sense strand starting at position 2093 of SEQ ID NO: 913498
gcaagaugcgggugaugaa

SEQ ID NO: 931967 - RNA, 19 nt, Artificial Sequence
  Description of Artificial Sequence: Synthetic oligonucleotide
  Antisense strand to SEQ ID NO: 931966
uucaucacccgcaucuugc

SEQ ID NO: 931968 - RNA, 19 nt, Artificial Sequence
  Description of Artificial Sequence: Synthetic oligonucleotide
  Sense strand starting at position 737 of SEQ ID NO: 913498
uugugaagguguccuaacu

SEQ ID NO: 931969 - RNA, 19 nt, Artificial Sequence
  Description of Artificial Sequence: Synthetic oligonucleotide
  Antisense strand to SEQ ID NO: 931968
aguuaggacaccuucacaa

SEQ ID NO: 931970 - RNA, 19 nt, Artificial Sequence
  Description of Artificial Sequence: Synthetic oligonucleotide
  Sense strand starting at position 718 of SEQ ID NO: 913498
gggcguaacccucaagcau

SEQ ID NO: 931971 - RNA, 19 nt, Artificial Sequence
  Description of Artificial Sequence: Synthetic oligonucleotide
  Antisense strand to SEQ ID NO: 931970
augcuugaggguuacgccc

SEQ ID NO: 931972 - RNA, 19 nt, Artificial Sequence
  Description of Artificial Sequence: Synthetic oligonucleotide
  Sense strand starting at position 2427 of SEQ ID NO: 913498
uccauaaauuguucucugu

SEQ ID NO: 931973 - RNA, 19 nt, Artificial Sequence
  Description of Artificial Sequence: Synthetic oligonucleotide
  Antisense strand to SEQ ID NO: 931972
acagagaacaauuuaugga

SEQ ID NO: 931974 - RNA, 19 nt, Artificial Sequence
  Description of Artificial Sequence: Synthetic oligonucleotide
  Sense strand starting at position 2036 of SEQ ID NO: 913498
auaauaaagucacauggaa

SEQ ID NO: 931975 - RNA, 19 nt, Artificial Sequence
  Description of Artificial Sequence: Synthetic oligonucleotide
  Antisense strand to SEQ ID NO: 931974
uuccaugugacuuuauuau

SEQ ID NO: 931976 - RNA, 19 nt, Artificial Sequence
  Description of Artificial Sequence: Synthetic oligonucleotide
  Sense strand starting at position 3484 of SEQ ID NO: 913498
ccagauuguuuaucuuguu

SEQ ID NO: 931977 - RNA, 19 nt, Artificial Sequence
  Description of Artificial Sequence: Synthetic oligonucleotide
  Antisense strand to SEQ ID NO: 931976
aacaagauaaacaaucugg

SEQ ID NO: 931978 - RNA, 19 nt, Artificial Sequence
  Description of Artificial Sequence: Synthetic oligonucleotide
  Sense strand starting at position 3521 of SEQ ID NO: 913498
uuaagucgcucuuugagaa

SEQ ID NO: 931979 - RNA, 19 nt, Artificial Sequence
  Description of Artificial Sequence: Synthetic oligonucleotide
  Antisense strand to SEQ ID NO: 931978
uucucaaagagcgacuuaa

SEQ ID NO: 931980 - RNA, 19 nt, Artificial Sequence
  Description of Artificial Sequence: Synthetic oligonucleotide
  Sense strand starting at position 1011 of SEQ ID NO: 913498
aaacgcgauuccucggaga

SEQ ID NO: 931981 - RNA, 19 nt, Artificial Sequence
  Description of Artificial Sequence: Synthetic oligonucleotide
  Antisense strand to SEQ ID NO: 931980
ucuccgaggaaucgcguuu

SEQ ID NO: 931982 - RNA, 19 nt, Artificial Sequence
  Description of Artificial Sequence: Synthetic oligonucleotide
  Sense strand starting at position 303 of SEQ ID NO: 913499
uuuauuucuuauguggcaa

SEQ ID NO: 931983 - RNA, 19 nt, Artificial Sequence
  Description of Artificial Sequence: Synthetic oligonucleotide
  Antisense strand to SEQ ID NO: 931982
uugccacauaagaaauaaa

SEQ ID NO: 931984 - RNA, 19 nt, Artificial Sequence
  Description of Artificial Sequence: Synthetic oligonucleotide
  Sense strand starting at position 2385 of SEQ ID NO: 913499
cacagauugggauggguca

SEQ ID NO: 931985 - RNA, 19 nt, Artificial Sequence
  Description of Artificial Sequence: Synthetic oligonucleotide
  Antisense strand to SEQ ID NO: 931984
ugacccaucccaaucugug

SEQ ID NO: 931986 - RNA, 19 nt, Artificial Sequence
  Description of Artificial Sequence: Synthetic oligonucleotide
  Sense strand starting at position 3321 of SEQ ID NO: 913499
uggcaaauaagcgaaggau

SEQ ID NO: 931987 - RNA, 19 nt, Artificial Sequence
  Description of Artificial Sequence: Synthetic oligonucleotide
  Antisense strand to SEQ ID NO: 931986
auccuucgcuuauuugcca

SEQ ID NO: 931988 - RNA, 19 nt, Artificial Sequence
  Description of Artificial Sequence: Synthetic oligonucleotide
  Sense strand starting at position 434 of SEQ ID NO: 913499
auuugaagaugugagaaau

SEQ ID NO: 931989 - RNA, 19 nt, Artificial Sequence
  Description of Artificial Sequence: Synthetic oligonucleotide
  Antisense strand to SEQ ID NO: 931988
auuucucacaucuucaaau

SEQ ID NO: 931990 - RNA, 19 nt, Artificial Sequence
  Description of Artificial Sequence: Synthetic oligonucleotide
  Sense strand starting at position 2780 of SEQ ID NO: 913499
ggaaauauacauuguacuu

SEQ ID NO: 931991 - RNA, 19 nt, Artificial Sequence
  Description of Artificial Sequence: Synthetic oligonucleotide
  Antisense strand to SEQ ID NO: 931990
aaguacaauguauauuucc

SEQ ID NO: 931992 - RNA, 19 nt, Artificial Sequence
  Description of Artificial Sequence: Synthetic oligonucleotide
  Sense strand starting at position 2372 of SEQ ID NO: 913499
gcagaugaguaaccacaga

SEQ ID NO: 931993 - RNA, 19 nt, Artificial Sequence
  Description of Artificial Sequence: Synthetic oligonucleotide
  Antisense strand to SEQ ID NO: 931992
ucugugguuacucaucugc

SEQ ID NO: 931994 - RNA, 19 nt, Artificial Sequence
  Description of Artificial Sequence: Synthetic oligonucleotide
  Sense strand starting at position 3291 of SEQ ID NO: 913499
gaaaucuugcaugauguau

SEQ ID NO: 931995 - RNA, 19 nt, Artificial Sequence
  Description of Artificial Sequence: Synthetic oligonucleotide
  Antisense strand to SEQ ID NO: 931994
auacaucaugcaagauuuc

SEQ ID NO: 931996 - RNA, 19 nt, Artificial Sequence
  Description of Artificial Sequence: Synthetic oligonucleotide
  Sense strand starting at position 2539 of SEQ ID NO: 913499
uagcauagagaucgaggau

SEQ ID NO: 931997 - RNA, 19 nt, Artificial Sequence
  Description of Artificial Sequence: Synthetic oligonucleotide
  Antisense strand to SEQ ID NO: 931996
auccucgaucucuaugcua

SEQ ID NO: 931998 - RNA, 19 nt, Artificial Sequence
  Description of Artificial Sequence: Synthetic oligonucleotide
  Sense strand starting at position 1058 of SEQ ID NO: 913499
ccagacaugcauuaagcua

SEQ ID NO: 931999 - RNA, 19 nt, Artificial Sequence
  Description of Artificial Sequence: Synthetic oligonucleotide
  Antisense strand to SEQ ID NO: 931998
uagcuuaaugcaugucugg

SEQ ID NO: 932000 - RNA, 19 nt, Artificial Sequence
  Description of Artificial Sequence: Synthetic oligonucleotide
  Sense strand starting at position 2477 of SEQ ID NO: 913499
ucuuguccucaggaagagu

SEQ ID NO: 932001 - RNA, 19 nt, Artificial Sequence
  Description of Artificial Sequence: Synthetic oligonucleotide
  Antisense strand to SEQ ID NO: 932000
acucuuccugaggacaaga

SEQ ID NO: 932002 - RNA, 19 nt, Artificial Sequence
  Description of Artificial Sequence: Synthetic oligonucleotide
  Sense strand starting at position 3127 of SEQ ID NO: 913499
gaaaguaaugguggacucu

SEQ ID NO: 932003 - RNA, 19 nt, Artificial Sequence
  Description of Artificial Sequence: Synthetic oligonucleotide
  Antisense strand to SEQ ID NO: 932002
agaguccaccauuacuuuc

SEQ ID NO: 932004 - RNA, 19 nt, Artificial Sequence
  Description of Artificial Sequence: Synthetic oligonucleotide
  Sense strand starting at position 3079 of SEQ ID NO: 913499
ucaguauaaccuggacuca

SEQ ID NO: 932005 - RNA, 19 nt, Artificial Sequence
  Description of Artificial Sequence: Synthetic oligonucleotide
  Antisense strand to SEQ ID NO: 932004
ugaguccagguuauacuga

SEQ ID NO: 932006 - RNA, 19 nt, Artificial Sequence
  Description of Artificial Sequence: Synthetic oligonucleotide
  Sense strand starting at position 3370 of SEQ ID NO: 913499
acaagaaggcgugaugagu

SEQ ID NO: 932007 - RNA, 19 nt, Artificial Sequence
  Description of Artificial Sequence: Synthetic oligonucleotide
  Antisense strand to SEQ ID NO: 932006
acucaucacgccuucuugu

SEQ ID NO: 932008 - RNA, 19 nt, Artificial Sequence
  Description of Artificial Sequence: Synthetic oligonucleotide
  Sense strand starting at position 615 of SEQ ID NO: 913499
accguuuaucuacauggau

SEQ ID NO: 932009 - RNA, 19 nt, Artificial Sequence
  Description of Artificial Sequence: Synthetic oligonucleotide
  Antisense strand to SEQ ID NO: 932008
auccauguagauaaacggu

SEQ ID NO: 932010 - RNA, 19 nt, Artificial Sequence
  Description of Artificial Sequence: Synthetic oligonucleotide
  Sense strand starting at position 2072 of SEQ ID NO: 913499
uagucaaaugcugaauagu

SEQ ID NO: 932011 - RNA, 19 nt, Artificial Sequence
  Description of Artificial Sequence: Synthetic oligonucleotide
  Antisense strand to SEQ ID NO: 932010
acuauucagcauuugacua

SEQ ID NO: 932012 - RNA, 19 nt, Artificial Sequence
  Description of Artificial Sequence: Synthetic oligonucleotide
  Sense strand starting at position 3575 of SEQ ID NO: 913499
guaaaugagcuuggaacca

SEQ ID NO: 932013 - RNA, 19 nt, Artificial Sequence
  Description of Artificial Sequence: Synthetic oligonucleotide
  Antisense strand to SEQ ID NO: 932012
ugguuccaagcucauuuac

SEQ ID NO: 932014 - RNA, 19 nt, Artificial Sequence
  Description of Artificial Sequence: Synthetic oligonucleotide
  Sense strand starting at position 1406 of SEQ ID NO: 913499
guaggcuaaguccagauua

SEQ ID NO: 932015 - RNA, 19 nt, Artificial Sequence
  Description of Artificial Sequence: Synthetic oligonucleotide
  Antisense strand to SEQ ID NO: 932014
uaaucuggacuuagccuac

SEQ ID NO: 932016 - RNA, 19 nt, Artificial Sequence
  Description of Artificial Sequence: Synthetic oligonucleotide
  Sense strand starting at position 559 of SEQ ID NO: 913499
uaguuugugaccgaaauug

SEQ ID NO: 932017 - RNA, 19 nt, Artificial Sequence
  Description of Artificial Sequence: Synthetic oligonucleotide
  Antisense strand to SEQ ID NO: 932016
caauuucggucacaaacua

SEQ ID NO: 932018 - RNA, 19 nt, Artificial Sequence
  Description of Artificial Sequence: Synthetic oligonucleotide
  Sense strand starting at position 2474 of SEQ ID NO: 913499
uugucuuguccucaggaag

SEQ ID NO: 932019 - RNA, 19 nt, Artificial Sequence
  Description of Artificial Sequence: Synthetic oligonucleotide
  Antisense strand to SEQ ID NO: 932018
cuuccugaggacaagacaa

SEQ ID NO: 932020 - RNA, 19 nt, Artificial Sequence
  Description of Artificial Sequence: Synthetic oligonucleotide
  Sense strand starting at position 2916 of SEQ ID NO: 913499
ugagcaauccgucaucaaa

SEQ ID NO: 932021 - RNA, 19 nt, Artificial Sequence
  Description of Artificial Sequence: Synthetic oligonucleotide
  Antisense strand to SEQ ID NO: 932020
uuugaugacggauugcuca

SEQ ID NO: 932022 - RNA, 19 nt, Artificial Sequence
  Description of Artificial Sequence: Synthetic oligonucleotide
  Sense strand starting at position 3878 of SEQ ID NO: 913499
ugcauauuuccaugcaguu

SEQ ID NO: 932023 - RNA, 19 nt, Artificial Sequence
  Description of Artificial Sequence: Synthetic oligonucleotide
  Antisense strand to SEQ ID NO: 932022
aacugcauggaaauaugca

SEQ ID NO: 932024 - RNA, 19 nt, Artificial Sequence
  Description of Artificial Sequence: Synthetic oligonucleotide
  Sense strand starting at position 1428 of SEQ ID NO: 913499
cgguauuuggaacgcaagu

SEQ ID NO: 932025 - RNA, 19 nt, Artificial Sequence
  Description of Artificial Sequence: Synthetic oligonucleotide
  Antisense strand to SEQ ID NO: 932024
acuugcguuccaaauaccg

SEQ ID NO: 932026 - RNA, 19 nt, Artificial Sequence
  Description of Artificial Sequence: Synthetic oligonucleotide
  Sense strand starting at position 3290 of SEQ ID NO: 913499
agaaaucuugcaugaugua

SEQ ID NO: 932027 - RNA, 19 nt, Artificial Sequence
  Description of Artificial Sequence: Synthetic oligonucleotide
  Antisense strand to SEQ ID NO: 932026
uacaucaugcaagauuucu

SEQ ID NO: 932028 - RNA, 19 nt, Artificial Sequence
  Description of Artificial Sequence: Synthetic oligonucleotide
  Sense strand starting at position 1513 of SEQ ID NO: 913499
aggcuuagacauugcaaag

SEQ ID NO: 932029 - RNA, 19 nt, Artificial Sequence
  Description of Artificial Sequence: Synthetic oligonucleotide
  Antisense strand to SEQ ID NO: 932028
cuuugcaaugucuaagccu

SEQ ID NO: 932030 - RNA, 19 nt, Artificial Sequence
  Description of Artificial Sequence: Synthetic oligonucleotide
  Sense strand starting at position 3761 of SEQ ID NO: 913499
ggguguguucagucagcgu

SEQ ID NO: 932031 - RNA, 19 nt, Artificial Sequence
  Description of Artificial Sequence: Synthetic oligonucleotide
  Antisense strand to SEQ ID NO: 932030
acgcugacugaacacaccc

SEQ ID NO: 932032 - RNA, 19 nt, Artificial Sequence
  Description of Artificial Sequence: Synthetic oligonucleotide
  Sense strand starting at position 2792 of SEQ ID NO: 913499
uguacuucuguuuauugga

SEQ ID NO: 932033 - RNA, 19 nt, Artificial Sequence
  Description of Artificial Sequence: Synthetic oligonucleotide
  Antisense strand to SEQ ID NO: 932032
uccaauaaacagaaguaca

SEQ ID NO: 932034 - RNA, 19 nt, Artificial Sequence
  Description of Artificial Sequence: Synthetic oligonucleotide
  Sense strand starting at position 3609 of SEQ ID NO: 913499
gaaacaguuugagcccauu

SEQ ID NO: 932035 - RNA, 19 nt, Artificial Sequence
  Description of Artificial Sequence: Synthetic oligonucleotide
  Antisense strand to SEQ ID NO: 932034
aaugggcucaaacuguuuc

SEQ ID NO: 932036 - RNA, 19 nt, Artificial Sequence
  Description of Artificial Sequence: Synthetic oligonucleotide
  Sense strand starting at position 1587 of SEQ ID NO: 913499
cacaaauagcagugagcaa

SEQ ID NO: 932037 - RNA, 19 nt, Artificial Sequence
  Description of Artificial Sequence: Synthetic oligonucleotide
  Antisense strand to SEQ ID NO: 932036
uugcucacugcuauuugug

SEQ ID NO: 932038 - RNA, 19 nt, Artificial Sequence
  Description of Artificial Sequence: Synthetic oligonucleotide
  Sense strand starting at position 2548 of SEQ ID NO: 913499
gaucgaggauuuggaaaua

SEQ ID NO: 932039 - RNA, 19 nt, Artificial Sequence
  Description of Artificial Sequence: Synthetic oligonucleotide
  Antisense strand to SEQ ID NO: 932038
uauuuccaaauccucgauc

SEQ ID NO: 932040 - RNA, 19 nt, Artificial Sequence
  Description of Artificial Sequence: Synthetic oligonucleotide
  Sense strand starting at position 1239 of SEQ ID NO: 913499
cuuccugguaugugagaga

SEQ ID NO: 932041 - RNA, 19 nt, Artificial Sequence
  Description of Artificial Sequence: Synthetic oligonucleotide
  Antisense strand to SEQ ID NO: 932040
ucucucacauaccaggaag

SEQ ID NO: 932042 - RNA, 19 nt, Artificial Sequence
  Description of Artificial Sequence: Synthetic oligonucleotide
  Sense strand starting at position 557 of SEQ ID NO: 913499
aauaguuugugaccgaaau

SEQ ID NO: 932043 - RNA, 19 nt, Artificial Sequence
  Description of Artificial Sequence: Synthetic oligonucleotide
  Antisense strand to SEQ ID NO: 932042
auuucggucacaaacuauu

SEQ ID NO: 932044 - RNA, 19 nt, Artificial Sequence
  Description of Artificial Sequence: Synthetic oligonucleotide
  Sense strand starting at position 2948 of SEQ ID NO: 913499
gcacuauuccaggaggugu

SEQ ID NO: 932045 - RNA, 19 nt, Artificial Sequence
  Description of Artificial Sequence: Synthetic oligonucleotide
  Antisense strand to SEQ ID NO: 932044
acaccuccuggaauagugc

SEQ ID NO: 932046 - RNA, 19 nt, Artificial Sequence
  Description of Artificial Sequence: Synthetic oligonucleotide
  Sense strand starting at position 1007 of SEQ ID NO: 913499
acaagauuauaggagauaa

SEQ ID NO: 932047 - RNA, 19 nt, Artificial Sequence
  Description of Artificial Sequence: Synthetic oligonucleotide
  Antisense strand to SEQ ID NO: 932046
uuaucuccuauaaucuugu

SEQ ID NO: 932048 - RNA, 19 nt, Artificial Sequence
  Description of Artificial Sequence: Synthetic oligonucleotide
  Sense strand starting at position 3203 of SEQ ID NO: 913499
cucugaacuuggucuugau

SEQ ID NO: 932049 - RNA, 19 nt, Artificial Sequence
  Description of Artificial Sequence: Synthetic oligonucleotide
  Antisense strand to SEQ ID NO: 932048
aucaagaccaaguucagag

SEQ ID NO: 932050 - RNA, 19 nt, Artificial Sequence
  Description of Artificial Sequence: Synthetic oligonucleotide
  Sense strand starting at position 925 of SEQ ID NO: 913499
aacgguagauacuaaauuu

SEQ ID NO: 932051 - RNA, 19 nt, Artificial Sequence
  Description of Artificial Sequence: Synthetic oligonucleotide
  Antisense strand to SEQ ID NO: 932050
aaauuuaguaucuaccguu

SEQ ID NO: 932052 - RNA, 19 nt, Artificial Sequence
  Description of Artificial Sequence: Synthetic oligonucleotide
  Sense strand starting at position 2669 of SEQ ID NO: 913499
uggaguccucaucgacaca

SEQ ID NO: 932053 - RNA, 19 nt, Artificial Sequence
  Description of Artificial Sequence: Synthetic oligonucleotide
  Antisense strand to SEQ ID NO: 932052
ugugucgaugaggacucca

SEQ ID NO: 932054 - RNA, 19 nt, Artificial Sequence
  Description of Artificial Sequence: Synthetic oligonucleotide
  Sense strand starting at position 3303 of SEQ ID NO: 913499
gauguaucagcuggacuau

SEQ ID NO: 932055 - RNA, 19 nt, Artificial Sequence
  Description of Artificial Sequence: Synthetic oligonucleotide
  Antisense strand to SEQ ID NO: 932054
auaguccagcugauacauc

SEQ ID NO: 932056 - RNA, 19 nt, Artificial Sequence
  Description of Artificial Sequence: Synthetic oligonucleotide
  Sense strand starting at position 3302 of SEQ ID NO: 913499
ugauguaucagcuggacua

SEQ ID NO: 932057 - RNA, 19 nt, Artificial Sequence
  Description of Artificial Sequence: Synthetic oligonucleotide
  Antisense strand to SEQ ID NO: 932056
uaguccagcugauacauca

SEQ ID NO: 932058 - RNA, 19 nt, Artificial Sequence
  Description of Artificial Sequence: Synthetic oligonucleotide
  Sense strand starting at position 1478 of SEQ ID NO: 913499
gugauuauuccaugcagag

SEQ ID NO: 932059 - RNA, 19 nt, Artificial Sequence
  Description of Artificial Sequence: Synthetic oligonucleotide
  Antisense strand to SEQ ID NO: 932058
cucugcauggaauaaucac

SEQ ID NO: 932060 - RNA, 19 nt, Artificial Sequence
  Description of Artificial Sequence: Synthetic oligonucleotide
  Sense strand starting at position 398 of SEQ ID NO: 913499
cuuagaaaccaacgcuuau

SEQ ID NO: 932061 - RNA, 19 nt, Artificial Sequence
  Description of Artificial Sequence: Synthetic oligonucleotide
  Antisense strand to SEQ ID NO: 932060
auaagcguugguuucuaag

SEQ ID NO: 932062 - RNA, 19 nt, Artificial Sequence
  Description of Artificial Sequence: Synthetic oligonucleotide
  Sense strand starting at position 3426 of SEQ ID NO: 913500
ugcauugagcaauacaaag

SEQ ID NO: 932063 - RNA, 19 nt, Artificial Sequence
  Description of Artificial Sequence: Synthetic oligonucleotide
  Antisense strand to SEQ ID NO: 932062
cuuuguauugcucaaugca

SEQ ID NO: 932064 - RNA, 19 nt, Artificial Sequence
  Description of Artificial Sequence: Synthetic oligonucleotide
  Sense strand starting at position 158 of SEQ ID NO: 913500
aacaaauaucguggaaaug

SEQ ID NO: 932065 - RNA, 19 nt, Artificial Sequence
  Description of Artificial Sequence: Synthetic oligonucleotide
  Antisense strand to SEQ ID NO: 932064
cauuuccacgauauuuguu

SEQ ID NO: 932066 - RNA, 19 nt, Artificial Sequence
  Description of Artificial Sequence: Synthetic oligonucleotide
  Sense strand starting at position 159 of SEQ ID NO: 913500
acaaauaucguggaaaugu

SEQ ID NO: 932067 - RNA, 19 nt, Artificial Sequence
  Description of Artificial Sequence: Synthetic oligonucleotide
  Antisense strand to SEQ ID NO: 932066
acauuuccacgauauuugu

SEQ ID NO: 932068 - RNA, 19 nt, Artificial Sequence
  Description of Artificial Sequence: Synthetic oligonucleotide
  Sense strand starting at position 3443 of SEQ ID NO: 913500
aguaucagaccugggauau

SEQ ID NO: 932069 - RNA, 19 nt, Artificial Sequence
  Description of Artificial Sequence: Synthetic oligonucleotide
  Antisense strand to SEQ ID NO: 932068
auaucccaggucugauacu

SEQ ID NO: 932070 - RNA, 19 nt, Artificial Sequence
  Description of Artificial Sequence: Synthetic oligonucleotide
  Sense strand starting at position 3373 of SEQ ID NO: 913500
agagguuaugaaggcaaau

SEQ ID NO: 932071 - RNA, 19 nt, Artificial Sequence
  Description of Artificial Sequence: Synthetic oligonucleotide
  Antisense strand to SEQ ID NO: 932070
auuugccuucauaaccucu

SEQ ID NO: 932072 - RNA, 19 nt, Artificial Sequence
  Description of Artificial Sequence: Synthetic oligonucleotide
  Sense strand starting at position 488 of SEQ ID NO: 913500
accucaauacugcagagua

SEQ ID NO: 932073 - RNA, 19 nt, Artificial Sequence
  Description of Artificial Sequence: Synthetic oligonucleotide
  Antisense strand to SEQ ID NO: 932072
uacucugcaguauugaggu

SEQ ID NO: 932074 - RNA, 19 nt, Artificial Sequence
  Description of Artificial Sequence: Synthetic oligonucleotide
  Sense strand starting at position 3225 of SEQ ID NO: 913500
acaaauuaugccugaggau

SEQ ID NO: 932075 - RNA, 19 nt, Artificial Sequence
  Description of Artificial Sequence: Synthetic oligonucleotide
  Antisense strand to SEQ ID NO: 932074
auccucaggcauaauuugu

SEQ ID NO: 932076 - RNA, 19 nt, Artificial Sequence
  Description of Artificial Sequence: Synthetic oligonucleotide
  Sense strand starting at position 3423 of SEQ ID NO: 913500
ugaugcauugagcaauaca

SEQ ID NO: 932077 - RNA, 19 nt, Artificial Sequence
  Description of Artificial Sequence: Synthetic oligonucleotide
  Antisense strand to SEQ ID NO: 932076
uguauugcucaaugcauca

SEQ ID NO: 932078 - RNA, 19 nt, Artificial Sequence
  Description of Artificial Sequence: Synthetic oligonucleotide
  Sense strand starting at position 2734 of SEQ ID NO: 913500
ggccaugaagcuuaaauau

SEQ ID NO: 932079 - RNA, 19 nt, Artificial Sequence
  Description of Artificial Sequence: Synthetic oligonucleotide
  Antisense strand to SEQ ID NO: 932078
auauuuaagcuucauggcc

SEQ ID NO: 932080 - RNA, 19 nt, Artificial Sequence
  Description of Artificial Sequence: Synthetic oligonucleotide
  Sense strand starting at position 2443 of SEQ ID NO: 913500
cgaucaccgaaaggauaua

SEQ ID NO: 932081 - RNA, 19 nt, Artificial Sequence
  Description of Artificial Sequence: Synthetic oligonucleotide
  Antisense strand to SEQ ID NO: 932080
uauauccuuucggugaucg

SEQ ID NO: 932082 - RNA, 19 nt, Artificial Sequence
  Description of Artificial Sequence: Synthetic oligonucleotide
  Sense strand starting at position 3560 of SEQ ID NO: 913500
gggcuaaacuaaccuuaau

SEQ ID NO: 932083 - RNA, 19 nt, Artificial Sequence
  Description of Artificial Sequence: Synthetic oligonucleotide
  Antisense strand to SEQ ID NO: 932082
auuaagguuaguuuagccc

SEQ ID NO: 932084 - RNA, 19 nt, Artificial Sequence
  Description of Artificial Sequence: Synthetic oligonucleotide
  Sense strand starting at position 3764 of SEQ ID NO: 913500
cuuaauaauuagcuggaua

SEQ ID NO: 932085 - RNA, 19 nt, Artificial Sequence
  Description of Artificial Sequence: Synthetic oligonucleotide
  Antisense strand to SEQ ID NO: 932084
uauccagcuaauuauuaag

SEQ ID NO: 932086 - RNA, 19 nt, Artificial Sequence
  Description of Artificial Sequence: Synthetic oligonucleotide
  Sense strand starting at position 3444 of SEQ ID NO: 913500
guaucagaccugggauauu

SEQ ID NO: 932087 - RNA, 19 nt, Artificial Sequence
  Description of Artificial Sequence: Synthetic oligonucleotide
  Antisense strand to SEQ ID NO: 932086
aauaucccaggucugauac

SEQ ID NO: 932088 - RNA, 19 nt, Artificial Sequence
  Description of Artificial Sequence: Synthetic oligonucleotide
  Sense strand starting at position 3814 of SEQ ID NO: 913500
uccauacguuauuugcaua

SEQ ID NO: 932089 - RNA, 19 nt, Artificial Sequence
  Description of Artificial Sequence: Synthetic oligonucleotide
  Antisense strand to SEQ ID NO: 932088
uaugcaaauaacguaugga

SEQ ID NO: 932090 - RNA, 19 nt, Artificial Sequence
  Description of Artificial Sequence: Synthetic oligonucleotide
  Sense strand starting at position 950 of SEQ ID NO: 913500
gacaaaccaugauuacgua

SEQ ID NO: 932091 - RNA, 19 nt, Artificial Sequence
  Description of Artificial Sequence: Synthetic oligonucleotide
  Antisense strand to SEQ ID NO: 932090
uacguaaucaugguuuguc

SEQ ID NO: 932092 - RNA, 19 nt, Artificial Sequence
  Description of Artificial Sequence: Synthetic oligonucleotide
  Sense strand starting at position 640 of SEQ ID NO: 913500
uccaauuucucgccugauc

SEQ ID NO: 932093 - RNA, 19 nt, Artificial Sequence
  Description of Artificial Sequence: Synthetic oligonucleotide
  Antisense strand to SEQ ID NO: 932092
gaucaggcgagaaauugga

SEQ ID NO: 932094 - RNA, 19 nt, Artificial Sequence
  Description of Artificial Sequence: Synthetic oligonucleotide
  Sense strand starting at position 2484 of SEQ ID NO: 913500
ucagaucuaugacccaagu

SEQ ID NO: 932095 - RNA, 19 nt, Artificial Sequence
  Description of Artificial Sequence: Synthetic oligonucleotide
  Antisense strand to SEQ ID NO: 932094
acuugggucauagaucuga

SEQ ID NO: 932096 - RNA, 19 nt, Artificial Sequence
  Description of Artificial Sequence: Synthetic oligonucleotide
  Sense strand starting at position 168 of SEQ ID NO: 913500
guggaaauguuacuaauca

SEQ ID NO: 932097 - RNA, 19 nt, Artificial Sequence
  Description of Artificial Sequence: Synthetic oligonucleotide
  Antisense strand to SEQ ID NO: 932096
ugauuaguaacauuuccac

SEQ ID NO: 932098 - RNA, 19 nt, Artificial Sequence
  Description of Artificial Sequence: Synthetic oligonucleotide
  Sense strand starting at position 2689 of SEQ ID NO: 913500
gaaaccagcugagugaauu

SEQ ID NO: 932099 - RNA, 19 nt, Artificial Sequence
  Description of Artificial Sequence: Synthetic oligonucleotide
  Antisense strand to SEQ ID NO: 932098
aauucacucagcugguuuc

SEQ ID NO: 932100 - RNA, 19 nt, Artificial Sequence
  Description of Artificial Sequence: Synthetic oligonucleotide
  Sense strand starting at position 3212 of SEQ ID NO: 913500
gggcuuucuccucacaaau

SEQ ID NO: 932101 - RNA, 19 nt, Artificial Sequence
  Description of Artificial Sequence: Synthetic oligonucleotide
  Antisense strand to SEQ ID NO: 932100
auuugugaggagaaagccc

SEQ ID NO: 932102 - RNA, 19 nt, Artificial Sequence
  Description of Artificial Sequence: Synthetic oligonucleotide
  Sense strand starting at position 3360 of SEQ ID NO: 913500
gcuaacuaucuuuagaggu

SEQ ID NO: 932103 - RNA, 19 nt, Artificial Sequence
  Description of Artificial Sequence: Synthetic oligonucleotide
  Antisense strand to SEQ ID NO: 932102
accucuaaagauaguuagc

SEQ ID NO: 932104 - RNA, 19 nt, Artificial Sequence
  Description of Artificial Sequence: Synthetic oligonucleotide
  Sense strand starting at position 4 of SEQ ID NO: 913500
ucaugauuaggcgaauucu

SEQ ID NO: 932105 - RNA, 19 nt, Artificial Sequence
  Description of Artificial Sequence: Synthetic oligonucleotide
  Antisense strand to SEQ ID NO: 932104
agaauucgccuaaucauga

SEQ ID NO: 932106 - RNA, 19 nt, Artificial Sequence
  Description of Artificial Sequence: Synthetic oligonucleotide
  Sense strand starting at position 3082 of SEQ ID NO: 913500
aauguaugugucuauacag

SEQ ID NO: 932107 - RNA, 19 nt, Artificial Sequence
  Description of Artificial Sequence: Synthetic oligonucleotide
  Antisense strand to SEQ ID NO: 932106
cuguauagacacauacauu

SEQ ID NO: 932108 - RNA, 19 nt, Artificial Sequence
  Description of Artificial Sequence: Synthetic oligonucleotide
  Sense strand starting at position 886 of SEQ ID NO: 913500
uuaguuugacgacauguaa

SEQ ID NO: 932109 - RNA, 19 nt, Artificial Sequence
  Description of Artificial Sequence: Synthetic oligonucleotide
  Antisense strand to SEQ ID NO: 932108
uuacaugucgucaaacuaa

SEQ ID NO: 932110 - RNA, 19 nt, Artificial Sequence
  Description of Artificial Sequence: Synthetic oligonucleotide
  Sense strand starting at position 2996 of SEQ ID NO: 913500
ucauaaauugcguaccaaa

SEQ ID NO: 932111 - RNA, 19 nt, Artificial Sequence
  Description of Artificial Sequence: Synthetic oligonucleotide
  Antisense strand to SEQ ID NO: 932110
uuugguacgcaauuuauga

SEQ ID NO: 932112 - RNA, 19 nt, Artificial Sequence
  Description of Artificial Sequence: Synthetic oligonucleotide
  Sense strand starting at position 2 of SEQ ID NO: 913500
aaucaugauuaggcgaauu

SEQ ID NO: 932113 - RNA, 19 nt, Artificial Sequence
  Description of Artificial Sequence: Synthetic oligonucleotide
  Antisense strand to SEQ ID NO: 932112
aauucgccuaaucaugauu

SEQ ID NO: 932114 - RNA, 19 nt, Artificial Sequence
  Description of Artificial Sequence: Synthetic oligonucleotide
  Sense strand starting at position 2945 of SEQ ID NO: 913500
uagucacaaguauguaaga

SEQ ID NO: 932115 - RNA, 19 nt, Artificial Sequence
  Description of Artificial Sequence: Synthetic oligonucleotide
  Antisense strand to SEQ ID NO: 932114
ucuuacauacuugugacua

SEQ ID NO: 932116 - RNA, 19 nt, Artificial Sequence
  Description of Artificial Sequence: Synthetic oligonucleotide
  Sense strand starting at position 3548 of SEQ ID NO: 913500
ucauuagauguagggcuaa

SEQ ID NO: 932117 - RNA, 19 nt, Artificial Sequence
  Description of Artificial Sequence: Synthetic oligonucleotide
  Antisense strand to SEQ ID NO: 932116
uuagcccuacaucuaauga

SEQ ID NO: 932118 - RNA, 19 nt, Artificial Sequence
  Description of Artificial Sequence: Synthetic oligonucleotide
  Sense strand starting at position 2943 of SEQ ID NO: 913500
uguagucacaaguauguaa

SEQ ID NO: 932119 - RNA, 19 nt, Artificial Sequence
  Description of Artificial Sequence: Synthetic oligonucleotide
  Antisense strand to SEQ ID NO: 932118
uuacauacuugugacuaca

SEQ ID NO: 932120 - RNA, 19 nt, Artificial Sequence
  Description of Artificial Sequence: Synthetic oligonucleotide
  Sense strand starting at position 3969 of SEQ ID NO: 913500
ggcuacauucuguaaggua

SEQ ID NO: 932121 - RNA, 19 nt, Artificial Sequence
  Description of Artificial Sequence: Synthetic oligonucleotide
  Antisense strand to SEQ ID NO: 932120
uaccuuacagaauguagcc

SEQ ID NO: 932122 - RNA, 19 nt, Artificial Sequence
  Description of Artificial Sequence: Synthetic oligonucleotide
  Sense strand starting at position 446 of SEQ ID NO: 913500
gaaaguuaguugccaggga

SEQ ID NO: 932123 - RNA, 19 nt, Artificial Sequence
  Description of Artificial Sequence: Synthetic oligonucleotide
  Antisense strand to SEQ ID NO: 932122
ucccuggcaacuaacuuuc

SEQ ID NO: 932124 - RNA, 19 nt, Artificial Sequence
  Description of Artificial Sequence: Synthetic oligonucleotide
  Sense strand starting at position 373 of SEQ ID NO: 913500
acugcagaguuucucaaga

SEQ ID NO: 932125 - RNA, 19 nt, Artificial Sequence
  Description of Artificial Sequence: Synthetic oligonucleotide
  Antisense strand to SEQ ID NO: 932124
ucuugagaaacucugcagu

SEQ ID NO: 932126 - RNA, 19 nt, Artificial Sequence
  Description of Artificial Sequence: Synthetic oligonucleotide
  Sense strand starting at position 3635 of SEQ ID NO: 913500
augguugcaaucgagugaa

SEQ ID NO: 932127 - RNA, 19 nt, Artificial Sequence
  Description of Artificial Sequence: Synthetic oligonucleotide
  Antisense strand to SEQ ID NO: 932126
uucacucgauugcaaccau

SEQ ID NO: 932128 - RNA, 19 nt, Artificial Sequence
  Description of Artificial Sequence: Synthetic oligonucleotide
  Sense strand starting at position 2818 of SEQ ID NO: 913500
agagaagcuggcgaguuua

SEQ ID NO: 932129 - RNA, 19 nt, Artificial Sequence
  Description of Artificial Sequence: Synthetic oligonucleotide
  Antisense strand to SEQ ID NO: 932128
uaaacucgccagcuucucu

SEQ ID NO: 932130 - RNA, 19 nt, Artificial Sequence
  Description of Artificial Sequence: Synthetic oligonucleotide
  Sense strand starting at position 2699 of SEQ ID NO: 913500
gagugaauucacgaguguu

SEQ ID NO: 932131 - RNA, 19 nt, Artificial Sequence
  Description of Artificial Sequence: Synthetic oligonucleotide
  Antisense strand to SEQ ID NO: 932130
aacacucgugaauucacuc

SEQ ID NO: 932132 - RNA, 19 nt, Artificial Sequence
  Description of Artificial Sequence: Synthetic oligonucleotide
  Sense strand starting at position 230 of SEQ ID NO: 913500
agaugaaccugaucgugua

SEQ ID NO: 932133 - RNA, 19 nt, Artificial Sequence
  Description of Artificial Sequence: Synthetic oligonucleotide
  Antisense strand to SEQ ID NO: 932132
uacacgaucagguucaucu

SEQ ID NO: 932134 - RNA, 19 nt, Artificial Sequence
  Description of Artificial Sequence: Synthetic oligonucleotide
  Sense strand starting at position 3639 of SEQ ID NO: 913500
uugcaaucgagugaauucu

SEQ ID NO: 932135 - RNA, 19 nt, Artificial Sequence
  Description of Artificial Sequence: Synthetic oligonucleotide
  Antisense strand to SEQ ID NO: 932134
agaauucacucgauugcaa

SEQ ID NO: 932136 - RNA, 19 nt, Artificial Sequence
  Description of Artificial Sequence: Synthetic oligonucleotide
  Sense strand starting at position 3339 of SEQ ID NO: 913500
ccagauucuugugugauga

SEQ ID NO: 932137 - RNA, 19 nt, Artificial Sequence
  Description of Artificial Sequence: Synthetic oligonucleotide
  Antisense strand to SEQ ID NO: 932136
ucaucacacaagaaucugg

SEQ ID NO: 932138 - RNA, 19 nt, Artificial Sequence
  Description of Artificial Sequence: Synthetic oligonucleotide
  Sense strand starting at position 3420 of SEQ ID NO: 913500
guuugaugcauugagcaau

SEQ ID NO: 932139 - RNA, 19 nt, Artificial Sequence
  Description of Artificial Sequence: Synthetic oligonucleotide
  Antisense strand to SEQ ID NO: 932138
auugcucaaugcaucaaac

SEQ ID NO: 932140 - RNA, 19 nt, Artificial Sequence
  Description of Artificial Sequence: Synthetic oligonucleotide
  Sense strand starting at position 3842 of SEQ ID NO: 913500
uguauauaaucagcugacu

SEQ ID NO: 932141 - RNA, 19 nt, Artificial Sequence
  Description of Artificial Sequence: Synthetic oligonucleotide
  Antisense strand to SEQ ID NO: 932140
agucagcugauuauauaca

SEQ ID NO: 932142 - RNA, 19 nt, Artificial Sequence
  Description of Artificial Sequence: Synthetic oligonucleotide
  Sense strand starting at position 2360 of SEQ ID NO: 913501
acuaguucugcgcucuuga

SEQ ID NO: 932143 - RNA, 19 nt, Artificial Sequence
  Description of Artificial Sequence: Synthetic oligonucleotide
  Antisense strand to SEQ ID NO: 932142
ucaagagcgcagaacuagu

SEQ ID NO: 932144 - RNA, 19 nt, Artificial Sequence
  Description of Artificial Sequence: Synthetic oligonucleotide
  Sense strand starting at position 3630 of SEQ ID NO: 913501
gugggauuagggugggaaa

SEQ ID NO: 932145 - RNA, 19 nt, Artificial Sequence
  Description of Artificial Sequence: Synthetic oligonucleotide
  Antisense strand to SEQ ID NO: 932144
uuucccacccuaaucccac

SEQ ID NO: 932146 - RNA, 19 nt, Artificial Sequence
  Description of Artificial Sequence: Synthetic oligonucleotide
  Sense strand starting at position 118 of SEQ ID NO: 913501
guuaaagaaaugcaagguu

SEQ ID NO: 932147 - RNA, 19 nt, Artificial Sequence
  Description of Artificial Sequence: Synthetic oligonucleotide
  Antisense strand to SEQ ID NO: 932146
aaccuugcauuucuuuaac

SEQ ID NO: 932148 - RNA, 19 nt, Artificial Sequence
  Description of Artificial Sequence: Synthetic oligonucleotide
  Sense strand starting at position 1028 of SEQ ID NO: 913501
agauaugauugguugauug

SEQ ID NO: 932149 - RNA, 19 nt, Artificial Sequence
  Description of Artificial Sequence: Synthetic oligonucleotide
  Antisense strand to SEQ ID NO: 932148
caaucaaccaaucauaucu

SEQ ID NO: 932150 - RNA, 19 nt, Artificial Sequence
  Description of Artificial Sequence: Synthetic oligonucleotide
  Sense strand starting at position 133 of SEQ ID NO: 913501
gguuauggcgucucucagu

SEQ ID NO: 932151 - RNA, 19 nt, Artificial Sequence
  Description of Artificial Sequence: Synthetic oligonucleotide
  Antisense strand to SEQ ID NO: 932150
acugagagacgccauaacc

SEQ ID NO: 932152 - RNA, 19 nt, Artificial Sequence
  Description of Artificial Sequence: Synthetic oligonucleotide
  Sense strand starting at position 241 of SEQ ID NO: 913501
cuaccaagucauugagaca

SEQ ID NO: 932153 - RNA, 19 nt, Artificial Sequence
  Description of Artificial Sequence: Synthetic oligonucleotide
  Antisense strand to SEQ ID NO: 932152
ugucucaaugacuugguag

SEQ ID NO: 932154 - RNA, 19 nt, Artificial Sequence
  Description of Artificial Sequence: Synthetic oligonucleotide
  Sense strand starting at position 1027 of SEQ ID NO: 913501
cagauaugauugguugauu

SEQ ID NO: 932155 - RNA, 19 nt, Artificial Sequence
  Description of Artificial Sequence: Synthetic oligonucleotide
  Antisense strand to SEQ ID NO: 932154
aaucaaccaaucauaucug

SEQ ID NO: 932156 - RNA, 19 nt, Artificial Sequence
  Description of Artificial Sequence: Synthetic oligonucleotide
  Sense strand starting at position 79 of SEQ ID NO: 913501
gccauuauaaggugaaaga

SEQ ID NO: 932157 - RNA, 19 nt, Artificial Sequence
  Description of Artificial Sequence: Synthetic oligonucleotide
  Antisense strand to SEQ ID NO: 932156
ucuuucaccuuauaauggc

SEQ ID NO: 932158 - RNA, 19 nt, Artificial Sequence
  Description of Artificial Sequence: Synthetic oligonucleotide
  Sense strand starting at position 2918 of SEQ ID NO: 913501
aacguuacugcugagagaa

SEQ ID NO: 932159 - RNA, 19 nt, Artificial Sequence
  Description of Artificial Sequence: Synthetic oligonucleotide
  Antisense strand to SEQ ID NO: 932158
uucucucagcaguaacguu

SEQ ID NO: 932160 - RNA, 19 nt, Artificial Sequence
  Description of Artificial Sequence: Synthetic oligonucleotide
  Sense strand starting at position 1025 of SEQ ID NO: 913501
cucagauaugauugguuga

SEQ ID NO: 932161 - RNA, 19 nt, Artificial Sequence
  Description of Artificial Sequence: Synthetic oligonucleotide
  Antisense strand to SEQ ID NO: 932160
ucaaccaaucauaucugag

SEQ ID NO: 932162 - RNA, 19 nt, Artificial Sequence
  Description of Artificial Sequence: Synthetic oligonucleotide
  Sense strand starting at position 1026 of SEQ ID NO: 913501
ucagauaugauugguugau

SEQ ID NO: 932163 - RNA, 19 nt, Artificial Sequence
  Description of Artificial Sequence: Synthetic oligonucleotide
  Antisense strand to SEQ ID NO: 932162
aucaaccaaucauaucuga

SEQ ID NO: 932164 - RNA, 19 nt, Artificial Sequence
  Description of Artificial Sequence: Synthetic oligonucleotide
  Sense strand starting at position 197 of SEQ ID NO: 913501
acacacuguugacuugaua

SEQ ID NO: 932165 - RNA, 19 nt, Artificial Sequence
  Description of Artificial Sequence: Synthetic oligonucleotide
  Antisense strand to SEQ ID NO: 932164
uaucaagucaacagugugu

SEQ ID NO: 932166 - RNA, 19 nt, Artificial Sequence
  Description of Artificial Sequence: Synthetic oligonucleotide
  Sense strand starting at position 1015 of SEQ ID NO: 913501
acagcaagcccucagauau

SEQ ID NO: 932167 - RNA, 19 nt, Artificial Sequence
  Description of Artificial Sequence: Synthetic oligonucleotide
  Antisense strand to SEQ ID NO: 932166
auaucugagggcuugcugu

SEQ ID NO: 932168 - RNA, 19 nt, Artificial Sequence
  Description of Artificial Sequence: Synthetic oligonucleotide
  Sense strand starting at position 1360 of SEQ ID NO: 913501
gguugauuagcugaaguga

SEQ ID NO: 932169 - RNA, 19 nt, Artificial Sequence
  Description of Artificial Sequence: Synthetic oligonucleotide
  Antisense strand to SEQ ID NO: 932168
ucacuucagcuaaucaacc

SEQ ID NO: 932170 - RNA, 19 nt, Artificial Sequence
  Description of Artificial Sequence: Synthetic oligonucleotide
  Sense strand starting at position 92 of SEQ ID NO: 913501
gaaagauugcaguagcuca

SEQ ID NO: 932171 - RNA, 19 nt, Artificial Sequence
  Description of Artificial Sequence: Synthetic oligonucleotide
  Antisense strand to SEQ ID NO: 932170
ugagcuacugcaaucuuuc

SEQ ID NO: 932172 - RNA, 19 nt, Artificial Sequence
  Description of Artificial Sequence: Synthetic oligonucleotide
  Sense strand starting at position 798 of SEQ ID NO: 913501
uccagucauccacaggguu

SEQ ID NO: 932173 - RNA, 19 nt, Artificial Sequence
  Description of Artificial Sequence: Synthetic oligonucleotide
  Antisense strand to SEQ ID NO: 932172
aacccuguggaugacugga

SEQ ID NO: 932174 - RNA, 19 nt, Artificial Sequence
  Description of Artificial Sequence: Synthetic oligonucleotide
  Sense strand starting at position 1369 of SEQ ID NO: 913501
gcugaagugaccuaaguca

SEQ ID NO: 932175 - RNA, 19 nt, Artificial Sequence
  Description of Artificial Sequence: Synthetic oligonucleotide
  Antisense strand to SEQ ID NO: 932174
ugacuuaggucacuucagc

SEQ ID NO: 932176 - RNA, 19 nt, Artificial Sequence
  Description of Artificial Sequence: Synthetic oligonucleotide
  Sense strand starting at position 163 of SEQ ID NO: 913501
acaggaaguucuuuccuau

SEQ ID NO: 932177 - RNA, 19 nt, Artificial Sequence
  Description of Artificial Sequence: Synthetic oligonucleotide
  Antisense strand to SEQ ID NO: 932176
auaggaaagaacuuccugu

SEQ ID NO: 932178 - RNA, 19 nt, Artificial Sequence
  Description of Artificial Sequence: Synthetic oligonucleotide
  Sense strand starting at position 774 of SEQ ID NO: 913501
gccaccuuucccuguauuu

SEQ ID NO: 932179 - RNA, 19 nt, Artificial Sequence
  Description of Artificial Sequence: Synthetic oligonucleotide
  Antisense strand to SEQ ID NO: 932178
aaauacagggaaagguggc

SEQ ID NO: 932180 - RNA, 19 nt, Artificial Sequence
  Description of Artificial Sequence: Synthetic oligonucleotide
  Sense strand starting at position 3660 of SEQ ID NO: 913501
aagauaaaucaucguguga

SEQ ID NO: 932181 - RNA, 19 nt, Artificial Sequence
  Description of Artificial Sequence: Synthetic oligonucleotide
  Antisense strand to SEQ ID NO: 932180
ucacacgaugauuuaucuu

SEQ ID NO: 932182 - RNA, 19 nt, Artificial Sequence
  Description of Artificial Sequence: Synthetic oligonucleotide
  Sense strand starting at position 2986 of SEQ ID NO: 913501
cauaaacucgcuggagauu

SEQ ID NO: 932183 - RNA, 19 nt, Artificial Sequence
  Description of Artificial Sequence: Synthetic oligonucleotide
  Antisense strand to SEQ ID NO: 932182
aaucuccagcgaguuuaug

SEQ ID NO: 932184 - RNA, 19 nt, Artificial Sequence
  Description of Artificial Sequence: Synthetic oligonucleotide
  Sense strand starting at position 3115 of SEQ ID NO: 913501
augugucuccuuggauaaa

SEQ ID NO: 932185 - RNA, 19 nt, Artificial Sequence
  Description of Artificial Sequence: Synthetic oligonucleotide
  Antisense strand to SEQ ID NO: 932184
uuuauccaaggagacacau

SEQ ID NO: 932186 - RNA, 19 nt, Artificial Sequence
  Description of Artificial Sequence: Synthetic oligonucleotide
  Sense strand starting at position 3113 of SEQ ID NO: 913501
agaugugucuccuuggaua

SEQ ID NO: 932187 - RNA, 19 nt, Artificial Sequence
  Description of Artificial Sequence: Synthetic oligonucleotide
  Antisense strand to SEQ ID NO: 932186
uauccaaggagacacaucu

SEQ ID NO: 932188 - RNA, 19 nt, Artificial Sequence
  Description of Artificial Sequence: Synthetic oligonucleotide
  Sense strand starting at position 106 of SEQ ID NO: 913501
gcucauccaucaguuaaag

SEQ ID NO: 932189 - RNA, 19 nt, Artificial Sequence
  Description of Artificial Sequence: Synthetic oligonucleotide
  Antisense strand to SEQ ID NO: 932188
cuuuaacugauggaugagc

SEQ ID NO: 932190 - RNA, 19 nt, Artificial Sequence
  Description of Artificial Sequence: Synthetic oligonucleotide
  Sense strand starting at position 181 of SEQ ID NO: 913501
uguguuucuguugauaaca

SEQ ID NO: 932191 - RNA, 19 nt, Artificial Sequence
  Description of Artificial Sequence: Synthetic oligonucleotide
  Antisense strand to SEQ ID NO: 932190
uguuaucaacagaaacaca

SEQ ID NO: 932192 - RNA, 19 nt, Artificial Sequence
  Description of Artificial Sequence: Synthetic oligonucleotide
  Sense strand starting at position 2383 of SEQ ID NO: 913501
agauucucccugugugaag

SEQ ID NO: 932193 - RNA, 19 nt, Artificial Sequence
  Description of Artificial Sequence: Synthetic oligonucleotide
  Antisense strand to SEQ ID NO: 932192
cuucacacagggagaaucu

SEQ ID NO: 932194 - RNA, 19 nt, Artificial Sequence
  Description of Artificial Sequence: Synthetic oligonucleotide
  Sense strand starting at position 2876 of SEQ ID NO: 913501
cuaucuauugaucgauucu

SEQ ID NO: 932195 - RNA, 19 nt, Artificial Sequence
  Description of Artificial Sequence: Synthetic oligonucleotide
  Antisense strand to SEQ ID NO: 932194
agaaucgaucaauagauag

SEQ ID NO: 932196 - RNA, 19 nt, Artificial Sequence
  Description of Artificial Sequence: Synthetic oligonucleotide
  Sense strand starting at position 1985 of SEQ ID NO: 913501
gccgcuuccgggaguuuga

SEQ ID NO: 932197 - RNA, 19 nt, Artificial Sequence
  Description of Artificial Sequence: Synthetic oligonucleotide
  Antisense strand to SEQ ID NO: 932196
ucaaacucccggaagcggc

SEQ ID NO: 932198 - RNA, 19 nt, Artificial Sequence
  Description of Artificial Sequence: Synthetic oligonucleotide
  Sense strand starting at position 3525 of SEQ ID NO: 913501
uuuaaagaaucagagaaac

SEQ ID NO: 932199 - RNA, 19 nt, Artificial Sequence
  Description of Artificial Sequence: Synthetic oligonucleotide
  Antisense strand to SEQ ID NO: 932198
guuucucugauucuuuaaa

SEQ ID NO: 932200 - RNA, 19 nt, Artificial Sequence
  Description of Artificial Sequence: Synthetic oligonucleotide
  Sense strand starting at position 2984 of SEQ ID NO: 913501
agcauaaacucgcuggaga

SEQ ID NO: 932201 - RNA, 19 nt, Artificial Sequence
  Description of Artificial Sequence: Synthetic oligonucleotide
  Antisense strand to SEQ ID NO: 932200
ucuccagcgaguuuaugcu

SEQ ID NO: 932202 - RNA, 19 nt, Artificial Sequence
  Description of Artificial Sequence: Synthetic oligonucleotide
  Sense strand starting at position 3664 of SEQ ID NO: 913501
uaaaucaucgugugaacau

SEQ ID NO: 932203 - RNA, 19 nt, Artificial Sequence
  Description of Artificial Sequence: Synthetic oligonucleotide
  Antisense strand to SEQ ID NO: 932202
auguucacacgaugauuua

SEQ ID NO: 932204 - RNA, 19 nt, Artificial Sequence
  Description of Artificial Sequence: Synthetic oligonucleotide
  Sense strand starting at position 2381 of SEQ ID NO: 913501
auagauucucccuguguga

SEQ ID NO: 932205 - RNA, 19 nt, Artificial Sequence
  Description of Artificial Sequence: Synthetic oligonucleotide
  Antisense strand to SEQ ID NO: 932204
ucacacagggagaaucuau

SEQ ID NO: 932206 - RNA, 19 nt, Artificial Sequence
  Description of Artificial Sequence: Synthetic oligonucleotide
  Sense strand starting at position 3111 of SEQ ID NO: 913501
cuagaugugucuccuugga

SEQ ID NO: 932207 - RNA, 19 nt, Artificial Sequence
  Description of Artificial Sequence: Synthetic oligonucleotide
  Antisense strand to SEQ ID NO: 932206
uccaaggagacacaucuag

SEQ ID NO: 932208 - RNA, 19 nt, Artificial Sequence
  Description of Artificial Sequence: Synthetic oligonucleotide
  Sense strand starting at position 166 of SEQ ID NO: 913501
ggaaguucuuuccuaugug

SEQ ID NO: 932209 - RNA, 19 nt, Artificial Sequence
  Description of Artificial Sequence: Synthetic oligonucleotide
  Antisense strand to SEQ ID NO: 932208
cacauaggaaagaacuucc

SEQ ID NO: 932210 - RNA, 19 nt, Artificial Sequence
  Description of Artificial Sequence: Synthetic oligonucleotide
  Sense strand starting at position 2803 of SEQ ID NO: 913501
cagguugaacgcugagauu

SEQ ID NO: 932211 - RNA, 19 nt, Artificial Sequence
  Description of Artificial Sequence: Synthetic oligonucleotide
  Antisense strand to SEQ ID NO: 932210
aaucucagcguucaaccug

SEQ ID NO: 932212 - RNA, 19 nt, Artificial Sequence
  Description of Artificial Sequence: Synthetic oligonucleotide
  Sense strand starting at position 3592 of SEQ ID NO: 913501
gcucccauuucugaaggga

SEQ ID NO: 932213 - RNA, 19 nt, Artificial Sequence
  Description of Artificial Sequence: Synthetic oligonucleotide
  Antisense strand to SEQ ID NO: 932212
ucccuucagaaaugggagc

SEQ ID NO: 932214 - RNA, 19 nt, Artificial Sequence
  Description of Artificial Sequence: Synthetic oligonucleotide
  Sense strand starting at position 2885 of SEQ ID NO: 913501
gaucgauucuagcucuuga

SEQ ID NO: 932215 - RNA, 19 nt, Artificial Sequence
  Description of Artificial Sequence: Synthetic oligonucleotide
  Antisense strand to SEQ ID NO: 932214
ucaagagcuagaaucgauc

SEQ ID NO: 932216 - RNA, 19 nt, Artificial Sequence
  Description of Artificial Sequence: Synthetic oligonucleotide
  Sense strand starting at position 2380 of SEQ ID NO: 913501
cauagauucucccugugug

SEQ ID NO: 932217 - RNA, 19 nt, Artificial Sequence
  Description of Artificial Sequence: Synthetic oligonucleotide
  Antisense strand to SEQ ID NO: 932216
cacacagggagaaucuaug

SEQ ID NO: 932218 - RNA, 19 nt, Artificial Sequence
  Description of Artificial Sequence: Synthetic oligonucleotide
  Sense strand starting at position 3448 of SEQ ID NO: 913501
gauguuagccauuguuaaa

SEQ ID NO: 932219 - RNA, 19 nt, Artificial Sequence
  Description of Artificial Sequence: Synthetic oligonucleotide
  Antisense strand to SEQ ID NO: 932218
uuuaacaauggcuaacauc

SEQ ID NO: 932220 - RNA, 19 nt, Artificial Sequence
  Description of Artificial Sequence: Synthetic oligonucleotide
  Sense strand starting at position 2985 of SEQ ID NO: 913501
gcauaaacucgcuggagau

SEQ ID NO: 932221 - RNA, 19 nt, Artificial Sequence
  Description of Artificial Sequence: Synthetic oligonucleotide
  Antisense strand to SEQ ID NO: 932220
aucuccagcgaguuuaugc

SEQ ID NO: 932222 - RNA, 19 nt, Artificial Sequence
  Description of Artificial Sequence: Synthetic oligonucleotide
  Sense strand starting at position 2380 of SEQ ID NO: 913502
acuaguucugcgcucuuga

SEQ ID NO: 932223 - RNA, 19 nt, Artificial Sequence
  Description of Artificial Sequence: Synthetic oligonucleotide
  Antisense strand to SEQ ID NO: 932222
ucaagagcgcagaacuagu

SEQ ID NO: 932224 - RNA, 19 nt, Artificial Sequence
  Description of Artificial Sequence: Synthetic oligonucleotide
  Sense strand starting at position 3650 of SEQ ID NO: 913502
gugggauuagggugggaaa

SEQ ID NO: 932225 - RNA, 19 nt, Artificial Sequence
  Description of Artificial Sequence: Synthetic oligonucleotide
  Antisense strand to SEQ ID NO: 932224
uuucccacccuaaucccac

SEQ ID NO: 932226 - RNA, 19 nt, Artificial Sequence
  Description of Artificial Sequence: Synthetic oligonucleotide
  Sense strand starting at position 138 of SEQ ID NO: 913502
guuaaagaaaugcaagguu

SEQ ID NO: 932227 - RNA, 19 nt, Artificial Sequence
  Description of Artificial Sequence: Synthetic oligonucleotide
  Antisense strand to SEQ ID NO: 932226
aaccuugcauuucuuuaac

SEQ ID NO: 932228 - RNA, 19 nt, Artificial Sequence
  Description of Artificial Sequence: Synthetic oligonucleotide
  Sense strand starting at position 1048 of SEQ ID NO: 913502
agauaugauugguugauug

SEQ ID NO: 932229 - RNA, 19 nt, Artificial Sequence
  Description of Artificial Sequence: Synthetic oligonucleotide
  Antisense strand to SEQ ID NO: 932228
caaucaaccaaucauaucu

SEQ ID NO: 932230 - RNA, 19 nt, Artificial Sequence
  Description of Artificial Sequence: Synthetic oligonucleotide
  Sense strand starting at position 153 of SEQ ID NO: 913502
gguuauggcgucucucagu

SEQ ID NO: 932231 - RNA, 19 nt, Artificial Sequence
  Description of Artificial Sequence: Synthetic oligonucleotide
  Antisense strand to SEQ ID NO: 932230
acugagagacgccauaacc

SEQ ID NO: 932232 - RNA, 19 nt, Artificial Sequence
  Description of Artificial Sequence: Synthetic oligonucleotide
  Sense strand starting at position 261 of SEQ ID NO: 913502
cuaccaagucauugagaca

SEQ ID NO: 932233 - RNA, 19 nt, Artificial Sequence
  Description of Artificial Sequence: Synthetic oligonucleotide
  Antisense strand to SEQ ID NO: 932232
ugucucaaugacuugguag

SEQ ID NO: 932234 - RNA, 19 nt, Artificial Sequence
  Description of Artificial Sequence: Synthetic oligonucleotide
  Sense strand starting at position 1047 of SEQ ID NO: 913502
cagauaugauugguugauu

SEQ ID NO: 932235 - RNA, 19 nt, Artificial Sequence
  Description of Artificial Sequence: Synthetic oligonucleotide
  Antisense strand to SEQ ID NO: 932234
aaucaaccaaucauaucug

SEQ ID NO: 932236 - RNA, 19 nt, Artificial Sequence
  Description of Artificial Sequence: Synthetic oligonucleotide
  Sense strand starting at position 99 of SEQ ID NO: 913502
gccauuauaaggugaaaga

SEQ ID NO: 932237 - RNA, 19 nt, Artificial Sequence
  Description of Artificial Sequence: Synthetic oligonucleotide
  Antisense strand to SEQ ID NO: 932236
ucuuucaccuuauaauggc

SEQ ID NO: 932238 - RNA, 19 nt, Artificial Sequence
  Description of Artificial Sequence: Synthetic oligonucleotide
  Sense strand starting at position 2938 of SEQ ID NO: 913502
aacguuacugcugagagaa

SEQ ID NO: 932239 - RNA, 19 nt, Artificial Sequence
  Description of Artificial Sequence: Synthetic oligonucleotide
  Antisense strand to SEQ ID NO: 932238
uucucucagcaguaacguu

SEQ ID NO: 932240 - RNA, 19 nt, Artificial Sequence
  Description of Artificial Sequence: Synthetic oligonucleotide
  Sense strand starting at position 1045 of SEQ ID NO: 913502
cucagauaugauugguuga

SEQ ID NO: 932241 - RNA, 19 nt, Artificial Sequence
  Description of Artificial Sequence: Synthetic oligonucleotide
  Antisense strand to SEQ ID NO: 932240
ucaaccaaucauaucugag

SEQ ID NO: 932242 - RNA, 19 nt, Artificial Sequence
  Description of Artificial Sequence: Synthetic oligonucleotide
  Sense strand starting at position 1046 of SEQ ID NO: 913502
ucagauaugauugguugau

SEQ ID NO: 932243 - RNA, 19 nt, Artificial Sequence
  Description of Artificial Sequence: Synthetic oligonucleotide
  Antisense strand to SEQ ID NO: 932242
aucaaccaaucauaucuga

SEQ ID NO: 932244 - RNA, 19 nt, Artificial Sequence
  Description of Artificial Sequence: Synthetic oligonucleotide
  Sense strand starting at position 217 of SEQ ID NO: 913502
acacacuguugacuugaua

SEQ ID NO: 932245 - RNA, 19 nt, Artificial Sequence
  Description of Artificial Sequence: Synthetic oligonucleotide
  Antisense strand to SEQ ID NO: 932244
uaucaagucaacagugugu

SEQ ID NO: 932246 - RNA, 19 nt, Artificial Sequence
  Description of Artificial Sequence: Synthetic oligonucleotide
  Sense strand starting at position 1035 of SEQ ID NO: 913502
acagcaagcccucagauau

SEQ ID NO: 932247 - RNA, 19 nt, Artificial Sequence
  Description of Artificial Sequence: Synthetic oligonucleotide
  Antisense strand to SEQ ID NO: 932246
auaucugagggcuugcugu

SEQ ID NO: 932248 - RNA, 19 nt, Artificial Sequence
  Description of Artificial Sequence: Synthetic oligonucleotide
  Sense strand starting at position 1380 of SEQ ID NO: 913502
gguugauuagcugaaguga

SEQ ID NO: 932249 - RNA, 19 nt, Artificial Sequence
  Description of Artificial Sequence: Synthetic oligonucleotide
  Antisense strand to SEQ ID NO: 932248
ucacuucagcuaaucaacc

SEQ ID NO: 932250 - RNA, 19 nt, Artificial Sequence
  Description of Artificial Sequence: Synthetic oligonucleotide
  Sense strand starting at position 112 of SEQ ID NO: 913502
gaaagauugcaguagcuca

SEQ ID NO: 932251 - RNA, 19 nt, Artificial Sequence
  Description of Artificial Sequence: Synthetic oligonucleotide
  Antisense strand to SEQ ID NO: 932250
ugagcuacugcaaucuuuc

SEQ ID NO: 932252 - RNA, 19 nt, Artificial Sequence
  Description of Artificial Sequence: Synthetic oligonucleotide
  Sense strand starting at position 818 of SEQ ID NO: 913502
uccagucauccacaggguu

SEQ ID NO: 932253 - RNA, 19 nt, Artificial Sequence
  Description of Artificial Sequence: Synthetic oligonucleotide
  Antisense strand to SEQ ID NO: 932252
aacccuguggaugacugga

SEQ ID NO: 932254 - RNA, 19 nt, Artificial Sequence
  Description of Artificial Sequence: Synthetic oligonucleotide
  Sense strand starting at position 1389 of SEQ ID NO: 913502
gcugaagugaccuaaguca

SEQ ID NO: 932255 - RNA, 19 nt, Artificial Sequence
  Description of Artificial Sequence: Synthetic oligonucleotide
  Antisense strand to SEQ ID NO: 932254
ugacuuaggucacuucagc

SEQ ID NO: 932256 - RNA, 19 nt, Artificial Sequence
  Description of Artificial Sequence: Synthetic oligonucleotide
  Sense strand starting at position 183 of SEQ ID NO: 913502
acaggaaguucuuuccuau

SEQ ID NO: 932257 - RNA, 19 nt, Artificial Sequence
  Description of Artificial Sequence: Synthetic oligonucleotide
  Antisense strand to SEQ ID NO: 932256
auaggaaagaacuuccugu

SEQ ID NO: 932258 - RNA, 19 nt, Artificial Sequence
  Description of Artificial Sequence: Synthetic oligonucleotide
  Sense strand starting at position 794 of SEQ ID NO: 913502
gccaccuuucccuguauuu

SEQ ID NO: 932259 - RNA, 19 nt, Artificial Sequence
  Description of Artificial Sequence: Synthetic oligonucleotide
  Antisense strand to SEQ ID NO: 932258
aaauacagggaaagguggc

SEQ ID NO: 932260 - RNA, 19 nt, Artificial Sequence
  Description of Artificial Sequence: Synthetic oligonucleotide
  Sense strand starting at position 3680 of SEQ ID NO: 913502
aagauaaaucaucguguga

SEQ ID NO: 932261 - RNA, 19 nt, Artificial Sequence
  Description of Artificial Sequence: Synthetic oligonucleotide
  Antisense strand to SEQ ID NO: 932260
ucacacgaugauuuaucuu

SEQ ID NO: 932262 - RNA, 19 nt, Artificial Sequence
  Description of Artificial Sequence: Synthetic oligonucleotide
  Sense strand starting at position 15 of SEQ ID NO: 913502
gugaaaucagaacgucuaa

SEQ ID NO: 932263 - RNA, 19 nt, Artificial Sequence
  Description of Artificial Sequence: Synthetic oligonucleotide
  Antisense strand to SEQ ID NO: 932262
uuagacguucugauuucac

SEQ ID NO: 932264 - RNA, 19 nt, Artificial Sequence
  Description of Artificial Sequence: Synthetic oligonucleotide
  Sense strand starting at position 3006 of SEQ ID NO: 913502
cauaaacucgcuggagauu

SEQ ID NO: 932265 - RNA, 19 nt, Artificial Sequence
  Description of Artificial Sequence: Synthetic oligonucleotide
  Antisense strand to SEQ ID NO: 932264
aaucuccagcgaguuuaug

SEQ ID NO: 932266 - RNA, 19 nt, Artificial Sequence
  Description of Artificial Sequence: Synthetic oligonucleotide
  Sense strand starting at position 3135 of SEQ ID NO: 913502
augugucuccuuggauaaa

SEQ ID NO: 932267 - RNA, 19 nt, Artificial Sequence
  Description of Artificial Sequence: Synthetic oligonucleotide
  Antisense strand to SEQ ID NO: 932266
uuuauccaaggagacacau

SEQ ID NO: 932268 - RNA, 19 nt, Artificial Sequence
  Description of Artificial Sequence: Synthetic oligonucleotide
  Sense strand starting at position 3133 of SEQ ID NO: 913502
agaugugucuccuuggaua

SEQ ID NO: 932269 - RNA, 19 nt, Artificial Sequence
  Description of Artificial Sequence: Synthetic oligonucleotide
  Antisense strand to SEQ ID NO: 932268
uauccaaggagacacaucu

SEQ ID NO: 932270 - RNA, 19 nt, Artificial Sequence
  Description of Artificial Sequence: Synthetic oligonucleotide
  Sense strand starting at position 126 of SEQ ID NO: 913502
gcucauccaucaguuaaag

SEQ ID NO: 932271 - RNA, 19 nt, Artificial Sequence
  Description of Artificial Sequence: Synthetic oligonucleotide
  Antisense strand to SEQ ID NO: 932270
cuuuaacugauggaugagc

SEQ ID NO: 932272 - RNA, 19 nt, Artificial Sequence
  Description of Artificial Sequence: Synthetic oligonucleotide
  Sense strand starting at position 201 of SEQ ID NO: 913502
uguguuucuguugauaaca

SEQ ID NO: 932273 - RNA, 19 nt, Artificial Sequence
  Description of Artificial Sequence: Synthetic oligonucleotide
  Antisense strand to SEQ ID NO: 932272
uguuaucaacagaaacaca

SEQ ID NO: 932274 - RNA, 19 nt, Artificial Sequence
  Description of Artificial Sequence: Synthetic oligonucleotide
  Sense strand starting at position 2 of SEQ ID NO: 913502
aagauuguccugugugaaa

SEQ ID NO: 932275 - RNA, 19 nt, Artificial Sequence
  Description of Artificial Sequence: Synthetic oligonucleotide
  Antisense strand to SEQ ID NO: 932274
uuucacacaggacaaucuu

SEQ ID NO: 932276 - RNA, 19 nt, Artificial Sequence
  Description of Artificial Sequence: Synthetic oligonucleotide
  Sense strand starting at position 2403 of SEQ ID NO: 913502
agauucucccugugugaag

SEQ ID NO: 932277 - RNA, 19 nt, Artificial Sequence
  Description of Artificial Sequence: Synthetic oligonucleotide
  Antisense strand to SEQ ID NO: 932276
cuucacacagggagaaucu

SEQ ID NO: 932278 - RNA, 19 nt, Artificial Sequence
  Description of Artificial Sequence: Synthetic oligonucleotide
  Sense strand starting at position 2896 of SEQ ID NO: 913502
cuaucuauugaucgauucu

SEQ ID NO: 932279 - RNA, 19 nt, Artificial Sequence
  Description of Artificial Sequence: Synthetic oligonucleotide
  Antisense strand to SEQ ID NO: 932278
agaaucgaucaauagauag

SEQ ID NO: 932280 - RNA, 19 nt, Artificial Sequence
  Description of Artificial Sequence: Synthetic oligonucleotide
  Sense strand starting at position 2005 of SEQ ID NO: 913502
gccgcuuccgggaguuuga

SEQ ID NO: 932281 - RNA, 19 nt, Artificial Sequence
  Description of Artificial Sequence: Synthetic oligonucleotide
  Antisense strand to SEQ ID NO: 932280
ucaaacucccggaagcggc

SEQ ID NO: 932282 - RNA, 19 nt, Artificial Sequence
  Description of Artificial Sequence: Synthetic oligonucleotide
  Sense strand starting at position 3545 of SEQ ID NO: 913502
uuuaaagaaucagagaaac

SEQ ID NO: 932283 - RNA, 19 nt, Artificial Sequence
  Description of Artificial Sequence: Synthetic oligonucleotide
  Antisense strand to SEQ ID NO: 932282
guuucucugauucuuuaaa

SEQ ID NO: 932284 - RNA, 19 nt, Artificial Sequence
  Description of Artificial Sequence: Synthetic oligonucleotide
  Sense strand starting at position 3004 of SEQ ID NO: 913502
agcauaaacucgcuggaga

SEQ ID NO: 932285 - RNA, 19 nt, Artificial Sequence
  Description of Artificial Sequence: Synthetic oligonucleotide
  Antisense strand to SEQ ID NO: 932284
ucuccagcgaguuuaugcu

SEQ ID NO: 932286 - RNA, 19 nt, Artificial Sequence
  Description of Artificial Sequence: Synthetic oligonucleotide
  Sense strand starting at position 3684 of SEQ ID NO: 913502
uaaaucaucgugugaacau

SEQ ID NO: 932287 - RNA, 19 nt, Artificial Sequence
  Description of Artificial Sequence: Synthetic oligonucleotide
  Antisense strand to SEQ ID NO: 932286
auguucacacgaugauuua

SEQ ID NO: 932288 - RNA, 19 nt, Artificial Sequence
  Description of Artificial Sequence: Synthetic oligonucleotide
  Sense strand starting at position 2401 of SEQ ID NO: 913502
auagauucucccuguguga

SEQ ID NO: 932289 - RNA, 19 nt, Artificial Sequence
  Description of Artificial Sequence: Synthetic oligonucleotide
  Antisense strand to SEQ ID NO: 932288
ucacacagggagaaucuau

SEQ ID NO: 932290 - RNA, 19 nt, Artificial Sequence
  Description of Artificial Sequence: Synthetic oligonucleotide
  Sense strand starting at position 3131 of SEQ ID NO: 913502
cuagaugugucuccuugga

SEQ ID NO: 932291 - RNA, 19 nt, Artificial Sequence
  Description of Artificial Sequence: Synthetic oligonucleotide
  Antisense strand to SEQ ID NO: 932290
uccaaggagacacaucuag

SEQ ID NO: 932292 - RNA, 19 nt, Artificial Sequence
  Description of Artificial Sequence: Synthetic oligonucleotide
  Sense strand starting at position 186 of SEQ ID NO: 913502
ggaaguucuuuccuaugug

SEQ ID NO: 932293 - RNA, 19 nt, Artificial Sequence
  Description of Artificial Sequence: Synthetic oligonucleotide
  Antisense strand to SEQ ID NO: 932292
cacauaggaaagaacuucc

SEQ ID NO: 932294 - RNA, 19 nt, Artificial Sequence
  Description of Artificial Sequence: Synthetic oligonucleotide
  Sense strand starting at position 2823 of SEQ ID NO: 913502
cagguugaacgcugagauu

SEQ ID NO: 932295 - RNA, 19 nt, Artificial Sequence
  Description of Artificial Sequence: Synthetic oligonucleotide
  Antisense strand to SEQ ID NO: 932294
aaucucagcguucaaccug

SEQ ID NO: 932296 - RNA, 19 nt, Artificial Sequence
  Description of Artificial Sequence: Synthetic oligonucleotide
  Sense strand starting at position 3612 of SEQ ID NO: 913502
gcucccauuucugaaggga

SEQ ID NO: 932297 - RNA, 19 nt, Artificial Sequence
  Description of Artificial Sequence: Synthetic oligonucleotide
  Antisense strand to SEQ ID NO: 932296
ucccuucagaaaugggagc

SEQ ID NO: 932298 - RNA, 19 nt, Artificial Sequence
  Description of Artificial Sequence: Synthetic oligonucleotide
  Sense strand starting at position 2905 of SEQ ID NO: 913502
gaucgauucuagcucuuga

SEQ ID NO: 932299 - RNA, 19 nt, Artificial Sequence
  Description of Artificial Sequence: Synthetic oligonucleotide
  Antisense strand to SEQ ID NO: 932298
ucaagagcuagaaucgauc

SEQ ID NO: 932300 - RNA, 19 nt, Artificial Sequence
  Description of Artificial Sequence: Synthetic oligonucleotide
  Sense strand starting at position 2400 of SEQ ID NO: 913502
cauagauucucccugugug

SEQ ID NO: 932301 - RNA, 19 nt, Artificial Sequence
  Description of Artificial Sequence: Synthetic oligonucleotide
  Antisense strand to SEQ ID NO: 932300
cacacagggagaaucuaug

SEQ ID NO: 932302 - RNA, 19 nt, Artificial Sequence
  Description of Artificial Sequence: Synthetic oligonucleotide
  Sense strand starting at position 2191 of SEQ ID NO: 913503
guuauaaaugcagaaacuu

SEQ ID NO: 932303 - RNA, 19 nt, Artificial Sequence
  Description of Artificial Sequence: Synthetic oligonucleotide
  Antisense strand to SEQ ID NO: 932302
aaguuucugcauuuauaac

SEQ ID NO: 932304 - RNA, 19 nt, Artificial Sequence
  Description of Artificial Sequence: Synthetic oligonucleotide
  Sense strand starting at position 1096 of SEQ ID NO: 913503
agguguaugcuagaaagga

SEQ ID NO: 932305 - RNA, 19 nt, Artificial Sequence
  Description of Artificial Sequence: Synthetic oligonucleotide
  Antisense strand to SEQ ID NO: 932304
uccuuucuagcauacaccu

SEQ ID NO: 932306 - RNA, 19 nt, Artificial Sequence
  Description of Artificial Sequence: Synthetic oligonucleotide
  Sense strand starting at position 3178 of SEQ ID NO: 913503
cuggaaguaaccugauuga

SEQ ID NO: 932307 - RNA, 19 nt, Artificial Sequence
  Description of Artificial Sequence: Synthetic oligonucleotide
  Antisense strand to SEQ ID NO: 932306
ucaaucagguuacuuccag

SEQ ID NO: 932308 - RNA, 19 nt, Artificial Sequence
  Description of Artificial Sequence: Synthetic oligonucleotide
  Sense strand starting at position 2689 of SEQ ID NO: 913503
agauaaguaacgugaggaa

SEQ ID NO: 932309 - RNA, 19 nt, Artificial Sequence
  Description of Artificial Sequence: Synthetic oligonucleotide
  Antisense strand to SEQ ID NO: 932308
uuccucacguuacuuaucu

SEQ ID NO: 932310 - RNA, 19 nt, Artificial Sequence
  Description of Artificial Sequence: Synthetic oligonucleotide
  Sense strand starting at position 931 of SEQ ID NO: 913503
uuguuagcagaguaggaaa

SEQ ID NO: 932311 - RNA, 19 nt, Artificial Sequence
  Description of Artificial Sequence: Synthetic oligonucleotide
  Antisense strand to SEQ ID NO: 932310
uuuccuacucugcuaacaa

SEQ ID NO: 932312 - RNA, 19 nt, Artificial Sequence
  Description of Artificial Sequence: Synthetic oligonucleotide
  Sense strand starting at position 213 of SEQ ID NO: 913503
gguucucuagaauaccuuu

SEQ ID NO: 932313 - RNA, 19 nt, Artificial Sequence
  Description of Artificial Sequence: Synthetic oligonucleotide
  Antisense strand to SEQ ID NO: 932312
aaagguauucuagagaacc

SEQ ID NO: 932314 - RNA, 19 nt, Artificial Sequence
  Description of Artificial Sequence: Synthetic oligonucleotide
  Sense strand starting at position 246 of SEQ ID NO: 913503
uggucaauccuggaaagcu

SEQ ID NO: 932315 - RNA, 19 nt, Artificial Sequence
  Description of Artificial Sequence: Synthetic oligonucleotide
  Antisense strand to SEQ ID NO: 932314
agcuuuccaggauugacca

SEQ ID NO: 932316 - RNA, 19 nt, Artificial Sequence
  Description of Artificial Sequence: Synthetic oligonucleotide
  Sense strand starting at position 2301 of SEQ ID NO: 913503
caaucuccgcgcuuucgaa

SEQ ID NO: 932317 - RNA, 19 nt, Artificial Sequence
  Description of Artificial Sequence: Synthetic oligonucleotide
  Antisense strand to SEQ ID NO: 932316
uucgaaagcgcggagauug

SEQ ID NO: 932318 - RNA, 19 nt, Artificial Sequence
  Description of Artificial Sequence: Synthetic oligonucleotide
  Sense strand starting at position 1214 of SEQ ID NO: 913503
gagacauuagaguguccag

SEQ ID NO: 932319 - RNA, 19 nt, Artificial Sequence
  Description of Artificial Sequence: Synthetic oligonucleotide
  Antisense strand to SEQ ID NO: 932318
cuggacacucuaaugucuc

SEQ ID NO: 932320 - RNA, 19 nt, Artificial Sequence
  Description of Artificial Sequence: Synthetic oligonucleotide
  Sense strand starting at position 1190 of SEQ ID NO: 913503
gacacugguuuggugagaa

SEQ ID NO: 932321 - RNA, 19 nt, Artificial Sequence
  Description of Artificial Sequence: Synthetic oligonucleotide
  Antisense strand to SEQ ID NO: 932320
uucucaccaaaccaguguc

SEQ ID NO: 932322 - RNA, 19 nt, Artificial Sequence
  Description of Artificial Sequence: Synthetic oligonucleotide
  Sense strand starting at position 1030 of SEQ ID NO: 913503
ugaagucgacgugaaugaa

SEQ ID NO: 932323 - RNA, 19 nt, Artificial Sequence
  Description of Artificial Sequence: Synthetic oligonucleotide
  Antisense strand to SEQ ID NO: 932322
uucauucacgucgacuuca

SEQ ID NO: 932324 - RNA, 19 nt, Artificial Sequence
  Description of Artificial Sequence: Synthetic oligonucleotide
  Sense strand starting at position 449 of SEQ ID NO: 913503
ugaacauucugcuuaggga

SEQ ID NO: 932325 - RNA, 19 nt, Artificial Sequence
  Description of Artificial Sequence: Synthetic oligonucleotide
  Antisense strand to SEQ ID NO: 932324
ucccuaagcagaauguuca

SEQ ID NO: 932326 - RNA, 19 nt, Artificial Sequence
  Description of Artificial Sequence: Synthetic oligonucleotide
  Sense strand starting at position 3481 of SEQ ID NO: 913503
gcuagauauccacaugguc

SEQ ID NO: 932327 - RNA, 19 nt, Artificial Sequence
  Description of Artificial Sequence: Synthetic oligonucleotide
  Antisense strand to SEQ ID NO: 932326
gaccauguggauaucuagc

SEQ ID NO: 932328 - RNA, 19 nt, Artificial Sequence
  Description of Artificial Sequence: Synthetic oligonucleotide
  Sense strand starting at position 778 of SEQ ID NO: 913503
ggucuucuauacuuggaag

SEQ ID NO: 932329 - RNA, 19 nt, Artificial Sequence
  Description of Artificial Sequence: Synthetic oligonucleotide
  Antisense strand to SEQ ID NO: 932328
cuuccaaguauagaagacc

SEQ ID NO: 932330 - RNA, 19 nt, Artificial Sequence
  Description of Artificial Sequence: Synthetic oligonucleotide
  Sense strand starting at position 1507 of SEQ ID NO: 913503
cgggaauccugagcuagaa

SEQ ID NO: 932331 - RNA, 19 nt, Artificial Sequence
  Description of Artificial Sequence: Synthetic oligonucleotide
  Antisense strand to SEQ ID NO: 932330
uucuagcucaggauucccg

SEQ ID NO: 932332 - RNA, 19 nt, Artificial Sequence
  Description of Artificial Sequence: Synthetic oligonucleotide
  Sense strand starting at position 918 of SEQ ID NO: 913503
gccugcuuugugguuguua

SEQ ID NO: 932333 - RNA, 19 nt, Artificial Sequence
  Description of Artificial Sequence: Synthetic oligonucleotide
  Antisense strand to SEQ ID NO: 932332
uaacaaccacaaagcaggc

SEQ ID NO: 932334 - RNA, 19 nt, Artificial Sequence
  Description of Artificial Sequence: Synthetic oligonucleotide
  Sense strand starting at position 1148 of SEQ ID NO: 913503
uauuaaagguaugcuugaa

SEQ ID NO: 932335 - RNA, 19 nt, Artificial Sequence
  Description of Artificial Sequence: Synthetic oligonucleotide
  Antisense strand to SEQ ID NO: 932334
uucaagcauaccuuuaaua

SEQ ID NO: 932336 - RNA, 19 nt, Artificial Sequence
  Description of Artificial Sequence: Synthetic oligonucleotide
  Sense strand starting at position 2737 of SEQ ID NO: 913503
caaaguugagugggacuuu

SEQ ID NO: 932337 - RNA, 19 nt, Artificial Sequence
  Description of Artificial Sequence: Synthetic oligonucleotide
  Antisense strand to SEQ ID NO: 932336
aaagucccacucaacuuug

SEQ ID NO: 932338 - RNA, 19 nt, Artificial Sequence
  Description of Artificial Sequence: Synthetic oligonucleotide
  Sense strand starting at position 1147 of SEQ ID NO: 913503
auauuaaagguaugcuuga

SEQ ID NO: 932339 - RNA, 19 nt, Artificial Sequence
  Description of Artificial Sequence: Synthetic oligonucleotide
  Antisense strand to SEQ ID NO: 932338
ucaagcauaccuuuaauau

SEQ ID NO: 932340 - RNA, 19 nt, Artificial Sequence
  Description of Artificial Sequence: Synthetic oligonucleotide
  Sense strand starting at position 473 of SEQ ID NO: 913503
ugcacccaucuuugggaaa

SEQ ID NO: 932341 - RNA, 19 nt, Artificial Sequence
  Description of Artificial Sequence: Synthetic oligonucleotide
  Antisense strand to SEQ ID NO: 932340
uuucccaaagaugggugca

SEQ ID NO: 932342 - RNA, 19 nt, Artificial Sequence
  Description of Artificial Sequence: Synthetic oligonucleotide
  Sense strand starting at position 3941 of SEQ ID NO: 913503
acauuuaaguguuaaagga

SEQ ID NO: 932343 - RNA, 19 nt, Artificial Sequence
  Description of Artificial Sequence: Synthetic oligonucleotide
  Antisense strand to SEQ ID NO: 932342
uccuuuaacacuuaaaugu

SEQ ID NO: 932344 - RNA, 19 nt, Artificial Sequence
  Description of Artificial Sequence: Synthetic oligonucleotide
  Sense strand starting at position 1548 of SEQ ID NO: 913503
gacguugcuggguaagaga

SEQ ID NO: 932345 - RNA, 19 nt, Artificial Sequence
  Description of Artificial Sequence: Synthetic oligonucleotide
  Antisense strand to SEQ ID NO: 932344
ucucuuacccagcaacguc

SEQ ID NO: 932346 - RNA, 19 nt, Artificial Sequence
  Description of Artificial Sequence: Synthetic oligonucleotide
  Sense strand starting at position 636 of SEQ ID NO: 913503
ugagauccauuugagucaa

SEQ ID NO: 932347 - RNA, 19 nt, Artificial Sequence
  Description of Artificial Sequence: Synthetic oligonucleotide
  Antisense strand to SEQ ID NO: 932346
uugacucaaauggaucuca

SEQ ID NO: 932348 - RNA, 19 nt, Artificial Sequence
  Description of Artificial Sequence: Synthetic oligonucleotide
  Sense strand starting at position 2261 of SEQ ID NO: 913503
ccagguccgggccaauaau

SEQ ID NO: 932349 - RNA, 19 nt, Artificial Sequence
  Description of Artificial Sequence: Synthetic oligonucleotide
  Antisense strand to SEQ ID NO: 932348
auuauuggcccggaccugg

SEQ ID NO: 932350 - RNA, 19 nt, Artificial Sequence
  Description of Artificial Sequence: Synthetic oligonucleotide
  Sense strand starting at position 2560 of SEQ ID NO: 913503
cgagaccugucucuaaaua

SEQ ID NO: 932351 - RNA, 19 nt, Artificial Sequence
  Description of Artificial Sequence: Synthetic oligonucleotide
  Antisense strand to SEQ ID NO: 932350
uauuuagagacaggucucg

SEQ ID NO: 932352 - RNA, 19 nt, Artificial Sequence
  Description of Artificial Sequence: Synthetic oligonucleotide
  Sense strand starting at position 262 of SEQ ID NO: 913503
gcuguauacguagaugaga

SEQ ID NO: 932353 - RNA, 19 nt, Artificial Sequence
  Description of Artificial Sequence: Synthetic oligonucleotide
  Antisense strand to SEQ ID NO: 932352
ucucaucuacguauacagc

SEQ ID NO: 932354 - RNA, 19 nt, Artificial Sequence
  Description of Artificial Sequence: Synthetic oligonucleotide
  Sense strand starting at position 1097 of SEQ ID NO: 913503
gguguaugcuagaaaggag

SEQ ID NO: 932355 - RNA, 19 nt, Artificial Sequence
  Description of Artificial Sequence: Synthetic oligonucleotide
  Antisense strand to SEQ ID NO: 932354
cuccuuucuagcauacacc

SEQ ID NO: 932356 - RNA, 19 nt, Artificial Sequence
  Description of Artificial Sequence: Synthetic oligonucleotide
  Sense strand starting at position 1027 of SEQ ID NO: 913503
gaaugaagucgacgugaau

SEQ ID NO: 932357 - RNA, 19 nt, Artificial Sequence
  Description of Artificial Sequence: Synthetic oligonucleotide
  Antisense strand to SEQ ID NO: 932356
auucacgucgacuucauuc

SEQ ID NO: 932358 - RNA, 19 nt, Artificial Sequence
  Description of Artificial Sequence: Synthetic oligonucleotide
  Sense strand starting at position 970 of SEQ ID NO: 913503
aagaguauguggccauauu

SEQ ID NO: 932359 - RNA, 19 nt, Artificial Sequence
  Description of Artificial Sequence: Synthetic oligonucleotide
  Antisense strand to SEQ ID NO: 932358
aauauggccacauacucuu

SEQ ID NO: 932360 - RNA, 19 nt, Artificial Sequence
  Description of Artificial Sequence: Synthetic oligonucleotide
  Sense strand starting at position 3167 of SEQ ID NO: 913503
agcagacagcucuggaagu

SEQ ID NO: 932361 - RNA, 19 nt, Artificial Sequence
  Description of Artificial Sequence: Synthetic oligonucleotide
  Antisense strand to SEQ ID NO: 932360
acuuccagagcugucugcu

SEQ ID NO: 932362 - RNA, 19 nt, Artificial Sequence
  Description of Artificial Sequence: Synthetic oligonucleotide
  Sense strand starting at position 254 of SEQ ID NO: 913503
ccuggaaagcuguauacgu

SEQ ID NO: 932363 - RNA, 19 nt, Artificial Sequence
  Description of Artificial Sequence: Synthetic oligonucleotide
  Antisense strand to SEQ ID NO: 932362
acguauacagcuuuccagg

SEQ ID NO: 932364 - RNA, 19 nt, Artificial Sequence
  Description of Artificial Sequence: Synthetic oligonucleotide
  Sense strand starting at position 2066 of SEQ ID NO: 913503
gcagauugguggaaggucu

SEQ ID NO: 932365 - RNA, 19 nt, Artificial Sequence
  Description of Artificial Sequence: Synthetic oligonucleotide
  Antisense strand to SEQ ID NO: 932364
agaccuuccaccaaucugc

SEQ ID NO: 932366 - RNA, 19 nt, Artificial Sequence
  Description of Artificial Sequence: Synthetic oligonucleotide
  Sense strand starting at position 3394 of SEQ ID NO: 913503
augugcuagucacuuggaa

SEQ ID NO: 932367 - RNA, 19 nt, Artificial Sequence
  Description of Artificial Sequence: Synthetic oligonucleotide
  Antisense strand to SEQ ID NO: 932366
uuccaagugacuagcacau

SEQ ID NO: 932368 - RNA, 19 nt, Artificial Sequence
  Description of Artificial Sequence: Synthetic oligonucleotide
  Sense strand starting at position 258 of SEQ ID NO: 913503
gaaagcuguauacguagau

SEQ ID NO: 932369 - RNA, 19 nt, Artificial Sequence
  Description of Artificial Sequence: Synthetic oligonucleotide
  Antisense strand to SEQ ID NO: 932368
aucuacguauacagcuuuc

SEQ ID NO: 932370 - RNA, 19 nt, Artificial Sequence
  Description of Artificial Sequence: Synthetic oligonucleotide
  Sense strand starting at position 3644 of SEQ ID NO: 913503
gggugagcccuguggacau

SEQ ID NO: 932371 - RNA, 19 nt, Artificial Sequence
  Description of Artificial Sequence: Synthetic oligonucleotide
  Antisense strand to SEQ ID NO: 932370
auguccacagggcucaccc

SEQ ID NO: 932372 - RNA, 19 nt, Artificial Sequence
  Description of Artificial Sequence: Synthetic oligonucleotide
  Sense strand starting at position 3949 of SEQ ID NO: 913503
guguuaaaggauugcuuua

SEQ ID NO: 932373 - RNA, 19 nt, Artificial Sequence
  Description of Artificial Sequence: Synthetic oligonucleotide
  Antisense strand to SEQ ID NO: 932372
uaaagcaauccuuuaacac

SEQ ID NO: 932374 - RNA, 19 nt, Artificial Sequence
  Description of Artificial Sequence: Synthetic oligonucleotide
  Sense strand starting at position 680 of SEQ ID NO: 913503
ccuaaaguuccguaggucu

SEQ ID NO: 932375 - RNA, 19 nt, Artificial Sequence
  Description of Artificial Sequence: Synthetic oligonucleotide
  Antisense strand to SEQ ID NO: 932374
agaccuacggaacuuuagg

SEQ ID NO: 932376 - RNA, 19 nt, Artificial Sequence
  Description of Artificial Sequence: Synthetic oligonucleotide
  Sense strand starting at position 622 of SEQ ID NO: 913503
acacaugcuggcugugaga

SEQ ID NO: 932377 - RNA, 19 nt, Artificial Sequence
  Description of Artificial Sequence: Synthetic oligonucleotide
  Antisense strand to SEQ ID NO: 932376
ucucacagccagcaugugu

SEQ ID NO: 932378 - RNA, 19 nt, Artificial Sequence
  Description of Artificial Sequence: Synthetic oligonucleotide
  Sense strand starting at position 1546 of SEQ ID NO: 913503
gggacguugcuggguaaga

SEQ ID NO: 932379 - RNA, 19 nt, Artificial Sequence
  Description of Artificial Sequence: Synthetic oligonucleotide
  Antisense strand to SEQ ID NO: 932378
ucuuacccagcaacguccc

SEQ ID NO: 932380 - RNA, 19 nt, Artificial Sequence
  Description of Artificial Sequence: Synthetic oligonucleotide
  Sense strand starting at position 753 of SEQ ID NO: 913503
gagaaagucucagaaggac

SEQ ID NO: 932381 - RNA, 19 nt, Artificial Sequence
  Description of Artificial Sequence: Synthetic oligonucleotide
  Antisense strand to SEQ ID NO: 932380
guccuucugagacuuucuc

SEQ ID NO: 932382 - RNA, 19 nt, Artificial Sequence
  Description of Artificial Sequence: Synthetic oligonucleotide
  Sense strand starting at position 3502 of SEQ ID NO: 913504
cuuaaauaucaagagugca

SEQ ID NO: 932383 - RNA, 19 nt, Artificial Sequence
  Description of Artificial Sequence: Synthetic oligonucleotide
  Antisense strand to SEQ ID NO: 932382
ugcacucuugauauuuaag

SEQ ID NO: 932384 - RNA, 19 nt, Artificial Sequence
  Description of Artificial Sequence: Synthetic oligonucleotide
  Sense strand starting at position 3329 of SEQ ID NO: 913504
caaagacaguucucagaug

SEQ ID NO: 932385 - RNA, 19 nt, Artificial Sequence
  Description of Artificial Sequence: Synthetic oligonucleotide
  Antisense strand to SEQ ID NO: 932384
caucugagaacugucuuug

SEQ ID NO: 932386 - RNA, 19 nt, Artificial Sequence
  Description of Artificial Sequence: Synthetic oligonucleotide
  Sense strand starting at position 3758 of SEQ ID NO: 913504
guggaugaucccuggagga

SEQ ID NO: 932387 - RNA, 19 nt, Artificial Sequence
  Description of Artificial Sequence: Synthetic oligonucleotide
  Antisense strand to SEQ ID NO: 932386
uccuccagggaucauccac

SEQ ID NO: 932388 - RNA, 19 nt, Artificial Sequence
  Description of Artificial Sequence: Synthetic oligonucleotide
  Sense strand starting at position 2926 of SEQ ID NO: 913504
uggaauuccacccgggaga

SEQ ID NO: 932389 - RNA, 19 nt, Artificial Sequence
  Description of Artificial Sequence: Synthetic oligonucleotide
  Antisense strand to SEQ ID NO: 932388
ucucccggguggaauucca

SEQ ID NO: 932390 - RNA, 19 nt, Artificial Sequence
  Description of Artificial Sequence: Synthetic oligonucleotide
  Sense strand starting at position 864 of SEQ ID NO: 913504
gcaaguuucgugucacucu

SEQ ID NO: 932391 - RNA, 19 nt, Artificial Sequence
  Description of Artificial Sequence: Synthetic oligonucleotide
  Antisense strand to SEQ ID NO: 932390
agagugacacgaaacuugc

SEQ ID NO: 932392 - RNA, 19 nt, Artificial Sequence
  Description of Artificial Sequence: Synthetic oligonucleotide
  Sense strand starting at position 494 of SEQ ID NO: 913504
gcacaauuagaccgaaaua

SEQ ID NO: 932393 - RNA, 19 nt, Artificial Sequence
  Description of Artificial Sequence: Synthetic oligonucleotide
  Antisense strand to SEQ ID NO: 932392
uauuucggucuaauugugc

SEQ ID NO: 932394 - RNA, 19 nt, Artificial Sequence
  Description of Artificial Sequence: Synthetic oligonucleotide
  Sense strand starting at position 853 of SEQ ID NO: 913504
caggaaauggugcaaguuu

SEQ ID NO: 932395 - RNA, 19 nt, Artificial Sequence
  Description of Artificial Sequence: Synthetic oligonucleotide
  Antisense strand to SEQ ID NO: 932394
aaacuugcaccauuuccug

SEQ ID NO: 932396 - RNA, 19 nt, Artificial Sequence
  Description of Artificial Sequence: Synthetic oligonucleotide
  Sense strand starting at position 872 of SEQ ID NO: 913504
cgugucacucuggaaagga

SEQ ID NO: 932397 - RNA, 19 nt, Artificial Sequence
  Description of Artificial Sequence: Synthetic oligonucleotide
  Antisense strand to SEQ ID NO: 932396
uccuuuccagagugacacg

SEQ ID NO: 932398 - RNA, 19 nt, Artificial Sequence
  Description of Artificial Sequence: Synthetic oligonucleotide
  Sense strand starting at position 370 of SEQ ID NO: 913504
ucacccagucagugagaaa

SEQ ID NO: 932399 - RNA, 19 nt, Artificial Sequence
  Description of Artificial Sequence: Synthetic oligonucleotide
  Antisense strand to SEQ ID NO: 932398
uuucucacugacuggguga

SEQ ID NO: 932400 - RNA, 19 nt, Artificial Sequence
  Description of Artificial Sequence: Synthetic oligonucleotide
  Sense strand starting at position 273 of SEQ ID NO: 913504
ugaucacacgugcaugaaa

SEQ ID NO: 932401 - RNA, 19 nt, Artificial Sequence
  Description of Artificial Sequence: Synthetic oligonucleotide
  Antisense strand to SEQ ID NO: 932400
uuucaugcacgugugauca

SEQ ID NO: 932402 - RNA, 19 nt, Artificial Sequence
  Description of Artificial Sequence: Synthetic oligonucleotide
  Sense strand starting at position 3888 of SEQ ID NO: 913504
ugccaucacccaggaaauu

SEQ ID NO: 932403 - RNA, 19 nt, Artificial Sequence
  Description of Artificial Sequence: Synthetic oligonucleotide
  Antisense strand to SEQ ID NO: 932402
aauuuccugggugauggca

SEQ ID NO: 932404 - RNA, 19 nt, Artificial Sequence
  Description of Artificial Sequence: Synthetic oligonucleotide
  Sense strand starting at position 1129 of SEQ ID NO: 913504
cugccucaucugcaagaga

SEQ ID NO: 932405 - RNA, 19 nt, Artificial Sequence
  Description of Artificial Sequence: Synthetic oligonucleotide
  Antisense strand to SEQ ID NO: 932404
ucucuugcagaugaggcag

SEQ ID NO: 932406 - RNA, 19 nt, Artificial Sequence
  Description of Artificial Sequence: Synthetic oligonucleotide
  Sense strand starting at position 221 of SEQ ID NO: 913504
cucggaauucggcaugaau

SEQ ID NO: 932407 - RNA, 19 nt, Artificial Sequence
  Description of Artificial Sequence: Synthetic oligonucleotide
  Antisense strand to SEQ ID NO: 932406
auucaugccgaauuccgag

SEQ ID NO: 932408 - RNA, 19 nt, Artificial Sequence
  Description of Artificial Sequence: Synthetic oligonucleotide
  Sense strand starting at position 3898 of SEQ ID NO: 913504
caggaaauucgagggcuuu

SEQ ID NO: 932409 - RNA, 19 nt, Artificial Sequence
  Description of Artificial Sequence: Synthetic oligonucleotide
  Antisense strand to SEQ ID NO: 932408
aaagcccucgaauuuccug

SEQ ID NO: 932410 - RNA, 19 nt, Artificial Sequence
  Description of Artificial Sequence: Synthetic oligonucleotide
  Sense strand starting at position 3730 of SEQ ID NO: 913504
ggcuccaucgcagacauga

SEQ ID NO: 932411 - RNA, 19 nt, Artificial Sequence
  Description of Artificial Sequence: Synthetic oligonucleotide
  Antisense strand to SEQ ID NO: 932410
ucaugucugcgauggagcc

SEQ ID NO: 932412 - RNA, 19 nt, Artificial Sequence
  Description of Artificial Sequence: Synthetic oligonucleotide
  Sense strand starting at position 2425 of SEQ ID NO: 913504
ucauuccgucauuacuuua

SEQ ID NO: 932413 - RNA, 19 nt, Artificial Sequence
  Description of Artificial Sequence: Synthetic oligonucleotide
  Antisense strand to SEQ ID NO: 932412
uaaaguaaugacggaauga

SEQ ID NO: 932414 - RNA, 19 nt, Artificial Sequence
  Description of Artificial Sequence: Synthetic oligonucleotide
  Sense strand starting at position 3377 of SEQ ID NO: 913504
uggguacagccucgauaaa

SEQ ID NO: 932415 - RNA, 19 nt, Artificial Sequence
  Description of Artificial Sequence: Synthetic oligonucleotide
  Antisense strand to SEQ ID NO: 932414
uuuaucgaggcuguaccca

SEQ ID NO: 932416 - RNA, 19 nt, Artificial Sequence
  Description of Artificial Sequence: Synthetic oligonucleotide
  Sense strand starting at position 210 of SEQ ID NO: 913504
agaggcuguuacucggaau

SEQ ID NO: 932417 - RNA, 19 nt, Artificial Sequence
  Description of Artificial Sequence: Synthetic oligonucleotide
  Antisense strand to SEQ ID NO: 932416
auuccgaguaacagccucu

SEQ ID NO: 932418 - RNA, 19 nt, Artificial Sequence
  Description of Artificial Sequence: Synthetic oligonucleotide
  Sense strand starting at position 3347 of SEQ ID NO: 913504
gggccuuuguugguaaaga

SEQ ID NO: 932419 - RNA, 19 nt, Artificial Sequence
  Description of Artificial Sequence: Synthetic oligonucleotide
  Antisense strand to SEQ ID NO: 932418
ucuuuaccaacaaaggccc

SEQ ID NO: 932420 - RNA, 19 nt, Artificial Sequence
  Description of Artificial Sequence: Synthetic oligonucleotide
  Sense strand starting at position 938 of SEQ ID NO: 913504
cuggcauugcucuggagau

SEQ ID NO: 932421 - RNA, 19 nt, Artificial Sequence
  Description of Artificial Sequence: Synthetic oligonucleotide
  Antisense strand to SEQ ID NO: 932420
aucuccagagcaaugccag

SEQ ID NO: 932422 - RNA, 19 nt, Artificial Sequence
  Description of Artificial Sequence: Synthetic oligonucleotide
  Sense strand starting at position 3294 of SEQ ID NO: 913504
gccucagaucccugcuaaa

SEQ ID NO: 932423 - RNA, 19 nt, Artificial Sequence
  Description of Artificial Sequence: Synthetic oligonucleotide
  Antisense strand to SEQ ID NO: 932422
uuuagcagggaucugaggc

SEQ ID NO: 932424 - RNA, 19 nt, Artificial Sequence
  Description of Artificial Sequence: Synthetic oligonucleotide
  Sense strand starting at position 211 of SEQ ID NO: 913504
gaggcuguuacucggaauu

SEQ ID NO: 932425 - RNA, 19 nt, Artificial Sequence
  Description of Artificial Sequence: Synthetic oligonucleotide
  Antisense strand to SEQ ID NO: 932424
aauuccgaguaacagccuc

SEQ ID NO: 932426 - RNA, 19 nt, Artificial Sequence
  Description of Artificial Sequence: Synthetic oligonucleotide
  Sense strand starting at position 3192 of SEQ ID NO: 913504
auaccuacaugggaucaaa

SEQ ID NO: 932427 - RNA, 19 nt, Artificial Sequence
  Description of Artificial Sequence: Synthetic oligonucleotide
  Antisense strand to SEQ ID NO: 932426
uuugaucccauguagguau

SEQ ID NO: 932428 - RNA, 19 nt, Artificial Sequence
  Description of Artificial Sequence: Synthetic oligonucleotide
  Sense strand starting at position 1685 of SEQ ID NO: 913504
guuugcucuggucagacga

SEQ ID NO: 932429 - RNA, 19 nt, Artificial Sequence
  Description of Artificial Sequence: Synthetic oligonucleotide
  Antisense strand to SEQ ID NO: 932428
ucgucugaccagagcaaac

SEQ ID NO: 932430 - RNA, 19 nt, Artificial Sequence
  Description of Artificial Sequence: Synthetic oligonucleotide
  Sense strand starting at position 271 of SEQ ID NO: 913504
agugaucacacgugcauga

SEQ ID NO: 932431 - RNA, 19 nt, Artificial Sequence
  Description of Artificial Sequence: Synthetic oligonucleotide
  Antisense strand to SEQ ID NO: 932430
ucaugcacgugugaucacu

SEQ ID NO: 932432 - RNA, 19 nt, Artificial Sequence
  Description of Artificial Sequence: Synthetic oligonucleotide
  Sense strand starting at position 223 of SEQ ID NO: 913504
cggaauucggcaugaaugu

SEQ ID NO: 932433 - RNA, 19 nt, Artificial Sequence
  Description of Artificial Sequence: Synthetic oligonucleotide
  Antisense strand to SEQ ID NO: 932432
acauucaugccgaauuccg

SEQ ID NO: 932434 - RNA, 19 nt, Artificial Sequence
  Description of Artificial Sequence: Synthetic oligonucleotide
  Sense strand starting at position 3670 of SEQ ID NO: 913504
cguggauguguucagcaac

SEQ ID NO: 932435 - RNA, 19 nt, Artificial Sequence
  Description of Artificial Sequence: Synthetic oligonucleotide
  Antisense strand to SEQ ID NO: 932434
guugcugaacacauccacg

SEQ ID NO: 932436 - RNA, 19 nt, Artificial Sequence
  Description of Artificial Sequence: Synthetic oligonucleotide
  Sense strand starting at position 3426 of SEQ ID NO: 913504
aacauaauguaguaagaga

SEQ ID NO: 932437 - RNA, 19 nt, Artificial Sequence
  Description of Artificial Sequence: Synthetic oligonucleotide
  Antisense strand to SEQ ID NO: 932436
ucucuuacuacauuauguu

SEQ ID NO: 932438 - RNA, 19 nt, Artificial Sequence
  Description of Artificial Sequence: Synthetic oligonucleotide
  Sense strand starting at position 414 of SEQ ID NO: 913504
gguucuccuuuggcaaagu

SEQ ID NO: 932439 - RNA, 19 nt, Artificial Sequence
  Description of Artificial Sequence: Synthetic oligonucleotide
  Antisense strand to SEQ ID NO: 932438
acuuugccaaaggagaacc

SEQ ID NO: 932440 - RNA, 19 nt, Artificial Sequence
  Description of Artificial Sequence: Synthetic oligonucleotide
  Sense strand starting at position 3793 of SEQ ID NO: 913504
gagagcugcaggugcuaau

SEQ ID NO: 932441 - RNA, 19 nt, Artificial Sequence
  Description of Artificial Sequence: Synthetic oligonucleotide
  Antisense strand to SEQ ID NO: 932440
auuagcaccugcagcucuc

SEQ ID NO: 932442 - RNA, 19 nt, Artificial Sequence
  Description of Artificial Sequence: Synthetic oligonucleotide
  Sense strand starting at position 1881 of SEQ ID NO: 913504
gcgugaugaccagguccau

SEQ ID NO: 932443 - RNA, 19 nt, Artificial Sequence
  Description of Artificial Sequence: Synthetic oligonucleotide
  Antisense strand to SEQ ID NO: 932442
auggaccuggucaucacgc

SEQ ID NO: 932444 - RNA, 19 nt, Artificial Sequence
  Description of Artificial Sequence: Synthetic oligonucleotide
  Sense strand starting at position 1127 of SEQ ID NO: 913504
ggcugccucaucugcaaga

SEQ ID NO: 932445 - RNA, 19 nt, Artificial Sequence
  Description of Artificial Sequence: Synthetic oligonucleotide
  Antisense strand to SEQ ID NO: 932444
ucuugcagaugaggcagcc

SEQ ID NO: 932446 - RNA, 19 nt, Artificial Sequence
  Description of Artificial Sequence: Synthetic oligonucleotide
  Sense strand starting at position 412 of SEQ ID NO: 913504
ucgguucuccuuuggcaaa

SEQ ID NO: 932447 - RNA, 19 nt, Artificial Sequence
  Description of Artificial Sequence: Synthetic oligonucleotide
  Antisense strand to SEQ ID NO: 932446
uuugccaaaggagaaccga

SEQ ID NO: 932448 - RNA, 19 nt, Artificial Sequence
  Description of Artificial Sequence: Synthetic oligonucleotide
  Sense strand starting at position 15 of SEQ ID NO: 913504
uacagagucucgcugucau

SEQ ID NO: 932449 - RNA, 19 nt, Artificial Sequence
  Description of Artificial Sequence: Synthetic oligonucleotide
  Antisense strand to SEQ ID NO: 932448
augacagcgagacucugua

SEQ ID NO: 932450 - RNA, 19 nt, Artificial Sequence
  Description of Artificial Sequence: Synthetic oligonucleotide
  Sense strand starting at position 3499 of SEQ ID NO: 913504
agccuuaaauaucaagagu

SEQ ID NO: 932451 - RNA, 19 nt, Artificial Sequence
  Description of Artificial Sequence: Synthetic oligonucleotide
  Antisense strand to SEQ ID NO: 932450
acucuugauauuuaaggcu

SEQ ID NO: 932452 - RNA, 19 nt, Artificial Sequence
  Description of Artificial Sequence: Synthetic oligonucleotide
  Sense strand starting at position 3297 of SEQ ID NO: 913504
ucagaucccugcuaaauga

SEQ ID NO: 932453 - RNA, 19 nt, Artificial Sequence
  Description of Artificial Sequence: Synthetic oligonucleotide
  Antisense strand to SEQ ID NO: 932452
ucauuuagcagggaucuga

SEQ ID NO: 932454 - RNA, 19 nt, Artificial Sequence
  Description of Artificial Sequence: Synthetic oligonucleotide
  Sense strand starting at position 577 of SEQ ID NO: 913504
cugugugucaccuguguau

SEQ ID NO: 932455 - RNA, 19 nt, Artificial Sequence
  Description of Artificial Sequence: Synthetic oligonucleotide
  Antisense strand to SEQ ID NO: 932454
auacacaggugacacacag

SEQ ID NO: 932456 - RNA, 19 nt, Artificial Sequence
  Description of Artificial Sequence: Synthetic oligonucleotide
  Sense strand starting at position 3244 of SEQ ID NO: 913504
gucguauguuucucaggcu

SEQ ID NO: 932457 - RNA, 19 nt, Artificial Sequence
  Description of Artificial Sequence: Synthetic oligonucleotide
  Antisense strand to SEQ ID NO: 932456
agccugagaaacauacgac

SEQ ID NO: 932458 - RNA, 19 nt, Artificial Sequence
  Description of Artificial Sequence: Synthetic oligonucleotide
  Sense strand starting at position 1538 of SEQ ID NO: 913504
ugaggaagguuuggucacu

SEQ ID NO: 932459 - RNA, 19 nt, Artificial Sequence
  Description of Artificial Sequence: Synthetic oligonucleotide
  Antisense strand to SEQ ID NO: 932458
agugaccaaaccuuccuca

SEQ ID NO: 932460 - RNA, 19 nt, Artificial Sequence
  Description of Artificial Sequence: Synthetic oligonucleotide
  Sense strand starting at position 3348 of SEQ ID NO: 913504
ggccuuuguugguaaagac

SEQ ID NO: 932461 - RNA, 19 nt, Artificial Sequence
  Description of Artificial Sequence: Synthetic oligonucleotide
  Antisense strand to SEQ ID NO: 932460
gucuuuaccaacaaaggcc

SEQ ID NO: 932462 - RNA, 19 nt, Artificial Sequence
  Description of Artificial Sequence: Synthetic oligonucleotide
  Sense strand starting at position 834 of SEQ ID NO: 913505
gcaagagaguaacuagaau

SEQ ID NO: 932463 - RNA, 19 nt, Artificial Sequence
  Description of Artificial Sequence: Synthetic oligonucleotide
  Antisense strand to SEQ ID NO: 932462
auucuaguuacucucuugc

SEQ ID NO: 932464 - RNA, 19 nt, Artificial Sequence
  Description of Artificial Sequence: Synthetic oligonucleotide
  Sense strand starting at position 1786 of SEQ ID NO: 913505
gacaaucgucaguaggaga

SEQ ID NO: 932465 - RNA, 19 nt, Artificial Sequence
  Description of Artificial Sequence: Synthetic oligonucleotide
  Antisense strand to SEQ ID NO: 932464
ucuccuacugacgauuguc

SEQ ID NO: 932466 - RNA, 19 nt, Artificial Sequence
  Description of Artificial Sequence: Synthetic oligonucleotide
  Sense strand starting at position 1414 of SEQ ID NO: 913505
aggaaaucagggugugaca

SEQ ID NO: 932467 - RNA, 19 nt, Artificial Sequence
  Description of Artificial Sequence: Synthetic oligonucleotide
  Antisense strand to SEQ ID NO: 932466
ugucacacccugauuuccu

SEQ ID NO: 932468 - RNA, 19 nt, Artificial Sequence
  Description of Artificial Sequence: Synthetic oligonucleotide
  Sense strand starting at position 1541 of SEQ ID NO: 913505
augguaucacuccaugacu

SEQ ID NO: 932469 - RNA, 19 nt, Artificial Sequence
  Description of Artificial Sequence: Synthetic oligonucleotide
  Antisense strand to SEQ ID NO: 932468
agucauggagugauaccau

SEQ ID NO: 932470 - RNA, 19 nt, Artificial Sequence
  Description of Artificial Sequence: Synthetic oligonucleotide
  Sense strand starting at position 53 of SEQ ID NO: 913505
ggaugaaaucaacgugaac

SEQ ID NO: 932471 - RNA, 19 nt, Artificial Sequence
  Description of Artificial Sequence: Synthetic oligonucleotide
  Antisense strand to SEQ ID NO: 932470
guucacguugauuucaucc

SEQ ID NO: 932472 - RNA, 19 nt, Artificial Sequence
  Description of Artificial Sequence: Synthetic oligonucleotide
  Sense strand starting at position 711 of SEQ ID NO: 913505
uaugaaagagaucguauga

SEQ ID NO: 932473 - RNA, 19 nt, Artificial Sequence
  Description of Artificial Sequence: Synthetic oligonucleotide
  Antisense strand to SEQ ID NO: 932472
ucauacgaucucuuucaua

SEQ ID NO: 932474 - RNA, 19 nt, Artificial Sequence
  Description of Artificial Sequence: Synthetic oligonucleotide
  Sense strand starting at position 3890 of SEQ ID NO: 913505
ccuuuaugucuuuaaggga

SEQ ID NO: 932475 - RNA, 19 nt, Artificial Sequence
  Description of Artificial Sequence: Synthetic oligonucleotide
  Antisense strand to SEQ ID NO: 932474
ucccuuaaagacauaaagg

SEQ ID NO: 932476 - RNA, 19 nt, Artificial Sequence
  Description of Artificial Sequence: Synthetic oligonucleotide
  Sense strand starting at position 2320 of SEQ ID NO: 913505
gaagguuccggaugaggga

SEQ ID NO: 932477 - RNA, 19 nt, Artificial Sequence
  Description of Artificial Sequence: Synthetic oligonucleotide
  Antisense strand to SEQ ID NO: 932476
ucccucauccggaaccuuc

SEQ ID NO: 932478 - RNA, 19 nt, Artificial Sequence
  Description of Artificial Sequence: Synthetic oligonucleotide
  Sense strand starting at position 2912 of SEQ ID NO: 913505
ggaucuguccucguugcga

SEQ ID NO: 932479 - RNA, 19 nt, Artificial Sequence
  Description of Artificial Sequence: Synthetic oligonucleotide
  Antisense strand to SEQ ID NO: 932478
ucgcaacgaggacagaucc

SEQ ID NO: 932480 - RNA, 19 nt, Artificial Sequence
  Description of Artificial Sequence: Synthetic oligonucleotide
  Sense strand starting at position 3011 of SEQ ID NO: 913505
ccagguguuagguaacaag

SEQ ID NO: 932481 - RNA, 19 nt, Artificial Sequence
  Description of Artificial Sequence: Synthetic oligonucleotide
  Antisense strand to SEQ ID NO: 932480
cuuguuaccuaacaccugg

SEQ ID NO: 932482 - RNA, 19 nt, Artificial Sequence
  Description of Artificial Sequence: Synthetic oligonucleotide
  Sense strand starting at position 1412 of SEQ ID NO: 913505
uuaggaaaucaggguguga

SEQ ID NO: 932483 - RNA, 19 nt, Artificial Sequence
  Description of Artificial Sequence: Synthetic oligonucleotide
  Antisense strand to SEQ ID NO: 932482
ucacacccugauuuccuaa

SEQ ID NO: 932484 - RNA, 19 nt, Artificial Sequence
  Description of Artificial Sequence: Synthetic oligonucleotide
  Sense strand starting at position 55 of SEQ ID NO: 913505
augaaaucaacgugaacug

SEQ ID NO: 932485 - RNA, 19 nt, Artificial Sequence
  Description of Artificial Sequence: Synthetic oligonucleotide
  Antisense strand to SEQ ID NO: 932484
caguucacguugauuucau

SEQ ID NO: 932486 - RNA, 19 nt, Artificial Sequence
  Description of Artificial Sequence: Synthetic oligonucleotide
  Sense strand starting at position 3330 of SEQ ID NO: 913505
ccuagaaggcuguaacuau

SEQ ID NO: 932487 - RNA, 19 nt, Artificial Sequence
  Description of Artificial Sequence: Synthetic oligonucleotide
  Antisense strand to SEQ ID NO: 932486
auaguuacagccuucuagg

SEQ ID NO: 932488 - RNA, 19 nt, Artificial Sequence
  Description of Artificial Sequence: Synthetic oligonucleotide
  Sense strand starting at position 1442 of SEQ ID NO: 913505
gggccauugauugggauga

SEQ ID NO: 932489 - RNA, 19 nt, Artificial Sequence
  Description of Artificial Sequence: Synthetic oligonucleotide
  Antisense strand to SEQ ID NO: 932488
ucaucccaaucaauggccc

SEQ ID NO: 932490 - RNA, 19 nt, Artificial Sequence
  Description of Artificial Sequence: Synthetic oligonucleotide
  Sense strand starting at position 3573 of SEQ ID NO: 913505
guguuuaguaaauaccaga

SEQ ID NO: 932491 - RNA, 19 nt, Artificial Sequence
  Description of Artificial Sequence: Synthetic oligonucleotide
  Antisense strand to SEQ ID NO: 932490
ucugguauuuacuaaacac

SEQ ID NO: 932492 - RNA, 19 nt, Artificial Sequence
  Description of Artificial Sequence: Synthetic oligonucleotide
  Sense strand starting at position 1515 of SEQ ID NO: 913505
ccaauauuucugugugagc

SEQ ID NO: 932493 - RNA, 19 nt, Artificial Sequence
  Description of Artificial Sequence: Synthetic oligonucleotide
  Antisense strand to SEQ ID NO: 932492
gcucacacagaaauauugg

SEQ ID NO: 932494 - RNA, 19 nt, Artificial Sequence
  Description of Artificial Sequence: Synthetic oligonucleotide
  Sense strand starting at position 1517 of SEQ ID NO: 913505
aauauuucugugugagccu

SEQ ID NO: 932495 - RNA, 19 nt, Artificial Sequence
  Description of Artificial Sequence: Synthetic oligonucleotide
  Antisense strand to SEQ ID NO: 932494
aggcucacacagaaauauu

SEQ ID NO: 932496 - RNA, 19 nt, Artificial Sequence
  Description of Artificial Sequence: Synthetic oligonucleotide
  Sense strand starting at position 2774 of SEQ ID NO: 913505
ugcugcugugcuuccauau

SEQ ID NO: 932497 - RNA, 19 nt, Artificial Sequence
  Description of Artificial Sequence: Synthetic oligonucleotide
  Antisense strand to SEQ ID NO: 932496
auauggaagcacagcagca

SEQ ID NO: 932498 - RNA, 19 nt, Artificial Sequence
  Description of Artificial Sequence: Synthetic oligonucleotide
  Sense strand starting at position 873 of SEQ ID NO: 913505
cacgauggugcugaaagau

SEQ ID NO: 932499 - RNA, 19 nt, Artificial Sequence
  Description of Artificial Sequence: Synthetic oligonucleotide
  Antisense strand to SEQ ID NO: 932498
aucuuucagcaccaucgug

SEQ ID NO: 932500 - RNA, 19 nt, Artificial Sequence
  Description of Artificial Sequence: Synthetic oligonucleotide
  Sense strand starting at position 1543 of SEQ ID NO: 913505
gguaucacuccaugacuaa

SEQ ID NO: 932501 - RNA, 19 nt, Artificial Sequence
  Description of Artificial Sequence: Synthetic oligonucleotide
  Antisense strand to SEQ ID NO: 932500
uuagucauggagugauacc

SEQ ID NO: 932502 - RNA, 19 nt, Artificial Sequence
  Description of Artificial Sequence: Synthetic oligonucleotide
  Sense strand starting at position 2290 of SEQ ID NO: 913505
ggacuaacgcuuggaagga

SEQ ID NO: 932503 - RNA, 19 nt, Artificial Sequence
  Description of Artificial Sequence: Synthetic oligonucleotide
  Antisense strand to SEQ ID NO: 932502
uccuuccaagcguuagucc

SEQ ID NO: 932504 - RNA, 19 nt, Artificial Sequence
  Description of Artificial Sequence: Synthetic oligonucleotide
  Sense strand starting at position 150 of SEQ ID NO: 913505
uccuaaguucugggaauau

SEQ ID NO: 932505 - RNA, 19 nt, Artificial Sequence
  Description of Artificial Sequence: Synthetic oligonucleotide
  Antisense strand to SEQ ID NO: 932504
auauucccagaacuuagga

SEQ ID NO: 932506 - RNA, 19 nt, Artificial Sequence
  Description of Artificial Sequence: Synthetic oligonucleotide
  Sense strand starting at position 3528 of SEQ ID NO: 913505
ucccuuccagaaggugaua

SEQ ID NO: 932507 - RNA, 19 nt, Artificial Sequence
  Description of Artificial Sequence: Synthetic oligonucleotide
  Antisense strand to SEQ ID NO: 932506
uaucaccuucuggaaggga

SEQ ID NO: 932508 - RNA, 19 nt, Artificial Sequence
  Description of Artificial Sequence: Synthetic oligonucleotide
  Sense strand starting at position 3842 of SEQ ID NO: 913505
cuuugagaagccuggacau

SEQ ID NO: 932509 - RNA, 19 nt, Artificial Sequence
  Description of Artificial Sequence: Synthetic oligonucleotide
  Antisense strand to SEQ ID NO: 932508
auguccaggcuucucaaag

SEQ ID NO: 932510 - RNA, 19 nt, Artificial Sequence
  Description of Artificial Sequence: Synthetic oligonucleotide
  Sense strand starting at position 3132 of SEQ ID NO: 913505
ggaguaagauuguuaaagu

SEQ ID NO: 932511 - RNA, 19 nt, Artificial Sequence
  Description of Artificial Sequence: Synthetic oligonucleotide
  Antisense strand to SEQ ID NO: 932510
acuuuaacaaucuuacucc

SEQ ID NO: 932512 - RNA, 19 nt, Artificial Sequence
  Description of Artificial Sequence: Synthetic oligonucleotide
  Sense strand starting at position 1423 of SEQ ID NO: 913505
gggugugacagguggacaa

SEQ ID NO: 932513 - RNA, 19 nt, Artificial Sequence
  Description of Artificial Sequence: Synthetic oligonucleotide
  Antisense strand to SEQ ID NO: 932512
uuguccaccugucacaccc

SEQ ID NO: 932514 - RNA, 19 nt, Artificial Sequence
  Description of Artificial Sequence: Synthetic oligonucleotide
  Sense strand starting at position 2853 of SEQ ID NO: 913505
gcuacuggacuuuggagau

SEQ ID NO: 932515 - RNA, 19 nt, Artificial Sequence
  Description of Artificial Sequence: Synthetic oligonucleotide
  Antisense strand to SEQ ID NO: 932514
aucuccaaaguccaguagc

SEQ ID NO: 932516 - RNA, 19 nt, Artificial Sequence
  Description of Artificial Sequence: Synthetic oligonucleotide
  Sense strand starting at position 3459 of SEQ ID NO: 913505
gauuguguaccagaguuac

SEQ ID NO: 932517 - RNA, 19 nt, Artificial Sequence
  Description of Artificial Sequence: Synthetic oligonucleotide
  Antisense strand to SEQ ID NO: 932516
guaacucugguacacaauc

SEQ ID NO: 932518 - RNA, 19 nt, Artificial Sequence
  Description of Artificial Sequence: Synthetic oligonucleotide
  Sense strand starting at position 3345 of SEQ ID NO: 913505
cuaucuagagggugugaua

SEQ ID NO: 932519 - RNA, 19 nt, Artificial Sequence
  Description of Artificial Sequence: Synthetic oligonucleotide
  Antisense strand to SEQ ID NO: 932518
uaucacacccucuagauag

SEQ ID NO: 932520 - RNA, 19 nt, Artificial Sequence
  Description of Artificial Sequence: Synthetic oligonucleotide
  Sense strand starting at position 745 of SEQ ID NO: 913505
gguguugaccacgggaaga

SEQ ID NO: 932521 - RNA, 19 nt, Artificial Sequence
  Description of Artificial Sequence: Synthetic oligonucleotide
  Antisense strand to SEQ ID NO: 932520
ucuucccguggucaacacc

SEQ ID NO: 932522 - RNA, 19 nt, Artificial Sequence
  Description of Artificial Sequence: Synthetic oligonucleotide
  Sense strand starting at position 1785 of SEQ ID NO: 913505
ugacaaucgucaguaggag

SEQ ID NO: 932523 - RNA, 19 nt, Artificial Sequence
  Description of Artificial Sequence: Synthetic oligonucleotide
  Antisense strand to SEQ ID NO: 932522
cuccuacugacgauuguca

SEQ ID NO: 932524 - RNA, 19 nt, Artificial Sequence
  Description of Artificial Sequence: Synthetic oligonucleotide
  Sense strand starting at position 699 of SEQ ID NO: 913505
gaagauggaugauaugaaa

SEQ ID NO: 932525 - RNA, 19 nt, Artificial Sequence
  Description of Artificial Sequence: Synthetic oligonucleotide
  Antisense strand to SEQ ID NO: 932524
uuucauaucauccaucuuc

SEQ ID NO: 932526 - RNA, 19 nt, Artificial Sequence
  Description of Artificial Sequence: Synthetic oligonucleotide
  Sense strand starting at position 3094 of SEQ ID NO: 913505
aaggaccucugugcaaauu

SEQ ID NO: 932527 - RNA, 19 nt, Artificial Sequence
  Description of Artificial Sequence: Synthetic oligonucleotide
  Antisense strand to SEQ ID NO: 932526
aauuugcacagagguccuu

SEQ ID NO: 932528 - RNA, 19 nt, Artificial Sequence
  Description of Artificial Sequence: Synthetic oligonucleotide
  Sense strand starting at position 1312 of SEQ ID NO: 913505
ggugauacgagauguuaac

SEQ ID NO: 932529 - RNA, 19 nt, Artificial Sequence
  Description of Artificial Sequence: Synthetic oligonucleotide
  Antisense strand to SEQ ID NO: 932528
guuaacaucucguaucacc

SEQ ID NO: 932530 - RNA, 19 nt, Artificial Sequence
  Description of Artificial Sequence: Synthetic oligonucleotide
  Sense strand starting at position 3093 of SEQ ID NO: 913505
uaaggaccucugugcaaau

SEQ ID NO: 932531 - RNA, 19 nt, Artificial Sequence
  Description of Artificial Sequence: Synthetic oligonucleotide
  Antisense strand to SEQ ID NO: 932530
auuugcacagagguccuua

SEQ ID NO: 932532 - RNA, 19 nt, Artificial Sequence
  Description of Artificial Sequence: Synthetic oligonucleotide
  Sense strand starting at position 268 of SEQ ID NO: 913505
guuggcugaggucaaguaa

SEQ ID NO: 932533 - RNA, 19 nt, Artificial Sequence
  Description of Artificial Sequence: Synthetic oligonucleotide
  Antisense strand to SEQ ID NO: 932532
uuacuugaccucagccaac

SEQ ID NO: 932534 - RNA, 19 nt, Artificial Sequence
  Description of Artificial Sequence: Synthetic oligonucleotide
  Sense strand starting at position 3103 of SEQ ID NO: 913505
ugugcaaauuccucugaaa

SEQ ID NO: 932535 - RNA, 19 nt, Artificial Sequence
  Description of Artificial Sequence: Synthetic oligonucleotide
  Antisense strand to SEQ ID NO: 932534
uuucagaggaauuugcaca

SEQ ID NO: 932536 - RNA, 19 nt, Artificial Sequence
  Description of Artificial Sequence: Synthetic oligonucleotide
  Sense strand starting at position 3565 of SEQ ID NO: 913505
cucauaaaguguuuaguaa

SEQ ID NO: 932537 - RNA, 19 nt, Artificial Sequence
  Description of Artificial Sequence: Synthetic oligonucleotide
  Antisense strand to SEQ ID NO: 932536
uuacuaaacacuuuaugag

SEQ ID NO: 932538 - RNA, 19 nt, Artificial Sequence
  Description of Artificial Sequence: Synthetic oligonucleotide
  Sense strand starting at position 3271 of SEQ ID NO: 913505
ggagaaaggugugcacuuu

SEQ ID NO: 932539 - RNA, 19 nt, Artificial Sequence
  Description of Artificial Sequence: Synthetic oligonucleotide
  Antisense strand to SEQ ID NO: 932538
aaagugcacaccuuucucc

SEQ ID NO: 932540 - RNA, 19 nt, Artificial Sequence
  Description of Artificial Sequence: Synthetic oligonucleotide
  Sense strand starting at position 3752 of SEQ ID NO: 913505
acuugagauucccuucugu

SEQ ID NO: 932541 - RNA, 19 nt, Artificial Sequence
  Description of Artificial Sequence: Synthetic oligonucleotide
  Antisense strand to SEQ ID NO: 932540
acagaagggaaucucaagu

SEQ ID NO: 932542 - RNA, 19 nt, Artificial Sequence
  Description of Artificial Sequence: Synthetic oligonucleotide
  Sense strand starting at position 1404 of SEQ ID NO: 913506
uugaauuaugaaugcaaga

SEQ ID NO: 932543 - RNA, 19 nt, Artificial Sequence
  Description of Artificial Sequence: Synthetic oligonucleotide
  Antisense strand to SEQ ID NO: 932542
ucuugcauucauaauucaa

SEQ ID NO: 932544 - RNA, 19 nt, Artificial Sequence
  Description of Artificial Sequence: Synthetic oligonucleotide
  Sense strand starting at position 2313 of SEQ ID NO: 913506
ggugcucaauauuuguaca

SEQ ID NO: 932545 - RNA, 19 nt, Artificial Sequence
  Description of Artificial Sequence: Synthetic oligonucleotide
  Antisense strand to SEQ ID NO: 932544
uguacaaauauugagcacc

SEQ ID NO: 932546 - RNA, 19 nt, Artificial Sequence
  Description of Artificial Sequence: Synthetic oligonucleotide
  Sense strand starting at position 2039 of SEQ ID NO: 913506
cuucgagagccugcuguuu

SEQ ID NO: 932547 - RNA, 19 nt, Artificial Sequence
  Description of Artificial Sequence: Synthetic oligonucleotide
  Antisense strand to SEQ ID NO: 932546
aaacagcaggcucucgaag

SEQ ID NO: 932548 - RNA, 19 nt, Artificial Sequence
  Description of Artificial Sequence: Synthetic oligonucleotide
  Sense strand starting at position 2865 of SEQ ID NO: 913506
uguucuaugaggcauagaa

SEQ ID NO: 932549 - RNA, 19 nt, Artificial Sequence
  Description of Artificial Sequence: Synthetic oligonucleotide
  Antisense strand to SEQ ID NO: 932548
uucuaugccucauagaaca

SEQ ID NO: 932550 - RNA, 19 nt, Artificial Sequence
  Description of Artificial Sequence: Synthetic oligonucleotide
  Sense strand starting at position 3394 of SEQ ID NO: 913506
guguuuaggagugaugaga

SEQ ID NO: 932551 - RNA, 19 nt, Artificial Sequence
  Description of Artificial Sequence: Synthetic oligonucleotide
  Antisense strand to SEQ ID NO: 932550
ucucaucacuccuaaacac

SEQ ID NO: 932552 - RNA, 19 nt, Artificial Sequence
  Description of Artificial Sequence: Synthetic oligonucleotide
  Sense strand starting at position 27 of SEQ ID NO: 913506
gucagaauugcucauugaa

SEQ ID NO: 932553 - RNA, 19 nt, Artificial Sequence
  Description of Artificial Sequence: Synthetic oligonucleotide
  Antisense strand to SEQ ID NO: 932552
uucaaugagcaauucugac

SEQ ID NO: 932554 - RNA, 19 nt, Artificial Sequence
  Description of Artificial Sequence: Synthetic oligonucleotide
  Sense strand starting at position 519 of SEQ ID NO: 913506
cuggaacuaugucuuaaua

SEQ ID NO: 932555 - RNA, 19 nt, Artificial Sequence
  Description of Artificial Sequence: Synthetic oligonucleotide
  Antisense strand to SEQ ID NO: 932554
uauuaagacauaguuccag

SEQ ID NO: 932556 - RNA, 19 nt, Artificial Sequence
  Description of Artificial Sequence: Synthetic oligonucleotide
  Sense strand starting at position 2990 of SEQ ID NO: 913506
caguguugggaggagucua

SEQ ID NO: 932557 - RNA, 19 nt, Artificial Sequence
  Description of Artificial Sequence: Synthetic oligonucleotide
  Antisense strand to SEQ ID NO: 932556
uagacuccucccaacacug

SEQ ID NO: 932558 - RNA, 19 nt, Artificial Sequence
  Description of Artificial Sequence: Synthetic oligonucleotide
  Sense strand starting at position 68 of SEQ ID NO: 913506
gugaugggugcugaggaua

SEQ ID NO: 932559 - RNA, 19 nt, Artificial Sequence
  Description of Artificial Sequence: Synthetic oligonucleotide
  Antisense strand to SEQ ID NO: 932558
uauccucagcacccaucac

SEQ ID NO: 932560 - RNA, 19 nt, Artificial Sequence
  Description of Artificial Sequence: Synthetic oligonucleotide
  Sense strand starting at position 163 of SEQ ID NO: 913506
ggagucauaaucugugaga

SEQ ID NO: 932561 - RNA, 19 nt, Artificial Sequence
  Description of Artificial Sequence: Synthetic oligonucleotide
  Antisense strand to SEQ ID NO: 932560
ucucacagauuaugacucc

SEQ ID NO: 932562 - RNA, 19 nt, Artificial Sequence
  Description of Artificial Sequence: Synthetic oligonucleotide
  Sense strand starting at position 1369 of SEQ ID NO: 913506
ccaugucuuguacacaaca

SEQ ID NO: 932563 - RNA, 19 nt, Artificial Sequence
  Description of Artificial Sequence: Synthetic oligonucleotide
  Antisense strand to SEQ ID NO: 932562
uguuguguacaagacaugg

SEQ ID NO: 932564 - RNA, 19 nt, Artificial Sequence
  Description of Artificial Sequence: Synthetic oligonucleotide
  Sense strand starting at position 829 of SEQ ID NO: 913506
gcuuaugcucuugcuuagu

SEQ ID NO: 932565 - RNA, 19 nt, Artificial Sequence
  Description of Artificial Sequence: Synthetic oligonucleotide
  Antisense strand to SEQ ID NO: 932564
acuaagcaagagcauaagc

SEQ ID NO: 932566 - RNA, 19 nt, Artificial Sequence
  Description of Artificial Sequence: Synthetic oligonucleotide
  Sense strand starting at position 510 of SEQ ID NO: 913506
ggaaguacgcuggaacuau

SEQ ID NO: 932567 - RNA, 19 nt, Artificial Sequence
  Description of Artificial Sequence: Synthetic oligonucleotide
  Antisense strand to SEQ ID NO: 932566
auaguuccagcguacuucc

SEQ ID NO: 932568 - RNA, 19 nt, Artificial Sequence
  Description of Artificial Sequence: Synthetic oligonucleotide
  Sense strand starting at position 3132 of SEQ ID NO: 913506
gggaacugucucugacuga

SEQ ID NO: 932569 - RNA, 19 nt, Artificial Sequence
  Description of Artificial Sequence: Synthetic oligonucleotide
  Antisense strand to SEQ ID NO: 932568
ucagucagagacaguuccc

SEQ ID NO: 932570 - RNA, 19 nt, Artificial Sequence
  Description of Artificial Sequence: Synthetic oligonucleotide
  Sense strand starting at position 1827 of SEQ ID NO: 913506
guuucuucaggagggauca

SEQ ID NO: 932571 - RNA, 19 nt, Artificial Sequence
  Description of Artificial Sequence: Synthetic oligonucleotide
  Antisense strand to SEQ ID NO: 932570
ugaucccuccugaagaaac

SEQ ID NO: 932572 - RNA, 19 nt, Artificial Sequence
  Description of Artificial Sequence: Synthetic oligonucleotide
  Sense strand starting at position 749 of SEQ ID NO: 913506
acaguuuaacuguaguuaa

SEQ ID NO: 932573 - RNA, 19 nt, Artificial Sequence
  Description of Artificial Sequence: Synthetic oligonucleotide
  Antisense strand to SEQ ID NO: 932572
uuaacuacaguuaaacugu

SEQ ID NO: 932574 - RNA, 19 nt, Artificial Sequence
  Description of Artificial Sequence: Synthetic oligonucleotide
  Sense strand starting at position 165 of SEQ ID NO: 913506
agucauaaucugugagaca

SEQ ID NO: 932575 - RNA, 19 nt, Artificial Sequence
  Description of Artificial Sequence: Synthetic oligonucleotide
  Antisense strand to SEQ ID NO: 932574
ugucucacagauuaugacu

SEQ ID NO: 932576 - RNA, 19 nt, Artificial Sequence
  Description of Artificial Sequence: Synthetic oligonucleotide
  Sense strand starting at position 164 of SEQ ID NO: 913506
gagucauaaucugugagac

SEQ ID NO: 932577 - RNA, 19 nt, Artificial Sequence
  Description of Artificial Sequence: Synthetic oligonucleotide
  Antisense strand to SEQ ID NO: 932576
gucucacagauuaugacuc

SEQ ID NO: 932578 - RNA, 19 nt, Artificial Sequence
  Description of Artificial Sequence: Synthetic oligonucleotide
  Sense strand starting at position 3343 of SEQ ID NO: 913506
uuuguuguuagguaggaga

SEQ ID NO: 932579 - RNA, 19 nt, Artificial Sequence
  Description of Artificial Sequence: Synthetic oligonucleotide
  Antisense strand to SEQ ID NO: 932578
ucuccuaccuaacaacaaa

SEQ ID NO: 932580 - RNA, 19 nt, Artificial Sequence
  Description of Artificial Sequence: Synthetic oligonucleotide
  Sense strand starting at position 1934 of SEQ ID NO: 913506
gagcaaguuuauuccaaga

SEQ ID NO: 932581 - RNA, 19 nt, Artificial Sequence
  Description of Artificial Sequence: Synthetic oligonucleotide
  Antisense strand to SEQ ID NO: 932580
ucuuggaauaaacuugcuc

SEQ ID NO: 932582 - RNA, 19 nt, Artificial Sequence
  Description of Artificial Sequence: Synthetic oligonucleotide
  Sense strand starting at position 3137 of SEQ ID NO: 913506
cugucucugacugagguua

SEQ ID NO: 932583 - RNA, 19 nt, Artificial Sequence
  Description of Artificial Sequence: Synthetic oligonucleotide
  Antisense strand to SEQ ID NO: 932582
uaaccucagucagagacag

SEQ ID NO: 932584 - RNA, 19 nt, Artificial Sequence
  Description of Artificial Sequence: Synthetic oligonucleotide
  Sense strand starting at position 3323 of SEQ ID NO: 913506
uuuccugauguggaaguuu

SEQ ID NO: 932585 - RNA, 19 nt, Artificial Sequence
  Description of Artificial Sequence: Synthetic oligonucleotide
  Antisense strand to SEQ ID NO: 932584
aaacuuccacaucaggaaa

SEQ ID NO: 932586 - RNA, 19 nt, Artificial Sequence
  Description of Artificial Sequence: Synthetic oligonucleotide
  Sense strand starting at position 1083 of SEQ ID NO: 913506
guuuaugaagacuggguau

SEQ ID NO: 932587 - RNA, 19 nt, Artificial Sequence
  Description of Artificial Sequence: Synthetic oligonucleotide
  Antisense strand to SEQ ID NO: 932586
auacccagucuucauaaac

SEQ ID NO: 932588 - RNA, 19 nt, Artificial Sequence
  Description of Artificial Sequence: Synthetic oligonucleotide
  Sense strand starting at position 3288 of SEQ ID NO: 913506
aucugaauuggaugguagu

SEQ ID NO: 932589 - RNA, 19 nt, Artificial Sequence
  Description of Artificial Sequence: Synthetic oligonucleotide
  Antisense strand to SEQ ID NO: 932588
acuaccauccaauucagau

SEQ ID NO: 932590 - RNA, 19 nt, Artificial Sequence
  Description of Artificial Sequence: Synthetic oligonucleotide
  Sense strand starting at position 1587 of SEQ ID NO: 913506
agcgcagucagcgcagaau

SEQ ID NO: 932591 - RNA, 19 nt, Artificial Sequence
  Description of Artificial Sequence: Synthetic oligonucleotide
  Antisense strand to SEQ ID NO: 932590
auucugcgcugacugcgcu

SEQ ID NO: 932592 - RNA, 19 nt, Artificial Sequence
  Description of Artificial Sequence: Synthetic oligonucleotide
  Sense strand starting at position 177 of SEQ ID NO: 913506
ugagacaggugcucugaca

SEQ ID NO: 932593 - RNA, 19 nt, Artificial Sequence
  Description of Artificial Sequence: Synthetic oligonucleotide
  Antisense strand to SEQ ID NO: 932592
ugucagagcaccugucuca

SEQ ID NO: 932594 - RNA, 19 nt, Artificial Sequence
  Description of Artificial Sequence: Synthetic oligonucleotide
  Sense strand starting at position 2978 of SEQ ID NO: 913506
gguuaacaucaccaguguu

SEQ ID NO: 932595 - RNA, 19 nt, Artificial Sequence
  Description of Artificial Sequence: Synthetic oligonucleotide
  Antisense strand to SEQ ID NO: 932594
aacacuggugauguuaacc

SEQ ID NO: 932596 - RNA, 19 nt, Artificial Sequence
  Description of Artificial Sequence: Synthetic oligonucleotide
  Sense strand starting at position 1398 of SEQ ID NO: 913506
ucguguuugaauuaugaau

SEQ ID NO: 932597 - RNA, 19 nt, Artificial Sequence
  Description of Artificial Sequence: Synthetic oligonucleotide
  Antisense strand to SEQ ID NO: 932596
auucauaauucaaacacga

SEQ ID NO: 932598 - RNA, 19 nt, Artificial Sequence
  Description of Artificial Sequence: Synthetic oligonucleotide
  Sense strand starting at position 2966 of SEQ ID NO: 913506
ucaggugaucaugguuaac

SEQ ID NO: 932599 - RNA, 19 nt, Artificial Sequence
  Description of Artificial Sequence: Synthetic oligonucleotide
  Antisense strand to SEQ ID NO: 932598
guuaaccaugaucaccuga

SEQ ID NO: 932600 - RNA, 19 nt, Artificial Sequence
  Description of Artificial Sequence: Synthetic oligonucleotide
  Sense strand starting at position 465 of SEQ ID NO: 913506
cuagcuggauuugagaaua

SEQ ID NO: 932601 - RNA, 19 nt, Artificial Sequence
  Description of Artificial Sequence: Synthetic oligonucleotide
  Antisense strand to SEQ ID NO: 932600
uauucucaaauccagcuag

SEQ ID NO: 932602 - RNA, 19 nt, Artificial Sequence
  Description of Artificial Sequence: Synthetic oligonucleotide
  Sense strand starting at position 415 of SEQ ID NO: 913506
uuaucuuaccagcagucau

SEQ ID NO: 932603 - RNA, 19 nt, Artificial Sequence
  Description of Artificial Sequence: Synthetic oligonucleotide
  Antisense strand to SEQ ID NO: 932602
augacugcugguaagauaa

SEQ ID NO: 932604 - RNA, 19 nt, Artificial Sequence
  Description of Artificial Sequence: Synthetic oligonucleotide
  Sense strand starting at position 689 of SEQ ID NO: 913506
uacagaucugaucguauca

SEQ ID NO: 932605 - RNA, 19 nt, Artificial Sequence
  Description of Artificial Sequence: Synthetic oligonucleotide
  Antisense strand to SEQ ID NO: 932604
ugauacgaucagaucugua

SEQ ID NO: 932606 - RNA, 19 nt, Artificial Sequence
  Description of Artificial Sequence: Synthetic oligonucleotide
  Sense strand starting at position 403 of SEQ ID NO: 913506
cagagaaguuuguuaucuu

SEQ ID NO: 932607 - RNA, 19 nt, Artificial Sequence
  Description of Artificial Sequence: Synthetic oligonucleotide
  Antisense strand to SEQ ID NO: 932606
aagauaacaaacuucucug

SEQ ID NO: 932608 - RNA, 19 nt, Artificial Sequence
  Description of Artificial Sequence: Synthetic oligonucleotide
  Sense strand starting at position 2307 of SEQ ID NO: 913506
cuucuaggugcucaauauu

SEQ ID NO: 932609 - RNA, 19 nt, Artificial Sequence
  Description of Artificial Sequence: Synthetic oligonucleotide
  Antisense strand to SEQ ID NO: 932608
aauauugagcaccuagaag

SEQ ID NO: 932610 - RNA, 19 nt, Artificial Sequence
  Description of Artificial Sequence: Synthetic oligonucleotide
  Sense strand starting at position 984 of SEQ ID NO: 913506
uuccuaguccaugaagcuu

SEQ ID NO: 932611 - RNA, 19 nt, Artificial Sequence
  Description of Artificial Sequence: Synthetic oligonucleotide
  Antisense strand to SEQ ID NO: 932610
aagcuucauggacuaggaa

SEQ ID NO: 932612 - RNA, 19 nt, Artificial Sequence
  Description of Artificial Sequence: Synthetic oligonucleotide
  Sense strand starting at position 1589 of SEQ ID NO: 913506
cgcagucagcgcagaauga

SEQ ID NO: 932613 - RNA, 19 nt, Artificial Sequence
  Description of Artificial Sequence: Synthetic oligonucleotide
  Antisense strand to SEQ ID NO: 932612
ucauucugcgcugacugcg

SEQ ID NO: 932614 - RNA, 19 nt, Artificial Sequence
  Description of Artificial Sequence: Synthetic oligonucleotide
  Sense strand starting at position 759 of SEQ ID NO: 913506
uguaguuaaauguaguacu

SEQ ID NO: 932615 - RNA, 19 nt, Artificial Sequence
  Description of Artificial Sequence: Synthetic oligonucleotide
  Antisense strand to SEQ ID NO: 932614
aguacuacauuuaacuaca

SEQ ID NO: 932616 - RNA, 19 nt, Artificial Sequence
  Description of Artificial Sequence: Synthetic oligonucleotide
  Sense strand starting at position 3978 of SEQ ID NO: 913506
gggagcuguucuuccagaa

SEQ ID NO: 932617 - RNA, 19 nt, Artificial Sequence
  Description of Artificial Sequence: Synthetic oligonucleotide
  Antisense strand to SEQ ID NO: 932616
uucuggaagaacagcuccc

SEQ ID NO: 932618 - RNA, 19 nt, Artificial Sequence
  Description of Artificial Sequence: Synthetic oligonucleotide
  Sense strand starting at position 3393 of SEQ ID NO: 913506
uguguuuaggagugaugag

SEQ ID NO: 932619 - RNA, 19 nt, Artificial Sequence
  Description of Artificial Sequence: Synthetic oligonucleotide
  Antisense strand to SEQ ID NO: 932618
cucaucacuccuaaacaca

SEQ ID NO: 932620 - RNA, 19 nt, Artificial Sequence
  Description of Artificial Sequence: Synthetic oligonucleotide
  Sense strand starting at position 3386 of SEQ ID NO: 913506
acacuaguguguuuaggag

SEQ ID NO: 932621 - RNA, 19 nt, Artificial Sequence
  Description of Artificial Sequence: Synthetic oligonucleotide
  Antisense strand to SEQ ID NO: 932620
cuccuaaacacacuagugu

SEQ ID NO: 932622 - RNA, 19 nt, Artificial Sequence
  Description of Artificial Sequence: Synthetic oligonucleotide
  Sense strand starting at position 427 of SEQ ID NO: 913507
augaaauugcuagagcaca

SEQ ID NO: 932623 - RNA, 19 nt, Artificial Sequence
  Description of Artificial Sequence: Synthetic oligonucleotide
  Antisense strand to SEQ ID NO: 932622
ugugcucuagcaauuucau

SEQ ID NO: 932624 - RNA, 19 nt, Artificial Sequence
  Description of Artificial Sequence: Synthetic oligonucleotide
  Sense strand starting at position 3350 of SEQ ID NO: 913507
ucuugcuuagugucuugua

SEQ ID NO: 932625 - RNA, 19 nt, Artificial Sequence
  Description of Artificial Sequence: Synthetic oligonucleotide
  Antisense strand to SEQ ID NO: 932624
uacaagacacuaagcaaga

SEQ ID NO: 932626 - RNA, 19 nt, Artificial Sequence
  Description of Artificial Sequence: Synthetic oligonucleotide
  Sense strand starting at position 2304 of SEQ ID NO: 913507
cucaguucacgugugucau

SEQ ID NO: 932627 - RNA, 19 nt, Artificial Sequence
  Description of Artificial Sequence: Synthetic oligonucleotide
  Antisense strand to SEQ ID NO: 932626
augacacacgugaacugag

SEQ ID NO: 932628 - RNA, 19 nt, Artificial Sequence
  Description of Artificial Sequence: Synthetic oligonucleotide
  Sense strand starting at position 2961 of SEQ ID NO: 913507
gggaaagagaugugaguuc

SEQ ID NO: 932629 - RNA, 19 nt, Artificial Sequence
  Description of Artificial Sequence: Synthetic oligonucleotide
  Antisense strand to SEQ ID NO: 932628
gaacucacaucucuuuccc

SEQ ID NO: 932630 - RNA, 19 nt, Artificial Sequence
  Description of Artificial Sequence: Synthetic oligonucleotide
  Sense strand starting at position 3806 of SEQ ID NO: 913507
accaauauaugggccuaaa

SEQ ID NO: 932631 - RNA, 19 nt, Artificial Sequence
  Description of Artificial Sequence: Synthetic oligonucleotide
  Antisense strand to SEQ ID NO: 932630
uuuaggcccauauauuggu

SEQ ID NO: 932632 - RNA, 19 nt, Artificial Sequence
  Description of Artificial Sequence: Synthetic oligonucleotide
  Sense strand starting at position 972 of SEQ ID NO: 913507
acacaaacaguauguaaau

SEQ ID NO: 932633 - RNA, 19 nt, Artificial Sequence
  Description of Artificial Sequence: Synthetic oligonucleotide
  Antisense strand to SEQ ID NO: 932632
auuuacauacuguuugugu

SEQ ID NO: 932634 - RNA, 19 nt, Artificial Sequence
  Description of Artificial Sequence: Synthetic oligonucleotide
  Sense strand starting at position 361 of SEQ ID NO: 913507
cuaucauuugccuguuaua

SEQ ID NO: 932635 - RNA, 19 nt, Artificial Sequence
  Description of Artificial Sequence: Synthetic oligonucleotide
  Antisense strand to SEQ ID NO: 932634
uauaacaggcaaaugauag

SEQ ID NO: 932636 - RNA, 19 nt, Artificial Sequence
  Description of Artificial Sequence: Synthetic oligonucleotide
  Sense strand starting at position 2242 of SEQ ID NO: 913507
guacaauuaacacgggaca

SEQ ID NO: 932637 - RNA, 19 nt, Artificial Sequence
  Description of Artificial Sequence: Synthetic oligonucleotide
  Antisense strand to SEQ ID NO: 932636
ugucccguguuaauuguac

SEQ ID NO: 932638 - RNA, 19 nt, Artificial Sequence
  Description of Artificial Sequence: Synthetic oligonucleotide
  Sense strand starting at position 1961 of SEQ ID NO: 913507
gcaguuguggcagcucauu

SEQ ID NO: 932639 - RNA, 19 nt, Artificial Sequence
  Description of Artificial Sequence: Synthetic oligonucleotide
  Antisense strand to SEQ ID NO: 932638
aaugagcugccacaacugc

SEQ ID NO: 932640 - RNA, 19 nt, Artificial Sequence
  Description of Artificial Sequence: Synthetic oligonucleotide
  Sense strand starting at position 360 of SEQ ID NO: 913507
ccuaucauuugccuguuau

SEQ ID NO: 932641 - RNA, 19 nt, Artificial Sequence
  Description of Artificial Sequence: Synthetic oligonucleotide
  Antisense strand to SEQ ID NO: 932640
auaacaggcaaaugauagg

SEQ ID NO: 932642 - RNA, 19 nt, Artificial Sequence
  Description of Artificial Sequence: Synthetic oligonucleotide
  Sense strand starting at position 359 of SEQ ID NO: 913507
uccuaucauuugccuguua

SEQ ID NO: 932643 - RNA, 19 nt, Artificial Sequence
  Description of Artificial Sequence: Synthetic oligonucleotide
  Antisense strand to SEQ ID NO: 932642
uaacaggcaaaugauagga

SEQ ID NO: 932644 - RNA, 19 nt, Artificial Sequence
  Description of Artificial Sequence: Synthetic oligonucleotide
  Sense strand starting at position 1412 of SEQ ID NO: 913507
guucaucaugucgaagaag

SEQ ID NO: 932645 - RNA, 19 nt, Artificial Sequence
  Description of Artificial Sequence: Synthetic oligonucleotide
  Antisense strand to SEQ ID NO: 932644
cuucuucgacaugaugaac

SEQ ID NO: 932646 - RNA, 19 nt, Artificial Sequence
  Description of Artificial Sequence: Synthetic oligonucleotide
  Sense strand starting at position 1562 of SEQ ID NO: 913507
gaacuccaugucgaagagu

SEQ ID NO: 932647 - RNA, 19 nt, Artificial Sequence
  Description of Artificial Sequence: Synthetic oligonucleotide
  Antisense strand to SEQ ID NO: 932646
acucuucgacauggaguuc

SEQ ID NO: 932648 - RNA, 19 nt, Artificial Sequence
  Description of Artificial Sequence: Synthetic oligonucleotide
  Sense strand starting at position 875 of SEQ ID NO: 913507
uaaauaugccagugaugaa

SEQ ID NO: 932649 - RNA, 19 nt, Artificial Sequence
  Description of Artificial Sequence: Synthetic oligonucleotide
  Antisense strand to SEQ ID NO: 932648
uucaucacuggcauauuua

SEQ ID NO: 932650 - RNA, 19 nt, Artificial Sequence
  Description of Artificial Sequence: Synthetic oligonucleotide
  Sense strand starting at position 2233 of SEQ ID NO: 913507
ucaguugacguacaauuaa

SEQ ID NO: 932651 - RNA, 19 nt, Artificial Sequence
  Description of Artificial Sequence: Synthetic oligonucleotide
  Antisense strand to SEQ ID NO: 932650
uuaauuguacgucaacuga

SEQ ID NO: 932652 - RNA, 19 nt, Artificial Sequence
  Description of Artificial Sequence: Synthetic oligonucleotide
  Sense strand starting at position 3572 of SEQ ID NO: 913507
ugccaagaaguaggauuau

SEQ ID NO: 932653 - RNA, 19 nt, Artificial Sequence
  Description of Artificial Sequence: Synthetic oligonucleotide
  Antisense strand to SEQ ID NO: 932652
auaauccuacuucuuggca

SEQ ID NO: 932654 - RNA, 19 nt, Artificial Sequence
  Description of Artificial Sequence: Synthetic oligonucleotide
  Sense strand starting at position 885 of SEQ ID NO: 913507
agugaugaaugucuaauuc

SEQ ID NO: 932655 - RNA, 19 nt, Artificial Sequence
  Description of Artificial Sequence: Synthetic oligonucleotide
  Antisense strand to SEQ ID NO: 932654
gaauuagacauucaucacu

SEQ ID NO: 932656 - RNA, 19 nt, Artificial Sequence
  Description of Artificial Sequence: Synthetic oligonucleotide
  Sense strand starting at position 152 of SEQ ID NO: 913507
gcaguagcuauggauggau

SEQ ID NO: 932657 - RNA, 19 nt, Artificial Sequence
  Description of Artificial Sequence: Synthetic oligonucleotide
  Antisense strand to SEQ ID NO: 932656
auccauccauagcuacugc

SEQ ID NO: 932658 - RNA, 19 nt, Artificial Sequence
  Description of Artificial Sequence: Synthetic oligonucleotide
  Sense strand starting at position 2373 of SEQ ID NO: 913507
gcaaucaaugcagaauugu

SEQ ID NO: 932659 - RNA, 19 nt, Artificial Sequence
  Description of Artificial Sequence: Synthetic oligonucleotide
  Antisense strand to SEQ ID NO: 932658
acaauucugcauugauugc

SEQ ID NO: 932660 - RNA, 19 nt, Artificial Sequence
  Description of Artificial Sequence: Synthetic oligonucleotide
  Sense strand starting at position 739 of SEQ ID NO: 913507
gcagaaacauguuugauug

SEQ ID NO: 932661 - RNA, 19 nt, Artificial Sequence
  Description of Artificial Sequence: Synthetic oligonucleotide
  Antisense strand to SEQ ID NO: 932660
caaucaaacauguuucugc

SEQ ID NO: 932662 - RNA, 19 nt, Artificial Sequence
  Description of Artificial Sequence: Synthetic oligonucleotide
  Sense strand starting at position 2595 of SEQ ID NO: 913507
ccgucagcucaggaaauca

SEQ ID NO: 932663 - RNA, 19 nt, Artificial Sequence
  Description of Artificial Sequence: Synthetic oligonucleotide
  Antisense strand to SEQ ID NO: 932662
ugauuuccugagcugacgg

SEQ ID NO: 932664 - RNA, 19 nt, Artificial Sequence
  Description of Artificial Sequence: Synthetic oligonucleotide
  Sense strand starting at position 231 of SEQ ID NO: 913507
acuauugacucaccaguuu

SEQ ID NO: 932665 - RNA, 19 nt, Artificial Sequence
  Description of Artificial Sequence: Synthetic oligonucleotide
  Antisense strand to SEQ ID NO: 932664
aaacuggugagucaauagu

SEQ ID NO: 932666 - RNA, 19 nt, Artificial Sequence
  Description of Artificial Sequence: Synthetic oligonucleotide
  Sense strand starting at position 985 of SEQ ID NO: 913507
guaaauuacuuugucagau

SEQ ID NO: 932667 - RNA, 19 nt, Artificial Sequence
  Description of Artificial Sequence: Synthetic oligonucleotide
  Antisense strand to SEQ ID NO: 932666
aucugacaaaguaauuuac

SEQ ID NO: 932668 - RNA, 19 nt, Artificial Sequence
  Description of Artificial Sequence: Synthetic oligonucleotide
  Sense strand starting at position 155 of SEQ ID NO: 913507
guagcuauggauggauuca

SEQ ID NO: 932669 - RNA, 19 nt, Artificial Sequence
  Description of Artificial Sequence: Synthetic oligonucleotide
  Antisense strand to SEQ ID NO: 932668
ugaauccauccauagcuac

SEQ ID NO: 932670 - RNA, 19 nt, Artificial Sequence
  Description of Artificial Sequence: Synthetic oligonucleotide
  Sense strand starting at position 716 of SEQ ID NO: 913507
cuauaauucuuggucacug

SEQ ID NO: 932671 - RNA, 19 nt, Artificial Sequence
  Description of Artificial Sequence: Synthetic oligonucleotide
  Antisense strand to SEQ ID NO: 932670
cagugaccaagaauuauag

SEQ ID NO: 932672 - RNA, 19 nt, Artificial Sequence
  Description of Artificial Sequence: Synthetic oligonucleotide
  Sense strand starting at position 2950 of SEQ ID NO: 913507
uuguucgucaagggaaaga

SEQ ID NO: 932673 - RNA, 19 nt, Artificial Sequence
  Description of Artificial Sequence: Synthetic oligonucleotide
  Antisense strand to SEQ ID NO: 932672
ucuuucccuugacgaacaa

SEQ ID NO: 932674 - RNA, 19 nt, Artificial Sequence
  Description of Artificial Sequence: Synthetic oligonucleotide
  Sense strand starting at position 3601 of SEQ ID NO: 913507
guggguuuacagcaguaaa

SEQ ID NO: 932675 - RNA, 19 nt, Artificial Sequence
  Description of Artificial Sequence: Synthetic oligonucleotide
  Antisense strand to SEQ ID NO: 932674
uuuacugcuguaaacccac

SEQ ID NO: 932676 - RNA, 19 nt, Artificial Sequence
  Description of Artificial Sequence: Synthetic oligonucleotide
  Sense strand starting at position 984 of SEQ ID NO: 913507
uguaaauuacuuugucaga

SEQ ID NO: 932677 - RNA, 19 nt, Artificial Sequence
  Description of Artificial Sequence: Synthetic oligonucleotide
  Antisense strand to SEQ ID NO: 932676
ucugacaaaguaauuuaca

SEQ ID NO: 932678 - RNA, 19 nt, Artificial Sequence
  Description of Artificial Sequence: Synthetic oligonucleotide
  Sense strand starting at position 1558 of SEQ ID NO: 913507
cgaagaacuccaugucgaa

SEQ ID NO: 932679 - RNA, 19 nt, Artificial Sequence
  Description of Artificial Sequence: Synthetic oligonucleotide
  Antisense strand to SEQ ID NO: 932678
uucgacauggaguucuucg

SEQ ID NO: 932680 - RNA, 19 nt, Artificial Sequence
  Description of Artificial Sequence: Synthetic oligonucleotide
  Sense strand starting at position 2369 of SEQ ID NO: 913507
cuuugcaaucaaugcagaa

SEQ ID NO: 932681 - RNA, 19 nt, Artificial Sequence
  Description of Artificial Sequence: Synthetic oligonucleotide
  Antisense strand to SEQ ID NO: 932680
uucugcauugauugcaaag

SEQ ID NO: 932682 - RNA, 19 nt, Artificial Sequence
  Description of Artificial Sequence: Synthetic oligonucleotide
  Sense strand starting at position 2970 of SEQ ID NO: 913507
augugaguuccugaagccu

SEQ ID NO: 932683 - RNA, 19 nt, Artificial Sequence
  Description of Artificial Sequence: Synthetic oligonucleotide
  Antisense strand to SEQ ID NO: 932682
aggcuucaggaacucacau

SEQ ID NO: 932684 - RNA, 19 nt, Artificial Sequence
  Description of Artificial Sequence: Synthetic oligonucleotide
  Sense strand starting at position 713 of SEQ ID NO: 913507
guacuauaauucuugguca

SEQ ID NO: 932685 - RNA, 19 nt, Artificial Sequence
  Description of Artificial Sequence: Synthetic oligonucleotide
  Antisense strand to SEQ ID NO: 932684
ugaccaagaauuauaguac

SEQ ID NO: 932686 - RNA, 19 nt, Artificial Sequence
  Description of Artificial Sequence: Synthetic oligonucleotide
  Sense strand starting at position 2140 of SEQ ID NO: 913507
uguaaaugugcucaucuau

SEQ ID NO: 932687 - RNA, 19 nt, Artificial Sequence
  Description of Artificial Sequence: Synthetic oligonucleotide
  Antisense strand to SEQ ID NO: 932686
auagaugagcacauuuaca

SEQ ID NO: 932688 - RNA, 19 nt, Artificial Sequence
  Description of Artificial Sequence: Synthetic oligonucleotide
  Sense strand starting at position 216 of SEQ ID NO: 913507
gccacucuaguguauacua

SEQ ID NO: 932689 - RNA, 19 nt, Artificial Sequence
  Description of Artificial Sequence: Synthetic oligonucleotide
  Antisense strand to SEQ ID NO: 932688
uaguauacacuagaguggc

SEQ ID NO: 932690 - RNA, 19 nt, Artificial Sequence
  Description of Artificial Sequence: Synthetic oligonucleotide
  Sense strand starting at position 3651 of SEQ ID NO: 913507
aaguaauaugcaugguauu

SEQ ID NO: 932691 - RNA, 19 nt, Artificial Sequence
  Description of Artificial Sequence: Synthetic oligonucleotide
  Antisense strand to SEQ ID NO: 932690
aauaccaugcauauuacuu

SEQ ID NO: 932692 - RNA, 19 nt, Artificial Sequence
  Description of Artificial Sequence: Synthetic oligonucleotide
  Sense strand starting at position 882 of SEQ ID NO: 913507
gccagugaugaaugucuaa

SEQ ID NO: 932693 - RNA, 19 nt, Artificial Sequence
  Description of Artificial Sequence: Synthetic oligonucleotide
  Antisense strand to SEQ ID NO: 932692
uuagacauucaucacuggc

SEQ ID NO: 932694 - RNA, 19 nt, Artificial Sequence
  Description of Artificial Sequence: Synthetic oligonucleotide
  Sense strand starting at position 1744 of SEQ ID NO: 913507
gcgagaagucaggguggau

SEQ ID NO: 932695 - RNA, 19 nt, Artificial Sequence
  Description of Artificial Sequence: Synthetic oligonucleotide
  Antisense strand to SEQ ID NO: 932694
auccacccugacuucucgc

SEQ ID NO: 932696 - RNA, 19 nt, Artificial Sequence
  Description of Artificial Sequence: Synthetic oligonucleotide
  Sense strand starting at position 918 of SEQ ID NO: 913507
aggcuauugaggugagcua

SEQ ID NO: 932697 - RNA, 19 nt, Artificial Sequence
  Description of Artificial Sequence: Synthetic oligonucleotide
  Antisense strand to SEQ ID NO: 932696
uagcucaccucaauagccu

SEQ ID NO: 932698 - RNA, 19 nt, Artificial Sequence
  Description of Artificial Sequence: Synthetic oligonucleotide
  Sense strand starting at position 2949 of SEQ ID NO: 913507
guuguucgucaagggaaag

SEQ ID NO: 932699 - RNA, 19 nt, Artificial Sequence
  Description of Artificial Sequence: Synthetic oligonucleotide
  Antisense strand to SEQ ID NO: 932698
cuuucccuugacgaacaac

SEQ ID NO: 932700 - RNA, 19 nt, Artificial Sequence
  Description of Artificial Sequence: Synthetic oligonucleotide
  Sense strand starting at position 3468 of SEQ ID NO: 913507
auaagucuaccguguaaag

SEQ ID NO: 932701 - RNA, 19 nt, Artificial Sequence
  Description of Artificial Sequence: Synthetic oligonucleotide
  Antisense strand to SEQ ID NO: 932700
cuuuacacgguagacuuau

SEQ ID NO: 932702 - RNA, 19 nt, Artificial Sequence
  Description of Artificial Sequence: Synthetic oligonucleotide
  Sense strand starting at position 2793 of SEQ ID NO: 913508
aggacaaguucucuaauga

SEQ ID NO: 932703 - RNA, 19 nt, Artificial Sequence
  Description of Artificial Sequence: Synthetic oligonucleotide
  Antisense strand to SEQ ID NO: 932702
ucauuagagaacuuguccu

SEQ ID NO: 932704 - RNA, 19 nt, Artificial Sequence
  Description of Artificial Sequence: Synthetic oligonucleotide
  Sense strand starting at position 755 of SEQ ID NO: 913508
gaggauucaccggagcaug

SEQ ID NO: 932705 - RNA, 19 nt, Artificial Sequence
  Description of Artificial Sequence: Synthetic oligonucleotide
  Antisense strand to SEQ ID NO: 932704
caugcuccggugaauccuc

SEQ ID NO: 932706 - RNA, 19 nt, Artificial Sequence
  Description of Artificial Sequence: Synthetic oligonucleotide
  Sense strand starting at position 909 of SEQ ID NO: 913508
ggacccugagcuugaagaa

SEQ ID NO: 932707 - RNA, 19 nt, Artificial Sequence
  Description of Artificial Sequence: Synthetic oligonucleotide
  Antisense strand to SEQ ID NO: 932706
uucuucaagcucagggucc

SEQ ID NO: 932708 - RNA, 19 nt, Artificial Sequence
  Description of Artificial Sequence: Synthetic oligonucleotide
  Sense strand starting at position 2792 of SEQ ID NO: 913508
uaggacaaguucucuaaug

SEQ ID NO: 932709 - RNA, 19 nt, Artificial Sequence
  Description of Artificial Sequence: Synthetic oligonucleotide
  Antisense strand to SEQ ID NO: 932708
cauuagagaacuuguccua

SEQ ID NO: 932710 - RNA, 19 nt, Artificial Sequence
  Description of Artificial Sequence: Synthetic oligonucleotide
  Sense strand starting at position 2066 of SEQ ID NO: 913508
gaggguugggucugaggaa

SEQ ID NO: 932711 - RNA, 19 nt, Artificial Sequence
  Description of Artificial Sequence: Synthetic oligonucleotide
  Antisense strand to SEQ ID NO: 932710
uuccucagacccaacccuc

SEQ ID NO: 932712 - RNA, 19 nt, Artificial Sequence
  Description of Artificial Sequence: Synthetic oligonucleotide
  Sense strand starting at position 541 of SEQ ID NO: 913508
gguuguugccaggaacaga

SEQ ID NO: 932713 - RNA, 19 nt, Artificial Sequence
  Description of Artificial Sequence: Synthetic oligonucleotide
  Antisense strand to SEQ ID NO: 932712
ucuguuccuggcaacaacc

SEQ ID NO: 932714 - RNA, 19 nt, Artificial Sequence
  Description of Artificial Sequence: Synthetic oligonucleotide
  Sense strand starting at position 447 of SEQ ID NO: 913508
aaagcugagguuuagcuaa

SEQ ID NO: 932715 - RNA, 19 nt, Artificial Sequence
  Description of Artificial Sequence: Synthetic oligonucleotide
  Antisense strand to SEQ ID NO: 932714
uuagcuaaaccucagcuuu

SEQ ID NO: 932716 - RNA, 19 nt, Artificial Sequence
  Description of Artificial Sequence: Synthetic oligonucleotide
  Sense strand starting at position 3199 of SEQ ID NO: 913508
ggugccuacguguuaguuu

SEQ ID NO: 932717 - RNA, 19 nt, Artificial Sequence
  Description of Artificial Sequence: Synthetic oligonucleotide
  Antisense strand to SEQ ID NO: 932716
aaacuaacacguaggcacc

SEQ ID NO: 932718 - RNA, 19 nt, Artificial Sequence
  Description of Artificial Sequence: Synthetic oligonucleotide
  Sense strand starting at position 1007 of SEQ ID NO: 913508
gaggauguauguguauaua

SEQ ID NO: 932719 - RNA, 19 nt, Artificial Sequence
  Description of Artificial Sequence: Synthetic oligonucleotide
  Antisense strand to SEQ ID NO: 932718
uauauacacauacauccuc

SEQ ID NO: 932720 - RNA, 19 nt, Artificial Sequence
  Description of Artificial Sequence: Synthetic oligonucleotide
  Sense strand starting at position 1006 of SEQ ID NO: 913508
agaggauguauguguauau

SEQ ID NO: 932721 - RNA, 19 nt, Artificial Sequence
  Description of Artificial Sequence: Synthetic oligonucleotide
  Antisense strand to SEQ ID NO: 932720
auauacacauacauccucu

SEQ ID NO: 932722 - RNA, 19 nt, Artificial Sequence
  Description of Artificial Sequence: Synthetic oligonucleotide
  Sense strand starting at position 341 of SEQ ID NO: 913508
uaggcugugggucacaauu

SEQ ID NO: 932723 - RNA, 19 nt, Artificial Sequence
  Description of Artificial Sequence: Synthetic oligonucleotide
  Antisense strand to SEQ ID NO: 932722
aauugugacccacagccua

SEQ ID NO: 932724 - RNA, 19 nt, Artificial Sequence
  Description of Artificial Sequence: Synthetic oligonucleotide
  Sense strand starting at position 983 of SEQ ID NO: 913508
ccaucacuccugggcagau

SEQ ID NO: 932725 - RNA, 19 nt, Artificial Sequence
  Description of Artificial Sequence: Synthetic oligonucleotide
  Antisense strand to SEQ ID NO: 932724
aucugcccaggagugaugg

SEQ ID NO: 932726 - RNA, 19 nt, Artificial Sequence
  Description of Artificial Sequence: Synthetic oligonucleotide
  Sense strand starting at position 357 of SEQ ID NO: 913508
auugcuacccucugagauc

SEQ ID NO: 932727 - RNA, 19 nt, Artificial Sequence
  Description of Artificial Sequence: Synthetic oligonucleotide
  Antisense strand to SEQ ID NO: 932726
gaucucagaggguagcaau

SEQ ID NO: 932728 - RNA, 19 nt, Artificial Sequence
  Description of Artificial Sequence: Synthetic oligonucleotide
  Sense strand starting at position 2537 of SEQ ID NO: 913508
ggaagacucugccucgauc

SEQ ID NO: 932729 - RNA, 19 nt, Artificial Sequence
  Description of Artificial Sequence: Synthetic oligonucleotide
  Antisense strand to SEQ ID NO: 932728
gaucgaggcagagucuucc

SEQ ID NO: 932730 - RNA, 19 nt, Artificial Sequence
  Description of Artificial Sequence: Synthetic oligonucleotide
  Sense strand starting at position 82 of SEQ ID NO: 913508
ggaugcaucugggcuaauu

SEQ ID NO: 932731 - RNA, 19 nt, Artificial Sequence
  Description of Artificial Sequence: Synthetic oligonucleotide
  Antisense strand to SEQ ID NO: 932730
aauuagcccagaugcaucc

SEQ ID NO: 932732 - RNA, 19 nt, Artificial Sequence
  Description of Artificial Sequence: Synthetic oligonucleotide
  Sense strand starting at position 79 of SEQ ID NO: 913508
ccaggaugcaucugggcua

SEQ ID NO: 932733 - RNA, 19 nt, Artificial Sequence
  Description of Artificial Sequence: Synthetic oligonucleotide
  Antisense strand to SEQ ID NO: 932732
uagcccagaugcauccugg

SEQ ID NO: 932734 - RNA, 19 nt, Artificial Sequence
  Description of Artificial Sequence: Synthetic oligonucleotide
  Sense strand starting at position 2926 of SEQ ID NO: 913508
gcgggauucuggucugaag

SEQ ID NO: 932735 - RNA, 19 nt, Artificial Sequence
  Description of Artificial Sequence: Synthetic oligonucleotide
  Antisense strand to SEQ ID NO: 932734
cuucagaccagaaucccgc

SEQ ID NO: 932736 - RNA, 19 nt, Artificial Sequence
  Description of Artificial Sequence: Synthetic oligonucleotide
  Sense strand starting at position 743 of SEQ ID NO: 913508
uggcguccuggugaggauu

SEQ ID NO: 932737 - RNA, 19 nt, Artificial Sequence
  Description of Artificial Sequence: Synthetic oligonucleotide
  Antisense strand to SEQ ID NO: 932736
aauccucaccaggacgcca

SEQ ID NO: 932738 - RNA, 19 nt, Artificial Sequence
  Description of Artificial Sequence: Synthetic oligonucleotide
  Sense strand starting at position 2053 of SEQ ID NO: 913508
gcugaauccuggagagggu

SEQ ID NO: 932739 - RNA, 19 nt, Artificial Sequence
  Description of Artificial Sequence: Synthetic oligonucleotide
  Antisense strand to SEQ ID NO: 932738
acccucuccaggauucagc

SEQ ID NO: 932740 - RNA, 19 nt, Artificial Sequence
  Description of Artificial Sequence: Synthetic oligonucleotide
  Sense strand starting at position 449 of SEQ ID NO: 913508
agcugagguuuagcuaauu

SEQ ID NO: 932741 - RNA, 19 nt, Artificial Sequence
  Description of Artificial Sequence: Synthetic oligonucleotide
  Antisense strand to SEQ ID NO: 932740
aauuagcuaaaccucagcu

SEQ ID NO: 932742 - RNA, 19 nt, Artificial Sequence
  Description of Artificial Sequence: Synthetic oligonucleotide
  Sense strand starting at position 1478 of SEQ ID NO: 913508
ggugcugucccuggauaga

SEQ ID NO: 932743 - RNA, 19 nt, Artificial Sequence
  Description of Artificial Sequence: Synthetic oligonucleotide
  Antisense strand to SEQ ID NO: 932742
ucuauccagggacagcacc

SEQ ID NO: 932744 - RNA, 19 nt, Artificial Sequence
  Description of Artificial Sequence: Synthetic oligonucleotide
  Sense strand starting at position 3151 of SEQ ID NO: 913508
ggguuugcuuccuuccuau

SEQ ID NO: 932745 - RNA, 19 nt, Artificial Sequence
  Description of Artificial Sequence: Synthetic oligonucleotide
  Antisense strand to SEQ ID NO: 932744
auaggaaggaagcaaaccc

SEQ ID NO: 932746 - RNA, 19 nt, Artificial Sequence
  Description of Artificial Sequence: Synthetic oligonucleotide
  Sense strand starting at position 3150 of SEQ ID NO: 913508
uggguuugcuuccuuccua

SEQ ID NO: 932747 - RNA, 19 nt, Artificial Sequence
  Description of Artificial Sequence: Synthetic oligonucleotide
  Antisense strand to SEQ ID NO: 932746
uaggaaggaagcaaaccca

SEQ ID NO: 932748 - RNA, 19 nt, Artificial Sequence
  Description of Artificial Sequence: Synthetic oligonucleotide
  Sense strand starting at position 2929 of SEQ ID NO: 913508
ggauucuggucugaaggga

SEQ ID NO: 932749 - RNA, 19 nt, Artificial Sequence
  Description of Artificial Sequence: Synthetic oligonucleotide
  Antisense strand to SEQ ID NO: 932748
ucccuucagaccagaaucc

SEQ ID NO: 932750 - RNA, 19 nt, Artificial Sequence
  Description of Artificial Sequence: Synthetic oligonucleotide
  Sense strand starting at position 37 of SEQ ID NO: 913508
aaugcaugcgugggugaau

SEQ ID NO: 932751 - RNA, 19 nt, Artificial Sequence
  Description of Artificial Sequence: Synthetic oligonucleotide
  Antisense strand to SEQ ID NO: 932750
auucacccacgcaugcauu

SEQ ID NO: 932752 - RNA, 19 nt, Artificial Sequence
  Description of Artificial Sequence: Synthetic oligonucleotide
  Sense strand starting at position 1021 of SEQ ID NO: 913508
auauaugucuguuuguguu

SEQ ID NO: 932753 - RNA, 19 nt, Artificial Sequence
  Description of Artificial Sequence: Synthetic oligonucleotide
  Antisense strand to SEQ ID NO: 932752
aacacaaacagacauauau

SEQ ID NO: 932754 - RNA, 19 nt, Artificial Sequence
  Description of Artificial Sequence: Synthetic oligonucleotide
  Sense strand starting at position 2526 of SEQ ID NO: 913508
acgcuaugaugggaagacu

SEQ ID NO: 932755 - RNA, 19 nt, Artificial Sequence
  Description of Artificial Sequence: Synthetic oligonucleotide
  Antisense strand to SEQ ID NO: 932754
agucuucccaucauagcgu

SEQ ID NO: 932756 - RNA, 19 nt, Artificial Sequence
  Description of Artificial Sequence: Synthetic oligonucleotide
  Sense strand starting at position 177 of SEQ ID NO: 913508
gcaggcugccaguguagau

SEQ ID NO: 932757 - RNA, 19 nt, Artificial Sequence
  Description of Artificial Sequence: Synthetic oligonucleotide
  Antisense strand to SEQ ID NO: 932756
aucuacacuggcagccugc

SEQ ID NO: 932758 - RNA, 19 nt, Artificial Sequence
  Description of Artificial Sequence: Synthetic oligonucleotide
  Sense strand starting at position 3208 of SEQ ID NO: 913508
guguuaguuuggcuuaggu

SEQ ID NO: 932759 - RNA, 19 nt, Artificial Sequence
  Description of Artificial Sequence: Synthetic oligonucleotide
  Antisense strand to SEQ ID NO: 932758
accuaagccaaacuaacac

SEQ ID NO: 932760 - RNA, 19 nt, Artificial Sequence
  Description of Artificial Sequence: Synthetic oligonucleotide
  Sense strand starting at position 2273 of SEQ ID NO: 913508
ggacaauccugauggcaga

SEQ ID NO: 932761 - RNA, 19 nt, Artificial Sequence
  Description of Artificial Sequence: Synthetic oligonucleotide
  Antisense strand to SEQ ID NO: 932760
ucugccaucaggauugucc

SEQ ID NO: 932762 - RNA, 19 nt, Artificial Sequence
  Description of Artificial Sequence: Synthetic oligonucleotide
  Sense strand starting at position 2324 of SEQ ID NO: 913508
aggcucuccucucagacaa

SEQ ID NO: 932763 - RNA, 19 nt, Artificial Sequence
  Description of Artificial Sequence: Synthetic oligonucleotide
  Antisense strand to SEQ ID NO: 932762
uugucugagaggagagccu

SEQ ID NO: 932764 - RNA, 19 nt, Artificial Sequence
  Description of Artificial Sequence: Synthetic oligonucleotide
  Sense strand starting at position 323 of SEQ ID NO: 913508
ggcaaagacuguuauuauu

SEQ ID NO: 932765 - RNA, 19 nt, Artificial Sequence
  Description of Artificial Sequence: Synthetic oligonucleotide
  Antisense strand to SEQ ID NO: 932764
aauaauaacagucuuugcc

SEQ ID NO: 932766 - RNA, 19 nt, Artificial Sequence
  Description of Artificial Sequence: Synthetic oligonucleotide
  Sense strand starting at position 2261 of SEQ ID NO: 913508
gcuacagacuugggacaau

SEQ ID NO: 932767 - RNA, 19 nt, Artificial Sequence
  Description of Artificial Sequence: Synthetic oligonucleotide
  Antisense strand to SEQ ID NO: 932766
auugucccaagucuguagc

SEQ ID NO: 932768 - RNA, 19 nt, Artificial Sequence
  Description of Artificial Sequence: Synthetic oligonucleotide
  Sense strand starting at position 2631 of SEQ ID NO: 913508
gggaaacuuuccugacagu

SEQ ID NO: 932769 - RNA, 19 nt, Artificial Sequence
  Description of Artificial Sequence: Synthetic oligonucleotide
  Antisense strand to SEQ ID NO: 932768
acugucaggaaaguuuccc

SEQ ID NO: 932770 - RNA, 19 nt, Artificial Sequence
  Description of Artificial Sequence: Synthetic oligonucleotide
  Sense strand starting at position 742 of SEQ ID NO: 913508
guggcguccuggugaggau

SEQ ID NO: 932771 - RNA, 19 nt, Artificial Sequence
  Description of Artificial Sequence: Synthetic oligonucleotide
  Antisense strand to SEQ ID NO: 932770
auccucaccaggacgccac

SEQ ID NO: 932772 - RNA, 19 nt, Artificial Sequence
  Description of Artificial Sequence: Synthetic oligonucleotide
  Sense strand starting at position 2159 of SEQ ID NO: 913509
aaaguaaagcagcauuaga

SEQ ID NO: 932773 - RNA, 19 nt, Artificial Sequence
  Description of Artificial Sequence: Synthetic oligonucleotide
  Antisense strand to SEQ ID NO: 932772
ucuaaugcugcuuuacuuu

SEQ ID NO: 932774 - RNA, 19 nt, Artificial Sequence
  Description of Artificial Sequence: Synthetic oligonucleotide
  Sense strand starting at position 2613 of SEQ ID NO: 913509
cugagauggcuguaggaug

SEQ ID NO: 932775 - RNA, 19 nt, Artificial Sequence
  Description of Artificial Sequence: Synthetic oligonucleotide
  Antisense strand to SEQ ID NO: 932774
cauccuacagccaucucag

SEQ ID NO: 932776 - RNA, 19 nt, Artificial Sequence
  Description of Artificial Sequence: Synthetic oligonucleotide
  Sense strand starting at position 2423 of SEQ ID NO: 913509
uguuguuaucguguguaga

SEQ ID NO: 932777 - RNA, 19 nt, Artificial Sequence
  Description of Artificial Sequence: Synthetic oligonucleotide
  Antisense strand to SEQ ID NO: 932776
ucuacacacgauaacaaca

SEQ ID NO: 932778 - RNA, 19 nt, Artificial Sequence
  Description of Artificial Sequence: Synthetic oligonucleotide
  Sense strand starting at position 3072 of SEQ ID NO: 913509
ccagucauuuccguuugag

SEQ ID NO: 932779 - RNA, 19 nt, Artificial Sequence
  Description of Artificial Sequence: Synthetic oligonucleotide
  Antisense strand to SEQ ID NO: 932778
cucaaacggaaaugacugg

SEQ ID NO: 932780 - RNA, 19 nt, Artificial Sequence
  Description of Artificial Sequence: Synthetic oligonucleotide
  Sense strand starting at position 2421 of SEQ ID NO: 913509
uauguuguuaucgugugua

SEQ ID NO: 932781 - RNA, 19 nt, Artificial Sequence
  Description of Artificial Sequence: Synthetic oligonucleotide
  Antisense strand to SEQ ID NO: 932780
uacacacgauaacaacaua

SEQ ID NO: 932782 - RNA, 19 nt, Artificial Sequence
  Description of Artificial Sequence: Synthetic oligonucleotide
  Sense strand starting at position 3075 of SEQ ID NO: 913509
gucauuuccguuugagacc

SEQ ID NO: 932783 - RNA, 19 nt, Artificial Sequence
  Description of Artificial Sequence: Synthetic oligonucleotide
  Antisense strand to SEQ ID NO: 932782
ggucucaaacggaaaugac

SEQ ID NO: 932784 - RNA, 19 nt, Artificial Sequence
  Description of Artificial Sequence: Synthetic oligonucleotide
  Sense strand starting at position 2950 of SEQ ID NO: 913509
uuuggagugggcuaauuau

SEQ ID NO: 932785 - RNA, 19 nt, Artificial Sequence
  Description of Artificial Sequence: Synthetic oligonucleotide
  Antisense strand to SEQ ID NO: 932784
auaauuagcccacuccaaa

SEQ ID NO: 932786 - RNA, 19 nt, Artificial Sequence
  Description of Artificial Sequence: Synthetic oligonucleotide
  Sense strand starting at position 3907 of SEQ ID NO: 913509
cgagaugggaccuggcaaa

SEQ ID NO: 932787 - RNA, 19 nt, Artificial Sequence
  Description of Artificial Sequence: Synthetic oligonucleotide
  Antisense strand to SEQ ID NO: 932786
uuugccaggucccaucucg

SEQ ID NO: 932788 - RNA, 19 nt, Artificial Sequence
  Description of Artificial Sequence: Synthetic oligonucleotide
  Sense strand starting at position 3510 of SEQ ID NO: 913509
ggucuuaucaggugaggaa

SEQ ID NO: 932789 - RNA, 19 nt, Artificial Sequence
  Description of Artificial Sequence: Synthetic oligonucleotide
  Antisense strand to SEQ ID NO: 932788
uuccucaccugauaagacc

SEQ ID NO: 932790 - RNA, 19 nt, Artificial Sequence
  Description of Artificial Sequence: Synthetic oligonucleotide
  Sense strand starting at position 2297 of SEQ ID NO: 913509
agaguaccugcagggaauu

SEQ ID NO: 932791 - RNA, 19 nt, Artificial Sequence
  Description of Artificial Sequence: Synthetic oligonucleotide
  Antisense strand to SEQ ID NO: 932790
aauucccugcagguacucu

SEQ ID NO: 932792 - RNA, 19 nt, Artificial Sequence
  Description of Artificial Sequence: Synthetic oligonucleotide
  Sense strand starting at position 2825 of SEQ ID NO: 913509
ccuggaugaccuugggcaa

SEQ ID NO: 932793 - RNA, 19 nt, Artificial Sequence
  Description of Artificial Sequence: Synthetic oligonucleotide
  Antisense strand to SEQ ID NO: 932792
uugcccaaggucauccagg

SEQ ID NO: 932794 - RNA, 19 nt, Artificial Sequence
  Description of Artificial Sequence: Synthetic oligonucleotide
  Sense strand starting at position 3239 of SEQ ID NO: 913509
ugucuaguggcugaagaac

SEQ ID NO: 932795 - RNA, 19 nt, Artificial Sequence
  Description of Artificial Sequence: Synthetic oligonucleotide
  Antisense strand to SEQ ID NO: 932794
guucuucagccacuagaca

SEQ ID NO: 932796 - RNA, 19 nt, Artificial Sequence
  Description of Artificial Sequence: Synthetic oligonucleotide
  Sense strand starting at position 2244 of SEQ ID NO: 913509
ggucuuucgaggcagacaa

SEQ ID NO: 932797 - RNA, 19 nt, Artificial Sequence
  Description of Artificial Sequence: Synthetic oligonucleotide
  Antisense strand to SEQ ID NO: 932796
uugucugccucgaaagacc

SEQ ID NO: 932798 - RNA, 19 nt, Artificial Sequence
  Description of Artificial Sequence: Synthetic oligonucleotide
  Sense strand starting at position 2084 of SEQ ID NO: 913509
gauuguguuguugagauua

SEQ ID NO: 932799 - RNA, 19 nt, Artificial Sequence
  Description of Artificial Sequence: Synthetic oligonucleotide
  Antisense strand to SEQ ID NO: 932798
uaaucucaacaacacaauc

SEQ ID NO: 932800 - RNA, 19 nt, Artificial Sequence
  Description of Artificial Sequence: Synthetic oligonucleotide
  Sense strand starting at position 2284 of SEQ ID NO: 913509
ccacguacucauuagagua

SEQ ID NO: 932801 - RNA, 19 nt, Artificial Sequence
  Description of Artificial Sequence: Synthetic oligonucleotide
  Antisense strand to SEQ ID NO: 932800
uacucuaaugaguacgugg

SEQ ID NO: 932802 - RNA, 19 nt, Artificial Sequence
  Description of Artificial Sequence: Synthetic oligonucleotide
  Sense strand starting at position 2406 of SEQ ID NO: 913509
aguauaaggacuugcuaug

SEQ ID NO: 932803 - RNA, 19 nt, Artificial Sequence
  Description of Artificial Sequence: Synthetic oligonucleotide
  Antisense strand to SEQ ID NO: 932802
cauagcaaguccuuauacu

SEQ ID NO: 932804 - RNA, 19 nt, Artificial Sequence
  Description of Artificial Sequence: Synthetic oligonucleotide
  Sense strand starting at position 2939 of SEQ ID NO: 913509
gcagaagacucuuuggagu

SEQ ID NO: 932805 - RNA, 19 nt, Artificial Sequence
  Description of Artificial Sequence: Synthetic oligonucleotide
  Antisense strand to SEQ ID NO: 932804
acuccaaagagucuucugc

SEQ ID NO: 932806 - RNA, 19 nt, Artificial Sequence
  Description of Artificial Sequence: Synthetic oligonucleotide
  Sense strand starting at position 2592 of SEQ ID NO: 913509
uuggaaugucuccaucugu

SEQ ID NO: 932807 - RNA, 19 nt, Artificial Sequence
  Description of Artificial Sequence: Synthetic oligonucleotide
  Antisense strand to SEQ ID NO: 932806
acagauggagacauuccaa

SEQ ID NO: 932808 - RNA, 19 nt, Artificial Sequence
  Description of Artificial Sequence: Synthetic oligonucleotide
  Sense strand starting at position 2611 of SEQ ID NO: 913509
cccugagauggcuguagga

SEQ ID NO: 932809 - RNA, 19 nt, Artificial Sequence
  Description of Artificial Sequence: Synthetic oligonucleotide
  Antisense strand to SEQ ID NO: 932808
uccuacagccaucucaggg

SEQ ID NO: 932810 - RNA, 19 nt, Artificial Sequence
  Description of Artificial Sequence: Synthetic oligonucleotide
  Sense strand starting at position 2308 of SEQ ID NO: 913509
agggaauuacuuugccucu

SEQ ID NO: 932811 - RNA, 19 nt, Artificial Sequence
  Description of Artificial Sequence: Synthetic oligonucleotide
  Antisense strand to SEQ ID NO: 932810
agaggcaaaguaauucccu

SEQ ID NO: 932812 - RNA, 19 nt, Artificial Sequence
  Description of Artificial Sequence: Synthetic oligonucleotide
  Sense strand starting at position 3568 of SEQ ID NO: 913509
gcagcagauccuggaauua

SEQ ID NO: 932813 - RNA, 19 nt, Artificial Sequence
  Description of Artificial Sequence: Synthetic oligonucleotide
  Antisense strand to SEQ ID NO: 932812
uaauuccaggaucugcugc

SEQ ID NO: 932814 - RNA, 19 nt, Artificial Sequence
  Description of Artificial Sequence: Synthetic oligonucleotide
  Sense strand starting at position 2602 of SEQ ID NO: 913509
uccaucugucccugagaug

SEQ ID NO: 932815 - RNA, 19 nt, Artificial Sequence
  Description of Artificial Sequence: Synthetic oligonucleotide
  Antisense strand to SEQ ID NO: 932814
caucucagggacagaugga

SEQ ID NO: 932816 - RNA, 19 nt, Artificial Sequence
  Description of Artificial Sequence: Synthetic oligonucleotide
  Sense strand starting at position 3238 of SEQ ID NO: 913509
augucuaguggcugaagaa

SEQ ID NO: 932817 - RNA, 19 nt, Artificial Sequence
  Description of Artificial Sequence: Synthetic oligonucleotide
  Antisense strand to SEQ ID NO: 932816
uucuucagccacuagacau

SEQ ID NO: 932818 - RNA, 19 nt, Artificial Sequence
  Description of Artificial Sequence: Synthetic oligonucleotide
  Sense strand starting at position 2946 of SEQ ID NO: 913509
acucuuuggagugggcuaa

SEQ ID NO: 932819 - RNA, 19 nt, Artificial Sequence
  Description of Artificial Sequence: Synthetic oligonucleotide
  Antisense strand to SEQ ID NO: 932818
uuagcccacuccaaagagu

SEQ ID NO: 932820 - RNA, 19 nt, Artificial Sequence
  Description of Artificial Sequence: Synthetic oligonucleotide
  Sense strand starting at position 2945 of SEQ ID NO: 913509
gacucuuuggagugggcua

SEQ ID NO: 932821 - RNA, 19 nt, Artificial Sequence
  Description of Artificial Sequence: Synthetic oligonucleotide
  Antisense strand to SEQ ID NO: 932820
uagcccacuccaaagaguc

SEQ ID NO: 932822 - RNA, 19 nt, Artificial Sequence
  Description of Artificial Sequence: Synthetic oligonucleotide
  Sense strand starting at position 2082 of SEQ ID NO: 913509
gggauuguguuguugagau

SEQ ID NO: 932823 - RNA, 19 nt, Artificial Sequence
  Description of Artificial Sequence: Synthetic oligonucleotide
  Antisense strand to SEQ ID NO: 932822
aucucaacaacacaauccc

SEQ ID NO: 932824 - RNA, 19 nt, Artificial Sequence
  Description of Artificial Sequence: Synthetic oligonucleotide
  Sense strand starting at position 1430 of SEQ ID NO: 913509
cagaauuucucggccgcga

SEQ ID NO: 932825 - RNA, 19 nt, Artificial Sequence
  Description of Artificial Sequence: Synthetic oligonucleotide
  Antisense strand to SEQ ID NO: 932824
ucgcggccgagaaauucug

SEQ ID NO: 932826 - RNA, 19 nt, Artificial Sequence
  Description of Artificial Sequence: Synthetic oligonucleotide
  Sense strand starting at position 3237 of SEQ ID NO: 913509
uaugucuaguggcugaaga

SEQ ID NO: 932827 - RNA, 19 nt, Artificial Sequence
  Description of Artificial Sequence: Synthetic oligonucleotide
  Antisense strand to SEQ ID NO: 932826
ucuucagccacuagacaua

SEQ ID NO: 932828 - RNA, 19 nt, Artificial Sequence
  Description of Artificial Sequence: Synthetic oligonucleotide
  Sense strand starting at position 1432 of SEQ ID NO: 913509
gaauuucucggccgcgaau

SEQ ID NO: 932829 - RNA, 19 nt, Artificial Sequence
  Description of Artificial Sequence: Synthetic oligonucleotide
  Antisense strand to SEQ ID NO: 932828
auucgcggccgagaaauuc

SEQ ID NO: 932830 - RNA, 19 nt, Artificial Sequence
  Description of Artificial Sequence: Synthetic oligonucleotide
  Sense strand starting at position 3355 of SEQ ID NO: 913509
cagguaucucugggcucau

SEQ ID NO: 932831 - RNA, 19 nt, Artificial Sequence
  Description of Artificial Sequence: Synthetic oligonucleotide
  Antisense strand to SEQ ID NO: 932830
augagcccagagauaccug

SEQ ID NO: 932832 - RNA, 19 nt, Artificial Sequence
  Description of Artificial Sequence: Synthetic oligonucleotide
  Sense strand starting at position 3820 of SEQ ID NO: 913509
aauccaucguggcuccaaa

SEQ ID NO: 932833 - RNA, 19 nt, Artificial Sequence
  Description of Artificial Sequence: Synthetic oligonucleotide
  Antisense strand to SEQ ID NO: 932832
uuuggagccacgauggauu

SEQ ID NO: 932834 - RNA, 19 nt, Artificial Sequence
  Description of Artificial Sequence: Synthetic oligonucleotide
  Sense strand starting at position 2426 of SEQ ID NO: 913509
uguuaucguguguagaaug

SEQ ID NO: 932835 - RNA, 19 nt, Artificial Sequence
  Description of Artificial Sequence: Synthetic oligonucleotide
  Antisense strand to SEQ ID NO: 932834
cauucuacacacgauaaca

SEQ ID NO: 932836 - RNA, 19 nt, Artificial Sequence
  Description of Artificial Sequence: Synthetic oligonucleotide
  Sense strand starting at position 2412 of SEQ ID NO: 913509
aggacuugcuauguuguua

SEQ ID NO: 932837 - RNA, 19 nt, Artificial Sequence
  Description of Artificial Sequence: Synthetic oligonucleotide
  Antisense strand to SEQ ID NO: 932836
uaacaacauagcaaguccu

SEQ ID NO: 932838 - RNA, 19 nt, Artificial Sequence
  Description of Artificial Sequence: Synthetic oligonucleotide
  Sense strand starting at position 2170 of SEQ ID NO: 913509
gcauuagacgcagaugcuu

SEQ ID NO: 932839 - RNA, 19 nt, Artificial Sequence
  Description of Artificial Sequence: Synthetic oligonucleotide
  Antisense strand to SEQ ID NO: 932838
aagcaucugcgucuaaugc

SEQ ID NO: 932840 - RNA, 19 nt, Artificial Sequence
  Description of Artificial Sequence: Synthetic oligonucleotide
  Sense strand starting at position 3334 of SEQ ID NO: 913509
ggcuguuccugagcaugaa

SEQ ID NO: 932841 - RNA, 19 nt, Artificial Sequence
  Description of Artificial Sequence: Synthetic oligonucleotide
  Antisense strand to SEQ ID NO: 932840
uucaugcucaggaacagcc

SEQ ID NO: 932842 - RNA, 19 nt, Artificial Sequence
  Description of Artificial Sequence: Synthetic oligonucleotide
  Sense strand starting at position 979 of SEQ ID NO: 913509
aagggcucucgguguggaa

SEQ ID NO: 932843 - RNA, 19 nt, Artificial Sequence
  Description of Artificial Sequence: Synthetic oligonucleotide
  Antisense strand to SEQ ID NO: 932842
uuccacaccgagagcccuu

SEQ ID NO: 932844 - RNA, 19 nt, Artificial Sequence
  Description of Artificial Sequence: Synthetic oligonucleotide
  Sense strand starting at position 2334 of SEQ ID NO: 913509
ucaguuaguuucuuuguaa

SEQ ID NO: 932845 - RNA, 19 nt, Artificial Sequence
  Description of Artificial Sequence: Synthetic oligonucleotide
  Antisense strand to SEQ ID NO: 932844
uuacaaagaaacuaacuga

SEQ ID NO: 932846 - RNA, 19 nt, Artificial Sequence
  Description of Artificial Sequence: Synthetic oligonucleotide
  Sense strand starting at position 2333 of SEQ ID NO: 913509
cucaguuaguuucuuugua

SEQ ID NO: 932847 - RNA, 19 nt, Artificial Sequence
  Description of Artificial Sequence: Synthetic oligonucleotide
  Antisense strand to SEQ ID NO: 932846
uacaaagaaacuaacugag

SEQ ID NO: 932848 - RNA, 19 nt, Artificial Sequence
  Description of Artificial Sequence: Synthetic oligonucleotide
  Sense strand starting at position 2325 of SEQ ID NO: 913509
cucugucccucaguuaguu

SEQ ID NO: 932849 - RNA, 19 nt, Artificial Sequence
  Description of Artificial Sequence: Synthetic oligonucleotide
  Antisense strand to SEQ ID NO: 932848
aacuaacugagggacagag

SEQ ID NO: 932850 - RNA, 19 nt, Artificial Sequence
  Description of Artificial Sequence: Synthetic oligonucleotide
  Sense strand starting at position 2231 of SEQ ID NO: 913509
gugcaaagaguguggucuu

SEQ ID NO: 932851 - RNA, 19 nt, Artificial Sequence
  Description of Artificial Sequence: Synthetic oligonucleotide
  Antisense strand to SEQ ID NO: 932850
aagaccacacucuuugcac

SEQ ID NO: 932852 - RNA, 19 nt, Artificial Sequence
  Description of Artificial Sequence: Synthetic oligonucleotide
  Sense strand starting at position 1864 of SEQ ID NO: 913510
aggacaaguucucuaauga

SEQ ID NO: 932853 - RNA, 19 nt, Artificial Sequence
  Description of Artificial Sequence: Synthetic oligonucleotide
  Antisense strand to SEQ ID NO: 932852
ucauuagagaacuuguccu

SEQ ID NO: 932854 - RNA, 19 nt, Artificial Sequence
  Description of Artificial Sequence: Synthetic oligonucleotide
  Sense strand starting at position 1863 of SEQ ID NO: 913510
uaggacaaguucucuaaug

SEQ ID NO: 932855 - RNA, 19 nt, Artificial Sequence
  Description of Artificial Sequence: Synthetic oligonucleotide
  Antisense strand to SEQ ID NO: 932854
cauuagagaacuuguccua

SEQ ID NO: 932856 - RNA, 19 nt, Artificial Sequence
  Description of Artificial Sequence: Synthetic oligonucleotide
  Sense strand starting at position 1137 of SEQ ID NO: 913510
gaggguugggucugaggaa

SEQ ID NO: 932857 - RNA, 19 nt, Artificial Sequence
  Description of Artificial Sequence: Synthetic oligonucleotide
  Antisense strand to SEQ ID NO: 932856
uuccucagacccaacccuc

SEQ ID NO: 932858 - RNA, 19 nt, Artificial Sequence
  Description of Artificial Sequence: Synthetic oligonucleotide
  Sense strand starting at position 2270 of SEQ ID NO: 913510
ggugccuacguguuaguuu

SEQ ID NO: 932859 - RNA, 19 nt, Artificial Sequence
  Description of Artificial Sequence: Synthetic oligonucleotide
  Antisense strand to SEQ ID NO: 932858
aaacuaacacguaggcacc

SEQ ID NO: 932860 - RNA, 19 nt, Artificial Sequence
  Description of Artificial Sequence: Synthetic oligonucleotide
  Sense strand starting at position 78 of SEQ ID NO: 913510
gaggauguauguguauaua

SEQ ID NO: 932861 - RNA, 19 nt, Artificial Sequence
  Description of Artificial Sequence: Synthetic oligonucleotide
  Antisense strand to SEQ ID NO: 932860
uauauacacauacauccuc

SEQ ID NO: 932862 - RNA, 19 nt, Artificial Sequence
  Description of Artificial Sequence: Synthetic oligonucleotide
  Sense strand starting at position 77 of SEQ ID NO: 913510
agaggauguauguguauau

SEQ ID NO: 932863 - RNA, 19 nt, Artificial Sequence
  Description of Artificial Sequence: Synthetic oligonucleotide
  Antisense strand to SEQ ID NO: 932862
auauacacauacauccucu

SEQ ID NO: 932864 - RNA, 19 nt, Artificial Sequence
  Description of Artificial Sequence: Synthetic oligonucleotide
  Sense strand starting at position 54 of SEQ ID NO: 913510
ccaucacuccugggcagau

SEQ ID NO: 932865 - RNA, 19 nt, Artificial Sequence
  Description of Artificial Sequence: Synthetic oligonucleotide
  Antisense strand to SEQ ID NO: 932864
aucugcccaggagugaugg

SEQ ID NO: 932866 - RNA, 19 nt, Artificial Sequence
  Description of Artificial Sequence: Synthetic oligonucleotide
  Sense strand starting at position 1608 of SEQ ID NO: 913510
ggaagacucugccucgauc

SEQ ID NO: 932867 - RNA, 19 nt, Artificial Sequence
  Description of Artificial Sequence: Synthetic oligonucleotide
  Antisense strand to SEQ ID NO: 932866
gaucgaggcagagucuucc

SEQ ID NO: 932868 - RNA, 19 nt, Artificial Sequence
  Description of Artificial Sequence: Synthetic oligonucleotide
  Sense strand starting at position 1997 of SEQ ID NO: 913510
gcgggauucuggucugaag

SEQ ID NO: 932869 - RNA, 19 nt, Artificial Sequence
  Description of Artificial Sequence: Synthetic oligonucleotide
  Antisense strand to SEQ ID NO: 932868
cuucagaccagaaucccgc

SEQ ID NO: 932870 - RNA, 19 nt, Artificial Sequence
  Description of Artificial Sequence: Synthetic oligonucleotide
  Sense strand starting at position 1124 of SEQ ID NO: 913510
gcugaauccuggagagggu

SEQ ID NO: 932871 - RNA, 19 nt, Artificial Sequence
  Description of Artificial Sequence: Synthetic oligonucleotide
  Antisense strand to SEQ ID NO: 932870
acccucuccaggauucagc

SEQ ID NO: 932872 - RNA, 19 nt, Artificial Sequence
  Description of Artificial Sequence: Synthetic oligonucleotide
  Sense strand starting at position 549 of SEQ ID NO: 913510
ggugcugucccuggauaga

SEQ ID NO: 932873 - RNA, 19 nt, Artificial Sequence
  Description of Artificial Sequence: Synthetic oligonucleotide
  Antisense strand to SEQ ID NO: 932872
ucuauccagggacagcacc

SEQ ID NO: 932874 - RNA, 19 nt, Artificial Sequence
  Description of Artificial Sequence: Synthetic oligonucleotide
  Sense strand starting at position 2221 of SEQ ID NO: 913510
uggguuugcuuccuuccua

SEQ ID NO: 932875 - RNA, 19 nt, Artificial Sequence
  Description of Artificial Sequence: Synthetic oligonucleotide
  Antisense strand to SEQ ID NO: 932874
uaggaaggaagcaaaccca

SEQ ID NO: 932876 - RNA, 19 nt, Artificial Sequence
  Description of Artificial Sequence: Synthetic oligonucleotide
  Sense strand starting at position 2222 of SEQ ID NO: 913510
ggguuugcuuccuuccuau

SEQ ID NO: 932877 - RNA, 19 nt, Artificial Sequence
  Description of Artificial Sequence: Synthetic oligonucleotide
  Antisense strand to SEQ ID NO: 932876
auaggaaggaagcaaaccc

SEQ ID NO: 932878 - RNA, 19 nt, Artificial Sequence
  Description of Artificial Sequence: Synthetic oligonucleotide
  Sense strand starting at position 2000 of SEQ ID NO: 913510
ggauucuggucugaaggga

SEQ ID NO: 932879 - RNA, 19 nt, Artificial Sequence
  Description of Artificial Sequence: Synthetic oligonucleotide
  Antisense strand to SEQ ID NO: 932878
ucccuucagaccagaaucc

SEQ ID NO: 932880 - RNA, 19 nt, Artificial Sequence
  Description of Artificial Sequence: Synthetic oligonucleotide
  Sense strand starting at position 92 of SEQ ID NO: 913510
auauaugucuguuuguguu

SEQ ID NO: 932881 - RNA, 19 nt, Artificial Sequence
  Description of Artificial Sequence: Synthetic oligonucleotide
  Antisense strand to SEQ ID NO: 932880
aacacaaacagacauauau

SEQ ID NO: 932882 - RNA, 19 nt, Artificial Sequence
  Description of Artificial Sequence: Synthetic oligonucleotide
  Sense strand starting at position 1597 of SEQ ID NO: 913510
acgcuaugaugggaagacu

SEQ ID NO: 932883 - RNA, 19 nt, Artificial Sequence
  Description of Artificial Sequence: Synthetic oligonucleotide
  Antisense strand to SEQ ID NO: 932882
agucuucccaucauagcgu

SEQ ID NO: 932884 - RNA, 19 nt, Artificial Sequence
  Description of Artificial Sequence: Synthetic oligonucleotide
  Sense strand starting at position 2279 of SEQ ID NO: 913510
guguuaguuuggcuuaggu

SEQ ID NO: 932885 - RNA, 19 nt, Artificial Sequence
  Description of Artificial Sequence: Synthetic oligonucleotide
  Antisense strand to SEQ ID NO: 932884
accuaagccaaacuaacac

SEQ ID NO: 932886 - RNA, 19 nt, Artificial Sequence
  Description of Artificial Sequence: Synthetic oligonucleotide
  Sense strand starting at position 1344 of SEQ ID NO: 913510
ggacaauccugauggcaga

SEQ ID NO: 932887 - RNA, 19 nt, Artificial Sequence
  Description of Artificial Sequence: Synthetic oligonucleotide
  Antisense strand to SEQ ID NO: 932886
ucugccaucaggauugucc

SEQ ID NO: 932888 - RNA, 19 nt, Artificial Sequence
  Description of Artificial Sequence: Synthetic oligonucleotide
  Sense strand starting at position 1395 of SEQ ID NO: 913510
aggcucuccucucagacaa

SEQ ID NO: 932889 - RNA, 19 nt, Artificial Sequence
  Description of Artificial Sequence: Synthetic oligonucleotide
  Antisense strand to SEQ ID NO: 932888
uugucugagaggagagccu

SEQ ID NO: 932890 - RNA, 19 nt, Artificial Sequence
  Description of Artificial Sequence: Synthetic oligonucleotide
  Sense strand starting at position 1332 of SEQ ID NO: 913510
gcuacagacuugggacaau

SEQ ID NO: 932891 - RNA, 19 nt, Artificial Sequence
  Description of Artificial Sequence: Synthetic oligonucleotide
  Antisense strand to SEQ ID NO: 932890
auugucccaagucuguagc

SEQ ID NO: 932892 - RNA, 19 nt, Artificial Sequence
  Description of Artificial Sequence: Synthetic oligonucleotide
  Sense strand starting at position 1702 of SEQ ID NO: 913510
gggaaacuuuccugacagu

SEQ ID NO: 932893 - RNA, 19 nt, Artificial Sequence
  Description of Artificial Sequence: Synthetic oligonucleotide
  Antisense strand to SEQ ID NO: 932892
acugucaggaaaguuuccc

SEQ ID NO: 932894 - RNA, 19 nt, Artificial Sequence
  Description of Artificial Sequence: Synthetic oligonucleotide
  Sense strand starting at position 1433 of SEQ ID NO: 913511
augaauaaauccgucaaga

SEQ ID NO: 932895 - RNA, 19 nt, Artificial Sequence
  Description of Artificial Sequence: Synthetic oligonucleotide
  Antisense strand to SEQ ID NO: 932894
ucuugacggauuuauucau

SEQ ID NO: 932896 - RNA, 19 nt, Artificial Sequence
  Description of Artificial Sequence: Synthetic oligonucleotide
  Sense strand starting at position 3137 of SEQ ID NO: 913511
uaucacagauguuuggaau

SEQ ID NO: 932897 - RNA, 19 nt, Artificial Sequence
  Description of Artificial Sequence: Synthetic oligonucleotide
  Antisense strand to SEQ ID NO: 932896
auuccaaacaucugugaua

SEQ ID NO: 932898 - RNA, 19 nt, Artificial Sequence
  Description of Artificial Sequence: Synthetic oligonucleotide
  Sense strand starting at position 3138 of SEQ ID NO: 913511
aucacagauguuuggaauc

SEQ ID NO: 932899 - RNA, 19 nt, Artificial Sequence
  Description of Artificial Sequence: Synthetic oligonucleotide
  Antisense strand to SEQ ID NO: 932898
gauuccaaacaucugugau

SEQ ID NO: 932900 - RNA, 19 nt, Artificial Sequence
  Description of Artificial Sequence: Synthetic oligonucleotide
  Sense strand starting at position 1001 of SEQ ID NO: 913511
gaaugacagcucuacaguu

SEQ ID NO: 932901 - RNA, 19 nt, Artificial Sequence
  Description of Artificial Sequence: Synthetic oligonucleotide
  Antisense strand to SEQ ID NO: 932900
aacuguagagcugucauuc

SEQ ID NO: 932902 - RNA, 19 nt, Artificial Sequence
  Description of Artificial Sequence: Synthetic oligonucleotide
  Sense strand starting at position 2531 of SEQ ID NO: 913511
accguuugcucauuuauaa

SEQ ID NO: 932903 - RNA, 19 nt, Artificial Sequence
  Description of Artificial Sequence: Synthetic oligonucleotide
  Antisense strand to SEQ ID NO: 932902
uuauaaaugagcaaacggu

SEQ ID NO: 932904 - RNA, 19 nt, Artificial Sequence
  Description of Artificial Sequence: Synthetic oligonucleotide
  Sense strand starting at position 3148 of SEQ ID NO: 913511
uuuggaaucuucccacuga

SEQ ID NO: 932905 - RNA, 19 nt, Artificial Sequence
  Description of Artificial Sequence: Synthetic oligonucleotide
  Antisense strand to SEQ ID NO: 932904
ucagugggaagauuccaaa

SEQ ID NO: 932906 - RNA, 19 nt, Artificial Sequence
  Description of Artificial Sequence: Synthetic oligonucleotide
  Sense strand starting at position 2528 of SEQ ID NO: 913511
gauaccguuugcucauuua

SEQ ID NO: 932907 - RNA, 19 nt, Artificial Sequence
  Description of Artificial Sequence: Synthetic oligonucleotide
  Antisense strand to SEQ ID NO: 932906
uaaaugagcaaacgguauc

SEQ ID NO: 932908 - RNA, 19 nt, Artificial Sequence
  Description of Artificial Sequence: Synthetic oligonucleotide
  Sense strand starting at position 2901 of SEQ ID NO: 913511
cccaaagugcuuuacauga

SEQ ID NO: 932909 - RNA, 19 nt, Artificial Sequence
  Description of Artificial Sequence: Synthetic oligonucleotide
  Antisense strand to SEQ ID NO: 932908
ucauguaaagcacuuuggg

SEQ ID NO: 932910 - RNA, 19 nt, Artificial Sequence
  Description of Artificial Sequence: Synthetic oligonucleotide
  Sense strand starting at position 3786 of SEQ ID NO: 913511
agcagaagacauuguuuaa

SEQ ID NO: 932911 - RNA, 19 nt, Artificial Sequence
  Description of Artificial Sequence: Synthetic oligonucleotide
  Antisense strand to SEQ ID NO: 932910
uuaaacaaugucuucugcu

SEQ ID NO: 932912 - RNA, 19 nt, Artificial Sequence
  Description of Artificial Sequence: Synthetic oligonucleotide
  Sense strand starting at position 3493 of SEQ ID NO: 913511
ggaauauuagcucacugca

SEQ ID NO: 932913 - RNA, 19 nt, Artificial Sequence
  Description of Artificial Sequence: Synthetic oligonucleotide
  Antisense strand to SEQ ID NO: 932912
ugcagugagcuaauauucc

SEQ ID NO: 932914 - RNA, 19 nt, Artificial Sequence
  Description of Artificial Sequence: Synthetic oligonucleotide
  Sense strand starting at position 3482 of SEQ ID NO: 913511
uggagugcaguggaauauu

SEQ ID NO: 932915 - RNA, 19 nt, Artificial Sequence
  Description of Artificial Sequence: Synthetic oligonucleotide
  Antisense strand to SEQ ID NO: 932914
aauauuccacugcacucca

SEQ ID NO: 932916 - RNA, 19 nt, Artificial Sequence
  Description of Artificial Sequence: Synthetic oligonucleotide
  Sense strand starting at position 2372 of SEQ ID NO: 913511
uuaagauguuggguuggga

SEQ ID NO: 932917 - RNA, 19 nt, Artificial Sequence
  Description of Artificial Sequence: Synthetic oligonucleotide
  Antisense strand to SEQ ID NO: 932916
ucccaacccaacaucuuaa

SEQ ID NO: 932918 - RNA, 19 nt, Artificial Sequence
  Description of Artificial Sequence: Synthetic oligonucleotide
  Sense strand starting at position 3412 of SEQ ID NO: 913511
uuguuaaaugagcaaaugu

SEQ ID NO: 932919 - RNA, 19 nt, Artificial Sequence
  Description of Artificial Sequence: Synthetic oligonucleotide
  Antisense strand to SEQ ID NO: 932918
acauuugcucauuuaacaa

SEQ ID NO: 932920 - RNA, 19 nt, Artificial Sequence
  Description of Artificial Sequence: Synthetic oligonucleotide
  Sense strand starting at position 2546 of SEQ ID NO: 913511
auaacaaucucaguuggua

SEQ ID NO: 932921 - RNA, 19 nt, Artificial Sequence
  Description of Artificial Sequence: Synthetic oligonucleotide
  Antisense strand to SEQ ID NO: 932920
uaccaacugagauuguuau

SEQ ID NO: 932922 - RNA, 19 nt, Artificial Sequence
  Description of Artificial Sequence: Synthetic oligonucleotide
  Sense strand starting at position 1172 of SEQ ID NO: 913511
ggcguugggaccuacaaau

SEQ ID NO: 932923 - RNA, 19 nt, Artificial Sequence
  Description of Artificial Sequence: Synthetic oligonucleotide
  Antisense strand to SEQ ID NO: 932922
auuuguaggucccaacgcc

SEQ ID NO: 932924 - RNA, 19 nt, Artificial Sequence
  Description of Artificial Sequence: Synthetic oligonucleotide
  Sense strand starting at position 2986 of SEQ ID NO: 913511
uccaaagaugugcagcaua

SEQ ID NO: 932925 - RNA, 19 nt, Artificial Sequence
  Description of Artificial Sequence: Synthetic oligonucleotide
  Antisense strand to SEQ ID NO: 932924
uaugcugcacaucuuugga

SEQ ID NO: 932926 - RNA, 19 nt, Artificial Sequence
  Description of Artificial Sequence: Synthetic oligonucleotide
  Sense strand starting at position 358 of SEQ ID NO: 913511
uuuaacugcguggaucaaa

SEQ ID NO: 932927 - RNA, 19 nt, Artificial Sequence
  Description of Artificial Sequence: Synthetic oligonucleotide
  Antisense strand to SEQ ID NO: 932926
uuugauccacgcaguuaaa

SEQ ID NO: 932928 - RNA, 19 nt, Artificial Sequence
  Description of Artificial Sequence: Synthetic oligonucleotide
  Sense strand starting at position 2637 of SEQ ID NO: 913511
aguugugaugcuuaaucag

SEQ ID NO: 932929 - RNA, 19 nt, Artificial Sequence
  Description of Artificial Sequence: Synthetic oligonucleotide
  Antisense strand to SEQ ID NO: 932928
cugauuaagcaucacaacu

SEQ ID NO: 932930 - RNA, 19 nt, Artificial Sequence
  Description of Artificial Sequence: Synthetic oligonucleotide
  Sense strand starting at position 1137 of SEQ ID NO: 913511
uggagagaucuaugucagc

SEQ ID NO: 932931 - RNA, 19 nt, Artificial Sequence
  Description of Artificial Sequence: Synthetic oligonucleotide
  Antisense strand to SEQ ID NO: 932930
gcugacauagaucucucca

SEQ ID NO: 932932 - RNA, 19 nt, Artificial Sequence
  Description of Artificial Sequence: Synthetic oligonucleotide
  Sense strand starting at position 3490 of SEQ ID NO: 913511
aguggaauauuagcucacu

SEQ ID NO: 932933 - RNA, 19 nt, Artificial Sequence
  Description of Artificial Sequence: Synthetic oligonucleotide
  Antisense strand to SEQ ID NO: 932932
agugagcuaauauuccacu

SEQ ID NO: 932934 - RNA, 19 nt, Artificial Sequence
  Description of Artificial Sequence: Synthetic oligonucleotide
  Sense strand starting at position 1069 of SEQ ID NO: 913511
caaguuuguccugauguag

SEQ ID NO: 932935 - RNA, 19 nt, Artificial Sequence
  Description of Artificial Sequence: Synthetic oligonucleotide
  Antisense strand to SEQ ID NO: 932934
cuacaucaggacaaacuug

SEQ ID NO: 932936 - RNA, 19 nt, Artificial Sequence
  Description of Artificial Sequence: Synthetic oligonucleotide
  Sense strand starting at position 1066 of SEQ ID NO: 913511
aaucaaguuuguccugaug

SEQ ID NO: 932937 - RNA, 19 nt, Artificial Sequence
  Description of Artificial Sequence: Synthetic oligonucleotide
  Antisense strand to SEQ ID NO: 932936
caucaggacaaacuugauu

SEQ ID NO: 932938 - RNA, 19 nt, Artificial Sequence
  Description of Artificial Sequence: Synthetic oligonucleotide
  Sense strand starting at position 2193 of SEQ ID NO: 913511
gacugaggcuucuccuuga

SEQ ID NO: 932939 - RNA, 19 nt, Artificial Sequence
  Description of Artificial Sequence: Synthetic oligonucleotide
  Antisense strand to SEQ ID NO: 932938
ucaaggagaagccucaguc

SEQ ID NO: 932940 - RNA, 19 nt, Artificial Sequence
  Description of Artificial Sequence: Synthetic oligonucleotide
  Sense strand starting at position 1481 of SEQ ID NO: 913511
ccacuuuggcgugaauaau

SEQ ID NO: 932941 - RNA, 19 nt, Artificial Sequence
  Description of Artificial Sequence: Synthetic oligonucleotide
  Antisense strand to SEQ ID NO: 932940
auuauucacgccaaagugg

SEQ ID NO: 932942 - RNA, 19 nt, Artificial Sequence
  Description of Artificial Sequence: Synthetic oligonucleotide
  Sense strand starting at position 2170 of SEQ ID NO: 913511
aggagacucuggguucgua

SEQ ID NO: 932943 - RNA, 19 nt, Artificial Sequence
  Description of Artificial Sequence: Synthetic oligonucleotide
  Antisense strand to SEQ ID NO: 932942
uacgaacccagagucuccu

SEQ ID NO: 932944 - RNA, 19 nt, Artificial Sequence
  Description of Artificial Sequence: Synthetic oligonucleotide
  Sense strand starting at position 2939 of SEQ ID NO: 913511
cagacuuguuucucaagug

SEQ ID NO: 932945 - RNA, 19 nt, Artificial Sequence
  Description of Artificial Sequence: Synthetic oligonucleotide
  Antisense strand to SEQ ID NO: 932944
cacuugagaaacaagucug

SEQ ID NO: 932946 - RNA, 19 nt, Artificial Sequence
  Description of Artificial Sequence: Synthetic oligonucleotide
  Sense strand starting at position 1300 of SEQ ID NO: 913511
ugucuacuugagcagcaau

SEQ ID NO: 932947 - RNA, 19 nt, Artificial Sequence
  Description of Artificial Sequence: Synthetic oligonucleotide
  Antisense strand to SEQ ID NO: 932946
auugcugcucaaguagaca

SEQ ID NO: 932948 - RNA, 19 nt, Artificial Sequence
  Description of Artificial Sequence: Synthetic oligonucleotide
  Sense strand starting at position 2415 of SEQ ID NO: 913511
accugaaagaacugucguu

SEQ ID NO: 932949 - RNA, 19 nt, Artificial Sequence
  Description of Artificial Sequence: Synthetic oligonucleotide
  Antisense strand to SEQ ID NO: 932948
aacgacaguucuuucaggu

SEQ ID NO: 932950 - RNA, 19 nt, Artificial Sequence
  Description of Artificial Sequence: Synthetic oligonucleotide
  Sense strand starting at position 3347 of SEQ ID NO: 913511
gaaggaacguugucuaucu

SEQ ID NO: 932951 - RNA, 19 nt, Artificial Sequence
  Description of Artificial Sequence: Synthetic oligonucleotide
  Antisense strand to SEQ ID NO: 932950
agauagacaacguuccuuc

SEQ ID NO: 932952 - RNA, 19 nt, Artificial Sequence
  Description of Artificial Sequence: Synthetic oligonucleotide
  Sense strand starting at position 1087 of SEQ ID NO: 913511
ggcccauaguucucacaau

SEQ ID NO: 932953 - RNA, 19 nt, Artificial Sequence
  Description of Artificial Sequence: Synthetic oligonucleotide
  Antisense strand to SEQ ID NO: 932952
auugugagaacuaugggcc

SEQ ID NO: 932954 - RNA, 19 nt, Artificial Sequence
  Description of Artificial Sequence: Synthetic oligonucleotide
  Sense strand starting at position 2148 of SEQ ID NO: 913511
ucauacuugucagcagauu

SEQ ID NO: 932955 - RNA, 19 nt, Artificial Sequence
  Description of Artificial Sequence: Synthetic oligonucleotide
  Antisense strand to SEQ ID NO: 932954
aaucugcugacaaguauga

SEQ ID NO: 932956 - RNA, 19 nt, Artificial Sequence
  Description of Artificial Sequence: Synthetic oligonucleotide
  Sense strand starting at position 1017 of SEQ ID NO: 913511
guuugucuaguccagacuu

SEQ ID NO: 932957 - RNA, 19 nt, Artificial Sequence
  Description of Artificial Sequence: Synthetic oligonucleotide
  Antisense strand to SEQ ID NO: 932956
aagucuggacuagacaaac

SEQ ID NO: 932958 - RNA, 19 nt, Artificial Sequence
  Description of Artificial Sequence: Synthetic oligonucleotide
  Sense strand starting at position 2938 of SEQ ID NO: 913511
ccagacuuguuucucaagu

SEQ ID NO: 932959 - RNA, 19 nt, Artificial Sequence
  Description of Artificial Sequence: Synthetic oligonucleotide
  Antisense strand to SEQ ID NO: 932958
acuugagaaacaagucugg

SEQ ID NO: 932960 - RNA, 19 nt, Artificial Sequence
  Description of Artificial Sequence: Synthetic oligonucleotide
  Sense strand starting at position 2385 of SEQ ID NO: 913511
uugggaaagauucguguuu

SEQ ID NO: 932961 - RNA, 19 nt, Artificial Sequence
  Description of Artificial Sequence: Synthetic oligonucleotide
  Antisense strand to SEQ ID NO: 932960
aaacacgaaucuuucccaa

SEQ ID NO: 932962 - RNA, 19 nt, Artificial Sequence
  Description of Artificial Sequence: Synthetic oligonucleotide
  Sense strand starting at position 3348 of SEQ ID NO: 913511
aaggaacguugucuaucuu

SEQ ID NO: 932963 - RNA, 19 nt, Artificial Sequence
  Description of Artificial Sequence: Synthetic oligonucleotide
  Antisense strand to SEQ ID NO: 932962
aagauagacaacguuccuu

SEQ ID NO: 932964 - RNA, 19 nt, Artificial Sequence
  Description of Artificial Sequence: Synthetic oligonucleotide
  Sense strand starting at position 3480 of SEQ ID NO: 913511
guuggagugcaguggaaua

SEQ ID NO: 932965 - RNA, 19 nt, Artificial Sequence
  Description of Artificial Sequence: Synthetic oligonucleotide
  Antisense strand to SEQ ID NO: 932964
uauuccacugcacuccaac

SEQ ID NO: 932966 - RNA, 19 nt, Artificial Sequence
  Description of Artificial Sequence: Synthetic oligonucleotide
  Sense strand starting at position 1480 of SEQ ID NO: 913511
cccacuuuggcgugaauaa

SEQ ID NO: 932967 - RNA, 19 nt, Artificial Sequence
  Description of Artificial Sequence: Synthetic oligonucleotide
  Antisense strand to SEQ ID NO: 932966
uuauucacgccaaaguggg

SEQ ID NO: 932968 - RNA, 19 nt, Artificial Sequence
  Description of Artificial Sequence: Synthetic oligonucleotide
  Sense strand starting at position 2994 of SEQ ID NO: 913511
ugugcagcauauucucaaa

SEQ ID NO: 932969 - RNA, 19 nt, Artificial Sequence
  Description of Artificial Sequence: Synthetic oligonucleotide
  Antisense strand to SEQ ID NO: 932968
uuugagaauaugcugcaca

SEQ ID NO: 932970 - RNA, 19 nt, Artificial Sequence
  Description of Artificial Sequence: Synthetic oligonucleotide
  Sense strand starting at position 3634 of SEQ ID NO: 913511
ugcgcagacuacucuugaa

SEQ ID NO: 932971 - RNA, 19 nt, Artificial Sequence
  Description of Artificial Sequence: Synthetic oligonucleotide
  Antisense strand to SEQ ID NO: 932970
uucaagaguagucugcgca

SEQ ID NO: 932972 - RNA, 19 nt, Artificial Sequence
  Description of Artificial Sequence: Synthetic oligonucleotide
  Sense strand starting at position 402 of SEQ ID NO: 913511
gucaccaguuuguuaacuu

SEQ ID NO: 932973 - RNA, 19 nt, Artificial Sequence
  Description of Artificial Sequence: Synthetic oligonucleotide
  Antisense strand to SEQ ID NO: 932972
aaguuaacaaacuggugac

SEQ ID NO: 932974 - RNA, 19 nt, Artificial Sequence
  Description of Artificial Sequence: Synthetic oligonucleotide
  Sense strand starting at position 3785 of SEQ ID NO: 913512
acauacugccagggaauaa

SEQ ID NO: 932975 - RNA, 19 nt, Artificial Sequence
  Description of Artificial Sequence: Synthetic oligonucleotide
  Antisense strand to SEQ ID NO: 932974
uuauucccuggcaguaugu

SEQ ID NO: 932976 - RNA, 19 nt, Artificial Sequence
  Description of Artificial Sequence: Synthetic oligonucleotide
  Sense strand starting at position 200 of SEQ ID NO: 913512
cgaagacuucccuacacug

SEQ ID NO: 932977 - RNA, 19 nt, Artificial Sequence
  Description of Artificial Sequence: Synthetic oligonucleotide
  Antisense strand to SEQ ID NO: 932976
caguguagggaagucuucg

SEQ ID NO: 932978 - RNA, 19 nt, Artificial Sequence
  Description of Artificial Sequence: Synthetic oligonucleotide
  Sense strand starting at position 2847 of SEQ ID NO: 913512
ugaagaugccaucaguuaa

SEQ ID NO: 932979 - RNA, 19 nt, Artificial Sequence
  Description of Artificial Sequence: Synthetic oligonucleotide
  Antisense strand to SEQ ID NO: 932978
uuaacugauggcaucuuca

SEQ ID NO: 932980 - RNA, 19 nt, Artificial Sequence
  Description of Artificial Sequence: Synthetic oligonucleotide
  Sense strand starting at position 3833 of SEQ ID NO: 913512
acauaacuccguuauggag

SEQ ID NO: 932981 - RNA, 19 nt, Artificial Sequence
  Description of Artificial Sequence: Synthetic oligonucleotide
  Antisense strand to SEQ ID NO: 932980
cuccauaacggaguuaugu

SEQ ID NO: 932982 - RNA, 19 nt, Artificial Sequence
  Description of Artificial Sequence: Synthetic oligonucleotide
  Sense strand starting at position 3202 of SEQ ID NO: 913512
ugcagaggucaccaucaga

SEQ ID NO: 932983 - RNA, 19 nt, Artificial Sequence
  Description of Artificial Sequence: Synthetic oligonucleotide
  Antisense strand to SEQ ID NO: 932982
ucugauggugaccucugca

SEQ ID NO: 932984 - RNA, 19 nt, Artificial Sequence
  Description of Artificial Sequence: Synthetic oligonucleotide
  Sense strand starting at position 3709 of SEQ ID NO: 913512
cagggaagggucuguggaa

SEQ ID NO: 932985 - RNA, 19 nt, Artificial Sequence
  Description of Artificial Sequence: Synthetic oligonucleotide
  Antisense strand to SEQ ID NO: 932984
uuccacagacccuucccug

SEQ ID NO: 932986 - RNA, 19 nt, Artificial Sequence
  Description of Artificial Sequence: Synthetic oligonucleotide
  Sense strand starting at position 3901 of SEQ ID NO: 913512
acgguugacauggagcaaa

SEQ ID NO: 932987 - RNA, 19 nt, Artificial Sequence
  Description of Artificial Sequence: Synthetic oligonucleotide
  Antisense strand to SEQ ID NO: 932986
uuugcuccaugucaaccgu

SEQ ID NO: 932988 - RNA, 19 nt, Artificial Sequence
  Description of Artificial Sequence: Synthetic oligonucleotide
  Sense strand starting at position 1609 of SEQ ID NO: 913512
ucgagcucgcaaguucauu

SEQ ID NO: 932989 - RNA, 19 nt, Artificial Sequence
  Description of Artificial Sequence: Synthetic oligonucleotide
  Antisense strand to SEQ ID NO: 932988
aaugaacuugcgagcucga

SEQ ID NO: 932990 - RNA, 19 nt, Artificial Sequence
  Description of Artificial Sequence: Synthetic oligonucleotide
  Sense strand starting at position 3078 of SEQ ID NO: 913512
agggucauuccugacagug

SEQ ID NO: 932991 - RNA, 19 nt, Artificial Sequence
  Description of Artificial Sequence: Synthetic oligonucleotide
  Antisense strand to SEQ ID NO: 932990
cacugucaggaaugacccu

SEQ ID NO: 932992 - RNA, 19 nt, Artificial Sequence
  Description of Artificial Sequence: Synthetic oligonucleotide
  Sense strand starting at position 3939 of SEQ ID NO: 913512
cacggugccgcuuugauau

SEQ ID NO: 932993 - RNA, 19 nt, Artificial Sequence
  Description of Artificial Sequence: Synthetic oligonucleotide
  Antisense strand to SEQ ID NO: 932992
auaucaaagcggcaccgug

SEQ ID NO: 932994 - RNA, 19 nt, Artificial Sequence
  Description of Artificial Sequence: Synthetic oligonucleotide
  Sense strand starting at position 1850 of SEQ ID NO: 913512
ccuaacuuguaccugagaa

SEQ ID NO: 932995 - RNA, 19 nt, Artificial Sequence
  Description of Artificial Sequence: Synthetic oligonucleotide
  Antisense strand to SEQ ID NO: 932994
uucucagguacaaguuagg

SEQ ID NO: 932996 - RNA, 19 nt, Artificial Sequence
  Description of Artificial Sequence: Synthetic oligonucleotide
  Sense strand starting at position 3634 of SEQ ID NO: 913512
guuguacaugcgucugcaa

SEQ ID NO: 932997 - RNA, 19 nt, Artificial Sequence
  Description of Artificial Sequence: Synthetic oligonucleotide
  Antisense strand to SEQ ID NO: 932996
uugcagacgcauguacaac

SEQ ID NO: 932998 - RNA, 19 nt, Artificial Sequence
  Description of Artificial Sequence: Synthetic oligonucleotide
  Sense strand starting at position 3194 of SEQ ID NO: 913512
gcaacuaaugcagagguca

SEQ ID NO: 932999 - RNA, 19 nt, Artificial Sequence
  Description of Artificial Sequence: Synthetic oligonucleotide
  Antisense strand to SEQ ID NO: 932998
ugaccucugcauuaguugc

SEQ ID NO: 933000 - RNA, 19 nt, Artificial Sequence
  Description of Artificial Sequence: Synthetic oligonucleotide
  Sense strand starting at position 3756 of SEQ ID NO: 913512
ggguguguggaacauuauu

SEQ ID NO: 933001 - RNA, 19 nt, Artificial Sequence
  Description of Artificial Sequence: Synthetic oligonucleotide
  Antisense strand to SEQ ID NO: 933000
aauaauguuccacacaccc

SEQ ID NO: 933002 - RNA, 19 nt, Artificial Sequence
  Description of Artificial Sequence: Synthetic oligonucleotide
  Sense strand starting at position 57 of SEQ ID NO: 913512
ccgagaacucgguacaauu

SEQ ID NO: 933003 - RNA, 19 nt, Artificial Sequence
  Description of Artificial Sequence: Synthetic oligonucleotide
  Antisense strand to SEQ ID NO: 933002
aauuguaccgaguucucgg

SEQ ID NO: 933004 - RNA, 19 nt, Artificial Sequence
  Description of Artificial Sequence: Synthetic oligonucleotide
  Sense strand starting at position 2835 of SEQ ID NO: 913512
cugacucugggcugaagau

SEQ ID NO: 933005 - RNA, 19 nt, Artificial Sequence
  Description of Artificial Sequence: Synthetic oligonucleotide
  Antisense strand to SEQ ID NO: 933004
aucuucagcccagagucag

SEQ ID NO: 933006 - RNA, 19 nt, Artificial Sequence
  Description of Artificial Sequence: Synthetic oligonucleotide
  Sense strand starting at position 3767 of SEQ ID NO: 913512
acauuauuccagggccaca

SEQ ID NO: 933007 - RNA, 19 nt, Artificial Sequence
  Description of Artificial Sequence: Synthetic oligonucleotide
  Antisense strand to SEQ ID NO: 933006
uguggcccuggaauaaugu

SEQ ID NO: 933008 - RNA, 19 nt, Artificial Sequence
  Description of Artificial Sequence: Synthetic oligonucleotide
  Sense strand starting at position 2071 of SEQ ID NO: 913512
uccagucuggaaugugaga

SEQ ID NO: 933009 - RNA, 19 nt, Artificial Sequence
  Description of Artificial Sequence: Synthetic oligonucleotide
  Antisense strand to SEQ ID NO: 933008
ucucacauuccagacugga

SEQ ID NO: 933010 - RNA, 19 nt, Artificial Sequence
  Description of Artificial Sequence: Synthetic oligonucleotide
  Sense strand starting at position 3050 of SEQ ID NO: 913512
ccguuaacuguagacuaca

SEQ ID NO: 933011 - RNA, 19 nt, Artificial Sequence
  Description of Artificial Sequence: Synthetic oligonucleotide
  Antisense strand to SEQ ID NO: 933010
uguagucuacaguuaacgg

SEQ ID NO: 933012 - RNA, 19 nt, Artificial Sequence
  Description of Artificial Sequence: Synthetic oligonucleotide
  Sense strand starting at position 3573 of SEQ ID NO: 913512
guuuauauacucgaguaau

SEQ ID NO: 933013 - RNA, 19 nt, Artificial Sequence
  Description of Artificial Sequence: Synthetic oligonucleotide
  Antisense strand to SEQ ID NO: 933012
auuacucgaguauauaaac

SEQ ID NO: 933014 - RNA, 19 nt, Artificial Sequence
  Description of Artificial Sequence: Synthetic oligonucleotide
  Sense strand starting at position 3687 of SEQ ID NO: 913512
gugcaacggguuuaaacaa

SEQ ID NO: 933015 - RNA, 19 nt, Artificial Sequence
  Description of Artificial Sequence: Synthetic oligonucleotide
  Antisense strand to SEQ ID NO: 933014
uuguuuaaacccguugcac

SEQ ID NO: 933016 - RNA, 19 nt, Artificial Sequence
  Description of Artificial Sequence: Synthetic oligonucleotide
  Sense strand starting at position 2208 of SEQ ID NO: 913512
agugacaccuugccagaua

SEQ ID NO: 933017 - RNA, 19 nt, Artificial Sequence
  Description of Artificial Sequence: Synthetic oligonucleotide
  Antisense strand to SEQ ID NO: 933016
uaucuggcaaggugucacu

SEQ ID NO: 933018 - RNA, 19 nt, Artificial Sequence
  Description of Artificial Sequence: Synthetic oligonucleotide
  Sense strand starting at position 3576 of SEQ ID NO: 913512
uauauacucgaguaauugc

SEQ ID NO: 933019 - RNA, 19 nt, Artificial Sequence
  Description of Artificial Sequence: Synthetic oligonucleotide
  Antisense strand to SEQ ID NO: 933018
gcaauuacucgaguauaua

SEQ ID NO: 933020 - RNA, 19 nt, Artificial Sequence
  Description of Artificial Sequence: Synthetic oligonucleotide
  Sense strand starting at position 3048 of SEQ ID NO: 913512
cuccguuaacuguagacua

SEQ ID NO: 933021 - RNA, 19 nt, Artificial Sequence
  Description of Artificial Sequence: Synthetic oligonucleotide
  Antisense strand to SEQ ID NO: 933020
uagucuacaguuaacggag

SEQ ID NO: 933022 - RNA, 19 nt, Artificial Sequence
  Description of Artificial Sequence: Synthetic oligonucleotide
  Sense strand starting at position 2715 of SEQ ID NO: 913512
gagguaaagcucugcagga

SEQ ID NO: 933023 - RNA, 19 nt, Artificial Sequence
  Description of Artificial Sequence: Synthetic oligonucleotide
  Antisense strand to SEQ ID NO: 933022
uccugcagagcuuuaccuc

SEQ ID NO: 933024 - RNA, 19 nt, Artificial Sequence
  Description of Artificial Sequence: Synthetic oligonucleotide
  Sense strand starting at position 3571 of SEQ ID NO: 913512
agguuuauauacucgagua

SEQ ID NO: 933025 - RNA, 19 nt, Artificial Sequence
  Description of Artificial Sequence: Synthetic oligonucleotide
  Antisense strand to SEQ ID NO: 933024
uacucgaguauauaaaccu

SEQ ID NO: 933026 - RNA, 19 nt, Artificial Sequence
  Description of Artificial Sequence: Synthetic oligonucleotide
  Sense strand starting at position 3572 of SEQ ID NO: 913512
gguuuauauacucgaguaa

SEQ ID NO: 933027 - RNA, 19 nt, Artificial Sequence
  Description of Artificial Sequence: Synthetic oligonucleotide
  Antisense strand to SEQ ID NO: 933026
uuacucgaguauauaaacc

SEQ ID NO: 933028 - RNA, 19 nt, Artificial Sequence
  Description of Artificial Sequence: Synthetic oligonucleotide
  Sense strand starting at position 55 of SEQ ID NO: 913512
ucccgagaacucgguacaa

SEQ ID NO: 933029 - RNA, 19 nt, Artificial Sequence
  Description of Artificial Sequence: Synthetic oligonucleotide
  Antisense strand to SEQ ID NO: 933028
uuguaccgaguucucggga

SEQ ID NO: 933030 - RNA, 19 nt, Artificial Sequence
  Description of Artificial Sequence: Synthetic oligonucleotide
  Sense strand starting at position 2013 of SEQ ID NO: 913512
aaugaaacauccgaggaga

SEQ ID NO: 933031 - RNA, 19 nt, Artificial Sequence
  Description of Artificial Sequence: Synthetic oligonucleotide
  Antisense strand to SEQ ID NO: 933030
ucuccucggauguuucauu

SEQ ID NO: 933032 - RNA, 19 nt, Artificial Sequence
  Description of Artificial Sequence: Synthetic oligonucleotide
  Sense strand starting at position 3749 of SEQ ID NO: 913512
ucuguaaggguguguggaa

SEQ ID NO: 933033 - RNA, 19 nt, Artificial Sequence
  Description of Artificial Sequence: Synthetic oligonucleotide
  Antisense strand to SEQ ID NO: 933032
uuccacacacccuuacaga

SEQ ID NO: 933034 - RNA, 19 nt, Artificial Sequence
  Description of Artificial Sequence: Synthetic oligonucleotide
  Sense strand starting at position 3037 of SEQ ID NO: 913512
aaaugaaagugcuccguua

SEQ ID NO: 933035 - RNA, 19 nt, Artificial Sequence
  Description of Artificial Sequence: Synthetic oligonucleotide
  Antisense strand to SEQ ID NO: 933034
uaacggagcacuuucauuu

SEQ ID NO: 933036 - RNA, 19 nt, Artificial Sequence
  Description of Artificial Sequence: Synthetic oligonucleotide
  Sense strand starting at position 3113 of SEQ ID NO: 913512
ucuuuauugccggaggcuu

SEQ ID NO: 933037 - RNA, 19 nt, Artificial Sequence
  Description of Artificial Sequence: Synthetic oligonucleotide
  Antisense strand to SEQ ID NO: 933036
aagccuccggcaauaaaga

SEQ ID NO: 933038 - RNA, 19 nt, Artificial Sequence
  Description of Artificial Sequence: Synthetic oligonucleotide
  Sense strand starting at position 3348 of SEQ ID NO: 913512
cuuagaaucucagacuaga

SEQ ID NO: 933039 - RNA, 19 nt, Artificial Sequence
  Description of Artificial Sequence: Synthetic oligonucleotide
  Antisense strand to SEQ ID NO: 933038
ucuagucugagauucuaag

SEQ ID NO: 933040 - RNA, 19 nt, Artificial Sequence
  Description of Artificial Sequence: Synthetic oligonucleotide
  Sense strand starting at position 3039 of SEQ ID NO: 913512
augaaagugcuccguuaac

SEQ ID NO: 933041 - RNA, 19 nt, Artificial Sequence
  Description of Artificial Sequence: Synthetic oligonucleotide
  Antisense strand to SEQ ID NO: 933040
guuaacggagcacuuucau

SEQ ID NO: 933042 - RNA, 19 nt, Artificial Sequence
  Description of Artificial Sequence: Synthetic oligonucleotide
  Sense strand starting at position 3674 of SEQ ID NO: 913512
cugucagaccagugugcaa

SEQ ID NO: 933043 - RNA, 19 nt, Artificial Sequence
  Description of Artificial Sequence: Synthetic oligonucleotide
  Antisense strand to SEQ ID NO: 933042
uugcacacuggucugacag

SEQ ID NO: 933044 - RNA, 19 nt, Artificial Sequence
  Description of Artificial Sequence: Synthetic oligonucleotide
  Sense strand starting at position 2076 of SEQ ID NO: 913512
ucuggaaugugagaucaag

SEQ ID NO: 933045 - RNA, 19 nt, Artificial Sequence
  Description of Artificial Sequence: Synthetic oligonucleotide
  Antisense strand to SEQ ID NO: 933044
cuugaucucacauuccaga

SEQ ID NO: 933046 - RNA, 19 nt, Artificial Sequence
  Description of Artificial Sequence: Synthetic oligonucleotide
  Sense strand starting at position 3945 of SEQ ID NO: 913512
gccgcuuugauaugaauuc

SEQ ID NO: 933047 - RNA, 19 nt, Artificial Sequence
  Description of Artificial Sequence: Synthetic oligonucleotide
  Antisense strand to SEQ ID NO: 933046
gaauucauaucaaagcggc

SEQ ID NO: 933048 - RNA, 19 nt, Artificial Sequence
  Description of Artificial Sequence: Synthetic oligonucleotide
  Sense strand starting at position 3207 of SEQ ID NO: 913512
aggucaccaucagaggauu

SEQ ID NO: 933049 - RNA, 19 nt, Artificial Sequence
  Description of Artificial Sequence: Synthetic oligonucleotide
  Antisense strand to SEQ ID NO: 933048
aauccucugauggugaccu

SEQ ID NO: 933050 - RNA, 19 nt, Artificial Sequence
  Description of Artificial Sequence: Synthetic oligonucleotide
  Sense strand starting at position 3637 of SEQ ID NO: 913512
guacaugcgucugcaagga

SEQ ID NO: 933051 - RNA, 19 nt, Artificial Sequence
  Description of Artificial Sequence: Synthetic oligonucleotide
  Antisense strand to SEQ ID NO: 933050
uccuugcagacgcauguac

SEQ ID NO: 933052 - RNA, 19 nt, Artificial Sequence
  Description of Artificial Sequence: Synthetic oligonucleotide
  Sense strand starting at position 2563 of SEQ ID NO: 913512
agacaucuuuaaggaacuu

SEQ ID NO: 933053 - RNA, 19 nt, Artificial Sequence
  Description of Artificial Sequence: Synthetic oligonucleotide
  Antisense strand to SEQ ID NO: 933052
aaguuccuuaaagaugucu

SEQ ID NO: 933054 - RNA, 19 nt, Artificial Sequence
  Description of Artificial Sequence: Synthetic oligonucleotide
  Sense strand starting at position 1383 of SEQ ID NO: 913513
cgaagacuucccuacacug

SEQ ID NO: 933055 - RNA, 19 nt, Artificial Sequence
  Description of Artificial Sequence: Synthetic oligonucleotide
  Antisense strand to SEQ ID NO: 933054
caguguagggaagucuucg

SEQ ID NO: 933056 - RNA, 19 nt, Artificial Sequence
  Description of Artificial Sequence: Synthetic oligonucleotide
  Sense strand starting at position 2792 of SEQ ID NO: 913513
ucgagcucgcaaguucauu

SEQ ID NO: 933057 - RNA, 19 nt, Artificial Sequence
  Description of Artificial Sequence: Synthetic oligonucleotide
  Antisense strand to SEQ ID NO: 933056
aaugaacuugcgagcucga

SEQ ID NO: 933058 - RNA, 19 nt, Artificial Sequence
  Description of Artificial Sequence: Synthetic oligonucleotide
  Sense strand starting at position 943 of SEQ ID NO: 913513
gauaaugguccaggaaggu

SEQ ID NO: 933059 - RNA, 19 nt, Artificial Sequence
  Description of Artificial Sequence: Synthetic oligonucleotide
  Antisense strand to SEQ ID NO: 933058
accuuccuggaccauuauc

SEQ ID NO: 933060 - RNA, 19 nt, Artificial Sequence
  Description of Artificial Sequence: Synthetic oligonucleotide
  Sense strand starting at position 865 of SEQ ID NO: 913513
ugccauguucuggaaggga

SEQ ID NO: 933061 - RNA, 19 nt, Artificial Sequence
  Description of Artificial Sequence: Synthetic oligonucleotide
  Antisense strand to SEQ ID NO: 933060
ucccuuccagaacauggca

SEQ ID NO: 933062 - RNA, 19 nt, Artificial Sequence
  Description of Artificial Sequence: Synthetic oligonucleotide
  Sense strand starting at position 3033 of SEQ ID NO: 913513
ccuaacuuguaccugagaa

SEQ ID NO: 933063 - RNA, 19 nt, Artificial Sequence
  Description of Artificial Sequence: Synthetic oligonucleotide
  Antisense strand to SEQ ID NO: 933062
uucucagguacaaguuagg

SEQ ID NO: 933064 - RNA, 19 nt, Artificial Sequence
  Description of Artificial Sequence: Synthetic oligonucleotide
  Sense strand starting at position 692 of SEQ ID NO: 913513
ucugacaguuucucaggaa

SEQ ID NO: 933065 - RNA, 19 nt, Artificial Sequence
  Description of Artificial Sequence: Synthetic oligonucleotide
  Antisense strand to SEQ ID NO: 933064
uuccugagaaacugucaga

SEQ ID NO: 933066 - RNA, 19 nt, Artificial Sequence
  Description of Artificial Sequence: Synthetic oligonucleotide
  Sense strand starting at position 1240 of SEQ ID NO: 913513
ccgagaacucgguacaauu

SEQ ID NO: 933067 - RNA, 19 nt, Artificial Sequence
  Description of Artificial Sequence: Synthetic oligonucleotide
  Antisense strand to SEQ ID NO: 933066
aauuguaccgaguucucgg

SEQ ID NO: 933068 - RNA, 19 nt, Artificial Sequence
  Description of Artificial Sequence: Synthetic oligonucleotide
  Sense strand starting at position 3254 of SEQ ID NO: 913513
uccagucuggaaugugaga

SEQ ID NO: 933069 - RNA, 19 nt, Artificial Sequence
  Description of Artificial Sequence: Synthetic oligonucleotide
  Antisense strand to SEQ ID NO: 933068
ucucacauuccagacugga

SEQ ID NO: 933070 - RNA, 19 nt, Artificial Sequence
  Description of Artificial Sequence: Synthetic oligonucleotide
  Sense strand starting at position 157 of SEQ ID NO: 913513
cuucuugaugcaggaauua

SEQ ID NO: 933071 - RNA, 19 nt, Artificial Sequence
  Description of Artificial Sequence: Synthetic oligonucleotide
  Antisense strand to SEQ ID NO: 933070
uaauuccugcaucaagaag

SEQ ID NO: 933072 - RNA, 19 nt, Artificial Sequence
  Description of Artificial Sequence: Synthetic oligonucleotide
  Sense strand starting at position 77 of SEQ ID NO: 913513
gaauuucuugucugcuguu

SEQ ID NO: 933073 - RNA, 19 nt, Artificial Sequence
  Description of Artificial Sequence: Synthetic oligonucleotide
  Antisense strand to SEQ ID NO: 933072
aacagcagacaagaaauuc

SEQ ID NO: 933074 - RNA, 19 nt, Artificial Sequence
  Description of Artificial Sequence: Synthetic oligonucleotide
  Sense strand starting at position 976 of SEQ ID NO: 913513
ggagaaacgcugggcaaau

SEQ ID NO: 933075 - RNA, 19 nt, Artificial Sequence
  Description of Artificial Sequence: Synthetic oligonucleotide
  Antisense strand to SEQ ID NO: 933074
auuugcccagcguuucucc

SEQ ID NO: 933076 - RNA, 19 nt, Artificial Sequence
  Description of Artificial Sequence: Synthetic oligonucleotide
  Sense strand starting at position 61 of SEQ ID NO: 913513
ccagcuaguuaacuuggaa

SEQ ID NO: 933077 - RNA, 19 nt, Artificial Sequence
  Description of Artificial Sequence: Synthetic oligonucleotide
  Antisense strand to SEQ ID NO: 933076
uuccaaguuaacuagcugg

SEQ ID NO: 933078 - RNA, 19 nt, Artificial Sequence
  Description of Artificial Sequence: Synthetic oligonucleotide
  Sense strand starting at position 3391 of SEQ ID NO: 913513
agugacaccuugccagaua

SEQ ID NO: 933079 - RNA, 19 nt, Artificial Sequence
  Description of Artificial Sequence: Synthetic oligonucleotide
  Antisense strand to SEQ ID NO: 933078
uaucuggcaaggugucacu

SEQ ID NO: 933080 - RNA, 19 nt, Artificial Sequence
  Description of Artificial Sequence: Synthetic oligonucleotide
  Sense strand starting at position 993 of SEQ ID NO: 913513
aucucuaggccucaguuua

SEQ ID NO: 933081 - RNA, 19 nt, Artificial Sequence
  Description of Artificial Sequence: Synthetic oligonucleotide
  Antisense strand to SEQ ID NO: 933080
uaaacugaggccuagagau

SEQ ID NO: 933082 - RNA, 19 nt, Artificial Sequence
  Description of Artificial Sequence: Synthetic oligonucleotide
  Sense strand starting at position 3898 of SEQ ID NO: 913513
gagguaaagcucugcagga

SEQ ID NO: 933083 - RNA, 19 nt, Artificial Sequence
  Description of Artificial Sequence: Synthetic oligonucleotide
  Antisense strand to SEQ ID NO: 933082
uccugcagagcuuuaccuc

SEQ ID NO: 933084 - RNA, 19 nt, Artificial Sequence
  Description of Artificial Sequence: Synthetic oligonucleotide
  Sense strand starting at position 183 of SEQ ID NO: 913513
cucuuccaggcaugugaaa

SEQ ID NO: 933085 - RNA, 19 nt, Artificial Sequence
  Description of Artificial Sequence: Synthetic oligonucleotide
  Antisense strand to SEQ ID NO: 933084
uuucacaugccuggaagag

SEQ ID NO: 933086 - RNA, 19 nt, Artificial Sequence
  Description of Artificial Sequence: Synthetic oligonucleotide
  Sense strand starting at position 345 of SEQ ID NO: 913513
gcgagcuuugaucauccaa

SEQ ID NO: 933087 - RNA, 19 nt, Artificial Sequence
  Description of Artificial Sequence: Synthetic oligonucleotide
  Antisense strand to SEQ ID NO: 933086
uuggaugaucaaagcucgc

SEQ ID NO: 933088 - RNA, 19 nt, Artificial Sequence
  Description of Artificial Sequence: Synthetic oligonucleotide
  Sense strand starting at position 1238 of SEQ ID NO: 913513
ucccgagaacucgguacaa

SEQ ID NO: 933089 - RNA, 19 nt, Artificial Sequence
  Description of Artificial Sequence: Synthetic oligonucleotide
  Antisense strand to SEQ ID NO: 933088
uuguaccgaguucucggga

SEQ ID NO: 933090 - RNA, 19 nt, Artificial Sequence
  Description of Artificial Sequence: Synthetic oligonucleotide
  Sense strand starting at position 794 of SEQ ID NO: 913513
augaucuauguaugucuuu

SEQ ID NO: 933091 - RNA, 19 nt, Artificial Sequence
  Description of Artificial Sequence: Synthetic oligonucleotide
  Antisense strand to SEQ ID NO: 933090
aaagacauacauagaucau

SEQ ID NO: 933092 - RNA, 19 nt, Artificial Sequence
  Description of Artificial Sequence: Synthetic oligonucleotide
  Sense strand starting at position 3196 of SEQ ID NO: 913513
aaugaaacauccgaggaga

SEQ ID NO: 933093 - RNA, 19 nt, Artificial Sequence
  Description of Artificial Sequence: Synthetic oligonucleotide
  Antisense strand to SEQ ID NO: 933092
ucuccucggauguuucauu

SEQ ID NO: 933094 - RNA, 19 nt, Artificial Sequence
  Description of Artificial Sequence: Synthetic oligonucleotide
  Sense strand starting at position 462 of SEQ ID NO: 913513
gccagcucacugcaaucau

SEQ ID NO: 933095 - RNA, 19 nt, Artificial Sequence
  Description of Artificial Sequence: Synthetic oligonucleotide
  Antisense strand to SEQ ID NO: 933094
augauugcagugagcuggc

SEQ ID NO: 933096 - RNA, 19 nt, Artificial Sequence
  Description of Artificial Sequence: Synthetic oligonucleotide
  Sense strand starting at position 803 of SEQ ID NO: 913513
guaugucuuuauguaucaa

SEQ ID NO: 933097 - RNA, 19 nt, Artificial Sequence
  Description of Artificial Sequence: Synthetic oligonucleotide
  Antisense strand to SEQ ID NO: 933096
uugauacauaaagacauac

SEQ ID NO: 933098 - RNA, 19 nt, Artificial Sequence
  Description of Artificial Sequence: Synthetic oligonucleotide
  Sense strand starting at position 799 of SEQ ID NO: 913513
cuauguaugucuuuaugua

SEQ ID NO: 933099 - RNA, 19 nt, Artificial Sequence
  Description of Artificial Sequence: Synthetic oligonucleotide
  Antisense strand to SEQ ID NO: 933098
uacauaaagacauacauag

SEQ ID NO: 933100 - RNA, 19 nt, Artificial Sequence
  Description of Artificial Sequence: Synthetic oligonucleotide
  Sense strand starting at position 341 of SEQ ID NO: 913513
cauggcgagcuuugaucau

SEQ ID NO: 933101 - RNA, 19 nt, Artificial Sequence
  Description of Artificial Sequence: Synthetic oligonucleotide
  Antisense strand to SEQ ID NO: 933100
augaucaaagcucgccaug

SEQ ID NO: 933102 - RNA, 19 nt, Artificial Sequence
  Description of Artificial Sequence: Synthetic oligonucleotide
  Sense strand starting at position 3259 of SEQ ID NO: 913513
ucuggaaugugagaucaag

SEQ ID NO: 933103 - RNA, 19 nt, Artificial Sequence
  Description of Artificial Sequence: Synthetic oligonucleotide
  Antisense strand to SEQ ID NO: 933102
cuugaucucacauuccaga

SEQ ID NO: 933104 - RNA, 19 nt, Artificial Sequence
  Description of Artificial Sequence: Synthetic oligonucleotide
  Sense strand starting at position 417 of SEQ ID NO: 913513
uggacaauauccuggauga

SEQ ID NO: 933105 - RNA, 19 nt, Artificial Sequence
  Description of Artificial Sequence: Synthetic oligonucleotide
  Antisense strand to SEQ ID NO: 933104
ucauccaggauauugucca

SEQ ID NO: 933106 - RNA, 19 nt, Artificial Sequence
  Description of Artificial Sequence: Synthetic oligonucleotide
  Sense strand starting at position 3746 of SEQ ID NO: 913513
agacaucuuuaaggaacuu

SEQ ID NO: 933107 - RNA, 19 nt, Artificial Sequence
  Description of Artificial Sequence: Synthetic oligonucleotide
  Antisense strand to SEQ ID NO: 933106
aaguuccuuaaagaugucu

SEQ ID NO: 933108 - RNA, 19 nt, Artificial Sequence
  Description of Artificial Sequence: Synthetic oligonucleotide
  Sense strand starting at position 2398 of SEQ ID NO: 913513
cgugaaagcacuggucugu

SEQ ID NO: 933109 - RNA, 19 nt, Artificial Sequence
  Description of Artificial Sequence: Synthetic oligonucleotide
  Antisense strand to SEQ ID NO: 933108
acagaccagugcuuucacg

SEQ ID NO: 933110 - RNA, 19 nt, Artificial Sequence
  Description of Artificial Sequence: Synthetic oligonucleotide
  Sense strand starting at position 693 of SEQ ID NO: 913513
cugacaguuucucaggaac

SEQ ID NO: 933111 - RNA, 19 nt, Artificial Sequence
  Description of Artificial Sequence: Synthetic oligonucleotide
  Antisense strand to SEQ ID NO: 933110
guuccugagaaacugucag

SEQ ID NO: 933112 - RNA, 19 nt, Artificial Sequence
  Description of Artificial Sequence: Synthetic oligonucleotide
  Sense strand starting at position 3339 of SEQ ID NO: 913513
guguguugcggugauucca

SEQ ID NO: 933113 - RNA, 19 nt, Artificial Sequence
  Description of Artificial Sequence: Synthetic oligonucleotide
  Antisense strand to SEQ ID NO: 933112
uggaaucaccgcaacacac

SEQ ID NO: 933114 - RNA, 19 nt, Artificial Sequence
  Description of Artificial Sequence: Synthetic oligonucleotide
  Sense strand starting at position 3378 of SEQ ID NO: 913513
ccugaaaucuggcagugac

SEQ ID NO: 933115 - RNA, 19 nt, Artificial Sequence
  Description of Artificial Sequence: Synthetic oligonucleotide
  Antisense strand to SEQ ID NO: 933114
gucacugccagauuucagg

SEQ ID NO: 933116 - RNA, 19 nt, Artificial Sequence
  Description of Artificial Sequence: Synthetic oligonucleotide
  Sense strand starting at position 1785 of SEQ ID NO: 913513
ccaacagacucgcauuaca

SEQ ID NO: 933117 - RNA, 19 nt, Artificial Sequence
  Description of Artificial Sequence: Synthetic oligonucleotide
  Antisense strand to SEQ ID NO: 933116
uguaaugcgagucuguugg

SEQ ID NO: 933118 - RNA, 19 nt, Artificial Sequence
  Description of Artificial Sequence: Synthetic oligonucleotide
  Sense strand starting at position 807 of SEQ ID NO: 913513
gucuuuauguaucaaucaa

SEQ ID NO: 933119 - RNA, 19 nt, Artificial Sequence
  Description of Artificial Sequence: Synthetic oligonucleotide
  Antisense strand to SEQ ID NO: 933118
uugauugauacauaaagac

SEQ ID NO: 933120 - RNA, 19 nt, Artificial Sequence
  Description of Artificial Sequence: Synthetic oligonucleotide
  Sense strand starting at position 695 of SEQ ID NO: 913513
gacaguuucucaggaacuu

SEQ ID NO: 933121 - RNA, 19 nt, Artificial Sequence
  Description of Artificial Sequence: Synthetic oligonucleotide
  Antisense strand to SEQ ID NO: 933120
aaguuccugagaaacuguc

SEQ ID NO: 933122 - RNA, 19 nt, Artificial Sequence
  Description of Artificial Sequence: Synthetic oligonucleotide
  Sense strand starting at position 3030 of SEQ ID NO: 913513
gcaccuaacuuguaccuga

SEQ ID NO: 933123 - RNA, 19 nt, Artificial Sequence
  Description of Artificial Sequence: Synthetic oligonucleotide
  Antisense strand to SEQ ID NO: 933122
ucagguacaaguuaggugc

SEQ ID NO: 933124 - RNA, 19 nt, Artificial Sequence
  Description of Artificial Sequence: Synthetic oligonucleotide
  Sense strand starting at position 2386 of SEQ ID NO: 913513
gcgcgcucacaccgugaaa

SEQ ID NO: 933125 - RNA, 19 nt, Artificial Sequence
  Description of Artificial Sequence: Synthetic oligonucleotide
  Antisense strand to SEQ ID NO: 933124
uuucacggugugagcgcgc

SEQ ID NO: 933126 - RNA, 19 nt, Artificial Sequence
  Description of Artificial Sequence: Synthetic oligonucleotide
  Sense strand starting at position 1372 of SEQ ID NO: 913513
gcagccuccuucgaagacu

SEQ ID NO: 933127 - RNA, 19 nt, Artificial Sequence
  Description of Artificial Sequence: Synthetic oligonucleotide
  Antisense strand to SEQ ID NO: 933126
agucuucgaaggaggcugc

SEQ ID NO: 933128 - RNA, 19 nt, Artificial Sequence
  Description of Artificial Sequence: Synthetic oligonucleotide
  Sense strand starting at position 3335 of SEQ ID NO: 913513
gcuuguguguugcggugau

SEQ ID NO: 933129 - RNA, 19 nt, Artificial Sequence
  Description of Artificial Sequence: Synthetic oligonucleotide
  Antisense strand to SEQ ID NO: 933128
aucaccgcaacacacaagc

SEQ ID NO: 933130 - RNA, 19 nt, Artificial Sequence
  Description of Artificial Sequence: Synthetic oligonucleotide
  Sense strand starting at position 384 of SEQ ID NO: 913514
ccaucuuagccagauacag

SEQ ID NO: 933131 - RNA, 19 nt, Artificial Sequence
  Description of Artificial Sequence: Synthetic oligonucleotide
  Antisense strand to SEQ ID NO: 933130
cuguaucuggcuaagaugg

SEQ ID NO: 933132 - RNA, 19 nt, Artificial Sequence
  Description of Artificial Sequence: Synthetic oligonucleotide
  Sense strand starting at position 897 of SEQ ID NO: 913514
uuggaagucccuggaggaa

SEQ ID NO: 933133 - RNA, 19 nt, Artificial Sequence
  Description of Artificial Sequence: Synthetic oligonucleotide
  Antisense strand to SEQ ID NO: 933132
uuccuccagggacuuccaa

SEQ ID NO: 933134 - RNA, 19 nt, Artificial Sequence
  Description of Artificial Sequence: Synthetic oligonucleotide
  Sense strand starting at position 3320 of SEQ ID NO: 913514
ucacgagaaauguggauaa

SEQ ID NO: 933135 - RNA, 19 nt, Artificial Sequence
  Description of Artificial Sequence: Synthetic oligonucleotide
  Antisense strand to SEQ ID NO: 933134
uuauccacauuucucguga

SEQ ID NO: 933136 - RNA, 19 nt, Artificial Sequence
  Description of Artificial Sequence: Synthetic oligonucleotide
  Sense strand starting at position 3674 of SEQ ID NO: 913514
aagggccuuguccagaaua

SEQ ID NO: 933137 - RNA, 19 nt, Artificial Sequence
  Description of Artificial Sequence: Synthetic oligonucleotide
  Antisense strand to SEQ ID NO: 933136
uauucuggacaaggcccuu

SEQ ID NO: 933138 - RNA, 19 nt, Artificial Sequence
  Description of Artificial Sequence: Synthetic oligonucleotide
  Sense strand starting at position 3676 of SEQ ID NO: 913514
gggccuuguccagaauaga

SEQ ID NO: 933139 - RNA, 19 nt, Artificial Sequence
  Description of Artificial Sequence: Synthetic oligonucleotide
  Antisense strand to SEQ ID NO: 933138
ucuauucuggacaaggccc

SEQ ID NO: 933140 - RNA, 19 nt, Artificial Sequence
  Description of Artificial Sequence: Synthetic oligonucleotide
  Sense strand starting at position 1443 of SEQ ID NO: 913514
uggcgaugagcugugugua

SEQ ID NO: 933141 - RNA, 19 nt, Artificial Sequence
  Description of Artificial Sequence: Synthetic oligonucleotide
  Antisense strand to SEQ ID NO: 933140
uacacacagcucaucgcca

SEQ ID NO: 933142 - RNA, 19 nt, Artificial Sequence
  Description of Artificial Sequence: Synthetic oligonucleotide
  Sense strand starting at position 2992 of SEQ ID NO: 913514
gacauuuaaugggauagua

SEQ ID NO: 933143 - RNA, 19 nt, Artificial Sequence
  Description of Artificial Sequence: Synthetic oligonucleotide
  Antisense strand to SEQ ID NO: 933142
uacuaucccauuaaauguc

SEQ ID NO: 933144 - RNA, 19 nt, Artificial Sequence
  Description of Artificial Sequence: Synthetic oligonucleotide
  Sense strand starting at position 940 of SEQ ID NO: 913514
ccugcuucccuggaagacu

SEQ ID NO: 933145 - RNA, 19 nt, Artificial Sequence
  Description of Artificial Sequence: Synthetic oligonucleotide
  Antisense strand to SEQ ID NO: 933144
agucuuccagggaagcagg

SEQ ID NO: 933146 - RNA, 19 nt, Artificial Sequence
  Description of Artificial Sequence: Synthetic oligonucleotide
  Sense strand starting at position 2937 of SEQ ID NO: 913514
ugggacuuccaguacguaa

SEQ ID NO: 933147 - RNA, 19 nt, Artificial Sequence
  Description of Artificial Sequence: Synthetic oligonucleotide
  Antisense strand to SEQ ID NO: 933146
uuacguacuggaaguccca

SEQ ID NO: 933148 - RNA, 19 nt, Artificial Sequence
  Description of Artificial Sequence: Synthetic oligonucleotide
  Sense strand starting at position 628 of SEQ ID NO: 913514
gaaugauaauuaccggugu

SEQ ID NO: 933149 - RNA, 19 nt, Artificial Sequence
  Description of Artificial Sequence: Synthetic oligonucleotide
  Antisense strand to SEQ ID NO: 933148
acaccgguaauuaucauuc

SEQ ID NO: 933150 - RNA, 19 nt, Artificial Sequence
  Description of Artificial Sequence: Synthetic oligonucleotide
  Sense strand starting at position 2989 of SEQ ID NO: 913514
ccugacauuuaaugggaua

SEQ ID NO: 933151 - RNA, 19 nt, Artificial Sequence
  Description of Artificial Sequence: Synthetic oligonucleotide
  Antisense strand to SEQ ID NO: 933150
uaucccauuaaaugucagg

SEQ ID NO: 933152 - RNA, 19 nt, Artificial Sequence
  Description of Artificial Sequence: Synthetic oligonucleotide
  Sense strand starting at position 3500 of SEQ ID NO: 913514
ggauaaacuuacucgccua

SEQ ID NO: 933153 - RNA, 19 nt, Artificial Sequence
  Description of Artificial Sequence: Synthetic oligonucleotide
  Antisense strand to SEQ ID NO: 933152
uaggcgaguaaguuuaucc

SEQ ID NO: 933154 - RNA, 19 nt, Artificial Sequence
  Description of Artificial Sequence: Synthetic oligonucleotide
  Sense strand starting at position 1037 of SEQ ID NO: 913514
cggcucugaguuuaugaau

SEQ ID NO: 933155 - RNA, 19 nt, Artificial Sequence
  Description of Artificial Sequence: Synthetic oligonucleotide
  Antisense strand to SEQ ID NO: 933154
auucauaaacucagagccg

SEQ ID NO: 933156 - RNA, 19 nt, Artificial Sequence
  Description of Artificial Sequence: Synthetic oligonucleotide
  Sense strand starting at position 2798 of SEQ ID NO: 913514
ccagcuucucgagggauga

SEQ ID NO: 933157 - RNA, 19 nt, Artificial Sequence
  Description of Artificial Sequence: Synthetic oligonucleotide
  Antisense strand to SEQ ID NO: 933156
ucaucccucgagaagcugg

SEQ ID NO: 933158 - RNA, 19 nt, Artificial Sequence
  Description of Artificial Sequence: Synthetic oligonucleotide
  Sense strand starting at position 295 of SEQ ID NO: 913514
cucucugcugcagaucuaa

SEQ ID NO: 933159 - RNA, 19 nt, Artificial Sequence
  Description of Artificial Sequence: Synthetic oligonucleotide
  Antisense strand to SEQ ID NO: 933158
uuagaucugcagcagagag

SEQ ID NO: 933160 - RNA, 19 nt, Artificial Sequence
  Description of Artificial Sequence: Synthetic oligonucleotide
  Sense strand starting at position 1194 of SEQ ID NO: 913514
ggguucuggccacaaguuu

SEQ ID NO: 933161 - RNA, 19 nt, Artificial Sequence
  Description of Artificial Sequence: Synthetic oligonucleotide
  Antisense strand to SEQ ID NO: 933160
aaacuuguggccagaaccc

SEQ ID NO: 933162 - RNA, 19 nt, Artificial Sequence
  Description of Artificial Sequence: Synthetic oligonucleotide
  Sense strand starting at position 630 of SEQ ID NO: 913514
augauaauuaccgguguca

SEQ ID NO: 933163 - RNA, 19 nt, Artificial Sequence
  Description of Artificial Sequence: Synthetic oligonucleotide
  Antisense strand to SEQ ID NO: 933162
ugacaccgguaauuaucau

SEQ ID NO: 933164 - RNA, 19 nt, Artificial Sequence
  Description of Artificial Sequence: Synthetic oligonucleotide
  Sense strand starting at position 2926 of SEQ ID NO: 913514
ggcauuccuccugggacuu

SEQ ID NO: 933165 - RNA, 19 nt, Artificial Sequence
  Description of Artificial Sequence: Synthetic oligonucleotide
  Antisense strand to SEQ ID NO: 933164
aagucccaggaggaaugcc

SEQ ID NO: 933166 - RNA, 19 nt, Artificial Sequence
  Description of Artificial Sequence: Synthetic oligonucleotide
  Sense strand starting at position 3223 of SEQ ID NO: 913514
cccugaauacuccgaagcu

SEQ ID NO: 933167 - RNA, 19 nt, Artificial Sequence
  Description of Artificial Sequence: Synthetic oligonucleotide
  Antisense strand to SEQ ID NO: 933166
agcuucggaguauucaggg

SEQ ID NO: 933168 - RNA, 19 nt, Artificial Sequence
  Description of Artificial Sequence: Synthetic oligonucleotide
  Sense strand starting at position 3370 of SEQ ID NO: 913514
auuguaagcggucacgaga

SEQ ID NO: 933169 - RNA, 19 nt, Artificial Sequence
  Description of Artificial Sequence: Synthetic oligonucleotide
  Antisense strand to SEQ ID NO: 933168
ucucgugaccgcuuacaau

SEQ ID NO: 933170 - RNA, 19 nt, Artificial Sequence
  Description of Artificial Sequence: Synthetic oligonucleotide
  Sense strand starting at position 34 of SEQ ID NO: 913514
gacugugaccacugcucua

SEQ ID NO: 933171 - RNA, 19 nt, Artificial Sequence
  Description of Artificial Sequence: Synthetic oligonucleotide
  Antisense strand to SEQ ID NO: 933170
uagagcaguggucacaguc

SEQ ID NO: 933172 - RNA, 19 nt, Artificial Sequence
  Description of Artificial Sequence: Synthetic oligonucleotide
  Sense strand starting at position 2950 of SEQ ID NO: 913514
acguaacgucaugagcuaa

SEQ ID NO: 933173 - RNA, 19 nt, Artificial Sequence
  Description of Artificial Sequence: Synthetic oligonucleotide
  Antisense strand to SEQ ID NO: 933172
uuagcucaugacguuacgu

SEQ ID NO: 933174 - RNA, 19 nt, Artificial Sequence
  Description of Artificial Sequence: Synthetic oligonucleotide
  Sense strand starting at position 632 of SEQ ID NO: 913514
gauaauuaccggugucauu

SEQ ID NO: 933175 - RNA, 19 nt, Artificial Sequence
  Description of Artificial Sequence: Synthetic oligonucleotide
  Antisense strand to SEQ ID NO: 933174
aaugacaccgguaauuauc

SEQ ID NO: 933176 - RNA, 19 nt, Artificial Sequence
  Description of Artificial Sequence: Synthetic oligonucleotide
  Sense strand starting at position 2507 of SEQ ID NO: 913514
cgguuucccugguuccaaa

SEQ ID NO: 933177 - RNA, 19 nt, Artificial Sequence
  Description of Artificial Sequence: Synthetic oligonucleotide
  Antisense strand to SEQ ID NO: 933176
uuuggaaccagggaaaccg

SEQ ID NO: 933178 - RNA, 19 nt, Artificial Sequence
  Description of Artificial Sequence: Synthetic oligonucleotide
  Sense strand starting at position 3867 of SEQ ID NO: 913514
uuggcugucuccucugcaa

SEQ ID NO: 933179 - RNA, 19 nt, Artificial Sequence
  Description of Artificial Sequence: Synthetic oligonucleotide
  Antisense strand to SEQ ID NO: 933178
uugcagaggagacagccaa

SEQ ID NO: 933180 - RNA, 19 nt, Artificial Sequence
  Description of Artificial Sequence: Synthetic oligonucleotide
  Sense strand starting at position 3869 of SEQ ID NO: 913514
ggcugucuccucugcaauc

SEQ ID NO: 933181 - RNA, 19 nt, Artificial Sequence
  Description of Artificial Sequence: Synthetic oligonucleotide
  Antisense strand to SEQ ID NO: 933180
gauugcagaggagacagcc

SEQ ID NO: 933182 - RNA, 19 nt, Artificial Sequence
  Description of Artificial Sequence: Synthetic oligonucleotide
  Sense strand starting at position 1040 of SEQ ID NO: 913514
cucugaguuuaugaaucac

SEQ ID NO: 933183 - RNA, 19 nt, Artificial Sequence
  Description of Artificial Sequence: Synthetic oligonucleotide
  Antisense strand to SEQ ID NO: 933182
gugauucauaaacucagag

SEQ ID NO: 933184 - RNA, 19 nt, Artificial Sequence
  Description of Artificial Sequence: Synthetic oligonucleotide
  Sense strand starting at position 3910 of SEQ ID NO: 913514
agagguccguucuaagaga

SEQ ID NO: 933185 - RNA, 19 nt, Artificial Sequence
  Description of Artificial Sequence: Synthetic oligonucleotide
  Antisense strand to SEQ ID NO: 933184
ucucuuagaacggaccucu

SEQ ID NO: 933186 - RNA, 19 nt, Artificial Sequence
  Description of Artificial Sequence: Synthetic oligonucleotide
  Sense strand starting at position 615 of SEQ ID NO: 913514
gugaguccauaaugaauga

SEQ ID NO: 933187 - RNA, 19 nt, Artificial Sequence
  Description of Artificial Sequence: Synthetic oligonucleotide
  Antisense strand to SEQ ID NO: 933186
ucauucauuauggacucac

SEQ ID NO: 933188 - RNA, 19 nt, Artificial Sequence
  Description of Artificial Sequence: Synthetic oligonucleotide
  Sense strand starting at position 635 of SEQ ID NO: 913514
aauuaccggugucauuauu

SEQ ID NO: 933189 - RNA, 19 nt, Artificial Sequence
  Description of Artificial Sequence: Synthetic oligonucleotide
  Antisense strand to SEQ ID NO: 933188
aauaaugacaccgguaauu

SEQ ID NO: 933190 - RNA, 19 nt, Artificial Sequence
  Description of Artificial Sequence: Synthetic oligonucleotide
  Sense strand starting at position 2925 of SEQ ID NO: 913514
gggcauuccuccugggacu

SEQ ID NO: 933191 - RNA, 19 nt, Artificial Sequence
  Description of Artificial Sequence: Synthetic oligonucleotide
  Antisense strand to SEQ ID NO: 933190
agucccaggaggaaugccc

SEQ ID NO: 933192 - RNA, 19 nt, Artificial Sequence
  Description of Artificial Sequence: Synthetic oligonucleotide
  Sense strand starting at position 2898 of SEQ ID NO: 913514
gcgagaacgucuuggauuc

SEQ ID NO: 933193 - RNA, 19 nt, Artificial Sequence
  Description of Artificial Sequence: Synthetic oligonucleotide
  Antisense strand to SEQ ID NO: 933192
gaauccaagacguucucgc

SEQ ID NO: 933194 - RNA, 19 nt, Artificial Sequence
  Description of Artificial Sequence: Synthetic oligonucleotide
  Sense strand starting at position 2949 of SEQ ID NO: 913514
uacguaacgucaugagcua

SEQ ID NO: 933195 - RNA, 19 nt, Artificial Sequence
  Description of Artificial Sequence: Synthetic oligonucleotide
  Antisense strand to SEQ ID NO: 933194
uagcucaugacguuacgua

SEQ ID NO: 933196 - RNA, 19 nt, Artificial Sequence
  Description of Artificial Sequence: Synthetic oligonucleotide
  Sense strand starting at position 26 of SEQ ID NO: 913515
cugcuaucacaggacuuaa

SEQ ID NO: 933197 - RNA, 19 nt, Artificial Sequence
  Description of Artificial Sequence: Synthetic oligonucleotide
  Antisense strand to SEQ ID NO: 933196
uuaaguccugugauagcag

SEQ ID NO: 933198 - RNA, 19 nt, Artificial Sequence
  Description of Artificial Sequence: Synthetic oligonucleotide
  Sense strand starting at position 3404 of SEQ ID NO: 913515
ugcuaaugugcucaauuuc

SEQ ID NO: 933199 - RNA, 19 nt, Artificial Sequence
  Description of Artificial Sequence: Synthetic oligonucleotide
  Antisense strand to SEQ ID NO: 933198
gaaauugagcacauuagca

SEQ ID NO: 933200 - RNA, 19 nt, Artificial Sequence
  Description of Artificial Sequence: Synthetic oligonucleotide
  Sense strand starting at position 2018 of SEQ ID NO: 913515
gucuuuguucucgcgagaa

SEQ ID NO: 933201 - RNA, 19 nt, Artificial Sequence
  Description of Artificial Sequence: Synthetic oligonucleotide
  Antisense strand to SEQ ID NO: 933200
uucucgcgagaacaaagac

SEQ ID NO: 933202 - RNA, 19 nt, Artificial Sequence
  Description of Artificial Sequence: Synthetic oligonucleotide
  Sense strand starting at position 3269 of SEQ ID NO: 913515
uuuccauggacuuggagau

SEQ ID NO: 933203 - RNA, 19 nt, Artificial Sequence
  Description of Artificial Sequence: Synthetic oligonucleotide
  Antisense strand to SEQ ID NO: 933202
aucuccaaguccauggaaa

SEQ ID NO: 933204 - RNA, 19 nt, Artificial Sequence
  Description of Artificial Sequence: Synthetic oligonucleotide
  Sense strand starting at position 630 of SEQ ID NO: 913515
gaauuauuaguccaggguc

SEQ ID NO: 933205 - RNA, 19 nt, Artificial Sequence
  Description of Artificial Sequence: Synthetic oligonucleotide
  Antisense strand to SEQ ID NO: 933204
gacccuggacuaauaauuc

SEQ ID NO: 933206 - RNA, 19 nt, Artificial Sequence
  Description of Artificial Sequence: Synthetic oligonucleotide
  Sense strand starting at position 441 of SEQ ID NO: 913515
gagcauuaugaucauagca

SEQ ID NO: 933207 - RNA, 19 nt, Artificial Sequence
  Description of Artificial Sequence: Synthetic oligonucleotide
  Antisense strand to SEQ ID NO: 933206
ugcuaugaucauaaugcuc

SEQ ID NO: 933208 - RNA, 19 nt, Artificial Sequence
  Description of Artificial Sequence: Synthetic oligonucleotide
  Sense strand starting at position 1318 of SEQ ID NO: 913515
ggcuuaacucuggacccau

SEQ ID NO: 933209 - RNA, 19 nt, Artificial Sequence
  Description of Artificial Sequence: Synthetic oligonucleotide
  Antisense strand to SEQ ID NO: 933208
auggguccagaguuaagcc

SEQ ID NO: 933210 - RNA, 19 nt, Artificial Sequence
  Description of Artificial Sequence: Synthetic oligonucleotide
  Sense strand starting at position 3107 of SEQ ID NO: 913515
ggaucucaauacuccaagu

SEQ ID NO: 933211 - RNA, 19 nt, Artificial Sequence
  Description of Artificial Sequence: Synthetic oligonucleotide
  Antisense strand to SEQ ID NO: 933210
acuuggaguauugagaucc

SEQ ID NO: 933212 - RNA, 19 nt, Artificial Sequence
  Description of Artificial Sequence: Synthetic oligonucleotide
  Sense strand starting at position 2369 of SEQ ID NO: 913515
cucgaccucccggaauuaa

SEQ ID NO: 933213 - RNA, 19 nt, Artificial Sequence
  Description of Artificial Sequence: Synthetic oligonucleotide
  Antisense strand to SEQ ID NO: 933212
uuaauuccgggaggucgag

SEQ ID NO: 933214 - RNA, 19 nt, Artificial Sequence
  Description of Artificial Sequence: Synthetic oligonucleotide
  Sense strand starting at position 3520 of SEQ ID NO: 913515
gccaucuuuguggaaacca

SEQ ID NO: 933215 - RNA, 19 nt, Artificial Sequence
  Description of Artificial Sequence: Synthetic oligonucleotide
  Antisense strand to SEQ ID NO: 933214
ugguuuccacaaagauggc

SEQ ID NO: 933216 - RNA, 19 nt, Artificial Sequence
  Description of Artificial Sequence: Synthetic oligonucleotide
  Sense strand starting at position 3287 of SEQ ID NO: 913515
ugaugaugccucugaggac

SEQ ID NO: 933217 - RNA, 19 nt, Artificial Sequence
  Description of Artificial Sequence: Synthetic oligonucleotide
  Antisense strand to SEQ ID NO: 933216
guccucagaggcaucauca

SEQ ID NO: 933218 - RNA, 19 nt, Artificial Sequence
  Description of Artificial Sequence: Synthetic oligonucleotide
  Sense strand starting at position 3495 of SEQ ID NO: 913515
ugaugauugggcugaccca

SEQ ID NO: 933219 - RNA, 19 nt, Artificial Sequence
  Description of Artificial Sequence: Synthetic oligonucleotide
  Antisense strand to SEQ ID NO: 933218
ugggucagcccaaucauca

SEQ ID NO: 933220 - RNA, 19 nt, Artificial Sequence
  Description of Artificial Sequence: Synthetic oligonucleotide
  Sense strand starting at position 2985 of SEQ ID NO: 913515
agaggcaagcuuugggaau

SEQ ID NO: 933221 - RNA, 19 nt, Artificial Sequence
  Description of Artificial Sequence: Synthetic oligonucleotide
  Antisense strand to SEQ ID NO: 933220
auucccaaagcuugccucu

SEQ ID NO: 933222 - RNA, 19 nt, Artificial Sequence
  Description of Artificial Sequence: Synthetic oligonucleotide
  Sense strand starting at position 3510 of SEQ ID NO: 913515
cccagaaguggccaucuuu

SEQ ID NO: 933223 - RNA, 19 nt, Artificial Sequence
  Description of Artificial Sequence: Synthetic oligonucleotide
  Antisense strand to SEQ ID NO: 933222
aaagauggccacuucuggg

SEQ ID NO: 933224 - RNA, 19 nt, Artificial Sequence
  Description of Artificial Sequence: Synthetic oligonucleotide
  Sense strand starting at position 237 of SEQ ID NO: 913515
acacccauguuccuuuaga

SEQ ID NO: 933225 - RNA, 19 nt, Artificial Sequence
  Description of Artificial Sequence: Synthetic oligonucleotide
  Antisense strand to SEQ ID NO: 933224
ucuaaaggaacaugggugu

SEQ ID NO: 933226 - RNA, 19 nt, Artificial Sequence
  Description of Artificial Sequence: Synthetic oligonucleotide
  Sense strand starting at position 440 of SEQ ID NO: 913515
ggagcauuaugaucauagc

SEQ ID NO: 933227 - RNA, 19 nt, Artificial Sequence
  Description of Artificial Sequence: Synthetic oligonucleotide
  Antisense strand to SEQ ID NO: 933226
gcuaugaucauaaugcucc

SEQ ID NO: 933228 - RNA, 19 nt, Artificial Sequence
  Description of Artificial Sequence: Synthetic oligonucleotide
  Sense strand starting at position 3403 of SEQ ID NO: 913515
gugcuaaugugcucaauuu

SEQ ID NO: 933229 - RNA, 19 nt, Artificial Sequence
  Description of Artificial Sequence: Synthetic oligonucleotide
  Antisense strand to SEQ ID NO: 933228
aaauugagcacauuagcac

SEQ ID NO: 933230 - RNA, 19 nt, Artificial Sequence
  Description of Artificial Sequence: Synthetic oligonucleotide
  Sense strand starting at position 2861 of SEQ ID NO: 913515
ucgggauuucgcgagcuuu

SEQ ID NO: 933231 - RNA, 19 nt, Artificial Sequence
  Description of Artificial Sequence: Synthetic oligonucleotide
  Antisense strand to SEQ ID NO: 933230
aaagcucgcgaaaucccga

SEQ ID NO: 933232 - RNA, 19 nt, Artificial Sequence
  Description of Artificial Sequence: Synthetic oligonucleotide
  Sense strand starting at position 632 of SEQ ID NO: 913515
auuauuaguccagggucua

SEQ ID NO: 933233 - RNA, 19 nt, Artificial Sequence
  Description of Artificial Sequence: Synthetic oligonucleotide
  Antisense strand to SEQ ID NO: 933232
uagacccuggacuaauaau

SEQ ID NO: 933234 - RNA, 19 nt, Artificial Sequence
  Description of Artificial Sequence: Synthetic oligonucleotide
  Sense strand starting at position 3179 of SEQ ID NO: 913515
uguugagcacugcaugaua

SEQ ID NO: 933235 - RNA, 19 nt, Artificial Sequence
  Description of Artificial Sequence: Synthetic oligonucleotide
  Antisense strand to SEQ ID NO: 933234
uaucaugcagugcucaaca

SEQ ID NO: 933236 - RNA, 19 nt, Artificial Sequence
  Description of Artificial Sequence: Synthetic oligonucleotide
  Sense strand starting at position 3212 of SEQ ID NO: 913515
guuguaggucauuaguaac

SEQ ID NO: 933237 - RNA, 19 nt, Artificial Sequence
  Description of Artificial Sequence: Synthetic oligonucleotide
  Antisense strand to SEQ ID NO: 933236
guuacuaaugaccuacaac

SEQ ID NO: 933238 - RNA, 19 nt, Artificial Sequence
  Description of Artificial Sequence: Synthetic oligonucleotide
  Sense strand starting at position 1111 of SEQ ID NO: 913515
cugcuacuacaaugguuaa

SEQ ID NO: 933239 - RNA, 19 nt, Artificial Sequence
  Description of Artificial Sequence: Synthetic oligonucleotide
  Antisense strand to SEQ ID NO: 933238
uuaaccauuguaguagcag

SEQ ID NO: 933240 - RNA, 19 nt, Artificial Sequence
  Description of Artificial Sequence: Synthetic oligonucleotide
  Sense strand starting at position 2833 of SEQ ID NO: 913515
gacgcuauuccggagugaa

SEQ ID NO: 933241 - RNA, 19 nt, Artificial Sequence
  Description of Artificial Sequence: Synthetic oligonucleotide
  Antisense strand to SEQ ID NO: 933240
uucacuccggaauagcguc

SEQ ID NO: 933242 - RNA, 19 nt, Artificial Sequence
  Description of Artificial Sequence: Synthetic oligonucleotide
  Sense strand starting at position 3181 of SEQ ID NO: 913515
uugagcacugcaugauaca

SEQ ID NO: 933243 - RNA, 19 nt, Artificial Sequence
  Description of Artificial Sequence: Synthetic oligonucleotide
  Antisense strand to SEQ ID NO: 933242
uguaucaugcagugcucaa

SEQ ID NO: 933244 - RNA, 19 nt, Artificial Sequence
  Description of Artificial Sequence: Synthetic oligonucleotide
  Sense strand starting at position 2836 of SEQ ID NO: 913515
gcuauuccggagugaagag

SEQ ID NO: 933245 - RNA, 19 nt, Artificial Sequence
  Description of Artificial Sequence: Synthetic oligonucleotide
  Antisense strand to SEQ ID NO: 933244
cucuucacuccggaauagc

SEQ ID NO: 933246 - RNA, 19 nt, Artificial Sequence
  Description of Artificial Sequence: Synthetic oligonucleotide
  Sense strand starting at position 2032 of SEQ ID NO: 913515
gagaaugaaugcgucacuu

SEQ ID NO: 933247 - RNA, 19 nt, Artificial Sequence
  Description of Artificial Sequence: Synthetic oligonucleotide
  Antisense strand to SEQ ID NO: 933246
aagugacgcauucauucuc

SEQ ID NO: 933248 - RNA, 19 nt, Artificial Sequence
  Description of Artificial Sequence: Synthetic oligonucleotide
  Sense strand starting at position 3209 of SEQ ID NO: 913515
gauguuguaggucauuagu

SEQ ID NO: 933249 - RNA, 19 nt, Artificial Sequence
  Description of Artificial Sequence: Synthetic oligonucleotide
  Antisense strand to SEQ ID NO: 933248
acuaaugaccuacaacauc

SEQ ID NO: 933250 - RNA, 19 nt, Artificial Sequence
  Description of Artificial Sequence: Synthetic oligonucleotide
  Sense strand starting at position 3220 of SEQ ID NO: 913515
ucauuaguaacauguggua

SEQ ID NO: 933251 - RNA, 19 nt, Artificial Sequence
  Description of Artificial Sequence: Synthetic oligonucleotide
  Antisense strand to SEQ ID NO: 933250
uaccacauguuacuaauga

SEQ ID NO: 933252 - RNA, 19 nt, Artificial Sequence
  Description of Artificial Sequence: Synthetic oligonucleotide
  Sense strand starting at position 1154 of SEQ ID NO: 913515
aauucuugagucugauguu

SEQ ID NO: 933253 - RNA, 19 nt, Artificial Sequence
  Description of Artificial Sequence: Synthetic oligonucleotide
  Antisense strand to SEQ ID NO: 933252
aacaucagacucaagaauu

SEQ ID NO: 933254 - RNA, 19 nt, Artificial Sequence
  Description of Artificial Sequence: Synthetic oligonucleotide
  Sense strand starting at position 633 of SEQ ID NO: 913515
uuauuaguccagggucuau

SEQ ID NO: 933255 - RNA, 19 nt, Artificial Sequence
  Description of Artificial Sequence: Synthetic oligonucleotide
  Antisense strand to SEQ ID NO: 933254
auagacccuggacuaauaa

SEQ ID NO: 933256 - RNA, 19 nt, Artificial Sequence
  Description of Artificial Sequence: Synthetic oligonucleotide
  Sense strand starting at position 2022 of SEQ ID NO: 913515
uuguucucgcgagaaugaa

SEQ ID NO: 933257 - RNA, 19 nt, Artificial Sequence
  Description of Artificial Sequence: Synthetic oligonucleotide
  Antisense strand to SEQ ID NO: 933256
uucauucucgcgagaacaa

SEQ ID NO: 933258 - RNA, 19 nt, Artificial Sequence
  Description of Artificial Sequence: Synthetic oligonucleotide
  Sense strand starting at position 2368 of SEQ ID NO: 913515
ccucgaccucccggaauua

SEQ ID NO: 933259 - RNA, 19 nt, Artificial Sequence
  Description of Artificial Sequence: Synthetic oligonucleotide
  Antisense strand to SEQ ID NO: 933258
uaauuccgggaggucgagg

SEQ ID NO: 933260 - RNA, 19 nt, Artificial Sequence
  Description of Artificial Sequence: Synthetic oligonucleotide
  Sense strand starting at position 3517 of SEQ ID NO: 913515
guggccaucuuuguggaaa

SEQ ID NO: 933261 - RNA, 19 nt, Artificial Sequence
  Description of Artificial Sequence: Synthetic oligonucleotide
  Antisense strand to SEQ ID NO: 933260
uuuccacaaagauggccac

SEQ ID NO: 933262 - RNA, 19 nt, Artificial Sequence
  Description of Artificial Sequence: Synthetic oligonucleotide
  Sense strand starting at position 1622 of SEQ ID NO: 913515
ccgcaacagcucuaucuau

SEQ ID NO: 933263 - RNA, 19 nt, Artificial Sequence
  Description of Artificial Sequence: Synthetic oligonucleotide
  Antisense strand to SEQ ID NO: 933262
auagauagagcuguugcgg

SEQ ID NO: 933264 - RNA, 19 nt, Artificial Sequence
  Description of Artificial Sequence: Synthetic oligonucleotide
  Sense strand starting at position 3032 of SEQ ID NO: 913515
ggcggauugccauagcaua

SEQ ID NO: 933265 - RNA, 19 nt, Artificial Sequence
  Description of Artificial Sequence: Synthetic oligonucleotide
  Antisense strand to SEQ ID NO: 933264
uaugcuauggcaauccgcc

SEQ ID NO: 933266 - RNA, 19 nt, Artificial Sequence
  Description of Artificial Sequence: Synthetic oligonucleotide
  Sense strand starting at position 3329 of SEQ ID NO: 913515
cgcacagagaauuguggua

SEQ ID NO: 933267 - RNA, 19 nt, Artificial Sequence
  Description of Artificial Sequence: Synthetic oligonucleotide
  Antisense strand to SEQ ID NO: 933266
uaccacaauucucugugcg

SEQ ID NO: 933268 - RNA, 19 nt, Artificial Sequence
  Description of Artificial Sequence: Synthetic oligonucleotide
  Sense strand starting at position 2924 of SEQ ID NO: 913515
uggguuugccagcacagua

SEQ ID NO: 933269 - RNA, 19 nt, Artificial Sequence
  Description of Artificial Sequence: Synthetic oligonucleotide
  Antisense strand to SEQ ID NO: 933268
uacugugcuggcaaaccca

SEQ ID NO: 933270 - RNA, 19 nt, Artificial Sequence
  Description of Artificial Sequence: Synthetic oligonucleotide
  Sense strand starting at position 2377 of SEQ ID NO: 913515
cccggaauuaagcgaucuu

SEQ ID NO: 933271 - RNA, 19 nt, Artificial Sequence
  Description of Artificial Sequence: Synthetic oligonucleotide
  Antisense strand to SEQ ID NO: 933270
aagaucgcuuaauuccggg

SEQ ID NO: 933272 - RNA, 19 nt, Artificial Sequence
  Description of Artificial Sequence: Synthetic oligonucleotide
  Sense strand starting at position 2843 of SEQ ID NO: 913515
cggagugaagaguguuucu

SEQ ID NO: 933273 - RNA, 19 nt, Artificial Sequence
  Description of Artificial Sequence: Synthetic oligonucleotide
  Antisense strand to SEQ ID NO: 933272
agaaacacucuucacuccg

SEQ ID NO: 933274 - RNA, 19 nt, Artificial Sequence
  Description of Artificial Sequence: Synthetic oligonucleotide
  Sense strand starting at position 3211 of SEQ ID NO: 913515
uguuguaggucauuaguaa

SEQ ID NO: 933275 - RNA, 19 nt, Artificial Sequence
  Description of Artificial Sequence: Synthetic oligonucleotide
  Antisense strand to SEQ ID NO: 933274
uuacuaaugaccuacaaca

SEQ ID NO: 933276 - RNA, 19 nt, Artificial Sequence
  Description of Artificial Sequence: Synthetic oligonucleotide
  Sense strand starting at position 718 of SEQ ID NO: 913516
ucucaagaugaguauccuu

SEQ ID NO: 933277 - RNA, 19 nt, Artificial Sequence
  Description of Artificial Sequence: Synthetic oligonucleotide
  Antisense strand to SEQ ID NO: 933276
aaggauacucaucuugaga

SEQ ID NO: 933278 - RNA, 19 nt, Artificial Sequence
  Description of Artificial Sequence: Synthetic oligonucleotide
  Sense strand starting at position 3782 of SEQ ID NO: 913516
ccuggugugcacgccaaau

SEQ ID NO: 933279 - RNA, 19 nt, Artificial Sequence
  Description of Artificial Sequence: Synthetic oligonucleotide
  Antisense strand to SEQ ID NO: 933278
auuuggcgugcacaccagg

SEQ ID NO: 933280 - RNA, 19 nt, Artificial Sequence
  Description of Artificial Sequence: Synthetic oligonucleotide
  Sense strand starting at position 2573 of SEQ ID NO: 913516
auucgugucgguuccaauu

SEQ ID NO: 933281 - RNA, 19 nt, Artificial Sequence
  Description of Artificial Sequence: Synthetic oligonucleotide
  Antisense strand to SEQ ID NO: 933280
aauuggaaccgacacgaau

SEQ ID NO: 933282 - RNA, 19 nt, Artificial Sequence
  Description of Artificial Sequence: Synthetic oligonucleotide
  Sense strand starting at position 1347 of SEQ ID NO: 913516
cuaagaugugauuagucac

SEQ ID NO: 933283 - RNA, 19 nt, Artificial Sequence
  Description of Artificial Sequence: Synthetic oligonucleotide
  Antisense strand to SEQ ID NO: 933282
gugacuaaucacaucuuag

SEQ ID NO: 933284 - RNA, 19 nt, Artificial Sequence
  Description of Artificial Sequence: Synthetic oligonucleotide
  Sense strand starting at position 1679 of SEQ ID NO: 913516
gcaucucaagguuauagga

SEQ ID NO: 933285 - RNA, 19 nt, Artificial Sequence
  Description of Artificial Sequence: Synthetic oligonucleotide
  Antisense strand to SEQ ID NO: 933284
uccuauaaccuugagaugc

SEQ ID NO: 933286 - RNA, 19 nt, Artificial Sequence
  Description of Artificial Sequence: Synthetic oligonucleotide
  Sense strand starting at position 723 of SEQ ID NO: 913516
agaugaguauccuuuaaua

SEQ ID NO: 933287 - RNA, 19 nt, Artificial Sequence
  Description of Artificial Sequence: Synthetic oligonucleotide
  Antisense strand to SEQ ID NO: 933286
uauuaaaggauacucaucu

SEQ ID NO: 933288 - RNA, 19 nt, Artificial Sequence
  Description of Artificial Sequence: Synthetic oligonucleotide
  Sense strand starting at position 1475 of SEQ ID NO: 913516
ggcuaugugacuuaaggac

SEQ ID NO: 933289 - RNA, 19 nt, Artificial Sequence
  Description of Artificial Sequence: Synthetic oligonucleotide
  Antisense strand to SEQ ID NO: 933288
guccuuaagucacauagcc

SEQ ID NO: 933290 - RNA, 19 nt, Artificial Sequence
  Description of Artificial Sequence: Synthetic oligonucleotide
  Sense strand starting at position 1032 of SEQ ID NO: 913516
ucugguacacaguauuaua

SEQ ID NO: 933291 - RNA, 19 nt, Artificial Sequence
  Description of Artificial Sequence: Synthetic oligonucleotide
  Antisense strand to SEQ ID NO: 933290
uauaauacuguguaccaga

SEQ ID NO: 933292 - RNA, 19 nt, Artificial Sequence
  Description of Artificial Sequence: Synthetic oligonucleotide
  Sense strand starting at position 2263 of SEQ ID NO: 913516
ucagauaccuaagauuuga

SEQ ID NO: 933293 - RNA, 19 nt, Artificial Sequence
  Description of Artificial Sequence: Synthetic oligonucleotide
  Antisense strand to SEQ ID NO: 933292
ucaaaucuuagguaucuga

SEQ ID NO: 933294 - RNA, 19 nt, Artificial Sequence
  Description of Artificial Sequence: Synthetic oligonucleotide
  Sense strand starting at position 2904 of SEQ ID NO: 913516
gcacgcgugacuucgaaau

SEQ ID NO: 933295 - RNA, 19 nt, Artificial Sequence
  Description of Artificial Sequence: Synthetic oligonucleotide
  Antisense strand to SEQ ID NO: 933294
auuucgaagucacgcgugc

SEQ ID NO: 933296 - RNA, 19 nt, Artificial Sequence
  Description of Artificial Sequence: Synthetic oligonucleotide
  Sense strand starting at position 2016 of SEQ ID NO: 913516
cuguccuggccauaaggaa

SEQ ID NO: 933297 - RNA, 19 nt, Artificial Sequence
  Description of Artificial Sequence: Synthetic oligonucleotide
  Antisense strand to SEQ ID NO: 933296
uuccuuauggccaggacag

SEQ ID NO: 933298 - RNA, 19 nt, Artificial Sequence
  Description of Artificial Sequence: Synthetic oligonucleotide
  Sense strand starting at position 781 of SEQ ID NO: 913516
ucgaaaugucauggaauau

SEQ ID NO: 933299 - RNA, 19 nt, Artificial Sequence
  Description of Artificial Sequence: Synthetic oligonucleotide
  Antisense strand to SEQ ID NO: 933298
auauuccaugacauuucga

SEQ ID NO: 933300 - RNA, 19 nt, Artificial Sequence
  Description of Artificial Sequence: Synthetic oligonucleotide
  Sense strand starting at position 476 of SEQ ID NO: 913516
cuaaauagaguuuaguguu

SEQ ID NO: 933301 - RNA, 19 nt, Artificial Sequence
  Description of Artificial Sequence: Synthetic oligonucleotide
  Antisense strand to SEQ ID NO: 933300
aacacuaaacucuauuuag

SEQ ID NO: 933302 - RNA, 19 nt, Artificial Sequence
  Description of Artificial Sequence: Synthetic oligonucleotide
  Sense strand starting at position 2664 of SEQ ID NO: 913516
gauuaacucgaaggguauu

SEQ ID NO: 933303 - RNA, 19 nt, Artificial Sequence
  Description of Artificial Sequence: Synthetic oligonucleotide
  Antisense strand to SEQ ID NO: 933302
aauacccuucgaguuaauc

SEQ ID NO: 933304 - RNA, 19 nt, Artificial Sequence
  Description of Artificial Sequence: Synthetic oligonucleotide
  Sense strand starting at position 3965 of SEQ ID NO: 913516
gacggcguuguuagugaaa

SEQ ID NO: 933305 - RNA, 19 nt, Artificial Sequence
  Description of Artificial Sequence: Synthetic oligonucleotide
  Antisense strand to SEQ ID NO: 933304
uuucacuaacaacgccguc

SEQ ID NO: 933306 - RNA, 19 nt, Artificial Sequence
  Description of Artificial Sequence: Synthetic oligonucleotide
  Sense strand starting at position 3863 of SEQ ID NO: 913516
ggacaauuccuagggugug

SEQ ID NO: 933307 - RNA, 19 nt, Artificial Sequence
  Description of Artificial Sequence: Synthetic oligonucleotide
  Antisense strand to SEQ ID NO: 933306
cacacccuaggaauugucc

SEQ ID NO: 933308 - RNA, 19 nt, Artificial Sequence
  Description of Artificial Sequence: Synthetic oligonucleotide
  Sense strand starting at position 319 of SEQ ID NO: 913516
ugggaaaguugccuuugaa

SEQ ID NO: 933309 - RNA, 19 nt, Artificial Sequence
  Description of Artificial Sequence: Synthetic oligonucleotide
  Antisense strand to SEQ ID NO: 933308
uucaaaggcaacuuuccca

SEQ ID NO: 933310 - RNA, 19 nt, Artificial Sequence
  Description of Artificial Sequence: Synthetic oligonucleotide
  Sense strand starting at position 2228 of SEQ ID NO: 913516
ggcagaaacagguguuaau

SEQ ID NO: 933311 - RNA, 19 nt, Artificial Sequence
  Description of Artificial Sequence: Synthetic oligonucleotide
  Antisense strand to SEQ ID NO: 933310
auuaacaccuguuucugcc

SEQ ID NO: 933312 - RNA, 19 nt, Artificial Sequence
  Description of Artificial Sequence: Synthetic oligonucleotide
  Sense strand starting at position 1489 of SEQ ID NO: 913516
aggacaugaaagcgucuua

SEQ ID NO: 933313 - RNA, 19 nt, Artificial Sequence
  Description of Artificial Sequence: Synthetic oligonucleotide
  Antisense strand to SEQ ID NO: 933312
uaagacgcuuucauguccu

SEQ ID NO: 933314 - RNA, 19 nt, Artificial Sequence
  Description of Artificial Sequence: Synthetic oligonucleotide
  Sense strand starting at position 318 of SEQ ID NO: 913516
uugggaaaguugccuuuga

SEQ ID NO: 933315 - RNA, 19 nt, Artificial Sequence
  Description of Artificial Sequence: Synthetic oligonucleotide
  Antisense strand to SEQ ID NO: 933314
ucaaaggcaacuuucccaa

SEQ ID NO: 933316 - RNA, 19 nt, Artificial Sequence
  Description of Artificial Sequence: Synthetic oligonucleotide
  Sense strand starting at position 2628 of SEQ ID NO: 913516
gcgguuuagagacagcaau

SEQ ID NO: 933317 - RNA, 19 nt, Artificial Sequence
  Description of Artificial Sequence: Synthetic oligonucleotide
  Antisense strand to SEQ ID NO: 933316
auugcugucucuaaaccgc

SEQ ID NO: 933318 - RNA, 19 nt, Artificial Sequence
  Description of Artificial Sequence: Synthetic oligonucleotide
  Sense strand starting at position 322 of SEQ ID NO: 913516
gaaaguugccuuugaauuc

SEQ ID NO: 933319 - RNA, 19 nt, Artificial Sequence
  Description of Artificial Sequence: Synthetic oligonucleotide
  Antisense strand to SEQ ID NO: 933318
gaauucaaaggcaacuuuc

SEQ ID NO: 933320 - RNA, 19 nt, Artificial Sequence
  Description of Artificial Sequence: Synthetic oligonucleotide
  Sense strand starting at position 775 of SEQ ID NO: 913516
guaacuucgaaaugucaug

SEQ ID NO: 933321 - RNA, 19 nt, Artificial Sequence
  Description of Artificial Sequence: Synthetic oligonucleotide
  Antisense strand to SEQ ID NO: 933320
caugacauuucgaaguuac

SEQ ID NO: 933322 - RNA, 19 nt, Artificial Sequence
  Description of Artificial Sequence: Synthetic oligonucleotide
  Sense strand starting at position 1149 of SEQ ID NO: 913516
gcgaaauacuguuuccaaa

SEQ ID NO: 933323 - RNA, 19 nt, Artificial Sequence
  Description of Artificial Sequence: Synthetic oligonucleotide
  Antisense strand to SEQ ID NO: 933322
uuuggaaacaguauuucgc

SEQ ID NO: 933324 - RNA, 19 nt, Artificial Sequence
  Description of Artificial Sequence: Synthetic oligonucleotide
  Sense strand starting at position 2685 of SEQ ID NO: 913516
gaaggcgcaucucuaauaa

SEQ ID NO: 933325 - RNA, 19 nt, Artificial Sequence
  Description of Artificial Sequence: Synthetic oligonucleotide
  Antisense strand to SEQ ID NO: 933324
uuauuagagaugcgccuuc

SEQ ID NO: 933326 - RNA, 19 nt, Artificial Sequence
  Description of Artificial Sequence: Synthetic oligonucleotide
  Sense strand starting at position 1676 of SEQ ID NO: 913516
ucugcaucucaagguuaua

SEQ ID NO: 933327 - RNA, 19 nt, Artificial Sequence
  Description of Artificial Sequence: Synthetic oligonucleotide
  Antisense strand to SEQ ID NO: 933326
uauaaccuugagaugcaga

SEQ ID NO: 933328 - RNA, 19 nt, Artificial Sequence
  Description of Artificial Sequence: Synthetic oligonucleotide
  Sense strand starting at position 1137 of SEQ ID NO: 913516
acgggacuuucugcgaaau

SEQ ID NO: 933329 - RNA, 19 nt, Artificial Sequence
  Description of Artificial Sequence: Synthetic oligonucleotide
  Antisense strand to SEQ ID NO: 933328
auuucgcagaaagucccgu

SEQ ID NO: 933330 - RNA, 19 nt, Artificial Sequence
  Description of Artificial Sequence: Synthetic oligonucleotide
  Sense strand starting at position 1138 of SEQ ID NO: 913516
cgggacuuucugcgaaaua

SEQ ID NO: 933331 - RNA, 19 nt, Artificial Sequence
  Description of Artificial Sequence: Synthetic oligonucleotide
  Antisense strand to SEQ ID NO: 933330
uauuucgcagaaagucccg

SEQ ID NO: 933332 - RNA, 19 nt, Artificial Sequence
  Description of Artificial Sequence: Synthetic oligonucleotide
  Sense strand starting at position 2749 of SEQ ID NO: 913516
gagggaguugagugcaguu

SEQ ID NO: 933333 - RNA, 19 nt, Artificial Sequence
  Description of Artificial Sequence: Synthetic oligonucleotide
  Antisense strand to SEQ ID NO: 933332
aacugcacucaacucccuc

SEQ ID NO: 933334 - RNA, 19 nt, Artificial Sequence
  Description of Artificial Sequence: Synthetic oligonucleotide
  Sense strand starting at position 1350 of SEQ ID NO: 913516
agaugugauuagucacgca

SEQ ID NO: 933335 - RNA, 19 nt, Artificial Sequence
  Description of Artificial Sequence: Synthetic oligonucleotide
  Antisense strand to SEQ ID NO: 933334
ugcgugacuaaucacaucu

SEQ ID NO: 933336 - RNA, 19 nt, Artificial Sequence
  Description of Artificial Sequence: Synthetic oligonucleotide
  Sense strand starting at position 1027 of SEQ ID NO: 913516
gugugucugguacacagua

SEQ ID NO: 933337 - RNA, 19 nt, Artificial Sequence
  Description of Artificial Sequence: Synthetic oligonucleotide
  Antisense strand to SEQ ID NO: 933336
uacuguguaccagacacac

SEQ ID NO: 933338 - RNA, 19 nt, Artificial Sequence
  Description of Artificial Sequence: Synthetic oligonucleotide
  Sense strand starting at position 1355 of SEQ ID NO: 913516
ugauuagucacgcaaugcu

SEQ ID NO: 933339 - RNA, 19 nt, Artificial Sequence
  Description of Artificial Sequence: Synthetic oligonucleotide
  Antisense strand to SEQ ID NO: 933338
agcauugcgugacuaauca

SEQ ID NO: 933340 - RNA, 19 nt, Artificial Sequence
  Description of Artificial Sequence: Synthetic oligonucleotide
  Sense strand starting at position 482 of SEQ ID NO: 913516
agaguuuaguguucaugua

SEQ ID NO: 933341 - RNA, 19 nt, Artificial Sequence
  Description of Artificial Sequence: Synthetic oligonucleotide
  Antisense strand to SEQ ID NO: 933340
uacaugaacacuaaacucu

SEQ ID NO: 933342 - RNA, 19 nt, Artificial Sequence
  Description of Artificial Sequence: Synthetic oligonucleotide
  Sense strand starting at position 2808 of SEQ ID NO: 913516
uuccaauucuugccggacu

SEQ ID NO: 933343 - RNA, 19 nt, Artificial Sequence
  Description of Artificial Sequence: Synthetic oligonucleotide
  Antisense strand to SEQ ID NO: 933342
aguccggcaagaauuggaa

SEQ ID NO: 933344 - RNA, 19 nt, Artificial Sequence
  Description of Artificial Sequence: Synthetic oligonucleotide
  Sense strand starting at position 1257 of SEQ ID NO: 913516
ccgagugucagaugccaga

SEQ ID NO: 933345 - RNA, 19 nt, Artificial Sequence
  Description of Artificial Sequence: Synthetic oligonucleotide
  Antisense strand to SEQ ID NO: 933344
ucuggcaucugacacucgg

SEQ ID NO: 933346 - RNA, 19 nt, Artificial Sequence
  Description of Artificial Sequence: Synthetic oligonucleotide
  Sense strand starting at position 2474 of SEQ ID NO: 913516
ucuuaaaggucgaguggga

SEQ ID NO: 933347 - RNA, 19 nt, Artificial Sequence
  Description of Artificial Sequence: Synthetic oligonucleotide
  Antisense strand to SEQ ID NO: 933346
ucccacucgaccuuuaaga

SEQ ID NO: 933348 - RNA, 19 nt, Artificial Sequence
  Description of Artificial Sequence: Synthetic oligonucleotide
  Sense strand starting at position 2011 of SEQ ID NO: 913516
uggagcuguccuggccaua

SEQ ID NO: 933349 - RNA, 19 nt, Artificial Sequence
  Description of Artificial Sequence: Synthetic oligonucleotide
  Antisense strand to SEQ ID NO: 933348
uauggccaggacagcucca

SEQ ID NO: 933350 - RNA, 19 nt, Artificial Sequence
  Description of Artificial Sequence: Synthetic oligonucleotide
  Sense strand starting at position 1007 of SEQ ID NO: 913516
gggcaaagaucacauauau

SEQ ID NO: 933351 - RNA, 19 nt, Artificial Sequence
  Description of Artificial Sequence: Synthetic oligonucleotide
  Antisense strand to SEQ ID NO: 933350
auauaugugaucuuugccc

SEQ ID NO: 933352 - RNA, 19 nt, Artificial Sequence
  Description of Artificial Sequence: Synthetic oligonucleotide
  Sense strand starting at position 1070 of SEQ ID NO: 913516
caagaaugguuauaaagug

SEQ ID NO: 933353 - RNA, 19 nt, Artificial Sequence
  Description of Artificial Sequence: Synthetic oligonucleotide
  Antisense strand to SEQ ID NO: 933352
cacuuuauaaccauucuug

SEQ ID NO: 933354 - RNA, 19 nt, Artificial Sequence
  Description of Artificial Sequence: Synthetic oligonucleotide
  Sense strand starting at position 560 of SEQ ID NO: 913516
ugugcagucuuccuguaaa

SEQ ID NO: 933355 - RNA, 19 nt, Artificial Sequence
  Description of Artificial Sequence: Synthetic oligonucleotide
  Antisense strand to SEQ ID NO: 933354
uuuacaggaagacugcaca

SEQ ID NO: 933356 - RNA, 19 nt, Artificial Sequence
  Description of Artificial Sequence: Synthetic oligonucleotide
  Sense strand starting at position 3511 of SEQ ID NO: 913517
acauguauauuauugggaa

SEQ ID NO: 933357 - RNA, 19 nt, Artificial Sequence
  Description of Artificial Sequence: Synthetic oligonucleotide
  Antisense strand to SEQ ID NO: 933356
uucccaauaauauacaugu

SEQ ID NO: 933358 - RNA, 19 nt, Artificial Sequence
  Description of Artificial Sequence: Synthetic oligonucleotide
  Sense strand starting at position 2037 of SEQ ID NO: 913517
aacuuuggucuggaguaag

SEQ ID NO: 933359 - RNA, 19 nt, Artificial Sequence
  Description of Artificial Sequence: Synthetic oligonucleotide
  Antisense strand to SEQ ID NO: 933358
cuuacuccagaccaaaguu

SEQ ID NO: 933360 - RNA, 19 nt, Artificial Sequence
  Description of Artificial Sequence: Synthetic oligonucleotide
  Sense strand starting at position 2779 of SEQ ID NO: 913517
gucguuauagcuguaucca

SEQ ID NO: 933361 - RNA, 19 nt, Artificial Sequence
  Description of Artificial Sequence: Synthetic oligonucleotide
  Antisense strand to SEQ ID NO: 933360
uggauacagcuauaacgac

SEQ ID NO: 933362 - RNA, 19 nt, Artificial Sequence
  Description of Artificial Sequence: Synthetic oligonucleotide
  Sense strand starting at position 2676 of SEQ ID NO: 913517
auuggaucauauuugcgua

SEQ ID NO: 933363 - RNA, 19 nt, Artificial Sequence
  Description of Artificial Sequence: Synthetic oligonucleotide
  Antisense strand to SEQ ID NO: 933362
uacgcaaauaugauccaau

SEQ ID NO: 933364 - RNA, 19 nt, Artificial Sequence
  Description of Artificial Sequence: Synthetic oligonucleotide
  Sense strand starting at position 490 of SEQ ID NO: 913517
augacugagucucugaaag

SEQ ID NO: 933365 - RNA, 19 nt, Artificial Sequence
  Description of Artificial Sequence: Synthetic oligonucleotide
  Antisense strand to SEQ ID NO: 933364
cuuucagagacucagucau

SEQ ID NO: 933366 - RNA, 19 nt, Artificial Sequence
  Description of Artificial Sequence: Synthetic oligonucleotide
  Sense strand starting at position 816 of SEQ ID NO: 913517
aaagguaaugacuguauga

SEQ ID NO: 933367 - RNA, 19 nt, Artificial Sequence
  Description of Artificial Sequence: Synthetic oligonucleotide
  Antisense strand to SEQ ID NO: 933366
ucauacagucauuaccuuu

SEQ ID NO: 933368 - RNA, 19 nt, Artificial Sequence
  Description of Artificial Sequence: Synthetic oligonucleotide
  Sense strand starting at position 2753 of SEQ ID NO: 913517
gaugguucugaacauucuu

SEQ ID NO: 933369 - RNA, 19 nt, Artificial Sequence
  Description of Artificial Sequence: Synthetic oligonucleotide
  Antisense strand to SEQ ID NO: 933368
aagaauguucagaaccauc

SEQ ID NO: 933370 - RNA, 19 nt, Artificial Sequence
  Description of Artificial Sequence: Synthetic oligonucleotide
  Sense strand starting at position 3376 of SEQ ID NO: 913517
cuagaagugagucaaaguc

SEQ ID NO: 933371 - RNA, 19 nt, Artificial Sequence
  Description of Artificial Sequence: Synthetic oligonucleotide
  Antisense strand to SEQ ID NO: 933370
gacuuugacucacuucuag

SEQ ID NO: 933372 - RNA, 19 nt, Artificial Sequence
  Description of Artificial Sequence: Synthetic oligonucleotide
  Sense strand starting at position 2680 of SEQ ID NO: 913517
gaucauauuugcguauuau

SEQ ID NO: 933373 - RNA, 19 nt, Artificial Sequence
  Description of Artificial Sequence: Synthetic oligonucleotide
  Antisense strand to SEQ ID NO: 933372
auaauacgcaaauaugauc

SEQ ID NO: 933374 - RNA, 19 nt, Artificial Sequence
  Description of Artificial Sequence: Synthetic oligonucleotide
  Sense strand starting at position 2222 of SEQ ID NO: 913517
gaggaucuguauucccaaa

SEQ ID NO: 933375 - RNA, 19 nt, Artificial Sequence
  Description of Artificial Sequence: Synthetic oligonucleotide
  Antisense strand to SEQ ID NO: 933374
uuugggaauacagauccuc

SEQ ID NO: 933376 - RNA, 19 nt, Artificial Sequence
  Description of Artificial Sequence: Synthetic oligonucleotide
  Sense strand starting at position 2678 of SEQ ID NO: 913517
uggaucauauuugcguauu

SEQ ID NO: 933377 - RNA, 19 nt, Artificial Sequence
  Description of Artificial Sequence: Synthetic oligonucleotide
  Antisense strand to SEQ ID NO: 933376
aauacgcaaauaugaucca

SEQ ID NO: 933378 - RNA, 19 nt, Artificial Sequence
  Description of Artificial Sequence: Synthetic oligonucleotide
  Sense strand starting at position 772 of SEQ ID NO: 913517
auuacauguguauaaggua

SEQ ID NO: 933379 - RNA, 19 nt, Artificial Sequence
  Description of Artificial Sequence: Synthetic oligonucleotide
  Antisense strand to SEQ ID NO: 933378
uaccuuauacacauguaau

SEQ ID NO: 933380 - RNA, 19 nt, Artificial Sequence
  Description of Artificial Sequence: Synthetic oligonucleotide
  Sense strand starting at position 1724 of SEQ ID NO: 913517
aauuguacuggugauccau

SEQ ID NO: 933381 - RNA, 19 nt, Artificial Sequence
  Description of Artificial Sequence: Synthetic oligonucleotide
  Antisense strand to SEQ ID NO: 933380
auggaucaccaguacaauu

SEQ ID NO: 933382 - RNA, 19 nt, Artificial Sequence
  Description of Artificial Sequence: Synthetic oligonucleotide
  Sense strand starting at position 2677 of SEQ ID NO: 913517
uuggaucauauuugcguau

SEQ ID NO: 933383 - RNA, 19 nt, Artificial Sequence
  Description of Artificial Sequence: Synthetic oligonucleotide
  Antisense strand to SEQ ID NO: 933382
auacgcaaauaugauccaa

SEQ ID NO: 933384 - RNA, 19 nt, Artificial Sequence
  Description of Artificial Sequence: Synthetic oligonucleotide
  Sense strand starting at position 2151 of SEQ ID NO: 913517
ccaagugucauggaagcaa

SEQ ID NO: 933385 - RNA, 19 nt, Artificial Sequence
  Description of Artificial Sequence: Synthetic oligonucleotide
  Antisense strand to SEQ ID NO: 933384
uugcuuccaugacacuugg

SEQ ID NO: 933386 - RNA, 19 nt, Artificial Sequence
  Description of Artificial Sequence: Synthetic oligonucleotide
  Sense strand starting at position 3941 of SEQ ID NO: 913517
ugaggauucugaguccuga

SEQ ID NO: 933387 - RNA, 19 nt, Artificial Sequence
  Description of Artificial Sequence: Synthetic oligonucleotide
  Antisense strand to SEQ ID NO: 933386
ucaggacucagaauccuca

SEQ ID NO: 933388 - RNA, 19 nt, Artificial Sequence
  Description of Artificial Sequence: Synthetic oligonucleotide
  Sense strand starting at position 1673 of SEQ ID NO: 913517
aaguccguaagugaugaaa

SEQ ID NO: 933389 - RNA, 19 nt, Artificial Sequence
  Description of Artificial Sequence: Synthetic oligonucleotide
  Antisense strand to SEQ ID NO: 933388
uuucaucacuuacggacuu

SEQ ID NO: 933390 - RNA, 19 nt, Artificial Sequence
  Description of Artificial Sequence: Synthetic oligonucleotide
  Sense strand starting at position 1312 of SEQ ID NO: 913517
gccguauugcugccacaua

SEQ ID NO: 933391 - RNA, 19 nt, Artificial Sequence
  Description of Artificial Sequence: Synthetic oligonucleotide
  Antisense strand to SEQ ID NO: 933390
uauguggcagcaauacggc

SEQ ID NO: 933392 - RNA, 19 nt, Artificial Sequence
  Description of Artificial Sequence: Synthetic oligonucleotide
  Sense strand starting at position 2497 of SEQ ID NO: 913517
uucuuuacucauuagugau

SEQ ID NO: 933393 - RNA, 19 nt, Artificial Sequence
  Description of Artificial Sequence: Synthetic oligonucleotide
  Antisense strand to SEQ ID NO: 933392
aucacuaaugaguaaagaa

SEQ ID NO: 933394 - RNA, 19 nt, Artificial Sequence
  Description of Artificial Sequence: Synthetic oligonucleotide
  Sense strand starting at position 2552 of SEQ ID NO: 913517
aggguaaaccuuugucaaa

SEQ ID NO: 933395 - RNA, 19 nt, Artificial Sequence
  Description of Artificial Sequence: Synthetic oligonucleotide
  Antisense strand to SEQ ID NO: 933394
uuugacaaagguuuacccu

SEQ ID NO: 933396 - RNA, 19 nt, Artificial Sequence
  Description of Artificial Sequence: Synthetic oligonucleotide
  Sense strand starting at position 2871 of SEQ ID NO: 913517
aucauuucuugagaugaua

SEQ ID NO: 933397 - RNA, 19 nt, Artificial Sequence
  Description of Artificial Sequence: Synthetic oligonucleotide
  Antisense strand to SEQ ID NO: 933396
uaucaucucaagaaaugau

SEQ ID NO: 933398 - RNA, 19 nt, Artificial Sequence
  Description of Artificial Sequence: Synthetic oligonucleotide
  Sense strand starting at position 3104 of SEQ ID NO: 913517
cguuauuguaacuagauga

SEQ ID NO: 933399 - RNA, 19 nt, Artificial Sequence
  Description of Artificial Sequence: Synthetic oligonucleotide
  Antisense strand to SEQ ID NO: 933398
ucaucuaguuacaauaacg

SEQ ID NO: 933400 - RNA, 19 nt, Artificial Sequence
  Description of Artificial Sequence: Synthetic oligonucleotide
  Sense strand starting at position 2743 of SEQ ID NO: 913517
cucugauagagaugguucu

SEQ ID NO: 933401 - RNA, 19 nt, Artificial Sequence
  Description of Artificial Sequence: Synthetic oligonucleotide
  Antisense strand to SEQ ID NO: 933400
agaaccaucucuaucagag

SEQ ID NO: 933402 - RNA, 19 nt, Artificial Sequence
  Description of Artificial Sequence: Synthetic oligonucleotide
  Sense strand starting at position 186 of SEQ ID NO: 913517
agggcucuccuugacaagu

SEQ ID NO: 933403 - RNA, 19 nt, Artificial Sequence
  Description of Artificial Sequence: Synthetic oligonucleotide
  Antisense strand to SEQ ID NO: 933402
acuugucaaggagagcccu

SEQ ID NO: 933404 - RNA, 19 nt, Artificial Sequence
  Description of Artificial Sequence: Synthetic oligonucleotide
  Sense strand starting at position 1311 of SEQ ID NO: 913517
ugccguauugcugccacau

SEQ ID NO: 933405 - RNA, 19 nt, Artificial Sequence
  Description of Artificial Sequence: Synthetic oligonucleotide
  Antisense strand to SEQ ID NO: 933404
auguggcagcaauacggca

SEQ ID NO: 933406 - RNA, 19 nt, Artificial Sequence
  Description of Artificial Sequence: Synthetic oligonucleotide
  Sense strand starting at position 720 of SEQ ID NO: 913517
agagcuagugucuaggacu

SEQ ID NO: 933407 - RNA, 19 nt, Artificial Sequence
  Description of Artificial Sequence: Synthetic oligonucleotide
  Antisense strand to SEQ ID NO: 933406
aguccuagacacuagcucu

SEQ ID NO: 933408 - RNA, 19 nt, Artificial Sequence
  Description of Artificial Sequence: Synthetic oligonucleotide
  Sense strand starting at position 2554 of SEQ ID NO: 913517
gguaaaccuuugucaaaug

SEQ ID NO: 933409 - RNA, 19 nt, Artificial Sequence
  Description of Artificial Sequence: Synthetic oligonucleotide
  Antisense strand to SEQ ID NO: 933408
cauuugacaaagguuuacc

SEQ ID NO: 933410 - RNA, 19 nt, Artificial Sequence
  Description of Artificial Sequence: Synthetic oligonucleotide
  Sense strand starting at position 2553 of SEQ ID NO: 913517
ggguaaaccuuugucaaau

SEQ ID NO: 933411 - RNA, 19 nt, Artificial Sequence
  Description of Artificial Sequence: Synthetic oligonucleotide
  Antisense strand to SEQ ID NO: 933410
auuugacaaagguuuaccc

SEQ ID NO: 933412 - RNA, 19 nt, Artificial Sequence
  Description of Artificial Sequence: Synthetic oligonucleotide
  Sense strand starting at position 3880 of SEQ ID NO: 913517
gcucuaaaggcugaggagu

SEQ ID NO: 933413 - RNA, 19 nt, Artificial Sequence
  Description of Artificial Sequence: Synthetic oligonucleotide
  Antisense strand to SEQ ID NO: 933412
acuccucagccuuuagagc

SEQ ID NO: 933414 - RNA, 19 nt, Artificial Sequence
  Description of Artificial Sequence: Synthetic oligonucleotide
  Sense strand starting at position 2796 of SEQ ID NO: 913517
cacucuguugaaugguaaa

SEQ ID NO: 933415 - RNA, 19 nt, Artificial Sequence
  Description of Artificial Sequence: Synthetic oligonucleotide
  Antisense strand to SEQ ID NO: 933414
uuuaccauucaacagagug

SEQ ID NO: 933416 - RNA, 19 nt, Artificial Sequence
  Description of Artificial Sequence: Synthetic oligonucleotide
  Sense strand starting at position 2436 of SEQ ID NO: 913517
cuucuagaaguuugacgaa

SEQ ID NO: 933417 - RNA, 19 nt, Artificial Sequence
  Description of Artificial Sequence: Synthetic oligonucleotide
  Antisense strand to SEQ ID NO: 933416
uucgucaaacuucuagaag

SEQ ID NO: 933418 - RNA, 19 nt, Artificial Sequence
  Description of Artificial Sequence: Synthetic oligonucleotide
  Sense strand starting at position 1216 of SEQ ID NO: 913517
auagaugccacuugugaag

SEQ ID NO: 933419 - RNA, 19 nt, Artificial Sequence
  Description of Artificial Sequence: Synthetic oligonucleotide
  Antisense strand to SEQ ID NO: 933418
cuucacaaguggcaucuau

SEQ ID NO: 933420 - RNA, 19 nt, Artificial Sequence
  Description of Artificial Sequence: Synthetic oligonucleotide
  Sense strand starting at position 3384 of SEQ ID NO: 913517
gagucaaagucugugaaug

SEQ ID NO: 933421 - RNA, 19 nt, Artificial Sequence
  Description of Artificial Sequence: Synthetic oligonucleotide
  Antisense strand to SEQ ID NO: 933420
cauucacagacuuugacuc

SEQ ID NO: 933422 - RNA, 19 nt, Artificial Sequence
  Description of Artificial Sequence: Synthetic oligonucleotide
  Sense strand starting at position 299 of SEQ ID NO: 913517
cgugcauagagauaguuga

SEQ ID NO: 933423 - RNA, 19 nt, Artificial Sequence
  Description of Artificial Sequence: Synthetic oligonucleotide
  Antisense strand to SEQ ID NO: 933422
ucaacuaucucuaugcacg

SEQ ID NO: 933424 - RNA, 19 nt, Artificial Sequence
  Description of Artificial Sequence: Synthetic oligonucleotide
  Sense strand starting at position 2035 of SEQ ID NO: 913517
ugaacuuuggucuggagua

SEQ ID NO: 933425 - RNA, 19 nt, Artificial Sequence
  Description of Artificial Sequence: Synthetic oligonucleotide
  Antisense strand to SEQ ID NO: 933424
uacuccagaccaaaguuca

SEQ ID NO: 933426 - RNA, 19 nt, Artificial Sequence
  Description of Artificial Sequence: Synthetic oligonucleotide
  Sense strand starting at position 1353 of SEQ ID NO: 913517
ucaacuugguagguauuau

SEQ ID NO: 933427 - RNA, 19 nt, Artificial Sequence
  Description of Artificial Sequence: Synthetic oligonucleotide
  Antisense strand to SEQ ID NO: 933426
auaauaccuaccaaguuga

SEQ ID NO: 933428 - RNA, 19 nt, Artificial Sequence
  Description of Artificial Sequence: Synthetic oligonucleotide
  Sense strand starting at position 3585 of SEQ ID NO: 913517
gggacagaauuucaguagu

SEQ ID NO: 933429 - RNA, 19 nt, Artificial Sequence
  Description of Artificial Sequence: Synthetic oligonucleotide
  Antisense strand to SEQ ID NO: 933428
acuacugaaauucuguccc

SEQ ID NO: 933430 - RNA, 19 nt, Artificial Sequence
  Description of Artificial Sequence: Synthetic oligonucleotide
  Sense strand starting at position 572 of SEQ ID NO: 913517
ccugaaaggcuauggcaau

SEQ ID NO: 933431 - RNA, 19 nt, Artificial Sequence
  Description of Artificial Sequence: Synthetic oligonucleotide
  Antisense strand to SEQ ID NO: 933430
auugccauagccuuucagg

SEQ ID NO: 933432 - RNA, 19 nt, Artificial Sequence
  Description of Artificial Sequence: Synthetic oligonucleotide
  Sense strand starting at position 1982 of SEQ ID NO: 913517
gguuaugcuaauggacauu

SEQ ID NO: 933433 - RNA, 19 nt, Artificial Sequence
  Description of Artificial Sequence: Synthetic oligonucleotide
  Antisense strand to SEQ ID NO: 933432
aauguccauuagcauaacc

SEQ ID NO: 933434 - RNA, 19 nt, Artificial Sequence
  Description of Artificial Sequence: Synthetic oligonucleotide
  Sense strand starting at position 3075 of SEQ ID NO: 913517
uguggaacuagcugaucau

SEQ ID NO: 933435 - RNA, 19 nt, Artificial Sequence
  Description of Artificial Sequence: Synthetic oligonucleotide
  Antisense strand to SEQ ID NO: 933434
augaucagcuaguuccaca

SEQ ID NO: 933436 - RNA, 19 nt, Artificial Sequence
  Description of Artificial Sequence: Synthetic oligonucleotide
  Sense strand starting at position 73 of SEQ ID NO: 913518
gugguuaggaaaggauaau

SEQ ID NO: 933437 - RNA, 19 nt, Artificial Sequence
  Description of Artificial Sequence: Synthetic oligonucleotide
  Antisense strand to SEQ ID NO: 933436
auuauccuuuccuaaccac

SEQ ID NO: 933438 - RNA, 19 nt, Artificial Sequence
  Description of Artificial Sequence: Synthetic oligonucleotide
  Sense strand starting at position 2242 of SEQ ID NO: 913518
ccgaauguccaucaauaag

SEQ ID NO: 933439 - RNA, 19 nt, Artificial Sequence
  Description of Artificial Sequence: Synthetic oligonucleotide
  Antisense strand to SEQ ID NO: 933438
cuuauugauggacauucgg

SEQ ID NO: 933440 - RNA, 19 nt, Artificial Sequence
  Description of Artificial Sequence: Synthetic oligonucleotide
  Sense strand starting at position 3825 of SEQ ID NO: 913518
aucauaagucuguauuaca

SEQ ID NO: 933441 - RNA, 19 nt, Artificial Sequence
  Description of Artificial Sequence: Synthetic oligonucleotide
  Antisense strand to SEQ ID NO: 933440
uguaauacagacuuaugau

SEQ ID NO: 933442 - RNA, 19 nt, Artificial Sequence
  Description of Artificial Sequence: Synthetic oligonucleotide
  Sense strand starting at position 3195 of SEQ ID NO: 913518
gauguaugugaccaucacu

SEQ ID NO: 933443 - RNA, 19 nt, Artificial Sequence
  Description of Artificial Sequence: Synthetic oligonucleotide
  Antisense strand to SEQ ID NO: 933442
agugauggucacauacauc

SEQ ID NO: 933444 - RNA, 19 nt, Artificial Sequence
  Description of Artificial Sequence: Synthetic oligonucleotide
  Sense strand starting at position 3750 of SEQ ID NO: 913518
uuaauaaaguggcuaugaa

SEQ ID NO: 933445 - RNA, 19 nt, Artificial Sequence
  Description of Artificial Sequence: Synthetic oligonucleotide
  Antisense strand to SEQ ID NO: 933444
uucauagccacuuuauuaa

SEQ ID NO: 933446 - RNA, 19 nt, Artificial Sequence
  Description of Artificial Sequence: Synthetic oligonucleotide
  Sense strand starting at position 3481 of SEQ ID NO: 913518
ucuuauccucugggaacua

SEQ ID NO: 933447 - RNA, 19 nt, Artificial Sequence
  Description of Artificial Sequence: Synthetic oligonucleotide
  Antisense strand to SEQ ID NO: 933446
uaguucccagaggauaaga

SEQ ID NO: 933448 - RNA, 19 nt, Artificial Sequence
  Description of Artificial Sequence: Synthetic oligonucleotide
  Sense strand starting at position 3187 of SEQ ID NO: 913518
cauguauggauguauguga

SEQ ID NO: 933449 - RNA, 19 nt, Artificial Sequence
  Description of Artificial Sequence: Synthetic oligonucleotide
  Antisense strand to SEQ ID NO: 933448
ucacauacauccauacaug

SEQ ID NO: 933450 - RNA, 19 nt, Artificial Sequence
  Description of Artificial Sequence: Synthetic oligonucleotide
  Sense strand starting at position 40 of SEQ ID NO: 913518
gagagaaauugcuuugggu

SEQ ID NO: 933451 - RNA, 19 nt, Artificial Sequence
  Description of Artificial Sequence: Synthetic oligonucleotide
  Antisense strand to SEQ ID NO: 933450
acccaaagcaauuucucuc

SEQ ID NO: 933452 - RNA, 19 nt, Artificial Sequence
  Description of Artificial Sequence: Synthetic oligonucleotide
  Sense strand starting at position 2281 of SEQ ID NO: 913518
accacugugcaauggaaua

SEQ ID NO: 933453 - RNA, 19 nt, Artificial Sequence
  Description of Artificial Sequence: Synthetic oligonucleotide
  Antisense strand to SEQ ID NO: 933452
uauuccauugcacaguggu

SEQ ID NO: 933454 - RNA, 19 nt, Artificial Sequence
  Description of Artificial Sequence: Synthetic oligonucleotide
  Sense strand starting at position 2327 of SEQ ID NO: 913518
ggaucuguuguauauguga

SEQ ID NO: 933455 - RNA, 19 nt, Artificial Sequence
  Description of Artificial Sequence: Synthetic oligonucleotide
  Antisense strand to SEQ ID NO: 933454
ucacauauacaacagaucc

SEQ ID NO: 933456 - RNA, 19 nt, Artificial Sequence
  Description of Artificial Sequence: Synthetic oligonucleotide
  Sense strand starting at position 3141 of SEQ ID NO: 913518
uugauauugguguaaugug

SEQ ID NO: 933457 - RNA, 19 nt, Artificial Sequence
  Description of Artificial Sequence: Synthetic oligonucleotide
  Antisense strand to SEQ ID NO: 933456
cacauuacaccaauaucaa

SEQ ID NO: 933458 - RNA, 19 nt, Artificial Sequence
  Description of Artificial Sequence: Synthetic oligonucleotide
  Sense strand starting at position 3194 of SEQ ID NO: 913518
ggauguaugugaccaucac

SEQ ID NO: 933459 - RNA, 19 nt, Artificial Sequence
  Description of Artificial Sequence: Synthetic oligonucleotide
  Antisense strand to SEQ ID NO: 933458
gugauggucacauacaucc

SEQ ID NO: 933460 - RNA, 19 nt, Artificial Sequence
  Description of Artificial Sequence: Synthetic oligonucleotide
  Sense strand starting at position 42 of SEQ ID NO: 913518
gagaaauugcuuuggguac

SEQ ID NO: 933461 - RNA, 19 nt, Artificial Sequence
  Description of Artificial Sequence: Synthetic oligonucleotide
  Antisense strand to SEQ ID NO: 933460
guacccaaagcaauuucuc

SEQ ID NO: 933462 - RNA, 19 nt, Artificial Sequence
  Description of Artificial Sequence: Synthetic oligonucleotide
  Sense strand starting at position 3137 of SEQ ID NO: 913518
gaaguugauauugguguaa

SEQ ID NO: 933463 - RNA, 19 nt, Artificial Sequence
  Description of Artificial Sequence: Synthetic oligonucleotide
  Antisense strand to SEQ ID NO: 933462
uuacaccaauaucaacuuc

SEQ ID NO: 933464 - RNA, 19 nt, Artificial Sequence
  Description of Artificial Sequence: Synthetic oligonucleotide
  Sense strand starting at position 2235 of SEQ ID NO: 913518
uuaagauccgaauguccau

SEQ ID NO: 933465 - RNA, 19 nt, Artificial Sequence
  Description of Artificial Sequence: Synthetic oligonucleotide
  Antisense strand to SEQ ID NO: 933464
auggacauucggaucuuaa

SEQ ID NO: 933466 - RNA, 19 nt, Artificial Sequence
  Description of Artificial Sequence: Synthetic oligonucleotide
  Sense strand starting at position 2274 of SEQ ID NO: 913518
aagugaaaccacugugcaa

SEQ ID NO: 933467 - RNA, 19 nt, Artificial Sequence
  Description of Artificial Sequence: Synthetic oligonucleotide
  Antisense strand to SEQ ID NO: 933466
uugcacagugguuucacuu

SEQ ID NO: 933468 - RNA, 19 nt, Artificial Sequence
  Description of Artificial Sequence: Synthetic oligonucleotide
  Sense strand starting at position 3673 of SEQ ID NO: 913518
ccauuauauggauguguca

SEQ ID NO: 933469 - RNA, 19 nt, Artificial Sequence
  Description of Artificial Sequence: Synthetic oligonucleotide
  Antisense strand to SEQ ID NO: 933468
ugacacauccauauaaugg

SEQ ID NO: 933470 - RNA, 19 nt, Artificial Sequence
  Description of Artificial Sequence: Synthetic oligonucleotide
  Sense strand starting at position 3198 of SEQ ID NO: 913518
guaugugaccaucacugca

SEQ ID NO: 933471 - RNA, 19 nt, Artificial Sequence
  Description of Artificial Sequence: Synthetic oligonucleotide
  Antisense strand to SEQ ID NO: 933470
ugcagugauggucacauac

SEQ ID NO: 933472 - RNA, 19 nt, Artificial Sequence
  Description of Artificial Sequence: Synthetic oligonucleotide
  Sense strand starting at position 3815 of SEQ ID NO: 913518
ggguaaauuuaucauaagu

SEQ ID NO: 933473 - RNA, 19 nt, Artificial Sequence
  Description of Artificial Sequence: Synthetic oligonucleotide
  Antisense strand to SEQ ID NO: 933472
acuuaugauaaauuuaccc

SEQ ID NO: 933474 - RNA, 19 nt, Artificial Sequence
  Description of Artificial Sequence: Synthetic oligonucleotide
  Sense strand starting at position 66 of SEQ ID NO: 913518
gccucacgugguuaggaaa

SEQ ID NO: 933475 - RNA, 19 nt, Artificial Sequence
  Description of Artificial Sequence: Synthetic oligonucleotide
  Antisense strand to SEQ ID NO: 933474
uuuccuaaccacgugaggc

SEQ ID NO: 933476 - RNA, 19 nt, Artificial Sequence
  Description of Artificial Sequence: Synthetic oligonucleotide
  Sense strand starting at position 2019 of SEQ ID NO: 913518
acuccuacccggcaguaau

SEQ ID NO: 933477 - RNA, 19 nt, Artificial Sequence
  Description of Artificial Sequence: Synthetic oligonucleotide
  Antisense strand to SEQ ID NO: 933476
auuacugccggguaggagu

SEQ ID NO: 933478 - RNA, 19 nt, Artificial Sequence
  Description of Artificial Sequence: Synthetic oligonucleotide
  Sense strand starting at position 2231 of SEQ ID NO: 913518
uuaguuaagauccgaaugu

SEQ ID NO: 933479 - RNA, 19 nt, Artificial Sequence
  Description of Artificial Sequence: Synthetic oligonucleotide
  Antisense strand to SEQ ID NO: 933478
acauucggaucuuaacuaa

SEQ ID NO: 933480 - RNA, 19 nt, Artificial Sequence
  Description of Artificial Sequence: Synthetic oligonucleotide
  Sense strand starting at position 2060 of SEQ ID NO: 913518
cccauuggcccgggaaauu

SEQ ID NO: 933481 - RNA, 19 nt, Artificial Sequence
  Description of Artificial Sequence: Synthetic oligonucleotide
  Antisense strand to SEQ ID NO: 933480
aauuucccgggccaauggg

SEQ ID NO: 933482 - RNA, 19 nt, Artificial Sequence
  Description of Artificial Sequence: Synthetic oligonucleotide
  Sense strand starting at position 3150 of SEQ ID NO: 913518
guguaauguguguauauag

SEQ ID NO: 933483 - RNA, 19 nt, Artificial Sequence
  Description of Artificial Sequence: Synthetic oligonucleotide
  Antisense strand to SEQ ID NO: 933482
cuauauacacacauuacac

SEQ ID NO: 933484 - RNA, 19 nt, Artificial Sequence
  Description of Artificial Sequence: Synthetic oligonucleotide
  Sense strand starting at position 2329 of SEQ ID NO: 913518
aucuguuguauaugugaua

SEQ ID NO: 933485 - RNA, 19 nt, Artificial Sequence
  Description of Artificial Sequence: Synthetic oligonucleotide
  Antisense strand to SEQ ID NO: 933484
uaucacauauacaacagau

SEQ ID NO: 933486 - RNA, 19 nt, Artificial Sequence
  Description of Artificial Sequence: Synthetic oligonucleotide
  Sense strand starting at position 3479 of SEQ ID NO: 913518
cgucuuauccucugggaac

SEQ ID NO: 933487 - RNA, 19 nt, Artificial Sequence
  Description of Artificial Sequence: Synthetic oligonucleotide
  Antisense strand to SEQ ID NO: 933486
guucccagaggauaagacg

SEQ ID NO: 933488 - RNA, 19 nt, Artificial Sequence
  Description of Artificial Sequence: Synthetic oligonucleotide
  Sense strand starting at position 9 of SEQ ID NO: 913518
uagagucuuccuuggguuu

SEQ ID NO: 933489 - RNA, 19 nt, Artificial Sequence
  Description of Artificial Sequence: Synthetic oligonucleotide
  Antisense strand to SEQ ID NO: 933488
aaacccaaggaagacucua

SEQ ID NO: 933490 - RNA, 19 nt, Artificial Sequence
  Description of Artificial Sequence: Synthetic oligonucleotide
  Sense strand starting at position 7 of SEQ ID NO: 913518
gguagagucuuccuugggu

SEQ ID NO: 933491 - RNA, 19 nt, Artificial Sequence
  Description of Artificial Sequence: Synthetic oligonucleotide
  Antisense strand to SEQ ID NO: 933490
acccaaggaagacucuacc

SEQ ID NO: 933492 - RNA, 19 nt, Artificial Sequence
  Description of Artificial Sequence: Synthetic oligonucleotide
  Sense strand starting at position 2199 of SEQ ID NO: 913518
guaaacauuucuggauuau

SEQ ID NO: 933493 - RNA, 19 nt, Artificial Sequence
  Description of Artificial Sequence: Synthetic oligonucleotide
  Antisense strand to SEQ ID NO: 933492
auaauccagaaauguuuac

SEQ ID NO: 933494 - RNA, 19 nt, Artificial Sequence
  Description of Artificial Sequence: Synthetic oligonucleotide
  Sense strand starting at position 2198 of SEQ ID NO: 913518
uguaaacauuucuggauua

SEQ ID NO: 933495 - RNA, 19 nt, Artificial Sequence
  Description of Artificial Sequence: Synthetic oligonucleotide
  Antisense strand to SEQ ID NO: 933494
uaauccagaaauguuuaca

SEQ ID NO: 933496 - RNA, 19 nt, Artificial Sequence
  Description of Artificial Sequence: Synthetic oligonucleotide
  Sense strand starting at position 3477 of SEQ ID NO: 913518
uucgucuuauccucuggga

SEQ ID NO: 933497 - RNA, 19 nt, Artificial Sequence
  Description of Artificial Sequence: Synthetic oligonucleotide
  Antisense strand to SEQ ID NO: 933496
ucccagaggauaagacgaa

SEQ ID NO: 933498 - RNA, 19 nt, Artificial Sequence
  Description of Artificial Sequence: Synthetic oligonucleotide
  Sense strand starting at position 3356 of SEQ ID NO: 913518
uguacuguucuaugaaugu

SEQ ID NO: 933499 - RNA, 19 nt, Artificial Sequence
  Description of Artificial Sequence: Synthetic oligonucleotide
  Antisense strand to SEQ ID NO: 933498
acauucauagaacaguaca

SEQ ID NO: 933500 - RNA, 19 nt, Artificial Sequence
  Description of Artificial Sequence: Synthetic oligonucleotide
  Sense strand starting at position 3616 of SEQ ID NO: 913518
ucaucuauguuguugugau

SEQ ID NO: 933501 - RNA, 19 nt, Artificial Sequence
  Description of Artificial Sequence: Synthetic oligonucleotide
  Antisense strand to SEQ ID NO: 933500
aucacaacaacauagauga

SEQ ID NO: 933502 - RNA, 19 nt, Artificial Sequence
  Description of Artificial Sequence: Synthetic oligonucleotide
  Sense strand starting at position 3253 of SEQ ID NO: 913518
gggagacuuucuuauuaaa

SEQ ID NO: 933503 - RNA, 19 nt, Artificial Sequence
  Description of Artificial Sequence: Synthetic oligonucleotide
  Antisense strand to SEQ ID NO: 933502
uuuaauaagaaagucuccc

SEQ ID NO: 933504 - RNA, 19 nt, Artificial Sequence
  Description of Artificial Sequence: Synthetic oligonucleotide
  Sense strand starting at position 2070 of SEQ ID NO: 913518
cgggaaauuucccagcuuu

SEQ ID NO: 933505 - RNA, 19 nt, Artificial Sequence
  Description of Artificial Sequence: Synthetic oligonucleotide
  Antisense strand to SEQ ID NO: 933504
aaagcugggaaauuucccg

SEQ ID NO: 933506 - RNA, 19 nt, Artificial Sequence
  Description of Artificial Sequence: Synthetic oligonucleotide
  Sense strand starting at position 3149 of SEQ ID NO: 913518
gguguaauguguguauaua

SEQ ID NO: 933507 - RNA, 19 nt, Artificial Sequence
  Description of Artificial Sequence: Synthetic oligonucleotide
  Antisense strand to SEQ ID NO: 933506
uauauacacacauuacacc

SEQ ID NO: 933508 - RNA, 19 nt, Artificial Sequence
  Description of Artificial Sequence: Synthetic oligonucleotide
  Sense strand starting at position 3763 of SEQ ID NO: 913518
uaugaacauuugugugaug

SEQ ID NO: 933509 - RNA, 19 nt, Artificial Sequence
  Description of Artificial Sequence: Synthetic oligonucleotide
  Antisense strand to SEQ ID NO: 933508
caucacacaaauguucaua

SEQ ID NO: 933510 - RNA, 19 nt, Artificial Sequence
  Description of Artificial Sequence: Synthetic oligonucleotide
  Sense strand starting at position 3688 of SEQ ID NO: 913518
gucacuguuuguuuaucca

SEQ ID NO: 933511 - RNA, 19 nt, Artificial Sequence
  Description of Artificial Sequence: Synthetic oligonucleotide
  Antisense strand to SEQ ID NO: 933510
uggauaaacaaacagugac

SEQ ID NO: 933512 - RNA, 19 nt, Artificial Sequence
  Description of Artificial Sequence: Synthetic oligonucleotide
  Sense strand starting at position 3157 of SEQ ID NO: 913518
guguguauauaguucucua

SEQ ID NO: 933513 - RNA, 19 nt, Artificial Sequence
  Description of Artificial Sequence: Synthetic oligonucleotide
  Antisense strand to SEQ ID NO: 933512
uagagaacuauauacacac

SEQ ID NO: 933514 - RNA, 19 nt, Artificial Sequence
  Description of Artificial Sequence: Synthetic oligonucleotide
  Sense strand starting at position 3449 of SEQ ID NO: 913518
guccuauuguauguaguca

SEQ ID NO: 933515 - RNA, 19 nt, Artificial Sequence
  Description of Artificial Sequence: Synthetic oligonucleotide
  Antisense strand to SEQ ID NO: 933514
ugacuacauacaauaggac

SEQ ID NO: 933516 - RNA, 19 nt, Artificial Sequence
  Description of Artificial Sequence: Synthetic oligonucleotide
  Sense strand starting at position 183 of SEQ ID NO: 913519
agagcaagccaaugaaaga

SEQ ID NO: 933517 - RNA, 19 nt, Artificial Sequence
  Description of Artificial Sequence: Synthetic oligonucleotide
  Antisense strand to SEQ ID NO: 933516
ucuuucauuggcuugcucu

SEQ ID NO: 933518 - RNA, 19 nt, Artificial Sequence
  Description of Artificial Sequence: Synthetic oligonucleotide
  Sense strand starting at position 3655 of SEQ ID NO: 913519
gaucuuguccaugagauuc

SEQ ID NO: 933519 - RNA, 19 nt, Artificial Sequence
  Description of Artificial Sequence: Synthetic oligonucleotide
  Antisense strand to SEQ ID NO: 933518
gaaucucauggacaagauc

SEQ ID NO: 933520 - RNA, 19 nt, Artificial Sequence
  Description of Artificial Sequence: Synthetic oligonucleotide
  Sense strand starting at position 3652 of SEQ ID NO: 913519
agugaucuuguccaugaga

SEQ ID NO: 933521 - RNA, 19 nt, Artificial Sequence
  Description of Artificial Sequence: Synthetic oligonucleotide
  Antisense strand to SEQ ID NO: 933520
ucucauggacaagaucacu

SEQ ID NO: 933522 - RNA, 19 nt, Artificial Sequence
  Description of Artificial Sequence: Synthetic oligonucleotide
  Sense strand starting at position 103 of SEQ ID NO: 913519
aggagaaaucccggucaac

SEQ ID NO: 933523 - RNA, 19 nt, Artificial Sequence
  Description of Artificial Sequence: Synthetic oligonucleotide
  Antisense strand to SEQ ID NO: 933522
guugaccgggauuucuccu

SEQ ID NO: 933524 - RNA, 19 nt, Artificial Sequence
  Description of Artificial Sequence: Synthetic oligonucleotide
  Sense strand starting at position 2265 of SEQ ID NO: 913519
ucgagagccagucaaagau

SEQ ID NO: 933525 - RNA, 19 nt, Artificial Sequence
  Description of Artificial Sequence: Synthetic oligonucleotide
  Antisense strand to SEQ ID NO: 933524
aucuuugacuggcucucga

SEQ ID NO: 933526 - RNA, 19 nt, Artificial Sequence
  Description of Artificial Sequence: Synthetic oligonucleotide
  Sense strand starting at position 2911 of SEQ ID NO: 913519
cuguauucccagcaggaau

SEQ ID NO: 933527 - RNA, 19 nt, Artificial Sequence
  Description of Artificial Sequence: Synthetic oligonucleotide
  Antisense strand to SEQ ID NO: 933526
auuccugcugggaauacag

SEQ ID NO: 933528 - RNA, 19 nt, Artificial Sequence
  Description of Artificial Sequence: Synthetic oligonucleotide
  Sense strand starting at position 2980 of SEQ ID NO: 913519
agaggcucauucuuaauca

SEQ ID NO: 933529 - RNA, 19 nt, Artificial Sequence
  Description of Artificial Sequence: Synthetic oligonucleotide
  Antisense strand to SEQ ID NO: 933528
ugauuaagaaugagccucu

SEQ ID NO: 933530 - RNA, 19 nt, Artificial Sequence
  Description of Artificial Sequence: Synthetic oligonucleotide
  Sense strand starting at position 3651 of SEQ ID NO: 913519
aagugaucuuguccaugag

SEQ ID NO: 933531 - RNA, 19 nt, Artificial Sequence
  Description of Artificial Sequence: Synthetic oligonucleotide
  Antisense strand to SEQ ID NO: 933530
cucauggacaagaucacuu

SEQ ID NO: 933532 - RNA, 19 nt, Artificial Sequence
  Description of Artificial Sequence: Synthetic oligonucleotide
  Sense strand starting at position 3019 of SEQ ID NO: 913519
ggucuuaggucacucaaga

SEQ ID NO: 933533 - RNA, 19 nt, Artificial Sequence
  Description of Artificial Sequence: Synthetic oligonucleotide
  Antisense strand to SEQ ID NO: 933532
ucuugagugaccuaagacc

SEQ ID NO: 933534 - RNA, 19 nt, Artificial Sequence
  Description of Artificial Sequence: Synthetic oligonucleotide
  Sense strand starting at position 3654 of SEQ ID NO: 913519
ugaucuuguccaugagauu

SEQ ID NO: 933535 - RNA, 19 nt, Artificial Sequence
  Description of Artificial Sequence: Synthetic oligonucleotide
  Antisense strand to SEQ ID NO: 933534
aaucucauggacaagauca

SEQ ID NO: 933536 - RNA, 19 nt, Artificial Sequence
  Description of Artificial Sequence: Synthetic oligonucleotide
  Sense strand starting at position 3537 of SEQ ID NO: 913519
aucaaacgucucugauuaa

SEQ ID NO: 933537 - RNA, 19 nt, Artificial Sequence
  Description of Artificial Sequence: Synthetic oligonucleotide
  Antisense strand to SEQ ID NO: 933536
uuaaucagagacguuugau

SEQ ID NO: 933538 - RNA, 19 nt, Artificial Sequence
  Description of Artificial Sequence: Synthetic oligonucleotide
  Sense strand starting at position 3817 of SEQ ID NO: 913519
gaaggagacugauaauaag

SEQ ID NO: 933539 - RNA, 19 nt, Artificial Sequence
  Description of Artificial Sequence: Synthetic oligonucleotide
  Antisense strand to SEQ ID NO: 933538
cuuauuaucagucuccuuc

SEQ ID NO: 933540 - RNA, 19 nt, Artificial Sequence
  Description of Artificial Sequence: Synthetic oligonucleotide
  Sense strand starting at position 2842 of SEQ ID NO: 913519
auauuauugcuaggaguau

SEQ ID NO: 933541 - RNA, 19 nt, Artificial Sequence
  Description of Artificial Sequence: Synthetic oligonucleotide
  Antisense strand to SEQ ID NO: 933540
auacuccuagcaauaauau

SEQ ID NO: 933542 - RNA, 19 nt, Artificial Sequence
  Description of Artificial Sequence: Synthetic oligonucleotide
  Sense strand starting at position 2213 of SEQ ID NO: 913519
ggcgcgugacucuugugua

SEQ ID NO: 933543 - RNA, 19 nt, Artificial Sequence
  Description of Artificial Sequence: Synthetic oligonucleotide
  Antisense strand to SEQ ID NO: 933542
uacacaagagucacgcgcc

SEQ ID NO: 933544 - RNA, 19 nt, Artificial Sequence
  Description of Artificial Sequence: Synthetic oligonucleotide
  Sense strand starting at position 3527 of SEQ ID NO: 913519
uuguaaaugcaucaaacgu

SEQ ID NO: 933545 - RNA, 19 nt, Artificial Sequence
  Description of Artificial Sequence: Synthetic oligonucleotide
  Antisense strand to SEQ ID NO: 933544
acguuugaugcauuuacaa

SEQ ID NO: 933546 - RNA, 19 nt, Artificial Sequence
  Description of Artificial Sequence: Synthetic oligonucleotide
  Sense strand starting at position 2468 of SEQ ID NO: 913519
cucaauucguaggcacaaa

SEQ ID NO: 933547 - RNA, 19 nt, Artificial Sequence
  Description of Artificial Sequence: Synthetic oligonucleotide
  Antisense strand to SEQ ID NO: 933546
uuugugccuacgaauugag

SEQ ID NO: 933548 - RNA, 19 nt, Artificial Sequence
  Description of Artificial Sequence: Synthetic oligonucleotide
  Sense strand starting at position 3600 of SEQ ID NO: 913519
acugaucuuuccucuucga

SEQ ID NO: 933549 - RNA, 19 nt, Artificial Sequence
  Description of Artificial Sequence: Synthetic oligonucleotide
  Antisense strand to SEQ ID NO: 933548
ucgaagaggaaagaucagu

SEQ ID NO: 933550 - RNA, 19 nt, Artificial Sequence
  Description of Artificial Sequence: Synthetic oligonucleotide
  Sense strand starting at position 3554 of SEQ ID NO: 913519
aauuucugguaugaguaau

SEQ ID NO: 933551 - RNA, 19 nt, Artificial Sequence
  Description of Artificial Sequence: Synthetic oligonucleotide
  Antisense strand to SEQ ID NO: 933550
auuacucauaccagaaauu

SEQ ID NO: 933552 - RNA, 19 nt, Artificial Sequence
  Description of Artificial Sequence: Synthetic oligonucleotide
  Sense strand starting at position 3565 of SEQ ID NO: 913519
ugaguaauuucuggaauga

SEQ ID NO: 933553 - RNA, 19 nt, Artificial Sequence
  Description of Artificial Sequence: Synthetic oligonucleotide
  Antisense strand to SEQ ID NO: 933552
ucauuccagaaauuacuca

SEQ ID NO: 933554 - RNA, 19 nt, Artificial Sequence
  Description of Artificial Sequence: Synthetic oligonucleotide
  Sense strand starting at position 3564 of SEQ ID NO: 913519
augaguaauuucuggaaug

SEQ ID NO: 933555 - RNA, 19 nt, Artificial Sequence
  Description of Artificial Sequence: Synthetic oligonucleotide
  Antisense strand to SEQ ID NO: 933554
cauuccagaaauuacucau

SEQ ID NO: 933556 - RNA, 19 nt, Artificial Sequence
  Description of Artificial Sequence: Synthetic oligonucleotide
  Sense strand starting at position 3551 of SEQ ID NO: 913519
auuaauuucugguaugagu

SEQ ID NO: 933557 - RNA, 19 nt, Artificial Sequence
  Description of Artificial Sequence: Synthetic oligonucleotide
  Antisense strand to SEQ ID NO: 933556
acucauaccagaaauuaau

SEQ ID NO: 933558 - RNA, 19 nt, Artificial Sequence
  Description of Artificial Sequence: Synthetic oligonucleotide
  Sense strand starting at position 2467 of SEQ ID NO: 913519
ucucaauucguaggcacaa

SEQ ID NO: 933559 - RNA, 19 nt, Artificial Sequence
  Description of Artificial Sequence: Synthetic oligonucleotide
  Antisense strand to SEQ ID NO: 933558
uugugccuacgaauugaga

SEQ ID NO: 933560 - RNA, 19 nt, Artificial Sequence
  Description of Artificial Sequence: Synthetic oligonucleotide
  Sense strand starting at position 3549 of SEQ ID NO: 913519
ugauuaauuucugguauga

SEQ ID NO: 933561 - RNA, 19 nt, Artificial Sequence
  Description of Artificial Sequence: Synthetic oligonucleotide
  Antisense strand to SEQ ID NO: 933560
ucauaccagaaauuaauca

SEQ ID NO: 933562 - RNA, 19 nt, Artificial Sequence
  Description of Artificial Sequence: Synthetic oligonucleotide
  Sense strand starting at position 3463 of SEQ ID NO: 913519
guuuaauguuucucuaccu

SEQ ID NO: 933563 - RNA, 19 nt, Artificial Sequence
  Description of Artificial Sequence: Synthetic oligonucleotide
  Antisense strand to SEQ ID NO: 933562
agguagagaaacauuaaac

SEQ ID NO: 933564 - RNA, 19 nt, Artificial Sequence
  Description of Artificial Sequence: Synthetic oligonucleotide
  Sense strand starting at position 3548 of SEQ ID NO: 913519
cugauuaauuucugguaug

SEQ ID NO: 933565 - RNA, 19 nt, Artificial Sequence
  Description of Artificial Sequence: Synthetic oligonucleotide
  Antisense strand to SEQ ID NO: 933564
cauaccagaaauuaaucag

SEQ ID NO: 933566 - RNA, 19 nt, Artificial Sequence
  Description of Artificial Sequence: Synthetic oligonucleotide
  Sense strand starting at position 3675 of SEQ ID NO: 913519
guugcucccuuggcugaaa

SEQ ID NO: 933567 - RNA, 19 nt, Artificial Sequence
  Description of Artificial Sequence: Synthetic oligonucleotide
  Antisense strand to SEQ ID NO: 933566
uuucagccaagggagcaac

SEQ ID NO: 933568 - RNA, 19 nt, Artificial Sequence
  Description of Artificial Sequence: Synthetic oligonucleotide
  Sense strand starting at position 3970 of SEQ ID NO: 913519
ccuuuagugcuuugcucaa

SEQ ID NO: 933569 - RNA, 19 nt, Artificial Sequence
  Description of Artificial Sequence: Synthetic oligonucleotide
  Antisense strand to SEQ ID NO: 933568
uugagcaaagcacuaaagg

SEQ ID NO: 933570 - RNA, 19 nt, Artificial Sequence
  Description of Artificial Sequence: Synthetic oligonucleotide
  Sense strand starting at position 2220 of SEQ ID NO: 913519
gacucuuguguaugugcga

SEQ ID NO: 933571 - RNA, 19 nt, Artificial Sequence
  Description of Artificial Sequence: Synthetic oligonucleotide
  Antisense strand to SEQ ID NO: 933570
ucgcacauacacaagaguc

SEQ ID NO: 933572 - RNA, 19 nt, Artificial Sequence
  Description of Artificial Sequence: Synthetic oligonucleotide
  Sense strand starting at position 3946 of SEQ ID NO: 913519
ucagcauagccuuguuguu

SEQ ID NO: 933573 - RNA, 19 nt, Artificial Sequence
  Description of Artificial Sequence: Synthetic oligonucleotide
  Antisense strand to SEQ ID NO: 933572
aacaacaaggcuaugcuga

SEQ ID NO: 933574 - RNA, 19 nt, Artificial Sequence
  Description of Artificial Sequence: Synthetic oligonucleotide
  Sense strand starting at position 3887 of SEQ ID NO: 913519
uugcgagccuuugcacuua

SEQ ID NO: 933575 - RNA, 19 nt, Artificial Sequence
  Description of Artificial Sequence: Synthetic oligonucleotide
  Antisense strand to SEQ ID NO: 933574
uaagugcaaaggcucgcaa

SEQ ID NO: 933576 - RNA, 19 nt, Artificial Sequence
  Description of Artificial Sequence: Synthetic oligonucleotide
  Sense strand starting at position 2857 of SEQ ID NO: 913519
guauauacuuccuagaccu

SEQ ID NO: 933577 - RNA, 19 nt, Artificial Sequence
  Description of Artificial Sequence: Synthetic oligonucleotide
  Antisense strand to SEQ ID NO: 933576
aggucuaggaaguauauac

SEQ ID NO: 933578 - RNA, 19 nt, Artificial Sequence
  Description of Artificial Sequence: Synthetic oligonucleotide
  Sense strand starting at position 2843 of SEQ ID NO: 913519
uauuauugcuaggaguaua

SEQ ID NO: 933579 - RNA, 19 nt, Artificial Sequence
  Description of Artificial Sequence: Synthetic oligonucleotide
  Antisense strand to SEQ ID NO: 933578
uauacuccuagcaauaaua

SEQ ID NO: 933580 - RNA, 19 nt, Artificial Sequence
  Description of Artificial Sequence: Synthetic oligonucleotide
  Sense strand starting at position 2840 of SEQ ID NO: 913519
acauauuauugcuaggagu

SEQ ID NO: 933581 - RNA, 19 nt, Artificial Sequence
  Description of Artificial Sequence: Synthetic oligonucleotide
  Antisense strand to SEQ ID NO: 933580
acuccuagcaauaauaugu

SEQ ID NO: 933582 - RNA, 19 nt, Artificial Sequence
  Description of Artificial Sequence: Synthetic oligonucleotide
  Sense strand starting at position 2661 of SEQ ID NO: 913519
ccucgagacuccuagggua

SEQ ID NO: 933583 - RNA, 19 nt, Artificial Sequence
  Description of Artificial Sequence: Synthetic oligonucleotide
  Antisense strand to SEQ ID NO: 933582
uacccuaggagucucgagg

SEQ ID NO: 933584 - RNA, 19 nt, Artificial Sequence
  Description of Artificial Sequence: Synthetic oligonucleotide
  Sense strand starting at position 3538 of SEQ ID NO: 913519
ucaaacgucucugauuaau

SEQ ID NO: 933585 - RNA, 19 nt, Artificial Sequence
  Description of Artificial Sequence: Synthetic oligonucleotide
  Antisense strand to SEQ ID NO: 933584
auuaaucagagacguuuga

SEQ ID NO: 933586 - RNA, 19 nt, Artificial Sequence
  Description of Artificial Sequence: Synthetic oligonucleotide
  Sense strand starting at position 2394 of SEQ ID NO: 913519
cggccagguuuggacuaaa

SEQ ID NO: 933587 - RNA, 19 nt, Artificial Sequence
  Description of Artificial Sequence: Synthetic oligonucleotide
  Antisense strand to SEQ ID NO: 933586
uuuaguccaaaccuggccg

SEQ ID NO: 933588 - RNA, 19 nt, Artificial Sequence
  Description of Artificial Sequence: Synthetic oligonucleotide
  Sense strand starting at position 132 of SEQ ID NO: 913519
ggguuggucugaggguaga

SEQ ID NO: 933589 - RNA, 19 nt, Artificial Sequence
  Description of Artificial Sequence: Synthetic oligonucleotide
  Antisense strand to SEQ ID NO: 933588
ucuacccucagaccaaccc

SEQ ID NO: 933590 - RNA, 19 nt, Artificial Sequence
  Description of Artificial Sequence: Synthetic oligonucleotide
  Sense strand starting at position 5 of SEQ ID NO: 913519
auggcagucuugugcuuua

SEQ ID NO: 933591 - RNA, 19 nt, Artificial Sequence
  Description of Artificial Sequence: Synthetic oligonucleotide
  Antisense strand to SEQ ID NO: 933590
uaaagcacaagacugccau

SEQ ID NO: 933592 - RNA, 19 nt, Artificial Sequence
  Description of Artificial Sequence: Synthetic oligonucleotide
  Sense strand starting at position 2216 of SEQ ID NO: 913519
gcgugacucuuguguaugu

SEQ ID NO: 933593 - RNA, 19 nt, Artificial Sequence
  Description of Artificial Sequence: Synthetic oligonucleotide
  Antisense strand to SEQ ID NO: 933592
acauacacaagagucacgc

SEQ ID NO: 933594 - RNA, 19 nt, Artificial Sequence
  Description of Artificial Sequence: Synthetic oligonucleotide
  Sense strand starting at position 2214 of SEQ ID NO: 913519
gcgcgugacucuuguguau

SEQ ID NO: 933595 - RNA, 19 nt, Artificial Sequence
  Description of Artificial Sequence: Synthetic oligonucleotide
  Antisense strand to SEQ ID NO: 933594
auacacaagagucacgcgc

SEQ ID NO: 933596 - RNA, 19 nt, Artificial Sequence
  Description of Artificial Sequence: Synthetic oligonucleotide
  Sense strand starting at position 3756 of SEQ ID NO: 913520
uuuggaggcccucaggaau

SEQ ID NO: 933597 - RNA, 19 nt, Artificial Sequence
  Description of Artificial Sequence: Synthetic oligonucleotide
  Antisense strand to SEQ ID NO: 933596
auuccugagggccuccaaa

SEQ ID NO: 933598 - RNA, 19 nt, Artificial Sequence
  Description of Artificial Sequence: Synthetic oligonucleotide
  Sense strand starting at position 3562 of SEQ ID NO: 913520
gggagacuuggaugguauu

SEQ ID NO: 933599 - RNA, 19 nt, Artificial Sequence
  Description of Artificial Sequence: Synthetic oligonucleotide
  Antisense strand to SEQ ID NO: 933598
aauaccauccaagucuccc

SEQ ID NO: 933600 - RNA, 19 nt, Artificial Sequence
  Description of Artificial Sequence: Synthetic oligonucleotide
  Sense strand starting at position 35 of SEQ ID NO: 913520
guuagagcugugcuccagu

SEQ ID NO: 933601 - RNA, 19 nt, Artificial Sequence
  Description of Artificial Sequence: Synthetic oligonucleotide
  Antisense strand to SEQ ID NO: 933600
acuggagcacagcucuaac

SEQ ID NO: 933602 - RNA, 19 nt, Artificial Sequence
  Description of Artificial Sequence: Synthetic oligonucleotide
  Sense strand starting at position 3909 of SEQ ID NO: 913520
cagagaaaccuggguguaa

SEQ ID NO: 933603 - RNA, 19 nt, Artificial Sequence
  Description of Artificial Sequence: Synthetic oligonucleotide
  Antisense strand to SEQ ID NO: 933602
uuacacccagguuucucug

SEQ ID NO: 933604 - RNA, 19 nt, Artificial Sequence
  Description of Artificial Sequence: Synthetic oligonucleotide
  Sense strand starting at position 2912 of SEQ ID NO: 913520
uguugucauuuccuauauu

SEQ ID NO: 933605 - RNA, 19 nt, Artificial Sequence
  Description of Artificial Sequence: Synthetic oligonucleotide
  Antisense strand to SEQ ID NO: 933604
aauauaggaaaugacaaca

SEQ ID NO: 933606 - RNA, 19 nt, Artificial Sequence
  Description of Artificial Sequence: Synthetic oligonucleotide
  Sense strand starting at position 3300 of SEQ ID NO: 913520
cuuaauagugcauauugga

SEQ ID NO: 933607 - RNA, 19 nt, Artificial Sequence
  Description of Artificial Sequence: Synthetic oligonucleotide
  Antisense strand to SEQ ID NO: 933606
uccaauaugcacuauuaag

SEQ ID NO: 933608 - RNA, 19 nt, Artificial Sequence
  Description of Artificial Sequence: Synthetic oligonucleotide
  Sense strand starting at position 2691 of SEQ ID NO: 913520
aggagaucuuauuccaggu

SEQ ID NO: 933609 - RNA, 19 nt, Artificial Sequence
  Description of Artificial Sequence: Synthetic oligonucleotide
  Antisense strand to SEQ ID NO: 933608
accuggaauaagaucuccu

SEQ ID NO: 933610 - RNA, 19 nt, Artificial Sequence
  Description of Artificial Sequence: Synthetic oligonucleotide
  Sense strand starting at position 2834 of SEQ ID NO: 913520
gucaucaaaggugagcaau

SEQ ID NO: 933611 - RNA, 19 nt, Artificial Sequence
  Description of Artificial Sequence: Synthetic oligonucleotide
  Antisense strand to SEQ ID NO: 933610
auugcucaccuuugaugac

SEQ ID NO: 933612 - RNA, 19 nt, Artificial Sequence
  Description of Artificial Sequence: Synthetic oligonucleotide
  Sense strand starting at position 3466 of SEQ ID NO: 913520
uaggauucuccugauggcu

SEQ ID NO: 933613 - RNA, 19 nt, Artificial Sequence
  Description of Artificial Sequence: Synthetic oligonucleotide
  Antisense strand to SEQ ID NO: 933612
agccaucaggagaauccua

SEQ ID NO: 933614 - RNA, 19 nt, Artificial Sequence
  Description of Artificial Sequence: Synthetic oligonucleotide
  Sense strand starting at position 2078 of SEQ ID NO: 913520
acggcuuggauuuguuuau

SEQ ID NO: 933615 - RNA, 19 nt, Artificial Sequence
  Description of Artificial Sequence: Synthetic oligonucleotide
  Antisense strand to SEQ ID NO: 933614
auaaacaaauccaagccgu

SEQ ID NO: 933616 - RNA, 19 nt, Artificial Sequence
  Description of Artificial Sequence: Synthetic oligonucleotide
  Sense strand starting at position 3673 of SEQ ID NO: 913520
gcuagucugaauggaggaa

SEQ ID NO: 933617 - RNA, 19 nt, Artificial Sequence
  Description of Artificial Sequence: Synthetic oligonucleotide
  Antisense strand to SEQ ID NO: 933616
uuccuccauucagacuagc

SEQ ID NO: 933618 - RNA, 19 nt, Artificial Sequence
  Description of Artificial Sequence: Synthetic oligonucleotide
  Sense strand starting at position 3286 of SEQ ID NO: 913520
uaaaguguggcacacuuaa

SEQ ID NO: 933619 - RNA, 19 nt, Artificial Sequence
  Description of Artificial Sequence: Synthetic oligonucleotide
  Antisense strand to SEQ ID NO: 933618
uuaagugugccacacuuua

SEQ ID NO: 933620 - RNA, 19 nt, Artificial Sequence
  Description of Artificial Sequence: Synthetic oligonucleotide
  Sense strand starting at position 2538 of SEQ ID NO: 913520
ucuguaccuccugagaucu

SEQ ID NO: 933621 - RNA, 19 nt, Artificial Sequence
  Description of Artificial Sequence: Synthetic oligonucleotide
  Antisense strand to SEQ ID NO: 933620
agaucucaggagguacaga

SEQ ID NO: 933622 - RNA, 19 nt, Artificial Sequence
  Description of Artificial Sequence: Synthetic oligonucleotide
  Sense strand starting at position 3054 of SEQ ID NO: 913520
uugacauuccugugaauga

SEQ ID NO: 933623 - RNA, 19 nt, Artificial Sequence
  Description of Artificial Sequence: Synthetic oligonucleotide
  Antisense strand to SEQ ID NO: 933622
ucauucacaggaaugucaa

SEQ ID NO: 933624 - RNA, 19 nt, Artificial Sequence
  Description of Artificial Sequence: Synthetic oligonucleotide
  Sense strand starting at position 2387 of SEQ ID NO: 913520
caggaacucgacugaguua

SEQ ID NO: 933625 - RNA, 19 nt, Artificial Sequence
  Description of Artificial Sequence: Synthetic oligonucleotide
  Antisense strand to SEQ ID NO: 933624
uaacucagucgaguuccug

SEQ ID NO: 933626 - RNA, 19 nt, Artificial Sequence
  Description of Artificial Sequence: Synthetic oligonucleotide
  Sense strand starting at position 2079 of SEQ ID NO: 913520
cggcuuggauuuguuuauu

SEQ ID NO: 933627 - RNA, 19 nt, Artificial Sequence
  Description of Artificial Sequence: Synthetic oligonucleotide
  Antisense strand to SEQ ID NO: 933626
aauaaacaaauccaagccg

SEQ ID NO: 933628 - RNA, 19 nt, Artificial Sequence
  Description of Artificial Sequence: Synthetic oligonucleotide
  Sense strand starting at position 3812 of SEQ ID NO: 913520
cauccuugugauugggaac

SEQ ID NO: 933629 - RNA, 19 nt, Artificial Sequence
  Description of Artificial Sequence: Synthetic oligonucleotide
  Antisense strand to SEQ ID NO: 933628
guucccaaucacaaggaug

SEQ ID NO: 933630 - RNA, 19 nt, Artificial Sequence
  Description of Artificial Sequence: Synthetic oligonucleotide
  Sense strand starting at position 3813 of SEQ ID NO: 913520
auccuugugauugggaacu

SEQ ID NO: 933631 - RNA, 19 nt, Artificial Sequence
  Description of Artificial Sequence: Synthetic oligonucleotide
  Antisense strand to SEQ ID NO: 933630
aguucccaaucacaaggau

SEQ ID NO: 933632 - RNA, 19 nt, Artificial Sequence
  Description of Artificial Sequence: Synthetic oligonucleotide
  Sense strand starting at position 3322 of SEQ ID NO: 913520
guaacauaguaaguacuga

SEQ ID NO: 933633 - RNA, 19 nt, Artificial Sequence
  Description of Artificial Sequence: Synthetic oligonucleotide
  Antisense strand to SEQ ID NO: 933632
ucaguacuuacuauguuac

SEQ ID NO: 933634 - RNA, 19 nt, Artificial Sequence
  Description of Artificial Sequence: Synthetic oligonucleotide
  Sense strand starting at position 2833 of SEQ ID NO: 913520
agucaucaaaggugagcaa

SEQ ID NO: 933635 - RNA, 19 nt, Artificial Sequence
  Description of Artificial Sequence: Synthetic oligonucleotide
  Antisense strand to SEQ ID NO: 933634
uugcucaccuuugaugacu

SEQ ID NO: 933636 - RNA, 19 nt, Artificial Sequence
  Description of Artificial Sequence: Synthetic oligonucleotide
  Sense strand starting at position 2390 of SEQ ID NO: 913520
gaacucgacugaguuauug

SEQ ID NO: 933637 - RNA, 19 nt, Artificial Sequence
  Description of Artificial Sequence: Synthetic oligonucleotide
  Antisense strand to SEQ ID NO: 933636
caauaacucagucgaguuc

SEQ ID NO: 933638 - RNA, 19 nt, Artificial Sequence
  Description of Artificial Sequence: Synthetic oligonucleotide
  Sense strand starting at position 500 of SEQ ID NO: 913520
uguuuaaucuacuuggauc

SEQ ID NO: 933639 - RNA, 19 nt, Artificial Sequence
  Description of Artificial Sequence: Synthetic oligonucleotide
  Antisense strand to SEQ ID NO: 933638
gauccaaguagauuaaaca

SEQ ID NO: 933640 - RNA, 19 nt, Artificial Sequence
  Description of Artificial Sequence: Synthetic oligonucleotide
  Sense strand starting at position 3462 of SEQ ID NO: 913520
guucuaggauucuccugau

SEQ ID NO: 933641 - RNA, 19 nt, Artificial Sequence
  Description of Artificial Sequence: Synthetic oligonucleotide
  Antisense strand to SEQ ID NO: 933640
aucaggagaauccuagaac

SEQ ID NO: 933642 - RNA, 19 nt, Artificial Sequence
  Description of Artificial Sequence: Synthetic oligonucleotide
  Sense strand starting at position 466 of SEQ ID NO: 913520
cgaagauugccauagcuac

SEQ ID NO: 933643 - RNA, 19 nt, Artificial Sequence
  Description of Artificial Sequence: Synthetic oligonucleotide
  Antisense strand to SEQ ID NO: 933642
guagcuauggcaaucuucg

SEQ ID NO: 933644 - RNA, 19 nt, Artificial Sequence
  Description of Artificial Sequence: Synthetic oligonucleotide
  Sense strand starting at position 3811 of SEQ ID NO: 913520
gcauccuugugauugggaa

SEQ ID NO: 933645 - RNA, 19 nt, Artificial Sequence
  Description of Artificial Sequence: Synthetic oligonucleotide
  Antisense strand to SEQ ID NO: 933644
uucccaaucacaaggaugc

SEQ ID NO: 933646 - RNA, 19 nt, Artificial Sequence
  Description of Artificial Sequence: Synthetic oligonucleotide
  Sense strand starting at position 2764 of SEQ ID NO: 913520
gccugccauuaaucugaga

SEQ ID NO: 933647 - RNA, 19 nt, Artificial Sequence
  Description of Artificial Sequence: Synthetic oligonucleotide
  Antisense strand to SEQ ID NO: 933646
ucucagauuaauggcaggc

SEQ ID NO: 933648 - RNA, 19 nt, Artificial Sequence
  Description of Artificial Sequence: Synthetic oligonucleotide
  Sense strand starting at position 3666 of SEQ ID NO: 913520
cucccaggcuagucugaau

SEQ ID NO: 933649 - RNA, 19 nt, Artificial Sequence
  Description of Artificial Sequence: Synthetic oligonucleotide
  Antisense strand to SEQ ID NO: 933648
auucagacuagccugggag

SEQ ID NO: 933650 - RNA, 19 nt, Artificial Sequence
  Description of Artificial Sequence: Synthetic oligonucleotide
  Sense strand starting at position 2708 of SEQ ID NO: 913520
guaucugagagguggcuca

SEQ ID NO: 933651 - RNA, 19 nt, Artificial Sequence
  Description of Artificial Sequence: Synthetic oligonucleotide
  Antisense strand to SEQ ID NO: 933650
ugagccaccucucagauac

SEQ ID NO: 933652 - RNA, 19 nt, Artificial Sequence
  Description of Artificial Sequence: Synthetic oligonucleotide
  Sense strand starting at position 492 of SEQ ID NO: 913520
gcuaguaguguuuaaucua

SEQ ID NO: 933653 - RNA, 19 nt, Artificial Sequence
  Description of Artificial Sequence: Synthetic oligonucleotide
  Antisense strand to SEQ ID NO: 933652
uagauuaaacacuacuagc

SEQ ID NO: 933654 - RNA, 19 nt, Artificial Sequence
  Description of Artificial Sequence: Synthetic oligonucleotide
  Sense strand starting at position 3456 of SEQ ID NO: 913520
guuccaguucuaggauucu

SEQ ID NO: 933655 - RNA, 19 nt, Artificial Sequence
  Description of Artificial Sequence: Synthetic oligonucleotide
  Antisense strand to SEQ ID NO: 933654
agaauccuagaacuggaac

SEQ ID NO: 933656 - RNA, 19 nt, Artificial Sequence
  Description of Artificial Sequence: Synthetic oligonucleotide
  Sense strand starting at position 3016 of SEQ ID NO: 913520
gcauuuguaucccaagaga

SEQ ID NO: 933657 - RNA, 19 nt, Artificial Sequence
  Description of Artificial Sequence: Synthetic oligonucleotide
  Antisense strand to SEQ ID NO: 933656
ucucuugggauacaaaugc

SEQ ID NO: 933658 - RNA, 19 nt, Artificial Sequence
  Description of Artificial Sequence: Synthetic oligonucleotide
  Sense strand starting at position 495 of SEQ ID NO: 913520
aguaguguuuaaucuacuu

SEQ ID NO: 933659 - RNA, 19 nt, Artificial Sequence
  Description of Artificial Sequence: Synthetic oligonucleotide
  Antisense strand to SEQ ID NO: 933658
aaguagauuaaacacuacu

SEQ ID NO: 933660 - RNA, 19 nt, Artificial Sequence
  Description of Artificial Sequence: Synthetic oligonucleotide
  Sense strand starting at position 3598 of SEQ ID NO: 913520
guuggagaguuucugcacu

SEQ ID NO: 933661 - RNA, 19 nt, Artificial Sequence
  Description of Artificial Sequence: Synthetic oligonucleotide
  Antisense strand to SEQ ID NO: 933660
agugcagaaacucuccaac

SEQ ID NO: 933662 - RNA, 19 nt, Artificial Sequence
  Description of Artificial Sequence: Synthetic oligonucleotide
  Sense strand starting at position 153 of SEQ ID NO: 913520
ccucuaccaccgugaucuu

SEQ ID NO: 933663 - RNA, 19 nt, Artificial Sequence
  Description of Artificial Sequence: Synthetic oligonucleotide
  Antisense strand to SEQ ID NO: 933662
aagaucacggugguagagg

SEQ ID NO: 933664 - RNA, 19 nt, Artificial Sequence
  Description of Artificial Sequence: Synthetic oligonucleotide
  Sense strand starting at position 3805 of SEQ ID NO: 913520
gcuggagcauccuugugau

SEQ ID NO: 933665 - RNA, 19 nt, Artificial Sequence
  Description of Artificial Sequence: Synthetic oligonucleotide
  Antisense strand to SEQ ID NO: 933664
aucacaaggaugcuccagc

SEQ ID NO: 933666 - RNA, 19 nt, Artificial Sequence
  Description of Artificial Sequence: Synthetic oligonucleotide
  Sense strand starting at position 3565 of SEQ ID NO: 913520
agacuuggaugguauugaa

SEQ ID NO: 933667 - RNA, 19 nt, Artificial Sequence
  Description of Artificial Sequence: Synthetic oligonucleotide
  Antisense strand to SEQ ID NO: 933666
uucaauaccauccaagucu

SEQ ID NO: 933668 - RNA, 19 nt, Artificial Sequence
  Description of Artificial Sequence: Synthetic oligonucleotide
  Sense strand starting at position 595 of SEQ ID NO: 913520
ggacuaauuuguggccaag

SEQ ID NO: 933669 - RNA, 19 nt, Artificial Sequence
  Description of Artificial Sequence: Synthetic oligonucleotide
  Antisense strand to SEQ ID NO: 933668
cuuggccacaaauuagucc

SEQ ID NO: 933670 - RNA, 19 nt, Artificial Sequence
  Description of Artificial Sequence: Synthetic oligonucleotide
  Sense strand starting at position 3560 of SEQ ID NO: 913520
uugggagacuuggauggua

SEQ ID NO: 933671 - RNA, 19 nt, Artificial Sequence
  Description of Artificial Sequence: Synthetic oligonucleotide
  Antisense strand to SEQ ID NO: 933670
uaccauccaagucucccaa

SEQ ID NO: 933672 - RNA, 19 nt, Artificial Sequence
  Description of Artificial Sequence: Synthetic oligonucleotide
  Sense strand starting at position 594 of SEQ ID NO: 913520
uggacuaauuuguggccaa

SEQ ID NO: 933673 - RNA, 19 nt, Artificial Sequence
  Description of Artificial Sequence: Synthetic oligonucleotide
  Antisense strand to SEQ ID NO: 933672
uuggccacaaauuagucca

SEQ ID NO: 933674 - RNA, 19 nt, Artificial Sequence
  Description of Artificial Sequence: Synthetic oligonucleotide
  Sense strand starting at position 38 of SEQ ID NO: 913520
agagcugugcuccaguguu

SEQ ID NO: 933675 - RNA, 19 nt, Artificial Sequence
  Description of Artificial Sequence: Synthetic oligonucleotide
  Antisense strand to SEQ ID NO: 933674
aacacuggagcacagcucu

SEQ ID NO: 933676 - RNA, 19 nt, Artificial Sequence
  Description of Artificial Sequence: Synthetic oligonucleotide
  Sense strand starting at position 1591 of SEQ ID NO: 913521
ucuaaagcccgcuauauuu

SEQ ID NO: 933677 - RNA, 19 nt, Artificial Sequence
  Description of Artificial Sequence: Synthetic oligonucleotide
  Antisense strand to SEQ ID NO: 933676
aaauauagcgggcuuuaga

SEQ ID NO: 933678 - RNA, 19 nt, Artificial Sequence
  Description of Artificial Sequence: Synthetic oligonucleotide
  Sense strand starting at position 3302 of SEQ ID NO: 913521
auuugacacuugcuuugua

SEQ ID NO: 933679 - RNA, 19 nt, Artificial Sequence
  Description of Artificial Sequence: Synthetic oligonucleotide
  Antisense strand to SEQ ID NO: 933678
uacaaagcaagugucaaau

SEQ ID NO: 933680 - RNA, 19 nt, Artificial Sequence
  Description of Artificial Sequence: Synthetic oligonucleotide
  Sense strand starting at position 3262 of SEQ ID NO: 913521
acuggagucgugcauuuca

SEQ ID NO: 933681 - RNA, 19 nt, Artificial Sequence
  Description of Artificial Sequence: Synthetic oligonucleotide
  Antisense strand to SEQ ID NO: 933680
ugaaaugcacgacuccagu

SEQ ID NO: 933682 - RNA, 19 nt, Artificial Sequence
  Description of Artificial Sequence: Synthetic oligonucleotide
  Sense strand starting at position 1085 of SEQ ID NO: 913521
auuugucaguuaccaguua

SEQ ID NO: 933683 - RNA, 19 nt, Artificial Sequence
  Description of Artificial Sequence: Synthetic oligonucleotide
  Antisense strand to SEQ ID NO: 933682
uaacugguaacugacaaau

SEQ ID NO: 933684 - RNA, 19 nt, Artificial Sequence
  Description of Artificial Sequence: Synthetic oligonucleotide
  Sense strand starting at position 1922 of SEQ ID NO: 913521
agaaauuugcagugcucac

SEQ ID NO: 933685 - RNA, 19 nt, Artificial Sequence
  Description of Artificial Sequence: Synthetic oligonucleotide
  Antisense strand to SEQ ID NO: 933684
gugagcacugcaaauuucu

SEQ ID NO: 933686 - RNA, 19 nt, Artificial Sequence
  Description of Artificial Sequence: Synthetic oligonucleotide
  Sense strand starting at position 2150 of SEQ ID NO: 913521
aacuuuacuggaggcagaa

SEQ ID NO: 933687 - RNA, 19 nt, Artificial Sequence
  Description of Artificial Sequence: Synthetic oligonucleotide
  Antisense strand to SEQ ID NO: 933686
uucugccuccaguaaaguu

SEQ ID NO: 933688 - RNA, 19 nt, Artificial Sequence
  Description of Artificial Sequence: Synthetic oligonucleotide
  Sense strand starting at position 1372 of SEQ ID NO: 913521
cagggacuguuucuagaag

SEQ ID NO: 933689 - RNA, 19 nt, Artificial Sequence
  Description of Artificial Sequence: Synthetic oligonucleotide
  Antisense strand to SEQ ID NO: 933688
cuucuagaaacagucccug

SEQ ID NO: 933690 - RNA, 19 nt, Artificial Sequence
  Description of Artificial Sequence: Synthetic oligonucleotide
  Sense strand starting at position 2973 of SEQ ID NO: 913521
ccuaaagacuagcuugaga

SEQ ID NO: 933691 - RNA, 19 nt, Artificial Sequence
  Description of Artificial Sequence: Synthetic oligonucleotide
  Antisense strand to SEQ ID NO: 933690
ucucaagcuagucuuuagg

SEQ ID NO: 933692 - RNA, 19 nt, Artificial Sequence
  Description of Artificial Sequence: Synthetic oligonucleotide
  Sense strand starting at position 3533 of SEQ ID NO: 913521
gguggugaaauaugaacau

SEQ ID NO: 933693 - RNA, 19 nt, Artificial Sequence
  Description of Artificial Sequence: Synthetic oligonucleotide
  Antisense strand to SEQ ID NO: 933692
auguucauauuucaccacc

SEQ ID NO: 933694 - RNA, 19 nt, Artificial Sequence
  Description of Artificial Sequence: Synthetic oligonucleotide
  Sense strand starting at position 2690 of SEQ ID NO: 913521
uauagugaugcugaccuaa

SEQ ID NO: 933695 - RNA, 19 nt, Artificial Sequence
  Description of Artificial Sequence: Synthetic oligonucleotide
  Antisense strand to SEQ ID NO: 933694
uuaggucagcaucacuaua

SEQ ID NO: 933696 - RNA, 19 nt, Artificial Sequence
  Description of Artificial Sequence: Synthetic oligonucleotide
  Sense strand starting at position 3527 of SEQ ID NO: 913521
gaguuugguggugaaauau

SEQ ID NO: 933697 - RNA, 19 nt, Artificial Sequence
  Description of Artificial Sequence: Synthetic oligonucleotide
  Antisense strand to SEQ ID NO: 933696
auauuucaccaccaaacuc

SEQ ID NO: 933698 - RNA, 19 nt, Artificial Sequence
  Description of Artificial Sequence: Synthetic oligonucleotide
  Sense strand starting at position 939 of SEQ ID NO: 913521
agaagaaacuauucugcuu

SEQ ID NO: 933699 - RNA, 19 nt, Artificial Sequence
  Description of Artificial Sequence: Synthetic oligonucleotide
  Antisense strand to SEQ ID NO: 933698
aagcagaauaguuucuucu

SEQ ID NO: 933700 - RNA, 19 nt, Artificial Sequence
  Description of Artificial Sequence: Synthetic oligonucleotide
  Sense strand starting at position 867 of SEQ ID NO: 913521
gggauagacaucugucuua

SEQ ID NO: 933701 - RNA, 19 nt, Artificial Sequence
  Description of Artificial Sequence: Synthetic oligonucleotide
  Antisense strand to SEQ ID NO: 933700
uaagacagaugucuauccc

SEQ ID NO: 933702 - RNA, 19 nt, Artificial Sequence
  Description of Artificial Sequence: Synthetic oligonucleotide
  Sense strand starting at position 779 of SEQ ID NO: 913521
uguaaacucugaucagacu

SEQ ID NO: 933703 - RNA, 19 nt, Artificial Sequence
  Description of Artificial Sequence: Synthetic oligonucleotide
  Antisense strand to SEQ ID NO: 933702
agucugaucagaguuuaca

SEQ ID NO: 933704 - RNA, 19 nt, Artificial Sequence
  Description of Artificial Sequence: Synthetic oligonucleotide
  Sense strand starting at position 1713 of SEQ ID NO: 913521
cuuuaaccagaaugcuaga

SEQ ID NO: 933705 - RNA, 19 nt, Artificial Sequence
  Description of Artificial Sequence: Synthetic oligonucleotide
  Antisense strand to SEQ ID NO: 933704
ucuagcauucugguuaaag

SEQ ID NO: 933706 - RNA, 19 nt, Artificial Sequence
  Description of Artificial Sequence: Synthetic oligonucleotide
  Sense strand starting at position 1038 of SEQ ID NO: 913521
aggaaugugccagagguuu

SEQ ID NO: 933707 - RNA, 19 nt, Artificial Sequence
  Description of Artificial Sequence: Synthetic oligonucleotide
  Antisense strand to SEQ ID NO: 933706
aaaccucuggcacauuccu

SEQ ID NO: 933708 - RNA, 19 nt, Artificial Sequence
  Description of Artificial Sequence: Synthetic oligonucleotide
  Sense strand starting at position 1337 of SEQ ID NO: 913521
ccauguauggcuuaaucag

SEQ ID NO: 933709 - RNA, 19 nt, Artificial Sequence
  Description of Artificial Sequence: Synthetic oligonucleotide
  Antisense strand to SEQ ID NO: 933708
cugauuaagccauacaugg

SEQ ID NO: 933710 - RNA, 19 nt, Artificial Sequence
  Description of Artificial Sequence: Synthetic oligonucleotide
  Sense strand starting at position 3510 of SEQ ID NO: 913521
auuaaacuaugugcuaaga

SEQ ID NO: 933711 - RNA, 19 nt, Artificial Sequence
  Description of Artificial Sequence: Synthetic oligonucleotide
  Antisense strand to SEQ ID NO: 933710
ucuuagcacauaguuuaau

SEQ ID NO: 933712 - RNA, 19 nt, Artificial Sequence
  Description of Artificial Sequence: Synthetic oligonucleotide
  Sense strand starting at position 142 of SEQ ID NO: 913521
gccaaugcccuggaauuga

SEQ ID NO: 933713 - RNA, 19 nt, Artificial Sequence
  Description of Artificial Sequence: Synthetic oligonucleotide
  Antisense strand to SEQ ID NO: 933712
ucaauuccagggcauuggc

SEQ ID NO: 933714 - RNA, 19 nt, Artificial Sequence
  Description of Artificial Sequence: Synthetic oligonucleotide
  Sense strand starting at position 89 of SEQ ID NO: 913521
acuggcuauugaccugaua

SEQ ID NO: 933715 - RNA, 19 nt, Artificial Sequence
  Description of Artificial Sequence: Synthetic oligonucleotide
  Antisense strand to SEQ ID NO: 933714
uaucaggucaauagccagu

SEQ ID NO: 933716 - RNA, 19 nt, Artificial Sequence
  Description of Artificial Sequence: Synthetic oligonucleotide
  Sense strand starting at position 830 of SEQ ID NO: 913521
gcaggacaccucugaaucu

SEQ ID NO: 933717 - RNA, 19 nt, Artificial Sequence
  Description of Artificial Sequence: Synthetic oligonucleotide
  Antisense strand to SEQ ID NO: 933716
agauucagagguguccugc

SEQ ID NO: 933718 - RNA, 19 nt, Artificial Sequence
  Description of Artificial Sequence: Synthetic oligonucleotide
  Sense strand starting at position 3073 of SEQ ID NO: 913521
ccagcaucacacugggauu

SEQ ID NO: 933719 - RNA, 19 nt, Artificial Sequence
  Description of Artificial Sequence: Synthetic oligonucleotide
  Antisense strand to SEQ ID NO: 933718
aaucccagugugaugcugg

SEQ ID NO: 933720 - RNA, 19 nt, Artificial Sequence
  Description of Artificial Sequence: Synthetic oligonucleotide
  Sense strand starting at position 2329 of SEQ ID NO: 913521
cuggaaucccacugcauga

SEQ ID NO: 933721 - RNA, 19 nt, Artificial Sequence
  Description of Artificial Sequence: Synthetic oligonucleotide
  Antisense strand to SEQ ID NO: 933720
ucaugcagugggauuccag

SEQ ID NO: 933722 - RNA, 19 nt, Artificial Sequence
  Description of Artificial Sequence: Synthetic oligonucleotide
  Sense strand starting at position 2364 of SEQ ID NO: 913521
cguggaugggcucauggau

SEQ ID NO: 933723 - RNA, 19 nt, Artificial Sequence
  Description of Artificial Sequence: Synthetic oligonucleotide
  Antisense strand to SEQ ID NO: 933722
auccaugagcccauccacg

SEQ ID NO: 933724 - RNA, 19 nt, Artificial Sequence
  Description of Artificial Sequence: Synthetic oligonucleotide
  Sense strand starting at position 1511 of SEQ ID NO: 913521
auuauaagcccguaucaua

SEQ ID NO: 933725 - RNA, 19 nt, Artificial Sequence
  Description of Artificial Sequence: Synthetic oligonucleotide
  Antisense strand to SEQ ID NO: 933724
uaugauacgggcuuauaau

SEQ ID NO: 933726 - RNA, 19 nt, Artificial Sequence
  Description of Artificial Sequence: Synthetic oligonucleotide
  Sense strand starting at position 2376 of SEQ ID NO: 913521
cauggaugagcauggucua

SEQ ID NO: 933727 - RNA, 19 nt, Artificial Sequence
  Description of Artificial Sequence: Synthetic oligonucleotide
  Antisense strand to SEQ ID NO: 933726
uagaccaugcucauccaug

SEQ ID NO: 933728 - RNA, 19 nt, Artificial Sequence
  Description of Artificial Sequence: Synthetic oligonucleotide
  Sense strand starting at position 2103 of SEQ ID NO: 913521
aucugacacuugcuggauu

SEQ ID NO: 933729 - RNA, 19 nt, Artificial Sequence
  Description of Artificial Sequence: Synthetic oligonucleotide
  Antisense strand to SEQ ID NO: 933728
aauccagcaagugucagau

SEQ ID NO: 933730 - RNA, 19 nt, Artificial Sequence
  Description of Artificial Sequence: Synthetic oligonucleotide
  Sense strand starting at position 870 of SEQ ID NO: 913521
auagacaucugucuuaggu

SEQ ID NO: 933731 - RNA, 19 nt, Artificial Sequence
  Description of Artificial Sequence: Synthetic oligonucleotide
  Antisense strand to SEQ ID NO: 933730
accuaagacagaugucuau

SEQ ID NO: 933732 - RNA, 19 nt, Artificial Sequence
  Description of Artificial Sequence: Synthetic oligonucleotide
  Sense strand starting at position 1489 of SEQ ID NO: 913521
aacugagauugggagagaa

SEQ ID NO: 933733 - RNA, 19 nt, Artificial Sequence
  Description of Artificial Sequence: Synthetic oligonucleotide
  Antisense strand to SEQ ID NO: 933732
uucucucccaaucucaguu

SEQ ID NO: 933734 - RNA, 19 nt, Artificial Sequence
  Description of Artificial Sequence: Synthetic oligonucleotide
  Sense strand starting at position 776 of SEQ ID NO: 913521
cuguguaaacucugaucag

SEQ ID NO: 933735 - RNA, 19 nt, Artificial Sequence
  Description of Artificial Sequence: Synthetic oligonucleotide
  Antisense strand to SEQ ID NO: 933734
cugaucagaguuuacacag

SEQ ID NO: 933736 - RNA, 19 nt, Artificial Sequence
  Description of Artificial Sequence: Synthetic oligonucleotide
  Sense strand starting at position 905 of SEQ ID NO: 913521
gugccuuagcucuaagaga

SEQ ID NO: 933737 - RNA, 19 nt, Artificial Sequence
  Description of Artificial Sequence: Synthetic oligonucleotide
  Antisense strand to SEQ ID NO: 933736
ucucuuagagcuaaggcac

SEQ ID NO: 933738 - RNA, 19 nt, Artificial Sequence
  Description of Artificial Sequence: Synthetic oligonucleotide
  Sense strand starting at position 1867 of SEQ ID NO: 913521
ggaaacaacuuugaauaaa

SEQ ID NO: 933739 - RNA, 19 nt, Artificial Sequence
  Description of Artificial Sequence: Synthetic oligonucleotide
  Antisense strand to SEQ ID NO: 933738
uuuauucaaaguuguuucc

SEQ ID NO: 933740 - RNA, 19 nt, Artificial Sequence
  Description of Artificial Sequence: Synthetic oligonucleotide
  Sense strand starting at position 1968 of SEQ ID NO: 913521
uguguuaaagcugagugau

SEQ ID NO: 933741 - RNA, 19 nt, Artificial Sequence
  Description of Artificial Sequence: Synthetic oligonucleotide
  Antisense strand to SEQ ID NO: 933740
aucacucagcuuuaacaca

SEQ ID NO: 933742 - RNA, 19 nt, Artificial Sequence
  Description of Artificial Sequence: Synthetic oligonucleotide
  Sense strand starting at position 1897 of SEQ ID NO: 913521
cuuucuucuccugauguuu

SEQ ID NO: 933743 - RNA, 19 nt, Artificial Sequence
  Description of Artificial Sequence: Synthetic oligonucleotide
  Antisense strand to SEQ ID NO: 933742
aaacaucaggagaagaaag

SEQ ID NO: 933744 - RNA, 19 nt, Artificial Sequence
  Description of Artificial Sequence: Synthetic oligonucleotide
  Sense strand starting at position 3306 of SEQ ID NO: 913521
gacacuugcuuuguaggau

SEQ ID NO: 933745 - RNA, 19 nt, Artificial Sequence
  Description of Artificial Sequence: Synthetic oligonucleotide
  Antisense strand to SEQ ID NO: 933744
auccuacaaagcaaguguc

SEQ ID NO: 933746 - RNA, 19 nt, Artificial Sequence
  Description of Artificial Sequence: Synthetic oligonucleotide
  Sense strand starting at position 3684 of SEQ ID NO: 913521
aguucugugggccagaagu

SEQ ID NO: 933747 - RNA, 19 nt, Artificial Sequence
  Description of Artificial Sequence: Synthetic oligonucleotide
  Antisense strand to SEQ ID NO: 933746
acuucuggcccacagaacu

SEQ ID NO: 933748 - RNA, 19 nt, Artificial Sequence
  Description of Artificial Sequence: Synthetic oligonucleotide
  Sense strand starting at position 3305 of SEQ ID NO: 913521
ugacacuugcuuuguagga

SEQ ID NO: 933749 - RNA, 19 nt, Artificial Sequence
  Description of Artificial Sequence: Synthetic oligonucleotide
  Antisense strand to SEQ ID NO: 933748
uccuacaaagcaaguguca

SEQ ID NO: 933750 - RNA, 19 nt, Artificial Sequence
  Description of Artificial Sequence: Synthetic oligonucleotide
  Sense strand starting at position 3616 of SEQ ID NO: 913521
cggugaggguucccauaac

SEQ ID NO: 933751 - RNA, 19 nt, Artificial Sequence
  Description of Artificial Sequence: Synthetic oligonucleotide
  Antisense strand to SEQ ID NO: 933750
guuaugggaacccucaccg

SEQ ID NO: 933752 - RNA, 19 nt, Artificial Sequence
  Description of Artificial Sequence: Synthetic oligonucleotide
  Sense strand starting at position 1509 of SEQ ID NO: 913521
gaauuauaagcccguauca

SEQ ID NO: 933753 - RNA, 19 nt, Artificial Sequence
  Description of Artificial Sequence: Synthetic oligonucleotide
  Antisense strand to SEQ ID NO: 933752
ugauacgggcuuauaauuc

SEQ ID NO: 933754 - RNA, 19 nt, Artificial Sequence
  Description of Artificial Sequence: Synthetic oligonucleotide
  Sense strand starting at position 2177 of SEQ ID NO: 913521
cuuccagcuuagguagauu

SEQ ID NO: 933755 - RNA, 19 nt, Artificial Sequence
  Description of Artificial Sequence: Synthetic oligonucleotide
  Antisense strand to SEQ ID NO: 933754
aaucuaccuaagcuggaag

SEQ ID NO: 933756 - RNA, 19 nt, Artificial Sequence
  Description of Artificial Sequence: Synthetic oligonucleotide
  Sense strand starting at position 1526 of SEQ ID NO: 913522
auguuuaggccacaaacaa

SEQ ID NO: 933757 - RNA, 19 nt, Artificial Sequence
  Description of Artificial Sequence: Synthetic oligonucleotide
  Antisense strand to SEQ ID NO: 933756
uuguuuguggccuaaacau

SEQ ID NO: 933758 - RNA, 19 nt, Artificial Sequence
  Description of Artificial Sequence: Synthetic oligonucleotide
  Sense strand starting at position 3966 of SEQ ID NO: 913522
uuaaacuuccuuugaagga

SEQ ID NO: 933759 - RNA, 19 nt, Artificial Sequence
  Description of Artificial Sequence: Synthetic oligonucleotide
  Antisense strand to SEQ ID NO: 933758
uccuucaaaggaaguuuaa

SEQ ID NO: 933760 - RNA, 19 nt, Artificial Sequence
  Description of Artificial Sequence: Synthetic oligonucleotide
  Sense strand starting at position 3099 of SEQ ID NO: 913522
gagcgauuauuugcaacau

SEQ ID NO: 933761 - RNA, 19 nt, Artificial Sequence
  Description of Artificial Sequence: Synthetic oligonucleotide
  Antisense strand to SEQ ID NO: 933760
auguugcaaauaaucgcuc

SEQ ID NO: 933762 - RNA, 19 nt, Artificial Sequence
  Description of Artificial Sequence: Synthetic oligonucleotide
  Sense strand starting at position 3729 of SEQ ID NO: 913522
ugucaauuugugggcauga

SEQ ID NO: 933763 - RNA, 19 nt, Artificial Sequence
  Description of Artificial Sequence: Synthetic oligonucleotide
  Antisense strand to SEQ ID NO: 933762
ucaugcccacaaauugaca

SEQ ID NO: 933764 - RNA, 19 nt, Artificial Sequence
  Description of Artificial Sequence: Synthetic oligonucleotide
  Sense strand starting at position 2929 of SEQ ID NO: 913522
ucucuauuucuacgaaguu

SEQ ID NO: 933765 - RNA, 19 nt, Artificial Sequence
  Description of Artificial Sequence: Synthetic oligonucleotide
  Antisense strand to SEQ ID NO: 933764
aacuucguagaaauagaga

SEQ ID NO: 933766 - RNA, 19 nt, Artificial Sequence
  Description of Artificial Sequence: Synthetic oligonucleotide
  Sense strand starting at position 1524 of SEQ ID NO: 913522
agauguuuaggccacaaac

SEQ ID NO: 933767 - RNA, 19 nt, Artificial Sequence
  Description of Artificial Sequence: Synthetic oligonucleotide
  Antisense strand to SEQ ID NO: 933766
guuuguggccuaaacaucu

SEQ ID NO: 933768 - RNA, 19 nt, Artificial Sequence
  Description of Artificial Sequence: Synthetic oligonucleotide
  Sense strand starting at position 2987 of SEQ ID NO: 913522
agcaaaguagauuagguau

SEQ ID NO: 933769 - RNA, 19 nt, Artificial Sequence
  Description of Artificial Sequence: Synthetic oligonucleotide
  Antisense strand to SEQ ID NO: 933768
auaccuaaucuacuuugcu

SEQ ID NO: 933770 - RNA, 19 nt, Artificial Sequence
  Description of Artificial Sequence: Synthetic oligonucleotide
  Sense strand starting at position 2847 of SEQ ID NO: 913522
gcaagaucuuuauuagaag

SEQ ID NO: 933771 - RNA, 19 nt, Artificial Sequence
  Description of Artificial Sequence: Synthetic oligonucleotide
  Antisense strand to SEQ ID NO: 933770
cuucuaauaaagaucuugc

SEQ ID NO: 933772 - RNA, 19 nt, Artificial Sequence
  Description of Artificial Sequence: Synthetic oligonucleotide
  Sense strand starting at position 3341 of SEQ ID NO: 913522
uauaguagcagugaaggau

SEQ ID NO: 933773 - RNA, 19 nt, Artificial Sequence
  Description of Artificial Sequence: Synthetic oligonucleotide
  Antisense strand to SEQ ID NO: 933772
auccuucacugcuacuaua

SEQ ID NO: 933774 - RNA, 19 nt, Artificial Sequence
  Description of Artificial Sequence: Synthetic oligonucleotide
  Sense strand starting at position 3263 of SEQ ID NO: 913522
guaacagauugaguaacua

SEQ ID NO: 933775 - RNA, 19 nt, Artificial Sequence
  Description of Artificial Sequence: Synthetic oligonucleotide
  Antisense strand to SEQ ID NO: 933774
uaguuacucaaucuguuac

SEQ ID NO: 933776 - RNA, 19 nt, Artificial Sequence
  Description of Artificial Sequence: Synthetic oligonucleotide
  Sense strand starting at position 2520 of SEQ ID NO: 913522
augugauucuugcuuauuu

SEQ ID NO: 933777 - RNA, 19 nt, Artificial Sequence
  Description of Artificial Sequence: Synthetic oligonucleotide
  Antisense strand to SEQ ID NO: 933776
aaauaagcaagaaucacau

SEQ ID NO: 933778 - RNA, 19 nt, Artificial Sequence
  Description of Artificial Sequence: Synthetic oligonucleotide
  Sense strand starting at position 3763 of SEQ ID NO: 913522
gaaggauuguuuccauaau

SEQ ID NO: 933779 - RNA, 19 nt, Artificial Sequence
  Description of Artificial Sequence: Synthetic oligonucleotide
  Antisense strand to SEQ ID NO: 933778
auuauggaaacaauccuuc

SEQ ID NO: 933780 - RNA, 19 nt, Artificial Sequence
  Description of Artificial Sequence: Synthetic oligonucleotide
  Sense strand starting at position 2866 of SEQ ID NO: 913522
ugaguuacuguuuaggaug

SEQ ID NO: 933781 - RNA, 19 nt, Artificial Sequence
  Description of Artificial Sequence: Synthetic oligonucleotide
  Antisense strand to SEQ ID NO: 933780
cauccuaaacaguaacuca

SEQ ID NO: 933782 - RNA, 19 nt, Artificial Sequence
  Description of Artificial Sequence: Synthetic oligonucleotide
  Sense strand starting at position 3260 of SEQ ID NO: 913522
ucaguaacagauugaguaa

SEQ ID NO: 933783 - RNA, 19 nt, Artificial Sequence
  Description of Artificial Sequence: Synthetic oligonucleotide
  Antisense strand to SEQ ID NO: 933782
uuacucaaucuguuacuga

SEQ ID NO: 933784 - RNA, 19 nt, Artificial Sequence
  Description of Artificial Sequence: Synthetic oligonucleotide
  Sense strand starting at position 74 of SEQ ID NO: 913522
cuaccuucccaguaggauu

SEQ ID NO: 933785 - RNA, 19 nt, Artificial Sequence
  Description of Artificial Sequence: Synthetic oligonucleotide
  Antisense strand to SEQ ID NO: 933784
aauccuacugggaagguag

SEQ ID NO: 933786 - RNA, 19 nt, Artificial Sequence
  Description of Artificial Sequence: Synthetic oligonucleotide
  Sense strand starting at position 1511 of SEQ ID NO: 913522
ggcuaaacaccuuagaugu

SEQ ID NO: 933787 - RNA, 19 nt, Artificial Sequence
  Description of Artificial Sequence: Synthetic oligonucleotide
  Antisense strand to SEQ ID NO: 933786
acaucuaagguguuuagcc

SEQ ID NO: 933788 - RNA, 19 nt, Artificial Sequence
  Description of Artificial Sequence: Synthetic oligonucleotide
  Sense strand starting at position 1299 of SEQ ID NO: 913522
guagaaccuguguaaacau

SEQ ID NO: 933789 - RNA, 19 nt, Artificial Sequence
  Description of Artificial Sequence: Synthetic oligonucleotide
  Antisense strand to SEQ ID NO: 933788
auguuuacacagguucuac

SEQ ID NO: 933790 - RNA, 19 nt, Artificial Sequence
  Description of Artificial Sequence: Synthetic oligonucleotide
  Sense strand starting at position 3324 of SEQ ID NO: 913522
uccucacucggugagaaua

SEQ ID NO: 933791 - RNA, 19 nt, Artificial Sequence
  Description of Artificial Sequence: Synthetic oligonucleotide
  Antisense strand to SEQ ID NO: 933790
uauucucaccgagugagga

SEQ ID NO: 933792 - RNA, 19 nt, Artificial Sequence
  Description of Artificial Sequence: Synthetic oligonucleotide
  Sense strand starting at position 3249 of SEQ ID NO: 913522
uggaguaagcaucaguaac

SEQ ID NO: 933793 - RNA, 19 nt, Artificial Sequence
  Description of Artificial Sequence: Synthetic oligonucleotide
  Antisense strand to SEQ ID NO: 933792
guuacugaugcuuacucca

SEQ ID NO: 933794 - RNA, 19 nt, Artificial Sequence
  Description of Artificial Sequence: Synthetic oligonucleotide
  Sense strand starting at position 3624 of SEQ ID NO: 913522
uugaguugauaacucuaau

SEQ ID NO: 933795 - RNA, 19 nt, Artificial Sequence
  Description of Artificial Sequence: Synthetic oligonucleotide
  Antisense strand to SEQ ID NO: 933794
auuagaguuaucaacucaa

SEQ ID NO: 933796 - RNA, 19 nt, Artificial Sequence
  Description of Artificial Sequence: Synthetic oligonucleotide
  Sense strand starting at position 3760 of SEQ ID NO: 913522
ucagaaggauuguuuccau

SEQ ID NO: 933797 - RNA, 19 nt, Artificial Sequence
  Description of Artificial Sequence: Synthetic oligonucleotide
  Antisense strand to SEQ ID NO: 933796
auggaaacaauccuucuga

SEQ ID NO: 933798 - RNA, 19 nt, Artificial Sequence
  Description of Artificial Sequence: Synthetic oligonucleotide
  Sense strand starting at position 517 of SEQ ID NO: 913522
uccagugaugccuaugaua

SEQ ID NO: 933799 - RNA, 19 nt, Artificial Sequence
  Description of Artificial Sequence: Synthetic oligonucleotide
  Antisense strand to SEQ ID NO: 933798
uaucauaggcaucacugga

SEQ ID NO: 933800 - RNA, 19 nt, Artificial Sequence
  Description of Artificial Sequence: Synthetic oligonucleotide
  Sense strand starting at position 3614 of SEQ ID NO: 913522
cuaauagaauuugaguuga

SEQ ID NO: 933801 - RNA, 19 nt, Artificial Sequence
  Description of Artificial Sequence: Synthetic oligonucleotide
  Antisense strand to SEQ ID NO: 933800
ucaacucaaauucuauuag

SEQ ID NO: 933802 - RNA, 19 nt, Artificial Sequence
  Description of Artificial Sequence: Synthetic oligonucleotide
  Sense strand starting at position 2982 of SEQ ID NO: 913522
cgugaagcaaaguagauua

SEQ ID NO: 933803 - RNA, 19 nt, Artificial Sequence
  Description of Artificial Sequence: Synthetic oligonucleotide
  Antisense strand to SEQ ID NO: 933802
uaaucuacuuugcuucacg

SEQ ID NO: 933804 - RNA, 19 nt, Artificial Sequence
  Description of Artificial Sequence: Synthetic oligonucleotide
  Sense strand starting at position 2880 of SEQ ID NO: 913522
ggaugcucauaccuuuaaa

SEQ ID NO: 933805 - RNA, 19 nt, Artificial Sequence
  Description of Artificial Sequence: Synthetic oligonucleotide
  Antisense strand to SEQ ID NO: 933804
uuuaaagguaugagcaucc

SEQ ID NO: 933806 - RNA, 19 nt, Artificial Sequence
  Description of Artificial Sequence: Synthetic oligonucleotide
  Sense strand starting at position 3369 of SEQ ID NO: 913522
ucccuagagucuuuaugaa

SEQ ID NO: 933807 - RNA, 19 nt, Artificial Sequence
  Description of Artificial Sequence: Synthetic oligonucleotide
  Antisense strand to SEQ ID NO: 933806
uucauaaagacucuaggga

SEQ ID NO: 933808 - RNA, 19 nt, Artificial Sequence
  Description of Artificial Sequence: Synthetic oligonucleotide
  Sense strand starting at position 776 of SEQ ID NO: 913522
auaacaaugcaauggucau

SEQ ID NO: 933809 - RNA, 19 nt, Artificial Sequence
  Description of Artificial Sequence: Synthetic oligonucleotide
  Antisense strand to SEQ ID NO: 933808
augaccauugcauuguuau

SEQ ID NO: 933810 - RNA, 19 nt, Artificial Sequence
  Description of Artificial Sequence: Synthetic oligonucleotide
  Sense strand starting at position 2859 of SEQ ID NO: 913522
uuagaagugaguuacuguu

SEQ ID NO: 933811 - RNA, 19 nt, Artificial Sequence
  Description of Artificial Sequence: Synthetic oligonucleotide
  Antisense strand to SEQ ID NO: 933810
aacaguaacucacuucuaa

SEQ ID NO: 933812 - RNA, 19 nt, Artificial Sequence
  Description of Artificial Sequence: Synthetic oligonucleotide
  Sense strand starting at position 3037 of SEQ ID NO: 913522
augcaaguucuugaagggu

SEQ ID NO: 933813 - RNA, 19 nt, Artificial Sequence
  Description of Artificial Sequence: Synthetic oligonucleotide
  Antisense strand to SEQ ID NO: 933812
acccuucaagaacuugcau

SEQ ID NO: 933814 - RNA, 19 nt, Artificial Sequence
  Description of Artificial Sequence: Synthetic oligonucleotide
  Sense strand starting at position 1394 of SEQ ID NO: 913522
uaguaauuacuucggaaac

SEQ ID NO: 933815 - RNA, 19 nt, Artificial Sequence
  Description of Artificial Sequence: Synthetic oligonucleotide
  Antisense strand to SEQ ID NO: 933814
guuuccgaaguaauuacua

SEQ ID NO: 933816 - RNA, 19 nt, Artificial Sequence
  Description of Artificial Sequence: Synthetic oligonucleotide
  Sense strand starting at position 3512 of SEQ ID NO: 913522
gacagaguuguguaaaugu

SEQ ID NO: 933817 - RNA, 19 nt, Artificial Sequence
  Description of Artificial Sequence: Synthetic oligonucleotide
  Antisense strand to SEQ ID NO: 933816
acauuuacacaacucuguc

SEQ ID NO: 933818 - RNA, 19 nt, Artificial Sequence
  Description of Artificial Sequence: Synthetic oligonucleotide
  Sense strand starting at position 2774 of SEQ ID NO: 913522
uuaguugcucuauagaauc

SEQ ID NO: 933819 - RNA, 19 nt, Artificial Sequence
  Description of Artificial Sequence: Synthetic oligonucleotide
  Antisense strand to SEQ ID NO: 933818
gauucuauagagcaacuaa

SEQ ID NO: 933820 - RNA, 19 nt, Artificial Sequence
  Description of Artificial Sequence: Synthetic oligonucleotide
  Sense strand starting at position 3909 of SEQ ID NO: 913522
accauaauguguucuaaug

SEQ ID NO: 933821 - RNA, 19 nt, Artificial Sequence
  Description of Artificial Sequence: Synthetic oligonucleotide
  Antisense strand to SEQ ID NO: 933820
cauuagaacacauuauggu

SEQ ID NO: 933822 - RNA, 19 nt, Artificial Sequence
  Description of Artificial Sequence: Synthetic oligonucleotide
  Sense strand starting at position 1392 of SEQ ID NO: 913522
ccuaguaauuacuucggaa

SEQ ID NO: 933823 - RNA, 19 nt, Artificial Sequence
  Description of Artificial Sequence: Synthetic oligonucleotide
  Antisense strand to SEQ ID NO: 933822
uuccgaaguaauuacuagg

SEQ ID NO: 933824 - RNA, 19 nt, Artificial Sequence
  Description of Artificial Sequence: Synthetic oligonucleotide
  Sense strand starting at position 1522 of SEQ ID NO: 913522
uuagauguuuaggccacaa

SEQ ID NO: 933825 - RNA, 19 nt, Artificial Sequence
  Description of Artificial Sequence: Synthetic oligonucleotide
  Antisense strand to SEQ ID NO: 933824
uuguggccuaaacaucuaa

SEQ ID NO: 933826 - RNA, 19 nt, Artificial Sequence
  Description of Artificial Sequence: Synthetic oligonucleotide
  Sense strand starting at position 3508 of SEQ ID NO: 913522
ucaggacagaguuguguaa

SEQ ID NO: 933827 - RNA, 19 nt, Artificial Sequence
  Description of Artificial Sequence: Synthetic oligonucleotide
  Antisense strand to SEQ ID NO: 933826
uuacacaacucuguccuga

SEQ ID NO: 933828 - RNA, 19 nt, Artificial Sequence
  Description of Artificial Sequence: Synthetic oligonucleotide
  Sense strand starting at position 1352 of SEQ ID NO: 913522
ugagguaugcucuaaguug

SEQ ID NO: 933829 - RNA, 19 nt, Artificial Sequence
  Description of Artificial Sequence: Synthetic oligonucleotide
  Antisense strand to SEQ ID NO: 933828
caacuuagagcauaccuca

SEQ ID NO: 933830 - RNA, 19 nt, Artificial Sequence
  Description of Artificial Sequence: Synthetic oligonucleotide
  Sense strand starting at position 2617 of SEQ ID NO: 913522
uacauagaguuccuguaug

SEQ ID NO: 933831 - RNA, 19 nt, Artificial Sequence
  Description of Artificial Sequence: Synthetic oligonucleotide
  Antisense strand to SEQ ID NO: 933830
cauacaggaacucuaugua

SEQ ID NO: 933832 - RNA, 19 nt, Artificial Sequence
  Description of Artificial Sequence: Synthetic oligonucleotide
  Sense strand starting at position 3837 of SEQ ID NO: 913522
uccucuuaggccuaaguau

SEQ ID NO: 933833 - RNA, 19 nt, Artificial Sequence
  Description of Artificial Sequence: Synthetic oligonucleotide
  Antisense strand to SEQ ID NO: 933832
auacuuaggccuaagagga

SEQ ID NO: 933834 - RNA, 19 nt, Artificial Sequence
  Description of Artificial Sequence: Synthetic oligonucleotide
  Sense strand starting at position 519 of SEQ ID NO: 913522
cagugaugccuaugauaau

SEQ ID NO: 933835 - RNA, 19 nt, Artificial Sequence
  Description of Artificial Sequence: Synthetic oligonucleotide
  Antisense strand to SEQ ID NO: 933834
auuaucauaggcaucacug

SEQ ID NO: 933836 - RNA, 19 nt, Artificial Sequence
  Description of Artificial Sequence: Synthetic oligonucleotide
  Sense strand starting at position 1526 of SEQ ID NO: 913523
auguuuaggccacaaacaa

SEQ ID NO: 933837 - RNA, 19 nt, Artificial Sequence
  Description of Artificial Sequence: Synthetic oligonucleotide
  Antisense strand to SEQ ID NO: 933836
uuguuuguggccuaaacau

SEQ ID NO: 933838 - RNA, 19 nt, Artificial Sequence
  Description of Artificial Sequence: Synthetic oligonucleotide
  Sense strand starting at position 3966 of SEQ ID NO: 913523
uuaaacuuccuuugaagga

SEQ ID NO: 933839 - RNA, 19 nt, Artificial Sequence
  Description of Artificial Sequence: Synthetic oligonucleotide
  Antisense strand to SEQ ID NO: 933838
uccuucaaaggaaguuuaa

SEQ ID NO: 933840 - RNA, 19 nt, Artificial Sequence
  Description of Artificial Sequence: Synthetic oligonucleotide
  Sense strand starting at position 3099 of SEQ ID NO: 913523
gagcgauuauuugcaacau

SEQ ID NO: 933841 - RNA, 19 nt, Artificial Sequence
  Description of Artificial Sequence: Synthetic oligonucleotide
  Antisense strand to SEQ ID NO: 933840
auguugcaaauaaucgcuc

SEQ ID NO: 933842 - RNA, 19 nt, Artificial Sequence
  Description of Artificial Sequence: Synthetic oligonucleotide
  Sense strand starting at position 3729 of SEQ ID NO: 913523
ugucaauuugugggcauga

SEQ ID NO: 933843 - RNA, 19 nt, Artificial Sequence
  Description of Artificial Sequence: Synthetic oligonucleotide
  Antisense strand to SEQ ID NO: 933842
ucaugcccacaaauugaca

SEQ ID NO: 933844 - RNA, 19 nt, Artificial Sequence
  Description of Artificial Sequence: Synthetic oligonucleotide
  Sense strand starting at position 2929 of SEQ ID NO: 913523
ucucuauuucuacgaaguu

SEQ ID NO: 933845 - RNA, 19 nt, Artificial Sequence
  Description of Artificial Sequence: Synthetic oligonucleotide
  Antisense strand to SEQ ID NO: 933844
aacuucguagaaauagaga

SEQ ID NO: 933846 - RNA, 19 nt, Artificial Sequence
  Description of Artificial Sequence: Synthetic oligonucleotide
  Sense strand starting at position 1524 of SEQ ID NO: 913523
agauguuuaggccacaaac

SEQ ID NO: 933847 - RNA, 19 nt, Artificial Sequence
  Description of Artificial Sequence: Synthetic oligonucleotide
  Antisense strand to SEQ ID NO: 933846
guuuguggccuaaacaucu

SEQ ID NO: 933848 - RNA, 19 nt, Artificial Sequence
  Description of Artificial Sequence: Synthetic oligonucleotide
  Sense strand starting at position 2987 of SEQ ID NO: 913523
agcaaaguagauuagguau

SEQ ID NO: 933849 - RNA, 19 nt, Artificial Sequence
  Description of Artificial Sequence: Synthetic oligonucleotide
  Antisense strand to SEQ ID NO: 933848
auaccuaaucuacuuugcu

SEQ ID NO: 933850 - RNA, 19 nt, Artificial Sequence
  Description of Artificial Sequence: Synthetic oligonucleotide
  Sense strand starting at position 2847 of SEQ ID NO: 913523
gcaagaucuuuauuagaag

SEQ ID NO: 933851 - RNA, 19 nt, Artificial Sequence
  Description of Artificial Sequence: Synthetic oligonucleotide
  Antisense strand to SEQ ID NO: 933850
cuucuaauaaagaucuugc

SEQ ID NO: 933852 - RNA, 19 nt, Artificial Sequence
  Description of Artificial Sequence: Synthetic oligonucleotide
  Sense strand starting at position 3341 of SEQ ID NO: 913523
uauaguagcagugaaggau

SEQ ID NO: 933853 - RNA, 19 nt, Artificial Sequence
  Description of Artificial Sequence: Synthetic oligonucleotide
  Antisense strand to SEQ ID NO: 933852
auccuucacugcuacuaua

SEQ ID NO: 933854 - RNA, 19 nt, Artificial Sequence
  Description of Artificial Sequence: Synthetic oligonucleotide
  Sense strand starting at position 3263 of SEQ ID NO: 913523
guaacagauugaguaacua

SEQ ID NO: 933855 - RNA, 19 nt, Artificial Sequence
  Description of Artificial Sequence: Synthetic oligonucleotide
  Antisense strand to SEQ ID NO: 933854
uaguuacucaaucuguuac

SEQ ID NO: 933856 - RNA, 19 nt, Artificial Sequence
  Description of Artificial Sequence: Synthetic oligonucleotide
  Sense strand starting at position 2520 of SEQ ID NO: 913523
augugauucuugcuuauuu

SEQ ID NO: 933857 - RNA, 19 nt, Artificial Sequence
  Description of Artificial Sequence: Synthetic oligonucleotide
  Antisense strand to SEQ ID NO: 933856
aaauaagcaagaaucacau

SEQ ID NO: 933858 - RNA, 19 nt, Artificial Sequence
  Description of Artificial Sequence: Synthetic oligonucleotide
  Sense strand starting at position 3763 of SEQ ID NO: 913523
gaaggauuguuuccauaau

SEQ ID NO: 933859 - RNA, 19 nt, Artificial Sequence
  Description of Artificial Sequence: Synthetic oligonucleotide
  Antisense strand to SEQ ID NO: 933858
auuauggaaacaauccuuc

SEQ ID NO: 933860 - RNA, 19 nt, Artificial Sequence
  Description of Artificial Sequence: Synthetic oligonucleotide
  Sense strand starting at position 2866 of SEQ ID NO: 913523
ugaguuacuguuuaggaug

SEQ ID NO: 933861 - RNA, 19 nt, Artificial Sequence
  Description of Artificial Sequence: Synthetic oligonucleotide
  Antisense strand to SEQ ID NO: 933860
cauccuaaacaguaacuca

SEQ ID NO: 933862 - RNA, 19 nt, Artificial Sequence
  Description of Artificial Sequence: Synthetic oligonucleotide
  Sense strand starting at position 3260 of SEQ ID NO: 913523
ucaguaacagauugaguaa

SEQ ID NO: 933863 - RNA, 19 nt, Artificial Sequence
  Description of Artificial Sequence: Synthetic oligonucleotide
  Antisense strand to SEQ ID NO: 933862
uuacucaaucuguuacuga

SEQ ID NO: 933864 - RNA, 19 nt, Artificial Sequence
  Description of Artificial Sequence: Synthetic oligonucleotide
  Sense strand starting at position 74 of SEQ ID NO: 913523
cuaccuucccaguaggauu

SEQ ID NO: 933865 - RNA, 19 nt, Artificial Sequence
  Description of Artificial Sequence: Synthetic oligonucleotide
  Antisense strand to SEQ ID NO: 933864
aauccuacugggaagguag

SEQ ID NO: 933866 - RNA, 19 nt, Artificial Sequence
  Description of Artificial Sequence: Synthetic oligonucleotide
  Sense strand starting at position 1511 of SEQ ID NO: 913523
ggcuaaacaccuuagaugu

SEQ ID NO: 933867 - RNA, 19 nt, Artificial Sequence
  Description of Artificial Sequence: Synthetic oligonucleotide
  Antisense strand to SEQ ID NO: 933866
acaucuaagguguuuagcc

SEQ ID NO: 933868 - RNA, 19 nt, Artificial Sequence
  Description of Artificial Sequence: Synthetic oligonucleotide
  Sense strand starting at position 1299 of SEQ ID NO: 913523
guagaaccuguguaaacau

SEQ ID NO: 933869 - RNA, 19 nt, Artificial Sequence
  Description of Artificial Sequence: Synthetic oligonucleotide
  Antisense strand to SEQ ID NO: 933868
auguuuacacagguucuac

SEQ ID NO: 933870 - RNA, 19 nt, Artificial Sequence
  Description of Artificial Sequence: Synthetic oligonucleotide
  Sense strand starting at position 3324 of SEQ ID NO: 913523
uccucacucggugagaaua

SEQ ID NO: 933871 - RNA, 19 nt, Artificial Sequence
  Description of Artificial Sequence: Synthetic oligonucleotide
  Antisense strand to SEQ ID NO: 933870
uauucucaccgagugagga

SEQ ID NO: 933872 - RNA, 19 nt, Artificial Sequence
  Description of Artificial Sequence: Synthetic oligonucleotide
  Sense strand starting at position 3249 of SEQ ID NO: 913523
uggaguaagcaucaguaac

SEQ ID NO: 933873 - RNA, 19 nt, Artificial Sequence
  Description of Artificial Sequence: Synthetic oligonucleotide
  Antisense strand to SEQ ID NO: 933872
guuacugaugcuuacucca

SEQ ID NO: 933874 - RNA, 19 nt, Artificial Sequence
  Description of Artificial Sequence: Synthetic oligonucleotide
  Sense strand starting at position 3624 of SEQ ID NO: 913523
uugaguugauaacucuaau

SEQ ID NO: 933875 - RNA, 19 nt, Artificial Sequence
  Description of Artificial Sequence: Synthetic oligonucleotide
  Antisense strand to SEQ ID NO: 933874
auuagaguuaucaacucaa

SEQ ID NO: 933876 - RNA, 19 nt, Artificial Sequence
  Description of Artificial Sequence: Synthetic oligonucleotide
  Sense strand starting at position 3760 of SEQ ID NO: 913523
ucagaaggauuguuuccau

SEQ ID NO: 933877 - RNA, 19 nt, Artificial Sequence
  Description of Artificial Sequence: Synthetic oligonucleotide
  Antisense strand to SEQ ID NO: 933876
auggaaacaauccuucuga

SEQ ID NO: 933878 - RNA, 19 nt, Artificial Sequence
  Description of Artificial Sequence: Synthetic oligonucleotide
  Sense strand starting at position 517 of SEQ ID NO: 913523
uccagugaugccuaugaua

SEQ ID NO: 933879 - RNA, 19 nt, Artificial Sequence
  Description of Artificial Sequence: Synthetic oligonucleotide
  Antisense strand to SEQ ID NO: 933878
uaucauaggcaucacugga

SEQ ID NO: 933880 - RNA, 19 nt, Artificial Sequence
  Description of Artificial Sequence: Synthetic oligonucleotide
  Sense strand starting at position 3614 of SEQ ID NO: 913523
cuaauagaauuugaguuga

SEQ ID NO: 933881 - RNA, 19 nt, Artificial Sequence
  Description of Artificial Sequence: Synthetic oligonucleotide
  Antisense strand to SEQ ID NO: 933880
ucaacucaaauucuauuag

SEQ ID NO: 933882 - RNA, 19 nt, Artificial Sequence
  Description of Artificial Sequence: Synthetic oligonucleotide
  Sense strand starting at position 2982 of SEQ ID NO: 913523
cgugaagcaaaguagauua

SEQ ID NO: 933883 - RNA, 19 nt, Artificial Sequence
  Description of Artificial Sequence: Synthetic oligonucleotide
  Antisense strand to SEQ ID NO: 933882
uaaucuacuuugcuucacg

SEQ ID NO: 933884 - RNA, 19 nt, Artificial Sequence
  Description of Artificial Sequence: Synthetic oligonucleotide
  Sense strand starting at position 2880 of SEQ ID NO: 913523
ggaugcucauaccuuuaaa

SEQ ID NO: 933885 - RNA, 19 nt, Artificial Sequence
  Description of Artificial Sequence: Synthetic oligonucleotide
  Antisense strand to SEQ ID NO: 933884
uuuaaagguaugagcaucc

SEQ ID NO: 933886 - RNA, 19 nt, Artificial Sequence
  Description of Artificial Sequence: Synthetic oligonucleotide
  Sense strand starting at position 3369 of SEQ ID NO: 913523
ucccuagagucuuuaugaa

SEQ ID NO: 933887 - RNA, 19 nt, Artificial Sequence
  Description of Artificial Sequence: Synthetic oligonucleotide
  Antisense strand to SEQ ID NO: 933886
uucauaaagacucuaggga

SEQ ID NO: 933888 - RNA, 19 nt, Artificial Sequence
  Description of Artificial Sequence: Synthetic oligonucleotide
  Sense strand starting at position 776 of SEQ ID NO: 913523
auaacaaugcaauggucau

SEQ ID NO: 933889 - RNA, 19 nt, Artificial Sequence
  Description of Artificial Sequence: Synthetic oligonucleotide
  Antisense strand to SEQ ID NO: 933888
augaccauugcauuguuau

SEQ ID NO: 933890 - RNA, 19 nt, Artificial Sequence
  Description of Artificial Sequence: Synthetic oligonucleotide
  Sense strand starting at position 2859 of SEQ ID NO: 913523
uuagaagugaguuacuguu

SEQ ID NO: 933891 - RNA, 19 nt, Artificial Sequence
  Description of Artificial Sequence: Synthetic oligonucleotide
  Antisense strand to SEQ ID NO: 933890
aacaguaacucacuucuaa

SEQ ID NO: 933892 - RNA, 19 nt, Artificial Sequence
  Description of Artificial Sequence: Synthetic oligonucleotide
  Sense strand starting at position 3037 of SEQ ID NO: 913523
augcaaguucuugaagggu

SEQ ID NO: 933893 - RNA, 19 nt, Artificial Sequence
  Description of Artificial Sequence: Synthetic oligonucleotide
  Antisense strand to SEQ ID NO: 933892
acccuucaagaacuugcau

SEQ ID NO: 933894 - RNA, 19 nt, Artificial Sequence
  Description of Artificial Sequence: Synthetic oligonucleotide
  Sense strand starting at position 1394 of SEQ ID NO: 913523
uaguaauuacuucggaaac

SEQ ID NO: 933895 - RNA, 19 nt, Artificial Sequence
  Description of Artificial Sequence: Synthetic oligonucleotide
  Antisense strand to SEQ ID NO: 933894
guuuccgaaguaauuacua

SEQ ID NO: 933896 - RNA, 19 nt, Artificial Sequence
  Description of Artificial Sequence: Synthetic oligonucleotide
  Sense strand starting at position 3512 of SEQ ID NO: 913523
gacagaguuguguaaaugu

SEQ ID NO: 933897 - RNA, 19 nt, Artificial Sequence
  Description of Artificial Sequence: Synthetic oligonucleotide
  Antisense strand to SEQ ID NO: 933896
acauuuacacaacucuguc

SEQ ID NO: 933898 - RNA, 19 nt, Artificial Sequence
  Description of Artificial Sequence: Synthetic oligonucleotide
  Sense strand starting at position 2774 of SEQ ID NO: 913523
uuaguugcucuauagaauc

SEQ ID NO: 933899 - RNA, 19 nt, Artificial Sequence
  Description of Artificial Sequence: Synthetic oligonucleotide
  Antisense strand to SEQ ID NO: 933898
gauucuauagagcaacuaa

SEQ ID NO: 933900 - RNA, 19 nt, Artificial Sequence
  Description of Artificial Sequence: Synthetic oligonucleotide
  Sense strand starting at position 3909 of SEQ ID NO: 913523
accauaauguguucuaaug

SEQ ID NO: 933901 - RNA, 19 nt, Artificial Sequence
  Description of Artificial Sequence: Synthetic oligonucleotide
  Antisense strand to SEQ ID NO: 933900
cauuagaacacauuauggu

SEQ ID NO: 933902 - RNA, 19 nt, Artificial Sequence
  Description of Artificial Sequence: Synthetic oligonucleotide
  Sense strand starting at position 1392 of SEQ ID NO: 913523
ccuaguaauuacuucggaa

SEQ ID NO: 933903 - RNA, 19 nt, Artificial Sequence
  Description of Artificial Sequence: Synthetic oligonucleotide
  Antisense strand to SEQ ID NO: 933902
uuccgaaguaauuacuagg

SEQ ID NO: 933904 - RNA, 19 nt, Artificial Sequence
  Description of Artificial Sequence: Synthetic oligonucleotide
  Sense strand starting at position 1522 of SEQ ID NO: 913523
uuagauguuuaggccacaa

SEQ ID NO: 933905 - RNA, 19 nt, Artificial Sequence
  Description of Artificial Sequence: Synthetic oligonucleotide
  Antisense strand to SEQ ID NO: 933904
uuguggccuaaacaucuaa

SEQ ID NO: 933906 - RNA, 19 nt, Artificial Sequence
  Description of Artificial Sequence: Synthetic oligonucleotide
  Sense strand starting at position 3508 of SEQ ID NO: 913523
ucaggacagaguuguguaa

SEQ ID NO: 933907 - RNA, 19 nt, Artificial Sequence
  Description of Artificial Sequence: Synthetic oligonucleotide
  Antisense strand to SEQ ID NO: 933906
uuacacaacucuguccuga

SEQ ID NO: 933908 - RNA, 19 nt, Artificial Sequence
  Description of Artificial Sequence: Synthetic oligonucleotide
  Sense strand starting at position 1352 of SEQ ID NO: 913523
ugagguaugcucuaaguug

SEQ ID NO: 933909 - RNA, 19 nt, Artificial Sequence
  Description of Artificial Sequence: Synthetic oligonucleotide
  Antisense strand to SEQ ID NO: 933908
caacuuagagcauaccuca

SEQ ID NO: 933910 - RNA, 19 nt, Artificial Sequence
  Description of Artificial Sequence: Synthetic oligonucleotide
  Sense strand starting at position 2617 of SEQ ID NO: 913523
uacauagaguuccuguaug

SEQ ID NO: 933911 - RNA, 19 nt, Artificial Sequence
  Description of Artificial Sequence: Synthetic oligonucleotide
  Antisense strand to SEQ ID NO: 933910
cauacaggaacucuaugua

SEQ ID NO: 933912 - RNA, 19 nt, Artificial Sequence
  Description of Artificial Sequence: Synthetic oligonucleotide
  Sense strand starting at position 3837 of SEQ ID NO: 913523
uccucuuaggccuaaguau

SEQ ID NO: 933913 - RNA, 19 nt, Artificial Sequence
  Description of Artificial Sequence: Synthetic oligonucleotide
  Antisense strand to SEQ ID NO: 933912
auacuuaggccuaagagga

SEQ ID NO: 933914 - RNA, 19 nt, Artificial Sequence
  Description of Artificial Sequence: Synthetic oligonucleotide
  Sense strand starting at position 519 of SEQ ID NO: 913523
cagugaugccuaugauaau

SEQ ID NO: 933915 - RNA, 19 nt, Artificial Sequence
  Description of Artificial Sequence: Synthetic oligonucleotide
  Antisense strand to SEQ ID NO: 933914
auuaucauaggcaucacug

SEQ ID NO: 933916 - RNA, 19 nt, Artificial Sequence
  Description of Artificial Sequence: Synthetic oligonucleotide
  Sense strand starting at position 1739 of SEQ ID NO: 913524
ggagaggguguuggauuaa

SEQ ID NO: 933917 - RNA, 19 nt, Artificial Sequence
  Description of Artificial Sequence: Synthetic oligonucleotide
  Antisense strand to SEQ ID NO: 933916
uuaauccaacacccucucc

SEQ ID NO: 933918 - RNA, 19 nt, Artificial Sequence
  Description of Artificial Sequence: Synthetic oligonucleotide
  Sense strand starting at position 2150 of SEQ ID NO: 913524
agcgccuagaucugaauuu

SEQ ID NO: 933919 - RNA, 19 nt, Artificial Sequence
  Description of Artificial Sequence: Synthetic oligonucleotide
  Antisense strand to SEQ ID NO: 933918
aaauucagaucuaggcgcu

SEQ ID NO: 933920 - RNA, 19 nt, Artificial Sequence
  Description of Artificial Sequence: Synthetic oligonucleotide
  Sense strand starting at position 2268 of SEQ ID NO: 913524
augugaauuguguauggag

SEQ ID NO: 933921 - RNA, 19 nt, Artificial Sequence
  Description of Artificial Sequence: Synthetic oligonucleotide
  Antisense strand to SEQ ID NO: 933920
cuccauacacaauucacau

SEQ ID NO: 933922 - RNA, 19 nt, Artificial Sequence
  Description of Artificial Sequence: Synthetic oligonucleotide
  Sense strand starting at position 132 of SEQ ID NO: 913524
ggaugcguucguuuagguu

SEQ ID NO: 933923 - RNA, 19 nt, Artificial Sequence
  Description of Artificial Sequence: Synthetic oligonucleotide
  Antisense strand to SEQ ID NO: 933922
aaccuaaacgaacgcaucc

SEQ ID NO: 933924 - RNA, 19 nt, Artificial Sequence
  Description of Artificial Sequence: Synthetic oligonucleotide
  Sense strand starting at position 2290 of SEQ ID NO: 913524
gccaguguaaguuacaaga

SEQ ID NO: 933925 - RNA, 19 nt, Artificial Sequence
  Description of Artificial Sequence: Synthetic oligonucleotide
  Antisense strand to SEQ ID NO: 933924
ucuuguaacuuacacuggc

SEQ ID NO: 933926 - RNA, 19 nt, Artificial Sequence
  Description of Artificial Sequence: Synthetic oligonucleotide
  Sense strand starting at position 2711 of SEQ ID NO: 913524
gguuguucuguugaaacac

SEQ ID NO: 933927 - RNA, 19 nt, Artificial Sequence
  Description of Artificial Sequence: Synthetic oligonucleotide
  Antisense strand to SEQ ID NO: 933926
guguuucaacagaacaacc

SEQ ID NO: 933928 - RNA, 19 nt, Artificial Sequence
  Description of Artificial Sequence: Synthetic oligonucleotide
  Sense strand starting at position 2502 of SEQ ID NO: 913524
gauggauacgagugucuaa

SEQ ID NO: 933929 - RNA, 19 nt, Artificial Sequence
  Description of Artificial Sequence: Synthetic oligonucleotide
  Antisense strand to SEQ ID NO: 933928
uuagacacucguauccauc

SEQ ID NO: 933930 - RNA, 19 nt, Artificial Sequence
  Description of Artificial Sequence: Synthetic oligonucleotide
  Sense strand starting at position 3493 of SEQ ID NO: 913524
gugaaauggcguuaugaau

SEQ ID NO: 933931 - RNA, 19 nt, Artificial Sequence
  Description of Artificial Sequence: Synthetic oligonucleotide
  Antisense strand to SEQ ID NO: 933930
auucauaacgccauuucac

SEQ ID NO: 933932 - RNA, 19 nt, Artificial Sequence
  Description of Artificial Sequence: Synthetic oligonucleotide
  Sense strand starting at position 1748 of SEQ ID NO: 913524
guuggauuaaccugagcca

SEQ ID NO: 933933 - RNA, 19 nt, Artificial Sequence
  Description of Artificial Sequence: Synthetic oligonucleotide
  Antisense strand to SEQ ID NO: 933932
uggcucagguuaauccaac

SEQ ID NO: 933934 - RNA, 19 nt, Artificial Sequence
  Description of Artificial Sequence: Synthetic oligonucleotide
  Sense strand starting at position 2708 of SEQ ID NO: 913524
caagguuguucuguugaaa

SEQ ID NO: 933935 - RNA, 19 nt, Artificial Sequence
  Description of Artificial Sequence: Synthetic oligonucleotide
  Antisense strand to SEQ ID NO: 933934
uuucaacagaacaaccuug

SEQ ID NO: 933936 - RNA, 19 nt, Artificial Sequence
  Description of Artificial Sequence: Synthetic oligonucleotide
  Sense strand starting at position 2505 of SEQ ID NO: 913524
ggauacgagugucuaaucu

SEQ ID NO: 933937 - RNA, 19 nt, Artificial Sequence
  Description of Artificial Sequence: Synthetic oligonucleotide
  Antisense strand to SEQ ID NO: 933936
agauuagacacucguaucc

SEQ ID NO: 933938 - RNA, 19 nt, Artificial Sequence
  Description of Artificial Sequence: Synthetic oligonucleotide
  Sense strand starting at position 3601 of SEQ ID NO: 913524
cugucauguuaccuuuaaa

SEQ ID NO: 933939 - RNA, 19 nt, Artificial Sequence
  Description of Artificial Sequence: Synthetic oligonucleotide
  Antisense strand to SEQ ID NO: 933938
uuuaaagguaacaugacag

SEQ ID NO: 933940 - RNA, 19 nt, Artificial Sequence
  Description of Artificial Sequence: Synthetic oligonucleotide
  Sense strand starting at position 3480 of SEQ ID NO: 913524
gacuucugccucugugaaa

SEQ ID NO: 933941 - RNA, 19 nt, Artificial Sequence
  Description of Artificial Sequence: Synthetic oligonucleotide
  Antisense strand to SEQ ID NO: 933940
uuucacagaggcagaaguc

SEQ ID NO: 933942 - RNA, 19 nt, Artificial Sequence
  Description of Artificial Sequence: Synthetic oligonucleotide
  Sense strand starting at position 2462 of SEQ ID NO: 913524
accauauucuuagcuguua

SEQ ID NO: 933943 - RNA, 19 nt, Artificial Sequence
  Description of Artificial Sequence: Synthetic oligonucleotide
  Antisense strand to SEQ ID NO: 933942
uaacagcuaagaauauggu

SEQ ID NO: 933944 - RNA, 19 nt, Artificial Sequence
  Description of Artificial Sequence: Synthetic oligonucleotide
  Sense strand starting at position 3481 of SEQ ID NO: 913524
acuucugccucugugaaau

SEQ ID NO: 933945 - RNA, 19 nt, Artificial Sequence
  Description of Artificial Sequence: Synthetic oligonucleotide
  Antisense strand to SEQ ID NO: 933944
auuucacagaggcagaagu

SEQ ID NO: 933946 - RNA, 19 nt, Artificial Sequence
  Description of Artificial Sequence: Synthetic oligonucleotide
  Sense strand starting at position 3152 of SEQ ID NO: 913524
guggcaagauuacugcuua

SEQ ID NO: 933947 - RNA, 19 nt, Artificial Sequence
  Description of Artificial Sequence: Synthetic oligonucleotide
  Antisense strand to SEQ ID NO: 933946
uaagcaguaaucuugccac

SEQ ID NO: 933948 - RNA, 19 nt, Artificial Sequence
  Description of Artificial Sequence: Synthetic oligonucleotide
  Sense strand starting at position 3410 of SEQ ID NO: 913524
uugguauucuuagugaagc

SEQ ID NO: 933949 - RNA, 19 nt, Artificial Sequence
  Description of Artificial Sequence: Synthetic oligonucleotide
  Antisense strand to SEQ ID NO: 933948
gcuucacuaagaauaccaa

SEQ ID NO: 933950 - RNA, 19 nt, Artificial Sequence
  Description of Artificial Sequence: Synthetic oligonucleotide
  Sense strand starting at position 128 of SEQ ID NO: 913524
cgccggaugcguucguuua

SEQ ID NO: 933951 - RNA, 19 nt, Artificial Sequence
  Description of Artificial Sequence: Synthetic oligonucleotide
  Antisense strand to SEQ ID NO: 933950
uaaacgaacgcauccggcg

SEQ ID NO: 933952 - RNA, 19 nt, Artificial Sequence
  Description of Artificial Sequence: Synthetic oligonucleotide
  Sense strand starting at position 1266 of SEQ ID NO: 913524
gccuucuuggccuggauga

SEQ ID NO: 933953 - RNA, 19 nt, Artificial Sequence
  Description of Artificial Sequence: Synthetic oligonucleotide
  Antisense strand to SEQ ID NO: 933952
ucauccaggccaagaaggc

SEQ ID NO: 933954 - RNA, 19 nt, Artificial Sequence
  Description of Artificial Sequence: Synthetic oligonucleotide
  Sense strand starting at position 2509 of SEQ ID NO: 913524
acgagugucuaaucuuggu

SEQ ID NO: 933955 - RNA, 19 nt, Artificial Sequence
  Description of Artificial Sequence: Synthetic oligonucleotide
  Antisense strand to SEQ ID NO: 933954
accaagauuagacacucgu

SEQ ID NO: 933956 - RNA, 19 nt, Artificial Sequence
  Description of Artificial Sequence: Synthetic oligonucleotide
  Sense strand starting at position 3405 of SEQ ID NO: 913524
ucugguugguauucuuagu

SEQ ID NO: 933957 - RNA, 19 nt, Artificial Sequence
  Description of Artificial Sequence: Synthetic oligonucleotide
  Antisense strand to SEQ ID NO: 933956
acuaagaauaccaaccaga

SEQ ID NO: 933958 - RNA, 19 nt, Artificial Sequence
  Description of Artificial Sequence: Synthetic oligonucleotide
  Sense strand starting at position 2264 of SEQ ID NO: 913524
gcauaugugaauuguguau

SEQ ID NO: 933959 - RNA, 19 nt, Artificial Sequence
  Description of Artificial Sequence: Synthetic oligonucleotide
  Antisense strand to SEQ ID NO: 933958
auacacaauucacauaugc

SEQ ID NO: 933960 - RNA, 19 nt, Artificial Sequence
  Description of Artificial Sequence: Synthetic oligonucleotide
  Sense strand starting at position 3600 of SEQ ID NO: 913524
gcugucauguuaccuuuaa

SEQ ID NO: 933961 - RNA, 19 nt, Artificial Sequence
  Description of Artificial Sequence: Synthetic oligonucleotide
  Antisense strand to SEQ ID NO: 933960
uuaaagguaacaugacagc

SEQ ID NO: 933962 - RNA, 19 nt, Artificial Sequence
  Description of Artificial Sequence: Synthetic oligonucleotide
  Sense strand starting at position 1315 of SEQ ID NO: 913524
gcucgcaggucaucauaga

SEQ ID NO: 933963 - RNA, 19 nt, Artificial Sequence
  Description of Artificial Sequence: Synthetic oligonucleotide
  Antisense strand to SEQ ID NO: 933962
ucuaugaugaccugcgagc

SEQ ID NO: 933964 - RNA, 19 nt, Artificial Sequence
  Description of Artificial Sequence: Synthetic oligonucleotide
  Sense strand starting at position 3588 of SEQ ID NO: 913524
ggcacuuagugagcuguca

SEQ ID NO: 933965 - RNA, 19 nt, Artificial Sequence
  Description of Artificial Sequence: Synthetic oligonucleotide
  Antisense strand to SEQ ID NO: 933964
ugacagcucacuaagugcc

SEQ ID NO: 933966 - RNA, 19 nt, Artificial Sequence
  Description of Artificial Sequence: Synthetic oligonucleotide
  Sense strand starting at position 2303 of SEQ ID NO: 913524
acaagauagucacaaguac

SEQ ID NO: 933967 - RNA, 19 nt, Artificial Sequence
  Description of Artificial Sequence: Synthetic oligonucleotide
  Antisense strand to SEQ ID NO: 933966
guacuugugacuaucuugu

SEQ ID NO: 933968 - RNA, 19 nt, Artificial Sequence
  Description of Artificial Sequence: Synthetic oligonucleotide
  Sense strand starting at position 1352 of SEQ ID NO: 913524
cagggucagcugcgugaaa

SEQ ID NO: 933969 - RNA, 19 nt, Artificial Sequence
  Description of Artificial Sequence: Synthetic oligonucleotide
  Antisense strand to SEQ ID NO: 933968
uuucacgcagcugacccug

SEQ ID NO: 933970 - RNA, 19 nt, Artificial Sequence
  Description of Artificial Sequence: Synthetic oligonucleotide
  Sense strand starting at position 2692 of SEQ ID NO: 913524
cggugaagcucccuugcaa

SEQ ID NO: 933971 - RNA, 19 nt, Artificial Sequence
  Description of Artificial Sequence: Synthetic oligonucleotide
  Antisense strand to SEQ ID NO: 933970
uugcaagggagcuucaccg

SEQ ID NO: 933972 - RNA, 19 nt, Artificial Sequence
  Description of Artificial Sequence: Synthetic oligonucleotide
  Sense strand starting at position 1146 of SEQ ID NO: 913524
cggaguagcccgugaaggu

SEQ ID NO: 933973 - RNA, 19 nt, Artificial Sequence
  Description of Artificial Sequence: Synthetic oligonucleotide
  Antisense strand to SEQ ID NO: 933972
accuucacgggcuacuccg

SEQ ID NO: 933974 - RNA, 19 nt, Artificial Sequence
  Description of Artificial Sequence: Synthetic oligonucleotide
  Sense strand starting at position 2646 of SEQ ID NO: 913524
gcuguuauguugguagguu

SEQ ID NO: 933975 - RNA, 19 nt, Artificial Sequence
  Description of Artificial Sequence: Synthetic oligonucleotide
  Antisense strand to SEQ ID NO: 933974
aaccuaccaacauaacagc

SEQ ID NO: 933976 - RNA, 19 nt, Artificial Sequence
  Description of Artificial Sequence: Synthetic oligonucleotide
  Sense strand starting at position 141 of SEQ ID NO: 913524
cguuuagguuucgcacaca

SEQ ID NO: 933977 - RNA, 19 nt, Artificial Sequence
  Description of Artificial Sequence: Synthetic oligonucleotide
  Antisense strand to SEQ ID NO: 933976
ugugugcgaaaccuaaacg

SEQ ID NO: 933978 - RNA, 19 nt, Artificial Sequence
  Description of Artificial Sequence: Synthetic oligonucleotide
  Sense strand starting at position 2288 of SEQ ID NO: 913524
gcgccaguguaaguuacaa

SEQ ID NO: 933979 - RNA, 19 nt, Artificial Sequence
  Description of Artificial Sequence: Synthetic oligonucleotide
  Antisense strand to SEQ ID NO: 933978
uuguaacuuacacuggcgc

SEQ ID NO: 933980 - RNA, 19 nt, Artificial Sequence
  Description of Artificial Sequence: Synthetic oligonucleotide
  Sense strand starting at position 2292 of SEQ ID NO: 913524
caguguaaguuacaagaua

SEQ ID NO: 933981 - RNA, 19 nt, Artificial Sequence
  Description of Artificial Sequence: Synthetic oligonucleotide
  Antisense strand to SEQ ID NO: 933980
uaucuuguaacuuacacug

SEQ ID NO: 933982 - RNA, 19 nt, Artificial Sequence
  Description of Artificial Sequence: Synthetic oligonucleotide
  Sense strand starting at position 2654 of SEQ ID NO: 913524
guugguagguuggaaugaa

SEQ ID NO: 933983 - RNA, 19 nt, Artificial Sequence
  Description of Artificial Sequence: Synthetic oligonucleotide
  Antisense strand to SEQ ID NO: 933982
uucauuccaaccuaccaac

SEQ ID NO: 933984 - RNA, 19 nt, Artificial Sequence
  Description of Artificial Sequence: Synthetic oligonucleotide
  Sense strand starting at position 870 of SEQ ID NO: 913524
acagcagccucguuugcaa

SEQ ID NO: 933985 - RNA, 19 nt, Artificial Sequence
  Description of Artificial Sequence: Synthetic oligonucleotide
  Antisense strand to SEQ ID NO: 933984
uugcaaacgaggcugcugu

SEQ ID NO: 933986 - RNA, 19 nt, Artificial Sequence
  Description of Artificial Sequence: Synthetic oligonucleotide
  Sense strand starting at position 3423 of SEQ ID NO: 913524
ugaagcugguuucagagau

SEQ ID NO: 933987 - RNA, 19 nt, Artificial Sequence
  Description of Artificial Sequence: Synthetic oligonucleotide
  Antisense strand to SEQ ID NO: 933986
aucucugaaaccagcuuca

SEQ ID NO: 933988 - RNA, 19 nt, Artificial Sequence
  Description of Artificial Sequence: Synthetic oligonucleotide
  Sense strand starting at position 1738 of SEQ ID NO: 913524
gggagaggguguuggauua

SEQ ID NO: 933989 - RNA, 19 nt, Artificial Sequence
  Description of Artificial Sequence: Synthetic oligonucleotide
  Antisense strand to SEQ ID NO: 933988
uaauccaacacccucuccc

SEQ ID NO: 933990 - RNA, 19 nt, Artificial Sequence
  Description of Artificial Sequence: Synthetic oligonucleotide
  Sense strand starting at position 2460 of SEQ ID NO: 913524
agaccauauucuuagcugu

SEQ ID NO: 933991 - RNA, 19 nt, Artificial Sequence
  Description of Artificial Sequence: Synthetic oligonucleotide
  Antisense strand to SEQ ID NO: 933990
acagcuaagaauauggucu

SEQ ID NO: 933992 - RNA, 19 nt, Artificial Sequence
  Description of Artificial Sequence: Synthetic oligonucleotide
  Sense strand starting at position 131 of SEQ ID NO: 913524
cggaugcguucguuuaggu

SEQ ID NO: 933993 - RNA, 19 nt, Artificial Sequence
  Description of Artificial Sequence: Synthetic oligonucleotide
  Antisense strand to SEQ ID NO: 933992
accuaaacgaacgcauccg

SEQ ID NO: 933994 - RNA, 19 nt, Artificial Sequence
  Description of Artificial Sequence: Synthetic oligonucleotide
  Sense strand starting at position 129 of SEQ ID NO: 913524
gccggaugcguucguuuag

SEQ ID NO: 933995 - RNA, 19 nt, Artificial Sequence
  Description of Artificial Sequence: Synthetic oligonucleotide
  Antisense strand to SEQ ID NO: 933994
cuaaacgaacgcauccggc

SEQ ID NO: 933996 - RNA, 19 nt, Artificial Sequence
  Description of Artificial Sequence: Synthetic oligonucleotide
  Sense strand starting at position 3380 of SEQ ID NO: 913525
caguuugggacugauagua

SEQ ID NO: 933997 - RNA, 19 nt, Artificial Sequence
  Description of Artificial Sequence: Synthetic oligonucleotide
  Antisense strand to SEQ ID NO: 933996
uacuaucagucccaaacug

SEQ ID NO: 933998 - RNA, 19 nt, Artificial Sequence
  Description of Artificial Sequence: Synthetic oligonucleotide
  Sense strand starting at position 1000 of SEQ ID NO: 913525
aggccugauguauauuaaa

SEQ ID NO: 933999 - RNA, 19 nt, Artificial Sequence
  Description of Artificial Sequence: Synthetic oligonucleotide
  Antisense strand to SEQ ID NO: 933998
uuuaauauacaucaggccu

SEQ ID NO: 934000 - RNA, 19 nt, Artificial Sequence
  Description of Artificial Sequence: Synthetic oligonucleotide
  Sense strand starting at position 3897 of SEQ ID NO: 913525
gaccauuaccaguauguga

SEQ ID NO: 934001 - RNA, 19 nt, Artificial Sequence
  Description of Artificial Sequence: Synthetic oligonucleotide
  Antisense strand to SEQ ID NO: 934000
ucacauacugguaaugguc

SEQ ID NO: 934002 - RNA, 19 nt, Artificial Sequence
  Description of Artificial Sequence: Synthetic oligonucleotide
  Sense strand starting at position 925 of SEQ ID NO: 913525
aucugacuacuuggaacuu

SEQ ID NO: 934003 - RNA, 19 nt, Artificial Sequence
  Description of Artificial Sequence: Synthetic oligonucleotide
  Antisense strand to SEQ ID NO: 934002
aaguuccaaguagucagau

SEQ ID NO: 934004 - RNA, 19 nt, Artificial Sequence
  Description of Artificial Sequence: Synthetic oligonucleotide
  Sense strand starting at position 833 of SEQ ID NO: 913525
ucgguuuccuauuucugau

SEQ ID NO: 934005 - RNA, 19 nt, Artificial Sequence
  Description of Artificial Sequence: Synthetic oligonucleotide
  Antisense strand to SEQ ID NO: 934004
aucagaaauaggaaaccga

SEQ ID NO: 934006 - RNA, 19 nt, Artificial Sequence
  Description of Artificial Sequence: Synthetic oligonucleotide
  Sense strand starting at position 2337 of SEQ ID NO: 913525
uuucuuuauguggauuaca

SEQ ID NO: 934007 - RNA, 19 nt, Artificial Sequence
  Description of Artificial Sequence: Synthetic oligonucleotide
  Antisense strand to SEQ ID NO: 934006
uguaauccacauaaagaaa

SEQ ID NO: 934008 - RNA, 19 nt, Artificial Sequence
  Description of Artificial Sequence: Synthetic oligonucleotide
  Sense strand starting at position 3901 of SEQ ID NO: 913525
auuaccaguaugugaggaa

SEQ ID NO: 934009 - RNA, 19 nt, Artificial Sequence
  Description of Artificial Sequence: Synthetic oligonucleotide
  Antisense strand to SEQ ID NO: 934008
uuccucacauacugguaau

SEQ ID NO: 934010 - RNA, 19 nt, Artificial Sequence
  Description of Artificial Sequence: Synthetic oligonucleotide
  Sense strand starting at position 3343 of SEQ ID NO: 913525
guugguuaagagcauagau

SEQ ID NO: 934011 - RNA, 19 nt, Artificial Sequence
  Description of Artificial Sequence: Synthetic oligonucleotide
  Antisense strand to SEQ ID NO: 934010
aucuaugcucuuaaccaac

SEQ ID NO: 934012 - RNA, 19 nt, Artificial Sequence
  Description of Artificial Sequence: Synthetic oligonucleotide
  Sense strand starting at position 278 of SEQ ID NO: 913525
uacuuaagugacugaggua

SEQ ID NO: 934013 - RNA, 19 nt, Artificial Sequence
  Description of Artificial Sequence: Synthetic oligonucleotide
  Antisense strand to SEQ ID NO: 934012
uaccucagucacuuaagua

SEQ ID NO: 934014 - RNA, 19 nt, Artificial Sequence
  Description of Artificial Sequence: Synthetic oligonucleotide
  Sense strand starting at position 2092 of SEQ ID NO: 913525
guuaauugucgagcgcgga

SEQ ID NO: 934015 - RNA, 19 nt, Artificial Sequence
  Description of Artificial Sequence: Synthetic oligonucleotide
  Antisense strand to SEQ ID NO: 934014
uccgcgcucgacaauuaac

SEQ ID NO: 934016 - RNA, 19 nt, Artificial Sequence
  Description of Artificial Sequence: Synthetic oligonucleotide
  Sense strand starting at position 3379 of SEQ ID NO: 913525
acaguuugggacugauagu

SEQ ID NO: 934017 - RNA, 19 nt, Artificial Sequence
  Description of Artificial Sequence: Synthetic oligonucleotide
  Antisense strand to SEQ ID NO: 934016
acuaucagucccaaacugu

SEQ ID NO: 934018 - RNA, 19 nt, Artificial Sequence
  Description of Artificial Sequence: Synthetic oligonucleotide
  Sense strand starting at position 22 of SEQ ID NO: 913525
uuauguaccgaauacugua

SEQ ID NO: 934019 - RNA, 19 nt, Artificial Sequence
  Description of Artificial Sequence: Synthetic oligonucleotide
  Antisense strand to SEQ ID NO: 934018
uacaguauucgguacauaa

SEQ ID NO: 934020 - RNA, 19 nt, Artificial Sequence
  Description of Artificial Sequence: Synthetic oligonucleotide
  Sense strand starting at position 15 of SEQ ID NO: 913525
uggcauauuauguaccgaa

SEQ ID NO: 934021 - RNA, 19 nt, Artificial Sequence
  Description of Artificial Sequence: Synthetic oligonucleotide
  Antisense strand to SEQ ID NO: 934020
uucgguacauaauaugcca

SEQ ID NO: 934022 - RNA, 19 nt, Artificial Sequence
  Description of Artificial Sequence: Synthetic oligonucleotide
  Sense strand starting at position 1040 of SEQ ID NO: 913525
ccuuaaaguagguauuguu

SEQ ID NO: 934023 - RNA, 19 nt, Artificial Sequence
  Description of Artificial Sequence: Synthetic oligonucleotide
  Antisense strand to SEQ ID NO: 934022
aacaauaccuacuuuaagg

SEQ ID NO: 934024 - RNA, 19 nt, Artificial Sequence
  Description of Artificial Sequence: Synthetic oligonucleotide
  Sense strand starting at position 3946 of SEQ ID NO: 913525
gugugcauuguuucguuca

SEQ ID NO: 934025 - RNA, 19 nt, Artificial Sequence
  Description of Artificial Sequence: Synthetic oligonucleotide
  Antisense strand to SEQ ID NO: 934024
ugaacgaaacaaugcacac

SEQ ID NO: 934026 - RNA, 19 nt, Artificial Sequence
  Description of Artificial Sequence: Synthetic oligonucleotide
  Sense strand starting at position 898 of SEQ ID NO: 913525
cucuguaggaugcaguaau

SEQ ID NO: 934027 - RNA, 19 nt, Artificial Sequence
  Description of Artificial Sequence: Synthetic oligonucleotide
  Antisense strand to SEQ ID NO: 934026
auuacugcauccuacagag

SEQ ID NO: 934028 - RNA, 19 nt, Artificial Sequence
  Description of Artificial Sequence: Synthetic oligonucleotide
  Sense strand starting at position 3083 of SEQ ID NO: 913525
cccaaagcucucuggacua

SEQ ID NO: 934029 - RNA, 19 nt, Artificial Sequence
  Description of Artificial Sequence: Synthetic oligonucleotide
  Antisense strand to SEQ ID NO: 934028
uaguccagagagcuuuggg

SEQ ID NO: 934030 - RNA, 19 nt, Artificial Sequence
  Description of Artificial Sequence: Synthetic oligonucleotide
  Sense strand starting at position 1 of SEQ ID NO: 913525
gcuauaaaucuguauggca

SEQ ID NO: 934031 - RNA, 19 nt, Artificial Sequence
  Description of Artificial Sequence: Synthetic oligonucleotide
  Antisense strand to SEQ ID NO: 934030
ugccauacagauuuauagc

SEQ ID NO: 934032 - RNA, 19 nt, Artificial Sequence
  Description of Artificial Sequence: Synthetic oligonucleotide
  Sense strand starting at position 2086 of SEQ ID NO: 913525
gggauaguuaauugucgag

SEQ ID NO: 934033 - RNA, 19 nt, Artificial Sequence
  Description of Artificial Sequence: Synthetic oligonucleotide
  Antisense strand to SEQ ID NO: 934032
cucgacaauuaacuauccc

SEQ ID NO: 934034 - RNA, 19 nt, Artificial Sequence
  Description of Artificial Sequence: Synthetic oligonucleotide
  Sense strand starting at position 1175 of SEQ ID NO: 913525
cguugugagugcacuguaa

SEQ ID NO: 934035 - RNA, 19 nt, Artificial Sequence
  Description of Artificial Sequence: Synthetic oligonucleotide
  Antisense strand to SEQ ID NO: 934034
uuacagugcacucacaacg

SEQ ID NO: 934036 - RNA, 19 nt, Artificial Sequence
  Description of Artificial Sequence: Synthetic oligonucleotide
  Sense strand starting at position 994 of SEQ ID NO: 913525
ugcuaaaggccugauguau

SEQ ID NO: 934037 - RNA, 19 nt, Artificial Sequence
  Description of Artificial Sequence: Synthetic oligonucleotide
  Antisense strand to SEQ ID NO: 934036
auacaucaggccuuuagca

SEQ ID NO: 934038 - RNA, 19 nt, Artificial Sequence
  Description of Artificial Sequence: Synthetic oligonucleotide
  Sense strand starting at position 2085 of SEQ ID NO: 913525
ugggauaguuaauugucga

SEQ ID NO: 934039 - RNA, 19 nt, Artificial Sequence
  Description of Artificial Sequence: Synthetic oligonucleotide
  Antisense strand to SEQ ID NO: 934038
ucgacaauuaacuauccca

SEQ ID NO: 934040 - RNA, 19 nt, Artificial Sequence
  Description of Artificial Sequence: Synthetic oligonucleotide
  Sense strand starting at position 3931 of SEQ ID NO: 913525
gugucauuacaugaagugu

SEQ ID NO: 934041 - RNA, 19 nt, Artificial Sequence
  Description of Artificial Sequence: Synthetic oligonucleotide
  Antisense strand to SEQ ID NO: 934040
acacuucauguaaugacac

SEQ ID NO: 934042 - RNA, 19 nt, Artificial Sequence
  Description of Artificial Sequence: Synthetic oligonucleotide
  Sense strand starting at position 3925 of SEQ ID NO: 913525
uaguaagugucauuacaug

SEQ ID NO: 934043 - RNA, 19 nt, Artificial Sequence
  Description of Artificial Sequence: Synthetic oligonucleotide
  Antisense strand to SEQ ID NO: 934042
cauguaaugacacuuacua

SEQ ID NO: 934044 - RNA, 19 nt, Artificial Sequence
  Description of Artificial Sequence: Synthetic oligonucleotide
  Sense strand starting at position 3326 of SEQ ID NO: 913525
guuaauaaugcagagcugu

SEQ ID NO: 934045 - RNA, 19 nt, Artificial Sequence
  Description of Artificial Sequence: Synthetic oligonucleotide
  Antisense strand to SEQ ID NO: 934044
acagcucugcauuauuaac

SEQ ID NO: 934046 - RNA, 19 nt, Artificial Sequence
  Description of Artificial Sequence: Synthetic oligonucleotide
  Sense strand starting at position 656 of SEQ ID NO: 913525
augagaccaugauaaggau

SEQ ID NO: 934047 - RNA, 19 nt, Artificial Sequence
  Description of Artificial Sequence: Synthetic oligonucleotide
  Antisense strand to SEQ ID NO: 934046
auccuuaucauggucucau

SEQ ID NO: 934048 - RNA, 19 nt, Artificial Sequence
  Description of Artificial Sequence: Synthetic oligonucleotide
  Sense strand starting at position 3143 of SEQ ID NO: 913525
aacuuuguugcuugggaca

SEQ ID NO: 934049 - RNA, 19 nt, Artificial Sequence
  Description of Artificial Sequence: Synthetic oligonucleotide
  Antisense strand to SEQ ID NO: 934048
ugucccaagcaacaaaguu

SEQ ID NO: 934050 - RNA, 19 nt, Artificial Sequence
  Description of Artificial Sequence: Synthetic oligonucleotide
  Sense strand starting at position 3273 of SEQ ID NO: 913525
gccagugccacugaucuga

SEQ ID NO: 934051 - RNA, 19 nt, Artificial Sequence
  Description of Artificial Sequence: Synthetic oligonucleotide
  Antisense strand to SEQ ID NO: 934050
ucagaucaguggcacuggc

SEQ ID NO: 934052 - RNA, 19 nt, Artificial Sequence
  Description of Artificial Sequence: Synthetic oligonucleotide
  Sense strand starting at position 3939 of SEQ ID NO: 913525
acaugaagugugcauuguu

SEQ ID NO: 934053 - RNA, 19 nt, Artificial Sequence
  Description of Artificial Sequence: Synthetic oligonucleotide
  Antisense strand to SEQ ID NO: 934052
aacaaugcacacuucaugu

SEQ ID NO: 934054 - RNA, 19 nt, Artificial Sequence
  Description of Artificial Sequence: Synthetic oligonucleotide
  Sense strand starting at position 800 of SEQ ID NO: 913525
uuacuauaucccugugagu

SEQ ID NO: 934055 - RNA, 19 nt, Artificial Sequence
  Description of Artificial Sequence: Synthetic oligonucleotide
  Antisense strand to SEQ ID NO: 934054
acucacagggauauaguaa

SEQ ID NO: 934056 - RNA, 19 nt, Artificial Sequence
  Description of Artificial Sequence: Synthetic oligonucleotide
  Sense strand starting at position 1125 of SEQ ID NO: 913525
gcaggucaauguuccagau

SEQ ID NO: 934057 - RNA, 19 nt, Artificial Sequence
  Description of Artificial Sequence: Synthetic oligonucleotide
  Antisense strand to SEQ ID NO: 934056
aucuggaacauugaccugc

SEQ ID NO: 934058 - RNA, 19 nt, Artificial Sequence
  Description of Artificial Sequence: Synthetic oligonucleotide
  Sense strand starting at position 2280 of SEQ ID NO: 913525
ccucuuccuccgugaagag

SEQ ID NO: 934059 - RNA, 19 nt, Artificial Sequence
  Description of Artificial Sequence: Synthetic oligonucleotide
  Antisense strand to SEQ ID NO: 934058
cucuucacggaggaagagg

SEQ ID NO: 934060 - RNA, 19 nt, Artificial Sequence
  Description of Artificial Sequence: Synthetic oligonucleotide
  Sense strand starting at position 709 of SEQ ID NO: 913525
ggagucuuguaauauuuau

SEQ ID NO: 934061 - RNA, 19 nt, Artificial Sequence
  Description of Artificial Sequence: Synthetic oligonucleotide
  Antisense strand to SEQ ID NO: 934060
auaaauauuacaagacucc

SEQ ID NO: 934062 - RNA, 19 nt, Artificial Sequence
  Description of Artificial Sequence: Synthetic oligonucleotide
  Sense strand starting at position 3971 of SEQ ID NO: 913525
uaaauuaugugcucccgga

SEQ ID NO: 934063 - RNA, 19 nt, Artificial Sequence
  Description of Artificial Sequence: Synthetic oligonucleotide
  Antisense strand to SEQ ID NO: 934062
uccgggagcacauaauuua

SEQ ID NO: 934064 - RNA, 19 nt, Artificial Sequence
  Description of Artificial Sequence: Synthetic oligonucleotide
  Sense strand starting at position 1875 of SEQ ID NO: 913525
cuaucuuugaggcguuaaa

SEQ ID NO: 934065 - RNA, 19 nt, Artificial Sequence
  Description of Artificial Sequence: Synthetic oligonucleotide
  Antisense strand to SEQ ID NO: 934064
uuuaacgccucaaagauag

SEQ ID NO: 934066 - RNA, 19 nt, Artificial Sequence
  Description of Artificial Sequence: Synthetic oligonucleotide
  Sense strand starting at position 514 of SEQ ID NO: 913525
guuguuaugcagcacauca

SEQ ID NO: 934067 - RNA, 19 nt, Artificial Sequence
  Description of Artificial Sequence: Synthetic oligonucleotide
  Antisense strand to SEQ ID NO: 934066
ugaugugcugcauaacaac

SEQ ID NO: 934068 - RNA, 19 nt, Artificial Sequence
  Description of Artificial Sequence: Synthetic oligonucleotide
  Sense strand starting at position 1884 of SEQ ID NO: 913525
aggcguuaaagguguggaa

SEQ ID NO: 934069 - RNA, 19 nt, Artificial Sequence
  Description of Artificial Sequence: Synthetic oligonucleotide
  Antisense strand to SEQ ID NO: 934068
uuccacaccuuuaacgccu

SEQ ID NO: 934070 - RNA, 19 nt, Artificial Sequence
  Description of Artificial Sequence: Synthetic oligonucleotide
  Sense strand starting at position 1369 of SEQ ID NO: 913525
gagcaaucgcugcauacug

SEQ ID NO: 934071 - RNA, 19 nt, Artificial Sequence
  Description of Artificial Sequence: Synthetic oligonucleotide
  Antisense strand to SEQ ID NO: 934070
caguaugcagcgauugcuc

SEQ ID NO: 934072 - RNA, 19 nt, Artificial Sequence
  Description of Artificial Sequence: Synthetic oligonucleotide
  Sense strand starting at position 2073 of SEQ ID NO: 913525
ccaguacuccgcugggaua

SEQ ID NO: 934073 - RNA, 19 nt, Artificial Sequence
  Description of Artificial Sequence: Synthetic oligonucleotide
  Antisense strand to SEQ ID NO: 934072
uaucccagcggaguacugg

SEQ ID NO: 934074 - RNA, 19 nt, Artificial Sequence
  Description of Artificial Sequence: Synthetic oligonucleotide
  Sense strand starting at position 551 of SEQ ID NO: 913525
cuguuuguaucucccacua

SEQ ID NO: 934075 - RNA, 19 nt, Artificial Sequence
  Description of Artificial Sequence: Synthetic oligonucleotide
  Antisense strand to SEQ ID NO: 934074
uagugggagauacaaacag

SEQ ID NO: 934076 - RNA, 19 nt, Artificial Sequence
  Description of Artificial Sequence: Synthetic oligonucleotide
  Sense strand starting at position 327 of SEQ ID NO: 913526
auauaaggaguguauggua

SEQ ID NO: 934077 - RNA, 19 nt, Artificial Sequence
  Description of Artificial Sequence: Synthetic oligonucleotide
  Antisense strand to SEQ ID NO: 934076
uaccauacacuccuuauau

SEQ ID NO: 934078 - RNA, 19 nt, Artificial Sequence
  Description of Artificial Sequence: Synthetic oligonucleotide
  Sense strand starting at position 2625 of SEQ ID NO: 913526
aagauuguaccugauaagc

SEQ ID NO: 934079 - RNA, 19 nt, Artificial Sequence
  Description of Artificial Sequence: Synthetic oligonucleotide
  Antisense strand to SEQ ID NO: 934078
gcuuaucagguacaaucuu

SEQ ID NO: 934080 - RNA, 19 nt, Artificial Sequence
  Description of Artificial Sequence: Synthetic oligonucleotide
  Sense strand starting at position 2623 of SEQ ID NO: 913526
uuaagauuguaccugauaa

SEQ ID NO: 934081 - RNA, 19 nt, Artificial Sequence
  Description of Artificial Sequence: Synthetic oligonucleotide
  Antisense strand to SEQ ID NO: 934080
uuaucagguacaaucuuaa

SEQ ID NO: 934082 - RNA, 19 nt, Artificial Sequence
  Description of Artificial Sequence: Synthetic oligonucleotide
  Sense strand starting at position 2242 of SEQ ID NO: 913526
gggaaacugaauuguagua

SEQ ID NO: 934083 - RNA, 19 nt, Artificial Sequence
  Description of Artificial Sequence: Synthetic oligonucleotide
  Antisense strand to SEQ ID NO: 934082
uacuacaauucaguuuccc

SEQ ID NO: 934084 - RNA, 19 nt, Artificial Sequence
  Description of Artificial Sequence: Synthetic oligonucleotide
  Sense strand starting at position 3109 of SEQ ID NO: 913526
uguuacauugcauaagaca

SEQ ID NO: 934085 - RNA, 19 nt, Artificial Sequence
  Description of Artificial Sequence: Synthetic oligonucleotide
  Antisense strand to SEQ ID NO: 934084
ugucuuaugcaauguaaca

SEQ ID NO: 934086 - RNA, 19 nt, Artificial Sequence
  Description of Artificial Sequence: Synthetic oligonucleotide
  Sense strand starting at position 17 of SEQ ID NO: 913526
gagcgagcgccugugagau

SEQ ID NO: 934087 - RNA, 19 nt, Artificial Sequence
  Description of Artificial Sequence: Synthetic oligonucleotide
  Antisense strand to SEQ ID NO: 934086
aucucacaggcgcucgcuc

SEQ ID NO: 934088 - RNA, 19 nt, Artificial Sequence
  Description of Artificial Sequence: Synthetic oligonucleotide
  Sense strand starting at position 210 of SEQ ID NO: 913526
guuugaagacccugaauua

SEQ ID NO: 934089 - RNA, 19 nt, Artificial Sequence
  Description of Artificial Sequence: Synthetic oligonucleotide
  Antisense strand to SEQ ID NO: 934088
uaauucagggucuucaaac

SEQ ID NO: 934090 - RNA, 19 nt, Artificial Sequence
  Description of Artificial Sequence: Synthetic oligonucleotide
  Sense strand starting at position 2171 of SEQ ID NO: 913526
ucacgaguuguugaaauaa

SEQ ID NO: 934091 - RNA, 19 nt, Artificial Sequence
  Description of Artificial Sequence: Synthetic oligonucleotide
  Antisense strand to SEQ ID NO: 934090
uuauuucaacaacucguga

SEQ ID NO: 934092 - RNA, 19 nt, Artificial Sequence
  Description of Artificial Sequence: Synthetic oligonucleotide
  Sense strand starting at position 2317 of SEQ ID NO: 913526
gguagcuagcaauaggaau

SEQ ID NO: 934093 - RNA, 19 nt, Artificial Sequence
  Description of Artificial Sequence: Synthetic oligonucleotide
  Antisense strand to SEQ ID NO: 934092
auuccuauugcuagcuacc

SEQ ID NO: 934094 - RNA, 19 nt, Artificial Sequence
  Description of Artificial Sequence: Synthetic oligonucleotide
  Sense strand starting at position 3590 of SEQ ID NO: 913526
cgguuuguucacguaggca

SEQ ID NO: 934095 - RNA, 19 nt, Artificial Sequence
  Description of Artificial Sequence: Synthetic oligonucleotide
  Antisense strand to SEQ ID NO: 934094
ugccuacgugaacaaaccg

SEQ ID NO: 934096 - RNA, 19 nt, Artificial Sequence
  Description of Artificial Sequence: Synthetic oligonucleotide
  Sense strand starting at position 590 of SEQ ID NO: 913526
guacaauugcaacaaaguu

SEQ ID NO: 934097 - RNA, 19 nt, Artificial Sequence
  Description of Artificial Sequence: Synthetic oligonucleotide
  Antisense strand to SEQ ID NO: 934096
aacuuuguugcaauuguac

SEQ ID NO: 934098 - RNA, 19 nt, Artificial Sequence
  Description of Artificial Sequence: Synthetic oligonucleotide
  Sense strand starting at position 3612 of SEQ ID NO: 913526
gauauuucuugugggauuu

SEQ ID NO: 934099 - RNA, 19 nt, Artificial Sequence
  Description of Artificial Sequence: Synthetic oligonucleotide
  Antisense strand to SEQ ID NO: 934098
aaaucccacaagaaauauc

SEQ ID NO: 934100 - RNA, 19 nt, Artificial Sequence
  Description of Artificial Sequence: Synthetic oligonucleotide
  Sense strand starting at position 2163 of SEQ ID NO: 913526
aaucuaaaucacgaguugu

SEQ ID NO: 934101 - RNA, 19 nt, Artificial Sequence
  Description of Artificial Sequence: Synthetic oligonucleotide
  Antisense strand to SEQ ID NO: 934100
acaacucgugauuuagauu

SEQ ID NO: 934102 - RNA, 19 nt, Artificial Sequence
  Description of Artificial Sequence: Synthetic oligonucleotide
  Sense strand starting at position 3507 of SEQ ID NO: 913526
ucaugauuccaaggcugga

SEQ ID NO: 934103 - RNA, 19 nt, Artificial Sequence
  Description of Artificial Sequence: Synthetic oligonucleotide
  Antisense strand to SEQ ID NO: 934102
uccagccuuggaaucauga

SEQ ID NO: 934104 - RNA, 19 nt, Artificial Sequence
  Description of Artificial Sequence: Synthetic oligonucleotide
  Sense strand starting at position 2634 of SEQ ID NO: 913526
ccugauaagcucugaacca

SEQ ID NO: 934105 - RNA, 19 nt, Artificial Sequence
  Description of Artificial Sequence: Synthetic oligonucleotide
  Antisense strand to SEQ ID NO: 934104
ugguucagagcuuaucagg

SEQ ID NO: 934106 - RNA, 19 nt, Artificial Sequence
  Description of Artificial Sequence: Synthetic oligonucleotide
  Sense strand starting at position 1288 of SEQ ID NO: 913526
ccauaucaucauggcugaa

SEQ ID NO: 934107 - RNA, 19 nt, Artificial Sequence
  Description of Artificial Sequence: Synthetic oligonucleotide
  Antisense strand to SEQ ID NO: 934106
uucagccaugaugauaugg

SEQ ID NO: 934108 - RNA, 19 nt, Artificial Sequence
  Description of Artificial Sequence: Synthetic oligonucleotide
  Sense strand starting at position 3677 of SEQ ID NO: 913526
ugacuaugcugauugaacu

SEQ ID NO: 934109 - RNA, 19 nt, Artificial Sequence
  Description of Artificial Sequence: Synthetic oligonucleotide
  Antisense strand to SEQ ID NO: 934108
aguucaaucagcauaguca

SEQ ID NO: 934110 - RNA, 19 nt, Artificial Sequence
  Description of Artificial Sequence: Synthetic oligonucleotide
  Sense strand starting at position 457 of SEQ ID NO: 913526
uuagcuuguccuuagaaca

SEQ ID NO: 934111 - RNA, 19 nt, Artificial Sequence
  Description of Artificial Sequence: Synthetic oligonucleotide
  Antisense strand to SEQ ID NO: 934110
uguucuaaggacaagcuaa

SEQ ID NO: 934112 - RNA, 19 nt, Artificial Sequence
  Description of Artificial Sequence: Synthetic oligonucleotide
  Sense strand starting at position 144 of SEQ ID NO: 913526
gucacaagacuuuggcaaa

SEQ ID NO: 934113 - RNA, 19 nt, Artificial Sequence
  Description of Artificial Sequence: Synthetic oligonucleotide
  Antisense strand to SEQ ID NO: 934112
uuugccaaagucuugugac

SEQ ID NO: 934114 - RNA, 19 nt, Artificial Sequence
  Description of Artificial Sequence: Synthetic oligonucleotide
  Sense strand starting at position 2131 of SEQ ID NO: 913526
uuguguccugauuacauua

SEQ ID NO: 934115 - RNA, 19 nt, Artificial Sequence
  Description of Artificial Sequence: Synthetic oligonucleotide
  Antisense strand to SEQ ID NO: 934114
uaauguaaucaggacacaa

SEQ ID NO: 934116 - RNA, 19 nt, Artificial Sequence
  Description of Artificial Sequence: Synthetic oligonucleotide
  Sense strand starting at position 1258 of SEQ ID NO: 913526
uccagugagcuagaauugu

SEQ ID NO: 934117 - RNA, 19 nt, Artificial Sequence
  Description of Artificial Sequence: Synthetic oligonucleotide
  Antisense strand to SEQ ID NO: 934116
acaauucuagcucacugga

SEQ ID NO: 934118 - RNA, 19 nt, Artificial Sequence
  Description of Artificial Sequence: Synthetic oligonucleotide
  Sense strand starting at position 436 of SEQ ID NO: 913526
cggagacugccauacaugu

SEQ ID NO: 934119 - RNA, 19 nt, Artificial Sequence
  Description of Artificial Sequence: Synthetic oligonucleotide
  Antisense strand to SEQ ID NO: 934118
acauguauggcagucuccg

SEQ ID NO: 934120 - RNA, 19 nt, Artificial Sequence
  Description of Artificial Sequence: Synthetic oligonucleotide
  Sense strand starting at position 2169 of SEQ ID NO: 913526
aaucacgaguuguugaaau

SEQ ID NO: 934121 - RNA, 19 nt, Artificial Sequence
  Description of Artificial Sequence: Synthetic oligonucleotide
  Antisense strand to SEQ ID NO: 934120
auuucaacaacucgugauu

SEQ ID NO: 934122 - RNA, 19 nt, Artificial Sequence
  Description of Artificial Sequence: Synthetic oligonucleotide
  Sense strand starting at position 147 of SEQ ID NO: 913526
acaagacuuuggcaaauuu

SEQ ID NO: 934123 - RNA, 19 nt, Artificial Sequence
  Description of Artificial Sequence: Synthetic oligonucleotide
  Antisense strand to SEQ ID NO: 934122
aaauuugccaaagucuugu

SEQ ID NO: 934124 - RNA, 19 nt, Artificial Sequence
  Description of Artificial Sequence: Synthetic oligonucleotide
  Sense strand starting at position 3671 of SEQ ID NO: 913526
aguugaugacuaugcugau

SEQ ID NO: 934125 - RNA, 19 nt, Artificial Sequence
  Description of Artificial Sequence: Synthetic oligonucleotide
  Antisense strand to SEQ ID NO: 934124
aucagcauagucaucaacu

SEQ ID NO: 934126 - RNA, 19 nt, Artificial Sequence
  Description of Artificial Sequence: Synthetic oligonucleotide
  Sense strand starting at position 134 of SEQ ID NO: 913526
ugcugucuuggucacaaga

SEQ ID NO: 934127 - RNA, 19 nt, Artificial Sequence
  Description of Artificial Sequence: Synthetic oligonucleotide
  Antisense strand to SEQ ID NO: 934126
ucuugugaccaagacagca

SEQ ID NO: 934128 - RNA, 19 nt, Artificial Sequence
  Description of Artificial Sequence: Synthetic oligonucleotide
  Sense strand starting at position 2306 of SEQ ID NO: 913526
gguaaugacuggguagcua

SEQ ID NO: 934129 - RNA, 19 nt, Artificial Sequence
  Description of Artificial Sequence: Synthetic oligonucleotide
  Antisense strand to SEQ ID NO: 934128
uagcuacccagucauuacc

SEQ ID NO: 934130 - RNA, 19 nt, Artificial Sequence
  Description of Artificial Sequence: Synthetic oligonucleotide
  Sense strand starting at position 1264 of SEQ ID NO: 913526
gagcuagaauugucuuuau

SEQ ID NO: 934131 - RNA, 19 nt, Artificial Sequence
  Description of Artificial Sequence: Synthetic oligonucleotide
  Antisense strand to SEQ ID NO: 934130
auaaagacaauucuagcuc

SEQ ID NO: 934132 - RNA, 19 nt, Artificial Sequence
  Description of Artificial Sequence: Synthetic oligonucleotide
  Sense strand starting at position 261 of SEQ ID NO: 913526
aguacaaagucucaaauuu

SEQ ID NO: 934133 - RNA, 19 nt, Artificial Sequence
  Description of Artificial Sequence: Synthetic oligonucleotide
  Antisense strand to SEQ ID NO: 934132
aaauuugagacuuuguacu

SEQ ID NO: 934134 - RNA, 19 nt, Artificial Sequence
  Description of Artificial Sequence: Synthetic oligonucleotide
  Sense strand starting at position 793 of SEQ ID NO: 913526
ucagacaaaugggauuaaa

SEQ ID NO: 934135 - RNA, 19 nt, Artificial Sequence
  Description of Artificial Sequence: Synthetic oligonucleotide
  Antisense strand to SEQ ID NO: 934134
uuuaaucccauuugucuga

SEQ ID NO: 934136 - RNA, 19 nt, Artificial Sequence
  Description of Artificial Sequence: Synthetic oligonucleotide
  Sense strand starting at position 3672 of SEQ ID NO: 913526
guugaugacuaugcugauu

SEQ ID NO: 934137 - RNA, 19 nt, Artificial Sequence
  Description of Artificial Sequence: Synthetic oligonucleotide
  Antisense strand to SEQ ID NO: 934136
aaucagcauagucaucaac

SEQ ID NO: 934138 - RNA, 19 nt, Artificial Sequence
  Description of Artificial Sequence: Synthetic oligonucleotide
  Sense strand starting at position 1090 of SEQ ID NO: 913526
ggcuuugaucaguauugca

SEQ ID NO: 934139 - RNA, 19 nt, Artificial Sequence
  Description of Artificial Sequence: Synthetic oligonucleotide
  Antisense strand to SEQ ID NO: 934138
ugcaauacugaucaaagcc

SEQ ID NO: 934140 - RNA, 19 nt, Artificial Sequence
  Description of Artificial Sequence: Synthetic oligonucleotide
  Sense strand starting at position 3452 of SEQ ID NO: 913526
cuggccaaguuucuauuaa

SEQ ID NO: 934141 - RNA, 19 nt, Artificial Sequence
  Description of Artificial Sequence: Synthetic oligonucleotide
  Antisense strand to SEQ ID NO: 934140
uuaauagaaacuuggccag

SEQ ID NO: 934142 - RNA, 19 nt, Artificial Sequence
  Description of Artificial Sequence: Synthetic oligonucleotide
  Sense strand starting at position 1066 of SEQ ID NO: 913526
ucaguucccuuggucuaaa

SEQ ID NO: 934143 - RNA, 19 nt, Artificial Sequence
  Description of Artificial Sequence: Synthetic oligonucleotide
  Antisense strand to SEQ ID NO: 934142
uuuagaccaagggaacuga

SEQ ID NO: 934144 - RNA, 19 nt, Artificial Sequence
  Description of Artificial Sequence: Synthetic oligonucleotide
  Sense strand starting at position 1473 of SEQ ID NO: 913526
agcuguaaucaauguuaac

SEQ ID NO: 934145 - RNA, 19 nt, Artificial Sequence
  Description of Artificial Sequence: Synthetic oligonucleotide
  Antisense strand to SEQ ID NO: 934144
guuaacauugauuacagcu

SEQ ID NO: 934146 - RNA, 19 nt, Artificial Sequence
  Description of Artificial Sequence: Synthetic oligonucleotide
  Sense strand starting at position 3789 of SEQ ID NO: 913526
ugcagcauacuguaaucuu

SEQ ID NO: 934147 - RNA, 19 nt, Artificial Sequence
  Description of Artificial Sequence: Synthetic oligonucleotide
  Antisense strand to SEQ ID NO: 934146
aagauuacaguaugcugca

SEQ ID NO: 934148 - RNA, 19 nt, Artificial Sequence
  Description of Artificial Sequence: Synthetic oligonucleotide
  Sense strand starting at position 3609 of SEQ ID NO: 913526
gaagauauuucuuguggga

SEQ ID NO: 934149 - RNA, 19 nt, Artificial Sequence
  Description of Artificial Sequence: Synthetic oligonucleotide
  Antisense strand to SEQ ID NO: 934148
ucccacaagaaauaucuuc

SEQ ID NO: 934150 - RNA, 19 nt, Artificial Sequence
  Description of Artificial Sequence: Synthetic oligonucleotide
  Sense strand starting at position 3797 of SEQ ID NO: 913526
acuguaaucuuuguuucua

SEQ ID NO: 934151 - RNA, 19 nt, Artificial Sequence
  Description of Artificial Sequence: Synthetic oligonucleotide
  Antisense strand to SEQ ID NO: 934150
uagaaacaaagauuacagu

SEQ ID NO: 934152 - RNA, 19 nt, Artificial Sequence
  Description of Artificial Sequence: Synthetic oligonucleotide
  Sense strand starting at position 3798 of SEQ ID NO: 913526
cuguaaucuuuguuucuag

SEQ ID NO: 934153 - RNA, 19 nt, Artificial Sequence
  Description of Artificial Sequence: Synthetic oligonucleotide
  Antisense strand to SEQ ID NO: 934152
cuagaaacaaagauuacag

SEQ ID NO: 934154 - RNA, 19 nt, Artificial Sequence
  Description of Artificial Sequence: Synthetic oligonucleotide
  Sense strand starting at position 640 of SEQ ID NO: 913526
cccagauacuuggagagga

SEQ ID NO: 934155 - RNA, 19 nt, Artificial Sequence
  Description of Artificial Sequence: Synthetic oligonucleotide
  Antisense strand to SEQ ID NO: 934154
uccucuccaaguaucuggg

SEQ ID NO: 934156 - RNA, 19 nt, Artificial Sequence
  Description of Artificial Sequence: Synthetic oligonucleotide
  Sense strand starting at position 1362 of SEQ ID NO: 913527
acguguuccauuuggagac

SEQ ID NO: 934157 - RNA, 19 nt, Artificial Sequence
  Description of Artificial Sequence: Synthetic oligonucleotide
  Antisense strand to SEQ ID NO: 934156
gucuccaaauggaacacgu

SEQ ID NO: 934158 - RNA, 19 nt, Artificial Sequence
  Description of Artificial Sequence: Synthetic oligonucleotide
  Sense strand starting at position 3142 of SEQ ID NO: 913527
ccgcccucugcuguugaaa

SEQ ID NO: 934159 - RNA, 19 nt, Artificial Sequence
  Description of Artificial Sequence: Synthetic oligonucleotide
  Antisense strand to SEQ ID NO: 934158
uuucaacagcagagggcgg

SEQ ID NO: 934160 - RNA, 19 nt, Artificial Sequence
  Description of Artificial Sequence: Synthetic oligonucleotide
  Sense strand starting at position 3143 of SEQ ID NO: 913527
cgcccucugcuguugaaau

SEQ ID NO: 934161 - RNA, 19 nt, Artificial Sequence
  Description of Artificial Sequence: Synthetic oligonucleotide
  Antisense strand to SEQ ID NO: 934160
auuucaacagcagagggcg

SEQ ID NO: 934162 - RNA, 19 nt, Artificial Sequence
  Description of Artificial Sequence: Synthetic oligonucleotide
  Sense strand starting at position 1270 of SEQ ID NO: 913527
acuagaaacgguuaacagu

SEQ ID NO: 934163 - RNA, 19 nt, Artificial Sequence
  Description of Artificial Sequence: Synthetic oligonucleotide
  Antisense strand to SEQ ID NO: 934162
acuguuaaccguuucuagu

SEQ ID NO: 934164 - RNA, 19 nt, Artificial Sequence
  Description of Artificial Sequence: Synthetic oligonucleotide
  Sense strand starting at position 2606 of SEQ ID NO: 913527
uugggugaaacuuagcuaa

SEQ ID NO: 934165 - RNA, 19 nt, Artificial Sequence
  Description of Artificial Sequence: Synthetic oligonucleotide
  Antisense strand to SEQ ID NO: 934164
uuagcuaaguuucacccaa

SEQ ID NO: 934166 - RNA, 19 nt, Artificial Sequence
  Description of Artificial Sequence: Synthetic oligonucleotide
  Sense strand starting at position 3459 of SEQ ID NO: 913527
auccuuccagagugacaga

SEQ ID NO: 934167 - RNA, 19 nt, Artificial Sequence
  Description of Artificial Sequence: Synthetic oligonucleotide
  Antisense strand to SEQ ID NO: 934166
ucugucacucuggaaggau

SEQ ID NO: 934168 - RNA, 19 nt, Artificial Sequence
  Description of Artificial Sequence: Synthetic oligonucleotide
  Sense strand starting at position 2609 of SEQ ID NO: 913527
ggugaaacuuagcuaagga

SEQ ID NO: 934169 - RNA, 19 nt, Artificial Sequence
  Description of Artificial Sequence: Synthetic oligonucleotide
  Antisense strand to SEQ ID NO: 934168
uccuuagcuaaguuucacc

SEQ ID NO: 934170 - RNA, 19 nt, Artificial Sequence
  Description of Artificial Sequence: Synthetic oligonucleotide
  Sense strand starting at position 2766 of SEQ ID NO: 913527
caagaaccggguuaucuuu

SEQ ID NO: 934171 - RNA, 19 nt, Artificial Sequence
  Description of Artificial Sequence: Synthetic oligonucleotide
  Antisense strand to SEQ ID NO: 934170
aaagauaacccgguucuug

SEQ ID NO: 934172 - RNA, 19 nt, Artificial Sequence
  Description of Artificial Sequence: Synthetic oligonucleotide
  Sense strand starting at position 1356 of SEQ ID NO: 913527
ucaccaacguguuccauuu

SEQ ID NO: 934173 - RNA, 19 nt, Artificial Sequence
  Description of Artificial Sequence: Synthetic oligonucleotide
  Antisense strand to SEQ ID NO: 934172
aaauggaacacguugguga

SEQ ID NO: 934174 - RNA, 19 nt, Artificial Sequence
  Description of Artificial Sequence: Synthetic oligonucleotide
  Sense strand starting at position 3544 of SEQ ID NO: 913527
aguugagauaacuggugau

SEQ ID NO: 934175 - RNA, 19 nt, Artificial Sequence
  Description of Artificial Sequence: Synthetic oligonucleotide
  Antisense strand to SEQ ID NO: 934174
aucaccaguuaucucaacu

SEQ ID NO: 934176 - RNA, 19 nt, Artificial Sequence
  Description of Artificial Sequence: Synthetic oligonucleotide
  Sense strand starting at position 3451 of SEQ ID NO: 913527
ggguacacauccuuccaga

SEQ ID NO: 934177 - RNA, 19 nt, Artificial Sequence
  Description of Artificial Sequence: Synthetic oligonucleotide
  Antisense strand to SEQ ID NO: 934176
ucuggaaggauguguaccc

SEQ ID NO: 934178 - RNA, 19 nt, Artificial Sequence
  Description of Artificial Sequence: Synthetic oligonucleotide
  Sense strand starting at position 3713 of SEQ ID NO: 913527
guagguaaucaguaaguau

SEQ ID NO: 934179 - RNA, 19 nt, Artificial Sequence
  Description of Artificial Sequence: Synthetic oligonucleotide
  Antisense strand to SEQ ID NO: 934178
auacuuacugauuaccuac

SEQ ID NO: 934180 - RNA, 19 nt, Artificial Sequence
  Description of Artificial Sequence: Synthetic oligonucleotide
  Sense strand starting at position 3702 of SEQ ID NO: 913527
ccugguacucaguagguaa

SEQ ID NO: 934181 - RNA, 19 nt, Artificial Sequence
  Description of Artificial Sequence: Synthetic oligonucleotide
  Antisense strand to SEQ ID NO: 934180
uuaccuacugaguaccagg

SEQ ID NO: 934182 - RNA, 19 nt, Artificial Sequence
  Description of Artificial Sequence: Synthetic oligonucleotide
  Sense strand starting at position 2599 of SEQ ID NO: 913527
guagacuuugggugaaacu

SEQ ID NO: 934183 - RNA, 19 nt, Artificial Sequence
  Description of Artificial Sequence: Synthetic oligonucleotide
  Antisense strand to SEQ ID NO: 934182
aguuucacccaaagucuac

SEQ ID NO: 934184 - RNA, 19 nt, Artificial Sequence
  Description of Artificial Sequence: Synthetic oligonucleotide
  Sense strand starting at position 3010 of SEQ ID NO: 913527
gaguccaacgcugaacauu

SEQ ID NO: 934185 - RNA, 19 nt, Artificial Sequence
  Description of Artificial Sequence: Synthetic oligonucleotide
  Antisense strand to SEQ ID NO: 934184
aauguucagcguuggacuc

SEQ ID NO: 934186 - RNA, 19 nt, Artificial Sequence
  Description of Artificial Sequence: Synthetic oligonucleotide
  Sense strand starting at position 3890 of SEQ ID NO: 913527
uugagacccuguucugaug

SEQ ID NO: 934187 - RNA, 19 nt, Artificial Sequence
  Description of Artificial Sequence: Synthetic oligonucleotide
  Antisense strand to SEQ ID NO: 934186
caucagaacagggucucaa

SEQ ID NO: 934188 - RNA, 19 nt, Artificial Sequence
  Description of Artificial Sequence: Synthetic oligonucleotide
  Sense strand starting at position 3709 of SEQ ID NO: 913527
cucaguagguaaucaguaa

SEQ ID NO: 934189 - RNA, 19 nt, Artificial Sequence
  Description of Artificial Sequence: Synthetic oligonucleotide
  Antisense strand to SEQ ID NO: 934188
uuacugauuaccuacugag

SEQ ID NO: 934190 - RNA, 19 nt, Artificial Sequence
  Description of Artificial Sequence: Synthetic oligonucleotide
  Sense strand starting at position 2809 of SEQ ID NO: 913527
uuaagucucugucugagaa

SEQ ID NO: 934191 - RNA, 19 nt, Artificial Sequence
  Description of Artificial Sequence: Synthetic oligonucleotide
  Antisense strand to SEQ ID NO: 934190
uucucagacagagacuuaa

SEQ ID NO: 934192 - RNA, 19 nt, Artificial Sequence
  Description of Artificial Sequence: Synthetic oligonucleotide
  Sense strand starting at position 3006 of SEQ ID NO: 913527
aaaugaguccaacgcugaa

SEQ ID NO: 934193 - RNA, 19 nt, Artificial Sequence
  Description of Artificial Sequence: Synthetic oligonucleotide
  Antisense strand to SEQ ID NO: 934192
uucagcguuggacucauuu

SEQ ID NO: 934194 - RNA, 19 nt, Artificial Sequence
  Description of Artificial Sequence: Synthetic oligonucleotide
  Sense strand starting at position 2810 of SEQ ID NO: 913527
uaagucucugucugagaac

SEQ ID NO: 934195 - RNA, 19 nt, Artificial Sequence
  Description of Artificial Sequence: Synthetic oligonucleotide
  Antisense strand to SEQ ID NO: 934194
guucucagacagagacuua

SEQ ID NO: 934196 - RNA, 19 nt, Artificial Sequence
  Description of Artificial Sequence: Synthetic oligonucleotide
  Sense strand starting at position 3501 of SEQ ID NO: 913527
ugagccaucucaguuaaua

SEQ ID NO: 934197 - RNA, 19 nt, Artificial Sequence
  Description of Artificial Sequence: Synthetic oligonucleotide
  Antisense strand to SEQ ID NO: 934196
uauuaacugagauggcuca

SEQ ID NO: 934198 - RNA, 19 nt, Artificial Sequence
  Description of Artificial Sequence: Synthetic oligonucleotide
  Sense strand starting at position 2598 of SEQ ID NO: 913527
cguagacuuugggugaaac

SEQ ID NO: 934199 - RNA, 19 nt, Artificial Sequence
  Description of Artificial Sequence: Synthetic oligonucleotide
  Antisense strand to SEQ ID NO: 934198
guuucacccaaagucuacg

SEQ ID NO: 934200 - RNA, 19 nt, Artificial Sequence
  Description of Artificial Sequence: Synthetic oligonucleotide
  Sense strand starting at position 3390 of SEQ ID NO: 913527
uugaguuuauacccaguua

SEQ ID NO: 934201 - RNA, 19 nt, Artificial Sequence
  Description of Artificial Sequence: Synthetic oligonucleotide
  Antisense strand to SEQ ID NO: 934200
uaacuggguauaaacucaa

SEQ ID NO: 934202 - RNA, 19 nt, Artificial Sequence
  Description of Artificial Sequence: Synthetic oligonucleotide
  Sense strand starting at position 3645 of SEQ ID NO: 913527
uuauaagcucuuggaagca

SEQ ID NO: 934203 - RNA, 19 nt, Artificial Sequence
  Description of Artificial Sequence: Synthetic oligonucleotide
  Antisense strand to SEQ ID NO: 934202
ugcuuccaagagcuuauaa

SEQ ID NO: 934204 - RNA, 19 nt, Artificial Sequence
  Description of Artificial Sequence: Synthetic oligonucleotide
  Sense strand starting at position 1404 of SEQ ID NO: 913527
aggcacauuugagaagguu

SEQ ID NO: 934205 - RNA, 19 nt, Artificial Sequence
  Description of Artificial Sequence: Synthetic oligonucleotide
  Antisense strand to SEQ ID NO: 934204
aaccuucucaaaugugccu

SEQ ID NO: 934206 - RNA, 19 nt, Artificial Sequence
  Description of Artificial Sequence: Synthetic oligonucleotide
  Sense strand starting at position 3877 of SEQ ID NO: 913527
caguucuauucuguugaga

SEQ ID NO: 934207 - RNA, 19 nt, Artificial Sequence
  Description of Artificial Sequence: Synthetic oligonucleotide
  Antisense strand to SEQ ID NO: 934206
ucucaacagaauagaacug

SEQ ID NO: 934208 - RNA, 19 nt, Artificial Sequence
  Description of Artificial Sequence: Synthetic oligonucleotide
  Sense strand starting at position 3241 of SEQ ID NO: 913527
uagcaaguuguacaagcua

SEQ ID NO: 934209 - RNA, 19 nt, Artificial Sequence
  Description of Artificial Sequence: Synthetic oligonucleotide
  Antisense strand to SEQ ID NO: 934208
uagcuuguacaacuugcua

SEQ ID NO: 934210 - RNA, 19 nt, Artificial Sequence
  Description of Artificial Sequence: Synthetic oligonucleotide
  Sense strand starting at position 3790 of SEQ ID NO: 913527
cugauaauuuaccagguuu

SEQ ID NO: 934211 - RNA, 19 nt, Artificial Sequence
  Description of Artificial Sequence: Synthetic oligonucleotide
  Antisense strand to SEQ ID NO: 934210
aaaccugguaaauuaucag

SEQ ID NO: 934212 - RNA, 19 nt, Artificial Sequence
  Description of Artificial Sequence: Synthetic oligonucleotide
  Sense strand starting at position 2039 of SEQ ID NO: 913527
ggcgacucuuaccucacaa

SEQ ID NO: 934213 - RNA, 19 nt, Artificial Sequence
  Description of Artificial Sequence: Synthetic oligonucleotide
  Antisense strand to SEQ ID NO: 934212
uugugagguaagagucgcc

SEQ ID NO: 934214 - RNA, 19 nt, Artificial Sequence
  Description of Artificial Sequence: Synthetic oligonucleotide
  Sense strand starting at position 3045 of SEQ ID NO: 913527
cguugaguucauugaagac

SEQ ID NO: 934215 - RNA, 19 nt, Artificial Sequence
  Description of Artificial Sequence: Synthetic oligonucleotide
  Antisense strand to SEQ ID NO: 934214
gucuucaaugaacucaacg

SEQ ID NO: 934216 - RNA, 19 nt, Artificial Sequence
  Description of Artificial Sequence: Synthetic oligonucleotide
  Sense strand starting at position 3171 of SEQ ID NO: 913527
uggguccuaccaugaguuu

SEQ ID NO: 934217 - RNA, 19 nt, Artificial Sequence
  Description of Artificial Sequence: Synthetic oligonucleotide
  Antisense strand to SEQ ID NO: 934216
aaacucaugguaggaccca

SEQ ID NO: 934218 - RNA, 19 nt, Artificial Sequence
  Description of Artificial Sequence: Synthetic oligonucleotide
  Sense strand starting at position 3325 of SEQ ID NO: 913527
gguaccaacucuuuguacu

SEQ ID NO: 934219 - RNA, 19 nt, Artificial Sequence
  Description of Artificial Sequence: Synthetic oligonucleotide
  Antisense strand to SEQ ID NO: 934218
aguacaaagaguugguacc

SEQ ID NO: 934220 - RNA, 19 nt, Artificial Sequence
  Description of Artificial Sequence: Synthetic oligonucleotide
  Sense strand starting at position 1257 of SEQ ID NO: 913527
aggugucaacgcgacuaga

SEQ ID NO: 934221 - RNA, 19 nt, Artificial Sequence
  Description of Artificial Sequence: Synthetic oligonucleotide
  Antisense strand to SEQ ID NO: 934220
ucuagucgcguugacaccu

SEQ ID NO: 934222 - RNA, 19 nt, Artificial Sequence
  Description of Artificial Sequence: Synthetic oligonucleotide
  Sense strand starting at position 1192 of SEQ ID NO: 913527
aggagugacugaugauuuc

SEQ ID NO: 934223 - RNA, 19 nt, Artificial Sequence
  Description of Artificial Sequence: Synthetic oligonucleotide
  Antisense strand to SEQ ID NO: 934222
gaaaucaucagucacuccu

SEQ ID NO: 934224 - RNA, 19 nt, Artificial Sequence
  Description of Artificial Sequence: Synthetic oligonucleotide
  Sense strand starting at position 3600 of SEQ ID NO: 913527
uguauugacugcuuuauau

SEQ ID NO: 934225 - RNA, 19 nt, Artificial Sequence
  Description of Artificial Sequence: Synthetic oligonucleotide
  Antisense strand to SEQ ID NO: 934224
auauaaagcagucaauaca

SEQ ID NO: 934226 - RNA, 19 nt, Artificial Sequence
  Description of Artificial Sequence: Synthetic oligonucleotide
  Sense strand starting at position 3237 of SEQ ID NO: 913527
ggcauagcaaguuguacaa

SEQ ID NO: 934227 - RNA, 19 nt, Artificial Sequence
  Description of Artificial Sequence: Synthetic oligonucleotide
  Antisense strand to SEQ ID NO: 934226
uuguacaacuugcuaugcc

SEQ ID NO: 934228 - RNA, 19 nt, Artificial Sequence
  Description of Artificial Sequence: Synthetic oligonucleotide
  Sense strand starting at position 2752 of SEQ ID NO: 913527
agcgaugucacuggcaaga

SEQ ID NO: 934229 - RNA, 19 nt, Artificial Sequence
  Description of Artificial Sequence: Synthetic oligonucleotide
  Antisense strand to SEQ ID NO: 934228
ucuugccagugacaucgcu

SEQ ID NO: 934230 - RNA, 19 nt, Artificial Sequence
  Description of Artificial Sequence: Synthetic oligonucleotide
  Sense strand starting at position 2595 of SEQ ID NO: 913527
ggucguagacuuuggguga

SEQ ID NO: 934231 - RNA, 19 nt, Artificial Sequence
  Description of Artificial Sequence: Synthetic oligonucleotide
  Antisense strand to SEQ ID NO: 934230
ucacccaaagucuacgacc

SEQ ID NO: 934232 - RNA, 19 nt, Artificial Sequence
  Description of Artificial Sequence: Synthetic oligonucleotide
  Sense strand starting at position 3726 of SEQ ID NO: 913527
aaguauuuguuguaugaac

SEQ ID NO: 934233 - RNA, 19 nt, Artificial Sequence
  Description of Artificial Sequence: Synthetic oligonucleotide
  Antisense strand to SEQ ID NO: 934232
guucauacaacaaauacuu

SEQ ID NO: 934234 - RNA, 19 nt, Artificial Sequence
  Description of Artificial Sequence: Synthetic oligonucleotide
  Sense strand starting at position 1837 of SEQ ID NO: 913527
uccugcugcuuccuggaaa

SEQ ID NO: 934235 - RNA, 19 nt, Artificial Sequence
  Description of Artificial Sequence: Synthetic oligonucleotide
  Antisense strand to SEQ ID NO: 934234
uuuccaggaagcagcagga

SEQ ID NO: 934236 - RNA, 19 nt, Artificial Sequence
  Description of Artificial Sequence: Synthetic oligonucleotide
  Sense strand starting at position 2483 of SEQ ID NO: 913528
augagauccagucauggug

SEQ ID NO: 934237 - RNA, 19 nt, Artificial Sequence
  Description of Artificial Sequence: Synthetic oligonucleotide
  Antisense strand to SEQ ID NO: 934236
caccaugacuggaucucau

SEQ ID NO: 934238 - RNA, 19 nt, Artificial Sequence
  Description of Artificial Sequence: Synthetic oligonucleotide
  Sense strand starting at position 1830 of SEQ ID NO: 913528
ccuagcuucccgcuuguaa

SEQ ID NO: 934239 - RNA, 19 nt, Artificial Sequence
  Description of Artificial Sequence: Synthetic oligonucleotide
  Antisense strand to SEQ ID NO: 934238
uuacaagcgggaagcuagg

SEQ ID NO: 934240 - RNA, 19 nt, Artificial Sequence
  Description of Artificial Sequence: Synthetic oligonucleotide
  Sense strand starting at position 2028 of SEQ ID NO: 913528
acugguuaacuggacugua

SEQ ID NO: 934241 - RNA, 19 nt, Artificial Sequence
  Description of Artificial Sequence: Synthetic oligonucleotide
  Antisense strand to SEQ ID NO: 934240
uacaguccaguuaaccagu

SEQ ID NO: 934242 - RNA, 19 nt, Artificial Sequence
  Description of Artificial Sequence: Synthetic oligonucleotide
  Sense strand starting at position 2075 of SEQ ID NO: 913528
acccuuugauuccuggaga

SEQ ID NO: 934243 - RNA, 19 nt, Artificial Sequence
  Description of Artificial Sequence: Synthetic oligonucleotide
  Antisense strand to SEQ ID NO: 934242
ucuccaggaaucaaagggu

SEQ ID NO: 934244 - RNA, 19 nt, Artificial Sequence
  Description of Artificial Sequence: Synthetic oligonucleotide
  Sense strand starting at position 549 of SEQ ID NO: 913528
uguguuugagucaggguuu

SEQ ID NO: 934245 - RNA, 19 nt, Artificial Sequence
  Description of Artificial Sequence: Synthetic oligonucleotide
  Antisense strand to SEQ ID NO: 934244
aaacccugacucaaacaca

SEQ ID NO: 934246 - RNA, 19 nt, Artificial Sequence
  Description of Artificial Sequence: Synthetic oligonucleotide
  Sense strand starting at position 320 of SEQ ID NO: 913528
ugaaguugaguuugaagga

SEQ ID NO: 934247 - RNA, 19 nt, Artificial Sequence
  Description of Artificial Sequence: Synthetic oligonucleotide
  Antisense strand to SEQ ID NO: 934246
uccuucaaacucaacuuca

SEQ ID NO: 934248 - RNA, 19 nt, Artificial Sequence
  Description of Artificial Sequence: Synthetic oligonucleotide
  Sense strand starting at position 3616 of SEQ ID NO: 913528
uggugaugucuauacaacu

SEQ ID NO: 934249 - RNA, 19 nt, Artificial Sequence
  Description of Artificial Sequence: Synthetic oligonucleotide
  Antisense strand to SEQ ID NO: 934248
aguuguauagacaucacca

SEQ ID NO: 934250 - RNA, 19 nt, Artificial Sequence
  Description of Artificial Sequence: Synthetic oligonucleotide
  Sense strand starting at position 2303 of SEQ ID NO: 913528
ucauguauccgauaauacc

SEQ ID NO: 934251 - RNA, 19 nt, Artificial Sequence
  Description of Artificial Sequence: Synthetic oligonucleotide
  Antisense strand to SEQ ID NO: 934250
gguauuaucggauacauga

SEQ ID NO: 934252 - RNA, 19 nt, Artificial Sequence
  Description of Artificial Sequence: Synthetic oligonucleotide
  Sense strand starting at position 562 of SEQ ID NO: 913528
ggguuuaaauaugcauaga

SEQ ID NO: 934253 - RNA, 19 nt, Artificial Sequence
  Description of Artificial Sequence: Synthetic oligonucleotide
  Antisense strand to SEQ ID NO: 934252
ucuaugcauauuuaaaccc

SEQ ID NO: 934254 - RNA, 19 nt, Artificial Sequence
  Description of Artificial Sequence: Synthetic oligonucleotide
  Sense strand starting at position 3497 of SEQ ID NO: 913528
guacaaugugaaugaaucu

SEQ ID NO: 934255 - RNA, 19 nt, Artificial Sequence
  Description of Artificial Sequence: Synthetic oligonucleotide
  Antisense strand to SEQ ID NO: 934254
agauucauucacauuguac

SEQ ID NO: 934256 - RNA, 19 nt, Artificial Sequence
  Description of Artificial Sequence: Synthetic oligonucleotide
  Sense strand starting at position 2331 of SEQ ID NO: 913528
cguaaagaauccuuacaau

SEQ ID NO: 934257 - RNA, 19 nt, Artificial Sequence
  Description of Artificial Sequence: Synthetic oligonucleotide
  Antisense strand to SEQ ID NO: 934256
auuguaaggauucuuuacg

SEQ ID NO: 934258 - RNA, 19 nt, Artificial Sequence
  Description of Artificial Sequence: Synthetic oligonucleotide
  Sense strand starting at position 449 of SEQ ID NO: 913528
gauguagaucugcacuuau

SEQ ID NO: 934259 - RNA, 19 nt, Artificial Sequence
  Description of Artificial Sequence: Synthetic oligonucleotide
  Antisense strand to SEQ ID NO: 934258
auaagugcagaucuacauc

SEQ ID NO: 934260 - RNA, 19 nt, Artificial Sequence
  Description of Artificial Sequence: Synthetic oligonucleotide
  Sense strand starting at position 2444 of SEQ ID NO: 913528
agugucauuagucauuaag

SEQ ID NO: 934261 - RNA, 19 nt, Artificial Sequence
  Description of Artificial Sequence: Synthetic oligonucleotide
  Antisense strand to SEQ ID NO: 934260
cuuaaugacuaaugacacu

SEQ ID NO: 934262 - RNA, 19 nt, Artificial Sequence
  Description of Artificial Sequence: Synthetic oligonucleotide
  Sense strand starting at position 2031 of SEQ ID NO: 913528
gguuaacuggacuguaaac

SEQ ID NO: 934263 - RNA, 19 nt, Artificial Sequence
  Description of Artificial Sequence: Synthetic oligonucleotide
  Antisense strand to SEQ ID NO: 934262
guuuacaguccaguuaacc

SEQ ID NO: 934264 - RNA, 19 nt, Artificial Sequence
  Description of Artificial Sequence: Synthetic oligonucleotide
  Sense strand starting at position 234 of SEQ ID NO: 913528
gggaguucagugcaaucau

SEQ ID NO: 934265 - RNA, 19 nt, Artificial Sequence
  Description of Artificial Sequence: Synthetic oligonucleotide
  Antisense strand to SEQ ID NO: 934264
augauugcacugaacuccc

SEQ ID NO: 934266 - RNA, 19 nt, Artificial Sequence
  Description of Artificial Sequence: Synthetic oligonucleotide
  Sense strand starting at position 3473 of SEQ ID NO: 913528
aaaggaguggagugcuaau

SEQ ID NO: 934267 - RNA, 19 nt, Artificial Sequence
  Description of Artificial Sequence: Synthetic oligonucleotide
  Antisense strand to SEQ ID NO: 934266
auuagcacuccacuccuuu

SEQ ID NO: 934268 - RNA, 19 nt, Artificial Sequence
  Description of Artificial Sequence: Synthetic oligonucleotide
  Sense strand starting at position 3741 of SEQ ID NO: 913528
aguacagcccucugaaaga

SEQ ID NO: 934269 - RNA, 19 nt, Artificial Sequence
  Description of Artificial Sequence: Synthetic oligonucleotide
  Antisense strand to SEQ ID NO: 934268
ucuuucagagggcuguacu

SEQ ID NO: 934270 - RNA, 19 nt, Artificial Sequence
  Description of Artificial Sequence: Synthetic oligonucleotide
  Sense strand starting at position 323 of SEQ ID NO: 913528
aguugaguuugaaggagga

SEQ ID NO: 934271 - RNA, 19 nt, Artificial Sequence
  Description of Artificial Sequence: Synthetic oligonucleotide
  Antisense strand to SEQ ID NO: 934270
uccuccuucaaacucaacu

SEQ ID NO: 934272 - RNA, 19 nt, Artificial Sequence
  Description of Artificial Sequence: Synthetic oligonucleotide
  Sense strand starting at position 2013 of SEQ ID NO: 913528
cacugauucugguuuacug

SEQ ID NO: 934273 - RNA, 19 nt, Artificial Sequence
  Description of Artificial Sequence: Synthetic oligonucleotide
  Antisense strand to SEQ ID NO: 934272
caguaaaccagaaucagug

SEQ ID NO: 934274 - RNA, 19 nt, Artificial Sequence
  Description of Artificial Sequence: Synthetic oligonucleotide
  Sense strand starting at position 263 of SEQ ID NO: 913528
ugugauggagucuggacuu

SEQ ID NO: 934275 - RNA, 19 nt, Artificial Sequence
  Description of Artificial Sequence: Synthetic oligonucleotide
  Antisense strand to SEQ ID NO: 934274
aaguccagacuccaucaca

SEQ ID NO: 934276 - RNA, 19 nt, Artificial Sequence
  Description of Artificial Sequence: Synthetic oligonucleotide
  Sense strand starting at position 401 of SEQ ID NO: 913528
aguuaaacauagucaugca

SEQ ID NO: 934277 - RNA, 19 nt, Artificial Sequence
  Description of Artificial Sequence: Synthetic oligonucleotide
  Antisense strand to SEQ ID NO: 934276
ugcaugacuauguuuaacu

SEQ ID NO: 934278 - RNA, 19 nt, Artificial Sequence
  Description of Artificial Sequence: Synthetic oligonucleotide
  Sense strand starting at position 3514 of SEQ ID NO: 913528
cuuacacaugccugguaaa

SEQ ID NO: 934279 - RNA, 19 nt, Artificial Sequence
  Description of Artificial Sequence: Synthetic oligonucleotide
  Antisense strand to SEQ ID NO: 934278
uuuaccaggcauguguaag

SEQ ID NO: 934280 - RNA, 19 nt, Artificial Sequence
  Description of Artificial Sequence: Synthetic oligonucleotide
  Sense strand starting at position 448 of SEQ ID NO: 913528
ugauguagaucugcacuua

SEQ ID NO: 934281 - RNA, 19 nt, Artificial Sequence
  Description of Artificial Sequence: Synthetic oligonucleotide
  Antisense strand to SEQ ID NO: 934280
uaagugcagaucuacauca

SEQ ID NO: 934282 - RNA, 19 nt, Artificial Sequence
  Description of Artificial Sequence: Synthetic oligonucleotide
  Sense strand starting at position 2017 of SEQ ID NO: 913528
gauucugguuuacugguua

SEQ ID NO: 934283 - RNA, 19 nt, Artificial Sequence
  Description of Artificial Sequence: Synthetic oligonucleotide
  Antisense strand to SEQ ID NO: 934282
uaaccaguaaaccagaauc

SEQ ID NO: 934284 - RNA, 19 nt, Artificial Sequence
  Description of Artificial Sequence: Synthetic oligonucleotide
  Sense strand starting at position 548 of SEQ ID NO: 913528
auguguuugagucaggguu

SEQ ID NO: 934285 - RNA, 19 nt, Artificial Sequence
  Description of Artificial Sequence: Synthetic oligonucleotide
  Antisense strand to SEQ ID NO: 934284
aacccugacucaaacacau

SEQ ID NO: 934286 - RNA, 19 nt, Artificial Sequence
  Description of Artificial Sequence: Synthetic oligonucleotide
  Sense strand starting at position 1892 of SEQ ID NO: 913528
gcuggaaauucuuuauguc

SEQ ID NO: 934287 - RNA, 19 nt, Artificial Sequence
  Description of Artificial Sequence: Synthetic oligonucleotide
  Antisense strand to SEQ ID NO: 934286
gacauaaagaauuuccagc

SEQ ID NO: 934288 - RNA, 19 nt, Artificial Sequence
  Description of Artificial Sequence: Synthetic oligonucleotide
  Sense strand starting at position 409 of SEQ ID NO: 913528
auagucaugcaaugagcua

SEQ ID NO: 934289 - RNA, 19 nt, Artificial Sequence
  Description of Artificial Sequence: Synthetic oligonucleotide
  Antisense strand to SEQ ID NO: 934288
uagcucauugcaugacuau

SEQ ID NO: 934290 - RNA, 19 nt, Artificial Sequence
  Description of Artificial Sequence: Synthetic oligonucleotide
  Sense strand starting at position 3791 of SEQ ID NO: 913528
auuccauuccuggguaugu

SEQ ID NO: 934291 - RNA, 19 nt, Artificial Sequence
  Description of Artificial Sequence: Synthetic oligonucleotide
  Antisense strand to SEQ ID NO: 934290
acauacccaggaauggaau

SEQ ID NO: 934292 - RNA, 19 nt, Artificial Sequence
  Description of Artificial Sequence: Synthetic oligonucleotide
  Sense strand starting at position 232 of SEQ ID NO: 913528
uugggaguucagugcaauc

SEQ ID NO: 934293 - RNA, 19 nt, Artificial Sequence
  Description of Artificial Sequence: Synthetic oligonucleotide
  Antisense strand to SEQ ID NO: 934292
gauugcacugaacucccaa

SEQ ID NO: 934294 - RNA, 19 nt, Artificial Sequence
  Description of Artificial Sequence: Synthetic oligonucleotide
  Sense strand starting at position 3674 of SEQ ID NO: 913528
acagaugaauucuaugaua

SEQ ID NO: 934295 - RNA, 19 nt, Artificial Sequence
  Description of Artificial Sequence: Synthetic oligonucleotide
  Antisense strand to SEQ ID NO: 934294
uaucauagaauucaucugu

SEQ ID NO: 934296 - RNA, 19 nt, Artificial Sequence
  Description of Artificial Sequence: Synthetic oligonucleotide
  Sense strand starting at position 485 of SEQ ID NO: 913528
auaacagauugugaaauga

SEQ ID NO: 934297 - RNA, 19 nt, Artificial Sequence
  Description of Artificial Sequence: Synthetic oligonucleotide
  Antisense strand to SEQ ID NO: 934296
ucauuucacaaucuguuau

SEQ ID NO: 934298 - RNA, 19 nt, Artificial Sequence
  Description of Artificial Sequence: Synthetic oligonucleotide
  Sense strand starting at position 3353 of SEQ ID NO: 913528
uguccauagcaguauuguu

SEQ ID NO: 934299 - RNA, 19 nt, Artificial Sequence
  Description of Artificial Sequence: Synthetic oligonucleotide
  Antisense strand to SEQ ID NO: 934298
aacaauacugcuauggaca

SEQ ID NO: 934300 - RNA, 19 nt, Artificial Sequence
  Description of Artificial Sequence: Synthetic oligonucleotide
  Sense strand starting at position 1310 of SEQ ID NO: 913528
gaggaaagaucugaaggcu

SEQ ID NO: 934301 - RNA, 19 nt, Artificial Sequence
  Description of Artificial Sequence: Synthetic oligonucleotide
  Antisense strand to SEQ ID NO: 934300
agccuucagaucuuuccuc

SEQ ID NO: 934302 - RNA, 19 nt, Artificial Sequence
  Description of Artificial Sequence: Synthetic oligonucleotide
  Sense strand starting at position 2196 of SEQ ID NO: 913528
ucugaagcauggcuguauu

SEQ ID NO: 934303 - RNA, 19 nt, Artificial Sequence
  Description of Artificial Sequence: Synthetic oligonucleotide
  Antisense strand to SEQ ID NO: 934302
aauacagccaugcuucaga

SEQ ID NO: 934304 - RNA, 19 nt, Artificial Sequence
  Description of Artificial Sequence: Synthetic oligonucleotide
  Sense strand starting at position 2183 of SEQ ID NO: 913528
gccugccuaucuuucugaa

SEQ ID NO: 934305 - RNA, 19 nt, Artificial Sequence
  Description of Artificial Sequence: Synthetic oligonucleotide
  Antisense strand to SEQ ID NO: 934304
uucagaaagauaggcaggc

SEQ ID NO: 934306 - RNA, 19 nt, Artificial Sequence
  Description of Artificial Sequence: Synthetic oligonucleotide
  Sense strand starting at position 1900 of SEQ ID NO: 913528
uucuuuaugucguucugga

SEQ ID NO: 934307 - RNA, 19 nt, Artificial Sequence
  Description of Artificial Sequence: Synthetic oligonucleotide
  Antisense strand to SEQ ID NO: 934306
uccagaacgacauaaagaa

SEQ ID NO: 934308 - RNA, 19 nt, Artificial Sequence
  Description of Artificial Sequence: Synthetic oligonucleotide
  Sense strand starting at position 3504 of SEQ ID NO: 913528
gugaaugaaucuuacacau

SEQ ID NO: 934309 - RNA, 19 nt, Artificial Sequence
  Description of Artificial Sequence: Synthetic oligonucleotide
  Antisense strand to SEQ ID NO: 934308
auguguaagauucauucac

SEQ ID NO: 934310 - RNA, 19 nt, Artificial Sequence
  Description of Artificial Sequence: Synthetic oligonucleotide
  Sense strand starting at position 3494 of SEQ ID NO: 913528
auuguacaaugugaaugaa

SEQ ID NO: 934311 - RNA, 19 nt, Artificial Sequence
  Description of Artificial Sequence: Synthetic oligonucleotide
  Antisense strand to SEQ ID NO: 934310
uucauucacauuguacaau

SEQ ID NO: 934312 - RNA, 19 nt, Artificial Sequence
  Description of Artificial Sequence: Synthetic oligonucleotide
  Sense strand starting at position 3679 of SEQ ID NO: 913528
ugaauucuaugauaugcaa

SEQ ID NO: 934313 - RNA, 19 nt, Artificial Sequence
  Description of Artificial Sequence: Synthetic oligonucleotide
  Antisense strand to SEQ ID NO: 934312
uugcauaucauagaauuca

SEQ ID NO: 934314 - RNA, 19 nt, Artificial Sequence
  Description of Artificial Sequence: Synthetic oligonucleotide
  Sense strand starting at position 484 of SEQ ID NO: 913528
cauaacagauugugaaaug

SEQ ID NO: 934315 - RNA, 19 nt, Artificial Sequence
  Description of Artificial Sequence: Synthetic oligonucleotide
  Antisense strand to SEQ ID NO: 934314
cauuucacaaucuguuaug

SEQ ID NO: 934316 - RNA, 19 nt, Artificial Sequence
  Description of Artificial Sequence: Synthetic oligonucleotide
  Sense strand starting at position 989 of SEQ ID NO: 913529
gcggaaauucagccgcauu

SEQ ID NO: 934317 - RNA, 19 nt, Artificial Sequence
  Description of Artificial Sequence: Synthetic oligonucleotide
  Antisense strand to SEQ ID NO: 934316
aaugcggcugaauuuccgc

SEQ ID NO: 934318 - RNA, 19 nt, Artificial Sequence
  Description of Artificial Sequence: Synthetic oligonucleotide
  Sense strand starting at position 149 of SEQ ID NO: 913529
gucgacauucuacaaauau

SEQ ID NO: 934319 - RNA, 19 nt, Artificial Sequence
  Description of Artificial Sequence: Synthetic oligonucleotide
  Antisense strand to SEQ ID NO: 934318
auauuuguagaaugucgac

SEQ ID NO: 934320 - RNA, 19 nt, Artificial Sequence
  Description of Artificial Sequence: Synthetic oligonucleotide
  Sense strand starting at position 660 of SEQ ID NO: 913529
acgucauuuaguggaaguc

SEQ ID NO: 934321 - RNA, 19 nt, Artificial Sequence
  Description of Artificial Sequence: Synthetic oligonucleotide
  Antisense strand to SEQ ID NO: 934320
gacuuccacuaaaugacgu

SEQ ID NO: 934322 - RNA, 19 nt, Artificial Sequence
  Description of Artificial Sequence: Synthetic oligonucleotide
  Sense strand starting at position 249 of SEQ ID NO: 913529
cuggaaauucuggaugugu

SEQ ID NO: 934323 - RNA, 19 nt, Artificial Sequence
  Description of Artificial Sequence: Synthetic oligonucleotide
  Antisense strand to SEQ ID NO: 934322
acacauccagaauuuccag

SEQ ID NO: 934324 - RNA, 19 nt, Artificial Sequence
  Description of Artificial Sequence: Synthetic oligonucleotide
  Sense strand starting at position 3604 of SEQ ID NO: 913529
agaaguccucagggugaga

SEQ ID NO: 934325 - RNA, 19 nt, Artificial Sequence
  Description of Artificial Sequence: Synthetic oligonucleotide
  Antisense strand to SEQ ID NO: 934324
ucucacccugaggacuucu

SEQ ID NO: 934326 - RNA, 19 nt, Artificial Sequence
  Description of Artificial Sequence: Synthetic oligonucleotide
  Sense strand starting at position 2463 of SEQ ID NO: 913529
cccagaggguccuuugaga

SEQ ID NO: 934327 - RNA, 19 nt, Artificial Sequence
  Description of Artificial Sequence: Synthetic oligonucleotide
  Antisense strand to SEQ ID NO: 934326
ucucaaaggacccucuggg

SEQ ID NO: 934328 - RNA, 19 nt, Artificial Sequence
  Description of Artificial Sequence: Synthetic oligonucleotide
  Sense strand starting at position 2302 of SEQ ID NO: 913529
gaguaaaguucccugggag

SEQ ID NO: 934329 - RNA, 19 nt, Artificial Sequence
  Description of Artificial Sequence: Synthetic oligonucleotide
  Antisense strand to SEQ ID NO: 934328
cucccagggaacuuuacuc

SEQ ID NO: 934330 - RNA, 19 nt, Artificial Sequence
  Description of Artificial Sequence: Synthetic oligonucleotide
  Sense strand starting at position 3768 of SEQ ID NO: 913529
gucuuuaguggugaaacag

SEQ ID NO: 934331 - RNA, 19 nt, Artificial Sequence
  Description of Artificial Sequence: Synthetic oligonucleotide
  Antisense strand to SEQ ID NO: 934330
cuguuucaccacuaaagac

SEQ ID NO: 934332 - RNA, 19 nt, Artificial Sequence
  Description of Artificial Sequence: Synthetic oligonucleotide
  Sense strand starting at position 2293 of SEQ ID NO: 913529
gguuucugggaguaaaguu

SEQ ID NO: 934333 - RNA, 19 nt, Artificial Sequence
  Description of Artificial Sequence: Synthetic oligonucleotide
  Antisense strand to SEQ ID NO: 934332
aacuuuacucccagaaacc

SEQ ID NO: 934334 - RNA, 19 nt, Artificial Sequence
  Description of Artificial Sequence: Synthetic oligonucleotide
  Sense strand starting at position 435 of SEQ ID NO: 913529
ugagcaguuuaaccaaaca

SEQ ID NO: 934335 - RNA, 19 nt, Artificial Sequence
  Description of Artificial Sequence: Synthetic oligonucleotide
  Antisense strand to SEQ ID NO: 934334
uguuugguuaaacugcuca

SEQ ID NO: 934336 - RNA, 19 nt, Artificial Sequence
  Description of Artificial Sequence: Synthetic oligonucleotide
  Sense strand starting at position 1144 of SEQ ID NO: 913529
gggcauaagccagagcuga

SEQ ID NO: 934337 - RNA, 19 nt, Artificial Sequence
  Description of Artificial Sequence: Synthetic oligonucleotide
  Antisense strand to SEQ ID NO: 934336
ucagcucuggcuuaugccc

SEQ ID NO: 934338 - RNA, 19 nt, Artificial Sequence
  Description of Artificial Sequence: Synthetic oligonucleotide
  Sense strand starting at position 1181 of SEQ ID NO: 913529
ggacaaguucugggaagcu

SEQ ID NO: 934339 - RNA, 19 nt, Artificial Sequence
  Description of Artificial Sequence: Synthetic oligonucleotide
  Antisense strand to SEQ ID NO: 934338
agcuucccagaacuugucc

SEQ ID NO: 934340 - RNA, 19 nt, Artificial Sequence
  Description of Artificial Sequence: Synthetic oligonucleotide
  Sense strand starting at position 2351 of SEQ ID NO: 913529
cccaucugagacugugauu

SEQ ID NO: 934341 - RNA, 19 nt, Artificial Sequence
  Description of Artificial Sequence: Synthetic oligonucleotide
  Antisense strand to SEQ ID NO: 934340
aaucacagucucagauggg

SEQ ID NO: 934342 - RNA, 19 nt, Artificial Sequence
  Description of Artificial Sequence: Synthetic oligonucleotide
  Sense strand starting at position 251 of SEQ ID NO: 913529
ggaaauucuggauguguuc

SEQ ID NO: 934343 - RNA, 19 nt, Artificial Sequence
  Description of Artificial Sequence: Synthetic oligonucleotide
  Antisense strand to SEQ ID NO: 934342
gaacacauccagaauuucc

SEQ ID NO: 934344 - RNA, 19 nt, Artificial Sequence
  Description of Artificial Sequence: Synthetic oligonucleotide
  Sense strand starting at position 3174 of SEQ ID NO: 913529
uguagaugucuuugggaac

SEQ ID NO: 934345 - RNA, 19 nt, Artificial Sequence
  Description of Artificial Sequence: Synthetic oligonucleotide
  Antisense strand to SEQ ID NO: 934344
guucccaaagacaucuaca

SEQ ID NO: 934346 - RNA, 19 nt, Artificial Sequence
  Description of Artificial Sequence: Synthetic oligonucleotide
  Sense strand starting at position 2431 of SEQ ID NO: 913529
ggguuugugguucauccaa

SEQ ID NO: 934347 - RNA, 19 nt, Artificial Sequence
  Description of Artificial Sequence: Synthetic oligonucleotide
  Antisense strand to SEQ ID NO: 934346
uuggaugaaccacaaaccc

SEQ ID NO: 934348 - RNA, 19 nt, Artificial Sequence
  Description of Artificial Sequence: Synthetic oligonucleotide
  Sense strand starting at position 3937 of SEQ ID NO: 913529
gagcuugcucaacagcaga

SEQ ID NO: 934349 - RNA, 19 nt, Artificial Sequence
  Description of Artificial Sequence: Synthetic oligonucleotide
  Antisense strand to SEQ ID NO: 934348
ucugcuguugagcaagcuc

SEQ ID NO: 934350 - RNA, 19 nt, Artificial Sequence
  Description of Artificial Sequence: Synthetic oligonucleotide
  Sense strand starting at position 3394 of SEQ ID NO: 913529
ccaggaagguugucauucu

SEQ ID NO: 934351 - RNA, 19 nt, Artificial Sequence
  Description of Artificial Sequence: Synthetic oligonucleotide
  Antisense strand to SEQ ID NO: 934350
agaaugacaaccuuccugg

SEQ ID NO: 934352 - RNA, 19 nt, Artificial Sequence
  Description of Artificial Sequence: Synthetic oligonucleotide
  Sense strand starting at position 3068 of SEQ ID NO: 913529
auccuaucuugagugguga

SEQ ID NO: 934353 - RNA, 19 nt, Artificial Sequence
  Description of Artificial Sequence: Synthetic oligonucleotide
  Antisense strand to SEQ ID NO: 934352
ucaccacucaagauaggau

SEQ ID NO: 934354 - RNA, 19 nt, Artificial Sequence
  Description of Artificial Sequence: Synthetic oligonucleotide
  Sense strand starting at position 3164 of SEQ ID NO: 913529
gguauucagguguagaugu

SEQ ID NO: 934355 - RNA, 19 nt, Artificial Sequence
  Description of Artificial Sequence: Synthetic oligonucleotide
  Antisense strand to SEQ ID NO: 934354
acaucuacaccugaauacc

SEQ ID NO: 934356 - RNA, 19 nt, Artificial Sequence
  Description of Artificial Sequence: Synthetic oligonucleotide
  Sense strand starting at position 257 of SEQ ID NO: 913529
ucuggauguguucaggguu

SEQ ID NO: 934357 - RNA, 19 nt, Artificial Sequence
  Description of Artificial Sequence: Synthetic oligonucleotide
  Antisense strand to SEQ ID NO: 934356
aacccugaacacauccaga

SEQ ID NO: 934358 - RNA, 19 nt, Artificial Sequence
  Description of Artificial Sequence: Synthetic oligonucleotide
  Sense strand starting at position 3765 of SEQ ID NO: 913529
acagucuuuaguggugaaa

SEQ ID NO: 934359 - RNA, 19 nt, Artificial Sequence
  Description of Artificial Sequence: Synthetic oligonucleotide
  Antisense strand to SEQ ID NO: 934358
uuucaccacuaaagacugu

SEQ ID NO: 934360 - RNA, 19 nt, Artificial Sequence
  Description of Artificial Sequence: Synthetic oligonucleotide
  Sense strand starting at position 1356 of SEQ ID NO: 913529
gcagaaaguuccuuaccug

SEQ ID NO: 934361 - RNA, 19 nt, Artificial Sequence
  Description of Artificial Sequence: Synthetic oligonucleotide
  Antisense strand to SEQ ID NO: 934360
cagguaaggaacuuucugc

SEQ ID NO: 934362 - RNA, 19 nt, Artificial Sequence
  Description of Artificial Sequence: Synthetic oligonucleotide
  Sense strand starting at position 931 of SEQ ID NO: 913529
ggcagagcuuucccuagaa

SEQ ID NO: 934363 - RNA, 19 nt, Artificial Sequence
  Description of Artificial Sequence: Synthetic oligonucleotide
  Antisense strand to SEQ ID NO: 934362
uucuagggaaagcucugcc

SEQ ID NO: 934364 - RNA, 19 nt, Artificial Sequence
  Description of Artificial Sequence: Synthetic oligonucleotide
  Sense strand starting at position 2989 of SEQ ID NO: 913529
ccgccuuccagcuagagaa

SEQ ID NO: 934365 - RNA, 19 nt, Artificial Sequence
  Description of Artificial Sequence: Synthetic oligonucleotide
  Antisense strand to SEQ ID NO: 934364
uucucuagcuggaaggcgg

SEQ ID NO: 934366 - RNA, 19 nt, Artificial Sequence
  Description of Artificial Sequence: Synthetic oligonucleotide
  Sense strand starting at position 432 of SEQ ID NO: 913529
ucgugagcaguuuaaccaa

SEQ ID NO: 934367 - RNA, 19 nt, Artificial Sequence
  Description of Artificial Sequence: Synthetic oligonucleotide
  Antisense strand to SEQ ID NO: 934366
uugguuaaacugcucacga

SEQ ID NO: 934368 - RNA, 19 nt, Artificial Sequence
  Description of Artificial Sequence: Synthetic oligonucleotide
  Sense strand starting at position 2356 of SEQ ID NO: 913529
cugagacugugauucuguu

SEQ ID NO: 934369 - RNA, 19 nt, Artificial Sequence
  Description of Artificial Sequence: Synthetic oligonucleotide
  Antisense strand to SEQ ID NO: 934368
aacagaaucacagucucag

SEQ ID NO: 934370 - RNA, 19 nt, Artificial Sequence
  Description of Artificial Sequence: Synthetic oligonucleotide
  Sense strand starting at position 3057 of SEQ ID NO: 913529
ucaguauagucauccuauc

SEQ ID NO: 934371 - RNA, 19 nt, Artificial Sequence
  Description of Artificial Sequence: Synthetic oligonucleotide
  Antisense strand to SEQ ID NO: 934370
gauaggaugacuauacuga

SEQ ID NO: 934372 - RNA, 19 nt, Artificial Sequence
  Description of Artificial Sequence: Synthetic oligonucleotide
  Sense strand starting at position 2767 of SEQ ID NO: 913529
ucagguauuggcugaauuc

SEQ ID NO: 934373 - RNA, 19 nt, Artificial Sequence
  Description of Artificial Sequence: Synthetic oligonucleotide
  Antisense strand to SEQ ID NO: 934372
gaauucagccaauaccuga

SEQ ID NO: 934374 - RNA, 19 nt, Artificial Sequence
  Description of Artificial Sequence: Synthetic oligonucleotide
  Sense strand starting at position 3323 of SEQ ID NO: 913529
caccauugcccuggaguga

SEQ ID NO: 934375 - RNA, 19 nt, Artificial Sequence
  Description of Artificial Sequence: Synthetic oligonucleotide
  Antisense strand to SEQ ID NO: 934374
ucacuccagggcaauggug

SEQ ID NO: 934376 - RNA, 19 nt, Artificial Sequence
  Description of Artificial Sequence: Synthetic oligonucleotide
  Sense strand starting at position 139 of SEQ ID NO: 913529
uggagucacagucgacauu

SEQ ID NO: 934377 - RNA, 19 nt, Artificial Sequence
  Description of Artificial Sequence: Synthetic oligonucleotide
  Antisense strand to SEQ ID NO: 934376
aaugucgacugugacucca

SEQ ID NO: 934378 - RNA, 19 nt, Artificial Sequence
  Description of Artificial Sequence: Synthetic oligonucleotide
  Sense strand starting at position 649 of SEQ ID NO: 913529
guuaauaaacuacgucauu

SEQ ID NO: 934379 - RNA, 19 nt, Artificial Sequence
  Description of Artificial Sequence: Synthetic oligonucleotide
  Antisense strand to SEQ ID NO: 934378
aaugacguaguuuauuaac

SEQ ID NO: 934380 - RNA, 19 nt, Artificial Sequence
  Description of Artificial Sequence: Synthetic oligonucleotide
  Sense strand starting at position 1557 of SEQ ID NO: 913529
aucuccugcccguaauaau

SEQ ID NO: 934381 - RNA, 19 nt, Artificial Sequence
  Description of Artificial Sequence: Synthetic oligonucleotide
  Antisense strand to SEQ ID NO: 934380
auuauuacgggcaggagau

SEQ ID NO: 934382 - RNA, 19 nt, Artificial Sequence
  Description of Artificial Sequence: Synthetic oligonucleotide
  Sense strand starting at position 49 of SEQ ID NO: 913529
cgcugagcaaguuacuuaa

SEQ ID NO: 934383 - RNA, 19 nt, Artificial Sequence
  Description of Artificial Sequence: Synthetic oligonucleotide
  Antisense strand to SEQ ID NO: 934382
uuaaguaacuugcucagcg

SEQ ID NO: 934384 - RNA, 19 nt, Artificial Sequence
  Description of Artificial Sequence: Synthetic oligonucleotide
  Sense strand starting at position 286 of SEQ ID NO: 913529
ucagaaaucuccgcccauu

SEQ ID NO: 934385 - RNA, 19 nt, Artificial Sequence
  Description of Artificial Sequence: Synthetic oligonucleotide
  Antisense strand to SEQ ID NO: 934384
aaugggcggagauuucuga

SEQ ID NO: 934386 - RNA, 19 nt, Artificial Sequence
  Description of Artificial Sequence: Synthetic oligonucleotide
  Sense strand starting at position 285 of SEQ ID NO: 913529
cucagaaaucuccgcccau

SEQ ID NO: 934387 - RNA, 19 nt, Artificial Sequence
  Description of Artificial Sequence: Synthetic oligonucleotide
  Antisense strand to SEQ ID NO: 934386
augggcggagauuucugag

SEQ ID NO: 934388 - RNA, 19 nt, Artificial Sequence
  Description of Artificial Sequence: Synthetic oligonucleotide
  Sense strand starting at position 427 of SEQ ID NO: 913529
gacuuucgugagcaguuua

SEQ ID NO: 934389 - RNA, 19 nt, Artificial Sequence
  Description of Artificial Sequence: Synthetic oligonucleotide
  Antisense strand to SEQ ID NO: 934388
uaaacugcucacgaaaguc

SEQ ID NO: 934390 - RNA, 19 nt, Artificial Sequence
  Description of Artificial Sequence: Synthetic oligonucleotide
  Sense strand starting at position 2360 of SEQ ID NO: 913529
gacugugauucuguugggu

SEQ ID NO: 934391 - RNA, 19 nt, Artificial Sequence
  Description of Artificial Sequence: Synthetic oligonucleotide
  Antisense strand to SEQ ID NO: 934390
acccaacagaaucacaguc

SEQ ID NO: 934392 - RNA, 19 nt, Artificial Sequence
  Description of Artificial Sequence: Synthetic oligonucleotide
  Sense strand starting at position 3263 of SEQ ID NO: 913529
gggucugugaugugauccu

SEQ ID NO: 934393 - RNA, 19 nt, Artificial Sequence
  Description of Artificial Sequence: Synthetic oligonucleotide
  Antisense strand to SEQ ID NO: 934392
aggaucacaucacagaccc

SEQ ID NO: 934394 - RNA, 19 nt, Artificial Sequence
  Description of Artificial Sequence: Synthetic oligonucleotide
  Sense strand starting at position 1355 of SEQ ID NO: 913529
cgcagaaaguuccuuaccu

SEQ ID NO: 934395 - RNA, 19 nt, Artificial Sequence
  Description of Artificial Sequence: Synthetic oligonucleotide
  Antisense strand to SEQ ID NO: 934394
agguaaggaacuuucugcg

SEQ ID NO: 934396 - RNA, 19 nt, Artificial Sequence
  Description of Artificial Sequence: Synthetic oligonucleotide
  Sense strand starting at position 3454 of SEQ ID NO: 913530
aaguauuugcucuacgguu

SEQ ID NO: 934397 - RNA, 19 nt, Artificial Sequence
  Description of Artificial Sequence: Synthetic oligonucleotide
  Antisense strand to SEQ ID NO: 934396
aaccguagagcaaauacuu

SEQ ID NO: 934398 - RNA, 19 nt, Artificial Sequence
  Description of Artificial Sequence: Synthetic oligonucleotide
  Sense strand starting at position 3040 of SEQ ID NO: 913530
augguuauagaguacagua

SEQ ID NO: 934399 - RNA, 19 nt, Artificial Sequence
  Description of Artificial Sequence: Synthetic oligonucleotide
  Antisense strand to SEQ ID NO: 934398
uacuguacucuauaaccau

SEQ ID NO: 934400 - RNA, 19 nt, Artificial Sequence
  Description of Artificial Sequence: Synthetic oligonucleotide
  Sense strand starting at position 1215 of SEQ ID NO: 913530
uaaacugcgcucguaaagu

SEQ ID NO: 934401 - RNA, 19 nt, Artificial Sequence
  Description of Artificial Sequence: Synthetic oligonucleotide
  Antisense strand to SEQ ID NO: 934400
acuuuacgagcgcaguuua

SEQ ID NO: 934402 - RNA, 19 nt, Artificial Sequence
  Description of Artificial Sequence: Synthetic oligonucleotide
  Sense strand starting at position 3070 of SEQ ID NO: 913530
aacgauagguucuuagaaa

SEQ ID NO: 934403 - RNA, 19 nt, Artificial Sequence
  Description of Artificial Sequence: Synthetic oligonucleotide
  Antisense strand to SEQ ID NO: 934402
uuucuaagaaccuaucguu

SEQ ID NO: 934404 - RNA, 19 nt, Artificial Sequence
  Description of Artificial Sequence: Synthetic oligonucleotide
  Sense strand starting at position 2429 of SEQ ID NO: 913530
ucuacauaccuugacuagu

SEQ ID NO: 934405 - RNA, 19 nt, Artificial Sequence
  Description of Artificial Sequence: Synthetic oligonucleotide
  Antisense strand to SEQ ID NO: 934404
acuagucaagguauguaga

SEQ ID NO: 934406 - RNA, 19 nt, Artificial Sequence
  Description of Artificial Sequence: Synthetic oligonucleotide
  Sense strand starting at position 3675 of SEQ ID NO: 913530
uggaucuggguuuaaaugu

SEQ ID NO: 934407 - RNA, 19 nt, Artificial Sequence
  Description of Artificial Sequence: Synthetic oligonucleotide
  Antisense strand to SEQ ID NO: 934406
acauuuaaacccagaucca

SEQ ID NO: 934408 - RNA, 19 nt, Artificial Sequence
  Description of Artificial Sequence: Synthetic oligonucleotide
  Sense strand starting at position 3053 of SEQ ID NO: 913530
acaguagguccucacuuaa

SEQ ID NO: 934409 - RNA, 19 nt, Artificial Sequence
  Description of Artificial Sequence: Synthetic oligonucleotide
  Antisense strand to SEQ ID NO: 934408
uuaagugaggaccuacugu

SEQ ID NO: 934410 - RNA, 19 nt, Artificial Sequence
  Description of Artificial Sequence: Synthetic oligonucleotide
  Sense strand starting at position 3773 of SEQ ID NO: 913530
accuguuaggauuauugua

SEQ ID NO: 934411 - RNA, 19 nt, Artificial Sequence
  Description of Artificial Sequence: Synthetic oligonucleotide
  Antisense strand to SEQ ID NO: 934410
uacaauaauccuaacaggu

SEQ ID NO: 934412 - RNA, 19 nt, Artificial Sequence
  Description of Artificial Sequence: Synthetic oligonucleotide
  Sense strand starting at position 3639 of SEQ ID NO: 913530
ugcuguaagauguaauaga

SEQ ID NO: 934413 - RNA, 19 nt, Artificial Sequence
  Description of Artificial Sequence: Synthetic oligonucleotide
  Antisense strand to SEQ ID NO: 934412
ucuauuacaucuuacagca

SEQ ID NO: 934414 - RNA, 19 nt, Artificial Sequence
  Description of Artificial Sequence: Synthetic oligonucleotide
  Sense strand starting at position 1202 of SEQ ID NO: 913530
guccgcuuucgucuaaacu

SEQ ID NO: 934415 - RNA, 19 nt, Artificial Sequence
  Description of Artificial Sequence: Synthetic oligonucleotide
  Antisense strand to SEQ ID NO: 934414
aguuuagacgaaagcggac

SEQ ID NO: 934416 - RNA, 19 nt, Artificial Sequence
  Description of Artificial Sequence: Synthetic oligonucleotide
  Sense strand starting at position 1212 of SEQ ID NO: 913530
gucuaaacugcgcucguaa

SEQ ID NO: 934417 - RNA, 19 nt, Artificial Sequence
  Description of Artificial Sequence: Synthetic oligonucleotide
  Antisense strand to SEQ ID NO: 934416
uuacgagcgcaguuuagac

SEQ ID NO: 934418 - RNA, 19 nt, Artificial Sequence
  Description of Artificial Sequence: Synthetic oligonucleotide
  Sense strand starting at position 2507 of SEQ ID NO: 913530
gcuugagcuccugagacaa

SEQ ID NO: 934419 - RNA, 19 nt, Artificial Sequence
  Description of Artificial Sequence: Synthetic oligonucleotide
  Antisense strand to SEQ ID NO: 934418
uugucucaggagcucaagc

SEQ ID NO: 934420 - RNA, 19 nt, Artificial Sequence
  Description of Artificial Sequence: Synthetic oligonucleotide
  Sense strand starting at position 473 of SEQ ID NO: 913530
ccggcaaauuaaguagaaa

SEQ ID NO: 934421 - RNA, 19 nt, Artificial Sequence
  Description of Artificial Sequence: Synthetic oligonucleotide
  Antisense strand to SEQ ID NO: 934420
uuucuacuuaauuugccgg

SEQ ID NO: 934422 - RNA, 19 nt, Artificial Sequence
  Description of Artificial Sequence: Synthetic oligonucleotide
  Sense strand starting at position 3081 of SEQ ID NO: 913530
cuuagaaaucauggcuuua

SEQ ID NO: 934423 - RNA, 19 nt, Artificial Sequence
  Description of Artificial Sequence: Synthetic oligonucleotide
  Antisense strand to SEQ ID NO: 934422
uaaagccaugauuucuaag

SEQ ID NO: 934424 - RNA, 19 nt, Artificial Sequence
  Description of Artificial Sequence: Synthetic oligonucleotide
  Sense strand starting at position 3228 of SEQ ID NO: 913530
agcuauugacaauguuaag

SEQ ID NO: 934425 - RNA, 19 nt, Artificial Sequence
  Description of Artificial Sequence: Synthetic oligonucleotide
  Antisense strand to SEQ ID NO: 934424
cuuaacauugucaauagcu

SEQ ID NO: 934426 - RNA, 19 nt, Artificial Sequence
  Description of Artificial Sequence: Synthetic oligonucleotide
  Sense strand starting at position 2190 of SEQ ID NO: 913530
acuugucagccagaguaac

SEQ ID NO: 934427 - RNA, 19 nt, Artificial Sequence
  Description of Artificial Sequence: Synthetic oligonucleotide
  Antisense strand to SEQ ID NO: 934426
guuacucuggcugacaagu

SEQ ID NO: 934428 - RNA, 19 nt, Artificial Sequence
  Description of Artificial Sequence: Synthetic oligonucleotide
  Sense strand starting at position 3775 of SEQ ID NO: 913530
cuguuaggauuauuguaga

SEQ ID NO: 934429 - RNA, 19 nt, Artificial Sequence
  Description of Artificial Sequence: Synthetic oligonucleotide
  Antisense strand to SEQ ID NO: 934428
ucuacaauaauccuaacag

SEQ ID NO: 934430 - RNA, 19 nt, Artificial Sequence
  Description of Artificial Sequence: Synthetic oligonucleotide
  Sense strand starting at position 2188 of SEQ ID NO: 913530
ugacuugucagccagagua

SEQ ID NO: 934431 - RNA, 19 nt, Artificial Sequence
  Description of Artificial Sequence: Synthetic oligonucleotide
  Antisense strand to SEQ ID NO: 934430
uacucuggcugacaaguca

SEQ ID NO: 934432 - RNA, 19 nt, Artificial Sequence
  Description of Artificial Sequence: Synthetic oligonucleotide
  Sense strand starting at position 3384 of SEQ ID NO: 913530
acaauugucucuguaacag

SEQ ID NO: 934433 - RNA, 19 nt, Artificial Sequence
  Description of Artificial Sequence: Synthetic oligonucleotide
  Antisense strand to SEQ ID NO: 934432
cuguuacagagacaauugu

SEQ ID NO: 934434 - RNA, 19 nt, Artificial Sequence
  Description of Artificial Sequence: Synthetic oligonucleotide
  Sense strand starting at position 3066 of SEQ ID NO: 913530
acuuaacgauagguucuua

SEQ ID NO: 934435 - RNA, 19 nt, Artificial Sequence
  Description of Artificial Sequence: Synthetic oligonucleotide
  Antisense strand to SEQ ID NO: 934434
uaagaaccuaucguuaagu

SEQ ID NO: 934436 - RNA, 19 nt, Artificial Sequence
  Description of Artificial Sequence: Synthetic oligonucleotide
  Sense strand starting at position 3681 of SEQ ID NO: 913530
uggguuuaaauguaugcuu

SEQ ID NO: 934437 - RNA, 19 nt, Artificial Sequence
  Description of Artificial Sequence: Synthetic oligonucleotide
  Antisense strand to SEQ ID NO: 934436
aagcauacauuuaaaccca

SEQ ID NO: 934438 - RNA, 19 nt, Artificial Sequence
  Description of Artificial Sequence: Synthetic oligonucleotide
  Sense strand starting at position 3032 of SEQ ID NO: 913530
auagcagcaugguuauaga

SEQ ID NO: 934439 - RNA, 19 nt, Artificial Sequence
  Description of Artificial Sequence: Synthetic oligonucleotide
  Antisense strand to SEQ ID NO: 934438
ucuauaaccaugcugcuau

SEQ ID NO: 934440 - RNA, 19 nt, Artificial Sequence
  Description of Artificial Sequence: Synthetic oligonucleotide
  Sense strand starting at position 3887 of SEQ ID NO: 913530
gauaguuaauucucuguug

SEQ ID NO: 934441 - RNA, 19 nt, Artificial Sequence
  Description of Artificial Sequence: Synthetic oligonucleotide
  Antisense strand to SEQ ID NO: 934440
caacagagaauuaacuauc

SEQ ID NO: 934442 - RNA, 19 nt, Artificial Sequence
  Description of Artificial Sequence: Synthetic oligonucleotide
  Sense strand starting at position 3029 of SEQ ID NO: 913530
agaauagcagcaugguuau

SEQ ID NO: 934443 - RNA, 19 nt, Artificial Sequence
  Description of Artificial Sequence: Synthetic oligonucleotide
  Antisense strand to SEQ ID NO: 934442
auaaccaugcugcuauucu

SEQ ID NO: 934444 - RNA, 19 nt, Artificial Sequence
  Description of Artificial Sequence: Synthetic oligonucleotide
  Sense strand starting at position 495 of SEQ ID NO: 913530
aacugagucacguacguaa

SEQ ID NO: 934445 - RNA, 19 nt, Artificial Sequence
  Description of Artificial Sequence: Synthetic oligonucleotide
  Antisense strand to SEQ ID NO: 934444
uuacguacgugacucaguu

SEQ ID NO: 934446 - RNA, 19 nt, Artificial Sequence
  Description of Artificial Sequence: Synthetic oligonucleotide
  Sense strand starting at position 2183 of SEQ ID NO: 913530
uccaaugacuugucagcca

SEQ ID NO: 934447 - RNA, 19 nt, Artificial Sequence
  Description of Artificial Sequence: Synthetic oligonucleotide
  Antisense strand to SEQ ID NO: 934446
uggcugacaagucauugga

SEQ ID NO: 934448 - RNA, 19 nt, Artificial Sequence
  Description of Artificial Sequence: Synthetic oligonucleotide
  Sense strand starting at position 465 of SEQ ID NO: 913530
ucaucugcccggcaaauua

SEQ ID NO: 934449 - RNA, 19 nt, Artificial Sequence
  Description of Artificial Sequence: Synthetic oligonucleotide
  Antisense strand to SEQ ID NO: 934448
uaauuugccgggcagauga

SEQ ID NO: 934450 - RNA, 19 nt, Artificial Sequence
  Description of Artificial Sequence: Synthetic oligonucleotide
  Sense strand starting at position 3832 of SEQ ID NO: 913530
ccuacucauguuuacguua

SEQ ID NO: 934451 - RNA, 19 nt, Artificial Sequence
  Description of Artificial Sequence: Synthetic oligonucleotide
  Antisense strand to SEQ ID NO: 934450
uaacguaaacaugaguagg

SEQ ID NO: 934452 - RNA, 19 nt, Artificial Sequence
  Description of Artificial Sequence: Synthetic oligonucleotide
  Sense strand starting at position 3872 of SEQ ID NO: 913530
gcuccucaccuaggugaua

SEQ ID NO: 934453 - RNA, 19 nt, Artificial Sequence
  Description of Artificial Sequence: Synthetic oligonucleotide
  Antisense strand to SEQ ID NO: 934452
uaucaccuaggugaggagc

SEQ ID NO: 934454 - RNA, 19 nt, Artificial Sequence
  Description of Artificial Sequence: Synthetic oligonucleotide
  Sense strand starting at position 555 of SEQ ID NO: 913530
ugagacuggcccuguaagu

SEQ ID NO: 934455 - RNA, 19 nt, Artificial Sequence
  Description of Artificial Sequence: Synthetic oligonucleotide
  Antisense strand to SEQ ID NO: 934454
acuuacagggccagucuca

SEQ ID NO: 934456 - RNA, 19 nt, Artificial Sequence
  Description of Artificial Sequence: Synthetic oligonucleotide
  Sense strand starting at position 2482 of SEQ ID NO: 913530
cugguugaguccuucucca

SEQ ID NO: 934457 - RNA, 19 nt, Artificial Sequence
  Description of Artificial Sequence: Synthetic oligonucleotide
  Antisense strand to SEQ ID NO: 934456
uggagaaggacucaaccag

SEQ ID NO: 934458 - RNA, 19 nt, Artificial Sequence
  Description of Artificial Sequence: Synthetic oligonucleotide
  Sense strand starting at position 3837 of SEQ ID NO: 913530
ucauguuuacguuagucca

SEQ ID NO: 934459 - RNA, 19 nt, Artificial Sequence
  Description of Artificial Sequence: Synthetic oligonucleotide
  Antisense strand to SEQ ID NO: 934458
uggacuaacguaaacauga

SEQ ID NO: 934460 - RNA, 19 nt, Artificial Sequence
  Description of Artificial Sequence: Synthetic oligonucleotide
  Sense strand starting at position 2235 of SEQ ID NO: 913530
gaggucgguuucuuccuaa

SEQ ID NO: 934461 - RNA, 19 nt, Artificial Sequence
  Description of Artificial Sequence: Synthetic oligonucleotide
  Antisense strand to SEQ ID NO: 934460
uuaggaagaaaccgaccuc

SEQ ID NO: 934462 - RNA, 19 nt, Artificial Sequence
  Description of Artificial Sequence: Synthetic oligonucleotide
  Sense strand starting at position 2575 of SEQ ID NO: 913530
uggaaaugguccgcaugcu

SEQ ID NO: 934463 - RNA, 19 nt, Artificial Sequence
  Description of Artificial Sequence: Synthetic oligonucleotide
  Antisense strand to SEQ ID NO: 934462
agcaugcggaccauuucca

SEQ ID NO: 934464 - RNA, 19 nt, Artificial Sequence
  Description of Artificial Sequence: Synthetic oligonucleotide
  Sense strand starting at position 3683 of SEQ ID NO: 913530
gguuuaaauguaugcuugu

SEQ ID NO: 934465 - RNA, 19 nt, Artificial Sequence
  Description of Artificial Sequence: Synthetic oligonucleotide
  Antisense strand to SEQ ID NO: 934464
acaagcauacauuuaaacc

SEQ ID NO: 934466 - RNA, 19 nt, Artificial Sequence
  Description of Artificial Sequence: Synthetic oligonucleotide
  Sense strand starting at position 506 of SEQ ID NO: 913530
guacguaagccacaguguu

SEQ ID NO: 934467 - RNA, 19 nt, Artificial Sequence
  Description of Artificial Sequence: Synthetic oligonucleotide
  Antisense strand to SEQ ID NO: 934466
aacacuguggcuuacguac

SEQ ID NO: 934468 - RNA, 19 nt, Artificial Sequence
  Description of Artificial Sequence: Synthetic oligonucleotide
  Sense strand starting at position 463 of SEQ ID NO: 913530
ccucaucugcccggcaaau

SEQ ID NO: 934469 - RNA, 19 nt, Artificial Sequence
  Description of Artificial Sequence: Synthetic oligonucleotide
  Antisense strand to SEQ ID NO: 934468
auuugccgggcagaugagg

SEQ ID NO: 934470 - RNA, 19 nt, Artificial Sequence
  Description of Artificial Sequence: Synthetic oligonucleotide
  Sense strand starting at position 462 of SEQ ID NO: 913530
cccucaucugcccggcaaa

SEQ ID NO: 934471 - RNA, 19 nt, Artificial Sequence
  Description of Artificial Sequence: Synthetic oligonucleotide
  Antisense strand to SEQ ID NO: 934470
uuugccgggcagaugaggg

SEQ ID NO: 934472 - RNA, 19 nt, Artificial Sequence
  Description of Artificial Sequence: Synthetic oligonucleotide
  Sense strand starting at position 3684 of SEQ ID NO: 913530
guuuaaauguaugcuuguu

SEQ ID NO: 934473 - RNA, 19 nt, Artificial Sequence
  Description of Artificial Sequence: Synthetic oligonucleotide
  Antisense strand to SEQ ID NO: 934472
aacaagcauacauuuaaac

SEQ ID NO: 934474 - RNA, 19 nt, Artificial Sequence
  Description of Artificial Sequence: Synthetic oligonucleotide
  Sense strand starting at position 654 of SEQ ID NO: 913530
ucagguaucugauauacaa

SEQ ID NO: 934475 - RNA, 19 nt, Artificial Sequence
  Description of Artificial Sequence: Synthetic oligonucleotide
  Antisense strand to SEQ ID NO: 934474
uuguauaucagauaccuga

SEQ ID NO: 934476 - RNA, 19 nt, Artificial Sequence
  Description of Artificial Sequence: Synthetic oligonucleotide
  Sense strand starting at position 3608 of SEQ ID NO: 913531
aauuauccagaaggguuua

SEQ ID NO: 934477 - RNA, 19 nt, Artificial Sequence
  Description of Artificial Sequence: Synthetic oligonucleotide
  Antisense strand to SEQ ID NO: 934476
uaaacccuucuggauaauu

SEQ ID NO: 934478 - RNA, 19 nt, Artificial Sequence
  Description of Artificial Sequence: Synthetic oligonucleotide
  Sense strand starting at position 2701 of SEQ ID NO: 913531
auauuugauugugcugagu

SEQ ID NO: 934479 - RNA, 19 nt, Artificial Sequence
  Description of Artificial Sequence: Synthetic oligonucleotide
  Antisense strand to SEQ ID NO: 934478
acucagcacaaucaaauau

SEQ ID NO: 934480 - RNA, 19 nt, Artificial Sequence
  Description of Artificial Sequence: Synthetic oligonucleotide
  Sense strand starting at position 1713 of SEQ ID NO: 913531
guacuuauagcagacauca

SEQ ID NO: 934481 - RNA, 19 nt, Artificial Sequence
  Description of Artificial Sequence: Synthetic oligonucleotide
  Antisense strand to SEQ ID NO: 934480
ugaugucugcuauaaguac

SEQ ID NO: 934482 - RNA, 19 nt, Artificial Sequence
  Description of Artificial Sequence: Synthetic oligonucleotide
  Sense strand starting at position 3503 of SEQ ID NO: 913531
aaaggaucauuguuucuga

SEQ ID NO: 934483 - RNA, 19 nt, Artificial Sequence
  Description of Artificial Sequence: Synthetic oligonucleotide
  Antisense strand to SEQ ID NO: 934482
ucagaaacaaugauccuuu

SEQ ID NO: 934484 - RNA, 19 nt, Artificial Sequence
  Description of Artificial Sequence: Synthetic oligonucleotide
  Sense strand starting at position 2697 of SEQ ID NO: 913531
agucauauuugauugugcu

SEQ ID NO: 934485 - RNA, 19 nt, Artificial Sequence
  Description of Artificial Sequence: Synthetic oligonucleotide
  Antisense strand to SEQ ID NO: 934484
agcacaaucaaauaugacu

SEQ ID NO: 934486 - RNA, 19 nt, Artificial Sequence
  Description of Artificial Sequence: Synthetic oligonucleotide
  Sense strand starting at position 2698 of SEQ ID NO: 913531
gucauauuugauugugcug

SEQ ID NO: 934487 - RNA, 19 nt, Artificial Sequence
  Description of Artificial Sequence: Synthetic oligonucleotide
  Antisense strand to SEQ ID NO: 934486
cagcacaaucaaauaugac

SEQ ID NO: 934488 - RNA, 19 nt, Artificial Sequence
  Description of Artificial Sequence: Synthetic oligonucleotide
  Sense strand starting at position 2707 of SEQ ID NO: 913531
gauugugcugaguaagaca

SEQ ID NO: 934489 - RNA, 19 nt, Artificial Sequence
  Description of Artificial Sequence: Synthetic oligonucleotide
  Antisense strand to SEQ ID NO: 934488
ugucuuacucagcacaauc

SEQ ID NO: 934490 - RNA, 19 nt, Artificial Sequence
  Description of Artificial Sequence: Synthetic oligonucleotide
  Sense strand starting at position 3504 of SEQ ID NO: 913531
aaggaucauuguuucugau

SEQ ID NO: 934491 - RNA, 19 nt, Artificial Sequence
  Description of Artificial Sequence: Synthetic oligonucleotide
  Antisense strand to SEQ ID NO: 934490
aucagaaacaaugauccuu

SEQ ID NO: 934492 - RNA, 19 nt, Artificial Sequence
  Description of Artificial Sequence: Synthetic oligonucleotide
  Sense strand starting at position 3528 of SEQ ID NO: 913531
aaacguaaauggucaaauu

SEQ ID NO: 934493 - RNA, 19 nt, Artificial Sequence
  Description of Artificial Sequence: Synthetic oligonucleotide
  Antisense strand to SEQ ID NO: 934492
aauuugaccauuuacguuu

SEQ ID NO: 934494 - RNA, 19 nt, Artificial Sequence
  Description of Artificial Sequence: Synthetic oligonucleotide
  Sense strand starting at position 1706 of SEQ ID NO: 913531
ugugaagguacuuauagca

SEQ ID NO: 934495 - RNA, 19 nt, Artificial Sequence
  Description of Artificial Sequence: Synthetic oligonucleotide
  Antisense strand to SEQ ID NO: 934494
ugcuauaaguaccuucaca

SEQ ID NO: 934496 - RNA, 19 nt, Artificial Sequence
  Description of Artificial Sequence: Synthetic oligonucleotide
  Sense strand starting at position 2113 of SEQ ID NO: 913531
agcagacugcucuaucaac

SEQ ID NO: 934497 - RNA, 19 nt, Artificial Sequence
  Description of Artificial Sequence: Synthetic oligonucleotide
  Antisense strand to SEQ ID NO: 934496
guugauagagcagucugcu

SEQ ID NO: 934498 - RNA, 19 nt, Artificial Sequence
  Description of Artificial Sequence: Synthetic oligonucleotide
  Sense strand starting at position 3285 of SEQ ID NO: 913531
aagauaguguggcuaacaa

SEQ ID NO: 934499 - RNA, 19 nt, Artificial Sequence
  Description of Artificial Sequence: Synthetic oligonucleotide
  Antisense strand to SEQ ID NO: 934498
uuguuagccacacuaucuu

SEQ ID NO: 934500 - RNA, 19 nt, Artificial Sequence
  Description of Artificial Sequence: Synthetic oligonucleotide
  Sense strand starting at position 3506 of SEQ ID NO: 913531
ggaucauuguuucugauac

SEQ ID NO: 934501 - RNA, 19 nt, Artificial Sequence
  Description of Artificial Sequence: Synthetic oligonucleotide
  Antisense strand to SEQ ID NO: 934500
guaucagaaacaaugaucc

SEQ ID NO: 934502 - RNA, 19 nt, Artificial Sequence
  Description of Artificial Sequence: Synthetic oligonucleotide
  Sense strand starting at position 3692 of SEQ ID NO: 913531
agaacagugcccuagcuaa

SEQ ID NO: 934503 - RNA, 19 nt, Artificial Sequence
  Description of Artificial Sequence: Synthetic oligonucleotide
  Antisense strand to SEQ ID NO: 934502
uuagcuagggcacuguucu

SEQ ID NO: 934504 - RNA, 19 nt, Artificial Sequence
  Description of Artificial Sequence: Synthetic oligonucleotide
  Sense strand starting at position 3373 of SEQ ID NO: 913531
agccaaguaugauuauuau

SEQ ID NO: 934505 - RNA, 19 nt, Artificial Sequence
  Description of Artificial Sequence: Synthetic oligonucleotide
  Antisense strand to SEQ ID NO: 934504
auaauaaucauacuuggcu

SEQ ID NO: 934506 - RNA, 19 nt, Artificial Sequence
  Description of Artificial Sequence: Synthetic oligonucleotide
  Sense strand starting at position 2772 of SEQ ID NO: 913531
gugacuuccuucccaugaa

SEQ ID NO: 934507 - RNA, 19 nt, Artificial Sequence
  Description of Artificial Sequence: Synthetic oligonucleotide
  Antisense strand to SEQ ID NO: 934506
uucaugggaaggaagucac

SEQ ID NO: 934508 - RNA, 19 nt, Artificial Sequence
  Description of Artificial Sequence: Synthetic oligonucleotide
  Sense strand starting at position 2704 of SEQ ID NO: 913531
uuugauugugcugaguaag

SEQ ID NO: 934509 - RNA, 19 nt, Artificial Sequence
  Description of Artificial Sequence: Synthetic oligonucleotide
  Antisense strand to SEQ ID NO: 934508
cuuacucagcacaaucaaa

SEQ ID NO: 934510 - RNA, 19 nt, Artificial Sequence
  Description of Artificial Sequence: Synthetic oligonucleotide
  Sense strand starting at position 3723 of SEQ ID NO: 913531
cuagcuaaucuguacagua

SEQ ID NO: 934511 - RNA, 19 nt, Artificial Sequence
  Description of Artificial Sequence: Synthetic oligonucleotide
  Antisense strand to SEQ ID NO: 934510
uacuguacagauuagcuag

SEQ ID NO: 934512 - RNA, 19 nt, Artificial Sequence
  Description of Artificial Sequence: Synthetic oligonucleotide
  Sense strand starting at position 3676 of SEQ ID NO: 913531
gguucuuuauccuuugaga

SEQ ID NO: 934513 - RNA, 19 nt, Artificial Sequence
  Description of Artificial Sequence: Synthetic oligonucleotide
  Antisense strand to SEQ ID NO: 934512
ucucaaaggauaaagaacc

SEQ ID NO: 934514 - RNA, 19 nt, Artificial Sequence
  Description of Artificial Sequence: Synthetic oligonucleotide
  Sense strand starting at position 3526 of SEQ ID NO: 913531
guaaacguaaauggucaaa

SEQ ID NO: 934515 - RNA, 19 nt, Artificial Sequence
  Description of Artificial Sequence: Synthetic oligonucleotide
  Antisense strand to SEQ ID NO: 934514
uuugaccauuuacguuuac

SEQ ID NO: 934516 - RNA, 19 nt, Artificial Sequence
  Description of Artificial Sequence: Synthetic oligonucleotide
  Sense strand starting at position 714 of SEQ ID NO: 913531
acugguuugccauauguaa

SEQ ID NO: 934517 - RNA, 19 nt, Artificial Sequence
  Description of Artificial Sequence: Synthetic oligonucleotide
  Antisense strand to SEQ ID NO: 934516
uuacauauggcaaaccagu

SEQ ID NO: 934518 - RNA, 19 nt, Artificial Sequence
  Description of Artificial Sequence: Synthetic oligonucleotide
  Sense strand starting at position 3909 of SEQ ID NO: 913531
ucucguauuugguuucagu

SEQ ID NO: 934519 - RNA, 19 nt, Artificial Sequence
  Description of Artificial Sequence: Synthetic oligonucleotide
  Antisense strand to SEQ ID NO: 934518
acugaaaccaaauacgaga

SEQ ID NO: 934520 - RNA, 19 nt, Artificial Sequence
  Description of Artificial Sequence: Synthetic oligonucleotide
  Sense strand starting at position 2758 of SEQ ID NO: 913531
uucgguuaucuugagugac

SEQ ID NO: 934521 - RNA, 19 nt, Artificial Sequence
  Description of Artificial Sequence: Synthetic oligonucleotide
  Antisense strand to SEQ ID NO: 934520
gucacucaagauaaccgaa

SEQ ID NO: 934522 - RNA, 19 nt, Artificial Sequence
  Description of Artificial Sequence: Synthetic oligonucleotide
  Sense strand starting at position 2111 of SEQ ID NO: 913531
auagcagacugcucuauca

SEQ ID NO: 934523 - RNA, 19 nt, Artificial Sequence
  Description of Artificial Sequence: Synthetic oligonucleotide
  Antisense strand to SEQ ID NO: 934522
ugauagagcagucugcuau

SEQ ID NO: 934524 - RNA, 19 nt, Artificial Sequence
  Description of Artificial Sequence: Synthetic oligonucleotide
  Sense strand starting at position 2761 of SEQ ID NO: 913531
gguuaucuugagugacuuc

SEQ ID NO: 934525 - RNA, 19 nt, Artificial Sequence
  Description of Artificial Sequence: Synthetic oligonucleotide
  Antisense strand to SEQ ID NO: 934524
gaagucacucaagauaacc

SEQ ID NO: 934526 - RNA, 19 nt, Artificial Sequence
  Description of Artificial Sequence: Synthetic oligonucleotide
  Sense strand starting at position 2844 of SEQ ID NO: 913531
gguucaguggcacaauguu

SEQ ID NO: 934527 - RNA, 19 nt, Artificial Sequence
  Description of Artificial Sequence: Synthetic oligonucleotide
  Antisense strand to SEQ ID NO: 934526
aacauugugccacugaacc

SEQ ID NO: 934528 - RNA, 19 nt, Artificial Sequence
  Description of Artificial Sequence: Synthetic oligonucleotide
  Sense strand starting at position 2760 of SEQ ID NO: 913531
cgguuaucuugagugacuu

SEQ ID NO: 934529 - RNA, 19 nt, Artificial Sequence
  Description of Artificial Sequence: Synthetic oligonucleotide
  Antisense strand to SEQ ID NO: 934528
aagucacucaagauaaccg

SEQ ID NO: 934530 - RNA, 19 nt, Artificial Sequence
  Description of Artificial Sequence: Synthetic oligonucleotide
  Sense strand starting at position 3851 of SEQ ID NO: 913531
acaugaccuuuauagaagu

SEQ ID NO: 934531 - RNA, 19 nt, Artificial Sequence
  Description of Artificial Sequence: Synthetic oligonucleotide
  Antisense strand to SEQ ID NO: 934530
acuucuauaaaggucaugu

SEQ ID NO: 934532 - RNA, 19 nt, Artificial Sequence
  Description of Artificial Sequence: Synthetic oligonucleotide
  Sense strand starting at position 3733 of SEQ ID NO: 913531
uguacaguaucuuggauuu

SEQ ID NO: 934533 - RNA, 19 nt, Artificial Sequence
  Description of Artificial Sequence: Synthetic oligonucleotide
  Antisense strand to SEQ ID NO: 934532
aaauccaagauacuguaca

SEQ ID NO: 934534 - RNA, 19 nt, Artificial Sequence
  Description of Artificial Sequence: Synthetic oligonucleotide
  Sense strand starting at position 3912 of SEQ ID NO: 913531
cguauuugguuucaguaag

SEQ ID NO: 934535 - RNA, 19 nt, Artificial Sequence
  Description of Artificial Sequence: Synthetic oligonucleotide
  Antisense strand to SEQ ID NO: 934534
cuuacugaaaccaaauacg

SEQ ID NO: 934536 - RNA, 19 nt, Artificial Sequence
  Description of Artificial Sequence: Synthetic oligonucleotide
  Sense strand starting at position 2703 of SEQ ID NO: 913531
auuugauugugcugaguaa

SEQ ID NO: 934537 - RNA, 19 nt, Artificial Sequence
  Description of Artificial Sequence: Synthetic oligonucleotide
  Antisense strand to SEQ ID NO: 934536
uuacucagcacaaucaaau

SEQ ID NO: 934538 - RNA, 19 nt, Artificial Sequence
  Description of Artificial Sequence: Synthetic oligonucleotide
  Sense strand starting at position 3900 of SEQ ID NO: 913531
gaaagccaaucucguauuu

SEQ ID NO: 934539 - RNA, 19 nt, Artificial Sequence
  Description of Artificial Sequence: Synthetic oligonucleotide
  Antisense strand to SEQ ID NO: 934538
aaauacgagauuggcuuuc

SEQ ID NO: 934540 - RNA, 19 nt, Artificial Sequence
  Description of Artificial Sequence: Synthetic oligonucleotide
  Sense strand starting at position 3426 of SEQ ID NO: 913531
uguuguuguugccuccaau

SEQ ID NO: 934541 - RNA, 19 nt, Artificial Sequence
  Description of Artificial Sequence: Synthetic oligonucleotide
  Antisense strand to SEQ ID NO: 934540
auuggaggcaacaacaaca

SEQ ID NO: 934542 - RNA, 19 nt, Artificial Sequence
  Description of Artificial Sequence: Synthetic oligonucleotide
  Sense strand starting at position 3681 of SEQ ID NO: 913531
uuuauccuuugagaacagu

SEQ ID NO: 934543 - RNA, 19 nt, Artificial Sequence
  Description of Artificial Sequence: Synthetic oligonucleotide
  Antisense strand to SEQ ID NO: 934542
acuguucucaaaggauaaa

SEQ ID NO: 934544 - RNA, 19 nt, Artificial Sequence
  Description of Artificial Sequence: Synthetic oligonucleotide
  Sense strand starting at position 1711 of SEQ ID NO: 913531
agguacuuauagcagacau

SEQ ID NO: 934545 - RNA, 19 nt, Artificial Sequence
  Description of Artificial Sequence: Synthetic oligonucleotide
  Antisense strand to SEQ ID NO: 934544
augucugcuauaaguaccu

SEQ ID NO: 934546 - RNA, 19 nt, Artificial Sequence
  Description of Artificial Sequence: Synthetic oligonucleotide
  Sense strand starting at position 2019 of SEQ ID NO: 913531
gguuuaugaugucauagua

SEQ ID NO: 934547 - RNA, 19 nt, Artificial Sequence
  Description of Artificial Sequence: Synthetic oligonucleotide
  Antisense strand to SEQ ID NO: 934546
uacuaugacaucauaaacc

SEQ ID NO: 934548 - RNA, 19 nt, Artificial Sequence
  Description of Artificial Sequence: Synthetic oligonucleotide
  Sense strand starting at position 3513 of SEQ ID NO: 913531
uguuucugauacuguaaac

SEQ ID NO: 934549 - RNA, 19 nt, Artificial Sequence
  Description of Artificial Sequence: Synthetic oligonucleotide
  Antisense strand to SEQ ID NO: 934548
guuuacaguaucagaaaca

SEQ ID NO: 934550 - RNA, 19 nt, Artificial Sequence
  Description of Artificial Sequence: Synthetic oligonucleotide
  Sense strand starting at position 2112 of SEQ ID NO: 913532
gauagaacuuaacuauggu

SEQ ID NO: 934551 - RNA, 19 nt, Artificial Sequence
  Description of Artificial Sequence: Synthetic oligonucleotide
  Antisense strand to SEQ ID NO: 934550
accauaguuaaguucuauc

SEQ ID NO: 934552 - RNA, 19 nt, Artificial Sequence
  Description of Artificial Sequence: Synthetic oligonucleotide
  Sense strand starting at position 317 of SEQ ID NO: 913532
cuuacacuucugggaaaca

SEQ ID NO: 934553 - RNA, 19 nt, Artificial Sequence
  Description of Artificial Sequence: Synthetic oligonucleotide
  Antisense strand to SEQ ID NO: 934552
uguuucccagaaguguaag

SEQ ID NO: 934554 - RNA, 19 nt, Artificial Sequence
  Description of Artificial Sequence: Synthetic oligonucleotide
  Sense strand starting at position 3174 of SEQ ID NO: 913532
aagagaaccuagguguuga

SEQ ID NO: 934555 - RNA, 19 nt, Artificial Sequence
  Description of Artificial Sequence: Synthetic oligonucleotide
  Antisense strand to SEQ ID NO: 934554
ucaacaccuagguucucuu

SEQ ID NO: 934556 - RNA, 19 nt, Artificial Sequence
  Description of Artificial Sequence: Synthetic oligonucleotide
  Sense strand starting at position 1637 of SEQ ID NO: 913532
cugaauuacucccuggaca

SEQ ID NO: 934557 - RNA, 19 nt, Artificial Sequence
  Description of Artificial Sequence: Synthetic oligonucleotide
  Antisense strand to SEQ ID NO: 934556
uguccagggaguaauucag

SEQ ID NO: 934558 - RNA, 19 nt, Artificial Sequence
  Description of Artificial Sequence: Synthetic oligonucleotide
  Sense strand starting at position 2848 of SEQ ID NO: 913532
agcauaauugcagaaacuu

SEQ ID NO: 934559 - RNA, 19 nt, Artificial Sequence
  Description of Artificial Sequence: Synthetic oligonucleotide
  Antisense strand to SEQ ID NO: 934558
aaguuucugcaauuaugcu

SEQ ID NO: 934560 - RNA, 19 nt, Artificial Sequence
  Description of Artificial Sequence: Synthetic oligonucleotide
  Sense strand starting at position 2588 of SEQ ID NO: 913532
gugucucugacccagagaa

SEQ ID NO: 934561 - RNA, 19 nt, Artificial Sequence
  Description of Artificial Sequence: Synthetic oligonucleotide
  Antisense strand to SEQ ID NO: 934560
uucucugggucagagacac

SEQ ID NO: 934562 - RNA, 19 nt, Artificial Sequence
  Description of Artificial Sequence: Synthetic oligonucleotide
  Sense strand starting at position 2448 of SEQ ID NO: 913532
gacauaugauauucuagug

SEQ ID NO: 934563 - RNA, 19 nt, Artificial Sequence
  Description of Artificial Sequence: Synthetic oligonucleotide
  Antisense strand to SEQ ID NO: 934562
cacuagaauaucauauguc

SEQ ID NO: 934564 - RNA, 19 nt, Artificial Sequence
  Description of Artificial Sequence: Synthetic oligonucleotide
  Sense strand starting at position 1638 of SEQ ID NO: 913532
ugaauuacucccuggacau

SEQ ID NO: 934565 - RNA, 19 nt, Artificial Sequence
  Description of Artificial Sequence: Synthetic oligonucleotide
  Antisense strand to SEQ ID NO: 934564
auguccagggaguaauuca

SEQ ID NO: 934566 - RNA, 19 nt, Artificial Sequence
  Description of Artificial Sequence: Synthetic oligonucleotide
  Sense strand starting at position 2688 of SEQ ID NO: 913532
acuuaacuuugggcagaga

SEQ ID NO: 934567 - RNA, 19 nt, Artificial Sequence
  Description of Artificial Sequence: Synthetic oligonucleotide
  Antisense strand to SEQ ID NO: 934566
ucucugcccaaaguuaagu

SEQ ID NO: 934568 - RNA, 19 nt, Artificial Sequence
  Description of Artificial Sequence: Synthetic oligonucleotide
  Sense strand starting at position 1757 of SEQ ID NO: 913532
aggauuaaagcuggaccuu

SEQ ID NO: 934569 - RNA, 19 nt, Artificial Sequence
  Description of Artificial Sequence: Synthetic oligonucleotide
  Antisense strand to SEQ ID NO: 934568
aagguccagcuuuaauccu

SEQ ID NO: 934570 - RNA, 19 nt, Artificial Sequence
  Description of Artificial Sequence: Synthetic oligonucleotide
  Sense strand starting at position 2926 of SEQ ID NO: 913532
gaaauaagucaccaguguc

SEQ ID NO: 934571 - RNA, 19 nt, Artificial Sequence
  Description of Artificial Sequence: Synthetic oligonucleotide
  Antisense strand to SEQ ID NO: 934570
gacacuggugacuuauuuc

SEQ ID NO: 934572 - RNA, 19 nt, Artificial Sequence
  Description of Artificial Sequence: Synthetic oligonucleotide
  Sense strand starting at position 170 of SEQ ID NO: 913532
aguagaaauauguggaccu

SEQ ID NO: 934573 - RNA, 19 nt, Artificial Sequence
  Description of Artificial Sequence: Synthetic oligonucleotide
  Antisense strand to SEQ ID NO: 934572
agguccacauauuucuacu

SEQ ID NO: 934574 - RNA, 19 nt, Artificial Sequence
  Description of Artificial Sequence: Synthetic oligonucleotide
  Sense strand starting at position 1592 of SEQ ID NO: 913532
aacgguguguauuucugau

SEQ ID NO: 934575 - RNA, 19 nt, Artificial Sequence
  Description of Artificial Sequence: Synthetic oligonucleotide
  Antisense strand to SEQ ID NO: 934574
aucagaaauacacaccguu

SEQ ID NO: 934576 - RNA, 19 nt, Artificial Sequence
  Description of Artificial Sequence: Synthetic oligonucleotide
  Sense strand starting at position 732 of SEQ ID NO: 913532
guuuaaucgagagggauac

SEQ ID NO: 934577 - RNA, 19 nt, Artificial Sequence
  Description of Artificial Sequence: Synthetic oligonucleotide
  Antisense strand to SEQ ID NO: 934576
guaucccucucgauuaaac

SEQ ID NO: 934578 - RNA, 19 nt, Artificial Sequence
  Description of Artificial Sequence: Synthetic oligonucleotide
  Sense strand starting at position 1587 of SEQ ID NO: 913532
accugaacgguguguauuu

SEQ ID NO: 934579 - RNA, 19 nt, Artificial Sequence
  Description of Artificial Sequence: Synthetic oligonucleotide
  Antisense strand to SEQ ID NO: 934578
aaauacacaccguucaggu

SEQ ID NO: 934580 - RNA, 19 nt, Artificial Sequence
  Description of Artificial Sequence: Synthetic oligonucleotide
  Sense strand starting at position 2491 of SEQ ID NO: 913532
uugucucuagacugauaaa

SEQ ID NO: 934581 - RNA, 19 nt, Artificial Sequence
  Description of Artificial Sequence: Synthetic oligonucleotide
  Antisense strand to SEQ ID NO: 934580
uuuaucagucuagagacaa

SEQ ID NO: 934582 - RNA, 19 nt, Artificial Sequence
  Description of Artificial Sequence: Synthetic oligonucleotide
  Sense strand starting at position 1594 of SEQ ID NO: 913532
cgguguguauuucugauga

SEQ ID NO: 934583 - RNA, 19 nt, Artificial Sequence
  Description of Artificial Sequence: Synthetic oligonucleotide
  Antisense strand to SEQ ID NO: 934582
ucaucagaaauacacaccg

SEQ ID NO: 934584 - RNA, 19 nt, Artificial Sequence
  Description of Artificial Sequence: Synthetic oligonucleotide
  Sense strand starting at position 3349 of SEQ ID NO: 913532
aagugagggcuuuauguag

SEQ ID NO: 934585 - RNA, 19 nt, Artificial Sequence
  Description of Artificial Sequence: Synthetic oligonucleotide
  Antisense strand to SEQ ID NO: 934584
cuacauaaagcccucacuu

SEQ ID NO: 934586 - RNA, 19 nt, Artificial Sequence
  Description of Artificial Sequence: Synthetic oligonucleotide
  Sense strand starting at position 2061 of SEQ ID NO: 913532
uuucuuaggccagaguaua

SEQ ID NO: 934587 - RNA, 19 nt, Artificial Sequence
  Description of Artificial Sequence: Synthetic oligonucleotide
  Antisense strand to SEQ ID NO: 934586
uauacucuggccuaagaaa

SEQ ID NO: 934588 - RNA, 19 nt, Artificial Sequence
  Description of Artificial Sequence: Synthetic oligonucleotide
  Sense strand starting at position 3485 of SEQ ID NO: 913532
cccagaguauuaucaucua

SEQ ID NO: 934589 - RNA, 19 nt, Artificial Sequence
  Description of Artificial Sequence: Synthetic oligonucleotide
  Antisense strand to SEQ ID NO: 934588
uagaugauaauacucuggg

SEQ ID NO: 934590 - RNA, 19 nt, Artificial Sequence
  Description of Artificial Sequence: Synthetic oligonucleotide
  Sense strand starting at position 1673 of SEQ ID NO: 913532
agguaacugcacuagaguu

SEQ ID NO: 934591 - RNA, 19 nt, Artificial Sequence
  Description of Artificial Sequence: Synthetic oligonucleotide
  Antisense strand to SEQ ID NO: 934590
aacucuagugcaguuaccu

SEQ ID NO: 934592 - RNA, 19 nt, Artificial Sequence
  Description of Artificial Sequence: Synthetic oligonucleotide
  Sense strand starting at position 3368 of SEQ ID NO: 913532
augccagagcuugagugaa

SEQ ID NO: 934593 - RNA, 19 nt, Artificial Sequence
  Description of Artificial Sequence: Synthetic oligonucleotide
  Antisense strand to SEQ ID NO: 934592
uucacucaagcucuggcau

SEQ ID NO: 934594 - RNA, 19 nt, Artificial Sequence
  Description of Artificial Sequence: Synthetic oligonucleotide
  Sense strand starting at position 2925 of SEQ ID NO: 913532
ggaaauaagucaccagugu

SEQ ID NO: 934595 - RNA, 19 nt, Artificial Sequence
  Description of Artificial Sequence: Synthetic oligonucleotide
  Antisense strand to SEQ ID NO: 934594
acacuggugacuuauuucc

SEQ ID NO: 934596 - RNA, 19 nt, Artificial Sequence
  Description of Artificial Sequence: Synthetic oligonucleotide
  Sense strand starting at position 2059 of SEQ ID NO: 913532
ccuuucuuaggccagagua

SEQ ID NO: 934597 - RNA, 19 nt, Artificial Sequence
  Description of Artificial Sequence: Synthetic oligonucleotide
  Antisense strand to SEQ ID NO: 934596
uacucuggccuaagaaagg

SEQ ID NO: 934598 - RNA, 19 nt, Artificial Sequence
  Description of Artificial Sequence: Synthetic oligonucleotide
  Sense strand starting at position 2823 of SEQ ID NO: 913532
aguaaacaacucuguccua

SEQ ID NO: 934599 - RNA, 19 nt, Artificial Sequence
  Description of Artificial Sequence: Synthetic oligonucleotide
  Antisense strand to SEQ ID NO: 934598
uaggacagaguuguuuacu

SEQ ID NO: 934600 - RNA, 19 nt, Artificial Sequence
  Description of Artificial Sequence: Synthetic oligonucleotide
  Sense strand starting at position 3488 of SEQ ID NO: 913532
agaguauuaucaucuaguu

SEQ ID NO: 934601 - RNA, 19 nt, Artificial Sequence
  Description of Artificial Sequence: Synthetic oligonucleotide
  Antisense strand to SEQ ID NO: 934600
aacuagaugauaauacucu

SEQ ID NO: 934602 - RNA, 19 nt, Artificial Sequence
  Description of Artificial Sequence: Synthetic oligonucleotide
  Sense strand starting at position 92 of SEQ ID NO: 913532
ugagaauucugucucuauu

SEQ ID NO: 934603 - RNA, 19 nt, Artificial Sequence
  Description of Artificial Sequence: Synthetic oligonucleotide
  Antisense strand to SEQ ID NO: 934602
aauagagacagaauucuca

SEQ ID NO: 934604 - RNA, 19 nt, Artificial Sequence
  Description of Artificial Sequence: Synthetic oligonucleotide
  Sense strand starting at position 3773 of SEQ ID NO: 913532
ucaguagagggcugguaaa

SEQ ID NO: 934605 - RNA, 19 nt, Artificial Sequence
  Description of Artificial Sequence: Synthetic oligonucleotide
  Antisense strand to SEQ ID NO: 934604
uuuaccagcccucuacuga

SEQ ID NO: 934606 - RNA, 19 nt, Artificial Sequence
  Description of Artificial Sequence: Synthetic oligonucleotide
  Sense strand starting at position 3966 of SEQ ID NO: 913532
cugguuauauauguugaua

SEQ ID NO: 934607 - RNA, 19 nt, Artificial Sequence
  Description of Artificial Sequence: Synthetic oligonucleotide
  Antisense strand to SEQ ID NO: 934606
uaucaacauauauaaccag

SEQ ID NO: 934608 - RNA, 19 nt, Artificial Sequence
  Description of Artificial Sequence: Synthetic oligonucleotide
  Sense strand starting at position 3614 of SEQ ID NO: 913532
ggcaacucuguaugaauua

SEQ ID NO: 934609 - RNA, 19 nt, Artificial Sequence
  Description of Artificial Sequence: Synthetic oligonucleotide
  Antisense strand to SEQ ID NO: 934608
uaauucauacagaguugcc

SEQ ID NO: 934610 - RNA, 19 nt, Artificial Sequence
  Description of Artificial Sequence: Synthetic oligonucleotide
  Sense strand starting at position 2824 of SEQ ID NO: 913532
guaaacaacucuguccuau

SEQ ID NO: 934611 - RNA, 19 nt, Artificial Sequence
  Description of Artificial Sequence: Synthetic oligonucleotide
  Antisense strand to SEQ ID NO: 934610
auaggacagaguuguuuac

SEQ ID NO: 934612 - RNA, 19 nt, Artificial Sequence
  Description of Artificial Sequence: Synthetic oligonucleotide
  Sense strand starting at position 3958 of SEQ ID NO: 913532
gcacaccacugguuauaua

SEQ ID NO: 934613 - RNA, 19 nt, Artificial Sequence
  Description of Artificial Sequence: Synthetic oligonucleotide
  Antisense strand to SEQ ID NO: 934612
uauauaaccaguggugugc

SEQ ID NO: 934614 - RNA, 19 nt, Artificial Sequence
  Description of Artificial Sequence: Synthetic oligonucleotide
  Sense strand starting at position 1404 of SEQ ID NO: 913532
agugaaaccuacguaccua

SEQ ID NO: 934615 - RNA, 19 nt, Artificial Sequence
  Description of Artificial Sequence: Synthetic oligonucleotide
  Antisense strand to SEQ ID NO: 934614
uagguacguagguuucacu

SEQ ID NO: 934616 - RNA, 19 nt, Artificial Sequence
  Description of Artificial Sequence: Synthetic oligonucleotide
  Sense strand starting at position 3344 of SEQ ID NO: 913532
acaguaagugagggcuuua

SEQ ID NO: 934617 - RNA, 19 nt, Artificial Sequence
  Description of Artificial Sequence: Synthetic oligonucleotide
  Antisense strand to SEQ ID NO: 934616
uaaagcccucacuuacugu

SEQ ID NO: 934618 - RNA, 19 nt, Artificial Sequence
  Description of Artificial Sequence: Synthetic oligonucleotide
  Sense strand starting at position 3849 of SEQ ID NO: 913532
ugauguaaguacuccuacu

SEQ ID NO: 934619 - RNA, 19 nt, Artificial Sequence
  Description of Artificial Sequence: Synthetic oligonucleotide
  Antisense strand to SEQ ID NO: 934618
aguaggaguacuuacauca

SEQ ID NO: 934620 - RNA, 19 nt, Artificial Sequence
  Description of Artificial Sequence: Synthetic oligonucleotide
  Sense strand starting at position 3355 of SEQ ID NO: 913532
gggcuuuauguagaugcca

SEQ ID NO: 934621 - RNA, 19 nt, Artificial Sequence
  Description of Artificial Sequence: Synthetic oligonucleotide
  Antisense strand to SEQ ID NO: 934620
uggcaucuacauaaagccc

SEQ ID NO: 934622 - RNA, 19 nt, Artificial Sequence
  Description of Artificial Sequence: Synthetic oligonucleotide
  Sense strand starting at position 2989 of SEQ ID NO: 913532
caaggaagacuuugugugu

SEQ ID NO: 934623 - RNA, 19 nt, Artificial Sequence
  Description of Artificial Sequence: Synthetic oligonucleotide
  Antisense strand to SEQ ID NO: 934622
acacacaaagucuuccuug

SEQ ID NO: 934624 - RNA, 19 nt, Artificial Sequence
  Description of Artificial Sequence: Synthetic oligonucleotide
  Sense strand starting at position 1659 of SEQ ID NO: 913532
auaguuuggcccgaaggua

SEQ ID NO: 934625 - RNA, 19 nt, Artificial Sequence
  Description of Artificial Sequence: Synthetic oligonucleotide
  Antisense strand to SEQ ID NO: 934624
uaccuucgggccaaacuau

SEQ ID NO: 934626 - RNA, 19 nt, Artificial Sequence
  Description of Artificial Sequence: Synthetic oligonucleotide
  Sense strand starting at position 626 of SEQ ID NO: 913532
auuuacaucuauugaugga

SEQ ID NO: 934627 - RNA, 19 nt, Artificial Sequence
  Description of Artificial Sequence: Synthetic oligonucleotide
  Antisense strand to SEQ ID NO: 934626
uccaucaauagauguaaau

SEQ ID NO: 934628 - RNA, 19 nt, Artificial Sequence
  Description of Artificial Sequence: Synthetic oligonucleotide
  Sense strand starting at position 2835 of SEQ ID NO: 913532
uguccuauaggcuagcaua

SEQ ID NO: 934629 - RNA, 19 nt, Artificial Sequence
  Description of Artificial Sequence: Synthetic oligonucleotide
  Antisense strand to SEQ ID NO: 934628
uaugcuagccuauaggaca

SEQ ID NO: 934630 - RNA, 19 nt, Artificial Sequence
  Description of Artificial Sequence: Synthetic oligonucleotide
  Sense strand starting at position 633 of SEQ ID NO: 913533
auuaacuucgaagagcuaa

SEQ ID NO: 934631 - RNA, 19 nt, Artificial Sequence
  Description of Artificial Sequence: Synthetic oligonucleotide
  Antisense strand to SEQ ID NO: 934630
uuagcucuucgaaguuaau

SEQ ID NO: 934632 - RNA, 19 nt, Artificial Sequence
  Description of Artificial Sequence: Synthetic oligonucleotide
  Sense strand starting at position 3473 of SEQ ID NO: 913533
guaauucuccaggauaccu

SEQ ID NO: 934633 - RNA, 19 nt, Artificial Sequence
  Description of Artificial Sequence: Synthetic oligonucleotide
  Antisense strand to SEQ ID NO: 934632
agguauccuggagaauuac

SEQ ID NO: 934634 - RNA, 19 nt, Artificial Sequence
  Description of Artificial Sequence: Synthetic oligonucleotide
  Sense strand starting at position 1837 of SEQ ID NO: 913533
ucagauguuccugaauacu

SEQ ID NO: 934635 - RNA, 19 nt, Artificial Sequence
  Description of Artificial Sequence: Synthetic oligonucleotide
  Antisense strand to SEQ ID NO: 934634
aguauucaggaacaucuga

SEQ ID NO: 934636 - RNA, 19 nt, Artificial Sequence
  Description of Artificial Sequence: Synthetic oligonucleotide
  Sense strand starting at position 3343 of SEQ ID NO: 913533
accuuaugucaaugaaagg

SEQ ID NO: 934637 - RNA, 19 nt, Artificial Sequence
  Description of Artificial Sequence: Synthetic oligonucleotide
  Antisense strand to SEQ ID NO: 934636
ccuuucauugacauaaggu

SEQ ID NO: 934638 - RNA, 19 nt, Artificial Sequence
  Description of Artificial Sequence: Synthetic oligonucleotide
  Sense strand starting at position 341 of SEQ ID NO: 913533
augaaaggcuugguaaaga

SEQ ID NO: 934639 - RNA, 19 nt, Artificial Sequence
  Description of Artificial Sequence: Synthetic oligonucleotide
  Antisense strand to SEQ ID NO: 934638
ucuuuaccaagccuuucau

SEQ ID NO: 934640 - RNA, 19 nt, Artificial Sequence
  Description of Artificial Sequence: Synthetic oligonucleotide
  Sense strand starting at position 742 of SEQ ID NO: 913533
acacaaagguuauuaguaa

SEQ ID NO: 934641 - RNA, 19 nt, Artificial Sequence
  Description of Artificial Sequence: Synthetic oligonucleotide
  Antisense strand to SEQ ID NO: 934640
uuacuaauaaccuuugugu

SEQ ID NO: 934642 - RNA, 19 nt, Artificial Sequence
  Description of Artificial Sequence: Synthetic oligonucleotide
  Sense strand starting at position 339 of SEQ ID NO: 913533
gaaugaaaggcuugguaaa

SEQ ID NO: 934643 - RNA, 19 nt, Artificial Sequence
  Description of Artificial Sequence: Synthetic oligonucleotide
  Antisense strand to SEQ ID NO: 934642
uuuaccaagccuuucauuc

SEQ ID NO: 934644 - RNA, 19 nt, Artificial Sequence
  Description of Artificial Sequence: Synthetic oligonucleotide
  Sense strand starting at position 340 of SEQ ID NO: 913533
aaugaaaggcuugguaaag

SEQ ID NO: 934645 - RNA, 19 nt, Artificial Sequence
  Description of Artificial Sequence: Synthetic oligonucleotide
  Antisense strand to SEQ ID NO: 934644
cuuuaccaagccuuucauu

SEQ ID NO: 934646 - RNA, 19 nt, Artificial Sequence
  Description of Artificial Sequence: Synthetic oligonucleotide
  Sense strand starting at position 3729 of SEQ ID NO: 913533
caauaaauauuggugugaa

SEQ ID NO: 934647 - RNA, 19 nt, Artificial Sequence
  Description of Artificial Sequence: Synthetic oligonucleotide
  Antisense strand to SEQ ID NO: 934646
uucacaccaauauuuauug

SEQ ID NO: 934648 - RNA, 19 nt, Artificial Sequence
  Description of Artificial Sequence: Synthetic oligonucleotide
  Sense strand starting at position 3524 of SEQ ID NO: 913533
gauaucuuggcugaguaag

SEQ ID NO: 934649 - RNA, 19 nt, Artificial Sequence
  Description of Artificial Sequence: Synthetic oligonucleotide
  Antisense strand to SEQ ID NO: 934648
cuuacucagccaagauauc

SEQ ID NO: 934650 - RNA, 19 nt, Artificial Sequence
  Description of Artificial Sequence: Synthetic oligonucleotide
  Sense strand starting at position 3395 of SEQ ID NO: 913533
aucaucuuccaguaaaggu

SEQ ID NO: 934651 - RNA, 19 nt, Artificial Sequence
  Description of Artificial Sequence: Synthetic oligonucleotide
  Antisense strand to SEQ ID NO: 934650
accuuuacuggaagaugau

SEQ ID NO: 934652 - RNA, 19 nt, Artificial Sequence
  Description of Artificial Sequence: Synthetic oligonucleotide
  Sense strand starting at position 539 of SEQ ID NO: 913533
auaguuccucaagacaguu

SEQ ID NO: 934653 - RNA, 19 nt, Artificial Sequence
  Description of Artificial Sequence: Synthetic oligonucleotide
  Antisense strand to SEQ ID NO: 934652
aacugucuugaggaacuau

SEQ ID NO: 934654 - RNA, 19 nt, Artificial Sequence
  Description of Artificial Sequence: Synthetic oligonucleotide
  Sense strand starting at position 1485 of SEQ ID NO: 913533
ucagaacaugaacgguaua

SEQ ID NO: 934655 - RNA, 19 nt, Artificial Sequence
  Description of Artificial Sequence: Synthetic oligonucleotide
  Antisense strand to SEQ ID NO: 934654
uauaccguucauguucuga

SEQ ID NO: 934656 - RNA, 19 nt, Artificial Sequence
  Description of Artificial Sequence: Synthetic oligonucleotide
  Sense strand starting at position 3902 of SEQ ID NO: 913533
uugguaaaugcuuacugaa

SEQ ID NO: 934657 - RNA, 19 nt, Artificial Sequence
  Description of Artificial Sequence: Synthetic oligonucleotide
  Antisense strand to SEQ ID NO: 934656
uucaguaagcauuuaccaa

SEQ ID NO: 934658 - RNA, 19 nt, Artificial Sequence
  Description of Artificial Sequence: Synthetic oligonucleotide
  Sense strand starting at position 304 of SEQ ID NO: 913533
gagucuuaugcuuagacaa

SEQ ID NO: 934659 - RNA, 19 nt, Artificial Sequence
  Description of Artificial Sequence: Synthetic oligonucleotide
  Antisense strand to SEQ ID NO: 934658
uugucuaagcauaagacuc

SEQ ID NO: 934660 - RNA, 19 nt, Artificial Sequence
  Description of Artificial Sequence: Synthetic oligonucleotide
  Sense strand starting at position 1583 of SEQ ID NO: 913533
augguaugcauaugaaaga

SEQ ID NO: 934661 - RNA, 19 nt, Artificial Sequence
  Description of Artificial Sequence: Synthetic oligonucleotide
  Antisense strand to SEQ ID NO: 934660
ucuuucauaugcauaccau

SEQ ID NO: 934662 - RNA, 19 nt, Artificial Sequence
  Description of Artificial Sequence: Synthetic oligonucleotide
  Sense strand starting at position 1460 of SEQ ID NO: 913533
gcugcauuuguccacagua

SEQ ID NO: 934663 - RNA, 19 nt, Artificial Sequence
  Description of Artificial Sequence: Synthetic oligonucleotide
  Antisense strand to SEQ ID NO: 934662
uacuguggacaaaugcagc

SEQ ID NO: 934664 - RNA, 19 nt, Artificial Sequence
  Description of Artificial Sequence: Synthetic oligonucleotide
  Sense strand starting at position 2249 of SEQ ID NO: 913533
acaugauuguaucuuacag

SEQ ID NO: 934665 - RNA, 19 nt, Artificial Sequence
  Description of Artificial Sequence: Synthetic oligonucleotide
  Antisense strand to SEQ ID NO: 934664
cuguaagauacaaucaugu

SEQ ID NO: 934666 - RNA, 19 nt, Artificial Sequence
  Description of Artificial Sequence: Synthetic oligonucleotide
  Sense strand starting at position 1833 of SEQ ID NO: 913533
acacucagauguuccugaa

SEQ ID NO: 934667 - RNA, 19 nt, Artificial Sequence
  Description of Artificial Sequence: Synthetic oligonucleotide
  Antisense strand to SEQ ID NO: 934666
uucaggaacaucugagugu

SEQ ID NO: 934668 - RNA, 19 nt, Artificial Sequence
  Description of Artificial Sequence: Synthetic oligonucleotide
  Sense strand starting at position 3520 of SEQ ID NO: 913533
ugaagauaucuuggcugag

SEQ ID NO: 934669 - RNA, 19 nt, Artificial Sequence
  Description of Artificial Sequence: Synthetic oligonucleotide
  Antisense strand to SEQ ID NO: 934668
cucagccaagauaucuuca

SEQ ID NO: 934670 - RNA, 19 nt, Artificial Sequence
  Description of Artificial Sequence: Synthetic oligonucleotide
  Sense strand starting at position 1750 of SEQ ID NO: 913533
cuaacaaagugagcugaau

SEQ ID NO: 934671 - RNA, 19 nt, Artificial Sequence
  Description of Artificial Sequence: Synthetic oligonucleotide
  Antisense strand to SEQ ID NO: 934670
auucagcucacuuuguuag

SEQ ID NO: 934672 - RNA, 19 nt, Artificial Sequence
  Description of Artificial Sequence: Synthetic oligonucleotide
  Sense strand starting at position 3472 of SEQ ID NO: 913533
aguaauucuccaggauacc

SEQ ID NO: 934673 - RNA, 19 nt, Artificial Sequence
  Description of Artificial Sequence: Synthetic oligonucleotide
  Antisense strand to SEQ ID NO: 934672
gguauccuggagaauuacu

SEQ ID NO: 934674 - RNA, 19 nt, Artificial Sequence
  Description of Artificial Sequence: Synthetic oligonucleotide
  Sense strand starting at position 2170 of SEQ ID NO: 913533
auagaaaucuguuugaggu

SEQ ID NO: 934675 - RNA, 19 nt, Artificial Sequence
  Description of Artificial Sequence: Synthetic oligonucleotide
  Antisense strand to SEQ ID NO: 934674
accucaaacagauuucuau

SEQ ID NO: 934676 - RNA, 19 nt, Artificial Sequence
  Description of Artificial Sequence: Synthetic oligonucleotide
  Sense strand starting at position 908 of SEQ ID NO: 913533
guuccuauagauggaguaa

SEQ ID NO: 934677 - RNA, 19 nt, Artificial Sequence
  Description of Artificial Sequence: Synthetic oligonucleotide
  Antisense strand to SEQ ID NO: 934676
uuacuccaucuauaggaac

SEQ ID NO: 934678 - RNA, 19 nt, Artificial Sequence
  Description of Artificial Sequence: Synthetic oligonucleotide
  Sense strand starting at position 907 of SEQ ID NO: 913533
aguuccuauagauggagua

SEQ ID NO: 934679 - RNA, 19 nt, Artificial Sequence
  Description of Artificial Sequence: Synthetic oligonucleotide
  Antisense strand to SEQ ID NO: 934678
uacuccaucuauaggaacu

SEQ ID NO: 934680 - RNA, 19 nt, Artificial Sequence
  Description of Artificial Sequence: Synthetic oligonucleotide
  Sense strand starting at position 3316 of SEQ ID NO: 913533
ucccuuguaugauuagaau

SEQ ID NO: 934681 - RNA, 19 nt, Artificial Sequence
  Description of Artificial Sequence: Synthetic oligonucleotide
  Antisense strand to SEQ ID NO: 934680
auucuaaucauacaaggga

SEQ ID NO: 934682 - RNA, 19 nt, Artificial Sequence
  Description of Artificial Sequence: Synthetic oligonucleotide
  Sense strand starting at position 3469 of SEQ ID NO: 913533
ucuaguaauucuccaggau

SEQ ID NO: 934683 - RNA, 19 nt, Artificial Sequence
  Description of Artificial Sequence: Synthetic oligonucleotide
  Antisense strand to SEQ ID NO: 934682
auccuggagaauuacuaga

SEQ ID NO: 934684 - RNA, 19 nt, Artificial Sequence
  Description of Artificial Sequence: Synthetic oligonucleotide
  Sense strand starting at position 3943 of SEQ ID NO: 913533
gugcuagguauuuguccaa

SEQ ID NO: 934685 - RNA, 19 nt, Artificial Sequence
  Description of Artificial Sequence: Synthetic oligonucleotide
  Antisense strand to SEQ ID NO: 934684
uuggacaaauaccuagcac

SEQ ID NO: 934686 - RNA, 19 nt, Artificial Sequence
  Description of Artificial Sequence: Synthetic oligonucleotide
  Sense strand starting at position 2171 of SEQ ID NO: 913533
uagaaaucuguuugaggug

SEQ ID NO: 934687 - RNA, 19 nt, Artificial Sequence
  Description of Artificial Sequence: Synthetic oligonucleotide
  Antisense strand to SEQ ID NO: 934686
caccucaaacagauuucua

SEQ ID NO: 934688 - RNA, 19 nt, Artificial Sequence
  Description of Artificial Sequence: Synthetic oligonucleotide
  Sense strand starting at position 2833 of SEQ ID NO: 913533
aaugaaggcuuggcacaua

SEQ ID NO: 934689 - RNA, 19 nt, Artificial Sequence
  Description of Artificial Sequence: Synthetic oligonucleotide
  Antisense strand to SEQ ID NO: 934688
uaugugccaagccuucauu

SEQ ID NO: 934690 - RNA, 19 nt, Artificial Sequence
  Description of Artificial Sequence: Synthetic oligonucleotide
  Sense strand starting at position 2183 of SEQ ID NO: 913533
ugaggugggcucuagcaaa

SEQ ID NO: 934691 - RNA, 19 nt, Artificial Sequence
  Description of Artificial Sequence: Synthetic oligonucleotide
  Antisense strand to SEQ ID NO: 934690
uuugcuagagcccaccuca

SEQ ID NO: 934692 - RNA, 19 nt, Artificial Sequence
  Description of Artificial Sequence: Synthetic oligonucleotide
  Sense strand starting at position 3522 of SEQ ID NO: 913533
aagauaucuuggcugagua

SEQ ID NO: 934693 - RNA, 19 nt, Artificial Sequence
  Description of Artificial Sequence: Synthetic oligonucleotide
  Antisense strand to SEQ ID NO: 934692
uacucagccaagauaucuu

SEQ ID NO: 934694 - RNA, 19 nt, Artificial Sequence
  Description of Artificial Sequence: Synthetic oligonucleotide
  Sense strand starting at position 3622 of SEQ ID NO: 913533
ggguuuggguccaagaaug

SEQ ID NO: 934695 - RNA, 19 nt, Artificial Sequence
  Description of Artificial Sequence: Synthetic oligonucleotide
  Antisense strand to SEQ ID NO: 934694
cauucuuggacccaaaccc

SEQ ID NO: 934696 - RNA, 19 nt, Artificial Sequence
  Description of Artificial Sequence: Synthetic oligonucleotide
  Sense strand starting at position 3716 of SEQ ID NO: 913533
gcacauagaugcucaauaa

SEQ ID NO: 934697 - RNA, 19 nt, Artificial Sequence
  Description of Artificial Sequence: Synthetic oligonucleotide
  Antisense strand to SEQ ID NO: 934696
uuauugagcaucuaugugc

SEQ ID NO: 934698 - RNA, 19 nt, Artificial Sequence
  Description of Artificial Sequence: Synthetic oligonucleotide
  Sense strand starting at position 3939 of SEQ ID NO: 913533
gucugugcuagguauuugu

SEQ ID NO: 934699 - RNA, 19 nt, Artificial Sequence
  Description of Artificial Sequence: Synthetic oligonucleotide
  Antisense strand to SEQ ID NO: 934698
acaaauaccuagcacagac

SEQ ID NO: 934700 - RNA, 19 nt, Artificial Sequence
  Description of Artificial Sequence: Synthetic oligonucleotide
  Sense strand starting at position 3523 of SEQ ID NO: 913533
agauaucuuggcugaguaa

SEQ ID NO: 934701 - RNA, 19 nt, Artificial Sequence
  Description of Artificial Sequence: Synthetic oligonucleotide
  Antisense strand to SEQ ID NO: 934700
uuacucagccaagauaucu

SEQ ID NO: 934702 - RNA, 19 nt, Artificial Sequence
  Description of Artificial Sequence: Synthetic oligonucleotide
  Sense strand starting at position 3521 of SEQ ID NO: 913533
gaagauaucuuggcugagu

SEQ ID NO: 934703 - RNA, 19 nt, Artificial Sequence
  Description of Artificial Sequence: Synthetic oligonucleotide
  Antisense strand to SEQ ID NO: 934702
acucagccaagauaucuuc

SEQ ID NO: 934704 - RNA, 19 nt, Artificial Sequence
  Description of Artificial Sequence: Synthetic oligonucleotide
  Sense strand starting at position 3937 of SEQ ID NO: 913533
gggucugugcuagguauuu

SEQ ID NO: 934705 - RNA, 19 nt, Artificial Sequence
  Description of Artificial Sequence: Synthetic oligonucleotide
  Antisense strand to SEQ ID NO: 934704
aaauaccuagcacagaccc

SEQ ID NO: 934706 - RNA, 19 nt, Artificial Sequence
  Description of Artificial Sequence: Synthetic oligonucleotide
  Sense strand starting at position 2664 of SEQ ID NO: 913533
ugaacuuucuggccuacaa

SEQ ID NO: 934707 - RNA, 19 nt, Artificial Sequence
  Description of Artificial Sequence: Synthetic oligonucleotide
  Antisense strand to SEQ ID NO: 934706
uuguaggccagaaaguuca

SEQ ID NO: 934708 - RNA, 19 nt, Artificial Sequence
  Description of Artificial Sequence: Synthetic oligonucleotide
  Sense strand starting at position 867 of SEQ ID NO: 913533
gcacuucccugacugaaca

SEQ ID NO: 934709 - RNA, 19 nt, Artificial Sequence
  Description of Artificial Sequence: Synthetic oligonucleotide
  Antisense strand to SEQ ID NO: 934708
uguucagucagggaagugc

SEQ ID NO: 934710 - RNA, 19 nt, Artificial Sequence
  Description of Artificial Sequence: Synthetic oligonucleotide
  Sense strand starting at position 1408 of SEQ ID NO: 913534
auuaacuucgaagagcuaa

SEQ ID NO: 934711 - RNA, 19 nt, Artificial Sequence
  Description of Artificial Sequence: Synthetic oligonucleotide
  Antisense strand to SEQ ID NO: 934710
uuagcucuucgaaguuaau

SEQ ID NO: 934712 - RNA, 19 nt, Artificial Sequence
  Description of Artificial Sequence: Synthetic oligonucleotide
  Sense strand starting at position 2612 of SEQ ID NO: 913534
ucagauguuccugaauacu

SEQ ID NO: 934713 - RNA, 19 nt, Artificial Sequence
  Description of Artificial Sequence: Synthetic oligonucleotide
  Antisense strand to SEQ ID NO: 934712
aguauucaggaacaucuga

SEQ ID NO: 934714 - RNA, 19 nt, Artificial Sequence
  Description of Artificial Sequence: Synthetic oligonucleotide
  Sense strand starting at position 1116 of SEQ ID NO: 913534
augaaaggcuugguaaaga

SEQ ID NO: 934715 - RNA, 19 nt, Artificial Sequence
  Description of Artificial Sequence: Synthetic oligonucleotide
  Antisense strand to SEQ ID NO: 934714
ucuuuaccaagccuuucau

SEQ ID NO: 934716 - RNA, 19 nt, Artificial Sequence
  Description of Artificial Sequence: Synthetic oligonucleotide
  Sense strand starting at position 1517 of SEQ ID NO: 913534
acacaaagguuauuaguaa

SEQ ID NO: 934717 - RNA, 19 nt, Artificial Sequence
  Description of Artificial Sequence: Synthetic oligonucleotide
  Antisense strand to SEQ ID NO: 934716
uuacuaauaaccuuugugu

SEQ ID NO: 934718 - RNA, 19 nt, Artificial Sequence
  Description of Artificial Sequence: Synthetic oligonucleotide
  Sense strand starting at position 1114 of SEQ ID NO: 913534
gaaugaaaggcuugguaaa

SEQ ID NO: 934719 - RNA, 19 nt, Artificial Sequence
  Description of Artificial Sequence: Synthetic oligonucleotide
  Antisense strand to SEQ ID NO: 934718
uuuaccaagccuuucauuc

SEQ ID NO: 934720 - RNA, 19 nt, Artificial Sequence
  Description of Artificial Sequence: Synthetic oligonucleotide
  Sense strand starting at position 1115 of SEQ ID NO: 913534
aaugaaaggcuugguaaag

SEQ ID NO: 934721 - RNA, 19 nt, Artificial Sequence
  Description of Artificial Sequence: Synthetic oligonucleotide
  Antisense strand to SEQ ID NO: 934720
cuuuaccaagccuuucauu

SEQ ID NO: 934722 - RNA, 19 nt, Artificial Sequence
  Description of Artificial Sequence: Synthetic oligonucleotide
  Sense strand starting at position 1314 of SEQ ID NO: 913534
auaguuccucaagacaguu

SEQ ID NO: 934723 - RNA, 19 nt, Artificial Sequence
  Description of Artificial Sequence: Synthetic oligonucleotide
  Antisense strand to SEQ ID NO: 934722
aacugucuugaggaacuau

SEQ ID NO: 934724 - RNA, 19 nt, Artificial Sequence
  Description of Artificial Sequence: Synthetic oligonucleotide
  Sense strand starting at position 2260 of SEQ ID NO: 913534
ucagaacaugaacgguaua

SEQ ID NO: 934725 - RNA, 19 nt, Artificial Sequence
  Description of Artificial Sequence: Synthetic oligonucleotide
  Antisense strand to SEQ ID NO: 934724
uauaccguucauguucuga

SEQ ID NO: 934726 - RNA, 19 nt, Artificial Sequence
  Description of Artificial Sequence: Synthetic oligonucleotide
  Sense strand starting at position 1079 of SEQ ID NO: 913534
gagucuuaugcuuagacaa

SEQ ID NO: 934727 - RNA, 19 nt, Artificial Sequence
  Description of Artificial Sequence: Synthetic oligonucleotide
  Antisense strand to SEQ ID NO: 934726
uugucuaagcauaagacuc

SEQ ID NO: 934728 - RNA, 19 nt, Artificial Sequence
  Description of Artificial Sequence: Synthetic oligonucleotide
  Sense strand starting at position 2358 of SEQ ID NO: 913534
augguaugcauaugaaaga

SEQ ID NO: 934729 - RNA, 19 nt, Artificial Sequence
  Description of Artificial Sequence: Synthetic oligonucleotide
  Antisense strand to SEQ ID NO: 934728
ucuuucauaugcauaccau

SEQ ID NO: 934730 - RNA, 19 nt, Artificial Sequence
  Description of Artificial Sequence: Synthetic oligonucleotide
  Sense strand starting at position 2235 of SEQ ID NO: 913534
gcugcauuuguccacagua

SEQ ID NO: 934731 - RNA, 19 nt, Artificial Sequence
  Description of Artificial Sequence: Synthetic oligonucleotide
  Antisense strand to SEQ ID NO: 934730
uacuguggacaaaugcagc

SEQ ID NO: 934732 - RNA, 19 nt, Artificial Sequence
  Description of Artificial Sequence: Synthetic oligonucleotide
  Sense strand starting at position 3024 of SEQ ID NO: 913534
acaugauuguaucuuacag

SEQ ID NO: 934733 - RNA, 19 nt, Artificial Sequence
  Description of Artificial Sequence: Synthetic oligonucleotide
  Antisense strand to SEQ ID NO: 934732
cuguaagauacaaucaugu

SEQ ID NO: 934734 - RNA, 19 nt, Artificial Sequence
  Description of Artificial Sequence: Synthetic oligonucleotide
  Sense strand starting at position 2608 of SEQ ID NO: 913534
acacucagauguuccugaa

SEQ ID NO: 934735 - RNA, 19 nt, Artificial Sequence
  Description of Artificial Sequence: Synthetic oligonucleotide
  Antisense strand to SEQ ID NO: 934734
uucaggaacaucugagugu

SEQ ID NO: 934736 - RNA, 19 nt, Artificial Sequence
  Description of Artificial Sequence: Synthetic oligonucleotide
  Sense strand starting at position 2525 of SEQ ID NO: 913534
cuaacaaagugagcugaau

SEQ ID NO: 934737 - RNA, 19 nt, Artificial Sequence
  Description of Artificial Sequence: Synthetic oligonucleotide
  Antisense strand to SEQ ID NO: 934736
auucagcucacuuuguuag

SEQ ID NO: 934738 - RNA, 19 nt, Artificial Sequence
  Description of Artificial Sequence: Synthetic oligonucleotide
  Sense strand starting at position 2945 of SEQ ID NO: 913534
auagaaaucuguuugaggu

SEQ ID NO: 934739 - RNA, 19 nt, Artificial Sequence
  Description of Artificial Sequence: Synthetic oligonucleotide
  Antisense strand to SEQ ID NO: 934738
accucaaacagauuucuau

SEQ ID NO: 934740 - RNA, 19 nt, Artificial Sequence
  Description of Artificial Sequence: Synthetic oligonucleotide
  Sense strand starting at position 1683 of SEQ ID NO: 913534
guuccuauagauggaguaa

SEQ ID NO: 934741 - RNA, 19 nt, Artificial Sequence
  Description of Artificial Sequence: Synthetic oligonucleotide
  Antisense strand to SEQ ID NO: 934740
uuacuccaucuauaggaac

SEQ ID NO: 934742 - RNA, 19 nt, Artificial Sequence
  Description of Artificial Sequence: Synthetic oligonucleotide
  Sense strand starting at position 1682 of SEQ ID NO: 913534
aguuccuauagauggagua

SEQ ID NO: 934743 - RNA, 19 nt, Artificial Sequence
  Description of Artificial Sequence: Synthetic oligonucleotide
  Antisense strand to SEQ ID NO: 934742
uacuccaucuauaggaacu

SEQ ID NO: 934744 - RNA, 19 nt, Artificial Sequence
  Description of Artificial Sequence: Synthetic oligonucleotide
  Sense strand starting at position 524 of SEQ ID NO: 913534
agcacugauucuguaagaa

SEQ ID NO: 934745 - RNA, 19 nt, Artificial Sequence
  Description of Artificial Sequence: Synthetic oligonucleotide
  Antisense strand to SEQ ID NO: 934744
uucuuacagaaucagugcu

SEQ ID NO: 934746 - RNA, 19 nt, Artificial Sequence
  Description of Artificial Sequence: Synthetic oligonucleotide
  Sense strand starting at position 2946 of SEQ ID NO: 913534
uagaaaucuguuugaggug

SEQ ID NO: 934747 - RNA, 19 nt, Artificial Sequence
  Description of Artificial Sequence: Synthetic oligonucleotide
  Antisense strand to SEQ ID NO: 934746
caccucaaacagauuucua

SEQ ID NO: 934748 - RNA, 19 nt, Artificial Sequence
  Description of Artificial Sequence: Synthetic oligonucleotide
  Sense strand starting at position 3608 of SEQ ID NO: 913534
aaugaaggcuuggcacaua

SEQ ID NO: 934749 - RNA, 19 nt, Artificial Sequence
  Description of Artificial Sequence: Synthetic oligonucleotide
  Antisense strand to SEQ ID NO: 934748
uaugugccaagccuucauu

SEQ ID NO: 934750 - RNA, 19 nt, Artificial Sequence
  Description of Artificial Sequence: Synthetic oligonucleotide
  Sense strand starting at position 2958 of SEQ ID NO: 913534
ugaggugggcucuagcaaa

SEQ ID NO: 934751 - RNA, 19 nt, Artificial Sequence
  Description of Artificial Sequence: Synthetic oligonucleotide
  Antisense strand to SEQ ID NO: 934750
uuugcuagagcccaccuca

SEQ ID NO: 934752 - RNA, 19 nt, Artificial Sequence
  Description of Artificial Sequence: Synthetic oligonucleotide
  Sense strand starting at position 3439 of SEQ ID NO: 913534
ugaacuuucuggccuacaa

SEQ ID NO: 934753 - RNA, 19 nt, Artificial Sequence
  Description of Artificial Sequence: Synthetic oligonucleotide
  Antisense strand to SEQ ID NO: 934752
uuguaggccagaaaguuca

SEQ ID NO: 934754 - RNA, 19 nt, Artificial Sequence
  Description of Artificial Sequence: Synthetic oligonucleotide
  Sense strand starting at position 1642 of SEQ ID NO: 913534
gcacuucccugacugaaca

SEQ ID NO: 934755 - RNA, 19 nt, Artificial Sequence
  Description of Artificial Sequence: Synthetic oligonucleotide
  Antisense strand to SEQ ID NO: 934754
uguucagucagggaagugc

SEQ ID NO: 934756 - RNA, 19 nt, Artificial Sequence
  Description of Artificial Sequence: Synthetic oligonucleotide
  Sense strand starting at position 2460 of SEQ ID NO: 913534
ggauuagugccucagucaa

SEQ ID NO: 934757 - RNA, 19 nt, Artificial Sequence
  Description of Artificial Sequence: Synthetic oligonucleotide
  Antisense strand to SEQ ID NO: 934756
uugacugaggcacuaaucc

SEQ ID NO: 934758 - RNA, 19 nt, Artificial Sequence
  Description of Artificial Sequence: Synthetic oligonucleotide
  Sense strand starting at position 3069 of SEQ ID NO: 913534
caaggcuucuagguaaacu

SEQ ID NO: 934759 - RNA, 19 nt, Artificial Sequence
  Description of Artificial Sequence: Synthetic oligonucleotide
  Antisense strand to SEQ ID NO: 934758
aguuuaccuagaagccuug

SEQ ID NO: 934760 - RNA, 19 nt, Artificial Sequence
  Description of Artificial Sequence: Synthetic oligonucleotide
  Sense strand starting at position 664 of SEQ ID NO: 913534
aucaaucauguguagcauu

SEQ ID NO: 934761 - RNA, 19 nt, Artificial Sequence
  Description of Artificial Sequence: Synthetic oligonucleotide
  Antisense strand to SEQ ID NO: 934760
aaugcuacacaugauugau

SEQ ID NO: 934762 - RNA, 19 nt, Artificial Sequence
  Description of Artificial Sequence: Synthetic oligonucleotide
  Sense strand starting at position 3607 of SEQ ID NO: 913534
uaaugaaggcuuggcacau

SEQ ID NO: 934763 - RNA, 19 nt, Artificial Sequence
  Description of Artificial Sequence: Synthetic oligonucleotide
  Antisense strand to SEQ ID NO: 934762
augugccaagccuucauua

SEQ ID NO: 934764 - RNA, 19 nt, Artificial Sequence
  Description of Artificial Sequence: Synthetic oligonucleotide
  Sense strand starting at position 3366 of SEQ ID NO: 913534
gugccaauggagcaaguau

SEQ ID NO: 934765 - RNA, 19 nt, Artificial Sequence
  Description of Artificial Sequence: Synthetic oligonucleotide
  Antisense strand to SEQ ID NO: 934764
auacuugcuccauuggcac

SEQ ID NO: 934766 - RNA, 19 nt, Artificial Sequence
  Description of Artificial Sequence: Synthetic oligonucleotide
  Sense strand starting at position 1078 of SEQ ID NO: 913534
ugagucuuaugcuuagaca

SEQ ID NO: 934767 - RNA, 19 nt, Artificial Sequence
  Description of Artificial Sequence: Synthetic oligonucleotide
  Antisense strand to SEQ ID NO: 934766
ugucuaagcauaagacuca

SEQ ID NO: 934768 - RNA, 19 nt, Artificial Sequence
  Description of Artificial Sequence: Synthetic oligonucleotide
  Sense strand starting at position 1524 of SEQ ID NO: 913534
gguuauuaguaacuaaguc

SEQ ID NO: 934769 - RNA, 19 nt, Artificial Sequence
  Description of Artificial Sequence: Synthetic oligonucleotide
  Antisense strand to SEQ ID NO: 934768
gacuuaguuacuaauaacc

SEQ ID NO: 934770 - RNA, 19 nt, Artificial Sequence
  Description of Artificial Sequence: Synthetic oligonucleotide
  Sense strand starting at position 2353 of SEQ ID NO: 913534
gcagaaugguaugcauaug

SEQ ID NO: 934771 - RNA, 19 nt, Artificial Sequence
  Description of Artificial Sequence: Synthetic oligonucleotide
  Antisense strand to SEQ ID NO: 934770
cauaugcauaccauucugc

SEQ ID NO: 934772 - RNA, 19 nt, Artificial Sequence
  Description of Artificial Sequence: Synthetic oligonucleotide
  Sense strand starting at position 3377 of SEQ ID NO: 913534
gcaaguauuauguaguauu

SEQ ID NO: 934773 - RNA, 19 nt, Artificial Sequence
  Description of Artificial Sequence: Synthetic oligonucleotide
  Antisense strand to SEQ ID NO: 934772
aauacuacauaauacuugc

SEQ ID NO: 934774 - RNA, 19 nt, Artificial Sequence
  Description of Artificial Sequence: Synthetic oligonucleotide
  Sense strand starting at position 2316 of SEQ ID NO: 913534
acagguugccuaugaagua

SEQ ID NO: 934775 - RNA, 19 nt, Artificial Sequence
  Description of Artificial Sequence: Synthetic oligonucleotide
  Antisense strand to SEQ ID NO: 934774
uacuucauaggcaaccugu

SEQ ID NO: 934776 - RNA, 19 nt, Artificial Sequence
  Description of Artificial Sequence: Synthetic oligonucleotide
  Sense strand starting at position 3423 of SEQ ID NO: 913534
ugaacuugcugauauuuga

SEQ ID NO: 934777 - RNA, 19 nt, Artificial Sequence
  Description of Artificial Sequence: Synthetic oligonucleotide
  Antisense strand to SEQ ID NO: 934776
ucaaauaucagcaaguuca

SEQ ID NO: 934778 - RNA, 19 nt, Artificial Sequence
  Description of Artificial Sequence: Synthetic oligonucleotide
  Sense strand starting at position 1675 of SEQ ID NO: 913534
aaucgcaaguuccuauaga

SEQ ID NO: 934779 - RNA, 19 nt, Artificial Sequence
  Description of Artificial Sequence: Synthetic oligonucleotide
  Antisense strand to SEQ ID NO: 934778
ucuauaggaacuugcgauu

SEQ ID NO: 934780 - RNA, 19 nt, Artificial Sequence
  Description of Artificial Sequence: Synthetic oligonucleotide
  Sense strand starting at position 2352 of SEQ ID NO: 913534
ggcagaaugguaugcauau

SEQ ID NO: 934781 - RNA, 19 nt, Artificial Sequence
  Description of Artificial Sequence: Synthetic oligonucleotide
  Antisense strand to SEQ ID NO: 934780
auaugcauaccauucugcc

SEQ ID NO: 934782 - RNA, 19 nt, Artificial Sequence
  Description of Artificial Sequence: Synthetic oligonucleotide
  Sense strand starting at position 2313 of SEQ ID NO: 913534
gcaacagguugccuaugaa

SEQ ID NO: 934783 - RNA, 19 nt, Artificial Sequence
  Description of Artificial Sequence: Synthetic oligonucleotide
  Antisense strand to SEQ ID NO: 934782
uucauaggcaaccuguugc

SEQ ID NO: 934784 - RNA, 19 nt, Artificial Sequence
  Description of Artificial Sequence: Synthetic oligonucleotide
  Sense strand starting at position 1199 of SEQ ID NO: 913534
uaugacaugcaguguuuga

SEQ ID NO: 934785 - RNA, 19 nt, Artificial Sequence
  Description of Artificial Sequence: Synthetic oligonucleotide
  Antisense strand to SEQ ID NO: 934784
ucaaacacugcaugucaua

SEQ ID NO: 934786 - RNA, 19 nt, Artificial Sequence
  Description of Artificial Sequence: Synthetic oligonucleotide
  Sense strand starting at position 2458 of SEQ ID NO: 913534
gaggauuagugccucaguc

SEQ ID NO: 934787 - RNA, 19 nt, Artificial Sequence
  Description of Artificial Sequence: Synthetic oligonucleotide
  Antisense strand to SEQ ID NO: 934786
gacugaggcacuaauccuc

SEQ ID NO: 934788 - RNA, 19 nt, Artificial Sequence
  Description of Artificial Sequence: Synthetic oligonucleotide
  Sense strand starting at position 2272 of SEQ ID NO: 913534
cgguauauacuguauguuu

SEQ ID NO: 934789 - RNA, 19 nt, Artificial Sequence
  Description of Artificial Sequence: Synthetic oligonucleotide
  Antisense strand to SEQ ID NO: 934788
aaacauacaguauauaccg

SEQ ID NO: 934790 - RNA, 19 nt, Artificial Sequence
  Description of Artificial Sequence: Synthetic oligonucleotide
  Sense strand starting at position 72 of SEQ ID NO: 913535
ugacucaccugaguaggaa

SEQ ID NO: 934791 - RNA, 19 nt, Artificial Sequence
  Description of Artificial Sequence: Synthetic oligonucleotide
  Antisense strand to SEQ ID NO: 934790
uuccuacucaggugaguca

SEQ ID NO: 934792 - RNA, 19 nt, Artificial Sequence
  Description of Artificial Sequence: Synthetic oligonucleotide
  Sense strand starting at position 3656 of SEQ ID NO: 913535
augguuauagaguacagua

SEQ ID NO: 934793 - RNA, 19 nt, Artificial Sequence
  Description of Artificial Sequence: Synthetic oligonucleotide
  Antisense strand to SEQ ID NO: 934792
uacuguacucuauaaccau

SEQ ID NO: 934794 - RNA, 19 nt, Artificial Sequence
  Description of Artificial Sequence: Synthetic oligonucleotide
  Sense strand starting at position 446 of SEQ ID NO: 913535
cuguguugggaucaauaca

SEQ ID NO: 934795 - RNA, 19 nt, Artificial Sequence
  Description of Artificial Sequence: Synthetic oligonucleotide
  Antisense strand to SEQ ID NO: 934794
uguauugaucccaacacag

SEQ ID NO: 934796 - RNA, 19 nt, Artificial Sequence
  Description of Artificial Sequence: Synthetic oligonucleotide
  Sense strand starting at position 1831 of SEQ ID NO: 913535
uaaacugcgcucguaaagu

SEQ ID NO: 934797 - RNA, 19 nt, Artificial Sequence
  Description of Artificial Sequence: Synthetic oligonucleotide
  Antisense strand to SEQ ID NO: 934796
acuuuacgagcgcaguuua

SEQ ID NO: 934798 - RNA, 19 nt, Artificial Sequence
  Description of Artificial Sequence: Synthetic oligonucleotide
  Sense strand starting at position 3686 of SEQ ID NO: 913535
aacgauagguucuuagaaa

SEQ ID NO: 934799 - RNA, 19 nt, Artificial Sequence
  Description of Artificial Sequence: Synthetic oligonucleotide
  Antisense strand to SEQ ID NO: 934798
uuucuaagaaccuaucguu

SEQ ID NO: 934800 - RNA, 19 nt, Artificial Sequence
  Description of Artificial Sequence: Synthetic oligonucleotide
  Sense strand starting at position 3045 of SEQ ID NO: 913535
ucuacauaccuugacuagu

SEQ ID NO: 934801 - RNA, 19 nt, Artificial Sequence
  Description of Artificial Sequence: Synthetic oligonucleotide
  Antisense strand to SEQ ID NO: 934800
acuagucaagguauguaga

SEQ ID NO: 934802 - RNA, 19 nt, Artificial Sequence
  Description of Artificial Sequence: Synthetic oligonucleotide
  Sense strand starting at position 30 of SEQ ID NO: 913535
uggucauaacccuaagcaa

SEQ ID NO: 934803 - RNA, 19 nt, Artificial Sequence
  Description of Artificial Sequence: Synthetic oligonucleotide
  Antisense strand to SEQ ID NO: 934802
uugcuuaggguuaugacca

SEQ ID NO: 934804 - RNA, 19 nt, Artificial Sequence
  Description of Artificial Sequence: Synthetic oligonucleotide
  Sense strand starting at position 3669 of SEQ ID NO: 913535
acaguagguccucacuuaa

SEQ ID NO: 934805 - RNA, 19 nt, Artificial Sequence
  Description of Artificial Sequence: Synthetic oligonucleotide
  Antisense strand to SEQ ID NO: 934804
uuaagugaggaccuacugu

SEQ ID NO: 934806 - RNA, 19 nt, Artificial Sequence
  Description of Artificial Sequence: Synthetic oligonucleotide
  Sense strand starting at position 1818 of SEQ ID NO: 913535
guccgcuuucgucuaaacu

SEQ ID NO: 934807 - RNA, 19 nt, Artificial Sequence
  Description of Artificial Sequence: Synthetic oligonucleotide
  Antisense strand to SEQ ID NO: 934806
aguuuagacgaaagcggac

SEQ ID NO: 934808 - RNA, 19 nt, Artificial Sequence
  Description of Artificial Sequence: Synthetic oligonucleotide
  Sense strand starting at position 1828 of SEQ ID NO: 913535
gucuaaacugcgcucguaa

SEQ ID NO: 934809 - RNA, 19 nt, Artificial Sequence
  Description of Artificial Sequence: Synthetic oligonucleotide
  Antisense strand to SEQ ID NO: 934808
uuacgagcgcaguuuagac

SEQ ID NO: 934810 - RNA, 19 nt, Artificial Sequence
  Description of Artificial Sequence: Synthetic oligonucleotide
  Sense strand starting at position 3123 of SEQ ID NO: 913535
gcuugagcuccugagacaa

SEQ ID NO: 934811 - RNA, 19 nt, Artificial Sequence
  Description of Artificial Sequence: Synthetic oligonucleotide
  Antisense strand to SEQ ID NO: 934810
uugucucaggagcucaagc

SEQ ID NO: 934812 - RNA, 19 nt, Artificial Sequence
  Description of Artificial Sequence: Synthetic oligonucleotide
  Sense strand starting at position 1089 of SEQ ID NO: 913535
ccggcaaauuaaguagaaa

SEQ ID NO: 934813 - RNA, 19 nt, Artificial Sequence
  Description of Artificial Sequence: Synthetic oligonucleotide
  Antisense strand to SEQ ID NO: 934812
uuucuacuuaauuugccgg

SEQ ID NO: 934814 - RNA, 19 nt, Artificial Sequence
  Description of Artificial Sequence: Synthetic oligonucleotide
  Sense strand starting at position 328 of SEQ ID NO: 913535
ugggaaaguaaguguuaua

SEQ ID NO: 934815 - RNA, 19 nt, Artificial Sequence
  Description of Artificial Sequence: Synthetic oligonucleotide
  Antisense strand to SEQ ID NO: 934814
uauaacacuuacuuuccca

SEQ ID NO: 934816 - RNA, 19 nt, Artificial Sequence
  Description of Artificial Sequence: Synthetic oligonucleotide
  Sense strand starting at position 3697 of SEQ ID NO: 913535
cuuagaaaucauggcuuua

SEQ ID NO: 934817 - RNA, 19 nt, Artificial Sequence
  Description of Artificial Sequence: Synthetic oligonucleotide
  Antisense strand to SEQ ID NO: 934816
uaaagccaugauuucuaag

SEQ ID NO: 934818 - RNA, 19 nt, Artificial Sequence
  Description of Artificial Sequence: Synthetic oligonucleotide
  Sense strand starting at position 3844 of SEQ ID NO: 913535
agcuauugacaauguuaag

SEQ ID NO: 934819 - RNA, 19 nt, Artificial Sequence
  Description of Artificial Sequence: Synthetic oligonucleotide
  Antisense strand to SEQ ID NO: 934818
cuuaacauugucaauagcu

SEQ ID NO: 934820 - RNA, 19 nt, Artificial Sequence
  Description of Artificial Sequence: Synthetic oligonucleotide
  Sense strand starting at position 2806 of SEQ ID NO: 913535
acuugucagccagaguaac

SEQ ID NO: 934821 - RNA, 19 nt, Artificial Sequence
  Description of Artificial Sequence: Synthetic oligonucleotide
  Antisense strand to SEQ ID NO: 934820
guuacucuggcugacaagu

SEQ ID NO: 934822 - RNA, 19 nt, Artificial Sequence
  Description of Artificial Sequence: Synthetic oligonucleotide
  Sense strand starting at position 327 of SEQ ID NO: 913535
cugggaaaguaaguguuau

SEQ ID NO: 934823 - RNA, 19 nt, Artificial Sequence
  Description of Artificial Sequence: Synthetic oligonucleotide
  Antisense strand to SEQ ID NO: 934822
auaacacuuacuuucccag

SEQ ID NO: 934824 - RNA, 19 nt, Artificial Sequence
  Description of Artificial Sequence: Synthetic oligonucleotide
  Sense strand starting at position 2804 of SEQ ID NO: 913535
ugacuugucagccagagua

SEQ ID NO: 934825 - RNA, 19 nt, Artificial Sequence
  Description of Artificial Sequence: Synthetic oligonucleotide
  Antisense strand to SEQ ID NO: 934824
uacucuggcugacaaguca

SEQ ID NO: 934826 - RNA, 19 nt, Artificial Sequence
  Description of Artificial Sequence: Synthetic oligonucleotide
  Sense strand starting at position 3682 of SEQ ID NO: 913535
acuuaacgauagguucuua

SEQ ID NO: 934827 - RNA, 19 nt, Artificial Sequence
  Description of Artificial Sequence: Synthetic oligonucleotide
  Antisense strand to SEQ ID NO: 934826
uaagaaccuaucguuaagu

SEQ ID NO: 934828 - RNA, 19 nt, Artificial Sequence
  Description of Artificial Sequence: Synthetic oligonucleotide
  Sense strand starting at position 102 of SEQ ID NO: 913535
gccuauuaacuauggauuc

SEQ ID NO: 934829 - RNA, 19 nt, Artificial Sequence
  Description of Artificial Sequence: Synthetic oligonucleotide
  Antisense strand to SEQ ID NO: 934828
gaauccauaguuaauaggc

SEQ ID NO: 934830 - RNA, 19 nt, Artificial Sequence
  Description of Artificial Sequence: Synthetic oligonucleotide
  Sense strand starting at position 384 of SEQ ID NO: 913535
cugacaaugcuuuaagugu

SEQ ID NO: 934831 - RNA, 19 nt, Artificial Sequence
  Description of Artificial Sequence: Synthetic oligonucleotide
  Antisense strand to SEQ ID NO: 934830
acacuuaaagcauugucag

SEQ ID NO: 934832 - RNA, 19 nt, Artificial Sequence
  Description of Artificial Sequence: Synthetic oligonucleotide
  Sense strand starting at position 60 of SEQ ID NO: 913535
uugauuaggcagugacuca

SEQ ID NO: 934833 - RNA, 19 nt, Artificial Sequence
  Description of Artificial Sequence: Synthetic oligonucleotide
  Antisense strand to SEQ ID NO: 934832
ugagucacugccuaaucaa

SEQ ID NO: 934834 - RNA, 19 nt, Artificial Sequence
  Description of Artificial Sequence: Synthetic oligonucleotide
  Sense strand starting at position 3648 of SEQ ID NO: 913535
auagcagcaugguuauaga

SEQ ID NO: 934835 - RNA, 19 nt, Artificial Sequence
  Description of Artificial Sequence: Synthetic oligonucleotide
  Antisense strand to SEQ ID NO: 934834
ucuauaaccaugcugcuau

SEQ ID NO: 934836 - RNA, 19 nt, Artificial Sequence
  Description of Artificial Sequence: Synthetic oligonucleotide
  Sense strand starting at position 3645 of SEQ ID NO: 913535
agaauagcagcaugguuau

SEQ ID NO: 934837 - RNA, 19 nt, Artificial Sequence
  Description of Artificial Sequence: Synthetic oligonucleotide
  Antisense strand to SEQ ID NO: 934836
auaaccaugcugcuauucu

SEQ ID NO: 934838 - RNA, 19 nt, Artificial Sequence
  Description of Artificial Sequence: Synthetic oligonucleotide
  Sense strand starting at position 526 of SEQ ID NO: 913535
uuugccuuccuuugggaaa

SEQ ID NO: 934839 - RNA, 19 nt, Artificial Sequence
  Description of Artificial Sequence: Synthetic oligonucleotide
  Antisense strand to SEQ ID NO: 934838
uuucccaaaggaaggcaaa

SEQ ID NO: 934840 - RNA, 19 nt, Artificial Sequence
  Description of Artificial Sequence: Synthetic oligonucleotide
  Sense strand starting at position 1111 of SEQ ID NO: 913535
aacugagucacguacguaa

SEQ ID NO: 934841 - RNA, 19 nt, Artificial Sequence
  Description of Artificial Sequence: Synthetic oligonucleotide
  Antisense strand to SEQ ID NO: 934840
uuacguacgugacucaguu

SEQ ID NO: 934842 - RNA, 19 nt, Artificial Sequence
  Description of Artificial Sequence: Synthetic oligonucleotide
  Sense strand starting at position 2799 of SEQ ID NO: 913535
uccaaugacuugucagcca

SEQ ID NO: 934843 - RNA, 19 nt, Artificial Sequence
  Description of Artificial Sequence: Synthetic oligonucleotide
  Antisense strand to SEQ ID NO: 934842
uggcugacaagucauugga

SEQ ID NO: 934844 - RNA, 19 nt, Artificial Sequence
  Description of Artificial Sequence: Synthetic oligonucleotide
  Sense strand starting at position 1081 of SEQ ID NO: 913535
ucaucugcccggcaaauua

SEQ ID NO: 934845 - RNA, 19 nt, Artificial Sequence
  Description of Artificial Sequence: Synthetic oligonucleotide
  Antisense strand to SEQ ID NO: 934844
uaauuugccgggcagauga

SEQ ID NO: 934846 - RNA, 19 nt, Artificial Sequence
  Description of Artificial Sequence: Synthetic oligonucleotide
  Sense strand starting at position 392 of SEQ ID NO: 913535
gcuuuaaguguuuacucau

SEQ ID NO: 934847 - RNA, 19 nt, Artificial Sequence
  Description of Artificial Sequence: Synthetic oligonucleotide
  Antisense strand to SEQ ID NO: 934846
augaguaaacacuuaaagc

SEQ ID NO: 934848 - RNA, 19 nt, Artificial Sequence
  Description of Artificial Sequence: Synthetic oligonucleotide
  Sense strand starting at position 67 of SEQ ID NO: 913535
ggcagugacucaccugagu

SEQ ID NO: 934849 - RNA, 19 nt, Artificial Sequence
  Description of Artificial Sequence: Synthetic oligonucleotide
  Antisense strand to SEQ ID NO: 934848
acucaggugagucacugcc

SEQ ID NO: 934850 - RNA, 19 nt, Artificial Sequence
  Description of Artificial Sequence: Synthetic oligonucleotide
  Sense strand starting at position 355 of SEQ ID NO: 913535
uuuacagauucgccaaagu

SEQ ID NO: 934851 - RNA, 19 nt, Artificial Sequence
  Description of Artificial Sequence: Synthetic oligonucleotide
  Antisense strand to SEQ ID NO: 934850
acuuuggcgaaucuguaaa

SEQ ID NO: 934852 - RNA, 19 nt, Artificial Sequence
  Description of Artificial Sequence: Synthetic oligonucleotide
  Sense strand starting at position 1171 of SEQ ID NO: 913535
ugagacuggcccuguaagu

SEQ ID NO: 934853 - RNA, 19 nt, Artificial Sequence
  Description of Artificial Sequence: Synthetic oligonucleotide
  Antisense strand to SEQ ID NO: 934852
acuuacagggccagucuca

SEQ ID NO: 934854 - RNA, 19 nt, Artificial Sequence
  Description of Artificial Sequence: Synthetic oligonucleotide
  Sense strand starting at position 3098 of SEQ ID NO: 913535
cugguugaguccuucucca

SEQ ID NO: 934855 - RNA, 19 nt, Artificial Sequence
  Description of Artificial Sequence: Synthetic oligonucleotide
  Antisense strand to SEQ ID NO: 934854
uggagaaggacucaaccag

SEQ ID NO: 934856 - RNA, 19 nt, Artificial Sequence
  Description of Artificial Sequence: Synthetic oligonucleotide
  Sense strand starting at position 366 of SEQ ID NO: 913535
gccaaaguugugugaauac

SEQ ID NO: 934857 - RNA, 19 nt, Artificial Sequence
  Description of Artificial Sequence: Synthetic oligonucleotide
  Antisense strand to SEQ ID NO: 934856
guauucacacaacuuuggc

SEQ ID NO: 934858 - RNA, 19 nt, Artificial Sequence
  Description of Artificial Sequence: Synthetic oligonucleotide
  Sense strand starting at position 2851 of SEQ ID NO: 913535
gaggucgguuucuuccuaa

SEQ ID NO: 934859 - RNA, 19 nt, Artificial Sequence
  Description of Artificial Sequence: Synthetic oligonucleotide
  Antisense strand to SEQ ID NO: 934858
uuaggaagaaaccgaccuc

SEQ ID NO: 934860 - RNA, 19 nt, Artificial Sequence
  Description of Artificial Sequence: Synthetic oligonucleotide
  Sense strand starting at position 438 of SEQ ID NO: 913535
uguuaaagcuguguuggga

SEQ ID NO: 934861 - RNA, 19 nt, Artificial Sequence
  Description of Artificial Sequence: Synthetic oligonucleotide
  Antisense strand to SEQ ID NO: 934860
ucccaacacagcuuuaaca

SEQ ID NO: 934862 - RNA, 19 nt, Artificial Sequence
  Description of Artificial Sequence: Synthetic oligonucleotide
  Sense strand starting at position 391 of SEQ ID NO: 913535
ugcuuuaaguguuuacuca

SEQ ID NO: 934863 - RNA, 19 nt, Artificial Sequence
  Description of Artificial Sequence: Synthetic oligonucleotide
  Antisense strand to SEQ ID NO: 934862
ugaguaaacacuuaaagca

SEQ ID NO: 934864 - RNA, 19 nt, Artificial Sequence
  Description of Artificial Sequence: Synthetic oligonucleotide
  Sense strand starting at position 365 of SEQ ID NO: 913535
cgccaaaguugugugaaua

SEQ ID NO: 934865 - RNA, 19 nt, Artificial Sequence
  Description of Artificial Sequence: Synthetic oligonucleotide
  Antisense strand to SEQ ID NO: 934864
uauucacacaacuuuggcg

SEQ ID NO: 934866 - RNA, 19 nt, Artificial Sequence
  Description of Artificial Sequence: Synthetic oligonucleotide
  Sense strand starting at position 3191 of SEQ ID NO: 913535
uggaaaugguccgcaugcu

SEQ ID NO: 934867 - RNA, 19 nt, Artificial Sequence
  Description of Artificial Sequence: Synthetic oligonucleotide
  Antisense strand to SEQ ID NO: 934866
agcaugcggaccauuucca

SEQ ID NO: 934868 - RNA, 19 nt, Artificial Sequence
  Description of Artificial Sequence: Synthetic oligonucleotide
  Sense strand starting at position 1122 of SEQ ID NO: 913535
guacguaagccacaguguu

SEQ ID NO: 934869 - RNA, 19 nt, Artificial Sequence
  Description of Artificial Sequence: Synthetic oligonucleotide
  Antisense strand to SEQ ID NO: 934868
aacacuguggcuuacguac

SEQ ID NO: 934870 - RNA, 19 nt, Artificial Sequence
  Description of Artificial Sequence: Synthetic oligonucleotide
  Sense strand starting at position 1550 of SEQ ID NO: 913536
uaagguuaaguacaaguau

SEQ ID NO: 934871 - RNA, 19 nt, Artificial Sequence
  Description of Artificial Sequence: Synthetic oligonucleotide
  Antisense strand to SEQ ID NO: 934870
auacuuguacuuaaccuua

SEQ ID NO: 934872 - RNA, 19 nt, Artificial Sequence
  Description of Artificial Sequence: Synthetic oligonucleotide
  Sense strand starting at position 690 of SEQ ID NO: 913536
cuaauaauagcaggauuau

SEQ ID NO: 934873 - RNA, 19 nt, Artificial Sequence
  Description of Artificial Sequence: Synthetic oligonucleotide
  Antisense strand to SEQ ID NO: 934872
auaauccugcuauuauuag

SEQ ID NO: 934874 - RNA, 19 nt, Artificial Sequence
  Description of Artificial Sequence: Synthetic oligonucleotide
  Sense strand starting at position 2104 of SEQ ID NO: 913536
ggaagaauauucuaauuuc

SEQ ID NO: 934875 - RNA, 19 nt, Artificial Sequence
  Description of Artificial Sequence: Synthetic oligonucleotide
  Antisense strand to SEQ ID NO: 934874
gaaauuagaauauucuucc

SEQ ID NO: 934876 - RNA, 19 nt, Artificial Sequence
  Description of Artificial Sequence: Synthetic oligonucleotide
  Sense strand starting at position 3667 of SEQ ID NO: 913536
uuccucuuccuagagguaa

SEQ ID NO: 934877 - RNA, 19 nt, Artificial Sequence
  Description of Artificial Sequence: Synthetic oligonucleotide
  Antisense strand to SEQ ID NO: 934876
uuaccucuaggaagaggaa

SEQ ID NO: 934878 - RNA, 19 nt, Artificial Sequence
  Description of Artificial Sequence: Synthetic oligonucleotide
  Sense strand starting at position 3681 of SEQ ID NO: 913536
gguaacuagcacugaagaa

SEQ ID NO: 934879 - RNA, 19 nt, Artificial Sequence
  Description of Artificial Sequence: Synthetic oligonucleotide
  Antisense strand to SEQ ID NO: 934878
uucuucagugcuaguuacc

SEQ ID NO: 934880 - RNA, 19 nt, Artificial Sequence
  Description of Artificial Sequence: Synthetic oligonucleotide
  Sense strand starting at position 2020 of SEQ ID NO: 913536
guugaauugggagaucgua

SEQ ID NO: 934881 - RNA, 19 nt, Artificial Sequence
  Description of Artificial Sequence: Synthetic oligonucleotide
  Antisense strand to SEQ ID NO: 934880
uacgaucucccaauucaac

SEQ ID NO: 934882 - RNA, 19 nt, Artificial Sequence
  Description of Artificial Sequence: Synthetic oligonucleotide
  Sense strand starting at position 3749 of SEQ ID NO: 913536
agccucauacccgaauaau

SEQ ID NO: 934883 - RNA, 19 nt, Artificial Sequence
  Description of Artificial Sequence: Synthetic oligonucleotide
  Antisense strand to SEQ ID NO: 934882
auuauucggguaugaggcu

SEQ ID NO: 934884 - RNA, 19 nt, Artificial Sequence
  Description of Artificial Sequence: Synthetic oligonucleotide
  Sense strand starting at position 753 of SEQ ID NO: 913536
uuuagcaaacuuugauaga

SEQ ID NO: 934885 - RNA, 19 nt, Artificial Sequence
  Description of Artificial Sequence: Synthetic oligonucleotide
  Antisense strand to SEQ ID NO: 934884
ucuaucaaaguuugcuaaa

SEQ ID NO: 934886 - RNA, 19 nt, Artificial Sequence
  Description of Artificial Sequence: Synthetic oligonucleotide
  Sense strand starting at position 1752 of SEQ ID NO: 913536
uuaagugaauggcugaaua

SEQ ID NO: 934887 - RNA, 19 nt, Artificial Sequence
  Description of Artificial Sequence: Synthetic oligonucleotide
  Antisense strand to SEQ ID NO: 934886
uauucagccauucacuuaa

SEQ ID NO: 934888 - RNA, 19 nt, Artificial Sequence
  Description of Artificial Sequence: Synthetic oligonucleotide
  Sense strand starting at position 1460 of SEQ ID NO: 913536
acagaaugucucugaaagu

SEQ ID NO: 934889 - RNA, 19 nt, Artificial Sequence
  Description of Artificial Sequence: Synthetic oligonucleotide
  Antisense strand to SEQ ID NO: 934888
acuuucagagacauucugu

SEQ ID NO: 934890 - RNA, 19 nt, Artificial Sequence
  Description of Artificial Sequence: Synthetic oligonucleotide
  Sense strand starting at position 1851 of SEQ ID NO: 913536
acuuuaagcuaaguagaau

SEQ ID NO: 934891 - RNA, 19 nt, Artificial Sequence
  Description of Artificial Sequence: Synthetic oligonucleotide
  Antisense strand to SEQ ID NO: 934890
auucuacuuagcuuaaagu

SEQ ID NO: 934892 - RNA, 19 nt, Artificial Sequence
  Description of Artificial Sequence: Synthetic oligonucleotide
  Sense strand starting at position 3114 of SEQ ID NO: 913536
uccuaaggguucuucuaaa

SEQ ID NO: 934893 - RNA, 19 nt, Artificial Sequence
  Description of Artificial Sequence: Synthetic oligonucleotide
  Antisense strand to SEQ ID NO: 934892
uuuagaagaacccuuagga

SEQ ID NO: 934894 - RNA, 19 nt, Artificial Sequence
  Description of Artificial Sequence: Synthetic oligonucleotide
  Sense strand starting at position 2337 of SEQ ID NO: 913536
cuaaguauagcucauaggu

SEQ ID NO: 934895 - RNA, 19 nt, Artificial Sequence
  Description of Artificial Sequence: Synthetic oligonucleotide
  Antisense strand to SEQ ID NO: 934894
accuaugagcuauacuuag

SEQ ID NO: 934896 - RNA, 19 nt, Artificial Sequence
  Description of Artificial Sequence: Synthetic oligonucleotide
  Sense strand starting at position 1811 of SEQ ID NO: 913536
cauguauguguacaucuau

SEQ ID NO: 934897 - RNA, 19 nt, Artificial Sequence
  Description of Artificial Sequence: Synthetic oligonucleotide
  Antisense strand to SEQ ID NO: 934896
auagauguacacauacaug

SEQ ID NO: 934898 - RNA, 19 nt, Artificial Sequence
  Description of Artificial Sequence: Synthetic oligonucleotide
  Sense strand starting at position 2028 of SEQ ID NO: 913536
gggagaucguaacauuuca

SEQ ID NO: 934899 - RNA, 19 nt, Artificial Sequence
  Description of Artificial Sequence: Synthetic oligonucleotide
  Antisense strand to SEQ ID NO: 934898
ugaaauguuacgaucuccc

SEQ ID NO: 934900 - RNA, 19 nt, Artificial Sequence
  Description of Artificial Sequence: Synthetic oligonucleotide
  Sense strand starting at position 1763 of SEQ ID NO: 913536
gcugaauaauuugaguaua

SEQ ID NO: 934901 - RNA, 19 nt, Artificial Sequence
  Description of Artificial Sequence: Synthetic oligonucleotide
  Antisense strand to SEQ ID NO: 934900
uauacucaaauuauucagc

SEQ ID NO: 934902 - RNA, 19 nt, Artificial Sequence
  Description of Artificial Sequence: Synthetic oligonucleotide
  Sense strand starting at position 1527 of SEQ ID NO: 913536
gguagagacuuucuucugu

SEQ ID NO: 934903 - RNA, 19 nt, Artificial Sequence
  Description of Artificial Sequence: Synthetic oligonucleotide
  Antisense strand to SEQ ID NO: 934902
acagaagaaagucucuacc

SEQ ID NO: 934904 - RNA, 19 nt, Artificial Sequence
  Description of Artificial Sequence: Synthetic oligonucleotide
  Sense strand starting at position 2724 of SEQ ID NO: 913536
gcagguuugcuugaaucca

SEQ ID NO: 934905 - RNA, 19 nt, Artificial Sequence
  Description of Artificial Sequence: Synthetic oligonucleotide
  Antisense strand to SEQ ID NO: 934904
uggauucaagcaaaccugc

SEQ ID NO: 934906 - RNA, 19 nt, Artificial Sequence
  Description of Artificial Sequence: Synthetic oligonucleotide
  Sense strand starting at position 1642 of SEQ ID NO: 913536
uccucauauuggucuacuu

SEQ ID NO: 934907 - RNA, 19 nt, Artificial Sequence
  Description of Artificial Sequence: Synthetic oligonucleotide
  Antisense strand to SEQ ID NO: 934906
aaguagaccaauaugagga

SEQ ID NO: 934908 - RNA, 19 nt, Artificial Sequence
  Description of Artificial Sequence: Synthetic oligonucleotide
  Sense strand starting at position 444 of SEQ ID NO: 913536
gaggccagcuuggucaaua

SEQ ID NO: 934909 - RNA, 19 nt, Artificial Sequence
  Description of Artificial Sequence: Synthetic oligonucleotide
  Antisense strand to SEQ ID NO: 934908
uauugaccaagcuggccuc

SEQ ID NO: 934910 - RNA, 19 nt, Artificial Sequence
  Description of Artificial Sequence: Synthetic oligonucleotide
  Sense strand starting at position 1749 of SEQ ID NO: 913536
gccuuaagugaauggcuga

SEQ ID NO: 934911 - RNA, 19 nt, Artificial Sequence
  Description of Artificial Sequence: Synthetic oligonucleotide
  Antisense strand to SEQ ID NO: 934910
ucagccauucacuuaaggc

SEQ ID NO: 934912 - RNA, 19 nt, Artificial Sequence
  Description of Artificial Sequence: Synthetic oligonucleotide
  Sense strand starting at position 445 of SEQ ID NO: 913536
aggccagcuuggucaauau

SEQ ID NO: 934913 - RNA, 19 nt, Artificial Sequence
  Description of Artificial Sequence: Synthetic oligonucleotide
  Antisense strand to SEQ ID NO: 934912
auauugaccaagcuggccu

SEQ ID NO: 934914 - RNA, 19 nt, Artificial Sequence
  Description of Artificial Sequence: Synthetic oligonucleotide
  Sense strand starting at position 3033 of SEQ ID NO: 913536
cgugcucaucccuaaguaa

SEQ ID NO: 934915 - RNA, 19 nt, Artificial Sequence
  Description of Artificial Sequence: Synthetic oligonucleotide
  Antisense strand to SEQ ID NO: 934914
uuacuuagggaugagcacg

SEQ ID NO: 934916 - RNA, 19 nt, Artificial Sequence
  Description of Artificial Sequence: Synthetic oligonucleotide
  Sense strand starting at position 798 of SEQ ID NO: 913536
ugaauauacugggauccaa

SEQ ID NO: 934917 - RNA, 19 nt, Artificial Sequence
  Description of Artificial Sequence: Synthetic oligonucleotide
  Antisense strand to SEQ ID NO: 934916
uuggaucccaguauauuca

SEQ ID NO: 934918 - RNA, 19 nt, Artificial Sequence
  Description of Artificial Sequence: Synthetic oligonucleotide
  Sense strand starting at position 3791 of SEQ ID NO: 913536
ucaggaugaucagagacuu

SEQ ID NO: 934919 - RNA, 19 nt, Artificial Sequence
  Description of Artificial Sequence: Synthetic oligonucleotide
  Antisense strand to SEQ ID NO: 934918
aagucucugaucauccuga

SEQ ID NO: 934920 - RNA, 19 nt, Artificial Sequence
  Description of Artificial Sequence: Synthetic oligonucleotide
  Sense strand starting at position 3758 of SEQ ID NO: 913536
cccgaauaaugacaagaua

SEQ ID NO: 934921 - RNA, 19 nt, Artificial Sequence
  Description of Artificial Sequence: Synthetic oligonucleotide
  Antisense strand to SEQ ID NO: 934920
uaucuugucauuauucggg

SEQ ID NO: 934922 - RNA, 19 nt, Artificial Sequence
  Description of Artificial Sequence: Synthetic oligonucleotide
  Sense strand starting at position 32 of SEQ ID NO: 913536
agagaugucucauagaaca

SEQ ID NO: 934923 - RNA, 19 nt, Artificial Sequence
  Description of Artificial Sequence: Synthetic oligonucleotide
  Antisense strand to SEQ ID NO: 934922
uguucuaugagacaucucu

SEQ ID NO: 934924 - RNA, 19 nt, Artificial Sequence
  Description of Artificial Sequence: Synthetic oligonucleotide
  Sense strand starting at position 2721 of SEQ ID NO: 913536
guagcagguuugcuugaau

SEQ ID NO: 934925 - RNA, 19 nt, Artificial Sequence
  Description of Artificial Sequence: Synthetic oligonucleotide
  Antisense strand to SEQ ID NO: 934924
auucaagcaaaccugcuac

SEQ ID NO: 934926 - RNA, 19 nt, Artificial Sequence
  Description of Artificial Sequence: Synthetic oligonucleotide
  Sense strand starting at position 3662 of SEQ ID NO: 913536
cccgcuuccucuuccuaga

SEQ ID NO: 934927 - RNA, 19 nt, Artificial Sequence
  Description of Artificial Sequence: Synthetic oligonucleotide
  Antisense strand to SEQ ID NO: 934926
ucuaggaagaggaagcggg

SEQ ID NO: 934928 - RNA, 19 nt, Artificial Sequence
  Description of Artificial Sequence: Synthetic oligonucleotide
  Sense strand starting at position 754 of SEQ ID NO: 913536
uuagcaaacuuugauagaa

SEQ ID NO: 934929 - RNA, 19 nt, Artificial Sequence
  Description of Artificial Sequence: Synthetic oligonucleotide
  Antisense strand to SEQ ID NO: 934928
uucuaucaaaguuugcuaa

SEQ ID NO: 934930 - RNA, 19 nt, Artificial Sequence
  Description of Artificial Sequence: Synthetic oligonucleotide
  Sense strand starting at position 3678 of SEQ ID NO: 913536
agagguaacuagcacugaa

SEQ ID NO: 934931 - RNA, 19 nt, Artificial Sequence
  Description of Artificial Sequence: Synthetic oligonucleotide
  Antisense strand to SEQ ID NO: 934930
uucagugcuaguuaccucu

SEQ ID NO: 934932 - RNA, 19 nt, Artificial Sequence
  Description of Artificial Sequence: Synthetic oligonucleotide
  Sense strand starting at position 2858 of SEQ ID NO: 913536
ucacuugagcgcggaaagu

SEQ ID NO: 934933 - RNA, 19 nt, Artificial Sequence
  Description of Artificial Sequence: Synthetic oligonucleotide
  Antisense strand to SEQ ID NO: 934932
acuuuccgcgcucaaguga

SEQ ID NO: 934934 - RNA, 19 nt, Artificial Sequence
  Description of Artificial Sequence: Synthetic oligonucleotide
  Sense strand starting at position 3032 of SEQ ID NO: 913536
ucgugcucaucccuaagua

SEQ ID NO: 934935 - RNA, 19 nt, Artificial Sequence
  Description of Artificial Sequence: Synthetic oligonucleotide
  Antisense strand to SEQ ID NO: 934934
uacuuagggaugagcacga

SEQ ID NO: 934936 - RNA, 19 nt, Artificial Sequence
  Description of Artificial Sequence: Synthetic oligonucleotide
  Sense strand starting at position 2233 of SEQ ID NO: 913536
uucuuaucuuccuagggaa

SEQ ID NO: 934937 - RNA, 19 nt, Artificial Sequence
  Description of Artificial Sequence: Synthetic oligonucleotide
  Antisense strand to SEQ ID NO: 934936
uucccuaggaagauaagaa

SEQ ID NO: 934938 - RNA, 19 nt, Artificial Sequence
  Description of Artificial Sequence: Synthetic oligonucleotide
  Sense strand starting at position 1461 of SEQ ID NO: 913536
cagaaugucucugaaagua

SEQ ID NO: 934939 - RNA, 19 nt, Artificial Sequence
  Description of Artificial Sequence: Synthetic oligonucleotide
  Antisense strand to SEQ ID NO: 934938
uacuuucagagacauucug

SEQ ID NO: 934940 - RNA, 19 nt, Artificial Sequence
  Description of Artificial Sequence: Synthetic oligonucleotide
  Sense strand starting at position 3782 of SEQ ID NO: 913536
gacccugacucaggaugau

SEQ ID NO: 934941 - RNA, 19 nt, Artificial Sequence
  Description of Artificial Sequence: Synthetic oligonucleotide
  Antisense strand to SEQ ID NO: 934940
aucauccugagucaggguc

SEQ ID NO: 934942 - RNA, 19 nt, Artificial Sequence
  Description of Artificial Sequence: Synthetic oligonucleotide
  Sense strand starting at position 1991 of SEQ ID NO: 913536
cuuuauuuauccugcagua

SEQ ID NO: 934943 - RNA, 19 nt, Artificial Sequence
  Description of Artificial Sequence: Synthetic oligonucleotide
  Antisense strand to SEQ ID NO: 934942
uacugcaggauaaauaaag

SEQ ID NO: 934944 - RNA, 19 nt, Artificial Sequence
  Description of Artificial Sequence: Synthetic oligonucleotide
  Sense strand starting at position 3105 of SEQ ID NO: 913536
agaguucccuccuaagggu

SEQ ID NO: 934945 - RNA, 19 nt, Artificial Sequence
  Description of Artificial Sequence: Synthetic oligonucleotide
  Antisense strand to SEQ ID NO: 934944
acccuuaggagggaacucu

SEQ ID NO: 934946 - RNA, 19 nt, Artificial Sequence
  Description of Artificial Sequence: Synthetic oligonucleotide
  Sense strand starting at position 1651 of SEQ ID NO: 913536
uggucuacuuucuaaacga

SEQ ID NO: 934947 - RNA, 19 nt, Artificial Sequence
  Description of Artificial Sequence: Synthetic oligonucleotide
  Antisense strand to SEQ ID NO: 934946
ucguuuagaaaguagacca

SEQ ID NO: 934948 - RNA, 19 nt, Artificial Sequence
  Description of Artificial Sequence: Synthetic oligonucleotide
  Sense strand starting at position 2339 of SEQ ID NO: 913536
aaguauagcucauagguau

SEQ ID NO: 934949 - RNA, 19 nt, Artificial Sequence
  Description of Artificial Sequence: Synthetic oligonucleotide
  Antisense strand to SEQ ID NO: 934948
auaccuaugagcuauacuu

SEQ ID NO: 934950 - RNA, 19 nt, Artificial Sequence
  Description of Artificial Sequence: Synthetic oligonucleotide
  Sense strand starting at position 860 of SEQ ID NO: 913537
acuacuguacugcaaagaa

SEQ ID NO: 934951 - RNA, 19 nt, Artificial Sequence
  Description of Artificial Sequence: Synthetic oligonucleotide
  Antisense strand to SEQ ID NO: 934950
uucuuugcaguacaguagu

SEQ ID NO: 934952 - RNA, 19 nt, Artificial Sequence
  Description of Artificial Sequence: Synthetic oligonucleotide
  Sense strand starting at position 748 of SEQ ID NO: 913537
cucucaacccuaggagaau

SEQ ID NO: 934953 - RNA, 19 nt, Artificial Sequence
  Description of Artificial Sequence: Synthetic oligonucleotide
  Antisense strand to SEQ ID NO: 934952
auucuccuaggguugagag

SEQ ID NO: 934954 - RNA, 19 nt, Artificial Sequence
  Description of Artificial Sequence: Synthetic oligonucleotide
  Sense strand starting at position 3263 of SEQ ID NO: 913537
agaaauagcuaggcacaga

SEQ ID NO: 934955 - RNA, 19 nt, Artificial Sequence
  Description of Artificial Sequence: Synthetic oligonucleotide
  Antisense strand to SEQ ID NO: 934954
ucugugccuagcuauuucu

SEQ ID NO: 934956 - RNA, 19 nt, Artificial Sequence
  Description of Artificial Sequence: Synthetic oligonucleotide
  Sense strand starting at position 799 of SEQ ID NO: 913537
cugggaugacuuuggauuc

SEQ ID NO: 934957 - RNA, 19 nt, Artificial Sequence
  Description of Artificial Sequence: Synthetic oligonucleotide
  Antisense strand to SEQ ID NO: 934956
gaauccaaagucaucccag

SEQ ID NO: 934958 - RNA, 19 nt, Artificial Sequence
  Description of Artificial Sequence: Synthetic oligonucleotide
  Sense strand starting at position 229 of SEQ ID NO: 913537
ccagaaggauguucuuaac

SEQ ID NO: 934959 - RNA, 19 nt, Artificial Sequence
  Description of Artificial Sequence: Synthetic oligonucleotide
  Antisense strand to SEQ ID NO: 934958
guuaagaacauccuucugg

SEQ ID NO: 934960 - RNA, 19 nt, Artificial Sequence
  Description of Artificial Sequence: Synthetic oligonucleotide
  Sense strand starting at position 135 of SEQ ID NO: 913537
cggaaauggaaauguucua

SEQ ID NO: 934961 - RNA, 19 nt, Artificial Sequence
  Description of Artificial Sequence: Synthetic oligonucleotide
  Antisense strand to SEQ ID NO: 934960
uagaacauuuccauuuccg

SEQ ID NO: 934962 - RNA, 19 nt, Artificial Sequence
  Description of Artificial Sequence: Synthetic oligonucleotide
  Sense strand starting at position 719 of SEQ ID NO: 913537
uuagucauuccuggaggaa

SEQ ID NO: 934963 - RNA, 19 nt, Artificial Sequence
  Description of Artificial Sequence: Synthetic oligonucleotide
  Antisense strand to SEQ ID NO: 934962
uuccuccaggaaugacuaa

SEQ ID NO: 934964 - RNA, 19 nt, Artificial Sequence
  Description of Artificial Sequence: Synthetic oligonucleotide
  Sense strand starting at position 3520 of SEQ ID NO: 913537
cuaggacaguaguuuauaa

SEQ ID NO: 934965 - RNA, 19 nt, Artificial Sequence
  Description of Artificial Sequence: Synthetic oligonucleotide
  Antisense strand to SEQ ID NO: 934964
uuauaaacuacuguccuag

SEQ ID NO: 934966 - RNA, 19 nt, Artificial Sequence
  Description of Artificial Sequence: Synthetic oligonucleotide
  Sense strand starting at position 3859 of SEQ ID NO: 913537
gagagacugucuccacacu

SEQ ID NO: 934967 - RNA, 19 nt, Artificial Sequence
  Description of Artificial Sequence: Synthetic oligonucleotide
  Antisense strand to SEQ ID NO: 934966
aguguggagacagucucuc

SEQ ID NO: 934968 - RNA, 19 nt, Artificial Sequence
  Description of Artificial Sequence: Synthetic oligonucleotide
  Sense strand starting at position 3517 of SEQ ID NO: 913537
ggucuaggacaguaguuua

SEQ ID NO: 934969 - RNA, 19 nt, Artificial Sequence
  Description of Artificial Sequence: Synthetic oligonucleotide
  Antisense strand to SEQ ID NO: 934968
uaaacuacuguccuagacc

SEQ ID NO: 934970 - RNA, 19 nt, Artificial Sequence
  Description of Artificial Sequence: Synthetic oligonucleotide
  Sense strand starting at position 3661 of SEQ ID NO: 913537
ggguucguggaucauuaaa

SEQ ID NO: 934971 - RNA, 19 nt, Artificial Sequence
  Description of Artificial Sequence: Synthetic oligonucleotide
  Antisense strand to SEQ ID NO: 934970
uuuaaugauccacgaaccc

SEQ ID NO: 934972 - RNA, 19 nt, Artificial Sequence
  Description of Artificial Sequence: Synthetic oligonucleotide
  Sense strand starting at position 538 of SEQ ID NO: 913537
uggaaaguccugcacccau

SEQ ID NO: 934973 - RNA, 19 nt, Artificial Sequence
  Description of Artificial Sequence: Synthetic oligonucleotide
  Antisense strand to SEQ ID NO: 934972
augggugcaggacuuucca

SEQ ID NO: 934974 - RNA, 19 nt, Artificial Sequence
  Description of Artificial Sequence: Synthetic oligonucleotide
  Sense strand starting at position 1226 of SEQ ID NO: 913537
cugggagacucucccgaua

SEQ ID NO: 934975 - RNA, 19 nt, Artificial Sequence
  Description of Artificial Sequence: Synthetic oligonucleotide
  Antisense strand to SEQ ID NO: 934974
uaucgggagagucucccag

SEQ ID NO: 934976 - RNA, 19 nt, Artificial Sequence
  Description of Artificial Sequence: Synthetic oligonucleotide
  Sense strand starting at position 3658 of SEQ ID NO: 913537
ggaggguucguggaucauu

SEQ ID NO: 934977 - RNA, 19 nt, Artificial Sequence
  Description of Artificial Sequence: Synthetic oligonucleotide
  Antisense strand to SEQ ID NO: 934976
aaugauccacgaacccucc

SEQ ID NO: 934978 - RNA, 19 nt, Artificial Sequence
  Description of Artificial Sequence: Synthetic oligonucleotide
  Sense strand starting at position 123 of SEQ ID NO: 913537
auuaguacccaccggaaau

SEQ ID NO: 934979 - RNA, 19 nt, Artificial Sequence
  Description of Artificial Sequence: Synthetic oligonucleotide
  Antisense strand to SEQ ID NO: 934978
auuuccgguggguacuaau

SEQ ID NO: 934980 - RNA, 19 nt, Artificial Sequence
  Description of Artificial Sequence: Synthetic oligonucleotide
  Sense strand starting at position 806 of SEQ ID NO: 913537
gacuuuggauucuugaguu

SEQ ID NO: 934981 - RNA, 19 nt, Artificial Sequence
  Description of Artificial Sequence: Synthetic oligonucleotide
  Antisense strand to SEQ ID NO: 934980
aacucaagaauccaaaguc

SEQ ID NO: 934982 - RNA, 19 nt, Artificial Sequence
  Description of Artificial Sequence: Synthetic oligonucleotide
  Sense strand starting at position 3933 of SEQ ID NO: 913537
ucauauuaugucugaucua

SEQ ID NO: 934983 - RNA, 19 nt, Artificial Sequence
  Description of Artificial Sequence: Synthetic oligonucleotide
  Antisense strand to SEQ ID NO: 934982
uagaucagacauaauauga

SEQ ID NO: 934984 - RNA, 19 nt, Artificial Sequence
  Description of Artificial Sequence: Synthetic oligonucleotide
  Sense strand starting at position 2937 of SEQ ID NO: 913537
guguuuauugaaugaauuc

SEQ ID NO: 934985 - RNA, 19 nt, Artificial Sequence
  Description of Artificial Sequence: Synthetic oligonucleotide
  Antisense strand to SEQ ID NO: 934984
gaauucauucaauaaacac

SEQ ID NO: 934986 - RNA, 19 nt, Artificial Sequence
  Description of Artificial Sequence: Synthetic oligonucleotide
  Sense strand starting at position 3954 of SEQ ID NO: 913537
agcauuccuuagccagaaa

SEQ ID NO: 934987 - RNA, 19 nt, Artificial Sequence
  Description of Artificial Sequence: Synthetic oligonucleotide
  Antisense strand to SEQ ID NO: 934986
uuucuggcuaaggaaugcu

SEQ ID NO: 934988 - RNA, 19 nt, Artificial Sequence
  Description of Artificial Sequence: Synthetic oligonucleotide
  Sense strand starting at position 3306 of SEQ ID NO: 913537
ccaucaagccuguaagguu

SEQ ID NO: 934989 - RNA, 19 nt, Artificial Sequence
  Description of Artificial Sequence: Synthetic oligonucleotide
  Antisense strand to SEQ ID NO: 934988
aaccuuacaggcuugaugg

SEQ ID NO: 934990 - RNA, 19 nt, Artificial Sequence
  Description of Artificial Sequence: Synthetic oligonucleotide
  Sense strand starting at position 3821 of SEQ ID NO: 913537
gagggcaucugagucaucu

SEQ ID NO: 934991 - RNA, 19 nt, Artificial Sequence
  Description of Artificial Sequence: Synthetic oligonucleotide
  Antisense strand to SEQ ID NO: 934990
agaugacucagaugcccuc

SEQ ID NO: 934992 - RNA, 19 nt, Artificial Sequence
  Description of Artificial Sequence: Synthetic oligonucleotide
  Sense strand starting at position 3657 of SEQ ID NO: 913537
aggaggguucguggaucau

SEQ ID NO: 934993 - RNA, 19 nt, Artificial Sequence
  Description of Artificial Sequence: Synthetic oligonucleotide
  Antisense strand to SEQ ID NO: 934992
augauccacgaacccuccu

SEQ ID NO: 934994 - RNA, 19 nt, Artificial Sequence
  Description of Artificial Sequence: Synthetic oligonucleotide
  Sense strand starting at position 2974 of SEQ ID NO: 913537
gucuuuggguuucugaaag

SEQ ID NO: 934995 - RNA, 19 nt, Artificial Sequence
  Description of Artificial Sequence: Synthetic oligonucleotide
  Antisense strand to SEQ ID NO: 934994
cuuucagaaacccaaagac

SEQ ID NO: 934996 - RNA, 19 nt, Artificial Sequence
  Description of Artificial Sequence: Synthetic oligonucleotide
  Sense strand starting at position 608 of SEQ ID NO: 913537
gaagcaucuccugggaugu

SEQ ID NO: 934997 - RNA, 19 nt, Artificial Sequence
  Description of Artificial Sequence: Synthetic oligonucleotide
  Antisense strand to SEQ ID NO: 934996
acaucccaggagaugcuuc

SEQ ID NO: 934998 - RNA, 19 nt, Artificial Sequence
  Description of Artificial Sequence: Synthetic oligonucleotide
  Sense strand starting at position 3831 of SEQ ID NO: 913537
gagucaucuggccaaggcu

SEQ ID NO: 934999 - RNA, 19 nt, Artificial Sequence
  Description of Artificial Sequence: Synthetic oligonucleotide
  Antisense strand to SEQ ID NO: 934998
agccuuggccagaugacuc

SEQ ID NO: 935000 - RNA, 19 nt, Artificial Sequence
  Description of Artificial Sequence: Synthetic oligonucleotide
  Sense strand starting at position 3598 of SEQ ID NO: 913537
auggaucuguugcuuauaa

SEQ ID NO: 935001 - RNA, 19 nt, Artificial Sequence
  Description of Artificial Sequence: Synthetic oligonucleotide
  Antisense strand to SEQ ID NO: 935000
uuauaagcaacagauccau

SEQ ID NO: 935002 - RNA, 19 nt, Artificial Sequence
  Description of Artificial Sequence: Synthetic oligonucleotide
  Sense strand starting at position 3599 of SEQ ID NO: 913537
uggaucuguugcuuauaaa

SEQ ID NO: 935003 - RNA, 19 nt, Artificial Sequence
  Description of Artificial Sequence: Synthetic oligonucleotide
  Antisense strand to SEQ ID NO: 935002
uuuauaagcaacagaucca

SEQ ID NO: 935004 - RNA, 19 nt, Artificial Sequence
  Description of Artificial Sequence: Synthetic oligonucleotide
  Sense strand starting at position 3846 of SEQ ID NO: 913537
ggcucuggcaccugagaga

SEQ ID NO: 935005 - RNA, 19 nt, Artificial Sequence
  Description of Artificial Sequence: Synthetic oligonucleotide
  Antisense strand to SEQ ID NO: 935004
ucucucaggugccagagcc

SEQ ID NO: 935006 - RNA, 19 nt, Artificial Sequence
  Description of Artificial Sequence: Synthetic oligonucleotide
  Sense strand starting at position 351 of SEQ ID NO: 913537
gguacucugugacucucaa

SEQ ID NO: 935007 - RNA, 19 nt, Artificial Sequence
  Description of Artificial Sequence: Synthetic oligonucleotide
  Antisense strand to SEQ ID NO: 935006
uugagagucacagaguacc

SEQ ID NO: 935008 - RNA, 19 nt, Artificial Sequence
  Description of Artificial Sequence: Synthetic oligonucleotide
  Sense strand starting at position 3940 of SEQ ID NO: 913537
augucugaucuaugagcau

SEQ ID NO: 935009 - RNA, 19 nt, Artificial Sequence
  Description of Artificial Sequence: Synthetic oligonucleotide
  Antisense strand to SEQ ID NO: 935008
augcucauagaucagacau

SEQ ID NO: 935010 - RNA, 19 nt, Artificial Sequence
  Description of Artificial Sequence: Synthetic oligonucleotide
  Sense strand starting at position 2367 of SEQ ID NO: 913537
cgcgcugauggcgagauuu

SEQ ID NO: 935011 - RNA, 19 nt, Artificial Sequence
  Description of Artificial Sequence: Synthetic oligonucleotide
  Antisense strand to SEQ ID NO: 935010
aaaucucgccaucagcgcg

SEQ ID NO: 935012 - RNA, 19 nt, Artificial Sequence
  Description of Artificial Sequence: Synthetic oligonucleotide
  Sense strand starting at position 2815 of SEQ ID NO: 913537
cuugaucagcaaugcucaa

SEQ ID NO: 935013 - RNA, 19 nt, Artificial Sequence
  Description of Artificial Sequence: Synthetic oligonucleotide
  Antisense strand to SEQ ID NO: 935012
uugagcauugcugaucaag

SEQ ID NO: 935014 - RNA, 19 nt, Artificial Sequence
  Description of Artificial Sequence: Synthetic oligonucleotide
  Sense strand starting at position 348 of SEQ ID NO: 913537
ugagguacucugugacucu

SEQ ID NO: 935015 - RNA, 19 nt, Artificial Sequence
  Description of Artificial Sequence: Synthetic oligonucleotide
  Antisense strand to SEQ ID NO: 935014
agagucacagaguaccuca

SEQ ID NO: 935016 - RNA, 19 nt, Artificial Sequence
  Description of Artificial Sequence: Synthetic oligonucleotide
  Sense strand starting at position 3932 of SEQ ID NO: 913537
gucauauuaugucugaucu

SEQ ID NO: 935017 - RNA, 19 nt, Artificial Sequence
  Description of Artificial Sequence: Synthetic oligonucleotide
  Antisense strand to SEQ ID NO: 935016
agaucagacauaauaugac

SEQ ID NO: 935018 - RNA, 19 nt, Artificial Sequence
  Description of Artificial Sequence: Synthetic oligonucleotide
  Sense strand starting at position 3930 of SEQ ID NO: 913537
uugucauauuaugucugau

SEQ ID NO: 935019 - RNA, 19 nt, Artificial Sequence
  Description of Artificial Sequence: Synthetic oligonucleotide
  Antisense strand to SEQ ID NO: 935018
aucagacauaauaugacaa

SEQ ID NO: 935020 - RNA, 19 nt, Artificial Sequence
  Description of Artificial Sequence: Synthetic oligonucleotide
  Sense strand starting at position 581 of SEQ ID NO: 913537
ucaagaauguguccuguca

SEQ ID NO: 935021 - RNA, 19 nt, Artificial Sequence
  Description of Artificial Sequence: Synthetic oligonucleotide
  Antisense strand to SEQ ID NO: 935020
ugacaggacacauucuuga

SEQ ID NO: 935022 - RNA, 19 nt, Artificial Sequence
  Description of Artificial Sequence: Synthetic oligonucleotide
  Sense strand starting at position 1573 of SEQ ID NO: 913537
agaaacuuucuccgccuua

SEQ ID NO: 935023 - RNA, 19 nt, Artificial Sequence
  Description of Artificial Sequence: Synthetic oligonucleotide
  Antisense strand to SEQ ID NO: 935022
uaaggcggagaaaguuucu

SEQ ID NO: 935024 - RNA, 19 nt, Artificial Sequence
  Description of Artificial Sequence: Synthetic oligonucleotide
  Sense strand starting at position 2967 of SEQ ID NO: 913537
gagugaggucuuuggguuu

SEQ ID NO: 935025 - RNA, 19 nt, Artificial Sequence
  Description of Artificial Sequence: Synthetic oligonucleotide
  Antisense strand to SEQ ID NO: 935024
aaacccaaagaccucacuc

SEQ ID NO: 935026 - RNA, 19 nt, Artificial Sequence
  Description of Artificial Sequence: Synthetic oligonucleotide
  Sense strand starting at position 810 of SEQ ID NO: 913537
uuggauucuugaguugcuu

SEQ ID NO: 935027 - RNA, 19 nt, Artificial Sequence
  Description of Artificial Sequence: Synthetic oligonucleotide
  Antisense strand to SEQ ID NO: 935026
aagcaacucaagaauccaa

SEQ ID NO: 935028 - RNA, 19 nt, Artificial Sequence
  Description of Artificial Sequence: Synthetic oligonucleotide
  Sense strand starting at position 416 of SEQ ID NO: 913537
guuccaaaucuccgucaau

SEQ ID NO: 935029 - RNA, 19 nt, Artificial Sequence
  Description of Artificial Sequence: Synthetic oligonucleotide
  Antisense strand to SEQ ID NO: 935028
auugacggagauuuggaac

SEQ ID NO: 935030 - RNA, 19 nt, Artificial Sequence
  Description of Artificial Sequence: Synthetic oligonucleotide
  Sense strand starting at position 690 of SEQ ID NO: 913538
agaauacuacgugauucca

SEQ ID NO: 935031 - RNA, 19 nt, Artificial Sequence
  Description of Artificial Sequence: Synthetic oligonucleotide
  Antisense strand to SEQ ID NO: 935030
uggaaucacguaguauucu

SEQ ID NO: 935032 - RNA, 19 nt, Artificial Sequence
  Description of Artificial Sequence: Synthetic oligonucleotide
  Sense strand starting at position 3455 of SEQ ID NO: 913538
gggugauacacugggauau

SEQ ID NO: 935033 - RNA, 19 nt, Artificial Sequence
  Description of Artificial Sequence: Synthetic oligonucleotide
  Antisense strand to SEQ ID NO: 935032
auaucccaguguaucaccc

SEQ ID NO: 935034 - RNA, 19 nt, Artificial Sequence
  Description of Artificial Sequence: Synthetic oligonucleotide
  Sense strand starting at position 3682 of SEQ ID NO: 913538
gcaaguugugaauaaauag

SEQ ID NO: 935035 - RNA, 19 nt, Artificial Sequence
  Description of Artificial Sequence: Synthetic oligonucleotide
  Antisense strand to SEQ ID NO: 935034
cuauuuauucacaacuugc

SEQ ID NO: 935036 - RNA, 19 nt, Artificial Sequence
  Description of Artificial Sequence: Synthetic oligonucleotide
  Sense strand starting at position 1590 of SEQ ID NO: 913538
aaguuuauccacugagagg

SEQ ID NO: 935037 - RNA, 19 nt, Artificial Sequence
  Description of Artificial Sequence: Synthetic oligonucleotide
  Antisense strand to SEQ ID NO: 935036
ccucucaguggauaaacuu

SEQ ID NO: 935038 - RNA, 19 nt, Artificial Sequence
  Description of Artificial Sequence: Synthetic oligonucleotide
  Sense strand starting at position 2101 of SEQ ID NO: 913538
guguuuaaaguauccgugu

SEQ ID NO: 935039 - RNA, 19 nt, Artificial Sequence
  Description of Artificial Sequence: Synthetic oligonucleotide
  Antisense strand to SEQ ID NO: 935038
acacggauacuuuaaacac

SEQ ID NO: 935040 - RNA, 19 nt, Artificial Sequence
  Description of Artificial Sequence: Synthetic oligonucleotide
  Sense strand starting at position 1567 of SEQ ID NO: 913538
ugacgaggucaccacugau

SEQ ID NO: 935041 - RNA, 19 nt, Artificial Sequence
  Description of Artificial Sequence: Synthetic oligonucleotide
  Antisense strand to SEQ ID NO: 935040
aucaguggugaccucguca

SEQ ID NO: 935042 - RNA, 19 nt, Artificial Sequence
  Description of Artificial Sequence: Synthetic oligonucleotide
  Sense strand starting at position 2378 of SEQ ID NO: 913538
ucaucuguugaaugaggga

SEQ ID NO: 935043 - RNA, 19 nt, Artificial Sequence
  Description of Artificial Sequence: Synthetic oligonucleotide
  Antisense strand to SEQ ID NO: 935042
ucccucauucaacagauga

SEQ ID NO: 935044 - RNA, 19 nt, Artificial Sequence
  Description of Artificial Sequence: Synthetic oligonucleotide
  Sense strand starting at position 3885 of SEQ ID NO: 913538
ggcuauuuauucucaguuu

SEQ ID NO: 935045 - RNA, 19 nt, Artificial Sequence
  Description of Artificial Sequence: Synthetic oligonucleotide
  Antisense strand to SEQ ID NO: 935044
aaacugagaauaaauagcc

SEQ ID NO: 935046 - RNA, 19 nt, Artificial Sequence
  Description of Artificial Sequence: Synthetic oligonucleotide
  Sense strand starting at position 3883 of SEQ ID NO: 913538
cuggcuauuuauucucagu

SEQ ID NO: 935047 - RNA, 19 nt, Artificial Sequence
  Description of Artificial Sequence: Synthetic oligonucleotide
  Antisense strand to SEQ ID NO: 935046
acugagaauaaauagccag

SEQ ID NO: 935048 - RNA, 19 nt, Artificial Sequence
  Description of Artificial Sequence: Synthetic oligonucleotide
  Sense strand starting at position 2637 of SEQ ID NO: 913538
cugggaagcucuccagaaa

SEQ ID NO: 935049 - RNA, 19 nt, Artificial Sequence
  Description of Artificial Sequence: Synthetic oligonucleotide
  Antisense strand to SEQ ID NO: 935048
uuucuggagagcuucccag

SEQ ID NO: 935050 - RNA, 19 nt, Artificial Sequence
  Description of Artificial Sequence: Synthetic oligonucleotide
  Sense strand starting at position 698 of SEQ ID NO: 913538
acgugauuccauuaacaug

SEQ ID NO: 935051 - RNA, 19 nt, Artificial Sequence
  Description of Artificial Sequence: Synthetic oligonucleotide
  Antisense strand to SEQ ID NO: 935050
cauguuaauggaaucacgu

SEQ ID NO: 935052 - RNA, 19 nt, Artificial Sequence
  Description of Artificial Sequence: Synthetic oligonucleotide
  Sense strand starting at position 664 of SEQ ID NO: 913538
gggugugucccacaaacaa

SEQ ID NO: 935053 - RNA, 19 nt, Artificial Sequence
  Description of Artificial Sequence: Synthetic oligonucleotide
  Antisense strand to SEQ ID NO: 935052
uuguuugugggacacaccc

SEQ ID NO: 935054 - RNA, 19 nt, Artificial Sequence
  Description of Artificial Sequence: Synthetic oligonucleotide
  Sense strand starting at position 972 of SEQ ID NO: 913538
cuucuaaacugguuggaac

SEQ ID NO: 935055 - RNA, 19 nt, Artificial Sequence
  Description of Artificial Sequence: Synthetic oligonucleotide
  Antisense strand to SEQ ID NO: 935054
guuccaaccaguuuagaag

SEQ ID NO: 935056 - RNA, 19 nt, Artificial Sequence
  Description of Artificial Sequence: Synthetic oligonucleotide
  Sense strand starting at position 3926 of SEQ ID NO: 913538
uucucauuugucuggcauc

SEQ ID NO: 935057 - RNA, 19 nt, Artificial Sequence
  Description of Artificial Sequence: Synthetic oligonucleotide
  Antisense strand to SEQ ID NO: 935056
gaugccagacaaaugagaa

SEQ ID NO: 935058 - RNA, 19 nt, Artificial Sequence
  Description of Artificial Sequence: Synthetic oligonucleotide
  Sense strand starting at position 168 of SEQ ID NO: 913538
augacucagucauucuaua

SEQ ID NO: 935059 - RNA, 19 nt, Artificial Sequence
  Description of Artificial Sequence: Synthetic oligonucleotide
  Antisense strand to SEQ ID NO: 935058
uauagaaugacugagucau

SEQ ID NO: 935060 - RNA, 19 nt, Artificial Sequence
  Description of Artificial Sequence: Synthetic oligonucleotide
  Sense strand starting at position 1723 of SEQ ID NO: 913538
caggcucaucccugagaga

SEQ ID NO: 935061 - RNA, 19 nt, Artificial Sequence
  Description of Artificial Sequence: Synthetic oligonucleotide
  Antisense strand to SEQ ID NO: 935060
ucucucagggaugagccug

SEQ ID NO: 935062 - RNA, 19 nt, Artificial Sequence
  Description of Artificial Sequence: Synthetic oligonucleotide
  Sense strand starting at position 688 of SEQ ID NO: 913538
ugagaauacuacgugauuc

SEQ ID NO: 935063 - RNA, 19 nt, Artificial Sequence
  Description of Artificial Sequence: Synthetic oligonucleotide
  Antisense strand to SEQ ID NO: 935062
gaaucacguaguauucuca

SEQ ID NO: 935064 - RNA, 19 nt, Artificial Sequence
  Description of Artificial Sequence: Synthetic oligonucleotide
  Sense strand starting at position 173 of SEQ ID NO: 913538
ucagucauucuauagcuga

SEQ ID NO: 935065 - RNA, 19 nt, Artificial Sequence
  Description of Artificial Sequence: Synthetic oligonucleotide
  Antisense strand to SEQ ID NO: 935064
ucagcuauagaaugacuga

SEQ ID NO: 935066 - RNA, 19 nt, Artificial Sequence
  Description of Artificial Sequence: Synthetic oligonucleotide
  Sense strand starting at position 2369 of SEQ ID NO: 913538
aggaauuccucaucuguug

SEQ ID NO: 935067 - RNA, 19 nt, Artificial Sequence
  Description of Artificial Sequence: Synthetic oligonucleotide
  Antisense strand to SEQ ID NO: 935066
caacagaugaggaauuccu

SEQ ID NO: 935068 - RNA, 19 nt, Artificial Sequence
  Description of Artificial Sequence: Synthetic oligonucleotide
  Sense strand starting at position 687 of SEQ ID NO: 913538
cugagaauacuacgugauu

SEQ ID NO: 935069 - RNA, 19 nt, Artificial Sequence
  Description of Artificial Sequence: Synthetic oligonucleotide
  Antisense strand to SEQ ID NO: 935068
aaucacguaguauucucag

SEQ ID NO: 935070 - RNA, 19 nt, Artificial Sequence
  Description of Artificial Sequence: Synthetic oligonucleotide
  Sense strand starting at position 1570 of SEQ ID NO: 913538
cgaggucaccacugauuaa

SEQ ID NO: 935071 - RNA, 19 nt, Artificial Sequence
  Description of Artificial Sequence: Synthetic oligonucleotide
  Antisense strand to SEQ ID NO: 935070
uuaaucaguggugaccucg

SEQ ID NO: 935072 - RNA, 19 nt, Artificial Sequence
  Description of Artificial Sequence: Synthetic oligonucleotide
  Sense strand starting at position 821 of SEQ ID NO: 913538
ggaaauguucuaugguuau

SEQ ID NO: 935073 - RNA, 19 nt, Artificial Sequence
  Description of Artificial Sequence: Synthetic oligonucleotide
  Antisense strand to SEQ ID NO: 935072
auaaccauagaacauuucc

SEQ ID NO: 935074 - RNA, 19 nt, Artificial Sequence
  Description of Artificial Sequence: Synthetic oligonucleotide
  Sense strand starting at position 3446 of SEQ ID NO: 913538
gcugaucaugggugauaca

SEQ ID NO: 935075 - RNA, 19 nt, Artificial Sequence
  Description of Artificial Sequence: Synthetic oligonucleotide
  Antisense strand to SEQ ID NO: 935074
uguaucacccaugaucagc

SEQ ID NO: 935076 - RNA, 19 nt, Artificial Sequence
  Description of Artificial Sequence: Synthetic oligonucleotide
  Sense strand starting at position 3445 of SEQ ID NO: 913538
ggcugaucaugggugauac

SEQ ID NO: 935077 - RNA, 19 nt, Artificial Sequence
  Description of Artificial Sequence: Synthetic oligonucleotide
  Antisense strand to SEQ ID NO: 935076
guaucacccaugaucagcc

SEQ ID NO: 935078 - RNA, 19 nt, Artificial Sequence
  Description of Artificial Sequence: Synthetic oligonucleotide
  Sense strand starting at position 3435 of SEQ ID NO: 913538
caaauuauguggcugauca

SEQ ID NO: 935079 - RNA, 19 nt, Artificial Sequence
  Description of Artificial Sequence: Synthetic oligonucleotide
  Antisense strand to SEQ ID NO: 935078
ugaucagccacauaauuug

SEQ ID NO: 935080 - RNA, 19 nt, Artificial Sequence
  Description of Artificial Sequence: Synthetic oligonucleotide
  Sense strand starting at position 120 of SEQ ID NO: 913538
augguaugguugguaauga

SEQ ID NO: 935081 - RNA, 19 nt, Artificial Sequence
  Description of Artificial Sequence: Synthetic oligonucleotide
  Antisense strand to SEQ ID NO: 935080
ucauuaccaaccauaccau

SEQ ID NO: 935082 - RNA, 19 nt, Artificial Sequence
  Description of Artificial Sequence: Synthetic oligonucleotide
  Sense strand starting at position 3401 of SEQ ID NO: 913538
uaauuugaauguggagaga

SEQ ID NO: 935083 - RNA, 19 nt, Artificial Sequence
  Description of Artificial Sequence: Synthetic oligonucleotide
  Antisense strand to SEQ ID NO: 935082
ucucuccacauucaaauua

SEQ ID NO: 935084 - RNA, 19 nt, Artificial Sequence
  Description of Artificial Sequence: Synthetic oligonucleotide
  Sense strand starting at position 2443 of SEQ ID NO: 913538
uuucgugaguggaaagaga

SEQ ID NO: 935085 - RNA, 19 nt, Artificial Sequence
  Description of Artificial Sequence: Synthetic oligonucleotide
  Antisense strand to SEQ ID NO: 935084
ucucuuuccacucacgaaa

SEQ ID NO: 935086 - RNA, 19 nt, Artificial Sequence
  Description of Artificial Sequence: Synthetic oligonucleotide
  Sense strand starting at position 82 of SEQ ID NO: 913538
gacuccauguugguuaaau

SEQ ID NO: 935087 - RNA, 19 nt, Artificial Sequence
  Description of Artificial Sequence: Synthetic oligonucleotide
  Antisense strand to SEQ ID NO: 935086
auuuaaccaacauggaguc

SEQ ID NO: 935088 - RNA, 19 nt, Artificial Sequence
  Description of Artificial Sequence: Synthetic oligonucleotide
  Sense strand starting at position 3436 of SEQ ID NO: 913538
aaauuauguggcugaucau

SEQ ID NO: 935089 - RNA, 19 nt, Artificial Sequence
  Description of Artificial Sequence: Synthetic oligonucleotide
  Antisense strand to SEQ ID NO: 935088
augaucagccacauaauuu

SEQ ID NO: 935090 - RNA, 19 nt, Artificial Sequence
  Description of Artificial Sequence: Synthetic oligonucleotide
  Sense strand starting at position 81 of SEQ ID NO: 913538
ugacuccauguugguuaaa

SEQ ID NO: 935091 - RNA, 19 nt, Artificial Sequence
  Description of Artificial Sequence: Synthetic oligonucleotide
  Antisense strand to SEQ ID NO: 935090
uuuaaccaacauggaguca

SEQ ID NO: 935092 - RNA, 19 nt, Artificial Sequence
  Description of Artificial Sequence: Synthetic oligonucleotide
  Sense strand starting at position 3939 of SEQ ID NO: 913538
ggcaucucuaguggaauca

SEQ ID NO: 935093 - RNA, 19 nt, Artificial Sequence
  Description of Artificial Sequence: Synthetic oligonucleotide
  Antisense strand to SEQ ID NO: 935092
ugauuccacuagagaugcc

SEQ ID NO: 935094 - RNA, 19 nt, Artificial Sequence
  Description of Artificial Sequence: Synthetic oligonucleotide
  Sense strand starting at position 845 of SEQ ID NO: 913538
gauauaucuggugguucca

SEQ ID NO: 935095 - RNA, 19 nt, Artificial Sequence
  Description of Artificial Sequence: Synthetic oligonucleotide
  Antisense strand to SEQ ID NO: 935094
uggaaccaccagauauauc

SEQ ID NO: 935096 - RNA, 19 nt, Artificial Sequence
  Description of Artificial Sequence: Synthetic oligonucleotide
  Sense strand starting at position 651 of SEQ ID NO: 913538
caugaaauagcaugggugu

SEQ ID NO: 935097 - RNA, 19 nt, Artificial Sequence
  Description of Artificial Sequence: Synthetic oligonucleotide
  Antisense strand to SEQ ID NO: 935096
acacccaugcuauuucaug

SEQ ID NO: 935098 - RNA, 19 nt, Artificial Sequence
  Description of Artificial Sequence: Synthetic oligonucleotide
  Sense strand starting at position 83 of SEQ ID NO: 913538
acuccauguugguuaaauu

SEQ ID NO: 935099 - RNA, 19 nt, Artificial Sequence
  Description of Artificial Sequence: Synthetic oligonucleotide
  Antisense strand to SEQ ID NO: 935098
aauuuaaccaacauggagu

SEQ ID NO: 935100 - RNA, 19 nt, Artificial Sequence
  Description of Artificial Sequence: Synthetic oligonucleotide
  Sense strand starting at position 3519 of SEQ ID NO: 913538
cuguguuggguuuaauauc

SEQ ID NO: 935101 - RNA, 19 nt, Artificial Sequence
  Description of Artificial Sequence: Synthetic oligonucleotide
  Antisense strand to SEQ ID NO: 935100
gauauuaaacccaacacag

SEQ ID NO: 935102 - RNA, 19 nt, Artificial Sequence
  Description of Artificial Sequence: Synthetic oligonucleotide
  Sense strand starting at position 855 of SEQ ID NO: 913538
gugguuccacaggguaaua

SEQ ID NO: 935103 - RNA, 19 nt, Artificial Sequence
  Description of Artificial Sequence: Synthetic oligonucleotide
  Antisense strand to SEQ ID NO: 935102
uauuacccuguggaaccac

SEQ ID NO: 935104 - RNA, 19 nt, Artificial Sequence
  Description of Artificial Sequence: Synthetic oligonucleotide
  Sense strand starting at position 854 of SEQ ID NO: 913538
ggugguuccacaggguaau

SEQ ID NO: 935105 - RNA, 19 nt, Artificial Sequence
  Description of Artificial Sequence: Synthetic oligonucleotide
  Antisense strand to SEQ ID NO: 935104
auuacccuguggaaccacc

SEQ ID NO: 935106 - RNA, 19 nt, Artificial Sequence
  Description of Artificial Sequence: Synthetic oligonucleotide
  Sense strand starting at position 529 of SEQ ID NO: 913538
ggcccacaguauucuuaau

SEQ ID NO: 935107 - RNA, 19 nt, Artificial Sequence
  Description of Artificial Sequence: Synthetic oligonucleotide
  Antisense strand to SEQ ID NO: 935106
auuaagaauacugugggcc

SEQ ID NO: 935108 - RNA, 19 nt, Artificial Sequence
  Description of Artificial Sequence: Synthetic oligonucleotide
  Sense strand starting at position 3726 of SEQ ID NO: 913538
uggugaucccaugguaagu

SEQ ID NO: 935109 - RNA, 19 nt, Artificial Sequence
  Description of Artificial Sequence: Synthetic oligonucleotide
  Antisense strand to SEQ ID NO: 935108
acuuaccaugggaucacca

SEQ ID NO: 935110 - RNA, 19 nt, Artificial Sequence
  Description of Artificial Sequence: Synthetic oligonucleotide
  Sense strand starting at position 3843 of SEQ ID NO: 913539
augcgcgacaguuuauauu

SEQ ID NO: 935111 - RNA, 19 nt, Artificial Sequence
  Description of Artificial Sequence: Synthetic oligonucleotide
  Antisense strand to SEQ ID NO: 935110
aauauaaacugucgcgcau

SEQ ID NO: 935112 - RNA, 19 nt, Artificial Sequence
  Description of Artificial Sequence: Synthetic oligonucleotide
  Sense strand starting at position 3026 of SEQ ID NO: 913539
cuagguaaauucccaagga

SEQ ID NO: 935113 - RNA, 19 nt, Artificial Sequence
  Description of Artificial Sequence: Synthetic oligonucleotide
  Antisense strand to SEQ ID NO: 935112
uccuugggaauuuaccuag

SEQ ID NO: 935114 - RNA, 19 nt, Artificial Sequence
  Description of Artificial Sequence: Synthetic oligonucleotide
  Sense strand starting at position 3080 of SEQ ID NO: 913539
cccagcuuggucucgcaua

SEQ ID NO: 935115 - RNA, 19 nt, Artificial Sequence
  Description of Artificial Sequence: Synthetic oligonucleotide
  Antisense strand to SEQ ID NO: 935114
uaugcgagaccaagcuggg

SEQ ID NO: 935116 - RNA, 19 nt, Artificial Sequence
  Description of Artificial Sequence: Synthetic oligonucleotide
  Sense strand starting at position 3060 of SEQ ID NO: 913539
aggccaagucaggauucua

SEQ ID NO: 935117 - RNA, 19 nt, Artificial Sequence
  Description of Artificial Sequence: Synthetic oligonucleotide
  Antisense strand to SEQ ID NO: 935116
uagaauccugacuuggccu

SEQ ID NO: 935118 - RNA, 19 nt, Artificial Sequence
  Description of Artificial Sequence: Synthetic oligonucleotide
  Sense strand starting at position 1200 of SEQ ID NO: 913539
ggaggaauguccuucacag

SEQ ID NO: 935119 - RNA, 19 nt, Artificial Sequence
  Description of Artificial Sequence: Synthetic oligonucleotide
  Antisense strand to SEQ ID NO: 935118
cugugaaggacauuccucc

SEQ ID NO: 935120 - RNA, 19 nt, Artificial Sequence
  Description of Artificial Sequence: Synthetic oligonucleotide
  Sense strand starting at position 2255 of SEQ ID NO: 913539
guacgagaugaccacagua

SEQ ID NO: 935121 - RNA, 19 nt, Artificial Sequence
  Description of Artificial Sequence: Synthetic oligonucleotide
  Antisense strand to SEQ ID NO: 935120
uacuguggucaucucguac

SEQ ID NO: 935122 - RNA, 19 nt, Artificial Sequence
  Description of Artificial Sequence: Synthetic oligonucleotide
  Sense strand starting at position 3145 of SEQ ID NO: 913539
gcuagugugauugaagaaa

SEQ ID NO: 935123 - RNA, 19 nt, Artificial Sequence
  Description of Artificial Sequence: Synthetic oligonucleotide
  Antisense strand to SEQ ID NO: 935122
uuucuucaaucacacuagc

SEQ ID NO: 935124 - RNA, 19 nt, Artificial Sequence
  Description of Artificial Sequence: Synthetic oligonucleotide
  Sense strand starting at position 2700 of SEQ ID NO: 913539
cgucgugcuauuccuaaua

SEQ ID NO: 935125 - RNA, 19 nt, Artificial Sequence
  Description of Artificial Sequence: Synthetic oligonucleotide
  Antisense strand to SEQ ID NO: 935124
uauuaggaauagcacgacg

SEQ ID NO: 935126 - RNA, 19 nt, Artificial Sequence
  Description of Artificial Sequence: Synthetic oligonucleotide
  Sense strand starting at position 3017 of SEQ ID NO: 913539
uggagagggcuagguaaau

SEQ ID NO: 935127 - RNA, 19 nt, Artificial Sequence
  Description of Artificial Sequence: Synthetic oligonucleotide
  Antisense strand to SEQ ID NO: 935126
auuuaccuagcccucucca

SEQ ID NO: 935128 - RNA, 19 nt, Artificial Sequence
  Description of Artificial Sequence: Synthetic oligonucleotide
  Sense strand starting at position 3811 of SEQ ID NO: 913539
gaaacaguucugcacuuag

SEQ ID NO: 935129 - RNA, 19 nt, Artificial Sequence
  Description of Artificial Sequence: Synthetic oligonucleotide
  Antisense strand to SEQ ID NO: 935128
cuaagugcagaacuguuuc

SEQ ID NO: 935130 - RNA, 19 nt, Artificial Sequence
  Description of Artificial Sequence: Synthetic oligonucleotide
  Sense strand starting at position 3120 of SEQ ID NO: 913539
acguguauugaauauauga

SEQ ID NO: 935131 - RNA, 19 nt, Artificial Sequence
  Description of Artificial Sequence: Synthetic oligonucleotide
  Antisense strand to SEQ ID NO: 935130
ucauauauucaauacacgu

SEQ ID NO: 935132 - RNA, 19 nt, Artificial Sequence
  Description of Artificial Sequence: Synthetic oligonucleotide
  Sense strand starting at position 1607 of SEQ ID NO: 913539
cccauagggugagucaaua

SEQ ID NO: 935133 - RNA, 19 nt, Artificial Sequence
  Description of Artificial Sequence: Synthetic oligonucleotide
  Antisense strand to SEQ ID NO: 935132
uauugacucacccuauggg

SEQ ID NO: 935134 - RNA, 19 nt, Artificial Sequence
  Description of Artificial Sequence: Synthetic oligonucleotide
  Sense strand starting at position 253 of SEQ ID NO: 913539
ggcucugcccaggacuaaa

SEQ ID NO: 935135 - RNA, 19 nt, Artificial Sequence
  Description of Artificial Sequence: Synthetic oligonucleotide
  Antisense strand to SEQ ID NO: 935134
uuuaguccugggcagagcc

SEQ ID NO: 935136 - RNA, 19 nt, Artificial Sequence
  Description of Artificial Sequence: Synthetic oligonucleotide
  Sense strand starting at position 2806 of SEQ ID NO: 913539
ggcuucagaguauggaaua

SEQ ID NO: 935137 - RNA, 19 nt, Artificial Sequence
  Description of Artificial Sequence: Synthetic oligonucleotide
  Antisense strand to SEQ ID NO: 935136
uauuccauacucugaagcc

SEQ ID NO: 935138 - RNA, 19 nt, Artificial Sequence
  Description of Artificial Sequence: Synthetic oligonucleotide
  Sense strand starting at position 840 of SEQ ID NO: 913539
gugucaugaccagaggcau

SEQ ID NO: 935139 - RNA, 19 nt, Artificial Sequence
  Description of Artificial Sequence: Synthetic oligonucleotide
  Antisense strand to SEQ ID NO: 935138
augccucuggucaugacac

SEQ ID NO: 935140 - RNA, 19 nt, Artificial Sequence
  Description of Artificial Sequence: Synthetic oligonucleotide
  Sense strand starting at position 1582 of SEQ ID NO: 913539
gggcaucuucuggaucgau

SEQ ID NO: 935141 - RNA, 19 nt, Artificial Sequence
  Description of Artificial Sequence: Synthetic oligonucleotide
  Antisense strand to SEQ ID NO: 935140
aucgauccagaagaugccc

SEQ ID NO: 935142 - RNA, 19 nt, Artificial Sequence
  Description of Artificial Sequence: Synthetic oligonucleotide
  Sense strand starting at position 3767 of SEQ ID NO: 913539
augguuuagcugcaaauaa

SEQ ID NO: 935143 - RNA, 19 nt, Artificial Sequence
  Description of Artificial Sequence: Synthetic oligonucleotide
  Antisense strand to SEQ ID NO: 935142
uuauuugcagcuaaaccau

SEQ ID NO: 935144 - RNA, 19 nt, Artificial Sequence
  Description of Artificial Sequence: Synthetic oligonucleotide
  Sense strand starting at position 2485 of SEQ ID NO: 913539
aagcguagucguuucagca

SEQ ID NO: 935145 - RNA, 19 nt, Artificial Sequence
  Description of Artificial Sequence: Synthetic oligonucleotide
  Antisense strand to SEQ ID NO: 935144
ugcugaaacgacuacgcuu

SEQ ID NO: 935146 - RNA, 19 nt, Artificial Sequence
  Description of Artificial Sequence: Synthetic oligonucleotide
  Sense strand starting at position 3143 of SEQ ID NO: 913539
aagcuagugugauugaaga

SEQ ID NO: 935147 - RNA, 19 nt, Artificial Sequence
  Description of Artificial Sequence: Synthetic oligonucleotide
  Antisense strand to SEQ ID NO: 935146
ucuucaaucacacuagcuu

SEQ ID NO: 935148 - RNA, 19 nt, Artificial Sequence
  Description of Artificial Sequence: Synthetic oligonucleotide
  Sense strand starting at position 1099 of SEQ ID NO: 913539
uugcuccuccaggaguuaa

SEQ ID NO: 935149 - RNA, 19 nt, Artificial Sequence
  Description of Artificial Sequence: Synthetic oligonucleotide
  Antisense strand to SEQ ID NO: 935148
uuaacuccuggaggagcaa

SEQ ID NO: 935150 - RNA, 19 nt, Artificial Sequence
  Description of Artificial Sequence: Synthetic oligonucleotide
  Sense strand starting at position 1275 of SEQ ID NO: 913539
acauuagguccugggcaga

SEQ ID NO: 935151 - RNA, 19 nt, Artificial Sequence
  Description of Artificial Sequence: Synthetic oligonucleotide
  Antisense strand to SEQ ID NO: 935150
ucugcccaggaccuaaugu

SEQ ID NO: 935152 - RNA, 19 nt, Artificial Sequence
  Description of Artificial Sequence: Synthetic oligonucleotide
  Sense strand starting at position 2698 of SEQ ID NO: 913539
gccgucgugcuauuccuaa

SEQ ID NO: 935153 - RNA, 19 nt, Artificial Sequence
  Description of Artificial Sequence: Synthetic oligonucleotide
  Antisense strand to SEQ ID NO: 935152
uuaggaauagcacgacggc

SEQ ID NO: 935154 - RNA, 19 nt, Artificial Sequence
  Description of Artificial Sequence: Synthetic oligonucleotide
  Sense strand starting at position 1940 of SEQ ID NO: 913539
cgccaaacucgacaugauu

SEQ ID NO: 935155 - RNA, 19 nt, Artificial Sequence
  Description of Artificial Sequence: Synthetic oligonucleotide
  Antisense strand to SEQ ID NO: 935154
aaucaugucgaguuuggcg

SEQ ID NO: 935156 - RNA, 19 nt, Artificial Sequence
  Description of Artificial Sequence: Synthetic oligonucleotide
  Sense strand starting at position 907 of SEQ ID NO: 913539
ccacuucuccagugacuga

SEQ ID NO: 935157 - RNA, 19 nt, Artificial Sequence
  Description of Artificial Sequence: Synthetic oligonucleotide
  Antisense strand to SEQ ID NO: 935156
ucagucacuggagaagugg

SEQ ID NO: 935158 - RNA, 19 nt, Artificial Sequence
  Description of Artificial Sequence: Synthetic oligonucleotide
  Sense strand starting at position 2313 of SEQ ID NO: 913539
gacucuucccuugacguca

SEQ ID NO: 935159 - RNA, 19 nt, Artificial Sequence
  Description of Artificial Sequence: Synthetic oligonucleotide
  Antisense strand to SEQ ID NO: 935158
ugacgucaagggaagaguc

SEQ ID NO: 935160 - RNA, 19 nt, Artificial Sequence
  Description of Artificial Sequence: Synthetic oligonucleotide
  Sense strand starting at position 778 of SEQ ID NO: 913539
caauuagcagucugggauc

SEQ ID NO: 935161 - RNA, 19 nt, Artificial Sequence
  Description of Artificial Sequence: Synthetic oligonucleotide
  Antisense strand to SEQ ID NO: 935160
gaucccagacugcuaauug

SEQ ID NO: 935162 - RNA, 19 nt, Artificial Sequence
  Description of Artificial Sequence: Synthetic oligonucleotide
  Sense strand starting at position 1351 of SEQ ID NO: 913539
ggaucaguggugugacaug

SEQ ID NO: 935163 - RNA, 19 nt, Artificial Sequence
  Description of Artificial Sequence: Synthetic oligonucleotide
  Antisense strand to SEQ ID NO: 935162
caugucacaccacugaucc

SEQ ID NO: 935164 - RNA, 19 nt, Artificial Sequence
  Description of Artificial Sequence: Synthetic oligonucleotide
  Sense strand starting at position 3810 of SEQ ID NO: 913539
ugaaacaguucugcacuua

SEQ ID NO: 935165 - RNA, 19 nt, Artificial Sequence
  Description of Artificial Sequence: Synthetic oligonucleotide
  Antisense strand to SEQ ID NO: 935164
uaagugcagaacuguuuca

SEQ ID NO: 935166 - RNA, 19 nt, Artificial Sequence
  Description of Artificial Sequence: Synthetic oligonucleotide
  Sense strand starting at position 3379 of SEQ ID NO: 913539
aggugugccauacauguaa

SEQ ID NO: 935167 - RNA, 19 nt, Artificial Sequence
  Description of Artificial Sequence: Synthetic oligonucleotide
  Antisense strand to SEQ ID NO: 935166
uuacauguauggcacaccu

SEQ ID NO: 935168 - RNA, 19 nt, Artificial Sequence
  Description of Artificial Sequence: Synthetic oligonucleotide
  Sense strand starting at position 2439 of SEQ ID NO: 913539
uaguauaguuaagcuagau

SEQ ID NO: 935169 - RNA, 19 nt, Artificial Sequence
  Description of Artificial Sequence: Synthetic oligonucleotide
  Antisense strand to SEQ ID NO: 935168
aucuagcuuaacuauacua

SEQ ID NO: 935170 - RNA, 19 nt, Artificial Sequence
  Description of Artificial Sequence: Synthetic oligonucleotide
  Sense strand starting at position 1216 of SEQ ID NO: 913539
caggucuucuagccaaaug

SEQ ID NO: 935171 - RNA, 19 nt, Artificial Sequence
  Description of Artificial Sequence: Synthetic oligonucleotide
  Antisense strand to SEQ ID NO: 935170
cauuuggcuagaagaccug

SEQ ID NO: 935172 - RNA, 19 nt, Artificial Sequence
  Description of Artificial Sequence: Synthetic oligonucleotide
  Sense strand starting at position 1363 of SEQ ID NO: 913539
ugacauguaucuuccgaug

SEQ ID NO: 935173 - RNA, 19 nt, Artificial Sequence
  Description of Artificial Sequence: Synthetic oligonucleotide
  Antisense strand to SEQ ID NO: 935172
caucggaagauacauguca

SEQ ID NO: 935174 - RNA, 19 nt, Artificial Sequence
  Description of Artificial Sequence: Synthetic oligonucleotide
  Sense strand starting at position 2160 of SEQ ID NO: 913539
gucagcuucuuauuacaga

SEQ ID NO: 935175 - RNA, 19 nt, Artificial Sequence
  Description of Artificial Sequence: Synthetic oligonucleotide
  Antisense strand to SEQ ID NO: 935174
ucuguaauaagaagcugac

SEQ ID NO: 935176 - RNA, 19 nt, Artificial Sequence
  Description of Artificial Sequence: Synthetic oligonucleotide
  Sense strand starting at position 3920 of SEQ ID NO: 913539
acggaauagucaccugcua

SEQ ID NO: 935177 - RNA, 19 nt, Artificial Sequence
  Description of Artificial Sequence: Synthetic oligonucleotide
  Antisense strand to SEQ ID NO: 935176
uagcaggugacuauuccgu

SEQ ID NO: 935178 - RNA, 19 nt, Artificial Sequence
  Description of Artificial Sequence: Synthetic oligonucleotide
  Sense strand starting at position 3377 of SEQ ID NO: 913539
ugaggugugccauacaugu

SEQ ID NO: 935179 - RNA, 19 nt, Artificial Sequence
  Description of Artificial Sequence: Synthetic oligonucleotide
  Antisense strand to SEQ ID NO: 935178
acauguauggcacaccuca

SEQ ID NO: 935180 - RNA, 19 nt, Artificial Sequence
  Description of Artificial Sequence: Synthetic oligonucleotide
  Sense strand starting at position 697 of SEQ ID NO: 913539
ucuccaucgcucgagaauc

SEQ ID NO: 935181 - RNA, 19 nt, Artificial Sequence
  Description of Artificial Sequence: Synthetic oligonucleotide
  Antisense strand to SEQ ID NO: 935180
gauucucgagcgauggaga

SEQ ID NO: 935182 - RNA, 19 nt, Artificial Sequence
  Description of Artificial Sequence: Synthetic oligonucleotide
  Sense strand starting at position 1098 of SEQ ID NO: 913539
auugcuccuccaggaguua

SEQ ID NO: 935183 - RNA, 19 nt, Artificial Sequence
  Description of Artificial Sequence: Synthetic oligonucleotide
  Antisense strand to SEQ ID NO: 935182
uaacuccuggaggagcaau

SEQ ID NO: 935184 - RNA, 19 nt, Artificial Sequence
  Description of Artificial Sequence: Synthetic oligonucleotide
  Sense strand starting at position 2063 of SEQ ID NO: 913539
cuuuacuaauucgcuugaa

SEQ ID NO: 935185 - RNA, 19 nt, Artificial Sequence
  Description of Artificial Sequence: Synthetic oligonucleotide
  Antisense strand to SEQ ID NO: 935184
uucaagcgaauuaguaaag

SEQ ID NO: 935186 - RNA, 19 nt, Artificial Sequence
  Description of Artificial Sequence: Synthetic oligonucleotide
  Sense strand starting at position 2064 of SEQ ID NO: 913539
uuuacuaauucgcuugaau

SEQ ID NO: 935187 - RNA, 19 nt, Artificial Sequence
  Description of Artificial Sequence: Synthetic oligonucleotide
  Antisense strand to SEQ ID NO: 935186
auucaagcgaauuaguaaa

SEQ ID NO: 935188 - RNA, 19 nt, Artificial Sequence
  Description of Artificial Sequence: Synthetic oligonucleotide
  Sense strand starting at position 1760 of SEQ ID NO: 913539
uugguauucgcagaagcca

SEQ ID NO: 935189 - RNA, 19 nt, Artificial Sequence
  Description of Artificial Sequence: Synthetic oligonucleotide
  Antisense strand to SEQ ID NO: 935188
uggcuucugcgaauaccaa

SEQ ID NO: 935190 - RNA, 19 nt, Artificial Sequence
  Description of Artificial Sequence: Synthetic oligonucleotide
  Sense strand starting at position 2616 of SEQ ID NO: 913540
agcagugcugugcccuaaa

SEQ ID NO: 935191 - RNA, 19 nt, Artificial Sequence
  Description of Artificial Sequence: Synthetic oligonucleotide
  Antisense strand to SEQ ID NO: 935190
uuuagggcacagcacugcu

SEQ ID NO: 935192 - RNA, 19 nt, Artificial Sequence
  Description of Artificial Sequence: Synthetic oligonucleotide
  Sense strand starting at position 3127 of SEQ ID NO: 913540
ugagaugucgagcaggaaa

SEQ ID NO: 935193 - RNA, 19 nt, Artificial Sequence
  Description of Artificial Sequence: Synthetic oligonucleotide
  Antisense strand to SEQ ID NO: 935192
uuuccugcucgacaucuca

SEQ ID NO: 935194 - RNA, 19 nt, Artificial Sequence
  Description of Artificial Sequence: Synthetic oligonucleotide
  Sense strand starting at position 3463 of SEQ ID NO: 913540
gggacuaucgaagauugcu

SEQ ID NO: 935195 - RNA, 19 nt, Artificial Sequence
  Description of Artificial Sequence: Synthetic oligonucleotide
  Antisense strand to SEQ ID NO: 935194
agcaaucuucgauaguccc

SEQ ID NO: 935196 - RNA, 19 nt, Artificial Sequence
  Description of Artificial Sequence: Synthetic oligonucleotide
  Sense strand starting at position 3859 of SEQ ID NO: 913540
guuucuuaggcauaaacua

SEQ ID NO: 935197 - RNA, 19 nt, Artificial Sequence
  Description of Artificial Sequence: Synthetic oligonucleotide
  Antisense strand to SEQ ID NO: 935196
uaguuuaugccuaagaaac

SEQ ID NO: 935198 - RNA, 19 nt, Artificial Sequence
  Description of Artificial Sequence: Synthetic oligonucleotide
  Sense strand starting at position 3570 of SEQ ID NO: 913540
cguaaugcggucgcuaaga

SEQ ID NO: 935199 - RNA, 19 nt, Artificial Sequence
  Description of Artificial Sequence: Synthetic oligonucleotide
  Antisense strand to SEQ ID NO: 935198
ucuuagcgaccgcauuacg

SEQ ID NO: 935200 - RNA, 19 nt, Artificial Sequence
  Description of Artificial Sequence: Synthetic oligonucleotide
  Sense strand starting at position 3856 of SEQ ID NO: 913540
ggaguuucuuaggcauaaa

SEQ ID NO: 935201 - RNA, 19 nt, Artificial Sequence
  Description of Artificial Sequence: Synthetic oligonucleotide
  Antisense strand to SEQ ID NO: 935200
uuuaugccuaagaaacucc

SEQ ID NO: 935202 - RNA, 19 nt, Artificial Sequence
  Description of Artificial Sequence: Synthetic oligonucleotide
  Sense strand starting at position 3568 of SEQ ID NO: 913540
cacguaaugcggucgcuaa

SEQ ID NO: 935203 - RNA, 19 nt, Artificial Sequence
  Description of Artificial Sequence: Synthetic oligonucleotide
  Antisense strand to SEQ ID NO: 935202
uuagcgaccgcauuacgug

SEQ ID NO: 935204 - RNA, 19 nt, Artificial Sequence
  Description of Artificial Sequence: Synthetic oligonucleotide
  Sense strand starting at position 3469 of SEQ ID NO: 913540
aucgaagauugcuuaauca

SEQ ID NO: 935205 - RNA, 19 nt, Artificial Sequence
  Description of Artificial Sequence: Synthetic oligonucleotide
  Antisense strand to SEQ ID NO: 935204
ugauuaagcaaucuucgau

SEQ ID NO: 935206 - RNA, 19 nt, Artificial Sequence
  Description of Artificial Sequence: Synthetic oligonucleotide
  Sense strand starting at position 3466 of SEQ ID NO: 913540
acuaucgaagauugcuuaa

SEQ ID NO: 935207 - RNA, 19 nt, Artificial Sequence
  Description of Artificial Sequence: Synthetic oligonucleotide
  Antisense strand to SEQ ID NO: 935206
uuaagcaaucuucgauagu

SEQ ID NO: 935208 - RNA, 19 nt, Artificial Sequence
  Description of Artificial Sequence: Synthetic oligonucleotide
  Sense strand starting at position 3567 of SEQ ID NO: 913540
ccacguaaugcggucgcua

SEQ ID NO: 935209 - RNA, 19 nt, Artificial Sequence
  Description of Artificial Sequence: Synthetic oligonucleotide
  Antisense strand to SEQ ID NO: 935208
uagcgaccgcauuacgugg

SEQ ID NO: 935210 - RNA, 19 nt, Artificial Sequence
  Description of Artificial Sequence: Synthetic oligonucleotide
  Sense strand starting at position 3915 of SEQ ID NO: 913540
cacagaagucuuugguucu

SEQ ID NO: 935211 - RNA, 19 nt, Artificial Sequence
  Description of Artificial Sequence: Synthetic oligonucleotide
  Antisense strand to SEQ ID NO: 935210
agaaccaaagacuucugug

SEQ ID NO: 935212 - RNA, 19 nt, Artificial Sequence
  Description of Artificial Sequence: Synthetic oligonucleotide
  Sense strand starting at position 3120 of SEQ ID NO: 913540
gcuggauugagaugucgag

SEQ ID NO: 935213 - RNA, 19 nt, Artificial Sequence
  Description of Artificial Sequence: Synthetic oligonucleotide
  Antisense strand to SEQ ID NO: 935212
cucgacaucucaauccagc

SEQ ID NO: 935214 - RNA, 19 nt, Artificial Sequence
  Description of Artificial Sequence: Synthetic oligonucleotide
  Sense strand starting at position 3925 of SEQ ID NO: 913540
uuugguucugaguggucuu

SEQ ID NO: 935215 - RNA, 19 nt, Artificial Sequence
  Description of Artificial Sequence: Synthetic oligonucleotide
  Antisense strand to SEQ ID NO: 935214
aagaccacucagaaccaaa

SEQ ID NO: 935216 - RNA, 19 nt, Artificial Sequence
  Description of Artificial Sequence: Synthetic oligonucleotide
  Sense strand starting at position 3656 of SEQ ID NO: 913540
cugcgcuuccaucgaggaa

SEQ ID NO: 935217 - RNA, 19 nt, Artificial Sequence
  Description of Artificial Sequence: Synthetic oligonucleotide
  Antisense strand to SEQ ID NO: 935216
uuccucgauggaagcgcag

SEQ ID NO: 935218 - RNA, 19 nt, Artificial Sequence
  Description of Artificial Sequence: Synthetic oligonucleotide
  Sense strand starting at position 3843 of SEQ ID NO: 913540
guaccuguucuucggaguu

SEQ ID NO: 935219 - RNA, 19 nt, Artificial Sequence
  Description of Artificial Sequence: Synthetic oligonucleotide
  Antisense strand to SEQ ID NO: 935218
aacuccgaagaacagguac

SEQ ID NO: 935220 - RNA, 19 nt, Artificial Sequence
  Description of Artificial Sequence: Synthetic oligonucleotide
  Sense strand starting at position 3036 of SEQ ID NO: 913540
gcgugcguccuccaagaau

SEQ ID NO: 935221 - RNA, 19 nt, Artificial Sequence
  Description of Artificial Sequence: Synthetic oligonucleotide
  Antisense strand to SEQ ID NO: 935220
auucuuggaggacgcacgc

SEQ ID NO: 935222 - RNA, 19 nt, Artificial Sequence
  Description of Artificial Sequence: Synthetic oligonucleotide
  Sense strand starting at position 3034 of SEQ ID NO: 913540
cggcgugcguccuccaaga

SEQ ID NO: 935223 - RNA, 19 nt, Artificial Sequence
  Description of Artificial Sequence: Synthetic oligonucleotide
  Antisense strand to SEQ ID NO: 935222
ucuuggaggacgcacgccg

SEQ ID NO: 935224 - RNA, 19 nt, Artificial Sequence
  Description of Artificial Sequence: Synthetic oligonucleotide
  Sense strand starting at position 3855 of SEQ ID NO: 913540
cggaguuucuuaggcauaa

SEQ ID NO: 935225 - RNA, 19 nt, Artificial Sequence
  Description of Artificial Sequence: Synthetic oligonucleotide
  Antisense strand to SEQ ID NO: 935224
uuaugccuaagaaacuccg

SEQ ID NO: 935226 - RNA, 19 nt, Artificial Sequence
  Description of Artificial Sequence: Synthetic oligonucleotide
  Sense strand starting at position 3922 of SEQ ID NO: 913540
gucuuugguucugaguggu

SEQ ID NO: 935227 - RNA, 19 nt, Artificial Sequence
  Description of Artificial Sequence: Synthetic oligonucleotide
  Antisense strand to SEQ ID NO: 935226
accacucagaaccaaagac

SEQ ID NO: 935228 - RNA, 19 nt, Artificial Sequence
  Description of Artificial Sequence: Synthetic oligonucleotide
  Sense strand starting at position 3137 of SEQ ID NO: 913541
agcagugcugugcccuaaa

SEQ ID NO: 935229 - RNA, 19 nt, Artificial Sequence
  Description of Artificial Sequence: Synthetic oligonucleotide
  Antisense strand to SEQ ID NO: 935228
uuuagggcacagcacugcu

SEQ ID NO: 935230 - RNA, 19 nt, Artificial Sequence
  Description of Artificial Sequence: Synthetic oligonucleotide
  Sense strand starting at position 3648 of SEQ ID NO: 913541
ugagaugucgagcaggaaa

SEQ ID NO: 935231 - RNA, 19 nt, Artificial Sequence
  Description of Artificial Sequence: Synthetic oligonucleotide
  Antisense strand to SEQ ID NO: 935230
uuuccugcucgacaucuca

SEQ ID NO: 935232 - RNA, 19 nt, Artificial Sequence
  Description of Artificial Sequence: Synthetic oligonucleotide
  Sense strand starting at position 3641 of SEQ ID NO: 913541
gcuggauugagaugucgag

SEQ ID NO: 935233 - RNA, 19 nt, Artificial Sequence
  Description of Artificial Sequence: Synthetic oligonucleotide
  Antisense strand to SEQ ID NO: 935232
cucgacaucucaauccagc

SEQ ID NO: 935234 - RNA, 19 nt, Artificial Sequence
  Description of Artificial Sequence: Synthetic oligonucleotide
  Sense strand starting at position 3557 of SEQ ID NO: 913541
gcgugcguccuccaagaau

SEQ ID NO: 935235 - RNA, 19 nt, Artificial Sequence
  Description of Artificial Sequence: Synthetic oligonucleotide
  Antisense strand to SEQ ID NO: 935234
auucuuggaggacgcacgc

SEQ ID NO: 935236 - RNA, 19 nt, Artificial Sequence
  Description of Artificial Sequence: Synthetic oligonucleotide
  Sense strand starting at position 3555 of SEQ ID NO: 913541
cggcgugcguccuccaaga

SEQ ID NO: 935237 - RNA, 19 nt, Artificial Sequence
  Description of Artificial Sequence: Synthetic oligonucleotide
  Antisense strand to SEQ ID NO: 935236
ucuuggaggacgcacgccg

SEQ ID NO: 935238 - RNA, 19 nt, Artificial Sequence
  Description of Artificial Sequence: Synthetic oligonucleotide
  Sense strand starting at position 41 of SEQ ID NO: 913542
uugauuauucucugaaagg

SEQ ID NO: 935239 - RNA, 19 nt, Artificial Sequence
  Description of Artificial Sequence: Synthetic oligonucleotide
  Antisense strand to SEQ ID NO: 935238
ccuuucagagaauaaucaa

SEQ ID NO: 935240 - RNA, 19 nt, Artificial Sequence
  Description of Artificial Sequence: Synthetic oligonucleotide
  Sense strand starting at position 916 of SEQ ID NO: 913542
ucaagugugaacgauuaaa

SEQ ID NO: 935241 - RNA, 19 nt, Artificial Sequence
  Description of Artificial Sequence: Synthetic oligonucleotide
  Antisense strand to SEQ ID NO: 935240
uuuaaucguucacacuuga

SEQ ID NO: 935242 - RNA, 19 nt, Artificial Sequence
  Description of Artificial Sequence: Synthetic oligonucleotide
  Sense strand starting at position 1531 of SEQ ID NO: 913542
ucgauauauuucgcccaag

SEQ ID NO: 935243 - RNA, 19 nt, Artificial Sequence
  Description of Artificial Sequence: Synthetic oligonucleotide
  Antisense strand to SEQ ID NO: 935242
cuugggcgaaauauaucga

SEQ ID NO: 935244 - RNA, 19 nt, Artificial Sequence
  Description of Artificial Sequence: Synthetic oligonucleotide
  Sense strand starting at position 1263 of SEQ ID NO: 913542
agaaguauccuuugaaauc

SEQ ID NO: 935245 - RNA, 19 nt, Artificial Sequence
  Description of Artificial Sequence: Synthetic oligonucleotide
  Antisense strand to SEQ ID NO: 935244
gauuucaaaggauacuucu

SEQ ID NO: 935246 - RNA, 19 nt, Artificial Sequence
  Description of Artificial Sequence: Synthetic oligonucleotide
  Sense strand starting at position 717 of SEQ ID NO: 913542
gcuuuccacagggauguaa

SEQ ID NO: 935247 - RNA, 19 nt, Artificial Sequence
  Description of Artificial Sequence: Synthetic oligonucleotide
  Antisense strand to SEQ ID NO: 935246
uuacaucccuguggaaagc

SEQ ID NO: 935248 - RNA, 19 nt, Artificial Sequence
  Description of Artificial Sequence: Synthetic oligonucleotide
  Sense strand starting at position 1102 of SEQ ID NO: 913542
gucagagcaguucagagau

SEQ ID NO: 935249 - RNA, 19 nt, Artificial Sequence
  Description of Artificial Sequence: Synthetic oligonucleotide
  Antisense strand to SEQ ID NO: 935248
aucucugaacugcucugac

SEQ ID NO: 935250 - RNA, 19 nt, Artificial Sequence
  Description of Artificial Sequence: Synthetic oligonucleotide
  Sense strand starting at position 1446 of SEQ ID NO: 913542
uacugaacacgagguaauu

SEQ ID NO: 935251 - RNA, 19 nt, Artificial Sequence
  Description of Artificial Sequence: Synthetic oligonucleotide
  Antisense strand to SEQ ID NO: 935250
aauuaccucguguucagua

SEQ ID NO: 935252 - RNA, 19 nt, Artificial Sequence
  Description of Artificial Sequence: Synthetic oligonucleotide
  Sense strand starting at position 115 of SEQ ID NO: 913542
uguguacacgaccagauua

SEQ ID NO: 935253 - RNA, 19 nt, Artificial Sequence
  Description of Artificial Sequence: Synthetic oligonucleotide
  Antisense strand to SEQ ID NO: 935252
uaaucuggucguguacaca

SEQ ID NO: 935254 - RNA, 19 nt, Artificial Sequence
  Description of Artificial Sequence: Synthetic oligonucleotide
  Sense strand starting at position 1532 of SEQ ID NO: 913542
cgauauauuucgcccaagu

SEQ ID NO: 935255 - RNA, 19 nt, Artificial Sequence
  Description of Artificial Sequence: Synthetic oligonucleotide
  Antisense strand to SEQ ID NO: 935254
acuugggcgaaauauaucg

SEQ ID NO: 935256 - RNA, 19 nt, Artificial Sequence
  Description of Artificial Sequence: Synthetic oligonucleotide
  Sense strand starting at position 304 of SEQ ID NO: 913542
guacuuuacgaauaucuuu

SEQ ID NO: 935257 - RNA, 19 nt, Artificial Sequence
  Description of Artificial Sequence: Synthetic oligonucleotide
  Antisense strand to SEQ ID NO: 935256
aaagauauucguaaaguac

SEQ ID NO: 935258 - RNA, 19 nt, Artificial Sequence
  Description of Artificial Sequence: Synthetic oligonucleotide
  Sense strand starting at position 880 of SEQ ID NO: 913542
uggcuuauuuccuuuguuu

SEQ ID NO: 935259 - RNA, 19 nt, Artificial Sequence
  Description of Artificial Sequence: Synthetic oligonucleotide
  Antisense strand to SEQ ID NO: 935258
aaacaaaggaaauaagcca

SEQ ID NO: 935260 - RNA, 19 nt, Artificial Sequence
  Description of Artificial Sequence: Synthetic oligonucleotide
  Sense strand starting at position 330 of SEQ ID NO: 913542
cggaauugaugauucaguu

SEQ ID NO: 935261 - RNA, 19 nt, Artificial Sequence
  Description of Artificial Sequence: Synthetic oligonucleotide
  Antisense strand to SEQ ID NO: 935260
aacugaaucaucaauuccg

SEQ ID NO: 935262 - RNA, 19 nt, Artificial Sequence
  Description of Artificial Sequence: Synthetic oligonucleotide
  Sense strand starting at position 766 of SEQ ID NO: 913542
accaaucagcgccauaaau

SEQ ID NO: 935263 - RNA, 19 nt, Artificial Sequence
  Description of Artificial Sequence: Synthetic oligonucleotide
  Antisense strand to SEQ ID NO: 935262
auuuauggcgcugauuggu

SEQ ID NO: 935264 - RNA, 19 nt, Artificial Sequence
  Description of Artificial Sequence: Synthetic oligonucleotide
  Sense strand starting at position 905 of SEQ ID NO: 913542
guuauacuugaucaagugu

SEQ ID NO: 935265 - RNA, 19 nt, Artificial Sequence
  Description of Artificial Sequence: Synthetic oligonucleotide
  Antisense strand to SEQ ID NO: 935264
acacuugaucaaguauaac

SEQ ID NO: 935266 - RNA, 19 nt, Artificial Sequence
  Description of Artificial Sequence: Synthetic oligonucleotide
  Sense strand starting at position 37 of SEQ ID NO: 913542
guuauugauuauucucuga

SEQ ID NO: 935267 - RNA, 19 nt, Artificial Sequence
  Description of Artificial Sequence: Synthetic oligonucleotide
  Antisense strand to SEQ ID NO: 935266
ucagagaauaaucaauaac

SEQ ID NO: 935268 - RNA, 19 nt, Artificial Sequence
  Description of Artificial Sequence: Synthetic oligonucleotide
  Sense strand starting at position 1161 of SEQ ID NO: 913542
gauacagucucugcuaaag

SEQ ID NO: 935269 - RNA, 19 nt, Artificial Sequence
  Description of Artificial Sequence: Synthetic oligonucleotide
  Antisense strand to SEQ ID NO: 935268
cuuuagcagagacuguauc

SEQ ID NO: 935270 - RNA, 19 nt, Artificial Sequence
  Description of Artificial Sequence: Synthetic oligonucleotide
  Sense strand starting at position 1433 of SEQ ID NO: 913542
cagcaaucuuagguacuga

SEQ ID NO: 935271 - RNA, 19 nt, Artificial Sequence
  Description of Artificial Sequence: Synthetic oligonucleotide
  Antisense strand to SEQ ID NO: 935270
ucaguaccuaagauugcug

SEQ ID NO: 935272 - RNA, 19 nt, Artificial Sequence
  Description of Artificial Sequence: Synthetic oligonucleotide
  Sense strand starting at position 904 of SEQ ID NO: 913542
uguuauacuugaucaagug

SEQ ID NO: 935273 - RNA, 19 nt, Artificial Sequence
  Description of Artificial Sequence: Synthetic oligonucleotide
  Antisense strand to SEQ ID NO: 935272
cacuugaucaaguauaaca

SEQ ID NO: 935274 - RNA, 19 nt, Artificial Sequence
  Description of Artificial Sequence: Synthetic oligonucleotide
  Sense strand starting at position 1521 of SEQ ID NO: 913542
gugguaugagucgauauau

SEQ ID NO: 935275 - RNA, 19 nt, Artificial Sequence
  Description of Artificial Sequence: Synthetic oligonucleotide
  Antisense strand to SEQ ID NO: 935274
auauaucgacucauaccac

SEQ ID NO: 935276 - RNA, 19 nt, Artificial Sequence
  Description of Artificial Sequence: Synthetic oligonucleotide
  Sense strand starting at position 1246 of SEQ ID NO: 913542
acuuuauaauugcuguaag

SEQ ID NO: 935277 - RNA, 19 nt, Artificial Sequence
  Description of Artificial Sequence: Synthetic oligonucleotide
  Antisense strand to SEQ ID NO: 935276
cuuacagcaauuauaaagu

SEQ ID NO: 935278 - RNA, 19 nt, Artificial Sequence
  Description of Artificial Sequence: Synthetic oligonucleotide
  Sense strand starting at position 911 of SEQ ID NO: 913542
cuugaucaagugugaacga

SEQ ID NO: 935279 - RNA, 19 nt, Artificial Sequence
  Description of Artificial Sequence: Synthetic oligonucleotide
  Antisense strand to SEQ ID NO: 935278
ucguucacacuugaucaag

SEQ ID NO: 935280 - RNA, 19 nt, Artificial Sequence
  Description of Artificial Sequence: Synthetic oligonucleotide
  Sense strand starting at position 528 of SEQ ID NO: 913542
ugcagacucuuauuaaggu

SEQ ID NO: 935281 - RNA, 19 nt, Artificial Sequence
  Description of Artificial Sequence: Synthetic oligonucleotide
  Antisense strand to SEQ ID NO: 935280
accuuaauaagagucugca

SEQ ID NO: 935282 - RNA, 19 nt, Artificial Sequence
  Description of Artificial Sequence: Synthetic oligonucleotide
  Sense strand starting at position 1662 of SEQ ID NO: 913542
aaauaaggcguuuagcauu

SEQ ID NO: 935283 - RNA, 19 nt, Artificial Sequence
  Description of Artificial Sequence: Synthetic oligonucleotide
  Antisense strand to SEQ ID NO: 935282
aaugcuaaacgccuuauuu

SEQ ID NO: 935284 - RNA, 19 nt, Artificial Sequence
  Description of Artificial Sequence: Synthetic oligonucleotide
  Sense strand starting at position 1518 of SEQ ID NO: 913542
agggugguaugagucgaua

SEQ ID NO: 935285 - RNA, 19 nt, Artificial Sequence
  Description of Artificial Sequence: Synthetic oligonucleotide
  Antisense strand to SEQ ID NO: 935284
uaucgacucauaccacccu

SEQ ID NO: 935286 - RNA, 19 nt, Artificial Sequence
  Description of Artificial Sequence: Synthetic oligonucleotide
  Sense strand starting at position 716 of SEQ ID NO: 913542
ugcuuuccacagggaugua

SEQ ID NO: 935287 - RNA, 19 nt, Artificial Sequence
  Description of Artificial Sequence: Synthetic oligonucleotide
  Antisense strand to SEQ ID NO: 935286
uacaucccuguggaaagca

SEQ ID NO: 935288 - RNA, 19 nt, Artificial Sequence
  Description of Artificial Sequence: Synthetic oligonucleotide
  Sense strand starting at position 1520 of SEQ ID NO: 913542
ggugguaugagucgauaua

SEQ ID NO: 935289 - RNA, 19 nt, Artificial Sequence
  Description of Artificial Sequence: Synthetic oligonucleotide
  Antisense strand to SEQ ID NO: 935288
uauaucgacucauaccacc

SEQ ID NO: 935290 - RNA, 19 nt, Artificial Sequence
  Description of Artificial Sequence: Synthetic oligonucleotide
  Sense strand starting at position 604 of SEQ ID NO: 913542
gucgguauucuuuaccuua

SEQ ID NO: 935291 - RNA, 19 nt, Artificial Sequence
  Description of Artificial Sequence: Synthetic oligonucleotide
  Antisense strand to SEQ ID NO: 935290
uaagguaaagaauaccgac

SEQ ID NO: 935292 - RNA, 19 nt, Artificial Sequence
  Description of Artificial Sequence: Synthetic oligonucleotide
  Sense strand starting at position 715 of SEQ ID NO: 913542
cugcuuuccacagggaugu

SEQ ID NO: 935293 - RNA, 19 nt, Artificial Sequence
  Description of Artificial Sequence: Synthetic oligonucleotide
  Antisense strand to SEQ ID NO: 935292
acaucccuguggaaagcag

SEQ ID NO: 935294 - RNA, 19 nt, Artificial Sequence
  Description of Artificial Sequence: Synthetic oligonucleotide
  Sense strand starting at position 1159 of SEQ ID NO: 913542
acgauacagucucugcuaa

SEQ ID NO: 935295 - RNA, 19 nt, Artificial Sequence
  Description of Artificial Sequence: Synthetic oligonucleotide
  Antisense strand to SEQ ID NO: 935294
uuagcagagacuguaucgu

SEQ ID NO: 935296 - RNA, 19 nt, Artificial Sequence
  Description of Artificial Sequence: Synthetic oligonucleotide
  Sense strand starting at position 983 of SEQ ID NO: 913542
uggcaacuguaagcauauu

SEQ ID NO: 935297 - RNA, 19 nt, Artificial Sequence
  Description of Artificial Sequence: Synthetic oligonucleotide
  Antisense strand to SEQ ID NO: 935296
aauaugcuuacaguugcca

SEQ ID NO: 935298 - RNA, 19 nt, Artificial Sequence
  Description of Artificial Sequence: Synthetic oligonucleotide
  Sense strand starting at position 1160 of SEQ ID NO: 913542
cgauacagucucugcuaaa

SEQ ID NO: 935299 - RNA, 19 nt, Artificial Sequence
  Description of Artificial Sequence: Synthetic oligonucleotide
  Antisense strand to SEQ ID NO: 935298
uuuagcagagacuguaucg

SEQ ID NO: 935300 - RNA, 19 nt, Artificial Sequence
  Description of Artificial Sequence: Synthetic oligonucleotide
  Sense strand starting at position 268 of SEQ ID NO: 913542
agccaaacguucuuacuuu

SEQ ID NO: 935301 - RNA, 19 nt, Artificial Sequence
  Description of Artificial Sequence: Synthetic oligonucleotide
  Antisense strand to SEQ ID NO: 935300
aaaguaagaacguuuggcu

SEQ ID NO: 935302 - RNA, 19 nt, Artificial Sequence
  Description of Artificial Sequence: Synthetic oligonucleotide
  Sense strand starting at position 42 of SEQ ID NO: 913542
ugauuauucucugaaaggg

SEQ ID NO: 935303 - RNA, 19 nt, Artificial Sequence
  Description of Artificial Sequence: Synthetic oligonucleotide
  Antisense strand to SEQ ID NO: 935302
cccuuucagagaauaauca

SEQ ID NO: 935304 - RNA, 19 nt, Artificial Sequence
  Description of Artificial Sequence: Synthetic oligonucleotide
  Sense strand starting at position 1116 of SEQ ID NO: 913542
gagaucugaugccagacaa

SEQ ID NO: 935305 - RNA, 19 nt, Artificial Sequence
  Description of Artificial Sequence: Synthetic oligonucleotide
  Antisense strand to SEQ ID NO: 935304
uugucuggcaucagaucuc

SEQ ID NO: 935306 - RNA, 19 nt, Artificial Sequence
  Description of Artificial Sequence: Synthetic oligonucleotide
  Sense strand starting at position 497 of SEQ ID NO: 913542
guaaauaacucacaggguu

SEQ ID NO: 935307 - RNA, 19 nt, Artificial Sequence
  Description of Artificial Sequence: Synthetic oligonucleotide
  Antisense strand to SEQ ID NO: 935306
aacccugugaguuauuuac

SEQ ID NO: 935308 - RNA, 19 nt, Artificial Sequence
  Description of Artificial Sequence: Synthetic oligonucleotide
  Sense strand starting at position 889 of SEQ ID NO: 913542
uccuuuguuugcucauguu

SEQ ID NO: 935309 - RNA, 19 nt, Artificial Sequence
  Description of Artificial Sequence: Synthetic oligonucleotide
  Antisense strand to SEQ ID NO: 935308
aacaugagcaaacaaagga

SEQ ID NO: 935310 - RNA, 19 nt, Artificial Sequence
  Description of Artificial Sequence: Synthetic oligonucleotide
  Sense strand starting at position 1094 of SEQ ID NO: 913542
aggagaaugucagagcagu

SEQ ID NO: 935311 - RNA, 19 nt, Artificial Sequence
  Description of Artificial Sequence: Synthetic oligonucleotide
  Antisense strand to SEQ ID NO: 935310
acugcucugacauucuccu

SEQ ID NO: 935312 - RNA, 19 nt, Artificial Sequence
  Description of Artificial Sequence: Synthetic oligonucleotide
  Sense strand starting at position 1513 of SEQ ID NO: 913542
uugaaagggugguaugagu

SEQ ID NO: 935313 - RNA, 19 nt, Artificial Sequence
  Description of Artificial Sequence: Synthetic oligonucleotide
  Antisense strand to SEQ ID NO: 935312
acucauaccacccuuucaa

SEQ ID NO: 935314 - RNA, 19 nt, Artificial Sequence
  Description of Artificial Sequence: Synthetic oligonucleotide
  Sense strand starting at position 526 of SEQ ID NO: 913542
ccugcagacucuuauuaag

SEQ ID NO: 935315 - RNA, 19 nt, Artificial Sequence
  Description of Artificial Sequence: Synthetic oligonucleotide
  Antisense strand to SEQ ID NO: 935314
cuuaauaagagucugcagg

SEQ ID NO: 935316 - RNA, 19 nt, Artificial Sequence
  Description of Artificial Sequence: Synthetic oligonucleotide
  Sense strand starting at position 301 of SEQ ID NO: 913542
gauguacuuuacgaauauc

SEQ ID NO: 935317 - RNA, 19 nt, Artificial Sequence
  Description of Artificial Sequence: Synthetic oligonucleotide
  Antisense strand to SEQ ID NO: 935316
gauauucguaaaguacauc

SEQ ID NO: 935318 - RNA, 19 nt, Artificial Sequence
  Description of Artificial Sequence: Synthetic oligonucleotide
  Sense strand starting at position 3886 of SEQ ID NO: 913543
gcuucuuugcuaucugguu

SEQ ID NO: 935319 - RNA, 19 nt, Artificial Sequence
  Description of Artificial Sequence: Synthetic oligonucleotide
  Antisense strand to SEQ ID NO: 935318
aaccagauagcaaagaagc

SEQ ID NO: 935320 - RNA, 19 nt, Artificial Sequence
  Description of Artificial Sequence: Synthetic oligonucleotide
  Sense strand starting at position 2487 of SEQ ID NO: 913543
uuaauccaccgugaugaaa

SEQ ID NO: 935321 - RNA, 19 nt, Artificial Sequence
  Description of Artificial Sequence: Synthetic oligonucleotide
  Antisense strand to SEQ ID NO: 935320
uuucaucacgguggauuaa

SEQ ID NO: 935322 - RNA, 19 nt, Artificial Sequence
  Description of Artificial Sequence: Synthetic oligonucleotide
  Sense strand starting at position 2432 of SEQ ID NO: 913543
ugauuccugagagguaaca

SEQ ID NO: 935323 - RNA, 19 nt, Artificial Sequence
  Description of Artificial Sequence: Synthetic oligonucleotide
  Antisense strand to SEQ ID NO: 935322
uguuaccucucaggaauca

SEQ ID NO: 935324 - RNA, 19 nt, Artificial Sequence
  Description of Artificial Sequence: Synthetic oligonucleotide
  Sense strand starting at position 3936 of SEQ ID NO: 913543
ggcucuauagaagaauguu

SEQ ID NO: 935325 - RNA, 19 nt, Artificial Sequence
  Description of Artificial Sequence: Synthetic oligonucleotide
  Antisense strand to SEQ ID NO: 935324
aacauucuucuauagagcc

SEQ ID NO: 935326 - RNA, 19 nt, Artificial Sequence
  Description of Artificial Sequence: Synthetic oligonucleotide
  Sense strand starting at position 2260 of SEQ ID NO: 913543
ucucguuagacugaugaag

SEQ ID NO: 935327 - RNA, 19 nt, Artificial Sequence
  Description of Artificial Sequence: Synthetic oligonucleotide
  Antisense strand to SEQ ID NO: 935326
cuucaucagucuaacgaga

SEQ ID NO: 935328 - RNA, 19 nt, Artificial Sequence
  Description of Artificial Sequence: Synthetic oligonucleotide
  Sense strand starting at position 2094 of SEQ ID NO: 913543
caacgauagccagagaggu

SEQ ID NO: 935329 - RNA, 19 nt, Artificial Sequence
  Description of Artificial Sequence: Synthetic oligonucleotide
  Antisense strand to SEQ ID NO: 935328
accucucuggcuaucguug

SEQ ID NO: 935330 - RNA, 19 nt, Artificial Sequence
  Description of Artificial Sequence: Synthetic oligonucleotide
  Sense strand starting at position 3194 of SEQ ID NO: 913543
cuacaaaggcuguauacau

SEQ ID NO: 935331 - RNA, 19 nt, Artificial Sequence
  Description of Artificial Sequence: Synthetic oligonucleotide
  Antisense strand to SEQ ID NO: 935330
auguauacagccuuuguag

SEQ ID NO: 935332 - RNA, 19 nt, Artificial Sequence
  Description of Artificial Sequence: Synthetic oligonucleotide
  Sense strand starting at position 3138 of SEQ ID NO: 913543
gcaggauucccaugacaaa

SEQ ID NO: 935333 - RNA, 19 nt, Artificial Sequence
  Description of Artificial Sequence: Synthetic oligonucleotide
  Antisense strand to SEQ ID NO: 935332
uuugucaugggaauccugc

SEQ ID NO: 935334 - RNA, 19 nt, Artificial Sequence
  Description of Artificial Sequence: Synthetic oligonucleotide
  Sense strand starting at position 2064 of SEQ ID NO: 913543
uaagacucacgguaacuuu

SEQ ID NO: 935335 - RNA, 19 nt, Artificial Sequence
  Description of Artificial Sequence: Synthetic oligonucleotide
  Antisense strand to SEQ ID NO: 935334
aaaguuaccgugagucuua

SEQ ID NO: 935336 - RNA, 19 nt, Artificial Sequence
  Description of Artificial Sequence: Synthetic oligonucleotide
  Sense strand starting at position 1532 of SEQ ID NO: 913543
gacggaucacuguaguacu

SEQ ID NO: 935337 - RNA, 19 nt, Artificial Sequence
  Description of Artificial Sequence: Synthetic oligonucleotide
  Antisense strand to SEQ ID NO: 935336
aguacuacagugauccguc

SEQ ID NO: 935338 - RNA, 19 nt, Artificial Sequence
  Description of Artificial Sequence: Synthetic oligonucleotide
  Sense strand starting at position 2887 of SEQ ID NO: 913543
cucaucuuccuuuagguau

SEQ ID NO: 935339 - RNA, 19 nt, Artificial Sequence
  Description of Artificial Sequence: Synthetic oligonucleotide
  Antisense strand to SEQ ID NO: 935338
auaccuaaaggaagaugag

SEQ ID NO: 935340 - RNA, 19 nt, Artificial Sequence
  Description of Artificial Sequence: Synthetic oligonucleotide
  Sense strand starting at position 3002 of SEQ ID NO: 913543
ggcgcaauaaugcaaagaa

SEQ ID NO: 935341 - RNA, 19 nt, Artificial Sequence
  Description of Artificial Sequence: Synthetic oligonucleotide
  Antisense strand to SEQ ID NO: 935340
uucuuugcauuauugcgcc

SEQ ID NO: 935342 - RNA, 19 nt, Artificial Sequence
  Description of Artificial Sequence: Synthetic oligonucleotide
  Sense strand starting at position 688 of SEQ ID NO: 913543
ggaugcugucugcagagga

SEQ ID NO: 935343 - RNA, 19 nt, Artificial Sequence
  Description of Artificial Sequence: Synthetic oligonucleotide
  Antisense strand to SEQ ID NO: 935342
uccucugcagacagcaucc

SEQ ID NO: 935344 - RNA, 19 nt, Artificial Sequence
  Description of Artificial Sequence: Synthetic oligonucleotide
  Sense strand starting at position 1586 of SEQ ID NO: 913543
gccugucugcugucguaga

SEQ ID NO: 935345 - RNA, 19 nt, Artificial Sequence
  Description of Artificial Sequence: Synthetic oligonucleotide
  Antisense strand to SEQ ID NO: 935344
ucuacgacagcagacaggc

SEQ ID NO: 935346 - RNA, 19 nt, Artificial Sequence
  Description of Artificial Sequence: Synthetic oligonucleotide
  Sense strand starting at position 2318 of SEQ ID NO: 913543
gggauuuacuuccacacug

SEQ ID NO: 935347 - RNA, 19 nt, Artificial Sequence
  Description of Artificial Sequence: Synthetic oligonucleotide
  Antisense strand to SEQ ID NO: 935346
caguguggaaguaaauccc

SEQ ID NO: 935348 - RNA, 19 nt, Artificial Sequence
  Description of Artificial Sequence: Synthetic oligonucleotide
  Sense strand starting at position 185 of SEQ ID NO: 913543
gaggauguauuacuugguu

SEQ ID NO: 935349 - RNA, 19 nt, Artificial Sequence
  Description of Artificial Sequence: Synthetic oligonucleotide
  Antisense strand to SEQ ID NO: 935348
aaccaaguaauacauccuc

SEQ ID NO: 935350 - RNA, 19 nt, Artificial Sequence
  Description of Artificial Sequence: Synthetic oligonucleotide
  Sense strand starting at position 2254 of SEQ ID NO: 913543
gugacaucucguuagacug

SEQ ID NO: 935351 - RNA, 19 nt, Artificial Sequence
  Description of Artificial Sequence: Synthetic oligonucleotide
  Antisense strand to SEQ ID NO: 935350
cagucuaacgagaugucac

SEQ ID NO: 935352 - RNA, 19 nt, Artificial Sequence
  Description of Artificial Sequence: Synthetic oligonucleotide
  Sense strand starting at position 2872 of SEQ ID NO: 913543
gcugcaucugaauaucuca

SEQ ID NO: 935353 - RNA, 19 nt, Artificial Sequence
  Description of Artificial Sequence: Synthetic oligonucleotide
  Antisense strand to SEQ ID NO: 935352
ugagauauucagaugcagc

SEQ ID NO: 935354 - RNA, 19 nt, Artificial Sequence
  Description of Artificial Sequence: Synthetic oligonucleotide
  Sense strand starting at position 1710 of SEQ ID NO: 913543
ggugguuuggcucaaacca

SEQ ID NO: 935355 - RNA, 19 nt, Artificial Sequence
  Description of Artificial Sequence: Synthetic oligonucleotide
  Antisense strand to SEQ ID NO: 935354
ugguuugagccaaaccacc

SEQ ID NO: 935356 - RNA, 19 nt, Artificial Sequence
  Description of Artificial Sequence: Synthetic oligonucleotide
  Sense strand starting at position 2486 of SEQ ID NO: 913543
cuuaauccaccgugaugaa

SEQ ID NO: 935357 - RNA, 19 nt, Artificial Sequence
  Description of Artificial Sequence: Synthetic oligonucleotide
  Antisense strand to SEQ ID NO: 935356
uucaucacgguggauuaag

SEQ ID NO: 935358 - RNA, 19 nt, Artificial Sequence
  Description of Artificial Sequence: Synthetic oligonucleotide
  Sense strand starting at position 3945 of SEQ ID NO: 913543
gaagaauguuuacccggua

SEQ ID NO: 935359 - RNA, 19 nt, Artificial Sequence
  Description of Artificial Sequence: Synthetic oligonucleotide
  Antisense strand to SEQ ID NO: 935358
uaccggguaaacauucuuc

SEQ ID NO: 935360 - RNA, 19 nt, Artificial Sequence
  Description of Artificial Sequence: Synthetic oligonucleotide
  Sense strand starting at position 3022 of SEQ ID NO: 913543
agcaguuauuuagauaaag

SEQ ID NO: 935361 - RNA, 19 nt, Artificial Sequence
  Description of Artificial Sequence: Synthetic oligonucleotide
  Antisense strand to SEQ ID NO: 935360
cuuuaucuaaauaacugcu

SEQ ID NO: 935362 - RNA, 19 nt, Artificial Sequence
  Description of Artificial Sequence: Synthetic oligonucleotide
  Sense strand starting at position 1590 of SEQ ID NO: 913543
gucugcugucguagaaggu

SEQ ID NO: 935363 - RNA, 19 nt, Artificial Sequence
  Description of Artificial Sequence: Synthetic oligonucleotide
  Antisense strand to SEQ ID NO: 935362
accuucuacgacagcagac

SEQ ID NO: 935364 - RNA, 19 nt, Artificial Sequence
  Description of Artificial Sequence: Synthetic oligonucleotide
  Sense strand starting at position 2885 of SEQ ID NO: 913543
aucucaucuuccuuuaggu

SEQ ID NO: 935365 - RNA, 19 nt, Artificial Sequence
  Description of Artificial Sequence: Synthetic oligonucleotide
  Antisense strand to SEQ ID NO: 935364
accuaaaggaagaugagau

SEQ ID NO: 935366 - RNA, 19 nt, Artificial Sequence
  Description of Artificial Sequence: Synthetic oligonucleotide
  Sense strand starting at position 187 of SEQ ID NO: 913543
ggauguauuacuugguucu

SEQ ID NO: 935367 - RNA, 19 nt, Artificial Sequence
  Description of Artificial Sequence: Synthetic oligonucleotide
  Antisense strand to SEQ ID NO: 935366
agaaccaaguaauacaucc

SEQ ID NO: 935368 - RNA, 19 nt, Artificial Sequence
  Description of Artificial Sequence: Synthetic oligonucleotide
  Sense strand starting at position 2504 of SEQ ID NO: 913543
aacguuaauccauggcaca

SEQ ID NO: 935369 - RNA, 19 nt, Artificial Sequence
  Description of Artificial Sequence: Synthetic oligonucleotide
  Antisense strand to SEQ ID NO: 935368
ugugccauggauuaacguu

SEQ ID NO: 935370 - RNA, 19 nt, Artificial Sequence
  Description of Artificial Sequence: Synthetic oligonucleotide
  Sense strand starting at position 2484 of SEQ ID NO: 913543
cucuuaauccaccgugaug

SEQ ID NO: 935371 - RNA, 19 nt, Artificial Sequence
  Description of Artificial Sequence: Synthetic oligonucleotide
  Antisense strand to SEQ ID NO: 935370
caucacgguggauuaagag

SEQ ID NO: 935372 - RNA, 19 nt, Artificial Sequence
  Description of Artificial Sequence: Synthetic oligonucleotide
  Sense strand starting at position 3141 of SEQ ID NO: 913543
ggauucccaugacaaagaa

SEQ ID NO: 935373 - RNA, 19 nt, Artificial Sequence
  Description of Artificial Sequence: Synthetic oligonucleotide
  Antisense strand to SEQ ID NO: 935372
uucuuugucaugggaaucc

SEQ ID NO: 935374 - RNA, 19 nt, Artificial Sequence
  Description of Artificial Sequence: Synthetic oligonucleotide
  Sense strand starting at position 3201 of SEQ ID NO: 913543
ggcuguauacauugaaagc

SEQ ID NO: 935375 - RNA, 19 nt, Artificial Sequence
  Description of Artificial Sequence: Synthetic oligonucleotide
  Antisense strand to SEQ ID NO: 935374
gcuuucaauguauacagcc

SEQ ID NO: 935376 - RNA, 19 nt, Artificial Sequence
  Description of Artificial Sequence: Synthetic oligonucleotide
  Sense strand starting at position 2652 of SEQ ID NO: 913543
acgacucuuugguugugaa

SEQ ID NO: 935377 - RNA, 19 nt, Artificial Sequence
  Description of Artificial Sequence: Synthetic oligonucleotide
  Antisense strand to SEQ ID NO: 935376
uucacaaccaaagagucgu

SEQ ID NO: 935378 - RNA, 19 nt, Artificial Sequence
  Description of Artificial Sequence: Synthetic oligonucleotide
  Sense strand starting at position 876 of SEQ ID NO: 913543
gugcgacagacuugauauc

SEQ ID NO: 935379 - RNA, 19 nt, Artificial Sequence
  Description of Artificial Sequence: Synthetic oligonucleotide
  Antisense strand to SEQ ID NO: 935378
gauaucaagucugucgcac

SEQ ID NO: 935380 - RNA, 19 nt, Artificial Sequence
  Description of Artificial Sequence: Synthetic oligonucleotide
  Sense strand starting at position 1633 of SEQ ID NO: 913543
ugcagccacugaguuauaa

SEQ ID NO: 935381 - RNA, 19 nt, Artificial Sequence
  Description of Artificial Sequence: Synthetic oligonucleotide
  Antisense strand to SEQ ID NO: 935380
uuauaacucaguggcugca

SEQ ID NO: 935382 - RNA, 19 nt, Artificial Sequence
  Description of Artificial Sequence: Synthetic oligonucleotide
  Sense strand starting at position 2651 of SEQ ID NO: 913543
gacgacucuuugguuguga

SEQ ID NO: 935383 - RNA, 19 nt, Artificial Sequence
  Description of Artificial Sequence: Synthetic oligonucleotide
  Antisense strand to SEQ ID NO: 935382
ucacaaccaaagagucguc

SEQ ID NO: 935384 - RNA, 19 nt, Artificial Sequence
  Description of Artificial Sequence: Synthetic oligonucleotide
  Sense strand starting at position 3305 of SEQ ID NO: 913543
acuagaaucuucuaaagag

SEQ ID NO: 935385 - RNA, 19 nt, Artificial Sequence
  Description of Artificial Sequence: Synthetic oligonucleotide
  Antisense strand to SEQ ID NO: 935384
cucuuuagaagauucuagu

SEQ ID NO: 935386 - RNA, 19 nt, Artificial Sequence
  Description of Artificial Sequence: Synthetic oligonucleotide
  Sense strand starting at position 2919 of SEQ ID NO: 913543
gccuaauuccagcaggcuu

SEQ ID NO: 935387 - RNA, 19 nt, Artificial Sequence
  Description of Artificial Sequence: Synthetic oligonucleotide
  Antisense strand to SEQ ID NO: 935386
aagccugcuggaauuaggc

SEQ ID NO: 935388 - RNA, 19 nt, Artificial Sequence
  Description of Artificial Sequence: Synthetic oligonucleotide
  Sense strand starting at position 2253 of SEQ ID NO: 913543
ugugacaucucguuagacu

SEQ ID NO: 935389 - RNA, 19 nt, Artificial Sequence
  Description of Artificial Sequence: Synthetic oligonucleotide
  Antisense strand to SEQ ID NO: 935388
agucuaacgagaugucaca

SEQ ID NO: 935390 - RNA, 19 nt, Artificial Sequence
  Description of Artificial Sequence: Synthetic oligonucleotide
  Sense strand starting at position 3957 of SEQ ID NO: 913543
cccgguagcgccuaagaaa

SEQ ID NO: 935391 - RNA, 19 nt, Artificial Sequence
  Description of Artificial Sequence: Synthetic oligonucleotide
  Antisense strand to SEQ ID NO: 935390
uuucuuaggcgcuaccggg

SEQ ID NO: 935392 - RNA, 19 nt, Artificial Sequence
  Description of Artificial Sequence: Synthetic oligonucleotide
  Sense strand starting at position 3862 of SEQ ID NO: 913543
ugagguagcucuguugacu

SEQ ID NO: 935393 - RNA, 19 nt, Artificial Sequence
  Description of Artificial Sequence: Synthetic oligonucleotide
  Antisense strand to SEQ ID NO: 935392
agucaacagagcuaccuca

SEQ ID NO: 935394 - RNA, 19 nt, Artificial Sequence
  Description of Artificial Sequence: Synthetic oligonucleotide
  Sense strand starting at position 2765 of SEQ ID NO: 913543
cagggaagggcguguguaa

SEQ ID NO: 935395 - RNA, 19 nt, Artificial Sequence
  Description of Artificial Sequence: Synthetic oligonucleotide
  Antisense strand to SEQ ID NO: 935394
uuacacacgcccuucccug

SEQ ID NO: 935396 - RNA, 19 nt, Artificial Sequence
  Description of Artificial Sequence: Synthetic oligonucleotide
  Sense strand starting at position 2653 of SEQ ID NO: 913543
cgacucuuugguugugaau

SEQ ID NO: 935397 - RNA, 19 nt, Artificial Sequence
  Description of Artificial Sequence: Synthetic oligonucleotide
  Antisense strand to SEQ ID NO: 935396
auucacaaccaaagagucg

SEQ ID NO: 935398 - RNA, 19 nt, Artificial Sequence
  Description of Artificial Sequence: Synthetic oligonucleotide
  Sense strand starting at position 1353 of SEQ ID NO: 913544
guuucuagugccuugcaua

SEQ ID NO: 935399 - RNA, 19 nt, Artificial Sequence
  Description of Artificial Sequence: Synthetic oligonucleotide
  Antisense strand to SEQ ID NO: 935398
uaugcaaggcacuagaaac

SEQ ID NO: 935400 - RNA, 19 nt, Artificial Sequence
  Description of Artificial Sequence: Synthetic oligonucleotide
  Sense strand starting at position 1451 of SEQ ID NO: 913544
uggguauuggcacaugaga

SEQ ID NO: 935401 - RNA, 19 nt, Artificial Sequence
  Description of Artificial Sequence: Synthetic oligonucleotide
  Antisense strand to SEQ ID NO: 935400
ucucaugugccaauaccca

SEQ ID NO: 935402 - RNA, 19 nt, Artificial Sequence
  Description of Artificial Sequence: Synthetic oligonucleotide
  Sense strand starting at position 3687 of SEQ ID NO: 913544
uuuaucuuggcugaagaua

SEQ ID NO: 935403 - RNA, 19 nt, Artificial Sequence
  Description of Artificial Sequence: Synthetic oligonucleotide
  Antisense strand to SEQ ID NO: 935402
uaucuucagccaagauaaa

SEQ ID NO: 935404 - RNA, 19 nt, Artificial Sequence
  Description of Artificial Sequence: Synthetic oligonucleotide
  Sense strand starting at position 2438 of SEQ ID NO: 913544
guuauauggguauacuaca

SEQ ID NO: 935405 - RNA, 19 nt, Artificial Sequence
  Description of Artificial Sequence: Synthetic oligonucleotide
  Antisense strand to SEQ ID NO: 935404
uguaguauacccauauaac

SEQ ID NO: 935406 - RNA, 19 nt, Artificial Sequence
  Description of Artificial Sequence: Synthetic oligonucleotide
  Sense strand starting at position 851 of SEQ ID NO: 913544
acaccagaguuaucauuga

SEQ ID NO: 935407 - RNA, 19 nt, Artificial Sequence
  Description of Artificial Sequence: Synthetic oligonucleotide
  Antisense strand to SEQ ID NO: 935406
ucaaugauaacucuggugu

SEQ ID NO: 935408 - RNA, 19 nt, Artificial Sequence
  Description of Artificial Sequence: Synthetic oligonucleotide
  Sense strand starting at position 3205 of SEQ ID NO: 913544
guggcagaauuaccaagaa

SEQ ID NO: 935409 - RNA, 19 nt, Artificial Sequence
  Description of Artificial Sequence: Synthetic oligonucleotide
  Antisense strand to SEQ ID NO: 935408
uucuugguaauucugccac

SEQ ID NO: 935410 - RNA, 19 nt, Artificial Sequence
  Description of Artificial Sequence: Synthetic oligonucleotide
  Sense strand starting at position 2568 of SEQ ID NO: 913544
acaguaauuuaggaauaac

SEQ ID NO: 935411 - RNA, 19 nt, Artificial Sequence
  Description of Artificial Sequence: Synthetic oligonucleotide
  Antisense strand to SEQ ID NO: 935410
guuauuccuaaauuacugu

SEQ ID NO: 935412 - RNA, 19 nt, Artificial Sequence
  Description of Artificial Sequence: Synthetic oligonucleotide
  Sense strand starting at position 1869 of SEQ ID NO: 913544
gaguauugcccauauacag

SEQ ID NO: 935413 - RNA, 19 nt, Artificial Sequence
  Description of Artificial Sequence: Synthetic oligonucleotide
  Antisense strand to SEQ ID NO: 935412
cuguauaugggcaauacuc

SEQ ID NO: 935414 - RNA, 19 nt, Artificial Sequence
  Description of Artificial Sequence: Synthetic oligonucleotide
  Sense strand starting at position 2618 of SEQ ID NO: 913544
ucugaauuguuauugagga

SEQ ID NO: 935415 - RNA, 19 nt, Artificial Sequence
  Description of Artificial Sequence: Synthetic oligonucleotide
  Antisense strand to SEQ ID NO: 935414
uccucaauaacaauucaga

SEQ ID NO: 935416 - RNA, 19 nt, Artificial Sequence
  Description of Artificial Sequence: Synthetic oligonucleotide
  Sense strand starting at position 1907 of SEQ ID NO: 913544
agcaauuucuuguauuuag

SEQ ID NO: 935417 - RNA, 19 nt, Artificial Sequence
  Description of Artificial Sequence: Synthetic oligonucleotide
  Antisense strand to SEQ ID NO: 935416
cuaaauacaagaaauugcu

SEQ ID NO: 935418 - RNA, 19 nt, Artificial Sequence
  Description of Artificial Sequence: Synthetic oligonucleotide
  Sense strand starting at position 2436 of SEQ ID NO: 913544
uuguuauauggguauacua

SEQ ID NO: 935419 - RNA, 19 nt, Artificial Sequence
  Description of Artificial Sequence: Synthetic oligonucleotide
  Antisense strand to SEQ ID NO: 935418
uaguauacccauauaacaa

SEQ ID NO: 935420 - RNA, 19 nt, Artificial Sequence
  Description of Artificial Sequence: Synthetic oligonucleotide
  Sense strand starting at position 1210 of SEQ ID NO: 913544
auuuaagucugcgcacaaa

SEQ ID NO: 935421 - RNA, 19 nt, Artificial Sequence
  Description of Artificial Sequence: Synthetic oligonucleotide
  Antisense strand to SEQ ID NO: 935420
uuugugcgcagacuuaaau

SEQ ID NO: 935422 - RNA, 19 nt, Artificial Sequence
  Description of Artificial Sequence: Synthetic oligonucleotide
  Sense strand starting at position 2281 of SEQ ID NO: 913544
ugauacuucccugaagcga

SEQ ID NO: 935423 - RNA, 19 nt, Artificial Sequence
  Description of Artificial Sequence: Synthetic oligonucleotide
  Antisense strand to SEQ ID NO: 935422
ucgcuucagggaaguauca

SEQ ID NO: 935424 - RNA, 19 nt, Artificial Sequence
  Description of Artificial Sequence: Synthetic oligonucleotide
  Sense strand starting at position 1453 of SEQ ID NO: 913544
gguauuggcacaugagaau

SEQ ID NO: 935425 - RNA, 19 nt, Artificial Sequence
  Description of Artificial Sequence: Synthetic oligonucleotide
  Antisense strand to SEQ ID NO: 935424
auucucaugugccaauacc

SEQ ID NO: 935426 - RNA, 19 nt, Artificial Sequence
  Description of Artificial Sequence: Synthetic oligonucleotide
  Sense strand starting at position 1208 of SEQ ID NO: 913544
auauuuaagucugcgcaca

SEQ ID NO: 935427 - RNA, 19 nt, Artificial Sequence
  Description of Artificial Sequence: Synthetic oligonucleotide
  Antisense strand to SEQ ID NO: 935426
ugugcgcagacuuaaauau

SEQ ID NO: 935428 - RNA, 19 nt, Artificial Sequence
  Description of Artificial Sequence: Synthetic oligonucleotide
  Sense strand starting at position 3755 of SEQ ID NO: 913544
cuaaguuaacuauggcaaa

SEQ ID NO: 935429 - RNA, 19 nt, Artificial Sequence
  Description of Artificial Sequence: Synthetic oligonucleotide
  Antisense strand to SEQ ID NO: 935428
uuugccauaguuaacuuag

SEQ ID NO: 935430 - RNA, 19 nt, Artificial Sequence
  Description of Artificial Sequence: Synthetic oligonucleotide
  Sense strand starting at position 2419 of SEQ ID NO: 913544
gaaguacuuguacagguuu

SEQ ID NO: 935431 - RNA, 19 nt, Artificial Sequence
  Description of Artificial Sequence: Synthetic oligonucleotide
  Antisense strand to SEQ ID NO: 935430
aaaccuguacaaguacuuc

SEQ ID NO: 935432 - RNA, 19 nt, Artificial Sequence
  Description of Artificial Sequence: Synthetic oligonucleotide
  Sense strand starting at position 1388 of SEQ ID NO: 913544
auaguaauagcucaguuac

SEQ ID NO: 935433 - RNA, 19 nt, Artificial Sequence
  Description of Artificial Sequence: Synthetic oligonucleotide
  Antisense strand to SEQ ID NO: 935432
guaacugagcuauuacuau

SEQ ID NO: 935434 - RNA, 19 nt, Artificial Sequence
  Description of Artificial Sequence: Synthetic oligonucleotide
  Sense strand starting at position 1209 of SEQ ID NO: 913544
uauuuaagucugcgcacaa

SEQ ID NO: 935435 - RNA, 19 nt, Artificial Sequence
  Description of Artificial Sequence: Synthetic oligonucleotide
  Antisense strand to SEQ ID NO: 935434
uugugcgcagacuuaaaua

SEQ ID NO: 935436 - RNA, 19 nt, Artificial Sequence
  Description of Artificial Sequence: Synthetic oligonucleotide
  Sense strand starting at position 694 of SEQ ID NO: 913544
aaacacgagugacauuuaa

SEQ ID NO: 935437 - RNA, 19 nt, Artificial Sequence
  Description of Artificial Sequence: Synthetic oligonucleotide
  Antisense strand to SEQ ID NO: 935436
uuaaaugucacucguguuu

SEQ ID NO: 935438 - RNA, 19 nt, Artificial Sequence
  Description of Artificial Sequence: Synthetic oligonucleotide
  Sense strand starting at position 1337 of SEQ ID NO: 913544
gucuaaaguauguaaaguu

SEQ ID NO: 935439 - RNA, 19 nt, Artificial Sequence
  Description of Artificial Sequence: Synthetic oligonucleotide
  Antisense strand to SEQ ID NO: 935438
aacuuuacauacuuuagac

SEQ ID NO: 935440 - RNA, 19 nt, Artificial Sequence
  Description of Artificial Sequence: Synthetic oligonucleotide
  Sense strand starting at position 1599 of SEQ ID NO: 913544
cugcuaauauacucggaaa

SEQ ID NO: 935441 - RNA, 19 nt, Artificial Sequence
  Description of Artificial Sequence: Synthetic oligonucleotide
  Antisense strand to SEQ ID NO: 935440
uuuccgaguauauuagcag

SEQ ID NO: 935442 - RNA, 19 nt, Artificial Sequence
  Description of Artificial Sequence: Synthetic oligonucleotide
  Sense strand starting at position 3044 of SEQ ID NO: 913544
uaguaaaugugcuuagaaa

SEQ ID NO: 935443 - RNA, 19 nt, Artificial Sequence
  Description of Artificial Sequence: Synthetic oligonucleotide
  Antisense strand to SEQ ID NO: 935442
uuucuaagcacauuuacua

SEQ ID NO: 935444 - RNA, 19 nt, Artificial Sequence
  Description of Artificial Sequence: Synthetic oligonucleotide
  Sense strand starting at position 2939 of SEQ ID NO: 913544
gccagcagaggguauuauu

SEQ ID NO: 935445 - RNA, 19 nt, Artificial Sequence
  Description of Artificial Sequence: Synthetic oligonucleotide
  Antisense strand to SEQ ID NO: 935444
aauaauacccucugcuggc

SEQ ID NO: 935446 - RNA, 19 nt, Artificial Sequence
  Description of Artificial Sequence: Synthetic oligonucleotide
  Sense strand starting at position 1865 of SEQ ID NO: 913544
gacagaguauugcccauau

SEQ ID NO: 935447 - RNA, 19 nt, Artificial Sequence
  Description of Artificial Sequence: Synthetic oligonucleotide
  Antisense strand to SEQ ID NO: 935446
auaugggcaauacucuguc

SEQ ID NO: 935448 - RNA, 19 nt, Artificial Sequence
  Description of Artificial Sequence: Synthetic oligonucleotide
  Sense strand starting at position 178 of SEQ ID NO: 913544
ccaguuuagugaguacaag

SEQ ID NO: 935449 - RNA, 19 nt, Artificial Sequence
  Description of Artificial Sequence: Synthetic oligonucleotide
  Antisense strand to SEQ ID NO: 935448
cuuguacucacuaaacugg

SEQ ID NO: 935450 - RNA, 19 nt, Artificial Sequence
  Description of Artificial Sequence: Synthetic oligonucleotide
  Sense strand starting at position 1040 of SEQ ID NO: 913544
agagucauucuagguaucu

SEQ ID NO: 935451 - RNA, 19 nt, Artificial Sequence
  Description of Artificial Sequence: Synthetic oligonucleotide
  Antisense strand to SEQ ID NO: 935450
agauaccuagaaugacucu

SEQ ID NO: 935452 - RNA, 19 nt, Artificial Sequence
  Description of Artificial Sequence: Synthetic oligonucleotide
  Sense strand starting at position 1041 of SEQ ID NO: 913544
gagucauucuagguaucug

SEQ ID NO: 935453 - RNA, 19 nt, Artificial Sequence
  Description of Artificial Sequence: Synthetic oligonucleotide
  Antisense strand to SEQ ID NO: 935452
cagauaccuagaaugacuc

SEQ ID NO: 935454 - RNA, 19 nt, Artificial Sequence
  Description of Artificial Sequence: Synthetic oligonucleotide
  Sense strand starting at position 1374 of SEQ ID NO: 913544
guuacucaaucauuauagu

SEQ ID NO: 935455 - RNA, 19 nt, Artificial Sequence
  Description of Artificial Sequence: Synthetic oligonucleotide
  Antisense strand to SEQ ID NO: 935454
acuauaaugauugaguaac

SEQ ID NO: 935456 - RNA, 19 nt, Artificial Sequence
  Description of Artificial Sequence: Synthetic oligonucleotide
  Sense strand starting at position 2445 of SEQ ID NO: 913544
ggguauacuacaugaugcu

SEQ ID NO: 935457 - RNA, 19 nt, Artificial Sequence
  Description of Artificial Sequence: Synthetic oligonucleotide
  Antisense strand to SEQ ID NO: 935456
agcaucauguaguauaccc

SEQ ID NO: 935458 - RNA, 19 nt, Artificial Sequence
  Description of Artificial Sequence: Synthetic oligonucleotide
  Sense strand starting at position 1764 of SEQ ID NO: 913544
aaaguuaucuaaccgagca

SEQ ID NO: 935459 - RNA, 19 nt, Artificial Sequence
  Description of Artificial Sequence: Synthetic oligonucleotide
  Antisense strand to SEQ ID NO: 935458
ugcucgguuagauaacuuu

SEQ ID NO: 935460 - RNA, 19 nt, Artificial Sequence
  Description of Artificial Sequence: Synthetic oligonucleotide
  Sense strand starting at position 1333 of SEQ ID NO: 913544
uugugucuaaaguauguaa

SEQ ID NO: 935461 - RNA, 19 nt, Artificial Sequence
  Description of Artificial Sequence: Synthetic oligonucleotide
  Antisense strand to SEQ ID NO: 935460
uuacauacuuuagacacaa

SEQ ID NO: 935462 - RNA, 19 nt, Artificial Sequence
  Description of Artificial Sequence: Synthetic oligonucleotide
  Sense strand starting at position 2317 of SEQ ID NO: 913544
uuaagaauaugccuguuau

SEQ ID NO: 935463 - RNA, 19 nt, Artificial Sequence
  Description of Artificial Sequence: Synthetic oligonucleotide
  Antisense strand to SEQ ID NO: 935462
auaacaggcauauucuuaa

SEQ ID NO: 935464 - RNA, 19 nt, Artificial Sequence
  Description of Artificial Sequence: Synthetic oligonucleotide
  Sense strand starting at position 512 of SEQ ID NO: 913544
cuguucuauuauguagaua

SEQ ID NO: 935465 - RNA, 19 nt, Artificial Sequence
  Description of Artificial Sequence: Synthetic oligonucleotide
  Antisense strand to SEQ ID NO: 935464
uaucuacauaauagaacag

SEQ ID NO: 935466 - RNA, 19 nt, Artificial Sequence
  Description of Artificial Sequence: Synthetic oligonucleotide
  Sense strand starting at position 1390 of SEQ ID NO: 913544
aguaauagcucaguuacag

SEQ ID NO: 935467 - RNA, 19 nt, Artificial Sequence
  Description of Artificial Sequence: Synthetic oligonucleotide
  Antisense strand to SEQ ID NO: 935466
cuguaacugagcuauuacu

SEQ ID NO: 935468 - RNA, 19 nt, Artificial Sequence
  Description of Artificial Sequence: Synthetic oligonucleotide
  Sense strand starting at position 3358 of SEQ ID NO: 913544
agaacuaaauuacaggaua

SEQ ID NO: 935469 - RNA, 19 nt, Artificial Sequence
  Description of Artificial Sequence: Synthetic oligonucleotide
  Antisense strand to SEQ ID NO: 935468
uauccuguaauuuaguucu

SEQ ID NO: 935470 - RNA, 19 nt, Artificial Sequence
  Description of Artificial Sequence: Synthetic oligonucleotide
  Sense strand starting at position 3526 of SEQ ID NO: 913544
gcgguauuaugacuaacaa

SEQ ID NO: 935471 - RNA, 19 nt, Artificial Sequence
  Description of Artificial Sequence: Synthetic oligonucleotide
  Antisense strand to SEQ ID NO: 935470
uuguuagucauaauaccgc

SEQ ID NO: 935472 - RNA, 19 nt, Artificial Sequence
  Description of Artificial Sequence: Synthetic oligonucleotide
  Sense strand starting at position 3115 of SEQ ID NO: 913544
gcuucucaucuguaucaca

SEQ ID NO: 935473 - RNA, 19 nt, Artificial Sequence
  Description of Artificial Sequence: Synthetic oligonucleotide
  Antisense strand to SEQ ID NO: 935472
ugugauacagaugagaagc

SEQ ID NO: 935474 - RNA, 19 nt, Artificial Sequence
  Description of Artificial Sequence: Synthetic oligonucleotide
  Sense strand starting at position 2174 of SEQ ID NO: 913544
auacaacuugcauggucau

SEQ ID NO: 935475 - RNA, 19 nt, Artificial Sequence
  Description of Artificial Sequence: Synthetic oligonucleotide
  Antisense strand to SEQ ID NO: 935474
augaccaugcaaguuguau

SEQ ID NO: 935476 - RNA, 19 nt, Artificial Sequence
  Description of Artificial Sequence: Synthetic oligonucleotide
  Sense strand starting at position 1528 of SEQ ID NO: 913544
aauugaaucugccugaguu

SEQ ID NO: 935477 - RNA, 19 nt, Artificial Sequence
  Description of Artificial Sequence: Synthetic oligonucleotide
  Antisense strand to SEQ ID NO: 935476
aacucaggcagauucaauu

SEQ ID NO: 935478 - RNA, 19 nt, Artificial Sequence
  Description of Artificial Sequence: Synthetic oligonucleotide
  Sense strand starting at position 53 of SEQ ID NO: 913545
aaaguuuauugaguggaaa

SEQ ID NO: 935479 - RNA, 19 nt, Artificial Sequence
  Description of Artificial Sequence: Synthetic oligonucleotide
  Antisense strand to SEQ ID NO: 935478
uuuccacucaauaaacuuu

SEQ ID NO: 935480 - RNA, 19 nt, Artificial Sequence
  Description of Artificial Sequence: Synthetic oligonucleotide
  Sense strand starting at position 3601 of SEQ ID NO: 913545
guaguauuuagcugaagua

SEQ ID NO: 935481 - RNA, 19 nt, Artificial Sequence
  Description of Artificial Sequence: Synthetic oligonucleotide
  Antisense strand to SEQ ID NO: 935480
uacuucagcuaaauacuac

SEQ ID NO: 935482 - RNA, 19 nt, Artificial Sequence
  Description of Artificial Sequence: Synthetic oligonucleotide
  Sense strand starting at position 3600 of SEQ ID NO: 913545
gguaguauuuagcugaagu

SEQ ID NO: 935483 - RNA, 19 nt, Artificial Sequence
  Description of Artificial Sequence: Synthetic oligonucleotide
  Antisense strand to SEQ ID NO: 935482
acuucagcuaaauacuacc

SEQ ID NO: 935484 - RNA, 19 nt, Artificial Sequence
  Description of Artificial Sequence: Synthetic oligonucleotide
  Sense strand starting at position 455 of SEQ ID NO: 913545
acuguagaauagguaauau

SEQ ID NO: 935485 - RNA, 19 nt, Artificial Sequence
  Description of Artificial Sequence: Synthetic oligonucleotide
  Antisense strand to SEQ ID NO: 935484
auauuaccuauucuacagu

SEQ ID NO: 935486 - RNA, 19 nt, Artificial Sequence
  Description of Artificial Sequence: Synthetic oligonucleotide
  Sense strand starting at position 732 of SEQ ID NO: 913545
gggaauaacuuugucuaua

SEQ ID NO: 935487 - RNA, 19 nt, Artificial Sequence
  Description of Artificial Sequence: Synthetic oligonucleotide
  Antisense strand to SEQ ID NO: 935486
uauagacaaaguuauuccc

SEQ ID NO: 935488 - RNA, 19 nt, Artificial Sequence
  Description of Artificial Sequence: Synthetic oligonucleotide
  Sense strand starting at position 3663 of SEQ ID NO: 913545
ucacguuggauuuguugau

SEQ ID NO: 935489 - RNA, 19 nt, Artificial Sequence
  Description of Artificial Sequence: Synthetic oligonucleotide
  Antisense strand to SEQ ID NO: 935488
aucaacaaauccaacguga

SEQ ID NO: 935490 - RNA, 19 nt, Artificial Sequence
  Description of Artificial Sequence: Synthetic oligonucleotide
  Sense strand starting at position 1757 of SEQ ID NO: 913545
aaaugagaauucgcugaag

SEQ ID NO: 935491 - RNA, 19 nt, Artificial Sequence
  Description of Artificial Sequence: Synthetic oligonucleotide
  Antisense strand to SEQ ID NO: 935490
cuucagcgaauucucauuu

SEQ ID NO: 935492 - RNA, 19 nt, Artificial Sequence
  Description of Artificial Sequence: Synthetic oligonucleotide
  Sense strand starting at position 2107 of SEQ ID NO: 913545
auacuuugccuagagaccu

SEQ ID NO: 935493 - RNA, 19 nt, Artificial Sequence
  Description of Artificial Sequence: Synthetic oligonucleotide
  Antisense strand to SEQ ID NO: 935492
aggucucuaggcaaaguau

SEQ ID NO: 935494 - RNA, 19 nt, Artificial Sequence
  Description of Artificial Sequence: Synthetic oligonucleotide
  Sense strand starting at position 3423 of SEQ ID NO: 913545
gcugaagagcuuuaaauua

SEQ ID NO: 935495 - RNA, 19 nt, Artificial Sequence
  Description of Artificial Sequence: Synthetic oligonucleotide
  Antisense strand to SEQ ID NO: 935494
uaauuuaaagcucuucagc

SEQ ID NO: 935496 - RNA, 19 nt, Artificial Sequence
  Description of Artificial Sequence: Synthetic oligonucleotide
  Sense strand starting at position 465 of SEQ ID NO: 913545
agguaauauucuguggaaa

SEQ ID NO: 935497 - RNA, 19 nt, Artificial Sequence
  Description of Artificial Sequence: Synthetic oligonucleotide
  Antisense strand to SEQ ID NO: 935496
uuuccacagaauauuaccu

SEQ ID NO: 935498 - RNA, 19 nt, Artificial Sequence
  Description of Artificial Sequence: Synthetic oligonucleotide
  Sense strand starting at position 54 of SEQ ID NO: 913545
aaguuuauugaguggaaau

SEQ ID NO: 935499 - RNA, 19 nt, Artificial Sequence
  Description of Artificial Sequence: Synthetic oligonucleotide
  Antisense strand to SEQ ID NO: 935498
auuuccacucaauaaacuu

SEQ ID NO: 935500 - RNA, 19 nt, Artificial Sequence
  Description of Artificial Sequence: Synthetic oligonucleotide
  Sense strand starting at position 733 of SEQ ID NO: 913545
ggaauaacuuugucuauac

SEQ ID NO: 935501 - RNA, 19 nt, Artificial Sequence
  Description of Artificial Sequence: Synthetic oligonucleotide
  Antisense strand to SEQ ID NO: 935500
guauagacaaaguuauucc

SEQ ID NO: 935502 - RNA, 19 nt, Artificial Sequence
  Description of Artificial Sequence: Synthetic oligonucleotide
  Sense strand starting at position 2060 of SEQ ID NO: 913545
acugacaacuuguuacuga

SEQ ID NO: 935503 - RNA, 19 nt, Artificial Sequence
  Description of Artificial Sequence: Synthetic oligonucleotide
  Antisense strand to SEQ ID NO: 935502
ucaguaacaaguugucagu

SEQ ID NO: 935504 - RNA, 19 nt, Artificial Sequence
  Description of Artificial Sequence: Synthetic oligonucleotide
  Sense strand starting at position 3020 of SEQ ID NO: 913545
aucuaaagauucuuaguug

SEQ ID NO: 935505 - RNA, 19 nt, Artificial Sequence
  Description of Artificial Sequence: Synthetic oligonucleotide
  Antisense strand to SEQ ID NO: 935504
caacuaagaaucuuuagau

SEQ ID NO: 935506 - RNA, 19 nt, Artificial Sequence
  Description of Artificial Sequence: Synthetic oligonucleotide
  Sense strand starting at position 1536 of SEQ ID NO: 913545
gccagaaacucucugaaug

SEQ ID NO: 935507 - RNA, 19 nt, Artificial Sequence
  Description of Artificial Sequence: Synthetic oligonucleotide
  Antisense strand to SEQ ID NO: 935506
cauucagagaguuucuggc

SEQ ID NO: 935508 - RNA, 19 nt, Artificial Sequence
  Description of Artificial Sequence: Synthetic oligonucleotide
  Sense strand starting at position 121 of SEQ ID NO: 913545
aucuaugugccugauaaca

SEQ ID NO: 935509 - RNA, 19 nt, Artificial Sequence
  Description of Artificial Sequence: Synthetic oligonucleotide
  Antisense strand to SEQ ID NO: 935508
uguuaucaggcacauagau

SEQ ID NO: 935510 - RNA, 19 nt, Artificial Sequence
  Description of Artificial Sequence: Synthetic oligonucleotide
  Sense strand starting at position 362 of SEQ ID NO: 913545
agauguuuaccauagcauc

SEQ ID NO: 935511 - RNA, 19 nt, Artificial Sequence
  Description of Artificial Sequence: Synthetic oligonucleotide
  Antisense strand to SEQ ID NO: 935510
gaugcuaugguaaacaucu

SEQ ID NO: 935512 - RNA, 19 nt, Artificial Sequence
  Description of Artificial Sequence: Synthetic oligonucleotide
  Sense strand starting at position 1014 of SEQ ID NO: 913545
ucacguuaucuccagagau

SEQ ID NO: 935513 - RNA, 19 nt, Artificial Sequence
  Description of Artificial Sequence: Synthetic oligonucleotide
  Antisense strand to SEQ ID NO: 935512
aucucuggagauaacguga

SEQ ID NO: 935514 - RNA, 19 nt, Artificial Sequence
  Description of Artificial Sequence: Synthetic oligonucleotide
  Sense strand starting at position 1016 of SEQ ID NO: 913545
acguuaucuccagagaucu

SEQ ID NO: 935515 - RNA, 19 nt, Artificial Sequence
  Description of Artificial Sequence: Synthetic oligonucleotide
  Antisense strand to SEQ ID NO: 935514
agaucucuggagauaacgu

SEQ ID NO: 935516 - RNA, 19 nt, Artificial Sequence
  Description of Artificial Sequence: Synthetic oligonucleotide
  Sense strand starting at position 731 of SEQ ID NO: 913545
ugggaauaacuuugucuau

SEQ ID NO: 935517 - RNA, 19 nt, Artificial Sequence
  Description of Artificial Sequence: Synthetic oligonucleotide
  Antisense strand to SEQ ID NO: 935516
auagacaaaguuauuccca

SEQ ID NO: 935518 - RNA, 19 nt, Artificial Sequence
  Description of Artificial Sequence: Synthetic oligonucleotide
  Sense strand starting at position 744 of SEQ ID NO: 913545
gucuauacugucuguauuu

SEQ ID NO: 935519 - RNA, 19 nt, Artificial Sequence
  Description of Artificial Sequence: Synthetic oligonucleotide
  Antisense strand to SEQ ID NO: 935518
aaauacagacaguauagac

SEQ ID NO: 935520 - RNA, 19 nt, Artificial Sequence
  Description of Artificial Sequence: Synthetic oligonucleotide
  Sense strand starting at position 2893 of SEQ ID NO: 913545
gggucugggaacugucaga

SEQ ID NO: 935521 - RNA, 19 nt, Artificial Sequence
  Description of Artificial Sequence: Synthetic oligonucleotide
  Antisense strand to SEQ ID NO: 935520
ucugacaguucccagaccc

SEQ ID NO: 935522 - RNA, 19 nt, Artificial Sequence
  Description of Artificial Sequence: Synthetic oligonucleotide
  Sense strand starting at position 55 of SEQ ID NO: 913545
aguuuauugaguggaaauu

SEQ ID NO: 935523 - RNA, 19 nt, Artificial Sequence
  Description of Artificial Sequence: Synthetic oligonucleotide
  Antisense strand to SEQ ID NO: 935522
aauuuccacucaauaaacu

SEQ ID NO: 935524 - RNA, 19 nt, Artificial Sequence
  Description of Artificial Sequence: Synthetic oligonucleotide
  Sense strand starting at position 2156 of SEQ ID NO: 913545
gcauuucucuaguuccuuu

SEQ ID NO: 935525 - RNA, 19 nt, Artificial Sequence
  Description of Artificial Sequence: Synthetic oligonucleotide
  Antisense strand to SEQ ID NO: 935524
aaaggaacuagagaaaugc

SEQ ID NO: 935526 - RNA, 19 nt, Artificial Sequence
  Description of Artificial Sequence: Synthetic oligonucleotide
  Sense strand starting at position 1029 of SEQ ID NO: 913545
agaucuuaguaggcacaua

SEQ ID NO: 935527 - RNA, 19 nt, Artificial Sequence
  Description of Artificial Sequence: Synthetic oligonucleotide
  Antisense strand to SEQ ID NO: 935526
uaugugccuacuaagaucu

SEQ ID NO: 935528 - RNA, 19 nt, Artificial Sequence
  Description of Artificial Sequence: Synthetic oligonucleotide
  Sense strand starting at position 2134 of SEQ ID NO: 913545
agcucugaauaaguuuaga

SEQ ID NO: 935529 - RNA, 19 nt, Artificial Sequence
  Description of Artificial Sequence: Synthetic oligonucleotide
  Antisense strand to SEQ ID NO: 935528
ucuaaacuuauucagagcu

SEQ ID NO: 935530 - RNA, 19 nt, Artificial Sequence
  Description of Artificial Sequence: Synthetic oligonucleotide
  Sense strand starting at position 1814 of SEQ ID NO: 913545
uguuucuuccuauaaagua

SEQ ID NO: 935531 - RNA, 19 nt, Artificial Sequence
  Description of Artificial Sequence: Synthetic oligonucleotide
  Antisense strand to SEQ ID NO: 935530
uacuuuauaggaagaaaca

SEQ ID NO: 935532 - RNA, 19 nt, Artificial Sequence
  Description of Artificial Sequence: Synthetic oligonucleotide
  Sense strand starting at position 3805 of SEQ ID NO: 913545
gugugaucgcugaggcaug

SEQ ID NO: 935533 - RNA, 19 nt, Artificial Sequence
  Description of Artificial Sequence: Synthetic oligonucleotide
  Antisense strand to SEQ ID NO: 935532
caugccucagcgaucacac

SEQ ID NO: 935534 - RNA, 19 nt, Artificial Sequence
  Description of Artificial Sequence: Synthetic oligonucleotide
  Sense strand starting at position 707 of SEQ ID NO: 913545
agacuauguguaggaggua

SEQ ID NO: 935535 - RNA, 19 nt, Artificial Sequence
  Description of Artificial Sequence: Synthetic oligonucleotide
  Antisense strand to SEQ ID NO: 935534
uaccuccuacacauagucu

SEQ ID NO: 935536 - RNA, 19 nt, Artificial Sequence
  Description of Artificial Sequence: Synthetic oligonucleotide
  Sense strand starting at position 488 of SEQ ID NO: 913545
uuugguauaugguuaaaug

SEQ ID NO: 935537 - RNA, 19 nt, Artificial Sequence
  Description of Artificial Sequence: Synthetic oligonucleotide
  Antisense strand to SEQ ID NO: 935536
cauuuaaccauauaccaaa

SEQ ID NO: 935538 - RNA, 19 nt, Artificial Sequence
  Description of Artificial Sequence: Synthetic oligonucleotide
  Sense strand starting at position 2023 of SEQ ID NO: 913545
ggugguaucuaauccugaa

SEQ ID NO: 935539 - RNA, 19 nt, Artificial Sequence
  Description of Artificial Sequence: Synthetic oligonucleotide
  Antisense strand to SEQ ID NO: 935538
uucaggauuagauaccacc

SEQ ID NO: 935540 - RNA, 19 nt, Artificial Sequence
  Description of Artificial Sequence: Synthetic oligonucleotide
  Sense strand starting at position 1028 of SEQ ID NO: 913545
gagaucuuaguaggcacau

SEQ ID NO: 935541 - RNA, 19 nt, Artificial Sequence
  Description of Artificial Sequence: Synthetic oligonucleotide
  Antisense strand to SEQ ID NO: 935540
augugccuacuaagaucuc

SEQ ID NO: 935542 - RNA, 19 nt, Artificial Sequence
  Description of Artificial Sequence: Synthetic oligonucleotide
  Sense strand starting at position 2423 of SEQ ID NO: 913545
uccaguauuuaugaggaac

SEQ ID NO: 935543 - RNA, 19 nt, Artificial Sequence
  Description of Artificial Sequence: Synthetic oligonucleotide
  Antisense strand to SEQ ID NO: 935542
guuccucauaaauacugga

SEQ ID NO: 935544 - RNA, 19 nt, Artificial Sequence
  Description of Artificial Sequence: Synthetic oligonucleotide
  Sense strand starting at position 3785 of SEQ ID NO: 913545
agagaaaucugccuuucuc

SEQ ID NO: 935545 - RNA, 19 nt, Artificial Sequence
  Description of Artificial Sequence: Synthetic oligonucleotide
  Antisense strand to SEQ ID NO: 935544
gagaaaggcagauuucucu

SEQ ID NO: 935546 - RNA, 19 nt, Artificial Sequence
  Description of Artificial Sequence: Synthetic oligonucleotide
  Sense strand starting at position 1760 of SEQ ID NO: 913545
ugagaauucgcugaaguuc

SEQ ID NO: 935547 - RNA, 19 nt, Artificial Sequence
  Description of Artificial Sequence: Synthetic oligonucleotide
  Antisense strand to SEQ ID NO: 935546
gaacuucagcgaauucuca

SEQ ID NO: 935548 - RNA, 19 nt, Artificial Sequence
  Description of Artificial Sequence: Synthetic oligonucleotide
  Sense strand starting at position 1482 of SEQ ID NO: 913545
gcauccaggccauaucuua

SEQ ID NO: 935549 - RNA, 19 nt, Artificial Sequence
  Description of Artificial Sequence: Synthetic oligonucleotide
  Antisense strand to SEQ ID NO: 935548
uaagauauggccuggaugc

SEQ ID NO: 935550 - RNA, 19 nt, Artificial Sequence
  Description of Artificial Sequence: Synthetic oligonucleotide
  Sense strand starting at position 2764 of SEQ ID NO: 913545
augaacuacuuguuugagu

SEQ ID NO: 935551 - RNA, 19 nt, Artificial Sequence
  Description of Artificial Sequence: Synthetic oligonucleotide
  Antisense strand to SEQ ID NO: 935550
acucaaacaaguaguucau

SEQ ID NO: 935552 - RNA, 19 nt, Artificial Sequence
  Description of Artificial Sequence: Synthetic oligonucleotide
  Sense strand starting at position 2911 of SEQ ID NO: 913545
agaaucaacuaugaaagga

SEQ ID NO: 935553 - RNA, 19 nt, Artificial Sequence
  Description of Artificial Sequence: Synthetic oligonucleotide
  Antisense strand to SEQ ID NO: 935552
uccuuucauaguugauucu

SEQ ID NO: 935554 - RNA, 19 nt, Artificial Sequence
  Description of Artificial Sequence: Synthetic oligonucleotide
  Sense strand starting at position 903 of SEQ ID NO: 913545
ucucaauauguugagcuuu

SEQ ID NO: 935555 - RNA, 19 nt, Artificial Sequence
  Description of Artificial Sequence: Synthetic oligonucleotide
  Antisense strand to SEQ ID NO: 935554
aaagcucaacauauugaga

SEQ ID NO: 935556 - RNA, 19 nt, Artificial Sequence
  Description of Artificial Sequence: Synthetic oligonucleotide
  Sense strand starting at position 1040 of SEQ ID NO: 913545
ggcacauaucagugacuca

SEQ ID NO: 935557 - RNA, 19 nt, Artificial Sequence
  Description of Artificial Sequence: Synthetic oligonucleotide
  Antisense strand to SEQ ID NO: 935556
ugagucacugauaugugcc

SEQ ID NO: 935558 - RNA, 19 nt, Artificial Sequence
  Description of Artificial Sequence: Synthetic oligonucleotide
  Sense strand starting at position 374 of SEQ ID NO: 913546
uaagaaaccuggcuuggaa

SEQ ID NO: 935559 - RNA, 19 nt, Artificial Sequence
  Description of Artificial Sequence: Synthetic oligonucleotide
  Antisense strand to SEQ ID NO: 935558
uuccaagccagguuucuua

SEQ ID NO: 935560 - RNA, 19 nt, Artificial Sequence
  Description of Artificial Sequence: Synthetic oligonucleotide
  Sense strand starting at position 2883 of SEQ ID NO: 913546
ggauauaugguuugaggac

SEQ ID NO: 935561 - RNA, 19 nt, Artificial Sequence
  Description of Artificial Sequence: Synthetic oligonucleotide
  Antisense strand to SEQ ID NO: 935560
guccucaaaccauauaucc

SEQ ID NO: 935562 - RNA, 19 nt, Artificial Sequence
  Description of Artificial Sequence: Synthetic oligonucleotide
  Sense strand starting at position 1090 of SEQ ID NO: 913546
uguucuuagcaugaagaaa

SEQ ID NO: 935563 - RNA, 19 nt, Artificial Sequence
  Description of Artificial Sequence: Synthetic oligonucleotide
  Antisense strand to SEQ ID NO: 935562
uuucuucaugcuaagaaca

SEQ ID NO: 935564 - RNA, 19 nt, Artificial Sequence
  Description of Artificial Sequence: Synthetic oligonucleotide
  Sense strand starting at position 2406 of SEQ ID NO: 913546
ggaggcuuaccucauacca

SEQ ID NO: 935565 - RNA, 19 nt, Artificial Sequence
  Description of Artificial Sequence: Synthetic oligonucleotide
  Antisense strand to SEQ ID NO: 935564
ugguaugagguaagccucc

SEQ ID NO: 935566 - RNA, 19 nt, Artificial Sequence
  Description of Artificial Sequence: Synthetic oligonucleotide
  Sense strand starting at position 2106 of SEQ ID NO: 913546
cuuccagagggauguaaau

SEQ ID NO: 935567 - RNA, 19 nt, Artificial Sequence
  Description of Artificial Sequence: Synthetic oligonucleotide
  Antisense strand to SEQ ID NO: 935566
auuuacaucccucuggaag

SEQ ID NO: 935568 - RNA, 19 nt, Artificial Sequence
  Description of Artificial Sequence: Synthetic oligonucleotide
  Sense strand starting at position 1308 of SEQ ID NO: 913546
uguaaacacucacugagau

SEQ ID NO: 935569 - RNA, 19 nt, Artificial Sequence
  Description of Artificial Sequence: Synthetic oligonucleotide
  Antisense strand to SEQ ID NO: 935568
aucucagugaguguuuaca

SEQ ID NO: 935570 - RNA, 19 nt, Artificial Sequence
  Description of Artificial Sequence: Synthetic oligonucleotide
  Sense strand starting at position 520 of SEQ ID NO: 913546
agcugugaaggucaaauga

SEQ ID NO: 935571 - RNA, 19 nt, Artificial Sequence
  Description of Artificial Sequence: Synthetic oligonucleotide
  Antisense strand to SEQ ID NO: 935570
ucauuugaccuucacagcu

SEQ ID NO: 935572 - RNA, 19 nt, Artificial Sequence
  Description of Artificial Sequence: Synthetic oligonucleotide
  Sense strand starting at position 1309 of SEQ ID NO: 913546
guaaacacucacugagauc

SEQ ID NO: 935573 - RNA, 19 nt, Artificial Sequence
  Description of Artificial Sequence: Synthetic oligonucleotide
  Antisense strand to SEQ ID NO: 935572
gaucucagugaguguuuac

SEQ ID NO: 935574 - RNA, 19 nt, Artificial Sequence
  Description of Artificial Sequence: Synthetic oligonucleotide
  Sense strand starting at position 3188 of SEQ ID NO: 913546
gaggaucauuauguaccau

SEQ ID NO: 935575 - RNA, 19 nt, Artificial Sequence
  Description of Artificial Sequence: Synthetic oligonucleotide
  Antisense strand to SEQ ID NO: 935574
augguacauaaugauccuc

SEQ ID NO: 935576 - RNA, 19 nt, Artificial Sequence
  Description of Artificial Sequence: Synthetic oligonucleotide
  Sense strand starting at position 2 of SEQ ID NO: 913546
ucagacuuaccuuggaauu

SEQ ID NO: 935577 - RNA, 19 nt, Artificial Sequence
  Description of Artificial Sequence: Synthetic oligonucleotide
  Antisense strand to SEQ ID NO: 935576
aauuccaagguaagucuga

SEQ ID NO: 935578 - RNA, 19 nt, Artificial Sequence
  Description of Artificial Sequence: Synthetic oligonucleotide
  Sense strand starting at position 2045 of SEQ ID NO: 913546
uggaauauccuguaacugu

SEQ ID NO: 935579 - RNA, 19 nt, Artificial Sequence
  Description of Artificial Sequence: Synthetic oligonucleotide
  Antisense strand to SEQ ID NO: 935578
acaguuacaggauauucca

SEQ ID NO: 935580 - RNA, 19 nt, Artificial Sequence
  Description of Artificial Sequence: Synthetic oligonucleotide
  Sense strand starting at position 3877 of SEQ ID NO: 913546
aaagauguugggcaucuuu

SEQ ID NO: 935581 - RNA, 19 nt, Artificial Sequence
  Description of Artificial Sequence: Synthetic oligonucleotide
  Antisense strand to SEQ ID NO: 935580
aaagaugcccaacaucuuu

SEQ ID NO: 935582 - RNA, 19 nt, Artificial Sequence
  Description of Artificial Sequence: Synthetic oligonucleotide
  Sense strand starting at position 1451 of SEQ ID NO: 913546
gagaaugcaucaguaauua

SEQ ID NO: 935583 - RNA, 19 nt, Artificial Sequence
  Description of Artificial Sequence: Synthetic oligonucleotide
  Antisense strand to SEQ ID NO: 935582
uaauuacugaugcauucuc

SEQ ID NO: 935584 - RNA, 19 nt, Artificial Sequence
  Description of Artificial Sequence: Synthetic oligonucleotide
  Sense strand starting at position 2296 of SEQ ID NO: 913546
ggucauuaucuacaccuuu

SEQ ID NO: 935585 - RNA, 19 nt, Artificial Sequence
  Description of Artificial Sequence: Synthetic oligonucleotide
  Antisense strand to SEQ ID NO: 935584
aaagguguagauaaugacc

SEQ ID NO: 935586 - RNA, 19 nt, Artificial Sequence
  Description of Artificial Sequence: Synthetic oligonucleotide
  Sense strand starting at position 1425 of SEQ ID NO: 913546
auucgaggccuauauaauu

SEQ ID NO: 935587 - RNA, 19 nt, Artificial Sequence
  Description of Artificial Sequence: Synthetic oligonucleotide
  Antisense strand to SEQ ID NO: 935586
aauuauauaggccucgaau

SEQ ID NO: 935588 - RNA, 19 nt, Artificial Sequence
  Description of Artificial Sequence: Synthetic oligonucleotide
  Sense strand starting at position 1423 of SEQ ID NO: 913546
ccauucgaggccuauauaa

SEQ ID NO: 935589 - RNA, 19 nt, Artificial Sequence
  Description of Artificial Sequence: Synthetic oligonucleotide
  Antisense strand to SEQ ID NO: 935588
uuauauaggccucgaaugg

SEQ ID NO: 935590 - RNA, 19 nt, Artificial Sequence
  Description of Artificial Sequence: Synthetic oligonucleotide
  Sense strand starting at position 2872 of SEQ ID NO: 913546
cccuuccagcuggauauau

SEQ ID NO: 935591 - RNA, 19 nt, Artificial Sequence
  Description of Artificial Sequence: Synthetic oligonucleotide
  Antisense strand to SEQ ID NO: 935590
auauauccagcuggaaggg

SEQ ID NO: 935592 - RNA, 19 nt, Artificial Sequence
  Description of Artificial Sequence: Synthetic oligonucleotide
  Sense strand starting at position 704 of SEQ ID NO: 913546
uggucacauguccacauau

SEQ ID NO: 935593 - RNA, 19 nt, Artificial Sequence
  Description of Artificial Sequence: Synthetic oligonucleotide
  Antisense strand to SEQ ID NO: 935592
auauguggacaugugacca

SEQ ID NO: 935594 - RNA, 19 nt, Artificial Sequence
  Description of Artificial Sequence: Synthetic oligonucleotide
  Sense strand starting at position 1294 of SEQ ID NO: 913546
aguguauuaccugauguaa

SEQ ID NO: 935595 - RNA, 19 nt, Artificial Sequence
  Description of Artificial Sequence: Synthetic oligonucleotide
  Antisense strand to SEQ ID NO: 935594
uuacaucagguaauacacu

SEQ ID NO: 935596 - RNA, 19 nt, Artificial Sequence
  Description of Artificial Sequence: Synthetic oligonucleotide
  Sense strand starting at position 1249 of SEQ ID NO: 913546
uaagucaccguauauggau

SEQ ID NO: 935597 - RNA, 19 nt, Artificial Sequence
  Description of Artificial Sequence: Synthetic oligonucleotide
  Antisense strand to SEQ ID NO: 935596
auccauauacggugacuua

SEQ ID NO: 935598 - RNA, 19 nt, Artificial Sequence
  Description of Artificial Sequence: Synthetic oligonucleotide
  Sense strand starting at position 2103 of SEQ ID NO: 913546
uuucuuccagagggaugua

SEQ ID NO: 935599 - RNA, 19 nt, Artificial Sequence
  Description of Artificial Sequence: Synthetic oligonucleotide
  Antisense strand to SEQ ID NO: 935598
uacaucccucuggaagaaa

SEQ ID NO: 935600 - RNA, 19 nt, Artificial Sequence
  Description of Artificial Sequence: Synthetic oligonucleotide
  Sense strand starting at position 1800 of SEQ ID NO: 913546
gcaggaaugacccaugugu

SEQ ID NO: 935601 - RNA, 19 nt, Artificial Sequence
  Description of Artificial Sequence: Synthetic oligonucleotide
  Antisense strand to SEQ ID NO: 935600
acacaugggucauuccugc

SEQ ID NO: 935602 - RNA, 19 nt, Artificial Sequence
  Description of Artificial Sequence: Synthetic oligonucleotide
  Sense strand starting at position 884 of SEQ ID NO: 913546
augucugaugcccaauuau

SEQ ID NO: 935603 - RNA, 19 nt, Artificial Sequence
  Description of Artificial Sequence: Synthetic oligonucleotide
  Antisense strand to SEQ ID NO: 935602
auaauugggcaucagacau

SEQ ID NO: 935604 - RNA, 19 nt, Artificial Sequence
  Description of Artificial Sequence: Synthetic oligonucleotide
  Sense strand starting at position 1089 of SEQ ID NO: 913546
auguucuuagcaugaagaa

SEQ ID NO: 935605 - RNA, 19 nt, Artificial Sequence
  Description of Artificial Sequence: Synthetic oligonucleotide
  Antisense strand to SEQ ID NO: 935604
uucuucaugcuaagaacau

SEQ ID NO: 935606 - RNA, 19 nt, Artificial Sequence
  Description of Artificial Sequence: Synthetic oligonucleotide
  Sense strand starting at position 617 of SEQ ID NO: 913546
ugaaauaugcagugauuau

SEQ ID NO: 935607 - RNA, 19 nt, Artificial Sequence
  Description of Artificial Sequence: Synthetic oligonucleotide
  Antisense strand to SEQ ID NO: 935606
auaaucacugcauauuuca

SEQ ID NO: 935608 - RNA, 19 nt, Artificial Sequence
  Description of Artificial Sequence: Synthetic oligonucleotide
  Sense strand starting at position 1819 of SEQ ID NO: 913546
uuacuuacuguuggagauu

SEQ ID NO: 935609 - RNA, 19 nt, Artificial Sequence
  Description of Artificial Sequence: Synthetic oligonucleotide
  Antisense strand to SEQ ID NO: 935608
aaucuccaacaguaaguaa

SEQ ID NO: 935610 - RNA, 19 nt, Artificial Sequence
  Description of Artificial Sequence: Synthetic oligonucleotide
  Sense strand starting at position 3735 of SEQ ID NO: 913546
cucuacucaucaguugaua

SEQ ID NO: 935611 - RNA, 19 nt, Artificial Sequence
  Description of Artificial Sequence: Synthetic oligonucleotide
  Antisense strand to SEQ ID NO: 935610
uaucaacugaugaguagag

SEQ ID NO: 935612 - RNA, 19 nt, Artificial Sequence
  Description of Artificial Sequence: Synthetic oligonucleotide
  Sense strand starting at position 1802 of SEQ ID NO: 913546
aggaaugacccauguguuu

SEQ ID NO: 935613 - RNA, 19 nt, Artificial Sequence
  Description of Artificial Sequence: Synthetic oligonucleotide
  Antisense strand to SEQ ID NO: 935612
aaacacaugggucauuccu

SEQ ID NO: 935614 - RNA, 19 nt, Artificial Sequence
  Description of Artificial Sequence: Synthetic oligonucleotide
  Sense strand starting at position 754 of SEQ ID NO: 913546
ggaggaguuucaguuccac

SEQ ID NO: 935615 - RNA, 19 nt, Artificial Sequence
  Description of Artificial Sequence: Synthetic oligonucleotide
  Antisense strand to SEQ ID NO: 935614
guggaacugaaacuccucc

SEQ ID NO: 935616 - RNA, 19 nt, Artificial Sequence
  Description of Artificial Sequence: Synthetic oligonucleotide
  Sense strand starting at position 517 of SEQ ID NO: 913546
gacagcugugaaggucaaa

SEQ ID NO: 935617 - RNA, 19 nt, Artificial Sequence
  Description of Artificial Sequence: Synthetic oligonucleotide
  Antisense strand to SEQ ID NO: 935616
uuugaccuucacagcuguc

SEQ ID NO: 935618 - RNA, 19 nt, Artificial Sequence
  Description of Artificial Sequence: Synthetic oligonucleotide
  Sense strand starting at position 23 of SEQ ID NO: 913546
gcugauagauuugacuaga

SEQ ID NO: 935619 - RNA, 19 nt, Artificial Sequence
  Description of Artificial Sequence: Synthetic oligonucleotide
  Antisense strand to SEQ ID NO: 935618
ucuagucaaaucuaucagc

SEQ ID NO: 935620 - RNA, 19 nt, Artificial Sequence
  Description of Artificial Sequence: Synthetic oligonucleotide
  Sense strand starting at position 2289 of SEQ ID NO: 913546
guaaacuggucauuaucua

SEQ ID NO: 935621 - RNA, 19 nt, Artificial Sequence
  Description of Artificial Sequence: Synthetic oligonucleotide
  Antisense strand to SEQ ID NO: 935620
uagauaaugaccaguuuac

SEQ ID NO: 935622 - RNA, 19 nt, Artificial Sequence
  Description of Artificial Sequence: Synthetic oligonucleotide
  Sense strand starting at position 2871 of SEQ ID NO: 913546
acccuuccagcuggauaua

SEQ ID NO: 935623 - RNA, 19 nt, Artificial Sequence
  Description of Artificial Sequence: Synthetic oligonucleotide
  Antisense strand to SEQ ID NO: 935622
uauauccagcuggaagggu

SEQ ID NO: 935624 - RNA, 19 nt, Artificial Sequence
  Description of Artificial Sequence: Synthetic oligonucleotide
  Sense strand starting at position 3930 of SEQ ID NO: 913546
ugaacugucuguuuagaua

SEQ ID NO: 935625 - RNA, 19 nt, Artificial Sequence
  Description of Artificial Sequence: Synthetic oligonucleotide
  Antisense strand to SEQ ID NO: 935624
uaucuaaacagacaguuca

SEQ ID NO: 935626 - RNA, 19 nt, Artificial Sequence
  Description of Artificial Sequence: Synthetic oligonucleotide
  Sense strand starting at position 580 of SEQ ID NO: 913546
guaagcucugaauaaugcu

SEQ ID NO: 935627 - RNA, 19 nt, Artificial Sequence
  Description of Artificial Sequence: Synthetic oligonucleotide
  Antisense strand to SEQ ID NO: 935626
agcauuauucagagcuuac

SEQ ID NO: 935628 - RNA, 19 nt, Artificial Sequence
  Description of Artificial Sequence: Synthetic oligonucleotide
  Sense strand starting at position 3876 of SEQ ID NO: 913546
caaagauguugggcaucuu

SEQ ID NO: 935629 - RNA, 19 nt, Artificial Sequence
  Description of Artificial Sequence: Synthetic oligonucleotide
  Antisense strand to SEQ ID NO: 935628
aagaugcccaacaucuuug

SEQ ID NO: 935630 - RNA, 19 nt, Artificial Sequence
  Description of Artificial Sequence: Synthetic oligonucleotide
  Sense strand starting at position 2081 of SEQ ID NO: 913546
gcccuagaaggcuauguua

SEQ ID NO: 935631 - RNA, 19 nt, Artificial Sequence
  Description of Artificial Sequence: Synthetic oligonucleotide
  Antisense strand to SEQ ID NO: 935630
uaacauagccuucuagggc

SEQ ID NO: 935632 - RNA, 19 nt, Artificial Sequence
  Description of Artificial Sequence: Synthetic oligonucleotide
  Sense strand starting at position 3169 of SEQ ID NO: 913546
uauguaggcucuuugagga

SEQ ID NO: 935633 - RNA, 19 nt, Artificial Sequence
  Description of Artificial Sequence: Synthetic oligonucleotide
  Antisense strand to SEQ ID NO: 935632
uccucaaagagccuacaua

SEQ ID NO: 935634 - RNA, 19 nt, Artificial Sequence
  Description of Artificial Sequence: Synthetic oligonucleotide
  Sense strand starting at position 3898 of SEQ ID NO: 913546
auguauauuugccauuugu

SEQ ID NO: 935635 - RNA, 19 nt, Artificial Sequence
  Description of Artificial Sequence: Synthetic oligonucleotide
  Antisense strand to SEQ ID NO: 935634
acaaauggcaaauauacau

SEQ ID NO: 935636 - RNA, 19 nt, Artificial Sequence
  Description of Artificial Sequence: Synthetic oligonucleotide
  Sense strand starting at position 3092 of SEQ ID NO: 913546
accauugcauugguuaaua

SEQ ID NO: 935637 - RNA, 19 nt, Artificial Sequence
  Description of Artificial Sequence: Synthetic oligonucleotide
  Antisense strand to SEQ ID NO: 935636
uauuaaccaaugcaauggu

SEQ ID NO: 935638 - RNA, 19 nt, Artificial Sequence
  Description of Artificial Sequence: Synthetic oligonucleotide
  Sense strand starting at position 215 of SEQ ID NO: 913547
ccagauguagcccacagaa

SEQ ID NO: 935639 - RNA, 19 nt, Artificial Sequence
  Description of Artificial Sequence: Synthetic oligonucleotide
  Antisense strand to SEQ ID NO: 935638
uucugugggcuacaucugg

SEQ ID NO: 935640 - RNA, 19 nt, Artificial Sequence
  Description of Artificial Sequence: Synthetic oligonucleotide
  Sense strand starting at position 259 of SEQ ID NO: 913547
auuagagaucauugguuga

SEQ ID NO: 935641 - RNA, 19 nt, Artificial Sequence
  Description of Artificial Sequence: Synthetic oligonucleotide
  Antisense strand to SEQ ID NO: 935640
ucaaccaaugaucucuaau

SEQ ID NO: 935642 - RNA, 19 nt, Artificial Sequence
  Description of Artificial Sequence: Synthetic oligonucleotide
  Sense strand starting at position 261 of SEQ ID NO: 913547
uagagaucauugguugaug

SEQ ID NO: 935643 - RNA, 19 nt, Artificial Sequence
  Description of Artificial Sequence: Synthetic oligonucleotide
  Antisense strand to SEQ ID NO: 935642
caucaaccaaugaucucua

SEQ ID NO: 935644 - RNA, 19 nt, Artificial Sequence
  Description of Artificial Sequence: Synthetic oligonucleotide
  Sense strand starting at position 982 of SEQ ID NO: 913547
cuggcuauauugucuauuu

SEQ ID NO: 935645 - RNA, 19 nt, Artificial Sequence
  Description of Artificial Sequence: Synthetic oligonucleotide
  Antisense strand to SEQ ID NO: 935644
aaauagacaauauagccag

SEQ ID NO: 935646 - RNA, 19 nt, Artificial Sequence
  Description of Artificial Sequence: Synthetic oligonucleotide
  Sense strand starting at position 812 of SEQ ID NO: 913547
gcacuaugagguuaaguaa

SEQ ID NO: 935647 - RNA, 19 nt, Artificial Sequence
  Description of Artificial Sequence: Synthetic oligonucleotide
  Antisense strand to SEQ ID NO: 935646
uuacuuaaccucauagugc

SEQ ID NO: 935648 - RNA, 19 nt, Artificial Sequence
  Description of Artificial Sequence: Synthetic oligonucleotide
  Sense strand starting at position 1430 of SEQ ID NO: 913547
agaggauaucauuguccuc

SEQ ID NO: 935649 - RNA, 19 nt, Artificial Sequence
  Description of Artificial Sequence: Synthetic oligonucleotide
  Antisense strand to SEQ ID NO: 935648
gaggacaaugauauccucu

SEQ ID NO: 935650 - RNA, 19 nt, Artificial Sequence
  Description of Artificial Sequence: Synthetic oligonucleotide
  Sense strand starting at position 168 of SEQ ID NO: 913547
acccuucuccaggguaaga

SEQ ID NO: 935651 - RNA, 19 nt, Artificial Sequence
  Description of Artificial Sequence: Synthetic oligonucleotide
  Antisense strand to SEQ ID NO: 935650
ucuuacccuggagaagggu

SEQ ID NO: 935652 - RNA, 19 nt, Artificial Sequence
  Description of Artificial Sequence: Synthetic oligonucleotide
  Sense strand starting at position 273 of SEQ ID NO: 913547
guugauggugucuaccaaa

SEQ ID NO: 935653 - RNA, 19 nt, Artificial Sequence
  Description of Artificial Sequence: Synthetic oligonucleotide
  Antisense strand to SEQ ID NO: 935652
uuugguagacaccaucaac

SEQ ID NO: 935654 - RNA, 19 nt, Artificial Sequence
  Description of Artificial Sequence: Synthetic oligonucleotide
  Sense strand starting at position 815 of SEQ ID NO: 913547
cuaugagguuaaguaacuu

SEQ ID NO: 935655 - RNA, 19 nt, Artificial Sequence
  Description of Artificial Sequence: Synthetic oligonucleotide
  Antisense strand to SEQ ID NO: 935654
aaguuacuuaaccucauag

SEQ ID NO: 935656 - RNA, 19 nt, Artificial Sequence
  Description of Artificial Sequence: Synthetic oligonucleotide
  Sense strand starting at position 1433 of SEQ ID NO: 913547
ggauaucauuguccucuga

SEQ ID NO: 935657 - RNA, 19 nt, Artificial Sequence
  Description of Artificial Sequence: Synthetic oligonucleotide
  Antisense strand to SEQ ID NO: 935656
ucagaggacaaugauaucc

SEQ ID NO: 935658 - RNA, 19 nt, Artificial Sequence
  Description of Artificial Sequence: Synthetic oligonucleotide
  Sense strand starting at position 263 of SEQ ID NO: 913547
gagaucauugguugauggu

SEQ ID NO: 935659 - RNA, 19 nt, Artificial Sequence
  Description of Artificial Sequence: Synthetic oligonucleotide
  Antisense strand to SEQ ID NO: 935658
accaucaaccaaugaucuc

SEQ ID NO: 935660 - RNA, 19 nt, Artificial Sequence
  Description of Artificial Sequence: Synthetic oligonucleotide
  Sense strand starting at position 2163 of SEQ ID NO: 913547
cuucucauccgucagagac

SEQ ID NO: 935661 - RNA, 19 nt, Artificial Sequence
  Description of Artificial Sequence: Synthetic oligonucleotide
  Antisense strand to SEQ ID NO: 935660
gucucugacggaugagaag

SEQ ID NO: 935662 - RNA, 19 nt, Artificial Sequence
  Description of Artificial Sequence: Synthetic oligonucleotide
  Sense strand starting at position 1435 of SEQ ID NO: 913547
auaucauuguccucugaua

SEQ ID NO: 935663 - RNA, 19 nt, Artificial Sequence
  Description of Artificial Sequence: Synthetic oligonucleotide
  Antisense strand to SEQ ID NO: 935662
uaucagaggacaaugauau

SEQ ID NO: 935664 - RNA, 19 nt, Artificial Sequence
  Description of Artificial Sequence: Synthetic oligonucleotide
  Sense strand starting at position 120 of SEQ ID NO: 913547
gaagaucuggucugccaga

SEQ ID NO: 935665 - RNA, 19 nt, Artificial Sequence
  Description of Artificial Sequence: Synthetic oligonucleotide
  Antisense strand to SEQ ID NO: 935664
ucuggcagaccagaucuuc

SEQ ID NO: 935666 - RNA, 19 nt, Artificial Sequence
  Description of Artificial Sequence: Synthetic oligonucleotide
  Sense strand starting at position 286 of SEQ ID NO: 913547
accaaaugugacugucauc

SEQ ID NO: 935667 - RNA, 19 nt, Artificial Sequence
  Description of Artificial Sequence: Synthetic oligonucleotide
  Antisense strand to SEQ ID NO: 935666
gaugacagucacauuuggu

SEQ ID NO: 935668 - RNA, 19 nt, Artificial Sequence
  Description of Artificial Sequence: Synthetic oligonucleotide
  Sense strand starting at position 135 of SEQ ID NO: 913547
cagacugguuuccuaagua

SEQ ID NO: 935669 - RNA, 19 nt, Artificial Sequence
  Description of Artificial Sequence: Synthetic oligonucleotide
  Antisense strand to SEQ ID NO: 935668
uacuuaggaaaccagucug

SEQ ID NO: 935670 - RNA, 19 nt, Artificial Sequence
  Description of Artificial Sequence: Synthetic oligonucleotide
  Sense strand starting at position 134 of SEQ ID NO: 913547
ccagacugguuuccuaagu

SEQ ID NO: 935671 - RNA, 19 nt, Artificial Sequence
  Description of Artificial Sequence: Synthetic oligonucleotide
  Antisense strand to SEQ ID NO: 935670
acuuaggaaaccagucugg

SEQ ID NO: 935672 - RNA, 19 nt, Artificial Sequence
  Description of Artificial Sequence: Synthetic oligonucleotide
  Sense strand starting at position 3759 of SEQ ID NO: 913547
agaagaaacuauggagaaa

SEQ ID NO: 935673 - RNA, 19 nt, Artificial Sequence
  Description of Artificial Sequence: Synthetic oligonucleotide
  Antisense strand to SEQ ID NO: 935672
uuucuccauaguuucuucu

SEQ ID NO: 935674 - RNA, 19 nt, Artificial Sequence
  Description of Artificial Sequence: Synthetic oligonucleotide
  Sense strand starting at position 1703 of SEQ ID NO: 913547
cuggaugugccuugauaca

SEQ ID NO: 935675 - RNA, 19 nt, Artificial Sequence
  Description of Artificial Sequence: Synthetic oligonucleotide
  Antisense strand to SEQ ID NO: 935674
uguaucaaggcacauccag

SEQ ID NO: 935676 - RNA, 19 nt, Artificial Sequence
  Description of Artificial Sequence: Synthetic oligonucleotide
  Sense strand starting at position 272 of SEQ ID NO: 913547
gguugauggugucuaccaa

SEQ ID NO: 935677 - RNA, 19 nt, Artificial Sequence
  Description of Artificial Sequence: Synthetic oligonucleotide
  Antisense strand to SEQ ID NO: 935676
uugguagacaccaucaacc

SEQ ID NO: 935678 - RNA, 19 nt, Artificial Sequence
  Description of Artificial Sequence: Synthetic oligonucleotide
  Sense strand starting at position 320 of SEQ ID NO: 913547
ccuaaaugccuccgaugau

SEQ ID NO: 935679 - RNA, 19 nt, Artificial Sequence
  Description of Artificial Sequence: Synthetic oligonucleotide
  Antisense strand to SEQ ID NO: 935678
aucaucggaggcauuuagg

SEQ ID NO: 935680 - RNA, 19 nt, Artificial Sequence
  Description of Artificial Sequence: Synthetic oligonucleotide
  Sense strand starting at position 280 of SEQ ID NO: 913547
gugucuaccaaaugugacu

SEQ ID NO: 935681 - RNA, 19 nt, Artificial Sequence
  Description of Artificial Sequence: Synthetic oligonucleotide
  Antisense strand to SEQ ID NO: 935680
agucacauuugguagacac

SEQ ID NO: 935682 - RNA, 19 nt, Artificial Sequence
  Description of Artificial Sequence: Synthetic oligonucleotide
  Sense strand starting at position 327 of SEQ ID NO: 913547
gccuccgaugaugguaaua

SEQ ID NO: 935683 - RNA, 19 nt, Artificial Sequence
  Description of Artificial Sequence: Synthetic oligonucleotide
  Antisense strand to SEQ ID NO: 935682
uauuaccaucaucggaggc

SEQ ID NO: 935684 - RNA, 19 nt, Artificial Sequence
  Description of Artificial Sequence: Synthetic oligonucleotide
  Sense strand starting at position 2024 of SEQ ID NO: 913547
gcucuaauucucuaacguc

SEQ ID NO: 935685 - RNA, 19 nt, Artificial Sequence
  Description of Artificial Sequence: Synthetic oligonucleotide
  Antisense strand to SEQ ID NO: 935684
gacguuagagaauuagagc

SEQ ID NO: 935686 - RNA, 19 nt, Artificial Sequence
  Description of Artificial Sequence: Synthetic oligonucleotide
  Sense strand starting at position 131 of SEQ ID NO: 913547
cugccagacugguuuccua

SEQ ID NO: 935687 - RNA, 19 nt, Artificial Sequence
  Description of Artificial Sequence: Synthetic oligonucleotide
  Antisense strand to SEQ ID NO: 935686
uaggaaaccagucuggcag

SEQ ID NO: 935688 - RNA, 19 nt, Artificial Sequence
  Description of Artificial Sequence: Synthetic oligonucleotide
  Sense strand starting at position 1616 of SEQ ID NO: 913547
cccguaagcguccagaaua

SEQ ID NO: 935689 - RNA, 19 nt, Artificial Sequence
  Description of Artificial Sequence: Synthetic oligonucleotide
  Antisense strand to SEQ ID NO: 935688
uauucuggacgcuuacggg

SEQ ID NO: 935690 - RNA, 19 nt, Artificial Sequence
  Description of Artificial Sequence: Synthetic oligonucleotide
  Sense strand starting at position 849 of SEQ ID NO: 913547
gcaaguuaauggcagauuu

SEQ ID NO: 935691 - RNA, 19 nt, Artificial Sequence
  Description of Artificial Sequence: Synthetic oligonucleotide
  Antisense strand to SEQ ID NO: 935690
aaaucugccauuaacuugc

SEQ ID NO: 935692 - RNA, 19 nt, Artificial Sequence
  Description of Artificial Sequence: Synthetic oligonucleotide
  Sense strand starting at position 2023 of SEQ ID NO: 913547
ugcucuaauucucuaacgu

SEQ ID NO: 935693 - RNA, 19 nt, Artificial Sequence
  Description of Artificial Sequence: Synthetic oligonucleotide
  Antisense strand to SEQ ID NO: 935692
acguuagagaauuagagca

SEQ ID NO: 935694 - RNA, 19 nt, Artificial Sequence
  Description of Artificial Sequence: Synthetic oligonucleotide
  Sense strand starting at position 2014 of SEQ ID NO: 913547
cggagcuccugcucuaauu

SEQ ID NO: 935695 - RNA, 19 nt, Artificial Sequence
  Description of Artificial Sequence: Synthetic oligonucleotide
  Antisense strand to SEQ ID NO: 935694
aauuagagcaggagcuccg

SEQ ID NO: 935696 - RNA, 19 nt, Artificial Sequence
  Description of Artificial Sequence: Synthetic oligonucleotide
  Sense strand starting at position 45 of SEQ ID NO: 913547
ccgguagccuuccuaagua

SEQ ID NO: 935697 - RNA, 19 nt, Artificial Sequence
  Description of Artificial Sequence: Synthetic oligonucleotide
  Antisense strand to SEQ ID NO: 935696
uacuuaggaaggcuaccgg

SEQ ID NO: 935698 - RNA, 19 nt, Artificial Sequence
  Description of Artificial Sequence: Synthetic oligonucleotide
  Sense strand starting at position 2152 of SEQ ID NO: 913547
ccgucuuguuccuucucau

SEQ ID NO: 935699 - RNA, 19 nt, Artificial Sequence
  Description of Artificial Sequence: Synthetic oligonucleotide
  Antisense strand to SEQ ID NO: 935698
augagaaggaacaagacgg

SEQ ID NO: 935700 - RNA, 19 nt, Artificial Sequence
  Description of Artificial Sequence: Synthetic oligonucleotide
  Sense strand starting at position 329 of SEQ ID NO: 913547
cuccgaugaugguaauauu

SEQ ID NO: 935701 - RNA, 19 nt, Artificial Sequence
  Description of Artificial Sequence: Synthetic oligonucleotide
  Antisense strand to SEQ ID NO: 935700
aauauuaccaucaucggag

SEQ ID NO: 935702 - RNA, 19 nt, Artificial Sequence
  Description of Artificial Sequence: Synthetic oligonucleotide
  Sense strand starting at position 321 of SEQ ID NO: 913547
cuaaaugccuccgaugaug

SEQ ID NO: 935703 - RNA, 19 nt, Artificial Sequence
  Description of Artificial Sequence: Synthetic oligonucleotide
  Antisense strand to SEQ ID NO: 935702
caucaucggaggcauuuag

SEQ ID NO: 935704 - RNA, 19 nt, Artificial Sequence
  Description of Artificial Sequence: Synthetic oligonucleotide
  Sense strand starting at position 276 of SEQ ID NO: 913547
gauggugucuaccaaaugu

SEQ ID NO: 935705 - RNA, 19 nt, Artificial Sequence
  Description of Artificial Sequence: Synthetic oligonucleotide
  Antisense strand to SEQ ID NO: 935704
acauuugguagacaccauc

SEQ ID NO: 935706 - RNA, 19 nt, Artificial Sequence
  Description of Artificial Sequence: Synthetic oligonucleotide
  Sense strand starting at position 3944 of SEQ ID NO: 913547
uggugauacuaggguuaau

SEQ ID NO: 935707 - RNA, 19 nt, Artificial Sequence
  Description of Artificial Sequence: Synthetic oligonucleotide
  Antisense strand to SEQ ID NO: 935706
auuaacccuaguaucacca

SEQ ID NO: 935708 - RNA, 19 nt, Artificial Sequence
  Description of Artificial Sequence: Synthetic oligonucleotide
  Sense strand starting at position 297 of SEQ ID NO: 913547
cugucauccugucaugagu

SEQ ID NO: 935709 - RNA, 19 nt, Artificial Sequence
  Description of Artificial Sequence: Synthetic oligonucleotide
  Antisense strand to SEQ ID NO: 935708
acucaugacaggaugacag

SEQ ID NO: 935710 - RNA, 19 nt, Artificial Sequence
  Description of Artificial Sequence: Synthetic oligonucleotide
  Sense strand starting at position 2102 of SEQ ID NO: 913547
gcgugaaggucuugagagg

SEQ ID NO: 935711 - RNA, 19 nt, Artificial Sequence
  Description of Artificial Sequence: Synthetic oligonucleotide
  Antisense strand to SEQ ID NO: 935710
ccucucaagaccuucacgc

SEQ ID NO: 935712 - RNA, 19 nt, Artificial Sequence
  Description of Artificial Sequence: Synthetic oligonucleotide
  Sense strand starting at position 306 of SEQ ID NO: 913547
ugucaugaguccugccuaa

SEQ ID NO: 935713 - RNA, 19 nt, Artificial Sequence
  Description of Artificial Sequence: Synthetic oligonucleotide
  Antisense strand to SEQ ID NO: 935712
uuaggcaggacucaugaca

SEQ ID NO: 935714 - RNA, 19 nt, Artificial Sequence
  Description of Artificial Sequence: Synthetic oligonucleotide
  Sense strand starting at position 2233 of SEQ ID NO: 913548
cuaugugaauauccuaaga

SEQ ID NO: 935715 - RNA, 19 nt, Artificial Sequence
  Description of Artificial Sequence: Synthetic oligonucleotide
  Antisense strand to SEQ ID NO: 935714
ucuuaggauauucacauag

SEQ ID NO: 935716 - RNA, 19 nt, Artificial Sequence
  Description of Artificial Sequence: Synthetic oligonucleotide
  Sense strand starting at position 1197 of SEQ ID NO: 913548
cagaguuguguauucgugu

SEQ ID NO: 935717 - RNA, 19 nt, Artificial Sequence
  Description of Artificial Sequence: Synthetic oligonucleotide
  Antisense strand to SEQ ID NO: 935716
acacgaauacacaacucug

SEQ ID NO: 935718 - RNA, 19 nt, Artificial Sequence
  Description of Artificial Sequence: Synthetic oligonucleotide
  Sense strand starting at position 1202 of SEQ ID NO: 913548
uuguguauucgugugagca

SEQ ID NO: 935719 - RNA, 19 nt, Artificial Sequence
  Description of Artificial Sequence: Synthetic oligonucleotide
  Antisense strand to SEQ ID NO: 935718
ugcucacacgaauacacaa

SEQ ID NO: 935720 - RNA, 19 nt, Artificial Sequence
  Description of Artificial Sequence: Synthetic oligonucleotide
  Sense strand starting at position 170 of SEQ ID NO: 913548
cgcuaugugcaugcacauu

SEQ ID NO: 935721 - RNA, 19 nt, Artificial Sequence
  Description of Artificial Sequence: Synthetic oligonucleotide
  Antisense strand to SEQ ID NO: 935720
aaugugcaugcacauagcg

SEQ ID NO: 935722 - RNA, 19 nt, Artificial Sequence
  Description of Artificial Sequence: Synthetic oligonucleotide
  Sense strand starting at position 812 of SEQ ID NO: 913548
agucacaaucuauagcgaa

SEQ ID NO: 935723 - RNA, 19 nt, Artificial Sequence
  Description of Artificial Sequence: Synthetic oligonucleotide
  Antisense strand to SEQ ID NO: 935722
uucgcuauagauugugacu

SEQ ID NO: 935724 - RNA, 19 nt, Artificial Sequence
  Description of Artificial Sequence: Synthetic oligonucleotide
  Sense strand starting at position 3939 of SEQ ID NO: 913548
ugacuuacaggcugaacua

SEQ ID NO: 935725 - RNA, 19 nt, Artificial Sequence
  Description of Artificial Sequence: Synthetic oligonucleotide
  Antisense strand to SEQ ID NO: 935724
uaguucagccuguaaguca

SEQ ID NO: 935726 - RNA, 19 nt, Artificial Sequence
  Description of Artificial Sequence: Synthetic oligonucleotide
  Sense strand starting at position 3850 of SEQ ID NO: 913548
uaauacucugugugaagaa

SEQ ID NO: 935727 - RNA, 19 nt, Artificial Sequence
  Description of Artificial Sequence: Synthetic oligonucleotide
  Antisense strand to SEQ ID NO: 935726
uucuucacacagaguauua

SEQ ID NO: 935728 - RNA, 19 nt, Artificial Sequence
  Description of Artificial Sequence: Synthetic oligonucleotide
  Sense strand starting at position 3849 of SEQ ID NO: 913548
cuaauacucugugugaaga

SEQ ID NO: 935729 - RNA, 19 nt, Artificial Sequence
  Description of Artificial Sequence: Synthetic oligonucleotide
  Antisense strand to SEQ ID NO: 935728
ucuucacacagaguauuag

SEQ ID NO: 935730 - RNA, 19 nt, Artificial Sequence
  Description of Artificial Sequence: Synthetic oligonucleotide
  Sense strand starting at position 753 of SEQ ID NO: 913548
gauacuuuacuacgaaggu

SEQ ID NO: 935731 - RNA, 19 nt, Artificial Sequence
  Description of Artificial Sequence: Synthetic oligonucleotide
  Antisense strand to SEQ ID NO: 935730
accuucguaguaaaguauc

SEQ ID NO: 935732 - RNA, 19 nt, Artificial Sequence
  Description of Artificial Sequence: Synthetic oligonucleotide
  Sense strand starting at position 3936 of SEQ ID NO: 913548
gguugacuuacaggcugaa

SEQ ID NO: 935733 - RNA, 19 nt, Artificial Sequence
  Description of Artificial Sequence: Synthetic oligonucleotide
  Antisense strand to SEQ ID NO: 935732
uucagccuguaagucaacc

SEQ ID NO: 935734 - RNA, 19 nt, Artificial Sequence
  Description of Artificial Sequence: Synthetic oligonucleotide
  Sense strand starting at position 3 of SEQ ID NO: 913548
guccauaacguuuaaucua

SEQ ID NO: 935735 - RNA, 19 nt, Artificial Sequence
  Description of Artificial Sequence: Synthetic oligonucleotide
  Antisense strand to SEQ ID NO: 935734
uagauuaaacguuauggac

SEQ ID NO: 935736 - RNA, 19 nt, Artificial Sequence
  Description of Artificial Sequence: Synthetic oligonucleotide
  Sense strand starting at position 3903 of SEQ ID NO: 913548
ugggauggcugucuugaag

SEQ ID NO: 935737 - RNA, 19 nt, Artificial Sequence
  Description of Artificial Sequence: Synthetic oligonucleotide
  Antisense strand to SEQ ID NO: 935736
cuucaagacagccauccca

SEQ ID NO: 935738 - RNA, 19 nt, Artificial Sequence
  Description of Artificial Sequence: Synthetic oligonucleotide
  Sense strand starting at position 3678 of SEQ ID NO: 913548
augccuuagcagggaucaa

SEQ ID NO: 935739 - RNA, 19 nt, Artificial Sequence
  Description of Artificial Sequence: Synthetic oligonucleotide
  Antisense strand to SEQ ID NO: 935738
uugaucccugcuaaggcau

SEQ ID NO: 935740 - RNA, 19 nt, Artificial Sequence
  Description of Artificial Sequence: Synthetic oligonucleotide
  Sense strand starting at position 3848 of SEQ ID NO: 913548
ucuaauacucugugugaag

SEQ ID NO: 935741 - RNA, 19 nt, Artificial Sequence
  Description of Artificial Sequence: Synthetic oligonucleotide
  Antisense strand to SEQ ID NO: 935740
cuucacacagaguauuaga

SEQ ID NO: 935742 - RNA, 19 nt, Artificial Sequence
  Description of Artificial Sequence: Synthetic oligonucleotide
  Sense strand starting at position 1988 of SEQ ID NO: 913548
cccggaaagcaaugguaca

SEQ ID NO: 935743 - RNA, 19 nt, Artificial Sequence
  Description of Artificial Sequence: Synthetic oligonucleotide
  Antisense strand to SEQ ID NO: 935742
uguaccauugcuuuccggg

SEQ ID NO: 935744 - RNA, 19 nt, Artificial Sequence
  Description of Artificial Sequence: Synthetic oligonucleotide
  Sense strand starting at position 750 of SEQ ID NO: 913548
uccgauacuuuacuacgaa

SEQ ID NO: 935745 - RNA, 19 nt, Artificial Sequence
  Description of Artificial Sequence: Synthetic oligonucleotide
  Antisense strand to SEQ ID NO: 935744
uucguaguaaaguaucgga

SEQ ID NO: 935746 - RNA, 19 nt, Artificial Sequence
  Description of Artificial Sequence: Synthetic oligonucleotide
  Sense strand starting at position 1530 of SEQ ID NO: 913548
ggguuaccuucugcagaag

SEQ ID NO: 935747 - RNA, 19 nt, Artificial Sequence
  Description of Artificial Sequence: Synthetic oligonucleotide
  Antisense strand to SEQ ID NO: 935746
cuucugcagaagguaaccc

SEQ ID NO: 935748 - RNA, 19 nt, Artificial Sequence
  Description of Artificial Sequence: Synthetic oligonucleotide
  Sense strand starting at position 2445 of SEQ ID NO: 913548
ccaagccuaucaguuugaa

SEQ ID NO: 935749 - RNA, 19 nt, Artificial Sequence
  Description of Artificial Sequence: Synthetic oligonucleotide
  Antisense strand to SEQ ID NO: 935748
uucaaacugauaggcuugg

SEQ ID NO: 935750 - RNA, 19 nt, Artificial Sequence
  Description of Artificial Sequence: Synthetic oligonucleotide
  Sense strand starting at position 2822 of SEQ ID NO: 913548
guauguuuccauuauguga

SEQ ID NO: 935751 - RNA, 19 nt, Artificial Sequence
  Description of Artificial Sequence: Synthetic oligonucleotide
  Antisense strand to SEQ ID NO: 935750
ucacauaauggaaacauac

SEQ ID NO: 935752 - RNA, 19 nt, Artificial Sequence
  Description of Artificial Sequence: Synthetic oligonucleotide
  Sense strand starting at position 3847 of SEQ ID NO: 913548
uucuaauacucugugugaa

SEQ ID NO: 935753 - RNA, 19 nt, Artificial Sequence
  Description of Artificial Sequence: Synthetic oligonucleotide
  Antisense strand to SEQ ID NO: 935752
uucacacagaguauuagaa

SEQ ID NO: 935754 - RNA, 19 nt, Artificial Sequence
  Description of Artificial Sequence: Synthetic oligonucleotide
  Sense strand starting at position 796 of SEQ ID NO: 913548
gacguuuauguugaacagu

SEQ ID NO: 935755 - RNA, 19 nt, Artificial Sequence
  Description of Artificial Sequence: Synthetic oligonucleotide
  Antisense strand to SEQ ID NO: 935754
acuguucaacauaaacguc

SEQ ID NO: 935756 - RNA, 19 nt, Artificial Sequence
  Description of Artificial Sequence: Synthetic oligonucleotide
  Sense strand starting at position 822 of SEQ ID NO: 913548
uauagcgaacguuaauauu

SEQ ID NO: 935757 - RNA, 19 nt, Artificial Sequence
  Description of Artificial Sequence: Synthetic oligonucleotide
  Antisense strand to SEQ ID NO: 935756
aauauuaacguucgcuaua

SEQ ID NO: 935758 - RNA, 19 nt, Artificial Sequence
  Description of Artificial Sequence: Synthetic oligonucleotide
  Sense strand starting at position 1073 of SEQ ID NO: 913548
cuagcaugcacguaggaua

SEQ ID NO: 935759 - RNA, 19 nt, Artificial Sequence
  Description of Artificial Sequence: Synthetic oligonucleotide
  Antisense strand to SEQ ID NO: 935758
uauccuacgugcaugcuag

SEQ ID NO: 935760 - RNA, 19 nt, Artificial Sequence
  Description of Artificial Sequence: Synthetic oligonucleotide
  Sense strand starting at position 2816 of SEQ ID NO: 913548
ccaacaguauguuuccauu

SEQ ID NO: 935761 - RNA, 19 nt, Artificial Sequence
  Description of Artificial Sequence: Synthetic oligonucleotide
  Antisense strand to SEQ ID NO: 935760
aauggaaacauacuguugg

SEQ ID NO: 935762 - RNA, 19 nt, Artificial Sequence
  Description of Artificial Sequence: Synthetic oligonucleotide
  Sense strand starting at position 705 of SEQ ID NO: 913548
gcgauuauuauguagucag

SEQ ID NO: 935763 - RNA, 19 nt, Artificial Sequence
  Description of Artificial Sequence: Synthetic oligonucleotide
  Antisense strand to SEQ ID NO: 935762
cugacuacauaauaaucgc

SEQ ID NO: 935764 - RNA, 19 nt, Artificial Sequence
  Description of Artificial Sequence: Synthetic oligonucleotide
  Sense strand starting at position 1786 of SEQ ID NO: 913548
accugucuccgcgaggaaa

SEQ ID NO: 935765 - RNA, 19 nt, Artificial Sequence
  Description of Artificial Sequence: Synthetic oligonucleotide
  Antisense strand to SEQ ID NO: 935764
uuuccucgcggagacaggu

SEQ ID NO: 935766 - RNA, 19 nt, Artificial Sequence
  Description of Artificial Sequence: Synthetic oligonucleotide
  Sense strand starting at position 2942 of SEQ ID NO: 913548
guuaacaacuaguuuguua

SEQ ID NO: 935767 - RNA, 19 nt, Artificial Sequence
  Description of Artificial Sequence: Synthetic oligonucleotide
  Antisense strand to SEQ ID NO: 935766
uaacaaacuaguuguuaac

SEQ ID NO: 935768 - RNA, 19 nt, Artificial Sequence
  Description of Artificial Sequence: Synthetic oligonucleotide
  Sense strand starting at position 2953 of SEQ ID NO: 913548
guuuguuaacaaugcaaua

SEQ ID NO: 935769 - RNA, 19 nt, Artificial Sequence
  Description of Artificial Sequence: Synthetic oligonucleotide
  Antisense strand to SEQ ID NO: 935768
uauugcauuguuaacaaac

SEQ ID NO: 935770 - RNA, 19 nt, Artificial Sequence
  Description of Artificial Sequence: Synthetic oligonucleotide
  Sense strand starting at position 1003 of SEQ ID NO: 913548
aggguaagcaagugcuaga

SEQ ID NO: 935771 - RNA, 19 nt, Artificial Sequence
  Description of Artificial Sequence: Synthetic oligonucleotide
  Antisense strand to SEQ ID NO: 935770
ucuagcacuugcuuacccu

SEQ ID NO: 935772 - RNA, 19 nt, Artificial Sequence
  Description of Artificial Sequence: Synthetic oligonucleotide
  Sense strand starting at position 1017 of SEQ ID NO: 913548
cuagaaagcgugugaggau

SEQ ID NO: 935773 - RNA, 19 nt, Artificial Sequence
  Description of Artificial Sequence: Synthetic oligonucleotide
  Antisense strand to SEQ ID NO: 935772
auccucacacgcuuucuag

SEQ ID NO: 935774 - RNA, 19 nt, Artificial Sequence
  Description of Artificial Sequence: Synthetic oligonucleotide
  Sense strand starting at position 3846 of SEQ ID NO: 913548
uuucuaauacucuguguga

SEQ ID NO: 935775 - RNA, 19 nt, Artificial Sequence
  Description of Artificial Sequence: Synthetic oligonucleotide
  Antisense strand to SEQ ID NO: 935774
ucacacagaguauuagaaa

SEQ ID NO: 935776 - RNA, 19 nt, Artificial Sequence
  Description of Artificial Sequence: Synthetic oligonucleotide
  Sense strand starting at position 3726 of SEQ ID NO: 913548
auuggaucgcuguauucuu

SEQ ID NO: 935777 - RNA, 19 nt, Artificial Sequence
  Description of Artificial Sequence: Synthetic oligonucleotide
  Antisense strand to SEQ ID NO: 935776
aagaauacagcgauccaau

SEQ ID NO: 935778 - RNA, 19 nt, Artificial Sequence
  Description of Artificial Sequence: Synthetic oligonucleotide
  Sense strand starting at position 2050 of SEQ ID NO: 913548
gcgaaaggccacggaaauu

SEQ ID NO: 935779 - RNA, 19 nt, Artificial Sequence
  Description of Artificial Sequence: Synthetic oligonucleotide
  Antisense strand to SEQ ID NO: 935778
aauuuccguggccuuucgc

SEQ ID NO: 935780 - RNA, 19 nt, Artificial Sequence
  Description of Artificial Sequence: Synthetic oligonucleotide
  Sense strand starting at position 709 of SEQ ID NO: 913548
uuauuauguagucaguugu

SEQ ID NO: 935781 - RNA, 19 nt, Artificial Sequence
  Description of Artificial Sequence: Synthetic oligonucleotide
  Antisense strand to SEQ ID NO: 935780
acaacugacuacauaauaa

SEQ ID NO: 935782 - RNA, 19 nt, Artificial Sequence
  Description of Artificial Sequence: Synthetic oligonucleotide
  Sense strand starting at position 2276 of SEQ ID NO: 913548
uuccaugggcuuugcaaau

SEQ ID NO: 935783 - RNA, 19 nt, Artificial Sequence
  Description of Artificial Sequence: Synthetic oligonucleotide
  Antisense strand to SEQ ID NO: 935782
auuugcaaagcccauggaa

SEQ ID NO: 935784 - RNA, 19 nt, Artificial Sequence
  Description of Artificial Sequence: Synthetic oligonucleotide
  Sense strand starting at position 636 of SEQ ID NO: 913548
ucaugugucugucuugaaa

SEQ ID NO: 935785 - RNA, 19 nt, Artificial Sequence
  Description of Artificial Sequence: Synthetic oligonucleotide
  Antisense strand to SEQ ID NO: 935784
uuucaagacagacacauga

SEQ ID NO: 935786 - RNA, 19 nt, Artificial Sequence
  Description of Artificial Sequence: Synthetic oligonucleotide
  Sense strand starting at position 3772 of SEQ ID NO: 913548
gcuauugauuuaggaauau

SEQ ID NO: 935787 - RNA, 19 nt, Artificial Sequence
  Description of Artificial Sequence: Synthetic oligonucleotide
  Antisense strand to SEQ ID NO: 935786
auauuccuaaaucaauagc

SEQ ID NO: 935788 - RNA, 19 nt, Artificial Sequence
  Description of Artificial Sequence: Synthetic oligonucleotide
  Sense strand starting at position 1788 of SEQ ID NO: 913548
cugucuccgcgaggaaaga

SEQ ID NO: 935789 - RNA, 19 nt, Artificial Sequence
  Description of Artificial Sequence: Synthetic oligonucleotide
  Antisense strand to SEQ ID NO: 935788
ucuuuccucgcggagacag

SEQ ID NO: 935790 - RNA, 19 nt, Artificial Sequence
  Description of Artificial Sequence: Synthetic oligonucleotide
  Sense strand starting at position 819 of SEQ ID NO: 913548
aucuauagcgaacguuaau

SEQ ID NO: 935791 - RNA, 19 nt, Artificial Sequence
  Description of Artificial Sequence: Synthetic oligonucleotide
  Antisense strand to SEQ ID NO: 935790
auuaacguucgcuauagau

SEQ ID NO: 935792 - RNA, 19 nt, Artificial Sequence
  Description of Artificial Sequence: Synthetic oligonucleotide
  Sense strand starting at position 704 of SEQ ID NO: 913548
agcgauuauuauguaguca

SEQ ID NO: 935793 - RNA, 19 nt, Artificial Sequence
  Description of Artificial Sequence: Synthetic oligonucleotide
  Antisense strand to SEQ ID NO: 935792
ugacuacauaauaaucgcu

SEQ ID NO: 935794 - RNA, 19 nt, Artificial Sequence
  Description of Artificial Sequence: Synthetic oligonucleotide
  Sense strand starting at position 1996 of SEQ ID NO: 913549
gugacaucauaaucuagga

SEQ ID NO: 935795 - RNA, 19 nt, Artificial Sequence
  Description of Artificial Sequence: Synthetic oligonucleotide
  Antisense strand to SEQ ID NO: 935794
uccuagauuaugaugucac

SEQ ID NO: 935796 - RNA, 19 nt, Artificial Sequence
  Description of Artificial Sequence: Synthetic oligonucleotide
  Sense strand starting at position 2471 of SEQ ID NO: 913549
agaaacuuucuuggaccau

SEQ ID NO: 935797 - RNA, 19 nt, Artificial Sequence
  Description of Artificial Sequence: Synthetic oligonucleotide
  Antisense strand to SEQ ID NO: 935796
augguccaagaaaguuucu

SEQ ID NO: 935798 - RNA, 19 nt, Artificial Sequence
  Description of Artificial Sequence: Synthetic oligonucleotide
  Sense strand starting at position 364 of SEQ ID NO: 913549
agacuccugccucagacaa

SEQ ID NO: 935799 - RNA, 19 nt, Artificial Sequence
  Description of Artificial Sequence: Synthetic oligonucleotide
  Antisense strand to SEQ ID NO: 935798
uugucugaggcaggagucu

SEQ ID NO: 935800 - RNA, 19 nt, Artificial Sequence
  Description of Artificial Sequence: Synthetic oligonucleotide
  Sense strand starting at position 885 of SEQ ID NO: 913549
ccgaacuaucuauaacgga

SEQ ID NO: 935801 - RNA, 19 nt, Artificial Sequence
  Description of Artificial Sequence: Synthetic oligonucleotide
  Antisense strand to SEQ ID NO: 935800
uccguuauagauaguucgg

SEQ ID NO: 935802 - RNA, 19 nt, Artificial Sequence
  Description of Artificial Sequence: Synthetic oligonucleotide
  Sense strand starting at position 1080 of SEQ ID NO: 913549
uguauagcccuacaaauga

SEQ ID NO: 935803 - RNA, 19 nt, Artificial Sequence
  Description of Artificial Sequence: Synthetic oligonucleotide
  Antisense strand to SEQ ID NO: 935802
ucauuuguagggcuauaca

SEQ ID NO: 935804 - RNA, 19 nt, Artificial Sequence
  Description of Artificial Sequence: Synthetic oligonucleotide
  Sense strand starting at position 1621 of SEQ ID NO: 913549
cagaaacuugcuuaagguc

SEQ ID NO: 935805 - RNA, 19 nt, Artificial Sequence
  Description of Artificial Sequence: Synthetic oligonucleotide
  Antisense strand to SEQ ID NO: 935804
gaccuuaagcaaguuucug

SEQ ID NO: 935806 - RNA, 19 nt, Artificial Sequence
  Description of Artificial Sequence: Synthetic oligonucleotide
  Sense strand starting at position 2761 of SEQ ID NO: 913549
cucuguugagacugauaga

SEQ ID NO: 935807 - RNA, 19 nt, Artificial Sequence
  Description of Artificial Sequence: Synthetic oligonucleotide
  Antisense strand to SEQ ID NO: 935806
ucuaucagucucaacagag

SEQ ID NO: 935808 - RNA, 19 nt, Artificial Sequence
  Description of Artificial Sequence: Synthetic oligonucleotide
  Sense strand starting at position 3918 of SEQ ID NO: 913549
agugguugacuagggaacu

SEQ ID NO: 935809 - RNA, 19 nt, Artificial Sequence
  Description of Artificial Sequence: Synthetic oligonucleotide
  Antisense strand to SEQ ID NO: 935808
aguucccuagucaaccacu

SEQ ID NO: 935810 - RNA, 19 nt, Artificial Sequence
  Description of Artificial Sequence: Synthetic oligonucleotide
  Sense strand starting at position 2911 of SEQ ID NO: 913549
cugagacagucugucaaga

SEQ ID NO: 935811 - RNA, 19 nt, Artificial Sequence
  Description of Artificial Sequence: Synthetic oligonucleotide
  Antisense strand to SEQ ID NO: 935810
ucuugacagacugucucag

SEQ ID NO: 935812 - RNA, 19 nt, Artificial Sequence
  Description of Artificial Sequence: Synthetic oligonucleotide
  Sense strand starting at position 515 of SEQ ID NO: 913549
ccuuauuagcaggacugua

SEQ ID NO: 935813 - RNA, 19 nt, Artificial Sequence
  Description of Artificial Sequence: Synthetic oligonucleotide
  Antisense strand to SEQ ID NO: 935812
uacaguccugcuaauaagg

SEQ ID NO: 935814 - RNA, 19 nt, Artificial Sequence
  Description of Artificial Sequence: Synthetic oligonucleotide
  Sense strand starting at position 2182 of SEQ ID NO: 913549
uuguuuguuccugagacag

SEQ ID NO: 935815 - RNA, 19 nt, Artificial Sequence
  Description of Artificial Sequence: Synthetic oligonucleotide
  Antisense strand to SEQ ID NO: 935814
cugucucaggaacaaacaa

SEQ ID NO: 935816 - RNA, 19 nt, Artificial Sequence
  Description of Artificial Sequence: Synthetic oligonucleotide
  Sense strand starting at position 715 of SEQ ID NO: 913549
uguguuuccagaugagaag

SEQ ID NO: 935817 - RNA, 19 nt, Artificial Sequence
  Description of Artificial Sequence: Synthetic oligonucleotide
  Antisense strand to SEQ ID NO: 935816
cuucucaucuggaaacaca

SEQ ID NO: 935818 - RNA, 19 nt, Artificial Sequence
  Description of Artificial Sequence: Synthetic oligonucleotide
  Sense strand starting at position 2753 of SEQ ID NO: 913549
acugacuucucuguugaga

SEQ ID NO: 935819 - RNA, 19 nt, Artificial Sequence
  Description of Artificial Sequence: Synthetic oligonucleotide
  Antisense strand to SEQ ID NO: 935818
ucucaacagagaagucagu

SEQ ID NO: 935820 - RNA, 19 nt, Artificial Sequence
  Description of Artificial Sequence: Synthetic oligonucleotide
  Sense strand starting at position 2016 of SEQ ID NO: 913549
cuucucucugcuuagagau

SEQ ID NO: 935821 - RNA, 19 nt, Artificial Sequence
  Description of Artificial Sequence: Synthetic oligonucleotide
  Antisense strand to SEQ ID NO: 935820
aucucuaagcagagagaag

SEQ ID NO: 935822 - RNA, 19 nt, Artificial Sequence
  Description of Artificial Sequence: Synthetic oligonucleotide
  Sense strand starting at position 1042 of SEQ ID NO: 913549
aacugugcacaugaguauu

SEQ ID NO: 935823 - RNA, 19 nt, Artificial Sequence
  Description of Artificial Sequence: Synthetic oligonucleotide
  Antisense strand to SEQ ID NO: 935822
aauacucaugugcacaguu

SEQ ID NO: 935824 - RNA, 19 nt, Artificial Sequence
  Description of Artificial Sequence: Synthetic oligonucleotide
  Sense strand starting at position 3915 of SEQ ID NO: 913549
gugagugguugacuaggga

SEQ ID NO: 935825 - RNA, 19 nt, Artificial Sequence
  Description of Artificial Sequence: Synthetic oligonucleotide
  Antisense strand to SEQ ID NO: 935824
ucccuagucaaccacucac

SEQ ID NO: 935826 - RNA, 19 nt, Artificial Sequence
  Description of Artificial Sequence: Synthetic oligonucleotide
  Sense strand starting at position 2580 of SEQ ID NO: 913549
accugaguguuucugagag

SEQ ID NO: 935827 - RNA, 19 nt, Artificial Sequence
  Description of Artificial Sequence: Synthetic oligonucleotide
  Antisense strand to SEQ ID NO: 935826
cucucagaaacacucaggu

SEQ ID NO: 935828 - RNA, 19 nt, Artificial Sequence
  Description of Artificial Sequence: Synthetic oligonucleotide
  Sense strand starting at position 3849 of SEQ ID NO: 913549
ccacauaacguaugaaucu

SEQ ID NO: 935829 - RNA, 19 nt, Artificial Sequence
  Description of Artificial Sequence: Synthetic oligonucleotide
  Antisense strand to SEQ ID NO: 935828
agauucauacguuaugugg

SEQ ID NO: 935830 - RNA, 19 nt, Artificial Sequence
  Description of Artificial Sequence: Synthetic oligonucleotide
  Sense strand starting at position 1620 of SEQ ID NO: 913549
ucagaaacuugcuuaaggu

SEQ ID NO: 935831 - RNA, 19 nt, Artificial Sequence
  Description of Artificial Sequence: Synthetic oligonucleotide
  Antisense strand to SEQ ID NO: 935830
accuuaagcaaguuucuga

SEQ ID NO: 935832 - RNA, 19 nt, Artificial Sequence
  Description of Artificial Sequence: Synthetic oligonucleotide
  Sense strand starting at position 2778 of SEQ ID NO: 913549
gauuucugguaccauagga

SEQ ID NO: 935833 - RNA, 19 nt, Artificial Sequence
  Description of Artificial Sequence: Synthetic oligonucleotide
  Antisense strand to SEQ ID NO: 935832
uccuaugguaccagaaauc

SEQ ID NO: 935834 - RNA, 19 nt, Artificial Sequence
  Description of Artificial Sequence: Synthetic oligonucleotide
  Sense strand starting at position 2764 of SEQ ID NO: 913549
uguugagacugauagauuu

SEQ ID NO: 935835 - RNA, 19 nt, Artificial Sequence
  Description of Artificial Sequence: Synthetic oligonucleotide
  Antisense strand to SEQ ID NO: 935834
aaaucuaucagucucaaca

SEQ ID NO: 935836 - RNA, 19 nt, Artificial Sequence
  Description of Artificial Sequence: Synthetic oligonucleotide
  Sense strand starting at position 1724 of SEQ ID NO: 913549
acuaacaugcuuggugaau

SEQ ID NO: 935837 - RNA, 19 nt, Artificial Sequence
  Description of Artificial Sequence: Synthetic oligonucleotide
  Antisense strand to SEQ ID NO: 935836
auucaccaagcauguuagu

SEQ ID NO: 935838 - RNA, 19 nt, Artificial Sequence
  Description of Artificial Sequence: Synthetic oligonucleotide
  Sense strand starting at position 1723 of SEQ ID NO: 913549
cacuaacaugcuuggugaa

SEQ ID NO: 935839 - RNA, 19 nt, Artificial Sequence
  Description of Artificial Sequence: Synthetic oligonucleotide
  Antisense strand to SEQ ID NO: 935838
uucaccaagcauguuagug

SEQ ID NO: 935840 - RNA, 19 nt, Artificial Sequence
  Description of Artificial Sequence: Synthetic oligonucleotide
  Sense strand starting at position 2775 of SEQ ID NO: 913549
auagauuucugguaccaua

SEQ ID NO: 935841 - RNA, 19 nt, Artificial Sequence
  Description of Artificial Sequence: Synthetic oligonucleotide
  Antisense strand to SEQ ID NO: 935840
uaugguaccagaaaucuau

SEQ ID NO: 935842 - RNA, 19 nt, Artificial Sequence
  Description of Artificial Sequence: Synthetic oligonucleotide
  Sense strand starting at position 3982 of SEQ ID NO: 913549
ucuaaaguugauugucaug

SEQ ID NO: 935843 - RNA, 19 nt, Artificial Sequence
  Description of Artificial Sequence: Synthetic oligonucleotide
  Antisense strand to SEQ ID NO: 935842
caugacaaucaacuuuaga

SEQ ID NO: 935844 - RNA, 19 nt, Artificial Sequence
  Description of Artificial Sequence: Synthetic oligonucleotide
  Sense strand starting at position 2752 of SEQ ID NO: 913549
cacugacuucucuguugag

SEQ ID NO: 935845 - RNA, 19 nt, Artificial Sequence
  Description of Artificial Sequence: Synthetic oligonucleotide
  Antisense strand to SEQ ID NO: 935844
cucaacagagaagucagug

SEQ ID NO: 935846 - RNA, 19 nt, Artificial Sequence
  Description of Artificial Sequence: Synthetic oligonucleotide
  Sense strand starting at position 2572 of SEQ ID NO: 913549
cuguaauuaccugaguguu

SEQ ID NO: 935847 - RNA, 19 nt, Artificial Sequence
  Description of Artificial Sequence: Synthetic oligonucleotide
  Antisense strand to SEQ ID NO: 935846
aacacucagguaauuacag

SEQ ID NO: 935848 - RNA, 19 nt, Artificial Sequence
  Description of Artificial Sequence: Synthetic oligonucleotide
  Sense strand starting at position 2015 of SEQ ID NO: 913549
acuucucucugcuuagaga

SEQ ID NO: 935849 - RNA, 19 nt, Artificial Sequence
  Description of Artificial Sequence: Synthetic oligonucleotide
  Antisense strand to SEQ ID NO: 935848
ucucuaagcagagagaagu

SEQ ID NO: 935850 - RNA, 19 nt, Artificial Sequence
  Description of Artificial Sequence: Synthetic oligonucleotide
  Sense strand starting at position 2011 of SEQ ID NO: 913549
aggaacuucucucugcuua

SEQ ID NO: 935851 - RNA, 19 nt, Artificial Sequence
  Description of Artificial Sequence: Synthetic oligonucleotide
  Antisense strand to SEQ ID NO: 935850
uaagcagagagaaguuccu

SEQ ID NO: 935852 - RNA, 19 nt, Artificial Sequence
  Description of Artificial Sequence: Synthetic oligonucleotide
  Sense strand starting at position 3981 of SEQ ID NO: 913549
cucuaaaguugauugucau

SEQ ID NO: 935853 - RNA, 19 nt, Artificial Sequence
  Description of Artificial Sequence: Synthetic oligonucleotide
  Antisense strand to SEQ ID NO: 935852
augacaaucaacuuuagag

SEQ ID NO: 935854 - RNA, 19 nt, Artificial Sequence
  Description of Artificial Sequence: Synthetic oligonucleotide
  Sense strand starting at position 2506 of SEQ ID NO: 913549
guccuaucauagguauuac

SEQ ID NO: 935855 - RNA, 19 nt, Artificial Sequence
  Description of Artificial Sequence: Synthetic oligonucleotide
  Antisense strand to SEQ ID NO: 935854
guaauaccuaugauaggac

SEQ ID NO: 935856 - RNA, 19 nt, Artificial Sequence
  Description of Artificial Sequence: Synthetic oligonucleotide
  Sense strand starting at position 3504 of SEQ ID NO: 913549
ucuaaauaugcaugauugu

SEQ ID NO: 935857 - RNA, 19 nt, Artificial Sequence
  Description of Artificial Sequence: Synthetic oligonucleotide
  Antisense strand to SEQ ID NO: 935856
acaaucaugcauauuuaga

SEQ ID NO: 935858 - RNA, 19 nt, Artificial Sequence
  Description of Artificial Sequence: Synthetic oligonucleotide
  Sense strand starting at position 1637 of SEQ ID NO: 913549
gucacaaagcuauguaaug

SEQ ID NO: 935859 - RNA, 19 nt, Artificial Sequence
  Description of Artificial Sequence: Synthetic oligonucleotide
  Antisense strand to SEQ ID NO: 935858
cauuacauagcuuugugac

SEQ ID NO: 935860 - RNA, 19 nt, Artificial Sequence
  Description of Artificial Sequence: Synthetic oligonucleotide
  Sense strand starting at position 3908 of SEQ ID NO: 913549
aaaguaugugagugguuga

SEQ ID NO: 935861 - RNA, 19 nt, Artificial Sequence
  Description of Artificial Sequence: Synthetic oligonucleotide
  Antisense strand to SEQ ID NO: 935860
ucaaccacucacauacuuu

SEQ ID NO: 935862 - RNA, 19 nt, Artificial Sequence
  Description of Artificial Sequence: Synthetic oligonucleotide
  Sense strand starting at position 2496 of SEQ ID NO: 913549
uagguaagguguccuauca

SEQ ID NO: 935863 - RNA, 19 nt, Artificial Sequence
  Description of Artificial Sequence: Synthetic oligonucleotide
  Antisense strand to SEQ ID NO: 935862
ugauaggacaccuuaccua

SEQ ID NO: 935864 - RNA, 19 nt, Artificial Sequence
  Description of Artificial Sequence: Synthetic oligonucleotide
  Sense strand starting at position 1879 of SEQ ID NO: 913549
ccauguuacucuguacaua

SEQ ID NO: 935865 - RNA, 19 nt, Artificial Sequence
  Description of Artificial Sequence: Synthetic oligonucleotide
  Antisense strand to SEQ ID NO: 935864
uauguacagaguaacaugg

SEQ ID NO: 935866 - RNA, 19 nt, Artificial Sequence
  Description of Artificial Sequence: Synthetic oligonucleotide
  Sense strand starting at position 391 of SEQ ID NO: 913549
uaggaauuagcugguuucu

SEQ ID NO: 935867 - RNA, 19 nt, Artificial Sequence
  Description of Artificial Sequence: Synthetic oligonucleotide
  Antisense strand to SEQ ID NO: 935866
agaaaccagcuaauuccua

SEQ ID NO: 935868 - RNA, 19 nt, Artificial Sequence
  Description of Artificial Sequence: Synthetic oligonucleotide
  Sense strand starting at position 969 of SEQ ID NO: 913549
ugaguuuccuaagcucuaa

SEQ ID NO: 935869 - RNA, 19 nt, Artificial Sequence
  Description of Artificial Sequence: Synthetic oligonucleotide
  Antisense strand to SEQ ID NO: 935868
uuagagcuuaggaaacuca

SEQ ID NO: 935870 - RNA, 19 nt, Artificial Sequence
  Description of Artificial Sequence: Synthetic oligonucleotide
  Sense strand starting at position 3156 of SEQ ID NO: 913549
cucagauugugucccauca

SEQ ID NO: 935871 - RNA, 19 nt, Artificial Sequence
  Description of Artificial Sequence: Synthetic oligonucleotide
  Antisense strand to SEQ ID NO: 935870
ugaugggacacaaucugag

SEQ ID NO: 935872 - RNA, 19 nt, Artificial Sequence
  Description of Artificial Sequence: Synthetic oligonucleotide
  Sense strand starting at position 2154 of SEQ ID NO: 913549
gucuaaccuugguccacua

SEQ ID NO: 935873 - RNA, 19 nt, Artificial Sequence
  Description of Artificial Sequence: Synthetic oligonucleotide
  Antisense strand to SEQ ID NO: 935872
uaguggaccaagguuagac

SEQ ID NO: 935874 - RNA, 19 nt, Artificial Sequence
  Description of Artificial Sequence: Synthetic oligonucleotide
  Sense strand starting at position 255 of SEQ ID NO: 913550
aaagaagguccauaacguu

SEQ ID NO: 935875 - RNA, 19 nt, Artificial Sequence
  Description of Artificial Sequence: Synthetic oligonucleotide
  Antisense strand to SEQ ID NO: 935874
aacguuauggaccuucuuu

SEQ ID NO: 935876 - RNA, 19 nt, Artificial Sequence
  Description of Artificial Sequence: Synthetic oligonucleotide
  Sense strand starting at position 2492 of SEQ ID NO: 913550
cuaugugaauauccuaaga

SEQ ID NO: 935877 - RNA, 19 nt, Artificial Sequence
  Description of Artificial Sequence: Synthetic oligonucleotide
  Antisense strand to SEQ ID NO: 935876
ucuuaggauauucacauag

SEQ ID NO: 935878 - RNA, 19 nt, Artificial Sequence
  Description of Artificial Sequence: Synthetic oligonucleotide
  Sense strand starting at position 1456 of SEQ ID NO: 913550
cagaguuguguauucgugu

SEQ ID NO: 935879 - RNA, 19 nt, Artificial Sequence
  Description of Artificial Sequence: Synthetic oligonucleotide
  Antisense strand to SEQ ID NO: 935878
acacgaauacacaacucug

SEQ ID NO: 935880 - RNA, 19 nt, Artificial Sequence
  Description of Artificial Sequence: Synthetic oligonucleotide
  Sense strand starting at position 1461 of SEQ ID NO: 913550
uuguguauucgugugagca

SEQ ID NO: 935881 - RNA, 19 nt, Artificial Sequence
  Description of Artificial Sequence: Synthetic oligonucleotide
  Antisense strand to SEQ ID NO: 935880
ugcucacacgaauacacaa

SEQ ID NO: 935882 - RNA, 19 nt, Artificial Sequence
  Description of Artificial Sequence: Synthetic oligonucleotide
  Sense strand starting at position 429 of SEQ ID NO: 913550
cgcuaugugcaugcacauu

SEQ ID NO: 935883 - RNA, 19 nt, Artificial Sequence
  Description of Artificial Sequence: Synthetic oligonucleotide
  Antisense strand to SEQ ID NO: 935882
aaugugcaugcacauagcg

SEQ ID NO: 935884 - RNA, 19 nt, Artificial Sequence
  Description of Artificial Sequence: Synthetic oligonucleotide
  Sense strand starting at position 1071 of SEQ ID NO: 913550
agucacaaucuauagcgaa

SEQ ID NO: 935885 - RNA, 19 nt, Artificial Sequence
  Description of Artificial Sequence: Synthetic oligonucleotide
  Antisense strand to SEQ ID NO: 935884
uucgcuauagauugugacu

SEQ ID NO: 935886 - RNA, 19 nt, Artificial Sequence
  Description of Artificial Sequence: Synthetic oligonucleotide
  Sense strand starting at position 1012 of SEQ ID NO: 913550
gauacuuuacuacgaaggu

SEQ ID NO: 935887 - RNA, 19 nt, Artificial Sequence
  Description of Artificial Sequence: Synthetic oligonucleotide
  Antisense strand to SEQ ID NO: 935886
accuucguaguaaaguauc

SEQ ID NO: 935888 - RNA, 19 nt, Artificial Sequence
  Description of Artificial Sequence: Synthetic oligonucleotide
  Sense strand starting at position 262 of SEQ ID NO: 913550
guccauaacguuuaaucua

SEQ ID NO: 935889 - RNA, 19 nt, Artificial Sequence
  Description of Artificial Sequence: Synthetic oligonucleotide
  Antisense strand to SEQ ID NO: 935888
uagauuaaacguuauggac

SEQ ID NO: 935890 - RNA, 19 nt, Artificial Sequence
  Description of Artificial Sequence: Synthetic oligonucleotide
  Sense strand starting at position 3937 of SEQ ID NO: 913550
augccuuagcagggaucaa

SEQ ID NO: 935891 - RNA, 19 nt, Artificial Sequence
  Description of Artificial Sequence: Synthetic oligonucleotide
  Antisense strand to SEQ ID NO: 935890
uugaucccugcuaaggcau

SEQ ID NO: 935892 - RNA, 19 nt, Artificial Sequence
  Description of Artificial Sequence: Synthetic oligonucleotide
  Sense strand starting at position 2247 of SEQ ID NO: 913550
cccggaaagcaaugguaca

SEQ ID NO: 935893 - RNA, 19 nt, Artificial Sequence
  Description of Artificial Sequence: Synthetic oligonucleotide
  Antisense strand to SEQ ID NO: 935892
uguaccauugcuuuccggg

SEQ ID NO: 935894 - RNA, 19 nt, Artificial Sequence
  Description of Artificial Sequence: Synthetic oligonucleotide
  Sense strand starting at position 1009 of SEQ ID NO: 913550
uccgauacuuuacuacgaa

SEQ ID NO: 935895 - RNA, 19 nt, Artificial Sequence
  Description of Artificial Sequence: Synthetic oligonucleotide
  Antisense strand to SEQ ID NO: 935894
uucguaguaaaguaucgga

SEQ ID NO: 935896 - RNA, 19 nt, Artificial Sequence
  Description of Artificial Sequence: Synthetic oligonucleotide
  Sense strand starting at position 1789 of SEQ ID NO: 913550
ggguuaccuucugcagaag

SEQ ID NO: 935897 - RNA, 19 nt, Artificial Sequence
  Description of Artificial Sequence: Synthetic oligonucleotide
  Antisense strand to SEQ ID NO: 935896
cuucugcagaagguaaccc

SEQ ID NO: 935898 - RNA, 19 nt, Artificial Sequence
  Description of Artificial Sequence: Synthetic oligonucleotide
  Sense strand starting at position 2704 of SEQ ID NO: 913550
ccaagccuaucaguuugaa

SEQ ID NO: 935899 - RNA, 19 nt, Artificial Sequence
  Description of Artificial Sequence: Synthetic oligonucleotide
  Antisense strand to SEQ ID NO: 935898
uucaaacugauaggcuugg

SEQ ID NO: 935900 - RNA, 19 nt, Artificial Sequence
  Description of Artificial Sequence: Synthetic oligonucleotide
  Sense strand starting at position 3081 of SEQ ID NO: 913550
guauguuuccauuauguga

SEQ ID NO: 935901 - RNA, 19 nt, Artificial Sequence
  Description of Artificial Sequence: Synthetic oligonucleotide
  Antisense strand to SEQ ID NO: 935900
ucacauaauggaaacauac

SEQ ID NO: 935902 - RNA, 19 nt, Artificial Sequence
  Description of Artificial Sequence: Synthetic oligonucleotide
  Sense strand starting at position 1055 of SEQ ID NO: 913550
gacguuuauguugaacagu

SEQ ID NO: 935903 - RNA, 19 nt, Artificial Sequence
  Description of Artificial Sequence: Synthetic oligonucleotide
  Antisense strand to SEQ ID NO: 935902
acuguucaacauaaacguc

SEQ ID NO: 935904 - RNA, 19 nt, Artificial Sequence
  Description of Artificial Sequence: Synthetic oligonucleotide
  Sense strand starting at position 1081 of SEQ ID NO: 913550
uauagcgaacguuaauauu

SEQ ID NO: 935905 - RNA, 19 nt, Artificial Sequence
  Description of Artificial Sequence: Synthetic oligonucleotide
  Antisense strand to SEQ ID NO: 935904
aauauuaacguucgcuaua

SEQ ID NO: 935906 - RNA, 19 nt, Artificial Sequence
  Description of Artificial Sequence: Synthetic oligonucleotide
  Sense strand starting at position 1332 of SEQ ID NO: 913550
cuagcaugcacguaggaua

SEQ ID NO: 935907 - RNA, 19 nt, Artificial Sequence
  Description of Artificial Sequence: Synthetic oligonucleotide
  Antisense strand to SEQ ID NO: 935906
uauccuacgugcaugcuag

SEQ ID NO: 935908 - RNA, 19 nt, Artificial Sequence
  Description of Artificial Sequence: Synthetic oligonucleotide
  Sense strand starting at position 3075 of SEQ ID NO: 913550
ccaacaguauguuuccauu

SEQ ID NO: 935909 - RNA, 19 nt, Artificial Sequence
  Description of Artificial Sequence: Synthetic oligonucleotide
  Antisense strand to SEQ ID NO: 935908
aauggaaacauacuguugg

SEQ ID NO: 935910 - RNA, 19 nt, Artificial Sequence
  Description of Artificial Sequence: Synthetic oligonucleotide
  Sense strand starting at position 964 of SEQ ID NO: 913550
gcgauuauuauguagucag

SEQ ID NO: 935911 - RNA, 19 nt, Artificial Sequence
  Description of Artificial Sequence: Synthetic oligonucleotide
  Antisense strand to SEQ ID NO: 935910
cugacuacauaauaaucgc

SEQ ID NO: 935912 - RNA, 19 nt, Artificial Sequence
  Description of Artificial Sequence: Synthetic oligonucleotide
  Sense strand starting at position 2045 of SEQ ID NO: 913550
accugucuccgcgaggaaa

SEQ ID NO: 935913 - RNA, 19 nt, Artificial Sequence
  Description of Artificial Sequence: Synthetic oligonucleotide
  Antisense strand to SEQ ID NO: 935912
uuuccucgcggagacaggu

SEQ ID NO: 935914 - RNA, 19 nt, Artificial Sequence
  Description of Artificial Sequence: Synthetic oligonucleotide
  Sense strand starting at position 3201 of SEQ ID NO: 913550
guuaacaacuaguuuguua

SEQ ID NO: 935915 - RNA, 19 nt, Artificial Sequence
  Description of Artificial Sequence: Synthetic oligonucleotide
  Antisense strand to SEQ ID NO: 935914
uaacaaacuaguuguuaac

SEQ ID NO: 935916 - RNA, 19 nt, Artificial Sequence
  Description of Artificial Sequence: Synthetic oligonucleotide
  Sense strand starting at position 3212 of SEQ ID NO: 913550
guuuguuaacaaugcaaua

SEQ ID NO: 935917 - RNA, 19 nt, Artificial Sequence
  Description of Artificial Sequence: Synthetic oligonucleotide
  Antisense strand to SEQ ID NO: 935916
uauugcauuguuaacaaac

SEQ ID NO: 935918 - RNA, 19 nt, Artificial Sequence
  Description of Artificial Sequence: Synthetic oligonucleotide
  Sense strand starting at position 1262 of SEQ ID NO: 913550
aggguaagcaagugcuaga

SEQ ID NO: 935919 - RNA, 19 nt, Artificial Sequence
  Description of Artificial Sequence: Synthetic oligonucleotide
  Antisense strand to SEQ ID NO: 935918
ucuagcacuugcuuacccu

SEQ ID NO: 935920 - RNA, 19 nt, Artificial Sequence
  Description of Artificial Sequence: Synthetic oligonucleotide
  Sense strand starting at position 1276 of SEQ ID NO: 913550
cuagaaagcgugugaggau

SEQ ID NO: 935921 - RNA, 19 nt, Artificial Sequence
  Description of Artificial Sequence: Synthetic oligonucleotide
  Antisense strand to SEQ ID NO: 935920
auccucacacgcuuucuag

SEQ ID NO: 935922 - RNA, 19 nt, Artificial Sequence
  Description of Artificial Sequence: Synthetic oligonucleotide
  Sense strand starting at position 181 of SEQ ID NO: 913550
gcagcccugcuugacaaau

SEQ ID NO: 935923 - RNA, 19 nt, Artificial Sequence
  Description of Artificial Sequence: Synthetic oligonucleotide
  Antisense strand to SEQ ID NO: 935922
auuugucaagcagggcugc

SEQ ID NO: 935924 - RNA, 19 nt, Artificial Sequence
  Description of Artificial Sequence: Synthetic oligonucleotide
  Sense strand starting at position 2309 of SEQ ID NO: 913550
gcgaaaggccacggaaauu

SEQ ID NO: 935925 - RNA, 19 nt, Artificial Sequence
  Description of Artificial Sequence: Synthetic oligonucleotide
  Antisense strand to SEQ ID NO: 935924
aauuuccguggccuuucgc

SEQ ID NO: 935926 - RNA, 19 nt, Artificial Sequence
  Description of Artificial Sequence: Synthetic oligonucleotide
  Sense strand starting at position 968 of SEQ ID NO: 913550
uuauuauguagucaguugu

SEQ ID NO: 935927 - RNA, 19 nt, Artificial Sequence
  Description of Artificial Sequence: Synthetic oligonucleotide
  Antisense strand to SEQ ID NO: 935926
acaacugacuacauaauaa

SEQ ID NO: 935928 - RNA, 19 nt, Artificial Sequence
  Description of Artificial Sequence: Synthetic oligonucleotide
  Sense strand starting at position 2535 of SEQ ID NO: 913550
uuccaugggcuuugcaaau

SEQ ID NO: 935929 - RNA, 19 nt, Artificial Sequence
  Description of Artificial Sequence: Synthetic oligonucleotide
  Antisense strand to SEQ ID NO: 935928
auuugcaaagcccauggaa

SEQ ID NO: 935930 - RNA, 19 nt, Artificial Sequence
  Description of Artificial Sequence: Synthetic oligonucleotide
  Sense strand starting at position 895 of SEQ ID NO: 913550
ucaugugucugucuugaaa

SEQ ID NO: 935931 - RNA, 19 nt, Artificial Sequence
  Description of Artificial Sequence: Synthetic oligonucleotide
  Antisense strand to SEQ ID NO: 935930
uuucaagacagacacauga

SEQ ID NO: 935932 - RNA, 19 nt, Artificial Sequence
  Description of Artificial Sequence: Synthetic oligonucleotide
  Sense strand starting at position 2047 of SEQ ID NO: 913550
cugucuccgcgaggaaaga

SEQ ID NO: 935933 - RNA, 19 nt, Artificial Sequence
  Description of Artificial Sequence: Synthetic oligonucleotide
  Antisense strand to SEQ ID NO: 935932
ucuuuccucgcggagacag

SEQ ID NO: 935934 - RNA, 19 nt, Artificial Sequence
  Description of Artificial Sequence: Synthetic oligonucleotide
  Sense strand starting at position 1078 of SEQ ID NO: 913550
aucuauagcgaacguuaau

SEQ ID NO: 935935 - RNA, 19 nt, Artificial Sequence
  Description of Artificial Sequence: Synthetic oligonucleotide
  Antisense strand to SEQ ID NO: 935934
auuaacguucgcuauagau

SEQ ID NO: 935936 - RNA, 19 nt, Artificial Sequence
  Description of Artificial Sequence: Synthetic oligonucleotide
  Sense strand starting at position 963 of SEQ ID NO: 913550
agcgauuauuauguaguca

SEQ ID NO: 935937 - RNA, 19 nt, Artificial Sequence
  Description of Artificial Sequence: Synthetic oligonucleotide
  Antisense strand to SEQ ID NO: 935936
ugacuacauaauaaucgcu

SEQ ID NO: 935938 - RNA, 19 nt, Artificial Sequence
  Description of Artificial Sequence: Synthetic oligonucleotide
  Sense strand starting at position 1454 of SEQ ID NO: 913550
cacagaguuguguauucgu

SEQ ID NO: 935939 - RNA, 19 nt, Artificial Sequence
  Description of Artificial Sequence: Synthetic oligonucleotide
  Antisense strand to SEQ ID NO: 935938
acgaauacacaacucugug

SEQ ID NO: 935940 - RNA, 19 nt, Artificial Sequence
  Description of Artificial Sequence: Synthetic oligonucleotide
  Sense strand starting at position 974 of SEQ ID NO: 913550
uguagucaguugucaauca

SEQ ID NO: 935941 - RNA, 19 nt, Artificial Sequence
  Description of Artificial Sequence: Synthetic oligonucleotide
  Antisense strand to SEQ ID NO: 935940
ugauugacaacugacuaca

SEQ ID NO: 935942 - RNA, 19 nt, Artificial Sequence
  Description of Artificial Sequence: Synthetic oligonucleotide
  Sense strand starting at position 435 of SEQ ID NO: 913550
gugcaugcacauuguagaa

SEQ ID NO: 935943 - RNA, 19 nt, Artificial Sequence
  Description of Artificial Sequence: Synthetic oligonucleotide
  Antisense strand to SEQ ID NO: 935942
uucuacaaugugcaugcac

SEQ ID NO: 935944 - RNA, 19 nt, Artificial Sequence
  Description of Artificial Sequence: Synthetic oligonucleotide
  Sense strand starting at position 1000 of SEQ ID NO: 913550
gugauuauuuccgauacuu

SEQ ID NO: 935945 - RNA, 19 nt, Artificial Sequence
  Description of Artificial Sequence: Synthetic oligonucleotide
  Antisense strand to SEQ ID NO: 935944
aaguaucggaaauaaucac

SEQ ID NO: 935946 - RNA, 19 nt, Artificial Sequence
  Description of Artificial Sequence: Synthetic oligonucleotide
  Sense strand starting at position 805 of SEQ ID NO: 913550
cuguguacuucucuuaucu

SEQ ID NO: 935947 - RNA, 19 nt, Artificial Sequence
  Description of Artificial Sequence: Synthetic oligonucleotide
  Antisense strand to SEQ ID NO: 935946
agauaagagaaguacacag

SEQ ID NO: 935948 - RNA, 19 nt, Artificial Sequence
  Description of Artificial Sequence: Synthetic oligonucleotide
  Sense strand starting at position 2494 of SEQ ID NO: 913550
augugaauauccuaagaca

SEQ ID NO: 935949 - RNA, 19 nt, Artificial Sequence
  Description of Artificial Sequence: Synthetic oligonucleotide
  Antisense strand to SEQ ID NO: 935948
ugucuuaggauauucacau

SEQ ID NO: 935950 - RNA, 19 nt, Artificial Sequence
  Description of Artificial Sequence: Synthetic oligonucleotide
  Sense strand starting at position 2425 of SEQ ID NO: 913550
agggacugcuaauaacaau

SEQ ID NO: 935951 - RNA, 19 nt, Artificial Sequence
  Description of Artificial Sequence: Synthetic oligonucleotide
  Antisense strand to SEQ ID NO: 935950
auuguuauuagcagucccu

SEQ ID NO: 935952 - RNA, 19 nt, Artificial Sequence
  Description of Artificial Sequence: Synthetic oligonucleotide
  Sense strand starting at position 3168 of SEQ ID NO: 913550
ggaaaucccugagaccuuu

SEQ ID NO: 935953 - RNA, 19 nt, Artificial Sequence
  Description of Artificial Sequence: Synthetic oligonucleotide
  Antisense strand to SEQ ID NO: 935952
aaaggucucagggauuucc

SEQ ID NO: 935954 - RNA, 19 nt, Artificial Sequence
  Description of Artificial Sequence: Synthetic oligonucleotide
  Sense strand starting at position 1204 of SEQ ID NO: 913551
cuuugaggauucuugauaa

SEQ ID NO: 935955 - RNA, 19 nt, Artificial Sequence
  Description of Artificial Sequence: Synthetic oligonucleotide
  Antisense strand to SEQ ID NO: 935954
uuaucaagaauccucaaag

SEQ ID NO: 935956 - RNA, 19 nt, Artificial Sequence
  Description of Artificial Sequence: Synthetic oligonucleotide
  Sense strand starting at position 3897 of SEQ ID NO: 913551
gccuuuagauuuguguaag

SEQ ID NO: 935957 - RNA, 19 nt, Artificial Sequence
  Description of Artificial Sequence: Synthetic oligonucleotide
  Antisense strand to SEQ ID NO: 935956
cuuacacaaaucuaaaggc

SEQ ID NO: 935958 - RNA, 19 nt, Artificial Sequence
  Description of Artificial Sequence: Synthetic oligonucleotide
  Sense strand starting at position 2748 of SEQ ID NO: 913551
gcauuugcuuaacuaguaa

SEQ ID NO: 935959 - RNA, 19 nt, Artificial Sequence
  Description of Artificial Sequence: Synthetic oligonucleotide
  Antisense strand to SEQ ID NO: 935958
uuacuaguuaagcaaaugc

SEQ ID NO: 935960 - RNA, 19 nt, Artificial Sequence
  Description of Artificial Sequence: Synthetic oligonucleotide
  Sense strand starting at position 820 of SEQ ID NO: 913551
auguaauggguuuacuaug

SEQ ID NO: 935961 - RNA, 19 nt, Artificial Sequence
  Description of Artificial Sequence: Synthetic oligonucleotide
  Antisense strand to SEQ ID NO: 935960
cauaguaaacccauuacau

SEQ ID NO: 935962 - RNA, 19 nt, Artificial Sequence
  Description of Artificial Sequence: Synthetic oligonucleotide
  Sense strand starting at position 2741 of SEQ ID NO: 913551
agggcaugcauuugcuuaa

SEQ ID NO: 935963 - RNA, 19 nt, Artificial Sequence
  Description of Artificial Sequence: Synthetic oligonucleotide
  Antisense strand to SEQ ID NO: 935962
uuaagcaaaugcaugcccu

SEQ ID NO: 935964 - RNA, 19 nt, Artificial Sequence
  Description of Artificial Sequence: Synthetic oligonucleotide
  Sense strand starting at position 2595 of SEQ ID NO: 913551
guuccaaguagucagauga

SEQ ID NO: 935965 - RNA, 19 nt, Artificial Sequence
  Description of Artificial Sequence: Synthetic oligonucleotide
  Antisense strand to SEQ ID NO: 935964
ucaucugacuacuuggaac

SEQ ID NO: 935966 - RNA, 19 nt, Artificial Sequence
  Description of Artificial Sequence: Synthetic oligonucleotide
  Sense strand starting at position 651 of SEQ ID NO: 913551
ucaagaggcuacuugacau

SEQ ID NO: 935967 - RNA, 19 nt, Artificial Sequence
  Description of Artificial Sequence: Synthetic oligonucleotide
  Antisense strand to SEQ ID NO: 935966
augucaaguagccucuuga

SEQ ID NO: 935968 - RNA, 19 nt, Artificial Sequence
  Description of Artificial Sequence: Synthetic oligonucleotide
  Sense strand starting at position 2960 of SEQ ID NO: 913551
cauaguuuagugggagaua

SEQ ID NO: 935969 - RNA, 19 nt, Artificial Sequence
  Description of Artificial Sequence: Synthetic oligonucleotide
  Antisense strand to SEQ ID NO: 935968
uaucucccacuaaacuaug

SEQ ID NO: 935970 - RNA, 19 nt, Artificial Sequence
  Description of Artificial Sequence: Synthetic oligonucleotide
  Sense strand starting at position 2669 of SEQ ID NO: 913551
aaaggugacucaguuaauc

SEQ ID NO: 935971 - RNA, 19 nt, Artificial Sequence
  Description of Artificial Sequence: Synthetic oligonucleotide
  Antisense strand to SEQ ID NO: 935970
gauuaacugagucaccuuu

SEQ ID NO: 935972 - RNA, 19 nt, Artificial Sequence
  Description of Artificial Sequence: Synthetic oligonucleotide
  Sense strand starting at position 3534 of SEQ ID NO: 913551
gccuaagagcaauaaguca

SEQ ID NO: 935973 - RNA, 19 nt, Artificial Sequence
  Description of Artificial Sequence: Synthetic oligonucleotide
  Antisense strand to SEQ ID NO: 935972
ugacuuauugcucuuaggc

SEQ ID NO: 935974 - RNA, 19 nt, Artificial Sequence
  Description of Artificial Sequence: Synthetic oligonucleotide
  Sense strand starting at position 3496 of SEQ ID NO: 913551
uacaguauucgguacauaa

SEQ ID NO: 935975 - RNA, 19 nt, Artificial Sequence
  Description of Artificial Sequence: Synthetic oligonucleotide
  Antisense strand to SEQ ID NO: 935974
uuauguaccgaauacugua

SEQ ID NO: 935976 - RNA, 19 nt, Artificial Sequence
  Description of Artificial Sequence: Synthetic oligonucleotide
  Sense strand starting at position 3498 of SEQ ID NO: 913551
caguauucgguacauaaua

SEQ ID NO: 935977 - RNA, 19 nt, Artificial Sequence
  Description of Artificial Sequence: Synthetic oligonucleotide
  Antisense strand to SEQ ID NO: 935976
uauuauguaccgaauacug

SEQ ID NO: 935978 - RNA, 19 nt, Artificial Sequence
  Description of Artificial Sequence: Synthetic oligonucleotide
  Sense strand starting at position 2287 of SEQ ID NO: 913551
gugaaagggccgggauaaa

SEQ ID NO: 935979 - RNA, 19 nt, Artificial Sequence
  Description of Artificial Sequence: Synthetic oligonucleotide
  Antisense strand to SEQ ID NO: 935978
uuuaucccggcccuuucac

SEQ ID NO: 935980 - RNA, 19 nt, Artificial Sequence
  Description of Artificial Sequence: Synthetic oligonucleotide
  Sense strand starting at position 3500 of SEQ ID NO: 913551
guauucgguacauaauaug

SEQ ID NO: 935981 - RNA, 19 nt, Artificial Sequence
  Description of Artificial Sequence: Synthetic oligonucleotide
  Antisense strand to SEQ ID NO: 935980
cauauuauguaccgaauac

SEQ ID NO: 935982 - RNA, 19 nt, Artificial Sequence
  Description of Artificial Sequence: Synthetic oligonucleotide
  Sense strand starting at position 2702 of SEQ ID NO: 913551
gagcauggaucuuuggacu

SEQ ID NO: 935983 - RNA, 19 nt, Artificial Sequence
  Description of Artificial Sequence: Synthetic oligonucleotide
  Antisense strand to SEQ ID NO: 935982
aguccaaagauccaugcuc

SEQ ID NO: 935984 - RNA, 19 nt, Artificial Sequence
  Description of Artificial Sequence: Synthetic oligonucleotide
  Sense strand starting at position 1508 of SEQ ID NO: 913551
aaacgugaagcugaaguua

SEQ ID NO: 935985 - RNA, 19 nt, Artificial Sequence
  Description of Artificial Sequence: Synthetic oligonucleotide
  Antisense strand to SEQ ID NO: 935984
uaacuucagcuucacguuu

SEQ ID NO: 935986 - RNA, 19 nt, Artificial Sequence
  Description of Artificial Sequence: Synthetic oligonucleotide
  Sense strand starting at position 2744 of SEQ ID NO: 913551
gcaugcauuugcuuaacua

SEQ ID NO: 935987 - RNA, 19 nt, Artificial Sequence
  Description of Artificial Sequence: Synthetic oligonucleotide
  Antisense strand to SEQ ID NO: 935986
uaguuaagcaaaugcaugc

SEQ ID NO: 935988 - RNA, 19 nt, Artificial Sequence
  Description of Artificial Sequence: Synthetic oligonucleotide
  Sense strand starting at position 1641 of SEQ ID NO: 913551
ccuuuaacgccucaaagau

SEQ ID NO: 935989 - RNA, 19 nt, Artificial Sequence
  Description of Artificial Sequence: Synthetic oligonucleotide
  Antisense strand to SEQ ID NO: 935988
aucuuugaggcguuaaagg

SEQ ID NO: 935990 - RNA, 19 nt, Artificial Sequence
  Description of Artificial Sequence: Synthetic oligonucleotide
  Sense strand starting at position 3819 of SEQ ID NO: 913551
uugaauuccugacccaagu

SEQ ID NO: 935991 - RNA, 19 nt, Artificial Sequence
  Description of Artificial Sequence: Synthetic oligonucleotide
  Antisense strand to SEQ ID NO: 935990
acuugggucaggaauucaa

SEQ ID NO: 935992 - RNA, 19 nt, Artificial Sequence
  Description of Artificial Sequence: Synthetic oligonucleotide
  Sense strand starting at position 2760 of SEQ ID NO: 913551
cuaguaauuauugaguggu

SEQ ID NO: 935993 - RNA, 19 nt, Artificial Sequence
  Description of Artificial Sequence: Synthetic oligonucleotide
  Antisense strand to SEQ ID NO: 935992
accacucaauaauuacuag

SEQ ID NO: 935994 - RNA, 19 nt, Artificial Sequence
  Description of Artificial Sequence: Synthetic oligonucleotide
  Sense strand starting at position 705 of SEQ ID NO: 913551
gcugucuuccauuaagaua

SEQ ID NO: 935995 - RNA, 19 nt, Artificial Sequence
  Description of Artificial Sequence: Synthetic oligonucleotide
  Antisense strand to SEQ ID NO: 935994
uaucuuaauggaagacagc

SEQ ID NO: 935996 - RNA, 19 nt, Artificial Sequence
  Description of Artificial Sequence: Synthetic oligonucleotide
  Sense strand starting at position 2855 of SEQ ID NO: 913551
uugcgaaauccuuaucaug

SEQ ID NO: 935997 - RNA, 19 nt, Artificial Sequence
  Description of Artificial Sequence: Synthetic oligonucleotide
  Antisense strand to SEQ ID NO: 935996
caugauaaggauuucgcaa

SEQ ID NO: 935998 - RNA, 19 nt, Artificial Sequence
  Description of Artificial Sequence: Synthetic oligonucleotide
  Sense strand starting at position 2612 of SEQ ID NO: 913551
gaggaaguauuacugcauc

SEQ ID NO: 935999 - RNA, 19 nt, Artificial Sequence
  Description of Artificial Sequence: Synthetic oligonucleotide
  Antisense strand to SEQ ID NO: 935998
gaugcaguaauacuuccuc

SEQ ID NO: 936000 - RNA, 19 nt, Artificial Sequence
  Description of Artificial Sequence: Synthetic oligonucleotide
  Sense strand starting at position 3913 of SEQ ID NO: 913551
aaguacauucuaugagguu

SEQ ID NO: 936001 - RNA, 19 nt, Artificial Sequence
  Description of Artificial Sequence: Synthetic oligonucleotide
  Antisense strand to SEQ ID NO: 936000
aaccucauagaauguacuu

SEQ ID NO: 936002 - RNA, 19 nt, Artificial Sequence
  Description of Artificial Sequence: Synthetic oligonucleotide
  Sense strand starting at position 154 of SEQ ID NO: 913551
cugugaaaggguuaagugu

SEQ ID NO: 936003 - RNA, 19 nt, Artificial Sequence
  Description of Artificial Sequence: Synthetic oligonucleotide
  Antisense strand to SEQ ID NO: 936002
acacuuaacccuuucacag

SEQ ID NO: 936004 - RNA, 19 nt, Artificial Sequence
  Description of Artificial Sequence: Synthetic oligonucleotide
  Sense strand starting at position 2422 of SEQ ID NO: 913551
uggccaaguuaauuaaacu

SEQ ID NO: 936005 - RNA, 19 nt, Artificial Sequence
  Description of Artificial Sequence: Synthetic oligonucleotide
  Antisense strand to SEQ ID NO: 936004
aguuuaauuaacuuggcca

SEQ ID NO: 936006 - RNA, 19 nt, Artificial Sequence
  Description of Artificial Sequence: Synthetic oligonucleotide
  Sense strand starting at position 2488 of SEQ ID NO: 913551
acuuuaagguuuguuauga

SEQ ID NO: 936007 - RNA, 19 nt, Artificial Sequence
  Description of Artificial Sequence: Synthetic oligonucleotide
  Antisense strand to SEQ ID NO: 936006
ucauaacaaaccuuaaagu

SEQ ID NO: 936008 - RNA, 19 nt, Artificial Sequence
  Description of Artificial Sequence: Synthetic oligonucleotide
  Sense strand starting at position 3211 of SEQ ID NO: 913551
cuuggaaauccuggccuca

SEQ ID NO: 936009 - RNA, 19 nt, Artificial Sequence
  Description of Artificial Sequence: Synthetic oligonucleotide
  Antisense strand to SEQ ID NO: 936008
ugaggccaggauuuccaag

SEQ ID NO: 936010 - RNA, 19 nt, Artificial Sequence
  Description of Artificial Sequence: Synthetic oligonucleotide
  Sense strand starting at position 2762 of SEQ ID NO: 913551
aguaauuauugagugguua

SEQ ID NO: 936011 - RNA, 19 nt, Artificial Sequence
  Description of Artificial Sequence: Synthetic oligonucleotide
  Antisense strand to SEQ ID NO: 936010
uaaccacucaauaauuacu

SEQ ID NO: 936012 - RNA, 19 nt, Artificial Sequence
  Description of Artificial Sequence: Synthetic oligonucleotide
  Sense strand starting at position 657 of SEQ ID NO: 913551
ggcuacuugacauguuaga

SEQ ID NO: 936013 - RNA, 19 nt, Artificial Sequence
  Description of Artificial Sequence: Synthetic oligonucleotide
  Antisense strand to SEQ ID NO: 936012
ucuaacaugucaaguagcc

SEQ ID NO: 936014 - RNA, 19 nt, Artificial Sequence
  Description of Artificial Sequence: Synthetic oligonucleotide
  Sense strand starting at position 825 of SEQ ID NO: 913551
auggguuuacuaugguuau

SEQ ID NO: 936015 - RNA, 19 nt, Artificial Sequence
  Description of Artificial Sequence: Synthetic oligonucleotide
  Antisense strand to SEQ ID NO: 936014
auaaccauaguaaacccau

SEQ ID NO: 936016 - RNA, 19 nt, Artificial Sequence
  Description of Artificial Sequence: Synthetic oligonucleotide
  Sense strand starting at position 1234 of SEQ ID NO: 913551
guuccucuucacggaggaa

SEQ ID NO: 936017 - RNA, 19 nt, Artificial Sequence
  Description of Artificial Sequence: Synthetic oligonucleotide
  Antisense strand to SEQ ID NO: 936016
uuccuccgugaagaggaac

SEQ ID NO: 936018 - RNA, 19 nt, Artificial Sequence
  Description of Artificial Sequence: Synthetic oligonucleotide
  Sense strand starting at position 430 of SEQ ID NO: 913551
uguaguaguccagagagcu

SEQ ID NO: 936019 - RNA, 19 nt, Artificial Sequence
  Description of Artificial Sequence: Synthetic oligonucleotide
  Antisense strand to SEQ ID NO: 936018
agcucucuggacuacuaca

SEQ ID NO: 936020 - RNA, 19 nt, Artificial Sequence
  Description of Artificial Sequence: Synthetic oligonucleotide
  Sense strand starting at position 3002 of SEQ ID NO: 913551
agugaugugcugcauaaca

SEQ ID NO: 936021 - RNA, 19 nt, Artificial Sequence
  Description of Artificial Sequence: Synthetic oligonucleotide
  Antisense strand to SEQ ID NO: 936020
uguuaugcagcacaucacu

SEQ ID NO: 936022 - RNA, 19 nt, Artificial Sequence
  Description of Artificial Sequence: Synthetic oligonucleotide
  Sense strand starting at position 2863 of SEQ ID NO: 913551
uccuuaucauggucucauu

SEQ ID NO: 936023 - RNA, 19 nt, Artificial Sequence
  Description of Artificial Sequence: Synthetic oligonucleotide
  Antisense strand to SEQ ID NO: 936022
aaugagaccaugauaagga

SEQ ID NO: 936024 - RNA, 19 nt, Artificial Sequence
  Description of Artificial Sequence: Synthetic oligonucleotide
  Sense strand starting at position 625 of SEQ ID NO: 913551
acugcaaccuccgugaaga

SEQ ID NO: 936025 - RNA, 19 nt, Artificial Sequence
  Description of Artificial Sequence: Synthetic oligonucleotide
  Antisense strand to SEQ ID NO: 936024
ucuucacggagguugcagu

SEQ ID NO: 936026 - RNA, 19 nt, Artificial Sequence
  Description of Artificial Sequence: Synthetic oligonucleotide
  Sense strand starting at position 2414 of SEQ ID NO: 913551
ugugguauuggccaaguua

SEQ ID NO: 936027 - RNA, 19 nt, Artificial Sequence
  Description of Artificial Sequence: Synthetic oligonucleotide
  Antisense strand to SEQ ID NO: 936026
uaacuuggccaauaccaca

SEQ ID NO: 936028 - RNA, 19 nt, Artificial Sequence
  Description of Artificial Sequence: Synthetic oligonucleotide
  Sense strand starting at position 210 of SEQ ID NO: 913551
cuccaugaguuuccuggua

SEQ ID NO: 936029 - RNA, 19 nt, Artificial Sequence
  Description of Artificial Sequence: Synthetic oligonucleotide
  Antisense strand to SEQ ID NO: 936028
uaccaggaaacucauggag

SEQ ID NO: 936030 - RNA, 19 nt, Artificial Sequence
  Description of Artificial Sequence: Synthetic oligonucleotide
  Sense strand starting at position 1441 of SEQ ID NO: 913551
uaacuaucccagcggagua

SEQ ID NO: 936031 - RNA, 19 nt, Artificial Sequence
  Description of Artificial Sequence: Synthetic oligonucleotide
  Antisense strand to SEQ ID NO: 936030
uacuccgcugggauaguua

SEQ ID NO: 936032 - RNA, 19 nt, Artificial Sequence
  Description of Artificial Sequence: Synthetic oligonucleotide
  Sense strand starting at position 2857 of SEQ ID NO: 913551
gcgaaauccuuaucauggu

SEQ ID NO: 936033 - RNA, 19 nt, Artificial Sequence
  Description of Artificial Sequence: Synthetic oligonucleotide
  Antisense strand to SEQ ID NO: 936032
accaugauaaggauuucgc

SEQ ID NO: 936034 - RNA, 19 nt, Artificial Sequence
  Description of Artificial Sequence: Synthetic oligonucleotide
  Sense strand starting at position 2225 of SEQ ID NO: 913552
caguuaugucuggagagac

SEQ ID NO: 936035 - RNA, 19 nt, Artificial Sequence
  Description of Artificial Sequence: Synthetic oligonucleotide
  Antisense strand to SEQ ID NO: 936034
gucucuccagacauaacug

SEQ ID NO: 936036 - RNA, 19 nt, Artificial Sequence
  Description of Artificial Sequence: Synthetic oligonucleotide
  Sense strand starting at position 1453 of SEQ ID NO: 913552
cuccaagagcauuagagua

SEQ ID NO: 936037 - RNA, 19 nt, Artificial Sequence
  Description of Artificial Sequence: Synthetic oligonucleotide
  Antisense strand to SEQ ID NO: 936036
uacucuaaugcucuuggag

SEQ ID NO: 936038 - RNA, 19 nt, Artificial Sequence
  Description of Artificial Sequence: Synthetic oligonucleotide
  Sense strand starting at position 871 of SEQ ID NO: 913552
guggucuauggacacauua

SEQ ID NO: 936039 - RNA, 19 nt, Artificial Sequence
  Description of Artificial Sequence: Synthetic oligonucleotide
  Antisense strand to SEQ ID NO: 936038
uaauguguccauagaccac

SEQ ID NO: 936040 - RNA, 19 nt, Artificial Sequence
  Description of Artificial Sequence: Synthetic oligonucleotide
  Sense strand starting at position 2371 of SEQ ID NO: 913552
gucaguaaacauuacuuau

SEQ ID NO: 936041 - RNA, 19 nt, Artificial Sequence
  Description of Artificial Sequence: Synthetic oligonucleotide
  Antisense strand to SEQ ID NO: 936040
auaaguaauguuuacugac

SEQ ID NO: 936042 - RNA, 19 nt, Artificial Sequence
  Description of Artificial Sequence: Synthetic oligonucleotide
  Sense strand starting at position 2945 of SEQ ID NO: 913552
gaggucugacgcucgugua

SEQ ID NO: 936043 - RNA, 19 nt, Artificial Sequence
  Description of Artificial Sequence: Synthetic oligonucleotide
  Antisense strand to SEQ ID NO: 936042
uacacgagcgucagaccuc

SEQ ID NO: 936044 - RNA, 19 nt, Artificial Sequence
  Description of Artificial Sequence: Synthetic oligonucleotide
  Sense strand starting at position 3842 of SEQ ID NO: 913552
gggauuuguaugugcucca

SEQ ID NO: 936045 - RNA, 19 nt, Artificial Sequence
  Description of Artificial Sequence: Synthetic oligonucleotide
  Antisense strand to SEQ ID NO: 936044
uggagcacauacaaauccc

SEQ ID NO: 936046 - RNA, 19 nt, Artificial Sequence
  Description of Artificial Sequence: Synthetic oligonucleotide
  Sense strand starting at position 1881 of SEQ ID NO: 913552
ggaagcucucuguagggau

SEQ ID NO: 936047 - RNA, 19 nt, Artificial Sequence
  Description of Artificial Sequence: Synthetic oligonucleotide
  Antisense strand to SEQ ID NO: 936046
aucccuacagagagcuucc

SEQ ID NO: 936048 - RNA, 19 nt, Artificial Sequence
  Description of Artificial Sequence: Synthetic oligonucleotide
  Sense strand starting at position 3843 of SEQ ID NO: 913552
ggauuuguaugugcuccau

SEQ ID NO: 936049 - RNA, 19 nt, Artificial Sequence
  Description of Artificial Sequence: Synthetic oligonucleotide
  Antisense strand to SEQ ID NO: 936048
auggagcacauacaaaucc

SEQ ID NO: 936050 - RNA, 19 nt, Artificial Sequence
  Description of Artificial Sequence: Synthetic oligonucleotide
  Sense strand starting at position 2642 of SEQ ID NO: 913552
gcauucaugggugaucuga

SEQ ID NO: 936051 - RNA, 19 nt, Artificial Sequence
  Description of Artificial Sequence: Synthetic oligonucleotide
  Antisense strand to SEQ ID NO: 936050
ucagaucacccaugaaugc

SEQ ID NO: 936052 - RNA, 19 nt, Artificial Sequence
  Description of Artificial Sequence: Synthetic oligonucleotide
  Sense strand starting at position 2454 of SEQ ID NO: 913552
guauucuaaguggagaguu

SEQ ID NO: 936053 - RNA, 19 nt, Artificial Sequence
  Description of Artificial Sequence: Synthetic oligonucleotide
  Antisense strand to SEQ ID NO: 936052
aacucuccacuuagaauac

SEQ ID NO: 936054 - RNA, 19 nt, Artificial Sequence
  Description of Artificial Sequence: Synthetic oligonucleotide
  Sense strand starting at position 3704 of SEQ ID NO: 913552
ggguguccugaagaccuuu

SEQ ID NO: 936055 - RNA, 19 nt, Artificial Sequence
  Description of Artificial Sequence: Synthetic oligonucleotide
  Antisense strand to SEQ ID NO: 936054
aaaggucuucaggacaccc

SEQ ID NO: 936056 - RNA, 19 nt, Artificial Sequence
  Description of Artificial Sequence: Synthetic oligonucleotide
  Sense strand starting at position 2907 of SEQ ID NO: 913552
acuggcuacuuucugaaga

SEQ ID NO: 936057 - RNA, 19 nt, Artificial Sequence
  Description of Artificial Sequence: Synthetic oligonucleotide
  Antisense strand to SEQ ID NO: 936056
ucuucagaaaguagccagu

SEQ ID NO: 936058 - RNA, 19 nt, Artificial Sequence
  Description of Artificial Sequence: Synthetic oligonucleotide
  Sense strand starting at position 2223 of SEQ ID NO: 913552
accaguuaugucuggagag

SEQ ID NO: 936059 - RNA, 19 nt, Artificial Sequence
  Description of Artificial Sequence: Synthetic oligonucleotide
  Antisense strand to SEQ ID NO: 936058
cucuccagacauaacuggu

SEQ ID NO: 936060 - RNA, 19 nt, Artificial Sequence
  Description of Artificial Sequence: Synthetic oligonucleotide
  Sense strand starting at position 2452 of SEQ ID NO: 913552
uuguauucuaaguggagag

SEQ ID NO: 936061 - RNA, 19 nt, Artificial Sequence
  Description of Artificial Sequence: Synthetic oligonucleotide
  Antisense strand to SEQ ID NO: 936060
cucuccacuuagaauacaa

SEQ ID NO: 936062 - RNA, 19 nt, Artificial Sequence
  Description of Artificial Sequence: Synthetic oligonucleotide
  Sense strand starting at position 3845 of SEQ ID NO: 913552
auuuguaugugcuccaucu

SEQ ID NO: 936063 - RNA, 19 nt, Artificial Sequence
  Description of Artificial Sequence: Synthetic oligonucleotide
  Antisense strand to SEQ ID NO: 936062
agauggagcacauacaaau

SEQ ID NO: 936064 - RNA, 19 nt, Artificial Sequence
  Description of Artificial Sequence: Synthetic oligonucleotide
  Sense strand starting at position 3266 of SEQ ID NO: 913552
ggacccuucugguuacuaa

SEQ ID NO: 936065 - RNA, 19 nt, Artificial Sequence
  Description of Artificial Sequence: Synthetic oligonucleotide
  Antisense strand to SEQ ID NO: 936064
uuaguaaccagaagggucc

SEQ ID NO: 936066 - RNA, 19 nt, Artificial Sequence
  Description of Artificial Sequence: Synthetic oligonucleotide
  Sense strand starting at position 2451 of SEQ ID NO: 913552
cuuguauucuaaguggaga

SEQ ID NO: 936067 - RNA, 19 nt, Artificial Sequence
  Description of Artificial Sequence: Synthetic oligonucleotide
  Antisense strand to SEQ ID NO: 936066
ucuccacuuagaauacaag

SEQ ID NO: 936068 - RNA, 19 nt, Artificial Sequence
  Description of Artificial Sequence: Synthetic oligonucleotide
  Sense strand starting at position 2638 of SEQ ID NO: 913552
ggaggcauucaugggugau

SEQ ID NO: 936069 - RNA, 19 nt, Artificial Sequence
  Description of Artificial Sequence: Synthetic oligonucleotide
  Antisense strand to SEQ ID NO: 936068
aucacccaugaaugccucc

SEQ ID NO: 936070 - RNA, 19 nt, Artificial Sequence
  Description of Artificial Sequence: Synthetic oligonucleotide
  Sense strand starting at position 391 of SEQ ID NO: 913552
agugaaauuacccgguaag

SEQ ID NO: 936071 - RNA, 19 nt, Artificial Sequence
  Description of Artificial Sequence: Synthetic oligonucleotide
  Antisense strand to SEQ ID NO: 936070
cuuaccggguaauuucacu

SEQ ID NO: 936072 - RNA, 19 nt, Artificial Sequence
  Description of Artificial Sequence: Synthetic oligonucleotide
  Sense strand starting at position 2966 of SEQ ID NO: 913552
cuaagucuccuagggugaa

SEQ ID NO: 936073 - RNA, 19 nt, Artificial Sequence
  Description of Artificial Sequence: Synthetic oligonucleotide
  Antisense strand to SEQ ID NO: 936072
uucacccuaggagacuuag

SEQ ID NO: 936074 - RNA, 19 nt, Artificial Sequence
  Description of Artificial Sequence: Synthetic oligonucleotide
  Sense strand starting at position 2446 of SEQ ID NO: 913552
ugaaacuuguauucuaagu

SEQ ID NO: 936075 - RNA, 19 nt, Artificial Sequence
  Description of Artificial Sequence: Synthetic oligonucleotide
  Antisense strand to SEQ ID NO: 936074
acuuagaauacaaguuuca

SEQ ID NO: 936076 - RNA, 19 nt, Artificial Sequence
  Description of Artificial Sequence: Synthetic oligonucleotide
  Sense strand starting at position 280 of SEQ ID NO: 913552
augguauguuaaucauauc

SEQ ID NO: 936077 - RNA, 19 nt, Artificial Sequence
  Description of Artificial Sequence: Synthetic oligonucleotide
  Antisense strand to SEQ ID NO: 936076
gauaugauuaacauaccau

SEQ ID NO: 936078 - RNA, 19 nt, Artificial Sequence
  Description of Artificial Sequence: Synthetic oligonucleotide
  Sense strand starting at position 392 of SEQ ID NO: 913552
gugaaauuacccgguaagg

SEQ ID NO: 936079 - RNA, 19 nt, Artificial Sequence
  Description of Artificial Sequence: Synthetic oligonucleotide
  Antisense strand to SEQ ID NO: 936078
ccuuaccggguaauuucac

SEQ ID NO: 936080 - RNA, 19 nt, Artificial Sequence
  Description of Artificial Sequence: Synthetic oligonucleotide
  Sense strand starting at position 390 of SEQ ID NO: 913552
cagugaaauuacccgguaa

SEQ ID NO: 936081 - RNA, 19 nt, Artificial Sequence
  Description of Artificial Sequence: Synthetic oligonucleotide
  Antisense strand to SEQ ID NO: 936080
uuaccggguaauuucacug

SEQ ID NO: 936082 - RNA, 19 nt, Artificial Sequence
  Description of Artificial Sequence: Synthetic oligonucleotide
  Sense strand starting at position 2385 of SEQ ID NO: 913552
cuuauugaucuagggccua

SEQ ID NO: 936083 - RNA, 19 nt, Artificial Sequence
  Description of Artificial Sequence: Synthetic oligonucleotide
  Antisense strand to SEQ ID NO: 936082
uaggcccuagaucaauaag

SEQ ID NO: 936084 - RNA, 19 nt, Artificial Sequence
  Description of Artificial Sequence: Synthetic oligonucleotide
  Sense strand starting at position 2302 of SEQ ID NO: 913552
uaguguccacauugagauu

SEQ ID NO: 936085 - RNA, 19 nt, Artificial Sequence
  Description of Artificial Sequence: Synthetic oligonucleotide
  Antisense strand to SEQ ID NO: 936084
aaucucaauguggacacua

SEQ ID NO: 936086 - RNA, 19 nt, Artificial Sequence
  Description of Artificial Sequence: Synthetic oligonucleotide
  Sense strand starting at position 1358 of SEQ ID NO: 913552
agcaguaaauuacucagua

SEQ ID NO: 936087 - RNA, 19 nt, Artificial Sequence
  Description of Artificial Sequence: Synthetic oligonucleotide
  Antisense strand to SEQ ID NO: 936086
uacugaguaauuuacugcu

SEQ ID NO: 936088 - RNA, 19 nt, Artificial Sequence
  Description of Artificial Sequence: Synthetic oligonucleotide
  Sense strand starting at position 1283 of SEQ ID NO: 913552
acaauuauguaagugcaca

SEQ ID NO: 936089 - RNA, 19 nt, Artificial Sequence
  Description of Artificial Sequence: Synthetic oligonucleotide
  Antisense strand to SEQ ID NO: 936088
ugugcacuuacauaauugu

SEQ ID NO: 936090 - RNA, 19 nt, Artificial Sequence
  Description of Artificial Sequence: Synthetic oligonucleotide
  Sense strand starting at position 1359 of SEQ ID NO: 913552
gcaguaaauuacucaguaa

SEQ ID NO: 936091 - RNA, 19 nt, Artificial Sequence
  Description of Artificial Sequence: Synthetic oligonucleotide
  Antisense strand to SEQ ID NO: 936090
uuacugaguaauuuacugc

SEQ ID NO: 936092 - RNA, 19 nt, Artificial Sequence
  Description of Artificial Sequence: Synthetic oligonucleotide
  Sense strand starting at position 1916 of SEQ ID NO: 913552
ccagcaggcacugaguuau

SEQ ID NO: 936093 - RNA, 19 nt, Artificial Sequence
  Description of Artificial Sequence: Synthetic oligonucleotide
  Antisense strand to SEQ ID NO: 936092
auaacucagugccugcugg

SEQ ID NO: 936094 - RNA, 19 nt, Artificial Sequence
  Description of Artificial Sequence: Synthetic oligonucleotide
  Sense strand starting at position 2453 of SEQ ID NO: 913552
uguauucuaaguggagagu

SEQ ID NO: 936095 - RNA, 19 nt, Artificial Sequence
  Description of Artificial Sequence: Synthetic oligonucleotide
  Antisense strand to SEQ ID NO: 936094
acucuccacuuagaauaca

SEQ ID NO: 936096 - RNA, 19 nt, Artificial Sequence
  Description of Artificial Sequence: Synthetic oligonucleotide
  Sense strand starting at position 2022 of SEQ ID NO: 913552
agggcucugcuuugagaag

SEQ ID NO: 936097 - RNA, 19 nt, Artificial Sequence
  Description of Artificial Sequence: Synthetic oligonucleotide
  Antisense strand to SEQ ID NO: 936096
cuucucaaagcagagcccu

SEQ ID NO: 936098 - RNA, 19 nt, Artificial Sequence
  Description of Artificial Sequence: Synthetic oligonucleotide
  Sense strand starting at position 2641 of SEQ ID NO: 913552
ggcauucaugggugaucug

SEQ ID NO: 936099 - RNA, 19 nt, Artificial Sequence
  Description of Artificial Sequence: Synthetic oligonucleotide
  Antisense strand to SEQ ID NO: 936098
cagaucacccaugaaugcc

SEQ ID NO: 936100 - RNA, 19 nt, Artificial Sequence
  Description of Artificial Sequence: Synthetic oligonucleotide
  Sense strand starting at position 149 of SEQ ID NO: 913552
ucaugcugagccugagaca

SEQ ID NO: 936101 - RNA, 19 nt, Artificial Sequence
  Description of Artificial Sequence: Synthetic oligonucleotide
  Antisense strand to SEQ ID NO: 936100
ugucucaggcucagcauga

SEQ ID NO: 936102 - RNA, 19 nt, Artificial Sequence
  Description of Artificial Sequence: Synthetic oligonucleotide
  Sense strand starting at position 382 of SEQ ID NO: 913552
gcuguuagcagugaaauua

SEQ ID NO: 936103 - RNA, 19 nt, Artificial Sequence
  Description of Artificial Sequence: Synthetic oligonucleotide
  Antisense strand to SEQ ID NO: 936102
uaauuucacugcuaacagc

SEQ ID NO: 936104 - RNA, 19 nt, Artificial Sequence
  Description of Artificial Sequence: Synthetic oligonucleotide
  Sense strand starting at position 3082 of SEQ ID NO: 913552
ggauccauuccucguugga

SEQ ID NO: 936105 - RNA, 19 nt, Artificial Sequence
  Description of Artificial Sequence: Synthetic oligonucleotide
  Antisense strand to SEQ ID NO: 936104
uccaacgaggaauggaucc

SEQ ID NO: 936106 - RNA, 19 nt, Artificial Sequence
  Description of Artificial Sequence: Synthetic oligonucleotide
  Sense strand starting at position 1644 of SEQ ID NO: 913552
gcaugagccuucuuacaag

SEQ ID NO: 936107 - RNA, 19 nt, Artificial Sequence
  Description of Artificial Sequence: Synthetic oligonucleotide
  Antisense strand to SEQ ID NO: 936106
cuuguaagaaggcucaugc

SEQ ID NO: 936108 - RNA, 19 nt, Artificial Sequence
  Description of Artificial Sequence: Synthetic oligonucleotide
  Sense strand starting at position 741 of SEQ ID NO: 913552
gguguaaauucuuccacuc

SEQ ID NO: 936109 - RNA, 19 nt, Artificial Sequence
  Description of Artificial Sequence: Synthetic oligonucleotide
  Antisense strand to SEQ ID NO: 936108
gaguggaagaauuuacacc

SEQ ID NO: 936110 - RNA, 19 nt, Artificial Sequence
  Description of Artificial Sequence: Synthetic oligonucleotide
  Sense strand starting at position 740 of SEQ ID NO: 913552
ugguguaaauucuuccacu

SEQ ID NO: 936111 - RNA, 19 nt, Artificial Sequence
  Description of Artificial Sequence: Synthetic oligonucleotide
  Antisense strand to SEQ ID NO: 936110
aguggaagaauuuacacca

SEQ ID NO: 936112 - RNA, 19 nt, Artificial Sequence
  Description of Artificial Sequence: Synthetic oligonucleotide
  Sense strand starting at position 3244 of SEQ ID NO: 913552
ggccacagguguuugagau

SEQ ID NO: 936113 - RNA, 19 nt, Artificial Sequence
  Description of Artificial Sequence: Synthetic oligonucleotide
  Antisense strand to SEQ ID NO: 936112
aucucaaacaccuguggcc

SEQ ID NO: 936114 - RNA, 19 nt, Artificial Sequence
  Description of Artificial Sequence: Synthetic oligonucleotide
  Sense strand starting at position 1826 of SEQ ID NO: 913553
ccgugucgucaccuacaca

SEQ ID NO: 936115 - RNA, 19 nt, Artificial Sequence
  Description of Artificial Sequence: Synthetic oligonucleotide
  Antisense strand to SEQ ID NO: 936114
uguguaggugacgacacgg

SEQ ID NO: 936116 - RNA, 19 nt, Artificial Sequence
  Description of Artificial Sequence: Synthetic oligonucleotide
  Sense strand starting at position 3349 of SEQ ID NO: 913553
gagagaguuccugacgacu

SEQ ID NO: 936117 - RNA, 19 nt, Artificial Sequence
  Description of Artificial Sequence: Synthetic oligonucleotide
  Antisense strand to SEQ ID NO: 936116
agucgucaggaacucucuc

SEQ ID NO: 936118 - RNA, 19 nt, Artificial Sequence
  Description of Artificial Sequence: Synthetic oligonucleotide
  Sense strand starting at position 1496 of SEQ ID NO: 913553
agggaagggucccuaucua

SEQ ID NO: 936119 - RNA, 19 nt, Artificial Sequence
  Description of Artificial Sequence: Synthetic oligonucleotide
  Antisense strand to SEQ ID NO: 936118
uagauagggacccuucccu

SEQ ID NO: 936120 - RNA, 19 nt, Artificial Sequence
  Description of Artificial Sequence: Synthetic oligonucleotide
  Sense strand starting at position 2193 of SEQ ID NO: 913553
aaugaauggcuaggaagua

SEQ ID NO: 936121 - RNA, 19 nt, Artificial Sequence
  Description of Artificial Sequence: Synthetic oligonucleotide
  Antisense strand to SEQ ID NO: 936120
uacuuccuagccauucauu

SEQ ID NO: 936122 - RNA, 19 nt, Artificial Sequence
  Description of Artificial Sequence: Synthetic oligonucleotide
  Sense strand starting at position 3936 of SEQ ID NO: 913553
caaacaugagcagguaaua

SEQ ID NO: 936123 - RNA, 19 nt, Artificial Sequence
  Description of Artificial Sequence: Synthetic oligonucleotide
  Antisense strand to SEQ ID NO: 936122
uauuaccugcucauguuug

SEQ ID NO: 936124 - RNA, 19 nt, Artificial Sequence
  Description of Artificial Sequence: Synthetic oligonucleotide
  Sense strand starting at position 2660 of SEQ ID NO: 913553
gcuuguguucucuuucucu

SEQ ID NO: 936125 - RNA, 19 nt, Artificial Sequence
  Description of Artificial Sequence: Synthetic oligonucleotide
  Antisense strand to SEQ ID NO: 936124
agagaaagagaacacaagc

SEQ ID NO: 936126 - RNA, 19 nt, Artificial Sequence
  Description of Artificial Sequence: Synthetic oligonucleotide
  Sense strand starting at position 3839 of SEQ ID NO: 913553
ggcacauaagcaugcauuu

SEQ ID NO: 936127 - RNA, 19 nt, Artificial Sequence
  Description of Artificial Sequence: Synthetic oligonucleotide
  Antisense strand to SEQ ID NO: 936126
aaaugcaugcuuaugugcc

SEQ ID NO: 936128 - RNA, 19 nt, Artificial Sequence
  Description of Artificial Sequence: Synthetic oligonucleotide
  Sense strand starting at position 365 of SEQ ID NO: 913553
agcaauggauuacucuuau

SEQ ID NO: 936129 - RNA, 19 nt, Artificial Sequence
  Description of Artificial Sequence: Synthetic oligonucleotide
  Antisense strand to SEQ ID NO: 936128
auaagaguaauccauugcu

SEQ ID NO: 936130 - RNA, 19 nt, Artificial Sequence
  Description of Artificial Sequence: Synthetic oligonucleotide
  Sense strand starting at position 317 of SEQ ID NO: 913553
gacgaaaucgccuaccaac

SEQ ID NO: 936131 - RNA, 19 nt, Artificial Sequence
  Description of Artificial Sequence: Synthetic oligonucleotide
  Antisense strand to SEQ ID NO: 936130
guugguaggcgauuucguc

SEQ ID NO: 936132 - RNA, 19 nt, Artificial Sequence
  Description of Artificial Sequence: Synthetic oligonucleotide
  Sense strand starting at position 1297 of SEQ ID NO: 913553
gcccauuaucuggauucuu

SEQ ID NO: 936133 - RNA, 19 nt, Artificial Sequence
  Description of Artificial Sequence: Synthetic oligonucleotide
  Antisense strand to SEQ ID NO: 936132
aagaauccagauaaugggc

SEQ ID NO: 936134 - RNA, 19 nt, Artificial Sequence
  Description of Artificial Sequence: Synthetic oligonucleotide
  Sense strand starting at position 3217 of SEQ ID NO: 913553
gcauuugguucugucucua

SEQ ID NO: 936135 - RNA, 19 nt, Artificial Sequence
  Description of Artificial Sequence: Synthetic oligonucleotide
  Antisense strand to SEQ ID NO: 936134
uagagacagaaccaaaugc

SEQ ID NO: 936136 - RNA, 19 nt, Artificial Sequence
  Description of Artificial Sequence: Synthetic oligonucleotide
  Sense strand starting at position 3921 of SEQ ID NO: 913553
agaguagaaguuugccaaa

SEQ ID NO: 936137 - RNA, 19 nt, Artificial Sequence
  Description of Artificial Sequence: Synthetic oligonucleotide
  Antisense strand to SEQ ID NO: 936136
uuuggcaaacuucuacucu

SEQ ID NO: 936138 - RNA, 19 nt, Artificial Sequence
  Description of Artificial Sequence: Synthetic oligonucleotide
  Sense strand starting at position 804 of SEQ ID NO: 913553
uggcccuaucacuauggua

SEQ ID NO: 936139 - RNA, 19 nt, Artificial Sequence
  Description of Artificial Sequence: Synthetic oligonucleotide
  Antisense strand to SEQ ID NO: 936138
uaccauagugauagggcca

SEQ ID NO: 936140 - RNA, 19 nt, Artificial Sequence
  Description of Artificial Sequence: Synthetic oligonucleotide
  Sense strand starting at position 2190 of SEQ ID NO: 913553
gcgaaugaauggcuaggaa

SEQ ID NO: 936141 - RNA, 19 nt, Artificial Sequence
  Description of Artificial Sequence: Synthetic oligonucleotide
  Antisense strand to SEQ ID NO: 936140
uuccuagccauucauucgc

SEQ ID NO: 936142 - RNA, 19 nt, Artificial Sequence
  Description of Artificial Sequence: Synthetic oligonucleotide
  Sense strand starting at position 3923 of SEQ ID NO: 913553
aguagaaguuugccaaaca

SEQ ID NO: 936143 - RNA, 19 nt, Artificial Sequence
  Description of Artificial Sequence: Synthetic oligonucleotide
  Antisense strand to SEQ ID NO: 936142
uguuuggcaaacuucuacu

SEQ ID NO: 936144 - RNA, 19 nt, Artificial Sequence
  Description of Artificial Sequence: Synthetic oligonucleotide
  Sense strand starting at position 3316 of SEQ ID NO: 913553
guaggaaacaaguguguaa

SEQ ID NO: 936145 - RNA, 19 nt, Artificial Sequence
  Description of Artificial Sequence: Synthetic oligonucleotide
  Antisense strand to SEQ ID NO: 936144
uuacacacuuguuuccuac

SEQ ID NO: 936146 - RNA, 19 nt, Artificial Sequence
  Description of Artificial Sequence: Synthetic oligonucleotide
  Sense strand starting at position 1302 of SEQ ID NO: 913553
uuaucuggauucuuuagua

SEQ ID NO: 936147 - RNA, 19 nt, Artificial Sequence
  Description of Artificial Sequence: Synthetic oligonucleotide
  Antisense strand to SEQ ID NO: 936146
uacuaaagaauccagauaa

SEQ ID NO: 936148 - RNA, 19 nt, Artificial Sequence
  Description of Artificial Sequence: Synthetic oligonucleotide
  Sense strand starting at position 230 of SEQ ID NO: 913553
gacguacagcuauaccauu

SEQ ID NO: 936149 - RNA, 19 nt, Artificial Sequence
  Description of Artificial Sequence: Synthetic oligonucleotide
  Antisense strand to SEQ ID NO: 936148
aaugguauagcuguacguc

SEQ ID NO: 936150 - RNA, 19 nt, Artificial Sequence
  Description of Artificial Sequence: Synthetic oligonucleotide
  Sense strand starting at position 2650 of SEQ ID NO: 913553
uggcaaauuugcuuguguu

SEQ ID NO: 936151 - RNA, 19 nt, Artificial Sequence
  Description of Artificial Sequence: Synthetic oligonucleotide
  Antisense strand to SEQ ID NO: 936150
aacacaagcaaauuugcca

SEQ ID NO: 936152 - RNA, 19 nt, Artificial Sequence
  Description of Artificial Sequence: Synthetic oligonucleotide
  Sense strand starting at position 275 of SEQ ID NO: 913553
caucuaggucucuggaagu

SEQ ID NO: 936153 - RNA, 19 nt, Artificial Sequence
  Description of Artificial Sequence: Synthetic oligonucleotide
  Antisense strand to SEQ ID NO: 936152
acuuccagagaccuagaug

SEQ ID NO: 936154 - RNA, 19 nt, Artificial Sequence
  Description of Artificial Sequence: Synthetic oligonucleotide
  Sense strand starting at position 2651 of SEQ ID NO: 913553
ggcaaauuugcuuguguuc

SEQ ID NO: 936155 - RNA, 19 nt, Artificial Sequence
  Description of Artificial Sequence: Synthetic oligonucleotide
  Antisense strand to SEQ ID NO: 936154
gaacacaagcaaauuugcc

SEQ ID NO: 936156 - RNA, 19 nt, Artificial Sequence
  Description of Artificial Sequence: Synthetic oligonucleotide
  Sense strand starting at position 1355 of SEQ ID NO: 913553
ggaacuccaucuguugcaa

SEQ ID NO: 936157 - RNA, 19 nt, Artificial Sequence
  Description of Artificial Sequence: Synthetic oligonucleotide
  Antisense strand to SEQ ID NO: 936156
uugcaacagauggaguucc

SEQ ID NO: 936158 - RNA, 19 nt, Artificial Sequence
  Description of Artificial Sequence: Synthetic oligonucleotide
  Sense strand starting at position 3495 of SEQ ID NO: 913553
gcgggagguucacuugaga

SEQ ID NO: 936159 - RNA, 19 nt, Artificial Sequence
  Description of Artificial Sequence: Synthetic oligonucleotide
  Antisense strand to SEQ ID NO: 936158
ucucaagugaaccucccgc

SEQ ID NO: 936160 - RNA, 19 nt, Artificial Sequence
  Description of Artificial Sequence: Synthetic oligonucleotide
  Sense strand starting at position 296 of SEQ ID NO: 913553
acucaaagauguucgcaca

SEQ ID NO: 936161 - RNA, 19 nt, Artificial Sequence
  Description of Artificial Sequence: Synthetic oligonucleotide
  Antisense strand to SEQ ID NO: 936160
ugugcgaacaucuuugagu

SEQ ID NO: 936162 - RNA, 19 nt, Artificial Sequence
  Description of Artificial Sequence: Synthetic oligonucleotide
  Sense strand starting at position 297 of SEQ ID NO: 913553
cucaaagauguucgcacaa

SEQ ID NO: 936163 - RNA, 19 nt, Artificial Sequence
  Description of Artificial Sequence: Synthetic oligonucleotide
  Antisense strand to SEQ ID NO: 936162
uugugcgaacaucuuugag

SEQ ID NO: 936164 - RNA, 19 nt, Artificial Sequence
  Description of Artificial Sequence: Synthetic oligonucleotide
  Sense strand starting at position 806 of SEQ ID NO: 913553
gcccuaucacuaugguaac

SEQ ID NO: 936165 - RNA, 19 nt, Artificial Sequence
  Description of Artificial Sequence: Synthetic oligonucleotide
  Antisense strand to SEQ ID NO: 936164
guuaccauagugauagggc

SEQ ID NO: 936166 - RNA, 19 nt, Artificial Sequence
  Description of Artificial Sequence: Synthetic oligonucleotide
  Sense strand starting at position 217 of SEQ ID NO: 913553
aguacaguaacuugacgua

SEQ ID NO: 936167 - RNA, 19 nt, Artificial Sequence
  Description of Artificial Sequence: Synthetic oligonucleotide
  Antisense strand to SEQ ID NO: 936166
uacgucaaguuacuguacu

SEQ ID NO: 936168 - RNA, 19 nt, Artificial Sequence
  Description of Artificial Sequence: Synthetic oligonucleotide
  Sense strand starting at position 358 of SEQ ID NO: 913553
gcuguuaagcaauggauua

SEQ ID NO: 936169 - RNA, 19 nt, Artificial Sequence
  Description of Artificial Sequence: Synthetic oligonucleotide
  Antisense strand to SEQ ID NO: 936168
uaauccauugcuuaacagc

SEQ ID NO: 936170 - RNA, 19 nt, Artificial Sequence
  Description of Artificial Sequence: Synthetic oligonucleotide
  Sense strand starting at position 1643 of SEQ ID NO: 913553
ggccuaacucugggagcuu

SEQ ID NO: 936171 - RNA, 19 nt, Artificial Sequence
  Description of Artificial Sequence: Synthetic oligonucleotide
  Antisense strand to SEQ ID NO: 936170
aagcucccagaguuaggcc

SEQ ID NO: 936172 - RNA, 19 nt, Artificial Sequence
  Description of Artificial Sequence: Synthetic oligonucleotide
  Sense strand starting at position 1314 of SEQ ID NO: 913553
uuuaguaccuguuccucua

SEQ ID NO: 936173 - RNA, 19 nt, Artificial Sequence
  Description of Artificial Sequence: Synthetic oligonucleotide
  Antisense strand to SEQ ID NO: 936172
uagaggaacagguacuaaa

SEQ ID NO: 936174 - RNA, 19 nt, Artificial Sequence
  Description of Artificial Sequence: Synthetic oligonucleotide
  Sense strand starting at position 2664 of SEQ ID NO: 913553
guguucucuuucucucaaa

SEQ ID NO: 936175 - RNA, 19 nt, Artificial Sequence
  Description of Artificial Sequence: Synthetic oligonucleotide
  Antisense strand to SEQ ID NO: 936174
uuugagagaaagagaacac

SEQ ID NO: 936176 - RNA, 19 nt, Artificial Sequence
  Description of Artificial Sequence: Synthetic oligonucleotide
  Sense strand starting at position 3948 of SEQ ID NO: 913553
gguaauaauucccagaaga

SEQ ID NO: 936177 - RNA, 19 nt, Artificial Sequence
  Description of Artificial Sequence: Synthetic oligonucleotide
  Antisense strand to SEQ ID NO: 936176
ucuucugggaauuauuacc

SEQ ID NO: 936178 - RNA, 19 nt, Artificial Sequence
  Description of Artificial Sequence: Synthetic oligonucleotide
  Sense strand starting at position 2663 of SEQ ID NO: 913553
uguguucucuuucucucaa

SEQ ID NO: 936179 - RNA, 19 nt, Artificial Sequence
  Description of Artificial Sequence: Synthetic oligonucleotide
  Antisense strand to SEQ ID NO: 936178
uugagagaaagagaacaca

SEQ ID NO: 936180 - RNA, 19 nt, Artificial Sequence
  Description of Artificial Sequence: Synthetic oligonucleotide
  Sense strand starting at position 2075 of SEQ ID NO: 913553
guguuugcgccucaaggaa

SEQ ID NO: 936181 - RNA, 19 nt, Artificial Sequence
  Description of Artificial Sequence: Synthetic oligonucleotide
  Antisense strand to SEQ ID NO: 936180
uuccuugaggcgcaaacac

SEQ ID NO: 936182 - RNA, 19 nt, Artificial Sequence
  Description of Artificial Sequence: Synthetic oligonucleotide
  Sense strand starting at position 2632 of SEQ ID NO: 913553
caguaagucucagcauguu

SEQ ID NO: 936183 - RNA, 19 nt, Artificial Sequence
  Description of Artificial Sequence: Synthetic oligonucleotide
  Antisense strand to SEQ ID NO: 936182
aacaugcugagacuuacug

SEQ ID NO: 936184 - RNA, 19 nt, Artificial Sequence
  Description of Artificial Sequence: Synthetic oligonucleotide
  Sense strand starting at position 1907 of SEQ ID NO: 913553
gugccaucuguccgaauag

SEQ ID NO: 936185 - RNA, 19 nt, Artificial Sequence
  Description of Artificial Sequence: Synthetic oligonucleotide
  Antisense strand to SEQ ID NO: 936184
cuauucggacagauggcac

SEQ ID NO: 936186 - RNA, 19 nt, Artificial Sequence
  Description of Artificial Sequence: Synthetic oligonucleotide
  Sense strand starting at position 1906 of SEQ ID NO: 913553
ugugccaucuguccgaaua

SEQ ID NO: 936187 - RNA, 19 nt, Artificial Sequence
  Description of Artificial Sequence: Synthetic oligonucleotide
  Antisense strand to SEQ ID NO: 936186
uauucggacagauggcaca

SEQ ID NO: 936188 - RNA, 19 nt, Artificial Sequence
  Description of Artificial Sequence: Synthetic oligonucleotide
  Sense strand starting at position 2139 of SEQ ID NO: 913553
ccgaaaggauuccaacuau

SEQ ID NO: 936189 - RNA, 19 nt, Artificial Sequence
  Description of Artificial Sequence: Synthetic oligonucleotide
  Antisense strand to SEQ ID NO: 936188
auaguuggaauccuuucgg

SEQ ID NO: 936190 - RNA, 19 nt, Artificial Sequence
  Description of Artificial Sequence: Synthetic oligonucleotide
  Sense strand starting at position 2641 of SEQ ID NO: 913553
ucagcauguuggcaaauuu

SEQ ID NO: 936191 - RNA, 19 nt, Artificial Sequence
  Description of Artificial Sequence: Synthetic oligonucleotide
  Antisense strand to SEQ ID NO: 936190
aaauuugccaacaugcuga

SEQ ID NO: 936192 - RNA, 19 nt, Artificial Sequence
  Description of Artificial Sequence: Synthetic oligonucleotide
  Sense strand starting at position 3800 of SEQ ID NO: 913553
guuuguuucuugccucaua

SEQ ID NO: 936193 - RNA, 19 nt, Artificial Sequence
  Description of Artificial Sequence: Synthetic oligonucleotide
  Antisense strand to SEQ ID NO: 936192
uaugaggcaagaaacaaac

SEQ ID NO: 936194 - RNA, 19 nt, Artificial Sequence
  Description of Artificial Sequence: Synthetic oligonucleotide
  Sense strand starting at position 2288 of SEQ ID NO: 913554
ccgcuuauugucccuguga

SEQ ID NO: 936195 - RNA, 19 nt, Artificial Sequence
  Description of Artificial Sequence: Synthetic oligonucleotide
  Antisense strand to SEQ ID NO: 936194
ucacagggacaauaagcgg

SEQ ID NO: 936196 - RNA, 19 nt, Artificial Sequence
  Description of Artificial Sequence: Synthetic oligonucleotide
  Sense strand starting at position 2680 of SEQ ID NO: 913554
gcgaauguagccuuuguac

SEQ ID NO: 936197 - RNA, 19 nt, Artificial Sequence
  Description of Artificial Sequence: Synthetic oligonucleotide
  Antisense strand to SEQ ID NO: 936196
guacaaaggcuacauucgc

SEQ ID NO: 936198 - RNA, 19 nt, Artificial Sequence
  Description of Artificial Sequence: Synthetic oligonucleotide
  Sense strand starting at position 2812 of SEQ ID NO: 913554
agcagacaguacucaauaa

SEQ ID NO: 936199 - RNA, 19 nt, Artificial Sequence
  Description of Artificial Sequence: Synthetic oligonucleotide
  Antisense strand to SEQ ID NO: 936198
uuauugaguacugucugcu

SEQ ID NO: 936200 - RNA, 19 nt, Artificial Sequence
  Description of Artificial Sequence: Synthetic oligonucleotide
  Sense strand starting at position 3811 of SEQ ID NO: 913554
cuuaaaucuggccaaagca

SEQ ID NO: 936201 - RNA, 19 nt, Artificial Sequence
  Description of Artificial Sequence: Synthetic oligonucleotide
  Antisense strand to SEQ ID NO: 936200
ugcuuuggccagauuuaag

SEQ ID NO: 936202 - RNA, 19 nt, Artificial Sequence
  Description of Artificial Sequence: Synthetic oligonucleotide
  Sense strand starting at position 3901 of SEQ ID NO: 913554
ggaucugucccagaagccu

SEQ ID NO: 936203 - RNA, 19 nt, Artificial Sequence
  Description of Artificial Sequence: Synthetic oligonucleotide
  Antisense strand to SEQ ID NO: 936202
aggcuucugggacagaucc

SEQ ID NO: 936204 - RNA, 19 nt, Artificial Sequence
  Description of Artificial Sequence: Synthetic oligonucleotide
  Sense strand starting at position 997 of SEQ ID NO: 913554
ggccuuggagauugaacuu

SEQ ID NO: 936205 - RNA, 19 nt, Artificial Sequence
  Description of Artificial Sequence: Synthetic oligonucleotide
  Antisense strand to SEQ ID NO: 936204
aaguucaaucuccaaggcc

SEQ ID NO: 936206 - RNA, 19 nt, Artificial Sequence
  Description of Artificial Sequence: Synthetic oligonucleotide
  Sense strand starting at position 2702 of SEQ ID NO: 913554
cgaccucucaauggugaaa

SEQ ID NO: 936207 - RNA, 19 nt, Artificial Sequence
  Description of Artificial Sequence: Synthetic oligonucleotide
  Antisense strand to SEQ ID NO: 936206
uuucaccauugagaggucg

SEQ ID NO: 936208 - RNA, 19 nt, Artificial Sequence
  Description of Artificial Sequence: Synthetic oligonucleotide
  Sense strand starting at position 3528 of SEQ ID NO: 913554
ggcagugagguccagugaa

SEQ ID NO: 936209 - RNA, 19 nt, Artificial Sequence
  Description of Artificial Sequence: Synthetic oligonucleotide
  Antisense strand to SEQ ID NO: 936208
uucacuggaccucacugcc

SEQ ID NO: 936210 - RNA, 19 nt, Artificial Sequence
  Description of Artificial Sequence: Synthetic oligonucleotide
  Sense strand starting at position 2557 of SEQ ID NO: 913554
gggaaugagacccgucuuu

SEQ ID NO: 936211 - RNA, 19 nt, Artificial Sequence
  Description of Artificial Sequence: Synthetic oligonucleotide
  Antisense strand to SEQ ID NO: 936210
aaagacgggucucauuccc

SEQ ID NO: 936212 - RNA, 19 nt, Artificial Sequence
  Description of Artificial Sequence: Synthetic oligonucleotide
  Sense strand starting at position 2330 of SEQ ID NO: 913554
ggaccuuaggcguaaagug

SEQ ID NO: 936213 - RNA, 19 nt, Artificial Sequence
  Description of Artificial Sequence: Synthetic oligonucleotide
  Antisense strand to SEQ ID NO: 936212
cacuuuacgccuaaggucc

SEQ ID NO: 936214 - RNA, 19 nt, Artificial Sequence
  Description of Artificial Sequence: Synthetic oligonucleotide
  Sense strand starting at position 2701 of SEQ ID NO: 913554
ccgaccucucaauggugaa

SEQ ID NO: 936215 - RNA, 19 nt, Artificial Sequence
  Description of Artificial Sequence: Synthetic oligonucleotide
  Antisense strand to SEQ ID NO: 936214
uucaccauugagaggucgg

SEQ ID NO: 936216 - RNA, 19 nt, Artificial Sequence
  Description of Artificial Sequence: Synthetic oligonucleotide
  Sense strand starting at position 2840 of SEQ ID NO: 913554
guaaguaaguccuuuaaac

SEQ ID NO: 936217 - RNA, 19 nt, Artificial Sequence
  Description of Artificial Sequence: Synthetic oligonucleotide
  Antisense strand to SEQ ID NO: 936216
guuuaaaggacuuacuuac

SEQ ID NO: 936218 - RNA, 19 nt, Artificial Sequence
  Description of Artificial Sequence: Synthetic oligonucleotide
  Sense strand starting at position 3349 of SEQ ID NO: 913554
aggugucuucugugcauuu

SEQ ID NO: 936219 - RNA, 19 nt, Artificial Sequence
  Description of Artificial Sequence: Synthetic oligonucleotide
  Antisense strand to SEQ ID NO: 936218
aaaugcacagaagacaccu

SEQ ID NO: 936220 - RNA, 19 nt, Artificial Sequence
  Description of Artificial Sequence: Synthetic oligonucleotide
  Sense strand starting at position 1004 of SEQ ID NO: 913554
gagauugaacuuugcugca

SEQ ID NO: 936221 - RNA, 19 nt, Artificial Sequence
  Description of Artificial Sequence: Synthetic oligonucleotide
  Antisense strand to SEQ ID NO: 936220
ugcagcaaaguucaaucuc

SEQ ID NO: 936222 - RNA, 19 nt, Artificial Sequence
  Description of Artificial Sequence: Synthetic oligonucleotide
  Sense strand starting at position 144 of SEQ ID NO: 913554
aaacauucuggcgaugugu

SEQ ID NO: 936223 - RNA, 19 nt, Artificial Sequence
  Description of Artificial Sequence: Synthetic oligonucleotide
  Antisense strand to SEQ ID NO: 936222
acacaucgccagaauguuu

SEQ ID NO: 936224 - RNA, 19 nt, Artificial Sequence
  Description of Artificial Sequence: Synthetic oligonucleotide
  Sense strand starting at position 327 of SEQ ID NO: 913554
cgagguuccucauuccaau

SEQ ID NO: 936225 - RNA, 19 nt, Artificial Sequence
  Description of Artificial Sequence: Synthetic oligonucleotide
  Antisense strand to SEQ ID NO: 936224
auuggaaugaggaaccucg

SEQ ID NO: 936226 - RNA, 19 nt, Artificial Sequence
  Description of Artificial Sequence: Synthetic oligonucleotide
  Sense strand starting at position 2827 of SEQ ID NO: 913554
auaaaugguagcuguaagu

SEQ ID NO: 936227 - RNA, 19 nt, Artificial Sequence
  Description of Artificial Sequence: Synthetic oligonucleotide
  Antisense strand to SEQ ID NO: 936226
acuuacagcuaccauuuau

SEQ ID NO: 936228 - RNA, 19 nt, Artificial Sequence
  Description of Artificial Sequence: Synthetic oligonucleotide
  Sense strand starting at position 920 of SEQ ID NO: 913554
cgaguuucucuucagcgaa

SEQ ID NO: 936229 - RNA, 19 nt, Artificial Sequence
  Description of Artificial Sequence: Synthetic oligonucleotide
  Antisense strand to SEQ ID NO: 936228
uucgcugaagagaaacucg

SEQ ID NO: 936230 - RNA, 19 nt, Artificial Sequence
  Description of Artificial Sequence: Synthetic oligonucleotide
  Sense strand starting at position 258 of SEQ ID NO: 913554
ggaggagucugggaugaac

SEQ ID NO: 936231 - RNA, 19 nt, Artificial Sequence
  Description of Artificial Sequence: Synthetic oligonucleotide
  Antisense strand to SEQ ID NO: 936230
guucaucccagacuccucc

SEQ ID NO: 936232 - RNA, 19 nt, Artificial Sequence
  Description of Artificial Sequence: Synthetic oligonucleotide
  Sense strand starting at position 2682 of SEQ ID NO: 913554
gaauguagccuuuguacuu

SEQ ID NO: 936233 - RNA, 19 nt, Artificial Sequence
  Description of Artificial Sequence: Synthetic oligonucleotide
  Antisense strand to SEQ ID NO: 936232
aaguacaaaggcuacauuc

SEQ ID NO: 936234 - RNA, 19 nt, Artificial Sequence
  Description of Artificial Sequence: Synthetic oligonucleotide
  Sense strand starting at position 3343 of SEQ ID NO: 913554
gggaguaggugucuucugu

SEQ ID NO: 936235 - RNA, 19 nt, Artificial Sequence
  Description of Artificial Sequence: Synthetic oligonucleotide
  Antisense strand to SEQ ID NO: 936234
acagaagacaccuacuccc

SEQ ID NO: 936236 - RNA, 19 nt, Artificial Sequence
  Description of Artificial Sequence: Synthetic oligonucleotide
  Sense strand starting at position 3801 of SEQ ID NO: 913554
cucgcuugcccuuaaaucu

SEQ ID NO: 936237 - RNA, 19 nt, Artificial Sequence
  Description of Artificial Sequence: Synthetic oligonucleotide
  Antisense strand to SEQ ID NO: 936236
agauuuaagggcaagcgag

SEQ ID NO: 936238 - RNA, 19 nt, Artificial Sequence
  Description of Artificial Sequence: Synthetic oligonucleotide
  Sense strand starting at position 2544 of SEQ ID NO: 913554
gagcucgaucugcgggaau

SEQ ID NO: 936239 - RNA, 19 nt, Artificial Sequence
  Description of Artificial Sequence: Synthetic oligonucleotide
  Antisense strand to SEQ ID NO: 936238
auucccgcagaucgagcuc

SEQ ID NO: 936240 - RNA, 19 nt, Artificial Sequence
  Description of Artificial Sequence: Synthetic oligonucleotide
  Sense strand starting at position 2546 of SEQ ID NO: 913554
gcucgaucugcgggaauga

SEQ ID NO: 936241 - RNA, 19 nt, Artificial Sequence
  Description of Artificial Sequence: Synthetic oligonucleotide
  Antisense strand to SEQ ID NO: 936240
ucauucccgcagaucgagc

SEQ ID NO: 936242 - RNA, 19 nt, Artificial Sequence
  Description of Artificial Sequence: Synthetic oligonucleotide
  Sense strand starting at position 2290 of SEQ ID NO: 913554
gcuuauugucccugugaca

SEQ ID NO: 936243 - RNA, 19 nt, Artificial Sequence
  Description of Artificial Sequence: Synthetic oligonucleotide
  Antisense strand to SEQ ID NO: 936242
ugucacagggacaauaagc

SEQ ID NO: 936244 - RNA, 19 nt, Artificial Sequence
  Description of Artificial Sequence: Synthetic oligonucleotide
  Sense strand starting at position 2795 of SEQ ID NO: 913554
cugcaucgugucugacaag

SEQ ID NO: 936245 - RNA, 19 nt, Artificial Sequence
  Description of Artificial Sequence: Synthetic oligonucleotide
  Antisense strand to SEQ ID NO: 936244
cuugucagacacgaugcag

SEQ ID NO: 936246 - RNA, 19 nt, Artificial Sequence
  Description of Artificial Sequence: Synthetic oligonucleotide
  Sense strand starting at position 2794 of SEQ ID NO: 913554
ucugcaucgugucugacaa

SEQ ID NO: 936247 - RNA, 19 nt, Artificial Sequence
  Description of Artificial Sequence: Synthetic oligonucleotide
  Antisense strand to SEQ ID NO: 936246
uugucagacacgaugcaga

SEQ ID NO: 936248 - RNA, 19 nt, Artificial Sequence
  Description of Artificial Sequence: Synthetic oligonucleotide
  Sense strand starting at position 1452 of SEQ ID NO: 913554
agcccauucgccuguggaa

SEQ ID NO: 936249 - RNA, 19 nt, Artificial Sequence
  Description of Artificial Sequence: Synthetic oligonucleotide
  Antisense strand to SEQ ID NO: 936248
uuccacaggcgaaugggcu

SEQ ID NO: 936250 - RNA, 19 nt, Artificial Sequence
  Description of Artificial Sequence: Synthetic oligonucleotide
  Sense strand starting at position 2783 of SEQ ID NO: 913554
ccgcgaaauucucugcauc

SEQ ID NO: 936251 - RNA, 19 nt, Artificial Sequence
  Description of Artificial Sequence: Synthetic oligonucleotide
  Antisense strand to SEQ ID NO: 936250
gaugcagagaauuucgcgg

SEQ ID NO: 936252 - RNA, 19 nt, Artificial Sequence
  Description of Artificial Sequence: Synthetic oligonucleotide
  Sense strand starting at position 2289 of SEQ ID NO: 913554
cgcuuauugucccugugac

SEQ ID NO: 936253 - RNA, 19 nt, Artificial Sequence
  Description of Artificial Sequence: Synthetic oligonucleotide
  Antisense strand to SEQ ID NO: 936252
gucacagggacaauaagcg

SEQ ID NO: 936254 - RNA, 19 nt, Artificial Sequence
  Description of Artificial Sequence: Synthetic oligonucleotide
  Sense strand starting at position 2785 of SEQ ID NO: 913554
gcgaaauucucugcaucgu

SEQ ID NO: 936255 - RNA, 19 nt, Artificial Sequence
  Description of Artificial Sequence: Synthetic oligonucleotide
  Antisense strand to SEQ ID NO: 936254
acgaugcagagaauuucgc

SEQ ID NO: 936256 - RNA, 19 nt, Artificial Sequence
  Description of Artificial Sequence: Synthetic oligonucleotide
  Sense strand starting at position 2704 of SEQ ID NO: 913554
accucucaauggugaaaug

SEQ ID NO: 936257 - RNA, 19 nt, Artificial Sequence
  Description of Artificial Sequence: Synthetic oligonucleotide
  Antisense strand to SEQ ID NO: 936256
cauuucaccauugagaggu

SEQ ID NO: 936258 - RNA, 19 nt, Artificial Sequence
  Description of Artificial Sequence: Synthetic oligonucleotide
  Sense strand starting at position 919 of SEQ ID NO: 913554
gcgaguuucucuucagcga

SEQ ID NO: 936259 - RNA, 19 nt, Artificial Sequence
  Description of Artificial Sequence: Synthetic oligonucleotide
  Antisense strand to SEQ ID NO: 936258
ucgcugaagagaaacucgc

SEQ ID NO: 936260 - RNA, 19 nt, Artificial Sequence
  Description of Artificial Sequence: Synthetic oligonucleotide
  Sense strand starting at position 3504 of SEQ ID NO: 913554
uggcccugcucuuaaagaa

SEQ ID NO: 936261 - RNA, 19 nt, Artificial Sequence
  Description of Artificial Sequence: Synthetic oligonucleotide
  Antisense strand to SEQ ID NO: 936260
uucuuuaagagcagggcca

SEQ ID NO: 936262 - RNA, 19 nt, Artificial Sequence
  Description of Artificial Sequence: Synthetic oligonucleotide
  Sense strand starting at position 3808 of SEQ ID NO: 913554
gcccuuaaaucuggccaaa

SEQ ID NO: 936263 - RNA, 19 nt, Artificial Sequence
  Description of Artificial Sequence: Synthetic oligonucleotide
  Antisense strand to SEQ ID NO: 936262
uuuggccagauuuaagggc

SEQ ID NO: 936264 - RNA, 19 nt, Artificial Sequence
  Description of Artificial Sequence: Synthetic oligonucleotide
  Sense strand starting at position 3347 of SEQ ID NO: 913554
guaggugucuucugugcau

SEQ ID NO: 936265 - RNA, 19 nt, Artificial Sequence
  Description of Artificial Sequence: Synthetic oligonucleotide
  Antisense strand to SEQ ID NO: 936264
augcacagaagacaccuac

SEQ ID NO: 936266 - RNA, 19 nt, Artificial Sequence
  Description of Artificial Sequence: Synthetic oligonucleotide
  Sense strand starting at position 1939 of SEQ ID NO: 913555
uuguguuaucucuugccuu

SEQ ID NO: 936267 - RNA, 19 nt, Artificial Sequence
  Description of Artificial Sequence: Synthetic oligonucleotide
  Antisense strand to SEQ ID NO: 936266
aaggcaagagauaacacaa

SEQ ID NO: 936268 - RNA, 19 nt, Artificial Sequence
  Description of Artificial Sequence: Synthetic oligonucleotide
  Sense strand starting at position 2469 of SEQ ID NO: 913555
agagauaggucaguacuag

SEQ ID NO: 936269 - RNA, 19 nt, Artificial Sequence
  Description of Artificial Sequence: Synthetic oligonucleotide
  Antisense strand to SEQ ID NO: 936268
cuaguacugaccuaucucu

SEQ ID NO: 936270 - RNA, 19 nt, Artificial Sequence
  Description of Artificial Sequence: Synthetic oligonucleotide
  Sense strand starting at position 3745 of SEQ ID NO: 913555
cgaugaaggcuugcucguu

SEQ ID NO: 936271 - RNA, 19 nt, Artificial Sequence
  Description of Artificial Sequence: Synthetic oligonucleotide
  Antisense strand to SEQ ID NO: 936270
aacgagcaagccuucaucg

SEQ ID NO: 936272 - RNA, 19 nt, Artificial Sequence
  Description of Artificial Sequence: Synthetic oligonucleotide
  Sense strand starting at position 1958 of SEQ ID NO: 913555
guggaaagauucuccugga

SEQ ID NO: 936273 - RNA, 19 nt, Artificial Sequence
  Description of Artificial Sequence: Synthetic oligonucleotide
  Antisense strand to SEQ ID NO: 936272
uccaggagaaucuuuccac

SEQ ID NO: 936274 - RNA, 19 nt, Artificial Sequence
  Description of Artificial Sequence: Synthetic oligonucleotide
  Sense strand starting at position 190 of SEQ ID NO: 913555
gcaacucuggaugggauaa

SEQ ID NO: 936275 - RNA, 19 nt, Artificial Sequence
  Description of Artificial Sequence: Synthetic oligonucleotide
  Antisense strand to SEQ ID NO: 936274
uuaucccauccagaguugc

SEQ ID NO: 936276 - RNA, 19 nt, Artificial Sequence
  Description of Artificial Sequence: Synthetic oligonucleotide
  Sense strand starting at position 1214 of SEQ ID NO: 913555
accuucucaguccauuaga

SEQ ID NO: 936277 - RNA, 19 nt, Artificial Sequence
  Description of Artificial Sequence: Synthetic oligonucleotide
  Antisense strand to SEQ ID NO: 936276
ucuaauggacugagaaggu

SEQ ID NO: 936278 - RNA, 19 nt, Artificial Sequence
  Description of Artificial Sequence: Synthetic oligonucleotide
  Sense strand starting at position 1101 of SEQ ID NO: 913555
gcuuucauggaggacagua

SEQ ID NO: 936279 - RNA, 19 nt, Artificial Sequence
  Description of Artificial Sequence: Synthetic oligonucleotide
  Antisense strand to SEQ ID NO: 936278
uacuguccuccaugaaagc

SEQ ID NO: 936280 - RNA, 19 nt, Artificial Sequence
  Description of Artificial Sequence: Synthetic oligonucleotide
  Sense strand starting at position 189 of SEQ ID NO: 913555
ggcaacucuggaugggaua

SEQ ID NO: 936281 - RNA, 19 nt, Artificial Sequence
  Description of Artificial Sequence: Synthetic oligonucleotide
  Antisense strand to SEQ ID NO: 936280
uaucccauccagaguugcc

SEQ ID NO: 936282 - RNA, 19 nt, Artificial Sequence
  Description of Artificial Sequence: Synthetic oligonucleotide
  Sense strand starting at position 260 of SEQ ID NO: 913555
ggcugaggacugcacagau

SEQ ID NO: 936283 - RNA, 19 nt, Artificial Sequence
  Description of Artificial Sequence: Synthetic oligonucleotide
  Antisense strand to SEQ ID NO: 936282
aucugugcaguccucagcc

SEQ ID NO: 936284 - RNA, 19 nt, Artificial Sequence
  Description of Artificial Sequence: Synthetic oligonucleotide
  Sense strand starting at position 1941 of SEQ ID NO: 913555
guguuaucucuugccuugu

SEQ ID NO: 936285 - RNA, 19 nt, Artificial Sequence
  Description of Artificial Sequence: Synthetic oligonucleotide
  Antisense strand to SEQ ID NO: 936284
acaaggcaagagauaacac

SEQ ID NO: 936286 - RNA, 19 nt, Artificial Sequence
  Description of Artificial Sequence: Synthetic oligonucleotide
  Sense strand starting at position 1230 of SEQ ID NO: 913555
agagaagucuaggcucaga

SEQ ID NO: 936287 - RNA, 19 nt, Artificial Sequence
  Description of Artificial Sequence: Synthetic oligonucleotide
  Antisense strand to SEQ ID NO: 936286
ucugagccuagacuucucu

SEQ ID NO: 936288 - RNA, 19 nt, Artificial Sequence
  Description of Artificial Sequence: Synthetic oligonucleotide
  Sense strand starting at position 1424 of SEQ ID NO: 913555
agaauuacagguuguugga

SEQ ID NO: 936289 - RNA, 19 nt, Artificial Sequence
  Description of Artificial Sequence: Synthetic oligonucleotide
  Antisense strand to SEQ ID NO: 936288
uccaacaaccuguaauucu

SEQ ID NO: 936290 - RNA, 19 nt, Artificial Sequence
  Description of Artificial Sequence: Synthetic oligonucleotide
  Sense strand starting at position 1421 of SEQ ID NO: 913555
ggaagaauuacagguuguu

SEQ ID NO: 936291 - RNA, 19 nt, Artificial Sequence
  Description of Artificial Sequence: Synthetic oligonucleotide
  Antisense strand to SEQ ID NO: 936290
aacaaccuguaauucuucc

SEQ ID NO: 936292 - RNA, 19 nt, Artificial Sequence
  Description of Artificial Sequence: Synthetic oligonucleotide
  Sense strand starting at position 994 of SEQ ID NO: 913555
cugaaaugucauuguagaa

SEQ ID NO: 936293 - RNA, 19 nt, Artificial Sequence
  Description of Artificial Sequence: Synthetic oligonucleotide
  Antisense strand to SEQ ID NO: 936292
uucuacaaugacauuucag

SEQ ID NO: 936294 - RNA, 19 nt, Artificial Sequence
  Description of Artificial Sequence: Synthetic oligonucleotide
  Sense strand starting at position 1949 of SEQ ID NO: 913555
ucuugccuuguggaaagau

SEQ ID NO: 936295 - RNA, 19 nt, Artificial Sequence
  Description of Artificial Sequence: Synthetic oligonucleotide
  Antisense strand to SEQ ID NO: 936294
aucuuuccacaaggcaaga

SEQ ID NO: 936296 - RNA, 19 nt, Artificial Sequence
  Description of Artificial Sequence: Synthetic oligonucleotide
  Sense strand starting at position 3876 of SEQ ID NO: 913555
auccaaguuguggaguuua

SEQ ID NO: 936297 - RNA, 19 nt, Artificial Sequence
  Description of Artificial Sequence: Synthetic oligonucleotide
  Antisense strand to SEQ ID NO: 936296
uaaacuccacaacuuggau

SEQ ID NO: 936298 - RNA, 19 nt, Artificial Sequence
  Description of Artificial Sequence: Synthetic oligonucleotide
  Sense strand starting at position 993 of SEQ ID NO: 913555
ccugaaaugucauuguaga

SEQ ID NO: 936299 - RNA, 19 nt, Artificial Sequence
  Description of Artificial Sequence: Synthetic oligonucleotide
  Antisense strand to SEQ ID NO: 936298
ucuacaaugacauuucagg

SEQ ID NO: 936300 - RNA, 19 nt, Artificial Sequence
  Description of Artificial Sequence: Synthetic oligonucleotide
  Sense strand starting at position 2164 of SEQ ID NO: 913555
ggagucaaggcuuggaacu

SEQ ID NO: 936301 - RNA, 19 nt, Artificial Sequence
  Description of Artificial Sequence: Synthetic oligonucleotide
  Antisense strand to SEQ ID NO: 936300
aguuccaagccuugacucc

SEQ ID NO: 936302 - RNA, 19 nt, Artificial Sequence
  Description of Artificial Sequence: Synthetic oligonucleotide
  Sense strand starting at position 1405 of SEQ ID NO: 913555
ccacuagucuacuuuggga

SEQ ID NO: 936303 - RNA, 19 nt, Artificial Sequence
  Description of Artificial Sequence: Synthetic oligonucleotide
  Antisense strand to SEQ ID NO: 936302
ucccaaaguagacuagugg

SEQ ID NO: 936304 - RNA, 19 nt, Artificial Sequence
  Description of Artificial Sequence: Synthetic oligonucleotide
  Sense strand starting at position 2238 of SEQ ID NO: 913555
aguagcagggacuguuaaa

SEQ ID NO: 936305 - RNA, 19 nt, Artificial Sequence
  Description of Artificial Sequence: Synthetic oligonucleotide
  Antisense strand to SEQ ID NO: 936304
uuuaacagucccugcuacu

SEQ ID NO: 936306 - RNA, 19 nt, Artificial Sequence
  Description of Artificial Sequence: Synthetic oligonucleotide
  Sense strand starting at position 2165 of SEQ ID NO: 913555
gagucaaggcuuggaacuu

SEQ ID NO: 936307 - RNA, 19 nt, Artificial Sequence
  Description of Artificial Sequence: Synthetic oligonucleotide
  Antisense strand to SEQ ID NO: 936306
aaguuccaagccuugacuc

SEQ ID NO: 936308 - RNA, 19 nt, Artificial Sequence
  Description of Artificial Sequence: Synthetic oligonucleotide
  Sense strand starting at position 1100 of SEQ ID NO: 913555
agcuuucauggaggacagu

SEQ ID NO: 936309 - RNA, 19 nt, Artificial Sequence
  Description of Artificial Sequence: Synthetic oligonucleotide
  Antisense strand to SEQ ID NO: 936308
acuguccuccaugaaagcu

SEQ ID NO: 936310 - RNA, 19 nt, Artificial Sequence
  Description of Artificial Sequence: Synthetic oligonucleotide
  Sense strand starting at position 3510 of SEQ ID NO: 913555
gugguccugaagugacaaa

SEQ ID NO: 936311 - RNA, 19 nt, Artificial Sequence
  Description of Artificial Sequence: Synthetic oligonucleotide
  Antisense strand to SEQ ID NO: 936310
uuugucacuucaggaccac

SEQ ID NO: 936312 - RNA, 19 nt, Artificial Sequence
  Description of Artificial Sequence: Synthetic oligonucleotide
  Sense strand starting at position 2245 of SEQ ID NO: 913555
gggacuguuaaaggucuuu

SEQ ID NO: 936313 - RNA, 19 nt, Artificial Sequence
  Description of Artificial Sequence: Synthetic oligonucleotide
  Antisense strand to SEQ ID NO: 936312
aaagaccuuuaacaguccc

SEQ ID NO: 936314 - RNA, 19 nt, Artificial Sequence
  Description of Artificial Sequence: Synthetic oligonucleotide
  Sense strand starting at position 103 of SEQ ID NO: 913555
auuagaaugcagcagcauu

SEQ ID NO: 936315 - RNA, 19 nt, Artificial Sequence
  Description of Artificial Sequence: Synthetic oligonucleotide
  Antisense strand to SEQ ID NO: 936314
aaugcugcugcauucuaau

SEQ ID NO: 936316 - RNA, 19 nt, Artificial Sequence
  Description of Artificial Sequence: Synthetic oligonucleotide
  Sense strand starting at position 1151 of SEQ ID NO: 913555
augaauccuggcuguauaa

SEQ ID NO: 936317 - RNA, 19 nt, Artificial Sequence
  Description of Artificial Sequence: Synthetic oligonucleotide
  Antisense strand to SEQ ID NO: 936316
uuauacagccaggauucau

SEQ ID NO: 936318 - RNA, 19 nt, Artificial Sequence
  Description of Artificial Sequence: Synthetic oligonucleotide
  Sense strand starting at position 1600 of SEQ ID NO: 913555
cgacaaucacuguagucuu

SEQ ID NO: 936319 - RNA, 19 nt, Artificial Sequence
  Description of Artificial Sequence: Synthetic oligonucleotide
  Antisense strand to SEQ ID NO: 936318
aagacuacagugauugucg

SEQ ID NO: 936320 - RNA, 19 nt, Artificial Sequence
  Description of Artificial Sequence: Synthetic oligonucleotide
  Sense strand starting at position 584 of SEQ ID NO: 913555
cuggcugauugguccaaga

SEQ ID NO: 936321 - RNA, 19 nt, Artificial Sequence
  Description of Artificial Sequence: Synthetic oligonucleotide
  Antisense strand to SEQ ID NO: 936320
ucuuggaccaaucagccag

SEQ ID NO: 936322 - RNA, 19 nt, Artificial Sequence
  Description of Artificial Sequence: Synthetic oligonucleotide
  Sense strand starting at position 3884 of SEQ ID NO: 913555
uguggaguuuaguccagaa

SEQ ID NO: 936323 - RNA, 19 nt, Artificial Sequence
  Description of Artificial Sequence: Synthetic oligonucleotide
  Antisense strand to SEQ ID NO: 936322
uucuggacuaaacuccaca

SEQ ID NO: 936324 - RNA, 19 nt, Artificial Sequence
  Description of Artificial Sequence: Synthetic oligonucleotide
  Sense strand starting at position 1150 of SEQ ID NO: 913555
caugaauccuggcuguaua

SEQ ID NO: 936325 - RNA, 19 nt, Artificial Sequence
  Description of Artificial Sequence: Synthetic oligonucleotide
  Antisense strand to SEQ ID NO: 936324
uauacagccaggauucaug

SEQ ID NO: 936326 - RNA, 19 nt, Artificial Sequence
  Description of Artificial Sequence: Synthetic oligonucleotide
  Sense strand starting at position 1669 of SEQ ID NO: 913555
agaaguuguuaugcauaug

SEQ ID NO: 936327 - RNA, 19 nt, Artificial Sequence
  Description of Artificial Sequence: Synthetic oligonucleotide
  Antisense strand to SEQ ID NO: 936326
cauaugcauaacaacuucu

SEQ ID NO: 936328 - RNA, 19 nt, Artificial Sequence
  Description of Artificial Sequence: Synthetic oligonucleotide
  Sense strand starting at position 2695 of SEQ ID NO: 913555
gcaucacauaucgguagga

SEQ ID NO: 936329 - RNA, 19 nt, Artificial Sequence
  Description of Artificial Sequence: Synthetic oligonucleotide
  Antisense strand to SEQ ID NO: 936328
uccuaccgauaugugaugc

SEQ ID NO: 936330 - RNA, 19 nt, Artificial Sequence
  Description of Artificial Sequence: Synthetic oligonucleotide
  Sense strand starting at position 973 of SEQ ID NO: 913555
gugggaggcucaucagcaa

SEQ ID NO: 936331 - RNA, 19 nt, Artificial Sequence
  Description of Artificial Sequence: Synthetic oligonucleotide
  Antisense strand to SEQ ID NO: 936330
uugcugaugagccucccac

SEQ ID NO: 936332 - RNA, 19 nt, Artificial Sequence
  Description of Artificial Sequence: Synthetic oligonucleotide
  Sense strand starting at position 1663 of SEQ ID NO: 913555
gcuugaagaaguuguuaug

SEQ ID NO: 936333 - RNA, 19 nt, Artificial Sequence
  Description of Artificial Sequence: Synthetic oligonucleotide
  Antisense strand to SEQ ID NO: 936332
cauaacaacuucuucaagc

SEQ ID NO: 936334 - RNA, 19 nt, Artificial Sequence
  Description of Artificial Sequence: Synthetic oligonucleotide
  Sense strand starting at position 2176 of SEQ ID NO: 913555
uggaacuuuccauguugca

SEQ ID NO: 936335 - RNA, 19 nt, Artificial Sequence
  Description of Artificial Sequence: Synthetic oligonucleotide
  Antisense strand to SEQ ID NO: 936334
ugcaacauggaaaguucca

SEQ ID NO: 936336 - RNA, 19 nt, Artificial Sequence
  Description of Artificial Sequence: Synthetic oligonucleotide
  Sense strand starting at position 1546 of SEQ ID NO: 913555
cagagaaguccuugcccuu

SEQ ID NO: 936337 - RNA, 19 nt, Artificial Sequence
  Description of Artificial Sequence: Synthetic oligonucleotide
  Antisense strand to SEQ ID NO: 936336
aagggcaaggacuucucug

SEQ ID NO: 936338 - RNA, 19 nt, Artificial Sequence
  Description of Artificial Sequence: Synthetic oligonucleotide
  Sense strand starting at position 1928 of SEQ ID NO: 913555
ucaccuugacuuuguguua

SEQ ID NO: 936339 - RNA, 19 nt, Artificial Sequence
  Description of Artificial Sequence: Synthetic oligonucleotide
  Antisense strand to SEQ ID NO: 936338
uaacacaaagucaagguga

SEQ ID NO: 936340 - RNA, 19 nt, Artificial Sequence
  Description of Artificial Sequence: Synthetic oligonucleotide
  Sense strand starting at position 1935 of SEQ ID NO: 913555
gacuuuguguuaucucuug

SEQ ID NO: 936341 - RNA, 19 nt, Artificial Sequence
  Description of Artificial Sequence: Synthetic oligonucleotide
  Antisense strand to SEQ ID NO: 936340
caagagauaacacaaaguc

SEQ ID NO: 936342 - RNA, 19 nt, Artificial Sequence
  Description of Artificial Sequence: Synthetic oligonucleotide
  Sense strand starting at position 1945 of SEQ ID NO: 913555
uaucucuugccuuguggaa

SEQ ID NO: 936343 - RNA, 19 nt, Artificial Sequence
  Description of Artificial Sequence: Synthetic oligonucleotide
  Antisense strand to SEQ ID NO: 936342
uuccacaaggcaagagaua

SEQ ID NO: 936344 - RNA, 19 nt, Artificial Sequence
  Description of Artificial Sequence: Synthetic oligonucleotide
  Sense strand starting at position 2371 of SEQ ID NO: 913555
cgauaagggcuguggguua

SEQ ID NO: 936345 - RNA, 19 nt, Artificial Sequence
  Description of Artificial Sequence: Synthetic oligonucleotide
  Antisense strand to SEQ ID NO: 936344
uaacccacagcccuuaucg

SEQ ID NO: 936346 - RNA, 19 nt, Artificial Sequence
  Description of Artificial Sequence: Synthetic oligonucleotide
  Sense strand starting at position 3622 of SEQ ID NO: 913556
ucaggaaauaucugcagag

SEQ ID NO: 936347 - RNA, 19 nt, Artificial Sequence
  Description of Artificial Sequence: Synthetic oligonucleotide
  Antisense strand to SEQ ID NO: 936346
cucugcagauauuuccuga

SEQ ID NO: 936348 - RNA, 19 nt, Artificial Sequence
  Description of Artificial Sequence: Synthetic oligonucleotide
  Sense strand starting at position 273 of SEQ ID NO: 913556
ccggaaacuccugaguuaa

SEQ ID NO: 936349 - RNA, 19 nt, Artificial Sequence
  Description of Artificial Sequence: Synthetic oligonucleotide
  Antisense strand to SEQ ID NO: 936348
uuaacucaggaguuuccgg

SEQ ID NO: 936350 - RNA, 19 nt, Artificial Sequence
  Description of Artificial Sequence: Synthetic oligonucleotide
  Sense strand starting at position 3777 of SEQ ID NO: 913556
acgauuugguggcuguaaa

SEQ ID NO: 936351 - RNA, 19 nt, Artificial Sequence
  Description of Artificial Sequence: Synthetic oligonucleotide
  Antisense strand to SEQ ID NO: 936350
uuuacagccaccaaaucgu

SEQ ID NO: 936352 - RNA, 19 nt, Artificial Sequence
  Description of Artificial Sequence: Synthetic oligonucleotide
  Sense strand starting at position 3775 of SEQ ID NO: 913556
aaacgauuugguggcugua

SEQ ID NO: 936353 - RNA, 19 nt, Artificial Sequence
  Description of Artificial Sequence: Synthetic oligonucleotide
  Antisense strand to SEQ ID NO: 936352
uacagccaccaaaucguuu

SEQ ID NO: 936354 - RNA, 19 nt, Artificial Sequence
  Description of Artificial Sequence: Synthetic oligonucleotide
  Sense strand starting at position 2506 of SEQ ID NO: 913556
guccaagagagaugcauaa

SEQ ID NO: 936355 - RNA, 19 nt, Artificial Sequence
  Description of Artificial Sequence: Synthetic oligonucleotide
  Antisense strand to SEQ ID NO: 936354
uuaugcaucucucuuggac

SEQ ID NO: 936356 - RNA, 19 nt, Artificial Sequence
  Description of Artificial Sequence: Synthetic oligonucleotide
  Sense strand starting at position 127 of SEQ ID NO: 913556
ucagaaucgaacugagagu

SEQ ID NO: 936357 - RNA, 19 nt, Artificial Sequence
  Description of Artificial Sequence: Synthetic oligonucleotide
  Antisense strand to SEQ ID NO: 936356
acucucaguucgauucuga

SEQ ID NO: 936358 - RNA, 19 nt, Artificial Sequence
  Description of Artificial Sequence: Synthetic oligonucleotide
  Sense strand starting at position 3778 of SEQ ID NO: 913556
cgauuugguggcuguaaac

SEQ ID NO: 936359 - RNA, 19 nt, Artificial Sequence
  Description of Artificial Sequence: Synthetic oligonucleotide
  Antisense strand to SEQ ID NO: 936358
guuuacagccaccaaaucg

SEQ ID NO: 936360 - RNA, 19 nt, Artificial Sequence
  Description of Artificial Sequence: Synthetic oligonucleotide
  Sense strand starting at position 2665 of SEQ ID NO: 913556
gaagucuuagaagguccua

SEQ ID NO: 936361 - RNA, 19 nt, Artificial Sequence
  Description of Artificial Sequence: Synthetic oligonucleotide
  Antisense strand to SEQ ID NO: 936360
uaggaccuucuaagacuuc

SEQ ID NO: 936362 - RNA, 19 nt, Artificial Sequence
  Description of Artificial Sequence: Synthetic oligonucleotide
  Sense strand starting at position 3280 of SEQ ID NO: 913556
ggaagucuucuguacuuug

SEQ ID NO: 936363 - RNA, 19 nt, Artificial Sequence
  Description of Artificial Sequence: Synthetic oligonucleotide
  Antisense strand to SEQ ID NO: 936362
caaaguacagaagacuucc

SEQ ID NO: 936364 - RNA, 19 nt, Artificial Sequence
  Description of Artificial Sequence: Synthetic oligonucleotide
  Sense strand starting at position 3559 of SEQ ID NO: 913556
aacucugcuccugagaguu

SEQ ID NO: 936365 - RNA, 19 nt, Artificial Sequence
  Description of Artificial Sequence: Synthetic oligonucleotide
  Antisense strand to SEQ ID NO: 936364
aacucucaggagcagaguu

SEQ ID NO: 936366 - RNA, 19 nt, Artificial Sequence
  Description of Artificial Sequence: Synthetic oligonucleotide
  Sense strand starting at position 2051 of SEQ ID NO: 913556
cguuaccuuggucagacaa

SEQ ID NO: 936367 - RNA, 19 nt, Artificial Sequence
  Description of Artificial Sequence: Synthetic oligonucleotide
  Antisense strand to SEQ ID NO: 936366
uugucugaccaagguaacg

SEQ ID NO: 936368 - RNA, 19 nt, Artificial Sequence
  Description of Artificial Sequence: Synthetic oligonucleotide
  Sense strand starting at position 1299 of SEQ ID NO: 913556
cggaauuccgcucauaaau

SEQ ID NO: 936369 - RNA, 19 nt, Artificial Sequence
  Description of Artificial Sequence: Synthetic oligonucleotide
  Antisense strand to SEQ ID NO: 936368
auuuaugagcggaauuccg

SEQ ID NO: 936370 - RNA, 19 nt, Artificial Sequence
  Description of Artificial Sequence: Synthetic oligonucleotide
  Sense strand starting at position 3499 of SEQ ID NO: 913556
gaacacugucucuggcaga

SEQ ID NO: 936371 - RNA, 19 nt, Artificial Sequence
  Description of Artificial Sequence: Synthetic oligonucleotide
  Antisense strand to SEQ ID NO: 936370
ucugccagagacaguguuc

SEQ ID NO: 936372 - RNA, 19 nt, Artificial Sequence
  Description of Artificial Sequence: Synthetic oligonucleotide
  Sense strand starting at position 3037 of SEQ ID NO: 913556
cugucuaagccucagggua

SEQ ID NO: 936373 - RNA, 19 nt, Artificial Sequence
  Description of Artificial Sequence: Synthetic oligonucleotide
  Antisense strand to SEQ ID NO: 936372
uacccugaggcuuagacag

SEQ ID NO: 936374 - RNA, 19 nt, Artificial Sequence
  Description of Artificial Sequence: Synthetic oligonucleotide
  Sense strand starting at position 2545 of SEQ ID NO: 913556
cgaaggaucgcgcagaaga

SEQ ID NO: 936375 - RNA, 19 nt, Artificial Sequence
  Description of Artificial Sequence: Synthetic oligonucleotide
  Antisense strand to SEQ ID NO: 936374
ucuucugcgcgauccuucg

SEQ ID NO: 936376 - RNA, 19 nt, Artificial Sequence
  Description of Artificial Sequence: Synthetic oligonucleotide
  Sense strand starting at position 55 of SEQ ID NO: 913556
ugcuuuagugccuaagaau

SEQ ID NO: 936377 - RNA, 19 nt, Artificial Sequence
  Description of Artificial Sequence: Synthetic oligonucleotide
  Antisense strand to SEQ ID NO: 936376
auucuuaggcacuaaagca

SEQ ID NO: 936378 - RNA, 19 nt, Artificial Sequence
  Description of Artificial Sequence: Synthetic oligonucleotide
  Sense strand starting at position 2533 of SEQ ID NO: 913556
uccagacgucuccgaagga

SEQ ID NO: 936379 - RNA, 19 nt, Artificial Sequence
  Description of Artificial Sequence: Synthetic oligonucleotide
  Antisense strand to SEQ ID NO: 936378
uccuucggagacgucugga

SEQ ID NO: 936380 - RNA, 19 nt, Artificial Sequence
  Description of Artificial Sequence: Synthetic oligonucleotide
  Sense strand starting at position 2050 of SEQ ID NO: 913556
acguuaccuuggucagaca

SEQ ID NO: 936381 - RNA, 19 nt, Artificial Sequence
  Description of Artificial Sequence: Synthetic oligonucleotide
  Antisense strand to SEQ ID NO: 936380
ugucugaccaagguaacgu

SEQ ID NO: 936382 - RNA, 19 nt, Artificial Sequence
  Description of Artificial Sequence: Synthetic oligonucleotide
  Sense strand starting at position 2423 of SEQ ID NO: 913556
cucucuuccacgugaugag

SEQ ID NO: 936383 - RNA, 19 nt, Artificial Sequence
  Description of Artificial Sequence: Synthetic oligonucleotide
  Antisense strand to SEQ ID NO: 936382
cucaucacguggaagagag

SEQ ID NO: 936384 - RNA, 19 nt, Artificial Sequence
  Description of Artificial Sequence: Synthetic oligonucleotide
  Sense strand starting at position 443 of SEQ ID NO: 913556
gggauuccauagcuguagu

SEQ ID NO: 936385 - RNA, 19 nt, Artificial Sequence
  Description of Artificial Sequence: Synthetic oligonucleotide
  Antisense strand to SEQ ID NO: 936384
acuacagcuauggaauccc

SEQ ID NO: 936386 - RNA, 19 nt, Artificial Sequence
  Description of Artificial Sequence: Synthetic oligonucleotide
  Sense strand starting at position 2048 of SEQ ID NO: 913556
ccacguuaccuuggucaga

SEQ ID NO: 936387 - RNA, 19 nt, Artificial Sequence
  Description of Artificial Sequence: Synthetic oligonucleotide
  Antisense strand to SEQ ID NO: 936386
ucugaccaagguaacgugg

SEQ ID NO: 936388 - RNA, 19 nt, Artificial Sequence
  Description of Artificial Sequence: Synthetic oligonucleotide
  Sense strand starting at position 1100 of SEQ ID NO: 913556
cccgcauaaucaccugagu

SEQ ID NO: 936389 - RNA, 19 nt, Artificial Sequence
  Description of Artificial Sequence: Synthetic oligonucleotide
  Antisense strand to SEQ ID NO: 936388
acucaggugauuaugcggg

SEQ ID NO: 936390 - RNA, 19 nt, Artificial Sequence
  Description of Artificial Sequence: Synthetic oligonucleotide
  Sense strand starting at position 311 of SEQ ID NO: 913556
ucgcaagguucuuuauuaa

SEQ ID NO: 936391 - RNA, 19 nt, Artificial Sequence
  Description of Artificial Sequence: Synthetic oligonucleotide
  Antisense strand to SEQ ID NO: 936390
uuaauaaagaaccuugcga

SEQ ID NO: 936392 - RNA, 19 nt, Artificial Sequence
  Description of Artificial Sequence: Synthetic oligonucleotide
  Sense strand starting at position 310 of SEQ ID NO: 913556
aucgcaagguucuuuauua

SEQ ID NO: 936393 - RNA, 19 nt, Artificial Sequence
  Description of Artificial Sequence: Synthetic oligonucleotide
  Antisense strand to SEQ ID NO: 936392
uaauaaagaaccuugcgau

SEQ ID NO: 936394 - RNA, 19 nt, Artificial Sequence
  Description of Artificial Sequence: Synthetic oligonucleotide
  Sense strand starting at position 54 of SEQ ID NO: 913556
uugcuuuagugccuaagaa

SEQ ID NO: 936395 - RNA, 19 nt, Artificial Sequence
  Description of Artificial Sequence: Synthetic oligonucleotide
  Antisense strand to SEQ ID NO: 936394
uucuuaggcacuaaagcaa

SEQ ID NO: 936396 - RNA, 19 nt, Artificial Sequence
  Description of Artificial Sequence: Synthetic oligonucleotide
  Sense strand starting at position 1287 of SEQ ID NO: 913556
gcauccaucagccggaauu

SEQ ID NO: 936397 - RNA, 19 nt, Artificial Sequence
  Description of Artificial Sequence: Synthetic oligonucleotide
  Antisense strand to SEQ ID NO: 936396
aauuccggcugauggaugc

SEQ ID NO: 936398 - RNA, 19 nt, Artificial Sequence
  Description of Artificial Sequence: Synthetic oligonucleotide
  Sense strand starting at position 118 of SEQ ID NO: 913556
aaggauuacucagaaucga

SEQ ID NO: 936399 - RNA, 19 nt, Artificial Sequence
  Description of Artificial Sequence: Synthetic oligonucleotide
  Antisense strand to SEQ ID NO: 936398
ucgauucugaguaauccuu

SEQ ID NO: 936400 - RNA, 19 nt, Artificial Sequence
  Description of Artificial Sequence: Synthetic oligonucleotide
  Sense strand starting at position 430 of SEQ ID NO: 913556
ucagccuuccuucgggauu

SEQ ID NO: 936401 - RNA, 19 nt, Artificial Sequence
  Description of Artificial Sequence: Synthetic oligonucleotide
  Antisense strand to SEQ ID NO: 936400
aaucccgaaggaaggcuga

SEQ ID NO: 936402 - RNA, 19 nt, Artificial Sequence
  Description of Artificial Sequence: Synthetic oligonucleotide
  Sense strand starting at position 3845 of SEQ ID NO: 913556
ggagguaauucucagaaau

SEQ ID NO: 936403 - RNA, 19 nt, Artificial Sequence
  Description of Artificial Sequence: Synthetic oligonucleotide
  Antisense strand to SEQ ID NO: 936402
auuucugagaauuaccucc

SEQ ID NO: 936404 - RNA, 19 nt, Artificial Sequence
  Description of Artificial Sequence: Synthetic oligonucleotide
  Sense strand starting at position 3759 of SEQ ID NO: 913556
gguuucagucuccggcaaa

SEQ ID NO: 936405 - RNA, 19 nt, Artificial Sequence
  Description of Artificial Sequence: Synthetic oligonucleotide
  Antisense strand to SEQ ID NO: 936404
uuugccggagacugaaacc

SEQ ID NO: 936406 - RNA, 19 nt, Artificial Sequence
  Description of Artificial Sequence: Synthetic oligonucleotide
  Sense strand starting at position 3758 of SEQ ID NO: 913556
ggguuucagucuccggcaa

SEQ ID NO: 936407 - RNA, 19 nt, Artificial Sequence
  Description of Artificial Sequence: Synthetic oligonucleotide
  Antisense strand to SEQ ID NO: 936406
uugccggagacugaaaccc

SEQ ID NO: 936408 - RNA, 19 nt, Artificial Sequence
  Description of Artificial Sequence: Synthetic oligonucleotide
  Sense strand starting at position 2421 of SEQ ID NO: 913556
ggcucucuuccacgugaug

SEQ ID NO: 936409 - RNA, 19 nt, Artificial Sequence
  Description of Artificial Sequence: Synthetic oligonucleotide
  Antisense strand to SEQ ID NO: 936408
caucacguggaagagagcc

SEQ ID NO: 936410 - RNA, 19 nt, Artificial Sequence
  Description of Artificial Sequence: Synthetic oligonucleotide
  Sense strand starting at position 3847 of SEQ ID NO: 913556
agguaauucucagaaaucc

SEQ ID NO: 936411 - RNA, 19 nt, Artificial Sequence
  Description of Artificial Sequence: Synthetic oligonucleotide
  Antisense strand to SEQ ID NO: 936410
ggauuucugagaauuaccu

SEQ ID NO: 936412 - RNA, 19 nt, Artificial Sequence
  Description of Artificial Sequence: Synthetic oligonucleotide
  Sense strand starting at position 2662 of SEQ ID NO: 913556
caugaagucuuagaagguc

SEQ ID NO: 936413 - RNA, 19 nt, Artificial Sequence
  Description of Artificial Sequence: Synthetic oligonucleotide
  Antisense strand to SEQ ID NO: 936412
gaccuucuaagacuucaug

SEQ ID NO: 936414 - RNA, 19 nt, Artificial Sequence
  Description of Artificial Sequence: Synthetic oligonucleotide
  Sense strand starting at position 2053 of SEQ ID NO: 913556
uuaccuuggucagacaauu

SEQ ID NO: 936415 - RNA, 19 nt, Artificial Sequence
  Description of Artificial Sequence: Synthetic oligonucleotide
  Antisense strand to SEQ ID NO: 936414
aauugucugaccaagguaa

SEQ ID NO: 936416 - RNA, 19 nt, Artificial Sequence
  Description of Artificial Sequence: Synthetic oligonucleotide
  Sense strand starting at position 58 of SEQ ID NO: 913556
uuuagugccuaagaauaga

SEQ ID NO: 936417 - RNA, 19 nt, Artificial Sequence
  Description of Artificial Sequence: Synthetic oligonucleotide
  Antisense strand to SEQ ID NO: 936416
ucuauucuuaggcacuaaa

SEQ ID NO: 936418 - RNA, 19 nt, Artificial Sequence
  Description of Artificial Sequence: Synthetic oligonucleotide
  Sense strand starting at position 3575 of SEQ ID NO: 913556
guuuaaaugcguugcccuu

SEQ ID NO: 936419 - RNA, 19 nt, Artificial Sequence
  Description of Artificial Sequence: Synthetic oligonucleotide
  Antisense strand to SEQ ID NO: 936418
aagggcaacgcauuuaaac

SEQ ID NO: 936420 - RNA, 19 nt, Artificial Sequence
  Description of Artificial Sequence: Synthetic oligonucleotide
  Sense strand starting at position 2534 of SEQ ID NO: 913556
ccagacgucuccgaaggau

SEQ ID NO: 936421 - RNA, 19 nt, Artificial Sequence
  Description of Artificial Sequence: Synthetic oligonucleotide
  Antisense strand to SEQ ID NO: 936420
auccuucggagacgucugg

SEQ ID NO: 936422 - RNA, 19 nt, Artificial Sequence
  Description of Artificial Sequence: Synthetic oligonucleotide
  Sense strand starting at position 272 of SEQ ID NO: 913556
accggaaacuccugaguua

SEQ ID NO: 936423 - RNA, 19 nt, Artificial Sequence
  Description of Artificial Sequence: Synthetic oligonucleotide
  Antisense strand to SEQ ID NO: 936422
uaacucaggaguuuccggu

SEQ ID NO: 936424 - RNA, 19 nt, Artificial Sequence
  Description of Artificial Sequence: Synthetic oligonucleotide
  Sense strand starting at position 3500 of SEQ ID NO: 913556
aacacugucucuggcagaa

SEQ ID NO: 936425 - RNA, 19 nt, Artificial Sequence
  Description of Artificial Sequence: Synthetic oligonucleotide
  Antisense strand to SEQ ID NO: 936424
uucugccagagacaguguu

SEQ ID NO: 936426 - RNA, 19 nt, Artificial Sequence
  Description of Artificial Sequence: Synthetic oligonucleotide
  Sense strand starting at position 3207 of SEQ ID NO: 913557
ucaggaaauaucugcagag

SEQ ID NO: 936427 - RNA, 19 nt, Artificial Sequence
  Description of Artificial Sequence: Synthetic oligonucleotide
  Antisense strand to SEQ ID NO: 936426
cucugcagauauuuccuga

SEQ ID NO: 936428 - RNA, 19 nt, Artificial Sequence
  Description of Artificial Sequence: Synthetic oligonucleotide
  Sense strand starting at position 3362 of SEQ ID NO: 913557
acgauuugguggcuguaaa

SEQ ID NO: 936429 - RNA, 19 nt, Artificial Sequence
  Description of Artificial Sequence: Synthetic oligonucleotide
  Antisense strand to SEQ ID NO: 936428
uuuacagccaccaaaucgu

SEQ ID NO: 936430 - RNA, 19 nt, Artificial Sequence
  Description of Artificial Sequence: Synthetic oligonucleotide
  Sense strand starting at position 3738 of SEQ ID NO: 913557
gugagagugaacgaucauu

SEQ ID NO: 936431 - RNA, 19 nt, Artificial Sequence
  Description of Artificial Sequence: Synthetic oligonucleotide
  Antisense strand to SEQ ID NO: 936430
aaugaucguucacucucac

SEQ ID NO: 936432 - RNA, 19 nt, Artificial Sequence
  Description of Artificial Sequence: Synthetic oligonucleotide
  Sense strand starting at position 3360 of SEQ ID NO: 913557
aaacgauuugguggcugua

SEQ ID NO: 936433 - RNA, 19 nt, Artificial Sequence
  Description of Artificial Sequence: Synthetic oligonucleotide
  Antisense strand to SEQ ID NO: 936432
uacagccaccaaaucguuu

SEQ ID NO: 936434 - RNA, 19 nt, Artificial Sequence
  Description of Artificial Sequence: Synthetic oligonucleotide
  Sense strand starting at position 2091 of SEQ ID NO: 913557
guccaagagagaugcauaa

SEQ ID NO: 936435 - RNA, 19 nt, Artificial Sequence
  Description of Artificial Sequence: Synthetic oligonucleotide
  Antisense strand to SEQ ID NO: 936434
uuaugcaucucucuuggac

SEQ ID NO: 936436 - RNA, 19 nt, Artificial Sequence
  Description of Artificial Sequence: Synthetic oligonucleotide
  Sense strand starting at position 3655 of SEQ ID NO: 913557
uggaaauugccgcagggaa

SEQ ID NO: 936437 - RNA, 19 nt, Artificial Sequence
  Description of Artificial Sequence: Synthetic oligonucleotide
  Antisense strand to SEQ ID NO: 936436
uucccugcggcaauuucca

SEQ ID NO: 936438 - RNA, 19 nt, Artificial Sequence
  Description of Artificial Sequence: Synthetic oligonucleotide
  Sense strand starting at position 3363 of SEQ ID NO: 913557
cgauuugguggcuguaaac

SEQ ID NO: 936439 - RNA, 19 nt, Artificial Sequence
  Description of Artificial Sequence: Synthetic oligonucleotide
  Antisense strand to SEQ ID NO: 936438
guuuacagccaccaaaucg

SEQ ID NO: 936440 - RNA, 19 nt, Artificial Sequence
  Description of Artificial Sequence: Synthetic oligonucleotide
  Sense strand starting at position 2250 of SEQ ID NO: 913557
gaagucuuagaagguccua

SEQ ID NO: 936441 - RNA, 19 nt, Artificial Sequence
  Description of Artificial Sequence: Synthetic oligonucleotide
  Antisense strand to SEQ ID NO: 936440
uaggaccuucuaagacuuc

SEQ ID NO: 936442 - RNA, 19 nt, Artificial Sequence
  Description of Artificial Sequence: Synthetic oligonucleotide
  Sense strand starting at position 2865 of SEQ ID NO: 913557
ggaagucuucuguacuuug

SEQ ID NO: 936443 - RNA, 19 nt, Artificial Sequence
  Description of Artificial Sequence: Synthetic oligonucleotide
  Antisense strand to SEQ ID NO: 936442
caaaguacagaagacuucc

SEQ ID NO: 936444 - RNA, 19 nt, Artificial Sequence
  Description of Artificial Sequence: Synthetic oligonucleotide
  Sense strand starting at position 3144 of SEQ ID NO: 913557
aacucugcuccugagaguu

SEQ ID NO: 936445 - RNA, 19 nt, Artificial Sequence
  Description of Artificial Sequence: Synthetic oligonucleotide
  Antisense strand to SEQ ID NO: 936444
aacucucaggagcagaguu

SEQ ID NO: 936446 - RNA, 19 nt, Artificial Sequence
  Description of Artificial Sequence: Synthetic oligonucleotide
  Sense strand starting at position 1636 of SEQ ID NO: 913557
cguuaccuuggucagacaa

SEQ ID NO: 936447 - RNA, 19 nt, Artificial Sequence
  Description of Artificial Sequence: Synthetic oligonucleotide
  Antisense strand to SEQ ID NO: 936446
uugucugaccaagguaacg

SEQ ID NO: 936448 - RNA, 19 nt, Artificial Sequence
  Description of Artificial Sequence: Synthetic oligonucleotide
  Sense strand starting at position 884 of SEQ ID NO: 913557
cggaauuccgcucauaaau

SEQ ID NO: 936449 - RNA, 19 nt, Artificial Sequence
  Description of Artificial Sequence: Synthetic oligonucleotide
  Antisense strand to SEQ ID NO: 936448
auuuaugagcggaauuccg

SEQ ID NO: 936450 - RNA, 19 nt, Artificial Sequence
  Description of Artificial Sequence: Synthetic oligonucleotide
  Sense strand starting at position 3084 of SEQ ID NO: 913557
gaacacugucucuggcaga

SEQ ID NO: 936451 - RNA, 19 nt, Artificial Sequence
  Description of Artificial Sequence: Synthetic oligonucleotide
  Antisense strand to SEQ ID NO: 936450
ucugccagagacaguguuc

SEQ ID NO: 936452 - RNA, 19 nt, Artificial Sequence
  Description of Artificial Sequence: Synthetic oligonucleotide
  Sense strand starting at position 2622 of SEQ ID NO: 913557
cugucuaagccucagggua

SEQ ID NO: 936453 - RNA, 19 nt, Artificial Sequence
  Description of Artificial Sequence: Synthetic oligonucleotide
  Antisense strand to SEQ ID NO: 936452
uacccugaggcuuagacag

SEQ ID NO: 936454 - RNA, 19 nt, Artificial Sequence
  Description of Artificial Sequence: Synthetic oligonucleotide
  Sense strand starting at position 2130 of SEQ ID NO: 913557
cgaaggaucgcgcagaaga

SEQ ID NO: 936455 - RNA, 19 nt, Artificial Sequence
  Description of Artificial Sequence: Synthetic oligonucleotide
  Antisense strand to SEQ ID NO: 936454
ucuucugcgcgauccuucg

SEQ ID NO: 936456 - RNA, 19 nt, Artificial Sequence
  Description of Artificial Sequence: Synthetic oligonucleotide
  Sense strand starting at position 3831 of SEQ ID NO: 913557
uaggaaucucgccaagcuu

SEQ ID NO: 936457 - RNA, 19 nt, Artificial Sequence
  Description of Artificial Sequence: Synthetic oligonucleotide
  Antisense strand to SEQ ID NO: 936456
aagcuuggcgagauuccua

SEQ ID NO: 936458 - RNA, 19 nt, Artificial Sequence
  Description of Artificial Sequence: Synthetic oligonucleotide
  Sense strand starting at position 3897 of SEQ ID NO: 913557
acucguuuccaagauguuu

SEQ ID NO: 936459 - RNA, 19 nt, Artificial Sequence
  Description of Artificial Sequence: Synthetic oligonucleotide
  Antisense strand to SEQ ID NO: 936458
aaacaucuuggaaacgagu

SEQ ID NO: 936460 - RNA, 19 nt, Artificial Sequence
  Description of Artificial Sequence: Synthetic oligonucleotide
  Sense strand starting at position 3574 of SEQ ID NO: 913557
gugacauccgagugaacuc

SEQ ID NO: 936461 - RNA, 19 nt, Artificial Sequence
  Description of Artificial Sequence: Synthetic oligonucleotide
  Antisense strand to SEQ ID NO: 936460
gaguucacucggaugucac

SEQ ID NO: 936462 - RNA, 19 nt, Artificial Sequence
  Description of Artificial Sequence: Synthetic oligonucleotide
  Sense strand starting at position 2118 of SEQ ID NO: 913557
uccagacgucuccgaagga

SEQ ID NO: 936463 - RNA, 19 nt, Artificial Sequence
  Description of Artificial Sequence: Synthetic oligonucleotide
  Antisense strand to SEQ ID NO: 936462
uccuucggagacgucugga

SEQ ID NO: 936464 - RNA, 19 nt, Artificial Sequence
  Description of Artificial Sequence: Synthetic oligonucleotide
  Sense strand starting at position 1635 of SEQ ID NO: 913557
acguuaccuuggucagaca

SEQ ID NO: 936465 - RNA, 19 nt, Artificial Sequence
  Description of Artificial Sequence: Synthetic oligonucleotide
  Antisense strand to SEQ ID NO: 936464
ugucugaccaagguaacgu

SEQ ID NO: 936466 - RNA, 19 nt, Artificial Sequence
  Description of Artificial Sequence: Synthetic oligonucleotide
  Sense strand starting at position 2008 of SEQ ID NO: 913557
cucucuuccacgugaugag

SEQ ID NO: 936467 - RNA, 19 nt, Artificial Sequence
  Description of Artificial Sequence: Synthetic oligonucleotide
  Antisense strand to SEQ ID NO: 936466
cucaucacguggaagagag

SEQ ID NO: 936468 - RNA, 19 nt, Artificial Sequence
  Description of Artificial Sequence: Synthetic oligonucleotide
  Sense strand starting at position 28 of SEQ ID NO: 913557
gggauuccauagcuguagu

SEQ ID NO: 936469 - RNA, 19 nt, Artificial Sequence
  Description of Artificial Sequence: Synthetic oligonucleotide
  Antisense strand to SEQ ID NO: 936468
acuacagcuauggaauccc

SEQ ID NO: 936470 - RNA, 19 nt, Artificial Sequence
  Description of Artificial Sequence: Synthetic oligonucleotide
  Sense strand starting at position 3570 of SEQ ID NO: 913557
gaccgugacauccgaguga

SEQ ID NO: 936471 - RNA, 19 nt, Artificial Sequence
  Description of Artificial Sequence: Synthetic oligonucleotide
  Antisense strand to SEQ ID NO: 936470
ucacucggaugucacgguc

SEQ ID NO: 936472 - RNA, 19 nt, Artificial Sequence
  Description of Artificial Sequence: Synthetic oligonucleotide
  Sense strand starting at position 1633 of SEQ ID NO: 913557
ccacguuaccuuggucaga

SEQ ID NO: 936473 - RNA, 19 nt, Artificial Sequence
  Description of Artificial Sequence: Synthetic oligonucleotide
  Antisense strand to SEQ ID NO: 936472
ucugaccaagguaacgugg

SEQ ID NO: 936474 - RNA, 19 nt, Artificial Sequence
  Description of Artificial Sequence: Synthetic oligonucleotide
  Sense strand starting at position 685 of SEQ ID NO: 913557
cccgcauaaucaccugagu

SEQ ID NO: 936475 - RNA, 19 nt, Artificial Sequence
  Description of Artificial Sequence: Synthetic oligonucleotide
  Antisense strand to SEQ ID NO: 936474
acucaggugauuaugcggg

SEQ ID NO: 936476 - RNA, 19 nt, Artificial Sequence
  Description of Artificial Sequence: Synthetic oligonucleotide
  Sense strand starting at position 3830 of SEQ ID NO: 913557
cuaggaaucucgccaagcu

SEQ ID NO: 936477 - RNA, 19 nt, Artificial Sequence
  Description of Artificial Sequence: Synthetic oligonucleotide
  Antisense strand to SEQ ID NO: 936476
agcuuggcgagauuccuag

SEQ ID NO: 936478 - RNA, 19 nt, Artificial Sequence
  Description of Artificial Sequence: Synthetic oligonucleotide
  Sense strand starting at position 872 of SEQ ID NO: 913557
gcauccaucagccggaauu

SEQ ID NO: 936479 - RNA, 19 nt, Artificial Sequence
  Description of Artificial Sequence: Synthetic oligonucleotide
  Antisense strand to SEQ ID NO: 936478
aauuccggcugauggaugc

SEQ ID NO: 936480 - RNA, 19 nt, Artificial Sequence
  Description of Artificial Sequence: Synthetic oligonucleotide
  Sense strand starting at position 15 of SEQ ID NO: 913557
ucagccuuccuucgggauu

SEQ ID NO: 936481 - RNA, 19 nt, Artificial Sequence
  Description of Artificial Sequence: Synthetic oligonucleotide
  Antisense strand to SEQ ID NO: 936480
aaucccgaaggaaggcuga

SEQ ID NO: 936482 - RNA, 19 nt, Artificial Sequence
  Description of Artificial Sequence: Synthetic oligonucleotide
  Sense strand starting at position 3430 of SEQ ID NO: 913557
ggagguaauucucagaaau

SEQ ID NO: 936483 - RNA, 19 nt, Artificial Sequence
  Description of Artificial Sequence: Synthetic oligonucleotide
  Antisense strand to SEQ ID NO: 936482
auuucugagaauuaccucc

SEQ ID NO: 936484 - RNA, 19 nt, Artificial Sequence
  Description of Artificial Sequence: Synthetic oligonucleotide
  Sense strand starting at position 3730 of SEQ ID NO: 913557
gauuaaaugugagagugaa

SEQ ID NO: 936485 - RNA, 19 nt, Artificial Sequence
  Description of Artificial Sequence: Synthetic oligonucleotide
  Antisense strand to SEQ ID NO: 936484
uucacucucacauuuaauc

SEQ ID NO: 936486 - RNA, 19 nt, Artificial Sequence
  Description of Artificial Sequence: Synthetic oligonucleotide
  Sense strand starting at position 3344 of SEQ ID NO: 913557
gguuucagucuccggcaaa

SEQ ID NO: 936487 - RNA, 19 nt, Artificial Sequence
  Description of Artificial Sequence: Synthetic oligonucleotide
  Antisense strand to SEQ ID NO: 936486
uuugccggagacugaaacc

SEQ ID NO: 936488 - RNA, 19 nt, Artificial Sequence
  Description of Artificial Sequence: Synthetic oligonucleotide
  Sense strand starting at position 3343 of SEQ ID NO: 913557
ggguuucagucuccggcaa

SEQ ID NO: 936489 - RNA, 19 nt, Artificial Sequence
  Description of Artificial Sequence: Synthetic oligonucleotide
  Antisense strand to SEQ ID NO: 936488
uugccggagacugaaaccc

SEQ ID NO: 936490 - RNA, 19 nt, Artificial Sequence
  Description of Artificial Sequence: Synthetic oligonucleotide
  Sense strand starting at position 2006 of SEQ ID NO: 913557
ggcucucuuccacgugaug

SEQ ID NO: 936491 - RNA, 19 nt, Artificial Sequence
  Description of Artificial Sequence: Synthetic oligonucleotide
  Antisense strand to SEQ ID NO: 936490
caucacguggaagagagcc

SEQ ID NO: 936492 - RNA, 19 nt, Artificial Sequence
  Description of Artificial Sequence: Synthetic oligonucleotide
  Sense strand starting at position 3432 of SEQ ID NO: 913557
agguaauucucagaaaucc

SEQ ID NO: 936493 - RNA, 19 nt, Artificial Sequence
  Description of Artificial Sequence: Synthetic oligonucleotide
  Antisense strand to SEQ ID NO: 936492
ggauuucugagaauuaccu

SEQ ID NO: 936494 - RNA, 19 nt, Artificial Sequence
  Description of Artificial Sequence: Synthetic oligonucleotide
  Sense strand starting at position 2247 of SEQ ID NO: 913557
caugaagucuuagaagguc

SEQ ID NO: 936495 - RNA, 19 nt, Artificial Sequence
  Description of Artificial Sequence: Synthetic oligonucleotide
  Antisense strand to SEQ ID NO: 936494
gaccuucuaagacuucaug

SEQ ID NO: 936496 - RNA, 19 nt, Artificial Sequence
  Description of Artificial Sequence: Synthetic oligonucleotide
  Sense strand starting at position 1638 of SEQ ID NO: 913557
uuaccuuggucagacaauu

SEQ ID NO: 936497 - RNA, 19 nt, Artificial Sequence
  Description of Artificial Sequence: Synthetic oligonucleotide
  Antisense strand to SEQ ID NO: 936496
aauugucugaccaagguaa

SEQ ID NO: 936498 - RNA, 19 nt, Artificial Sequence
  Description of Artificial Sequence: Synthetic oligonucleotide
  Sense strand starting at position 3160 of SEQ ID NO: 913557
guuuaaaugcguugcccuu

SEQ ID NO: 936499 - RNA, 19 nt, Artificial Sequence
  Description of Artificial Sequence: Synthetic oligonucleotide
  Antisense strand to SEQ ID NO: 936498
aagggcaacgcauuuaaac

SEQ ID NO: 936500 - RNA, 19 nt, Artificial Sequence
  Description of Artificial Sequence: Synthetic oligonucleotide
  Sense strand starting at position 2119 of SEQ ID NO: 913557
ccagacgucuccgaaggau

SEQ ID NO: 936501 - RNA, 19 nt, Artificial Sequence
  Description of Artificial Sequence: Synthetic oligonucleotide
  Antisense strand to SEQ ID NO: 936500
auccuucggagacgucugg

SEQ ID NO: 936502 - RNA, 19 nt, Artificial Sequence
  Description of Artificial Sequence: Synthetic oligonucleotide
  Sense strand starting at position 3085 of SEQ ID NO: 913557
aacacugucucuggcagaa

SEQ ID NO: 936503 - RNA, 19 nt, Artificial Sequence
  Description of Artificial Sequence: Synthetic oligonucleotide
  Antisense strand to SEQ ID NO: 936502
uucugccagagacaguguu

SEQ ID NO: 936504 - RNA, 19 nt, Artificial Sequence
  Description of Artificial Sequence: Synthetic oligonucleotide
  Sense strand starting at position 3146 of SEQ ID NO: 913557
cucugcuccugagaguuua

SEQ ID NO: 936505 - RNA, 19 nt, Artificial Sequence
  Description of Artificial Sequence: Synthetic oligonucleotide
  Antisense strand to SEQ ID NO: 936504
uaaacucucaggagcagag

SEQ ID NO: 936506 - RNA, 19 nt, Artificial Sequence
  Description of Artificial Sequence: Synthetic oligonucleotide
  Sense strand starting at position 1753 of SEQ ID NO: 913558
ggaagaagggaccguauua

SEQ ID NO: 936507 - RNA, 19 nt, Artificial Sequence
  Description of Artificial Sequence: Synthetic oligonucleotide
  Antisense strand to SEQ ID NO: 936506
uaauacggucccuucuucc

SEQ ID NO: 936508 - RNA, 19 nt, Artificial Sequence
  Description of Artificial Sequence: Synthetic oligonucleotide
  Sense strand starting at position 745 of SEQ ID NO: 913558
ugccaucuccucuaagaag

SEQ ID NO: 936509 - RNA, 19 nt, Artificial Sequence
  Description of Artificial Sequence: Synthetic oligonucleotide
  Antisense strand to SEQ ID NO: 936508
cuucuuagaggagauggca

SEQ ID NO: 936510 - RNA, 19 nt, Artificial Sequence
  Description of Artificial Sequence: Synthetic oligonucleotide
  Sense strand starting at position 1426 of SEQ ID NO: 913558
guuccuauuggugagauga

SEQ ID NO: 936511 - RNA, 19 nt, Artificial Sequence
  Description of Artificial Sequence: Synthetic oligonucleotide
  Antisense strand to SEQ ID NO: 936510
ucaucucaccaauaggaac

SEQ ID NO: 936512 - RNA, 19 nt, Artificial Sequence
  Description of Artificial Sequence: Synthetic oligonucleotide
  Sense strand starting at position 2544 of SEQ ID NO: 913558
cgugucuuugcauauuuaa

SEQ ID NO: 936513 - RNA, 19 nt, Artificial Sequence
  Description of Artificial Sequence: Synthetic oligonucleotide
  Antisense strand to SEQ ID NO: 936512
uuaaauaugcaaagacacg

SEQ ID NO: 936514 - RNA, 19 nt, Artificial Sequence
  Description of Artificial Sequence: Synthetic oligonucleotide
  Sense strand starting at position 988 of SEQ ID NO: 913558
cgcggauccgacguaucua

SEQ ID NO: 936515 - RNA, 19 nt, Artificial Sequence
  Description of Artificial Sequence: Synthetic oligonucleotide
  Antisense strand to SEQ ID NO: 936514
uagauacgucggauccgcg

SEQ ID NO: 936516 - RNA, 19 nt, Artificial Sequence
  Description of Artificial Sequence: Synthetic oligonucleotide
  Sense strand starting at position 1398 of SEQ ID NO: 913558
ucuacucuacgggaaugua

SEQ ID NO: 936517 - RNA, 19 nt, Artificial Sequence
  Description of Artificial Sequence: Synthetic oligonucleotide
  Antisense strand to SEQ ID NO: 936516
uacauucccguagaguaga

SEQ ID NO: 936518 - RNA, 19 nt, Artificial Sequence
  Description of Artificial Sequence: Synthetic oligonucleotide
  Sense strand starting at position 2538 of SEQ ID NO: 913558
acgugacgugucuuugcau

SEQ ID NO: 936519 - RNA, 19 nt, Artificial Sequence
  Description of Artificial Sequence: Synthetic oligonucleotide
  Antisense strand to SEQ ID NO: 936518
augcaaagacacgucacgu

SEQ ID NO: 936520 - RNA, 19 nt, Artificial Sequence
  Description of Artificial Sequence: Synthetic oligonucleotide
  Sense strand starting at position 3225 of SEQ ID NO: 913558
gggcuuugugcgucccauu

SEQ ID NO: 936521 - RNA, 19 nt, Artificial Sequence
  Description of Artificial Sequence: Synthetic oligonucleotide
  Antisense strand to SEQ ID NO: 936520
aaugggacgcacaaagccc

SEQ ID NO: 936522 - RNA, 19 nt, Artificial Sequence
  Description of Artificial Sequence: Synthetic oligonucleotide
  Sense strand starting at position 1703 of SEQ ID NO: 913558
cuacaaaucccaugggcau

SEQ ID NO: 936523 - RNA, 19 nt, Artificial Sequence
  Description of Artificial Sequence: Synthetic oligonucleotide
  Antisense strand to SEQ ID NO: 936522
augcccaugggauuuguag

SEQ ID NO: 936524 - RNA, 19 nt, Artificial Sequence
  Description of Artificial Sequence: Synthetic oligonucleotide
  Sense strand starting at position 2878 of SEQ ID NO: 913558
ggugaaagaacugggcuuu

SEQ ID NO: 936525 - RNA, 19 nt, Artificial Sequence
  Description of Artificial Sequence: Synthetic oligonucleotide
  Antisense strand to SEQ ID NO: 936524
aaagcccaguucuuucacc

SEQ ID NO: 936526 - RNA, 19 nt, Artificial Sequence
  Description of Artificial Sequence: Synthetic oligonucleotide
  Sense strand starting at position 3740 of SEQ ID NO: 913558
aucaguaagcucugaauag

SEQ ID NO: 936527 - RNA, 19 nt, Artificial Sequence
  Description of Artificial Sequence: Synthetic oligonucleotide
  Antisense strand to SEQ ID NO: 936526
cuauucagagcuuacugau

SEQ ID NO: 936528 - RNA, 19 nt, Artificial Sequence
  Description of Artificial Sequence: Synthetic oligonucleotide
  Sense strand starting at position 1354 of SEQ ID NO: 913558
cuggcuggcgcguuuacaa

SEQ ID NO: 936529 - RNA, 19 nt, Artificial Sequence
  Description of Artificial Sequence: Synthetic oligonucleotide
  Antisense strand to SEQ ID NO: 936528
uuguaaacgcgccagccag

SEQ ID NO: 936530 - RNA, 19 nt, Artificial Sequence
  Description of Artificial Sequence: Synthetic oligonucleotide
  Sense strand starting at position 3023 of SEQ ID NO: 913558
gaucuaccacgucagguau

SEQ ID NO: 936531 - RNA, 19 nt, Artificial Sequence
  Description of Artificial Sequence: Synthetic oligonucleotide
  Antisense strand to SEQ ID NO: 936530
auaccugacgugguagauc

SEQ ID NO: 936532 - RNA, 19 nt, Artificial Sequence
  Description of Artificial Sequence: Synthetic oligonucleotide
  Sense strand starting at position 2479 of SEQ ID NO: 913558
gcuggacacguuuauauag

SEQ ID NO: 936533 - RNA, 19 nt, Artificial Sequence
  Description of Artificial Sequence: Synthetic oligonucleotide
  Antisense strand to SEQ ID NO: 936532
cuauauaaacguguccagc

SEQ ID NO: 936534 - RNA, 19 nt, Artificial Sequence
  Description of Artificial Sequence: Synthetic oligonucleotide
  Sense strand starting at position 1388 of SEQ ID NO: 913558
gggccugguaucuacucua

SEQ ID NO: 936535 - RNA, 19 nt, Artificial Sequence
  Description of Artificial Sequence: Synthetic oligonucleotide
  Antisense strand to SEQ ID NO: 936534
uagaguagauaccaggccc

SEQ ID NO: 936536 - RNA, 19 nt, Artificial Sequence
  Description of Artificial Sequence: Synthetic oligonucleotide
  Sense strand starting at position 3381 of SEQ ID NO: 913558
aaggcaguaucucucugaa

SEQ ID NO: 936537 - RNA, 19 nt, Artificial Sequence
  Description of Artificial Sequence: Synthetic oligonucleotide
  Antisense strand to SEQ ID NO: 936536
uucagagagauacugccuu

SEQ ID NO: 936538 - RNA, 19 nt, Artificial Sequence
  Description of Artificial Sequence: Synthetic oligonucleotide
  Sense strand starting at position 1395 of SEQ ID NO: 913558
guaucuacucuacgggaau

SEQ ID NO: 936539 - RNA, 19 nt, Artificial Sequence
  Description of Artificial Sequence: Synthetic oligonucleotide
  Antisense strand to SEQ ID NO: 936538
auucccguagaguagauac

SEQ ID NO: 936540 - RNA, 19 nt, Artificial Sequence
  Description of Artificial Sequence: Synthetic oligonucleotide
  Sense strand starting at position 2145 of SEQ ID NO: 913558
aggccagaacucuguucua

SEQ ID NO: 936541 - RNA, 19 nt, Artificial Sequence
  Description of Artificial Sequence: Synthetic oligonucleotide
  Antisense strand to SEQ ID NO: 936540
uagaacagaguucuggccu

SEQ ID NO: 936542 - RNA, 19 nt, Artificial Sequence
  Description of Artificial Sequence: Synthetic oligonucleotide
  Sense strand starting at position 1424 of SEQ ID NO: 913558
cuguuccuauuggugagau

SEQ ID NO: 936543 - RNA, 19 nt, Artificial Sequence
  Description of Artificial Sequence: Synthetic oligonucleotide
  Antisense strand to SEQ ID NO: 936542
aucucaccaauaggaacag

SEQ ID NO: 936544 - RNA, 19 nt, Artificial Sequence
  Description of Artificial Sequence: Synthetic oligonucleotide
  Sense strand starting at position 3405 of SEQ ID NO: 913558
ggacgucucagccaaagca

SEQ ID NO: 936545 - RNA, 19 nt, Artificial Sequence
  Description of Artificial Sequence: Synthetic oligonucleotide
  Antisense strand to SEQ ID NO: 936544
ugcuuuggcugagacgucc

SEQ ID NO: 936546 - RNA, 19 nt, Artificial Sequence
  Description of Artificial Sequence: Synthetic oligonucleotide
  Sense strand starting at position 906 of SEQ ID NO: 913558
gcuaguuaccagggaccuu

SEQ ID NO: 936547 - RNA, 19 nt, Artificial Sequence
  Description of Artificial Sequence: Synthetic oligonucleotide
  Antisense strand to SEQ ID NO: 936546
aaggucccugguaacuagc

SEQ ID NO: 936548 - RNA, 19 nt, Artificial Sequence
  Description of Artificial Sequence: Synthetic oligonucleotide
  Sense strand starting at position 1423 of SEQ ID NO: 913558
ccuguuccuauuggugaga

SEQ ID NO: 936549 - RNA, 19 nt, Artificial Sequence
  Description of Artificial Sequence: Synthetic oligonucleotide
  Antisense strand to SEQ ID NO: 936548
ucucaccaauaggaacagg

SEQ ID NO: 936550 - RNA, 19 nt, Artificial Sequence
  Description of Artificial Sequence: Synthetic oligonucleotide
  Sense strand starting at position 3383 of SEQ ID NO: 913558
ggcaguaucucucugaauc

SEQ ID NO: 936551 - RNA, 19 nt, Artificial Sequence
  Description of Artificial Sequence: Synthetic oligonucleotide
  Antisense strand to SEQ ID NO: 936550
gauucagagagauacugcc

SEQ ID NO: 936552 - RNA, 19 nt, Artificial Sequence
  Description of Artificial Sequence: Synthetic oligonucleotide
  Sense strand starting at position 1446 of SEQ ID NO: 913558
gaaacagacucagagugaa

SEQ ID NO: 936553 - RNA, 19 nt, Artificial Sequence
  Description of Artificial Sequence: Synthetic oligonucleotide
  Antisense strand to SEQ ID NO: 936552
uucacucugagucuguuuc

SEQ ID NO: 936554 - RNA, 19 nt, Artificial Sequence
  Description of Artificial Sequence: Synthetic oligonucleotide
  Sense strand starting at position 3384 of SEQ ID NO: 913558
gcaguaucucucugaaucc

SEQ ID NO: 936555 - RNA, 19 nt, Artificial Sequence
  Description of Artificial Sequence: Synthetic oligonucleotide
  Antisense strand to SEQ ID NO: 936554
ggauucagagagauacugc

SEQ ID NO: 936556 - RNA, 19 nt, Artificial Sequence
  Description of Artificial Sequence: Synthetic oligonucleotide
  Sense strand starting at position 743 of SEQ ID NO: 913558
gcugccaucuccucuaaga

SEQ ID NO: 936557 - RNA, 19 nt, Artificial Sequence
  Description of Artificial Sequence: Synthetic oligonucleotide
  Antisense strand to SEQ ID NO: 936556
ucuuagaggagauggcagc

SEQ ID NO: 936558 - RNA, 19 nt, Artificial Sequence
  Description of Artificial Sequence: Synthetic oligonucleotide
  Sense strand starting at position 3191 of SEQ ID NO: 913558
cgacgacucuugucaaucu

SEQ ID NO: 936559 - RNA, 19 nt, Artificial Sequence
  Description of Artificial Sequence: Synthetic oligonucleotide
  Antisense strand to SEQ ID NO: 936558
agauugacaagagucgucg

SEQ ID NO: 936560 - RNA, 19 nt, Artificial Sequence
  Description of Artificial Sequence: Synthetic oligonucleotide
  Sense strand starting at position 3689 of SEQ ID NO: 913558
uccaguaacuaggaaauaa

SEQ ID NO: 936561 - RNA, 19 nt, Artificial Sequence
  Description of Artificial Sequence: Synthetic oligonucleotide
  Antisense strand to SEQ ID NO: 936560
uuauuuccuaguuacugga

SEQ ID NO: 936562 - RNA, 19 nt, Artificial Sequence
  Description of Artificial Sequence: Synthetic oligonucleotide
  Sense strand starting at position 3314 of SEQ ID NO: 913558
ggugcaggguguuuauauu

SEQ ID NO: 936563 - RNA, 19 nt, Artificial Sequence
  Description of Artificial Sequence: Synthetic oligonucleotide
  Antisense strand to SEQ ID NO: 936562
aauauaaacacccugcacc

SEQ ID NO: 936564 - RNA, 19 nt, Artificial Sequence
  Description of Artificial Sequence: Synthetic oligonucleotide
  Sense strand starting at position 2899 of SEQ ID NO: 913558
ucuccuuugcuccgacuau

SEQ ID NO: 936565 - RNA, 19 nt, Artificial Sequence
  Description of Artificial Sequence: Synthetic oligonucleotide
  Antisense strand to SEQ ID NO: 936564
auagucggagcaaaggaga

SEQ ID NO: 936566 - RNA, 19 nt, Artificial Sequence
  Description of Artificial Sequence: Synthetic oligonucleotide
  Sense strand starting at position 3180 of SEQ ID NO: 913558
ccgaguuugcccgacgacu

SEQ ID NO: 936567 - RNA, 19 nt, Artificial Sequence
  Description of Artificial Sequence: Synthetic oligonucleotide
  Antisense strand to SEQ ID NO: 936566
agucgucgggcaaacucgg

SEQ ID NO: 936568 - RNA, 19 nt, Artificial Sequence
  Description of Artificial Sequence: Synthetic oligonucleotide
  Sense strand starting at position 695 of SEQ ID NO: 913558
ccaguucugcucugaugca

SEQ ID NO: 936569 - RNA, 19 nt, Artificial Sequence
  Description of Artificial Sequence: Synthetic oligonucleotide
  Antisense strand to SEQ ID NO: 936568
ugcaucagagcagaacugg

SEQ ID NO: 936570 - RNA, 19 nt, Artificial Sequence
  Description of Artificial Sequence: Synthetic oligonucleotide
  Sense strand starting at position 2126 of SEQ ID NO: 913558
gcccgagauuuauaagcuc

SEQ ID NO: 936571 - RNA, 19 nt, Artificial Sequence
  Description of Artificial Sequence: Synthetic oligonucleotide
  Antisense strand to SEQ ID NO: 936570
gagcuuauaaaucucgggc

SEQ ID NO: 936572 - RNA, 19 nt, Artificial Sequence
  Description of Artificial Sequence: Synthetic oligonucleotide
  Sense strand starting at position 2541 of SEQ ID NO: 913558
ugacgugucuuugcauauu

SEQ ID NO: 936573 - RNA, 19 nt, Artificial Sequence
  Description of Artificial Sequence: Synthetic oligonucleotide
  Antisense strand to SEQ ID NO: 936572
aauaugcaaagacacguca

SEQ ID NO: 936574 - RNA, 19 nt, Artificial Sequence
  Description of Artificial Sequence: Synthetic oligonucleotide
  Sense strand starting at position 3741 of SEQ ID NO: 913558
ucaguaagcucugaauaga

SEQ ID NO: 936575 - RNA, 19 nt, Artificial Sequence
  Description of Artificial Sequence: Synthetic oligonucleotide
  Antisense strand to SEQ ID NO: 936574
ucuauucagagcuuacuga

SEQ ID NO: 936576 - RNA, 19 nt, Artificial Sequence
  Description of Artificial Sequence: Synthetic oligonucleotide
  Sense strand starting at position 2481 of SEQ ID NO: 913558
uggacacguuuauauagau

SEQ ID NO: 936577 - RNA, 19 nt, Artificial Sequence
  Description of Artificial Sequence: Synthetic oligonucleotide
  Antisense strand to SEQ ID NO: 936576
aucuauauaaacgugucca

SEQ ID NO: 936578 - RNA, 19 nt, Artificial Sequence
  Description of Artificial Sequence: Synthetic oligonucleotide
  Sense strand starting at position 584 of SEQ ID NO: 913558
gccucaucugcuuggcgau

SEQ ID NO: 936579 - RNA, 19 nt, Artificial Sequence
  Description of Artificial Sequence: Synthetic oligonucleotide
  Antisense strand to SEQ ID NO: 936578
aucgccaagcagaugaggc

SEQ ID NO: 936580 - RNA, 19 nt, Artificial Sequence
  Description of Artificial Sequence: Synthetic oligonucleotide
  Sense strand starting at position 3192 of SEQ ID NO: 913558
gacgacucuugucaaucua

SEQ ID NO: 936581 - RNA, 19 nt, Artificial Sequence
  Description of Artificial Sequence: Synthetic oligonucleotide
  Antisense strand to SEQ ID NO: 936580
uagauugacaagagucguc

SEQ ID NO: 936582 - RNA, 19 nt, Artificial Sequence
  Description of Artificial Sequence: Synthetic oligonucleotide
  Sense strand starting at position 2539 of SEQ ID NO: 913558
cgugacgugucuuugcaua

SEQ ID NO: 936583 - RNA, 19 nt, Artificial Sequence
  Description of Artificial Sequence: Synthetic oligonucleotide
  Antisense strand to SEQ ID NO: 936582
uaugcaaagacacgucacg

SEQ ID NO: 936584 - RNA, 19 nt, Artificial Sequence
  Description of Artificial Sequence: Synthetic oligonucleotide
  Sense strand starting at position 1572 of SEQ ID NO: 913558
cugcguugugucugggagu

SEQ ID NO: 936585 - RNA, 19 nt, Artificial Sequence
  Description of Artificial Sequence: Synthetic oligonucleotide
  Antisense strand to SEQ ID NO: 936584
acucccagacacaacgcag

SEQ ID NO: 936586 - RNA, 19 nt, Artificial Sequence
  Description of Artificial Sequence: Synthetic oligonucleotide
  Sense strand starting at position 2374 of SEQ ID NO: 913559
auccuauugagaggaguua

SEQ ID NO: 936587 - RNA, 19 nt, Artificial Sequence
  Description of Artificial Sequence: Synthetic oligonucleotide
  Antisense strand to SEQ ID NO: 936586
uaacuccucucaauaggau

SEQ ID NO: 936588 - RNA, 19 nt, Artificial Sequence
  Description of Artificial Sequence: Synthetic oligonucleotide
  Sense strand starting at position 3095 of SEQ ID NO: 913559
gacggcugagaauauuauu

SEQ ID NO: 936589 - RNA, 19 nt, Artificial Sequence
  Description of Artificial Sequence: Synthetic oligonucleotide
  Antisense strand to SEQ ID NO: 936588
aauaauauucucagccguc

SEQ ID NO: 936590 - RNA, 19 nt, Artificial Sequence
  Description of Artificial Sequence: Synthetic oligonucleotide
  Sense strand starting at position 3816 of SEQ ID NO: 913559
cuaguacaguuauuuguuu

SEQ ID NO: 936591 - RNA, 19 nt, Artificial Sequence
  Description of Artificial Sequence: Synthetic oligonucleotide
  Antisense strand to SEQ ID NO: 936590
aaacaaauaacuguacuag

SEQ ID NO: 936592 - RNA, 19 nt, Artificial Sequence
  Description of Artificial Sequence: Synthetic oligonucleotide
  Sense strand starting at position 3334 of SEQ ID NO: 913559
aaauaacaggguuguacau

SEQ ID NO: 936593 - RNA, 19 nt, Artificial Sequence
  Description of Artificial Sequence: Synthetic oligonucleotide
  Antisense strand to SEQ ID NO: 936592
auguacaacccuguuauuu

SEQ ID NO: 936594 - RNA, 19 nt, Artificial Sequence
  Description of Artificial Sequence: Synthetic oligonucleotide
  Sense strand starting at position 3856 of SEQ ID NO: 913559
gguauacaacauugguaga

SEQ ID NO: 936595 - RNA, 19 nt, Artificial Sequence
  Description of Artificial Sequence: Synthetic oligonucleotide
  Antisense strand to SEQ ID NO: 936594
ucuaccaauguuguauacc

SEQ ID NO: 936596 - RNA, 19 nt, Artificial Sequence
  Description of Artificial Sequence: Synthetic oligonucleotide
  Sense strand starting at position 675 of SEQ ID NO: 913559
gugaaccuuggguauguaa

SEQ ID NO: 936597 - RNA, 19 nt, Artificial Sequence
  Description of Artificial Sequence: Synthetic oligonucleotide
  Antisense strand to SEQ ID NO: 936596
uuacauacccaagguucac

SEQ ID NO: 936598 - RNA, 19 nt, Artificial Sequence
  Description of Artificial Sequence: Synthetic oligonucleotide
  Sense strand starting at position 801 of SEQ ID NO: 913559
gaagucaguauguggaaga

SEQ ID NO: 936599 - RNA, 19 nt, Artificial Sequence
  Description of Artificial Sequence: Synthetic oligonucleotide
  Antisense strand to SEQ ID NO: 936598
ucuuccacauacugacuuc

SEQ ID NO: 936600 - RNA, 19 nt, Artificial Sequence
  Description of Artificial Sequence: Synthetic oligonucleotide
  Sense strand starting at position 912 of SEQ ID NO: 913559
guaugugacauauauguac

SEQ ID NO: 936601 - RNA, 19 nt, Artificial Sequence
  Description of Artificial Sequence: Synthetic oligonucleotide
  Antisense strand to SEQ ID NO: 936600
guacauauaugucacauac

SEQ ID NO: 936602 - RNA, 19 nt, Artificial Sequence
  Description of Artificial Sequence: Synthetic oligonucleotide
  Sense strand starting at position 677 of SEQ ID NO: 913559
gaaccuuggguauguaaau

SEQ ID NO: 936603 - RNA, 19 nt, Artificial Sequence
  Description of Artificial Sequence: Synthetic oligonucleotide
  Antisense strand to SEQ ID NO: 936602
auuuacauacccaagguuc

SEQ ID NO: 936604 - RNA, 19 nt, Artificial Sequence
  Description of Artificial Sequence: Synthetic oligonucleotide
  Sense strand starting at position 671 of SEQ ID NO: 913559
uaaagugaaccuuggguau

SEQ ID NO: 936605 - RNA, 19 nt, Artificial Sequence
  Description of Artificial Sequence: Synthetic oligonucleotide
  Antisense strand to SEQ ID NO: 936604
auacccaagguucacuuua

SEQ ID NO: 936606 - RNA, 19 nt, Artificial Sequence
  Description of Artificial Sequence: Synthetic oligonucleotide
  Sense strand starting at position 684 of SEQ ID NO: 913559
ggguauguaaauuagcauu

SEQ ID NO: 936607 - RNA, 19 nt, Artificial Sequence
  Description of Artificial Sequence: Synthetic oligonucleotide
  Antisense strand to SEQ ID NO: 936606
aaugcuaauuuacauaccc

SEQ ID NO: 936608 - RNA, 19 nt, Artificial Sequence
  Description of Artificial Sequence: Synthetic oligonucleotide
  Sense strand starting at position 717 of SEQ ID NO: 913559
caguauggauguuccuaaa

SEQ ID NO: 936609 - RNA, 19 nt, Artificial Sequence
  Description of Artificial Sequence: Synthetic oligonucleotide
  Antisense strand to SEQ ID NO: 936608
uuuaggaacauccauacug

SEQ ID NO: 936610 - RNA, 19 nt, Artificial Sequence
  Description of Artificial Sequence: Synthetic oligonucleotide
  Sense strand starting at position 678 of SEQ ID NO: 913559
aaccuuggguauguaaauu

SEQ ID NO: 936611 - RNA, 19 nt, Artificial Sequence
  Description of Artificial Sequence: Synthetic oligonucleotide
  Antisense strand to SEQ ID NO: 936610
aauuuacauacccaagguu

SEQ ID NO: 936612 - RNA, 19 nt, Artificial Sequence
  Description of Artificial Sequence: Synthetic oligonucleotide
  Sense strand starting at position 3024 of SEQ ID NO: 913559
ggcuaaaccgguuaucaau

SEQ ID NO: 936613 - RNA, 19 nt, Artificial Sequence
  Description of Artificial Sequence: Synthetic oligonucleotide
  Antisense strand to SEQ ID NO: 936612
auugauaaccgguuuagcc

SEQ ID NO: 936614 - RNA, 19 nt, Artificial Sequence
  Description of Artificial Sequence: Synthetic oligonucleotide
  Sense strand starting at position 3885 of SEQ ID NO: 913559
guggaaucauuacuauggu

SEQ ID NO: 936615 - RNA, 19 nt, Artificial Sequence
  Description of Artificial Sequence: Synthetic oligonucleotide
  Antisense strand to SEQ ID NO: 936614
accauaguaaugauuccac

SEQ ID NO: 936616 - RNA, 19 nt, Artificial Sequence
  Description of Artificial Sequence: Synthetic oligonucleotide
  Sense strand starting at position 3343 of SEQ ID NO: 913559
gguuguacauucucaagag

SEQ ID NO: 936617 - RNA, 19 nt, Artificial Sequence
  Description of Artificial Sequence: Synthetic oligonucleotide
  Antisense strand to SEQ ID NO: 936616
cucuugagaauguacaacc

SEQ ID NO: 936618 - RNA, 19 nt, Artificial Sequence
  Description of Artificial Sequence: Synthetic oligonucleotide
  Sense strand starting at position 3026 of SEQ ID NO: 913559
cuaaaccgguuaucaauua

SEQ ID NO: 936619 - RNA, 19 nt, Artificial Sequence
  Description of Artificial Sequence: Synthetic oligonucleotide
  Antisense strand to SEQ ID NO: 936618
uaauugauaaccgguuuag

SEQ ID NO: 936620 - RNA, 19 nt, Artificial Sequence
  Description of Artificial Sequence: Synthetic oligonucleotide
  Sense strand starting at position 3230 of SEQ ID NO: 913559
gguauauucucacuuacac

SEQ ID NO: 936621 - RNA, 19 nt, Artificial Sequence
  Description of Artificial Sequence: Synthetic oligonucleotide
  Antisense strand to SEQ ID NO: 936620
guguaagugagaauauacc

SEQ ID NO: 936622 - RNA, 19 nt, Artificial Sequence
  Description of Artificial Sequence: Synthetic oligonucleotide
  Sense strand starting at position 910 of SEQ ID NO: 913559
uuguaugugacauauaugu

SEQ ID NO: 936623 - RNA, 19 nt, Artificial Sequence
  Description of Artificial Sequence: Synthetic oligonucleotide
  Antisense strand to SEQ ID NO: 936622
acauauaugucacauacaa

SEQ ID NO: 936624 - RNA, 19 nt, Artificial Sequence
  Description of Artificial Sequence: Synthetic oligonucleotide
  Sense strand starting at position 814 of SEQ ID NO: 913559
ggaagacaugucuguacuu

SEQ ID NO: 936625 - RNA, 19 nt, Artificial Sequence
  Description of Artificial Sequence: Synthetic oligonucleotide
  Antisense strand to SEQ ID NO: 936624
aaguacagacaugucuucc

SEQ ID NO: 936626 - RNA, 19 nt, Artificial Sequence
  Description of Artificial Sequence: Synthetic oligonucleotide
  Sense strand starting at position 2331 of SEQ ID NO: 913559
gggcaaucuguguauuaua

SEQ ID NO: 936627 - RNA, 19 nt, Artificial Sequence
  Description of Artificial Sequence: Synthetic oligonucleotide
  Antisense strand to SEQ ID NO: 936626
uauaauacacagauugccc

SEQ ID NO: 936628 - RNA, 19 nt, Artificial Sequence
  Description of Artificial Sequence: Synthetic oligonucleotide
  Sense strand starting at position 3386 of SEQ ID NO: 913559
cccucucugucacugaaga

SEQ ID NO: 936629 - RNA, 19 nt, Artificial Sequence
  Description of Artificial Sequence: Synthetic oligonucleotide
  Antisense strand to SEQ ID NO: 936628
ucuucagugacagagaggg

SEQ ID NO: 936630 - RNA, 19 nt, Artificial Sequence
  Description of Artificial Sequence: Synthetic oligonucleotide
  Sense strand starting at position 1153 of SEQ ID NO: 913559
gggauacguuggucaacag

SEQ ID NO: 936631 - RNA, 19 nt, Artificial Sequence
  Description of Artificial Sequence: Synthetic oligonucleotide
  Antisense strand to SEQ ID NO: 936630
cuguugaccaacguauccc

SEQ ID NO: 936632 - RNA, 19 nt, Artificial Sequence
  Description of Artificial Sequence: Synthetic oligonucleotide
  Sense strand starting at position 815 of SEQ ID NO: 913559
gaagacaugucuguacuuc

SEQ ID NO: 936633 - RNA, 19 nt, Artificial Sequence
  Description of Artificial Sequence: Synthetic oligonucleotide
  Antisense strand to SEQ ID NO: 936632
gaaguacagacaugucuuc

SEQ ID NO: 936634 - RNA, 19 nt, Artificial Sequence
  Description of Artificial Sequence: Synthetic oligonucleotide
  Sense strand starting at position 3405 of SEQ ID NO: 913559
gcugaaaccuacucaguau

SEQ ID NO: 936635 - RNA, 19 nt, Artificial Sequence
  Description of Artificial Sequence: Synthetic oligonucleotide
  Antisense strand to SEQ ID NO: 936634
auacugaguagguuucagc

SEQ ID NO: 936636 - RNA, 19 nt, Artificial Sequence
  Description of Artificial Sequence: Synthetic oligonucleotide
  Sense strand starting at position 3787 of SEQ ID NO: 913559
uaaagaugucauuguggua

SEQ ID NO: 936637 - RNA, 19 nt, Artificial Sequence
  Description of Artificial Sequence: Synthetic oligonucleotide
  Antisense strand to SEQ ID NO: 936636
uaccacaaugacaucuuua

SEQ ID NO: 936638 - RNA, 19 nt, Artificial Sequence
  Description of Artificial Sequence: Synthetic oligonucleotide
  Sense strand starting at position 674 of SEQ ID NO: 913559
agugaaccuuggguaugua

SEQ ID NO: 936639 - RNA, 19 nt, Artificial Sequence
  Description of Artificial Sequence: Synthetic oligonucleotide
  Antisense strand to SEQ ID NO: 936638
uacauacccaagguucacu

SEQ ID NO: 936640 - RNA, 19 nt, Artificial Sequence
  Description of Artificial Sequence: Synthetic oligonucleotide
  Sense strand starting at position 2342 of SEQ ID NO: 913559
guauuauauuccuuguaca

SEQ ID NO: 936641 - RNA, 19 nt, Artificial Sequence
  Description of Artificial Sequence: Synthetic oligonucleotide
  Antisense strand to SEQ ID NO: 936640
uguacaaggaauauaauac

SEQ ID NO: 936642 - RNA, 19 nt, Artificial Sequence
  Description of Artificial Sequence: Synthetic oligonucleotide
  Sense strand starting at position 2329 of SEQ ID NO: 913559
gagggcaaucuguguauua

SEQ ID NO: 936643 - RNA, 19 nt, Artificial Sequence
  Description of Artificial Sequence: Synthetic oligonucleotide
  Antisense strand to SEQ ID NO: 936642
uaauacacagauugcccuc

SEQ ID NO: 936644 - RNA, 19 nt, Artificial Sequence
  Description of Artificial Sequence: Synthetic oligonucleotide
  Sense strand starting at position 3227 of SEQ ID NO: 913559
ugugguauauucucacuua

SEQ ID NO: 936645 - RNA, 19 nt, Artificial Sequence
  Description of Artificial Sequence: Synthetic oligonucleotide
  Antisense strand to SEQ ID NO: 936644
uaagugagaauauaccaca

SEQ ID NO: 936646 - RNA, 19 nt, Artificial Sequence
  Description of Artificial Sequence: Synthetic oligonucleotide
  Sense strand starting at position 2330 of SEQ ID NO: 913559
agggcaaucuguguauuau

SEQ ID NO: 936647 - RNA, 19 nt, Artificial Sequence
  Description of Artificial Sequence: Synthetic oligonucleotide
  Antisense strand to SEQ ID NO: 936646
auaauacacagauugcccu

SEQ ID NO: 936648 - RNA, 19 nt, Artificial Sequence
  Description of Artificial Sequence: Synthetic oligonucleotide
  Sense strand starting at position 1194 of SEQ ID NO: 913559
gaggaauaagcucgggugu

SEQ ID NO: 936649 - RNA, 19 nt, Artificial Sequence
  Description of Artificial Sequence: Synthetic oligonucleotide
  Antisense strand to SEQ ID NO: 936648
acacccgagcuuauuccuc

SEQ ID NO: 936650 - RNA, 19 nt, Artificial Sequence
  Description of Artificial Sequence: Synthetic oligonucleotide
  Sense strand starting at position 1195 of SEQ ID NO: 913559
aggaauaagcucggguguu

SEQ ID NO: 936651 - RNA, 19 nt, Artificial Sequence
  Description of Artificial Sequence: Synthetic oligonucleotide
  Antisense strand to SEQ ID NO: 936650
aacacccgagcuuauuccu

SEQ ID NO: 936652 - RNA, 19 nt, Artificial Sequence
  Description of Artificial Sequence: Synthetic oligonucleotide
  Sense strand starting at position 2080 of SEQ ID NO: 913559
caacuacgcccaggugauu

SEQ ID NO: 936653 - RNA, 19 nt, Artificial Sequence
  Description of Artificial Sequence: Synthetic oligonucleotide
  Antisense strand to SEQ ID NO: 936652
aaucaccugggcguaguug

SEQ ID NO: 936654 - RNA, 19 nt, Artificial Sequence
  Description of Artificial Sequence: Synthetic oligonucleotide
  Sense strand starting at position 686 of SEQ ID NO: 913559
guauguaaauuagcauugu

SEQ ID NO: 936655 - RNA, 19 nt, Artificial Sequence
  Description of Artificial Sequence: Synthetic oligonucleotide
  Antisense strand to SEQ ID NO: 936654
acaaugcuaauuuacauac

SEQ ID NO: 936656 - RNA, 19 nt, Artificial Sequence
  Description of Artificial Sequence: Synthetic oligonucleotide
  Sense strand starting at position 1177 of SEQ ID NO: 913559
gaguuacacuuagauagga

SEQ ID NO: 936657 - RNA, 19 nt, Artificial Sequence
  Description of Artificial Sequence: Synthetic oligonucleotide
  Antisense strand to SEQ ID NO: 936656
uccuaucuaaguguaacuc

SEQ ID NO: 936658 - RNA, 19 nt, Artificial Sequence
  Description of Artificial Sequence: Synthetic oligonucleotide
  Sense strand starting at position 1034 of SEQ ID NO: 913559
agaggcaaauaucauauau

SEQ ID NO: 936659 - RNA, 19 nt, Artificial Sequence
  Description of Artificial Sequence: Synthetic oligonucleotide
  Antisense strand to SEQ ID NO: 936658
auauaugauauuugccucu

SEQ ID NO: 936660 - RNA, 19 nt, Artificial Sequence
  Description of Artificial Sequence: Synthetic oligonucleotide
  Sense strand starting at position 2032 of SEQ ID NO: 913559
gaacgauucugccucagcu

SEQ ID NO: 936661 - RNA, 19 nt, Artificial Sequence
  Description of Artificial Sequence: Synthetic oligonucleotide
  Antisense strand to SEQ ID NO: 936660
agcugaggcagaaucguuc

SEQ ID NO: 936662 - RNA, 19 nt, Artificial Sequence
  Description of Artificial Sequence: Synthetic oligonucleotide
  Sense strand starting at position 2339 of SEQ ID NO: 913559
uguguauuauauuccuugu

SEQ ID NO: 936663 - RNA, 19 nt, Artificial Sequence
  Description of Artificial Sequence: Synthetic oligonucleotide
  Antisense strand to SEQ ID NO: 936662
acaaggaauauaauacaca

SEQ ID NO: 936664 - RNA, 19 nt, Artificial Sequence
  Description of Artificial Sequence: Synthetic oligonucleotide
  Sense strand starting at position 3859 of SEQ ID NO: 913559
auacaacauugguagacau

SEQ ID NO: 936665 - RNA, 19 nt, Artificial Sequence
  Description of Artificial Sequence: Synthetic oligonucleotide
  Antisense strand to SEQ ID NO: 936664
augucuaccaauguuguau

SEQ ID NO: 936666 - RNA, 19 nt, Artificial Sequence
  Description of Artificial Sequence: Synthetic oligonucleotide
  Sense strand starting at position 1295 of SEQ ID NO: 913560
uggaucuaauaauugaagu

SEQ ID NO: 936667 - RNA, 19 nt, Artificial Sequence
  Description of Artificial Sequence: Synthetic oligonucleotide
  Antisense strand to SEQ ID NO: 936666
acuucaauuauuagaucca

SEQ ID NO: 936668 - RNA, 19 nt, Artificial Sequence
  Description of Artificial Sequence: Synthetic oligonucleotide
  Sense strand starting at position 1522 of SEQ ID NO: 913560
cuagcaaauggcuaugaaa

SEQ ID NO: 936669 - RNA, 19 nt, Artificial Sequence
  Description of Artificial Sequence: Synthetic oligonucleotide
  Antisense strand to SEQ ID NO: 936668
uuucauagccauuugcuag

SEQ ID NO: 936670 - RNA, 19 nt, Artificial Sequence
  Description of Artificial Sequence: Synthetic oligonucleotide
  Sense strand starting at position 3336 of SEQ ID NO: 913560
auuacuagaucacuaacga

SEQ ID NO: 936671 - RNA, 19 nt, Artificial Sequence
  Description of Artificial Sequence: Synthetic oligonucleotide
  Antisense strand to SEQ ID NO: 936670
ucguuagugaucuaguaau

SEQ ID NO: 936672 - RNA, 19 nt, Artificial Sequence
  Description of Artificial Sequence: Synthetic oligonucleotide
  Sense strand starting at position 803 of SEQ ID NO: 913560
ggcacaauaucuuuaagaa

SEQ ID NO: 936673 - RNA, 19 nt, Artificial Sequence
  Description of Artificial Sequence: Synthetic oligonucleotide
  Antisense strand to SEQ ID NO: 936672
uucuuaaagauauugugcc

SEQ ID NO: 936674 - RNA, 19 nt, Artificial Sequence
  Description of Artificial Sequence: Synthetic oligonucleotide
  Sense strand starting at position 2420 of SEQ ID NO: 913560
augucaauccuauaucgaa

SEQ ID NO: 936675 - RNA, 19 nt, Artificial Sequence
  Description of Artificial Sequence: Synthetic oligonucleotide
  Antisense strand to SEQ ID NO: 936674
uucgauauaggauugacau

SEQ ID NO: 936676 - RNA, 19 nt, Artificial Sequence
  Description of Artificial Sequence: Synthetic oligonucleotide
  Sense strand starting at position 2380 of SEQ ID NO: 913560
cggaaauggccauauucua

SEQ ID NO: 936677 - RNA, 19 nt, Artificial Sequence
  Description of Artificial Sequence: Synthetic oligonucleotide
  Antisense strand to SEQ ID NO: 936676
uagaauauggccauuuccg

SEQ ID NO: 936678 - RNA, 19 nt, Artificial Sequence
  Description of Artificial Sequence: Synthetic oligonucleotide
  Sense strand starting at position 1067 of SEQ ID NO: 913560
gcuuauaaggcuuaauaua

SEQ ID NO: 936679 - RNA, 19 nt, Artificial Sequence
  Description of Artificial Sequence: Synthetic oligonucleotide
  Antisense strand to SEQ ID NO: 936678
uauauuaagccuuauaagc

SEQ ID NO: 936680 - RNA, 19 nt, Artificial Sequence
  Description of Artificial Sequence: Synthetic oligonucleotide
  Sense strand starting at position 1524 of SEQ ID NO: 913560
agcaaauggcuaugaaaua

SEQ ID NO: 936681 - RNA, 19 nt, Artificial Sequence
  Description of Artificial Sequence: Synthetic oligonucleotide
  Antisense strand to SEQ ID NO: 936680
uauuucauagccauuugcu

SEQ ID NO: 936682 - RNA, 19 nt, Artificial Sequence
  Description of Artificial Sequence: Synthetic oligonucleotide
  Sense strand starting at position 3095 of SEQ ID NO: 913560
ccuggucuccuccagacau

SEQ ID NO: 936683 - RNA, 19 nt, Artificial Sequence
  Description of Artificial Sequence: Synthetic oligonucleotide
  Antisense strand to SEQ ID NO: 936682
augucuggaggagaccagg

SEQ ID NO: 936684 - RNA, 19 nt, Artificial Sequence
  Description of Artificial Sequence: Synthetic oligonucleotide
  Sense strand starting at position 1725 of SEQ ID NO: 913560
auuguaccucuagggauau

SEQ ID NO: 936685 - RNA, 19 nt, Artificial Sequence
  Description of Artificial Sequence: Synthetic oligonucleotide
  Antisense strand to SEQ ID NO: 936684
auaucccuagagguacaau

SEQ ID NO: 936686 - RNA, 19 nt, Artificial Sequence
  Description of Artificial Sequence: Synthetic oligonucleotide
  Sense strand starting at position 3768 of SEQ ID NO: 913560
aguauuucgugauucaguc

SEQ ID NO: 936687 - RNA, 19 nt, Artificial Sequence
  Description of Artificial Sequence: Synthetic oligonucleotide
  Antisense strand to SEQ ID NO: 936686
gacugaaucacgaaauacu

SEQ ID NO: 936688 - RNA, 19 nt, Artificial Sequence
  Description of Artificial Sequence: Synthetic oligonucleotide
  Sense strand starting at position 2353 of SEQ ID NO: 913560
auaaccaguugggaauuua

SEQ ID NO: 936689 - RNA, 19 nt, Artificial Sequence
  Description of Artificial Sequence: Synthetic oligonucleotide
  Antisense strand to SEQ ID NO: 936688
uaaauucccaacugguuau

SEQ ID NO: 936690 - RNA, 19 nt, Artificial Sequence
  Description of Artificial Sequence: Synthetic oligonucleotide
  Sense strand starting at position 3895 of SEQ ID NO: 913560
aguccaaggccuuggagaa

SEQ ID NO: 936691 - RNA, 19 nt, Artificial Sequence
  Description of Artificial Sequence: Synthetic oligonucleotide
  Antisense strand to SEQ ID NO: 936690
uucuccaaggccuuggacu

SEQ ID NO: 936692 - RNA, 19 nt, Artificial Sequence
  Description of Artificial Sequence: Synthetic oligonucleotide
  Sense strand starting at position 2214 of SEQ ID NO: 913560
uagguugaagccuagguau

SEQ ID NO: 936693 - RNA, 19 nt, Artificial Sequence
  Description of Artificial Sequence: Synthetic oligonucleotide
  Antisense strand to SEQ ID NO: 936692
auaccuaggcuucaaccua

SEQ ID NO: 936694 - RNA, 19 nt, Artificial Sequence
  Description of Artificial Sequence: Synthetic oligonucleotide
  Sense strand starting at position 3654 of SEQ ID NO: 913560
ggugcuagagcugagacua

SEQ ID NO: 936695 - RNA, 19 nt, Artificial Sequence
  Description of Artificial Sequence: Synthetic oligonucleotide
  Antisense strand to SEQ ID NO: 936694
uagucucagcucuagcacc

SEQ ID NO: 936696 - RNA, 19 nt, Artificial Sequence
  Description of Artificial Sequence: Synthetic oligonucleotide
  Sense strand starting at position 2443 of SEQ ID NO: 913560
aggagacuuuguccuuuau

SEQ ID NO: 936697 - RNA, 19 nt, Artificial Sequence
  Description of Artificial Sequence: Synthetic oligonucleotide
  Antisense strand to SEQ ID NO: 936696
auaaaggacaaagucuccu

SEQ ID NO: 936698 - RNA, 19 nt, Artificial Sequence
  Description of Artificial Sequence: Synthetic oligonucleotide
  Sense strand starting at position 3953 of SEQ ID NO: 913560
ugacucacguaacuuuaaa

SEQ ID NO: 936699 - RNA, 19 nt, Artificial Sequence
  Description of Artificial Sequence: Synthetic oligonucleotide
  Antisense strand to SEQ ID NO: 936698
uuuaaaguuacgugaguca

SEQ ID NO: 936700 - RNA, 19 nt, Artificial Sequence
  Description of Artificial Sequence: Synthetic oligonucleotide
  Sense strand starting at position 1264 of SEQ ID NO: 913560
guagcuauagcuuaauuaa

SEQ ID NO: 936701 - RNA, 19 nt, Artificial Sequence
  Description of Artificial Sequence: Synthetic oligonucleotide
  Antisense strand to SEQ ID NO: 936700
uuaauuaagcuauagcuac

SEQ ID NO: 936702 - RNA, 19 nt, Artificial Sequence
  Description of Artificial Sequence: Synthetic oligonucleotide
  Sense strand starting at position 3832 of SEQ ID NO: 913560
agcccaaguugacuagauu

SEQ ID NO: 936703 - RNA, 19 nt, Artificial Sequence
  Description of Artificial Sequence: Synthetic oligonucleotide
  Antisense strand to SEQ ID NO: 936702
aaucuagucaacuugggcu

SEQ ID NO: 936704 - RNA, 19 nt, Artificial Sequence
  Description of Artificial Sequence: Synthetic oligonucleotide
  Sense strand starting at position 3603 of SEQ ID NO: 913560
gaggcugagccuugaagau

SEQ ID NO: 936705 - RNA, 19 nt, Artificial Sequence
  Description of Artificial Sequence: Synthetic oligonucleotide
  Antisense strand to SEQ ID NO: 936704
aucuucaaggcucagccuc

SEQ ID NO: 936706 - RNA, 19 nt, Artificial Sequence
  Description of Artificial Sequence: Synthetic oligonucleotide
  Sense strand starting at position 1571 of SEQ ID NO: 913560
gacaguuuguuauucugaa

SEQ ID NO: 936707 - RNA, 19 nt, Artificial Sequence
  Description of Artificial Sequence: Synthetic oligonucleotide
  Antisense strand to SEQ ID NO: 936706
uucagaauaacaaacuguc

SEQ ID NO: 936708 - RNA, 19 nt, Artificial Sequence
  Description of Artificial Sequence: Synthetic oligonucleotide
  Sense strand starting at position 2441 of SEQ ID NO: 913560
uuaggagacuuuguccuuu

SEQ ID NO: 936709 - RNA, 19 nt, Artificial Sequence
  Description of Artificial Sequence: Synthetic oligonucleotide
  Antisense strand to SEQ ID NO: 936708
aaaggacaaagucuccuaa

SEQ ID NO: 936710 - RNA, 19 nt, Artificial Sequence
  Description of Artificial Sequence: Synthetic oligonucleotide
  Sense strand starting at position 3877 of SEQ ID NO: 913560
accuuuaguacuuggguga

SEQ ID NO: 936711 - RNA, 19 nt, Artificial Sequence
  Description of Artificial Sequence: Synthetic oligonucleotide
  Antisense strand to SEQ ID NO: 936710
ucacccaaguacuaaaggu

SEQ ID NO: 936712 - RNA, 19 nt, Artificial Sequence
  Description of Artificial Sequence: Synthetic oligonucleotide
  Sense strand starting at position 1572 of SEQ ID NO: 913560
acaguuuguuauucugaau

SEQ ID NO: 936713 - RNA, 19 nt, Artificial Sequence
  Description of Artificial Sequence: Synthetic oligonucleotide
  Antisense strand to SEQ ID NO: 936712
auucagaauaacaaacugu

SEQ ID NO: 936714 - RNA, 19 nt, Artificial Sequence
  Description of Artificial Sequence: Synthetic oligonucleotide
  Sense strand starting at position 3744 of SEQ ID NO: 913560
uuuacugauuguguacaau

SEQ ID NO: 936715 - RNA, 19 nt, Artificial Sequence
  Description of Artificial Sequence: Synthetic oligonucleotide
  Antisense strand to SEQ ID NO: 936714
auuguacacaaucaguaaa

SEQ ID NO: 936716 - RNA, 19 nt, Artificial Sequence
  Description of Artificial Sequence: Synthetic oligonucleotide
  Sense strand starting at position 3622 of SEQ ID NO: 913560
ucaguacuguagccaagaa

SEQ ID NO: 936717 - RNA, 19 nt, Artificial Sequence
  Description of Artificial Sequence: Synthetic oligonucleotide
  Antisense strand to SEQ ID NO: 936716
uucuuggcuacaguacuga

SEQ ID NO: 936718 - RNA, 19 nt, Artificial Sequence
  Description of Artificial Sequence: Synthetic oligonucleotide
  Sense strand starting at position 3059 of SEQ ID NO: 913560
gugcuaagggcuugagaaa

SEQ ID NO: 936719 - RNA, 19 nt, Artificial Sequence
  Description of Artificial Sequence: Synthetic oligonucleotide
  Antisense strand to SEQ ID NO: 936718
uuucucaagcccuuagcac

SEQ ID NO: 936720 - RNA, 19 nt, Artificial Sequence
  Description of Artificial Sequence: Synthetic oligonucleotide
  Sense strand starting at position 3108 of SEQ ID NO: 913560
agacauggcugcuuuauau

SEQ ID NO: 936721 - RNA, 19 nt, Artificial Sequence
  Description of Artificial Sequence: Synthetic oligonucleotide
  Antisense strand to SEQ ID NO: 936720
auauaaagcagccaugucu

SEQ ID NO: 936722 - RNA, 19 nt, Artificial Sequence
  Description of Artificial Sequence: Synthetic oligonucleotide
  Sense strand starting at position 2216 of SEQ ID NO: 913560
gguugaagccuagguauug

SEQ ID NO: 936723 - RNA, 19 nt, Artificial Sequence
  Description of Artificial Sequence: Synthetic oligonucleotide
  Antisense strand to SEQ ID NO: 936722
caauaccuaggcuucaacc

SEQ ID NO: 936724 - RNA, 19 nt, Artificial Sequence
  Description of Artificial Sequence: Synthetic oligonucleotide
  Sense strand starting at position 1995 of SEQ ID NO: 913560
uuaagacaaccgugagcuu

SEQ ID NO: 936725 - RNA, 19 nt, Artificial Sequence
  Description of Artificial Sequence: Synthetic oligonucleotide
  Antisense strand to SEQ ID NO: 936724
aagcucacgguugucuuaa

SEQ ID NO: 936726 - RNA, 19 nt, Artificial Sequence
  Description of Artificial Sequence: Synthetic oligonucleotide
  Sense strand starting at position 258 of SEQ ID NO: 913560
uagcuaaagguuugcagau

SEQ ID NO: 936727 - RNA, 19 nt, Artificial Sequence
  Description of Artificial Sequence: Synthetic oligonucleotide
  Antisense strand to SEQ ID NO: 936726
aucugcaaaccuuuagcua

SEQ ID NO: 936728 - RNA, 19 nt, Artificial Sequence
  Description of Artificial Sequence: Synthetic oligonucleotide
  Sense strand starting at position 3011 of SEQ ID NO: 913560
gggaaacgcucaguguaac

SEQ ID NO: 936729 - RNA, 19 nt, Artificial Sequence
  Description of Artificial Sequence: Synthetic oligonucleotide
  Antisense strand to SEQ ID NO: 936728
guuacacugagcguuuccc

SEQ ID NO: 936730 - RNA, 19 nt, Artificial Sequence
  Description of Artificial Sequence: Synthetic oligonucleotide
  Sense strand starting at position 102 of SEQ ID NO: 913560
agcagucaucaccgaauuc

SEQ ID NO: 936731 - RNA, 19 nt, Artificial Sequence
  Description of Artificial Sequence: Synthetic oligonucleotide
  Antisense strand to SEQ ID NO: 936730
gaauucggugaugacugcu

SEQ ID NO: 936732 - RNA, 19 nt, Artificial Sequence
  Description of Artificial Sequence: Synthetic oligonucleotide
  Sense strand starting at position 3105 of SEQ ID NO: 913560
uccagacauggcugcuuua

SEQ ID NO: 936733 - RNA, 19 nt, Artificial Sequence
  Description of Artificial Sequence: Synthetic oligonucleotide
  Antisense strand to SEQ ID NO: 936732
uaaagcagccaugucugga

SEQ ID NO: 936734 - RNA, 19 nt, Artificial Sequence
  Description of Artificial Sequence: Synthetic oligonucleotide
  Sense strand starting at position 3753 of SEQ ID NO: 913560
uguguacaaugguucagua

SEQ ID NO: 936735 - RNA, 19 nt, Artificial Sequence
  Description of Artificial Sequence: Synthetic oligonucleotide
  Antisense strand to SEQ ID NO: 936734
uacugaaccauuguacaca

SEQ ID NO: 936736 - RNA, 19 nt, Artificial Sequence
  Description of Artificial Sequence: Synthetic oligonucleotide
  Sense strand starting at position 3012 of SEQ ID NO: 913560
ggaaacgcucaguguaacu

SEQ ID NO: 936737 - RNA, 19 nt, Artificial Sequence
  Description of Artificial Sequence: Synthetic oligonucleotide
  Antisense strand to SEQ ID NO: 936736
aguuacacugagcguuucc

SEQ ID NO: 936738 - RNA, 19 nt, Artificial Sequence
  Description of Artificial Sequence: Synthetic oligonucleotide
  Sense strand starting at position 3048 of SEQ ID NO: 913560
cagagaauuuggugcuaag

SEQ ID NO: 936739 - RNA, 19 nt, Artificial Sequence
  Description of Artificial Sequence: Synthetic oligonucleotide
  Antisense strand to SEQ ID NO: 936738
cuuagcaccaaauucucug

SEQ ID NO: 936740 - RNA, 19 nt, Artificial Sequence
  Description of Artificial Sequence: Synthetic oligonucleotide
  Sense strand starting at position 3407 of SEQ ID NO: 913560
auuuccuaaugagguuauu

SEQ ID NO: 936741 - RNA, 19 nt, Artificial Sequence
  Description of Artificial Sequence: Synthetic oligonucleotide
  Antisense strand to SEQ ID NO: 936740
aauaaccucauuaggaaau

SEQ ID NO: 936742 - RNA, 19 nt, Artificial Sequence
  Description of Artificial Sequence: Synthetic oligonucleotide
  Sense strand starting at position 3383 of SEQ ID NO: 913560
aagauaucaucguauuugu

SEQ ID NO: 936743 - RNA, 19 nt, Artificial Sequence
  Description of Artificial Sequence: Synthetic oligonucleotide
  Antisense strand to SEQ ID NO: 936742
acaaauacgaugauaucuu

SEQ ID NO: 936744 - RNA, 19 nt, Artificial Sequence
  Description of Artificial Sequence: Synthetic oligonucleotide
  Sense strand starting at position 3036 of SEQ ID NO: 913560
aagagcugaucucagagaa

SEQ ID NO: 936745 - RNA, 19 nt, Artificial Sequence
  Description of Artificial Sequence: Synthetic oligonucleotide
  Antisense strand to SEQ ID NO: 936744
uucucugagaucagcucuu

SEQ ID NO: 936746 - RNA, 19 nt, Artificial Sequence
  Description of Artificial Sequence: Synthetic oligonucleotide
  Sense strand starting at position 230 of SEQ ID NO: 913561
cgcuauuugcuccaaauac

SEQ ID NO: 936747 - RNA, 19 nt, Artificial Sequence
  Description of Artificial Sequence: Synthetic oligonucleotide
  Antisense strand to SEQ ID NO: 936746
guauuuggagcaaauagcg

SEQ ID NO: 936748 - RNA, 19 nt, Artificial Sequence
  Description of Artificial Sequence: Synthetic oligonucleotide
  Sense strand starting at position 3870 of SEQ ID NO: 913561
ggauuaaucuaaucaguga

SEQ ID NO: 936749 - RNA, 19 nt, Artificial Sequence
  Description of Artificial Sequence: Synthetic oligonucleotide
  Antisense strand to SEQ ID NO: 936748
ucacugauuagauuaaucc

SEQ ID NO: 936750 - RNA, 19 nt, Artificial Sequence
  Description of Artificial Sequence: Synthetic oligonucleotide
  Sense strand starting at position 1603 of SEQ ID NO: 913561
agaaguucagagggaguau

SEQ ID NO: 936751 - RNA, 19 nt, Artificial Sequence
  Description of Artificial Sequence: Synthetic oligonucleotide
  Antisense strand to SEQ ID NO: 936750
auacucccucugaacuucu

SEQ ID NO: 936752 - RNA, 19 nt, Artificial Sequence
  Description of Artificial Sequence: Synthetic oligonucleotide
  Sense strand starting at position 514 of SEQ ID NO: 913561
cucagagucccacagguaa

SEQ ID NO: 936753 - RNA, 19 nt, Artificial Sequence
  Description of Artificial Sequence: Synthetic oligonucleotide
  Antisense strand to SEQ ID NO: 936752
uuaccugugggacucugag

SEQ ID NO: 936754 - RNA, 19 nt, Artificial Sequence
  Description of Artificial Sequence: Synthetic oligonucleotide
  Sense strand starting at position 2259 of SEQ ID NO: 913561
uaaugaccaguugggaauu

SEQ ID NO: 936755 - RNA, 19 nt, Artificial Sequence
  Description of Artificial Sequence: Synthetic oligonucleotide
  Antisense strand to SEQ ID NO: 936754
aauucccaacuggucauua

SEQ ID NO: 936756 - RNA, 19 nt, Artificial Sequence
  Description of Artificial Sequence: Synthetic oligonucleotide
  Sense strand starting at position 2955 of SEQ ID NO: 913561
agacauuaguuacucugaa

SEQ ID NO: 936757 - RNA, 19 nt, Artificial Sequence
  Description of Artificial Sequence: Synthetic oligonucleotide
  Antisense strand to SEQ ID NO: 936756
uucagaguaacuaaugucu

SEQ ID NO: 936758 - RNA, 19 nt, Artificial Sequence
  Description of Artificial Sequence: Synthetic oligonucleotide
  Sense strand starting at position 3203 of SEQ ID NO: 913561
uccagucaccuccagacau

SEQ ID NO: 936759 - RNA, 19 nt, Artificial Sequence
  Description of Artificial Sequence: Synthetic oligonucleotide
  Antisense strand to SEQ ID NO: 936758
augucuggaggugacugga

SEQ ID NO: 936760 - RNA, 19 nt, Artificial Sequence
  Description of Artificial Sequence: Synthetic oligonucleotide
  Sense strand starting at position 2956 of SEQ ID NO: 913561
gacauuaguuacucugaag

SEQ ID NO: 936761 - RNA, 19 nt, Artificial Sequence
  Description of Artificial Sequence: Synthetic oligonucleotide
  Antisense strand to SEQ ID NO: 936760
cuucagaguaacuaauguc

SEQ ID NO: 936762 - RNA, 19 nt, Artificial Sequence
  Description of Artificial Sequence: Synthetic oligonucleotide
  Sense strand starting at position 2045 of SEQ ID NO: 913561
uggacuuuggcccauggau

SEQ ID NO: 936763 - RNA, 19 nt, Artificial Sequence
  Description of Artificial Sequence: Synthetic oligonucleotide
  Antisense strand to SEQ ID NO: 936762
auccaugggccaaagucca

SEQ ID NO: 936764 - RNA, 19 nt, Artificial Sequence
  Description of Artificial Sequence: Synthetic oligonucleotide
  Sense strand starting at position 3028 of SEQ ID NO: 913561
uccguuauuuguuuauaag

SEQ ID NO: 936765 - RNA, 19 nt, Artificial Sequence
  Description of Artificial Sequence: Synthetic oligonucleotide
  Antisense strand to SEQ ID NO: 936764
cuuauaaacaaauaacgga

SEQ ID NO: 936766 - RNA, 19 nt, Artificial Sequence
  Description of Artificial Sequence: Synthetic oligonucleotide
  Sense strand starting at position 3588 of SEQ ID NO: 913561
aucgauuauguuuauagac

SEQ ID NO: 936767 - RNA, 19 nt, Artificial Sequence
  Description of Artificial Sequence: Synthetic oligonucleotide
  Antisense strand to SEQ ID NO: 936766
gucuauaaacauaaucgau

SEQ ID NO: 936768 - RNA, 19 nt, Artificial Sequence
  Description of Artificial Sequence: Synthetic oligonucleotide
  Sense strand starting at position 1071 of SEQ ID NO: 913561
ggaugaaauuucuaaucac

SEQ ID NO: 936769 - RNA, 19 nt, Artificial Sequence
  Description of Artificial Sequence: Synthetic oligonucleotide
  Antisense strand to SEQ ID NO: 936768
gugauuagaaauuucaucc

SEQ ID NO: 936770 - RNA, 19 nt, Artificial Sequence
  Description of Artificial Sequence: Synthetic oligonucleotide
  Sense strand starting at position 3406 of SEQ ID NO: 913561
gauagucaauggucaugaa

SEQ ID NO: 936771 - RNA, 19 nt, Artificial Sequence
  Description of Artificial Sequence: Synthetic oligonucleotide
  Antisense strand to SEQ ID NO: 936770
uucaugaccauugacuauc

SEQ ID NO: 936772 - RNA, 19 nt, Artificial Sequence
  Description of Artificial Sequence: Synthetic oligonucleotide
  Sense strand starting at position 2112 of SEQ ID NO: 913561
aggagauucugguuuaauu

SEQ ID NO: 936773 - RNA, 19 nt, Artificial Sequence
  Description of Artificial Sequence: Synthetic oligonucleotide
  Antisense strand to SEQ ID NO: 936772
aauuaaaccagaaucuccu

SEQ ID NO: 936774 - RNA, 19 nt, Artificial Sequence
  Description of Artificial Sequence: Synthetic oligonucleotide
  Sense strand starting at position 2287 of SEQ ID NO: 913561
gagggaaaucaguguauuc

SEQ ID NO: 936775 - RNA, 19 nt, Artificial Sequence
  Description of Artificial Sequence: Synthetic oligonucleotide
  Antisense strand to SEQ ID NO: 936774
gaauacacugauuucccuc

SEQ ID NO: 936776 - RNA, 19 nt, Artificial Sequence
  Description of Artificial Sequence: Synthetic oligonucleotide
  Sense strand starting at position 2185 of SEQ ID NO: 913561
ugcugugaugauggagaaa

SEQ ID NO: 936777 - RNA, 19 nt, Artificial Sequence
  Description of Artificial Sequence: Synthetic oligonucleotide
  Antisense strand to SEQ ID NO: 936776
uuucuccaucaucacagca

SEQ ID NO: 936778 - RNA, 19 nt, Artificial Sequence
  Description of Artificial Sequence: Synthetic oligonucleotide
  Sense strand starting at position 337 of SEQ ID NO: 913561
aaaugugauggugauuguu

SEQ ID NO: 936779 - RNA, 19 nt, Artificial Sequence
  Description of Artificial Sequence: Synthetic oligonucleotide
  Antisense strand to SEQ ID NO: 936778
aacaaucaccaucacauuu

SEQ ID NO: 936780 - RNA, 19 nt, Artificial Sequence
  Description of Artificial Sequence: Synthetic oligonucleotide
  Sense strand starting at position 813 of SEQ ID NO: 913561
ucagcaucuccuggaagaa

SEQ ID NO: 936781 - RNA, 19 nt, Artificial Sequence
  Description of Artificial Sequence: Synthetic oligonucleotide
  Antisense strand to SEQ ID NO: 936780
uucuuccaggagaugcuga

SEQ ID NO: 936782 - RNA, 19 nt, Artificial Sequence
  Description of Artificial Sequence: Synthetic oligonucleotide
  Sense strand starting at position 3023 of SEQ ID NO: 913561
agaaguccguuauuuguuu

SEQ ID NO: 936783 - RNA, 19 nt, Artificial Sequence
  Description of Artificial Sequence: Synthetic oligonucleotide
  Antisense strand to SEQ ID NO: 936782
aaacaaauaacggacuucu

SEQ ID NO: 936784 - RNA, 19 nt, Artificial Sequence
  Description of Artificial Sequence: Synthetic oligonucleotide
  Sense strand starting at position 3024 of SEQ ID NO: 913561
gaaguccguuauuuguuua

SEQ ID NO: 936785 - RNA, 19 nt, Artificial Sequence
  Description of Artificial Sequence: Synthetic oligonucleotide
  Antisense strand to SEQ ID NO: 936784
uaaacaaauaacggacuuc

SEQ ID NO: 936786 - RNA, 19 nt, Artificial Sequence
  Description of Artificial Sequence: Synthetic oligonucleotide
  Sense strand starting at position 12 of SEQ ID NO: 913561
acagaaauaugugcaccua

SEQ ID NO: 936787 - RNA, 19 nt, Artificial Sequence
  Description of Artificial Sequence: Synthetic oligonucleotide
  Antisense strand to SEQ ID NO: 936786
uaggugcacauauuucugu

SEQ ID NO: 936788 - RNA, 19 nt, Artificial Sequence
  Description of Artificial Sequence: Synthetic oligonucleotide
  Sense strand starting at position 334 of SEQ ID NO: 913561
cauaaaugugauggugauu

SEQ ID NO: 936789 - RNA, 19 nt, Artificial Sequence
  Description of Artificial Sequence: Synthetic oligonucleotide
  Antisense strand to SEQ ID NO: 936788
aaucaccaucacauuuaug

SEQ ID NO: 936790 - RNA, 19 nt, Artificial Sequence
  Description of Artificial Sequence: Synthetic oligonucleotide
  Sense strand starting at position 2047 of SEQ ID NO: 913561
gacuuuggcccauggauag

SEQ ID NO: 936791 - RNA, 19 nt, Artificial Sequence
  Description of Artificial Sequence: Synthetic oligonucleotide
  Antisense strand to SEQ ID NO: 936790
cuauccaugggccaaaguc

SEQ ID NO: 936792 - RNA, 19 nt, Artificial Sequence
  Description of Artificial Sequence: Synthetic oligonucleotide
  Sense strand starting at position 2357 of SEQ ID NO: 913561
agacuuagcccuugauaac

SEQ ID NO: 936793 - RNA, 19 nt, Artificial Sequence
  Description of Artificial Sequence: Synthetic oligonucleotide
  Antisense strand to SEQ ID NO: 936792
guuaucaagggcuaagucu

SEQ ID NO: 936794 - RNA, 19 nt, Artificial Sequence
  Description of Artificial Sequence: Synthetic oligonucleotide
  Sense strand starting at position 2261 of SEQ ID NO: 913561
augaccaguugggaauuua

SEQ ID NO: 936795 - RNA, 19 nt, Artificial Sequence
  Description of Artificial Sequence: Synthetic oligonucleotide
  Antisense strand to SEQ ID NO: 936794
uaaauucccaacuggucau

SEQ ID NO: 936796 - RNA, 19 nt, Artificial Sequence
  Description of Artificial Sequence: Synthetic oligonucleotide
  Sense strand starting at position 63 of SEQ ID NO: 913561
ggaauugccucuuccagaa

SEQ ID NO: 936797 - RNA, 19 nt, Artificial Sequence
  Description of Artificial Sequence: Synthetic oligonucleotide
  Antisense strand to SEQ ID NO: 936796
uucuggaagaggcaauucc

SEQ ID NO: 936798 - RNA, 19 nt, Artificial Sequence
  Description of Artificial Sequence: Synthetic oligonucleotide
  Sense strand starting at position 1752 of SEQ ID NO: 913561
ugcagauguccuuaacauc

SEQ ID NO: 936799 - RNA, 19 nt, Artificial Sequence
  Description of Artificial Sequence: Synthetic oligonucleotide
  Antisense strand to SEQ ID NO: 936798
gauguuaaggacaucugca

SEQ ID NO: 936800 - RNA, 19 nt, Artificial Sequence
  Description of Artificial Sequence: Synthetic oligonucleotide
  Sense strand starting at position 3027 of SEQ ID NO: 913561
guccguuauuuguuuauaa

SEQ ID NO: 936801 - RNA, 19 nt, Artificial Sequence
  Description of Artificial Sequence: Synthetic oligonucleotide
  Antisense strand to SEQ ID NO: 936800
uuauaaacaaauaacggac

SEQ ID NO: 936802 - RNA, 19 nt, Artificial Sequence
  Description of Artificial Sequence: Synthetic oligonucleotide
  Sense strand starting at position 3403 of SEQ ID NO: 913561
acugauagucaauggucau

SEQ ID NO: 936803 - RNA, 19 nt, Artificial Sequence
  Description of Artificial Sequence: Synthetic oligonucleotide
  Antisense strand to SEQ ID NO: 936802
augaccauugacuaucagu

SEQ ID NO: 936804 - RNA, 19 nt, Artificial Sequence
  Description of Artificial Sequence: Synthetic oligonucleotide
  Sense strand starting at position 1728 of SEQ ID NO: 913561
gcagacuuacauuggugaa

SEQ ID NO: 936805 - RNA, 19 nt, Artificial Sequence
  Description of Artificial Sequence: Synthetic oligonucleotide
  Antisense strand to SEQ ID NO: 936804
uucaccaauguaagucugc

SEQ ID NO: 936806 - RNA, 19 nt, Artificial Sequence
  Description of Artificial Sequence: Synthetic oligonucleotide
  Sense strand starting at position 2101 of SEQ ID NO: 913561
agugccaaucuaggagauu

SEQ ID NO: 936807 - RNA, 19 nt, Artificial Sequence
  Description of Artificial Sequence: Synthetic oligonucleotide
  Antisense strand to SEQ ID NO: 936806
aaucuccuagauuggcacu

SEQ ID NO: 936808 - RNA, 19 nt, Artificial Sequence
  Description of Artificial Sequence: Synthetic oligonucleotide
  Sense strand starting at position 549 of SEQ ID NO: 913561
acuggaaucucugcuaauu

SEQ ID NO: 936809 - RNA, 19 nt, Artificial Sequence
  Description of Artificial Sequence: Synthetic oligonucleotide
  Antisense strand to SEQ ID NO: 936808
aauuagcagagauuccagu

SEQ ID NO: 936810 - RNA, 19 nt, Artificial Sequence
  Description of Artificial Sequence: Synthetic oligonucleotide
  Sense strand starting at position 3404 of SEQ ID NO: 913561
cugauagucaauggucaug

SEQ ID NO: 936811 - RNA, 19 nt, Artificial Sequence
  Description of Artificial Sequence: Synthetic oligonucleotide
  Antisense strand to SEQ ID NO: 936810
caugaccauugacuaucag

SEQ ID NO: 936812 - RNA, 19 nt, Artificial Sequence
  Description of Artificial Sequence: Synthetic oligonucleotide
  Sense strand starting at position 1649 of SEQ ID NO: 913561
gugugcuuccaggaauaua

SEQ ID NO: 936813 - RNA, 19 nt, Artificial Sequence
  Description of Artificial Sequence: Synthetic oligonucleotide
  Antisense strand to SEQ ID NO: 936812
uauauuccuggaagcacac

SEQ ID NO: 936814 - RNA, 19 nt, Artificial Sequence
  Description of Artificial Sequence: Synthetic oligonucleotide
  Sense strand starting at position 227 of SEQ ID NO: 913561
agucgcuauuugcuccaaa

SEQ ID NO: 936815 - RNA, 19 nt, Artificial Sequence
  Description of Artificial Sequence: Synthetic oligonucleotide
  Antisense strand to SEQ ID NO: 936814
uuuggagcaaauagcgacu

SEQ ID NO: 936816 - RNA, 19 nt, Artificial Sequence
  Description of Artificial Sequence: Synthetic oligonucleotide
  Sense strand starting at position 3727 of SEQ ID NO: 913561
ucaguacuuuagcuaagga

SEQ ID NO: 936817 - RNA, 19 nt, Artificial Sequence
  Description of Artificial Sequence: Synthetic oligonucleotide
  Antisense strand to SEQ ID NO: 936816
uccuuagcuaaaguacuga

SEQ ID NO: 936818 - RNA, 19 nt, Artificial Sequence
  Description of Artificial Sequence: Synthetic oligonucleotide
  Sense strand starting at position 1703 of SEQ ID NO: 913561
uugcaauuggcuggaggaa

SEQ ID NO: 936819 - RNA, 19 nt, Artificial Sequence
  Description of Artificial Sequence: Synthetic oligonucleotide
  Antisense strand to SEQ ID NO: 936818
uuccuccagccaauugcaa

SEQ ID NO: 936820 - RNA, 19 nt, Artificial Sequence
  Description of Artificial Sequence: Synthetic oligonucleotide
  Sense strand starting at position 303 of SEQ ID NO: 913561
acacauagauucgauauuu

SEQ ID NO: 936821 - RNA, 19 nt, Artificial Sequence
  Description of Artificial Sequence: Synthetic oligonucleotide
  Antisense strand to SEQ ID NO: 936820
aaauaucgaaucuaugugu

SEQ ID NO: 936822 - RNA, 19 nt, Artificial Sequence
  Description of Artificial Sequence: Synthetic oligonucleotide
  Sense strand starting at position 2798 of SEQ ID NO: 913561
aagaaacucugggagaaca

SEQ ID NO: 936823 - RNA, 19 nt, Artificial Sequence
  Description of Artificial Sequence: Synthetic oligonucleotide
  Antisense strand to SEQ ID NO: 936822
uguucucccagaguuucuu

SEQ ID NO: 936824 - RNA, 19 nt, Artificial Sequence
  Description of Artificial Sequence: Synthetic oligonucleotide
  Sense strand starting at position 571 of SEQ ID NO: 913561
acugaugcuugagcaauua

SEQ ID NO: 936825 - RNA, 19 nt, Artificial Sequence
  Description of Artificial Sequence: Synthetic oligonucleotide
  Antisense strand to SEQ ID NO: 936824
uaauugcucaagcaucagu

SEQ ID NO: 936826 - RNA, 19 nt, Artificial Sequence
  Description of Artificial Sequence: Synthetic oligonucleotide
  Sense strand starting at position 3349 of SEQ ID NO: 913562
uucuaaauucccuagugag

SEQ ID NO: 936827 - RNA, 19 nt, Artificial Sequence
  Description of Artificial Sequence: Synthetic oligonucleotide
  Antisense strand to SEQ ID NO: 936826
cucacuagggaauuuagaa

SEQ ID NO: 936828 - RNA, 19 nt, Artificial Sequence
  Description of Artificial Sequence: Synthetic oligonucleotide
  Sense strand starting at position 2246 of SEQ ID NO: 913562
aauguuaacccagaugguu

SEQ ID NO: 936829 - RNA, 19 nt, Artificial Sequence
  Description of Artificial Sequence: Synthetic oligonucleotide
  Antisense strand to SEQ ID NO: 936828
aaccaucuggguuaacauu

SEQ ID NO: 936830 - RNA, 19 nt, Artificial Sequence
  Description of Artificial Sequence: Synthetic oligonucleotide
  Sense strand starting at position 2748 of SEQ ID NO: 913562
gcccaucgugguguauuau

SEQ ID NO: 936831 - RNA, 19 nt, Artificial Sequence
  Description of Artificial Sequence: Synthetic oligonucleotide
  Antisense strand to SEQ ID NO: 936830
auaauacaccacgaugggc

SEQ ID NO: 936832 - RNA, 19 nt, Artificial Sequence
  Description of Artificial Sequence: Synthetic oligonucleotide
  Sense strand starting at position 3364 of SEQ ID NO: 913562
ugagguuauuuccauuucu

SEQ ID NO: 936833 - RNA, 19 nt, Artificial Sequence
  Description of Artificial Sequence: Synthetic oligonucleotide
  Antisense strand to SEQ ID NO: 936832
agaaauggaaauaaccuca

SEQ ID NO: 936834 - RNA, 19 nt, Artificial Sequence
  Description of Artificial Sequence: Synthetic oligonucleotide
  Sense strand starting at position 770 of SEQ ID NO: 913562
acgugcagucagagagguu

SEQ ID NO: 936835 - RNA, 19 nt, Artificial Sequence
  Description of Artificial Sequence: Synthetic oligonucleotide
  Antisense strand to SEQ ID NO: 936834
aaccucucugacugcacgu

SEQ ID NO: 936836 - RNA, 19 nt, Artificial Sequence
  Description of Artificial Sequence: Synthetic oligonucleotide
  Sense strand starting at position 3043 of SEQ ID NO: 913562
cccagucaccuccagacau

SEQ ID NO: 936837 - RNA, 19 nt, Artificial Sequence
  Description of Artificial Sequence: Synthetic oligonucleotide
  Antisense strand to SEQ ID NO: 936836
augucuggaggugacuggg

SEQ ID NO: 936838 - RNA, 19 nt, Artificial Sequence
  Description of Artificial Sequence: Synthetic oligonucleotide
  Sense strand starting at position 384 of SEQ ID NO: 913562
caguacuuuguggaucuaa

SEQ ID NO: 936839 - RNA, 19 nt, Artificial Sequence
  Description of Artificial Sequence: Synthetic oligonucleotide
  Antisense strand to SEQ ID NO: 936838
uuagauccacaaaguacug

SEQ ID NO: 936840 - RNA, 19 nt, Artificial Sequence
  Description of Artificial Sequence: Synthetic oligonucleotide
  Sense strand starting at position 3842 of SEQ ID NO: 913562
agucaaaggccuuggagaa

SEQ ID NO: 936841 - RNA, 19 nt, Artificial Sequence
  Description of Artificial Sequence: Synthetic oligonucleotide
  Antisense strand to SEQ ID NO: 936840
uucuccaaggccuuugacu

SEQ ID NO: 936842 - RNA, 19 nt, Artificial Sequence
  Description of Artificial Sequence: Synthetic oligonucleotide
  Sense strand starting at position 1523 of SEQ ID NO: 913562
uauagcaaaugguuaugaa

SEQ ID NO: 936843 - RNA, 19 nt, Artificial Sequence
  Description of Artificial Sequence: Synthetic oligonucleotide
  Antisense strand to SEQ ID NO: 936842
uucauaaccauuugcuaua

SEQ ID NO: 936844 - RNA, 19 nt, Artificial Sequence
  Description of Artificial Sequence: Synthetic oligonucleotide
  Sense strand starting at position 1995 of SEQ ID NO: 913562
uuaagacaaccaugagcuu

SEQ ID NO: 936845 - RNA, 19 nt, Artificial Sequence
  Description of Artificial Sequence: Synthetic oligonucleotide
  Antisense strand to SEQ ID NO: 936844
aagcucaugguugucuuaa

SEQ ID NO: 936846 - RNA, 19 nt, Artificial Sequence
  Description of Artificial Sequence: Synthetic oligonucleotide
  Sense strand starting at position 2049 of SEQ ID NO: 913562
cggugugugccucuuugau

SEQ ID NO: 936847 - RNA, 19 nt, Artificial Sequence
  Description of Artificial Sequence: Synthetic oligonucleotide
  Antisense strand to SEQ ID NO: 936846
aucaaagaggcacacaccg

SEQ ID NO: 936848 - RNA, 19 nt, Artificial Sequence
  Description of Artificial Sequence: Synthetic oligonucleotide
  Sense strand starting at position 3828 of SEQ ID NO: 913562
uuaguacuuagguaaguca

SEQ ID NO: 936849 - RNA, 19 nt, Artificial Sequence
  Description of Artificial Sequence: Synthetic oligonucleotide
  Antisense strand to SEQ ID NO: 936848
ugacuuaccuaaguacuaa

SEQ ID NO: 936850 - RNA, 19 nt, Artificial Sequence
  Description of Artificial Sequence: Synthetic oligonucleotide
  Sense strand starting at position 407 of SEQ ID NO: 913562
ggaagucuauaacuucuuu

SEQ ID NO: 936851 - RNA, 19 nt, Artificial Sequence
  Description of Artificial Sequence: Synthetic oligonucleotide
  Antisense strand to SEQ ID NO: 936850
aaagaaguuauagacuucc

SEQ ID NO: 936852 - RNA, 19 nt, Artificial Sequence
  Description of Artificial Sequence: Synthetic oligonucleotide
  Sense strand starting at position 2956 of SEQ ID NO: 913562
ucuccaucacugcagaagu

SEQ ID NO: 936853 - RNA, 19 nt, Artificial Sequence
  Description of Artificial Sequence: Synthetic oligonucleotide
  Antisense strand to SEQ ID NO: 936852
acuucugcagugauggaga

SEQ ID NO: 936854 - RNA, 19 nt, Artificial Sequence
  Description of Artificial Sequence: Synthetic oligonucleotide
  Sense strand starting at position 642 of SEQ ID NO: 913562
ugaaaugcucccgauuauu

SEQ ID NO: 936855 - RNA, 19 nt, Artificial Sequence
  Description of Artificial Sequence: Synthetic oligonucleotide
  Antisense strand to SEQ ID NO: 936854
aauaaucgggagcauuuca

SEQ ID NO: 936856 - RNA, 19 nt, Artificial Sequence
  Description of Artificial Sequence: Synthetic oligonucleotide
  Sense strand starting at position 2438 of SEQ ID NO: 913562
aggagacuuuguucuuuau

SEQ ID NO: 936857 - RNA, 19 nt, Artificial Sequence
  Description of Artificial Sequence: Synthetic oligonucleotide
  Antisense strand to SEQ ID NO: 936856
auaaagaacaaagucuccu

SEQ ID NO: 936858 - RNA, 19 nt, Artificial Sequence
  Description of Artificial Sequence: Synthetic oligonucleotide
  Sense strand starting at position 3568 of SEQ ID NO: 913562
ucaguaucuuagccaagaa

SEQ ID NO: 936859 - RNA, 19 nt, Artificial Sequence
  Description of Artificial Sequence: Synthetic oligonucleotide
  Antisense strand to SEQ ID NO: 936858
uucuuggcuaagauacuga

SEQ ID NO: 936860 - RNA, 19 nt, Artificial Sequence
  Description of Artificial Sequence: Synthetic oligonucleotide
  Sense strand starting at position 3549 of SEQ ID NO: 913562
gaagcugagccuugaagau

SEQ ID NO: 936861 - RNA, 19 nt, Artificial Sequence
  Description of Artificial Sequence: Synthetic oligonucleotide
  Antisense strand to SEQ ID NO: 936860
aucuucaaggcucagcuuc

SEQ ID NO: 936862 - RNA, 19 nt, Artificial Sequence
  Description of Artificial Sequence: Synthetic oligonucleotide
  Sense strand starting at position 135 of SEQ ID NO: 913562
cgucauucucuugaucuaa

SEQ ID NO: 936863 - RNA, 19 nt, Artificial Sequence
  Description of Artificial Sequence: Synthetic oligonucleotide
  Antisense strand to SEQ ID NO: 936862
uuagaucaagagaaugacg

SEQ ID NO: 936864 - RNA, 19 nt, Artificial Sequence
  Description of Artificial Sequence: Synthetic oligonucleotide
  Sense strand starting at position 3007 of SEQ ID NO: 913562
gugcuaaggguuugagaaa

SEQ ID NO: 936865 - RNA, 19 nt, Artificial Sequence
  Description of Artificial Sequence: Synthetic oligonucleotide
  Antisense strand to SEQ ID NO: 936864
uuucucaaacccuuagcac

SEQ ID NO: 936866 - RNA, 19 nt, Artificial Sequence
  Description of Artificial Sequence: Synthetic oligonucleotide
  Sense strand starting at position 2436 of SEQ ID NO: 913562
uuaggagacuuuguucuuu

SEQ ID NO: 936867 - RNA, 19 nt, Artificial Sequence
  Description of Artificial Sequence: Synthetic oligonucleotide
  Antisense strand to SEQ ID NO: 936866
aaagaacaaagucuccuaa

SEQ ID NO: 936868 - RNA, 19 nt, Artificial Sequence
  Description of Artificial Sequence: Synthetic oligonucleotide
  Sense strand starting at position 1428 of SEQ ID NO: 913562
ugccgauccaccugggaaa

SEQ ID NO: 936869 - RNA, 19 nt, Artificial Sequence
  Description of Artificial Sequence: Synthetic oligonucleotide
  Antisense strand to SEQ ID NO: 936868
uuucccagguggaucggca

SEQ ID NO: 936870 - RNA, 19 nt, Artificial Sequence
  Description of Artificial Sequence: Synthetic oligonucleotide
  Sense strand starting at position 3348 of SEQ ID NO: 913562
guucuaaauucccuaguga

SEQ ID NO: 936871 - RNA, 19 nt, Artificial Sequence
  Description of Artificial Sequence: Synthetic oligonucleotide
  Antisense strand to SEQ ID NO: 936870
ucacuagggaauuuagaac

SEQ ID NO: 936872 - RNA, 19 nt, Artificial Sequence
  Description of Artificial Sequence: Synthetic oligonucleotide
  Sense strand starting at position 1161 of SEQ ID NO: 913562
uucuuaucuccguauacug

SEQ ID NO: 936873 - RNA, 19 nt, Artificial Sequence
  Description of Artificial Sequence: Synthetic oligonucleotide
  Antisense strand to SEQ ID NO: 936872
caguauacggagauaagaa

SEQ ID NO: 936874 - RNA, 19 nt, Artificial Sequence
  Description of Artificial Sequence: Synthetic oligonucleotide
  Sense strand starting at position 645 of SEQ ID NO: 913562
aaugcucccgauuauugua

SEQ ID NO: 936875 - RNA, 19 nt, Artificial Sequence
  Description of Artificial Sequence: Synthetic oligonucleotide
  Antisense strand to SEQ ID NO: 936874
uacaauaaucgggagcauu

SEQ ID NO: 936876 - RNA, 19 nt, Artificial Sequence
  Description of Artificial Sequence: Synthetic oligonucleotide
  Sense strand starting at position 3962 of SEQ ID NO: 913562
gguugcugucuuuauaaua

SEQ ID NO: 936877 - RNA, 19 nt, Artificial Sequence
  Description of Artificial Sequence: Synthetic oligonucleotide
  Antisense strand to SEQ ID NO: 936876
uauuauaaagacagcaacc

SEQ ID NO: 936878 - RNA, 19 nt, Artificial Sequence
  Description of Artificial Sequence: Synthetic oligonucleotide
  Sense strand starting at position 3145 of SEQ ID NO: 913562
cacaguuguggaugcaaua

SEQ ID NO: 936879 - RNA, 19 nt, Artificial Sequence
  Description of Artificial Sequence: Synthetic oligonucleotide
  Antisense strand to SEQ ID NO: 936878
uauugcauccacaacugug

SEQ ID NO: 936880 - RNA, 19 nt, Artificial Sequence
  Description of Artificial Sequence: Synthetic oligonucleotide
  Sense strand starting at position 42 of SEQ ID NO: 913562
cccugauagccaugugaug

SEQ ID NO: 936881 - RNA, 19 nt, Artificial Sequence
  Description of Artificial Sequence: Synthetic oligonucleotide
  Antisense strand to SEQ ID NO: 936880
caucacauggcuaucaggg

SEQ ID NO: 936882 - RNA, 19 nt, Artificial Sequence
  Description of Artificial Sequence: Synthetic oligonucleotide
  Sense strand starting at position 2971 of SEQ ID NO: 913562
aagugaaacgcucagugua

SEQ ID NO: 936883 - RNA, 19 nt, Artificial Sequence
  Description of Artificial Sequence: Synthetic oligonucleotide
  Antisense strand to SEQ ID NO: 936882
uacacugagcguuucacuu

SEQ ID NO: 936884 - RNA, 19 nt, Artificial Sequence
  Description of Artificial Sequence: Synthetic oligonucleotide
  Sense strand starting at position 2757 of SEQ ID NO: 913562
gguguauuaucucuuacac

SEQ ID NO: 936885 - RNA, 19 nt, Artificial Sequence
  Description of Artificial Sequence: Synthetic oligonucleotide
  Antisense strand to SEQ ID NO: 936884
guguaagagauaauacacc

SEQ ID NO: 936886 - RNA, 19 nt, Artificial Sequence
  Description of Artificial Sequence: Synthetic oligonucleotide
  Sense strand starting at position 3124 of SEQ ID NO: 913562
aaaggaaauuauggacaga

SEQ ID NO: 936887 - RNA, 19 nt, Artificial Sequence
  Description of Artificial Sequence: Synthetic oligonucleotide
  Antisense strand to SEQ ID NO: 936886
ucuguccauaauuuccuuu

SEQ ID NO: 936888 - RNA, 19 nt, Artificial Sequence
  Description of Artificial Sequence: Synthetic oligonucleotide
  Sense strand starting at position 2896 of SEQ ID NO: 913562
auuugucucuaagggaaac

SEQ ID NO: 936889 - RNA, 19 nt, Artificial Sequence
  Description of Artificial Sequence: Synthetic oligonucleotide
  Antisense strand to SEQ ID NO: 936888
guuucccuuagagacaaau

SEQ ID NO: 936890 - RNA, 19 nt, Artificial Sequence
  Description of Artificial Sequence: Synthetic oligonucleotide
  Sense strand starting at position 3056 of SEQ ID NO: 913562
agacauggcugcuuucuau

SEQ ID NO: 936891 - RNA, 19 nt, Artificial Sequence
  Description of Artificial Sequence: Synthetic oligonucleotide
  Antisense strand to SEQ ID NO: 936890
auagaaagcagccaugucu

SEQ ID NO: 936892 - RNA, 19 nt, Artificial Sequence
  Description of Artificial Sequence: Synthetic oligonucleotide
  Sense strand starting at position 1160 of SEQ ID NO: 913562
auucuuaucuccguauacu

SEQ ID NO: 936893 - RNA, 19 nt, Artificial Sequence
  Description of Artificial Sequence: Synthetic oligonucleotide
  Antisense strand to SEQ ID NO: 936892
aguauacggagauaagaau

SEQ ID NO: 936894 - RNA, 19 nt, Artificial Sequence
  Description of Artificial Sequence: Synthetic oligonucleotide
  Sense strand starting at position 2923 of SEQ ID NO: 913562
agaugcucaugagaagaaa

SEQ ID NO: 936895 - RNA, 19 nt, Artificial Sequence
  Description of Artificial Sequence: Synthetic oligonucleotide
  Antisense strand to SEQ ID NO: 936894
uuucuucucaugagcaucu

SEQ ID NO: 936896 - RNA, 19 nt, Artificial Sequence
  Description of Artificial Sequence: Synthetic oligonucleotide
  Sense strand starting at position 771 of SEQ ID NO: 913562
cgugcagucagagagguuu

SEQ ID NO: 936897 - RNA, 19 nt, Artificial Sequence
  Description of Artificial Sequence: Synthetic oligonucleotide
  Antisense strand to SEQ ID NO: 936896
aaaccucucugacugcacg

SEQ ID NO: 936898 - RNA, 19 nt, Artificial Sequence
  Description of Artificial Sequence: Synthetic oligonucleotide
  Sense strand starting at position 3529 of SEQ ID NO: 913562
ugacccauuuccggaauga

SEQ ID NO: 936899 - RNA, 19 nt, Artificial Sequence
  Description of Artificial Sequence: Synthetic oligonucleotide
  Antisense strand to SEQ ID NO: 936898
ucauuccggaaauggguca

SEQ ID NO: 936900 - RNA, 19 nt, Artificial Sequence
  Description of Artificial Sequence: Synthetic oligonucleotide
  Sense strand starting at position 1156 of SEQ ID NO: 913562
guaaauucuuaucuccgua

SEQ ID NO: 936901 - RNA, 19 nt, Artificial Sequence
  Description of Artificial Sequence: Synthetic oligonucleotide
  Antisense strand to SEQ ID NO: 936900
uacggagauaagaauuuac

SEQ ID NO: 936902 - RNA, 19 nt, Artificial Sequence
  Description of Artificial Sequence: Synthetic oligonucleotide
  Sense strand starting at position 1171 of SEQ ID NO: 913562
cguauacuguacuucuaca

SEQ ID NO: 936903 - RNA, 19 nt, Artificial Sequence
  Description of Artificial Sequence: Synthetic oligonucleotide
  Antisense strand to SEQ ID NO: 936902
uguagaaguacaguauacg

SEQ ID NO: 936904 - RNA, 19 nt, Artificial Sequence
  Description of Artificial Sequence: Synthetic oligonucleotide
  Sense strand starting at position 123 of SEQ ID NO: 913562
ucauaacuacagcgucauu

SEQ ID NO: 936905 - RNA, 19 nt, Artificial Sequence
  Description of Artificial Sequence: Synthetic oligonucleotide
  Antisense strand to SEQ ID NO: 936904
aaugacgcuguaguuauga

SEQ ID NO: 936906 - RNA, 19 nt, Artificial Sequence
  Description of Artificial Sequence: Synthetic oligonucleotide
  Sense strand starting at position 47 of SEQ ID NO: 913563
ggagaaugcgcagauaaag

SEQ ID NO: 936907 - RNA, 19 nt, Artificial Sequence
  Description of Artificial Sequence: Synthetic oligonucleotide
  Antisense strand to SEQ ID NO: 936906
cuuuaucugcgcauucucc

SEQ ID NO: 936908 - RNA, 19 nt, Artificial Sequence
  Description of Artificial Sequence: Synthetic oligonucleotide
  Sense strand starting at position 3446 of SEQ ID NO: 913563
acaauucccugggcagaaa

SEQ ID NO: 936909 - RNA, 19 nt, Artificial Sequence
  Description of Artificial Sequence: Synthetic oligonucleotide
  Antisense strand to SEQ ID NO: 936908
uuucugcccagggaauugu

SEQ ID NO: 936910 - RNA, 19 nt, Artificial Sequence
  Description of Artificial Sequence: Synthetic oligonucleotide
  Sense strand starting at position 2350 of SEQ ID NO: 913563
caugcauuuguuuggagua

SEQ ID NO: 936911 - RNA, 19 nt, Artificial Sequence
  Description of Artificial Sequence: Synthetic oligonucleotide
  Antisense strand to SEQ ID NO: 936910
uacuccaaacaaaugcaug

SEQ ID NO: 936912 - RNA, 19 nt, Artificial Sequence
  Description of Artificial Sequence: Synthetic oligonucleotide
  Sense strand starting at position 2804 of SEQ ID NO: 913563
uguugaucccgggacacaa

SEQ ID NO: 936913 - RNA, 19 nt, Artificial Sequence
  Description of Artificial Sequence: Synthetic oligonucleotide
  Antisense strand to SEQ ID NO: 936912
uugugucccgggaucaaca

SEQ ID NO: 936914 - RNA, 19 nt, Artificial Sequence
  Description of Artificial Sequence: Synthetic oligonucleotide
  Sense strand starting at position 3344 of SEQ ID NO: 913563
cgaggugagaacugacaau

SEQ ID NO: 936915 - RNA, 19 nt, Artificial Sequence
  Description of Artificial Sequence: Synthetic oligonucleotide
  Antisense strand to SEQ ID NO: 936914
auugucaguucucaccucg

SEQ ID NO: 936916 - RNA, 19 nt, Artificial Sequence
  Description of Artificial Sequence: Synthetic oligonucleotide
  Sense strand starting at position 2899 of SEQ ID NO: 913563
gaagguaguccauagguau

SEQ ID NO: 936917 - RNA, 19 nt, Artificial Sequence
  Description of Artificial Sequence: Synthetic oligonucleotide
  Antisense strand to SEQ ID NO: 936916
auaccuauggacuaccuuc

SEQ ID NO: 936918 - RNA, 19 nt, Artificial Sequence
  Description of Artificial Sequence: Synthetic oligonucleotide
  Sense strand starting at position 2481 of SEQ ID NO: 913563
ccaguaguaccugaaucac

SEQ ID NO: 936919 - RNA, 19 nt, Artificial Sequence
  Description of Artificial Sequence: Synthetic oligonucleotide
  Antisense strand to SEQ ID NO: 936918
gugauucagguacuacugg

SEQ ID NO: 936920 - RNA, 19 nt, Artificial Sequence
  Description of Artificial Sequence: Synthetic oligonucleotide
  Sense strand starting at position 2362 of SEQ ID NO: 913563
uggaguaggguuuauguaa

SEQ ID NO: 936921 - RNA, 19 nt, Artificial Sequence
  Description of Artificial Sequence: Synthetic oligonucleotide
  Antisense strand to SEQ ID NO: 936920
uuacauaaacccuacucca

SEQ ID NO: 936922 - RNA, 19 nt, Artificial Sequence
  Description of Artificial Sequence: Synthetic oligonucleotide
  Sense strand starting at position 3445 of SEQ ID NO: 913563
gacaauucccugggcagaa

SEQ ID NO: 936923 - RNA, 19 nt, Artificial Sequence
  Description of Artificial Sequence: Synthetic oligonucleotide
  Antisense strand to SEQ ID NO: 936922
uucugcccagggaauuguc

SEQ ID NO: 936924 - RNA, 19 nt, Artificial Sequence
  Description of Artificial Sequence: Synthetic oligonucleotide
  Sense strand starting at position 2349 of SEQ ID NO: 913563
ccaugcauuuguuuggagu

SEQ ID NO: 936925 - RNA, 19 nt, Artificial Sequence
  Description of Artificial Sequence: Synthetic oligonucleotide
  Antisense strand to SEQ ID NO: 936924
acuccaaacaaaugcaugg

SEQ ID NO: 936926 - RNA, 19 nt, Artificial Sequence
  Description of Artificial Sequence: Synthetic oligonucleotide
  Sense strand starting at position 3444 of SEQ ID NO: 913563
ggacaauucccugggcaga

SEQ ID NO: 936927 - RNA, 19 nt, Artificial Sequence
  Description of Artificial Sequence: Synthetic oligonucleotide
  Antisense strand to SEQ ID NO: 936926
ucugcccagggaauugucc

SEQ ID NO: 936928 - RNA, 19 nt, Artificial Sequence
  Description of Artificial Sequence: Synthetic oligonucleotide
  Sense strand starting at position 3816 of SEQ ID NO: 913563
cuguuagaugcccaaccaa

SEQ ID NO: 936929 - RNA, 19 nt, Artificial Sequence
  Description of Artificial Sequence: Synthetic oligonucleotide
  Antisense strand to SEQ ID NO: 936928
uugguugggcaucuaacag

SEQ ID NO: 936930 - RNA, 19 nt, Artificial Sequence
  Description of Artificial Sequence: Synthetic oligonucleotide
  Sense strand starting at position 3852 of SEQ ID NO: 913563
gggaacaccucguuugaaa

SEQ ID NO: 936931 - RNA, 19 nt, Artificial Sequence
  Description of Artificial Sequence: Synthetic oligonucleotide
  Antisense strand to SEQ ID NO: 936930
uuucaaacgagguguuccc

SEQ ID NO: 936932 - RNA, 19 nt, Artificial Sequence
  Description of Artificial Sequence: Synthetic oligonucleotide
  Sense strand starting at position 3797 of SEQ ID NO: 913563
gaguccucuggccauaaua

SEQ ID NO: 936933 - RNA, 19 nt, Artificial Sequence
  Description of Artificial Sequence: Synthetic oligonucleotide
  Antisense strand to SEQ ID NO: 936932
uauuauggccagaggacuc

SEQ ID NO: 936934 - RNA, 19 nt, Artificial Sequence
  Description of Artificial Sequence: Synthetic oligonucleotide
  Sense strand starting at position 1743 of SEQ ID NO: 913563
gauccaauugcugaguuau

SEQ ID NO: 936935 - RNA, 19 nt, Artificial Sequence
  Description of Artificial Sequence: Synthetic oligonucleotide
  Antisense strand to SEQ ID NO: 936934
auaacucagcaauuggauc

SEQ ID NO: 936936 - RNA, 19 nt, Artificial Sequence
  Description of Artificial Sequence: Synthetic oligonucleotide
  Sense strand starting at position 3874 of SEQ ID NO: 913563
augacauuucugugugcuu

SEQ ID NO: 936937 - RNA, 19 nt, Artificial Sequence
  Description of Artificial Sequence: Synthetic oligonucleotide
  Antisense strand to SEQ ID NO: 936936
aagcacacagaaaugucau

SEQ ID NO: 936938 - RNA, 19 nt, Artificial Sequence
  Description of Artificial Sequence: Synthetic oligonucleotide
  Sense strand starting at position 3544 of SEQ ID NO: 913563
acaaguuuccucgauuacu

SEQ ID NO: 936939 - RNA, 19 nt, Artificial Sequence
  Description of Artificial Sequence: Synthetic oligonucleotide
  Antisense strand to SEQ ID NO: 936938
aguaaucgaggaaacuugu

SEQ ID NO: 936940 - RNA, 19 nt, Artificial Sequence
  Description of Artificial Sequence: Synthetic oligonucleotide
  Sense strand starting at position 3876 of SEQ ID NO: 913563
gacauuucugugugcuucu

SEQ ID NO: 936941 - RNA, 19 nt, Artificial Sequence
  Description of Artificial Sequence: Synthetic oligonucleotide
  Antisense strand to SEQ ID NO: 936940
agaagcacacagaaauguc

SEQ ID NO: 936942 - RNA, 19 nt, Artificial Sequence
  Description of Artificial Sequence: Synthetic oligonucleotide
  Sense strand starting at position 2442 of SEQ ID NO: 913563
ccucuugaugucugaugag

SEQ ID NO: 936943 - RNA, 19 nt, Artificial Sequence
  Description of Artificial Sequence: Synthetic oligonucleotide
  Antisense strand to SEQ ID NO: 936942
cucaucagacaucaagagg

SEQ ID NO: 936944 - RNA, 19 nt, Artificial Sequence
  Description of Artificial Sequence: Synthetic oligonucleotide
  Sense strand starting at position 2262 of SEQ ID NO: 913563
guugccaacccauaguuaa

SEQ ID NO: 936945 - RNA, 19 nt, Artificial Sequence
  Description of Artificial Sequence: Synthetic oligonucleotide
  Antisense strand to SEQ ID NO: 936944
uuaacuauggguuggcaac

SEQ ID NO: 936946 - RNA, 19 nt, Artificial Sequence
  Description of Artificial Sequence: Synthetic oligonucleotide
  Sense strand starting at position 2026 of SEQ ID NO: 913563
uuuauaauguguucugaga

SEQ ID NO: 936947 - RNA, 19 nt, Artificial Sequence
  Description of Artificial Sequence: Synthetic oligonucleotide
  Antisense strand to SEQ ID NO: 936946
ucucagaacacauuauaaa

SEQ ID NO: 936948 - RNA, 19 nt, Artificial Sequence
  Description of Artificial Sequence: Synthetic oligonucleotide
  Sense strand starting at position 3799 of SEQ ID NO: 913563
guccucuggccauaauacu

SEQ ID NO: 936949 - RNA, 19 nt, Artificial Sequence
  Description of Artificial Sequence: Synthetic oligonucleotide
  Antisense strand to SEQ ID NO: 936948
aguauuauggccagaggac

SEQ ID NO: 936950 - RNA, 19 nt, Artificial Sequence
  Description of Artificial Sequence: Synthetic oligonucleotide
  Sense strand starting at position 2659 of SEQ ID NO: 913563
auauauucuggcuguagaa

SEQ ID NO: 936951 - RNA, 19 nt, Artificial Sequence
  Description of Artificial Sequence: Synthetic oligonucleotide
  Antisense strand to SEQ ID NO: 936950
uucuacagccagaauauau

SEQ ID NO: 936952 - RNA, 19 nt, Artificial Sequence
  Description of Artificial Sequence: Synthetic oligonucleotide
  Sense strand starting at position 576 of SEQ ID NO: 913563
cgcccuaauccugaucuca

SEQ ID NO: 936953 - RNA, 19 nt, Artificial Sequence
  Description of Artificial Sequence: Synthetic oligonucleotide
  Antisense strand to SEQ ID NO: 936952
ugagaucaggauuagggcg

SEQ ID NO: 936954 - RNA, 19 nt, Artificial Sequence
  Description of Artificial Sequence: Synthetic oligonucleotide
  Sense strand starting at position 586 of SEQ ID NO: 913563
cugaucucauccuucggau

SEQ ID NO: 936955 - RNA, 19 nt, Artificial Sequence
  Description of Artificial Sequence: Synthetic oligonucleotide
  Antisense strand to SEQ ID NO: 936954
auccgaaggaugagaucag

SEQ ID NO: 936956 - RNA, 19 nt, Artificial Sequence
  Description of Artificial Sequence: Synthetic oligonucleotide
  Sense strand starting at position 2658 of SEQ ID NO: 913563
uauauauucuggcuguaga

SEQ ID NO: 936957 - RNA, 19 nt, Artificial Sequence
  Description of Artificial Sequence: Synthetic oligonucleotide
  Antisense strand to SEQ ID NO: 936956
ucuacagccagaauauaua

SEQ ID NO: 936958 - RNA, 19 nt, Artificial Sequence
  Description of Artificial Sequence: Synthetic oligonucleotide
  Sense strand starting at position 1712 of SEQ ID NO: 913563
gucugcaaaugaguugaau

SEQ ID NO: 936959 - RNA, 19 nt, Artificial Sequence
  Description of Artificial Sequence: Synthetic oligonucleotide
  Antisense strand to SEQ ID NO: 936958
auucaacucauuugcagac

SEQ ID NO: 936960 - RNA, 19 nt, Artificial Sequence
  Description of Artificial Sequence: Synthetic oligonucleotide
  Sense strand starting at position 2192 of SEQ ID NO: 913563
ggaguuggacugugucaac

SEQ ID NO: 936961 - RNA, 19 nt, Artificial Sequence
  Description of Artificial Sequence: Synthetic oligonucleotide
  Antisense strand to SEQ ID NO: 936960
guugacacaguccaacucc

SEQ ID NO: 936962 - RNA, 19 nt, Artificial Sequence
  Description of Artificial Sequence: Synthetic oligonucleotide
  Sense strand starting at position 3542 of SEQ ID NO: 913563
ccacaaguuuccucgauua

SEQ ID NO: 936963 - RNA, 19 nt, Artificial Sequence
  Description of Artificial Sequence: Synthetic oligonucleotide
  Antisense strand to SEQ ID NO: 936962
uaaucgaggaaacuugugg

SEQ ID NO: 936964 - RNA, 19 nt, Artificial Sequence
  Description of Artificial Sequence: Synthetic oligonucleotide
  Sense strand starting at position 3571 of SEQ ID NO: 913563
cuucuagugcuugagagca

SEQ ID NO: 936965 - RNA, 19 nt, Artificial Sequence
  Description of Artificial Sequence: Synthetic oligonucleotide
  Antisense strand to SEQ ID NO: 936964
ugcucucaagcacuagaag

SEQ ID NO: 936966 - RNA, 19 nt, Artificial Sequence
  Description of Artificial Sequence: Synthetic oligonucleotide
  Sense strand starting at position 3850 of SEQ ID NO: 913563
acgggaacaccucguuuga

SEQ ID NO: 936967 - RNA, 19 nt, Artificial Sequence
  Description of Artificial Sequence: Synthetic oligonucleotide
  Antisense strand to SEQ ID NO: 936966
ucaaacgagguguucccgu

SEQ ID NO: 936968 - RNA, 19 nt, Artificial Sequence
  Description of Artificial Sequence: Synthetic oligonucleotide
  Sense strand starting at position 1783 of SEQ ID NO: 913563
uucucuuacccgggugaag

SEQ ID NO: 936969 - RNA, 19 nt, Artificial Sequence
  Description of Artificial Sequence: Synthetic oligonucleotide
  Antisense strand to SEQ ID NO: 936968
cuucacccggguaagagaa

SEQ ID NO: 936970 - RNA, 19 nt, Artificial Sequence
  Description of Artificial Sequence: Synthetic oligonucleotide
  Sense strand starting at position 3796 of SEQ ID NO: 913563
ugaguccucuggccauaau

SEQ ID NO: 936971 - RNA, 19 nt, Artificial Sequence
  Description of Artificial Sequence: Synthetic oligonucleotide
  Antisense strand to SEQ ID NO: 936970
auuauggccagaggacuca

SEQ ID NO: 936972 - RNA, 19 nt, Artificial Sequence
  Description of Artificial Sequence: Synthetic oligonucleotide
  Sense strand starting at position 2791 of SEQ ID NO: 913563
gauaucuugucuuuguuga

SEQ ID NO: 936973 - RNA, 19 nt, Artificial Sequence
  Description of Artificial Sequence: Synthetic oligonucleotide
  Antisense strand to SEQ ID NO: 936972
ucaacaaagacaagauauc

SEQ ID NO: 936974 - RNA, 19 nt, Artificial Sequence
  Description of Artificial Sequence: Synthetic oligonucleotide
  Sense strand starting at position 2936 of SEQ ID NO: 913563
gugugugguuagaaugaag

SEQ ID NO: 936975 - RNA, 19 nt, Artificial Sequence
  Description of Artificial Sequence: Synthetic oligonucleotide
  Antisense strand to SEQ ID NO: 936974
cuucauucuaaccacacac

SEQ ID NO: 936976 - RNA, 19 nt, Artificial Sequence
  Description of Artificial Sequence: Synthetic oligonucleotide
  Sense strand starting at position 2441 of SEQ ID NO: 913563
gccucuugaugucugauga

SEQ ID NO: 936977 - RNA, 19 nt, Artificial Sequence
  Description of Artificial Sequence: Synthetic oligonucleotide
  Antisense strand to SEQ ID NO: 936976
ucaucagacaucaagaggc

SEQ ID NO: 936978 - RNA, 19 nt, Artificial Sequence
  Description of Artificial Sequence: Synthetic oligonucleotide
  Sense strand starting at position 1782 of SEQ ID NO: 913563
uuucucuuacccgggugaa

SEQ ID NO: 936979 - RNA, 19 nt, Artificial Sequence
  Description of Artificial Sequence: Synthetic oligonucleotide
  Antisense strand to SEQ ID NO: 936978
uucacccggguaagagaaa

SEQ ID NO: 936980 - RNA, 19 nt, Artificial Sequence
  Description of Artificial Sequence: Synthetic oligonucleotide
  Sense strand starting at position 3541 of SEQ ID NO: 913563
uccacaaguuuccucgauu

SEQ ID NO: 936981 - RNA, 19 nt, Artificial Sequence
  Description of Artificial Sequence: Synthetic oligonucleotide
  Antisense strand to SEQ ID NO: 936980
aaucgaggaaacuugugga

SEQ ID NO: 936982 - RNA, 19 nt, Artificial Sequence
  Description of Artificial Sequence: Synthetic oligonucleotide
  Sense strand starting at position 2306 of SEQ ID NO: 913563
cccuuuggcacugguuaga

SEQ ID NO: 936983 - RNA, 19 nt, Artificial Sequence
  Description of Artificial Sequence: Synthetic oligonucleotide
  Antisense strand to SEQ ID NO: 936982
ucuaaccagugccaaaggg

SEQ ID NO: 936984 - RNA, 19 nt, Artificial Sequence
  Description of Artificial Sequence: Synthetic oligonucleotide
  Sense strand starting at position 1745 of SEQ ID NO: 913563
uccaauugcugaguuauuc

SEQ ID NO: 936985 - RNA, 19 nt, Artificial Sequence
  Description of Artificial Sequence: Synthetic oligonucleotide
  Antisense strand to SEQ ID NO: 936984
gaauaacucagcaauugga

SEQ ID NO: 936986 - RNA, 19 nt, Artificial Sequence
  Description of Artificial Sequence: Synthetic oligonucleotide
  Sense strand starting at position 3593 of SEQ ID NO: 913564
uggauuugcugguuucuua

SEQ ID NO: 936987 - RNA, 19 nt, Artificial Sequence
  Description of Artificial Sequence: Synthetic oligonucleotide
  Antisense strand to SEQ ID NO: 936986
uaagaaaccagcaaaucca

SEQ ID NO: 936988 - RNA, 19 nt, Artificial Sequence
  Description of Artificial Sequence: Synthetic oligonucleotide
  Sense strand starting at position 924 of SEQ ID NO: 913564
aguguugguaaugaacaua

SEQ ID NO: 936989 - RNA, 19 nt, Artificial Sequence
  Description of Artificial Sequence: Synthetic oligonucleotide
  Antisense strand to SEQ ID NO: 936988
uauguucauuaccaacacu

SEQ ID NO: 936990 - RNA, 19 nt, Artificial Sequence
  Description of Artificial Sequence: Synthetic oligonucleotide
  Sense strand starting at position 3884 of SEQ ID NO: 913564
uuggauguggcagaauuca

SEQ ID NO: 936991 - RNA, 19 nt, Artificial Sequence
  Description of Artificial Sequence: Synthetic oligonucleotide
  Antisense strand to SEQ ID NO: 936990
ugaauucugccacauccaa

SEQ ID NO: 936992 - RNA, 19 nt, Artificial Sequence
  Description of Artificial Sequence: Synthetic oligonucleotide
  Sense strand starting at position 3732 of SEQ ID NO: 913564
agauauucccggcagggau

SEQ ID NO: 936993 - RNA, 19 nt, Artificial Sequence
  Description of Artificial Sequence: Synthetic oligonucleotide
  Antisense strand to SEQ ID NO: 936992
aucccugccgggaauaucu

SEQ ID NO: 936994 - RNA, 19 nt, Artificial Sequence
  Description of Artificial Sequence: Synthetic oligonucleotide
  Sense strand starting at position 1153 of SEQ ID NO: 913564
uuaaucuuagaacgagauu

SEQ ID NO: 936995 - RNA, 19 nt, Artificial Sequence
  Description of Artificial Sequence: Synthetic oligonucleotide
  Antisense strand to SEQ ID NO: 936994
aaucucguucuaagauuaa

SEQ ID NO: 936996 - RNA, 19 nt, Artificial Sequence
  Description of Artificial Sequence: Synthetic oligonucleotide
  Sense strand starting at position 48 of SEQ ID NO: 913564
gaaaguacccagcauagua

SEQ ID NO: 936997 - RNA, 19 nt, Artificial Sequence
  Description of Artificial Sequence: Synthetic oligonucleotide
  Antisense strand to SEQ ID NO: 936996
uacuaugcuggguacuuuc

SEQ ID NO: 936998 - RNA, 19 nt, Artificial Sequence
  Description of Artificial Sequence: Synthetic oligonucleotide
  Sense strand starting at position 3800 of SEQ ID NO: 913564
uuuggaugggaguagcauu

SEQ ID NO: 936999 - RNA, 19 nt, Artificial Sequence
  Description of Artificial Sequence: Synthetic oligonucleotide
  Antisense strand to SEQ ID NO: 936998
aaugcuacucccauccaaa

SEQ ID NO: 937000 - RNA, 19 nt, Artificial Sequence
  Description of Artificial Sequence: Synthetic oligonucleotide
  Sense strand starting at position 2910 of SEQ ID NO: 913564
uggacacuccgugaauauu

SEQ ID NO: 937001 - RNA, 19 nt, Artificial Sequence
  Description of Artificial Sequence: Synthetic oligonucleotide
  Antisense strand to SEQ ID NO: 937000
aauauucacggagugucca

SEQ ID NO: 937002 - RNA, 19 nt, Artificial Sequence
  Description of Artificial Sequence: Synthetic oligonucleotide
  Sense strand starting at position 22 of SEQ ID NO: 913564
gugaaaguuggguaaguag

SEQ ID NO: 937003 - RNA, 19 nt, Artificial Sequence
  Description of Artificial Sequence: Synthetic oligonucleotide
  Antisense strand to SEQ ID NO: 937002
cuacuuacccaacuuucac

SEQ ID NO: 937004 - RNA, 19 nt, Artificial Sequence
  Description of Artificial Sequence: Synthetic oligonucleotide
  Sense strand starting at position 1260 of SEQ ID NO: 913564
gggcuuaacagguauccca

SEQ ID NO: 937005 - RNA, 19 nt, Artificial Sequence
  Description of Artificial Sequence: Synthetic oligonucleotide
  Antisense strand to SEQ ID NO: 937004
ugggauaccuguuaagccc

SEQ ID NO: 937006 - RNA, 19 nt, Artificial Sequence
  Description of Artificial Sequence: Synthetic oligonucleotide
  Sense strand starting at position 1037 of SEQ ID NO: 913564
gaaguucuccauuaugggu

SEQ ID NO: 937007 - RNA, 19 nt, Artificial Sequence
  Description of Artificial Sequence: Synthetic oligonucleotide
  Antisense strand to SEQ ID NO: 937006
acccauaauggagaacuuc

SEQ ID NO: 937008 - RNA, 19 nt, Artificial Sequence
  Description of Artificial Sequence: Synthetic oligonucleotide
  Sense strand starting at position 1890 of SEQ ID NO: 913564
gcgccagucacuuccaguu

SEQ ID NO: 937009 - RNA, 19 nt, Artificial Sequence
  Description of Artificial Sequence: Synthetic oligonucleotide
  Antisense strand to SEQ ID NO: 937008
aacuggaagugacuggcgc

SEQ ID NO: 937010 - RNA, 19 nt, Artificial Sequence
  Description of Artificial Sequence: Synthetic oligonucleotide
  Sense strand starting at position 549 of SEQ ID NO: 913564
gcaacagaagucugacaac

SEQ ID NO: 937011 - RNA, 19 nt, Artificial Sequence
  Description of Artificial Sequence: Synthetic oligonucleotide
  Antisense strand to SEQ ID NO: 937010
guugucagacuucuguugc

SEQ ID NO: 937012 - RNA, 19 nt, Artificial Sequence
  Description of Artificial Sequence: Synthetic oligonucleotide
  Sense strand starting at position 374 of SEQ ID NO: 913564
cugcccuaucaaugaggaa

SEQ ID NO: 937013 - RNA, 19 nt, Artificial Sequence
  Description of Artificial Sequence: Synthetic oligonucleotide
  Antisense strand to SEQ ID NO: 937012
uuccucauugauagggcag

SEQ ID NO: 937014 - RNA, 19 nt, Artificial Sequence
  Description of Artificial Sequence: Synthetic oligonucleotide
  Sense strand starting at position 3692 of SEQ ID NO: 913564
uuaaauccuggccauguga

SEQ ID NO: 937015 - RNA, 19 nt, Artificial Sequence
  Description of Artificial Sequence: Synthetic oligonucleotide
  Antisense strand to SEQ ID NO: 937014
ucacauggccaggauuuaa

SEQ ID NO: 937016 - RNA, 19 nt, Artificial Sequence
  Description of Artificial Sequence: Synthetic oligonucleotide
  Sense strand starting at position 1034 of SEQ ID NO: 913564
ugugaaguucuccauuaug

SEQ ID NO: 937017 - RNA, 19 nt, Artificial Sequence
  Description of Artificial Sequence: Synthetic oligonucleotide
  Antisense strand to SEQ ID NO: 937016
cauaauggagaacuucaca

SEQ ID NO: 937018 - RNA, 19 nt, Artificial Sequence
  Description of Artificial Sequence: Synthetic oligonucleotide
  Sense strand starting at position 9 of SEQ ID NO: 913564
uuauauggugauugugaaa

SEQ ID NO: 937019 - RNA, 19 nt, Artificial Sequence
  Description of Artificial Sequence: Synthetic oligonucleotide
  Antisense strand to SEQ ID NO: 937018
uuucacaaucaccauauaa

SEQ ID NO: 937020 - RNA, 19 nt, Artificial Sequence
  Description of Artificial Sequence: Synthetic oligonucleotide
  Sense strand starting at position 2084 of SEQ ID NO: 913564
uuuauuuguguucgaaagu

SEQ ID NO: 937021 - RNA, 19 nt, Artificial Sequence
  Description of Artificial Sequence: Synthetic oligonucleotide
  Antisense strand to SEQ ID NO: 937020
acuuucgaacacaaauaaa

SEQ ID NO: 937022 - RNA, 19 nt, Artificial Sequence
  Description of Artificial Sequence: Synthetic oligonucleotide
  Sense strand starting at position 3902 of SEQ ID NO: 913564
aguuaucucaugggaggua

SEQ ID NO: 937023 - RNA, 19 nt, Artificial Sequence
  Description of Artificial Sequence: Synthetic oligonucleotide
  Antisense strand to SEQ ID NO: 937022
uaccucccaugagauaacu

SEQ ID NO: 937024 - RNA, 19 nt, Artificial Sequence
  Description of Artificial Sequence: Synthetic oligonucleotide
  Sense strand starting at position 3795 of SEQ ID NO: 913564
ccuucuuuggaugggagua

SEQ ID NO: 937025 - RNA, 19 nt, Artificial Sequence
  Description of Artificial Sequence: Synthetic oligonucleotide
  Antisense strand to SEQ ID NO: 937024
uacucccauccaaagaagg

SEQ ID NO: 937026 - RNA, 19 nt, Artificial Sequence
  Description of Artificial Sequence: Synthetic oligonucleotide
  Sense strand starting at position 18 of SEQ ID NO: 913564
gauugugaaaguuggguaa

SEQ ID NO: 937027 - RNA, 19 nt, Artificial Sequence
  Description of Artificial Sequence: Synthetic oligonucleotide
  Antisense strand to SEQ ID NO: 937026
uuacccaacuuucacaauc

SEQ ID NO: 937028 - RNA, 19 nt, Artificial Sequence
  Description of Artificial Sequence: Synthetic oligonucleotide
  Sense strand starting at position 8 of SEQ ID NO: 913564
cuuauauggugauugugaa

SEQ ID NO: 937029 - RNA, 19 nt, Artificial Sequence
  Description of Artificial Sequence: Synthetic oligonucleotide
  Antisense strand to SEQ ID NO: 937028
uucacaaucaccauauaag

SEQ ID NO: 937030 - RNA, 19 nt, Artificial Sequence
  Description of Artificial Sequence: Synthetic oligonucleotide
  Sense strand starting at position 3871 of SEQ ID NO: 913564
uauaguuaauugguuggau

SEQ ID NO: 937031 - RNA, 19 nt, Artificial Sequence
  Description of Artificial Sequence: Synthetic oligonucleotide
  Antisense strand to SEQ ID NO: 937030
auccaaccaauuaacuaua

SEQ ID NO: 937032 - RNA, 19 nt, Artificial Sequence
  Description of Artificial Sequence: Synthetic oligonucleotide
  Sense strand starting at position 245 of SEQ ID NO: 913564
acugaauugguaugucuga

SEQ ID NO: 937033 - RNA, 19 nt, Artificial Sequence
  Description of Artificial Sequence: Synthetic oligonucleotide
  Antisense strand to SEQ ID NO: 937032
ucagacauaccaauucagu

SEQ ID NO: 937034 - RNA, 19 nt, Artificial Sequence
  Description of Artificial Sequence: Synthetic oligonucleotide
  Sense strand starting at position 759 of SEQ ID NO: 913564
ucggaaaugucuucuaaca

SEQ ID NO: 937035 - RNA, 19 nt, Artificial Sequence
  Description of Artificial Sequence: Synthetic oligonucleotide
  Antisense strand to SEQ ID NO: 937034
uguuagaagacauuuccga

SEQ ID NO: 937036 - RNA, 19 nt, Artificial Sequence
  Description of Artificial Sequence: Synthetic oligonucleotide
  Sense strand starting at position 33 of SEQ ID NO: 913564
guaaguagacagugugaaa

SEQ ID NO: 937037 - RNA, 19 nt, Artificial Sequence
  Description of Artificial Sequence: Synthetic oligonucleotide
  Antisense strand to SEQ ID NO: 937036
uuucacacugucuacuuac

SEQ ID NO: 937038 - RNA, 19 nt, Artificial Sequence
  Description of Artificial Sequence: Synthetic oligonucleotide
  Sense strand starting at position 3901 of SEQ ID NO: 913564
caguuaucucaugggaggu

SEQ ID NO: 937039 - RNA, 19 nt, Artificial Sequence
  Description of Artificial Sequence: Synthetic oligonucleotide
  Antisense strand to SEQ ID NO: 937038
accucccaugagauaacug

SEQ ID NO: 937040 - RNA, 19 nt, Artificial Sequence
  Description of Artificial Sequence: Synthetic oligonucleotide
  Sense strand starting at position 748 of SEQ ID NO: 913564
aaaugucuucuucggaaau

SEQ ID NO: 937041 - RNA, 19 nt, Artificial Sequence
  Description of Artificial Sequence: Synthetic oligonucleotide
  Antisense strand to SEQ ID NO: 937040
auuuccgaagaagacauuu

SEQ ID NO: 937042 - RNA, 19 nt, Artificial Sequence
  Description of Artificial Sequence: Synthetic oligonucleotide
  Sense strand starting at position 2908 of SEQ ID NO: 913564
aguggacacuccgugaaua

SEQ ID NO: 937043 - RNA, 19 nt, Artificial Sequence
  Description of Artificial Sequence: Synthetic oligonucleotide
  Antisense strand to SEQ ID NO: 937042
uauucacggaguguccacu

SEQ ID NO: 937044 - RNA, 19 nt, Artificial Sequence
  Description of Artificial Sequence: Synthetic oligonucleotide
  Sense strand starting at position 1954 of SEQ ID NO: 913564
agggucuuggcgggaacaa

SEQ ID NO: 937045 - RNA, 19 nt, Artificial Sequence
  Description of Artificial Sequence: Synthetic oligonucleotide
  Antisense strand to SEQ ID NO: 937044
uuguucccgccaagacccu

SEQ ID NO: 937046 - RNA, 19 nt, Artificial Sequence
  Description of Artificial Sequence: Synthetic oligonucleotide
  Sense strand starting at position 252 of SEQ ID NO: 913564
ugguaugucugaccuaaug

SEQ ID NO: 937047 - RNA, 19 nt, Artificial Sequence
  Description of Artificial Sequence: Synthetic oligonucleotide
  Antisense strand to SEQ ID NO: 937046
cauuaggucagacauacca

SEQ ID NO: 937048 - RNA, 19 nt, Artificial Sequence
  Description of Artificial Sequence: Synthetic oligonucleotide
  Sense strand starting at position 1162 of SEQ ID NO: 913564
gaacgagauuuguaacauu

SEQ ID NO: 937049 - RNA, 19 nt, Artificial Sequence
  Description of Artificial Sequence: Synthetic oligonucleotide
  Antisense strand to SEQ ID NO: 937048
aauguuacaaaucucguuc

SEQ ID NO: 937050 - RNA, 19 nt, Artificial Sequence
  Description of Artificial Sequence: Synthetic oligonucleotide
  Sense strand starting at position 3466 of SEQ ID NO: 913564
ucuauaucccagugaggug

SEQ ID NO: 937051 - RNA, 19 nt, Artificial Sequence
  Description of Artificial Sequence: Synthetic oligonucleotide
  Antisense strand to SEQ ID NO: 937050
caccucacugggauauaga

SEQ ID NO: 937052 - RNA, 19 nt, Artificial Sequence
  Description of Artificial Sequence: Synthetic oligonucleotide
  Sense strand starting at position 746 of SEQ ID NO: 913564
ccaaaugucuucuucggaa

SEQ ID NO: 937053 - RNA, 19 nt, Artificial Sequence
  Description of Artificial Sequence: Synthetic oligonucleotide
  Antisense strand to SEQ ID NO: 937052
uuccgaagaagacauuugg

SEQ ID NO: 937054 - RNA, 19 nt, Artificial Sequence
  Description of Artificial Sequence: Synthetic oligonucleotide
  Sense strand starting at position 1915 of SEQ ID NO: 913564
gccuucucucuggagguua

SEQ ID NO: 937055 - RNA, 19 nt, Artificial Sequence
  Description of Artificial Sequence: Synthetic oligonucleotide
  Antisense strand to SEQ ID NO: 937054
uaaccuccagagagaaggc

SEQ ID NO: 937056 - RNA, 19 nt, Artificial Sequence
  Description of Artificial Sequence: Synthetic oligonucleotide
  Sense strand starting at position 21 of SEQ ID NO: 913564
ugugaaaguuggguaagua

SEQ ID NO: 937057 - RNA, 19 nt, Artificial Sequence
  Description of Artificial Sequence: Synthetic oligonucleotide
  Antisense strand to SEQ ID NO: 937056
uacuuacccaacuuucaca

SEQ ID NO: 937058 - RNA, 19 nt, Artificial Sequence
  Description of Artificial Sequence: Synthetic oligonucleotide
  Sense strand starting at position 697 of SEQ ID NO: 913564
agccauuauuuggaucaac

SEQ ID NO: 937059 - RNA, 19 nt, Artificial Sequence
  Description of Artificial Sequence: Synthetic oligonucleotide
  Antisense strand to SEQ ID NO: 937058
guugauccaaauaauggcu

SEQ ID NO: 937060 - RNA, 19 nt, Artificial Sequence
  Description of Artificial Sequence: Synthetic oligonucleotide
  Sense strand starting at position 3941 of SEQ ID NO: 913564
aacagaguauuggugucuu

SEQ ID NO: 937061 - RNA, 19 nt, Artificial Sequence
  Description of Artificial Sequence: Synthetic oligonucleotide
  Antisense strand to SEQ ID NO: 937060
aagacaccaauacucuguu

SEQ ID NO: 937062 - RNA, 19 nt, Artificial Sequence
  Description of Artificial Sequence: Synthetic oligonucleotide
  Sense strand starting at position 368 of SEQ ID NO: 913564
aggugucugcccuaucaau

SEQ ID NO: 937063 - RNA, 19 nt, Artificial Sequence
  Description of Artificial Sequence: Synthetic oligonucleotide
  Antisense strand to SEQ ID NO: 937062
auugauagggcagacaccu

SEQ ID NO: 937064 - RNA, 19 nt, Artificial Sequence
  Description of Artificial Sequence: Synthetic oligonucleotide
  Sense strand starting at position 3689 of SEQ ID NO: 913564
gguuuaaauccuggccaug

SEQ ID NO: 937065 - RNA, 19 nt, Artificial Sequence
  Description of Artificial Sequence: Synthetic oligonucleotide
  Antisense strand to SEQ ID NO: 937064
cauggccaggauuuaaacc

SEQ ID NO: 937066 - RNA, 19 nt, Artificial Sequence
  Description of Artificial Sequence: Synthetic oligonucleotide
  Sense strand starting at position 3781 of SEQ ID NO: 913565
uggauuugcugguuucuua

SEQ ID NO: 937067 - RNA, 19 nt, Artificial Sequence
  Description of Artificial Sequence: Synthetic oligonucleotide
  Antisense strand to SEQ ID NO: 937066
uaagaaaccagcaaaucca

SEQ ID NO: 937068 - RNA, 19 nt, Artificial Sequence
  Description of Artificial Sequence: Synthetic oligonucleotide
  Sense strand starting at position 1112 of SEQ ID NO: 913565
aguguugguaaugaacaua

SEQ ID NO: 937069 - RNA, 19 nt, Artificial Sequence
  Description of Artificial Sequence: Synthetic oligonucleotide
  Antisense strand to SEQ ID NO: 937068
uauguucauuaccaacacu

SEQ ID NO: 937070 - RNA, 19 nt, Artificial Sequence
  Description of Artificial Sequence: Synthetic oligonucleotide
  Sense strand starting at position 3920 of SEQ ID NO: 913565
agauauucccggcagggau

SEQ ID NO: 937071 - RNA, 19 nt, Artificial Sequence
  Description of Artificial Sequence: Synthetic oligonucleotide
  Antisense strand to SEQ ID NO: 937070
aucccugccgggaauaucu

SEQ ID NO: 937072 - RNA, 19 nt, Artificial Sequence
  Description of Artificial Sequence: Synthetic oligonucleotide
  Sense strand starting at position 1341 of SEQ ID NO: 913565
uuaaucuuagaacgagauu

SEQ ID NO: 937073 - RNA, 19 nt, Artificial Sequence
  Description of Artificial Sequence: Synthetic oligonucleotide
  Antisense strand to SEQ ID NO: 937072
aaucucguucuaagauuaa

SEQ ID NO: 937074 - RNA, 19 nt, Artificial Sequence
  Description of Artificial Sequence: Synthetic oligonucleotide
  Sense strand starting at position 236 of SEQ ID NO: 913565
gaaaguacccagcauagua

SEQ ID NO: 937075 - RNA, 19 nt, Artificial Sequence
  Description of Artificial Sequence: Synthetic oligonucleotide
  Antisense strand to SEQ ID NO: 937074
uacuaugcuggguacuuuc

SEQ ID NO: 937076 - RNA, 19 nt, Artificial Sequence
  Description of Artificial Sequence: Synthetic oligonucleotide
  Sense strand starting at position 3098 of SEQ ID NO: 913565
uggacacuccgugaauauu

SEQ ID NO: 937077 - RNA, 19 nt, Artificial Sequence
  Description of Artificial Sequence: Synthetic oligonucleotide
  Antisense strand to SEQ ID NO: 937076
aauauucacggagugucca

SEQ ID NO: 937078 - RNA, 19 nt, Artificial Sequence
  Description of Artificial Sequence: Synthetic oligonucleotide
  Sense strand starting at position 210 of SEQ ID NO: 913565
gugaaaguuggguaaguag

SEQ ID NO: 937079 - RNA, 19 nt, Artificial Sequence
  Description of Artificial Sequence: Synthetic oligonucleotide
  Antisense strand to SEQ ID NO: 937078
cuacuuacccaacuuucac

SEQ ID NO: 937080 - RNA, 19 nt, Artificial Sequence
  Description of Artificial Sequence: Synthetic oligonucleotide
  Sense strand starting at position 1448 of SEQ ID NO: 913565
gggcuuaacagguauccca

SEQ ID NO: 937081 - RNA, 19 nt, Artificial Sequence
  Description of Artificial Sequence: Synthetic oligonucleotide
  Antisense strand to SEQ ID NO: 937080
ugggauaccuguuaagccc

SEQ ID NO: 937082 - RNA, 19 nt, Artificial Sequence
  Description of Artificial Sequence: Synthetic oligonucleotide
  Sense strand starting at position 1225 of SEQ ID NO: 913565
gaaguucuccauuaugggu

SEQ ID NO: 937083 - RNA, 19 nt, Artificial Sequence
  Description of Artificial Sequence: Synthetic oligonucleotide
  Antisense strand to SEQ ID NO: 937082
acccauaauggagaacuuc

SEQ ID NO: 937084 - RNA, 19 nt, Artificial Sequence
  Description of Artificial Sequence: Synthetic oligonucleotide
  Sense strand starting at position 2078 of SEQ ID NO: 913565
gcgccagucacuuccaguu

SEQ ID NO: 937085 - RNA, 19 nt, Artificial Sequence
  Description of Artificial Sequence: Synthetic oligonucleotide
  Antisense strand to SEQ ID NO: 937084
aacuggaagugacuggcgc

SEQ ID NO: 937086 - RNA, 19 nt, Artificial Sequence
  Description of Artificial Sequence: Synthetic oligonucleotide
  Sense strand starting at position 139 of SEQ ID NO: 913565
uggacaaguuaucugacuu

SEQ ID NO: 937087 - RNA, 19 nt, Artificial Sequence
  Description of Artificial Sequence: Synthetic oligonucleotide
  Antisense strand to SEQ ID NO: 937086
aagucagauaacuugucca

SEQ ID NO: 937088 - RNA, 19 nt, Artificial Sequence
  Description of Artificial Sequence: Synthetic oligonucleotide
  Sense strand starting at position 138 of SEQ ID NO: 913565
uuggacaaguuaucugacu

SEQ ID NO: 937089 - RNA, 19 nt, Artificial Sequence
  Description of Artificial Sequence: Synthetic oligonucleotide
  Antisense strand to SEQ ID NO: 937088
agucagauaacuuguccaa

SEQ ID NO: 937090 - RNA, 19 nt, Artificial Sequence
  Description of Artificial Sequence: Synthetic oligonucleotide
  Sense strand starting at position 737 of SEQ ID NO: 913565
gcaacagaagucugacaac

SEQ ID NO: 937091 - RNA, 19 nt, Artificial Sequence
  Description of Artificial Sequence: Synthetic oligonucleotide
  Antisense strand to SEQ ID NO: 937090
guugucagacuucuguugc

SEQ ID NO: 937092 - RNA, 19 nt, Artificial Sequence
  Description of Artificial Sequence: Synthetic oligonucleotide
  Sense strand starting at position 562 of SEQ ID NO: 913565
cugcccuaucaaugaggaa

SEQ ID NO: 937093 - RNA, 19 nt, Artificial Sequence
  Description of Artificial Sequence: Synthetic oligonucleotide
  Antisense strand to SEQ ID NO: 937092
uuccucauugauagggcag

SEQ ID NO: 937094 - RNA, 19 nt, Artificial Sequence
  Description of Artificial Sequence: Synthetic oligonucleotide
  Sense strand starting at position 3880 of SEQ ID NO: 913565
uuaaauccuggccauguga

SEQ ID NO: 937095 - RNA, 19 nt, Artificial Sequence
  Description of Artificial Sequence: Synthetic oligonucleotide
  Antisense strand to SEQ ID NO: 937094
ucacauggccaggauuuaa

SEQ ID NO: 937096 - RNA, 19 nt, Artificial Sequence
  Description of Artificial Sequence: Synthetic oligonucleotide
  Sense strand starting at position 1222 of SEQ ID NO: 913565
ugugaaguucuccauuaug

SEQ ID NO: 937097 - RNA, 19 nt, Artificial Sequence
  Description of Artificial Sequence: Synthetic oligonucleotide
  Antisense strand to SEQ ID NO: 937096
cauaauggagaacuucaca

SEQ ID NO: 937098 - RNA, 19 nt, Artificial Sequence
  Description of Artificial Sequence: Synthetic oligonucleotide
  Sense strand starting at position 197 of SEQ ID NO: 913565
uuauauggugauugugaaa

SEQ ID NO: 937099 - RNA, 19 nt, Artificial Sequence
  Description of Artificial Sequence: Synthetic oligonucleotide
  Antisense strand to SEQ ID NO: 937098
uuucacaaucaccauauaa

SEQ ID NO: 937100 - RNA, 19 nt, Artificial Sequence
  Description of Artificial Sequence: Synthetic oligonucleotide
  Sense strand starting at position 2272 of SEQ ID NO: 913565
uuuauuuguguucgaaagu

SEQ ID NO: 937101 - RNA, 19 nt, Artificial Sequence
  Description of Artificial Sequence: Synthetic oligonucleotide
  Antisense strand to SEQ ID NO: 937100
acuuucgaacacaaauaaa

SEQ ID NO: 937102 - RNA, 19 nt, Artificial Sequence
  Description of Artificial Sequence: Synthetic oligonucleotide
  Sense strand starting at position 3983 of SEQ ID NO: 913565
ccuucuuuggaugggagua

SEQ ID NO: 937103 - RNA, 19 nt, Artificial Sequence
  Description of Artificial Sequence: Synthetic oligonucleotide
  Antisense strand to SEQ ID NO: 937102
uacucccauccaaagaagg

SEQ ID NO: 937104 - RNA, 19 nt, Artificial Sequence
  Description of Artificial Sequence: Synthetic oligonucleotide
  Sense strand starting at position 206 of SEQ ID NO: 913565
gauugugaaaguuggguaa

SEQ ID NO: 937105 - RNA, 19 nt, Artificial Sequence
  Description of Artificial Sequence: Synthetic oligonucleotide
  Antisense strand to SEQ ID NO: 937104
uuacccaacuuucacaauc

SEQ ID NO: 937106 - RNA, 19 nt, Artificial Sequence
  Description of Artificial Sequence: Synthetic oligonucleotide
  Sense strand starting at position 196 of SEQ ID NO: 913565
cuuauauggugauugugaa

SEQ ID NO: 937107 - RNA, 19 nt, Artificial Sequence
  Description of Artificial Sequence: Synthetic oligonucleotide
  Antisense strand to SEQ ID NO: 937106
uucacaaucaccauauaag

SEQ ID NO: 937108 - RNA, 19 nt, Artificial Sequence
  Description of Artificial Sequence: Synthetic oligonucleotide
  Sense strand starting at position 433 of SEQ ID NO: 913565
acugaauugguaugucuga

SEQ ID NO: 937109 - RNA, 19 nt, Artificial Sequence
  Description of Artificial Sequence: Synthetic oligonucleotide
  Antisense strand to SEQ ID NO: 937108
ucagacauaccaauucagu

SEQ ID NO: 937110 - RNA, 19 nt, Artificial Sequence
  Description of Artificial Sequence: Synthetic oligonucleotide
  Sense strand starting at position 947 of SEQ ID NO: 913565
ucggaaaugucuucuaaca

SEQ ID NO: 937111 - RNA, 19 nt, Artificial Sequence
  Description of Artificial Sequence: Synthetic oligonucleotide
  Antisense strand to SEQ ID NO: 937110
uguuagaagacauuuccga

SEQ ID NO: 937112 - RNA, 19 nt, Artificial Sequence
  Description of Artificial Sequence: Synthetic oligonucleotide
  Sense strand starting at position 221 of SEQ ID NO: 913565
guaaguagacagugugaaa

SEQ ID NO: 937113 - RNA, 19 nt, Artificial Sequence
  Description of Artificial Sequence: Synthetic oligonucleotide
  Antisense strand to SEQ ID NO: 937112
uuucacacugucuacuuac

SEQ ID NO: 937114 - RNA, 19 nt, Artificial Sequence
  Description of Artificial Sequence: Synthetic oligonucleotide
  Sense strand starting at position 936 of SEQ ID NO: 913565
aaaugucuucuucggaaau

SEQ ID NO: 937115 - RNA, 19 nt, Artificial Sequence
  Description of Artificial Sequence: Synthetic oligonucleotide
  Antisense strand to SEQ ID NO: 937114
auuuccgaagaagacauuu

SEQ ID NO: 937116 - RNA, 19 nt, Artificial Sequence
  Description of Artificial Sequence: Synthetic oligonucleotide
  Sense strand starting at position 3096 of SEQ ID NO: 913565
aguggacacuccgugaaua

SEQ ID NO: 937117 - RNA, 19 nt, Artificial Sequence
  Description of Artificial Sequence: Synthetic oligonucleotide
  Antisense strand to SEQ ID NO: 937116
uauucacggaguguccacu

SEQ ID NO: 937118 - RNA, 19 nt, Artificial Sequence
  Description of Artificial Sequence: Synthetic oligonucleotide
  Sense strand starting at position 2142 of SEQ ID NO: 913565
agggucuuggcgggaacaa

SEQ ID NO: 937119 - RNA, 19 nt, Artificial Sequence
  Description of Artificial Sequence: Synthetic oligonucleotide
  Antisense strand to SEQ ID NO: 937118
uuguucccgccaagacccu

SEQ ID NO: 937120 - RNA, 19 nt, Artificial Sequence
  Description of Artificial Sequence: Synthetic oligonucleotide
  Sense strand starting at position 440 of SEQ ID NO: 913565
ugguaugucugaccuaaug

SEQ ID NO: 937121 - RNA, 19 nt, Artificial Sequence
  Description of Artificial Sequence: Synthetic oligonucleotide
  Antisense strand to SEQ ID NO: 937120
cauuaggucagacauacca

SEQ ID NO: 937122 - RNA, 19 nt, Artificial Sequence
  Description of Artificial Sequence: Synthetic oligonucleotide
  Sense strand starting at position 1350 of SEQ ID NO: 913565
gaacgagauuuguaacauu

SEQ ID NO: 937123 - RNA, 19 nt, Artificial Sequence
  Description of Artificial Sequence: Synthetic oligonucleotide
  Antisense strand to SEQ ID NO: 937122
aauguuacaaaucucguuc

SEQ ID NO: 937124 - RNA, 19 nt, Artificial Sequence
  Description of Artificial Sequence: Synthetic oligonucleotide
  Sense strand starting at position 3654 of SEQ ID NO: 913565
ucuauaucccagugaggug

SEQ ID NO: 937125 - RNA, 19 nt, Artificial Sequence
  Description of Artificial Sequence: Synthetic oligonucleotide
  Antisense strand to SEQ ID NO: 937124
caccucacugggauauaga

SEQ ID NO: 937126 - RNA, 19 nt, Artificial Sequence
  Description of Artificial Sequence: Synthetic oligonucleotide
  Sense strand starting at position 934 of SEQ ID NO: 913565
ccaaaugucuucuucggaa

SEQ ID NO: 937127 - RNA, 19 nt, Artificial Sequence
  Description of Artificial Sequence: Synthetic oligonucleotide
  Antisense strand to SEQ ID NO: 937126
uuccgaagaagacauuugg

SEQ ID NO: 937128 - RNA, 19 nt, Artificial Sequence
  Description of Artificial Sequence: Synthetic oligonucleotide
  Sense strand starting at position 2103 of SEQ ID NO: 913565
gccuucucucuggagguua

SEQ ID NO: 937129 - RNA, 19 nt, Artificial Sequence
  Description of Artificial Sequence: Synthetic oligonucleotide
  Antisense strand to SEQ ID NO: 937128
uaaccuccagagagaaggc

SEQ ID NO: 937130 - RNA, 19 nt, Artificial Sequence
  Description of Artificial Sequence: Synthetic oligonucleotide
  Sense strand starting at position 209 of SEQ ID NO: 913565
ugugaaaguuggguaagua

SEQ ID NO: 937131 - RNA, 19 nt, Artificial Sequence
  Description of Artificial Sequence: Synthetic oligonucleotide
  Antisense strand to SEQ ID NO: 937130
uacuuacccaacuuucaca

SEQ ID NO: 937132 - RNA, 19 nt, Artificial Sequence
  Description of Artificial Sequence: Synthetic oligonucleotide
  Sense strand starting at position 885 of SEQ ID NO: 913565
agccauuauuuggaucaac

SEQ ID NO: 937133 - RNA, 19 nt, Artificial Sequence
  Description of Artificial Sequence: Synthetic oligonucleotide
  Antisense strand to SEQ ID NO: 937132
guugauccaaauaauggcu

SEQ ID NO: 937134 - RNA, 19 nt, Artificial Sequence
  Description of Artificial Sequence: Synthetic oligonucleotide
  Sense strand starting at position 556 of SEQ ID NO: 913565
aggugucugcccuaucaau

SEQ ID NO: 937135 - RNA, 19 nt, Artificial Sequence
  Description of Artificial Sequence: Synthetic oligonucleotide
  Antisense strand to SEQ ID NO: 937134
auugauagggcagacaccu

SEQ ID NO: 937136 - RNA, 19 nt, Artificial Sequence
  Description of Artificial Sequence: Synthetic oligonucleotide
  Sense strand starting at position 3877 of SEQ ID NO: 913565
gguuuaaauccuggccaug

SEQ ID NO: 937137 - RNA, 19 nt, Artificial Sequence
  Description of Artificial Sequence: Synthetic oligonucleotide
  Antisense strand to SEQ ID NO: 937136
cauggccaggauuuaaacc

SEQ ID NO: 937138 - RNA, 19 nt, Artificial Sequence
  Description of Artificial Sequence: Synthetic oligonucleotide
  Sense strand starting at position 2053 of SEQ ID NO: 913565
guuuguguauaagugaaag

SEQ ID NO: 937139 - RNA, 19 nt, Artificial Sequence
  Description of Artificial Sequence: Synthetic oligonucleotide
  Antisense strand to SEQ ID NO: 937138
cuuucacuuauacacaaac

SEQ ID NO: 937140 - RNA, 19 nt, Artificial Sequence
  Description of Artificial Sequence: Synthetic oligonucleotide
  Sense strand starting at position 3097 of SEQ ID NO: 913565
guggacacuccgugaauau

SEQ ID NO: 937141 - RNA, 19 nt, Artificial Sequence
  Description of Artificial Sequence: Synthetic oligonucleotide
  Antisense strand to SEQ ID NO: 937140
auauucacggaguguccac

SEQ ID NO: 937142 - RNA, 19 nt, Artificial Sequence
  Description of Artificial Sequence: Synthetic oligonucleotide
  Sense strand starting at position 1221 of SEQ ID NO: 913565
cugugaaguucuccauuau

SEQ ID NO: 937143 - RNA, 19 nt, Artificial Sequence
  Description of Artificial Sequence: Synthetic oligonucleotide
  Antisense strand to SEQ ID NO: 937142
auaauggagaacuucacag

SEQ ID NO: 937144 - RNA, 19 nt, Artificial Sequence
  Description of Artificial Sequence: Synthetic oligonucleotide
  Sense strand starting at position 1195 of SEQ ID NO: 913565
agauaaaccuaucacagga

SEQ ID NO: 937145 - RNA, 19 nt, Artificial Sequence
  Description of Artificial Sequence: Synthetic oligonucleotide
  Antisense strand to SEQ ID NO: 937144
uccugugauagguuuaucu

SEQ ID NO: 937146 - RNA, 19 nt, Artificial Sequence
  Description of Artificial Sequence: Synthetic oligonucleotide
  Sense strand starting at position 1301 of SEQ ID NO: 913566
agaugaagccuuugagagg

SEQ ID NO: 937147 - RNA, 19 nt, Artificial Sequence
  Description of Artificial Sequence: Synthetic oligonucleotide
  Antisense strand to SEQ ID NO: 937146
ccucucaaaggcuucaucu

SEQ ID NO: 937148 - RNA, 19 nt, Artificial Sequence
  Description of Artificial Sequence: Synthetic oligonucleotide
  Sense strand starting at position 3818 of SEQ ID NO: 913566
gacccuaaaguuugagaac

SEQ ID NO: 937149 - RNA, 19 nt, Artificial Sequence
  Description of Artificial Sequence: Synthetic oligonucleotide
  Antisense strand to SEQ ID NO: 937148
guucucaaacuuuaggguc

SEQ ID NO: 937150 - RNA, 19 nt, Artificial Sequence
  Description of Artificial Sequence: Synthetic oligonucleotide
  Sense strand starting at position 488 of SEQ ID NO: 913566
acaccaacccugugaggaa

SEQ ID NO: 937151 - RNA, 19 nt, Artificial Sequence
  Description of Artificial Sequence: Synthetic oligonucleotide
  Antisense strand to SEQ ID NO: 937150
uuccucacaggguuggugu

SEQ ID NO: 937152 - RNA, 19 nt, Artificial Sequence
  Description of Artificial Sequence: Synthetic oligonucleotide
  Sense strand starting at position 3607 of SEQ ID NO: 913566
uuauguauuugcucacuua

SEQ ID NO: 937153 - RNA, 19 nt, Artificial Sequence
  Description of Artificial Sequence: Synthetic oligonucleotide
  Antisense strand to SEQ ID NO: 937152
uaagugagcaaauacauaa

SEQ ID NO: 937154 - RNA, 19 nt, Artificial Sequence
  Description of Artificial Sequence: Synthetic oligonucleotide
  Sense strand starting at position 3710 of SEQ ID NO: 913566
aggcaagauagguaagcau

SEQ ID NO: 937155 - RNA, 19 nt, Artificial Sequence
  Description of Artificial Sequence: Synthetic oligonucleotide
  Antisense strand to SEQ ID NO: 937154
augcuuaccuaucuugccu

SEQ ID NO: 937156 - RNA, 19 nt, Artificial Sequence
  Description of Artificial Sequence: Synthetic oligonucleotide
  Sense strand starting at position 207 of SEQ ID NO: 913566
ccaacuacuugagcagaga

SEQ ID NO: 937157 - RNA, 19 nt, Artificial Sequence
  Description of Artificial Sequence: Synthetic oligonucleotide
  Antisense strand to SEQ ID NO: 937156
ucucugcucaaguaguugg

SEQ ID NO: 937158 - RNA, 19 nt, Artificial Sequence
  Description of Artificial Sequence: Synthetic oligonucleotide
  Sense strand starting at position 1047 of SEQ ID NO: 913566
ggcuguuccacaguugugu

SEQ ID NO: 937159 - RNA, 19 nt, Artificial Sequence
  Description of Artificial Sequence: Synthetic oligonucleotide
  Antisense strand to SEQ ID NO: 937158
acacaacuguggaacagcc

SEQ ID NO: 937160 - RNA, 19 nt, Artificial Sequence
  Description of Artificial Sequence: Synthetic oligonucleotide
  Sense strand starting at position 3552 of SEQ ID NO: 913566
gaagaaucucacgguagag

SEQ ID NO: 937161 - RNA, 19 nt, Artificial Sequence
  Description of Artificial Sequence: Synthetic oligonucleotide
  Antisense strand to SEQ ID NO: 937160
cucuaccgugagauucuuc

SEQ ID NO: 937162 - RNA, 19 nt, Artificial Sequence
  Description of Artificial Sequence: Synthetic oligonucleotide
  Sense strand starting at position 3562 of SEQ ID NO: 913566
acgguagagcuccaggaaa

SEQ ID NO: 937163 - RNA, 19 nt, Artificial Sequence
  Description of Artificial Sequence: Synthetic oligonucleotide
  Antisense strand to SEQ ID NO: 937162
uuuccuggagcucuaccgu

SEQ ID NO: 937164 - RNA, 19 nt, Artificial Sequence
  Description of Artificial Sequence: Synthetic oligonucleotide
  Sense strand starting at position 776 of SEQ ID NO: 913566
aaugaacaaugguugucaa

SEQ ID NO: 937165 - RNA, 19 nt, Artificial Sequence
  Description of Artificial Sequence: Synthetic oligonucleotide
  Antisense strand to SEQ ID NO: 937164
uugacaaccauuguucauu

SEQ ID NO: 937166 - RNA, 19 nt, Artificial Sequence
  Description of Artificial Sequence: Synthetic oligonucleotide
  Sense strand starting at position 3599 of SEQ ID NO: 913566
ucgugaucuuauguauuug

SEQ ID NO: 937167 - RNA, 19 nt, Artificial Sequence
  Description of Artificial Sequence: Synthetic oligonucleotide
  Antisense strand to SEQ ID NO: 937166
caaauacauaagaucacga

SEQ ID NO: 937168 - RNA, 19 nt, Artificial Sequence
  Description of Artificial Sequence: Synthetic oligonucleotide
  Sense strand starting at position 700 of SEQ ID NO: 913566
ggcgaauuagcacaaugag

SEQ ID NO: 937169 - RNA, 19 nt, Artificial Sequence
  Description of Artificial Sequence: Synthetic oligonucleotide
  Antisense strand to SEQ ID NO: 937168
cucauugugcuaauucgcc

SEQ ID NO: 937170 - RNA, 19 nt, Artificial Sequence
  Description of Artificial Sequence: Synthetic oligonucleotide
  Sense strand starting at position 445 of SEQ ID NO: 913566
ccaagugauugauuccaca

SEQ ID NO: 937171 - RNA, 19 nt, Artificial Sequence
  Description of Artificial Sequence: Synthetic oligonucleotide
  Antisense strand to SEQ ID NO: 937170
uguggaaucaaucacuugg

SEQ ID NO: 937172 - RNA, 19 nt, Artificial Sequence
  Description of Artificial Sequence: Synthetic oligonucleotide
  Sense strand starting at position 754 of SEQ ID NO: 913566
uuguuagcacaauagaagu

SEQ ID NO: 937173 - RNA, 19 nt, Artificial Sequence
  Description of Artificial Sequence: Synthetic oligonucleotide
  Antisense strand to SEQ ID NO: 937172
acuucuauugugcuaacaa

SEQ ID NO: 937174 - RNA, 19 nt, Artificial Sequence
  Description of Artificial Sequence: Synthetic oligonucleotide
  Sense strand starting at position 368 of SEQ ID NO: 913566
agagaaaucacugguggcu

SEQ ID NO: 937175 - RNA, 19 nt, Artificial Sequence
  Description of Artificial Sequence: Synthetic oligonucleotide
  Antisense strand to SEQ ID NO: 937174
agccaccagugauuucucu

SEQ ID NO: 937176 - RNA, 19 nt, Artificial Sequence
  Description of Artificial Sequence: Synthetic oligonucleotide
  Sense strand starting at position 2081 of SEQ ID NO: 913566
ugggauuaccgugaggguu

SEQ ID NO: 937177 - RNA, 19 nt, Artificial Sequence
  Description of Artificial Sequence: Synthetic oligonucleotide
  Antisense strand to SEQ ID NO: 937176
aacccucacgguaauccca

SEQ ID NO: 937178 - RNA, 19 nt, Artificial Sequence
  Description of Artificial Sequence: Synthetic oligonucleotide
  Sense strand starting at position 2872 of SEQ ID NO: 913566
gacaacauguuugcagaau

SEQ ID NO: 937179 - RNA, 19 nt, Artificial Sequence
  Description of Artificial Sequence: Synthetic oligonucleotide
  Antisense strand to SEQ ID NO: 937178
auucugcaaacauguuguc

SEQ ID NO: 937180 - RNA, 19 nt, Artificial Sequence
  Description of Artificial Sequence: Synthetic oligonucleotide
  Sense strand starting at position 3793 of SEQ ID NO: 913566
acacaccuucuaggugauu

SEQ ID NO: 937181 - RNA, 19 nt, Artificial Sequence
  Description of Artificial Sequence: Synthetic oligonucleotide
  Antisense strand to SEQ ID NO: 937180
aaucaccuagaaggugugu

SEQ ID NO: 937182 - RNA, 19 nt, Artificial Sequence
  Description of Artificial Sequence: Synthetic oligonucleotide
  Sense strand starting at position 1506 of SEQ ID NO: 913566
ucagguucucccuaucgaa

SEQ ID NO: 937183 - RNA, 19 nt, Artificial Sequence
  Description of Artificial Sequence: Synthetic oligonucleotide
  Antisense strand to SEQ ID NO: 937182
uucgauagggagaaccuga

SEQ ID NO: 937184 - RNA, 19 nt, Artificial Sequence
  Description of Artificial Sequence: Synthetic oligonucleotide
  Sense strand starting at position 890 of SEQ ID NO: 913566
aggauccagcugugaaauc

SEQ ID NO: 937185 - RNA, 19 nt, Artificial Sequence
  Description of Artificial Sequence: Synthetic oligonucleotide
  Antisense strand to SEQ ID NO: 937184
gauuucacagcuggauccu

SEQ ID NO: 937186 - RNA, 19 nt, Artificial Sequence
  Description of Artificial Sequence: Synthetic oligonucleotide
  Sense strand starting at position 3522 of SEQ ID NO: 913566
acaacaaauucugcuguga

SEQ ID NO: 937187 - RNA, 19 nt, Artificial Sequence
  Description of Artificial Sequence: Synthetic oligonucleotide
  Antisense strand to SEQ ID NO: 937186
ucacagcagaauuuguugu

SEQ ID NO: 937188 - RNA, 19 nt, Artificial Sequence
  Description of Artificial Sequence: Synthetic oligonucleotide
  Sense strand starting at position 3320 of SEQ ID NO: 913566
uagccaugauacucagagu

SEQ ID NO: 937189 - RNA, 19 nt, Artificial Sequence
  Description of Artificial Sequence: Synthetic oligonucleotide
  Antisense strand to SEQ ID NO: 937188
acucugaguaucauggcua

SEQ ID NO: 937190 - RNA, 19 nt, Artificial Sequence
  Description of Artificial Sequence: Synthetic oligonucleotide
  Sense strand starting at position 786 of SEQ ID NO: 913566
gguugucaaguuagcggua

SEQ ID NO: 937191 - RNA, 19 nt, Artificial Sequence
  Description of Artificial Sequence: Synthetic oligonucleotide
  Antisense strand to SEQ ID NO: 937190
uaccgcuaacuugacaacc

SEQ ID NO: 937192 - RNA, 19 nt, Artificial Sequence
  Description of Artificial Sequence: Synthetic oligonucleotide
  Sense strand starting at position 2106 of SEQ ID NO: 913566
gaaaguuuguaucugacuc

SEQ ID NO: 937193 - RNA, 19 nt, Artificial Sequence
  Description of Artificial Sequence: Synthetic oligonucleotide
  Antisense strand to SEQ ID NO: 937192
gagucagauacaaacuuuc

SEQ ID NO: 937194 - RNA, 19 nt, Artificial Sequence
  Description of Artificial Sequence: Synthetic oligonucleotide
  Sense strand starting at position 779 of SEQ ID NO: 913566
gaacaaugguugucaaguu

SEQ ID NO: 937195 - RNA, 19 nt, Artificial Sequence
  Description of Artificial Sequence: Synthetic oligonucleotide
  Antisense strand to SEQ ID NO: 937194
aacuugacaaccauuguuc

SEQ ID NO: 937196 - RNA, 19 nt, Artificial Sequence
  Description of Artificial Sequence: Synthetic oligonucleotide
  Sense strand starting at position 2840 of SEQ ID NO: 913566
caaaccuucggguagcauu

SEQ ID NO: 937197 - RNA, 19 nt, Artificial Sequence
  Description of Artificial Sequence: Synthetic oligonucleotide
  Antisense strand to SEQ ID NO: 937196
aaugcuacccgaagguuug

SEQ ID NO: 937198 - RNA, 19 nt, Artificial Sequence
  Description of Artificial Sequence: Synthetic oligonucleotide
  Sense strand starting at position 789 of SEQ ID NO: 913566
ugucaaguuagcgguauuu

SEQ ID NO: 937199 - RNA, 19 nt, Artificial Sequence
  Description of Artificial Sequence: Synthetic oligonucleotide
  Antisense strand to SEQ ID NO: 937198
aaauaccgcuaacuugaca

SEQ ID NO: 937200 - RNA, 19 nt, Artificial Sequence
  Description of Artificial Sequence: Synthetic oligonucleotide
  Sense strand starting at position 2871 of SEQ ID NO: 913566
cgacaacauguuugcagaa

SEQ ID NO: 937201 - RNA, 19 nt, Artificial Sequence
  Description of Artificial Sequence: Synthetic oligonucleotide
  Antisense strand to SEQ ID NO: 937200
uucugcaaacauguugucg

SEQ ID NO: 937202 - RNA, 19 nt, Artificial Sequence
  Description of Artificial Sequence: Synthetic oligonucleotide
  Sense strand starting at position 848 of SEQ ID NO: 913566
gcgacacucuaaccuuaau

SEQ ID NO: 937203 - RNA, 19 nt, Artificial Sequence
  Description of Artificial Sequence: Synthetic oligonucleotide
  Antisense strand to SEQ ID NO: 937202
auuaagguuagagugucgc

SEQ ID NO: 937204 - RNA, 19 nt, Artificial Sequence
  Description of Artificial Sequence: Synthetic oligonucleotide
  Sense strand starting at position 657 of SEQ ID NO: 913566
agugauuccguuuaucauu

SEQ ID NO: 937205 - RNA, 19 nt, Artificial Sequence
  Description of Artificial Sequence: Synthetic oligonucleotide
  Antisense strand to SEQ ID NO: 937204
aaugauaaacggaaucacu

SEQ ID NO: 937206 - RNA, 19 nt, Artificial Sequence
  Description of Artificial Sequence: Synthetic oligonucleotide
  Sense strand starting at position 1525 of SEQ ID NO: 913566
gcggucuauggagauaguu

SEQ ID NO: 937207 - RNA, 19 nt, Artificial Sequence
  Description of Artificial Sequence: Synthetic oligonucleotide
  Antisense strand to SEQ ID NO: 937206
aacuaucuccauagaccgc

SEQ ID NO: 937208 - RNA, 19 nt, Artificial Sequence
  Description of Artificial Sequence: Synthetic oligonucleotide
  Sense strand starting at position 3462 of SEQ ID NO: 913566
uuugaugguuugucuuaga

SEQ ID NO: 937209 - RNA, 19 nt, Artificial Sequence
  Description of Artificial Sequence: Synthetic oligonucleotide
  Antisense strand to SEQ ID NO: 937208
ucuaagacaaaccaucaaa

SEQ ID NO: 937210 - RNA, 19 nt, Artificial Sequence
  Description of Artificial Sequence: Synthetic oligonucleotide
  Sense strand starting at position 1968 of SEQ ID NO: 913566
cggaacugcgcuuagaaau

SEQ ID NO: 937211 - RNA, 19 nt, Artificial Sequence
  Description of Artificial Sequence: Synthetic oligonucleotide
  Antisense strand to SEQ ID NO: 937210
auuucuaagcgcaguuccg

SEQ ID NO: 937212 - RNA, 19 nt, Artificial Sequence
  Description of Artificial Sequence: Synthetic oligonucleotide
  Sense strand starting at position 1770 of SEQ ID NO: 913566
gcugcuuggguuuaaauca

SEQ ID NO: 937213 - RNA, 19 nt, Artificial Sequence
  Description of Artificial Sequence: Synthetic oligonucleotide
  Antisense strand to SEQ ID NO: 937212
ugauuuaaacccaagcagc

SEQ ID NO: 937214 - RNA, 19 nt, Artificial Sequence
  Description of Artificial Sequence: Synthetic oligonucleotide
  Sense strand starting at position 377 of SEQ ID NO: 913566
acugguggcuuuguggaaa

SEQ ID NO: 937215 - RNA, 19 nt, Artificial Sequence
  Description of Artificial Sequence: Synthetic oligonucleotide
  Antisense strand to SEQ ID NO: 937214
uuuccacaaagccaccagu

SEQ ID NO: 937216 - RNA, 19 nt, Artificial Sequence
  Description of Artificial Sequence: Synthetic oligonucleotide
  Sense strand starting at position 748 of SEQ ID NO: 913566
agugacuuguuagcacaau

SEQ ID NO: 937217 - RNA, 19 nt, Artificial Sequence
  Description of Artificial Sequence: Synthetic oligonucleotide
  Antisense strand to SEQ ID NO: 937216
auugugcuaacaagucacu

SEQ ID NO: 937218 - RNA, 19 nt, Artificial Sequence
  Description of Artificial Sequence: Synthetic oligonucleotide
  Sense strand starting at position 3539 of SEQ ID NO: 913566
gagucuaguguccgaagaa

SEQ ID NO: 937219 - RNA, 19 nt, Artificial Sequence
  Description of Artificial Sequence: Synthetic oligonucleotide
  Antisense strand to SEQ ID NO: 937218
uucuucggacacuagacuc

SEQ ID NO: 937220 - RNA, 19 nt, Artificial Sequence
  Description of Artificial Sequence: Synthetic oligonucleotide
  Sense strand starting at position 1084 of SEQ ID NO: 913566
cuugcugaccaauguuuga

SEQ ID NO: 937221 - RNA, 19 nt, Artificial Sequence
  Description of Artificial Sequence: Synthetic oligonucleotide
  Antisense strand to SEQ ID NO: 937220
ucaaacauuggucagcaag

SEQ ID NO: 937222 - RNA, 19 nt, Artificial Sequence
  Description of Artificial Sequence: Synthetic oligonucleotide
  Sense strand starting at position 2486 of SEQ ID NO: 913566
agaacacuuucgcuuuauu

SEQ ID NO: 937223 - RNA, 19 nt, Artificial Sequence
  Description of Artificial Sequence: Synthetic oligonucleotide
  Antisense strand to SEQ ID NO: 937222
aauaaagcgaaaguguucu

SEQ ID NO: 937224 - RNA, 19 nt, Artificial Sequence
  Description of Artificial Sequence: Synthetic oligonucleotide
  Sense strand starting at position 689 of SEQ ID NO: 913566
acuaauggcugggcgaauu

SEQ ID NO: 937225 - RNA, 19 nt, Artificial Sequence
  Description of Artificial Sequence: Synthetic oligonucleotide
  Antisense strand to SEQ ID NO: 937224
aauucgcccagccauuagu

SEQ ID NO: 937226 - RNA, 19 nt, Artificial Sequence
  Description of Artificial Sequence: Synthetic oligonucleotide
  Sense strand starting at position 2290 of SEQ ID NO: 913567
aggaaagacuuguuuauua

SEQ ID NO: 937227 - RNA, 19 nt, Artificial Sequence
  Description of Artificial Sequence: Synthetic oligonucleotide
  Antisense strand to SEQ ID NO: 937226
uaauaaacaagucuuuccu

SEQ ID NO: 937228 - RNA, 19 nt, Artificial Sequence
  Description of Artificial Sequence: Synthetic oligonucleotide
  Sense strand starting at position 2735 of SEQ ID NO: 913567
ugguuagaggaguguggau

SEQ ID NO: 937229 - RNA, 19 nt, Artificial Sequence
  Description of Artificial Sequence: Synthetic oligonucleotide
  Antisense strand to SEQ ID NO: 937228
auccacacuccucuaacca

SEQ ID NO: 937230 - RNA, 19 nt, Artificial Sequence
  Description of Artificial Sequence: Synthetic oligonucleotide
  Sense strand starting at position 3113 of SEQ ID NO: 913567
gguuuaucagucugggaca

SEQ ID NO: 937231 - RNA, 19 nt, Artificial Sequence
  Description of Artificial Sequence: Synthetic oligonucleotide
  Antisense strand to SEQ ID NO: 937230
ugucccagacugauaaacc

SEQ ID NO: 937232 - RNA, 19 nt, Artificial Sequence
  Description of Artificial Sequence: Synthetic oligonucleotide
  Sense strand starting at position 3097 of SEQ ID NO: 913567
ccuuuauugcucuaaaggu

SEQ ID NO: 937233 - RNA, 19 nt, Artificial Sequence
  Description of Artificial Sequence: Synthetic oligonucleotide
  Antisense strand to SEQ ID NO: 937232
accuuuagagcaauaaagg

SEQ ID NO: 937234 - RNA, 19 nt, Artificial Sequence
  Description of Artificial Sequence: Synthetic oligonucleotide
  Sense strand starting at position 3235 of SEQ ID NO: 913567
gcuugcuuucgcgugacaa

SEQ ID NO: 937235 - RNA, 19 nt, Artificial Sequence
  Description of Artificial Sequence: Synthetic oligonucleotide
  Antisense strand to SEQ ID NO: 937234
uugucacgcgaaagcaagc

SEQ ID NO: 937236 - RNA, 19 nt, Artificial Sequence
  Description of Artificial Sequence: Synthetic oligonucleotide
  Sense strand starting at position 3105 of SEQ ID NO: 913567
gcucuaaagguuuaucagu

SEQ ID NO: 937237 - RNA, 19 nt, Artificial Sequence
  Description of Artificial Sequence: Synthetic oligonucleotide
  Antisense strand to SEQ ID NO: 937236
acugauaaaccuuuagagc

SEQ ID NO: 937238 - RNA, 19 nt, Artificial Sequence
  Description of Artificial Sequence: Synthetic oligonucleotide
  Sense strand starting at position 3728 of SEQ ID NO: 913567
gagagaagaucugaauuaa

SEQ ID NO: 937239 - RNA, 19 nt, Artificial Sequence
  Description of Artificial Sequence: Synthetic oligonucleotide
  Antisense strand to SEQ ID NO: 937238
uuaauucagaucuucucuc

SEQ ID NO: 937240 - RNA, 19 nt, Artificial Sequence
  Description of Artificial Sequence: Synthetic oligonucleotide
  Sense strand starting at position 3107 of SEQ ID NO: 913567
ucuaaagguuuaucagucu

SEQ ID NO: 937241 - RNA, 19 nt, Artificial Sequence
  Description of Artificial Sequence: Synthetic oligonucleotide
  Antisense strand to SEQ ID NO: 937240
agacugauaaaccuuuaga

SEQ ID NO: 937242 - RNA, 19 nt, Artificial Sequence
  Description of Artificial Sequence: Synthetic oligonucleotide
  Sense strand starting at position 3094 of SEQ ID NO: 913567
cgaccuuuauugcucuaaa

SEQ ID NO: 937243 - RNA, 19 nt, Artificial Sequence
  Description of Artificial Sequence: Synthetic oligonucleotide
  Antisense strand to SEQ ID NO: 937242
uuuagagcaauaaaggucg

SEQ ID NO: 937244 - RNA, 19 nt, Artificial Sequence
  Description of Artificial Sequence: Synthetic oligonucleotide
  Sense strand starting at position 2534 of SEQ ID NO: 913567
uugcaaaggcucgggauau

SEQ ID NO: 937245 - RNA, 19 nt, Artificial Sequence
  Description of Artificial Sequence: Synthetic oligonucleotide
  Antisense strand to SEQ ID NO: 937244
auaucccgagccuuugcaa

SEQ ID NO: 937246 - RNA, 19 nt, Artificial Sequence
  Description of Artificial Sequence: Synthetic oligonucleotide
  Sense strand starting at position 2533 of SEQ ID NO: 913567
uuugcaaaggcucgggaua

SEQ ID NO: 937247 - RNA, 19 nt, Artificial Sequence
  Description of Artificial Sequence: Synthetic oligonucleotide
  Antisense strand to SEQ ID NO: 937246
uaucccgagccuuugcaaa

SEQ ID NO: 937248 - RNA, 19 nt, Artificial Sequence
  Description of Artificial Sequence: Synthetic oligonucleotide
  Sense strand starting at position 2902 of SEQ ID NO: 913567
ucgccuagcgcuuugugua

SEQ ID NO: 937249 - RNA, 19 nt, Artificial Sequence
  Description of Artificial Sequence: Synthetic oligonucleotide
  Antisense strand to SEQ ID NO: 937248
uacacaaagcgcuaggcga

SEQ ID NO: 937250 - RNA, 19 nt, Artificial Sequence
  Description of Artificial Sequence: Synthetic oligonucleotide
  Sense strand starting at position 1291 of SEQ ID NO: 913567
aggugcuguuuccuuaaga

SEQ ID NO: 937251 - RNA, 19 nt, Artificial Sequence
  Description of Artificial Sequence: Synthetic oligonucleotide
  Antisense strand to SEQ ID NO: 937250
ucuuaaggaaacagcaccu

SEQ ID NO: 937252 - RNA, 19 nt, Artificial Sequence
  Description of Artificial Sequence: Synthetic oligonucleotide
  Sense strand starting at position 1292 of SEQ ID NO: 913567
ggugcuguuuccuuaagaa

SEQ ID NO: 937253 - RNA, 19 nt, Artificial Sequence
  Description of Artificial Sequence: Synthetic oligonucleotide
  Antisense strand to SEQ ID NO: 937252
uucuuaaggaaacagcacc

SEQ ID NO: 937254 - RNA, 19 nt, Artificial Sequence
  Description of Artificial Sequence: Synthetic oligonucleotide
  Sense strand starting at position 3676 of SEQ ID NO: 913567
ugaaaucacucuuacagag

SEQ ID NO: 937255 - RNA, 19 nt, Artificial Sequence
  Description of Artificial Sequence: Synthetic oligonucleotide
  Antisense strand to SEQ ID NO: 937254
cucuguaagagugauuuca

SEQ ID NO: 937256 - RNA, 19 nt, Artificial Sequence
  Description of Artificial Sequence: Synthetic oligonucleotide
  Sense strand starting at position 3237 of SEQ ID NO: 913567
uugcuuucgcgugacaaau

SEQ ID NO: 937257 - RNA, 19 nt, Artificial Sequence
  Description of Artificial Sequence: Synthetic oligonucleotide
  Antisense strand to SEQ ID NO: 937256
auuugucacgcgaaagcaa

SEQ ID NO: 937258 - RNA, 19 nt, Artificial Sequence
  Description of Artificial Sequence: Synthetic oligonucleotide
  Sense strand starting at position 2729 of SEQ ID NO: 913567
ggagagugguuagaggagu

SEQ ID NO: 937259 - RNA, 19 nt, Artificial Sequence
  Description of Artificial Sequence: Synthetic oligonucleotide
  Antisense strand to SEQ ID NO: 937258
acuccucuaaccacucucc

SEQ ID NO: 937260 - RNA, 19 nt, Artificial Sequence
  Description of Artificial Sequence: Synthetic oligonucleotide
  Sense strand starting at position 1753 of SEQ ID NO: 913567
cguagaagccgcuguaaga

SEQ ID NO: 937261 - RNA, 19 nt, Artificial Sequence
  Description of Artificial Sequence: Synthetic oligonucleotide
  Antisense strand to SEQ ID NO: 937260
ucuuacagcggcuucuacg

SEQ ID NO: 937262 - RNA, 19 nt, Artificial Sequence
  Description of Artificial Sequence: Synthetic oligonucleotide
  Sense strand starting at position 3633 of SEQ ID NO: 913567
gcggcuaguuguucuugga

SEQ ID NO: 937263 - RNA, 19 nt, Artificial Sequence
  Description of Artificial Sequence: Synthetic oligonucleotide
  Antisense strand to SEQ ID NO: 937262
uccaagaacaacuagccgc

SEQ ID NO: 937264 - RNA, 19 nt, Artificial Sequence
  Description of Artificial Sequence: Synthetic oligonucleotide
  Sense strand starting at position 3236 of SEQ ID NO: 913567
cuugcuuucgcgugacaaa

SEQ ID NO: 937265 - RNA, 19 nt, Artificial Sequence
  Description of Artificial Sequence: Synthetic oligonucleotide
  Antisense strand to SEQ ID NO: 937264
uuugucacgcgaaagcaag

SEQ ID NO: 937266 - RNA, 19 nt, Artificial Sequence
  Description of Artificial Sequence: Synthetic oligonucleotide
  Sense strand starting at position 3490 of SEQ ID NO: 913567
ggaauaguuugugagccac

SEQ ID NO: 937267 - RNA, 19 nt, Artificial Sequence
  Description of Artificial Sequence: Synthetic oligonucleotide
  Antisense strand to SEQ ID NO: 937266
guggcucacaaacuauucc

SEQ ID NO: 937268 - RNA, 19 nt, Artificial Sequence
  Description of Artificial Sequence: Synthetic oligonucleotide
  Sense strand starting at position 2420 of SEQ ID NO: 913567
ccuaaagcuucgggaacaa

SEQ ID NO: 937269 - RNA, 19 nt, Artificial Sequence
  Description of Artificial Sequence: Synthetic oligonucleotide
  Antisense strand to SEQ ID NO: 937268
uuguucccgaagcuuuagg

SEQ ID NO: 937270 - RNA, 19 nt, Artificial Sequence
  Description of Artificial Sequence: Synthetic oligonucleotide
  Sense strand starting at position 3810 of SEQ ID NO: 913567
aaacaagaguuacgauguu

SEQ ID NO: 937271 - RNA, 19 nt, Artificial Sequence
  Description of Artificial Sequence: Synthetic oligonucleotide
  Antisense strand to SEQ ID NO: 937270
aacaucguaacucuuguuu

SEQ ID NO: 937272 - RNA, 19 nt, Artificial Sequence
  Description of Artificial Sequence: Synthetic oligonucleotide
  Sense strand starting at position 2419 of SEQ ID NO: 913567
uccuaaagcuucgggaaca

SEQ ID NO: 937273 - RNA, 19 nt, Artificial Sequence
  Description of Artificial Sequence: Synthetic oligonucleotide
  Antisense strand to SEQ ID NO: 937272
uguucccgaagcuuuagga

SEQ ID NO: 937274 - RNA, 19 nt, Artificial Sequence
  Description of Artificial Sequence: Synthetic oligonucleotide
  Sense strand starting at position 2410 of SEQ ID NO: 913567
cgucuuggauccuaaagcu

SEQ ID NO: 937275 - RNA, 19 nt, Artificial Sequence
  Description of Artificial Sequence: Synthetic oligonucleotide
  Antisense strand to SEQ ID NO: 937274
agcuuuaggauccaagacg

SEQ ID NO: 937276 - RNA, 19 nt, Artificial Sequence
  Description of Artificial Sequence: Synthetic oligonucleotide
  Sense strand starting at position 3489 of SEQ ID NO: 913567
uggaauaguuugugagcca

SEQ ID NO: 937277 - RNA, 19 nt, Artificial Sequence
  Description of Artificial Sequence: Synthetic oligonucleotide
  Antisense strand to SEQ ID NO: 937276
uggcucacaaacuauucca

SEQ ID NO: 937278 - RNA, 19 nt, Artificial Sequence
  Description of Artificial Sequence: Synthetic oligonucleotide
  Sense strand starting at position 2903 of SEQ ID NO: 913567
cgccuagcgcuuuguguaa

SEQ ID NO: 937279 - RNA, 19 nt, Artificial Sequence
  Description of Artificial Sequence: Synthetic oligonucleotide
  Antisense strand to SEQ ID NO: 937278
uuacacaaagcgcuaggcg

SEQ ID NO: 937280 - RNA, 19 nt, Artificial Sequence
  Description of Artificial Sequence: Synthetic oligonucleotide
  Sense strand starting at position 2177 of SEQ ID NO: 913567
ccagaaagcucgcagucga

SEQ ID NO: 937281 - RNA, 19 nt, Artificial Sequence
  Description of Artificial Sequence: Synthetic oligonucleotide
  Antisense strand to SEQ ID NO: 937280
ucgacugcgagcuuucugg

SEQ ID NO: 937282 - RNA, 19 nt, Artificial Sequence
  Description of Artificial Sequence: Synthetic oligonucleotide
  Sense strand starting at position 2300 of SEQ ID NO: 913567
uguuuauuauaggguugca

SEQ ID NO: 937283 - RNA, 19 nt, Artificial Sequence
  Description of Artificial Sequence: Synthetic oligonucleotide
  Antisense strand to SEQ ID NO: 937282
ugcaacccuauaauaaaca

SEQ ID NO: 937284 - RNA, 19 nt, Artificial Sequence
  Description of Artificial Sequence: Synthetic oligonucleotide
  Sense strand starting at position 3239 of SEQ ID NO: 913567
gcuuucgcgugacaaauga

SEQ ID NO: 937285 - RNA, 19 nt, Artificial Sequence
  Description of Artificial Sequence: Synthetic oligonucleotide
  Antisense strand to SEQ ID NO: 937284
ucauuugucacgcgaaagc

SEQ ID NO: 937286 - RNA, 19 nt, Artificial Sequence
  Description of Artificial Sequence: Synthetic oligonucleotide
  Sense strand starting at position 578 of SEQ ID NO: 913568
cagaacaauguuggaagua

SEQ ID NO: 937287 - RNA, 19 nt, Artificial Sequence
  Description of Artificial Sequence: Synthetic oligonucleotide
  Antisense strand to SEQ ID NO: 937286
uacuuccaacauuguucug

SEQ ID NO: 937288 - RNA, 19 nt, Artificial Sequence
  Description of Artificial Sequence: Synthetic oligonucleotide
  Sense strand starting at position 3792 of SEQ ID NO: 913568
ccuuguaugaaaugaggau

SEQ ID NO: 937289 - RNA, 19 nt, Artificial Sequence
  Description of Artificial Sequence: Synthetic oligonucleotide
  Antisense strand to SEQ ID NO: 937288
auccucauuucauacaagg

SEQ ID NO: 937290 - RNA, 19 nt, Artificial Sequence
  Description of Artificial Sequence: Synthetic oligonucleotide
  Sense strand starting at position 2302 of SEQ ID NO: 913568
ucgucacuucccguagcaa

SEQ ID NO: 937291 - RNA, 19 nt, Artificial Sequence
  Description of Artificial Sequence: Synthetic oligonucleotide
  Antisense strand to SEQ ID NO: 937290
uugcuacgggaagugacga

SEQ ID NO: 937292 - RNA, 19 nt, Artificial Sequence
  Description of Artificial Sequence: Synthetic oligonucleotide
  Sense strand starting at position 2706 of SEQ ID NO: 913568
ucgggucuggucguucauu

SEQ ID NO: 937293 - RNA, 19 nt, Artificial Sequence
  Description of Artificial Sequence: Synthetic oligonucleotide
  Antisense strand to SEQ ID NO: 937292
aaugaacgaccagacccga

SEQ ID NO: 937294 - RNA, 19 nt, Artificial Sequence
  Description of Artificial Sequence: Synthetic oligonucleotide
  Sense strand starting at position 2587 of SEQ ID NO: 913568
uguauugcucgaguuugca

SEQ ID NO: 937295 - RNA, 19 nt, Artificial Sequence
  Description of Artificial Sequence: Synthetic oligonucleotide
  Antisense strand to SEQ ID NO: 937294
ugcaaacucgagcaauaca

SEQ ID NO: 937296 - RNA, 19 nt, Artificial Sequence
  Description of Artificial Sequence: Synthetic oligonucleotide
  Sense strand starting at position 2756 of SEQ ID NO: 913568
cacugugucagguaggaga

SEQ ID NO: 937297 - RNA, 19 nt, Artificial Sequence
  Description of Artificial Sequence: Synthetic oligonucleotide
  Antisense strand to SEQ ID NO: 937296
ucuccuaccugacacagug

SEQ ID NO: 937298 - RNA, 19 nt, Artificial Sequence
  Description of Artificial Sequence: Synthetic oligonucleotide
  Sense strand starting at position 2751 of SEQ ID NO: 913568
gcguucacugugucaggua

SEQ ID NO: 937299 - RNA, 19 nt, Artificial Sequence
  Description of Artificial Sequence: Synthetic oligonucleotide
  Antisense strand to SEQ ID NO: 937298
uaccugacacagugaacgc

SEQ ID NO: 937300 - RNA, 19 nt, Artificial Sequence
  Description of Artificial Sequence: Synthetic oligonucleotide
  Sense strand starting at position 2656 of SEQ ID NO: 913568
ucugaaagugucgaccaga

SEQ ID NO: 937301 - RNA, 19 nt, Artificial Sequence
  Description of Artificial Sequence: Synthetic oligonucleotide
  Antisense strand to SEQ ID NO: 937300
ucuggucgacacuuucaga

SEQ ID NO: 937302 - RNA, 19 nt, Artificial Sequence
  Description of Artificial Sequence: Synthetic oligonucleotide
  Sense strand starting at position 2616 of SEQ ID NO: 913568
cgcggauguguguccuuaa

SEQ ID NO: 937303 - RNA, 19 nt, Artificial Sequence
  Description of Artificial Sequence: Synthetic oligonucleotide
  Antisense strand to SEQ ID NO: 937302
uuaaggacacacauccgcg

SEQ ID NO: 937304 - RNA, 19 nt, Artificial Sequence
  Description of Artificial Sequence: Synthetic oligonucleotide
  Sense strand starting at position 2644 of SEQ ID NO: 913568
ggaaacgucuacucugaaa

SEQ ID NO: 937305 - RNA, 19 nt, Artificial Sequence
  Description of Artificial Sequence: Synthetic oligonucleotide
  Antisense strand to SEQ ID NO: 937304
uuucagaguagacguuucc

SEQ ID NO: 937306 - RNA, 19 nt, Artificial Sequence
  Description of Artificial Sequence: Synthetic oligonucleotide
  Sense strand starting at position 1282 of SEQ ID NO: 913568
cucuacuucccuuacgaga

SEQ ID NO: 937307 - RNA, 19 nt, Artificial Sequence
  Description of Artificial Sequence: Synthetic oligonucleotide
  Antisense strand to SEQ ID NO: 937306
ucucguaagggaaguagag

SEQ ID NO: 937308 - RNA, 19 nt, Artificial Sequence
  Description of Artificial Sequence: Synthetic oligonucleotide
  Sense strand starting at position 1054 of SEQ ID NO: 913568
guuaaaucacuaggaagca

SEQ ID NO: 937309 - RNA, 19 nt, Artificial Sequence
  Description of Artificial Sequence: Synthetic oligonucleotide
  Antisense strand to SEQ ID NO: 937308
ugcuuccuagugauuuaac

SEQ ID NO: 937310 - RNA, 19 nt, Artificial Sequence
  Description of Artificial Sequence: Synthetic oligonucleotide
  Sense strand starting at position 2805 of SEQ ID NO: 913568
aagccuuaucgucaagaag

SEQ ID NO: 937311 - RNA, 19 nt, Artificial Sequence
  Description of Artificial Sequence: Synthetic oligonucleotide
  Antisense strand to SEQ ID NO: 937310
cuucuugacgauaaggcuu

SEQ ID NO: 937312 - RNA, 19 nt, Artificial Sequence
  Description of Artificial Sequence: Synthetic oligonucleotide
  Sense strand starting at position 596 of SEQ ID NO: 913568
acauauuacgcugaauucu

SEQ ID NO: 937313 - RNA, 19 nt, Artificial Sequence
  Description of Artificial Sequence: Synthetic oligonucleotide
  Antisense strand to SEQ ID NO: 937312
agaauucagcguaauaugu

SEQ ID NO: 937314 - RNA, 19 nt, Artificial Sequence
  Description of Artificial Sequence: Synthetic oligonucleotide
  Sense strand starting at position 2758 of SEQ ID NO: 913568
cugugucagguaggagaaa

SEQ ID NO: 937315 - RNA, 19 nt, Artificial Sequence
  Description of Artificial Sequence: Synthetic oligonucleotide
  Antisense strand to SEQ ID NO: 937314
uuucuccuaccugacacag

SEQ ID NO: 937316 - RNA, 19 nt, Artificial Sequence
  Description of Artificial Sequence: Synthetic oligonucleotide
  Sense strand starting at position 1287 of SEQ ID NO: 913568
cuucccuuacgagaguuua

SEQ ID NO: 937317 - RNA, 19 nt, Artificial Sequence
  Description of Artificial Sequence: Synthetic oligonucleotide
  Antisense strand to SEQ ID NO: 937316
uaaacucucguaagggaag

SEQ ID NO: 937318 - RNA, 19 nt, Artificial Sequence
  Description of Artificial Sequence: Synthetic oligonucleotide
  Sense strand starting at position 1193 of SEQ ID NO: 913568
ucaacucaugugggucaaa

SEQ ID NO: 937319 - RNA, 19 nt, Artificial Sequence
  Description of Artificial Sequence: Synthetic oligonucleotide
  Antisense strand to SEQ ID NO: 937318
uuugacccacaugaguuga

SEQ ID NO: 937320 - RNA, 19 nt, Artificial Sequence
  Description of Artificial Sequence: Synthetic oligonucleotide
  Sense strand starting at position 2358 of SEQ ID NO: 913568
gcuuuccgcgugguaaauu

SEQ ID NO: 937321 - RNA, 19 nt, Artificial Sequence
  Description of Artificial Sequence: Synthetic oligonucleotide
  Antisense strand to SEQ ID NO: 937320
aauuuaccacgcggaaagc

SEQ ID NO: 937322 - RNA, 19 nt, Artificial Sequence
  Description of Artificial Sequence: Synthetic oligonucleotide
  Sense strand starting at position 3740 of SEQ ID NO: 913568
ccagucugcucuguuauuu

SEQ ID NO: 937323 - RNA, 19 nt, Artificial Sequence
  Description of Artificial Sequence: Synthetic oligonucleotide
  Antisense strand to SEQ ID NO: 937322
aaauaacagagcagacugg

SEQ ID NO: 937324 - RNA, 19 nt, Artificial Sequence
  Description of Artificial Sequence: Synthetic oligonucleotide
  Sense strand starting at position 784 of SEQ ID NO: 913568
aacagaguuuggucaugua

SEQ ID NO: 937325 - RNA, 19 nt, Artificial Sequence
  Description of Artificial Sequence: Synthetic oligonucleotide
  Antisense strand to SEQ ID NO: 937324
uacaugaccaaacucuguu

SEQ ID NO: 937326 - RNA, 19 nt, Artificial Sequence
  Description of Artificial Sequence: Synthetic oligonucleotide
  Sense strand starting at position 1167 of SEQ ID NO: 913568
ccuuuacauuuccauggga

SEQ ID NO: 937327 - RNA, 19 nt, Artificial Sequence
  Description of Artificial Sequence: Synthetic oligonucleotide
  Antisense strand to SEQ ID NO: 937326
ucccauggaaauguaaagg

SEQ ID NO: 937328 - RNA, 19 nt, Artificial Sequence
  Description of Artificial Sequence: Synthetic oligonucleotide
  Sense strand starting at position 870 of SEQ ID NO: 913568
ucuugcaccugaguacaaa

SEQ ID NO: 937329 - RNA, 19 nt, Artificial Sequence
  Description of Artificial Sequence: Synthetic oligonucleotide
  Antisense strand to SEQ ID NO: 937328
uuuguacucaggugcaaga

SEQ ID NO: 937330 - RNA, 19 nt, Artificial Sequence
  Description of Artificial Sequence: Synthetic oligonucleotide
  Sense strand starting at position 2646 of SEQ ID NO: 913568
aaacgucuacucugaaagu

SEQ ID NO: 937331 - RNA, 19 nt, Artificial Sequence
  Description of Artificial Sequence: Synthetic oligonucleotide
  Antisense strand to SEQ ID NO: 937330
acuuucagaguagacguuu

SEQ ID NO: 937332 - RNA, 19 nt, Artificial Sequence
  Description of Artificial Sequence: Synthetic oligonucleotide
  Sense strand starting at position 2808 of SEQ ID NO: 913568
ccuuaucgucaagaagcuu

SEQ ID NO: 937333 - RNA, 19 nt, Artificial Sequence
  Description of Artificial Sequence: Synthetic oligonucleotide
  Antisense strand to SEQ ID NO: 937332
aagcuucuugacgauaagg

SEQ ID NO: 937334 - RNA, 19 nt, Artificial Sequence
  Description of Artificial Sequence: Synthetic oligonucleotide
  Sense strand starting at position 1087 of SEQ ID NO: 913568
gucagcuaucaagguuaaa

SEQ ID NO: 937335 - RNA, 19 nt, Artificial Sequence
  Description of Artificial Sequence: Synthetic oligonucleotide
  Antisense strand to SEQ ID NO: 937334
uuuaaccuugauagcugac

SEQ ID NO: 937336 - RNA, 19 nt, Artificial Sequence
  Description of Artificial Sequence: Synthetic oligonucleotide
  Sense strand starting at position 467 of SEQ ID NO: 913568
agaugacuguggcuccuau

SEQ ID NO: 937337 - RNA, 19 nt, Artificial Sequence
  Description of Artificial Sequence: Synthetic oligonucleotide
  Antisense strand to SEQ ID NO: 937336
auaggagccacagucaucu

SEQ ID NO: 937338 - RNA, 19 nt, Artificial Sequence
  Description of Artificial Sequence: Synthetic oligonucleotide
  Sense strand starting at position 3787 of SEQ ID NO: 913568
guuucccuuguaugaaaug

SEQ ID NO: 937339 - RNA, 19 nt, Artificial Sequence
  Description of Artificial Sequence: Synthetic oligonucleotide
  Antisense strand to SEQ ID NO: 937338
cauuucauacaagggaaac

SEQ ID NO: 937340 - RNA, 19 nt, Artificial Sequence
  Description of Artificial Sequence: Synthetic oligonucleotide
  Sense strand starting at position 3107 of SEQ ID NO: 913568
gggauagaauaauaucuga

SEQ ID NO: 937341 - RNA, 19 nt, Artificial Sequence
  Description of Artificial Sequence: Synthetic oligonucleotide
  Antisense strand to SEQ ID NO: 937340
ucagauauuauucuauccc

SEQ ID NO: 937342 - RNA, 19 nt, Artificial Sequence
  Description of Artificial Sequence: Synthetic oligonucleotide
  Sense strand starting at position 593 of SEQ ID NO: 913568
aguacauauuacgcugaau

SEQ ID NO: 937343 - RNA, 19 nt, Artificial Sequence
  Description of Artificial Sequence: Synthetic oligonucleotide
  Antisense strand to SEQ ID NO: 937342
auucagcguaauauguacu

SEQ ID NO: 937344 - RNA, 19 nt, Artificial Sequence
  Description of Artificial Sequence: Synthetic oligonucleotide
  Sense strand starting at position 2845 of SEQ ID NO: 913568
agaggucuuguggguuuga

SEQ ID NO: 937345 - RNA, 19 nt, Artificial Sequence
  Description of Artificial Sequence: Synthetic oligonucleotide
  Antisense strand to SEQ ID NO: 937344
ucaaacccacaagaccucu

SEQ ID NO: 937346 - RNA, 19 nt, Artificial Sequence
  Description of Artificial Sequence: Synthetic oligonucleotide
  Sense strand starting at position 3783 of SEQ ID NO: 913568
ccaaguuucccuuguauga

SEQ ID NO: 937347 - RNA, 19 nt, Artificial Sequence
  Description of Artificial Sequence: Synthetic oligonucleotide
  Antisense strand to SEQ ID NO: 937346
ucauacaagggaaacuugg

SEQ ID NO: 937348 - RNA, 19 nt, Artificial Sequence
  Description of Artificial Sequence: Synthetic oligonucleotide
  Sense strand starting at position 3781 of SEQ ID NO: 913568
acccaaguuucccuuguau

SEQ ID NO: 937349 - RNA, 19 nt, Artificial Sequence
  Description of Artificial Sequence: Synthetic oligonucleotide
  Antisense strand to SEQ ID NO: 937348
auacaagggaaacuugggu

SEQ ID NO: 937350 - RNA, 19 nt, Artificial Sequence
  Description of Artificial Sequence: Synthetic oligonucleotide
  Sense strand starting at position 2355 of SEQ ID NO: 913568
gcugcuuuccgcgugguaa

SEQ ID NO: 937351 - RNA, 19 nt, Artificial Sequence
  Description of Artificial Sequence: Synthetic oligonucleotide
  Antisense strand to SEQ ID NO: 937350
uuaccacgcggaaagcagc

SEQ ID NO: 937352 - RNA, 19 nt, Artificial Sequence
  Description of Artificial Sequence: Synthetic oligonucleotide
  Sense strand starting at position 819 of SEQ ID NO: 913568
ugccaaauugaacgcaauu

SEQ ID NO: 937353 - RNA, 19 nt, Artificial Sequence
  Description of Artificial Sequence: Synthetic oligonucleotide
  Antisense strand to SEQ ID NO: 937352
aauugcguucaauuuggca

SEQ ID NO: 937354 - RNA, 19 nt, Artificial Sequence
  Description of Artificial Sequence: Synthetic oligonucleotide
  Sense strand starting at position 634 of SEQ ID NO: 913568
ccuggucucuguucucaaa

SEQ ID NO: 937355 - RNA, 19 nt, Artificial Sequence
  Description of Artificial Sequence: Synthetic oligonucleotide
  Antisense strand to SEQ ID NO: 937354
uuugagaacagagaccagg

SEQ ID NO: 937356 - RNA, 19 nt, Artificial Sequence
  Description of Artificial Sequence: Synthetic oligonucleotide
  Sense strand starting at position 636 of SEQ ID NO: 913568
uggucucuguucucaaauc

SEQ ID NO: 937357 - RNA, 19 nt, Artificial Sequence
  Description of Artificial Sequence: Synthetic oligonucleotide
  Antisense strand to SEQ ID NO: 937356
gauuugagaacagagacca

SEQ ID NO: 937358 - RNA, 19 nt, Artificial Sequence
  Description of Artificial Sequence: Synthetic oligonucleotide
  Sense strand starting at position 3112 of SEQ ID NO: 913568
agaauaauaucugacauug

SEQ ID NO: 937359 - RNA, 19 nt, Artificial Sequence
  Description of Artificial Sequence: Synthetic oligonucleotide
  Antisense strand to SEQ ID NO: 937358
caaugucagauauuauucu

SEQ ID NO: 937360 - RNA, 19 nt, Artificial Sequence
  Description of Artificial Sequence: Synthetic oligonucleotide
  Sense strand starting at position 2389 of SEQ ID NO: 913568
cugugacugugguuggauu

SEQ ID NO: 937361 - RNA, 19 nt, Artificial Sequence
  Description of Artificial Sequence: Synthetic oligonucleotide
  Antisense strand to SEQ ID NO: 937360
aauccaaccacagucacag

SEQ ID NO: 937362 - RNA, 19 nt, Artificial Sequence
  Description of Artificial Sequence: Synthetic oligonucleotide
  Sense strand starting at position 2478 of SEQ ID NO: 913568
aaagguuagcuuuguauuc

SEQ ID NO: 937363 - RNA, 19 nt, Artificial Sequence
  Description of Artificial Sequence: Synthetic oligonucleotide
  Antisense strand to SEQ ID NO: 937362
gaauacaaagcuaaccuuu

SEQ ID NO: 937364 - RNA, 19 nt, Artificial Sequence
  Description of Artificial Sequence: Synthetic oligonucleotide
  Sense strand starting at position 541 of SEQ ID NO: 913568
guuguagccuccuuagaag

SEQ ID NO: 937365 - RNA, 19 nt, Artificial Sequence
  Description of Artificial Sequence: Synthetic oligonucleotide
  Antisense strand to SEQ ID NO: 937364
cuucuaaggaggcuacaac

SEQ ID NO: 937366 - RNA, 19 nt, Artificial Sequence
  Description of Artificial Sequence: Synthetic oligonucleotide
  Sense strand starting at position 261 of SEQ ID NO: 913569
cagaacaauguuggaagua

SEQ ID NO: 937367 - RNA, 19 nt, Artificial Sequence
  Description of Artificial Sequence: Synthetic oligonucleotide
  Antisense strand to SEQ ID NO: 937366
uacuuccaacauuguucug

SEQ ID NO: 937368 - RNA, 19 nt, Artificial Sequence
  Description of Artificial Sequence: Synthetic oligonucleotide
  Sense strand starting at position 3475 of SEQ ID NO: 913569
ccuuguaugaaaugaggau

SEQ ID NO: 937369 - RNA, 19 nt, Artificial Sequence
  Description of Artificial Sequence: Synthetic oligonucleotide
  Antisense strand to SEQ ID NO: 937368
auccucauuucauacaagg

SEQ ID NO: 937370 - RNA, 19 nt, Artificial Sequence
  Description of Artificial Sequence: Synthetic oligonucleotide
  Sense strand starting at position 1985 of SEQ ID NO: 913569
ucgucacuucccguagcaa

SEQ ID NO: 937371 - RNA, 19 nt, Artificial Sequence
  Description of Artificial Sequence: Synthetic oligonucleotide
  Antisense strand to SEQ ID NO: 937370
uugcuacgggaagugacga

SEQ ID NO: 937372 - RNA, 19 nt, Artificial Sequence
  Description of Artificial Sequence: Synthetic oligonucleotide
  Sense strand starting at position 2389 of SEQ ID NO: 913569
ucgggucuggucguucauu

SEQ ID NO: 937373 - RNA, 19 nt, Artificial Sequence
  Description of Artificial Sequence: Synthetic oligonucleotide
  Antisense strand to SEQ ID NO: 937372
aaugaacgaccagacccga

SEQ ID NO: 937374 - RNA, 19 nt, Artificial Sequence
  Description of Artificial Sequence: Synthetic oligonucleotide
  Sense strand starting at position 2270 of SEQ ID NO: 913569
uguauugcucgaguuugca

SEQ ID NO: 937375 - RNA, 19 nt, Artificial Sequence
  Description of Artificial Sequence: Synthetic oligonucleotide
  Antisense strand to SEQ ID NO: 937374
ugcaaacucgagcaauaca

SEQ ID NO: 937376 - RNA, 19 nt, Artificial Sequence
  Description of Artificial Sequence: Synthetic oligonucleotide
  Sense strand starting at position 2439 of SEQ ID NO: 913569
cacugugucagguaggaga

SEQ ID NO: 937377 - RNA, 19 nt, Artificial Sequence
  Description of Artificial Sequence: Synthetic oligonucleotide
  Antisense strand to SEQ ID NO: 937376
ucuccuaccugacacagug

SEQ ID NO: 937378 - RNA, 19 nt, Artificial Sequence
  Description of Artificial Sequence: Synthetic oligonucleotide
  Sense strand starting at position 2434 of SEQ ID NO: 913569
gcguucacugugucaggua

SEQ ID NO: 937379 - RNA, 19 nt, Artificial Sequence
  Description of Artificial Sequence: Synthetic oligonucleotide
  Antisense strand to SEQ ID NO: 937378
uaccugacacagugaacgc

SEQ ID NO: 937380 - RNA, 19 nt, Artificial Sequence
  Description of Artificial Sequence: Synthetic oligonucleotide
  Sense strand starting at position 2339 of SEQ ID NO: 913569
ucugaaagugucgaccaga

SEQ ID NO: 937381 - RNA, 19 nt, Artificial Sequence
  Description of Artificial Sequence: Synthetic oligonucleotide
  Antisense strand to SEQ ID NO: 937380
ucuggucgacacuuucaga

SEQ ID NO: 937382 - RNA, 19 nt, Artificial Sequence
  Description of Artificial Sequence: Synthetic oligonucleotide
  Sense strand starting at position 2299 of SEQ ID NO: 913569
cgcggauguguguccuuaa

SEQ ID NO: 937383 - RNA, 19 nt, Artificial Sequence
  Description of Artificial Sequence: Synthetic oligonucleotide
  Antisense strand to SEQ ID NO: 937382
uuaaggacacacauccgcg

SEQ ID NO: 937384 - RNA, 19 nt, Artificial Sequence
  Description of Artificial Sequence: Synthetic oligonucleotide
  Sense strand starting at position 2327 of SEQ ID NO: 913569
ggaaacgucuacucugaaa

SEQ ID NO: 937385 - RNA, 19 nt, Artificial Sequence
  Description of Artificial Sequence: Synthetic oligonucleotide
  Antisense strand to SEQ ID NO: 937384
uuucagaguagacguuucc

SEQ ID NO: 937386 - RNA, 19 nt, Artificial Sequence
  Description of Artificial Sequence: Synthetic oligonucleotide
  Sense strand starting at position 965 of SEQ ID NO: 913569
cucuacuucccuuacgaga

SEQ ID NO: 937387 - RNA, 19 nt, Artificial Sequence
  Description of Artificial Sequence: Synthetic oligonucleotide
  Antisense strand to SEQ ID NO: 937386
ucucguaagggaaguagag

SEQ ID NO: 937388 - RNA, 19 nt, Artificial Sequence
  Description of Artificial Sequence: Synthetic oligonucleotide
  Sense strand starting at position 737 of SEQ ID NO: 913569
guuaaaucacuaggaagca

SEQ ID NO: 937389 - RNA, 19 nt, Artificial Sequence
  Description of Artificial Sequence: Synthetic oligonucleotide
  Antisense strand to SEQ ID NO: 937388
ugcuuccuagugauuuaac

SEQ ID NO: 937390 - RNA, 19 nt, Artificial Sequence
  Description of Artificial Sequence: Synthetic oligonucleotide
  Sense strand starting at position 2488 of SEQ ID NO: 913569
aagccuuaucgucaagaag

SEQ ID NO: 937391 - RNA, 19 nt, Artificial Sequence
  Description of Artificial Sequence: Synthetic oligonucleotide
  Antisense strand to SEQ ID NO: 937390
cuucuugacgauaaggcuu

SEQ ID NO: 937392 - RNA, 19 nt, Artificial Sequence
  Description of Artificial Sequence: Synthetic oligonucleotide
  Sense strand starting at position 279 of SEQ ID NO: 913569
acauauuacgcugaauucu

SEQ ID NO: 937393 - RNA, 19 nt, Artificial Sequence
  Description of Artificial Sequence: Synthetic oligonucleotide
  Antisense strand to SEQ ID NO: 937392
agaauucagcguaauaugu

SEQ ID NO: 937394 - RNA, 19 nt, Artificial Sequence
  Description of Artificial Sequence: Synthetic oligonucleotide
  Sense strand starting at position 2441 of SEQ ID NO: 913569
cugugucagguaggagaaa

SEQ ID NO: 937395 - RNA, 19 nt, Artificial Sequence
  Description of Artificial Sequence: Synthetic oligonucleotide
  Antisense strand to SEQ ID NO: 937394
uuucuccuaccugacacag

SEQ ID NO: 937396 - RNA, 19 nt, Artificial Sequence
  Description of Artificial Sequence: Synthetic oligonucleotide
  Sense strand starting at position 970 of SEQ ID NO: 913569
cuucccuuacgagaguuua

SEQ ID NO: 937397 - RNA, 19 nt, Artificial Sequence
  Description of Artificial Sequence: Synthetic oligonucleotide
  Antisense strand to SEQ ID NO: 937396
uaaacucucguaagggaag

SEQ ID NO: 937398 - RNA, 19 nt, Artificial Sequence
  Description of Artificial Sequence: Synthetic oligonucleotide
  Sense strand starting at position 876 of SEQ ID NO: 913569
ucaacucaugugggucaaa

SEQ ID NO: 937399 - RNA, 19 nt, Artificial Sequence
  Description of Artificial Sequence: Synthetic oligonucleotide
  Antisense strand to SEQ ID NO: 937398
uuugacccacaugaguuga

SEQ ID NO: 937400 - RNA, 19 nt, Artificial Sequence
  Description of Artificial Sequence: Synthetic oligonucleotide
  Sense strand starting at position 2041 of SEQ ID NO: 913569
gcuuuccgcgugguaaauu

SEQ ID NO: 937401 - RNA, 19 nt, Artificial Sequence
  Description of Artificial Sequence: Synthetic oligonucleotide
  Antisense strand to SEQ ID NO: 937400
aauuuaccacgcggaaagc

SEQ ID NO: 937402 - RNA, 19 nt, Artificial Sequence
  Description of Artificial Sequence: Synthetic oligonucleotide
  Sense strand starting at position 3423 of SEQ ID NO: 913569
ccagucugcucuguuauuu

SEQ ID NO: 937403 - RNA, 19 nt, Artificial Sequence
  Description of Artificial Sequence: Synthetic oligonucleotide
  Antisense strand to SEQ ID NO: 937402
aaauaacagagcagacugg

SEQ ID NO: 937404 - RNA, 19 nt, Artificial Sequence
  Description of Artificial Sequence: Synthetic oligonucleotide
  Sense strand starting at position 467 of SEQ ID NO: 913569
aacagaguuuggucaugua

SEQ ID NO: 937405 - RNA, 19 nt, Artificial Sequence
  Description of Artificial Sequence: Synthetic oligonucleotide
  Antisense strand to SEQ ID NO: 937404
uacaugaccaaacucuguu

SEQ ID NO: 937406 - RNA, 19 nt, Artificial Sequence
  Description of Artificial Sequence: Synthetic oligonucleotide
  Sense strand starting at position 850 of SEQ ID NO: 913569
ccuuuacauuuccauggga

SEQ ID NO: 937407 - RNA, 19 nt, Artificial Sequence
  Description of Artificial Sequence: Synthetic oligonucleotide
  Antisense strand to SEQ ID NO: 937406
ucccauggaaauguaaagg

SEQ ID NO: 937408 - RNA, 19 nt, Artificial Sequence
  Description of Artificial Sequence: Synthetic oligonucleotide
  Sense strand starting at position 553 of SEQ ID NO: 913569
ucuugcaccugaguacaaa

SEQ ID NO: 937409 - RNA, 19 nt, Artificial Sequence
  Description of Artificial Sequence: Synthetic oligonucleotide
  Antisense strand to SEQ ID NO: 937408
uuuguacucaggugcaaga

SEQ ID NO: 937410 - RNA, 19 nt, Artificial Sequence
  Description of Artificial Sequence: Synthetic oligonucleotide
  Sense strand starting at position 2329 of SEQ ID NO: 913569
aaacgucuacucugaaagu

SEQ ID NO: 937411 - RNA, 19 nt, Artificial Sequence
  Description of Artificial Sequence: Synthetic oligonucleotide
  Antisense strand to SEQ ID NO: 937410
acuuucagaguagacguuu

SEQ ID NO: 937412 - RNA, 19 nt, Artificial Sequence
  Description of Artificial Sequence: Synthetic oligonucleotide
  Sense strand starting at position 2491 of SEQ ID NO: 913569
ccuuaucgucaagaagcuu

SEQ ID NO: 937413 - RNA, 19 nt, Artificial Sequence
  Description of Artificial Sequence: Synthetic oligonucleotide
  Antisense strand to SEQ ID NO: 937412
aagcuucuugacgauaagg

SEQ ID NO: 937414 - RNA, 19 nt, Artificial Sequence
  Description of Artificial Sequence: Synthetic oligonucleotide
  Sense strand starting at position 770 of SEQ ID NO: 913569
gucagcuaucaagguuaaa

SEQ ID NO: 937415 - RNA, 19 nt, Artificial Sequence
  Description of Artificial Sequence: Synthetic oligonucleotide
  Antisense strand to SEQ ID NO: 937414
uuuaaccuugauagcugac

SEQ ID NO: 937416 - RNA, 19 nt, Artificial Sequence
  Description of Artificial Sequence: Synthetic oligonucleotide
  Sense strand starting at position 150 of SEQ ID NO: 913569
agaugacuguggcuccuau

SEQ ID NO: 937417 - RNA, 19 nt, Artificial Sequence
  Description of Artificial Sequence: Synthetic oligonucleotide
  Antisense strand to SEQ ID NO: 937416
auaggagccacagucaucu

SEQ ID NO: 937418 - RNA, 19 nt, Artificial Sequence
  Description of Artificial Sequence: Synthetic oligonucleotide
  Sense strand starting at position 3470 of SEQ ID NO: 913569
guuucccuuguaugaaaug

SEQ ID NO: 937419 - RNA, 19 nt, Artificial Sequence
  Description of Artificial Sequence: Synthetic oligonucleotide
  Antisense strand to SEQ ID NO: 937418
cauuucauacaagggaaac

SEQ ID NO: 937420 - RNA, 19 nt, Artificial Sequence
  Description of Artificial Sequence: Synthetic oligonucleotide
  Sense strand starting at position 2790 of SEQ ID NO: 913569
gggauagaauaauaucuga

SEQ ID NO: 937421 - RNA, 19 nt, Artificial Sequence
  Description of Artificial Sequence: Synthetic oligonucleotide
  Antisense strand to SEQ ID NO: 937420
ucagauauuauucuauccc

SEQ ID NO: 937422 - RNA, 19 nt, Artificial Sequence
  Description of Artificial Sequence: Synthetic oligonucleotide
  Sense strand starting at position 276 of SEQ ID NO: 913569
aguacauauuacgcugaau

SEQ ID NO: 937423 - RNA, 19 nt, Artificial Sequence
  Description of Artificial Sequence: Synthetic oligonucleotide
  Antisense strand to SEQ ID NO: 937422
auucagcguaauauguacu

SEQ ID NO: 937424 - RNA, 19 nt, Artificial Sequence
  Description of Artificial Sequence: Synthetic oligonucleotide
  Sense strand starting at position 2528 of SEQ ID NO: 913569
agaggucuuguggguuuga

SEQ ID NO: 937425 - RNA, 19 nt, Artificial Sequence
  Description of Artificial Sequence: Synthetic oligonucleotide
  Antisense strand to SEQ ID NO: 937424
ucaaacccacaagaccucu

SEQ ID NO: 937426 - RNA, 19 nt, Artificial Sequence
  Description of Artificial Sequence: Synthetic oligonucleotide
  Sense strand starting at position 3466 of SEQ ID NO: 913569
ccaaguuucccuuguauga

SEQ ID NO: 937427 - RNA, 19 nt, Artificial Sequence
  Description of Artificial Sequence: Synthetic oligonucleotide
  Antisense strand to SEQ ID NO: 937426
ucauacaagggaaacuugg

SEQ ID NO: 937428 - RNA, 19 nt, Artificial Sequence
  Description of Artificial Sequence: Synthetic oligonucleotide
  Sense strand starting at position 3464 of SEQ ID NO: 913569
acccaaguuucccuuguau

SEQ ID NO: 937429 - RNA, 19 nt, Artificial Sequence
  Description of Artificial Sequence: Synthetic oligonucleotide
  Antisense strand to SEQ ID NO: 937428
auacaagggaaacuugggu

SEQ ID NO: 937430 - RNA, 19 nt, Artificial Sequence
  Description of Artificial Sequence: Synthetic oligonucleotide
  Sense strand starting at position 2038 of SEQ ID NO: 913569
gcugcuuuccgcgugguaa

SEQ ID NO: 937431 - RNA, 19 nt, Artificial Sequence
  Description of Artificial Sequence: Synthetic oligonucleotide
  Antisense strand to SEQ ID NO: 937430
uuaccacgcggaaagcagc

SEQ ID NO: 937432 - RNA, 19 nt, Artificial Sequence
  Description of Artificial Sequence: Synthetic oligonucleotide
  Sense strand starting at position 502 of SEQ ID NO: 913569
ugccaaauugaacgcaauu

SEQ ID NO: 937433 - RNA, 19 nt, Artificial Sequence
  Description of Artificial Sequence: Synthetic oligonucleotide
  Antisense strand to SEQ ID NO: 937432
aauugcguucaauuuggca

SEQ ID NO: 937434 - RNA, 19 nt, Artificial Sequence
  Description of Artificial Sequence: Synthetic oligonucleotide
  Sense strand starting at position 317 of SEQ ID NO: 913569
ccuggucucuguucucaaa

SEQ ID NO: 937435 - RNA, 19 nt, Artificial Sequence
  Description of Artificial Sequence: Synthetic oligonucleotide
  Antisense strand to SEQ ID NO: 937434
uuugagaacagagaccagg

SEQ ID NO: 937436 - RNA, 19 nt, Artificial Sequence
  Description of Artificial Sequence: Synthetic oligonucleotide
  Sense strand starting at position 319 of SEQ ID NO: 913569
uggucucuguucucaaauc

SEQ ID NO: 937437 - RNA, 19 nt, Artificial Sequence
  Description of Artificial Sequence: Synthetic oligonucleotide
  Antisense strand to SEQ ID NO: 937436
gauuugagaacagagacca

SEQ ID NO: 937438 - RNA, 19 nt, Artificial Sequence
  Description of Artificial Sequence: Synthetic oligonucleotide
  Sense strand starting at position 2795 of SEQ ID NO: 913569
agaauaauaucugacauug

SEQ ID NO: 937439 - RNA, 19 nt, Artificial Sequence
  Description of Artificial Sequence: Synthetic oligonucleotide
  Antisense strand to SEQ ID NO: 937438
caaugucagauauuauucu

SEQ ID NO: 937440 - RNA, 19 nt, Artificial Sequence
  Description of Artificial Sequence: Synthetic oligonucleotide
  Sense strand starting at position 2072 of SEQ ID NO: 913569
cugugacugugguuggauu

SEQ ID NO: 937441 - RNA, 19 nt, Artificial Sequence
  Description of Artificial Sequence: Synthetic oligonucleotide
  Antisense strand to SEQ ID NO: 937440
aauccaaccacagucacag

SEQ ID NO: 937442 - RNA, 19 nt, Artificial Sequence
  Description of Artificial Sequence: Synthetic oligonucleotide
  Sense strand starting at position 2161 of SEQ ID NO: 913569
aaagguuagcuuuguauuc

SEQ ID NO: 937443 - RNA, 19 nt, Artificial Sequence
  Description of Artificial Sequence: Synthetic oligonucleotide
  Antisense strand to SEQ ID NO: 937442
gaauacaaagcuaaccuuu

SEQ ID NO: 937444 - RNA, 19 nt, Artificial Sequence
  Description of Artificial Sequence: Synthetic oligonucleotide
  Sense strand starting at position 224 of SEQ ID NO: 913569
guuguagccuccuuagaag

SEQ ID NO: 937445 - RNA, 19 nt, Artificial Sequence
  Description of Artificial Sequence: Synthetic oligonucleotide
  Antisense strand to SEQ ID NO: 937444
cuucuaaggaggcuacaac

SEQ ID NO: 937446 - RNA, 19 nt, Artificial Sequence
  Description of Artificial Sequence: Synthetic oligonucleotide
  Sense strand starting at position 2750 of SEQ ID NO: 913570
ccacaucagccugagaacu

SEQ ID NO: 937447 - RNA, 19 nt, Artificial Sequence
  Description of Artificial Sequence: Synthetic oligonucleotide
  Antisense strand to SEQ ID NO: 937446
aguucucaggcugaugugg

SEQ ID NO: 937448 - RNA, 19 nt, Artificial Sequence
  Description of Artificial Sequence: Synthetic oligonucleotide
  Sense strand starting at position 861 of SEQ ID NO: 913570
uaaggucagagagguagau

SEQ ID NO: 937449 - RNA, 19 nt, Artificial Sequence
  Description of Artificial Sequence: Synthetic oligonucleotide
  Antisense strand to SEQ ID NO: 937448
aucuaccucucugaccuua

SEQ ID NO: 937450 - RNA, 19 nt, Artificial Sequence
  Description of Artificial Sequence: Synthetic oligonucleotide
  Sense strand starting at position 331 of SEQ ID NO: 913570
ggucacuuuccucaagaac

SEQ ID NO: 937451 - RNA, 19 nt, Artificial Sequence
  Description of Artificial Sequence: Synthetic oligonucleotide
  Antisense strand to SEQ ID NO: 937450
guucuugaggaaagugacc

SEQ ID NO: 937452 - RNA, 19 nt, Artificial Sequence
  Description of Artificial Sequence: Synthetic oligonucleotide
  Sense strand starting at position 3740 of SEQ ID NO: 913570
gugauuaacaaguauacga

SEQ ID NO: 937453 - RNA, 19 nt, Artificial Sequence
  Description of Artificial Sequence: Synthetic oligonucleotide
  Antisense strand to SEQ ID NO: 937452
ucguauacuuguuaaucac

SEQ ID NO: 937454 - RNA, 19 nt, Artificial Sequence
  Description of Artificial Sequence: Synthetic oligonucleotide
  Sense strand starting at position 3742 of SEQ ID NO: 913570
gauuaacaaguauacgagu

SEQ ID NO: 937455 - RNA, 19 nt, Artificial Sequence
  Description of Artificial Sequence: Synthetic oligonucleotide
  Antisense strand to SEQ ID NO: 937454
acucguauacuuguuaauc

SEQ ID NO: 937456 - RNA, 19 nt, Artificial Sequence
  Description of Artificial Sequence: Synthetic oligonucleotide
  Sense strand starting at position 627 of SEQ ID NO: 913570
guaguugccgggaguggaa

SEQ ID NO: 937457 - RNA, 19 nt, Artificial Sequence
  Description of Artificial Sequence: Synthetic oligonucleotide
  Antisense strand to SEQ ID NO: 937456
uuccacucccggcaacuac

SEQ ID NO: 937458 - RNA, 19 nt, Artificial Sequence
  Description of Artificial Sequence: Synthetic oligonucleotide
  Sense strand starting at position 3391 of SEQ ID NO: 913570
cucuuccuagguuaugaga

SEQ ID NO: 937459 - RNA, 19 nt, Artificial Sequence
  Description of Artificial Sequence: Synthetic oligonucleotide
  Antisense strand to SEQ ID NO: 937458
ucucauaaccuaggaagag

SEQ ID NO: 937460 - RNA, 19 nt, Artificial Sequence
  Description of Artificial Sequence: Synthetic oligonucleotide
  Sense strand starting at position 1512 of SEQ ID NO: 913570
aacagauuccauggugaug

SEQ ID NO: 937461 - RNA, 19 nt, Artificial Sequence
  Description of Artificial Sequence: Synthetic oligonucleotide
  Antisense strand to SEQ ID NO: 937460
caucaccauggaaucuguu

SEQ ID NO: 937462 - RNA, 19 nt, Artificial Sequence
  Description of Artificial Sequence: Synthetic oligonucleotide
  Sense strand starting at position 1726 of SEQ ID NO: 913570
ggccaucaucagggacaga

SEQ ID NO: 937463 - RNA, 19 nt, Artificial Sequence
  Description of Artificial Sequence: Synthetic oligonucleotide
  Antisense strand to SEQ ID NO: 937462
ucugucccugaugauggcc

SEQ ID NO: 937464 - RNA, 19 nt, Artificial Sequence
  Description of Artificial Sequence: Synthetic oligonucleotide
  Sense strand starting at position 155 of SEQ ID NO: 913570
ccaccagaccuguauucua

SEQ ID NO: 937465 - RNA, 19 nt, Artificial Sequence
  Description of Artificial Sequence: Synthetic oligonucleotide
  Antisense strand to SEQ ID NO: 937464
uagaauacaggucuggugg

SEQ ID NO: 937466 - RNA, 19 nt, Artificial Sequence
  Description of Artificial Sequence: Synthetic oligonucleotide
  Sense strand starting at position 3216 of SEQ ID NO: 913570
ggaauugguccugaauagc

SEQ ID NO: 937467 - RNA, 19 nt, Artificial Sequence
  Description of Artificial Sequence: Synthetic oligonucleotide
  Antisense strand to SEQ ID NO: 937466
gcuauucaggaccaauucc

SEQ ID NO: 937468 - RNA, 19 nt, Artificial Sequence
  Description of Artificial Sequence: Synthetic oligonucleotide
  Sense strand starting at position 3604 of SEQ ID NO: 913570
gugguugaagguuaauaac

SEQ ID NO: 937469 - RNA, 19 nt, Artificial Sequence
  Description of Artificial Sequence: Synthetic oligonucleotide
  Antisense strand to SEQ ID NO: 937468
guuauuaaccuucaaccac

SEQ ID NO: 937470 - RNA, 19 nt, Artificial Sequence
  Description of Artificial Sequence: Synthetic oligonucleotide
  Sense strand starting at position 2721 of SEQ ID NO: 913570
uccugaagccgagaucaau

SEQ ID NO: 937471 - RNA, 19 nt, Artificial Sequence
  Description of Artificial Sequence: Synthetic oligonucleotide
  Antisense strand to SEQ ID NO: 937470
auugaucucggcuucagga

SEQ ID NO: 937472 - RNA, 19 nt, Artificial Sequence
  Description of Artificial Sequence: Synthetic oligonucleotide
  Sense strand starting at position 3877 of SEQ ID NO: 913570
accgaugugucaguaauuu

SEQ ID NO: 937473 - RNA, 19 nt, Artificial Sequence
  Description of Artificial Sequence: Synthetic oligonucleotide
  Antisense strand to SEQ ID NO: 937472
aaauuacugacacaucggu

SEQ ID NO: 937474 - RNA, 19 nt, Artificial Sequence
  Description of Artificial Sequence: Synthetic oligonucleotide
  Sense strand starting at position 1351 of SEQ ID NO: 913570
uauugaggucuguaaaccu

SEQ ID NO: 937475 - RNA, 19 nt, Artificial Sequence
  Description of Artificial Sequence: Synthetic oligonucleotide
  Antisense strand to SEQ ID NO: 937474
agguuuacagaccucaaua

SEQ ID NO: 937476 - RNA, 19 nt, Artificial Sequence
  Description of Artificial Sequence: Synthetic oligonucleotide
  Sense strand starting at position 2087 of SEQ ID NO: 913570
ucaaccaaugagugugaga

SEQ ID NO: 937477 - RNA, 19 nt, Artificial Sequence
  Description of Artificial Sequence: Synthetic oligonucleotide
  Antisense strand to SEQ ID NO: 937476
ucucacacucauugguuga

SEQ ID NO: 937478 - RNA, 19 nt, Artificial Sequence
  Description of Artificial Sequence: Synthetic oligonucleotide
  Sense strand starting at position 2650 of SEQ ID NO: 913570
ccgagaaaggaauguacuu

SEQ ID NO: 937479 - RNA, 19 nt, Artificial Sequence
  Description of Artificial Sequence: Synthetic oligonucleotide
  Antisense strand to SEQ ID NO: 937478
aaguacauuccuuucucgg

SEQ ID NO: 937480 - RNA, 19 nt, Artificial Sequence
  Description of Artificial Sequence: Synthetic oligonucleotide
  Sense strand starting at position 239 of SEQ ID NO: 913570
aagggcagucaauauguau

SEQ ID NO: 937481 - RNA, 19 nt, Artificial Sequence
  Description of Artificial Sequence: Synthetic oligonucleotide
  Antisense strand to SEQ ID NO: 937480
auacauauugacugcccuu

SEQ ID NO: 937482 - RNA, 19 nt, Artificial Sequence
  Description of Artificial Sequence: Synthetic oligonucleotide
  Sense strand starting at position 3365 of SEQ ID NO: 913570
gcuauugaugacggagaaa

SEQ ID NO: 937483 - RNA, 19 nt, Artificial Sequence
  Description of Artificial Sequence: Synthetic oligonucleotide
  Antisense strand to SEQ ID NO: 937482
uuucuccgucaucaauagc

SEQ ID NO: 937484 - RNA, 19 nt, Artificial Sequence
  Description of Artificial Sequence: Synthetic oligonucleotide
  Sense strand starting at position 1338 of SEQ ID NO: 913570
ucuacagacuaguuauuga

SEQ ID NO: 937485 - RNA, 19 nt, Artificial Sequence
  Description of Artificial Sequence: Synthetic oligonucleotide
  Antisense strand to SEQ ID NO: 937484
ucaauaacuagucuguaga

SEQ ID NO: 937486 - RNA, 19 nt, Artificial Sequence
  Description of Artificial Sequence: Synthetic oligonucleotide
  Sense strand starting at position 2181 of SEQ ID NO: 913570
gcaugcacugauuaacaua

SEQ ID NO: 937487 - RNA, 19 nt, Artificial Sequence
  Description of Artificial Sequence: Synthetic oligonucleotide
  Antisense strand to SEQ ID NO: 937486
uauguuaaucagugcaugc

SEQ ID NO: 937488 - RNA, 19 nt, Artificial Sequence
  Description of Artificial Sequence: Synthetic oligonucleotide
  Sense strand starting at position 761 of SEQ ID NO: 913570
gucacagagcuauauacuu

SEQ ID NO: 937489 - RNA, 19 nt, Artificial Sequence
  Description of Artificial Sequence: Synthetic oligonucleotide
  Antisense strand to SEQ ID NO: 937488
aaguauauagcucugugac

SEQ ID NO: 937490 - RNA, 19 nt, Artificial Sequence
  Description of Artificial Sequence: Synthetic oligonucleotide
  Sense strand starting at position 2793 of SEQ ID NO: 913570
agaugcucccgugaaacaa

SEQ ID NO: 937491 - RNA, 19 nt, Artificial Sequence
  Description of Artificial Sequence: Synthetic oligonucleotide
  Antisense strand to SEQ ID NO: 937490
uuguuucacgggagcaucu

SEQ ID NO: 937492 - RNA, 19 nt, Artificial Sequence
  Description of Artificial Sequence: Synthetic oligonucleotide
  Sense strand starting at position 1283 of SEQ ID NO: 913570
cgaucuccaucacugacaa

SEQ ID NO: 937493 - RNA, 19 nt, Artificial Sequence
  Description of Artificial Sequence: Synthetic oligonucleotide
  Antisense strand to SEQ ID NO: 937492
uugucagugauggagaucg

SEQ ID NO: 937494 - RNA, 19 nt, Artificial Sequence
  Description of Artificial Sequence: Synthetic oligonucleotide
  Sense strand starting at position 2131 of SEQ ID NO: 913570
ugaagugauugguuacuag

SEQ ID NO: 937495 - RNA, 19 nt, Artificial Sequence
  Description of Artificial Sequence: Synthetic oligonucleotide
  Antisense strand to SEQ ID NO: 937494
cuaguaaccaaucacuuca

SEQ ID NO: 937496 - RNA, 19 nt, Artificial Sequence
  Description of Artificial Sequence: Synthetic oligonucleotide
  Sense strand starting at position 330 of SEQ ID NO: 913570
uggucacuuuccucaagaa

SEQ ID NO: 937497 - RNA, 19 nt, Artificial Sequence
  Description of Artificial Sequence: Synthetic oligonucleotide
  Antisense strand to SEQ ID NO: 937496
uucuugaggaaagugacca

SEQ ID NO: 937498 - RNA, 19 nt, Artificial Sequence
  Description of Artificial Sequence: Synthetic oligonucleotide
  Sense strand starting at position 656 of SEQ ID NO: 913570
augagaagugaguguuuaa

SEQ ID NO: 937499 - RNA, 19 nt, Artificial Sequence
  Description of Artificial Sequence: Synthetic oligonucleotide
  Antisense strand to SEQ ID NO: 937498
uuaaacacucacuucucau

SEQ ID NO: 937500 - RNA, 19 nt, Artificial Sequence
  Description of Artificial Sequence: Synthetic oligonucleotide
  Sense strand starting at position 883 of SEQ ID NO: 913570
gcuuucuaaggcuauacaa

SEQ ID NO: 937501 - RNA, 19 nt, Artificial Sequence
  Description of Artificial Sequence: Synthetic oligonucleotide
  Antisense strand to SEQ ID NO: 937500
uuguauagccuuagaaagc

SEQ ID NO: 937502 - RNA, 19 nt, Artificial Sequence
  Description of Artificial Sequence: Synthetic oligonucleotide
  Sense strand starting at position 3245 of SEQ ID NO: 913570
aauguuaaaucugugauug

SEQ ID NO: 937503 - RNA, 19 nt, Artificial Sequence
  Description of Artificial Sequence: Synthetic oligonucleotide
  Antisense strand to SEQ ID NO: 937502
caaucacagauuuaacauu

SEQ ID NO: 937504 - RNA, 19 nt, Artificial Sequence
  Description of Artificial Sequence: Synthetic oligonucleotide
  Sense strand starting at position 1335 of SEQ ID NO: 913570
gccucuacagacuaguuau

SEQ ID NO: 937505 - RNA, 19 nt, Artificial Sequence
  Description of Artificial Sequence: Synthetic oligonucleotide
  Antisense strand to SEQ ID NO: 937504
auaacuagucuguagaggc

SEQ ID NO: 937506 - RNA, 19 nt, Artificial Sequence
  Description of Artificial Sequence: Synthetic oligonucleotide
  Sense strand starting at position 572 of SEQ ID NO: 913570
cugcuuacacucuagguaa

SEQ ID NO: 937507 - RNA, 19 nt, Artificial Sequence
  Description of Artificial Sequence: Synthetic oligonucleotide
  Antisense strand to SEQ ID NO: 937506
uuaccuagaguguaagcag

SEQ ID NO: 937508 - RNA, 19 nt, Artificial Sequence
  Description of Artificial Sequence: Synthetic oligonucleotide
  Sense strand starting at position 3767 of SEQ ID NO: 913570
gaaugaccuucugugacuu

SEQ ID NO: 937509 - RNA, 19 nt, Artificial Sequence
  Description of Artificial Sequence: Synthetic oligonucleotide
  Antisense strand to SEQ ID NO: 937508
aagucacagaaggucauuc

SEQ ID NO: 937510 - RNA, 19 nt, Artificial Sequence
  Description of Artificial Sequence: Synthetic oligonucleotide
  Sense strand starting at position 981 of SEQ ID NO: 913570
gucaaaugucuccaguaau

SEQ ID NO: 937511 - RNA, 19 nt, Artificial Sequence
  Description of Artificial Sequence: Synthetic oligonucleotide
  Antisense strand to SEQ ID NO: 937510
auuacuggagacauuugac

SEQ ID NO: 937512 - RNA, 19 nt, Artificial Sequence
  Description of Artificial Sequence: Synthetic oligonucleotide
  Sense strand starting at position 2177 of SEQ ID NO: 913570
ggaagcaugcacugauuaa

SEQ ID NO: 937513 - RNA, 19 nt, Artificial Sequence
  Description of Artificial Sequence: Synthetic oligonucleotide
  Antisense strand to SEQ ID NO: 937512
uuaaucagugcaugcuucc

SEQ ID NO: 937514 - RNA, 19 nt, Artificial Sequence
  Description of Artificial Sequence: Synthetic oligonucleotide
  Sense strand starting at position 792 of SEQ ID NO: 913570
aaugauaaacguuaugugu

SEQ ID NO: 937515 - RNA, 19 nt, Artificial Sequence
  Description of Artificial Sequence: Synthetic oligonucleotide
  Antisense strand to SEQ ID NO: 937514
acacauaacguuuaucauu

SEQ ID NO: 937516 - RNA, 19 nt, Artificial Sequence
  Description of Artificial Sequence: Synthetic oligonucleotide
  Sense strand starting at position 3402 of SEQ ID NO: 913570
uuaugagaauagcuaugca

SEQ ID NO: 937517 - RNA, 19 nt, Artificial Sequence
  Description of Artificial Sequence: Synthetic oligonucleotide
  Antisense strand to SEQ ID NO: 937516
ugcauagcuauucucauaa

SEQ ID NO: 937518 - RNA, 19 nt, Artificial Sequence
  Description of Artificial Sequence: Synthetic oligonucleotide
  Sense strand starting at position 3452 of SEQ ID NO: 913570
guccuaaucccucagucca

SEQ ID NO: 937519 - RNA, 19 nt, Artificial Sequence
  Description of Artificial Sequence: Synthetic oligonucleotide
  Antisense strand to SEQ ID NO: 937518
uggacugagggauuaggac

SEQ ID NO: 937520 - RNA, 19 nt, Artificial Sequence
  Description of Artificial Sequence: Synthetic oligonucleotide
  Sense strand starting at position 3127 of SEQ ID NO: 913570
cuugauaacgucuagcaca

SEQ ID NO: 937521 - RNA, 19 nt, Artificial Sequence
  Description of Artificial Sequence: Synthetic oligonucleotide
  Antisense strand to SEQ ID NO: 937520
ugugcuagacguuaucaag

SEQ ID NO: 937522 - RNA, 19 nt, Artificial Sequence
  Description of Artificial Sequence: Synthetic oligonucleotide
  Sense strand starting at position 3515 of SEQ ID NO: 913570
guaugaugaugugcauaaa

SEQ ID NO: 937523 - RNA, 19 nt, Artificial Sequence
  Description of Artificial Sequence: Synthetic oligonucleotide
  Antisense strand to SEQ ID NO: 937522
uuuaugcacaucaucauac

SEQ ID NO: 937524 - RNA, 19 nt, Artificial Sequence
  Description of Artificial Sequence: Synthetic oligonucleotide
  Sense strand starting at position 1295 of SEQ ID NO: 913570
cugacaaauccuggcaagu

SEQ ID NO: 937525 - RNA, 19 nt, Artificial Sequence
  Description of Artificial Sequence: Synthetic oligonucleotide
  Antisense strand to SEQ ID NO: 937524
acuugccaggauuugucag

SEQ ID NO: 937526 - RNA, 19 nt, Artificial Sequence
  Description of Artificial Sequence: Synthetic oligonucleotide
  Sense strand starting at position 498 of SEQ ID NO: 913571
gugugauugauggaacauu

SEQ ID NO: 937527 - RNA, 19 nt, Artificial Sequence
  Description of Artificial Sequence: Synthetic oligonucleotide
  Antisense strand to SEQ ID NO: 937526
aauguuccaucaaucacac

SEQ ID NO: 937528 - RNA, 19 nt, Artificial Sequence
  Description of Artificial Sequence: Synthetic oligonucleotide
  Sense strand starting at position 623 of SEQ ID NO: 913571
cuacuccgugaggauaaau

SEQ ID NO: 937529 - RNA, 19 nt, Artificial Sequence
  Description of Artificial Sequence: Synthetic oligonucleotide
  Antisense strand to SEQ ID NO: 937528
auuuauccucacggaguag

SEQ ID NO: 937530 - RNA, 19 nt, Artificial Sequence
  Description of Artificial Sequence: Synthetic oligonucleotide
  Sense strand starting at position 1009 of SEQ ID NO: 913571
aaauguauccuugggagac

SEQ ID NO: 937531 - RNA, 19 nt, Artificial Sequence
  Description of Artificial Sequence: Synthetic oligonucleotide
  Antisense strand to SEQ ID NO: 937530
gucucccaaggauacauuu

SEQ ID NO: 937532 - RNA, 19 nt, Artificial Sequence
  Description of Artificial Sequence: Synthetic oligonucleotide
  Sense strand starting at position 2270 of SEQ ID NO: 913571
gugucuguuacagaaagga

SEQ ID NO: 937533 - RNA, 19 nt, Artificial Sequence
  Description of Artificial Sequence: Synthetic oligonucleotide
  Antisense strand to SEQ ID NO: 937532
uccuuucuguaacagacac

SEQ ID NO: 937534 - RNA, 19 nt, Artificial Sequence
  Description of Artificial Sequence: Synthetic oligonucleotide
  Sense strand starting at position 494 of SEQ ID NO: 913571
uagugugugauugauggaa

SEQ ID NO: 937535 - RNA, 19 nt, Artificial Sequence
  Description of Artificial Sequence: Synthetic oligonucleotide
  Antisense strand to SEQ ID NO: 937534
uuccaucaaucacacacua

SEQ ID NO: 937536 - RNA, 19 nt, Artificial Sequence
  Description of Artificial Sequence: Synthetic oligonucleotide
  Sense strand starting at position 3552 of SEQ ID NO: 913571
agucuagcuguagauagaa

SEQ ID NO: 937537 - RNA, 19 nt, Artificial Sequence
  Description of Artificial Sequence: Synthetic oligonucleotide
  Antisense strand to SEQ ID NO: 937536
uucuaucuacagcuagacu

SEQ ID NO: 937538 - RNA, 19 nt, Artificial Sequence
  Description of Artificial Sequence: Synthetic oligonucleotide
  Sense strand starting at position 1506 of SEQ ID NO: 913571
aagcguggaccucaaagau

SEQ ID NO: 937539 - RNA, 19 nt, Artificial Sequence
  Description of Artificial Sequence: Synthetic oligonucleotide
  Antisense strand to SEQ ID NO: 937538
aucuuugagguccacgcuu

SEQ ID NO: 937540 - RNA, 19 nt, Artificial Sequence
  Description of Artificial Sequence: Synthetic oligonucleotide
  Sense strand starting at position 61 of SEQ ID NO: 913571
guuggagcucccuaaugag

SEQ ID NO: 937541 - RNA, 19 nt, Artificial Sequence
  Description of Artificial Sequence: Synthetic oligonucleotide
  Antisense strand to SEQ ID NO: 937540
cucauuagggagcuccaac

SEQ ID NO: 937542 - RNA, 19 nt, Artificial Sequence
  Description of Artificial Sequence: Synthetic oligonucleotide
  Sense strand starting at position 620 of SEQ ID NO: 913571
cuucuacuccgugaggaua

SEQ ID NO: 937543 - RNA, 19 nt, Artificial Sequence
  Description of Artificial Sequence: Synthetic oligonucleotide
  Antisense strand to SEQ ID NO: 937542
uauccucacggaguagaag

SEQ ID NO: 937544 - RNA, 19 nt, Artificial Sequence
  Description of Artificial Sequence: Synthetic oligonucleotide
  Sense strand starting at position 907 of SEQ ID NO: 913571
gcugucuuccaagacugga

SEQ ID NO: 937545 - RNA, 19 nt, Artificial Sequence
  Description of Artificial Sequence: Synthetic oligonucleotide
  Antisense strand to SEQ ID NO: 937544
uccagucuuggaagacagc

SEQ ID NO: 937546 - RNA, 19 nt, Artificial Sequence
  Description of Artificial Sequence: Synthetic oligonucleotide
  Sense strand starting at position 3344 of SEQ ID NO: 913571
gccaguaugguaggagaga

SEQ ID NO: 937547 - RNA, 19 nt, Artificial Sequence
  Description of Artificial Sequence: Synthetic oligonucleotide
  Antisense strand to SEQ ID NO: 937546
ucucuccuaccauacuggc

SEQ ID NO: 937548 - RNA, 19 nt, Artificial Sequence
  Description of Artificial Sequence: Synthetic oligonucleotide
  Sense strand starting at position 3294 of SEQ ID NO: 913571
cugagugaguuucccaaau

SEQ ID NO: 937549 - RNA, 19 nt, Artificial Sequence
  Description of Artificial Sequence: Synthetic oligonucleotide
  Antisense strand to SEQ ID NO: 937548
auuugggaaacucacucag

SEQ ID NO: 937550 - RNA, 19 nt, Artificial Sequence
  Description of Artificial Sequence: Synthetic oligonucleotide
  Sense strand starting at position 3372 of SEQ ID NO: 913571
uccuuaccugguuagucau

SEQ ID NO: 937551 - RNA, 19 nt, Artificial Sequence
  Description of Artificial Sequence: Synthetic oligonucleotide
  Antisense strand to SEQ ID NO: 937550
augacuaaccagguaagga

SEQ ID NO: 937552 - RNA, 19 nt, Artificial Sequence
  Description of Artificial Sequence: Synthetic oligonucleotide
  Sense strand starting at position 3337 of SEQ ID NO: 913571
uaacuuugccaguauggua

SEQ ID NO: 937553 - RNA, 19 nt, Artificial Sequence
  Description of Artificial Sequence: Synthetic oligonucleotide
  Antisense strand to SEQ ID NO: 937552
uaccauacuggcaaaguua

SEQ ID NO: 937554 - RNA, 19 nt, Artificial Sequence
  Description of Artificial Sequence: Synthetic oligonucleotide
  Sense strand starting at position 771 of SEQ ID NO: 913571
ugucaauagaguggcuaaa

SEQ ID NO: 937555 - RNA, 19 nt, Artificial Sequence
  Description of Artificial Sequence: Synthetic oligonucleotide
  Antisense strand to SEQ ID NO: 937554
uuuagccacucuauugaca

SEQ ID NO: 937556 - RNA, 19 nt, Artificial Sequence
  Description of Artificial Sequence: Synthetic oligonucleotide
  Sense strand starting at position 1140 of SEQ ID NO: 913571
ucagcuugagcucaagagu

SEQ ID NO: 937557 - RNA, 19 nt, Artificial Sequence
  Description of Artificial Sequence: Synthetic oligonucleotide
  Antisense strand to SEQ ID NO: 937556
acucuugagcucaagcuga

SEQ ID NO: 937558 - RNA, 19 nt, Artificial Sequence
  Description of Artificial Sequence: Synthetic oligonucleotide
  Sense strand starting at position 2642 of SEQ ID NO: 913571
gucuuaccaacguggagaa

SEQ ID NO: 937559 - RNA, 19 nt, Artificial Sequence
  Description of Artificial Sequence: Synthetic oligonucleotide
  Antisense strand to SEQ ID NO: 937558
uucuccacguugguaagac

SEQ ID NO: 937560 - RNA, 19 nt, Artificial Sequence
  Description of Artificial Sequence: Synthetic oligonucleotide
  Sense strand starting at position 757 of SEQ ID NO: 913571
agcacauaucaagguguca

SEQ ID NO: 937561 - RNA, 19 nt, Artificial Sequence
  Description of Artificial Sequence: Synthetic oligonucleotide
  Antisense strand to SEQ ID NO: 937560
ugacaccuugauaugugcu

SEQ ID NO: 937562 - RNA, 19 nt, Artificial Sequence
  Description of Artificial Sequence: Synthetic oligonucleotide
  Sense strand starting at position 1048 of SEQ ID NO: 913571
acagcuccgccucauuaaa

SEQ ID NO: 937563 - RNA, 19 nt, Artificial Sequence
  Description of Artificial Sequence: Synthetic oligonucleotide
  Antisense strand to SEQ ID NO: 937562
uuuaaugaggcggagcugu

SEQ ID NO: 937564 - RNA, 19 nt, Artificial Sequence
  Description of Artificial Sequence: Synthetic oligonucleotide
  Sense strand starting at position 3371 of SEQ ID NO: 913571
auccuuaccugguuaguca

SEQ ID NO: 937565 - RNA, 19 nt, Artificial Sequence
  Description of Artificial Sequence: Synthetic oligonucleotide
  Antisense strand to SEQ ID NO: 937564
ugacuaaccagguaaggau

SEQ ID NO: 937566 - RNA, 19 nt, Artificial Sequence
  Description of Artificial Sequence: Synthetic oligonucleotide
  Sense strand starting at position 3576 of SEQ ID NO: 913571
cacacaggaugauagauua

SEQ ID NO: 937567 - RNA, 19 nt, Artificial Sequence
  Description of Artificial Sequence: Synthetic oligonucleotide
  Antisense strand to SEQ ID NO: 937566
uaaucuaucauccugugug

SEQ ID NO: 937568 - RNA, 19 nt, Artificial Sequence
  Description of Artificial Sequence: Synthetic oligonucleotide
  Sense strand starting at position 619 of SEQ ID NO: 913571
ucuucuacuccgugaggau

SEQ ID NO: 937569 - RNA, 19 nt, Artificial Sequence
  Description of Artificial Sequence: Synthetic oligonucleotide
  Antisense strand to SEQ ID NO: 937568
auccucacggaguagaaga

SEQ ID NO: 937570 - RNA, 19 nt, Artificial Sequence
  Description of Artificial Sequence: Synthetic oligonucleotide
  Sense strand starting at position 770 of SEQ ID NO: 913571
gugucaauagaguggcuaa

SEQ ID NO: 937571 - RNA, 19 nt, Artificial Sequence
  Description of Artificial Sequence: Synthetic oligonucleotide
  Antisense strand to SEQ ID NO: 937570
uuagccacucuauugacac

SEQ ID NO: 937572 - RNA, 19 nt, Artificial Sequence
  Description of Artificial Sequence: Synthetic oligonucleotide
  Sense strand starting at position 1050 of SEQ ID NO: 913571
agcuccgccucauuaaaga

SEQ ID NO: 937573 - RNA, 19 nt, Artificial Sequence
  Description of Artificial Sequence: Synthetic oligonucleotide
  Antisense strand to SEQ ID NO: 937572
ucuuuaaugaggcggagcu

SEQ ID NO: 937574 - RNA, 19 nt, Artificial Sequence
  Description of Artificial Sequence: Synthetic oligonucleotide
  Sense strand starting at position 487 of SEQ ID NO: 913571
gaaguucuagugugugauu

SEQ ID NO: 937575 - RNA, 19 nt, Artificial Sequence
  Description of Artificial Sequence: Synthetic oligonucleotide
  Antisense strand to SEQ ID NO: 937574
aaucacacacuagaacuuc

SEQ ID NO: 937576 - RNA, 19 nt, Artificial Sequence
  Description of Artificial Sequence: Synthetic oligonucleotide
  Sense strand starting at position 489 of SEQ ID NO: 913571
aguucuagugugugauuga

SEQ ID NO: 937577 - RNA, 19 nt, Artificial Sequence
  Description of Artificial Sequence: Synthetic oligonucleotide
  Antisense strand to SEQ ID NO: 937576
ucaaucacacacuagaacu

SEQ ID NO: 937578 - RNA, 19 nt, Artificial Sequence
  Description of Artificial Sequence: Synthetic oligonucleotide
  Sense strand starting at position 3273 of SEQ ID NO: 913571
gaacgauuaguuggucugu

SEQ ID NO: 937579 - RNA, 19 nt, Artificial Sequence
  Description of Artificial Sequence: Synthetic oligonucleotide
  Antisense strand to SEQ ID NO: 937578
acagaccaacuaaucguuc

SEQ ID NO: 937580 - RNA, 19 nt, Artificial Sequence
  Description of Artificial Sequence: Synthetic oligonucleotide
  Sense strand starting at position 3283 of SEQ ID NO: 913571
uuggucugucucugaguga

SEQ ID NO: 937581 - RNA, 19 nt, Artificial Sequence
  Description of Artificial Sequence: Synthetic oligonucleotide
  Antisense strand to SEQ ID NO: 937580
ucacucagagacagaccaa

SEQ ID NO: 937582 - RNA, 19 nt, Artificial Sequence
  Description of Artificial Sequence: Synthetic oligonucleotide
  Sense strand starting at position 3498 of SEQ ID NO: 913571
gcacucugcuggguuacaa

SEQ ID NO: 937583 - RNA, 19 nt, Artificial Sequence
  Description of Artificial Sequence: Synthetic oligonucleotide
  Antisense strand to SEQ ID NO: 937582
uuguaacccagcagagugc

SEQ ID NO: 937584 - RNA, 19 nt, Artificial Sequence
  Description of Artificial Sequence: Synthetic oligonucleotide
  Sense strand starting at position 3287 of SEQ ID NO: 913571
ucugucucugagugaguuu

SEQ ID NO: 937585 - RNA, 19 nt, Artificial Sequence
  Description of Artificial Sequence: Synthetic oligonucleotide
  Antisense strand to SEQ ID NO: 937584
aaacucacucagagacaga

SEQ ID NO: 937586 - RNA, 19 nt, Artificial Sequence
  Description of Artificial Sequence: Synthetic oligonucleotide
  Sense strand starting at position 3369 of SEQ ID NO: 913571
gcauccuuaccugguuagu

SEQ ID NO: 937587 - RNA, 19 nt, Artificial Sequence
  Description of Artificial Sequence: Synthetic oligonucleotide
  Antisense strand to SEQ ID NO: 937586
acuaaccagguaaggaugc

SEQ ID NO: 937588 - RNA, 19 nt, Artificial Sequence
  Description of Artificial Sequence: Synthetic oligonucleotide
  Sense strand starting at position 3275 of SEQ ID NO: 913571
acgauuaguuggucugucu

SEQ ID NO: 937589 - RNA, 19 nt, Artificial Sequence
  Description of Artificial Sequence: Synthetic oligonucleotide
  Antisense strand to SEQ ID NO: 937588
agacagaccaacuaaucgu

SEQ ID NO: 937590 - RNA, 19 nt, Artificial Sequence
  Description of Artificial Sequence: Synthetic oligonucleotide
  Sense strand starting at position 3286 of SEQ ID NO: 913571
gucugucucugagugaguu

SEQ ID NO: 937591 - RNA, 19 nt, Artificial Sequence
  Description of Artificial Sequence: Synthetic oligonucleotide
  Antisense strand to SEQ ID NO: 937590
aacucacucagagacagac

SEQ ID NO: 937592 - RNA, 19 nt, Artificial Sequence
  Description of Artificial Sequence: Synthetic oligonucleotide
  Sense strand starting at position 3383 of SEQ ID NO: 913571
uuagucauccuucguucca

SEQ ID NO: 937593 - RNA, 19 nt, Artificial Sequence
  Description of Artificial Sequence: Synthetic oligonucleotide
  Antisense strand to SEQ ID NO: 937592
uggaacgaaggaugacuaa

SEQ ID NO: 937594 - RNA, 19 nt, Artificial Sequence
  Description of Artificial Sequence: Synthetic oligonucleotide
  Sense strand starting at position 3385 of SEQ ID NO: 913571
agucauccuucguuccagu

SEQ ID NO: 937595 - RNA, 19 nt, Artificial Sequence
  Description of Artificial Sequence: Synthetic oligonucleotide
  Antisense strand to SEQ ID NO: 937594
acuggaacgaaggaugacu

SEQ ID NO: 937596 - RNA, 19 nt, Artificial Sequence
  Description of Artificial Sequence: Synthetic oligonucleotide
  Sense strand starting at position 3296 of SEQ ID NO: 913571
gagugaguuucccaaauga

SEQ ID NO: 937597 - RNA, 19 nt, Artificial Sequence
  Description of Artificial Sequence: Synthetic oligonucleotide
  Antisense strand to SEQ ID NO: 937596
ucauuugggaaacucacuc

SEQ ID NO: 937598 - RNA, 19 nt, Artificial Sequence
  Description of Artificial Sequence: Synthetic oligonucleotide
  Sense strand starting at position 994 of SEQ ID NO: 913571
cagagaugguccuggaaau

SEQ ID NO: 937599 - RNA, 19 nt, Artificial Sequence
  Description of Artificial Sequence: Synthetic oligonucleotide
  Antisense strand to SEQ ID NO: 937598
auuuccaggaccaucucug

SEQ ID NO: 937600 - RNA, 19 nt, Artificial Sequence
  Description of Artificial Sequence: Synthetic oligonucleotide
  Sense strand starting at position 1 of SEQ ID NO: 913571
agcguauguucauuguauc

SEQ ID NO: 937601 - RNA, 19 nt, Artificial Sequence
  Description of Artificial Sequence: Synthetic oligonucleotide
  Antisense strand to SEQ ID NO: 937600
gauacaaugaacauacgcu

SEQ ID NO: 937602 - RNA, 19 nt, Artificial Sequence
  Description of Artificial Sequence: Synthetic oligonucleotide
  Sense strand starting at position 2268 of SEQ ID NO: 913571
gggugucuguuacagaaag

SEQ ID NO: 937603 - RNA, 19 nt, Artificial Sequence
  Description of Artificial Sequence: Synthetic oligonucleotide
  Antisense strand to SEQ ID NO: 937602
cuuucuguaacagacaccc

SEQ ID NO: 937604 - RNA, 19 nt, Artificial Sequence
  Description of Artificial Sequence: Synthetic oligonucleotide
  Sense strand starting at position 2 of SEQ ID NO: 913571
gcguauguucauuguaucu

SEQ ID NO: 937605 - RNA, 19 nt, Artificial Sequence
  Description of Artificial Sequence: Synthetic oligonucleotide
  Antisense strand to SEQ ID NO: 937604
agauacaaugaacauacgc

SEQ ID NO: 937606 - RNA, 19 nt, Artificial Sequence
  Description of Artificial Sequence: Synthetic oligonucleotide
  Sense strand starting at position 765 of SEQ ID NO: 913572
aucagaauuuccuugugcu

SEQ ID NO: 937607 - RNA, 19 nt, Artificial Sequence
  Description of Artificial Sequence: Synthetic oligonucleotide
  Antisense strand to SEQ ID NO: 937606
agcacaaggaaauucugau

SEQ ID NO: 937608 - RNA, 19 nt, Artificial Sequence
  Description of Artificial Sequence: Synthetic oligonucleotide
  Sense strand starting at position 3751 of SEQ ID NO: 913572
ucccuaagaguguaauaau

SEQ ID NO: 937609 - RNA, 19 nt, Artificial Sequence
  Description of Artificial Sequence: Synthetic oligonucleotide
  Antisense strand to SEQ ID NO: 937608
auuauuacacucuuaggga

SEQ ID NO: 937610 - RNA, 19 nt, Artificial Sequence
  Description of Artificial Sequence: Synthetic oligonucleotide
  Sense strand starting at position 3088 of SEQ ID NO: 913572
cucucuauuggucaagaca

SEQ ID NO: 937611 - RNA, 19 nt, Artificial Sequence
  Description of Artificial Sequence: Synthetic oligonucleotide
  Antisense strand to SEQ ID NO: 937610
ugucuugaccaauagagag

SEQ ID NO: 937612 - RNA, 19 nt, Artificial Sequence
  Description of Artificial Sequence: Synthetic oligonucleotide
  Sense strand starting at position 3153 of SEQ ID NO: 913572
cuucuaagggcuuauuaga

SEQ ID NO: 937613 - RNA, 19 nt, Artificial Sequence
  Description of Artificial Sequence: Synthetic oligonucleotide
  Antisense strand to SEQ ID NO: 937612
ucuaauaagcccuuagaag

SEQ ID NO: 937614 - RNA, 19 nt, Artificial Sequence
  Description of Artificial Sequence: Synthetic oligonucleotide
  Sense strand starting at position 3934 of SEQ ID NO: 913572
ucuguuauaguggaauuaa

SEQ ID NO: 937615 - RNA, 19 nt, Artificial Sequence
  Description of Artificial Sequence: Synthetic oligonucleotide
  Antisense strand to SEQ ID NO: 937614
uuaauuccacuauaacaga

SEQ ID NO: 937616 - RNA, 19 nt, Artificial Sequence
  Description of Artificial Sequence: Synthetic oligonucleotide
  Sense strand starting at position 1284 of SEQ ID NO: 913572
gcagguucuccauaaagga

SEQ ID NO: 937617 - RNA, 19 nt, Artificial Sequence
  Description of Artificial Sequence: Synthetic oligonucleotide
  Antisense strand to SEQ ID NO: 937616
uccuuuauggagaaccugc

SEQ ID NO: 937618 - RNA, 19 nt, Artificial Sequence
  Description of Artificial Sequence: Synthetic oligonucleotide
  Sense strand starting at position 3163 of SEQ ID NO: 913572
cuuauuagaugaguaaacu

SEQ ID NO: 937619 - RNA, 19 nt, Artificial Sequence
  Description of Artificial Sequence: Synthetic oligonucleotide
  Antisense strand to SEQ ID NO: 937618
aguuuacucaucuaauaag

SEQ ID NO: 937620 - RNA, 19 nt, Artificial Sequence
  Description of Artificial Sequence: Synthetic oligonucleotide
  Sense strand starting at position 3266 of SEQ ID NO: 913572
cuaguuuagagguaaguaa

SEQ ID NO: 937621 - RNA, 19 nt, Artificial Sequence
  Description of Artificial Sequence: Synthetic oligonucleotide
  Antisense strand to SEQ ID NO: 937620
uuacuuaccucuaaacuag

SEQ ID NO: 937622 - RNA, 19 nt, Artificial Sequence
  Description of Artificial Sequence: Synthetic oligonucleotide
  Sense strand starting at position 1319 of SEQ ID NO: 913572
auaggaagaucuucucuuu

SEQ ID NO: 937623 - RNA, 19 nt, Artificial Sequence
  Description of Artificial Sequence: Synthetic oligonucleotide
  Antisense strand to SEQ ID NO: 937622
aaagagaagaucuuccuau

SEQ ID NO: 937624 - RNA, 19 nt, Artificial Sequence
  Description of Artificial Sequence: Synthetic oligonucleotide
  Sense strand starting at position 1908 of SEQ ID NO: 913572
auaauuuaggcugguguuu

SEQ ID NO: 937625 - RNA, 19 nt, Artificial Sequence
  Description of Artificial Sequence: Synthetic oligonucleotide
  Antisense strand to SEQ ID NO: 937624
aaacaccagccuaaauuau

SEQ ID NO: 937626 - RNA, 19 nt, Artificial Sequence
  Description of Artificial Sequence: Synthetic oligonucleotide
  Sense strand starting at position 728 of SEQ ID NO: 913572
auauuuaguugcucaguua

SEQ ID NO: 937627 - RNA, 19 nt, Artificial Sequence
  Description of Artificial Sequence: Synthetic oligonucleotide
  Antisense strand to SEQ ID NO: 937626
uaacugagcaacuaaauau

SEQ ID NO: 937628 - RNA, 19 nt, Artificial Sequence
  Description of Artificial Sequence: Synthetic oligonucleotide
  Sense strand starting at position 766 of SEQ ID NO: 913572
ucagaauuuccuugugcuu

SEQ ID NO: 937629 - RNA, 19 nt, Artificial Sequence
  Description of Artificial Sequence: Synthetic oligonucleotide
  Antisense strand to SEQ ID NO: 937628
aagcacaaggaaauucuga

SEQ ID NO: 937630 - RNA, 19 nt, Artificial Sequence
  Description of Artificial Sequence: Synthetic oligonucleotide
  Sense strand starting at position 933 of SEQ ID NO: 913572
aauggaucauuugaguaaa

SEQ ID NO: 937631 - RNA, 19 nt, Artificial Sequence
  Description of Artificial Sequence: Synthetic oligonucleotide
  Antisense strand to SEQ ID NO: 937630
uuuacucaaaugauccauu

SEQ ID NO: 937632 - RNA, 19 nt, Artificial Sequence
  Description of Artificial Sequence: Synthetic oligonucleotide
  Sense strand starting at position 3059 of SEQ ID NO: 913572
ccuaauuaguaagugauaa

SEQ ID NO: 937633 - RNA, 19 nt, Artificial Sequence
  Description of Artificial Sequence: Synthetic oligonucleotide
  Antisense strand to SEQ ID NO: 937632
uuaucacuuacuaauuagg

SEQ ID NO: 937634 - RNA, 19 nt, Artificial Sequence
  Description of Artificial Sequence: Synthetic oligonucleotide
  Sense strand starting at position 3653 of SEQ ID NO: 913572
caaugauugccuuagguag

SEQ ID NO: 937635 - RNA, 19 nt, Artificial Sequence
  Description of Artificial Sequence: Synthetic oligonucleotide
  Antisense strand to SEQ ID NO: 937634
cuaccuaaggcaaucauug

SEQ ID NO: 937636 - RNA, 19 nt, Artificial Sequence
  Description of Artificial Sequence: Synthetic oligonucleotide
  Sense strand starting at position 736 of SEQ ID NO: 913572
uugcucaguuauuucuuau

SEQ ID NO: 937637 - RNA, 19 nt, Artificial Sequence
  Description of Artificial Sequence: Synthetic oligonucleotide
  Antisense strand to SEQ ID NO: 937636
auaagaaauaacugagcaa

SEQ ID NO: 937638 - RNA, 19 nt, Artificial Sequence
  Description of Artificial Sequence: Synthetic oligonucleotide
  Sense strand starting at position 1534 of SEQ ID NO: 913572
gcugacauuccacaagcaa

SEQ ID NO: 937639 - RNA, 19 nt, Artificial Sequence
  Description of Artificial Sequence: Synthetic oligonucleotide
  Antisense strand to SEQ ID NO: 937638
uugcuuguggaaugucagc

SEQ ID NO: 937640 - RNA, 19 nt, Artificial Sequence
  Description of Artificial Sequence: Synthetic oligonucleotide
  Sense strand starting at position 2058 of SEQ ID NO: 913572
acaggauugugauugugag

SEQ ID NO: 937641 - RNA, 19 nt, Artificial Sequence
  Description of Artificial Sequence: Synthetic oligonucleotide
  Antisense strand to SEQ ID NO: 937640
cucacaaucacaauccugu

SEQ ID NO: 937642 - RNA, 19 nt, Artificial Sequence
  Description of Artificial Sequence: Synthetic oligonucleotide
  Sense strand starting at position 3171 of SEQ ID NO: 913572
augaguaaacuaggcacua

SEQ ID NO: 937643 - RNA, 19 nt, Artificial Sequence
  Description of Artificial Sequence: Synthetic oligonucleotide
  Antisense strand to SEQ ID NO: 937642
uagugccuaguuuacucau

SEQ ID NO: 937644 - RNA, 19 nt, Artificial Sequence
  Description of Artificial Sequence: Synthetic oligonucleotide
  Sense strand starting at position 3455 of SEQ ID NO: 913572
agaauagcuccaggaagca

SEQ ID NO: 937645 - RNA, 19 nt, Artificial Sequence
  Description of Artificial Sequence: Synthetic oligonucleotide
  Antisense strand to SEQ ID NO: 937644
ugcuuccuggagcuauucu

SEQ ID NO: 937646 - RNA, 19 nt, Artificial Sequence
  Description of Artificial Sequence: Synthetic oligonucleotide
  Sense strand starting at position 1156 of SEQ ID NO: 913572
ugugacaugucauuaaaua

SEQ ID NO: 937647 - RNA, 19 nt, Artificial Sequence
  Description of Artificial Sequence: Synthetic oligonucleotide
  Antisense strand to SEQ ID NO: 937646
uauuuaaugacaugucaca

SEQ ID NO: 937648 - RNA, 19 nt, Artificial Sequence
  Description of Artificial Sequence: Synthetic oligonucleotide
  Sense strand starting at position 2689 of SEQ ID NO: 913572
ugagauuccugggucuuga

SEQ ID NO: 937649 - RNA, 19 nt, Artificial Sequence
  Description of Artificial Sequence: Synthetic oligonucleotide
  Antisense strand to SEQ ID NO: 937648
ucaagacccaggaaucuca

SEQ ID NO: 937650 - RNA, 19 nt, Artificial Sequence
  Description of Artificial Sequence: Synthetic oligonucleotide
  Sense strand starting at position 3496 of SEQ ID NO: 913572
aagcuaauucugggaaggu

SEQ ID NO: 937651 - RNA, 19 nt, Artificial Sequence
  Description of Artificial Sequence: Synthetic oligonucleotide
  Antisense strand to SEQ ID NO: 937650
accuucccagaauuagcuu

SEQ ID NO: 937652 - RNA, 19 nt, Artificial Sequence
  Description of Artificial Sequence: Synthetic oligonucleotide
  Sense strand starting at position 3160 of SEQ ID NO: 913572
gggcuuauuagaugaguaa

SEQ ID NO: 937653 - RNA, 19 nt, Artificial Sequence
  Description of Artificial Sequence: Synthetic oligonucleotide
  Antisense strand to SEQ ID NO: 937652
uuacucaucuaauaagccc

SEQ ID NO: 937654 - RNA, 19 nt, Artificial Sequence
  Description of Artificial Sequence: Synthetic oligonucleotide
  Sense strand starting at position 1281 of SEQ ID NO: 913572
gaagcagguucuccauaaa

SEQ ID NO: 937655 - RNA, 19 nt, Artificial Sequence
  Description of Artificial Sequence: Synthetic oligonucleotide
  Antisense strand to SEQ ID NO: 937654
uuuauggagaaccugcuuc

SEQ ID NO: 937656 - RNA, 19 nt, Artificial Sequence
  Description of Artificial Sequence: Synthetic oligonucleotide
  Sense strand starting at position 1322 of SEQ ID NO: 913572
ggaagaucuucucuuucuu

SEQ ID NO: 937657 - RNA, 19 nt, Artificial Sequence
  Description of Artificial Sequence: Synthetic oligonucleotide
  Antisense strand to SEQ ID NO: 937656
aagaaagagaagaucuucc

SEQ ID NO: 937658 - RNA, 19 nt, Artificial Sequence
  Description of Artificial Sequence: Synthetic oligonucleotide
  Sense strand starting at position 3749 of SEQ ID NO: 913572
acucccuaagaguguaaua

SEQ ID NO: 937659 - RNA, 19 nt, Artificial Sequence
  Description of Artificial Sequence: Synthetic oligonucleotide
  Antisense strand to SEQ ID NO: 937658
uauuacacucuuagggagu

SEQ ID NO: 937660 - RNA, 19 nt, Artificial Sequence
  Description of Artificial Sequence: Synthetic oligonucleotide
  Sense strand starting at position 731 of SEQ ID NO: 913572
uuuaguugcucaguuauuu

SEQ ID NO: 937661 - RNA, 19 nt, Artificial Sequence
  Description of Artificial Sequence: Synthetic oligonucleotide
  Antisense strand to SEQ ID NO: 937660
aaauaacugagcaacuaaa

SEQ ID NO: 937662 - RNA, 19 nt, Artificial Sequence
  Description of Artificial Sequence: Synthetic oligonucleotide
  Sense strand starting at position 735 of SEQ ID NO: 913572
guugcucaguuauuucuua

SEQ ID NO: 937663 - RNA, 19 nt, Artificial Sequence
  Description of Artificial Sequence: Synthetic oligonucleotide
  Antisense strand to SEQ ID NO: 937662
uaagaaauaacugagcaac

SEQ ID NO: 937664 - RNA, 19 nt, Artificial Sequence
  Description of Artificial Sequence: Synthetic oligonucleotide
  Sense strand starting at position 3483 of SEQ ID NO: 913572
gagaucaucgcacaagcua

SEQ ID NO: 937665 - RNA, 19 nt, Artificial Sequence
  Description of Artificial Sequence: Synthetic oligonucleotide
  Antisense strand to SEQ ID NO: 937664
uagcuugugcgaugaucuc

SEQ ID NO: 937666 - RNA, 19 nt, Artificial Sequence
  Description of Artificial Sequence: Synthetic oligonucleotide
  Sense strand starting at position 959 of SEQ ID NO: 913572
cuaggaucauuugaguaau

SEQ ID NO: 937667 - RNA, 19 nt, Artificial Sequence
  Description of Artificial Sequence: Synthetic oligonucleotide
  Antisense strand to SEQ ID NO: 937666
auuacucaaaugauccuag

SEQ ID NO: 937668 - RNA, 19 nt, Artificial Sequence
  Description of Artificial Sequence: Synthetic oligonucleotide
  Sense strand starting at position 653 of SEQ ID NO: 913572
cuagguuuaucucuuaaug

SEQ ID NO: 937669 - RNA, 19 nt, Artificial Sequence
  Description of Artificial Sequence: Synthetic oligonucleotide
  Antisense strand to SEQ ID NO: 937668
cauuaagagauaaaccuag

SEQ ID NO: 937670 - RNA, 19 nt, Artificial Sequence
  Description of Artificial Sequence: Synthetic oligonucleotide
  Sense strand starting at position 2070 of SEQ ID NO: 913572
uugugaggcuaaucaauca

SEQ ID NO: 937671 - RNA, 19 nt, Artificial Sequence
  Description of Artificial Sequence: Synthetic oligonucleotide
  Antisense strand to SEQ ID NO: 937670
ugauugauuagccucacaa

SEQ ID NO: 937672 - RNA, 19 nt, Artificial Sequence
  Description of Artificial Sequence: Synthetic oligonucleotide
  Sense strand starting at position 1280 of SEQ ID NO: 913572
ugaagcagguucuccauaa

SEQ ID NO: 937673 - RNA, 19 nt, Artificial Sequence
  Description of Artificial Sequence: Synthetic oligonucleotide
  Antisense strand to SEQ ID NO: 937672
uuauggagaaccugcuuca

SEQ ID NO: 937674 - RNA, 19 nt, Artificial Sequence
  Description of Artificial Sequence: Synthetic oligonucleotide
  Sense strand starting at position 2688 of SEQ ID NO: 913572
uugagauuccugggucuug

SEQ ID NO: 937675 - RNA, 19 nt, Artificial Sequence
  Description of Artificial Sequence: Synthetic oligonucleotide
  Antisense strand to SEQ ID NO: 937674
caagacccaggaaucucaa

SEQ ID NO: 937676 - RNA, 19 nt, Artificial Sequence
  Description of Artificial Sequence: Synthetic oligonucleotide
  Sense strand starting at position 1357 of SEQ ID NO: 913572
acgugaugaauauggcaau

SEQ ID NO: 937677 - RNA, 19 nt, Artificial Sequence
  Description of Artificial Sequence: Synthetic oligonucleotide
  Antisense strand to SEQ ID NO: 937676
auugccauauucaucacgu

SEQ ID NO: 937678 - RNA, 19 nt, Artificial Sequence
  Description of Artificial Sequence: Synthetic oligonucleotide
  Sense strand starting at position 3468 of SEQ ID NO: 913572
gaagcaugguagcuugaga

SEQ ID NO: 937679 - RNA, 19 nt, Artificial Sequence
  Description of Artificial Sequence: Synthetic oligonucleotide
  Antisense strand to SEQ ID NO: 937678
ucucaagcuaccaugcuuc

SEQ ID NO: 937680 - RNA, 19 nt, Artificial Sequence
  Description of Artificial Sequence: Synthetic oligonucleotide
  Sense strand starting at position 2304 of SEQ ID NO: 913572
uccauauguaguuaugguu

SEQ ID NO: 937681 - RNA, 19 nt, Artificial Sequence
  Description of Artificial Sequence: Synthetic oligonucleotide
  Antisense strand to SEQ ID NO: 937680
aaccauaacuacauaugga

SEQ ID NO: 937682 - RNA, 19 nt, Artificial Sequence
  Description of Artificial Sequence: Synthetic oligonucleotide
  Sense strand starting at position 1879 of SEQ ID NO: 913572
auuucugcugccugcuuaa

SEQ ID NO: 937683 - RNA, 19 nt, Artificial Sequence
  Description of Artificial Sequence: Synthetic oligonucleotide
  Antisense strand to SEQ ID NO: 937682
uuaagcaggcagcagaaau

SEQ ID NO: 937684 - RNA, 19 nt, Artificial Sequence
  Description of Artificial Sequence: Synthetic oligonucleotide
  Sense strand starting at position 3608 of SEQ ID NO: 913572
guucucagccuacauguaa

SEQ ID NO: 937685 - RNA, 19 nt, Artificial Sequence
  Description of Artificial Sequence: Synthetic oligonucleotide
  Antisense strand to SEQ ID NO: 937684
uuacauguaggcugagaac

SEQ ID NO: 937686 - RNA, 19 nt, Artificial Sequence
  Description of Artificial Sequence: Synthetic oligonucleotide
  Sense strand starting at position 139 of SEQ ID NO: 913573
ggaacaaauguggguccaa

SEQ ID NO: 937687 - RNA, 19 nt, Artificial Sequence
  Description of Artificial Sequence: Synthetic oligonucleotide
  Antisense strand to SEQ ID NO: 937686
uuggacccacauuuguucc

SEQ ID NO: 937688 - RNA, 19 nt, Artificial Sequence
  Description of Artificial Sequence: Synthetic oligonucleotide
  Sense strand starting at position 2982 of SEQ ID NO: 913573
gacucuuagucacuggaag

SEQ ID NO: 937689 - RNA, 19 nt, Artificial Sequence
  Description of Artificial Sequence: Synthetic oligonucleotide
  Antisense strand to SEQ ID NO: 937688
cuuccagugacuaagaguc

SEQ ID NO: 937690 - RNA, 19 nt, Artificial Sequence
  Description of Artificial Sequence: Synthetic oligonucleotide
  Sense strand starting at position 3713 of SEQ ID NO: 913573
gagaaugacauucgacgau

SEQ ID NO: 937691 - RNA, 19 nt, Artificial Sequence
  Description of Artificial Sequence: Synthetic oligonucleotide
  Antisense strand to SEQ ID NO: 937690
aucgucgaaugucauucuc

SEQ ID NO: 937692 - RNA, 19 nt, Artificial Sequence
  Description of Artificial Sequence: Synthetic oligonucleotide
  Sense strand starting at position 2909 of SEQ ID NO: 913573
ugagcaaacuucccuggaa

SEQ ID NO: 937693 - RNA, 19 nt, Artificial Sequence
  Description of Artificial Sequence: Synthetic oligonucleotide
  Antisense strand to SEQ ID NO: 937692
uuccagggaaguuugcuca

SEQ ID NO: 937694 - RNA, 19 nt, Artificial Sequence
  Description of Artificial Sequence: Synthetic oligonucleotide
  Sense strand starting at position 1046 of SEQ ID NO: 913573
caugaucuccgccaugaag

SEQ ID NO: 937695 - RNA, 19 nt, Artificial Sequence
  Description of Artificial Sequence: Synthetic oligonucleotide
  Antisense strand to SEQ ID NO: 937694
cuucauggcggagaucaug

SEQ ID NO: 937696 - RNA, 19 nt, Artificial Sequence
  Description of Artificial Sequence: Synthetic oligonucleotide
  Sense strand starting at position 948 of SEQ ID NO: 913573
cggcuaaaugcacaucaaa

SEQ ID NO: 937697 - RNA, 19 nt, Artificial Sequence
  Description of Artificial Sequence: Synthetic oligonucleotide
  Antisense strand to SEQ ID NO: 937696
uuugaugugcauuuagccg

SEQ ID NO: 937698 - RNA, 19 nt, Artificial Sequence
  Description of Artificial Sequence: Synthetic oligonucleotide
  Sense strand starting at position 2983 of SEQ ID NO: 913573
acucuuagucacuggaagu

SEQ ID NO: 937699 - RNA, 19 nt, Artificial Sequence
  Description of Artificial Sequence: Synthetic oligonucleotide
  Antisense strand to SEQ ID NO: 937698
acuuccagugacuaagagu

SEQ ID NO: 937700 - RNA, 19 nt, Artificial Sequence
  Description of Artificial Sequence: Synthetic oligonucleotide
  Sense strand starting at position 716 of SEQ ID NO: 913573
cuucuuugcccugaaagug

SEQ ID NO: 937701 - RNA, 19 nt, Artificial Sequence
  Description of Artificial Sequence: Synthetic oligonucleotide
  Antisense strand to SEQ ID NO: 937700
cacuuucagggcaaagaag

SEQ ID NO: 937702 - RNA, 19 nt, Artificial Sequence
  Description of Artificial Sequence: Synthetic oligonucleotide
  Sense strand starting at position 977 of SEQ ID NO: 913573
uugggaacuucagugguuu

SEQ ID NO: 937703 - RNA, 19 nt, Artificial Sequence
  Description of Artificial Sequence: Synthetic oligonucleotide
  Antisense strand to SEQ ID NO: 937702
aaaccacugaaguucccaa

SEQ ID NO: 937704 - RNA, 19 nt, Artificial Sequence
  Description of Artificial Sequence: Synthetic oligonucleotide
  Sense strand starting at position 3660 of SEQ ID NO: 913573
gccagaggugugugcauuu

SEQ ID NO: 937705 - RNA, 19 nt, Artificial Sequence
  Description of Artificial Sequence: Synthetic oligonucleotide
  Antisense strand to SEQ ID NO: 937704
aaaugcacacaccucuggc

SEQ ID NO: 937706 - RNA, 19 nt, Artificial Sequence
  Description of Artificial Sequence: Synthetic oligonucleotide
  Sense strand starting at position 2618 of SEQ ID NO: 913573
agcagaugaccuugagcga

SEQ ID NO: 937707 - RNA, 19 nt, Artificial Sequence
  Description of Artificial Sequence: Synthetic oligonucleotide
  Antisense strand to SEQ ID NO: 937706
ucgcucaaggucaucugcu

SEQ ID NO: 937708 - RNA, 19 nt, Artificial Sequence
  Description of Artificial Sequence: Synthetic oligonucleotide
  Sense strand starting at position 3667 of SEQ ID NO: 913573
gugugugcauuuccuguaa

SEQ ID NO: 937709 - RNA, 19 nt, Artificial Sequence
  Description of Artificial Sequence: Synthetic oligonucleotide
  Antisense strand to SEQ ID NO: 937708
uuacaggaaaugcacacac

SEQ ID NO: 937710 - RNA, 19 nt, Artificial Sequence
  Description of Artificial Sequence: Synthetic oligonucleotide
  Sense strand starting at position 3572 of SEQ ID NO: 913573
uauucuuugugaguguaag

SEQ ID NO: 937711 - RNA, 19 nt, Artificial Sequence
  Description of Artificial Sequence: Synthetic oligonucleotide
  Antisense strand to SEQ ID NO: 937710
cuuacacucacaaagaaua

SEQ ID NO: 937712 - RNA, 19 nt, Artificial Sequence
  Description of Artificial Sequence: Synthetic oligonucleotide
  Sense strand starting at position 1298 of SEQ ID NO: 913573
caaguuucgcauugaaauc

SEQ ID NO: 937713 - RNA, 19 nt, Artificial Sequence
  Description of Artificial Sequence: Synthetic oligonucleotide
  Antisense strand to SEQ ID NO: 937712
gauuucaaugcgaaacuug

SEQ ID NO: 937714 - RNA, 19 nt, Artificial Sequence
  Description of Artificial Sequence: Synthetic oligonucleotide
  Sense strand starting at position 128 of SEQ ID NO: 913573
cccagacucugggaacaaa

SEQ ID NO: 937715 - RNA, 19 nt, Artificial Sequence
  Description of Artificial Sequence: Synthetic oligonucleotide
  Antisense strand to SEQ ID NO: 937714
uuuguucccagagucuggg

SEQ ID NO: 937716 - RNA, 19 nt, Artificial Sequence
  Description of Artificial Sequence: Synthetic oligonucleotide
  Sense strand starting at position 1294 of SEQ ID NO: 913573
acgacaaguuucgcauuga

SEQ ID NO: 937717 - RNA, 19 nt, Artificial Sequence
  Description of Artificial Sequence: Synthetic oligonucleotide
  Antisense strand to SEQ ID NO: 937716
ucaaugcgaaacuugucgu

SEQ ID NO: 937718 - RNA, 19 nt, Artificial Sequence
  Description of Artificial Sequence: Synthetic oligonucleotide
  Sense strand starting at position 715 of SEQ ID NO: 913573
ccuucuuugcccugaaagu

SEQ ID NO: 937719 - RNA, 19 nt, Artificial Sequence
  Description of Artificial Sequence: Synthetic oligonucleotide
  Antisense strand to SEQ ID NO: 937718
acuuucagggcaaagaagg

SEQ ID NO: 937720 - RNA, 19 nt, Artificial Sequence
  Description of Artificial Sequence: Synthetic oligonucleotide
  Sense strand starting at position 3568 of SEQ ID NO: 913573
ucuguauucuuugugagug

SEQ ID NO: 937721 - RNA, 19 nt, Artificial Sequence
  Description of Artificial Sequence: Synthetic oligonucleotide
  Antisense strand to SEQ ID NO: 937720
cacucacaaagaauacaga

SEQ ID NO: 937722 - RNA, 19 nt, Artificial Sequence
  Description of Artificial Sequence: Synthetic oligonucleotide
  Sense strand starting at position 3567 of SEQ ID NO: 913573
cucuguauucuuugugagu

SEQ ID NO: 937723 - RNA, 19 nt, Artificial Sequence
  Description of Artificial Sequence: Synthetic oligonucleotide
  Antisense strand to SEQ ID NO: 937722
acucacaaagaauacagag

SEQ ID NO: 937724 - RNA, 19 nt, Artificial Sequence
  Description of Artificial Sequence: Synthetic oligonucleotide
  Sense strand starting at position 1022 of SEQ ID NO: 913573
ucugaaacuuaugacaguu

SEQ ID NO: 937725 - RNA, 19 nt, Artificial Sequence
  Description of Artificial Sequence: Synthetic oligonucleotide
  Antisense strand to SEQ ID NO: 937724
aacugucauaaguuucaga

SEQ ID NO: 937726 - RNA, 19 nt, Artificial Sequence
  Description of Artificial Sequence: Synthetic oligonucleotide
  Sense strand starting at position 3947 of SEQ ID NO: 913573
cccuacacgucacagauaa

SEQ ID NO: 937727 - RNA, 19 nt, Artificial Sequence
  Description of Artificial Sequence: Synthetic oligonucleotide
  Antisense strand to SEQ ID NO: 937726
uuaucugugacguguaggg

SEQ ID NO: 937728 - RNA, 19 nt, Artificial Sequence
  Description of Artificial Sequence: Synthetic oligonucleotide
  Sense strand starting at position 1021 of SEQ ID NO: 913573
aucugaaacuuaugacagu

SEQ ID NO: 937729 - RNA, 19 nt, Artificial Sequence
  Description of Artificial Sequence: Synthetic oligonucleotide
  Antisense strand to SEQ ID NO: 937728
acugucauaaguuucagau

SEQ ID NO: 937730 - RNA, 19 nt, Artificial Sequence
  Description of Artificial Sequence: Synthetic oligonucleotide
  Sense strand starting at position 2499 of SEQ ID NO: 913573
gcuugacgucugcgcgaaa

SEQ ID NO: 937731 - RNA, 19 nt, Artificial Sequence
  Description of Artificial Sequence: Synthetic oligonucleotide
  Antisense strand to SEQ ID NO: 937730
uuucgcgcagacgucaagc

SEQ ID NO: 937732 - RNA, 19 nt, Artificial Sequence
  Description of Artificial Sequence: Synthetic oligonucleotide
  Sense strand starting at position 1295 of SEQ ID NO: 913573
cgacaaguuucgcauugaa

SEQ ID NO: 937733 - RNA, 19 nt, Artificial Sequence
  Description of Artificial Sequence: Synthetic oligonucleotide
  Antisense strand to SEQ ID NO: 937732
uucaaugcgaaacuugucg

SEQ ID NO: 937734 - RNA, 19 nt, Artificial Sequence
  Description of Artificial Sequence: Synthetic oligonucleotide
  Sense strand starting at position 2593 of SEQ ID NO: 913573
gcuggaaguuucgaaugca

SEQ ID NO: 937735 - RNA, 19 nt, Artificial Sequence
  Description of Artificial Sequence: Synthetic oligonucleotide
  Antisense strand to SEQ ID NO: 937734
ugcauucgaaacuuccagc

SEQ ID NO: 937736 - RNA, 19 nt, Artificial Sequence
  Description of Artificial Sequence: Synthetic oligonucleotide
  Sense strand starting at position 3570 of SEQ ID NO: 913573
uguauucuuugugagugua

SEQ ID NO: 937737 - RNA, 19 nt, Artificial Sequence
  Description of Artificial Sequence: Synthetic oligonucleotide
  Antisense strand to SEQ ID NO: 937736
uacacucacaaagaauaca

SEQ ID NO: 937738 - RNA, 19 nt, Artificial Sequence
  Description of Artificial Sequence: Synthetic oligonucleotide
  Sense strand starting at position 2858 of SEQ ID NO: 913573
ugccucuaguccugaccau

SEQ ID NO: 937739 - RNA, 19 nt, Artificial Sequence
  Description of Artificial Sequence: Synthetic oligonucleotide
  Antisense strand to SEQ ID NO: 937738
auggucaggacuagaggca

SEQ ID NO: 937740 - RNA, 19 nt, Artificial Sequence
  Description of Artificial Sequence: Synthetic oligonucleotide
  Sense strand starting at position 583 of SEQ ID NO: 913573
ccaacugugucacguuaca

SEQ ID NO: 937741 - RNA, 19 nt, Artificial Sequence
  Description of Artificial Sequence: Synthetic oligonucleotide
  Antisense strand to SEQ ID NO: 937740
uguaacgugacacaguugg

SEQ ID NO: 937742 - RNA, 19 nt, Artificial Sequence
  Description of Artificial Sequence: Synthetic oligonucleotide
  Sense strand starting at position 3569 of SEQ ID NO: 913573
cuguauucuuugugagugu

SEQ ID NO: 937743 - RNA, 19 nt, Artificial Sequence
  Description of Artificial Sequence: Synthetic oligonucleotide
  Antisense strand to SEQ ID NO: 937742
acacucacaaagaauacag

SEQ ID NO: 937744 - RNA, 19 nt, Artificial Sequence
  Description of Artificial Sequence: Synthetic oligonucleotide
  Sense strand starting at position 581 of SEQ ID NO: 913573
cgccaacugugucacguua

SEQ ID NO: 937745 - RNA, 19 nt, Artificial Sequence
  Description of Artificial Sequence: Synthetic oligonucleotide
  Antisense strand to SEQ ID NO: 937744
uaacgugacacaguuggcg

SEQ ID NO: 937746 - RNA, 19 nt, Artificial Sequence
  Description of Artificial Sequence: Synthetic oligonucleotide
  Sense strand starting at position 691 of SEQ ID NO: 913574
auggccaaugcagauaaau

SEQ ID NO: 937747 - RNA, 19 nt, Artificial Sequence
  Description of Artificial Sequence: Synthetic oligonucleotide
  Antisense strand to SEQ ID NO: 937746
auuuaucugcauuggccau

SEQ ID NO: 937748 - RNA, 19 nt, Artificial Sequence
  Description of Artificial Sequence: Synthetic oligonucleotide
  Sense strand starting at position 2812 of SEQ ID NO: 913574
agaugaacuugauuaggca

SEQ ID NO: 937749 - RNA, 19 nt, Artificial Sequence
  Description of Artificial Sequence: Synthetic oligonucleotide
  Antisense strand to SEQ ID NO: 937748
ugccuaaucaaguucaucu

SEQ ID NO: 937750 - RNA, 19 nt, Artificial Sequence
  Description of Artificial Sequence: Synthetic oligonucleotide
  Sense strand starting at position 871 of SEQ ID NO: 913574
cucaauugaccucaagguu

SEQ ID NO: 937751 - RNA, 19 nt, Artificial Sequence
  Description of Artificial Sequence: Synthetic oligonucleotide
  Antisense strand to SEQ ID NO: 937750
aaccuugaggucaauugag

SEQ ID NO: 937752 - RNA, 19 nt, Artificial Sequence
  Description of Artificial Sequence: Synthetic oligonucleotide
  Sense strand starting at position 3916 of SEQ ID NO: 913574
cugcaagcuguguuaaguu

SEQ ID NO: 937753 - RNA, 19 nt, Artificial Sequence
  Description of Artificial Sequence: Synthetic oligonucleotide
  Antisense strand to SEQ ID NO: 937752
aacuuaacacagcuugcag

SEQ ID NO: 937754 - RNA, 19 nt, Artificial Sequence
  Description of Artificial Sequence: Synthetic oligonucleotide
  Sense strand starting at position 3745 of SEQ ID NO: 913574
gucuguguucuaguuccuu

SEQ ID NO: 937755 - RNA, 19 nt, Artificial Sequence
  Description of Artificial Sequence: Synthetic oligonucleotide
  Antisense strand to SEQ ID NO: 937754
aaggaacuagaacacagac

SEQ ID NO: 937756 - RNA, 19 nt, Artificial Sequence
  Description of Artificial Sequence: Synthetic oligonucleotide
  Sense strand starting at position 3259 of SEQ ID NO: 913574
cuggguuguuaccuuauuu

SEQ ID NO: 937757 - RNA, 19 nt, Artificial Sequence
  Description of Artificial Sequence: Synthetic oligonucleotide
  Antisense strand to SEQ ID NO: 937756
aaauaagguaacaacccag

SEQ ID NO: 937758 - RNA, 19 nt, Artificial Sequence
  Description of Artificial Sequence: Synthetic oligonucleotide
  Sense strand starting at position 2827 of SEQ ID NO: 913574
ggcagacgcgugagaucaa

SEQ ID NO: 937759 - RNA, 19 nt, Artificial Sequence
  Description of Artificial Sequence: Synthetic oligonucleotide
  Antisense strand to SEQ ID NO: 937758
uugaucucacgcgucugcc

SEQ ID NO: 937760 - RNA, 19 nt, Artificial Sequence
  Description of Artificial Sequence: Synthetic oligonucleotide
  Sense strand starting at position 3162 of SEQ ID NO: 913574
guguauaagaaugauguca

SEQ ID NO: 937761 - RNA, 19 nt, Artificial Sequence
  Description of Artificial Sequence: Synthetic oligonucleotide
  Antisense strand to SEQ ID NO: 937760
ugacaucauucuuauacac

SEQ ID NO: 937762 - RNA, 19 nt, Artificial Sequence
  Description of Artificial Sequence: Synthetic oligonucleotide
  Sense strand starting at position 935 of SEQ ID NO: 913574
guuguauugaaucauugag

SEQ ID NO: 937763 - RNA, 19 nt, Artificial Sequence
  Description of Artificial Sequence: Synthetic oligonucleotide
  Antisense strand to SEQ ID NO: 937762
cucaaugauucaauacaac

SEQ ID NO: 937764 - RNA, 19 nt, Artificial Sequence
  Description of Artificial Sequence: Synthetic oligonucleotide
  Sense strand starting at position 3155 of SEQ ID NO: 913574
aaggcugguguauaagaau

SEQ ID NO: 937765 - RNA, 19 nt, Artificial Sequence
  Description of Artificial Sequence: Synthetic oligonucleotide
  Antisense strand to SEQ ID NO: 937764
auucuuauacaccagccuu

SEQ ID NO: 937766 - RNA, 19 nt, Artificial Sequence
  Description of Artificial Sequence: Synthetic oligonucleotide
  Sense strand starting at position 2964 of SEQ ID NO: 913574
ugacuuccucauuaguaua

SEQ ID NO: 937767 - RNA, 19 nt, Artificial Sequence
  Description of Artificial Sequence: Synthetic oligonucleotide
  Antisense strand to SEQ ID NO: 937766
uauacuaaugaggaaguca

SEQ ID NO: 937768 - RNA, 19 nt, Artificial Sequence
  Description of Artificial Sequence: Synthetic oligonucleotide
  Sense strand starting at position 366 of SEQ ID NO: 913574
guccuaccagacuaaguua

SEQ ID NO: 937769 - RNA, 19 nt, Artificial Sequence
  Description of Artificial Sequence: Synthetic oligonucleotide
  Antisense strand to SEQ ID NO: 937768
uaacuuagucugguaggac

SEQ ID NO: 937770 - RNA, 19 nt, Artificial Sequence
  Description of Artificial Sequence: Synthetic oligonucleotide
  Sense strand starting at position 826 of SEQ ID NO: 913574
cuuugauaucuguaugauc

SEQ ID NO: 937771 - RNA, 19 nt, Artificial Sequence
  Description of Artificial Sequence: Synthetic oligonucleotide
  Antisense strand to SEQ ID NO: 937770
gaucauacagauaucaaag

SEQ ID NO: 937772 - RNA, 19 nt, Artificial Sequence
  Description of Artificial Sequence: Synthetic oligonucleotide
  Sense strand starting at position 3858 of SEQ ID NO: 913574
ccaggaaauuauccuguca

SEQ ID NO: 937773 - RNA, 19 nt, Artificial Sequence
  Description of Artificial Sequence: Synthetic oligonucleotide
  Antisense strand to SEQ ID NO: 937772
ugacaggauaauuuccugg

SEQ ID NO: 937774 - RNA, 19 nt, Artificial Sequence
  Description of Artificial Sequence: Synthetic oligonucleotide
  Sense strand starting at position 2264 of SEQ ID NO: 913574
gcaggaacucugggaacuu

SEQ ID NO: 937775 - RNA, 19 nt, Artificial Sequence
  Description of Artificial Sequence: Synthetic oligonucleotide
  Antisense strand to SEQ ID NO: 937774
aaguucccagaguuccugc

SEQ ID NO: 937776 - RNA, 19 nt, Artificial Sequence
  Description of Artificial Sequence: Synthetic oligonucleotide
  Sense strand starting at position 2298 of SEQ ID NO: 913574
gcaguaaggguugaauuau

SEQ ID NO: 937777 - RNA, 19 nt, Artificial Sequence
  Description of Artificial Sequence: Synthetic oligonucleotide
  Antisense strand to SEQ ID NO: 937776
auaauucaacccuuacugc

SEQ ID NO: 937778 - RNA, 19 nt, Artificial Sequence
  Description of Artificial Sequence: Synthetic oligonucleotide
  Sense strand starting at position 2705 of SEQ ID NO: 913574
gagacuggcguuuagaaau

SEQ ID NO: 937779 - RNA, 19 nt, Artificial Sequence
  Description of Artificial Sequence: Synthetic oligonucleotide
  Antisense strand to SEQ ID NO: 937778
auuucuaaacgccagucuc

SEQ ID NO: 937780 - RNA, 19 nt, Artificial Sequence
  Description of Artificial Sequence: Synthetic oligonucleotide
  Sense strand starting at position 3173 of SEQ ID NO: 913574
ugaugucaugcuuauaaau

SEQ ID NO: 937781 - RNA, 19 nt, Artificial Sequence
  Description of Artificial Sequence: Synthetic oligonucleotide
  Antisense strand to SEQ ID NO: 937780
auuuauaagcaugacauca

SEQ ID NO: 937782 - RNA, 19 nt, Artificial Sequence
  Description of Artificial Sequence: Synthetic oligonucleotide
  Sense strand starting at position 504 of SEQ ID NO: 913574
gagggucgucgcccuguua

SEQ ID NO: 937783 - RNA, 19 nt, Artificial Sequence
  Description of Artificial Sequence: Synthetic oligonucleotide
  Antisense strand to SEQ ID NO: 937782
uaacagggcgacgacccuc

SEQ ID NO: 937784 - RNA, 19 nt, Artificial Sequence
  Description of Artificial Sequence: Synthetic oligonucleotide
  Sense strand starting at position 2712 of SEQ ID NO: 913574
gcguuuagaaauuagauca

SEQ ID NO: 937785 - RNA, 19 nt, Artificial Sequence
  Description of Artificial Sequence: Synthetic oligonucleotide
  Antisense strand to SEQ ID NO: 937784
ugaucuaauuucuaaacgc

SEQ ID NO: 937786 - RNA, 19 nt, Artificial Sequence
  Description of Artificial Sequence: Synthetic oligonucleotide
  Sense strand starting at position 3968 of SEQ ID NO: 913574
ugccaaucagaagguugaa

SEQ ID NO: 937787 - RNA, 19 nt, Artificial Sequence
  Description of Artificial Sequence: Synthetic oligonucleotide
  Antisense strand to SEQ ID NO: 937786
uucaaccuucugauuggca

SEQ ID NO: 937788 - RNA, 19 nt, Artificial Sequence
  Description of Artificial Sequence: Synthetic oligonucleotide
  Sense strand starting at position 192 of SEQ ID NO: 913574
gucagucauagguaauauc

SEQ ID NO: 937789 - RNA, 19 nt, Artificial Sequence
  Description of Artificial Sequence: Synthetic oligonucleotide
  Antisense strand to SEQ ID NO: 937788
gauauuaccuaugacugac

SEQ ID NO: 937790 - RNA, 19 nt, Artificial Sequence
  Description of Artificial Sequence: Synthetic oligonucleotide
  Sense strand starting at position 2304 of SEQ ID NO: 913574
aggguugaauuauccggau

SEQ ID NO: 937791 - RNA, 19 nt, Artificial Sequence
  Description of Artificial Sequence: Synthetic oligonucleotide
  Antisense strand to SEQ ID NO: 937790
auccggauaauucaacccu

SEQ ID NO: 937792 - RNA, 19 nt, Artificial Sequence
  Description of Artificial Sequence: Synthetic oligonucleotide
  Sense strand starting at position 3044 of SEQ ID NO: 913574
gcaauacccuuucuaggga

SEQ ID NO: 937793 - RNA, 19 nt, Artificial Sequence
  Description of Artificial Sequence: Synthetic oligonucleotide
  Antisense strand to SEQ ID NO: 937792
ucccuagaaaggguauugc

SEQ ID NO: 937794 - RNA, 19 nt, Artificial Sequence
  Description of Artificial Sequence: Synthetic oligonucleotide
  Sense strand starting at position 3663 of SEQ ID NO: 913574
aaguaaagccagugacaau

SEQ ID NO: 937795 - RNA, 19 nt, Artificial Sequence
  Description of Artificial Sequence: Synthetic oligonucleotide
  Antisense strand to SEQ ID NO: 937794
auugucacuggcuuuacuu

SEQ ID NO: 937796 - RNA, 19 nt, Artificial Sequence
  Description of Artificial Sequence: Synthetic oligonucleotide
  Sense strand starting at position 3849 of SEQ ID NO: 913574
uccaucuguccaggaaauu

SEQ ID NO: 937797 - RNA, 19 nt, Artificial Sequence
  Description of Artificial Sequence: Synthetic oligonucleotide
  Antisense strand to SEQ ID NO: 937796
aauuuccuggacagaugga

SEQ ID NO: 937798 - RNA, 19 nt, Artificial Sequence
  Description of Artificial Sequence: Synthetic oligonucleotide
  Sense strand starting at position 3583 of SEQ ID NO: 913574
uccucuaagcuguauagau

SEQ ID NO: 937799 - RNA, 19 nt, Artificial Sequence
  Description of Artificial Sequence: Synthetic oligonucleotide
  Antisense strand to SEQ ID NO: 937798
aucuauacagcuuagagga

SEQ ID NO: 937800 - RNA, 19 nt, Artificial Sequence
  Description of Artificial Sequence: Synthetic oligonucleotide
  Sense strand starting at position 18 of SEQ ID NO: 913574
aggguuguaaugcauuacu

SEQ ID NO: 937801 - RNA, 19 nt, Artificial Sequence
  Description of Artificial Sequence: Synthetic oligonucleotide
  Antisense strand to SEQ ID NO: 937800
aguaaugcauuacaacccu

SEQ ID NO: 937802 - RNA, 19 nt, Artificial Sequence
  Description of Artificial Sequence: Synthetic oligonucleotide
  Sense strand starting at position 3161 of SEQ ID NO: 913574
gguguauaagaaugauguc

SEQ ID NO: 937803 - RNA, 19 nt, Artificial Sequence
  Description of Artificial Sequence: Synthetic oligonucleotide
  Antisense strand to SEQ ID NO: 937802
gacaucauucuuauacacc

SEQ ID NO: 937804 - RNA, 19 nt, Artificial Sequence
  Description of Artificial Sequence: Synthetic oligonucleotide
  Sense strand starting at position 3127 of SEQ ID NO: 913574
ugaaauugguguguggaua

SEQ ID NO: 937805 - RNA, 19 nt, Artificial Sequence
  Description of Artificial Sequence: Synthetic oligonucleotide
  Antisense strand to SEQ ID NO: 937804
uauccacacaccaauuuca

SEQ ID NO: 937806 - RNA, 19 nt, Artificial Sequence
  Description of Artificial Sequence: Synthetic oligonucleotide
  Sense strand starting at position 2297 of SEQ ID NO: 913574
ggcaguaaggguugaauua

SEQ ID NO: 937807 - RNA, 19 nt, Artificial Sequence
  Description of Artificial Sequence: Synthetic oligonucleotide
  Antisense strand to SEQ ID NO: 937806
uaauucaacccuuacugcc

SEQ ID NO: 937808 - RNA, 19 nt, Artificial Sequence
  Description of Artificial Sequence: Synthetic oligonucleotide
  Sense strand starting at position 3128 of SEQ ID NO: 913574
gaaauugguguguggauau

SEQ ID NO: 937809 - RNA, 19 nt, Artificial Sequence
  Description of Artificial Sequence: Synthetic oligonucleotide
  Antisense strand to SEQ ID NO: 937808
auauccacacaccaauuuc

SEQ ID NO: 937810 - RNA, 19 nt, Artificial Sequence
  Description of Artificial Sequence: Synthetic oligonucleotide
  Sense strand starting at position 2963 of SEQ ID NO: 913574
cugacuuccucauuaguau

SEQ ID NO: 937811 - RNA, 19 nt, Artificial Sequence
  Description of Artificial Sequence: Synthetic oligonucleotide
  Antisense strand to SEQ ID NO: 937810
auacuaaugaggaagucag

SEQ ID NO: 937812 - RNA, 19 nt, Artificial Sequence
  Description of Artificial Sequence: Synthetic oligonucleotide
  Sense strand starting at position 700 of SEQ ID NO: 913574
gcagauaaaucaguccucu

SEQ ID NO: 937813 - RNA, 19 nt, Artificial Sequence
  Description of Artificial Sequence: Synthetic oligonucleotide
  Antisense strand to SEQ ID NO: 937812
agaggacugauuuaucugc

SEQ ID NO: 937814 - RNA, 19 nt, Artificial Sequence
  Description of Artificial Sequence: Synthetic oligonucleotide
  Sense strand starting at position 2306 of SEQ ID NO: 913574
gguugaauuauccggaucu

SEQ ID NO: 937815 - RNA, 19 nt, Artificial Sequence
  Description of Artificial Sequence: Synthetic oligonucleotide
  Antisense strand to SEQ ID NO: 937814
agauccggauaauucaacc

SEQ ID NO: 937816 - RNA, 19 nt, Artificial Sequence
  Description of Artificial Sequence: Synthetic oligonucleotide
  Sense strand starting at position 3809 of SEQ ID NO: 913574
augguacccuaguuauauu

SEQ ID NO: 937817 - RNA, 19 nt, Artificial Sequence
  Description of Artificial Sequence: Synthetic oligonucleotide
  Antisense strand to SEQ ID NO: 937816
aauauaacuaggguaccau

SEQ ID NO: 937818 - RNA, 19 nt, Artificial Sequence
  Description of Artificial Sequence: Synthetic oligonucleotide
  Sense strand starting at position 815 of SEQ ID NO: 913574
aaagcugguuucuuugaua

SEQ ID NO: 937819 - RNA, 19 nt, Artificial Sequence
  Description of Artificial Sequence: Synthetic oligonucleotide
  Antisense strand to SEQ ID NO: 937818
uaucaaagaaaccagcuuu

SEQ ID NO: 937820 - RNA, 19 nt, Artificial Sequence
  Description of Artificial Sequence: Synthetic oligonucleotide
  Sense strand starting at position 657 of SEQ ID NO: 913574
ucaaguugugaggguacca

SEQ ID NO: 937821 - RNA, 19 nt, Artificial Sequence
  Description of Artificial Sequence: Synthetic oligonucleotide
  Antisense strand to SEQ ID NO: 937820
ugguacccucacaacuuga

SEQ ID NO: 937822 - RNA, 19 nt, Artificial Sequence
  Description of Artificial Sequence: Synthetic oligonucleotide
  Sense strand starting at position 184 of SEQ ID NO: 913574
uguauacagucagucauag

SEQ ID NO: 937823 - RNA, 19 nt, Artificial Sequence
  Description of Artificial Sequence: Synthetic oligonucleotide
  Antisense strand to SEQ ID NO: 937822
cuaugacugacuguauaca

SEQ ID NO: 937824 - RNA, 19 nt, Artificial Sequence
  Description of Artificial Sequence: Synthetic oligonucleotide
  Sense strand starting at position 3804 of SEQ ID NO: 913574
cuugaaugguacccuaguu

SEQ ID NO: 937825 - RNA, 19 nt, Artificial Sequence
  Description of Artificial Sequence: Synthetic oligonucleotide
  Antisense strand to SEQ ID NO: 937824
aacuaggguaccauucaag

SEQ ID NO: 937826 - RNA, 19 nt, Artificial Sequence
  Description of Artificial Sequence: Synthetic oligonucleotide
  Sense strand starting at position 974 of SEQ ID NO: 913575
ugugcucucagggagagaa

SEQ ID NO: 937827 - RNA, 19 nt, Artificial Sequence
  Description of Artificial Sequence: Synthetic oligonucleotide
  Antisense strand to SEQ ID NO: 937826
uucucucccugagagcaca

SEQ ID NO: 937828 - RNA, 19 nt, Artificial Sequence
  Description of Artificial Sequence: Synthetic oligonucleotide
  Sense strand starting at position 849 of SEQ ID NO: 913575
gccaguauccguuccugca

SEQ ID NO: 937829 - RNA, 19 nt, Artificial Sequence
  Description of Artificial Sequence: Synthetic oligonucleotide
  Antisense strand to SEQ ID NO: 937828
ugcaggaacggauacuggc

SEQ ID NO: 937830 - RNA, 19 nt, Artificial Sequence
  Description of Artificial Sequence: Synthetic oligonucleotide
  Sense strand starting at position 534 of SEQ ID NO: 913575
ccuggcucugaacaaguua

SEQ ID NO: 937831 - RNA, 19 nt, Artificial Sequence
  Description of Artificial Sequence: Synthetic oligonucleotide
  Antisense strand to SEQ ID NO: 937830
uaacuuguucagagccagg

SEQ ID NO: 937832 - RNA, 19 nt, Artificial Sequence
  Description of Artificial Sequence: Synthetic oligonucleotide
  Sense strand starting at position 672 of SEQ ID NO: 913575
acgacaacugaacgugaua

SEQ ID NO: 937833 - RNA, 19 nt, Artificial Sequence
  Description of Artificial Sequence: Synthetic oligonucleotide
  Antisense strand to SEQ ID NO: 937832
uaucacguucaguugucgu

SEQ ID NO: 937834 - RNA, 19 nt, Artificial Sequence
  Description of Artificial Sequence: Synthetic oligonucleotide
  Sense strand starting at position 1235 of SEQ ID NO: 913575
cccauucuucuggacggua

SEQ ID NO: 937835 - RNA, 19 nt, Artificial Sequence
  Description of Artificial Sequence: Synthetic oligonucleotide
  Antisense strand to SEQ ID NO: 937834
uaccguccagaagaauggg

SEQ ID NO: 937836 - RNA, 19 nt, Artificial Sequence
  Description of Artificial Sequence: Synthetic oligonucleotide
  Sense strand starting at position 283 of SEQ ID NO: 913575
gguuaagauggccaacgua

SEQ ID NO: 937837 - RNA, 19 nt, Artificial Sequence
  Description of Artificial Sequence: Synthetic oligonucleotide
  Antisense strand to SEQ ID NO: 937836
uacguuggccaucuuaacc

SEQ ID NO: 937838 - RNA, 19 nt, Artificial Sequence
  Description of Artificial Sequence: Synthetic oligonucleotide
  Sense strand starting at position 973 of SEQ ID NO: 913575
cugugcucucagggagaga

SEQ ID NO: 937839 - RNA, 19 nt, Artificial Sequence
  Description of Artificial Sequence: Synthetic oligonucleotide
  Antisense strand to SEQ ID NO: 937838
ucucucccugagagcacag

SEQ ID NO: 937840 - RNA, 19 nt, Artificial Sequence
  Description of Artificial Sequence: Synthetic oligonucleotide
  Sense strand starting at position 825 of SEQ ID NO: 913575
gccuaccacuugucagaaa

SEQ ID NO: 937841 - RNA, 19 nt, Artificial Sequence
  Description of Artificial Sequence: Synthetic oligonucleotide
  Antisense strand to SEQ ID NO: 937840
uuucugacaagugguaggc

SEQ ID NO: 937842 - RNA, 19 nt, Artificial Sequence
  Description of Artificial Sequence: Synthetic oligonucleotide
  Sense strand starting at position 1247 of SEQ ID NO: 913575
gacgguacccuugguuaaa

SEQ ID NO: 937843 - RNA, 19 nt, Artificial Sequence
  Description of Artificial Sequence: Synthetic oligonucleotide
  Antisense strand to SEQ ID NO: 937842
uuuaaccaaggguaccguc

SEQ ID NO: 937844 - RNA, 19 nt, Artificial Sequence
  Description of Artificial Sequence: Synthetic oligonucleotide
  Sense strand starting at position 530 of SEQ ID NO: 913575
guuuccuggcucugaacaa

SEQ ID NO: 937845 - RNA, 19 nt, Artificial Sequence
  Description of Artificial Sequence: Synthetic oligonucleotide
  Antisense strand to SEQ ID NO: 937844
uuguucagagccaggaaac

SEQ ID NO: 937846 - RNA, 19 nt, Artificial Sequence
  Description of Artificial Sequence: Synthetic oligonucleotide
  Sense strand starting at position 588 of SEQ ID NO: 913575
gcccaauacuuucugagca

SEQ ID NO: 937847 - RNA, 19 nt, Artificial Sequence
  Description of Artificial Sequence: Synthetic oligonucleotide
  Antisense strand to SEQ ID NO: 937846
ugcucagaaaguauugggc

SEQ ID NO: 937848 - RNA, 19 nt, Artificial Sequence
  Description of Artificial Sequence: Synthetic oligonucleotide
  Sense strand starting at position 103 of SEQ ID NO: 913575
ggacuagguuugcccagua

SEQ ID NO: 937849 - RNA, 19 nt, Artificial Sequence
  Description of Artificial Sequence: Synthetic oligonucleotide
  Antisense strand to SEQ ID NO: 937848
uacugggcaaaccuagucc

SEQ ID NO: 937850 - RNA, 19 nt, Artificial Sequence
  Description of Artificial Sequence: Synthetic oligonucleotide
  Sense strand starting at position 527 of SEQ ID NO: 913575
uuuguuuccuggcucugaa

SEQ ID NO: 937851 - RNA, 19 nt, Artificial Sequence
  Description of Artificial Sequence: Synthetic oligonucleotide
  Antisense strand to SEQ ID NO: 937850
uucagagccaggaaacaaa

SEQ ID NO: 937852 - RNA, 19 nt, Artificial Sequence
  Description of Artificial Sequence: Synthetic oligonucleotide
  Sense strand starting at position 243 of SEQ ID NO: 913575
uuuagucucucugucaguu

SEQ ID NO: 937853 - RNA, 19 nt, Artificial Sequence
  Description of Artificial Sequence: Synthetic oligonucleotide
  Antisense strand to SEQ ID NO: 937852
aacugacagagagacuaaa

SEQ ID NO: 937854 - RNA, 19 nt, Artificial Sequence
  Description of Artificial Sequence: Synthetic oligonucleotide
  Sense strand starting at position 115 of SEQ ID NO: 913575
cccaguaacucugacauga

SEQ ID NO: 937855 - RNA, 19 nt, Artificial Sequence
  Description of Artificial Sequence: Synthetic oligonucleotide
  Antisense strand to SEQ ID NO: 937854
ucaugucagaguuacuggg

SEQ ID NO: 937856 - RNA, 19 nt, Artificial Sequence
  Description of Artificial Sequence: Synthetic oligonucleotide
  Sense strand starting at position 951 of SEQ ID NO: 913575
cagccuuccucguuaagca

SEQ ID NO: 937857 - RNA, 19 nt, Artificial Sequence
  Description of Artificial Sequence: Synthetic oligonucleotide
  Antisense strand to SEQ ID NO: 937856
ugcuuaacgaggaaggcug

SEQ ID NO: 937858 - RNA, 19 nt, Artificial Sequence
  Description of Artificial Sequence: Synthetic oligonucleotide
  Sense strand starting at position 303 of SEQ ID NO: 913575
gagagcuguuaccaggaau

SEQ ID NO: 937859 - RNA, 19 nt, Artificial Sequence
  Description of Artificial Sequence: Synthetic oligonucleotide
  Antisense strand to SEQ ID NO: 937858
auuccugguaacagcucuc

SEQ ID NO: 937860 - RNA, 19 nt, Artificial Sequence
  Description of Artificial Sequence: Synthetic oligonucleotide
  Sense strand starting at position 677 of SEQ ID NO: 913575
aacugaacgugauaaagca

SEQ ID NO: 937861 - RNA, 19 nt, Artificial Sequence
  Description of Artificial Sequence: Synthetic oligonucleotide
  Antisense strand to SEQ ID NO: 937860
ugcuuuaucacguucaguu

SEQ ID NO: 937862 - RNA, 19 nt, Artificial Sequence
  Description of Artificial Sequence: Synthetic oligonucleotide
  Sense strand starting at position 1056 of SEQ ID NO: 913575
gggcccaguuuccaaagaa

SEQ ID NO: 937863 - RNA, 19 nt, Artificial Sequence
  Description of Artificial Sequence: Synthetic oligonucleotide
  Antisense strand to SEQ ID NO: 937862
uucuuuggaaacugggccc

SEQ ID NO: 937864 - RNA, 19 nt, Artificial Sequence
  Description of Artificial Sequence: Synthetic oligonucleotide
  Sense strand starting at position 1419 of SEQ ID NO: 913575
gggcauuguucacagcgaa

SEQ ID NO: 937865 - RNA, 19 nt, Artificial Sequence
  Description of Artificial Sequence: Synthetic oligonucleotide
  Antisense strand to SEQ ID NO: 937864
uucgcugugaacaaugccc

SEQ ID NO: 937866 - RNA, 19 nt, Artificial Sequence
  Description of Artificial Sequence: Synthetic oligonucleotide
  Sense strand starting at position 2896 of SEQ ID NO: 913576
ggcugaggccaugaaauga

SEQ ID NO: 937867 - RNA, 19 nt, Artificial Sequence
  Description of Artificial Sequence: Synthetic oligonucleotide
  Antisense strand to SEQ ID NO: 937866
ucauuucauggccucagcc

SEQ ID NO: 937868 - RNA, 19 nt, Artificial Sequence
  Description of Artificial Sequence: Synthetic oligonucleotide
  Sense strand starting at position 602 of SEQ ID NO: 913576
auaagagcugcccaauaga

SEQ ID NO: 937869 - RNA, 19 nt, Artificial Sequence
  Description of Artificial Sequence: Synthetic oligonucleotide
  Antisense strand to SEQ ID NO: 937868
ucuauugggcagcucuuau

SEQ ID NO: 937870 - RNA, 19 nt, Artificial Sequence
  Description of Artificial Sequence: Synthetic oligonucleotide
  Sense strand starting at position 1430 of SEQ ID NO: 913576
ggcauuugcagugggaauc

SEQ ID NO: 937871 - RNA, 19 nt, Artificial Sequence
  Description of Artificial Sequence: Synthetic oligonucleotide
  Antisense strand to SEQ ID NO: 937870
gauucccacugcaaaugcc

SEQ ID NO: 937872 - RNA, 19 nt, Artificial Sequence
  Description of Artificial Sequence: Synthetic oligonucleotide
  Sense strand starting at position 1275 of SEQ ID NO: 913576
guuuguuuaaagcugugca

SEQ ID NO: 937873 - RNA, 19 nt, Artificial Sequence
  Description of Artificial Sequence: Synthetic oligonucleotide
  Antisense strand to SEQ ID NO: 937872
ugcacagcuuuaaacaaac

SEQ ID NO: 937874 - RNA, 19 nt, Artificial Sequence
  Description of Artificial Sequence: Synthetic oligonucleotide
  Sense strand starting at position 605 of SEQ ID NO: 913576
agagcugcccaauagauga

SEQ ID NO: 937875 - RNA, 19 nt, Artificial Sequence
  Description of Artificial Sequence: Synthetic oligonucleotide
  Antisense strand to SEQ ID NO: 937874
ucaucuauugggcagcucu

SEQ ID NO: 937876 - RNA, 19 nt, Artificial Sequence
  Description of Artificial Sequence: Synthetic oligonucleotide
  Sense strand starting at position 1340 of SEQ ID NO: 913576
ucuugucugcgcucaauua

SEQ ID NO: 937877 - RNA, 19 nt, Artificial Sequence
  Description of Artificial Sequence: Synthetic oligonucleotide
  Antisense strand to SEQ ID NO: 937876
uaauugagcgcagacaaga

SEQ ID NO: 937878 - RNA, 19 nt, Artificial Sequence
  Description of Artificial Sequence: Synthetic oligonucleotide
  Sense strand starting at position 2304 of SEQ ID NO: 913576
gggaaagcaucucugggau

SEQ ID NO: 937879 - RNA, 19 nt, Artificial Sequence
  Description of Artificial Sequence: Synthetic oligonucleotide
  Antisense strand to SEQ ID NO: 937878
aucccagagaugcuuuccc

SEQ ID NO: 937880 - RNA, 19 nt, Artificial Sequence
  Description of Artificial Sequence: Synthetic oligonucleotide
  Sense strand starting at position 2437 of SEQ ID NO: 913576
ggaugauuccacggagacc

SEQ ID NO: 937881 - RNA, 19 nt, Artificial Sequence
  Description of Artificial Sequence: Synthetic oligonucleotide
  Antisense strand to SEQ ID NO: 937880
ggucuccguggaaucaucc

SEQ ID NO: 937882 - RNA, 19 nt, Artificial Sequence
  Description of Artificial Sequence: Synthetic oligonucleotide
  Sense strand starting at position 1350 of SEQ ID NO: 913576
gcucaauuacuugaccuga

SEQ ID NO: 937883 - RNA, 19 nt, Artificial Sequence
  Description of Artificial Sequence: Synthetic oligonucleotide
  Antisense strand to SEQ ID NO: 937882
ucaggucaaguaauugagc

SEQ ID NO: 937884 - RNA, 19 nt, Artificial Sequence
  Description of Artificial Sequence: Synthetic oligonucleotide
  Sense strand starting at position 2038 of SEQ ID NO: 913576
gauggcuaauauguggaaa

SEQ ID NO: 937885 - RNA, 19 nt, Artificial Sequence
  Description of Artificial Sequence: Synthetic oligonucleotide
  Antisense strand to SEQ ID NO: 937884
uuuccacauauuagccauc

SEQ ID NO: 937886 - RNA, 19 nt, Artificial Sequence
  Description of Artificial Sequence: Synthetic oligonucleotide
  Sense strand starting at position 1826 of SEQ ID NO: 913576
acguaauaccuguagauag

SEQ ID NO: 937887 - RNA, 19 nt, Artificial Sequence
  Description of Artificial Sequence: Synthetic oligonucleotide
  Antisense strand to SEQ ID NO: 937886
cuaucuacagguauuacgu

SEQ ID NO: 937888 - RNA, 19 nt, Artificial Sequence
  Description of Artificial Sequence: Synthetic oligonucleotide
  Sense strand starting at position 2393 of SEQ ID NO: 913576
ggaugacaugaguguggau

SEQ ID NO: 937889 - RNA, 19 nt, Artificial Sequence
  Description of Artificial Sequence: Synthetic oligonucleotide
  Antisense strand to SEQ ID NO: 937888
auccacacucaugucaucc

SEQ ID NO: 937890 - RNA, 19 nt, Artificial Sequence
  Description of Artificial Sequence: Synthetic oligonucleotide
  Sense strand starting at position 6 of SEQ ID NO: 913576
uguuucuuuguagauaaag

SEQ ID NO: 937891 - RNA, 19 nt, Artificial Sequence
  Description of Artificial Sequence: Synthetic oligonucleotide
  Antisense strand to SEQ ID NO: 937890
cuuuaucuacaaagaaaca

SEQ ID NO: 937892 - RNA, 19 nt, Artificial Sequence
  Description of Artificial Sequence: Synthetic oligonucleotide
  Sense strand starting at position 369 of SEQ ID NO: 913576
gugacaguuccagaaguua

SEQ ID NO: 937893 - RNA, 19 nt, Artificial Sequence
  Description of Artificial Sequence: Synthetic oligonucleotide
  Antisense strand to SEQ ID NO: 937892
uaacuucuggaacugucac

SEQ ID NO: 937894 - RNA, 19 nt, Artificial Sequence
  Description of Artificial Sequence: Synthetic oligonucleotide
  Sense strand starting at position 95 of SEQ ID NO: 913576
gggugaacucgguacugac

SEQ ID NO: 937895 - RNA, 19 nt, Artificial Sequence
  Description of Artificial Sequence: Synthetic oligonucleotide
  Antisense strand to SEQ ID NO: 937894
gucaguaccgaguucaccc

SEQ ID NO: 937896 - RNA, 19 nt, Artificial Sequence
  Description of Artificial Sequence: Synthetic oligonucleotide
  Sense strand starting at position 719 of SEQ ID NO: 913576
gauaauaguugcccaauag

SEQ ID NO: 937897 - RNA, 19 nt, Artificial Sequence
  Description of Artificial Sequence: Synthetic oligonucleotide
  Antisense strand to SEQ ID NO: 937896
cuauugggcaacuauuauc

SEQ ID NO: 937898 - RNA, 19 nt, Artificial Sequence
  Description of Artificial Sequence: Synthetic oligonucleotide
  Sense strand starting at position 3338 of SEQ ID NO: 913576
ggaucaucagagugucaug

SEQ ID NO: 937899 - RNA, 19 nt, Artificial Sequence
  Description of Artificial Sequence: Synthetic oligonucleotide
  Antisense strand to SEQ ID NO: 937898
caugacacucugaugaucc

SEQ ID NO: 937900 - RNA, 19 nt, Artificial Sequence
  Description of Artificial Sequence: Synthetic oligonucleotide
  Sense strand starting at position 3270 of SEQ ID NO: 913576
uuagaaguggauugugauc

SEQ ID NO: 937901 - RNA, 19 nt, Artificial Sequence
  Description of Artificial Sequence: Synthetic oligonucleotide
  Antisense strand to SEQ ID NO: 937900
gaucacaauccacuucuaa

SEQ ID NO: 937902 - RNA, 19 nt, Artificial Sequence
  Description of Artificial Sequence: Synthetic oligonucleotide
  Sense strand starting at position 3770 of SEQ ID NO: 913576
ucuugagaaugugugggau

SEQ ID NO: 937903 - RNA, 19 nt, Artificial Sequence
  Description of Artificial Sequence: Synthetic oligonucleotide
  Antisense strand to SEQ ID NO: 937902
aucccacacauucucaaga

SEQ ID NO: 937904 - RNA, 19 nt, Artificial Sequence
  Description of Artificial Sequence: Synthetic oligonucleotide
  Sense strand starting at position 720 of SEQ ID NO: 913576
auaauaguugcccaauagu

SEQ ID NO: 937905 - RNA, 19 nt, Artificial Sequence
  Description of Artificial Sequence: Synthetic oligonucleotide
  Antisense strand to SEQ ID NO: 937904
acuauugggcaacuauuau

SEQ ID NO: 937906 - RNA, 19 nt, Artificial Sequence
  Description of Artificial Sequence: Synthetic oligonucleotide
  Sense strand starting at position 1577 of SEQ ID NO: 913576
ccuuuaguugaaugacuua

SEQ ID NO: 937907 - RNA, 19 nt, Artificial Sequence
  Description of Artificial Sequence: Synthetic oligonucleotide
  Antisense strand to SEQ ID NO: 937906
uaagucauucaacuaaagg

SEQ ID NO: 937908 - RNA, 19 nt, Artificial Sequence
  Description of Artificial Sequence: Synthetic oligonucleotide
  Sense strand starting at position 2581 of SEQ ID NO: 913576
ccuugacaugcacauugua

SEQ ID NO: 937909 - RNA, 19 nt, Artificial Sequence
  Description of Artificial Sequence: Synthetic oligonucleotide
  Antisense strand to SEQ ID NO: 937908
uacaaugugcaugucaagg

SEQ ID NO: 937910 - RNA, 19 nt, Artificial Sequence
  Description of Artificial Sequence: Synthetic oligonucleotide
  Sense strand starting at position 848 of SEQ ID NO: 913576
guaauaacugccugauaga

SEQ ID NO: 937911 - RNA, 19 nt, Artificial Sequence
  Description of Artificial Sequence: Synthetic oligonucleotide
  Antisense strand to SEQ ID NO: 937910
ucuaucaggcaguuauuac

SEQ ID NO: 937912 - RNA, 19 nt, Artificial Sequence
  Description of Artificial Sequence: Synthetic oligonucleotide
  Sense strand starting at position 847 of SEQ ID NO: 913576
gguaauaacugccugauag

SEQ ID NO: 937913 - RNA, 19 nt, Artificial Sequence
  Description of Artificial Sequence: Synthetic oligonucleotide
  Antisense strand to SEQ ID NO: 937912
cuaucaggcaguuauuacc

SEQ ID NO: 937914 - RNA, 19 nt, Artificial Sequence
  Description of Artificial Sequence: Synthetic oligonucleotide
  Sense strand starting at position 2793 of SEQ ID NO: 913576
gacacuugauggccaguaa

SEQ ID NO: 937915 - RNA, 19 nt, Artificial Sequence
  Description of Artificial Sequence: Synthetic oligonucleotide
  Antisense strand to SEQ ID NO: 937914
uuacuggccaucaaguguc

SEQ ID NO: 937916 - RNA, 19 nt, Artificial Sequence
  Description of Artificial Sequence: Synthetic oligonucleotide
  Sense strand starting at position 2758 of SEQ ID NO: 913576
ccaagaagguugccugaca

SEQ ID NO: 937917 - RNA, 19 nt, Artificial Sequence
  Description of Artificial Sequence: Synthetic oligonucleotide
  Antisense strand to SEQ ID NO: 937916
ugucaggcaaccuucuugg

SEQ ID NO: 937918 - RNA, 19 nt, Artificial Sequence
  Description of Artificial Sequence: Synthetic oligonucleotide
  Sense strand starting at position 1377 of SEQ ID NO: 913576
ggcaaauauuagccaucaa

SEQ ID NO: 937919 - RNA, 19 nt, Artificial Sequence
  Description of Artificial Sequence: Synthetic oligonucleotide
  Antisense strand to SEQ ID NO: 937918
uugauggcuaauauuugcc

SEQ ID NO: 937920 - RNA, 19 nt, Artificial Sequence
  Description of Artificial Sequence: Synthetic oligonucleotide
  Sense strand starting at position 723 of SEQ ID NO: 913576
auaguugcccaauaguuga

SEQ ID NO: 937921 - RNA, 19 nt, Artificial Sequence
  Description of Artificial Sequence: Synthetic oligonucleotide
  Antisense strand to SEQ ID NO: 937920
ucaacuauugggcaacuau

SEQ ID NO: 937922 - RNA, 19 nt, Artificial Sequence
  Description of Artificial Sequence: Synthetic oligonucleotide
  Sense strand starting at position 718 of SEQ ID NO: 913576
ugauaauaguugcccaaua

SEQ ID NO: 937923 - RNA, 19 nt, Artificial Sequence
  Description of Artificial Sequence: Synthetic oligonucleotide
  Antisense strand to SEQ ID NO: 937922
uauugggcaacuauuauca

SEQ ID NO: 937924 - RNA, 19 nt, Artificial Sequence
  Description of Artificial Sequence: Synthetic oligonucleotide
  Sense strand starting at position 2307 of SEQ ID NO: 913576
aaagcaucucugggauggu

SEQ ID NO: 937925 - RNA, 19 nt, Artificial Sequence
  Description of Artificial Sequence: Synthetic oligonucleotide
  Antisense strand to SEQ ID NO: 937924
accaucccagagaugcuuu

SEQ ID NO: 937926 - RNA, 19 nt, Artificial Sequence
  Description of Artificial Sequence: Synthetic oligonucleotide
  Sense strand starting at position 2070 of SEQ ID NO: 913576
uuugauugauugccauaug

SEQ ID NO: 937927 - RNA, 19 nt, Artificial Sequence
  Description of Artificial Sequence: Synthetic oligonucleotide
  Antisense strand to SEQ ID NO: 937926
cauauggcaaucaaucaaa

SEQ ID NO: 937928 - RNA, 19 nt, Artificial Sequence
  Description of Artificial Sequence: Synthetic oligonucleotide
  Sense strand starting at position 666 of SEQ ID NO: 913576
auaauagcugccugacaga

SEQ ID NO: 937929 - RNA, 19 nt, Artificial Sequence
  Description of Artificial Sequence: Synthetic oligonucleotide
  Antisense strand to SEQ ID NO: 937928
ucugucaggcagcuauuau

SEQ ID NO: 937930 - RNA, 19 nt, Artificial Sequence
  Description of Artificial Sequence: Synthetic oligonucleotide
  Sense strand starting at position 2805 of SEQ ID NO: 913576
ccaguaacucuugguuaaa

SEQ ID NO: 937931 - RNA, 19 nt, Artificial Sequence
  Description of Artificial Sequence: Synthetic oligonucleotide
  Antisense strand to SEQ ID NO: 937930
uuuaaccaagaguuacugg

SEQ ID NO: 937932 - RNA, 19 nt, Artificial Sequence
  Description of Artificial Sequence: Synthetic oligonucleotide
  Sense strand starting at position 1781 of SEQ ID NO: 913576
caugauugggucugcagga

SEQ ID NO: 937933 - RNA, 19 nt, Artificial Sequence
  Description of Artificial Sequence: Synthetic oligonucleotide
  Antisense strand to SEQ ID NO: 937932
uccugcagacccaaucaug

SEQ ID NO: 937934 - RNA, 19 nt, Artificial Sequence
  Description of Artificial Sequence: Synthetic oligonucleotide
  Sense strand starting at position 2584 of SEQ ID NO: 913576
ugacaugcacauuguauga

SEQ ID NO: 937935 - RNA, 19 nt, Artificial Sequence
  Description of Artificial Sequence: Synthetic oligonucleotide
  Antisense strand to SEQ ID NO: 937934
ucauacaaugugcauguca

SEQ ID NO: 937936 - RNA, 19 nt, Artificial Sequence
  Description of Artificial Sequence: Synthetic oligonucleotide
  Sense strand starting at position 1606 of SEQ ID NO: 913576
ugacuuaaugacuggcuuu

SEQ ID NO: 937937 - RNA, 19 nt, Artificial Sequence
  Description of Artificial Sequence: Synthetic oligonucleotide
  Antisense strand to SEQ ID NO: 937936
aaagccagucauuaaguca

SEQ ID NO: 937938 - RNA, 19 nt, Artificial Sequence
  Description of Artificial Sequence: Synthetic oligonucleotide
  Sense strand starting at position 1170 of SEQ ID NO: 913576
gccauugagaugcagcaau

SEQ ID NO: 937939 - RNA, 19 nt, Artificial Sequence
  Description of Artificial Sequence: Synthetic oligonucleotide
  Antisense strand to SEQ ID NO: 937938
auugcugcaucucaauggc

SEQ ID NO: 937940 - RNA, 19 nt, Artificial Sequence
  Description of Artificial Sequence: Synthetic oligonucleotide
  Sense strand starting at position 58 of SEQ ID NO: 913576
augugaauuccaugucaug

SEQ ID NO: 937941 - RNA, 19 nt, Artificial Sequence
  Description of Artificial Sequence: Synthetic oligonucleotide
  Antisense strand to SEQ ID NO: 937940
caugacauggaauucacau

SEQ ID NO: 937942 - RNA, 19 nt, Artificial Sequence
  Description of Artificial Sequence: Synthetic oligonucleotide
  Sense strand starting at position 3462 of SEQ ID NO: 913576
cagacugucuggucuuaga

SEQ ID NO: 937943 - RNA, 19 nt, Artificial Sequence
  Description of Artificial Sequence: Synthetic oligonucleotide
  Antisense strand to SEQ ID NO: 937942
ucuaagaccagacagucug

SEQ ID NO: 937944 - RNA, 19 nt, Artificial Sequence
  Description of Artificial Sequence: Synthetic oligonucleotide
  Sense strand starting at position 1254 of SEQ ID NO: 913576
uugagugacugggcuucaa

SEQ ID NO: 937945 - RNA, 19 nt, Artificial Sequence
  Description of Artificial Sequence: Synthetic oligonucleotide
  Antisense strand to SEQ ID NO: 937944
uugaagcccagucacucaa

SEQ ID NO: 937946 - RNA, 19 nt, Artificial Sequence
  Description of Artificial Sequence: Synthetic oligonucleotide
  Sense strand starting at position 1513 of SEQ ID NO: 913577
gguugcaauuuccuauuau

SEQ ID NO: 937947 - RNA, 19 nt, Artificial Sequence
  Description of Artificial Sequence: Synthetic oligonucleotide
  Antisense strand to SEQ ID NO: 937946
auaauaggaaauugcaacc

SEQ ID NO: 937948 - RNA, 19 nt, Artificial Sequence
  Description of Artificial Sequence: Synthetic oligonucleotide
  Sense strand starting at position 2435 of SEQ ID NO: 913577
auaggaacuccuugaucau

SEQ ID NO: 937949 - RNA, 19 nt, Artificial Sequence
  Description of Artificial Sequence: Synthetic oligonucleotide
  Antisense strand to SEQ ID NO: 937948
augaucaaggaguuccuau

SEQ ID NO: 937950 - RNA, 19 nt, Artificial Sequence
  Description of Artificial Sequence: Synthetic oligonucleotide
  Sense strand starting at position 935 of SEQ ID NO: 913577
agcucaauccuuuacagag

SEQ ID NO: 937951 - RNA, 19 nt, Artificial Sequence
  Description of Artificial Sequence: Synthetic oligonucleotide
  Antisense strand to SEQ ID NO: 937950
cucuguaaaggauugagcu

SEQ ID NO: 937952 - RNA, 19 nt, Artificial Sequence
  Description of Artificial Sequence: Synthetic oligonucleotide
  Sense strand starting at position 3651 of SEQ ID NO: 913577
gagugucaacgacacauaa

SEQ ID NO: 937953 - RNA, 19 nt, Artificial Sequence
  Description of Artificial Sequence: Synthetic oligonucleotide
  Antisense strand to SEQ ID NO: 937952
uuaugugucguugacacuc

SEQ ID NO: 937954 - RNA, 19 nt, Artificial Sequence
  Description of Artificial Sequence: Synthetic oligonucleotide
  Sense strand starting at position 3653 of SEQ ID NO: 913577
gugucaacgacacauaaga

SEQ ID NO: 937955 - RNA, 19 nt, Artificial Sequence
  Description of Artificial Sequence: Synthetic oligonucleotide
  Antisense strand to SEQ ID NO: 937954
ucuuaugugucguugacac

SEQ ID NO: 937956 - RNA, 19 nt, Artificial Sequence
  Description of Artificial Sequence: Synthetic oligonucleotide
  Sense strand starting at position 3417 of SEQ ID NO: 913577
aagagugacucagucuaaa

SEQ ID NO: 937957 - RNA, 19 nt, Artificial Sequence
  Description of Artificial Sequence: Synthetic oligonucleotide
  Antisense strand to SEQ ID NO: 937956
uuuagacugagucacucuu

SEQ ID NO: 937958 - RNA, 19 nt, Artificial Sequence
  Description of Artificial Sequence: Synthetic oligonucleotide
  Sense strand starting at position 454 of SEQ ID NO: 913577
gugggacacucauuacaau

SEQ ID NO: 937959 - RNA, 19 nt, Artificial Sequence
  Description of Artificial Sequence: Synthetic oligonucleotide
  Antisense strand to SEQ ID NO: 937958
auuguaaugagugucccac

SEQ ID NO: 937960 - RNA, 19 nt, Artificial Sequence
  Description of Artificial Sequence: Synthetic oligonucleotide
  Sense strand starting at position 147 of SEQ ID NO: 913577
ucagaacuguucuuggaaa

SEQ ID NO: 937961 - RNA, 19 nt, Artificial Sequence
  Description of Artificial Sequence: Synthetic oligonucleotide
  Antisense strand to SEQ ID NO: 937960
uuuccaagaacaguucuga

SEQ ID NO: 937962 - RNA, 19 nt, Artificial Sequence
  Description of Artificial Sequence: Synthetic oligonucleotide
  Sense strand starting at position 867 of SEQ ID NO: 913577
aaaguaaugccggaaaucu

SEQ ID NO: 937963 - RNA, 19 nt, Artificial Sequence
  Description of Artificial Sequence: Synthetic oligonucleotide
  Antisense strand to SEQ ID NO: 937962
agauuuccggcauuacuuu

SEQ ID NO: 937964 - RNA, 19 nt, Artificial Sequence
  Description of Artificial Sequence: Synthetic oligonucleotide
  Sense strand starting at position 3569 of SEQ ID NO: 913577
gugauauaacaucacggua

SEQ ID NO: 937965 - RNA, 19 nt, Artificial Sequence
  Description of Artificial Sequence: Synthetic oligonucleotide
  Antisense strand to SEQ ID NO: 937964
uaccgugauguuauaucac

SEQ ID NO: 937966 - RNA, 19 nt, Artificial Sequence
  Description of Artificial Sequence: Synthetic oligonucleotide
  Sense strand starting at position 3649 of SEQ ID NO: 913577
augagugucaacgacacau

SEQ ID NO: 937967 - RNA, 19 nt, Artificial Sequence
  Description of Artificial Sequence: Synthetic oligonucleotide
  Antisense strand to SEQ ID NO: 937966
augugucguugacacucau

SEQ ID NO: 937968 - RNA, 19 nt, Artificial Sequence
  Description of Artificial Sequence: Synthetic oligonucleotide
  Sense strand starting at position 2105 of SEQ ID NO: 913577
gccuuugcucccuugcuua

SEQ ID NO: 937969 - RNA, 19 nt, Artificial Sequence
  Description of Artificial Sequence: Synthetic oligonucleotide
  Antisense strand to SEQ ID NO: 937968
uaagcaagggagcaaaggc

SEQ ID NO: 937970 - RNA, 19 nt, Artificial Sequence
  Description of Artificial Sequence: Synthetic oligonucleotide
  Sense strand starting at position 2117 of SEQ ID NO: 913577
uugcuuaggacugggaaua

SEQ ID NO: 937971 - RNA, 19 nt, Artificial Sequence
  Description of Artificial Sequence: Synthetic oligonucleotide
  Antisense strand to SEQ ID NO: 937970
uauucccaguccuaagcaa

SEQ ID NO: 937972 - RNA, 19 nt, Artificial Sequence
  Description of Artificial Sequence: Synthetic oligonucleotide
  Sense strand starting at position 3092 of SEQ ID NO: 913577
auaucagugguauaacugu

SEQ ID NO: 937973 - RNA, 19 nt, Artificial Sequence
  Description of Artificial Sequence: Synthetic oligonucleotide
  Antisense strand to SEQ ID NO: 937972
acaguuauaccacugauau

SEQ ID NO: 937974 - RNA, 19 nt, Artificial Sequence
  Description of Artificial Sequence: Synthetic oligonucleotide
  Sense strand starting at position 583 of SEQ ID NO: 913577
gugagauacgaucaugcua

SEQ ID NO: 937975 - RNA, 19 nt, Artificial Sequence
  Description of Artificial Sequence: Synthetic oligonucleotide
  Antisense strand to SEQ ID NO: 937974
uagcaugaucguaucucac

SEQ ID NO: 937976 - RNA, 19 nt, Artificial Sequence
  Description of Artificial Sequence: Synthetic oligonucleotide
  Sense strand starting at position 1547 of SEQ ID NO: 913577
gccgaaacuccucaacuua

SEQ ID NO: 937977 - RNA, 19 nt, Artificial Sequence
  Description of Artificial Sequence: Synthetic oligonucleotide
  Antisense strand to SEQ ID NO: 937976
uaaguugaggaguuucggc

SEQ ID NO: 937978 - RNA, 19 nt, Artificial Sequence
  Description of Artificial Sequence: Synthetic oligonucleotide
  Sense strand starting at position 2116 of SEQ ID NO: 913577
cuugcuuaggacugggaau

SEQ ID NO: 937979 - RNA, 19 nt, Artificial Sequence
  Description of Artificial Sequence: Synthetic oligonucleotide
  Antisense strand to SEQ ID NO: 937978
auucccaguccuaagcaag

SEQ ID NO: 937980 - RNA, 19 nt, Artificial Sequence
  Description of Artificial Sequence: Synthetic oligonucleotide
  Sense strand starting at position 3894 of SEQ ID NO: 913577
ggguuacagugagcaagau

SEQ ID NO: 937981 - RNA, 19 nt, Artificial Sequence
  Description of Artificial Sequence: Synthetic oligonucleotide
  Antisense strand to SEQ ID NO: 937980
aucuugcucacuguaaccc

SEQ ID NO: 937982 - RNA, 19 nt, Artificial Sequence
  Description of Artificial Sequence: Synthetic oligonucleotide
  Sense strand starting at position 284 of SEQ ID NO: 913577
agguuucuuucuucugaaa

SEQ ID NO: 937983 - RNA, 19 nt, Artificial Sequence
  Description of Artificial Sequence: Synthetic oligonucleotide
  Antisense strand to SEQ ID NO: 937982
uuucagaagaaagaaaccu

SEQ ID NO: 937984 - RNA, 19 nt, Artificial Sequence
  Description of Artificial Sequence: Synthetic oligonucleotide
  Sense strand starting at position 19 of SEQ ID NO: 913577
aaggaugcauaguucuuua

SEQ ID NO: 937985 - RNA, 19 nt, Artificial Sequence
  Description of Artificial Sequence: Synthetic oligonucleotide
  Antisense strand to SEQ ID NO: 937984
uaaagaacuaugcauccuu

SEQ ID NO: 937986 - RNA, 19 nt, Artificial Sequence
  Description of Artificial Sequence: Synthetic oligonucleotide
  Sense strand starting at position 3975 of SEQ ID NO: 913577
uaugaauugggauguguuc

SEQ ID NO: 937987 - RNA, 19 nt, Artificial Sequence
  Description of Artificial Sequence: Synthetic oligonucleotide
  Antisense strand to SEQ ID NO: 937986
gaacacaucccaauucaua

SEQ ID NO: 937988 - RNA, 19 nt, Artificial Sequence
  Description of Artificial Sequence: Synthetic oligonucleotide
  Sense strand starting at position 1104 of SEQ ID NO: 913577
guuugacugaggcaucagu

SEQ ID NO: 937989 - RNA, 19 nt, Artificial Sequence
  Description of Artificial Sequence: Synthetic oligonucleotide
  Antisense strand to SEQ ID NO: 937988
acugaugccucagucaaac

SEQ ID NO: 937990 - RNA, 19 nt, Artificial Sequence
  Description of Artificial Sequence: Synthetic oligonucleotide
  Sense strand starting at position 866 of SEQ ID NO: 913577
uaaaguaaugccggaaauc

SEQ ID NO: 937991 - RNA, 19 nt, Artificial Sequence
  Description of Artificial Sequence: Synthetic oligonucleotide
  Antisense strand to SEQ ID NO: 937990
gauuuccggcauuacuuua

SEQ ID NO: 937992 - RNA, 19 nt, Artificial Sequence
  Description of Artificial Sequence: Synthetic oligonucleotide
  Sense strand starting at position 2942 of SEQ ID NO: 913577
ucacuauuggauugagccu

SEQ ID NO: 937993 - RNA, 19 nt, Artificial Sequence
  Description of Artificial Sequence: Synthetic oligonucleotide
  Antisense strand to SEQ ID NO: 937992
aggcucaauccaauaguga

SEQ ID NO: 937994 - RNA, 19 nt, Artificial Sequence
  Description of Artificial Sequence: Synthetic oligonucleotide
  Sense strand starting at position 3087 of SEQ ID NO: 913577
guuaaauaucagugguaua

SEQ ID NO: 937995 - RNA, 19 nt, Artificial Sequence
  Description of Artificial Sequence: Synthetic oligonucleotide
  Antisense strand to SEQ ID NO: 937994
uauaccacugauauuuaac

SEQ ID NO: 937996 - RNA, 19 nt, Artificial Sequence
  Description of Artificial Sequence: Synthetic oligonucleotide
  Sense strand starting at position 688 of SEQ ID NO: 913577
agaaauuucuaccacuggu

SEQ ID NO: 937997 - RNA, 19 nt, Artificial Sequence
  Description of Artificial Sequence: Synthetic oligonucleotide
  Antisense strand to SEQ ID NO: 937996
accagugguagaaauuucu

SEQ ID NO: 937998 - RNA, 19 nt, Artificial Sequence
  Description of Artificial Sequence: Synthetic oligonucleotide
  Sense strand starting at position 980 of SEQ ID NO: 913577
uauaguggguaagucaauu

SEQ ID NO: 937999 - RNA, 19 nt, Artificial Sequence
  Description of Artificial Sequence: Synthetic oligonucleotide
  Antisense strand to SEQ ID NO: 937998
aauugacuuacccacuaua

SEQ ID NO: 938000 - RNA, 19 nt, Artificial Sequence
  Description of Artificial Sequence: Synthetic oligonucleotide
  Sense strand starting at position 2366 of SEQ ID NO: 913577
gugcacucccugggaaaca

SEQ ID NO: 938001 - RNA, 19 nt, Artificial Sequence
  Description of Artificial Sequence: Synthetic oligonucleotide
  Antisense strand to SEQ ID NO: 938000
uguuucccagggagugcac

SEQ ID NO: 938002 - RNA, 19 nt, Artificial Sequence
  Description of Artificial Sequence: Synthetic oligonucleotide
  Sense strand starting at position 120 of SEQ ID NO: 913577
ccagguaccgguuauccau

SEQ ID NO: 938003 - RNA, 19 nt, Artificial Sequence
  Description of Artificial Sequence: Synthetic oligonucleotide
  Antisense strand to SEQ ID NO: 938002
auggauaaccgguaccugg

SEQ ID NO: 938004 - RNA, 19 nt, Artificial Sequence
  Description of Artificial Sequence: Synthetic oligonucleotide
  Sense strand starting at position 3101 of SEQ ID NO: 913577
guauaacuguuauccugau

SEQ ID NO: 938005 - RNA, 19 nt, Artificial Sequence
  Description of Artificial Sequence: Synthetic oligonucleotide
  Antisense strand to SEQ ID NO: 938004
aucaggauaacaguuauac

SEQ ID NO: 938006 - RNA, 19 nt, Artificial Sequence
  Description of Artificial Sequence: Synthetic oligonucleotide
  Sense strand starting at position 1414 of SEQ ID NO: 913577
ugguuaacuuccucugauc

SEQ ID NO: 938007 - RNA, 19 nt, Artificial Sequence
  Description of Artificial Sequence: Synthetic oligonucleotide
  Antisense strand to SEQ ID NO: 938006
gaucagaggaaguuaacca

SEQ ID NO: 938008 - RNA, 19 nt, Artificial Sequence
  Description of Artificial Sequence: Synthetic oligonucleotide
  Sense strand starting at position 3086 of SEQ ID NO: 913577
uguuaaauaucagugguau

SEQ ID NO: 938009 - RNA, 19 nt, Artificial Sequence
  Description of Artificial Sequence: Synthetic oligonucleotide
  Antisense strand to SEQ ID NO: 938008
auaccacugauauuuaaca

SEQ ID NO: 938010 - RNA, 19 nt, Artificial Sequence
  Description of Artificial Sequence: Synthetic oligonucleotide
  Sense strand starting at position 1290 of SEQ ID NO: 913577
uggcuaugaugccuuaaag

SEQ ID NO: 938011 - RNA, 19 nt, Artificial Sequence
  Description of Artificial Sequence: Synthetic oligonucleotide
  Antisense strand to SEQ ID NO: 938010
cuuuaaggcaucauagcca

SEQ ID NO: 938012 - RNA, 19 nt, Artificial Sequence
  Description of Artificial Sequence: Synthetic oligonucleotide
  Sense strand starting at position 1402 of SEQ ID NO: 913577
acauuaugaccgugguuaa

SEQ ID NO: 938013 - RNA, 19 nt, Artificial Sequence
  Description of Artificial Sequence: Synthetic oligonucleotide
  Antisense strand to SEQ ID NO: 938012
uuaaccacggucauaaugu

SEQ ID NO: 938014 - RNA, 19 nt, Artificial Sequence
  Description of Artificial Sequence: Synthetic oligonucleotide
  Sense strand starting at position 408 of SEQ ID NO: 913577
ugcucaugauaugagauuu

SEQ ID NO: 938015 - RNA, 19 nt, Artificial Sequence
  Description of Artificial Sequence: Synthetic oligonucleotide
  Antisense strand to SEQ ID NO: 938014
aaaucucauaucaugagca

SEQ ID NO: 938016 - RNA, 19 nt, Artificial Sequence
  Description of Artificial Sequence: Synthetic oligonucleotide
  Sense strand starting at position 2364 of SEQ ID NO: 913577
uugugcacucccugggaaa

SEQ ID NO: 938017 - RNA, 19 nt, Artificial Sequence
  Description of Artificial Sequence: Synthetic oligonucleotide
  Antisense strand to SEQ ID NO: 938016
uuucccagggagugcacaa

SEQ ID NO: 938018 - RNA, 19 nt, Artificial Sequence
  Description of Artificial Sequence: Synthetic oligonucleotide
  Sense strand starting at position 1546 of SEQ ID NO: 913577
ggccgaaacuccucaacuu

SEQ ID NO: 938019 - RNA, 19 nt, Artificial Sequence
  Description of Artificial Sequence: Synthetic oligonucleotide
  Antisense strand to SEQ ID NO: 938018
aaguugaggaguuucggcc

SEQ ID NO: 938020 - RNA, 19 nt, Artificial Sequence
  Description of Artificial Sequence: Synthetic oligonucleotide
  Sense strand starting at position 303 of SEQ ID NO: 913577
agcuuauugcaaugacauu

SEQ ID NO: 938021 - RNA, 19 nt, Artificial Sequence
  Description of Artificial Sequence: Synthetic oligonucleotide
  Antisense strand to SEQ ID NO: 938020
aaugucauugcaauaagcu

SEQ ID NO: 938022 - RNA, 19 nt, Artificial Sequence
  Description of Artificial Sequence: Synthetic oligonucleotide
  Sense strand starting at position 1146 of SEQ ID NO: 913577
gucauuaccucuccaguga

SEQ ID NO: 938023 - RNA, 19 nt, Artificial Sequence
  Description of Artificial Sequence: Synthetic oligonucleotide
  Antisense strand to SEQ ID NO: 938022
ucacuggagagguaaugac

SEQ ID NO: 938024 - RNA, 19 nt, Artificial Sequence
  Description of Artificial Sequence: Synthetic oligonucleotide
  Sense strand starting at position 282 of SEQ ID NO: 913577
cuagguuucuuucuucuga

SEQ ID NO: 938025 - RNA, 19 nt, Artificial Sequence
  Description of Artificial Sequence: Synthetic oligonucleotide
  Antisense strand to SEQ ID NO: 938024
ucagaagaaagaaaccuag

SEQ ID NO: 938026 - RNA, 19 nt, Artificial Sequence
  Description of Artificial Sequence: Synthetic oligonucleotide
  Sense strand starting at position 3877 of SEQ ID NO: 913578
aaaugaguaggucagguau

SEQ ID NO: 938027 - RNA, 19 nt, Artificial Sequence
  Description of Artificial Sequence: Synthetic oligonucleotide
  Antisense strand to SEQ ID NO: 938026
auaccugaccuacucauuu

SEQ ID NO: 938028 - RNA, 19 nt, Artificial Sequence
  Description of Artificial Sequence: Synthetic oligonucleotide
  Sense strand starting at position 655 of SEQ ID NO: 913578
acgugguagccgucaggau

SEQ ID NO: 938029 - RNA, 19 nt, Artificial Sequence
  Description of Artificial Sequence: Synthetic oligonucleotide
  Antisense strand to SEQ ID NO: 938028
auccugacggcuaccacgu

SEQ ID NO: 938030 - RNA, 19 nt, Artificial Sequence
  Description of Artificial Sequence: Synthetic oligonucleotide
  Sense strand starting at position 3864 of SEQ ID NO: 913578
gcagguuguaaggaaauga

SEQ ID NO: 938031 - RNA, 19 nt, Artificial Sequence
  Description of Artificial Sequence: Synthetic oligonucleotide
  Antisense strand to SEQ ID NO: 938030
ucauuuccuuacaaccugc

SEQ ID NO: 938032 - RNA, 19 nt, Artificial Sequence
  Description of Artificial Sequence: Synthetic oligonucleotide
  Sense strand starting at position 617 of SEQ ID NO: 913578
uaaucuucccgaggaggaa

SEQ ID NO: 938033 - RNA, 19 nt, Artificial Sequence
  Description of Artificial Sequence: Synthetic oligonucleotide
  Antisense strand to SEQ ID NO: 938032
uuccuccucgggaagauua

SEQ ID NO: 938034 - RNA, 19 nt, Artificial Sequence
  Description of Artificial Sequence: Synthetic oligonucleotide
  Sense strand starting at position 3250 of SEQ ID NO: 913578
uggcuugauaacuggaaga

SEQ ID NO: 938035 - RNA, 19 nt, Artificial Sequence
  Description of Artificial Sequence: Synthetic oligonucleotide
  Antisense strand to SEQ ID NO: 938034
ucuuccaguuaucaagcca

SEQ ID NO: 938036 - RNA, 19 nt, Artificial Sequence
  Description of Artificial Sequence: Synthetic oligonucleotide
  Sense strand starting at position 3787 of SEQ ID NO: 913578
auuacugagccucacgaaa

SEQ ID NO: 938037 - RNA, 19 nt, Artificial Sequence
  Description of Artificial Sequence: Synthetic oligonucleotide
  Antisense strand to SEQ ID NO: 938036
uuucgugaggcucaguaau

SEQ ID NO: 938038 - RNA, 19 nt, Artificial Sequence
  Description of Artificial Sequence: Synthetic oligonucleotide
  Sense strand starting at position 1006 of SEQ ID NO: 913578
ucucaucaucgggaggagu

SEQ ID NO: 938039 - RNA, 19 nt, Artificial Sequence
  Description of Artificial Sequence: Synthetic oligonucleotide
  Antisense strand to SEQ ID NO: 938038
acuccucccgaugaugaga

SEQ ID NO: 938040 - RNA, 19 nt, Artificial Sequence
  Description of Artificial Sequence: Synthetic oligonucleotide
  Sense strand starting at position 2102 of SEQ ID NO: 913578
uuacuaaguggugaucuau

SEQ ID NO: 938041 - RNA, 19 nt, Artificial Sequence
  Description of Artificial Sequence: Synthetic oligonucleotide
  Antisense strand to SEQ ID NO: 938040
auagaucaccacuuaguaa

SEQ ID NO: 938042 - RNA, 19 nt, Artificial Sequence
  Description of Artificial Sequence: Synthetic oligonucleotide
  Sense strand starting at position 758 of SEQ ID NO: 913578
ucuagcguggauuaagaaa

SEQ ID NO: 938043 - RNA, 19 nt, Artificial Sequence
  Description of Artificial Sequence: Synthetic oligonucleotide
  Antisense strand to SEQ ID NO: 938042
uuucuuaauccacgcuaga

SEQ ID NO: 938044 - RNA, 19 nt, Artificial Sequence
  Description of Artificial Sequence: Synthetic oligonucleotide
  Sense strand starting at position 2937 of SEQ ID NO: 913578
gggcuaucacuccagugaa

SEQ ID NO: 938045 - RNA, 19 nt, Artificial Sequence
  Description of Artificial Sequence: Synthetic oligonucleotide
  Antisense strand to SEQ ID NO: 938044
uucacuggagugauagccc

SEQ ID NO: 938046 - RNA, 19 nt, Artificial Sequence
  Description of Artificial Sequence: Synthetic oligonucleotide
  Sense strand starting at position 3747 of SEQ ID NO: 913578
caaggaagugaguguagau

SEQ ID NO: 938047 - RNA, 19 nt, Artificial Sequence
  Description of Artificial Sequence: Synthetic oligonucleotide
  Antisense strand to SEQ ID NO: 938046
aucuacacucacuuccuug

SEQ ID NO: 938048 - RNA, 19 nt, Artificial Sequence
  Description of Artificial Sequence: Synthetic oligonucleotide
  Sense strand starting at position 3868 of SEQ ID NO: 913578
guuguaaggaaaugaguag

SEQ ID NO: 938049 - RNA, 19 nt, Artificial Sequence
  Description of Artificial Sequence: Synthetic oligonucleotide
  Antisense strand to SEQ ID NO: 938048
cuacucauuuccuuacaac

SEQ ID NO: 938050 - RNA, 19 nt, Artificial Sequence
  Description of Artificial Sequence: Synthetic oligonucleotide
  Sense strand starting at position 1008 of SEQ ID NO: 913578
ucaucaucgggaggaguga

SEQ ID NO: 938051 - RNA, 19 nt, Artificial Sequence
  Description of Artificial Sequence: Synthetic oligonucleotide
  Antisense strand to SEQ ID NO: 938050
ucacuccucccgaugauga

SEQ ID NO: 938052 - RNA, 19 nt, Artificial Sequence
  Description of Artificial Sequence: Synthetic oligonucleotide
  Sense strand starting at position 570 of SEQ ID NO: 913578
aagcccuauggguauuauu

SEQ ID NO: 938053 - RNA, 19 nt, Artificial Sequence
  Description of Artificial Sequence: Synthetic oligonucleotide
  Antisense strand to SEQ ID NO: 938052
aauaauacccauagggcuu

SEQ ID NO: 938054 - RNA, 19 nt, Artificial Sequence
  Description of Artificial Sequence: Synthetic oligonucleotide
  Sense strand starting at position 3773 of SEQ ID NO: 913578
agcagagaagucugauuac

SEQ ID NO: 938055 - RNA, 19 nt, Artificial Sequence
  Description of Artificial Sequence: Synthetic oligonucleotide
  Antisense strand to SEQ ID NO: 938054
guaaucagacuucucugcu

SEQ ID NO: 938056 - RNA, 19 nt, Artificial Sequence
  Description of Artificial Sequence: Synthetic oligonucleotide
  Sense strand starting at position 2110 of SEQ ID NO: 913578
uggugaucuauauacguaa

SEQ ID NO: 938057 - RNA, 19 nt, Artificial Sequence
  Description of Artificial Sequence: Synthetic oligonucleotide
  Antisense strand to SEQ ID NO: 938056
uuacguauauagaucacca

SEQ ID NO: 938058 - RNA, 19 nt, Artificial Sequence
  Description of Artificial Sequence: Synthetic oligonucleotide
  Sense strand starting at position 2513 of SEQ ID NO: 913578
aauucucuuggugaguuau

SEQ ID NO: 938059 - RNA, 19 nt, Artificial Sequence
  Description of Artificial Sequence: Synthetic oligonucleotide
  Antisense strand to SEQ ID NO: 938058
auaacucaccaagagaauu

SEQ ID NO: 938060 - RNA, 19 nt, Artificial Sequence
  Description of Artificial Sequence: Synthetic oligonucleotide
  Sense strand starting at position 102 of SEQ ID NO: 913578
aucagugucaggcagaauu

SEQ ID NO: 938061 - RNA, 19 nt, Artificial Sequence
  Description of Artificial Sequence: Synthetic oligonucleotide
  Antisense strand to SEQ ID NO: 938060
aauucugccugacacugau

SEQ ID NO: 938062 - RNA, 19 nt, Artificial Sequence
  Description of Artificial Sequence: Synthetic oligonucleotide
  Sense strand starting at position 2550 of SEQ ID NO: 913578
auacauucuagggagcgua

SEQ ID NO: 938063 - RNA, 19 nt, Artificial Sequence
  Description of Artificial Sequence: Synthetic oligonucleotide
  Antisense strand to SEQ ID NO: 938062
uacgcucccuagaauguau

SEQ ID NO: 938064 - RNA, 19 nt, Artificial Sequence
  Description of Artificial Sequence: Synthetic oligonucleotide
  Sense strand starting at position 312 of SEQ ID NO: 913578
cagcguuccgcuuucucaa

SEQ ID NO: 938065 - RNA, 19 nt, Artificial Sequence
  Description of Artificial Sequence: Synthetic oligonucleotide
  Antisense strand to SEQ ID NO: 938064
uugagaaagcggaacgcug

SEQ ID NO: 938066 - RNA, 19 nt, Artificial Sequence
  Description of Artificial Sequence: Synthetic oligonucleotide
  Sense strand starting at position 313 of SEQ ID NO: 913578
agcguuccgcuuucucaau

SEQ ID NO: 938067 - RNA, 19 nt, Artificial Sequence
  Description of Artificial Sequence: Synthetic oligonucleotide
  Antisense strand to SEQ ID NO: 938066
auugagaaagcggaacgcu

SEQ ID NO: 938068 - RNA, 19 nt, Artificial Sequence
  Description of Artificial Sequence: Synthetic oligonucleotide
  Sense strand starting at position 613 of SEQ ID NO: 913578
ccucuaaucuucccgagga

SEQ ID NO: 938069 - RNA, 19 nt, Artificial Sequence
  Description of Artificial Sequence: Synthetic oligonucleotide
  Antisense strand to SEQ ID NO: 938068
uccucgggaagauuagagg

SEQ ID NO: 938070 - RNA, 19 nt, Artificial Sequence
  Description of Artificial Sequence: Synthetic oligonucleotide
  Sense strand starting at position 3065 of SEQ ID NO: 913578
caguaauccggaugagagu

SEQ ID NO: 938071 - RNA, 19 nt, Artificial Sequence
  Description of Artificial Sequence: Synthetic oligonucleotide
  Antisense strand to SEQ ID NO: 938070
acucucauccggauuacug

SEQ ID NO: 938072 - RNA, 19 nt, Artificial Sequence
  Description of Artificial Sequence: Synthetic oligonucleotide
  Sense strand starting at position 2510 of SEQ ID NO: 913578
gggaauucucuuggugagu

SEQ ID NO: 938073 - RNA, 19 nt, Artificial Sequence
  Description of Artificial Sequence: Synthetic oligonucleotide
  Antisense strand to SEQ ID NO: 938072
acucaccaagagaauuccc

SEQ ID NO: 938074 - RNA, 19 nt, Artificial Sequence
  Description of Artificial Sequence: Synthetic oligonucleotide
  Sense strand starting at position 3339 of SEQ ID NO: 913578
ggguuugauucaguuuaug

SEQ ID NO: 938075 - RNA, 19 nt, Artificial Sequence
  Description of Artificial Sequence: Synthetic oligonucleotide
  Antisense strand to SEQ ID NO: 938074
cauaaacugaaucaaaccc

SEQ ID NO: 938076 - RNA, 19 nt, Artificial Sequence
  Description of Artificial Sequence: Synthetic oligonucleotide
  Sense strand starting at position 2511 of SEQ ID NO: 913578
ggaauucucuuggugaguu

SEQ ID NO: 938077 - RNA, 19 nt, Artificial Sequence
  Description of Artificial Sequence: Synthetic oligonucleotide
  Antisense strand to SEQ ID NO: 938076
aacucaccaagagaauucc

SEQ ID NO: 938078 - RNA, 19 nt, Artificial Sequence
  Description of Artificial Sequence: Synthetic oligonucleotide
  Sense strand starting at position 1175 of SEQ ID NO: 913578
agaaaugucucccugucua

SEQ ID NO: 938079 - RNA, 19 nt, Artificial Sequence
  Description of Artificial Sequence: Synthetic oligonucleotide
  Antisense strand to SEQ ID NO: 938078
uagacagggagacauuucu

SEQ ID NO: 938080 - RNA, 19 nt, Artificial Sequence
  Description of Artificial Sequence: Synthetic oligonucleotide
  Sense strand starting at position 2108 of SEQ ID NO: 913578
aguggugaucuauauacgu

SEQ ID NO: 938081 - RNA, 19 nt, Artificial Sequence
  Description of Artificial Sequence: Synthetic oligonucleotide
  Antisense strand to SEQ ID NO: 938080
acguauauagaucaccacu

SEQ ID NO: 938082 - RNA, 19 nt, Artificial Sequence
  Description of Artificial Sequence: Synthetic oligonucleotide
  Sense strand starting at position 1974 of SEQ ID NO: 913578
aggucuuagaguugaguau

SEQ ID NO: 938083 - RNA, 19 nt, Artificial Sequence
  Description of Artificial Sequence: Synthetic oligonucleotide
  Antisense strand to SEQ ID NO: 938082
auacucaacucuaagaccu

SEQ ID NO: 938084 - RNA, 19 nt, Artificial Sequence
  Description of Artificial Sequence: Synthetic oligonucleotide
  Sense strand starting at position 1095 of SEQ ID NO: 913578
gagaguggucccugacccu

SEQ ID NO: 938085 - RNA, 19 nt, Artificial Sequence
  Description of Artificial Sequence: Synthetic oligonucleotide
  Antisense strand to SEQ ID NO: 938084
agggucagggaccacucuc

SEQ ID NO: 938086 - RNA, 19 nt, Artificial Sequence
  Description of Artificial Sequence: Synthetic oligonucleotide
  Sense strand starting at position 3043 of SEQ ID NO: 913578
aggauuugguaagaugcua

SEQ ID NO: 938087 - RNA, 19 nt, Artificial Sequence
  Description of Artificial Sequence: Synthetic oligonucleotide
  Antisense strand to SEQ ID NO: 938086
uagcaucuuaccaaauccu

SEQ ID NO: 938088 - RNA, 19 nt, Artificial Sequence
  Description of Artificial Sequence: Synthetic oligonucleotide
  Sense strand starting at position 2896 of SEQ ID NO: 913578
uacagaguguaauccaguu

SEQ ID NO: 938089 - RNA, 19 nt, Artificial Sequence
  Description of Artificial Sequence: Synthetic oligonucleotide
  Antisense strand to SEQ ID NO: 938088
aacuggauuacacucugua

SEQ ID NO: 938090 - RNA, 19 nt, Artificial Sequence
  Description of Artificial Sequence: Synthetic oligonucleotide
  Sense strand starting at position 2515 of SEQ ID NO: 913578
uucucuuggugaguuauaa

SEQ ID NO: 938091 - RNA, 19 nt, Artificial Sequence
  Description of Artificial Sequence: Synthetic oligonucleotide
  Antisense strand to SEQ ID NO: 938090
uuauaacucaccaagagaa

SEQ ID NO: 938092 - RNA, 19 nt, Artificial Sequence
  Description of Artificial Sequence: Synthetic oligonucleotide
  Sense strand starting at position 2112 of SEQ ID NO: 913578
gugaucuauauacguaaug

SEQ ID NO: 938093 - RNA, 19 nt, Artificial Sequence
  Description of Artificial Sequence: Synthetic oligonucleotide
  Antisense strand to SEQ ID NO: 938092
cauuacguauauagaucac

SEQ ID NO: 938094 - RNA, 19 nt, Artificial Sequence
  Description of Artificial Sequence: Synthetic oligonucleotide
  Sense strand starting at position 2084 of SEQ ID NO: 913578
cuguuauucccagacgguu

SEQ ID NO: 938095 - RNA, 19 nt, Artificial Sequence
  Description of Artificial Sequence: Synthetic oligonucleotide
  Antisense strand to SEQ ID NO: 938094
aaccgucugggaauaacag

SEQ ID NO: 938096 - RNA, 19 nt, Artificial Sequence
  Description of Artificial Sequence: Synthetic oligonucleotide
  Sense strand starting at position 2113 of SEQ ID NO: 913578
ugaucuauauacguaaugu

SEQ ID NO: 938097 - RNA, 19 nt, Artificial Sequence
  Description of Artificial Sequence: Synthetic oligonucleotide
  Antisense strand to SEQ ID NO: 938096
acauuacguauauagauca

SEQ ID NO: 938098 - RNA, 19 nt, Artificial Sequence
  Description of Artificial Sequence: Synthetic oligonucleotide
  Sense strand starting at position 2099 of SEQ ID NO: 913578
gguuuacuaaguggugauc

SEQ ID NO: 938099 - RNA, 19 nt, Artificial Sequence
  Description of Artificial Sequence: Synthetic oligonucleotide
  Antisense strand to SEQ ID NO: 938098
gaucaccacuuaguaaacc

SEQ ID NO: 938100 - RNA, 19 nt, Artificial Sequence
  Description of Artificial Sequence: Synthetic oligonucleotide
  Sense strand starting at position 1737 of SEQ ID NO: 913578
guuggauuccauggcggaa

SEQ ID NO: 938101 - RNA, 19 nt, Artificial Sequence
  Description of Artificial Sequence: Synthetic oligonucleotide
  Antisense strand to SEQ ID NO: 938100
uuccgccauggaauccaac

SEQ ID NO: 938102 - RNA, 19 nt, Artificial Sequence
  Description of Artificial Sequence: Synthetic oligonucleotide
  Sense strand starting at position 711 of SEQ ID NO: 913578
gguuuacugaguggugauc

SEQ ID NO: 938103 - RNA, 19 nt, Artificial Sequence
  Description of Artificial Sequence: Synthetic oligonucleotide
  Antisense strand to SEQ ID NO: 938102
gaucaccacucaguaaacc

SEQ ID NO: 938104 - RNA, 19 nt, Artificial Sequence
  Description of Artificial Sequence: Synthetic oligonucleotide
  Sense strand starting at position 2097 of SEQ ID NO: 913578
acgguuuacuaagugguga

SEQ ID NO: 938105 - RNA, 19 nt, Artificial Sequence
  Description of Artificial Sequence: Synthetic oligonucleotide
  Antisense strand to SEQ ID NO: 938104
ucaccacuuaguaaaccgu

SEQ ID NO: 938106 - RNA, 19 nt, Artificial Sequence
  Description of Artificial Sequence: Synthetic oligonucleotide
  Sense strand starting at position 3735 of SEQ ID NO: 913579
agugcaauugaauaaaucu

SEQ ID NO: 938107 - RNA, 19 nt, Artificial Sequence
  Description of Artificial Sequence: Synthetic oligonucleotide
  Antisense strand to SEQ ID NO: 938106
agauuuauucaauugcacu

SEQ ID NO: 938108 - RNA, 19 nt, Artificial Sequence
  Description of Artificial Sequence: Synthetic oligonucleotide
  Sense strand starting at position 27 of SEQ ID NO: 913579
gauagauuauguuuaagac

SEQ ID NO: 938109 - RNA, 19 nt, Artificial Sequence
  Description of Artificial Sequence: Synthetic oligonucleotide
  Antisense strand to SEQ ID NO: 938108
gucuuaaacauaaucuauc

SEQ ID NO: 938110 - RNA, 19 nt, Artificial Sequence
  Description of Artificial Sequence: Synthetic oligonucleotide
  Sense strand starting at position 712 of SEQ ID NO: 913579
ugucuuaagcuauagaaga

SEQ ID NO: 938111 - RNA, 19 nt, Artificial Sequence
  Description of Artificial Sequence: Synthetic oligonucleotide
  Antisense strand to SEQ ID NO: 938110
ucuucuauagcuuaagaca

SEQ ID NO: 938112 - RNA, 19 nt, Artificial Sequence
  Description of Artificial Sequence: Synthetic oligonucleotide
  Sense strand starting at position 25 of SEQ ID NO: 913579
uggauagauuauguuuaag

SEQ ID NO: 938113 - RNA, 19 nt, Artificial Sequence
  Description of Artificial Sequence: Synthetic oligonucleotide
  Antisense strand to SEQ ID NO: 938112
cuuaaacauaaucuaucca

SEQ ID NO: 938114 - RNA, 19 nt, Artificial Sequence
  Description of Artificial Sequence: Synthetic oligonucleotide
  Sense strand starting at position 2319 of SEQ ID NO: 913579
ugauuaauugauuauggcu

SEQ ID NO: 938115 - RNA, 19 nt, Artificial Sequence
  Description of Artificial Sequence: Synthetic oligonucleotide
  Antisense strand to SEQ ID NO: 938114
agccauaaucaauuaauca

SEQ ID NO: 938116 - RNA, 19 nt, Artificial Sequence
  Description of Artificial Sequence: Synthetic oligonucleotide
  Sense strand starting at position 1045 of SEQ ID NO: 913579
uaaguaucgguggaagaug

SEQ ID NO: 938117 - RNA, 19 nt, Artificial Sequence
  Description of Artificial Sequence: Synthetic oligonucleotide
  Antisense strand to SEQ ID NO: 938116
caucuuccaccgauacuua

SEQ ID NO: 938118 - RNA, 19 nt, Artificial Sequence
  Description of Artificial Sequence: Synthetic oligonucleotide
  Sense strand starting at position 1063 of SEQ ID NO: 913579
gacaguuuagggugagaag

SEQ ID NO: 938119 - RNA, 19 nt, Artificial Sequence
  Description of Artificial Sequence: Synthetic oligonucleotide
  Antisense strand to SEQ ID NO: 938118
cuucucacccuaaacuguc

SEQ ID NO: 938120 - RNA, 19 nt, Artificial Sequence
  Description of Artificial Sequence: Synthetic oligonucleotide
  Sense strand starting at position 3883 of SEQ ID NO: 913579
cagugagauguuuaaccau

SEQ ID NO: 938121 - RNA, 19 nt, Artificial Sequence
  Description of Artificial Sequence: Synthetic oligonucleotide
  Antisense strand to SEQ ID NO: 938120
augguuaaacaucucacug

SEQ ID NO: 938122 - RNA, 19 nt, Artificial Sequence
  Description of Artificial Sequence: Synthetic oligonucleotide
  Sense strand starting at position 253 of SEQ ID NO: 913579
augaaucugaagugugaaa

SEQ ID NO: 938123 - RNA, 19 nt, Artificial Sequence
  Description of Artificial Sequence: Synthetic oligonucleotide
  Antisense strand to SEQ ID NO: 938122
uuucacacuucagauucau

SEQ ID NO: 938124 - RNA, 19 nt, Artificial Sequence
  Description of Artificial Sequence: Synthetic oligonucleotide
  Sense strand starting at position 2541 of SEQ ID NO: 913579
cucaaucauaguuggagga

SEQ ID NO: 938125 - RNA, 19 nt, Artificial Sequence
  Description of Artificial Sequence: Synthetic oligonucleotide
  Antisense strand to SEQ ID NO: 938124
uccuccaacuaugauugag

SEQ ID NO: 938126 - RNA, 19 nt, Artificial Sequence
  Description of Artificial Sequence: Synthetic oligonucleotide
  Sense strand starting at position 2285 of SEQ ID NO: 913579
cuagcuaucgaacacuaaa

SEQ ID NO: 938127 - RNA, 19 nt, Artificial Sequence
  Description of Artificial Sequence: Synthetic oligonucleotide
  Antisense strand to SEQ ID NO: 938126
uuuaguguucgauagcuag

SEQ ID NO: 938128 - RNA, 19 nt, Artificial Sequence
  Description of Artificial Sequence: Synthetic oligonucleotide
  Sense strand starting at position 555 of SEQ ID NO: 913579
ucgugugaaguguacauuu

SEQ ID NO: 938129 - RNA, 19 nt, Artificial Sequence
  Description of Artificial Sequence: Synthetic oligonucleotide
  Antisense strand to SEQ ID NO: 938128
aaauguacacuucacacga

SEQ ID NO: 938130 - RNA, 19 nt, Artificial Sequence
  Description of Artificial Sequence: Synthetic oligonucleotide
  Sense strand starting at position 3890 of SEQ ID NO: 913579
auguuuaaccaucauguga

SEQ ID NO: 938131 - RNA, 19 nt, Artificial Sequence
  Description of Artificial Sequence: Synthetic oligonucleotide
  Antisense strand to SEQ ID NO: 938130
ucacaugaugguuaaacau

SEQ ID NO: 938132 - RNA, 19 nt, Artificial Sequence
  Description of Artificial Sequence: Synthetic oligonucleotide
  Sense strand starting at position 3210 of SEQ ID NO: 913579
gaacgucaucuuuaccaag

SEQ ID NO: 938133 - RNA, 19 nt, Artificial Sequence
  Description of Artificial Sequence: Synthetic oligonucleotide
  Antisense strand to SEQ ID NO: 938132
cuugguaaagaugacguuc

SEQ ID NO: 938134 - RNA, 19 nt, Artificial Sequence
  Description of Artificial Sequence: Synthetic oligonucleotide
  Sense strand starting at position 1292 of SEQ ID NO: 913579
aaaguugaagcaggaguaa

SEQ ID NO: 938135 - RNA, 19 nt, Artificial Sequence
  Description of Artificial Sequence: Synthetic oligonucleotide
  Antisense strand to SEQ ID NO: 938134
uuacuccugcuucaacuuu

SEQ ID NO: 938136 - RNA, 19 nt, Artificial Sequence
  Description of Artificial Sequence: Synthetic oligonucleotide
  Sense strand starting at position 3886 of SEQ ID NO: 913579
ugagauguuuaaccaucau

SEQ ID NO: 938137 - RNA, 19 nt, Artificial Sequence
  Description of Artificial Sequence: Synthetic oligonucleotide
  Antisense strand to SEQ ID NO: 938136
augaugguuaaacaucuca

SEQ ID NO: 938138 - RNA, 19 nt, Artificial Sequence
  Description of Artificial Sequence: Synthetic oligonucleotide
  Sense strand starting at position 1081 of SEQ ID NO: 913579
gcggcugcucuuucucaca

SEQ ID NO: 938139 - RNA, 19 nt, Artificial Sequence
  Description of Artificial Sequence: Synthetic oligonucleotide
  Antisense strand to SEQ ID NO: 938138
ugugagaaagagcagccgc

SEQ ID NO: 938140 - RNA, 19 nt, Artificial Sequence
  Description of Artificial Sequence: Synthetic oligonucleotide
  Sense strand starting at position 266 of SEQ ID NO: 913579
gugaaaugccuauacuuua

SEQ ID NO: 938141 - RNA, 19 nt, Artificial Sequence
  Description of Artificial Sequence: Synthetic oligonucleotide
  Antisense strand to SEQ ID NO: 938140
uaaaguauaggcauuucac

SEQ ID NO: 938142 - RNA, 19 nt, Artificial Sequence
  Description of Artificial Sequence: Synthetic oligonucleotide
  Sense strand starting at position 587 of SEQ ID NO: 913579
ccugaaaucagcgaaaugu

SEQ ID NO: 938143 - RNA, 19 nt, Artificial Sequence
  Description of Artificial Sequence: Synthetic oligonucleotide
  Antisense strand to SEQ ID NO: 938142
acauuucgcugauuucagg

SEQ ID NO: 938144 - RNA, 19 nt, Artificial Sequence
  Description of Artificial Sequence: Synthetic oligonucleotide
  Sense strand starting at position 2557 of SEQ ID NO: 913579
ggagaaauguaguuuaucc

SEQ ID NO: 938145 - RNA, 19 nt, Artificial Sequence
  Description of Artificial Sequence: Synthetic oligonucleotide
  Antisense strand to SEQ ID NO: 938144
ggauaaacuacauuucucc

SEQ ID NO: 938146 - RNA, 19 nt, Artificial Sequence
  Description of Artificial Sequence: Synthetic oligonucleotide
  Sense strand starting at position 2310 of SEQ ID NO: 913579
uuugaagccugauuaauug

SEQ ID NO: 938147 - RNA, 19 nt, Artificial Sequence
  Description of Artificial Sequence: Synthetic oligonucleotide
  Antisense strand to SEQ ID NO: 938146
caauuaaucaggcuucaaa

SEQ ID NO: 938148 - RNA, 19 nt, Artificial Sequence
  Description of Artificial Sequence: Synthetic oligonucleotide
  Sense strand starting at position 3391 of SEQ ID NO: 913579
gccacaaaucugggauucu

SEQ ID NO: 938149 - RNA, 19 nt, Artificial Sequence
  Description of Artificial Sequence: Synthetic oligonucleotide
  Antisense strand to SEQ ID NO: 938148
agaaucccagauuuguggc

SEQ ID NO: 938150 - RNA, 19 nt, Artificial Sequence
  Description of Artificial Sequence: Synthetic oligonucleotide
  Sense strand starting at position 3204 of SEQ ID NO: 913579
uaaagugaacgucaucuuu

SEQ ID NO: 938151 - RNA, 19 nt, Artificial Sequence
  Description of Artificial Sequence: Synthetic oligonucleotide
  Antisense strand to SEQ ID NO: 938150
aaagaugacguucacuuua

SEQ ID NO: 938152 - RNA, 19 nt, Artificial Sequence
  Description of Artificial Sequence: Synthetic oligonucleotide
  Sense strand starting at position 478 of SEQ ID NO: 913579
uugaauggcaacuaucgua

SEQ ID NO: 938153 - RNA, 19 nt, Artificial Sequence
  Description of Artificial Sequence: Synthetic oligonucleotide
  Antisense strand to SEQ ID NO: 938152
uacgauaguugccauucaa

SEQ ID NO: 938154 - RNA, 19 nt, Artificial Sequence
  Description of Artificial Sequence: Synthetic oligonucleotide
  Sense strand starting at position 3614 of SEQ ID NO: 913579
acuuguccacccugagaug

SEQ ID NO: 938155 - RNA, 19 nt, Artificial Sequence
  Description of Artificial Sequence: Synthetic oligonucleotide
  Antisense strand to SEQ ID NO: 938154
caucucaggguggacaagu

SEQ ID NO: 938156 - RNA, 19 nt, Artificial Sequence
  Description of Artificial Sequence: Synthetic oligonucleotide
  Sense strand starting at position 3346 of SEQ ID NO: 913579
ucauuagauuaagugcaau

SEQ ID NO: 938157 - RNA, 19 nt, Artificial Sequence
  Description of Artificial Sequence: Synthetic oligonucleotide
  Antisense strand to SEQ ID NO: 938156
auugcacuuaaucuaauga

SEQ ID NO: 938158 - RNA, 19 nt, Artificial Sequence
  Description of Artificial Sequence: Synthetic oligonucleotide
  Sense strand starting at position 2746 of SEQ ID NO: 913579
uuguguggacuuuauuauu

SEQ ID NO: 938159 - RNA, 19 nt, Artificial Sequence
  Description of Artificial Sequence: Synthetic oligonucleotide
  Antisense strand to SEQ ID NO: 938158
aauaauaaaguccacacaa

SEQ ID NO: 938160 - RNA, 19 nt, Artificial Sequence
  Description of Artificial Sequence: Synthetic oligonucleotide
  Sense strand starting at position 1042 of SEQ ID NO: 913579
agguaaguaucgguggaag

SEQ ID NO: 938161 - RNA, 19 nt, Artificial Sequence
  Description of Artificial Sequence: Synthetic oligonucleotide
  Antisense strand to SEQ ID NO: 938160
cuuccaccgauacuuaccu

SEQ ID NO: 938162 - RNA, 19 nt, Artificial Sequence
  Description of Artificial Sequence: Synthetic oligonucleotide
  Sense strand starting at position 264 of SEQ ID NO: 913579
gugugaaaugccuauacuu

SEQ ID NO: 938163 - RNA, 19 nt, Artificial Sequence
  Description of Artificial Sequence: Synthetic oligonucleotide
  Antisense strand to SEQ ID NO: 938162
aaguauaggcauuucacac

SEQ ID NO: 938164 - RNA, 19 nt, Artificial Sequence
  Description of Artificial Sequence: Synthetic oligonucleotide
  Sense strand starting at position 3813 of SEQ ID NO: 913579
guacuaauucugggcauag

SEQ ID NO: 938165 - RNA, 19 nt, Artificial Sequence
  Description of Artificial Sequence: Synthetic oligonucleotide
  Antisense strand to SEQ ID NO: 938164
cuaugcccagaauuaguac

SEQ ID NO: 938166 - RNA, 19 nt, Artificial Sequence
  Description of Artificial Sequence: Synthetic oligonucleotide
  Sense strand starting at position 1041 of SEQ ID NO: 913579
gagguaaguaucgguggaa

SEQ ID NO: 938167 - RNA, 19 nt, Artificial Sequence
  Description of Artificial Sequence: Synthetic oligonucleotide
  Antisense strand to SEQ ID NO: 938166
uuccaccgauacuuaccuc

SEQ ID NO: 938168 - RNA, 19 nt, Artificial Sequence
  Description of Artificial Sequence: Synthetic oligonucleotide
  Sense strand starting at position 1043 of SEQ ID NO: 913579
gguaaguaucgguggaaga

SEQ ID NO: 938169 - RNA, 19 nt, Artificial Sequence
  Description of Artificial Sequence: Synthetic oligonucleotide
  Antisense strand to SEQ ID NO: 938168
ucuuccaccgauacuuacc

SEQ ID NO: 938170 - RNA, 19 nt, Artificial Sequence
  Description of Artificial Sequence: Synthetic oligonucleotide
  Sense strand starting at position 2796 of SEQ ID NO: 913579
gcacucaauuaguugaacu

SEQ ID NO: 938171 - RNA, 19 nt, Artificial Sequence
  Description of Artificial Sequence: Synthetic oligonucleotide
  Antisense strand to SEQ ID NO: 938170
aguucaacuaauugagugc

SEQ ID NO: 938172 - RNA, 19 nt, Artificial Sequence
  Description of Artificial Sequence: Synthetic oligonucleotide
  Sense strand starting at position 3966 of SEQ ID NO: 913579
aggacauucgcugaguucu

SEQ ID NO: 938173 - RNA, 19 nt, Artificial Sequence
  Description of Artificial Sequence: Synthetic oligonucleotide
  Antisense strand to SEQ ID NO: 938172
agaacucagcgaauguccu

SEQ ID NO: 938174 - RNA, 19 nt, Artificial Sequence
  Description of Artificial Sequence: Synthetic oligonucleotide
  Sense strand starting at position 43 of SEQ ID NO: 913579
gacucucuuuacguacaga

SEQ ID NO: 938175 - RNA, 19 nt, Artificial Sequence
  Description of Artificial Sequence: Synthetic oligonucleotide
  Antisense strand to SEQ ID NO: 938174
ucuguacguaaagagaguc

SEQ ID NO: 938176 - RNA, 19 nt, Artificial Sequence
  Description of Artificial Sequence: Synthetic oligonucleotide
  Sense strand starting at position 3625 of SEQ ID NO: 913579
cugagaugaucuucuugcu

SEQ ID NO: 938177 - RNA, 19 nt, Artificial Sequence
  Description of Artificial Sequence: Synthetic oligonucleotide
  Antisense strand to SEQ ID NO: 938176
agcaagaagaucaucucag

SEQ ID NO: 938178 - RNA, 19 nt, Artificial Sequence
  Description of Artificial Sequence: Synthetic oligonucleotide
  Sense strand starting at position 3458 of SEQ ID NO: 913579
ccuuuauguugucugagaa

SEQ ID NO: 938179 - RNA, 19 nt, Artificial Sequence
  Description of Artificial Sequence: Synthetic oligonucleotide
  Antisense strand to SEQ ID NO: 938178
uucucagacaacauaaagg

SEQ ID NO: 938180 - RNA, 19 nt, Artificial Sequence
  Description of Artificial Sequence: Synthetic oligonucleotide
  Sense strand starting at position 3457 of SEQ ID NO: 913579
accuuuauguugucugaga

SEQ ID NO: 938181 - RNA, 19 nt, Artificial Sequence
  Description of Artificial Sequence: Synthetic oligonucleotide
  Antisense strand to SEQ ID NO: 938180
ucucagacaacauaaaggu

SEQ ID NO: 938182 - RNA, 19 nt, Artificial Sequence
  Description of Artificial Sequence: Synthetic oligonucleotide
  Sense strand starting at position 1044 of SEQ ID NO: 913579
guaaguaucgguggaagau

SEQ ID NO: 938183 - RNA, 19 nt, Artificial Sequence
  Description of Artificial Sequence: Synthetic oligonucleotide
  Antisense strand to SEQ ID NO: 938182
aucuuccaccgauacuuac

SEQ ID NO: 938184 - RNA, 19 nt, Artificial Sequence
  Description of Artificial Sequence: Synthetic oligonucleotide
  Sense strand starting at position 586 of SEQ ID NO: 913579
gccugaaaucagcgaaaug

SEQ ID NO: 938185 - RNA, 19 nt, Artificial Sequence
  Description of Artificial Sequence: Synthetic oligonucleotide
  Antisense strand to SEQ ID NO: 938184
cauuucgcugauuucaggc

SEQ ID NO: 938186 - RNA, 19 nt, Artificial Sequence
  Description of Artificial Sequence: Synthetic oligonucleotide
  Sense strand starting at position 535 of SEQ ID NO: 913580
agauaacuuccucagcaug

SEQ ID NO: 938187 - RNA, 19 nt, Artificial Sequence
  Description of Artificial Sequence: Synthetic oligonucleotide
  Antisense strand to SEQ ID NO: 938186
caugcugaggaaguuaucu

SEQ ID NO: 938188 - RNA, 19 nt, Artificial Sequence
  Description of Artificial Sequence: Synthetic oligonucleotide
  Sense strand starting at position 1970 of SEQ ID NO: 913580
gucaauacaccagauguca

SEQ ID NO: 938189 - RNA, 19 nt, Artificial Sequence
  Description of Artificial Sequence: Synthetic oligonucleotide
  Antisense strand to SEQ ID NO: 938188
ugacaucugguguauugac

SEQ ID NO: 938190 - RNA, 19 nt, Artificial Sequence
  Description of Artificial Sequence: Synthetic oligonucleotide
  Sense strand starting at position 1767 of SEQ ID NO: 913580
aucacaucccaguaaugug

SEQ ID NO: 938191 - RNA, 19 nt, Artificial Sequence
  Description of Artificial Sequence: Synthetic oligonucleotide
  Antisense strand to SEQ ID NO: 938190
cacauuacugggaugugau

SEQ ID NO: 938192 - RNA, 19 nt, Artificial Sequence
  Description of Artificial Sequence: Synthetic oligonucleotide
  Sense strand starting at position 961 of SEQ ID NO: 913580
uuauaauacgaauggguaa

SEQ ID NO: 938193 - RNA, 19 nt, Artificial Sequence
  Description of Artificial Sequence: Synthetic oligonucleotide
  Antisense strand to SEQ ID NO: 938192
uuacccauucguauuauaa

SEQ ID NO: 938194 - RNA, 19 nt, Artificial Sequence
  Description of Artificial Sequence: Synthetic oligonucleotide
  Sense strand starting at position 2098 of SEQ ID NO: 913580
auaagagaugcaugugaac

SEQ ID NO: 938195 - RNA, 19 nt, Artificial Sequence
  Description of Artificial Sequence: Synthetic oligonucleotide
  Antisense strand to SEQ ID NO: 938194
guucacaugcaucucuuau

SEQ ID NO: 938196 - RNA, 19 nt, Artificial Sequence
  Description of Artificial Sequence: Synthetic oligonucleotide
  Sense strand starting at position 1079 of SEQ ID NO: 913580
acuguuauccuugggagag

SEQ ID NO: 938197 - RNA, 19 nt, Artificial Sequence
  Description of Artificial Sequence: Synthetic oligonucleotide
  Antisense strand to SEQ ID NO: 938196
cucucccaaggauaacagu

SEQ ID NO: 938198 - RNA, 19 nt, Artificial Sequence
  Description of Artificial Sequence: Synthetic oligonucleotide
  Sense strand starting at position 3961 of SEQ ID NO: 913580
ucaucaaggcauuagucau

SEQ ID NO: 938199 - RNA, 19 nt, Artificial Sequence
  Description of Artificial Sequence: Synthetic oligonucleotide
  Antisense strand to SEQ ID NO: 938198
augacuaaugccuugauga

SEQ ID NO: 938200 - RNA, 19 nt, Artificial Sequence
  Description of Artificial Sequence: Synthetic oligonucleotide
  Sense strand starting at position 2974 of SEQ ID NO: 913580
ucagauggcugugcuauuu

SEQ ID NO: 938201 - RNA, 19 nt, Artificial Sequence
  Description of Artificial Sequence: Synthetic oligonucleotide
  Antisense strand to SEQ ID NO: 938200
aaauagcacagccaucuga

SEQ ID NO: 938202 - RNA, 19 nt, Artificial Sequence
  Description of Artificial Sequence: Synthetic oligonucleotide
  Sense strand starting at position 148 of SEQ ID NO: 913580
gcacauucugcacagggau

SEQ ID NO: 938203 - RNA, 19 nt, Artificial Sequence
  Description of Artificial Sequence: Synthetic oligonucleotide
  Antisense strand to SEQ ID NO: 938202
aucccugugcagaaugugc

SEQ ID NO: 938204 - RNA, 19 nt, Artificial Sequence
  Description of Artificial Sequence: Synthetic oligonucleotide
  Sense strand starting at position 1078 of SEQ ID NO: 913580
uacuguuauccuugggaga

SEQ ID NO: 938205 - RNA, 19 nt, Artificial Sequence
  Description of Artificial Sequence: Synthetic oligonucleotide
  Antisense strand to SEQ ID NO: 938204
ucucccaaggauaacagua

SEQ ID NO: 938206 - RNA, 19 nt, Artificial Sequence
  Description of Artificial Sequence: Synthetic oligonucleotide
  Sense strand starting at position 3367 of SEQ ID NO: 913580
agguuuauuucugaagaga

SEQ ID NO: 938207 - RNA, 19 nt, Artificial Sequence
  Description of Artificial Sequence: Synthetic oligonucleotide
  Antisense strand to SEQ ID NO: 938206
ucucuucagaaauaaaccu

SEQ ID NO: 938208 - RNA, 19 nt, Artificial Sequence
  Description of Artificial Sequence: Synthetic oligonucleotide
  Sense strand starting at position 2131 of SEQ ID NO: 913580
guuaauaaagacugucuau

SEQ ID NO: 938209 - RNA, 19 nt, Artificial Sequence
  Description of Artificial Sequence: Synthetic oligonucleotide
  Antisense strand to SEQ ID NO: 938208
auagacagucuuuauuaac

SEQ ID NO: 938210 - RNA, 19 nt, Artificial Sequence
  Description of Artificial Sequence: Synthetic oligonucleotide
  Sense strand starting at position 2252 of SEQ ID NO: 913580
aucuuaggauguguuaaua

SEQ ID NO: 938211 - RNA, 19 nt, Artificial Sequence
  Description of Artificial Sequence: Synthetic oligonucleotide
  Antisense strand to SEQ ID NO: 938210
uauuaacacauccuaagau

SEQ ID NO: 938212 - RNA, 19 nt, Artificial Sequence
  Description of Artificial Sequence: Synthetic oligonucleotide
  Sense strand starting at position 1505 of SEQ ID NO: 913580
ggccaugugccagaauaca

SEQ ID NO: 938213 - RNA, 19 nt, Artificial Sequence
  Description of Artificial Sequence: Synthetic oligonucleotide
  Antisense strand to SEQ ID NO: 938212
uguauucuggcacauggcc

SEQ ID NO: 938214 - RNA, 19 nt, Artificial Sequence
  Description of Artificial Sequence: Synthetic oligonucleotide
  Sense strand starting at position 3114 of SEQ ID NO: 913580
gugaguggucagggacaca

SEQ ID NO: 938215 - RNA, 19 nt, Artificial Sequence
  Description of Artificial Sequence: Synthetic oligonucleotide
  Antisense strand to SEQ ID NO: 938214
ugugucccugaccacucac

SEQ ID NO: 938216 - RNA, 19 nt, Artificial Sequence
  Description of Artificial Sequence: Synthetic oligonucleotide
  Sense strand starting at position 1747 of SEQ ID NO: 913580
ugucuuaccgaagauaguu

SEQ ID NO: 938217 - RNA, 19 nt, Artificial Sequence
  Description of Artificial Sequence: Synthetic oligonucleotide
  Antisense strand to SEQ ID NO: 938216
aacuaucuucgguaagaca

SEQ ID NO: 938218 - RNA, 19 nt, Artificial Sequence
  Description of Artificial Sequence: Synthetic oligonucleotide
  Sense strand starting at position 3084 of SEQ ID NO: 913580
acaguucaggucugggauu

SEQ ID NO: 938219 - RNA, 19 nt, Artificial Sequence
  Description of Artificial Sequence: Synthetic oligonucleotide
  Antisense strand to SEQ ID NO: 938218
aaucccagaccugaacugu

SEQ ID NO: 938220 - RNA, 19 nt, Artificial Sequence
  Description of Artificial Sequence: Synthetic oligonucleotide
  Sense strand starting at position 1774 of SEQ ID NO: 913580
cccaguaauguguaguaau

SEQ ID NO: 938221 - RNA, 19 nt, Artificial Sequence
  Description of Artificial Sequence: Synthetic oligonucleotide
  Antisense strand to SEQ ID NO: 938220
auuacuacacauuacuggg

SEQ ID NO: 938222 - RNA, 19 nt, Artificial Sequence
  Description of Artificial Sequence: Synthetic oligonucleotide
  Sense strand starting at position 1797 of SEQ ID NO: 913580
aguaucuucugaccuguaa

SEQ ID NO: 938223 - RNA, 19 nt, Artificial Sequence
  Description of Artificial Sequence: Synthetic oligonucleotide
  Antisense strand to SEQ ID NO: 938222
uuacaggucagaagauacu

SEQ ID NO: 938224 - RNA, 19 nt, Artificial Sequence
  Description of Artificial Sequence: Synthetic oligonucleotide
  Sense strand starting at position 1742 of SEQ ID NO: 913580
uccacugucuuaccgaaga

SEQ ID NO: 938225 - RNA, 19 nt, Artificial Sequence
  Description of Artificial Sequence: Synthetic oligonucleotide
  Antisense strand to SEQ ID NO: 938224
ucuucgguaagacagugga

SEQ ID NO: 938226 - RNA, 19 nt, Artificial Sequence
  Description of Artificial Sequence: Synthetic oligonucleotide
  Sense strand starting at position 1851 of SEQ ID NO: 913580
ccuucuucccucggaaaca

SEQ ID NO: 938227 - RNA, 19 nt, Artificial Sequence
  Description of Artificial Sequence: Synthetic oligonucleotide
  Antisense strand to SEQ ID NO: 938226
uguuuccgagggaagaagg

SEQ ID NO: 938228 - RNA, 19 nt, Artificial Sequence
  Description of Artificial Sequence: Synthetic oligonucleotide
  Sense strand starting at position 2959 of SEQ ID NO: 913580
guaugauaacucgggucag

SEQ ID NO: 938229 - RNA, 19 nt, Artificial Sequence
  Description of Artificial Sequence: Synthetic oligonucleotide
  Antisense strand to SEQ ID NO: 938228
cugacccgaguuaucauac

SEQ ID NO: 938230 - RNA, 19 nt, Artificial Sequence
  Description of Artificial Sequence: Synthetic oligonucleotide
  Sense strand starting at position 3034 of SEQ ID NO: 913580
gagguagguccaggcaauu

SEQ ID NO: 938231 - RNA, 19 nt, Artificial Sequence
  Description of Artificial Sequence: Synthetic oligonucleotide
  Antisense strand to SEQ ID NO: 938230
aauugccuggaccuaccuc

SEQ ID NO: 938232 - RNA, 19 nt, Artificial Sequence
  Description of Artificial Sequence: Synthetic oligonucleotide
  Sense strand starting at position 3817 of SEQ ID NO: 913580
ugaaguugccaugguggaa

SEQ ID NO: 938233 - RNA, 19 nt, Artificial Sequence
  Description of Artificial Sequence: Synthetic oligonucleotide
  Antisense strand to SEQ ID NO: 938232
uuccaccauggcaacuuca

SEQ ID NO: 938234 - RNA, 19 nt, Artificial Sequence
  Description of Artificial Sequence: Synthetic oligonucleotide
  Sense strand starting at position 2233 of SEQ ID NO: 913580
ugugaagcaaugugguaaa

SEQ ID NO: 938235 - RNA, 19 nt, Artificial Sequence
  Description of Artificial Sequence: Synthetic oligonucleotide
  Antisense strand to SEQ ID NO: 938234
uuuaccacauugcuucaca

SEQ ID NO: 938236 - RNA, 19 nt, Artificial Sequence
  Description of Artificial Sequence: Synthetic oligonucleotide
  Sense strand starting at position 3366 of SEQ ID NO: 913580
aagguuuauuucugaagag

SEQ ID NO: 938237 - RNA, 19 nt, Artificial Sequence
  Description of Artificial Sequence: Synthetic oligonucleotide
  Antisense strand to SEQ ID NO: 938236
cucuucagaaauaaaccuu

SEQ ID NO: 938238 - RNA, 19 nt, Artificial Sequence
  Description of Artificial Sequence: Synthetic oligonucleotide
  Sense strand starting at position 2997 of SEQ ID NO: 913580
uggguugguucuccagacu

SEQ ID NO: 938239 - RNA, 19 nt, Artificial Sequence
  Description of Artificial Sequence: Synthetic oligonucleotide
  Antisense strand to SEQ ID NO: 938238
agucuggagaaccaaccca

SEQ ID NO: 938240 - RNA, 19 nt, Artificial Sequence
  Description of Artificial Sequence: Synthetic oligonucleotide
  Sense strand starting at position 448 of SEQ ID NO: 913580
acacauucuugagaagaaa

SEQ ID NO: 938241 - RNA, 19 nt, Artificial Sequence
  Description of Artificial Sequence: Synthetic oligonucleotide
  Antisense strand to SEQ ID NO: 938240
uuucuucucaagaaugugu

SEQ ID NO: 938242 - RNA, 19 nt, Artificial Sequence
  Description of Artificial Sequence: Synthetic oligonucleotide
  Sense strand starting at position 2014 of SEQ ID NO: 913580
cucauuggcuguuuacaga

SEQ ID NO: 938243 - RNA, 19 nt, Artificial Sequence
  Description of Artificial Sequence: Synthetic oligonucleotide
  Antisense strand to SEQ ID NO: 938242
ucuguaaacagccaaugag

SEQ ID NO: 938244 - RNA, 19 nt, Artificial Sequence
  Description of Artificial Sequence: Synthetic oligonucleotide
  Sense strand starting at position 1248 of SEQ ID NO: 913580
aguaauuucugucacacaa

SEQ ID NO: 938245 - RNA, 19 nt, Artificial Sequence
  Description of Artificial Sequence: Synthetic oligonucleotide
  Antisense strand to SEQ ID NO: 938244
uugugugacagaaauuacu

SEQ ID NO: 938246 - RNA, 19 nt, Artificial Sequence
  Description of Artificial Sequence: Synthetic oligonucleotide
  Sense strand starting at position 2075 of SEQ ID NO: 913580
ugggaucuguaguuugagu

SEQ ID NO: 938247 - RNA, 19 nt, Artificial Sequence
  Description of Artificial Sequence: Synthetic oligonucleotide
  Antisense strand to SEQ ID NO: 938246
acucaaacuacagauccca

SEQ ID NO: 938248 - RNA, 19 nt, Artificial Sequence
  Description of Artificial Sequence: Synthetic oligonucleotide
  Sense strand starting at position 1875 of SEQ ID NO: 913580
cacagugagcuucgaauua

SEQ ID NO: 938249 - RNA, 19 nt, Artificial Sequence
  Description of Artificial Sequence: Synthetic oligonucleotide
  Antisense strand to SEQ ID NO: 938248
uaauucgaagcucacugug

SEQ ID NO: 938250 - RNA, 19 nt, Artificial Sequence
  Description of Artificial Sequence: Synthetic oligonucleotide
  Sense strand starting at position 1848 of SEQ ID NO: 913580
aguccuucuucccucggaa

SEQ ID NO: 938251 - RNA, 19 nt, Artificial Sequence
  Description of Artificial Sequence: Synthetic oligonucleotide
  Antisense strand to SEQ ID NO: 938250
uuccgagggaagaaggacu

SEQ ID NO: 938252 - RNA, 19 nt, Artificial Sequence
  Description of Artificial Sequence: Synthetic oligonucleotide
  Sense strand starting at position 2077 of SEQ ID NO: 913580
ggaucuguaguuugaguuu

SEQ ID NO: 938253 - RNA, 19 nt, Artificial Sequence
  Description of Artificial Sequence: Synthetic oligonucleotide
  Antisense strand to SEQ ID NO: 938252
aaacucaaacuacagaucc

SEQ ID NO: 938254 - RNA, 19 nt, Artificial Sequence
  Description of Artificial Sequence: Synthetic oligonucleotide
  Sense strand starting at position 2080 of SEQ ID NO: 913580
ucuguaguuugaguuuaua

SEQ ID NO: 938255 - RNA, 19 nt, Artificial Sequence
  Description of Artificial Sequence: Synthetic oligonucleotide
  Antisense strand to SEQ ID NO: 938254
uauaaacucaaacuacaga

SEQ ID NO: 938256 - RNA, 19 nt, Artificial Sequence
  Description of Artificial Sequence: Synthetic oligonucleotide
  Sense strand starting at position 2045 of SEQ ID NO: 913580
aguccacgugucuauuauu

SEQ ID NO: 938257 - RNA, 19 nt, Artificial Sequence
  Description of Artificial Sequence: Synthetic oligonucleotide
  Antisense strand to SEQ ID NO: 938256
aauaauagacacguggacu

SEQ ID NO: 938258 - RNA, 19 nt, Artificial Sequence
  Description of Artificial Sequence: Synthetic oligonucleotide
  Sense strand starting at position 1772 of SEQ ID NO: 913580
aucccaguaauguguagua

SEQ ID NO: 938259 - RNA, 19 nt, Artificial Sequence
  Description of Artificial Sequence: Synthetic oligonucleotide
  Antisense strand to SEQ ID NO: 938258
uacuacacauuacugggau

SEQ ID NO: 938260 - RNA, 19 nt, Artificial Sequence
  Description of Artificial Sequence: Synthetic oligonucleotide
  Sense strand starting at position 2732 of SEQ ID NO: 913580
aauagugauuuguaagcca

SEQ ID NO: 938261 - RNA, 19 nt, Artificial Sequence
  Description of Artificial Sequence: Synthetic oligonucleotide
  Antisense strand to SEQ ID NO: 938260
uggcuuacaaaucacuauu

SEQ ID NO: 938262 - RNA, 19 nt, Artificial Sequence
  Description of Artificial Sequence: Synthetic oligonucleotide
  Sense strand starting at position 575 of SEQ ID NO: 913580
cuuuguguccaguaaugca

SEQ ID NO: 938263 - RNA, 19 nt, Artificial Sequence
  Description of Artificial Sequence: Synthetic oligonucleotide
  Antisense strand to SEQ ID NO: 938262
ugcauuacuggacacaaag

SEQ ID NO: 938264 - RNA, 19 nt, Artificial Sequence
  Description of Artificial Sequence: Synthetic oligonucleotide
  Sense strand starting at position 3015 of SEQ ID NO: 913580
ucaggagugucucuagucu

SEQ ID NO: 938265 - RNA, 19 nt, Artificial Sequence
  Description of Artificial Sequence: Synthetic oligonucleotide
  Antisense strand to SEQ ID NO: 938264
agacuagagacacuccuga

SEQ ID NO: 938266 - RNA, 19 nt, Artificial Sequence
  Description of Artificial Sequence: Synthetic oligonucleotide
  Sense strand starting at position 3575 of SEQ ID NO: 913581
auugaaaucgcacacugaa

SEQ ID NO: 938267 - RNA, 19 nt, Artificial Sequence
  Description of Artificial Sequence: Synthetic oligonucleotide
  Antisense strand to SEQ ID NO: 938266
uucagugugcgauuucaau

SEQ ID NO: 938268 - RNA, 19 nt, Artificial Sequence
  Description of Artificial Sequence: Synthetic oligonucleotide
  Sense strand starting at position 1370 of SEQ ID NO: 913581
uguugauugaaugauggua

SEQ ID NO: 938269 - RNA, 19 nt, Artificial Sequence
  Description of Artificial Sequence: Synthetic oligonucleotide
  Antisense strand to SEQ ID NO: 938268
uaccaucauucaaucaaca

SEQ ID NO: 938270 - RNA, 19 nt, Artificial Sequence
  Description of Artificial Sequence: Synthetic oligonucleotide
  Sense strand starting at position 2240 of SEQ ID NO: 913581
uuuaguguccaagaacaac

SEQ ID NO: 938271 - RNA, 19 nt, Artificial Sequence
  Description of Artificial Sequence: Synthetic oligonucleotide
  Antisense strand to SEQ ID NO: 938270
guuguucuuggacacuaaa

SEQ ID NO: 938272 - RNA, 19 nt, Artificial Sequence
  Description of Artificial Sequence: Synthetic oligonucleotide
  Sense strand starting at position 298 of SEQ ID NO: 913581
cccucaaccgaguaaggau

SEQ ID NO: 938273 - RNA, 19 nt, Artificial Sequence
  Description of Artificial Sequence: Synthetic oligonucleotide
  Antisense strand to SEQ ID NO: 938272
auccuuacucgguugaggg

SEQ ID NO: 938274 - RNA, 19 nt, Artificial Sequence
  Description of Artificial Sequence: Synthetic oligonucleotide
  Sense strand starting at position 2806 of SEQ ID NO: 913581
gaaguauguguauacauau

SEQ ID NO: 938275 - RNA, 19 nt, Artificial Sequence
  Description of Artificial Sequence: Synthetic oligonucleotide
  Antisense strand to SEQ ID NO: 938274
auauguauacacauacuuc

SEQ ID NO: 938276 - RNA, 19 nt, Artificial Sequence
  Description of Artificial Sequence: Synthetic oligonucleotide
  Sense strand starting at position 3784 of SEQ ID NO: 913581
uggaacuaugggugagcaa

SEQ ID NO: 938277 - RNA, 19 nt, Artificial Sequence
  Description of Artificial Sequence: Synthetic oligonucleotide
  Antisense strand to SEQ ID NO: 938276
uugcucacccauaguucca

SEQ ID NO: 938278 - RNA, 19 nt, Artificial Sequence
  Description of Artificial Sequence: Synthetic oligonucleotide
  Sense strand starting at position 2467 of SEQ ID NO: 913581
ccucuagcccuguaggaaa

SEQ ID NO: 938279 - RNA, 19 nt, Artificial Sequence
  Description of Artificial Sequence: Synthetic oligonucleotide
  Antisense strand to SEQ ID NO: 938278
uuuccuacagggcuagagg

SEQ ID NO: 938280 - RNA, 19 nt, Artificial Sequence
  Description of Artificial Sequence: Synthetic oligonucleotide
  Sense strand starting at position 2803 of SEQ ID NO: 913581
gaggaaguauguguauaca

SEQ ID NO: 938281 - RNA, 19 nt, Artificial Sequence
  Description of Artificial Sequence: Synthetic oligonucleotide
  Antisense strand to SEQ ID NO: 938280
uguauacacauacuuccuc

SEQ ID NO: 938282 - RNA, 19 nt, Artificial Sequence
  Description of Artificial Sequence: Synthetic oligonucleotide
  Sense strand starting at position 2813 of SEQ ID NO: 913581
guguauacauaucuuaaag

SEQ ID NO: 938283 - RNA, 19 nt, Artificial Sequence
  Description of Artificial Sequence: Synthetic oligonucleotide
  Antisense strand to SEQ ID NO: 938282
cuuuaagauauguauacac

SEQ ID NO: 938284 - RNA, 19 nt, Artificial Sequence
  Description of Artificial Sequence: Synthetic oligonucleotide
  Sense strand starting at position 2802 of SEQ ID NO: 913581
agaggaaguauguguauac

SEQ ID NO: 938285 - RNA, 19 nt, Artificial Sequence
  Description of Artificial Sequence: Synthetic oligonucleotide
  Antisense strand to SEQ ID NO: 938284
guauacacauacuuccucu

SEQ ID NO: 938286 - RNA, 19 nt, Artificial Sequence
  Description of Artificial Sequence: Synthetic oligonucleotide
  Sense strand starting at position 3336 of SEQ ID NO: 913581
aucuuacaucacugggcaa

SEQ ID NO: 938287 - RNA, 19 nt, Artificial Sequence
  Description of Artificial Sequence: Synthetic oligonucleotide
  Antisense strand to SEQ ID NO: 938286
uugcccagugauguaagau

SEQ ID NO: 938288 - RNA, 19 nt, Artificial Sequence
  Description of Artificial Sequence: Synthetic oligonucleotide
  Sense strand starting at position 1359 of SEQ ID NO: 913581
caauaaagguuuguugauu

SEQ ID NO: 938289 - RNA, 19 nt, Artificial Sequence
  Description of Artificial Sequence: Synthetic oligonucleotide
  Antisense strand to SEQ ID NO: 938288
aaucaacaaaccuuuauug

SEQ ID NO: 938290 - RNA, 19 nt, Artificial Sequence
  Description of Artificial Sequence: Synthetic oligonucleotide
  Sense strand starting at position 1406 of SEQ ID NO: 913581
uccagaguccuuuaccuuu

SEQ ID NO: 938291 - RNA, 19 nt, Artificial Sequence
  Description of Artificial Sequence: Synthetic oligonucleotide
  Antisense strand to SEQ ID NO: 938290
aaagguaaaggacucugga

SEQ ID NO: 938292 - RNA, 19 nt, Artificial Sequence
  Description of Artificial Sequence: Synthetic oligonucleotide
  Sense strand starting at position 2162 of SEQ ID NO: 913581
ggagcuaggucuucaggga

SEQ ID NO: 938293 - RNA, 19 nt, Artificial Sequence
  Description of Artificial Sequence: Synthetic oligonucleotide
  Antisense strand to SEQ ID NO: 938292
ucccugaagaccuagcucc

SEQ ID NO: 938294 - RNA, 19 nt, Artificial Sequence
  Description of Artificial Sequence: Synthetic oligonucleotide
  Sense strand starting at position 2663 of SEQ ID NO: 913581
uggguuugaacauguugga

SEQ ID NO: 938295 - RNA, 19 nt, Artificial Sequence
  Description of Artificial Sequence: Synthetic oligonucleotide
  Antisense strand to SEQ ID NO: 938294
uccaacauguucaaaccca

SEQ ID NO: 938296 - RNA, 19 nt, Artificial Sequence
  Description of Artificial Sequence: Synthetic oligonucleotide
  Sense strand starting at position 1358 of SEQ ID NO: 913581
ucaauaaagguuuguugau

SEQ ID NO: 938297 - RNA, 19 nt, Artificial Sequence
  Description of Artificial Sequence: Synthetic oligonucleotide
  Antisense strand to SEQ ID NO: 938296
aucaacaaaccuuuauuga

SEQ ID NO: 938298 - RNA, 19 nt, Artificial Sequence
  Description of Artificial Sequence: Synthetic oligonucleotide
  Sense strand starting at position 1126 of SEQ ID NO: 913581
aagugaaauuuccaagagu

SEQ ID NO: 938299 - RNA, 19 nt, Artificial Sequence
  Description of Artificial Sequence: Synthetic oligonucleotide
  Antisense strand to SEQ ID NO: 938298
acucuuggaaauuucacuu

SEQ ID NO: 938300 - RNA, 19 nt, Artificial Sequence
  Description of Artificial Sequence: Synthetic oligonucleotide
  Sense strand starting at position 2945 of SEQ ID NO: 913581
gccucaaacucuccaggau

SEQ ID NO: 938301 - RNA, 19 nt, Artificial Sequence
  Description of Artificial Sequence: Synthetic oligonucleotide
  Antisense strand to SEQ ID NO: 938300
auccuggagaguuugaggc

SEQ ID NO: 938302 - RNA, 19 nt, Artificial Sequence
  Description of Artificial Sequence: Synthetic oligonucleotide
  Sense strand starting at position 1569 of SEQ ID NO: 913581
caaagaguauccguaaauc

SEQ ID NO: 938303 - RNA, 19 nt, Artificial Sequence
  Description of Artificial Sequence: Synthetic oligonucleotide
  Antisense strand to SEQ ID NO: 938302
gauuuacggauacucuuug

SEQ ID NO: 938304 - RNA, 19 nt, Artificial Sequence
  Description of Artificial Sequence: Synthetic oligonucleotide
  Sense strand starting at position 1011 of SEQ ID NO: 913581
guugcuugaguugaaauua

SEQ ID NO: 938305 - RNA, 19 nt, Artificial Sequence
  Description of Artificial Sequence: Synthetic oligonucleotide
  Antisense strand to SEQ ID NO: 938304
uaauuucaacucaagcaac

SEQ ID NO: 938306 - RNA, 19 nt, Artificial Sequence
  Description of Artificial Sequence: Synthetic oligonucleotide
  Sense strand starting at position 989 of SEQ ID NO: 913581
guugaauugcugcaauaca

SEQ ID NO: 938307 - RNA, 19 nt, Artificial Sequence
  Description of Artificial Sequence: Synthetic oligonucleotide
  Antisense strand to SEQ ID NO: 938306
uguauugcagcaauucaac

SEQ ID NO: 938308 - RNA, 19 nt, Artificial Sequence
  Description of Artificial Sequence: Synthetic oligonucleotide
  Sense strand starting at position 927 of SEQ ID NO: 913581
uugcuuuaacuuugggaau

SEQ ID NO: 938309 - RNA, 19 nt, Artificial Sequence
  Description of Artificial Sequence: Synthetic oligonucleotide
  Antisense strand to SEQ ID NO: 938308
auucccaaaguuaaagcaa

SEQ ID NO: 938310 - RNA, 19 nt, Artificial Sequence
  Description of Artificial Sequence: Synthetic oligonucleotide
  Sense strand starting at position 1164 of SEQ ID NO: 913581
ggacuuacauuuggauaug

SEQ ID NO: 938311 - RNA, 19 nt, Artificial Sequence
  Description of Artificial Sequence: Synthetic oligonucleotide
  Antisense strand to SEQ ID NO: 938310
cauauccaaauguaagucc

SEQ ID NO: 938312 - RNA, 19 nt, Artificial Sequence
  Description of Artificial Sequence: Synthetic oligonucleotide
  Sense strand starting at position 887 of SEQ ID NO: 913581
gcuugaauguccucuaaag

SEQ ID NO: 938313 - RNA, 19 nt, Artificial Sequence
  Description of Artificial Sequence: Synthetic oligonucleotide
  Antisense strand to SEQ ID NO: 938312
cuuuagaggacauucaagc

SEQ ID NO: 938314 - RNA, 19 nt, Artificial Sequence
  Description of Artificial Sequence: Synthetic oligonucleotide
  Sense strand starting at position 2638 of SEQ ID NO: 913581
uuuaauacucugugaaguu

SEQ ID NO: 938315 - RNA, 19 nt, Artificial Sequence
  Description of Artificial Sequence: Synthetic oligonucleotide
  Antisense strand to SEQ ID NO: 938314
aacuucacagaguauuaaa

SEQ ID NO: 938316 - RNA, 19 nt, Artificial Sequence
  Description of Artificial Sequence: Synthetic oligonucleotide
  Sense strand starting at position 1567 of SEQ ID NO: 913581
ggcaaagaguauccguaaa

SEQ ID NO: 938317 - RNA, 19 nt, Artificial Sequence
  Description of Artificial Sequence: Synthetic oligonucleotide
  Antisense strand to SEQ ID NO: 938316
uuuacggauacucuuugcc

SEQ ID NO: 938318 - RNA, 19 nt, Artificial Sequence
  Description of Artificial Sequence: Synthetic oligonucleotide
  Sense strand starting at position 1008 of SEQ ID NO: 913581
acaguugcuugaguugaaa

SEQ ID NO: 938319 - RNA, 19 nt, Artificial Sequence
  Description of Artificial Sequence: Synthetic oligonucleotide
  Antisense strand to SEQ ID NO: 938318
uuucaacucaagcaacugu

SEQ ID NO: 938320 - RNA, 19 nt, Artificial Sequence
  Description of Artificial Sequence: Synthetic oligonucleotide
  Sense strand starting at position 1522 of SEQ ID NO: 913581
guucucugucacugagaac

SEQ ID NO: 938321 - RNA, 19 nt, Artificial Sequence
  Description of Artificial Sequence: Synthetic oligonucleotide
  Antisense strand to SEQ ID NO: 938320
guucucagugacagagaac

SEQ ID NO: 938322 - RNA, 19 nt, Artificial Sequence
  Description of Artificial Sequence: Synthetic oligonucleotide
  Sense strand starting at position 541 of SEQ ID NO: 913581
aguuaacccuaguccuuau

SEQ ID NO: 938323 - RNA, 19 nt, Artificial Sequence
  Description of Artificial Sequence: Synthetic oligonucleotide
  Antisense strand to SEQ ID NO: 938322
auaaggacuaggguuaacu

SEQ ID NO: 938324 - RNA, 19 nt, Artificial Sequence
  Description of Artificial Sequence: Synthetic oligonucleotide
  Sense strand starting at position 905 of SEQ ID NO: 913581
gauaucugaugauaaagga

SEQ ID NO: 938325 - RNA, 19 nt, Artificial Sequence
  Description of Artificial Sequence: Synthetic oligonucleotide
  Antisense strand to SEQ ID NO: 938324
uccuuuaucaucagauauc

SEQ ID NO: 938326 - RNA, 19 nt, Artificial Sequence
  Description of Artificial Sequence: Synthetic oligonucleotide
  Sense strand starting at position 680 of SEQ ID NO: 913581
uguuucgauucuuugacaa

SEQ ID NO: 938327 - RNA, 19 nt, Artificial Sequence
  Description of Artificial Sequence: Synthetic oligonucleotide
  Antisense strand to SEQ ID NO: 938326
uugucaaagaaucgaaaca

SEQ ID NO: 938328 - RNA, 19 nt, Artificial Sequence
  Description of Artificial Sequence: Synthetic oligonucleotide
  Sense strand starting at position 416 of SEQ ID NO: 913581
gcuacuuuacuaugguaau

SEQ ID NO: 938329 - RNA, 19 nt, Artificial Sequence
  Description of Artificial Sequence: Synthetic oligonucleotide
  Antisense strand to SEQ ID NO: 938328
auuaccauaguaaaguagc

SEQ ID NO: 938330 - RNA, 19 nt, Artificial Sequence
  Description of Artificial Sequence: Synthetic oligonucleotide
  Sense strand starting at position 3555 of SEQ ID NO: 913581
auauacauuugcuacggaa

SEQ ID NO: 938331 - RNA, 19 nt, Artificial Sequence
  Description of Artificial Sequence: Synthetic oligonucleotide
  Antisense strand to SEQ ID NO: 938330
uuccguagcaaauguauau

SEQ ID NO: 938332 - RNA, 19 nt, Artificial Sequence
  Description of Artificial Sequence: Synthetic oligonucleotide
  Sense strand starting at position 38 of SEQ ID NO: 913581
gaaucuaacgcccgaugau

SEQ ID NO: 938333 - RNA, 19 nt, Artificial Sequence
  Description of Artificial Sequence: Synthetic oligonucleotide
  Antisense strand to SEQ ID NO: 938332
aucaucgggcguuagauuc

SEQ ID NO: 938334 - RNA, 19 nt, Artificial Sequence
  Description of Artificial Sequence: Synthetic oligonucleotide
  Sense strand starting at position 2926 of SEQ ID NO: 913581
gccaauaaguuucugcaaa

SEQ ID NO: 938335 - RNA, 19 nt, Artificial Sequence
  Description of Artificial Sequence: Synthetic oligonucleotide
  Antisense strand to SEQ ID NO: 938334
uuugcagaaacuuauuggc

SEQ ID NO: 938336 - RNA, 19 nt, Artificial Sequence
  Description of Artificial Sequence: Synthetic oligonucleotide
  Sense strand starting at position 1010 of SEQ ID NO: 913581
aguugcuugaguugaaauu

SEQ ID NO: 938337 - RNA, 19 nt, Artificial Sequence
  Description of Artificial Sequence: Synthetic oligonucleotide
  Antisense strand to SEQ ID NO: 938336
aauuucaacucaagcaacu

SEQ ID NO: 938338 - RNA, 19 nt, Artificial Sequence
  Description of Artificial Sequence: Synthetic oligonucleotide
  Sense strand starting at position 3467 of SEQ ID NO: 913581
auauguagaugcuuugcaa

SEQ ID NO: 938339 - RNA, 19 nt, Artificial Sequence
  Description of Artificial Sequence: Synthetic oligonucleotide
  Antisense strand to SEQ ID NO: 938338
uugcaaagcaucuacauau

SEQ ID NO: 938340 - RNA, 19 nt, Artificial Sequence
  Description of Artificial Sequence: Synthetic oligonucleotide
  Sense strand starting at position 2719 of SEQ ID NO: 913581
aagagauggugagaaacuu

SEQ ID NO: 938341 - RNA, 19 nt, Artificial Sequence
  Description of Artificial Sequence: Synthetic oligonucleotide
  Antisense strand to SEQ ID NO: 938340
aaguuucucaccaucucuu

SEQ ID NO: 938342 - RNA, 19 nt, Artificial Sequence
  Description of Artificial Sequence: Synthetic oligonucleotide
  Sense strand starting at position 2789 of SEQ ID NO: 913581
aggguaaacucacagagga

SEQ ID NO: 938343 - RNA, 19 nt, Artificial Sequence
  Description of Artificial Sequence: Synthetic oligonucleotide
  Antisense strand to SEQ ID NO: 938342
uccucugugaguuuacccu

SEQ ID NO: 938344 - RNA, 19 nt, Artificial Sequence
  Description of Artificial Sequence: Synthetic oligonucleotide
  Sense strand starting at position 3180 of SEQ ID NO: 913581
caaaguaagucggcacauu

SEQ ID NO: 938345 - RNA, 19 nt, Artificial Sequence
  Description of Artificial Sequence: Synthetic oligonucleotide
  Antisense strand to SEQ ID NO: 938344
aaugugccgacuuacuuug

SEQ ID NO: 938346 - RNA, 19 nt, Artificial Sequence
  Description of Artificial Sequence: Synthetic oligonucleotide
  Sense strand starting at position 3962 of SEQ ID NO: 913582
ucaaguaugccauaugaaa

SEQ ID NO: 938347 - RNA, 19 nt, Artificial Sequence
  Description of Artificial Sequence: Synthetic oligonucleotide
  Antisense strand to SEQ ID NO: 938346
uuucauauggcauacuuga

SEQ ID NO: 938348 - RNA, 19 nt, Artificial Sequence
  Description of Artificial Sequence: Synthetic oligonucleotide
  Sense strand starting at position 3268 of SEQ ID NO: 913582
uuaggcuauggugaauaau

SEQ ID NO: 938349 - RNA, 19 nt, Artificial Sequence
  Description of Artificial Sequence: Synthetic oligonucleotide
  Antisense strand to SEQ ID NO: 938348
auuauucaccauagccuaa

SEQ ID NO: 938350 - RNA, 19 nt, Artificial Sequence
  Description of Artificial Sequence: Synthetic oligonucleotide
  Sense strand starting at position 710 of SEQ ID NO: 913582
uuauuaucacaaugaguga

SEQ ID NO: 938351 - RNA, 19 nt, Artificial Sequence
  Description of Artificial Sequence: Synthetic oligonucleotide
  Antisense strand to SEQ ID NO: 938350
ucacucauugugauaauaa

SEQ ID NO: 938352 - RNA, 19 nt, Artificial Sequence
  Description of Artificial Sequence: Synthetic oligonucleotide
  Sense strand starting at position 3051 of SEQ ID NO: 913582
cuaugauuacucuggauac

SEQ ID NO: 938353 - RNA, 19 nt, Artificial Sequence
  Description of Artificial Sequence: Synthetic oligonucleotide
  Antisense strand to SEQ ID NO: 938352
guauccagaguaaucauag

SEQ ID NO: 938354 - RNA, 19 nt, Artificial Sequence
  Description of Artificial Sequence: Synthetic oligonucleotide
  Sense strand starting at position 115 of SEQ ID NO: 913582
uagguaauccauuagcuga

SEQ ID NO: 938355 - RNA, 19 nt, Artificial Sequence
  Description of Artificial Sequence: Synthetic oligonucleotide
  Antisense strand to SEQ ID NO: 938354
ucagcuaauggauuaccua

SEQ ID NO: 938356 - RNA, 19 nt, Artificial Sequence
  Description of Artificial Sequence: Synthetic oligonucleotide
  Sense strand starting at position 3188 of SEQ ID NO: 913582
gcugaauaauacucaauug

SEQ ID NO: 938357 - RNA, 19 nt, Artificial Sequence
  Description of Artificial Sequence: Synthetic oligonucleotide
  Antisense strand to SEQ ID NO: 938356
caauugaguauuauucagc

SEQ ID NO: 938358 - RNA, 19 nt, Artificial Sequence
  Description of Artificial Sequence: Synthetic oligonucleotide
  Sense strand starting at position 2633 of SEQ ID NO: 913582
gcaguauucccguuguuug

SEQ ID NO: 938359 - RNA, 19 nt, Artificial Sequence
  Description of Artificial Sequence: Synthetic oligonucleotide
  Antisense strand to SEQ ID NO: 938358
caaacaacgggaauacugc

SEQ ID NO: 938360 - RNA, 19 nt, Artificial Sequence
  Description of Artificial Sequence: Synthetic oligonucleotide
  Sense strand starting at position 3049 of SEQ ID NO: 913582
cucuaugauuacucuggau

SEQ ID NO: 938361 - RNA, 19 nt, Artificial Sequence
  Description of Artificial Sequence: Synthetic oligonucleotide
  Antisense strand to SEQ ID NO: 938360
auccagaguaaucauagag

SEQ ID NO: 938362 - RNA, 19 nt, Artificial Sequence
  Description of Artificial Sequence: Synthetic oligonucleotide
  Sense strand starting at position 561 of SEQ ID NO: 913582
acguaaguaucugcaauuu

SEQ ID NO: 938363 - RNA, 19 nt, Artificial Sequence
  Description of Artificial Sequence: Synthetic oligonucleotide
  Antisense strand to SEQ ID NO: 938362
aaauugcagauacuuacgu

SEQ ID NO: 938364 - RNA, 19 nt, Artificial Sequence
  Description of Artificial Sequence: Synthetic oligonucleotide
  Sense strand starting at position 2539 of SEQ ID NO: 913582
ggacaucuuugagaauuug

SEQ ID NO: 938365 - RNA, 19 nt, Artificial Sequence
  Description of Artificial Sequence: Synthetic oligonucleotide
  Antisense strand to SEQ ID NO: 938364
caaauucucaaagaugucc

SEQ ID NO: 938366 - RNA, 19 nt, Artificial Sequence
  Description of Artificial Sequence: Synthetic oligonucleotide
  Sense strand starting at position 1542 of SEQ ID NO: 913582
gguggacuaacgcagaauu

SEQ ID NO: 938367 - RNA, 19 nt, Artificial Sequence
  Description of Artificial Sequence: Synthetic oligonucleotide
  Antisense strand to SEQ ID NO: 938366
aauucugcguuaguccacc

SEQ ID NO: 938368 - RNA, 19 nt, Artificial Sequence
  Description of Artificial Sequence: Synthetic oligonucleotide
  Sense strand starting at position 2547 of SEQ ID NO: 913582
uugagaauuugagagcaag

SEQ ID NO: 938369 - RNA, 19 nt, Artificial Sequence
  Description of Artificial Sequence: Synthetic oligonucleotide
  Antisense strand to SEQ ID NO: 938368
cuugcucucaaauucucaa

SEQ ID NO: 938370 - RNA, 19 nt, Artificial Sequence
  Description of Artificial Sequence: Synthetic oligonucleotide
  Sense strand starting at position 1149 of SEQ ID NO: 913582
agaauaagugagugccaaa

SEQ ID NO: 938371 - RNA, 19 nt, Artificial Sequence
  Description of Artificial Sequence: Synthetic oligonucleotide
  Antisense strand to SEQ ID NO: 938370
uuuggcacucacuuauucu

SEQ ID NO: 938372 - RNA, 19 nt, Artificial Sequence
  Description of Artificial Sequence: Synthetic oligonucleotide
  Sense strand starting at position 337 of SEQ ID NO: 913582
uuaaacagaucguuuauga

SEQ ID NO: 938373 - RNA, 19 nt, Artificial Sequence
  Description of Artificial Sequence: Synthetic oligonucleotide
  Antisense strand to SEQ ID NO: 938372
ucauaaacgaucuguuuaa

SEQ ID NO: 938374 - RNA, 19 nt, Artificial Sequence
  Description of Artificial Sequence: Synthetic oligonucleotide
  Sense strand starting at position 2499 of SEQ ID NO: 913582
gccucuaucugucccauuu

SEQ ID NO: 938375 - RNA, 19 nt, Artificial Sequence
  Description of Artificial Sequence: Synthetic oligonucleotide
  Antisense strand to SEQ ID NO: 938374
aaaugggacagauagaggc

SEQ ID NO: 938376 - RNA, 19 nt, Artificial Sequence
  Description of Artificial Sequence: Synthetic oligonucleotide
  Sense strand starting at position 45 of SEQ ID NO: 913582
gaugcuuuggcagaugauc

SEQ ID NO: 938377 - RNA, 19 nt, Artificial Sequence
  Description of Artificial Sequence: Synthetic oligonucleotide
  Antisense strand to SEQ ID NO: 938376
gaucaucugccaaagcauc

SEQ ID NO: 938378 - RNA, 19 nt, Artificial Sequence
  Description of Artificial Sequence: Synthetic oligonucleotide
  Sense strand starting at position 1148 of SEQ ID NO: 913582
cagaauaagugagugccaa

SEQ ID NO: 938379 - RNA, 19 nt, Artificial Sequence
  Description of Artificial Sequence: Synthetic oligonucleotide
  Antisense strand to SEQ ID NO: 938378
uuggcacucacuuauucug

SEQ ID NO: 938380 - RNA, 19 nt, Artificial Sequence
  Description of Artificial Sequence: Synthetic oligonucleotide
  Sense strand starting at position 1050 of SEQ ID NO: 913582
acagcaucauuaguuauga

SEQ ID NO: 938381 - RNA, 19 nt, Artificial Sequence
  Description of Artificial Sequence: Synthetic oligonucleotide
  Antisense strand to SEQ ID NO: 938380
ucauaacuaaugaugcugu

SEQ ID NO: 938382 - RNA, 19 nt, Artificial Sequence
  Description of Artificial Sequence: Synthetic oligonucleotide
  Sense strand starting at position 107 of SEQ ID NO: 913582
ccauguuguagguaaucca

SEQ ID NO: 938383 - RNA, 19 nt, Artificial Sequence
  Description of Artificial Sequence: Synthetic oligonucleotide
  Antisense strand to SEQ ID NO: 938382
uggauuaccuacaacaugg

SEQ ID NO: 938384 - RNA, 19 nt, Artificial Sequence
  Description of Artificial Sequence: Synthetic oligonucleotide
  Sense strand starting at position 2411 of SEQ ID NO: 913582
agucgauuccugucugcgu

SEQ ID NO: 938385 - RNA, 19 nt, Artificial Sequence
  Description of Artificial Sequence: Synthetic oligonucleotide
  Antisense strand to SEQ ID NO: 938384
acgcagacaggaaucgacu

SEQ ID NO: 938386 - RNA, 19 nt, Artificial Sequence
  Description of Artificial Sequence: Synthetic oligonucleotide
  Sense strand starting at position 122 of SEQ ID NO: 913582
uccauuagcugacucuaga

SEQ ID NO: 938387 - RNA, 19 nt, Artificial Sequence
  Description of Artificial Sequence: Synthetic oligonucleotide
  Antisense strand to SEQ ID NO: 938386
ucuagagucagcuaaugga

SEQ ID NO: 938388 - RNA, 19 nt, Artificial Sequence
  Description of Artificial Sequence: Synthetic oligonucleotide
  Sense strand starting at position 3868 of SEQ ID NO: 913582
uggauaauguuauuagcca

SEQ ID NO: 938389 - RNA, 19 nt, Artificial Sequence
  Description of Artificial Sequence: Synthetic oligonucleotide
  Antisense strand to SEQ ID NO: 938388
uggcuaauaacauuaucca

SEQ ID NO: 938390 - RNA, 19 nt, Artificial Sequence
  Description of Artificial Sequence: Synthetic oligonucleotide
  Sense strand starting at position 992 of SEQ ID NO: 913582
agagcuagacuaugcucaa

SEQ ID NO: 938391 - RNA, 19 nt, Artificial Sequence
  Description of Artificial Sequence: Synthetic oligonucleotide
  Antisense strand to SEQ ID NO: 938390
uugagcauagucuagcucu

SEQ ID NO: 938392 - RNA, 19 nt, Artificial Sequence
  Description of Artificial Sequence: Synthetic oligonucleotide
  Sense strand starting at position 2632 of SEQ ID NO: 913582
cgcaguauucccguuguuu

SEQ ID NO: 938393 - RNA, 19 nt, Artificial Sequence
  Description of Artificial Sequence: Synthetic oligonucleotide
  Antisense strand to SEQ ID NO: 938392
aaacaacgggaauacugcg

SEQ ID NO: 938394 - RNA, 19 nt, Artificial Sequence
  Description of Artificial Sequence: Synthetic oligonucleotide
  Sense strand starting at position 2651 of SEQ ID NO: 913582
guuuaaagaccacgaaguu

SEQ ID NO: 938395 - RNA, 19 nt, Artificial Sequence
  Description of Artificial Sequence: Synthetic oligonucleotide
  Antisense strand to SEQ ID NO: 938394
aacuucguggucuuuaaac

SEQ ID NO: 938396 - RNA, 19 nt, Artificial Sequence
  Description of Artificial Sequence: Synthetic oligonucleotide
  Sense strand starting at position 2457 of SEQ ID NO: 913582
ggcaguuucccuuauuaug

SEQ ID NO: 938397 - RNA, 19 nt, Artificial Sequence
  Description of Artificial Sequence: Synthetic oligonucleotide
  Antisense strand to SEQ ID NO: 938396
cauaauaagggaaacugcc

SEQ ID NO: 938398 - RNA, 19 nt, Artificial Sequence
  Description of Artificial Sequence: Synthetic oligonucleotide
  Sense strand starting at position 3264 of SEQ ID NO: 913582
accuuuaggcuauggugaa

SEQ ID NO: 938399 - RNA, 19 nt, Artificial Sequence
  Description of Artificial Sequence: Synthetic oligonucleotide
  Antisense strand to SEQ ID NO: 938398
uucaccauagccuaaaggu

SEQ ID NO: 938400 - RNA, 19 nt, Artificial Sequence
  Description of Artificial Sequence: Synthetic oligonucleotide
  Sense strand starting at position 3231 of SEQ ID NO: 913582
ucccaucuuucuguggaca

SEQ ID NO: 938401 - RNA, 19 nt, Artificial Sequence
  Description of Artificial Sequence: Synthetic oligonucleotide
  Antisense strand to SEQ ID NO: 938400
uguccacagaaagauggga

SEQ ID NO: 938402 - RNA, 19 nt, Artificial Sequence
  Description of Artificial Sequence: Synthetic oligonucleotide
  Sense strand starting at position 98 of SEQ ID NO: 913582
guaauaauaccauguugua

SEQ ID NO: 938403 - RNA, 19 nt, Artificial Sequence
  Description of Artificial Sequence: Synthetic oligonucleotide
  Antisense strand to SEQ ID NO: 938402
uacaacaugguauuauuac

SEQ ID NO: 938404 - RNA, 19 nt, Artificial Sequence
  Description of Artificial Sequence: Synthetic oligonucleotide
  Sense strand starting at position 3232 of SEQ ID NO: 913582
cccaucuuucuguggacau

SEQ ID NO: 938405 - RNA, 19 nt, Artificial Sequence
  Description of Artificial Sequence: Synthetic oligonucleotide
  Antisense strand to SEQ ID NO: 938404
auguccacagaaagauggg

SEQ ID NO: 938406 - RNA, 19 nt, Artificial Sequence
  Description of Artificial Sequence: Synthetic oligonucleotide
  Sense strand starting at position 3958 of SEQ ID NO: 913582
ggagucaaguaugccauau

SEQ ID NO: 938407 - RNA, 19 nt, Artificial Sequence
  Description of Artificial Sequence: Synthetic oligonucleotide
  Antisense strand to SEQ ID NO: 938406
auauggcauacuugacucc

SEQ ID NO: 938408 - RNA, 19 nt, Artificial Sequence
  Description of Artificial Sequence: Synthetic oligonucleotide
  Sense strand starting at position 632 of SEQ ID NO: 913582
agcugagaauaaugaauuu

SEQ ID NO: 938409 - RNA, 19 nt, Artificial Sequence
  Description of Artificial Sequence: Synthetic oligonucleotide
  Antisense strand to SEQ ID NO: 938408
aaauucauuauucucagcu

SEQ ID NO: 938410 - RNA, 19 nt, Artificial Sequence
  Description of Artificial Sequence: Synthetic oligonucleotide
  Sense strand starting at position 3951 of SEQ ID NO: 913582
guuguuuggagucaaguau

SEQ ID NO: 938411 - RNA, 19 nt, Artificial Sequence
  Description of Artificial Sequence: Synthetic oligonucleotide
  Antisense strand to SEQ ID NO: 938410
auacuugacuccaaacaac

SEQ ID NO: 938412 - RNA, 19 nt, Artificial Sequence
  Description of Artificial Sequence: Synthetic oligonucleotide
  Sense strand starting at position 548 of SEQ ID NO: 913582
aagugaauuuaacacguaa

SEQ ID NO: 938413 - RNA, 19 nt, Artificial Sequence
  Description of Artificial Sequence: Synthetic oligonucleotide
  Antisense strand to SEQ ID NO: 938412
uuacguguuaaauucacuu

SEQ ID NO: 938414 - RNA, 19 nt, Artificial Sequence
  Description of Artificial Sequence: Synthetic oligonucleotide
  Sense strand starting at position 47 of SEQ ID NO: 913582
ugcuuuggcagaugaucaa

SEQ ID NO: 938415 - RNA, 19 nt, Artificial Sequence
  Description of Artificial Sequence: Synthetic oligonucleotide
  Antisense strand to SEQ ID NO: 938414
uugaucaucugccaaagca

SEQ ID NO: 938416 - RNA, 19 nt, Artificial Sequence
  Description of Artificial Sequence: Synthetic oligonucleotide
  Sense strand starting at position 3198 of SEQ ID NO: 913582
acucaauuguacguauaua

SEQ ID NO: 938417 - RNA, 19 nt, Artificial Sequence
  Description of Artificial Sequence: Synthetic oligonucleotide
  Antisense strand to SEQ ID NO: 938416
uauauacguacaauugagu

SEQ ID NO: 938418 - RNA, 19 nt, Artificial Sequence
  Description of Artificial Sequence: Synthetic oligonucleotide
  Sense strand starting at position 3957 of SEQ ID NO: 913582
uggagucaaguaugccaua

SEQ ID NO: 938419 - RNA, 19 nt, Artificial Sequence
  Description of Artificial Sequence: Synthetic oligonucleotide
  Antisense strand to SEQ ID NO: 938418
uauggcauacuugacucca

SEQ ID NO: 938420 - RNA, 19 nt, Artificial Sequence
  Description of Artificial Sequence: Synthetic oligonucleotide
  Sense strand starting at position 2920 of SEQ ID NO: 913582
ugacauuguucugcaacca

SEQ ID NO: 938421 - RNA, 19 nt, Artificial Sequence
  Description of Artificial Sequence: Synthetic oligonucleotide
  Antisense strand to SEQ ID NO: 938420
ugguugcagaacaauguca

SEQ ID NO: 938422 - RNA, 19 nt, Artificial Sequence
  Description of Artificial Sequence: Synthetic oligonucleotide
  Sense strand starting at position 2455 of SEQ ID NO: 913582
gaggcaguuucccuuauua

SEQ ID NO: 938423 - RNA, 19 nt, Artificial Sequence
  Description of Artificial Sequence: Synthetic oligonucleotide
  Antisense strand to SEQ ID NO: 938422
uaauaagggaaacugccuc

SEQ ID NO: 938424 - RNA, 19 nt, Artificial Sequence
  Description of Artificial Sequence: Synthetic oligonucleotide
  Sense strand starting at position 110 of SEQ ID NO: 913582
uguuguagguaauccauua

SEQ ID NO: 938425 - RNA, 19 nt, Artificial Sequence
  Description of Artificial Sequence: Synthetic oligonucleotide
  Antisense strand to SEQ ID NO: 938424
uaauggauuaccuacaaca

SEQ ID NO: 938426 - RNA, 19 nt, Artificial Sequence
  Description of Artificial Sequence: Synthetic oligonucleotide
  Sense strand starting at position 3488 of SEQ ID NO: 913583
guggaaauuguagaguaau

SEQ ID NO: 938427 - RNA, 19 nt, Artificial Sequence
  Description of Artificial Sequence: Synthetic oligonucleotide
  Antisense strand to SEQ ID NO: 938426
auuacucuacaauuuccac

SEQ ID NO: 938428 - RNA, 19 nt, Artificial Sequence
  Description of Artificial Sequence: Synthetic oligonucleotide
  Sense strand starting at position 1479 of SEQ ID NO: 913583
acuaguuguucuuugauuu

SEQ ID NO: 938429 - RNA, 19 nt, Artificial Sequence
  Description of Artificial Sequence: Synthetic oligonucleotide
  Antisense strand to SEQ ID NO: 938428
aaaucaaagaacaacuagu

SEQ ID NO: 938430 - RNA, 19 nt, Artificial Sequence
  Description of Artificial Sequence: Synthetic oligonucleotide
  Sense strand starting at position 1204 of SEQ ID NO: 913583
ccagauguauagguaagaa

SEQ ID NO: 938431 - RNA, 19 nt, Artificial Sequence
  Description of Artificial Sequence: Synthetic oligonucleotide
  Antisense strand to SEQ ID NO: 938430
uucuuaccuauacaucugg

SEQ ID NO: 938432 - RNA, 19 nt, Artificial Sequence
  Description of Artificial Sequence: Synthetic oligonucleotide
  Sense strand starting at position 2435 of SEQ ID NO: 913583
guauuucaugguggguauu

SEQ ID NO: 938433 - RNA, 19 nt, Artificial Sequence
  Description of Artificial Sequence: Synthetic oligonucleotide
  Antisense strand to SEQ ID NO: 938432
aauacccaccaugaaauac

SEQ ID NO: 938434 - RNA, 19 nt, Artificial Sequence
  Description of Artificial Sequence: Synthetic oligonucleotide
  Sense strand starting at position 2109 of SEQ ID NO: 913583
gaguaaccucgugaggaag

SEQ ID NO: 938435 - RNA, 19 nt, Artificial Sequence
  Description of Artificial Sequence: Synthetic oligonucleotide
  Antisense strand to SEQ ID NO: 938434
cuuccucacgagguuacuc

SEQ ID NO: 938436 - RNA, 19 nt, Artificial Sequence
  Description of Artificial Sequence: Synthetic oligonucleotide
  Sense strand starting at position 2910 of SEQ ID NO: 913583
cugagaaaugauugagcua

SEQ ID NO: 938437 - RNA, 19 nt, Artificial Sequence
  Description of Artificial Sequence: Synthetic oligonucleotide
  Antisense strand to SEQ ID NO: 938436
uagcucaaucauuucucag

SEQ ID NO: 938438 - RNA, 19 nt, Artificial Sequence
  Description of Artificial Sequence: Synthetic oligonucleotide
  Sense strand starting at position 3876 of SEQ ID NO: 913583
uguuguguucguucccaag

SEQ ID NO: 938439 - RNA, 19 nt, Artificial Sequence
  Description of Artificial Sequence: Synthetic oligonucleotide
  Antisense strand to SEQ ID NO: 938438
cuugggaacgaacacaaca

SEQ ID NO: 938440 - RNA, 19 nt, Artificial Sequence
  Description of Artificial Sequence: Synthetic oligonucleotide
  Sense strand starting at position 3946 of SEQ ID NO: 913583
ggagguaguacugagaugu

SEQ ID NO: 938441 - RNA, 19 nt, Artificial Sequence
  Description of Artificial Sequence: Synthetic oligonucleotide
  Antisense strand to SEQ ID NO: 938440
acaucucaguacuaccucc

SEQ ID NO: 938442 - RNA, 19 nt, Artificial Sequence
  Description of Artificial Sequence: Synthetic oligonucleotide
  Sense strand starting at position 2760 of SEQ ID NO: 913583
cucauuuccugagcagcua

SEQ ID NO: 938443 - RNA, 19 nt, Artificial Sequence
  Description of Artificial Sequence: Synthetic oligonucleotide
  Antisense strand to SEQ ID NO: 938442
uagcugcucaggaaaugag

SEQ ID NO: 938444 - RNA, 19 nt, Artificial Sequence
  Description of Artificial Sequence: Synthetic oligonucleotide
  Sense strand starting at position 3667 of SEQ ID NO: 913583
cugguaagggccuauaaug

SEQ ID NO: 938445 - RNA, 19 nt, Artificial Sequence
  Description of Artificial Sequence: Synthetic oligonucleotide
  Antisense strand to SEQ ID NO: 938444
cauuauaggcccuuaccag

SEQ ID NO: 938446 - RNA, 19 nt, Artificial Sequence
  Description of Artificial Sequence: Synthetic oligonucleotide
  Sense strand starting at position 2604 of SEQ ID NO: 913583
uaagguuguccagagagua

SEQ ID NO: 938447 - RNA, 19 nt, Artificial Sequence
  Description of Artificial Sequence: Synthetic oligonucleotide
  Antisense strand to SEQ ID NO: 938446
uacucucuggacaaccuua

SEQ ID NO: 938448 - RNA, 19 nt, Artificial Sequence
  Description of Artificial Sequence: Synthetic oligonucleotide
  Sense strand starting at position 3633 of SEQ ID NO: 913583
uuuauugagcuguaacaga

SEQ ID NO: 938449 - RNA, 19 nt, Artificial Sequence
  Description of Artificial Sequence: Synthetic oligonucleotide
  Antisense strand to SEQ ID NO: 938448
ucuguuacagcucaauaaa

SEQ ID NO: 938450 - RNA, 19 nt, Artificial Sequence
  Description of Artificial Sequence: Synthetic oligonucleotide
  Sense strand starting at position 1480 of SEQ ID NO: 913583
cuaguuguucuuugauuuc

SEQ ID NO: 938451 - RNA, 19 nt, Artificial Sequence
  Description of Artificial Sequence: Synthetic oligonucleotide
  Antisense strand to SEQ ID NO: 938450
gaaaucaaagaacaacuag

SEQ ID NO: 938452 - RNA, 19 nt, Artificial Sequence
  Description of Artificial Sequence: Synthetic oligonucleotide
  Sense strand starting at position 1203 of SEQ ID NO: 913583
cccagauguauagguaaga

SEQ ID NO: 938453 - RNA, 19 nt, Artificial Sequence
  Description of Artificial Sequence: Synthetic oligonucleotide
  Antisense strand to SEQ ID NO: 938452
ucuuaccuauacaucuggg

SEQ ID NO: 938454 - RNA, 19 nt, Artificial Sequence
  Description of Artificial Sequence: Synthetic oligonucleotide
  Sense strand starting at position 2268 of SEQ ID NO: 913583
ggaugucuguuauuugcau

SEQ ID NO: 938455 - RNA, 19 nt, Artificial Sequence
  Description of Artificial Sequence: Synthetic oligonucleotide
  Antisense strand to SEQ ID NO: 938454
augcaaauaacagacaucc

SEQ ID NO: 938456 - RNA, 19 nt, Artificial Sequence
  Description of Artificial Sequence: Synthetic oligonucleotide
  Sense strand starting at position 2277 of SEQ ID NO: 913583
uuauuugcauggguguuau

SEQ ID NO: 938457 - RNA, 19 nt, Artificial Sequence
  Description of Artificial Sequence: Synthetic oligonucleotide
  Antisense strand to SEQ ID NO: 938456
auaacacccaugcaaauaa

SEQ ID NO: 938458 - RNA, 19 nt, Artificial Sequence
  Description of Artificial Sequence: Synthetic oligonucleotide
  Sense strand starting at position 2601 of SEQ ID NO: 913583
gauuaagguuguccagaga

SEQ ID NO: 938459 - RNA, 19 nt, Artificial Sequence
  Description of Artificial Sequence: Synthetic oligonucleotide
  Antisense strand to SEQ ID NO: 938458
ucucuggacaaccuuaauc

SEQ ID NO: 938460 - RNA, 19 nt, Artificial Sequence
  Description of Artificial Sequence: Synthetic oligonucleotide
  Sense strand starting at position 3711 of SEQ ID NO: 913583
gacuguuugcuagagauca

SEQ ID NO: 938461 - RNA, 19 nt, Artificial Sequence
  Description of Artificial Sequence: Synthetic oligonucleotide
  Antisense strand to SEQ ID NO: 938460
ugaucucuagcaaacaguc

SEQ ID NO: 938462 - RNA, 19 nt, Artificial Sequence
  Description of Artificial Sequence: Synthetic oligonucleotide
  Sense strand starting at position 3641 of SEQ ID NO: 913583
gcuguaacagaagggaauu

SEQ ID NO: 938463 - RNA, 19 nt, Artificial Sequence
  Description of Artificial Sequence: Synthetic oligonucleotide
  Antisense strand to SEQ ID NO: 938462
aauucccuucuguuacagc

SEQ ID NO: 938464 - RNA, 19 nt, Artificial Sequence
  Description of Artificial Sequence: Synthetic oligonucleotide
  Sense strand starting at position 599 of SEQ ID NO: 913583
gcugacauuucuucugcau

SEQ ID NO: 938465 - RNA, 19 nt, Artificial Sequence
  Description of Artificial Sequence: Synthetic oligonucleotide
  Antisense strand to SEQ ID NO: 938464
augcagaagaaaugucagc

SEQ ID NO: 938466 - RNA, 19 nt, Artificial Sequence
  Description of Artificial Sequence: Synthetic oligonucleotide
  Sense strand starting at position 937 of SEQ ID NO: 913583
uggauuagugagugaacca

SEQ ID NO: 938467 - RNA, 19 nt, Artificial Sequence
  Description of Artificial Sequence: Synthetic oligonucleotide
  Antisense strand to SEQ ID NO: 938466
ugguucacucacuaaucca

SEQ ID NO: 938468 - RNA, 19 nt, Artificial Sequence
  Description of Artificial Sequence: Synthetic oligonucleotide
  Sense strand starting at position 2600 of SEQ ID NO: 913583
ggauuaagguuguccagag

SEQ ID NO: 938469 - RNA, 19 nt, Artificial Sequence
  Description of Artificial Sequence: Synthetic oligonucleotide
  Antisense strand to SEQ ID NO: 938468
cucuggacaaccuuaaucc

SEQ ID NO: 938470 - RNA, 19 nt, Artificial Sequence
  Description of Artificial Sequence: Synthetic oligonucleotide
  Sense strand starting at position 3622 of SEQ ID NO: 913583
cuggauaacuguuuauuga

SEQ ID NO: 938471 - RNA, 19 nt, Artificial Sequence
  Description of Artificial Sequence: Synthetic oligonucleotide
  Antisense strand to SEQ ID NO: 938470
ucaauaaacaguuauccag

SEQ ID NO: 938472 - RNA, 19 nt, Artificial Sequence
  Description of Artificial Sequence: Synthetic oligonucleotide
  Sense strand starting at position 3691 of SEQ ID NO: 913583
cugaaauucccggaugcua

SEQ ID NO: 938473 - RNA, 19 nt, Artificial Sequence
  Description of Artificial Sequence: Synthetic oligonucleotide
  Antisense strand to SEQ ID NO: 938472
uagcauccgggaauuucag

SEQ ID NO: 938474 - RNA, 19 nt, Artificial Sequence
  Description of Artificial Sequence: Synthetic oligonucleotide
  Sense strand starting at position 2935 of SEQ ID NO: 913583
ggacucagaucugucugau

SEQ ID NO: 938475 - RNA, 19 nt, Artificial Sequence
  Description of Artificial Sequence: Synthetic oligonucleotide
  Antisense strand to SEQ ID NO: 938474
aucagacagaucugagucc

SEQ ID NO: 938476 - RNA, 19 nt, Artificial Sequence
  Description of Artificial Sequence: Synthetic oligonucleotide
  Sense strand starting at position 3526 of SEQ ID NO: 913583
guaagaccuguuuaguaac

SEQ ID NO: 938477 - RNA, 19 nt, Artificial Sequence
  Description of Artificial Sequence: Synthetic oligonucleotide
  Antisense strand to SEQ ID NO: 938476
guuacuaaacaggucuuac

SEQ ID NO: 938478 - RNA, 19 nt, Artificial Sequence
  Description of Artificial Sequence: Synthetic oligonucleotide
  Sense strand starting at position 2934 of SEQ ID NO: 913583
uggacucagaucugucuga

SEQ ID NO: 938479 - RNA, 19 nt, Artificial Sequence
  Description of Artificial Sequence: Synthetic oligonucleotide
  Antisense strand to SEQ ID NO: 938478
ucagacagaucugagucca

SEQ ID NO: 938480 - RNA, 19 nt, Artificial Sequence
  Description of Artificial Sequence: Synthetic oligonucleotide
  Sense strand starting at position 3833 of SEQ ID NO: 913583
gcagcagggaguuaaguaa

SEQ ID NO: 938481 - RNA, 19 nt, Artificial Sequence
  Description of Artificial Sequence: Synthetic oligonucleotide
  Antisense strand to SEQ ID NO: 938480
uuacuuaacucccugcugc

SEQ ID NO: 938482 - RNA, 19 nt, Artificial Sequence
  Description of Artificial Sequence: Synthetic oligonucleotide
  Sense strand starting at position 537 of SEQ ID NO: 913583
uguugcgaacauuaacaua

SEQ ID NO: 938483 - RNA, 19 nt, Artificial Sequence
  Description of Artificial Sequence: Synthetic oligonucleotide
  Antisense strand to SEQ ID NO: 938482
uauguuaauguucgcaaca

SEQ ID NO: 938484 - RNA, 19 nt, Artificial Sequence
  Description of Artificial Sequence: Synthetic oligonucleotide
  Sense strand starting at position 744 of SEQ ID NO: 913583
cggucaacugcauaaauca

SEQ ID NO: 938485 - RNA, 19 nt, Artificial Sequence
  Description of Artificial Sequence: Synthetic oligonucleotide
  Antisense strand to SEQ ID NO: 938484
ugauuuaugcaguugaccg

SEQ ID NO: 938486 - RNA, 19 nt, Artificial Sequence
  Description of Artificial Sequence: Synthetic oligonucleotide
  Sense strand starting at position 954 of SEQ ID NO: 913583
caaucuaggugguccaaau

SEQ ID NO: 938487 - RNA, 19 nt, Artificial Sequence
  Description of Artificial Sequence: Synthetic oligonucleotide
  Antisense strand to SEQ ID NO: 938486
auuuggaccaccuagauug

SEQ ID NO: 938488 - RNA, 19 nt, Artificial Sequence
  Description of Artificial Sequence: Synthetic oligonucleotide
  Sense strand starting at position 2095 of SEQ ID NO: 913583
ucauuagcuccucagagua

SEQ ID NO: 938489 - RNA, 19 nt, Artificial Sequence
  Description of Artificial Sequence: Synthetic oligonucleotide
  Antisense strand to SEQ ID NO: 938488
uacucugaggagcuaauga

SEQ ID NO: 938490 - RNA, 19 nt, Artificial Sequence
  Description of Artificial Sequence: Synthetic oligonucleotide
  Sense strand starting at position 1558 of SEQ ID NO: 913583
uuccuuggguucccaagaa

SEQ ID NO: 938491 - RNA, 19 nt, Artificial Sequence
  Description of Artificial Sequence: Synthetic oligonucleotide
  Antisense strand to SEQ ID NO: 938490
uucuugggaacccaaggaa

SEQ ID NO: 938492 - RNA, 19 nt, Artificial Sequence
  Description of Artificial Sequence: Synthetic oligonucleotide
  Sense strand starting at position 2276 of SEQ ID NO: 913583
guuauuugcauggguguua

SEQ ID NO: 938493 - RNA, 19 nt, Artificial Sequence
  Description of Artificial Sequence: Synthetic oligonucleotide
  Antisense strand to SEQ ID NO: 938492
uaacacccaugcaaauaac

SEQ ID NO: 938494 - RNA, 19 nt, Artificial Sequence
  Description of Artificial Sequence: Synthetic oligonucleotide
  Sense strand starting at position 1025 of SEQ ID NO: 913583
ucugucaucccuggacaga

SEQ ID NO: 938495 - RNA, 19 nt, Artificial Sequence
  Description of Artificial Sequence: Synthetic oligonucleotide
  Antisense strand to SEQ ID NO: 938494
ucuguccagggaugacaga

SEQ ID NO: 938496 - RNA, 19 nt, Artificial Sequence
  Description of Artificial Sequence: Synthetic oligonucleotide
  Sense strand starting at position 829 of SEQ ID NO: 913583
accauuuguuucuggauuu

SEQ ID NO: 938497 - RNA, 19 nt, Artificial Sequence
  Description of Artificial Sequence: Synthetic oligonucleotide
  Antisense strand to SEQ ID NO: 938496
aaauccagaaacaaauggu

SEQ ID NO: 938498 - RNA, 19 nt, Artificial Sequence
  Description of Artificial Sequence: Synthetic oligonucleotide
  Sense strand starting at position 3858 of SEQ ID NO: 913583
cuagcaagagucugggauu

SEQ ID NO: 938499 - RNA, 19 nt, Artificial Sequence
  Description of Artificial Sequence: Synthetic oligonucleotide
  Antisense strand to SEQ ID NO: 938498
aaucccagacucuugcuag

SEQ ID NO: 938500 - RNA, 19 nt, Artificial Sequence
  Description of Artificial Sequence: Synthetic oligonucleotide
  Sense strand starting at position 1507 of SEQ ID NO: 913583
uguucucccagugggaaga

SEQ ID NO: 938501 - RNA, 19 nt, Artificial Sequence
  Description of Artificial Sequence: Synthetic oligonucleotide
  Antisense strand to SEQ ID NO: 938500
ucuucccacugggagaaca

SEQ ID NO: 938502 - RNA, 19 nt, Artificial Sequence
  Description of Artificial Sequence: Synthetic oligonucleotide
  Sense strand starting at position 2387 of SEQ ID NO: 913583
uuuccagauccguauucua

SEQ ID NO: 938503 - RNA, 19 nt, Artificial Sequence
  Description of Artificial Sequence: Synthetic oligonucleotide
  Antisense strand to SEQ ID NO: 938502
uagaauacggaucuggaaa

SEQ ID NO: 938504 - RNA, 19 nt, Artificial Sequence
  Description of Artificial Sequence: Synthetic oligonucleotide
  Sense strand starting at position 1045 of SEQ ID NO: 913583
cugucuuaacagugaauac

SEQ ID NO: 938505 - RNA, 19 nt, Artificial Sequence
  Description of Artificial Sequence: Synthetic oligonucleotide
  Antisense strand to SEQ ID NO: 938504
guauucacuguuaagacag

SEQ ID NO: 938506 - RNA, 19 nt, Artificial Sequence
  Description of Artificial Sequence: Synthetic oligonucleotide
  Sense strand starting at position 3891 of SEQ ID NO: 913584
gaagaagggccuuauuggu

SEQ ID NO: 938507 - RNA, 19 nt, Artificial Sequence
  Description of Artificial Sequence: Synthetic oligonucleotide
  Antisense strand to SEQ ID NO: 938506
accaauaaggcccuucuuc

SEQ ID NO: 938508 - RNA, 19 nt, Artificial Sequence
  Description of Artificial Sequence: Synthetic oligonucleotide
  Sense strand starting at position 1347 of SEQ ID NO: 913584
cgggaaagggcggaauuau

SEQ ID NO: 938509 - RNA, 19 nt, Artificial Sequence
  Description of Artificial Sequence: Synthetic oligonucleotide
  Antisense strand to SEQ ID NO: 938508
auaauuccgcccuuucccg

SEQ ID NO: 938510 - RNA, 19 nt, Artificial Sequence
  Description of Artificial Sequence: Synthetic oligonucleotide
  Sense strand starting at position 3606 of SEQ ID NO: 913584
aggagaagcaucugugaag

SEQ ID NO: 938511 - RNA, 19 nt, Artificial Sequence
  Description of Artificial Sequence: Synthetic oligonucleotide
  Antisense strand to SEQ ID NO: 938510
cuucacagaugcuucuccu

SEQ ID NO: 938512 - RNA, 19 nt, Artificial Sequence
  Description of Artificial Sequence: Synthetic oligonucleotide
  Sense strand starting at position 3532 of SEQ ID NO: 913584
aagcuuucuguggaaauca

SEQ ID NO: 938513 - RNA, 19 nt, Artificial Sequence
  Description of Artificial Sequence: Synthetic oligonucleotide
  Antisense strand to SEQ ID NO: 938512
ugauuuccacagaaagcuu

SEQ ID NO: 938514 - RNA, 19 nt, Artificial Sequence
  Description of Artificial Sequence: Synthetic oligonucleotide
  Sense strand starting at position 445 of SEQ ID NO: 913584
ggaggaagcucagucauaa

SEQ ID NO: 938515 - RNA, 19 nt, Artificial Sequence
  Description of Artificial Sequence: Synthetic oligonucleotide
  Antisense strand to SEQ ID NO: 938514
uuaugacugagcuuccucc

SEQ ID NO: 938516 - RNA, 19 nt, Artificial Sequence
  Description of Artificial Sequence: Synthetic oligonucleotide
  Sense strand starting at position 1121 of SEQ ID NO: 913584
ggguccgaaauguaaacuu

SEQ ID NO: 938517 - RNA, 19 nt, Artificial Sequence
  Description of Artificial Sequence: Synthetic oligonucleotide
  Antisense strand to SEQ ID NO: 938516
aaguuuacauuucggaccc

SEQ ID NO: 938518 - RNA, 19 nt, Artificial Sequence
  Description of Artificial Sequence: Synthetic oligonucleotide
  Sense strand starting at position 2745 of SEQ ID NO: 913584
agaauaguugugggacuca

SEQ ID NO: 938519 - RNA, 19 nt, Artificial Sequence
  Description of Artificial Sequence: Synthetic oligonucleotide
  Antisense strand to SEQ ID NO: 938518
ugagucccacaacuauucu

SEQ ID NO: 938520 - RNA, 19 nt, Artificial Sequence
  Description of Artificial Sequence: Synthetic oligonucleotide
  Sense strand starting at position 3692 of SEQ ID NO: 913584
ggaggccucccuugaggaa

SEQ ID NO: 938521 - RNA, 19 nt, Artificial Sequence
  Description of Artificial Sequence: Synthetic oligonucleotide
  Antisense strand to SEQ ID NO: 938520
uuccucaagggaggccucc

SEQ ID NO: 938522 - RNA, 19 nt, Artificial Sequence
  Description of Artificial Sequence: Synthetic oligonucleotide
  Sense strand starting at position 2993 of SEQ ID NO: 913584
ggacaaagccuccgaauga

SEQ ID NO: 938523 - RNA, 19 nt, Artificial Sequence
  Description of Artificial Sequence: Synthetic oligonucleotide
  Antisense strand to SEQ ID NO: 938522
ucauucggaggcuuugucc

SEQ ID NO: 938524 - RNA, 19 nt, Artificial Sequence
  Description of Artificial Sequence: Synthetic oligonucleotide
  Sense strand starting at position 361 of SEQ ID NO: 913584
ugagucugcagucagauga

SEQ ID NO: 938525 - RNA, 19 nt, Artificial Sequence
  Description of Artificial Sequence: Synthetic oligonucleotide
  Antisense strand to SEQ ID NO: 938524
ucaucugacugcagacuca

SEQ ID NO: 938526 - RNA, 19 nt, Artificial Sequence
  Description of Artificial Sequence: Synthetic oligonucleotide
  Sense strand starting at position 595 of SEQ ID NO: 913584
uacuguaagucauugacag

SEQ ID NO: 938527 - RNA, 19 nt, Artificial Sequence
  Description of Artificial Sequence: Synthetic oligonucleotide
  Antisense strand to SEQ ID NO: 938526
cugucaaugacuuacagua

SEQ ID NO: 938528 - RNA, 19 nt, Artificial Sequence
  Description of Artificial Sequence: Synthetic oligonucleotide
  Sense strand starting at position 455 of SEQ ID NO: 913584
cagucauaaugguccugaa

SEQ ID NO: 938529 - RNA, 19 nt, Artificial Sequence
  Description of Artificial Sequence: Synthetic oligonucleotide
  Antisense strand to SEQ ID NO: 938528
uucaggaccauuaugacug

SEQ ID NO: 938530 - RNA, 19 nt, Artificial Sequence
  Description of Artificial Sequence: Synthetic oligonucleotide
  Sense strand starting at position 3905 of SEQ ID NO: 913584
uuggucgugcuaggaauuu

SEQ ID NO: 938531 - RNA, 19 nt, Artificial Sequence
  Description of Artificial Sequence: Synthetic oligonucleotide
  Antisense strand to SEQ ID NO: 938530
aaauuccuagcacgaccaa

SEQ ID NO: 938532 - RNA, 19 nt, Artificial Sequence
  Description of Artificial Sequence: Synthetic oligonucleotide
  Sense strand starting at position 244 of SEQ ID NO: 913584
agcauucucagguggaaua

SEQ ID NO: 938533 - RNA, 19 nt, Artificial Sequence
  Description of Artificial Sequence: Synthetic oligonucleotide
  Antisense strand to SEQ ID NO: 938532
uauuccaccugagaaugcu

SEQ ID NO: 938534 - RNA, 19 nt, Artificial Sequence
  Description of Artificial Sequence: Synthetic oligonucleotide
  Sense strand starting at position 3326 of SEQ ID NO: 913584
aaauaaguauuugggaaug

SEQ ID NO: 938535 - RNA, 19 nt, Artificial Sequence
  Description of Artificial Sequence: Synthetic oligonucleotide
  Antisense strand to SEQ ID NO: 938534
cauucccaaauacuuauuu

SEQ ID NO: 938536 - RNA, 19 nt, Artificial Sequence
  Description of Artificial Sequence: Synthetic oligonucleotide
  Sense strand starting at position 2873 of SEQ ID NO: 913584
gguguuucccaugacagua

SEQ ID NO: 938537 - RNA, 19 nt, Artificial Sequence
  Description of Artificial Sequence: Synthetic oligonucleotide
  Antisense strand to SEQ ID NO: 938536
uacugucaugggaaacacc

SEQ ID NO: 938538 - RNA, 19 nt, Artificial Sequence
  Description of Artificial Sequence: Synthetic oligonucleotide
  Sense strand starting at position 3645 of SEQ ID NO: 913584
ggugcucuacgguaaagga

SEQ ID NO: 938539 - RNA, 19 nt, Artificial Sequence
  Description of Artificial Sequence: Synthetic oligonucleotide
  Antisense strand to SEQ ID NO: 938538
uccuuuaccguagagcacc

SEQ ID NO: 938540 - RNA, 19 nt, Artificial Sequence
  Description of Artificial Sequence: Synthetic oligonucleotide
  Sense strand starting at position 245 of SEQ ID NO: 913584
gcauucucagguggaauau

SEQ ID NO: 938541 - RNA, 19 nt, Artificial Sequence
  Description of Artificial Sequence: Synthetic oligonucleotide
  Antisense strand to SEQ ID NO: 938540
auauuccaccugagaaugc

SEQ ID NO: 938542 - RNA, 19 nt, Artificial Sequence
  Description of Artificial Sequence: Synthetic oligonucleotide
  Sense strand starting at position 3530 of SEQ ID NO: 913584
ugaagcuuucuguggaaau

SEQ ID NO: 938543 - RNA, 19 nt, Artificial Sequence
  Description of Artificial Sequence: Synthetic oligonucleotide
  Antisense strand to SEQ ID NO: 938542
auuuccacagaaagcuuca

SEQ ID NO: 938544 - RNA, 19 nt, Artificial Sequence
  Description of Artificial Sequence: Synthetic oligonucleotide
  Sense strand starting at position 1358 of SEQ ID NO: 913584
ggaauuauccgcugggacc

SEQ ID NO: 938545 - RNA, 19 nt, Artificial Sequence
  Description of Artificial Sequence: Synthetic oligonucleotide
  Antisense strand to SEQ ID NO: 938544
ggucccagcggauaauucc

SEQ ID NO: 938546 - RNA, 19 nt, Artificial Sequence
  Description of Artificial Sequence: Synthetic oligonucleotide
  Sense strand starting at position 164 of SEQ ID NO: 913584
cuagguucccugggaguca

SEQ ID NO: 938547 - RNA, 19 nt, Artificial Sequence
  Description of Artificial Sequence: Synthetic oligonucleotide
  Antisense strand to SEQ ID NO: 938546
ugacucccagggaaccuag

SEQ ID NO: 938548 - RNA, 19 nt, Artificial Sequence
  Description of Artificial Sequence: Synthetic oligonucleotide
  Sense strand starting at position 3635 of SEQ ID NO: 913584
ggacaaguagggugcucua

SEQ ID NO: 938549 - RNA, 19 nt, Artificial Sequence
  Description of Artificial Sequence: Synthetic oligonucleotide
  Antisense strand to SEQ ID NO: 938548
uagagcacccuacuugucc

SEQ ID NO: 938550 - RNA, 19 nt, Artificial Sequence
  Description of Artificial Sequence: Synthetic oligonucleotide
  Sense strand starting at position 3527 of SEQ ID NO: 913584
acuugaagcuuucugugga

SEQ ID NO: 938551 - RNA, 19 nt, Artificial Sequence
  Description of Artificial Sequence: Synthetic oligonucleotide
  Antisense strand to SEQ ID NO: 938550
uccacagaaagcuucaagu

SEQ ID NO: 938552 - RNA, 19 nt, Artificial Sequence
  Description of Artificial Sequence: Synthetic oligonucleotide
  Sense strand starting at position 3624 of SEQ ID NO: 913584
ggugcuguccaggacaagu

SEQ ID NO: 938553 - RNA, 19 nt, Artificial Sequence
  Description of Artificial Sequence: Synthetic oligonucleotide
  Antisense strand to SEQ ID NO: 938552
acuuguccuggacagcacc

SEQ ID NO: 938554 - RNA, 19 nt, Artificial Sequence
  Description of Artificial Sequence: Synthetic oligonucleotide
  Sense strand starting at position 3384 of SEQ ID NO: 913584
ugcugcguucaagaggaua

SEQ ID NO: 938555 - RNA, 19 nt, Artificial Sequence
  Description of Artificial Sequence: Synthetic oligonucleotide
  Antisense strand to SEQ ID NO: 938554
uauccucuugaacgcagca

SEQ ID NO: 938556 - RNA, 19 nt, Artificial Sequence
  Description of Artificial Sequence: Synthetic oligonucleotide
  Sense strand starting at position 2659 of SEQ ID NO: 913584
ugcugaaugaguggaguuu

SEQ ID NO: 938557 - RNA, 19 nt, Artificial Sequence
  Description of Artificial Sequence: Synthetic oligonucleotide
  Antisense strand to SEQ ID NO: 938556
aaacuccacucauucagca

SEQ ID NO: 938558 - RNA, 19 nt, Artificial Sequence
  Description of Artificial Sequence: Synthetic oligonucleotide
  Sense strand starting at position 3856 of SEQ ID NO: 913584
acaggaaagugacauaaau

SEQ ID NO: 938559 - RNA, 19 nt, Artificial Sequence
  Description of Artificial Sequence: Synthetic oligonucleotide
  Antisense strand to SEQ ID NO: 938558
auuuaugucacuuuccugu

SEQ ID NO: 938560 - RNA, 19 nt, Artificial Sequence
  Description of Artificial Sequence: Synthetic oligonucleotide
  Sense strand starting at position 3163 of SEQ ID NO: 913584
ucccuaccucugugaggua

SEQ ID NO: 938561 - RNA, 19 nt, Artificial Sequence
  Description of Artificial Sequence: Synthetic oligonucleotide
  Antisense strand to SEQ ID NO: 938560
uaccucacagagguaggga

SEQ ID NO: 938562 - RNA, 19 nt, Artificial Sequence
  Description of Artificial Sequence: Synthetic oligonucleotide
  Sense strand starting at position 2627 of SEQ ID NO: 913584
gugcguuccagacagguga

SEQ ID NO: 938563 - RNA, 19 nt, Artificial Sequence
  Description of Artificial Sequence: Synthetic oligonucleotide
  Antisense strand to SEQ ID NO: 938562
ucaccugucuggaacgcac

SEQ ID NO: 938564 - RNA, 19 nt, Artificial Sequence
  Description of Artificial Sequence: Synthetic oligonucleotide
  Sense strand starting at position 3060 of SEQ ID NO: 913584
ggugucuucucuccgaaga

SEQ ID NO: 938565 - RNA, 19 nt, Artificial Sequence
  Description of Artificial Sequence: Synthetic oligonucleotide
  Antisense strand to SEQ ID NO: 938564
ucuucggagagaagacacc

SEQ ID NO: 938566 - RNA, 19 nt, Artificial Sequence
  Description of Artificial Sequence: Synthetic oligonucleotide
  Sense strand starting at position 2872 of SEQ ID NO: 913584
ugguguuucccaugacagu

SEQ ID NO: 938567 - RNA, 19 nt, Artificial Sequence
  Description of Artificial Sequence: Synthetic oligonucleotide
  Antisense strand to SEQ ID NO: 938566
acugucaugggaaacacca

SEQ ID NO: 938568 - RNA, 19 nt, Artificial Sequence
  Description of Artificial Sequence: Synthetic oligonucleotide
  Sense strand starting at position 3642 of SEQ ID NO: 913584
uagggugcucuacgguaaa

SEQ ID NO: 938569 - RNA, 19 nt, Artificial Sequence
  Description of Artificial Sequence: Synthetic oligonucleotide
  Antisense strand to SEQ ID NO: 938568
uuuaccguagagcacccua

SEQ ID NO: 938570 - RNA, 19 nt, Artificial Sequence
  Description of Artificial Sequence: Synthetic oligonucleotide
  Sense strand starting at position 3061 of SEQ ID NO: 913584
gugucuucucuccgaagac

SEQ ID NO: 938571 - RNA, 19 nt, Artificial Sequence
  Description of Artificial Sequence: Synthetic oligonucleotide
  Antisense strand to SEQ ID NO: 938570
gucuucggagagaagacac

SEQ ID NO: 938572 - RNA, 19 nt, Artificial Sequence
  Description of Artificial Sequence: Synthetic oligonucleotide
  Sense strand starting at position 1356 of SEQ ID NO: 913584
gcggaauuauccgcuggga

SEQ ID NO: 938573 - RNA, 19 nt, Artificial Sequence
  Description of Artificial Sequence: Synthetic oligonucleotide
  Antisense strand to SEQ ID NO: 938572
ucccagcggauaauuccgc

SEQ ID NO: 938574 - RNA, 19 nt, Artificial Sequence
  Description of Artificial Sequence: Synthetic oligonucleotide
  Sense strand starting at position 3721 of SEQ ID NO: 913584
cccagacuuuaaggauaag

SEQ ID NO: 938575 - RNA, 19 nt, Artificial Sequence
  Description of Artificial Sequence: Synthetic oligonucleotide
  Antisense strand to SEQ ID NO: 938574
cuuauccuuaaagucuggg

SEQ ID NO: 938576 - RNA, 19 nt, Artificial Sequence
  Description of Artificial Sequence: Synthetic oligonucleotide
  Sense strand starting at position 2732 of SEQ ID NO: 913584
agaagcuaaugcuagaaua

SEQ ID NO: 938577 - RNA, 19 nt, Artificial Sequence
  Description of Artificial Sequence: Synthetic oligonucleotide
  Antisense strand to SEQ ID NO: 938576
uauucuagcauuagcuucu

SEQ ID NO: 938578 - RNA, 19 nt, Artificial Sequence
  Description of Artificial Sequence: Synthetic oligonucleotide
  Sense strand starting at position 2994 of SEQ ID NO: 913584
gacaaagccuccgaaugaa

SEQ ID NO: 938579 - RNA, 19 nt, Artificial Sequence
  Description of Artificial Sequence: Synthetic oligonucleotide
  Antisense strand to SEQ ID NO: 938578
uucauucggaggcuuuguc

SEQ ID NO: 938580 - RNA, 19 nt, Artificial Sequence
  Description of Artificial Sequence: Synthetic oligonucleotide
  Sense strand starting at position 3965 of SEQ ID NO: 913584
cucgccuucucuuuaaugu

SEQ ID NO: 938581 - RNA, 19 nt, Artificial Sequence
  Description of Artificial Sequence: Synthetic oligonucleotide
  Antisense strand to SEQ ID NO: 938580
acauuaaagagaaggcgag

SEQ ID NO: 938582 - RNA, 19 nt, Artificial Sequence
  Description of Artificial Sequence: Synthetic oligonucleotide
  Sense strand starting at position 3363 of SEQ ID NO: 913584
uuucguggguuagaggaaa

SEQ ID NO: 938583 - RNA, 19 nt, Artificial Sequence
  Description of Artificial Sequence: Synthetic oligonucleotide
  Antisense strand to SEQ ID NO: 938582
uuuccucuaacccacgaaa

SEQ ID NO: 938584 - RNA, 19 nt, Artificial Sequence
  Description of Artificial Sequence: Synthetic oligonucleotide
  Sense strand starting at position 599 of SEQ ID NO: 913584
guaagucauugacagcaga

SEQ ID NO: 938585 - RNA, 19 nt, Artificial Sequence
  Description of Artificial Sequence: Synthetic oligonucleotide
  Antisense strand to SEQ ID NO: 938584
ucugcugucaaugacuuac

SEQ ID NO: 938586 - RNA, 19 nt, Artificial Sequence
  Description of Artificial Sequence: Synthetic oligonucleotide
  Sense strand starting at position 1437 of SEQ ID NO: 913585
cagagauaacaaugguagu

SEQ ID NO: 938587 - RNA, 19 nt, Artificial Sequence
  Description of Artificial Sequence: Synthetic oligonucleotide
  Antisense strand to SEQ ID NO: 938586
acuaccauuguuaucucug

SEQ ID NO: 938588 - RNA, 19 nt, Artificial Sequence
  Description of Artificial Sequence: Synthetic oligonucleotide
  Sense strand starting at position 3289 of SEQ ID NO: 913585
cccgaagaccucuauccau

SEQ ID NO: 938589 - RNA, 19 nt, Artificial Sequence
  Description of Artificial Sequence: Synthetic oligonucleotide
  Antisense strand to SEQ ID NO: 938588
auggauagaggucuucggg

SEQ ID NO: 938590 - RNA, 19 nt, Artificial Sequence
  Description of Artificial Sequence: Synthetic oligonucleotide
  Sense strand starting at position 3157 of SEQ ID NO: 913585
uguuuauguccagaaucag

SEQ ID NO: 938591 - RNA, 19 nt, Artificial Sequence
  Description of Artificial Sequence: Synthetic oligonucleotide
  Antisense strand to SEQ ID NO: 938590
cugauucuggacauaaaca

SEQ ID NO: 938592 - RNA, 19 nt, Artificial Sequence
  Description of Artificial Sequence: Synthetic oligonucleotide
  Sense strand starting at position 175 of SEQ ID NO: 913585
cacauaggguccuuauaug

SEQ ID NO: 938593 - RNA, 19 nt, Artificial Sequence
  Description of Artificial Sequence: Synthetic oligonucleotide
  Antisense strand to SEQ ID NO: 938592
cauauaaggacccuaugug

SEQ ID NO: 938594 - RNA, 19 nt, Artificial Sequence
  Description of Artificial Sequence: Synthetic oligonucleotide
  Sense strand starting at position 3482 of SEQ ID NO: 913585
gcaagaaacgcgcuuuguu

SEQ ID NO: 938595 - RNA, 19 nt, Artificial Sequence
  Description of Artificial Sequence: Synthetic oligonucleotide
  Antisense strand to SEQ ID NO: 938594
aacaaagcgcguuucuugc

SEQ ID NO: 938596 - RNA, 19 nt, Artificial Sequence
  Description of Artificial Sequence: Synthetic oligonucleotide
  Sense strand starting at position 105 of SEQ ID NO: 913585
gagugacugcuuuaacauu

SEQ ID NO: 938597 - RNA, 19 nt, Artificial Sequence
  Description of Artificial Sequence: Synthetic oligonucleotide
  Antisense strand to SEQ ID NO: 938596
aauguuaaagcagucacuc

SEQ ID NO: 938598 - RNA, 19 nt, Artificial Sequence
  Description of Artificial Sequence: Synthetic oligonucleotide
  Sense strand starting at position 3174 of SEQ ID NO: 913585
agauauuggagcugacucu

SEQ ID NO: 938599 - RNA, 19 nt, Artificial Sequence
  Description of Artificial Sequence: Synthetic oligonucleotide
  Antisense strand to SEQ ID NO: 938598
agagucagcuccaauaucu

SEQ ID NO: 938600 - RNA, 19 nt, Artificial Sequence
  Description of Artificial Sequence: Synthetic oligonucleotide
  Sense strand starting at position 1518 of SEQ ID NO: 913585
gcgcccguggugaauuaau

SEQ ID NO: 938601 - RNA, 19 nt, Artificial Sequence
  Description of Artificial Sequence: Synthetic oligonucleotide
  Antisense strand to SEQ ID NO: 938600
auuaauucaccacgggcgc

SEQ ID NO: 938602 - RNA, 19 nt, Artificial Sequence
  Description of Artificial Sequence: Synthetic oligonucleotide
  Sense strand starting at position 1029 of SEQ ID NO: 913585
cucugaguccugggacaac

SEQ ID NO: 938603 - RNA, 19 nt, Artificial Sequence
  Description of Artificial Sequence: Synthetic oligonucleotide
  Antisense strand to SEQ ID NO: 938602
guugucccaggacucagag

SEQ ID NO: 938604 - RNA, 19 nt, Artificial Sequence
  Description of Artificial Sequence: Synthetic oligonucleotide
  Sense strand starting at position 992 of SEQ ID NO: 913585
cgcuucuuauuauuuaagu

SEQ ID NO: 938605 - RNA, 19 nt, Artificial Sequence
  Description of Artificial Sequence: Synthetic oligonucleotide
  Antisense strand to SEQ ID NO: 938604
acuuaaauaauaagaagcg

SEQ ID NO: 938606 - RNA, 19 nt, Artificial Sequence
  Description of Artificial Sequence: Synthetic oligonucleotide
  Sense strand starting at position 2952 of SEQ ID NO: 913585
ccgggauccagccauacuu

SEQ ID NO: 938607 - RNA, 19 nt, Artificial Sequence
  Description of Artificial Sequence: Synthetic oligonucleotide
  Antisense strand to SEQ ID NO: 938606
aaguauggcuggaucccgg

SEQ ID NO: 938608 - RNA, 19 nt, Artificial Sequence
  Description of Artificial Sequence: Synthetic oligonucleotide
  Sense strand starting at position 1186 of SEQ ID NO: 913585
accaguuguuaucuugaaa

SEQ ID NO: 938609 - RNA, 19 nt, Artificial Sequence
  Description of Artificial Sequence: Synthetic oligonucleotide
  Antisense strand to SEQ ID NO: 938608
uuucaagauaacaacuggu

SEQ ID NO: 938610 - RNA, 19 nt, Artificial Sequence
  Description of Artificial Sequence: Synthetic oligonucleotide
  Sense strand starting at position 9 of SEQ ID NO: 913585
cucauugcuccuugagaaa

SEQ ID NO: 938611 - RNA, 19 nt, Artificial Sequence
  Description of Artificial Sequence: Synthetic oligonucleotide
  Antisense strand to SEQ ID NO: 938610
uuucucaaggagcaaugag

SEQ ID NO: 938612 - RNA, 19 nt, Artificial Sequence
  Description of Artificial Sequence: Synthetic oligonucleotide
  Sense strand starting at position 731 of SEQ ID NO: 913585
cggccauaauuuccguauu

SEQ ID NO: 938613 - RNA, 19 nt, Artificial Sequence
  Description of Artificial Sequence: Synthetic oligonucleotide
  Antisense strand to SEQ ID NO: 938612
aauacggaaauuauggccg

SEQ ID NO: 938614 - RNA, 19 nt, Artificial Sequence
  Description of Artificial Sequence: Synthetic oligonucleotide
  Sense strand starting at position 134 of SEQ ID NO: 913585
uuguuauuccucuaguaau

SEQ ID NO: 938615 - RNA, 19 nt, Artificial Sequence
  Description of Artificial Sequence: Synthetic oligonucleotide
  Antisense strand to SEQ ID NO: 938614
auuacuagaggaauaacaa

SEQ ID NO: 938616 - RNA, 19 nt, Artificial Sequence
  Description of Artificial Sequence: Synthetic oligonucleotide
  Sense strand starting at position 198 of SEQ ID NO: 913585
uuguucuuugaauagcuau

SEQ ID NO: 938617 - RNA, 19 nt, Artificial Sequence
  Description of Artificial Sequence: Synthetic oligonucleotide
  Antisense strand to SEQ ID NO: 938616
auagcuauucaaagaacaa

SEQ ID NO: 938618 - RNA, 19 nt, Artificial Sequence
  Description of Artificial Sequence: Synthetic oligonucleotide
  Sense strand starting at position 862 of SEQ ID NO: 913585
ugugccugaccuuauuaau

SEQ ID NO: 938619 - RNA, 19 nt, Artificial Sequence
  Description of Artificial Sequence: Synthetic oligonucleotide
  Antisense strand to SEQ ID NO: 938618
auuaauaaggucaggcaca

SEQ ID NO: 938620 - RNA, 19 nt, Artificial Sequence
  Description of Artificial Sequence: Synthetic oligonucleotide
  Sense strand starting at position 231 of SEQ ID NO: 913585
ucagcaaacgccuauuaau

SEQ ID NO: 938621 - RNA, 19 nt, Artificial Sequence
  Description of Artificial Sequence: Synthetic oligonucleotide
  Antisense strand to SEQ ID NO: 938620
auuaauaggcguuugcuga

SEQ ID NO: 938622 - RNA, 19 nt, Artificial Sequence
  Description of Artificial Sequence: Synthetic oligonucleotide
  Sense strand starting at position 3155 of SEQ ID NO: 913585
guuguuuauguccagaauc

SEQ ID NO: 938623 - RNA, 19 nt, Artificial Sequence
  Description of Artificial Sequence: Synthetic oligonucleotide
  Antisense strand to SEQ ID NO: 938622
gauucuggacauaaacaac

SEQ ID NO: 938624 - RNA, 19 nt, Artificial Sequence
  Description of Artificial Sequence: Synthetic oligonucleotide
  Sense strand starting at position 8 of SEQ ID NO: 913585
ccucauugcuccuugagaa

SEQ ID NO: 938625 - RNA, 19 nt, Artificial Sequence
  Description of Artificial Sequence: Synthetic oligonucleotide
  Antisense strand to SEQ ID NO: 938624
uucucaaggagcaaugagg

SEQ ID NO: 938626 - RNA, 19 nt, Artificial Sequence
  Description of Artificial Sequence: Synthetic oligonucleotide
  Sense strand starting at position 103 of SEQ ID NO: 913585
cugagugacugcuuuaaca

SEQ ID NO: 938627 - RNA, 19 nt, Artificial Sequence
  Description of Artificial Sequence: Synthetic oligonucleotide
  Antisense strand to SEQ ID NO: 938626
uguuaaagcagucacucag

SEQ ID NO: 938628 - RNA, 19 nt, Artificial Sequence
  Description of Artificial Sequence: Synthetic oligonucleotide
  Sense strand starting at position 2128 of SEQ ID NO: 913585
ugguaaguggucuauuccu

SEQ ID NO: 938629 - RNA, 19 nt, Artificial Sequence
  Description of Artificial Sequence: Synthetic oligonucleotide
  Antisense strand to SEQ ID NO: 938628
aggaauagaccacuuacca

SEQ ID NO: 938630 - RNA, 19 nt, Artificial Sequence
  Description of Artificial Sequence: Synthetic oligonucleotide
  Sense strand starting at position 76 of SEQ ID NO: 913585
gacauaguuauaggugguu

SEQ ID NO: 938631 - RNA, 19 nt, Artificial Sequence
  Description of Artificial Sequence: Synthetic oligonucleotide
  Antisense strand to SEQ ID NO: 938630
aaccaccuauaacuauguc

SEQ ID NO: 938632 - RNA, 19 nt, Artificial Sequence
  Description of Artificial Sequence: Synthetic oligonucleotide
  Sense strand starting at position 2784 of SEQ ID NO: 913585
gaaguuuaaccggguuuga

SEQ ID NO: 938633 - RNA, 19 nt, Artificial Sequence
  Description of Artificial Sequence: Synthetic oligonucleotide
  Antisense strand to SEQ ID NO: 938632
ucaaacccgguuaaacuuc

SEQ ID NO: 938634 - RNA, 19 nt, Artificial Sequence
  Description of Artificial Sequence: Synthetic oligonucleotide
  Sense strand starting at position 1749 of SEQ ID NO: 913585
ggagacauguguuccaguc

SEQ ID NO: 938635 - RNA, 19 nt, Artificial Sequence
  Description of Artificial Sequence: Synthetic oligonucleotide
  Antisense strand to SEQ ID NO: 938634
gacuggaacacaugucucc

SEQ ID NO: 938636 - RNA, 19 nt, Artificial Sequence
  Description of Artificial Sequence: Synthetic oligonucleotide
  Sense strand starting at position 1766 of SEQ ID NO: 913585
ucaugucaucucugugaac

SEQ ID NO: 938637 - RNA, 19 nt, Artificial Sequence
  Description of Artificial Sequence: Synthetic oligonucleotide
  Antisense strand to SEQ ID NO: 938636
guucacagagaugacauga

SEQ ID NO: 938638 - RNA, 19 nt, Artificial Sequence
  Description of Artificial Sequence: Synthetic oligonucleotide
  Sense strand starting at position 1768 of SEQ ID NO: 913585
augucaucucugugaaccu

SEQ ID NO: 938639 - RNA, 19 nt, Artificial Sequence
  Description of Artificial Sequence: Synthetic oligonucleotide
  Antisense strand to SEQ ID NO: 938638
agguucacagagaugacau

SEQ ID NO: 938640 - RNA, 19 nt, Artificial Sequence
  Description of Artificial Sequence: Synthetic oligonucleotide
  Sense strand starting at position 1755 of SEQ ID NO: 913585
auguguuccagucauguca

SEQ ID NO: 938641 - RNA, 19 nt, Artificial Sequence
  Description of Artificial Sequence: Synthetic oligonucleotide
  Antisense strand to SEQ ID NO: 938640
ugacaugacuggaacacau

SEQ ID NO: 938642 - RNA, 19 nt, Artificial Sequence
  Description of Artificial Sequence: Synthetic oligonucleotide
  Sense strand starting at position 1746 of SEQ ID NO: 913585
uccggagacauguguucca

SEQ ID NO: 938643 - RNA, 19 nt, Artificial Sequence
  Description of Artificial Sequence: Synthetic oligonucleotide
  Antisense strand to SEQ ID NO: 938642
uggaacacaugucuccgga

SEQ ID NO: 938644 - RNA, 19 nt, Artificial Sequence
  Description of Artificial Sequence: Synthetic oligonucleotide
  Sense strand starting at position 181 of SEQ ID NO: 913585
ggguccuuauaugugaguu

SEQ ID NO: 938645 - RNA, 19 nt, Artificial Sequence
  Description of Artificial Sequence: Synthetic oligonucleotide
  Antisense strand to SEQ ID NO: 938644
aacucacauauaaggaccc

SEQ ID NO: 938646 - RNA, 19 nt, Artificial Sequence
  Description of Artificial Sequence: Synthetic oligonucleotide
  Sense strand starting at position 182 of SEQ ID NO: 913585
gguccuuauaugugaguug

SEQ ID NO: 938647 - RNA, 19 nt, Artificial Sequence
  Description of Artificial Sequence: Synthetic oligonucleotide
  Antisense strand to SEQ ID NO: 938646
caacucacauauaaggacc

SEQ ID NO: 938648 - RNA, 19 nt, Artificial Sequence
  Description of Artificial Sequence: Synthetic oligonucleotide
  Sense strand starting at position 92 of SEQ ID NO: 913585
guuuguucugacugaguga

SEQ ID NO: 938649 - RNA, 19 nt, Artificial Sequence
  Description of Artificial Sequence: Synthetic oligonucleotide
  Antisense strand to SEQ ID NO: 938648
ucacucagucagaacaaac

SEQ ID NO: 938650 - RNA, 19 nt, Artificial Sequence
  Description of Artificial Sequence: Synthetic oligonucleotide
  Sense strand starting at position 1101 of SEQ ID NO: 913585
cuaaauguugcacgaacga

SEQ ID NO: 938651 - RNA, 19 nt, Artificial Sequence
  Description of Artificial Sequence: Synthetic oligonucleotide
  Antisense strand to SEQ ID NO: 938650
ucguucgugcaacauuuag

SEQ ID NO: 938652 - RNA, 19 nt, Artificial Sequence
  Description of Artificial Sequence: Synthetic oligonucleotide
  Sense strand starting at position 1068 of SEQ ID NO: 913585
uaguuuagagcuuggcaca

SEQ ID NO: 938653 - RNA, 19 nt, Artificial Sequence
  Description of Artificial Sequence: Synthetic oligonucleotide
  Antisense strand to SEQ ID NO: 938652
ugugccaagcucuaaacua

SEQ ID NO: 938654 - RNA, 19 nt, Artificial Sequence
  Description of Artificial Sequence: Synthetic oligonucleotide
  Sense strand starting at position 1069 of SEQ ID NO: 913585
aguuuagagcuuggcacau

SEQ ID NO: 938655 - RNA, 19 nt, Artificial Sequence
  Description of Artificial Sequence: Synthetic oligonucleotide
  Antisense strand to SEQ ID NO: 938654
augugccaagcucuaaacu

SEQ ID NO: 938656 - RNA, 19 nt, Artificial Sequence
  Description of Artificial Sequence: Synthetic oligonucleotide
  Sense strand starting at position 732 of SEQ ID NO: 913585
ggccauaauuuccguauuu

SEQ ID NO: 938657 - RNA, 19 nt, Artificial Sequence
  Description of Artificial Sequence: Synthetic oligonucleotide
  Antisense strand to SEQ ID NO: 938656
aaauacggaaauuauggcc

SEQ ID NO: 938658 - RNA, 19 nt, Artificial Sequence
  Description of Artificial Sequence: Synthetic oligonucleotide
  Sense strand starting at position 1180 of SEQ ID NO: 913585
ugagucaccaguuguuauc

SEQ ID NO: 938659 - RNA, 19 nt, Artificial Sequence
  Description of Artificial Sequence: Synthetic oligonucleotide
  Antisense strand to SEQ ID NO: 938658
gauaacaacuggugacuca

SEQ ID NO: 938660 - RNA, 19 nt, Artificial Sequence
  Description of Artificial Sequence: Synthetic oligonucleotide
  Sense strand starting at position 3489 of SEQ ID NO: 913585
acgcgcuuuguugaaagaa

SEQ ID NO: 938661 - RNA, 19 nt, Artificial Sequence
  Description of Artificial Sequence: Synthetic oligonucleotide
  Antisense strand to SEQ ID NO: 938660
uucuuucaacaaagcgcgu

SEQ ID NO: 938662 - RNA, 19 nt, Artificial Sequence
  Description of Artificial Sequence: Synthetic oligonucleotide
  Sense strand starting at position 1716 of SEQ ID NO: 913585
gcgagaugguguagaggaa

SEQ ID NO: 938663 - RNA, 19 nt, Artificial Sequence
  Description of Artificial Sequence: Synthetic oligonucleotide
  Antisense strand to SEQ ID NO: 938662
uuccucuacaccaucucgc

SEQ ID NO: 938664 - RNA, 19 nt, Artificial Sequence
  Description of Artificial Sequence: Synthetic oligonucleotide
  Sense strand starting at position 187 of SEQ ID NO: 913585
uuauaugugaguuguucuu

SEQ ID NO: 938665 - RNA, 19 nt, Artificial Sequence
  Description of Artificial Sequence: Synthetic oligonucleotide
  Antisense strand to SEQ ID NO: 938664
aagaacaacucacauauaa

SEQ ID NO: 938666 - RNA, 19 nt, Artificial Sequence
  Description of Artificial Sequence: Synthetic oligonucleotide
  Sense strand starting at position 1266 of SEQ ID NO: 913586
ggcuaaaucgcuuugucuc

SEQ ID NO: 938667 - RNA, 19 nt, Artificial Sequence
  Description of Artificial Sequence: Synthetic oligonucleotide
  Antisense strand to SEQ ID NO: 938666
gagacaaagcgauuuagcc

SEQ ID NO: 938668 - RNA, 19 nt, Artificial Sequence
  Description of Artificial Sequence: Synthetic oligonucleotide
  Sense strand starting at position 3782 of SEQ ID NO: 913586
guucuuaugcacgugcaga

SEQ ID NO: 938669 - RNA, 19 nt, Artificial Sequence
  Description of Artificial Sequence: Synthetic oligonucleotide
  Antisense strand to SEQ ID NO: 938668
ucugcacgugcauaagaac

SEQ ID NO: 938670 - RNA, 19 nt, Artificial Sequence
  Description of Artificial Sequence: Synthetic oligonucleotide
  Sense strand starting at position 129 of SEQ ID NO: 913586
gcagcauccacagaugaag

SEQ ID NO: 938671 - RNA, 19 nt, Artificial Sequence
  Description of Artificial Sequence: Synthetic oligonucleotide
  Antisense strand to SEQ ID NO: 938670
cuucaucuguggaugcugc

SEQ ID NO: 938672 - RNA, 19 nt, Artificial Sequence
  Description of Artificial Sequence: Synthetic oligonucleotide
  Sense strand starting at position 3765 of SEQ ID NO: 913586
ggcaaauaucaccaacugu

SEQ ID NO: 938673 - RNA, 19 nt, Artificial Sequence
  Description of Artificial Sequence: Synthetic oligonucleotide
  Antisense strand to SEQ ID NO: 938672
acaguuggugauauuugcc

SEQ ID NO: 938674 - RNA, 19 nt, Artificial Sequence
  Description of Artificial Sequence: Synthetic oligonucleotide
  Sense strand starting at position 3624 of SEQ ID NO: 913586
caccaugaccucgaguacu

SEQ ID NO: 938675 - RNA, 19 nt, Artificial Sequence
  Description of Artificial Sequence: Synthetic oligonucleotide
  Antisense strand to SEQ ID NO: 938674
aguacucgaggucauggug

SEQ ID NO: 938676 - RNA, 19 nt, Artificial Sequence
  Description of Artificial Sequence: Synthetic oligonucleotide
  Sense strand starting at position 270 of SEQ ID NO: 913586
cugguuguggaagaaguuu

SEQ ID NO: 938677 - RNA, 19 nt, Artificial Sequence
  Description of Artificial Sequence: Synthetic oligonucleotide
  Antisense strand to SEQ ID NO: 938676
aaacuucuuccacaaccag

SEQ ID NO: 938678 - RNA, 19 nt, Artificial Sequence
  Description of Artificial Sequence: Synthetic oligonucleotide
  Sense strand starting at position 921 of SEQ ID NO: 913586
gagcuaaugccagagguca

SEQ ID NO: 938679 - RNA, 19 nt, Artificial Sequence
  Description of Artificial Sequence: Synthetic oligonucleotide
  Antisense strand to SEQ ID NO: 938678
ugaccucuggcauuagcuc

SEQ ID NO: 938680 - RNA, 19 nt, Artificial Sequence
  Description of Artificial Sequence: Synthetic oligonucleotide
  Sense strand starting at position 673 of SEQ ID NO: 913586
aggugaaaguucccgggaa

SEQ ID NO: 938681 - RNA, 19 nt, Artificial Sequence
  Description of Artificial Sequence: Synthetic oligonucleotide
  Antisense strand to SEQ ID NO: 938680
uucccgggaacuuucaccu

SEQ ID NO: 938682 - RNA, 19 nt, Artificial Sequence
  Description of Artificial Sequence: Synthetic oligonucleotide
  Sense strand starting at position 2373 of SEQ ID NO: 913586
gggauuccgagccagucaa

SEQ ID NO: 938683 - RNA, 19 nt, Artificial Sequence
  Description of Artificial Sequence: Synthetic oligonucleotide
  Antisense strand to SEQ ID NO: 938682
uugacuggcucggaauccc

SEQ ID NO: 938684 - RNA, 19 nt, Artificial Sequence
  Description of Artificial Sequence: Synthetic oligonucleotide
  Sense strand starting at position 3306 of SEQ ID NO: 913586
gagaaaccgcugugggaau

SEQ ID NO: 938685 - RNA, 19 nt, Artificial Sequence
  Description of Artificial Sequence: Synthetic oligonucleotide
  Antisense strand to SEQ ID NO: 938684
auucccacagcgguuucuc

SEQ ID NO: 938686 - RNA, 19 nt, Artificial Sequence
  Description of Artificial Sequence: Synthetic oligonucleotide
  Sense strand starting at position 3755 of SEQ ID NO: 913586
gaccguccacggcaaauau

SEQ ID NO: 938687 - RNA, 19 nt, Artificial Sequence
  Description of Artificial Sequence: Synthetic oligonucleotide
  Antisense strand to SEQ ID NO: 938686
auauuugccguggacgguc

SEQ ID NO: 938688 - RNA, 19 nt, Artificial Sequence
  Description of Artificial Sequence: Synthetic oligonucleotide
  Sense strand starting at position 3819 of SEQ ID NO: 913586
acugucugaucucuuccau

SEQ ID NO: 938689 - RNA, 19 nt, Artificial Sequence
  Description of Artificial Sequence: Synthetic oligonucleotide
  Antisense strand to SEQ ID NO: 938688
auggaagagaucagacagu

SEQ ID NO: 938690 - RNA, 19 nt, Artificial Sequence
  Description of Artificial Sequence: Synthetic oligonucleotide
  Sense strand starting at position 923 of SEQ ID NO: 913586
gcuaaugccagaggucaga

SEQ ID NO: 938691 - RNA, 19 nt, Artificial Sequence
  Description of Artificial Sequence: Synthetic oligonucleotide
  Antisense strand to SEQ ID NO: 938690
ucugaccucuggcauuagc

SEQ ID NO: 938692 - RNA, 19 nt, Artificial Sequence
  Description of Artificial Sequence: Synthetic oligonucleotide
  Sense strand starting at position 51 of SEQ ID NO: 913586
uaagaaucguucuuguaua

SEQ ID NO: 938693 - RNA, 19 nt, Artificial Sequence
  Description of Artificial Sequence: Synthetic oligonucleotide
  Antisense strand to SEQ ID NO: 938692
uauacaagaacgauucuua

SEQ ID NO: 938694 - RNA, 19 nt, Artificial Sequence
  Description of Artificial Sequence: Synthetic oligonucleotide
  Sense strand starting at position 3607 of SEQ ID NO: 913586
gaguuuggccacugaguca

SEQ ID NO: 938695 - RNA, 19 nt, Artificial Sequence
  Description of Artificial Sequence: Synthetic oligonucleotide
  Antisense strand to SEQ ID NO: 938694
ugacucaguggccaaacuc

SEQ ID NO: 938696 - RNA, 19 nt, Artificial Sequence
  Description of Artificial Sequence: Synthetic oligonucleotide
  Sense strand starting at position 3738 of SEQ ID NO: 913586
guuacucaccuguguggga

SEQ ID NO: 938697 - RNA, 19 nt, Artificial Sequence
  Description of Artificial Sequence: Synthetic oligonucleotide
  Antisense strand to SEQ ID NO: 938696
ucccacacaggugaguaac

SEQ ID NO: 938698 - RNA, 19 nt, Artificial Sequence
  Description of Artificial Sequence: Synthetic oligonucleotide
  Sense strand starting at position 3721 of SEQ ID NO: 913586
ugauuaaugcaaugucugu

SEQ ID NO: 938699 - RNA, 19 nt, Artificial Sequence
  Description of Artificial Sequence: Synthetic oligonucleotide
  Antisense strand to SEQ ID NO: 938698
acagacauugcauuaauca

SEQ ID NO: 938700 - RNA, 19 nt, Artificial Sequence
  Description of Artificial Sequence: Synthetic oligonucleotide
  Sense strand starting at position 3603 of SEQ ID NO: 913586
gccagaguuuggccacuga

SEQ ID NO: 938701 - RNA, 19 nt, Artificial Sequence
  Description of Artificial Sequence: Synthetic oligonucleotide
  Antisense strand to SEQ ID NO: 938700
ucaguggccaaacucuggc

SEQ ID NO: 938702 - RNA, 19 nt, Artificial Sequence
  Description of Artificial Sequence: Synthetic oligonucleotide
  Sense strand starting at position 3934 of SEQ ID NO: 913586
ggugaucucgcaggugaga

SEQ ID NO: 938703 - RNA, 19 nt, Artificial Sequence
  Description of Artificial Sequence: Synthetic oligonucleotide
  Antisense strand to SEQ ID NO: 938702
ucucaccugcgagaucacc

SEQ ID NO: 938704 - RNA, 19 nt, Artificial Sequence
  Description of Artificial Sequence: Synthetic oligonucleotide
  Sense strand starting at position 1130 of SEQ ID NO: 913586
gucucugcucucgaagguu

SEQ ID NO: 938705 - RNA, 19 nt, Artificial Sequence
  Description of Artificial Sequence: Synthetic oligonucleotide
  Antisense strand to SEQ ID NO: 938704
aaccuucgagagcagagac

SEQ ID NO: 938706 - RNA, 19 nt, Artificial Sequence
  Description of Artificial Sequence: Synthetic oligonucleotide
  Sense strand starting at position 48 of SEQ ID NO: 913586
ggcuaagaaucguucuugu

SEQ ID NO: 938707 - RNA, 19 nt, Artificial Sequence
  Description of Artificial Sequence: Synthetic oligonucleotide
  Antisense strand to SEQ ID NO: 938706
acaagaacgauucuuagcc

SEQ ID NO: 938708 - RNA, 19 nt, Artificial Sequence
  Description of Artificial Sequence: Synthetic oligonucleotide
  Sense strand starting at position 3783 of SEQ ID NO: 913586
uucuuaugcacgugcagaa

SEQ ID NO: 938709 - RNA, 19 nt, Artificial Sequence
  Description of Artificial Sequence: Synthetic oligonucleotide
  Antisense strand to SEQ ID NO: 938708
uucugcacgugcauaagaa

SEQ ID NO: 938710 - RNA, 19 nt, Artificial Sequence
  Description of Artificial Sequence: Synthetic oligonucleotide
  Sense strand starting at position 2117 of SEQ ID NO: 913586
gccacuccuucgcuuuaaa

SEQ ID NO: 938711 - RNA, 19 nt, Artificial Sequence
  Description of Artificial Sequence: Synthetic oligonucleotide
  Antisense strand to SEQ ID NO: 938710
uuuaaagcgaaggaguggc

SEQ ID NO: 938712 - RNA, 19 nt, Artificial Sequence
  Description of Artificial Sequence: Synthetic oligonucleotide
  Sense strand starting at position 1273 of SEQ ID NO: 913586
ucgcuuugucucggacaaa

SEQ ID NO: 938713 - RNA, 19 nt, Artificial Sequence
  Description of Artificial Sequence: Synthetic oligonucleotide
  Antisense strand to SEQ ID NO: 938712
uuuguccgagacaaagcga

SEQ ID NO: 938714 - RNA, 19 nt, Artificial Sequence
  Description of Artificial Sequence: Synthetic oligonucleotide
  Sense strand starting at position 86 of SEQ ID NO: 913586
acaagaguaugucaugacu

SEQ ID NO: 938715 - RNA, 19 nt, Artificial Sequence
  Description of Artificial Sequence: Synthetic oligonucleotide
  Antisense strand to SEQ ID NO: 938714
agucaugacauacucuugu

SEQ ID NO: 938716 - RNA, 19 nt, Artificial Sequence
  Description of Artificial Sequence: Synthetic oligonucleotide
  Sense strand starting at position 3716 of SEQ ID NO: 913586
cuaaaugauuaaugcaaug

SEQ ID NO: 938717 - RNA, 19 nt, Artificial Sequence
  Description of Artificial Sequence: Synthetic oligonucleotide
  Antisense strand to SEQ ID NO: 938716
cauugcauuaaucauuuag

SEQ ID NO: 938718 - RNA, 19 nt, Artificial Sequence
  Description of Artificial Sequence: Synthetic oligonucleotide
  Sense strand starting at position 88 of SEQ ID NO: 913586
aagaguaugucaugacuca

SEQ ID NO: 938719 - RNA, 19 nt, Artificial Sequence
  Description of Artificial Sequence: Synthetic oligonucleotide
  Antisense strand to SEQ ID NO: 938718
ugagucaugacauacucuu

SEQ ID NO: 938720 - RNA, 19 nt, Artificial Sequence
  Description of Artificial Sequence: Synthetic oligonucleotide
  Sense strand starting at position 3823 of SEQ ID NO: 913586
ucugaucucuuccaugguu

SEQ ID NO: 938721 - RNA, 19 nt, Artificial Sequence
  Description of Artificial Sequence: Synthetic oligonucleotide
  Antisense strand to SEQ ID NO: 938720
aaccauggaagagaucaga

SEQ ID NO: 938722 - RNA, 19 nt, Artificial Sequence
  Description of Artificial Sequence: Synthetic oligonucleotide
  Sense strand starting at position 674 of SEQ ID NO: 913586
ggugaaaguucccgggaag

SEQ ID NO: 938723 - RNA, 19 nt, Artificial Sequence
  Description of Artificial Sequence: Synthetic oligonucleotide
  Antisense strand to SEQ ID NO: 938722
cuucccgggaacuuucacc

SEQ ID NO: 938724 - RNA, 19 nt, Artificial Sequence
  Description of Artificial Sequence: Synthetic oligonucleotide
  Sense strand starting at position 241 of SEQ ID NO: 913586
ccgcaaagcugacaacauu

SEQ ID NO: 938725 - RNA, 19 nt, Artificial Sequence
  Description of Artificial Sequence: Synthetic oligonucleotide
  Antisense strand to SEQ ID NO: 938724
aauguugucagcuuugcgg

SEQ ID NO: 938726 - RNA, 19 nt, Artificial Sequence
  Description of Artificial Sequence: Synthetic oligonucleotide
  Sense strand starting at position 52 of SEQ ID NO: 913586
aagaaucguucuuguauau

SEQ ID NO: 938727 - RNA, 19 nt, Artificial Sequence
  Description of Artificial Sequence: Synthetic oligonucleotide
  Antisense strand to SEQ ID NO: 938726
auauacaagaacgauucuu

SEQ ID NO: 938728 - RNA, 19 nt, Artificial Sequence
  Description of Artificial Sequence: Synthetic oligonucleotide
  Sense strand starting at position 1274 of SEQ ID NO: 913586
cgcuuugucucggacaaag

SEQ ID NO: 938729 - RNA, 19 nt, Artificial Sequence
  Description of Artificial Sequence: Synthetic oligonucleotide
  Antisense strand to SEQ ID NO: 938728
cuuuguccgagacaaagcg

SEQ ID NO: 938730 - RNA, 19 nt, Artificial Sequence
  Description of Artificial Sequence: Synthetic oligonucleotide
  Sense strand starting at position 1070 of SEQ ID NO: 913586
aggcuuuguuucuggcaga

SEQ ID NO: 938731 - RNA, 19 nt, Artificial Sequence
  Description of Artificial Sequence: Synthetic oligonucleotide
  Antisense strand to SEQ ID NO: 938730
ucugccagaaacaaagccu

SEQ ID NO: 938732 - RNA, 19 nt, Artificial Sequence
  Description of Artificial Sequence: Synthetic oligonucleotide
  Sense strand starting at position 1071 of SEQ ID NO: 913586
ggcuuuguuucuggcagag

SEQ ID NO: 938733 - RNA, 19 nt, Artificial Sequence
  Description of Artificial Sequence: Synthetic oligonucleotide
  Antisense strand to SEQ ID NO: 938732
cucugccagaaacaaagcc

SEQ ID NO: 938734 - RNA, 19 nt, Artificial Sequence
  Description of Artificial Sequence: Synthetic oligonucleotide
  Sense strand starting at position 1272 of SEQ ID NO: 913586
aucgcuuugucucggacaa

SEQ ID NO: 938735 - RNA, 19 nt, Artificial Sequence
  Description of Artificial Sequence: Synthetic oligonucleotide
  Antisense strand to SEQ ID NO: 938734
uuguccgagacaaagcgau

SEQ ID NO: 938736 - RNA, 19 nt, Artificial Sequence
  Description of Artificial Sequence: Synthetic oligonucleotide
  Sense strand starting at position 2155 of SEQ ID NO: 913587
gaguaacuuggauaggucu

SEQ ID NO: 938737 - RNA, 19 nt, Artificial Sequence
  Description of Artificial Sequence: Synthetic oligonucleotide
  Antisense strand to SEQ ID NO: 938736
agaccuauccaaguuacuc

SEQ ID NO: 938738 - RNA, 19 nt, Artificial Sequence
  Description of Artificial Sequence: Synthetic oligonucleotide
  Sense strand starting at position 2046 of SEQ ID NO: 913587
gccagaugucuugcugucu

SEQ ID NO: 938739 - RNA, 19 nt, Artificial Sequence
  Description of Artificial Sequence: Synthetic oligonucleotide
  Antisense strand to SEQ ID NO: 938738
agacagcaagacaucuggc

SEQ ID NO: 938740 - RNA, 19 nt, Artificial Sequence
  Description of Artificial Sequence: Synthetic oligonucleotide
  Sense strand starting at position 3144 of SEQ ID NO: 913587
ggauacagccuugaucuua

SEQ ID NO: 938741 - RNA, 19 nt, Artificial Sequence
  Description of Artificial Sequence: Synthetic oligonucleotide
  Antisense strand to SEQ ID NO: 938740
uaagaucaaggcuguaucc

SEQ ID NO: 938742 - RNA, 19 nt, Artificial Sequence
  Description of Artificial Sequence: Synthetic oligonucleotide
  Sense strand starting at position 2217 of SEQ ID NO: 913587
cgucauuucucagcaaaca

SEQ ID NO: 938743 - RNA, 19 nt, Artificial Sequence
  Description of Artificial Sequence: Synthetic oligonucleotide
  Antisense strand to SEQ ID NO: 938742
uguuugcugagaaaugacg

SEQ ID NO: 938744 - RNA, 19 nt, Artificial Sequence
  Description of Artificial Sequence: Synthetic oligonucleotide
  Sense strand starting at position 781 of SEQ ID NO: 913587
ggguuagugagucacagag

SEQ ID NO: 938745 - RNA, 19 nt, Artificial Sequence
  Description of Artificial Sequence: Synthetic oligonucleotide
  Antisense strand to SEQ ID NO: 938744
cucugugacucacuaaccc

SEQ ID NO: 938746 - RNA, 19 nt, Artificial Sequence
  Description of Artificial Sequence: Synthetic oligonucleotide
  Sense strand starting at position 2785 of SEQ ID NO: 913587
agcauuacaccaggauaau

SEQ ID NO: 938747 - RNA, 19 nt, Artificial Sequence
  Description of Artificial Sequence: Synthetic oligonucleotide
  Antisense strand to SEQ ID NO: 938746
auuauccugguguaaugcu

SEQ ID NO: 938748 - RNA, 19 nt, Artificial Sequence
  Description of Artificial Sequence: Synthetic oligonucleotide
  Sense strand starting at position 2429 of SEQ ID NO: 913587
uggcaaagcgcugcuaauu

SEQ ID NO: 938749 - RNA, 19 nt, Artificial Sequence
  Description of Artificial Sequence: Synthetic oligonucleotide
  Antisense strand to SEQ ID NO: 938748
aauuagcagcgcuuugcca

SEQ ID NO: 938750 - RNA, 19 nt, Artificial Sequence
  Description of Artificial Sequence: Synthetic oligonucleotide
  Sense strand starting at position 546 of SEQ ID NO: 913587
ucaccugauggcuacuaau

SEQ ID NO: 938751 - RNA, 19 nt, Artificial Sequence
  Description of Artificial Sequence: Synthetic oligonucleotide
  Antisense strand to SEQ ID NO: 938750
auuaguagccaucagguga

SEQ ID NO: 938752 - RNA, 19 nt, Artificial Sequence
  Description of Artificial Sequence: Synthetic oligonucleotide
  Sense strand starting at position 3001 of SEQ ID NO: 913587
gucugugcuccgucuagac

SEQ ID NO: 938753 - RNA, 19 nt, Artificial Sequence
  Description of Artificial Sequence: Synthetic oligonucleotide
  Antisense strand to SEQ ID NO: 938752
gucuagacggagcacagac

SEQ ID NO: 938754 - RNA, 19 nt, Artificial Sequence
  Description of Artificial Sequence: Synthetic oligonucleotide
  Sense strand starting at position 2214 of SEQ ID NO: 913587
auccgucauuucucagcaa

SEQ ID NO: 938755 - RNA, 19 nt, Artificial Sequence
  Description of Artificial Sequence: Synthetic oligonucleotide
  Antisense strand to SEQ ID NO: 938754
uugcugagaaaugacggau

SEQ ID NO: 938756 - RNA, 19 nt, Artificial Sequence
  Description of Artificial Sequence: Synthetic oligonucleotide
  Sense strand starting at position 2158 of SEQ ID NO: 913587
uaacuuggauaggucuauu

SEQ ID NO: 938757 - RNA, 19 nt, Artificial Sequence
  Description of Artificial Sequence: Synthetic oligonucleotide
  Antisense strand to SEQ ID NO: 938756
aauagaccuauccaaguua

SEQ ID NO: 938758 - RNA, 19 nt, Artificial Sequence
  Description of Artificial Sequence: Synthetic oligonucleotide
  Sense strand starting at position 3398 of SEQ ID NO: 913587
gggaaagaaucacaggaaa

SEQ ID NO: 938759 - RNA, 19 nt, Artificial Sequence
  Description of Artificial Sequence: Synthetic oligonucleotide
  Antisense strand to SEQ ID NO: 938758
uuuccugugauucuuuccc

SEQ ID NO: 938760 - RNA, 19 nt, Artificial Sequence
  Description of Artificial Sequence: Synthetic oligonucleotide
  Sense strand starting at position 2768 of SEQ ID NO: 913587
auaauugguucuguaauag

SEQ ID NO: 938761 - RNA, 19 nt, Artificial Sequence
  Description of Artificial Sequence: Synthetic oligonucleotide
  Antisense strand to SEQ ID NO: 938760
cuauuacagaaccaauuau

SEQ ID NO: 938762 - RNA, 19 nt, Artificial Sequence
  Description of Artificial Sequence: Synthetic oligonucleotide
  Sense strand starting at position 2442 of SEQ ID NO: 913587
cuaauugucgccgccggau

SEQ ID NO: 938763 - RNA, 19 nt, Artificial Sequence
  Description of Artificial Sequence: Synthetic oligonucleotide
  Antisense strand to SEQ ID NO: 938762
auccggcggcgacaauuag

SEQ ID NO: 938764 - RNA, 19 nt, Artificial Sequence
  Description of Artificial Sequence: Synthetic oligonucleotide
  Sense strand starting at position 2843 of SEQ ID NO: 913587
gcggaaagccuuuaugaua

SEQ ID NO: 938765 - RNA, 19 nt, Artificial Sequence
  Description of Artificial Sequence: Synthetic oligonucleotide
  Antisense strand to SEQ ID NO: 938764
uaucauaaaggcuuuccgc

SEQ ID NO: 938766 - RNA, 19 nt, Artificial Sequence
  Description of Artificial Sequence: Synthetic oligonucleotide
  Sense strand starting at position 3143 of SEQ ID NO: 913587
gggauacagccuugaucuu

SEQ ID NO: 938767 - RNA, 19 nt, Artificial Sequence
  Description of Artificial Sequence: Synthetic oligonucleotide
  Antisense strand to SEQ ID NO: 938766
aagaucaaggcuguauccc

SEQ ID NO: 938768 - RNA, 19 nt, Artificial Sequence
  Description of Artificial Sequence: Synthetic oligonucleotide
  Sense strand starting at position 2157 of SEQ ID NO: 913587
guaacuuggauaggucuau

SEQ ID NO: 938769 - RNA, 19 nt, Artificial Sequence
  Description of Artificial Sequence: Synthetic oligonucleotide
  Antisense strand to SEQ ID NO: 938768
auagaccuauccaaguuac

SEQ ID NO: 938770 - RNA, 19 nt, Artificial Sequence
  Description of Artificial Sequence: Synthetic oligonucleotide
  Sense strand starting at position 137 of SEQ ID NO: 913587
gugaaaugcaggcaaaugu

SEQ ID NO: 938771 - RNA, 19 nt, Artificial Sequence
  Description of Artificial Sequence: Synthetic oligonucleotide
  Antisense strand to SEQ ID NO: 938770
acauuugccugcauuucac

SEQ ID NO: 938772 - RNA, 19 nt, Artificial Sequence
  Description of Artificial Sequence: Synthetic oligonucleotide
  Sense strand starting at position 2566 of SEQ ID NO: 913587
ucucgaugcaaaugauaug

SEQ ID NO: 938773 - RNA, 19 nt, Artificial Sequence
  Description of Artificial Sequence: Synthetic oligonucleotide
  Antisense strand to SEQ ID NO: 938772
cauaucauuugcaucgaga

SEQ ID NO: 938774 - RNA, 19 nt, Artificial Sequence
  Description of Artificial Sequence: Synthetic oligonucleotide
  Sense strand starting at position 135 of SEQ ID NO: 913587
augugaaaugcaggcaaau

SEQ ID NO: 938775 - RNA, 19 nt, Artificial Sequence
  Description of Artificial Sequence: Synthetic oligonucleotide
  Antisense strand to SEQ ID NO: 938774
auuugccugcauuucacau

SEQ ID NO: 938776 - RNA, 19 nt, Artificial Sequence
  Description of Artificial Sequence: Synthetic oligonucleotide
  Sense strand starting at position 2384 of SEQ ID NO: 913587
uugggcugcccuuaucaaa

SEQ ID NO: 938777 - RNA, 19 nt, Artificial Sequence
  Description of Artificial Sequence: Synthetic oligonucleotide
  Antisense strand to SEQ ID NO: 938776
uuugauaagggcagcccaa

SEQ ID NO: 938778 - RNA, 19 nt, Artificial Sequence
  Description of Artificial Sequence: Synthetic oligonucleotide
  Sense strand starting at position 2683 of SEQ ID NO: 913587
aaaguaccgggcugaaauu

SEQ ID NO: 938779 - RNA, 19 nt, Artificial Sequence
  Description of Artificial Sequence: Synthetic oligonucleotide
  Antisense strand to SEQ ID NO: 938778
aauuucagcccgguacuuu

SEQ ID NO: 938780 - RNA, 19 nt, Artificial Sequence
  Description of Artificial Sequence: Synthetic oligonucleotide
  Sense strand starting at position 3037 of SEQ ID NO: 913587
gacgauggcuucuuggaca

SEQ ID NO: 938781 - RNA, 19 nt, Artificial Sequence
  Description of Artificial Sequence: Synthetic oligonucleotide
  Antisense strand to SEQ ID NO: 938780
uguccaagaagccaucguc

SEQ ID NO: 938782 - RNA, 19 nt, Artificial Sequence
  Description of Artificial Sequence: Synthetic oligonucleotide
  Sense strand starting at position 2356 of SEQ ID NO: 913587
ggcaaaccuuucuccgaga

SEQ ID NO: 938783 - RNA, 19 nt, Artificial Sequence
  Description of Artificial Sequence: Synthetic oligonucleotide
  Antisense strand to SEQ ID NO: 938782
ucucggagaaagguuugcc

SEQ ID NO: 938784 - RNA, 19 nt, Artificial Sequence
  Description of Artificial Sequence: Synthetic oligonucleotide
  Sense strand starting at position 2587 of SEQ ID NO: 913587
gugggacccuuugcaauua

SEQ ID NO: 938785 - RNA, 19 nt, Artificial Sequence
  Description of Artificial Sequence: Synthetic oligonucleotide
  Antisense strand to SEQ ID NO: 938784
uaauugcaaagggucccac

SEQ ID NO: 938786 - RNA, 19 nt, Artificial Sequence
  Description of Artificial Sequence: Synthetic oligonucleotide
  Sense strand starting at position 434 of SEQ ID NO: 913587
aaacgaguagguugccaaa

SEQ ID NO: 938787 - RNA, 19 nt, Artificial Sequence
  Description of Artificial Sequence: Synthetic oligonucleotide
  Antisense strand to SEQ ID NO: 938786
uuuggcaaccuacucguuu

SEQ ID NO: 938788 - RNA, 19 nt, Artificial Sequence
  Description of Artificial Sequence: Synthetic oligonucleotide
  Sense strand starting at position 1086 of SEQ ID NO: 913587
cccaauuagaggcgugaca

SEQ ID NO: 938789 - RNA, 19 nt, Artificial Sequence
  Description of Artificial Sequence: Synthetic oligonucleotide
  Antisense strand to SEQ ID NO: 938788
ugucacgccucuaauuggg

SEQ ID NO: 938790 - RNA, 19 nt, Artificial Sequence
  Description of Artificial Sequence: Synthetic oligonucleotide
  Sense strand starting at position 1040 of SEQ ID NO: 913587
gcagaagcaccgugaaaga

SEQ ID NO: 938791 - RNA, 19 nt, Artificial Sequence
  Description of Artificial Sequence: Synthetic oligonucleotide
  Antisense strand to SEQ ID NO: 938790
ucuuucacggugcuucugc

SEQ ID NO: 938792 - RNA, 19 nt, Artificial Sequence
  Description of Artificial Sequence: Synthetic oligonucleotide
  Sense strand starting at position 2495 of SEQ ID NO: 913587
uuuccaaacgaucguacaa

SEQ ID NO: 938793 - RNA, 19 nt, Artificial Sequence
  Description of Artificial Sequence: Synthetic oligonucleotide
  Antisense strand to SEQ ID NO: 938792
uuguacgaucguuuggaaa

SEQ ID NO: 938794 - RNA, 19 nt, Artificial Sequence
  Description of Artificial Sequence: Synthetic oligonucleotide
  Sense strand starting at position 2755 of SEQ ID NO: 913587
agucuaauggcgcauaauu

SEQ ID NO: 938795 - RNA, 19 nt, Artificial Sequence
  Description of Artificial Sequence: Synthetic oligonucleotide
  Antisense strand to SEQ ID NO: 938794
aauuaugcgccauuagacu

SEQ ID NO: 938796 - RNA, 19 nt, Artificial Sequence
  Description of Artificial Sequence: Synthetic oligonucleotide
  Sense strand starting at position 3332 of SEQ ID NO: 913587
gaucuauuccagugaagcg

SEQ ID NO: 938797 - RNA, 19 nt, Artificial Sequence
  Description of Artificial Sequence: Synthetic oligonucleotide
  Antisense strand to SEQ ID NO: 938796
cgcuucacuggaauagauc

SEQ ID NO: 938798 - RNA, 19 nt, Artificial Sequence
  Description of Artificial Sequence: Synthetic oligonucleotide
  Sense strand starting at position 1520 of SEQ ID NO: 913587
gcgauagagcuucaagucu

SEQ ID NO: 938799 - RNA, 19 nt, Artificial Sequence
  Description of Artificial Sequence: Synthetic oligonucleotide
  Antisense strand to SEQ ID NO: 938798
agacuugaagcucuaucgc

SEQ ID NO: 938800 - RNA, 19 nt, Artificial Sequence
  Description of Artificial Sequence: Synthetic oligonucleotide
  Sense strand starting at position 2654 of SEQ ID NO: 913587
ucucucugccugggugaaa

SEQ ID NO: 938801 - RNA, 19 nt, Artificial Sequence
  Description of Artificial Sequence: Synthetic oligonucleotide
  Antisense strand to SEQ ID NO: 938800
uuucacccaggcagagaga

SEQ ID NO: 938802 - RNA, 19 nt, Artificial Sequence
  Description of Artificial Sequence: Synthetic oligonucleotide
  Sense strand starting at position 2088 of SEQ ID NO: 913587
agcacucgccuuuauaauc

SEQ ID NO: 938803 - RNA, 19 nt, Artificial Sequence
  Description of Artificial Sequence: Synthetic oligonucleotide
  Antisense strand to SEQ ID NO: 938802
gauuauaaaggcgagugcu

SEQ ID NO: 938804 - RNA, 19 nt, Artificial Sequence
  Description of Artificial Sequence: Synthetic oligonucleotide
  Sense strand starting at position 3424 of SEQ ID NO: 913587
ucguuucagagcggagaga

SEQ ID NO: 938805 - RNA, 19 nt, Artificial Sequence
  Description of Artificial Sequence: Synthetic oligonucleotide
  Antisense strand to SEQ ID NO: 938804
ucucuccgcucugaaacga

SEQ ID NO: 938806 - RNA, 19 nt, Artificial Sequence
  Description of Artificial Sequence: Synthetic oligonucleotide
  Sense strand starting at position 2562 of SEQ ID NO: 913587
cgcuucucgaugcaaauga

SEQ ID NO: 938807 - RNA, 19 nt, Artificial Sequence
  Description of Artificial Sequence: Synthetic oligonucleotide
  Antisense strand to SEQ ID NO: 938806
ucauuugcaucgagaagcg

SEQ ID NO: 938808 - RNA, 19 nt, Artificial Sequence
  Description of Artificial Sequence: Synthetic oligonucleotide
  Sense strand starting at position 1108 of SEQ ID NO: 913587
gcaucugugcugggaggau

SEQ ID NO: 938809 - RNA, 19 nt, Artificial Sequence
  Description of Artificial Sequence: Synthetic oligonucleotide
  Antisense strand to SEQ ID NO: 938808
auccucccagcacagaugc

SEQ ID NO: 938810 - RNA, 19 nt, Artificial Sequence
  Description of Artificial Sequence: Synthetic oligonucleotide
  Sense strand starting at position 2109 of SEQ ID NO: 913587
acgcauaauuggccuuaau

SEQ ID NO: 938811 - RNA, 19 nt, Artificial Sequence
  Description of Artificial Sequence: Synthetic oligonucleotide
  Antisense strand to SEQ ID NO: 938810
auuaaggccaauuaugcgu

SEQ ID NO: 938812 - RNA, 19 nt, Artificial Sequence
  Description of Artificial Sequence: Synthetic oligonucleotide
  Sense strand starting at position 2952 of SEQ ID NO: 913587
caagaugcaucagaagaug

SEQ ID NO: 938813 - RNA, 19 nt, Artificial Sequence
  Description of Artificial Sequence: Synthetic oligonucleotide
  Antisense strand to SEQ ID NO: 938812
caucuucugaugcaucuug

SEQ ID NO: 938814 - RNA, 19 nt, Artificial Sequence
  Description of Artificial Sequence: Synthetic oligonucleotide
  Sense strand starting at position 2888 of SEQ ID NO: 913587
gguuauuaaaugcguguaa

SEQ ID NO: 938815 - RNA, 19 nt, Artificial Sequence
  Description of Artificial Sequence: Synthetic oligonucleotide
  Antisense strand to SEQ ID NO: 938814
uuacacgcauuuaauaacc

SEQ ID NO: 938816 - RNA, 19 nt, Artificial Sequence
  Description of Artificial Sequence: Synthetic oligonucleotide
  Sense strand starting at position 2288 of SEQ ID NO: 913588
gggcucuggagcuaagaaa

SEQ ID NO: 938817 - RNA, 19 nt, Artificial Sequence
  Description of Artificial Sequence: Synthetic oligonucleotide
  Antisense strand to SEQ ID NO: 938816
uuucuuagcuccagagccc

SEQ ID NO: 938818 - RNA, 19 nt, Artificial Sequence
  Description of Artificial Sequence: Synthetic oligonucleotide
  Sense strand starting at position 3040 of SEQ ID NO: 913588
gagauaggguuauccuaau

SEQ ID NO: 938819 - RNA, 19 nt, Artificial Sequence
  Description of Artificial Sequence: Synthetic oligonucleotide
  Antisense strand to SEQ ID NO: 938818
auuaggauaacccuaucuc

SEQ ID NO: 938820 - RNA, 19 nt, Artificial Sequence
  Description of Artificial Sequence: Synthetic oligonucleotide
  Sense strand starting at position 2111 of SEQ ID NO: 913588
ggaauaagcuuaucuuaaa

SEQ ID NO: 938821 - RNA, 19 nt, Artificial Sequence
  Description of Artificial Sequence: Synthetic oligonucleotide
  Antisense strand to SEQ ID NO: 938820
uuuaagauaagcuuauucc

SEQ ID NO: 938822 - RNA, 19 nt, Artificial Sequence
  Description of Artificial Sequence: Synthetic oligonucleotide
  Sense strand starting at position 1685 of SEQ ID NO: 913588
ugaguucucacagaacgac

SEQ ID NO: 938823 - RNA, 19 nt, Artificial Sequence
  Description of Artificial Sequence: Synthetic oligonucleotide
  Antisense strand to SEQ ID NO: 938822
gucguucugugagaacuca

SEQ ID NO: 938824 - RNA, 19 nt, Artificial Sequence
  Description of Artificial Sequence: Synthetic oligonucleotide
  Sense strand starting at position 2928 of SEQ ID NO: 913588
ggugaaugcuauuuguuua

SEQ ID NO: 938825 - RNA, 19 nt, Artificial Sequence
  Description of Artificial Sequence: Synthetic oligonucleotide
  Antisense strand to SEQ ID NO: 938824
uaaacaaauagcauucacc

SEQ ID NO: 938826 - RNA, 19 nt, Artificial Sequence
  Description of Artificial Sequence: Synthetic oligonucleotide
  Sense strand starting at position 2837 of SEQ ID NO: 913588
uccugagcugaguaaauga

SEQ ID NO: 938827 - RNA, 19 nt, Artificial Sequence
  Description of Artificial Sequence: Synthetic oligonucleotide
  Antisense strand to SEQ ID NO: 938826
ucauuuacucagcucagga

SEQ ID NO: 938828 - RNA, 19 nt, Artificial Sequence
  Description of Artificial Sequence: Synthetic oligonucleotide
  Sense strand starting at position 2817 of SEQ ID NO: 913588
ggaauuggacauugauugu

SEQ ID NO: 938829 - RNA, 19 nt, Artificial Sequence
  Description of Artificial Sequence: Synthetic oligonucleotide
  Antisense strand to SEQ ID NO: 938828
acaaucaauguccaauucc

SEQ ID NO: 938830 - RNA, 19 nt, Artificial Sequence
  Description of Artificial Sequence: Synthetic oligonucleotide
  Sense strand starting at position 1202 of SEQ ID NO: 913588
aggugacagugaccuaaau

SEQ ID NO: 938831 - RNA, 19 nt, Artificial Sequence
  Description of Artificial Sequence: Synthetic oligonucleotide
  Antisense strand to SEQ ID NO: 938830
auuuaggucacugucaccu

SEQ ID NO: 938832 - RNA, 19 nt, Artificial Sequence
  Description of Artificial Sequence: Synthetic oligonucleotide
  Sense strand starting at position 442 of SEQ ID NO: 913588
gguauuaagcagcaagaua

SEQ ID NO: 938833 - RNA, 19 nt, Artificial Sequence
  Description of Artificial Sequence: Synthetic oligonucleotide
  Antisense strand to SEQ ID NO: 938832
uaucuugcugcuuaauacc

SEQ ID NO: 938834 - RNA, 19 nt, Artificial Sequence
  Description of Artificial Sequence: Synthetic oligonucleotide
  Sense strand starting at position 225 of SEQ ID NO: 913588
aguagaaguaugcaaguaa

SEQ ID NO: 938835 - RNA, 19 nt, Artificial Sequence
  Description of Artificial Sequence: Synthetic oligonucleotide
  Antisense strand to SEQ ID NO: 938834
uuacuugcauacuucuacu

SEQ ID NO: 938836 - RNA, 19 nt, Artificial Sequence
  Description of Artificial Sequence: Synthetic oligonucleotide
  Sense strand starting at position 428 of SEQ ID NO: 913588
gacgauuaucuccagguau

SEQ ID NO: 938837 - RNA, 19 nt, Artificial Sequence
  Description of Artificial Sequence: Synthetic oligonucleotide
  Antisense strand to SEQ ID NO: 938836
auaccuggagauaaucguc

SEQ ID NO: 938838 - RNA, 19 nt, Artificial Sequence
  Description of Artificial Sequence: Synthetic oligonucleotide
  Sense strand starting at position 1680 of SEQ ID NO: 913588
cuaauugaguucucacaga

SEQ ID NO: 938839 - RNA, 19 nt, Artificial Sequence
  Description of Artificial Sequence: Synthetic oligonucleotide
  Antisense strand to SEQ ID NO: 938838
ucugugagaacucaauuag

SEQ ID NO: 938840 - RNA, 19 nt, Artificial Sequence
  Description of Artificial Sequence: Synthetic oligonucleotide
  Sense strand starting at position 1106 of SEQ ID NO: 913588
aagaaaggauagucguuau

SEQ ID NO: 938841 - RNA, 19 nt, Artificial Sequence
  Description of Artificial Sequence: Synthetic oligonucleotide
  Antisense strand to SEQ ID NO: 938840
auaacgacuauccuuucuu

SEQ ID NO: 938842 - RNA, 19 nt, Artificial Sequence
  Description of Artificial Sequence: Synthetic oligonucleotide
  Sense strand starting at position 956 of SEQ ID NO: 913588
ugggacuugggccaguuau

SEQ ID NO: 938843 - RNA, 19 nt, Artificial Sequence
  Description of Artificial Sequence: Synthetic oligonucleotide
  Antisense strand to SEQ ID NO: 938842
auaacuggcccaaguccca

SEQ ID NO: 938844 - RNA, 19 nt, Artificial Sequence
  Description of Artificial Sequence: Synthetic oligonucleotide
  Sense strand starting at position 285 of SEQ ID NO: 913588
aagggagauuaugcaguuu

SEQ ID NO: 938845 - RNA, 19 nt, Artificial Sequence
  Description of Artificial Sequence: Synthetic oligonucleotide
  Antisense strand to SEQ ID NO: 938844
aaacugcauaaucucccuu

SEQ ID NO: 938846 - RNA, 19 nt, Artificial Sequence
  Description of Artificial Sequence: Synthetic oligonucleotide
  Sense strand starting at position 1110 of SEQ ID NO: 913588
aaggauagucguuaucauu

SEQ ID NO: 938847 - RNA, 19 nt, Artificial Sequence
  Description of Artificial Sequence: Synthetic oligonucleotide
  Antisense strand to SEQ ID NO: 938846
aaugauaacgacuauccuu

SEQ ID NO: 938848 - RNA, 19 nt, Artificial Sequence
  Description of Artificial Sequence: Synthetic oligonucleotide
  Sense strand starting at position 1631 of SEQ ID NO: 913588
uaagacuuuguuuagguuu

SEQ ID NO: 938849 - RNA, 19 nt, Artificial Sequence
  Description of Artificial Sequence: Synthetic oligonucleotide
  Antisense strand to SEQ ID NO: 938848
aaaccuaaacaaagucuua

SEQ ID NO: 938850 - RNA, 19 nt, Artificial Sequence
  Description of Artificial Sequence: Synthetic oligonucleotide
  Sense strand starting at position 2235 of SEQ ID NO: 913588
guuccaaucuuucuagaga

SEQ ID NO: 938851 - RNA, 19 nt, Artificial Sequence
  Description of Artificial Sequence: Synthetic oligonucleotide
  Antisense strand to SEQ ID NO: 938850
ucucuagaaagauuggaac

SEQ ID NO: 938852 - RNA, 19 nt, Artificial Sequence
  Description of Artificial Sequence: Synthetic oligonucleotide
  Sense strand starting at position 427 of SEQ ID NO: 913588
agacgauuaucuccaggua

SEQ ID NO: 938853 - RNA, 19 nt, Artificial Sequence
  Description of Artificial Sequence: Synthetic oligonucleotide
  Antisense strand to SEQ ID NO: 938852
uaccuggagauaaucgucu

SEQ ID NO: 938854 - RNA, 19 nt, Artificial Sequence
  Description of Artificial Sequence: Synthetic oligonucleotide
  Sense strand starting at position 2824 of SEQ ID NO: 913588
gacauugauuguuuccuga

SEQ ID NO: 938855 - RNA, 19 nt, Artificial Sequence
  Description of Artificial Sequence: Synthetic oligonucleotide
  Antisense strand to SEQ ID NO: 938854
ucaggaaacaaucaauguc

SEQ ID NO: 938856 - RNA, 19 nt, Artificial Sequence
  Description of Artificial Sequence: Synthetic oligonucleotide
  Sense strand starting at position 1284 of SEQ ID NO: 913588
uuuauucuugaggguauua

SEQ ID NO: 938857 - RNA, 19 nt, Artificial Sequence
  Description of Artificial Sequence: Synthetic oligonucleotide
  Antisense strand to SEQ ID NO: 938856
uaauacccucaagaauaaa

SEQ ID NO: 938858 - RNA, 19 nt, Artificial Sequence
  Description of Artificial Sequence: Synthetic oligonucleotide
  Sense strand starting at position 2994 of SEQ ID NO: 913588
uuccaagugcuugaugauu

SEQ ID NO: 938859 - RNA, 19 nt, Artificial Sequence
  Description of Artificial Sequence: Synthetic oligonucleotide
  Antisense strand to SEQ ID NO: 938858
aaucaucaagcacuuggaa

SEQ ID NO: 938860 - RNA, 19 nt, Artificial Sequence
  Description of Artificial Sequence: Synthetic oligonucleotide
  Sense strand starting at position 416 of SEQ ID NO: 913588
uuccuauggcuagacgauu

SEQ ID NO: 938861 - RNA, 19 nt, Artificial Sequence
  Description of Artificial Sequence: Synthetic oligonucleotide
  Antisense strand to SEQ ID NO: 938860
aaucgucuagccauaggaa

SEQ ID NO: 938862 - RNA, 19 nt, Artificial Sequence
  Description of Artificial Sequence: Synthetic oligonucleotide
  Sense strand starting at position 1591 of SEQ ID NO: 913588
ugcacuuauaugugagaga

SEQ ID NO: 938863 - RNA, 19 nt, Artificial Sequence
  Description of Artificial Sequence: Synthetic oligonucleotide
  Antisense strand to SEQ ID NO: 938862
ucucucacauauaagugca

SEQ ID NO: 938864 - RNA, 19 nt, Artificial Sequence
  Description of Artificial Sequence: Synthetic oligonucleotide
  Sense strand starting at position 1295 of SEQ ID NO: 913588
ggguauuauagcuagcuaa

SEQ ID NO: 938865 - RNA, 19 nt, Artificial Sequence
  Description of Artificial Sequence: Synthetic oligonucleotide
  Antisense strand to SEQ ID NO: 938864
uuagcuagcuauaauaccc

SEQ ID NO: 938866 - RNA, 19 nt, Artificial Sequence
  Description of Artificial Sequence: Synthetic oligonucleotide
  Sense strand starting at position 1056 of SEQ ID NO: 913588
ugagaucaugcaugcagga

SEQ ID NO: 938867 - RNA, 19 nt, Artificial Sequence
  Description of Artificial Sequence: Synthetic oligonucleotide
  Antisense strand to SEQ ID NO: 938866
uccugcaugcaugaucuca

SEQ ID NO: 938868 - RNA, 19 nt, Artificial Sequence
  Description of Artificial Sequence: Synthetic oligonucleotide
  Sense strand starting at position 1534 of SEQ ID NO: 913588
gagucugagucccugauga

SEQ ID NO: 938869 - RNA, 19 nt, Artificial Sequence
  Description of Artificial Sequence: Synthetic oligonucleotide
  Antisense strand to SEQ ID NO: 938868
ucaucagggacucagacuc

SEQ ID NO: 938870 - RNA, 19 nt, Artificial Sequence
  Description of Artificial Sequence: Synthetic oligonucleotide
  Sense strand starting at position 2922 of SEQ ID NO: 913588
cauggaggugaaugcuauu

SEQ ID NO: 938871 - RNA, 19 nt, Artificial Sequence
  Description of Artificial Sequence: Synthetic oligonucleotide
  Antisense strand to SEQ ID NO: 938870
aauagcauucaccuccaug

SEQ ID NO: 938872 - RNA, 19 nt, Artificial Sequence
  Description of Artificial Sequence: Synthetic oligonucleotide
  Sense strand starting at position 1026 of SEQ ID NO: 913588
cucuaucacuggguuauca

SEQ ID NO: 938873 - RNA, 19 nt, Artificial Sequence
  Description of Artificial Sequence: Synthetic oligonucleotide
  Antisense strand to SEQ ID NO: 938872
ugauaacccagugauagag

SEQ ID NO: 938874 - RNA, 19 nt, Artificial Sequence
  Description of Artificial Sequence: Synthetic oligonucleotide
  Sense strand starting at position 1109 of SEQ ID NO: 913588
aaaggauagucguuaucau

SEQ ID NO: 938875 - RNA, 19 nt, Artificial Sequence
  Description of Artificial Sequence: Synthetic oligonucleotide
  Antisense strand to SEQ ID NO: 938874
augauaacgacuauccuuu

SEQ ID NO: 938876 - RNA, 19 nt, Artificial Sequence
  Description of Artificial Sequence: Synthetic oligonucleotide
  Sense strand starting at position 1013 of SEQ ID NO: 913588
gggaguaauuagccucuau

SEQ ID NO: 938877 - RNA, 19 nt, Artificial Sequence
  Description of Artificial Sequence: Synthetic oligonucleotide
  Antisense strand to SEQ ID NO: 938876
auagaggcuaauuacuccc

SEQ ID NO: 938878 - RNA, 19 nt, Artificial Sequence
  Description of Artificial Sequence: Synthetic oligonucleotide
  Sense strand starting at position 1672 of SEQ ID NO: 913588
agcccuaacuaauugaguu

SEQ ID NO: 938879 - RNA, 19 nt, Artificial Sequence
  Description of Artificial Sequence: Synthetic oligonucleotide
  Antisense strand to SEQ ID NO: 938878
aacucaauuaguuagggcu

SEQ ID NO: 938880 - RNA, 19 nt, Artificial Sequence
  Description of Artificial Sequence: Synthetic oligonucleotide
  Sense strand starting at position 450 of SEQ ID NO: 913588
gcagcaagauauguauuaa

SEQ ID NO: 938881 - RNA, 19 nt, Artificial Sequence
  Description of Artificial Sequence: Synthetic oligonucleotide
  Antisense strand to SEQ ID NO: 938880
uuaauacauaucuugcugc

SEQ ID NO: 938882 - RNA, 19 nt, Artificial Sequence
  Description of Artificial Sequence: Synthetic oligonucleotide
  Sense strand starting at position 1942 of SEQ ID NO: 913588
agccucuuggcagaugagu

SEQ ID NO: 938883 - RNA, 19 nt, Artificial Sequence
  Description of Artificial Sequence: Synthetic oligonucleotide
  Antisense strand to SEQ ID NO: 938882
acucaucugccaagaggcu

SEQ ID NO: 938884 - RNA, 19 nt, Artificial Sequence
  Description of Artificial Sequence: Synthetic oligonucleotide
  Sense strand starting at position 2342 of SEQ ID NO: 913588
agacuuuacuccuuugguu

SEQ ID NO: 938885 - RNA, 19 nt, Artificial Sequence
  Description of Artificial Sequence: Synthetic oligonucleotide
  Antisense strand to SEQ ID NO: 938884
aaccaaaggaguaaagucu

SEQ ID NO: 938886 - RNA, 19 nt, Artificial Sequence
  Description of Artificial Sequence: Synthetic oligonucleotide
  Sense strand starting at position 3005 of SEQ ID NO: 913588
ugaugauuguaagcccauu

SEQ ID NO: 938887 - RNA, 19 nt, Artificial Sequence
  Description of Artificial Sequence: Synthetic oligonucleotide
  Antisense strand to SEQ ID NO: 938886
aaugggcuuacaaucauca

SEQ ID NO: 938888 - RNA, 19 nt, Artificial Sequence
  Description of Artificial Sequence: Synthetic oligonucleotide
  Sense strand starting at position 2992 of SEQ ID NO: 913588
uauuccaagugcuugauga

SEQ ID NO: 938889 - RNA, 19 nt, Artificial Sequence
  Description of Artificial Sequence: Synthetic oligonucleotide
  Antisense strand to SEQ ID NO: 938888
ucaucaagcacuuggaaua

SEQ ID NO: 938890 - RNA, 19 nt, Artificial Sequence
  Description of Artificial Sequence: Synthetic oligonucleotide
  Sense strand starting at position 430 of SEQ ID NO: 913588
cgauuaucuccagguauua

SEQ ID NO: 938891 - RNA, 19 nt, Artificial Sequence
  Description of Artificial Sequence: Synthetic oligonucleotide
  Antisense strand to SEQ ID NO: 938890
uaauaccuggagauaaucg

SEQ ID NO: 938892 - RNA, 19 nt, Artificial Sequence
  Description of Artificial Sequence: Synthetic oligonucleotide
  Sense strand starting at position 1630 of SEQ ID NO: 913588
cuaagacuuuguuuagguu

SEQ ID NO: 938893 - RNA, 19 nt, Artificial Sequence
  Description of Artificial Sequence: Synthetic oligonucleotide
  Antisense strand to SEQ ID NO: 938892
aaccuaaacaaagucuuag

SEQ ID NO: 938894 - RNA, 19 nt, Artificial Sequence
  Description of Artificial Sequence: Synthetic oligonucleotide
  Sense strand starting at position 1025 of SEQ ID NO: 913588
ccucuaucacuggguuauc

SEQ ID NO: 938895 - RNA, 19 nt, Artificial Sequence
  Description of Artificial Sequence: Synthetic oligonucleotide
  Antisense strand to SEQ ID NO: 938894
gauaacccagugauagagg

SEQ ID NO: 938896 - RNA, 19 nt, Artificial Sequence
  Description of Artificial Sequence: Synthetic oligonucleotide
  Sense strand starting at position 2280 of SEQ ID NO: 913589
uuagaaacaucuguggaau

SEQ ID NO: 938897 - RNA, 19 nt, Artificial Sequence
  Description of Artificial Sequence: Synthetic oligonucleotide
  Antisense strand to SEQ ID NO: 938896
auuccacagauguuucuaa

SEQ ID NO: 938898 - RNA, 19 nt, Artificial Sequence
  Description of Artificial Sequence: Synthetic oligonucleotide
  Sense strand starting at position 2294 of SEQ ID NO: 913589
ggaauuaguagauguagag

SEQ ID NO: 938899 - RNA, 19 nt, Artificial Sequence
  Description of Artificial Sequence: Synthetic oligonucleotide
  Antisense strand to SEQ ID NO: 938898
cucuacaucuacuaauucc

SEQ ID NO: 938900 - RNA, 19 nt, Artificial Sequence
  Description of Artificial Sequence: Synthetic oligonucleotide
  Sense strand starting at position 2281 of SEQ ID NO: 913589
uagaaacaucuguggaauu

SEQ ID NO: 938901 - RNA, 19 nt, Artificial Sequence
  Description of Artificial Sequence: Synthetic oligonucleotide
  Antisense strand to SEQ ID NO: 938900
aauuccacagauguuucua

SEQ ID NO: 938902 - RNA, 19 nt, Artificial Sequence
  Description of Artificial Sequence: Synthetic oligonucleotide
  Sense strand starting at position 2292 of SEQ ID NO: 913589
guggaauuaguagauguag

SEQ ID NO: 938903 - RNA, 19 nt, Artificial Sequence
  Description of Artificial Sequence: Synthetic oligonucleotide
  Antisense strand to SEQ ID NO: 938902
cuacaucuacuaauuccac

SEQ ID NO: 938904 - RNA, 19 nt, Artificial Sequence
  Description of Artificial Sequence: Synthetic oligonucleotide
  Sense strand starting at position 2143 of SEQ ID NO: 913589
gagagaccucugcaaguca

SEQ ID NO: 938905 - RNA, 19 nt, Artificial Sequence
  Description of Artificial Sequence: Synthetic oligonucleotide
  Antisense strand to SEQ ID NO: 938904
ugacuugcagaggucucuc

SEQ ID NO: 938906 - RNA, 19 nt, Artificial Sequence
  Description of Artificial Sequence: Synthetic oligonucleotide
  Sense strand starting at position 3924 of SEQ ID NO: 913589
guuuauauggcguuuggca

SEQ ID NO: 938907 - RNA, 19 nt, Artificial Sequence
  Description of Artificial Sequence: Synthetic oligonucleotide
  Antisense strand to SEQ ID NO: 938906
ugccaaacgccauauaaac

SEQ ID NO: 938908 - RNA, 19 nt, Artificial Sequence
  Description of Artificial Sequence: Synthetic oligonucleotide
  Sense strand starting at position 2256 of SEQ ID NO: 913589
cugggucugacacauagua

SEQ ID NO: 938909 - RNA, 19 nt, Artificial Sequence
  Description of Artificial Sequence: Synthetic oligonucleotide
  Antisense strand to SEQ ID NO: 938908
uacuaugugucagacccag

SEQ ID NO: 938910 - RNA, 19 nt, Artificial Sequence
  Description of Artificial Sequence: Synthetic oligonucleotide
  Sense strand starting at position 2480 of SEQ ID NO: 913589
cucugaauuacggagguca

SEQ ID NO: 938911 - RNA, 19 nt, Artificial Sequence
  Description of Artificial Sequence: Synthetic oligonucleotide
  Antisense strand to SEQ ID NO: 938910
ugaccuccguaauucagag

SEQ ID NO: 938912 - RNA, 19 nt, Artificial Sequence
  Description of Artificial Sequence: Synthetic oligonucleotide
  Sense strand starting at position 2218 of SEQ ID NO: 913589
cucagagaauuugaggauu

SEQ ID NO: 938913 - RNA, 19 nt, Artificial Sequence
  Description of Artificial Sequence: Synthetic oligonucleotide
  Antisense strand to SEQ ID NO: 938912
aauccucaaauucucugag

SEQ ID NO: 938914 - RNA, 19 nt, Artificial Sequence
  Description of Artificial Sequence: Synthetic oligonucleotide
  Sense strand starting at position 2379 of SEQ ID NO: 913589
gcugguuccaaggaugaau

SEQ ID NO: 938915 - RNA, 19 nt, Artificial Sequence
  Description of Artificial Sequence: Synthetic oligonucleotide
  Antisense strand to SEQ ID NO: 938914
auucauccuuggaaccagc

SEQ ID NO: 938916 - RNA, 19 nt, Artificial Sequence
  Description of Artificial Sequence: Synthetic oligonucleotide
  Sense strand starting at position 1694 of SEQ ID NO: 913589
agagcuauuucuccuuguu

SEQ ID NO: 938917 - RNA, 19 nt, Artificial Sequence
  Description of Artificial Sequence: Synthetic oligonucleotide
  Antisense strand to SEQ ID NO: 938916
aacaaggagaaauagcucu

SEQ ID NO: 938918 - RNA, 19 nt, Artificial Sequence
  Description of Artificial Sequence: Synthetic oligonucleotide
  Sense strand starting at position 3039 of SEQ ID NO: 913589
gcuaacugucaucagaaac

SEQ ID NO: 938919 - RNA, 19 nt, Artificial Sequence
  Description of Artificial Sequence: Synthetic oligonucleotide
  Antisense strand to SEQ ID NO: 938918
guuucugaugacaguuagc

SEQ ID NO: 938920 - RNA, 19 nt, Artificial Sequence
  Description of Artificial Sequence: Synthetic oligonucleotide
  Sense strand starting at position 206 of SEQ ID NO: 913589
uugaguguugcagagaaag

SEQ ID NO: 938921 - RNA, 19 nt, Artificial Sequence
  Description of Artificial Sequence: Synthetic oligonucleotide
  Antisense strand to SEQ ID NO: 938920
cuuucucugcaacacucaa

SEQ ID NO: 938922 - RNA, 19 nt, Artificial Sequence
  Description of Artificial Sequence: Synthetic oligonucleotide
  Sense strand starting at position 1546 of SEQ ID NO: 913589
uggaaauguuuccuggaac

SEQ ID NO: 938923 - RNA, 19 nt, Artificial Sequence
  Description of Artificial Sequence: Synthetic oligonucleotide
  Antisense strand to SEQ ID NO: 938922
guuccaggaaacauuucca

SEQ ID NO: 938924 - RNA, 19 nt, Artificial Sequence
  Description of Artificial Sequence: Synthetic oligonucleotide
  Sense strand starting at position 1545 of SEQ ID NO: 913589
cuggaaauguuuccuggaa

SEQ ID NO: 938925 - RNA, 19 nt, Artificial Sequence
  Description of Artificial Sequence: Synthetic oligonucleotide
  Antisense strand to SEQ ID NO: 938924
uuccaggaaacauuuccag

SEQ ID NO: 938926 - RNA, 19 nt, Artificial Sequence
  Description of Artificial Sequence: Synthetic oligonucleotide
  Sense strand starting at position 2269 of SEQ ID NO: 913589
auaguaggugcuuagaaac

SEQ ID NO: 938927 - RNA, 19 nt, Artificial Sequence
  Description of Artificial Sequence: Synthetic oligonucleotide
  Antisense strand to SEQ ID NO: 938926
guuucuaagcaccuacuau

SEQ ID NO: 938928 - RNA, 19 nt, Artificial Sequence
  Description of Artificial Sequence: Synthetic oligonucleotide
  Sense strand starting at position 2942 of SEQ ID NO: 913589
auggcuaacuucucagaag

SEQ ID NO: 938929 - RNA, 19 nt, Artificial Sequence
  Description of Artificial Sequence: Synthetic oligonucleotide
  Antisense strand to SEQ ID NO: 938928
cuucugagaaguuagccau

SEQ ID NO: 938930 - RNA, 19 nt, Artificial Sequence
  Description of Artificial Sequence: Synthetic oligonucleotide
  Sense strand starting at position 2220 of SEQ ID NO: 913589
cagagaauuugaggauuag

SEQ ID NO: 938931 - RNA, 19 nt, Artificial Sequence
  Description of Artificial Sequence: Synthetic oligonucleotide
  Antisense strand to SEQ ID NO: 938930
cuaauccucaaauucucug

SEQ ID NO: 938932 - RNA, 19 nt, Artificial Sequence
  Description of Artificial Sequence: Synthetic oligonucleotide
  Sense strand starting at position 2470 of SEQ ID NO: 913589
uuggaugagucucugaauu

SEQ ID NO: 938933 - RNA, 19 nt, Artificial Sequence
  Description of Artificial Sequence: Synthetic oligonucleotide
  Antisense strand to SEQ ID NO: 938932
aauucagagacucauccaa

SEQ ID NO: 938934 - RNA, 19 nt, Artificial Sequence
  Description of Artificial Sequence: Synthetic oligonucleotide
  Sense strand starting at position 2388 of SEQ ID NO: 913589
aaggaugaaugauagaaag

SEQ ID NO: 938935 - RNA, 19 nt, Artificial Sequence
  Description of Artificial Sequence: Synthetic oligonucleotide
  Antisense strand to SEQ ID NO: 938934
cuuucuaucauucauccuu

SEQ ID NO: 938936 - RNA, 19 nt, Artificial Sequence
  Description of Artificial Sequence: Synthetic oligonucleotide
  Sense strand starting at position 3141 of SEQ ID NO: 913589
gcugguuaucagcaagaga

SEQ ID NO: 938937 - RNA, 19 nt, Artificial Sequence
  Description of Artificial Sequence: Synthetic oligonucleotide
  Antisense strand to SEQ ID NO: 938936
ucucuugcugauaaccagc

SEQ ID NO: 938938 - RNA, 19 nt, Artificial Sequence
  Description of Artificial Sequence: Synthetic oligonucleotide
  Sense strand starting at position 170 of SEQ ID NO: 913589
gcagacaucuagguaccaa

SEQ ID NO: 938939 - RNA, 19 nt, Artificial Sequence
  Description of Artificial Sequence: Synthetic oligonucleotide
  Antisense strand to SEQ ID NO: 938938
uugguaccuagaugucugc

SEQ ID NO: 938940 - RNA, 19 nt, Artificial Sequence
  Description of Artificial Sequence: Synthetic oligonucleotide
  Sense strand starting at position 3038 of SEQ ID NO: 913589
ggcuaacugucaucagaaa

SEQ ID NO: 938941 - RNA, 19 nt, Artificial Sequence
  Description of Artificial Sequence: Synthetic oligonucleotide
  Antisense strand to SEQ ID NO: 938940
uuucugaugacaguuagcc

SEQ ID NO: 938942 - RNA, 19 nt, Artificial Sequence
  Description of Artificial Sequence: Synthetic oligonucleotide
  Sense strand starting at position 324 of SEQ ID NO: 913589
aggaaucggguucgacaaa

SEQ ID NO: 938943 - RNA, 19 nt, Artificial Sequence
  Description of Artificial Sequence: Synthetic oligonucleotide
  Antisense strand to SEQ ID NO: 938942
uuugucgaacccgauuccu

SEQ ID NO: 938944 - RNA, 19 nt, Artificial Sequence
  Description of Artificial Sequence: Synthetic oligonucleotide
  Sense strand starting at position 3938 of SEQ ID NO: 913589
uggcauagacacugucaaa

SEQ ID NO: 938945 - RNA, 19 nt, Artificial Sequence
  Description of Artificial Sequence: Synthetic oligonucleotide
  Antisense strand to SEQ ID NO: 938944
uuugacagugucuaugcca

SEQ ID NO: 938946 - RNA, 19 nt, Artificial Sequence
  Description of Artificial Sequence: Synthetic oligonucleotide
  Sense strand starting at position 3527 of SEQ ID NO: 913589
ggaauaucaguuugcaaua

SEQ ID NO: 938947 - RNA, 19 nt, Artificial Sequence
  Description of Artificial Sequence: Synthetic oligonucleotide
  Antisense strand to SEQ ID NO: 938946
uauugcaaacugauauucc

SEQ ID NO: 938948 - RNA, 19 nt, Artificial Sequence
  Description of Artificial Sequence: Synthetic oligonucleotide
  Sense strand starting at position 2934 of SEQ ID NO: 913589
uagugaagauggcuaacuu

SEQ ID NO: 938949 - RNA, 19 nt, Artificial Sequence
  Description of Artificial Sequence: Synthetic oligonucleotide
  Antisense strand to SEQ ID NO: 938948
aaguuagccaucuucacua

SEQ ID NO: 938950 - RNA, 19 nt, Artificial Sequence
  Description of Artificial Sequence: Synthetic oligonucleotide
  Sense strand starting at position 3516 of SEQ ID NO: 913589
agauuuggguuggaauauc

SEQ ID NO: 938951 - RNA, 19 nt, Artificial Sequence
  Description of Artificial Sequence: Synthetic oligonucleotide
  Antisense strand to SEQ ID NO: 938950
gauauuccaacccaaaucu

SEQ ID NO: 938952 - RNA, 19 nt, Artificial Sequence
  Description of Artificial Sequence: Synthetic oligonucleotide
  Sense strand starting at position 2331 of SEQ ID NO: 913589
gguucugaggacugaguua

SEQ ID NO: 938953 - RNA, 19 nt, Artificial Sequence
  Description of Artificial Sequence: Synthetic oligonucleotide
  Antisense strand to SEQ ID NO: 938952
uaacucaguccucagaacc

SEQ ID NO: 938954 - RNA, 19 nt, Artificial Sequence
  Description of Artificial Sequence: Synthetic oligonucleotide
  Sense strand starting at position 2141 of SEQ ID NO: 913589
cagagagaccucugcaagu

SEQ ID NO: 938955 - RNA, 19 nt, Artificial Sequence
  Description of Artificial Sequence: Synthetic oligonucleotide
  Antisense strand to SEQ ID NO: 938954
acuugcagaggucucucug

SEQ ID NO: 938956 - RNA, 19 nt, Artificial Sequence
  Description of Artificial Sequence: Synthetic oligonucleotide
  Sense strand starting at position 169 of SEQ ID NO: 913589
ggcagacaucuagguacca

SEQ ID NO: 938957 - RNA, 19 nt, Artificial Sequence
  Description of Artificial Sequence: Synthetic oligonucleotide
  Antisense strand to SEQ ID NO: 938956
ugguaccuagaugucugcc

SEQ ID NO: 938958 - RNA, 19 nt, Artificial Sequence
  Description of Artificial Sequence: Synthetic oligonucleotide
  Sense strand starting at position 3063 of SEQ ID NO: 913589
gagggagauuccucugccu

SEQ ID NO: 938959 - RNA, 19 nt, Artificial Sequence
  Description of Artificial Sequence: Synthetic oligonucleotide
  Antisense strand to SEQ ID NO: 938958
aggcagaggaaucucccuc

SEQ ID NO: 938960 - RNA, 19 nt, Artificial Sequence
  Description of Artificial Sequence: Synthetic oligonucleotide
  Sense strand starting at position 3068 of SEQ ID NO: 913589
agauuccucugccuauaag

SEQ ID NO: 938961 - RNA, 19 nt, Artificial Sequence
  Description of Artificial Sequence: Synthetic oligonucleotide
  Antisense strand to SEQ ID NO: 938960
cuuauaggcagaggaaucu

SEQ ID NO: 938962 - RNA, 19 nt, Artificial Sequence
  Description of Artificial Sequence: Synthetic oligonucleotide
  Sense strand starting at position 3066 of SEQ ID NO: 913589
ggagauuccucugccuaua

SEQ ID NO: 938963 - RNA, 19 nt, Artificial Sequence
  Description of Artificial Sequence: Synthetic oligonucleotide
  Antisense strand to SEQ ID NO: 938962
uauaggcagaggaaucucc

SEQ ID NO: 938964 - RNA, 19 nt, Artificial Sequence
  Description of Artificial Sequence: Synthetic oligonucleotide
  Sense strand starting at position 3898 of SEQ ID NO: 913589
gccuuagcacaaggauuaa

SEQ ID NO: 938965 - RNA, 19 nt, Artificial Sequence
  Description of Artificial Sequence: Synthetic oligonucleotide
  Antisense strand to SEQ ID NO: 938964
uuaauccuugugcuaaggc

SEQ ID NO: 938966 - RNA, 19 nt, Artificial Sequence
  Description of Artificial Sequence: Synthetic oligonucleotide
  Sense strand starting at position 3532 of SEQ ID NO: 913589
aucaguuugcaauauguca

SEQ ID NO: 938967 - RNA, 19 nt, Artificial Sequence
  Description of Artificial Sequence: Synthetic oligonucleotide
  Antisense strand to SEQ ID NO: 938966
ugacauauugcaaacugau

SEQ ID NO: 938968 - RNA, 19 nt, Artificial Sequence
  Description of Artificial Sequence: Synthetic oligonucleotide
  Sense strand starting at position 351 of SEQ ID NO: 913589
gcacuaagcagaggacuuu

SEQ ID NO: 938969 - RNA, 19 nt, Artificial Sequence
  Description of Artificial Sequence: Synthetic oligonucleotide
  Antisense strand to SEQ ID NO: 938968
aaaguccucugcuuagugc

SEQ ID NO: 938970 - RNA, 19 nt, Artificial Sequence
  Description of Artificial Sequence: Synthetic oligonucleotide
  Sense strand starting at position 1532 of SEQ ID NO: 913589
cuugacaguuguccuggaa

SEQ ID NO: 938971 - RNA, 19 nt, Artificial Sequence
  Description of Artificial Sequence: Synthetic oligonucleotide
  Antisense strand to SEQ ID NO: 938970
uuccaggacaacugucaag

SEQ ID NO: 938972 - RNA, 19 nt, Artificial Sequence
  Description of Artificial Sequence: Synthetic oligonucleotide
  Sense strand starting at position 3065 of SEQ ID NO: 913589
gggagauuccucugccuau

SEQ ID NO: 938973 - RNA, 19 nt, Artificial Sequence
  Description of Artificial Sequence: Synthetic oligonucleotide
  Antisense strand to SEQ ID NO: 938972
auaggcagaggaaucuccc

SEQ ID NO: 938974 - RNA, 19 nt, Artificial Sequence
  Description of Artificial Sequence: Synthetic oligonucleotide
  Sense strand starting at position 3511 of SEQ ID NO: 913589
uagagagauuuggguugga

SEQ ID NO: 938975 - RNA, 19 nt, Artificial Sequence
  Description of Artificial Sequence: Synthetic oligonucleotide
  Antisense strand to SEQ ID NO: 938974
uccaacccaaaucucucua

SEQ ID NO: 938976 - RNA, 19 nt, Artificial Sequence
  Description of Artificial Sequence: Synthetic oligonucleotide
  Sense strand starting at position 130 of SEQ ID NO: 913590
ccuagagggcucugagaga

SEQ ID NO: 938977 - RNA, 19 nt, Artificial Sequence
  Description of Artificial Sequence: Synthetic oligonucleotide
  Antisense strand to SEQ ID NO: 938976
ucucucagagcccucuagg

SEQ ID NO: 938978 - RNA, 19 nt, Artificial Sequence
  Description of Artificial Sequence: Synthetic oligonucleotide
  Sense strand starting at position 3918 of SEQ ID NO: 913590
ggguaacuucccuacggga

SEQ ID NO: 938979 - RNA, 19 nt, Artificial Sequence
  Description of Artificial Sequence: Synthetic oligonucleotide
  Antisense strand to SEQ ID NO: 938978
ucccguagggaaguuaccc

SEQ ID NO: 938980 - RNA, 19 nt, Artificial Sequence
  Description of Artificial Sequence: Synthetic oligonucleotide
  Sense strand starting at position 2016 of SEQ ID NO: 913590
agguucugcccagaacaca

SEQ ID NO: 938981 - RNA, 19 nt, Artificial Sequence
  Description of Artificial Sequence: Synthetic oligonucleotide
  Antisense strand to SEQ ID NO: 938980
uguguucugggcagaaccu

SEQ ID NO: 938982 - RNA, 19 nt, Artificial Sequence
  Description of Artificial Sequence: Synthetic oligonucleotide
  Sense strand starting at position 247 of SEQ ID NO: 913590
agaccucaucgauaugguu

SEQ ID NO: 938983 - RNA, 19 nt, Artificial Sequence
  Description of Artificial Sequence: Synthetic oligonucleotide
  Antisense strand to SEQ ID NO: 938982
aaccauaucgaugaggucu

SEQ ID NO: 938984 - RNA, 19 nt, Artificial Sequence
  Description of Artificial Sequence: Synthetic oligonucleotide
  Sense strand starting at position 41 of SEQ ID NO: 913590
auucuaguuccacaguuaa

SEQ ID NO: 938985 - RNA, 19 nt, Artificial Sequence
  Description of Artificial Sequence: Synthetic oligonucleotide
  Antisense strand to SEQ ID NO: 938984
uuaacuguggaacuagaau

SEQ ID NO: 938986 - RNA, 19 nt, Artificial Sequence
  Description of Artificial Sequence: Synthetic oligonucleotide
  Sense strand starting at position 2174 of SEQ ID NO: 913590
ucuguuugggauugaagac

SEQ ID NO: 938987 - RNA, 19 nt, Artificial Sequence
  Description of Artificial Sequence: Synthetic oligonucleotide
  Antisense strand to SEQ ID NO: 938986
gucuucaaucccaaacaga

SEQ ID NO: 938988 - RNA, 19 nt, Artificial Sequence
  Description of Artificial Sequence: Synthetic oligonucleotide
  Sense strand starting at position 3772 of SEQ ID NO: 913590
gugagaauuccauguaaua

SEQ ID NO: 938989 - RNA, 19 nt, Artificial Sequence
  Description of Artificial Sequence: Synthetic oligonucleotide
  Antisense strand to SEQ ID NO: 938988
uauuacauggaauucucac

SEQ ID NO: 938990 - RNA, 19 nt, Artificial Sequence
  Description of Artificial Sequence: Synthetic oligonucleotide
  Sense strand starting at position 1446 of SEQ ID NO: 913590
uccagagaguggucacuaa

SEQ ID NO: 938991 - RNA, 19 nt, Artificial Sequence
  Description of Artificial Sequence: Synthetic oligonucleotide
  Antisense strand to SEQ ID NO: 938990
uuagugaccacucucugga

SEQ ID NO: 938992 - RNA, 19 nt, Artificial Sequence
  Description of Artificial Sequence: Synthetic oligonucleotide
  Sense strand starting at position 3824 of SEQ ID NO: 913590
uaugguagaugcccaauaa

SEQ ID NO: 938993 - RNA, 19 nt, Artificial Sequence
  Description of Artificial Sequence: Synthetic oligonucleotide
  Antisense strand to SEQ ID NO: 938992
uuauugggcaucuaccaua

SEQ ID NO: 938994 - RNA, 19 nt, Artificial Sequence
  Description of Artificial Sequence: Synthetic oligonucleotide
  Sense strand starting at position 917 of SEQ ID NO: 913590
aggacugugaacugguauu

SEQ ID NO: 938995 - RNA, 19 nt, Artificial Sequence
  Description of Artificial Sequence: Synthetic oligonucleotide
  Antisense strand to SEQ ID NO: 938994
aauaccaguucacaguccu

SEQ ID NO: 938996 - RNA, 19 nt, Artificial Sequence
  Description of Artificial Sequence: Synthetic oligonucleotide
  Sense strand starting at position 721 of SEQ ID NO: 913590
ccuaaaucagcuuggacuu

SEQ ID NO: 938997 - RNA, 19 nt, Artificial Sequence
  Description of Artificial Sequence: Synthetic oligonucleotide
  Antisense strand to SEQ ID NO: 938996
aaguccaagcugauuuagg

SEQ ID NO: 938998 - RNA, 19 nt, Artificial Sequence
  Description of Artificial Sequence: Synthetic oligonucleotide
  Sense strand starting at position 1303 of SEQ ID NO: 913590
ugggauaucuguuccuauu

SEQ ID NO: 938999 - RNA, 19 nt, Artificial Sequence
  Description of Artificial Sequence: Synthetic oligonucleotide
  Antisense strand to SEQ ID NO: 938998
aauaggaacagauauccca

SEQ ID NO: 939000 - RNA, 19 nt, Artificial Sequence
  Description of Artificial Sequence: Synthetic oligonucleotide
  Sense strand starting at position 894 of SEQ ID NO: 913590
agccuaucuccagguaaga

SEQ ID NO: 939001 - RNA, 19 nt, Artificial Sequence
  Description of Artificial Sequence: Synthetic oligonucleotide
  Antisense strand to SEQ ID NO: 939000
ucuuaccuggagauaggcu

SEQ ID NO: 939002 - RNA, 19 nt, Artificial Sequence
  Description of Artificial Sequence: Synthetic oligonucleotide
  Sense strand starting at position 3920 of SEQ ID NO: 913590
guaacuucccuacgggaca

SEQ ID NO: 939003 - RNA, 19 nt, Artificial Sequence
  Description of Artificial Sequence: Synthetic oligonucleotide
  Antisense strand to SEQ ID NO: 939002
ugucccguagggaaguuac

SEQ ID NO: 939004 - RNA, 19 nt, Artificial Sequence
  Description of Artificial Sequence: Synthetic oligonucleotide
  Sense strand starting at position 2014 of SEQ ID NO: 913590
gcagguucugcccagaaca

SEQ ID NO: 939005 - RNA, 19 nt, Artificial Sequence
  Description of Artificial Sequence: Synthetic oligonucleotide
  Antisense strand to SEQ ID NO: 939004
uguucugggcagaaccugc

SEQ ID NO: 939006 - RNA, 19 nt, Artificial Sequence
  Description of Artificial Sequence: Synthetic oligonucleotide
  Sense strand starting at position 830 of SEQ ID NO: 913590
ugcuacuuccaguacucau

SEQ ID NO: 939007 - RNA, 19 nt, Artificial Sequence
  Description of Artificial Sequence: Synthetic oligonucleotide
  Antisense strand to SEQ ID NO: 939006
augaguacuggaaguagca

SEQ ID NO: 939008 - RNA, 19 nt, Artificial Sequence
  Description of Artificial Sequence: Synthetic oligonucleotide
  Sense strand starting at position 244 of SEQ ID NO: 913590
gccagaccucaucgauaug

SEQ ID NO: 939009 - RNA, 19 nt, Artificial Sequence
  Description of Artificial Sequence: Synthetic oligonucleotide
  Antisense strand to SEQ ID NO: 939008
cauaucgaugaggucuggc

SEQ ID NO: 939010 - RNA, 19 nt, Artificial Sequence
  Description of Artificial Sequence: Synthetic oligonucleotide
  Sense strand starting at position 2187 of SEQ ID NO: 913590
gaagaccguugguuccaua

SEQ ID NO: 939011 - RNA, 19 nt, Artificial Sequence
  Description of Artificial Sequence: Synthetic oligonucleotide
  Antisense strand to SEQ ID NO: 939010
uauggaaccaacggucuuc

SEQ ID NO: 939012 - RNA, 19 nt, Artificial Sequence
  Description of Artificial Sequence: Synthetic oligonucleotide
  Sense strand starting at position 2167 of SEQ ID NO: 913590
cuugguaucuguuugggau

SEQ ID NO: 939013 - RNA, 19 nt, Artificial Sequence
  Description of Artificial Sequence: Synthetic oligonucleotide
  Antisense strand to SEQ ID NO: 939012
aucccaaacagauaccaag

SEQ ID NO: 939014 - RNA, 19 nt, Artificial Sequence
  Description of Artificial Sequence: Synthetic oligonucleotide
  Sense strand starting at position 2039 of SEQ ID NO: 913590
cugugaagcggcuagaauu

SEQ ID NO: 939015 - RNA, 19 nt, Artificial Sequence
  Description of Artificial Sequence: Synthetic oligonucleotide
  Antisense strand to SEQ ID NO: 939014
aauucuagccgcuucacag

SEQ ID NO: 939016 - RNA, 19 nt, Artificial Sequence
  Description of Artificial Sequence: Synthetic oligonucleotide
  Sense strand starting at position 3837 of SEQ ID NO: 913590
caauaaauggcacgucuua

SEQ ID NO: 939017 - RNA, 19 nt, Artificial Sequence
  Description of Artificial Sequence: Synthetic oligonucleotide
  Antisense strand to SEQ ID NO: 939016
uaagacgugccauuuauug

SEQ ID NO: 939018 - RNA, 19 nt, Artificial Sequence
  Description of Artificial Sequence: Synthetic oligonucleotide
  Sense strand starting at position 2168 of SEQ ID NO: 913590
uugguaucuguuugggauu

SEQ ID NO: 939019 - RNA, 19 nt, Artificial Sequence
  Description of Artificial Sequence: Synthetic oligonucleotide
  Antisense strand to SEQ ID NO: 939018
aaucccaaacagauaccaa

SEQ ID NO: 939020 - RNA, 19 nt, Artificial Sequence
  Description of Artificial Sequence: Synthetic oligonucleotide
  Sense strand starting at position 1371 of SEQ ID NO: 913590
agccauacggcucaugagu

SEQ ID NO: 939021 - RNA, 19 nt, Artificial Sequence
  Description of Artificial Sequence: Synthetic oligonucleotide
  Antisense strand to SEQ ID NO: 939020
acucaugagccguauggcu

SEQ ID NO: 939022 - RNA, 19 nt, Artificial Sequence
  Description of Artificial Sequence: Synthetic oligonucleotide
  Sense strand starting at position 640 of SEQ ID NO: 913590
cugagcugcagauguauga

SEQ ID NO: 939023 - RNA, 19 nt, Artificial Sequence
  Description of Artificial Sequence: Synthetic oligonucleotide
  Antisense strand to SEQ ID NO: 939022
ucauacaucugcagcucag

SEQ ID NO: 939024 - RNA, 19 nt, Artificial Sequence
  Description of Artificial Sequence: Synthetic oligonucleotide
  Sense strand starting at position 1289 of SEQ ID NO: 913590
ugaugucucacucguggga

SEQ ID NO: 939025 - RNA, 19 nt, Artificial Sequence
  Description of Artificial Sequence: Synthetic oligonucleotide
  Antisense strand to SEQ ID NO: 939024
ucccacgagugagacauca

SEQ ID NO: 939026 - RNA, 19 nt, Artificial Sequence
  Description of Artificial Sequence: Synthetic oligonucleotide
  Sense strand starting at position 2049 of SEQ ID NO: 913590
gcuagaauuccaggugcug

SEQ ID NO: 939027 - RNA, 19 nt, Artificial Sequence
  Description of Artificial Sequence: Synthetic oligonucleotide
  Antisense strand to SEQ ID NO: 939026
cagcaccuggaauucuagc

SEQ ID NO: 939028 - RNA, 19 nt, Artificial Sequence
  Description of Artificial Sequence: Synthetic oligonucleotide
  Sense strand starting at position 1292 of SEQ ID NO: 913590
ugucucacucgugggauau

SEQ ID NO: 939029 - RNA, 19 nt, Artificial Sequence
  Description of Artificial Sequence: Synthetic oligonucleotide
  Antisense strand to SEQ ID NO: 939028
auaucccacgagugagaca

SEQ ID NO: 939030 - RNA, 19 nt, Artificial Sequence
  Description of Artificial Sequence: Synthetic oligonucleotide
  Sense strand starting at position 1293 of SEQ ID NO: 913590
gucucacucgugggauauc

SEQ ID NO: 939031 - RNA, 19 nt, Artificial Sequence
  Description of Artificial Sequence: Synthetic oligonucleotide
  Antisense strand to SEQ ID NO: 939030
gauaucccacgagugagac

SEQ ID NO: 939032 - RNA, 19 nt, Artificial Sequence
  Description of Artificial Sequence: Synthetic oligonucleotide
  Sense strand starting at position 207 of SEQ ID NO: 913590
gugggucuuacucacgcau

SEQ ID NO: 939033 - RNA, 19 nt, Artificial Sequence
  Description of Artificial Sequence: Synthetic oligonucleotide
  Antisense strand to SEQ ID NO: 939032
augcgugaguaagacccac

SEQ ID NO: 939034 - RNA, 19 nt, Artificial Sequence
  Description of Artificial Sequence: Synthetic oligonucleotide
  Sense strand starting at position 2636 of SEQ ID NO: 913590
ggccaaugggugugucaca

SEQ ID NO: 939035 - RNA, 19 nt, Artificial Sequence
  Description of Artificial Sequence: Synthetic oligonucleotide
  Antisense strand to SEQ ID NO: 939034
ugugacacacccauuggcc

SEQ ID NO: 939036 - RNA, 19 nt, Artificial Sequence
  Description of Artificial Sequence: Synthetic oligonucleotide
  Sense strand starting at position 1599 of SEQ ID NO: 913590
caggcaucugcuggcugaa

SEQ ID NO: 939037 - RNA, 19 nt, Artificial Sequence
  Description of Artificial Sequence: Synthetic oligonucleotide
  Antisense strand to SEQ ID NO: 939036
uucagccagcagaugccug

SEQ ID NO: 939038 - RNA, 19 nt, Artificial Sequence
  Description of Artificial Sequence: Synthetic oligonucleotide
  Sense strand starting at position 696 of SEQ ID NO: 913590
ggcacuagucagugcagau

SEQ ID NO: 939039 - RNA, 19 nt, Artificial Sequence
  Description of Artificial Sequence: Synthetic oligonucleotide
  Antisense strand to SEQ ID NO: 939038
aucugcacugacuagugcc

SEQ ID NO: 939040 - RNA, 19 nt, Artificial Sequence
  Description of Artificial Sequence: Synthetic oligonucleotide
  Sense strand starting at position 36 of SEQ ID NO: 913590
ugugcauucuaguuccaca

SEQ ID NO: 939041 - RNA, 19 nt, Artificial Sequence
  Description of Artificial Sequence: Synthetic oligonucleotide
  Antisense strand to SEQ ID NO: 939040
uguggaacuagaaugcaca

SEQ ID NO: 939042 - RNA, 19 nt, Artificial Sequence
  Description of Artificial Sequence: Synthetic oligonucleotide
  Sense strand starting at position 3844 of SEQ ID NO: 913590
uggcacgucuuacuauuau

SEQ ID NO: 939043 - RNA, 19 nt, Artificial Sequence
  Description of Artificial Sequence: Synthetic oligonucleotide
  Antisense strand to SEQ ID NO: 939042
auaauaguaagacgugcca

SEQ ID NO: 939044 - RNA, 19 nt, Artificial Sequence
  Description of Artificial Sequence: Synthetic oligonucleotide
  Sense strand starting at position 927 of SEQ ID NO: 913590
acugguauuuguuagcaac

SEQ ID NO: 939045 - RNA, 19 nt, Artificial Sequence
  Description of Artificial Sequence: Synthetic oligonucleotide
  Antisense strand to SEQ ID NO: 939044
guugcuaacaaauaccagu

SEQ ID NO: 939046 - RNA, 19 nt, Artificial Sequence
  Description of Artificial Sequence: Synthetic oligonucleotide
  Sense strand starting at position 677 of SEQ ID NO: 913590
cuuggaguucccuguuugu

SEQ ID NO: 939047 - RNA, 19 nt, Artificial Sequence
  Description of Artificial Sequence: Synthetic oligonucleotide
  Antisense strand to SEQ ID NO: 939046
acaaacagggaacuccaag

SEQ ID NO: 939048 - RNA, 19 nt, Artificial Sequence
  Description of Artificial Sequence: Synthetic oligonucleotide
  Sense strand starting at position 1690 of SEQ ID NO: 913590
gguccugucuuugcuaacu

SEQ ID NO: 939049 - RNA, 19 nt, Artificial Sequence
  Description of Artificial Sequence: Synthetic oligonucleotide
  Antisense strand to SEQ ID NO: 939048
aguuagcaaagacaggacc

SEQ ID NO: 939050 - RNA, 19 nt, Artificial Sequence
  Description of Artificial Sequence: Synthetic oligonucleotide
  Sense strand starting at position 733 of SEQ ID NO: 913590
uggacuuuguagggaugaa

SEQ ID NO: 939051 - RNA, 19 nt, Artificial Sequence
  Description of Artificial Sequence: Synthetic oligonucleotide
  Antisense strand to SEQ ID NO: 939050
uucaucccuacaaagucca

SEQ ID NO: 939052 - RNA, 19 nt, Artificial Sequence
  Description of Artificial Sequence: Synthetic oligonucleotide
  Sense strand starting at position 3770 of SEQ ID NO: 913590
cugugagaauuccauguaa

SEQ ID NO: 939053 - RNA, 19 nt, Artificial Sequence
  Description of Artificial Sequence: Synthetic oligonucleotide
  Antisense strand to SEQ ID NO: 939052
uuacauggaauucucacag

SEQ ID NO: 939054 - RNA, 19 nt, Artificial Sequence
  Description of Artificial Sequence: Synthetic oligonucleotide
  Sense strand starting at position 2171 of SEQ ID NO: 913590
guaucuguuugggauugaa

SEQ ID NO: 939055 - RNA, 19 nt, Artificial Sequence
  Description of Artificial Sequence: Synthetic oligonucleotide
  Antisense strand to SEQ ID NO: 939054
uucaaucccaaacagauac

SEQ ID NO: 939056 - RNA, 19 nt, Artificial Sequence
  Description of Artificial Sequence: Synthetic oligonucleotide
  Sense strand starting at position 1994 of SEQ ID NO: 913591
gaaugagugccguccguga

SEQ ID NO: 939057 - RNA, 19 nt, Artificial Sequence
  Description of Artificial Sequence: Synthetic oligonucleotide
  Antisense strand to SEQ ID NO: 939056
ucacggacggcacucauuc

SEQ ID NO: 939058 - RNA, 19 nt, Artificial Sequence
  Description of Artificial Sequence: Synthetic oligonucleotide
  Sense strand starting at position 2854 of SEQ ID NO: 913591
uuaucuauggaucaaguuu

SEQ ID NO: 939059 - RNA, 19 nt, Artificial Sequence
  Description of Artificial Sequence: Synthetic oligonucleotide
  Antisense strand to SEQ ID NO: 939058
aaacuugauccauagauaa

SEQ ID NO: 939060 - RNA, 19 nt, Artificial Sequence
  Description of Artificial Sequence: Synthetic oligonucleotide
  Sense strand starting at position 3889 of SEQ ID NO: 913591
acaagauccggauagcauu

SEQ ID NO: 939061 - RNA, 19 nt, Artificial Sequence
  Description of Artificial Sequence: Synthetic oligonucleotide
  Antisense strand to SEQ ID NO: 939060
aaugcuauccggaucuugu

SEQ ID NO: 939062 - RNA, 19 nt, Artificial Sequence
  Description of Artificial Sequence: Synthetic oligonucleotide
  Sense strand starting at position 3939 of SEQ ID NO: 913591
aucggugcuuuauuugaga

SEQ ID NO: 939063 - RNA, 19 nt, Artificial Sequence
  Description of Artificial Sequence: Synthetic oligonucleotide
  Antisense strand to SEQ ID NO: 939062
ucucaaauaaagcaccgau

SEQ ID NO: 939064 - RNA, 19 nt, Artificial Sequence
  Description of Artificial Sequence: Synthetic oligonucleotide
  Sense strand starting at position 1036 of SEQ ID NO: 913591
cgaagcucgcgucuggaaa

SEQ ID NO: 939065 - RNA, 19 nt, Artificial Sequence
  Description of Artificial Sequence: Synthetic oligonucleotide
  Antisense strand to SEQ ID NO: 939064
uuuccagacgcgagcuucg

SEQ ID NO: 939066 - RNA, 19 nt, Artificial Sequence
  Description of Artificial Sequence: Synthetic oligonucleotide
  Sense strand starting at position 3871 of SEQ ID NO: 913591
gagggaucuuacucaguga

SEQ ID NO: 939067 - RNA, 19 nt, Artificial Sequence
  Description of Artificial Sequence: Synthetic oligonucleotide
  Antisense strand to SEQ ID NO: 939066
ucacugaguaagaucccuc

SEQ ID NO: 939068 - RNA, 19 nt, Artificial Sequence
  Description of Artificial Sequence: Synthetic oligonucleotide
  Sense strand starting at position 770 of SEQ ID NO: 913591
ggaugugagcuccaaacug

SEQ ID NO: 939069 - RNA, 19 nt, Artificial Sequence
  Description of Artificial Sequence: Synthetic oligonucleotide
  Antisense strand to SEQ ID NO: 939068
caguuuggagcucacaucc

SEQ ID NO: 939070 - RNA, 19 nt, Artificial Sequence
  Description of Artificial Sequence: Synthetic oligonucleotide
  Sense strand starting at position 3934 of SEQ ID NO: 913591
gcgggaucggugcuuuauu

SEQ ID NO: 939071 - RNA, 19 nt, Artificial Sequence
  Description of Artificial Sequence: Synthetic oligonucleotide
  Antisense strand to SEQ ID NO: 939070
aauaaagcaccgaucccgc

SEQ ID NO: 939072 - RNA, 19 nt, Artificial Sequence
  Description of Artificial Sequence: Synthetic oligonucleotide
  Sense strand starting at position 3874 of SEQ ID NO: 913591
ggaucuuacucagugacaa

SEQ ID NO: 939073 - RNA, 19 nt, Artificial Sequence
  Description of Artificial Sequence: Synthetic oligonucleotide
  Antisense strand to SEQ ID NO: 939072
uugucacugaguaagaucc

SEQ ID NO: 939074 - RNA, 19 nt, Artificial Sequence
  Description of Artificial Sequence: Synthetic oligonucleotide
  Sense strand starting at position 3875 of SEQ ID NO: 913591
gaucuuacucagugacaag

SEQ ID NO: 939075 - RNA, 19 nt, Artificial Sequence
  Description of Artificial Sequence: Synthetic oligonucleotide
  Antisense strand to SEQ ID NO: 939074
cuugucacugaguaagauc

SEQ ID NO: 939076 - RNA, 19 nt, Artificial Sequence
  Description of Artificial Sequence: Synthetic oligonucleotide
  Sense strand starting at position 28 of SEQ ID NO: 913591
ggcagaaacuucuccaaac

SEQ ID NO: 939077 - RNA, 19 nt, Artificial Sequence
  Description of Artificial Sequence: Synthetic oligonucleotide
  Antisense strand to SEQ ID NO: 939076
guuuggagaaguuucugcc

SEQ ID NO: 939078 - RNA, 19 nt, Artificial Sequence
  Description of Artificial Sequence: Synthetic oligonucleotide
  Sense strand starting at position 410 of SEQ ID NO: 913591
gggcuaaacccucaucucu

SEQ ID NO: 939079 - RNA, 19 nt, Artificial Sequence
  Description of Artificial Sequence: Synthetic oligonucleotide
  Antisense strand to SEQ ID NO: 939078
agagaugaggguuuagccc

SEQ ID NO: 939080 - RNA, 19 nt, Artificial Sequence
  Description of Artificial Sequence: Synthetic oligonucleotide
  Sense strand starting at position 3365 of SEQ ID NO: 913591
gcacguucuguuucuguua

SEQ ID NO: 939081 - RNA, 19 nt, Artificial Sequence
  Description of Artificial Sequence: Synthetic oligonucleotide
  Antisense strand to SEQ ID NO: 939080
uaacagaaacagaacgugc

SEQ ID NO: 939082 - RNA, 19 nt, Artificial Sequence
  Description of Artificial Sequence: Synthetic oligonucleotide
  Sense strand starting at position 448 of SEQ ID NO: 913591
ccgggugucauuugagguu

SEQ ID NO: 939083 - RNA, 19 nt, Artificial Sequence
  Description of Artificial Sequence: Synthetic oligonucleotide
  Antisense strand to SEQ ID NO: 939082
aaccucaaaugacacccgg

SEQ ID NO: 939084 - RNA, 19 nt, Artificial Sequence
  Description of Artificial Sequence: Synthetic oligonucleotide
  Sense strand starting at position 3625 of SEQ ID NO: 913591
ggccaacuccgaggaauga

SEQ ID NO: 939085 - RNA, 19 nt, Artificial Sequence
  Description of Artificial Sequence: Synthetic oligonucleotide
  Antisense strand to SEQ ID NO: 939084
ucauuccucggaguuggcc

SEQ ID NO: 939086 - RNA, 19 nt, Artificial Sequence
  Description of Artificial Sequence: Synthetic oligonucleotide
  Sense strand starting at position 2437 of SEQ ID NO: 913591
ggagaggacgucggagauu

SEQ ID NO: 939087 - RNA, 19 nt, Artificial Sequence
  Description of Artificial Sequence: Synthetic oligonucleotide
  Antisense strand to SEQ ID NO: 939086
aaucuccgacguccucucc

SEQ ID NO: 939088 - RNA, 19 nt, Artificial Sequence
  Description of Artificial Sequence: Synthetic oligonucleotide
  Sense strand starting at position 490 of SEQ ID NO: 913591
ggagcagucauaggaagua

SEQ ID NO: 939089 - RNA, 19 nt, Artificial Sequence
  Description of Artificial Sequence: Synthetic oligonucleotide
  Antisense strand to SEQ ID NO: 939088
uacuuccuaugacugcucc

SEQ ID NO: 939090 - RNA, 19 nt, Artificial Sequence
  Description of Artificial Sequence: Synthetic oligonucleotide
  Sense strand starting at position 3941 of SEQ ID NO: 913591
cggugcuuuauuugagagu

SEQ ID NO: 939091 - RNA, 19 nt, Artificial Sequence
  Description of Artificial Sequence: Synthetic oligonucleotide
  Antisense strand to SEQ ID NO: 939090
acucucaaauaaagcaccg

SEQ ID NO: 939092 - RNA, 19 nt, Artificial Sequence
  Description of Artificial Sequence: Synthetic oligonucleotide
  Sense strand starting at position 3935 of SEQ ID NO: 913591
cgggaucggugcuuuauuu

SEQ ID NO: 939093 - RNA, 19 nt, Artificial Sequence
  Description of Artificial Sequence: Synthetic oligonucleotide
  Antisense strand to SEQ ID NO: 939092
aaauaaagcaccgaucccg

SEQ ID NO: 939094 - RNA, 19 nt, Artificial Sequence
  Description of Artificial Sequence: Synthetic oligonucleotide
  Sense strand starting at position 866 of SEQ ID NO: 913591
agggacucgccaggucaaa

SEQ ID NO: 939095 - RNA, 19 nt, Artificial Sequence
  Description of Artificial Sequence: Synthetic oligonucleotide
  Antisense strand to SEQ ID NO: 939094
uuugaccuggcgagucccu

SEQ ID NO: 939096 - RNA, 19 nt, Artificial Sequence
  Description of Artificial Sequence: Synthetic oligonucleotide
  Sense strand starting at position 2029 of SEQ ID NO: 913591
aggccaaauauggguguuu

SEQ ID NO: 939097 - RNA, 19 nt, Artificial Sequence
  Description of Artificial Sequence: Synthetic oligonucleotide
  Antisense strand to SEQ ID NO: 939096
aaacacccauauuuggccu

SEQ ID NO: 939098 - RNA, 19 nt, Artificial Sequence
  Description of Artificial Sequence: Synthetic oligonucleotide
  Sense strand starting at position 975 of SEQ ID NO: 913591
ugcugaucccgccagauca

SEQ ID NO: 939099 - RNA, 19 nt, Artificial Sequence
  Description of Artificial Sequence: Synthetic oligonucleotide
  Antisense strand to SEQ ID NO: 939098
ugaucuggcgggaucagca

SEQ ID NO: 939100 - RNA, 19 nt, Artificial Sequence
  Description of Artificial Sequence: Synthetic oligonucleotide
  Sense strand starting at position 3775 of SEQ ID NO: 913591
gguauuuauuagcagauua

SEQ ID NO: 939101 - RNA, 19 nt, Artificial Sequence
  Description of Artificial Sequence: Synthetic oligonucleotide
  Antisense strand to SEQ ID NO: 939100
uaaucugcuaauaaauacc

SEQ ID NO: 939102 - RNA, 19 nt, Artificial Sequence
  Description of Artificial Sequence: Synthetic oligonucleotide
  Sense strand starting at position 2788 of SEQ ID NO: 913591
gcauguaucccacgaugga

SEQ ID NO: 939103 - RNA, 19 nt, Artificial Sequence
  Description of Artificial Sequence: Synthetic oligonucleotide
  Antisense strand to SEQ ID NO: 939102
uccaucgugggauacaugc

SEQ ID NO: 939104 - RNA, 19 nt, Artificial Sequence
  Description of Artificial Sequence: Synthetic oligonucleotide
  Sense strand starting at position 284 of SEQ ID NO: 913591
caaguugcauggcuuuaaa

SEQ ID NO: 939105 - RNA, 19 nt, Artificial Sequence
  Description of Artificial Sequence: Synthetic oligonucleotide
  Antisense strand to SEQ ID NO: 939104
uuuaaagccaugcaacuug

SEQ ID NO: 939106 - RNA, 19 nt, Artificial Sequence
  Description of Artificial Sequence: Synthetic oligonucleotide
  Sense strand starting at position 1359 of SEQ ID NO: 913591
agcgcucaccuuugaggaa

SEQ ID NO: 939107 - RNA, 19 nt, Artificial Sequence
  Description of Artificial Sequence: Synthetic oligonucleotide
  Antisense strand to SEQ ID NO: 939106
uuccucaaaggugagcgcu

SEQ ID NO: 939108 - RNA, 19 nt, Artificial Sequence
  Description of Artificial Sequence: Synthetic oligonucleotide
  Sense strand starting at position 3772 of SEQ ID NO: 913591
ucugguauuuauuagcaga

SEQ ID NO: 939109 - RNA, 19 nt, Artificial Sequence
  Description of Artificial Sequence: Synthetic oligonucleotide
  Antisense strand to SEQ ID NO: 939108
ucugcuaauaaauaccaga

SEQ ID NO: 939110 - RNA, 19 nt, Artificial Sequence
  Description of Artificial Sequence: Synthetic oligonucleotide
  Sense strand starting at position 988 of SEQ ID NO: 913591
agaucagucuaucaggaag

SEQ ID NO: 939111 - RNA, 19 nt, Artificial Sequence
  Description of Artificial Sequence: Synthetic oligonucleotide
  Antisense strand to SEQ ID NO: 939110
cuuccugauagacugaucu

SEQ ID NO: 939112 - RNA, 19 nt, Artificial Sequence
  Description of Artificial Sequence: Synthetic oligonucleotide
  Sense strand starting at position 3483 of SEQ ID NO: 913591
gaguaagacuuauacucag

SEQ ID NO: 939113 - RNA, 19 nt, Artificial Sequence
  Description of Artificial Sequence: Synthetic oligonucleotide
  Antisense strand to SEQ ID NO: 939112
cugaguauaagucuuacuc

SEQ ID NO: 939114 - RNA, 19 nt, Artificial Sequence
  Description of Artificial Sequence: Synthetic oligonucleotide
  Sense strand starting at position 3942 of SEQ ID NO: 913591
ggugcuuuauuugagagug

SEQ ID NO: 939115 - RNA, 19 nt, Artificial Sequence
  Description of Artificial Sequence: Synthetic oligonucleotide
  Antisense strand to SEQ ID NO: 939114
cacucucaaauaaagcacc

SEQ ID NO: 939116 - RNA, 19 nt, Artificial Sequence
  Description of Artificial Sequence: Synthetic oligonucleotide
  Sense strand starting at position 3765 of SEQ ID NO: 913591
aggcccuucugguauuuau

SEQ ID NO: 939117 - RNA, 19 nt, Artificial Sequence
  Description of Artificial Sequence: Synthetic oligonucleotide
  Antisense strand to SEQ ID NO: 939116
auaaauaccagaagggccu

SEQ ID NO: 939118 - RNA, 19 nt, Artificial Sequence
  Description of Artificial Sequence: Synthetic oligonucleotide
  Sense strand starting at position 3833 of SEQ ID NO: 913591
ucauuugggucuuagucuu

SEQ ID NO: 939119 - RNA, 19 nt, Artificial Sequence
  Description of Artificial Sequence: Synthetic oligonucleotide
  Antisense strand to SEQ ID NO: 939118
aagacuaagacccaaauga

SEQ ID NO: 939120 - RNA, 19 nt, Artificial Sequence
  Description of Artificial Sequence: Synthetic oligonucleotide
  Sense strand starting at position 3746 of SEQ ID NO: 913591
ggagguaugugggagacua

SEQ ID NO: 939121 - RNA, 19 nt, Artificial Sequence
  Description of Artificial Sequence: Synthetic oligonucleotide
  Antisense strand to SEQ ID NO: 939120
uagucucccacauaccucc

SEQ ID NO: 939122 - RNA, 19 nt, Artificial Sequence
  Description of Artificial Sequence: Synthetic oligonucleotide
  Sense strand starting at position 3944 of SEQ ID NO: 913591
ugcuuuauuugagaguggu

SEQ ID NO: 939123 - RNA, 19 nt, Artificial Sequence
  Description of Artificial Sequence: Synthetic oligonucleotide
  Antisense strand to SEQ ID NO: 939122
accacucucaaauaaagca

SEQ ID NO: 939124 - RNA, 19 nt, Artificial Sequence
  Description of Artificial Sequence: Synthetic oligonucleotide
  Sense strand starting at position 140 of SEQ ID NO: 913591
gggauaggcuguuagaaga

SEQ ID NO: 939125 - RNA, 19 nt, Artificial Sequence
  Description of Artificial Sequence: Synthetic oligonucleotide
  Antisense strand to SEQ ID NO: 939124
ucuucuaacagccuauccc

SEQ ID NO: 939126 - RNA, 19 nt, Artificial Sequence
  Description of Artificial Sequence: Synthetic oligonucleotide
  Sense strand starting at position 2850 of SEQ ID NO: 913591
gggauuaucuauggaucaa

SEQ ID NO: 939127 - RNA, 19 nt, Artificial Sequence
  Description of Artificial Sequence: Synthetic oligonucleotide
  Antisense strand to SEQ ID NO: 939126
uugauccauagauaauccc

SEQ ID NO: 939128 - RNA, 19 nt, Artificial Sequence
  Description of Artificial Sequence: Synthetic oligonucleotide
  Sense strand starting at position 3828 of SEQ ID NO: 913591
uugagucauuugggucuua

SEQ ID NO: 939129 - RNA, 19 nt, Artificial Sequence
  Description of Artificial Sequence: Synthetic oligonucleotide
  Antisense strand to SEQ ID NO: 939128
uaagacccaaaugacucaa

SEQ ID NO: 939130 - RNA, 19 nt, Artificial Sequence
  Description of Artificial Sequence: Synthetic oligonucleotide
  Sense strand starting at position 451 of SEQ ID NO: 913591
ggugucauuugagguuaca

SEQ ID NO: 939131 - RNA, 19 nt, Artificial Sequence
  Description of Artificial Sequence: Synthetic oligonucleotide
  Antisense strand to SEQ ID NO: 939130
uguaaccucaaaugacacc

SEQ ID NO: 939132 - RNA, 19 nt, Artificial Sequence
  Description of Artificial Sequence: Synthetic oligonucleotide
  Sense strand starting at position 2528 of SEQ ID NO: 913591
gguggccggauucguuaua

SEQ ID NO: 939133 - RNA, 19 nt, Artificial Sequence
  Description of Artificial Sequence: Synthetic oligonucleotide
  Antisense strand to SEQ ID NO: 939132
uauaacgaauccggccacc

SEQ ID NO: 939134 - RNA, 19 nt, Artificial Sequence
  Description of Artificial Sequence: Synthetic oligonucleotide
  Sense strand starting at position 2962 of SEQ ID NO: 913591
gcaagcauuuauugagggu

SEQ ID NO: 939135 - RNA, 19 nt, Artificial Sequence
  Description of Artificial Sequence: Synthetic oligonucleotide
  Antisense strand to SEQ ID NO: 939134
acccucaauaaaugcuugc

SEQ ID NO: 939136 - RNA, 19 nt, Artificial Sequence
  Description of Artificial Sequence: Synthetic oligonucleotide
  Sense strand starting at position 896 of SEQ ID NO: 913592
acuagagagugaucucuaa

SEQ ID NO: 939137 - RNA, 19 nt, Artificial Sequence
  Description of Artificial Sequence: Synthetic oligonucleotide
  Antisense strand to SEQ ID NO: 939136
uuagagaucacucucuagu

SEQ ID NO: 939138 - RNA, 19 nt, Artificial Sequence
  Description of Artificial Sequence: Synthetic oligonucleotide
  Sense strand starting at position 405 of SEQ ID NO: 913592
cugauauaggaaugagcau

SEQ ID NO: 939139 - RNA, 19 nt, Artificial Sequence
  Description of Artificial Sequence: Synthetic oligonucleotide
  Antisense strand to SEQ ID NO: 939138
augcucauuccuauaucag

SEQ ID NO: 939140 - RNA, 19 nt, Artificial Sequence
  Description of Artificial Sequence: Synthetic oligonucleotide
  Sense strand starting at position 111 of SEQ ID NO: 913592
cacccaguguugguaauuu

SEQ ID NO: 939141 - RNA, 19 nt, Artificial Sequence
  Description of Artificial Sequence: Synthetic oligonucleotide
  Antisense strand to SEQ ID NO: 939140
aaauuaccaacacugggug

SEQ ID NO: 939142 - RNA, 19 nt, Artificial Sequence
  Description of Artificial Sequence: Synthetic oligonucleotide
  Sense strand starting at position 379 of SEQ ID NO: 913592
gagucuucuagguaugagg

SEQ ID NO: 939143 - RNA, 19 nt, Artificial Sequence
  Description of Artificial Sequence: Synthetic oligonucleotide
  Antisense strand to SEQ ID NO: 939142
ccucauaccuagaagacuc

SEQ ID NO: 939144 - RNA, 19 nt, Artificial Sequence
  Description of Artificial Sequence: Synthetic oligonucleotide
  Sense strand starting at position 641 of SEQ ID NO: 913592
guauaacuccuauggagga

SEQ ID NO: 939145 - RNA, 19 nt, Artificial Sequence
  Description of Artificial Sequence: Synthetic oligonucleotide
  Antisense strand to SEQ ID NO: 939144
uccuccauaggaguuauac

SEQ ID NO: 939146 - RNA, 19 nt, Artificial Sequence
  Description of Artificial Sequence: Synthetic oligonucleotide
  Sense strand starting at position 401 of SEQ ID NO: 913592
ggcccugauauaggaauga

SEQ ID NO: 939147 - RNA, 19 nt, Artificial Sequence
  Description of Artificial Sequence: Synthetic oligonucleotide
  Antisense strand to SEQ ID NO: 939146
ucauuccuauaucagggcc

SEQ ID NO: 939148 - RNA, 19 nt, Artificial Sequence
  Description of Artificial Sequence: Synthetic oligonucleotide
  Sense strand starting at position 721 of SEQ ID NO: 913592
cuuggauccuaucucaaag

SEQ ID NO: 939149 - RNA, 19 nt, Artificial Sequence
  Description of Artificial Sequence: Synthetic oligonucleotide
  Antisense strand to SEQ ID NO: 939148
cuuugagauaggauccaag

SEQ ID NO: 939150 - RNA, 19 nt, Artificial Sequence
  Description of Artificial Sequence: Synthetic oligonucleotide
  Sense strand starting at position 3895 of SEQ ID NO: 913592
caaaguagauugguaacua

SEQ ID NO: 939151 - RNA, 19 nt, Artificial Sequence
  Description of Artificial Sequence: Synthetic oligonucleotide
  Antisense strand to SEQ ID NO: 939150
uaguuaccaaucuacuuug

SEQ ID NO: 939152 - RNA, 19 nt, Artificial Sequence
  Description of Artificial Sequence: Synthetic oligonucleotide
  Sense strand starting at position 860 of SEQ ID NO: 913592
auggauuauuaugcagaug

SEQ ID NO: 939153 - RNA, 19 nt, Artificial Sequence
  Description of Artificial Sequence: Synthetic oligonucleotide
  Antisense strand to SEQ ID NO: 939152
caucugcauaauaauccau

SEQ ID NO: 939154 - RNA, 19 nt, Artificial Sequence
  Description of Artificial Sequence: Synthetic oligonucleotide
  Sense strand starting at position 1073 of SEQ ID NO: 913592
uccaaaugagguugauauu

SEQ ID NO: 939155 - RNA, 19 nt, Artificial Sequence
  Description of Artificial Sequence: Synthetic oligonucleotide
  Antisense strand to SEQ ID NO: 939154
aauaucaaccucauuugga

SEQ ID NO: 939156 - RNA, 19 nt, Artificial Sequence
  Description of Artificial Sequence: Synthetic oligonucleotide
  Sense strand starting at position 863 of SEQ ID NO: 913592
gauuauuaugcagauguac

SEQ ID NO: 939157 - RNA, 19 nt, Artificial Sequence
  Description of Artificial Sequence: Synthetic oligonucleotide
  Antisense strand to SEQ ID NO: 939156
guacaucugcauaauaauc

SEQ ID NO: 939158 - RNA, 19 nt, Artificial Sequence
  Description of Artificial Sequence: Synthetic oligonucleotide
  Sense strand starting at position 861 of SEQ ID NO: 913592
uggauuauuaugcagaugu

SEQ ID NO: 939159 - RNA, 19 nt, Artificial Sequence
  Description of Artificial Sequence: Synthetic oligonucleotide
  Antisense strand to SEQ ID NO: 939158
acaucugcauaauaaucca

SEQ ID NO: 939160 - RNA, 19 nt, Artificial Sequence
  Description of Artificial Sequence: Synthetic oligonucleotide
  Sense strand starting at position 3881 of SEQ ID NO: 913592
uacagugauccaggcaaag

SEQ ID NO: 939161 - RNA, 19 nt, Artificial Sequence
  Description of Artificial Sequence: Synthetic oligonucleotide
  Antisense strand to SEQ ID NO: 939160
cuuugccuggaucacugua

SEQ ID NO: 939162 - RNA, 19 nt, Artificial Sequence
  Description of Artificial Sequence: Synthetic oligonucleotide
  Sense strand starting at position 987 of SEQ ID NO: 913592
gggaaaggaauguguaugu

SEQ ID NO: 939163 - RNA, 19 nt, Artificial Sequence
  Description of Artificial Sequence: Synthetic oligonucleotide
  Antisense strand to SEQ ID NO: 939162
acauacacauuccuuuccc

SEQ ID NO: 939164 - RNA, 19 nt, Artificial Sequence
  Description of Artificial Sequence: Synthetic oligonucleotide
  Sense strand starting at position 411 of SEQ ID NO: 913592
uaggaaugagcauggcaau

SEQ ID NO: 939165 - RNA, 19 nt, Artificial Sequence
  Description of Artificial Sequence: Synthetic oligonucleotide
  Antisense strand to SEQ ID NO: 939164
auugccaugcucauuccua

SEQ ID NO: 939166 - RNA, 19 nt, Artificial Sequence
  Description of Artificial Sequence: Synthetic oligonucleotide
  Sense strand starting at position 412 of SEQ ID NO: 913592
aggaaugagcauggcaauu

SEQ ID NO: 939167 - RNA, 19 nt, Artificial Sequence
  Description of Artificial Sequence: Synthetic oligonucleotide
  Antisense strand to SEQ ID NO: 939166
aauugccaugcucauuccu

SEQ ID NO: 939168 - RNA, 19 nt, Artificial Sequence
  Description of Artificial Sequence: Synthetic oligonucleotide
  Sense strand starting at position 115 of SEQ ID NO: 913592
caguguugguaauuugcua

SEQ ID NO: 939169 - RNA, 19 nt, Artificial Sequence
  Description of Artificial Sequence: Synthetic oligonucleotide
  Antisense strand to SEQ ID NO: 939168
uagcaaauuaccaacacug

SEQ ID NO: 939170 - RNA, 19 nt, Artificial Sequence
  Description of Artificial Sequence: Synthetic oligonucleotide
  Sense strand starting at position 377 of SEQ ID NO: 913592
aagagucuucuagguauga

SEQ ID NO: 939171 - RNA, 19 nt, Artificial Sequence
  Description of Artificial Sequence: Synthetic oligonucleotide
  Antisense strand to SEQ ID NO: 939170
ucauaccuagaagacucuu

SEQ ID NO: 939172 - RNA, 19 nt, Artificial Sequence
  Description of Artificial Sequence: Synthetic oligonucleotide
  Sense strand starting at position 378 of SEQ ID NO: 913592
agagucuucuagguaugag

SEQ ID NO: 939173 - RNA, 19 nt, Artificial Sequence
  Description of Artificial Sequence: Synthetic oligonucleotide
  Antisense strand to SEQ ID NO: 939172
cucauaccuagaagacucu

SEQ ID NO: 939174 - RNA, 19 nt, Artificial Sequence
  Description of Artificial Sequence: Synthetic oligonucleotide
  Sense strand starting at position 455 of SEQ ID NO: 913592
cuaaacuugucccuggaca

SEQ ID NO: 939175 - RNA, 19 nt, Artificial Sequence
  Description of Artificial Sequence: Synthetic oligonucleotide
  Antisense strand to SEQ ID NO: 939174
uguccagggacaaguuuag

SEQ ID NO: 939176 - RNA, 19 nt, Artificial Sequence
  Description of Artificial Sequence: Synthetic oligonucleotide
  Sense strand starting at position 381 of SEQ ID NO: 913592
gucuucuagguaugaggaa

SEQ ID NO: 939177 - RNA, 19 nt, Artificial Sequence
  Description of Artificial Sequence: Synthetic oligonucleotide
  Antisense strand to SEQ ID NO: 939176
uuccucauaccuagaagac

SEQ ID NO: 939178 - RNA, 19 nt, Artificial Sequence
  Description of Artificial Sequence: Synthetic oligonucleotide
  Sense strand starting at position 2605 of SEQ ID NO: 913592
cgaggagacuugcuacaca

SEQ ID NO: 939179 - RNA, 19 nt, Artificial Sequence
  Description of Artificial Sequence: Synthetic oligonucleotide
  Antisense strand to SEQ ID NO: 939178
uguguagcaagucuccucg

SEQ ID NO: 939180 - RNA, 19 nt, Artificial Sequence
  Description of Artificial Sequence: Synthetic oligonucleotide
  Sense strand starting at position 1266 of SEQ ID NO: 913592
gcugcuccagaaggauaaa

SEQ ID NO: 939181 - RNA, 19 nt, Artificial Sequence
  Description of Artificial Sequence: Synthetic oligonucleotide
  Antisense strand to SEQ ID NO: 939180
uuuauccuucuggagcagc

SEQ ID NO: 939182 - RNA, 19 nt, Artificial Sequence
  Description of Artificial Sequence: Synthetic oligonucleotide
  Sense strand starting at position 3527 of SEQ ID NO: 913592
gcggaauugcuugaaccaa

SEQ ID NO: 939183 - RNA, 19 nt, Artificial Sequence
  Description of Artificial Sequence: Synthetic oligonucleotide
  Antisense strand to SEQ ID NO: 939182
uugguucaagcaauuccgc

SEQ ID NO: 939184 - RNA, 19 nt, Artificial Sequence
  Description of Artificial Sequence: Synthetic oligonucleotide
  Sense strand starting at position 939 of SEQ ID NO: 913592
gcugaaauuguauaugguc

SEQ ID NO: 939185 - RNA, 19 nt, Artificial Sequence
  Description of Artificial Sequence: Synthetic oligonucleotide
  Antisense strand to SEQ ID NO: 939184
gaccauauacaauuucagc

SEQ ID NO: 939186 - RNA, 19 nt, Artificial Sequence
  Description of Artificial Sequence: Synthetic oligonucleotide
  Sense strand starting at position 3893 of SEQ ID NO: 913592
ggcaaaguagauugguaac

SEQ ID NO: 939187 - RNA, 19 nt, Artificial Sequence
  Description of Artificial Sequence: Synthetic oligonucleotide
  Antisense strand to SEQ ID NO: 939186
guuaccaaucuacuuugcc

SEQ ID NO: 939188 - RNA, 19 nt, Artificial Sequence
  Description of Artificial Sequence: Synthetic oligonucleotide
  Sense strand starting at position 3667 of SEQ ID NO: 913592
cucagauuauggcucuaug

SEQ ID NO: 939189 - RNA, 19 nt, Artificial Sequence
  Description of Artificial Sequence: Synthetic oligonucleotide
  Antisense strand to SEQ ID NO: 939188
cauagagccauaaucugag

SEQ ID NO: 939190 - RNA, 19 nt, Artificial Sequence
  Description of Artificial Sequence: Synthetic oligonucleotide
  Sense strand starting at position 3874 of SEQ ID NO: 913592
acaguucuacagugaucca

SEQ ID NO: 939191 - RNA, 19 nt, Artificial Sequence
  Description of Artificial Sequence: Synthetic oligonucleotide
  Antisense strand to SEQ ID NO: 939190
uggaucacuguagaacugu

SEQ ID NO: 939192 - RNA, 19 nt, Artificial Sequence
  Description of Artificial Sequence: Synthetic oligonucleotide
  Sense strand starting at position 603 of SEQ ID NO: 913592
gugcauaugccauaugaca

SEQ ID NO: 939193 - RNA, 19 nt, Artificial Sequence
  Description of Artificial Sequence: Synthetic oligonucleotide
  Antisense strand to SEQ ID NO: 939192
ugucauauggcauaugcac

SEQ ID NO: 939194 - RNA, 19 nt, Artificial Sequence
  Description of Artificial Sequence: Synthetic oligonucleotide
  Sense strand starting at position 1263 of SEQ ID NO: 913592
guugcugcuccagaaggau

SEQ ID NO: 939195 - RNA, 19 nt, Artificial Sequence
  Description of Artificial Sequence: Synthetic oligonucleotide
  Antisense strand to SEQ ID NO: 939194
auccuucuggagcagcaac

SEQ ID NO: 939196 - RNA, 19 nt, Artificial Sequence
  Description of Artificial Sequence: Synthetic oligonucleotide
  Sense strand starting at position 3839 of SEQ ID NO: 913592
gaaugcagaguuggugauu

SEQ ID NO: 939197 - RNA, 19 nt, Artificial Sequence
  Description of Artificial Sequence: Synthetic oligonucleotide
  Antisense strand to SEQ ID NO: 939196
aaucaccaacucugcauuc

SEQ ID NO: 939198 - RNA, 19 nt, Artificial Sequence
  Description of Artificial Sequence: Synthetic oligonucleotide
  Sense strand starting at position 453 of SEQ ID NO: 913592
gucuaaacuugucccugga

SEQ ID NO: 939199 - RNA, 19 nt, Artificial Sequence
  Description of Artificial Sequence: Synthetic oligonucleotide
  Antisense strand to SEQ ID NO: 939198
uccagggacaaguuuagac

SEQ ID NO: 939200 - RNA, 19 nt, Artificial Sequence
  Description of Artificial Sequence: Synthetic oligonucleotide
  Sense strand starting at position 3023 of SEQ ID NO: 913592
aauagauguuaguugagcu

SEQ ID NO: 939201 - RNA, 19 nt, Artificial Sequence
  Description of Artificial Sequence: Synthetic oligonucleotide
  Antisense strand to SEQ ID NO: 939200
agcucaacuaacaucuauu

SEQ ID NO: 939202 - RNA, 19 nt, Artificial Sequence
  Description of Artificial Sequence: Synthetic oligonucleotide
  Sense strand starting at position 3288 of SEQ ID NO: 913592
gugaguguacccuaaguug

SEQ ID NO: 939203 - RNA, 19 nt, Artificial Sequence
  Description of Artificial Sequence: Synthetic oligonucleotide
  Antisense strand to SEQ ID NO: 939202
caacuuaggguacacucac

SEQ ID NO: 939204 - RNA, 19 nt, Artificial Sequence
  Description of Artificial Sequence: Synthetic oligonucleotide
  Sense strand starting at position 3024 of SEQ ID NO: 913592
auagauguuaguugagcua

SEQ ID NO: 939205 - RNA, 19 nt, Artificial Sequence
  Description of Artificial Sequence: Synthetic oligonucleotide
  Antisense strand to SEQ ID NO: 939204
uagcucaacuaacaucuau

SEQ ID NO: 939206 - RNA, 19 nt, Artificial Sequence
  Description of Artificial Sequence: Synthetic oligonucleotide
  Sense strand starting at position 935 of SEQ ID NO: 913592
aggugcugaaauuguauau

SEQ ID NO: 939207 - RNA, 19 nt, Artificial Sequence
  Description of Artificial Sequence: Synthetic oligonucleotide
  Antisense strand to SEQ ID NO: 939206
auauacaauuucagcaccu

SEQ ID NO: 939208 - RNA, 19 nt, Artificial Sequence
  Description of Artificial Sequence: Synthetic oligonucleotide
  Sense strand starting at position 566 of SEQ ID NO: 913592
ggaugucagugucucugaa

SEQ ID NO: 939209 - RNA, 19 nt, Artificial Sequence
  Description of Artificial Sequence: Synthetic oligonucleotide
  Antisense strand to SEQ ID NO: 939208
uucagagacacugacaucc

SEQ ID NO: 939210 - RNA, 19 nt, Artificial Sequence
  Description of Artificial Sequence: Synthetic oligonucleotide
  Sense strand starting at position 441 of SEQ ID NO: 913592
gaaugccacugugucuaaa

SEQ ID NO: 939211 - RNA, 19 nt, Artificial Sequence
  Description of Artificial Sequence: Synthetic oligonucleotide
  Antisense strand to SEQ ID NO: 939210
uuuagacacaguggcauuc

SEQ ID NO: 939212 - RNA, 19 nt, Artificial Sequence
  Description of Artificial Sequence: Synthetic oligonucleotide
  Sense strand starting at position 568 of SEQ ID NO: 913592
augucagugucucugaaau

SEQ ID NO: 939213 - RNA, 19 nt, Artificial Sequence
  Description of Artificial Sequence: Synthetic oligonucleotide
  Antisense strand to SEQ ID NO: 939212
auuucagagacacugacau

SEQ ID NO: 939214 - RNA, 19 nt, Artificial Sequence
  Description of Artificial Sequence: Synthetic oligonucleotide
  Sense strand starting at position 944 of SEQ ID NO: 913592
aauuguauauggucuguca

SEQ ID NO: 939215 - RNA, 19 nt, Artificial Sequence
  Description of Artificial Sequence: Synthetic oligonucleotide
  Antisense strand to SEQ ID NO: 939214
ugacagaccauauacaauu

SEQ ID NO: 939216 - RNA, 19 nt, Artificial Sequence
  Description of Artificial Sequence: Synthetic oligonucleotide
  Sense strand starting at position 3635 of SEQ ID NO: 913593
cucuucuuugucguguuaa

SEQ ID NO: 939217 - RNA, 19 nt, Artificial Sequence
  Description of Artificial Sequence: Synthetic oligonucleotide
  Antisense strand to SEQ ID NO: 939216
uuaacacgacaaagaagag

SEQ ID NO: 939218 - RNA, 19 nt, Artificial Sequence
  Description of Artificial Sequence: Synthetic oligonucleotide
  Sense strand starting at position 3300 of SEQ ID NO: 913593
ugaugagucaaagggugaa

SEQ ID NO: 939219 - RNA, 19 nt, Artificial Sequence
  Description of Artificial Sequence: Synthetic oligonucleotide
  Antisense strand to SEQ ID NO: 939218
uucacccuuugacucauca

SEQ ID NO: 939220 - RNA, 19 nt, Artificial Sequence
  Description of Artificial Sequence: Synthetic oligonucleotide
  Sense strand starting at position 324 of SEQ ID NO: 913593
agcauagagccauaaucug

SEQ ID NO: 939221 - RNA, 19 nt, Artificial Sequence
  Description of Artificial Sequence: Synthetic oligonucleotide
  Antisense strand to SEQ ID NO: 939220
cagauuauggcucuaugcu

SEQ ID NO: 939222 - RNA, 19 nt, Artificial Sequence
  Description of Artificial Sequence: Synthetic oligonucleotide
  Sense strand starting at position 2535 of SEQ ID NO: 913593
uugcuuaccacaggagaga

SEQ ID NO: 939223 - RNA, 19 nt, Artificial Sequence
  Description of Artificial Sequence: Synthetic oligonucleotide
  Antisense strand to SEQ ID NO: 939222
ucucuccugugguaagcaa

SEQ ID NO: 939224 - RNA, 19 nt, Artificial Sequence
  Description of Artificial Sequence: Synthetic oligonucleotide
  Sense strand starting at position 868 of SEQ ID NO: 913593
cugggagcucuguaaauau

SEQ ID NO: 939225 - RNA, 19 nt, Artificial Sequence
  Description of Artificial Sequence: Synthetic oligonucleotide
  Antisense strand to SEQ ID NO: 939224
auauuuacagagcucccag

SEQ ID NO: 939226 - RNA, 19 nt, Artificial Sequence
  Description of Artificial Sequence: Synthetic oligonucleotide
  Sense strand starting at position 3526 of SEQ ID NO: 913593
gcuagaugcauuuguccag

SEQ ID NO: 939227 - RNA, 19 nt, Artificial Sequence
  Description of Artificial Sequence: Synthetic oligonucleotide
  Antisense strand to SEQ ID NO: 939226
cuggacaaaugcaucuagc

SEQ ID NO: 939228 - RNA, 19 nt, Artificial Sequence
  Description of Artificial Sequence: Synthetic oligonucleotide
  Sense strand starting at position 2861 of SEQ ID NO: 913593
aagauacuguguuccaaag

SEQ ID NO: 939229 - RNA, 19 nt, Artificial Sequence
  Description of Artificial Sequence: Synthetic oligonucleotide
  Antisense strand to SEQ ID NO: 939228
cuuuggaacacaguaucuu

SEQ ID NO: 939230 - RNA, 19 nt, Artificial Sequence
  Description of Artificial Sequence: Synthetic oligonucleotide
  Sense strand starting at position 3262 of SEQ ID NO: 913593
gcaacuauaucuuugagau

SEQ ID NO: 939231 - RNA, 19 nt, Artificial Sequence
  Description of Artificial Sequence: Synthetic oligonucleotide
  Antisense strand to SEQ ID NO: 939230
aucucaaagauauaguugc

SEQ ID NO: 939232 - RNA, 19 nt, Artificial Sequence
  Description of Artificial Sequence: Synthetic oligonucleotide
  Sense strand starting at position 264 of SEQ ID NO: 913593
aucugaaggaaauguguuu

SEQ ID NO: 939233 - RNA, 19 nt, Artificial Sequence
  Description of Artificial Sequence: Synthetic oligonucleotide
  Antisense strand to SEQ ID NO: 939232
aaacacauuuccuucagau

SEQ ID NO: 939234 - RNA, 19 nt, Artificial Sequence
  Description of Artificial Sequence: Synthetic oligonucleotide
  Sense strand starting at position 3099 of SEQ ID NO: 913593
agagaucacucucuaguuu

SEQ ID NO: 939235 - RNA, 19 nt, Artificial Sequence
  Description of Artificial Sequence: Synthetic oligonucleotide
  Antisense strand to SEQ ID NO: 939234
aaacuagagagugaucucu

SEQ ID NO: 939236 - RNA, 19 nt, Artificial Sequence
  Description of Artificial Sequence: Synthetic oligonucleotide
  Sense strand starting at position 2859 of SEQ ID NO: 913593
ugaagauacuguguuccaa

SEQ ID NO: 939237 - RNA, 19 nt, Artificial Sequence
  Description of Artificial Sequence: Synthetic oligonucleotide
  Antisense strand to SEQ ID NO: 939236
uuggaacacaguaucuuca

SEQ ID NO: 939238 - RNA, 19 nt, Artificial Sequence
  Description of Artificial Sequence: Synthetic oligonucleotide
  Sense strand starting at position 109 of SEQ ID NO: 913593
cuacuuugccuggaucacu

SEQ ID NO: 939239 - RNA, 19 nt, Artificial Sequence
  Description of Artificial Sequence: Synthetic oligonucleotide
  Antisense strand to SEQ ID NO: 939238
agugauccaggcaaaguag

SEQ ID NO: 939240 - RNA, 19 nt, Artificial Sequence
  Description of Artificial Sequence: Synthetic oligonucleotide
  Sense strand starting at position 2796 of SEQ ID NO: 913593
augacuuugagaugucugu

SEQ ID NO: 939241 - RNA, 19 nt, Artificial Sequence
  Description of Artificial Sequence: Synthetic oligonucleotide
  Antisense strand to SEQ ID NO: 939240
acagacaucucaaagucau

SEQ ID NO: 939242 - RNA, 19 nt, Artificial Sequence
  Description of Artificial Sequence: Synthetic oligonucleotide
  Sense strand starting at position 3495 of SEQ ID NO: 913593
augucacugucucugaaau

SEQ ID NO: 939243 - RNA, 19 nt, Artificial Sequence
  Description of Artificial Sequence: Synthetic oligonucleotide
  Antisense strand to SEQ ID NO: 939242
auuucagagacagugacau

SEQ ID NO: 939244 - RNA, 19 nt, Artificial Sequence
  Description of Artificial Sequence: Synthetic oligonucleotide
  Sense strand starting at position 60 of SEQ ID NO: 913593
ucagaaccugcauguuaau

SEQ ID NO: 939245 - RNA, 19 nt, Artificial Sequence
  Description of Artificial Sequence: Synthetic oligonucleotide
  Antisense strand to SEQ ID NO: 939244
auuaacaugcagguucuga

SEQ ID NO: 939246 - RNA, 19 nt, Artificial Sequence
  Description of Artificial Sequence: Synthetic oligonucleotide
  Sense strand starting at position 107 of SEQ ID NO: 913593
aucuacuuugccuggauca

SEQ ID NO: 939247 - RNA, 19 nt, Artificial Sequence
  Description of Artificial Sequence: Synthetic oligonucleotide
  Antisense strand to SEQ ID NO: 939246
ugauccaggcaaaguagau

SEQ ID NO: 939248 - RNA, 19 nt, Artificial Sequence
  Description of Artificial Sequence: Synthetic oligonucleotide
  Sense strand starting at position 269 of SEQ ID NO: 913593
aaggaaauguguuugccca

SEQ ID NO: 939249 - RNA, 19 nt, Artificial Sequence
  Description of Artificial Sequence: Synthetic oligonucleotide
  Antisense strand to SEQ ID NO: 939248
ugggcaaacacauuuccuu

SEQ ID NO: 939250 - RNA, 19 nt, Artificial Sequence
  Description of Artificial Sequence: Synthetic oligonucleotide
  Sense strand starting at position 270 of SEQ ID NO: 913593
aggaaauguguuugcccaa

SEQ ID NO: 939251 - RNA, 19 nt, Artificial Sequence
  Description of Artificial Sequence: Synthetic oligonucleotide
  Antisense strand to SEQ ID NO: 939250
uugggcaaacacauuuccu

SEQ ID NO: 939252 - RNA, 19 nt, Artificial Sequence
  Description of Artificial Sequence: Synthetic oligonucleotide
  Sense strand starting at position 2509 of SEQ ID NO: 913593
ccuauugguguaugugaaa

SEQ ID NO: 939253 - RNA, 19 nt, Artificial Sequence
  Description of Artificial Sequence: Synthetic oligonucleotide
  Antisense strand to SEQ ID NO: 939252
uuucacauacaccaauagg

SEQ ID NO: 939254 - RNA, 19 nt, Artificial Sequence
  Description of Artificial Sequence: Synthetic oligonucleotide
  Sense strand starting at position 3313 of SEQ ID NO: 913593
ggugaaugcauaugugauu

SEQ ID NO: 939255 - RNA, 19 nt, Artificial Sequence
  Description of Artificial Sequence: Synthetic oligonucleotide
  Antisense strand to SEQ ID NO: 939254
aaucacauaugcauucacc

SEQ ID NO: 939256 - RNA, 19 nt, Artificial Sequence
  Description of Artificial Sequence: Synthetic oligonucleotide
  Sense strand starting at position 1380 of SEQ ID NO: 913593
cagguuucuguguagcaag

SEQ ID NO: 939257 - RNA, 19 nt, Artificial Sequence
  Description of Artificial Sequence: Synthetic oligonucleotide
  Antisense strand to SEQ ID NO: 939256
cuugcuacacagaaaccug

SEQ ID NO: 939258 - RNA, 19 nt, Artificial Sequence
  Description of Artificial Sequence: Synthetic oligonucleotide
  Sense strand starting at position 2668 of SEQ ID NO: 913593
gcugguaggccagaaguuu

SEQ ID NO: 939259 - RNA, 19 nt, Artificial Sequence
  Description of Artificial Sequence: Synthetic oligonucleotide
  Antisense strand to SEQ ID NO: 939258
aaacuucuggccuaccagc

SEQ ID NO: 939260 - RNA, 19 nt, Artificial Sequence
  Description of Artificial Sequence: Synthetic oligonucleotide
  Sense strand starting at position 3681 of SEQ ID NO: 913593
guaagcuuagcucaaaugu

SEQ ID NO: 939261 - RNA, 19 nt, Artificial Sequence
  Description of Artificial Sequence: Synthetic oligonucleotide
  Antisense strand to SEQ ID NO: 939260
acauuugagcuaagcuuac

SEQ ID NO: 939262 - RNA, 19 nt, Artificial Sequence
  Description of Artificial Sequence: Synthetic oligonucleotide
  Sense strand starting at position 271 of SEQ ID NO: 913593
ggaaauguguuugcccaac

SEQ ID NO: 939263 - RNA, 19 nt, Artificial Sequence
  Description of Artificial Sequence: Synthetic oligonucleotide
  Antisense strand to SEQ ID NO: 939262
guugggcaaacacauuucc

SEQ ID NO: 939264 - RNA, 19 nt, Artificial Sequence
  Description of Artificial Sequence: Synthetic oligonucleotide
  Sense strand starting at position 90 of SEQ ID NO: 913593
gcgaccuguaguuaccaau

SEQ ID NO: 939265 - RNA, 19 nt, Artificial Sequence
  Description of Artificial Sequence: Synthetic oligonucleotide
  Antisense strand to SEQ ID NO: 939264
auugguaacuacaggucgc

SEQ ID NO: 939266 - RNA, 19 nt, Artificial Sequence
  Description of Artificial Sequence: Synthetic oligonucleotide
  Sense strand starting at position 2800 of SEQ ID NO: 913593
cuuugagaugucuguguag

SEQ ID NO: 939267 - RNA, 19 nt, Artificial Sequence
  Description of Artificial Sequence: Synthetic oligonucleotide
  Antisense strand to SEQ ID NO: 939266
cuacacagacaucucaaag

SEQ ID NO: 939268 - RNA, 19 nt, Artificial Sequence
  Description of Artificial Sequence: Synthetic oligonucleotide
  Sense strand starting at position 2871 of SEQ ID NO: 913593
guuccaaagucaguuguaa

SEQ ID NO: 939269 - RNA, 19 nt, Artificial Sequence
  Description of Artificial Sequence: Synthetic oligonucleotide
  Antisense strand to SEQ ID NO: 939268
uuacaacugacuuuggaac

SEQ ID NO: 939270 - RNA, 19 nt, Artificial Sequence
  Description of Artificial Sequence: Synthetic oligonucleotide
  Sense strand starting at position 2507 of SEQ ID NO: 913593
ugccuauugguguauguga

SEQ ID NO: 939271 - RNA, 19 nt, Artificial Sequence
  Description of Artificial Sequence: Synthetic oligonucleotide
  Antisense strand to SEQ ID NO: 939270
ucacauacaccaauaggca

SEQ ID NO: 939272 - RNA, 19 nt, Artificial Sequence
  Description of Artificial Sequence: Synthetic oligonucleotide
  Sense strand starting at position 3226 of SEQ ID NO: 913593
gcaaauaacugugugcaua

SEQ ID NO: 939273 - RNA, 19 nt, Artificial Sequence
  Description of Artificial Sequence: Synthetic oligonucleotide
  Antisense strand to SEQ ID NO: 939272
uaugcacacaguuauuugc

SEQ ID NO: 939274 - RNA, 19 nt, Artificial Sequence
  Description of Artificial Sequence: Synthetic oligonucleotide
  Sense strand starting at position 3748 of SEQ ID NO: 913593
ccucuugucuggucucaua

SEQ ID NO: 939275 - RNA, 19 nt, Artificial Sequence
  Description of Artificial Sequence: Synthetic oligonucleotide
  Antisense strand to SEQ ID NO: 939274
uaugagaccagacaagagg

SEQ ID NO: 939276 - RNA, 19 nt, Artificial Sequence
  Description of Artificial Sequence: Synthetic oligonucleotide
  Sense strand starting at position 3082 of SEQ ID NO: 913593
ucuuuauucugugucuuag

SEQ ID NO: 939277 - RNA, 19 nt, Artificial Sequence
  Description of Artificial Sequence: Synthetic oligonucleotide
  Antisense strand to SEQ ID NO: 939276
cuaagacacagaauaaaga

SEQ ID NO: 939278 - RNA, 19 nt, Artificial Sequence
  Description of Artificial Sequence: Synthetic oligonucleotide
  Sense strand starting at position 3266 of SEQ ID NO: 913593
cuauaucuuugagauagga

SEQ ID NO: 939279 - RNA, 19 nt, Artificial Sequence
  Description of Artificial Sequence: Synthetic oligonucleotide
  Antisense strand to SEQ ID NO: 939278
uccuaucucaaagauauag

SEQ ID NO: 939280 - RNA, 19 nt, Artificial Sequence
  Description of Artificial Sequence: Synthetic oligonucleotide
  Sense strand starting at position 3497 of SEQ ID NO: 913593
gucacugucucugaaauuu

SEQ ID NO: 939281 - RNA, 19 nt, Artificial Sequence
  Description of Artificial Sequence: Synthetic oligonucleotide
  Antisense strand to SEQ ID NO: 939280
aaauuucagagacagugac

SEQ ID NO: 939282 - RNA, 19 nt, Artificial Sequence
  Description of Artificial Sequence: Synthetic oligonucleotide
  Sense strand starting at position 3081 of SEQ ID NO: 913593
uucuuuauucugugucuua

SEQ ID NO: 939283 - RNA, 19 nt, Artificial Sequence
  Description of Artificial Sequence: Synthetic oligonucleotide
  Antisense strand to SEQ ID NO: 939282
uaagacacagaauaaagaa

SEQ ID NO: 939284 - RNA, 19 nt, Artificial Sequence
  Description of Artificial Sequence: Synthetic oligonucleotide
  Sense strand starting at position 3225 of SEQ ID NO: 913593
ugcaaauaacugugugcau

SEQ ID NO: 939285 - RNA, 19 nt, Artificial Sequence
  Description of Artificial Sequence: Synthetic oligonucleotide
  Antisense strand to SEQ ID NO: 939284
augcacacaguuauuugca

SEQ ID NO: 939286 - RNA, 19 nt, Artificial Sequence
  Description of Artificial Sequence: Synthetic oligonucleotide
  Sense strand starting at position 1379 of SEQ ID NO: 913593
ccagguuucuguguagcaa

SEQ ID NO: 939287 - RNA, 19 nt, Artificial Sequence
  Description of Artificial Sequence: Synthetic oligonucleotide
  Antisense strand to SEQ ID NO: 939286
uugcuacacagaaaccugg

SEQ ID NO: 939288 - RNA, 19 nt, Artificial Sequence
  Description of Artificial Sequence: Synthetic oligonucleotide
  Sense strand starting at position 3577 of SEQ ID NO: 913593
cuguaauugccaugcucau

SEQ ID NO: 939289 - RNA, 19 nt, Artificial Sequence
  Description of Artificial Sequence: Synthetic oligonucleotide
  Antisense strand to SEQ ID NO: 939288
augagcauggcaauuacag

SEQ ID NO: 939290 - RNA, 19 nt, Artificial Sequence
  Description of Artificial Sequence: Synthetic oligonucleotide
  Sense strand starting at position 3194 of SEQ ID NO: 913593
ggugcuucagugugacuau

SEQ ID NO: 939291 - RNA, 19 nt, Artificial Sequence
  Description of Artificial Sequence: Synthetic oligonucleotide
  Antisense strand to SEQ ID NO: 939290
auagucacacugaagcacc

SEQ ID NO: 939292 - RNA, 19 nt, Artificial Sequence
  Description of Artificial Sequence: Synthetic oligonucleotide
  Sense strand starting at position 84 of SEQ ID NO: 913593
cuccaagcgaccuguaguu

SEQ ID NO: 939293 - RNA, 19 nt, Artificial Sequence
  Description of Artificial Sequence: Synthetic oligonucleotide
  Antisense strand to SEQ ID NO: 939292
aacuacaggucgcuuggag

SEQ ID NO: 939294 - RNA, 19 nt, Artificial Sequence
  Description of Artificial Sequence: Synthetic oligonucleotide
  Sense strand starting at position 2792 of SEQ ID NO: 913593
ucaaaugacuuugagaugu

SEQ ID NO: 939295 - RNA, 19 nt, Artificial Sequence
  Description of Artificial Sequence: Synthetic oligonucleotide
  Antisense strand to SEQ ID NO: 939294
acaucucaaagucauuuga

SEQ ID NO: 939296 - RNA, 19 nt, Artificial Sequence
  Description of Artificial Sequence: Synthetic oligonucleotide
  Sense strand starting at position 2349 of SEQ ID NO: 913594
uuauuaguugacuacugau

SEQ ID NO: 939297 - RNA, 19 nt, Artificial Sequence
  Description of Artificial Sequence: Synthetic oligonucleotide
  Antisense strand to SEQ ID NO: 939296
aucaguagucaacuaauaa

SEQ ID NO: 939298 - RNA, 19 nt, Artificial Sequence
  Description of Artificial Sequence: Synthetic oligonucleotide
  Sense strand starting at position 1586 of SEQ ID NO: 913594
uugacacugcuggaucaau

SEQ ID NO: 939299 - RNA, 19 nt, Artificial Sequence
  Description of Artificial Sequence: Synthetic oligonucleotide
  Antisense strand to SEQ ID NO: 939298
auugauccagcagugucaa

SEQ ID NO: 939300 - RNA, 19 nt, Artificial Sequence
  Description of Artificial Sequence: Synthetic oligonucleotide
  Sense strand starting at position 1558 of SEQ ID NO: 913594
aguuuacaagagugaauga

SEQ ID NO: 939301 - RNA, 19 nt, Artificial Sequence
  Description of Artificial Sequence: Synthetic oligonucleotide
  Antisense strand to SEQ ID NO: 939300
ucauucacucuuguaaacu

SEQ ID NO: 939302 - RNA, 19 nt, Artificial Sequence
  Description of Artificial Sequence: Synthetic oligonucleotide
  Sense strand starting at position 1337 of SEQ ID NO: 913594
gucuaagaugauggauauu

SEQ ID NO: 939303 - RNA, 19 nt, Artificial Sequence
  Description of Artificial Sequence: Synthetic oligonucleotide
  Antisense strand to SEQ ID NO: 939302
aauauccaucaucuuagac

SEQ ID NO: 939304 - RNA, 19 nt, Artificial Sequence
  Description of Artificial Sequence: Synthetic oligonucleotide
  Sense strand starting at position 1644 of SEQ ID NO: 913594
uguugaguaauaugaugaa

SEQ ID NO: 939305 - RNA, 19 nt, Artificial Sequence
  Description of Artificial Sequence: Synthetic oligonucleotide
  Antisense strand to SEQ ID NO: 939304
uucaucauauuacucaaca

SEQ ID NO: 939306 - RNA, 19 nt, Artificial Sequence
  Description of Artificial Sequence: Synthetic oligonucleotide
  Sense strand starting at position 1571 of SEQ ID NO: 913594
gaaugaaggucacuguuga

SEQ ID NO: 939307 - RNA, 19 nt, Artificial Sequence
  Description of Artificial Sequence: Synthetic oligonucleotide
  Antisense strand to SEQ ID NO: 939306
ucaacagugaccuucauuc

SEQ ID NO: 939308 - RNA, 19 nt, Artificial Sequence
  Description of Artificial Sequence: Synthetic oligonucleotide
  Sense strand starting at position 588 of SEQ ID NO: 913594
aagaaauugugagcugauc

SEQ ID NO: 939309 - RNA, 19 nt, Artificial Sequence
  Description of Artificial Sequence: Synthetic oligonucleotide
  Antisense strand to SEQ ID NO: 939308
gaucagcucacaauuucuu

SEQ ID NO: 939310 - RNA, 19 nt, Artificial Sequence
  Description of Artificial Sequence: Synthetic oligonucleotide
  Sense strand starting at position 3673 of SEQ ID NO: 913594
cagauaugcugaguuggga

SEQ ID NO: 939311 - RNA, 19 nt, Artificial Sequence
  Description of Artificial Sequence: Synthetic oligonucleotide
  Antisense strand to SEQ ID NO: 939310
ucccaacucagcauaucug

SEQ ID NO: 939312 - RNA, 19 nt, Artificial Sequence
  Description of Artificial Sequence: Synthetic oligonucleotide
  Sense strand starting at position 1353 of SEQ ID NO: 913594
auugaaauugcuuaccugu

SEQ ID NO: 939313 - RNA, 19 nt, Artificial Sequence
  Description of Artificial Sequence: Synthetic oligonucleotide
  Antisense strand to SEQ ID NO: 939312
acagguaagcaauuucaau

SEQ ID NO: 939314 - RNA, 19 nt, Artificial Sequence
  Description of Artificial Sequence: Synthetic oligonucleotide
  Sense strand starting at position 1259 of SEQ ID NO: 913594
agccaauaagauuguauug

SEQ ID NO: 939315 - RNA, 19 nt, Artificial Sequence
  Description of Artificial Sequence: Synthetic oligonucleotide
  Antisense strand to SEQ ID NO: 939314
caauacaaucuuauuggcu

SEQ ID NO: 939316 - RNA, 19 nt, Artificial Sequence
  Description of Artificial Sequence: Synthetic oligonucleotide
  Sense strand starting at position 1268 of SEQ ID NO: 913594
gauuguauuguguacugga

SEQ ID NO: 939317 - RNA, 19 nt, Artificial Sequence
  Description of Artificial Sequence: Synthetic oligonucleotide
  Antisense strand to SEQ ID NO: 939316
uccaguacacaauacaauc

SEQ ID NO: 939318 - RNA, 19 nt, Artificial Sequence
  Description of Artificial Sequence: Synthetic oligonucleotide
  Sense strand starting at position 3492 of SEQ ID NO: 913594
aagcuuuaaggaugcugaa

SEQ ID NO: 939319 - RNA, 19 nt, Artificial Sequence
  Description of Artificial Sequence: Synthetic oligonucleotide
  Antisense strand to SEQ ID NO: 939318
uucagcauccuuaaagcuu

SEQ ID NO: 939320 - RNA, 19 nt, Artificial Sequence
  Description of Artificial Sequence: Synthetic oligonucleotide
  Sense strand starting at position 2346 of SEQ ID NO: 913594
uuguuauuaguugacuacu

SEQ ID NO: 939321 - RNA, 19 nt, Artificial Sequence
  Description of Artificial Sequence: Synthetic oligonucleotide
  Antisense strand to SEQ ID NO: 939320
aguagucaacuaauaacaa

SEQ ID NO: 939322 - RNA, 19 nt, Artificial Sequence
  Description of Artificial Sequence: Synthetic oligonucleotide
  Sense strand starting at position 1836 of SEQ ID NO: 913594
guaauuguuccaugaagac

SEQ ID NO: 939323 - RNA, 19 nt, Artificial Sequence
  Description of Artificial Sequence: Synthetic oligonucleotide
  Antisense strand to SEQ ID NO: 939322
gucuucauggaacaauuac

SEQ ID NO: 939324 - RNA, 19 nt, Artificial Sequence
  Description of Artificial Sequence: Synthetic oligonucleotide
  Sense strand starting at position 1543 of SEQ ID NO: 913594
cagaauugaugguccaguu

SEQ ID NO: 939325 - RNA, 19 nt, Artificial Sequence
  Description of Artificial Sequence: Synthetic oligonucleotide
  Antisense strand to SEQ ID NO: 939324
aacuggaccaucaauucug

SEQ ID NO: 939326 - RNA, 19 nt, Artificial Sequence
  Description of Artificial Sequence: Synthetic oligonucleotide
  Sense strand starting at position 724 of SEQ ID NO: 913594
uguauaaauuauccaggca

SEQ ID NO: 939327 - RNA, 19 nt, Artificial Sequence
  Description of Artificial Sequence: Synthetic oligonucleotide
  Antisense strand to SEQ ID NO: 939326
ugccuggauaauuuauaca

SEQ ID NO: 939328 - RNA, 19 nt, Artificial Sequence
  Description of Artificial Sequence: Synthetic oligonucleotide
  Sense strand starting at position 2495 of SEQ ID NO: 913594
ugguaaauaucuuuccuug

SEQ ID NO: 939329 - RNA, 19 nt, Artificial Sequence
  Description of Artificial Sequence: Synthetic oligonucleotide
  Antisense strand to SEQ ID NO: 939328
caaggaaagauauuuacca

SEQ ID NO: 939330 - RNA, 19 nt, Artificial Sequence
  Description of Artificial Sequence: Synthetic oligonucleotide
  Sense strand starting at position 2348 of SEQ ID NO: 913594
guuauuaguugacuacuga

SEQ ID NO: 939331 - RNA, 19 nt, Artificial Sequence
  Description of Artificial Sequence: Synthetic oligonucleotide
  Antisense strand to SEQ ID NO: 939330
ucaguagucaacuaauaac

SEQ ID NO: 939332 - RNA, 19 nt, Artificial Sequence
  Description of Artificial Sequence: Synthetic oligonucleotide
  Sense strand starting at position 1470 of SEQ ID NO: 913594
acuguuaagccauggaacu

SEQ ID NO: 939333 - RNA, 19 nt, Artificial Sequence
  Description of Artificial Sequence: Synthetic oligonucleotide
  Antisense strand to SEQ ID NO: 939332
aguuccauggcuuaacagu

SEQ ID NO: 939334 - RNA, 19 nt, Artificial Sequence
  Description of Artificial Sequence: Synthetic oligonucleotide
  Sense strand starting at position 3658 of SEQ ID NO: 913594
ccuauucuagugugacaga

SEQ ID NO: 939335 - RNA, 19 nt, Artificial Sequence
  Description of Artificial Sequence: Synthetic oligonucleotide
  Antisense strand to SEQ ID NO: 939334
ucugucacacuagaauagg

SEQ ID NO: 939336 - RNA, 19 nt, Artificial Sequence
  Description of Artificial Sequence: Synthetic oligonucleotide
  Sense strand starting at position 1070 of SEQ ID NO: 913594
gcugucuauguagaaaucu

SEQ ID NO: 939337 - RNA, 19 nt, Artificial Sequence
  Description of Artificial Sequence: Synthetic oligonucleotide
  Antisense strand to SEQ ID NO: 939336
agauuucuacauagacagc

SEQ ID NO: 939338 - RNA, 19 nt, Artificial Sequence
  Description of Artificial Sequence: Synthetic oligonucleotide
  Sense strand starting at position 1794 of SEQ ID NO: 913594
uugaaucaguguuucuaca

SEQ ID NO: 939339 - RNA, 19 nt, Artificial Sequence
  Description of Artificial Sequence: Synthetic oligonucleotide
  Antisense strand to SEQ ID NO: 939338
uguagaaacacugauucaa

SEQ ID NO: 939340 - RNA, 19 nt, Artificial Sequence
  Description of Artificial Sequence: Synthetic oligonucleotide
  Sense strand starting at position 557 of SEQ ID NO: 913594
acauaaaugucugucagug

SEQ ID NO: 939341 - RNA, 19 nt, Artificial Sequence
  Description of Artificial Sequence: Synthetic oligonucleotide
  Antisense strand to SEQ ID NO: 939340
cacugacagacauuuaugu

SEQ ID NO: 939342 - RNA, 19 nt, Artificial Sequence
  Description of Artificial Sequence: Synthetic oligonucleotide
  Sense strand starting at position 2291 of SEQ ID NO: 913594
gggaacaucugucugcuua

SEQ ID NO: 939343 - RNA, 19 nt, Artificial Sequence
  Description of Artificial Sequence: Synthetic oligonucleotide
  Antisense strand to SEQ ID NO: 939342
uaagcagacagauguuccc

SEQ ID NO: 939344 - RNA, 19 nt, Artificial Sequence
  Description of Artificial Sequence: Synthetic oligonucleotide
  Sense strand starting at position 3699 of SEQ ID NO: 913594
uauuguugguuaguaauga

SEQ ID NO: 939345 - RNA, 19 nt, Artificial Sequence
  Description of Artificial Sequence: Synthetic oligonucleotide
  Antisense strand to SEQ ID NO: 939344
ucauuacuaaccaacaaua

SEQ ID NO: 939346 - RNA, 19 nt, Artificial Sequence
  Description of Artificial Sequence: Synthetic oligonucleotide
  Sense strand starting at position 1744 of SEQ ID NO: 913594
uuaucacugucagcuauga

SEQ ID NO: 939347 - RNA, 19 nt, Artificial Sequence
  Description of Artificial Sequence: Synthetic oligonucleotide
  Antisense strand to SEQ ID NO: 939346
ucauagcugacagugauaa

SEQ ID NO: 939348 - RNA, 19 nt, Artificial Sequence
  Description of Artificial Sequence: Synthetic oligonucleotide
  Sense strand starting at position 1202 of SEQ ID NO: 913594
auugcaauuguguaguaug

SEQ ID NO: 939349 - RNA, 19 nt, Artificial Sequence
  Description of Artificial Sequence: Synthetic oligonucleotide
  Antisense strand to SEQ ID NO: 939348
cauacuacacaauugcaau

SEQ ID NO: 939350 - RNA, 19 nt, Artificial Sequence
  Description of Artificial Sequence: Synthetic oligonucleotide
  Sense strand starting at position 2344 of SEQ ID NO: 913594
ccuuguuauuaguugacua

SEQ ID NO: 939351 - RNA, 19 nt, Artificial Sequence
  Description of Artificial Sequence: Synthetic oligonucleotide
  Antisense strand to SEQ ID NO: 939350
uagucaacuaauaacaagg

SEQ ID NO: 939352 - RNA, 19 nt, Artificial Sequence
  Description of Artificial Sequence: Synthetic oligonucleotide
  Sense strand starting at position 1067 of SEQ ID NO: 913594
caugcugucuauguagaaa

SEQ ID NO: 939353 - RNA, 19 nt, Artificial Sequence
  Description of Artificial Sequence: Synthetic oligonucleotide
  Antisense strand to SEQ ID NO: 939352
uuucuacauagacagcaug

SEQ ID NO: 939354 - RNA, 19 nt, Artificial Sequence
  Description of Artificial Sequence: Synthetic oligonucleotide
  Sense strand starting at position 3692 of SEQ ID NO: 913594
gcaaauauauuguugguua

SEQ ID NO: 939355 - RNA, 19 nt, Artificial Sequence
  Description of Artificial Sequence: Synthetic oligonucleotide
  Antisense strand to SEQ ID NO: 939354
uaaccaacaauauauuugc

SEQ ID NO: 939356 - RNA, 19 nt, Artificial Sequence
  Description of Artificial Sequence: Synthetic oligonucleotide
  Sense strand starting at position 1788 of SEQ ID NO: 913594
guuguauugaaucaguguu

SEQ ID NO: 939357 - RNA, 19 nt, Artificial Sequence
  Description of Artificial Sequence: Synthetic oligonucleotide
  Antisense strand to SEQ ID NO: 939356
aacacugauucaauacaac

SEQ ID NO: 939358 - RNA, 19 nt, Artificial Sequence
  Description of Artificial Sequence: Synthetic oligonucleotide
  Sense strand starting at position 1688 of SEQ ID NO: 913594
ucucaugagcuuuguaaau

SEQ ID NO: 939359 - RNA, 19 nt, Artificial Sequence
  Description of Artificial Sequence: Synthetic oligonucleotide
  Antisense strand to SEQ ID NO: 939358
auuuacaaagcucaugaga

SEQ ID NO: 939360 - RNA, 19 nt, Artificial Sequence
  Description of Artificial Sequence: Synthetic oligonucleotide
  Sense strand starting at position 1066 of SEQ ID NO: 913594
acaugcugucuauguagaa

SEQ ID NO: 939361 - RNA, 19 nt, Artificial Sequence
  Description of Artificial Sequence: Synthetic oligonucleotide
  Antisense strand to SEQ ID NO: 939360
uucuacauagacagcaugu

SEQ ID NO: 939362 - RNA, 19 nt, Artificial Sequence
  Description of Artificial Sequence: Synthetic oligonucleotide
  Sense strand starting at position 2292 of SEQ ID NO: 913594
ggaacaucugucugcuuau

SEQ ID NO: 939363 - RNA, 19 nt, Artificial Sequence
  Description of Artificial Sequence: Synthetic oligonucleotide
  Antisense strand to SEQ ID NO: 939362
auaagcagacagauguucc

SEQ ID NO: 939364 - RNA, 19 nt, Artificial Sequence
  Description of Artificial Sequence: Synthetic oligonucleotide
  Sense strand starting at position 3446 of SEQ ID NO: 913594
gcucguagacaauacguaa

SEQ ID NO: 939365 - RNA, 19 nt, Artificial Sequence
  Description of Artificial Sequence: Synthetic oligonucleotide
  Antisense strand to SEQ ID NO: 939364
uuacguauugucuacgagc

SEQ ID NO: 939366 - RNA, 19 nt, Artificial Sequence
  Description of Artificial Sequence: Synthetic oligonucleotide
  Sense strand starting at position 442 of SEQ ID NO: 913594
aguaauuccucuucucagu

SEQ ID NO: 939367 - RNA, 19 nt, Artificial Sequence
  Description of Artificial Sequence: Synthetic oligonucleotide
  Antisense strand to SEQ ID NO: 939366
acugagaagaggaauuacu

SEQ ID NO: 939368 - RNA, 19 nt, Artificial Sequence
  Description of Artificial Sequence: Synthetic oligonucleotide
  Sense strand starting at position 891 of SEQ ID NO: 913594
ucucauguauaucuuguau

SEQ ID NO: 939369 - RNA, 19 nt, Artificial Sequence
  Description of Artificial Sequence: Synthetic oligonucleotide
  Antisense strand to SEQ ID NO: 939368
auacaagauauacaugaga

SEQ ID NO: 939370 - RNA, 19 nt, Artificial Sequence
  Description of Artificial Sequence: Synthetic oligonucleotide
  Sense strand starting at position 1639 of SEQ ID NO: 913594
gcugcuguugaguaauaug

SEQ ID NO: 939371 - RNA, 19 nt, Artificial Sequence
  Description of Artificial Sequence: Synthetic oligonucleotide
  Antisense strand to SEQ ID NO: 939370
cauauuacucaacagcagc

SEQ ID NO: 939372 - RNA, 19 nt, Artificial Sequence
  Description of Artificial Sequence: Synthetic oligonucleotide
  Sense strand starting at position 2333 of SEQ ID NO: 913594
agaaucaugugccuuguua

SEQ ID NO: 939373 - RNA, 19 nt, Artificial Sequence
  Description of Artificial Sequence: Synthetic oligonucleotide
  Antisense strand to SEQ ID NO: 939372
uaacaaggcacaugauucu

SEQ ID NO: 939374 - RNA, 19 nt, Artificial Sequence
  Description of Artificial Sequence: Synthetic oligonucleotide
  Sense strand starting at position 1659 of SEQ ID NO: 913594
ugaacacuucccggcuuua

SEQ ID NO: 939375 - RNA, 19 nt, Artificial Sequence
  Description of Artificial Sequence: Synthetic oligonucleotide
  Antisense strand to SEQ ID NO: 939374
uaaagccgggaaguguuca

SEQ ID NO: 939376 - RNA, 19 nt, Artificial Sequence
  Description of Artificial Sequence: Synthetic oligonucleotide
  Sense strand starting at position 3634 of SEQ ID NO: 913595
cuucccugccaagagaaau

SEQ ID NO: 939377 - RNA, 19 nt, Artificial Sequence
  Description of Artificial Sequence: Synthetic oligonucleotide
  Antisense strand to SEQ ID NO: 939376
auuucucuuggcagggaag

SEQ ID NO: 939378 - RNA, 19 nt, Artificial Sequence
  Description of Artificial Sequence: Synthetic oligonucleotide
  Sense strand starting at position 1000 of SEQ ID NO: 913595
aagauuucguguuuacauc

SEQ ID NO: 939379 - RNA, 19 nt, Artificial Sequence
  Description of Artificial Sequence: Synthetic oligonucleotide
  Antisense strand to SEQ ID NO: 939378
gauguaaacacgaaaucuu

SEQ ID NO: 939380 - RNA, 19 nt, Artificial Sequence
  Description of Artificial Sequence: Synthetic oligonucleotide
  Sense strand starting at position 793 of SEQ ID NO: 913595
guaaguuaugcuccguuua

SEQ ID NO: 939381 - RNA, 19 nt, Artificial Sequence
  Description of Artificial Sequence: Synthetic oligonucleotide
  Antisense strand to SEQ ID NO: 939380
uaaacggagcauaacuuac

SEQ ID NO: 939382 - RNA, 19 nt, Artificial Sequence
  Description of Artificial Sequence: Synthetic oligonucleotide
  Sense strand starting at position 1524 of SEQ ID NO: 913595
guguguuugcacuuacuuu

SEQ ID NO: 939383 - RNA, 19 nt, Artificial Sequence
  Description of Artificial Sequence: Synthetic oligonucleotide
  Antisense strand to SEQ ID NO: 939382
aaaguaagugcaaacacac

SEQ ID NO: 939384 - RNA, 19 nt, Artificial Sequence
  Description of Artificial Sequence: Synthetic oligonucleotide
  Sense strand starting at position 205 of SEQ ID NO: 913595
uggaauucucauuagcaug

SEQ ID NO: 939385 - RNA, 19 nt, Artificial Sequence
  Description of Artificial Sequence: Synthetic oligonucleotide
  Antisense strand to SEQ ID NO: 939384
caugcuaaugagaauucca

SEQ ID NO: 939386 - RNA, 19 nt, Artificial Sequence
  Description of Artificial Sequence: Synthetic oligonucleotide
  Sense strand starting at position 1514 of SEQ ID NO: 913595
gggugugaucguguguuug

SEQ ID NO: 939387 - RNA, 19 nt, Artificial Sequence
  Description of Artificial Sequence: Synthetic oligonucleotide
  Antisense strand to SEQ ID NO: 939386
caaacacacgaucacaccc

SEQ ID NO: 939388 - RNA, 19 nt, Artificial Sequence
  Description of Artificial Sequence: Synthetic oligonucleotide
  Sense strand starting at position 427 of SEQ ID NO: 913595
ucaggauuugagugcugca

SEQ ID NO: 939389 - RNA, 19 nt, Artificial Sequence
  Description of Artificial Sequence: Synthetic oligonucleotide
  Antisense strand to SEQ ID NO: 939388
ugcagcacucaaauccuga

SEQ ID NO: 939390 - RNA, 19 nt, Artificial Sequence
  Description of Artificial Sequence: Synthetic oligonucleotide
  Sense strand starting at position 518 of SEQ ID NO: 913595
aggcaaucccuuugaaagg

SEQ ID NO: 939391 - RNA, 19 nt, Artificial Sequence
  Description of Artificial Sequence: Synthetic oligonucleotide
  Antisense strand to SEQ ID NO: 939390
ccuuucaaagggauugccu

SEQ ID NO: 939392 - RNA, 19 nt, Artificial Sequence
  Description of Artificial Sequence: Synthetic oligonucleotide
  Sense strand starting at position 676 of SEQ ID NO: 913595
gcccauguggucguuuauu

SEQ ID NO: 939393 - RNA, 19 nt, Artificial Sequence
  Description of Artificial Sequence: Synthetic oligonucleotide
  Antisense strand to SEQ ID NO: 939392
aauaaacgaccacaugggc

SEQ ID NO: 939394 - RNA, 19 nt, Artificial Sequence
  Description of Artificial Sequence: Synthetic oligonucleotide
  Sense strand starting at position 471 of SEQ ID NO: 913595
ggaagucuguaacucagga

SEQ ID NO: 939395 - RNA, 19 nt, Artificial Sequence
  Description of Artificial Sequence: Synthetic oligonucleotide
  Antisense strand to SEQ ID NO: 939394
uccugaguuacagacuucc

SEQ ID NO: 939396 - RNA, 19 nt, Artificial Sequence
  Description of Artificial Sequence: Synthetic oligonucleotide
  Sense strand starting at position 3914 of SEQ ID NO: 913595
ugccaaagauaagugaauu

SEQ ID NO: 939397 - RNA, 19 nt, Artificial Sequence
  Description of Artificial Sequence: Synthetic oligonucleotide
  Antisense strand to SEQ ID NO: 939396
aauucacuuaucuuuggca

SEQ ID NO: 939398 - RNA, 19 nt, Artificial Sequence
  Description of Artificial Sequence: Synthetic oligonucleotide
  Sense strand starting at position 1972 of SEQ ID NO: 913595
gccgaaagcguuuccucga

SEQ ID NO: 939399 - RNA, 19 nt, Artificial Sequence
  Description of Artificial Sequence: Synthetic oligonucleotide
  Antisense strand to SEQ ID NO: 939398
ucgaggaaacgcuuucggc

SEQ ID NO: 939400 - RNA, 19 nt, Artificial Sequence
  Description of Artificial Sequence: Synthetic oligonucleotide
  Sense strand starting at position 204 of SEQ ID NO: 913595
auggaauucucauuagcau

SEQ ID NO: 939401 - RNA, 19 nt, Artificial Sequence
  Description of Artificial Sequence: Synthetic oligonucleotide
  Antisense strand to SEQ ID NO: 939400
augcuaaugagaauuccau

SEQ ID NO: 939402 - RNA, 19 nt, Artificial Sequence
  Description of Artificial Sequence: Synthetic oligonucleotide
  Sense strand starting at position 3973 of SEQ ID NO: 913595
ggugccggccgucuaauua

SEQ ID NO: 939403 - RNA, 19 nt, Artificial Sequence
  Description of Artificial Sequence: Synthetic oligonucleotide
  Antisense strand to SEQ ID NO: 939402
uaauuagacggccggcacc

SEQ ID NO: 939404 - RNA, 19 nt, Artificial Sequence
  Description of Artificial Sequence: Synthetic oligonucleotide
  Sense strand starting at position 500 of SEQ ID NO: 913595
ggugaugcagcagaacuua

SEQ ID NO: 939405 - RNA, 19 nt, Artificial Sequence
  Description of Artificial Sequence: Synthetic oligonucleotide
  Antisense strand to SEQ ID NO: 939404
uaaguucugcugcaucacc

SEQ ID NO: 939406 - RNA, 19 nt, Artificial Sequence
  Description of Artificial Sequence: Synthetic oligonucleotide
  Sense strand starting at position 216 of SEQ ID NO: 913595
uuagcaugucaaggaaacu

SEQ ID NO: 939407 - RNA, 19 nt, Artificial Sequence
  Description of Artificial Sequence: Synthetic oligonucleotide
  Antisense strand to SEQ ID NO: 939406
aguuuccuugacaugcuaa

SEQ ID NO: 939408 - RNA, 19 nt, Artificial Sequence
  Description of Artificial Sequence: Synthetic oligonucleotide
  Sense strand starting at position 984 of SEQ ID NO: 913595
ccuucuaugccaugagaag

SEQ ID NO: 939409 - RNA, 19 nt, Artificial Sequence
  Description of Artificial Sequence: Synthetic oligonucleotide
  Antisense strand to SEQ ID NO: 939408
cuucucauggcauagaagg

SEQ ID NO: 939410 - RNA, 19 nt, Artificial Sequence
  Description of Artificial Sequence: Synthetic oligonucleotide
  Sense strand starting at position 1281 of SEQ ID NO: 913595
caggauuccuagcucgaag

SEQ ID NO: 939411 - RNA, 19 nt, Artificial Sequence
  Description of Artificial Sequence: Synthetic oligonucleotide
  Antisense strand to SEQ ID NO: 939410
cuucgagcuaggaauccug

SEQ ID NO: 939412 - RNA, 19 nt, Artificial Sequence
  Description of Artificial Sequence: Synthetic oligonucleotide
  Sense strand starting at position 602 of SEQ ID NO: 913595
gcucuuagggcuugcauuu

SEQ ID NO: 939413 - RNA, 19 nt, Artificial Sequence
  Description of Artificial Sequence: Synthetic oligonucleotide
  Antisense strand to SEQ ID NO: 939412
aaaugcaagcccuaagagc

SEQ ID NO: 939414 - RNA, 19 nt, Artificial Sequence
  Description of Artificial Sequence: Synthetic oligonucleotide
  Sense strand starting at position 1914 of SEQ ID NO: 913595
gcggaauauucuccugaau

SEQ ID NO: 939415 - RNA, 19 nt, Artificial Sequence
  Description of Artificial Sequence: Synthetic oligonucleotide
  Antisense strand to SEQ ID NO: 939414
auucaggagaauauuccgc

SEQ ID NO: 939416 - RNA, 19 nt, Artificial Sequence
  Description of Artificial Sequence: Synthetic oligonucleotide
  Sense strand starting at position 948 of SEQ ID NO: 913595
gugccaucgacuuauugau

SEQ ID NO: 939417 - RNA, 19 nt, Artificial Sequence
  Description of Artificial Sequence: Synthetic oligonucleotide
  Antisense strand to SEQ ID NO: 939416
aucaauaagucgauggcac

SEQ ID NO: 939418 - RNA, 19 nt, Artificial Sequence
  Description of Artificial Sequence: Synthetic oligonucleotide
  Sense strand starting at position 319 of SEQ ID NO: 913595
cgugcagaggcauaaacuu

SEQ ID NO: 939419 - RNA, 19 nt, Artificial Sequence
  Description of Artificial Sequence: Synthetic oligonucleotide
  Antisense strand to SEQ ID NO: 939418
aaguuuaugccucugcacg

SEQ ID NO: 939420 - RNA, 19 nt, Artificial Sequence
  Description of Artificial Sequence: Synthetic oligonucleotide
  Sense strand starting at position 3618 of SEQ ID NO: 913595
ggaacuguccuaggcacuu

SEQ ID NO: 939421 - RNA, 19 nt, Artificial Sequence
  Description of Artificial Sequence: Synthetic oligonucleotide
  Antisense strand to SEQ ID NO: 939420
aagugccuaggacaguucc

SEQ ID NO: 939422 - RNA, 19 nt, Artificial Sequence
  Description of Artificial Sequence: Synthetic oligonucleotide
  Sense strand starting at position 343 of SEQ ID NO: 913595
ccuguuuggucauugaauc

SEQ ID NO: 939423 - RNA, 19 nt, Artificial Sequence
  Description of Artificial Sequence: Synthetic oligonucleotide
  Antisense strand to SEQ ID NO: 939422
gauucaaugaccaaacagg

SEQ ID NO: 939424 - RNA, 19 nt, Artificial Sequence
  Description of Artificial Sequence: Synthetic oligonucleotide
  Sense strand starting at position 344 of SEQ ID NO: 913595
cuguuuggucauugaaucu

SEQ ID NO: 939425 - RNA, 19 nt, Artificial Sequence
  Description of Artificial Sequence: Synthetic oligonucleotide
  Antisense strand to SEQ ID NO: 939424
agauucaaugaccaaacag

SEQ ID NO: 939426 - RNA, 19 nt, Artificial Sequence
  Description of Artificial Sequence: Synthetic oligonucleotide
  Sense strand starting at position 735 of SEQ ID NO: 913595
gcugaacucuuucuaaugu

SEQ ID NO: 939427 - RNA, 19 nt, Artificial Sequence
  Description of Artificial Sequence: Synthetic oligonucleotide
  Antisense strand to SEQ ID NO: 939426
acauuagaaagaguucagc

SEQ ID NO: 939428 - RNA, 19 nt, Artificial Sequence
  Description of Artificial Sequence: Synthetic oligonucleotide
  Sense strand starting at position 1009 of SEQ ID NO: 913595
uguuuacauccaugucauu

SEQ ID NO: 939429 - RNA, 19 nt, Artificial Sequence
  Description of Artificial Sequence: Synthetic oligonucleotide
  Antisense strand to SEQ ID NO: 939428
aaugacauggauguaaaca

SEQ ID NO: 939430 - RNA, 19 nt, Artificial Sequence
  Description of Artificial Sequence: Synthetic oligonucleotide
  Sense strand starting at position 2724 of SEQ ID NO: 913595
ggaaguuacuacucgccca

SEQ ID NO: 939431 - RNA, 19 nt, Artificial Sequence
  Description of Artificial Sequence: Synthetic oligonucleotide
  Antisense strand to SEQ ID NO: 939430
ugggcgaguaguaacuucc

SEQ ID NO: 939432 - RNA, 19 nt, Artificial Sequence
  Description of Artificial Sequence: Synthetic oligonucleotide
  Sense strand starting at position 1913 of SEQ ID NO: 913595
cgcggaauauucuccugaa

SEQ ID NO: 939433 - RNA, 19 nt, Artificial Sequence
  Description of Artificial Sequence: Synthetic oligonucleotide
  Antisense strand to SEQ ID NO: 939432
uucaggagaauauuccgcg

SEQ ID NO: 939434 - RNA, 19 nt, Artificial Sequence
  Description of Artificial Sequence: Synthetic oligonucleotide
  Sense strand starting at position 932 of SEQ ID NO: 913595
cgguuaaucaugugaagug

SEQ ID NO: 939435 - RNA, 19 nt, Artificial Sequence
  Description of Artificial Sequence: Synthetic oligonucleotide
  Antisense strand to SEQ ID NO: 939434
cacuucacaugauuaaccg

SEQ ID NO: 939436 - RNA, 19 nt, Artificial Sequence
  Description of Artificial Sequence: Synthetic oligonucleotide
  Sense strand starting at position 378 of SEQ ID NO: 913595
agaucuugcucuguucuga

SEQ ID NO: 939437 - RNA, 19 nt, Artificial Sequence
  Description of Artificial Sequence: Synthetic oligonucleotide
  Antisense strand to SEQ ID NO: 939436
ucagaacagagcaagaucu

SEQ ID NO: 939438 - RNA, 19 nt, Artificial Sequence
  Description of Artificial Sequence: Synthetic oligonucleotide
  Sense strand starting at position 2727 of SEQ ID NO: 913595
aguuacuacucgcccaaau

SEQ ID NO: 939439 - RNA, 19 nt, Artificial Sequence
  Description of Artificial Sequence: Synthetic oligonucleotide
  Antisense strand to SEQ ID NO: 939438
auuugggcgaguaguaacu

SEQ ID NO: 939440 - RNA, 19 nt, Artificial Sequence
  Description of Artificial Sequence: Synthetic oligonucleotide
  Sense strand starting at position 1007 of SEQ ID NO: 913595
cguguuuacauccauguca

SEQ ID NO: 939441 - RNA, 19 nt, Artificial Sequence
  Description of Artificial Sequence: Synthetic oligonucleotide
  Antisense strand to SEQ ID NO: 939440
ugacauggauguaaacacg

SEQ ID NO: 939442 - RNA, 19 nt, Artificial Sequence
  Description of Artificial Sequence: Synthetic oligonucleotide
  Sense strand starting at position 3755 of SEQ ID NO: 913595
ccgugaauuggcagcgugu

SEQ ID NO: 939443 - RNA, 19 nt, Artificial Sequence
  Description of Artificial Sequence: Synthetic oligonucleotide
  Antisense strand to SEQ ID NO: 939442
acacgcugccaauucacgg

SEQ ID NO: 939444 - RNA, 19 nt, Artificial Sequence
  Description of Artificial Sequence: Synthetic oligonucleotide
  Sense strand starting at position 957 of SEQ ID NO: 913595
acuuauugaucguuuaugu

SEQ ID NO: 939445 - RNA, 19 nt, Artificial Sequence
  Description of Artificial Sequence: Synthetic oligonucleotide
  Antisense strand to SEQ ID NO: 939444
acauaaacgaucaauaagu

SEQ ID NO: 939446 - RNA, 19 nt, Artificial Sequence
  Description of Artificial Sequence: Synthetic oligonucleotide
  Sense strand starting at position 2880 of SEQ ID NO: 913595
ugcccagaugcaugcaaua

SEQ ID NO: 939447 - RNA, 19 nt, Artificial Sequence
  Description of Artificial Sequence: Synthetic oligonucleotide
  Antisense strand to SEQ ID NO: 939446
uauugcaugcaucugggca

SEQ ID NO: 939448 - RNA, 19 nt, Artificial Sequence
  Description of Artificial Sequence: Synthetic oligonucleotide
  Sense strand starting at position 954 of SEQ ID NO: 913595
ucgacuuauugaucguuua

SEQ ID NO: 939449 - RNA, 19 nt, Artificial Sequence
  Description of Artificial Sequence: Synthetic oligonucleotide
  Antisense strand to SEQ ID NO: 939448
uaaacgaucaauaagucga

SEQ ID NO: 939450 - RNA, 19 nt, Artificial Sequence
  Description of Artificial Sequence: Synthetic oligonucleotide
  Sense strand starting at position 955 of SEQ ID NO: 913595
cgacuuauugaucguuuau

SEQ ID NO: 939451 - RNA, 19 nt, Artificial Sequence
  Description of Artificial Sequence: Synthetic oligonucleotide
  Antisense strand to SEQ ID NO: 939450
auaaacgaucaauaagucg

SEQ ID NO: 939452 - RNA, 19 nt, Artificial Sequence
  Description of Artificial Sequence: Synthetic oligonucleotide
  Sense strand starting at position 3977 of SEQ ID NO: 913595
ccggccgucuaauuaaaua

SEQ ID NO: 939453 - RNA, 19 nt, Artificial Sequence
  Description of Artificial Sequence: Synthetic oligonucleotide
  Antisense strand to SEQ ID NO: 939452
uauuuaauuagacggccgg

SEQ ID NO: 939454 - RNA, 19 nt, Artificial Sequence
  Description of Artificial Sequence: Synthetic oligonucleotide
  Sense strand starting at position 795 of SEQ ID NO: 913595
aaguuaugcuccguuuaug

SEQ ID NO: 939455 - RNA, 19 nt, Artificial Sequence
  Description of Artificial Sequence: Synthetic oligonucleotide
  Antisense strand to SEQ ID NO: 939454
cauaaacggagcauaacuu

SEQ ID NO: 939456 - RNA, 19 nt, Artificial Sequence
  Description of Artificial Sequence: Synthetic oligonucleotide
  Sense strand starting at position 1303 of SEQ ID NO: 913596
ugugcuuugcuggcaacua

SEQ ID NO: 939457 - RNA, 19 nt, Artificial Sequence
  Description of Artificial Sequence: Synthetic oligonucleotide
  Antisense strand to SEQ ID NO: 939456
uaguugccagcaaagcaca

SEQ ID NO: 939458 - RNA, 19 nt, Artificial Sequence
  Description of Artificial Sequence: Synthetic oligonucleotide
  Sense strand starting at position 184 of SEQ ID NO: 913596
ucacauauuugggaaugaa

SEQ ID NO: 939459 - RNA, 19 nt, Artificial Sequence
  Description of Artificial Sequence: Synthetic oligonucleotide
  Antisense strand to SEQ ID NO: 939458
uucauucccaaauauguga

SEQ ID NO: 939460 - RNA, 19 nt, Artificial Sequence
  Description of Artificial Sequence: Synthetic oligonucleotide
  Sense strand starting at position 198 of SEQ ID NO: 913596
augaaauuccugggugaua

SEQ ID NO: 939461 - RNA, 19 nt, Artificial Sequence
  Description of Artificial Sequence: Synthetic oligonucleotide
  Antisense strand to SEQ ID NO: 939460
uaucacccaggaauuucau

SEQ ID NO: 939462 - RNA, 19 nt, Artificial Sequence
  Description of Artificial Sequence: Synthetic oligonucleotide
  Sense strand starting at position 200 of SEQ ID NO: 913596
gaaauuccugggugauaua

SEQ ID NO: 939463 - RNA, 19 nt, Artificial Sequence
  Description of Artificial Sequence: Synthetic oligonucleotide
  Antisense strand to SEQ ID NO: 939462
uauaucacccaggaauuuc

SEQ ID NO: 939464 - RNA, 19 nt, Artificial Sequence
  Description of Artificial Sequence: Synthetic oligonucleotide
  Sense strand starting at position 2277 of SEQ ID NO: 913596
gagcuaugccuauagagag

SEQ ID NO: 939465 - RNA, 19 nt, Artificial Sequence
  Description of Artificial Sequence: Synthetic oligonucleotide
  Antisense strand to SEQ ID NO: 939464
cucucuauaggcauagcuc

SEQ ID NO: 939466 - RNA, 19 nt, Artificial Sequence
  Description of Artificial Sequence: Synthetic oligonucleotide
  Sense strand starting at position 1475 of SEQ ID NO: 913596
aaggucuuccaauggauau

SEQ ID NO: 939467 - RNA, 19 nt, Artificial Sequence
  Description of Artificial Sequence: Synthetic oligonucleotide
  Antisense strand to SEQ ID NO: 939466
auauccauuggaagaccuu

SEQ ID NO: 939468 - RNA, 19 nt, Artificial Sequence
  Description of Artificial Sequence: Synthetic oligonucleotide
  Sense strand starting at position 2265 of SEQ ID NO: 913596
cugugaacaccagagcuau

SEQ ID NO: 939469 - RNA, 19 nt, Artificial Sequence
  Description of Artificial Sequence: Synthetic oligonucleotide
  Antisense strand to SEQ ID NO: 939468
auagcucugguguucacag

SEQ ID NO: 939470 - RNA, 19 nt, Artificial Sequence
  Description of Artificial Sequence: Synthetic oligonucleotide
  Sense strand starting at position 3886 of SEQ ID NO: 913596
cuguuuggcgugcuaauua

SEQ ID NO: 939471 - RNA, 19 nt, Artificial Sequence
  Description of Artificial Sequence: Synthetic oligonucleotide
  Antisense strand to SEQ ID NO: 939470
uaauuagcacgccaaacag

SEQ ID NO: 939472 - RNA, 19 nt, Artificial Sequence
  Description of Artificial Sequence: Synthetic oligonucleotide
  Sense strand starting at position 1588 of SEQ ID NO: 913596
cgcagaauugaugacaucu

SEQ ID NO: 939473 - RNA, 19 nt, Artificial Sequence
  Description of Artificial Sequence: Synthetic oligonucleotide
  Antisense strand to SEQ ID NO: 939472
agaugucaucaauucugcg

SEQ ID NO: 939474 - RNA, 19 nt, Artificial Sequence
  Description of Artificial Sequence: Synthetic oligonucleotide
  Sense strand starting at position 199 of SEQ ID NO: 913596
ugaaauuccugggugauau

SEQ ID NO: 939475 - RNA, 19 nt, Artificial Sequence
  Description of Artificial Sequence: Synthetic oligonucleotide
  Antisense strand to SEQ ID NO: 939474
auaucacccaggaauuuca

SEQ ID NO: 939476 - RNA, 19 nt, Artificial Sequence
  Description of Artificial Sequence: Synthetic oligonucleotide
  Sense strand starting at position 584 of SEQ ID NO: 913596
gggccuuaucuaugaagaa

SEQ ID NO: 939477 - RNA, 19 nt, Artificial Sequence
  Description of Artificial Sequence: Synthetic oligonucleotide
  Antisense strand to SEQ ID NO: 939476
uucuucauagauaaggccc

SEQ ID NO: 939478 - RNA, 19 nt, Artificial Sequence
  Description of Artificial Sequence: Synthetic oligonucleotide
  Sense strand starting at position 2275 of SEQ ID NO: 913596
cagagcuaugccuauagag

SEQ ID NO: 939479 - RNA, 19 nt, Artificial Sequence
  Description of Artificial Sequence: Synthetic oligonucleotide
  Antisense strand to SEQ ID NO: 939478
cucuauaggcauagcucug

SEQ ID NO: 939480 - RNA, 19 nt, Artificial Sequence
  Description of Artificial Sequence: Synthetic oligonucleotide
  Sense strand starting at position 2610 of SEQ ID NO: 913596
ugacuuagaucuguauuaa

SEQ ID NO: 939481 - RNA, 19 nt, Artificial Sequence
  Description of Artificial Sequence: Synthetic oligonucleotide
  Antisense strand to SEQ ID NO: 939480
uuaauacagaucuaaguca

SEQ ID NO: 939482 - RNA, 19 nt, Artificial Sequence
  Description of Artificial Sequence: Synthetic oligonucleotide
  Sense strand starting at position 1268 of SEQ ID NO: 913596
ccaggaacauucucacagu

SEQ ID NO: 939483 - RNA, 19 nt, Artificial Sequence
  Description of Artificial Sequence: Synthetic oligonucleotide
  Antisense strand to SEQ ID NO: 939482
acugugagaauguuccugg

SEQ ID NO: 939484 - RNA, 19 nt, Artificial Sequence
  Description of Artificial Sequence: Synthetic oligonucleotide
  Sense strand starting at position 934 of SEQ ID NO: 913596
auguuaaguguauauggau

SEQ ID NO: 939485 - RNA, 19 nt, Artificial Sequence
  Description of Artificial Sequence: Synthetic oligonucleotide
  Antisense strand to SEQ ID NO: 939484
auccauauacacuuaacau

SEQ ID NO: 939486 - RNA, 19 nt, Artificial Sequence
  Description of Artificial Sequence: Synthetic oligonucleotide
  Sense strand starting at position 2651 of SEQ ID NO: 913596
uaggauauugcucagggca

SEQ ID NO: 939487 - RNA, 19 nt, Artificial Sequence
  Description of Artificial Sequence: Synthetic oligonucleotide
  Antisense strand to SEQ ID NO: 939486
ugcccugagcaauauccua

SEQ ID NO: 939488 - RNA, 19 nt, Artificial Sequence
  Description of Artificial Sequence: Synthetic oligonucleotide
  Sense strand starting at position 1401 of SEQ ID NO: 913596
uggucuugaguugauccaa

SEQ ID NO: 939489 - RNA, 19 nt, Artificial Sequence
  Description of Artificial Sequence: Synthetic oligonucleotide
  Antisense strand to SEQ ID NO: 939488
uuggaucaacucaagacca

SEQ ID NO: 939490 - RNA, 19 nt, Artificial Sequence
  Description of Artificial Sequence: Synthetic oligonucleotide
  Sense strand starting at position 1396 of SEQ ID NO: 913596
acccauggucuugaguuga

SEQ ID NO: 939491 - RNA, 19 nt, Artificial Sequence
  Description of Artificial Sequence: Synthetic oligonucleotide
  Antisense strand to SEQ ID NO: 939490
ucaacucaagaccaugggu

SEQ ID NO: 939492 - RNA, 19 nt, Artificial Sequence
  Description of Artificial Sequence: Synthetic oligonucleotide
  Sense strand starting at position 2111 of SEQ ID NO: 913596
uuaugacuucuguaucuca

SEQ ID NO: 939493 - RNA, 19 nt, Artificial Sequence
  Description of Artificial Sequence: Synthetic oligonucleotide
  Antisense strand to SEQ ID NO: 939492
ugagauacagaagucauaa

SEQ ID NO: 939494 - RNA, 19 nt, Artificial Sequence
  Description of Artificial Sequence: Synthetic oligonucleotide
  Sense strand starting at position 147 of SEQ ID NO: 913596
gagauauugcuauagccac

SEQ ID NO: 939495 - RNA, 19 nt, Artificial Sequence
  Description of Artificial Sequence: Synthetic oligonucleotide
  Antisense strand to SEQ ID NO: 939494
guggcuauagcaauaucuc

SEQ ID NO: 939496 - RNA, 19 nt, Artificial Sequence
  Description of Artificial Sequence: Synthetic oligonucleotide
  Sense strand starting at position 3885 of SEQ ID NO: 913596
ucuguuuggcgugcuaauu

SEQ ID NO: 939497 - RNA, 19 nt, Artificial Sequence
  Description of Artificial Sequence: Synthetic oligonucleotide
  Antisense strand to SEQ ID NO: 939496
aauuagcacgccaaacaga

SEQ ID NO: 939498 - RNA, 19 nt, Artificial Sequence
  Description of Artificial Sequence: Synthetic oligonucleotide
  Sense strand starting at position 374 of SEQ ID NO: 913596
ucgacuuaaugauuacauu

SEQ ID NO: 939499 - RNA, 19 nt, Artificial Sequence
  Description of Artificial Sequence: Synthetic oligonucleotide
  Antisense strand to SEQ ID NO: 939498
aauguaaucauuaagucga

SEQ ID NO: 939500 - RNA, 19 nt, Artificial Sequence
  Description of Artificial Sequence: Synthetic oligonucleotide
  Sense strand starting at position 313 of SEQ ID NO: 913596
auauguaaaugcucagaua

SEQ ID NO: 939501 - RNA, 19 nt, Artificial Sequence
  Description of Artificial Sequence: Synthetic oligonucleotide
  Antisense strand to SEQ ID NO: 939500
uaucugagcauuuacauau

SEQ ID NO: 939502 - RNA, 19 nt, Artificial Sequence
  Description of Artificial Sequence: Synthetic oligonucleotide
  Sense strand starting at position 929 of SEQ ID NO: 913596
gaaggauguuaaguguaua

SEQ ID NO: 939503 - RNA, 19 nt, Artificial Sequence
  Description of Artificial Sequence: Synthetic oligonucleotide
  Antisense strand to SEQ ID NO: 939502
uauacacuuaacauccuuc

SEQ ID NO: 939504 - RNA, 19 nt, Artificial Sequence
  Description of Artificial Sequence: Synthetic oligonucleotide
  Sense strand starting at position 168 of SEQ ID NO: 913596
uuggaaacguaauccauca

SEQ ID NO: 939505 - RNA, 19 nt, Artificial Sequence
  Description of Artificial Sequence: Synthetic oligonucleotide
  Antisense strand to SEQ ID NO: 939504
ugauggauuacguuuccaa

SEQ ID NO: 939506 - RNA, 19 nt, Artificial Sequence
  Description of Artificial Sequence: Synthetic oligonucleotide
  Sense strand starting at position 1802 of SEQ ID NO: 913596
cugggucuagcauagacuu

SEQ ID NO: 939507 - RNA, 19 nt, Artificial Sequence
  Description of Artificial Sequence: Synthetic oligonucleotide
  Antisense strand to SEQ ID NO: 939506
aagucuaugcuagacccag

SEQ ID NO: 939508 - RNA, 19 nt, Artificial Sequence
  Description of Artificial Sequence: Synthetic oligonucleotide
  Sense strand starting at position 1012 of SEQ ID NO: 913596
auaguugauccugguauaa

SEQ ID NO: 939509 - RNA, 19 nt, Artificial Sequence
  Description of Artificial Sequence: Synthetic oligonucleotide
  Antisense strand to SEQ ID NO: 939508
uuauaccaggaucaacuau

SEQ ID NO: 939510 - RNA, 19 nt, Artificial Sequence
  Description of Artificial Sequence: Synthetic oligonucleotide
  Sense strand starting at position 917 of SEQ ID NO: 913596
ucccauaaccgcgaaggau

SEQ ID NO: 939511 - RNA, 19 nt, Artificial Sequence
  Description of Artificial Sequence: Synthetic oligonucleotide
  Antisense strand to SEQ ID NO: 939510
auccuucgcgguuauggga

SEQ ID NO: 939512 - RNA, 19 nt, Artificial Sequence
  Description of Artificial Sequence: Synthetic oligonucleotide
  Sense strand starting at position 183 of SEQ ID NO: 913596
aucacauauuugggaauga

SEQ ID NO: 939513 - RNA, 19 nt, Artificial Sequence
  Description of Artificial Sequence: Synthetic oligonucleotide
  Antisense strand to SEQ ID NO: 939512
ucauucccaaauaugugau

SEQ ID NO: 939514 - RNA, 19 nt, Artificial Sequence
  Description of Artificial Sequence: Synthetic oligonucleotide
  Sense strand starting at position 483 of SEQ ID NO: 913596
gugcuaggauaagugauaa

SEQ ID NO: 939515 - RNA, 19 nt, Artificial Sequence
  Description of Artificial Sequence: Synthetic oligonucleotide
  Antisense strand to SEQ ID NO: 939514
uuaucacuuauccuagcac

SEQ ID NO: 939516 - RNA, 19 nt, Artificial Sequence
  Description of Artificial Sequence: Synthetic oligonucleotide
  Sense strand starting at position 2800 of SEQ ID NO: 913596
ccagaaugcccucagguuu

SEQ ID NO: 939517 - RNA, 19 nt, Artificial Sequence
  Description of Artificial Sequence: Synthetic oligonucleotide
  Antisense strand to SEQ ID NO: 939516
aaaccugagggcauucugg

SEQ ID NO: 939518 - RNA, 19 nt, Artificial Sequence
  Description of Artificial Sequence: Synthetic oligonucleotide
  Sense strand starting at position 1996 of SEQ ID NO: 913596
gacauugugggugauuguu

SEQ ID NO: 939519 - RNA, 19 nt, Artificial Sequence
  Description of Artificial Sequence: Synthetic oligonucleotide
  Antisense strand to SEQ ID NO: 939518
aacaaucacccacaauguc

SEQ ID NO: 939520 - RNA, 19 nt, Artificial Sequence
  Description of Artificial Sequence: Synthetic oligonucleotide
  Sense strand starting at position 2778 of SEQ ID NO: 913596
auaucaaaucauuguguca

SEQ ID NO: 939521 - RNA, 19 nt, Artificial Sequence
  Description of Artificial Sequence: Synthetic oligonucleotide
  Antisense strand to SEQ ID NO: 939520
ugacacaaugauuugauau

SEQ ID NO: 939522 - RNA, 19 nt, Artificial Sequence
  Description of Artificial Sequence: Synthetic oligonucleotide
  Sense strand starting at position 1580 of SEQ ID NO: 913596
agcagugacgcagaauuga

SEQ ID NO: 939523 - RNA, 19 nt, Artificial Sequence
  Description of Artificial Sequence: Synthetic oligonucleotide
  Antisense strand to SEQ ID NO: 939522
ucaauucugcgucacugcu

SEQ ID NO: 939524 - RNA, 19 nt, Artificial Sequence
  Description of Artificial Sequence: Synthetic oligonucleotide
  Sense strand starting at position 1470 of SEQ ID NO: 913596
augcaaaggucuuccaaug

SEQ ID NO: 939525 - RNA, 19 nt, Artificial Sequence
  Description of Artificial Sequence: Synthetic oligonucleotide
  Antisense strand to SEQ ID NO: 939524
cauuggaagaccuuugcau

SEQ ID NO: 939526 - RNA, 19 nt, Artificial Sequence
  Description of Artificial Sequence: Synthetic oligonucleotide
  Sense strand starting at position 2463 of SEQ ID NO: 913596
gaaagaguuaguugucuga

SEQ ID NO: 939527 - RNA, 19 nt, Artificial Sequence
  Description of Artificial Sequence: Synthetic oligonucleotide
  Antisense strand to SEQ ID NO: 939526
ucagacaacuaacucuuuc

SEQ ID NO: 939528 - RNA, 19 nt, Artificial Sequence
  Description of Artificial Sequence: Synthetic oligonucleotide
  Sense strand starting at position 771 of SEQ ID NO: 913596
gaaguugcgauagauguca

SEQ ID NO: 939529 - RNA, 19 nt, Artificial Sequence
  Description of Artificial Sequence: Synthetic oligonucleotide
  Antisense strand to SEQ ID NO: 939528
ugacaucuaucgcaacuuc

SEQ ID NO: 939530 - RNA, 19 nt, Artificial Sequence
  Description of Artificial Sequence: Synthetic oligonucleotide
  Sense strand starting at position 1557 of SEQ ID NO: 913596
ggcagcaaugccuaucaga

SEQ ID NO: 939531 - RNA, 19 nt, Artificial Sequence
  Description of Artificial Sequence: Synthetic oligonucleotide
  Antisense strand to SEQ ID NO: 939530
ucugauaggcauugcugcc

SEQ ID NO: 939532 - RNA, 19 nt, Artificial Sequence
  Description of Artificial Sequence: Synthetic oligonucleotide
  Sense strand starting at position 2465 of SEQ ID NO: 913596
aagaguuaguugucugaca

SEQ ID NO: 939533 - RNA, 19 nt, Artificial Sequence
  Description of Artificial Sequence: Synthetic oligonucleotide
  Antisense strand to SEQ ID NO: 939532
ugucagacaacuaacucuu

SEQ ID NO: 939534 - RNA, 19 nt, Artificial Sequence
  Description of Artificial Sequence: Synthetic oligonucleotide
  Sense strand starting at position 2466 of SEQ ID NO: 913596
agaguuaguugucugacaa

SEQ ID NO: 939535 - RNA, 19 nt, Artificial Sequence
  Description of Artificial Sequence: Synthetic oligonucleotide
  Antisense strand to SEQ ID NO: 939534
uugucagacaacuaacucu

SEQ ID NO: 939536 - RNA, 19 nt, Artificial Sequence
  Description of Artificial Sequence: Synthetic oligonucleotide
  Sense strand starting at position 1605 of SEQ ID NO: 913597
gggacucuaugaucacuca

SEQ ID NO: 939537 - RNA, 19 nt, Artificial Sequence
  Description of Artificial Sequence: Synthetic oligonucleotide
  Antisense strand to SEQ ID NO: 939536
ugagugaucauagaguccc

SEQ ID NO: 939538 - RNA, 19 nt, Artificial Sequence
  Description of Artificial Sequence: Synthetic oligonucleotide
  Sense strand starting at position 3677 of SEQ ID NO: 913597
uuaacaacucuguaaagug

SEQ ID NO: 939539 - RNA, 19 nt, Artificial Sequence
  Description of Artificial Sequence: Synthetic oligonucleotide
  Antisense strand to SEQ ID NO: 939538
cacuuuacagaguuguuaa

SEQ ID NO: 939540 - RNA, 19 nt, Artificial Sequence
  Description of Artificial Sequence: Synthetic oligonucleotide
  Sense strand starting at position 2604 of SEQ ID NO: 913597
caggaaagugcucacuuga

SEQ ID NO: 939541 - RNA, 19 nt, Artificial Sequence
  Description of Artificial Sequence: Synthetic oligonucleotide
  Antisense strand to SEQ ID NO: 939540
ucaagugagcacuuuccug

SEQ ID NO: 939542 - RNA, 19 nt, Artificial Sequence
  Description of Artificial Sequence: Synthetic oligonucleotide
  Sense strand starting at position 2847 of SEQ ID NO: 913597
gcaauuaagcaccagaauc

SEQ ID NO: 939543 - RNA, 19 nt, Artificial Sequence
  Description of Artificial Sequence: Synthetic oligonucleotide
  Antisense strand to SEQ ID NO: 939542
gauucuggugcuuaauugc

SEQ ID NO: 939544 - RNA, 19 nt, Artificial Sequence
  Description of Artificial Sequence: Synthetic oligonucleotide
  Sense strand starting at position 2716 of SEQ ID NO: 913597
agaauuaaagauuguagca

SEQ ID NO: 939545 - RNA, 19 nt, Artificial Sequence
  Description of Artificial Sequence: Synthetic oligonucleotide
  Antisense strand to SEQ ID NO: 939544
ugcuacaaucuuuaauucu

SEQ ID NO: 939546 - RNA, 19 nt, Artificial Sequence
  Description of Artificial Sequence: Synthetic oligonucleotide
  Sense strand starting at position 2471 of SEQ ID NO: 913597
gucgcccuucgucugaaau

SEQ ID NO: 939547 - RNA, 19 nt, Artificial Sequence
  Description of Artificial Sequence: Synthetic oligonucleotide
  Antisense strand to SEQ ID NO: 939546
auuucagacgaagggcgac

SEQ ID NO: 939548 - RNA, 19 nt, Artificial Sequence
  Description of Artificial Sequence: Synthetic oligonucleotide
  Sense strand starting at position 1259 of SEQ ID NO: 913597
ggagguugcauugauaccu

SEQ ID NO: 939549 - RNA, 19 nt, Artificial Sequence
  Description of Artificial Sequence: Synthetic oligonucleotide
  Antisense strand to SEQ ID NO: 939548
agguaucaaugcaaccucc

SEQ ID NO: 939550 - RNA, 19 nt, Artificial Sequence
  Description of Artificial Sequence: Synthetic oligonucleotide
  Sense strand starting at position 1623 of SEQ ID NO: 913597
aggcuaauaccucacugua

SEQ ID NO: 939551 - RNA, 19 nt, Artificial Sequence
  Description of Artificial Sequence: Synthetic oligonucleotide
  Antisense strand to SEQ ID NO: 939550
uacagugagguauuagccu

SEQ ID NO: 939552 - RNA, 19 nt, Artificial Sequence
  Description of Artificial Sequence: Synthetic oligonucleotide
  Sense strand starting at position 3686 of SEQ ID NO: 913597
cuguaaaguggguaugauu

SEQ ID NO: 939553 - RNA, 19 nt, Artificial Sequence
  Description of Artificial Sequence: Synthetic oligonucleotide
  Antisense strand to SEQ ID NO: 939552
aaucauacccacuuuacag

SEQ ID NO: 939554 - RNA, 19 nt, Artificial Sequence
  Description of Artificial Sequence: Synthetic oligonucleotide
  Sense strand starting at position 1334 of SEQ ID NO: 913597
agaguacuaguuuauucuu

SEQ ID NO: 939555 - RNA, 19 nt, Artificial Sequence
  Description of Artificial Sequence: Synthetic oligonucleotide
  Antisense strand to SEQ ID NO: 939554
aagaauaaacuaguacucu

SEQ ID NO: 939556 - RNA, 19 nt, Artificial Sequence
  Description of Artificial Sequence: Synthetic oligonucleotide
  Sense strand starting at position 1376 of SEQ ID NO: 913597
gaaagaaauggcgguggau

SEQ ID NO: 939557 - RNA, 19 nt, Artificial Sequence
  Description of Artificial Sequence: Synthetic oligonucleotide
  Antisense strand to SEQ ID NO: 939556
auccaccgccauuucuuuc

SEQ ID NO: 939558 - RNA, 19 nt, Artificial Sequence
  Description of Artificial Sequence: Synthetic oligonucleotide
  Sense strand starting at position 1229 of SEQ ID NO: 913597
gacugugaagaaugucacu

SEQ ID NO: 939559 - RNA, 19 nt, Artificial Sequence
  Description of Artificial Sequence: Synthetic oligonucleotide
  Antisense strand to SEQ ID NO: 939558
agugacauucuucacaguc

SEQ ID NO: 939560 - RNA, 19 nt, Artificial Sequence
  Description of Artificial Sequence: Synthetic oligonucleotide
  Sense strand starting at position 568 of SEQ ID NO: 913597
gacugcuuccuagagaguu

SEQ ID NO: 939561 - RNA, 19 nt, Artificial Sequence
  Description of Artificial Sequence: Synthetic oligonucleotide
  Antisense strand to SEQ ID NO: 939560
aacucucuaggaagcaguc

SEQ ID NO: 939562 - RNA, 19 nt, Artificial Sequence
  Description of Artificial Sequence: Synthetic oligonucleotide
  Sense strand starting at position 3284 of SEQ ID NO: 913597
cgaagugguguauaauaau

SEQ ID NO: 939563 - RNA, 19 nt, Artificial Sequence
  Description of Artificial Sequence: Synthetic oligonucleotide
  Antisense strand to SEQ ID NO: 939562
auuauuauacaccacuucg

SEQ ID NO: 939564 - RNA, 19 nt, Artificial Sequence
  Description of Artificial Sequence: Synthetic oligonucleotide
  Sense strand starting at position 3282 of SEQ ID NO: 913597
accgaagugguguauaaua

SEQ ID NO: 939565 - RNA, 19 nt, Artificial Sequence
  Description of Artificial Sequence: Synthetic oligonucleotide
  Antisense strand to SEQ ID NO: 939564
uauuauacaccacuucggu

SEQ ID NO: 939566 - RNA, 19 nt, Artificial Sequence
  Description of Artificial Sequence: Synthetic oligonucleotide
  Sense strand starting at position 565 of SEQ ID NO: 913597
uuagacugcuuccuagaga

SEQ ID NO: 939567 - RNA, 19 nt, Artificial Sequence
  Description of Artificial Sequence: Synthetic oligonucleotide
  Antisense strand to SEQ ID NO: 939566
ucucuaggaagcagucuaa

SEQ ID NO: 939568 - RNA, 19 nt, Artificial Sequence
  Description of Artificial Sequence: Synthetic oligonucleotide
  Sense strand starting at position 2513 of SEQ ID NO: 913597
gcugaagcauuuguagcau

SEQ ID NO: 939569 - RNA, 19 nt, Artificial Sequence
  Description of Artificial Sequence: Synthetic oligonucleotide
  Antisense strand to SEQ ID NO: 939568
augcuacaaaugcuucagc

SEQ ID NO: 939570 - RNA, 19 nt, Artificial Sequence
  Description of Artificial Sequence: Synthetic oligonucleotide
  Sense strand starting at position 2512 of SEQ ID NO: 913597
ugcugaagcauuuguagca

SEQ ID NO: 939571 - RNA, 19 nt, Artificial Sequence
  Description of Artificial Sequence: Synthetic oligonucleotide
  Antisense strand to SEQ ID NO: 939570
ugcuacaaaugcuucagca

SEQ ID NO: 939572 - RNA, 19 nt, Artificial Sequence
  Description of Artificial Sequence: Synthetic oligonucleotide
  Sense strand starting at position 2551 of SEQ ID NO: 913597
auuguuaauggccauggua

SEQ ID NO: 939573 - RNA, 19 nt, Artificial Sequence
  Description of Artificial Sequence: Synthetic oligonucleotide
  Antisense strand to SEQ ID NO: 939572
uaccauggccauuaacaau

SEQ ID NO: 939574 - RNA, 19 nt, Artificial Sequence
  Description of Artificial Sequence: Synthetic oligonucleotide
  Sense strand starting at position 1359 of SEQ ID NO: 913597
aggugaugcuugguaaaga

SEQ ID NO: 939575 - RNA, 19 nt, Artificial Sequence
  Description of Artificial Sequence: Synthetic oligonucleotide
  Antisense strand to SEQ ID NO: 939574
ucuuuaccaagcaucaccu

SEQ ID NO: 939576 - RNA, 19 nt, Artificial Sequence
  Description of Artificial Sequence: Synthetic oligonucleotide
  Sense strand starting at position 2564 of SEQ ID NO: 913597
augguagcucgagaaguua

SEQ ID NO: 939577 - RNA, 19 nt, Artificial Sequence
  Description of Artificial Sequence: Synthetic oligonucleotide
  Antisense strand to SEQ ID NO: 939576
uaacuucucgagcuaccau

SEQ ID NO: 939578 - RNA, 19 nt, Artificial Sequence
  Description of Artificial Sequence: Synthetic oligonucleotide
  Sense strand starting at position 1116 of SEQ ID NO: 913597
uaaucugaagucggguaau

SEQ ID NO: 939579 - RNA, 19 nt, Artificial Sequence
  Description of Artificial Sequence: Synthetic oligonucleotide
  Antisense strand to SEQ ID NO: 939578
auuacccgacuucagauua

SEQ ID NO: 939580 - RNA, 19 nt, Artificial Sequence
  Description of Artificial Sequence: Synthetic oligonucleotide
  Sense strand starting at position 779 of SEQ ID NO: 913597
ggaaaucuuugcccacucu

SEQ ID NO: 939581 - RNA, 19 nt, Artificial Sequence
  Description of Artificial Sequence: Synthetic oligonucleotide
  Antisense strand to SEQ ID NO: 939580
agagugggcaaagauuucc

SEQ ID NO: 939582 - RNA, 19 nt, Artificial Sequence
  Description of Artificial Sequence: Synthetic oligonucleotide
  Sense strand starting at position 1582 of SEQ ID NO: 913597
agaauuuggugucagaacu

SEQ ID NO: 939583 - RNA, 19 nt, Artificial Sequence
  Description of Artificial Sequence: Synthetic oligonucleotide
  Antisense strand to SEQ ID NO: 939582
aguucugacaccaaauucu

SEQ ID NO: 939584 - RNA, 19 nt, Artificial Sequence
  Description of Artificial Sequence: Synthetic oligonucleotide
  Sense strand starting at position 2723 of SEQ ID NO: 913597
aagauuguagcaugccaaa

SEQ ID NO: 939585 - RNA, 19 nt, Artificial Sequence
  Description of Artificial Sequence: Synthetic oligonucleotide
  Antisense strand to SEQ ID NO: 939584
uuuggcaugcuacaaucuu

SEQ ID NO: 939586 - RNA, 19 nt, Artificial Sequence
  Description of Artificial Sequence: Synthetic oligonucleotide
  Sense strand starting at position 758 of SEQ ID NO: 913597
cuguuugugagguauuacu

SEQ ID NO: 939587 - RNA, 19 nt, Artificial Sequence
  Description of Artificial Sequence: Synthetic oligonucleotide
  Antisense strand to SEQ ID NO: 939586
aguaauaccucacaaacag

SEQ ID NO: 939588 - RNA, 19 nt, Artificial Sequence
  Description of Artificial Sequence: Synthetic oligonucleotide
  Sense strand starting at position 2404 of SEQ ID NO: 913597
ucggaauucucuccucuca

SEQ ID NO: 939589 - RNA, 19 nt, Artificial Sequence
  Description of Artificial Sequence: Synthetic oligonucleotide
  Antisense strand to SEQ ID NO: 939588
ugagaggagagaauuccga

SEQ ID NO: 939590 - RNA, 19 nt, Artificial Sequence
  Description of Artificial Sequence: Synthetic oligonucleotide
  Sense strand starting at position 1097 of SEQ ID NO: 913597
uuacuauaacucuguugua

SEQ ID NO: 939591 - RNA, 19 nt, Artificial Sequence
  Description of Artificial Sequence: Synthetic oligonucleotide
  Antisense strand to SEQ ID NO: 939590
uacaacagaguuauaguaa

SEQ ID NO: 939592 - RNA, 19 nt, Artificial Sequence
  Description of Artificial Sequence: Synthetic oligonucleotide
  Sense strand starting at position 1357 of SEQ ID NO: 913597
ccaggugaugcuugguaaa

SEQ ID NO: 939593 - RNA, 19 nt, Artificial Sequence
  Description of Artificial Sequence: Synthetic oligonucleotide
  Antisense strand to SEQ ID NO: 939592
uuuaccaagcaucaccugg

SEQ ID NO: 939594 - RNA, 19 nt, Artificial Sequence
  Description of Artificial Sequence: Synthetic oligonucleotide
  Sense strand starting at position 2703 of SEQ ID NO: 913597
agauaaagaucccagaauu

SEQ ID NO: 939595 - RNA, 19 nt, Artificial Sequence
  Description of Artificial Sequence: Synthetic oligonucleotide
  Antisense strand to SEQ ID NO: 939594
aauucugggaucuuuaucu

SEQ ID NO: 939596 - RNA, 19 nt, Artificial Sequence
  Description of Artificial Sequence: Synthetic oligonucleotide
  Sense strand starting at position 996 of SEQ ID NO: 913597
uuugguaccuuugcugaaa

SEQ ID NO: 939597 - RNA, 19 nt, Artificial Sequence
  Description of Artificial Sequence: Synthetic oligonucleotide
  Antisense strand to SEQ ID NO: 939596
uuucagcaaagguaccaaa

SEQ ID NO: 939598 - RNA, 19 nt, Artificial Sequence
  Description of Artificial Sequence: Synthetic oligonucleotide
  Sense strand starting at position 928 of SEQ ID NO: 913597
ucugcauacggguaucagu

SEQ ID NO: 939599 - RNA, 19 nt, Artificial Sequence
  Description of Artificial Sequence: Synthetic oligonucleotide
  Antisense strand to SEQ ID NO: 939598
acugauacccguaugcaga

SEQ ID NO: 939600 - RNA, 19 nt, Artificial Sequence
  Description of Artificial Sequence: Synthetic oligonucleotide
  Sense strand starting at position 1916 of SEQ ID NO: 913597
cggaaauccugagagaaag

SEQ ID NO: 939601 - RNA, 19 nt, Artificial Sequence
  Description of Artificial Sequence: Synthetic oligonucleotide
  Antisense strand to SEQ ID NO: 939600
cuuucucucaggauuuccg

SEQ ID NO: 939602 - RNA, 19 nt, Artificial Sequence
  Description of Artificial Sequence: Synthetic oligonucleotide
  Sense strand starting at position 2668 of SEQ ID NO: 913597
auaucagauugggaacauu

SEQ ID NO: 939603 - RNA, 19 nt, Artificial Sequence
  Description of Artificial Sequence: Synthetic oligonucleotide
  Antisense strand to SEQ ID NO: 939602
aauguucccaaucugauau

SEQ ID NO: 939604 - RNA, 19 nt, Artificial Sequence
  Description of Artificial Sequence: Synthetic oligonucleotide
  Sense strand starting at position 3780 of SEQ ID NO: 913597
aguugagcuugggcuuuaa

SEQ ID NO: 939605 - RNA, 19 nt, Artificial Sequence
  Description of Artificial Sequence: Synthetic oligonucleotide
  Antisense strand to SEQ ID NO: 939604
uuaaagcccaagcucaacu

SEQ ID NO: 939606 - RNA, 19 nt, Artificial Sequence
  Description of Artificial Sequence: Synthetic oligonucleotide
  Sense strand starting at position 424 of SEQ ID NO: 913597
gaugcuaucuuauuguagu

SEQ ID NO: 939607 - RNA, 19 nt, Artificial Sequence
  Description of Artificial Sequence: Synthetic oligonucleotide
  Antisense strand to SEQ ID NO: 939606
acuacaauaagauagcauc

SEQ ID NO: 939608 - RNA, 19 nt, Artificial Sequence
  Description of Artificial Sequence: Synthetic oligonucleotide
  Sense strand starting at position 2279 of SEQ ID NO: 913597
agagcuuggagcugugagu

SEQ ID NO: 939609 - RNA, 19 nt, Artificial Sequence
  Description of Artificial Sequence: Synthetic oligonucleotide
  Antisense strand to SEQ ID NO: 939608
acucacagcuccaagcucu

SEQ ID NO: 939610 - RNA, 19 nt, Artificial Sequence
  Description of Artificial Sequence: Synthetic oligonucleotide
  Sense strand starting at position 2667 of SEQ ID NO: 913597
gauaucagauugggaacau

SEQ ID NO: 939611 - RNA, 19 nt, Artificial Sequence
  Description of Artificial Sequence: Synthetic oligonucleotide
  Antisense strand to SEQ ID NO: 939610
auguucccaaucugauauc

SEQ ID NO: 939612 - RNA, 19 nt, Artificial Sequence
  Description of Artificial Sequence: Synthetic oligonucleotide
  Sense strand starting at position 1435 of SEQ ID NO: 913597
cuaagagacucguaaggaa

SEQ ID NO: 939613 - RNA, 19 nt, Artificial Sequence
  Description of Artificial Sequence: Synthetic oligonucleotide
  Antisense strand to SEQ ID NO: 939612
uuccuuacgagucucuuag

SEQ ID NO: 939614 - RNA, 19 nt, Artificial Sequence
  Description of Artificial Sequence: Synthetic oligonucleotide
  Sense strand starting at position 2798 of SEQ ID NO: 913597
uuccgaagccuguggucau

SEQ ID NO: 939615 - RNA, 19 nt, Artificial Sequence
  Description of Artificial Sequence: Synthetic oligonucleotide
  Antisense strand to SEQ ID NO: 939614
augaccacaggcuucggaa

SEQ ID NO: 939616 - RNA, 19 nt, Artificial Sequence
  Description of Artificial Sequence: Synthetic oligonucleotide
  Sense strand starting at position 3430 of SEQ ID NO: 913598
ggcagaagucgauagaacu

SEQ ID NO: 939617 - RNA, 19 nt, Artificial Sequence
  Description of Artificial Sequence: Synthetic oligonucleotide
  Antisense strand to SEQ ID NO: 939616
aguucuaucgacuucugcc

SEQ ID NO: 939618 - RNA, 19 nt, Artificial Sequence
  Description of Artificial Sequence: Synthetic oligonucleotide
  Sense strand starting at position 3127 of SEQ ID NO: 913598
guaccuaugccgucucuuu

SEQ ID NO: 939619 - RNA, 19 nt, Artificial Sequence
  Description of Artificial Sequence: Synthetic oligonucleotide
  Antisense strand to SEQ ID NO: 939618
aaagagacggcauagguac

SEQ ID NO: 939620 - RNA, 19 nt, Artificial Sequence
  Description of Artificial Sequence: Synthetic oligonucleotide
  Sense strand starting at position 2247 of SEQ ID NO: 913598
gggugauuggcgcugcacu

SEQ ID NO: 939621 - RNA, 19 nt, Artificial Sequence
  Description of Artificial Sequence: Synthetic oligonucleotide
  Antisense strand to SEQ ID NO: 939620
agugcagcgccaaucaccc

SEQ ID NO: 939622 - RNA, 19 nt, Artificial Sequence
  Description of Artificial Sequence: Synthetic oligonucleotide
  Sense strand starting at position 317 of SEQ ID NO: 913598
guggugggucgcucaaguu

SEQ ID NO: 939623 - RNA, 19 nt, Artificial Sequence
  Description of Artificial Sequence: Synthetic oligonucleotide
  Antisense strand to SEQ ID NO: 939622
aacuugagcgacccaccac

SEQ ID NO: 939624 - RNA, 19 nt, Artificial Sequence
  Description of Artificial Sequence: Synthetic oligonucleotide
  Sense strand starting at position 2140 of SEQ ID NO: 913598
ugacaaggccugugggaaa

SEQ ID NO: 939625 - RNA, 19 nt, Artificial Sequence
  Description of Artificial Sequence: Synthetic oligonucleotide
  Antisense strand to SEQ ID NO: 939624
uuucccacaggccuuguca

SEQ ID NO: 939626 - RNA, 19 nt, Artificial Sequence
  Description of Artificial Sequence: Synthetic oligonucleotide
  Sense strand starting at position 168 of SEQ ID NO: 913598
acaguaaagugggcauaaa

SEQ ID NO: 939627 - RNA, 19 nt, Artificial Sequence
  Description of Artificial Sequence: Synthetic oligonucleotide
  Antisense strand to SEQ ID NO: 939626
uuuaugcccacuuuacugu

SEQ ID NO: 939628 - RNA, 19 nt, Artificial Sequence
  Description of Artificial Sequence: Synthetic oligonucleotide
  Sense strand starting at position 3601 of SEQ ID NO: 913598
ggcuuucucccugacacaa

SEQ ID NO: 939629 - RNA, 19 nt, Artificial Sequence
  Description of Artificial Sequence: Synthetic oligonucleotide
  Antisense strand to SEQ ID NO: 939628
uugugucagggagaaagcc

SEQ ID NO: 939630 - RNA, 19 nt, Artificial Sequence
  Description of Artificial Sequence: Synthetic oligonucleotide
  Sense strand starting at position 566 of SEQ ID NO: 913598
gaaacuuagcaaugggcaa

SEQ ID NO: 939631 - RNA, 19 nt, Artificial Sequence
  Description of Artificial Sequence: Synthetic oligonucleotide
  Antisense strand to SEQ ID NO: 939630
uugcccauugcuaaguuuc

SEQ ID NO: 939632 - RNA, 19 nt, Artificial Sequence
  Description of Artificial Sequence: Synthetic oligonucleotide
  Sense strand starting at position 2720 of SEQ ID NO: 913598
cuggacugcgcagaugaaa

SEQ ID NO: 939633 - RNA, 19 nt, Artificial Sequence
  Description of Artificial Sequence: Synthetic oligonucleotide
  Antisense strand to SEQ ID NO: 939632
uuucaucugcgcaguccag

SEQ ID NO: 939634 - RNA, 19 nt, Artificial Sequence
  Description of Artificial Sequence: Synthetic oligonucleotide
  Sense strand starting at position 3420 of SEQ ID NO: 913598
gcauuacccaggcagaagu

SEQ ID NO: 939635 - RNA, 19 nt, Artificial Sequence
  Description of Artificial Sequence: Synthetic oligonucleotide
  Antisense strand to SEQ ID NO: 939634
acuucugccuggguaaugc

SEQ ID NO: 939636 - RNA, 19 nt, Artificial Sequence
  Description of Artificial Sequence: Synthetic oligonucleotide
  Sense strand starting at position 377 of SEQ ID NO: 913598
uuuaaugcuugguuaagaa

SEQ ID NO: 939637 - RNA, 19 nt, Artificial Sequence
  Description of Artificial Sequence: Synthetic oligonucleotide
  Antisense strand to SEQ ID NO: 939636
uucuuaaccaagcauuaaa

SEQ ID NO: 939638 - RNA, 19 nt, Artificial Sequence
  Description of Artificial Sequence: Synthetic oligonucleotide
  Sense strand starting at position 465 of SEQ ID NO: 913598
auauuuaauucuggagaac

SEQ ID NO: 939639 - RNA, 19 nt, Artificial Sequence
  Description of Artificial Sequence: Synthetic oligonucleotide
  Antisense strand to SEQ ID NO: 939638
guucuccagaauuaaauau

SEQ ID NO: 939640 - RNA, 19 nt, Artificial Sequence
  Description of Artificial Sequence: Synthetic oligonucleotide
  Sense strand starting at position 2409 of SEQ ID NO: 913598
gccuccagguaucuggaaa

SEQ ID NO: 939641 - RNA, 19 nt, Artificial Sequence
  Description of Artificial Sequence: Synthetic oligonucleotide
  Antisense strand to SEQ ID NO: 939640
uuuccagauaccuggaggc

SEQ ID NO: 939642 - RNA, 19 nt, Artificial Sequence
  Description of Artificial Sequence: Synthetic oligonucleotide
  Sense strand starting at position 2217 of SEQ ID NO: 913598
guuugccugcauuaggaaa

SEQ ID NO: 939643 - RNA, 19 nt, Artificial Sequence
  Description of Artificial Sequence: Synthetic oligonucleotide
  Antisense strand to SEQ ID NO: 939642
uuuccuaaugcaggcaaac

SEQ ID NO: 939644 - RNA, 19 nt, Artificial Sequence
  Description of Artificial Sequence: Synthetic oligonucleotide
  Sense strand starting at position 3159 of SEQ ID NO: 913598
uguccaggcagguaucauu

SEQ ID NO: 939645 - RNA, 19 nt, Artificial Sequence
  Description of Artificial Sequence: Synthetic oligonucleotide
  Antisense strand to SEQ ID NO: 939644
aaugauaccugccuggaca

SEQ ID NO: 939646 - RNA, 19 nt, Artificial Sequence
  Description of Artificial Sequence: Synthetic oligonucleotide
  Sense strand starting at position 376 of SEQ ID NO: 913598
cuuuaaugcuugguuaaga

SEQ ID NO: 939647 - RNA, 19 nt, Artificial Sequence
  Description of Artificial Sequence: Synthetic oligonucleotide
  Antisense strand to SEQ ID NO: 939646
ucuuaaccaagcauuaaag

SEQ ID NO: 939648 - RNA, 19 nt, Artificial Sequence
  Description of Artificial Sequence: Synthetic oligonucleotide
  Sense strand starting at position 3600 of SEQ ID NO: 913598
aggcuuucucccugacaca

SEQ ID NO: 939649 - RNA, 19 nt, Artificial Sequence
  Description of Artificial Sequence: Synthetic oligonucleotide
  Antisense strand to SEQ ID NO: 939648
ugugucagggagaaagccu

SEQ ID NO: 939650 - RNA, 19 nt, Artificial Sequence
  Description of Artificial Sequence: Synthetic oligonucleotide
  Sense strand starting at position 3216 of SEQ ID NO: 913598
caggccuaguaguuacaga

SEQ ID NO: 939651 - RNA, 19 nt, Artificial Sequence
  Description of Artificial Sequence: Synthetic oligonucleotide
  Antisense strand to SEQ ID NO: 939650
ucuguaacuacuaggccug

SEQ ID NO: 939652 - RNA, 19 nt, Artificial Sequence
  Description of Artificial Sequence: Synthetic oligonucleotide
  Sense strand starting at position 365 of SEQ ID NO: 913598
acauaaugcugcuuuaaug

SEQ ID NO: 939653 - RNA, 19 nt, Artificial Sequence
  Description of Artificial Sequence: Synthetic oligonucleotide
  Antisense strand to SEQ ID NO: 939652
cauuaaagcagcauuaugu

SEQ ID NO: 939654 - RNA, 19 nt, Artificial Sequence
  Description of Artificial Sequence: Synthetic oligonucleotide
  Sense strand starting at position 351 of SEQ ID NO: 913598
cugcuuagugcccaacaua

SEQ ID NO: 939655 - RNA, 19 nt, Artificial Sequence
  Description of Artificial Sequence: Synthetic oligonucleotide
  Antisense strand to SEQ ID NO: 939654
uauguugggcacuaagcag

SEQ ID NO: 939656 - RNA, 19 nt, Artificial Sequence
  Description of Artificial Sequence: Synthetic oligonucleotide
  Sense strand starting at position 2585 of SEQ ID NO: 913598
gcuggucucuuacuaagau

SEQ ID NO: 939657 - RNA, 19 nt, Artificial Sequence
  Description of Artificial Sequence: Synthetic oligonucleotide
  Antisense strand to SEQ ID NO: 939656
aucuuaguaagagaccagc

SEQ ID NO: 939658 - RNA, 19 nt, Artificial Sequence
  Description of Artificial Sequence: Synthetic oligonucleotide
  Sense strand starting at position 3686 of SEQ ID NO: 913598
augucucugcugcacagau

SEQ ID NO: 939659 - RNA, 19 nt, Artificial Sequence
  Description of Artificial Sequence: Synthetic oligonucleotide
  Antisense strand to SEQ ID NO: 939658
aucugugcagcagagacau

SEQ ID NO: 939660 - RNA, 19 nt, Artificial Sequence
  Description of Artificial Sequence: Synthetic oligonucleotide
  Sense strand starting at position 3458 of SEQ ID NO: 913598
uugaguccuuccucaagca

SEQ ID NO: 939661 - RNA, 19 nt, Artificial Sequence
  Description of Artificial Sequence: Synthetic oligonucleotide
  Antisense strand to SEQ ID NO: 939660
ugcuugaggaaggacucaa

SEQ ID NO: 939662 - RNA, 19 nt, Artificial Sequence
  Description of Artificial Sequence: Synthetic oligonucleotide
  Sense strand starting at position 3766 of SEQ ID NO: 913598
agaaauaacucaggaugaa

SEQ ID NO: 939663 - RNA, 19 nt, Artificial Sequence
  Description of Artificial Sequence: Synthetic oligonucleotide
  Antisense strand to SEQ ID NO: 939662
uucauccugaguuauuucu

SEQ ID NO: 939664 - RNA, 19 nt, Artificial Sequence
  Description of Artificial Sequence: Synthetic oligonucleotide
  Sense strand starting at position 3418 of SEQ ID NO: 913598
ccgcauuacccaggcagaa

SEQ ID NO: 939665 - RNA, 19 nt, Artificial Sequence
  Description of Artificial Sequence: Synthetic oligonucleotide
  Antisense strand to SEQ ID NO: 939664
uucugccuggguaaugcgg

SEQ ID NO: 939666 - RNA, 19 nt, Artificial Sequence
  Description of Artificial Sequence: Synthetic oligonucleotide
  Sense strand starting at position 3260 of SEQ ID NO: 913598
gaaggauggcgcuguggau

SEQ ID NO: 939667 - RNA, 19 nt, Artificial Sequence
  Description of Artificial Sequence: Synthetic oligonucleotide
  Antisense strand to SEQ ID NO: 939666
auccacagcgccauccuuc

SEQ ID NO: 939668 - RNA, 19 nt, Artificial Sequence
  Description of Artificial Sequence: Synthetic oligonucleotide
  Sense strand starting at position 2537 of SEQ ID NO: 913598
ggucgcagagccugauaaa

SEQ ID NO: 939669 - RNA, 19 nt, Artificial Sequence
  Description of Artificial Sequence: Synthetic oligonucleotide
  Antisense strand to SEQ ID NO: 939668
uuuaucaggcucugcgacc

SEQ ID NO: 939670 - RNA, 19 nt, Artificial Sequence
  Description of Artificial Sequence: Synthetic oligonucleotide
  Sense strand starting at position 429 of SEQ ID NO: 913598
augugagaguguuucaguc

SEQ ID NO: 939671 - RNA, 19 nt, Artificial Sequence
  Description of Artificial Sequence: Synthetic oligonucleotide
  Antisense strand to SEQ ID NO: 939670
gacugaaacacucucacau

SEQ ID NO: 939672 - RNA, 19 nt, Artificial Sequence
  Description of Artificial Sequence: Synthetic oligonucleotide
  Sense strand starting at position 3699 of SEQ ID NO: 913598
acagaugugucuuugcuac

SEQ ID NO: 939673 - RNA, 19 nt, Artificial Sequence
  Description of Artificial Sequence: Synthetic oligonucleotide
  Antisense strand to SEQ ID NO: 939672
guagcaaagacacaucugu

SEQ ID NO: 939674 - RNA, 19 nt, Artificial Sequence
  Description of Artificial Sequence: Synthetic oligonucleotide
  Sense strand starting at position 2455 of SEQ ID NO: 913598
aguuaaauuuccggaacac

SEQ ID NO: 939675 - RNA, 19 nt, Artificial Sequence
  Description of Artificial Sequence: Synthetic oligonucleotide
  Antisense strand to SEQ ID NO: 939674
guguuccggaaauuuaacu

SEQ ID NO: 939676 - RNA, 19 nt, Artificial Sequence
  Description of Artificial Sequence: Synthetic oligonucleotide
  Sense strand starting at position 375 of SEQ ID NO: 913598
gcuuuaaugcuugguuaag

SEQ ID NO: 939677 - RNA, 19 nt, Artificial Sequence
  Description of Artificial Sequence: Synthetic oligonucleotide
  Antisense strand to SEQ ID NO: 939676
cuuaaccaagcauuaaagc

SEQ ID NO: 939678 - RNA, 19 nt, Artificial Sequence
  Description of Artificial Sequence: Synthetic oligonucleotide
  Sense strand starting at position 329 of SEQ ID NO: 913598
ucaaguucuugcucaaguu

SEQ ID NO: 939679 - RNA, 19 nt, Artificial Sequence
  Description of Artificial Sequence: Synthetic oligonucleotide
  Antisense strand to SEQ ID NO: 939678
aacuugagcaagaacuuga

SEQ ID NO: 939680 - RNA, 19 nt, Artificial Sequence
  Description of Artificial Sequence: Synthetic oligonucleotide
  Sense strand starting at position 3668 of SEQ ID NO: 913598
acuucuuuccugugccaca

SEQ ID NO: 939681 - RNA, 19 nt, Artificial Sequence
  Description of Artificial Sequence: Synthetic oligonucleotide
  Antisense strand to SEQ ID NO: 939680
uguggcacaggaaagaagu

SEQ ID NO: 939682 - RNA, 19 nt, Artificial Sequence
  Description of Artificial Sequence: Synthetic oligonucleotide
  Sense strand starting at position 2093 of SEQ ID NO: 913598
gugaaaggcgcgcauugaa

SEQ ID NO: 939683 - RNA, 19 nt, Artificial Sequence
  Description of Artificial Sequence: Synthetic oligonucleotide
  Antisense strand to SEQ ID NO: 939682
uucaaugcgcgccuuucac

SEQ ID NO: 939684 - RNA, 19 nt, Artificial Sequence
  Description of Artificial Sequence: Synthetic oligonucleotide
  Sense strand starting at position 3167 of SEQ ID NO: 913598
cagguaucauuaucgcagu

SEQ ID NO: 939685 - RNA, 19 nt, Artificial Sequence
  Description of Artificial Sequence: Synthetic oligonucleotide
  Antisense strand to SEQ ID NO: 939684
acugcgauaaugauaccug

SEQ ID NO: 939686 - RNA, 19 nt, Artificial Sequence
  Description of Artificial Sequence: Synthetic oligonucleotide
  Sense strand starting at position 374 of SEQ ID NO: 913598
ugcuuuaaugcuugguuaa

SEQ ID NO: 939687 - RNA, 19 nt, Artificial Sequence
  Description of Artificial Sequence: Synthetic oligonucleotide
  Antisense strand to SEQ ID NO: 939686
uuaaccaagcauuaaagca

SEQ ID NO: 939688 - RNA, 19 nt, Artificial Sequence
  Description of Artificial Sequence: Synthetic oligonucleotide
  Sense strand starting at position 2578 of SEQ ID NO: 913598
ggucacugcuggucucuua

SEQ ID NO: 939689 - RNA, 19 nt, Artificial Sequence
  Description of Artificial Sequence: Synthetic oligonucleotide
  Antisense strand to SEQ ID NO: 939688
uaagagaccagcagugacc

SEQ ID NO: 939690 - RNA, 19 nt, Artificial Sequence
  Description of Artificial Sequence: Synthetic oligonucleotide
  Sense strand starting at position 1149 of SEQ ID NO: 913598
ccagauuccaguuggcgua

SEQ ID NO: 939691 - RNA, 19 nt, Artificial Sequence
  Description of Artificial Sequence: Synthetic oligonucleotide
  Antisense strand to SEQ ID NO: 939690
uacgccaacuggaaucugg

SEQ ID NO: 939692 - RNA, 19 nt, Artificial Sequence
  Description of Artificial Sequence: Synthetic oligonucleotide
  Sense strand starting at position 373 of SEQ ID NO: 913598
cugcuuuaaugcuugguua

SEQ ID NO: 939693 - RNA, 19 nt, Artificial Sequence
  Description of Artificial Sequence: Synthetic oligonucleotide
  Antisense strand to SEQ ID NO: 939692
uaaccaagcauuaaagcag

SEQ ID NO: 939694 - RNA, 19 nt, Artificial Sequence
  Description of Artificial Sequence: Synthetic oligonucleotide
  Sense strand starting at position 976 of SEQ ID NO: 913598
aggugaacaucucagggua

SEQ ID NO: 939695 - RNA, 19 nt, Artificial Sequence
  Description of Artificial Sequence: Synthetic oligonucleotide
  Antisense strand to SEQ ID NO: 939694
uacccugagauguucaccu

SEQ ID NO: 939696 - RNA, 19 nt, Artificial Sequence
  Description of Artificial Sequence: Synthetic oligonucleotide
  Sense strand starting at position 1113 of SEQ ID NO: 913599
ggagcuacgccugcucuua

SEQ ID NO: 939697 - RNA, 19 nt, Artificial Sequence
  Description of Artificial Sequence: Synthetic oligonucleotide
  Antisense strand to SEQ ID NO: 939696
uaagagcaggcguagcucc

SEQ ID NO: 939698 - RNA, 19 nt, Artificial Sequence
  Description of Artificial Sequence: Synthetic oligonucleotide
  Sense strand starting at position 3455 of SEQ ID NO: 913599
guuaaaccucugggacaga

SEQ ID NO: 939699 - RNA, 19 nt, Artificial Sequence
  Description of Artificial Sequence: Synthetic oligonucleotide
  Antisense strand to SEQ ID NO: 939698
ucugucccagagguuuaac

SEQ ID NO: 939700 - RNA, 19 nt, Artificial Sequence
  Description of Artificial Sequence: Synthetic oligonucleotide
  Sense strand starting at position 2550 of SEQ ID NO: 913599
ggagcauccauuuguguac

SEQ ID NO: 939701 - RNA, 19 nt, Artificial Sequence
  Description of Artificial Sequence: Synthetic oligonucleotide
  Antisense strand to SEQ ID NO: 939700
guacacaaauggaugcucc

SEQ ID NO: 939702 - RNA, 19 nt, Artificial Sequence
  Description of Artificial Sequence: Synthetic oligonucleotide
  Sense strand starting at position 3453 of SEQ ID NO: 913599
uaguuaaaccucugggaca

SEQ ID NO: 939703 - RNA, 19 nt, Artificial Sequence
  Description of Artificial Sequence: Synthetic oligonucleotide
  Antisense strand to SEQ ID NO: 939702
ugucccagagguuuaacua

SEQ ID NO: 939704 - RNA, 19 nt, Artificial Sequence
  Description of Artificial Sequence: Synthetic oligonucleotide
  Sense strand starting at position 895 of SEQ ID NO: 913599
caaggcauggcccaagauu

SEQ ID NO: 939705 - RNA, 19 nt, Artificial Sequence
  Description of Artificial Sequence: Synthetic oligonucleotide
  Antisense strand to SEQ ID NO: 939704
aaucuugggccaugccuug

SEQ ID NO: 939706 - RNA, 19 nt, Artificial Sequence
  Description of Artificial Sequence: Synthetic oligonucleotide
  Sense strand starting at position 3201 of SEQ ID NO: 913599
agaggacacuucuugucau

SEQ ID NO: 939707 - RNA, 19 nt, Artificial Sequence
  Description of Artificial Sequence: Synthetic oligonucleotide
  Antisense strand to SEQ ID NO: 939706
augacaagaaguguccucu

SEQ ID NO: 939708 - RNA, 19 nt, Artificial Sequence
  Description of Artificial Sequence: Synthetic oligonucleotide
  Sense strand starting at position 904 of SEQ ID NO: 913599
gcccaagauuccucagaua

SEQ ID NO: 939709 - RNA, 19 nt, Artificial Sequence
  Description of Artificial Sequence: Synthetic oligonucleotide
  Antisense strand to SEQ ID NO: 939708
uaucugaggaaucuugggc

SEQ ID NO: 939710 - RNA, 19 nt, Artificial Sequence
  Description of Artificial Sequence: Synthetic oligonucleotide
  Sense strand starting at position 3221 of SEQ ID NO: 913599
gcggaaguguuuccauuug

SEQ ID NO: 939711 - RNA, 19 nt, Artificial Sequence
  Description of Artificial Sequence: Synthetic oligonucleotide
  Antisense strand to SEQ ID NO: 939710
caaauggaaacacuuccgc

SEQ ID NO: 939712 - RNA, 19 nt, Artificial Sequence
  Description of Artificial Sequence: Synthetic oligonucleotide
  Sense strand starting at position 903 of SEQ ID NO: 913599
ggcccaagauuccucagau

SEQ ID NO: 939713 - RNA, 19 nt, Artificial Sequence
  Description of Artificial Sequence: Synthetic oligonucleotide
  Antisense strand to SEQ ID NO: 939712
aucugaggaaucuugggcc

SEQ ID NO: 939714 - RNA, 19 nt, Artificial Sequence
  Description of Artificial Sequence: Synthetic oligonucleotide
  Sense strand starting at position 1125 of SEQ ID NO: 913599
gcucuuagagccgagggaa

SEQ ID NO: 939715 - RNA, 19 nt, Artificial Sequence
  Description of Artificial Sequence: Synthetic oligonucleotide
  Antisense strand to SEQ ID NO: 939714
uucccucggcucuaagagc

SEQ ID NO: 939716 - RNA, 19 nt, Artificial Sequence
  Description of Artificial Sequence: Synthetic oligonucleotide
  Sense strand starting at position 3441 of SEQ ID NO: 913599
ucuauacuaguguaguuaa

SEQ ID NO: 939717 - RNA, 19 nt, Artificial Sequence
  Description of Artificial Sequence: Synthetic oligonucleotide
  Antisense strand to SEQ ID NO: 939716
uuaacuacacuaguauaga

SEQ ID NO: 939718 - RNA, 19 nt, Artificial Sequence
  Description of Artificial Sequence: Synthetic oligonucleotide
  Sense strand starting at position 2431 of SEQ ID NO: 913599
gccacauuaggaggaguuu

SEQ ID NO: 939719 - RNA, 19 nt, Artificial Sequence
  Description of Artificial Sequence: Synthetic oligonucleotide
  Antisense strand to SEQ ID NO: 939718
aaacuccuccuaauguggc

SEQ ID NO: 939720 - RNA, 19 nt, Artificial Sequence
  Description of Artificial Sequence: Synthetic oligonucleotide
  Sense strand starting at position 3377 of SEQ ID NO: 913599
agacaucucguguaaguag

SEQ ID NO: 939721 - RNA, 19 nt, Artificial Sequence
  Description of Artificial Sequence: Synthetic oligonucleotide
  Antisense strand to SEQ ID NO: 939720
cuacuuacacgagaugucu

SEQ ID NO: 939722 - RNA, 19 nt, Artificial Sequence
  Description of Artificial Sequence: Synthetic oligonucleotide
  Sense strand starting at position 3834 of SEQ ID NO: 913599
ccaagagguuuccuuucua

SEQ ID NO: 939723 - RNA, 19 nt, Artificial Sequence
  Description of Artificial Sequence: Synthetic oligonucleotide
  Antisense strand to SEQ ID NO: 939722
uagaaaggaaaccucuugg

SEQ ID NO: 939724 - RNA, 19 nt, Artificial Sequence
  Description of Artificial Sequence: Synthetic oligonucleotide
  Sense strand starting at position 3433 of SEQ ID NO: 913599
aacgaugcucuauacuagu

SEQ ID NO: 939725 - RNA, 19 nt, Artificial Sequence
  Description of Artificial Sequence: Synthetic oligonucleotide
  Antisense strand to SEQ ID NO: 939724
acuaguauagagcaucguu

SEQ ID NO: 939726 - RNA, 19 nt, Artificial Sequence
  Description of Artificial Sequence: Synthetic oligonucleotide
  Sense strand starting at position 3838 of SEQ ID NO: 913599
gagguuuccuuucuaacga

SEQ ID NO: 939727 - RNA, 19 nt, Artificial Sequence
  Description of Artificial Sequence: Synthetic oligonucleotide
  Antisense strand to SEQ ID NO: 939726
ucguuagaaaggaaaccuc

SEQ ID NO: 939728 - RNA, 19 nt, Artificial Sequence
  Description of Artificial Sequence: Synthetic oligonucleotide
  Sense strand starting at position 3825 of SEQ ID NO: 913599
ccguguccgccaagagguu

SEQ ID NO: 939729 - RNA, 19 nt, Artificial Sequence
  Description of Artificial Sequence: Synthetic oligonucleotide
  Antisense strand to SEQ ID NO: 939728
aaccucuuggcggacacgg

SEQ ID NO: 939730 - RNA, 19 nt, Artificial Sequence
  Description of Artificial Sequence: Synthetic oligonucleotide
  Sense strand starting at position 3380 of SEQ ID NO: 913599
caucucguguaaguagaaa

SEQ ID NO: 939731 - RNA, 19 nt, Artificial Sequence
  Description of Artificial Sequence: Synthetic oligonucleotide
  Antisense strand to SEQ ID NO: 939730
uuucuacuuacacgagaug

SEQ ID NO: 939732 - RNA, 19 nt, Artificial Sequence
  Description of Artificial Sequence: Synthetic oligonucleotide
  Sense strand starting at position 3426 of SEQ ID NO: 913599
uuuaguaaacgaugcucua

SEQ ID NO: 939733 - RNA, 19 nt, Artificial Sequence
  Description of Artificial Sequence: Synthetic oligonucleotide
  Antisense strand to SEQ ID NO: 939732
uagagcaucguuuacuaaa

SEQ ID NO: 939734 - RNA, 19 nt, Artificial Sequence
  Description of Artificial Sequence: Synthetic oligonucleotide
  Sense strand starting at position 375 of SEQ ID NO: 913599
gaucauagucccugugcua

SEQ ID NO: 939735 - RNA, 19 nt, Artificial Sequence
  Description of Artificial Sequence: Synthetic oligonucleotide
  Antisense strand to SEQ ID NO: 939734
uagcacagggacuaugauc

SEQ ID NO: 939736 - RNA, 19 nt, Artificial Sequence
  Description of Artificial Sequence: Synthetic oligonucleotide
  Sense strand starting at position 3485 of SEQ ID NO: 913599
ugaaauggcucagacagaa

SEQ ID NO: 939737 - RNA, 19 nt, Artificial Sequence
  Description of Artificial Sequence: Synthetic oligonucleotide
  Antisense strand to SEQ ID NO: 939736
uucugucugagccauuuca

SEQ ID NO: 939738 - RNA, 19 nt, Artificial Sequence
  Description of Artificial Sequence: Synthetic oligonucleotide
  Sense strand starting at position 1339 of SEQ ID NO: 913599
ggguguuaagccuggguca

SEQ ID NO: 939739 - RNA, 19 nt, Artificial Sequence
  Description of Artificial Sequence: Synthetic oligonucleotide
  Antisense strand to SEQ ID NO: 939738
ugacccaggcuuaacaccc

SEQ ID NO: 939740 - RNA, 19 nt, Artificial Sequence
  Description of Artificial Sequence: Synthetic oligonucleotide
  Sense strand starting at position 2561 of SEQ ID NO: 913599
uuguguacuugcccggauu

SEQ ID NO: 939741 - RNA, 19 nt, Artificial Sequence
  Description of Artificial Sequence: Synthetic oligonucleotide
  Antisense strand to SEQ ID NO: 939740
aauccgggcaaguacacaa

SEQ ID NO: 939742 - RNA, 19 nt, Artificial Sequence
  Description of Artificial Sequence: Synthetic oligonucleotide
  Sense strand starting at position 2563 of SEQ ID NO: 913599
guguacuugcccggauucu

SEQ ID NO: 939743 - RNA, 19 nt, Artificial Sequence
  Description of Artificial Sequence: Synthetic oligonucleotide
  Antisense strand to SEQ ID NO: 939742
agaauccgggcaaguacac

SEQ ID NO: 939744 - RNA, 19 nt, Artificial Sequence
  Description of Artificial Sequence: Synthetic oligonucleotide
  Sense strand starting at position 3591 of SEQ ID NO: 913599
uggugucaucccggcucau

SEQ ID NO: 939745 - RNA, 19 nt, Artificial Sequence
  Description of Artificial Sequence: Synthetic oligonucleotide
  Antisense strand to SEQ ID NO: 939744
augagccgggaugacacca

SEQ ID NO: 939746 - RNA, 19 nt, Artificial Sequence
  Description of Artificial Sequence: Synthetic oligonucleotide
  Sense strand starting at position 3202 of SEQ ID NO: 913599
gaggacacuucuugucaua

SEQ ID NO: 939747 - RNA, 19 nt, Artificial Sequence
  Description of Artificial Sequence: Synthetic oligonucleotide
  Antisense strand to SEQ ID NO: 939746
uaugacaagaaguguccuc

SEQ ID NO: 939748 - RNA, 19 nt, Artificial Sequence
  Description of Artificial Sequence: Synthetic oligonucleotide
  Sense strand starting at position 345 of SEQ ID NO: 913599
gaugcuugccuccguuagu

SEQ ID NO: 939749 - RNA, 19 nt, Artificial Sequence
  Description of Artificial Sequence: Synthetic oligonucleotide
  Antisense strand to SEQ ID NO: 939748
acuaacggaggcaagcauc

SEQ ID NO: 939750 - RNA, 19 nt, Artificial Sequence
  Description of Artificial Sequence: Synthetic oligonucleotide
  Sense strand starting at position 1001 of SEQ ID NO: 913599
gggaggaggugucagcuuu

SEQ ID NO: 939751 - RNA, 19 nt, Artificial Sequence
  Description of Artificial Sequence: Synthetic oligonucleotide
  Antisense strand to SEQ ID NO: 939750
aaagcugacaccuccuccc

SEQ ID NO: 939752 - RNA, 19 nt, Artificial Sequence
  Description of Artificial Sequence: Synthetic oligonucleotide
  Sense strand starting at position 684 of SEQ ID NO: 913599
cgccguauccuguggguuu

SEQ ID NO: 939753 - RNA, 19 nt, Artificial Sequence
  Description of Artificial Sequence: Synthetic oligonucleotide
  Antisense strand to SEQ ID NO: 939752
aaacccacaggauacggcg

SEQ ID NO: 939754 - RNA, 19 nt, Artificial Sequence
  Description of Artificial Sequence: Synthetic oligonucleotide
  Sense strand starting at position 3436 of SEQ ID NO: 913599
gaugcucuauacuagugua

SEQ ID NO: 939755 - RNA, 19 nt, Artificial Sequence
  Description of Artificial Sequence: Synthetic oligonucleotide
  Antisense strand to SEQ ID NO: 939754
uacacuaguauagagcauc

SEQ ID NO: 939756 - RNA, 19 nt, Artificial Sequence
  Description of Artificial Sequence: Synthetic oligonucleotide
  Sense strand starting at position 3207 of SEQ ID NO: 913599
cacuucuugucauagcgga

SEQ ID NO: 939757 - RNA, 19 nt, Artificial Sequence
  Description of Artificial Sequence: Synthetic oligonucleotide
  Antisense strand to SEQ ID NO: 939756
uccgcuaugacaagaagug

SEQ ID NO: 939758 - RNA, 19 nt, Artificial Sequence
  Description of Artificial Sequence: Synthetic oligonucleotide
  Sense strand starting at position 3375 of SEQ ID NO: 913599
gaagacaucucguguaagu

SEQ ID NO: 939759 - RNA, 19 nt, Artificial Sequence
  Description of Artificial Sequence: Synthetic oligonucleotide
  Antisense strand to SEQ ID NO: 939758
acuuacacgagaugucuuc

SEQ ID NO: 939760 - RNA, 19 nt, Artificial Sequence
  Description of Artificial Sequence: Synthetic oligonucleotide
  Sense strand starting at position 3714 of SEQ ID NO: 913599
uuaguagagucgggaguuu

SEQ ID NO: 939761 - RNA, 19 nt, Artificial Sequence
  Description of Artificial Sequence: Synthetic oligonucleotide
  Antisense strand to SEQ ID NO: 939760
aaacucccgacucuacuaa

SEQ ID NO: 939762 - RNA, 19 nt, Artificial Sequence
  Description of Artificial Sequence: Synthetic oligonucleotide
  Sense strand starting at position 728 of SEQ ID NO: 913599
ugaagugucuggcagcagu

SEQ ID NO: 939763 - RNA, 19 nt, Artificial Sequence
  Description of Artificial Sequence: Synthetic oligonucleotide
  Antisense strand to SEQ ID NO: 939762
acugcugccagacacuuca

SEQ ID NO: 939764 - RNA, 19 nt, Artificial Sequence
  Description of Artificial Sequence: Synthetic oligonucleotide
  Sense strand starting at position 3439 of SEQ ID NO: 913599
gcucuauacuaguguaguu

SEQ ID NO: 939765 - RNA, 19 nt, Artificial Sequence
  Description of Artificial Sequence: Synthetic oligonucleotide
  Antisense strand to SEQ ID NO: 939764
aacuacacuaguauagagc

SEQ ID NO: 939766 - RNA, 19 nt, Artificial Sequence
  Description of Artificial Sequence: Synthetic oligonucleotide
  Sense strand starting at position 12 of SEQ ID NO: 913600
guuaauaggcauuacaaac

SEQ ID NO: 939767 - RNA, 19 nt, Artificial Sequence
  Description of Artificial Sequence: Synthetic oligonucleotide
  Antisense strand to SEQ ID NO: 939766
guuuguaaugccuauuaac

SEQ ID NO: 939768 - RNA, 19 nt, Artificial Sequence
  Description of Artificial Sequence: Synthetic oligonucleotide
  Sense strand starting at position 318 of SEQ ID NO: 913600
uaacacauugggugaaacu

SEQ ID NO: 939769 - RNA, 19 nt, Artificial Sequence
  Description of Artificial Sequence: Synthetic oligonucleotide
  Antisense strand to SEQ ID NO: 939768
aguuucacccaauguguua

SEQ ID NO: 939770 - RNA, 19 nt, Artificial Sequence
  Description of Artificial Sequence: Synthetic oligonucleotide
  Sense strand starting at position 314 of SEQ ID NO: 913600
uaauuaacacauuggguga

SEQ ID NO: 939771 - RNA, 19 nt, Artificial Sequence
  Description of Artificial Sequence: Synthetic oligonucleotide
  Antisense strand to SEQ ID NO: 939770
ucacccaauguguuaauua

SEQ ID NO: 939772 - RNA, 19 nt, Artificial Sequence
  Description of Artificial Sequence: Synthetic oligonucleotide
  Sense strand starting at position 1080 of SEQ ID NO: 913600
cgaugcaucgguucaugca

SEQ ID NO: 939773 - RNA, 19 nt, Artificial Sequence
  Description of Artificial Sequence: Synthetic oligonucleotide
  Antisense strand to SEQ ID NO: 939772
ugcaugaaccgaugcaucg

SEQ ID NO: 939774 - RNA, 19 nt, Artificial Sequence
  Description of Artificial Sequence: Synthetic oligonucleotide
  Sense strand starting at position 2548 of SEQ ID NO: 913600
gaugccagcgcuuugagua

SEQ ID NO: 939775 - RNA, 19 nt, Artificial Sequence
  Description of Artificial Sequence: Synthetic oligonucleotide
  Antisense strand to SEQ ID NO: 939774
uacucaaagcgcuggcauc

SEQ ID NO: 939776 - RNA, 19 nt, Artificial Sequence
  Description of Artificial Sequence: Synthetic oligonucleotide
  Sense strand starting at position 2555 of SEQ ID NO: 913600
gcgcuuugaguagcgaaga

SEQ ID NO: 939777 - RNA, 19 nt, Artificial Sequence
  Description of Artificial Sequence: Synthetic oligonucleotide
  Antisense strand to SEQ ID NO: 939776
ucuucgcuacucaaagcgc

SEQ ID NO: 939778 - RNA, 19 nt, Artificial Sequence
  Description of Artificial Sequence: Synthetic oligonucleotide
  Sense strand starting at position 625 of SEQ ID NO: 913600
ucauguuaacuagaugcaa

SEQ ID NO: 939779 - RNA, 19 nt, Artificial Sequence
  Description of Artificial Sequence: Synthetic oligonucleotide
  Antisense strand to SEQ ID NO: 939778
uugcaucuaguuaacauga

SEQ ID NO: 939780 - RNA, 19 nt, Artificial Sequence
  Description of Artificial Sequence: Synthetic oligonucleotide
  Sense strand starting at position 2592 of SEQ ID NO: 913600
gccguuugcaagcuuugaa

SEQ ID NO: 939781 - RNA, 19 nt, Artificial Sequence
  Description of Artificial Sequence: Synthetic oligonucleotide
  Antisense strand to SEQ ID NO: 939780
uucaaagcuugcaaacggc

SEQ ID NO: 939782 - RNA, 19 nt, Artificial Sequence
  Description of Artificial Sequence: Synthetic oligonucleotide
  Sense strand starting at position 2591 of SEQ ID NO: 913600
ggccguuugcaagcuuuga

SEQ ID NO: 939783 - RNA, 19 nt, Artificial Sequence
  Description of Artificial Sequence: Synthetic oligonucleotide
  Antisense strand to SEQ ID NO: 939782
ucaaagcuugcaaacggcc

SEQ ID NO: 939784 - RNA, 19 nt, Artificial Sequence
  Description of Artificial Sequence: Synthetic oligonucleotide
  Sense strand starting at position 1596 of SEQ ID NO: 913600
cucaccugugcagaagauu

SEQ ID NO: 939785 - RNA, 19 nt, Artificial Sequence
  Description of Artificial Sequence: Synthetic oligonucleotide
  Antisense strand to SEQ ID NO: 939784
aaucuucugcacaggugag

SEQ ID NO: 939786 - RNA, 19 nt, Artificial Sequence
  Description of Artificial Sequence: Synthetic oligonucleotide
  Sense strand starting at position 2151 of SEQ ID NO: 913600
acgugaauuagugagaggu

SEQ ID NO: 939787 - RNA, 19 nt, Artificial Sequence
  Description of Artificial Sequence: Synthetic oligonucleotide
  Antisense strand to SEQ ID NO: 939786
accucucacuaauucacgu

SEQ ID NO: 939788 - RNA, 19 nt, Artificial Sequence
  Description of Artificial Sequence: Synthetic oligonucleotide
  Sense strand starting at position 520 of SEQ ID NO: 913600
gaguaugaugguuaugguu

SEQ ID NO: 939789 - RNA, 19 nt, Artificial Sequence
  Description of Artificial Sequence: Synthetic oligonucleotide
  Antisense strand to SEQ ID NO: 939788
aaccauaaccaucauacuc

SEQ ID NO: 939790 - RNA, 19 nt, Artificial Sequence
  Description of Artificial Sequence: Synthetic oligonucleotide
  Sense strand starting at position 1387 of SEQ ID NO: 913600
gaaagaucguaucuaauuc

SEQ ID NO: 939791 - RNA, 19 nt, Artificial Sequence
  Description of Artificial Sequence: Synthetic oligonucleotide
  Antisense strand to SEQ ID NO: 939790
gaauuagauacgaucuuuc

SEQ ID NO: 939792 - RNA, 19 nt, Artificial Sequence
  Description of Artificial Sequence: Synthetic oligonucleotide
  Sense strand starting at position 622 of SEQ ID NO: 913600
guaucauguuaacuagaug

SEQ ID NO: 939793 - RNA, 19 nt, Artificial Sequence
  Description of Artificial Sequence: Synthetic oligonucleotide
  Antisense strand to SEQ ID NO: 939792
caucuaguuaacaugauac

SEQ ID NO: 939794 - RNA, 19 nt, Artificial Sequence
  Description of Artificial Sequence: Synthetic oligonucleotide
  Sense strand starting at position 2754 of SEQ ID NO: 913600
uugcaauuuggcugucuca

SEQ ID NO: 939795 - RNA, 19 nt, Artificial Sequence
  Description of Artificial Sequence: Synthetic oligonucleotide
  Antisense strand to SEQ ID NO: 939794
ugagacagccaaauugcaa

SEQ ID NO: 939796 - RNA, 19 nt, Artificial Sequence
  Description of Artificial Sequence: Synthetic oligonucleotide
  Sense strand starting at position 1592 of SEQ ID NO: 913600
aggacucaccugugcagaa

SEQ ID NO: 939797 - RNA, 19 nt, Artificial Sequence
  Description of Artificial Sequence: Synthetic oligonucleotide
  Antisense strand to SEQ ID NO: 939796
uucugcacaggugaguccu

SEQ ID NO: 939798 - RNA, 19 nt, Artificial Sequence
  Description of Artificial Sequence: Synthetic oligonucleotide
  Sense strand starting at position 2662 of SEQ ID NO: 913600
agccacauccguuauacaa

SEQ ID NO: 939799 - RNA, 19 nt, Artificial Sequence
  Description of Artificial Sequence: Synthetic oligonucleotide
  Antisense strand to SEQ ID NO: 939798
uuguauaacggauguggcu

SEQ ID NO: 939800 - RNA, 19 nt, Artificial Sequence
  Description of Artificial Sequence: Synthetic oligonucleotide
  Sense strand starting at position 2669 of SEQ ID NO: 913600
uccguuauacaauacaugu

SEQ ID NO: 939801 - RNA, 19 nt, Artificial Sequence
  Description of Artificial Sequence: Synthetic oligonucleotide
  Antisense strand to SEQ ID NO: 939800
acauguauuguauaacgga

SEQ ID NO: 939802 - RNA, 19 nt, Artificial Sequence
  Description of Artificial Sequence: Synthetic oligonucleotide
  Sense strand starting at position 3818 of SEQ ID NO: 913600
gccaaugugcaauaugauc

SEQ ID NO: 939803 - RNA, 19 nt, Artificial Sequence
  Description of Artificial Sequence: Synthetic oligonucleotide
  Antisense strand to SEQ ID NO: 939802
gaucauauugcacauuggc

SEQ ID NO: 939804 - RNA, 19 nt, Artificial Sequence
  Description of Artificial Sequence: Synthetic oligonucleotide
  Sense strand starting at position 519 of SEQ ID NO: 913600
ggaguaugaugguuauggu

SEQ ID NO: 939805 - RNA, 19 nt, Artificial Sequence
  Description of Artificial Sequence: Synthetic oligonucleotide
  Antisense strand to SEQ ID NO: 939804
accauaaccaucauacucc

SEQ ID NO: 939806 - RNA, 19 nt, Artificial Sequence
  Description of Artificial Sequence: Synthetic oligonucleotide
  Sense strand starting at position 2501 of SEQ ID NO: 913600
ucuggauggguccgagacu

SEQ ID NO: 939807 - RNA, 19 nt, Artificial Sequence
  Description of Artificial Sequence: Synthetic oligonucleotide
  Antisense strand to SEQ ID NO: 939806
agucucggacccauccaga

SEQ ID NO: 939808 - RNA, 19 nt, Artificial Sequence
  Description of Artificial Sequence: Synthetic oligonucleotide
  Sense strand starting at position 2828 of SEQ ID NO: 913600
gcuccugaugaguaagcau

SEQ ID NO: 939809 - RNA, 19 nt, Artificial Sequence
  Description of Artificial Sequence: Synthetic oligonucleotide
  Antisense strand to SEQ ID NO: 939808
augcuuacucaucaggagc

SEQ ID NO: 939810 - RNA, 19 nt, Artificial Sequence
  Description of Artificial Sequence: Synthetic oligonucleotide
  Sense strand starting at position 3823 of SEQ ID NO: 913600
ugugcaauaugaucuuaau

SEQ ID NO: 939811 - RNA, 19 nt, Artificial Sequence
  Description of Artificial Sequence: Synthetic oligonucleotide
  Antisense strand to SEQ ID NO: 939810
auuaagaucauauugcaca

SEQ ID NO: 939812 - RNA, 19 nt, Artificial Sequence
  Description of Artificial Sequence: Synthetic oligonucleotide
  Sense strand starting at position 415 of SEQ ID NO: 913600
gaacguaugccacauguua

SEQ ID NO: 939813 - RNA, 19 nt, Artificial Sequence
  Description of Artificial Sequence: Synthetic oligonucleotide
  Antisense strand to SEQ ID NO: 939812
uaacauguggcauacguuc

SEQ ID NO: 939814 - RNA, 19 nt, Artificial Sequence
  Description of Artificial Sequence: Synthetic oligonucleotide
  Sense strand starting at position 2632 of SEQ ID NO: 913600
uccucagugucaucucaaa

SEQ ID NO: 939815 - RNA, 19 nt, Artificial Sequence
  Description of Artificial Sequence: Synthetic oligonucleotide
  Antisense strand to SEQ ID NO: 939814
uuugagaugacacugagga

SEQ ID NO: 939816 - RNA, 19 nt, Artificial Sequence
  Description of Artificial Sequence: Synthetic oligonucleotide
  Sense strand starting at position 1235 of SEQ ID NO: 913600
accucuucugcauggcaaa

SEQ ID NO: 939817 - RNA, 19 nt, Artificial Sequence
  Description of Artificial Sequence: Synthetic oligonucleotide
  Antisense strand to SEQ ID NO: 939816
uuugccaugcagaagaggu

SEQ ID NO: 939818 - RNA, 19 nt, Artificial Sequence
  Description of Artificial Sequence: Synthetic oligonucleotide
  Sense strand starting at position 2050 of SEQ ID NO: 913600
augucuuuguuggcaaaca

SEQ ID NO: 939819 - RNA, 19 nt, Artificial Sequence
  Description of Artificial Sequence: Synthetic oligonucleotide
  Antisense strand to SEQ ID NO: 939818
uguuugccaacaaagacau

SEQ ID NO: 939820 - RNA, 19 nt, Artificial Sequence
  Description of Artificial Sequence: Synthetic oligonucleotide
  Sense strand starting at position 3288 of SEQ ID NO: 913600
auuugaauauugcagccaa

SEQ ID NO: 939821 - RNA, 19 nt, Artificial Sequence
  Description of Artificial Sequence: Synthetic oligonucleotide
  Antisense strand to SEQ ID NO: 939820
uuggcugcaauauucaaau

SEQ ID NO: 939822 - RNA, 19 nt, Artificial Sequence
  Description of Artificial Sequence: Synthetic oligonucleotide
  Sense strand starting at position 1199 of SEQ ID NO: 913600
ggcgucuggguucaauauu

SEQ ID NO: 939823 - RNA, 19 nt, Artificial Sequence
  Description of Artificial Sequence: Synthetic oligonucleotide
  Antisense strand to SEQ ID NO: 939822
aauauugaacccagacgcc

SEQ ID NO: 939824 - RNA, 19 nt, Artificial Sequence
  Description of Artificial Sequence: Synthetic oligonucleotide
  Sense strand starting at position 1064 of SEQ ID NO: 913600
gcaaauauuuaguaaucga

SEQ ID NO: 939825 - RNA, 19 nt, Artificial Sequence
  Description of Artificial Sequence: Synthetic oligonucleotide
  Antisense strand to SEQ ID NO: 939824
ucgauuacuaaauauuugc

SEQ ID NO: 939826 - RNA, 19 nt, Artificial Sequence
  Description of Artificial Sequence: Synthetic oligonucleotide
  Sense strand starting at position 1270 of SEQ ID NO: 913600
ugaauuaguucggucucau

SEQ ID NO: 939827 - RNA, 19 nt, Artificial Sequence
  Description of Artificial Sequence: Synthetic oligonucleotide
  Antisense strand to SEQ ID NO: 939826
augagaccgaacuaauuca

SEQ ID NO: 939828 - RNA, 19 nt, Artificial Sequence
  Description of Artificial Sequence: Synthetic oligonucleotide
  Sense strand starting at position 528 of SEQ ID NO: 913600
ugguuaugguuaucagcua

SEQ ID NO: 939829 - RNA, 19 nt, Artificial Sequence
  Description of Artificial Sequence: Synthetic oligonucleotide
  Antisense strand to SEQ ID NO: 939828
uagcugauaaccauaacca

SEQ ID NO: 939830 - RNA, 19 nt, Artificial Sequence
  Description of Artificial Sequence: Synthetic oligonucleotide
  Sense strand starting at position 3861 of SEQ ID NO: 913600
cugucucuguguccacaaa

SEQ ID NO: 939831 - RNA, 19 nt, Artificial Sequence
  Description of Artificial Sequence: Synthetic oligonucleotide
  Antisense strand to SEQ ID NO: 939830
uuuguggacacagagacag

SEQ ID NO: 939832 - RNA, 19 nt, Artificial Sequence
  Description of Artificial Sequence: Synthetic oligonucleotide
  Sense strand starting at position 2704 of SEQ ID NO: 913600
uuuguugugccguaagaua

SEQ ID NO: 939833 - RNA, 19 nt, Artificial Sequence
  Description of Artificial Sequence: Synthetic oligonucleotide
  Antisense strand to SEQ ID NO: 939832
uaucuuacggcacaacaaa

SEQ ID NO: 939834 - RNA, 19 nt, Artificial Sequence
  Description of Artificial Sequence: Synthetic oligonucleotide
  Sense strand starting at position 1384 of SEQ ID NO: 913600
gaggaaagaucguaucuaa

SEQ ID NO: 939835 - RNA, 19 nt, Artificial Sequence
  Description of Artificial Sequence: Synthetic oligonucleotide
  Antisense strand to SEQ ID NO: 939834
uuagauacgaucuuuccuc

SEQ ID NO: 939836 - RNA, 19 nt, Artificial Sequence
  Description of Artificial Sequence: Synthetic oligonucleotide
  Sense strand starting at position 2595 of SEQ ID NO: 913600
guuugcaagcuuugaaggu

SEQ ID NO: 939837 - RNA, 19 nt, Artificial Sequence
  Description of Artificial Sequence: Synthetic oligonucleotide
  Antisense strand to SEQ ID NO: 939836
accuucaaagcuugcaaac

SEQ ID NO: 939838 - RNA, 19 nt, Artificial Sequence
  Description of Artificial Sequence: Synthetic oligonucleotide
  Sense strand starting at position 2528 of SEQ ID NO: 913600
cucacagguucccaggaaa

SEQ ID NO: 939839 - RNA, 19 nt, Artificial Sequence
  Description of Artificial Sequence: Synthetic oligonucleotide
  Antisense strand to SEQ ID NO: 939838
uuuccugggaaccugugag

SEQ ID NO: 939840 - RNA, 19 nt, Artificial Sequence
  Description of Artificial Sequence: Synthetic oligonucleotide
  Sense strand starting at position 2553 of SEQ ID NO: 913600
cagcgcuuugaguagcgaa

SEQ ID NO: 939841 - RNA, 19 nt, Artificial Sequence
  Description of Artificial Sequence: Synthetic oligonucleotide
  Antisense strand to SEQ ID NO: 939840
uucgcuacucaaagcgcug

SEQ ID NO: 939842 - RNA, 19 nt, Artificial Sequence
  Description of Artificial Sequence: Synthetic oligonucleotide
  Sense strand starting at position 316 of SEQ ID NO: 913600
auuaacacauugggugaaa

SEQ ID NO: 939843 - RNA, 19 nt, Artificial Sequence
  Description of Artificial Sequence: Synthetic oligonucleotide
  Antisense strand to SEQ ID NO: 939842
uuucacccaauguguuaau

SEQ ID NO: 939844 - RNA, 19 nt, Artificial Sequence
  Description of Artificial Sequence: Synthetic oligonucleotide
  Sense strand starting at position 455 of SEQ ID NO: 913600
gagcauaaaugguaacauu

SEQ ID NO: 939845 - RNA, 19 nt, Artificial Sequence
  Description of Artificial Sequence: Synthetic oligonucleotide
  Antisense strand to SEQ ID NO: 939844
aauguuaccauuuaugcuc

SEQ ID NO: 939846 - RNA, 19 nt, Artificial Sequence
  Description of Artificial Sequence: Synthetic oligonucleotide
  Sense strand starting at position 2613 of SEQ ID NO: 913601
agugaaugcguauugcuuu

SEQ ID NO: 939847 - RNA, 19 nt, Artificial Sequence
  Description of Artificial Sequence: Synthetic oligonucleotide
  Antisense strand to SEQ ID NO: 939846
aaagcaauacgcauucacu

SEQ ID NO: 939848 - RNA, 19 nt, Artificial Sequence
  Description of Artificial Sequence: Synthetic oligonucleotide
  Sense strand starting at position 2576 of SEQ ID NO: 913601
cugaauuacuugguggaaa

SEQ ID NO: 939849 - RNA, 19 nt, Artificial Sequence
  Description of Artificial Sequence: Synthetic oligonucleotide
  Antisense strand to SEQ ID NO: 939848
uuuccaccaaguaauucag

SEQ ID NO: 939850 - RNA, 19 nt, Artificial Sequence
  Description of Artificial Sequence: Synthetic oligonucleotide
  Sense strand starting at position 1618 of SEQ ID NO: 913601
cacugagaguuacugggau

SEQ ID NO: 939851 - RNA, 19 nt, Artificial Sequence
  Description of Artificial Sequence: Synthetic oligonucleotide
  Antisense strand to SEQ ID NO: 939850
aucccaguaacucucagug

SEQ ID NO: 939852 - RNA, 19 nt, Artificial Sequence
  Description of Artificial Sequence: Synthetic oligonucleotide
  Sense strand starting at position 1983 of SEQ ID NO: 913601
auugcuccucgcucaguua

SEQ ID NO: 939853 - RNA, 19 nt, Artificial Sequence
  Description of Artificial Sequence: Synthetic oligonucleotide
  Antisense strand to SEQ ID NO: 939852
uaacugagcgaggagcaau

SEQ ID NO: 939854 - RNA, 19 nt, Artificial Sequence
  Description of Artificial Sequence: Synthetic oligonucleotide
  Sense strand starting at position 2575 of SEQ ID NO: 913601
ucugaauuacuugguggaa

SEQ ID NO: 939855 - RNA, 19 nt, Artificial Sequence
  Description of Artificial Sequence: Synthetic oligonucleotide
  Antisense strand to SEQ ID NO: 939854
uuccaccaaguaauucaga

SEQ ID NO: 939856 - RNA, 19 nt, Artificial Sequence
  Description of Artificial Sequence: Synthetic oligonucleotide
  Sense strand starting at position 2574 of SEQ ID NO: 913601
uucugaauuacuuggugga

SEQ ID NO: 939857 - RNA, 19 nt, Artificial Sequence
  Description of Artificial Sequence: Synthetic oligonucleotide
  Antisense strand to SEQ ID NO: 939856
uccaccaaguaauucagaa

SEQ ID NO: 939858 - RNA, 19 nt, Artificial Sequence
  Description of Artificial Sequence: Synthetic oligonucleotide
  Sense strand starting at position 2592 of SEQ ID NO: 913601
aaagaaguggcuggugaua

SEQ ID NO: 939859 - RNA, 19 nt, Artificial Sequence
  Description of Artificial Sequence: Synthetic oligonucleotide
  Antisense strand to SEQ ID NO: 939858
uaucaccagccacuucuuu

SEQ ID NO: 939860 - RNA, 19 nt, Artificial Sequence
  Description of Artificial Sequence: Synthetic oligonucleotide
  Sense strand starting at position 2591 of SEQ ID NO: 913601
gaaagaaguggcuggugau

SEQ ID NO: 939861 - RNA, 19 nt, Artificial Sequence
  Description of Artificial Sequence: Synthetic oligonucleotide
  Antisense strand to SEQ ID NO: 939860
aucaccagccacuucuuuc

SEQ ID NO: 939862 - RNA, 19 nt, Artificial Sequence
  Description of Artificial Sequence: Synthetic oligonucleotide
  Sense strand starting at position 1659 of SEQ ID NO: 913601
aucauuugcuccucgcaca

SEQ ID NO: 939863 - RNA, 19 nt, Artificial Sequence
  Description of Artificial Sequence: Synthetic oligonucleotide
  Antisense strand to SEQ ID NO: 939862
ugugcgaggagcaaaugau

SEQ ID NO: 939864 - RNA, 19 nt, Artificial Sequence
  Description of Artificial Sequence: Synthetic oligonucleotide
  Sense strand starting at position 683 of SEQ ID NO: 913601
ggaaggaguccguagguuu

SEQ ID NO: 939865 - RNA, 19 nt, Artificial Sequence
  Description of Artificial Sequence: Synthetic oligonucleotide
  Antisense strand to SEQ ID NO: 939864
aaaccuacggacuccuucc

SEQ ID NO: 939866 - RNA, 19 nt, Artificial Sequence
  Description of Artificial Sequence: Synthetic oligonucleotide
  Sense strand starting at position 1660 of SEQ ID NO: 913601
ucauuugcuccucgcacaa

SEQ ID NO: 939867 - RNA, 19 nt, Artificial Sequence
  Description of Artificial Sequence: Synthetic oligonucleotide
  Antisense strand to SEQ ID NO: 939866
uugugcgaggagcaaauga

SEQ ID NO: 939868 - RNA, 19 nt, Artificial Sequence
  Description of Artificial Sequence: Synthetic oligonucleotide
  Sense strand starting at position 3299 of SEQ ID NO: 913601
ccgaaagcaucucuaauca

SEQ ID NO: 939869 - RNA, 19 nt, Artificial Sequence
  Description of Artificial Sequence: Synthetic oligonucleotide
  Antisense strand to SEQ ID NO: 939868
ugauuagagaugcuuucgg

SEQ ID NO: 939870 - RNA, 19 nt, Artificial Sequence
  Description of Artificial Sequence: Synthetic oligonucleotide
  Sense strand starting at position 3983 of SEQ ID NO: 913601
gagcacauuugggaaaguu

SEQ ID NO: 939871 - RNA, 19 nt, Artificial Sequence
  Description of Artificial Sequence: Synthetic oligonucleotide
  Antisense strand to SEQ ID NO: 939870
aacuuucccaaaugugcuc

SEQ ID NO: 939872 - RNA, 19 nt, Artificial Sequence
  Description of Artificial Sequence: Synthetic oligonucleotide
  Sense strand starting at position 2632 of SEQ ID NO: 913601
uuuggaaagucuguucuau

SEQ ID NO: 939873 - RNA, 19 nt, Artificial Sequence
  Description of Artificial Sequence: Synthetic oligonucleotide
  Antisense strand to SEQ ID NO: 939872
auagaacagacuuuccaaa

SEQ ID NO: 939874 - RNA, 19 nt, Artificial Sequence
  Description of Artificial Sequence: Synthetic oligonucleotide
  Sense strand starting at position 2642 of SEQ ID NO: 913601
cuguucuauuuauacagga

SEQ ID NO: 939875 - RNA, 19 nt, Artificial Sequence
  Description of Artificial Sequence: Synthetic oligonucleotide
  Antisense strand to SEQ ID NO: 939874
uccuguauaaauagaacag

SEQ ID NO: 939876 - RNA, 19 nt, Artificial Sequence
  Description of Artificial Sequence: Synthetic oligonucleotide
  Sense strand starting at position 576 of SEQ ID NO: 913601
gggugauuucccggcugcu

SEQ ID NO: 939877 - RNA, 19 nt, Artificial Sequence
  Description of Artificial Sequence: Synthetic oligonucleotide
  Antisense strand to SEQ ID NO: 939876
agcagccgggaaaucaccc

SEQ ID NO: 939878 - RNA, 19 nt, Artificial Sequence
  Description of Artificial Sequence: Synthetic oligonucleotide
  Sense strand starting at position 1531 of SEQ ID NO: 913601
ccaguucggcauugggaaa

SEQ ID NO: 939879 - RNA, 19 nt, Artificial Sequence
  Description of Artificial Sequence: Synthetic oligonucleotide
  Antisense strand to SEQ ID NO: 939878
uuucccaaugccgaacugg

SEQ ID NO: 939880 - RNA, 19 nt, Artificial Sequence
  Description of Artificial Sequence: Synthetic oligonucleotide
  Sense strand starting at position 76 of SEQ ID NO: 913601
cagucaugucaauguugau

SEQ ID NO: 939881 - RNA, 19 nt, Artificial Sequence
  Description of Artificial Sequence: Synthetic oligonucleotide
  Antisense strand to SEQ ID NO: 939880
aucaacauugacaugacug

SEQ ID NO: 939882 - RNA, 19 nt, Artificial Sequence
  Description of Artificial Sequence: Synthetic oligonucleotide
  Sense strand starting at position 32 of SEQ ID NO: 913601
agcaaagcugcugggauau

SEQ ID NO: 939883 - RNA, 19 nt, Artificial Sequence
  Description of Artificial Sequence: Synthetic oligonucleotide
  Antisense strand to SEQ ID NO: 939882
auaucccagcagcuuugcu

SEQ ID NO: 939884 - RNA, 19 nt, Artificial Sequence
  Description of Artificial Sequence: Synthetic oligonucleotide
  Sense strand starting at position 284 of SEQ ID NO: 913601
guggcaacccauugacagu

SEQ ID NO: 939885 - RNA, 19 nt, Artificial Sequence
  Description of Artificial Sequence: Synthetic oligonucleotide
  Antisense strand to SEQ ID NO: 939884
acugucaauggguugccac

SEQ ID NO: 939886 - RNA, 19 nt, Artificial Sequence
  Description of Artificial Sequence: Synthetic oligonucleotide
  Sense strand starting at position 1931 of SEQ ID NO: 913601
gguguaguguuauuauaac

SEQ ID NO: 939887 - RNA, 19 nt, Artificial Sequence
  Description of Artificial Sequence: Synthetic oligonucleotide
  Antisense strand to SEQ ID NO: 939886
guuauaauaacacuacacc

SEQ ID NO: 939888 - RNA, 19 nt, Artificial Sequence
  Description of Artificial Sequence: Synthetic oligonucleotide
  Sense strand starting at position 2004 of SEQ ID NO: 913601
cggaaaguguugcucuaag

SEQ ID NO: 939889 - RNA, 19 nt, Artificial Sequence
  Description of Artificial Sequence: Synthetic oligonucleotide
  Antisense strand to SEQ ID NO: 939888
cuuagagcaacacuuuccg

SEQ ID NO: 939890 - RNA, 19 nt, Artificial Sequence
  Description of Artificial Sequence: Synthetic oligonucleotide
  Sense strand starting at position 7 of SEQ ID NO: 913601
ucugguuucuaggugcaga

SEQ ID NO: 939891 - RNA, 19 nt, Artificial Sequence
  Description of Artificial Sequence: Synthetic oligonucleotide
  Antisense strand to SEQ ID NO: 939890
ucugcaccuagaaaccaga

SEQ ID NO: 939892 - RNA, 19 nt, Artificial Sequence
  Description of Artificial Sequence: Synthetic oligonucleotide
  Sense strand starting at position 209 of SEQ ID NO: 913601
acuguagagcuguggcaaa

SEQ ID NO: 939893 - RNA, 19 nt, Artificial Sequence
  Description of Artificial Sequence: Synthetic oligonucleotide
  Antisense strand to SEQ ID NO: 939892
uuugccacagcucuacagu

SEQ ID NO: 939894 - RNA, 19 nt, Artificial Sequence
  Description of Artificial Sequence: Synthetic oligonucleotide
  Sense strand starting at position 1008 of SEQ ID NO: 913601
aagggagcgcuccgagauu

SEQ ID NO: 939895 - RNA, 19 nt, Artificial Sequence
  Description of Artificial Sequence: Synthetic oligonucleotide
  Antisense strand to SEQ ID NO: 939894
aaucucggagcgcucccuu

SEQ ID NO: 939896 - RNA, 19 nt, Artificial Sequence
  Description of Artificial Sequence: Synthetic oligonucleotide
  Sense strand starting at position 3955 of SEQ ID NO: 913601
cggccaucucucugacuua

SEQ ID NO: 939897 - RNA, 19 nt, Artificial Sequence
  Description of Artificial Sequence: Synthetic oligonucleotide
  Antisense strand to SEQ ID NO: 939896
uaagucagagagauggccg

SEQ ID NO: 939898 - RNA, 19 nt, Artificial Sequence
  Description of Artificial Sequence: Synthetic oligonucleotide
  Sense strand starting at position 1646 of SEQ ID NO: 913601
ggccuuggcggucaucauu

SEQ ID NO: 939899 - RNA, 19 nt, Artificial Sequence
  Description of Artificial Sequence: Synthetic oligonucleotide
  Antisense strand to SEQ ID NO: 939898
aaugaugaccgccaaggcc

SEQ ID NO: 939900 - RNA, 19 nt, Artificial Sequence
  Description of Artificial Sequence: Synthetic oligonucleotide
  Sense strand starting at position 3219 of SEQ ID NO: 913601
gaauacacguacuagaaua

SEQ ID NO: 939901 - RNA, 19 nt, Artificial Sequence
  Description of Artificial Sequence: Synthetic oligonucleotide
  Antisense strand to SEQ ID NO: 939900
uauucuaguacguguauuc

SEQ ID NO: 939902 - RNA, 19 nt, Artificial Sequence
  Description of Artificial Sequence: Synthetic oligonucleotide
  Sense strand starting at position 2051 of SEQ ID NO: 913601
gacgucgcugcccauauau

SEQ ID NO: 939903 - RNA, 19 nt, Artificial Sequence
  Description of Artificial Sequence: Synthetic oligonucleotide
  Antisense strand to SEQ ID NO: 939902
auauaugggcagcgacguc

SEQ ID NO: 939904 - RNA, 19 nt, Artificial Sequence
  Description of Artificial Sequence: Synthetic oligonucleotide
  Sense strand starting at position 3382 of SEQ ID NO: 913601
ccuucuguuucguucccaa

SEQ ID NO: 939905 - RNA, 19 nt, Artificial Sequence
  Description of Artificial Sequence: Synthetic oligonucleotide
  Antisense strand to SEQ ID NO: 939904
uugggaacgaaacagaagg

SEQ ID NO: 939906 - RNA, 19 nt, Artificial Sequence
  Description of Artificial Sequence: Synthetic oligonucleotide
  Sense strand starting at position 2679 of SEQ ID NO: 913601
uggguuguuuguuuguuua

SEQ ID NO: 939907 - RNA, 19 nt, Artificial Sequence
  Description of Artificial Sequence: Synthetic oligonucleotide
  Antisense strand to SEQ ID NO: 939906
uaaacaaacaaacaaccca

SEQ ID NO: 939908 - RNA, 19 nt, Artificial Sequence
  Description of Artificial Sequence: Synthetic oligonucleotide
  Sense strand starting at position 2577 of SEQ ID NO: 913601
ugaauuacuugguggaaag

SEQ ID NO: 939909 - RNA, 19 nt, Artificial Sequence
  Description of Artificial Sequence: Synthetic oligonucleotide
  Antisense strand to SEQ ID NO: 939908
cuuuccaccaaguaauuca

SEQ ID NO: 939910 - RNA, 19 nt, Artificial Sequence
  Description of Artificial Sequence: Synthetic oligonucleotide
  Sense strand starting at position 2050 of SEQ ID NO: 913601
ugacgucgcugcccauaua

SEQ ID NO: 939911 - RNA, 19 nt, Artificial Sequence
  Description of Artificial Sequence: Synthetic oligonucleotide
  Antisense strand to SEQ ID NO: 939910
uauaugggcagcgacguca

SEQ ID NO: 939912 - RNA, 19 nt, Artificial Sequence
  Description of Artificial Sequence: Synthetic oligonucleotide
  Sense strand starting at position 525 of SEQ ID NO: 913601
cagucagugccgugauggu

SEQ ID NO: 939913 - RNA, 19 nt, Artificial Sequence
  Description of Artificial Sequence: Synthetic oligonucleotide
  Antisense strand to SEQ ID NO: 939912
accaucacggcacugacug

SEQ ID NO: 939914 - RNA, 19 nt, Artificial Sequence
  Description of Artificial Sequence: Synthetic oligonucleotide
  Sense strand starting at position 1585 of SEQ ID NO: 913601
gguagauguugucagacag

SEQ ID NO: 939915 - RNA, 19 nt, Artificial Sequence
  Description of Artificial Sequence: Synthetic oligonucleotide
  Antisense strand to SEQ ID NO: 939914
cugucugacaacaucuacc

SEQ ID NO: 939916 - RNA, 19 nt, Artificial Sequence
  Description of Artificial Sequence: Synthetic oligonucleotide
  Sense strand starting at position 3956 of SEQ ID NO: 913601
ggccaucucucugacuuaa

SEQ ID NO: 939917 - RNA, 19 nt, Artificial Sequence
  Description of Artificial Sequence: Synthetic oligonucleotide
  Antisense strand to SEQ ID NO: 939916
uuaagucagagagauggcc

SEQ ID NO: 939918 - RNA, 19 nt, Artificial Sequence
  Description of Artificial Sequence: Synthetic oligonucleotide
  Sense strand starting at position 2594 of SEQ ID NO: 913601
agaaguggcuggugauaag

SEQ ID NO: 939919 - RNA, 19 nt, Artificial Sequence
  Description of Artificial Sequence: Synthetic oligonucleotide
  Antisense strand to SEQ ID NO: 939918
cuuaucaccagccacuucu

SEQ ID NO: 939920 - RNA, 19 nt, Artificial Sequence
  Description of Artificial Sequence: Synthetic oligonucleotide
  Sense strand starting at position 2597 of SEQ ID NO: 913601
aguggcuggugauaagagu

SEQ ID NO: 939921 - RNA, 19 nt, Artificial Sequence
  Description of Artificial Sequence: Synthetic oligonucleotide
  Antisense strand to SEQ ID NO: 939920
acucuuaucaccagccacu

SEQ ID NO: 939922 - RNA, 19 nt, Artificial Sequence
  Description of Artificial Sequence: Synthetic oligonucleotide
  Sense strand starting at position 79 of SEQ ID NO: 913601
ucaugucaauguugaucau

SEQ ID NO: 939923 - RNA, 19 nt, Artificial Sequence
  Description of Artificial Sequence: Synthetic oligonucleotide
  Antisense strand to SEQ ID NO: 939922
augaucaacauugacauga

SEQ ID NO: 939924 - RNA, 19 nt, Artificial Sequence
  Description of Artificial Sequence: Synthetic oligonucleotide
  Sense strand starting at position 31 of SEQ ID NO: 913601
gagcaaagcugcugggaua

SEQ ID NO: 939925 - RNA, 19 nt, Artificial Sequence
  Description of Artificial Sequence: Synthetic oligonucleotide
  Antisense strand to SEQ ID NO: 939924
uaucccagcagcuuugcuc

SEQ ID NO: 939926 - RNA, 19 nt, Artificial Sequence
  Description of Artificial Sequence: Synthetic oligonucleotide
  Sense strand starting at position 2979 of SEQ ID NO: 913602
ccaauuugcuuuguccaga

SEQ ID NO: 939927 - RNA, 19 nt, Artificial Sequence
  Description of Artificial Sequence: Synthetic oligonucleotide
  Antisense strand to SEQ ID NO: 939926
ucuggacaaagcaaauugg

SEQ ID NO: 939928 - RNA, 19 nt, Artificial Sequence
  Description of Artificial Sequence: Synthetic oligonucleotide
  Sense strand starting at position 2082 of SEQ ID NO: 913602
cugggaggccuuuauugaa

SEQ ID NO: 939929 - RNA, 19 nt, Artificial Sequence
  Description of Artificial Sequence: Synthetic oligonucleotide
  Antisense strand to SEQ ID NO: 939928
uucaauaaaggccucccag

SEQ ID NO: 939930 - RNA, 19 nt, Artificial Sequence
  Description of Artificial Sequence: Synthetic oligonucleotide
  Sense strand starting at position 3911 of SEQ ID NO: 913602
guuugaucccaaugaaaga

SEQ ID NO: 939931 - RNA, 19 nt, Artificial Sequence
  Description of Artificial Sequence: Synthetic oligonucleotide
  Antisense strand to SEQ ID NO: 939930
ucuuucauugggaucaaac

SEQ ID NO: 939932 - RNA, 19 nt, Artificial Sequence
  Description of Artificial Sequence: Synthetic oligonucleotide
  Sense strand starting at position 2936 of SEQ ID NO: 913602
auguaucagggcuauuaaa

SEQ ID NO: 939933 - RNA, 19 nt, Artificial Sequence
  Description of Artificial Sequence: Synthetic oligonucleotide
  Antisense strand to SEQ ID NO: 939932
uuuaauagcccugauacau

SEQ ID NO: 939934 - RNA, 19 nt, Artificial Sequence
  Description of Artificial Sequence: Synthetic oligonucleotide
  Sense strand starting at position 2388 of SEQ ID NO: 913602
ugaacacuucuuugaggau

SEQ ID NO: 939935 - RNA, 19 nt, Artificial Sequence
  Description of Artificial Sequence: Synthetic oligonucleotide
  Antisense strand to SEQ ID NO: 939934
auccucaaagaaguguuca

SEQ ID NO: 939936 - RNA, 19 nt, Artificial Sequence
  Description of Artificial Sequence: Synthetic oligonucleotide
  Sense strand starting at position 2106 of SEQ ID NO: 913602
gcugaaacaagucaguaga

SEQ ID NO: 939937 - RNA, 19 nt, Artificial Sequence
  Description of Artificial Sequence: Synthetic oligonucleotide
  Antisense strand to SEQ ID NO: 939936
ucuacugacuuguuucagc

SEQ ID NO: 939938 - RNA, 19 nt, Artificial Sequence
  Description of Artificial Sequence: Synthetic oligonucleotide
  Sense strand starting at position 3969 of SEQ ID NO: 913602
agacuucucuaagcagaga

SEQ ID NO: 939939 - RNA, 19 nt, Artificial Sequence
  Description of Artificial Sequence: Synthetic oligonucleotide
  Antisense strand to SEQ ID NO: 939938
ucucugcuuagagaagucu

SEQ ID NO: 939940 - RNA, 19 nt, Artificial Sequence
  Description of Artificial Sequence: Synthetic oligonucleotide
  Sense strand starting at position 2709 of SEQ ID NO: 913602
gaaagaagugcggacaagu

SEQ ID NO: 939941 - RNA, 19 nt, Artificial Sequence
  Description of Artificial Sequence: Synthetic oligonucleotide
  Antisense strand to SEQ ID NO: 939940
acuuguccgcacuucuuuc

SEQ ID NO: 939942 - RNA, 19 nt, Artificial Sequence
  Description of Artificial Sequence: Synthetic oligonucleotide
  Sense strand starting at position 3964 of SEQ ID NO: 913602
gaggaagacuucucuaagc

SEQ ID NO: 939943 - RNA, 19 nt, Artificial Sequence
  Description of Artificial Sequence: Synthetic oligonucleotide
  Antisense strand to SEQ ID NO: 939942
gcuuagagaagucuuccuc

SEQ ID NO: 939944 - RNA, 19 nt, Artificial Sequence
  Description of Artificial Sequence: Synthetic oligonucleotide
  Sense strand starting at position 3754 of SEQ ID NO: 913602
ucagguucccuuuagauau

SEQ ID NO: 939945 - RNA, 19 nt, Artificial Sequence
  Description of Artificial Sequence: Synthetic oligonucleotide
  Antisense strand to SEQ ID NO: 939944
auaucuaaagggaaccuga

SEQ ID NO: 939946 - RNA, 19 nt, Artificial Sequence
  Description of Artificial Sequence: Synthetic oligonucleotide
  Sense strand starting at position 2387 of SEQ ID NO: 913602
gugaacacuucuuugagga

SEQ ID NO: 939947 - RNA, 19 nt, Artificial Sequence
  Description of Artificial Sequence: Synthetic oligonucleotide
  Antisense strand to SEQ ID NO: 939946
uccucaaagaaguguucac

SEQ ID NO: 939948 - RNA, 19 nt, Artificial Sequence
  Description of Artificial Sequence: Synthetic oligonucleotide
  Sense strand starting at position 3898 of SEQ ID NO: 913602
gaacaaugacaguguuuga

SEQ ID NO: 939949 - RNA, 19 nt, Artificial Sequence
  Description of Artificial Sequence: Synthetic oligonucleotide
  Antisense strand to SEQ ID NO: 939948
ucaaacacugucauuguuc

SEQ ID NO: 939950 - RNA, 19 nt, Artificial Sequence
  Description of Artificial Sequence: Synthetic oligonucleotide
  Sense strand starting at position 3540 of SEQ ID NO: 913602
cugguaaucccagaggcua

SEQ ID NO: 939951 - RNA, 19 nt, Artificial Sequence
  Description of Artificial Sequence: Synthetic oligonucleotide
  Antisense strand to SEQ ID NO: 939950
uagccucugggauuaccag

SEQ ID NO: 939952 - RNA, 19 nt, Artificial Sequence
  Description of Artificial Sequence: Synthetic oligonucleotide
  Sense strand starting at position 3683 of SEQ ID NO: 913602
auaagagcucuaugaucua

SEQ ID NO: 939953 - RNA, 19 nt, Artificial Sequence
  Description of Artificial Sequence: Synthetic oligonucleotide
  Antisense strand to SEQ ID NO: 939952
uagaucauagagcucuuau

SEQ ID NO: 939954 - RNA, 19 nt, Artificial Sequence
  Description of Artificial Sequence: Synthetic oligonucleotide
  Sense strand starting at position 3400 of SEQ ID NO: 913602
cucaaacuugaauggcaua

SEQ ID NO: 939955 - RNA, 19 nt, Artificial Sequence
  Description of Artificial Sequence: Synthetic oligonucleotide
  Antisense strand to SEQ ID NO: 939954
uaugccauucaaguuugag

SEQ ID NO: 939956 - RNA, 19 nt, Artificial Sequence
  Description of Artificial Sequence: Synthetic oligonucleotide
  Sense strand starting at position 2672 of SEQ ID NO: 913602
acaguauccuuccuggaga

SEQ ID NO: 939957 - RNA, 19 nt, Artificial Sequence
  Description of Artificial Sequence: Synthetic oligonucleotide
  Antisense strand to SEQ ID NO: 939956
ucuccaggaaggauacugu

SEQ ID NO: 939958 - RNA, 19 nt, Artificial Sequence
  Description of Artificial Sequence: Synthetic oligonucleotide
  Sense strand starting at position 3329 of SEQ ID NO: 913602
cuguuacuggaguggaaga

SEQ ID NO: 939959 - RNA, 19 nt, Artificial Sequence
  Description of Artificial Sequence: Synthetic oligonucleotide
  Antisense strand to SEQ ID NO: 939958
ucuuccacuccaguaacag

SEQ ID NO: 939960 - RNA, 19 nt, Artificial Sequence
  Description of Artificial Sequence: Synthetic oligonucleotide
  Sense strand starting at position 3789 of SEQ ID NO: 913602
ccagguguccaucacuaca

SEQ ID NO: 939961 - RNA, 19 nt, Artificial Sequence
  Description of Artificial Sequence: Synthetic oligonucleotide
  Antisense strand to SEQ ID NO: 939960
uguagugauggacaccugg

SEQ ID NO: 939962 - RNA, 19 nt, Artificial Sequence
  Description of Artificial Sequence: Synthetic oligonucleotide
  Sense strand starting at position 3649 of SEQ ID NO: 913602
gugucauuggcacaaauaa

SEQ ID NO: 939963 - RNA, 19 nt, Artificial Sequence
  Description of Artificial Sequence: Synthetic oligonucleotide
  Antisense strand to SEQ ID NO: 939962
uuauuugugccaaugacac

SEQ ID NO: 939964 - RNA, 19 nt, Artificial Sequence
  Description of Artificial Sequence: Synthetic oligonucleotide
  Sense strand starting at position 2648 of SEQ ID NO: 913602
gcugucauaagagaagcua

SEQ ID NO: 939965 - RNA, 19 nt, Artificial Sequence
  Description of Artificial Sequence: Synthetic oligonucleotide
  Antisense strand to SEQ ID NO: 939964
uagcuucucuuaugacagc

SEQ ID NO: 939966 - RNA, 19 nt, Artificial Sequence
  Description of Artificial Sequence: Synthetic oligonucleotide
  Sense strand starting at position 2739 of SEQ ID NO: 913602
aggguuuacugagcaagau

SEQ ID NO: 939967 - RNA, 19 nt, Artificial Sequence
  Description of Artificial Sequence: Synthetic oligonucleotide
  Antisense strand to SEQ ID NO: 939966
aucuugcucaguaaacccu

SEQ ID NO: 939968 - RNA, 19 nt, Artificial Sequence
  Description of Artificial Sequence: Synthetic oligonucleotide
  Sense strand starting at position 3686 of SEQ ID NO: 913602
agagcucuaugaucuaauu

SEQ ID NO: 939969 - RNA, 19 nt, Artificial Sequence
  Description of Artificial Sequence: Synthetic oligonucleotide
  Antisense strand to SEQ ID NO: 939968
aauuagaucauagagcucu

SEQ ID NO: 939970 - RNA, 19 nt, Artificial Sequence
  Description of Artificial Sequence: Synthetic oligonucleotide
  Sense strand starting at position 1266 of SEQ ID NO: 913602
agguuagcacccuaguaga

SEQ ID NO: 939971 - RNA, 19 nt, Artificial Sequence
  Description of Artificial Sequence: Synthetic oligonucleotide
  Antisense strand to SEQ ID NO: 939970
ucuacuagggugcuaaccu

SEQ ID NO: 939972 - RNA, 19 nt, Artificial Sequence
  Description of Artificial Sequence: Synthetic oligonucleotide
  Sense strand starting at position 2173 of SEQ ID NO: 913602
cuuaaauauggguagugca

SEQ ID NO: 939973 - RNA, 19 nt, Artificial Sequence
  Description of Artificial Sequence: Synthetic oligonucleotide
  Antisense strand to SEQ ID NO: 939972
ugcacuacccauauuuaag

SEQ ID NO: 939974 - RNA, 19 nt, Artificial Sequence
  Description of Artificial Sequence: Synthetic oligonucleotide
  Sense strand starting at position 3498 of SEQ ID NO: 913602
agugauaaaugguucucua

SEQ ID NO: 939975 - RNA, 19 nt, Artificial Sequence
  Description of Artificial Sequence: Synthetic oligonucleotide
  Antisense strand to SEQ ID NO: 939974
uagagaaccauuuaucacu

SEQ ID NO: 939976 - RNA, 19 nt, Artificial Sequence
  Description of Artificial Sequence: Synthetic oligonucleotide
  Sense strand starting at position 1954 of SEQ ID NO: 913602
ugagcuuuccaaggacuca

SEQ ID NO: 939977 - RNA, 19 nt, Artificial Sequence
  Description of Artificial Sequence: Synthetic oligonucleotide
  Antisense strand to SEQ ID NO: 939976
ugaguccuuggaaagcuca

SEQ ID NO: 939978 - RNA, 19 nt, Artificial Sequence
  Description of Artificial Sequence: Synthetic oligonucleotide
  Sense strand starting at position 1252 of SEQ ID NO: 913602
aagaaaucgcagcaagguu

SEQ ID NO: 939979 - RNA, 19 nt, Artificial Sequence
  Description of Artificial Sequence: Synthetic oligonucleotide
  Antisense strand to SEQ ID NO: 939978
aaccuugcugcgauuucuu

SEQ ID NO: 939980 - RNA, 19 nt, Artificial Sequence
  Description of Artificial Sequence: Synthetic oligonucleotide
  Sense strand starting at position 3542 of SEQ ID NO: 913602
gguaaucccagaggcuaua

SEQ ID NO: 939981 - RNA, 19 nt, Artificial Sequence
  Description of Artificial Sequence: Synthetic oligonucleotide
  Antisense strand to SEQ ID NO: 939980
uauagccucugggauuacc

SEQ ID NO: 939982 - RNA, 19 nt, Artificial Sequence
  Description of Artificial Sequence: Synthetic oligonucleotide
  Sense strand starting at position 3071 of SEQ ID NO: 913602
gaguguuuagggugacaag

SEQ ID NO: 939983 - RNA, 19 nt, Artificial Sequence
  Description of Artificial Sequence: Synthetic oligonucleotide
  Antisense strand to SEQ ID NO: 939982
cuugucacccuaaacacuc

SEQ ID NO: 939984 - RNA, 19 nt, Artificial Sequence
  Description of Artificial Sequence: Synthetic oligonucleotide
  Sense strand starting at position 3867 of SEQ ID NO: 913602
agcauugugcaucacacaa

SEQ ID NO: 939985 - RNA, 19 nt, Artificial Sequence
  Description of Artificial Sequence: Synthetic oligonucleotide
  Antisense strand to SEQ ID NO: 939984
uugugugaugcacaaugcu

SEQ ID NO: 939986 - RNA, 19 nt, Artificial Sequence
  Description of Artificial Sequence: Synthetic oligonucleotide
  Sense strand starting at position 3905 of SEQ ID NO: 913602
gacaguguuugaucccaau

SEQ ID NO: 939987 - RNA, 19 nt, Artificial Sequence
  Description of Artificial Sequence: Synthetic oligonucleotide
  Antisense strand to SEQ ID NO: 939986
auugggaucaaacacuguc

SEQ ID NO: 939988 - RNA, 19 nt, Artificial Sequence
  Description of Artificial Sequence: Synthetic oligonucleotide
  Sense strand starting at position 498 of SEQ ID NO: 913602
ccgaaagcaucucuaauca

SEQ ID NO: 939989 - RNA, 19 nt, Artificial Sequence
  Description of Artificial Sequence: Synthetic oligonucleotide
  Antisense strand to SEQ ID NO: 939988
ugauuagagaugcuuucgg

SEQ ID NO: 939990 - RNA, 19 nt, Artificial Sequence
  Description of Artificial Sequence: Synthetic oligonucleotide
  Sense strand starting at position 3767 of SEQ ID NO: 913602
agauauuucgugugccucu

SEQ ID NO: 939991 - RNA, 19 nt, Artificial Sequence
  Description of Artificial Sequence: Synthetic oligonucleotide
  Antisense strand to SEQ ID NO: 939990
agaggcacacgaaauaucu

SEQ ID NO: 939992 - RNA, 19 nt, Artificial Sequence
  Description of Artificial Sequence: Synthetic oligonucleotide
  Sense strand starting at position 1182 of SEQ ID NO: 913602
gagcacauuugggaaaguu

SEQ ID NO: 939993 - RNA, 19 nt, Artificial Sequence
  Description of Artificial Sequence: Synthetic oligonucleotide
  Antisense strand to SEQ ID NO: 939992
aacuuucccaaaugugcuc

SEQ ID NO: 939994 - RNA, 19 nt, Artificial Sequence
  Description of Artificial Sequence: Synthetic oligonucleotide
  Sense strand starting at position 3590 of SEQ ID NO: 913602
uguugugaagcuugaggaa

SEQ ID NO: 939995 - RNA, 19 nt, Artificial Sequence
  Description of Artificial Sequence: Synthetic oligonucleotide
  Antisense strand to SEQ ID NO: 939994
uuccucaagcuucacaaca

SEQ ID NO: 939996 - RNA, 19 nt, Artificial Sequence
  Description of Artificial Sequence: Synthetic oligonucleotide
  Sense strand starting at position 2984 of SEQ ID NO: 913602
uugcuuuguccagauucca

SEQ ID NO: 939997 - RNA, 19 nt, Artificial Sequence
  Description of Artificial Sequence: Synthetic oligonucleotide
  Antisense strand to SEQ ID NO: 939996
uggaaucuggacaaagcaa

SEQ ID NO: 939998 - RNA, 19 nt, Artificial Sequence
  Description of Artificial Sequence: Synthetic oligonucleotide
  Sense strand starting at position 2470 of SEQ ID NO: 913602
uuugccauuucugaggaga

SEQ ID NO: 939999 - RNA, 19 nt, Artificial Sequence
  Description of Artificial Sequence: Synthetic oligonucleotide
  Antisense strand to SEQ ID NO: 939998
ucuccucagaaauggcaaa

SEQ ID NO: 940000 - RNA, 19 nt, Artificial Sequence
  Description of Artificial Sequence: Synthetic oligonucleotide
  Sense strand starting at position 2816 of SEQ ID NO: 913602
guaccauggucccuacuau

SEQ ID NO: 940001 - RNA, 19 nt, Artificial Sequence
  Description of Artificial Sequence: Synthetic oligonucleotide
  Antisense strand to SEQ ID NO: 940000
auaguagggaccaugguac

SEQ ID NO: 940002 - RNA, 19 nt, Artificial Sequence
  Description of Artificial Sequence: Synthetic oligonucleotide
  Sense strand starting at position 3620 of SEQ ID NO: 913602
gcaccaguccaauguacaa

SEQ ID NO: 940003 - RNA, 19 nt, Artificial Sequence
  Description of Artificial Sequence: Synthetic oligonucleotide
  Antisense strand to SEQ ID NO: 940002
uuguacauuggacuggugc

SEQ ID NO: 940004 - RNA, 19 nt, Artificial Sequence
  Description of Artificial Sequence: Synthetic oligonucleotide
  Sense strand starting at position 3501 of SEQ ID NO: 913602
gauaaaugguucucuacgu

SEQ ID NO: 940005 - RNA, 19 nt, Artificial Sequence
  Description of Artificial Sequence: Synthetic oligonucleotide
  Antisense strand to SEQ ID NO: 940004
acguagagaaccauuuauc

SEQ ID NO: 940006 - RNA, 19 nt, Artificial Sequence
  Description of Artificial Sequence: Synthetic oligonucleotide
  Sense strand starting at position 2300 of SEQ ID NO: 913603
ggagucgugcaguuacagu

SEQ ID NO: 940007 - RNA, 19 nt, Artificial Sequence
  Description of Artificial Sequence: Synthetic oligonucleotide
  Antisense strand to SEQ ID NO: 940006
acuguaacugcacgacucc

SEQ ID NO: 940008 - RNA, 19 nt, Artificial Sequence
  Description of Artificial Sequence: Synthetic oligonucleotide
  Sense strand starting at position 841 of SEQ ID NO: 913603
uaauaaaugccuuggagag

SEQ ID NO: 940009 - RNA, 19 nt, Artificial Sequence
  Description of Artificial Sequence: Synthetic oligonucleotide
  Antisense strand to SEQ ID NO: 940008
cucuccaaggcauuuauua

SEQ ID NO: 940010 - RNA, 19 nt, Artificial Sequence
  Description of Artificial Sequence: Synthetic oligonucleotide
  Sense strand starting at position 3189 of SEQ ID NO: 913603
agacgagauaugugaauua

SEQ ID NO: 940011 - RNA, 19 nt, Artificial Sequence
  Description of Artificial Sequence: Synthetic oligonucleotide
  Antisense strand to SEQ ID NO: 940010
uaauucacauaucucgucu

SEQ ID NO: 940012 - RNA, 19 nt, Artificial Sequence
  Description of Artificial Sequence: Synthetic oligonucleotide
  Sense strand starting at position 3187 of SEQ ID NO: 913603
auagacgagauaugugaau

SEQ ID NO: 940013 - RNA, 19 nt, Artificial Sequence
  Description of Artificial Sequence: Synthetic oligonucleotide
  Antisense strand to SEQ ID NO: 940012
auucacauaucucgucuau

SEQ ID NO: 940014 - RNA, 19 nt, Artificial Sequence
  Description of Artificial Sequence: Synthetic oligonucleotide
  Sense strand starting at position 2508 of SEQ ID NO: 913603
cagggauugccuugagaaa

SEQ ID NO: 940015 - RNA, 19 nt, Artificial Sequence
  Description of Artificial Sequence: Synthetic oligonucleotide
  Antisense strand to SEQ ID NO: 940014
uuucucaaggcaaucccug

SEQ ID NO: 940016 - RNA, 19 nt, Artificial Sequence
  Description of Artificial Sequence: Synthetic oligonucleotide
  Sense strand starting at position 2242 of SEQ ID NO: 913603
aguuucugucuggagaaca

SEQ ID NO: 940017 - RNA, 19 nt, Artificial Sequence
  Description of Artificial Sequence: Synthetic oligonucleotide
  Antisense strand to SEQ ID NO: 940016
uguucuccagacagaaacu

SEQ ID NO: 940018 - RNA, 19 nt, Artificial Sequence
  Description of Artificial Sequence: Synthetic oligonucleotide
  Sense strand starting at position 964 of SEQ ID NO: 913603
gacugaucuggaugucaag

SEQ ID NO: 940019 - RNA, 19 nt, Artificial Sequence
  Description of Artificial Sequence: Synthetic oligonucleotide
  Antisense strand to SEQ ID NO: 940018
cuugacauccagaucaguc

SEQ ID NO: 940020 - RNA, 19 nt, Artificial Sequence
  Description of Artificial Sequence: Synthetic oligonucleotide
  Sense strand starting at position 2362 of SEQ ID NO: 913603
aaaugcugaguuuaacgaa

SEQ ID NO: 940021 - RNA, 19 nt, Artificial Sequence
  Description of Artificial Sequence: Synthetic oligonucleotide
  Antisense strand to SEQ ID NO: 940020
uucguuaaacucagcauuu

SEQ ID NO: 940022 - RNA, 19 nt, Artificial Sequence
  Description of Artificial Sequence: Synthetic oligonucleotide
  Sense strand starting at position 88 of SEQ ID NO: 913603
uauguaggccauuauaaug

SEQ ID NO: 940023 - RNA, 19 nt, Artificial Sequence
  Description of Artificial Sequence: Synthetic oligonucleotide
  Antisense strand to SEQ ID NO: 940022
cauuauaauggccuacaua

SEQ ID NO: 940024 - RNA, 19 nt, Artificial Sequence
  Description of Artificial Sequence: Synthetic oligonucleotide
  Sense strand starting at position 3146 of SEQ ID NO: 913603
gcagcagugaaauagauua

SEQ ID NO: 940025 - RNA, 19 nt, Artificial Sequence
  Description of Artificial Sequence: Synthetic oligonucleotide
  Antisense strand to SEQ ID NO: 940024
uaaucuauuucacugcugc

SEQ ID NO: 940026 - RNA, 19 nt, Artificial Sequence
  Description of Artificial Sequence: Synthetic oligonucleotide
  Sense strand starting at position 356 of SEQ ID NO: 913603
accauuagaucacugguua

SEQ ID NO: 940027 - RNA, 19 nt, Artificial Sequence
  Description of Artificial Sequence: Synthetic oligonucleotide
  Antisense strand to SEQ ID NO: 940026
uaaccagugaucuaauggu

SEQ ID NO: 940028 - RNA, 19 nt, Artificial Sequence
  Description of Artificial Sequence: Synthetic oligonucleotide
  Sense strand starting at position 1196 of SEQ ID NO: 913603
ucagguuaaaugggucaga

SEQ ID NO: 940029 - RNA, 19 nt, Artificial Sequence
  Description of Artificial Sequence: Synthetic oligonucleotide
  Antisense strand to SEQ ID NO: 940028
ucugacccauuuaaccuga

SEQ ID NO: 940030 - RNA, 19 nt, Artificial Sequence
  Description of Artificial Sequence: Synthetic oligonucleotide
  Sense strand starting at position 1054 of SEQ ID NO: 913603
uuucguuaucuuuaagagg

SEQ ID NO: 940031 - RNA, 19 nt, Artificial Sequence
  Description of Artificial Sequence: Synthetic oligonucleotide
  Antisense strand to SEQ ID NO: 940030
ccucuuaaagauaacgaaa

SEQ ID NO: 940032 - RNA, 19 nt, Artificial Sequence
  Description of Artificial Sequence: Synthetic oligonucleotide
  Sense strand starting at position 1106 of SEQ ID NO: 913603
aacuuccagugauucgaaa

SEQ ID NO: 940033 - RNA, 19 nt, Artificial Sequence
  Description of Artificial Sequence: Synthetic oligonucleotide
  Antisense strand to SEQ ID NO: 940032
uuucgaaucacuggaaguu

SEQ ID NO: 940034 - RNA, 19 nt, Artificial Sequence
  Description of Artificial Sequence: Synthetic oligonucleotide
  Sense strand starting at position 2750 of SEQ ID NO: 913603
cgaaguacuuuaccuagaa

SEQ ID NO: 940035 - RNA, 19 nt, Artificial Sequence
  Description of Artificial Sequence: Synthetic oligonucleotide
  Antisense strand to SEQ ID NO: 940034
uucuagguaaaguacuucg

SEQ ID NO: 940036 - RNA, 19 nt, Artificial Sequence
  Description of Artificial Sequence: Synthetic oligonucleotide
  Sense strand starting at position 360 of SEQ ID NO: 913603
uuagaucacugguuaucau

SEQ ID NO: 940037 - RNA, 19 nt, Artificial Sequence
  Description of Artificial Sequence: Synthetic oligonucleotide
  Antisense strand to SEQ ID NO: 940036
augauaaccagugaucuaa

SEQ ID NO: 940038 - RNA, 19 nt, Artificial Sequence
  Description of Artificial Sequence: Synthetic oligonucleotide
  Sense strand starting at position 2240 of SEQ ID NO: 913603
agaguuucugucuggagaa

SEQ ID NO: 940039 - RNA, 19 nt, Artificial Sequence
  Description of Artificial Sequence: Synthetic oligonucleotide
  Antisense strand to SEQ ID NO: 940038
uucuccagacagaaacucu

SEQ ID NO: 940040 - RNA, 19 nt, Artificial Sequence
  Description of Artificial Sequence: Synthetic oligonucleotide
  Sense strand starting at position 640 of SEQ ID NO: 913603
uguaacucacaagguauau

SEQ ID NO: 940041 - RNA, 19 nt, Artificial Sequence
  Description of Artificial Sequence: Synthetic oligonucleotide
  Antisense strand to SEQ ID NO: 940040
auauaccuugugaguuaca

SEQ ID NO: 940042 - RNA, 19 nt, Artificial Sequence
  Description of Artificial Sequence: Synthetic oligonucleotide
  Sense strand starting at position 357 of SEQ ID NO: 913603
ccauuagaucacugguuau

SEQ ID NO: 940043 - RNA, 19 nt, Artificial Sequence
  Description of Artificial Sequence: Synthetic oligonucleotide
  Antisense strand to SEQ ID NO: 940042
auaaccagugaucuaaugg

SEQ ID NO: 940044 - RNA, 19 nt, Artificial Sequence
  Description of Artificial Sequence: Synthetic oligonucleotide
  Sense strand starting at position 384 of SEQ ID NO: 913603
ugaauuagugcucacaucu

SEQ ID NO: 940045 - RNA, 19 nt, Artificial Sequence
  Description of Artificial Sequence: Synthetic oligonucleotide
  Antisense strand to SEQ ID NO: 940044
agaugugagcacuaauuca

SEQ ID NO: 940046 - RNA, 19 nt, Artificial Sequence
  Description of Artificial Sequence: Synthetic oligonucleotide
  Sense strand starting at position 2239 of SEQ ID NO: 913603
cagaguuucugucuggaga

SEQ ID NO: 940047 - RNA, 19 nt, Artificial Sequence
  Description of Artificial Sequence: Synthetic oligonucleotide
  Antisense strand to SEQ ID NO: 940046
ucuccagacagaaacucug

SEQ ID NO: 940048 - RNA, 19 nt, Artificial Sequence
  Description of Artificial Sequence: Synthetic oligonucleotide
  Sense strand starting at position 722 of SEQ ID NO: 913603
cuauccaugcccuaacgau

SEQ ID NO: 940049 - RNA, 19 nt, Artificial Sequence
  Description of Artificial Sequence: Synthetic oligonucleotide
  Antisense strand to SEQ ID NO: 940048
aucguuagggcauggauag

SEQ ID NO: 940050 - RNA, 19 nt, Artificial Sequence
  Description of Artificial Sequence: Synthetic oligonucleotide
  Sense strand starting at position 82 of SEQ ID NO: 913603
auauaauauguaggccauu

SEQ ID NO: 940051 - RNA, 19 nt, Artificial Sequence
  Description of Artificial Sequence: Synthetic oligonucleotide
  Antisense strand to SEQ ID NO: 940050
aauggccuacauauuauau

SEQ ID NO: 940052 - RNA, 19 nt, Artificial Sequence
  Description of Artificial Sequence: Synthetic oligonucleotide
  Sense strand starting at position 557 of SEQ ID NO: 913603
aguuuaugugcugacucaa

SEQ ID NO: 940053 - RNA, 19 nt, Artificial Sequence
  Description of Artificial Sequence: Synthetic oligonucleotide
  Antisense strand to SEQ ID NO: 940052
uugagucagcacauaaacu

SEQ ID NO: 940054 - RNA, 19 nt, Artificial Sequence
  Description of Artificial Sequence: Synthetic oligonucleotide
  Sense strand starting at position 182 of SEQ ID NO: 913603
agccaugcagaguaguaau

SEQ ID NO: 940055 - RNA, 19 nt, Artificial Sequence
  Description of Artificial Sequence: Synthetic oligonucleotide
  Antisense strand to SEQ ID NO: 940054
auuacuacucugcauggcu

SEQ ID NO: 940056 - RNA, 19 nt, Artificial Sequence
  Description of Artificial Sequence: Synthetic oligonucleotide
  Sense strand starting at position 546 of SEQ ID NO: 913603
gccaaauuaucaguuuaug

SEQ ID NO: 940057 - RNA, 19 nt, Artificial Sequence
  Description of Artificial Sequence: Synthetic oligonucleotide
  Antisense strand to SEQ ID NO: 940056
cauaaacugauaauuuggc

SEQ ID NO: 940058 - RNA, 19 nt, Artificial Sequence
  Description of Artificial Sequence: Synthetic oligonucleotide
  Sense strand starting at position 383 of SEQ ID NO: 913603
augaauuagugcucacauc

SEQ ID NO: 940059 - RNA, 19 nt, Artificial Sequence
  Description of Artificial Sequence: Synthetic oligonucleotide
  Antisense strand to SEQ ID NO: 940058
gaugugagcacuaauucau

SEQ ID NO: 940060 - RNA, 19 nt, Artificial Sequence
  Description of Artificial Sequence: Synthetic oligonucleotide
  Sense strand starting at position 152 of SEQ ID NO: 913603
gcaugcaaaugacuguaaa

SEQ ID NO: 940061 - RNA, 19 nt, Artificial Sequence
  Description of Artificial Sequence: Synthetic oligonucleotide
  Antisense strand to SEQ ID NO: 940060
uuuacagucauuugcaugc

SEQ ID NO: 940062 - RNA, 19 nt, Artificial Sequence
  Description of Artificial Sequence: Synthetic oligonucleotide
  Sense strand starting at position 827 of SEQ ID NO: 913603
ccagaacgccaauguaaua

SEQ ID NO: 940063 - RNA, 19 nt, Artificial Sequence
  Description of Artificial Sequence: Synthetic oligonucleotide
  Antisense strand to SEQ ID NO: 940062
uauuacauuggcguucugg

SEQ ID NO: 940064 - RNA, 19 nt, Artificial Sequence
  Description of Artificial Sequence: Synthetic oligonucleotide
  Sense strand starting at position 2801 of SEQ ID NO: 913603
aagcccuugguacgaaaua

SEQ ID NO: 940065 - RNA, 19 nt, Artificial Sequence
  Description of Artificial Sequence: Synthetic oligonucleotide
  Antisense strand to SEQ ID NO: 940064
uauuucguaccaagggcuu

SEQ ID NO: 940066 - RNA, 19 nt, Artificial Sequence
  Description of Artificial Sequence: Synthetic oligonucleotide
  Sense strand starting at position 2296 of SEQ ID NO: 913603
gugcggagucgugcaguua

SEQ ID NO: 940067 - RNA, 19 nt, Artificial Sequence
  Description of Artificial Sequence: Synthetic oligonucleotide
  Antisense strand to SEQ ID NO: 940066
uaacugcacgacuccgcac

SEQ ID NO: 940068 - RNA, 19 nt, Artificial Sequence
  Description of Artificial Sequence: Synthetic oligonucleotide
  Sense strand starting at position 2194 of SEQ ID NO: 913603
ucaaucuucgagcgagaau

SEQ ID NO: 940069 - RNA, 19 nt, Artificial Sequence
  Description of Artificial Sequence: Synthetic oligonucleotide
  Antisense strand to SEQ ID NO: 940068
auucucgcucgaagauuga

SEQ ID NO: 940070 - RNA, 19 nt, Artificial Sequence
  Description of Artificial Sequence: Synthetic oligonucleotide
  Sense strand starting at position 2498 of SEQ ID NO: 913603
guuugugucacagggauug

SEQ ID NO: 940071 - RNA, 19 nt, Artificial Sequence
  Description of Artificial Sequence: Synthetic oligonucleotide
  Antisense strand to SEQ ID NO: 940070
caaucccugugacacaaac

SEQ ID NO: 940072 - RNA, 19 nt, Artificial Sequence
  Description of Artificial Sequence: Synthetic oligonucleotide
  Sense strand starting at position 534 of SEQ ID NO: 913603
aucucugguucugccaaau

SEQ ID NO: 940073 - RNA, 19 nt, Artificial Sequence
  Description of Artificial Sequence: Synthetic oligonucleotide
  Antisense strand to SEQ ID NO: 940072
auuuggcagaaccagagau

SEQ ID NO: 940074 - RNA, 19 nt, Artificial Sequence
  Description of Artificial Sequence: Synthetic oligonucleotide
  Sense strand starting at position 2237 of SEQ ID NO: 913603
gucagaguuucugucugga

SEQ ID NO: 940075 - RNA, 19 nt, Artificial Sequence
  Description of Artificial Sequence: Synthetic oligonucleotide
  Antisense strand to SEQ ID NO: 940074
uccagacagaaacucugac

SEQ ID NO: 940076 - RNA, 19 nt, Artificial Sequence
  Description of Artificial Sequence: Synthetic oligonucleotide
  Sense strand starting at position 3167 of SEQ ID NO: 913603
gucaauguauuacacauuu

SEQ ID NO: 940077 - RNA, 19 nt, Artificial Sequence
  Description of Artificial Sequence: Synthetic oligonucleotide
  Antisense strand to SEQ ID NO: 940076
aaauguguaauacauugac

SEQ ID NO: 940078 - RNA, 19 nt, Artificial Sequence
  Description of Artificial Sequence: Synthetic oligonucleotide
  Sense strand starting at position 266 of SEQ ID NO: 913603
gcuacaguuugguuuauag

SEQ ID NO: 940079 - RNA, 19 nt, Artificial Sequence
  Description of Artificial Sequence: Synthetic oligonucleotide
  Antisense strand to SEQ ID NO: 940078
cuauaaaccaaacuguagc

SEQ ID NO: 940080 - RNA, 19 nt, Artificial Sequence
  Description of Artificial Sequence: Synthetic oligonucleotide
  Sense strand starting at position 2624 of SEQ ID NO: 913603
aaaggagugucgucacuuu

SEQ ID NO: 940081 - RNA, 19 nt, Artificial Sequence
  Description of Artificial Sequence: Synthetic oligonucleotide
  Antisense strand to SEQ ID NO: 940080
aaagugacgacacuccuuu

SEQ ID NO: 940082 - RNA, 19 nt, Artificial Sequence
  Description of Artificial Sequence: Synthetic oligonucleotide
  Sense strand starting at position 2260 of SEQ ID NO: 913603
aagcaaacgucugcagauu

SEQ ID NO: 940083 - RNA, 19 nt, Artificial Sequence
  Description of Artificial Sequence: Synthetic oligonucleotide
  Antisense strand to SEQ ID NO: 940082
aaucugcagacguuugcuu

SEQ ID NO: 940084 - RNA, 19 nt, Artificial Sequence
  Description of Artificial Sequence: Synthetic oligonucleotide
  Sense strand starting at position 306 of SEQ ID NO: 913603
ucuucuuuccgauguauua

SEQ ID NO: 940085 - RNA, 19 nt, Artificial Sequence
  Description of Artificial Sequence: Synthetic oligonucleotide
  Antisense strand to SEQ ID NO: 940084
uaauacaucggaaagaaga

SEQ ID NO: 940086 - RNA, 19 nt, Artificial Sequence
  Description of Artificial Sequence: Synthetic oligonucleotide
  Sense strand starting at position 3559 of SEQ ID NO: 913604
ggaagauacuaguuuacau

SEQ ID NO: 940087 - RNA, 19 nt, Artificial Sequence
  Description of Artificial Sequence: Synthetic oligonucleotide
  Antisense strand to SEQ ID NO: 940086
auguaaacuaguaucuucc

SEQ ID NO: 940088 - RNA, 19 nt, Artificial Sequence
  Description of Artificial Sequence: Synthetic oligonucleotide
  Sense strand starting at position 2219 of SEQ ID NO: 913604
accacuuuacuugagcaga

SEQ ID NO: 940089 - RNA, 19 nt, Artificial Sequence
  Description of Artificial Sequence: Synthetic oligonucleotide
  Antisense strand to SEQ ID NO: 940088
ucugcucaaguaaaguggu

SEQ ID NO: 940090 - RNA, 19 nt, Artificial Sequence
  Description of Artificial Sequence: Synthetic oligonucleotide
  Sense strand starting at position 3490 of SEQ ID NO: 913604
ugaguuuaaccuugaaaga

SEQ ID NO: 940091 - RNA, 19 nt, Artificial Sequence
  Description of Artificial Sequence: Synthetic oligonucleotide
  Antisense strand to SEQ ID NO: 940090
ucuuucaagguuaaacuca

SEQ ID NO: 940092 - RNA, 19 nt, Artificial Sequence
  Description of Artificial Sequence: Synthetic oligonucleotide
  Sense strand starting at position 2689 of SEQ ID NO: 913604
guggauuauauguauugau

SEQ ID NO: 940093 - RNA, 19 nt, Artificial Sequence
  Description of Artificial Sequence: Synthetic oligonucleotide
  Antisense strand to SEQ ID NO: 940092
aucaauacauauaauccac

SEQ ID NO: 940094 - RNA, 19 nt, Artificial Sequence
  Description of Artificial Sequence: Synthetic oligonucleotide
  Sense strand starting at position 2142 of SEQ ID NO: 913604
gcgagcuaaguguuuguga

SEQ ID NO: 940095 - RNA, 19 nt, Artificial Sequence
  Description of Artificial Sequence: Synthetic oligonucleotide
  Antisense strand to SEQ ID NO: 940094
ucacaaacacuuagcucgc

SEQ ID NO: 940096 - RNA, 19 nt, Artificial Sequence
  Description of Artificial Sequence: Synthetic oligonucleotide
  Sense strand starting at position 2222 of SEQ ID NO: 913604
acuuuacuugagcagacuu

SEQ ID NO: 940097 - RNA, 19 nt, Artificial Sequence
  Description of Artificial Sequence: Synthetic oligonucleotide
  Antisense strand to SEQ ID NO: 940096
aagucugcucaaguaaagu

SEQ ID NO: 940098 - RNA, 19 nt, Artificial Sequence
  Description of Artificial Sequence: Synthetic oligonucleotide
  Sense strand starting at position 3105 of SEQ ID NO: 913604
aaagaagguugucucagau

SEQ ID NO: 940099 - RNA, 19 nt, Artificial Sequence
  Description of Artificial Sequence: Synthetic oligonucleotide
  Antisense strand to SEQ ID NO: 940098
aucugagacaaccuucuuu

SEQ ID NO: 940100 - RNA, 19 nt, Artificial Sequence
  Description of Artificial Sequence: Synthetic oligonucleotide
  Sense strand starting at position 3088 of SEQ ID NO: 913604
acagguauguaguuagaaa

SEQ ID NO: 940101 - RNA, 19 nt, Artificial Sequence
  Description of Artificial Sequence: Synthetic oligonucleotide
  Antisense strand to SEQ ID NO: 940100
uuucuaacuacauaccugu

SEQ ID NO: 940102 - RNA, 19 nt, Artificial Sequence
  Description of Artificial Sequence: Synthetic oligonucleotide
  Sense strand starting at position 3334 of SEQ ID NO: 913604
ggugcuuggcaagaacaua

SEQ ID NO: 940103 - RNA, 19 nt, Artificial Sequence
  Description of Artificial Sequence: Synthetic oligonucleotide
  Antisense strand to SEQ ID NO: 940102
uauguucuugccaagcacc

SEQ ID NO: 940104 - RNA, 19 nt, Artificial Sequence
  Description of Artificial Sequence: Synthetic oligonucleotide
  Sense strand starting at position 2555 of SEQ ID NO: 913604
gggcuuagaccaugaggua

SEQ ID NO: 940105 - RNA, 19 nt, Artificial Sequence
  Description of Artificial Sequence: Synthetic oligonucleotide
  Antisense strand to SEQ ID NO: 940104
uaccucauggucuaagccc

SEQ ID NO: 940106 - RNA, 19 nt, Artificial Sequence
  Description of Artificial Sequence: Synthetic oligonucleotide
  Sense strand starting at position 118 of SEQ ID NO: 913604
cgaguuggucuugaacuga

SEQ ID NO: 940107 - RNA, 19 nt, Artificial Sequence
  Description of Artificial Sequence: Synthetic oligonucleotide
  Antisense strand to SEQ ID NO: 940106
ucaguucaagaccaacucg

SEQ ID NO: 940108 - RNA, 19 nt, Artificial Sequence
  Description of Artificial Sequence: Synthetic oligonucleotide
  Sense strand starting at position 2688 of SEQ ID NO: 913604
uguggauuauauguauuga

SEQ ID NO: 940109 - RNA, 19 nt, Artificial Sequence
  Description of Artificial Sequence: Synthetic oligonucleotide
  Antisense strand to SEQ ID NO: 940108
ucaauacauauaauccaca

SEQ ID NO: 940110 - RNA, 19 nt, Artificial Sequence
  Description of Artificial Sequence: Synthetic oligonucleotide
  Sense strand starting at position 3592 of SEQ ID NO: 913604
cagugugugguugauaaag

SEQ ID NO: 940111 - RNA, 19 nt, Artificial Sequence
  Description of Artificial Sequence: Synthetic oligonucleotide
  Antisense strand to SEQ ID NO: 940110
cuuuaucaaccacacacug

SEQ ID NO: 940112 - RNA, 19 nt, Artificial Sequence
  Description of Artificial Sequence: Synthetic oligonucleotide
  Sense strand starting at position 1126 of SEQ ID NO: 913604
ccgaauuccucucccaaag

SEQ ID NO: 940113 - RNA, 19 nt, Artificial Sequence
  Description of Artificial Sequence: Synthetic oligonucleotide
  Antisense strand to SEQ ID NO: 940112
cuuugggagaggaauucgg

SEQ ID NO: 940114 - RNA, 19 nt, Artificial Sequence
  Description of Artificial Sequence: Synthetic oligonucleotide
  Sense strand starting at position 2753 of SEQ ID NO: 913604
ugggauuguaccugugaau

SEQ ID NO: 940115 - RNA, 19 nt, Artificial Sequence
  Description of Artificial Sequence: Synthetic oligonucleotide
  Antisense strand to SEQ ID NO: 940114
auucacagguacaauccca

SEQ ID NO: 940116 - RNA, 19 nt, Artificial Sequence
  Description of Artificial Sequence: Synthetic oligonucleotide
  Sense strand starting at position 2743 of SEQ ID NO: 913604
ugaucacuagugggauugu

SEQ ID NO: 940117 - RNA, 19 nt, Artificial Sequence
  Description of Artificial Sequence: Synthetic oligonucleotide
  Antisense strand to SEQ ID NO: 940116
acaaucccacuagugauca

SEQ ID NO: 940118 - RNA, 19 nt, Artificial Sequence
  Description of Artificial Sequence: Synthetic oligonucleotide
  Sense strand starting at position 3487 of SEQ ID NO: 913604
ggcugaguuuaaccuugaa

SEQ ID NO: 940119 - RNA, 19 nt, Artificial Sequence
  Description of Artificial Sequence: Synthetic oligonucleotide
  Antisense strand to SEQ ID NO: 940118
uucaagguuaaacucagcc

SEQ ID NO: 940120 - RNA, 19 nt, Artificial Sequence
  Description of Artificial Sequence: Synthetic oligonucleotide
  Sense strand starting at position 2209 of SEQ ID NO: 913604
gucgguuaacaccacuuua

SEQ ID NO: 940121 - RNA, 19 nt, Artificial Sequence
  Description of Artificial Sequence: Synthetic oligonucleotide
  Antisense strand to SEQ ID NO: 940120
uaaagugguguuaaccgac

SEQ ID NO: 940122 - RNA, 19 nt, Artificial Sequence
  Description of Artificial Sequence: Synthetic oligonucleotide
  Sense strand starting at position 714 of SEQ ID NO: 913604
uaaacaguuccuggucaug

SEQ ID NO: 940123 - RNA, 19 nt, Artificial Sequence
  Description of Artificial Sequence: Synthetic oligonucleotide
  Antisense strand to SEQ ID NO: 940122
caugaccaggaacuguuua

SEQ ID NO: 940124 - RNA, 19 nt, Artificial Sequence
  Description of Artificial Sequence: Synthetic oligonucleotide
  Sense strand starting at position 3601 of SEQ ID NO: 913604
guugauaaagugcaucagu

SEQ ID NO: 940125 - RNA, 19 nt, Artificial Sequence
  Description of Artificial Sequence: Synthetic oligonucleotide
  Antisense strand to SEQ ID NO: 940124
acugaugcacuuuaucaac

SEQ ID NO: 940126 - RNA, 19 nt, Artificial Sequence
  Description of Artificial Sequence: Synthetic oligonucleotide
  Sense strand starting at position 2943 of SEQ ID NO: 913604
uagugagaacaguggcauu

SEQ ID NO: 940127 - RNA, 19 nt, Artificial Sequence
  Description of Artificial Sequence: Synthetic oligonucleotide
  Antisense strand to SEQ ID NO: 940126
aaugccacuguucucacua

SEQ ID NO: 940128 - RNA, 19 nt, Artificial Sequence
  Description of Artificial Sequence: Synthetic oligonucleotide
  Sense strand starting at position 353 of SEQ ID NO: 913604
gcaagaaggucuccuuacu

SEQ ID NO: 940129 - RNA, 19 nt, Artificial Sequence
  Description of Artificial Sequence: Synthetic oligonucleotide
  Antisense strand to SEQ ID NO: 940128
aguaaggagaccuucuugc

SEQ ID NO: 940130 - RNA, 19 nt, Artificial Sequence
  Description of Artificial Sequence: Synthetic oligonucleotide
  Sense strand starting at position 2680 of SEQ ID NO: 913604
uuuguuuguguggauuaua

SEQ ID NO: 940131 - RNA, 19 nt, Artificial Sequence
  Description of Artificial Sequence: Synthetic oligonucleotide
  Antisense strand to SEQ ID NO: 940130
uauaauccacacaaacaaa

SEQ ID NO: 940132 - RNA, 19 nt, Artificial Sequence
  Description of Artificial Sequence: Synthetic oligonucleotide
  Sense strand starting at position 2752 of SEQ ID NO: 913604
gugggauuguaccugugaa

SEQ ID NO: 940133 - RNA, 19 nt, Artificial Sequence
  Description of Artificial Sequence: Synthetic oligonucleotide
  Antisense strand to SEQ ID NO: 940132
uucacagguacaaucccac

SEQ ID NO: 940134 - RNA, 19 nt, Artificial Sequence
  Description of Artificial Sequence: Synthetic oligonucleotide
  Sense strand starting at position 930 of SEQ ID NO: 913604
uggcuauuacuugagcuuu

SEQ ID NO: 940135 - RNA, 19 nt, Artificial Sequence
  Description of Artificial Sequence: Synthetic oligonucleotide
  Antisense strand to SEQ ID NO: 940134
aaagcucaaguaauagcca

SEQ ID NO: 940136 - RNA, 19 nt, Artificial Sequence
  Description of Artificial Sequence: Synthetic oligonucleotide
  Sense strand starting at position 2973 of SEQ ID NO: 913604
uugcaaacgcuuuaauauc

SEQ ID NO: 940137 - RNA, 19 nt, Artificial Sequence
  Description of Artificial Sequence: Synthetic oligonucleotide
  Antisense strand to SEQ ID NO: 940136
gauauuaaagcguuugcaa

SEQ ID NO: 940138 - RNA, 19 nt, Artificial Sequence
  Description of Artificial Sequence: Synthetic oligonucleotide
  Sense strand starting at position 380 of SEQ ID NO: 913604
cuugcuauugugcaacuga

SEQ ID NO: 940139 - RNA, 19 nt, Artificial Sequence
  Description of Artificial Sequence: Synthetic oligonucleotide
  Antisense strand to SEQ ID NO: 940138
ucaguugcacaauagcaag

SEQ ID NO: 940140 - RNA, 19 nt, Artificial Sequence
  Description of Artificial Sequence: Synthetic oligonucleotide
  Sense strand starting at position 3590 of SEQ ID NO: 913604
uacagugugugguugauaa

SEQ ID NO: 940141 - RNA, 19 nt, Artificial Sequence
  Description of Artificial Sequence: Synthetic oligonucleotide
  Antisense strand to SEQ ID NO: 940140
uuaucaaccacacacugua

SEQ ID NO: 940142 - RNA, 19 nt, Artificial Sequence
  Description of Artificial Sequence: Synthetic oligonucleotide
  Sense strand starting at position 3945 of SEQ ID NO: 913604
gugcaucacucuuugaacu

SEQ ID NO: 940143 - RNA, 19 nt, Artificial Sequence
  Description of Artificial Sequence: Synthetic oligonucleotide
  Antisense strand to SEQ ID NO: 940142
aguucaaagagugaugcac

SEQ ID NO: 940144 - RNA, 19 nt, Artificial Sequence
  Description of Artificial Sequence: Synthetic oligonucleotide
  Sense strand starting at position 3724 of SEQ ID NO: 913604
gcgagacccuccucucaca

SEQ ID NO: 940145 - RNA, 19 nt, Artificial Sequence
  Description of Artificial Sequence: Synthetic oligonucleotide
  Antisense strand to SEQ ID NO: 940144
ugugagaggagggucucgc

SEQ ID NO: 940146 - RNA, 19 nt, Artificial Sequence
  Description of Artificial Sequence: Synthetic oligonucleotide
  Sense strand starting at position 240 of SEQ ID NO: 913604
aacuucugccugggucauu

SEQ ID NO: 940147 - RNA, 19 nt, Artificial Sequence
  Description of Artificial Sequence: Synthetic oligonucleotide
  Antisense strand to SEQ ID NO: 940146
aaugacccaggcagaaguu

SEQ ID NO: 940148 - RNA, 19 nt, Artificial Sequence
  Description of Artificial Sequence: Synthetic oligonucleotide
  Sense strand starting at position 932 of SEQ ID NO: 913604
gcuauuacuugagcuuuau

SEQ ID NO: 940149 - RNA, 19 nt, Artificial Sequence
  Description of Artificial Sequence: Synthetic oligonucleotide
  Antisense strand to SEQ ID NO: 940148
auaaagcucaaguaauagc

SEQ ID NO: 940150 - RNA, 19 nt, Artificial Sequence
  Description of Artificial Sequence: Synthetic oligonucleotide
  Sense strand starting at position 3503 of SEQ ID NO: 913604
gaaagacucugagacuuug

SEQ ID NO: 940151 - RNA, 19 nt, Artificial Sequence
  Description of Artificial Sequence: Synthetic oligonucleotide
  Antisense strand to SEQ ID NO: 940150
caaagucucagagucuuuc

SEQ ID NO: 940152 - RNA, 19 nt, Artificial Sequence
  Description of Artificial Sequence: Synthetic oligonucleotide
  Sense strand starting at position 2408 of SEQ ID NO: 913604
ccaguuaauuguguauccu

SEQ ID NO: 940153 - RNA, 19 nt, Artificial Sequence
  Description of Artificial Sequence: Synthetic oligonucleotide
  Antisense strand to SEQ ID NO: 940152
aggauacacaauuaacugg

SEQ ID NO: 940154 - RNA, 19 nt, Artificial Sequence
  Description of Artificial Sequence: Synthetic oligonucleotide
  Sense strand starting at position 2937 of SEQ ID NO: 913604
aacaaauagugagaacagu

SEQ ID NO: 940155 - RNA, 19 nt, Artificial Sequence
  Description of Artificial Sequence: Synthetic oligonucleotide
  Antisense strand to SEQ ID NO: 940154
acuguucucacuauuuguu

SEQ ID NO: 940156 - RNA, 19 nt, Artificial Sequence
  Description of Artificial Sequence: Synthetic oligonucleotide
  Sense strand starting at position 3501 of SEQ ID NO: 913604
uugaaagacucugagacuu

SEQ ID NO: 940157 - RNA, 19 nt, Artificial Sequence
  Description of Artificial Sequence: Synthetic oligonucleotide
  Antisense strand to SEQ ID NO: 940156
aagucucagagucuuucaa

SEQ ID NO: 940158 - RNA, 19 nt, Artificial Sequence
  Description of Artificial Sequence: Synthetic oligonucleotide
  Sense strand starting at position 2405 of SEQ ID NO: 913604
guaccaguuaauuguguau

SEQ ID NO: 940159 - RNA, 19 nt, Artificial Sequence
  Description of Artificial Sequence: Synthetic oligonucleotide
  Antisense strand to SEQ ID NO: 940158
auacacaauuaacugguac

SEQ ID NO: 940160 - RNA, 19 nt, Artificial Sequence
  Description of Artificial Sequence: Synthetic oligonucleotide
  Sense strand starting at position 2153 of SEQ ID NO: 913604
guuugugagccuggugaag

SEQ ID NO: 940161 - RNA, 19 nt, Artificial Sequence
  Description of Artificial Sequence: Synthetic oligonucleotide
  Antisense strand to SEQ ID NO: 940160
cuucaccaggcucacaaac

SEQ ID NO: 940162 - RNA, 19 nt, Artificial Sequence
  Description of Artificial Sequence: Synthetic oligonucleotide
  Sense strand starting at position 996 of SEQ ID NO: 913604
ggccucguccagcaaagua

SEQ ID NO: 940163 - RNA, 19 nt, Artificial Sequence
  Description of Artificial Sequence: Synthetic oligonucleotide
  Antisense strand to SEQ ID NO: 940162
uacuuugcuggacgaggcc

SEQ ID NO: 940164 - RNA, 19 nt, Artificial Sequence
  Description of Artificial Sequence: Synthetic oligonucleotide
  Sense strand starting at position 2189 of SEQ ID NO: 913604
ucuucuuauuguuugucau

SEQ ID NO: 940165 - RNA, 19 nt, Artificial Sequence
  Description of Artificial Sequence: Synthetic oligonucleotide
  Antisense strand to SEQ ID NO: 940164
augacaaacaauaagaaga

SEQ ID NO: 940166 - RNA, 19 nt, Artificial Sequence
  Description of Artificial Sequence: Synthetic oligonucleotide
  Sense strand starting at position 2709 of SEQ ID NO: 913605
aauacagagcgaugaagau

SEQ ID NO: 940167 - RNA, 19 nt, Artificial Sequence
  Description of Artificial Sequence: Synthetic oligonucleotide
  Antisense strand to SEQ ID NO: 940166
aucuucaucgcucuguauu

SEQ ID NO: 940168 - RNA, 19 nt, Artificial Sequence
  Description of Artificial Sequence: Synthetic oligonucleotide
  Sense strand starting at position 3933 of SEQ ID NO: 913605
ucaacaacuggguaaguuu

SEQ ID NO: 940169 - RNA, 19 nt, Artificial Sequence
  Description of Artificial Sequence: Synthetic oligonucleotide
  Antisense strand to SEQ ID NO: 940168
aaacuuacccaguuguuga

SEQ ID NO: 940170 - RNA, 19 nt, Artificial Sequence
  Description of Artificial Sequence: Synthetic oligonucleotide
  Sense strand starting at position 3470 of SEQ ID NO: 913605
cccaaugaagcaugaauua

SEQ ID NO: 940171 - RNA, 19 nt, Artificial Sequence
  Description of Artificial Sequence: Synthetic oligonucleotide
  Antisense strand to SEQ ID NO: 940170
uaauucaugcuucauuggg

SEQ ID NO: 940172 - RNA, 19 nt, Artificial Sequence
  Description of Artificial Sequence: Synthetic oligonucleotide
  Sense strand starting at position 3505 of SEQ ID NO: 913605
ggguaaggaaauugucaac

SEQ ID NO: 940173 - RNA, 19 nt, Artificial Sequence
  Description of Artificial Sequence: Synthetic oligonucleotide
  Antisense strand to SEQ ID NO: 940172
guugacaauuuccuuaccc

SEQ ID NO: 940174 - RNA, 19 nt, Artificial Sequence
  Description of Artificial Sequence: Synthetic oligonucleotide
  Sense strand starting at position 2437 of SEQ ID NO: 913605
cagcauguccuggaaggau

SEQ ID NO: 940175 - RNA, 19 nt, Artificial Sequence
  Description of Artificial Sequence: Synthetic oligonucleotide
  Antisense strand to SEQ ID NO: 940174
auccuuccaggacaugcug

SEQ ID NO: 940176 - RNA, 19 nt, Artificial Sequence
  Description of Artificial Sequence: Synthetic oligonucleotide
  Sense strand starting at position 3008 of SEQ ID NO: 913605
ccaugaaauuggcucuaga

SEQ ID NO: 940177 - RNA, 19 nt, Artificial Sequence
  Description of Artificial Sequence: Synthetic oligonucleotide
  Antisense strand to SEQ ID NO: 940176
ucuagagccaauuucaugg

SEQ ID NO: 940178 - RNA, 19 nt, Artificial Sequence
  Description of Artificial Sequence: Synthetic oligonucleotide
  Sense strand starting at position 3557 of SEQ ID NO: 913605
gaagcauuacagcaacagu

SEQ ID NO: 940179 - RNA, 19 nt, Artificial Sequence
  Description of Artificial Sequence: Synthetic oligonucleotide
  Antisense strand to SEQ ID NO: 940178
acuguugcuguaaugcuuc

SEQ ID NO: 940180 - RNA, 19 nt, Artificial Sequence
  Description of Artificial Sequence: Synthetic oligonucleotide
  Sense strand starting at position 2487 of SEQ ID NO: 913605
ucagccucugauggagaau

SEQ ID NO: 940181 - RNA, 19 nt, Artificial Sequence
  Description of Artificial Sequence: Synthetic oligonucleotide
  Antisense strand to SEQ ID NO: 940180
auucuccaucagaggcuga

SEQ ID NO: 940182 - RNA, 19 nt, Artificial Sequence
  Description of Artificial Sequence: Synthetic oligonucleotide
  Sense strand starting at position 2436 of SEQ ID NO: 913605
acagcauguccuggaagga

SEQ ID NO: 940183 - RNA, 19 nt, Artificial Sequence
  Description of Artificial Sequence: Synthetic oligonucleotide
  Antisense strand to SEQ ID NO: 940182
uccuuccaggacaugcugu

SEQ ID NO: 940184 - RNA, 19 nt, Artificial Sequence
  Description of Artificial Sequence: Synthetic oligonucleotide
  Sense strand starting at position 2449 of SEQ ID NO: 913605
gaaggaucucucugaggcu

SEQ ID NO: 940185 - RNA, 19 nt, Artificial Sequence
  Description of Artificial Sequence: Synthetic oligonucleotide
  Antisense strand to SEQ ID NO: 940184
agccucagagagauccuuc

SEQ ID NO: 940186 - RNA, 19 nt, Artificial Sequence
  Description of Artificial Sequence: Synthetic oligonucleotide
  Sense strand starting at position 2806 of SEQ ID NO: 913605
uccaguugugaggaucagu

SEQ ID NO: 940187 - RNA, 19 nt, Artificial Sequence
  Description of Artificial Sequence: Synthetic oligonucleotide
  Antisense strand to SEQ ID NO: 940186
acugauccucacaacugga

SEQ ID NO: 940188 - RNA, 19 nt, Artificial Sequence
  Description of Artificial Sequence: Synthetic oligonucleotide
  Sense strand starting at position 2403 of SEQ ID NO: 913605
ggacaugugcaguagugaa

SEQ ID NO: 940189 - RNA, 19 nt, Artificial Sequence
  Description of Artificial Sequence: Synthetic oligonucleotide
  Antisense strand to SEQ ID NO: 940188
uucacuacugcacaugucc

SEQ ID NO: 940190 - RNA, 19 nt, Artificial Sequence
  Description of Artificial Sequence: Synthetic oligonucleotide
  Sense strand starting at position 3707 of SEQ ID NO: 913605
gucugaugaaagugauucu

SEQ ID NO: 940191 - RNA, 19 nt, Artificial Sequence
  Description of Artificial Sequence: Synthetic oligonucleotide
  Antisense strand to SEQ ID NO: 940190
agaaucacuuucaucagac

SEQ ID NO: 940192 - RNA, 19 nt, Artificial Sequence
  Description of Artificial Sequence: Synthetic oligonucleotide
  Sense strand starting at position 2781 of SEQ ID NO: 913605
ucccauggaagguguuaau

SEQ ID NO: 940193 - RNA, 19 nt, Artificial Sequence
  Description of Artificial Sequence: Synthetic oligonucleotide
  Antisense strand to SEQ ID NO: 940192
auuaacaccuuccauggga

SEQ ID NO: 940194 - RNA, 19 nt, Artificial Sequence
  Description of Artificial Sequence: Synthetic oligonucleotide
  Sense strand starting at position 2987 of SEQ ID NO: 913605
ggcugucagagguggaaga

SEQ ID NO: 940195 - RNA, 19 nt, Artificial Sequence
  Description of Artificial Sequence: Synthetic oligonucleotide
  Antisense strand to SEQ ID NO: 940194
ucuuccaccucugacagcc

SEQ ID NO: 940196 - RNA, 19 nt, Artificial Sequence
  Description of Artificial Sequence: Synthetic oligonucleotide
  Sense strand starting at position 2220 of SEQ ID NO: 913605
uuguuaaagucucuggaca

SEQ ID NO: 940197 - RNA, 19 nt, Artificial Sequence
  Description of Artificial Sequence: Synthetic oligonucleotide
  Antisense strand to SEQ ID NO: 940196
uguccagagacuuuaacaa

SEQ ID NO: 940198 - RNA, 19 nt, Artificial Sequence
  Description of Artificial Sequence: Synthetic oligonucleotide
  Sense strand starting at position 3829 of SEQ ID NO: 913605
cuuaaacgcucaucaagau

SEQ ID NO: 940199 - RNA, 19 nt, Artificial Sequence
  Description of Artificial Sequence: Synthetic oligonucleotide
  Antisense strand to SEQ ID NO: 940198
aucuugaugagcguuuaag

SEQ ID NO: 940200 - RNA, 19 nt, Artificial Sequence
  Description of Artificial Sequence: Synthetic oligonucleotide
  Sense strand starting at position 2221 of SEQ ID NO: 913605
uguuaaagucucuggacac

SEQ ID NO: 940201 - RNA, 19 nt, Artificial Sequence
  Description of Artificial Sequence: Synthetic oligonucleotide
  Antisense strand to SEQ ID NO: 940200
guguccagagacuuuaaca

SEQ ID NO: 940202 - RNA, 19 nt, Artificial Sequence
  Description of Artificial Sequence: Synthetic oligonucleotide
  Sense strand starting at position 3695 of SEQ ID NO: 913605
agaugaugcugugucugau

SEQ ID NO: 940203 - RNA, 19 nt, Artificial Sequence
  Description of Artificial Sequence: Synthetic oligonucleotide
  Antisense strand to SEQ ID NO: 940202
aucagacacagcaucaucu

SEQ ID NO: 940204 - RNA, 19 nt, Artificial Sequence
  Description of Artificial Sequence: Synthetic oligonucleotide
  Sense strand starting at position 3428 of SEQ ID NO: 913605
ggauauuaauuccaggaga

SEQ ID NO: 940205 - RNA, 19 nt, Artificial Sequence
  Description of Artificial Sequence: Synthetic oligonucleotide
  Antisense strand to SEQ ID NO: 940204
ucuccuggaauuaauaucc

SEQ ID NO: 940206 - RNA, 19 nt, Artificial Sequence
  Description of Artificial Sequence: Synthetic oligonucleotide
  Sense strand starting at position 3698 of SEQ ID NO: 913605
ugaugcugugucugaugaa

SEQ ID NO: 940207 - RNA, 19 nt, Artificial Sequence
  Description of Artificial Sequence: Synthetic oligonucleotide
  Antisense strand to SEQ ID NO: 940206
uucaucagacacagcauca

SEQ ID NO: 940208 - RNA, 19 nt, Artificial Sequence
  Description of Artificial Sequence: Synthetic oligonucleotide
  Sense strand starting at position 2791 of SEQ ID NO: 913605
gguguuaauucucccucca

SEQ ID NO: 940209 - RNA, 19 nt, Artificial Sequence
  Description of Artificial Sequence: Synthetic oligonucleotide
  Antisense strand to SEQ ID NO: 940208
uggagggagaauuaacacc

SEQ ID NO: 940210 - RNA, 19 nt, Artificial Sequence
  Description of Artificial Sequence: Synthetic oligonucleotide
  Sense strand starting at position 2196 of SEQ ID NO: 913605
cccucagucugugugaaac

SEQ ID NO: 940211 - RNA, 19 nt, Artificial Sequence
  Description of Artificial Sequence: Synthetic oligonucleotide
  Antisense strand to SEQ ID NO: 940210
guuucacacagacugaggg

SEQ ID NO: 940212 - RNA, 19 nt, Artificial Sequence
  Description of Artificial Sequence: Synthetic oligonucleotide
  Sense strand starting at position 2793 of SEQ ID NO: 913605
uguuaauucucccuccagu

SEQ ID NO: 940213 - RNA, 19 nt, Artificial Sequence
  Description of Artificial Sequence: Synthetic oligonucleotide
  Antisense strand to SEQ ID NO: 940212
acuggagggagaauuaaca

SEQ ID NO: 940214 - RNA, 19 nt, Artificial Sequence
  Description of Artificial Sequence: Synthetic oligonucleotide
  Sense strand starting at position 2661 of SEQ ID NO: 913605
gcgcaucucauagaagcuu

SEQ ID NO: 940215 - RNA, 19 nt, Artificial Sequence
  Description of Artificial Sequence: Synthetic oligonucleotide
  Antisense strand to SEQ ID NO: 940214
aagcuucuaugagaugcgc

SEQ ID NO: 940216 - RNA, 19 nt, Artificial Sequence
  Description of Artificial Sequence: Synthetic oligonucleotide
  Sense strand starting at position 3403 of SEQ ID NO: 913605
guuucugcccugugaaaua

SEQ ID NO: 940217 - RNA, 19 nt, Artificial Sequence
  Description of Artificial Sequence: Synthetic oligonucleotide
  Antisense strand to SEQ ID NO: 940216
uauuucacagggcagaaac

SEQ ID NO: 940218 - RNA, 19 nt, Artificial Sequence
  Description of Artificial Sequence: Synthetic oligonucleotide
  Sense strand starting at position 3317 of SEQ ID NO: 913605
gcgaguugucaucauccuu

SEQ ID NO: 940219 - RNA, 19 nt, Artificial Sequence
  Description of Artificial Sequence: Synthetic oligonucleotide
  Antisense strand to SEQ ID NO: 940218
aaggaugaugacaacucgc

SEQ ID NO: 940220 - RNA, 19 nt, Artificial Sequence
  Description of Artificial Sequence: Synthetic oligonucleotide
  Sense strand starting at position 2095 of SEQ ID NO: 913605
gaaaucaaguaucaaguga

SEQ ID NO: 940221 - RNA, 19 nt, Artificial Sequence
  Description of Artificial Sequence: Synthetic oligonucleotide
  Antisense strand to SEQ ID NO: 940220
ucacuugauacuugauuuc

SEQ ID NO: 940222 - RNA, 19 nt, Artificial Sequence
  Description of Artificial Sequence: Synthetic oligonucleotide
  Sense strand starting at position 3313 of SEQ ID NO: 913605
ugaugcgaguugucaucau

SEQ ID NO: 940223 - RNA, 19 nt, Artificial Sequence
  Description of Artificial Sequence: Synthetic oligonucleotide
  Antisense strand to SEQ ID NO: 940222
augaugacaacucgcauca

SEQ ID NO: 940224 - RNA, 19 nt, Artificial Sequence
  Description of Artificial Sequence: Synthetic oligonucleotide
  Sense strand starting at position 2195 of SEQ ID NO: 913605
gcccucagucugugugaaa

SEQ ID NO: 940225 - RNA, 19 nt, Artificial Sequence
  Description of Artificial Sequence: Synthetic oligonucleotide
  Antisense strand to SEQ ID NO: 940224
uuucacacagacugagggc

SEQ ID NO: 940226 - RNA, 19 nt, Artificial Sequence
  Description of Artificial Sequence: Synthetic oligonucleotide
  Sense strand starting at position 3641 of SEQ ID NO: 913605
ggguacaauugugaggaca

SEQ ID NO: 940227 - RNA, 19 nt, Artificial Sequence
  Description of Artificial Sequence: Synthetic oligonucleotide
  Antisense strand to SEQ ID NO: 940226
uguccucacaauuguaccc

SEQ ID NO: 940228 - RNA, 19 nt, Artificial Sequence
  Description of Artificial Sequence: Synthetic oligonucleotide
  Sense strand starting at position 3311 of SEQ ID NO: 913605
ggugaugcgaguugucauc

SEQ ID NO: 940229 - RNA, 19 nt, Artificial Sequence
  Description of Artificial Sequence: Synthetic oligonucleotide
  Antisense strand to SEQ ID NO: 940228
gaugacaacucgcaucacc

SEQ ID NO: 940230 - RNA, 19 nt, Artificial Sequence
  Description of Artificial Sequence: Synthetic oligonucleotide
  Sense strand starting at position 3146 of SEQ ID NO: 913605
aacaaauggucagaagcga

SEQ ID NO: 940231 - RNA, 19 nt, Artificial Sequence
  Description of Artificial Sequence: Synthetic oligonucleotide
  Antisense strand to SEQ ID NO: 940230
ucgcuucugaccauuuguu

SEQ ID NO: 940232 - RNA, 19 nt, Artificial Sequence
  Description of Artificial Sequence: Synthetic oligonucleotide
  Sense strand starting at position 2536 of SEQ ID NO: 913605
gagugauccucugcuccgu

SEQ ID NO: 940233 - RNA, 19 nt, Artificial Sequence
  Description of Artificial Sequence: Synthetic oligonucleotide
  Antisense strand to SEQ ID NO: 940232
acggagcagaggaucacuc

SEQ ID NO: 940234 - RNA, 19 nt, Artificial Sequence
  Description of Artificial Sequence: Synthetic oligonucleotide
  Sense strand starting at position 2784 of SEQ ID NO: 913605
cauggaagguguuaauucu

SEQ ID NO: 940235 - RNA, 19 nt, Artificial Sequence
  Description of Artificial Sequence: Synthetic oligonucleotide
  Antisense strand to SEQ ID NO: 940234
agaauuaacaccuuccaug

SEQ ID NO: 940236 - RNA, 19 nt, Artificial Sequence
  Description of Artificial Sequence: Synthetic oligonucleotide
  Sense strand starting at position 2390 of SEQ ID NO: 913605
aguccugaaucauggacau

SEQ ID NO: 940237 - RNA, 19 nt, Artificial Sequence
  Description of Artificial Sequence: Synthetic oligonucleotide
  Antisense strand to SEQ ID NO: 940236
auguccaugauucaggacu

SEQ ID NO: 940238 - RNA, 19 nt, Artificial Sequence
  Description of Artificial Sequence: Synthetic oligonucleotide
  Sense strand starting at position 3643 of SEQ ID NO: 913605
guacaauugugaggacaac

SEQ ID NO: 940239 - RNA, 19 nt, Artificial Sequence
  Description of Artificial Sequence: Synthetic oligonucleotide
  Antisense strand to SEQ ID NO: 940238
guuguccucacaauuguac

SEQ ID NO: 940240 - RNA, 19 nt, Artificial Sequence
  Description of Artificial Sequence: Synthetic oligonucleotide
  Sense strand starting at position 2198 of SEQ ID NO: 913605
cucagucugugugaaacaa

SEQ ID NO: 940241 - RNA, 19 nt, Artificial Sequence
  Description of Artificial Sequence: Synthetic oligonucleotide
  Antisense strand to SEQ ID NO: 940240
uuguuucacacagacugag

SEQ ID NO: 940242 - RNA, 19 nt, Artificial Sequence
  Description of Artificial Sequence: Synthetic oligonucleotide
  Sense strand starting at position 3699 of SEQ ID NO: 913605
gaugcugugucugaugaaa

SEQ ID NO: 940243 - RNA, 19 nt, Artificial Sequence
  Description of Artificial Sequence: Synthetic oligonucleotide
  Antisense strand to SEQ ID NO: 940242
uuucaucagacacagcauc

SEQ ID NO: 940244 - RNA, 19 nt, Artificial Sequence
  Description of Artificial Sequence: Synthetic oligonucleotide
  Sense strand starting at position 2452 of SEQ ID NO: 913605
ggaucucucugaggcugau

SEQ ID NO: 940245 - RNA, 19 nt, Artificial Sequence
  Description of Artificial Sequence: Synthetic oligonucleotide
  Antisense strand to SEQ ID NO: 940244
aucagccucagagagaucc

SEQ ID NO: 940246 - RNA, 19 nt, Artificial Sequence
  Description of Artificial Sequence: Synthetic oligonucleotide
  Sense strand starting at position 24 of SEQ ID NO: 913606
agauccaaucaguagucua

SEQ ID NO: 940247 - RNA, 19 nt, Artificial Sequence
  Description of Artificial Sequence: Synthetic oligonucleotide
  Antisense strand to SEQ ID NO: 940246
uagacuacugauuggaucu

SEQ ID NO: 940248 - RNA, 19 nt, Artificial Sequence
  Description of Artificial Sequence: Synthetic oligonucleotide
  Sense strand starting at position 3679 of SEQ ID NO: 913606
aauacaugucuauggauga

SEQ ID NO: 940249 - RNA, 19 nt, Artificial Sequence
  Description of Artificial Sequence: Synthetic oligonucleotide
  Antisense strand to SEQ ID NO: 940248
ucauccauagacauguauu

SEQ ID NO: 940250 - RNA, 19 nt, Artificial Sequence
  Description of Artificial Sequence: Synthetic oligonucleotide
  Sense strand starting at position 853 of SEQ ID NO: 913606
gguauuaacguauacaaag

SEQ ID NO: 940251 - RNA, 19 nt, Artificial Sequence
  Description of Artificial Sequence: Synthetic oligonucleotide
  Antisense strand to SEQ ID NO: 940250
cuuuguauacguuaauacc

SEQ ID NO: 940252 - RNA, 19 nt, Artificial Sequence
  Description of Artificial Sequence: Synthetic oligonucleotide
  Sense strand starting at position 467 of SEQ ID NO: 913606
auagaaugguggucuaaga

SEQ ID NO: 940253 - RNA, 19 nt, Artificial Sequence
  Description of Artificial Sequence: Synthetic oligonucleotide
  Antisense strand to SEQ ID NO: 940252
ucuuagaccaccauucuau

SEQ ID NO: 940254 - RNA, 19 nt, Artificial Sequence
  Description of Artificial Sequence: Synthetic oligonucleotide
  Sense strand starting at position 2500 of SEQ ID NO: 913606
gcuguugugguuucuuuau

SEQ ID NO: 940255 - RNA, 19 nt, Artificial Sequence
  Description of Artificial Sequence: Synthetic oligonucleotide
  Antisense strand to SEQ ID NO: 940254
auaaagaaaccacaacagc

SEQ ID NO: 940256 - RNA, 19 nt, Artificial Sequence
  Description of Artificial Sequence: Synthetic oligonucleotide
  Sense strand starting at position 3683 of SEQ ID NO: 913606
caugucuauggaugaauga

SEQ ID NO: 940257 - RNA, 19 nt, Artificial Sequence
  Description of Artificial Sequence: Synthetic oligonucleotide
  Antisense strand to SEQ ID NO: 940256
ucauucauccauagacaug

SEQ ID NO: 940258 - RNA, 19 nt, Artificial Sequence
  Description of Artificial Sequence: Synthetic oligonucleotide
  Sense strand starting at position 376 of SEQ ID NO: 913606
gggaacuaaagccgagaau

SEQ ID NO: 940259 - RNA, 19 nt, Artificial Sequence
  Description of Artificial Sequence: Synthetic oligonucleotide
  Antisense strand to SEQ ID NO: 940258
auucucggcuuuaguuccc

SEQ ID NO: 940260 - RNA, 19 nt, Artificial Sequence
  Description of Artificial Sequence: Synthetic oligonucleotide
  Sense strand starting at position 3952 of SEQ ID NO: 913606
ugaaucauuaugggagguu

SEQ ID NO: 940261 - RNA, 19 nt, Artificial Sequence
  Description of Artificial Sequence: Synthetic oligonucleotide
  Antisense strand to SEQ ID NO: 940260
aaccucccauaaugauuca

SEQ ID NO: 940262 - RNA, 19 nt, Artificial Sequence
  Description of Artificial Sequence: Synthetic oligonucleotide
  Sense strand starting at position 3230 of SEQ ID NO: 913606
cucagacuguacuuggaaa

SEQ ID NO: 940263 - RNA, 19 nt, Artificial Sequence
  Description of Artificial Sequence: Synthetic oligonucleotide
  Antisense strand to SEQ ID NO: 940262
uuuccaaguacagucugag

SEQ ID NO: 940264 - RNA, 19 nt, Artificial Sequence
  Description of Artificial Sequence: Synthetic oligonucleotide
  Sense strand starting at position 86 of SEQ ID NO: 913606
gggacugaaaguugaguua

SEQ ID NO: 940265 - RNA, 19 nt, Artificial Sequence
  Description of Artificial Sequence: Synthetic oligonucleotide
  Antisense strand to SEQ ID NO: 940264
uaacucaacuuucaguccc

SEQ ID NO: 940266 - RNA, 19 nt, Artificial Sequence
  Description of Artificial Sequence: Synthetic oligonucleotide
  Sense strand starting at position 13 of SEQ ID NO: 913606
gccaaucugguagauccaa

SEQ ID NO: 940267 - RNA, 19 nt, Artificial Sequence
  Description of Artificial Sequence: Synthetic oligonucleotide
  Antisense strand to SEQ ID NO: 940266
uuggaucuaccagauuggc

SEQ ID NO: 940268 - RNA, 19 nt, Artificial Sequence
  Description of Artificial Sequence: Synthetic oligonucleotide
  Sense strand starting at position 3174 of SEQ ID NO: 913606
ggcugauuaccagauuccu

SEQ ID NO: 940269 - RNA, 19 nt, Artificial Sequence
  Description of Artificial Sequence: Synthetic oligonucleotide
  Antisense strand to SEQ ID NO: 940268
aggaaucugguaaucagcc

SEQ ID NO: 940270 - RNA, 19 nt, Artificial Sequence
  Description of Artificial Sequence: Synthetic oligonucleotide
  Sense strand starting at position 688 of SEQ ID NO: 913606
gugggugcugauuagagaa

SEQ ID NO: 940271 - RNA, 19 nt, Artificial Sequence
  Description of Artificial Sequence: Synthetic oligonucleotide
  Antisense strand to SEQ ID NO: 940270
uucucuaaucagcacccac

SEQ ID NO: 940272 - RNA, 19 nt, Artificial Sequence
  Description of Artificial Sequence: Synthetic oligonucleotide
  Sense strand starting at position 2831 of SEQ ID NO: 913606
ggcaguuugagauaaggug

SEQ ID NO: 940273 - RNA, 19 nt, Artificial Sequence
  Description of Artificial Sequence: Synthetic oligonucleotide
  Antisense strand to SEQ ID NO: 940272
caccuuaucucaaacugcc

SEQ ID NO: 940274 - RNA, 19 nt, Artificial Sequence
  Description of Artificial Sequence: Synthetic oligonucleotide
  Sense strand starting at position 21 of SEQ ID NO: 913606
gguagauccaaucaguagu

SEQ ID NO: 940275 - RNA, 19 nt, Artificial Sequence
  Description of Artificial Sequence: Synthetic oligonucleotide
  Antisense strand to SEQ ID NO: 940274
acuacugauuggaucuacc

SEQ ID NO: 940276 - RNA, 19 nt, Artificial Sequence
  Description of Artificial Sequence: Synthetic oligonucleotide
  Sense strand starting at position 2704 of SEQ ID NO: 913606
cuucuuucucgccugugua

SEQ ID NO: 940277 - RNA, 19 nt, Artificial Sequence
  Description of Artificial Sequence: Synthetic oligonucleotide
  Antisense strand to SEQ ID NO: 940276
uacacaggcgagaaagaag

SEQ ID NO: 940278 - RNA, 19 nt, Artificial Sequence
  Description of Artificial Sequence: Synthetic oligonucleotide
  Sense strand starting at position 2034 of SEQ ID NO: 913606
cgcaguccgcauucugauu

SEQ ID NO: 940279 - RNA, 19 nt, Artificial Sequence
  Description of Artificial Sequence: Synthetic oligonucleotide
  Antisense strand to SEQ ID NO: 940278
aaucagaaugcggacugcg

SEQ ID NO: 940280 - RNA, 19 nt, Artificial Sequence
  Description of Artificial Sequence: Synthetic oligonucleotide
  Sense strand starting at position 3205 of SEQ ID NO: 913606
cagagauucugguccuaua

SEQ ID NO: 940281 - RNA, 19 nt, Artificial Sequence
  Description of Artificial Sequence: Synthetic oligonucleotide
  Antisense strand to SEQ ID NO: 940280
uauaggaccagaaucucug

SEQ ID NO: 940282 - RNA, 19 nt, Artificial Sequence
  Description of Artificial Sequence: Synthetic oligonucleotide
  Sense strand starting at position 3875 of SEQ ID NO: 913606
caagguugugauuaguaug

SEQ ID NO: 940283 - RNA, 19 nt, Artificial Sequence
  Description of Artificial Sequence: Synthetic oligonucleotide
  Antisense strand to SEQ ID NO: 940282
cauacuaaucacaaccuug

SEQ ID NO: 940284 - RNA, 19 nt, Artificial Sequence
  Description of Artificial Sequence: Synthetic oligonucleotide
  Sense strand starting at position 3633 of SEQ ID NO: 913606
uccugauggcuccauauau

SEQ ID NO: 940285 - RNA, 19 nt, Artificial Sequence
  Description of Artificial Sequence: Synthetic oligonucleotide
  Antisense strand to SEQ ID NO: 940284
auauauggagccaucagga

SEQ ID NO: 940286 - RNA, 19 nt, Artificial Sequence
  Description of Artificial Sequence: Synthetic oligonucleotide
  Sense strand starting at position 515 of SEQ ID NO: 913606
gucuuaccugaagauugca

SEQ ID NO: 940287 - RNA, 19 nt, Artificial Sequence
  Description of Artificial Sequence: Synthetic oligonucleotide
  Antisense strand to SEQ ID NO: 940286
ugcaaucuucagguaagac

SEQ ID NO: 940288 - RNA, 19 nt, Artificial Sequence
  Description of Artificial Sequence: Synthetic oligonucleotide
  Sense strand starting at position 3889 of SEQ ID NO: 913606
guaugcaagccagauaaug

SEQ ID NO: 940289 - RNA, 19 nt, Artificial Sequence
  Description of Artificial Sequence: Synthetic oligonucleotide
  Antisense strand to SEQ ID NO: 940288
cauuaucuggcuugcauac

SEQ ID NO: 940290 - RNA, 19 nt, Artificial Sequence
  Description of Artificial Sequence: Synthetic oligonucleotide
  Sense strand starting at position 1052 of SEQ ID NO: 913606
guaagaagaauguggcaau

SEQ ID NO: 940291 - RNA, 19 nt, Artificial Sequence
  Description of Artificial Sequence: Synthetic oligonucleotide
  Antisense strand to SEQ ID NO: 940290
auugccacauucuucuuac

SEQ ID NO: 940292 - RNA, 19 nt, Artificial Sequence
  Description of Artificial Sequence: Synthetic oligonucleotide
  Sense strand starting at position 2239 of SEQ ID NO: 913606
cugcuuagcagugaagaga

SEQ ID NO: 940293 - RNA, 19 nt, Artificial Sequence
  Description of Artificial Sequence: Synthetic oligonucleotide
  Antisense strand to SEQ ID NO: 940292
ucucuucacugcuaagcag

SEQ ID NO: 940294 - RNA, 19 nt, Artificial Sequence
  Description of Artificial Sequence: Synthetic oligonucleotide
  Sense strand starting at position 441 of SEQ ID NO: 913606
ugaugcaaucgggaaagcu

SEQ ID NO: 940295 - RNA, 19 nt, Artificial Sequence
  Description of Artificial Sequence: Synthetic oligonucleotide
  Antisense strand to SEQ ID NO: 940294
agcuuucccgauugcauca

SEQ ID NO: 940296 - RNA, 19 nt, Artificial Sequence
  Description of Artificial Sequence: Synthetic oligonucleotide
  Sense strand starting at position 887 of SEQ ID NO: 913606
aggagcuauguccaagguu

SEQ ID NO: 940297 - RNA, 19 nt, Artificial Sequence
  Description of Artificial Sequence: Synthetic oligonucleotide
  Antisense strand to SEQ ID NO: 940296
aaccuuggacauagcuccu

SEQ ID NO: 940298 - RNA, 19 nt, Artificial Sequence
  Description of Artificial Sequence: Synthetic oligonucleotide
  Sense strand starting at position 341 of SEQ ID NO: 913606
aggauaauauaacagaaga

SEQ ID NO: 940299 - RNA, 19 nt, Artificial Sequence
  Description of Artificial Sequence: Synthetic oligonucleotide
  Antisense strand to SEQ ID NO: 940298
ucuucuguuauauuauccu

SEQ ID NO: 940300 - RNA, 19 nt, Artificial Sequence
  Description of Artificial Sequence: Synthetic oligonucleotide
  Sense strand starting at position 1398 of SEQ ID NO: 913606
uguauauuuccacguucuc

SEQ ID NO: 940301 - RNA, 19 nt, Artificial Sequence
  Description of Artificial Sequence: Synthetic oligonucleotide
  Antisense strand to SEQ ID NO: 940300
gagaacguggaaauauaca

SEQ ID NO: 940302 - RNA, 19 nt, Artificial Sequence
  Description of Artificial Sequence: Synthetic oligonucleotide
  Sense strand starting at position 198 of SEQ ID NO: 913606
gaaguuauuggagggucuu

SEQ ID NO: 940303 - RNA, 19 nt, Artificial Sequence
  Description of Artificial Sequence: Synthetic oligonucleotide
  Antisense strand to SEQ ID NO: 940302
aagacccuccaauaacuuc

SEQ ID NO: 940304 - RNA, 19 nt, Artificial Sequence
  Description of Artificial Sequence: Synthetic oligonucleotide
  Sense strand starting at position 142 of SEQ ID NO: 913606
ggagauguguagagggaua

SEQ ID NO: 940305 - RNA, 19 nt, Artificial Sequence
  Description of Artificial Sequence: Synthetic oligonucleotide
  Antisense strand to SEQ ID NO: 940304
uaucccucuacacaucucc

SEQ ID NO: 940306 - RNA, 19 nt, Artificial Sequence
  Description of Artificial Sequence: Synthetic oligonucleotide
  Sense strand starting at position 438 of SEQ ID NO: 913606
gguugaugcaaucgggaaa

SEQ ID NO: 940307 - RNA, 19 nt, Artificial Sequence
  Description of Artificial Sequence: Synthetic oligonucleotide
  Antisense strand to SEQ ID NO: 940306
uuucccgauugcaucaacc

SEQ ID NO: 940308 - RNA, 19 nt, Artificial Sequence
  Description of Artificial Sequence: Synthetic oligonucleotide
  Sense strand starting at position 3779 of SEQ ID NO: 913606
auuaaugagccaugugauu

SEQ ID NO: 940309 - RNA, 19 nt, Artificial Sequence
  Description of Artificial Sequence: Synthetic oligonucleotide
  Antisense strand to SEQ ID NO: 940308
aaucacauggcucauuaau

SEQ ID NO: 940310 - RNA, 19 nt, Artificial Sequence
  Description of Artificial Sequence: Synthetic oligonucleotide
  Sense strand starting at position 687 of SEQ ID NO: 913606
ggugggugcugauuagaga

SEQ ID NO: 940311 - RNA, 19 nt, Artificial Sequence
  Description of Artificial Sequence: Synthetic oligonucleotide
  Antisense strand to SEQ ID NO: 940310
ucucuaaucagcacccacc

SEQ ID NO: 940312 - RNA, 19 nt, Artificial Sequence
  Description of Artificial Sequence: Synthetic oligonucleotide
  Sense strand starting at position 1451 of SEQ ID NO: 913606
cucuaaucucuuugaggug

SEQ ID NO: 940313 - RNA, 19 nt, Artificial Sequence
  Description of Artificial Sequence: Synthetic oligonucleotide
  Antisense strand to SEQ ID NO: 940312
caccucaaagagauuagag

SEQ ID NO: 940314 - RNA, 19 nt, Artificial Sequence
  Description of Artificial Sequence: Synthetic oligonucleotide
  Sense strand starting at position 2913 of SEQ ID NO: 913606
aauggcuaugugcaguaaa

SEQ ID NO: 940315 - RNA, 19 nt, Artificial Sequence
  Description of Artificial Sequence: Synthetic oligonucleotide
  Antisense strand to SEQ ID NO: 940314
uuuacugcacauagccauu

SEQ ID NO: 940316 - RNA, 19 nt, Artificial Sequence
  Description of Artificial Sequence: Synthetic oligonucleotide
  Sense strand starting at position 817 of SEQ ID NO: 913606
ucauuuguagagcgcgaau

SEQ ID NO: 940317 - RNA, 19 nt, Artificial Sequence
  Description of Artificial Sequence: Synthetic oligonucleotide
  Antisense strand to SEQ ID NO: 940316
auucgcgcucuacaaauga

SEQ ID NO: 940318 - RNA, 19 nt, Artificial Sequence
  Description of Artificial Sequence: Synthetic oligonucleotide
  Sense strand starting at position 3164 of SEQ ID NO: 913606
uccuauaccuggcugauua

SEQ ID NO: 940319 - RNA, 19 nt, Artificial Sequence
  Description of Artificial Sequence: Synthetic oligonucleotide
  Antisense strand to SEQ ID NO: 940318
uaaucagccagguauagga

SEQ ID NO: 940320 - RNA, 19 nt, Artificial Sequence
  Description of Artificial Sequence: Synthetic oligonucleotide
  Sense strand starting at position 1527 of SEQ ID NO: 913606
auaacucugcucuguaaga

SEQ ID NO: 940321 - RNA, 19 nt, Artificial Sequence
  Description of Artificial Sequence: Synthetic oligonucleotide
  Antisense strand to SEQ ID NO: 940320
ucuuacagagcagaguuau

SEQ ID NO: 940322 - RNA, 19 nt, Artificial Sequence
  Description of Artificial Sequence: Synthetic oligonucleotide
  Sense strand starting at position 2311 of SEQ ID NO: 913606
uuuccaggcucccugagau

SEQ ID NO: 940323 - RNA, 19 nt, Artificial Sequence
  Description of Artificial Sequence: Synthetic oligonucleotide
  Antisense strand to SEQ ID NO: 940322
aucucagggagccuggaaa

SEQ ID NO: 940324 - RNA, 19 nt, Artificial Sequence
  Description of Artificial Sequence: Synthetic oligonucleotide
  Sense strand starting at position 3217 of SEQ ID NO: 913606
uccuauagguugucucaga

SEQ ID NO: 940325 - RNA, 19 nt, Artificial Sequence
  Description of Artificial Sequence: Synthetic oligonucleotide
  Antisense strand to SEQ ID NO: 940324
ucugagacaaccuauagga

SEQ ID NO: 940326 - RNA, 19 nt, Artificial Sequence
  Description of Artificial Sequence: Synthetic oligonucleotide
  Sense strand starting at position 3063 of SEQ ID NO: 913607
uuuauuggugguuaaagau

SEQ ID NO: 940327 - RNA, 19 nt, Artificial Sequence
  Description of Artificial Sequence: Synthetic oligonucleotide
  Antisense strand to SEQ ID NO: 940326
aucuuuaaccaccaauaaa

SEQ ID NO: 940328 - RNA, 19 nt, Artificial Sequence
  Description of Artificial Sequence: Synthetic oligonucleotide
  Sense strand starting at position 2545 of SEQ ID NO: 913607
guucguuugcgaguugaga

SEQ ID NO: 940329 - RNA, 19 nt, Artificial Sequence
  Description of Artificial Sequence: Synthetic oligonucleotide
  Antisense strand to SEQ ID NO: 940328
ucucaacucgcaaacgaac

SEQ ID NO: 940330 - RNA, 19 nt, Artificial Sequence
  Description of Artificial Sequence: Synthetic oligonucleotide
  Sense strand starting at position 3894 of SEQ ID NO: 913607
uugucuacaguuuggaaau

SEQ ID NO: 940331 - RNA, 19 nt, Artificial Sequence
  Description of Artificial Sequence: Synthetic oligonucleotide
  Antisense strand to SEQ ID NO: 940330
auuuccaaacuguagacaa

SEQ ID NO: 940332 - RNA, 19 nt, Artificial Sequence
  Description of Artificial Sequence: Synthetic oligonucleotide
  Sense strand starting at position 3062 of SEQ ID NO: 913607
guuuauuggugguuaaaga

SEQ ID NO: 940333 - RNA, 19 nt, Artificial Sequence
  Description of Artificial Sequence: Synthetic oligonucleotide
  Antisense strand to SEQ ID NO: 940332
ucuuuaaccaccaauaaac

SEQ ID NO: 940334 - RNA, 19 nt, Artificial Sequence
  Description of Artificial Sequence: Synthetic oligonucleotide
  Sense strand starting at position 2518 of SEQ ID NO: 913607
gugcguucgcgauucuuga

SEQ ID NO: 940335 - RNA, 19 nt, Artificial Sequence
  Description of Artificial Sequence: Synthetic oligonucleotide
  Antisense strand to SEQ ID NO: 940334
ucaagaaucgcgaacgcac

SEQ ID NO: 940336 - RNA, 19 nt, Artificial Sequence
  Description of Artificial Sequence: Synthetic oligonucleotide
  Sense strand starting at position 3439 of SEQ ID NO: 913607
ugugucaauuacuccuuua

SEQ ID NO: 940337 - RNA, 19 nt, Artificial Sequence
  Description of Artificial Sequence: Synthetic oligonucleotide
  Antisense strand to SEQ ID NO: 940336
uaaaggaguaauugacaca

SEQ ID NO: 940338 - RNA, 19 nt, Artificial Sequence
  Description of Artificial Sequence: Synthetic oligonucleotide
  Sense strand starting at position 3060 of SEQ ID NO: 913607
cuguuuauuggugguuaaa

SEQ ID NO: 940339 - RNA, 19 nt, Artificial Sequence
  Description of Artificial Sequence: Synthetic oligonucleotide
  Antisense strand to SEQ ID NO: 940338
uuuaaccaccaauaaacag

SEQ ID NO: 940340 - RNA, 19 nt, Artificial Sequence
  Description of Artificial Sequence: Synthetic oligonucleotide
  Sense strand starting at position 3277 of SEQ ID NO: 913607
cuagguugccgugaaaccu

SEQ ID NO: 940341 - RNA, 19 nt, Artificial Sequence
  Description of Artificial Sequence: Synthetic oligonucleotide
  Antisense strand to SEQ ID NO: 940340
agguuucacggcaaccuag

SEQ ID NO: 940342 - RNA, 19 nt, Artificial Sequence
  Description of Artificial Sequence: Synthetic oligonucleotide
  Sense strand starting at position 3920 of SEQ ID NO: 913607
ucaauuaggcugugagguu

SEQ ID NO: 940343 - RNA, 19 nt, Artificial Sequence
  Description of Artificial Sequence: Synthetic oligonucleotide
  Antisense strand to SEQ ID NO: 940342
aaccucacagccuaauuga

SEQ ID NO: 940344 - RNA, 19 nt, Artificial Sequence
  Description of Artificial Sequence: Synthetic oligonucleotide
  Sense strand starting at position 3058 of SEQ ID NO: 913607
cucuguuuauuggugguua

SEQ ID NO: 940345 - RNA, 19 nt, Artificial Sequence
  Description of Artificial Sequence: Synthetic oligonucleotide
  Antisense strand to SEQ ID NO: 940344
uaaccaccaauaaacagag

SEQ ID NO: 940346 - RNA, 19 nt, Artificial Sequence
  Description of Artificial Sequence: Synthetic oligonucleotide
  Sense strand starting at position 2773 of SEQ ID NO: 913607
caguguggucaauguuauu

SEQ ID NO: 940347 - RNA, 19 nt, Artificial Sequence
  Description of Artificial Sequence: Synthetic oligonucleotide
  Antisense strand to SEQ ID NO: 940346
aauaacauugaccacacug

SEQ ID NO: 940348 - RNA, 19 nt, Artificial Sequence
  Description of Artificial Sequence: Synthetic oligonucleotide
  Sense strand starting at position 3265 of SEQ ID NO: 913607
uguguuuggugacuagguu

SEQ ID NO: 940349 - RNA, 19 nt, Artificial Sequence
  Description of Artificial Sequence: Synthetic oligonucleotide
  Antisense strand to SEQ ID NO: 940348
aaccuagucaccaaacaca

SEQ ID NO: 940350 - RNA, 19 nt, Artificial Sequence
  Description of Artificial Sequence: Synthetic oligonucleotide
  Sense strand starting at position 3702 of SEQ ID NO: 913607
ucccuuaggcuucgaaguu

SEQ ID NO: 940351 - RNA, 19 nt, Artificial Sequence
  Description of Artificial Sequence: Synthetic oligonucleotide
  Antisense strand to SEQ ID NO: 940350
aacuucgaagccuaaggga

SEQ ID NO: 940352 - RNA, 19 nt, Artificial Sequence
  Description of Artificial Sequence: Synthetic oligonucleotide
  Sense strand starting at position 2744 of SEQ ID NO: 913607
uauuaagguuccgucguaa

SEQ ID NO: 940353 - RNA, 19 nt, Artificial Sequence
  Description of Artificial Sequence: Synthetic oligonucleotide
  Antisense strand to SEQ ID NO: 940352
uuacgacggaaccuuaaua

SEQ ID NO: 940354 - RNA, 19 nt, Artificial Sequence
  Description of Artificial Sequence: Synthetic oligonucleotide
  Sense strand starting at position 2769 of SEQ ID NO: 913607
uugucaguguggucaaugu

SEQ ID NO: 940355 - RNA, 19 nt, Artificial Sequence
  Description of Artificial Sequence: Synthetic oligonucleotide
  Antisense strand to SEQ ID NO: 940354
acauugaccacacugacaa

SEQ ID NO: 940356 - RNA, 19 nt, Artificial Sequence
  Description of Artificial Sequence: Synthetic oligonucleotide
  Sense strand starting at position 3196 of SEQ ID NO: 913607
aaauucuagcgucguuuaa

SEQ ID NO: 940357 - RNA, 19 nt, Artificial Sequence
  Description of Artificial Sequence: Synthetic oligonucleotide
  Antisense strand to SEQ ID NO: 940356
uuaaacgacgcuagaauuu

SEQ ID NO: 940358 - RNA, 19 nt, Artificial Sequence
  Description of Artificial Sequence: Synthetic oligonucleotide
  Sense strand starting at position 3561 of SEQ ID NO: 913607
cagacagauucgugaggaa

SEQ ID NO: 940359 - RNA, 19 nt, Artificial Sequence
  Description of Artificial Sequence: Synthetic oligonucleotide
  Antisense strand to SEQ ID NO: 940358
uuccucacgaaucugucug

SEQ ID NO: 940360 - RNA, 19 nt, Artificial Sequence
  Description of Artificial Sequence: Synthetic oligonucleotide
  Sense strand starting at position 3017 of SEQ ID NO: 913607
cggcauaauuaugaucaca

SEQ ID NO: 940361 - RNA, 19 nt, Artificial Sequence
  Description of Artificial Sequence: Synthetic oligonucleotide
  Antisense strand to SEQ ID NO: 940360
ugugaucauaauuaugccg

SEQ ID NO: 940362 - RNA, 19 nt, Artificial Sequence
  Description of Artificial Sequence: Synthetic oligonucleotide
  Sense strand starting at position 3253 of SEQ ID NO: 913607
cgcagaauugccuguguuu

SEQ ID NO: 940363 - RNA, 19 nt, Artificial Sequence
  Description of Artificial Sequence: Synthetic oligonucleotide
  Antisense strand to SEQ ID NO: 940362
aaacacaggcaauucugcg

SEQ ID NO: 940364 - RNA, 19 nt, Artificial Sequence
  Description of Artificial Sequence: Synthetic oligonucleotide
  Sense strand starting at position 3564 of SEQ ID NO: 913607
acagauucgugaggaacug

SEQ ID NO: 940365 - RNA, 19 nt, Artificial Sequence
  Description of Artificial Sequence: Synthetic oligonucleotide
  Antisense strand to SEQ ID NO: 940364
caguuccucacgaaucugu

SEQ ID NO: 940366 - RNA, 19 nt, Artificial Sequence
  Description of Artificial Sequence: Synthetic oligonucleotide
  Sense strand starting at position 3921 of SEQ ID NO: 913607
caauuaggcugugagguua

SEQ ID NO: 940367 - RNA, 19 nt, Artificial Sequence
  Description of Artificial Sequence: Synthetic oligonucleotide
  Antisense strand to SEQ ID NO: 940366
uaaccucacagccuaauug

SEQ ID NO: 940368 - RNA, 19 nt, Artificial Sequence
  Description of Artificial Sequence: Synthetic oligonucleotide
  Sense strand starting at position 3423 of SEQ ID NO: 913607
gguguauauuuauguuugu

SEQ ID NO: 940369 - RNA, 19 nt, Artificial Sequence
  Description of Artificial Sequence: Synthetic oligonucleotide
  Antisense strand to SEQ ID NO: 940368
acaaacauaaauauacacc

SEQ ID NO: 940370 - RNA, 19 nt, Artificial Sequence
  Description of Artificial Sequence: Synthetic oligonucleotide
  Sense strand starting at position 3801 of SEQ ID NO: 913607
cccaaagauucugggcuuu

SEQ ID NO: 940371 - RNA, 19 nt, Artificial Sequence
  Description of Artificial Sequence: Synthetic oligonucleotide
  Antisense strand to SEQ ID NO: 940370
aaagcccagaaucuuuggg

SEQ ID NO: 940372 - RNA, 19 nt, Artificial Sequence
  Description of Artificial Sequence: Synthetic oligonucleotide
  Sense strand starting at position 3895 of SEQ ID NO: 913607
ugucuacaguuuggaaauc

SEQ ID NO: 940373 - RNA, 19 nt, Artificial Sequence
  Description of Artificial Sequence: Synthetic oligonucleotide
  Antisense strand to SEQ ID NO: 940372
gauuuccaaacuguagaca

SEQ ID NO: 940374 - RNA, 19 nt, Artificial Sequence
  Description of Artificial Sequence: Synthetic oligonucleotide
  Sense strand starting at position 2732 of SEQ ID NO: 913607
gugcuacuguacuauuaag

SEQ ID NO: 940375 - RNA, 19 nt, Artificial Sequence
  Description of Artificial Sequence: Synthetic oligonucleotide
  Antisense strand to SEQ ID NO: 940374
cuuaauaguacaguagcac

SEQ ID NO: 940376 - RNA, 19 nt, Artificial Sequence
  Description of Artificial Sequence: Synthetic oligonucleotide
  Sense strand starting at position 3049 of SEQ ID NO: 913607
ggcgcugcucucuguuuau

SEQ ID NO: 940377 - RNA, 19 nt, Artificial Sequence
  Description of Artificial Sequence: Synthetic oligonucleotide
  Antisense strand to SEQ ID NO: 940376
auaaacagagagcagcgcc

SEQ ID NO: 940378 - RNA, 19 nt, Artificial Sequence
  Description of Artificial Sequence: Synthetic oligonucleotide
  Sense strand starting at position 2776 of SEQ ID NO: 913607
uguggucaauguuauuauu

SEQ ID NO: 940379 - RNA, 19 nt, Artificial Sequence
  Description of Artificial Sequence: Synthetic oligonucleotide
  Antisense strand to SEQ ID NO: 940378
aauaauaacauugaccaca

SEQ ID NO: 940380 - RNA, 19 nt, Artificial Sequence
  Description of Artificial Sequence: Synthetic oligonucleotide
  Sense strand starting at position 2834 of SEQ ID NO: 913607
uuauuauuaugccaucugu

SEQ ID NO: 940381 - RNA, 19 nt, Artificial Sequence
  Description of Artificial Sequence: Synthetic oligonucleotide
  Antisense strand to SEQ ID NO: 940380
acagauggcauaauaauaa

SEQ ID NO: 940382 - RNA, 19 nt, Artificial Sequence
  Description of Artificial Sequence: Synthetic oligonucleotide
  Sense strand starting at position 3432 of SEQ ID NO: 913607
uuauguuugugucaauuac

SEQ ID NO: 940383 - RNA, 19 nt, Artificial Sequence
  Description of Artificial Sequence: Synthetic oligonucleotide
  Antisense strand to SEQ ID NO: 940382
guaauugacacaaacauaa

SEQ ID NO: 940384 - RNA, 19 nt, Artificial Sequence
  Description of Artificial Sequence: Synthetic oligonucleotide
  Sense strand starting at position 3461 of SEQ ID NO: 913607
cagauauaauguuguguug

SEQ ID NO: 940385 - RNA, 19 nt, Artificial Sequence
  Description of Artificial Sequence: Synthetic oligonucleotide
  Antisense strand to SEQ ID NO: 940384
caacacaacauuauaucug

SEQ ID NO: 940386 - RNA, 19 nt, Artificial Sequence
  Description of Artificial Sequence: Synthetic oligonucleotide
  Sense strand starting at position 2516 of SEQ ID NO: 913607
cggugcguucgcgauucuu

SEQ ID NO: 940387 - RNA, 19 nt, Artificial Sequence
  Description of Artificial Sequence: Synthetic oligonucleotide
  Antisense strand to SEQ ID NO: 940386
aagaaucgcgaacgcaccg

SEQ ID NO: 940388 - RNA, 19 nt, Artificial Sequence
  Description of Artificial Sequence: Synthetic oligonucleotide
  Sense strand starting at position 3800 of SEQ ID NO: 913607
gcccaaagauucugggcuu

SEQ ID NO: 940389 - RNA, 19 nt, Artificial Sequence
  Description of Artificial Sequence: Synthetic oligonucleotide
  Antisense strand to SEQ ID NO: 940388
aagcccagaaucuuugggc

SEQ ID NO: 940390 - RNA, 19 nt, Artificial Sequence
  Description of Artificial Sequence: Synthetic oligonucleotide
  Sense strand starting at position 2724 of SEQ ID NO: 913607
ccgauauggugcuacugua

SEQ ID NO: 940391 - RNA, 19 nt, Artificial Sequence
  Description of Artificial Sequence: Synthetic oligonucleotide
  Antisense strand to SEQ ID NO: 940390
uacaguagcaccauaucgg

SEQ ID NO: 940392 - RNA, 19 nt, Artificial Sequence
  Description of Artificial Sequence: Synthetic oligonucleotide
  Sense strand starting at position 2748 of SEQ ID NO: 913607
aagguuccgucguaauuau

SEQ ID NO: 940393 - RNA, 19 nt, Artificial Sequence
  Description of Artificial Sequence: Synthetic oligonucleotide
  Antisense strand to SEQ ID NO: 940392
auaauuacgacggaaccuu

SEQ ID NO: 940394 - RNA, 19 nt, Artificial Sequence
  Description of Artificial Sequence: Synthetic oligonucleotide
  Sense strand starting at position 3059 of SEQ ID NO: 913607
ucuguuuauuggugguuaa

SEQ ID NO: 940395 - RNA, 19 nt, Artificial Sequence
  Description of Artificial Sequence: Synthetic oligonucleotide
  Antisense strand to SEQ ID NO: 940394
uuaaccaccaauaaacaga

SEQ ID NO: 940396 - RNA, 19 nt, Artificial Sequence
  Description of Artificial Sequence: Synthetic oligonucleotide
  Sense strand starting at position 3274 of SEQ ID NO: 913607
ugacuagguugccgugaaa

SEQ ID NO: 940397 - RNA, 19 nt, Artificial Sequence
  Description of Artificial Sequence: Synthetic oligonucleotide
  Antisense strand to SEQ ID NO: 940396
uuucacggcaaccuaguca

SEQ ID NO: 940398 - RNA, 19 nt, Artificial Sequence
  Description of Artificial Sequence: Synthetic oligonucleotide
  Sense strand starting at position 2540 of SEQ ID NO: 913607
ggcucguucguuugcgagu

SEQ ID NO: 940399 - RNA, 19 nt, Artificial Sequence
  Description of Artificial Sequence: Synthetic oligonucleotide
  Antisense strand to SEQ ID NO: 940398
acucgcaaacgaacgagcc

SEQ ID NO: 940400 - RNA, 19 nt, Artificial Sequence
  Description of Artificial Sequence: Synthetic oligonucleotide
  Sense strand starting at position 2385 of SEQ ID NO: 913607
gccguucgguuauaccaau

SEQ ID NO: 940401 - RNA, 19 nt, Artificial Sequence
  Description of Artificial Sequence: Synthetic oligonucleotide
  Antisense strand to SEQ ID NO: 940400
auugguauaaccgaacggc

SEQ ID NO: 940402 - RNA, 19 nt, Artificial Sequence
  Description of Artificial Sequence: Synthetic oligonucleotide
  Sense strand starting at position 3262 of SEQ ID NO: 913607
gccuguguuuggugacuag

SEQ ID NO: 940403 - RNA, 19 nt, Artificial Sequence
  Description of Artificial Sequence: Synthetic oligonucleotide
  Antisense strand to SEQ ID NO: 940402
cuagucaccaaacacaggc

SEQ ID NO: 940404 - RNA, 19 nt, Artificial Sequence
  Description of Artificial Sequence: Synthetic oligonucleotide
  Sense strand starting at position 580 of SEQ ID NO: 913607
agucguagcuucggagacu

SEQ ID NO: 940405 - RNA, 19 nt, Artificial Sequence
  Description of Artificial Sequence: Synthetic oligonucleotide
  Antisense strand to SEQ ID NO: 940404
agucuccgaagcuacgacu

SEQ ID NO: 940406 - RNA, 19 nt, Artificial Sequence
  Description of Artificial Sequence: Synthetic oligonucleotide
  Sense strand starting at position 877 of SEQ ID NO: 913608
ggugaacaaucuccauaag

SEQ ID NO: 940407 - RNA, 19 nt, Artificial Sequence
  Description of Artificial Sequence: Synthetic oligonucleotide
  Antisense strand to SEQ ID NO: 940406
cuuauggagauuguucacc

SEQ ID NO: 940408 - RNA, 19 nt, Artificial Sequence
  Description of Artificial Sequence: Synthetic oligonucleotide
  Sense strand starting at position 1641 of SEQ ID NO: 913608
gaaggcacccaauauguau

SEQ ID NO: 940409 - RNA, 19 nt, Artificial Sequence
  Description of Artificial Sequence: Synthetic oligonucleotide
  Antisense strand to SEQ ID NO: 940408
auacauauugggugccuuc

SEQ ID NO: 940410 - RNA, 19 nt, Artificial Sequence
  Description of Artificial Sequence: Synthetic oligonucleotide
  Sense strand starting at position 1655 of SEQ ID NO: 913608
uguauuugcugagucagac

SEQ ID NO: 940411 - RNA, 19 nt, Artificial Sequence
  Description of Artificial Sequence: Synthetic oligonucleotide
  Antisense strand to SEQ ID NO: 940410
gucugacucagcaaauaca

SEQ ID NO: 940412 - RNA, 19 nt, Artificial Sequence
  Description of Artificial Sequence: Synthetic oligonucleotide
  Sense strand starting at position 1755 of SEQ ID NO: 913608
gccauuuacuagucacuuu

SEQ ID NO: 940413 - RNA, 19 nt, Artificial Sequence
  Description of Artificial Sequence: Synthetic oligonucleotide
  Antisense strand to SEQ ID NO: 940412
aaagugacuaguaaauggc

SEQ ID NO: 940414 - RNA, 19 nt, Artificial Sequence
  Description of Artificial Sequence: Synthetic oligonucleotide
  Sense strand starting at position 3347 of SEQ ID NO: 913608
uuacuaaauugagucauag

SEQ ID NO: 940415 - RNA, 19 nt, Artificial Sequence
  Description of Artificial Sequence: Synthetic oligonucleotide
  Antisense strand to SEQ ID NO: 940414
cuaugacucaauuuaguaa

SEQ ID NO: 940416 - RNA, 19 nt, Artificial Sequence
  Description of Artificial Sequence: Synthetic oligonucleotide
  Sense strand starting at position 344 of SEQ ID NO: 913608
accuaaauugaaugcuaga

SEQ ID NO: 940417 - RNA, 19 nt, Artificial Sequence
  Description of Artificial Sequence: Synthetic oligonucleotide
  Antisense strand to SEQ ID NO: 940416
ucuagcauucaauuuaggu

SEQ ID NO: 940418 - RNA, 19 nt, Artificial Sequence
  Description of Artificial Sequence: Synthetic oligonucleotide
  Sense strand starting at position 397 of SEQ ID NO: 913608
agcagugcuagggaaagau

SEQ ID NO: 940419 - RNA, 19 nt, Artificial Sequence
  Description of Artificial Sequence: Synthetic oligonucleotide
  Antisense strand to SEQ ID NO: 940418
aucuuucccuagcacugcu

SEQ ID NO: 940420 - RNA, 19 nt, Artificial Sequence
  Description of Artificial Sequence: Synthetic oligonucleotide
  Sense strand starting at position 3635 of SEQ ID NO: 913608
uugcucuucccagaaagau

SEQ ID NO: 940421 - RNA, 19 nt, Artificial Sequence
  Description of Artificial Sequence: Synthetic oligonucleotide
  Antisense strand to SEQ ID NO: 940420
aucuuucugggaagagcaa

SEQ ID NO: 940422 - RNA, 19 nt, Artificial Sequence
  Description of Artificial Sequence: Synthetic oligonucleotide
  Sense strand starting at position 3921 of SEQ ID NO: 913608
gugaaucaccaaugguaga

SEQ ID NO: 940423 - RNA, 19 nt, Artificial Sequence
  Description of Artificial Sequence: Synthetic oligonucleotide
  Antisense strand to SEQ ID NO: 940422
ucuaccauuggugauucac

SEQ ID NO: 940424 - RNA, 19 nt, Artificial Sequence
  Description of Artificial Sequence: Synthetic oligonucleotide
  Sense strand starting at position 814 of SEQ ID NO: 913608
acaagaaugucaguauuac

SEQ ID NO: 940425 - RNA, 19 nt, Artificial Sequence
  Description of Artificial Sequence: Synthetic oligonucleotide
  Antisense strand to SEQ ID NO: 940424
guaauacugacauucuugu

SEQ ID NO: 940426 - RNA, 19 nt, Artificial Sequence
  Description of Artificial Sequence: Synthetic oligonucleotide
  Sense strand starting at position 3705 of SEQ ID NO: 913608
cacugauuauuguuugaag

SEQ ID NO: 940427 - RNA, 19 nt, Artificial Sequence
  Description of Artificial Sequence: Synthetic oligonucleotide
  Antisense strand to SEQ ID NO: 940426
cuucaaacaauaaucagug

SEQ ID NO: 940428 - RNA, 19 nt, Artificial Sequence
  Description of Artificial Sequence: Synthetic oligonucleotide
  Sense strand starting at position 113 of SEQ ID NO: 913608
caaauagauccgcagcaga

SEQ ID NO: 940429 - RNA, 19 nt, Artificial Sequence
  Description of Artificial Sequence: Synthetic oligonucleotide
  Antisense strand to SEQ ID NO: 940428
ucugcugcggaucuauuug

SEQ ID NO: 940430 - RNA, 19 nt, Artificial Sequence
  Description of Artificial Sequence: Synthetic oligonucleotide
  Sense strand starting at position 183 of SEQ ID NO: 913608
uugaaagucccuuaguuac

SEQ ID NO: 940431 - RNA, 19 nt, Artificial Sequence
  Description of Artificial Sequence: Synthetic oligonucleotide
  Antisense strand to SEQ ID NO: 940430
guaacuaagggacuuucaa

SEQ ID NO: 940432 - RNA, 19 nt, Artificial Sequence
  Description of Artificial Sequence: Synthetic oligonucleotide
  Sense strand starting at position 1570 of SEQ ID NO: 913608
caaugacugcguuagaaac

SEQ ID NO: 940433 - RNA, 19 nt, Artificial Sequence
  Description of Artificial Sequence: Synthetic oligonucleotide
  Antisense strand to SEQ ID NO: 940432
guuucuaacgcagucauug

SEQ ID NO: 940434 - RNA, 19 nt, Artificial Sequence
  Description of Artificial Sequence: Synthetic oligonucleotide
  Sense strand starting at position 1807 of SEQ ID NO: 913608
acagcuugaugaccucaua

SEQ ID NO: 940435 - RNA, 19 nt, Artificial Sequence
  Description of Artificial Sequence: Synthetic oligonucleotide
  Antisense strand to SEQ ID NO: 940434
uaugaggucaucaagcugu

SEQ ID NO: 940436 - RNA, 19 nt, Artificial Sequence
  Description of Artificial Sequence: Synthetic oligonucleotide
  Sense strand starting at position 3644 of SEQ ID NO: 913608
ccagaaagauucuugccau

SEQ ID NO: 940437 - RNA, 19 nt, Artificial Sequence
  Description of Artificial Sequence: Synthetic oligonucleotide
  Antisense strand to SEQ ID NO: 940436
auggcaagaaucuuucugg

SEQ ID NO: 940438 - RNA, 19 nt, Artificial Sequence
  Description of Artificial Sequence: Synthetic oligonucleotide
  Sense strand starting at position 2034 of SEQ ID NO: 913608
ucuauagacgauuguggaa

SEQ ID NO: 940439 - RNA, 19 nt, Artificial Sequence
  Description of Artificial Sequence: Synthetic oligonucleotide
  Antisense strand to SEQ ID NO: 940438
uuccacaaucgucuauaga

SEQ ID NO: 940440 - RNA, 19 nt, Artificial Sequence
  Description of Artificial Sequence: Synthetic oligonucleotide
  Sense strand starting at position 3213 of SEQ ID NO: 913608
cccucaaaucuguauuggu

SEQ ID NO: 940441 - RNA, 19 nt, Artificial Sequence
  Description of Artificial Sequence: Synthetic oligonucleotide
  Antisense strand to SEQ ID NO: 940440
accaauacagauuugaggg

SEQ ID NO: 940442 - RNA, 19 nt, Artificial Sequence
  Description of Artificial Sequence: Synthetic oligonucleotide
  Sense strand starting at position 3579 of SEQ ID NO: 913608
gagcaaagucuguaacucu

SEQ ID NO: 940443 - RNA, 19 nt, Artificial Sequence
  Description of Artificial Sequence: Synthetic oligonucleotide
  Antisense strand to SEQ ID NO: 940442
agaguuacagacuuugcuc

SEQ ID NO: 940444 - RNA, 19 nt, Artificial Sequence
  Description of Artificial Sequence: Synthetic oligonucleotide
  Sense strand starting at position 1238 of SEQ ID NO: 913608
uuuggugaucuacaagcuu

SEQ ID NO: 940445 - RNA, 19 nt, Artificial Sequence
  Description of Artificial Sequence: Synthetic oligonucleotide
  Antisense strand to SEQ ID NO: 940444
aagcuuguagaucaccaaa

SEQ ID NO: 940446 - RNA, 19 nt, Artificial Sequence
  Description of Artificial Sequence: Synthetic oligonucleotide
  Sense strand starting at position 1621 of SEQ ID NO: 913608
aggauaguuacuggcacau

SEQ ID NO: 940447 - RNA, 19 nt, Artificial Sequence
  Description of Artificial Sequence: Synthetic oligonucleotide
  Antisense strand to SEQ ID NO: 940446
augugccaguaacuauccu

SEQ ID NO: 940448 - RNA, 19 nt, Artificial Sequence
  Description of Artificial Sequence: Synthetic oligonucleotide
  Sense strand starting at position 2162 of SEQ ID NO: 913608
cuaagaaugugguccuauu

SEQ ID NO: 940449 - RNA, 19 nt, Artificial Sequence
  Description of Artificial Sequence: Synthetic oligonucleotide
  Antisense strand to SEQ ID NO: 940448
aauaggaccacauucuuag

SEQ ID NO: 940450 - RNA, 19 nt, Artificial Sequence
  Description of Artificial Sequence: Synthetic oligonucleotide
  Sense strand starting at position 1926 of SEQ ID NO: 913608
gagucauucucuucuugag

SEQ ID NO: 940451 - RNA, 19 nt, Artificial Sequence
  Description of Artificial Sequence: Synthetic oligonucleotide
  Antisense strand to SEQ ID NO: 940450
cucaagaagagaaugacuc

SEQ ID NO: 940452 - RNA, 19 nt, Artificial Sequence
  Description of Artificial Sequence: Synthetic oligonucleotide
  Sense strand starting at position 3804 of SEQ ID NO: 913608
agugcucagcuuuauaaga

SEQ ID NO: 940453 - RNA, 19 nt, Artificial Sequence
  Description of Artificial Sequence: Synthetic oligonucleotide
  Antisense strand to SEQ ID NO: 940452
ucuuauaaagcugagcacu

SEQ ID NO: 940454 - RNA, 19 nt, Artificial Sequence
  Description of Artificial Sequence: Synthetic oligonucleotide
  Sense strand starting at position 1610 of SEQ ID NO: 913608
ucuuuauauguaggauagu

SEQ ID NO: 940455 - RNA, 19 nt, Artificial Sequence
  Description of Artificial Sequence: Synthetic oligonucleotide
  Antisense strand to SEQ ID NO: 940454
acuauccuacauauaaaga

SEQ ID NO: 940456 - RNA, 19 nt, Artificial Sequence
  Description of Artificial Sequence: Synthetic oligonucleotide
  Sense strand starting at position 3577 of SEQ ID NO: 913608
gagagcaaagucuguaacu

SEQ ID NO: 940457 - RNA, 19 nt, Artificial Sequence
  Description of Artificial Sequence: Synthetic oligonucleotide
  Antisense strand to SEQ ID NO: 940456
aguuacagacuuugcucuc

SEQ ID NO: 940458 - RNA, 19 nt, Artificial Sequence
  Description of Artificial Sequence: Synthetic oligonucleotide
  Sense strand starting at position 20 of SEQ ID NO: 913608
gaggaaugcuggucuccau

SEQ ID NO: 940459 - RNA, 19 nt, Artificial Sequence
  Description of Artificial Sequence: Synthetic oligonucleotide
  Antisense strand to SEQ ID NO: 940458
auggagaccagcauuccuc

SEQ ID NO: 940460 - RNA, 19 nt, Artificial Sequence
  Description of Artificial Sequence: Synthetic oligonucleotide
  Sense strand starting at position 3022 of SEQ ID NO: 913608
augccugacuaaguacuua

SEQ ID NO: 940461 - RNA, 19 nt, Artificial Sequence
  Description of Artificial Sequence: Synthetic oligonucleotide
  Antisense strand to SEQ ID NO: 940460
uaaguacuuagucaggcau

SEQ ID NO: 940462 - RNA, 19 nt, Artificial Sequence
  Description of Artificial Sequence: Synthetic oligonucleotide
  Sense strand starting at position 181 of SEQ ID NO: 913608
acuugaaagucccuuaguu

SEQ ID NO: 940463 - RNA, 19 nt, Artificial Sequence
  Description of Artificial Sequence: Synthetic oligonucleotide
  Antisense strand to SEQ ID NO: 940462
aacuaagggacuuucaagu

SEQ ID NO: 940464 - RNA, 19 nt, Artificial Sequence
  Description of Artificial Sequence: Synthetic oligonucleotide
  Sense strand starting at position 1568 of SEQ ID NO: 913608
aucaaugacugcguuagaa

SEQ ID NO: 940465 - RNA, 19 nt, Artificial Sequence
  Description of Artificial Sequence: Synthetic oligonucleotide
  Antisense strand to SEQ ID NO: 940464
uucuaacgcagucauugau

SEQ ID NO: 940466 - RNA, 19 nt, Artificial Sequence
  Description of Artificial Sequence: Synthetic oligonucleotide
  Sense strand starting at position 734 of SEQ ID NO: 913608
ccuuauguuucuuuagaug

SEQ ID NO: 940467 - RNA, 19 nt, Artificial Sequence
  Description of Artificial Sequence: Synthetic oligonucleotide
  Antisense strand to SEQ ID NO: 940466
caucuaaagaaacauaagg

SEQ ID NO: 940468 - RNA, 19 nt, Artificial Sequence
  Description of Artificial Sequence: Synthetic oligonucleotide
  Sense strand starting at position 3587 of SEQ ID NO: 913608
ucuguaacucuggaguguu

SEQ ID NO: 940469 - RNA, 19 nt, Artificial Sequence
  Description of Artificial Sequence: Synthetic oligonucleotide
  Antisense strand to SEQ ID NO: 940468
aacacuccagaguuacaga

SEQ ID NO: 940470 - RNA, 19 nt, Artificial Sequence
  Description of Artificial Sequence: Synthetic oligonucleotide
  Sense strand starting at position 2041 of SEQ ID NO: 913608
acgauuguggaauguuuga

SEQ ID NO: 940471 - RNA, 19 nt, Artificial Sequence
  Description of Artificial Sequence: Synthetic oligonucleotide
  Antisense strand to SEQ ID NO: 940470
ucaaacauuccacaaucgu

SEQ ID NO: 940472 - RNA, 19 nt, Artificial Sequence
  Description of Artificial Sequence: Synthetic oligonucleotide
  Sense strand starting at position 1607 of SEQ ID NO: 913608
uguucuuuauauguaggau

SEQ ID NO: 940473 - RNA, 19 nt, Artificial Sequence
  Description of Artificial Sequence: Synthetic oligonucleotide
  Antisense strand to SEQ ID NO: 940472
auccuacauauaaagaaca

SEQ ID NO: 940474 - RNA, 19 nt, Artificial Sequence
  Description of Artificial Sequence: Synthetic oligonucleotide
  Sense strand starting at position 3725 of SEQ ID NO: 913608
guacaccgccauugaaaga

SEQ ID NO: 940475 - RNA, 19 nt, Artificial Sequence
  Description of Artificial Sequence: Synthetic oligonucleotide
  Antisense strand to SEQ ID NO: 940474
ucuuucaauggcgguguac

SEQ ID NO: 940476 - RNA, 19 nt, Artificial Sequence
  Description of Artificial Sequence: Synthetic oligonucleotide
  Sense strand starting at position 1557 of SEQ ID NO: 913608
acugcugcaucaucaauga

SEQ ID NO: 940477 - RNA, 19 nt, Artificial Sequence
  Description of Artificial Sequence: Synthetic oligonucleotide
  Antisense strand to SEQ ID NO: 940476
ucauugaugaugcagcagu

SEQ ID NO: 940478 - RNA, 19 nt, Artificial Sequence
  Description of Artificial Sequence: Synthetic oligonucleotide
  Sense strand starting at position 1249 of SEQ ID NO: 913608
acaagcuuugggugacuuu

SEQ ID NO: 940479 - RNA, 19 nt, Artificial Sequence
  Description of Artificial Sequence: Synthetic oligonucleotide
  Antisense strand to SEQ ID NO: 940478
aaagucacccaaagcuugu

SEQ ID NO: 940480 - RNA, 19 nt, Artificial Sequence
  Description of Artificial Sequence: Synthetic oligonucleotide
  Sense strand starting at position 733 of SEQ ID NO: 913608
cccuuauguuucuuuagau

SEQ ID NO: 940481 - RNA, 19 nt, Artificial Sequence
  Description of Artificial Sequence: Synthetic oligonucleotide
  Antisense strand to SEQ ID NO: 940480
aucuaaagaaacauaaggg

SEQ ID NO: 940482 - RNA, 19 nt, Artificial Sequence
  Description of Artificial Sequence: Synthetic oligonucleotide
  Sense strand starting at position 3982 of SEQ ID NO: 913608
agaaauuccugcuugucau

SEQ ID NO: 940483 - RNA, 19 nt, Artificial Sequence
  Description of Artificial Sequence: Synthetic oligonucleotide
  Antisense strand to SEQ ID NO: 940482
augacaagcaggaauuucu

SEQ ID NO: 940484 - RNA, 19 nt, Artificial Sequence
  Description of Artificial Sequence: Synthetic oligonucleotide
  Sense strand starting at position 3235 of SEQ ID NO: 913608
gucuuccuugugcaucaaa

SEQ ID NO: 940485 - RNA, 19 nt, Artificial Sequence
  Description of Artificial Sequence: Synthetic oligonucleotide
  Antisense strand to SEQ ID NO: 940484
uuugaugcacaaggaagac

SEQ ID NO: 940486 - RNA, 19 nt, Artificial Sequence
  Description of Artificial Sequence: Synthetic oligonucleotide
  Sense strand starting at position 3660 of SEQ ID NO: 913609
gauuucuguuuagcaagua

SEQ ID NO: 940487 - RNA, 19 nt, Artificial Sequence
  Description of Artificial Sequence: Synthetic oligonucleotide
  Antisense strand to SEQ ID NO: 940486
uacuugcuaaacagaaauc

SEQ ID NO: 940488 - RNA, 19 nt, Artificial Sequence
  Description of Artificial Sequence: Synthetic oligonucleotide
  Sense strand starting at position 3569 of SEQ ID NO: 913609
auagauggaucuguagauc

SEQ ID NO: 940489 - RNA, 19 nt, Artificial Sequence
  Description of Artificial Sequence: Synthetic oligonucleotide
  Antisense strand to SEQ ID NO: 940488
gaucuacagauccaucuau

SEQ ID NO: 940490 - RNA, 19 nt, Artificial Sequence
  Description of Artificial Sequence: Synthetic oligonucleotide
  Sense strand starting at position 3217 of SEQ ID NO: 913609
gaagauggaugccucugaa

SEQ ID NO: 940491 - RNA, 19 nt, Artificial Sequence
  Description of Artificial Sequence: Synthetic oligonucleotide
  Antisense strand to SEQ ID NO: 940490
uucagaggcauccaucuuc

SEQ ID NO: 940492 - RNA, 19 nt, Artificial Sequence
  Description of Artificial Sequence: Synthetic oligonucleotide
  Sense strand starting at position 1450 of SEQ ID NO: 913609
guauuaauaagagguuaag

SEQ ID NO: 940493 - RNA, 19 nt, Artificial Sequence
  Description of Artificial Sequence: Synthetic oligonucleotide
  Antisense strand to SEQ ID NO: 940492
cuuaaccucuuauuaauac

SEQ ID NO: 940494 - RNA, 19 nt, Artificial Sequence
  Description of Artificial Sequence: Synthetic oligonucleotide
  Sense strand starting at position 1453 of SEQ ID NO: 913609
uuaauaagagguuaagugu

SEQ ID NO: 940495 - RNA, 19 nt, Artificial Sequence
  Description of Artificial Sequence: Synthetic oligonucleotide
  Antisense strand to SEQ ID NO: 940494
acacuuaaccucuuauuaa

SEQ ID NO: 940496 - RNA, 19 nt, Artificial Sequence
  Description of Artificial Sequence: Synthetic oligonucleotide
  Sense strand starting at position 1943 of SEQ ID NO: 913609
guccucucucgggaagaaa

SEQ ID NO: 940497 - RNA, 19 nt, Artificial Sequence
  Description of Artificial Sequence: Synthetic oligonucleotide
  Antisense strand to SEQ ID NO: 940496
uuucuucccgagagaggac

SEQ ID NO: 940498 - RNA, 19 nt, Artificial Sequence
  Description of Artificial Sequence: Synthetic oligonucleotide
  Sense strand starting at position 1166 of SEQ ID NO: 913609
uuagaaacugccuaauagu

SEQ ID NO: 940499 - RNA, 19 nt, Artificial Sequence
  Description of Artificial Sequence: Synthetic oligonucleotide
  Antisense strand to SEQ ID NO: 940498
acuauuaggcaguuucuaa

SEQ ID NO: 940500 - RNA, 19 nt, Artificial Sequence
  Description of Artificial Sequence: Synthetic oligonucleotide
  Sense strand starting at position 3697 of SEQ ID NO: 913609
ggaaaccuccuguauguac

SEQ ID NO: 940501 - RNA, 19 nt, Artificial Sequence
  Description of Artificial Sequence: Synthetic oligonucleotide
  Antisense strand to SEQ ID NO: 940500
guacauacaggagguuucc

SEQ ID NO: 940502 - RNA, 19 nt, Artificial Sequence
  Description of Artificial Sequence: Synthetic oligonucleotide
  Sense strand starting at position 1980 of SEQ ID NO: 913609
gauugcuaagcgucguuga

SEQ ID NO: 940503 - RNA, 19 nt, Artificial Sequence
  Description of Artificial Sequence: Synthetic oligonucleotide
  Antisense strand to SEQ ID NO: 940502
ucaacgacgcuuagcaauc

SEQ ID NO: 940504 - RNA, 19 nt, Artificial Sequence
  Description of Artificial Sequence: Synthetic oligonucleotide
  Sense strand starting at position 1182 of SEQ ID NO: 913609
agugguagauauuucguuu

SEQ ID NO: 940505 - RNA, 19 nt, Artificial Sequence
  Description of Artificial Sequence: Synthetic oligonucleotide
  Antisense strand to SEQ ID NO: 940504
aaacgaaauaucuaccacu

SEQ ID NO: 940506 - RNA, 19 nt, Artificial Sequence
  Description of Artificial Sequence: Synthetic oligonucleotide
  Sense strand starting at position 3267 of SEQ ID NO: 913609
aaauaaagcuucccggaga

SEQ ID NO: 940507 - RNA, 19 nt, Artificial Sequence
  Description of Artificial Sequence: Synthetic oligonucleotide
  Antisense strand to SEQ ID NO: 940506
ucuccgggaagcuuuauuu

SEQ ID NO: 940508 - RNA, 19 nt, Artificial Sequence
  Description of Artificial Sequence: Synthetic oligonucleotide
  Sense strand starting at position 2632 of SEQ ID NO: 913609
uggugaguuauuggaggag

SEQ ID NO: 940509 - RNA, 19 nt, Artificial Sequence
  Description of Artificial Sequence: Synthetic oligonucleotide
  Antisense strand to SEQ ID NO: 940508
cuccuccaauaacucacca

SEQ ID NO: 940510 - RNA, 19 nt, Artificial Sequence
  Description of Artificial Sequence: Synthetic oligonucleotide
  Sense strand starting at position 3773 of SEQ ID NO: 913609
cuggcuaaagcuuaugaau

SEQ ID NO: 940511 - RNA, 19 nt, Artificial Sequence
  Description of Artificial Sequence: Synthetic oligonucleotide
  Antisense strand to SEQ ID NO: 940510
auucauaagcuuuagccag

SEQ ID NO: 940512 - RNA, 19 nt, Artificial Sequence
  Description of Artificial Sequence: Synthetic oligonucleotide
  Sense strand starting at position 1456 of SEQ ID NO: 913609
auaagagguuaaguguaau

SEQ ID NO: 940513 - RNA, 19 nt, Artificial Sequence
  Description of Artificial Sequence: Synthetic oligonucleotide
  Antisense strand to SEQ ID NO: 940512
auuacacuuaaccucuuau

SEQ ID NO: 940514 - RNA, 19 nt, Artificial Sequence
  Description of Artificial Sequence: Synthetic oligonucleotide
  Sense strand starting at position 3350 of SEQ ID NO: 913609
aacacaauggccuggugaa

SEQ ID NO: 940515 - RNA, 19 nt, Artificial Sequence
  Description of Artificial Sequence: Synthetic oligonucleotide
  Antisense strand to SEQ ID NO: 940514
uucaccaggccauuguguu

SEQ ID NO: 940516 - RNA, 19 nt, Artificial Sequence
  Description of Artificial Sequence: Synthetic oligonucleotide
  Sense strand starting at position 622 of SEQ ID NO: 913609
ugcuaauggagauguaaua

SEQ ID NO: 940517 - RNA, 19 nt, Artificial Sequence
  Description of Artificial Sequence: Synthetic oligonucleotide
  Antisense strand to SEQ ID NO: 940516
uauuacaucuccauuagca

SEQ ID NO: 940518 - RNA, 19 nt, Artificial Sequence
  Description of Artificial Sequence: Synthetic oligonucleotide
  Sense strand starting at position 3220 of SEQ ID NO: 913609
gauggaugccucugaacca

SEQ ID NO: 940519 - RNA, 19 nt, Artificial Sequence
  Description of Artificial Sequence: Synthetic oligonucleotide
  Antisense strand to SEQ ID NO: 940518
ugguucagaggcauccauc

SEQ ID NO: 940520 - RNA, 19 nt, Artificial Sequence
  Description of Artificial Sequence: Synthetic oligonucleotide
  Sense strand starting at position 3442 of SEQ ID NO: 913609
acauaagaauacguuaagu

SEQ ID NO: 940521 - RNA, 19 nt, Artificial Sequence
  Description of Artificial Sequence: Synthetic oligonucleotide
  Antisense strand to SEQ ID NO: 940520
acuuaacguauucuuaugu

SEQ ID NO: 940522 - RNA, 19 nt, Artificial Sequence
  Description of Artificial Sequence: Synthetic oligonucleotide
  Sense strand starting at position 3665 of SEQ ID NO: 913609
cuguuuagcaaguauagag

SEQ ID NO: 940523 - RNA, 19 nt, Artificial Sequence
  Description of Artificial Sequence: Synthetic oligonucleotide
  Antisense strand to SEQ ID NO: 940522
cucuauacuugcuaaacag

SEQ ID NO: 940524 - RNA, 19 nt, Artificial Sequence
  Description of Artificial Sequence: Synthetic oligonucleotide
  Sense strand starting at position 129 of SEQ ID NO: 913609
aguguaaauugacuuuaac

SEQ ID NO: 940525 - RNA, 19 nt, Artificial Sequence
  Description of Artificial Sequence: Synthetic oligonucleotide
  Antisense strand to SEQ ID NO: 940524
guuaaagucaauuuacacu

SEQ ID NO: 940526 - RNA, 19 nt, Artificial Sequence
  Description of Artificial Sequence: Synthetic oligonucleotide
  Sense strand starting at position 3740 of SEQ ID NO: 913609
gaaugauaacgccauuagc

SEQ ID NO: 940527 - RNA, 19 nt, Artificial Sequence
  Description of Artificial Sequence: Synthetic oligonucleotide
  Antisense strand to SEQ ID NO: 940526
gcuaauggcguuaucauuc

SEQ ID NO: 940528 - RNA, 19 nt, Artificial Sequence
  Description of Artificial Sequence: Synthetic oligonucleotide
  Sense strand starting at position 3326 of SEQ ID NO: 913609
guuggcuggcggagugauu

SEQ ID NO: 940529 - RNA, 19 nt, Artificial Sequence
  Description of Artificial Sequence: Synthetic oligonucleotide
  Antisense strand to SEQ ID NO: 940528
aaucacuccgccagccaac

SEQ ID NO: 940530 - RNA, 19 nt, Artificial Sequence
  Description of Artificial Sequence: Synthetic oligonucleotide
  Sense strand starting at position 3763 of SEQ ID NO: 913609
uggauagucacuggcuaaa

SEQ ID NO: 940531 - RNA, 19 nt, Artificial Sequence
  Description of Artificial Sequence: Synthetic oligonucleotide
  Antisense strand to SEQ ID NO: 940530
uuuagccagugacuaucca

SEQ ID NO: 940532 - RNA, 19 nt, Artificial Sequence
  Description of Artificial Sequence: Synthetic oligonucleotide
  Sense strand starting at position 477 of SEQ ID NO: 913609
aucuguuauagaggaguuu

SEQ ID NO: 940533 - RNA, 19 nt, Artificial Sequence
  Description of Artificial Sequence: Synthetic oligonucleotide
  Antisense strand to SEQ ID NO: 940532
aaacuccucuauaacagau

SEQ ID NO: 940534 - RNA, 19 nt, Artificial Sequence
  Description of Artificial Sequence: Synthetic oligonucleotide
  Sense strand starting at position 3827 of SEQ ID NO: 913609
guuaaucaguuccugaaau

SEQ ID NO: 940535 - RNA, 19 nt, Artificial Sequence
  Description of Artificial Sequence: Synthetic oligonucleotide
  Antisense strand to SEQ ID NO: 940534
auuucaggaacugauuaac

SEQ ID NO: 940536 - RNA, 19 nt, Artificial Sequence
  Description of Artificial Sequence: Synthetic oligonucleotide
  Sense strand starting at position 2634 of SEQ ID NO: 913609
gugaguuauuggaggagaa

SEQ ID NO: 940537 - RNA, 19 nt, Artificial Sequence
  Description of Artificial Sequence: Synthetic oligonucleotide
  Antisense strand to SEQ ID NO: 940536
uucuccuccaauaacucac

SEQ ID NO: 940538 - RNA, 19 nt, Artificial Sequence
  Description of Artificial Sequence: Synthetic oligonucleotide
  Sense strand starting at position 375 of SEQ ID NO: 913609
aucgucuagaugcaguaaa

SEQ ID NO: 940539 - RNA, 19 nt, Artificial Sequence
  Description of Artificial Sequence: Synthetic oligonucleotide
  Antisense strand to SEQ ID NO: 940538
uuuacugcaucuagacgau

SEQ ID NO: 940540 - RNA, 19 nt, Artificial Sequence
  Description of Artificial Sequence: Synthetic oligonucleotide
  Sense strand starting at position 1941 of SEQ ID NO: 913609
caguccucucucgggaaga

SEQ ID NO: 940541 - RNA, 19 nt, Artificial Sequence
  Description of Artificial Sequence: Synthetic oligonucleotide
  Antisense strand to SEQ ID NO: 940540
ucuucccgagagaggacug

SEQ ID NO: 940542 - RNA, 19 nt, Artificial Sequence
  Description of Artificial Sequence: Synthetic oligonucleotide
  Sense strand starting at position 567 of SEQ ID NO: 913609
gcaacugugccauaacuua

SEQ ID NO: 940543 - RNA, 19 nt, Artificial Sequence
  Description of Artificial Sequence: Synthetic oligonucleotide
  Antisense strand to SEQ ID NO: 940542
uaaguuauggcacaguugc

SEQ ID NO: 940544 - RNA, 19 nt, Artificial Sequence
  Description of Artificial Sequence: Synthetic oligonucleotide
  Sense strand starting at position 768 of SEQ ID NO: 913609
guacauuuaucucacagau

SEQ ID NO: 940545 - RNA, 19 nt, Artificial Sequence
  Description of Artificial Sequence: Synthetic oligonucleotide
  Antisense strand to SEQ ID NO: 940544
aucugugagauaaauguac

SEQ ID NO: 940546 - RNA, 19 nt, Artificial Sequence
  Description of Artificial Sequence: Synthetic oligonucleotide
  Sense strand starting at position 237 of SEQ ID NO: 913609
aaccaagaagucugugcua

SEQ ID NO: 940547 - RNA, 19 nt, Artificial Sequence
  Description of Artificial Sequence: Synthetic oligonucleotide
  Antisense strand to SEQ ID NO: 940546
uagcacagacuucuugguu

SEQ ID NO: 940548 - RNA, 19 nt, Artificial Sequence
  Description of Artificial Sequence: Synthetic oligonucleotide
  Sense strand starting at position 3113 of SEQ ID NO: 913609
ccuggucacccguaaaucu

SEQ ID NO: 940549 - RNA, 19 nt, Artificial Sequence
  Description of Artificial Sequence: Synthetic oligonucleotide
  Antisense strand to SEQ ID NO: 940548
agauuuacgggugaccagg

SEQ ID NO: 940550 - RNA, 19 nt, Artificial Sequence
  Description of Artificial Sequence: Synthetic oligonucleotide
  Sense strand starting at position 3761 of SEQ ID NO: 913609
aguggauagucacuggcua

SEQ ID NO: 940551 - RNA, 19 nt, Artificial Sequence
  Description of Artificial Sequence: Synthetic oligonucleotide
  Antisense strand to SEQ ID NO: 940550
uagccagugacuauccacu

SEQ ID NO: 940552 - RNA, 19 nt, Artificial Sequence
  Description of Artificial Sequence: Synthetic oligonucleotide
  Sense strand starting at position 2257 of SEQ ID NO: 913609
ggcgucacccaauaagguu

SEQ ID NO: 940553 - RNA, 19 nt, Artificial Sequence
  Description of Artificial Sequence: Synthetic oligonucleotide
  Antisense strand to SEQ ID NO: 940552
aaccuuauugggugacgcc

SEQ ID NO: 940554 - RNA, 19 nt, Artificial Sequence
  Description of Artificial Sequence: Synthetic oligonucleotide
  Sense strand starting at position 3762 of SEQ ID NO: 913609
guggauagucacuggcuaa

SEQ ID NO: 940555 - RNA, 19 nt, Artificial Sequence
  Description of Artificial Sequence: Synthetic oligonucleotide
  Antisense strand to SEQ ID NO: 940554
uuagccagugacuauccac

SEQ ID NO: 940556 - RNA, 19 nt, Artificial Sequence
  Description of Artificial Sequence: Synthetic oligonucleotide
  Sense strand starting at position 240 of SEQ ID NO: 913609
caagaagucugugcuauca

SEQ ID NO: 940557 - RNA, 19 nt, Artificial Sequence
  Description of Artificial Sequence: Synthetic oligonucleotide
  Antisense strand to SEQ ID NO: 940556
ugauagcacagacuucuug

SEQ ID NO: 940558 - RNA, 19 nt, Artificial Sequence
  Description of Artificial Sequence: Synthetic oligonucleotide
  Sense strand starting at position 2974 of SEQ ID NO: 913609
uggaccugcucuuuguaaa

SEQ ID NO: 940559 - RNA, 19 nt, Artificial Sequence
  Description of Artificial Sequence: Synthetic oligonucleotide
  Antisense strand to SEQ ID NO: 940558
uuuacaaagagcaggucca

SEQ ID NO: 940560 - RNA, 19 nt, Artificial Sequence
  Description of Artificial Sequence: Synthetic oligonucleotide
  Sense strand starting at position 119 of SEQ ID NO: 913609
gaaucuugccaguguaaau

SEQ ID NO: 940561 - RNA, 19 nt, Artificial Sequence
  Description of Artificial Sequence: Synthetic oligonucleotide
  Antisense strand to SEQ ID NO: 940560
auuuacacuggcaagauuc

SEQ ID NO: 940562 - RNA, 19 nt, Artificial Sequence
  Description of Artificial Sequence: Synthetic oligonucleotide
  Sense strand starting at position 2975 of SEQ ID NO: 913609
ggaccugcucuuuguaaau

SEQ ID NO: 940563 - RNA, 19 nt, Artificial Sequence
  Description of Artificial Sequence: Synthetic oligonucleotide
  Antisense strand to SEQ ID NO: 940562
auuuacaaagagcaggucc

SEQ ID NO: 940564 - RNA, 19 nt, Artificial Sequence
  Description of Artificial Sequence: Synthetic oligonucleotide
  Sense strand starting at position 686 of SEQ ID NO: 913609
ugccuacuuguugaagcua

SEQ ID NO: 940565 - RNA, 19 nt, Artificial Sequence
  Description of Artificial Sequence: Synthetic oligonucleotide
  Antisense strand to SEQ ID NO: 940564
uagcuucaacaaguaggca

SEQ ID NO: 940566 - RNA, 19 nt, Artificial Sequence
  Description of Artificial Sequence: Synthetic oligonucleotide
  Sense strand starting at position 682 of SEQ ID NO: 913610
ggccacagguucuuuauuu

SEQ ID NO: 940567 - RNA, 19 nt, Artificial Sequence
  Description of Artificial Sequence: Synthetic oligonucleotide
  Antisense strand to SEQ ID NO: 940566
aaauaaagaaccuguggcc

SEQ ID NO: 940568 - RNA, 19 nt, Artificial Sequence
  Description of Artificial Sequence: Synthetic oligonucleotide
  Sense strand starting at position 3522 of SEQ ID NO: 913610
gguugagucccacaucaaa

SEQ ID NO: 940569 - RNA, 19 nt, Artificial Sequence
  Description of Artificial Sequence: Synthetic oligonucleotide
  Antisense strand to SEQ ID NO: 940568
uuugaugugggacucaacc

SEQ ID NO: 940570 - RNA, 19 nt, Artificial Sequence
  Description of Artificial Sequence: Synthetic oligonucleotide
  Sense strand starting at position 2882 of SEQ ID NO: 913610
gugcguccucaguucuaga

SEQ ID NO: 940571 - RNA, 19 nt, Artificial Sequence
  Description of Artificial Sequence: Synthetic oligonucleotide
  Antisense strand to SEQ ID NO: 940570
ucuagaacugaggacgcac

SEQ ID NO: 940572 - RNA, 19 nt, Artificial Sequence
  Description of Artificial Sequence: Synthetic oligonucleotide
  Sense strand starting at position 3916 of SEQ ID NO: 913610
gugaguaaugaguacacca

SEQ ID NO: 940573 - RNA, 19 nt, Artificial Sequence
  Description of Artificial Sequence: Synthetic oligonucleotide
  Antisense strand to SEQ ID NO: 940572
ugguguacucauuacucac

SEQ ID NO: 940574 - RNA, 19 nt, Artificial Sequence
  Description of Artificial Sequence: Synthetic oligonucleotide
  Sense strand starting at position 3248 of SEQ ID NO: 913610
uguguaauggaccaucaug

SEQ ID NO: 940575 - RNA, 19 nt, Artificial Sequence
  Description of Artificial Sequence: Synthetic oligonucleotide
  Antisense strand to SEQ ID NO: 940574
caugaugguccauuacaca

SEQ ID NO: 940576 - RNA, 19 nt, Artificial Sequence
  Description of Artificial Sequence: Synthetic oligonucleotide
  Sense strand starting at position 2567 of SEQ ID NO: 913610
ugcuaugauguccaggaga

SEQ ID NO: 940577 - RNA, 19 nt, Artificial Sequence
  Description of Artificial Sequence: Synthetic oligonucleotide
  Antisense strand to SEQ ID NO: 940576
ucuccuggacaucauagca

SEQ ID NO: 940578 - RNA, 19 nt, Artificial Sequence
  Description of Artificial Sequence: Synthetic oligonucleotide
  Sense strand starting at position 3690 of SEQ ID NO: 913610
ggaccaccaugucuuaaga

SEQ ID NO: 940579 - RNA, 19 nt, Artificial Sequence
  Description of Artificial Sequence: Synthetic oligonucleotide
  Antisense strand to SEQ ID NO: 940578
ucuuaagacaugguggucc

SEQ ID NO: 940580 - RNA, 19 nt, Artificial Sequence
  Description of Artificial Sequence: Synthetic oligonucleotide
  Sense strand starting at position 314 of SEQ ID NO: 913610
agauguaaguucccagaga

SEQ ID NO: 940581 - RNA, 19 nt, Artificial Sequence
  Description of Artificial Sequence: Synthetic oligonucleotide
  Antisense strand to SEQ ID NO: 940580
ucucugggaacuuacaucu

SEQ ID NO: 940582 - RNA, 19 nt, Artificial Sequence
  Description of Artificial Sequence: Synthetic oligonucleotide
  Sense strand starting at position 3277 of SEQ ID NO: 913610
cucuccuugcuagauggaa

SEQ ID NO: 940583 - RNA, 19 nt, Artificial Sequence
  Description of Artificial Sequence: Synthetic oligonucleotide
  Antisense strand to SEQ ID NO: 940582
uuccaucuagcaaggagag

SEQ ID NO: 940584 - RNA, 19 nt, Artificial Sequence
  Description of Artificial Sequence: Synthetic oligonucleotide
  Sense strand starting at position 2601 of SEQ ID NO: 913610
ccuucucugggauauuagu

SEQ ID NO: 940585 - RNA, 19 nt, Artificial Sequence
  Description of Artificial Sequence: Synthetic oligonucleotide
  Antisense strand to SEQ ID NO: 940584
acuaauaucccagagaagg

SEQ ID NO: 940586 - RNA, 19 nt, Artificial Sequence
  Description of Artificial Sequence: Synthetic oligonucleotide
  Sense strand starting at position 3908 of SEQ ID NO: 913610
ggaggugggugaguaauga

SEQ ID NO: 940587 - RNA, 19 nt, Artificial Sequence
  Description of Artificial Sequence: Synthetic oligonucleotide
  Antisense strand to SEQ ID NO: 940586
ucauuacucacccaccucc

SEQ ID NO: 940588 - RNA, 19 nt, Artificial Sequence
  Description of Artificial Sequence: Synthetic oligonucleotide
  Sense strand starting at position 803 of SEQ ID NO: 913610
gauaguauaggccaugagu

SEQ ID NO: 940589 - RNA, 19 nt, Artificial Sequence
  Description of Artificial Sequence: Synthetic oligonucleotide
  Antisense strand to SEQ ID NO: 940588
acucauggccuauacuauc

SEQ ID NO: 940590 - RNA, 19 nt, Artificial Sequence
  Description of Artificial Sequence: Synthetic oligonucleotide
  Sense strand starting at position 2887 of SEQ ID NO: 913610
uccucaguucuagauacuu

SEQ ID NO: 940591 - RNA, 19 nt, Artificial Sequence
  Description of Artificial Sequence: Synthetic oligonucleotide
  Antisense strand to SEQ ID NO: 940590
aaguaucuagaacugagga

SEQ ID NO: 940592 - RNA, 19 nt, Artificial Sequence
  Description of Artificial Sequence: Synthetic oligonucleotide
  Sense strand starting at position 1407 of SEQ ID NO: 913610
agcugagggcauuaaggua

SEQ ID NO: 940593 - RNA, 19 nt, Artificial Sequence
  Description of Artificial Sequence: Synthetic oligonucleotide
  Antisense strand to SEQ ID NO: 940592
uaccuuaaugcccucagcu

SEQ ID NO: 940594 - RNA, 19 nt, Artificial Sequence
  Description of Artificial Sequence: Synthetic oligonucleotide
  Sense strand starting at position 737 of SEQ ID NO: 913610
gguacugaggauugaguua

SEQ ID NO: 940595 - RNA, 19 nt, Artificial Sequence
  Description of Artificial Sequence: Synthetic oligonucleotide
  Antisense strand to SEQ ID NO: 940594
uaacucaauccucaguacc

SEQ ID NO: 940596 - RNA, 19 nt, Artificial Sequence
  Description of Artificial Sequence: Synthetic oligonucleotide
  Sense strand starting at position 2857 of SEQ ID NO: 913610
guaucaugcgauuacagaa

SEQ ID NO: 940597 - RNA, 19 nt, Artificial Sequence
  Description of Artificial Sequence: Synthetic oligonucleotide
  Antisense strand to SEQ ID NO: 940596
uucuguaaucgcaugauac

SEQ ID NO: 940598 - RNA, 19 nt, Artificial Sequence
  Description of Artificial Sequence: Synthetic oligonucleotide
  Sense strand starting at position 646 of SEQ ID NO: 913610
cacuauguccuuugggaaa

SEQ ID NO: 940599 - RNA, 19 nt, Artificial Sequence
  Description of Artificial Sequence: Synthetic oligonucleotide
  Antisense strand to SEQ ID NO: 940598
uuucccaaaggacauagug

SEQ ID NO: 940600 - RNA, 19 nt, Artificial Sequence
  Description of Artificial Sequence: Synthetic oligonucleotide
  Sense strand starting at position 2035 of SEQ ID NO: 913610
cccagaucucgcguggcuu

SEQ ID NO: 940601 - RNA, 19 nt, Artificial Sequence
  Description of Artificial Sequence: Synthetic oligonucleotide
  Antisense strand to SEQ ID NO: 940600
aagccacgcgagaucuggg

SEQ ID NO: 940602 - RNA, 19 nt, Artificial Sequence
  Description of Artificial Sequence: Synthetic oligonucleotide
  Sense strand starting at position 3814 of SEQ ID NO: 913610
ggaauagcugcucaguaaa

SEQ ID NO: 940603 - RNA, 19 nt, Artificial Sequence
  Description of Artificial Sequence: Synthetic oligonucleotide
  Antisense strand to SEQ ID NO: 940602
uuuacugagcagcuauucc

SEQ ID NO: 940604 - RNA, 19 nt, Artificial Sequence
  Description of Artificial Sequence: Synthetic oligonucleotide
  Sense strand starting at position 2977 of SEQ ID NO: 913610
cuaagcagaucaguuacaa

SEQ ID NO: 940605 - RNA, 19 nt, Artificial Sequence
  Description of Artificial Sequence: Synthetic oligonucleotide
  Antisense strand to SEQ ID NO: 940604
uuguaacugaucugcuuag

SEQ ID NO: 940606 - RNA, 19 nt, Artificial Sequence
  Description of Artificial Sequence: Synthetic oligonucleotide
  Sense strand starting at position 3759 of SEQ ID NO: 913610
cgacuugauuugucuuguu

SEQ ID NO: 940607 - RNA, 19 nt, Artificial Sequence
  Description of Artificial Sequence: Synthetic oligonucleotide
  Antisense strand to SEQ ID NO: 940606
aacaagacaaaucaagucg

SEQ ID NO: 940608 - RNA, 19 nt, Artificial Sequence
  Description of Artificial Sequence: Synthetic oligonucleotide
  Sense strand starting at position 2645 of SEQ ID NO: 913610
aaaccaguguggguugaaa

SEQ ID NO: 940609 - RNA, 19 nt, Artificial Sequence
  Description of Artificial Sequence: Synthetic oligonucleotide
  Antisense strand to SEQ ID NO: 940608
uuucaacccacacugguuu

SEQ ID NO: 940610 - RNA, 19 nt, Artificial Sequence
  Description of Artificial Sequence: Synthetic oligonucleotide
  Sense strand starting at position 2488 of SEQ ID NO: 913610
uggcgaucucaggaauucu

SEQ ID NO: 940611 - RNA, 19 nt, Artificial Sequence
  Description of Artificial Sequence: Synthetic oligonucleotide
  Antisense strand to SEQ ID NO: 940610
agaauuccugagaucgcca

SEQ ID NO: 940612 - RNA, 19 nt, Artificial Sequence
  Description of Artificial Sequence: Synthetic oligonucleotide
  Sense strand starting at position 3666 of SEQ ID NO: 913610
gaagauugcgaguauccug

SEQ ID NO: 940613 - RNA, 19 nt, Artificial Sequence
  Description of Artificial Sequence: Synthetic oligonucleotide
  Antisense strand to SEQ ID NO: 940612
caggauacucgcaaucuuc

SEQ ID NO: 940614 - RNA, 19 nt, Artificial Sequence
  Description of Artificial Sequence: Synthetic oligonucleotide
  Sense strand starting at position 614 of SEQ ID NO: 913610
acacaaaugugguuugauu

SEQ ID NO: 940615 - RNA, 19 nt, Artificial Sequence
  Description of Artificial Sequence: Synthetic oligonucleotide
  Antisense strand to SEQ ID NO: 940614
aaucaaaccacauuugugu

SEQ ID NO: 940616 - RNA, 19 nt, Artificial Sequence
  Description of Artificial Sequence: Synthetic oligonucleotide
  Sense strand starting at position 2693 of SEQ ID NO: 913610
gugguuugggcagaccuaa

SEQ ID NO: 940617 - RNA, 19 nt, Artificial Sequence
  Description of Artificial Sequence: Synthetic oligonucleotide
  Antisense strand to SEQ ID NO: 940616
uuaggucugcccaaaccac

SEQ ID NO: 940618 - RNA, 19 nt, Artificial Sequence
  Description of Artificial Sequence: Synthetic oligonucleotide
  Sense strand starting at position 3687 of SEQ ID NO: 913610
cugggaccaccaugucuua

SEQ ID NO: 940619 - RNA, 19 nt, Artificial Sequence
  Description of Artificial Sequence: Synthetic oligonucleotide
  Antisense strand to SEQ ID NO: 940618
uaagacaugguggucccag

SEQ ID NO: 940620 - RNA, 19 nt, Artificial Sequence
  Description of Artificial Sequence: Synthetic oligonucleotide
  Sense strand starting at position 3962 of SEQ ID NO: 913610
caggaauaaugagaaauag

SEQ ID NO: 940621 - RNA, 19 nt, Artificial Sequence
  Description of Artificial Sequence: Synthetic oligonucleotide
  Antisense strand to SEQ ID NO: 940620
cuauuucucauuauuccug

SEQ ID NO: 940622 - RNA, 19 nt, Artificial Sequence
  Description of Artificial Sequence: Synthetic oligonucleotide
  Sense strand starting at position 1063 of SEQ ID NO: 913610
agguaugugccagaucuca

SEQ ID NO: 940623 - RNA, 19 nt, Artificial Sequence
  Description of Artificial Sequence: Synthetic oligonucleotide
  Antisense strand to SEQ ID NO: 940622
ugagaucuggcacauaccu

SEQ ID NO: 940624 - RNA, 19 nt, Artificial Sequence
  Description of Artificial Sequence: Synthetic oligonucleotide
  Sense strand starting at position 3835 of SEQ ID NO: 913610
uuuguugagugauugaaug

SEQ ID NO: 940625 - RNA, 19 nt, Artificial Sequence
  Description of Artificial Sequence: Synthetic oligonucleotide
  Antisense strand to SEQ ID NO: 940624
cauucaaucacucaacaaa

SEQ ID NO: 940626 - RNA, 19 nt, Artificial Sequence
  Description of Artificial Sequence: Synthetic oligonucleotide
  Sense strand starting at position 1274 of SEQ ID NO: 913610
gucagauauuaacuggcau

SEQ ID NO: 940627 - RNA, 19 nt, Artificial Sequence
  Description of Artificial Sequence: Synthetic oligonucleotide
  Antisense strand to SEQ ID NO: 940626
augccaguuaauaucugac

SEQ ID NO: 940628 - RNA, 19 nt, Artificial Sequence
  Description of Artificial Sequence: Synthetic oligonucleotide
  Sense strand starting at position 242 of SEQ ID NO: 913610
agcacacagucaucuauca

SEQ ID NO: 940629 - RNA, 19 nt, Artificial Sequence
  Description of Artificial Sequence: Synthetic oligonucleotide
  Antisense strand to SEQ ID NO: 940628
ugauagaugacugugugcu

SEQ ID NO: 940630 - RNA, 19 nt, Artificial Sequence
  Description of Artificial Sequence: Synthetic oligonucleotide
  Sense strand starting at position 422 of SEQ ID NO: 913610
acacuaaguagcugugaga

SEQ ID NO: 940631 - RNA, 19 nt, Artificial Sequence
  Description of Artificial Sequence: Synthetic oligonucleotide
  Antisense strand to SEQ ID NO: 940630
ucucacagcuacuuagugu

SEQ ID NO: 940632 - RNA, 19 nt, Artificial Sequence
  Description of Artificial Sequence: Synthetic oligonucleotide
  Sense strand starting at position 3055 of SEQ ID NO: 913610
ccgagucacuuaguacaaa

SEQ ID NO: 940633 - RNA, 19 nt, Artificial Sequence
  Description of Artificial Sequence: Synthetic oligonucleotide
  Antisense strand to SEQ ID NO: 940632
uuuguacuaagugacucgg

SEQ ID NO: 940634 - RNA, 19 nt, Artificial Sequence
  Description of Artificial Sequence: Synthetic oligonucleotide
  Sense strand starting at position 2990 of SEQ ID NO: 913610
uuacaagaucugugccaca

SEQ ID NO: 940635 - RNA, 19 nt, Artificial Sequence
  Description of Artificial Sequence: Synthetic oligonucleotide
  Antisense strand to SEQ ID NO: 940634
uguggcacagaucuuguaa

SEQ ID NO: 940636 - RNA, 19 nt, Artificial Sequence
  Description of Artificial Sequence: Synthetic oligonucleotide
  Sense strand starting at position 3303 of SEQ ID NO: 913610
gacgguagaaucugagucu

SEQ ID NO: 940637 - RNA, 19 nt, Artificial Sequence
  Description of Artificial Sequence: Synthetic oligonucleotide
  Antisense strand to SEQ ID NO: 940636
agacucagauucuaccguc

SEQ ID NO: 940638 - RNA, 19 nt, Artificial Sequence
  Description of Artificial Sequence: Synthetic oligonucleotide
  Sense strand starting at position 3306 of SEQ ID NO: 913610
gguagaaucugagucugug

SEQ ID NO: 940639 - RNA, 19 nt, Artificial Sequence
  Description of Artificial Sequence: Synthetic oligonucleotide
  Antisense strand to SEQ ID NO: 940638
cacagacucagauucuacc

SEQ ID NO: 940640 - RNA, 19 nt, Artificial Sequence
  Description of Artificial Sequence: Synthetic oligonucleotide
  Sense strand starting at position 3240 of SEQ ID NO: 913610
acugucuguguguaaugga

SEQ ID NO: 940641 - RNA, 19 nt, Artificial Sequence
  Description of Artificial Sequence: Synthetic oligonucleotide
  Antisense strand to SEQ ID NO: 940640
uccauuacacacagacagu

SEQ ID NO: 940642 - RNA, 19 nt, Artificial Sequence
  Description of Artificial Sequence: Synthetic oligonucleotide
  Sense strand starting at position 1622 of SEQ ID NO: 913610
gcuccuucccuccagaagu

SEQ ID NO: 940643 - RNA, 19 nt, Artificial Sequence
  Description of Artificial Sequence: Synthetic oligonucleotide
  Antisense strand to SEQ ID NO: 940642
acuucuggagggaaggagc

SEQ ID NO: 940644 - RNA, 19 nt, Artificial Sequence
  Description of Artificial Sequence: Synthetic oligonucleotide
  Sense strand starting at position 731 of SEQ ID NO: 913610
cgcagugguacugaggauu

SEQ ID NO: 940645 - RNA, 19 nt, Artificial Sequence
  Description of Artificial Sequence: Synthetic oligonucleotide
  Antisense strand to SEQ ID NO: 940644
aauccucaguaccacugcg

SEQ ID NO: 940646 - RNA, 19 nt, Artificial Sequence
  Description of Artificial Sequence: Synthetic oligonucleotide
  Sense strand starting at position 649 of SEQ ID NO: 913611
aggagacagucuccaugau

SEQ ID NO: 940647 - RNA, 19 nt, Artificial Sequence
  Description of Artificial Sequence: Synthetic oligonucleotide
  Antisense strand to SEQ ID NO: 940646
aucauggagacugucuccu

SEQ ID NO: 940648 - RNA, 19 nt, Artificial Sequence
  Description of Artificial Sequence: Synthetic oligonucleotide
  Sense strand starting at position 2404 of SEQ ID NO: 913611
ggagaaacucagcaaugcu

SEQ ID NO: 940649 - RNA, 19 nt, Artificial Sequence
  Description of Artificial Sequence: Synthetic oligonucleotide
  Antisense strand to SEQ ID NO: 940648
agcauugcugaguuucucc

SEQ ID NO: 940650 - RNA, 19 nt, Artificial Sequence
  Description of Artificial Sequence: Synthetic oligonucleotide
  Sense strand starting at position 591 of SEQ ID NO: 913611
ccagguuuagaauaaguuu

SEQ ID NO: 940651 - RNA, 19 nt, Artificial Sequence
  Description of Artificial Sequence: Synthetic oligonucleotide
  Antisense strand to SEQ ID NO: 940650
aaacuuauucuaaaccugg

SEQ ID NO: 940652 - RNA, 19 nt, Artificial Sequence
  Description of Artificial Sequence: Synthetic oligonucleotide
  Sense strand starting at position 119 of SEQ ID NO: 913611
auguuugugcuguugaguu

SEQ ID NO: 940653 - RNA, 19 nt, Artificial Sequence
  Description of Artificial Sequence: Synthetic oligonucleotide
  Antisense strand to SEQ ID NO: 940652
aacucaacagcacaaacau

SEQ ID NO: 940654 - RNA, 19 nt, Artificial Sequence
  Description of Artificial Sequence: Synthetic oligonucleotide
  Sense strand starting at position 1589 of SEQ ID NO: 913611
gggaccgaacaaugugaau

SEQ ID NO: 940655 - RNA, 19 nt, Artificial Sequence
  Description of Artificial Sequence: Synthetic oligonucleotide
  Antisense strand to SEQ ID NO: 940654
auucacauuguucgguccc

SEQ ID NO: 940656 - RNA, 19 nt, Artificial Sequence
  Description of Artificial Sequence: Synthetic oligonucleotide
  Sense strand starting at position 2939 of SEQ ID NO: 913611
auguauagucagcaauaaa

SEQ ID NO: 940657 - RNA, 19 nt, Artificial Sequence
  Description of Artificial Sequence: Synthetic oligonucleotide
  Antisense strand to SEQ ID NO: 940656
uuuauugcugacuauacau

SEQ ID NO: 940658 - RNA, 19 nt, Artificial Sequence
  Description of Artificial Sequence: Synthetic oligonucleotide
  Sense strand starting at position 408 of SEQ ID NO: 913611
guaagacaauuguuuagaa

SEQ ID NO: 940659 - RNA, 19 nt, Artificial Sequence
  Description of Artificial Sequence: Synthetic oligonucleotide
  Antisense strand to SEQ ID NO: 940658
uucuaaacaauugucuuac

SEQ ID NO: 940660 - RNA, 19 nt, Artificial Sequence
  Description of Artificial Sequence: Synthetic oligonucleotide
  Sense strand starting at position 134 of SEQ ID NO: 913611
aguuaaagagcuuacaagu

SEQ ID NO: 940661 - RNA, 19 nt, Artificial Sequence
  Description of Artificial Sequence: Synthetic oligonucleotide
  Antisense strand to SEQ ID NO: 940660
acuuguaagcucuuuaacu

SEQ ID NO: 940662 - RNA, 19 nt, Artificial Sequence
  Description of Artificial Sequence: Synthetic oligonucleotide
  Sense strand starting at position 2683 of SEQ ID NO: 913611
gaggaauucuaguuuccau

SEQ ID NO: 940663 - RNA, 19 nt, Artificial Sequence
  Description of Artificial Sequence: Synthetic oligonucleotide
  Antisense strand to SEQ ID NO: 940662
auggaaacuagaauuccuc

SEQ ID NO: 940664 - RNA, 19 nt, Artificial Sequence
  Description of Artificial Sequence: Synthetic oligonucleotide
  Sense strand starting at position 2757 of SEQ ID NO: 913611
gcaccagcacaguaaagau

SEQ ID NO: 940665 - RNA, 19 nt, Artificial Sequence
  Description of Artificial Sequence: Synthetic oligonucleotide
  Antisense strand to SEQ ID NO: 940664
aucuuuacugugcuggugc

SEQ ID NO: 940666 - RNA, 19 nt, Artificial Sequence
  Description of Artificial Sequence: Synthetic oligonucleotide
  Sense strand starting at position 1531 of SEQ ID NO: 913611
ggcauccuucuuuaugaca

SEQ ID NO: 940667 - RNA, 19 nt, Artificial Sequence
  Description of Artificial Sequence: Synthetic oligonucleotide
  Antisense strand to SEQ ID NO: 940666
ugucauaaagaaggaugcc

SEQ ID NO: 940668 - RNA, 19 nt, Artificial Sequence
  Description of Artificial Sequence: Synthetic oligonucleotide
  Sense strand starting at position 2830 of SEQ ID NO: 913611
cuggaauagccacagcuau

SEQ ID NO: 940669 - RNA, 19 nt, Artificial Sequence
  Description of Artificial Sequence: Synthetic oligonucleotide
  Antisense strand to SEQ ID NO: 940668
auagcuguggcuauuccag

SEQ ID NO: 940670 - RNA, 19 nt, Artificial Sequence
  Description of Artificial Sequence: Synthetic oligonucleotide
  Sense strand starting at position 20 of SEQ ID NO: 913611
ggauauccugucuaccuuu

SEQ ID NO: 940671 - RNA, 19 nt, Artificial Sequence
  Description of Artificial Sequence: Synthetic oligonucleotide
  Antisense strand to SEQ ID NO: 940670
aaagguagacaggauaucc

SEQ ID NO: 940672 - RNA, 19 nt, Artificial Sequence
  Description of Artificial Sequence: Synthetic oligonucleotide
  Sense strand starting at position 1759 of SEQ ID NO: 913611
gggagccugacugguaaga

SEQ ID NO: 940673 - RNA, 19 nt, Artificial Sequence
  Description of Artificial Sequence: Synthetic oligonucleotide
  Antisense strand to SEQ ID NO: 940672
ucuuaccagucaggcuccc

SEQ ID NO: 940674 - RNA, 19 nt, Artificial Sequence
  Description of Artificial Sequence: Synthetic oligonucleotide
  Sense strand starting at position 129 of SEQ ID NO: 913611
uguugaguuaaagagcuua

SEQ ID NO: 940675 - RNA, 19 nt, Artificial Sequence
  Description of Artificial Sequence: Synthetic oligonucleotide
  Antisense strand to SEQ ID NO: 940674
uaagcucuuuaacucaaca

SEQ ID NO: 940676 - RNA, 19 nt, Artificial Sequence
  Description of Artificial Sequence: Synthetic oligonucleotide
  Sense strand starting at position 2912 of SEQ ID NO: 913611
cuguuuauuugagagaaga

SEQ ID NO: 940677 - RNA, 19 nt, Artificial Sequence
  Description of Artificial Sequence: Synthetic oligonucleotide
  Antisense strand to SEQ ID NO: 940676
ucuucucucaaauaaacag

SEQ ID NO: 940678 - RNA, 19 nt, Artificial Sequence
  Description of Artificial Sequence: Synthetic oligonucleotide
  Sense strand starting at position 3655 of SEQ ID NO: 913611
gccuaucaugguuauuaua

SEQ ID NO: 940679 - RNA, 19 nt, Artificial Sequence
  Description of Artificial Sequence: Synthetic oligonucleotide
  Antisense strand to SEQ ID NO: 940678
uauaauaaccaugauaggc

SEQ ID NO: 940680 - RNA, 19 nt, Artificial Sequence
  Description of Artificial Sequence: Synthetic oligonucleotide
  Sense strand starting at position 1257 of SEQ ID NO: 913611
aucuuaugugaccagccau

SEQ ID NO: 940681 - RNA, 19 nt, Artificial Sequence
  Description of Artificial Sequence: Synthetic oligonucleotide
  Antisense strand to SEQ ID NO: 940680
auggcuggucacauaagau

SEQ ID NO: 940682 - RNA, 19 nt, Artificial Sequence
  Description of Artificial Sequence: Synthetic oligonucleotide
  Sense strand starting at position 3228 of SEQ ID NO: 913611
ugaauucugccagagcuac

SEQ ID NO: 940683 - RNA, 19 nt, Artificial Sequence
  Description of Artificial Sequence: Synthetic oligonucleotide
  Antisense strand to SEQ ID NO: 940682
guagcucuggcagaauuca

SEQ ID NO: 940684 - RNA, 19 nt, Artificial Sequence
  Description of Artificial Sequence: Synthetic oligonucleotide
  Sense strand starting at position 1220 of SEQ ID NO: 913611
gcuugacauaguuggaaca

SEQ ID NO: 940685 - RNA, 19 nt, Artificial Sequence
  Description of Artificial Sequence: Synthetic oligonucleotide
  Antisense strand to SEQ ID NO: 940684
uguuccaacuaugucaagc

SEQ ID NO: 940686 - RNA, 19 nt, Artificial Sequence
  Description of Artificial Sequence: Synthetic oligonucleotide
  Sense strand starting at position 2935 of SEQ ID NO: 913611
acaaauguauagucagcaa

SEQ ID NO: 940687 - RNA, 19 nt, Artificial Sequence
  Description of Artificial Sequence: Synthetic oligonucleotide
  Antisense strand to SEQ ID NO: 940686
uugcugacuauacauuugu

SEQ ID NO: 940688 - RNA, 19 nt, Artificial Sequence
  Description of Artificial Sequence: Synthetic oligonucleotide
  Sense strand starting at position 1047 of SEQ ID NO: 913611
ugguguuugugcauauggu

SEQ ID NO: 940689 - RNA, 19 nt, Artificial Sequence
  Description of Artificial Sequence: Synthetic oligonucleotide
  Antisense strand to SEQ ID NO: 940688
accauaugcacaaacacca

SEQ ID NO: 940690 - RNA, 19 nt, Artificial Sequence
  Description of Artificial Sequence: Synthetic oligonucleotide
  Sense strand starting at position 2767 of SEQ ID NO: 913611
aguaaagauccagggcagu

SEQ ID NO: 940691 - RNA, 19 nt, Artificial Sequence
  Description of Artificial Sequence: Synthetic oligonucleotide
  Antisense strand to SEQ ID NO: 940690
acugcccuggaucuuuacu

SEQ ID NO: 940692 - RNA, 19 nt, Artificial Sequence
  Description of Artificial Sequence: Synthetic oligonucleotide
  Sense strand starting at position 2518 of SEQ ID NO: 913611
guagaagccucuccagaau

SEQ ID NO: 940693 - RNA, 19 nt, Artificial Sequence
  Description of Artificial Sequence: Synthetic oligonucleotide
  Antisense strand to SEQ ID NO: 940692
auucuggagaggcuucuac

SEQ ID NO: 940694 - RNA, 19 nt, Artificial Sequence
  Description of Artificial Sequence: Synthetic oligonucleotide
  Sense strand starting at position 2882 of SEQ ID NO: 913611
cuauauugugcucaguaaa

SEQ ID NO: 940695 - RNA, 19 nt, Artificial Sequence
  Description of Artificial Sequence: Synthetic oligonucleotide
  Antisense strand to SEQ ID NO: 940694
uuuacugagcacaauauag

SEQ ID NO: 940696 - RNA, 19 nt, Artificial Sequence
  Description of Artificial Sequence: Synthetic oligonucleotide
  Sense strand starting at position 2910 of SEQ ID NO: 913611
cucuguuuauuugagagaa

SEQ ID NO: 940697 - RNA, 19 nt, Artificial Sequence
  Description of Artificial Sequence: Synthetic oligonucleotide
  Antisense strand to SEQ ID NO: 940696
uucucucaaauaaacagag

SEQ ID NO: 940698 - RNA, 19 nt, Artificial Sequence
  Description of Artificial Sequence: Synthetic oligonucleotide
  Sense strand starting at position 1529 of SEQ ID NO: 913611
auggcauccuucuuuauga

SEQ ID NO: 940699 - RNA, 19 nt, Artificial Sequence
  Description of Artificial Sequence: Synthetic oligonucleotide
  Antisense strand to SEQ ID NO: 940698
ucauaaagaaggaugccau

SEQ ID NO: 940700 - RNA, 19 nt, Artificial Sequence
  Description of Artificial Sequence: Synthetic oligonucleotide
  Sense strand starting at position 19 of SEQ ID NO: 913611
uggauauccugucuaccuu

SEQ ID NO: 940701 - RNA, 19 nt, Artificial Sequence
  Description of Artificial Sequence: Synthetic oligonucleotide
  Antisense strand to SEQ ID NO: 940700
aagguagacaggauaucca

SEQ ID NO: 940702 - RNA, 19 nt, Artificial Sequence
  Description of Artificial Sequence: Synthetic oligonucleotide
  Sense strand starting at position 2420 of SEQ ID NO: 913611
gcugucuaucuagauucuu

SEQ ID NO: 940703 - RNA, 19 nt, Artificial Sequence
  Description of Artificial Sequence: Synthetic oligonucleotide
  Antisense strand to SEQ ID NO: 940702
aagaaucuagauagacagc

SEQ ID NO: 940704 - RNA, 19 nt, Artificial Sequence
  Description of Artificial Sequence: Synthetic oligonucleotide
  Sense strand starting at position 2958 of SEQ ID NO: 913611
caguuucugccauagaguc

SEQ ID NO: 940705 - RNA, 19 nt, Artificial Sequence
  Description of Artificial Sequence: Synthetic oligonucleotide
  Antisense strand to SEQ ID NO: 940704
gacucuauggcagaaacug

SEQ ID NO: 940706 - RNA, 19 nt, Artificial Sequence
  Description of Artificial Sequence: Synthetic oligonucleotide
  Sense strand starting at position 3654 of SEQ ID NO: 913611
ggccuaucaugguuauuau

SEQ ID NO: 940707 - RNA, 19 nt, Artificial Sequence
  Description of Artificial Sequence: Synthetic oligonucleotide
  Antisense strand to SEQ ID NO: 940706
auaauaaccaugauaggcc

SEQ ID NO: 940708 - RNA, 19 nt, Artificial Sequence
  Description of Artificial Sequence: Synthetic oligonucleotide
  Sense strand starting at position 2840 of SEQ ID NO: 913611
cacagcuaucugcgaaaga

SEQ ID NO: 940709 - RNA, 19 nt, Artificial Sequence
  Description of Artificial Sequence: Synthetic oligonucleotide
  Antisense strand to SEQ ID NO: 940708
ucuuucgcagauagcugug

SEQ ID NO: 940710 - RNA, 19 nt, Artificial Sequence
  Description of Artificial Sequence: Synthetic oligonucleotide
  Sense strand starting at position 3268 of SEQ ID NO: 913611
acauguagacaccguuuau

SEQ ID NO: 940711 - RNA, 19 nt, Artificial Sequence
  Description of Artificial Sequence: Synthetic oligonucleotide
  Antisense strand to SEQ ID NO: 940710
auaaacggugucuacaugu

SEQ ID NO: 940712 - RNA, 19 nt, Artificial Sequence
  Description of Artificial Sequence: Synthetic oligonucleotide
  Sense strand starting at position 624 of SEQ ID NO: 913611
agagguguuccuugagagc

SEQ ID NO: 940713 - RNA, 19 nt, Artificial Sequence
  Description of Artificial Sequence: Synthetic oligonucleotide
  Antisense strand to SEQ ID NO: 940712
gcucucaaggaacaccucu

SEQ ID NO: 940714 - RNA, 19 nt, Artificial Sequence
  Description of Artificial Sequence: Synthetic oligonucleotide
  Sense strand starting at position 2350 of SEQ ID NO: 913611
guagaaauauaacaggaua

SEQ ID NO: 940715 - RNA, 19 nt, Artificial Sequence
  Description of Artificial Sequence: Synthetic oligonucleotide
  Antisense strand to SEQ ID NO: 940714
uauccuguuauauuucuac

SEQ ID NO: 940716 - RNA, 19 nt, Artificial Sequence
  Description of Artificial Sequence: Synthetic oligonucleotide
  Sense strand starting at position 1035 of SEQ ID NO: 913611
gacuauuaaggcugguguu

SEQ ID NO: 940717 - RNA, 19 nt, Artificial Sequence
  Description of Artificial Sequence: Synthetic oligonucleotide
  Antisense strand to SEQ ID NO: 940716
aacaccagccuuaauaguc

SEQ ID NO: 940718 - RNA, 19 nt, Artificial Sequence
  Description of Artificial Sequence: Synthetic oligonucleotide
  Sense strand starting at position 3652 of SEQ ID NO: 913611
cuggccuaucaugguuauu

SEQ ID NO: 940719 - RNA, 19 nt, Artificial Sequence
  Description of Artificial Sequence: Synthetic oligonucleotide
  Antisense strand to SEQ ID NO: 940718
aauaaccaugauaggccag

SEQ ID NO: 940720 - RNA, 19 nt, Artificial Sequence
  Description of Artificial Sequence: Synthetic oligonucleotide
  Sense strand starting at position 1036 of SEQ ID NO: 913611
acuauuaaggcugguguuu

SEQ ID NO: 940721 - RNA, 19 nt, Artificial Sequence
  Description of Artificial Sequence: Synthetic oligonucleotide
  Antisense strand to SEQ ID NO: 940720
aaacaccagccuuaauagu

SEQ ID NO: 940722 - RNA, 19 nt, Artificial Sequence
  Description of Artificial Sequence: Synthetic oligonucleotide
  Sense strand starting at position 366 of SEQ ID NO: 913611
acuauugugucuuucuuua

SEQ ID NO: 940723 - RNA, 19 nt, Artificial Sequence
  Description of Artificial Sequence: Synthetic oligonucleotide
  Antisense strand to SEQ ID NO: 940722
uaaagaaagacacaauagu

SEQ ID NO: 940724 - RNA, 19 nt, Artificial Sequence
  Description of Artificial Sequence: Synthetic oligonucleotide
  Sense strand starting at position 364 of SEQ ID NO: 913611
acacuauugugucuuucuu

SEQ ID NO: 940725 - RNA, 19 nt, Artificial Sequence
  Description of Artificial Sequence: Synthetic oligonucleotide
  Antisense strand to SEQ ID NO: 940724
aagaaagacacaauagugu

SEQ ID NO: 940726 - RNA, 19 nt, Artificial Sequence
  Description of Artificial Sequence: Synthetic oligonucleotide
  Sense strand starting at position 2979 of SEQ ID NO: 913612
aaugaauauuggucugaua

SEQ ID NO: 940727 - RNA, 19 nt, Artificial Sequence
  Description of Artificial Sequence: Synthetic oligonucleotide
  Antisense strand to SEQ ID NO: 940726
uaucagaccaauauucauu

SEQ ID NO: 940728 - RNA, 19 nt, Artificial Sequence
  Description of Artificial Sequence: Synthetic oligonucleotide
  Sense strand starting at position 2378 of SEQ ID NO: 913612
cucagacauugagucuaaa

SEQ ID NO: 940729 - RNA, 19 nt, Artificial Sequence
  Description of Artificial Sequence: Synthetic oligonucleotide
  Antisense strand to SEQ ID NO: 940728
uuuagacucaaugucugag

SEQ ID NO: 940730 - RNA, 19 nt, Artificial Sequence
  Description of Artificial Sequence: Synthetic oligonucleotide
  Sense strand starting at position 2108 of SEQ ID NO: 913612
ugaugaaagucauccacca

SEQ ID NO: 940731 - RNA, 19 nt, Artificial Sequence
  Description of Artificial Sequence: Synthetic oligonucleotide
  Antisense strand to SEQ ID NO: 940730
ugguggaugacuuucauca

SEQ ID NO: 940732 - RNA, 19 nt, Artificial Sequence
  Description of Artificial Sequence: Synthetic oligonucleotide
  Sense strand starting at position 3054 of SEQ ID NO: 913612
accaacaauugguuuauga

SEQ ID NO: 940733 - RNA, 19 nt, Artificial Sequence
  Description of Artificial Sequence: Synthetic oligonucleotide
  Antisense strand to SEQ ID NO: 940732
ucauaaaccaauuguuggu

SEQ ID NO: 940734 - RNA, 19 nt, Artificial Sequence
  Description of Artificial Sequence: Synthetic oligonucleotide
  Sense strand starting at position 3131 of SEQ ID NO: 913612
gugcgaauuacagaaugga

SEQ ID NO: 940735 - RNA, 19 nt, Artificial Sequence
  Description of Artificial Sequence: Synthetic oligonucleotide
  Antisense strand to SEQ ID NO: 940734
uccauucuguaauucgcac

SEQ ID NO: 940736 - RNA, 19 nt, Artificial Sequence
  Description of Artificial Sequence: Synthetic oligonucleotide
  Sense strand starting at position 2013 of SEQ ID NO: 913612
augaguuuccugcaggaga

SEQ ID NO: 940737 - RNA, 19 nt, Artificial Sequence
  Description of Artificial Sequence: Synthetic oligonucleotide
  Antisense strand to SEQ ID NO: 940736
ucuccugcaggaaacucau

SEQ ID NO: 940738 - RNA, 19 nt, Artificial Sequence
  Description of Artificial Sequence: Synthetic oligonucleotide
  Sense strand starting at position 2978 of SEQ ID NO: 913612
uaaugaauauuggucugau

SEQ ID NO: 940739 - RNA, 19 nt, Artificial Sequence
  Description of Artificial Sequence: Synthetic oligonucleotide
  Antisense strand to SEQ ID NO: 940738
aucagaccaauauucauua

SEQ ID NO: 940740 - RNA, 19 nt, Artificial Sequence
  Description of Artificial Sequence: Synthetic oligonucleotide
  Sense strand starting at position 2153 of SEQ ID NO: 913612
gaagucuaaugagcaugaa

SEQ ID NO: 940741 - RNA, 19 nt, Artificial Sequence
  Description of Artificial Sequence: Synthetic oligonucleotide
  Antisense strand to SEQ ID NO: 940740
uucaugcucauuagacuuc

SEQ ID NO: 940742 - RNA, 19 nt, Artificial Sequence
  Description of Artificial Sequence: Synthetic oligonucleotide
  Sense strand starting at position 2586 of SEQ ID NO: 913612
guuuccuaguucuugauuu

SEQ ID NO: 940743 - RNA, 19 nt, Artificial Sequence
  Description of Artificial Sequence: Synthetic oligonucleotide
  Antisense strand to SEQ ID NO: 940742
aaaucaagaacuaggaaac

SEQ ID NO: 940744 - RNA, 19 nt, Artificial Sequence
  Description of Artificial Sequence: Synthetic oligonucleotide
  Sense strand starting at position 2178 of SEQ ID NO: 913612
cauccagaccgucaagauu

SEQ ID NO: 940745 - RNA, 19 nt, Artificial Sequence
  Description of Artificial Sequence: Synthetic oligonucleotide
  Antisense strand to SEQ ID NO: 940744
aaucuugacggucuggaug

SEQ ID NO: 940746 - RNA, 19 nt, Artificial Sequence
  Description of Artificial Sequence: Synthetic oligonucleotide
  Sense strand starting at position 81 of SEQ ID NO: 913612
ugaacuugagugcaaagua

SEQ ID NO: 940747 - RNA, 19 nt, Artificial Sequence
  Description of Artificial Sequence: Synthetic oligonucleotide
  Antisense strand to SEQ ID NO: 940746
uacuuugcacucaaguuca

SEQ ID NO: 940748 - RNA, 19 nt, Artificial Sequence
  Description of Artificial Sequence: Synthetic oligonucleotide
  Sense strand starting at position 2024 of SEQ ID NO: 913612
gcaggagacgcugcguuau

SEQ ID NO: 940749 - RNA, 19 nt, Artificial Sequence
  Description of Artificial Sequence: Synthetic oligonucleotide
  Antisense strand to SEQ ID NO: 940748
auaacgcagcgucuccugc

SEQ ID NO: 940750 - RNA, 19 nt, Artificial Sequence
  Description of Artificial Sequence: Synthetic oligonucleotide
  Sense strand starting at position 2270 of SEQ ID NO: 913612
gggcuaauccuuugaaagg

SEQ ID NO: 940751 - RNA, 19 nt, Artificial Sequence
  Description of Artificial Sequence: Synthetic oligonucleotide
  Antisense strand to SEQ ID NO: 940750
ccuuucaaaggauuagccc

SEQ ID NO: 940752 - RNA, 19 nt, Artificial Sequence
  Description of Artificial Sequence: Synthetic oligonucleotide
  Sense strand starting at position 1875 of SEQ ID NO: 913612
gaaaguuguuaccuugaaa

SEQ ID NO: 940753 - RNA, 19 nt, Artificial Sequence
  Description of Artificial Sequence: Synthetic oligonucleotide
  Antisense strand to SEQ ID NO: 940752
uuucaagguaacaacuuuc

SEQ ID NO: 940754 - RNA, 19 nt, Artificial Sequence
  Description of Artificial Sequence: Synthetic oligonucleotide
  Sense strand starting at position 732 of SEQ ID NO: 913612
aucuaaauguagucagaug

SEQ ID NO: 940755 - RNA, 19 nt, Artificial Sequence
  Description of Artificial Sequence: Synthetic oligonucleotide
  Antisense strand to SEQ ID NO: 940754
caucugacuacauuuagau

SEQ ID NO: 940756 - RNA, 19 nt, Artificial Sequence
  Description of Artificial Sequence: Synthetic oligonucleotide
  Sense strand starting at position 3290 of SEQ ID NO: 913612
gguucucuacuuuauuaca

SEQ ID NO: 940757 - RNA, 19 nt, Artificial Sequence
  Description of Artificial Sequence: Synthetic oligonucleotide
  Antisense strand to SEQ ID NO: 940756
uguaauaaaguagagaacc

SEQ ID NO: 940758 - RNA, 19 nt, Artificial Sequence
  Description of Artificial Sequence: Synthetic oligonucleotide
  Sense strand starting at position 2447 of SEQ ID NO: 913612
uggucucucuuauuugcua

SEQ ID NO: 940759 - RNA, 19 nt, Artificial Sequence
  Description of Artificial Sequence: Synthetic oligonucleotide
  Antisense strand to SEQ ID NO: 940758
uagcaaauaagagagacca

SEQ ID NO: 940760 - RNA, 19 nt, Artificial Sequence
  Description of Artificial Sequence: Synthetic oligonucleotide
  Sense strand starting at position 922 of SEQ ID NO: 913612
ucuuguucccagcaaagaa

SEQ ID NO: 940761 - RNA, 19 nt, Artificial Sequence
  Description of Artificial Sequence: Synthetic oligonucleotide
  Antisense strand to SEQ ID NO: 940760
uucuuugcugggaacaaga

SEQ ID NO: 940762 - RNA, 19 nt, Artificial Sequence
  Description of Artificial Sequence: Synthetic oligonucleotide
  Sense strand starting at position 375 of SEQ ID NO: 913612
aaguaaguagcacauguaa

SEQ ID NO: 940763 - RNA, 19 nt, Artificial Sequence
  Description of Artificial Sequence: Synthetic oligonucleotide
  Antisense strand to SEQ ID NO: 940762
uuacaugugcuacuuacuu

SEQ ID NO: 940764 - RNA, 19 nt, Artificial Sequence
  Description of Artificial Sequence: Synthetic oligonucleotide
  Sense strand starting at position 2955 of SEQ ID NO: 913612
gucaguuuagacuacaucu

SEQ ID NO: 940765 - RNA, 19 nt, Artificial Sequence
  Description of Artificial Sequence: Synthetic oligonucleotide
  Antisense strand to SEQ ID NO: 940764
agauguagucuaaacugac

SEQ ID NO: 940766 - RNA, 19 nt, Artificial Sequence
  Description of Artificial Sequence: Synthetic oligonucleotide
  Sense strand starting at position 2981 of SEQ ID NO: 913612
ugaauauuggucugauauu

SEQ ID NO: 940767 - RNA, 19 nt, Artificial Sequence
  Description of Artificial Sequence: Synthetic oligonucleotide
  Antisense strand to SEQ ID NO: 940766
aauaucagaccaauauuca

SEQ ID NO: 940768 - RNA, 19 nt, Artificial Sequence
  Description of Artificial Sequence: Synthetic oligonucleotide
  Sense strand starting at position 2840 of SEQ ID NO: 913612
uuuggagcuguuuaacaau

SEQ ID NO: 940769 - RNA, 19 nt, Artificial Sequence
  Description of Artificial Sequence: Synthetic oligonucleotide
  Antisense strand to SEQ ID NO: 940768
auuguuaaacagcuccaaa

SEQ ID NO: 940770 - RNA, 19 nt, Artificial Sequence
  Description of Artificial Sequence: Synthetic oligonucleotide
  Sense strand starting at position 281 of SEQ ID NO: 913612
augagaucucaaggcaagu

SEQ ID NO: 940771 - RNA, 19 nt, Artificial Sequence
  Description of Artificial Sequence: Synthetic oligonucleotide
  Antisense strand to SEQ ID NO: 940770
acuugccuugagaucucau

SEQ ID NO: 940772 - RNA, 19 nt, Artificial Sequence
  Description of Artificial Sequence: Synthetic oligonucleotide
  Sense strand starting at position 733 of SEQ ID NO: 913612
ucuaaauguagucagaugu

SEQ ID NO: 940773 - RNA, 19 nt, Artificial Sequence
  Description of Artificial Sequence: Synthetic oligonucleotide
  Antisense strand to SEQ ID NO: 940772
acaucugacuacauuuaga

SEQ ID NO: 940774 - RNA, 19 nt, Artificial Sequence
  Description of Artificial Sequence: Synthetic oligonucleotide
  Sense strand starting at position 1871 of SEQ ID NO: 913612
auaagaaaguuguuaccuu

SEQ ID NO: 940775 - RNA, 19 nt, Artificial Sequence
  Description of Artificial Sequence: Synthetic oligonucleotide
  Antisense strand to SEQ ID NO: 940774
aagguaacaacuuucuuau

SEQ ID NO: 940776 - RNA, 19 nt, Artificial Sequence
  Description of Artificial Sequence: Synthetic oligonucleotide
  Sense strand starting at position 3245 of SEQ ID NO: 913612
ugagcuugucaaugagaga

SEQ ID NO: 940777 - RNA, 19 nt, Artificial Sequence
  Description of Artificial Sequence: Synthetic oligonucleotide
  Antisense strand to SEQ ID NO: 940776
ucucucauugacaagcuca

SEQ ID NO: 940778 - RNA, 19 nt, Artificial Sequence
  Description of Artificial Sequence: Synthetic oligonucleotide
  Sense strand starting at position 2867 of SEQ ID NO: 913612
ucugaaaugcuuuauaguu

SEQ ID NO: 940779 - RNA, 19 nt, Artificial Sequence
  Description of Artificial Sequence: Synthetic oligonucleotide
  Antisense strand to SEQ ID NO: 940778
aacuauaaagcauuucaga

SEQ ID NO: 940780 - RNA, 19 nt, Artificial Sequence
  Description of Artificial Sequence: Synthetic oligonucleotide
  Sense strand starting at position 2156 of SEQ ID NO: 913612
gucuaaugagcaugaauua

SEQ ID NO: 940781 - RNA, 19 nt, Artificial Sequence
  Description of Artificial Sequence: Synthetic oligonucleotide
  Antisense strand to SEQ ID NO: 940780
uaauucaugcucauuagac

SEQ ID NO: 940782 - RNA, 19 nt, Artificial Sequence
  Description of Artificial Sequence: Synthetic oligonucleotide
  Sense strand starting at position 466 of SEQ ID NO: 913612
aagaaauauguuggcuacu

SEQ ID NO: 940783 - RNA, 19 nt, Artificial Sequence
  Description of Artificial Sequence: Synthetic oligonucleotide
  Antisense strand to SEQ ID NO: 940782
aguagccaacauauuucuu

SEQ ID NO: 940784 - RNA, 19 nt, Artificial Sequence
  Description of Artificial Sequence: Synthetic oligonucleotide
  Sense strand starting at position 468 of SEQ ID NO: 913612
gaaauauguuggcuacuca

SEQ ID NO: 940785 - RNA, 19 nt, Artificial Sequence
  Description of Artificial Sequence: Synthetic oligonucleotide
  Antisense strand to SEQ ID NO: 940784
ugaguagccaacauauuuc

SEQ ID NO: 940786 - RNA, 19 nt, Artificial Sequence
  Description of Artificial Sequence: Synthetic oligonucleotide
  Sense strand starting at position 1772 of SEQ ID NO: 913612
cccucucuucguuauagaa

SEQ ID NO: 940787 - RNA, 19 nt, Artificial Sequence
  Description of Artificial Sequence: Synthetic oligonucleotide
  Antisense strand to SEQ ID NO: 940786
uucuauaacgaagagaggg

SEQ ID NO: 940788 - RNA, 19 nt, Artificial Sequence
  Description of Artificial Sequence: Synthetic oligonucleotide
  Sense strand starting at position 510 of SEQ ID NO: 913612
gguauaagcaugugggaau

SEQ ID NO: 940789 - RNA, 19 nt, Artificial Sequence
  Description of Artificial Sequence: Synthetic oligonucleotide
  Antisense strand to SEQ ID NO: 940788
auucccacaugcuuauacc

SEQ ID NO: 940790 - RNA, 19 nt, Artificial Sequence
  Description of Artificial Sequence: Synthetic oligonucleotide
  Sense strand starting at position 78 of SEQ ID NO: 913612
augugaacuugagugcaaa

SEQ ID NO: 940791 - RNA, 19 nt, Artificial Sequence
  Description of Artificial Sequence: Synthetic oligonucleotide
  Antisense strand to SEQ ID NO: 940790
uuugcacucaaguucacau

SEQ ID NO: 940792 - RNA, 19 nt, Artificial Sequence
  Description of Artificial Sequence: Synthetic oligonucleotide
  Sense strand starting at position 584 of SEQ ID NO: 913612
cccucacugcugcagagau

SEQ ID NO: 940793 - RNA, 19 nt, Artificial Sequence
  Description of Artificial Sequence: Synthetic oligonucleotide
  Antisense strand to SEQ ID NO: 940792
aucucugcagcagugaggg

SEQ ID NO: 940794 - RNA, 19 nt, Artificial Sequence
  Description of Artificial Sequence: Synthetic oligonucleotide
  Sense strand starting at position 2288 of SEQ ID NO: 913612
gaagguaaguccucaaguc

SEQ ID NO: 940795 - RNA, 19 nt, Artificial Sequence
  Description of Artificial Sequence: Synthetic oligonucleotide
  Antisense strand to SEQ ID NO: 940794
gacuugaggacuuaccuuc

SEQ ID NO: 940796 - RNA, 19 nt, Artificial Sequence
  Description of Artificial Sequence: Synthetic oligonucleotide
  Sense strand starting at position 76 of SEQ ID NO: 913612
guaugugaacuugagugca

SEQ ID NO: 940797 - RNA, 19 nt, Artificial Sequence
  Description of Artificial Sequence: Synthetic oligonucleotide
  Antisense strand to SEQ ID NO: 940796
ugcacucaaguucacauac

SEQ ID NO: 940798 - RNA, 19 nt, Artificial Sequence
  Description of Artificial Sequence: Synthetic oligonucleotide
  Sense strand starting at position 596 of SEQ ID NO: 913612
cagagauucuuccuggcuc

SEQ ID NO: 940799 - RNA, 19 nt, Artificial Sequence
  Description of Artificial Sequence: Synthetic oligonucleotide
  Antisense strand to SEQ ID NO: 940798
gagccaggaagaaucucug

SEQ ID NO: 940800 - RNA, 19 nt, Artificial Sequence
  Description of Artificial Sequence: Synthetic oligonucleotide
  Sense strand starting at position 495 of SEQ ID NO: 913612
uuccauguucuauacggua

SEQ ID NO: 940801 - RNA, 19 nt, Artificial Sequence
  Description of Artificial Sequence: Synthetic oligonucleotide
  Antisense strand to SEQ ID NO: 940800
uaccguauagaacauggaa

SEQ ID NO: 940802 - RNA, 19 nt, Artificial Sequence
  Description of Artificial Sequence: Synthetic oligonucleotide
  Sense strand starting at position 1208 of SEQ ID NO: 913612
ccuggacucugcuuccuaa

SEQ ID NO: 940803 - RNA, 19 nt, Artificial Sequence
  Description of Artificial Sequence: Synthetic oligonucleotide
  Antisense strand to SEQ ID NO: 940802
uuaggaagcagaguccagg

SEQ ID NO: 940804 - RNA, 19 nt, Artificial Sequence
  Description of Artificial Sequence: Synthetic oligonucleotide
  Sense strand starting at position 896 of SEQ ID NO: 913612
agccuugugccacauuaac

SEQ ID NO: 940805 - RNA, 19 nt, Artificial Sequence
  Description of Artificial Sequence: Synthetic oligonucleotide
  Antisense strand to SEQ ID NO: 940804
guuaauguggcacaaggcu

SEQ ID NO: 940806 - RNA, 19 nt, Artificial Sequence
  Description of Artificial Sequence: Synthetic oligonucleotide
  Sense strand starting at position 3243 of SEQ ID NO: 913613
aaugaauauuggucugaua

SEQ ID NO: 940807 - RNA, 19 nt, Artificial Sequence
  Description of Artificial Sequence: Synthetic oligonucleotide
  Antisense strand to SEQ ID NO: 940806
uaucagaccaauauucauu

SEQ ID NO: 940808 - RNA, 19 nt, Artificial Sequence
  Description of Artificial Sequence: Synthetic oligonucleotide
  Sense strand starting at position 2642 of SEQ ID NO: 913613
cucagacauugagucuaaa

SEQ ID NO: 940809 - RNA, 19 nt, Artificial Sequence
  Description of Artificial Sequence: Synthetic oligonucleotide
  Antisense strand to SEQ ID NO: 940808
uuuagacucaaugucugag

SEQ ID NO: 940810 - RNA, 19 nt, Artificial Sequence
  Description of Artificial Sequence: Synthetic oligonucleotide
  Sense strand starting at position 2372 of SEQ ID NO: 913613
ugaugaaagucauccacca

SEQ ID NO: 940811 - RNA, 19 nt, Artificial Sequence
  Description of Artificial Sequence: Synthetic oligonucleotide
  Antisense strand to SEQ ID NO: 940810
ugguggaugacuuucauca

SEQ ID NO: 940812 - RNA, 19 nt, Artificial Sequence
  Description of Artificial Sequence: Synthetic oligonucleotide
  Sense strand starting at position 3318 of SEQ ID NO: 913613
accaacaauugguuuauga

SEQ ID NO: 940813 - RNA, 19 nt, Artificial Sequence
  Description of Artificial Sequence: Synthetic oligonucleotide
  Antisense strand to SEQ ID NO: 940812
ucauaaaccaauuguuggu

SEQ ID NO: 940814 - RNA, 19 nt, Artificial Sequence
  Description of Artificial Sequence: Synthetic oligonucleotide
  Sense strand starting at position 3395 of SEQ ID NO: 913613
gugcgaauuacagaaugga

SEQ ID NO: 940815 - RNA, 19 nt, Artificial Sequence
  Description of Artificial Sequence: Synthetic oligonucleotide
  Antisense strand to SEQ ID NO: 940814
uccauucuguaauucgcac

SEQ ID NO: 940816 - RNA, 19 nt, Artificial Sequence
  Description of Artificial Sequence: Synthetic oligonucleotide
  Sense strand starting at position 2277 of SEQ ID NO: 913613
augaguuuccugcaggaga

SEQ ID NO: 940817 - RNA, 19 nt, Artificial Sequence
  Description of Artificial Sequence: Synthetic oligonucleotide
  Antisense strand to SEQ ID NO: 940816
ucuccugcaggaaacucau

SEQ ID NO: 940818 - RNA, 19 nt, Artificial Sequence
  Description of Artificial Sequence: Synthetic oligonucleotide
  Sense strand starting at position 3242 of SEQ ID NO: 913613
uaaugaauauuggucugau

SEQ ID NO: 940819 - RNA, 19 nt, Artificial Sequence
  Description of Artificial Sequence: Synthetic oligonucleotide
  Antisense strand to SEQ ID NO: 940818
aucagaccaauauucauua

SEQ ID NO: 940820 - RNA, 19 nt, Artificial Sequence
  Description of Artificial Sequence: Synthetic oligonucleotide
  Sense strand starting at position 2417 of SEQ ID NO: 913613
gaagucuaaugagcaugaa

SEQ ID NO: 940821 - RNA, 19 nt, Artificial Sequence
  Description of Artificial Sequence: Synthetic oligonucleotide
  Antisense strand to SEQ ID NO: 940820
uucaugcucauuagacuuc

SEQ ID NO: 940822 - RNA, 19 nt, Artificial Sequence
  Description of Artificial Sequence: Synthetic oligonucleotide
  Sense strand starting at position 2850 of SEQ ID NO: 913613
guuuccuaguucuugauuu

SEQ ID NO: 940823 - RNA, 19 nt, Artificial Sequence
  Description of Artificial Sequence: Synthetic oligonucleotide
  Antisense strand to SEQ ID NO: 940822
aaaucaagaacuaggaaac

SEQ ID NO: 940824 - RNA, 19 nt, Artificial Sequence
  Description of Artificial Sequence: Synthetic oligonucleotide
  Sense strand starting at position 2442 of SEQ ID NO: 913613
cauccagaccgucaagauu

SEQ ID NO: 940825 - RNA, 19 nt, Artificial Sequence
  Description of Artificial Sequence: Synthetic oligonucleotide
  Antisense strand to SEQ ID NO: 940824
aaucuugacggucuggaug

SEQ ID NO: 940826 - RNA, 19 nt, Artificial Sequence
  Description of Artificial Sequence: Synthetic oligonucleotide
  Sense strand starting at position 345 of SEQ ID NO: 913613
ugaacuugagugcaaagua

SEQ ID NO: 940827 - RNA, 19 nt, Artificial Sequence
  Description of Artificial Sequence: Synthetic oligonucleotide
  Antisense strand to SEQ ID NO: 940826
uacuuugcacucaaguuca

SEQ ID NO: 940828 - RNA, 19 nt, Artificial Sequence
  Description of Artificial Sequence: Synthetic oligonucleotide
  Sense strand starting at position 2288 of SEQ ID NO: 913613
gcaggagacgcugcguuau

SEQ ID NO: 940829 - RNA, 19 nt, Artificial Sequence
  Description of Artificial Sequence: Synthetic oligonucleotide
  Antisense strand to SEQ ID NO: 940828
auaacgcagcgucuccugc

SEQ ID NO: 940830 - RNA, 19 nt, Artificial Sequence
  Description of Artificial Sequence: Synthetic oligonucleotide
  Sense strand starting at position 2534 of SEQ ID NO: 913613
gggcuaauccuuugaaagg

SEQ ID NO: 940831 - RNA, 19 nt, Artificial Sequence
  Description of Artificial Sequence: Synthetic oligonucleotide
  Antisense strand to SEQ ID NO: 940830
ccuuucaaaggauuagccc

SEQ ID NO: 940832 - RNA, 19 nt, Artificial Sequence
  Description of Artificial Sequence: Synthetic oligonucleotide
  Sense strand starting at position 2139 of SEQ ID NO: 913613
gaaaguuguuaccuugaaa

SEQ ID NO: 940833 - RNA, 19 nt, Artificial Sequence
  Description of Artificial Sequence: Synthetic oligonucleotide
  Antisense strand to SEQ ID NO: 940832
uuucaagguaacaacuuuc

SEQ ID NO: 940834 - RNA, 19 nt, Artificial Sequence
  Description of Artificial Sequence: Synthetic oligonucleotide
  Sense strand starting at position 996 of SEQ ID NO: 913613
aucuaaauguagucagaug

SEQ ID NO: 940835 - RNA, 19 nt, Artificial Sequence
  Description of Artificial Sequence: Synthetic oligonucleotide
  Antisense strand to SEQ ID NO: 940834
caucugacuacauuuagau

SEQ ID NO: 940836 - RNA, 19 nt, Artificial Sequence
  Description of Artificial Sequence: Synthetic oligonucleotide
  Sense strand starting at position 3554 of SEQ ID NO: 913613
gguucucuacuuuauuaca

SEQ ID NO: 940837 - RNA, 19 nt, Artificial Sequence
  Description of Artificial Sequence: Synthetic oligonucleotide
  Antisense strand to SEQ ID NO: 940836
uguaauaaaguagagaacc

SEQ ID NO: 940838 - RNA, 19 nt, Artificial Sequence
  Description of Artificial Sequence: Synthetic oligonucleotide
  Sense strand starting at position 2711 of SEQ ID NO: 913613
uggucucucuuauuugcua

SEQ ID NO: 940839 - RNA, 19 nt, Artificial Sequence
  Description of Artificial Sequence: Synthetic oligonucleotide
  Antisense strand to SEQ ID NO: 940838
uagcaaauaagagagacca

SEQ ID NO: 940840 - RNA, 19 nt, Artificial Sequence
  Description of Artificial Sequence: Synthetic oligonucleotide
  Sense strand starting at position 1186 of SEQ ID NO: 913613
ucuuguucccagcaaagaa

SEQ ID NO: 940841 - RNA, 19 nt, Artificial Sequence
  Description of Artificial Sequence: Synthetic oligonucleotide
  Antisense strand to SEQ ID NO: 940840
uucuuugcugggaacaaga

SEQ ID NO: 940842 - RNA, 19 nt, Artificial Sequence
  Description of Artificial Sequence: Synthetic oligonucleotide
  Sense strand starting at position 639 of SEQ ID NO: 913613
aaguaaguagcacauguaa

SEQ ID NO: 940843 - RNA, 19 nt, Artificial Sequence
  Description of Artificial Sequence: Synthetic oligonucleotide
  Antisense strand to SEQ ID NO: 940842
uuacaugugcuacuuacuu

SEQ ID NO: 940844 - RNA, 19 nt, Artificial Sequence
  Description of Artificial Sequence: Synthetic oligonucleotide
  Sense strand starting at position 3219 of SEQ ID NO: 913613
gucaguuuagacuacaucu

SEQ ID NO: 940845 - RNA, 19 nt, Artificial Sequence
  Description of Artificial Sequence: Synthetic oligonucleotide
  Antisense strand to SEQ ID NO: 940844
agauguagucuaaacugac

SEQ ID NO: 940846 - RNA, 19 nt, Artificial Sequence
  Description of Artificial Sequence: Synthetic oligonucleotide
  Sense strand starting at position 3245 of SEQ ID NO: 913613
ugaauauuggucugauauu

SEQ ID NO: 940847 - RNA, 19 nt, Artificial Sequence
  Description of Artificial Sequence: Synthetic oligonucleotide
  Antisense strand to SEQ ID NO: 940846
aauaucagaccaauauuca

SEQ ID NO: 940848 - RNA, 19 nt, Artificial Sequence
  Description of Artificial Sequence: Synthetic oligonucleotide
  Sense strand starting at position 3104 of SEQ ID NO: 913613
uuuggagcuguuuaacaau

SEQ ID NO: 940849 - RNA, 19 nt, Artificial Sequence
  Description of Artificial Sequence: Synthetic oligonucleotide
  Antisense strand to SEQ ID NO: 940848
auuguuaaacagcuccaaa

SEQ ID NO: 940850 - RNA, 19 nt, Artificial Sequence
  Description of Artificial Sequence: Synthetic oligonucleotide
  Sense strand starting at position 545 of SEQ ID NO: 913613
augagaucucaaggcaagu

SEQ ID NO: 940851 - RNA, 19 nt, Artificial Sequence
  Description of Artificial Sequence: Synthetic oligonucleotide
  Antisense strand to SEQ ID NO: 940850
acuugccuugagaucucau

SEQ ID NO: 940852 - RNA, 19 nt, Artificial Sequence
  Description of Artificial Sequence: Synthetic oligonucleotide
  Sense strand starting at position 997 of SEQ ID NO: 913613
ucuaaauguagucagaugu

SEQ ID NO: 940853 - RNA, 19 nt, Artificial Sequence
  Description of Artificial Sequence: Synthetic oligonucleotide
  Antisense strand to SEQ ID NO: 940852
acaucugacuacauuuaga

SEQ ID NO: 940854 - RNA, 19 nt, Artificial Sequence
  Description of Artificial Sequence: Synthetic oligonucleotide
  Sense strand starting at position 2135 of SEQ ID NO: 913613
auaagaaaguuguuaccuu

SEQ ID NO: 940855 - RNA, 19 nt, Artificial Sequence
  Description of Artificial Sequence: Synthetic oligonucleotide
  Antisense strand to SEQ ID NO: 940854
aagguaacaacuuucuuau

SEQ ID NO: 940856 - RNA, 19 nt, Artificial Sequence
  Description of Artificial Sequence: Synthetic oligonucleotide
  Sense strand starting at position 3509 of SEQ ID NO: 913613
ugagcuugucaaugagaga

SEQ ID NO: 940857 - RNA, 19 nt, Artificial Sequence
  Description of Artificial Sequence: Synthetic oligonucleotide
  Antisense strand to SEQ ID NO: 940856
ucucucauugacaagcuca

SEQ ID NO: 940858 - RNA, 19 nt, Artificial Sequence
  Description of Artificial Sequence: Synthetic oligonucleotide
  Sense strand starting at position 3131 of SEQ ID NO: 913613
ucugaaaugcuuuauaguu

SEQ ID NO: 940859 - RNA, 19 nt, Artificial Sequence
  Description of Artificial Sequence: Synthetic oligonucleotide
  Antisense strand to SEQ ID NO: 940858
aacuauaaagcauuucaga

SEQ ID NO: 940860 - RNA, 19 nt, Artificial Sequence
  Description of Artificial Sequence: Synthetic oligonucleotide
  Sense strand starting at position 2420 of SEQ ID NO: 913613
gucuaaugagcaugaauua

SEQ ID NO: 940861 - RNA, 19 nt, Artificial Sequence
  Description of Artificial Sequence: Synthetic oligonucleotide
  Antisense strand to SEQ ID NO: 940860
uaauucaugcucauuagac

SEQ ID NO: 940862 - RNA, 19 nt, Artificial Sequence
  Description of Artificial Sequence: Synthetic oligonucleotide
  Sense strand starting at position 730 of SEQ ID NO: 913613
aagaaauauguuggcuacu

SEQ ID NO: 940863 - RNA, 19 nt, Artificial Sequence
  Description of Artificial Sequence: Synthetic oligonucleotide
  Antisense strand to SEQ ID NO: 940862
aguagccaacauauuucuu

SEQ ID NO: 940864 - RNA, 19 nt, Artificial Sequence
  Description of Artificial Sequence: Synthetic oligonucleotide
  Sense strand starting at position 732 of SEQ ID NO: 913613
gaaauauguuggcuacuca

SEQ ID NO: 940865 - RNA, 19 nt, Artificial Sequence
  Description of Artificial Sequence: Synthetic oligonucleotide
  Antisense strand to SEQ ID NO: 940864
ugaguagccaacauauuuc

SEQ ID NO: 940866 - RNA, 19 nt, Artificial Sequence
  Description of Artificial Sequence: Synthetic oligonucleotide
  Sense strand starting at position 2036 of SEQ ID NO: 913613
cccucucuucguuauagaa

SEQ ID NO: 940867 - RNA, 19 nt, Artificial Sequence
  Description of Artificial Sequence: Synthetic oligonucleotide
  Antisense strand to SEQ ID NO: 940866
uucuauaacgaagagaggg

SEQ ID NO: 940868 - RNA, 19 nt, Artificial Sequence
  Description of Artificial Sequence: Synthetic oligonucleotide
  Sense strand starting at position 774 of SEQ ID NO: 913613
gguauaagcaugugggaau

SEQ ID NO: 940869 - RNA, 19 nt, Artificial Sequence
  Description of Artificial Sequence: Synthetic oligonucleotide
  Antisense strand to SEQ ID NO: 940868
auucccacaugcuuauacc

SEQ ID NO: 940870 - RNA, 19 nt, Artificial Sequence
  Description of Artificial Sequence: Synthetic oligonucleotide
  Sense strand starting at position 342 of SEQ ID NO: 913613
augugaacuugagugcaaa

SEQ ID NO: 940871 - RNA, 19 nt, Artificial Sequence
  Description of Artificial Sequence: Synthetic oligonucleotide
  Antisense strand to SEQ ID NO: 940870
uuugcacucaaguucacau

SEQ ID NO: 940872 - RNA, 19 nt, Artificial Sequence
  Description of Artificial Sequence: Synthetic oligonucleotide
  Sense strand starting at position 848 of SEQ ID NO: 913613
cccucacugcugcagagau

SEQ ID NO: 940873 - RNA, 19 nt, Artificial Sequence
  Description of Artificial Sequence: Synthetic oligonucleotide
  Antisense strand to SEQ ID NO: 940872
aucucugcagcagugaggg

SEQ ID NO: 940874 - RNA, 19 nt, Artificial Sequence
  Description of Artificial Sequence: Synthetic oligonucleotide
  Sense strand starting at position 2552 of SEQ ID NO: 913613
gaagguaaguccucaaguc

SEQ ID NO: 940875 - RNA, 19 nt, Artificial Sequence
  Description of Artificial Sequence: Synthetic oligonucleotide
  Antisense strand to SEQ ID NO: 940874
gacuugaggacuuaccuuc

SEQ ID NO: 940876 - RNA, 19 nt, Artificial Sequence
  Description of Artificial Sequence: Synthetic oligonucleotide
  Sense strand starting at position 340 of SEQ ID NO: 913613
guaugugaacuugagugca

SEQ ID NO: 940877 - RNA, 19 nt, Artificial Sequence
  Description of Artificial Sequence: Synthetic oligonucleotide
  Antisense strand to SEQ ID NO: 940876
ugcacucaaguucacauac

SEQ ID NO: 940878 - RNA, 19 nt, Artificial Sequence
  Description of Artificial Sequence: Synthetic oligonucleotide
  Sense strand starting at position 860 of SEQ ID NO: 913613
cagagauucuuccuggcuc

SEQ ID NO: 940879 - RNA, 19 nt, Artificial Sequence
  Description of Artificial Sequence: Synthetic oligonucleotide
  Antisense strand to SEQ ID NO: 940878
gagccaggaagaaucucug

SEQ ID NO: 940880 - RNA, 19 nt, Artificial Sequence
  Description of Artificial Sequence: Synthetic oligonucleotide
  Sense strand starting at position 759 of SEQ ID NO: 913613
uuccauguucuauacggua

SEQ ID NO: 940881 - RNA, 19 nt, Artificial Sequence
  Description of Artificial Sequence: Synthetic oligonucleotide
  Antisense strand to SEQ ID NO: 940880
uaccguauagaacauggaa

SEQ ID NO: 940882 - RNA, 19 nt, Artificial Sequence
  Description of Artificial Sequence: Synthetic oligonucleotide
  Sense strand starting at position 1472 of SEQ ID NO: 913613
ccuggacucugcuuccuaa

SEQ ID NO: 940883 - RNA, 19 nt, Artificial Sequence
  Description of Artificial Sequence: Synthetic oligonucleotide
  Antisense strand to SEQ ID NO: 940882
uuaggaagcagaguccagg

SEQ ID NO: 940884 - RNA, 19 nt, Artificial Sequence
  Description of Artificial Sequence: Synthetic oligonucleotide
  Sense strand starting at position 1160 of SEQ ID NO: 913613
agccuugugccacauuaac

SEQ ID NO: 940885 - RNA, 19 nt, Artificial Sequence
  Description of Artificial Sequence: Synthetic oligonucleotide
  Antisense strand to SEQ ID NO: 940884
guuaauguggcacaaggcu

SEQ ID NO: 940886 - RNA, 19 nt, Artificial Sequence
  Description of Artificial Sequence: Synthetic oligonucleotide
  Sense strand starting at position 3791 of SEQ ID NO: 913614
gaaacugagucauugacca

SEQ ID NO: 940887 - RNA, 19 nt, Artificial Sequence
  Description of Artificial Sequence: Synthetic oligonucleotide
  Antisense strand to SEQ ID NO: 940886
uggucaaugacucaguuuc

SEQ ID NO: 940888 - RNA, 19 nt, Artificial Sequence
  Description of Artificial Sequence: Synthetic oligonucleotide
  Sense strand starting at position 3804 of SEQ ID NO: 913614
ugaccaaguccugauuauu

SEQ ID NO: 940889 - RNA, 19 nt, Artificial Sequence
  Description of Artificial Sequence: Synthetic oligonucleotide
  Antisense strand to SEQ ID NO: 940888
aauaaucaggacuugguca

SEQ ID NO: 940890 - RNA, 19 nt, Artificial Sequence
  Description of Artificial Sequence: Synthetic oligonucleotide
  Sense strand starting at position 3274 of SEQ ID NO: 913614
aaagccugucaggacauua

SEQ ID NO: 940891 - RNA, 19 nt, Artificial Sequence
  Description of Artificial Sequence: Synthetic oligonucleotide
  Antisense strand to SEQ ID NO: 940890
uaauguccugacaggcuuu

SEQ ID NO: 940892 - RNA, 19 nt, Artificial Sequence
  Description of Artificial Sequence: Synthetic oligonucleotide
  Sense strand starting at position 883 of SEQ ID NO: 913614
agggauauucuacggauac

SEQ ID NO: 940893 - RNA, 19 nt, Artificial Sequence
  Description of Artificial Sequence: Synthetic oligonucleotide
  Antisense strand to SEQ ID NO: 940892
guauccguagaauaucccu

SEQ ID NO: 940894 - RNA, 19 nt, Artificial Sequence
  Description of Artificial Sequence: Synthetic oligonucleotide
  Sense strand starting at position 1346 of SEQ ID NO: 913614
gucuaugggcuagaaacua

SEQ ID NO: 940895 - RNA, 19 nt, Artificial Sequence
  Description of Artificial Sequence: Synthetic oligonucleotide
  Antisense strand to SEQ ID NO: 940894
uaguuucuagcccauagac

SEQ ID NO: 940896 - RNA, 19 nt, Artificial Sequence
  Description of Artificial Sequence: Synthetic oligonucleotide
  Sense strand starting at position 1344 of SEQ ID NO: 913614
uggucuaugggcuagaaac

SEQ ID NO: 940897 - RNA, 19 nt, Artificial Sequence
  Description of Artificial Sequence: Synthetic oligonucleotide
  Antisense strand to SEQ ID NO: 940896
guuucuagcccauagacca

SEQ ID NO: 940898 - RNA, 19 nt, Artificial Sequence
  Description of Artificial Sequence: Synthetic oligonucleotide
  Sense strand starting at position 3657 of SEQ ID NO: 913614
aggguauuagcaugggaaa

SEQ ID NO: 940899 - RNA, 19 nt, Artificial Sequence
  Description of Artificial Sequence: Synthetic oligonucleotide
  Antisense strand to SEQ ID NO: 940898
uuucccaugcuaauacccu

SEQ ID NO: 940900 - RNA, 19 nt, Artificial Sequence
  Description of Artificial Sequence: Synthetic oligonucleotide
  Sense strand starting at position 3658 of SEQ ID NO: 913614
ggguauuagcaugggaaag

SEQ ID NO: 940901 - RNA, 19 nt, Artificial Sequence
  Description of Artificial Sequence: Synthetic oligonucleotide
  Antisense strand to SEQ ID NO: 940900
cuuucccaugcuaauaccc

SEQ ID NO: 940902 - RNA, 19 nt, Artificial Sequence
  Description of Artificial Sequence: Synthetic oligonucleotide
  Sense strand starting at position 1369 of SEQ ID NO: 913614
uuaucagcccucgaaauaa

SEQ ID NO: 940903 - RNA, 19 nt, Artificial Sequence
  Description of Artificial Sequence: Synthetic oligonucleotide
  Antisense strand to SEQ ID NO: 940902
uuauuucgagggcugauaa

SEQ ID NO: 940904 - RNA, 19 nt, Artificial Sequence
  Description of Artificial Sequence: Synthetic oligonucleotide
  Sense strand starting at position 3752 of SEQ ID NO: 913614
uggguucugaguugaagaa

SEQ ID NO: 940905 - RNA, 19 nt, Artificial Sequence
  Description of Artificial Sequence: Synthetic oligonucleotide
  Antisense strand to SEQ ID NO: 940904
uucuucaacucagaaccca

SEQ ID NO: 940906 - RNA, 19 nt, Artificial Sequence
  Description of Artificial Sequence: Synthetic oligonucleotide
  Sense strand starting at position 3734 of SEQ ID NO: 913614
auauuuggcugucuuuagu

SEQ ID NO: 940907 - RNA, 19 nt, Artificial Sequence
  Description of Artificial Sequence: Synthetic oligonucleotide
  Antisense strand to SEQ ID NO: 940906
acuaaagacagccaaauau

SEQ ID NO: 940908 - RNA, 19 nt, Artificial Sequence
  Description of Artificial Sequence: Synthetic oligonucleotide
  Sense strand starting at position 3647 of SEQ ID NO: 913614
cucugacuugaggguauua

SEQ ID NO: 940909 - RNA, 19 nt, Artificial Sequence
  Description of Artificial Sequence: Synthetic oligonucleotide
  Antisense strand to SEQ ID NO: 940908
uaauacccucaagucagag

SEQ ID NO: 940910 - RNA, 19 nt, Artificial Sequence
  Description of Artificial Sequence: Synthetic oligonucleotide
  Sense strand starting at position 2714 of SEQ ID NO: 913614
gccguuaucucauuuccag

SEQ ID NO: 940911 - RNA, 19 nt, Artificial Sequence
  Description of Artificial Sequence: Synthetic oligonucleotide
  Antisense strand to SEQ ID NO: 940910
cuggaaaugagauaacggc

SEQ ID NO: 940912 - RNA, 19 nt, Artificial Sequence
  Description of Artificial Sequence: Synthetic oligonucleotide
  Sense strand starting at position 1275 of SEQ ID NO: 913614
gcgaaucugaaucaauguu

SEQ ID NO: 940913 - RNA, 19 nt, Artificial Sequence
  Description of Artificial Sequence: Synthetic oligonucleotide
  Antisense strand to SEQ ID NO: 940912
aacauugauucagauucgc

SEQ ID NO: 940914 - RNA, 19 nt, Artificial Sequence
  Description of Artificial Sequence: Synthetic oligonucleotide
  Sense strand starting at position 3603 of SEQ ID NO: 913614
caggaaagcuuaguaguga

SEQ ID NO: 940915 - RNA, 19 nt, Artificial Sequence
  Description of Artificial Sequence: Synthetic oligonucleotide
  Antisense strand to SEQ ID NO: 940914
ucacuacuaagcuuuccug

SEQ ID NO: 940916 - RNA, 19 nt, Artificial Sequence
  Description of Artificial Sequence: Synthetic oligonucleotide
  Sense strand starting at position 3731 of SEQ ID NO: 913614
agcauauuuggcugucuuu

SEQ ID NO: 940917 - RNA, 19 nt, Artificial Sequence
  Description of Artificial Sequence: Synthetic oligonucleotide
  Antisense strand to SEQ ID NO: 940916
aaagacagccaaauaugcu

SEQ ID NO: 940918 - RNA, 19 nt, Artificial Sequence
  Description of Artificial Sequence: Synthetic oligonucleotide
  Sense strand starting at position 1637 of SEQ ID NO: 913614
gucugcagccuagaaagau

SEQ ID NO: 940919 - RNA, 19 nt, Artificial Sequence
  Description of Artificial Sequence: Synthetic oligonucleotide
  Antisense strand to SEQ ID NO: 940918
aucuuucuaggcugcagac

SEQ ID NO: 940920 - RNA, 19 nt, Artificial Sequence
  Description of Artificial Sequence: Synthetic oligonucleotide
  Sense strand starting at position 3638 of SEQ ID NO: 913614
ucauguauacucugacuug

SEQ ID NO: 940921 - RNA, 19 nt, Artificial Sequence
  Description of Artificial Sequence: Synthetic oligonucleotide
  Antisense strand to SEQ ID NO: 940920
caagucagaguauacauga

SEQ ID NO: 940922 - RNA, 19 nt, Artificial Sequence
  Description of Artificial Sequence: Synthetic oligonucleotide
  Sense strand starting at position 556 of SEQ ID NO: 913614
cccaguugcuguguaauuu

SEQ ID NO: 940923 - RNA, 19 nt, Artificial Sequence
  Description of Artificial Sequence: Synthetic oligonucleotide
  Antisense strand to SEQ ID NO: 940922
aaauuacacagcaacuggg

SEQ ID NO: 940924 - RNA, 19 nt, Artificial Sequence
  Description of Artificial Sequence: Synthetic oligonucleotide
  Sense strand starting at position 1124 of SEQ ID NO: 913614
auguauggauaaguguauu

SEQ ID NO: 940925 - RNA, 19 nt, Artificial Sequence
  Description of Artificial Sequence: Synthetic oligonucleotide
  Antisense strand to SEQ ID NO: 940924
aauacacuuauccauacau

SEQ ID NO: 940926 - RNA, 19 nt, Artificial Sequence
  Description of Artificial Sequence: Synthetic oligonucleotide
  Sense strand starting at position 1342 of SEQ ID NO: 913614
ccuggucuaugggcuagaa

SEQ ID NO: 940927 - RNA, 19 nt, Artificial Sequence
  Description of Artificial Sequence: Synthetic oligonucleotide
  Antisense strand to SEQ ID NO: 940926
uucuagcccauagaccagg

SEQ ID NO: 940928 - RNA, 19 nt, Artificial Sequence
  Description of Artificial Sequence: Synthetic oligonucleotide
  Sense strand starting at position 2602 of SEQ ID NO: 913614
uuaugccagucaucaugaa

SEQ ID NO: 940929 - RNA, 19 nt, Artificial Sequence
  Description of Artificial Sequence: Synthetic oligonucleotide
  Antisense strand to SEQ ID NO: 940928
uucaugaugacuggcauaa

SEQ ID NO: 940930 - RNA, 19 nt, Artificial Sequence
  Description of Artificial Sequence: Synthetic oligonucleotide
  Sense strand starting at position 2990 of SEQ ID NO: 913614
uuuauacaugccuauuguu

SEQ ID NO: 940931 - RNA, 19 nt, Artificial Sequence
  Description of Artificial Sequence: Synthetic oligonucleotide
  Antisense strand to SEQ ID NO: 940930
aacaauaggcauguauaaa

SEQ ID NO: 940932 - RNA, 19 nt, Artificial Sequence
  Description of Artificial Sequence: Synthetic oligonucleotide
  Sense strand starting at position 98 of SEQ ID NO: 913614
ucuacaacugagugcuuaa

SEQ ID NO: 940933 - RNA, 19 nt, Artificial Sequence
  Description of Artificial Sequence: Synthetic oligonucleotide
  Antisense strand to SEQ ID NO: 940932
uuaagcacucaguuguaga

SEQ ID NO: 940934 - RNA, 19 nt, Artificial Sequence
  Description of Artificial Sequence: Synthetic oligonucleotide
  Sense strand starting at position 3029 of SEQ ID NO: 913614
cuauuauacguauaugucu

SEQ ID NO: 940935 - RNA, 19 nt, Artificial Sequence
  Description of Artificial Sequence: Synthetic oligonucleotide
  Antisense strand to SEQ ID NO: 940934
agacauauacguauaauag

SEQ ID NO: 940936 - RNA, 19 nt, Artificial Sequence
  Description of Artificial Sequence: Synthetic oligonucleotide
  Sense strand starting at position 1368 of SEQ ID NO: 913614
uuuaucagcccucgaaaua

SEQ ID NO: 940937 - RNA, 19 nt, Artificial Sequence
  Description of Artificial Sequence: Synthetic oligonucleotide
  Antisense strand to SEQ ID NO: 940936
uauuucgagggcugauaaa

SEQ ID NO: 940938 - RNA, 19 nt, Artificial Sequence
  Description of Artificial Sequence: Synthetic oligonucleotide
  Sense strand starting at position 1236 of SEQ ID NO: 913614
uguuuaaccuccucaagug

SEQ ID NO: 940939 - RNA, 19 nt, Artificial Sequence
  Description of Artificial Sequence: Synthetic oligonucleotide
  Antisense strand to SEQ ID NO: 940938
cacuugaggagguuaaaca

SEQ ID NO: 940940 - RNA, 19 nt, Artificial Sequence
  Description of Artificial Sequence: Synthetic oligonucleotide
  Sense strand starting at position 2588 of SEQ ID NO: 913614
cauugaaugucugcuuaug

SEQ ID NO: 940941 - RNA, 19 nt, Artificial Sequence
  Description of Artificial Sequence: Synthetic oligonucleotide
  Antisense strand to SEQ ID NO: 940940
cauaagcagacauucaaug

SEQ ID NO: 940942 - RNA, 19 nt, Artificial Sequence
  Description of Artificial Sequence: Synthetic oligonucleotide
  Sense strand starting at position 507 of SEQ ID NO: 913614
aagugauucuugcccugac

SEQ ID NO: 940943 - RNA, 19 nt, Artificial Sequence
  Description of Artificial Sequence: Synthetic oligonucleotide
  Antisense strand to SEQ ID NO: 940942
gucagggcaagaaucacuu

SEQ ID NO: 940944 - RNA, 19 nt, Artificial Sequence
  Description of Artificial Sequence: Synthetic oligonucleotide
  Sense strand starting at position 3949 of SEQ ID NO: 913614
uguugaacuuccuaauuug

SEQ ID NO: 940945 - RNA, 19 nt, Artificial Sequence
  Description of Artificial Sequence: Synthetic oligonucleotide
  Antisense strand to SEQ ID NO: 940944
caaauuaggaaguucaaca

SEQ ID NO: 940946 - RNA, 19 nt, Artificial Sequence
  Description of Artificial Sequence: Synthetic oligonucleotide
  Sense strand starting at position 3703 of SEQ ID NO: 913614
ucucuuaggugauugguuu

SEQ ID NO: 940947 - RNA, 19 nt, Artificial Sequence
  Description of Artificial Sequence: Synthetic oligonucleotide
  Antisense strand to SEQ ID NO: 940946
aaaccaaucaccuaagaga

SEQ ID NO: 940948 - RNA, 19 nt, Artificial Sequence
  Description of Artificial Sequence: Synthetic oligonucleotide
  Sense strand starting at position 183 of SEQ ID NO: 913614
auguucuugucaucucuaa

SEQ ID NO: 940949 - RNA, 19 nt, Artificial Sequence
  Description of Artificial Sequence: Synthetic oligonucleotide
  Antisense strand to SEQ ID NO: 940948
uuagagaugacaagaacau

SEQ ID NO: 940950 - RNA, 19 nt, Artificial Sequence
  Description of Artificial Sequence: Synthetic oligonucleotide
  Sense strand starting at position 3010 of SEQ ID NO: 913614
cacuuagcacguugaauua

SEQ ID NO: 940951 - RNA, 19 nt, Artificial Sequence
  Description of Artificial Sequence: Synthetic oligonucleotide
  Antisense strand to SEQ ID NO: 940950
uaauucaacgugcuaagug

SEQ ID NO: 940952 - RNA, 19 nt, Artificial Sequence
  Description of Artificial Sequence: Synthetic oligonucleotide
  Sense strand starting at position 3694 of SEQ ID NO: 913614
aaaguagugucucuuaggu

SEQ ID NO: 940953 - RNA, 19 nt, Artificial Sequence
  Description of Artificial Sequence: Synthetic oligonucleotide
  Antisense strand to SEQ ID NO: 940952
accuaagagacacuacuuu

SEQ ID NO: 940954 - RNA, 19 nt, Artificial Sequence
  Description of Artificial Sequence: Synthetic oligonucleotide
  Sense strand starting at position 1068 of SEQ ID NO: 913614
cuuauuggugcauguagau

SEQ ID NO: 940955 - RNA, 19 nt, Artificial Sequence
  Description of Artificial Sequence: Synthetic oligonucleotide
  Antisense strand to SEQ ID NO: 940954
aucuacaugcaccaauaag

SEQ ID NO: 940956 - RNA, 19 nt, Artificial Sequence
  Description of Artificial Sequence: Synthetic oligonucleotide
  Sense strand starting at position 3743 of SEQ ID NO: 913614
ugucuuuaguggguucuga

SEQ ID NO: 940957 - RNA, 19 nt, Artificial Sequence
  Description of Artificial Sequence: Synthetic oligonucleotide
  Antisense strand to SEQ ID NO: 940956
ucagaacccacuaaagaca

SEQ ID NO: 940958 - RNA, 19 nt, Artificial Sequence
  Description of Artificial Sequence: Synthetic oligonucleotide
  Sense strand starting at position 177 of SEQ ID NO: 913614
gucuaaauguucuugucau

SEQ ID NO: 940959 - RNA, 19 nt, Artificial Sequence
  Description of Artificial Sequence: Synthetic oligonucleotide
  Antisense strand to SEQ ID NO: 940958
augacaagaacauuuagac

SEQ ID NO: 940960 - RNA, 19 nt, Artificial Sequence
  Description of Artificial Sequence: Synthetic oligonucleotide
  Sense strand starting at position 339 of SEQ ID NO: 913614
cucauaacauuggagaauc

SEQ ID NO: 940961 - RNA, 19 nt, Artificial Sequence
  Description of Artificial Sequence: Synthetic oligonucleotide
  Antisense strand to SEQ ID NO: 940960
gauucuccaauguuaugag

SEQ ID NO: 940962 - RNA, 19 nt, Artificial Sequence
  Description of Artificial Sequence: Synthetic oligonucleotide
  Sense strand starting at position 1136 of SEQ ID NO: 913614
guguauucaucugugaagu

SEQ ID NO: 940963 - RNA, 19 nt, Artificial Sequence
  Description of Artificial Sequence: Synthetic oligonucleotide
  Antisense strand to SEQ ID NO: 940962
acuucacagaugaauacac

SEQ ID NO: 940964 - RNA, 19 nt, Artificial Sequence
  Description of Artificial Sequence: Synthetic oligonucleotide
  Sense strand starting at position 1663 of SEQ ID NO: 913614
caggcuucuguccgacuga

SEQ ID NO: 940965 - RNA, 19 nt, Artificial Sequence
  Description of Artificial Sequence: Synthetic oligonucleotide
  Antisense strand to SEQ ID NO: 940964
ucagucggacagaagccug

SEQ ID NO: 940966 - RNA, 19 nt, Artificial Sequence
  Description of Artificial Sequence: Synthetic oligonucleotide
  Sense strand starting at position 920 of SEQ ID NO: 913615
cucgacauuuccuugcaga

SEQ ID NO: 940967 - RNA, 19 nt, Artificial Sequence
  Description of Artificial Sequence: Synthetic oligonucleotide
  Antisense strand to SEQ ID NO: 940966
ucugcaaggaaaugucgag

SEQ ID NO: 940968 - RNA, 19 nt, Artificial Sequence
  Description of Artificial Sequence: Synthetic oligonucleotide
  Sense strand starting at position 3940 of SEQ ID NO: 913615
aacauuagguuccugaaag

SEQ ID NO: 940969 - RNA, 19 nt, Artificial Sequence
  Description of Artificial Sequence: Synthetic oligonucleotide
  Antisense strand to SEQ ID NO: 940968
cuuucaggaaccuaauguu

SEQ ID NO: 940970 - RNA, 19 nt, Artificial Sequence
  Description of Artificial Sequence: Synthetic oligonucleotide
  Sense strand starting at position 1591 of SEQ ID NO: 913615
cuguuuaucgaggcguauu

SEQ ID NO: 940971 - RNA, 19 nt, Artificial Sequence
  Description of Artificial Sequence: Synthetic oligonucleotide
  Antisense strand to SEQ ID NO: 940970
aauacgccucgauaaacag

SEQ ID NO: 940972 - RNA, 19 nt, Artificial Sequence
  Description of Artificial Sequence: Synthetic oligonucleotide
  Sense strand starting at position 3205 of SEQ ID NO: 913615
cugggaacuacguaguaaa

SEQ ID NO: 940973 - RNA, 19 nt, Artificial Sequence
  Description of Artificial Sequence: Synthetic oligonucleotide
  Antisense strand to SEQ ID NO: 940972
uuuacuacguaguucccag

SEQ ID NO: 940974 - RNA, 19 nt, Artificial Sequence
  Description of Artificial Sequence: Synthetic oligonucleotide
  Sense strand starting at position 3124 of SEQ ID NO: 913615
auuuguaucuuagugcaca

SEQ ID NO: 940975 - RNA, 19 nt, Artificial Sequence
  Description of Artificial Sequence: Synthetic oligonucleotide
  Antisense strand to SEQ ID NO: 940974
ugugcacuaagauacaaau

SEQ ID NO: 940976 - RNA, 19 nt, Artificial Sequence
  Description of Artificial Sequence: Synthetic oligonucleotide
  Sense strand starting at position 6 of SEQ ID NO: 913615
augagacaaugugcugaaa

SEQ ID NO: 940977 - RNA, 19 nt, Artificial Sequence
  Description of Artificial Sequence: Synthetic oligonucleotide
  Antisense strand to SEQ ID NO: 940976
uuucagcacauugucucau

SEQ ID NO: 940978 - RNA, 19 nt, Artificial Sequence
  Description of Artificial Sequence: Synthetic oligonucleotide
  Sense strand starting at position 789 of SEQ ID NO: 913615
gggauagugguuuauuauc

SEQ ID NO: 940979 - RNA, 19 nt, Artificial Sequence
  Description of Artificial Sequence: Synthetic oligonucleotide
  Antisense strand to SEQ ID NO: 940978
gauaauaaaccacuauccc

SEQ ID NO: 940980 - RNA, 19 nt, Artificial Sequence
  Description of Artificial Sequence: Synthetic oligonucleotide
  Sense strand starting at position 2492 of SEQ ID NO: 913615
gcgccuuaggucuuuacga

SEQ ID NO: 940981 - RNA, 19 nt, Artificial Sequence
  Description of Artificial Sequence: Synthetic oligonucleotide
  Antisense strand to SEQ ID NO: 940980
ucguaaagaccuaaggcgc

SEQ ID NO: 940982 - RNA, 19 nt, Artificial Sequence
  Description of Artificial Sequence: Synthetic oligonucleotide
  Sense strand starting at position 9 of SEQ ID NO: 913615
agacaaugugcugaaaguc

SEQ ID NO: 940983 - RNA, 19 nt, Artificial Sequence
  Description of Artificial Sequence: Synthetic oligonucleotide
  Antisense strand to SEQ ID NO: 940982
gacuuucagcacauugucu

SEQ ID NO: 940984 - RNA, 19 nt, Artificial Sequence
  Description of Artificial Sequence: Synthetic oligonucleotide
  Sense strand starting at position 3654 of SEQ ID NO: 913615
guucuaaugaaguagcaag

SEQ ID NO: 940985 - RNA, 19 nt, Artificial Sequence
  Description of Artificial Sequence: Synthetic oligonucleotide
  Antisense strand to SEQ ID NO: 940984
cuugcuacuucauuagaac

SEQ ID NO: 940986 - RNA, 19 nt, Artificial Sequence
  Description of Artificial Sequence: Synthetic oligonucleotide
  Sense strand starting at position 3859 of SEQ ID NO: 913615
uggaaugacaccuguuuag

SEQ ID NO: 940987 - RNA, 19 nt, Artificial Sequence
  Description of Artificial Sequence: Synthetic oligonucleotide
  Antisense strand to SEQ ID NO: 940986
cuaaacaggugucauucca

SEQ ID NO: 940988 - RNA, 19 nt, Artificial Sequence
  Description of Artificial Sequence: Synthetic oligonucleotide
  Sense strand starting at position 3643 of SEQ ID NO: 913615
ccaggagaguaguucuaau

SEQ ID NO: 940989 - RNA, 19 nt, Artificial Sequence
  Description of Artificial Sequence: Synthetic oligonucleotide
  Antisense strand to SEQ ID NO: 940988
auuagaacuacucuccugg

SEQ ID NO: 940990 - RNA, 19 nt, Artificial Sequence
  Description of Artificial Sequence: Synthetic oligonucleotide
  Sense strand starting at position 3905 of SEQ ID NO: 913615
gcugaauauuauucugaca

SEQ ID NO: 940991 - RNA, 19 nt, Artificial Sequence
  Description of Artificial Sequence: Synthetic oligonucleotide
  Antisense strand to SEQ ID NO: 940990
ugucagaauaauauucagc

SEQ ID NO: 940992 - RNA, 19 nt, Artificial Sequence
  Description of Artificial Sequence: Synthetic oligonucleotide
  Sense strand starting at position 3803 of SEQ ID NO: 913615
ugagucauuagauagcagu

SEQ ID NO: 940993 - RNA, 19 nt, Artificial Sequence
  Description of Artificial Sequence: Synthetic oligonucleotide
  Antisense strand to SEQ ID NO: 940992
acugcuaucuaaugacuca

SEQ ID NO: 940994 - RNA, 19 nt, Artificial Sequence
  Description of Artificial Sequence: Synthetic oligonucleotide
  Sense strand starting at position 787 of SEQ ID NO: 913615
cagggauagugguuuauua

SEQ ID NO: 940995 - RNA, 19 nt, Artificial Sequence
  Description of Artificial Sequence: Synthetic oligonucleotide
  Antisense strand to SEQ ID NO: 940994
uaauaaaccacuaucccug

SEQ ID NO: 940996 - RNA, 19 nt, Artificial Sequence
  Description of Artificial Sequence: Synthetic oligonucleotide
  Sense strand starting at position 3798 of SEQ ID NO: 913615
caagcugagucauuagaua

SEQ ID NO: 940997 - RNA, 19 nt, Artificial Sequence
  Description of Artificial Sequence: Synthetic oligonucleotide
  Antisense strand to SEQ ID NO: 940996
uaucuaaugacucagcuug

SEQ ID NO: 940998 - RNA, 19 nt, Artificial Sequence
  Description of Artificial Sequence: Synthetic oligonucleotide
  Sense strand starting at position 3718 of SEQ ID NO: 913615
auaaguguggguuaacuuu

SEQ ID NO: 940999 - RNA, 19 nt, Artificial Sequence
  Description of Artificial Sequence: Synthetic oligonucleotide
  Antisense strand to SEQ ID NO: 940998
aaaguuaacccacacuuau

SEQ ID NO: 941000 - RNA, 19 nt, Artificial Sequence
  Description of Artificial Sequence: Synthetic oligonucleotide
  Sense strand starting at position 3237 of SEQ ID NO: 913615
cuuaaauacugggcuugau

SEQ ID NO: 941001 - RNA, 19 nt, Artificial Sequence
  Description of Artificial Sequence: Synthetic oligonucleotide
  Antisense strand to SEQ ID NO: 941000
aucaagcccaguauuuaag

SEQ ID NO: 941002 - RNA, 19 nt, Artificial Sequence
  Description of Artificial Sequence: Synthetic oligonucleotide
  Sense strand starting at position 3904 of SEQ ID NO: 913615
ggcugaauauuauucugac

SEQ ID NO: 941003 - RNA, 19 nt, Artificial Sequence
  Description of Artificial Sequence: Synthetic oligonucleotide
  Antisense strand to SEQ ID NO: 941002
gucagaauaauauucagcc

SEQ ID NO: 941004 - RNA, 19 nt, Artificial Sequence
  Description of Artificial Sequence: Synthetic oligonucleotide
  Sense strand starting at position 601 of SEQ ID NO: 913615
aggauccuccuucgaaauu

SEQ ID NO: 941005 - RNA, 19 nt, Artificial Sequence
  Description of Artificial Sequence: Synthetic oligonucleotide
  Antisense strand to SEQ ID NO: 941004
aauuucgaaggaggauccu

SEQ ID NO: 941006 - RNA, 19 nt, Artificial Sequence
  Description of Artificial Sequence: Synthetic oligonucleotide
  Sense strand starting at position 2539 of SEQ ID NO: 913615
ugcuacuuugaguaaacuu

SEQ ID NO: 941007 - RNA, 19 nt, Artificial Sequence
  Description of Artificial Sequence: Synthetic oligonucleotide
  Antisense strand to SEQ ID NO: 941006
aaguuuacucaaaguagca

SEQ ID NO: 941008 - RNA, 19 nt, Artificial Sequence
  Description of Artificial Sequence: Synthetic oligonucleotide
  Sense strand starting at position 759 of SEQ ID NO: 913615
agauauucgcaaggaucac

SEQ ID NO: 941009 - RNA, 19 nt, Artificial Sequence
  Description of Artificial Sequence: Synthetic oligonucleotide
  Antisense strand to SEQ ID NO: 941008
gugauccuugcgaauaucu

SEQ ID NO: 941010 - RNA, 19 nt, Artificial Sequence
  Description of Artificial Sequence: Synthetic oligonucleotide
  Sense strand starting at position 3715 of SEQ ID NO: 913615
aggauaaguguggguuaac

SEQ ID NO: 941011 - RNA, 19 nt, Artificial Sequence
  Description of Artificial Sequence: Synthetic oligonucleotide
  Antisense strand to SEQ ID NO: 941010
guuaacccacacuuauccu

SEQ ID NO: 941012 - RNA, 19 nt, Artificial Sequence
  Description of Artificial Sequence: Synthetic oligonucleotide
  Sense strand starting at position 560 of SEQ ID NO: 913615
ugaaucaagucacuuaguu

SEQ ID NO: 941013 - RNA, 19 nt, Artificial Sequence
  Description of Artificial Sequence: Synthetic oligonucleotide
  Antisense strand to SEQ ID NO: 941012
aacuaagugacuugauuca

SEQ ID NO: 941014 - RNA, 19 nt, Artificial Sequence
  Description of Artificial Sequence: Synthetic oligonucleotide
  Sense strand starting at position 3716 of SEQ ID NO: 913615
ggauaaguguggguuaacu

SEQ ID NO: 941015 - RNA, 19 nt, Artificial Sequence
  Description of Artificial Sequence: Synthetic oligonucleotide
  Antisense strand to SEQ ID NO: 941014
aguuaacccacacuuaucc

SEQ ID NO: 941016 - RNA, 19 nt, Artificial Sequence
  Description of Artificial Sequence: Synthetic oligonucleotide
  Sense strand starting at position 2643 of SEQ ID NO: 913615
acgcauugggcuuaauaua

SEQ ID NO: 941017 - RNA, 19 nt, Artificial Sequence
  Description of Artificial Sequence: Synthetic oligonucleotide
  Antisense strand to SEQ ID NO: 941016
uauauuaagcccaaugcgu

SEQ ID NO: 941018 - RNA, 19 nt, Artificial Sequence
  Description of Artificial Sequence: Synthetic oligonucleotide
  Sense strand starting at position 2961 of SEQ ID NO: 913615
gcugaauuauuagauuuag

SEQ ID NO: 941019 - RNA, 19 nt, Artificial Sequence
  Description of Artificial Sequence: Synthetic oligonucleotide
  Antisense strand to SEQ ID NO: 941018
cuaaaucuaauaauucagc

SEQ ID NO: 941020 - RNA, 19 nt, Artificial Sequence
  Description of Artificial Sequence: Synthetic oligonucleotide
  Sense strand starting at position 2538 of SEQ ID NO: 913615
augcuacuuugaguaaacu

SEQ ID NO: 941021 - RNA, 19 nt, Artificial Sequence
  Description of Artificial Sequence: Synthetic oligonucleotide
  Antisense strand to SEQ ID NO: 941020
aguuuacucaaaguagcau

SEQ ID NO: 941022 - RNA, 19 nt, Artificial Sequence
  Description of Artificial Sequence: Synthetic oligonucleotide
  Sense strand starting at position 3794 of SEQ ID NO: 913615
uccacaagcugagucauua

SEQ ID NO: 941023 - RNA, 19 nt, Artificial Sequence
  Description of Artificial Sequence: Synthetic oligonucleotide
  Antisense strand to SEQ ID NO: 941022
uaaugacucagcuugugga

SEQ ID NO: 941024 - RNA, 19 nt, Artificial Sequence
  Description of Artificial Sequence: Synthetic oligonucleotide
  Sense strand starting at position 21 of SEQ ID NO: 913615
gaaagucagugcccaacua

SEQ ID NO: 941025 - RNA, 19 nt, Artificial Sequence
  Description of Artificial Sequence: Synthetic oligonucleotide
  Antisense strand to SEQ ID NO: 941024
uaguugggcacugacuuuc

SEQ ID NO: 941026 - RNA, 19 nt, Artificial Sequence
  Description of Artificial Sequence: Synthetic oligonucleotide
  Sense strand starting at position 357 of SEQ ID NO: 913615
guaugcaauuccuuaggau

SEQ ID NO: 941027 - RNA, 19 nt, Artificial Sequence
  Description of Artificial Sequence: Synthetic oligonucleotide
  Antisense strand to SEQ ID NO: 941026
auccuaaggaauugcauac

SEQ ID NO: 941028 - RNA, 19 nt, Artificial Sequence
  Description of Artificial Sequence: Synthetic oligonucleotide
  Sense strand starting at position 610 of SEQ ID NO: 913615
cuucgaaauuuagaucuau

SEQ ID NO: 941029 - RNA, 19 nt, Artificial Sequence
  Description of Artificial Sequence: Synthetic oligonucleotide
  Antisense strand to SEQ ID NO: 941028
auagaucuaaauuucgaag

SEQ ID NO: 941030 - RNA, 19 nt, Artificial Sequence
  Description of Artificial Sequence: Synthetic oligonucleotide
  Sense strand starting at position 3127 of SEQ ID NO: 913615
uguaucuuagugcacaauu

SEQ ID NO: 941031 - RNA, 19 nt, Artificial Sequence
  Description of Artificial Sequence: Synthetic oligonucleotide
  Antisense strand to SEQ ID NO: 941030
aauugugcacuaagauaca

SEQ ID NO: 941032 - RNA, 19 nt, Artificial Sequence
  Description of Artificial Sequence: Synthetic oligonucleotide
  Sense strand starting at position 791 of SEQ ID NO: 913615
gauagugguuuauuauccu

SEQ ID NO: 941033 - RNA, 19 nt, Artificial Sequence
  Description of Artificial Sequence: Synthetic oligonucleotide
  Antisense strand to SEQ ID NO: 941032
aggauaauaaaccacuauc

SEQ ID NO: 941034 - RNA, 19 nt, Artificial Sequence
  Description of Artificial Sequence: Synthetic oligonucleotide
  Sense strand starting at position 3256 of SEQ ID NO: 913615
augagcugucacuagcuua

SEQ ID NO: 941035 - RNA, 19 nt, Artificial Sequence
  Description of Artificial Sequence: Synthetic oligonucleotide
  Antisense strand to SEQ ID NO: 941034
uaagcuagugacagcucau

SEQ ID NO: 941036 - RNA, 19 nt, Artificial Sequence
  Description of Artificial Sequence: Synthetic oligonucleotide
  Sense strand starting at position 64 of SEQ ID NO: 913615
uuggcuuaucuguaaaguu

SEQ ID NO: 941037 - RNA, 19 nt, Artificial Sequence
  Description of Artificial Sequence: Synthetic oligonucleotide
  Antisense strand to SEQ ID NO: 941036
aacuuuacagauaagccaa

SEQ ID NO: 941038 - RNA, 19 nt, Artificial Sequence
  Description of Artificial Sequence: Synthetic oligonucleotide
  Sense strand starting at position 2494 of SEQ ID NO: 913615
gccuuaggucuuuacgaua

SEQ ID NO: 941039 - RNA, 19 nt, Artificial Sequence
  Description of Artificial Sequence: Synthetic oligonucleotide
  Antisense strand to SEQ ID NO: 941038
uaucguaaagaccuaaggc

SEQ ID NO: 941040 - RNA, 19 nt, Artificial Sequence
  Description of Artificial Sequence: Synthetic oligonucleotide
  Sense strand starting at position 3713 of SEQ ID NO: 913615
guaggauaaguguggguua

SEQ ID NO: 941041 - RNA, 19 nt, Artificial Sequence
  Description of Artificial Sequence: Synthetic oligonucleotide
  Antisense strand to SEQ ID NO: 941040
uaacccacacuuauccuac

SEQ ID NO: 941042 - RNA, 19 nt, Artificial Sequence
  Description of Artificial Sequence: Synthetic oligonucleotide
  Sense strand starting at position 60 of SEQ ID NO: 913615
acacuuggcuuaucuguaa

SEQ ID NO: 941043 - RNA, 19 nt, Artificial Sequence
  Description of Artificial Sequence: Synthetic oligonucleotide
  Antisense strand to SEQ ID NO: 941042
uuacagauaagccaagugu

SEQ ID NO: 941044 - RNA, 19 nt, Artificial Sequence
  Description of Artificial Sequence: Synthetic oligonucleotide
  Sense strand starting at position 470 of SEQ ID NO: 913615
aagccacagcgaugguaaa

SEQ ID NO: 941045 - RNA, 19 nt, Artificial Sequence
  Description of Artificial Sequence: Synthetic oligonucleotide
  Antisense strand to SEQ ID NO: 941044
uuuaccaucgcuguggcuu

SEQ ID NO: 941046 - RNA, 19 nt, Artificial Sequence
  Description of Artificial Sequence: Synthetic oligonucleotide
  Sense strand starting at position 1090 of SEQ ID NO: 913616
cucgacauuuccuugcaga

SEQ ID NO: 941047 - RNA, 19 nt, Artificial Sequence
  Description of Artificial Sequence: Synthetic oligonucleotide
  Antisense strand to SEQ ID NO: 941046
ucugcaaggaaaugucgag

SEQ ID NO: 941048 - RNA, 19 nt, Artificial Sequence
  Description of Artificial Sequence: Synthetic oligonucleotide
  Sense strand starting at position 1761 of SEQ ID NO: 913616
cuguuuaucgaggcguauu

SEQ ID NO: 941049 - RNA, 19 nt, Artificial Sequence
  Description of Artificial Sequence: Synthetic oligonucleotide
  Antisense strand to SEQ ID NO: 941048
aauacgccucgauaaacag

SEQ ID NO: 941050 - RNA, 19 nt, Artificial Sequence
  Description of Artificial Sequence: Synthetic oligonucleotide
  Sense strand starting at position 3375 of SEQ ID NO: 913616
cugggaacuacguaguaaa

SEQ ID NO: 941051 - RNA, 19 nt, Artificial Sequence
  Description of Artificial Sequence: Synthetic oligonucleotide
  Antisense strand to SEQ ID NO: 941050
uuuacuacguaguucccag

SEQ ID NO: 941052 - RNA, 19 nt, Artificial Sequence
  Description of Artificial Sequence: Synthetic oligonucleotide
  Sense strand starting at position 3294 of SEQ ID NO: 913616
auuuguaucuuagugcaca

SEQ ID NO: 941053 - RNA, 19 nt, Artificial Sequence
  Description of Artificial Sequence: Synthetic oligonucleotide
  Antisense strand to SEQ ID NO: 941052
ugugcacuaagauacaaau

SEQ ID NO: 941054 - RNA, 19 nt, Artificial Sequence
  Description of Artificial Sequence: Synthetic oligonucleotide
  Sense strand starting at position 176 of SEQ ID NO: 913616
augagacaaugugcugaaa

SEQ ID NO: 941055 - RNA, 19 nt, Artificial Sequence
  Description of Artificial Sequence: Synthetic oligonucleotide
  Antisense strand to SEQ ID NO: 941054
uuucagcacauugucucau

SEQ ID NO: 941056 - RNA, 19 nt, Artificial Sequence
  Description of Artificial Sequence: Synthetic oligonucleotide
  Sense strand starting at position 959 of SEQ ID NO: 913616
gggauagugguuuauuauc

SEQ ID NO: 941057 - RNA, 19 nt, Artificial Sequence
  Description of Artificial Sequence: Synthetic oligonucleotide
  Antisense strand to SEQ ID NO: 941056
gauaauaaaccacuauccc

SEQ ID NO: 941058 - RNA, 19 nt, Artificial Sequence
  Description of Artificial Sequence: Synthetic oligonucleotide
  Sense strand starting at position 2662 of SEQ ID NO: 913616
gcgccuuaggucuuuacga

SEQ ID NO: 941059 - RNA, 19 nt, Artificial Sequence
  Description of Artificial Sequence: Synthetic oligonucleotide
  Antisense strand to SEQ ID NO: 941058
ucguaaagaccuaaggcgc

SEQ ID NO: 941060 - RNA, 19 nt, Artificial Sequence
  Description of Artificial Sequence: Synthetic oligonucleotide
  Sense strand starting at position 179 of SEQ ID NO: 913616
agacaaugugcugaaaguc

SEQ ID NO: 941061 - RNA, 19 nt, Artificial Sequence
  Description of Artificial Sequence: Synthetic oligonucleotide
  Antisense strand to SEQ ID NO: 941060
gacuuucagcacauugucu

SEQ ID NO: 941062 - RNA, 19 nt, Artificial Sequence
  Description of Artificial Sequence: Synthetic oligonucleotide
  Sense strand starting at position 3824 of SEQ ID NO: 913616
guucuaaugaaguagcaag

SEQ ID NO: 941063 - RNA, 19 nt, Artificial Sequence
  Description of Artificial Sequence: Synthetic oligonucleotide
  Antisense strand to SEQ ID NO: 941062
cuugcuacuucauuagaac

SEQ ID NO: 941064 - RNA, 19 nt, Artificial Sequence
  Description of Artificial Sequence: Synthetic oligonucleotide
  Sense strand starting at position 3813 of SEQ ID NO: 913616
ccaggagaguaguucuaau

SEQ ID NO: 941065 - RNA, 19 nt, Artificial Sequence
  Description of Artificial Sequence: Synthetic oligonucleotide
  Antisense strand to SEQ ID NO: 941064
auuagaacuacucuccugg

SEQ ID NO: 941066 - RNA, 19 nt, Artificial Sequence
  Description of Artificial Sequence: Synthetic oligonucleotide
  Sense strand starting at position 3973 of SEQ ID NO: 913616
ugagucauuagauagcagu

SEQ ID NO: 941067 - RNA, 19 nt, Artificial Sequence
  Description of Artificial Sequence: Synthetic oligonucleotide
  Antisense strand to SEQ ID NO: 941066
acugcuaucuaaugacuca

SEQ ID NO: 941068 - RNA, 19 nt, Artificial Sequence
  Description of Artificial Sequence: Synthetic oligonucleotide
  Sense strand starting at position 957 of SEQ ID NO: 913616
cagggauagugguuuauua

SEQ ID NO: 941069 - RNA, 19 nt, Artificial Sequence
  Description of Artificial Sequence: Synthetic oligonucleotide
  Antisense strand to SEQ ID NO: 941068
uaauaaaccacuaucccug

SEQ ID NO: 941070 - RNA, 19 nt, Artificial Sequence
  Description of Artificial Sequence: Synthetic oligonucleotide
  Sense strand starting at position 53 of SEQ ID NO: 913616
agacaagauucugcaguca

SEQ ID NO: 941071 - RNA, 19 nt, Artificial Sequence
  Description of Artificial Sequence: Synthetic oligonucleotide
  Antisense strand to SEQ ID NO: 941070
ugacugcagaaucuugucu

SEQ ID NO: 941072 - RNA, 19 nt, Artificial Sequence
  Description of Artificial Sequence: Synthetic oligonucleotide
  Sense strand starting at position 3968 of SEQ ID NO: 913616
caagcugagucauuagaua

SEQ ID NO: 941073 - RNA, 19 nt, Artificial Sequence
  Description of Artificial Sequence: Synthetic oligonucleotide
  Antisense strand to SEQ ID NO: 941072
uaucuaaugacucagcuug

SEQ ID NO: 941074 - RNA, 19 nt, Artificial Sequence
  Description of Artificial Sequence: Synthetic oligonucleotide
  Sense strand starting at position 3888 of SEQ ID NO: 913616
auaaguguggguuaacuuu

SEQ ID NO: 941075 - RNA, 19 nt, Artificial Sequence
  Description of Artificial Sequence: Synthetic oligonucleotide
  Antisense strand to SEQ ID NO: 941074
aaaguuaacccacacuuau

SEQ ID NO: 941076 - RNA, 19 nt, Artificial Sequence
  Description of Artificial Sequence: Synthetic oligonucleotide
  Sense strand starting at position 3407 of SEQ ID NO: 913616
cuuaaauacugggcuugau

SEQ ID NO: 941077 - RNA, 19 nt, Artificial Sequence
  Description of Artificial Sequence: Synthetic oligonucleotide
  Antisense strand to SEQ ID NO: 941076
aucaagcccaguauuuaag

SEQ ID NO: 941078 - RNA, 19 nt, Artificial Sequence
  Description of Artificial Sequence: Synthetic oligonucleotide
  Sense strand starting at position 771 of SEQ ID NO: 913616
aggauccuccuucgaaauu

SEQ ID NO: 941079 - RNA, 19 nt, Artificial Sequence
  Description of Artificial Sequence: Synthetic oligonucleotide
  Antisense strand to SEQ ID NO: 941078
aauuucgaaggaggauccu

SEQ ID NO: 941080 - RNA, 19 nt, Artificial Sequence
  Description of Artificial Sequence: Synthetic oligonucleotide
  Sense strand starting at position 2709 of SEQ ID NO: 913616
ugcuacuuugaguaaacuu

SEQ ID NO: 941081 - RNA, 19 nt, Artificial Sequence
  Description of Artificial Sequence: Synthetic oligonucleotide
  Antisense strand to SEQ ID NO: 941080
aaguuuacucaaaguagca

SEQ ID NO: 941082 - RNA, 19 nt, Artificial Sequence
  Description of Artificial Sequence: Synthetic oligonucleotide
  Sense strand starting at position 929 of SEQ ID NO: 913616
agauauucgcaaggaucac

SEQ ID NO: 941083 - RNA, 19 nt, Artificial Sequence
  Description of Artificial Sequence: Synthetic oligonucleotide
  Antisense strand to SEQ ID NO: 941082
gugauccuugcgaauaucu

SEQ ID NO: 941084 - RNA, 19 nt, Artificial Sequence
  Description of Artificial Sequence: Synthetic oligonucleotide
  Sense strand starting at position 3885 of SEQ ID NO: 913616
aggauaaguguggguuaac

SEQ ID NO: 941085 - RNA, 19 nt, Artificial Sequence
  Description of Artificial Sequence: Synthetic oligonucleotide
  Antisense strand to SEQ ID NO: 941084
guuaacccacacuuauccu

SEQ ID NO: 941086 - RNA, 19 nt, Artificial Sequence
  Description of Artificial Sequence: Synthetic oligonucleotide
  Sense strand starting at position 67 of SEQ ID NO: 913616
agucacaaguacuuuaauu

SEQ ID NO: 941087 - RNA, 19 nt, Artificial Sequence
  Description of Artificial Sequence: Synthetic oligonucleotide
  Antisense strand to SEQ ID NO: 941086
aauuaaaguacuugugacu

SEQ ID NO: 941088 - RNA, 19 nt, Artificial Sequence
  Description of Artificial Sequence: Synthetic oligonucleotide
  Sense strand starting at position 730 of SEQ ID NO: 913616
ugaaucaagucacuuaguu

SEQ ID NO: 941089 - RNA, 19 nt, Artificial Sequence
  Description of Artificial Sequence: Synthetic oligonucleotide
  Antisense strand to SEQ ID NO: 941088
aacuaagugacuugauuca

SEQ ID NO: 941090 - RNA, 19 nt, Artificial Sequence
  Description of Artificial Sequence: Synthetic oligonucleotide
  Sense strand starting at position 3886 of SEQ ID NO: 913616
ggauaaguguggguuaacu

SEQ ID NO: 941091 - RNA, 19 nt, Artificial Sequence
  Description of Artificial Sequence: Synthetic oligonucleotide
  Antisense strand to SEQ ID NO: 941090
aguuaacccacacuuaucc

SEQ ID NO: 941092 - RNA, 19 nt, Artificial Sequence
  Description of Artificial Sequence: Synthetic oligonucleotide
  Sense strand starting at position 2813 of SEQ ID NO: 913616
acgcauugggcuuaauaua

SEQ ID NO: 941093 - RNA, 19 nt, Artificial Sequence
  Description of Artificial Sequence: Synthetic oligonucleotide
  Antisense strand to SEQ ID NO: 941092
uauauuaagcccaaugcgu

SEQ ID NO: 941094 - RNA, 19 nt, Artificial Sequence
  Description of Artificial Sequence: Synthetic oligonucleotide
  Sense strand starting at position 3131 of SEQ ID NO: 913616
gcugaauuauuagauuuag

SEQ ID NO: 941095 - RNA, 19 nt, Artificial Sequence
  Description of Artificial Sequence: Synthetic oligonucleotide
  Antisense strand to SEQ ID NO: 941094
cuaaaucuaauaauucagc

SEQ ID NO: 941096 - RNA, 19 nt, Artificial Sequence
  Description of Artificial Sequence: Synthetic oligonucleotide
  Sense strand starting at position 2708 of SEQ ID NO: 913616
augcuacuuugaguaaacu

SEQ ID NO: 941097 - RNA, 19 nt, Artificial Sequence
  Description of Artificial Sequence: Synthetic oligonucleotide
  Antisense strand to SEQ ID NO: 941096
aguuuacucaaaguagcau

SEQ ID NO: 941098 - RNA, 19 nt, Artificial Sequence
  Description of Artificial Sequence: Synthetic oligonucleotide
  Sense strand starting at position 3964 of SEQ ID NO: 913616
uccacaagcugagucauua

SEQ ID NO: 941099 - RNA, 19 nt, Artificial Sequence
  Description of Artificial Sequence: Synthetic oligonucleotide
  Antisense strand to SEQ ID NO: 941098
uaaugacucagcuugugga

SEQ ID NO: 941100 - RNA, 19 nt, Artificial Sequence
  Description of Artificial Sequence: Synthetic oligonucleotide
  Sense strand starting at position 191 of SEQ ID NO: 913616
gaaagucagugcccaacua

SEQ ID NO: 941101 - RNA, 19 nt, Artificial Sequence
  Description of Artificial Sequence: Synthetic oligonucleotide
  Antisense strand to SEQ ID NO: 941100
uaguugggcacugacuuuc

SEQ ID NO: 941102 - RNA, 19 nt, Artificial Sequence
  Description of Artificial Sequence: Synthetic oligonucleotide
  Sense strand starting at position 527 of SEQ ID NO: 913616
guaugcaauuccuuaggau

SEQ ID NO: 941103 - RNA, 19 nt, Artificial Sequence
  Description of Artificial Sequence: Synthetic oligonucleotide
  Antisense strand to SEQ ID NO: 941102
auccuaaggaauugcauac

SEQ ID NO: 941104 - RNA, 19 nt, Artificial Sequence
  Description of Artificial Sequence: Synthetic oligonucleotide
  Sense strand starting at position 780 of SEQ ID NO: 913616
cuucgaaauuuagaucuau

SEQ ID NO: 941105 - RNA, 19 nt, Artificial Sequence
  Description of Artificial Sequence: Synthetic oligonucleotide
  Antisense strand to SEQ ID NO: 941104
auagaucuaaauuucgaag

SEQ ID NO: 941106 - RNA, 19 nt, Artificial Sequence
  Description of Artificial Sequence: Synthetic oligonucleotide
  Sense strand starting at position 3297 of SEQ ID NO: 913616
uguaucuuagugcacaauu

SEQ ID NO: 941107 - RNA, 19 nt, Artificial Sequence
  Description of Artificial Sequence: Synthetic oligonucleotide
  Antisense strand to SEQ ID NO: 941106
aauugugcacuaagauaca

SEQ ID NO: 941108 - RNA, 19 nt, Artificial Sequence
  Description of Artificial Sequence: Synthetic oligonucleotide
  Sense strand starting at position 961 of SEQ ID NO: 913616
gauagugguuuauuauccu

SEQ ID NO: 941109 - RNA, 19 nt, Artificial Sequence
  Description of Artificial Sequence: Synthetic oligonucleotide
  Antisense strand to SEQ ID NO: 941108
aggauaauaaaccacuauc

SEQ ID NO: 941110 - RNA, 19 nt, Artificial Sequence
  Description of Artificial Sequence: Synthetic oligonucleotide
  Sense strand starting at position 3426 of SEQ ID NO: 913616
augagcugucacuagcuua

SEQ ID NO: 941111 - RNA, 19 nt, Artificial Sequence
  Description of Artificial Sequence: Synthetic oligonucleotide
  Antisense strand to SEQ ID NO: 941110
uaagcuagugacagcucau

SEQ ID NO: 941112 - RNA, 19 nt, Artificial Sequence
  Description of Artificial Sequence: Synthetic oligonucleotide
  Sense strand starting at position 234 of SEQ ID NO: 913616
uuggcuuaucuguaaaguu

SEQ ID NO: 941113 - RNA, 19 nt, Artificial Sequence
  Description of Artificial Sequence: Synthetic oligonucleotide
  Antisense strand to SEQ ID NO: 941112
aacuuuacagauaagccaa

SEQ ID NO: 941114 - RNA, 19 nt, Artificial Sequence
  Description of Artificial Sequence: Synthetic oligonucleotide
  Sense strand starting at position 2664 of SEQ ID NO: 913616
gccuuaggucuuuacgaua

SEQ ID NO: 941115 - RNA, 19 nt, Artificial Sequence
  Description of Artificial Sequence: Synthetic oligonucleotide
  Antisense strand to SEQ ID NO: 941114
uaucguaaagaccuaaggc

SEQ ID NO: 941116 - RNA, 19 nt, Artificial Sequence
  Description of Artificial Sequence: Synthetic oligonucleotide
  Sense strand starting at position 3883 of SEQ ID NO: 913616
guaggauaaguguggguua

SEQ ID NO: 941117 - RNA, 19 nt, Artificial Sequence
  Description of Artificial Sequence: Synthetic oligonucleotide
  Antisense strand to SEQ ID NO: 941116
uaacccacacuuauccuac

SEQ ID NO: 941118 - RNA, 19 nt, Artificial Sequence
  Description of Artificial Sequence: Synthetic oligonucleotide
  Sense strand starting at position 230 of SEQ ID NO: 913616
acacuuggcuuaucuguaa

SEQ ID NO: 941119 - RNA, 19 nt, Artificial Sequence
  Description of Artificial Sequence: Synthetic oligonucleotide
  Antisense strand to SEQ ID NO: 941118
uuacagauaagccaagugu

SEQ ID NO: 941120 - RNA, 19 nt, Artificial Sequence
  Description of Artificial Sequence: Synthetic oligonucleotide
  Sense strand starting at position 640 of SEQ ID NO: 913616
aagccacagcgaugguaaa

SEQ ID NO: 941121 - RNA, 19 nt, Artificial Sequence
  Description of Artificial Sequence: Synthetic oligonucleotide
  Antisense strand to SEQ ID NO: 941120
uuuaccaucgcuguggcuu

SEQ ID NO: 941122 - RNA, 19 nt, Artificial Sequence
  Description of Artificial Sequence: Synthetic oligonucleotide
  Sense strand starting at position 772 of SEQ ID NO: 913616
ggauccuccuucgaaauuu

SEQ ID NO: 941123 - RNA, 19 nt, Artificial Sequence
  Description of Artificial Sequence: Synthetic oligonucleotide
  Antisense strand to SEQ ID NO: 941122
aaauuucgaaggaggaucc

SEQ ID NO: 941124 - RNA, 19 nt, Artificial Sequence
  Description of Artificial Sequence: Synthetic oligonucleotide
  Sense strand starting at position 3632 of SEQ ID NO: 913616
gaguauugaggguguguau

SEQ ID NO: 941125 - RNA, 19 nt, Artificial Sequence
  Description of Artificial Sequence: Synthetic oligonucleotide
  Antisense strand to SEQ ID NO: 941124
auacacacccucaauacuc

SEQ ID NO: 941126 - RNA, 19 nt, Artificial Sequence
  Description of Artificial Sequence: Synthetic oligonucleotide
  Sense strand starting at position 3706 of SEQ ID NO: 913617
uagacaaucugaguggacu

SEQ ID NO: 941127 - RNA, 19 nt, Artificial Sequence
  Description of Artificial Sequence: Synthetic oligonucleotide
  Antisense strand to SEQ ID NO: 941126
aguccacucagauugucua

SEQ ID NO: 941128 - RNA, 19 nt, Artificial Sequence
  Description of Artificial Sequence: Synthetic oligonucleotide
  Sense strand starting at position 2636 of SEQ ID NO: 913617
ccuuuacuggcugacagaa

SEQ ID NO: 941129 - RNA, 19 nt, Artificial Sequence
  Description of Artificial Sequence: Synthetic oligonucleotide
  Antisense strand to SEQ ID NO: 941128
uucugucagccaguaaagg

SEQ ID NO: 941130 - RNA, 19 nt, Artificial Sequence
  Description of Artificial Sequence: Synthetic oligonucleotide
  Sense strand starting at position 1089 of SEQ ID NO: 913617
ugcaaagauuaucuaauga

SEQ ID NO: 941131 - RNA, 19 nt, Artificial Sequence
  Description of Artificial Sequence: Synthetic oligonucleotide
  Antisense strand to SEQ ID NO: 941130
ucauuagauaaucuuugca

SEQ ID NO: 941132 - RNA, 19 nt, Artificial Sequence
  Description of Artificial Sequence: Synthetic oligonucleotide
  Sense strand starting at position 2977 of SEQ ID NO: 913617
gaaauuugaugcucggucu

SEQ ID NO: 941133 - RNA, 19 nt, Artificial Sequence
  Description of Artificial Sequence: Synthetic oligonucleotide
  Antisense strand to SEQ ID NO: 941132
agaccgagcaucaaauuuc

SEQ ID NO: 941134 - RNA, 19 nt, Artificial Sequence
  Description of Artificial Sequence: Synthetic oligonucleotide
  Sense strand starting at position 3707 of SEQ ID NO: 913617
agacaaucugaguggacuu

SEQ ID NO: 941135 - RNA, 19 nt, Artificial Sequence
  Description of Artificial Sequence: Synthetic oligonucleotide
  Antisense strand to SEQ ID NO: 941134
aaguccacucagauugucu

SEQ ID NO: 941136 - RNA, 19 nt, Artificial Sequence
  Description of Artificial Sequence: Synthetic oligonucleotide
  Sense strand starting at position 2480 of SEQ ID NO: 913617
aucuuuaauuccuugggaa

SEQ ID NO: 941137 - RNA, 19 nt, Artificial Sequence
  Description of Artificial Sequence: Synthetic oligonucleotide
  Antisense strand to SEQ ID NO: 941136
uucccaaggaauuaaagau

SEQ ID NO: 941138 - RNA, 19 nt, Artificial Sequence
  Description of Artificial Sequence: Synthetic oligonucleotide
  Sense strand starting at position 2962 of SEQ ID NO: 913617
aauuaagugggcugggaaa

SEQ ID NO: 941139 - RNA, 19 nt, Artificial Sequence
  Description of Artificial Sequence: Synthetic oligonucleotide
  Antisense strand to SEQ ID NO: 941138
uuucccagcccacuuaauu

SEQ ID NO: 941140 - RNA, 19 nt, Artificial Sequence
  Description of Artificial Sequence: Synthetic oligonucleotide
  Sense strand starting at position 2481 of SEQ ID NO: 913617
ucuuuaauuccuugggaaa

SEQ ID NO: 941141 - RNA, 19 nt, Artificial Sequence
  Description of Artificial Sequence: Synthetic oligonucleotide
  Antisense strand to SEQ ID NO: 941140
uuucccaaggaauuaaaga

SEQ ID NO: 941142 - RNA, 19 nt, Artificial Sequence
  Description of Artificial Sequence: Synthetic oligonucleotide
  Sense strand starting at position 1739 of SEQ ID NO: 913617
acaauauaggcuggauacu

SEQ ID NO: 941143 - RNA, 19 nt, Artificial Sequence
  Description of Artificial Sequence: Synthetic oligonucleotide
  Antisense strand to SEQ ID NO: 941142
aguauccagccuauauugu

SEQ ID NO: 941144 - RNA, 19 nt, Artificial Sequence
  Description of Artificial Sequence: Synthetic oligonucleotide
  Sense strand starting at position 3830 of SEQ ID NO: 913617
uguucugugcacuucguaa

SEQ ID NO: 941145 - RNA, 19 nt, Artificial Sequence
  Description of Artificial Sequence: Synthetic oligonucleotide
  Antisense strand to SEQ ID NO: 941144
uuacgaagugcacagaaca

SEQ ID NO: 941146 - RNA, 19 nt, Artificial Sequence
  Description of Artificial Sequence: Synthetic oligonucleotide
  Sense strand starting at position 1053 of SEQ ID NO: 913617
ccaaauguaccguauagga

SEQ ID NO: 941147 - RNA, 19 nt, Artificial Sequence
  Description of Artificial Sequence: Synthetic oligonucleotide
  Antisense strand to SEQ ID NO: 941146
uccuauacgguacauuugg

SEQ ID NO: 941148 - RNA, 19 nt, Artificial Sequence
  Description of Artificial Sequence: Synthetic oligonucleotide
  Sense strand starting at position 1088 of SEQ ID NO: 913617
cugcaaagauuaucuaaug

SEQ ID NO: 941149 - RNA, 19 nt, Artificial Sequence
  Description of Artificial Sequence: Synthetic oligonucleotide
  Antisense strand to SEQ ID NO: 941148
cauuagauaaucuuugcag

SEQ ID NO: 941150 - RNA, 19 nt, Artificial Sequence
  Description of Artificial Sequence: Synthetic oligonucleotide
  Sense strand starting at position 3540 of SEQ ID NO: 913617
caugauaagccaggaggua

SEQ ID NO: 941151 - RNA, 19 nt, Artificial Sequence
  Description of Artificial Sequence: Synthetic oligonucleotide
  Antisense strand to SEQ ID NO: 941150
uaccuccuggcuuaucaug

SEQ ID NO: 941152 - RNA, 19 nt, Artificial Sequence
  Description of Artificial Sequence: Synthetic oligonucleotide
  Sense strand starting at position 3681 of SEQ ID NO: 913617
gcguuuguucuacugccaa

SEQ ID NO: 941153 - RNA, 19 nt, Artificial Sequence
  Description of Artificial Sequence: Synthetic oligonucleotide
  Antisense strand to SEQ ID NO: 941152
uuggcaguagaacaaacgc

SEQ ID NO: 941154 - RNA, 19 nt, Artificial Sequence
  Description of Artificial Sequence: Synthetic oligonucleotide
  Sense strand starting at position 2980 of SEQ ID NO: 913617
auuugaugcucggucucua

SEQ ID NO: 941155 - RNA, 19 nt, Artificial Sequence
  Description of Artificial Sequence: Synthetic oligonucleotide
  Antisense strand to SEQ ID NO: 941154
uagagaccgagcaucaaau

SEQ ID NO: 941156 - RNA, 19 nt, Artificial Sequence
  Description of Artificial Sequence: Synthetic oligonucleotide
  Sense strand starting at position 2731 of SEQ ID NO: 913617
gccuccaggaagugauaaa

SEQ ID NO: 941157 - RNA, 19 nt, Artificial Sequence
  Description of Artificial Sequence: Synthetic oligonucleotide
  Antisense strand to SEQ ID NO: 941156
uuuaucacuuccuggaggc

SEQ ID NO: 941158 - RNA, 19 nt, Artificial Sequence
  Description of Artificial Sequence: Synthetic oligonucleotide
  Sense strand starting at position 1788 of SEQ ID NO: 913617
gcauauggaucuuccaaca

SEQ ID NO: 941159 - RNA, 19 nt, Artificial Sequence
  Description of Artificial Sequence: Synthetic oligonucleotide
  Antisense strand to SEQ ID NO: 941158
uguuggaagauccauaugc

SEQ ID NO: 941160 - RNA, 19 nt, Artificial Sequence
  Description of Artificial Sequence: Synthetic oligonucleotide
  Sense strand starting at position 1433 of SEQ ID NO: 913617
ugaaauaucugaguuccuc

SEQ ID NO: 941161 - RNA, 19 nt, Artificial Sequence
  Description of Artificial Sequence: Synthetic oligonucleotide
  Antisense strand to SEQ ID NO: 941160
gaggaacucagauauuuca

SEQ ID NO: 941162 - RNA, 19 nt, Artificial Sequence
  Description of Artificial Sequence: Synthetic oligonucleotide
  Sense strand starting at position 3414 of SEQ ID NO: 913617
ggcacuuaauagguaacau

SEQ ID NO: 941163 - RNA, 19 nt, Artificial Sequence
  Description of Artificial Sequence: Synthetic oligonucleotide
  Antisense strand to SEQ ID NO: 941162
auguuaccuauuaagugcc

SEQ ID NO: 941164 - RNA, 19 nt, Artificial Sequence
  Description of Artificial Sequence: Synthetic oligonucleotide
  Sense strand starting at position 3450 of SEQ ID NO: 913617
uagggugacuaugaauuua

SEQ ID NO: 941165 - RNA, 19 nt, Artificial Sequence
  Description of Artificial Sequence: Synthetic oligonucleotide
  Antisense strand to SEQ ID NO: 941164
uaaauucauagucacccua

SEQ ID NO: 941166 - RNA, 19 nt, Artificial Sequence
  Description of Artificial Sequence: Synthetic oligonucleotide
  Sense strand starting at position 2964 of SEQ ID NO: 913617
uuaagugggcugggaaauu

SEQ ID NO: 941167 - RNA, 19 nt, Artificial Sequence
  Description of Artificial Sequence: Synthetic oligonucleotide
  Antisense strand to SEQ ID NO: 941166
aauuucccagcccacuuaa

SEQ ID NO: 941168 - RNA, 19 nt, Artificial Sequence
  Description of Artificial Sequence: Synthetic oligonucleotide
  Sense strand starting at position 2635 of SEQ ID NO: 913617
accuuuacuggcugacaga

SEQ ID NO: 941169 - RNA, 19 nt, Artificial Sequence
  Description of Artificial Sequence: Synthetic oligonucleotide
  Antisense strand to SEQ ID NO: 941168
ucugucagccaguaaaggu

SEQ ID NO: 941170 - RNA, 19 nt, Artificial Sequence
  Description of Artificial Sequence: Synthetic oligonucleotide
  Sense strand starting at position 3577 of SEQ ID NO: 913617
gugagaccuccuugaacuu

SEQ ID NO: 941171 - RNA, 19 nt, Artificial Sequence
  Description of Artificial Sequence: Synthetic oligonucleotide
  Antisense strand to SEQ ID NO: 941170
aaguucaaggaggucucac

SEQ ID NO: 941172 - RNA, 19 nt, Artificial Sequence
  Description of Artificial Sequence: Synthetic oligonucleotide
  Sense strand starting at position 1258 of SEQ ID NO: 913617
guauccaaguaaucuauca

SEQ ID NO: 941173 - RNA, 19 nt, Artificial Sequence
  Description of Artificial Sequence: Synthetic oligonucleotide
  Antisense strand to SEQ ID NO: 941172
ugauagauuacuuggauac

SEQ ID NO: 941174 - RNA, 19 nt, Artificial Sequence
  Description of Artificial Sequence: Synthetic oligonucleotide
  Sense strand starting at position 3530 of SEQ ID NO: 913617
agagccuguccaugauaag

SEQ ID NO: 941175 - RNA, 19 nt, Artificial Sequence
  Description of Artificial Sequence: Synthetic oligonucleotide
  Antisense strand to SEQ ID NO: 941174
cuuaucauggacaggcucu

SEQ ID NO: 941176 - RNA, 19 nt, Artificial Sequence
  Description of Artificial Sequence: Synthetic oligonucleotide
  Sense strand starting at position 1753 of SEQ ID NO: 913617
auacuugugucccuagaaa

SEQ ID NO: 941177 - RNA, 19 nt, Artificial Sequence
  Description of Artificial Sequence: Synthetic oligonucleotide
  Antisense strand to SEQ ID NO: 941176
uuucuagggacacaaguau

SEQ ID NO: 941178 - RNA, 19 nt, Artificial Sequence
  Description of Artificial Sequence: Synthetic oligonucleotide
  Sense strand starting at position 3527 of SEQ ID NO: 913617
aacagagccuguccaugau

SEQ ID NO: 941179 - RNA, 19 nt, Artificial Sequence
  Description of Artificial Sequence: Synthetic oligonucleotide
  Antisense strand to SEQ ID NO: 941178
aucauggacaggcucuguu

SEQ ID NO: 941180 - RNA, 19 nt, Artificial Sequence
  Description of Artificial Sequence: Synthetic oligonucleotide
  Sense strand starting at position 1394 of SEQ ID NO: 913617
uggcauugccaacauuacu

SEQ ID NO: 941181 - RNA, 19 nt, Artificial Sequence
  Description of Artificial Sequence: Synthetic oligonucleotide
  Antisense strand to SEQ ID NO: 941180
aguaauguuggcaaugcca

SEQ ID NO: 941182 - RNA, 19 nt, Artificial Sequence
  Description of Artificial Sequence: Synthetic oligonucleotide
  Sense strand starting at position 2436 of SEQ ID NO: 913617
gccagucauccuggaacaa

SEQ ID NO: 941183 - RNA, 19 nt, Artificial Sequence
  Description of Artificial Sequence: Synthetic oligonucleotide
  Antisense strand to SEQ ID NO: 941182
uuguuccaggaugacuggc

SEQ ID NO: 941184 - RNA, 19 nt, Artificial Sequence
  Description of Artificial Sequence: Synthetic oligonucleotide
  Sense strand starting at position 3869 of SEQ ID NO: 913617
caugcuuuccuaugggaua

SEQ ID NO: 941185 - RNA, 19 nt, Artificial Sequence
  Description of Artificial Sequence: Synthetic oligonucleotide
  Antisense strand to SEQ ID NO: 941184
uaucccauaggaaagcaug

SEQ ID NO: 941186 - RNA, 19 nt, Artificial Sequence
  Description of Artificial Sequence: Synthetic oligonucleotide
  Sense strand starting at position 2827 of SEQ ID NO: 913617
aaaugugcuggucauuauu

SEQ ID NO: 941187 - RNA, 19 nt, Artificial Sequence
  Description of Artificial Sequence: Synthetic oligonucleotide
  Antisense strand to SEQ ID NO: 941186
aauaaugaccagcacauuu

SEQ ID NO: 941188 - RNA, 19 nt, Artificial Sequence
  Description of Artificial Sequence: Synthetic oligonucleotide
  Sense strand starting at position 1751 of SEQ ID NO: 913617
ggauacuugugucccuaga

SEQ ID NO: 941189 - RNA, 19 nt, Artificial Sequence
  Description of Artificial Sequence: Synthetic oligonucleotide
  Antisense strand to SEQ ID NO: 941188
ucuagggacacaaguaucc

SEQ ID NO: 941190 - RNA, 19 nt, Artificial Sequence
  Description of Artificial Sequence: Synthetic oligonucleotide
  Sense strand starting at position 1251 of SEQ ID NO: 913617
guaguuuguauccaaguaa

SEQ ID NO: 941191 - RNA, 19 nt, Artificial Sequence
  Description of Artificial Sequence: Synthetic oligonucleotide
  Antisense strand to SEQ ID NO: 941190
uuacuuggauacaaacuac

SEQ ID NO: 941192 - RNA, 19 nt, Artificial Sequence
  Description of Artificial Sequence: Synthetic oligonucleotide
  Sense strand starting at position 2405 of SEQ ID NO: 913617
ucgauuugaucucaugaag

SEQ ID NO: 941193 - RNA, 19 nt, Artificial Sequence
  Description of Artificial Sequence: Synthetic oligonucleotide
  Antisense strand to SEQ ID NO: 941192
cuucaugagaucaaaucga

SEQ ID NO: 941194 - RNA, 19 nt, Artificial Sequence
  Description of Artificial Sequence: Synthetic oligonucleotide
  Sense strand starting at position 2312 of SEQ ID NO: 913617
ucuugagcagauuguugau

SEQ ID NO: 941195 - RNA, 19 nt, Artificial Sequence
  Description of Artificial Sequence: Synthetic oligonucleotide
  Antisense strand to SEQ ID NO: 941194
aucaacaaucugcucaaga

SEQ ID NO: 941196 - RNA, 19 nt, Artificial Sequence
  Description of Artificial Sequence: Synthetic oligonucleotide
  Sense strand starting at position 2346 of SEQ ID NO: 913617
gauagauccucugcaugca

SEQ ID NO: 941197 - RNA, 19 nt, Artificial Sequence
  Description of Artificial Sequence: Synthetic oligonucleotide
  Antisense strand to SEQ ID NO: 941196
ugcaugcagaggaucuauc

SEQ ID NO: 941198 - RNA, 19 nt, Artificial Sequence
  Description of Artificial Sequence: Synthetic oligonucleotide
  Sense strand starting at position 1437 of SEQ ID NO: 913617
auaucugaguuccucugua

SEQ ID NO: 941199 - RNA, 19 nt, Artificial Sequence
  Description of Artificial Sequence: Synthetic oligonucleotide
  Antisense strand to SEQ ID NO: 941198
uacagaggaacucagauau

SEQ ID NO: 941200 - RNA, 19 nt, Artificial Sequence
  Description of Artificial Sequence: Synthetic oligonucleotide
  Sense strand starting at position 26 of SEQ ID NO: 913617
aguggucuaguguacuauu

SEQ ID NO: 941201 - RNA, 19 nt, Artificial Sequence
  Description of Artificial Sequence: Synthetic oligonucleotide
  Antisense strand to SEQ ID NO: 941200
aauaguacacuagaccacu

SEQ ID NO: 941202 - RNA, 19 nt, Artificial Sequence
  Description of Artificial Sequence: Synthetic oligonucleotide
  Sense strand starting at position 1749 of SEQ ID NO: 913617
cuggauacuugugucccua

SEQ ID NO: 941203 - RNA, 19 nt, Artificial Sequence
  Description of Artificial Sequence: Synthetic oligonucleotide
  Antisense strand to SEQ ID NO: 941202
uagggacacaaguauccag

SEQ ID NO: 941204 - RNA, 19 nt, Artificial Sequence
  Description of Artificial Sequence: Synthetic oligonucleotide
  Sense strand starting at position 1965 of SEQ ID NO: 913617
gguuaacaacuuugcgaug

SEQ ID NO: 941205 - RNA, 19 nt, Artificial Sequence
  Description of Artificial Sequence: Synthetic oligonucleotide
  Antisense strand to SEQ ID NO: 941204
caucgcaaaguuguuaacc

SEQ ID NO: 941206 - RNA, 19 nt, Artificial Sequence
  Description of Artificial Sequence: Synthetic oligonucleotide
  Sense strand starting at position 2533 of SEQ ID NO: 913618
accguggugcguuugaaga

SEQ ID NO: 941207 - RNA, 19 nt, Artificial Sequence
  Description of Artificial Sequence: Synthetic oligonucleotide
  Antisense strand to SEQ ID NO: 941206
ucuucaaacgcaccacggu

SEQ ID NO: 941208 - RNA, 19 nt, Artificial Sequence
  Description of Artificial Sequence: Synthetic oligonucleotide
  Sense strand starting at position 430 of SEQ ID NO: 913618
ugcuguuaagaggaaagua

SEQ ID NO: 941209 - RNA, 19 nt, Artificial Sequence
  Description of Artificial Sequence: Synthetic oligonucleotide
  Antisense strand to SEQ ID NO: 941208
uacuuuccucuuaacagca

SEQ ID NO: 941210 - RNA, 19 nt, Artificial Sequence
  Description of Artificial Sequence: Synthetic oligonucleotide
  Sense strand starting at position 2459 of SEQ ID NO: 913618
gccuuaaguccagcguuua

SEQ ID NO: 941211 - RNA, 19 nt, Artificial Sequence
  Description of Artificial Sequence: Synthetic oligonucleotide
  Antisense strand to SEQ ID NO: 941210
uaaacgcuggacuuaaggc

SEQ ID NO: 941212 - RNA, 19 nt, Artificial Sequence
  Description of Artificial Sequence: Synthetic oligonucleotide
  Sense strand starting at position 1019 of SEQ ID NO: 913618
cuuaaucaucugggacacu

SEQ ID NO: 941213 - RNA, 19 nt, Artificial Sequence
  Description of Artificial Sequence: Synthetic oligonucleotide
  Antisense strand to SEQ ID NO: 941212
agugucccagaugauuaag

SEQ ID NO: 941214 - RNA, 19 nt, Artificial Sequence
  Description of Artificial Sequence: Synthetic oligonucleotide
  Sense strand starting at position 1015 of SEQ ID NO: 913618
aaggcuuaaucaucuggga

SEQ ID NO: 941215 - RNA, 19 nt, Artificial Sequence
  Description of Artificial Sequence: Synthetic oligonucleotide
  Antisense strand to SEQ ID NO: 941214
ucccagaugauuaagccuu

SEQ ID NO: 941216 - RNA, 19 nt, Artificial Sequence
  Description of Artificial Sequence: Synthetic oligonucleotide
  Sense strand starting at position 482 of SEQ ID NO: 913618
ugaaauuguggagguagau

SEQ ID NO: 941217 - RNA, 19 nt, Artificial Sequence
  Description of Artificial Sequence: Synthetic oligonucleotide
  Antisense strand to SEQ ID NO: 941216
aucuaccuccacaauuuca

SEQ ID NO: 941218 - RNA, 19 nt, Artificial Sequence
  Description of Artificial Sequence: Synthetic oligonucleotide
  Sense strand starting at position 568 of SEQ ID NO: 913618
acgucuugcaaggaaacaa

SEQ ID NO: 941219 - RNA, 19 nt, Artificial Sequence
  Description of Artificial Sequence: Synthetic oligonucleotide
  Antisense strand to SEQ ID NO: 941218
uuguuuccuugcaagacgu

SEQ ID NO: 941220 - RNA, 19 nt, Artificial Sequence
  Description of Artificial Sequence: Synthetic oligonucleotide
  Sense strand starting at position 2174 of SEQ ID NO: 913618
uggcaaggcaguuaugaaa

SEQ ID NO: 941221 - RNA, 19 nt, Artificial Sequence
  Description of Artificial Sequence: Synthetic oligonucleotide
  Antisense strand to SEQ ID NO: 941220
uuucauaacugccuugcca

SEQ ID NO: 941222 - RNA, 19 nt, Artificial Sequence
  Description of Artificial Sequence: Synthetic oligonucleotide
  Sense strand starting at position 3386 of SEQ ID NO: 913618
uggagacccuuccuauauc

SEQ ID NO: 941223 - RNA, 19 nt, Artificial Sequence
  Description of Artificial Sequence: Synthetic oligonucleotide
  Antisense strand to SEQ ID NO: 941222
gauauaggaagggucucca

SEQ ID NO: 941224 - RNA, 19 nt, Artificial Sequence
  Description of Artificial Sequence: Synthetic oligonucleotide
  Sense strand starting at position 3904 of SEQ ID NO: 913618
ggcauuuguuucucauagu

SEQ ID NO: 941225 - RNA, 19 nt, Artificial Sequence
  Description of Artificial Sequence: Synthetic oligonucleotide
  Antisense strand to SEQ ID NO: 941224
acuaugagaaacaaaugcc

SEQ ID NO: 941226 - RNA, 19 nt, Artificial Sequence
  Description of Artificial Sequence: Synthetic oligonucleotide
  Sense strand starting at position 1017 of SEQ ID NO: 913618
ggcuuaaucaucugggaca

SEQ ID NO: 941227 - RNA, 19 nt, Artificial Sequence
  Description of Artificial Sequence: Synthetic oligonucleotide
  Antisense strand to SEQ ID NO: 941226
ugucccagaugauuaagcc

SEQ ID NO: 941228 - RNA, 19 nt, Artificial Sequence
  Description of Artificial Sequence: Synthetic oligonucleotide
  Sense strand starting at position 579 of SEQ ID NO: 913618
ggaaacaacgugugaaauu

SEQ ID NO: 941229 - RNA, 19 nt, Artificial Sequence
  Description of Artificial Sequence: Synthetic oligonucleotide
  Antisense strand to SEQ ID NO: 941228
aauuucacacguuguuucc

SEQ ID NO: 941230 - RNA, 19 nt, Artificial Sequence
  Description of Artificial Sequence: Synthetic oligonucleotide
  Sense strand starting at position 3295 of SEQ ID NO: 913618
guugauugacauuaguuuc

SEQ ID NO: 941231 - RNA, 19 nt, Artificial Sequence
  Description of Artificial Sequence: Synthetic oligonucleotide
  Antisense strand to SEQ ID NO: 941230
gaaacuaaugucaaucaac

SEQ ID NO: 941232 - RNA, 19 nt, Artificial Sequence
  Description of Artificial Sequence: Synthetic oligonucleotide
  Sense strand starting at position 2628 of SEQ ID NO: 913618
gcaggauggcuguaccaga

SEQ ID NO: 941233 - RNA, 19 nt, Artificial Sequence
  Description of Artificial Sequence: Synthetic oligonucleotide
  Antisense strand to SEQ ID NO: 941232
ucugguacagccauccugc

SEQ ID NO: 941234 - RNA, 19 nt, Artificial Sequence
  Description of Artificial Sequence: Synthetic oligonucleotide
  Sense strand starting at position 3289 of SEQ ID NO: 913618
aaggcaguugauugacauu

SEQ ID NO: 941235 - RNA, 19 nt, Artificial Sequence
  Description of Artificial Sequence: Synthetic oligonucleotide
  Antisense strand to SEQ ID NO: 941234
aaugucaaucaacugccuu

SEQ ID NO: 941236 - RNA, 19 nt, Artificial Sequence
  Description of Artificial Sequence: Synthetic oligonucleotide
  Sense strand starting at position 3743 of SEQ ID NO: 913618
gaugccuaugcucaggauu

SEQ ID NO: 941237 - RNA, 19 nt, Artificial Sequence
  Description of Artificial Sequence: Synthetic oligonucleotide
  Antisense strand to SEQ ID NO: 941236
aauccugagcauaggcauc

SEQ ID NO: 941238 - RNA, 19 nt, Artificial Sequence
  Description of Artificial Sequence: Synthetic oligonucleotide
  Sense strand starting at position 3514 of SEQ ID NO: 913618
cuauuaagggccgaauugu

SEQ ID NO: 941239 - RNA, 19 nt, Artificial Sequence
  Description of Artificial Sequence: Synthetic oligonucleotide
  Antisense strand to SEQ ID NO: 941238
acaauucggcccuuaauag

SEQ ID NO: 941240 - RNA, 19 nt, Artificial Sequence
  Description of Artificial Sequence: Synthetic oligonucleotide
  Sense strand starting at position 1103 of SEQ ID NO: 913618
ggaggguuggucggacaca

SEQ ID NO: 941241 - RNA, 19 nt, Artificial Sequence
  Description of Artificial Sequence: Synthetic oligonucleotide
  Antisense strand to SEQ ID NO: 941240
uguguccgaccaacccucc

SEQ ID NO: 941242 - RNA, 19 nt, Artificial Sequence
  Description of Artificial Sequence: Synthetic oligonucleotide
  Sense strand starting at position 446 of SEQ ID NO: 913618
guacaaggcuuucugacaa

SEQ ID NO: 941243 - RNA, 19 nt, Artificial Sequence
  Description of Artificial Sequence: Synthetic oligonucleotide
  Antisense strand to SEQ ID NO: 941242
uugucagaaagccuuguac

SEQ ID NO: 941244 - RNA, 19 nt, Artificial Sequence
  Description of Artificial Sequence: Synthetic oligonucleotide
  Sense strand starting at position 567 of SEQ ID NO: 913618
aacgucuugcaaggaaaca

SEQ ID NO: 941245 - RNA, 19 nt, Artificial Sequence
  Description of Artificial Sequence: Synthetic oligonucleotide
  Antisense strand to SEQ ID NO: 941244
uguuuccuugcaagacguu

SEQ ID NO: 941246 - RNA, 19 nt, Artificial Sequence
  Description of Artificial Sequence: Synthetic oligonucleotide
  Sense strand starting at position 992 of SEQ ID NO: 913618
cuaagucuugcagaguauc

SEQ ID NO: 941247 - RNA, 19 nt, Artificial Sequence
  Description of Artificial Sequence: Synthetic oligonucleotide
  Antisense strand to SEQ ID NO: 941246
gauacucugcaagacuuag

SEQ ID NO: 941248 - RNA, 19 nt, Artificial Sequence
  Description of Artificial Sequence: Synthetic oligonucleotide
  Sense strand starting at position 1273 of SEQ ID NO: 913618
uggacaacugugcggauaa

SEQ ID NO: 941249 - RNA, 19 nt, Artificial Sequence
  Description of Artificial Sequence: Synthetic oligonucleotide
  Antisense strand to SEQ ID NO: 941248
uuauccgcacaguugucca

SEQ ID NO: 941250 - RNA, 19 nt, Artificial Sequence
  Description of Artificial Sequence: Synthetic oligonucleotide
  Sense strand starting at position 3510 of SEQ ID NO: 913618
ggagcuauuaagggccgaa

SEQ ID NO: 941251 - RNA, 19 nt, Artificial Sequence
  Description of Artificial Sequence: Synthetic oligonucleotide
  Antisense strand to SEQ ID NO: 941250
uucggcccuuaauagcucc

SEQ ID NO: 941252 - RNA, 19 nt, Artificial Sequence
  Description of Artificial Sequence: Synthetic oligonucleotide
  Sense strand starting at position 543 of SEQ ID NO: 913618
gucagucaggucgaaagua

SEQ ID NO: 941253 - RNA, 19 nt, Artificial Sequence
  Description of Artificial Sequence: Synthetic oligonucleotide
  Antisense strand to SEQ ID NO: 941252
uacuuucgaccugacugac

SEQ ID NO: 941254 - RNA, 19 nt, Artificial Sequence
  Description of Artificial Sequence: Synthetic oligonucleotide
  Sense strand starting at position 535 of SEQ ID NO: 913618
ucugauaagucagucaggu

SEQ ID NO: 941255 - RNA, 19 nt, Artificial Sequence
  Description of Artificial Sequence: Synthetic oligonucleotide
  Antisense strand to SEQ ID NO: 941254
accugacugacuuaucaga

SEQ ID NO: 941256 - RNA, 19 nt, Artificial Sequence
  Description of Artificial Sequence: Synthetic oligonucleotide
  Sense strand starting at position 580 of SEQ ID NO: 913618
gaaacaacgugugaaauuu

SEQ ID NO: 941257 - RNA, 19 nt, Artificial Sequence
  Description of Artificial Sequence: Synthetic oligonucleotide
  Antisense strand to SEQ ID NO: 941256
aaauuucacacguuguuuc

SEQ ID NO: 941258 - RNA, 19 nt, Artificial Sequence
  Description of Artificial Sequence: Synthetic oligonucleotide
  Sense strand starting at position 998 of SEQ ID NO: 913618
cuugcagaguaucuucuaa

SEQ ID NO: 941259 - RNA, 19 nt, Artificial Sequence
  Description of Artificial Sequence: Synthetic oligonucleotide
  Antisense strand to SEQ ID NO: 941258
uuagaagauacucugcaag

SEQ ID NO: 941260 - RNA, 19 nt, Artificial Sequence
  Description of Artificial Sequence: Synthetic oligonucleotide
  Sense strand starting at position 1224 of SEQ ID NO: 913618
uguuaaguaggcugaugau

SEQ ID NO: 941261 - RNA, 19 nt, Artificial Sequence
  Description of Artificial Sequence: Synthetic oligonucleotide
  Antisense strand to SEQ ID NO: 941260
aucaucagccuacuuaaca

SEQ ID NO: 941262 - RNA, 19 nt, Artificial Sequence
  Description of Artificial Sequence: Synthetic oligonucleotide
  Sense strand starting at position 970 of SEQ ID NO: 913618
agagaagggcuccguucau

SEQ ID NO: 941263 - RNA, 19 nt, Artificial Sequence
  Description of Artificial Sequence: Synthetic oligonucleotide
  Antisense strand to SEQ ID NO: 941262
augaacggagcccuucucu

SEQ ID NO: 941264 - RNA, 19 nt, Artificial Sequence
  Description of Artificial Sequence: Synthetic oligonucleotide
  Sense strand starting at position 3360 of SEQ ID NO: 913618
gacugagguucccuuugca

SEQ ID NO: 941265 - RNA, 19 nt, Artificial Sequence
  Description of Artificial Sequence: Synthetic oligonucleotide
  Antisense strand to SEQ ID NO: 941264
ugcaaagggaaccucaguc

SEQ ID NO: 941266 - RNA, 19 nt, Artificial Sequence
  Description of Artificial Sequence: Synthetic oligonucleotide
  Sense strand starting at position 890 of SEQ ID NO: 913618
agcugaugcacuugugaaa

SEQ ID NO: 941267 - RNA, 19 nt, Artificial Sequence
  Description of Artificial Sequence: Synthetic oligonucleotide
  Antisense strand to SEQ ID NO: 941266
uuucacaagugcaucagcu

SEQ ID NO: 941268 - RNA, 19 nt, Artificial Sequence
  Description of Artificial Sequence: Synthetic oligonucleotide
  Sense strand starting at position 2419 of SEQ ID NO: 913618
cggagugagugccuacaga

SEQ ID NO: 941269 - RNA, 19 nt, Artificial Sequence
  Description of Artificial Sequence: Synthetic oligonucleotide
  Antisense strand to SEQ ID NO: 941268
ucuguaggcacucacuccg

SEQ ID NO: 941270 - RNA, 19 nt, Artificial Sequence
  Description of Artificial Sequence: Synthetic oligonucleotide
  Sense strand starting at position 3983 of SEQ ID NO: 913618
cuccucauggcuugcaaau

SEQ ID NO: 941271 - RNA, 19 nt, Artificial Sequence
  Description of Artificial Sequence: Synthetic oligonucleotide
  Antisense strand to SEQ ID NO: 941270
auuugcaagccaugaggag

SEQ ID NO: 941272 - RNA, 19 nt, Artificial Sequence
  Description of Artificial Sequence: Synthetic oligonucleotide
  Sense strand starting at position 2476 of SEQ ID NO: 913618
uaguauccguccucagauc

SEQ ID NO: 941273 - RNA, 19 nt, Artificial Sequence
  Description of Artificial Sequence: Synthetic oligonucleotide
  Antisense strand to SEQ ID NO: 941272
gaucugaggacggauacua

SEQ ID NO: 941274 - RNA, 19 nt, Artificial Sequence
  Description of Artificial Sequence: Synthetic oligonucleotide
  Sense strand starting at position 858 of SEQ ID NO: 913618
caacaacgugcguaacuuu

SEQ ID NO: 941275 - RNA, 19 nt, Artificial Sequence
  Description of Artificial Sequence: Synthetic oligonucleotide
  Antisense strand to SEQ ID NO: 941274
aaaguuacgcacguuguug

SEQ ID NO: 941276 - RNA, 19 nt, Artificial Sequence
  Description of Artificial Sequence: Synthetic oligonucleotide
  Sense strand starting at position 769 of SEQ ID NO: 913618
uuucguauuuaguaaagac

SEQ ID NO: 941277 - RNA, 19 nt, Artificial Sequence
  Description of Artificial Sequence: Synthetic oligonucleotide
  Antisense strand to SEQ ID NO: 941276
gucuuuacuaaauacgaaa

SEQ ID NO: 941278 - RNA, 19 nt, Artificial Sequence
  Description of Artificial Sequence: Synthetic oligonucleotide
  Sense strand starting at position 2337 of SEQ ID NO: 913618
uguugucucccacgacuga

SEQ ID NO: 941279 - RNA, 19 nt, Artificial Sequence
  Description of Artificial Sequence: Synthetic oligonucleotide
  Antisense strand to SEQ ID NO: 941278
ucagucgugggagacaaca

SEQ ID NO: 941280 - RNA, 19 nt, Artificial Sequence
  Description of Artificial Sequence: Synthetic oligonucleotide
  Sense strand starting at position 2440 of SEQ ID NO: 913618
cugcuuacauguguacauu

SEQ ID NO: 941281 - RNA, 19 nt, Artificial Sequence
  Description of Artificial Sequence: Synthetic oligonucleotide
  Antisense strand to SEQ ID NO: 941280
aauguacacauguaagcag

SEQ ID NO: 941282 - RNA, 19 nt, Artificial Sequence
  Description of Artificial Sequence: Synthetic oligonucleotide
  Sense strand starting at position 1020 of SEQ ID NO: 913618
uuaaucaucugggacacua

SEQ ID NO: 941283 - RNA, 19 nt, Artificial Sequence
  Description of Artificial Sequence: Synthetic oligonucleotide
  Antisense strand to SEQ ID NO: 941282
uagugucccagaugauuaa

SEQ ID NO: 941284 - RNA, 19 nt, Artificial Sequence
  Description of Artificial Sequence: Synthetic oligonucleotide
  Sense strand starting at position 521 of SEQ ID NO: 913618
cugauaaagugacaucuga

SEQ ID NO: 941285 - RNA, 19 nt, Artificial Sequence
  Description of Artificial Sequence: Synthetic oligonucleotide
  Antisense strand to SEQ ID NO: 941284
ucagaugucacuuuaucag

SEQ ID NO: 941286 - RNA, 19 nt, Artificial Sequence
  Description of Artificial Sequence: Synthetic oligonucleotide
  Sense strand starting at position 2533 of SEQ ID NO: 913619
accguggugcguuugaaga

SEQ ID NO: 941287 - RNA, 19 nt, Artificial Sequence
  Description of Artificial Sequence: Synthetic oligonucleotide
  Antisense strand to SEQ ID NO: 941286
ucuucaaacgcaccacggu

SEQ ID NO: 941288 - RNA, 19 nt, Artificial Sequence
  Description of Artificial Sequence: Synthetic oligonucleotide
  Sense strand starting at position 430 of SEQ ID NO: 913619
ugcuguuaagaggaaagua

SEQ ID NO: 941289 - RNA, 19 nt, Artificial Sequence
  Description of Artificial Sequence: Synthetic oligonucleotide
  Antisense strand to SEQ ID NO: 941288
uacuuuccucuuaacagca

SEQ ID NO: 941290 - RNA, 19 nt, Artificial Sequence
  Description of Artificial Sequence: Synthetic oligonucleotide
  Sense strand starting at position 2459 of SEQ ID NO: 913619
gccuuaaguccagcguuua

SEQ ID NO: 941291 - RNA, 19 nt, Artificial Sequence
  Description of Artificial Sequence: Synthetic oligonucleotide
  Antisense strand to SEQ ID NO: 941290
uaaacgcuggacuuaaggc

SEQ ID NO: 941292 - RNA, 19 nt, Artificial Sequence
  Description of Artificial Sequence: Synthetic oligonucleotide
  Sense strand starting at position 1019 of SEQ ID NO: 913619
cuuaaucaucugggacacu

SEQ ID NO: 941293 - RNA, 19 nt, Artificial Sequence
  Description of Artificial Sequence: Synthetic oligonucleotide
  Antisense strand to SEQ ID NO: 941292
agugucccagaugauuaag

SEQ ID NO: 941294 - RNA, 19 nt, Artificial Sequence
  Description of Artificial Sequence: Synthetic oligonucleotide
  Sense strand starting at position 1015 of SEQ ID NO: 913619
aaggcuuaaucaucuggga

SEQ ID NO: 941295 - RNA, 19 nt, Artificial Sequence
  Description of Artificial Sequence: Synthetic oligonucleotide
  Antisense strand to SEQ ID NO: 941294
ucccagaugauuaagccuu

SEQ ID NO: 941296 - RNA, 19 nt, Artificial Sequence
  Description of Artificial Sequence: Synthetic oligonucleotide
  Sense strand starting at position 482 of SEQ ID NO: 913619
ugaaauuguggagguagau

SEQ ID NO: 941297 - RNA, 19 nt, Artificial Sequence
  Description of Artificial Sequence: Synthetic oligonucleotide
  Antisense strand to SEQ ID NO: 941296
aucuaccuccacaauuuca

SEQ ID NO: 941298 - RNA, 19 nt, Artificial Sequence
  Description of Artificial Sequence: Synthetic oligonucleotide
  Sense strand starting at position 568 of SEQ ID NO: 913619
acgucuugcaaggaaacaa

SEQ ID NO: 941299 - RNA, 19 nt, Artificial Sequence
  Description of Artificial Sequence: Synthetic oligonucleotide
  Antisense strand to SEQ ID NO: 941298
uuguuuccuugcaagacgu

SEQ ID NO: 941300 - RNA, 19 nt, Artificial Sequence
  Description of Artificial Sequence: Synthetic oligonucleotide
  Sense strand starting at position 2174 of SEQ ID NO: 913619
uggcaaggcaguuaugaaa

SEQ ID NO: 941301 - RNA, 19 nt, Artificial Sequence
  Description of Artificial Sequence: Synthetic oligonucleotide
  Antisense strand to SEQ ID NO: 941300
uuucauaacugccuugcca

SEQ ID NO: 941302 - RNA, 19 nt, Artificial Sequence
  Description of Artificial Sequence: Synthetic oligonucleotide
  Sense strand starting at position 3386 of SEQ ID NO: 913619
uggagacccuuccuauauc

SEQ ID NO: 941303 - RNA, 19 nt, Artificial Sequence
  Description of Artificial Sequence: Synthetic oligonucleotide
  Antisense strand to SEQ ID NO: 941302
gauauaggaagggucucca

SEQ ID NO: 941304 - RNA, 19 nt, Artificial Sequence
  Description of Artificial Sequence: Synthetic oligonucleotide
  Sense strand starting at position 3904 of SEQ ID NO: 913619
ggcauuuguuucucauagu

SEQ ID NO: 941305 - RNA, 19 nt, Artificial Sequence
  Description of Artificial Sequence: Synthetic oligonucleotide
  Antisense strand to SEQ ID NO: 941304
acuaugagaaacaaaugcc

SEQ ID NO: 941306 - RNA, 19 nt, Artificial Sequence
  Description of Artificial Sequence: Synthetic oligonucleotide
  Sense strand starting at position 1017 of SEQ ID NO: 913619
ggcuuaaucaucugggaca

SEQ ID NO: 941307 - RNA, 19 nt, Artificial Sequence
  Description of Artificial Sequence: Synthetic oligonucleotide
  Antisense strand to SEQ ID NO: 941306
ugucccagaugauuaagcc

SEQ ID NO: 941308 - RNA, 19 nt, Artificial Sequence
  Description of Artificial Sequence: Synthetic oligonucleotide
  Sense strand starting at position 579 of SEQ ID NO: 913619
ggaaacaacgugugaaauu

SEQ ID NO: 941309 - RNA, 19 nt, Artificial Sequence
  Description of Artificial Sequence: Synthetic oligonucleotide
  Antisense strand to SEQ ID NO: 941308
aauuucacacguuguuucc

SEQ ID NO: 941310 - RNA, 19 nt, Artificial Sequence
  Description of Artificial Sequence: Synthetic oligonucleotide
  Sense strand starting at position 3295 of SEQ ID NO: 913619
guugauugacauuaguuuc

SEQ ID NO: 941311 - RNA, 19 nt, Artificial Sequence
  Description of Artificial Sequence: Synthetic oligonucleotide
  Antisense strand to SEQ ID NO: 941310
gaaacuaaugucaaucaac

SEQ ID NO: 941312 - RNA, 19 nt, Artificial Sequence
  Description of Artificial Sequence: Synthetic oligonucleotide
  Sense strand starting at position 2628 of SEQ ID NO: 913619
gcaggauggcuguaccaga

SEQ ID NO: 941313 - RNA, 19 nt, Artificial Sequence
  Description of Artificial Sequence: Synthetic oligonucleotide
  Antisense strand to SEQ ID NO: 941312
ucugguacagccauccugc

SEQ ID NO: 941314 - RNA, 19 nt, Artificial Sequence
  Description of Artificial Sequence: Synthetic oligonucleotide
  Sense strand starting at position 3289 of SEQ ID NO: 913619
aaggcaguugauugacauu

SEQ ID NO: 941315 - RNA, 19 nt, Artificial Sequence
  Description of Artificial Sequence: Synthetic oligonucleotide
  Antisense strand to SEQ ID NO: 941314
aaugucaaucaacugccuu

SEQ ID NO: 941316 - RNA, 19 nt, Artificial Sequence
  Description of Artificial Sequence: Synthetic oligonucleotide
  Sense strand starting at position 3743 of SEQ ID NO: 913619
gaugccuaugcucaggauu

SEQ ID NO: 941317 - RNA, 19 nt, Artificial Sequence
  Description of Artificial Sequence: Synthetic oligonucleotide
  Antisense strand to SEQ ID NO: 941316
aauccugagcauaggcauc

SEQ ID NO: 941318 - RNA, 19 nt, Artificial Sequence
  Description of Artificial Sequence: Synthetic oligonucleotide
  Sense strand starting at position 3514 of SEQ ID NO: 913619
cuauuaagggccgaauugu

SEQ ID NO: 941319 - RNA, 19 nt, Artificial Sequence
  Description of Artificial Sequence: Synthetic oligonucleotide
  Antisense strand to SEQ ID NO: 941318
acaauucggcccuuaauag

SEQ ID NO: 941320 - RNA, 19 nt, Artificial Sequence
  Description of Artificial Sequence: Synthetic oligonucleotide
  Sense strand starting at position 1103 of SEQ ID NO: 913619
ggaggguuggucggacaca

SEQ ID NO: 941321 - RNA, 19 nt, Artificial Sequence
  Description of Artificial Sequence: Synthetic oligonucleotide
  Antisense strand to SEQ ID NO: 941320
uguguccgaccaacccucc

SEQ ID NO: 941322 - RNA, 19 nt, Artificial Sequence
  Description of Artificial Sequence: Synthetic oligonucleotide
  Sense strand starting at position 446 of SEQ ID NO: 913619
guacaaggcuuucugacaa

SEQ ID NO: 941323 - RNA, 19 nt, Artificial Sequence
  Description of Artificial Sequence: Synthetic oligonucleotide
  Antisense strand to SEQ ID NO: 941322
uugucagaaagccuuguac

SEQ ID NO: 941324 - RNA, 19 nt, Artificial Sequence
  Description of Artificial Sequence: Synthetic oligonucleotide
  Sense strand starting at position 567 of SEQ ID NO: 913619
aacgucuugcaaggaaaca

SEQ ID NO: 941325 - RNA, 19 nt, Artificial Sequence
  Description of Artificial Sequence: Synthetic oligonucleotide
  Antisense strand to SEQ ID NO: 941324
uguuuccuugcaagacguu

SEQ ID NO: 941326 - RNA, 19 nt, Artificial Sequence
  Description of Artificial Sequence: Synthetic oligonucleotide
  Sense strand starting at position 992 of SEQ ID NO: 913619
cuaagucuugcagaguauc

SEQ ID NO: 941327 - RNA, 19 nt, Artificial Sequence
  Description of Artificial Sequence: Synthetic oligonucleotide
  Antisense strand to SEQ ID NO: 941326
gauacucugcaagacuuag

SEQ ID NO: 941328 - RNA, 19 nt, Artificial Sequence
  Description of Artificial Sequence: Synthetic oligonucleotide
  Sense strand starting at position 1273 of SEQ ID NO: 913619
uggacaacugugcggauaa

SEQ ID NO: 941329 - RNA, 19 nt, Artificial Sequence
  Description of Artificial Sequence: Synthetic oligonucleotide
  Antisense strand to SEQ ID NO: 941328
uuauccgcacaguugucca

SEQ ID NO: 941330 - RNA, 19 nt, Artificial Sequence
  Description of Artificial Sequence: Synthetic oligonucleotide
  Sense strand starting at position 3510 of SEQ ID NO: 913619
ggagcuauuaagggccgaa

SEQ ID NO: 941331 - RNA, 19 nt, Artificial Sequence
  Description of Artificial Sequence: Synthetic oligonucleotide
  Antisense strand to SEQ ID NO: 941330
uucggcccuuaauagcucc

SEQ ID NO: 941332 - RNA, 19 nt, Artificial Sequence
  Description of Artificial Sequence: Synthetic oligonucleotide
  Sense strand starting at position 543 of SEQ ID NO: 913619
gucagucaggucgaaagua

SEQ ID NO: 941333 - RNA, 19 nt, Artificial Sequence
  Description of Artificial Sequence: Synthetic oligonucleotide
  Antisense strand to SEQ ID NO: 941332
uacuuucgaccugacugac

SEQ ID NO: 941334 - RNA, 19 nt, Artificial Sequence
  Description of Artificial Sequence: Synthetic oligonucleotide
  Sense strand starting at position 535 of SEQ ID NO: 913619
ucugauaagucagucaggu

SEQ ID NO: 941335 - RNA, 19 nt, Artificial Sequence
  Description of Artificial Sequence: Synthetic oligonucleotide
  Antisense strand to SEQ ID NO: 941334
accugacugacuuaucaga

SEQ ID NO: 941336 - RNA, 19 nt, Artificial Sequence
  Description of Artificial Sequence: Synthetic oligonucleotide
  Sense strand starting at position 580 of SEQ ID NO: 913619
gaaacaacgugugaaauuu

SEQ ID NO: 941337 - RNA, 19 nt, Artificial Sequence
  Description of Artificial Sequence: Synthetic oligonucleotide
  Antisense strand to SEQ ID NO: 941336
aaauuucacacguuguuuc

SEQ ID NO: 941338 - RNA, 19 nt, Artificial Sequence
  Description of Artificial Sequence: Synthetic oligonucleotide
  Sense strand starting at position 998 of SEQ ID NO: 913619
cuugcagaguaucuucuaa

SEQ ID NO: 941339 - RNA, 19 nt, Artificial Sequence
  Description of Artificial Sequence: Synthetic oligonucleotide
  Antisense strand to SEQ ID NO: 941338
uuagaagauacucugcaag

SEQ ID NO: 941340 - RNA, 19 nt, Artificial Sequence
  Description of Artificial Sequence: Synthetic oligonucleotide
  Sense strand starting at position 1224 of SEQ ID NO: 913619
uguuaaguaggcugaugau

SEQ ID NO: 941341 - RNA, 19 nt, Artificial Sequence
  Description of Artificial Sequence: Synthetic oligonucleotide
  Antisense strand to SEQ ID NO: 941340
aucaucagccuacuuaaca

SEQ ID NO: 941342 - RNA, 19 nt, Artificial Sequence
  Description of Artificial Sequence: Synthetic oligonucleotide
  Sense strand starting at position 970 of SEQ ID NO: 913619
agagaagggcuccguucau

SEQ ID NO: 941343 - RNA, 19 nt, Artificial Sequence
  Description of Artificial Sequence: Synthetic oligonucleotide
  Antisense strand to SEQ ID NO: 941342
augaacggagcccuucucu

SEQ ID NO: 941344 - RNA, 19 nt, Artificial Sequence
  Description of Artificial Sequence: Synthetic oligonucleotide
  Sense strand starting at position 3360 of SEQ ID NO: 913619
gacugagguucccuuugca

SEQ ID NO: 941345 - RNA, 19 nt, Artificial Sequence
  Description of Artificial Sequence: Synthetic oligonucleotide
  Antisense strand to SEQ ID NO: 941344
ugcaaagggaaccucaguc

SEQ ID NO: 941346 - RNA, 19 nt, Artificial Sequence
  Description of Artificial Sequence: Synthetic oligonucleotide
  Sense strand starting at position 890 of SEQ ID NO: 913619
agcugaugcacuugugaaa

SEQ ID NO: 941347 - RNA, 19 nt, Artificial Sequence
  Description of Artificial Sequence: Synthetic oligonucleotide
  Antisense strand to SEQ ID NO: 941346
uuucacaagugcaucagcu

SEQ ID NO: 941348 - RNA, 19 nt, Artificial Sequence
  Description of Artificial Sequence: Synthetic oligonucleotide
  Sense strand starting at position 2419 of SEQ ID NO: 913619
cggagugagugccuacaga

SEQ ID NO: 941349 - RNA, 19 nt, Artificial Sequence
  Description of Artificial Sequence: Synthetic oligonucleotide
  Antisense strand to SEQ ID NO: 941348
ucuguaggcacucacuccg

SEQ ID NO: 941350 - RNA, 19 nt, Artificial Sequence
  Description of Artificial Sequence: Synthetic oligonucleotide
  Sense strand starting at position 3983 of SEQ ID NO: 913619
cuccucauggcuugcaaau

SEQ ID NO: 941351 - RNA, 19 nt, Artificial Sequence
  Description of Artificial Sequence: Synthetic oligonucleotide
  Antisense strand to SEQ ID NO: 941350
auuugcaagccaugaggag

SEQ ID NO: 941352 - RNA, 19 nt, Artificial Sequence
  Description of Artificial Sequence: Synthetic oligonucleotide
  Sense strand starting at position 2476 of SEQ ID NO: 913619
uaguauccguccucagauc

SEQ ID NO: 941353 - RNA, 19 nt, Artificial Sequence
  Description of Artificial Sequence: Synthetic oligonucleotide
  Antisense strand to SEQ ID NO: 941352
gaucugaggacggauacua

SEQ ID NO: 941354 - RNA, 19 nt, Artificial Sequence
  Description of Artificial Sequence: Synthetic oligonucleotide
  Sense strand starting at position 858 of SEQ ID NO: 913619
caacaacgugcguaacuuu

SEQ ID NO: 941355 - RNA, 19 nt, Artificial Sequence
  Description of Artificial Sequence: Synthetic oligonucleotide
  Antisense strand to SEQ ID NO: 941354
aaaguuacgcacguuguug

SEQ ID NO: 941356 - RNA, 19 nt, Artificial Sequence
  Description of Artificial Sequence: Synthetic oligonucleotide
  Sense strand starting at position 769 of SEQ ID NO: 913619
uuucguauuuaguaaagac

SEQ ID NO: 941357 - RNA, 19 nt, Artificial Sequence
  Description of Artificial Sequence: Synthetic oligonucleotide
  Antisense strand to SEQ ID NO: 941356
gucuuuacuaaauacgaaa

SEQ ID NO: 941358 - RNA, 19 nt, Artificial Sequence
  Description of Artificial Sequence: Synthetic oligonucleotide
  Sense strand starting at position 2337 of SEQ ID NO: 913619
uguugucucccacgacuga

SEQ ID NO: 941359 - RNA, 19 nt, Artificial Sequence
  Description of Artificial Sequence: Synthetic oligonucleotide
  Antisense strand to SEQ ID NO: 941358
ucagucgugggagacaaca

SEQ ID NO: 941360 - RNA, 19 nt, Artificial Sequence
  Description of Artificial Sequence: Synthetic oligonucleotide
  Sense strand starting at position 2440 of SEQ ID NO: 913619
cugcuuacauguguacauu

SEQ ID NO: 941361 - RNA, 19 nt, Artificial Sequence
  Description of Artificial Sequence: Synthetic oligonucleotide
  Antisense strand to SEQ ID NO: 941360
aauguacacauguaagcag

SEQ ID NO: 941362 - RNA, 19 nt, Artificial Sequence
  Description of Artificial Sequence: Synthetic oligonucleotide
  Sense strand starting at position 1020 of SEQ ID NO: 913619
uuaaucaucugggacacua

SEQ ID NO: 941363 - RNA, 19 nt, Artificial Sequence
  Description of Artificial Sequence: Synthetic oligonucleotide
  Antisense strand to SEQ ID NO: 941362
uagugucccagaugauuaa

SEQ ID NO: 941364 - RNA, 19 nt, Artificial Sequence
  Description of Artificial Sequence: Synthetic oligonucleotide
  Sense strand starting at position 521 of SEQ ID NO: 913619
cugauaaagugacaucuga

SEQ ID NO: 941365 - RNA, 19 nt, Artificial Sequence
  Description of Artificial Sequence: Synthetic oligonucleotide
  Antisense strand to SEQ ID NO: 941364
ucagaugucacuuuaucag

SEQ ID NO: 941366 - RNA, 19 nt, Artificial Sequence
  Description of Artificial Sequence: Synthetic oligonucleotide
  Sense strand starting at position 2118 of SEQ ID NO: 913620
accguggugcguuugaaga

SEQ ID NO: 941367 - RNA, 19 nt, Artificial Sequence
  Description of Artificial Sequence: Synthetic oligonucleotide
  Antisense strand to SEQ ID NO: 941366
ucuucaaacgcaccacggu

SEQ ID NO: 941368 - RNA, 19 nt, Artificial Sequence
  Description of Artificial Sequence: Synthetic oligonucleotide
  Sense strand starting at position 15 of SEQ ID NO: 913620
ugcuguuaagaggaaagua

SEQ ID NO: 941369 - RNA, 19 nt, Artificial Sequence
  Description of Artificial Sequence: Synthetic oligonucleotide
  Antisense strand to SEQ ID NO: 941368
uacuuuccucuuaacagca

SEQ ID NO: 941370 - RNA, 19 nt, Artificial Sequence
  Description of Artificial Sequence: Synthetic oligonucleotide
  Sense strand starting at position 2044 of SEQ ID NO: 913620
gccuuaaguccagcguuua

SEQ ID NO: 941371 - RNA, 19 nt, Artificial Sequence
  Description of Artificial Sequence: Synthetic oligonucleotide
  Antisense strand to SEQ ID NO: 941370
uaaacgcuggacuuaaggc

SEQ ID NO: 941372 - RNA, 19 nt, Artificial Sequence
  Description of Artificial Sequence: Synthetic oligonucleotide
  Sense strand starting at position 604 of SEQ ID NO: 913620
cuuaaucaucugggacacu

SEQ ID NO: 941373 - RNA, 19 nt, Artificial Sequence
  Description of Artificial Sequence: Synthetic oligonucleotide
  Antisense strand to SEQ ID NO: 941372
agugucccagaugauuaag

SEQ ID NO: 941374 - RNA, 19 nt, Artificial Sequence
  Description of Artificial Sequence: Synthetic oligonucleotide
  Sense strand starting at position 600 of SEQ ID NO: 913620
aaggcuuaaucaucuggga

SEQ ID NO: 941375 - RNA, 19 nt, Artificial Sequence
  Description of Artificial Sequence: Synthetic oligonucleotide
  Antisense strand to SEQ ID NO: 941374
ucccagaugauuaagccuu

SEQ ID NO: 941376 - RNA, 19 nt, Artificial Sequence
  Description of Artificial Sequence: Synthetic oligonucleotide
  Sense strand starting at position 67 of SEQ ID NO: 913620
ugaaauuguggagguagau

SEQ ID NO: 941377 - RNA, 19 nt, Artificial Sequence
  Description of Artificial Sequence: Synthetic oligonucleotide
  Antisense strand to SEQ ID NO: 941376
aucuaccuccacaauuuca

SEQ ID NO: 941378 - RNA, 19 nt, Artificial Sequence
  Description of Artificial Sequence: Synthetic oligonucleotide
  Sense strand starting at position 153 of SEQ ID NO: 913620
acgucuugcaaggaaacaa

SEQ ID NO: 941379 - RNA, 19 nt, Artificial Sequence
  Description of Artificial Sequence: Synthetic oligonucleotide
  Antisense strand to SEQ ID NO: 941378
uuguuuccuugcaagacgu

SEQ ID NO: 941380 - RNA, 19 nt, Artificial Sequence
  Description of Artificial Sequence: Synthetic oligonucleotide
  Sense strand starting at position 1759 of SEQ ID NO: 913620
uggcaaggcaguuaugaaa

SEQ ID NO: 941381 - RNA, 19 nt, Artificial Sequence
  Description of Artificial Sequence: Synthetic oligonucleotide
  Antisense strand to SEQ ID NO: 941380
uuucauaacugccuugcca

SEQ ID NO: 941382 - RNA, 19 nt, Artificial Sequence
  Description of Artificial Sequence: Synthetic oligonucleotide
  Sense strand starting at position 2971 of SEQ ID NO: 913620
uggagacccuuccuauauc

SEQ ID NO: 941383 - RNA, 19 nt, Artificial Sequence
  Description of Artificial Sequence: Synthetic oligonucleotide
  Antisense strand to SEQ ID NO: 941382
gauauaggaagggucucca

SEQ ID NO: 941384 - RNA, 19 nt, Artificial Sequence
  Description of Artificial Sequence: Synthetic oligonucleotide
  Sense strand starting at position 3489 of SEQ ID NO: 913620
ggcauuuguuucucauagu

SEQ ID NO: 941385 - RNA, 19 nt, Artificial Sequence
  Description of Artificial Sequence: Synthetic oligonucleotide
  Antisense strand to SEQ ID NO: 941384
acuaugagaaacaaaugcc

SEQ ID NO: 941386 - RNA, 19 nt, Artificial Sequence
  Description of Artificial Sequence: Synthetic oligonucleotide
  Sense strand starting at position 602 of SEQ ID NO: 913620
ggcuuaaucaucugggaca

SEQ ID NO: 941387 - RNA, 19 nt, Artificial Sequence
  Description of Artificial Sequence: Synthetic oligonucleotide
  Antisense strand to SEQ ID NO: 941386
ugucccagaugauuaagcc

SEQ ID NO: 941388 - RNA, 19 nt, Artificial Sequence
  Description of Artificial Sequence: Synthetic oligonucleotide
  Sense strand starting at position 164 of SEQ ID NO: 913620
ggaaacaacgugugaaauu

SEQ ID NO: 941389 - RNA, 19 nt, Artificial Sequence
  Description of Artificial Sequence: Synthetic oligonucleotide
  Antisense strand to SEQ ID NO: 941388
aauuucacacguuguuucc

SEQ ID NO: 941390 - RNA, 19 nt, Artificial Sequence
  Description of Artificial Sequence: Synthetic oligonucleotide
  Sense strand starting at position 2880 of SEQ ID NO: 913620
guugauugacauuaguuuc

SEQ ID NO: 941391 - RNA, 19 nt, Artificial Sequence
  Description of Artificial Sequence: Synthetic oligonucleotide
  Antisense strand to SEQ ID NO: 941390
gaaacuaaugucaaucaac

SEQ ID NO: 941392 - RNA, 19 nt, Artificial Sequence
  Description of Artificial Sequence: Synthetic oligonucleotide
  Sense strand starting at position 2213 of SEQ ID NO: 913620
gcaggauggcuguaccaga

SEQ ID NO: 941393 - RNA, 19 nt, Artificial Sequence
  Description of Artificial Sequence: Synthetic oligonucleotide
  Antisense strand to SEQ ID NO: 941392
ucugguacagccauccugc

SEQ ID NO: 941394 - RNA, 19 nt, Artificial Sequence
  Description of Artificial Sequence: Synthetic oligonucleotide
  Sense strand starting at position 2874 of SEQ ID NO: 913620
aaggcaguugauugacauu

SEQ ID NO: 941395 - RNA, 19 nt, Artificial Sequence
  Description of Artificial Sequence: Synthetic oligonucleotide
  Antisense strand to SEQ ID NO: 941394
aaugucaaucaacugccuu

SEQ ID NO: 941396 - RNA, 19 nt, Artificial Sequence
  Description of Artificial Sequence: Synthetic oligonucleotide
  Sense strand starting at position 3328 of SEQ ID NO: 913620
gaugccuaugcucaggauu

SEQ ID NO: 941397 - RNA, 19 nt, Artificial Sequence
  Description of Artificial Sequence: Synthetic oligonucleotide
  Antisense strand to SEQ ID NO: 941396
aauccugagcauaggcauc

SEQ ID NO: 941398 - RNA, 19 nt, Artificial Sequence
  Description of Artificial Sequence: Synthetic oligonucleotide
  Sense strand starting at position 3099 of SEQ ID NO: 913620
cuauuaagggccgaauugu

SEQ ID NO: 941399 - RNA, 19 nt, Artificial Sequence
  Description of Artificial Sequence: Synthetic oligonucleotide
  Antisense strand to SEQ ID NO: 941398
acaauucggcccuuaauag

SEQ ID NO: 941400 - RNA, 19 nt, Artificial Sequence
  Description of Artificial Sequence: Synthetic oligonucleotide
  Sense strand starting at position 688 of SEQ ID NO: 913620
ggaggguuggucggacaca

SEQ ID NO: 941401 - RNA, 19 nt, Artificial Sequence
  Description of Artificial Sequence: Synthetic oligonucleotide
  Antisense strand to SEQ ID NO: 941400
uguguccgaccaacccucc

SEQ ID NO: 941402 - RNA, 19 nt, Artificial Sequence
  Description of Artificial Sequence: Synthetic oligonucleotide
  Sense strand starting at position 31 of SEQ ID NO: 913620
guacaaggcuuucugacaa

SEQ ID NO: 941403 - RNA, 19 nt, Artificial Sequence
  Description of Artificial Sequence: Synthetic oligonucleotide
  Antisense strand to SEQ ID NO: 941402
uugucagaaagccuuguac

SEQ ID NO: 941404 - RNA, 19 nt, Artificial Sequence
  Description of Artificial Sequence: Synthetic oligonucleotide
  Sense strand starting at position 152 of SEQ ID NO: 913620
aacgucuugcaaggaaaca

SEQ ID NO: 941405 - RNA, 19 nt, Artificial Sequence
  Description of Artificial Sequence: Synthetic oligonucleotide
  Antisense strand to SEQ ID NO: 941404
uguuuccuugcaagacguu

SEQ ID NO: 941406 - RNA, 19 nt, Artificial Sequence
  Description of Artificial Sequence: Synthetic oligonucleotide
  Sense strand starting at position 577 of SEQ ID NO: 913620
cuaagucuugcagaguauc

SEQ ID NO: 941407 - RNA, 19 nt, Artificial Sequence
  Description of Artificial Sequence: Synthetic oligonucleotide
  Antisense strand to SEQ ID NO: 941406
gauacucugcaagacuuag

SEQ ID NO: 941408 - RNA, 19 nt, Artificial Sequence
  Description of Artificial Sequence: Synthetic oligonucleotide
  Sense strand starting at position 3970 of SEQ ID NO: 913620
ggucccucugcuuagaauu

SEQ ID NO: 941409 - RNA, 19 nt, Artificial Sequence
  Description of Artificial Sequence: Synthetic oligonucleotide
  Antisense strand to SEQ ID NO: 941408
aauucuaagcagagggacc

SEQ ID NO: 941410 - RNA, 19 nt, Artificial Sequence
  Description of Artificial Sequence: Synthetic oligonucleotide
  Sense strand starting at position 3947 of SEQ ID NO: 913620
ucacuucugugaucuuaca

SEQ ID NO: 941411 - RNA, 19 nt, Artificial Sequence
  Description of Artificial Sequence: Synthetic oligonucleotide
  Antisense strand to SEQ ID NO: 941410
uguaagaucacagaaguga

SEQ ID NO: 941412 - RNA, 19 nt, Artificial Sequence
  Description of Artificial Sequence: Synthetic oligonucleotide
  Sense strand starting at position 858 of SEQ ID NO: 913620
uggacaacugugcggauaa

SEQ ID NO: 941413 - RNA, 19 nt, Artificial Sequence
  Description of Artificial Sequence: Synthetic oligonucleotide
  Antisense strand to SEQ ID NO: 941412
uuauccgcacaguugucca

SEQ ID NO: 941414 - RNA, 19 nt, Artificial Sequence
  Description of Artificial Sequence: Synthetic oligonucleotide
  Sense strand starting at position 3095 of SEQ ID NO: 913620
ggagcuauuaagggccgaa

SEQ ID NO: 941415 - RNA, 19 nt, Artificial Sequence
  Description of Artificial Sequence: Synthetic oligonucleotide
  Antisense strand to SEQ ID NO: 941414
uucggcccuuaauagcucc

SEQ ID NO: 941416 - RNA, 19 nt, Artificial Sequence
  Description of Artificial Sequence: Synthetic oligonucleotide
  Sense strand starting at position 128 of SEQ ID NO: 913620
gucagucaggucgaaagua

SEQ ID NO: 941417 - RNA, 19 nt, Artificial Sequence
  Description of Artificial Sequence: Synthetic oligonucleotide
  Antisense strand to SEQ ID NO: 941416
uacuuucgaccugacugac

SEQ ID NO: 941418 - RNA, 19 nt, Artificial Sequence
  Description of Artificial Sequence: Synthetic oligonucleotide
  Sense strand starting at position 120 of SEQ ID NO: 913620
ucugauaagucagucaggu

SEQ ID NO: 941419 - RNA, 19 nt, Artificial Sequence
  Description of Artificial Sequence: Synthetic oligonucleotide
  Antisense strand to SEQ ID NO: 941418
accugacugacuuaucaga

SEQ ID NO: 941420 - RNA, 19 nt, Artificial Sequence
  Description of Artificial Sequence: Synthetic oligonucleotide
  Sense strand starting at position 165 of SEQ ID NO: 913620
gaaacaacgugugaaauuu

SEQ ID NO: 941421 - RNA, 19 nt, Artificial Sequence
  Description of Artificial Sequence: Synthetic oligonucleotide
  Antisense strand to SEQ ID NO: 941420
aaauuucacacguuguuuc

SEQ ID NO: 941422 - RNA, 19 nt, Artificial Sequence
  Description of Artificial Sequence: Synthetic oligonucleotide
  Sense strand starting at position 583 of SEQ ID NO: 913620
cuugcagaguaucuucuaa

SEQ ID NO: 941423 - RNA, 19 nt, Artificial Sequence
  Description of Artificial Sequence: Synthetic oligonucleotide
  Antisense strand to SEQ ID NO: 941422
uuagaagauacucugcaag

SEQ ID NO: 941424 - RNA, 19 nt, Artificial Sequence
  Description of Artificial Sequence: Synthetic oligonucleotide
  Sense strand starting at position 3581 of SEQ ID NO: 913620
gcaaaugguuaccuucuca

SEQ ID NO: 941425 - RNA, 19 nt, Artificial Sequence
  Description of Artificial Sequence: Synthetic oligonucleotide
  Antisense strand to SEQ ID NO: 941424
ugagaagguaaccauuugc

SEQ ID NO: 941426 - RNA, 19 nt, Artificial Sequence
  Description of Artificial Sequence: Synthetic oligonucleotide
  Sense strand starting at position 809 of SEQ ID NO: 913620
uguuaaguaggcugaugau

SEQ ID NO: 941427 - RNA, 19 nt, Artificial Sequence
  Description of Artificial Sequence: Synthetic oligonucleotide
  Antisense strand to SEQ ID NO: 941426
aucaucagccuacuuaaca

SEQ ID NO: 941428 - RNA, 19 nt, Artificial Sequence
  Description of Artificial Sequence: Synthetic oligonucleotide
  Sense strand starting at position 555 of SEQ ID NO: 913620
agagaagggcuccguucau

SEQ ID NO: 941429 - RNA, 19 nt, Artificial Sequence
  Description of Artificial Sequence: Synthetic oligonucleotide
  Antisense strand to SEQ ID NO: 941428
augaacggagcccuucucu

SEQ ID NO: 941430 - RNA, 19 nt, Artificial Sequence
  Description of Artificial Sequence: Synthetic oligonucleotide
  Sense strand starting at position 3650 of SEQ ID NO: 913620
aggcaucagccguauugga

SEQ ID NO: 941431 - RNA, 19 nt, Artificial Sequence
  Description of Artificial Sequence: Synthetic oligonucleotide
  Antisense strand to SEQ ID NO: 941430
uccaauacggcugaugccu

SEQ ID NO: 941432 - RNA, 19 nt, Artificial Sequence
  Description of Artificial Sequence: Synthetic oligonucleotide
  Sense strand starting at position 3969 of SEQ ID NO: 913620
aggucccucugcuuagaau

SEQ ID NO: 941433 - RNA, 19 nt, Artificial Sequence
  Description of Artificial Sequence: Synthetic oligonucleotide
  Antisense strand to SEQ ID NO: 941432
auucuaagcagagggaccu

SEQ ID NO: 941434 - RNA, 19 nt, Artificial Sequence
  Description of Artificial Sequence: Synthetic oligonucleotide
  Sense strand starting at position 2945 of SEQ ID NO: 913620
gacugagguucccuuugca

SEQ ID NO: 941435 - RNA, 19 nt, Artificial Sequence
  Description of Artificial Sequence: Synthetic oligonucleotide
  Antisense strand to SEQ ID NO: 941434
ugcaaagggaaccucaguc

SEQ ID NO: 941436 - RNA, 19 nt, Artificial Sequence
  Description of Artificial Sequence: Synthetic oligonucleotide
  Sense strand starting at position 475 of SEQ ID NO: 913620
agcugaugcacuugugaaa

SEQ ID NO: 941437 - RNA, 19 nt, Artificial Sequence
  Description of Artificial Sequence: Synthetic oligonucleotide
  Antisense strand to SEQ ID NO: 941436
uuucacaagugcaucagcu

SEQ ID NO: 941438 - RNA, 19 nt, Artificial Sequence
  Description of Artificial Sequence: Synthetic oligonucleotide
  Sense strand starting at position 2004 of SEQ ID NO: 913620
cggagugagugccuacaga

SEQ ID NO: 941439 - RNA, 19 nt, Artificial Sequence
  Description of Artificial Sequence: Synthetic oligonucleotide
  Antisense strand to SEQ ID NO: 941438
ucuguaggcacucacuccg

SEQ ID NO: 941440 - RNA, 19 nt, Artificial Sequence
  Description of Artificial Sequence: Synthetic oligonucleotide
  Sense strand starting at position 3934 of SEQ ID NO: 913620
acuuguuauucugucacuu

SEQ ID NO: 941441 - RNA, 19 nt, Artificial Sequence
  Description of Artificial Sequence: Synthetic oligonucleotide
  Antisense strand to SEQ ID NO: 941440
aagugacagaauaacaagu

SEQ ID NO: 941442 - RNA, 19 nt, Artificial Sequence
  Description of Artificial Sequence: Synthetic oligonucleotide
  Sense strand starting at position 3931 of SEQ ID NO: 913620
ccuacuuguuauucuguca

SEQ ID NO: 941443 - RNA, 19 nt, Artificial Sequence
  Description of Artificial Sequence: Synthetic oligonucleotide
  Antisense strand to SEQ ID NO: 941442
ugacagaauaacaaguagg

SEQ ID NO: 941444 - RNA, 19 nt, Artificial Sequence
  Description of Artificial Sequence: Synthetic oligonucleotide
  Sense strand starting at position 3568 of SEQ ID NO: 913620
cuccucauggcuugcaaau

SEQ ID NO: 941445 - RNA, 19 nt, Artificial Sequence
  Description of Artificial Sequence: Synthetic oligonucleotide
  Antisense strand to SEQ ID NO: 941444
auuugcaagccaugaggag

SEQ ID NO: 941446 - RNA, 19 nt, Artificial Sequence
  Description of Artificial Sequence: Synthetic oligonucleotide
  Sense strand starting at position 3506 of SEQ ID NO: 913621
uugcuuaaagaaugaaaug

SEQ ID NO: 941447 - RNA, 19 nt, Artificial Sequence
  Description of Artificial Sequence: Synthetic oligonucleotide
  Antisense strand to SEQ ID NO: 941446
cauuucauucuuuaagcaa

SEQ ID NO: 941448 - RNA, 19 nt, Artificial Sequence
  Description of Artificial Sequence: Synthetic oligonucleotide
  Sense strand starting at position 2701 of SEQ ID NO: 913621
aaagguauaguugggagau

SEQ ID NO: 941449 - RNA, 19 nt, Artificial Sequence
  Description of Artificial Sequence: Synthetic oligonucleotide
  Antisense strand to SEQ ID NO: 941448
aucucccaacuauaccuuu

SEQ ID NO: 941450 - RNA, 19 nt, Artificial Sequence
  Description of Artificial Sequence: Synthetic oligonucleotide
  Sense strand starting at position 2107 of SEQ ID NO: 913621
aggcaagucgcuuucugua

SEQ ID NO: 941451 - RNA, 19 nt, Artificial Sequence
  Description of Artificial Sequence: Synthetic oligonucleotide
  Antisense strand to SEQ ID NO: 941450
uacagaaagcgacuugccu

SEQ ID NO: 941452 - RNA, 19 nt, Artificial Sequence
  Description of Artificial Sequence: Synthetic oligonucleotide
  Sense strand starting at position 1896 of SEQ ID NO: 913621
gcgccucaccgaucaguga

SEQ ID NO: 941453 - RNA, 19 nt, Artificial Sequence
  Description of Artificial Sequence: Synthetic oligonucleotide
  Antisense strand to SEQ ID NO: 941452
ucacugaucggugaggcgc

SEQ ID NO: 941454 - RNA, 19 nt, Artificial Sequence
  Description of Artificial Sequence: Synthetic oligonucleotide
  Sense strand starting at position 965 of SEQ ID NO: 913621
aucaguguugugcuuaugu

SEQ ID NO: 941455 - RNA, 19 nt, Artificial Sequence
  Description of Artificial Sequence: Synthetic oligonucleotide
  Antisense strand to SEQ ID NO: 941454
acauaagcacaacacugau

SEQ ID NO: 941456 - RNA, 19 nt, Artificial Sequence
  Description of Artificial Sequence: Synthetic oligonucleotide
  Sense strand starting at position 2106 of SEQ ID NO: 913621
gaggcaagucgcuuucugu

SEQ ID NO: 941457 - RNA, 19 nt, Artificial Sequence
  Description of Artificial Sequence: Synthetic oligonucleotide
  Antisense strand to SEQ ID NO: 941456
acagaaagcgacuugccuc

SEQ ID NO: 941458 - RNA, 19 nt, Artificial Sequence
  Description of Artificial Sequence: Synthetic oligonucleotide
  Sense strand starting at position 3230 of SEQ ID NO: 913621
uacuuaguaguggaaguaa

SEQ ID NO: 941459 - RNA, 19 nt, Artificial Sequence
  Description of Artificial Sequence: Synthetic oligonucleotide
  Antisense strand to SEQ ID NO: 941458
uuacuuccacuacuaagua

SEQ ID NO: 941460 - RNA, 19 nt, Artificial Sequence
  Description of Artificial Sequence: Synthetic oligonucleotide
  Sense strand starting at position 712 of SEQ ID NO: 913621
caggauggauuugaaagua

SEQ ID NO: 941461 - RNA, 19 nt, Artificial Sequence
  Description of Artificial Sequence: Synthetic oligonucleotide
  Antisense strand to SEQ ID NO: 941460
uacuuucaaauccauccug

SEQ ID NO: 941462 - RNA, 19 nt, Artificial Sequence
  Description of Artificial Sequence: Synthetic oligonucleotide
  Sense strand starting at position 237 of SEQ ID NO: 913621
ucgaucuaucuacaaggua

SEQ ID NO: 941463 - RNA, 19 nt, Artificial Sequence
  Description of Artificial Sequence: Synthetic oligonucleotide
  Antisense strand to SEQ ID NO: 941462
uaccuuguagauagaucga

SEQ ID NO: 941464 - RNA, 19 nt, Artificial Sequence
  Description of Artificial Sequence: Synthetic oligonucleotide
  Sense strand starting at position 563 of SEQ ID NO: 913621
gagucauuccuugaaaugu

SEQ ID NO: 941465 - RNA, 19 nt, Artificial Sequence
  Description of Artificial Sequence: Synthetic oligonucleotide
  Antisense strand to SEQ ID NO: 941464
acauuucaaggaaugacuc

SEQ ID NO: 941466 - RNA, 19 nt, Artificial Sequence
  Description of Artificial Sequence: Synthetic oligonucleotide
  Sense strand starting at position 3195 of SEQ ID NO: 913621
gaagucaagugguuaggaa

SEQ ID NO: 941467 - RNA, 19 nt, Artificial Sequence
  Description of Artificial Sequence: Synthetic oligonucleotide
  Antisense strand to SEQ ID NO: 941466
uuccuaaccacuugacuuc

SEQ ID NO: 941468 - RNA, 19 nt, Artificial Sequence
  Description of Artificial Sequence: Synthetic oligonucleotide
  Sense strand starting at position 2809 of SEQ ID NO: 913621
uguaaaguccucuaaccca

SEQ ID NO: 941469 - RNA, 19 nt, Artificial Sequence
  Description of Artificial Sequence: Synthetic oligonucleotide
  Antisense strand to SEQ ID NO: 941468
uggguuagaggacuuuaca

SEQ ID NO: 941470 - RNA, 19 nt, Artificial Sequence
  Description of Artificial Sequence: Synthetic oligonucleotide
  Sense strand starting at position 825 of SEQ ID NO: 913621
cuuacuagucuguaucaaa

SEQ ID NO: 941471 - RNA, 19 nt, Artificial Sequence
  Description of Artificial Sequence: Synthetic oligonucleotide
  Antisense strand to SEQ ID NO: 941470
uuugauacagacuaguaag

SEQ ID NO: 941472 - RNA, 19 nt, Artificial Sequence
  Description of Artificial Sequence: Synthetic oligonucleotide
  Sense strand starting at position 3362 of SEQ ID NO: 913621
uaggaaugucugggaccuu

SEQ ID NO: 941473 - RNA, 19 nt, Artificial Sequence
  Description of Artificial Sequence: Synthetic oligonucleotide
  Antisense strand to SEQ ID NO: 941472
aaggucccagacauuccua

SEQ ID NO: 941474 - RNA, 19 nt, Artificial Sequence
  Description of Artificial Sequence: Synthetic oligonucleotide
  Sense strand starting at position 853 of SEQ ID NO: 913621
ugguaauuaggcugaagga

SEQ ID NO: 941475 - RNA, 19 nt, Artificial Sequence
  Description of Artificial Sequence: Synthetic oligonucleotide
  Antisense strand to SEQ ID NO: 941474
uccuucagccuaauuacca

SEQ ID NO: 941476 - RNA, 19 nt, Artificial Sequence
  Description of Artificial Sequence: Synthetic oligonucleotide
  Sense strand starting at position 386 of SEQ ID NO: 913621
gaaagcaagcccuggaaau

SEQ ID NO: 941477 - RNA, 19 nt, Artificial Sequence
  Description of Artificial Sequence: Synthetic oligonucleotide
  Antisense strand to SEQ ID NO: 941476
auuuccagggcuugcuuuc

SEQ ID NO: 941478 - RNA, 19 nt, Artificial Sequence
  Description of Artificial Sequence: Synthetic oligonucleotide
  Sense strand starting at position 562 of SEQ ID NO: 913621
ugagucauuccuugaaaug

SEQ ID NO: 941479 - RNA, 19 nt, Artificial Sequence
  Description of Artificial Sequence: Synthetic oligonucleotide
  Antisense strand to SEQ ID NO: 941478
cauuucaaggaaugacuca

SEQ ID NO: 941480 - RNA, 19 nt, Artificial Sequence
  Description of Artificial Sequence: Synthetic oligonucleotide
  Sense strand starting at position 561 of SEQ ID NO: 913621
uugagucauuccuugaaau

SEQ ID NO: 941481 - RNA, 19 nt, Artificial Sequence
  Description of Artificial Sequence: Synthetic oligonucleotide
  Antisense strand to SEQ ID NO: 941480
auuucaaggaaugacucaa

SEQ ID NO: 941482 - RNA, 19 nt, Artificial Sequence
  Description of Artificial Sequence: Synthetic oligonucleotide
  Sense strand starting at position 529 of SEQ ID NO: 913621
agaugaacuguuugagguu

SEQ ID NO: 941483 - RNA, 19 nt, Artificial Sequence
  Description of Artificial Sequence: Synthetic oligonucleotide
  Antisense strand to SEQ ID NO: 941482
aaccucaaacaguucaucu

SEQ ID NO: 941484 - RNA, 19 nt, Artificial Sequence
  Description of Artificial Sequence: Synthetic oligonucleotide
  Sense strand starting at position 3373 of SEQ ID NO: 913621
gggaccuuaucuguuccaa

SEQ ID NO: 941485 - RNA, 19 nt, Artificial Sequence
  Description of Artificial Sequence: Synthetic oligonucleotide
  Antisense strand to SEQ ID NO: 941484
uuggaacagauaagguccc

SEQ ID NO: 941486 - RNA, 19 nt, Artificial Sequence
  Description of Artificial Sequence: Synthetic oligonucleotide
  Sense strand starting at position 1421 of SEQ ID NO: 913621
gcucuagagcccuaacuga

SEQ ID NO: 941487 - RNA, 19 nt, Artificial Sequence
  Description of Artificial Sequence: Synthetic oligonucleotide
  Antisense strand to SEQ ID NO: 941486
ucaguuagggcucuagagc

SEQ ID NO: 941488 - RNA, 19 nt, Artificial Sequence
  Description of Artificial Sequence: Synthetic oligonucleotide
  Sense strand starting at position 2751 of SEQ ID NO: 913621
ugguuuaagccuugaaagg

SEQ ID NO: 941489 - RNA, 19 nt, Artificial Sequence
  Description of Artificial Sequence: Synthetic oligonucleotide
  Antisense strand to SEQ ID NO: 941488
ccuuucaaggcuuaaacca

SEQ ID NO: 941490 - RNA, 19 nt, Artificial Sequence
  Description of Artificial Sequence: Synthetic oligonucleotide
  Sense strand starting at position 3136 of SEQ ID NO: 913621
gugcuuuagggccaaugaa

SEQ ID NO: 941491 - RNA, 19 nt, Artificial Sequence
  Description of Artificial Sequence: Synthetic oligonucleotide
  Antisense strand to SEQ ID NO: 941490
uucauuggcccuaaagcac

SEQ ID NO: 941492 - RNA, 19 nt, Artificial Sequence
  Description of Artificial Sequence: Synthetic oligonucleotide
  Sense strand starting at position 3979 of SEQ ID NO: 913621
cgaacagugauaugugaug

SEQ ID NO: 941493 - RNA, 19 nt, Artificial Sequence
  Description of Artificial Sequence: Synthetic oligonucleotide
  Antisense strand to SEQ ID NO: 941492
caucacauaucacuguucg

SEQ ID NO: 941494 - RNA, 19 nt, Artificial Sequence
  Description of Artificial Sequence: Synthetic oligonucleotide
  Sense strand starting at position 3476 of SEQ ID NO: 913621
uguagacauucucugaagu

SEQ ID NO: 941495 - RNA, 19 nt, Artificial Sequence
  Description of Artificial Sequence: Synthetic oligonucleotide
  Antisense strand to SEQ ID NO: 941494
acuucagagaaugucuaca

SEQ ID NO: 941496 - RNA, 19 nt, Artificial Sequence
  Description of Artificial Sequence: Synthetic oligonucleotide
  Sense strand starting at position 3477 of SEQ ID NO: 913621
guagacauucucugaaguu

SEQ ID NO: 941497 - RNA, 19 nt, Artificial Sequence
  Description of Artificial Sequence: Synthetic oligonucleotide
  Antisense strand to SEQ ID NO: 941496
aacuucagagaaugucuac

SEQ ID NO: 941498 - RNA, 19 nt, Artificial Sequence
  Description of Artificial Sequence: Synthetic oligonucleotide
  Sense strand starting at position 2401 of SEQ ID NO: 913621
agaggaagauauuagauau

SEQ ID NO: 941499 - RNA, 19 nt, Artificial Sequence
  Description of Artificial Sequence: Synthetic oligonucleotide
  Antisense strand to SEQ ID NO: 941498
auaucuaauaucuuccucu

SEQ ID NO: 941500 - RNA, 19 nt, Artificial Sequence
  Description of Artificial Sequence: Synthetic oligonucleotide
  Sense strand starting at position 3229 of SEQ ID NO: 913621
uuacuuaguaguggaagua

SEQ ID NO: 941501 - RNA, 19 nt, Artificial Sequence
  Description of Artificial Sequence: Synthetic oligonucleotide
  Antisense strand to SEQ ID NO: 941500
uacuuccacuacuaaguaa

SEQ ID NO: 941502 - RNA, 19 nt, Artificial Sequence
  Description of Artificial Sequence: Synthetic oligonucleotide
  Sense strand starting at position 2594 of SEQ ID NO: 913621
gcuugugugaugggaagga

SEQ ID NO: 941503 - RNA, 19 nt, Artificial Sequence
  Description of Artificial Sequence: Synthetic oligonucleotide
  Antisense strand to SEQ ID NO: 941502
uccuucccaucacacaagc

SEQ ID NO: 941504 - RNA, 19 nt, Artificial Sequence
  Description of Artificial Sequence: Synthetic oligonucleotide
  Sense strand starting at position 661 of SEQ ID NO: 913621
agagcuccaucugcuaaga

SEQ ID NO: 941505 - RNA, 19 nt, Artificial Sequence
  Description of Artificial Sequence: Synthetic oligonucleotide
  Antisense strand to SEQ ID NO: 941504
ucuuagcagauggagcucu

SEQ ID NO: 941506 - RNA, 19 nt, Artificial Sequence
  Description of Artificial Sequence: Synthetic oligonucleotide
  Sense strand starting at position 2225 of SEQ ID NO: 913621
uuuguucuugugcagagaa

SEQ ID NO: 941507 - RNA, 19 nt, Artificial Sequence
  Description of Artificial Sequence: Synthetic oligonucleotide
  Antisense strand to SEQ ID NO: 941506
uucucugcacaagaacaaa

SEQ ID NO: 941508 - RNA, 19 nt, Artificial Sequence
  Description of Artificial Sequence: Synthetic oligonucleotide
  Sense strand starting at position 3621 of SEQ ID NO: 913621
cuauaauagucuguucuga

SEQ ID NO: 941509 - RNA, 19 nt, Artificial Sequence
  Description of Artificial Sequence: Synthetic oligonucleotide
  Antisense strand to SEQ ID NO: 941508
ucagaacagacuauuauag

SEQ ID NO: 941510 - RNA, 19 nt, Artificial Sequence
  Description of Artificial Sequence: Synthetic oligonucleotide
  Sense strand starting at position 3623 of SEQ ID NO: 913621
auaauagucuguucugacu

SEQ ID NO: 941511 - RNA, 19 nt, Artificial Sequence
  Description of Artificial Sequence: Synthetic oligonucleotide
  Antisense strand to SEQ ID NO: 941510
agucagaacagacuauuau

SEQ ID NO: 941512 - RNA, 19 nt, Artificial Sequence
  Description of Artificial Sequence: Synthetic oligonucleotide
  Sense strand starting at position 45 of SEQ ID NO: 913621
aaaggauucuccucggucu

SEQ ID NO: 941513 - RNA, 19 nt, Artificial Sequence
  Description of Artificial Sequence: Synthetic oligonucleotide
  Antisense strand to SEQ ID NO: 941512
agaccgaggagaauccuuu

SEQ ID NO: 941514 - RNA, 19 nt, Artificial Sequence
  Description of Artificial Sequence: Synthetic oligonucleotide
  Sense strand starting at position 2453 of SEQ ID NO: 913621
uauuaugugccagaaugcu

SEQ ID NO: 941515 - RNA, 19 nt, Artificial Sequence
  Description of Artificial Sequence: Synthetic oligonucleotide
  Antisense strand to SEQ ID NO: 941514
agcauucuggcacauaaua

SEQ ID NO: 941516 - RNA, 19 nt, Artificial Sequence
  Description of Artificial Sequence: Synthetic oligonucleotide
  Sense strand starting at position 1216 of SEQ ID NO: 913621
gaguuugcuguguauagga

SEQ ID NO: 941517 - RNA, 19 nt, Artificial Sequence
  Description of Artificial Sequence: Synthetic oligonucleotide
  Antisense strand to SEQ ID NO: 941516
uccuauacacagcaaacuc

SEQ ID NO: 941518 - RNA, 19 nt, Artificial Sequence
  Description of Artificial Sequence: Synthetic oligonucleotide
  Sense strand starting at position 2377 of SEQ ID NO: 913621
aauaaagugcugugaaagu

SEQ ID NO: 941519 - RNA, 19 nt, Artificial Sequence
  Description of Artificial Sequence: Synthetic oligonucleotide
  Antisense strand to SEQ ID NO: 941518
acuuucacagcacuuuauu

SEQ ID NO: 941520 - RNA, 19 nt, Artificial Sequence
  Description of Artificial Sequence: Synthetic oligonucleotide
  Sense strand starting at position 824 of SEQ ID NO: 913621
ucuuacuagucuguaucaa

SEQ ID NO: 941521 - RNA, 19 nt, Artificial Sequence
  Description of Artificial Sequence: Synthetic oligonucleotide
  Antisense strand to SEQ ID NO: 941520
uugauacagacuaguaaga

SEQ ID NO: 941522 - RNA, 19 nt, Artificial Sequence
  Description of Artificial Sequence: Synthetic oligonucleotide
  Sense strand starting at position 2326 of SEQ ID NO: 913621
acuugcuuccggcagagau

SEQ ID NO: 941523 - RNA, 19 nt, Artificial Sequence
  Description of Artificial Sequence: Synthetic oligonucleotide
  Antisense strand to SEQ ID NO: 941522
aucucugccggaagcaagu

SEQ ID NO: 941524 - RNA, 19 nt, Artificial Sequence
  Description of Artificial Sequence: Synthetic oligonucleotide
  Sense strand starting at position 3125 of SEQ ID NO: 913621
augggaaagcagugcuuua

SEQ ID NO: 941525 - RNA, 19 nt, Artificial Sequence
  Description of Artificial Sequence: Synthetic oligonucleotide
  Antisense strand to SEQ ID NO: 941524
uaaagcacugcuuucccau

SEQ ID NO: 941526 - RNA, 19 nt, Artificial Sequence
  Description of Artificial Sequence: Synthetic oligonucleotide
  Sense strand starting at position 3586 of SEQ ID NO: 913622
uugcuuaaagaaugaaaug

SEQ ID NO: 941527 - RNA, 19 nt, Artificial Sequence
  Description of Artificial Sequence: Synthetic oligonucleotide
  Antisense strand to SEQ ID NO: 941526
cauuucauucuuuaagcaa

SEQ ID NO: 941528 - RNA, 19 nt, Artificial Sequence
  Description of Artificial Sequence: Synthetic oligonucleotide
  Sense strand starting at position 2781 of SEQ ID NO: 913622
aaagguauaguugggagau

SEQ ID NO: 941529 - RNA, 19 nt, Artificial Sequence
  Description of Artificial Sequence: Synthetic oligonucleotide
  Antisense strand to SEQ ID NO: 941528
aucucccaacuauaccuuu

SEQ ID NO: 941530 - RNA, 19 nt, Artificial Sequence
  Description of Artificial Sequence: Synthetic oligonucleotide
  Sense strand starting at position 2187 of SEQ ID NO: 913622
aggcaagucgcuuucugua

SEQ ID NO: 941531 - RNA, 19 nt, Artificial Sequence
  Description of Artificial Sequence: Synthetic oligonucleotide
  Antisense strand to SEQ ID NO: 941530
uacagaaagcgacuugccu

SEQ ID NO: 941532 - RNA, 19 nt, Artificial Sequence
  Description of Artificial Sequence: Synthetic oligonucleotide
  Sense strand starting at position 1976 of SEQ ID NO: 913622
gcgccucaccgaucaguga

SEQ ID NO: 941533 - RNA, 19 nt, Artificial Sequence
  Description of Artificial Sequence: Synthetic oligonucleotide
  Antisense strand to SEQ ID NO: 941532
ucacugaucggugaggcgc

SEQ ID NO: 941534 - RNA, 19 nt, Artificial Sequence
  Description of Artificial Sequence: Synthetic oligonucleotide
  Sense strand starting at position 1045 of SEQ ID NO: 913622
aucaguguugugcuuaugu

SEQ ID NO: 941535 - RNA, 19 nt, Artificial Sequence
  Description of Artificial Sequence: Synthetic oligonucleotide
  Antisense strand to SEQ ID NO: 941534
acauaagcacaacacugau

SEQ ID NO: 941536 - RNA, 19 nt, Artificial Sequence
  Description of Artificial Sequence: Synthetic oligonucleotide
  Sense strand starting at position 2186 of SEQ ID NO: 913622
gaggcaagucgcuuucugu

SEQ ID NO: 941537 - RNA, 19 nt, Artificial Sequence
  Description of Artificial Sequence: Synthetic oligonucleotide
  Antisense strand to SEQ ID NO: 941536
acagaaagcgacuugccuc

SEQ ID NO: 941538 - RNA, 19 nt, Artificial Sequence
  Description of Artificial Sequence: Synthetic oligonucleotide
  Sense strand starting at position 3310 of SEQ ID NO: 913622
uacuuaguaguggaaguaa

SEQ ID NO: 941539 - RNA, 19 nt, Artificial Sequence
  Description of Artificial Sequence: Synthetic oligonucleotide
  Antisense strand to SEQ ID NO: 941538
uuacuuccacuacuaagua

SEQ ID NO: 941540 - RNA, 19 nt, Artificial Sequence
  Description of Artificial Sequence: Synthetic oligonucleotide
  Sense strand starting at position 792 of SEQ ID NO: 913622
caggauggauuugaaagua

SEQ ID NO: 941541 - RNA, 19 nt, Artificial Sequence
  Description of Artificial Sequence: Synthetic oligonucleotide
  Antisense strand to SEQ ID NO: 941540
uacuuucaaauccauccug

SEQ ID NO: 941542 - RNA, 19 nt, Artificial Sequence
  Description of Artificial Sequence: Synthetic oligonucleotide
  Sense strand starting at position 317 of SEQ ID NO: 913622
ucgaucuaucuacaaggua

SEQ ID NO: 941543 - RNA, 19 nt, Artificial Sequence
  Description of Artificial Sequence: Synthetic oligonucleotide
  Antisense strand to SEQ ID NO: 941542
uaccuuguagauagaucga

SEQ ID NO: 941544 - RNA, 19 nt, Artificial Sequence
  Description of Artificial Sequence: Synthetic oligonucleotide
  Sense strand starting at position 643 of SEQ ID NO: 913622
gagucauuccuugaaaugu

SEQ ID NO: 941545 - RNA, 19 nt, Artificial Sequence
  Description of Artificial Sequence: Synthetic oligonucleotide
  Antisense strand to SEQ ID NO: 941544
acauuucaaggaaugacuc

SEQ ID NO: 941546 - RNA, 19 nt, Artificial Sequence
  Description of Artificial Sequence: Synthetic oligonucleotide
  Sense strand starting at position 3275 of SEQ ID NO: 913622
gaagucaagugguuaggaa

SEQ ID NO: 941547 - RNA, 19 nt, Artificial Sequence
  Description of Artificial Sequence: Synthetic oligonucleotide
  Antisense strand to SEQ ID NO: 941546
uuccuaaccacuugacuuc

SEQ ID NO: 941548 - RNA, 19 nt, Artificial Sequence
  Description of Artificial Sequence: Synthetic oligonucleotide
  Sense strand starting at position 2889 of SEQ ID NO: 913622
uguaaaguccucuaaccca

SEQ ID NO: 941549 - RNA, 19 nt, Artificial Sequence
  Description of Artificial Sequence: Synthetic oligonucleotide
  Antisense strand to SEQ ID NO: 941548
uggguuagaggacuuuaca

SEQ ID NO: 941550 - RNA, 19 nt, Artificial Sequence
  Description of Artificial Sequence: Synthetic oligonucleotide
  Sense strand starting at position 905 of SEQ ID NO: 913622
cuuacuagucuguaucaaa

SEQ ID NO: 941551 - RNA, 19 nt, Artificial Sequence
  Description of Artificial Sequence: Synthetic oligonucleotide
  Antisense strand to SEQ ID NO: 941550
uuugauacagacuaguaag

SEQ ID NO: 941552 - RNA, 19 nt, Artificial Sequence
  Description of Artificial Sequence: Synthetic oligonucleotide
  Sense strand starting at position 3442 of SEQ ID NO: 913622
uaggaaugucugggaccuu

SEQ ID NO: 941553 - RNA, 19 nt, Artificial Sequence
  Description of Artificial Sequence: Synthetic oligonucleotide
  Antisense strand to SEQ ID NO: 941552
aaggucccagacauuccua

SEQ ID NO: 941554 - RNA, 19 nt, Artificial Sequence
  Description of Artificial Sequence: Synthetic oligonucleotide
  Sense strand starting at position 933 of SEQ ID NO: 913622
ugguaauuaggcugaagga

SEQ ID NO: 941555 - RNA, 19 nt, Artificial Sequence
  Description of Artificial Sequence: Synthetic oligonucleotide
  Antisense strand to SEQ ID NO: 941554
uccuucagccuaauuacca

SEQ ID NO: 941556 - RNA, 19 nt, Artificial Sequence
  Description of Artificial Sequence: Synthetic oligonucleotide
  Sense strand starting at position 466 of SEQ ID NO: 913622
gaaagcaagcccuggaaau

SEQ ID NO: 941557 - RNA, 19 nt, Artificial Sequence
  Description of Artificial Sequence: Synthetic oligonucleotide
  Antisense strand to SEQ ID NO: 941556
auuuccagggcuugcuuuc

SEQ ID NO: 941558 - RNA, 19 nt, Artificial Sequence
  Description of Artificial Sequence: Synthetic oligonucleotide
  Sense strand starting at position 642 of SEQ ID NO: 913622
ugagucauuccuugaaaug

SEQ ID NO: 941559 - RNA, 19 nt, Artificial Sequence
  Description of Artificial Sequence: Synthetic oligonucleotide
  Antisense strand to SEQ ID NO: 941558
cauuucaaggaaugacuca

SEQ ID NO: 941560 - RNA, 19 nt, Artificial Sequence
  Description of Artificial Sequence: Synthetic oligonucleotide
  Sense strand starting at position 641 of SEQ ID NO: 913622
uugagucauuccuugaaau

SEQ ID NO: 941561 - RNA, 19 nt, Artificial Sequence
  Description of Artificial Sequence: Synthetic oligonucleotide
  Antisense strand to SEQ ID NO: 941560
auuucaaggaaugacucaa

SEQ ID NO: 941562 - RNA, 19 nt, Artificial Sequence
  Description of Artificial Sequence: Synthetic oligonucleotide
  Sense strand starting at position 609 of SEQ ID NO: 913622
agaugaacuguuugagguu

SEQ ID NO: 941563 - RNA, 19 nt, Artificial Sequence
  Description of Artificial Sequence: Synthetic oligonucleotide
  Antisense strand to SEQ ID NO: 941562
aaccucaaacaguucaucu

SEQ ID NO: 941564 - RNA, 19 nt, Artificial Sequence
  Description of Artificial Sequence: Synthetic oligonucleotide
  Sense strand starting at position 3453 of SEQ ID NO: 913622
gggaccuuaucuguuccaa

SEQ ID NO: 941565 - RNA, 19 nt, Artificial Sequence
  Description of Artificial Sequence: Synthetic oligonucleotide
  Antisense strand to SEQ ID NO: 941564
uuggaacagauaagguccc

SEQ ID NO: 941566 - RNA, 19 nt, Artificial Sequence
  Description of Artificial Sequence: Synthetic oligonucleotide
  Sense strand starting at position 1501 of SEQ ID NO: 913622
gcucuagagcccuaacuga

SEQ ID NO: 941567 - RNA, 19 nt, Artificial Sequence
  Description of Artificial Sequence: Synthetic oligonucleotide
  Antisense strand to SEQ ID NO: 941566
ucaguuagggcucuagagc

SEQ ID NO: 941568 - RNA, 19 nt, Artificial Sequence
  Description of Artificial Sequence: Synthetic oligonucleotide
  Sense strand starting at position 2831 of SEQ ID NO: 913622
ugguuuaagccuugaaagg

SEQ ID NO: 941569 - RNA, 19 nt, Artificial Sequence
  Description of Artificial Sequence: Synthetic oligonucleotide
  Antisense strand to SEQ ID NO: 941568
ccuuucaaggcuuaaacca

SEQ ID NO: 941570 - RNA, 19 nt, Artificial Sequence
  Description of Artificial Sequence: Synthetic oligonucleotide
  Sense strand starting at position 3216 of SEQ ID NO: 913622
gugcuuuagggccaaugaa

SEQ ID NO: 941571 - RNA, 19 nt, Artificial Sequence
  Description of Artificial Sequence: Synthetic oligonucleotide
  Antisense strand to SEQ ID NO: 941570
uucauuggcccuaaagcac

SEQ ID NO: 941572 - RNA, 19 nt, Artificial Sequence
  Description of Artificial Sequence: Synthetic oligonucleotide
  Sense strand starting at position 3556 of SEQ ID NO: 913622
uguagacauucucugaagu

SEQ ID NO: 941573 - RNA, 19 nt, Artificial Sequence
  Description of Artificial Sequence: Synthetic oligonucleotide
  Antisense strand to SEQ ID NO: 941572
acuucagagaaugucuaca

SEQ ID NO: 941574 - RNA, 19 nt, Artificial Sequence
  Description of Artificial Sequence: Synthetic oligonucleotide
  Sense strand starting at position 3557 of SEQ ID NO: 913622
guagacauucucugaaguu

SEQ ID NO: 941575 - RNA, 19 nt, Artificial Sequence
  Description of Artificial Sequence: Synthetic oligonucleotide
  Antisense strand to SEQ ID NO: 941574
aacuucagagaaugucuac

SEQ ID NO: 941576 - RNA, 19 nt, Artificial Sequence
  Description of Artificial Sequence: Synthetic oligonucleotide
  Sense strand starting at position 2481 of SEQ ID NO: 913622
agaggaagauauuagauau

SEQ ID NO: 941577 - RNA, 19 nt, Artificial Sequence
  Description of Artificial Sequence: Synthetic oligonucleotide
  Antisense strand to SEQ ID NO: 941576
auaucuaauaucuuccucu

SEQ ID NO: 941578 - RNA, 19 nt, Artificial Sequence
  Description of Artificial Sequence: Synthetic oligonucleotide
  Sense strand starting at position 3309 of SEQ ID NO: 913622
uuacuuaguaguggaagua

SEQ ID NO: 941579 - RNA, 19 nt, Artificial Sequence
  Description of Artificial Sequence: Synthetic oligonucleotide
  Antisense strand to SEQ ID NO: 941578
uacuuccacuacuaaguaa

SEQ ID NO: 941580 - RNA, 19 nt, Artificial Sequence
  Description of Artificial Sequence: Synthetic oligonucleotide
  Sense strand starting at position 2674 of SEQ ID NO: 913622
gcuugugugaugggaagga

SEQ ID NO: 941581 - RNA, 19 nt, Artificial Sequence
  Description of Artificial Sequence: Synthetic oligonucleotide
  Antisense strand to SEQ ID NO: 941580
uccuucccaucacacaagc

SEQ ID NO: 941582 - RNA, 19 nt, Artificial Sequence
  Description of Artificial Sequence: Synthetic oligonucleotide
  Sense strand starting at position 741 of SEQ ID NO: 913622
agagcuccaucugcuaaga

SEQ ID NO: 941583 - RNA, 19 nt, Artificial Sequence
  Description of Artificial Sequence: Synthetic oligonucleotide
  Antisense strand to SEQ ID NO: 941582
ucuuagcagauggagcucu

SEQ ID NO: 941584 - RNA, 19 nt, Artificial Sequence
  Description of Artificial Sequence: Synthetic oligonucleotide
  Sense strand starting at position 2305 of SEQ ID NO: 913622
uuuguucuugugcagagaa

SEQ ID NO: 941585 - RNA, 19 nt, Artificial Sequence
  Description of Artificial Sequence: Synthetic oligonucleotide
  Antisense strand to SEQ ID NO: 941584
uucucugcacaagaacaaa

SEQ ID NO: 941586 - RNA, 19 nt, Artificial Sequence
  Description of Artificial Sequence: Synthetic oligonucleotide
  Sense strand starting at position 3701 of SEQ ID NO: 913622
cuauaauagucuguucuga

SEQ ID NO: 941587 - RNA, 19 nt, Artificial Sequence
  Description of Artificial Sequence: Synthetic oligonucleotide
  Antisense strand to SEQ ID NO: 941586
ucagaacagacuauuauag

SEQ ID NO: 941588 - RNA, 19 nt, Artificial Sequence
  Description of Artificial Sequence: Synthetic oligonucleotide
  Sense strand starting at position 3703 of SEQ ID NO: 913622
auaauagucuguucugacu

SEQ ID NO: 941589 - RNA, 19 nt, Artificial Sequence
  Description of Artificial Sequence: Synthetic oligonucleotide
  Antisense strand to SEQ ID NO: 941588
agucagaacagacuauuau

SEQ ID NO: 941590 - RNA, 19 nt, Artificial Sequence
  Description of Artificial Sequence: Synthetic oligonucleotide
  Sense strand starting at position 125 of SEQ ID NO: 913622
aaaggauucuccucggucu

SEQ ID NO: 941591 - RNA, 19 nt, Artificial Sequence
  Description of Artificial Sequence: Synthetic oligonucleotide
  Antisense strand to SEQ ID NO: 941590
agaccgaggagaauccuuu

SEQ ID NO: 941592 - RNA, 19 nt, Artificial Sequence
  Description of Artificial Sequence: Synthetic oligonucleotide
  Sense strand starting at position 2533 of SEQ ID NO: 913622
uauuaugugccagaaugcu

SEQ ID NO: 941593 - RNA, 19 nt, Artificial Sequence
  Description of Artificial Sequence: Synthetic oligonucleotide
  Antisense strand to SEQ ID NO: 941592
agcauucuggcacauaaua

SEQ ID NO: 941594 - RNA, 19 nt, Artificial Sequence
  Description of Artificial Sequence: Synthetic oligonucleotide
  Sense strand starting at position 1296 of SEQ ID NO: 913622
gaguuugcuguguauagga

SEQ ID NO: 941595 - RNA, 19 nt, Artificial Sequence
  Description of Artificial Sequence: Synthetic oligonucleotide
  Antisense strand to SEQ ID NO: 941594
uccuauacacagcaaacuc

SEQ ID NO: 941596 - RNA, 19 nt, Artificial Sequence
  Description of Artificial Sequence: Synthetic oligonucleotide
  Sense strand starting at position 2457 of SEQ ID NO: 913622
aauaaagugcugugaaagu

SEQ ID NO: 941597 - RNA, 19 nt, Artificial Sequence
  Description of Artificial Sequence: Synthetic oligonucleotide
  Antisense strand to SEQ ID NO: 941596
acuuucacagcacuuuauu

SEQ ID NO: 941598 - RNA, 19 nt, Artificial Sequence
  Description of Artificial Sequence: Synthetic oligonucleotide
  Sense strand starting at position 904 of SEQ ID NO: 913622
ucuuacuagucuguaucaa

SEQ ID NO: 941599 - RNA, 19 nt, Artificial Sequence
  Description of Artificial Sequence: Synthetic oligonucleotide
  Antisense strand to SEQ ID NO: 941598
uugauacagacuaguaaga

SEQ ID NO: 941600 - RNA, 19 nt, Artificial Sequence
  Description of Artificial Sequence: Synthetic oligonucleotide
  Sense strand starting at position 2406 of SEQ ID NO: 913622
acuugcuuccggcagagau

SEQ ID NO: 941601 - RNA, 19 nt, Artificial Sequence
  Description of Artificial Sequence: Synthetic oligonucleotide
  Antisense strand to SEQ ID NO: 941600
aucucugccggaagcaagu

SEQ ID NO: 941602 - RNA, 19 nt, Artificial Sequence
  Description of Artificial Sequence: Synthetic oligonucleotide
  Sense strand starting at position 3205 of SEQ ID NO: 913622
augggaaagcagugcuuua

SEQ ID NO: 941603 - RNA, 19 nt, Artificial Sequence
  Description of Artificial Sequence: Synthetic oligonucleotide
  Antisense strand to SEQ ID NO: 941602
uaaagcacugcuuucccau

SEQ ID NO: 941604 - RNA, 19 nt, Artificial Sequence
  Description of Artificial Sequence: Synthetic oligonucleotide
  Sense strand starting at position 2529 of SEQ ID NO: 913622
uuccuauuaugugccagaa

SEQ ID NO: 941605 - RNA, 19 nt, Artificial Sequence
  Description of Artificial Sequence: Synthetic oligonucleotide
  Antisense strand to SEQ ID NO: 941604
uucuggcacauaauaggaa

SEQ ID NO: 941606 - RNA, 19 nt, Artificial Sequence
  Description of Artificial Sequence: Synthetic oligonucleotide
  Sense strand starting at position 963 of SEQ ID NO: 913623
cccuaagaccuuugaagau

SEQ ID NO: 941607 - RNA, 19 nt, Artificial Sequence
  Description of Artificial Sequence: Synthetic oligonucleotide
  Antisense strand to SEQ ID NO: 941606
aucuucaaaggucuuaggg

SEQ ID NO: 941608 - RNA, 19 nt, Artificial Sequence
  Description of Artificial Sequence: Synthetic oligonucleotide
  Sense strand starting at position 772 of SEQ ID NO: 913623
gcuacaaagcucugauuuc

SEQ ID NO: 941609 - RNA, 19 nt, Artificial Sequence
  Description of Artificial Sequence: Synthetic oligonucleotide
  Antisense strand to SEQ ID NO: 941608
gaaaucagagcuuuguagc

SEQ ID NO: 941610 - RNA, 19 nt, Artificial Sequence
  Description of Artificial Sequence: Synthetic oligonucleotide
  Sense strand starting at position 1726 of SEQ ID NO: 913623
cuguaaucucucuaaggau

SEQ ID NO: 941611 - RNA, 19 nt, Artificial Sequence
  Description of Artificial Sequence: Synthetic oligonucleotide
  Antisense strand to SEQ ID NO: 941610
auccuuagagagauuacag

SEQ ID NO: 941612 - RNA, 19 nt, Artificial Sequence
  Description of Artificial Sequence: Synthetic oligonucleotide
  Sense strand starting at position 3364 of SEQ ID NO: 913623
cugagagcuacaugagaua

SEQ ID NO: 941613 - RNA, 19 nt, Artificial Sequence
  Description of Artificial Sequence: Synthetic oligonucleotide
  Antisense strand to SEQ ID NO: 941612
uaucucauguagcucucag

SEQ ID NO: 941614 - RNA, 19 nt, Artificial Sequence
  Description of Artificial Sequence: Synthetic oligonucleotide
  Sense strand starting at position 295 of SEQ ID NO: 913623
agugcuguggcugccaaau

SEQ ID NO: 941615 - RNA, 19 nt, Artificial Sequence
  Description of Artificial Sequence: Synthetic oligonucleotide
  Antisense strand to SEQ ID NO: 941614
auuuggcagccacagcacu

SEQ ID NO: 941616 - RNA, 19 nt, Artificial Sequence
  Description of Artificial Sequence: Synthetic oligonucleotide
  Sense strand starting at position 466 of SEQ ID NO: 913623
agacaaagucuguagaugu

SEQ ID NO: 941617 - RNA, 19 nt, Artificial Sequence
  Description of Artificial Sequence: Synthetic oligonucleotide
  Antisense strand to SEQ ID NO: 941616
acaucuacagacuuugucu

SEQ ID NO: 941618 - RNA, 19 nt, Artificial Sequence
  Description of Artificial Sequence: Synthetic oligonucleotide
  Sense strand starting at position 1671 of SEQ ID NO: 913623
uaaucuuauggugaugagu

SEQ ID NO: 941619 - RNA, 19 nt, Artificial Sequence
  Description of Artificial Sequence: Synthetic oligonucleotide
  Antisense strand to SEQ ID NO: 941618
acucaucaccauaagauua

SEQ ID NO: 941620 - RNA, 19 nt, Artificial Sequence
  Description of Artificial Sequence: Synthetic oligonucleotide
  Sense strand starting at position 2578 of SEQ ID NO: 913623
ugugucaauuuccuccauu

SEQ ID NO: 941621 - RNA, 19 nt, Artificial Sequence
  Description of Artificial Sequence: Synthetic oligonucleotide
  Antisense strand to SEQ ID NO: 941620
aauggaggaaauugacaca

SEQ ID NO: 941622 - RNA, 19 nt, Artificial Sequence
  Description of Artificial Sequence: Synthetic oligonucleotide
  Sense strand starting at position 464 of SEQ ID NO: 913623
acagacaaagucuguagau

SEQ ID NO: 941623 - RNA, 19 nt, Artificial Sequence
  Description of Artificial Sequence: Synthetic oligonucleotide
  Antisense strand to SEQ ID NO: 941622
aucuacagacuuugucugu

SEQ ID NO: 941624 - RNA, 19 nt, Artificial Sequence
  Description of Artificial Sequence: Synthetic oligonucleotide
  Sense strand starting at position 465 of SEQ ID NO: 913623
cagacaaagucuguagaug

SEQ ID NO: 941625 - RNA, 19 nt, Artificial Sequence
  Description of Artificial Sequence: Synthetic oligonucleotide
  Antisense strand to SEQ ID NO: 941624
caucuacagacuuugucug

SEQ ID NO: 941626 - RNA, 19 nt, Artificial Sequence
  Description of Artificial Sequence: Synthetic oligonucleotide
  Sense strand starting at position 1843 of SEQ ID NO: 913623
ccuuaucaccgcuaaagaa

SEQ ID NO: 941627 - RNA, 19 nt, Artificial Sequence
  Description of Artificial Sequence: Synthetic oligonucleotide
  Antisense strand to SEQ ID NO: 941626
uucuuuagcggugauaagg

SEQ ID NO: 941628 - RNA, 19 nt, Artificial Sequence
  Description of Artificial Sequence: Synthetic oligonucleotide
  Sense strand starting at position 1444 of SEQ ID NO: 913623
ucugaauggucaccauaca

SEQ ID NO: 941629 - RNA, 19 nt, Artificial Sequence
  Description of Artificial Sequence: Synthetic oligonucleotide
  Antisense strand to SEQ ID NO: 941628
uguauggugaccauucaga

SEQ ID NO: 941630 - RNA, 19 nt, Artificial Sequence
  Description of Artificial Sequence: Synthetic oligonucleotide
  Sense strand starting at position 1441 of SEQ ID NO: 913623
auaucugaauggucaccau

SEQ ID NO: 941631 - RNA, 19 nt, Artificial Sequence
  Description of Artificial Sequence: Synthetic oligonucleotide
  Antisense strand to SEQ ID NO: 941630
auggugaccauucagauau

SEQ ID NO: 941632 - RNA, 19 nt, Artificial Sequence
  Description of Artificial Sequence: Synthetic oligonucleotide
  Sense strand starting at position 3696 of SEQ ID NO: 913623
augaguaaguccuuugaga

SEQ ID NO: 941633 - RNA, 19 nt, Artificial Sequence
  Description of Artificial Sequence: Synthetic oligonucleotide
  Antisense strand to SEQ ID NO: 941632
ucucaaaggacuuacucau

SEQ ID NO: 941634 - RNA, 19 nt, Artificial Sequence
  Description of Artificial Sequence: Synthetic oligonucleotide
  Sense strand starting at position 3126 of SEQ ID NO: 913623
cauagauugcaucaguuug

SEQ ID NO: 941635 - RNA, 19 nt, Artificial Sequence
  Description of Artificial Sequence: Synthetic oligonucleotide
  Antisense strand to SEQ ID NO: 941634
caaacugaugcaaucuaug

SEQ ID NO: 941636 - RNA, 19 nt, Artificial Sequence
  Description of Artificial Sequence: Synthetic oligonucleotide
  Sense strand starting at position 142 of SEQ ID NO: 913623
aacaguagccuuuggaaag

SEQ ID NO: 941637 - RNA, 19 nt, Artificial Sequence
  Description of Artificial Sequence: Synthetic oligonucleotide
  Antisense strand to SEQ ID NO: 941636
cuuuccaaaggcuacuguu

SEQ ID NO: 941638 - RNA, 19 nt, Artificial Sequence
  Description of Artificial Sequence: Synthetic oligonucleotide
  Sense strand starting at position 436 of SEQ ID NO: 913623
cagacuagccgacagguua

SEQ ID NO: 941639 - RNA, 19 nt, Artificial Sequence
  Description of Artificial Sequence: Synthetic oligonucleotide
  Antisense strand to SEQ ID NO: 941638
uaaccugucggcuagucug

SEQ ID NO: 941640 - RNA, 19 nt, Artificial Sequence
  Description of Artificial Sequence: Synthetic oligonucleotide
  Sense strand starting at position 2494 of SEQ ID NO: 913623
ugaaaugugcuaugggaug

SEQ ID NO: 941641 - RNA, 19 nt, Artificial Sequence
  Description of Artificial Sequence: Synthetic oligonucleotide
  Antisense strand to SEQ ID NO: 941640
caucccauagcacauuuca

SEQ ID NO: 941642 - RNA, 19 nt, Artificial Sequence
  Description of Artificial Sequence: Synthetic oligonucleotide
  Sense strand starting at position 2697 of SEQ ID NO: 913623
augaguuugcuagaucccu

SEQ ID NO: 941643 - RNA, 19 nt, Artificial Sequence
  Description of Artificial Sequence: Synthetic oligonucleotide
  Antisense strand to SEQ ID NO: 941642
agggaucuagcaaacucau

SEQ ID NO: 941644 - RNA, 19 nt, Artificial Sequence
  Description of Artificial Sequence: Synthetic oligonucleotide
  Sense strand starting at position 3192 of SEQ ID NO: 913623
caguauuugucgucccaug

SEQ ID NO: 941645 - RNA, 19 nt, Artificial Sequence
  Description of Artificial Sequence: Synthetic oligonucleotide
  Antisense strand to SEQ ID NO: 941644
caugggacgacaaauacug

SEQ ID NO: 941646 - RNA, 19 nt, Artificial Sequence
  Description of Artificial Sequence: Synthetic oligonucleotide
  Sense strand starting at position 3698 of SEQ ID NO: 913623
gaguaaguccuuugagacu

SEQ ID NO: 941647 - RNA, 19 nt, Artificial Sequence
  Description of Artificial Sequence: Synthetic oligonucleotide
  Antisense strand to SEQ ID NO: 941646
agucucaaaggacuuacuc

SEQ ID NO: 941648 - RNA, 19 nt, Artificial Sequence
  Description of Artificial Sequence: Synthetic oligonucleotide
  Sense strand starting at position 3519 of SEQ ID NO: 913623
auacuaaaugacuguuguu

SEQ ID NO: 941649 - RNA, 19 nt, Artificial Sequence
  Description of Artificial Sequence: Synthetic oligonucleotide
  Antisense strand to SEQ ID NO: 941648
aacaacagucauuuaguau

SEQ ID NO: 941650 - RNA, 19 nt, Artificial Sequence
  Description of Artificial Sequence: Synthetic oligonucleotide
  Sense strand starting at position 1039 of SEQ ID NO: 913623
guuuaaacuuuaguggauu

SEQ ID NO: 941651 - RNA, 19 nt, Artificial Sequence
  Description of Artificial Sequence: Synthetic oligonucleotide
  Antisense strand to SEQ ID NO: 941650
aauccacuaaaguuuaaac

SEQ ID NO: 941652 - RNA, 19 nt, Artificial Sequence
  Description of Artificial Sequence: Synthetic oligonucleotide
  Sense strand starting at position 63 of SEQ ID NO: 913623
guugaauacugucccagau

SEQ ID NO: 941653 - RNA, 19 nt, Artificial Sequence
  Description of Artificial Sequence: Synthetic oligonucleotide
  Antisense strand to SEQ ID NO: 941652
aucugggacaguauucaac

SEQ ID NO: 941654 - RNA, 19 nt, Artificial Sequence
  Description of Artificial Sequence: Synthetic oligonucleotide
  Sense strand starting at position 2147 of SEQ ID NO: 913623
cuuugcuuccaagaauguu

SEQ ID NO: 941655 - RNA, 19 nt, Artificial Sequence
  Description of Artificial Sequence: Synthetic oligonucleotide
  Antisense strand to SEQ ID NO: 941654
aacauucuuggaagcaaag

SEQ ID NO: 941656 - RNA, 19 nt, Artificial Sequence
  Description of Artificial Sequence: Synthetic oligonucleotide
  Sense strand starting at position 2519 of SEQ ID NO: 913623
ugaggucacuaggcuaauu

SEQ ID NO: 941657 - RNA, 19 nt, Artificial Sequence
  Description of Artificial Sequence: Synthetic oligonucleotide
  Antisense strand to SEQ ID NO: 941656
aauuagccuagugaccuca

SEQ ID NO: 941658 - RNA, 19 nt, Artificial Sequence
  Description of Artificial Sequence: Synthetic oligonucleotide
  Sense strand starting at position 1880 of SEQ ID NO: 913623
ggugcccuaccuuaaagua

SEQ ID NO: 941659 - RNA, 19 nt, Artificial Sequence
  Description of Artificial Sequence: Synthetic oligonucleotide
  Antisense strand to SEQ ID NO: 941658
uacuuuaagguagggcacc

SEQ ID NO: 941660 - RNA, 19 nt, Artificial Sequence
  Description of Artificial Sequence: Synthetic oligonucleotide
  Sense strand starting at position 1550 of SEQ ID NO: 913623
augucuaauuguucugaau

SEQ ID NO: 941661 - RNA, 19 nt, Artificial Sequence
  Description of Artificial Sequence: Synthetic oligonucleotide
  Antisense strand to SEQ ID NO: 941660
auucagaacaauuagacau

SEQ ID NO: 941662 - RNA, 19 nt, Artificial Sequence
  Description of Artificial Sequence: Synthetic oligonucleotide
  Sense strand starting at position 3557 of SEQ ID NO: 913623
guuauacagcaauggcaaa

SEQ ID NO: 941663 - RNA, 19 nt, Artificial Sequence
  Description of Artificial Sequence: Synthetic oligonucleotide
  Antisense strand to SEQ ID NO: 941662
uuugccauugcuguauaac

SEQ ID NO: 941664 - RNA, 19 nt, Artificial Sequence
  Description of Artificial Sequence: Synthetic oligonucleotide
  Sense strand starting at position 2682 of SEQ ID NO: 913623
uaugccucacugugaauga

SEQ ID NO: 941665 - RNA, 19 nt, Artificial Sequence
  Description of Artificial Sequence: Synthetic oligonucleotide
  Antisense strand to SEQ ID NO: 941664
ucauucacagugaggcaua

SEQ ID NO: 941666 - RNA, 19 nt, Artificial Sequence
  Description of Artificial Sequence: Synthetic oligonucleotide
  Sense strand starting at position 2693 of SEQ ID NO: 913623
gugaaugaguuugcuagau

SEQ ID NO: 941667 - RNA, 19 nt, Artificial Sequence
  Description of Artificial Sequence: Synthetic oligonucleotide
  Antisense strand to SEQ ID NO: 941666
aucuagcaaacucauucac

SEQ ID NO: 941668 - RNA, 19 nt, Artificial Sequence
  Description of Artificial Sequence: Synthetic oligonucleotide
  Sense strand starting at position 2692 of SEQ ID NO: 913623
ugugaaugaguuugcuaga

SEQ ID NO: 941669 - RNA, 19 nt, Artificial Sequence
  Description of Artificial Sequence: Synthetic oligonucleotide
  Antisense strand to SEQ ID NO: 941668
ucuagcaaacucauucaca

SEQ ID NO: 941670 - RNA, 19 nt, Artificial Sequence
  Description of Artificial Sequence: Synthetic oligonucleotide
  Sense strand starting at position 1546 of SEQ ID NO: 913623
ugauaugucuaauuguucu

SEQ ID NO: 941671 - RNA, 19 nt, Artificial Sequence
  Description of Artificial Sequence: Synthetic oligonucleotide
  Antisense strand to SEQ ID NO: 941670
agaacaauuagacauauca

SEQ ID NO: 941672 - RNA, 19 nt, Artificial Sequence
  Description of Artificial Sequence: Synthetic oligonucleotide
  Sense strand starting at position 2679 of SEQ ID NO: 913623
ccuuaugccucacugugaa

SEQ ID NO: 941673 - RNA, 19 nt, Artificial Sequence
  Description of Artificial Sequence: Synthetic oligonucleotide
  Antisense strand to SEQ ID NO: 941672
uucacagugaggcauaagg

SEQ ID NO: 941674 - RNA, 19 nt, Artificial Sequence
  Description of Artificial Sequence: Synthetic oligonucleotide
  Sense strand starting at position 2499 of SEQ ID NO: 913623
ugugcuaugggaugugauu

SEQ ID NO: 941675 - RNA, 19 nt, Artificial Sequence
  Description of Artificial Sequence: Synthetic oligonucleotide
  Antisense strand to SEQ ID NO: 941674
aaucacaucccauagcaca

SEQ ID NO: 941676 - RNA, 19 nt, Artificial Sequence
  Description of Artificial Sequence: Synthetic oligonucleotide
  Sense strand starting at position 782 of SEQ ID NO: 913623
ucugauuucugcuauugaa

SEQ ID NO: 941677 - RNA, 19 nt, Artificial Sequence
  Description of Artificial Sequence: Synthetic oligonucleotide
  Antisense strand to SEQ ID NO: 941676
uucaauagcagaaaucaga

SEQ ID NO: 941678 - RNA, 19 nt, Artificial Sequence
  Description of Artificial Sequence: Synthetic oligonucleotide
  Sense strand starting at position 3114 of SEQ ID NO: 913623
uauggcauuugucauagau

SEQ ID NO: 941679 - RNA, 19 nt, Artificial Sequence
  Description of Artificial Sequence: Synthetic oligonucleotide
  Antisense strand to SEQ ID NO: 941678
aucuaugacaaaugccaua

SEQ ID NO: 941680 - RNA, 19 nt, Artificial Sequence
  Description of Artificial Sequence: Synthetic oligonucleotide
  Sense strand starting at position 3116 of SEQ ID NO: 913623
uggcauuugucauagauug

SEQ ID NO: 941681 - RNA, 19 nt, Artificial Sequence
  Description of Artificial Sequence: Synthetic oligonucleotide
  Antisense strand to SEQ ID NO: 941680
caaucuaugacaaaugcca

SEQ ID NO: 941682 - RNA, 19 nt, Artificial Sequence
  Description of Artificial Sequence: Synthetic oligonucleotide
  Sense strand starting at position 3061 of SEQ ID NO: 913623
ugacguuuguucucuuaaa

SEQ ID NO: 941683 - RNA, 19 nt, Artificial Sequence
  Description of Artificial Sequence: Synthetic oligonucleotide
  Antisense strand to SEQ ID NO: 941682
uuuaagagaacaaacguca

SEQ ID NO: 941684 - RNA, 19 nt, Artificial Sequence
  Description of Artificial Sequence: Synthetic oligonucleotide
  Sense strand starting at position 2228 of SEQ ID NO: 913623
uucggaaaguuccugccua

SEQ ID NO: 941685 - RNA, 19 nt, Artificial Sequence
  Description of Artificial Sequence: Synthetic oligonucleotide
  Antisense strand to SEQ ID NO: 941684
uaggcaggaacuuuccgaa

SEQ ID NO: 941686 - RNA, 19 nt, Artificial Sequence
  Description of Artificial Sequence: Synthetic oligonucleotide
  Sense strand starting at position 3817 of SEQ ID NO: 913624
ggauuccagcuauacacau

SEQ ID NO: 941687 - RNA, 19 nt, Artificial Sequence
  Description of Artificial Sequence: Synthetic oligonucleotide
  Antisense strand to SEQ ID NO: 941686
auguguauagcuggaaucc

SEQ ID NO: 941688 - RNA, 19 nt, Artificial Sequence
  Description of Artificial Sequence: Synthetic oligonucleotide
  Sense strand starting at position 3395 of SEQ ID NO: 913624
gagacucugcgggagaauu

SEQ ID NO: 941689 - RNA, 19 nt, Artificial Sequence
  Description of Artificial Sequence: Synthetic oligonucleotide
  Antisense strand to SEQ ID NO: 941688
aauucucccgcagagucuc

SEQ ID NO: 941690 - RNA, 19 nt, Artificial Sequence
  Description of Artificial Sequence: Synthetic oligonucleotide
  Sense strand starting at position 3579 of SEQ ID NO: 913624
ggacccauaugauuagagu

SEQ ID NO: 941691 - RNA, 19 nt, Artificial Sequence
  Description of Artificial Sequence: Synthetic oligonucleotide
  Antisense strand to SEQ ID NO: 941690
acucuaaucauaugggucc

SEQ ID NO: 941692 - RNA, 19 nt, Artificial Sequence
  Description of Artificial Sequence: Synthetic oligonucleotide
  Sense strand starting at position 840 of SEQ ID NO: 913624
guguauucugaagaauacu

SEQ ID NO: 941693 - RNA, 19 nt, Artificial Sequence
  Description of Artificial Sequence: Synthetic oligonucleotide
  Antisense strand to SEQ ID NO: 941692
aguauucuucagaauacac

SEQ ID NO: 941694 - RNA, 19 nt, Artificial Sequence
  Description of Artificial Sequence: Synthetic oligonucleotide
  Sense strand starting at position 75 of SEQ ID NO: 913624
aaguaugagucaccaggga

SEQ ID NO: 941695 - RNA, 19 nt, Artificial Sequence
  Description of Artificial Sequence: Synthetic oligonucleotide
  Antisense strand to SEQ ID NO: 941694
ucccuggugacucauacuu

SEQ ID NO: 941696 - RNA, 19 nt, Artificial Sequence
  Description of Artificial Sequence: Synthetic oligonucleotide
  Sense strand starting at position 68 of SEQ ID NO: 913624
augggauaaguaugaguca

SEQ ID NO: 941697 - RNA, 19 nt, Artificial Sequence
  Description of Artificial Sequence: Synthetic oligonucleotide
  Antisense strand to SEQ ID NO: 941696
ugacucauacuuaucccau

SEQ ID NO: 941698 - RNA, 19 nt, Artificial Sequence
  Description of Artificial Sequence: Synthetic oligonucleotide
  Sense strand starting at position 3403 of SEQ ID NO: 913624
gcgggagaauuuguuucuu

SEQ ID NO: 941699 - RNA, 19 nt, Artificial Sequence
  Description of Artificial Sequence: Synthetic oligonucleotide
  Antisense strand to SEQ ID NO: 941698
aagaaacaaauucucccgc

SEQ ID NO: 941700 - RNA, 19 nt, Artificial Sequence
  Description of Artificial Sequence: Synthetic oligonucleotide
  Sense strand starting at position 2970 of SEQ ID NO: 913624
gcucuuuauccagcugugu

SEQ ID NO: 941701 - RNA, 19 nt, Artificial Sequence
  Description of Artificial Sequence: Synthetic oligonucleotide
  Antisense strand to SEQ ID NO: 941700
acacagcuggauaaagagc

SEQ ID NO: 941702 - RNA, 19 nt, Artificial Sequence
  Description of Artificial Sequence: Synthetic oligonucleotide
  Sense strand starting at position 2837 of SEQ ID NO: 913624
ccaguuugucaugaucaaa

SEQ ID NO: 941703 - RNA, 19 nt, Artificial Sequence
  Description of Artificial Sequence: Synthetic oligonucleotide
  Antisense strand to SEQ ID NO: 941702
uuugaucaugacaaacugg

SEQ ID NO: 941704 - RNA, 19 nt, Artificial Sequence
  Description of Artificial Sequence: Synthetic oligonucleotide
  Sense strand starting at position 3103 of SEQ ID NO: 913624
guccgaagacauuaauucu

SEQ ID NO: 941705 - RNA, 19 nt, Artificial Sequence
  Description of Artificial Sequence: Synthetic oligonucleotide
  Antisense strand to SEQ ID NO: 941704
agaauuaaugucuucggac

SEQ ID NO: 941706 - RNA, 19 nt, Artificial Sequence
  Description of Artificial Sequence: Synthetic oligonucleotide
  Sense strand starting at position 71 of SEQ ID NO: 913624
ggauaaguaugagucacca

SEQ ID NO: 941707 - RNA, 19 nt, Artificial Sequence
  Description of Artificial Sequence: Synthetic oligonucleotide
  Antisense strand to SEQ ID NO: 941706
uggugacucauacuuaucc

SEQ ID NO: 941708 - RNA, 19 nt, Artificial Sequence
  Description of Artificial Sequence: Synthetic oligonucleotide
  Sense strand starting at position 550 of SEQ ID NO: 913624
ugguguuagggauacagua

SEQ ID NO: 941709 - RNA, 19 nt, Artificial Sequence
  Description of Artificial Sequence: Synthetic oligonucleotide
  Antisense strand to SEQ ID NO: 941708
uacuguaucccuaacacca

SEQ ID NO: 941710 - RNA, 19 nt, Artificial Sequence
  Description of Artificial Sequence: Synthetic oligonucleotide
  Sense strand starting at position 3100 of SEQ ID NO: 913624
aguguccgaagacauuaau

SEQ ID NO: 941711 - RNA, 19 nt, Artificial Sequence
  Description of Artificial Sequence: Synthetic oligonucleotide
  Antisense strand to SEQ ID NO: 941710
auuaaugucuucggacacu

SEQ ID NO: 941712 - RNA, 19 nt, Artificial Sequence
  Description of Artificial Sequence: Synthetic oligonucleotide
  Sense strand starting at position 834 of SEQ ID NO: 913624
uaggaaguguauucugaag

SEQ ID NO: 941713 - RNA, 19 nt, Artificial Sequence
  Description of Artificial Sequence: Synthetic oligonucleotide
  Antisense strand to SEQ ID NO: 941712
cuucagaauacacuuccua

SEQ ID NO: 941714 - RNA, 19 nt, Artificial Sequence
  Description of Artificial Sequence: Synthetic oligonucleotide
  Sense strand starting at position 3181 of SEQ ID NO: 913624
ucaguuaaaugacuguaaa

SEQ ID NO: 941715 - RNA, 19 nt, Artificial Sequence
  Description of Artificial Sequence: Synthetic oligonucleotide
  Antisense strand to SEQ ID NO: 941714
uuuacagucauuuaacuga

SEQ ID NO: 941716 - RNA, 19 nt, Artificial Sequence
  Description of Artificial Sequence: Synthetic oligonucleotide
  Sense strand starting at position 3706 of SEQ ID NO: 913624
gggauuagaaugugagcau

SEQ ID NO: 941717 - RNA, 19 nt, Artificial Sequence
  Description of Artificial Sequence: Synthetic oligonucleotide
  Antisense strand to SEQ ID NO: 941716
augcucacauucuaauccc

SEQ ID NO: 941718 - RNA, 19 nt, Artificial Sequence
  Description of Artificial Sequence: Synthetic oligonucleotide
  Sense strand starting at position 3394 of SEQ ID NO: 913624
agagacucugcgggagaau

SEQ ID NO: 941719 - RNA, 19 nt, Artificial Sequence
  Description of Artificial Sequence: Synthetic oligonucleotide
  Antisense strand to SEQ ID NO: 941718
auucucccgcagagucucu

SEQ ID NO: 941720 - RNA, 19 nt, Artificial Sequence
  Description of Artificial Sequence: Synthetic oligonucleotide
  Sense strand starting at position 1208 of SEQ ID NO: 913624
gcguguucccaagcagcaa

SEQ ID NO: 941721 - RNA, 19 nt, Artificial Sequence
  Description of Artificial Sequence: Synthetic oligonucleotide
  Antisense strand to SEQ ID NO: 941720
uugcugcuugggaacacgc

SEQ ID NO: 941722 - RNA, 19 nt, Artificial Sequence
  Description of Artificial Sequence: Synthetic oligonucleotide
  Sense strand starting at position 878 of SEQ ID NO: 913624
ucucaaguucccuaaguga

SEQ ID NO: 941723 - RNA, 19 nt, Artificial Sequence
  Description of Artificial Sequence: Synthetic oligonucleotide
  Antisense strand to SEQ ID NO: 941722
ucacuuagggaacuugaga

SEQ ID NO: 941724 - RNA, 19 nt, Artificial Sequence
  Description of Artificial Sequence: Synthetic oligonucleotide
  Sense strand starting at position 3865 of SEQ ID NO: 913624
ugcagagagaccuagcuuu

SEQ ID NO: 941725 - RNA, 19 nt, Artificial Sequence
  Description of Artificial Sequence: Synthetic oligonucleotide
  Antisense strand to SEQ ID NO: 941724
aaagcuaggucucucugca

SEQ ID NO: 941726 - RNA, 19 nt, Artificial Sequence
  Description of Artificial Sequence: Synthetic oligonucleotide
  Sense strand starting at position 1009 of SEQ ID NO: 913624
ggcuaauaauauucuauug

SEQ ID NO: 941727 - RNA, 19 nt, Artificial Sequence
  Description of Artificial Sequence: Synthetic oligonucleotide
  Antisense strand to SEQ ID NO: 941726
caauagaauauuauuagcc

SEQ ID NO: 941728 - RNA, 19 nt, Artificial Sequence
  Description of Artificial Sequence: Synthetic oligonucleotide
  Sense strand starting at position 3710 of SEQ ID NO: 913624
uuagaaugugagcaucagu

SEQ ID NO: 941729 - RNA, 19 nt, Artificial Sequence
  Description of Artificial Sequence: Synthetic oligonucleotide
  Antisense strand to SEQ ID NO: 941728
acugaugcucacauucuaa

SEQ ID NO: 941730 - RNA, 19 nt, Artificial Sequence
  Description of Artificial Sequence: Synthetic oligonucleotide
  Sense strand starting at position 2807 of SEQ ID NO: 913624
uaaugacauguuuguggga

SEQ ID NO: 941731 - RNA, 19 nt, Artificial Sequence
  Description of Artificial Sequence: Synthetic oligonucleotide
  Antisense strand to SEQ ID NO: 941730
ucccacaaacaugucauua

SEQ ID NO: 941732 - RNA, 19 nt, Artificial Sequence
  Description of Artificial Sequence: Synthetic oligonucleotide
  Sense strand starting at position 600 of SEQ ID NO: 913624
gaguuuccugggcaucuga

SEQ ID NO: 941733 - RNA, 19 nt, Artificial Sequence
  Description of Artificial Sequence: Synthetic oligonucleotide
  Antisense strand to SEQ ID NO: 941732
ucagaugcccaggaaacuc

SEQ ID NO: 941734 - RNA, 19 nt, Artificial Sequence
  Description of Artificial Sequence: Synthetic oligonucleotide
  Sense strand starting at position 2532 of SEQ ID NO: 913624
gccagucaacuuggaaaua

SEQ ID NO: 941735 - RNA, 19 nt, Artificial Sequence
  Description of Artificial Sequence: Synthetic oligonucleotide
  Antisense strand to SEQ ID NO: 941734
uauuuccaaguugacuggc

SEQ ID NO: 941736 - RNA, 19 nt, Artificial Sequence
  Description of Artificial Sequence: Synthetic oligonucleotide
  Sense strand starting at position 1824 of SEQ ID NO: 913624
gagaucuuuaccggagggu

SEQ ID NO: 941737 - RNA, 19 nt, Artificial Sequence
  Description of Artificial Sequence: Synthetic oligonucleotide
  Antisense strand to SEQ ID NO: 941736
acccuccgguaaagaucuc

SEQ ID NO: 941738 - RNA, 19 nt, Artificial Sequence
  Description of Artificial Sequence: Synthetic oligonucleotide
  Sense strand starting at position 2840 of SEQ ID NO: 913624
guuugucaugaucaaagca

SEQ ID NO: 941739 - RNA, 19 nt, Artificial Sequence
  Description of Artificial Sequence: Synthetic oligonucleotide
  Antisense strand to SEQ ID NO: 941738
ugcuuugaucaugacaaac

SEQ ID NO: 941740 - RNA, 19 nt, Artificial Sequence
  Description of Artificial Sequence: Synthetic oligonucleotide
  Sense strand starting at position 552 of SEQ ID NO: 913624
guguuagggauacaguagu

SEQ ID NO: 941741 - RNA, 19 nt, Artificial Sequence
  Description of Artificial Sequence: Synthetic oligonucleotide
  Antisense strand to SEQ ID NO: 941740
acuacuguaucccuaacac

SEQ ID NO: 941742 - RNA, 19 nt, Artificial Sequence
  Description of Artificial Sequence: Synthetic oligonucleotide
  Sense strand starting at position 83 of SEQ ID NO: 913624
gucaccagggauugcuaaa

SEQ ID NO: 941743 - RNA, 19 nt, Artificial Sequence
  Description of Artificial Sequence: Synthetic oligonucleotide
  Antisense strand to SEQ ID NO: 941742
uuuagcaaucccuggugac

SEQ ID NO: 941744 - RNA, 19 nt, Artificial Sequence
  Description of Artificial Sequence: Synthetic oligonucleotide
  Sense strand starting at position 2353 of SEQ ID NO: 913624
uuaacaagggccugaugua

SEQ ID NO: 941745 - RNA, 19 nt, Artificial Sequence
  Description of Artificial Sequence: Synthetic oligonucleotide
  Antisense strand to SEQ ID NO: 941744
uacaucaggcccuuguuaa

SEQ ID NO: 941746 - RNA, 19 nt, Artificial Sequence
  Description of Artificial Sequence: Synthetic oligonucleotide
  Sense strand starting at position 3080 of SEQ ID NO: 913624
gagcaugagcucugaagac

SEQ ID NO: 941747 - RNA, 19 nt, Artificial Sequence
  Description of Artificial Sequence: Synthetic oligonucleotide
  Antisense strand to SEQ ID NO: 941746
gucuucagagcucaugcuc

SEQ ID NO: 941748 - RNA, 19 nt, Artificial Sequence
  Description of Artificial Sequence: Synthetic oligonucleotide
  Sense strand starting at position 579 of SEQ ID NO: 913624
aggcaaggucccuaauguu

SEQ ID NO: 941749 - RNA, 19 nt, Artificial Sequence
  Description of Artificial Sequence: Synthetic oligonucleotide
  Antisense strand to SEQ ID NO: 941748
aacauuagggaccuugccu

SEQ ID NO: 941750 - RNA, 19 nt, Artificial Sequence
  Description of Artificial Sequence: Synthetic oligonucleotide
  Sense strand starting at position 3145 of SEQ ID NO: 913624
gugugacauugggcaagaa

SEQ ID NO: 941751 - RNA, 19 nt, Artificial Sequence
  Description of Artificial Sequence: Synthetic oligonucleotide
  Antisense strand to SEQ ID NO: 941750
uucuugcccaaugucacac

SEQ ID NO: 941752 - RNA, 19 nt, Artificial Sequence
  Description of Artificial Sequence: Synthetic oligonucleotide
  Sense strand starting at position 2690 of SEQ ID NO: 913624
cagaguagcuggguugaga

SEQ ID NO: 941753 - RNA, 19 nt, Artificial Sequence
  Description of Artificial Sequence: Synthetic oligonucleotide
  Antisense strand to SEQ ID NO: 941752
ucucaacccagcuacucug

SEQ ID NO: 941754 - RNA, 19 nt, Artificial Sequence
  Description of Artificial Sequence: Synthetic oligonucleotide
  Sense strand starting at position 2218 of SEQ ID NO: 913624
gccuuugggcuuuaacaua

SEQ ID NO: 941755 - RNA, 19 nt, Artificial Sequence
  Description of Artificial Sequence: Synthetic oligonucleotide
  Antisense strand to SEQ ID NO: 941754
uauguuaaagcccaaaggc

SEQ ID NO: 941756 - RNA, 19 nt, Artificial Sequence
  Description of Artificial Sequence: Synthetic oligonucleotide
  Sense strand starting at position 1041 of SEQ ID NO: 913624
ucaguuuggcauggaauau

SEQ ID NO: 941757 - RNA, 19 nt, Artificial Sequence
  Description of Artificial Sequence: Synthetic oligonucleotide
  Antisense strand to SEQ ID NO: 941756
auauuccaugccaaacuga

SEQ ID NO: 941758 - RNA, 19 nt, Artificial Sequence
  Description of Artificial Sequence: Synthetic oligonucleotide
  Sense strand starting at position 1040 of SEQ ID NO: 913624
cucaguuuggcauggaaua

SEQ ID NO: 941759 - RNA, 19 nt, Artificial Sequence
  Description of Artificial Sequence: Synthetic oligonucleotide
  Antisense strand to SEQ ID NO: 941758
uauuccaugccaaacugag

SEQ ID NO: 941760 - RNA, 19 nt, Artificial Sequence
  Description of Artificial Sequence: Synthetic oligonucleotide
  Sense strand starting at position 2656 of SEQ ID NO: 913624
auaccaaaguccgugaacu

SEQ ID NO: 941761 - RNA, 19 nt, Artificial Sequence
  Description of Artificial Sequence: Synthetic oligonucleotide
  Antisense strand to SEQ ID NO: 941760
aguucacggacuuugguau

SEQ ID NO: 941762 - RNA, 19 nt, Artificial Sequence
  Description of Artificial Sequence: Synthetic oligonucleotide
  Sense strand starting at position 3062 of SEQ ID NO: 913624
gguauugugcaauaguuag

SEQ ID NO: 941763 - RNA, 19 nt, Artificial Sequence
  Description of Artificial Sequence: Synthetic oligonucleotide
  Antisense strand to SEQ ID NO: 941762
cuaacuauugcacaauacc

SEQ ID NO: 941764 - RNA, 19 nt, Artificial Sequence
  Description of Artificial Sequence: Synthetic oligonucleotide
  Sense strand starting at position 3 of SEQ ID NO: 913624
agcaguacccucuauaugu

SEQ ID NO: 941765 - RNA, 19 nt, Artificial Sequence
  Description of Artificial Sequence: Synthetic oligonucleotide
  Antisense strand to SEQ ID NO: 941764
acauauagaggguacugcu

SEQ ID NO: 941766 - RNA, 19 nt, Artificial Sequence
  Description of Artificial Sequence: Synthetic oligonucleotide
  Sense strand starting at position 1315 of SEQ ID NO: 913625
cagagacugugauuauaac

SEQ ID NO: 941767 - RNA, 19 nt, Artificial Sequence
  Description of Artificial Sequence: Synthetic oligonucleotide
  Antisense strand to SEQ ID NO: 941766
guuauaaucacagucucug

SEQ ID NO: 941768 - RNA, 19 nt, Artificial Sequence
  Description of Artificial Sequence: Synthetic oligonucleotide
  Sense strand starting at position 828 of SEQ ID NO: 913625
uuauaugauccugagcuaa

SEQ ID NO: 941769 - RNA, 19 nt, Artificial Sequence
  Description of Artificial Sequence: Synthetic oligonucleotide
  Antisense strand to SEQ ID NO: 941768
uuagcucaggaucauauaa

SEQ ID NO: 941770 - RNA, 19 nt, Artificial Sequence
  Description of Artificial Sequence: Synthetic oligonucleotide
  Sense strand starting at position 1146 of SEQ ID NO: 913625
ggugauaguagagaagcua

SEQ ID NO: 941771 - RNA, 19 nt, Artificial Sequence
  Description of Artificial Sequence: Synthetic oligonucleotide
  Antisense strand to SEQ ID NO: 941770
uagcuucucuacuaucacc

SEQ ID NO: 941772 - RNA, 19 nt, Artificial Sequence
  Description of Artificial Sequence: Synthetic oligonucleotide
  Sense strand starting at position 2011 of SEQ ID NO: 913625
ucgauuucucauuggccaa

SEQ ID NO: 941773 - RNA, 19 nt, Artificial Sequence
  Description of Artificial Sequence: Synthetic oligonucleotide
  Antisense strand to SEQ ID NO: 941772
uuggccaaugagaaaucga

SEQ ID NO: 941774 - RNA, 19 nt, Artificial Sequence
  Description of Artificial Sequence: Synthetic oligonucleotide
  Sense strand starting at position 866 of SEQ ID NO: 913625
acuagaaagguagguauua

SEQ ID NO: 941775 - RNA, 19 nt, Artificial Sequence
  Description of Artificial Sequence: Synthetic oligonucleotide
  Antisense strand to SEQ ID NO: 941774
uaauaccuaccuuucuagu

SEQ ID NO: 941776 - RNA, 19 nt, Artificial Sequence
  Description of Artificial Sequence: Synthetic oligonucleotide
  Sense strand starting at position 1404 of SEQ ID NO: 913625
cggaaagguaagcaacauu

SEQ ID NO: 941777 - RNA, 19 nt, Artificial Sequence
  Description of Artificial Sequence: Synthetic oligonucleotide
  Antisense strand to SEQ ID NO: 941776
aauguugcuuaccuuuccg

SEQ ID NO: 941778 - RNA, 19 nt, Artificial Sequence
  Description of Artificial Sequence: Synthetic oligonucleotide
  Sense strand starting at position 849 of SEQ ID NO: 913625
cuggaucuaucucugaaac

SEQ ID NO: 941779 - RNA, 19 nt, Artificial Sequence
  Description of Artificial Sequence: Synthetic oligonucleotide
  Antisense strand to SEQ ID NO: 941778
guuucagagauagauccag

SEQ ID NO: 941780 - RNA, 19 nt, Artificial Sequence
  Description of Artificial Sequence: Synthetic oligonucleotide
  Sense strand starting at position 850 of SEQ ID NO: 913625
uggaucuaucucugaaacu

SEQ ID NO: 941781 - RNA, 19 nt, Artificial Sequence
  Description of Artificial Sequence: Synthetic oligonucleotide
  Antisense strand to SEQ ID NO: 941780
aguuucagagauagaucca

SEQ ID NO: 941782 - RNA, 19 nt, Artificial Sequence
  Description of Artificial Sequence: Synthetic oligonucleotide
  Sense strand starting at position 3251 of SEQ ID NO: 913625
ugcaaacauccugagagca

SEQ ID NO: 941783 - RNA, 19 nt, Artificial Sequence
  Description of Artificial Sequence: Synthetic oligonucleotide
  Antisense strand to SEQ ID NO: 941782
ugcucucaggauguuugca

SEQ ID NO: 941784 - RNA, 19 nt, Artificial Sequence
  Description of Artificial Sequence: Synthetic oligonucleotide
  Sense strand starting at position 1202 of SEQ ID NO: 913625
agaagcguuccagauagau

SEQ ID NO: 941785 - RNA, 19 nt, Artificial Sequence
  Description of Artificial Sequence: Synthetic oligonucleotide
  Antisense strand to SEQ ID NO: 941784
aucuaucuggaacgcuucu

SEQ ID NO: 941786 - RNA, 19 nt, Artificial Sequence
  Description of Artificial Sequence: Synthetic oligonucleotide
  Sense strand starting at position 1026 of SEQ ID NO: 913625
gacauagugcuuggaagaa

SEQ ID NO: 941787 - RNA, 19 nt, Artificial Sequence
  Description of Artificial Sequence: Synthetic oligonucleotide
  Antisense strand to SEQ ID NO: 941786
uucuuccaagcacuauguc

SEQ ID NO: 941788 - RNA, 19 nt, Artificial Sequence
  Description of Artificial Sequence: Synthetic oligonucleotide
  Sense strand starting at position 1137 of SEQ ID NO: 913625
cuucucugaggugauagua

SEQ ID NO: 941789 - RNA, 19 nt, Artificial Sequence
  Description of Artificial Sequence: Synthetic oligonucleotide
  Antisense strand to SEQ ID NO: 941788
uacuaucaccucagagaag

SEQ ID NO: 941790 - RNA, 19 nt, Artificial Sequence
  Description of Artificial Sequence: Synthetic oligonucleotide
  Sense strand starting at position 3604 of SEQ ID NO: 913625
ucuauuucuugagaugaaa

SEQ ID NO: 941791 - RNA, 19 nt, Artificial Sequence
  Description of Artificial Sequence: Synthetic oligonucleotide
  Antisense strand to SEQ ID NO: 941790
uuucaucucaagaaauaga

SEQ ID NO: 941792 - RNA, 19 nt, Artificial Sequence
  Description of Artificial Sequence: Synthetic oligonucleotide
  Sense strand starting at position 2010 of SEQ ID NO: 913625
gucgauuucucauuggcca

SEQ ID NO: 941793 - RNA, 19 nt, Artificial Sequence
  Description of Artificial Sequence: Synthetic oligonucleotide
  Antisense strand to SEQ ID NO: 941792
uggccaaugagaaaucgac

SEQ ID NO: 941794 - RNA, 19 nt, Artificial Sequence
  Description of Artificial Sequence: Synthetic oligonucleotide
  Sense strand starting at position 3363 of SEQ ID NO: 913625
cgacuuucccauugggaaa

SEQ ID NO: 941795 - RNA, 19 nt, Artificial Sequence
  Description of Artificial Sequence: Synthetic oligonucleotide
  Antisense strand to SEQ ID NO: 941794
uuucccaaugggaaagucg

SEQ ID NO: 941796 - RNA, 19 nt, Artificial Sequence
  Description of Artificial Sequence: Synthetic oligonucleotide
  Sense strand starting at position 830 of SEQ ID NO: 913625
auaugauccugagcuaauc

SEQ ID NO: 941797 - RNA, 19 nt, Artificial Sequence
  Description of Artificial Sequence: Synthetic oligonucleotide
  Antisense strand to SEQ ID NO: 941796
gauuagcucaggaucauau

SEQ ID NO: 941798 - RNA, 19 nt, Artificial Sequence
  Description of Artificial Sequence: Synthetic oligonucleotide
  Sense strand starting at position 1392 of SEQ ID NO: 913625
gcuagauaaagucggaaag

SEQ ID NO: 941799 - RNA, 19 nt, Artificial Sequence
  Description of Artificial Sequence: Synthetic oligonucleotide
  Antisense strand to SEQ ID NO: 941798
cuuuccgacuuuaucuagc

SEQ ID NO: 941800 - RNA, 19 nt, Artificial Sequence
  Description of Artificial Sequence: Synthetic oligonucleotide
  Sense strand starting at position 1577 of SEQ ID NO: 913625
gcgauacggcuagaagaaa

SEQ ID NO: 941801 - RNA, 19 nt, Artificial Sequence
  Description of Artificial Sequence: Synthetic oligonucleotide
  Antisense strand to SEQ ID NO: 941800
uuucuucuagccguaucgc

SEQ ID NO: 941802 - RNA, 19 nt, Artificial Sequence
  Description of Artificial Sequence: Synthetic oligonucleotide
  Sense strand starting at position 1025 of SEQ ID NO: 913625
ugacauagugcuuggaaga

SEQ ID NO: 941803 - RNA, 19 nt, Artificial Sequence
  Description of Artificial Sequence: Synthetic oligonucleotide
  Antisense strand to SEQ ID NO: 941802
ucuuccaagcacuauguca

SEQ ID NO: 941804 - RNA, 19 nt, Artificial Sequence
  Description of Artificial Sequence: Synthetic oligonucleotide
  Sense strand starting at position 201 of SEQ ID NO: 913625
uuaagugaauacuugcaga

SEQ ID NO: 941805 - RNA, 19 nt, Artificial Sequence
  Description of Artificial Sequence: Synthetic oligonucleotide
  Antisense strand to SEQ ID NO: 941804
ucugcaaguauucacuuaa

SEQ ID NO: 941806 - RNA, 19 nt, Artificial Sequence
  Description of Artificial Sequence: Synthetic oligonucleotide
  Sense strand starting at position 3239 of SEQ ID NO: 913625
ccuacuugagauugcaaac

SEQ ID NO: 941807 - RNA, 19 nt, Artificial Sequence
  Description of Artificial Sequence: Synthetic oligonucleotide
  Antisense strand to SEQ ID NO: 941806
guuugcaaucucaaguagg

SEQ ID NO: 941808 - RNA, 19 nt, Artificial Sequence
  Description of Artificial Sequence: Synthetic oligonucleotide
  Sense strand starting at position 3232 of SEQ ID NO: 913625
gguaucuccuacuugagau

SEQ ID NO: 941809 - RNA, 19 nt, Artificial Sequence
  Description of Artificial Sequence: Synthetic oligonucleotide
  Antisense strand to SEQ ID NO: 941808
aucucaaguaggagauacc

SEQ ID NO: 941810 - RNA, 19 nt, Artificial Sequence
  Description of Artificial Sequence: Synthetic oligonucleotide
  Sense strand starting at position 839 of SEQ ID NO: 913625
ugagcuaauccuggaucua

SEQ ID NO: 941811 - RNA, 19 nt, Artificial Sequence
  Description of Artificial Sequence: Synthetic oligonucleotide
  Antisense strand to SEQ ID NO: 941810
uagauccaggauuagcuca

SEQ ID NO: 941812 - RNA, 19 nt, Artificial Sequence
  Description of Artificial Sequence: Synthetic oligonucleotide
  Sense strand starting at position 1114 of SEQ ID NO: 913625
cucaauuaguggguccaga

SEQ ID NO: 941813 - RNA, 19 nt, Artificial Sequence
  Description of Artificial Sequence: Synthetic oligonucleotide
  Antisense strand to SEQ ID NO: 941812
ucuggacccacuaauugag

SEQ ID NO: 941814 - RNA, 19 nt, Artificial Sequence
  Description of Artificial Sequence: Synthetic oligonucleotide
  Sense strand starting at position 1024 of SEQ ID NO: 913625
cugacauagugcuuggaag

SEQ ID NO: 941815 - RNA, 19 nt, Artificial Sequence
  Description of Artificial Sequence: Synthetic oligonucleotide
  Antisense strand to SEQ ID NO: 941814
cuuccaagcacuaugucag

SEQ ID NO: 941816 - RNA, 19 nt, Artificial Sequence
  Description of Artificial Sequence: Synthetic oligonucleotide
  Sense strand starting at position 1277 of SEQ ID NO: 913625
agaagcuaguauguuauaa

SEQ ID NO: 941817 - RNA, 19 nt, Artificial Sequence
  Description of Artificial Sequence: Synthetic oligonucleotide
  Antisense strand to SEQ ID NO: 941816
uuauaacauacuagcuucu

SEQ ID NO: 941818 - RNA, 19 nt, Artificial Sequence
  Description of Artificial Sequence: Synthetic oligonucleotide
  Sense strand starting at position 3173 of SEQ ID NO: 913625
cguguuagcccagaaggga

SEQ ID NO: 941819 - RNA, 19 nt, Artificial Sequence
  Description of Artificial Sequence: Synthetic oligonucleotide
  Antisense strand to SEQ ID NO: 941818
ucccuucugggcuaacacg

SEQ ID NO: 941820 - RNA, 19 nt, Artificial Sequence
  Description of Artificial Sequence: Synthetic oligonucleotide
  Sense strand starting at position 760 of SEQ ID NO: 913625
ucaaguuagccagaacgua

SEQ ID NO: 941821 - RNA, 19 nt, Artificial Sequence
  Description of Artificial Sequence: Synthetic oligonucleotide
  Antisense strand to SEQ ID NO: 941820
uacguucuggcuaacuuga

SEQ ID NO: 941822 - RNA, 19 nt, Artificial Sequence
  Description of Artificial Sequence: Synthetic oligonucleotide
  Sense strand starting at position 2038 of SEQ ID NO: 913625
acaguuccgcaguaagaca

SEQ ID NO: 941823 - RNA, 19 nt, Artificial Sequence
  Description of Artificial Sequence: Synthetic oligonucleotide
  Antisense strand to SEQ ID NO: 941822
ugucuuacugcggaacugu

SEQ ID NO: 941824 - RNA, 19 nt, Artificial Sequence
  Description of Artificial Sequence: Synthetic oligonucleotide
  Sense strand starting at position 499 of SEQ ID NO: 913625
caaggugcccuguaauauu

SEQ ID NO: 941825 - RNA, 19 nt, Artificial Sequence
  Description of Artificial Sequence: Synthetic oligonucleotide
  Antisense strand to SEQ ID NO: 941824
aauauuacagggcaccuug

SEQ ID NO: 941826 - RNA, 19 nt, Artificial Sequence
  Description of Artificial Sequence: Synthetic oligonucleotide
  Sense strand starting at position 73 of SEQ ID NO: 913625
gcgcccugccgacaauuua

SEQ ID NO: 941827 - RNA, 19 nt, Artificial Sequence
  Description of Artificial Sequence: Synthetic oligonucleotide
  Antisense strand to SEQ ID NO: 941826
uaaauugucggcagggcgc

SEQ ID NO: 941828 - RNA, 19 nt, Artificial Sequence
  Description of Artificial Sequence: Synthetic oligonucleotide
  Sense strand starting at position 222 of SEQ ID NO: 913625
uuucucuuugagcauggua

SEQ ID NO: 941829 - RNA, 19 nt, Artificial Sequence
  Description of Artificial Sequence: Synthetic oligonucleotide
  Antisense strand to SEQ ID NO: 941828
uaccaugcucaaagagaaa

SEQ ID NO: 941830 - RNA, 19 nt, Artificial Sequence
  Description of Artificial Sequence: Synthetic oligonucleotide
  Sense strand starting at position 3271 of SEQ ID NO: 913625
cgucuuuguccagaugaca

SEQ ID NO: 941831 - RNA, 19 nt, Artificial Sequence
  Description of Artificial Sequence: Synthetic oligonucleotide
  Antisense strand to SEQ ID NO: 941830
ugucaucuggacaaagacg

SEQ ID NO: 941832 - RNA, 19 nt, Artificial Sequence
  Description of Artificial Sequence: Synthetic oligonucleotide
  Sense strand starting at position 1136 of SEQ ID NO: 913625
acuucucugaggugauagu

SEQ ID NO: 941833 - RNA, 19 nt, Artificial Sequence
  Description of Artificial Sequence: Synthetic oligonucleotide
  Antisense strand to SEQ ID NO: 941832
acuaucaccucagagaagu

SEQ ID NO: 941834 - RNA, 19 nt, Artificial Sequence
  Description of Artificial Sequence: Synthetic oligonucleotide
  Sense strand starting at position 1234 of SEQ ID NO: 913625
ggcucuguagcaggagaaa

SEQ ID NO: 941835 - RNA, 19 nt, Artificial Sequence
  Description of Artificial Sequence: Synthetic oligonucleotide
  Antisense strand to SEQ ID NO: 941834
uuucuccugcuacagagcc

SEQ ID NO: 941836 - RNA, 19 nt, Artificial Sequence
  Description of Artificial Sequence: Synthetic oligonucleotide
  Sense strand starting at position 919 of SEQ ID NO: 913625
gugcuauauacggauggua

SEQ ID NO: 941837 - RNA, 19 nt, Artificial Sequence
  Description of Artificial Sequence: Synthetic oligonucleotide
  Antisense strand to SEQ ID NO: 941836
uaccauccguauauagcac

SEQ ID NO: 941838 - RNA, 19 nt, Artificial Sequence
  Description of Artificial Sequence: Synthetic oligonucleotide
  Sense strand starting at position 1359 of SEQ ID NO: 913625
acuagauugcgucagugag

SEQ ID NO: 941839 - RNA, 19 nt, Artificial Sequence
  Description of Artificial Sequence: Synthetic oligonucleotide
  Antisense strand to SEQ ID NO: 941838
cucacugacgcaaucuagu

SEQ ID NO: 941840 - RNA, 19 nt, Artificial Sequence
  Description of Artificial Sequence: Synthetic oligonucleotide
  Sense strand starting at position 2076 of SEQ ID NO: 913625
uauccuugcgaguaaacuc

SEQ ID NO: 941841 - RNA, 19 nt, Artificial Sequence
  Description of Artificial Sequence: Synthetic oligonucleotide
  Antisense strand to SEQ ID NO: 941840
gaguuuacucgcaaggaua

SEQ ID NO: 941842 - RNA, 19 nt, Artificial Sequence
  Description of Artificial Sequence: Synthetic oligonucleotide
  Sense strand starting at position 1005 of SEQ ID NO: 913625
cugagugucucaucauaug

SEQ ID NO: 941843 - RNA, 19 nt, Artificial Sequence
  Description of Artificial Sequence: Synthetic oligonucleotide
  Antisense strand to SEQ ID NO: 941842
cauaugaugagacacucag

SEQ ID NO: 941844 - RNA, 19 nt, Artificial Sequence
  Description of Artificial Sequence: Synthetic oligonucleotide
  Sense strand starting at position 915 of SEQ ID NO: 913625
ccuugugcuauauacggau

SEQ ID NO: 941845 - RNA, 19 nt, Artificial Sequence
  Description of Artificial Sequence: Synthetic oligonucleotide
  Antisense strand to SEQ ID NO: 941844
auccguauauagcacaagg

SEQ ID NO: 941846 - RNA, 19 nt, Artificial Sequence
  Description of Artificial Sequence: Synthetic oligonucleotide
  Sense strand starting at position 3169 of SEQ ID NO: 913626
gggaaauauuguucuaaau

SEQ ID NO: 941847 - RNA, 19 nt, Artificial Sequence
  Description of Artificial Sequence: Synthetic oligonucleotide
  Antisense strand to SEQ ID NO: 941846
auuuagaacaauauuuccc

SEQ ID NO: 941848 - RNA, 19 nt, Artificial Sequence
  Description of Artificial Sequence: Synthetic oligonucleotide
  Sense strand starting at position 862 of SEQ ID NO: 913626
gcauacacugaugaucauu

SEQ ID NO: 941849 - RNA, 19 nt, Artificial Sequence
  Description of Artificial Sequence: Synthetic oligonucleotide
  Antisense strand to SEQ ID NO: 941848
aaugaucaucaguguaugc

SEQ ID NO: 941850 - RNA, 19 nt, Artificial Sequence
  Description of Artificial Sequence: Synthetic oligonucleotide
  Sense strand starting at position 3510 of SEQ ID NO: 913626
ccauuugacuugguugcua

SEQ ID NO: 941851 - RNA, 19 nt, Artificial Sequence
  Description of Artificial Sequence: Synthetic oligonucleotide
  Antisense strand to SEQ ID NO: 941850
uagcaaccaagucaaaugg

SEQ ID NO: 941852 - RNA, 19 nt, Artificial Sequence
  Description of Artificial Sequence: Synthetic oligonucleotide
  Sense strand starting at position 1965 of SEQ ID NO: 913626
uguccauccugggcaauuu

SEQ ID NO: 941853 - RNA, 19 nt, Artificial Sequence
  Description of Artificial Sequence: Synthetic oligonucleotide
  Antisense strand to SEQ ID NO: 941852
aaauugcccaggauggaca

SEQ ID NO: 941854 - RNA, 19 nt, Artificial Sequence
  Description of Artificial Sequence: Synthetic oligonucleotide
  Sense strand starting at position 3059 of SEQ ID NO: 913626
aguuuaugccacuaagaag

SEQ ID NO: 941855 - RNA, 19 nt, Artificial Sequence
  Description of Artificial Sequence: Synthetic oligonucleotide
  Antisense strand to SEQ ID NO: 941854
cuucuuaguggcauaaacu

SEQ ID NO: 941856 - RNA, 19 nt, Artificial Sequence
  Description of Artificial Sequence: Synthetic oligonucleotide
  Sense strand starting at position 3469 of SEQ ID NO: 913626
ccagauauuccuggagacc

SEQ ID NO: 941857 - RNA, 19 nt, Artificial Sequence
  Description of Artificial Sequence: Synthetic oligonucleotide
  Antisense strand to SEQ ID NO: 941856
ggucuccaggaauaucugg

SEQ ID NO: 941858 - RNA, 19 nt, Artificial Sequence
  Description of Artificial Sequence: Synthetic oligonucleotide
  Sense strand starting at position 535 of SEQ ID NO: 913626
aagcuacuuggcuaggaaa

SEQ ID NO: 941859 - RNA, 19 nt, Artificial Sequence
  Description of Artificial Sequence: Synthetic oligonucleotide
  Antisense strand to SEQ ID NO: 941858
uuuccuagccaaguagcuu

SEQ ID NO: 941860 - RNA, 19 nt, Artificial Sequence
  Description of Artificial Sequence: Synthetic oligonucleotide
  Sense strand starting at position 3179 of SEQ ID NO: 913626
guucuaaauggacagucau

SEQ ID NO: 941861 - RNA, 19 nt, Artificial Sequence
  Description of Artificial Sequence: Synthetic oligonucleotide
  Antisense strand to SEQ ID NO: 941860
augacuguccauuuagaac

SEQ ID NO: 941862 - RNA, 19 nt, Artificial Sequence
  Description of Artificial Sequence: Synthetic oligonucleotide
  Sense strand starting at position 1067 of SEQ ID NO: 913626
guuauugagugagccauuu

SEQ ID NO: 941863 - RNA, 19 nt, Artificial Sequence
  Description of Artificial Sequence: Synthetic oligonucleotide
  Antisense strand to SEQ ID NO: 941862
aaauggcucacucaauaac

SEQ ID NO: 941864 - RNA, 19 nt, Artificial Sequence
  Description of Artificial Sequence: Synthetic oligonucleotide
  Sense strand starting at position 2421 of SEQ ID NO: 913626
ggaaucuucccggaaucuu

SEQ ID NO: 941865 - RNA, 19 nt, Artificial Sequence
  Description of Artificial Sequence: Synthetic oligonucleotide
  Antisense strand to SEQ ID NO: 941864
aagauuccgggaagauucc

SEQ ID NO: 941866 - RNA, 19 nt, Artificial Sequence
  Description of Artificial Sequence: Synthetic oligonucleotide
  Sense strand starting at position 2164 of SEQ ID NO: 913626
gccauaauagcgucagccu

SEQ ID NO: 941867 - RNA, 19 nt, Artificial Sequence
  Description of Artificial Sequence: Synthetic oligonucleotide
  Antisense strand to SEQ ID NO: 941866
aggcugacgcuauuauggc

SEQ ID NO: 941868 - RNA, 19 nt, Artificial Sequence
  Description of Artificial Sequence: Synthetic oligonucleotide
  Sense strand starting at position 2410 of SEQ ID NO: 913626
gggaucuuuccggaaucuu

SEQ ID NO: 941869 - RNA, 19 nt, Artificial Sequence
  Description of Artificial Sequence: Synthetic oligonucleotide
  Antisense strand to SEQ ID NO: 941868
aagauuccggaaagauccc

SEQ ID NO: 941870 - RNA, 19 nt, Artificial Sequence
  Description of Artificial Sequence: Synthetic oligonucleotide
  Sense strand starting at position 235 of SEQ ID NO: 913626
uuugcugugacagaggaua

SEQ ID NO: 941871 - RNA, 19 nt, Artificial Sequence
  Description of Artificial Sequence: Synthetic oligonucleotide
  Antisense strand to SEQ ID NO: 941870
uauccucugucacagcaaa

SEQ ID NO: 941872 - RNA, 19 nt, Artificial Sequence
  Description of Artificial Sequence: Synthetic oligonucleotide
  Sense strand starting at position 1280 of SEQ ID NO: 913626
ugaaacauucgccacauga

SEQ ID NO: 941873 - RNA, 19 nt, Artificial Sequence
  Description of Artificial Sequence: Synthetic oligonucleotide
  Antisense strand to SEQ ID NO: 941872
ucauguggcgaauguuuca

SEQ ID NO: 941874 - RNA, 19 nt, Artificial Sequence
  Description of Artificial Sequence: Synthetic oligonucleotide
  Sense strand starting at position 2094 of SEQ ID NO: 913626
gugccaagucaauagacaa

SEQ ID NO: 941875 - RNA, 19 nt, Artificial Sequence
  Description of Artificial Sequence: Synthetic oligonucleotide
  Antisense strand to SEQ ID NO: 941874
uugucuauugacuuggcac

SEQ ID NO: 941876 - RNA, 19 nt, Artificial Sequence
  Description of Artificial Sequence: Synthetic oligonucleotide
  Sense strand starting at position 1855 of SEQ ID NO: 913626
uuccaauugcccgaagaga

SEQ ID NO: 941877 - RNA, 19 nt, Artificial Sequence
  Description of Artificial Sequence: Synthetic oligonucleotide
  Antisense strand to SEQ ID NO: 941876
ucucuucgggcaauuggaa

SEQ ID NO: 941878 - RNA, 19 nt, Artificial Sequence
  Description of Artificial Sequence: Synthetic oligonucleotide
  Sense strand starting at position 2740 of SEQ ID NO: 913626
uuaauaugugaauggugaa

SEQ ID NO: 941879 - RNA, 19 nt, Artificial Sequence
  Description of Artificial Sequence: Synthetic oligonucleotide
  Antisense strand to SEQ ID NO: 941878
uucaccauucacauauuaa

SEQ ID NO: 941880 - RNA, 19 nt, Artificial Sequence
  Description of Artificial Sequence: Synthetic oligonucleotide
  Sense strand starting at position 3931 of SEQ ID NO: 913626
acaguagacuuucugauua

SEQ ID NO: 941881 - RNA, 19 nt, Artificial Sequence
  Description of Artificial Sequence: Synthetic oligonucleotide
  Antisense strand to SEQ ID NO: 941880
uaaucagaaagucuacugu

SEQ ID NO: 941882 - RNA, 19 nt, Artificial Sequence
  Description of Artificial Sequence: Synthetic oligonucleotide
  Sense strand starting at position 2139 of SEQ ID NO: 913626
aagauaauguagccugaua

SEQ ID NO: 941883 - RNA, 19 nt, Artificial Sequence
  Description of Artificial Sequence: Synthetic oligonucleotide
  Antisense strand to SEQ ID NO: 941882
uaucaggcuacauuaucuu

SEQ ID NO: 941884 - RNA, 19 nt, Artificial Sequence
  Description of Artificial Sequence: Synthetic oligonucleotide
  Sense strand starting at position 2973 of SEQ ID NO: 913626
acaggugguaguuauuaua

SEQ ID NO: 941885 - RNA, 19 nt, Artificial Sequence
  Description of Artificial Sequence: Synthetic oligonucleotide
  Antisense strand to SEQ ID NO: 941884
uauaauaacuaccaccugu

SEQ ID NO: 941886 - RNA, 19 nt, Artificial Sequence
  Description of Artificial Sequence: Synthetic oligonucleotide
  Sense strand starting at position 2639 of SEQ ID NO: 913626
agguauuauguacauguga

SEQ ID NO: 941887 - RNA, 19 nt, Artificial Sequence
  Description of Artificial Sequence: Synthetic oligonucleotide
  Antisense strand to SEQ ID NO: 941886
ucacauguacauaauaccu

SEQ ID NO: 941888 - RNA, 19 nt, Artificial Sequence
  Description of Artificial Sequence: Synthetic oligonucleotide
  Sense strand starting at position 2270 of SEQ ID NO: 913626
ccaguuguccaucacaaau

SEQ ID NO: 941889 - RNA, 19 nt, Artificial Sequence
  Description of Artificial Sequence: Synthetic oligonucleotide
  Antisense strand to SEQ ID NO: 941888
auuugugauggacaacugg

SEQ ID NO: 941890 - RNA, 19 nt, Artificial Sequence
  Description of Artificial Sequence: Synthetic oligonucleotide
  Sense strand starting at position 3154 of SEQ ID NO: 913626
auguaauggccauacggga

SEQ ID NO: 941891 - RNA, 19 nt, Artificial Sequence
  Description of Artificial Sequence: Synthetic oligonucleotide
  Antisense strand to SEQ ID NO: 941890
ucccguauggccauuacau

SEQ ID NO: 941892 - RNA, 19 nt, Artificial Sequence
  Description of Artificial Sequence: Synthetic oligonucleotide
  Sense strand starting at position 628 of SEQ ID NO: 913626
cugggauuaccgggaacuu

SEQ ID NO: 941893 - RNA, 19 nt, Artificial Sequence
  Description of Artificial Sequence: Synthetic oligonucleotide
  Antisense strand to SEQ ID NO: 941892
aaguucccgguaaucccag

SEQ ID NO: 941894 - RNA, 19 nt, Artificial Sequence
  Description of Artificial Sequence: Synthetic oligonucleotide
  Sense strand starting at position 2500 of SEQ ID NO: 913626
auaaauaggucuuugguaa

SEQ ID NO: 941895 - RNA, 19 nt, Artificial Sequence
  Description of Artificial Sequence: Synthetic oligonucleotide
  Antisense strand to SEQ ID NO: 941894
uuaccaaagaccuauuuau

SEQ ID NO: 941896 - RNA, 19 nt, Artificial Sequence
  Description of Artificial Sequence: Synthetic oligonucleotide
  Sense strand starting at position 3168 of SEQ ID NO: 913626
cgggaaauauuguucuaaa

SEQ ID NO: 941897 - RNA, 19 nt, Artificial Sequence
  Description of Artificial Sequence: Synthetic oligonucleotide
  Antisense strand to SEQ ID NO: 941896
uuuagaacaauauuucccg

SEQ ID NO: 941898 - RNA, 19 nt, Artificial Sequence
  Description of Artificial Sequence: Synthetic oligonucleotide
  Sense strand starting at position 3334 of SEQ ID NO: 913626
cgugcuauccaagcuguuu

SEQ ID NO: 941899 - RNA, 19 nt, Artificial Sequence
  Description of Artificial Sequence: Synthetic oligonucleotide
  Antisense strand to SEQ ID NO: 941898
aaacagcuuggauagcacg

SEQ ID NO: 941900 - RNA, 19 nt, Artificial Sequence
  Description of Artificial Sequence: Synthetic oligonucleotide
  Sense strand starting at position 2637 of SEQ ID NO: 913626
ggagguauuauguacaugu

SEQ ID NO: 941901 - RNA, 19 nt, Artificial Sequence
  Description of Artificial Sequence: Synthetic oligonucleotide
  Antisense strand to SEQ ID NO: 941900
acauguacauaauaccucc

SEQ ID NO: 941902 - RNA, 19 nt, Artificial Sequence
  Description of Artificial Sequence: Synthetic oligonucleotide
  Sense strand starting at position 1831 of SEQ ID NO: 913626
cuccacuuugcuuauagga

SEQ ID NO: 941903 - RNA, 19 nt, Artificial Sequence
  Description of Artificial Sequence: Synthetic oligonucleotide
  Antisense strand to SEQ ID NO: 941902
uccuauaagcaaaguggag

SEQ ID NO: 941904 - RNA, 19 nt, Artificial Sequence
  Description of Artificial Sequence: Synthetic oligonucleotide
  Sense strand starting at position 1985 of SEQ ID NO: 913626
gcgcucuuccuucugugau

SEQ ID NO: 941905 - RNA, 19 nt, Artificial Sequence
  Description of Artificial Sequence: Synthetic oligonucleotide
  Antisense strand to SEQ ID NO: 941904
aucacagaaggaagagcgc

SEQ ID NO: 941906 - RNA, 19 nt, Artificial Sequence
  Description of Artificial Sequence: Synthetic oligonucleotide
  Sense strand starting at position 858 of SEQ ID NO: 913626
cuaggcauacacugaugau

SEQ ID NO: 941907 - RNA, 19 nt, Artificial Sequence
  Description of Artificial Sequence: Synthetic oligonucleotide
  Antisense strand to SEQ ID NO: 941906
aucaucaguguaugccuag

SEQ ID NO: 941908 - RNA, 19 nt, Artificial Sequence
  Description of Artificial Sequence: Synthetic oligonucleotide
  Sense strand starting at position 396 of SEQ ID NO: 913626
uaaggaggcuucuuagauu

SEQ ID NO: 941909 - RNA, 19 nt, Artificial Sequence
  Description of Artificial Sequence: Synthetic oligonucleotide
  Antisense strand to SEQ ID NO: 941908
aaucuaagaagccuccuua

SEQ ID NO: 941910 - RNA, 19 nt, Artificial Sequence
  Description of Artificial Sequence: Synthetic oligonucleotide
  Sense strand starting at position 2659 of SEQ ID NO: 913626
guauucuaccuauauggua

SEQ ID NO: 941911 - RNA, 19 nt, Artificial Sequence
  Description of Artificial Sequence: Synthetic oligonucleotide
  Antisense strand to SEQ ID NO: 941910
uaccauauagguagaauac

SEQ ID NO: 941912 - RNA, 19 nt, Artificial Sequence
  Description of Artificial Sequence: Synthetic oligonucleotide
  Sense strand starting at position 3923 of SEQ ID NO: 913626
cgcuaagaacaguagacuu

SEQ ID NO: 941913 - RNA, 19 nt, Artificial Sequence
  Description of Artificial Sequence: Synthetic oligonucleotide
  Antisense strand to SEQ ID NO: 941912
aagucuacuguucuuagcg

SEQ ID NO: 941914 - RNA, 19 nt, Artificial Sequence
  Description of Artificial Sequence: Synthetic oligonucleotide
  Sense strand starting at position 3224 of SEQ ID NO: 913626
gcuuuagaaugaguggaua

SEQ ID NO: 941915 - RNA, 19 nt, Artificial Sequence
  Description of Artificial Sequence: Synthetic oligonucleotide
  Antisense strand to SEQ ID NO: 941914
uauccacucauucuaaagc

SEQ ID NO: 941916 - RNA, 19 nt, Artificial Sequence
  Description of Artificial Sequence: Synthetic oligonucleotide
  Sense strand starting at position 2648 of SEQ ID NO: 913626
guacaugugaaguauucua

SEQ ID NO: 941917 - RNA, 19 nt, Artificial Sequence
  Description of Artificial Sequence: Synthetic oligonucleotide
  Antisense strand to SEQ ID NO: 941916
uagaauacuucacauguac

SEQ ID NO: 941918 - RNA, 19 nt, Artificial Sequence
  Description of Artificial Sequence: Synthetic oligonucleotide
  Sense strand starting at position 3045 of SEQ ID NO: 913626
augugacuaaggcaaguuu

SEQ ID NO: 941919 - RNA, 19 nt, Artificial Sequence
  Description of Artificial Sequence: Synthetic oligonucleotide
  Antisense strand to SEQ ID NO: 941918
aaacuugccuuagucacau

SEQ ID NO: 941920 - RNA, 19 nt, Artificial Sequence
  Description of Artificial Sequence: Synthetic oligonucleotide
  Sense strand starting at position 2353 of SEQ ID NO: 913626
aucuuucgccuggagagau

SEQ ID NO: 941921 - RNA, 19 nt, Artificial Sequence
  Description of Artificial Sequence: Synthetic oligonucleotide
  Antisense strand to SEQ ID NO: 941920
aucucuccaggcgaaagau

SEQ ID NO: 941922 - RNA, 19 nt, Artificial Sequence
  Description of Artificial Sequence: Synthetic oligonucleotide
  Sense strand starting at position 2387 of SEQ ID NO: 913626
uucugaaucuuucuggacu

SEQ ID NO: 941923 - RNA, 19 nt, Artificial Sequence
  Description of Artificial Sequence: Synthetic oligonucleotide
  Antisense strand to SEQ ID NO: 941922
aguccagaaagauucagaa

SEQ ID NO: 941924 - RNA, 19 nt, Artificial Sequence
  Description of Artificial Sequence: Synthetic oligonucleotide
  Sense strand starting at position 3568 of SEQ ID NO: 913626
caagcacacguauaguaaa

SEQ ID NO: 941925 - RNA, 19 nt, Artificial Sequence
  Description of Artificial Sequence: Synthetic oligonucleotide
  Antisense strand to SEQ ID NO: 941924
uuuacuauacgugugcuug

SEQ ID NO: 941926 - RNA, 19 nt, Artificial Sequence
  Description of Artificial Sequence: Synthetic oligonucleotide
  Sense strand starting at position 633 of SEQ ID NO: 913627
gucauaaauuaagcaaaga

SEQ ID NO: 941927 - RNA, 19 nt, Artificial Sequence
  Description of Artificial Sequence: Synthetic oligonucleotide
  Antisense strand to SEQ ID NO: 941926
ucuuugcuuaauuuaugac

SEQ ID NO: 941928 - RNA, 19 nt, Artificial Sequence
  Description of Artificial Sequence: Synthetic oligonucleotide
  Sense strand starting at position 912 of SEQ ID NO: 913627
caaguuuaagaaugugaag

SEQ ID NO: 941929 - RNA, 19 nt, Artificial Sequence
  Description of Artificial Sequence: Synthetic oligonucleotide
  Antisense strand to SEQ ID NO: 941928
cuucacauucuuaaacuug

SEQ ID NO: 941930 - RNA, 19 nt, Artificial Sequence
  Description of Artificial Sequence: Synthetic oligonucleotide
  Sense strand starting at position 3282 of SEQ ID NO: 913627
gcugaauuccaugaacuuu

SEQ ID NO: 941931 - RNA, 19 nt, Artificial Sequence
  Description of Artificial Sequence: Synthetic oligonucleotide
  Antisense strand to SEQ ID NO: 941930
aaaguucauggaauucagc

SEQ ID NO: 941932 - RNA, 19 nt, Artificial Sequence
  Description of Artificial Sequence: Synthetic oligonucleotide
  Sense strand starting at position 3957 of SEQ ID NO: 913627
ggcguuauugcacuguauc

SEQ ID NO: 941933 - RNA, 19 nt, Artificial Sequence
  Description of Artificial Sequence: Synthetic oligonucleotide
  Antisense strand to SEQ ID NO: 941932
gauacagugcaauaacgcc

SEQ ID NO: 941934 - RNA, 19 nt, Artificial Sequence
  Description of Artificial Sequence: Synthetic oligonucleotide
  Sense strand starting at position 3016 of SEQ ID NO: 913627
cugucuuggcaacagauga

SEQ ID NO: 941935 - RNA, 19 nt, Artificial Sequence
  Description of Artificial Sequence: Synthetic oligonucleotide
  Antisense strand to SEQ ID NO: 941934
ucaucuguugccaagacag

SEQ ID NO: 941936 - RNA, 19 nt, Artificial Sequence
  Description of Artificial Sequence: Synthetic oligonucleotide
  Sense strand starting at position 2941 of SEQ ID NO: 913627
gacugaaacaguuaucggu

SEQ ID NO: 941937 - RNA, 19 nt, Artificial Sequence
  Description of Artificial Sequence: Synthetic oligonucleotide
  Antisense strand to SEQ ID NO: 941936
accgauaacuguuucaguc

SEQ ID NO: 941938 - RNA, 19 nt, Artificial Sequence
  Description of Artificial Sequence: Synthetic oligonucleotide
  Sense strand starting at position 127 of SEQ ID NO: 913627
gugcaaggucuuuaagaag

SEQ ID NO: 941939 - RNA, 19 nt, Artificial Sequence
  Description of Artificial Sequence: Synthetic oligonucleotide
  Antisense strand to SEQ ID NO: 941938
cuucuuaaagaccuugcac

SEQ ID NO: 941940 - RNA, 19 nt, Artificial Sequence
  Description of Artificial Sequence: Synthetic oligonucleotide
  Sense strand starting at position 3873 of SEQ ID NO: 913627
gaaucagucuucucuggaa

SEQ ID NO: 941941 - RNA, 19 nt, Artificial Sequence
  Description of Artificial Sequence: Synthetic oligonucleotide
  Antisense strand to SEQ ID NO: 941940
uuccagagaagacugauuc

SEQ ID NO: 941942 - RNA, 19 nt, Artificial Sequence
  Description of Artificial Sequence: Synthetic oligonucleotide
  Sense strand starting at position 479 of SEQ ID NO: 913627
auguaaguggcauaccaau

SEQ ID NO: 941943 - RNA, 19 nt, Artificial Sequence
  Description of Artificial Sequence: Synthetic oligonucleotide
  Antisense strand to SEQ ID NO: 941942
auugguaugccacuuacau

SEQ ID NO: 941944 - RNA, 19 nt, Artificial Sequence
  Description of Artificial Sequence: Synthetic oligonucleotide
  Sense strand starting at position 2639 of SEQ ID NO: 913627
ccaguuccucuuggaagaa

SEQ ID NO: 941945 - RNA, 19 nt, Artificial Sequence
  Description of Artificial Sequence: Synthetic oligonucleotide
  Antisense strand to SEQ ID NO: 941944
uucuuccaagaggaacugg

SEQ ID NO: 941946 - RNA, 19 nt, Artificial Sequence
  Description of Artificial Sequence: Synthetic oligonucleotide
  Sense strand starting at position 3099 of SEQ ID NO: 913627
agucacaucaguuacggau

SEQ ID NO: 941947 - RNA, 19 nt, Artificial Sequence
  Description of Artificial Sequence: Synthetic oligonucleotide
  Antisense strand to SEQ ID NO: 941946
auccguaacugaugugacu

SEQ ID NO: 941948 - RNA, 19 nt, Artificial Sequence
  Description of Artificial Sequence: Synthetic oligonucleotide
  Sense strand starting at position 2949 of SEQ ID NO: 913627
caguuaucgguuucagcgu

SEQ ID NO: 941949 - RNA, 19 nt, Artificial Sequence
  Description of Artificial Sequence: Synthetic oligonucleotide
  Antisense strand to SEQ ID NO: 941948
acgcugaaaccgauaacug

SEQ ID NO: 941950 - RNA, 19 nt, Artificial Sequence
  Description of Artificial Sequence: Synthetic oligonucleotide
  Sense strand starting at position 3754 of SEQ ID NO: 913627
cugcucugugaugaagacu

SEQ ID NO: 941951 - RNA, 19 nt, Artificial Sequence
  Description of Artificial Sequence: Synthetic oligonucleotide
  Antisense strand to SEQ ID NO: 941950
agucuucaucacagagcag

SEQ ID NO: 941952 - RNA, 19 nt, Artificial Sequence
  Description of Artificial Sequence: Synthetic oligonucleotide
  Sense strand starting at position 32 of SEQ ID NO: 913627
ccaaaucuguggcuaaaga

SEQ ID NO: 941953 - RNA, 19 nt, Artificial Sequence
  Description of Artificial Sequence: Synthetic oligonucleotide
  Antisense strand to SEQ ID NO: 941952
ucuuuagccacagauuugg

SEQ ID NO: 941954 - RNA, 19 nt, Artificial Sequence
  Description of Artificial Sequence: Synthetic oligonucleotide
  Sense strand starting at position 3281 of SEQ ID NO: 913627
agcugaauuccaugaacuu

SEQ ID NO: 941955 - RNA, 19 nt, Artificial Sequence
  Description of Artificial Sequence: Synthetic oligonucleotide
  Antisense strand to SEQ ID NO: 941954
aaguucauggaauucagcu

SEQ ID NO: 941956 - RNA, 19 nt, Artificial Sequence
  Description of Artificial Sequence: Synthetic oligonucleotide
  Sense strand starting at position 3875 of SEQ ID NO: 913627
aucagucuucucuggaaac

SEQ ID NO: 941957 - RNA, 19 nt, Artificial Sequence
  Description of Artificial Sequence: Synthetic oligonucleotide
  Antisense strand to SEQ ID NO: 941956
guuuccagagaagacugau

SEQ ID NO: 941958 - RNA, 19 nt, Artificial Sequence
  Description of Artificial Sequence: Synthetic oligonucleotide
  Sense strand starting at position 3071 of SEQ ID NO: 913627
gacaguuugggucauaguc

SEQ ID NO: 941959 - RNA, 19 nt, Artificial Sequence
  Description of Artificial Sequence: Synthetic oligonucleotide
  Antisense strand to SEQ ID NO: 941958
gacuaugacccaaacuguc

SEQ ID NO: 941960 - RNA, 19 nt, Artificial Sequence
  Description of Artificial Sequence: Synthetic oligonucleotide
  Sense strand starting at position 2886 of SEQ ID NO: 913627
acccuaaggcucugagauu

SEQ ID NO: 941961 - RNA, 19 nt, Artificial Sequence
  Description of Artificial Sequence: Synthetic oligonucleotide
  Antisense strand to SEQ ID NO: 941960
aaucucagagccuuagggu

SEQ ID NO: 941962 - RNA, 19 nt, Artificial Sequence
  Description of Artificial Sequence: Synthetic oligonucleotide
  Sense strand starting at position 468 of SEQ ID NO: 913627
auuaaucuuggauguaagu

SEQ ID NO: 941963 - RNA, 19 nt, Artificial Sequence
  Description of Artificial Sequence: Synthetic oligonucleotide
  Antisense strand to SEQ ID NO: 941962
acuuacauccaagauuaau

SEQ ID NO: 941964 - RNA, 19 nt, Artificial Sequence
  Description of Artificial Sequence: Synthetic oligonucleotide
  Sense strand starting at position 485 of SEQ ID NO: 913627
guggcauaccaauauugua

SEQ ID NO: 941965 - RNA, 19 nt, Artificial Sequence
  Description of Artificial Sequence: Synthetic oligonucleotide
  Antisense strand to SEQ ID NO: 941964
uacaauauugguaugccac

SEQ ID NO: 941966 - RNA, 19 nt, Artificial Sequence
  Description of Artificial Sequence: Synthetic oligonucleotide
  Sense strand starting at position 914 of SEQ ID NO: 913627
aguuuaagaaugugaaguc

SEQ ID NO: 941967 - RNA, 19 nt, Artificial Sequence
  Description of Artificial Sequence: Synthetic oligonucleotide
  Antisense strand to SEQ ID NO: 941966
gacuucacauucuuaaacu

SEQ ID NO: 941968 - RNA, 19 nt, Artificial Sequence
  Description of Artificial Sequence: Synthetic oligonucleotide
  Sense strand starting at position 416 of SEQ ID NO: 913627
ggugguuauaugcaaaccu

SEQ ID NO: 941969 - RNA, 19 nt, Artificial Sequence
  Description of Artificial Sequence: Synthetic oligonucleotide
  Antisense strand to SEQ ID NO: 941968
agguuugcauauaaccacc

SEQ ID NO: 941970 - RNA, 19 nt, Artificial Sequence
  Description of Artificial Sequence: Synthetic oligonucleotide
  Sense strand starting at position 676 of SEQ ID NO: 913627
ggguggugagcauaugagu

SEQ ID NO: 941971 - RNA, 19 nt, Artificial Sequence
  Description of Artificial Sequence: Synthetic oligonucleotide
  Antisense strand to SEQ ID NO: 941970
acucauaugcucaccaccc

SEQ ID NO: 941972 - RNA, 19 nt, Artificial Sequence
  Description of Artificial Sequence: Synthetic oligonucleotide
  Sense strand starting at position 455 of SEQ ID NO: 913627
acaacuuguccguauuaau

SEQ ID NO: 941973 - RNA, 19 nt, Artificial Sequence
  Description of Artificial Sequence: Synthetic oligonucleotide
  Antisense strand to SEQ ID NO: 941972
auuaauacggacaaguugu

SEQ ID NO: 941974 - RNA, 19 nt, Artificial Sequence
  Description of Artificial Sequence: Synthetic oligonucleotide
  Sense strand starting at position 126 of SEQ ID NO: 913627
agugcaaggucuuuaagaa

SEQ ID NO: 941975 - RNA, 19 nt, Artificial Sequence
  Description of Artificial Sequence: Synthetic oligonucleotide
  Antisense strand to SEQ ID NO: 941974
uucuuaaagaccuugcacu

SEQ ID NO: 941976 - RNA, 19 nt, Artificial Sequence
  Description of Artificial Sequence: Synthetic oligonucleotide
  Sense strand starting at position 2227 of SEQ ID NO: 913627
cccggaugaccgggaaagu

SEQ ID NO: 941977 - RNA, 19 nt, Artificial Sequence
  Description of Artificial Sequence: Synthetic oligonucleotide
  Antisense strand to SEQ ID NO: 941976
acuuucccggucauccggg

SEQ ID NO: 941978 - RNA, 19 nt, Artificial Sequence
  Description of Artificial Sequence: Synthetic oligonucleotide
  Sense strand starting at position 3786 of SEQ ID NO: 913627
aauauauggccuugucaug

SEQ ID NO: 941979 - RNA, 19 nt, Artificial Sequence
  Description of Artificial Sequence: Synthetic oligonucleotide
  Antisense strand to SEQ ID NO: 941978
caugacaaggccauauauu

SEQ ID NO: 941980 - RNA, 19 nt, Artificial Sequence
  Description of Artificial Sequence: Synthetic oligonucleotide
  Sense strand starting at position 366 of SEQ ID NO: 913627
aguggaaauuuacauuguu

SEQ ID NO: 941981 - RNA, 19 nt, Artificial Sequence
  Description of Artificial Sequence: Synthetic oligonucleotide
  Antisense strand to SEQ ID NO: 941980
aacaauguaaauuuccacu

SEQ ID NO: 941982 - RNA, 19 nt, Artificial Sequence
  Description of Artificial Sequence: Synthetic oligonucleotide
  Sense strand starting at position 474 of SEQ ID NO: 913627
cuuggauguaaguggcaua

SEQ ID NO: 941983 - RNA, 19 nt, Artificial Sequence
  Description of Artificial Sequence: Synthetic oligonucleotide
  Antisense strand to SEQ ID NO: 941982
uaugccacuuacauccaag

SEQ ID NO: 941984 - RNA, 19 nt, Artificial Sequence
  Description of Artificial Sequence: Synthetic oligonucleotide
  Sense strand starting at position 2943 of SEQ ID NO: 913627
cugaaacaguuaucgguuu

SEQ ID NO: 941985 - RNA, 19 nt, Artificial Sequence
  Description of Artificial Sequence: Synthetic oligonucleotide
  Antisense strand to SEQ ID NO: 941984
aaaccgauaacuguuucag

SEQ ID NO: 941986 - RNA, 19 nt, Artificial Sequence
  Description of Artificial Sequence: Synthetic oligonucleotide
  Sense strand starting at position 465 of SEQ ID NO: 913627
cguauuaaucuuggaugua

SEQ ID NO: 941987 - RNA, 19 nt, Artificial Sequence
  Description of Artificial Sequence: Synthetic oligonucleotide
  Antisense strand to SEQ ID NO: 941986
uacauccaagauuaauacg

SEQ ID NO: 941988 - RNA, 19 nt, Artificial Sequence
  Description of Artificial Sequence: Synthetic oligonucleotide
  Sense strand starting at position 3605 of SEQ ID NO: 913627
gugaacuuuccaggugcaa

SEQ ID NO: 941989 - RNA, 19 nt, Artificial Sequence
  Description of Artificial Sequence: Synthetic oligonucleotide
  Antisense strand to SEQ ID NO: 941988
uugcaccuggaaaguucac

SEQ ID NO: 941990 - RNA, 19 nt, Artificial Sequence
  Description of Artificial Sequence: Synthetic oligonucleotide
  Sense strand starting at position 407 of SEQ ID NO: 913627
uucuguacaggugguuaua

SEQ ID NO: 941991 - RNA, 19 nt, Artificial Sequence
  Description of Artificial Sequence: Synthetic oligonucleotide
  Antisense strand to SEQ ID NO: 941990
uauaaccaccuguacagaa

SEQ ID NO: 941992 - RNA, 19 nt, Artificial Sequence
  Description of Artificial Sequence: Synthetic oligonucleotide
  Sense strand starting at position 1783 of SEQ ID NO: 913627
cgucuuuguguggaaagua

SEQ ID NO: 941993 - RNA, 19 nt, Artificial Sequence
  Description of Artificial Sequence: Synthetic oligonucleotide
  Antisense strand to SEQ ID NO: 941992
uacuuuccacacaaagacg

SEQ ID NO: 941994 - RNA, 19 nt, Artificial Sequence
  Description of Artificial Sequence: Synthetic oligonucleotide
  Sense strand starting at position 29 of SEQ ID NO: 913627
uggccaaaucuguggcuaa

SEQ ID NO: 941995 - RNA, 19 nt, Artificial Sequence
  Description of Artificial Sequence: Synthetic oligonucleotide
  Antisense strand to SEQ ID NO: 941994
uuagccacagauuuggcca

SEQ ID NO: 941996 - RNA, 19 nt, Artificial Sequence
  Description of Artificial Sequence: Synthetic oligonucleotide
  Sense strand starting at position 3306 of SEQ ID NO: 913627
ugguguuuccuaugauucu

SEQ ID NO: 941997 - RNA, 19 nt, Artificial Sequence
  Description of Artificial Sequence: Synthetic oligonucleotide
  Antisense strand to SEQ ID NO: 941996
agaaucauaggaaacacca

SEQ ID NO: 941998 - RNA, 19 nt, Artificial Sequence
  Description of Artificial Sequence: Synthetic oligonucleotide
  Sense strand starting at position 160 of SEQ ID NO: 913627
guuguacaaucacugcuau

SEQ ID NO: 941999 - RNA, 19 nt, Artificial Sequence
  Description of Artificial Sequence: Synthetic oligonucleotide
  Antisense strand to SEQ ID NO: 941998
auagcagugauuguacaac

SEQ ID NO: 942000 - RNA, 19 nt, Artificial Sequence
  Description of Artificial Sequence: Synthetic oligonucleotide
  Sense strand starting at position 533 of SEQ ID NO: 913627
ugauguggcuggucaguaa

SEQ ID NO: 942001 - RNA, 19 nt, Artificial Sequence
  Description of Artificial Sequence: Synthetic oligonucleotide
  Antisense strand to SEQ ID NO: 942000
uuacugaccagccacauca

SEQ ID NO: 942002 - RNA, 19 nt, Artificial Sequence
  Description of Artificial Sequence: Synthetic oligonucleotide
  Sense strand starting at position 681 of SEQ ID NO: 913627
gugagcauaugagugguuu

SEQ ID NO: 942003 - RNA, 19 nt, Artificial Sequence
  Description of Artificial Sequence: Synthetic oligonucleotide
  Antisense strand to SEQ ID NO: 942002
aaaccacucauaugcucac

SEQ ID NO: 942004 - RNA, 19 nt, Artificial Sequence
  Description of Artificial Sequence: Synthetic oligonucleotide
  Sense strand starting at position 2686 of SEQ ID NO: 913627
agacauuuguuguaauugu

SEQ ID NO: 942005 - RNA, 19 nt, Artificial Sequence
  Description of Artificial Sequence: Synthetic oligonucleotide
  Antisense strand to SEQ ID NO: 942004
acaauuacaacaaaugucu

SEQ ID NO: 942006 - RNA, 19 nt, Artificial Sequence
  Description of Artificial Sequence: Synthetic oligonucleotide
  Sense strand starting at position 2471 of SEQ ID NO: 913628
augaucacaucugugaaga

SEQ ID NO: 942007 - RNA, 19 nt, Artificial Sequence
  Description of Artificial Sequence: Synthetic oligonucleotide
  Antisense strand to SEQ ID NO: 942006
ucuucacagaugugaucau

SEQ ID NO: 942008 - RNA, 19 nt, Artificial Sequence
  Description of Artificial Sequence: Synthetic oligonucleotide
  Sense strand starting at position 656 of SEQ ID NO: 913628
uguuguggucauguguuca

SEQ ID NO: 942009 - RNA, 19 nt, Artificial Sequence
  Description of Artificial Sequence: Synthetic oligonucleotide
  Antisense strand to SEQ ID NO: 942008
ugaacacaugaccacaaca

SEQ ID NO: 942010 - RNA, 19 nt, Artificial Sequence
  Description of Artificial Sequence: Synthetic oligonucleotide
  Sense strand starting at position 3072 of SEQ ID NO: 913628
ccaccucaugaauggauua

SEQ ID NO: 942011 - RNA, 19 nt, Artificial Sequence
  Description of Artificial Sequence: Synthetic oligonucleotide
  Antisense strand to SEQ ID NO: 942010
uaauccauucaugaggugg

SEQ ID NO: 942012 - RNA, 19 nt, Artificial Sequence
  Description of Artificial Sequence: Synthetic oligonucleotide
  Sense strand starting at position 1224 of SEQ ID NO: 913628
cuuaauagagcauggauaa

SEQ ID NO: 942013 - RNA, 19 nt, Artificial Sequence
  Description of Artificial Sequence: Synthetic oligonucleotide
  Antisense strand to SEQ ID NO: 942012
uuauccaugcucuauuaag

SEQ ID NO: 942014 - RNA, 19 nt, Artificial Sequence
  Description of Artificial Sequence: Synthetic oligonucleotide
  Sense strand starting at position 1313 of SEQ ID NO: 913628
gaguuugacagacaugguu

SEQ ID NO: 942015 - RNA, 19 nt, Artificial Sequence
  Description of Artificial Sequence: Synthetic oligonucleotide
  Antisense strand to SEQ ID NO: 942014
aaccaugucugucaaacuc

SEQ ID NO: 942016 - RNA, 19 nt, Artificial Sequence
  Description of Artificial Sequence: Synthetic oligonucleotide
  Sense strand starting at position 3066 of SEQ ID NO: 913628
agggcuccaccucaugaau

SEQ ID NO: 942017 - RNA, 19 nt, Artificial Sequence
  Description of Artificial Sequence: Synthetic oligonucleotide
  Antisense strand to SEQ ID NO: 942016
auucaugagguggagcccu

SEQ ID NO: 942018 - RNA, 19 nt, Artificial Sequence
  Description of Artificial Sequence: Synthetic oligonucleotide
  Sense strand starting at position 2472 of SEQ ID NO: 913628
ugaucacaucugugaagag

SEQ ID NO: 942019 - RNA, 19 nt, Artificial Sequence
  Description of Artificial Sequence: Synthetic oligonucleotide
  Antisense strand to SEQ ID NO: 942018
cucuucacagaugugauca

SEQ ID NO: 942020 - RNA, 19 nt, Artificial Sequence
  Description of Artificial Sequence: Synthetic oligonucleotide
  Sense strand starting at position 3685 of SEQ ID NO: 913628
uccaaaugaucauugugga

SEQ ID NO: 942021 - RNA, 19 nt, Artificial Sequence
  Description of Artificial Sequence: Synthetic oligonucleotide
  Antisense strand to SEQ ID NO: 942020
uccacaaugaucauuugga

SEQ ID NO: 942022 - RNA, 19 nt, Artificial Sequence
  Description of Artificial Sequence: Synthetic oligonucleotide
  Sense strand starting at position 3686 of SEQ ID NO: 913628
ccaaaugaucauuguggau

SEQ ID NO: 942023 - RNA, 19 nt, Artificial Sequence
  Description of Artificial Sequence: Synthetic oligonucleotide
  Antisense strand to SEQ ID NO: 942022
auccacaaugaucauuugg

SEQ ID NO: 942024 - RNA, 19 nt, Artificial Sequence
  Description of Artificial Sequence: Synthetic oligonucleotide
  Sense strand starting at position 3812 of SEQ ID NO: 913628
uggugcucucaacaugaaa

SEQ ID NO: 942025 - RNA, 19 nt, Artificial Sequence
  Description of Artificial Sequence: Synthetic oligonucleotide
  Antisense strand to SEQ ID NO: 942024
uuucauguugagagcacca

SEQ ID NO: 942026 - RNA, 19 nt, Artificial Sequence
  Description of Artificial Sequence: Synthetic oligonucleotide
  Sense strand starting at position 1967 of SEQ ID NO: 913628
gaccucauccggcacagaa

SEQ ID NO: 942027 - RNA, 19 nt, Artificial Sequence
  Description of Artificial Sequence: Synthetic oligonucleotide
  Antisense strand to SEQ ID NO: 942026
uucugugccggaugagguc

SEQ ID NO: 942028 - RNA, 19 nt, Artificial Sequence
  Description of Artificial Sequence: Synthetic oligonucleotide
  Sense strand starting at position 2809 of SEQ ID NO: 913628
uggaauuaccauugcagag

SEQ ID NO: 942029 - RNA, 19 nt, Artificial Sequence
  Description of Artificial Sequence: Synthetic oligonucleotide
  Antisense strand to SEQ ID NO: 942028
cucugcaaugguaauucca

SEQ ID NO: 942030 - RNA, 19 nt, Artificial Sequence
  Description of Artificial Sequence: Synthetic oligonucleotide
  Sense strand starting at position 3904 of SEQ ID NO: 913628
ucaguaagaacaggguuua

SEQ ID NO: 942031 - RNA, 19 nt, Artificial Sequence
  Description of Artificial Sequence: Synthetic oligonucleotide
  Antisense strand to SEQ ID NO: 942030
uaaacccuguucuuacuga

SEQ ID NO: 942032 - RNA, 19 nt, Artificial Sequence
  Description of Artificial Sequence: Synthetic oligonucleotide
  Sense strand starting at position 2602 of SEQ ID NO: 913628
gguguauguagauauacau

SEQ ID NO: 942033 - RNA, 19 nt, Artificial Sequence
  Description of Artificial Sequence: Synthetic oligonucleotide
  Antisense strand to SEQ ID NO: 942032
auguauaucuacauacacc

SEQ ID NO: 942034 - RNA, 19 nt, Artificial Sequence
  Description of Artificial Sequence: Synthetic oligonucleotide
  Sense strand starting at position 113 of SEQ ID NO: 913628
ccaauaucuguguacacca

SEQ ID NO: 942035 - RNA, 19 nt, Artificial Sequence
  Description of Artificial Sequence: Synthetic oligonucleotide
  Antisense strand to SEQ ID NO: 942034
ugguguacacagauauugg

SEQ ID NO: 942036 - RNA, 19 nt, Artificial Sequence
  Description of Artificial Sequence: Synthetic oligonucleotide
  Sense strand starting at position 3409 of SEQ ID NO: 913628
gcaggacaugguggaauau

SEQ ID NO: 942037 - RNA, 19 nt, Artificial Sequence
  Description of Artificial Sequence: Synthetic oligonucleotide
  Antisense strand to SEQ ID NO: 942036
auauuccaccauguccugc

SEQ ID NO: 942038 - RNA, 19 nt, Artificial Sequence
  Description of Artificial Sequence: Synthetic oligonucleotide
  Sense strand starting at position 2697 of SEQ ID NO: 913628
ugaucucugggcugaagga

SEQ ID NO: 942039 - RNA, 19 nt, Artificial Sequence
  Description of Artificial Sequence: Synthetic oligonucleotide
  Antisense strand to SEQ ID NO: 942038
uccuucagcccagagauca

SEQ ID NO: 942040 - RNA, 19 nt, Artificial Sequence
  Description of Artificial Sequence: Synthetic oligonucleotide
  Sense strand starting at position 84 of SEQ ID NO: 913628
guuuaucuaggucaacauu

SEQ ID NO: 942041 - RNA, 19 nt, Artificial Sequence
  Description of Artificial Sequence: Synthetic oligonucleotide
  Antisense strand to SEQ ID NO: 942040
aauguugaccuagauaaac

SEQ ID NO: 942042 - RNA, 19 nt, Artificial Sequence
  Description of Artificial Sequence: Synthetic oligonucleotide
  Sense strand starting at position 2850 of SEQ ID NO: 913628
ugacaucuggcccacaagu

SEQ ID NO: 942043 - RNA, 19 nt, Artificial Sequence
  Description of Artificial Sequence: Synthetic oligonucleotide
  Antisense strand to SEQ ID NO: 942042
acuugugggccagauguca

SEQ ID NO: 942044 - RNA, 19 nt, Artificial Sequence
  Description of Artificial Sequence: Synthetic oligonucleotide
  Sense strand starting at position 2695 of SEQ ID NO: 913628
uaugaucucugggcugaag

SEQ ID NO: 942045 - RNA, 19 nt, Artificial Sequence
  Description of Artificial Sequence: Synthetic oligonucleotide
  Antisense strand to SEQ ID NO: 942044
cuucagcccagagaucaua

SEQ ID NO: 942046 - RNA, 19 nt, Artificial Sequence
  Description of Artificial Sequence: Synthetic oligonucleotide
  Sense strand starting at position 1326 of SEQ ID NO: 913628
augguuggcaucugaagaa

SEQ ID NO: 942047 - RNA, 19 nt, Artificial Sequence
  Description of Artificial Sequence: Synthetic oligonucleotide
  Antisense strand to SEQ ID NO: 942046
uucuucagaugccaaccau

SEQ ID NO: 942048 - RNA, 19 nt, Artificial Sequence
  Description of Artificial Sequence: Synthetic oligonucleotide
  Sense strand starting at position 1299 of SEQ ID NO: 913628
aggcgacucauccagaguu

SEQ ID NO: 942049 - RNA, 19 nt, Artificial Sequence
  Description of Artificial Sequence: Synthetic oligonucleotide
  Antisense strand to SEQ ID NO: 942048
aacucuggaugagucgccu

SEQ ID NO: 942050 - RNA, 19 nt, Artificial Sequence
  Description of Artificial Sequence: Synthetic oligonucleotide
  Sense strand starting at position 82 of SEQ ID NO: 913628
auguuuaucuaggucaaca

SEQ ID NO: 942051 - RNA, 19 nt, Artificial Sequence
  Description of Artificial Sequence: Synthetic oligonucleotide
  Antisense strand to SEQ ID NO: 942050
uguugaccuagauaaacau

SEQ ID NO: 942052 - RNA, 19 nt, Artificial Sequence
  Description of Artificial Sequence: Synthetic oligonucleotide
  Sense strand starting at position 2685 of SEQ ID NO: 913628
acuauaucuguaugaucuc

SEQ ID NO: 942053 - RNA, 19 nt, Artificial Sequence
  Description of Artificial Sequence: Synthetic oligonucleotide
  Antisense strand to SEQ ID NO: 942052
gagaucauacagauauagu

SEQ ID NO: 942054 - RNA, 19 nt, Artificial Sequence
  Description of Artificial Sequence: Synthetic oligonucleotide
  Sense strand starting at position 1611 of SEQ ID NO: 913628
ggcauucaagguggugaaa

SEQ ID NO: 942055 - RNA, 19 nt, Artificial Sequence
  Description of Artificial Sequence: Synthetic oligonucleotide
  Antisense strand to SEQ ID NO: 942054
uuucaccaccuugaaugcc

SEQ ID NO: 942056 - RNA, 19 nt, Artificial Sequence
  Description of Artificial Sequence: Synthetic oligonucleotide
  Sense strand starting at position 2848 of SEQ ID NO: 913628
ggugacaucuggcccacaa

SEQ ID NO: 942057 - RNA, 19 nt, Artificial Sequence
  Description of Artificial Sequence: Synthetic oligonucleotide
  Antisense strand to SEQ ID NO: 942056
uugugggccagaugucacc

SEQ ID NO: 942058 - RNA, 19 nt, Artificial Sequence
  Description of Artificial Sequence: Synthetic oligonucleotide
  Sense strand starting at position 2742 of SEQ ID NO: 913628
cuuccaguucuagauuguu

SEQ ID NO: 942059 - RNA, 19 nt, Artificial Sequence
  Description of Artificial Sequence: Synthetic oligonucleotide
  Antisense strand to SEQ ID NO: 942058
aacaaucuagaacuggaag

SEQ ID NO: 942060 - RNA, 19 nt, Artificial Sequence
  Description of Artificial Sequence: Synthetic oligonucleotide
  Sense strand starting at position 81 of SEQ ID NO: 913628
gauguuuaucuaggucaac

SEQ ID NO: 942061 - RNA, 19 nt, Artificial Sequence
  Description of Artificial Sequence: Synthetic oligonucleotide
  Antisense strand to SEQ ID NO: 942060
guugaccuagauaaacauc

SEQ ID NO: 942062 - RNA, 19 nt, Artificial Sequence
  Description of Artificial Sequence: Synthetic oligonucleotide
  Sense strand starting at position 1562 of SEQ ID NO: 913628
guuuauucuuaccucagau

SEQ ID NO: 942063 - RNA, 19 nt, Artificial Sequence
  Description of Artificial Sequence: Synthetic oligonucleotide
  Antisense strand to SEQ ID NO: 942062
aucugagguaagaauaaac

SEQ ID NO: 942064 - RNA, 19 nt, Artificial Sequence
  Description of Artificial Sequence: Synthetic oligonucleotide
  Sense strand starting at position 1561 of SEQ ID NO: 913628
uguuuauucuuaccucaga

SEQ ID NO: 942065 - RNA, 19 nt, Artificial Sequence
  Description of Artificial Sequence: Synthetic oligonucleotide
  Antisense strand to SEQ ID NO: 942064
ucugagguaagaauaaaca

SEQ ID NO: 942066 - RNA, 19 nt, Artificial Sequence
  Description of Artificial Sequence: Synthetic oligonucleotide
  Sense strand starting at position 1301 of SEQ ID NO: 913628
gcgacucauccagaguuug

SEQ ID NO: 942067 - RNA, 19 nt, Artificial Sequence
  Description of Artificial Sequence: Synthetic oligonucleotide
  Antisense strand to SEQ ID NO: 942066
caaacucuggaugagucgc

SEQ ID NO: 942068 - RNA, 19 nt, Artificial Sequence
  Description of Artificial Sequence: Synthetic oligonucleotide
  Sense strand starting at position 111 of SEQ ID NO: 913628
acccaauaucuguguacac

SEQ ID NO: 942069 - RNA, 19 nt, Artificial Sequence
  Description of Artificial Sequence: Synthetic oligonucleotide
  Antisense strand to SEQ ID NO: 942068
guguacacagauauugggu

SEQ ID NO: 942070 - RNA, 19 nt, Artificial Sequence
  Description of Artificial Sequence: Synthetic oligonucleotide
  Sense strand starting at position 1650 of SEQ ID NO: 913628
agaguuagcccaggaaguc

SEQ ID NO: 942071 - RNA, 19 nt, Artificial Sequence
  Description of Artificial Sequence: Synthetic oligonucleotide
  Antisense strand to SEQ ID NO: 942070
gacuuccugggcuaacucu

SEQ ID NO: 942072 - RNA, 19 nt, Artificial Sequence
  Description of Artificial Sequence: Synthetic oligonucleotide
  Sense strand starting at position 1819 of SEQ ID NO: 913628
uccuuagagcggugaagaa

SEQ ID NO: 942073 - RNA, 19 nt, Artificial Sequence
  Description of Artificial Sequence: Synthetic oligonucleotide
  Antisense strand to SEQ ID NO: 942072
uucuucaccgcucuaagga

SEQ ID NO: 942074 - RNA, 19 nt, Artificial Sequence
  Description of Artificial Sequence: Synthetic oligonucleotide
  Sense strand starting at position 2747 of SEQ ID NO: 913628
aguucuagauuguuauuac

SEQ ID NO: 942075 - RNA, 19 nt, Artificial Sequence
  Description of Artificial Sequence: Synthetic oligonucleotide
  Antisense strand to SEQ ID NO: 942074
guaauaacaaucuagaacu

SEQ ID NO: 942076 - RNA, 19 nt, Artificial Sequence
  Description of Artificial Sequence: Synthetic oligonucleotide
  Sense strand starting at position 2694 of SEQ ID NO: 913628
guaugaucucugggcugaa

SEQ ID NO: 942077 - RNA, 19 nt, Artificial Sequence
  Description of Artificial Sequence: Synthetic oligonucleotide
  Antisense strand to SEQ ID NO: 942076
uucagcccagagaucauac

SEQ ID NO: 942078 - RNA, 19 nt, Artificial Sequence
  Description of Artificial Sequence: Synthetic oligonucleotide
  Sense strand starting at position 2588 of SEQ ID NO: 913628
auauguuauguauaggugu

SEQ ID NO: 942079 - RNA, 19 nt, Artificial Sequence
  Description of Artificial Sequence: Synthetic oligonucleotide
  Antisense strand to SEQ ID NO: 942078
acaccuauacauaacauau

SEQ ID NO: 942080 - RNA, 19 nt, Artificial Sequence
  Description of Artificial Sequence: Synthetic oligonucleotide
  Sense strand starting at position 254 of SEQ ID NO: 913628
uggaaaugcuguuuccaca

SEQ ID NO: 942081 - RNA, 19 nt, Artificial Sequence
  Description of Artificial Sequence: Synthetic oligonucleotide
  Antisense strand to SEQ ID NO: 942080
uguggaaacagcauuucca

SEQ ID NO: 942082 - RNA, 19 nt, Artificial Sequence
  Description of Artificial Sequence: Synthetic oligonucleotide
  Sense strand starting at position 385 of SEQ ID NO: 913628
ggcguaucgcuugugguca

SEQ ID NO: 942083 - RNA, 19 nt, Artificial Sequence
  Description of Artificial Sequence: Synthetic oligonucleotide
  Antisense strand to SEQ ID NO: 942082
ugaccacaagcgauacgcc

SEQ ID NO: 942084 - RNA, 19 nt, Artificial Sequence
  Description of Artificial Sequence: Synthetic oligonucleotide
  Sense strand starting at position 2731 of SEQ ID NO: 913628
caaggaguuuccuuccagu

SEQ ID NO: 942085 - RNA, 19 nt, Artificial Sequence
  Description of Artificial Sequence: Synthetic oligonucleotide
  Antisense strand to SEQ ID NO: 942084
acuggaaggaaacuccuug

SEQ ID NO: 942086 - RNA, 19 nt, Artificial Sequence
  Description of Artificial Sequence: Synthetic oligonucleotide
  Sense strand starting at position 2287 of SEQ ID NO: 913629
augaucacaucugugaaga

SEQ ID NO: 942087 - RNA, 19 nt, Artificial Sequence
  Description of Artificial Sequence: Synthetic oligonucleotide
  Antisense strand to SEQ ID NO: 942086
ucuucacagaugugaucau

SEQ ID NO: 942088 - RNA, 19 nt, Artificial Sequence
  Description of Artificial Sequence: Synthetic oligonucleotide
  Sense strand starting at position 472 of SEQ ID NO: 913629
uguuguggucauguguuca

SEQ ID NO: 942089 - RNA, 19 nt, Artificial Sequence
  Description of Artificial Sequence: Synthetic oligonucleotide
  Antisense strand to SEQ ID NO: 942088
ugaacacaugaccacaaca

SEQ ID NO: 942090 - RNA, 19 nt, Artificial Sequence
  Description of Artificial Sequence: Synthetic oligonucleotide
  Sense strand starting at position 2888 of SEQ ID NO: 913629
ccaccucaugaauggauua

SEQ ID NO: 942091 - RNA, 19 nt, Artificial Sequence
  Description of Artificial Sequence: Synthetic oligonucleotide
  Antisense strand to SEQ ID NO: 942090
uaauccauucaugaggugg

SEQ ID NO: 942092 - RNA, 19 nt, Artificial Sequence
  Description of Artificial Sequence: Synthetic oligonucleotide
  Sense strand starting at position 1040 of SEQ ID NO: 913629
cuuaauagagcauggauaa

SEQ ID NO: 942093 - RNA, 19 nt, Artificial Sequence
  Description of Artificial Sequence: Synthetic oligonucleotide
  Antisense strand to SEQ ID NO: 942092
uuauccaugcucuauuaag

SEQ ID NO: 942094 - RNA, 19 nt, Artificial Sequence
  Description of Artificial Sequence: Synthetic oligonucleotide
  Sense strand starting at position 1129 of SEQ ID NO: 913629
gaguuugacagacaugguu

SEQ ID NO: 942095 - RNA, 19 nt, Artificial Sequence
  Description of Artificial Sequence: Synthetic oligonucleotide
  Antisense strand to SEQ ID NO: 942094
aaccaugucugucaaacuc

SEQ ID NO: 942096 - RNA, 19 nt, Artificial Sequence
  Description of Artificial Sequence: Synthetic oligonucleotide
  Sense strand starting at position 2882 of SEQ ID NO: 913629
agggcuccaccucaugaau

SEQ ID NO: 942097 - RNA, 19 nt, Artificial Sequence
  Description of Artificial Sequence: Synthetic oligonucleotide
  Antisense strand to SEQ ID NO: 942096
auucaugagguggagcccu

SEQ ID NO: 942098 - RNA, 19 nt, Artificial Sequence
  Description of Artificial Sequence: Synthetic oligonucleotide
  Sense strand starting at position 2288 of SEQ ID NO: 913629
ugaucacaucugugaagag

SEQ ID NO: 942099 - RNA, 19 nt, Artificial Sequence
  Description of Artificial Sequence: Synthetic oligonucleotide
  Antisense strand to SEQ ID NO: 942098
cucuucacagaugugauca

SEQ ID NO: 942100 - RNA, 19 nt, Artificial Sequence
  Description of Artificial Sequence: Synthetic oligonucleotide
  Sense strand starting at position 3501 of SEQ ID NO: 913629
uccaaaugaucauugugga

SEQ ID NO: 942101 - RNA, 19 nt, Artificial Sequence
  Description of Artificial Sequence: Synthetic oligonucleotide
  Antisense strand to SEQ ID NO: 942100
uccacaaugaucauuugga

SEQ ID NO: 942102 - RNA, 19 nt, Artificial Sequence
  Description of Artificial Sequence: Synthetic oligonucleotide
  Sense strand starting at position 3502 of SEQ ID NO: 913629
ccaaaugaucauuguggau

SEQ ID NO: 942103 - RNA, 19 nt, Artificial Sequence
  Description of Artificial Sequence: Synthetic oligonucleotide
  Antisense strand to SEQ ID NO: 942102
auccacaaugaucauuugg

SEQ ID NO: 942104 - RNA, 19 nt, Artificial Sequence
  Description of Artificial Sequence: Synthetic oligonucleotide
  Sense strand starting at position 3628 of SEQ ID NO: 913629
uggugcucucaacaugaaa

SEQ ID NO: 942105 - RNA, 19 nt, Artificial Sequence
  Description of Artificial Sequence: Synthetic oligonucleotide
  Antisense strand to SEQ ID NO: 942104
uuucauguugagagcacca

SEQ ID NO: 942106 - RNA, 19 nt, Artificial Sequence
  Description of Artificial Sequence: Synthetic oligonucleotide
  Sense strand starting at position 1783 of SEQ ID NO: 913629
gaccucauccggcacagaa

SEQ ID NO: 942107 - RNA, 19 nt, Artificial Sequence
  Description of Artificial Sequence: Synthetic oligonucleotide
  Antisense strand to SEQ ID NO: 942106
uucugugccggaugagguc

SEQ ID NO: 942108 - RNA, 19 nt, Artificial Sequence
  Description of Artificial Sequence: Synthetic oligonucleotide
  Sense strand starting at position 2625 of SEQ ID NO: 913629
uggaauuaccauugcagag

SEQ ID NO: 942109 - RNA, 19 nt, Artificial Sequence
  Description of Artificial Sequence: Synthetic oligonucleotide
  Antisense strand to SEQ ID NO: 942108
cucugcaaugguaauucca

SEQ ID NO: 942110 - RNA, 19 nt, Artificial Sequence
  Description of Artificial Sequence: Synthetic oligonucleotide
  Sense strand starting at position 3720 of SEQ ID NO: 913629
ucaguaagaacaggguuua

SEQ ID NO: 942111 - RNA, 19 nt, Artificial Sequence
  Description of Artificial Sequence: Synthetic oligonucleotide
  Antisense strand to SEQ ID NO: 942110
uaaacccuguucuuacuga

SEQ ID NO: 942112 - RNA, 19 nt, Artificial Sequence
  Description of Artificial Sequence: Synthetic oligonucleotide
  Sense strand starting at position 2418 of SEQ ID NO: 913629
gguguauguagauauacau

SEQ ID NO: 942113 - RNA, 19 nt, Artificial Sequence
  Description of Artificial Sequence: Synthetic oligonucleotide
  Antisense strand to SEQ ID NO: 942112
auguauaucuacauacacc

SEQ ID NO: 942114 - RNA, 19 nt, Artificial Sequence
  Description of Artificial Sequence: Synthetic oligonucleotide
  Sense strand starting at position 3225 of SEQ ID NO: 913629
gcaggacaugguggaauau

SEQ ID NO: 942115 - RNA, 19 nt, Artificial Sequence
  Description of Artificial Sequence: Synthetic oligonucleotide
  Antisense strand to SEQ ID NO: 942114
auauuccaccauguccugc

SEQ ID NO: 942116 - RNA, 19 nt, Artificial Sequence
  Description of Artificial Sequence: Synthetic oligonucleotide
  Sense strand starting at position 2513 of SEQ ID NO: 913629
ugaucucugggcugaagga

SEQ ID NO: 942117 - RNA, 19 nt, Artificial Sequence
  Description of Artificial Sequence: Synthetic oligonucleotide
  Antisense strand to SEQ ID NO: 942116
uccuucagcccagagauca

SEQ ID NO: 942118 - RNA, 19 nt, Artificial Sequence
  Description of Artificial Sequence: Synthetic oligonucleotide
  Sense strand starting at position 2666 of SEQ ID NO: 913629
ugacaucuggcccacaagu

SEQ ID NO: 942119 - RNA, 19 nt, Artificial Sequence
  Description of Artificial Sequence: Synthetic oligonucleotide
  Antisense strand to SEQ ID NO: 942118
acuugugggccagauguca

SEQ ID NO: 942120 - RNA, 19 nt, Artificial Sequence
  Description of Artificial Sequence: Synthetic oligonucleotide
  Sense strand starting at position 2511 of SEQ ID NO: 913629
uaugaucucugggcugaag

SEQ ID NO: 942121 - RNA, 19 nt, Artificial Sequence
  Description of Artificial Sequence: Synthetic oligonucleotide
  Antisense strand to SEQ ID NO: 942120
cuucagcccagagaucaua

SEQ ID NO: 942122 - RNA, 19 nt, Artificial Sequence
  Description of Artificial Sequence: Synthetic oligonucleotide
  Sense strand starting at position 3819 of SEQ ID NO: 913629
ggugauauuccucaggcau

SEQ ID NO: 942123 - RNA, 19 nt, Artificial Sequence
  Description of Artificial Sequence: Synthetic oligonucleotide
  Antisense strand to SEQ ID NO: 942122
augccugaggaauaucacc

SEQ ID NO: 942124 - RNA, 19 nt, Artificial Sequence
  Description of Artificial Sequence: Synthetic oligonucleotide
  Sense strand starting at position 1142 of SEQ ID NO: 913629
augguuggcaucugaagaa

SEQ ID NO: 942125 - RNA, 19 nt, Artificial Sequence
  Description of Artificial Sequence: Synthetic oligonucleotide
  Antisense strand to SEQ ID NO: 942124
uucuucagaugccaaccau

SEQ ID NO: 942126 - RNA, 19 nt, Artificial Sequence
  Description of Artificial Sequence: Synthetic oligonucleotide
  Sense strand starting at position 1115 of SEQ ID NO: 913629
aggcgacucauccagaguu

SEQ ID NO: 942127 - RNA, 19 nt, Artificial Sequence
  Description of Artificial Sequence: Synthetic oligonucleotide
  Antisense strand to SEQ ID NO: 942126
aacucuggaugagucgccu

SEQ ID NO: 942128 - RNA, 19 nt, Artificial Sequence
  Description of Artificial Sequence: Synthetic oligonucleotide
  Sense strand starting at position 2501 of SEQ ID NO: 913629
acuauaucuguaugaucuc

SEQ ID NO: 942129 - RNA, 19 nt, Artificial Sequence
  Description of Artificial Sequence: Synthetic oligonucleotide
  Antisense strand to SEQ ID NO: 942128
gagaucauacagauauagu

SEQ ID NO: 942130 - RNA, 19 nt, Artificial Sequence
  Description of Artificial Sequence: Synthetic oligonucleotide
  Sense strand starting at position 1427 of SEQ ID NO: 913629
ggcauucaagguggugaaa

SEQ ID NO: 942131 - RNA, 19 nt, Artificial Sequence
  Description of Artificial Sequence: Synthetic oligonucleotide
  Antisense strand to SEQ ID NO: 942130
uuucaccaccuugaaugcc

SEQ ID NO: 942132 - RNA, 19 nt, Artificial Sequence
  Description of Artificial Sequence: Synthetic oligonucleotide
  Sense strand starting at position 3818 of SEQ ID NO: 913629
aggugauauuccucaggca

SEQ ID NO: 942133 - RNA, 19 nt, Artificial Sequence
  Description of Artificial Sequence: Synthetic oligonucleotide
  Antisense strand to SEQ ID NO: 942132
ugccugaggaauaucaccu

SEQ ID NO: 942134 - RNA, 19 nt, Artificial Sequence
  Description of Artificial Sequence: Synthetic oligonucleotide
  Sense strand starting at position 2664 of SEQ ID NO: 913629
ggugacaucuggcccacaa

SEQ ID NO: 942135 - RNA, 19 nt, Artificial Sequence
  Description of Artificial Sequence: Synthetic oligonucleotide
  Antisense strand to SEQ ID NO: 942134
uugugggccagaugucacc

SEQ ID NO: 942136 - RNA, 19 nt, Artificial Sequence
  Description of Artificial Sequence: Synthetic oligonucleotide
  Sense strand starting at position 2558 of SEQ ID NO: 913629
cuuccaguucuagauuguu

SEQ ID NO: 942137 - RNA, 19 nt, Artificial Sequence
  Description of Artificial Sequence: Synthetic oligonucleotide
  Antisense strand to SEQ ID NO: 942136
aacaaucuagaacuggaag

SEQ ID NO: 942138 - RNA, 19 nt, Artificial Sequence
  Description of Artificial Sequence: Synthetic oligonucleotide
  Sense strand starting at position 1378 of SEQ ID NO: 913629
guuuauucuuaccucagau

SEQ ID NO: 942139 - RNA, 19 nt, Artificial Sequence
  Description of Artificial Sequence: Synthetic oligonucleotide
  Antisense strand to SEQ ID NO: 942138
aucugagguaagaauaaac

SEQ ID NO: 942140 - RNA, 19 nt, Artificial Sequence
  Description of Artificial Sequence: Synthetic oligonucleotide
  Sense strand starting at position 1377 of SEQ ID NO: 913629
uguuuauucuuaccucaga

SEQ ID NO: 942141 - RNA, 19 nt, Artificial Sequence
  Description of Artificial Sequence: Synthetic oligonucleotide
  Antisense strand to SEQ ID NO: 942140
ucugagguaagaauaaaca

SEQ ID NO: 942142 - RNA, 19 nt, Artificial Sequence
  Description of Artificial Sequence: Synthetic oligonucleotide
  Sense strand starting at position 3866 of SEQ ID NO: 913629
guaagagugaacuguuacu

SEQ ID NO: 942143 - RNA, 19 nt, Artificial Sequence
  Description of Artificial Sequence: Synthetic oligonucleotide
  Antisense strand to SEQ ID NO: 942142
aguaacaguucacucuuac

SEQ ID NO: 942144 - RNA, 19 nt, Artificial Sequence
  Description of Artificial Sequence: Synthetic oligonucleotide
  Sense strand starting at position 1117 of SEQ ID NO: 913629
gcgacucauccagaguuug

SEQ ID NO: 942145 - RNA, 19 nt, Artificial Sequence
  Description of Artificial Sequence: Synthetic oligonucleotide
  Antisense strand to SEQ ID NO: 942144
caaacucuggaugagucgc

SEQ ID NO: 942146 - RNA, 19 nt, Artificial Sequence
  Description of Artificial Sequence: Synthetic oligonucleotide
  Sense strand starting at position 1466 of SEQ ID NO: 913629
agaguuagcccaggaaguc

SEQ ID NO: 942147 - RNA, 19 nt, Artificial Sequence
  Description of Artificial Sequence: Synthetic oligonucleotide
  Antisense strand to SEQ ID NO: 942146
gacuuccugggcuaacucu

SEQ ID NO: 942148 - RNA, 19 nt, Artificial Sequence
  Description of Artificial Sequence: Synthetic oligonucleotide
  Sense strand starting at position 1635 of SEQ ID NO: 913629
uccuuagagcggugaagaa

SEQ ID NO: 942149 - RNA, 19 nt, Artificial Sequence
  Description of Artificial Sequence: Synthetic oligonucleotide
  Antisense strand to SEQ ID NO: 942148
uucuucaccgcucuaagga

SEQ ID NO: 942150 - RNA, 19 nt, Artificial Sequence
  Description of Artificial Sequence: Synthetic oligonucleotide
  Sense strand starting at position 3871 of SEQ ID NO: 913629
agugaacuguuacucuuua

SEQ ID NO: 942151 - RNA, 19 nt, Artificial Sequence
  Description of Artificial Sequence: Synthetic oligonucleotide
  Antisense strand to SEQ ID NO: 942150
uaaagaguaacaguucacu

SEQ ID NO: 942152 - RNA, 19 nt, Artificial Sequence
  Description of Artificial Sequence: Synthetic oligonucleotide
  Sense strand starting at position 2563 of SEQ ID NO: 913629
aguucuagauuguuauuac

SEQ ID NO: 942153 - RNA, 19 nt, Artificial Sequence
  Description of Artificial Sequence: Synthetic oligonucleotide
  Antisense strand to SEQ ID NO: 942152
guaauaacaaucuagaacu

SEQ ID NO: 942154 - RNA, 19 nt, Artificial Sequence
  Description of Artificial Sequence: Synthetic oligonucleotide
  Sense strand starting at position 2510 of SEQ ID NO: 913629
guaugaucucugggcugaa

SEQ ID NO: 942155 - RNA, 19 nt, Artificial Sequence
  Description of Artificial Sequence: Synthetic oligonucleotide
  Antisense strand to SEQ ID NO: 942154
uucagcccagagaucauac

SEQ ID NO: 942156 - RNA, 19 nt, Artificial Sequence
  Description of Artificial Sequence: Synthetic oligonucleotide
  Sense strand starting at position 2404 of SEQ ID NO: 913629
auauguuauguauaggugu

SEQ ID NO: 942157 - RNA, 19 nt, Artificial Sequence
  Description of Artificial Sequence: Synthetic oligonucleotide
  Antisense strand to SEQ ID NO: 942156
acaccuauacauaacauau

SEQ ID NO: 942158 - RNA, 19 nt, Artificial Sequence
  Description of Artificial Sequence: Synthetic oligonucleotide
  Sense strand starting at position 70 of SEQ ID NO: 913629
uggaaaugcuguuuccaca

SEQ ID NO: 942159 - RNA, 19 nt, Artificial Sequence
  Description of Artificial Sequence: Synthetic oligonucleotide
  Antisense strand to SEQ ID NO: 942158
uguggaaacagcauuucca

SEQ ID NO: 942160 - RNA, 19 nt, Artificial Sequence
  Description of Artificial Sequence: Synthetic oligonucleotide
  Sense strand starting at position 201 of SEQ ID NO: 913629
ggcguaucgcuugugguca

SEQ ID NO: 942161 - RNA, 19 nt, Artificial Sequence
  Description of Artificial Sequence: Synthetic oligonucleotide
  Antisense strand to SEQ ID NO: 942160
ugaccacaagcgauacgcc

SEQ ID NO: 942162 - RNA, 19 nt, Artificial Sequence
  Description of Artificial Sequence: Synthetic oligonucleotide
  Sense strand starting at position 2547 of SEQ ID NO: 913629
caaggaguuuccuuccagu

SEQ ID NO: 942163 - RNA, 19 nt, Artificial Sequence
  Description of Artificial Sequence: Synthetic oligonucleotide
  Antisense strand to SEQ ID NO: 942162
acuggaaggaaacuccuug

SEQ ID NO: 942164 - RNA, 19 nt, Artificial Sequence
  Description of Artificial Sequence: Synthetic oligonucleotide
  Sense strand starting at position 2186 of SEQ ID NO: 913629
uauguuuaacauggcggaa

SEQ ID NO: 942165 - RNA, 19 nt, Artificial Sequence
  Description of Artificial Sequence: Synthetic oligonucleotide
  Antisense strand to SEQ ID NO: 942164
uuccgccauguuaaacaua

SEQ ID NO: 942166 - RNA, 19 nt, Artificial Sequence
  Description of Artificial Sequence: Synthetic oligonucleotide
  Sense strand starting at position 3481 of SEQ ID NO: 913630
uuguaugagaguuguauuu

SEQ ID NO: 942167 - RNA, 19 nt, Artificial Sequence
  Description of Artificial Sequence: Synthetic oligonucleotide
  Antisense strand to SEQ ID NO: 942166
aaauacaacucucauacaa

SEQ ID NO: 942168 - RNA, 19 nt, Artificial Sequence
  Description of Artificial Sequence: Synthetic oligonucleotide
  Sense strand starting at position 3059 of SEQ ID NO: 913630
uuucuaauugggcaauuaa

SEQ ID NO: 942169 - RNA, 19 nt, Artificial Sequence
  Description of Artificial Sequence: Synthetic oligonucleotide
  Antisense strand to SEQ ID NO: 942168
uuaauugcccaauuagaaa

SEQ ID NO: 942170 - RNA, 19 nt, Artificial Sequence
  Description of Artificial Sequence: Synthetic oligonucleotide
  Sense strand starting at position 2520 of SEQ ID NO: 913630
cugucuagagcgcucuuau

SEQ ID NO: 942171 - RNA, 19 nt, Artificial Sequence
  Description of Artificial Sequence: Synthetic oligonucleotide
  Antisense strand to SEQ ID NO: 942170
auaagagcgcucuagacag

SEQ ID NO: 942172 - RNA, 19 nt, Artificial Sequence
  Description of Artificial Sequence: Synthetic oligonucleotide
  Sense strand starting at position 2521 of SEQ ID NO: 913630
ugucuagagcgcucuuauu

SEQ ID NO: 942173 - RNA, 19 nt, Artificial Sequence
  Description of Artificial Sequence: Synthetic oligonucleotide
  Antisense strand to SEQ ID NO: 942172
aauaagagcgcucuagaca

SEQ ID NO: 942174 - RNA, 19 nt, Artificial Sequence
  Description of Artificial Sequence: Synthetic oligonucleotide
  Sense strand starting at position 563 of SEQ ID NO: 913630
aacagaauguggguccaaa

SEQ ID NO: 942175 - RNA, 19 nt, Artificial Sequence
  Description of Artificial Sequence: Synthetic oligonucleotide
  Antisense strand to SEQ ID NO: 942174
uuuggacccacauucuguu

SEQ ID NO: 942176 - RNA, 19 nt, Artificial Sequence
  Description of Artificial Sequence: Synthetic oligonucleotide
  Sense strand starting at position 2260 of SEQ ID NO: 913630
cugaaauacccgggagacu

SEQ ID NO: 942177 - RNA, 19 nt, Artificial Sequence
  Description of Artificial Sequence: Synthetic oligonucleotide
  Antisense strand to SEQ ID NO: 942176
agucucccggguauuucag

SEQ ID NO: 942178 - RNA, 19 nt, Artificial Sequence
  Description of Artificial Sequence: Synthetic oligonucleotide
  Sense strand starting at position 99 of SEQ ID NO: 913630
agccaaauggcauaccaau

SEQ ID NO: 942179 - RNA, 19 nt, Artificial Sequence
  Description of Artificial Sequence: Synthetic oligonucleotide
  Antisense strand to SEQ ID NO: 942178
auugguaugccauuuggcu

SEQ ID NO: 942180 - RNA, 19 nt, Artificial Sequence
  Description of Artificial Sequence: Synthetic oligonucleotide
  Sense strand starting at position 335 of SEQ ID NO: 913630
cugugacugaccgaggauu

SEQ ID NO: 942181 - RNA, 19 nt, Artificial Sequence
  Description of Artificial Sequence: Synthetic oligonucleotide
  Antisense strand to SEQ ID NO: 942180
aauccucggucagucacag

SEQ ID NO: 942182 - RNA, 19 nt, Artificial Sequence
  Description of Artificial Sequence: Synthetic oligonucleotide
  Sense strand starting at position 3831 of SEQ ID NO: 913630
ugaugaagguaagucuaua

SEQ ID NO: 942183 - RNA, 19 nt, Artificial Sequence
  Description of Artificial Sequence: Synthetic oligonucleotide
  Antisense strand to SEQ ID NO: 942182
uauagacuuaccuucauca

SEQ ID NO: 942184 - RNA, 19 nt, Artificial Sequence
  Description of Artificial Sequence: Synthetic oligonucleotide
  Sense strand starting at position 290 of SEQ ID NO: 913630
acgugaaaucuggagcuaa

SEQ ID NO: 942185 - RNA, 19 nt, Artificial Sequence
  Description of Artificial Sequence: Synthetic oligonucleotide
  Antisense strand to SEQ ID NO: 942184
uuagcuccagauuucacgu

SEQ ID NO: 942186 - RNA, 19 nt, Artificial Sequence
  Description of Artificial Sequence: Synthetic oligonucleotide
  Sense strand starting at position 571 of SEQ ID NO: 913630
guggguccaaaugaguauu

SEQ ID NO: 942187 - RNA, 19 nt, Artificial Sequence
  Description of Artificial Sequence: Synthetic oligonucleotide
  Antisense strand to SEQ ID NO: 942186
aauacucauuuggacccac

SEQ ID NO: 942188 - RNA, 19 nt, Artificial Sequence
  Description of Artificial Sequence: Synthetic oligonucleotide
  Sense strand starting at position 2571 of SEQ ID NO: 913630
acuacagagcugugaauga

SEQ ID NO: 942189 - RNA, 19 nt, Artificial Sequence
  Description of Artificial Sequence: Synthetic oligonucleotide
  Antisense strand to SEQ ID NO: 942188
ucauucacagcucuguagu

SEQ ID NO: 942190 - RNA, 19 nt, Artificial Sequence
  Description of Artificial Sequence: Synthetic oligonucleotide
  Sense strand starting at position 3942 of SEQ ID NO: 913630
gacuaugguguuuauucca

SEQ ID NO: 942191 - RNA, 19 nt, Artificial Sequence
  Description of Artificial Sequence: Synthetic oligonucleotide
  Antisense strand to SEQ ID NO: 942190
uggaauaaacaccauaguc

SEQ ID NO: 942192 - RNA, 19 nt, Artificial Sequence
  Description of Artificial Sequence: Synthetic oligonucleotide
  Sense strand starting at position 877 of SEQ ID NO: 913630
uuuaaauguaguugaggau

SEQ ID NO: 942193 - RNA, 19 nt, Artificial Sequence
  Description of Artificial Sequence: Synthetic oligonucleotide
  Antisense strand to SEQ ID NO: 942192
auccucaacuacauuuaaa

SEQ ID NO: 942194 - RNA, 19 nt, Artificial Sequence
  Description of Artificial Sequence: Synthetic oligonucleotide
  Sense strand starting at position 2863 of SEQ ID NO: 913630
ccauguugaccuggauaug

SEQ ID NO: 942195 - RNA, 19 nt, Artificial Sequence
  Description of Artificial Sequence: Synthetic oligonucleotide
  Antisense strand to SEQ ID NO: 942194
cauauccaggucaacaugg

SEQ ID NO: 942196 - RNA, 19 nt, Artificial Sequence
  Description of Artificial Sequence: Synthetic oligonucleotide
  Sense strand starting at position 2569 of SEQ ID NO: 913630
ggacuacagagcugugaau

SEQ ID NO: 942197 - RNA, 19 nt, Artificial Sequence
  Description of Artificial Sequence: Synthetic oligonucleotide
  Antisense strand to SEQ ID NO: 942196
auucacagcucuguagucc

SEQ ID NO: 942198 - RNA, 19 nt, Artificial Sequence
  Description of Artificial Sequence: Synthetic oligonucleotide
  Sense strand starting at position 2258 of SEQ ID NO: 913630
ugcugaaauacccgggaga

SEQ ID NO: 942199 - RNA, 19 nt, Artificial Sequence
  Description of Artificial Sequence: Synthetic oligonucleotide
  Antisense strand to SEQ ID NO: 942198
ucucccggguauuucagca

SEQ ID NO: 942200 - RNA, 19 nt, Artificial Sequence
  Description of Artificial Sequence: Synthetic oligonucleotide
  Sense strand starting at position 397 of SEQ ID NO: 913630
guacuuuaagcacagcaaa

SEQ ID NO: 942201 - RNA, 19 nt, Artificial Sequence
  Description of Artificial Sequence: Synthetic oligonucleotide
  Antisense strand to SEQ ID NO: 942200
uuugcugugcuuaaaguac

SEQ ID NO: 942202 - RNA, 19 nt, Artificial Sequence
  Description of Artificial Sequence: Synthetic oligonucleotide
  Sense strand starting at position 3018 of SEQ ID NO: 913630
guaaguuaaugaguuaaca

SEQ ID NO: 942203 - RNA, 19 nt, Artificial Sequence
  Description of Artificial Sequence: Synthetic oligonucleotide
  Antisense strand to SEQ ID NO: 942202
uguuaacucauuaacuuac

SEQ ID NO: 942204 - RNA, 19 nt, Artificial Sequence
  Description of Artificial Sequence: Synthetic oligonucleotide
  Sense strand starting at position 3879 of SEQ ID NO: 913630
uagauuacaugguuguuaa

SEQ ID NO: 942205 - RNA, 19 nt, Artificial Sequence
  Description of Artificial Sequence: Synthetic oligonucleotide
  Antisense strand to SEQ ID NO: 942204
uuaacaaccauguaaucua

SEQ ID NO: 942206 - RNA, 19 nt, Artificial Sequence
  Description of Artificial Sequence: Synthetic oligonucleotide
  Sense strand starting at position 1279 of SEQ ID NO: 913630
acaucucuguagucagaag

SEQ ID NO: 942207 - RNA, 19 nt, Artificial Sequence
  Description of Artificial Sequence: Synthetic oligonucleotide
  Antisense strand to SEQ ID NO: 942206
cuucugacuacagagaugu

SEQ ID NO: 942208 - RNA, 19 nt, Artificial Sequence
  Description of Artificial Sequence: Synthetic oligonucleotide
  Sense strand starting at position 3880 of SEQ ID NO: 913630
agauuacaugguuguuaau

SEQ ID NO: 942209 - RNA, 19 nt, Artificial Sequence
  Description of Artificial Sequence: Synthetic oligonucleotide
  Antisense strand to SEQ ID NO: 942208
auuaacaaccauguaaucu

SEQ ID NO: 942210 - RNA, 19 nt, Artificial Sequence
  Description of Artificial Sequence: Synthetic oligonucleotide
  Sense strand starting at position 1448 of SEQ ID NO: 913630
uagugugcacuccaugaaa

SEQ ID NO: 942211 - RNA, 19 nt, Artificial Sequence
  Description of Artificial Sequence: Synthetic oligonucleotide
  Antisense strand to SEQ ID NO: 942210
uuucauggagugcacacua

SEQ ID NO: 942212 - RNA, 19 nt, Artificial Sequence
  Description of Artificial Sequence: Synthetic oligonucleotide
  Sense strand starting at position 1759 of SEQ ID NO: 913630
cagagaaaggcaugcaagu

SEQ ID NO: 942213 - RNA, 19 nt, Artificial Sequence
  Description of Artificial Sequence: Synthetic oligonucleotide
  Antisense strand to SEQ ID NO: 942212
acuugcaugccuuucucug

SEQ ID NO: 942214 - RNA, 19 nt, Artificial Sequence
  Description of Artificial Sequence: Synthetic oligonucleotide
  Sense strand starting at position 72 of SEQ ID NO: 913630
ucaauaggcuccuuagauu

SEQ ID NO: 942215 - RNA, 19 nt, Artificial Sequence
  Description of Artificial Sequence: Synthetic oligonucleotide
  Antisense strand to SEQ ID NO: 942214
aaucuaaggagccuauuga

SEQ ID NO: 942216 - RNA, 19 nt, Artificial Sequence
  Description of Artificial Sequence: Synthetic oligonucleotide
  Sense strand starting at position 751 of SEQ ID NO: 913630
ucaccaagucauugugaua

SEQ ID NO: 942217 - RNA, 19 nt, Artificial Sequence
  Description of Artificial Sequence: Synthetic oligonucleotide
  Antisense strand to SEQ ID NO: 942216
uaucacaaugacuugguga

SEQ ID NO: 942218 - RNA, 19 nt, Artificial Sequence
  Description of Artificial Sequence: Synthetic oligonucleotide
  Sense strand starting at position 3877 of SEQ ID NO: 913630
cauagauuacaugguuguu

SEQ ID NO: 942219 - RNA, 19 nt, Artificial Sequence
  Description of Artificial Sequence: Synthetic oligonucleotide
  Antisense strand to SEQ ID NO: 942218
aacaaccauguaaucuaug

SEQ ID NO: 942220 - RNA, 19 nt, Artificial Sequence
  Description of Artificial Sequence: Synthetic oligonucleotide
  Sense strand starting at position 750 of SEQ ID NO: 913630
cucaccaagucauugugau

SEQ ID NO: 942221 - RNA, 19 nt, Artificial Sequence
  Description of Artificial Sequence: Synthetic oligonucleotide
  Antisense strand to SEQ ID NO: 942220
aucacaaugacuuggugag

SEQ ID NO: 942222 - RNA, 19 nt, Artificial Sequence
  Description of Artificial Sequence: Synthetic oligonucleotide
  Sense strand starting at position 3929 of SEQ ID NO: 913630
ccuuguacucauugacuau

SEQ ID NO: 942223 - RNA, 19 nt, Artificial Sequence
  Description of Artificial Sequence: Synthetic oligonucleotide
  Antisense strand to SEQ ID NO: 942222
auagucaaugaguacaagg

SEQ ID NO: 942224 - RNA, 19 nt, Artificial Sequence
  Description of Artificial Sequence: Synthetic oligonucleotide
  Sense strand starting at position 2218 of SEQ ID NO: 913630
cgaggcuggcaaugagaau

SEQ ID NO: 942225 - RNA, 19 nt, Artificial Sequence
  Description of Artificial Sequence: Synthetic oligonucleotide
  Antisense strand to SEQ ID NO: 942224
auucucauugccagccucg

SEQ ID NO: 942226 - RNA, 19 nt, Artificial Sequence
  Description of Artificial Sequence: Synthetic oligonucleotide
  Sense strand starting at position 3005 of SEQ ID NO: 913630
aguccaaaccuauguaagu

SEQ ID NO: 942227 - RNA, 19 nt, Artificial Sequence
  Description of Artificial Sequence: Synthetic oligonucleotide
  Antisense strand to SEQ ID NO: 942226
acuuacauagguuuggacu

SEQ ID NO: 942228 - RNA, 19 nt, Artificial Sequence
  Description of Artificial Sequence: Synthetic oligonucleotide
  Sense strand starting at position 31 of SEQ ID NO: 913630
agucaaugauguguuauac

SEQ ID NO: 942229 - RNA, 19 nt, Artificial Sequence
  Description of Artificial Sequence: Synthetic oligonucleotide
  Antisense strand to SEQ ID NO: 942228
guauaacacaucauugacu

SEQ ID NO: 942230 - RNA, 19 nt, Artificial Sequence
  Description of Artificial Sequence: Synthetic oligonucleotide
  Sense strand starting at position 60 of SEQ ID NO: 913630
uuugguauguucucaauag

SEQ ID NO: 942231 - RNA, 19 nt, Artificial Sequence
  Description of Artificial Sequence: Synthetic oligonucleotide
  Antisense strand to SEQ ID NO: 942230
cuauugagaacauaccaaa

SEQ ID NO: 942232 - RNA, 19 nt, Artificial Sequence
  Description of Artificial Sequence: Synthetic oligonucleotide
  Sense strand starting at position 2743 of SEQ ID NO: 913630
acgcuaucccuuugaauaa

SEQ ID NO: 942233 - RNA, 19 nt, Artificial Sequence
  Description of Artificial Sequence: Synthetic oligonucleotide
  Antisense strand to SEQ ID NO: 942232
uuauucaaagggauagcgu

SEQ ID NO: 942234 - RNA, 19 nt, Artificial Sequence
  Description of Artificial Sequence: Synthetic oligonucleotide
  Sense strand starting at position 3559 of SEQ ID NO: 913630
ucauuaagguucuuugcaa

SEQ ID NO: 942235 - RNA, 19 nt, Artificial Sequence
  Description of Artificial Sequence: Synthetic oligonucleotide
  Antisense strand to SEQ ID NO: 942234
uugcaaagaaccuuaauga

SEQ ID NO: 942236 - RNA, 19 nt, Artificial Sequence
  Description of Artificial Sequence: Synthetic oligonucleotide
  Sense strand starting at position 3006 of SEQ ID NO: 913630
guccaaaccuauguaaguu

SEQ ID NO: 942237 - RNA, 19 nt, Artificial Sequence
  Description of Artificial Sequence: Synthetic oligonucleotide
  Antisense strand to SEQ ID NO: 942236
aacuuacauagguuuggac

SEQ ID NO: 942238 - RNA, 19 nt, Artificial Sequence
  Description of Artificial Sequence: Synthetic oligonucleotide
  Sense strand starting at position 3898 of SEQ ID NO: 913630
uuucccauaugguuguuaa

SEQ ID NO: 942239 - RNA, 19 nt, Artificial Sequence
  Description of Artificial Sequence: Synthetic oligonucleotide
  Antisense strand to SEQ ID NO: 942238
uuaacaaccauaugggaaa

SEQ ID NO: 942240 - RNA, 19 nt, Artificial Sequence
  Description of Artificial Sequence: Synthetic oligonucleotide
  Sense strand starting at position 3165 of SEQ ID NO: 913630
ccaguuaauucuccaguug

SEQ ID NO: 942241 - RNA, 19 nt, Artificial Sequence
  Description of Artificial Sequence: Synthetic oligonucleotide
  Antisense strand to SEQ ID NO: 942240
caacuggagaauuaacugg

SEQ ID NO: 942242 - RNA, 19 nt, Artificial Sequence
  Description of Artificial Sequence: Synthetic oligonucleotide
  Sense strand starting at position 26 of SEQ ID NO: 913630
guccuagucaaugaugugu

SEQ ID NO: 942243 - RNA, 19 nt, Artificial Sequence
  Description of Artificial Sequence: Synthetic oligonucleotide
  Antisense strand to SEQ ID NO: 942242
acacaucauugacuaggac

SEQ ID NO: 942244 - RNA, 19 nt, Artificial Sequence
  Description of Artificial Sequence: Synthetic oligonucleotide
  Sense strand starting at position 1203 of SEQ ID NO: 913630
ccauguuugaaggguguua

SEQ ID NO: 942245 - RNA, 19 nt, Artificial Sequence
  Description of Artificial Sequence: Synthetic oligonucleotide
  Antisense strand to SEQ ID NO: 942244
uaacacccuucaaacaugg

SEQ ID NO: 942246 - RNA, 19 nt, Artificial Sequence
  Description of Artificial Sequence: Synthetic oligonucleotide
  Sense strand starting at position 3172 of SEQ ID NO: 913631
uuguaugagaguuguauuu

SEQ ID NO: 942247 - RNA, 19 nt, Artificial Sequence
  Description of Artificial Sequence: Synthetic oligonucleotide
  Antisense strand to SEQ ID NO: 942246
aaauacaacucucauacaa

SEQ ID NO: 942248 - RNA, 19 nt, Artificial Sequence
  Description of Artificial Sequence: Synthetic oligonucleotide
  Sense strand starting at position 2750 of SEQ ID NO: 913631
uuucuaauugggcaauuaa

SEQ ID NO: 942249 - RNA, 19 nt, Artificial Sequence
  Description of Artificial Sequence: Synthetic oligonucleotide
  Antisense strand to SEQ ID NO: 942248
uuaauugcccaauuagaaa

SEQ ID NO: 942250 - RNA, 19 nt, Artificial Sequence
  Description of Artificial Sequence: Synthetic oligonucleotide
  Sense strand starting at position 2211 of SEQ ID NO: 913631
cugucuagagcgcucuuau

SEQ ID NO: 942251 - RNA, 19 nt, Artificial Sequence
  Description of Artificial Sequence: Synthetic oligonucleotide
  Antisense strand to SEQ ID NO: 942250
auaagagcgcucuagacag

SEQ ID NO: 942252 - RNA, 19 nt, Artificial Sequence
  Description of Artificial Sequence: Synthetic oligonucleotide
  Sense strand starting at position 2212 of SEQ ID NO: 913631
ugucuagagcgcucuuauu

SEQ ID NO: 942253 - RNA, 19 nt, Artificial Sequence
  Description of Artificial Sequence: Synthetic oligonucleotide
  Antisense strand to SEQ ID NO: 942252
aauaagagcgcucuagaca

SEQ ID NO: 942254 - RNA, 19 nt, Artificial Sequence
  Description of Artificial Sequence: Synthetic oligonucleotide
  Sense strand starting at position 254 of SEQ ID NO: 913631
aacagaauguggguccaaa

SEQ ID NO: 942255 - RNA, 19 nt, Artificial Sequence
  Description of Artificial Sequence: Synthetic oligonucleotide
  Antisense strand to SEQ ID NO: 942254
uuuggacccacauucuguu

SEQ ID NO: 942256 - RNA, 19 nt, Artificial Sequence
  Description of Artificial Sequence: Synthetic oligonucleotide
  Sense strand starting at position 1951 of SEQ ID NO: 913631
cugaaauacccgggagacu

SEQ ID NO: 942257 - RNA, 19 nt, Artificial Sequence
  Description of Artificial Sequence: Synthetic oligonucleotide
  Antisense strand to SEQ ID NO: 942256
agucucccggguauuucag

SEQ ID NO: 942258 - RNA, 19 nt, Artificial Sequence
  Description of Artificial Sequence: Synthetic oligonucleotide
  Sense strand starting at position 26 of SEQ ID NO: 913631
cugugacugaccgaggauu

SEQ ID NO: 942259 - RNA, 19 nt, Artificial Sequence
  Description of Artificial Sequence: Synthetic oligonucleotide
  Antisense strand to SEQ ID NO: 942258
aauccucggucagucacag

SEQ ID NO: 942260 - RNA, 19 nt, Artificial Sequence
  Description of Artificial Sequence: Synthetic oligonucleotide
  Sense strand starting at position 3522 of SEQ ID NO: 913631
ugaugaagguaagucuaua

SEQ ID NO: 942261 - RNA, 19 nt, Artificial Sequence
  Description of Artificial Sequence: Synthetic oligonucleotide
  Antisense strand to SEQ ID NO: 942260
uauagacuuaccuucauca

SEQ ID NO: 942262 - RNA, 19 nt, Artificial Sequence
  Description of Artificial Sequence: Synthetic oligonucleotide
  Sense strand starting at position 262 of SEQ ID NO: 913631
guggguccaaaugaguauu

SEQ ID NO: 942263 - RNA, 19 nt, Artificial Sequence
  Description of Artificial Sequence: Synthetic oligonucleotide
  Antisense strand to SEQ ID NO: 942262
aauacucauuuggacccac

SEQ ID NO: 942264 - RNA, 19 nt, Artificial Sequence
  Description of Artificial Sequence: Synthetic oligonucleotide
  Sense strand starting at position 2262 of SEQ ID NO: 913631
acuacagagcugugaauga

SEQ ID NO: 942265 - RNA, 19 nt, Artificial Sequence
  Description of Artificial Sequence: Synthetic oligonucleotide
  Antisense strand to SEQ ID NO: 942264
ucauucacagcucuguagu

SEQ ID NO: 942266 - RNA, 19 nt, Artificial Sequence
  Description of Artificial Sequence: Synthetic oligonucleotide
  Sense strand starting at position 3633 of SEQ ID NO: 913631
gacuaugguguuuauucca

SEQ ID NO: 942267 - RNA, 19 nt, Artificial Sequence
  Description of Artificial Sequence: Synthetic oligonucleotide
  Antisense strand to SEQ ID NO: 942266
uggaauaaacaccauaguc

SEQ ID NO: 942268 - RNA, 19 nt, Artificial Sequence
  Description of Artificial Sequence: Synthetic oligonucleotide
  Sense strand starting at position 568 of SEQ ID NO: 913631
uuuaaauguaguugaggau

SEQ ID NO: 942269 - RNA, 19 nt, Artificial Sequence
  Description of Artificial Sequence: Synthetic oligonucleotide
  Antisense strand to SEQ ID NO: 942268
auccucaacuacauuuaaa

SEQ ID NO: 942270 - RNA, 19 nt, Artificial Sequence
  Description of Artificial Sequence: Synthetic oligonucleotide
  Sense strand starting at position 2554 of SEQ ID NO: 913631
ccauguugaccuggauaug

SEQ ID NO: 942271 - RNA, 19 nt, Artificial Sequence
  Description of Artificial Sequence: Synthetic oligonucleotide
  Antisense strand to SEQ ID NO: 942270
cauauccaggucaacaugg

SEQ ID NO: 942272 - RNA, 19 nt, Artificial Sequence
  Description of Artificial Sequence: Synthetic oligonucleotide
  Sense strand starting at position 2260 of SEQ ID NO: 913631
ggacuacagagcugugaau

SEQ ID NO: 942273 - RNA, 19 nt, Artificial Sequence
  Description of Artificial Sequence: Synthetic oligonucleotide
  Antisense strand to SEQ ID NO: 942272
auucacagcucuguagucc

SEQ ID NO: 942274 - RNA, 19 nt, Artificial Sequence
  Description of Artificial Sequence: Synthetic oligonucleotide
  Sense strand starting at position 1949 of SEQ ID NO: 913631
ugcugaaauacccgggaga

SEQ ID NO: 942275 - RNA, 19 nt, Artificial Sequence
  Description of Artificial Sequence: Synthetic oligonucleotide
  Antisense strand to SEQ ID NO: 942274
ucucccggguauuucagca

SEQ ID NO: 942276 - RNA, 19 nt, Artificial Sequence
  Description of Artificial Sequence: Synthetic oligonucleotide
  Sense strand starting at position 88 of SEQ ID NO: 913631
guacuuuaagcacagcaaa

SEQ ID NO: 942277 - RNA, 19 nt, Artificial Sequence
  Description of Artificial Sequence: Synthetic oligonucleotide
  Antisense strand to SEQ ID NO: 942276
uuugcugugcuuaaaguac

SEQ ID NO: 942278 - RNA, 19 nt, Artificial Sequence
  Description of Artificial Sequence: Synthetic oligonucleotide
  Sense strand starting at position 2709 of SEQ ID NO: 913631
guaaguuaaugaguuaaca

SEQ ID NO: 942279 - RNA, 19 nt, Artificial Sequence
  Description of Artificial Sequence: Synthetic oligonucleotide
  Antisense strand to SEQ ID NO: 942278
uguuaacucauuaacuuac

SEQ ID NO: 942280 - RNA, 19 nt, Artificial Sequence
  Description of Artificial Sequence: Synthetic oligonucleotide
  Sense strand starting at position 3570 of SEQ ID NO: 913631
uagauuacaugguuguuaa

SEQ ID NO: 942281 - RNA, 19 nt, Artificial Sequence
  Description of Artificial Sequence: Synthetic oligonucleotide
  Antisense strand to SEQ ID NO: 942280
uuaacaaccauguaaucua

SEQ ID NO: 942282 - RNA, 19 nt, Artificial Sequence
  Description of Artificial Sequence: Synthetic oligonucleotide
  Sense strand starting at position 970 of SEQ ID NO: 913631
acaucucuguagucagaag

SEQ ID NO: 942283 - RNA, 19 nt, Artificial Sequence
  Description of Artificial Sequence: Synthetic oligonucleotide
  Antisense strand to SEQ ID NO: 942282
cuucugacuacagagaugu

SEQ ID NO: 942284 - RNA, 19 nt, Artificial Sequence
  Description of Artificial Sequence: Synthetic oligonucleotide
  Sense strand starting at position 3571 of SEQ ID NO: 913631
agauuacaugguuguuaau

SEQ ID NO: 942285 - RNA, 19 nt, Artificial Sequence
  Description of Artificial Sequence: Synthetic oligonucleotide
  Antisense strand to SEQ ID NO: 942284
auuaacaaccauguaaucu

SEQ ID NO: 942286 - RNA, 19 nt, Artificial Sequence
  Description of Artificial Sequence: Synthetic oligonucleotide
  Sense strand starting at position 1139 of SEQ ID NO: 913631
uagugugcacuccaugaaa

SEQ ID NO: 942287 - RNA, 19 nt, Artificial Sequence
  Description of Artificial Sequence: Synthetic oligonucleotide
  Antisense strand to SEQ ID NO: 942286
uuucauggagugcacacua

SEQ ID NO: 942288 - RNA, 19 nt, Artificial Sequence
  Description of Artificial Sequence: Synthetic oligonucleotide
  Sense strand starting at position 1450 of SEQ ID NO: 913631
cagagaaaggcaugcaagu

SEQ ID NO: 942289 - RNA, 19 nt, Artificial Sequence
  Description of Artificial Sequence: Synthetic oligonucleotide
  Antisense strand to SEQ ID NO: 942288
acuugcaugccuuucucug

SEQ ID NO: 942290 - RNA, 19 nt, Artificial Sequence
  Description of Artificial Sequence: Synthetic oligonucleotide
  Sense strand starting at position 442 of SEQ ID NO: 913631
ucaccaagucauugugaua

SEQ ID NO: 942291 - RNA, 19 nt, Artificial Sequence
  Description of Artificial Sequence: Synthetic oligonucleotide
  Antisense strand to SEQ ID NO: 942290
uaucacaaugacuugguga

SEQ ID NO: 942292 - RNA, 19 nt, Artificial Sequence
  Description of Artificial Sequence: Synthetic oligonucleotide
  Sense strand starting at position 3568 of SEQ ID NO: 913631
cauagauuacaugguuguu

SEQ ID NO: 942293 - RNA, 19 nt, Artificial Sequence
  Description of Artificial Sequence: Synthetic oligonucleotide
  Antisense strand to SEQ ID NO: 942292
aacaaccauguaaucuaug

SEQ ID NO: 942294 - RNA, 19 nt, Artificial Sequence
  Description of Artificial Sequence: Synthetic oligonucleotide
  Sense strand starting at position 441 of SEQ ID NO: 913631
cucaccaagucauugugau

SEQ ID NO: 942295 - RNA, 19 nt, Artificial Sequence
  Description of Artificial Sequence: Synthetic oligonucleotide
  Antisense strand to SEQ ID NO: 942294
aucacaaugacuuggugag

SEQ ID NO: 942296 - RNA, 19 nt, Artificial Sequence
  Description of Artificial Sequence: Synthetic oligonucleotide
  Sense strand starting at position 3620 of SEQ ID NO: 913631
ccuuguacucauugacuau

SEQ ID NO: 942297 - RNA, 19 nt, Artificial Sequence
  Description of Artificial Sequence: Synthetic oligonucleotide
  Antisense strand to SEQ ID NO: 942296
auagucaaugaguacaagg

SEQ ID NO: 942298 - RNA, 19 nt, Artificial Sequence
  Description of Artificial Sequence: Synthetic oligonucleotide
  Sense strand starting at position 1909 of SEQ ID NO: 913631
cgaggcuggcaaugagaau

SEQ ID NO: 942299 - RNA, 19 nt, Artificial Sequence
  Description of Artificial Sequence: Synthetic oligonucleotide
  Antisense strand to SEQ ID NO: 942298
auucucauugccagccucg

SEQ ID NO: 942300 - RNA, 19 nt, Artificial Sequence
  Description of Artificial Sequence: Synthetic oligonucleotide
  Sense strand starting at position 2696 of SEQ ID NO: 913631
aguccaaaccuauguaagu

SEQ ID NO: 942301 - RNA, 19 nt, Artificial Sequence
  Description of Artificial Sequence: Synthetic oligonucleotide
  Antisense strand to SEQ ID NO: 942300
acuuacauagguuuggacu

SEQ ID NO: 942302 - RNA, 19 nt, Artificial Sequence
  Description of Artificial Sequence: Synthetic oligonucleotide
  Sense strand starting at position 2434 of SEQ ID NO: 913631
acgcuaucccuuugaauaa

SEQ ID NO: 942303 - RNA, 19 nt, Artificial Sequence
  Description of Artificial Sequence: Synthetic oligonucleotide
  Antisense strand to SEQ ID NO: 942302
uuauucaaagggauagcgu

SEQ ID NO: 942304 - RNA, 19 nt, Artificial Sequence
  Description of Artificial Sequence: Synthetic oligonucleotide
  Sense strand starting at position 3250 of SEQ ID NO: 913631
ucauuaagguucuuugcaa

SEQ ID NO: 942305 - RNA, 19 nt, Artificial Sequence
  Description of Artificial Sequence: Synthetic oligonucleotide
  Antisense strand to SEQ ID NO: 942304
uugcaaagaaccuuaauga

SEQ ID NO: 942306 - RNA, 19 nt, Artificial Sequence
  Description of Artificial Sequence: Synthetic oligonucleotide
  Sense strand starting at position 2697 of SEQ ID NO: 913631
guccaaaccuauguaaguu

SEQ ID NO: 942307 - RNA, 19 nt, Artificial Sequence
  Description of Artificial Sequence: Synthetic oligonucleotide
  Antisense strand to SEQ ID NO: 942306
aacuuacauagguuuggac

SEQ ID NO: 942308 - RNA, 19 nt, Artificial Sequence
  Description of Artificial Sequence: Synthetic oligonucleotide
  Sense strand starting at position 3589 of SEQ ID NO: 913631
uuucccauaugguuguuaa

SEQ ID NO: 942309 - RNA, 19 nt, Artificial Sequence
  Description of Artificial Sequence: Synthetic oligonucleotide
  Antisense strand to SEQ ID NO: 942308
uuaacaaccauaugggaaa

SEQ ID NO: 942310 - RNA, 19 nt, Artificial Sequence
  Description of Artificial Sequence: Synthetic oligonucleotide
  Sense strand starting at position 2856 of SEQ ID NO: 913631
ccaguuaauucuccaguug

SEQ ID NO: 942311 - RNA, 19 nt, Artificial Sequence
  Description of Artificial Sequence: Synthetic oligonucleotide
  Antisense strand to SEQ ID NO: 942310
caacuggagaauuaacugg

SEQ ID NO: 942312 - RNA, 19 nt, Artificial Sequence
  Description of Artificial Sequence: Synthetic oligonucleotide
  Sense strand starting at position 894 of SEQ ID NO: 913631
ccauguuugaaggguguua

SEQ ID NO: 942313 - RNA, 19 nt, Artificial Sequence
  Description of Artificial Sequence: Synthetic oligonucleotide
  Antisense strand to SEQ ID NO: 942312
uaacacccuucaaacaugg

SEQ ID NO: 942314 - RNA, 19 nt, Artificial Sequence
  Description of Artificial Sequence: Synthetic oligonucleotide
  Sense strand starting at position 3590 of SEQ ID NO: 913631
uucccauaugguuguuaau

SEQ ID NO: 942315 - RNA, 19 nt, Artificial Sequence
  Description of Artificial Sequence: Synthetic oligonucleotide
  Antisense strand to SEQ ID NO: 942314
auuaacaaccauaugggaa

SEQ ID NO: 942316 - RNA, 19 nt, Artificial Sequence
  Description of Artificial Sequence: Synthetic oligonucleotide
  Sense strand starting at position 1117 of SEQ ID NO: 913631
cuucuauugcuguaaaugu

SEQ ID NO: 942317 - RNA, 19 nt, Artificial Sequence
  Description of Artificial Sequence: Synthetic oligonucleotide
  Antisense strand to SEQ ID NO: 942316
acauuuacagcaauagaag

SEQ ID NO: 942318 - RNA, 19 nt, Artificial Sequence
  Description of Artificial Sequence: Synthetic oligonucleotide
  Sense strand starting at position 3496 of SEQ ID NO: 913631
gagaucuguucuuuguuua

SEQ ID NO: 942319 - RNA, 19 nt, Artificial Sequence
  Description of Artificial Sequence: Synthetic oligonucleotide
  Antisense strand to SEQ ID NO: 942318
uaaacaaagaacagaucuc

SEQ ID NO: 942320 - RNA, 19 nt, Artificial Sequence
  Description of Artificial Sequence: Synthetic oligonucleotide
  Sense strand starting at position 3652 of SEQ ID NO: 913631
aguguuccaguguggagaa

SEQ ID NO: 942321 - RNA, 19 nt, Artificial Sequence
  Description of Artificial Sequence: Synthetic oligonucleotide
  Antisense strand to SEQ ID NO: 942320
uucuccacacuggaacacu

SEQ ID NO: 942322 - RNA, 19 nt, Artificial Sequence
  Description of Artificial Sequence: Synthetic oligonucleotide
  Sense strand starting at position 3600 of SEQ ID NO: 913631
guuguuaauuuccagaaac

SEQ ID NO: 942323 - RNA, 19 nt, Artificial Sequence
  Description of Artificial Sequence: Synthetic oligonucleotide
  Antisense strand to SEQ ID NO: 942322
guuucuggaaauuaacaac

SEQ ID NO: 942324 - RNA, 19 nt, Artificial Sequence
  Description of Artificial Sequence: Synthetic oligonucleotide
  Sense strand starting at position 673 of SEQ ID NO: 913631
gagaaagaaugcuagauga

SEQ ID NO: 942325 - RNA, 19 nt, Artificial Sequence
  Description of Artificial Sequence: Synthetic oligonucleotide
  Antisense strand to SEQ ID NO: 942324
ucaucuagcauucuuucuc

SEQ ID NO: 942326 - RNA, 19 nt, Artificial Sequence
  Description of Artificial Sequence: Synthetic oligonucleotide
  Sense strand starting at position 675 of SEQ ID NO: 913632
ggaaguguaaagcauuaau

SEQ ID NO: 942327 - RNA, 19 nt, Artificial Sequence
  Description of Artificial Sequence: Synthetic oligonucleotide
  Antisense strand to SEQ ID NO: 942326
auuaaugcuuuacacuucc

SEQ ID NO: 942328 - RNA, 19 nt, Artificial Sequence
  Description of Artificial Sequence: Synthetic oligonucleotide
  Sense strand starting at position 2587 of SEQ ID NO: 913632
uuagaaagcugaguaagau

SEQ ID NO: 942329 - RNA, 19 nt, Artificial Sequence
  Description of Artificial Sequence: Synthetic oligonucleotide
  Antisense strand to SEQ ID NO: 942328
aucuuacucagcuuucuaa

SEQ ID NO: 942330 - RNA, 19 nt, Artificial Sequence
  Description of Artificial Sequence: Synthetic oligonucleotide
  Sense strand starting at position 3618 of SEQ ID NO: 913632
ggcuguuauccauaagaca

SEQ ID NO: 942331 - RNA, 19 nt, Artificial Sequence
  Description of Artificial Sequence: Synthetic oligonucleotide
  Antisense strand to SEQ ID NO: 942330
ugucuuauggauaacagcc

SEQ ID NO: 942332 - RNA, 19 nt, Artificial Sequence
  Description of Artificial Sequence: Synthetic oligonucleotide
  Sense strand starting at position 2244 of SEQ ID NO: 913632
gcccuagaaccguaagaga

SEQ ID NO: 942333 - RNA, 19 nt, Artificial Sequence
  Description of Artificial Sequence: Synthetic oligonucleotide
  Antisense strand to SEQ ID NO: 942332
ucucuuacgguucuagggc

SEQ ID NO: 942334 - RNA, 19 nt, Artificial Sequence
  Description of Artificial Sequence: Synthetic oligonucleotide
  Sense strand starting at position 1310 of SEQ ID NO: 913632
gggaucuuuaucuguagaa

SEQ ID NO: 942335 - RNA, 19 nt, Artificial Sequence
  Description of Artificial Sequence: Synthetic oligonucleotide
  Antisense strand to SEQ ID NO: 942334
uucuacagauaaagauccc

SEQ ID NO: 942336 - RNA, 19 nt, Artificial Sequence
  Description of Artificial Sequence: Synthetic oligonucleotide
  Sense strand starting at position 1311 of SEQ ID NO: 913632
ggaucuuuaucuguagaau

SEQ ID NO: 942337 - RNA, 19 nt, Artificial Sequence
  Description of Artificial Sequence: Synthetic oligonucleotide
  Antisense strand to SEQ ID NO: 942336
auucuacagauaaagaucc

SEQ ID NO: 942338 - RNA, 19 nt, Artificial Sequence
  Description of Artificial Sequence: Synthetic oligonucleotide
  Sense strand starting at position 1309 of SEQ ID NO: 913632
ugggaucuuuaucuguaga

SEQ ID NO: 942339 - RNA, 19 nt, Artificial Sequence
  Description of Artificial Sequence: Synthetic oligonucleotide
  Antisense strand to SEQ ID NO: 942338
ucuacagauaaagauccca

SEQ ID NO: 942340 - RNA, 19 nt, Artificial Sequence
  Description of Artificial Sequence: Synthetic oligonucleotide
  Sense strand starting at position 1371 of SEQ ID NO: 913632
gagcaaauguauguaaaua

SEQ ID NO: 942341 - RNA, 19 nt, Artificial Sequence
  Description of Artificial Sequence: Synthetic oligonucleotide
  Antisense strand to SEQ ID NO: 942340
uauuuacauacauuugcuc

SEQ ID NO: 942342 - RNA, 19 nt, Artificial Sequence
  Description of Artificial Sequence: Synthetic oligonucleotide
  Sense strand starting at position 2435 of SEQ ID NO: 913632
ccaaauucugcaugaugac

SEQ ID NO: 942343 - RNA, 19 nt, Artificial Sequence
  Description of Artificial Sequence: Synthetic oligonucleotide
  Antisense strand to SEQ ID NO: 942342
gucaucaugcagaauuugg

SEQ ID NO: 942344 - RNA, 19 nt, Artificial Sequence
  Description of Artificial Sequence: Synthetic oligonucleotide
  Sense strand starting at position 2391 of SEQ ID NO: 913632
agguauuagccugagugau

SEQ ID NO: 942345 - RNA, 19 nt, Artificial Sequence
  Description of Artificial Sequence: Synthetic oligonucleotide
  Antisense strand to SEQ ID NO: 942344
aucacucaggcuaauaccu

SEQ ID NO: 942346 - RNA, 19 nt, Artificial Sequence
  Description of Artificial Sequence: Synthetic oligonucleotide
  Sense strand starting at position 333 of SEQ ID NO: 913632
uuuacagaguuguuaagau

SEQ ID NO: 942347 - RNA, 19 nt, Artificial Sequence
  Description of Artificial Sequence: Synthetic oligonucleotide
  Antisense strand to SEQ ID NO: 942346
aucuuaacaacucuguaaa

SEQ ID NO: 942348 - RNA, 19 nt, Artificial Sequence
  Description of Artificial Sequence: Synthetic oligonucleotide
  Sense strand starting at position 2397 of SEQ ID NO: 913632
uagccugagugaucauaga

SEQ ID NO: 942349 - RNA, 19 nt, Artificial Sequence
  Description of Artificial Sequence: Synthetic oligonucleotide
  Antisense strand to SEQ ID NO: 942348
ucuaugaucacucaggcua

SEQ ID NO: 942350 - RNA, 19 nt, Artificial Sequence
  Description of Artificial Sequence: Synthetic oligonucleotide
  Sense strand starting at position 3078 of SEQ ID NO: 913632
aacugauacccguaugcag

SEQ ID NO: 942351 - RNA, 19 nt, Artificial Sequence
  Description of Artificial Sequence: Synthetic oligonucleotide
  Antisense strand to SEQ ID NO: 942350
cugcauacggguaucaguu

SEQ ID NO: 942352 - RNA, 19 nt, Artificial Sequence
  Description of Artificial Sequence: Synthetic oligonucleotide
  Sense strand starting at position 1308 of SEQ ID NO: 913632
cugggaucuuuaucuguag

SEQ ID NO: 942353 - RNA, 19 nt, Artificial Sequence
  Description of Artificial Sequence: Synthetic oligonucleotide
  Antisense strand to SEQ ID NO: 942352
cuacagauaaagaucccag

SEQ ID NO: 942354 - RNA, 19 nt, Artificial Sequence
  Description of Artificial Sequence: Synthetic oligonucleotide
  Sense strand starting at position 3452 of SEQ ID NO: 913632
gcagucuaauaauugauua

SEQ ID NO: 942355 - RNA, 19 nt, Artificial Sequence
  Description of Artificial Sequence: Synthetic oligonucleotide
  Antisense strand to SEQ ID NO: 942354
uaaucaauuauuagacugc

SEQ ID NO: 942356 - RNA, 19 nt, Artificial Sequence
  Description of Artificial Sequence: Synthetic oligonucleotide
  Sense strand starting at position 1370 of SEQ ID NO: 913632
ugagcaaauguauguaaau

SEQ ID NO: 942357 - RNA, 19 nt, Artificial Sequence
  Description of Artificial Sequence: Synthetic oligonucleotide
  Antisense strand to SEQ ID NO: 942356
auuuacauacauuugcuca

SEQ ID NO: 942358 - RNA, 19 nt, Artificial Sequence
  Description of Artificial Sequence: Synthetic oligonucleotide
  Sense strand starting at position 2987 of SEQ ID NO: 913632
uccauaugucugcagugaa

SEQ ID NO: 942359 - RNA, 19 nt, Artificial Sequence
  Description of Artificial Sequence: Synthetic oligonucleotide
  Antisense strand to SEQ ID NO: 942358
uucacugcagacauaugga

SEQ ID NO: 942360 - RNA, 19 nt, Artificial Sequence
  Description of Artificial Sequence: Synthetic oligonucleotide
  Sense strand starting at position 2377 of SEQ ID NO: 913632
ucauauguacagugaggua

SEQ ID NO: 942361 - RNA, 19 nt, Artificial Sequence
  Description of Artificial Sequence: Synthetic oligonucleotide
  Antisense strand to SEQ ID NO: 942360
uaccucacuguacauauga

SEQ ID NO: 942362 - RNA, 19 nt, Artificial Sequence
  Description of Artificial Sequence: Synthetic oligonucleotide
  Sense strand starting at position 2517 of SEQ ID NO: 913632
aaaugaugauuugguuaga

SEQ ID NO: 942363 - RNA, 19 nt, Artificial Sequence
  Description of Artificial Sequence: Synthetic oligonucleotide
  Antisense strand to SEQ ID NO: 942362
ucuaaccaaaucaucauuu

SEQ ID NO: 942364 - RNA, 19 nt, Artificial Sequence
  Description of Artificial Sequence: Synthetic oligonucleotide
  Sense strand starting at position 2574 of SEQ ID NO: 913632
ccuuacgagucucuuagaa

SEQ ID NO: 942365 - RNA, 19 nt, Artificial Sequence
  Description of Artificial Sequence: Synthetic oligonucleotide
  Antisense strand to SEQ ID NO: 942364
uucuaagagacucguaagg

SEQ ID NO: 942366 - RNA, 19 nt, Artificial Sequence
  Description of Artificial Sequence: Synthetic oligonucleotide
  Sense strand starting at position 3652 of SEQ ID NO: 913632
uggcaaggauuuggauaaa

SEQ ID NO: 942367 - RNA, 19 nt, Artificial Sequence
  Description of Artificial Sequence: Synthetic oligonucleotide
  Antisense strand to SEQ ID NO: 942366
uuuauccaaauccuugcca

SEQ ID NO: 942368 - RNA, 19 nt, Artificial Sequence
  Description of Artificial Sequence: Synthetic oligonucleotide
  Sense strand starting at position 1438 of SEQ ID NO: 913632
auuaauaacuucucgagcu

SEQ ID NO: 942369 - RNA, 19 nt, Artificial Sequence
  Description of Artificial Sequence: Synthetic oligonucleotide
  Antisense strand to SEQ ID NO: 942368
agcucgagaaguuauuaau

SEQ ID NO: 942370 - RNA, 19 nt, Artificial Sequence
  Description of Artificial Sequence: Synthetic oligonucleotide
  Sense strand starting at position 2494 of SEQ ID NO: 913632
cugucccucuggguugaaa

SEQ ID NO: 942371 - RNA, 19 nt, Artificial Sequence
  Description of Artificial Sequence: Synthetic oligonucleotide
  Antisense strand to SEQ ID NO: 942370
uuucaacccagagggacag

SEQ ID NO: 942372 - RNA, 19 nt, Artificial Sequence
  Description of Artificial Sequence: Synthetic oligonucleotide
  Sense strand starting at position 1421 of SEQ ID NO: 913632
ggagcccucaguuagcuau

SEQ ID NO: 942373 - RNA, 19 nt, Artificial Sequence
  Description of Artificial Sequence: Synthetic oligonucleotide
  Antisense strand to SEQ ID NO: 942372
auagcuaacugagggcucc

SEQ ID NO: 942374 - RNA, 19 nt, Artificial Sequence
  Description of Artificial Sequence: Synthetic oligonucleotide
  Sense strand starting at position 1317 of SEQ ID NO: 913632
uuaucuguagaaugugcaa

SEQ ID NO: 942375 - RNA, 19 nt, Artificial Sequence
  Description of Artificial Sequence: Synthetic oligonucleotide
  Antisense strand to SEQ ID NO: 942374
uugcacauucuacagauaa

SEQ ID NO: 942376 - RNA, 19 nt, Artificial Sequence
  Description of Artificial Sequence: Synthetic oligonucleotide
  Sense strand starting at position 3080 of SEQ ID NO: 913632
cugauacccguaugcagaa

SEQ ID NO: 942377 - RNA, 19 nt, Artificial Sequence
  Description of Artificial Sequence: Synthetic oligonucleotide
  Antisense strand to SEQ ID NO: 942376
uucugcauacggguaucag

SEQ ID NO: 942378 - RNA, 19 nt, Artificial Sequence
  Description of Artificial Sequence: Synthetic oligonucleotide
  Sense strand starting at position 2393 of SEQ ID NO: 913632
guauuagccugagugauca

SEQ ID NO: 942379 - RNA, 19 nt, Artificial Sequence
  Description of Artificial Sequence: Synthetic oligonucleotide
  Antisense strand to SEQ ID NO: 942378
ugaucacucaggcuaauac

SEQ ID NO: 942380 - RNA, 19 nt, Artificial Sequence
  Description of Artificial Sequence: Synthetic oligonucleotide
  Sense strand starting at position 40 of SEQ ID NO: 913632
auuaucauguaugugcaua

SEQ ID NO: 942381 - RNA, 19 nt, Artificial Sequence
  Description of Artificial Sequence: Synthetic oligonucleotide
  Antisense strand to SEQ ID NO: 942380
uaugcacauacaugauaau

SEQ ID NO: 942382 - RNA, 19 nt, Artificial Sequence
  Description of Artificial Sequence: Synthetic oligonucleotide
  Sense strand starting at position 2541 of SEQ ID NO: 913632
gugagugggugucuggaua

SEQ ID NO: 942383 - RNA, 19 nt, Artificial Sequence
  Description of Artificial Sequence: Synthetic oligonucleotide
  Antisense strand to SEQ ID NO: 942382
uauccagacacccacucac

SEQ ID NO: 942384 - RNA, 19 nt, Artificial Sequence
  Description of Artificial Sequence: Synthetic oligonucleotide
  Sense strand starting at position 2986 of SEQ ID NO: 913632
auccauaugucugcaguga

SEQ ID NO: 942385 - RNA, 19 nt, Artificial Sequence
  Description of Artificial Sequence: Synthetic oligonucleotide
  Antisense strand to SEQ ID NO: 942384
ucacugcagacauauggau

SEQ ID NO: 942386 - RNA, 19 nt, Artificial Sequence
  Description of Artificial Sequence: Synthetic oligonucleotide
  Sense strand starting at position 1279 of SEQ ID NO: 913632
ugaucuuuggcaugcuaca

SEQ ID NO: 942387 - RNA, 19 nt, Artificial Sequence
  Description of Artificial Sequence: Synthetic oligonucleotide
  Antisense strand to SEQ ID NO: 942386
uguagcaugccaaagauca

SEQ ID NO: 942388 - RNA, 19 nt, Artificial Sequence
  Description of Artificial Sequence: Synthetic oligonucleotide
  Sense strand starting at position 2990 of SEQ ID NO: 913632
auaugucugcagugaauuc

SEQ ID NO: 942389 - RNA, 19 nt, Artificial Sequence
  Description of Artificial Sequence: Synthetic oligonucleotide
  Antisense strand to SEQ ID NO: 942388
gaauucacugcagacauau

SEQ ID NO: 942390 - RNA, 19 nt, Artificial Sequence
  Description of Artificial Sequence: Synthetic oligonucleotide
  Sense strand starting at position 1352 of SEQ ID NO: 913632
ugauaucauugauaggaau

SEQ ID NO: 942391 - RNA, 19 nt, Artificial Sequence
  Description of Artificial Sequence: Synthetic oligonucleotide
  Antisense strand to SEQ ID NO: 942390
auuccuaucaaugauauca

SEQ ID NO: 942392 - RNA, 19 nt, Artificial Sequence
  Description of Artificial Sequence: Synthetic oligonucleotide
  Sense strand starting at position 1424 of SEQ ID NO: 913632
gcccucaguuagcuauuaa

SEQ ID NO: 942393 - RNA, 19 nt, Artificial Sequence
  Description of Artificial Sequence: Synthetic oligonucleotide
  Antisense strand to SEQ ID NO: 942392
uuaauagcuaacugagggc

SEQ ID NO: 942394 - RNA, 19 nt, Artificial Sequence
  Description of Artificial Sequence: Synthetic oligonucleotide
  Sense strand starting at position 3847 of SEQ ID NO: 913632
gcacuauucucaguagcca

SEQ ID NO: 942395 - RNA, 19 nt, Artificial Sequence
  Description of Artificial Sequence: Synthetic oligonucleotide
  Antisense strand to SEQ ID NO: 942394
uggcuacugagaauagugc

SEQ ID NO: 942396 - RNA, 19 nt, Artificial Sequence
  Description of Artificial Sequence: Synthetic oligonucleotide
  Sense strand starting at position 1423 of SEQ ID NO: 913632
agcccucaguuagcuauua

SEQ ID NO: 942397 - RNA, 19 nt, Artificial Sequence
  Description of Artificial Sequence: Synthetic oligonucleotide
  Antisense strand to SEQ ID NO: 942396
uaauagcuaacugagggcu

SEQ ID NO: 942398 - RNA, 19 nt, Artificial Sequence
  Description of Artificial Sequence: Synthetic oligonucleotide
  Sense strand starting at position 2596 of SEQ ID NO: 913632
ugaguaagauuggaaucau

SEQ ID NO: 942399 - RNA, 19 nt, Artificial Sequence
  Description of Artificial Sequence: Synthetic oligonucleotide
  Antisense strand to SEQ ID NO: 942398
augauuccaaucuuacuca

SEQ ID NO: 942400 - RNA, 19 nt, Artificial Sequence
  Description of Artificial Sequence: Synthetic oligonucleotide
  Sense strand starting at position 1607 of SEQ ID NO: 913632
aggagagaauuccgaagaa

SEQ ID NO: 942401 - RNA, 19 nt, Artificial Sequence
  Description of Artificial Sequence: Synthetic oligonucleotide
  Antisense strand to SEQ ID NO: 942400
uucuucggaauucucuccu

SEQ ID NO: 942402 - RNA, 19 nt, Artificial Sequence
  Description of Artificial Sequence: Synthetic oligonucleotide
  Sense strand starting at position 1383 of SEQ ID NO: 913632
guaaauagcuuugcacagu

SEQ ID NO: 942403 - RNA, 19 nt, Artificial Sequence
  Description of Artificial Sequence: Synthetic oligonucleotide
  Antisense strand to SEQ ID NO: 942402
acugugcaaagcuauuuac

SEQ ID NO: 942404 - RNA, 19 nt, Artificial Sequence
  Description of Artificial Sequence: Synthetic oligonucleotide
  Sense strand starting at position 2247 of SEQ ID NO: 913632
cuagaaccguaagagaaau

SEQ ID NO: 942405 - RNA, 19 nt, Artificial Sequence
  Description of Artificial Sequence: Synthetic oligonucleotide
  Antisense strand to SEQ ID NO: 942404
auuucucuuacgguucuag

SEQ ID NO: 942406 - RNA, 19 nt, Artificial Sequence
  Description of Artificial Sequence: Synthetic oligonucleotide
  Sense strand starting at position 2653 of SEQ ID NO: 913633
augccuaaggcagauaaau

SEQ ID NO: 942407 - RNA, 19 nt, Artificial Sequence
  Description of Artificial Sequence: Synthetic oligonucleotide
  Antisense strand to SEQ ID NO: 942406
auuuaucugccuuaggcau

SEQ ID NO: 942408 - RNA, 19 nt, Artificial Sequence
  Description of Artificial Sequence: Synthetic oligonucleotide
  Sense strand starting at position 723 of SEQ ID NO: 913633
guucucccagaauaaagua

SEQ ID NO: 942409 - RNA, 19 nt, Artificial Sequence
  Description of Artificial Sequence: Synthetic oligonucleotide
  Antisense strand to SEQ ID NO: 942408
uacuuuauucugggagaac

SEQ ID NO: 942410 - RNA, 19 nt, Artificial Sequence
  Description of Artificial Sequence: Synthetic oligonucleotide
  Sense strand starting at position 2763 of SEQ ID NO: 913633
aaaguuuagguugaguuaa

SEQ ID NO: 942411 - RNA, 19 nt, Artificial Sequence
  Description of Artificial Sequence: Synthetic oligonucleotide
  Antisense strand to SEQ ID NO: 942410
uuaacucaaccuaaacuuu

SEQ ID NO: 942412 - RNA, 19 nt, Artificial Sequence
  Description of Artificial Sequence: Synthetic oligonucleotide
  Sense strand starting at position 720 of SEQ ID NO: 913633
gcaguucucccagaauaaa

SEQ ID NO: 942413 - RNA, 19 nt, Artificial Sequence
  Description of Artificial Sequence: Synthetic oligonucleotide
  Antisense strand to SEQ ID NO: 942412
uuuauucugggagaacugc

SEQ ID NO: 942414 - RNA, 19 nt, Artificial Sequence
  Description of Artificial Sequence: Synthetic oligonucleotide
  Sense strand starting at position 873 of SEQ ID NO: 913633
aguacaauugcaggauaaa

SEQ ID NO: 942415 - RNA, 19 nt, Artificial Sequence
  Description of Artificial Sequence: Synthetic oligonucleotide
  Antisense strand to SEQ ID NO: 942414
uuuauccugcaauuguacu

SEQ ID NO: 942416 - RNA, 19 nt, Artificial Sequence
  Description of Artificial Sequence: Synthetic oligonucleotide
  Sense strand starting at position 2310 of SEQ ID NO: 913633
uuggaagacucguuaagaa

SEQ ID NO: 942417 - RNA, 19 nt, Artificial Sequence
  Description of Artificial Sequence: Synthetic oligonucleotide
  Antisense strand to SEQ ID NO: 942416
uucuuaacgagucuuccaa

SEQ ID NO: 942418 - RNA, 19 nt, Artificial Sequence
  Description of Artificial Sequence: Synthetic oligonucleotide
  Sense strand starting at position 3647 of SEQ ID NO: 913633
cugaguugugguaguggua

SEQ ID NO: 942419 - RNA, 19 nt, Artificial Sequence
  Description of Artificial Sequence: Synthetic oligonucleotide
  Antisense strand to SEQ ID NO: 942418
uaccacuaccacaacucag

SEQ ID NO: 942420 - RNA, 19 nt, Artificial Sequence
  Description of Artificial Sequence: Synthetic oligonucleotide
  Sense strand starting at position 2287 of SEQ ID NO: 913633
agguucuuccuguaaggac

SEQ ID NO: 942421 - RNA, 19 nt, Artificial Sequence
  Description of Artificial Sequence: Synthetic oligonucleotide
  Antisense strand to SEQ ID NO: 942420
guccuuacaggaagaaccu

SEQ ID NO: 942422 - RNA, 19 nt, Artificial Sequence
  Description of Artificial Sequence: Synthetic oligonucleotide
  Sense strand starting at position 812 of SEQ ID NO: 913633
auuagucuacuaggauacu

SEQ ID NO: 942423 - RNA, 19 nt, Artificial Sequence
  Description of Artificial Sequence: Synthetic oligonucleotide
  Antisense strand to SEQ ID NO: 942422
aguauccuaguagacuaau

SEQ ID NO: 942424 - RNA, 19 nt, Artificial Sequence
  Description of Artificial Sequence: Synthetic oligonucleotide
  Sense strand starting at position 759 of SEQ ID NO: 913633
gcauucuuacuagaacagu

SEQ ID NO: 942425 - RNA, 19 nt, Artificial Sequence
  Description of Artificial Sequence: Synthetic oligonucleotide
  Antisense strand to SEQ ID NO: 942424
acuguucuaguaagaaugc

SEQ ID NO: 942426 - RNA, 19 nt, Artificial Sequence
  Description of Artificial Sequence: Synthetic oligonucleotide
  Sense strand starting at position 686 of SEQ ID NO: 913633
auuguuucugcacagaaug

SEQ ID NO: 942427 - RNA, 19 nt, Artificial Sequence
  Description of Artificial Sequence: Synthetic oligonucleotide
  Antisense strand to SEQ ID NO: 942426
cauucugugcagaaacaau

SEQ ID NO: 942428 - RNA, 19 nt, Artificial Sequence
  Description of Artificial Sequence: Synthetic oligonucleotide
  Sense strand starting at position 2541 of SEQ ID NO: 913633
ugugauaugguugauagug

SEQ ID NO: 942429 - RNA, 19 nt, Artificial Sequence
  Description of Artificial Sequence: Synthetic oligonucleotide
  Antisense strand to SEQ ID NO: 942428
cacuaucaaccauaucaca

SEQ ID NO: 942430 - RNA, 19 nt, Artificial Sequence
  Description of Artificial Sequence: Synthetic oligonucleotide
  Sense strand starting at position 2553 of SEQ ID NO: 913633
gauagugagguguagugau

SEQ ID NO: 942431 - RNA, 19 nt, Artificial Sequence
  Description of Artificial Sequence: Synthetic oligonucleotide
  Antisense strand to SEQ ID NO: 942430
aucacuacaccucacuauc

SEQ ID NO: 942432 - RNA, 19 nt, Artificial Sequence
  Description of Artificial Sequence: Synthetic oligonucleotide
  Sense strand starting at position 3705 of SEQ ID NO: 913633
ggagaucuuaacugggcuu

SEQ ID NO: 942433 - RNA, 19 nt, Artificial Sequence
  Description of Artificial Sequence: Synthetic oligonucleotide
  Antisense strand to SEQ ID NO: 942432
aagcccaguuaagaucucc

SEQ ID NO: 942434 - RNA, 19 nt, Artificial Sequence
  Description of Artificial Sequence: Synthetic oligonucleotide
  Sense strand starting at position 2215 of SEQ ID NO: 913633
guuucuccaguggaaguaa

SEQ ID NO: 942435 - RNA, 19 nt, Artificial Sequence
  Description of Artificial Sequence: Synthetic oligonucleotide
  Antisense strand to SEQ ID NO: 942434
uuacuuccacuggagaaac

SEQ ID NO: 942436 - RNA, 19 nt, Artificial Sequence
  Description of Artificial Sequence: Synthetic oligonucleotide
  Sense strand starting at position 3918 of SEQ ID NO: 913633
guuuaagaugguuagucau

SEQ ID NO: 942437 - RNA, 19 nt, Artificial Sequence
  Description of Artificial Sequence: Synthetic oligonucleotide
  Antisense strand to SEQ ID NO: 942436
augacuaaccaucuuaaac

SEQ ID NO: 942438 - RNA, 19 nt, Artificial Sequence
  Description of Artificial Sequence: Synthetic oligonucleotide
  Sense strand starting at position 396 of SEQ ID NO: 913633
ucauuucccuccguguaau

SEQ ID NO: 942439 - RNA, 19 nt, Artificial Sequence
  Description of Artificial Sequence: Synthetic oligonucleotide
  Antisense strand to SEQ ID NO: 942438
auuacacggagggaaauga

SEQ ID NO: 942440 - RNA, 19 nt, Artificial Sequence
  Description of Artificial Sequence: Synthetic oligonucleotide
  Sense strand starting at position 3921 of SEQ ID NO: 913633
uaagaugguuagucauauu

SEQ ID NO: 942441 - RNA, 19 nt, Artificial Sequence
  Description of Artificial Sequence: Synthetic oligonucleotide
  Antisense strand to SEQ ID NO: 942440
aauaugacuaaccaucuua

SEQ ID NO: 942442 - RNA, 19 nt, Artificial Sequence
  Description of Artificial Sequence: Synthetic oligonucleotide
  Sense strand starting at position 3920 of SEQ ID NO: 913633
uuaagaugguuagucauau

SEQ ID NO: 942443 - RNA, 19 nt, Artificial Sequence
  Description of Artificial Sequence: Synthetic oligonucleotide
  Antisense strand to SEQ ID NO: 942442
auaugacuaaccaucuuaa

SEQ ID NO: 942444 - RNA, 19 nt, Artificial Sequence
  Description of Artificial Sequence: Synthetic oligonucleotide
  Sense strand starting at position 2729 of SEQ ID NO: 913633
uuagucaagccuugaagaa

SEQ ID NO: 942445 - RNA, 19 nt, Artificial Sequence
  Description of Artificial Sequence: Synthetic oligonucleotide
  Antisense strand to SEQ ID NO: 942444
uucuucaaggcuugacuaa

SEQ ID NO: 942446 - RNA, 19 nt, Artificial Sequence
  Description of Artificial Sequence: Synthetic oligonucleotide
  Sense strand starting at position 3769 of SEQ ID NO: 913633
ggcagauaaauacgaccuu

SEQ ID NO: 942447 - RNA, 19 nt, Artificial Sequence
  Description of Artificial Sequence: Synthetic oligonucleotide
  Antisense strand to SEQ ID NO: 942446
aaggucguauuuaucugcc

SEQ ID NO: 942448 - RNA, 19 nt, Artificial Sequence
  Description of Artificial Sequence: Synthetic oligonucleotide
  Sense strand starting at position 2646 of SEQ ID NO: 913633
ccaguaaaugccuaaggca

SEQ ID NO: 942449 - RNA, 19 nt, Artificial Sequence
  Description of Artificial Sequence: Synthetic oligonucleotide
  Antisense strand to SEQ ID NO: 942448
ugccuuaggcauuuacugg

SEQ ID NO: 942450 - RNA, 19 nt, Artificial Sequence
  Description of Artificial Sequence: Synthetic oligonucleotide
  Sense strand starting at position 3761 of SEQ ID NO: 913633
ugcuccuuggcagauaaau

SEQ ID NO: 942451 - RNA, 19 nt, Artificial Sequence
  Description of Artificial Sequence: Synthetic oligonucleotide
  Antisense strand to SEQ ID NO: 942450
auuuaucugccaaggagca

SEQ ID NO: 942452 - RNA, 19 nt, Artificial Sequence
  Description of Artificial Sequence: Synthetic oligonucleotide
  Sense strand starting at position 3650 of SEQ ID NO: 913633
aguugugguagugguauuu

SEQ ID NO: 942453 - RNA, 19 nt, Artificial Sequence
  Description of Artificial Sequence: Synthetic oligonucleotide
  Antisense strand to SEQ ID NO: 942452
aaauaccacuaccacaacu

SEQ ID NO: 942454 - RNA, 19 nt, Artificial Sequence
  Description of Artificial Sequence: Synthetic oligonucleotide
  Sense strand starting at position 829 of SEQ ID NO: 913633
cuugaauacugucucuaug

SEQ ID NO: 942455 - RNA, 19 nt, Artificial Sequence
  Description of Artificial Sequence: Synthetic oligonucleotide
  Antisense strand to SEQ ID NO: 942454
cauagagacaguauucaag

SEQ ID NO: 942456 - RNA, 19 nt, Artificial Sequence
  Description of Artificial Sequence: Synthetic oligonucleotide
  Sense strand starting at position 2715 of SEQ ID NO: 913633
ucccuaacaguguauuagu

SEQ ID NO: 942457 - RNA, 19 nt, Artificial Sequence
  Description of Artificial Sequence: Synthetic oligonucleotide
  Antisense strand to SEQ ID NO: 942456
acuaauacacuguuaggga

SEQ ID NO: 942458 - RNA, 19 nt, Artificial Sequence
  Description of Artificial Sequence: Synthetic oligonucleotide
  Sense strand starting at position 2765 of SEQ ID NO: 913633
aguuuagguugaguuaaua

SEQ ID NO: 942459 - RNA, 19 nt, Artificial Sequence
  Description of Artificial Sequence: Synthetic oligonucleotide
  Antisense strand to SEQ ID NO: 942458
uauuaacucaaccuaaacu

SEQ ID NO: 942460 - RNA, 19 nt, Artificial Sequence
  Description of Artificial Sequence: Synthetic oligonucleotide
  Sense strand starting at position 3917 of SEQ ID NO: 913633
aguuuaagaugguuaguca

SEQ ID NO: 942461 - RNA, 19 nt, Artificial Sequence
  Description of Artificial Sequence: Synthetic oligonucleotide
  Antisense strand to SEQ ID NO: 942460
ugacuaaccaucuuaaacu

SEQ ID NO: 942462 - RNA, 19 nt, Artificial Sequence
  Description of Artificial Sequence: Synthetic oligonucleotide
  Sense strand starting at position 395 of SEQ ID NO: 913633
gucauuucccuccguguaa

SEQ ID NO: 942463 - RNA, 19 nt, Artificial Sequence
  Description of Artificial Sequence: Synthetic oligonucleotide
  Antisense strand to SEQ ID NO: 942462
uuacacggagggaaaugac

SEQ ID NO: 942464 - RNA, 19 nt, Artificial Sequence
  Description of Artificial Sequence: Synthetic oligonucleotide
  Sense strand starting at position 2762 of SEQ ID NO: 913633
uaaaguuuagguugaguua

SEQ ID NO: 942465 - RNA, 19 nt, Artificial Sequence
  Description of Artificial Sequence: Synthetic oligonucleotide
  Antisense strand to SEQ ID NO: 942464
uaacucaaccuaaacuuua

SEQ ID NO: 942466 - RNA, 19 nt, Artificial Sequence
  Description of Artificial Sequence: Synthetic oligonucleotide
  Sense strand starting at position 3915 of SEQ ID NO: 913633
acaguuuaagaugguuagu

SEQ ID NO: 942467 - RNA, 19 nt, Artificial Sequence
  Description of Artificial Sequence: Synthetic oligonucleotide
  Antisense strand to SEQ ID NO: 942466
acuaaccaucuuaaacugu

SEQ ID NO: 942468 - RNA, 19 nt, Artificial Sequence
  Description of Artificial Sequence: Synthetic oligonucleotide
  Sense strand starting at position 2713 of SEQ ID NO: 913633
acucccuaacaguguauua

SEQ ID NO: 942469 - RNA, 19 nt, Artificial Sequence
  Description of Artificial Sequence: Synthetic oligonucleotide
  Antisense strand to SEQ ID NO: 942468
uaauacacuguuagggagu

SEQ ID NO: 942470 - RNA, 19 nt, Artificial Sequence
  Description of Artificial Sequence: Synthetic oligonucleotide
  Sense strand starting at position 716 of SEQ ID NO: 913633
uugggcaguucucccagaa

SEQ ID NO: 942471 - RNA, 19 nt, Artificial Sequence
  Description of Artificial Sequence: Synthetic oligonucleotide
  Antisense strand to SEQ ID NO: 942470
uucugggagaacugcccaa

SEQ ID NO: 942472 - RNA, 19 nt, Artificial Sequence
  Description of Artificial Sequence: Synthetic oligonucleotide
  Sense strand starting at position 467 of SEQ ID NO: 913633
gagcuugcccuagagcuaa

SEQ ID NO: 942473 - RNA, 19 nt, Artificial Sequence
  Description of Artificial Sequence: Synthetic oligonucleotide
  Antisense strand to SEQ ID NO: 942472
uuagcucuagggcaagcuc

SEQ ID NO: 942474 - RNA, 19 nt, Artificial Sequence
  Description of Artificial Sequence: Synthetic oligonucleotide
  Sense strand starting at position 892 of SEQ ID NO: 913633
cgaagaguguccaggaaga

SEQ ID NO: 942475 - RNA, 19 nt, Artificial Sequence
  Description of Artificial Sequence: Synthetic oligonucleotide
  Antisense strand to SEQ ID NO: 942474
ucuuccuggacacucuucg

SEQ ID NO: 942476 - RNA, 19 nt, Artificial Sequence
  Description of Artificial Sequence: Synthetic oligonucleotide
  Sense strand starting at position 2401 of SEQ ID NO: 913633
ugaaauggcuuugcuaacu

SEQ ID NO: 942477 - RNA, 19 nt, Artificial Sequence
  Description of Artificial Sequence: Synthetic oligonucleotide
  Antisense strand to SEQ ID NO: 942476
aguuagcaaagccauuuca

SEQ ID NO: 942478 - RNA, 19 nt, Artificial Sequence
  Description of Artificial Sequence: Synthetic oligonucleotide
  Sense strand starting at position 3634 of SEQ ID NO: 913633
acuuauacuuguucugagu

SEQ ID NO: 942479 - RNA, 19 nt, Artificial Sequence
  Description of Artificial Sequence: Synthetic oligonucleotide
  Antisense strand to SEQ ID NO: 942478
acucagaacaaguauaagu

SEQ ID NO: 942480 - RNA, 19 nt, Artificial Sequence
  Description of Artificial Sequence: Synthetic oligonucleotide
  Sense strand starting at position 2760 of SEQ ID NO: 913633
gguaaaguuuagguugagu

SEQ ID NO: 942481 - RNA, 19 nt, Artificial Sequence
  Description of Artificial Sequence: Synthetic oligonucleotide
  Antisense strand to SEQ ID NO: 942480
acucaaccuaaacuuuacc

SEQ ID NO: 942482 - RNA, 19 nt, Artificial Sequence
  Description of Artificial Sequence: Synthetic oligonucleotide
  Sense strand starting at position 2540 of SEQ ID NO: 913633
uugugauaugguugauagu

SEQ ID NO: 942483 - RNA, 19 nt, Artificial Sequence
  Description of Artificial Sequence: Synthetic oligonucleotide
  Antisense strand to SEQ ID NO: 942482
acuaucaaccauaucacaa

SEQ ID NO: 942484 - RNA, 19 nt, Artificial Sequence
  Description of Artificial Sequence: Synthetic oligonucleotide
  Sense strand starting at position 2796 of SEQ ID NO: 913633
auauuuguauccugaagaa

SEQ ID NO: 942485 - RNA, 19 nt, Artificial Sequence
  Description of Artificial Sequence: Synthetic oligonucleotide
  Antisense strand to SEQ ID NO: 942484
uucuucaggauacaaauau

SEQ ID NO: 942486 - RNA, 19 nt, Artificial Sequence
  Description of Artificial Sequence: Synthetic oligonucleotide
  Sense strand starting at position 372 of SEQ ID NO: 913634
ggaucaaugccacaucuac

SEQ ID NO: 942487 - RNA, 19 nt, Artificial Sequence
  Description of Artificial Sequence: Synthetic oligonucleotide
  Antisense strand to SEQ ID NO: 942486
guagauguggcauugaucc

SEQ ID NO: 942488 - RNA, 19 nt, Artificial Sequence
  Description of Artificial Sequence: Synthetic oligonucleotide
  Sense strand starting at position 3232 of SEQ ID NO: 913634
gaaacaucaccuggucaga

SEQ ID NO: 942489 - RNA, 19 nt, Artificial Sequence
  Description of Artificial Sequence: Synthetic oligonucleotide
  Antisense strand to SEQ ID NO: 942488
ucugaccaggugauguuuc

SEQ ID NO: 942490 - RNA, 19 nt, Artificial Sequence
  Description of Artificial Sequence: Synthetic oligonucleotide
  Sense strand starting at position 1327 of SEQ ID NO: 913634
gaaagagaggcauggaguu

SEQ ID NO: 942491 - RNA, 19 nt, Artificial Sequence
  Description of Artificial Sequence: Synthetic oligonucleotide
  Antisense strand to SEQ ID NO: 942490
aacuccaugccucucuuuc

SEQ ID NO: 942492 - RNA, 19 nt, Artificial Sequence
  Description of Artificial Sequence: Synthetic oligonucleotide
  Sense strand starting at position 807 of SEQ ID NO: 913634
gucauaagagaaugugaac

SEQ ID NO: 942493 - RNA, 19 nt, Artificial Sequence
  Description of Artificial Sequence: Synthetic oligonucleotide
  Antisense strand to SEQ ID NO: 942492
guucacauucucuuaugac

SEQ ID NO: 942494 - RNA, 19 nt, Artificial Sequence
  Description of Artificial Sequence: Synthetic oligonucleotide
  Sense strand starting at position 2467 of SEQ ID NO: 913634
uuuagaucacauggguaag

SEQ ID NO: 942495 - RNA, 19 nt, Artificial Sequence
  Description of Artificial Sequence: Synthetic oligonucleotide
  Antisense strand to SEQ ID NO: 942494
cuuacccaugugaucuaaa

SEQ ID NO: 942496 - RNA, 19 nt, Artificial Sequence
  Description of Artificial Sequence: Synthetic oligonucleotide
  Sense strand starting at position 504 of SEQ ID NO: 913634
gggugugguaaugauugaa

SEQ ID NO: 942497 - RNA, 19 nt, Artificial Sequence
  Description of Artificial Sequence: Synthetic oligonucleotide
  Antisense strand to SEQ ID NO: 942496
uucaaucauuaccacaccc

SEQ ID NO: 942498 - RNA, 19 nt, Artificial Sequence
  Description of Artificial Sequence: Synthetic oligonucleotide
  Sense strand starting at position 3519 of SEQ ID NO: 913634
ugaguaaauagcugaugaa

SEQ ID NO: 942499 - RNA, 19 nt, Artificial Sequence
  Description of Artificial Sequence: Synthetic oligonucleotide
  Antisense strand to SEQ ID NO: 942498
uucaucagcuauuuacuca

SEQ ID NO: 942500 - RNA, 19 nt, Artificial Sequence
  Description of Artificial Sequence: Synthetic oligonucleotide
  Sense strand starting at position 507 of SEQ ID NO: 913634
ugugguaaugauugaauaa

SEQ ID NO: 942501 - RNA, 19 nt, Artificial Sequence
  Description of Artificial Sequence: Synthetic oligonucleotide
  Antisense strand to SEQ ID NO: 942500
uuauucaaucauuaccaca

SEQ ID NO: 942502 - RNA, 19 nt, Artificial Sequence
  Description of Artificial Sequence: Synthetic oligonucleotide
  Sense strand starting at position 797 of SEQ ID NO: 913634
aggccauguagucauaaga

SEQ ID NO: 942503 - RNA, 19 nt, Artificial Sequence
  Description of Artificial Sequence: Synthetic oligonucleotide
  Antisense strand to SEQ ID NO: 942502
ucuuaugacuacauggccu

SEQ ID NO: 942504 - RNA, 19 nt, Artificial Sequence
  Description of Artificial Sequence: Synthetic oligonucleotide
  Sense strand starting at position 633 of SEQ ID NO: 913634
guauuagaguaaucaccaa

SEQ ID NO: 942505 - RNA, 19 nt, Artificial Sequence
  Description of Artificial Sequence: Synthetic oligonucleotide
  Antisense strand to SEQ ID NO: 942504
uuggugauuacucuaauac

SEQ ID NO: 942506 - RNA, 19 nt, Artificial Sequence
  Description of Artificial Sequence: Synthetic oligonucleotide
  Sense strand starting at position 1425 of SEQ ID NO: 913634
ucaaauugauguucuagau

SEQ ID NO: 942507 - RNA, 19 nt, Artificial Sequence
  Description of Artificial Sequence: Synthetic oligonucleotide
  Antisense strand to SEQ ID NO: 942506
aucuagaacaucaauuuga

SEQ ID NO: 942508 - RNA, 19 nt, Artificial Sequence
  Description of Artificial Sequence: Synthetic oligonucleotide
  Sense strand starting at position 426 of SEQ ID NO: 913634
cugggagcucuugagcaaa

SEQ ID NO: 942509 - RNA, 19 nt, Artificial Sequence
  Description of Artificial Sequence: Synthetic oligonucleotide
  Antisense strand to SEQ ID NO: 942508
uuugcucaagagcucccag

SEQ ID NO: 942510 - RNA, 19 nt, Artificial Sequence
  Description of Artificial Sequence: Synthetic oligonucleotide
  Sense strand starting at position 752 of SEQ ID NO: 913634
augaauccugaaugcauua

SEQ ID NO: 942511 - RNA, 19 nt, Artificial Sequence
  Description of Artificial Sequence: Synthetic oligonucleotide
  Antisense strand to SEQ ID NO: 942510
uaaugcauucaggauucau

SEQ ID NO: 942512 - RNA, 19 nt, Artificial Sequence
  Description of Artificial Sequence: Synthetic oligonucleotide
  Sense strand starting at position 683 of SEQ ID NO: 913634
cugacugagguguauccau

SEQ ID NO: 942513 - RNA, 19 nt, Artificial Sequence
  Description of Artificial Sequence: Synthetic oligonucleotide
  Antisense strand to SEQ ID NO: 942512
auggauacaccucagucag

SEQ ID NO: 942514 - RNA, 19 nt, Artificial Sequence
  Description of Artificial Sequence: Synthetic oligonucleotide
  Sense strand starting at position 1334 of SEQ ID NO: 913634
aggcauggaguuugaauga

SEQ ID NO: 942515 - RNA, 19 nt, Artificial Sequence
  Description of Artificial Sequence: Synthetic oligonucleotide
  Antisense strand to SEQ ID NO: 942514
ucauucaaacuccaugccu

SEQ ID NO: 942516 - RNA, 19 nt, Artificial Sequence
  Description of Artificial Sequence: Synthetic oligonucleotide
  Sense strand starting at position 2316 of SEQ ID NO: 913634
gauaccugagguuggguaa

SEQ ID NO: 942517 - RNA, 19 nt, Artificial Sequence
  Description of Artificial Sequence: Synthetic oligonucleotide
  Antisense strand to SEQ ID NO: 942516
uuacccaaccucagguauc

SEQ ID NO: 942518 - RNA, 19 nt, Artificial Sequence
  Description of Artificial Sequence: Synthetic oligonucleotide
  Sense strand starting at position 3466 of SEQ ID NO: 913634
aucucuagugucuagauca

SEQ ID NO: 942519 - RNA, 19 nt, Artificial Sequence
  Description of Artificial Sequence: Synthetic oligonucleotide
  Antisense strand to SEQ ID NO: 942518
ugaucuagacacuagagau

SEQ ID NO: 942520 - RNA, 19 nt, Artificial Sequence
  Description of Artificial Sequence: Synthetic oligonucleotide
  Sense strand starting at position 729 of SEQ ID NO: 913634
cacugagacgugcaacaau

SEQ ID NO: 942521 - RNA, 19 nt, Artificial Sequence
  Description of Artificial Sequence: Synthetic oligonucleotide
  Antisense strand to SEQ ID NO: 942520
auuguugcacgucucagug

SEQ ID NO: 942522 - RNA, 19 nt, Artificial Sequence
  Description of Artificial Sequence: Synthetic oligonucleotide
  Sense strand starting at position 2740 of SEQ ID NO: 913634
acacauauacgcuggaaca

SEQ ID NO: 942523 - RNA, 19 nt, Artificial Sequence
  Description of Artificial Sequence: Synthetic oligonucleotide
  Antisense strand to SEQ ID NO: 942522
uguuccagcguauaugugu

SEQ ID NO: 942524 - RNA, 19 nt, Artificial Sequence
  Description of Artificial Sequence: Synthetic oligonucleotide
  Sense strand starting at position 428 of SEQ ID NO: 913634
gggagcucuugagcaaaca

SEQ ID NO: 942525 - RNA, 19 nt, Artificial Sequence
  Description of Artificial Sequence: Synthetic oligonucleotide
  Antisense strand to SEQ ID NO: 942524
uguuugcucaagagcuccc

SEQ ID NO: 942526 - RNA, 19 nt, Artificial Sequence
  Description of Artificial Sequence: Synthetic oligonucleotide
  Sense strand starting at position 2162 of SEQ ID NO: 913634
guguauuaucauggacaca

SEQ ID NO: 942527 - RNA, 19 nt, Artificial Sequence
  Description of Artificial Sequence: Synthetic oligonucleotide
  Antisense strand to SEQ ID NO: 942526
uguguccaugauaauacac

SEQ ID NO: 942528 - RNA, 19 nt, Artificial Sequence
  Description of Artificial Sequence: Synthetic oligonucleotide
  Sense strand starting at position 3471 of SEQ ID NO: 913634
uagugucuagaucaauguu

SEQ ID NO: 942529 - RNA, 19 nt, Artificial Sequence
  Description of Artificial Sequence: Synthetic oligonucleotide
  Antisense strand to SEQ ID NO: 942528
aacauugaucuagacacua

SEQ ID NO: 942530 - RNA, 19 nt, Artificial Sequence
  Description of Artificial Sequence: Synthetic oligonucleotide
  Sense strand starting at position 322 of SEQ ID NO: 913634
cuguauagucccugagaag

SEQ ID NO: 942531 - RNA, 19 nt, Artificial Sequence
  Description of Artificial Sequence: Synthetic oligonucleotide
  Antisense strand to SEQ ID NO: 942530
cuucucagggacuauacag

SEQ ID NO: 942532 - RNA, 19 nt, Artificial Sequence
  Description of Artificial Sequence: Synthetic oligonucleotide
  Sense strand starting at position 1876 of SEQ ID NO: 913634
ugaucugugaaguagcauu

SEQ ID NO: 942533 - RNA, 19 nt, Artificial Sequence
  Description of Artificial Sequence: Synthetic oligonucleotide
  Antisense strand to SEQ ID NO: 942532
aaugcuacuucacagauca

SEQ ID NO: 942534 - RNA, 19 nt, Artificial Sequence
  Description of Artificial Sequence: Synthetic oligonucleotide
  Sense strand starting at position 323 of SEQ ID NO: 913634
uguauagucccugagaagc

SEQ ID NO: 942535 - RNA, 19 nt, Artificial Sequence
  Description of Artificial Sequence: Synthetic oligonucleotide
  Antisense strand to SEQ ID NO: 942534
gcuucucagggacuauaca

SEQ ID NO: 942536 - RNA, 19 nt, Artificial Sequence
  Description of Artificial Sequence: Synthetic oligonucleotide
  Sense strand starting at position 2296 of SEQ ID NO: 913634
aucuguguggcuuacaaag

SEQ ID NO: 942537 - RNA, 19 nt, Artificial Sequence
  Description of Artificial Sequence: Synthetic oligonucleotide
  Antisense strand to SEQ ID NO: 942536
cuuuguaagccacacagau

SEQ ID NO: 942538 - RNA, 19 nt, Artificial Sequence
  Description of Artificial Sequence: Synthetic oligonucleotide
  Sense strand starting at position 757 of SEQ ID NO: 913634
uccugaaugcauuaugcua

SEQ ID NO: 942539 - RNA, 19 nt, Artificial Sequence
  Description of Artificial Sequence: Synthetic oligonucleotide
  Antisense strand to SEQ ID NO: 942538
uagcauaaugcauucagga

SEQ ID NO: 942540 - RNA, 19 nt, Artificial Sequence
  Description of Artificial Sequence: Synthetic oligonucleotide
  Sense strand starting at position 3459 of SEQ ID NO: 913634
ucauuauaucucuaguguc

SEQ ID NO: 942541 - RNA, 19 nt, Artificial Sequence
  Description of Artificial Sequence: Synthetic oligonucleotide
  Antisense strand to SEQ ID NO: 942540
gacacuagagauauaauga

SEQ ID NO: 942542 - RNA, 19 nt, Artificial Sequence
  Description of Artificial Sequence: Synthetic oligonucleotide
  Sense strand starting at position 321 of SEQ ID NO: 913634
ucuguauagucccugagaa

SEQ ID NO: 942543 - RNA, 19 nt, Artificial Sequence
  Description of Artificial Sequence: Synthetic oligonucleotide
  Antisense strand to SEQ ID NO: 942542
uucucagggacuauacaga

SEQ ID NO: 942544 - RNA, 19 nt, Artificial Sequence
  Description of Artificial Sequence: Synthetic oligonucleotide
  Sense strand starting at position 174 of SEQ ID NO: 913634
acgacugguacugggagua

SEQ ID NO: 942545 - RNA, 19 nt, Artificial Sequence
  Description of Artificial Sequence: Synthetic oligonucleotide
  Antisense strand to SEQ ID NO: 942544
uacucccaguaccagucgu

SEQ ID NO: 942546 - RNA, 19 nt, Artificial Sequence
  Description of Artificial Sequence: Synthetic oligonucleotide
  Sense strand starting at position 1037 of SEQ ID NO: 913634
gugucaaacuucuuuaaau

SEQ ID NO: 942547 - RNA, 19 nt, Artificial Sequence
  Description of Artificial Sequence: Synthetic oligonucleotide
  Antisense strand to SEQ ID NO: 942546
auuuaaagaaguuugacac

SEQ ID NO: 942548 - RNA, 19 nt, Artificial Sequence
  Description of Artificial Sequence: Synthetic oligonucleotide
  Sense strand starting at position 360 of SEQ ID NO: 913634
gugcccuuuaagggaucaa

SEQ ID NO: 942549 - RNA, 19 nt, Artificial Sequence
  Description of Artificial Sequence: Synthetic oligonucleotide
  Antisense strand to SEQ ID NO: 942548
uugaucccuuaaagggcac

SEQ ID NO: 942550 - RNA, 19 nt, Artificial Sequence
  Description of Artificial Sequence: Synthetic oligonucleotide
  Sense strand starting at position 1658 of SEQ ID NO: 913634
cuauguuuauggucaacac

SEQ ID NO: 942551 - RNA, 19 nt, Artificial Sequence
  Description of Artificial Sequence: Synthetic oligonucleotide
  Antisense strand to SEQ ID NO: 942550
guguugaccauaaacauag

SEQ ID NO: 942552 - RNA, 19 nt, Artificial Sequence
  Description of Artificial Sequence: Synthetic oligonucleotide
  Sense strand starting at position 2158 of SEQ ID NO: 913634
ucuuguguauuaucaugga

SEQ ID NO: 942553 - RNA, 19 nt, Artificial Sequence
  Description of Artificial Sequence: Synthetic oligonucleotide
  Antisense strand to SEQ ID NO: 942552
uccaugauaauacacaaga

SEQ ID NO: 942554 - RNA, 19 nt, Artificial Sequence
  Description of Artificial Sequence: Synthetic oligonucleotide
  Sense strand starting at position 606 of SEQ ID NO: 913634
gggauaugaugauaaggau

SEQ ID NO: 942555 - RNA, 19 nt, Artificial Sequence
  Description of Artificial Sequence: Synthetic oligonucleotide
  Antisense strand to SEQ ID NO: 942554
auccuuaucaucauauccc

SEQ ID NO: 942556 - RNA, 19 nt, Artificial Sequence
  Description of Artificial Sequence: Synthetic oligonucleotide
  Sense strand starting at position 1675 of SEQ ID NO: 913634
acaaccauuugguaacagu

SEQ ID NO: 942557 - RNA, 19 nt, Artificial Sequence
  Description of Artificial Sequence: Synthetic oligonucleotide
  Antisense strand to SEQ ID NO: 942556
acuguuaccaaaugguugu

SEQ ID NO: 942558 - RNA, 19 nt, Artificial Sequence
  Description of Artificial Sequence: Synthetic oligonucleotide
  Sense strand starting at position 3400 of SEQ ID NO: 913634
gucuucuccuccuuagaug

SEQ ID NO: 942559 - RNA, 19 nt, Artificial Sequence
  Description of Artificial Sequence: Synthetic oligonucleotide
  Antisense strand to SEQ ID NO: 942558
caucuaaggaggagaagac

SEQ ID NO: 942560 - RNA, 19 nt, Artificial Sequence
  Description of Artificial Sequence: Synthetic oligonucleotide
  Sense strand starting at position 1257 of SEQ ID NO: 913634
gcuugccaaguuuaauauu

SEQ ID NO: 942561 - RNA, 19 nt, Artificial Sequence
  Description of Artificial Sequence: Synthetic oligonucleotide
  Antisense strand to SEQ ID NO: 942560
aauauuaaacuuggcaagc

SEQ ID NO: 942562 - RNA, 19 nt, Artificial Sequence
  Description of Artificial Sequence: Synthetic oligonucleotide
  Sense strand starting at position 3383 of SEQ ID NO: 913634
uggguuuaccuguaucugu

SEQ ID NO: 942563 - RNA, 19 nt, Artificial Sequence
  Description of Artificial Sequence: Synthetic oligonucleotide
  Antisense strand to SEQ ID NO: 942562
acagauacagguaaaccca

SEQ ID NO: 942564 - RNA, 19 nt, Artificial Sequence
  Description of Artificial Sequence: Synthetic oligonucleotide
  Sense strand starting at position 497 of SEQ ID NO: 913634
cuucauagggugugguaau

SEQ ID NO: 942565 - RNA, 19 nt, Artificial Sequence
  Description of Artificial Sequence: Synthetic oligonucleotide
  Antisense strand to SEQ ID NO: 942564
auuaccacacccuaugaag

SEQ ID NO: 942566 - RNA, 19 nt, Artificial Sequence
  Description of Artificial Sequence: Synthetic oligonucleotide
  Sense strand starting at position 331 of SEQ ID NO: 913635
aaagcaguaggguauuaau

SEQ ID NO: 942567 - RNA, 19 nt, Artificial Sequence
  Description of Artificial Sequence: Synthetic oligonucleotide
  Antisense strand to SEQ ID NO: 942566
auuaauacccuacugcuuu

SEQ ID NO: 942568 - RNA, 19 nt, Artificial Sequence
  Description of Artificial Sequence: Synthetic oligonucleotide
  Sense strand starting at position 2841 of SEQ ID NO: 913635
gggagaaagguuggguuca

SEQ ID NO: 942569 - RNA, 19 nt, Artificial Sequence
  Description of Artificial Sequence: Synthetic oligonucleotide
  Antisense strand to SEQ ID NO: 942568
ugaacccaaccuuucuccc

SEQ ID NO: 942570 - RNA, 19 nt, Artificial Sequence
  Description of Artificial Sequence: Synthetic oligonucleotide
  Sense strand starting at position 2746 of SEQ ID NO: 913635
agacuauuccaugacacgu

SEQ ID NO: 942571 - RNA, 19 nt, Artificial Sequence
  Description of Artificial Sequence: Synthetic oligonucleotide
  Antisense strand to SEQ ID NO: 942570
acgugucauggaauagucu

SEQ ID NO: 942572 - RNA, 19 nt, Artificial Sequence
  Description of Artificial Sequence: Synthetic oligonucleotide
  Sense strand starting at position 3064 of SEQ ID NO: 913635
aggguucuuccugaaagca

SEQ ID NO: 942573 - RNA, 19 nt, Artificial Sequence
  Description of Artificial Sequence: Synthetic oligonucleotide
  Antisense strand to SEQ ID NO: 942572
ugcuuucaggaagaacccu

SEQ ID NO: 942574 - RNA, 19 nt, Artificial Sequence
  Description of Artificial Sequence: Synthetic oligonucleotide
  Sense strand starting at position 3938 of SEQ ID NO: 913635
gaaggaggguuauuacugu

SEQ ID NO: 942575 - RNA, 19 nt, Artificial Sequence
  Description of Artificial Sequence: Synthetic oligonucleotide
  Antisense strand to SEQ ID NO: 942574
acaguaauaacccuccuuc

SEQ ID NO: 942576 - RNA, 19 nt, Artificial Sequence
  Description of Artificial Sequence: Synthetic oligonucleotide
  Sense strand starting at position 1272 of SEQ ID NO: 913635
aaucccuuauggucuggaa

SEQ ID NO: 942577 - RNA, 19 nt, Artificial Sequence
  Description of Artificial Sequence: Synthetic oligonucleotide
  Antisense strand to SEQ ID NO: 942576
uuccagaccauaagggauu

SEQ ID NO: 942578 - RNA, 19 nt, Artificial Sequence
  Description of Artificial Sequence: Synthetic oligonucleotide
  Sense strand starting at position 1153 of SEQ ID NO: 913635
gcgacaaacugaucuggaa

SEQ ID NO: 942579 - RNA, 19 nt, Artificial Sequence
  Description of Artificial Sequence: Synthetic oligonucleotide
  Antisense strand to SEQ ID NO: 942578
uuccagaucaguuugucgc

SEQ ID NO: 942580 - RNA, 19 nt, Artificial Sequence
  Description of Artificial Sequence: Synthetic oligonucleotide
  Sense strand starting at position 2795 of SEQ ID NO: 913635
gaaccaucgcaauagguau

SEQ ID NO: 942581 - RNA, 19 nt, Artificial Sequence
  Description of Artificial Sequence: Synthetic oligonucleotide
  Antisense strand to SEQ ID NO: 942580
auaccuauugcgaugguuc

SEQ ID NO: 942582 - RNA, 19 nt, Artificial Sequence
  Description of Artificial Sequence: Synthetic oligonucleotide
  Sense strand starting at position 1267 of SEQ ID NO: 913635
gagcaaaucccuuaugguc

SEQ ID NO: 942583 - RNA, 19 nt, Artificial Sequence
  Description of Artificial Sequence: Synthetic oligonucleotide
  Antisense strand to SEQ ID NO: 942582
gaccauaagggauuugcuc

SEQ ID NO: 942584 - RNA, 19 nt, Artificial Sequence
  Description of Artificial Sequence: Synthetic oligonucleotide
  Sense strand starting at position 3185 of SEQ ID NO: 913635
cuaagagguaguuagcauu

SEQ ID NO: 942585 - RNA, 19 nt, Artificial Sequence
  Description of Artificial Sequence: Synthetic oligonucleotide
  Antisense strand to SEQ ID NO: 942584
aaugcuaacuaccucuuag

SEQ ID NO: 942586 - RNA, 19 nt, Artificial Sequence
  Description of Artificial Sequence: Synthetic oligonucleotide
  Sense strand starting at position 1274 of SEQ ID NO: 913635
ucccuuauggucuggaaga

SEQ ID NO: 942587 - RNA, 19 nt, Artificial Sequence
  Description of Artificial Sequence: Synthetic oligonucleotide
  Antisense strand to SEQ ID NO: 942586
ucuuccagaccauaaggga

SEQ ID NO: 942588 - RNA, 19 nt, Artificial Sequence
  Description of Artificial Sequence: Synthetic oligonucleotide
  Sense strand starting at position 553 of SEQ ID NO: 913635
cugcaagugccagaauaug

SEQ ID NO: 942589 - RNA, 19 nt, Artificial Sequence
  Description of Artificial Sequence: Synthetic oligonucleotide
  Antisense strand to SEQ ID NO: 942588
cauauucuggcacuugcag

SEQ ID NO: 942590 - RNA, 19 nt, Artificial Sequence
  Description of Artificial Sequence: Synthetic oligonucleotide
  Sense strand starting at position 3408 of SEQ ID NO: 913635
gguggauggccugaguuca

SEQ ID NO: 942591 - RNA, 19 nt, Artificial Sequence
  Description of Artificial Sequence: Synthetic oligonucleotide
  Antisense strand to SEQ ID NO: 942590
ugaacucaggccauccacc

SEQ ID NO: 942592 - RNA, 19 nt, Artificial Sequence
  Description of Artificial Sequence: Synthetic oligonucleotide
  Sense strand starting at position 393 of SEQ ID NO: 913635
auucguuuccuacacgaag

SEQ ID NO: 942593 - RNA, 19 nt, Artificial Sequence
  Description of Artificial Sequence: Synthetic oligonucleotide
  Antisense strand to SEQ ID NO: 942592
cuucguguaggaaacgaau

SEQ ID NO: 942594 - RNA, 19 nt, Artificial Sequence
  Description of Artificial Sequence: Synthetic oligonucleotide
  Sense strand starting at position 3034 of SEQ ID NO: 913635
gguggaggguucuugguaa

SEQ ID NO: 942595 - RNA, 19 nt, Artificial Sequence
  Description of Artificial Sequence: Synthetic oligonucleotide
  Antisense strand to SEQ ID NO: 942594
uuaccaagaacccuccacc

SEQ ID NO: 942596 - RNA, 19 nt, Artificial Sequence
  Description of Artificial Sequence: Synthetic oligonucleotide
  Sense strand starting at position 3149 of SEQ ID NO: 913635
agcagagacucuuugucca

SEQ ID NO: 942597 - RNA, 19 nt, Artificial Sequence
  Description of Artificial Sequence: Synthetic oligonucleotide
  Antisense strand to SEQ ID NO: 942596
uggacaaagagucucugcu

SEQ ID NO: 942598 - RNA, 19 nt, Artificial Sequence
  Description of Artificial Sequence: Synthetic oligonucleotide
  Sense strand starting at position 2752 of SEQ ID NO: 913635
uuccaugacacgugugaaa

SEQ ID NO: 942599 - RNA, 19 nt, Artificial Sequence
  Description of Artificial Sequence: Synthetic oligonucleotide
  Antisense strand to SEQ ID NO: 942598
uuucacacgugucauggaa

SEQ ID NO: 942600 - RNA, 19 nt, Artificial Sequence
  Description of Artificial Sequence: Synthetic oligonucleotide
  Sense strand starting at position 3711 of SEQ ID NO: 913635
cuagacuuuccuugagccu

SEQ ID NO: 942601 - RNA, 19 nt, Artificial Sequence
  Description of Artificial Sequence: Synthetic oligonucleotide
  Antisense strand to SEQ ID NO: 942600
aggcucaaggaaagucuag

SEQ ID NO: 942602 - RNA, 19 nt, Artificial Sequence
  Description of Artificial Sequence: Synthetic oligonucleotide
  Sense strand starting at position 98 of SEQ ID NO: 913635
gcagcaagagcuggguaaa

SEQ ID NO: 942603 - RNA, 19 nt, Artificial Sequence
  Description of Artificial Sequence: Synthetic oligonucleotide
  Antisense strand to SEQ ID NO: 942602
uuuacccagcucuugcugc

SEQ ID NO: 942604 - RNA, 19 nt, Artificial Sequence
  Description of Artificial Sequence: Synthetic oligonucleotide
  Sense strand starting at position 690 of SEQ ID NO: 913635
gagcauguuagccgaggaa

SEQ ID NO: 942605 - RNA, 19 nt, Artificial Sequence
  Description of Artificial Sequence: Synthetic oligonucleotide
  Antisense strand to SEQ ID NO: 942604
uuccucggcuaacaugcuc

SEQ ID NO: 942606 - RNA, 19 nt, Artificial Sequence
  Description of Artificial Sequence: Synthetic oligonucleotide
  Sense strand starting at position 444 of SEQ ID NO: 913635
uccgcucuuccaugauaug

SEQ ID NO: 942607 - RNA, 19 nt, Artificial Sequence
  Description of Artificial Sequence: Synthetic oligonucleotide
  Antisense strand to SEQ ID NO: 942606
cauaucauggaagagcgga

SEQ ID NO: 942608 - RNA, 19 nt, Artificial Sequence
  Description of Artificial Sequence: Synthetic oligonucleotide
  Sense strand starting at position 2585 of SEQ ID NO: 913635
gccaguauagacugcagua

SEQ ID NO: 942609 - RNA, 19 nt, Artificial Sequence
  Description of Artificial Sequence: Synthetic oligonucleotide
  Antisense strand to SEQ ID NO: 942608
uacugcagucuauacuggc

SEQ ID NO: 942610 - RNA, 19 nt, Artificial Sequence
  Description of Artificial Sequence: Synthetic oligonucleotide
  Sense strand starting at position 889 of SEQ ID NO: 913635
agcggugcccugggugaau

SEQ ID NO: 942611 - RNA, 19 nt, Artificial Sequence
  Description of Artificial Sequence: Synthetic oligonucleotide
  Antisense strand to SEQ ID NO: 942610
auucacccagggcaccgcu

SEQ ID NO: 942612 - RNA, 19 nt, Artificial Sequence
  Description of Artificial Sequence: Synthetic oligonucleotide
  Sense strand starting at position 3038 of SEQ ID NO: 913635
gaggguucuugguaaacug

SEQ ID NO: 942613 - RNA, 19 nt, Artificial Sequence
  Description of Artificial Sequence: Synthetic oligonucleotide
  Antisense strand to SEQ ID NO: 942612
caguuuaccaagaacccuc

SEQ ID NO: 942614 - RNA, 19 nt, Artificial Sequence
  Description of Artificial Sequence: Synthetic oligonucleotide
  Sense strand starting at position 2842 of SEQ ID NO: 913635
ggagaaagguuggguucaa

SEQ ID NO: 942615 - RNA, 19 nt, Artificial Sequence
  Description of Artificial Sequence: Synthetic oligonucleotide
  Antisense strand to SEQ ID NO: 942614
uugaacccaaccuuucucc

SEQ ID NO: 942616 - RNA, 19 nt, Artificial Sequence
  Description of Artificial Sequence: Synthetic oligonucleotide
  Sense strand starting at position 334 of SEQ ID NO: 913635
gcaguaggguauuaauaaa

SEQ ID NO: 942617 - RNA, 19 nt, Artificial Sequence
  Description of Artificial Sequence: Synthetic oligonucleotide
  Antisense strand to SEQ ID NO: 942616
uuuauuaauacccuacugc

SEQ ID NO: 942618 - RNA, 19 nt, Artificial Sequence
  Description of Artificial Sequence: Synthetic oligonucleotide
  Sense strand starting at position 542 of SEQ ID NO: 913635
aggaaaugauacugcaagu

SEQ ID NO: 942619 - RNA, 19 nt, Artificial Sequence
  Description of Artificial Sequence: Synthetic oligonucleotide
  Antisense strand to SEQ ID NO: 942618
acuugcaguaucauuuccu

SEQ ID NO: 942620 - RNA, 19 nt, Artificial Sequence
  Description of Artificial Sequence: Synthetic oligonucleotide
  Sense strand starting at position 363 of SEQ ID NO: 913635
augcaacacugaugaucua

SEQ ID NO: 942621 - RNA, 19 nt, Artificial Sequence
  Description of Artificial Sequence: Synthetic oligonucleotide
  Antisense strand to SEQ ID NO: 942620
uagaucaucaguguugcau

SEQ ID NO: 942622 - RNA, 19 nt, Artificial Sequence
  Description of Artificial Sequence: Synthetic oligonucleotide
  Sense strand starting at position 485 of SEQ ID NO: 913635
ucauaacggucauauucua

SEQ ID NO: 942623 - RNA, 19 nt, Artificial Sequence
  Description of Artificial Sequence: Synthetic oligonucleotide
  Antisense strand to SEQ ID NO: 942622
uagaauaugaccguuauga

SEQ ID NO: 942624 - RNA, 19 nt, Artificial Sequence
  Description of Artificial Sequence: Synthetic oligonucleotide
  Sense strand starting at position 1275 of SEQ ID NO: 913635
cccuuauggucuggaagag

SEQ ID NO: 942625 - RNA, 19 nt, Artificial Sequence
  Description of Artificial Sequence: Synthetic oligonucleotide
  Antisense strand to SEQ ID NO: 942624
cucuuccagaccauaaggg

SEQ ID NO: 942626 - RNA, 19 nt, Artificial Sequence
  Description of Artificial Sequence: Synthetic oligonucleotide
  Sense strand starting at position 3188 of SEQ ID NO: 913635
agagguaguuagcauuauc

SEQ ID NO: 942627 - RNA, 19 nt, Artificial Sequence
  Description of Artificial Sequence: Synthetic oligonucleotide
  Antisense strand to SEQ ID NO: 942626
gauaaugcuaacuaccucu

SEQ ID NO: 942628 - RNA, 19 nt, Artificial Sequence
  Description of Artificial Sequence: Synthetic oligonucleotide
  Sense strand starting at position 3942 of SEQ ID NO: 913635
gaggguuauuacuguaauu

SEQ ID NO: 942629 - RNA, 19 nt, Artificial Sequence
  Description of Artificial Sequence: Synthetic oligonucleotide
  Antisense strand to SEQ ID NO: 942628
aauuacaguaauaacccuc

SEQ ID NO: 942630 - RNA, 19 nt, Artificial Sequence
  Description of Artificial Sequence: Synthetic oligonucleotide
  Sense strand starting at position 447 of SEQ ID NO: 913635
gcucuuccaugauaugcau

SEQ ID NO: 942631 - RNA, 19 nt, Artificial Sequence
  Description of Artificial Sequence: Synthetic oligonucleotide
  Antisense strand to SEQ ID NO: 942630
augcauaucauggaagagc

SEQ ID NO: 942632 - RNA, 19 nt, Artificial Sequence
  Description of Artificial Sequence: Synthetic oligonucleotide
  Sense strand starting at position 391 of SEQ ID NO: 913635
acauucguuuccuacacga

SEQ ID NO: 942633 - RNA, 19 nt, Artificial Sequence
  Description of Artificial Sequence: Synthetic oligonucleotide
  Antisense strand to SEQ ID NO: 942632
ucguguaggaaacgaaugu

SEQ ID NO: 942634 - RNA, 19 nt, Artificial Sequence
  Description of Artificial Sequence: Synthetic oligonucleotide
  Sense strand starting at position 3783 of SEQ ID NO: 913635
cgguaugccuuccacacaa

SEQ ID NO: 942635 - RNA, 19 nt, Artificial Sequence
  Description of Artificial Sequence: Synthetic oligonucleotide
  Antisense strand to SEQ ID NO: 942634
uuguguggaaggcauaccg

SEQ ID NO: 942636 - RNA, 19 nt, Artificial Sequence
  Description of Artificial Sequence: Synthetic oligonucleotide
  Sense strand starting at position 3063 of SEQ ID NO: 913635
caggguucuuccugaaagc

SEQ ID NO: 942637 - RNA, 19 nt, Artificial Sequence
  Description of Artificial Sequence: Synthetic oligonucleotide
  Antisense strand to SEQ ID NO: 942636
gcuuucaggaagaacccug

SEQ ID NO: 942638 - RNA, 19 nt, Artificial Sequence
  Description of Artificial Sequence: Synthetic oligonucleotide
  Sense strand starting at position 2508 of SEQ ID NO: 913635
gugccauccuaauguaguu

SEQ ID NO: 942639 - RNA, 19 nt, Artificial Sequence
  Description of Artificial Sequence: Synthetic oligonucleotide
  Antisense strand to SEQ ID NO: 942638
aacuacauuaggauggcac

SEQ ID NO: 942640 - RNA, 19 nt, Artificial Sequence
  Description of Artificial Sequence: Synthetic oligonucleotide
  Sense strand starting at position 3655 of SEQ ID NO: 913636
ugguauaguagugacauaa

SEQ ID NO: 942641 - RNA, 19 nt, Artificial Sequence
  Description of Artificial Sequence: Synthetic oligonucleotide
  Antisense strand to SEQ ID NO: 942640
uuaugucacuacuauacca

SEQ ID NO: 942642 - RNA, 19 nt, Artificial Sequence
  Description of Artificial Sequence: Synthetic oligonucleotide
  Sense strand starting at position 531 of SEQ ID NO: 913636
ccuugcagaguagauauua

SEQ ID NO: 942643 - RNA, 19 nt, Artificial Sequence
  Description of Artificial Sequence: Synthetic oligonucleotide
  Antisense strand to SEQ ID NO: 942642
uaauaucuacucugcaagg

SEQ ID NO: 942644 - RNA, 19 nt, Artificial Sequence
  Description of Artificial Sequence: Synthetic oligonucleotide
  Sense strand starting at position 2178 of SEQ ID NO: 913636
gcgguugauaguuccgcaa

SEQ ID NO: 942645 - RNA, 19 nt, Artificial Sequence
  Description of Artificial Sequence: Synthetic oligonucleotide
  Antisense strand to SEQ ID NO: 942644
uugcggaacuaucaaccgc

SEQ ID NO: 942646 - RNA, 19 nt, Artificial Sequence
  Description of Artificial Sequence: Synthetic oligonucleotide
  Sense strand starting at position 2216 of SEQ ID NO: 913636
agugaaaccuuaguauuaa

SEQ ID NO: 942647 - RNA, 19 nt, Artificial Sequence
  Description of Artificial Sequence: Synthetic oligonucleotide
  Antisense strand to SEQ ID NO: 942646
uuaauacuaagguuucacu

SEQ ID NO: 942648 - RNA, 19 nt, Artificial Sequence
  Description of Artificial Sequence: Synthetic oligonucleotide
  Sense strand starting at position 1362 of SEQ ID NO: 913636
uugcaucagggcgaagaaa

SEQ ID NO: 942649 - RNA, 19 nt, Artificial Sequence
  Description of Artificial Sequence: Synthetic oligonucleotide
  Antisense strand to SEQ ID NO: 942648
uuucuucgcccugaugcaa

SEQ ID NO: 942650 - RNA, 19 nt, Artificial Sequence
  Description of Artificial Sequence: Synthetic oligonucleotide
  Sense strand starting at position 665 of SEQ ID NO: 913636
uuaauaguccauggacacu

SEQ ID NO: 942651 - RNA, 19 nt, Artificial Sequence
  Description of Artificial Sequence: Synthetic oligonucleotide
  Antisense strand to SEQ ID NO: 942650
aguguccauggacuauuaa

SEQ ID NO: 942652 - RNA, 19 nt, Artificial Sequence
  Description of Artificial Sequence: Synthetic oligonucleotide
  Sense strand starting at position 664 of SEQ ID NO: 913636
uuuaauaguccauggacac

SEQ ID NO: 942653 - RNA, 19 nt, Artificial Sequence
  Description of Artificial Sequence: Synthetic oligonucleotide
  Antisense strand to SEQ ID NO: 942652
guguccauggacuauuaaa

SEQ ID NO: 942654 - RNA, 19 nt, Artificial Sequence
  Description of Artificial Sequence: Synthetic oligonucleotide
  Sense strand starting at position 2084 of SEQ ID NO: 913636
agucuugaaggcugaggaa

SEQ ID NO: 942655 - RNA, 19 nt, Artificial Sequence
  Description of Artificial Sequence: Synthetic oligonucleotide
  Antisense strand to SEQ ID NO: 942654
uuccucagccuucaagacu

SEQ ID NO: 942656 - RNA, 19 nt, Artificial Sequence
  Description of Artificial Sequence: Synthetic oligonucleotide
  Sense strand starting at position 880 of SEQ ID NO: 913636
ggaaucaccucccugugaa

SEQ ID NO: 942657 - RNA, 19 nt, Artificial Sequence
  Description of Artificial Sequence: Synthetic oligonucleotide
  Antisense strand to SEQ ID NO: 942656
uucacagggaggugauucc

SEQ ID NO: 942658 - RNA, 19 nt, Artificial Sequence
  Description of Artificial Sequence: Synthetic oligonucleotide
  Sense strand starting at position 3665 of SEQ ID NO: 913636
gugacauaauuugauaaca

SEQ ID NO: 942659 - RNA, 19 nt, Artificial Sequence
  Description of Artificial Sequence: Synthetic oligonucleotide
  Antisense strand to SEQ ID NO: 942658
uguuaucaaauuaugucac

SEQ ID NO: 942660 - RNA, 19 nt, Artificial Sequence
  Description of Artificial Sequence: Synthetic oligonucleotide
  Sense strand starting at position 1007 of SEQ ID NO: 913636
uagguuuaaugaguuugaa

SEQ ID NO: 942661 - RNA, 19 nt, Artificial Sequence
  Description of Artificial Sequence: Synthetic oligonucleotide
  Antisense strand to SEQ ID NO: 942660
uucaaacucauuaaaccua

SEQ ID NO: 942662 - RNA, 19 nt, Artificial Sequence
  Description of Artificial Sequence: Synthetic oligonucleotide
  Sense strand starting at position 3976 of SEQ ID NO: 913636
gaauuaucaucagugguga

SEQ ID NO: 942663 - RNA, 19 nt, Artificial Sequence
  Description of Artificial Sequence: Synthetic oligonucleotide
  Antisense strand to SEQ ID NO: 942662
ucaccacugaugauaauuc

SEQ ID NO: 942664 - RNA, 19 nt, Artificial Sequence
  Description of Artificial Sequence: Synthetic oligonucleotide
  Sense strand starting at position 1240 of SEQ ID NO: 913636
gccugucacuucccuauuu

SEQ ID NO: 942665 - RNA, 19 nt, Artificial Sequence
  Description of Artificial Sequence: Synthetic oligonucleotide
  Antisense strand to SEQ ID NO: 942664
aaauagggaagugacaggc

SEQ ID NO: 942666 - RNA, 19 nt, Artificial Sequence
  Description of Artificial Sequence: Synthetic oligonucleotide
  Sense strand starting at position 3925 of SEQ ID NO: 913636
cagagaaguggcuaaacgu

SEQ ID NO: 942667 - RNA, 19 nt, Artificial Sequence
  Description of Artificial Sequence: Synthetic oligonucleotide
  Antisense strand to SEQ ID NO: 942666
acguuuagccacuucucug

SEQ ID NO: 942668 - RNA, 19 nt, Artificial Sequence
  Description of Artificial Sequence: Synthetic oligonucleotide
  Sense strand starting at position 1396 of SEQ ID NO: 913636
uaacaaguaucaguaguga

SEQ ID NO: 942669 - RNA, 19 nt, Artificial Sequence
  Description of Artificial Sequence: Synthetic oligonucleotide
  Antisense strand to SEQ ID NO: 942668
ucacuacugauacuuguua

SEQ ID NO: 942670 - RNA, 19 nt, Artificial Sequence
  Description of Artificial Sequence: Synthetic oligonucleotide
  Sense strand starting at position 3790 of SEQ ID NO: 913636
guauccucuuacucaggga

SEQ ID NO: 942671 - RNA, 19 nt, Artificial Sequence
  Description of Artificial Sequence: Synthetic oligonucleotide
  Antisense strand to SEQ ID NO: 942670
ucccugaguaagaggauac

SEQ ID NO: 942672 - RNA, 19 nt, Artificial Sequence
  Description of Artificial Sequence: Synthetic oligonucleotide
  Sense strand starting at position 1010 of SEQ ID NO: 913636
guuuaaugaguuugaauca

SEQ ID NO: 942673 - RNA, 19 nt, Artificial Sequence
  Description of Artificial Sequence: Synthetic oligonucleotide
  Antisense strand to SEQ ID NO: 942672
ugauucaaacucauuaaac

SEQ ID NO: 942674 - RNA, 19 nt, Artificial Sequence
  Description of Artificial Sequence: Synthetic oligonucleotide
  Sense strand starting at position 2182 of SEQ ID NO: 913636
uugauaguuccgcaaacag

SEQ ID NO: 942675 - RNA, 19 nt, Artificial Sequence
  Description of Artificial Sequence: Synthetic oligonucleotide
  Antisense strand to SEQ ID NO: 942674
cuguuugcggaacuaucaa

SEQ ID NO: 942676 - RNA, 19 nt, Artificial Sequence
  Description of Artificial Sequence: Synthetic oligonucleotide
  Sense strand starting at position 3648 of SEQ ID NO: 913636
aacaguuugguauaguagu

SEQ ID NO: 942677 - RNA, 19 nt, Artificial Sequence
  Description of Artificial Sequence: Synthetic oligonucleotide
  Antisense strand to SEQ ID NO: 942676
acuacuauaccaaacuguu

SEQ ID NO: 942678 - RNA, 19 nt, Artificial Sequence
  Description of Artificial Sequence: Synthetic oligonucleotide
  Sense strand starting at position 591 of SEQ ID NO: 913636
uuguucuuacaguaaucuu

SEQ ID NO: 942679 - RNA, 19 nt, Artificial Sequence
  Description of Artificial Sequence: Synthetic oligonucleotide
  Antisense strand to SEQ ID NO: 942678
aagauuacuguaagaacaa

SEQ ID NO: 942680 - RNA, 19 nt, Artificial Sequence
  Description of Artificial Sequence: Synthetic oligonucleotide
  Sense strand starting at position 1391 of SEQ ID NO: 913636
gugucuaacaaguaucagu

SEQ ID NO: 942681 - RNA, 19 nt, Artificial Sequence
  Description of Artificial Sequence: Synthetic oligonucleotide
  Antisense strand to SEQ ID NO: 942680
acugauacuuguuagacac

SEQ ID NO: 942682 - RNA, 19 nt, Artificial Sequence
  Description of Artificial Sequence: Synthetic oligonucleotide
  Sense strand starting at position 2958 of SEQ ID NO: 913636
ugaggucaggaguguuaug

SEQ ID NO: 942683 - RNA, 19 nt, Artificial Sequence
  Description of Artificial Sequence: Synthetic oligonucleotide
  Antisense strand to SEQ ID NO: 942682
cauaacacuccugaccuca

SEQ ID NO: 942684 - RNA, 19 nt, Artificial Sequence
  Description of Artificial Sequence: Synthetic oligonucleotide
  Sense strand starting at position 222 of SEQ ID NO: 913636
agaguugaauaguugcuau

SEQ ID NO: 942685 - RNA, 19 nt, Artificial Sequence
  Description of Artificial Sequence: Synthetic oligonucleotide
  Antisense strand to SEQ ID NO: 942684
auagcaacuauucaacucu

SEQ ID NO: 942686 - RNA, 19 nt, Artificial Sequence
  Description of Artificial Sequence: Synthetic oligonucleotide
  Sense strand starting at position 1542 of SEQ ID NO: 913636
agucuagaagccugacuuu

SEQ ID NO: 942687 - RNA, 19 nt, Artificial Sequence
  Description of Artificial Sequence: Synthetic oligonucleotide
  Antisense strand to SEQ ID NO: 942686
aaagucaggcuucuagacu

SEQ ID NO: 942688 - RNA, 19 nt, Artificial Sequence
  Description of Artificial Sequence: Synthetic oligonucleotide
  Sense strand starting at position 1505 of SEQ ID NO: 913636
ccuuuagauuccuucccga

SEQ ID NO: 942689 - RNA, 19 nt, Artificial Sequence
  Description of Artificial Sequence: Synthetic oligonucleotide
  Antisense strand to SEQ ID NO: 942688
ucgggaaggaaucuaaagg

SEQ ID NO: 942690 - RNA, 19 nt, Artificial Sequence
  Description of Artificial Sequence: Synthetic oligonucleotide
  Sense strand starting at position 3875 of SEQ ID NO: 913636
aucauaauucggugucagg

SEQ ID NO: 942691 - RNA, 19 nt, Artificial Sequence
  Description of Artificial Sequence: Synthetic oligonucleotide
  Antisense strand to SEQ ID NO: 942690
ccugacaccgaauuaugau

SEQ ID NO: 942692 - RNA, 19 nt, Artificial Sequence
  Description of Artificial Sequence: Synthetic oligonucleotide
  Sense strand starting at position 724 of SEQ ID NO: 913636
uauuaaauagcugguugua

SEQ ID NO: 942693 - RNA, 19 nt, Artificial Sequence
  Description of Artificial Sequence: Synthetic oligonucleotide
  Antisense strand to SEQ ID NO: 942692
uacaaccagcuauuuaaua

SEQ ID NO: 942694 - RNA, 19 nt, Artificial Sequence
  Description of Artificial Sequence: Synthetic oligonucleotide
  Sense strand starting at position 374 of SEQ ID NO: 913636
aaguaaauuguugguucuu

SEQ ID NO: 942695 - RNA, 19 nt, Artificial Sequence
  Description of Artificial Sequence: Synthetic oligonucleotide
  Antisense strand to SEQ ID NO: 942694
aagaaccaacaauuuacuu

SEQ ID NO: 942696 - RNA, 19 nt, Artificial Sequence
  Description of Artificial Sequence: Synthetic oligonucleotide
  Sense strand starting at position 626 of SEQ ID NO: 913636
gugauauuaguaggcauuc

SEQ ID NO: 942697 - RNA, 19 nt, Artificial Sequence
  Description of Artificial Sequence: Synthetic oligonucleotide
  Antisense strand to SEQ ID NO: 942696
gaaugccuacuaauaucac

SEQ ID NO: 942698 - RNA, 19 nt, Artificial Sequence
  Description of Artificial Sequence: Synthetic oligonucleotide
  Sense strand starting at position 529 of SEQ ID NO: 913636
cgccuugcagaguagauau

SEQ ID NO: 942699 - RNA, 19 nt, Artificial Sequence
  Description of Artificial Sequence: Synthetic oligonucleotide
  Antisense strand to SEQ ID NO: 942698
auaucuacucugcaaggcg

SEQ ID NO: 942700 - RNA, 19 nt, Artificial Sequence
  Description of Artificial Sequence: Synthetic oligonucleotide
  Sense strand starting at position 3694 of SEQ ID NO: 913636
ucacuuuggcugcagaguu

SEQ ID NO: 942701 - RNA, 19 nt, Artificial Sequence
  Description of Artificial Sequence: Synthetic oligonucleotide
  Antisense strand to SEQ ID NO: 942700
aacucugcagccaaaguga

SEQ ID NO: 942702 - RNA, 19 nt, Artificial Sequence
  Description of Artificial Sequence: Synthetic oligonucleotide
  Sense strand starting at position 536 of SEQ ID NO: 913636
cagaguagauauuaaggga

SEQ ID NO: 942703 - RNA, 19 nt, Artificial Sequence
  Description of Artificial Sequence: Synthetic oligonucleotide
  Antisense strand to SEQ ID NO: 942702
ucccuuaauaucuacucug

SEQ ID NO: 942704 - RNA, 19 nt, Artificial Sequence
  Description of Artificial Sequence: Synthetic oligonucleotide
  Sense strand starting at position 3858 of SEQ ID NO: 913636
uggaaacauuaucagauau

SEQ ID NO: 942705 - RNA, 19 nt, Artificial Sequence
  Description of Artificial Sequence: Synthetic oligonucleotide
  Antisense strand to SEQ ID NO: 942704
auaucugauaauguuucca

SEQ ID NO: 942706 - RNA, 19 nt, Artificial Sequence
  Description of Artificial Sequence: Synthetic oligonucleotide
  Sense strand starting at position 727 of SEQ ID NO: 913636
uaaauagcugguuguagua

SEQ ID NO: 942707 - RNA, 19 nt, Artificial Sequence
  Description of Artificial Sequence: Synthetic oligonucleotide
  Antisense strand to SEQ ID NO: 942706
uacuacaaccagcuauuua

SEQ ID NO: 942708 - RNA, 19 nt, Artificial Sequence
  Description of Artificial Sequence: Synthetic oligonucleotide
  Sense strand starting at position 2171 of SEQ ID NO: 913636
ucagacagcgguugauagu

SEQ ID NO: 942709 - RNA, 19 nt, Artificial Sequence
  Description of Artificial Sequence: Synthetic oligonucleotide
  Antisense strand to SEQ ID NO: 942708
acuaucaaccgcugucuga

SEQ ID NO: 942710 - RNA, 19 nt, Artificial Sequence
  Description of Artificial Sequence: Synthetic oligonucleotide
  Sense strand starting at position 2181 of SEQ ID NO: 913636
guugauaguuccgcaaaca

SEQ ID NO: 942711 - RNA, 19 nt, Artificial Sequence
  Description of Artificial Sequence: Synthetic oligonucleotide
  Antisense strand to SEQ ID NO: 942710
uguuugcggaacuaucaac

SEQ ID NO: 942712 - RNA, 19 nt, Artificial Sequence
  Description of Artificial Sequence: Synthetic oligonucleotide
  Sense strand starting at position 3743 of SEQ ID NO: 913636
gugaaacggugguucaagu

SEQ ID NO: 942713 - RNA, 19 nt, Artificial Sequence
  Description of Artificial Sequence: Synthetic oligonucleotide
  Antisense strand to SEQ ID NO: 942712
acuugaaccaccguuucac

SEQ ID NO: 942714 - RNA, 19 nt, Artificial Sequence
  Description of Artificial Sequence: Synthetic oligonucleotide
  Sense strand starting at position 2168 of SEQ ID NO: 913636
gccucagacagcgguugau

SEQ ID NO: 942715 - RNA, 19 nt, Artificial Sequence
  Description of Artificial Sequence: Synthetic oligonucleotide
  Antisense strand to SEQ ID NO: 942714
aucaaccgcugucugaggc

SEQ ID NO: 942716 - RNA, 19 nt, Artificial Sequence
  Description of Artificial Sequence: Synthetic oligonucleotide
  Sense strand starting at position 2969 of SEQ ID NO: 913636
guguuaugcgcguuugugu

SEQ ID NO: 942717 - RNA, 19 nt, Artificial Sequence
  Description of Artificial Sequence: Synthetic oligonucleotide
  Antisense strand to SEQ ID NO: 942716
acacaaacgcgcauaacac

SEQ ID NO: 942718 - RNA, 19 nt, Artificial Sequence
  Description of Artificial Sequence: Synthetic oligonucleotide
  Sense strand starting at position 539 of SEQ ID NO: 913636
aguagauauuaagggauau

SEQ ID NO: 942719 - RNA, 19 nt, Artificial Sequence
  Description of Artificial Sequence: Synthetic oligonucleotide
  Antisense strand to SEQ ID NO: 942718
auaucccuuaauaucuacu

SEQ ID NO: 942720 - RNA, 19 nt, Artificial Sequence
  Description of Artificial Sequence: Synthetic oligonucleotide
  Sense strand starting at position 3471 of SEQ ID NO: 913637
ucugcaugaucauuuaguu

SEQ ID NO: 942721 - RNA, 19 nt, Artificial Sequence
  Description of Artificial Sequence: Synthetic oligonucleotide
  Antisense strand to SEQ ID NO: 942720
aacuaaaugaucaugcaga

SEQ ID NO: 942722 - RNA, 19 nt, Artificial Sequence
  Description of Artificial Sequence: Synthetic oligonucleotide
  Sense strand starting at position 3441 of SEQ ID NO: 913637
aucgauaaagaguaaugca

SEQ ID NO: 942723 - RNA, 19 nt, Artificial Sequence
  Description of Artificial Sequence: Synthetic oligonucleotide
  Antisense strand to SEQ ID NO: 942722
ugcauuacucuuuaucgau

SEQ ID NO: 942724 - RNA, 19 nt, Artificial Sequence
  Description of Artificial Sequence: Synthetic oligonucleotide
  Sense strand starting at position 2606 of SEQ ID NO: 913637
gauagauuccuacagcgaa

SEQ ID NO: 942725 - RNA, 19 nt, Artificial Sequence
  Description of Artificial Sequence: Synthetic oligonucleotide
  Antisense strand to SEQ ID NO: 942724
uucgcuguaggaaucuauc

SEQ ID NO: 942726 - RNA, 19 nt, Artificial Sequence
  Description of Artificial Sequence: Synthetic oligonucleotide
  Sense strand starting at position 2247 of SEQ ID NO: 913637
augaguuaccaugaagucu

SEQ ID NO: 942727 - RNA, 19 nt, Artificial Sequence
  Description of Artificial Sequence: Synthetic oligonucleotide
  Antisense strand to SEQ ID NO: 942726
agacuucaugguaacucau

SEQ ID NO: 942728 - RNA, 19 nt, Artificial Sequence
  Description of Artificial Sequence: Synthetic oligonucleotide
  Sense strand starting at position 359 of SEQ ID NO: 913637
ggauaacuuggauguauua

SEQ ID NO: 942729 - RNA, 19 nt, Artificial Sequence
  Description of Artificial Sequence: Synthetic oligonucleotide
  Antisense strand to SEQ ID NO: 942728
uaauacauccaaguuaucc

SEQ ID NO: 942730 - RNA, 19 nt, Artificial Sequence
  Description of Artificial Sequence: Synthetic oligonucleotide
  Sense strand starting at position 3690 of SEQ ID NO: 913637
acgggaaguaguuaucuaa

SEQ ID NO: 942731 - RNA, 19 nt, Artificial Sequence
  Description of Artificial Sequence: Synthetic oligonucleotide
  Antisense strand to SEQ ID NO: 942730
uuagauaacuacuucccgu

SEQ ID NO: 942732 - RNA, 19 nt, Artificial Sequence
  Description of Artificial Sequence: Synthetic oligonucleotide
  Sense strand starting at position 1995 of SEQ ID NO: 913637
acaauugugccucagaaau

SEQ ID NO: 942733 - RNA, 19 nt, Artificial Sequence
  Description of Artificial Sequence: Synthetic oligonucleotide
  Antisense strand to SEQ ID NO: 942732
auuucugaggcacaauugu

SEQ ID NO: 942734 - RNA, 19 nt, Artificial Sequence
  Description of Artificial Sequence: Synthetic oligonucleotide
  Sense strand starting at position 17 of SEQ ID NO: 913637
uguugcacacaagauaauu

SEQ ID NO: 942735 - RNA, 19 nt, Artificial Sequence
  Description of Artificial Sequence: Synthetic oligonucleotide
  Antisense strand to SEQ ID NO: 942734
aauuaucuugugugcaaca

SEQ ID NO: 942736 - RNA, 19 nt, Artificial Sequence
  Description of Artificial Sequence: Synthetic oligonucleotide
  Sense strand starting at position 3499 of SEQ ID NO: 913637
ggauuauaguacuugaauc

SEQ ID NO: 942737 - RNA, 19 nt, Artificial Sequence
  Description of Artificial Sequence: Synthetic oligonucleotide
  Antisense strand to SEQ ID NO: 942736
gauucaaguacuauaaucc

SEQ ID NO: 942738 - RNA, 19 nt, Artificial Sequence
  Description of Artificial Sequence: Synthetic oligonucleotide
  Sense strand starting at position 3376 of SEQ ID NO: 913637
guuucuguacuauaacaga

SEQ ID NO: 942739 - RNA, 19 nt, Artificial Sequence
  Description of Artificial Sequence: Synthetic oligonucleotide
  Antisense strand to SEQ ID NO: 942738
ucuguuauaguacagaaac

SEQ ID NO: 942740 - RNA, 19 nt, Artificial Sequence
  Description of Artificial Sequence: Synthetic oligonucleotide
  Sense strand starting at position 3223 of SEQ ID NO: 913637
cuccuaauagcggagaauu

SEQ ID NO: 942741 - RNA, 19 nt, Artificial Sequence
  Description of Artificial Sequence: Synthetic oligonucleotide
  Antisense strand to SEQ ID NO: 942740
aauucuccgcuauuaggag

SEQ ID NO: 942742 - RNA, 19 nt, Artificial Sequence
  Description of Artificial Sequence: Synthetic oligonucleotide
  Sense strand starting at position 2243 of SEQ ID NO: 913637
ucucaugaguuaccaugaa

SEQ ID NO: 942743 - RNA, 19 nt, Artificial Sequence
  Description of Artificial Sequence: Synthetic oligonucleotide
  Antisense strand to SEQ ID NO: 942742
uucaugguaacucaugaga

SEQ ID NO: 942744 - RNA, 19 nt, Artificial Sequence
  Description of Artificial Sequence: Synthetic oligonucleotide
  Sense strand starting at position 3582 of SEQ ID NO: 913637
uucuuaaucugaguaacag

SEQ ID NO: 942745 - RNA, 19 nt, Artificial Sequence
  Description of Artificial Sequence: Synthetic oligonucleotide
  Antisense strand to SEQ ID NO: 942744
cuguuacucagauuaagaa

SEQ ID NO: 942746 - RNA, 19 nt, Artificial Sequence
  Description of Artificial Sequence: Synthetic oligonucleotide
  Sense strand starting at position 3392 of SEQ ID NO: 913637
agagcacaucuacgaaaca

SEQ ID NO: 942747 - RNA, 19 nt, Artificial Sequence
  Description of Artificial Sequence: Synthetic oligonucleotide
  Antisense strand to SEQ ID NO: 942746
uguuucguagaugugcucu

SEQ ID NO: 942748 - RNA, 19 nt, Artificial Sequence
  Description of Artificial Sequence: Synthetic oligonucleotide
  Sense strand starting at position 2437 of SEQ ID NO: 913637
gagacuggucaguaucucu

SEQ ID NO: 942749 - RNA, 19 nt, Artificial Sequence
  Description of Artificial Sequence: Synthetic oligonucleotide
  Antisense strand to SEQ ID NO: 942748
agagauacugaccagucuc

SEQ ID NO: 942750 - RNA, 19 nt, Artificial Sequence
  Description of Artificial Sequence: Synthetic oligonucleotide
  Sense strand starting at position 3468 of SEQ ID NO: 913637
cguucugcaugaucauuua

SEQ ID NO: 942751 - RNA, 19 nt, Artificial Sequence
  Description of Artificial Sequence: Synthetic oligonucleotide
  Antisense strand to SEQ ID NO: 942750
uaaaugaucaugcagaacg

SEQ ID NO: 942752 - RNA, 19 nt, Artificial Sequence
  Description of Artificial Sequence: Synthetic oligonucleotide
  Sense strand starting at position 3693 of SEQ ID NO: 913637
ggaaguaguuaucuaaauc

SEQ ID NO: 942753 - RNA, 19 nt, Artificial Sequence
  Description of Artificial Sequence: Synthetic oligonucleotide
  Antisense strand to SEQ ID NO: 942752
gauuuagauaacuacuucc

SEQ ID NO: 942754 - RNA, 19 nt, Artificial Sequence
  Description of Artificial Sequence: Synthetic oligonucleotide
  Sense strand starting at position 2706 of SEQ ID NO: 913637
auguccaagcuuuaauuga

SEQ ID NO: 942755 - RNA, 19 nt, Artificial Sequence
  Description of Artificial Sequence: Synthetic oligonucleotide
  Antisense strand to SEQ ID NO: 942754
ucaauuaaagcuuggacau

SEQ ID NO: 942756 - RNA, 19 nt, Artificial Sequence
  Description of Artificial Sequence: Synthetic oligonucleotide
  Sense strand starting at position 2106 of SEQ ID NO: 913637
cgaagacuuguccauucua

SEQ ID NO: 942757 - RNA, 19 nt, Artificial Sequence
  Description of Artificial Sequence: Synthetic oligonucleotide
  Antisense strand to SEQ ID NO: 942756
uagaauggacaagucuucg

SEQ ID NO: 942758 - RNA, 19 nt, Artificial Sequence
  Description of Artificial Sequence: Synthetic oligonucleotide
  Sense strand starting at position 608 of SEQ ID NO: 913637
accacaguauuaguaacau

SEQ ID NO: 942759 - RNA, 19 nt, Artificial Sequence
  Description of Artificial Sequence: Synthetic oligonucleotide
  Antisense strand to SEQ ID NO: 942758
auguuacuaauacuguggu

SEQ ID NO: 942760 - RNA, 19 nt, Artificial Sequence
  Description of Artificial Sequence: Synthetic oligonucleotide
  Sense strand starting at position 2811 of SEQ ID NO: 913637
uugaacuauuggccugaua

SEQ ID NO: 942761 - RNA, 19 nt, Artificial Sequence
  Description of Artificial Sequence: Synthetic oligonucleotide
  Antisense strand to SEQ ID NO: 942760
uaucaggccaauaguucaa

SEQ ID NO: 942762 - RNA, 19 nt, Artificial Sequence
  Description of Artificial Sequence: Synthetic oligonucleotide
  Sense strand starting at position 3681 of SEQ ID NO: 913637
aucuucuuaacgggaagua

SEQ ID NO: 942763 - RNA, 19 nt, Artificial Sequence
  Description of Artificial Sequence: Synthetic oligonucleotide
  Antisense strand to SEQ ID NO: 942762
uacuucccguuaagaagau

SEQ ID NO: 942764 - RNA, 19 nt, Artificial Sequence
  Description of Artificial Sequence: Synthetic oligonucleotide
  Sense strand starting at position 1993 of SEQ ID NO: 913637
acacaauugugccucagaa

SEQ ID NO: 942765 - RNA, 19 nt, Artificial Sequence
  Description of Artificial Sequence: Synthetic oligonucleotide
  Antisense strand to SEQ ID NO: 942764
uucugaggcacaauugugu

SEQ ID NO: 942766 - RNA, 19 nt, Artificial Sequence
  Description of Artificial Sequence: Synthetic oligonucleotide
  Sense strand starting at position 3726 of SEQ ID NO: 913637
agacucuucuuuguuuaag

SEQ ID NO: 942767 - RNA, 19 nt, Artificial Sequence
  Description of Artificial Sequence: Synthetic oligonucleotide
  Antisense strand to SEQ ID NO: 942766
cuuaaacaaagaagagucu

SEQ ID NO: 942768 - RNA, 19 nt, Artificial Sequence
  Description of Artificial Sequence: Synthetic oligonucleotide
  Sense strand starting at position 2052 of SEQ ID NO: 913637
gccaaagugccauaauacu

SEQ ID NO: 942769 - RNA, 19 nt, Artificial Sequence
  Description of Artificial Sequence: Synthetic oligonucleotide
  Antisense strand to SEQ ID NO: 942768
aguauuauggcacuuuggc

SEQ ID NO: 942770 - RNA, 19 nt, Artificial Sequence
  Description of Artificial Sequence: Synthetic oligonucleotide
  Sense strand starting at position 603 of SEQ ID NO: 913637
ccuguaccacaguauuagu

SEQ ID NO: 942771 - RNA, 19 nt, Artificial Sequence
  Description of Artificial Sequence: Synthetic oligonucleotide
  Antisense strand to SEQ ID NO: 942770
acuaauacugugguacagg

SEQ ID NO: 942772 - RNA, 19 nt, Artificial Sequence
  Description of Artificial Sequence: Synthetic oligonucleotide
  Sense strand starting at position 2237 of SEQ ID NO: 913637
uuuguuucucaugaguuac

SEQ ID NO: 942773 - RNA, 19 nt, Artificial Sequence
  Description of Artificial Sequence: Synthetic oligonucleotide
  Antisense strand to SEQ ID NO: 942772
guaacucaugagaaacaaa

SEQ ID NO: 942774 - RNA, 19 nt, Artificial Sequence
  Description of Artificial Sequence: Synthetic oligonucleotide
  Sense strand starting at position 3769 of SEQ ID NO: 913637
uggguugcagggugaaaua

SEQ ID NO: 942775 - RNA, 19 nt, Artificial Sequence
  Description of Artificial Sequence: Synthetic oligonucleotide
  Antisense strand to SEQ ID NO: 942774
uauuucacccugcaaccca

SEQ ID NO: 942776 - RNA, 19 nt, Artificial Sequence
  Description of Artificial Sequence: Synthetic oligonucleotide
  Sense strand starting at position 186 of SEQ ID NO: 913637
agagguagguucucuaagu

SEQ ID NO: 942777 - RNA, 19 nt, Artificial Sequence
  Description of Artificial Sequence: Synthetic oligonucleotide
  Antisense strand to SEQ ID NO: 942776
acuuagagaaccuaccucu

SEQ ID NO: 942778 - RNA, 19 nt, Artificial Sequence
  Description of Artificial Sequence: Synthetic oligonucleotide
  Sense strand starting at position 2433 of SEQ ID NO: 913637
ccgagagacuggucaguau

SEQ ID NO: 942779 - RNA, 19 nt, Artificial Sequence
  Description of Artificial Sequence: Synthetic oligonucleotide
  Antisense strand to SEQ ID NO: 942778
auacugaccagucucucgg

SEQ ID NO: 942780 - RNA, 19 nt, Artificial Sequence
  Description of Artificial Sequence: Synthetic oligonucleotide
  Sense strand starting at position 600 of SEQ ID NO: 913637
gggccuguaccacaguauu

SEQ ID NO: 942781 - RNA, 19 nt, Artificial Sequence
  Description of Artificial Sequence: Synthetic oligonucleotide
  Antisense strand to SEQ ID NO: 942780
aauacugugguacaggccc

SEQ ID NO: 942782 - RNA, 19 nt, Artificial Sequence
  Description of Artificial Sequence: Synthetic oligonucleotide
  Sense strand starting at position 402 of SEQ ID NO: 913637
ugcugcaaccuguaaucaa

SEQ ID NO: 942783 - RNA, 19 nt, Artificial Sequence
  Description of Artificial Sequence: Synthetic oligonucleotide
  Antisense strand to SEQ ID NO: 942782
uugauuacagguugcagca

SEQ ID NO: 942784 - RNA, 19 nt, Artificial Sequence
  Description of Artificial Sequence: Synthetic oligonucleotide
  Sense strand starting at position 590 of SEQ ID NO: 913637
aagggauugugggccugua

SEQ ID NO: 942785 - RNA, 19 nt, Artificial Sequence
  Description of Artificial Sequence: Synthetic oligonucleotide
  Antisense strand to SEQ ID NO: 942784
uacaggcccacaaucccuu

SEQ ID NO: 942786 - RNA, 19 nt, Artificial Sequence
  Description of Artificial Sequence: Synthetic oligonucleotide
  Sense strand starting at position 2982 of SEQ ID NO: 913637
uguucuggucacuaagcau

SEQ ID NO: 942787 - RNA, 19 nt, Artificial Sequence
  Description of Artificial Sequence: Synthetic oligonucleotide
  Antisense strand to SEQ ID NO: 942786
augcuuagugaccagaaca

SEQ ID NO: 942788 - RNA, 19 nt, Artificial Sequence
  Description of Artificial Sequence: Synthetic oligonucleotide
  Sense strand starting at position 2270 of SEQ ID NO: 913637
agccgacuuccuuggagau

SEQ ID NO: 942789 - RNA, 19 nt, Artificial Sequence
  Description of Artificial Sequence: Synthetic oligonucleotide
  Antisense strand to SEQ ID NO: 942788
aucuccaaggaagucggcu

SEQ ID NO: 942790 - RNA, 19 nt, Artificial Sequence
  Description of Artificial Sequence: Synthetic oligonucleotide
  Sense strand starting at position 187 of SEQ ID NO: 913637
gagguagguucucuaaguu

SEQ ID NO: 942791 - RNA, 19 nt, Artificial Sequence
  Description of Artificial Sequence: Synthetic oligonucleotide
  Antisense strand to SEQ ID NO: 942790
aacuuagagaaccuaccuc

SEQ ID NO: 942792 - RNA, 19 nt, Artificial Sequence
  Description of Artificial Sequence: Synthetic oligonucleotide
  Sense strand starting at position 2239 of SEQ ID NO: 913637
uguuucucaugaguuacca

SEQ ID NO: 942793 - RNA, 19 nt, Artificial Sequence
  Description of Artificial Sequence: Synthetic oligonucleotide
  Antisense strand to SEQ ID NO: 942792
ugguaacucaugagaaaca

SEQ ID NO: 942794 - RNA, 19 nt, Artificial Sequence
  Description of Artificial Sequence: Synthetic oligonucleotide
  Sense strand starting at position 3466 of SEQ ID NO: 913637
cacguucugcaugaucauu

SEQ ID NO: 942795 - RNA, 19 nt, Artificial Sequence
  Description of Artificial Sequence: Synthetic oligonucleotide
  Antisense strand to SEQ ID NO: 942794
aaugaucaugcagaacgug

SEQ ID NO: 942796 - RNA, 19 nt, Artificial Sequence
  Description of Artificial Sequence: Synthetic oligonucleotide
  Sense strand starting at position 3173 of SEQ ID NO: 913637
gcuaaugguggcggaagaa

SEQ ID NO: 942797 - RNA, 19 nt, Artificial Sequence
  Description of Artificial Sequence: Synthetic oligonucleotide
  Antisense strand to SEQ ID NO: 942796
uucuuccgccaccauuagc

SEQ ID NO: 942798 - RNA, 19 nt, Artificial Sequence
  Description of Artificial Sequence: Synthetic oligonucleotide
  Sense strand starting at position 2139 of SEQ ID NO: 913637
gagugucagcgguagauua

SEQ ID NO: 942799 - RNA, 19 nt, Artificial Sequence
  Description of Artificial Sequence: Synthetic oligonucleotide
  Antisense strand to SEQ ID NO: 942798
uaaucuaccgcugacacuc

SEQ ID NO: 942800 - RNA, 19 nt, Artificial Sequence
  Description of Artificial Sequence: Synthetic oligonucleotide
  Sense strand starting at position 3721 of SEQ ID NO: 913638
uugccuuuacuggaaauaa

SEQ ID NO: 942801 - RNA, 19 nt, Artificial Sequence
  Description of Artificial Sequence: Synthetic oligonucleotide
  Antisense strand to SEQ ID NO: 942800
uuauuuccaguaaaggcaa

SEQ ID NO: 942802 - RNA, 19 nt, Artificial Sequence
  Description of Artificial Sequence: Synthetic oligonucleotide
  Sense strand starting at position 39 of SEQ ID NO: 913638
acaauaacucuguaagguc

SEQ ID NO: 942803 - RNA, 19 nt, Artificial Sequence
  Description of Artificial Sequence: Synthetic oligonucleotide
  Antisense strand to SEQ ID NO: 942802
gaccuuacagaguuauugu

SEQ ID NO: 942804 - RNA, 19 nt, Artificial Sequence
  Description of Artificial Sequence: Synthetic oligonucleotide
  Sense strand starting at position 2798 of SEQ ID NO: 913638
accauauuacuuugggaug

SEQ ID NO: 942805 - RNA, 19 nt, Artificial Sequence
  Description of Artificial Sequence: Synthetic oligonucleotide
  Antisense strand to SEQ ID NO: 942804
caucccaaaguaauauggu

SEQ ID NO: 942806 - RNA, 19 nt, Artificial Sequence
  Description of Artificial Sequence: Synthetic oligonucleotide
  Sense strand starting at position 3140 of SEQ ID NO: 913638
cguuauguucucuaauuuc

SEQ ID NO: 942807 - RNA, 19 nt, Artificial Sequence
  Description of Artificial Sequence: Synthetic oligonucleotide
  Antisense strand to SEQ ID NO: 942806
gaaauuagagaacauaacg

SEQ ID NO: 942808 - RNA, 19 nt, Artificial Sequence
  Description of Artificial Sequence: Synthetic oligonucleotide
  Sense strand starting at position 772 of SEQ ID NO: 913638
acagguguucccuaaauag

SEQ ID NO: 942809 - RNA, 19 nt, Artificial Sequence
  Description of Artificial Sequence: Synthetic oligonucleotide
  Antisense strand to SEQ ID NO: 942808
cuauuuagggaacaccugu

SEQ ID NO: 942810 - RNA, 19 nt, Artificial Sequence
  Description of Artificial Sequence: Synthetic oligonucleotide
  Sense strand starting at position 671 of SEQ ID NO: 913638
gggagagauuacguaaauc

SEQ ID NO: 942811 - RNA, 19 nt, Artificial Sequence
  Description of Artificial Sequence: Synthetic oligonucleotide
  Antisense strand to SEQ ID NO: 942810
gauuuacguaaucucuccc

SEQ ID NO: 942812 - RNA, 19 nt, Artificial Sequence
  Description of Artificial Sequence: Synthetic oligonucleotide
  Sense strand starting at position 3687 of SEQ ID NO: 913638
ggaucucaauaauuacgau

SEQ ID NO: 942813 - RNA, 19 nt, Artificial Sequence
  Description of Artificial Sequence: Synthetic oligonucleotide
  Antisense strand to SEQ ID NO: 942812
aucguaauuauugagaucc

SEQ ID NO: 942814 - RNA, 19 nt, Artificial Sequence
  Description of Artificial Sequence: Synthetic oligonucleotide
  Sense strand starting at position 1131 of SEQ ID NO: 913638
gggauacuuugggccaaga

SEQ ID NO: 942815 - RNA, 19 nt, Artificial Sequence
  Description of Artificial Sequence: Synthetic oligonucleotide
  Antisense strand to SEQ ID NO: 942814
ucuuggcccaaaguauccc

SEQ ID NO: 942816 - RNA, 19 nt, Artificial Sequence
  Description of Artificial Sequence: Synthetic oligonucleotide
  Sense strand starting at position 3187 of SEQ ID NO: 913638
ccuugcauuuggcuaauua

SEQ ID NO: 942817 - RNA, 19 nt, Artificial Sequence
  Description of Artificial Sequence: Synthetic oligonucleotide
  Antisense strand to SEQ ID NO: 942816
uaauuagccaaaugcaagg

SEQ ID NO: 942818 - RNA, 19 nt, Artificial Sequence
  Description of Artificial Sequence: Synthetic oligonucleotide
  Sense strand starting at position 1133 of SEQ ID NO: 913638
gauacuuugggccaagagu

SEQ ID NO: 942819 - RNA, 19 nt, Artificial Sequence
  Description of Artificial Sequence: Synthetic oligonucleotide
  Antisense strand to SEQ ID NO: 942818
acucuuggcccaaaguauc

SEQ ID NO: 942820 - RNA, 19 nt, Artificial Sequence
  Description of Artificial Sequence: Synthetic oligonucleotide
  Sense strand starting at position 3873 of SEQ ID NO: 913638
guacauagagcucauaacu

SEQ ID NO: 942821 - RNA, 19 nt, Artificial Sequence
  Description of Artificial Sequence: Synthetic oligonucleotide
  Antisense strand to SEQ ID NO: 942820
aguuaugagcucuauguac

SEQ ID NO: 942822 - RNA, 19 nt, Artificial Sequence
  Description of Artificial Sequence: Synthetic oligonucleotide
  Sense strand starting at position 753 of SEQ ID NO: 913638
cgcccaaucuauuucggga

SEQ ID NO: 942823 - RNA, 19 nt, Artificial Sequence
  Description of Artificial Sequence: Synthetic oligonucleotide
  Antisense strand to SEQ ID NO: 942822
ucccgaaauagauugggcg

SEQ ID NO: 942824 - RNA, 19 nt, Artificial Sequence
  Description of Artificial Sequence: Synthetic oligonucleotide
  Sense strand starting at position 342 of SEQ ID NO: 913638
caaagugggaaguguuaaa

SEQ ID NO: 942825 - RNA, 19 nt, Artificial Sequence
  Description of Artificial Sequence: Synthetic oligonucleotide
  Antisense strand to SEQ ID NO: 942824
uuuaacacuucccacuuug

SEQ ID NO: 942826 - RNA, 19 nt, Artificial Sequence
  Description of Artificial Sequence: Synthetic oligonucleotide
  Sense strand starting at position 3139 of SEQ ID NO: 913638
acguuauguucucuaauuu

SEQ ID NO: 942827 - RNA, 19 nt, Artificial Sequence
  Description of Artificial Sequence: Synthetic oligonucleotide
  Antisense strand to SEQ ID NO: 942826
aaauuagagaacauaacgu

SEQ ID NO: 942828 - RNA, 19 nt, Artificial Sequence
  Description of Artificial Sequence: Synthetic oligonucleotide
  Sense strand starting at position 3747 of SEQ ID NO: 913638
auuaucucucagcaaguga

SEQ ID NO: 942829 - RNA, 19 nt, Artificial Sequence
  Description of Artificial Sequence: Synthetic oligonucleotide
  Antisense strand to SEQ ID NO: 942828
ucacuugcugagagauaau

SEQ ID NO: 942830 - RNA, 19 nt, Artificial Sequence
  Description of Artificial Sequence: Synthetic oligonucleotide
  Sense strand starting at position 89 of SEQ ID NO: 913638
aggcuuaaauaagcuaaau

SEQ ID NO: 942831 - RNA, 19 nt, Artificial Sequence
  Description of Artificial Sequence: Synthetic oligonucleotide
  Antisense strand to SEQ ID NO: 942830
auuuagcuuauuuaagccu

SEQ ID NO: 942832 - RNA, 19 nt, Artificial Sequence
  Description of Artificial Sequence: Synthetic oligonucleotide
  Sense strand starting at position 929 of SEQ ID NO: 913638
uagggauaguuacuaguau

SEQ ID NO: 942833 - RNA, 19 nt, Artificial Sequence
  Description of Artificial Sequence: Synthetic oligonucleotide
  Antisense strand to SEQ ID NO: 942832
auacuaguaacuaucccua

SEQ ID NO: 942834 - RNA, 19 nt, Artificial Sequence
  Description of Artificial Sequence: Synthetic oligonucleotide
  Sense strand starting at position 838 of SEQ ID NO: 913638
cugacucaagguuauguuu

SEQ ID NO: 942835 - RNA, 19 nt, Artificial Sequence
  Description of Artificial Sequence: Synthetic oligonucleotide
  Antisense strand to SEQ ID NO: 942834
aaacauaaccuugagucag

SEQ ID NO: 942836 - RNA, 19 nt, Artificial Sequence
  Description of Artificial Sequence: Synthetic oligonucleotide
  Sense strand starting at position 768 of SEQ ID NO: 913638
gggaacagguguucccuaa

SEQ ID NO: 942837 - RNA, 19 nt, Artificial Sequence
  Description of Artificial Sequence: Synthetic oligonucleotide
  Antisense strand to SEQ ID NO: 942836
uuagggaacaccuguuccc

SEQ ID NO: 942838 - RNA, 19 nt, Artificial Sequence
  Description of Artificial Sequence: Synthetic oligonucleotide
  Sense strand starting at position 3956 of SEQ ID NO: 913638
aaugguguaguguauauaa

SEQ ID NO: 942839 - RNA, 19 nt, Artificial Sequence
  Description of Artificial Sequence: Synthetic oligonucleotide
  Antisense strand to SEQ ID NO: 942838
uuauauacacuacaccauu

SEQ ID NO: 942840 - RNA, 19 nt, Artificial Sequence
  Description of Artificial Sequence: Synthetic oligonucleotide
  Sense strand starting at position 430 of SEQ ID NO: 913638
agucauuacauguaggguu

SEQ ID NO: 942841 - RNA, 19 nt, Artificial Sequence
  Description of Artificial Sequence: Synthetic oligonucleotide
  Antisense strand to SEQ ID NO: 942840
aacccuacauguaaugacu

SEQ ID NO: 942842 - RNA, 19 nt, Artificial Sequence
  Description of Artificial Sequence: Synthetic oligonucleotide
  Sense strand starting at position 46 of SEQ ID NO: 913638
cucuguaaggucuauuauc

SEQ ID NO: 942843 - RNA, 19 nt, Artificial Sequence
  Description of Artificial Sequence: Synthetic oligonucleotide
  Antisense strand to SEQ ID NO: 942842
gauaauagaccuuacagag

SEQ ID NO: 942844 - RNA, 19 nt, Artificial Sequence
  Description of Artificial Sequence: Synthetic oligonucleotide
  Sense strand starting at position 959 of SEQ ID NO: 913638
ccuguuacagugcaagaau

SEQ ID NO: 942845 - RNA, 19 nt, Artificial Sequence
  Description of Artificial Sequence: Synthetic oligonucleotide
  Antisense strand to SEQ ID NO: 942844
auucuugcacuguaacagg

SEQ ID NO: 942846 - RNA, 19 nt, Artificial Sequence
  Description of Artificial Sequence: Synthetic oligonucleotide
  Sense strand starting at position 2699 of SEQ ID NO: 913638
uugcccgagcuuugaauuu

SEQ ID NO: 942847 - RNA, 19 nt, Artificial Sequence
  Description of Artificial Sequence: Synthetic oligonucleotide
  Antisense strand to SEQ ID NO: 942846
aaauucaaagcucgggcaa

SEQ ID NO: 942848 - RNA, 19 nt, Artificial Sequence
  Description of Artificial Sequence: Synthetic oligonucleotide
  Sense strand starting at position 2456 of SEQ ID NO: 913638
uggcauaaugugcauuaga

SEQ ID NO: 942849 - RNA, 19 nt, Artificial Sequence
  Description of Artificial Sequence: Synthetic oligonucleotide
  Antisense strand to SEQ ID NO: 942848
ucuaaugcacauuaugcca

SEQ ID NO: 942850 - RNA, 19 nt, Artificial Sequence
  Description of Artificial Sequence: Synthetic oligonucleotide
  Sense strand starting at position 518 of SEQ ID NO: 913638
guucuaucgauuugugcaa

SEQ ID NO: 942851 - RNA, 19 nt, Artificial Sequence
  Description of Artificial Sequence: Synthetic oligonucleotide
  Antisense strand to SEQ ID NO: 942850
uugcacaaaucgauagaac

SEQ ID NO: 942852 - RNA, 19 nt, Artificial Sequence
  Description of Artificial Sequence: Synthetic oligonucleotide
  Sense strand starting at position 217 of SEQ ID NO: 913638
ggcugaauauuaucuuauu

SEQ ID NO: 942853 - RNA, 19 nt, Artificial Sequence
  Description of Artificial Sequence: Synthetic oligonucleotide
  Antisense strand to SEQ ID NO: 942852
aauaagauaauauucagcc

SEQ ID NO: 942854 - RNA, 19 nt, Artificial Sequence
  Description of Artificial Sequence: Synthetic oligonucleotide
  Sense strand starting at position 3866 of SEQ ID NO: 913638
ggucuauguacauagagcu

SEQ ID NO: 942855 - RNA, 19 nt, Artificial Sequence
  Description of Artificial Sequence: Synthetic oligonucleotide
  Antisense strand to SEQ ID NO: 942854
agcucuauguacauagacc

SEQ ID NO: 942856 - RNA, 19 nt, Artificial Sequence
  Description of Artificial Sequence: Synthetic oligonucleotide
  Sense strand starting at position 3958 of SEQ ID NO: 913638
ugguguaguguauauaaca

SEQ ID NO: 942857 - RNA, 19 nt, Artificial Sequence
  Description of Artificial Sequence: Synthetic oligonucleotide
  Antisense strand to SEQ ID NO: 942856
uguuauauacacuacacca

SEQ ID NO: 942858 - RNA, 19 nt, Artificial Sequence
  Description of Artificial Sequence: Synthetic oligonucleotide
  Sense strand starting at position 3951 of SEQ ID NO: 913638
auauuaaugguguagugua

SEQ ID NO: 942859 - RNA, 19 nt, Artificial Sequence
  Description of Artificial Sequence: Synthetic oligonucleotide
  Antisense strand to SEQ ID NO: 942858
uacacuacaccauuaauau

SEQ ID NO: 942860 - RNA, 19 nt, Artificial Sequence
  Description of Artificial Sequence: Synthetic oligonucleotide
  Sense strand starting at position 55 of SEQ ID NO: 913638
gucuauuaucuguacuuua

SEQ ID NO: 942861 - RNA, 19 nt, Artificial Sequence
  Description of Artificial Sequence: Synthetic oligonucleotide
  Antisense strand to SEQ ID NO: 942860
uaaaguacagauaauagac

SEQ ID NO: 942862 - RNA, 19 nt, Artificial Sequence
  Description of Artificial Sequence: Synthetic oligonucleotide
  Sense strand starting at position 424 of SEQ ID NO: 913638
agcccaagucauuacaugu

SEQ ID NO: 942863 - RNA, 19 nt, Artificial Sequence
  Description of Artificial Sequence: Synthetic oligonucleotide
  Antisense strand to SEQ ID NO: 942862
acauguaaugacuugggcu

SEQ ID NO: 942864 - RNA, 19 nt, Artificial Sequence
  Description of Artificial Sequence: Synthetic oligonucleotide
  Sense strand starting at position 2781 of SEQ ID NO: 913638
uucuguacuccuuggaaac

SEQ ID NO: 942865 - RNA, 19 nt, Artificial Sequence
  Description of Artificial Sequence: Synthetic oligonucleotide
  Antisense strand to SEQ ID NO: 942864
guuuccaaggaguacagaa

SEQ ID NO: 942866 - RNA, 19 nt, Artificial Sequence
  Description of Artificial Sequence: Synthetic oligonucleotide
  Sense strand starting at position 2816 of SEQ ID NO: 913638
gcaguaaugcaauaguuaa

SEQ ID NO: 942867 - RNA, 19 nt, Artificial Sequence
  Description of Artificial Sequence: Synthetic oligonucleotide
  Antisense strand to SEQ ID NO: 942866
uuaacuauugcauuacugc

SEQ ID NO: 942868 - RNA, 19 nt, Artificial Sequence
  Description of Artificial Sequence: Synthetic oligonucleotide
  Sense strand starting at position 883 of SEQ ID NO: 913638
caccuuuaggaauguguca

SEQ ID NO: 942869 - RNA, 19 nt, Artificial Sequence
  Description of Artificial Sequence: Synthetic oligonucleotide
  Antisense strand to SEQ ID NO: 942868
ugacacauuccuaaaggug

SEQ ID NO: 942870 - RNA, 19 nt, Artificial Sequence
  Description of Artificial Sequence: Synthetic oligonucleotide
  Sense strand starting at position 3554 of SEQ ID NO: 913638
guguaacuugcuuaugaca

SEQ ID NO: 942871 - RNA, 19 nt, Artificial Sequence
  Description of Artificial Sequence: Synthetic oligonucleotide
  Antisense strand to SEQ ID NO: 942870
ugucauaagcaaguuacac

SEQ ID NO: 942872 - RNA, 19 nt, Artificial Sequence
  Description of Artificial Sequence: Synthetic oligonucleotide
  Sense strand starting at position 2803 of SEQ ID NO: 913638
auuacuuugggaugcagua

SEQ ID NO: 942873 - RNA, 19 nt, Artificial Sequence
  Description of Artificial Sequence: Synthetic oligonucleotide
  Antisense strand to SEQ ID NO: 942872
uacugcaucccaaaguaau

SEQ ID NO: 942874 - RNA, 19 nt, Artificial Sequence
  Description of Artificial Sequence: Synthetic oligonucleotide
  Sense strand starting at position 2444 of SEQ ID NO: 913638
uggcaaagaauguggcaua

SEQ ID NO: 942875 - RNA, 19 nt, Artificial Sequence
  Description of Artificial Sequence: Synthetic oligonucleotide
  Antisense strand to SEQ ID NO: 942874
uaugccacauucuuugcca

SEQ ID NO: 942876 - RNA, 19 nt, Artificial Sequence
  Description of Artificial Sequence: Synthetic oligonucleotide
  Sense strand starting at position 3907 of SEQ ID NO: 913638
ucagaaguguuuccacauu

SEQ ID NO: 942877 - RNA, 19 nt, Artificial Sequence
  Description of Artificial Sequence: Synthetic oligonucleotide
  Antisense strand to SEQ ID NO: 942876
aauguggaaacacuucuga

SEQ ID NO: 942878 - RNA, 19 nt, Artificial Sequence
  Description of Artificial Sequence: Synthetic oligonucleotide
  Sense strand starting at position 2531 of SEQ ID NO: 913638
agagcaaccuguuuguaaa

SEQ ID NO: 942879 - RNA, 19 nt, Artificial Sequence
  Description of Artificial Sequence: Synthetic oligonucleotide
  Antisense strand to SEQ ID NO: 942878
uuuacaaacagguugcucu

SEQ ID NO: 942880 - RNA, 19 nt, Artificial Sequence
  Description of Artificial Sequence: Synthetic oligonucleotide
  Sense strand starting at position 2883 of SEQ ID NO: 913639
gcggaugcugccuuguaga

SEQ ID NO: 942881 - RNA, 19 nt, Artificial Sequence
  Description of Artificial Sequence: Synthetic oligonucleotide
  Antisense strand to SEQ ID NO: 942880
ucuacaaggcagcauccgc

SEQ ID NO: 942882 - RNA, 19 nt, Artificial Sequence
  Description of Artificial Sequence: Synthetic oligonucleotide
  Sense strand starting at position 3636 of SEQ ID NO: 913639
cuaucacugccuuauagag

SEQ ID NO: 942883 - RNA, 19 nt, Artificial Sequence
  Description of Artificial Sequence: Synthetic oligonucleotide
  Antisense strand to SEQ ID NO: 942882
cucuauaaggcagugauag

SEQ ID NO: 942884 - RNA, 19 nt, Artificial Sequence
  Description of Artificial Sequence: Synthetic oligonucleotide
  Sense strand starting at position 368 of SEQ ID NO: 913639
gugaaaugacgguaacuug

SEQ ID NO: 942885 - RNA, 19 nt, Artificial Sequence
  Description of Artificial Sequence: Synthetic oligonucleotide
  Antisense strand to SEQ ID NO: 942884
caaguuaccgucauuucac

SEQ ID NO: 942886 - RNA, 19 nt, Artificial Sequence
  Description of Artificial Sequence: Synthetic oligonucleotide
  Sense strand starting at position 170 of SEQ ID NO: 913639
uuaauaucuggugaggcau

SEQ ID NO: 942887 - RNA, 19 nt, Artificial Sequence
  Description of Artificial Sequence: Synthetic oligonucleotide
  Antisense strand to SEQ ID NO: 942886
augccucaccagauauuaa

SEQ ID NO: 942888 - RNA, 19 nt, Artificial Sequence
  Description of Artificial Sequence: Synthetic oligonucleotide
  Sense strand starting at position 3405 of SEQ ID NO: 913639
ucuguuucucaggaaaggu

SEQ ID NO: 942889 - RNA, 19 nt, Artificial Sequence
  Description of Artificial Sequence: Synthetic oligonucleotide
  Antisense strand to SEQ ID NO: 942888
accuuuccugagaaacaga

SEQ ID NO: 942890 - RNA, 19 nt, Artificial Sequence
  Description of Artificial Sequence: Synthetic oligonucleotide
  Sense strand starting at position 3454 of SEQ ID NO: 913639
aggcuucggagaggaaauu

SEQ ID NO: 942891 - RNA, 19 nt, Artificial Sequence
  Description of Artificial Sequence: Synthetic oligonucleotide
  Antisense strand to SEQ ID NO: 942890
aauuuccucuccgaagccu

SEQ ID NO: 942892 - RNA, 19 nt, Artificial Sequence
  Description of Artificial Sequence: Synthetic oligonucleotide
  Sense strand starting at position 426 of SEQ ID NO: 913639
uauguacuacucugggaau

SEQ ID NO: 942893 - RNA, 19 nt, Artificial Sequence
  Description of Artificial Sequence: Synthetic oligonucleotide
  Antisense strand to SEQ ID NO: 942892
auucccagaguaguacaua

SEQ ID NO: 942894 - RNA, 19 nt, Artificial Sequence
  Description of Artificial Sequence: Synthetic oligonucleotide
  Sense strand starting at position 448 of SEQ ID NO: 913639
ccgggucuugugaguggua

SEQ ID NO: 942895 - RNA, 19 nt, Artificial Sequence
  Description of Artificial Sequence: Synthetic oligonucleotide
  Antisense strand to SEQ ID NO: 942894
uaccacucacaagacccgg

SEQ ID NO: 942896 - RNA, 19 nt, Artificial Sequence
  Description of Artificial Sequence: Synthetic oligonucleotide
  Sense strand starting at position 145 of SEQ ID NO: 913639
aguaguaaacauggauagu

SEQ ID NO: 942897 - RNA, 19 nt, Artificial Sequence
  Description of Artificial Sequence: Synthetic oligonucleotide
  Antisense strand to SEQ ID NO: 942896
acuauccauguuuacuacu

SEQ ID NO: 942898 - RNA, 19 nt, Artificial Sequence
  Description of Artificial Sequence: Synthetic oligonucleotide
  Sense strand starting at position 3952 of SEQ ID NO: 913639
gcuggaaagagaugcuuaa

SEQ ID NO: 942899 - RNA, 19 nt, Artificial Sequence
  Description of Artificial Sequence: Synthetic oligonucleotide
  Antisense strand to SEQ ID NO: 942898
uuaagcaucucuuuccagc

SEQ ID NO: 942900 - RNA, 19 nt, Artificial Sequence
  Description of Artificial Sequence: Synthetic oligonucleotide
  Sense strand starting at position 451 of SEQ ID NO: 913639
ggucuugugagugguauuu

SEQ ID NO: 942901 - RNA, 19 nt, Artificial Sequence
  Description of Artificial Sequence: Synthetic oligonucleotide
  Antisense strand to SEQ ID NO: 942900
aaauaccacucacaagacc

SEQ ID NO: 942902 - RNA, 19 nt, Artificial Sequence
  Description of Artificial Sequence: Synthetic oligonucleotide
  Sense strand starting at position 2684 of SEQ ID NO: 913639
cgggaacuuguugagucua

SEQ ID NO: 942903 - RNA, 19 nt, Artificial Sequence
  Description of Artificial Sequence: Synthetic oligonucleotide
  Antisense strand to SEQ ID NO: 942902
uagacucaacaaguucccg

SEQ ID NO: 942904 - RNA, 19 nt, Artificial Sequence
  Description of Artificial Sequence: Synthetic oligonucleotide
  Sense strand starting at position 366 of SEQ ID NO: 913639
uagugaaaugacgguaacu

SEQ ID NO: 942905 - RNA, 19 nt, Artificial Sequence
  Description of Artificial Sequence: Synthetic oligonucleotide
  Antisense strand to SEQ ID NO: 942904
aguuaccgucauuucacua

SEQ ID NO: 942906 - RNA, 19 nt, Artificial Sequence
  Description of Artificial Sequence: Synthetic oligonucleotide
  Sense strand starting at position 3145 of SEQ ID NO: 913639
uccuuuguggcagaguaga

SEQ ID NO: 942907 - RNA, 19 nt, Artificial Sequence
  Description of Artificial Sequence: Synthetic oligonucleotide
  Antisense strand to SEQ ID NO: 942906
ucuacucugccacaaagga

SEQ ID NO: 942908 - RNA, 19 nt, Artificial Sequence
  Description of Artificial Sequence: Synthetic oligonucleotide
  Sense strand starting at position 3973 of SEQ ID NO: 913639
uugugugagcaguauggaa

SEQ ID NO: 942909 - RNA, 19 nt, Artificial Sequence
  Description of Artificial Sequence: Synthetic oligonucleotide
  Antisense strand to SEQ ID NO: 942908
uuccauacugcucacacaa

SEQ ID NO: 942910 - RNA, 19 nt, Artificial Sequence
  Description of Artificial Sequence: Synthetic oligonucleotide
  Sense strand starting at position 614 of SEQ ID NO: 913639
gucuucugaaaugaucguu

SEQ ID NO: 942911 - RNA, 19 nt, Artificial Sequence
  Description of Artificial Sequence: Synthetic oligonucleotide
  Antisense strand to SEQ ID NO: 942910
aacgaucauuucagaagac

SEQ ID NO: 942912 - RNA, 19 nt, Artificial Sequence
  Description of Artificial Sequence: Synthetic oligonucleotide
  Sense strand starting at position 3532 of SEQ ID NO: 913639
ugagaccucuuugccuaua

SEQ ID NO: 942913 - RNA, 19 nt, Artificial Sequence
  Description of Artificial Sequence: Synthetic oligonucleotide
  Antisense strand to SEQ ID NO: 942912
uauaggcaaagaggucuca

SEQ ID NO: 942914 - RNA, 19 nt, Artificial Sequence
  Description of Artificial Sequence: Synthetic oligonucleotide
  Sense strand starting at position 3545 of SEQ ID NO: 913639
ccuauacaucccugagucu

SEQ ID NO: 942915 - RNA, 19 nt, Artificial Sequence
  Description of Artificial Sequence: Synthetic oligonucleotide
  Antisense strand to SEQ ID NO: 942914
agacucagggauguauagg

SEQ ID NO: 942916 - RNA, 19 nt, Artificial Sequence
  Description of Artificial Sequence: Synthetic oligonucleotide
  Sense strand starting at position 3401 of SEQ ID NO: 913639
uuagucuguuucucaggaa

SEQ ID NO: 942917 - RNA, 19 nt, Artificial Sequence
  Description of Artificial Sequence: Synthetic oligonucleotide
  Antisense strand to SEQ ID NO: 942916
uuccugagaaacagacuaa

SEQ ID NO: 942918 - RNA, 19 nt, Artificial Sequence
  Description of Artificial Sequence: Synthetic oligonucleotide
  Sense strand starting at position 3682 of SEQ ID NO: 913639
cgaaauaccuucuuuguau

SEQ ID NO: 942919 - RNA, 19 nt, Artificial Sequence
  Description of Artificial Sequence: Synthetic oligonucleotide
  Antisense strand to SEQ ID NO: 942918
auacaaagaagguauuucg

SEQ ID NO: 942920 - RNA, 19 nt, Artificial Sequence
  Description of Artificial Sequence: Synthetic oligonucleotide
  Sense strand starting at position 3354 of SEQ ID NO: 913639
uggauuugcuccuagaaug

SEQ ID NO: 942921 - RNA, 19 nt, Artificial Sequence
  Description of Artificial Sequence: Synthetic oligonucleotide
  Antisense strand to SEQ ID NO: 942920
cauucuaggagcaaaucca

SEQ ID NO: 942922 - RNA, 19 nt, Artificial Sequence
  Description of Artificial Sequence: Synthetic oligonucleotide
  Sense strand starting at position 1852 of SEQ ID NO: 913639
cagauaagucgaggucgau

SEQ ID NO: 942923 - RNA, 19 nt, Artificial Sequence
  Description of Artificial Sequence: Synthetic oligonucleotide
  Antisense strand to SEQ ID NO: 942922
aucgaccucgacuuaucug

SEQ ID NO: 942924 - RNA, 19 nt, Artificial Sequence
  Description of Artificial Sequence: Synthetic oligonucleotide
  Sense strand starting at position 1728 of SEQ ID NO: 913639
cgagugugugcgcccgaau

SEQ ID NO: 942925 - RNA, 19 nt, Artificial Sequence
  Description of Artificial Sequence: Synthetic oligonucleotide
  Antisense strand to SEQ ID NO: 942924
auucgggcgcacacacucg

SEQ ID NO: 942926 - RNA, 19 nt, Artificial Sequence
  Description of Artificial Sequence: Synthetic oligonucleotide
  Sense strand starting at position 613 of SEQ ID NO: 913639
agucuucugaaaugaucgu

SEQ ID NO: 942927 - RNA, 19 nt, Artificial Sequence
  Description of Artificial Sequence: Synthetic oligonucleotide
  Antisense strand to SEQ ID NO: 942926
acgaucauuucagaagacu

SEQ ID NO: 942928 - RNA, 19 nt, Artificial Sequence
  Description of Artificial Sequence: Synthetic oligonucleotide
  Sense strand starting at position 684 of SEQ ID NO: 913639
guuucaccucgggaugcuu

SEQ ID NO: 942929 - RNA, 19 nt, Artificial Sequence
  Description of Artificial Sequence: Synthetic oligonucleotide
  Antisense strand to SEQ ID NO: 942928
aagcaucccgaggugaaac

SEQ ID NO: 942930 - RNA, 19 nt, Artificial Sequence
  Description of Artificial Sequence: Synthetic oligonucleotide
  Sense strand starting at position 3398 of SEQ ID NO: 913639
uuauuagucuguuucucag

SEQ ID NO: 942931 - RNA, 19 nt, Artificial Sequence
  Description of Artificial Sequence: Synthetic oligonucleotide
  Antisense strand to SEQ ID NO: 942930
cugagaaacagacuaauaa

SEQ ID NO: 942932 - RNA, 19 nt, Artificial Sequence
  Description of Artificial Sequence: Synthetic oligonucleotide
  Sense strand starting at position 176 of SEQ ID NO: 913639
ucuggugaggcaugcagau

SEQ ID NO: 942933 - RNA, 19 nt, Artificial Sequence
  Description of Artificial Sequence: Synthetic oligonucleotide
  Antisense strand to SEQ ID NO: 942932
aucugcaugccucaccaga

SEQ ID NO: 942934 - RNA, 19 nt, Artificial Sequence
  Description of Artificial Sequence: Synthetic oligonucleotide
  Sense strand starting at position 3839 of SEQ ID NO: 913639
gaguccugagccuguggau

SEQ ID NO: 942935 - RNA, 19 nt, Artificial Sequence
  Description of Artificial Sequence: Synthetic oligonucleotide
  Antisense strand to SEQ ID NO: 942934
auccacaggcucaggacuc

SEQ ID NO: 942936 - RNA, 19 nt, Artificial Sequence
  Description of Artificial Sequence: Synthetic oligonucleotide
  Sense strand starting at position 3162 of SEQ ID NO: 913639
gaauucucuugggagagga

SEQ ID NO: 942937 - RNA, 19 nt, Artificial Sequence
  Description of Artificial Sequence: Synthetic oligonucleotide
  Antisense strand to SEQ ID NO: 942936
uccucucccaagagaauuc

SEQ ID NO: 942938 - RNA, 19 nt, Artificial Sequence
  Description of Artificial Sequence: Synthetic oligonucleotide
  Sense strand starting at position 619 of SEQ ID NO: 913639
cugaaaugaucguuuggcu

SEQ ID NO: 942939 - RNA, 19 nt, Artificial Sequence
  Description of Artificial Sequence: Synthetic oligonucleotide
  Antisense strand to SEQ ID NO: 942938
agccaaacgaucauuucag

SEQ ID NO: 942940 - RNA, 19 nt, Artificial Sequence
  Description of Artificial Sequence: Synthetic oligonucleotide
  Sense strand starting at position 3531 of SEQ ID NO: 913639
gugagaccucuuugccuau

SEQ ID NO: 942941 - RNA, 19 nt, Artificial Sequence
  Description of Artificial Sequence: Synthetic oligonucleotide
  Antisense strand to SEQ ID NO: 942940
auaggcaaagaggucucac

SEQ ID NO: 942942 - RNA, 19 nt, Artificial Sequence
  Description of Artificial Sequence: Synthetic oligonucleotide
  Sense strand starting at position 3554 of SEQ ID NO: 913639
cccugagucucugcaccua

SEQ ID NO: 942943 - RNA, 19 nt, Artificial Sequence
  Description of Artificial Sequence: Synthetic oligonucleotide
  Antisense strand to SEQ ID NO: 942942
uaggugcagagacucaggg

SEQ ID NO: 942944 - RNA, 19 nt, Artificial Sequence
  Description of Artificial Sequence: Synthetic oligonucleotide
  Sense strand starting at position 2242 of SEQ ID NO: 913639
auugucuucggcgagaucu

SEQ ID NO: 942945 - RNA, 19 nt, Artificial Sequence
  Description of Artificial Sequence: Synthetic oligonucleotide
  Antisense strand to SEQ ID NO: 942944
agaucucgccgaagacaau

SEQ ID NO: 942946 - RNA, 19 nt, Artificial Sequence
  Description of Artificial Sequence: Synthetic oligonucleotide
  Sense strand starting at position 2244 of SEQ ID NO: 913639
ugucuucggcgagaucuca

SEQ ID NO: 942947 - RNA, 19 nt, Artificial Sequence
  Description of Artificial Sequence: Synthetic oligonucleotide
  Antisense strand to SEQ ID NO: 942946
ugagaucucgccgaagaca

SEQ ID NO: 942948 - RNA, 19 nt, Artificial Sequence
  Description of Artificial Sequence: Synthetic oligonucleotide
  Sense strand starting at position 681 of SEQ ID NO: 913639
gcaguuucaccucgggaug

SEQ ID NO: 942949 - RNA, 19 nt, Artificial Sequence
  Description of Artificial Sequence: Synthetic oligonucleotide
  Antisense strand to SEQ ID NO: 942948
caucccgaggugaaacugc

SEQ ID NO: 942950 - RNA, 19 nt, Artificial Sequence
  Description of Artificial Sequence: Synthetic oligonucleotide
  Sense strand starting at position 3414 of SEQ ID NO: 913639
caggaaaggucagagaagu

SEQ ID NO: 942951 - RNA, 19 nt, Artificial Sequence
  Description of Artificial Sequence: Synthetic oligonucleotide
  Antisense strand to SEQ ID NO: 942950
acuucucugaccuuuccug

SEQ ID NO: 942952 - RNA, 19 nt, Artificial Sequence
  Description of Artificial Sequence: Synthetic oligonucleotide
  Sense strand starting at position 59 of SEQ ID NO: 913639
agugauagcugugcuagac

SEQ ID NO: 942953 - RNA, 19 nt, Artificial Sequence
  Description of Artificial Sequence: Synthetic oligonucleotide
  Antisense strand to SEQ ID NO: 942952
gucuagcacagcuaucacu

SEQ ID NO: 942954 - RNA, 19 nt, Artificial Sequence
  Description of Artificial Sequence: Synthetic oligonucleotide
  Sense strand starting at position 1851 of SEQ ID NO: 913639
acagauaagucgaggucga

SEQ ID NO: 942955 - RNA, 19 nt, Artificial Sequence
  Description of Artificial Sequence: Synthetic oligonucleotide
  Antisense strand to SEQ ID NO: 942954
ucgaccucgacuuaucugu

SEQ ID NO: 942956 - RNA, 19 nt, Artificial Sequence
  Description of Artificial Sequence: Synthetic oligonucleotide
  Sense strand starting at position 58 of SEQ ID NO: 913639
uagugauagcugugcuaga

SEQ ID NO: 942957 - RNA, 19 nt, Artificial Sequence
  Description of Artificial Sequence: Synthetic oligonucleotide
  Antisense strand to SEQ ID NO: 942956
ucuagcacagcuaucacua

SEQ ID NO: 942958 - RNA, 19 nt, Artificial Sequence
  Description of Artificial Sequence: Synthetic oligonucleotide
  Sense strand starting at position 450 of SEQ ID NO: 913639
gggucuugugagugguauu

SEQ ID NO: 942959 - RNA, 19 nt, Artificial Sequence
  Description of Artificial Sequence: Synthetic oligonucleotide
  Antisense strand to SEQ ID NO: 942958
aauaccacucacaagaccc

SEQ ID NO: 942960 - RNA, 19 nt, Artificial Sequence
  Description of Artificial Sequence: Synthetic oligonucleotide
  Sense strand starting at position 237 of SEQ ID NO: 913640
cccaguauccaguagauaa

SEQ ID NO: 942961 - RNA, 19 nt, Artificial Sequence
  Description of Artificial Sequence: Synthetic oligonucleotide
  Antisense strand to SEQ ID NO: 942960
uuaucuacuggauacuggg

SEQ ID NO: 942962 - RNA, 19 nt, Artificial Sequence
  Description of Artificial Sequence: Synthetic oligonucleotide
  Sense strand starting at position 2972 of SEQ ID NO: 913640
gugugaaucaucgcuuugu

SEQ ID NO: 942963 - RNA, 19 nt, Artificial Sequence
  Description of Artificial Sequence: Synthetic oligonucleotide
  Antisense strand to SEQ ID NO: 942962
acaaagcgaugauucacac

SEQ ID NO: 942964 - RNA, 19 nt, Artificial Sequence
  Description of Artificial Sequence: Synthetic oligonucleotide
  Sense strand starting at position 19 of SEQ ID NO: 913640
aguccugagcaacauaauu

SEQ ID NO: 942965 - RNA, 19 nt, Artificial Sequence
  Description of Artificial Sequence: Synthetic oligonucleotide
  Antisense strand to SEQ ID NO: 942964
aauuauguugcucaggacu

SEQ ID NO: 942966 - RNA, 19 nt, Artificial Sequence
  Description of Artificial Sequence: Synthetic oligonucleotide
  Sense strand starting at position 915 of SEQ ID NO: 913640
guauaaggcugucuuauuu

SEQ ID NO: 942967 - RNA, 19 nt, Artificial Sequence
  Description of Artificial Sequence: Synthetic oligonucleotide
  Antisense strand to SEQ ID NO: 942966
aaauaagacagccuuauac

SEQ ID NO: 942968 - RNA, 19 nt, Artificial Sequence
  Description of Artificial Sequence: Synthetic oligonucleotide
  Sense strand starting at position 181 of SEQ ID NO: 913640
accucacuccuggauguau

SEQ ID NO: 942969 - RNA, 19 nt, Artificial Sequence
  Description of Artificial Sequence: Synthetic oligonucleotide
  Antisense strand to SEQ ID NO: 942968
auacauccaggagugaggu

SEQ ID NO: 942970 - RNA, 19 nt, Artificial Sequence
  Description of Artificial Sequence: Synthetic oligonucleotide
  Sense strand starting at position 3307 of SEQ ID NO: 913640
gaugguuaagccuauuaac

SEQ ID NO: 942971 - RNA, 19 nt, Artificial Sequence
  Description of Artificial Sequence: Synthetic oligonucleotide
  Antisense strand to SEQ ID NO: 942970
guuaauaggcuuaaccauc

SEQ ID NO: 942972 - RNA, 19 nt, Artificial Sequence
  Description of Artificial Sequence: Synthetic oligonucleotide
  Sense strand starting at position 719 of SEQ ID NO: 913640
acagaaagcuaugcaagau

SEQ ID NO: 942973 - RNA, 19 nt, Artificial Sequence
  Description of Artificial Sequence: Synthetic oligonucleotide
  Antisense strand to SEQ ID NO: 942972
aucuugcauagcuuucugu

SEQ ID NO: 942974 - RNA, 19 nt, Artificial Sequence
  Description of Artificial Sequence: Synthetic oligonucleotide
  Sense strand starting at position 922 of SEQ ID NO: 913640
gcugucuuauuuccuauau

SEQ ID NO: 942975 - RNA, 19 nt, Artificial Sequence
  Description of Artificial Sequence: Synthetic oligonucleotide
  Antisense strand to SEQ ID NO: 942974
auauaggaaauaagacagc

SEQ ID NO: 942976 - RNA, 19 nt, Artificial Sequence
  Description of Artificial Sequence: Synthetic oligonucleotide
  Sense strand starting at position 241 of SEQ ID NO: 913640
guauccaguagauaagguu

SEQ ID NO: 942977 - RNA, 19 nt, Artificial Sequence
  Description of Artificial Sequence: Synthetic oligonucleotide
  Antisense strand to SEQ ID NO: 942976
aaccuuaucuacuggauac

SEQ ID NO: 942978 - RNA, 19 nt, Artificial Sequence
  Description of Artificial Sequence: Synthetic oligonucleotide
  Sense strand starting at position 2726 of SEQ ID NO: 913640
guguaccuauuugcuaauu

SEQ ID NO: 942979 - RNA, 19 nt, Artificial Sequence
  Description of Artificial Sequence: Synthetic oligonucleotide
  Antisense strand to SEQ ID NO: 942978
aauuagcaaauagguacac

SEQ ID NO: 942980 - RNA, 19 nt, Artificial Sequence
  Description of Artificial Sequence: Synthetic oligonucleotide
  Sense strand starting at position 16 of SEQ ID NO: 913640
ucuaguccugagcaacaua

SEQ ID NO: 942981 - RNA, 19 nt, Artificial Sequence
  Description of Artificial Sequence: Synthetic oligonucleotide
  Antisense strand to SEQ ID NO: 942980
uauguugcucaggacuaga

SEQ ID NO: 942982 - RNA, 19 nt, Artificial Sequence
  Description of Artificial Sequence: Synthetic oligonucleotide
  Sense strand starting at position 3738 of SEQ ID NO: 913640
ucaagaugccagcaaagua

SEQ ID NO: 942983 - RNA, 19 nt, Artificial Sequence
  Description of Artificial Sequence: Synthetic oligonucleotide
  Antisense strand to SEQ ID NO: 942982
uacuuugcuggcaucuuga

SEQ ID NO: 942984 - RNA, 19 nt, Artificial Sequence
  Description of Artificial Sequence: Synthetic oligonucleotide
  Sense strand starting at position 2418 of SEQ ID NO: 913640
cuaaucucugguuagcaga

SEQ ID NO: 942985 - RNA, 19 nt, Artificial Sequence
  Description of Artificial Sequence: Synthetic oligonucleotide
  Antisense strand to SEQ ID NO: 942984
ucugcuaaccagagauuag

SEQ ID NO: 942986 - RNA, 19 nt, Artificial Sequence
  Description of Artificial Sequence: Synthetic oligonucleotide
  Sense strand starting at position 2420 of SEQ ID NO: 913640
aaucucugguuagcagaaa

SEQ ID NO: 942987 - RNA, 19 nt, Artificial Sequence
  Description of Artificial Sequence: Synthetic oligonucleotide
  Antisense strand to SEQ ID NO: 942986
uuucugcuaaccagagauu

SEQ ID NO: 942988 - RNA, 19 nt, Artificial Sequence
  Description of Artificial Sequence: Synthetic oligonucleotide
  Sense strand starting at position 2958 of SEQ ID NO: 913640
ugaugaaaucugcagugug

SEQ ID NO: 942989 - RNA, 19 nt, Artificial Sequence
  Description of Artificial Sequence: Synthetic oligonucleotide
  Antisense strand to SEQ ID NO: 942988
cacacugcagauuucauca

SEQ ID NO: 942990 - RNA, 19 nt, Artificial Sequence
  Description of Artificial Sequence: Synthetic oligonucleotide
  Sense strand starting at position 3497 of SEQ ID NO: 913640
aguuaaggaucuguguaaa

SEQ ID NO: 942991 - RNA, 19 nt, Artificial Sequence
  Description of Artificial Sequence: Synthetic oligonucleotide
  Antisense strand to SEQ ID NO: 942990
uuuacacagauccuuaacu

SEQ ID NO: 942992 - RNA, 19 nt, Artificial Sequence
  Description of Artificial Sequence: Synthetic oligonucleotide
  Sense strand starting at position 1143 of SEQ ID NO: 913640
uuaugaaaugaauguguuc

SEQ ID NO: 942993 - RNA, 19 nt, Artificial Sequence
  Description of Artificial Sequence: Synthetic oligonucleotide
  Antisense strand to SEQ ID NO: 942992
gaacacauucauuucauaa

SEQ ID NO: 942994 - RNA, 19 nt, Artificial Sequence
  Description of Artificial Sequence: Synthetic oligonucleotide
  Sense strand starting at position 3536 of SEQ ID NO: 913640
ucagcuucucaguaggauu

SEQ ID NO: 942995 - RNA, 19 nt, Artificial Sequence
  Description of Artificial Sequence: Synthetic oligonucleotide
  Antisense strand to SEQ ID NO: 942994
aauccuacugagaagcuga

SEQ ID NO: 942996 - RNA, 19 nt, Artificial Sequence
  Description of Artificial Sequence: Synthetic oligonucleotide
  Sense strand starting at position 190 of SEQ ID NO: 913640
cuggauguaucacuccauu

SEQ ID NO: 942997 - RNA, 19 nt, Artificial Sequence
  Description of Artificial Sequence: Synthetic oligonucleotide
  Antisense strand to SEQ ID NO: 942996
aauggagugauacauccag

SEQ ID NO: 942998 - RNA, 19 nt, Artificial Sequence
  Description of Artificial Sequence: Synthetic oligonucleotide
  Sense strand starting at position 3496 of SEQ ID NO: 913640
gaguuaaggaucuguguaa

SEQ ID NO: 942999 - RNA, 19 nt, Artificial Sequence
  Description of Artificial Sequence: Synthetic oligonucleotide
  Antisense strand to SEQ ID NO: 942998
uuacacagauccuuaacuc

SEQ ID NO: 943000 - RNA, 19 nt, Artificial Sequence
  Description of Artificial Sequence: Synthetic oligonucleotide
  Sense strand starting at position 773 of SEQ ID NO: 913640
cagucagagguuugaguaa

SEQ ID NO: 943001 - RNA, 19 nt, Artificial Sequence
  Description of Artificial Sequence: Synthetic oligonucleotide
  Antisense strand to SEQ ID NO: 943000
uuacucaaaccucugacug

SEQ ID NO: 943002 - RNA, 19 nt, Artificial Sequence
  Description of Artificial Sequence: Synthetic oligonucleotide
  Sense strand starting at position 1062 of SEQ ID NO: 913640
uaaucagagucugugacuu

SEQ ID NO: 943003 - RNA, 19 nt, Artificial Sequence
  Description of Artificial Sequence: Synthetic oligonucleotide
  Antisense strand to SEQ ID NO: 943002
aagucacagacucugauua

SEQ ID NO: 943004 - RNA, 19 nt, Artificial Sequence
  Description of Artificial Sequence: Synthetic oligonucleotide
  Sense strand starting at position 1146 of SEQ ID NO: 913640
ugaaaugaauguguuccuu

SEQ ID NO: 943005 - RNA, 19 nt, Artificial Sequence
  Description of Artificial Sequence: Synthetic oligonucleotide
  Antisense strand to SEQ ID NO: 943004
aaggaacacauucauuuca

SEQ ID NO: 943006 - RNA, 19 nt, Artificial Sequence
  Description of Artificial Sequence: Synthetic oligonucleotide
  Sense strand starting at position 769 of SEQ ID NO: 913640
gucacagucagagguuuga

SEQ ID NO: 943007 - RNA, 19 nt, Artificial Sequence
  Description of Artificial Sequence: Synthetic oligonucleotide
  Antisense strand to SEQ ID NO: 943006
ucaaaccucugacugugac

SEQ ID NO: 943008 - RNA, 19 nt, Artificial Sequence
  Description of Artificial Sequence: Synthetic oligonucleotide
  Sense strand starting at position 3873 of SEQ ID NO: 913640
gucucuucucuguacuuaa

SEQ ID NO: 943009 - RNA, 19 nt, Artificial Sequence
  Description of Artificial Sequence: Synthetic oligonucleotide
  Antisense strand to SEQ ID NO: 943008
uuaaguacagagaagagac

SEQ ID NO: 943010 - RNA, 19 nt, Artificial Sequence
  Description of Artificial Sequence: Synthetic oligonucleotide
  Sense strand starting at position 2963 of SEQ ID NO: 913640
aaaucugcagugugaauca

SEQ ID NO: 943011 - RNA, 19 nt, Artificial Sequence
  Description of Artificial Sequence: Synthetic oligonucleotide
  Antisense strand to SEQ ID NO: 943010
ugauucacacugcagauuu

SEQ ID NO: 943012 - RNA, 19 nt, Artificial Sequence
  Description of Artificial Sequence: Synthetic oligonucleotide
  Sense strand starting at position 814 of SEQ ID NO: 913640
ccagacagcugcuuauaau

SEQ ID NO: 943013 - RNA, 19 nt, Artificial Sequence
  Description of Artificial Sequence: Synthetic oligonucleotide
  Antisense strand to SEQ ID NO: 943012
auuauaagcagcugucugg

SEQ ID NO: 943014 - RNA, 19 nt, Artificial Sequence
  Description of Artificial Sequence: Synthetic oligonucleotide
  Sense strand starting at position 13 of SEQ ID NO: 913640
guuucuaguccugagcaac

SEQ ID NO: 943015 - RNA, 19 nt, Artificial Sequence
  Description of Artificial Sequence: Synthetic oligonucleotide
  Antisense strand to SEQ ID NO: 943014
guugcucaggacuagaaac

SEQ ID NO: 943016 - RNA, 19 nt, Artificial Sequence
  Description of Artificial Sequence: Synthetic oligonucleotide
  Sense strand starting at position 2961 of SEQ ID NO: 913640
ugaaaucugcagugugaau

SEQ ID NO: 943017 - RNA, 19 nt, Artificial Sequence
  Description of Artificial Sequence: Synthetic oligonucleotide
  Antisense strand to SEQ ID NO: 943016
auucacacugcagauuuca

SEQ ID NO: 943018 - RNA, 19 nt, Artificial Sequence
  Description of Artificial Sequence: Synthetic oligonucleotide
  Sense strand starting at position 219 of SEQ ID NO: 913640
cugcaauccugauuagagc

SEQ ID NO: 943019 - RNA, 19 nt, Artificial Sequence
  Description of Artificial Sequence: Synthetic oligonucleotide
  Antisense strand to SEQ ID NO: 943018
gcucuaaucaggauugcag

SEQ ID NO: 943020 - RNA, 19 nt, Artificial Sequence
  Description of Artificial Sequence: Synthetic oligonucleotide
  Sense strand starting at position 3011 of SEQ ID NO: 913640
ccagguucuuagucacuua

SEQ ID NO: 943021 - RNA, 19 nt, Artificial Sequence
  Description of Artificial Sequence: Synthetic oligonucleotide
  Antisense strand to SEQ ID NO: 943020
uaagugacuaagaaccugg

SEQ ID NO: 943022 - RNA, 19 nt, Artificial Sequence
  Description of Artificial Sequence: Synthetic oligonucleotide
  Sense strand starting at position 1550 of SEQ ID NO: 913640
gcacauuccggcgaaggau

SEQ ID NO: 943023 - RNA, 19 nt, Artificial Sequence
  Description of Artificial Sequence: Synthetic oligonucleotide
  Antisense strand to SEQ ID NO: 943022
auccuucgccggaaugugc

SEQ ID NO: 943024 - RNA, 19 nt, Artificial Sequence
  Description of Artificial Sequence: Synthetic oligonucleotide
  Sense strand starting at position 972 of SEQ ID NO: 913640
cugaacuucgucugaucua

SEQ ID NO: 943025 - RNA, 19 nt, Artificial Sequence
  Description of Artificial Sequence: Synthetic oligonucleotide
  Antisense strand to SEQ ID NO: 943024
uagaucagacgaaguucag

SEQ ID NO: 943026 - RNA, 19 nt, Artificial Sequence
  Description of Artificial Sequence: Synthetic oligonucleotide
  Sense strand starting at position 1269 of SEQ ID NO: 913640
uaaagagaguguucguuua

SEQ ID NO: 943027 - RNA, 19 nt, Artificial Sequence
  Description of Artificial Sequence: Synthetic oligonucleotide
  Antisense strand to SEQ ID NO: 943026
uaaacgaacacucucuuua

SEQ ID NO: 943028 - RNA, 19 nt, Artificial Sequence
  Description of Artificial Sequence: Synthetic oligonucleotide
  Sense strand starting at position 3116 of SEQ ID NO: 913640
agguauucccugcggauaa

SEQ ID NO: 943029 - RNA, 19 nt, Artificial Sequence
  Description of Artificial Sequence: Synthetic oligonucleotide
  Antisense strand to SEQ ID NO: 943028
uuauccgcagggaauaccu

SEQ ID NO: 943030 - RNA, 19 nt, Artificial Sequence
  Description of Artificial Sequence: Synthetic oligonucleotide
  Sense strand starting at position 1462 of SEQ ID NO: 913640
cccggaauucugcaggcuu

SEQ ID NO: 943031 - RNA, 19 nt, Artificial Sequence
  Description of Artificial Sequence: Synthetic oligonucleotide
  Antisense strand to SEQ ID NO: 943030
aagccugcagaauuccggg

SEQ ID NO: 943032 - RNA, 19 nt, Artificial Sequence
  Description of Artificial Sequence: Synthetic oligonucleotide
  Sense strand starting at position 3626 of SEQ ID NO: 913640
gcauuaggcuucuuaauug

SEQ ID NO: 943033 - RNA, 19 nt, Artificial Sequence
  Description of Artificial Sequence: Synthetic oligonucleotide
  Antisense strand to SEQ ID NO: 943032
caauuaagaagccuaaugc

SEQ ID NO: 943034 - RNA, 19 nt, Artificial Sequence
  Description of Artificial Sequence: Synthetic oligonucleotide
  Sense strand starting at position 3114 of SEQ ID NO: 913640
gaagguauucccugcggau

SEQ ID NO: 943035 - RNA, 19 nt, Artificial Sequence
  Description of Artificial Sequence: Synthetic oligonucleotide
  Antisense strand to SEQ ID NO: 943034
auccgcagggaauaccuuc

SEQ ID NO: 943036 - RNA, 19 nt, Artificial Sequence
  Description of Artificial Sequence: Synthetic oligonucleotide
  Sense strand starting at position 3014 of SEQ ID NO: 913640
gguucuuagucacuuagua

SEQ ID NO: 943037 - RNA, 19 nt, Artificial Sequence
  Description of Artificial Sequence: Synthetic oligonucleotide
  Antisense strand to SEQ ID NO: 943036
uacuaagugacuaagaacc

SEQ ID NO: 943038 - RNA, 19 nt, Artificial Sequence
  Description of Artificial Sequence: Synthetic oligonucleotide
  Sense strand starting at position 1271 of SEQ ID NO: 913640
aagagaguguucguuuacu

SEQ ID NO: 943039 - RNA, 19 nt, Artificial Sequence
  Description of Artificial Sequence: Synthetic oligonucleotide
  Antisense strand to SEQ ID NO: 943038
aguaaacgaacacucucuu

SEQ ID NO: 943040 - RNA, 19 nt, Artificial Sequence
  Description of Artificial Sequence: Synthetic oligonucleotide
  Sense strand starting at position 2261 of SEQ ID NO: 913641
gaagaugcccuugggaaga

SEQ ID NO: 943041 - RNA, 19 nt, Artificial Sequence
  Description of Artificial Sequence: Synthetic oligonucleotide
  Antisense strand to SEQ ID NO: 943040
ucuucccaagggcaucuuc

SEQ ID NO: 943042 - RNA, 19 nt, Artificial Sequence
  Description of Artificial Sequence: Synthetic oligonucleotide
  Sense strand starting at position 985 of SEQ ID NO: 913641
agaguaagcgugguuuguu

SEQ ID NO: 943043 - RNA, 19 nt, Artificial Sequence
  Description of Artificial Sequence: Synthetic oligonucleotide
  Antisense strand to SEQ ID NO: 943042
aacaaaccacgcuuacucu

SEQ ID NO: 943044 - RNA, 19 nt, Artificial Sequence
  Description of Artificial Sequence: Synthetic oligonucleotide
  Sense strand starting at position 3477 of SEQ ID NO: 913641
auauaagaucacuguugga

SEQ ID NO: 943045 - RNA, 19 nt, Artificial Sequence
  Description of Artificial Sequence: Synthetic oligonucleotide
  Antisense strand to SEQ ID NO: 943044
uccaacagugaucuuauau

SEQ ID NO: 943046 - RNA, 19 nt, Artificial Sequence
  Description of Artificial Sequence: Synthetic oligonucleotide
  Sense strand starting at position 2517 of SEQ ID NO: 913641
agcuaaggugaccaucaau

SEQ ID NO: 943047 - RNA, 19 nt, Artificial Sequence
  Description of Artificial Sequence: Synthetic oligonucleotide
  Antisense strand to SEQ ID NO: 943046
auugauggucaccuuagcu

SEQ ID NO: 943048 - RNA, 19 nt, Artificial Sequence
  Description of Artificial Sequence: Synthetic oligonucleotide
  Sense strand starting at position 2260 of SEQ ID NO: 913641
ggaagaugcccuugggaag

SEQ ID NO: 943049 - RNA, 19 nt, Artificial Sequence
  Description of Artificial Sequence: Synthetic oligonucleotide
  Antisense strand to SEQ ID NO: 943048
cuucccaagggcaucuucc

SEQ ID NO: 943050 - RNA, 19 nt, Artificial Sequence
  Description of Artificial Sequence: Synthetic oligonucleotide
  Sense strand starting at position 2093 of SEQ ID NO: 913641
accaaucgccgggaagaaa

SEQ ID NO: 943051 - RNA, 19 nt, Artificial Sequence
  Description of Artificial Sequence: Synthetic oligonucleotide
  Antisense strand to SEQ ID NO: 943050
uuucuucccggcgauuggu

SEQ ID NO: 943052 - RNA, 19 nt, Artificial Sequence
  Description of Artificial Sequence: Synthetic oligonucleotide
  Sense strand starting at position 961 of SEQ ID NO: 913641
uguaccuuacagggagaau

SEQ ID NO: 943053 - RNA, 19 nt, Artificial Sequence
  Description of Artificial Sequence: Synthetic oligonucleotide
  Antisense strand to SEQ ID NO: 943052
auucucccuguaagguaca

SEQ ID NO: 943054 - RNA, 19 nt, Artificial Sequence
  Description of Artificial Sequence: Synthetic oligonucleotide
  Sense strand starting at position 127 of SEQ ID NO: 913641
uuacuagguggcuaagaua

SEQ ID NO: 943055 - RNA, 19 nt, Artificial Sequence
  Description of Artificial Sequence: Synthetic oligonucleotide
  Antisense strand to SEQ ID NO: 943054
uaucuuagccaccuaguaa

SEQ ID NO: 943056 - RNA, 19 nt, Artificial Sequence
  Description of Artificial Sequence: Synthetic oligonucleotide
  Sense strand starting at position 2852 of SEQ ID NO: 913641
aggcauucucacgaaugga

SEQ ID NO: 943057 - RNA, 19 nt, Artificial Sequence
  Description of Artificial Sequence: Synthetic oligonucleotide
  Antisense strand to SEQ ID NO: 943056
uccauucgugagaaugccu

SEQ ID NO: 943058 - RNA, 19 nt, Artificial Sequence
  Description of Artificial Sequence: Synthetic oligonucleotide
  Sense strand starting at position 1046 of SEQ ID NO: 913641
acuugagaauucccaaagu

SEQ ID NO: 943059 - RNA, 19 nt, Artificial Sequence
  Description of Artificial Sequence: Synthetic oligonucleotide
  Antisense strand to SEQ ID NO: 943058
acuuugggaauucucaagu

SEQ ID NO: 943060 - RNA, 19 nt, Artificial Sequence
  Description of Artificial Sequence: Synthetic oligonucleotide
  Sense strand starting at position 173 of SEQ ID NO: 913641
cuggcuagcauggagauaa

SEQ ID NO: 943061 - RNA, 19 nt, Artificial Sequence
  Description of Artificial Sequence: Synthetic oligonucleotide
  Antisense strand to SEQ ID NO: 943060
uuaucuccaugcuagccag

SEQ ID NO: 943062 - RNA, 19 nt, Artificial Sequence
  Description of Artificial Sequence: Synthetic oligonucleotide
  Sense strand starting at position 355 of SEQ ID NO: 913641
gucaguuauagggauaucu

SEQ ID NO: 943063 - RNA, 19 nt, Artificial Sequence
  Description of Artificial Sequence: Synthetic oligonucleotide
  Antisense strand to SEQ ID NO: 943062
agauaucccuauaacugac

SEQ ID NO: 943064 - RNA, 19 nt, Artificial Sequence
  Description of Artificial Sequence: Synthetic oligonucleotide
  Sense strand starting at position 3717 of SEQ ID NO: 913641
uccagaggugagugacaaa

SEQ ID NO: 943065 - RNA, 19 nt, Artificial Sequence
  Description of Artificial Sequence: Synthetic oligonucleotide
  Antisense strand to SEQ ID NO: 943064
uuugucacucaccucugga

SEQ ID NO: 943066 - RNA, 19 nt, Artificial Sequence
  Description of Artificial Sequence: Synthetic oligonucleotide
  Sense strand starting at position 2624 of SEQ ID NO: 913641
gcaauuugguccuugagug

SEQ ID NO: 943067 - RNA, 19 nt, Artificial Sequence
  Description of Artificial Sequence: Synthetic oligonucleotide
  Antisense strand to SEQ ID NO: 943066
cacucaaggaccaaauugc

SEQ ID NO: 943068 - RNA, 19 nt, Artificial Sequence
  Description of Artificial Sequence: Synthetic oligonucleotide
  Sense strand starting at position 336 of SEQ ID NO: 913641
agauaaucacugcaguauu

SEQ ID NO: 943069 - RNA, 19 nt, Artificial Sequence
  Description of Artificial Sequence: Synthetic oligonucleotide
  Antisense strand to SEQ ID NO: 943068
aauacugcagugauuaucu

SEQ ID NO: 943070 - RNA, 19 nt, Artificial Sequence
  Description of Artificial Sequence: Synthetic oligonucleotide
  Sense strand starting at position 3926 of SEQ ID NO: 913641
cuuggaauacguggaggaa

SEQ ID NO: 943071 - RNA, 19 nt, Artificial Sequence
  Description of Artificial Sequence: Synthetic oligonucleotide
  Antisense strand to SEQ ID NO: 943070
uuccuccacguauuccaag

SEQ ID NO: 943072 - RNA, 19 nt, Artificial Sequence
  Description of Artificial Sequence: Synthetic oligonucleotide
  Sense strand starting at position 3740 of SEQ ID NO: 913641
gguaaaucaccacgacaag

SEQ ID NO: 943073 - RNA, 19 nt, Artificial Sequence
  Description of Artificial Sequence: Synthetic oligonucleotide
  Antisense strand to SEQ ID NO: 943072
cuugucguggugauuuacc

SEQ ID NO: 943074 - RNA, 19 nt, Artificial Sequence
  Description of Artificial Sequence: Synthetic oligonucleotide
  Sense strand starting at position 3412 of SEQ ID NO: 913641
gcuguacgaaauuaagaug

SEQ ID NO: 943075 - RNA, 19 nt, Artificial Sequence
  Description of Artificial Sequence: Synthetic oligonucleotide
  Antisense strand to SEQ ID NO: 943074
caucuuaauuucguacagc

SEQ ID NO: 943076 - RNA, 19 nt, Artificial Sequence
  Description of Artificial Sequence: Synthetic oligonucleotide
  Sense strand starting at position 333 of SEQ ID NO: 913641
aagagauaaucacugcagu

SEQ ID NO: 943077 - RNA, 19 nt, Artificial Sequence
  Description of Artificial Sequence: Synthetic oligonucleotide
  Antisense strand to SEQ ID NO: 943076
acugcagugauuaucucuu

SEQ ID NO: 943078 - RNA, 19 nt, Artificial Sequence
  Description of Artificial Sequence: Synthetic oligonucleotide
  Sense strand starting at position 334 of SEQ ID NO: 913641
agagauaaucacugcagua

SEQ ID NO: 943079 - RNA, 19 nt, Artificial Sequence
  Description of Artificial Sequence: Synthetic oligonucleotide
  Antisense strand to SEQ ID NO: 943078
uacugcagugauuaucucu

SEQ ID NO: 943080 - RNA, 19 nt, Artificial Sequence
  Description of Artificial Sequence: Synthetic oligonucleotide
  Sense strand starting at position 2397 of SEQ ID NO: 913641
uuauuugucuggcccgaau

SEQ ID NO: 943081 - RNA, 19 nt, Artificial Sequence
  Description of Artificial Sequence: Synthetic oligonucleotide
  Antisense strand to SEQ ID NO: 943080
auucgggccagacaaauaa

SEQ ID NO: 943082 - RNA, 19 nt, Artificial Sequence
  Description of Artificial Sequence: Synthetic oligonucleotide
  Sense strand starting at position 3137 of SEQ ID NO: 913641
auccuuaaucuguaaguuu

SEQ ID NO: 943083 - RNA, 19 nt, Artificial Sequence
  Description of Artificial Sequence: Synthetic oligonucleotide
  Antisense strand to SEQ ID NO: 943082
aaacuuacagauuaaggau

SEQ ID NO: 943084 - RNA, 19 nt, Artificial Sequence
  Description of Artificial Sequence: Synthetic oligonucleotide
  Sense strand starting at position 2905 of SEQ ID NO: 913641
gugagugagcaaugagaau

SEQ ID NO: 943085 - RNA, 19 nt, Artificial Sequence
  Description of Artificial Sequence: Synthetic oligonucleotide
  Antisense strand to SEQ ID NO: 943084
auucucauugcucacucac

SEQ ID NO: 943086 - RNA, 19 nt, Artificial Sequence
  Description of Artificial Sequence: Synthetic oligonucleotide
  Sense strand starting at position 3928 of SEQ ID NO: 913641
uggaauacguggaggaaga

SEQ ID NO: 943087 - RNA, 19 nt, Artificial Sequence
  Description of Artificial Sequence: Synthetic oligonucleotide
  Antisense strand to SEQ ID NO: 943086
ucuuccuccacguauucca

SEQ ID NO: 943088 - RNA, 19 nt, Artificial Sequence
  Description of Artificial Sequence: Synthetic oligonucleotide
  Sense strand starting at position 1174 of SEQ ID NO: 913641
uugcgcuugcugcugaaau

SEQ ID NO: 943089 - RNA, 19 nt, Artificial Sequence
  Description of Artificial Sequence: Synthetic oligonucleotide
  Antisense strand to SEQ ID NO: 943088
auuucagcagcaagcgcaa

SEQ ID NO: 943090 - RNA, 19 nt, Artificial Sequence
  Description of Artificial Sequence: Synthetic oligonucleotide
  Sense strand starting at position 126 of SEQ ID NO: 913641
auuacuagguggcuaagau

SEQ ID NO: 943091 - RNA, 19 nt, Artificial Sequence
  Description of Artificial Sequence: Synthetic oligonucleotide
  Antisense strand to SEQ ID NO: 943090
aucuuagccaccuaguaau

SEQ ID NO: 943092 - RNA, 19 nt, Artificial Sequence
  Description of Artificial Sequence: Synthetic oligonucleotide
  Sense strand starting at position 1347 of SEQ ID NO: 913641
ucagcauaucccugaggac

SEQ ID NO: 943093 - RNA, 19 nt, Artificial Sequence
  Description of Artificial Sequence: Synthetic oligonucleotide
  Antisense strand to SEQ ID NO: 943092
guccucagggauaugcuga

SEQ ID NO: 943094 - RNA, 19 nt, Artificial Sequence
  Description of Artificial Sequence: Synthetic oligonucleotide
  Sense strand starting at position 3526 of SEQ ID NO: 913641
gugacauaugacuguacca

SEQ ID NO: 943095 - RNA, 19 nt, Artificial Sequence
  Description of Artificial Sequence: Synthetic oligonucleotide
  Antisense strand to SEQ ID NO: 943094
ugguacagucauaugucac

SEQ ID NO: 943096 - RNA, 19 nt, Artificial Sequence
  Description of Artificial Sequence: Synthetic oligonucleotide
  Sense strand starting at position 2092 of SEQ ID NO: 913641
aaccaaucgccgggaagaa

SEQ ID NO: 943097 - RNA, 19 nt, Artificial Sequence
  Description of Artificial Sequence: Synthetic oligonucleotide
  Antisense strand to SEQ ID NO: 943096
uucuucccggcgauugguu

SEQ ID NO: 943098 - RNA, 19 nt, Artificial Sequence
  Description of Artificial Sequence: Synthetic oligonucleotide
  Sense strand starting at position 353 of SEQ ID NO: 913641
uugucaguuauagggauau

SEQ ID NO: 943099 - RNA, 19 nt, Artificial Sequence
  Description of Artificial Sequence: Synthetic oligonucleotide
  Antisense strand to SEQ ID NO: 943098
auaucccuauaacugacaa

SEQ ID NO: 943100 - RNA, 19 nt, Artificial Sequence
  Description of Artificial Sequence: Synthetic oligonucleotide
  Sense strand starting at position 2091 of SEQ ID NO: 913641
gaaccaaucgccgggaaga

SEQ ID NO: 943101 - RNA, 19 nt, Artificial Sequence
  Description of Artificial Sequence: Synthetic oligonucleotide
  Antisense strand to SEQ ID NO: 943100
ucuucccggcgauugguuc

SEQ ID NO: 943102 - RNA, 19 nt, Artificial Sequence
  Description of Artificial Sequence: Synthetic oligonucleotide
  Sense strand starting at position 3707 of SEQ ID NO: 913641
uggaauuuauuccagaggu

SEQ ID NO: 943103 - RNA, 19 nt, Artificial Sequence
  Description of Artificial Sequence: Synthetic oligonucleotide
  Antisense strand to SEQ ID NO: 943102
accucuggaauaaauucca

SEQ ID NO: 943104 - RNA, 19 nt, Artificial Sequence
  Description of Artificial Sequence: Synthetic oligonucleotide
  Sense strand starting at position 2608 of SEQ ID NO: 913641
agagaugccucauuaggca

SEQ ID NO: 943105 - RNA, 19 nt, Artificial Sequence
  Description of Artificial Sequence: Synthetic oligonucleotide
  Antisense strand to SEQ ID NO: 943104
ugccuaaugaggcaucucu

SEQ ID NO: 943106 - RNA, 19 nt, Artificial Sequence
  Description of Artificial Sequence: Synthetic oligonucleotide
  Sense strand starting at position 2899 of SEQ ID NO: 913641
gagucugugagugagcaau

SEQ ID NO: 943107 - RNA, 19 nt, Artificial Sequence
  Description of Artificial Sequence: Synthetic oligonucleotide
  Antisense strand to SEQ ID NO: 943106
auugcucacucacagacuc

SEQ ID NO: 943108 - RNA, 19 nt, Artificial Sequence
  Description of Artificial Sequence: Synthetic oligonucleotide
  Sense strand starting at position 2070 of SEQ ID NO: 913641
aggcgucucccucagagau

SEQ ID NO: 943109 - RNA, 19 nt, Artificial Sequence
  Description of Artificial Sequence: Synthetic oligonucleotide
  Antisense strand to SEQ ID NO: 943108
aucucugagggagacgccu

SEQ ID NO: 943110 - RNA, 19 nt, Artificial Sequence
  Description of Artificial Sequence: Synthetic oligonucleotide
  Sense strand starting at position 901 of SEQ ID NO: 913641
acacuuguacgccacauau

SEQ ID NO: 943111 - RNA, 19 nt, Artificial Sequence
  Description of Artificial Sequence: Synthetic oligonucleotide
  Antisense strand to SEQ ID NO: 943110
auauguggcguacaagugu

SEQ ID NO: 943112 - RNA, 19 nt, Artificial Sequence
  Description of Artificial Sequence: Synthetic oligonucleotide
  Sense strand starting at position 2862 of SEQ ID NO: 913641
acgaauggaccuugcagua

SEQ ID NO: 943113 - RNA, 19 nt, Artificial Sequence
  Description of Artificial Sequence: Synthetic oligonucleotide
  Antisense strand to SEQ ID NO: 943112
uacugcaagguccauucgu

SEQ ID NO: 943114 - RNA, 19 nt, Artificial Sequence
  Description of Artificial Sequence: Synthetic oligonucleotide
  Sense strand starting at position 787 of SEQ ID NO: 913641
ggacacugcuuugcuauaa

SEQ ID NO: 943115 - RNA, 19 nt, Artificial Sequence
  Description of Artificial Sequence: Synthetic oligonucleotide
  Antisense strand to SEQ ID NO: 943114
uuauagcaaagcagugucc

SEQ ID NO: 943116 - RNA, 19 nt, Artificial Sequence
  Description of Artificial Sequence: Synthetic oligonucleotide
  Sense strand starting at position 2752 of SEQ ID NO: 913641
ggacaauuauaacacaaug

SEQ ID NO: 943117 - RNA, 19 nt, Artificial Sequence
  Description of Artificial Sequence: Synthetic oligonucleotide
  Antisense strand to SEQ ID NO: 943116
cauuguguuauaauugucc

SEQ ID NO: 943118 - RNA, 19 nt, Artificial Sequence
  Description of Artificial Sequence: Synthetic oligonucleotide
  Sense strand starting at position 786 of SEQ ID NO: 913641
gggacacugcuuugcuaua

SEQ ID NO: 943119 - RNA, 19 nt, Artificial Sequence
  Description of Artificial Sequence: Synthetic oligonucleotide
  Antisense strand to SEQ ID NO: 943118
uauagcaaagcaguguccc

SEQ ID NO: 943120 - RNA, 19 nt, Artificial Sequence
  Description of Artificial Sequence: Synthetic oligonucleotide
  Sense strand starting at position 2207 of SEQ ID NO: 913642
agucaugcagauuauaaca

SEQ ID NO: 943121 - RNA, 19 nt, Artificial Sequence
  Description of Artificial Sequence: Synthetic oligonucleotide
  Antisense strand to SEQ ID NO: 943120
uguuauaaucugcaugacu

SEQ ID NO: 943122 - RNA, 19 nt, Artificial Sequence
  Description of Artificial Sequence: Synthetic oligonucleotide
  Sense strand starting at position 1710 of SEQ ID NO: 913642
uucucaacuccaugaggaa

SEQ ID NO: 943123 - RNA, 19 nt, Artificial Sequence
  Description of Artificial Sequence: Synthetic oligonucleotide
  Antisense strand to SEQ ID NO: 943122
uuccucauggaguugagaa

SEQ ID NO: 943124 - RNA, 19 nt, Artificial Sequence
  Description of Artificial Sequence: Synthetic oligonucleotide
  Sense strand starting at position 3158 of SEQ ID NO: 913642
ccugaaagcccugacaacu

SEQ ID NO: 943125 - RNA, 19 nt, Artificial Sequence
  Description of Artificial Sequence: Synthetic oligonucleotide
  Antisense strand to SEQ ID NO: 943124
aguugucagggcuuucagg

SEQ ID NO: 943126 - RNA, 19 nt, Artificial Sequence
  Description of Artificial Sequence: Synthetic oligonucleotide
  Sense strand starting at position 2890 of SEQ ID NO: 913642
gguccucuauaguuuauuu

SEQ ID NO: 943127 - RNA, 19 nt, Artificial Sequence
  Description of Artificial Sequence: Synthetic oligonucleotide
  Antisense strand to SEQ ID NO: 943126
aaauaaacuauagaggacc

SEQ ID NO: 943128 - RNA, 19 nt, Artificial Sequence
  Description of Artificial Sequence: Synthetic oligonucleotide
  Sense strand starting at position 29 of SEQ ID NO: 913642
gcauguuugcuccuaggca

SEQ ID NO: 943129 - RNA, 19 nt, Artificial Sequence
  Description of Artificial Sequence: Synthetic oligonucleotide
  Antisense strand to SEQ ID NO: 943128
ugccuaggagcaaacaugc

SEQ ID NO: 943130 - RNA, 19 nt, Artificial Sequence
  Description of Artificial Sequence: Synthetic oligonucleotide
  Sense strand starting at position 840 of SEQ ID NO: 913642
ugagcagacccugaauucu

SEQ ID NO: 943131 - RNA, 19 nt, Artificial Sequence
  Description of Artificial Sequence: Synthetic oligonucleotide
  Antisense strand to SEQ ID NO: 943130
agaauucagggucugcuca

SEQ ID NO: 943132 - RNA, 19 nt, Artificial Sequence
  Description of Artificial Sequence: Synthetic oligonucleotide
  Sense strand starting at position 689 of SEQ ID NO: 913642
acucuugugccagagagaa

SEQ ID NO: 943133 - RNA, 19 nt, Artificial Sequence
  Description of Artificial Sequence: Synthetic oligonucleotide
  Antisense strand to SEQ ID NO: 943132
uucucucuggcacaagagu

SEQ ID NO: 943134 - RNA, 19 nt, Artificial Sequence
  Description of Artificial Sequence: Synthetic oligonucleotide
  Sense strand starting at position 3569 of SEQ ID NO: 913642
ggcaaucugacuuaaggua

SEQ ID NO: 943135 - RNA, 19 nt, Artificial Sequence
  Description of Artificial Sequence: Synthetic oligonucleotide
  Antisense strand to SEQ ID NO: 943134
uaccuuaagucagauugcc

SEQ ID NO: 943136 - RNA, 19 nt, Artificial Sequence
  Description of Artificial Sequence: Synthetic oligonucleotide
  Sense strand starting at position 531 of SEQ ID NO: 913642
cacugugauccugaaagug

SEQ ID NO: 943137 - RNA, 19 nt, Artificial Sequence
  Description of Artificial Sequence: Synthetic oligonucleotide
  Antisense strand to SEQ ID NO: 943136
cacuuucaggaucacagug

SEQ ID NO: 943138 - RNA, 19 nt, Artificial Sequence
  Description of Artificial Sequence: Synthetic oligonucleotide
  Sense strand starting at position 1272 of SEQ ID NO: 913642
ccuggagauccaggaguau

SEQ ID NO: 943139 - RNA, 19 nt, Artificial Sequence
  Description of Artificial Sequence: Synthetic oligonucleotide
  Antisense strand to SEQ ID NO: 943138
auacuccuggaucuccagg

SEQ ID NO: 943140 - RNA, 19 nt, Artificial Sequence
  Description of Artificial Sequence: Synthetic oligonucleotide
  Sense strand starting at position 3357 of SEQ ID NO: 913642
auuaucaggcauuaaaugu

SEQ ID NO: 943141 - RNA, 19 nt, Artificial Sequence
  Description of Artificial Sequence: Synthetic oligonucleotide
  Antisense strand to SEQ ID NO: 943140
acauuuaaugccugauaau

SEQ ID NO: 943142 - RNA, 19 nt, Artificial Sequence
  Description of Artificial Sequence: Synthetic oligonucleotide
  Sense strand starting at position 2190 of SEQ ID NO: 913642
agcuuugagucauuugcag

SEQ ID NO: 943143 - RNA, 19 nt, Artificial Sequence
  Description of Artificial Sequence: Synthetic oligonucleotide
  Antisense strand to SEQ ID NO: 943142
cugcaaaugacucaaagcu

SEQ ID NO: 943144 - RNA, 19 nt, Artificial Sequence
  Description of Artificial Sequence: Synthetic oligonucleotide
  Sense strand starting at position 3304 of SEQ ID NO: 913642
auguguugucgucuucauu

SEQ ID NO: 943145 - RNA, 19 nt, Artificial Sequence
  Description of Artificial Sequence: Synthetic oligonucleotide
  Antisense strand to SEQ ID NO: 943144
aaugaagacgacaacacau

SEQ ID NO: 943146 - RNA, 19 nt, Artificial Sequence
  Description of Artificial Sequence: Synthetic oligonucleotide
  Sense strand starting at position 2629 of SEQ ID NO: 913642
agucgauuucucugcugga

SEQ ID NO: 943147 - RNA, 19 nt, Artificial Sequence
  Description of Artificial Sequence: Synthetic oligonucleotide
  Antisense strand to SEQ ID NO: 943146
uccagcagagaaaucgacu

SEQ ID NO: 943148 - RNA, 19 nt, Artificial Sequence
  Description of Artificial Sequence: Synthetic oligonucleotide
  Sense strand starting at position 2630 of SEQ ID NO: 913642
gucgauuucucugcuggag

SEQ ID NO: 943149 - RNA, 19 nt, Artificial Sequence
  Description of Artificial Sequence: Synthetic oligonucleotide
  Antisense strand to SEQ ID NO: 943148
cuccagcagagaaaucgac

SEQ ID NO: 943150 - RNA, 19 nt, Artificial Sequence
  Description of Artificial Sequence: Synthetic oligonucleotide
  Sense strand starting at position 934 of SEQ ID NO: 913642
ucacaugggucucuaagau

SEQ ID NO: 943151 - RNA, 19 nt, Artificial Sequence
  Description of Artificial Sequence: Synthetic oligonucleotide
  Antisense strand to SEQ ID NO: 943150
aucuuagagacccauguga

SEQ ID NO: 943152 - RNA, 19 nt, Artificial Sequence
  Description of Artificial Sequence: Synthetic oligonucleotide
  Sense strand starting at position 614 of SEQ ID NO: 913642
gaguguuaucaggaccagu

SEQ ID NO: 943153 - RNA, 19 nt, Artificial Sequence
  Description of Artificial Sequence: Synthetic oligonucleotide
  Antisense strand to SEQ ID NO: 943152
acugguccugauaacacuc

SEQ ID NO: 943154 - RNA, 19 nt, Artificial Sequence
  Description of Artificial Sequence: Synthetic oligonucleotide
  Sense strand starting at position 2604 of SEQ ID NO: 913642
uugguuguaccacauccaa

SEQ ID NO: 943155 - RNA, 19 nt, Artificial Sequence
  Description of Artificial Sequence: Synthetic oligonucleotide
  Antisense strand to SEQ ID NO: 943154
uuggaugugguacaaccaa

SEQ ID NO: 943156 - RNA, 19 nt, Artificial Sequence
  Description of Artificial Sequence: Synthetic oligonucleotide
  Sense strand starting at position 3403 of SEQ ID NO: 913642
agaauuccacagugaggca

SEQ ID NO: 943157 - RNA, 19 nt, Artificial Sequence
  Description of Artificial Sequence: Synthetic oligonucleotide
  Antisense strand to SEQ ID NO: 943156
ugccucacuguggaauucu

SEQ ID NO: 943158 - RNA, 19 nt, Artificial Sequence
  Description of Artificial Sequence: Synthetic oligonucleotide
  Sense strand starting at position 1043 of SEQ ID NO: 913642
agucuugugaugcaaagau

SEQ ID NO: 943159 - RNA, 19 nt, Artificial Sequence
  Description of Artificial Sequence: Synthetic oligonucleotide
  Antisense strand to SEQ ID NO: 943158
aucuuugcaucacaagacu

SEQ ID NO: 943160 - RNA, 19 nt, Artificial Sequence
  Description of Artificial Sequence: Synthetic oligonucleotide
  Sense strand starting at position 610 of SEQ ID NO: 913642
cugagaguguuaucaggac

SEQ ID NO: 943161 - RNA, 19 nt, Artificial Sequence
  Description of Artificial Sequence: Synthetic oligonucleotide
  Antisense strand to SEQ ID NO: 943160
guccugauaacacucucag

SEQ ID NO: 943162 - RNA, 19 nt, Artificial Sequence
  Description of Artificial Sequence: Synthetic oligonucleotide
  Sense strand starting at position 3876 of SEQ ID NO: 913642
guuaaaucaugucugaaac

SEQ ID NO: 943163 - RNA, 19 nt, Artificial Sequence
  Description of Artificial Sequence: Synthetic oligonucleotide
  Antisense strand to SEQ ID NO: 943162
guuucagacaugauuuaac

SEQ ID NO: 943164 - RNA, 19 nt, Artificial Sequence
  Description of Artificial Sequence: Synthetic oligonucleotide
  Sense strand starting at position 3482 of SEQ ID NO: 913642
cagggcuggcuugauauua

SEQ ID NO: 943165 - RNA, 19 nt, Artificial Sequence
  Description of Artificial Sequence: Synthetic oligonucleotide
  Antisense strand to SEQ ID NO: 943164
uaauaucaagccagcccug

SEQ ID NO: 943166 - RNA, 19 nt, Artificial Sequence
  Description of Artificial Sequence: Synthetic oligonucleotide
  Sense strand starting at position 1302 of SEQ ID NO: 913642
ucuuaaagagaauguguuu

SEQ ID NO: 943167 - RNA, 19 nt, Artificial Sequence
  Description of Artificial Sequence: Synthetic oligonucleotide
  Antisense strand to SEQ ID NO: 943166
aaacacauucucuuuaaga

SEQ ID NO: 943168 - RNA, 19 nt, Artificial Sequence
  Description of Artificial Sequence: Synthetic oligonucleotide
  Sense strand starting at position 1444 of SEQ ID NO: 913642
aagggucaguuucucugaa

SEQ ID NO: 943169 - RNA, 19 nt, Artificial Sequence
  Description of Artificial Sequence: Synthetic oligonucleotide
  Antisense strand to SEQ ID NO: 943168
uucagagaaacugacccuu

SEQ ID NO: 943170 - RNA, 19 nt, Artificial Sequence
  Description of Artificial Sequence: Synthetic oligonucleotide
  Sense strand starting at position 1445 of SEQ ID NO: 913642
agggucaguuucucugaaa

SEQ ID NO: 943171 - RNA, 19 nt, Artificial Sequence
  Description of Artificial Sequence: Synthetic oligonucleotide
  Antisense strand to SEQ ID NO: 943170
uuucagagaaacugacccu

SEQ ID NO: 943172 - RNA, 19 nt, Artificial Sequence
  Description of Artificial Sequence: Synthetic oligonucleotide
  Sense strand starting at position 397 of SEQ ID NO: 913642
ggugucagugcugaaggaa

SEQ ID NO: 943173 - RNA, 19 nt, Artificial Sequence
  Description of Artificial Sequence: Synthetic oligonucleotide
  Antisense strand to SEQ ID NO: 943172
uuccuucagcacugacacc

SEQ ID NO: 943174 - RNA, 19 nt, Artificial Sequence
  Description of Artificial Sequence: Synthetic oligonucleotide
  Sense strand starting at position 527 of SEQ ID NO: 913642
cucccacugugauccugaa

SEQ ID NO: 943175 - RNA, 19 nt, Artificial Sequence
  Description of Artificial Sequence: Synthetic oligonucleotide
  Antisense strand to SEQ ID NO: 943174
uucaggaucacagugggag

SEQ ID NO: 943176 - RNA, 19 nt, Artificial Sequence
  Description of Artificial Sequence: Synthetic oligonucleotide
  Sense strand starting at position 3286 of SEQ ID NO: 913642
ccacaauauguuggcacaa

SEQ ID NO: 943177 - RNA, 19 nt, Artificial Sequence
  Description of Artificial Sequence: Synthetic oligonucleotide
  Antisense strand to SEQ ID NO: 943176
uugugccaacauauugugg

SEQ ID NO: 943178 - RNA, 19 nt, Artificial Sequence
  Description of Artificial Sequence: Synthetic oligonucleotide
  Sense strand starting at position 3678 of SEQ ID NO: 913642
ucuaaaguaccaugugacu

SEQ ID NO: 943179 - RNA, 19 nt, Artificial Sequence
  Description of Artificial Sequence: Synthetic oligonucleotide
  Antisense strand to SEQ ID NO: 943178
agucacaugguacuuuaga

SEQ ID NO: 943180 - RNA, 19 nt, Artificial Sequence
  Description of Artificial Sequence: Synthetic oligonucleotide
  Sense strand starting at position 2204 of SEQ ID NO: 913642
ugcagucaugcagauuaua

SEQ ID NO: 943181 - RNA, 19 nt, Artificial Sequence
  Description of Artificial Sequence: Synthetic oligonucleotide
  Antisense strand to SEQ ID NO: 943180
uauaaucugcaugacugca

SEQ ID NO: 943182 - RNA, 19 nt, Artificial Sequence
  Description of Artificial Sequence: Synthetic oligonucleotide
  Sense strand starting at position 2887 of SEQ ID NO: 913642
ucugguccucuauaguuua

SEQ ID NO: 943183 - RNA, 19 nt, Artificial Sequence
  Description of Artificial Sequence: Synthetic oligonucleotide
  Antisense strand to SEQ ID NO: 943182
uaaacuauagaggaccaga

SEQ ID NO: 943184 - RNA, 19 nt, Artificial Sequence
  Description of Artificial Sequence: Synthetic oligonucleotide
  Sense strand starting at position 1745 of SEQ ID NO: 913642
agugacauccuaugagucu

SEQ ID NO: 943185 - RNA, 19 nt, Artificial Sequence
  Description of Artificial Sequence: Synthetic oligonucleotide
  Antisense strand to SEQ ID NO: 943184
agacucauaggaugucacu

SEQ ID NO: 943186 - RNA, 19 nt, Artificial Sequence
  Description of Artificial Sequence: Synthetic oligonucleotide
  Sense strand starting at position 1229 of SEQ ID NO: 913642
gcuguaauuguugauuaac

SEQ ID NO: 943187 - RNA, 19 nt, Artificial Sequence
  Description of Artificial Sequence: Synthetic oligonucleotide
  Antisense strand to SEQ ID NO: 943186
guuaaucaacaauuacagc

SEQ ID NO: 943188 - RNA, 19 nt, Artificial Sequence
  Description of Artificial Sequence: Synthetic oligonucleotide
  Sense strand starting at position 1446 of SEQ ID NO: 913642
gggucaguuucucugaaac

SEQ ID NO: 943189 - RNA, 19 nt, Artificial Sequence
  Description of Artificial Sequence: Synthetic oligonucleotide
  Antisense strand to SEQ ID NO: 943188
guuucagagaaacugaccc

SEQ ID NO: 943190 - RNA, 19 nt, Artificial Sequence
  Description of Artificial Sequence: Synthetic oligonucleotide
  Sense strand starting at position 3792 of SEQ ID NO: 913642
ggccuaacuccugacuguu

SEQ ID NO: 943191 - RNA, 19 nt, Artificial Sequence
  Description of Artificial Sequence: Synthetic oligonucleotide
  Antisense strand to SEQ ID NO: 943190
aacagucaggaguuaggcc

SEQ ID NO: 943192 - RNA, 19 nt, Artificial Sequence
  Description of Artificial Sequence: Synthetic oligonucleotide
  Sense strand starting at position 3862 of SEQ ID NO: 913642
ucagcacuggcugaguuaa

SEQ ID NO: 943193 - RNA, 19 nt, Artificial Sequence
  Description of Artificial Sequence: Synthetic oligonucleotide
  Antisense strand to SEQ ID NO: 943192
uuaacucagccagugcuga

SEQ ID NO: 943194 - RNA, 19 nt, Artificial Sequence
  Description of Artificial Sequence: Synthetic oligonucleotide
  Sense strand starting at position 2864 of SEQ ID NO: 913642
gaaugaaucuggcuugguu

SEQ ID NO: 943195 - RNA, 19 nt, Artificial Sequence
  Description of Artificial Sequence: Synthetic oligonucleotide
  Antisense strand to SEQ ID NO: 943194
aaccaagccagauucauuc

SEQ ID NO: 943196 - RNA, 19 nt, Artificial Sequence
  Description of Artificial Sequence: Synthetic oligonucleotide
  Sense strand starting at position 2300 of SEQ ID NO: 913642
gucauacuagcgcaaauaa

SEQ ID NO: 943197 - RNA, 19 nt, Artificial Sequence
  Description of Artificial Sequence: Synthetic oligonucleotide
  Antisense strand to SEQ ID NO: 943196
uuauuugcgcuaguaugac

SEQ ID NO: 943198 - RNA, 19 nt, Artificial Sequence
  Description of Artificial Sequence: Synthetic oligonucleotide
  Sense strand starting at position 1058 of SEQ ID NO: 913642
agauuauccuguuuagcag

SEQ ID NO: 943199 - RNA, 19 nt, Artificial Sequence
  Description of Artificial Sequence: Synthetic oligonucleotide
  Antisense strand to SEQ ID NO: 943198
cugcuaaacaggauaaucu

SEQ ID NO: 943200 - RNA, 19 nt, Artificial Sequence
  Description of Artificial Sequence: Synthetic oligonucleotide
  Sense strand starting at position 3788 of SEQ ID NO: 913643
ggugguagaaauuaagguu

SEQ ID NO: 943201 - RNA, 19 nt, Artificial Sequence
  Description of Artificial Sequence: Synthetic oligonucleotide
  Antisense strand to SEQ ID NO: 943200
aaccuuaauuucuaccacc

SEQ ID NO: 943202 - RNA, 19 nt, Artificial Sequence
  Description of Artificial Sequence: Synthetic oligonucleotide
  Sense strand starting at position 2904 of SEQ ID NO: 913643
acgugagagguggaucuaa

SEQ ID NO: 943203 - RNA, 19 nt, Artificial Sequence
  Description of Artificial Sequence: Synthetic oligonucleotide
  Antisense strand to SEQ ID NO: 943202
uuagauccaccucucacgu

SEQ ID NO: 943204 - RNA, 19 nt, Artificial Sequence
  Description of Artificial Sequence: Synthetic oligonucleotide
  Sense strand starting at position 3461 of SEQ ID NO: 913643
cgguaacauccugaagauc

SEQ ID NO: 943205 - RNA, 19 nt, Artificial Sequence
  Description of Artificial Sequence: Synthetic oligonucleotide
  Antisense strand to SEQ ID NO: 943204
gaucuucaggauguuaccg

SEQ ID NO: 943206 - RNA, 19 nt, Artificial Sequence
  Description of Artificial Sequence: Synthetic oligonucleotide
  Sense strand starting at position 3317 of SEQ ID NO: 913643
aaaugaguucuuggagacu

SEQ ID NO: 943207 - RNA, 19 nt, Artificial Sequence
  Description of Artificial Sequence: Synthetic oligonucleotide
  Antisense strand to SEQ ID NO: 943206
agucuccaagaacucauuu

SEQ ID NO: 943208 - RNA, 19 nt, Artificial Sequence
  Description of Artificial Sequence: Synthetic oligonucleotide
  Sense strand starting at position 136 of SEQ ID NO: 913643
gaugaaugaguaugguaac

SEQ ID NO: 943209 - RNA, 19 nt, Artificial Sequence
  Description of Artificial Sequence: Synthetic oligonucleotide
  Antisense strand to SEQ ID NO: 943208
guuaccauacucauucauc

SEQ ID NO: 943210 - RNA, 19 nt, Artificial Sequence
  Description of Artificial Sequence: Synthetic oligonucleotide
  Sense strand starting at position 2565 of SEQ ID NO: 913643
aagacauaucggugacaca

SEQ ID NO: 943211 - RNA, 19 nt, Artificial Sequence
  Description of Artificial Sequence: Synthetic oligonucleotide
  Antisense strand to SEQ ID NO: 943210
ugugucaccgauaugucuu

SEQ ID NO: 943212 - RNA, 19 nt, Artificial Sequence
  Description of Artificial Sequence: Synthetic oligonucleotide
  Sense strand starting at position 3917 of SEQ ID NO: 913643
gaggcagaucuggguaaag

SEQ ID NO: 943213 - RNA, 19 nt, Artificial Sequence
  Description of Artificial Sequence: Synthetic oligonucleotide
  Antisense strand to SEQ ID NO: 943212
cuuuacccagaucugccuc

SEQ ID NO: 943214 - RNA, 19 nt, Artificial Sequence
  Description of Artificial Sequence: Synthetic oligonucleotide
  Sense strand starting at position 2010 of SEQ ID NO: 913643
agacuccaucucuacguaa

SEQ ID NO: 943215 - RNA, 19 nt, Artificial Sequence
  Description of Artificial Sequence: Synthetic oligonucleotide
  Antisense strand to SEQ ID NO: 943214
uuacguagagauggagucu

SEQ ID NO: 943216 - RNA, 19 nt, Artificial Sequence
  Description of Artificial Sequence: Synthetic oligonucleotide
  Sense strand starting at position 2969 of SEQ ID NO: 913643
gcaggaguuaggcauauga

SEQ ID NO: 943217 - RNA, 19 nt, Artificial Sequence
  Description of Artificial Sequence: Synthetic oligonucleotide
  Antisense strand to SEQ ID NO: 943216
ucauaugccuaacuccugc

SEQ ID NO: 943218 - RNA, 19 nt, Artificial Sequence
  Description of Artificial Sequence: Synthetic oligonucleotide
  Sense strand starting at position 2242 of SEQ ID NO: 913643
gcugacucacgauacauau

SEQ ID NO: 943219 - RNA, 19 nt, Artificial Sequence
  Description of Artificial Sequence: Synthetic oligonucleotide
  Antisense strand to SEQ ID NO: 943218
auauguaucgugagucagc

SEQ ID NO: 943220 - RNA, 19 nt, Artificial Sequence
  Description of Artificial Sequence: Synthetic oligonucleotide
  Sense strand starting at position 2653 of SEQ ID NO: 913643
uggucauuugccugcaaca

SEQ ID NO: 943221 - RNA, 19 nt, Artificial Sequence
  Description of Artificial Sequence: Synthetic oligonucleotide
  Antisense strand to SEQ ID NO: 943220
uguugcaggcaaaugacca

SEQ ID NO: 943222 - RNA, 19 nt, Artificial Sequence
  Description of Artificial Sequence: Synthetic oligonucleotide
  Sense strand starting at position 3304 of SEQ ID NO: 913643
ucauuuccuugggaaauga

SEQ ID NO: 943223 - RNA, 19 nt, Artificial Sequence
  Description of Artificial Sequence: Synthetic oligonucleotide
  Antisense strand to SEQ ID NO: 943222
ucauuucccaaggaaauga

SEQ ID NO: 943224 - RNA, 19 nt, Artificial Sequence
  Description of Artificial Sequence: Synthetic oligonucleotide
  Sense strand starting at position 3808 of SEQ ID NO: 913643
acuagaagcuuugugauaa

SEQ ID NO: 943225 - RNA, 19 nt, Artificial Sequence
  Description of Artificial Sequence: Synthetic oligonucleotide
  Antisense strand to SEQ ID NO: 943224
uuaucacaaagcuucuagu

SEQ ID NO: 943226 - RNA, 19 nt, Artificial Sequence
  Description of Artificial Sequence: Synthetic oligonucleotide
  Sense strand starting at position 3452 of SEQ ID NO: 913643
uuuacacuucgguaacauc

SEQ ID NO: 943227 - RNA, 19 nt, Artificial Sequence
  Description of Artificial Sequence: Synthetic oligonucleotide
  Antisense strand to SEQ ID NO: 943226
gauguuaccgaaguguaaa

SEQ ID NO: 943228 - RNA, 19 nt, Artificial Sequence
  Description of Artificial Sequence: Synthetic oligonucleotide
  Sense strand starting at position 2651 of SEQ ID NO: 913643
gguggucauuugccugcaa

SEQ ID NO: 943229 - RNA, 19 nt, Artificial Sequence
  Description of Artificial Sequence: Synthetic oligonucleotide
  Antisense strand to SEQ ID NO: 943228
uugcaggcaaaugaccacc

SEQ ID NO: 943230 - RNA, 19 nt, Artificial Sequence
  Description of Artificial Sequence: Synthetic oligonucleotide
  Sense strand starting at position 586 of SEQ ID NO: 913643
ggcuguuaaguuuacaacu

SEQ ID NO: 943231 - RNA, 19 nt, Artificial Sequence
  Description of Artificial Sequence: Synthetic oligonucleotide
  Antisense strand to SEQ ID NO: 943230
aguuguaaacuuaacagcc

SEQ ID NO: 943232 - RNA, 19 nt, Artificial Sequence
  Description of Artificial Sequence: Synthetic oligonucleotide
  Sense strand starting at position 833 of SEQ ID NO: 913643
ccaacaauucgcgaagguu

SEQ ID NO: 943233 - RNA, 19 nt, Artificial Sequence
  Description of Artificial Sequence: Synthetic oligonucleotide
  Antisense strand to SEQ ID NO: 943232
aaccuucgcgaauuguugg

SEQ ID NO: 943234 - RNA, 19 nt, Artificial Sequence
  Description of Artificial Sequence: Synthetic oligonucleotide
  Sense strand starting at position 24 of SEQ ID NO: 913643
ugccuugugagguaccuua

SEQ ID NO: 943235 - RNA, 19 nt, Artificial Sequence
  Description of Artificial Sequence: Synthetic oligonucleotide
  Antisense strand to SEQ ID NO: 943234
uaagguaccucacaaggca

SEQ ID NO: 943236 - RNA, 19 nt, Artificial Sequence
  Description of Artificial Sequence: Synthetic oligonucleotide
  Sense strand starting at position 2757 of SEQ ID NO: 913643
cuccauguuccauguaaac

SEQ ID NO: 943237 - RNA, 19 nt, Artificial Sequence
  Description of Artificial Sequence: Synthetic oligonucleotide
  Antisense strand to SEQ ID NO: 943236
guuuacauggaacauggag

SEQ ID NO: 943238 - RNA, 19 nt, Artificial Sequence
  Description of Artificial Sequence: Synthetic oligonucleotide
  Sense strand starting at position 49 of SEQ ID NO: 913643
gugcaauaaauacgaugua

SEQ ID NO: 943239 - RNA, 19 nt, Artificial Sequence
  Description of Artificial Sequence: Synthetic oligonucleotide
  Antisense strand to SEQ ID NO: 943238
uacaucguauuuauugcac

SEQ ID NO: 943240 - RNA, 19 nt, Artificial Sequence
  Description of Artificial Sequence: Synthetic oligonucleotide
  Sense strand starting at position 3401 of SEQ ID NO: 913643
aggcuuuaacugugaugua

SEQ ID NO: 943241 - RNA, 19 nt, Artificial Sequence
  Description of Artificial Sequence: Synthetic oligonucleotide
  Antisense strand to SEQ ID NO: 943240
uacaucacaguuaaagccu

SEQ ID NO: 943242 - RNA, 19 nt, Artificial Sequence
  Description of Artificial Sequence: Synthetic oligonucleotide
  Sense strand starting at position 3303 of SEQ ID NO: 913643
gucauuuccuugggaaaug

SEQ ID NO: 943243 - RNA, 19 nt, Artificial Sequence
  Description of Artificial Sequence: Synthetic oligonucleotide
  Antisense strand to SEQ ID NO: 943242
cauuucccaaggaaaugac

SEQ ID NO: 943244 - RNA, 19 nt, Artificial Sequence
  Description of Artificial Sequence: Synthetic oligonucleotide
  Sense strand starting at position 3820 of SEQ ID NO: 913643
gugauaacuuuagauaaug

SEQ ID NO: 943245 - RNA, 19 nt, Artificial Sequence
  Description of Artificial Sequence: Synthetic oligonucleotide
  Antisense strand to SEQ ID NO: 943244
cauuaucuaaaguuaucac

SEQ ID NO: 943246 - RNA, 19 nt, Artificial Sequence
  Description of Artificial Sequence: Synthetic oligonucleotide
  Sense strand starting at position 3768 of SEQ ID NO: 913643
gccuuagguucugaauuuc

SEQ ID NO: 943247 - RNA, 19 nt, Artificial Sequence
  Description of Artificial Sequence: Synthetic oligonucleotide
  Antisense strand to SEQ ID NO: 943246
gaaauucagaaccuaaggc

SEQ ID NO: 943248 - RNA, 19 nt, Artificial Sequence
  Description of Artificial Sequence: Synthetic oligonucleotide
  Sense strand starting at position 2219 of SEQ ID NO: 913643
guuggacuuucagagacag

SEQ ID NO: 943249 - RNA, 19 nt, Artificial Sequence
  Description of Artificial Sequence: Synthetic oligonucleotide
  Antisense strand to SEQ ID NO: 943248
cugucucugaaaguccaac

SEQ ID NO: 943250 - RNA, 19 nt, Artificial Sequence
  Description of Artificial Sequence: Synthetic oligonucleotide
  Sense strand starting at position 3008 of SEQ ID NO: 913643
ucguauacuuuggugcaau

SEQ ID NO: 943251 - RNA, 19 nt, Artificial Sequence
  Description of Artificial Sequence: Synthetic oligonucleotide
  Antisense strand to SEQ ID NO: 943250
auugcaccaaaguauacga

SEQ ID NO: 943252 - RNA, 19 nt, Artificial Sequence
  Description of Artificial Sequence: Synthetic oligonucleotide
  Sense strand starting at position 3362 of SEQ ID NO: 913643
gguugaggauagcagaauu

SEQ ID NO: 943253 - RNA, 19 nt, Artificial Sequence
  Description of Artificial Sequence: Synthetic oligonucleotide
  Antisense strand to SEQ ID NO: 943252
aauucugcuauccucaacc

SEQ ID NO: 943254 - RNA, 19 nt, Artificial Sequence
  Description of Artificial Sequence: Synthetic oligonucleotide
  Sense strand starting at position 139 of SEQ ID NO: 913643
gaaugaguaugguaacgag

SEQ ID NO: 943255 - RNA, 19 nt, Artificial Sequence
  Description of Artificial Sequence: Synthetic oligonucleotide
  Antisense strand to SEQ ID NO: 943254
cucguuaccauacucauuc

SEQ ID NO: 943256 - RNA, 19 nt, Artificial Sequence
  Description of Artificial Sequence: Synthetic oligonucleotide
  Sense strand starting at position 3767 of SEQ ID NO: 913643
agccuuagguucugaauuu

SEQ ID NO: 943257 - RNA, 19 nt, Artificial Sequence
  Description of Artificial Sequence: Synthetic oligonucleotide
  Antisense strand to SEQ ID NO: 943256
aaauucagaaccuaaggcu

SEQ ID NO: 943258 - RNA, 19 nt, Artificial Sequence
  Description of Artificial Sequence: Synthetic oligonucleotide
  Sense strand starting at position 633 of SEQ ID NO: 913643
uugugacucuugggaaaga

SEQ ID NO: 943259 - RNA, 19 nt, Artificial Sequence
  Description of Artificial Sequence: Synthetic oligonucleotide
  Antisense strand to SEQ ID NO: 943258
ucuuucccaagagucacaa

SEQ ID NO: 943260 - RNA, 19 nt, Artificial Sequence
  Description of Artificial Sequence: Synthetic oligonucleotide
  Sense strand starting at position 3916 of SEQ ID NO: 913643
ggaggcagaucuggguaaa

SEQ ID NO: 943261 - RNA, 19 nt, Artificial Sequence
  Description of Artificial Sequence: Synthetic oligonucleotide
  Antisense strand to SEQ ID NO: 943260
uuuacccagaucugccucc

SEQ ID NO: 943262 - RNA, 19 nt, Artificial Sequence
  Description of Artificial Sequence: Synthetic oligonucleotide
  Sense strand starting at position 616 of SEQ ID NO: 913643
aauuuaaagucaggcguuu

SEQ ID NO: 943263 - RNA, 19 nt, Artificial Sequence
  Description of Artificial Sequence: Synthetic oligonucleotide
  Antisense strand to SEQ ID NO: 943262
aaacgccugacuuuaaauu

SEQ ID NO: 943264 - RNA, 19 nt, Artificial Sequence
  Description of Artificial Sequence: Synthetic oligonucleotide
  Sense strand starting at position 50 of SEQ ID NO: 913643
ugcaauaaauacgauguau

SEQ ID NO: 943265 - RNA, 19 nt, Artificial Sequence
  Description of Artificial Sequence: Synthetic oligonucleotide
  Antisense strand to SEQ ID NO: 943264
auacaucguauuuauugca

SEQ ID NO: 943266 - RNA, 19 nt, Artificial Sequence
  Description of Artificial Sequence: Synthetic oligonucleotide
  Sense strand starting at position 3496 of SEQ ID NO: 913643
ggcuacaucugauagcuaa

SEQ ID NO: 943267 - RNA, 19 nt, Artificial Sequence
  Description of Artificial Sequence: Synthetic oligonucleotide
  Antisense strand to SEQ ID NO: 943266
uuagcuaucagauguagcc

SEQ ID NO: 943268 - RNA, 19 nt, Artificial Sequence
  Description of Artificial Sequence: Synthetic oligonucleotide
  Sense strand starting at position 3929 of SEQ ID NO: 913643
gguaaagacuccugacuuu

SEQ ID NO: 943269 - RNA, 19 nt, Artificial Sequence
  Description of Artificial Sequence: Synthetic oligonucleotide
  Antisense strand to SEQ ID NO: 943268
aaagucaggagucuuuacc

SEQ ID NO: 943270 - RNA, 19 nt, Artificial Sequence
  Description of Artificial Sequence: Synthetic oligonucleotide
  Sense strand starting at position 3812 of SEQ ID NO: 913643
gaagcuuugugauaacuuu

SEQ ID NO: 943271 - RNA, 19 nt, Artificial Sequence
  Description of Artificial Sequence: Synthetic oligonucleotide
  Antisense strand to SEQ ID NO: 943270
aaaguuaucacaaagcuuc

SEQ ID NO: 943272 - RNA, 19 nt, Artificial Sequence
  Description of Artificial Sequence: Synthetic oligonucleotide
  Sense strand starting at position 2239 of SEQ ID NO: 913643
agagcugacucacgauaca

SEQ ID NO: 943273 - RNA, 19 nt, Artificial Sequence
  Description of Artificial Sequence: Synthetic oligonucleotide
  Antisense strand to SEQ ID NO: 943272
uguaucgugagucagcucu

SEQ ID NO: 943274 - RNA, 19 nt, Artificial Sequence
  Description of Artificial Sequence: Synthetic oligonucleotide
  Sense strand starting at position 3460 of SEQ ID NO: 913643
ucgguaacauccugaagau

SEQ ID NO: 943275 - RNA, 19 nt, Artificial Sequence
  Description of Artificial Sequence: Synthetic oligonucleotide
  Antisense strand to SEQ ID NO: 943274
aucuucaggauguuaccga

SEQ ID NO: 943276 - RNA, 19 nt, Artificial Sequence
  Description of Artificial Sequence: Synthetic oligonucleotide
  Sense strand starting at position 3192 of SEQ ID NO: 913643
cuccuuaccuugugaagag

SEQ ID NO: 943277 - RNA, 19 nt, Artificial Sequence
  Description of Artificial Sequence: Synthetic oligonucleotide
  Antisense strand to SEQ ID NO: 943276
cucuucacaagguaaggag

SEQ ID NO: 943278 - RNA, 19 nt, Artificial Sequence
  Description of Artificial Sequence: Synthetic oligonucleotide
  Sense strand starting at position 3020 of SEQ ID NO: 913643
gugcaaugcggguguaguu

SEQ ID NO: 943279 - RNA, 19 nt, Artificial Sequence
  Description of Artificial Sequence: Synthetic oligonucleotide
  Antisense strand to SEQ ID NO: 943278
aacuacacccgcauugcac

SEQ ID NO: 943280 - RNA, 19 nt, Artificial Sequence
  Description of Artificial Sequence: Synthetic oligonucleotide
  Sense strand starting at position 3561 of SEQ ID NO: 913644
acgugagagguggaucuaa

SEQ ID NO: 943281 - RNA, 19 nt, Artificial Sequence
  Description of Artificial Sequence: Synthetic oligonucleotide
  Antisense strand to SEQ ID NO: 943280
uuagauccaccucucacgu

SEQ ID NO: 943282 - RNA, 19 nt, Artificial Sequence
  Description of Artificial Sequence: Synthetic oligonucleotide
  Sense strand starting at position 3974 of SEQ ID NO: 913644
aaaugaguucuuggagacu

SEQ ID NO: 943283 - RNA, 19 nt, Artificial Sequence
  Description of Artificial Sequence: Synthetic oligonucleotide
  Antisense strand to SEQ ID NO: 943282
agucuccaagaacucauuu

SEQ ID NO: 943284 - RNA, 19 nt, Artificial Sequence
  Description of Artificial Sequence: Synthetic oligonucleotide
  Sense strand starting at position 793 of SEQ ID NO: 913644
gaugaaugaguaugguaac

SEQ ID NO: 943285 - RNA, 19 nt, Artificial Sequence
  Description of Artificial Sequence: Synthetic oligonucleotide
  Antisense strand to SEQ ID NO: 943284
guuaccauacucauucauc

SEQ ID NO: 943286 - RNA, 19 nt, Artificial Sequence
  Description of Artificial Sequence: Synthetic oligonucleotide
  Sense strand starting at position 3222 of SEQ ID NO: 913644
aagacauaucggugacaca

SEQ ID NO: 943287 - RNA, 19 nt, Artificial Sequence
  Description of Artificial Sequence: Synthetic oligonucleotide
  Antisense strand to SEQ ID NO: 943286
ugugucaccgauaugucuu

SEQ ID NO: 943288 - RNA, 19 nt, Artificial Sequence
  Description of Artificial Sequence: Synthetic oligonucleotide
  Sense strand starting at position 183 of SEQ ID NO: 913644
guaauuucccugugccaga

SEQ ID NO: 943289 - RNA, 19 nt, Artificial Sequence
  Description of Artificial Sequence: Synthetic oligonucleotide
  Antisense strand to SEQ ID NO: 943288
ucuggcacagggaaauuac

SEQ ID NO: 943290 - RNA, 19 nt, Artificial Sequence
  Description of Artificial Sequence: Synthetic oligonucleotide
  Sense strand starting at position 2667 of SEQ ID NO: 913644
agacuccaucucuacguaa

SEQ ID NO: 943291 - RNA, 19 nt, Artificial Sequence
  Description of Artificial Sequence: Synthetic oligonucleotide
  Antisense strand to SEQ ID NO: 943290
uuacguagagauggagucu

SEQ ID NO: 943292 - RNA, 19 nt, Artificial Sequence
  Description of Artificial Sequence: Synthetic oligonucleotide
  Sense strand starting at position 3626 of SEQ ID NO: 913644
gcaggaguuaggcauauga

SEQ ID NO: 943293 - RNA, 19 nt, Artificial Sequence
  Description of Artificial Sequence: Synthetic oligonucleotide
  Antisense strand to SEQ ID NO: 943292
ucauaugccuaacuccugc

SEQ ID NO: 943294 - RNA, 19 nt, Artificial Sequence
  Description of Artificial Sequence: Synthetic oligonucleotide
  Sense strand starting at position 2899 of SEQ ID NO: 913644
gcugacucacgauacauau

SEQ ID NO: 943295 - RNA, 19 nt, Artificial Sequence
  Description of Artificial Sequence: Synthetic oligonucleotide
  Antisense strand to SEQ ID NO: 943294
auauguaucgugagucagc

SEQ ID NO: 943296 - RNA, 19 nt, Artificial Sequence
  Description of Artificial Sequence: Synthetic oligonucleotide
  Sense strand starting at position 416 of SEQ ID NO: 913644
ccauuuaaaugacacgaga

SEQ ID NO: 943297 - RNA, 19 nt, Artificial Sequence
  Description of Artificial Sequence: Synthetic oligonucleotide
  Antisense strand to SEQ ID NO: 943296
ucucgugucauuuaaaugg

SEQ ID NO: 943298 - RNA, 19 nt, Artificial Sequence
  Description of Artificial Sequence: Synthetic oligonucleotide
  Sense strand starting at position 3310 of SEQ ID NO: 913644
uggucauuugccugcaaca

SEQ ID NO: 943299 - RNA, 19 nt, Artificial Sequence
  Description of Artificial Sequence: Synthetic oligonucleotide
  Antisense strand to SEQ ID NO: 943298
uguugcaggcaaaugacca

SEQ ID NO: 943300 - RNA, 19 nt, Artificial Sequence
  Description of Artificial Sequence: Synthetic oligonucleotide
  Sense strand starting at position 3961 of SEQ ID NO: 913644
ucauuuccuugggaaauga

SEQ ID NO: 943301 - RNA, 19 nt, Artificial Sequence
  Description of Artificial Sequence: Synthetic oligonucleotide
  Antisense strand to SEQ ID NO: 943300
ucauuucccaaggaaauga

SEQ ID NO: 943302 - RNA, 19 nt, Artificial Sequence
  Description of Artificial Sequence: Synthetic oligonucleotide
  Sense strand starting at position 617 of SEQ ID NO: 913644
gggaaugcuuccuuaauua

SEQ ID NO: 943303 - RNA, 19 nt, Artificial Sequence
  Description of Artificial Sequence: Synthetic oligonucleotide
  Antisense strand to SEQ ID NO: 943302
uaauuaaggaagcauuccc

SEQ ID NO: 943304 - RNA, 19 nt, Artificial Sequence
  Description of Artificial Sequence: Synthetic oligonucleotide
  Sense strand starting at position 181 of SEQ ID NO: 913644
cuguaauuucccugugcca

SEQ ID NO: 943305 - RNA, 19 nt, Artificial Sequence
  Description of Artificial Sequence: Synthetic oligonucleotide
  Antisense strand to SEQ ID NO: 943304
uggcacagggaaauuacag

SEQ ID NO: 943306 - RNA, 19 nt, Artificial Sequence
  Description of Artificial Sequence: Synthetic oligonucleotide
  Sense strand starting at position 3308 of SEQ ID NO: 913644
gguggucauuugccugcaa

SEQ ID NO: 943307 - RNA, 19 nt, Artificial Sequence
  Description of Artificial Sequence: Synthetic oligonucleotide
  Antisense strand to SEQ ID NO: 943306
uugcaggcaaaugaccacc

SEQ ID NO: 943308 - RNA, 19 nt, Artificial Sequence
  Description of Artificial Sequence: Synthetic oligonucleotide
  Sense strand starting at position 616 of SEQ ID NO: 913644
ugggaaugcuuccuuaauu

SEQ ID NO: 943309 - RNA, 19 nt, Artificial Sequence
  Description of Artificial Sequence: Synthetic oligonucleotide
  Antisense strand to SEQ ID NO: 943308
aauuaaggaagcauuccca

SEQ ID NO: 943310 - RNA, 19 nt, Artificial Sequence
  Description of Artificial Sequence: Synthetic oligonucleotide
  Sense strand starting at position 340 of SEQ ID NO: 913644
ugcccuauugcuuagauag

SEQ ID NO: 943311 - RNA, 19 nt, Artificial Sequence
  Description of Artificial Sequence: Synthetic oligonucleotide
  Antisense strand to SEQ ID NO: 943310
cuaucuaagcaauagggca

SEQ ID NO: 943312 - RNA, 19 nt, Artificial Sequence
  Description of Artificial Sequence: Synthetic oligonucleotide
  Sense strand starting at position 286 of SEQ ID NO: 913644
ggagcuucugcucaacauu

SEQ ID NO: 943313 - RNA, 19 nt, Artificial Sequence
  Description of Artificial Sequence: Synthetic oligonucleotide
  Antisense strand to SEQ ID NO: 943312
aauguugagcagaagcucc

SEQ ID NO: 943314 - RNA, 19 nt, Artificial Sequence
  Description of Artificial Sequence: Synthetic oligonucleotide
  Sense strand starting at position 1243 of SEQ ID NO: 913644
ggcuguuaaguuuacaacu

SEQ ID NO: 943315 - RNA, 19 nt, Artificial Sequence
  Description of Artificial Sequence: Synthetic oligonucleotide
  Antisense strand to SEQ ID NO: 943314
aguuguaaacuuaacagcc

SEQ ID NO: 943316 - RNA, 19 nt, Artificial Sequence
  Description of Artificial Sequence: Synthetic oligonucleotide
  Sense strand starting at position 371 of SEQ ID NO: 913644
gggcuugagcccuagaguu

SEQ ID NO: 943317 - RNA, 19 nt, Artificial Sequence
  Description of Artificial Sequence: Synthetic oligonucleotide
  Antisense strand to SEQ ID NO: 943316
aacucuagggcucaagccc

SEQ ID NO: 943318 - RNA, 19 nt, Artificial Sequence
  Description of Artificial Sequence: Synthetic oligonucleotide
  Sense strand starting at position 1490 of SEQ ID NO: 913644
ccaacaauucgcgaagguu

SEQ ID NO: 943319 - RNA, 19 nt, Artificial Sequence
  Description of Artificial Sequence: Synthetic oligonucleotide
  Antisense strand to SEQ ID NO: 943318
aaccuucgcgaauuguugg

SEQ ID NO: 943320 - RNA, 19 nt, Artificial Sequence
  Description of Artificial Sequence: Synthetic oligonucleotide
  Sense strand starting at position 681 of SEQ ID NO: 913644
ugccuugugagguaccuua

SEQ ID NO: 943321 - RNA, 19 nt, Artificial Sequence
  Description of Artificial Sequence: Synthetic oligonucleotide
  Antisense strand to SEQ ID NO: 943320
uaagguaccucacaaggca

SEQ ID NO: 943322 - RNA, 19 nt, Artificial Sequence
  Description of Artificial Sequence: Synthetic oligonucleotide
  Sense strand starting at position 3414 of SEQ ID NO: 913644
cuccauguuccauguaaac

SEQ ID NO: 943323 - RNA, 19 nt, Artificial Sequence
  Description of Artificial Sequence: Synthetic oligonucleotide
  Antisense strand to SEQ ID NO: 943322
guuuacauggaacauggag

SEQ ID NO: 943324 - RNA, 19 nt, Artificial Sequence
  Description of Artificial Sequence: Synthetic oligonucleotide
  Sense strand starting at position 706 of SEQ ID NO: 913644
gugcaauaaauacgaugua

SEQ ID NO: 943325 - RNA, 19 nt, Artificial Sequence
  Description of Artificial Sequence: Synthetic oligonucleotide
  Antisense strand to SEQ ID NO: 943324
uacaucguauuuauugcac

SEQ ID NO: 943326 - RNA, 19 nt, Artificial Sequence
  Description of Artificial Sequence: Synthetic oligonucleotide
  Sense strand starting at position 285 of SEQ ID NO: 913644
uggagcuucugcucaacau

SEQ ID NO: 943327 - RNA, 19 nt, Artificial Sequence
  Description of Artificial Sequence: Synthetic oligonucleotide
  Antisense strand to SEQ ID NO: 943326
auguugagcagaagcucca

SEQ ID NO: 943328 - RNA, 19 nt, Artificial Sequence
  Description of Artificial Sequence: Synthetic oligonucleotide
  Sense strand starting at position 339 of SEQ ID NO: 913644
cugcccuauugcuuagaua

SEQ ID NO: 943329 - RNA, 19 nt, Artificial Sequence
  Description of Artificial Sequence: Synthetic oligonucleotide
  Antisense strand to SEQ ID NO: 943328
uaucuaagcaauagggcag

SEQ ID NO: 943330 - RNA, 19 nt, Artificial Sequence
  Description of Artificial Sequence: Synthetic oligonucleotide
  Sense strand starting at position 3960 of SEQ ID NO: 913644
gucauuuccuugggaaaug

SEQ ID NO: 943331 - RNA, 19 nt, Artificial Sequence
  Description of Artificial Sequence: Synthetic oligonucleotide
  Antisense strand to SEQ ID NO: 943330
cauuucccaaggaaaugac

SEQ ID NO: 943332 - RNA, 19 nt, Artificial Sequence
  Description of Artificial Sequence: Synthetic oligonucleotide
  Sense strand starting at position 33 of SEQ ID NO: 913644
cugcuuucuggugaacguu

SEQ ID NO: 943333 - RNA, 19 nt, Artificial Sequence
  Description of Artificial Sequence: Synthetic oligonucleotide
  Antisense strand to SEQ ID NO: 943332
aacguucaccagaaagcag

SEQ ID NO: 943334 - RNA, 19 nt, Artificial Sequence
  Description of Artificial Sequence: Synthetic oligonucleotide
  Sense strand starting at position 2876 of SEQ ID NO: 913644
guuggacuuucagagacag

SEQ ID NO: 943335 - RNA, 19 nt, Artificial Sequence
  Description of Artificial Sequence: Synthetic oligonucleotide
  Antisense strand to SEQ ID NO: 943334
cugucucugaaaguccaac

SEQ ID NO: 943336 - RNA, 19 nt, Artificial Sequence
  Description of Artificial Sequence: Synthetic oligonucleotide
  Sense strand starting at position 3665 of SEQ ID NO: 913644
ucguauacuuuggugcaau

SEQ ID NO: 943337 - RNA, 19 nt, Artificial Sequence
  Description of Artificial Sequence: Synthetic oligonucleotide
  Antisense strand to SEQ ID NO: 943336
auugcaccaaaguauacga

SEQ ID NO: 943338 - RNA, 19 nt, Artificial Sequence
  Description of Artificial Sequence: Synthetic oligonucleotide
  Sense strand starting at position 796 of SEQ ID NO: 913644
gaaugaguaugguaacgag

SEQ ID NO: 943339 - RNA, 19 nt, Artificial Sequence
  Description of Artificial Sequence: Synthetic oligonucleotide
  Antisense strand to SEQ ID NO: 943338
cucguuaccauacucauuc

SEQ ID NO: 943340 - RNA, 19 nt, Artificial Sequence
  Description of Artificial Sequence: Synthetic oligonucleotide
  Sense strand starting at position 639 of SEQ ID NO: 913644
ucuacagaguugcaagaau

SEQ ID NO: 943341 - RNA, 19 nt, Artificial Sequence
  Description of Artificial Sequence: Synthetic oligonucleotide
  Antisense strand to SEQ ID NO: 943340
auucuugcaacucuguaga

SEQ ID NO: 943342 - RNA, 19 nt, Artificial Sequence
  Description of Artificial Sequence: Synthetic oligonucleotide
  Sense strand starting at position 479 of SEQ ID NO: 913644
ugcagaaggucucaacuaa

SEQ ID NO: 943343 - RNA, 19 nt, Artificial Sequence
  Description of Artificial Sequence: Synthetic oligonucleotide
  Antisense strand to SEQ ID NO: 943342
uuaguugagaccuucugca

SEQ ID NO: 943344 - RNA, 19 nt, Artificial Sequence
  Description of Artificial Sequence: Synthetic oligonucleotide
  Sense strand starting at position 1290 of SEQ ID NO: 913644
uugugacucuugggaaaga

SEQ ID NO: 943345 - RNA, 19 nt, Artificial Sequence
  Description of Artificial Sequence: Synthetic oligonucleotide
  Antisense strand to SEQ ID NO: 943344
ucuuucccaagagucacaa

SEQ ID NO: 943346 - RNA, 19 nt, Artificial Sequence
  Description of Artificial Sequence: Synthetic oligonucleotide
  Sense strand starting at position 1273 of SEQ ID NO: 913644
aauuuaaagucaggcguuu

SEQ ID NO: 943347 - RNA, 19 nt, Artificial Sequence
  Description of Artificial Sequence: Synthetic oligonucleotide
  Antisense strand to SEQ ID NO: 943346
aaacgccugacuuuaaauu

SEQ ID NO: 943348 - RNA, 19 nt, Artificial Sequence
  Description of Artificial Sequence: Synthetic oligonucleotide
  Sense strand starting at position 707 of SEQ ID NO: 913644
ugcaauaaauacgauguau

SEQ ID NO: 943349 - RNA, 19 nt, Artificial Sequence
  Description of Artificial Sequence: Synthetic oligonucleotide
  Antisense strand to SEQ ID NO: 943348
auacaucguauuuauugca

SEQ ID NO: 943350 - RNA, 19 nt, Artificial Sequence
  Description of Artificial Sequence: Synthetic oligonucleotide
  Sense strand starting at position 249 of SEQ ID NO: 913644
gaugguucuugccacacaa

SEQ ID NO: 943351 - RNA, 19 nt, Artificial Sequence
  Description of Artificial Sequence: Synthetic oligonucleotide
  Antisense strand to SEQ ID NO: 943350
uuguguggcaagaaccauc

SEQ ID NO: 943352 - RNA, 19 nt, Artificial Sequence
  Description of Artificial Sequence: Synthetic oligonucleotide
  Sense strand starting at position 2896 of SEQ ID NO: 913644
agagcugacucacgauaca

SEQ ID NO: 943353 - RNA, 19 nt, Artificial Sequence
  Description of Artificial Sequence: Synthetic oligonucleotide
  Antisense strand to SEQ ID NO: 943352
uguaucgugagucagcucu

SEQ ID NO: 943354 - RNA, 19 nt, Artificial Sequence
  Description of Artificial Sequence: Synthetic oligonucleotide
  Sense strand starting at position 3849 of SEQ ID NO: 913644
cuccuuaccuugugaagag

SEQ ID NO: 943355 - RNA, 19 nt, Artificial Sequence
  Description of Artificial Sequence: Synthetic oligonucleotide
  Antisense strand to SEQ ID NO: 943354
cucuucacaagguaaggag

SEQ ID NO: 943356 - RNA, 19 nt, Artificial Sequence
  Description of Artificial Sequence: Synthetic oligonucleotide
  Sense strand starting at position 3677 of SEQ ID NO: 913644
gugcaaugcggguguaguu

SEQ ID NO: 943357 - RNA, 19 nt, Artificial Sequence
  Description of Artificial Sequence: Synthetic oligonucleotide
  Antisense strand to SEQ ID NO: 943356
aacuacacccgcauugcac

SEQ ID NO: 943358 - RNA, 19 nt, Artificial Sequence
  Description of Artificial Sequence: Synthetic oligonucleotide
  Sense strand starting at position 1288 of SEQ ID NO: 913644
guuugugacucuugggaaa

SEQ ID NO: 943359 - RNA, 19 nt, Artificial Sequence
  Description of Artificial Sequence: Synthetic oligonucleotide
  Antisense strand to SEQ ID NO: 943358
uuucccaagagucacaaac

SEQ ID NO: 943360 - RNA, 19 nt, Artificial Sequence
  Description of Artificial Sequence: Synthetic oligonucleotide
  Sense strand starting at position 3210 of SEQ ID NO: 913645
aguagauucgcagaagaug

SEQ ID NO: 943361 - RNA, 19 nt, Artificial Sequence
  Description of Artificial Sequence: Synthetic oligonucleotide
  Antisense strand to SEQ ID NO: 943360
caucuucugcgaaucuacu

SEQ ID NO: 943362 - RNA, 19 nt, Artificial Sequence
  Description of Artificial Sequence: Synthetic oligonucleotide
  Sense strand starting at position 3260 of SEQ ID NO: 913645
uccuaugugcucguuucua

SEQ ID NO: 943363 - RNA, 19 nt, Artificial Sequence
  Description of Artificial Sequence: Synthetic oligonucleotide
  Antisense strand to SEQ ID NO: 943362
uagaaacgagcacauagga

SEQ ID NO: 943364 - RNA, 19 nt, Artificial Sequence
  Description of Artificial Sequence: Synthetic oligonucleotide
  Sense strand starting at position 3965 of SEQ ID NO: 913645
guuugagcuacucaggaga

SEQ ID NO: 943365 - RNA, 19 nt, Artificial Sequence
  Description of Artificial Sequence: Synthetic oligonucleotide
  Antisense strand to SEQ ID NO: 943364
ucuccugaguagcucaaac

SEQ ID NO: 943366 - RNA, 19 nt, Artificial Sequence
  Description of Artificial Sequence: Synthetic oligonucleotide
  Sense strand starting at position 2379 of SEQ ID NO: 913645
acgcucuguagauagagaa

SEQ ID NO: 943367 - RNA, 19 nt, Artificial Sequence
  Description of Artificial Sequence: Synthetic oligonucleotide
  Antisense strand to SEQ ID NO: 943366
uucucuaucuacagagcgu

SEQ ID NO: 943368 - RNA, 19 nt, Artificial Sequence
  Description of Artificial Sequence: Synthetic oligonucleotide
  Sense strand starting at position 3148 of SEQ ID NO: 913645
uugggaauuucggaaugac

SEQ ID NO: 943369 - RNA, 19 nt, Artificial Sequence
  Description of Artificial Sequence: Synthetic oligonucleotide
  Antisense strand to SEQ ID NO: 943368
gucauuccgaaauucccaa

SEQ ID NO: 943370 - RNA, 19 nt, Artificial Sequence
  Description of Artificial Sequence: Synthetic oligonucleotide
  Sense strand starting at position 3951 of SEQ ID NO: 913645
ggcauagaucuguaguuug

SEQ ID NO: 943371 - RNA, 19 nt, Artificial Sequence
  Description of Artificial Sequence: Synthetic oligonucleotide
  Antisense strand to SEQ ID NO: 943370
caaacuacagaucuaugcc

SEQ ID NO: 943372 - RNA, 19 nt, Artificial Sequence
  Description of Artificial Sequence: Synthetic oligonucleotide
  Sense strand starting at position 743 of SEQ ID NO: 913645
cuggaaugcugguuugaca

SEQ ID NO: 943373 - RNA, 19 nt, Artificial Sequence
  Description of Artificial Sequence: Synthetic oligonucleotide
  Antisense strand to SEQ ID NO: 943372
ugucaaaccagcauuccag

SEQ ID NO: 943374 - RNA, 19 nt, Artificial Sequence
  Description of Artificial Sequence: Synthetic oligonucleotide
  Sense strand starting at position 3438 of SEQ ID NO: 913645
gagaaugagucgcuccaca

SEQ ID NO: 943375 - RNA, 19 nt, Artificial Sequence
  Description of Artificial Sequence: Synthetic oligonucleotide
  Antisense strand to SEQ ID NO: 943374
uguggagcgacucauucuc

SEQ ID NO: 943376 - RNA, 19 nt, Artificial Sequence
  Description of Artificial Sequence: Synthetic oligonucleotide
  Sense strand starting at position 3956 of SEQ ID NO: 913645
agaucuguaguuugagcua

SEQ ID NO: 943377 - RNA, 19 nt, Artificial Sequence
  Description of Artificial Sequence: Synthetic oligonucleotide
  Antisense strand to SEQ ID NO: 943376
uagcucaaacuacagaucu

SEQ ID NO: 943378 - RNA, 19 nt, Artificial Sequence
  Description of Artificial Sequence: Synthetic oligonucleotide
  Sense strand starting at position 889 of SEQ ID NO: 913645
ucacgcuuguaauccaaua

SEQ ID NO: 943379 - RNA, 19 nt, Artificial Sequence
  Description of Artificial Sequence: Synthetic oligonucleotide
  Antisense strand to SEQ ID NO: 943378
uauuggauuacaagcguga

SEQ ID NO: 943380 - RNA, 19 nt, Artificial Sequence
  Description of Artificial Sequence: Synthetic oligonucleotide
  Sense strand starting at position 3207 of SEQ ID NO: 913645
gcuaguagauucgcagaag

SEQ ID NO: 943381 - RNA, 19 nt, Artificial Sequence
  Description of Artificial Sequence: Synthetic oligonucleotide
  Antisense strand to SEQ ID NO: 943380
cuucugcgaaucuacuagc

SEQ ID NO: 943382 - RNA, 19 nt, Artificial Sequence
  Description of Artificial Sequence: Synthetic oligonucleotide
  Sense strand starting at position 33 of SEQ ID NO: 913645
agguauuaaucccagagaa

SEQ ID NO: 943383 - RNA, 19 nt, Artificial Sequence
  Description of Artificial Sequence: Synthetic oligonucleotide
  Antisense strand to SEQ ID NO: 943382
uucucugggauuaauaccu

SEQ ID NO: 943384 - RNA, 19 nt, Artificial Sequence
  Description of Artificial Sequence: Synthetic oligonucleotide
  Sense strand starting at position 3950 of SEQ ID NO: 913645
cggcauagaucuguaguuu

SEQ ID NO: 943385 - RNA, 19 nt, Artificial Sequence
  Description of Artificial Sequence: Synthetic oligonucleotide
  Antisense strand to SEQ ID NO: 943384
aaacuacagaucuaugccg

SEQ ID NO: 943386 - RNA, 19 nt, Artificial Sequence
  Description of Artificial Sequence: Synthetic oligonucleotide
  Sense strand starting at position 3967 of SEQ ID NO: 913645
uugagcuacucaggagaau

SEQ ID NO: 943387 - RNA, 19 nt, Artificial Sequence
  Description of Artificial Sequence: Synthetic oligonucleotide
  Antisense strand to SEQ ID NO: 943386
auucuccugaguagcucaa

SEQ ID NO: 943388 - RNA, 19 nt, Artificial Sequence
  Description of Artificial Sequence: Synthetic oligonucleotide
  Sense strand starting at position 3208 of SEQ ID NO: 913645
cuaguagauucgcagaaga

SEQ ID NO: 943389 - RNA, 19 nt, Artificial Sequence
  Description of Artificial Sequence: Synthetic oligonucleotide
  Antisense strand to SEQ ID NO: 943388
ucuucugcgaaucuacuag

SEQ ID NO: 943390 - RNA, 19 nt, Artificial Sequence
  Description of Artificial Sequence: Synthetic oligonucleotide
  Sense strand starting at position 1254 of SEQ ID NO: 913645
cuccaacaguucugagcuu

SEQ ID NO: 943391 - RNA, 19 nt, Artificial Sequence
  Description of Artificial Sequence: Synthetic oligonucleotide
  Antisense strand to SEQ ID NO: 943390
aagcucagaacuguuggag

SEQ ID NO: 943392 - RNA, 19 nt, Artificial Sequence
  Description of Artificial Sequence: Synthetic oligonucleotide
  Sense strand starting at position 3567 of SEQ ID NO: 913646
gggugucuucugucgguca

SEQ ID NO: 943393 - RNA, 19 nt, Artificial Sequence
  Description of Artificial Sequence: Synthetic oligonucleotide
  Antisense strand to SEQ ID NO: 943392
ugaccgacagaagacaccc

SEQ ID NO: 943394 - RNA, 19 nt, Artificial Sequence
  Description of Artificial Sequence: Synthetic oligonucleotide
  Sense strand starting at position 3571 of SEQ ID NO: 913646
gucuucugucggucauagu

SEQ ID NO: 943395 - RNA, 19 nt, Artificial Sequence
  Description of Artificial Sequence: Synthetic oligonucleotide
  Antisense strand to SEQ ID NO: 943394
acuaugaccgacagaagac

SEQ ID NO: 943396 - RNA, 19 nt, Artificial Sequence
  Description of Artificial Sequence: Synthetic oligonucleotide
  Sense strand starting at position 3536 of SEQ ID NO: 913646
agcauuuacuguguuacca

SEQ ID NO: 943397 - RNA, 19 nt, Artificial Sequence
  Description of Artificial Sequence: Synthetic oligonucleotide
  Antisense strand to SEQ ID NO: 943396
ugguaacacaguaaaugcu

SEQ ID NO: 943398 - RNA, 19 nt, Artificial Sequence
  Description of Artificial Sequence: Synthetic oligonucleotide
  Sense strand starting at position 3733 of SEQ ID NO: 913646
aguagcugugacuacaaga

SEQ ID NO: 943399 - RNA, 19 nt, Artificial Sequence
  Description of Artificial Sequence: Synthetic oligonucleotide
  Antisense strand to SEQ ID NO: 943398
ucuuguagucacagcuacu

SEQ ID NO: 943400 - RNA, 19 nt, Artificial Sequence
  Description of Artificial Sequence: Synthetic oligonucleotide
  Sense strand starting at position 2379 of SEQ ID NO: 913646
acgcucuguagauaagaga

SEQ ID NO: 943401 - RNA, 19 nt, Artificial Sequence
  Description of Artificial Sequence: Synthetic oligonucleotide
  Antisense strand to SEQ ID NO: 943400
ucucuuaucuacagagcgu

SEQ ID NO: 943402 - RNA, 19 nt, Artificial Sequence
  Description of Artificial Sequence: Synthetic oligonucleotide
  Sense strand starting at position 2377 of SEQ ID NO: 913646
ggacgcucuguagauaaga

SEQ ID NO: 943403 - RNA, 19 nt, Artificial Sequence
  Description of Artificial Sequence: Synthetic oligonucleotide
  Antisense strand to SEQ ID NO: 943402
ucuuaucuacagagcgucc

SEQ ID NO: 943404 - RNA, 19 nt, Artificial Sequence
  Description of Artificial Sequence: Synthetic oligonucleotide
  Sense strand starting at position 3414 of SEQ ID NO: 913646
acaauccugcgguaacaau

SEQ ID NO: 943405 - RNA, 19 nt, Artificial Sequence
  Description of Artificial Sequence: Synthetic oligonucleotide
  Antisense strand to SEQ ID NO: 943404
auuguuaccgcaggauugu

SEQ ID NO: 943406 - RNA, 19 nt, Artificial Sequence
  Description of Artificial Sequence: Synthetic oligonucleotide
  Sense strand starting at position 3323 of SEQ ID NO: 913646
gagacaaucgguugcaaga

SEQ ID NO: 943407 - RNA, 19 nt, Artificial Sequence
  Description of Artificial Sequence: Synthetic oligonucleotide
  Antisense strand to SEQ ID NO: 943406
ucuugcaaccgauugucuc

SEQ ID NO: 943408 - RNA, 19 nt, Artificial Sequence
  Description of Artificial Sequence: Synthetic oligonucleotide
  Sense strand starting at position 3321 of SEQ ID NO: 913646
cagagacaaucgguugcaa

SEQ ID NO: 943409 - RNA, 19 nt, Artificial Sequence
  Description of Artificial Sequence: Synthetic oligonucleotide
  Antisense strand to SEQ ID NO: 943408
uugcaaccgauugucucug

SEQ ID NO: 943410 - RNA, 19 nt, Artificial Sequence
  Description of Artificial Sequence: Synthetic oligonucleotide
  Sense strand starting at position 3263 of SEQ ID NO: 913646
cugaguccucuccaauugu

SEQ ID NO: 943411 - RNA, 19 nt, Artificial Sequence
  Description of Artificial Sequence: Synthetic oligonucleotide
  Antisense strand to SEQ ID NO: 943410
acaauuggagaggacucag

SEQ ID NO: 943412 - RNA, 19 nt, Artificial Sequence
  Description of Artificial Sequence: Synthetic oligonucleotide
  Sense strand starting at position 743 of SEQ ID NO: 913646
ccggaaugcugguuugaca

SEQ ID NO: 943413 - RNA, 19 nt, Artificial Sequence
  Description of Artificial Sequence: Synthetic oligonucleotide
  Antisense strand to SEQ ID NO: 943412
ugucaaaccagcauuccgg

SEQ ID NO: 943414 - RNA, 19 nt, Artificial Sequence
  Description of Artificial Sequence: Synthetic oligonucleotide
  Sense strand starting at position 3399 of SEQ ID NO: 913646
caaucaguggcguggacaa

SEQ ID NO: 943415 - RNA, 19 nt, Artificial Sequence
  Description of Artificial Sequence: Synthetic oligonucleotide
  Antisense strand to SEQ ID NO: 943414
uuguccacgccacugauug

SEQ ID NO: 943416 - RNA, 19 nt, Artificial Sequence
  Description of Artificial Sequence: Synthetic oligonucleotide
  Sense strand starting at position 2375 of SEQ ID NO: 913646
gcggacgcucuguagauaa

SEQ ID NO: 943417 - RNA, 19 nt, Artificial Sequence
  Description of Artificial Sequence: Synthetic oligonucleotide
  Antisense strand to SEQ ID NO: 943416
uuaucuacagagcguccgc

SEQ ID NO: 943418 - RNA, 19 nt, Artificial Sequence
  Description of Artificial Sequence: Synthetic oligonucleotide
  Sense strand starting at position 3572 of SEQ ID NO: 913646
ucuucugucggucauaguu

SEQ ID NO: 943419 - RNA, 19 nt, Artificial Sequence
  Description of Artificial Sequence: Synthetic oligonucleotide
  Antisense strand to SEQ ID NO: 943418
aacuaugaccgacagaaga

SEQ ID NO: 943420 - RNA, 19 nt, Artificial Sequence
  Description of Artificial Sequence: Synthetic oligonucleotide
  Sense strand starting at position 3569 of SEQ ID NO: 913646
gugucuucugucggucaua

SEQ ID NO: 943421 - RNA, 19 nt, Artificial Sequence
  Description of Artificial Sequence: Synthetic oligonucleotide
  Antisense strand to SEQ ID NO: 943420
uaugaccgacagaagacac

SEQ ID NO: 943422 - RNA, 19 nt, Artificial Sequence
  Description of Artificial Sequence: Synthetic oligonucleotide
  Sense strand starting at position 30 of SEQ ID NO: 913646
aggcguuaaucccagagaa

SEQ ID NO: 943423 - RNA, 19 nt, Artificial Sequence
  Description of Artificial Sequence: Synthetic oligonucleotide
  Antisense strand to SEQ ID NO: 943422
uucucugggauuaacgccu

SEQ ID NO: 943424 - RNA, 19 nt, Artificial Sequence
  Description of Artificial Sequence: Synthetic oligonucleotide
  Sense strand starting at position 3325 of SEQ ID NO: 913646
gacaaucgguugcaagaua

SEQ ID NO: 943425 - RNA, 19 nt, Artificial Sequence
  Description of Artificial Sequence: Synthetic oligonucleotide
  Antisense strand to SEQ ID NO: 943424
uaucuugcaaccgauuguc

SEQ ID NO: 943426 - RNA, 19 nt, Artificial Sequence
  Description of Artificial Sequence: Synthetic oligonucleotide
  Sense strand starting at position 3270 of SEQ ID NO: 913646
cucuccaauuguugaggaa

SEQ ID NO: 943427 - RNA, 19 nt, Artificial Sequence
  Description of Artificial Sequence: Synthetic oligonucleotide
  Antisense strand to SEQ ID NO: 943426
uuccucaacaauuggagag

SEQ ID NO: 943428 - RNA, 19 nt, Artificial Sequence
  Description of Artificial Sequence: Synthetic oligonucleotide
  Sense strand starting at position 3979 of SEQ ID NO: 913646
acaucuuacuugcgagaug

SEQ ID NO: 943429 - RNA, 19 nt, Artificial Sequence
  Description of Artificial Sequence: Synthetic oligonucleotide
  Antisense strand to SEQ ID NO: 943428
caucucgcaaguaagaugu

SEQ ID NO: 943430 - RNA, 19 nt, Artificial Sequence
  Description of Artificial Sequence: Synthetic oligonucleotide
  Sense strand starting at position 1255 of SEQ ID NO: 913646
ucgaacaguucugagcuuu

SEQ ID NO: 943431 - RNA, 19 nt, Artificial Sequence
  Description of Artificial Sequence: Synthetic oligonucleotide
  Antisense strand to SEQ ID NO: 943430
aaagcucagaacuguucga

SEQ ID NO: 943432 - RNA, 19 nt, Artificial Sequence
  Description of Artificial Sequence: Synthetic oligonucleotide
  Sense strand starting at position 3412 of SEQ ID NO: 913646
ggacaauccugcgguaaca

SEQ ID NO: 943433 - RNA, 19 nt, Artificial Sequence
  Description of Artificial Sequence: Synthetic oligonucleotide
  Antisense strand to SEQ ID NO: 943432
uguuaccgcaggauugucc

SEQ ID NO: 943434 - RNA, 19 nt, Artificial Sequence
  Description of Artificial Sequence: Synthetic oligonucleotide
  Sense strand starting at position 1254 of SEQ ID NO: 913646
cucgaacaguucugagcuu

SEQ ID NO: 943435 - RNA, 19 nt, Artificial Sequence
  Description of Artificial Sequence: Synthetic oligonucleotide
  Antisense strand to SEQ ID NO: 943434
aagcucagaacuguucgag

SEQ ID NO: 943436 - RNA, 19 nt, Artificial Sequence
  Description of Artificial Sequence: Synthetic oligonucleotide
  Sense strand starting at position 3568 of SEQ ID NO: 913646
ggugucuucugucggucau

SEQ ID NO: 943437 - RNA, 19 nt, Artificial Sequence
  Description of Artificial Sequence: Synthetic oligonucleotide
  Antisense strand to SEQ ID NO: 943436
augaccgacagaagacacc

SEQ ID NO: 943438 - RNA, 19 nt, Artificial Sequence
  Description of Artificial Sequence: Synthetic oligonucleotide
  Sense strand starting at position 3225 of SEQ ID NO: 913647
cuagucagugacuaacuaa

SEQ ID NO: 943439 - RNA, 19 nt, Artificial Sequence
  Description of Artificial Sequence: Synthetic oligonucleotide
  Antisense strand to SEQ ID NO: 943438
uuaguuagucacugacuag

SEQ ID NO: 943440 - RNA, 19 nt, Artificial Sequence
  Description of Artificial Sequence: Synthetic oligonucleotide
  Sense strand starting at position 3578 of SEQ ID NO: 913647
gaagauguugauugggauu

SEQ ID NO: 943441 - RNA, 19 nt, Artificial Sequence
  Description of Artificial Sequence: Synthetic oligonucleotide
  Antisense strand to SEQ ID NO: 943440
aaucccaaucaacaucuuc

SEQ ID NO: 943442 - RNA, 19 nt, Artificial Sequence
  Description of Artificial Sequence: Synthetic oligonucleotide
  Sense strand starting at position 531 of SEQ ID NO: 913647
aaggcagaggcucauuaau

SEQ ID NO: 943443 - RNA, 19 nt, Artificial Sequence
  Description of Artificial Sequence: Synthetic oligonucleotide
  Antisense strand to SEQ ID NO: 943442
auuaaugagccucugccuu

SEQ ID NO: 943444 - RNA, 19 nt, Artificial Sequence
  Description of Artificial Sequence: Synthetic oligonucleotide
  Sense strand starting at position 1492 of SEQ ID NO: 913647
aguauuguccaacaauacu

SEQ ID NO: 943445 - RNA, 19 nt, Artificial Sequence
  Description of Artificial Sequence: Synthetic oligonucleotide
  Antisense strand to SEQ ID NO: 943444
aguauuguuggacaauacu

SEQ ID NO: 943446 - RNA, 19 nt, Artificial Sequence
  Description of Artificial Sequence: Synthetic oligonucleotide
  Sense strand starting at position 3389 of SEQ ID NO: 913647
ugauguccugagcauggaa

SEQ ID NO: 943447 - RNA, 19 nt, Artificial Sequence
  Description of Artificial Sequence: Synthetic oligonucleotide
  Antisense strand to SEQ ID NO: 943446
uuccaugcucaggacauca

SEQ ID NO: 943448 - RNA, 19 nt, Artificial Sequence
  Description of Artificial Sequence: Synthetic oligonucleotide
  Sense strand starting at position 2619 of SEQ ID NO: 913647
gaagauuguguagacaugu

SEQ ID NO: 943449 - RNA, 19 nt, Artificial Sequence
  Description of Artificial Sequence: Synthetic oligonucleotide
  Antisense strand to SEQ ID NO: 943448
acaugucuacacaaucuuc

SEQ ID NO: 943450 - RNA, 19 nt, Artificial Sequence
  Description of Artificial Sequence: Synthetic oligonucleotide
  Sense strand starting at position 2011 of SEQ ID NO: 913647
cccugcuaggaguaauuaa

SEQ ID NO: 943451 - RNA, 19 nt, Artificial Sequence
  Description of Artificial Sequence: Synthetic oligonucleotide
  Antisense strand to SEQ ID NO: 943450
uuaauuacuccuagcaggg

SEQ ID NO: 943452 - RNA, 19 nt, Artificial Sequence
  Description of Artificial Sequence: Synthetic oligonucleotide
  Sense strand starting at position 3444 of SEQ ID NO: 913647
uuugacuggagaugcauaa

SEQ ID NO: 943453 - RNA, 19 nt, Artificial Sequence
  Description of Artificial Sequence: Synthetic oligonucleotide
  Antisense strand to SEQ ID NO: 943452
uuaugcaucuccagucaaa

SEQ ID NO: 943454 - RNA, 19 nt, Artificial Sequence
  Description of Artificial Sequence: Synthetic oligonucleotide
  Sense strand starting at position 3322 of SEQ ID NO: 913647
acggguauuaucgcccgua

SEQ ID NO: 943455 - RNA, 19 nt, Artificial Sequence
  Description of Artificial Sequence: Synthetic oligonucleotide
  Antisense strand to SEQ ID NO: 943454
uacgggcgauaauacccgu

SEQ ID NO: 943456 - RNA, 19 nt, Artificial Sequence
  Description of Artificial Sequence: Synthetic oligonucleotide
  Sense strand starting at position 146 of SEQ ID NO: 913647
aaguaaggguaagugaauu

SEQ ID NO: 943457 - RNA, 19 nt, Artificial Sequence
  Description of Artificial Sequence: Synthetic oligonucleotide
  Antisense strand to SEQ ID NO: 943456
aauucacuuacccuuacuu

SEQ ID NO: 943458 - RNA, 19 nt, Artificial Sequence
  Description of Artificial Sequence: Synthetic oligonucleotide
  Sense strand starting at position 1190 of SEQ ID NO: 913647
cagagaguccuaggauccu

SEQ ID NO: 943459 - RNA, 19 nt, Artificial Sequence
  Description of Artificial Sequence: Synthetic oligonucleotide
  Antisense strand to SEQ ID NO: 943458
aggauccuaggacucucug

SEQ ID NO: 943460 - RNA, 19 nt, Artificial Sequence
  Description of Artificial Sequence: Synthetic oligonucleotide
  Sense strand starting at position 3228 of SEQ ID NO: 913647
gucagugacuaacuaauaa

SEQ ID NO: 943461 - RNA, 19 nt, Artificial Sequence
  Description of Artificial Sequence: Synthetic oligonucleotide
  Antisense strand to SEQ ID NO: 943460
uuauuaguuagucacugac

SEQ ID NO: 943462 - RNA, 19 nt, Artificial Sequence
  Description of Artificial Sequence: Synthetic oligonucleotide
  Sense strand starting at position 3386 of SEQ ID NO: 913647
aauugauguccugagcaug

SEQ ID NO: 943463 - RNA, 19 nt, Artificial Sequence
  Description of Artificial Sequence: Synthetic oligonucleotide
  Antisense strand to SEQ ID NO: 943462
caugcucaggacaucaauu

SEQ ID NO: 943464 - RNA, 19 nt, Artificial Sequence
  Description of Artificial Sequence: Synthetic oligonucleotide
  Sense strand starting at position 1305 of SEQ ID NO: 913647
ggaagaaucuuucccucuc

SEQ ID NO: 943465 - RNA, 19 nt, Artificial Sequence
  Description of Artificial Sequence: Synthetic oligonucleotide
  Antisense strand to SEQ ID NO: 943464
gagagggaaagauucuucc

SEQ ID NO: 943466 - RNA, 19 nt, Artificial Sequence
  Description of Artificial Sequence: Synthetic oligonucleotide
  Sense strand starting at position 2086 of SEQ ID NO: 913647
guagaaugggccuauucug

SEQ ID NO: 943467 - RNA, 19 nt, Artificial Sequence
  Description of Artificial Sequence: Synthetic oligonucleotide
  Antisense strand to SEQ ID NO: 943466
cagaauaggcccauucuac

SEQ ID NO: 943468 - RNA, 19 nt, Artificial Sequence
  Description of Artificial Sequence: Synthetic oligonucleotide
  Sense strand starting at position 681 of SEQ ID NO: 913647
augguaaacucauugaggu

SEQ ID NO: 943469 - RNA, 19 nt, Artificial Sequence
  Description of Artificial Sequence: Synthetic oligonucleotide
  Antisense strand to SEQ ID NO: 943468
accucaaugaguuuaccau

SEQ ID NO: 943470 - RNA, 19 nt, Artificial Sequence
  Description of Artificial Sequence: Synthetic oligonucleotide
  Sense strand starting at position 277 of SEQ ID NO: 913647
aauggacugugucugacaa

SEQ ID NO: 943471 - RNA, 19 nt, Artificial Sequence
  Description of Artificial Sequence: Synthetic oligonucleotide
  Antisense strand to SEQ ID NO: 943470
uugucagacacaguccauu

SEQ ID NO: 943472 - RNA, 19 nt, Artificial Sequence
  Description of Artificial Sequence: Synthetic oligonucleotide
  Sense strand starting at position 1134 of SEQ ID NO: 913647
ccguuaguagaggaagagu

SEQ ID NO: 943473 - RNA, 19 nt, Artificial Sequence
  Description of Artificial Sequence: Synthetic oligonucleotide
  Antisense strand to SEQ ID NO: 943472
acucuuccucuacuaacgg

SEQ ID NO: 943474 - RNA, 19 nt, Artificial Sequence
  Description of Artificial Sequence: Synthetic oligonucleotide
  Sense strand starting at position 1632 of SEQ ID NO: 913647
uuugccagggcucagaaau

SEQ ID NO: 943475 - RNA, 19 nt, Artificial Sequence
  Description of Artificial Sequence: Synthetic oligonucleotide
  Antisense strand to SEQ ID NO: 943474
auuucugagcccuggcaaa

SEQ ID NO: 943476 - RNA, 19 nt, Artificial Sequence
  Description of Artificial Sequence: Synthetic oligonucleotide
  Sense strand starting at position 655 of SEQ ID NO: 913647
ggccaaggugcugaauuaa

SEQ ID NO: 943477 - RNA, 19 nt, Artificial Sequence
  Description of Artificial Sequence: Synthetic oligonucleotide
  Antisense strand to SEQ ID NO: 943476
uuaauucagcaccuuggcc

SEQ ID NO: 943478 - RNA, 19 nt, Artificial Sequence
  Description of Artificial Sequence: Synthetic oligonucleotide
  Sense strand starting at position 2412 of SEQ ID NO: 913647
uuaguugcacaaugaaaua

SEQ ID NO: 943479 - RNA, 19 nt, Artificial Sequence
  Description of Artificial Sequence: Synthetic oligonucleotide
  Antisense strand to SEQ ID NO: 943478
uauuucauugugcaacuaa

SEQ ID NO: 943480 - RNA, 19 nt, Artificial Sequence
  Description of Artificial Sequence: Synthetic oligonucleotide
  Sense strand starting at position 274 of SEQ ID NO: 913647
uagaauggacugugucuga

SEQ ID NO: 943481 - RNA, 19 nt, Artificial Sequence
  Description of Artificial Sequence: Synthetic oligonucleotide
  Antisense strand to SEQ ID NO: 943480
ucagacacaguccauucua

SEQ ID NO: 943482 - RNA, 19 nt, Artificial Sequence
  Description of Artificial Sequence: Synthetic oligonucleotide
  Sense strand starting at position 300 of SEQ ID NO: 913647
ccucucugguacuugaaga

SEQ ID NO: 943483 - RNA, 19 nt, Artificial Sequence
  Description of Artificial Sequence: Synthetic oligonucleotide
  Antisense strand to SEQ ID NO: 943482
ucuucaaguaccagagagg

SEQ ID NO: 943484 - RNA, 19 nt, Artificial Sequence
  Description of Artificial Sequence: Synthetic oligonucleotide
  Sense strand starting at position 2750 of SEQ ID NO: 913647
gcuccauagcaguagaaca

SEQ ID NO: 943485 - RNA, 19 nt, Artificial Sequence
  Description of Artificial Sequence: Synthetic oligonucleotide
  Antisense strand to SEQ ID NO: 943484
uguucuacugcuauggagc

SEQ ID NO: 943486 - RNA, 19 nt, Artificial Sequence
  Description of Artificial Sequence: Synthetic oligonucleotide
  Sense strand starting at position 1389 of SEQ ID NO: 913647
ccaccugggcccugaaaua

SEQ ID NO: 943487 - RNA, 19 nt, Artificial Sequence
  Description of Artificial Sequence: Synthetic oligonucleotide
  Antisense strand to SEQ ID NO: 943486
uauuucagggcccaggugg

SEQ ID NO: 943488 - RNA, 19 nt, Artificial Sequence
  Description of Artificial Sequence: Synthetic oligonucleotide
  Sense strand starting at position 1126 of SEQ ID NO: 913647
acaaccuuccguuaguaga

SEQ ID NO: 943489 - RNA, 19 nt, Artificial Sequence
  Description of Artificial Sequence: Synthetic oligonucleotide
  Antisense strand to SEQ ID NO: 943488
ucuacuaacggaagguugu

SEQ ID NO: 943490 - RNA, 19 nt, Artificial Sequence
  Description of Artificial Sequence: Synthetic oligonucleotide
  Sense strand starting at position 3391 of SEQ ID NO: 913647
auguccugagcauggaaua

SEQ ID NO: 943491 - RNA, 19 nt, Artificial Sequence
  Description of Artificial Sequence: Synthetic oligonucleotide
  Antisense strand to SEQ ID NO: 943490
uauuccaugcucaggacau

SEQ ID NO: 943492 - RNA, 19 nt, Artificial Sequence
  Description of Artificial Sequence: Synthetic oligonucleotide
  Sense strand starting at position 3392 of SEQ ID NO: 913647
uguccugagcauggaauaa

SEQ ID NO: 943493 - RNA, 19 nt, Artificial Sequence
  Description of Artificial Sequence: Synthetic oligonucleotide
  Antisense strand to SEQ ID NO: 943492
uuauuccaugcucaggaca

SEQ ID NO: 943494 - RNA, 19 nt, Artificial Sequence
  Description of Artificial Sequence: Synthetic oligonucleotide
  Sense strand starting at position 2173 of SEQ ID NO: 913647
ucuauuccauagguauauu

SEQ ID NO: 943495 - RNA, 19 nt, Artificial Sequence
  Description of Artificial Sequence: Synthetic oligonucleotide
  Antisense strand to SEQ ID NO: 943494
aauauaccuauggaauaga

SEQ ID NO: 943496 - RNA, 19 nt, Artificial Sequence
  Description of Artificial Sequence: Synthetic oligonucleotide
  Sense strand starting at position 930 of SEQ ID NO: 913647
ccacaugacucacuuuagu

SEQ ID NO: 943497 - RNA, 19 nt, Artificial Sequence
  Description of Artificial Sequence: Synthetic oligonucleotide
  Antisense strand to SEQ ID NO: 943496
acuaaagugagucaugugg

SEQ ID NO: 943498 - RNA, 19 nt, Artificial Sequence
  Description of Artificial Sequence: Synthetic oligonucleotide
  Sense strand starting at position 1779 of SEQ ID NO: 913647
ccaauuuguuuggaauaag

SEQ ID NO: 943499 - RNA, 19 nt, Artificial Sequence
  Description of Artificial Sequence: Synthetic oligonucleotide
  Antisense strand to SEQ ID NO: 943498
cuuauuccaaacaaauugg

SEQ ID NO: 943500 - RNA, 19 nt, Artificial Sequence
  Description of Artificial Sequence: Synthetic oligonucleotide
  Sense strand starting at position 682 of SEQ ID NO: 913647
ugguaaacucauugagguc

SEQ ID NO: 943501 - RNA, 19 nt, Artificial Sequence
  Description of Artificial Sequence: Synthetic oligonucleotide
  Antisense strand to SEQ ID NO: 943500
gaccucaaugaguuuacca

SEQ ID NO: 943502 - RNA, 19 nt, Artificial Sequence
  Description of Artificial Sequence: Synthetic oligonucleotide
  Sense strand starting at position 3224 of SEQ ID NO: 913647
ccuagucagugacuaacua

SEQ ID NO: 943503 - RNA, 19 nt, Artificial Sequence
  Description of Artificial Sequence: Synthetic oligonucleotide
  Antisense strand to SEQ ID NO: 943502
uaguuagucacugacuagg

SEQ ID NO: 943504 - RNA, 19 nt, Artificial Sequence
  Description of Artificial Sequence: Synthetic oligonucleotide
  Sense strand starting at position 3315 of SEQ ID NO: 913647
ugguauuacggguauuauc

SEQ ID NO: 943505 - RNA, 19 nt, Artificial Sequence
  Description of Artificial Sequence: Synthetic oligonucleotide
  Antisense strand to SEQ ID NO: 943504
gauaauacccguaauacca

SEQ ID NO: 943506 - RNA, 19 nt, Artificial Sequence
  Description of Artificial Sequence: Synthetic oligonucleotide
  Sense strand starting at position 2457 of SEQ ID NO: 913647
gcacacuuccauugacaug

SEQ ID NO: 943507 - RNA, 19 nt, Artificial Sequence
  Description of Artificial Sequence: Synthetic oligonucleotide
  Antisense strand to SEQ ID NO: 943506
caugucaauggaagugugc

SEQ ID NO: 943508 - RNA, 19 nt, Artificial Sequence
  Description of Artificial Sequence: Synthetic oligonucleotide
  Sense strand starting at position 1585 of SEQ ID NO: 913647
ggguuaucucaggguuuaa

SEQ ID NO: 943509 - RNA, 19 nt, Artificial Sequence
  Description of Artificial Sequence: Synthetic oligonucleotide
  Antisense strand to SEQ ID NO: 943508
uuaaacccugagauaaccc

SEQ ID NO: 943510 - RNA, 19 nt, Artificial Sequence
  Description of Artificial Sequence: Synthetic oligonucleotide
  Sense strand starting at position 112 of SEQ ID NO: 913647
cuacgacugcuauaaaugu

SEQ ID NO: 943511 - RNA, 19 nt, Artificial Sequence
  Description of Artificial Sequence: Synthetic oligonucleotide
  Antisense strand to SEQ ID NO: 943510
acauuuauagcagucguag

SEQ ID NO: 943512 - RNA, 19 nt, Artificial Sequence
  Description of Artificial Sequence: Synthetic oligonucleotide
  Sense strand starting at position 1175 of SEQ ID NO: 913647
gcaagcaaaucuuuccaga

SEQ ID NO: 943513 - RNA, 19 nt, Artificial Sequence
  Description of Artificial Sequence: Synthetic oligonucleotide
  Antisense strand to SEQ ID NO: 943512
ucuggaaagauuugcuugc

SEQ ID NO: 943514 - RNA, 19 nt, Artificial Sequence
  Description of Artificial Sequence: Synthetic oligonucleotide
  Sense strand starting at position 2742 of SEQ ID NO: 913647
cuggguaagcuccauagca

SEQ ID NO: 943515 - RNA, 19 nt, Artificial Sequence
  Description of Artificial Sequence: Synthetic oligonucleotide
  Antisense strand to SEQ ID NO: 943514
ugcuauggagcuuacccag

SEQ ID NO: 943516 - RNA, 19 nt, Artificial Sequence
  Description of Artificial Sequence: Synthetic oligonucleotide
  Sense strand starting at position 3528 of SEQ ID NO: 913647
gcucuaguauaaucuuaga

SEQ ID NO: 943517 - RNA, 19 nt, Artificial Sequence
  Description of Artificial Sequence: Synthetic oligonucleotide
  Antisense strand to SEQ ID NO: 943516
ucuaagauuauacuagagc

SEQ ID NO: 943518 - RNA, 19 nt, Artificial Sequence
  Description of Artificial Sequence: Synthetic oligonucleotide
  Sense strand starting at position 3790 of SEQ ID NO: 913648
aggguuauugaccagguca

SEQ ID NO: 943519 - RNA, 19 nt, Artificial Sequence
  Description of Artificial Sequence: Synthetic oligonucleotide
  Antisense strand to SEQ ID NO: 943518
ugaccuggucaauaacccu

SEQ ID NO: 943520 - RNA, 19 nt, Artificial Sequence
  Description of Artificial Sequence: Synthetic oligonucleotide
  Sense strand starting at position 362 of SEQ ID NO: 913648
gguaaagcuccauaccaga

SEQ ID NO: 943521 - RNA, 19 nt, Artificial Sequence
  Description of Artificial Sequence: Synthetic oligonucleotide
  Antisense strand to SEQ ID NO: 943520
ucugguauggagcuuuacc

SEQ ID NO: 943522 - RNA, 19 nt, Artificial Sequence
  Description of Artificial Sequence: Synthetic oligonucleotide
  Sense strand starting at position 2856 of SEQ ID NO: 913648
aacguugaugauugaggaa

SEQ ID NO: 943523 - RNA, 19 nt, Artificial Sequence
  Description of Artificial Sequence: Synthetic oligonucleotide
  Antisense strand to SEQ ID NO: 943522
uuccucaaucaucaacguu

SEQ ID NO: 943524 - RNA, 19 nt, Artificial Sequence
  Description of Artificial Sequence: Synthetic oligonucleotide
  Sense strand starting at position 2855 of SEQ ID NO: 913648
gaacguugaugauugagga

SEQ ID NO: 943525 - RNA, 19 nt, Artificial Sequence
  Description of Artificial Sequence: Synthetic oligonucleotide
  Antisense strand to SEQ ID NO: 943524
uccucaaucaucaacguuc

SEQ ID NO: 943526 - RNA, 19 nt, Artificial Sequence
  Description of Artificial Sequence: Synthetic oligonucleotide
  Sense strand starting at position 2586 of SEQ ID NO: 913648
gugaccaggacuuggaauu

SEQ ID NO: 943527 - RNA, 19 nt, Artificial Sequence
  Description of Artificial Sequence: Synthetic oligonucleotide
  Antisense strand to SEQ ID NO: 943526
aauuccaaguccuggucac

SEQ ID NO: 943528 - RNA, 19 nt, Artificial Sequence
  Description of Artificial Sequence: Synthetic oligonucleotide
  Sense strand starting at position 1356 of SEQ ID NO: 913648
ggaagucugguguacacaa

SEQ ID NO: 943529 - RNA, 19 nt, Artificial Sequence
  Description of Artificial Sequence: Synthetic oligonucleotide
  Antisense strand to SEQ ID NO: 943528
uuguguacaccagacuucc

SEQ ID NO: 943530 - RNA, 19 nt, Artificial Sequence
  Description of Artificial Sequence: Synthetic oligonucleotide
  Sense strand starting at position 324 of SEQ ID NO: 913648
uguacagaugguugggaaa

SEQ ID NO: 943531 - RNA, 19 nt, Artificial Sequence
  Description of Artificial Sequence: Synthetic oligonucleotide
  Antisense strand to SEQ ID NO: 943530
uuucccaaccaucuguaca

SEQ ID NO: 943532 - RNA, 19 nt, Artificial Sequence
  Description of Artificial Sequence: Synthetic oligonucleotide
  Sense strand starting at position 3683 of SEQ ID NO: 913648
ucccuagucccuuauagga

SEQ ID NO: 943533 - RNA, 19 nt, Artificial Sequence
  Description of Artificial Sequence: Synthetic oligonucleotide
  Antisense strand to SEQ ID NO: 943532
uccuauaagggacuaggga

SEQ ID NO: 943534 - RNA, 19 nt, Artificial Sequence
  Description of Artificial Sequence: Synthetic oligonucleotide
  Sense strand starting at position 3752 of SEQ ID NO: 913648
acauauugugcauauugga

SEQ ID NO: 943535 - RNA, 19 nt, Artificial Sequence
  Description of Artificial Sequence: Synthetic oligonucleotide
  Antisense strand to SEQ ID NO: 943534
uccaauaugcacaauaugu

SEQ ID NO: 943536 - RNA, 19 nt, Artificial Sequence
  Description of Artificial Sequence: Synthetic oligonucleotide
  Sense strand starting at position 3472 of SEQ ID NO: 913648
ggucauacuaguuaaagug

SEQ ID NO: 943537 - RNA, 19 nt, Artificial Sequence
  Description of Artificial Sequence: Synthetic oligonucleotide
  Antisense strand to SEQ ID NO: 943536
cacuuuaacuaguaugacc

SEQ ID NO: 943538 - RNA, 19 nt, Artificial Sequence
  Description of Artificial Sequence: Synthetic oligonucleotide
  Sense strand starting at position 591 of SEQ ID NO: 913648
ccuguuaagaaguaauggu

SEQ ID NO: 943539 - RNA, 19 nt, Artificial Sequence
  Description of Artificial Sequence: Synthetic oligonucleotide
  Antisense strand to SEQ ID NO: 943538
accauuacuucuuaacagg

SEQ ID NO: 943540 - RNA, 19 nt, Artificial Sequence
  Description of Artificial Sequence: Synthetic oligonucleotide
  Sense strand starting at position 3303 of SEQ ID NO: 913648
uugauugacucucugacau

SEQ ID NO: 943541 - RNA, 19 nt, Artificial Sequence
  Description of Artificial Sequence: Synthetic oligonucleotide
  Antisense strand to SEQ ID NO: 943540
augucagagagucaaucaa

SEQ ID NO: 943542 - RNA, 19 nt, Artificial Sequence
  Description of Artificial Sequence: Synthetic oligonucleotide
  Sense strand starting at position 3239 of SEQ ID NO: 913648
ugacuuguacacgggaaag

SEQ ID NO: 943543 - RNA, 19 nt, Artificial Sequence
  Description of Artificial Sequence: Synthetic oligonucleotide
  Antisense strand to SEQ ID NO: 943542
cuuucccguguacaaguca

SEQ ID NO: 943544 - RNA, 19 nt, Artificial Sequence
  Description of Artificial Sequence: Synthetic oligonucleotide
  Sense strand starting at position 360 of SEQ ID NO: 913648
uugguaaagcuccauacca

SEQ ID NO: 943545 - RNA, 19 nt, Artificial Sequence
  Description of Artificial Sequence: Synthetic oligonucleotide
  Antisense strand to SEQ ID NO: 943544
ugguauggagcuuuaccaa

SEQ ID NO: 943546 - RNA, 19 nt, Artificial Sequence
  Description of Artificial Sequence: Synthetic oligonucleotide
  Sense strand starting at position 926 of SEQ ID NO: 913648
gucagaaagcaucaagcau

SEQ ID NO: 943547 - RNA, 19 nt, Artificial Sequence
  Description of Artificial Sequence: Synthetic oligonucleotide
  Antisense strand to SEQ ID NO: 943546
augcuugaugcuuucugac

SEQ ID NO: 943548 - RNA, 19 nt, Artificial Sequence
  Description of Artificial Sequence: Synthetic oligonucleotide
  Sense strand starting at position 1647 of SEQ ID NO: 913648
cgagaauguguaugagaga

SEQ ID NO: 943549 - RNA, 19 nt, Artificial Sequence
  Description of Artificial Sequence: Synthetic oligonucleotide
  Antisense strand to SEQ ID NO: 943548
ucucucauacacauucucg

SEQ ID NO: 943550 - RNA, 19 nt, Artificial Sequence
  Description of Artificial Sequence: Synthetic oligonucleotide
  Sense strand starting at position 2989 of SEQ ID NO: 913648
gaaacuauacugugugaug

SEQ ID NO: 943551 - RNA, 19 nt, Artificial Sequence
  Description of Artificial Sequence: Synthetic oligonucleotide
  Antisense strand to SEQ ID NO: 943550
caucacacaguauaguuuc

SEQ ID NO: 943552 - RNA, 19 nt, Artificial Sequence
  Description of Artificial Sequence: Synthetic oligonucleotide
  Sense strand starting at position 3251 of SEQ ID NO: 913648
gggaaaguguucuccugaa

SEQ ID NO: 943553 - RNA, 19 nt, Artificial Sequence
  Description of Artificial Sequence: Synthetic oligonucleotide
  Antisense strand to SEQ ID NO: 943552
uucaggagaacacuuuccc

SEQ ID NO: 943554 - RNA, 19 nt, Artificial Sequence
  Description of Artificial Sequence: Synthetic oligonucleotide
  Sense strand starting at position 3316 of SEQ ID NO: 913648
ugacauugauguuuacauu

SEQ ID NO: 943555 - RNA, 19 nt, Artificial Sequence
  Description of Artificial Sequence: Synthetic oligonucleotide
  Antisense strand to SEQ ID NO: 943554
aauguaaacaucaauguca

SEQ ID NO: 943556 - RNA, 19 nt, Artificial Sequence
  Description of Artificial Sequence: Synthetic oligonucleotide
  Sense strand starting at position 1479 of SEQ ID NO: 913648
cugggaucuuucucaaccu

SEQ ID NO: 943557 - RNA, 19 nt, Artificial Sequence
  Description of Artificial Sequence: Synthetic oligonucleotide
  Antisense strand to SEQ ID NO: 943556
agguugagaaagaucccag

SEQ ID NO: 943558 - RNA, 19 nt, Artificial Sequence
  Description of Artificial Sequence: Synthetic oligonucleotide
  Sense strand starting at position 1041 of SEQ ID NO: 913648
uccgaugaaagcuaguauu

SEQ ID NO: 943559 - RNA, 19 nt, Artificial Sequence
  Description of Artificial Sequence: Synthetic oligonucleotide
  Antisense strand to SEQ ID NO: 943558
aauacuagcuuucaucgga

SEQ ID NO: 943560 - RNA, 19 nt, Artificial Sequence
  Description of Artificial Sequence: Synthetic oligonucleotide
  Sense strand starting at position 1035 of SEQ ID NO: 913648
aauuguuccgaugaaagcu

SEQ ID NO: 943561 - RNA, 19 nt, Artificial Sequence
  Description of Artificial Sequence: Synthetic oligonucleotide
  Antisense strand to SEQ ID NO: 943560
agcuuucaucggaacaauu

SEQ ID NO: 943562 - RNA, 19 nt, Artificial Sequence
  Description of Artificial Sequence: Synthetic oligonucleotide
  Sense strand starting at position 1234 of SEQ ID NO: 913648
gaucuugcucaugaaguuu

SEQ ID NO: 943563 - RNA, 19 nt, Artificial Sequence
  Description of Artificial Sequence: Synthetic oligonucleotide
  Antisense strand to SEQ ID NO: 943562
aaacuucaugagcaagauc

SEQ ID NO: 943564 - RNA, 19 nt, Artificial Sequence
  Description of Artificial Sequence: Synthetic oligonucleotide
  Sense strand starting at position 1376 of SEQ ID NO: 913648
uuagaaugcaucuggagua

SEQ ID NO: 943565 - RNA, 19 nt, Artificial Sequence
  Description of Artificial Sequence: Synthetic oligonucleotide
  Antisense strand to SEQ ID NO: 943564
uacuccagaugcauucuaa

SEQ ID NO: 943566 - RNA, 19 nt, Artificial Sequence
  Description of Artificial Sequence: Synthetic oligonucleotide
  Sense strand starting at position 2758 of SEQ ID NO: 913648
agauacacuuugucuucua

SEQ ID NO: 943567 - RNA, 19 nt, Artificial Sequence
  Description of Artificial Sequence: Synthetic oligonucleotide
  Antisense strand to SEQ ID NO: 943566
uagaagacaaaguguaucu

SEQ ID NO: 943568 - RNA, 19 nt, Artificial Sequence
  Description of Artificial Sequence: Synthetic oligonucleotide
  Sense strand starting at position 3481 of SEQ ID NO: 913648
aguuaaaguguccaggcaa

SEQ ID NO: 943569 - RNA, 19 nt, Artificial Sequence
  Description of Artificial Sequence: Synthetic oligonucleotide
  Antisense strand to SEQ ID NO: 943568
uugccuggacacuuuaacu

SEQ ID NO: 943570 - RNA, 19 nt, Artificial Sequence
  Description of Artificial Sequence: Synthetic oligonucleotide
  Sense strand starting at position 2804 of SEQ ID NO: 913648
acaguagguguccaguaau

SEQ ID NO: 943571 - RNA, 19 nt, Artificial Sequence
  Description of Artificial Sequence: Synthetic oligonucleotide
  Antisense strand to SEQ ID NO: 943570
auuacuggacaccuacugu

SEQ ID NO: 943572 - RNA, 19 nt, Artificial Sequence
  Description of Artificial Sequence: Synthetic oligonucleotide
  Sense strand starting at position 2849 of SEQ ID NO: 913648
ugaguagaacguugaugau

SEQ ID NO: 943573 - RNA, 19 nt, Artificial Sequence
  Description of Artificial Sequence: Synthetic oligonucleotide
  Antisense strand to SEQ ID NO: 943572
aucaucaacguucuacuca

SEQ ID NO: 943574 - RNA, 19 nt, Artificial Sequence
  Description of Artificial Sequence: Synthetic oligonucleotide
  Sense strand starting at position 2846 of SEQ ID NO: 913648
gacugaguagaacguugau

SEQ ID NO: 943575 - RNA, 19 nt, Artificial Sequence
  Description of Artificial Sequence: Synthetic oligonucleotide
  Antisense strand to SEQ ID NO: 943574
aucaacguucuacucaguc

SEQ ID NO: 943576 - RNA, 19 nt, Artificial Sequence
  Description of Artificial Sequence: Synthetic oligonucleotide
  Sense strand starting at position 3238 of SEQ ID NO: 913648
gugacuuguacacgggaaa

SEQ ID NO: 943577 - RNA, 19 nt, Artificial Sequence
  Description of Artificial Sequence: Synthetic oligonucleotide
  Antisense strand to SEQ ID NO: 943576
uuucccguguacaagucac

SEQ ID NO: 943578 - RNA, 19 nt, Artificial Sequence
  Description of Artificial Sequence: Synthetic oligonucleotide
  Sense strand starting at position 1772 of SEQ ID NO: 913648
gcguccacucgggaaagaa

SEQ ID NO: 943579 - RNA, 19 nt, Artificial Sequence
  Description of Artificial Sequence: Synthetic oligonucleotide
  Antisense strand to SEQ ID NO: 943578
uucuuucccgaguggacgc

SEQ ID NO: 943580 - RNA, 19 nt, Artificial Sequence
  Description of Artificial Sequence: Synthetic oligonucleotide
  Sense strand starting at position 2815 of SEQ ID NO: 913648
ccaguaauguauccgagaa

SEQ ID NO: 943581 - RNA, 19 nt, Artificial Sequence
  Description of Artificial Sequence: Synthetic oligonucleotide
  Antisense strand to SEQ ID NO: 943580
uucucggauacauuacugg

SEQ ID NO: 943582 - RNA, 19 nt, Artificial Sequence
  Description of Artificial Sequence: Synthetic oligonucleotide
  Sense strand starting at position 3310 of SEQ ID NO: 913648
acucucugacauugauguu

SEQ ID NO: 943583 - RNA, 19 nt, Artificial Sequence
  Description of Artificial Sequence: Synthetic oligonucleotide
  Antisense strand to SEQ ID NO: 943582
aacaucaaugucagagagu

SEQ ID NO: 943584 - RNA, 19 nt, Artificial Sequence
  Description of Artificial Sequence: Synthetic oligonucleotide
  Sense strand starting at position 905 of SEQ ID NO: 913648
aguaauggugauggugauu

SEQ ID NO: 943585 - RNA, 19 nt, Artificial Sequence
  Description of Artificial Sequence: Synthetic oligonucleotide
  Antisense strand to SEQ ID NO: 943584
aaucaccaucaccauuacu

SEQ ID NO: 943586 - RNA, 19 nt, Artificial Sequence
  Description of Artificial Sequence: Synthetic oligonucleotide
  Sense strand starting at position 3471 of SEQ ID NO: 913648
gggucauacuaguuaaagu

SEQ ID NO: 943587 - RNA, 19 nt, Artificial Sequence
  Description of Artificial Sequence: Synthetic oligonucleotide
  Antisense strand to SEQ ID NO: 943586
acuuuaacuaguaugaccc

SEQ ID NO: 943588 - RNA, 19 nt, Artificial Sequence
  Description of Artificial Sequence: Synthetic oligonucleotide
  Sense strand starting at position 208 of SEQ ID NO: 913648
ccuguuauacugugauaga

SEQ ID NO: 943589 - RNA, 19 nt, Artificial Sequence
  Description of Artificial Sequence: Synthetic oligonucleotide
  Antisense strand to SEQ ID NO: 943588
ucuaucacaguauaacagg

SEQ ID NO: 943590 - RNA, 19 nt, Artificial Sequence
  Description of Artificial Sequence: Synthetic oligonucleotide
  Sense strand starting at position 2933 of SEQ ID NO: 913648
gagcauuuguuagaauaaa

SEQ ID NO: 943591 - RNA, 19 nt, Artificial Sequence
  Description of Artificial Sequence: Synthetic oligonucleotide
  Antisense strand to SEQ ID NO: 943590
uuuauucuaacaaaugcuc

SEQ ID NO: 943592 - RNA, 19 nt, Artificial Sequence
  Description of Artificial Sequence: Synthetic oligonucleotide
  Sense strand starting at position 457 of SEQ ID NO: 913648
ugugcuuggcacuaaauga

SEQ ID NO: 943593 - RNA, 19 nt, Artificial Sequence
  Description of Artificial Sequence: Synthetic oligonucleotide
  Antisense strand to SEQ ID NO: 943592
ucauuuagugccaagcaca

SEQ ID NO: 943594 - RNA, 19 nt, Artificial Sequence
  Description of Artificial Sequence: Synthetic oligonucleotide
  Sense strand starting at position 350 of SEQ ID NO: 913648
ugagaauuauuugguaaag

SEQ ID NO: 943595 - RNA, 19 nt, Artificial Sequence
  Description of Artificial Sequence: Synthetic oligonucleotide
  Antisense strand to SEQ ID NO: 943594
cuuuaccaaauaauucuca

SEQ ID NO: 943596 - RNA, 19 nt, Artificial Sequence
  Description of Artificial Sequence: Synthetic oligonucleotide
  Sense strand starting at position 3792 of SEQ ID NO: 913648
gguuauugaccaggucacu

SEQ ID NO: 943597 - RNA, 19 nt, Artificial Sequence
  Description of Artificial Sequence: Synthetic oligonucleotide
  Antisense strand to SEQ ID NO: 943596
agugaccuggucaauaacc

SEQ ID NO: 943598 - RNA, 19 nt, Artificial Sequence
  Description of Artificial Sequence: Synthetic oligonucleotide
  Sense strand starting at position 766 of SEQ ID NO: 913649
ugcuauuuauuggugaucu

SEQ ID NO: 943599 - RNA, 19 nt, Artificial Sequence
  Description of Artificial Sequence: Synthetic oligonucleotide
  Antisense strand to SEQ ID NO: 943598
agaucaccaauaaauagca

SEQ ID NO: 943600 - RNA, 19 nt, Artificial Sequence
  Description of Artificial Sequence: Synthetic oligonucleotide
  Sense strand starting at position 1528 of SEQ ID NO: 913649
uggugacuuguuuagaaau

SEQ ID NO: 943601 - RNA, 19 nt, Artificial Sequence
  Description of Artificial Sequence: Synthetic oligonucleotide
  Antisense strand to SEQ ID NO: 943600
auuucuaaacaagucacca

SEQ ID NO: 943602 - RNA, 19 nt, Artificial Sequence
  Description of Artificial Sequence: Synthetic oligonucleotide
  Sense strand starting at position 2932 of SEQ ID NO: 913649
cuaaucgucccugagacaa

SEQ ID NO: 943603 - RNA, 19 nt, Artificial Sequence
  Description of Artificial Sequence: Synthetic oligonucleotide
  Antisense strand to SEQ ID NO: 943602
uugucucagggacgauuag

SEQ ID NO: 943604 - RNA, 19 nt, Artificial Sequence
  Description of Artificial Sequence: Synthetic oligonucleotide
  Sense strand starting at position 95 of SEQ ID NO: 913649
cuggcuuauccucacaaug

SEQ ID NO: 943605 - RNA, 19 nt, Artificial Sequence
  Description of Artificial Sequence: Synthetic oligonucleotide
  Antisense strand to SEQ ID NO: 943604
cauugugaggauaagccag

SEQ ID NO: 943606 - RNA, 19 nt, Artificial Sequence
  Description of Artificial Sequence: Synthetic oligonucleotide
  Sense strand starting at position 2768 of SEQ ID NO: 913649
ggugcaucacaugaggagu

SEQ ID NO: 943607 - RNA, 19 nt, Artificial Sequence
  Description of Artificial Sequence: Synthetic oligonucleotide
  Antisense strand to SEQ ID NO: 943606
acuccucaugugaugcacc

SEQ ID NO: 943608 - RNA, 19 nt, Artificial Sequence
  Description of Artificial Sequence: Synthetic oligonucleotide
  Sense strand starting at position 518 of SEQ ID NO: 913649
gcaugcuagaacugaagga

SEQ ID NO: 943609 - RNA, 19 nt, Artificial Sequence
  Description of Artificial Sequence: Synthetic oligonucleotide
  Antisense strand to SEQ ID NO: 943608
uccuucaguucuagcaugc

SEQ ID NO: 943610 - RNA, 19 nt, Artificial Sequence
  Description of Artificial Sequence: Synthetic oligonucleotide
  Sense strand starting at position 514 of SEQ ID NO: 913649
gguagcaugcuagaacuga

SEQ ID NO: 943611 - RNA, 19 nt, Artificial Sequence
  Description of Artificial Sequence: Synthetic oligonucleotide
  Antisense strand to SEQ ID NO: 943610
ucaguucuagcaugcuacc

SEQ ID NO: 943612 - RNA, 19 nt, Artificial Sequence
  Description of Artificial Sequence: Synthetic oligonucleotide
  Sense strand starting at position 1538 of SEQ ID NO: 913649
uuuagaaaucuuugaagcu

SEQ ID NO: 943613 - RNA, 19 nt, Artificial Sequence
  Description of Artificial Sequence: Synthetic oligonucleotide
  Antisense strand to SEQ ID NO: 943612
agcuucaaagauuucuaaa

SEQ ID NO: 943614 - RNA, 19 nt, Artificial Sequence
  Description of Artificial Sequence: Synthetic oligonucleotide
  Sense strand starting at position 472 of SEQ ID NO: 913649
agggaauucucugccuacu

SEQ ID NO: 943615 - RNA, 19 nt, Artificial Sequence
  Description of Artificial Sequence: Synthetic oligonucleotide
  Antisense strand to SEQ ID NO: 943614
aguaggcagagaauucccu

SEQ ID NO: 943616 - RNA, 19 nt, Artificial Sequence
  Description of Artificial Sequence: Synthetic oligonucleotide
  Sense strand starting at position 2931 of SEQ ID NO: 913649
acuaaucgucccugagaca

SEQ ID NO: 943617 - RNA, 19 nt, Artificial Sequence
  Description of Artificial Sequence: Synthetic oligonucleotide
  Antisense strand to SEQ ID NO: 943616
ugucucagggacgauuagu

SEQ ID NO: 943618 - RNA, 19 nt, Artificial Sequence
  Description of Artificial Sequence: Synthetic oligonucleotide
  Sense strand starting at position 1526 of SEQ ID NO: 913649
cuuggugacuuguuuagaa

SEQ ID NO: 943619 - RNA, 19 nt, Artificial Sequence
  Description of Artificial Sequence: Synthetic oligonucleotide
  Antisense strand to SEQ ID NO: 943618
uucuaaacaagucaccaag

SEQ ID NO: 943620 - RNA, 19 nt, Artificial Sequence
  Description of Artificial Sequence: Synthetic oligonucleotide
  Sense strand starting at position 2930 of SEQ ID NO: 913649
cacuaaucgucccugagac

SEQ ID NO: 943621 - RNA, 19 nt, Artificial Sequence
  Description of Artificial Sequence: Synthetic oligonucleotide
  Antisense strand to SEQ ID NO: 943620
gucucagggacgauuagug

SEQ ID NO: 943622 - RNA, 19 nt, Artificial Sequence
  Description of Artificial Sequence: Synthetic oligonucleotide
  Sense strand starting at position 2384 of SEQ ID NO: 913649
ggccuaguaagagguuuag

SEQ ID NO: 943623 - RNA, 19 nt, Artificial Sequence
  Description of Artificial Sequence: Synthetic oligonucleotide
  Antisense strand to SEQ ID NO: 943622
cuaaaccucuuacuaggcc

SEQ ID NO: 943624 - RNA, 19 nt, Artificial Sequence
  Description of Artificial Sequence: Synthetic oligonucleotide
  Sense strand starting at position 2508 of SEQ ID NO: 913649
guuuguggccucuauggga

SEQ ID NO: 943625 - RNA, 19 nt, Artificial Sequence
  Description of Artificial Sequence: Synthetic oligonucleotide
  Antisense strand to SEQ ID NO: 943624
ucccauagaggccacaaac

SEQ ID NO: 943626 - RNA, 19 nt, Artificial Sequence
  Description of Artificial Sequence: Synthetic oligonucleotide
  Sense strand starting at position 94 of SEQ ID NO: 913649
gcuggcuuauccucacaau

SEQ ID NO: 943627 - RNA, 19 nt, Artificial Sequence
  Description of Artificial Sequence: Synthetic oligonucleotide
  Antisense strand to SEQ ID NO: 943626
auugugaggauaagccagc

SEQ ID NO: 943628 - RNA, 19 nt, Artificial Sequence
  Description of Artificial Sequence: Synthetic oligonucleotide
  Sense strand starting at position 3797 of SEQ ID NO: 913649
gccuguuccgcugauaaau

SEQ ID NO: 943629 - RNA, 19 nt, Artificial Sequence
  Description of Artificial Sequence: Synthetic oligonucleotide
  Antisense strand to SEQ ID NO: 943628
auuuaucagcggaacaggc

SEQ ID NO: 943630 - RNA, 19 nt, Artificial Sequence
  Description of Artificial Sequence: Synthetic oligonucleotide
  Sense strand starting at position 2589 of SEQ ID NO: 913649
aguguagucaccuggcuuu

SEQ ID NO: 943631 - RNA, 19 nt, Artificial Sequence
  Description of Artificial Sequence: Synthetic oligonucleotide
  Antisense strand to SEQ ID NO: 943630
aaagccaggugacuacacu

SEQ ID NO: 943632 - RNA, 19 nt, Artificial Sequence
  Description of Artificial Sequence: Synthetic oligonucleotide
  Sense strand starting at position 2504 of SEQ ID NO: 913649
agcaguuuguggccucuau

SEQ ID NO: 943633 - RNA, 19 nt, Artificial Sequence
  Description of Artificial Sequence: Synthetic oligonucleotide
  Antisense strand to SEQ ID NO: 943632
auagaggccacaaacugcu

SEQ ID NO: 943634 - RNA, 19 nt, Artificial Sequence
  Description of Artificial Sequence: Synthetic oligonucleotide
  Sense strand starting at position 1539 of SEQ ID NO: 913649
uuagaaaucuuugaagcuu

SEQ ID NO: 943635 - RNA, 19 nt, Artificial Sequence
  Description of Artificial Sequence: Synthetic oligonucleotide
  Antisense strand to SEQ ID NO: 943634
aagcuucaaagauuucuaa

SEQ ID NO: 943636 - RNA, 19 nt, Artificial Sequence
  Description of Artificial Sequence: Synthetic oligonucleotide
  Sense strand starting at position 3794 of SEQ ID NO: 913649
uaugccuguuccgcugaua

SEQ ID NO: 943637 - RNA, 19 nt, Artificial Sequence
  Description of Artificial Sequence: Synthetic oligonucleotide
  Antisense strand to SEQ ID NO: 943636
uaucagcggaacaggcaua

SEQ ID NO: 943638 - RNA, 19 nt, Artificial Sequence
  Description of Artificial Sequence: Synthetic oligonucleotide
  Sense strand starting at position 85 of SEQ ID NO: 913649
gggcucagugcuggcuuau

SEQ ID NO: 943639 - RNA, 19 nt, Artificial Sequence
  Description of Artificial Sequence: Synthetic oligonucleotide
  Antisense strand to SEQ ID NO: 943638
auaagccagcacugagccc

SEQ ID NO: 943640 - RNA, 19 nt, Artificial Sequence
  Description of Artificial Sequence: Synthetic oligonucleotide
  Sense strand starting at position 97 of SEQ ID NO: 913649
ggcuuauccucacaaugga

SEQ ID NO: 943641 - RNA, 19 nt, Artificial Sequence
  Description of Artificial Sequence: Synthetic oligonucleotide
  Antisense strand to SEQ ID NO: 943640
uccauugugaggauaagcc

SEQ ID NO: 943642 - RNA, 19 nt, Artificial Sequence
  Description of Artificial Sequence: Synthetic oligonucleotide
  Sense strand starting at position 1530 of SEQ ID NO: 913649
gugacuuguuuagaaaucu

SEQ ID NO: 943643 - RNA, 19 nt, Artificial Sequence
  Description of Artificial Sequence: Synthetic oligonucleotide
  Antisense strand to SEQ ID NO: 943642
agauuucuaaacaagucac

SEQ ID NO: 943644 - RNA, 19 nt, Artificial Sequence
  Description of Artificial Sequence: Synthetic oligonucleotide
  Sense strand starting at position 512 of SEQ ID NO: 913649
gugguagcaugcuagaacu

SEQ ID NO: 943645 - RNA, 19 nt, Artificial Sequence
  Description of Artificial Sequence: Synthetic oligonucleotide
  Antisense strand to SEQ ID NO: 943644
aguucuagcaugcuaccac

SEQ ID NO: 943646 - RNA, 19 nt, Artificial Sequence
  Description of Artificial Sequence: Synthetic oligonucleotide
  Sense strand starting at position 3799 of SEQ ID NO: 913649
cuguuccgcugauaaaugu

SEQ ID NO: 943647 - RNA, 19 nt, Artificial Sequence
  Description of Artificial Sequence: Synthetic oligonucleotide
  Antisense strand to SEQ ID NO: 943646
acauuuaucagcggaacag

SEQ ID NO: 943648 - RNA, 19 nt, Artificial Sequence
  Description of Artificial Sequence: Synthetic oligonucleotide
  Sense strand starting at position 2942 of SEQ ID NO: 913650
cuaaucaucccugaggcaa

SEQ ID NO: 943649 - RNA, 19 nt, Artificial Sequence
  Description of Artificial Sequence: Synthetic oligonucleotide
  Antisense strand to SEQ ID NO: 943648
uugccucagggaugauuag

SEQ ID NO: 943650 - RNA, 19 nt, Artificial Sequence
  Description of Artificial Sequence: Synthetic oligonucleotide
  Sense strand starting at position 530 of SEQ ID NO: 913650
cgugcuagaacugaaggau

SEQ ID NO: 943651 - RNA, 19 nt, Artificial Sequence
  Description of Artificial Sequence: Synthetic oligonucleotide
  Antisense strand to SEQ ID NO: 943650
auccuucaguucuagcacg

SEQ ID NO: 943652 - RNA, 19 nt, Artificial Sequence
  Description of Artificial Sequence: Synthetic oligonucleotide
  Sense strand starting at position 3787 of SEQ ID NO: 913650
acacaaggguccuuucuau

SEQ ID NO: 943653 - RNA, 19 nt, Artificial Sequence
  Description of Artificial Sequence: Synthetic oligonucleotide
  Antisense strand to SEQ ID NO: 943652
auagaaaggacccuugugu

SEQ ID NO: 943654 - RNA, 19 nt, Artificial Sequence
  Description of Artificial Sequence: Synthetic oligonucleotide
  Sense strand starting at position 2941 of SEQ ID NO: 913650
ccuaaucaucccugaggca

SEQ ID NO: 943655 - RNA, 19 nt, Artificial Sequence
  Description of Artificial Sequence: Synthetic oligonucleotide
  Antisense strand to SEQ ID NO: 943654
ugccucagggaugauuagg

SEQ ID NO: 943656 - RNA, 19 nt, Artificial Sequence
  Description of Artificial Sequence: Synthetic oligonucleotide
  Sense strand starting at position 529 of SEQ ID NO: 913650
gcgugcuagaacugaagga

SEQ ID NO: 943657 - RNA, 19 nt, Artificial Sequence
  Description of Artificial Sequence: Synthetic oligonucleotide
  Antisense strand to SEQ ID NO: 943656
uccuucaguucuagcacgc

SEQ ID NO: 943658 - RNA, 19 nt, Artificial Sequence
  Description of Artificial Sequence: Synthetic oligonucleotide
  Sense strand starting at position 2438 of SEQ ID NO: 913650
gcaguccuuugagucauga

SEQ ID NO: 943659 - RNA, 19 nt, Artificial Sequence
  Description of Artificial Sequence: Synthetic oligonucleotide
  Antisense strand to SEQ ID NO: 943658
ucaugacucaaaggacugc

SEQ ID NO: 943660 - RNA, 19 nt, Artificial Sequence
  Description of Artificial Sequence: Synthetic oligonucleotide
  Sense strand starting at position 2435 of SEQ ID NO: 913650
ugggcaguccuuugaguca

SEQ ID NO: 943661 - RNA, 19 nt, Artificial Sequence
  Description of Artificial Sequence: Synthetic oligonucleotide
  Antisense strand to SEQ ID NO: 943660
ugacucaaaggacugccca

SEQ ID NO: 943662 - RNA, 19 nt, Artificial Sequence
  Description of Artificial Sequence: Synthetic oligonucleotide
  Sense strand starting at position 183 of SEQ ID NO: 913650
cagacugacucaugagaag

SEQ ID NO: 943663 - RNA, 19 nt, Artificial Sequence
  Description of Artificial Sequence: Synthetic oligonucleotide
  Antisense strand to SEQ ID NO: 943662
cuucucaugagucagucug

SEQ ID NO: 943664 - RNA, 19 nt, Artificial Sequence
  Description of Artificial Sequence: Synthetic oligonucleotide
  Sense strand starting at position 2442 of SEQ ID NO: 913650
uccuuugagucaugaacac

SEQ ID NO: 943665 - RNA, 19 nt, Artificial Sequence
  Description of Artificial Sequence: Synthetic oligonucleotide
  Antisense strand to SEQ ID NO: 943664
guguucaugacucaaagga

SEQ ID NO: 943666 - RNA, 19 nt, Artificial Sequence
  Description of Artificial Sequence: Synthetic oligonucleotide
  Sense strand starting at position 523 of SEQ ID NO: 913650
gugguagcgugcuagaacu

SEQ ID NO: 943667 - RNA, 19 nt, Artificial Sequence
  Description of Artificial Sequence: Synthetic oligonucleotide
  Antisense strand to SEQ ID NO: 943666
aguucuagcacgcuaccac

SEQ ID NO: 943668 - RNA, 19 nt, Artificial Sequence
  Description of Artificial Sequence: Synthetic oligonucleotide
  Sense strand starting at position 2913 of SEQ ID NO: 913651
gggcauagcgugucuucuu

SEQ ID NO: 943669 - RNA, 19 nt, Artificial Sequence
  Description of Artificial Sequence: Synthetic oligonucleotide
  Antisense strand to SEQ ID NO: 943668
aagaagacacgcuaugccc

SEQ ID NO: 943670 - RNA, 19 nt, Artificial Sequence
  Description of Artificial Sequence: Synthetic oligonucleotide
  Sense strand starting at position 529 of SEQ ID NO: 913651
gugugcuagaacugaagga

SEQ ID NO: 943671 - RNA, 19 nt, Artificial Sequence
  Description of Artificial Sequence: Synthetic oligonucleotide
  Antisense strand to SEQ ID NO: 943670
uccuucaguucuagcacac

SEQ ID NO: 943672 - RNA, 19 nt, Artificial Sequence
  Description of Artificial Sequence: Synthetic oligonucleotide
  Sense strand starting at position 183 of SEQ ID NO: 913651
cagacuggcucaugagaag

SEQ ID NO: 943673 - RNA, 19 nt, Artificial Sequence
  Description of Artificial Sequence: Synthetic oligonucleotide
  Antisense strand to SEQ ID NO: 943672
cuucucaugagccagucug

SEQ ID NO: 943674 - RNA, 19 nt, Artificial Sequence
  Description of Artificial Sequence: Synthetic oligonucleotide
  Sense strand starting at position 834 of SEQ ID NO: 913651
gcaacaguguaucaaguga

SEQ ID NO: 943675 - RNA, 19 nt, Artificial Sequence
  Description of Artificial Sequence: Synthetic oligonucleotide
  Antisense strand to SEQ ID NO: 943674
ucacuugauacacuguugc

SEQ ID NO: 943676 - RNA, 19 nt, Artificial Sequence
  Description of Artificial Sequence: Synthetic oligonucleotide
  Sense strand starting at position 3284 of SEQ ID NO: 913651
cugagaccuucuugcauuc

SEQ ID NO: 943677 - RNA, 19 nt, Artificial Sequence
  Description of Artificial Sequence: Synthetic oligonucleotide
  Antisense strand to SEQ ID NO: 943676
gaaugcaagaaggucucag

SEQ ID NO: 943678 - RNA, 19 nt, Artificial Sequence
  Description of Artificial Sequence: Synthetic oligonucleotide
  Sense strand starting at position 2942 of SEQ ID NO: 913652
cuaaucaucccugaggcaa

SEQ ID NO: 943679 - RNA, 19 nt, Artificial Sequence
  Description of Artificial Sequence: Synthetic oligonucleotide
  Antisense strand to SEQ ID NO: 943678
uugccucagggaugauuag

SEQ ID NO: 943680 - RNA, 19 nt, Artificial Sequence
  Description of Artificial Sequence: Synthetic oligonucleotide
  Sense strand starting at position 530 of SEQ ID NO: 913652
cgugcuagaacugaaggau

SEQ ID NO: 943681 - RNA, 19 nt, Artificial Sequence
  Description of Artificial Sequence: Synthetic oligonucleotide
  Antisense strand to SEQ ID NO: 943680
auccuucaguucuagcacg

SEQ ID NO: 943682 - RNA, 19 nt, Artificial Sequence
  Description of Artificial Sequence: Synthetic oligonucleotide
  Sense strand starting at position 3787 of SEQ ID NO: 913652
acacaaggguccuuucuau

SEQ ID NO: 943683 - RNA, 19 nt, Artificial Sequence
  Description of Artificial Sequence: Synthetic oligonucleotide
  Antisense strand to SEQ ID NO: 943682
auagaaaggacccuugugu

SEQ ID NO: 943684 - RNA, 19 nt, Artificial Sequence
  Description of Artificial Sequence: Synthetic oligonucleotide
  Sense strand starting at position 2941 of SEQ ID NO: 913652
ccuaaucaucccugaggca

SEQ ID NO: 943685 - RNA, 19 nt, Artificial Sequence
  Description of Artificial Sequence: Synthetic oligonucleotide
  Antisense strand to SEQ ID NO: 943684
ugccucagggaugauuagg

SEQ ID NO: 943686 - RNA, 19 nt, Artificial Sequence
  Description of Artificial Sequence: Synthetic oligonucleotide
  Sense strand starting at position 529 of SEQ ID NO: 913652
gcgugcuagaacugaagga

SEQ ID NO: 943687 - RNA, 19 nt, Artificial Sequence
  Description of Artificial Sequence: Synthetic oligonucleotide
  Antisense strand to SEQ ID NO: 943686
uccuucaguucuagcacgc

SEQ ID NO: 943688 - RNA, 19 nt, Artificial Sequence
  Description of Artificial Sequence: Synthetic oligonucleotide
  Sense strand starting at position 2438 of SEQ ID NO: 913652
gcaguccuuugagucauga

SEQ ID NO: 943689 - RNA, 19 nt, Artificial Sequence
  Description of Artificial Sequence: Synthetic oligonucleotide
  Antisense strand to SEQ ID NO: 943688
ucaugacucaaaggacugc

SEQ ID NO: 943690 - RNA, 19 nt, Artificial Sequence
  Description of Artificial Sequence: Synthetic oligonucleotide
  Sense strand starting at position 2435 of SEQ ID NO: 913652
ugggcaguccuuugaguca

SEQ ID NO: 943691 - RNA, 19 nt, Artificial Sequence
  Description of Artificial Sequence: Synthetic oligonucleotide
  Antisense strand to SEQ ID NO: 943690
ugacucaaaggacugccca

SEQ ID NO: 943692 - RNA, 19 nt, Artificial Sequence
  Description of Artificial Sequence: Synthetic oligonucleotide
  Sense strand starting at position 183 of SEQ ID NO: 913652
cagacugacucaugagaag

SEQ ID NO: 943693 - RNA, 19 nt, Artificial Sequence
  Description of Artificial Sequence: Synthetic oligonucleotide
  Antisense strand to SEQ ID NO: 943692
cuucucaugagucagucug

SEQ ID NO: 943694 - RNA, 19 nt, Artificial Sequence
  Description of Artificial Sequence: Synthetic oligonucleotide
  Sense strand starting at position 2442 of SEQ ID NO: 913652
uccuuugagucaugaacac

SEQ ID NO: 943695 - RNA, 19 nt, Artificial Sequence
  Description of Artificial Sequence: Synthetic oligonucleotide
  Antisense strand to SEQ ID NO: 943694
guguucaugacucaaagga

SEQ ID NO: 943696 - RNA, 19 nt, Artificial Sequence
  Description of Artificial Sequence: Synthetic oligonucleotide
  Sense strand starting at position 523 of SEQ ID NO: 913652
gugguagcgugcuagaacu

SEQ ID NO: 943697 - RNA, 19 nt, Artificial Sequence
  Description of Artificial Sequence: Synthetic oligonucleotide
  Antisense strand to SEQ ID NO: 943696
aguucuagcacgcuaccac

SEQ ID NO: 943698 - RNA, 19 nt, Artificial Sequence
  Description of Artificial Sequence: Synthetic oligonucleotide
  Sense strand starting at position 2913 of SEQ ID NO: 913653
gggcauagcgugucuucuu

SEQ ID NO: 943699 - RNA, 19 nt, Artificial Sequence
  Description of Artificial Sequence: Synthetic oligonucleotide
  Antisense strand to SEQ ID NO: 943698
aagaagacacgcuaugccc

SEQ ID NO: 943700 - RNA, 19 nt, Artificial Sequence
  Description of Artificial Sequence: Synthetic oligonucleotide
  Sense strand starting at position 529 of SEQ ID NO: 913653
gugugcuagaacugaagga

SEQ ID NO: 943701 - RNA, 19 nt, Artificial Sequence
  Description of Artificial Sequence: Synthetic oligonucleotide
  Antisense strand to SEQ ID NO: 943700
uccuucaguucuagcacac

SEQ ID NO: 943702 - RNA, 19 nt, Artificial Sequence
  Description of Artificial Sequence: Synthetic oligonucleotide
  Sense strand starting at position 183 of SEQ ID NO: 913653
cagacuggcucaugagaag

SEQ ID NO: 943703 - RNA, 19 nt, Artificial Sequence
  Description of Artificial Sequence: Synthetic oligonucleotide
  Antisense strand to SEQ ID NO: 943702
cuucucaugagccagucug

SEQ ID NO: 943704 - RNA, 19 nt, Artificial Sequence
  Description of Artificial Sequence: Synthetic oligonucleotide
  Sense strand starting at position 834 of SEQ ID NO: 913653
gcaacaguguaucaaguga

SEQ ID NO: 943705 - RNA, 19 nt, Artificial Sequence
  Description of Artificial Sequence: Synthetic oligonucleotide
  Antisense strand to SEQ ID NO: 943704
ucacuugauacacuguugc

SEQ ID NO: 943706 - RNA, 19 nt, Artificial Sequence
  Description of Artificial Sequence: Synthetic oligonucleotide
  Sense strand starting at position 3284 of SEQ ID NO: 913653
cugagaccuucuugcauuc

SEQ ID NO: 943707 - RNA, 19 nt, Artificial Sequence
  Description of Artificial Sequence: Synthetic oligonucleotide
  Antisense strand to SEQ ID NO: 943706
gaaugcaagaaggucucag

SEQ ID NO: 943708 - RNA, 19 nt, Artificial Sequence
  Description of Artificial Sequence: Synthetic oligonucleotide
  Sense strand starting at position 756 of SEQ ID NO: 913654
uauccauaggaaugugaac

SEQ ID NO: 943709 - RNA, 19 nt, Artificial Sequence
  Description of Artificial Sequence: Synthetic oligonucleotide
  Antisense strand to SEQ ID NO: 943708
guucacauuccuauggaua

SEQ ID NO: 943710 - RNA, 19 nt, Artificial Sequence
  Description of Artificial Sequence: Synthetic oligonucleotide
  Sense strand starting at position 3373 of SEQ ID NO: 913654
guuugaaaucuagacaguu

SEQ ID NO: 943711 - RNA, 19 nt, Artificial Sequence
  Description of Artificial Sequence: Synthetic oligonucleotide
  Antisense strand to SEQ ID NO: 943710
aacugucuagauuucaaac

SEQ ID NO: 943712 - RNA, 19 nt, Artificial Sequence
  Description of Artificial Sequence: Synthetic oligonucleotide
  Sense strand starting at position 1502 of SEQ ID NO: 913654
gcaguugaacgggacaaua

SEQ ID NO: 943713 - RNA, 19 nt, Artificial Sequence
  Description of Artificial Sequence: Synthetic oligonucleotide
  Antisense strand to SEQ ID NO: 943712
uauugucccguucaacugc

SEQ ID NO: 943714 - RNA, 19 nt, Artificial Sequence
  Description of Artificial Sequence: Synthetic oligonucleotide
  Sense strand starting at position 568 of SEQ ID NO: 913654
gguguuuggcagcuaguuu

SEQ ID NO: 943715 - RNA, 19 nt, Artificial Sequence
  Description of Artificial Sequence: Synthetic oligonucleotide
  Antisense strand to SEQ ID NO: 943714
aaacuagcugccaaacacc

SEQ ID NO: 943716 - RNA, 19 nt, Artificial Sequence
  Description of Artificial Sequence: Synthetic oligonucleotide
  Sense strand starting at position 567 of SEQ ID NO: 913654
ugguguuuggcagcuaguu

SEQ ID NO: 943717 - RNA, 19 nt, Artificial Sequence
  Description of Artificial Sequence: Synthetic oligonucleotide
  Antisense strand to SEQ ID NO: 943716
aacuagcugccaaacacca

SEQ ID NO: 943718 - RNA, 19 nt, Artificial Sequence
  Description of Artificial Sequence: Synthetic oligonucleotide
  Sense strand starting at position 765 of SEQ ID NO: 913654
gaaugugaacuuuagcauu

SEQ ID NO: 943719 - RNA, 19 nt, Artificial Sequence
  Description of Artificial Sequence: Synthetic oligonucleotide
  Antisense strand to SEQ ID NO: 943718
aaugcuaaaguucacauuc

SEQ ID NO: 943720 - RNA, 19 nt, Artificial Sequence
  Description of Artificial Sequence: Synthetic oligonucleotide
  Sense strand starting at position 3625 of SEQ ID NO: 913654
ccuggcuagcccugaauuu

SEQ ID NO: 943721 - RNA, 19 nt, Artificial Sequence
  Description of Artificial Sequence: Synthetic oligonucleotide
  Antisense strand to SEQ ID NO: 943720
aaauucagggcuagccagg

SEQ ID NO: 943722 - RNA, 19 nt, Artificial Sequence
  Description of Artificial Sequence: Synthetic oligonucleotide
  Sense strand starting at position 3738 of SEQ ID NO: 913654
agauuuggccucuguaguc

SEQ ID NO: 943723 - RNA, 19 nt, Artificial Sequence
  Description of Artificial Sequence: Synthetic oligonucleotide
  Antisense strand to SEQ ID NO: 943722
gacuacagaggccaaaucu

SEQ ID NO: 943724 - RNA, 19 nt, Artificial Sequence
  Description of Artificial Sequence: Synthetic oligonucleotide
  Sense strand starting at position 549 of SEQ ID NO: 913654
ccgcuaacgcuaguaaugu

SEQ ID NO: 943725 - RNA, 19 nt, Artificial Sequence
  Description of Artificial Sequence: Synthetic oligonucleotide
  Antisense strand to SEQ ID NO: 943724
acauuacuagcguuagcgg

SEQ ID NO: 943726 - RNA, 19 nt, Artificial Sequence
  Description of Artificial Sequence: Synthetic oligonucleotide
  Sense strand starting at position 785 of SEQ ID NO: 913654
ccuaucaaguauguauaaa

SEQ ID NO: 943727 - RNA, 19 nt, Artificial Sequence
  Description of Artificial Sequence: Synthetic oligonucleotide
  Antisense strand to SEQ ID NO: 943726
uuuauacauacuugauagg

SEQ ID NO: 943728 - RNA, 19 nt, Artificial Sequence
  Description of Artificial Sequence: Synthetic oligonucleotide
  Sense strand starting at position 2374 of SEQ ID NO: 913654
ugagaaagcgcgccuguuu

SEQ ID NO: 943729 - RNA, 19 nt, Artificial Sequence
  Description of Artificial Sequence: Synthetic oligonucleotide
  Antisense strand to SEQ ID NO: 943728
aaacaggcgcgcuuucuca

SEQ ID NO: 943730 - RNA, 19 nt, Artificial Sequence
  Description of Artificial Sequence: Synthetic oligonucleotide
  Sense strand starting at position 3419 of SEQ ID NO: 913654
cgcguuaaucguuucaauu

SEQ ID NO: 943731 - RNA, 19 nt, Artificial Sequence
  Description of Artificial Sequence: Synthetic oligonucleotide
  Antisense strand to SEQ ID NO: 943730
aauugaaacgauuaacgcg

SEQ ID NO: 943732 - RNA, 19 nt, Artificial Sequence
  Description of Artificial Sequence: Synthetic oligonucleotide
  Sense strand starting at position 418 of SEQ ID NO: 913654
acacaauauuucgagaacu

SEQ ID NO: 943733 - RNA, 19 nt, Artificial Sequence
  Description of Artificial Sequence: Synthetic oligonucleotide
  Antisense strand to SEQ ID NO: 943732
aguucucgaaauauugugu

SEQ ID NO: 943734 - RNA, 19 nt, Artificial Sequence
  Description of Artificial Sequence: Synthetic oligonucleotide
  Sense strand starting at position 784 of SEQ ID NO: 913654
uccuaucaaguauguauaa

SEQ ID NO: 943735 - RNA, 19 nt, Artificial Sequence
  Description of Artificial Sequence: Synthetic oligonucleotide
  Antisense strand to SEQ ID NO: 943734
uuauacauacuugauagga

SEQ ID NO: 943736 - RNA, 19 nt, Artificial Sequence
  Description of Artificial Sequence: Synthetic oligonucleotide
  Sense strand starting at position 1501 of SEQ ID NO: 913654
agcaguugaacgggacaau

SEQ ID NO: 943737 - RNA, 19 nt, Artificial Sequence
  Description of Artificial Sequence: Synthetic oligonucleotide
  Antisense strand to SEQ ID NO: 943736
auugucccguucaacugcu

SEQ ID NO: 943738 - RNA, 19 nt, Artificial Sequence
  Description of Artificial Sequence: Synthetic oligonucleotide
  Sense strand starting at position 587 of SEQ ID NO: 913654
uaaugacugucauuagagc

SEQ ID NO: 943739 - RNA, 19 nt, Artificial Sequence
  Description of Artificial Sequence: Synthetic oligonucleotide
  Antisense strand to SEQ ID NO: 943738
gcucuaaugacagucauua

SEQ ID NO: 943740 - RNA, 19 nt, Artificial Sequence
  Description of Artificial Sequence: Synthetic oligonucleotide
  Sense strand starting at position 1431 of SEQ ID NO: 913654
aggugaagcagucaguacu

SEQ ID NO: 943741 - RNA, 19 nt, Artificial Sequence
  Description of Artificial Sequence: Synthetic oligonucleotide
  Antisense strand to SEQ ID NO: 943740
aguacugacugcuucaccu

SEQ ID NO: 943742 - RNA, 19 nt, Artificial Sequence
  Description of Artificial Sequence: Synthetic oligonucleotide
  Sense strand starting at position 3682 of SEQ ID NO: 913654
agauaauguuugguaguca

SEQ ID NO: 943743 - RNA, 19 nt, Artificial Sequence
  Description of Artificial Sequence: Synthetic oligonucleotide
  Antisense strand to SEQ ID NO: 943742
ugacuaccaaacauuaucu

SEQ ID NO: 943744 - RNA, 19 nt, Artificial Sequence
  Description of Artificial Sequence: Synthetic oligonucleotide
  Sense strand starting at position 3118 of SEQ ID NO: 913654
ugaucuugcaugcagagua

SEQ ID NO: 943745 - RNA, 19 nt, Artificial Sequence
  Description of Artificial Sequence: Synthetic oligonucleotide
  Antisense strand to SEQ ID NO: 943744
uacucugcaugcaagauca

SEQ ID NO: 943746 - RNA, 19 nt, Artificial Sequence
  Description of Artificial Sequence: Synthetic oligonucleotide
  Sense strand starting at position 3679 of SEQ ID NO: 913654
gucagauaauguuugguag

SEQ ID NO: 943747 - RNA, 19 nt, Artificial Sequence
  Description of Artificial Sequence: Synthetic oligonucleotide
  Antisense strand to SEQ ID NO: 943746
cuaccaaacauuaucugac

SEQ ID NO: 943748 - RNA, 19 nt, Artificial Sequence
  Description of Artificial Sequence: Synthetic oligonucleotide
  Sense strand starting at position 3762 of SEQ ID NO: 913654
gcuuucuucgagcaaauaa

SEQ ID NO: 943749 - RNA, 19 nt, Artificial Sequence
  Description of Artificial Sequence: Synthetic oligonucleotide
  Antisense strand to SEQ ID NO: 943748
uuauuugcucgaagaaagc

SEQ ID NO: 943750 - RNA, 19 nt, Artificial Sequence
  Description of Artificial Sequence: Synthetic oligonucleotide
  Sense strand starting at position 3364 of SEQ ID NO: 913654
ggcuucuaaguuugaaauc

SEQ ID NO: 943751 - RNA, 19 nt, Artificial Sequence
  Description of Artificial Sequence: Synthetic oligonucleotide
  Antisense strand to SEQ ID NO: 943750
gauuucaaacuuagaagcc

SEQ ID NO: 943752 - RNA, 19 nt, Artificial Sequence
  Description of Artificial Sequence: Synthetic oligonucleotide
  Sense strand starting at position 3949 of SEQ ID NO: 913654
gggcuagacccaugucuca

SEQ ID NO: 943753 - RNA, 19 nt, Artificial Sequence
  Description of Artificial Sequence: Synthetic oligonucleotide
  Antisense strand to SEQ ID NO: 943752
ugagacaugggucuagccc

SEQ ID NO: 943754 - RNA, 19 nt, Artificial Sequence
  Description of Artificial Sequence: Synthetic oligonucleotide
  Sense strand starting at position 3906 of SEQ ID NO: 913654
agucuuguuggagguggau

SEQ ID NO: 943755 - RNA, 19 nt, Artificial Sequence
  Description of Artificial Sequence: Synthetic oligonucleotide
  Antisense strand to SEQ ID NO: 943754
auccaccuccaacaagacu

SEQ ID NO: 943756 - RNA, 19 nt, Artificial Sequence
  Description of Artificial Sequence: Synthetic oligonucleotide
  Sense strand starting at position 3680 of SEQ ID NO: 913654
ucagauaauguuugguagu

SEQ ID NO: 943757 - RNA, 19 nt, Artificial Sequence
  Description of Artificial Sequence: Synthetic oligonucleotide
  Antisense strand to SEQ ID NO: 943756
acuaccaaacauuaucuga

SEQ ID NO: 943758 - RNA, 19 nt, Artificial Sequence
  Description of Artificial Sequence: Synthetic oligonucleotide
  Sense strand starting at position 3361 of SEQ ID NO: 913654
cuuggcuucuaaguuugaa

SEQ ID NO: 943759 - RNA, 19 nt, Artificial Sequence
  Description of Artificial Sequence: Synthetic oligonucleotide
  Antisense strand to SEQ ID NO: 943758
uucaaacuuagaagccaag

SEQ ID NO: 943760 - RNA, 19 nt, Artificial Sequence
  Description of Artificial Sequence: Synthetic oligonucleotide
  Sense strand starting at position 505 of SEQ ID NO: 913654
agguccaaugggugucauu

SEQ ID NO: 943761 - RNA, 19 nt, Artificial Sequence
  Description of Artificial Sequence: Synthetic oligonucleotide
  Antisense strand to SEQ ID NO: 943760
aaugacacccauuggaccu

SEQ ID NO: 943762 - RNA, 19 nt, Artificial Sequence
  Description of Artificial Sequence: Synthetic oligonucleotide
  Sense strand starting at position 298 of SEQ ID NO: 913654
ugacuuauuuagcaaguaa

SEQ ID NO: 943763 - RNA, 19 nt, Artificial Sequence
  Description of Artificial Sequence: Synthetic oligonucleotide
  Antisense strand to SEQ ID NO: 943762
uuacuugcuaaauaaguca

SEQ ID NO: 943764 - RNA, 19 nt, Artificial Sequence
  Description of Artificial Sequence: Synthetic oligonucleotide
  Sense strand starting at position 3691 of SEQ ID NO: 913654
uugguagucacuggguuau

SEQ ID NO: 943765 - RNA, 19 nt, Artificial Sequence
  Description of Artificial Sequence: Synthetic oligonucleotide
  Antisense strand to SEQ ID NO: 943764
auaacccagugacuaccaa

SEQ ID NO: 943766 - RNA, 19 nt, Artificial Sequence
  Description of Artificial Sequence: Synthetic oligonucleotide
  Sense strand starting at position 3705 of SEQ ID NO: 913654
guuauccugugguuuaaau

SEQ ID NO: 943767 - RNA, 19 nt, Artificial Sequence
  Description of Artificial Sequence: Synthetic oligonucleotide
  Antisense strand to SEQ ID NO: 943766
auuuaaaccacaggauaac

SEQ ID NO: 943768 - RNA, 19 nt, Artificial Sequence
  Description of Artificial Sequence: Synthetic oligonucleotide
  Sense strand starting at position 3026 of SEQ ID NO: 913654
ggcucuguggauggugauu

SEQ ID NO: 943769 - RNA, 19 nt, Artificial Sequence
  Description of Artificial Sequence: Synthetic oligonucleotide
  Antisense strand to SEQ ID NO: 943768
aaucaccauccacagagcc

SEQ ID NO: 943770 - RNA, 19 nt, Artificial Sequence
  Description of Artificial Sequence: Synthetic oligonucleotide
  Sense strand starting at position 117 of SEQ ID NO: 913654
ucugaaacuccguggguuu

SEQ ID NO: 943771 - RNA, 19 nt, Artificial Sequence
  Description of Artificial Sequence: Synthetic oligonucleotide
  Antisense strand to SEQ ID NO: 943770
aaacccacggaguuucaga

SEQ ID NO: 943772 - RNA, 19 nt, Artificial Sequence
  Description of Artificial Sequence: Synthetic oligonucleotide
  Sense strand starting at position 3702 of SEQ ID NO: 913654
uggguuauccugugguuua

SEQ ID NO: 943773 - RNA, 19 nt, Artificial Sequence
  Description of Artificial Sequence: Synthetic oligonucleotide
  Antisense strand to SEQ ID NO: 943772
uaaaccacaggauaaccca

SEQ ID NO: 943774 - RNA, 19 nt, Artificial Sequence
  Description of Artificial Sequence: Synthetic oligonucleotide
  Sense strand starting at position 547 of SEQ ID NO: 913654
gaccgcuaacgcuaguaau

SEQ ID NO: 943775 - RNA, 19 nt, Artificial Sequence
  Description of Artificial Sequence: Synthetic oligonucleotide
  Antisense strand to SEQ ID NO: 943774
auuacuagcguuagcgguc

SEQ ID NO: 943776 - RNA, 19 nt, Artificial Sequence
  Description of Artificial Sequence: Synthetic oligonucleotide
  Sense strand starting at position 363 of SEQ ID NO: 913654
agaguacacuuagaugaau

SEQ ID NO: 943777 - RNA, 19 nt, Artificial Sequence
  Description of Artificial Sequence: Synthetic oligonucleotide
  Antisense strand to SEQ ID NO: 943776
auucaucuaaguguacucu

SEQ ID NO: 943778 - RNA, 19 nt, Artificial Sequence
  Description of Artificial Sequence: Synthetic oligonucleotide
  Sense strand starting at position 3905 of SEQ ID NO: 913654
gagucuuguuggaggugga

SEQ ID NO: 943779 - RNA, 19 nt, Artificial Sequence
  Description of Artificial Sequence: Synthetic oligonucleotide
  Antisense strand to SEQ ID NO: 943778
uccaccuccaacaagacuc

SEQ ID NO: 943780 - RNA, 19 nt, Artificial Sequence
  Description of Artificial Sequence: Synthetic oligonucleotide
  Sense strand starting at position 3109 of SEQ ID NO: 913654
uguauaugcugaucuugca

SEQ ID NO: 943781 - RNA, 19 nt, Artificial Sequence
  Description of Artificial Sequence: Synthetic oligonucleotide
  Antisense strand to SEQ ID NO: 943780
ugcaagaucagcauauaca

SEQ ID NO: 943782 - RNA, 19 nt, Artificial Sequence
  Description of Artificial Sequence: Synthetic oligonucleotide
  Sense strand starting at position 725 of SEQ ID NO: 913654
cagccucguuaguuugaaa

SEQ ID NO: 943783 - RNA, 19 nt, Artificial Sequence
  Description of Artificial Sequence: Synthetic oligonucleotide
  Antisense strand to SEQ ID NO: 943782
uuucaaacuaacgaggcug

SEQ ID NO: 943784 - RNA, 19 nt, Artificial Sequence
  Description of Artificial Sequence: Synthetic oligonucleotide
  Sense strand starting at position 3751 of SEQ ID NO: 913654
guagucagauugcuuucuu

SEQ ID NO: 943785 - RNA, 19 nt, Artificial Sequence
  Description of Artificial Sequence: Synthetic oligonucleotide
  Antisense strand to SEQ ID NO: 943784
aagaaagcaaucugacuac

SEQ ID NO: 943786 - RNA, 19 nt, Artificial Sequence
  Description of Artificial Sequence: Synthetic oligonucleotide
  Sense strand starting at position 3758 of SEQ ID NO: 913654
gauugcuuucuucgagcaa

SEQ ID NO: 943787 - RNA, 19 nt, Artificial Sequence
  Description of Artificial Sequence: Synthetic oligonucleotide
  Antisense strand to SEQ ID NO: 943786
uugcucgaagaaagcaauc

SEQ ID NO: 943788 - RNA, 19 nt, Artificial Sequence
  Description of Artificial Sequence: Synthetic oligonucleotide
  Sense strand starting at position 3495 of SEQ ID NO: 913655
gaguauauuuaggugugua

SEQ ID NO: 943789 - RNA, 19 nt, Artificial Sequence
  Description of Artificial Sequence: Synthetic oligonucleotide
  Antisense strand to SEQ ID NO: 943788
uacacaccuaaauauacuc

SEQ ID NO: 943790 - RNA, 19 nt, Artificial Sequence
  Description of Artificial Sequence: Synthetic oligonucleotide
  Sense strand starting at position 530 of SEQ ID NO: 913655
uggagaaacuaaguuacuu

SEQ ID NO: 943791 - RNA, 19 nt, Artificial Sequence
  Description of Artificial Sequence: Synthetic oligonucleotide
  Antisense strand to SEQ ID NO: 943790
aaguaacuuaguuucucca

SEQ ID NO: 943792 - RNA, 19 nt, Artificial Sequence
  Description of Artificial Sequence: Synthetic oligonucleotide
  Sense strand starting at position 476 of SEQ ID NO: 913655
uugcuauuaguagauaaag

SEQ ID NO: 943793 - RNA, 19 nt, Artificial Sequence
  Description of Artificial Sequence: Synthetic oligonucleotide
  Antisense strand to SEQ ID NO: 943792
cuuuaucuacuaauagcaa

SEQ ID NO: 943794 - RNA, 19 nt, Artificial Sequence
  Description of Artificial Sequence: Synthetic oligonucleotide
  Sense strand starting at position 1085 of SEQ ID NO: 913655
agagcuaaccgagauucca

SEQ ID NO: 943795 - RNA, 19 nt, Artificial Sequence
  Description of Artificial Sequence: Synthetic oligonucleotide
  Antisense strand to SEQ ID NO: 943794
uggaaucucgguuagcucu

SEQ ID NO: 943796 - RNA, 19 nt, Artificial Sequence
  Description of Artificial Sequence: Synthetic oligonucleotide
  Sense strand starting at position 2605 of SEQ ID NO: 913655
acaauuggcgaguagaaua

SEQ ID NO: 943797 - RNA, 19 nt, Artificial Sequence
  Description of Artificial Sequence: Synthetic oligonucleotide
  Antisense strand to SEQ ID NO: 943796
uauucuacucgccaauugu

SEQ ID NO: 943798 - RNA, 19 nt, Artificial Sequence
  Description of Artificial Sequence: Synthetic oligonucleotide
  Sense strand starting at position 3091 of SEQ ID NO: 913655
cugagaucugaaugauagu

SEQ ID NO: 943799 - RNA, 19 nt, Artificial Sequence
  Description of Artificial Sequence: Synthetic oligonucleotide
  Antisense strand to SEQ ID NO: 943798
acuaucauucagaucucag

SEQ ID NO: 943800 - RNA, 19 nt, Artificial Sequence
  Description of Artificial Sequence: Synthetic oligonucleotide
  Sense strand starting at position 2602 of SEQ ID NO: 913655
cagacaauuggcgaguaga

SEQ ID NO: 943801 - RNA, 19 nt, Artificial Sequence
  Description of Artificial Sequence: Synthetic oligonucleotide
  Antisense strand to SEQ ID NO: 943800
ucuacucgccaauugucug

SEQ ID NO: 943802 - RNA, 19 nt, Artificial Sequence
  Description of Artificial Sequence: Synthetic oligonucleotide
  Sense strand starting at position 1321 of SEQ ID NO: 913655
cgguccuuggugagagcua

SEQ ID NO: 943803 - RNA, 19 nt, Artificial Sequence
  Description of Artificial Sequence: Synthetic oligonucleotide
  Antisense strand to SEQ ID NO: 943802
uagcucucaccaaggaccg

SEQ ID NO: 943804 - RNA, 19 nt, Artificial Sequence
  Description of Artificial Sequence: Synthetic oligonucleotide
  Sense strand starting at position 2559 of SEQ ID NO: 913655
accuuauagggcugaacaa

SEQ ID NO: 943805 - RNA, 19 nt, Artificial Sequence
  Description of Artificial Sequence: Synthetic oligonucleotide
  Antisense strand to SEQ ID NO: 943804
uuguucagcccuauaaggu

SEQ ID NO: 943806 - RNA, 19 nt, Artificial Sequence
  Description of Artificial Sequence: Synthetic oligonucleotide
  Sense strand starting at position 1240 of SEQ ID NO: 913655
ugguguguccgugcacaau

SEQ ID NO: 943807 - RNA, 19 nt, Artificial Sequence
  Description of Artificial Sequence: Synthetic oligonucleotide
  Antisense strand to SEQ ID NO: 943806
auugugcacggacacacca

SEQ ID NO: 943808 - RNA, 19 nt, Artificial Sequence
  Description of Artificial Sequence: Synthetic oligonucleotide
  Sense strand starting at position 451 of SEQ ID NO: 913655
auaugaucauaugucaucu

SEQ ID NO: 943809 - RNA, 19 nt, Artificial Sequence
  Description of Artificial Sequence: Synthetic oligonucleotide
  Antisense strand to SEQ ID NO: 943808
agaugacauaugaucauau

SEQ ID NO: 943810 - RNA, 19 nt, Artificial Sequence
  Description of Artificial Sequence: Synthetic oligonucleotide
  Sense strand starting at position 3014 of SEQ ID NO: 913655
caguguguuagagagugga

SEQ ID NO: 943811 - RNA, 19 nt, Artificial Sequence
  Description of Artificial Sequence: Synthetic oligonucleotide
  Antisense strand to SEQ ID NO: 943810
uccacucucuaacacacug

SEQ ID NO: 943812 - RNA, 19 nt, Artificial Sequence
  Description of Artificial Sequence: Synthetic oligonucleotide
  Sense strand starting at position 1343 of SEQ ID NO: 913655
ggagacaauguguguacaa

SEQ ID NO: 943813 - RNA, 19 nt, Artificial Sequence
  Description of Artificial Sequence: Synthetic oligonucleotide
  Antisense strand to SEQ ID NO: 943812
uuguacacacauugucucc

SEQ ID NO: 943814 - RNA, 19 nt, Artificial Sequence
  Description of Artificial Sequence: Synthetic oligonucleotide
  Sense strand starting at position 3209 of SEQ ID NO: 913655
uggugucugcaggaauaca

SEQ ID NO: 943815 - RNA, 19 nt, Artificial Sequence
  Description of Artificial Sequence: Synthetic oligonucleotide
  Antisense strand to SEQ ID NO: 943814
uguauuccugcagacacca

SEQ ID NO: 943816 - RNA, 19 nt, Artificial Sequence
  Description of Artificial Sequence: Synthetic oligonucleotide
  Sense strand starting at position 2288 of SEQ ID NO: 913655
uuggaaaccuccuugaguc

SEQ ID NO: 943817 - RNA, 19 nt, Artificial Sequence
  Description of Artificial Sequence: Synthetic oligonucleotide
  Antisense strand to SEQ ID NO: 943816
gacucaaggagguuuccaa

SEQ ID NO: 943818 - RNA, 19 nt, Artificial Sequence
  Description of Artificial Sequence: Synthetic oligonucleotide
  Sense strand starting at position 609 of SEQ ID NO: 913655
acaacaugucgguauccca

SEQ ID NO: 943819 - RNA, 19 nt, Artificial Sequence
  Description of Artificial Sequence: Synthetic oligonucleotide
  Antisense strand to SEQ ID NO: 943818
ugggauaccgacauguugu

SEQ ID NO: 943820 - RNA, 19 nt, Artificial Sequence
  Description of Artificial Sequence: Synthetic oligonucleotide
  Sense strand starting at position 1344 of SEQ ID NO: 913655
gagacaauguguguacaac

SEQ ID NO: 943821 - RNA, 19 nt, Artificial Sequence
  Description of Artificial Sequence: Synthetic oligonucleotide
  Antisense strand to SEQ ID NO: 943820
guuguacacacauugucuc

SEQ ID NO: 943822 - RNA, 19 nt, Artificial Sequence
  Description of Artificial Sequence: Synthetic oligonucleotide
  Sense strand starting at position 2289 of SEQ ID NO: 913655
uggaaaccuccuugagucu

SEQ ID NO: 943823 - RNA, 19 nt, Artificial Sequence
  Description of Artificial Sequence: Synthetic oligonucleotide
  Antisense strand to SEQ ID NO: 943822
agacucaaggagguuucca

SEQ ID NO: 943824 - RNA, 19 nt, Artificial Sequence
  Description of Artificial Sequence: Synthetic oligonucleotide
  Sense strand starting at position 1082 of SEQ ID NO: 913655
cucagagcuaaccgagauu

SEQ ID NO: 943825 - RNA, 19 nt, Artificial Sequence
  Description of Artificial Sequence: Synthetic oligonucleotide
  Antisense strand to SEQ ID NO: 943824
aaucucgguuagcucugag

SEQ ID NO: 943826 - RNA, 19 nt, Artificial Sequence
  Description of Artificial Sequence: Synthetic oligonucleotide
  Sense strand starting at position 1275 of SEQ ID NO: 913655
auuugcuccuccgugaagu

SEQ ID NO: 943827 - RNA, 19 nt, Artificial Sequence
  Description of Artificial Sequence: Synthetic oligonucleotide
  Antisense strand to SEQ ID NO: 943826
acuucacggaggagcaaau

SEQ ID NO: 943828 - RNA, 19 nt, Artificial Sequence
  Description of Artificial Sequence: Synthetic oligonucleotide
  Sense strand starting at position 1242 of SEQ ID NO: 913655
guguguccgugcacaauga

SEQ ID NO: 943829 - RNA, 19 nt, Artificial Sequence
  Description of Artificial Sequence: Synthetic oligonucleotide
  Antisense strand to SEQ ID NO: 943828
ucauugugcacggacacac

SEQ ID NO: 943830 - RNA, 19 nt, Artificial Sequence
  Description of Artificial Sequence: Synthetic oligonucleotide
  Sense strand starting at position 2434 of SEQ ID NO: 913655
aggucaccuuguuccuaaa

SEQ ID NO: 943831 - RNA, 19 nt, Artificial Sequence
  Description of Artificial Sequence: Synthetic oligonucleotide
  Antisense strand to SEQ ID NO: 943830
uuuaggaacaaggugaccu

SEQ ID NO: 943832 - RNA, 19 nt, Artificial Sequence
  Description of Artificial Sequence: Synthetic oligonucleotide
  Sense strand starting at position 731 of SEQ ID NO: 913655
gcugcagagagcgaugauu

SEQ ID NO: 943833 - RNA, 19 nt, Artificial Sequence
  Description of Artificial Sequence: Synthetic oligonucleotide
  Antisense strand to SEQ ID NO: 943832
aaucaucgcucucugcagc

SEQ ID NO: 943834 - RNA, 19 nt, Artificial Sequence
  Description of Artificial Sequence: Synthetic oligonucleotide
  Sense strand starting at position 646 of SEQ ID NO: 913655
aaauuaaucgggugguggu

SEQ ID NO: 943835 - RNA, 19 nt, Artificial Sequence
  Description of Artificial Sequence: Synthetic oligonucleotide
  Antisense strand to SEQ ID NO: 943834
accaccacccgauuaauuu

SEQ ID NO: 943836 - RNA, 19 nt, Artificial Sequence
  Description of Artificial Sequence: Synthetic oligonucleotide
  Sense strand starting at position 3599 of SEQ ID NO: 913655
guuguaguauaacuguuaa

SEQ ID NO: 943837 - RNA, 19 nt, Artificial Sequence
  Description of Artificial Sequence: Synthetic oligonucleotide
  Antisense strand to SEQ ID NO: 943836
uuaacaguuauacuacaac

SEQ ID NO: 943838 - RNA, 19 nt, Artificial Sequence
  Description of Artificial Sequence: Synthetic oligonucleotide
  Sense strand starting at position 3449 of SEQ ID NO: 913655
ggagacaguuucucgcuau

SEQ ID NO: 943839 - RNA, 19 nt, Artificial Sequence
  Description of Artificial Sequence: Synthetic oligonucleotide
  Antisense strand to SEQ ID NO: 943838
auagcgagaaacugucucc

SEQ ID NO: 943840 - RNA, 19 nt, Artificial Sequence
  Description of Artificial Sequence: Synthetic oligonucleotide
  Sense strand starting at position 3448 of SEQ ID NO: 913655
uggagacaguuucucgcua

SEQ ID NO: 943841 - RNA, 19 nt, Artificial Sequence
  Description of Artificial Sequence: Synthetic oligonucleotide
  Antisense strand to SEQ ID NO: 943840
uagcgagaaacugucucca

SEQ ID NO: 943842 - RNA, 19 nt, Artificial Sequence
  Description of Artificial Sequence: Synthetic oligonucleotide
  Sense strand starting at position 497 of SEQ ID NO: 913655
aguuuaacuuagccuuagu

SEQ ID NO: 943843 - RNA, 19 nt, Artificial Sequence
  Description of Artificial Sequence: Synthetic oligonucleotide
  Antisense strand to SEQ ID NO: 943842
acuaaggcuaaguuaaacu

SEQ ID NO: 943844 - RNA, 19 nt, Artificial Sequence
  Description of Artificial Sequence: Synthetic oligonucleotide
  Sense strand starting at position 1065 of SEQ ID NO: 913655
ggaagauaauuacauuccu

SEQ ID NO: 943845 - RNA, 19 nt, Artificial Sequence
  Description of Artificial Sequence: Synthetic oligonucleotide
  Antisense strand to SEQ ID NO: 943844
aggaauguaauuaucuucc

SEQ ID NO: 943846 - RNA, 19 nt, Artificial Sequence
  Description of Artificial Sequence: Synthetic oligonucleotide
  Sense strand starting at position 3609 of SEQ ID NO: 913655
aacuguuaaugugucuagu

SEQ ID NO: 943847 - RNA, 19 nt, Artificial Sequence
  Description of Artificial Sequence: Synthetic oligonucleotide
  Antisense strand to SEQ ID NO: 943846
acuagacacauuaacaguu

SEQ ID NO: 943848 - RNA, 19 nt, Artificial Sequence
  Description of Artificial Sequence: Synthetic oligonucleotide
  Sense strand starting at position 3094 of SEQ ID NO: 913655
agaucugaaugauaguaac

SEQ ID NO: 943849 - RNA, 19 nt, Artificial Sequence
  Description of Artificial Sequence: Synthetic oligonucleotide
  Antisense strand to SEQ ID NO: 943848
guuacuaucauucagaucu

SEQ ID NO: 943850 - RNA, 19 nt, Artificial Sequence
  Description of Artificial Sequence: Synthetic oligonucleotide
  Sense strand starting at position 3611 of SEQ ID NO: 913655
cuguuaaugugucuaguuu

SEQ ID NO: 943851 - RNA, 19 nt, Artificial Sequence
  Description of Artificial Sequence: Synthetic oligonucleotide
  Antisense strand to SEQ ID NO: 943850
aaacuagacacauuaacag

SEQ ID NO: 943852 - RNA, 19 nt, Artificial Sequence
  Description of Artificial Sequence: Synthetic oligonucleotide
  Sense strand starting at position 2385 of SEQ ID NO: 913655
guaggcuuuccuuguucua

SEQ ID NO: 943853 - RNA, 19 nt, Artificial Sequence
  Description of Artificial Sequence: Synthetic oligonucleotide
  Antisense strand to SEQ ID NO: 943852
uagaacaaggaaagccuac

SEQ ID NO: 943854 - RNA, 19 nt, Artificial Sequence
  Description of Artificial Sequence: Synthetic oligonucleotide
  Sense strand starting at position 742 of SEQ ID NO: 913655
cgaugauugcgcuacugca

SEQ ID NO: 943855 - RNA, 19 nt, Artificial Sequence
  Description of Artificial Sequence: Synthetic oligonucleotide
  Antisense strand to SEQ ID NO: 943854
ugcaguagcgcaaucaucg

SEQ ID NO: 943856 - RNA, 19 nt, Artificial Sequence
  Description of Artificial Sequence: Synthetic oligonucleotide
  Sense strand starting at position 3452 of SEQ ID NO: 913655
gacaguuucucgcuauguu

SEQ ID NO: 943857 - RNA, 19 nt, Artificial Sequence
  Description of Artificial Sequence: Synthetic oligonucleotide
  Antisense strand to SEQ ID NO: 943856
aacauagcgagaaacuguc

SEQ ID NO: 943858 - RNA, 19 nt, Artificial Sequence
  Description of Artificial Sequence: Synthetic oligonucleotide
  Sense strand starting at position 519 of SEQ ID NO: 913655
aaaguaccuucuggagaaa

SEQ ID NO: 943859 - RNA, 19 nt, Artificial Sequence
  Description of Artificial Sequence: Synthetic oligonucleotide
  Antisense strand to SEQ ID NO: 943858
uuucuccagaagguacuuu

SEQ ID NO: 943860 - RNA, 19 nt, Artificial Sequence
  Description of Artificial Sequence: Synthetic oligonucleotide
  Sense strand starting at position 1285 of SEQ ID NO: 913655
ccgugaagugggcgucaga

SEQ ID NO: 943861 - RNA, 19 nt, Artificial Sequence
  Description of Artificial Sequence: Synthetic oligonucleotide
  Antisense strand to SEQ ID NO: 943860
ucugacgcccacuucacgg

SEQ ID NO: 943862 - RNA, 19 nt, Artificial Sequence
  Description of Artificial Sequence: Synthetic oligonucleotide
  Sense strand starting at position 3643 of SEQ ID NO: 913655
gcagguguuuagaggcuga

SEQ ID NO: 943863 - RNA, 19 nt, Artificial Sequence
  Description of Artificial Sequence: Synthetic oligonucleotide
  Antisense strand to SEQ ID NO: 943862
ucagccucuaaacaccugc

SEQ ID NO: 943864 - RNA, 19 nt, Artificial Sequence
  Description of Artificial Sequence: Synthetic oligonucleotide
  Sense strand starting at position 3494 of SEQ ID NO: 913655
ggaguauauuuaggugugu

SEQ ID NO: 943865 - RNA, 19 nt, Artificial Sequence
  Description of Artificial Sequence: Synthetic oligonucleotide
  Antisense strand to SEQ ID NO: 943864
acacaccuaaauauacucc

SEQ ID NO: 943866 - RNA, 19 nt, Artificial Sequence
  Description of Artificial Sequence: Synthetic oligonucleotide
  Sense strand starting at position 453 of SEQ ID NO: 913655
augaucauaugucaucuuu

SEQ ID NO: 943867 - RNA, 19 nt, Artificial Sequence
  Description of Artificial Sequence: Synthetic oligonucleotide
  Antisense strand to SEQ ID NO: 943866
aaagaugacauaugaucau

SEQ ID NO: 943868 - RNA, 19 nt, Artificial Sequence
  Description of Artificial Sequence: Synthetic oligonucleotide
  Sense strand starting at position 3820 of SEQ ID NO: 913656
agguucuucccacaugaua

SEQ ID NO: 943869 - RNA, 19 nt, Artificial Sequence
  Description of Artificial Sequence: Synthetic oligonucleotide
  Antisense strand to SEQ ID NO: 943868
uaucaugugggaagaaccu

SEQ ID NO: 943870 - RNA, 19 nt, Artificial Sequence
  Description of Artificial Sequence: Synthetic oligonucleotide
  Sense strand starting at position 190 of SEQ ID NO: 913656
gcuagcaugucauuuggaa

SEQ ID NO: 943871 - RNA, 19 nt, Artificial Sequence
  Description of Artificial Sequence: Synthetic oligonucleotide
  Antisense strand to SEQ ID NO: 943870
uuccaaaugacaugcuagc

SEQ ID NO: 943872 - RNA, 19 nt, Artificial Sequence
  Description of Artificial Sequence: Synthetic oligonucleotide
  Sense strand starting at position 3687 of SEQ ID NO: 913656
agaauauacuugcuuaaga

SEQ ID NO: 943873 - RNA, 19 nt, Artificial Sequence
  Description of Artificial Sequence: Synthetic oligonucleotide
  Antisense strand to SEQ ID NO: 943872
ucuuaagcaaguauauucu

SEQ ID NO: 943874 - RNA, 19 nt, Artificial Sequence
  Description of Artificial Sequence: Synthetic oligonucleotide
  Sense strand starting at position 3391 of SEQ ID NO: 913656
gcuuuaaggacagaguuua

SEQ ID NO: 943875 - RNA, 19 nt, Artificial Sequence
  Description of Artificial Sequence: Synthetic oligonucleotide
  Antisense strand to SEQ ID NO: 943874
uaaacucuguccuuaaagc

SEQ ID NO: 943876 - RNA, 19 nt, Artificial Sequence
  Description of Artificial Sequence: Synthetic oligonucleotide
  Sense strand starting at position 3676 of SEQ ID NO: 913656
ugaggcugucuagaauaua

SEQ ID NO: 943877 - RNA, 19 nt, Artificial Sequence
  Description of Artificial Sequence: Synthetic oligonucleotide
  Antisense strand to SEQ ID NO: 943876
uauauucuagacagccuca

SEQ ID NO: 943878 - RNA, 19 nt, Artificial Sequence
  Description of Artificial Sequence: Synthetic oligonucleotide
  Sense strand starting at position 2545 of SEQ ID NO: 913656
ucaggaauguaacccugau

SEQ ID NO: 943879 - RNA, 19 nt, Artificial Sequence
  Description of Artificial Sequence: Synthetic oligonucleotide
  Antisense strand to SEQ ID NO: 943878
aucaggguuacauuccuga

SEQ ID NO: 943880 - RNA, 19 nt, Artificial Sequence
  Description of Artificial Sequence: Synthetic oligonucleotide
  Sense strand starting at position 500 of SEQ ID NO: 913656
gagauuguaccguauggaa

SEQ ID NO: 943881 - RNA, 19 nt, Artificial Sequence
  Description of Artificial Sequence: Synthetic oligonucleotide
  Antisense strand to SEQ ID NO: 943880
uuccauacgguacaaucuc

SEQ ID NO: 943882 - RNA, 19 nt, Artificial Sequence
  Description of Artificial Sequence: Synthetic oligonucleotide
  Sense strand starting at position 3088 of SEQ ID NO: 913656
guggaaaggauaugagucu

SEQ ID NO: 943883 - RNA, 19 nt, Artificial Sequence
  Description of Artificial Sequence: Synthetic oligonucleotide
  Antisense strand to SEQ ID NO: 943882
agacucauauccuuuccac

SEQ ID NO: 943884 - RNA, 19 nt, Artificial Sequence
  Description of Artificial Sequence: Synthetic oligonucleotide
  Sense strand starting at position 285 of SEQ ID NO: 913656
ugcagcagucaauaggaaa

SEQ ID NO: 943885 - RNA, 19 nt, Artificial Sequence
  Description of Artificial Sequence: Synthetic oligonucleotide
  Antisense strand to SEQ ID NO: 943884
uuuccuauugacugcugca

SEQ ID NO: 943886 - RNA, 19 nt, Artificial Sequence
  Description of Artificial Sequence: Synthetic oligonucleotide
  Sense strand starting at position 2796 of SEQ ID NO: 913656
cgccauuugaaugguucua

SEQ ID NO: 943887 - RNA, 19 nt, Artificial Sequence
  Description of Artificial Sequence: Synthetic oligonucleotide
  Antisense strand to SEQ ID NO: 943886
uagaaccauucaaauggcg

SEQ ID NO: 943888 - RNA, 19 nt, Artificial Sequence
  Description of Artificial Sequence: Synthetic oligonucleotide
  Sense strand starting at position 3117 of SEQ ID NO: 913656
aguuacaugaugugggaua

SEQ ID NO: 943889 - RNA, 19 nt, Artificial Sequence
  Description of Artificial Sequence: Synthetic oligonucleotide
  Antisense strand to SEQ ID NO: 943888
uaucccacaucauguaacu

SEQ ID NO: 943890 - RNA, 19 nt, Artificial Sequence
  Description of Artificial Sequence: Synthetic oligonucleotide
  Sense strand starting at position 2952 of SEQ ID NO: 913656
auggcuauugcugaaauau

SEQ ID NO: 943891 - RNA, 19 nt, Artificial Sequence
  Description of Artificial Sequence: Synthetic oligonucleotide
  Antisense strand to SEQ ID NO: 943890
auauuucagcaauagccau

SEQ ID NO: 943892 - RNA, 19 nt, Artificial Sequence
  Description of Artificial Sequence: Synthetic oligonucleotide
  Sense strand starting at position 3679 of SEQ ID NO: 913656
ggcugucuagaauauacuu

SEQ ID NO: 943893 - RNA, 19 nt, Artificial Sequence
  Description of Artificial Sequence: Synthetic oligonucleotide
  Antisense strand to SEQ ID NO: 943892
aaguauauucuagacagcc

SEQ ID NO: 943894 - RNA, 19 nt, Artificial Sequence
  Description of Artificial Sequence: Synthetic oligonucleotide
  Sense strand starting at position 144 of SEQ ID NO: 913656
ggaggaaucucccugccag

SEQ ID NO: 943895 - RNA, 19 nt, Artificial Sequence
  Description of Artificial Sequence: Synthetic oligonucleotide
  Antisense strand to SEQ ID NO: 943894
cuggcagggagauuccucc

SEQ ID NO: 943896 - RNA, 19 nt, Artificial Sequence
  Description of Artificial Sequence: Synthetic oligonucleotide
  Sense strand starting at position 3130 of SEQ ID NO: 913656
gggauagagucaguucauc

SEQ ID NO: 943897 - RNA, 19 nt, Artificial Sequence
  Description of Artificial Sequence: Synthetic oligonucleotide
  Antisense strand to SEQ ID NO: 943896
gaugaacugacucuauccc

SEQ ID NO: 943898 - RNA, 19 nt, Artificial Sequence
  Description of Artificial Sequence: Synthetic oligonucleotide
  Sense strand starting at position 1797 of SEQ ID NO: 913656
aggaaaucgacuugucacu

SEQ ID NO: 943899 - RNA, 19 nt, Artificial Sequence
  Description of Artificial Sequence: Synthetic oligonucleotide
  Antisense strand to SEQ ID NO: 943898
agugacaagucgauuuccu

SEQ ID NO: 943900 - RNA, 19 nt, Artificial Sequence
  Description of Artificial Sequence: Synthetic oligonucleotide
  Sense strand starting at position 2526 of SEQ ID NO: 913656
uuaggauguugacuuaagu

SEQ ID NO: 943901 - RNA, 19 nt, Artificial Sequence
  Description of Artificial Sequence: Synthetic oligonucleotide
  Antisense strand to SEQ ID NO: 943900
acuuaagucaacauccuaa

SEQ ID NO: 943902 - RNA, 19 nt, Artificial Sequence
  Description of Artificial Sequence: Synthetic oligonucleotide
  Sense strand starting at position 3815 of SEQ ID NO: 913656
acuauagguucuucccaca

SEQ ID NO: 943903 - RNA, 19 nt, Artificial Sequence
  Description of Artificial Sequence: Synthetic oligonucleotide
  Antisense strand to SEQ ID NO: 943902
ugugggaagaaccuauagu

SEQ ID NO: 943904 - RNA, 19 nt, Artificial Sequence
  Description of Artificial Sequence: Synthetic oligonucleotide
  Sense strand starting at position 1186 of SEQ ID NO: 913656
aagaguugucugcaaacga

SEQ ID NO: 943905 - RNA, 19 nt, Artificial Sequence
  Description of Artificial Sequence: Synthetic oligonucleotide
  Antisense strand to SEQ ID NO: 943904
ucguuugcagacaacucuu

SEQ ID NO: 943906 - RNA, 19 nt, Artificial Sequence
  Description of Artificial Sequence: Synthetic oligonucleotide
  Sense strand starting at position 2376 of SEQ ID NO: 913656
guugucacacuuugggaaa

SEQ ID NO: 943907 - RNA, 19 nt, Artificial Sequence
  Description of Artificial Sequence: Synthetic oligonucleotide
  Antisense strand to SEQ ID NO: 943906
uuucccaaagugugacaac

SEQ ID NO: 943908 - RNA, 19 nt, Artificial Sequence
  Description of Artificial Sequence: Synthetic oligonucleotide
  Sense strand starting at position 502 of SEQ ID NO: 913656
gauuguaccguauggaaga

SEQ ID NO: 943909 - RNA, 19 nt, Artificial Sequence
  Description of Artificial Sequence: Synthetic oligonucleotide
  Antisense strand to SEQ ID NO: 943908
ucuuccauacgguacaauc

SEQ ID NO: 943910 - RNA, 19 nt, Artificial Sequence
  Description of Artificial Sequence: Synthetic oligonucleotide
  Sense strand starting at position 2513 of SEQ ID NO: 913656
uuaguucuguaacuuagga

SEQ ID NO: 943911 - RNA, 19 nt, Artificial Sequence
  Description of Artificial Sequence: Synthetic oligonucleotide
  Antisense strand to SEQ ID NO: 943910
uccuaaguuacagaacuaa

SEQ ID NO: 943912 - RNA, 19 nt, Artificial Sequence
  Description of Artificial Sequence: Synthetic oligonucleotide
  Sense strand starting at position 523 of SEQ ID NO: 913656
cggaguguggccuauagga

SEQ ID NO: 943913 - RNA, 19 nt, Artificial Sequence
  Description of Artificial Sequence: Synthetic oligonucleotide
  Antisense strand to SEQ ID NO: 943912
uccuauaggccacacuccg

SEQ ID NO: 943914 - RNA, 19 nt, Artificial Sequence
  Description of Artificial Sequence: Synthetic oligonucleotide
  Sense strand starting at position 2795 of SEQ ID NO: 913656
gcgccauuugaaugguucu

SEQ ID NO: 943915 - RNA, 19 nt, Artificial Sequence
  Description of Artificial Sequence: Synthetic oligonucleotide
  Antisense strand to SEQ ID NO: 943914
agaaccauucaaauggcgc

SEQ ID NO: 943916 - RNA, 19 nt, Artificial Sequence
  Description of Artificial Sequence: Synthetic oligonucleotide
  Sense strand starting at position 1168 of SEQ ID NO: 913656
gcaaacuuccgcgaacaaa

SEQ ID NO: 943917 - RNA, 19 nt, Artificial Sequence
  Description of Artificial Sequence: Synthetic oligonucleotide
  Antisense strand to SEQ ID NO: 943916
uuuguucgcggaaguuugc

SEQ ID NO: 943918 - RNA, 19 nt, Artificial Sequence
  Description of Artificial Sequence: Synthetic oligonucleotide
  Sense strand starting at position 2787 of SEQ ID NO: 913656
uugugucugcgccauuuga

SEQ ID NO: 943919 - RNA, 19 nt, Artificial Sequence
  Description of Artificial Sequence: Synthetic oligonucleotide
  Antisense strand to SEQ ID NO: 943918
ucaaauggcgcagacacaa

SEQ ID NO: 943920 - RNA, 19 nt, Artificial Sequence
  Description of Artificial Sequence: Synthetic oligonucleotide
  Sense strand starting at position 3673 of SEQ ID NO: 913656
ucuugaggcugucuagaau

SEQ ID NO: 943921 - RNA, 19 nt, Artificial Sequence
  Description of Artificial Sequence: Synthetic oligonucleotide
  Antisense strand to SEQ ID NO: 943920
auucuagacagccucaaga

SEQ ID NO: 943922 - RNA, 19 nt, Artificial Sequence
  Description of Artificial Sequence: Synthetic oligonucleotide
  Sense strand starting at position 2510 of SEQ ID NO: 913656
uguuuaguucuguaacuua

SEQ ID NO: 943923 - RNA, 19 nt, Artificial Sequence
  Description of Artificial Sequence: Synthetic oligonucleotide
  Antisense strand to SEQ ID NO: 943922
uaaguuacagaacuaaaca

SEQ ID NO: 943924 - RNA, 19 nt, Artificial Sequence
  Description of Artificial Sequence: Synthetic oligonucleotide
  Sense strand starting at position 1808 of SEQ ID NO: 913656
uugucacuuccugaagugu

SEQ ID NO: 943925 - RNA, 19 nt, Artificial Sequence
  Description of Artificial Sequence: Synthetic oligonucleotide
  Antisense strand to SEQ ID NO: 943924
acacuucaggaagugacaa

SEQ ID NO: 943926 - RNA, 19 nt, Artificial Sequence
  Description of Artificial Sequence: Synthetic oligonucleotide
  Sense strand starting at position 2650 of SEQ ID NO: 913656
uuccuacugguguauguua

SEQ ID NO: 943927 - RNA, 19 nt, Artificial Sequence
  Description of Artificial Sequence: Synthetic oligonucleotide
  Antisense strand to SEQ ID NO: 943926
uaacauacaccaguaggaa

SEQ ID NO: 943928 - RNA, 19 nt, Artificial Sequence
  Description of Artificial Sequence: Synthetic oligonucleotide
  Sense strand starting at position 3057 of SEQ ID NO: 913656
ucugcugcaugauuagaau

SEQ ID NO: 943929 - RNA, 19 nt, Artificial Sequence
  Description of Artificial Sequence: Synthetic oligonucleotide
  Antisense strand to SEQ ID NO: 943928
auucuaaucaugcagcaga

SEQ ID NO: 943930 - RNA, 19 nt, Artificial Sequence
  Description of Artificial Sequence: Synthetic oligonucleotide
  Sense strand starting at position 1806 of SEQ ID NO: 913656
acuugucacuuccugaagu

SEQ ID NO: 943931 - RNA, 19 nt, Artificial Sequence
  Description of Artificial Sequence: Synthetic oligonucleotide
  Antisense strand to SEQ ID NO: 943930
acuucaggaagugacaagu

SEQ ID NO: 943932 - RNA, 19 nt, Artificial Sequence
  Description of Artificial Sequence: Synthetic oligonucleotide
  Sense strand starting at position 3333 of SEQ ID NO: 913656
aagagucaguguuucccua

SEQ ID NO: 943933 - RNA, 19 nt, Artificial Sequence
  Description of Artificial Sequence: Synthetic oligonucleotide
  Antisense strand to SEQ ID NO: 943932
uagggaaacacugacucuu

SEQ ID NO: 943934 - RNA, 19 nt, Artificial Sequence
  Description of Artificial Sequence: Synthetic oligonucleotide
  Sense strand starting at position 3335 of SEQ ID NO: 913656
gagucaguguuucccuaaa

SEQ ID NO: 943935 - RNA, 19 nt, Artificial Sequence
  Description of Artificial Sequence: Synthetic oligonucleotide
  Antisense strand to SEQ ID NO: 943934
uuuagggaaacacugacuc

SEQ ID NO: 943936 - RNA, 19 nt, Artificial Sequence
  Description of Artificial Sequence: Synthetic oligonucleotide
  Sense strand starting at position 3052 of SEQ ID NO: 913656
ugaguucugcugcaugauu

SEQ ID NO: 943937 - RNA, 19 nt, Artificial Sequence
  Description of Artificial Sequence: Synthetic oligonucleotide
  Antisense strand to SEQ ID NO: 943936
aaucaugcagcagaacuca

SEQ ID NO: 943938 - RNA, 19 nt, Artificial Sequence
  Description of Artificial Sequence: Synthetic oligonucleotide
  Sense strand starting at position 2368 of SEQ ID NO: 913656
cuuaaaguguugucacacu

SEQ ID NO: 943939 - RNA, 19 nt, Artificial Sequence
  Description of Artificial Sequence: Synthetic oligonucleotide
  Antisense strand to SEQ ID NO: 943938
agugugacaacacuuuaag

SEQ ID NO: 943940 - RNA, 19 nt, Artificial Sequence
  Description of Artificial Sequence: Synthetic oligonucleotide
  Sense strand starting at position 3888 of SEQ ID NO: 913656
gcuccauaguucuuuacua

SEQ ID NO: 943941 - RNA, 19 nt, Artificial Sequence
  Description of Artificial Sequence: Synthetic oligonucleotide
  Antisense strand to SEQ ID NO: 943940
uaguaaagaacuauggagc

SEQ ID NO: 943942 - RNA, 19 nt, Artificial Sequence
  Description of Artificial Sequence: Synthetic oligonucleotide
  Sense strand starting at position 2785 of SEQ ID NO: 913656
gauugugucugcgccauuu

SEQ ID NO: 943943 - RNA, 19 nt, Artificial Sequence
  Description of Artificial Sequence: Synthetic oligonucleotide
  Antisense strand to SEQ ID NO: 943942
aaauggcgcagacacaauc

SEQ ID NO: 943944 - RNA, 19 nt, Artificial Sequence
  Description of Artificial Sequence: Synthetic oligonucleotide
  Sense strand starting at position 2288 of SEQ ID NO: 913656
guuagaugccgagguucaa

SEQ ID NO: 943945 - RNA, 19 nt, Artificial Sequence
  Description of Artificial Sequence: Synthetic oligonucleotide
  Antisense strand to SEQ ID NO: 943944
uugaaccucggcaucuaac

SEQ ID NO: 943946 - RNA, 19 nt, Artificial Sequence
  Description of Artificial Sequence: Synthetic oligonucleotide
  Sense strand starting at position 2509 of SEQ ID NO: 913656
auguuuaguucuguaacuu

SEQ ID NO: 943947 - RNA, 19 nt, Artificial Sequence
  Description of Artificial Sequence: Synthetic oligonucleotide
  Antisense strand to SEQ ID NO: 943946
aaguuacagaacuaaacau

SEQ ID NO: 943948 - RNA, 19 nt, Artificial Sequence
  Description of Artificial Sequence: Synthetic oligonucleotide
  Sense strand starting at position 2981 of SEQ ID NO: 913657
aagagauuauuaucuggua

SEQ ID NO: 943949 - RNA, 19 nt, Artificial Sequence
  Description of Artificial Sequence: Synthetic oligonucleotide
  Antisense strand to SEQ ID NO: 943948
uaccagauaauaaucucuu

SEQ ID NO: 943950 - RNA, 19 nt, Artificial Sequence
  Description of Artificial Sequence: Synthetic oligonucleotide
  Sense strand starting at position 3234 of SEQ ID NO: 913657
ggucauggaagugauuacu

SEQ ID NO: 943951 - RNA, 19 nt, Artificial Sequence
  Description of Artificial Sequence: Synthetic oligonucleotide
  Antisense strand to SEQ ID NO: 943950
aguaaucacuuccaugacc

SEQ ID NO: 943952 - RNA, 19 nt, Artificial Sequence
  Description of Artificial Sequence: Synthetic oligonucleotide
  Sense strand starting at position 3252 of SEQ ID NO: 913657
uaaucuugccaguagaaag

SEQ ID NO: 943953 - RNA, 19 nt, Artificial Sequence
  Description of Artificial Sequence: Synthetic oligonucleotide
  Antisense strand to SEQ ID NO: 943952
cuuucuacuggcaagauua

SEQ ID NO: 943954 - RNA, 19 nt, Artificial Sequence
  Description of Artificial Sequence: Synthetic oligonucleotide
  Sense strand starting at position 2982 of SEQ ID NO: 913657
agagauuauuaucugguag

SEQ ID NO: 943955 - RNA, 19 nt, Artificial Sequence
  Description of Artificial Sequence: Synthetic oligonucleotide
  Antisense strand to SEQ ID NO: 943954
cuaccagauaauaaucucu

SEQ ID NO: 943956 - RNA, 19 nt, Artificial Sequence
  Description of Artificial Sequence: Synthetic oligonucleotide
  Sense strand starting at position 188 of SEQ ID NO: 913657
guccgauccguuguucaau

SEQ ID NO: 943957 - RNA, 19 nt, Artificial Sequence
  Description of Artificial Sequence: Synthetic oligonucleotide
  Antisense strand to SEQ ID NO: 943956
auugaacaacggaucggac

SEQ ID NO: 943958 - RNA, 19 nt, Artificial Sequence
  Description of Artificial Sequence: Synthetic oligonucleotide
  Sense strand starting at position 702 of SEQ ID NO: 913657
ucucuaaggcgggaauaua

SEQ ID NO: 943959 - RNA, 19 nt, Artificial Sequence
  Description of Artificial Sequence: Synthetic oligonucleotide
  Antisense strand to SEQ ID NO: 943958
uauauucccgccuuagaga

SEQ ID NO: 943960 - RNA, 19 nt, Artificial Sequence
  Description of Artificial Sequence: Synthetic oligonucleotide
  Sense strand starting at position 2879 of SEQ ID NO: 913657
agggcugugaaacaaugua

SEQ ID NO: 943961 - RNA, 19 nt, Artificial Sequence
  Description of Artificial Sequence: Synthetic oligonucleotide
  Antisense strand to SEQ ID NO: 943960
uacauuguuucacagcccu

SEQ ID NO: 943962 - RNA, 19 nt, Artificial Sequence
  Description of Artificial Sequence: Synthetic oligonucleotide
  Sense strand starting at position 130 of SEQ ID NO: 913657
ucaggaguucuugagcaag

SEQ ID NO: 943963 - RNA, 19 nt, Artificial Sequence
  Description of Artificial Sequence: Synthetic oligonucleotide
  Antisense strand to SEQ ID NO: 943962
cuugcucaagaacuccuga

SEQ ID NO: 943964 - RNA, 19 nt, Artificial Sequence
  Description of Artificial Sequence: Synthetic oligonucleotide
  Sense strand starting at position 2119 of SEQ ID NO: 913657
ugaggacacugcuccugaa

SEQ ID NO: 943965 - RNA, 19 nt, Artificial Sequence
  Description of Artificial Sequence: Synthetic oligonucleotide
  Antisense strand to SEQ ID NO: 943964
uucaggagcaguguccuca

SEQ ID NO: 943966 - RNA, 19 nt, Artificial Sequence
  Description of Artificial Sequence: Synthetic oligonucleotide
  Sense strand starting at position 3233 of SEQ ID NO: 913657
gggucauggaagugauuac

SEQ ID NO: 943967 - RNA, 19 nt, Artificial Sequence
  Description of Artificial Sequence: Synthetic oligonucleotide
  Antisense strand to SEQ ID NO: 943966
guaaucacuuccaugaccc

SEQ ID NO: 943968 - RNA, 19 nt, Artificial Sequence
  Description of Artificial Sequence: Synthetic oligonucleotide
  Sense strand starting at position 1047 of SEQ ID NO: 913657
ugcauccuucuauaaaggu

SEQ ID NO: 943969 - RNA, 19 nt, Artificial Sequence
  Description of Artificial Sequence: Synthetic oligonucleotide
  Antisense strand to SEQ ID NO: 943968
accuuuauagaaggaugca

SEQ ID NO: 943970 - RNA, 19 nt, Artificial Sequence
  Description of Artificial Sequence: Synthetic oligonucleotide
  Sense strand starting at position 3141 of SEQ ID NO: 913657
gguauucaggucuggagau

SEQ ID NO: 943971 - RNA, 19 nt, Artificial Sequence
  Description of Artificial Sequence: Synthetic oligonucleotide
  Antisense strand to SEQ ID NO: 943970
aucuccagaccugaauacc

SEQ ID NO: 943972 - RNA, 19 nt, Artificial Sequence
  Description of Artificial Sequence: Synthetic oligonucleotide
  Sense strand starting at position 3462 of SEQ ID NO: 913657
gguuuauguguggauauug

SEQ ID NO: 943973 - RNA, 19 nt, Artificial Sequence
  Description of Artificial Sequence: Synthetic oligonucleotide
  Antisense strand to SEQ ID NO: 943972
caauauccacacauaaacc

SEQ ID NO: 943974 - RNA, 19 nt, Artificial Sequence
  Description of Artificial Sequence: Synthetic oligonucleotide
  Sense strand starting at position 3459 of SEQ ID NO: 913657
gaagguuuauguguggaua

SEQ ID NO: 943975 - RNA, 19 nt, Artificial Sequence
  Description of Artificial Sequence: Synthetic oligonucleotide
  Antisense strand to SEQ ID NO: 943974
uauccacacauaaaccuuc

SEQ ID NO: 943976 - RNA, 19 nt, Artificial Sequence
  Description of Artificial Sequence: Synthetic oligonucleotide
  Sense strand starting at position 701 of SEQ ID NO: 913657
uucucuaaggcgggaauau

SEQ ID NO: 943977 - RNA, 19 nt, Artificial Sequence
  Description of Artificial Sequence: Synthetic oligonucleotide
  Antisense strand to SEQ ID NO: 943976
auauucccgccuuagagaa

SEQ ID NO: 943978 - RNA, 19 nt, Artificial Sequence
  Description of Artificial Sequence: Synthetic oligonucleotide
  Sense strand starting at position 133 of SEQ ID NO: 913657
ggaguucuugagcaagccu

SEQ ID NO: 943979 - RNA, 19 nt, Artificial Sequence
  Description of Artificial Sequence: Synthetic oligonucleotide
  Antisense strand to SEQ ID NO: 943978
aggcuugcucaagaacucc

SEQ ID NO: 943980 - RNA, 19 nt, Artificial Sequence
  Description of Artificial Sequence: Synthetic oligonucleotide
  Sense strand starting at position 3460 of SEQ ID NO: 913657
aagguuuauguguggauau

SEQ ID NO: 943981 - RNA, 19 nt, Artificial Sequence
  Description of Artificial Sequence: Synthetic oligonucleotide
  Antisense strand to SEQ ID NO: 943980
auauccacacauaaaccuu

SEQ ID NO: 943982 - RNA, 19 nt, Artificial Sequence
  Description of Artificial Sequence: Synthetic oligonucleotide
  Sense strand starting at position 1023 of SEQ ID NO: 913657
gacgacuugguuugagagu

SEQ ID NO: 943983 - RNA, 19 nt, Artificial Sequence
  Description of Artificial Sequence: Synthetic oligonucleotide
  Antisense strand to SEQ ID NO: 943982
acucucaaaccaagucguc

SEQ ID NO: 943984 - RNA, 19 nt, Artificial Sequence
  Description of Artificial Sequence: Synthetic oligonucleotide
  Sense strand starting at position 3638 of SEQ ID NO: 913657
gcaguacuccuguauccag

SEQ ID NO: 943985 - RNA, 19 nt, Artificial Sequence
  Description of Artificial Sequence: Synthetic oligonucleotide
  Antisense strand to SEQ ID NO: 943984
cuggauacaggaguacugc

SEQ ID NO: 943986 - RNA, 19 nt, Artificial Sequence
  Description of Artificial Sequence: Synthetic oligonucleotide
  Sense strand starting at position 3248 of SEQ ID NO: 913657
uuacuaaucuugccaguag

SEQ ID NO: 943987 - RNA, 19 nt, Artificial Sequence
  Description of Artificial Sequence: Synthetic oligonucleotide
  Antisense strand to SEQ ID NO: 943986
cuacuggcaagauuaguaa

SEQ ID NO: 943988 - RNA, 19 nt, Artificial Sequence
  Description of Artificial Sequence: Synthetic oligonucleotide
  Sense strand starting at position 2874 of SEQ ID NO: 913657
uuuguagggcugugaaaca

SEQ ID NO: 943989 - RNA, 19 nt, Artificial Sequence
  Description of Artificial Sequence: Synthetic oligonucleotide
  Antisense strand to SEQ ID NO: 943988
uguuucacagcccuacaaa

SEQ ID NO: 943990 - RNA, 19 nt, Artificial Sequence
  Description of Artificial Sequence: Synthetic oligonucleotide
  Sense strand starting at position 1219 of SEQ ID NO: 913657
cguguuuagaucugauaac

SEQ ID NO: 943991 - RNA, 19 nt, Artificial Sequence
  Description of Artificial Sequence: Synthetic oligonucleotide
  Antisense strand to SEQ ID NO: 943990
guuaucagaucuaaacacg

SEQ ID NO: 943992 - RNA, 19 nt, Artificial Sequence
  Description of Artificial Sequence: Synthetic oligonucleotide
  Sense strand starting at position 2968 of SEQ ID NO: 913657
cuuugaggaucacaagaga

SEQ ID NO: 943993 - RNA, 19 nt, Artificial Sequence
  Description of Artificial Sequence: Synthetic oligonucleotide
  Antisense strand to SEQ ID NO: 943992
ucucuugugauccucaaag

SEQ ID NO: 943994 - RNA, 19 nt, Artificial Sequence
  Description of Artificial Sequence: Synthetic oligonucleotide
  Sense strand starting at position 3875 of SEQ ID NO: 913657
gcaggucucuaugcuaaag

SEQ ID NO: 943995 - RNA, 19 nt, Artificial Sequence
  Description of Artificial Sequence: Synthetic oligonucleotide
  Antisense strand to SEQ ID NO: 943994
cuuuagcauagagaccugc

SEQ ID NO: 943996 - RNA, 19 nt, Artificial Sequence
  Description of Artificial Sequence: Synthetic oligonucleotide
  Sense strand starting at position 3872 of SEQ ID NO: 913657
agugcaggucucuaugcua

SEQ ID NO: 943997 - RNA, 19 nt, Artificial Sequence
  Description of Artificial Sequence: Synthetic oligonucleotide
  Antisense strand to SEQ ID NO: 943996
uagcauagagaccugcacu

SEQ ID NO: 943998 - RNA, 19 nt, Artificial Sequence
  Description of Artificial Sequence: Synthetic oligonucleotide
  Sense strand starting at position 33 of SEQ ID NO: 913657
cauucuuugcugggucauu

SEQ ID NO: 943999 - RNA, 19 nt, Artificial Sequence
  Description of Artificial Sequence: Synthetic oligonucleotide
  Antisense strand to SEQ ID NO: 943998
aaugacccagcaaagaaug

SEQ ID NO: 944000 - RNA, 19 nt, Artificial Sequence
  Description of Artificial Sequence: Synthetic oligonucleotide
  Sense strand starting at position 1212 of SEQ ID NO: 913657
uagagcucguguuuagauc

SEQ ID NO: 944001 - RNA, 19 nt, Artificial Sequence
  Description of Artificial Sequence: Synthetic oligonucleotide
  Antisense strand to SEQ ID NO: 944000
gaucuaaacacgagcucua

SEQ ID NO: 944002 - RNA, 19 nt, Artificial Sequence
  Description of Artificial Sequence: Synthetic oligonucleotide
  Sense strand starting at position 3645 of SEQ ID NO: 913657
uccuguauccagugguucu

SEQ ID NO: 944003 - RNA, 19 nt, Artificial Sequence
  Description of Artificial Sequence: Synthetic oligonucleotide
  Antisense strand to SEQ ID NO: 944002
agaaccacuggauacagga

SEQ ID NO: 944004 - RNA, 19 nt, Artificial Sequence
  Description of Artificial Sequence: Synthetic oligonucleotide
  Sense strand starting at position 3240 of SEQ ID NO: 913657
ggaagugauuacuaaucuu

SEQ ID NO: 944005 - RNA, 19 nt, Artificial Sequence
  Description of Artificial Sequence: Synthetic oligonucleotide
  Antisense strand to SEQ ID NO: 944004
aagauuaguaaucacuucc

SEQ ID NO: 944006 - RNA, 19 nt, Artificial Sequence
  Description of Artificial Sequence: Synthetic oligonucleotide
  Sense strand starting at position 3022 of SEQ ID NO: 913657
aggagaguaucauagguuc

SEQ ID NO: 944007 - RNA, 19 nt, Artificial Sequence
  Description of Artificial Sequence: Synthetic oligonucleotide
  Antisense strand to SEQ ID NO: 944006
gaaccuaugauacucuccu

SEQ ID NO: 944008 - RNA, 19 nt, Artificial Sequence
  Description of Artificial Sequence: Synthetic oligonucleotide
  Sense strand starting at position 3020 of SEQ ID NO: 913657
ccaggagaguaucauaggu

SEQ ID NO: 944009 - RNA, 19 nt, Artificial Sequence
  Description of Artificial Sequence: Synthetic oligonucleotide
  Antisense strand to SEQ ID NO: 944008
accuaugauacucuccugg

SEQ ID NO: 944010 - RNA, 19 nt, Artificial Sequence
  Description of Artificial Sequence: Synthetic oligonucleotide
  Sense strand starting at position 142 of SEQ ID NO: 913657
gagcaagccucugcuuagu

SEQ ID NO: 944011 - RNA, 19 nt, Artificial Sequence
  Description of Artificial Sequence: Synthetic oligonucleotide
  Antisense strand to SEQ ID NO: 944010
acuaagcagaggcuugcuc

SEQ ID NO: 944012 - RNA, 19 nt, Artificial Sequence
  Description of Artificial Sequence: Synthetic oligonucleotide
  Sense strand starting at position 3308 of SEQ ID NO: 913657
uuacuuuccucuuagggaa

SEQ ID NO: 944013 - RNA, 19 nt, Artificial Sequence
  Description of Artificial Sequence: Synthetic oligonucleotide
  Antisense strand to SEQ ID NO: 944012
uucccuaagaggaaaguaa

SEQ ID NO: 944014 - RNA, 19 nt, Artificial Sequence
  Description of Artificial Sequence: Synthetic oligonucleotide
  Sense strand starting at position 2773 of SEQ ID NO: 913657
ggaucuuucucgcuggcuu

SEQ ID NO: 944015 - RNA, 19 nt, Artificial Sequence
  Description of Artificial Sequence: Synthetic oligonucleotide
  Antisense strand to SEQ ID NO: 944014
aagccagcgagaaagaucc

SEQ ID NO: 944016 - RNA, 19 nt, Artificial Sequence
  Description of Artificial Sequence: Synthetic oligonucleotide
  Sense strand starting at position 762 of SEQ ID NO: 913657
guucuuguaugcuaaauuu

SEQ ID NO: 944017 - RNA, 19 nt, Artificial Sequence
  Description of Artificial Sequence: Synthetic oligonucleotide
  Antisense strand to SEQ ID NO: 944016
aaauuuagcauacaagaac

SEQ ID NO: 944018 - RNA, 19 nt, Artificial Sequence
  Description of Artificial Sequence: Synthetic oligonucleotide
  Sense strand starting at position 1207 of SEQ ID NO: 913657
uaaguuagagcucguguuu

SEQ ID NO: 944019 - RNA, 19 nt, Artificial Sequence
  Description of Artificial Sequence: Synthetic oligonucleotide
  Antisense strand to SEQ ID NO: 944018
aaacacgagcucuaacuua

SEQ ID NO: 944020 - RNA, 19 nt, Artificial Sequence
  Description of Artificial Sequence: Synthetic oligonucleotide
  Sense strand starting at position 1459 of SEQ ID NO: 913657
cagccucggacguguuuaa

SEQ ID NO: 944021 - RNA, 19 nt, Artificial Sequence
  Description of Artificial Sequence: Synthetic oligonucleotide
  Antisense strand to SEQ ID NO: 944020
uuaaacacguccgaggcug

SEQ ID NO: 944022 - RNA, 19 nt, Artificial Sequence
  Description of Artificial Sequence: Synthetic oligonucleotide
  Sense strand starting at position 759 of SEQ ID NO: 913657
agcguucuuguaugcuaaa

SEQ ID NO: 944023 - RNA, 19 nt, Artificial Sequence
  Description of Artificial Sequence: Synthetic oligonucleotide
  Antisense strand to SEQ ID NO: 944022
uuuagcauacaagaacgcu

SEQ ID NO: 944024 - RNA, 19 nt, Artificial Sequence
  Description of Artificial Sequence: Synthetic oligonucleotide
  Sense strand starting at position 144 of SEQ ID NO: 913657
gcaagccucugcuuaguuu

SEQ ID NO: 944025 - RNA, 19 nt, Artificial Sequence
  Description of Artificial Sequence: Synthetic oligonucleotide
  Antisense strand to SEQ ID NO: 944024
aaacuaagcagaggcuugc

SEQ ID NO: 944026 - RNA, 19 nt, Artificial Sequence
  Description of Artificial Sequence: Synthetic oligonucleotide
  Sense strand starting at position 760 of SEQ ID NO: 913657
gcguucuuguaugcuaaau

SEQ ID NO: 944027 - RNA, 19 nt, Artificial Sequence
  Description of Artificial Sequence: Synthetic oligonucleotide
  Antisense strand to SEQ ID NO: 944026
auuuagcauacaagaacgc

SEQ ID NO: 944028 - RNA, 19 nt, Artificial Sequence
  Description of Artificial Sequence: Synthetic oligonucleotide
  Sense strand starting at position 821 of SEQ ID NO: 913658
gggagugcaagcuaagaaa

SEQ ID NO: 944029 - RNA, 19 nt, Artificial Sequence
  Description of Artificial Sequence: Synthetic oligonucleotide
  Antisense strand to SEQ ID NO: 944028
uuucuuagcuugcacuccc

SEQ ID NO: 944030 - RNA, 19 nt, Artificial Sequence
  Description of Artificial Sequence: Synthetic oligonucleotide
  Sense strand starting at position 1078 of SEQ ID NO: 913658
acuuauuuccuacgucuga

SEQ ID NO: 944031 - RNA, 19 nt, Artificial Sequence
  Description of Artificial Sequence: Synthetic oligonucleotide
  Antisense strand to SEQ ID NO: 944030
ucagacguaggaaauaagu

SEQ ID NO: 944032 - RNA, 19 nt, Artificial Sequence
  Description of Artificial Sequence: Synthetic oligonucleotide
  Sense strand starting at position 1071 of SEQ ID NO: 913658
ggugcugacuuauuuccua

SEQ ID NO: 944033 - RNA, 19 nt, Artificial Sequence
  Description of Artificial Sequence: Synthetic oligonucleotide
  Antisense strand to SEQ ID NO: 944032
uaggaaauaagucagcacc

SEQ ID NO: 944034 - RNA, 19 nt, Artificial Sequence
  Description of Artificial Sequence: Synthetic oligonucleotide
  Sense strand starting at position 2881 of SEQ ID NO: 913658
ucaaaucuagguuagguua

SEQ ID NO: 944035 - RNA, 19 nt, Artificial Sequence
  Description of Artificial Sequence: Synthetic oligonucleotide
  Antisense strand to SEQ ID NO: 944034
uaaccuaaccuagauuuga

SEQ ID NO: 944036 - RNA, 19 nt, Artificial Sequence
  Description of Artificial Sequence: Synthetic oligonucleotide
  Sense strand starting at position 352 of SEQ ID NO: 913658
ugguguaaucuggauauca

SEQ ID NO: 944037 - RNA, 19 nt, Artificial Sequence
  Description of Artificial Sequence: Synthetic oligonucleotide
  Antisense strand to SEQ ID NO: 944036
ugauauccagauuacacca

SEQ ID NO: 944038 - RNA, 19 nt, Artificial Sequence
  Description of Artificial Sequence: Synthetic oligonucleotide
  Sense strand starting at position 3447 of SEQ ID NO: 913658
ggcaaagaugguuaguuaa

SEQ ID NO: 944039 - RNA, 19 nt, Artificial Sequence
  Description of Artificial Sequence: Synthetic oligonucleotide
  Antisense strand to SEQ ID NO: 944038
uuaacuaaccaucuuugcc

SEQ ID NO: 944040 - RNA, 19 nt, Artificial Sequence
  Description of Artificial Sequence: Synthetic oligonucleotide
  Sense strand starting at position 3552 of SEQ ID NO: 913658
ugcccacguacgucuaauu

SEQ ID NO: 944041 - RNA, 19 nt, Artificial Sequence
  Description of Artificial Sequence: Synthetic oligonucleotide
  Antisense strand to SEQ ID NO: 944040
aauuagacguacgugggca

SEQ ID NO: 944042 - RNA, 19 nt, Artificial Sequence
  Description of Artificial Sequence: Synthetic oligonucleotide
  Sense strand starting at position 3449 of SEQ ID NO: 913658
caaagaugguuaguuaaua

SEQ ID NO: 944043 - RNA, 19 nt, Artificial Sequence
  Description of Artificial Sequence: Synthetic oligonucleotide
  Antisense strand to SEQ ID NO: 944042
uauuaacuaaccaucuuug

SEQ ID NO: 944044 - RNA, 19 nt, Artificial Sequence
  Description of Artificial Sequence: Synthetic oligonucleotide
  Sense strand starting at position 2537 of SEQ ID NO: 913658
cuuguaauucuuucgugcu

SEQ ID NO: 944045 - RNA, 19 nt, Artificial Sequence
  Description of Artificial Sequence: Synthetic oligonucleotide
  Antisense strand to SEQ ID NO: 944044
agcacgaaagaauuacaag

SEQ ID NO: 944046 - RNA, 19 nt, Artificial Sequence
  Description of Artificial Sequence: Synthetic oligonucleotide
  Sense strand starting at position 3340 of SEQ ID NO: 913658
guggaucuuccuuacuuaa

SEQ ID NO: 944047 - RNA, 19 nt, Artificial Sequence
  Description of Artificial Sequence: Synthetic oligonucleotide
  Antisense strand to SEQ ID NO: 944046
uuaaguaaggaagauccac

SEQ ID NO: 944048 - RNA, 19 nt, Artificial Sequence
  Description of Artificial Sequence: Synthetic oligonucleotide
  Sense strand starting at position 2492 of SEQ ID NO: 913658
cuucguuacucauuauuuc

SEQ ID NO: 944049 - RNA, 19 nt, Artificial Sequence
  Description of Artificial Sequence: Synthetic oligonucleotide
  Antisense strand to SEQ ID NO: 944048
gaaauaaugaguaacgaag

SEQ ID NO: 944050 - RNA, 19 nt, Artificial Sequence
  Description of Artificial Sequence: Synthetic oligonucleotide
  Sense strand starting at position 3718 of SEQ ID NO: 913658
aggguuggguaauuauaua

SEQ ID NO: 944051 - RNA, 19 nt, Artificial Sequence
  Description of Artificial Sequence: Synthetic oligonucleotide
  Antisense strand to SEQ ID NO: 944050
uauauaauuacccaacccu

SEQ ID NO: 944052 - RNA, 19 nt, Artificial Sequence
  Description of Artificial Sequence: Synthetic oligonucleotide
  Sense strand starting at position 398 of SEQ ID NO: 913658
uggaauuagaucugaguuc

SEQ ID NO: 944053 - RNA, 19 nt, Artificial Sequence
  Description of Artificial Sequence: Synthetic oligonucleotide
  Antisense strand to SEQ ID NO: 944052
gaacucagaucuaauucca

SEQ ID NO: 944054 - RNA, 19 nt, Artificial Sequence
  Description of Artificial Sequence: Synthetic oligonucleotide
  Sense strand starting at position 3376 of SEQ ID NO: 913658
cagugagaugagugauuau

SEQ ID NO: 944055 - RNA, 19 nt, Artificial Sequence
  Description of Artificial Sequence: Synthetic oligonucleotide
  Antisense strand to SEQ ID NO: 944054
auaaucacucaucucacug

SEQ ID NO: 944056 - RNA, 19 nt, Artificial Sequence
  Description of Artificial Sequence: Synthetic oligonucleotide
  Sense strand starting at position 537 of SEQ ID NO: 913658
ugagaauccgcggagauca

SEQ ID NO: 944057 - RNA, 19 nt, Artificial Sequence
  Description of Artificial Sequence: Synthetic oligonucleotide
  Antisense strand to SEQ ID NO: 944056
ugaucuccgcggauucuca

SEQ ID NO: 944058 - RNA, 19 nt, Artificial Sequence
  Description of Artificial Sequence: Synthetic oligonucleotide
  Sense strand starting at position 3860 of SEQ ID NO: 913658
cagcauauuccugagaguc

SEQ ID NO: 944059 - RNA, 19 nt, Artificial Sequence
  Description of Artificial Sequence: Synthetic oligonucleotide
  Antisense strand to SEQ ID NO: 944058
gacucucaggaauaugcug

SEQ ID NO: 944060 - RNA, 19 nt, Artificial Sequence
  Description of Artificial Sequence: Synthetic oligonucleotide
  Sense strand starting at position 445 of SEQ ID NO: 913658
gugaucuuggcugaauuac

SEQ ID NO: 944061 - RNA, 19 nt, Artificial Sequence
  Description of Artificial Sequence: Synthetic oligonucleotide
  Antisense strand to SEQ ID NO: 944060
guaauucagccaagaucac

SEQ ID NO: 944062 - RNA, 19 nt, Artificial Sequence
  Description of Artificial Sequence: Synthetic oligonucleotide
  Sense strand starting at position 3711 of SEQ ID NO: 913658
augucaaaggguuggguaa

SEQ ID NO: 944063 - RNA, 19 nt, Artificial Sequence
  Description of Artificial Sequence: Synthetic oligonucleotide
  Antisense strand to SEQ ID NO: 944062
uuacccaacccuuugacau

SEQ ID NO: 944064 - RNA, 19 nt, Artificial Sequence
  Description of Artificial Sequence: Synthetic oligonucleotide
  Sense strand starting at position 3367 of SEQ ID NO: 913658
auuauagcccagugagaug

SEQ ID NO: 944065 - RNA, 19 nt, Artificial Sequence
  Description of Artificial Sequence: Synthetic oligonucleotide
  Antisense strand to SEQ ID NO: 944064
caucucacugggcuauaau

SEQ ID NO: 944066 - RNA, 19 nt, Artificial Sequence
  Description of Artificial Sequence: Synthetic oligonucleotide
  Sense strand starting at position 3493 of SEQ ID NO: 913658
agauauucuugcucccaag

SEQ ID NO: 944067 - RNA, 19 nt, Artificial Sequence
  Description of Artificial Sequence: Synthetic oligonucleotide
  Antisense strand to SEQ ID NO: 944066
cuugggagcaagaauaucu

SEQ ID NO: 944068 - RNA, 19 nt, Artificial Sequence
  Description of Artificial Sequence: Synthetic oligonucleotide
  Sense strand starting at position 1113 of SEQ ID NO: 913658
agcaauaucuguucugaag

SEQ ID NO: 944069 - RNA, 19 nt, Artificial Sequence
  Description of Artificial Sequence: Synthetic oligonucleotide
  Antisense strand to SEQ ID NO: 944068
cuucagaacagauauugcu

SEQ ID NO: 944070 - RNA, 19 nt, Artificial Sequence
  Description of Artificial Sequence: Synthetic oligonucleotide
  Sense strand starting at position 2879 of SEQ ID NO: 913658
ccucaaaucuagguuaggu

SEQ ID NO: 944071 - RNA, 19 nt, Artificial Sequence
  Description of Artificial Sequence: Synthetic oligonucleotide
  Antisense strand to SEQ ID NO: 944070
accuaaccuagauuugagg

SEQ ID NO: 944072 - RNA, 19 nt, Artificial Sequence
  Description of Artificial Sequence: Synthetic oligonucleotide
  Sense strand starting at position 3712 of SEQ ID NO: 913658
ugucaaaggguuggguaau

SEQ ID NO: 944073 - RNA, 19 nt, Artificial Sequence
  Description of Artificial Sequence: Synthetic oligonucleotide
  Antisense strand to SEQ ID NO: 944072
auuacccaacccuuugaca

SEQ ID NO: 944074 - RNA, 19 nt, Artificial Sequence
  Description of Artificial Sequence: Synthetic oligonucleotide
  Sense strand starting at position 3106 of SEQ ID NO: 913658
gggcauucucuguauuauc

SEQ ID NO: 944075 - RNA, 19 nt, Artificial Sequence
  Description of Artificial Sequence: Synthetic oligonucleotide
  Antisense strand to SEQ ID NO: 944074
gauaauacagagaaugccc

SEQ ID NO: 944076 - RNA, 19 nt, Artificial Sequence
  Description of Artificial Sequence: Synthetic oligonucleotide
  Sense strand starting at position 350 of SEQ ID NO: 913658
cuugguguaaucuggauau

SEQ ID NO: 944077 - RNA, 19 nt, Artificial Sequence
  Description of Artificial Sequence: Synthetic oligonucleotide
  Antisense strand to SEQ ID NO: 944076
auauccagauuacaccaag

SEQ ID NO: 944078 - RNA, 19 nt, Artificial Sequence
  Description of Artificial Sequence: Synthetic oligonucleotide
  Sense strand starting at position 526 of SEQ ID NO: 913658
cauggcucucgugagaauc

SEQ ID NO: 944079 - RNA, 19 nt, Artificial Sequence
  Description of Artificial Sequence: Synthetic oligonucleotide
  Antisense strand to SEQ ID NO: 944078
gauucucacgagagccaug

SEQ ID NO: 944080 - RNA, 19 nt, Artificial Sequence
  Description of Artificial Sequence: Synthetic oligonucleotide
  Sense strand starting at position 2233 of SEQ ID NO: 913658
ggcuaauugcuggagucac

SEQ ID NO: 944081 - RNA, 19 nt, Artificial Sequence
  Description of Artificial Sequence: Synthetic oligonucleotide
  Antisense strand to SEQ ID NO: 944080
gugacuccagcaauuagcc

SEQ ID NO: 944082 - RNA, 19 nt, Artificial Sequence
  Description of Artificial Sequence: Synthetic oligonucleotide
  Sense strand starting at position 3339 of SEQ ID NO: 913658
uguggaucuuccuuacuua

SEQ ID NO: 944083 - RNA, 19 nt, Artificial Sequence
  Description of Artificial Sequence: Synthetic oligonucleotide
  Antisense strand to SEQ ID NO: 944082
uaaguaaggaagauccaca

SEQ ID NO: 944084 - RNA, 19 nt, Artificial Sequence
  Description of Artificial Sequence: Synthetic oligonucleotide
  Sense strand starting at position 1111 of SEQ ID NO: 913658
ugagcaauaucuguucuga

SEQ ID NO: 944085 - RNA, 19 nt, Artificial Sequence
  Description of Artificial Sequence: Synthetic oligonucleotide
  Antisense strand to SEQ ID NO: 944084
ucagaacagauauugcuca

SEQ ID NO: 944086 - RNA, 19 nt, Artificial Sequence
  Description of Artificial Sequence: Synthetic oligonucleotide
  Sense strand starting at position 2574 of SEQ ID NO: 913658
agucacuauugcuuuggaa

SEQ ID NO: 944087 - RNA, 19 nt, Artificial Sequence
  Description of Artificial Sequence: Synthetic oligonucleotide
  Antisense strand to SEQ ID NO: 944086
uuccaaagcaauagugacu

SEQ ID NO: 944088 - RNA, 19 nt, Artificial Sequence
  Description of Artificial Sequence: Synthetic oligonucleotide
  Sense strand starting at position 2150 of SEQ ID NO: 913658
guaguucaaccugggaagu

SEQ ID NO: 944089 - RNA, 19 nt, Artificial Sequence
  Description of Artificial Sequence: Synthetic oligonucleotide
  Antisense strand to SEQ ID NO: 944088
acuucccagguugaacuac

SEQ ID NO: 944090 - RNA, 19 nt, Artificial Sequence
  Description of Artificial Sequence: Synthetic oligonucleotide
  Sense strand starting at position 2222 of SEQ ID NO: 913658
acaggagccuuggcuaauu

SEQ ID NO: 944091 - RNA, 19 nt, Artificial Sequence
  Description of Artificial Sequence: Synthetic oligonucleotide
  Antisense strand to SEQ ID NO: 944090
aauuagccaaggcuccugu

SEQ ID NO: 944092 - RNA, 19 nt, Artificial Sequence
  Description of Artificial Sequence: Synthetic oligonucleotide
  Sense strand starting at position 2606 of SEQ ID NO: 913658
uuagguaguuuagcaugaa

SEQ ID NO: 944093 - RNA, 19 nt, Artificial Sequence
  Description of Artificial Sequence: Synthetic oligonucleotide
  Antisense strand to SEQ ID NO: 944092
uucaugcuaaacuaccuaa

SEQ ID NO: 944094 - RNA, 19 nt, Artificial Sequence
  Description of Artificial Sequence: Synthetic oligonucleotide
  Sense strand starting at position 3298 of SEQ ID NO: 913658
aguaucucuugagugugaa

SEQ ID NO: 944095 - RNA, 19 nt, Artificial Sequence
  Description of Artificial Sequence: Synthetic oligonucleotide
  Antisense strand to SEQ ID NO: 944094
uucacacucaagagauacu

SEQ ID NO: 944096 - RNA, 19 nt, Artificial Sequence
  Description of Artificial Sequence: Synthetic oligonucleotide
  Sense strand starting at position 3563 of SEQ ID NO: 913658
gucuaauuauccucaaguu

SEQ ID NO: 944097 - RNA, 19 nt, Artificial Sequence
  Description of Artificial Sequence: Synthetic oligonucleotide
  Antisense strand to SEQ ID NO: 944096
aacuugaggauaauuagac

SEQ ID NO: 944098 - RNA, 19 nt, Artificial Sequence
  Description of Artificial Sequence: Synthetic oligonucleotide
  Sense strand starting at position 444 of SEQ ID NO: 913658
ugugaucuuggcugaauua

SEQ ID NO: 944099 - RNA, 19 nt, Artificial Sequence
  Description of Artificial Sequence: Synthetic oligonucleotide
  Antisense strand to SEQ ID NO: 944098
uaauucagccaagaucaca

SEQ ID NO: 944100 - RNA, 19 nt, Artificial Sequence
  Description of Artificial Sequence: Synthetic oligonucleotide
  Sense strand starting at position 730 of SEQ ID NO: 913658
ucaaguuucuuggccaaua

SEQ ID NO: 944101 - RNA, 19 nt, Artificial Sequence
  Description of Artificial Sequence: Synthetic oligonucleotide
  Antisense strand to SEQ ID NO: 944100
uauuggccaagaaacuuga

SEQ ID NO: 944102 - RNA, 19 nt, Artificial Sequence
  Description of Artificial Sequence: Synthetic oligonucleotide
  Sense strand starting at position 81 of SEQ ID NO: 913658
agcuccaagcuuugacaau

SEQ ID NO: 944103 - RNA, 19 nt, Artificial Sequence
  Description of Artificial Sequence: Synthetic oligonucleotide
  Antisense strand to SEQ ID NO: 944102
auugucaaagcuuggagcu

SEQ ID NO: 944104 - RNA, 19 nt, Artificial Sequence
  Description of Artificial Sequence: Synthetic oligonucleotide
  Sense strand starting at position 3005 of SEQ ID NO: 913658
cuguuagugccaugaggaa

SEQ ID NO: 944105 - RNA, 19 nt, Artificial Sequence
  Description of Artificial Sequence: Synthetic oligonucleotide
  Antisense strand to SEQ ID NO: 944104
uuccucauggcacuaacag

SEQ ID NO: 944106 - RNA, 19 nt, Artificial Sequence
  Description of Artificial Sequence: Synthetic oligonucleotide
  Sense strand starting at position 2581 of SEQ ID NO: 913658
auugcuuuggaacgguaga

SEQ ID NO: 944107 - RNA, 19 nt, Artificial Sequence
  Description of Artificial Sequence: Synthetic oligonucleotide
  Antisense strand to SEQ ID NO: 944106
ucuaccguuccaaagcaau

SEQ ID NO: 944108 - RNA, 19 nt, Artificial Sequence
  Description of Artificial Sequence: Synthetic oligonucleotide
  Sense strand starting at position 3310 of SEQ ID NO: 913659
agaggaauaugggugcaga

SEQ ID NO: 944109 - RNA, 19 nt, Artificial Sequence
  Description of Artificial Sequence: Synthetic oligonucleotide
  Antisense strand to SEQ ID NO: 944108
ucugcacccauauuccucu

SEQ ID NO: 944110 - RNA, 19 nt, Artificial Sequence
  Description of Artificial Sequence: Synthetic oligonucleotide
  Sense strand starting at position 3313 of SEQ ID NO: 913659
ggaauaugggugcagauuc

SEQ ID NO: 944111 - RNA, 19 nt, Artificial Sequence
  Description of Artificial Sequence: Synthetic oligonucleotide
  Antisense strand to SEQ ID NO: 944110
gaaucugcacccauauucc

SEQ ID NO: 944112 - RNA, 19 nt, Artificial Sequence
  Description of Artificial Sequence: Synthetic oligonucleotide
  Sense strand starting at position 3311 of SEQ ID NO: 913659
gaggaauaugggugcagau

SEQ ID NO: 944113 - RNA, 19 nt, Artificial Sequence
  Description of Artificial Sequence: Synthetic oligonucleotide
  Antisense strand to SEQ ID NO: 944112
aucugcacccauauuccuc

SEQ ID NO: 944114 - RNA, 19 nt, Artificial Sequence
  Description of Artificial Sequence: Synthetic oligonucleotide
  Sense strand starting at position 2560 of SEQ ID NO: 913659
aucuccuuuccauaguuga

SEQ ID NO: 944115 - RNA, 19 nt, Artificial Sequence
  Description of Artificial Sequence: Synthetic oligonucleotide
  Antisense strand to SEQ ID NO: 944114
ucaacuauggaaaggagau

SEQ ID NO: 944116 - RNA, 19 nt, Artificial Sequence
  Description of Artificial Sequence: Synthetic oligonucleotide
  Sense strand starting at position 3952 of SEQ ID NO: 913659
agugcugagcgccuguaau

SEQ ID NO: 944117 - RNA, 19 nt, Artificial Sequence
  Description of Artificial Sequence: Synthetic oligonucleotide
  Antisense strand to SEQ ID NO: 944116
auuacaggcgcucagcacu

SEQ ID NO: 944118 - RNA, 19 nt, Artificial Sequence
  Description of Artificial Sequence: Synthetic oligonucleotide
  Sense strand starting at position 3660 of SEQ ID NO: 913659
gaggguguugccuaugaau

SEQ ID NO: 944119 - RNA, 19 nt, Artificial Sequence
  Description of Artificial Sequence: Synthetic oligonucleotide
  Antisense strand to SEQ ID NO: 944118
auucauaggcaacacccuc

SEQ ID NO: 944120 - RNA, 19 nt, Artificial Sequence
  Description of Artificial Sequence: Synthetic oligonucleotide
  Sense strand starting at position 3776 of SEQ ID NO: 913659
ucuguaccuguaugaagaa

SEQ ID NO: 944121 - RNA, 19 nt, Artificial Sequence
  Description of Artificial Sequence: Synthetic oligonucleotide
  Antisense strand to SEQ ID NO: 944120
uucuucauacagguacaga

SEQ ID NO: 944122 - RNA, 19 nt, Artificial Sequence
  Description of Artificial Sequence: Synthetic oligonucleotide
  Sense strand starting at position 119 of SEQ ID NO: 913659
ccugcucucccaggagaga

SEQ ID NO: 944123 - RNA, 19 nt, Artificial Sequence
  Description of Artificial Sequence: Synthetic oligonucleotide
  Antisense strand to SEQ ID NO: 944122
ucucuccugggagagcagg

SEQ ID NO: 944124 - RNA, 19 nt, Artificial Sequence
  Description of Artificial Sequence: Synthetic oligonucleotide
  Sense strand starting at position 3672 of SEQ ID NO: 913659
uaugaauguguuuaacugu

SEQ ID NO: 944125 - RNA, 19 nt, Artificial Sequence
  Description of Artificial Sequence: Synthetic oligonucleotide
  Antisense strand to SEQ ID NO: 944124
acaguuaaacacauucaua

SEQ ID NO: 944126 - RNA, 19 nt, Artificial Sequence
  Description of Artificial Sequence: Synthetic oligonucleotide
  Sense strand starting at position 3584 of SEQ ID NO: 913659
acuuguuaugacugugaga

SEQ ID NO: 944127 - RNA, 19 nt, Artificial Sequence
  Description of Artificial Sequence: Synthetic oligonucleotide
  Antisense strand to SEQ ID NO: 944126
ucucacagucauaacaagu

SEQ ID NO: 944128 - RNA, 19 nt, Artificial Sequence
  Description of Artificial Sequence: Synthetic oligonucleotide
  Sense strand starting at position 3671 of SEQ ID NO: 913659
cuaugaauguguuuaacug

SEQ ID NO: 944129 - RNA, 19 nt, Artificial Sequence
  Description of Artificial Sequence: Synthetic oligonucleotide
  Antisense strand to SEQ ID NO: 944128
caguuaaacacauucauag

SEQ ID NO: 944130 - RNA, 19 nt, Artificial Sequence
  Description of Artificial Sequence: Synthetic oligonucleotide
  Sense strand starting at position 2263 of SEQ ID NO: 913659
caaagagaguaguugccau

SEQ ID NO: 944131 - RNA, 19 nt, Artificial Sequence
  Description of Artificial Sequence: Synthetic oligonucleotide
  Antisense strand to SEQ ID NO: 944130
auggcaacuacucucuuug

SEQ ID NO: 944132 - RNA, 19 nt, Artificial Sequence
  Description of Artificial Sequence: Synthetic oligonucleotide
  Sense strand starting at position 2545 of SEQ ID NO: 913659
gacgguguucccuagaucu

SEQ ID NO: 944133 - RNA, 19 nt, Artificial Sequence
  Description of Artificial Sequence: Synthetic oligonucleotide
  Antisense strand to SEQ ID NO: 944132
agaucuagggaacaccguc

SEQ ID NO: 944134 - RNA, 19 nt, Artificial Sequence
  Description of Artificial Sequence: Synthetic oligonucleotide
  Sense strand starting at position 3487 of SEQ ID NO: 913659
augacagcuuguguauaua

SEQ ID NO: 944135 - RNA, 19 nt, Artificial Sequence
  Description of Artificial Sequence: Synthetic oligonucleotide
  Antisense strand to SEQ ID NO: 944134
uauauacacaagcugucau

SEQ ID NO: 944136 - RNA, 19 nt, Artificial Sequence
  Description of Artificial Sequence: Synthetic oligonucleotide
  Sense strand starting at position 3586 of SEQ ID NO: 913659
uuguuaugacugugagagu

SEQ ID NO: 944137 - RNA, 19 nt, Artificial Sequence
  Description of Artificial Sequence: Synthetic oligonucleotide
  Antisense strand to SEQ ID NO: 944136
acucucacagucauaacaa

SEQ ID NO: 944138 - RNA, 19 nt, Artificial Sequence
  Description of Artificial Sequence: Synthetic oligonucleotide
  Sense strand starting at position 3116 of SEQ ID NO: 913659
ugaguacugagguggcauu

SEQ ID NO: 944139 - RNA, 19 nt, Artificial Sequence
  Description of Artificial Sequence: Synthetic oligonucleotide
  Antisense strand to SEQ ID NO: 944138
aaugccaccucaguacuca

SEQ ID NO: 944140 - RNA, 19 nt, Artificial Sequence
  Description of Artificial Sequence: Synthetic oligonucleotide
  Sense strand starting at position 511 of SEQ ID NO: 913659
gcgaguccgccuccguuau

SEQ ID NO: 944141 - RNA, 19 nt, Artificial Sequence
  Description of Artificial Sequence: Synthetic oligonucleotide
  Antisense strand to SEQ ID NO: 944140
auaacggaggcggacucgc

SEQ ID NO: 944142 - RNA, 19 nt, Artificial Sequence
  Description of Artificial Sequence: Synthetic oligonucleotide
  Sense strand starting at position 3469 of SEQ ID NO: 913659
cucugugugcacuggagaa

SEQ ID NO: 944143 - RNA, 19 nt, Artificial Sequence
  Description of Artificial Sequence: Synthetic oligonucleotide
  Antisense strand to SEQ ID NO: 944142
uucuccagugcacacagag

SEQ ID NO: 944144 - RNA, 19 nt, Artificial Sequence
  Description of Artificial Sequence: Synthetic oligonucleotide
  Sense strand starting at position 3669 of SEQ ID NO: 913659
gccuaugaauguguuuaac

SEQ ID NO: 944145 - RNA, 19 nt, Artificial Sequence
  Description of Artificial Sequence: Synthetic oligonucleotide
  Antisense strand to SEQ ID NO: 944144
guuaaacacauucauaggc

SEQ ID NO: 944146 - RNA, 19 nt, Artificial Sequence
  Description of Artificial Sequence: Synthetic oligonucleotide
  Sense strand starting at position 3675 of SEQ ID NO: 913659
gaauguguuuaacugugua

SEQ ID NO: 944147 - RNA, 19 nt, Artificial Sequence
  Description of Artificial Sequence: Synthetic oligonucleotide
  Antisense strand to SEQ ID NO: 944146
uacacaguuaaacacauuc

SEQ ID NO: 944148 - RNA, 19 nt, Artificial Sequence
  Description of Artificial Sequence: Synthetic oligonucleotide
  Sense strand starting at position 3609 of SEQ ID NO: 913659
gagggugugucuuugagca

SEQ ID NO: 944149 - RNA, 19 nt, Artificial Sequence
  Description of Artificial Sequence: Synthetic oligonucleotide
  Antisense strand to SEQ ID NO: 944148
ugcucaaagacacacccuc

SEQ ID NO: 944150 - RNA, 19 nt, Artificial Sequence
  Description of Artificial Sequence: Synthetic oligonucleotide
  Sense strand starting at position 3679 of SEQ ID NO: 913659
guguuuaacuguguacuga

SEQ ID NO: 944151 - RNA, 19 nt, Artificial Sequence
  Description of Artificial Sequence: Synthetic oligonucleotide
  Antisense strand to SEQ ID NO: 944150
ucaguacacaguuaaacac

SEQ ID NO: 944152 - RNA, 19 nt, Artificial Sequence
  Description of Artificial Sequence: Synthetic oligonucleotide
  Sense strand starting at position 3772 of SEQ ID NO: 913659
ccugucuguaccuguauga

SEQ ID NO: 944153 - RNA, 19 nt, Artificial Sequence
  Description of Artificial Sequence: Synthetic oligonucleotide
  Antisense strand to SEQ ID NO: 944152
ucauacagguacagacagg

SEQ ID NO: 944154 - RNA, 19 nt, Artificial Sequence
  Description of Artificial Sequence: Synthetic oligonucleotide
  Sense strand starting at position 152 of SEQ ID NO: 913659
ugagucgcuaccgaguauu

SEQ ID NO: 944155 - RNA, 19 nt, Artificial Sequence
  Description of Artificial Sequence: Synthetic oligonucleotide
  Antisense strand to SEQ ID NO: 944154
aauacucgguagcgacuca

SEQ ID NO: 944156 - RNA, 19 nt, Artificial Sequence
  Description of Artificial Sequence: Synthetic oligonucleotide
  Sense strand starting at position 3522 of SEQ ID NO: 913659
uguguuccuguuugaugau

SEQ ID NO: 944157 - RNA, 19 nt, Artificial Sequence
  Description of Artificial Sequence: Synthetic oligonucleotide
  Antisense strand to SEQ ID NO: 944156
aucaucaaacaggaacaca

SEQ ID NO: 944158 - RNA, 19 nt, Artificial Sequence
  Description of Artificial Sequence: Synthetic oligonucleotide
  Sense strand starting at position 3388 of SEQ ID NO: 913659
uguguacaucuguaugugu

SEQ ID NO: 944159 - RNA, 19 nt, Artificial Sequence
  Description of Artificial Sequence: Synthetic oligonucleotide
  Antisense strand to SEQ ID NO: 944158
acacauacagauguacaca

SEQ ID NO: 944160 - RNA, 19 nt, Artificial Sequence
  Description of Artificial Sequence: Synthetic oligonucleotide
  Sense strand starting at position 3662 of SEQ ID NO: 913659
ggguguugccuaugaaugu

SEQ ID NO: 944161 - RNA, 19 nt, Artificial Sequence
  Description of Artificial Sequence: Synthetic oligonucleotide
  Antisense strand to SEQ ID NO: 944160
acauucauaggcaacaccc

SEQ ID NO: 944162 - RNA, 19 nt, Artificial Sequence
  Description of Artificial Sequence: Synthetic oligonucleotide
  Sense strand starting at position 3404 of SEQ ID NO: 913659
uguacaucuguauguguau

SEQ ID NO: 944163 - RNA, 19 nt, Artificial Sequence
  Description of Artificial Sequence: Synthetic oligonucleotide
  Antisense strand to SEQ ID NO: 944162
auacacauacagauguaca

SEQ ID NO: 944164 - RNA, 19 nt, Artificial Sequence
  Description of Artificial Sequence: Synthetic oligonucleotide
  Sense strand starting at position 3678 of SEQ ID NO: 913659
uguguuuaacuguguacug

SEQ ID NO: 944165 - RNA, 19 nt, Artificial Sequence
  Description of Artificial Sequence: Synthetic oligonucleotide
  Antisense strand to SEQ ID NO: 944164
caguacacaguuaaacaca

SEQ ID NO: 944166 - RNA, 19 nt, Artificial Sequence
  Description of Artificial Sequence: Synthetic oligonucleotide
  Sense strand starting at position 3521 of SEQ ID NO: 913659
guguguuccuguuugauga

SEQ ID NO: 944167 - RNA, 19 nt, Artificial Sequence
  Description of Artificial Sequence: Synthetic oligonucleotide
  Antisense strand to SEQ ID NO: 944166
ucaucaaacaggaacacac

SEQ ID NO: 944168 - RNA, 19 nt, Artificial Sequence
  Description of Artificial Sequence: Synthetic oligonucleotide
  Sense strand starting at position 3378 of SEQ ID NO: 913659
ccugcuugaguguguacau

SEQ ID NO: 944169 - RNA, 19 nt, Artificial Sequence
  Description of Artificial Sequence: Synthetic oligonucleotide
  Antisense strand to SEQ ID NO: 944168
auguacacacucaagcagg

SEQ ID NO: 944170 - RNA, 19 nt, Artificial Sequence
  Description of Artificial Sequence: Synthetic oligonucleotide
  Sense strand starting at position 498 of SEQ ID NO: 913659
gccacuauuaccugcgagu

SEQ ID NO: 944171 - RNA, 19 nt, Artificial Sequence
  Description of Artificial Sequence: Synthetic oligonucleotide
  Antisense strand to SEQ ID NO: 944170
acucgcagguaauaguggc

SEQ ID NO: 944172 - RNA, 19 nt, Artificial Sequence
  Description of Artificial Sequence: Synthetic oligonucleotide
  Sense strand starting at position 3433 of SEQ ID NO: 913659
gcaguaggucucugugagu

SEQ ID NO: 944173 - RNA, 19 nt, Artificial Sequence
  Description of Artificial Sequence: Synthetic oligonucleotide
  Antisense strand to SEQ ID NO: 944172
acucacagagaccuacugc

SEQ ID NO: 944174 - RNA, 19 nt, Artificial Sequence
  Description of Artificial Sequence: Synthetic oligonucleotide
  Sense strand starting at position 3777 of SEQ ID NO: 913659
cuguaccuguaugaagaaa

SEQ ID NO: 944175 - RNA, 19 nt, Artificial Sequence
  Description of Artificial Sequence: Synthetic oligonucleotide
  Antisense strand to SEQ ID NO: 944174
uuucuucauacagguacag

SEQ ID NO: 944176 - RNA, 19 nt, Artificial Sequence
  Description of Artificial Sequence: Synthetic oligonucleotide
  Sense strand starting at position 3578 of SEQ ID NO: 913659
acacauacuuguuaugacu

SEQ ID NO: 944177 - RNA, 19 nt, Artificial Sequence
  Description of Artificial Sequence: Synthetic oligonucleotide
  Antisense strand to SEQ ID NO: 944176
agucauaacaaguaugugu

SEQ ID NO: 944178 - RNA, 19 nt, Artificial Sequence
  Description of Artificial Sequence: Synthetic oligonucleotide
  Sense strand starting at position 454 of SEQ ID NO: 913659
ccaggaaccugcgaguaaa

SEQ ID NO: 944179 - RNA, 19 nt, Artificial Sequence
  Description of Artificial Sequence: Synthetic oligonucleotide
  Antisense strand to SEQ ID NO: 944178
uuuacucgcagguuccugg

SEQ ID NO: 944180 - RNA, 19 nt, Artificial Sequence
  Description of Artificial Sequence: Synthetic oligonucleotide
  Sense strand starting at position 2558 of SEQ ID NO: 913659
agaucuccuuuccauaguu

SEQ ID NO: 944181 - RNA, 19 nt, Artificial Sequence
  Description of Artificial Sequence: Synthetic oligonucleotide
  Antisense strand to SEQ ID NO: 944180
aacuauggaaaggagaucu

SEQ ID NO: 944182 - RNA, 19 nt, Artificial Sequence
  Description of Artificial Sequence: Synthetic oligonucleotide
  Sense strand starting at position 3613 of SEQ ID NO: 913659
gugugucuuugagcagugu

SEQ ID NO: 944183 - RNA, 19 nt, Artificial Sequence
  Description of Artificial Sequence: Synthetic oligonucleotide
  Antisense strand to SEQ ID NO: 944182
acacugcucaaagacacac

SEQ ID NO: 944184 - RNA, 19 nt, Artificial Sequence
  Description of Artificial Sequence: Synthetic oligonucleotide
  Sense strand starting at position 3587 of SEQ ID NO: 913659
uguuaugacugugagagug

SEQ ID NO: 944185 - RNA, 19 nt, Artificial Sequence
  Description of Artificial Sequence: Synthetic oligonucleotide
  Antisense strand to SEQ ID NO: 944184
cacucucacagucauaaca

SEQ ID NO: 944186 - RNA, 19 nt, Artificial Sequence
  Description of Artificial Sequence: Synthetic oligonucleotide
  Sense strand starting at position 3444 of SEQ ID NO: 913659
cugugagugucugauacac

SEQ ID NO: 944187 - RNA, 19 nt, Artificial Sequence
  Description of Artificial Sequence: Synthetic oligonucleotide
  Antisense strand to SEQ ID NO: 944186
guguaucagacacucacag

SEQ ID NO: 944188 - RNA, 19 nt, Artificial Sequence
  Description of Artificial Sequence: Synthetic oligonucleotide
  Sense strand starting at position 2929 of SEQ ID NO: 913660
uccagaauuccugaguuau

SEQ ID NO: 944189 - RNA, 19 nt, Artificial Sequence
  Description of Artificial Sequence: Synthetic oligonucleotide
  Antisense strand to SEQ ID NO: 944188
auaacucaggaauucugga

SEQ ID NO: 944190 - RNA, 19 nt, Artificial Sequence
  Description of Artificial Sequence: Synthetic oligonucleotide
  Sense strand starting at position 3116 of SEQ ID NO: 913660
cgugaacaucuuuaggaac

SEQ ID NO: 944191 - RNA, 19 nt, Artificial Sequence
  Description of Artificial Sequence: Synthetic oligonucleotide
  Antisense strand to SEQ ID NO: 944190
guuccuaaagauguucacg

SEQ ID NO: 944192 - RNA, 19 nt, Artificial Sequence
  Description of Artificial Sequence: Synthetic oligonucleotide
  Sense strand starting at position 3502 of SEQ ID NO: 913660
uuaggacuccucugaugau

SEQ ID NO: 944193 - RNA, 19 nt, Artificial Sequence
  Description of Artificial Sequence: Synthetic oligonucleotide
  Antisense strand to SEQ ID NO: 944192
aucaucagaggaguccuaa

SEQ ID NO: 944194 - RNA, 19 nt, Artificial Sequence
  Description of Artificial Sequence: Synthetic oligonucleotide
  Sense strand starting at position 431 of SEQ ID NO: 913660
uccugccuuccagaagacu

SEQ ID NO: 944195 - RNA, 19 nt, Artificial Sequence
  Description of Artificial Sequence: Synthetic oligonucleotide
  Antisense strand to SEQ ID NO: 944194
agucuucuggaaggcagga

SEQ ID NO: 944196 - RNA, 19 nt, Artificial Sequence
  Description of Artificial Sequence: Synthetic oligonucleotide
  Sense strand starting at position 3083 of SEQ ID NO: 913660
uuuaguacucacuagguca

SEQ ID NO: 944197 - RNA, 19 nt, Artificial Sequence
  Description of Artificial Sequence: Synthetic oligonucleotide
  Antisense strand to SEQ ID NO: 944196
ugaccuagugaguacuaaa

SEQ ID NO: 944198 - RNA, 19 nt, Artificial Sequence
  Description of Artificial Sequence: Synthetic oligonucleotide
  Sense strand starting at position 2506 of SEQ ID NO: 913660
ggucgacugccugaagaag

SEQ ID NO: 944199 - RNA, 19 nt, Artificial Sequence
  Description of Artificial Sequence: Synthetic oligonucleotide
  Antisense strand to SEQ ID NO: 944198
cuucuucaggcagucgacc

SEQ ID NO: 944200 - RNA, 19 nt, Artificial Sequence
  Description of Artificial Sequence: Synthetic oligonucleotide
  Sense strand starting at position 663 of SEQ ID NO: 913660
accuaaucagaucggguaa

SEQ ID NO: 944201 - RNA, 19 nt, Artificial Sequence
  Description of Artificial Sequence: Synthetic oligonucleotide
  Antisense strand to SEQ ID NO: 944200
uuacccgaucugauuaggu

SEQ ID NO: 944202 - RNA, 19 nt, Artificial Sequence
  Description of Artificial Sequence: Synthetic oligonucleotide
  Sense strand starting at position 3389 of SEQ ID NO: 913660
cccugaauccucuagguuu

SEQ ID NO: 944203 - RNA, 19 nt, Artificial Sequence
  Description of Artificial Sequence: Synthetic oligonucleotide
  Antisense strand to SEQ ID NO: 944202
aaaccuagaggauucaggg

SEQ ID NO: 944204 - RNA, 19 nt, Artificial Sequence
  Description of Artificial Sequence: Synthetic oligonucleotide
  Sense strand starting at position 455 of SEQ ID NO: 913660
accuguaauucuguaagaa

SEQ ID NO: 944205 - RNA, 19 nt, Artificial Sequence
  Description of Artificial Sequence: Synthetic oligonucleotide
  Antisense strand to SEQ ID NO: 944204
uucuuacagaauuacaggu

SEQ ID NO: 944206 - RNA, 19 nt, Artificial Sequence
  Description of Artificial Sequence: Synthetic oligonucleotide
  Sense strand starting at position 3166 of SEQ ID NO: 913660
gggaauagacuucguuaug

SEQ ID NO: 944207 - RNA, 19 nt, Artificial Sequence
  Description of Artificial Sequence: Synthetic oligonucleotide
  Antisense strand to SEQ ID NO: 944206
cauaacgaagucuauuccc

SEQ ID NO: 944208 - RNA, 19 nt, Artificial Sequence
  Description of Artificial Sequence: Synthetic oligonucleotide
  Sense strand starting at position 308 of SEQ ID NO: 913660
acucaaucugcucaugagu

SEQ ID NO: 944209 - RNA, 19 nt, Artificial Sequence
  Description of Artificial Sequence: Synthetic oligonucleotide
  Antisense strand to SEQ ID NO: 944208
acucaugagcagauugagu

SEQ ID NO: 944210 - RNA, 19 nt, Artificial Sequence
  Description of Artificial Sequence: Synthetic oligonucleotide
  Sense strand starting at position 1565 of SEQ ID NO: 913660
cgggaaacuuucccagagu

SEQ ID NO: 944211 - RNA, 19 nt, Artificial Sequence
  Description of Artificial Sequence: Synthetic oligonucleotide
  Antisense strand to SEQ ID NO: 944210
acucugggaaaguuucccg

SEQ ID NO: 944212 - RNA, 19 nt, Artificial Sequence
  Description of Artificial Sequence: Synthetic oligonucleotide
  Sense strand starting at position 3051 of SEQ ID NO: 913660
aauugcauuucguuuguua

SEQ ID NO: 944213 - RNA, 19 nt, Artificial Sequence
  Description of Artificial Sequence: Synthetic oligonucleotide
  Antisense strand to SEQ ID NO: 944212
uaacaaacgaaaugcaauu

SEQ ID NO: 944214 - RNA, 19 nt, Artificial Sequence
  Description of Artificial Sequence: Synthetic oligonucleotide
  Sense strand starting at position 2764 of SEQ ID NO: 913660
cuuucuagagcacggaaua

SEQ ID NO: 944215 - RNA, 19 nt, Artificial Sequence
  Description of Artificial Sequence: Synthetic oligonucleotide
  Antisense strand to SEQ ID NO: 944214
uauuccgugcucuagaaag

SEQ ID NO: 944216 - RNA, 19 nt, Artificial Sequence
  Description of Artificial Sequence: Synthetic oligonucleotide
  Sense strand starting at position 3055 of SEQ ID NO: 913660
gcauuucguuuguuagauu

SEQ ID NO: 944217 - RNA, 19 nt, Artificial Sequence
  Description of Artificial Sequence: Synthetic oligonucleotide
  Antisense strand to SEQ ID NO: 944216
aaucuaacaaacgaaaugc

SEQ ID NO: 944218 - RNA, 19 nt, Artificial Sequence
  Description of Artificial Sequence: Synthetic oligonucleotide
  Sense strand starting at position 3054 of SEQ ID NO: 913660
ugcauuucguuuguuagau

SEQ ID NO: 944219 - RNA, 19 nt, Artificial Sequence
  Description of Artificial Sequence: Synthetic oligonucleotide
  Antisense strand to SEQ ID NO: 944218
aucuaacaaacgaaaugca

SEQ ID NO: 944220 - RNA, 19 nt, Artificial Sequence
  Description of Artificial Sequence: Synthetic oligonucleotide
  Sense strand starting at position 3053 of SEQ ID NO: 913660
uugcauuucguuuguuaga

SEQ ID NO: 944221 - RNA, 19 nt, Artificial Sequence
  Description of Artificial Sequence: Synthetic oligonucleotide
  Antisense strand to SEQ ID NO: 944220
ucuaacaaacgaaaugcaa

SEQ ID NO: 944222 - RNA, 19 nt, Artificial Sequence
  Description of Artificial Sequence: Synthetic oligonucleotide
  Sense strand starting at position 2573 of SEQ ID NO: 913660
cgcagagucguagcgaguu

SEQ ID NO: 944223 - RNA, 19 nt, Artificial Sequence
  Description of Artificial Sequence: Synthetic oligonucleotide
  Antisense strand to SEQ ID NO: 944222
aacucgcuacgacucugcg

SEQ ID NO: 944224 - RNA, 19 nt, Artificial Sequence
  Description of Artificial Sequence: Synthetic oligonucleotide
  Sense strand starting at position 3115 of SEQ ID NO: 913660
gcgugaacaucuuuaggaa

SEQ ID NO: 944225 - RNA, 19 nt, Artificial Sequence
  Description of Artificial Sequence: Synthetic oligonucleotide
  Antisense strand to SEQ ID NO: 944224
uuccuaaagauguucacgc

SEQ ID NO: 944226 - RNA, 19 nt, Artificial Sequence
  Description of Artificial Sequence: Synthetic oligonucleotide
  Sense strand starting at position 2908 of SEQ ID NO: 913660
guggcauugcuccaaucaa

SEQ ID NO: 944227 - RNA, 19 nt, Artificial Sequence
  Description of Artificial Sequence: Synthetic oligonucleotide
  Antisense strand to SEQ ID NO: 944226
uugauuggagcaaugccac

SEQ ID NO: 944228 - RNA, 19 nt, Artificial Sequence
  Description of Artificial Sequence: Synthetic oligonucleotide
  Sense strand starting at position 3167 of SEQ ID NO: 913660
ggaauagacuucguuaugu

SEQ ID NO: 944229 - RNA, 19 nt, Artificial Sequence
  Description of Artificial Sequence: Synthetic oligonucleotide
  Antisense strand to SEQ ID NO: 944228
acauaacgaagucuauucc

SEQ ID NO: 944230 - RNA, 19 nt, Artificial Sequence
  Description of Artificial Sequence: Synthetic oligonucleotide
  Sense strand starting at position 3169 of SEQ ID NO: 913660
aauagacuucguuaugugu

SEQ ID NO: 944231 - RNA, 19 nt, Artificial Sequence
  Description of Artificial Sequence: Synthetic oligonucleotide
  Antisense strand to SEQ ID NO: 944230
acacauaacgaagucuauu

SEQ ID NO: 944232 - RNA, 19 nt, Artificial Sequence
  Description of Artificial Sequence: Synthetic oligonucleotide
  Sense strand starting at position 2823 of SEQ ID NO: 913660
gugugugcacuauacagau

SEQ ID NO: 944233 - RNA, 19 nt, Artificial Sequence
  Description of Artificial Sequence: Synthetic oligonucleotide
  Antisense strand to SEQ ID NO: 944232
aucuguauagugcacacac

SEQ ID NO: 944234 - RNA, 19 nt, Artificial Sequence
  Description of Artificial Sequence: Synthetic oligonucleotide
  Sense strand starting at position 3228 of SEQ ID NO: 913660
acugcuauccugugaacua

SEQ ID NO: 944235 - RNA, 19 nt, Artificial Sequence
  Description of Artificial Sequence: Synthetic oligonucleotide
  Antisense strand to SEQ ID NO: 944234
uaguucacaggauagcagu

SEQ ID NO: 944236 - RNA, 19 nt, Artificial Sequence
  Description of Artificial Sequence: Synthetic oligonucleotide
  Sense strand starting at position 257 of SEQ ID NO: 913660
uggacuaguucugucucca

SEQ ID NO: 944237 - RNA, 19 nt, Artificial Sequence
  Description of Artificial Sequence: Synthetic oligonucleotide
  Antisense strand to SEQ ID NO: 944236
uggagacagaacuagucca

SEQ ID NO: 944238 - RNA, 19 nt, Artificial Sequence
  Description of Artificial Sequence: Synthetic oligonucleotide
  Sense strand starting at position 2800 of SEQ ID NO: 913660
agagaauguuaccaaacaa

SEQ ID NO: 944239 - RNA, 19 nt, Artificial Sequence
  Description of Artificial Sequence: Synthetic oligonucleotide
  Antisense strand to SEQ ID NO: 944238
uuguuugguaacauucucu

SEQ ID NO: 944240 - RNA, 19 nt, Artificial Sequence
  Description of Artificial Sequence: Synthetic oligonucleotide
  Sense strand starting at position 2817 of SEQ ID NO: 913660
aaugaagugugugcacuau

SEQ ID NO: 944241 - RNA, 19 nt, Artificial Sequence
  Description of Artificial Sequence: Synthetic oligonucleotide
  Antisense strand to SEQ ID NO: 944240
auagugcacacacuucauu

SEQ ID NO: 944242 - RNA, 19 nt, Artificial Sequence
  Description of Artificial Sequence: Synthetic oligonucleotide
  Sense strand starting at position 2816 of SEQ ID NO: 913660
caaugaagugugugcacua

SEQ ID NO: 944243 - RNA, 19 nt, Artificial Sequence
  Description of Artificial Sequence: Synthetic oligonucleotide
  Antisense strand to SEQ ID NO: 944242
uagugcacacacuucauug

SEQ ID NO: 944244 - RNA, 19 nt, Artificial Sequence
  Description of Artificial Sequence: Synthetic oligonucleotide
  Sense strand starting at position 3094 of SEQ ID NO: 913660
cuaggucagguucguuaga

SEQ ID NO: 944245 - RNA, 19 nt, Artificial Sequence
  Description of Artificial Sequence: Synthetic oligonucleotide
  Antisense strand to SEQ ID NO: 944244
ucuaacgaaccugaccuag

SEQ ID NO: 944246 - RNA, 19 nt, Artificial Sequence
  Description of Artificial Sequence: Synthetic oligonucleotide
  Sense strand starting at position 3288 of SEQ ID NO: 913660
guacacguucguuacaauc

SEQ ID NO: 944247 - RNA, 19 nt, Artificial Sequence
  Description of Artificial Sequence: Synthetic oligonucleotide
  Antisense strand to SEQ ID NO: 944246
gauuguaacgaacguguac

SEQ ID NO: 944248 - RNA, 19 nt, Artificial Sequence
  Description of Artificial Sequence: Synthetic oligonucleotide
  Sense strand starting at position 2752 of SEQ ID NO: 913660
gcagucaccucccuuucua

SEQ ID NO: 944249 - RNA, 19 nt, Artificial Sequence
  Description of Artificial Sequence: Synthetic oligonucleotide
  Antisense strand to SEQ ID NO: 944248
uagaaagggaggugacugc

SEQ ID NO: 944250 - RNA, 19 nt, Artificial Sequence
  Description of Artificial Sequence: Synthetic oligonucleotide
  Sense strand starting at position 3172 of SEQ ID NO: 913660
agacuucguuauguguuga

SEQ ID NO: 944251 - RNA, 19 nt, Artificial Sequence
  Description of Artificial Sequence: Synthetic oligonucleotide
  Antisense strand to SEQ ID NO: 944250
ucaacacauaacgaagucu

SEQ ID NO: 944252 - RNA, 19 nt, Artificial Sequence
  Description of Artificial Sequence: Synthetic oligonucleotide
  Sense strand starting at position 3177 of SEQ ID NO: 913660
ucguuauguguugaggguu

SEQ ID NO: 944253 - RNA, 19 nt, Artificial Sequence
  Description of Artificial Sequence: Synthetic oligonucleotide
  Antisense strand to SEQ ID NO: 944252
aacccucaacacauaacga

SEQ ID NO: 944254 - RNA, 19 nt, Artificial Sequence
  Description of Artificial Sequence: Synthetic oligonucleotide
  Sense strand starting at position 3189 of SEQ ID NO: 913660
gaggguugucuguggguuu

SEQ ID NO: 944255 - RNA, 19 nt, Artificial Sequence
  Description of Artificial Sequence: Synthetic oligonucleotide
  Antisense strand to SEQ ID NO: 944254
aaacccacagacaacccuc

SEQ ID NO: 944256 - RNA, 19 nt, Artificial Sequence
  Description of Artificial Sequence: Synthetic oligonucleotide
  Sense strand starting at position 3286 of SEQ ID NO: 913660
agguacacguucguuacaa

SEQ ID NO: 944257 - RNA, 19 nt, Artificial Sequence
  Description of Artificial Sequence: Synthetic oligonucleotide
  Antisense strand to SEQ ID NO: 944256
uuguaacgaacguguaccu

SEQ ID NO: 944258 - RNA, 19 nt, Artificial Sequence
  Description of Artificial Sequence: Synthetic oligonucleotide
  Sense strand starting at position 3106 of SEQ ID NO: 913660
cguuagagggcgugaacau

SEQ ID NO: 944259 - RNA, 19 nt, Artificial Sequence
  Description of Artificial Sequence: Synthetic oligonucleotide
  Antisense strand to SEQ ID NO: 944258
auguucacgcccucuaacg

SEQ ID NO: 944260 - RNA, 19 nt, Artificial Sequence
  Description of Artificial Sequence: Synthetic oligonucleotide
  Sense strand starting at position 3287 of SEQ ID NO: 913660
gguacacguucguuacaau

SEQ ID NO: 944261 - RNA, 19 nt, Artificial Sequence
  Description of Artificial Sequence: Synthetic oligonucleotide
  Antisense strand to SEQ ID NO: 944260
auuguaacgaacguguacc

SEQ ID NO: 944262 - RNA, 19 nt, Artificial Sequence
  Description of Artificial Sequence: Synthetic oligonucleotide
  Sense strand starting at position 1566 of SEQ ID NO: 913660
gggaaacuuucccagaguu

SEQ ID NO: 944263 - RNA, 19 nt, Artificial Sequence
  Description of Artificial Sequence: Synthetic oligonucleotide
  Antisense strand to SEQ ID NO: 944262
aacucugggaaaguuuccc

SEQ ID NO: 944264 - RNA, 19 nt, Artificial Sequence
  Description of Artificial Sequence: Synthetic oligonucleotide
  Sense strand starting at position 3118 of SEQ ID NO: 913660
ugaacaucuuuaggaacau

SEQ ID NO: 944265 - RNA, 19 nt, Artificial Sequence
  Description of Artificial Sequence: Synthetic oligonucleotide
  Antisense strand to SEQ ID NO: 944264
auguuccuaaagauguuca

SEQ ID NO: 944266 - RNA, 19 nt, Artificial Sequence
  Description of Artificial Sequence: Synthetic oligonucleotide
  Sense strand starting at position 3064 of SEQ ID NO: 913660
uuguuagauugacacugau

SEQ ID NO: 944267 - RNA, 19 nt, Artificial Sequence
  Description of Artificial Sequence: Synthetic oligonucleotide
  Antisense strand to SEQ ID NO: 944266
aucagugucaaucuaacaa

SEQ ID NO: 944268 - RNA, 19 nt, Artificial Sequence
  Description of Artificial Sequence: Synthetic oligonucleotide
  Sense strand starting at position 3560 of SEQ ID NO: 913661
uccagaauuccugaguuau

SEQ ID NO: 944269 - RNA, 19 nt, Artificial Sequence
  Description of Artificial Sequence: Synthetic oligonucleotide
  Antisense strand to SEQ ID NO: 944268
auaacucaggaauucugga

SEQ ID NO: 944270 - RNA, 19 nt, Artificial Sequence
  Description of Artificial Sequence: Synthetic oligonucleotide
  Sense strand starting at position 3747 of SEQ ID NO: 913661
cgugaacaucuuuaggaac

SEQ ID NO: 944271 - RNA, 19 nt, Artificial Sequence
  Description of Artificial Sequence: Synthetic oligonucleotide
  Antisense strand to SEQ ID NO: 944270
guuccuaaagauguucacg

SEQ ID NO: 944272 - RNA, 19 nt, Artificial Sequence
  Description of Artificial Sequence: Synthetic oligonucleotide
  Sense strand starting at position 1062 of SEQ ID NO: 913661
uccugccuuccagaagacu

SEQ ID NO: 944273 - RNA, 19 nt, Artificial Sequence
  Description of Artificial Sequence: Synthetic oligonucleotide
  Antisense strand to SEQ ID NO: 944272
agucuucuggaaggcagga

SEQ ID NO: 944274 - RNA, 19 nt, Artificial Sequence
  Description of Artificial Sequence: Synthetic oligonucleotide
  Sense strand starting at position 3714 of SEQ ID NO: 913661
uuuaguacucacuagguca

SEQ ID NO: 944275 - RNA, 19 nt, Artificial Sequence
  Description of Artificial Sequence: Synthetic oligonucleotide
  Antisense strand to SEQ ID NO: 944274
ugaccuagugaguacuaaa

SEQ ID NO: 944276 - RNA, 19 nt, Artificial Sequence
  Description of Artificial Sequence: Synthetic oligonucleotide
  Sense strand starting at position 3137 of SEQ ID NO: 913661
ggucgacugccugaagaag

SEQ ID NO: 944277 - RNA, 19 nt, Artificial Sequence
  Description of Artificial Sequence: Synthetic oligonucleotide
  Antisense strand to SEQ ID NO: 944276
cuucuucaggcagucgacc

SEQ ID NO: 944278 - RNA, 19 nt, Artificial Sequence
  Description of Artificial Sequence: Synthetic oligonucleotide
  Sense strand starting at position 1294 of SEQ ID NO: 913661
accuaaucagaucggguaa

SEQ ID NO: 944279 - RNA, 19 nt, Artificial Sequence
  Description of Artificial Sequence: Synthetic oligonucleotide
  Antisense strand to SEQ ID NO: 944278
uuacccgaucugauuaggu

SEQ ID NO: 944280 - RNA, 19 nt, Artificial Sequence
  Description of Artificial Sequence: Synthetic oligonucleotide
  Sense strand starting at position 1086 of SEQ ID NO: 913661
accuguaauucuguaagaa

SEQ ID NO: 944281 - RNA, 19 nt, Artificial Sequence
  Description of Artificial Sequence: Synthetic oligonucleotide
  Antisense strand to SEQ ID NO: 944280
uucuuacagaauuacaggu

SEQ ID NO: 944282 - RNA, 19 nt, Artificial Sequence
  Description of Artificial Sequence: Synthetic oligonucleotide
  Sense strand starting at position 3797 of SEQ ID NO: 913661
gggaauagacuucguuaug

SEQ ID NO: 944283 - RNA, 19 nt, Artificial Sequence
  Description of Artificial Sequence: Synthetic oligonucleotide
  Antisense strand to SEQ ID NO: 944282
cauaacgaagucuauuccc

SEQ ID NO: 944284 - RNA, 19 nt, Artificial Sequence
  Description of Artificial Sequence: Synthetic oligonucleotide
  Sense strand starting at position 939 of SEQ ID NO: 913661
acucaaucugcucaugagu

SEQ ID NO: 944285 - RNA, 19 nt, Artificial Sequence
  Description of Artificial Sequence: Synthetic oligonucleotide
  Antisense strand to SEQ ID NO: 944284
acucaugagcagauugagu

SEQ ID NO: 944286 - RNA, 19 nt, Artificial Sequence
  Description of Artificial Sequence: Synthetic oligonucleotide
  Sense strand starting at position 2196 of SEQ ID NO: 913661
cgggaaacuuucccagagu

SEQ ID NO: 944287 - RNA, 19 nt, Artificial Sequence
  Description of Artificial Sequence: Synthetic oligonucleotide
  Antisense strand to SEQ ID NO: 944286
acucugggaaaguuucccg

SEQ ID NO: 944288 - RNA, 19 nt, Artificial Sequence
  Description of Artificial Sequence: Synthetic oligonucleotide
  Sense strand starting at position 3682 of SEQ ID NO: 913661
aauugcauuucguuuguua

SEQ ID NO: 944289 - RNA, 19 nt, Artificial Sequence
  Description of Artificial Sequence: Synthetic oligonucleotide
  Antisense strand to SEQ ID NO: 944288
uaacaaacgaaaugcaauu

SEQ ID NO: 944290 - RNA, 19 nt, Artificial Sequence
  Description of Artificial Sequence: Synthetic oligonucleotide
  Sense strand starting at position 242 of SEQ ID NO: 913661
gugcaacaccaaugaagua

SEQ ID NO: 944291 - RNA, 19 nt, Artificial Sequence
  Description of Artificial Sequence: Synthetic oligonucleotide
  Antisense strand to SEQ ID NO: 944290
uacuucauugguguugcac

SEQ ID NO: 944292 - RNA, 19 nt, Artificial Sequence
  Description of Artificial Sequence: Synthetic oligonucleotide
  Sense strand starting at position 3395 of SEQ ID NO: 913661
cuuucuagagcacggaaua

SEQ ID NO: 944293 - RNA, 19 nt, Artificial Sequence
  Description of Artificial Sequence: Synthetic oligonucleotide
  Antisense strand to SEQ ID NO: 944292
uauuccgugcucuagaaag

SEQ ID NO: 944294 - RNA, 19 nt, Artificial Sequence
  Description of Artificial Sequence: Synthetic oligonucleotide
  Sense strand starting at position 3686 of SEQ ID NO: 913661
gcauuucguuuguuagauu

SEQ ID NO: 944295 - RNA, 19 nt, Artificial Sequence
  Description of Artificial Sequence: Synthetic oligonucleotide
  Antisense strand to SEQ ID NO: 944294
aaucuaacaaacgaaaugc

SEQ ID NO: 944296 - RNA, 19 nt, Artificial Sequence
  Description of Artificial Sequence: Synthetic oligonucleotide
  Sense strand starting at position 3685 of SEQ ID NO: 913661
ugcauuucguuuguuagau

SEQ ID NO: 944297 - RNA, 19 nt, Artificial Sequence
  Description of Artificial Sequence: Synthetic oligonucleotide
  Antisense strand to SEQ ID NO: 944296
aucuaacaaacgaaaugca

SEQ ID NO: 944298 - RNA, 19 nt, Artificial Sequence
  Description of Artificial Sequence: Synthetic oligonucleotide
  Sense strand starting at position 616 of SEQ ID NO: 913661
ugucccaauuauguuuaaa

SEQ ID NO: 944299 - RNA, 19 nt, Artificial Sequence
  Description of Artificial Sequence: Synthetic oligonucleotide
  Antisense strand to SEQ ID NO: 944298
uuuaaacauaauugggaca

SEQ ID NO: 944300 - RNA, 19 nt, Artificial Sequence
  Description of Artificial Sequence: Synthetic oligonucleotide
  Sense strand starting at position 3684 of SEQ ID NO: 913661
uugcauuucguuuguuaga

SEQ ID NO: 944301 - RNA, 19 nt, Artificial Sequence
  Description of Artificial Sequence: Synthetic oligonucleotide
  Antisense strand to SEQ ID NO: 944300
ucuaacaaacgaaaugcaa

SEQ ID NO: 944302 - RNA, 19 nt, Artificial Sequence
  Description of Artificial Sequence: Synthetic oligonucleotide
  Sense strand starting at position 3204 of SEQ ID NO: 913661
cgcagagucguagcgaguu

SEQ ID NO: 944303 - RNA, 19 nt, Artificial Sequence
  Description of Artificial Sequence: Synthetic oligonucleotide
  Antisense strand to SEQ ID NO: 944302
aacucgcuacgacucugcg

SEQ ID NO: 944304 - RNA, 19 nt, Artificial Sequence
  Description of Artificial Sequence: Synthetic oligonucleotide
  Sense strand starting at position 3746 of SEQ ID NO: 913661
gcgugaacaucuuuaggaa

SEQ ID NO: 944305 - RNA, 19 nt, Artificial Sequence
  Description of Artificial Sequence: Synthetic oligonucleotide
  Antisense strand to SEQ ID NO: 944304
uuccuaaagauguucacgc

SEQ ID NO: 944306 - RNA, 19 nt, Artificial Sequence
  Description of Artificial Sequence: Synthetic oligonucleotide
  Sense strand starting at position 3539 of SEQ ID NO: 913661
guggcauugcuccaaucaa

SEQ ID NO: 944307 - RNA, 19 nt, Artificial Sequence
  Description of Artificial Sequence: Synthetic oligonucleotide
  Antisense strand to SEQ ID NO: 944306
uugauuggagcaaugccac

SEQ ID NO: 944308 - RNA, 19 nt, Artificial Sequence
  Description of Artificial Sequence: Synthetic oligonucleotide
  Sense strand starting at position 3798 of SEQ ID NO: 913661
ggaauagacuucguuaugu

SEQ ID NO: 944309 - RNA, 19 nt, Artificial Sequence
  Description of Artificial Sequence: Synthetic oligonucleotide
  Antisense strand to SEQ ID NO: 944308
acauaacgaagucuauucc

SEQ ID NO: 944310 - RNA, 19 nt, Artificial Sequence
  Description of Artificial Sequence: Synthetic oligonucleotide
  Sense strand starting at position 3800 of SEQ ID NO: 913661
aauagacuucguuaugugu

SEQ ID NO: 944311 - RNA, 19 nt, Artificial Sequence
  Description of Artificial Sequence: Synthetic oligonucleotide
  Antisense strand to SEQ ID NO: 944310
acacauaacgaagucuauu

SEQ ID NO: 944312 - RNA, 19 nt, Artificial Sequence
  Description of Artificial Sequence: Synthetic oligonucleotide
  Sense strand starting at position 3454 of SEQ ID NO: 913661
gugugugcacuauacagau

SEQ ID NO: 944313 - RNA, 19 nt, Artificial Sequence
  Description of Artificial Sequence: Synthetic oligonucleotide
  Antisense strand to SEQ ID NO: 944312
aucuguauagugcacacac

SEQ ID NO: 944314 - RNA, 19 nt, Artificial Sequence
  Description of Artificial Sequence: Synthetic oligonucleotide
  Sense strand starting at position 3859 of SEQ ID NO: 913661
acugcuauccugugaacua

SEQ ID NO: 944315 - RNA, 19 nt, Artificial Sequence
  Description of Artificial Sequence: Synthetic oligonucleotide
  Antisense strand to SEQ ID NO: 944314
uaguucacaggauagcagu

SEQ ID NO: 944316 - RNA, 19 nt, Artificial Sequence
  Description of Artificial Sequence: Synthetic oligonucleotide
  Sense strand starting at position 888 of SEQ ID NO: 913661
uggacuaguucugucucca

SEQ ID NO: 944317 - RNA, 19 nt, Artificial Sequence
  Description of Artificial Sequence: Synthetic oligonucleotide
  Antisense strand to SEQ ID NO: 944316
uggagacagaacuagucca

SEQ ID NO: 944318 - RNA, 19 nt, Artificial Sequence
  Description of Artificial Sequence: Synthetic oligonucleotide
  Sense strand starting at position 229 of SEQ ID NO: 913661
ggcagaaucgaaugugcaa

SEQ ID NO: 944319 - RNA, 19 nt, Artificial Sequence
  Description of Artificial Sequence: Synthetic oligonucleotide
  Antisense strand to SEQ ID NO: 944318
uugcacauucgauucugcc

SEQ ID NO: 944320 - RNA, 19 nt, Artificial Sequence
  Description of Artificial Sequence: Synthetic oligonucleotide
  Sense strand starting at position 3431 of SEQ ID NO: 913661
agagaauguuaccaaacaa

SEQ ID NO: 944321 - RNA, 19 nt, Artificial Sequence
  Description of Artificial Sequence: Synthetic oligonucleotide
  Antisense strand to SEQ ID NO: 944320
uuguuugguaacauucucu

SEQ ID NO: 944322 - RNA, 19 nt, Artificial Sequence
  Description of Artificial Sequence: Synthetic oligonucleotide
  Sense strand starting at position 3448 of SEQ ID NO: 913661
aaugaagugugugcacuau

SEQ ID NO: 944323 - RNA, 19 nt, Artificial Sequence
  Description of Artificial Sequence: Synthetic oligonucleotide
  Antisense strand to SEQ ID NO: 944322
auagugcacacacuucauu

SEQ ID NO: 944324 - RNA, 19 nt, Artificial Sequence
  Description of Artificial Sequence: Synthetic oligonucleotide
  Sense strand starting at position 3447 of SEQ ID NO: 913661
caaugaagugugugcacua

SEQ ID NO: 944325 - RNA, 19 nt, Artificial Sequence
  Description of Artificial Sequence: Synthetic oligonucleotide
  Antisense strand to SEQ ID NO: 944324
uagugcacacacuucauug

SEQ ID NO: 944326 - RNA, 19 nt, Artificial Sequence
  Description of Artificial Sequence: Synthetic oligonucleotide
  Sense strand starting at position 613 of SEQ ID NO: 913661
gugugucccaauuauguuu

SEQ ID NO: 944327 - RNA, 19 nt, Artificial Sequence
  Description of Artificial Sequence: Synthetic oligonucleotide
  Antisense strand to SEQ ID NO: 944326
aaacauaauugggacacac

SEQ ID NO: 944328 - RNA, 19 nt, Artificial Sequence
  Description of Artificial Sequence: Synthetic oligonucleotide
  Sense strand starting at position 3725 of SEQ ID NO: 913661
cuaggucagguucguuaga

SEQ ID NO: 944329 - RNA, 19 nt, Artificial Sequence
  Description of Artificial Sequence: Synthetic oligonucleotide
  Antisense strand to SEQ ID NO: 944328
ucuaacgaaccugaccuag

SEQ ID NO: 944330 - RNA, 19 nt, Artificial Sequence
  Description of Artificial Sequence: Synthetic oligonucleotide
  Sense strand starting at position 336 of SEQ ID NO: 913661
ggccgagcugggugaauua

SEQ ID NO: 944331 - RNA, 19 nt, Artificial Sequence
  Description of Artificial Sequence: Synthetic oligonucleotide
  Antisense strand to SEQ ID NO: 944330
uaauucacccagcucggcc

SEQ ID NO: 944332 - RNA, 19 nt, Artificial Sequence
  Description of Artificial Sequence: Synthetic oligonucleotide
  Sense strand starting at position 3919 of SEQ ID NO: 913661
guacacguucguuacaauc

SEQ ID NO: 944333 - RNA, 19 nt, Artificial Sequence
  Description of Artificial Sequence: Synthetic oligonucleotide
  Antisense strand to SEQ ID NO: 944332
gauuguaacgaacguguac

SEQ ID NO: 944334 - RNA, 19 nt, Artificial Sequence
  Description of Artificial Sequence: Synthetic oligonucleotide
  Sense strand starting at position 3383 of SEQ ID NO: 913661
gcagucaccucccuuucua

SEQ ID NO: 944335 - RNA, 19 nt, Artificial Sequence
  Description of Artificial Sequence: Synthetic oligonucleotide
  Antisense strand to SEQ ID NO: 944334
uagaaagggaggugacugc

SEQ ID NO: 944336 - RNA, 19 nt, Artificial Sequence
  Description of Artificial Sequence: Synthetic oligonucleotide
  Sense strand starting at position 3803 of SEQ ID NO: 913661
agacuucguuauguguuga

SEQ ID NO: 944337 - RNA, 19 nt, Artificial Sequence
  Description of Artificial Sequence: Synthetic oligonucleotide
  Antisense strand to SEQ ID NO: 944336
ucaacacauaacgaagucu

SEQ ID NO: 944338 - RNA, 19 nt, Artificial Sequence
  Description of Artificial Sequence: Synthetic oligonucleotide
  Sense strand starting at position 3808 of SEQ ID NO: 913661
ucguuauguguugaggguu

SEQ ID NO: 944339 - RNA, 19 nt, Artificial Sequence
  Description of Artificial Sequence: Synthetic oligonucleotide
  Antisense strand to SEQ ID NO: 944338
aacccucaacacauaacga

SEQ ID NO: 944340 - RNA, 19 nt, Artificial Sequence
  Description of Artificial Sequence: Synthetic oligonucleotide
  Sense strand starting at position 3820 of SEQ ID NO: 913661
gaggguugucuguggguuu

SEQ ID NO: 944341 - RNA, 19 nt, Artificial Sequence
  Description of Artificial Sequence: Synthetic oligonucleotide
  Antisense strand to SEQ ID NO: 944340
aaacccacagacaacccuc

SEQ ID NO: 944342 - RNA, 19 nt, Artificial Sequence
  Description of Artificial Sequence: Synthetic oligonucleotide
  Sense strand starting at position 3917 of SEQ ID NO: 913661
agguacacguucguuacaa

SEQ ID NO: 944343 - RNA, 19 nt, Artificial Sequence
  Description of Artificial Sequence: Synthetic oligonucleotide
  Antisense strand to SEQ ID NO: 944342
uuguaacgaacguguaccu

SEQ ID NO: 944344 - RNA, 19 nt, Artificial Sequence
  Description of Artificial Sequence: Synthetic oligonucleotide
  Sense strand starting at position 3737 of SEQ ID NO: 913661
cguuagagggcgugaacau

SEQ ID NO: 944345 - RNA, 19 nt, Artificial Sequence
  Description of Artificial Sequence: Synthetic oligonucleotide
  Antisense strand to SEQ ID NO: 944344
auguucacgcccucuaacg

SEQ ID NO: 944346 - RNA, 19 nt, Artificial Sequence
  Description of Artificial Sequence: Synthetic oligonucleotide
  Sense strand starting at position 3918 of SEQ ID NO: 913661
gguacacguucguuacaau

SEQ ID NO: 944347 - RNA, 19 nt, Artificial Sequence
  Description of Artificial Sequence: Synthetic oligonucleotide
  Antisense strand to SEQ ID NO: 944346
auuguaacgaacguguacc

SEQ ID NO: 944348 - RNA, 19 nt, Artificial Sequence
  Description of Artificial Sequence: Synthetic oligonucleotide
  Sense strand starting at position 409 of SEQ ID NO: 913662
gaaagugaaacugaguguu

SEQ ID NO: 944349 - RNA, 19 nt, Artificial Sequence
  Description of Artificial Sequence: Synthetic oligonucleotide
  Antisense strand to SEQ ID NO: 944348
aacacucaguuucacuuuc

SEQ ID NO: 944350 - RNA, 19 nt, Artificial Sequence
  Description of Artificial Sequence: Synthetic oligonucleotide
  Sense strand starting at position 809 of SEQ ID NO: 913662
auuacaugucuggaucuau

SEQ ID NO: 944351 - RNA, 19 nt, Artificial Sequence
  Description of Artificial Sequence: Synthetic oligonucleotide
  Antisense strand to SEQ ID NO: 944350
auagauccagacauguaau

SEQ ID NO: 944352 - RNA, 19 nt, Artificial Sequence
  Description of Artificial Sequence: Synthetic oligonucleotide
  Sense strand starting at position 2894 of SEQ ID NO: 913662
acaagagguucccugauga

SEQ ID NO: 944353 - RNA, 19 nt, Artificial Sequence
  Description of Artificial Sequence: Synthetic oligonucleotide
  Antisense strand to SEQ ID NO: 944352
ucaucagggaaccucuugu

SEQ ID NO: 944354 - RNA, 19 nt, Artificial Sequence
  Description of Artificial Sequence: Synthetic oligonucleotide
  Sense strand starting at position 1471 of SEQ ID NO: 913662
cuuuguguaagugugcauu

SEQ ID NO: 944355 - RNA, 19 nt, Artificial Sequence
  Description of Artificial Sequence: Synthetic oligonucleotide
  Antisense strand to SEQ ID NO: 944354
aaugcacacuuacacaaag

SEQ ID NO: 944356 - RNA, 19 nt, Artificial Sequence
  Description of Artificial Sequence: Synthetic oligonucleotide
  Sense strand starting at position 2388 of SEQ ID NO: 913662
gggcuuuccguucuauguu

SEQ ID NO: 944357 - RNA, 19 nt, Artificial Sequence
  Description of Artificial Sequence: Synthetic oligonucleotide
  Antisense strand to SEQ ID NO: 944356
aacauagaacggaaagccc

SEQ ID NO: 944358 - RNA, 19 nt, Artificial Sequence
  Description of Artificial Sequence: Synthetic oligonucleotide
  Sense strand starting at position 2387 of SEQ ID NO: 913662
ugggcuuuccguucuaugu

SEQ ID NO: 944359 - RNA, 19 nt, Artificial Sequence
  Description of Artificial Sequence: Synthetic oligonucleotide
  Antisense strand to SEQ ID NO: 944358
acauagaacggaaagccca

SEQ ID NO: 944360 - RNA, 19 nt, Artificial Sequence
  Description of Artificial Sequence: Synthetic oligonucleotide
  Sense strand starting at position 1866 of SEQ ID NO: 913662
gaggacuugccugaaguca

SEQ ID NO: 944361 - RNA, 19 nt, Artificial Sequence
  Description of Artificial Sequence: Synthetic oligonucleotide
  Antisense strand to SEQ ID NO: 944360
ugacuucaggcaaguccuc

SEQ ID NO: 944362 - RNA, 19 nt, Artificial Sequence
  Description of Artificial Sequence: Synthetic oligonucleotide
  Sense strand starting at position 1474 of SEQ ID NO: 913662
uguguaagugugcauuuaa

SEQ ID NO: 944363 - RNA, 19 nt, Artificial Sequence
  Description of Artificial Sequence: Synthetic oligonucleotide
  Antisense strand to SEQ ID NO: 944362
uuaaaugcacacuuacaca

SEQ ID NO: 944364 - RNA, 19 nt, Artificial Sequence
  Description of Artificial Sequence: Synthetic oligonucleotide
  Sense strand starting at position 2628 of SEQ ID NO: 913662
agugaauaagccuacccau

SEQ ID NO: 944365 - RNA, 19 nt, Artificial Sequence
  Description of Artificial Sequence: Synthetic oligonucleotide
  Antisense strand to SEQ ID NO: 944364
auggguaggcuuauucacu

SEQ ID NO: 944366 - RNA, 19 nt, Artificial Sequence
  Description of Artificial Sequence: Synthetic oligonucleotide
  Sense strand starting at position 1135 of SEQ ID NO: 913662
uuugcuaaucuggacaauu

SEQ ID NO: 944367 - RNA, 19 nt, Artificial Sequence
  Description of Artificial Sequence: Synthetic oligonucleotide
  Antisense strand to SEQ ID NO: 944366
aauuguccagauuagcaaa

SEQ ID NO: 944368 - RNA, 19 nt, Artificial Sequence
  Description of Artificial Sequence: Synthetic oligonucleotide
  Sense strand starting at position 52 of SEQ ID NO: 913662
uggucagaucuggaguuua

SEQ ID NO: 944369 - RNA, 19 nt, Artificial Sequence
  Description of Artificial Sequence: Synthetic oligonucleotide
  Antisense strand to SEQ ID NO: 944368
uaaacuccagaucugacca

SEQ ID NO: 944370 - RNA, 19 nt, Artificial Sequence
  Description of Artificial Sequence: Synthetic oligonucleotide
  Sense strand starting at position 991 of SEQ ID NO: 913662
ccuagaauuccuggaagua

SEQ ID NO: 944371 - RNA, 19 nt, Artificial Sequence
  Description of Artificial Sequence: Synthetic oligonucleotide
  Antisense strand to SEQ ID NO: 944370
uacuuccaggaauucuagg

SEQ ID NO: 944372 - RNA, 19 nt, Artificial Sequence
  Description of Artificial Sequence: Synthetic oligonucleotide
  Sense strand starting at position 3800 of SEQ ID NO: 913662
gaaaucugagacuggucuu

SEQ ID NO: 944373 - RNA, 19 nt, Artificial Sequence
  Description of Artificial Sequence: Synthetic oligonucleotide
  Antisense strand to SEQ ID NO: 944372
aagaccagucucagauuuc

SEQ ID NO: 944374 - RNA, 19 nt, Artificial Sequence
  Description of Artificial Sequence: Synthetic oligonucleotide
  Sense strand starting at position 44 of SEQ ID NO: 913662
cuuugaaguggucagaucu

SEQ ID NO: 944375 - RNA, 19 nt, Artificial Sequence
  Description of Artificial Sequence: Synthetic oligonucleotide
  Antisense strand to SEQ ID NO: 944374
agaucugaccacuucaaag

SEQ ID NO: 944376 - RNA, 19 nt, Artificial Sequence
  Description of Artificial Sequence: Synthetic oligonucleotide
  Sense strand starting at position 3635 of SEQ ID NO: 913662
uguuaaugucauuaaccau

SEQ ID NO: 944377 - RNA, 19 nt, Artificial Sequence
  Description of Artificial Sequence: Synthetic oligonucleotide
  Antisense strand to SEQ ID NO: 944376
augguuaaugacauuaaca

SEQ ID NO: 944378 - RNA, 19 nt, Artificial Sequence
  Description of Artificial Sequence: Synthetic oligonucleotide
  Sense strand starting at position 3823 of SEQ ID NO: 913662
aggcaugugaaugacaguu

SEQ ID NO: 944379 - RNA, 19 nt, Artificial Sequence
  Description of Artificial Sequence: Synthetic oligonucleotide
  Antisense strand to SEQ ID NO: 944378
aacugucauucacaugccu

SEQ ID NO: 944380 - RNA, 19 nt, Artificial Sequence
  Description of Artificial Sequence: Synthetic oligonucleotide
  Sense strand starting at position 2767 of SEQ ID NO: 913662
aggcuucacgaagaguuga

SEQ ID NO: 944381 - RNA, 19 nt, Artificial Sequence
  Description of Artificial Sequence: Synthetic oligonucleotide
  Antisense strand to SEQ ID NO: 944380
ucaacucuucgugaagccu

SEQ ID NO: 944382 - RNA, 19 nt, Artificial Sequence
  Description of Artificial Sequence: Synthetic oligonucleotide
  Sense strand starting at position 2820 of SEQ ID NO: 913662
aggaaacaaugugugcaaa

SEQ ID NO: 944383 - RNA, 19 nt, Artificial Sequence
  Description of Artificial Sequence: Synthetic oligonucleotide
  Antisense strand to SEQ ID NO: 944382
uuugcacacauuguuuccu

SEQ ID NO: 944384 - RNA, 19 nt, Artificial Sequence
  Description of Artificial Sequence: Synthetic oligonucleotide
  Sense strand starting at position 1418 of SEQ ID NO: 913662
agcacuucgcaggaauaaa

SEQ ID NO: 944385 - RNA, 19 nt, Artificial Sequence
  Description of Artificial Sequence: Synthetic oligonucleotide
  Antisense strand to SEQ ID NO: 944384
uuuauuccugcgaagugcu

SEQ ID NO: 944386 - RNA, 19 nt, Artificial Sequence
  Description of Artificial Sequence: Synthetic oligonucleotide
  Sense strand starting at position 1443 of SEQ ID NO: 913662
cuguacacccgagauacuu

SEQ ID NO: 944387 - RNA, 19 nt, Artificial Sequence
  Description of Artificial Sequence: Synthetic oligonucleotide
  Antisense strand to SEQ ID NO: 944386
aaguaucucggguguacag

SEQ ID NO: 944388 - RNA, 19 nt, Artificial Sequence
  Description of Artificial Sequence: Synthetic oligonucleotide
  Sense strand starting at position 3496 of SEQ ID NO: 913662
cuaugugagaauuggcaaa

SEQ ID NO: 944389 - RNA, 19 nt, Artificial Sequence
  Description of Artificial Sequence: Synthetic oligonucleotide
  Antisense strand to SEQ ID NO: 944388
uuugccaauucucacauag

SEQ ID NO: 944390 - RNA, 19 nt, Artificial Sequence
  Description of Artificial Sequence: Synthetic oligonucleotide
  Sense strand starting at position 41 of SEQ ID NO: 913662
ugacuuugaaguggucaga

SEQ ID NO: 944391 - RNA, 19 nt, Artificial Sequence
  Description of Artificial Sequence: Synthetic oligonucleotide
  Antisense strand to SEQ ID NO: 944390
ucugaccacuucaaaguca

SEQ ID NO: 944392 - RNA, 19 nt, Artificial Sequence
  Description of Artificial Sequence: Synthetic oligonucleotide
  Sense strand starting at position 823 of SEQ ID NO: 913662
ucuauuugucacugcagca

SEQ ID NO: 944393 - RNA, 19 nt, Artificial Sequence
  Description of Artificial Sequence: Synthetic oligonucleotide
  Antisense strand to SEQ ID NO: 944392
ugcugcagugacaaauaga

SEQ ID NO: 944394 - RNA, 19 nt, Artificial Sequence
  Description of Artificial Sequence: Synthetic oligonucleotide
  Sense strand starting at position 615 of SEQ ID NO: 913662
agcugauucccaggacauc

SEQ ID NO: 944395 - RNA, 19 nt, Artificial Sequence
  Description of Artificial Sequence: Synthetic oligonucleotide
  Antisense strand to SEQ ID NO: 944394
gauguccugggaaucagcu

SEQ ID NO: 944396 - RNA, 19 nt, Artificial Sequence
  Description of Artificial Sequence: Synthetic oligonucleotide
  Sense strand starting at position 3754 of SEQ ID NO: 913662
uuaaguuaucuguggaaua

SEQ ID NO: 944397 - RNA, 19 nt, Artificial Sequence
  Description of Artificial Sequence: Synthetic oligonucleotide
  Antisense strand to SEQ ID NO: 944396
uauuccacagauaacuuaa

SEQ ID NO: 944398 - RNA, 19 nt, Artificial Sequence
  Description of Artificial Sequence: Synthetic oligonucleotide
  Sense strand starting at position 3634 of SEQ ID NO: 913662
auguuaaugucauuaacca

SEQ ID NO: 944399 - RNA, 19 nt, Artificial Sequence
  Description of Artificial Sequence: Synthetic oligonucleotide
  Antisense strand to SEQ ID NO: 944398
ugguuaaugacauuaacau

SEQ ID NO: 944400 - RNA, 19 nt, Artificial Sequence
  Description of Artificial Sequence: Synthetic oligonucleotide
  Sense strand starting at position 1483 of SEQ ID NO: 913662
gugcauuuaacaugugucu

SEQ ID NO: 944401 - RNA, 19 nt, Artificial Sequence
  Description of Artificial Sequence: Synthetic oligonucleotide
  Antisense strand to SEQ ID NO: 944400
agacacauguuaaaugcac

SEQ ID NO: 944402 - RNA, 19 nt, Artificial Sequence
  Description of Artificial Sequence: Synthetic oligonucleotide
  Sense strand starting at position 2846 of SEQ ID NO: 913662
aggcauuaacaaugcacua

SEQ ID NO: 944403 - RNA, 19 nt, Artificial Sequence
  Description of Artificial Sequence: Synthetic oligonucleotide
  Antisense strand to SEQ ID NO: 944402
uagugcauuguuaaugccu

SEQ ID NO: 944404 - RNA, 19 nt, Artificial Sequence
  Description of Artificial Sequence: Synthetic oligonucleotide
  Sense strand starting at position 3822 of SEQ ID NO: 913662
aaggcaugugaaugacagu

SEQ ID NO: 944405 - RNA, 19 nt, Artificial Sequence
  Description of Artificial Sequence: Synthetic oligonucleotide
  Antisense strand to SEQ ID NO: 944404
acugucauucacaugccuu

SEQ ID NO: 944406 - RNA, 19 nt, Artificial Sequence
  Description of Artificial Sequence: Synthetic oligonucleotide
  Sense strand starting at position 1865 of SEQ ID NO: 913662
agaggacuugccugaaguc

SEQ ID NO: 944407 - RNA, 19 nt, Artificial Sequence
  Description of Artificial Sequence: Synthetic oligonucleotide
  Antisense strand to SEQ ID NO: 944406
gacuucaggcaaguccucu

SEQ ID NO: 944408 - RNA, 19 nt, Artificial Sequence
  Description of Artificial Sequence: Synthetic oligonucleotide
  Sense strand starting at position 1834 of SEQ ID NO: 913662
acaauugugccaugauuaa

SEQ ID NO: 944409 - RNA, 19 nt, Artificial Sequence
  Description of Artificial Sequence: Synthetic oligonucleotide
  Antisense strand to SEQ ID NO: 944408
uuaaucauggcacaauugu

SEQ ID NO: 944410 - RNA, 19 nt, Artificial Sequence
  Description of Artificial Sequence: Synthetic oligonucleotide
  Sense strand starting at position 3641 of SEQ ID NO: 913662
ugucauuaaccauguuaag

SEQ ID NO: 944411 - RNA, 19 nt, Artificial Sequence
  Description of Artificial Sequence: Synthetic oligonucleotide
  Antisense strand to SEQ ID NO: 944410
cuuaacaugguuaaugaca

SEQ ID NO: 944412 - RNA, 19 nt, Artificial Sequence
  Description of Artificial Sequence: Synthetic oligonucleotide
  Sense strand starting at position 807 of SEQ ID NO: 913662
ccauuacaugucuggaucu

SEQ ID NO: 944413 - RNA, 19 nt, Artificial Sequence
  Description of Artificial Sequence: Synthetic oligonucleotide
  Antisense strand to SEQ ID NO: 944412
agauccagacauguaaugg

SEQ ID NO: 944414 - RNA, 19 nt, Artificial Sequence
  Description of Artificial Sequence: Synthetic oligonucleotide
  Sense strand starting at position 3764 of SEQ ID NO: 913662
uguggaauaccauguuuau

SEQ ID NO: 944415 - RNA, 19 nt, Artificial Sequence
  Description of Artificial Sequence: Synthetic oligonucleotide
  Antisense strand to SEQ ID NO: 944414
auaaacaugguauuccaca

SEQ ID NO: 944416 - RNA, 19 nt, Artificial Sequence
  Description of Artificial Sequence: Synthetic oligonucleotide
  Sense strand starting at position 3547 of SEQ ID NO: 913662
agaacauggcuuuguuuga

SEQ ID NO: 944417 - RNA, 19 nt, Artificial Sequence
  Description of Artificial Sequence: Synthetic oligonucleotide
  Antisense strand to SEQ ID NO: 944416
ucaaacaaagccauguucu

SEQ ID NO: 944418 - RNA, 19 nt, Artificial Sequence
  Description of Artificial Sequence: Synthetic oligonucleotide
  Sense strand starting at position 1473 of SEQ ID NO: 913662
uuguguaagugugcauuua

SEQ ID NO: 944419 - RNA, 19 nt, Artificial Sequence
  Description of Artificial Sequence: Synthetic oligonucleotide
  Antisense strand to SEQ ID NO: 944418
uaaaugcacacuuacacaa

SEQ ID NO: 944420 - RNA, 19 nt, Artificial Sequence
  Description of Artificial Sequence: Synthetic oligonucleotide
  Sense strand starting at position 799 of SEQ ID NO: 913662
uugugaggccauuacaugu

SEQ ID NO: 944421 - RNA, 19 nt, Artificial Sequence
  Description of Artificial Sequence: Synthetic oligonucleotide
  Antisense strand to SEQ ID NO: 944420
acauguaauggccucacaa

SEQ ID NO: 944422 - RNA, 19 nt, Artificial Sequence
  Description of Artificial Sequence: Synthetic oligonucleotide
  Sense strand starting at position 870 of SEQ ID NO: 913662
ugaaauggauaccaaauaa

SEQ ID NO: 944423 - RNA, 19 nt, Artificial Sequence
  Description of Artificial Sequence: Synthetic oligonucleotide
  Antisense strand to SEQ ID NO: 944422
uuauuugguauccauuuca

SEQ ID NO: 944424 - RNA, 19 nt, Artificial Sequence
  Description of Artificial Sequence: Synthetic oligonucleotide
  Sense strand starting at position 1417 of SEQ ID NO: 913662
aagcacuucgcaggaauaa

SEQ ID NO: 944425 - RNA, 19 nt, Artificial Sequence
  Description of Artificial Sequence: Synthetic oligonucleotide
  Antisense strand to SEQ ID NO: 944424
uuauuccugcgaagugcuu

SEQ ID NO: 944426 - RNA, 19 nt, Artificial Sequence
  Description of Artificial Sequence: Synthetic oligonucleotide
  Sense strand starting at position 2565 of SEQ ID NO: 913662
augagagcuuugucuuaug

SEQ ID NO: 944427 - RNA, 19 nt, Artificial Sequence
  Description of Artificial Sequence: Synthetic oligonucleotide
  Antisense strand to SEQ ID NO: 944426
cauaagacaaagcucucau

SEQ ID NO: 944428 - RNA, 19 nt, Artificial Sequence
  Description of Artificial Sequence: Synthetic oligonucleotide
  Sense strand starting at position 390 of SEQ ID NO: 913663
agcugaacacuacauguaa

SEQ ID NO: 944429 - RNA, 19 nt, Artificial Sequence
  Description of Artificial Sequence: Synthetic oligonucleotide
  Antisense strand to SEQ ID NO: 944428
uuacauguaguguucagcu

SEQ ID NO: 944430 - RNA, 19 nt, Artificial Sequence
  Description of Artificial Sequence: Synthetic oligonucleotide
  Sense strand starting at position 3524 of SEQ ID NO: 913663
augagaugaucccuguaaa

SEQ ID NO: 944431 - RNA, 19 nt, Artificial Sequence
  Description of Artificial Sequence: Synthetic oligonucleotide
  Antisense strand to SEQ ID NO: 944430
uuuacagggaucaucucau

SEQ ID NO: 944432 - RNA, 19 nt, Artificial Sequence
  Description of Artificial Sequence: Synthetic oligonucleotide
  Sense strand starting at position 2909 of SEQ ID NO: 913663
augagcuauaagugagaaa

SEQ ID NO: 944433 - RNA, 19 nt, Artificial Sequence
  Description of Artificial Sequence: Synthetic oligonucleotide
  Antisense strand to SEQ ID NO: 944432
uuucucacuuauagcucau

SEQ ID NO: 944434 - RNA, 19 nt, Artificial Sequence
  Description of Artificial Sequence: Synthetic oligonucleotide
  Sense strand starting at position 2743 of SEQ ID NO: 913663
uggauucuccaaggacuca

SEQ ID NO: 944435 - RNA, 19 nt, Artificial Sequence
  Description of Artificial Sequence: Synthetic oligonucleotide
  Antisense strand to SEQ ID NO: 944434
ugaguccuuggagaaucca

SEQ ID NO: 944436 - RNA, 19 nt, Artificial Sequence
  Description of Artificial Sequence: Synthetic oligonucleotide
  Sense strand starting at position 421 of SEQ ID NO: 913663
agggauguucuuuaaucuc

SEQ ID NO: 944437 - RNA, 19 nt, Artificial Sequence
  Description of Artificial Sequence: Synthetic oligonucleotide
  Antisense strand to SEQ ID NO: 944436
gagauuaaagaacaucccu

SEQ ID NO: 944438 - RNA, 19 nt, Artificial Sequence
  Description of Artificial Sequence: Synthetic oligonucleotide
  Sense strand starting at position 3634 of SEQ ID NO: 913663
aacaaagacuuuguguaga

SEQ ID NO: 944439 - RNA, 19 nt, Artificial Sequence
  Description of Artificial Sequence: Synthetic oligonucleotide
  Antisense strand to SEQ ID NO: 944438
ucuacacaaagucuuuguu

SEQ ID NO: 944440 - RNA, 19 nt, Artificial Sequence
  Description of Artificial Sequence: Synthetic oligonucleotide
  Sense strand starting at position 3636 of SEQ ID NO: 913663
caaagacuuuguguagaaa

SEQ ID NO: 944441 - RNA, 19 nt, Artificial Sequence
  Description of Artificial Sequence: Synthetic oligonucleotide
  Antisense strand to SEQ ID NO: 944440
uuucuacacaaagucuuug

SEQ ID NO: 944442 - RNA, 19 nt, Artificial Sequence
  Description of Artificial Sequence: Synthetic oligonucleotide
  Sense strand starting at position 3169 of SEQ ID NO: 913663
ccaauuucugucuguuuau

SEQ ID NO: 944443 - RNA, 19 nt, Artificial Sequence
  Description of Artificial Sequence: Synthetic oligonucleotide
  Antisense strand to SEQ ID NO: 944442
auaaacagacagaaauugg

SEQ ID NO: 944444 - RNA, 19 nt, Artificial Sequence
  Description of Artificial Sequence: Synthetic oligonucleotide
  Sense strand starting at position 1021 of SEQ ID NO: 913663
caaggaaucguccaaagca

SEQ ID NO: 944445 - RNA, 19 nt, Artificial Sequence
  Description of Artificial Sequence: Synthetic oligonucleotide
  Antisense strand to SEQ ID NO: 944444
ugcuuuggacgauuccuug

SEQ ID NO: 944446 - RNA, 19 nt, Artificial Sequence
  Description of Artificial Sequence: Synthetic oligonucleotide
  Sense strand starting at position 788 of SEQ ID NO: 913663
uguacacauccuggacaga

SEQ ID NO: 944447 - RNA, 19 nt, Artificial Sequence
  Description of Artificial Sequence: Synthetic oligonucleotide
  Antisense strand to SEQ ID NO: 944446
ucuguccaggauguguaca

SEQ ID NO: 944448 - RNA, 19 nt, Artificial Sequence
  Description of Artificial Sequence: Synthetic oligonucleotide
  Sense strand starting at position 3506 of SEQ ID NO: 913663
cuuacuuucgagggauaaa

SEQ ID NO: 944449 - RNA, 19 nt, Artificial Sequence
  Description of Artificial Sequence: Synthetic oligonucleotide
  Antisense strand to SEQ ID NO: 944448
uuuaucccucgaaaguaag

SEQ ID NO: 944450 - RNA, 19 nt, Artificial Sequence
  Description of Artificial Sequence: Synthetic oligonucleotide
  Sense strand starting at position 2340 of SEQ ID NO: 913663
acaggaguucgcgcugcaa

SEQ ID NO: 944451 - RNA, 19 nt, Artificial Sequence
  Description of Artificial Sequence: Synthetic oligonucleotide
  Antisense strand to SEQ ID NO: 944450
uugcagcgcgaacuccugu

SEQ ID NO: 944452 - RNA, 19 nt, Artificial Sequence
  Description of Artificial Sequence: Synthetic oligonucleotide
  Sense strand starting at position 2343 of SEQ ID NO: 913663
ggaguucgcgcugcaaaca

SEQ ID NO: 944453 - RNA, 19 nt, Artificial Sequence
  Description of Artificial Sequence: Synthetic oligonucleotide
  Antisense strand to SEQ ID NO: 944452
uguuugcagcgcgaacucc

SEQ ID NO: 944454 - RNA, 19 nt, Artificial Sequence
  Description of Artificial Sequence: Synthetic oligonucleotide
  Sense strand starting at position 3858 of SEQ ID NO: 913663
auuuguguacuaugagcga

SEQ ID NO: 944455 - RNA, 19 nt, Artificial Sequence
  Description of Artificial Sequence: Synthetic oligonucleotide
  Antisense strand to SEQ ID NO: 944454
ucgcucauaguacacaaau

SEQ ID NO: 944456 - RNA, 19 nt, Artificial Sequence
  Description of Artificial Sequence: Synthetic oligonucleotide
  Sense strand starting at position 411 of SEQ ID NO: 913663
uuaauaguagagggauguu

SEQ ID NO: 944457 - RNA, 19 nt, Artificial Sequence
  Description of Artificial Sequence: Synthetic oligonucleotide
  Antisense strand to SEQ ID NO: 944456
aacaucccucuacuauuaa

SEQ ID NO: 944458 - RNA, 19 nt, Artificial Sequence
  Description of Artificial Sequence: Synthetic oligonucleotide
  Sense strand starting at position 3670 of SEQ ID NO: 913663
aaggcagugguuuauugaa

SEQ ID NO: 944459 - RNA, 19 nt, Artificial Sequence
  Description of Artificial Sequence: Synthetic oligonucleotide
  Antisense strand to SEQ ID NO: 944458
uucaauaaaccacugccuu

SEQ ID NO: 944460 - RNA, 19 nt, Artificial Sequence
  Description of Artificial Sequence: Synthetic oligonucleotide
  Sense strand starting at position 3852 of SEQ ID NO: 913663
ugcuacauuuguguacuau

SEQ ID NO: 944461 - RNA, 19 nt, Artificial Sequence
  Description of Artificial Sequence: Synthetic oligonucleotide
  Antisense strand to SEQ ID NO: 944460
auaguacacaaauguagca

SEQ ID NO: 944462 - RNA, 19 nt, Artificial Sequence
  Description of Artificial Sequence: Synthetic oligonucleotide
  Sense strand starting at position 3926 of SEQ ID NO: 913663
guguuuagauuuguguuag

SEQ ID NO: 944463 - RNA, 19 nt, Artificial Sequence
  Description of Artificial Sequence: Synthetic oligonucleotide
  Antisense strand to SEQ ID NO: 944462
cuaacacaaaucuaaacac

SEQ ID NO: 944464 - RNA, 19 nt, Artificial Sequence
  Description of Artificial Sequence: Synthetic oligonucleotide
  Sense strand starting at position 3819 of SEQ ID NO: 913663
aggugaugucaugaguuca

SEQ ID NO: 944465 - RNA, 19 nt, Artificial Sequence
  Description of Artificial Sequence: Synthetic oligonucleotide
  Antisense strand to SEQ ID NO: 944464
ugaacucaugacaucaccu

SEQ ID NO: 944466 - RNA, 19 nt, Artificial Sequence
  Description of Artificial Sequence: Synthetic oligonucleotide
  Sense strand starting at position 3949 of SEQ ID NO: 913663
guuuguaauuucuuacugu

SEQ ID NO: 944467 - RNA, 19 nt, Artificial Sequence
  Description of Artificial Sequence: Synthetic oligonucleotide
  Antisense strand to SEQ ID NO: 944466
acaguaagaaauuacaaac

SEQ ID NO: 944468 - RNA, 19 nt, Artificial Sequence
  Description of Artificial Sequence: Synthetic oligonucleotide
  Sense strand starting at position 3633 of SEQ ID NO: 913663
caacaaagacuuuguguag

SEQ ID NO: 944469 - RNA, 19 nt, Artificial Sequence
  Description of Artificial Sequence: Synthetic oligonucleotide
  Antisense strand to SEQ ID NO: 944468
cuacacaaagucuuuguug

SEQ ID NO: 944470 - RNA, 19 nt, Artificial Sequence
  Description of Artificial Sequence: Synthetic oligonucleotide
  Sense strand starting at position 3863 of SEQ ID NO: 913663
uguacuaugagcgaaucaa

SEQ ID NO: 944471 - RNA, 19 nt, Artificial Sequence
  Description of Artificial Sequence: Synthetic oligonucleotide
  Antisense strand to SEQ ID NO: 944470
uugauucgcucauaguaca

SEQ ID NO: 944472 - RNA, 19 nt, Artificial Sequence
  Description of Artificial Sequence: Synthetic oligonucleotide
  Sense strand starting at position 479 of SEQ ID NO: 913663
cuguuaggaucaguaagau

SEQ ID NO: 944473 - RNA, 19 nt, Artificial Sequence
  Description of Artificial Sequence: Synthetic oligonucleotide
  Antisense strand to SEQ ID NO: 944472
aucuuacugauccuaacag

SEQ ID NO: 944474 - RNA, 19 nt, Artificial Sequence
  Description of Artificial Sequence: Synthetic oligonucleotide
  Sense strand starting at position 2619 of SEQ ID NO: 913663
uuggguguuagacguauuu

SEQ ID NO: 944475 - RNA, 19 nt, Artificial Sequence
  Description of Artificial Sequence: Synthetic oligonucleotide
  Antisense strand to SEQ ID NO: 944474
aaauacgucuaacacccaa

SEQ ID NO: 944476 - RNA, 19 nt, Artificial Sequence
  Description of Artificial Sequence: Synthetic oligonucleotide
  Sense strand starting at position 3505 of SEQ ID NO: 913663
ccuuacuuucgagggauaa

SEQ ID NO: 944477 - RNA, 19 nt, Artificial Sequence
  Description of Artificial Sequence: Synthetic oligonucleotide
  Antisense strand to SEQ ID NO: 944476
uuaucccucgaaaguaagg

SEQ ID NO: 944478 - RNA, 19 nt, Artificial Sequence
  Description of Artificial Sequence: Synthetic oligonucleotide
  Sense strand starting at position 420 of SEQ ID NO: 913663
gagggauguucuuuaaucu

SEQ ID NO: 944479 - RNA, 19 nt, Artificial Sequence
  Description of Artificial Sequence: Synthetic oligonucleotide
  Antisense strand to SEQ ID NO: 944478
agauuaaagaacaucccuc

SEQ ID NO: 944480 - RNA, 19 nt, Artificial Sequence
  Description of Artificial Sequence: Synthetic oligonucleotide
  Sense strand starting at position 541 of SEQ ID NO: 913663
uugucuagaggugauggua

SEQ ID NO: 944481 - RNA, 19 nt, Artificial Sequence
  Description of Artificial Sequence: Synthetic oligonucleotide
  Antisense strand to SEQ ID NO: 944480
uaccaucaccucuagacaa

SEQ ID NO: 944482 - RNA, 19 nt, Artificial Sequence
  Description of Artificial Sequence: Synthetic oligonucleotide
  Sense strand starting at position 596 of SEQ ID NO: 913663
guugucauaauguacuaga

SEQ ID NO: 944483 - RNA, 19 nt, Artificial Sequence
  Description of Artificial Sequence: Synthetic oligonucleotide
  Antisense strand to SEQ ID NO: 944482
ucuaguacauuaugacaac

SEQ ID NO: 944484 - RNA, 19 nt, Artificial Sequence
  Description of Artificial Sequence: Synthetic oligonucleotide
  Sense strand starting at position 309 of SEQ ID NO: 913663
augguaaugacaugugacu

SEQ ID NO: 944485 - RNA, 19 nt, Artificial Sequence
  Description of Artificial Sequence: Synthetic oligonucleotide
  Antisense strand to SEQ ID NO: 944484
agucacaugucauuaccau

SEQ ID NO: 944486 - RNA, 19 nt, Artificial Sequence
  Description of Artificial Sequence: Synthetic oligonucleotide
  Sense strand starting at position 3477 of SEQ ID NO: 913663
ucaaucuguaguggagaua

SEQ ID NO: 944487 - RNA, 19 nt, Artificial Sequence
  Description of Artificial Sequence: Synthetic oligonucleotide
  Antisense strand to SEQ ID NO: 944486
uaucuccacuacagauuga

SEQ ID NO: 944488 - RNA, 19 nt, Artificial Sequence
  Description of Artificial Sequence: Synthetic oligonucleotide
  Sense strand starting at position 311 of SEQ ID NO: 913663
gguaaugacaugugacuua

SEQ ID NO: 944489 - RNA, 19 nt, Artificial Sequence
  Description of Artificial Sequence: Synthetic oligonucleotide
  Antisense strand to SEQ ID NO: 944488
uaagucacaugucauuacc

SEQ ID NO: 944490 - RNA, 19 nt, Artificial Sequence
  Description of Artificial Sequence: Synthetic oligonucleotide
  Sense strand starting at position 55 of SEQ ID NO: 913663
gacagucucccaggugaaa

SEQ ID NO: 944491 - RNA, 19 nt, Artificial Sequence
  Description of Artificial Sequence: Synthetic oligonucleotide
  Antisense strand to SEQ ID NO: 944490
uuucaccugggagacuguc

SEQ ID NO: 944492 - RNA, 19 nt, Artificial Sequence
  Description of Artificial Sequence: Synthetic oligonucleotide
  Sense strand starting at position 2653 of SEQ ID NO: 913663
ucuagauccugaguccaua

SEQ ID NO: 944493 - RNA, 19 nt, Artificial Sequence
  Description of Artificial Sequence: Synthetic oligonucleotide
  Antisense strand to SEQ ID NO: 944492
uauggacucaggaucuaga

SEQ ID NO: 944494 - RNA, 19 nt, Artificial Sequence
  Description of Artificial Sequence: Synthetic oligonucleotide
  Sense strand starting at position 544 of SEQ ID NO: 913663
ucuagaggugaugguauua

SEQ ID NO: 944495 - RNA, 19 nt, Artificial Sequence
  Description of Artificial Sequence: Synthetic oligonucleotide
  Antisense strand to SEQ ID NO: 944494
uaauaccaucaccucuaga

SEQ ID NO: 944496 - RNA, 19 nt, Artificial Sequence
  Description of Artificial Sequence: Synthetic oligonucleotide
  Sense strand starting at position 414 of SEQ ID NO: 913663
auaguagagggauguucuu

SEQ ID NO: 944497 - RNA, 19 nt, Artificial Sequence
  Description of Artificial Sequence: Synthetic oligonucleotide
  Antisense strand to SEQ ID NO: 944496
aagaacaucccucuacuau

SEQ ID NO: 944498 - RNA, 19 nt, Artificial Sequence
  Description of Artificial Sequence: Synthetic oligonucleotide
  Sense strand starting at position 3168 of SEQ ID NO: 913663
gccaauuucugucuguuua

SEQ ID NO: 944499 - RNA, 19 nt, Artificial Sequence
  Description of Artificial Sequence: Synthetic oligonucleotide
  Antisense strand to SEQ ID NO: 944498
uaaacagacagaaauuggc

SEQ ID NO: 944500 - RNA, 19 nt, Artificial Sequence
  Description of Artificial Sequence: Synthetic oligonucleotide
  Sense strand starting at position 3166 of SEQ ID NO: 913663
augccaauuucugucuguu

SEQ ID NO: 944501 - RNA, 19 nt, Artificial Sequence
  Description of Artificial Sequence: Synthetic oligonucleotide
  Antisense strand to SEQ ID NO: 944500
aacagacagaaauuggcau

SEQ ID NO: 944502 - RNA, 19 nt, Artificial Sequence
  Description of Artificial Sequence: Synthetic oligonucleotide
  Sense strand starting at position 3925 of SEQ ID NO: 913663
uguguuuagauuuguguua

SEQ ID NO: 944503 - RNA, 19 nt, Artificial Sequence
  Description of Artificial Sequence: Synthetic oligonucleotide
  Antisense strand to SEQ ID NO: 944502
uaacacaaaucuaaacaca

SEQ ID NO: 944504 - RNA, 19 nt, Artificial Sequence
  Description of Artificial Sequence: Synthetic oligonucleotide
  Sense strand starting at position 862 of SEQ ID NO: 913663
agucauaaacuauggcuga

SEQ ID NO: 944505 - RNA, 19 nt, Artificial Sequence
  Description of Artificial Sequence: Synthetic oligonucleotide
  Antisense strand to SEQ ID NO: 944504
ucagccauaguuuaugacu

SEQ ID NO: 944506 - RNA, 19 nt, Artificial Sequence
  Description of Artificial Sequence: Synthetic oligonucleotide
  Sense strand starting at position 430 of SEQ ID NO: 913663
cuuuaaucucauuaugcga

SEQ ID NO: 944507 - RNA, 19 nt, Artificial Sequence
  Description of Artificial Sequence: Synthetic oligonucleotide
  Antisense strand to SEQ ID NO: 944506
ucgcauaaugagauuaaag

SEQ ID NO: 944508 - RNA, 19 nt, Artificial Sequence
  Description of Artificial Sequence: Synthetic oligonucleotide
  Sense strand starting at position 2404 of SEQ ID NO: 913664
aaagaaacuccaugggucu

SEQ ID NO: 944509 - RNA, 19 nt, Artificial Sequence
  Description of Artificial Sequence: Synthetic oligonucleotide
  Antisense strand to SEQ ID NO: 944508
agacccauggaguuucuuu

SEQ ID NO: 944510 - RNA, 19 nt, Artificial Sequence
  Description of Artificial Sequence: Synthetic oligonucleotide
  Sense strand starting at position 952 of SEQ ID NO: 913664
aaauacucugggcaaguua

SEQ ID NO: 944511 - RNA, 19 nt, Artificial Sequence
  Description of Artificial Sequence: Synthetic oligonucleotide
  Antisense strand to SEQ ID NO: 944510
uaacuugcccagaguauuu

SEQ ID NO: 944512 - RNA, 19 nt, Artificial Sequence
  Description of Artificial Sequence: Synthetic oligonucleotide
  Sense strand starting at position 3928 of SEQ ID NO: 913664
cagagagguuucccuagaa

SEQ ID NO: 944513 - RNA, 19 nt, Artificial Sequence
  Description of Artificial Sequence: Synthetic oligonucleotide
  Antisense strand to SEQ ID NO: 944512
uucuagggaaaccucucug

SEQ ID NO: 944514 - RNA, 19 nt, Artificial Sequence
  Description of Artificial Sequence: Synthetic oligonucleotide
  Sense strand starting at position 897 of SEQ ID NO: 913664
uugaauuacggguaaacuu

SEQ ID NO: 944515 - RNA, 19 nt, Artificial Sequence
  Description of Artificial Sequence: Synthetic oligonucleotide
  Antisense strand to SEQ ID NO: 944514
aaguuuacccguaauucaa

SEQ ID NO: 944516 - RNA, 19 nt, Artificial Sequence
  Description of Artificial Sequence: Synthetic oligonucleotide
  Sense strand starting at position 436 of SEQ ID NO: 913664
gugacuccgcgucuagauu

SEQ ID NO: 944517 - RNA, 19 nt, Artificial Sequence
  Description of Artificial Sequence: Synthetic oligonucleotide
  Antisense strand to SEQ ID NO: 944516
aaucuagacgcggagucac

SEQ ID NO: 944518 - RNA, 19 nt, Artificial Sequence
  Description of Artificial Sequence: Synthetic oligonucleotide
  Sense strand starting at position 3932 of SEQ ID NO: 913664
gagguuucccuagaaugua

SEQ ID NO: 944519 - RNA, 19 nt, Artificial Sequence
  Description of Artificial Sequence: Synthetic oligonucleotide
  Antisense strand to SEQ ID NO: 944518
uacauucuagggaaaccuc

SEQ ID NO: 944520 - RNA, 19 nt, Artificial Sequence
  Description of Artificial Sequence: Synthetic oligonucleotide
  Sense strand starting at position 2208 of SEQ ID NO: 913664
uugaaaguguauccagaag

SEQ ID NO: 944521 - RNA, 19 nt, Artificial Sequence
  Description of Artificial Sequence: Synthetic oligonucleotide
  Antisense strand to SEQ ID NO: 944520
cuucuggauacacuuucaa

SEQ ID NO: 944522 - RNA, 19 nt, Artificial Sequence
  Description of Artificial Sequence: Synthetic oligonucleotide
  Sense strand starting at position 1198 of SEQ ID NO: 913664
cagcguuguagugagauuu

SEQ ID NO: 944523 - RNA, 19 nt, Artificial Sequence
  Description of Artificial Sequence: Synthetic oligonucleotide
  Antisense strand to SEQ ID NO: 944522
aaaucucacuacaacgcug

SEQ ID NO: 944524 - RNA, 19 nt, Artificial Sequence
  Description of Artificial Sequence: Synthetic oligonucleotide
  Sense strand starting at position 1233 of SEQ ID NO: 913664
cagccaugggcacaagauu

SEQ ID NO: 944525 - RNA, 19 nt, Artificial Sequence
  Description of Artificial Sequence: Synthetic oligonucleotide
  Antisense strand to SEQ ID NO: 944524
aaucuugugcccauggcug

SEQ ID NO: 944526 - RNA, 19 nt, Artificial Sequence
  Description of Artificial Sequence: Synthetic oligonucleotide
  Sense strand starting at position 2359 of SEQ ID NO: 913664
cuggccuuuggagauuauu

SEQ ID NO: 944527 - RNA, 19 nt, Artificial Sequence
  Description of Artificial Sequence: Synthetic oligonucleotide
  Antisense strand to SEQ ID NO: 944526
aauaaucuccaaaggccag

SEQ ID NO: 944528 - RNA, 19 nt, Artificial Sequence
  Description of Artificial Sequence: Synthetic oligonucleotide
  Sense strand starting at position 2728 of SEQ ID NO: 913664
aagagugaguccuuccaaa

SEQ ID NO: 944529 - RNA, 19 nt, Artificial Sequence
  Description of Artificial Sequence: Synthetic oligonucleotide
  Antisense strand to SEQ ID NO: 944528
uuuggaaggacucacucuu

SEQ ID NO: 944530 - RNA, 19 nt, Artificial Sequence
  Description of Artificial Sequence: Synthetic oligonucleotide
  Sense strand starting at position 3600 of SEQ ID NO: 913664
ugugacuucuaaccugaga

SEQ ID NO: 944531 - RNA, 19 nt, Artificial Sequence
  Description of Artificial Sequence: Synthetic oligonucleotide
  Antisense strand to SEQ ID NO: 944530
ucucagguuagaagucaca

SEQ ID NO: 944532 - RNA, 19 nt, Artificial Sequence
  Description of Artificial Sequence: Synthetic oligonucleotide
  Sense strand starting at position 2512 of SEQ ID NO: 913664
ggucuuuagguggauuauc

SEQ ID NO: 944533 - RNA, 19 nt, Artificial Sequence
  Description of Artificial Sequence: Synthetic oligonucleotide
  Antisense strand to SEQ ID NO: 944532
gauaauccaccuaaagacc

SEQ ID NO: 944534 - RNA, 19 nt, Artificial Sequence
  Description of Artificial Sequence: Synthetic oligonucleotide
  Sense strand starting at position 435 of SEQ ID NO: 913664
cgugacuccgcgucuagau

SEQ ID NO: 944535 - RNA, 19 nt, Artificial Sequence
  Description of Artificial Sequence: Synthetic oligonucleotide
  Antisense strand to SEQ ID NO: 944534
aucuagacgcggagucacg

SEQ ID NO: 944536 - RNA, 19 nt, Artificial Sequence
  Description of Artificial Sequence: Synthetic oligonucleotide
  Sense strand starting at position 434 of SEQ ID NO: 913664
ccgugacuccgcgucuaga

SEQ ID NO: 944537 - RNA, 19 nt, Artificial Sequence
  Description of Artificial Sequence: Synthetic oligonucleotide
  Antisense strand to SEQ ID NO: 944536
ucuagacgcggagucacgg

SEQ ID NO: 944538 - RNA, 19 nt, Artificial Sequence
  Description of Artificial Sequence: Synthetic oligonucleotide
  Sense strand starting at position 718 of SEQ ID NO: 913664
gaaggucuaguguaauccu

SEQ ID NO: 944539 - RNA, 19 nt, Artificial Sequence
  Description of Artificial Sequence: Synthetic oligonucleotide
  Antisense strand to SEQ ID NO: 944538
aggauuacacuagaccuuc

SEQ ID NO: 944540 - RNA, 19 nt, Artificial Sequence
  Description of Artificial Sequence: Synthetic oligonucleotide
  Sense strand starting at position 895 of SEQ ID NO: 913664
ccuugaauuacggguaaac

SEQ ID NO: 944541 - RNA, 19 nt, Artificial Sequence
  Description of Artificial Sequence: Synthetic oligonucleotide
  Antisense strand to SEQ ID NO: 944540
guuuacccguaauucaagg

SEQ ID NO: 944542 - RNA, 19 nt, Artificial Sequence
  Description of Artificial Sequence: Synthetic oligonucleotide
  Sense strand starting at position 2509 of SEQ ID NO: 913664
acaggucuuuagguggauu

SEQ ID NO: 944543 - RNA, 19 nt, Artificial Sequence
  Description of Artificial Sequence: Synthetic oligonucleotide
  Antisense strand to SEQ ID NO: 944542
aauccaccuaaagaccugu

SEQ ID NO: 944544 - RNA, 19 nt, Artificial Sequence
  Description of Artificial Sequence: Synthetic oligonucleotide
  Sense strand starting at position 3582 of SEQ ID NO: 913664
acaggucugagcugaugau

SEQ ID NO: 944545 - RNA, 19 nt, Artificial Sequence
  Description of Artificial Sequence: Synthetic oligonucleotide
  Antisense strand to SEQ ID NO: 944544
aucaucagcucagaccugu

SEQ ID NO: 944546 - RNA, 19 nt, Artificial Sequence
  Description of Artificial Sequence: Synthetic oligonucleotide
  Sense strand starting at position 959 of SEQ ID NO: 913664
cugggcaaguuauuauaca

SEQ ID NO: 944547 - RNA, 19 nt, Artificial Sequence
  Description of Artificial Sequence: Synthetic oligonucleotide
  Antisense strand to SEQ ID NO: 944546
uguauaauaacuugcccag

SEQ ID NO: 944548 - RNA, 19 nt, Artificial Sequence
  Description of Artificial Sequence: Synthetic oligonucleotide
  Sense strand starting at position 2510 of SEQ ID NO: 913664
caggucuuuagguggauua

SEQ ID NO: 944549 - RNA, 19 nt, Artificial Sequence
  Description of Artificial Sequence: Synthetic oligonucleotide
  Antisense strand to SEQ ID NO: 944548
uaauccaccuaaagaccug

SEQ ID NO: 944550 - RNA, 19 nt, Artificial Sequence
  Description of Artificial Sequence: Synthetic oligonucleotide
  Sense strand starting at position 2511 of SEQ ID NO: 913664
aggucuuuagguggauuau

SEQ ID NO: 944551 - RNA, 19 nt, Artificial Sequence
  Description of Artificial Sequence: Synthetic oligonucleotide
  Antisense strand to SEQ ID NO: 944550
auaauccaccuaaagaccu

SEQ ID NO: 944552 - RNA, 19 nt, Artificial Sequence
  Description of Artificial Sequence: Synthetic oligonucleotide
  Sense strand starting at position 2895 of SEQ ID NO: 913664
gagugacuugucuaagcug

SEQ ID NO: 944553 - RNA, 19 nt, Artificial Sequence
  Description of Artificial Sequence: Synthetic oligonucleotide
  Antisense strand to SEQ ID NO: 944552
cagcuuagacaagucacuc

SEQ ID NO: 944554 - RNA, 19 nt, Artificial Sequence
  Description of Artificial Sequence: Synthetic oligonucleotide
  Sense strand starting at position 1130 of SEQ ID NO: 913664
cgcaacagucauugcauuu

SEQ ID NO: 944555 - RNA, 19 nt, Artificial Sequence
  Description of Artificial Sequence: Synthetic oligonucleotide
  Antisense strand to SEQ ID NO: 944554
aaaugcaaugacuguugcg

SEQ ID NO: 944556 - RNA, 19 nt, Artificial Sequence
  Description of Artificial Sequence: Synthetic oligonucleotide
  Sense strand starting at position 1269 of SEQ ID NO: 913664
gcaauaaauggcuauuguu

SEQ ID NO: 944557 - RNA, 19 nt, Artificial Sequence
  Description of Artificial Sequence: Synthetic oligonucleotide
  Antisense strand to SEQ ID NO: 944556
aacaauagccauuuauugc

SEQ ID NO: 944558 - RNA, 19 nt, Artificial Sequence
  Description of Artificial Sequence: Synthetic oligonucleotide
  Sense strand starting at position 3154 of SEQ ID NO: 913664
ucuuaagguugggucuuaa

SEQ ID NO: 944559 - RNA, 19 nt, Artificial Sequence
  Description of Artificial Sequence: Synthetic oligonucleotide
  Antisense strand to SEQ ID NO: 944558
uuaagacccaaccuuaaga

SEQ ID NO: 944560 - RNA, 19 nt, Artificial Sequence
  Description of Artificial Sequence: Synthetic oligonucleotide
  Sense strand starting at position 2630 of SEQ ID NO: 913664
aguaauuacucguuaaaug

SEQ ID NO: 944561 - RNA, 19 nt, Artificial Sequence
  Description of Artificial Sequence: Synthetic oligonucleotide
  Antisense strand to SEQ ID NO: 944560
cauuuaacgaguaauuacu

SEQ ID NO: 944562 - RNA, 19 nt, Artificial Sequence
  Description of Artificial Sequence: Synthetic oligonucleotide
  Sense strand starting at position 2355 of SEQ ID NO: 913664
agagcuggccuuuggagau

SEQ ID NO: 944563 - RNA, 19 nt, Artificial Sequence
  Description of Artificial Sequence: Synthetic oligonucleotide
  Antisense strand to SEQ ID NO: 944562
aucuccaaaggccagcucu

SEQ ID NO: 944564 - RNA, 19 nt, Artificial Sequence
  Description of Artificial Sequence: Synthetic oligonucleotide
  Sense strand starting at position 3622 of SEQ ID NO: 913664
agaugcucagcuugaacau

SEQ ID NO: 944565 - RNA, 19 nt, Artificial Sequence
  Description of Artificial Sequence: Synthetic oligonucleotide
  Antisense strand to SEQ ID NO: 944564
auguucaagcugagcaucu

SEQ ID NO: 944566 - RNA, 19 nt, Artificial Sequence
  Description of Artificial Sequence: Synthetic oligonucleotide
  Sense strand starting at position 2631 of SEQ ID NO: 913664
guaauuacucguuaaaugu

SEQ ID NO: 944567 - RNA, 19 nt, Artificial Sequence
  Description of Artificial Sequence: Synthetic oligonucleotide
  Antisense strand to SEQ ID NO: 944566
acauuuaacgaguaauuac

SEQ ID NO: 944568 - RNA, 19 nt, Artificial Sequence
  Description of Artificial Sequence: Synthetic oligonucleotide
  Sense strand starting at position 2911 of SEQ ID NO: 913664
cuguccucugguuaguaau

SEQ ID NO: 944569 - RNA, 19 nt, Artificial Sequence
  Description of Artificial Sequence: Synthetic oligonucleotide
  Antisense strand to SEQ ID NO: 944568
auuacuaaccagaggacag

SEQ ID NO: 944570 - RNA, 19 nt, Artificial Sequence
  Description of Artificial Sequence: Synthetic oligonucleotide
  Sense strand starting at position 576 of SEQ ID NO: 913664
gcacuauccgcagaaccuu

SEQ ID NO: 944571 - RNA, 19 nt, Artificial Sequence
  Description of Artificial Sequence: Synthetic oligonucleotide
  Antisense strand to SEQ ID NO: 944570
aagguucugcggauagugc

SEQ ID NO: 944572 - RNA, 19 nt, Artificial Sequence
  Description of Artificial Sequence: Synthetic oligonucleotide
  Sense strand starting at position 3619 of SEQ ID NO: 913664
aguagaugcucagcuugaa

SEQ ID NO: 944573 - RNA, 19 nt, Artificial Sequence
  Description of Artificial Sequence: Synthetic oligonucleotide
  Antisense strand to SEQ ID NO: 944572
uucaagcugagcaucuacu

SEQ ID NO: 944574 - RNA, 19 nt, Artificial Sequence
  Description of Artificial Sequence: Synthetic oligonucleotide
  Sense strand starting at position 3616 of SEQ ID NO: 913664
agaaguagaugcucagcuu

SEQ ID NO: 944575 - RNA, 19 nt, Artificial Sequence
  Description of Artificial Sequence: Synthetic oligonucleotide
  Antisense strand to SEQ ID NO: 944574
aagcugagcaucuacuucu

SEQ ID NO: 944576 - RNA, 19 nt, Artificial Sequence
  Description of Artificial Sequence: Synthetic oligonucleotide
  Sense strand starting at position 2893 of SEQ ID NO: 913664
cagagugacuugucuaagc

SEQ ID NO: 944577 - RNA, 19 nt, Artificial Sequence
  Description of Artificial Sequence: Synthetic oligonucleotide
  Antisense strand to SEQ ID NO: 944576
gcuuagacaagucacucug

SEQ ID NO: 944578 - RNA, 19 nt, Artificial Sequence
  Description of Artificial Sequence: Synthetic oligonucleotide
  Sense strand starting at position 2913 of SEQ ID NO: 913664
guccucugguuaguaauga

SEQ ID NO: 944579 - RNA, 19 nt, Artificial Sequence
  Description of Artificial Sequence: Synthetic oligonucleotide
  Antisense strand to SEQ ID NO: 944578
ucauuacuaaccagaggac

SEQ ID NO: 944580 - RNA, 19 nt, Artificial Sequence
  Description of Artificial Sequence: Synthetic oligonucleotide
  Sense strand starting at position 2891 of SEQ ID NO: 913664
gccagagugacuugucuaa

SEQ ID NO: 944581 - RNA, 19 nt, Artificial Sequence
  Description of Artificial Sequence: Synthetic oligonucleotide
  Antisense strand to SEQ ID NO: 944580
uuagacaagucacucuggc

SEQ ID NO: 944582 - RNA, 19 nt, Artificial Sequence
  Description of Artificial Sequence: Synthetic oligonucleotide
  Sense strand starting at position 3742 of SEQ ID NO: 913664
gcaacugucugauuagggu

SEQ ID NO: 944583 - RNA, 19 nt, Artificial Sequence
  Description of Artificial Sequence: Synthetic oligonucleotide
  Antisense strand to SEQ ID NO: 944582
acccuaaucagacaguugc

SEQ ID NO: 944584 - RNA, 19 nt, Artificial Sequence
  Description of Artificial Sequence: Synthetic oligonucleotide
  Sense strand starting at position 1118 of SEQ ID NO: 913664
guuaauuaaccucgcaaca

SEQ ID NO: 944585 - RNA, 19 nt, Artificial Sequence
  Description of Artificial Sequence: Synthetic oligonucleotide
  Antisense strand to SEQ ID NO: 944584
uguugcgagguuaauuaac

SEQ ID NO: 944586 - RNA, 19 nt, Artificial Sequence
  Description of Artificial Sequence: Synthetic oligonucleotide
  Sense strand starting at position 159 of SEQ ID NO: 913664
ccucuuugggaccgugauu

SEQ ID NO: 944587 - RNA, 19 nt, Artificial Sequence
  Description of Artificial Sequence: Synthetic oligonucleotide
  Antisense strand to SEQ ID NO: 944586
aaucacggucccaaagagg

SEQ ID NO: 944588 - RNA, 19 nt, Artificial Sequence
  Description of Artificial Sequence: Synthetic oligonucleotide
  Sense strand starting at position 223 of SEQ ID NO: 913665
ggaccaggauuccuuuaca

SEQ ID NO: 944589 - RNA, 19 nt, Artificial Sequence
  Description of Artificial Sequence: Synthetic oligonucleotide
  Antisense strand to SEQ ID NO: 944588
uguaaaggaauccuggucc

SEQ ID NO: 944590 - RNA, 19 nt, Artificial Sequence
  Description of Artificial Sequence: Synthetic oligonucleotide
  Sense strand starting at position 3703 of SEQ ID NO: 913665
ggagguaggcuugaguaga

SEQ ID NO: 944591 - RNA, 19 nt, Artificial Sequence
  Description of Artificial Sequence: Synthetic oligonucleotide
  Antisense strand to SEQ ID NO: 944590
ucuacucaagccuaccucc

SEQ ID NO: 944592 - RNA, 19 nt, Artificial Sequence
  Description of Artificial Sequence: Synthetic oligonucleotide
  Sense strand starting at position 2365 of SEQ ID NO: 913665
ggacaagaaucccuuaguc

SEQ ID NO: 944593 - RNA, 19 nt, Artificial Sequence
  Description of Artificial Sequence: Synthetic oligonucleotide
  Antisense strand to SEQ ID NO: 944592
gacuaagggauucuugucc

SEQ ID NO: 944594 - RNA, 19 nt, Artificial Sequence
  Description of Artificial Sequence: Synthetic oligonucleotide
  Sense strand starting at position 1806 of SEQ ID NO: 913665
cccuccuggaucggagaaa

SEQ ID NO: 944595 - RNA, 19 nt, Artificial Sequence
  Description of Artificial Sequence: Synthetic oligonucleotide
  Antisense strand to SEQ ID NO: 944594
uuucuccgauccaggaggg

SEQ ID NO: 944596 - RNA, 19 nt, Artificial Sequence
  Description of Artificial Sequence: Synthetic oligonucleotide
  Sense strand starting at position 386 of SEQ ID NO: 913665
gugacugacagaugcaaau

SEQ ID NO: 944597 - RNA, 19 nt, Artificial Sequence
  Description of Artificial Sequence: Synthetic oligonucleotide
  Antisense strand to SEQ ID NO: 944596
auuugcaucugucagucac

SEQ ID NO: 944598 - RNA, 19 nt, Artificial Sequence
  Description of Artificial Sequence: Synthetic oligonucleotide
  Sense strand starting at position 384 of SEQ ID NO: 913665
ccgugacugacagaugcaa

SEQ ID NO: 944599 - RNA, 19 nt, Artificial Sequence
  Description of Artificial Sequence: Synthetic oligonucleotide
  Antisense strand to SEQ ID NO: 944598
uugcaucugucagucacgg

SEQ ID NO: 944600 - RNA, 19 nt, Artificial Sequence
  Description of Artificial Sequence: Synthetic oligonucleotide
  Sense strand starting at position 3208 of SEQ ID NO: 913665
uguugaaacuugucaggga

SEQ ID NO: 944601 - RNA, 19 nt, Artificial Sequence
  Description of Artificial Sequence: Synthetic oligonucleotide
  Antisense strand to SEQ ID NO: 944600
ucccugacaaguuucaaca

SEQ ID NO: 944602 - RNA, 19 nt, Artificial Sequence
  Description of Artificial Sequence: Synthetic oligonucleotide
  Sense strand starting at position 1497 of SEQ ID NO: 913665
agucguucgaaugaaugaa

SEQ ID NO: 944603 - RNA, 19 nt, Artificial Sequence
  Description of Artificial Sequence: Synthetic oligonucleotide
  Antisense strand to SEQ ID NO: 944602
uucauucauucgaacgacu

SEQ ID NO: 944604 - RNA, 19 nt, Artificial Sequence
  Description of Artificial Sequence: Synthetic oligonucleotide
  Sense strand starting at position 2750 of SEQ ID NO: 913665
ugggaaugggcugaguguu

SEQ ID NO: 944605 - RNA, 19 nt, Artificial Sequence
  Description of Artificial Sequence: Synthetic oligonucleotide
  Antisense strand to SEQ ID NO: 944604
aacacucagcccauuccca

SEQ ID NO: 944606 - RNA, 19 nt, Artificial Sequence
  Description of Artificial Sequence: Synthetic oligonucleotide
  Sense strand starting at position 2489 of SEQ ID NO: 913665
ggagucagguuucucuaag

SEQ ID NO: 944607 - RNA, 19 nt, Artificial Sequence
  Description of Artificial Sequence: Synthetic oligonucleotide
  Antisense strand to SEQ ID NO: 944606
cuuagagaaaccugacucc

SEQ ID NO: 944608 - RNA, 19 nt, Artificial Sequence
  Description of Artificial Sequence: Synthetic oligonucleotide
  Sense strand starting at position 3687 of SEQ ID NO: 913665
ggccauguuccauggagga

SEQ ID NO: 944609 - RNA, 19 nt, Artificial Sequence
  Description of Artificial Sequence: Synthetic oligonucleotide
  Antisense strand to SEQ ID NO: 944608
uccuccauggaacauggcc

SEQ ID NO: 944610 - RNA, 19 nt, Artificial Sequence
  Description of Artificial Sequence: Synthetic oligonucleotide
  Sense strand starting at position 3517 of SEQ ID NO: 913665
guguuaagaccagaccguu

SEQ ID NO: 944611 - RNA, 19 nt, Artificial Sequence
  Description of Artificial Sequence: Synthetic oligonucleotide
  Antisense strand to SEQ ID NO: 944610
aacggucuggucuuaacac

SEQ ID NO: 944612 - RNA, 19 nt, Artificial Sequence
  Description of Artificial Sequence: Synthetic oligonucleotide
  Sense strand starting at position 895 of SEQ ID NO: 913665
augcaaaucgccgagacua

SEQ ID NO: 944613 - RNA, 19 nt, Artificial Sequence
  Description of Artificial Sequence: Synthetic oligonucleotide
  Antisense strand to SEQ ID NO: 944612
uagucucggcgauuugcau

SEQ ID NO: 944614 - RNA, 19 nt, Artificial Sequence
  Description of Artificial Sequence: Synthetic oligonucleotide
  Sense strand starting at position 569 of SEQ ID NO: 913665
caaccugaucgcugaguga

SEQ ID NO: 944615 - RNA, 19 nt, Artificial Sequence
  Description of Artificial Sequence: Synthetic oligonucleotide
  Antisense strand to SEQ ID NO: 944614
ucacucagcgaucagguug

SEQ ID NO: 944616 - RNA, 19 nt, Artificial Sequence
  Description of Artificial Sequence: Synthetic oligonucleotide
  Sense strand starting at position 276 of SEQ ID NO: 913665
ucaccuaguucguugaaau

SEQ ID NO: 944617 - RNA, 19 nt, Artificial Sequence
  Description of Artificial Sequence: Synthetic oligonucleotide
  Antisense strand to SEQ ID NO: 944616
auuucaacgaacuagguga

SEQ ID NO: 944618 - RNA, 19 nt, Artificial Sequence
  Description of Artificial Sequence: Synthetic oligonucleotide
  Sense strand starting at position 275 of SEQ ID NO: 913665
cucaccuaguucguugaaa

SEQ ID NO: 944619 - RNA, 19 nt, Artificial Sequence
  Description of Artificial Sequence: Synthetic oligonucleotide
  Antisense strand to SEQ ID NO: 944618
uuucaacgaacuaggugag

SEQ ID NO: 944620 - RNA, 19 nt, Artificial Sequence
  Description of Artificial Sequence: Synthetic oligonucleotide
  Sense strand starting at position 483 of SEQ ID NO: 913665
uuaucaaagcccgguaauu

SEQ ID NO: 944621 - RNA, 19 nt, Artificial Sequence
  Description of Artificial Sequence: Synthetic oligonucleotide
  Antisense strand to SEQ ID NO: 944620
aauuaccgggcuuugauaa

SEQ ID NO: 944622 - RNA, 19 nt, Artificial Sequence
  Description of Artificial Sequence: Synthetic oligonucleotide
  Sense strand starting at position 2279 of SEQ ID NO: 913665
ucaguucuuccuggcacaa

SEQ ID NO: 944623 - RNA, 19 nt, Artificial Sequence
  Description of Artificial Sequence: Synthetic oligonucleotide
  Antisense strand to SEQ ID NO: 944622
uugugccaggaagaacuga

SEQ ID NO: 944624 - RNA, 19 nt, Artificial Sequence
  Description of Artificial Sequence: Synthetic oligonucleotide
  Sense strand starting at position 277 of SEQ ID NO: 913665
caccuaguucguugaaauu

SEQ ID NO: 944625 - RNA, 19 nt, Artificial Sequence
  Description of Artificial Sequence: Synthetic oligonucleotide
  Antisense strand to SEQ ID NO: 944624
aauuucaacgaacuaggug

SEQ ID NO: 944626 - RNA, 19 nt, Artificial Sequence
  Description of Artificial Sequence: Synthetic oligonucleotide
  Sense strand starting at position 1492 of SEQ ID NO: 913665
acucaagucguucgaauga

SEQ ID NO: 944627 - RNA, 19 nt, Artificial Sequence
  Description of Artificial Sequence: Synthetic oligonucleotide
  Antisense strand to SEQ ID NO: 944626
ucauucgaacgacuugagu

SEQ ID NO: 944628 - RNA, 19 nt, Artificial Sequence
  Description of Artificial Sequence: Synthetic oligonucleotide
  Sense strand starting at position 3449 of SEQ ID NO: 913665
ucgcucuccuccucagaaa

SEQ ID NO: 944629 - RNA, 19 nt, Artificial Sequence
  Description of Artificial Sequence: Synthetic oligonucleotide
  Antisense strand to SEQ ID NO: 944628
uuucugaggaggagagcga

SEQ ID NO: 944630 - RNA, 19 nt, Artificial Sequence
  Description of Artificial Sequence: Synthetic oligonucleotide
  Sense strand starting at position 1490 of SEQ ID NO: 913665
caacucaagucguucgaau

SEQ ID NO: 944631 - RNA, 19 nt, Artificial Sequence
  Description of Artificial Sequence: Synthetic oligonucleotide
  Antisense strand to SEQ ID NO: 944630
auucgaacgacuugaguug

SEQ ID NO: 944632 - RNA, 19 nt, Artificial Sequence
  Description of Artificial Sequence: Synthetic oligonucleotide
  Sense strand starting at position 3469 of SEQ ID NO: 913665
aucauugcucaucguaacu

SEQ ID NO: 944633 - RNA, 19 nt, Artificial Sequence
  Description of Artificial Sequence: Synthetic oligonucleotide
  Antisense strand to SEQ ID NO: 944632
aguuacgaugagcaaugau

SEQ ID NO: 944634 - RNA, 19 nt, Artificial Sequence
  Description of Artificial Sequence: Synthetic oligonucleotide
  Sense strand starting at position 177 of SEQ ID NO: 913665
ggucaaguuucaguccugu

SEQ ID NO: 944635 - RNA, 19 nt, Artificial Sequence
  Description of Artificial Sequence: Synthetic oligonucleotide
  Antisense strand to SEQ ID NO: 944634
acaggacugaaacuugacc

SEQ ID NO: 944636 - RNA, 19 nt, Artificial Sequence
  Description of Artificial Sequence: Synthetic oligonucleotide
  Sense strand starting at position 2177 of SEQ ID NO: 913665
guuuguuugugggcauuga

SEQ ID NO: 944637 - RNA, 19 nt, Artificial Sequence
  Description of Artificial Sequence: Synthetic oligonucleotide
  Antisense strand to SEQ ID NO: 944636
ucaaugcccacaaacaaac

SEQ ID NO: 944638 - RNA, 19 nt, Artificial Sequence
  Description of Artificial Sequence: Synthetic oligonucleotide
  Sense strand starting at position 1558 of SEQ ID NO: 913665
ccgccuuccgcccaagauu

SEQ ID NO: 944639 - RNA, 19 nt, Artificial Sequence
  Description of Artificial Sequence: Synthetic oligonucleotide
  Antisense strand to SEQ ID NO: 944638
aaucuugggcggaaggcgg

SEQ ID NO: 944640 - RNA, 19 nt, Artificial Sequence
  Description of Artificial Sequence: Synthetic oligonucleotide
  Sense strand starting at position 3209 of SEQ ID NO: 913665
guugaaacuugucagggaa

SEQ ID NO: 944641 - RNA, 19 nt, Artificial Sequence
  Description of Artificial Sequence: Synthetic oligonucleotide
  Antisense strand to SEQ ID NO: 944640
uucccugacaaguuucaac

SEQ ID NO: 944642 - RNA, 19 nt, Artificial Sequence
  Description of Artificial Sequence: Synthetic oligonucleotide
  Sense strand starting at position 3211 of SEQ ID NO: 913665
ugaaacuugucagggaaca

SEQ ID NO: 944643 - RNA, 19 nt, Artificial Sequence
  Description of Artificial Sequence: Synthetic oligonucleotide
  Antisense strand to SEQ ID NO: 944642
uguucccugacaaguuuca

SEQ ID NO: 944644 - RNA, 19 nt, Artificial Sequence
  Description of Artificial Sequence: Synthetic oligonucleotide
  Sense strand starting at position 2106 of SEQ ID NO: 913665
ggcccuguucucugucuau

SEQ ID NO: 944645 - RNA, 19 nt, Artificial Sequence
  Description of Artificial Sequence: Synthetic oligonucleotide
  Antisense strand to SEQ ID NO: 944644
auagacagagaacagggcc

SEQ ID NO: 944646 - RNA, 19 nt, Artificial Sequence
  Description of Artificial Sequence: Synthetic oligonucleotide
  Sense strand starting at position 2833 of SEQ ID NO: 913665
gguagaggaucccacaguu

SEQ ID NO: 944647 - RNA, 19 nt, Artificial Sequence
  Description of Artificial Sequence: Synthetic oligonucleotide
  Antisense strand to SEQ ID NO: 944646
aacugugggauccucuacc

SEQ ID NO: 944648 - RNA, 19 nt, Artificial Sequence
  Description of Artificial Sequence: Synthetic oligonucleotide
  Sense strand starting at position 2635 of SEQ ID NO: 913665
ugccuaagcucgcuuaucu

SEQ ID NO: 944649 - RNA, 19 nt, Artificial Sequence
  Description of Artificial Sequence: Synthetic oligonucleotide
  Antisense strand to SEQ ID NO: 944648
agauaagcgagcuuaggca

SEQ ID NO: 944650 - RNA, 19 nt, Artificial Sequence
  Description of Artificial Sequence: Synthetic oligonucleotide
  Sense strand starting at position 2709 of SEQ ID NO: 913665
cugauaaccuccugcgaug

SEQ ID NO: 944651 - RNA, 19 nt, Artificial Sequence
  Description of Artificial Sequence: Synthetic oligonucleotide
  Antisense strand to SEQ ID NO: 944650
caucgcaggagguuaucag

SEQ ID NO: 944652 - RNA, 19 nt, Artificial Sequence
  Description of Artificial Sequence: Synthetic oligonucleotide
  Sense strand starting at position 2278 of SEQ ID NO: 913665
gucaguucuuccuggcaca

SEQ ID NO: 944653 - RNA, 19 nt, Artificial Sequence
  Description of Artificial Sequence: Synthetic oligonucleotide
  Antisense strand to SEQ ID NO: 944652
ugugccaggaagaacugac

SEQ ID NO: 944654 - RNA, 19 nt, Artificial Sequence
  Description of Artificial Sequence: Synthetic oligonucleotide
  Sense strand starting at position 282 of SEQ ID NO: 913666
gacccauccgauuaaagua

SEQ ID NO: 944655 - RNA, 19 nt, Artificial Sequence
  Description of Artificial Sequence: Synthetic oligonucleotide
  Antisense strand to SEQ ID NO: 944654
uacuuuaaucggauggguc

SEQ ID NO: 944656 - RNA, 19 nt, Artificial Sequence
  Description of Artificial Sequence: Synthetic oligonucleotide
  Sense strand starting at position 3599 of SEQ ID NO: 913666
aguagacuuccagagcaca

SEQ ID NO: 944657 - RNA, 19 nt, Artificial Sequence
  Description of Artificial Sequence: Synthetic oligonucleotide
  Antisense strand to SEQ ID NO: 944656
ugugcucuggaagucuacu

SEQ ID NO: 944658 - RNA, 19 nt, Artificial Sequence
  Description of Artificial Sequence: Synthetic oligonucleotide
  Sense strand starting at position 2778 of SEQ ID NO: 913666
ggcccugggagccagaaau

SEQ ID NO: 944659 - RNA, 19 nt, Artificial Sequence
  Description of Artificial Sequence: Synthetic oligonucleotide
  Antisense strand to SEQ ID NO: 944658
auuucuggcucccagggcc

SEQ ID NO: 944660 - RNA, 19 nt, Artificial Sequence
  Description of Artificial Sequence: Synthetic oligonucleotide
  Sense strand starting at position 3687 of SEQ ID NO: 913666
gucuuaugagcucagaaau

SEQ ID NO: 944661 - RNA, 19 nt, Artificial Sequence
  Description of Artificial Sequence: Synthetic oligonucleotide
  Antisense strand to SEQ ID NO: 944660
auuucugagcucauaagac

SEQ ID NO: 944662 - RNA, 19 nt, Artificial Sequence
  Description of Artificial Sequence: Synthetic oligonucleotide
  Sense strand starting at position 3674 of SEQ ID NO: 913666
ccacaaggaccaugucuua

SEQ ID NO: 944663 - RNA, 19 nt, Artificial Sequence
  Description of Artificial Sequence: Synthetic oligonucleotide
  Antisense strand to SEQ ID NO: 944662
uaagacaugguccuugugg

SEQ ID NO: 944664 - RNA, 19 nt, Artificial Sequence
  Description of Artificial Sequence: Synthetic oligonucleotide
  Sense strand starting at position 3750 of SEQ ID NO: 913666
gaguucguugaaugaauga

SEQ ID NO: 944665 - RNA, 19 nt, Artificial Sequence
  Description of Artificial Sequence: Synthetic oligonucleotide
  Antisense strand to SEQ ID NO: 944664
ucauucauucaacgaacuc

SEQ ID NO: 944666 - RNA, 19 nt, Artificial Sequence
  Description of Artificial Sequence: Synthetic oligonucleotide
  Sense strand starting at position 3744 of SEQ ID NO: 913666
aauuaagaguucguugaau

SEQ ID NO: 944667 - RNA, 19 nt, Artificial Sequence
  Description of Artificial Sequence: Synthetic oligonucleotide
  Antisense strand to SEQ ID NO: 944666
auucaacgaacucuuaauu

SEQ ID NO: 944668 - RNA, 19 nt, Artificial Sequence
  Description of Artificial Sequence: Synthetic oligonucleotide
  Sense strand starting at position 3731 of SEQ ID NO: 913666
agagcuguucugcaauuaa

SEQ ID NO: 944669 - RNA, 19 nt, Artificial Sequence
  Description of Artificial Sequence: Synthetic oligonucleotide
  Antisense strand to SEQ ID NO: 944668
uuaauugcagaacagcucu

SEQ ID NO: 944670 - RNA, 19 nt, Artificial Sequence
  Description of Artificial Sequence: Synthetic oligonucleotide
  Sense strand starting at position 3743 of SEQ ID NO: 913666
caauuaagaguucguugaa

SEQ ID NO: 944671 - RNA, 19 nt, Artificial Sequence
  Description of Artificial Sequence: Synthetic oligonucleotide
  Antisense strand to SEQ ID NO: 944670
uucaacgaacucuuaauug

SEQ ID NO: 944672 - RNA, 19 nt, Artificial Sequence
  Description of Artificial Sequence: Synthetic oligonucleotide
  Sense strand starting at position 3746 of SEQ ID NO: 913666
uuaagaguucguugaauga

SEQ ID NO: 944673 - RNA, 19 nt, Artificial Sequence
  Description of Artificial Sequence: Synthetic oligonucleotide
  Antisense strand to SEQ ID NO: 944672
ucauucaacgaacucuuaa

SEQ ID NO: 944674 - RNA, 19 nt, Artificial Sequence
  Description of Artificial Sequence: Synthetic oligonucleotide
  Sense strand starting at position 3684 of SEQ ID NO: 913666
caugucuuaugagcucaga

SEQ ID NO: 944675 - RNA, 19 nt, Artificial Sequence
  Description of Artificial Sequence: Synthetic oligonucleotide
  Antisense strand to SEQ ID NO: 944674
ucugagcucauaagacaug

SEQ ID NO: 944676 - RNA, 19 nt, Artificial Sequence
  Description of Artificial Sequence: Synthetic oligonucleotide
  Sense strand starting at position 1322 of SEQ ID NO: 913666
cccgaucauugggccaaau

SEQ ID NO: 944677 - RNA, 19 nt, Artificial Sequence
  Description of Artificial Sequence: Synthetic oligonucleotide
  Antisense strand to SEQ ID NO: 944676
auuuggcccaaugaucggg

SEQ ID NO: 944678 - RNA, 19 nt, Artificial Sequence
  Description of Artificial Sequence: Synthetic oligonucleotide
  Sense strand starting at position 1276 of SEQ ID NO: 913666
agacaaauuuacggagcaa

SEQ ID NO: 944679 - RNA, 19 nt, Artificial Sequence
  Description of Artificial Sequence: Synthetic oligonucleotide
  Antisense strand to SEQ ID NO: 944678
uugcuccguaaauuugucu

SEQ ID NO: 944680 - RNA, 19 nt, Artificial Sequence
  Description of Artificial Sequence: Synthetic oligonucleotide
  Sense strand starting at position 498 of SEQ ID NO: 913666
aagggagauuccuagauuc

SEQ ID NO: 944681 - RNA, 19 nt, Artificial Sequence
  Description of Artificial Sequence: Synthetic oligonucleotide
  Antisense strand to SEQ ID NO: 944680
gaaucuaggaaucucccuu

SEQ ID NO: 944682 - RNA, 19 nt, Artificial Sequence
  Description of Artificial Sequence: Synthetic oligonucleotide
  Sense strand starting at position 3730 of SEQ ID NO: 913666
cagagcuguucugcaauua

SEQ ID NO: 944683 - RNA, 19 nt, Artificial Sequence
  Description of Artificial Sequence: Synthetic oligonucleotide
  Antisense strand to SEQ ID NO: 944682
uaauugcagaacagcucug

SEQ ID NO: 944684 - RNA, 19 nt, Artificial Sequence
  Description of Artificial Sequence: Synthetic oligonucleotide
  Sense strand starting at position 1508 of SEQ ID NO: 913666
ccgagaccuucguuucuau

SEQ ID NO: 944685 - RNA, 19 nt, Artificial Sequence
  Description of Artificial Sequence: Synthetic oligonucleotide
  Antisense strand to SEQ ID NO: 944684
auagaaacgaaggucucgg

SEQ ID NO: 944686 - RNA, 19 nt, Artificial Sequence
  Description of Artificial Sequence: Synthetic oligonucleotide
  Sense strand starting at position 262 of SEQ ID NO: 913666
ccaguuuccacguguaaau

SEQ ID NO: 944687 - RNA, 19 nt, Artificial Sequence
  Description of Artificial Sequence: Synthetic oligonucleotide
  Antisense strand to SEQ ID NO: 944686
auuuacacguggaaacugg

SEQ ID NO: 944688 - RNA, 19 nt, Artificial Sequence
  Description of Artificial Sequence: Synthetic oligonucleotide
  Sense strand starting at position 279 of SEQ ID NO: 913666
auugacccauccgauuaaa

SEQ ID NO: 944689 - RNA, 19 nt, Artificial Sequence
  Description of Artificial Sequence: Synthetic oligonucleotide
  Antisense strand to SEQ ID NO: 944688
uuuaaucggaugggucaau

SEQ ID NO: 944690 - RNA, 19 nt, Artificial Sequence
  Description of Artificial Sequence: Synthetic oligonucleotide
  Sense strand starting at position 3597 of SEQ ID NO: 913666
gaaguagacuuccagagca

SEQ ID NO: 944691 - RNA, 19 nt, Artificial Sequence
  Description of Artificial Sequence: Synthetic oligonucleotide
  Antisense strand to SEQ ID NO: 944690
ugcucuggaagucuacuuc

SEQ ID NO: 944692 - RNA, 19 nt, Artificial Sequence
  Description of Artificial Sequence: Synthetic oligonucleotide
  Sense strand starting at position 3266 of SEQ ID NO: 913666
cagagaugcucugggacag

SEQ ID NO: 944693 - RNA, 19 nt, Artificial Sequence
  Description of Artificial Sequence: Synthetic oligonucleotide
  Antisense strand to SEQ ID NO: 944692
cugucccagagcaucucug

SEQ ID NO: 944694 - RNA, 19 nt, Artificial Sequence
  Description of Artificial Sequence: Synthetic oligonucleotide
  Sense strand starting at position 3205 of SEQ ID NO: 913666
cccugagguuucuggaaac

SEQ ID NO: 944695 - RNA, 19 nt, Artificial Sequence
  Description of Artificial Sequence: Synthetic oligonucleotide
  Antisense strand to SEQ ID NO: 944694
guuuccagaaaccucaggg

SEQ ID NO: 944696 - RNA, 19 nt, Artificial Sequence
  Description of Artificial Sequence: Synthetic oligonucleotide
  Sense strand starting at position 1321 of SEQ ID NO: 913666
acccgaucauugggccaaa

SEQ ID NO: 944697 - RNA, 19 nt, Artificial Sequence
  Description of Artificial Sequence: Synthetic oligonucleotide
  Antisense strand to SEQ ID NO: 944696
uuuggcccaaugaucgggu

SEQ ID NO: 944698 - RNA, 19 nt, Artificial Sequence
  Description of Artificial Sequence: Synthetic oligonucleotide
  Sense strand starting at position 3681 of SEQ ID NO: 913666
gaccaugucuuaugagcuc

SEQ ID NO: 944699 - RNA, 19 nt, Artificial Sequence
  Description of Artificial Sequence: Synthetic oligonucleotide
  Antisense strand to SEQ ID NO: 944698
gagcucauaagacaugguc

SEQ ID NO: 944700 - RNA, 19 nt, Artificial Sequence
  Description of Artificial Sequence: Synthetic oligonucleotide
  Sense strand starting at position 132 of SEQ ID NO: 913667
cccuauagagguuaucuau

SEQ ID NO: 944701 - RNA, 19 nt, Artificial Sequence
  Description of Artificial Sequence: Synthetic oligonucleotide
  Antisense strand to SEQ ID NO: 944700
auagauaaccucuauaggg

SEQ ID NO: 944702 - RNA, 19 nt, Artificial Sequence
  Description of Artificial Sequence: Synthetic oligonucleotide
  Sense strand starting at position 267 of SEQ ID NO: 913667
ugcucauggcugcauuuaa

SEQ ID NO: 944703 - RNA, 19 nt, Artificial Sequence
  Description of Artificial Sequence: Synthetic oligonucleotide
  Antisense strand to SEQ ID NO: 944702
uuaaaugcagccaugagca

SEQ ID NO: 944704 - RNA, 19 nt, Artificial Sequence
  Description of Artificial Sequence: Synthetic oligonucleotide
  Sense strand starting at position 3819 of SEQ ID NO: 913667
caguauguagaguaacaca

SEQ ID NO: 944705 - RNA, 19 nt, Artificial Sequence
  Description of Artificial Sequence: Synthetic oligonucleotide
  Antisense strand to SEQ ID NO: 944704
uguguuacucuacauacug

SEQ ID NO: 944706 - RNA, 19 nt, Artificial Sequence
  Description of Artificial Sequence: Synthetic oligonucleotide
  Sense strand starting at position 162 of SEQ ID NO: 913667
cgccgcauccaaguuuaua

SEQ ID NO: 944707 - RNA, 19 nt, Artificial Sequence
  Description of Artificial Sequence: Synthetic oligonucleotide
  Antisense strand to SEQ ID NO: 944706
uauaaacuuggaugcggcg

SEQ ID NO: 944708 - RNA, 19 nt, Artificial Sequence
  Description of Artificial Sequence: Synthetic oligonucleotide
  Sense strand starting at position 135 of SEQ ID NO: 913667
uauagagguuaucuaugac

SEQ ID NO: 944709 - RNA, 19 nt, Artificial Sequence
  Description of Artificial Sequence: Synthetic oligonucleotide
  Antisense strand to SEQ ID NO: 944708
gucauagauaaccucuaua

SEQ ID NO: 944710 - RNA, 19 nt, Artificial Sequence
  Description of Artificial Sequence: Synthetic oligonucleotide
  Sense strand starting at position 138 of SEQ ID NO: 913667
agagguuaucuaugacacc

SEQ ID NO: 944711 - RNA, 19 nt, Artificial Sequence
  Description of Artificial Sequence: Synthetic oligonucleotide
  Antisense strand to SEQ ID NO: 944710
ggugucauagauaaccucu

SEQ ID NO: 944712 - RNA, 19 nt, Artificial Sequence
  Description of Artificial Sequence: Synthetic oligonucleotide
  Sense strand starting at position 1748 of SEQ ID NO: 913667
uugcaaauacgauagcaaa

SEQ ID NO: 944713 - RNA, 19 nt, Artificial Sequence
  Description of Artificial Sequence: Synthetic oligonucleotide
  Antisense strand to SEQ ID NO: 944712
uuugcuaucguauuugcaa

SEQ ID NO: 944714 - RNA, 19 nt, Artificial Sequence
  Description of Artificial Sequence: Synthetic oligonucleotide
  Sense strand starting at position 216 of SEQ ID NO: 913667
uuagcugauuaagugagaa

SEQ ID NO: 944715 - RNA, 19 nt, Artificial Sequence
  Description of Artificial Sequence: Synthetic oligonucleotide
  Antisense strand to SEQ ID NO: 944714
uucucacuuaaucagcuaa

SEQ ID NO: 944716 - RNA, 19 nt, Artificial Sequence
  Description of Artificial Sequence: Synthetic oligonucleotide
  Sense strand starting at position 498 of SEQ ID NO: 913667
ucugcuaucccagagauuc

SEQ ID NO: 944717 - RNA, 19 nt, Artificial Sequence
  Description of Artificial Sequence: Synthetic oligonucleotide
  Antisense strand to SEQ ID NO: 944716
gaaucucugggauagcaga

SEQ ID NO: 944718 - RNA, 19 nt, Artificial Sequence
  Description of Artificial Sequence: Synthetic oligonucleotide
  Sense strand starting at position 2805 of SEQ ID NO: 913667
gaaugaauguguucuugaa

SEQ ID NO: 944719 - RNA, 19 nt, Artificial Sequence
  Description of Artificial Sequence: Synthetic oligonucleotide
  Antisense strand to SEQ ID NO: 944718
uucaagaacacauucauuc

SEQ ID NO: 944720 - RNA, 19 nt, Artificial Sequence
  Description of Artificial Sequence: Synthetic oligonucleotide
  Sense strand starting at position 2809 of SEQ ID NO: 913667
gaauguguucuugaaucuu

SEQ ID NO: 944721 - RNA, 19 nt, Artificial Sequence
  Description of Artificial Sequence: Synthetic oligonucleotide
  Antisense strand to SEQ ID NO: 944720
aagauucaagaacacauuc

SEQ ID NO: 944722 - RNA, 19 nt, Artificial Sequence
  Description of Artificial Sequence: Synthetic oligonucleotide
  Sense strand starting at position 2802 of SEQ ID NO: 913667
agagaaugaauguguucuu

SEQ ID NO: 944723 - RNA, 19 nt, Artificial Sequence
  Description of Artificial Sequence: Synthetic oligonucleotide
  Antisense strand to SEQ ID NO: 944722
aagaacacauucauucucu

SEQ ID NO: 944724 - RNA, 19 nt, Artificial Sequence
  Description of Artificial Sequence: Synthetic oligonucleotide
  Sense strand starting at position 2101 of SEQ ID NO: 913667
ugucucuccagauggauga

SEQ ID NO: 944725 - RNA, 19 nt, Artificial Sequence
  Description of Artificial Sequence: Synthetic oligonucleotide
  Antisense strand to SEQ ID NO: 944724
ucauccaucuggagagaca

SEQ ID NO: 944726 - RNA, 19 nt, Artificial Sequence
  Description of Artificial Sequence: Synthetic oligonucleotide
  Sense strand starting at position 329 of SEQ ID NO: 913667
ggacucacaucacuuuagu

SEQ ID NO: 944727 - RNA, 19 nt, Artificial Sequence
  Description of Artificial Sequence: Synthetic oligonucleotide
  Antisense strand to SEQ ID NO: 944726
acuaaagugaugugagucc

SEQ ID NO: 944728 - RNA, 19 nt, Artificial Sequence
  Description of Artificial Sequence: Synthetic oligonucleotide
  Sense strand starting at position 2585 of SEQ ID NO: 913667
guaguugaacgguaagauu

SEQ ID NO: 944729 - RNA, 19 nt, Artificial Sequence
  Description of Artificial Sequence: Synthetic oligonucleotide
  Antisense strand to SEQ ID NO: 944728
aaucuuaccguucaacuac

SEQ ID NO: 944730 - RNA, 19 nt, Artificial Sequence
  Description of Artificial Sequence: Synthetic oligonucleotide
  Sense strand starting at position 213 of SEQ ID NO: 913667
uuguuagcugauuaaguga

SEQ ID NO: 944731 - RNA, 19 nt, Artificial Sequence
  Description of Artificial Sequence: Synthetic oligonucleotide
  Antisense strand to SEQ ID NO: 944730
ucacuuaaucagcuaacaa

SEQ ID NO: 944732 - RNA, 19 nt, Artificial Sequence
  Description of Artificial Sequence: Synthetic oligonucleotide
  Sense strand starting at position 427 of SEQ ID NO: 913667
acgccuauuucuguuucca

SEQ ID NO: 944733 - RNA, 19 nt, Artificial Sequence
  Description of Artificial Sequence: Synthetic oligonucleotide
  Antisense strand to SEQ ID NO: 944732
uggaaacagaaauaggcgu

SEQ ID NO: 944734 - RNA, 19 nt, Artificial Sequence
  Description of Artificial Sequence: Synthetic oligonucleotide
  Sense strand starting at position 123 of SEQ ID NO: 913667
ggcuucugucccuauagag

SEQ ID NO: 944735 - RNA, 19 nt, Artificial Sequence
  Description of Artificial Sequence: Synthetic oligonucleotide
  Antisense strand to SEQ ID NO: 944734
cucuauagggacagaagcc

SEQ ID NO: 944736 - RNA, 19 nt, Artificial Sequence
  Description of Artificial Sequence: Synthetic oligonucleotide
  Sense strand starting at position 1989 of SEQ ID NO: 913667
cgugguaucaauggaacag

SEQ ID NO: 944737 - RNA, 19 nt, Artificial Sequence
  Description of Artificial Sequence: Synthetic oligonucleotide
  Antisense strand to SEQ ID NO: 944736
cuguuccauugauaccacg

SEQ ID NO: 944738 - RNA, 19 nt, Artificial Sequence
  Description of Artificial Sequence: Synthetic oligonucleotide
  Sense strand starting at position 2807 of SEQ ID NO: 913667
augaauguguucuugaauc

SEQ ID NO: 944739 - RNA, 19 nt, Artificial Sequence
  Description of Artificial Sequence: Synthetic oligonucleotide
  Antisense strand to SEQ ID NO: 944738
gauucaagaacacauucau

SEQ ID NO: 944740 - RNA, 19 nt, Artificial Sequence
  Description of Artificial Sequence: Synthetic oligonucleotide
  Sense strand starting at position 3406 of SEQ ID NO: 913667
gacagugugcuauacuuac

SEQ ID NO: 944741 - RNA, 19 nt, Artificial Sequence
  Description of Artificial Sequence: Synthetic oligonucleotide
  Antisense strand to SEQ ID NO: 944740
guaaguauagcacacuguc

SEQ ID NO: 944742 - RNA, 19 nt, Artificial Sequence
  Description of Artificial Sequence: Synthetic oligonucleotide
  Sense strand starting at position 2348 of SEQ ID NO: 913667
cucauauucugaguucuac

SEQ ID NO: 944743 - RNA, 19 nt, Artificial Sequence
  Description of Artificial Sequence: Synthetic oligonucleotide
  Antisense strand to SEQ ID NO: 944742
guagaacucagaauaugag

SEQ ID NO: 944744 - RNA, 19 nt, Artificial Sequence
  Description of Artificial Sequence: Synthetic oligonucleotide
  Sense strand starting at position 2127 of SEQ ID NO: 913667
gguccuguaguaugaaaua

SEQ ID NO: 944745 - RNA, 19 nt, Artificial Sequence
  Description of Artificial Sequence: Synthetic oligonucleotide
  Antisense strand to SEQ ID NO: 944744
uauuucauacuacaggacc

SEQ ID NO: 944746 - RNA, 19 nt, Artificial Sequence
  Description of Artificial Sequence: Synthetic oligonucleotide
  Sense strand starting at position 700 of SEQ ID NO: 913667
uccagaaauugacaaagaa

SEQ ID NO: 944747 - RNA, 19 nt, Artificial Sequence
  Description of Artificial Sequence: Synthetic oligonucleotide
  Antisense strand to SEQ ID NO: 944746
uucuuugucaauuucugga

SEQ ID NO: 944748 - RNA, 19 nt, Artificial Sequence
  Description of Artificial Sequence: Synthetic oligonucleotide
  Sense strand starting at position 1619 of SEQ ID NO: 913667
acuacucuuccgcagacuu

SEQ ID NO: 944749 - RNA, 19 nt, Artificial Sequence
  Description of Artificial Sequence: Synthetic oligonucleotide
  Antisense strand to SEQ ID NO: 944748
aagucugcggaagaguagu

SEQ ID NO: 944750 - RNA, 19 nt, Artificial Sequence
  Description of Artificial Sequence: Synthetic oligonucleotide
  Sense strand starting at position 1685 of SEQ ID NO: 913667
ggaaacugcuuacugucua

SEQ ID NO: 944751 - RNA, 19 nt, Artificial Sequence
  Description of Artificial Sequence: Synthetic oligonucleotide
  Antisense strand to SEQ ID NO: 944750
uagacaguaagcaguuucc

SEQ ID NO: 944752 - RNA, 19 nt, Artificial Sequence
  Description of Artificial Sequence: Synthetic oligonucleotide
  Sense strand starting at position 1720 of SEQ ID NO: 913667
ccauguaugcauugagauu

SEQ ID NO: 944753 - RNA, 19 nt, Artificial Sequence
  Description of Artificial Sequence: Synthetic oligonucleotide
  Antisense strand to SEQ ID NO: 944752
aaucucaaugcauacaugg

SEQ ID NO: 944754 - RNA, 19 nt, Artificial Sequence
  Description of Artificial Sequence: Synthetic oligonucleotide
  Sense strand starting at position 1627 of SEQ ID NO: 913667
uccgcagacuuucuagaau

SEQ ID NO: 944755 - RNA, 19 nt, Artificial Sequence
  Description of Artificial Sequence: Synthetic oligonucleotide
  Antisense strand to SEQ ID NO: 944754
auucuagaaagucugcgga

SEQ ID NO: 944756 - RNA, 19 nt, Artificial Sequence
  Description of Artificial Sequence: Synthetic oligonucleotide
  Sense strand starting at position 1980 of SEQ ID NO: 913667
gugaaugaacgugguauca

SEQ ID NO: 944757 - RNA, 19 nt, Artificial Sequence
  Description of Artificial Sequence: Synthetic oligonucleotide
  Antisense strand to SEQ ID NO: 944756
ugauaccacguucauucac

SEQ ID NO: 944758 - RNA, 19 nt, Artificial Sequence
  Description of Artificial Sequence: Synthetic oligonucleotide
  Sense strand starting at position 122 of SEQ ID NO: 913667
aggcuucugucccuauaga

SEQ ID NO: 944759 - RNA, 19 nt, Artificial Sequence
  Description of Artificial Sequence: Synthetic oligonucleotide
  Antisense strand to SEQ ID NO: 944758
ucuauagggacagaagccu

SEQ ID NO: 944760 - RNA, 19 nt, Artificial Sequence
  Description of Artificial Sequence: Synthetic oligonucleotide
  Sense strand starting at position 1450 of SEQ ID NO: 913667
gcagcuucggaggagucau

SEQ ID NO: 944761 - RNA, 19 nt, Artificial Sequence
  Description of Artificial Sequence: Synthetic oligonucleotide
  Antisense strand to SEQ ID NO: 944760
augacuccuccgaagcugc

SEQ ID NO: 944762 - RNA, 19 nt, Artificial Sequence
  Description of Artificial Sequence: Synthetic oligonucleotide
  Sense strand starting at position 274 of SEQ ID NO: 913667
ggcugcauuuaauagaaau

SEQ ID NO: 944763 - RNA, 19 nt, Artificial Sequence
  Description of Artificial Sequence: Synthetic oligonucleotide
  Antisense strand to SEQ ID NO: 944762
auuucuauuaaaugcagcc

SEQ ID NO: 944764 - RNA, 19 nt, Artificial Sequence
  Description of Artificial Sequence: Synthetic oligonucleotide
  Sense strand starting at position 1979 of SEQ ID NO: 913667
ugugaaugaacgugguauc

SEQ ID NO: 944765 - RNA, 19 nt, Artificial Sequence
  Description of Artificial Sequence: Synthetic oligonucleotide
  Antisense strand to SEQ ID NO: 944764
gauaccacguucauucaca

SEQ ID NO: 944766 - RNA, 19 nt, Artificial Sequence
  Description of Artificial Sequence: Synthetic oligonucleotide
  Sense strand starting at position 120 of SEQ ID NO: 913667
ugaggcuucugucccuaua

SEQ ID NO: 944767 - RNA, 19 nt, Artificial Sequence
  Description of Artificial Sequence: Synthetic oligonucleotide
  Antisense strand to SEQ ID NO: 944766
uauagggacagaagccuca

SEQ ID NO: 944768 - RNA, 19 nt, Artificial Sequence
  Description of Artificial Sequence: Synthetic oligonucleotide
  Sense strand starting at position 220 of SEQ ID NO: 913667
cugauuaagugagaagaca

SEQ ID NO: 944769 - RNA, 19 nt, Artificial Sequence
  Description of Artificial Sequence: Synthetic oligonucleotide
  Antisense strand to SEQ ID NO: 944768
ugucuucucacuuaaucag

SEQ ID NO: 944770 - RNA, 19 nt, Artificial Sequence
  Description of Artificial Sequence: Synthetic oligonucleotide
  Sense strand starting at position 208 of SEQ ID NO: 913667
cagucuuguuagcugauua

SEQ ID NO: 944771 - RNA, 19 nt, Artificial Sequence
  Description of Artificial Sequence: Synthetic oligonucleotide
  Antisense strand to SEQ ID NO: 944770
uaaucagcuaacaagacug

SEQ ID NO: 944772 - RNA, 19 nt, Artificial Sequence
  Description of Artificial Sequence: Synthetic oligonucleotide
  Sense strand starting at position 2034 of SEQ ID NO: 913667
cccgauuucucucacacug

SEQ ID NO: 944773 - RNA, 19 nt, Artificial Sequence
  Description of Artificial Sequence: Synthetic oligonucleotide
  Antisense strand to SEQ ID NO: 944772
cagugugagagaaaucggg

SEQ ID NO: 944774 - RNA, 19 nt, Artificial Sequence
  Description of Artificial Sequence: Synthetic oligonucleotide
  Sense strand starting at position 2525 of SEQ ID NO: 913667
agaaaucaguuauaagggu

SEQ ID NO: 944775 - RNA, 19 nt, Artificial Sequence
  Description of Artificial Sequence: Synthetic oligonucleotide
  Antisense strand to SEQ ID NO: 944774
acccuuauaacugauuucu

SEQ ID NO: 944776 - RNA, 19 nt, Artificial Sequence
  Description of Artificial Sequence: Synthetic oligonucleotide
  Sense strand starting at position 3328 of SEQ ID NO: 913667
uuagaaauguacuacauug

SEQ ID NO: 944777 - RNA, 19 nt, Artificial Sequence
  Description of Artificial Sequence: Synthetic oligonucleotide
  Antisense strand to SEQ ID NO: 944776
caauguaguacauuucuaa

SEQ ID NO: 944778 - RNA, 19 nt, Artificial Sequence
  Description of Artificial Sequence: Synthetic oligonucleotide
  Sense strand starting at position 1969 of SEQ ID NO: 913667
gccggcucccugugaauga

SEQ ID NO: 944779 - RNA, 19 nt, Artificial Sequence
  Description of Artificial Sequence: Synthetic oligonucleotide
  Antisense strand to SEQ ID NO: 944778
ucauucacagggagccggc

SEQ ID NO: 944780 - RNA, 19 nt, Artificial Sequence
  Description of Artificial Sequence: Synthetic oligonucleotide
  Sense strand starting at position 318 of SEQ ID NO: 913668
ucauuuguuugccugaaau

SEQ ID NO: 944781 - RNA, 19 nt, Artificial Sequence
  Description of Artificial Sequence: Synthetic oligonucleotide
  Antisense strand to SEQ ID NO: 944780
auuucaggcaaacaaauga

SEQ ID NO: 944782 - RNA, 19 nt, Artificial Sequence
  Description of Artificial Sequence: Synthetic oligonucleotide
  Sense strand starting at position 3479 of SEQ ID NO: 913668
gagccuauacauuaacgga

SEQ ID NO: 944783 - RNA, 19 nt, Artificial Sequence
  Description of Artificial Sequence: Synthetic oligonucleotide
  Antisense strand to SEQ ID NO: 944782
uccguuaauguauaggcuc

SEQ ID NO: 944784 - RNA, 19 nt, Artificial Sequence
  Description of Artificial Sequence: Synthetic oligonucleotide
  Sense strand starting at position 3859 of SEQ ID NO: 913668
caguuugcagaauguauuu

SEQ ID NO: 944785 - RNA, 19 nt, Artificial Sequence
  Description of Artificial Sequence: Synthetic oligonucleotide
  Antisense strand to SEQ ID NO: 944784
aaauacauucugcaaacug

SEQ ID NO: 944786 - RNA, 19 nt, Artificial Sequence
  Description of Artificial Sequence: Synthetic oligonucleotide
  Sense strand starting at position 825 of SEQ ID NO: 913668
gcgcuuucgacaucuccca

SEQ ID NO: 944787 - RNA, 19 nt, Artificial Sequence
  Description of Artificial Sequence: Synthetic oligonucleotide
  Antisense strand to SEQ ID NO: 944786
ugggagaugucgaaagcgc

SEQ ID NO: 944788 - RNA, 19 nt, Artificial Sequence
  Description of Artificial Sequence: Synthetic oligonucleotide
  Sense strand starting at position 1762 of SEQ ID NO: 913668
caaacuuugcucgcgaguu

SEQ ID NO: 944789 - RNA, 19 nt, Artificial Sequence
  Description of Artificial Sequence: Synthetic oligonucleotide
  Antisense strand to SEQ ID NO: 944788
aacucgcgagcaaaguuug

SEQ ID NO: 944790 - RNA, 19 nt, Artificial Sequence
  Description of Artificial Sequence: Synthetic oligonucleotide
  Sense strand starting at position 234 of SEQ ID NO: 913668
gguuuaaugcuugcgucca

SEQ ID NO: 944791 - RNA, 19 nt, Artificial Sequence
  Description of Artificial Sequence: Synthetic oligonucleotide
  Antisense strand to SEQ ID NO: 944790
uggacgcaagcauuaaacc

SEQ ID NO: 944792 - RNA, 19 nt, Artificial Sequence
  Description of Artificial Sequence: Synthetic oligonucleotide
  Sense strand starting at position 364 of SEQ ID NO: 913668
cgcuaaagagcucagagaa

SEQ ID NO: 944793 - RNA, 19 nt, Artificial Sequence
  Description of Artificial Sequence: Synthetic oligonucleotide
  Antisense strand to SEQ ID NO: 944792
uucucugagcucuuuagcg

SEQ ID NO: 944794 - RNA, 19 nt, Artificial Sequence
  Description of Artificial Sequence: Synthetic oligonucleotide
  Sense strand starting at position 484 of SEQ ID NO: 913668
guggaagauuuacagggau

SEQ ID NO: 944795 - RNA, 19 nt, Artificial Sequence
  Description of Artificial Sequence: Synthetic oligonucleotide
  Antisense strand to SEQ ID NO: 944794
aucccuguaaaucuuccac

SEQ ID NO: 944796 - RNA, 19 nt, Artificial Sequence
  Description of Artificial Sequence: Synthetic oligonucleotide
  Sense strand starting at position 3787 of SEQ ID NO: 913668
augcauguugaauggaaag

SEQ ID NO: 944797 - RNA, 19 nt, Artificial Sequence
  Description of Artificial Sequence: Synthetic oligonucleotide
  Antisense strand to SEQ ID NO: 944796
cuuuccauucaacaugcau

SEQ ID NO: 944798 - RNA, 19 nt, Artificial Sequence
  Description of Artificial Sequence: Synthetic oligonucleotide
  Sense strand starting at position 3449 of SEQ ID NO: 913668
ggucaaguccucuaaccug

SEQ ID NO: 944799 - RNA, 19 nt, Artificial Sequence
  Description of Artificial Sequence: Synthetic oligonucleotide
  Antisense strand to SEQ ID NO: 944798
cagguuagaggacuugacc

SEQ ID NO: 944800 - RNA, 19 nt, Artificial Sequence
  Description of Artificial Sequence: Synthetic oligonucleotide
  Sense strand starting at position 2556 of SEQ ID NO: 913668
cuacauaggugauucuauu

SEQ ID NO: 944801 - RNA, 19 nt, Artificial Sequence
  Description of Artificial Sequence: Synthetic oligonucleotide
  Antisense strand to SEQ ID NO: 944800
aauagaaucaccuauguag

SEQ ID NO: 944802 - RNA, 19 nt, Artificial Sequence
  Description of Artificial Sequence: Synthetic oligonucleotide
  Sense strand starting at position 3366 of SEQ ID NO: 913668
uuggaaauuugauagcaac

SEQ ID NO: 944803 - RNA, 19 nt, Artificial Sequence
  Description of Artificial Sequence: Synthetic oligonucleotide
  Antisense strand to SEQ ID NO: 944802
guugcuaucaaauuuccaa

SEQ ID NO: 944804 - RNA, 19 nt, Artificial Sequence
  Description of Artificial Sequence: Synthetic oligonucleotide
  Sense strand starting at position 2693 of SEQ ID NO: 913668
gaauguggcucucucagaa

SEQ ID NO: 944805 - RNA, 19 nt, Artificial Sequence
  Description of Artificial Sequence: Synthetic oligonucleotide
  Antisense strand to SEQ ID NO: 944804
uucugagagagccacauuc

SEQ ID NO: 944806 - RNA, 19 nt, Artificial Sequence
  Description of Artificial Sequence: Synthetic oligonucleotide
  Sense strand starting at position 2596 of SEQ ID NO: 913668
agaguacuauucccaguuu

SEQ ID NO: 944807 - RNA, 19 nt, Artificial Sequence
  Description of Artificial Sequence: Synthetic oligonucleotide
  Antisense strand to SEQ ID NO: 944806
aaacugggaauaguacucu

SEQ ID NO: 944808 - RNA, 19 nt, Artificial Sequence
  Description of Artificial Sequence: Synthetic oligonucleotide
  Sense strand starting at position 3646 of SEQ ID NO: 913668
gggaaacucgagugucuca

SEQ ID NO: 944809 - RNA, 19 nt, Artificial Sequence
  Description of Artificial Sequence: Synthetic oligonucleotide
  Antisense strand to SEQ ID NO: 944808
ugagacacucgaguuuccc

SEQ ID NO: 944810 - RNA, 19 nt, Artificial Sequence
  Description of Artificial Sequence: Synthetic oligonucleotide
  Sense strand starting at position 3545 of SEQ ID NO: 913668
uucugauagcaguauguuu

SEQ ID NO: 944811 - RNA, 19 nt, Artificial Sequence
  Description of Artificial Sequence: Synthetic oligonucleotide
  Antisense strand to SEQ ID NO: 944810
aaacauacugcuaucagaa

SEQ ID NO: 944812 - RNA, 19 nt, Artificial Sequence
  Description of Artificial Sequence: Synthetic oligonucleotide
  Sense strand starting at position 2895 of SEQ ID NO: 913668
gcuguaacugguuaaaguu

SEQ ID NO: 944813 - RNA, 19 nt, Artificial Sequence
  Description of Artificial Sequence: Synthetic oligonucleotide
  Antisense strand to SEQ ID NO: 944812
aacuuuaaccaguuacagc

SEQ ID NO: 944814 - RNA, 19 nt, Artificial Sequence
  Description of Artificial Sequence: Synthetic oligonucleotide
  Sense strand starting at position 2452 of SEQ ID NO: 913668
cuuggaaauguucgcagga

SEQ ID NO: 944815 - RNA, 19 nt, Artificial Sequence
  Description of Artificial Sequence: Synthetic oligonucleotide
  Antisense strand to SEQ ID NO: 944814
uccugcgaacauuuccaag

SEQ ID NO: 944816 - RNA, 19 nt, Artificial Sequence
  Description of Artificial Sequence: Synthetic oligonucleotide
  Sense strand starting at position 3418 of SEQ ID NO: 913668
cucuauaugcuugguggga

SEQ ID NO: 944817 - RNA, 19 nt, Artificial Sequence
  Description of Artificial Sequence: Synthetic oligonucleotide
  Antisense strand to SEQ ID NO: 944816
ucccaccaagcauauagag

SEQ ID NO: 944818 - RNA, 19 nt, Artificial Sequence
  Description of Artificial Sequence: Synthetic oligonucleotide
  Sense strand starting at position 9 of SEQ ID NO: 913668
cugggaucaccugguguuu

SEQ ID NO: 944819 - RNA, 19 nt, Artificial Sequence
  Description of Artificial Sequence: Synthetic oligonucleotide
  Antisense strand to SEQ ID NO: 944818
aaacaccaggugaucccag

SEQ ID NO: 944820 - RNA, 19 nt, Artificial Sequence
  Description of Artificial Sequence: Synthetic oligonucleotide
  Sense strand starting at position 1611 of SEQ ID NO: 913668
aagagugguccuugggucu

SEQ ID NO: 944821 - RNA, 19 nt, Artificial Sequence
  Description of Artificial Sequence: Synthetic oligonucleotide
  Antisense strand to SEQ ID NO: 944820
agacccaaggaccacucuu

SEQ ID NO: 944822 - RNA, 19 nt, Artificial Sequence
  Description of Artificial Sequence: Synthetic oligonucleotide
  Sense strand starting at position 580 of SEQ ID NO: 913668
aaagcagguuugccuuuaa

SEQ ID NO: 944823 - RNA, 19 nt, Artificial Sequence
  Description of Artificial Sequence: Synthetic oligonucleotide
  Antisense strand to SEQ ID NO: 944822
uuaaaggcaaaccugcuuu

SEQ ID NO: 944824 - RNA, 19 nt, Artificial Sequence
  Description of Artificial Sequence: Synthetic oligonucleotide
  Sense strand starting at position 2894 of SEQ ID NO: 913668
agcuguaacugguuaaagu

SEQ ID NO: 944825 - RNA, 19 nt, Artificial Sequence
  Description of Artificial Sequence: Synthetic oligonucleotide
  Antisense strand to SEQ ID NO: 944824
acuuuaaccaguuacagcu

SEQ ID NO: 944826 - RNA, 19 nt, Artificial Sequence
  Description of Artificial Sequence: Synthetic oligonucleotide
  Sense strand starting at position 86 of SEQ ID NO: 913668
agacccaucucuucgcuua

SEQ ID NO: 944827 - RNA, 19 nt, Artificial Sequence
  Description of Artificial Sequence: Synthetic oligonucleotide
  Antisense strand to SEQ ID NO: 944826
uaagcgaagagaugggucu

SEQ ID NO: 944828 - RNA, 19 nt, Artificial Sequence
  Description of Artificial Sequence: Synthetic oligonucleotide
  Sense strand starting at position 3180 of SEQ ID NO: 913668
gcaccugugucacuaacau

SEQ ID NO: 944829 - RNA, 19 nt, Artificial Sequence
  Description of Artificial Sequence: Synthetic oligonucleotide
  Antisense strand to SEQ ID NO: 944828
auguuagugacacaggugc

SEQ ID NO: 944830 - RNA, 19 nt, Artificial Sequence
  Description of Artificial Sequence: Synthetic oligonucleotide
  Sense strand starting at position 3780 of SEQ ID NO: 913668
uagcuuuaugcauguugaa

SEQ ID NO: 944831 - RNA, 19 nt, Artificial Sequence
  Description of Artificial Sequence: Synthetic oligonucleotide
  Antisense strand to SEQ ID NO: 944830
uucaacaugcauaaagcua

SEQ ID NO: 944832 - RNA, 19 nt, Artificial Sequence
  Description of Artificial Sequence: Synthetic oligonucleotide
  Sense strand starting at position 607 of SEQ ID NO: 913668
uuuauugaauugggagaaa

SEQ ID NO: 944833 - RNA, 19 nt, Artificial Sequence
  Description of Artificial Sequence: Synthetic oligonucleotide
  Antisense strand to SEQ ID NO: 944832
uuucucccaauucaauaaa

SEQ ID NO: 944834 - RNA, 19 nt, Artificial Sequence
  Description of Artificial Sequence: Synthetic oligonucleotide
  Sense strand starting at position 2607 of SEQ ID NO: 913668
cccaguuucugauaaggaa

SEQ ID NO: 944835 - RNA, 19 nt, Artificial Sequence
  Description of Artificial Sequence: Synthetic oligonucleotide
  Antisense strand to SEQ ID NO: 944834
uuccuuaucagaaacuggg

SEQ ID NO: 944836 - RNA, 19 nt, Artificial Sequence
  Description of Artificial Sequence: Synthetic oligonucleotide
  Sense strand starting at position 1484 of SEQ ID NO: 913668
gcgucuugcgcggcgauua

SEQ ID NO: 944837 - RNA, 19 nt, Artificial Sequence
  Description of Artificial Sequence: Synthetic oligonucleotide
  Antisense strand to SEQ ID NO: 944836
uaaucgccgcgcaagacgc

SEQ ID NO: 944838 - RNA, 19 nt, Artificial Sequence
  Description of Artificial Sequence: Synthetic oligonucleotide
  Sense strand starting at position 2475 of SEQ ID NO: 913668
gcauguuucuguccuucua

SEQ ID NO: 944839 - RNA, 19 nt, Artificial Sequence
  Description of Artificial Sequence: Synthetic oligonucleotide
  Antisense strand to SEQ ID NO: 944838
uagaaggacagaaacaugc

SEQ ID NO: 944840 - RNA, 19 nt, Artificial Sequence
  Description of Artificial Sequence: Synthetic oligonucleotide
  Sense strand starting at position 2610 of SEQ ID NO: 913668
aguuucugauaaggaaaca

SEQ ID NO: 944841 - RNA, 19 nt, Artificial Sequence
  Description of Artificial Sequence: Synthetic oligonucleotide
  Antisense strand to SEQ ID NO: 944840
uguuuccuuaucagaaacu

SEQ ID NO: 944842 - RNA, 19 nt, Artificial Sequence
  Description of Artificial Sequence: Synthetic oligonucleotide
  Sense strand starting at position 2937 of SEQ ID NO: 913668
uaagccgugucuucggaau

SEQ ID NO: 944843 - RNA, 19 nt, Artificial Sequence
  Description of Artificial Sequence: Synthetic oligonucleotide
  Antisense strand to SEQ ID NO: 944842
auuccgaagacacggcuua

SEQ ID NO: 944844 - RNA, 19 nt, Artificial Sequence
  Description of Artificial Sequence: Synthetic oligonucleotide
  Sense strand starting at position 236 of SEQ ID NO: 913668
uuuaaugcuugcguccaau

SEQ ID NO: 944845 - RNA, 19 nt, Artificial Sequence
  Description of Artificial Sequence: Synthetic oligonucleotide
  Antisense strand to SEQ ID NO: 944844
auuggacgcaagcauuaaa

SEQ ID NO: 944846 - RNA, 19 nt, Artificial Sequence
  Description of Artificial Sequence: Synthetic oligonucleotide
  Sense strand starting at position 1492 of SEQ ID NO: 913668
cgcggcgauuaccuugaau

SEQ ID NO: 944847 - RNA, 19 nt, Artificial Sequence
  Description of Artificial Sequence: Synthetic oligonucleotide
  Antisense strand to SEQ ID NO: 944846
auucaagguaaucgccgcg

SEQ ID NO: 944848 - RNA, 19 nt, Artificial Sequence
  Description of Artificial Sequence: Synthetic oligonucleotide
  Sense strand starting at position 1761 of SEQ ID NO: 913668
ccaaacuuugcucgcgagu

SEQ ID NO: 944849 - RNA, 19 nt, Artificial Sequence
  Description of Artificial Sequence: Synthetic oligonucleotide
  Antisense strand to SEQ ID NO: 944848
acucgcgagcaaaguuugg

SEQ ID NO: 944850 - RNA, 19 nt, Artificial Sequence
  Description of Artificial Sequence: Synthetic oligonucleotide
  Sense strand starting at position 2454 of SEQ ID NO: 913668
uggaaauguucgcaggaca

SEQ ID NO: 944851 - RNA, 19 nt, Artificial Sequence
  Description of Artificial Sequence: Synthetic oligonucleotide
  Antisense strand to SEQ ID NO: 944850
uguccugcgaacauuucca

SEQ ID NO: 944852 - RNA, 19 nt, Artificial Sequence
  Description of Artificial Sequence: Synthetic oligonucleotide
  Sense strand starting at position 3651 of SEQ ID NO: 913668
acucgagugucucaggaca

SEQ ID NO: 944853 - RNA, 19 nt, Artificial Sequence
  Description of Artificial Sequence: Synthetic oligonucleotide
  Antisense strand to SEQ ID NO: 944852
uguccugagacacucgagu

SEQ ID NO: 944854 - RNA, 19 nt, Artificial Sequence
  Description of Artificial Sequence: Synthetic oligonucleotide
  Sense strand starting at position 3537 of SEQ ID NO: 913668
acggguuguucugauagca

SEQ ID NO: 944855 - RNA, 19 nt, Artificial Sequence
  Description of Artificial Sequence: Synthetic oligonucleotide
  Antisense strand to SEQ ID NO: 944854
ugcuaucagaacaacccgu

SEQ ID NO: 944856 - RNA, 19 nt, Artificial Sequence
  Description of Artificial Sequence: Synthetic oligonucleotide
  Sense strand starting at position 3803 of SEQ ID NO: 913668
aaggaagcuuuccgcugaa

SEQ ID NO: 944857 - RNA, 19 nt, Artificial Sequence
  Description of Artificial Sequence: Synthetic oligonucleotide
  Antisense strand to SEQ ID NO: 944856
uucagcggaaagcuuccuu

SEQ ID NO: 944858 - RNA, 19 nt, Artificial Sequence
  Description of Artificial Sequence: Synthetic oligonucleotide
  Sense strand starting at position 527 of SEQ ID NO: 913668
uuuaaauguugauagcguu

SEQ ID NO: 944859 - RNA, 19 nt, Artificial Sequence
  Description of Artificial Sequence: Synthetic oligonucleotide
  Antisense strand to SEQ ID NO: 944858
aacgcuaucaacauuuaaa

SEQ ID NO: 944860 - RNA, 19 nt, Artificial Sequence
  Description of Artificial Sequence: Synthetic oligonucleotide
  Sense strand starting at position 714 of SEQ ID NO: 913669
guaagugugcuguucauuc

SEQ ID NO: 944861 - RNA, 19 nt, Artificial Sequence
  Description of Artificial Sequence: Synthetic oligonucleotide
  Antisense strand to SEQ ID NO: 944860
gaaugaacagcacacuuac

SEQ ID NO: 944862 - RNA, 19 nt, Artificial Sequence
  Description of Artificial Sequence: Synthetic oligonucleotide
  Sense strand starting at position 1031 of SEQ ID NO: 913669
gccucauguaguccucgua

SEQ ID NO: 944863 - RNA, 19 nt, Artificial Sequence
  Description of Artificial Sequence: Synthetic oligonucleotide
  Antisense strand to SEQ ID NO: 944862
uacgaggacuacaugaggc

SEQ ID NO: 944864 - RNA, 19 nt, Artificial Sequence
  Description of Artificial Sequence: Synthetic oligonucleotide
  Sense strand starting at position 2860 of SEQ ID NO: 913669
guaaauuauagucauggua

SEQ ID NO: 944865 - RNA, 19 nt, Artificial Sequence
  Description of Artificial Sequence: Synthetic oligonucleotide
  Antisense strand to SEQ ID NO: 944864
uaccaugacuauaauuuac

SEQ ID NO: 944866 - RNA, 19 nt, Artificial Sequence
  Description of Artificial Sequence: Synthetic oligonucleotide
  Sense strand starting at position 1381 of SEQ ID NO: 913669
cauuguaagcaguaggaau

SEQ ID NO: 944867 - RNA, 19 nt, Artificial Sequence
  Description of Artificial Sequence: Synthetic oligonucleotide
  Antisense strand to SEQ ID NO: 944866
auuccuacugcuuacaaug

SEQ ID NO: 944868 - RNA, 19 nt, Artificial Sequence
  Description of Artificial Sequence: Synthetic oligonucleotide
  Sense strand starting at position 2651 of SEQ ID NO: 913669
gccacuuacgaagagugaa

SEQ ID NO: 944869 - RNA, 19 nt, Artificial Sequence
  Description of Artificial Sequence: Synthetic oligonucleotide
  Antisense strand to SEQ ID NO: 944868
uucacucuucguaaguggc

SEQ ID NO: 944870 - RNA, 19 nt, Artificial Sequence
  Description of Artificial Sequence: Synthetic oligonucleotide
  Sense strand starting at position 1654 of SEQ ID NO: 913669
aaggguagcugauucuaaa

SEQ ID NO: 944871 - RNA, 19 nt, Artificial Sequence
  Description of Artificial Sequence: Synthetic oligonucleotide
  Antisense strand to SEQ ID NO: 944870
uuuagaaucagcuacccuu

SEQ ID NO: 944872 - RNA, 19 nt, Artificial Sequence
  Description of Artificial Sequence: Synthetic oligonucleotide
  Sense strand starting at position 2874 of SEQ ID NO: 913669
ugguaugugauuggaccaa

SEQ ID NO: 944873 - RNA, 19 nt, Artificial Sequence
  Description of Artificial Sequence: Synthetic oligonucleotide
  Antisense strand to SEQ ID NO: 944872
uugguccaaucacauacca

SEQ ID NO: 944874 - RNA, 19 nt, Artificial Sequence
  Description of Artificial Sequence: Synthetic oligonucleotide
  Sense strand starting at position 2873 of SEQ ID NO: 913669
augguaugugauuggacca

SEQ ID NO: 944875 - RNA, 19 nt, Artificial Sequence
  Description of Artificial Sequence: Synthetic oligonucleotide
  Antisense strand to SEQ ID NO: 944874
ugguccaaucacauaccau

SEQ ID NO: 944876 - RNA, 19 nt, Artificial Sequence
  Description of Artificial Sequence: Synthetic oligonucleotide
  Sense strand starting at position 2016 of SEQ ID NO: 913669
uggcgagucagggaaucuu

SEQ ID NO: 944877 - RNA, 19 nt, Artificial Sequence
  Description of Artificial Sequence: Synthetic oligonucleotide
  Antisense strand to SEQ ID NO: 944876
aagauucccugacucgcca

SEQ ID NO: 944878 - RNA, 19 nt, Artificial Sequence
  Description of Artificial Sequence: Synthetic oligonucleotide
  Sense strand starting at position 2145 of SEQ ID NO: 913669
cucagagucccaggugaua

SEQ ID NO: 944879 - RNA, 19 nt, Artificial Sequence
  Description of Artificial Sequence: Synthetic oligonucleotide
  Antisense strand to SEQ ID NO: 944878
uaucaccugggacucugag

SEQ ID NO: 944880 - RNA, 19 nt, Artificial Sequence
  Description of Artificial Sequence: Synthetic oligonucleotide
  Sense strand starting at position 529 of SEQ ID NO: 913669
acacgauugcuucagguga

SEQ ID NO: 944881 - RNA, 19 nt, Artificial Sequence
  Description of Artificial Sequence: Synthetic oligonucleotide
  Antisense strand to SEQ ID NO: 944880
ucaccugaagcaaucgugu

SEQ ID NO: 944882 - RNA, 19 nt, Artificial Sequence
  Description of Artificial Sequence: Synthetic oligonucleotide
  Sense strand starting at position 2589 of SEQ ID NO: 913669
aguuuacacuugucaggau

SEQ ID NO: 944883 - RNA, 19 nt, Artificial Sequence
  Description of Artificial Sequence: Synthetic oligonucleotide
  Antisense strand to SEQ ID NO: 944882
auccugacaaguguaaacu

SEQ ID NO: 944884 - RNA, 19 nt, Artificial Sequence
  Description of Artificial Sequence: Synthetic oligonucleotide
  Sense strand starting at position 1878 of SEQ ID NO: 913669
uccauaucuccauguggac

SEQ ID NO: 944885 - RNA, 19 nt, Artificial Sequence
  Description of Artificial Sequence: Synthetic oligonucleotide
  Antisense strand to SEQ ID NO: 944884
guccacauggagauaugga

SEQ ID NO: 944886 - RNA, 19 nt, Artificial Sequence
  Description of Artificial Sequence: Synthetic oligonucleotide
  Sense strand starting at position 3891 of SEQ ID NO: 913669
gcuagcuggcacuagaaau

SEQ ID NO: 944887 - RNA, 19 nt, Artificial Sequence
  Description of Artificial Sequence: Synthetic oligonucleotide
  Antisense strand to SEQ ID NO: 944886
auuucuagugccagcuagc

SEQ ID NO: 944888 - RNA, 19 nt, Artificial Sequence
  Description of Artificial Sequence: Synthetic oligonucleotide
  Sense strand starting at position 2178 of SEQ ID NO: 913669
cacagaaaugugugaggcu

SEQ ID NO: 944889 - RNA, 19 nt, Artificial Sequence
  Description of Artificial Sequence: Synthetic oligonucleotide
  Antisense strand to SEQ ID NO: 944888
agccucacacauuucugug

SEQ ID NO: 944890 - RNA, 19 nt, Artificial Sequence
  Description of Artificial Sequence: Synthetic oligonucleotide
  Sense strand starting at position 600 of SEQ ID NO: 913669
gagcccaugucucucagaa

SEQ ID NO: 944891 - RNA, 19 nt, Artificial Sequence
  Description of Artificial Sequence: Synthetic oligonucleotide
  Antisense strand to SEQ ID NO: 944890
uucugagagacaugggcuc

SEQ ID NO: 944892 - RNA, 19 nt, Artificial Sequence
  Description of Artificial Sequence: Synthetic oligonucleotide
  Sense strand starting at position 846 of SEQ ID NO: 913669
ucauuaaguggcgaugagu

SEQ ID NO: 944893 - RNA, 19 nt, Artificial Sequence
  Description of Artificial Sequence: Synthetic oligonucleotide
  Antisense strand to SEQ ID NO: 944892
acucaucgccacuuaauga

SEQ ID NO: 944894 - RNA, 19 nt, Artificial Sequence
  Description of Artificial Sequence: Synthetic oligonucleotide
  Sense strand starting at position 1103 of SEQ ID NO: 913669
cccugugauacuuggaggu

SEQ ID NO: 944895 - RNA, 19 nt, Artificial Sequence
  Description of Artificial Sequence: Synthetic oligonucleotide
  Antisense strand to SEQ ID NO: 944894
accuccaaguaucacaggg

SEQ ID NO: 944896 - RNA, 19 nt, Artificial Sequence
  Description of Artificial Sequence: Synthetic oligonucleotide
  Sense strand starting at position 2859 of SEQ ID NO: 913669
uguaaauuauagucauggu

SEQ ID NO: 944897 - RNA, 19 nt, Artificial Sequence
  Description of Artificial Sequence: Synthetic oligonucleotide
  Antisense strand to SEQ ID NO: 944896
accaugacuauaauuuaca

SEQ ID NO: 944898 - RNA, 19 nt, Artificial Sequence
  Description of Artificial Sequence: Synthetic oligonucleotide
  Sense strand starting at position 1195 of SEQ ID NO: 913669
ugaugcauugcuuaaguau

SEQ ID NO: 944899 - RNA, 19 nt, Artificial Sequence
  Description of Artificial Sequence: Synthetic oligonucleotide
  Antisense strand to SEQ ID NO: 944898
auacuuaagcaaugcauca

SEQ ID NO: 944900 - RNA, 19 nt, Artificial Sequence
  Description of Artificial Sequence: Synthetic oligonucleotide
  Sense strand starting at position 2863 of SEQ ID NO: 913669
aauuauagucaugguaugu

SEQ ID NO: 944901 - RNA, 19 nt, Artificial Sequence
  Description of Artificial Sequence: Synthetic oligonucleotide
  Antisense strand to SEQ ID NO: 944900
acauaccaugacuauaauu

SEQ ID NO: 944902 - RNA, 19 nt, Artificial Sequence
  Description of Artificial Sequence: Synthetic oligonucleotide
  Sense strand starting at position 3621 of SEQ ID NO: 913669
agaagauaauuucggaucu

SEQ ID NO: 944903 - RNA, 19 nt, Artificial Sequence
  Description of Artificial Sequence: Synthetic oligonucleotide
  Antisense strand to SEQ ID NO: 944902
agauccgaaauuaucuucu

SEQ ID NO: 944904 - RNA, 19 nt, Artificial Sequence
  Description of Artificial Sequence: Synthetic oligonucleotide
  Sense strand starting at position 3622 of SEQ ID NO: 913669
gaagauaauuucggaucua

SEQ ID NO: 944905 - RNA, 19 nt, Artificial Sequence
  Description of Artificial Sequence: Synthetic oligonucleotide
  Antisense strand to SEQ ID NO: 944904
uagauccgaaauuaucuuc

SEQ ID NO: 944906 - RNA, 19 nt, Artificial Sequence
  Description of Artificial Sequence: Synthetic oligonucleotide
  Sense strand starting at position 2867 of SEQ ID NO: 913669
auagucaugguaugugauu

SEQ ID NO: 944907 - RNA, 19 nt, Artificial Sequence
  Description of Artificial Sequence: Synthetic oligonucleotide
  Antisense strand to SEQ ID NO: 944906
aaucacauaccaugacuau

SEQ ID NO: 944908 - RNA, 19 nt, Artificial Sequence
  Description of Artificial Sequence: Synthetic oligonucleotide
  Sense strand starting at position 2620 of SEQ ID NO: 913669
ggagaagugucuuucaguc

SEQ ID NO: 944909 - RNA, 19 nt, Artificial Sequence
  Description of Artificial Sequence: Synthetic oligonucleotide
  Antisense strand to SEQ ID NO: 944908
gacugaaagacacuucucc

SEQ ID NO: 944910 - RNA, 19 nt, Artificial Sequence
  Description of Artificial Sequence: Synthetic oligonucleotide
  Sense strand starting at position 3042 of SEQ ID NO: 913669
ucaguacucucugugacua

SEQ ID NO: 944911 - RNA, 19 nt, Artificial Sequence
  Description of Artificial Sequence: Synthetic oligonucleotide
  Antisense strand to SEQ ID NO: 944910
uagucacagagaguacuga

SEQ ID NO: 944912 - RNA, 19 nt, Artificial Sequence
  Description of Artificial Sequence: Synthetic oligonucleotide
  Sense strand starting at position 3415 of SEQ ID NO: 913669
ggugaaacggugugauuca

SEQ ID NO: 944913 - RNA, 19 nt, Artificial Sequence
  Description of Artificial Sequence: Synthetic oligonucleotide
  Antisense strand to SEQ ID NO: 944912
ugaaucacaccguuucacc

SEQ ID NO: 944914 - RNA, 19 nt, Artificial Sequence
  Description of Artificial Sequence: Synthetic oligonucleotide
  Sense strand starting at position 857 of SEQ ID NO: 913669
cgaugagugcugggaucug

SEQ ID NO: 944915 - RNA, 19 nt, Artificial Sequence
  Description of Artificial Sequence: Synthetic oligonucleotide
  Antisense strand to SEQ ID NO: 944914
cagaucccagcacucaucg

SEQ ID NO: 944916 - RNA, 19 nt, Artificial Sequence
  Description of Artificial Sequence: Synthetic oligonucleotide
  Sense strand starting at position 257 of SEQ ID NO: 913669
gacguacaggcaugacuuu

SEQ ID NO: 944917 - RNA, 19 nt, Artificial Sequence
  Description of Artificial Sequence: Synthetic oligonucleotide
  Antisense strand to SEQ ID NO: 944916
aaagucaugccuguacguc

SEQ ID NO: 944918 - RNA, 19 nt, Artificial Sequence
  Description of Artificial Sequence: Synthetic oligonucleotide
  Sense strand starting at position 3745 of SEQ ID NO: 913669
aauccuaaguccucgcaga

SEQ ID NO: 944919 - RNA, 19 nt, Artificial Sequence
  Description of Artificial Sequence: Synthetic oligonucleotide
  Antisense strand to SEQ ID NO: 944918
ucugcgaggacuuaggauu

SEQ ID NO: 944920 - RNA, 19 nt, Artificial Sequence
  Description of Artificial Sequence: Synthetic oligonucleotide
  Sense strand starting at position 3646 of SEQ ID NO: 913669
acauacaugugggaggaaa

SEQ ID NO: 944921 - RNA, 19 nt, Artificial Sequence
  Description of Artificial Sequence: Synthetic oligonucleotide
  Antisense strand to SEQ ID NO: 944920
uuuccucccacauguaugu

SEQ ID NO: 944922 - RNA, 19 nt, Artificial Sequence
  Description of Artificial Sequence: Synthetic oligonucleotide
  Sense strand starting at position 1193 of SEQ ID NO: 913669
gaugaugcauugcuuaagu

SEQ ID NO: 944923 - RNA, 19 nt, Artificial Sequence
  Description of Artificial Sequence: Synthetic oligonucleotide
  Antisense strand to SEQ ID NO: 944922
acuuaagcaaugcaucauc

SEQ ID NO: 944924 - RNA, 19 nt, Artificial Sequence
  Description of Artificial Sequence: Synthetic oligonucleotide
  Sense strand starting at position 3041 of SEQ ID NO: 913669
cucaguacucucugugacu

SEQ ID NO: 944925 - RNA, 19 nt, Artificial Sequence
  Description of Artificial Sequence: Synthetic oligonucleotide
  Antisense strand to SEQ ID NO: 944924
agucacagagaguacugag

SEQ ID NO: 944926 - RNA, 19 nt, Artificial Sequence
  Description of Artificial Sequence: Synthetic oligonucleotide
  Sense strand starting at position 1618 of SEQ ID NO: 913669
acgaucuggugcucuuaga

SEQ ID NO: 944927 - RNA, 19 nt, Artificial Sequence
  Description of Artificial Sequence: Synthetic oligonucleotide
  Antisense strand to SEQ ID NO: 944926
ucuaagagcaccagaucgu

SEQ ID NO: 944928 - RNA, 19 nt, Artificial Sequence
  Description of Artificial Sequence: Synthetic oligonucleotide
  Sense strand starting at position 1180 of SEQ ID NO: 913669
ucugccacucugugaugau

SEQ ID NO: 944929 - RNA, 19 nt, Artificial Sequence
  Description of Artificial Sequence: Synthetic oligonucleotide
  Antisense strand to SEQ ID NO: 944928
aucaucacagaguggcaga

SEQ ID NO: 944930 - RNA, 19 nt, Artificial Sequence
  Description of Artificial Sequence: Synthetic oligonucleotide
  Sense strand starting at position 1884 of SEQ ID NO: 913669
ucuccauguggacguuaau

SEQ ID NO: 944931 - RNA, 19 nt, Artificial Sequence
  Description of Artificial Sequence: Synthetic oligonucleotide
  Antisense strand to SEQ ID NO: 944930
auuaacguccacauggaga

SEQ ID NO: 944932 - RNA, 19 nt, Artificial Sequence
  Description of Artificial Sequence: Synthetic oligonucleotide
  Sense strand starting at position 2086 of SEQ ID NO: 913669
ucucaaaugugcgcaaaca

SEQ ID NO: 944933 - RNA, 19 nt, Artificial Sequence
  Description of Artificial Sequence: Synthetic oligonucleotide
  Antisense strand to SEQ ID NO: 944932
uguuugcgcacauuugaga

SEQ ID NO: 944934 - RNA, 19 nt, Artificial Sequence
  Description of Artificial Sequence: Synthetic oligonucleotide
  Sense strand starting at position 1198 of SEQ ID NO: 913669
ugcauugcuuaaguauuau

SEQ ID NO: 944935 - RNA, 19 nt, Artificial Sequence
  Description of Artificial Sequence: Synthetic oligonucleotide
  Antisense strand to SEQ ID NO: 944934
auaauacuuaagcaaugca

SEQ ID NO: 944936 - RNA, 19 nt, Artificial Sequence
  Description of Artificial Sequence: Synthetic oligonucleotide
  Sense strand starting at position 2381 of SEQ ID NO: 913669
aaaugcucggguuggcaua

SEQ ID NO: 944937 - RNA, 19 nt, Artificial Sequence
  Description of Artificial Sequence: Synthetic oligonucleotide
  Antisense strand to SEQ ID NO: 944936
uaugccaacccgagcauuu

SEQ ID NO: 944938 - RNA, 19 nt, Artificial Sequence
  Description of Artificial Sequence: Synthetic oligonucleotide
  Sense strand starting at position 3610 of SEQ ID NO: 913669
ucaagagccucagaagaua

SEQ ID NO: 944939 - RNA, 19 nt, Artificial Sequence
  Description of Artificial Sequence: Synthetic oligonucleotide
  Antisense strand to SEQ ID NO: 944938
uaucuucugaggcucuuga

SEQ ID NO: 944940 - RNA, 19 nt, Artificial Sequence
  Description of Artificial Sequence: Synthetic oligonucleotide
  Sense strand starting at position 2131 of SEQ ID NO: 913670
ucauuuguuugccugaaau

SEQ ID NO: 944941 - RNA, 19 nt, Artificial Sequence
  Description of Artificial Sequence: Synthetic oligonucleotide
  Antisense strand to SEQ ID NO: 944940
auuucaggcaaacaaauga

SEQ ID NO: 944942 - RNA, 19 nt, Artificial Sequence
  Description of Artificial Sequence: Synthetic oligonucleotide
  Sense strand starting at position 1357 of SEQ ID NO: 913670
ccuccuaggcaggauaauu

SEQ ID NO: 944943 - RNA, 19 nt, Artificial Sequence
  Description of Artificial Sequence: Synthetic oligonucleotide
  Antisense strand to SEQ ID NO: 944942
aauuauccugccuaggagg

SEQ ID NO: 944944 - RNA, 19 nt, Artificial Sequence
  Description of Artificial Sequence: Synthetic oligonucleotide
  Sense strand starting at position 2638 of SEQ ID NO: 913670
gcgcuuucgacaucuccca

SEQ ID NO: 944945 - RNA, 19 nt, Artificial Sequence
  Description of Artificial Sequence: Synthetic oligonucleotide
  Antisense strand to SEQ ID NO: 944944
ugggagaugucgaaagcgc

SEQ ID NO: 944946 - RNA, 19 nt, Artificial Sequence
  Description of Artificial Sequence: Synthetic oligonucleotide
  Sense strand starting at position 3575 of SEQ ID NO: 913670
caaacuuugcucgcgaguu

SEQ ID NO: 944947 - RNA, 19 nt, Artificial Sequence
  Description of Artificial Sequence: Synthetic oligonucleotide
  Antisense strand to SEQ ID NO: 944946
aacucgcgagcaaaguuug

SEQ ID NO: 944948 - RNA, 19 nt, Artificial Sequence
  Description of Artificial Sequence: Synthetic oligonucleotide
  Sense strand starting at position 2047 of SEQ ID NO: 913670
gguuuaaugcuugcgucca

SEQ ID NO: 944949 - RNA, 19 nt, Artificial Sequence
  Description of Artificial Sequence: Synthetic oligonucleotide
  Antisense strand to SEQ ID NO: 944948
uggacgcaagcauuaaacc

SEQ ID NO: 944950 - RNA, 19 nt, Artificial Sequence
  Description of Artificial Sequence: Synthetic oligonucleotide
  Sense strand starting at position 2177 of SEQ ID NO: 913670
cgcuaaagagcucagagaa

SEQ ID NO: 944951 - RNA, 19 nt, Artificial Sequence
  Description of Artificial Sequence: Synthetic oligonucleotide
  Antisense strand to SEQ ID NO: 944950
uucucugagcucuuuagcg

SEQ ID NO: 944952 - RNA, 19 nt, Artificial Sequence
  Description of Artificial Sequence: Synthetic oligonucleotide
  Sense strand starting at position 182 of SEQ ID NO: 913670
guaaauuauagucauggua

SEQ ID NO: 944953 - RNA, 19 nt, Artificial Sequence
  Description of Artificial Sequence: Synthetic oligonucleotide
  Antisense strand to SEQ ID NO: 944952
uaccaugacuauaauuuac

SEQ ID NO: 944954 - RNA, 19 nt, Artificial Sequence
  Description of Artificial Sequence: Synthetic oligonucleotide
  Sense strand starting at position 2297 of SEQ ID NO: 913670
guggaagauuuacagggau

SEQ ID NO: 944955 - RNA, 19 nt, Artificial Sequence
  Description of Artificial Sequence: Synthetic oligonucleotide
  Antisense strand to SEQ ID NO: 944954
aucccuguaaaucuuccac

SEQ ID NO: 944956 - RNA, 19 nt, Artificial Sequence
  Description of Artificial Sequence: Synthetic oligonucleotide
  Sense strand starting at position 196 of SEQ ID NO: 913670
ugguaugugauuggaccaa

SEQ ID NO: 944957 - RNA, 19 nt, Artificial Sequence
  Description of Artificial Sequence: Synthetic oligonucleotide
  Antisense strand to SEQ ID NO: 944956
uugguccaaucacauacca

SEQ ID NO: 944958 - RNA, 19 nt, Artificial Sequence
  Description of Artificial Sequence: Synthetic oligonucleotide
  Sense strand starting at position 195 of SEQ ID NO: 913670
augguaugugauuggacca

SEQ ID NO: 944959 - RNA, 19 nt, Artificial Sequence
  Description of Artificial Sequence: Synthetic oligonucleotide
  Antisense strand to SEQ ID NO: 944958
ugguccaaucacauaccau

SEQ ID NO: 944960 - RNA, 19 nt, Artificial Sequence
  Description of Artificial Sequence: Synthetic oligonucleotide
  Sense strand starting at position 1454 of SEQ ID NO: 913670
ccauaauccuuccuggagu

SEQ ID NO: 944961 - RNA, 19 nt, Artificial Sequence
  Description of Artificial Sequence: Synthetic oligonucleotide
  Antisense strand to SEQ ID NO: 944960
acuccaggaaggauuaugg

SEQ ID NO: 944962 - RNA, 19 nt, Artificial Sequence
  Description of Artificial Sequence: Synthetic oligonucleotide
  Sense strand starting at position 1213 of SEQ ID NO: 913670
gcuagcuggcacuagaaau

SEQ ID NO: 944963 - RNA, 19 nt, Artificial Sequence
  Description of Artificial Sequence: Synthetic oligonucleotide
  Antisense strand to SEQ ID NO: 944962
auuucuagugccagcuagc

SEQ ID NO: 944964 - RNA, 19 nt, Artificial Sequence
  Description of Artificial Sequence: Synthetic oligonucleotide
  Sense strand starting at position 181 of SEQ ID NO: 913670
uguaaauuauagucauggu

SEQ ID NO: 944965 - RNA, 19 nt, Artificial Sequence
  Description of Artificial Sequence: Synthetic oligonucleotide
  Antisense strand to SEQ ID NO: 944964
accaugacuauaauuuaca

SEQ ID NO: 944966 - RNA, 19 nt, Artificial Sequence
  Description of Artificial Sequence: Synthetic oligonucleotide
  Sense strand starting at position 185 of SEQ ID NO: 913670
aauuauagucaugguaugu

SEQ ID NO: 944967 - RNA, 19 nt, Artificial Sequence
  Description of Artificial Sequence: Synthetic oligonucleotide
  Antisense strand to SEQ ID NO: 944966
acauaccaugacuauaauu

SEQ ID NO: 944968 - RNA, 19 nt, Artificial Sequence
  Description of Artificial Sequence: Synthetic oligonucleotide
  Sense strand starting at position 943 of SEQ ID NO: 913670
agaagauaauuucggaucu

SEQ ID NO: 944969 - RNA, 19 nt, Artificial Sequence
  Description of Artificial Sequence: Synthetic oligonucleotide
  Antisense strand to SEQ ID NO: 944968
agauccgaaauuaucuucu

SEQ ID NO: 944970 - RNA, 19 nt, Artificial Sequence
  Description of Artificial Sequence: Synthetic oligonucleotide
  Sense strand starting at position 944 of SEQ ID NO: 913670
gaagauaauuucggaucua

SEQ ID NO: 944971 - RNA, 19 nt, Artificial Sequence
  Description of Artificial Sequence: Synthetic oligonucleotide
  Antisense strand to SEQ ID NO: 944970
uagauccgaaauuaucuuc

SEQ ID NO: 944972 - RNA, 19 nt, Artificial Sequence
  Description of Artificial Sequence: Synthetic oligonucleotide
  Sense strand starting at position 189 of SEQ ID NO: 913670
auagucaugguaugugauu

SEQ ID NO: 944973 - RNA, 19 nt, Artificial Sequence
  Description of Artificial Sequence: Synthetic oligonucleotide
  Antisense strand to SEQ ID NO: 944972
aaucacauaccaugacuau

SEQ ID NO: 944974 - RNA, 19 nt, Artificial Sequence
  Description of Artificial Sequence: Synthetic oligonucleotide
  Sense strand starting at position 364 of SEQ ID NO: 913670
ucaguacucucugugacua

SEQ ID NO: 944975 - RNA, 19 nt, Artificial Sequence
  Description of Artificial Sequence: Synthetic oligonucleotide
  Antisense strand to SEQ ID NO: 944974
uagucacagagaguacuga

SEQ ID NO: 944976 - RNA, 19 nt, Artificial Sequence
  Description of Artificial Sequence: Synthetic oligonucleotide
  Sense strand starting at position 1822 of SEQ ID NO: 913670
cugggaucaccugguguuu

SEQ ID NO: 944977 - RNA, 19 nt, Artificial Sequence
  Description of Artificial Sequence: Synthetic oligonucleotide
  Antisense strand to SEQ ID NO: 944976
aaacaccaggugaucccag

SEQ ID NO: 944978 - RNA, 19 nt, Artificial Sequence
  Description of Artificial Sequence: Synthetic oligonucleotide
  Sense strand starting at position 1793 of SEQ ID NO: 913670
gggugaucuguccacugcu

SEQ ID NO: 944979 - RNA, 19 nt, Artificial Sequence
  Description of Artificial Sequence: Synthetic oligonucleotide
  Antisense strand to SEQ ID NO: 944978
agcaguggacagaucaccc

SEQ ID NO: 944980 - RNA, 19 nt, Artificial Sequence
  Description of Artificial Sequence: Synthetic oligonucleotide
  Sense strand starting at position 737 of SEQ ID NO: 913670
ggugaaacggugugauuca

SEQ ID NO: 944981 - RNA, 19 nt, Artificial Sequence
  Description of Artificial Sequence: Synthetic oligonucleotide
  Antisense strand to SEQ ID NO: 944980
ugaaucacaccguuucacc

SEQ ID NO: 944982 - RNA, 19 nt, Artificial Sequence
  Description of Artificial Sequence: Synthetic oligonucleotide
  Sense strand starting at position 3424 of SEQ ID NO: 913670
aagagugguccuugggucu

SEQ ID NO: 944983 - RNA, 19 nt, Artificial Sequence
  Description of Artificial Sequence: Synthetic oligonucleotide
  Antisense strand to SEQ ID NO: 944982
agacccaaggaccacucuu

SEQ ID NO: 944984 - RNA, 19 nt, Artificial Sequence
  Description of Artificial Sequence: Synthetic oligonucleotide
  Sense strand starting at position 1067 of SEQ ID NO: 913670
aauccuaaguccucgcaga

SEQ ID NO: 944985 - RNA, 19 nt, Artificial Sequence
  Description of Artificial Sequence: Synthetic oligonucleotide
  Antisense strand to SEQ ID NO: 944984
ucugcgaggacuuaggauu

SEQ ID NO: 944986 - RNA, 19 nt, Artificial Sequence
  Description of Artificial Sequence: Synthetic oligonucleotide
  Sense strand starting at position 2393 of SEQ ID NO: 913670
aaagcagguuugccuuuaa

SEQ ID NO: 944987 - RNA, 19 nt, Artificial Sequence
  Description of Artificial Sequence: Synthetic oligonucleotide
  Antisense strand to SEQ ID NO: 944986
uuaaaggcaaaccugcuuu

SEQ ID NO: 944988 - RNA, 19 nt, Artificial Sequence
  Description of Artificial Sequence: Synthetic oligonucleotide
  Sense strand starting at position 968 of SEQ ID NO: 913670
acauacaugugggaggaaa

SEQ ID NO: 944989 - RNA, 19 nt, Artificial Sequence
  Description of Artificial Sequence: Synthetic oligonucleotide
  Antisense strand to SEQ ID NO: 944988
uuuccucccacauguaugu

SEQ ID NO: 944990 - RNA, 19 nt, Artificial Sequence
  Description of Artificial Sequence: Synthetic oligonucleotide
  Sense strand starting at position 363 of SEQ ID NO: 913670
cucaguacucucugugacu

SEQ ID NO: 944991 - RNA, 19 nt, Artificial Sequence
  Description of Artificial Sequence: Synthetic oligonucleotide
  Antisense strand to SEQ ID NO: 944990
agucacagagaguacugag

SEQ ID NO: 944992 - RNA, 19 nt, Artificial Sequence
  Description of Artificial Sequence: Synthetic oligonucleotide
  Sense strand starting at position 1899 of SEQ ID NO: 913670
agacccaucucuucgcuua

SEQ ID NO: 944993 - RNA, 19 nt, Artificial Sequence
  Description of Artificial Sequence: Synthetic oligonucleotide
  Antisense strand to SEQ ID NO: 944992
uaagcgaagagaugggucu

SEQ ID NO: 944994 - RNA, 19 nt, Artificial Sequence
  Description of Artificial Sequence: Synthetic oligonucleotide
  Sense strand starting at position 1307 of SEQ ID NO: 913670
gcgacaggucugcacaguu

SEQ ID NO: 944995 - RNA, 19 nt, Artificial Sequence
  Description of Artificial Sequence: Synthetic oligonucleotide
  Antisense strand to SEQ ID NO: 944994
aacugugcagaccugucgc

SEQ ID NO: 944996 - RNA, 19 nt, Artificial Sequence
  Description of Artificial Sequence: Synthetic oligonucleotide
  Sense strand starting at position 398 of SEQ ID NO: 913670
gcacaaacuuuagagaaug

SEQ ID NO: 944997 - RNA, 19 nt, Artificial Sequence
  Description of Artificial Sequence: Synthetic oligonucleotide
  Antisense strand to SEQ ID NO: 944996
cauucucuaaaguuugugc

SEQ ID NO: 944998 - RNA, 19 nt, Artificial Sequence
  Description of Artificial Sequence: Synthetic oligonucleotide
  Sense strand starting at position 932 of SEQ ID NO: 913670
ucaagagccucagaagaua

SEQ ID NO: 944999 - RNA, 19 nt, Artificial Sequence
  Description of Artificial Sequence: Synthetic oligonucleotide
  Antisense strand to SEQ ID NO: 944998
uaucuucugaggcucuuga

SEQ ID NO: 945000 - RNA, 19 nt, Artificial Sequence
  Description of Artificial Sequence: Synthetic oligonucleotide
  Sense strand starting at position 2420 of SEQ ID NO: 913670
uuuauugaauugggagaaa

SEQ ID NO: 945001 - RNA, 19 nt, Artificial Sequence
  Description of Artificial Sequence: Synthetic oligonucleotide
  Antisense strand to SEQ ID NO: 945000
uuucucccaauucaauaaa

SEQ ID NO: 945002 - RNA, 19 nt, Artificial Sequence
  Description of Artificial Sequence: Synthetic oligonucleotide
  Sense strand starting at position 3297 of SEQ ID NO: 913670
gcgucuugcgcggcgauua

SEQ ID NO: 945003 - RNA, 19 nt, Artificial Sequence
  Description of Artificial Sequence: Synthetic oligonucleotide
  Antisense strand to SEQ ID NO: 945002
uaaucgccgcgcaagacgc

SEQ ID NO: 945004 - RNA, 19 nt, Artificial Sequence
  Description of Artificial Sequence: Synthetic oligonucleotide
  Sense strand starting at position 2049 of SEQ ID NO: 913670
uuuaaugcuugcguccaau

SEQ ID NO: 945005 - RNA, 19 nt, Artificial Sequence
  Description of Artificial Sequence: Synthetic oligonucleotide
  Antisense strand to SEQ ID NO: 945004
auuggacgcaagcauuaaa

SEQ ID NO: 945006 - RNA, 19 nt, Artificial Sequence
  Description of Artificial Sequence: Synthetic oligonucleotide
  Sense strand starting at position 125 of SEQ ID NO: 913670
agaugcaaauucugaugaa

SEQ ID NO: 945007 - RNA, 19 nt, Artificial Sequence
  Description of Artificial Sequence: Synthetic oligonucleotide
  Antisense strand to SEQ ID NO: 945006
uucaucagaauuugcaucu

SEQ ID NO: 945008 - RNA, 19 nt, Artificial Sequence
  Description of Artificial Sequence: Synthetic oligonucleotide
  Sense strand starting at position 3305 of SEQ ID NO: 913670
cgcggcgauuaccuugaau

SEQ ID NO: 945009 - RNA, 19 nt, Artificial Sequence
  Description of Artificial Sequence: Synthetic oligonucleotide
  Antisense strand to SEQ ID NO: 945008
auucaagguaaucgccgcg

SEQ ID NO: 945010 - RNA, 19 nt, Artificial Sequence
  Description of Artificial Sequence: Synthetic oligonucleotide
  Sense strand starting at position 641 of SEQ ID NO: 913670
agcuuugacugaggacaaa

SEQ ID NO: 945011 - RNA, 19 nt, Artificial Sequence
  Description of Artificial Sequence: Synthetic oligonucleotide
  Antisense strand to SEQ ID NO: 945010
uuuguccucagucaaagcu

SEQ ID NO: 945012 - RNA, 19 nt, Artificial Sequence
  Description of Artificial Sequence: Synthetic oligonucleotide
  Sense strand starting at position 572 of SEQ ID NO: 913670
caaguuaugucauaggauu

SEQ ID NO: 945013 - RNA, 19 nt, Artificial Sequence
  Description of Artificial Sequence: Synthetic oligonucleotide
  Antisense strand to SEQ ID NO: 945012
aauccuaugacauaacuug

SEQ ID NO: 945014 - RNA, 19 nt, Artificial Sequence
  Description of Artificial Sequence: Synthetic oligonucleotide
  Sense strand starting at position 128 of SEQ ID NO: 913670
ugcaaauucugaugaauaa

SEQ ID NO: 945015 - RNA, 19 nt, Artificial Sequence
  Description of Artificial Sequence: Synthetic oligonucleotide
  Antisense strand to SEQ ID NO: 945014
uuauucaucagaauuugca

SEQ ID NO: 945016 - RNA, 19 nt, Artificial Sequence
  Description of Artificial Sequence: Synthetic oligonucleotide
  Sense strand starting at position 3574 of SEQ ID NO: 913670
ccaaacuuugcucgcgagu

SEQ ID NO: 945017 - RNA, 19 nt, Artificial Sequence
  Description of Artificial Sequence: Synthetic oligonucleotide
  Antisense strand to SEQ ID NO: 945016
acucgcgagcaaaguuugg

SEQ ID NO: 945018 - RNA, 19 nt, Artificial Sequence
  Description of Artificial Sequence: Synthetic oligonucleotide
  Sense strand starting at position 366 of SEQ ID NO: 913670
aguacucucugugacuaag

SEQ ID NO: 945019 - RNA, 19 nt, Artificial Sequence
  Description of Artificial Sequence: Synthetic oligonucleotide
  Antisense strand to SEQ ID NO: 945018
cuuagucacagagaguacu

SEQ ID NO: 945020 - RNA, 19 nt, Artificial Sequence
  Description of Artificial Sequence: Synthetic oligonucleotide
  Sense strand starting at position 3744 of SEQ ID NO: 913671
ccuccuaggcaggauaauu

SEQ ID NO: 945021 - RNA, 19 nt, Artificial Sequence
  Description of Artificial Sequence: Synthetic oligonucleotide
  Antisense strand to SEQ ID NO: 945020
aauuauccugccuaggagg

SEQ ID NO: 945022 - RNA, 19 nt, Artificial Sequence
  Description of Artificial Sequence: Synthetic oligonucleotide
  Sense strand starting at position 423 of SEQ ID NO: 913671
guaagugugcuguucauuc

SEQ ID NO: 945023 - RNA, 19 nt, Artificial Sequence
  Description of Artificial Sequence: Synthetic oligonucleotide
  Antisense strand to SEQ ID NO: 945022
gaaugaacagcacacuuac

SEQ ID NO: 945024 - RNA, 19 nt, Artificial Sequence
  Description of Artificial Sequence: Synthetic oligonucleotide
  Sense strand starting at position 740 of SEQ ID NO: 913671
gccucauguaguccucgua

SEQ ID NO: 945025 - RNA, 19 nt, Artificial Sequence
  Description of Artificial Sequence: Synthetic oligonucleotide
  Antisense strand to SEQ ID NO: 945024
uacgaggacuacaugaggc

SEQ ID NO: 945026 - RNA, 19 nt, Artificial Sequence
  Description of Artificial Sequence: Synthetic oligonucleotide
  Sense strand starting at position 2569 of SEQ ID NO: 913671
guaaauuauagucauggua

SEQ ID NO: 945027 - RNA, 19 nt, Artificial Sequence
  Description of Artificial Sequence: Synthetic oligonucleotide
  Antisense strand to SEQ ID NO: 945026
uaccaugacuauaauuuac

SEQ ID NO: 945028 - RNA, 19 nt, Artificial Sequence
  Description of Artificial Sequence: Synthetic oligonucleotide
  Sense strand starting at position 1090 of SEQ ID NO: 913671
cauuguaagcaguaggaau

SEQ ID NO: 945029 - RNA, 19 nt, Artificial Sequence
  Description of Artificial Sequence: Synthetic oligonucleotide
  Antisense strand to SEQ ID NO: 945028
auuccuacugcuuacaaug

SEQ ID NO: 945030 - RNA, 19 nt, Artificial Sequence
  Description of Artificial Sequence: Synthetic oligonucleotide
  Sense strand starting at position 2360 of SEQ ID NO: 913671
gccacuuacgaagagugaa

SEQ ID NO: 945031 - RNA, 19 nt, Artificial Sequence
  Description of Artificial Sequence: Synthetic oligonucleotide
  Antisense strand to SEQ ID NO: 945030
uucacucuucguaaguggc

SEQ ID NO: 945032 - RNA, 19 nt, Artificial Sequence
  Description of Artificial Sequence: Synthetic oligonucleotide
  Sense strand starting at position 1363 of SEQ ID NO: 913671
aaggguagcugauucuaaa

SEQ ID NO: 945033 - RNA, 19 nt, Artificial Sequence
  Description of Artificial Sequence: Synthetic oligonucleotide
  Antisense strand to SEQ ID NO: 945032
uuuagaaucagcuacccuu

SEQ ID NO: 945034 - RNA, 19 nt, Artificial Sequence
  Description of Artificial Sequence: Synthetic oligonucleotide
  Sense strand starting at position 2583 of SEQ ID NO: 913671
ugguaugugauuggaccaa

SEQ ID NO: 945035 - RNA, 19 nt, Artificial Sequence
  Description of Artificial Sequence: Synthetic oligonucleotide
  Antisense strand to SEQ ID NO: 945034
uugguccaaucacauacca

SEQ ID NO: 945036 - RNA, 19 nt, Artificial Sequence
  Description of Artificial Sequence: Synthetic oligonucleotide
  Sense strand starting at position 2582 of SEQ ID NO: 913671
augguaugugauuggacca

SEQ ID NO: 945037 - RNA, 19 nt, Artificial Sequence
  Description of Artificial Sequence: Synthetic oligonucleotide
  Antisense strand to SEQ ID NO: 945036
ugguccaaucacauaccau

SEQ ID NO: 945038 - RNA, 19 nt, Artificial Sequence
  Description of Artificial Sequence: Synthetic oligonucleotide
  Sense strand starting at position 1725 of SEQ ID NO: 913671
uggcgagucagggaaucuu

SEQ ID NO: 945039 - RNA, 19 nt, Artificial Sequence
  Description of Artificial Sequence: Synthetic oligonucleotide
  Antisense strand to SEQ ID NO: 945038
aagauucccugacucgcca

SEQ ID NO: 945040 - RNA, 19 nt, Artificial Sequence
  Description of Artificial Sequence: Synthetic oligonucleotide
  Sense strand starting at position 1854 of SEQ ID NO: 913671
cucagagucccaggugaua

SEQ ID NO: 945041 - RNA, 19 nt, Artificial Sequence
  Description of Artificial Sequence: Synthetic oligonucleotide
  Antisense strand to SEQ ID NO: 945040
uaucaccugggacucugag

SEQ ID NO: 945042 - RNA, 19 nt, Artificial Sequence
  Description of Artificial Sequence: Synthetic oligonucleotide
  Sense strand starting at position 238 of SEQ ID NO: 913671
acacgauugcuucagguga

SEQ ID NO: 945043 - RNA, 19 nt, Artificial Sequence
  Description of Artificial Sequence: Synthetic oligonucleotide
  Antisense strand to SEQ ID NO: 945042
ucaccugaagcaaucgugu

SEQ ID NO: 945044 - RNA, 19 nt, Artificial Sequence
  Description of Artificial Sequence: Synthetic oligonucleotide
  Sense strand starting at position 3841 of SEQ ID NO: 913671
ccauaauccuuccuggagu

SEQ ID NO: 945045 - RNA, 19 nt, Artificial Sequence
  Description of Artificial Sequence: Synthetic oligonucleotide
  Antisense strand to SEQ ID NO: 945044
acuccaggaaggauuaugg

SEQ ID NO: 945046 - RNA, 19 nt, Artificial Sequence
  Description of Artificial Sequence: Synthetic oligonucleotide
  Sense strand starting at position 2298 of SEQ ID NO: 913671
aguuuacacuugucaggau

SEQ ID NO: 945047 - RNA, 19 nt, Artificial Sequence
  Description of Artificial Sequence: Synthetic oligonucleotide
  Antisense strand to SEQ ID NO: 945046
auccugacaaguguaaacu

SEQ ID NO: 945048 - RNA, 19 nt, Artificial Sequence
  Description of Artificial Sequence: Synthetic oligonucleotide
  Sense strand starting at position 1587 of SEQ ID NO: 913671
uccauaucuccauguggac

SEQ ID NO: 945049 - RNA, 19 nt, Artificial Sequence
  Description of Artificial Sequence: Synthetic oligonucleotide
  Antisense strand to SEQ ID NO: 945048
guccacauggagauaugga

SEQ ID NO: 945050 - RNA, 19 nt, Artificial Sequence
  Description of Artificial Sequence: Synthetic oligonucleotide
  Sense strand starting at position 3600 of SEQ ID NO: 913671
gcuagcuggcacuagaaau

SEQ ID NO: 945051 - RNA, 19 nt, Artificial Sequence
  Description of Artificial Sequence: Synthetic oligonucleotide
  Antisense strand to SEQ ID NO: 945050
auuucuagugccagcuagc

SEQ ID NO: 945052 - RNA, 19 nt, Artificial Sequence
  Description of Artificial Sequence: Synthetic oligonucleotide
  Sense strand starting at position 1887 of SEQ ID NO: 913671
cacagaaaugugugaggcu

SEQ ID NO: 945053 - RNA, 19 nt, Artificial Sequence
  Description of Artificial Sequence: Synthetic oligonucleotide
  Antisense strand to SEQ ID NO: 945052
agccucacacauuucugug

SEQ ID NO: 945054 - RNA, 19 nt, Artificial Sequence
  Description of Artificial Sequence: Synthetic oligonucleotide
  Sense strand starting at position 309 of SEQ ID NO: 913671
gagcccaugucucucagaa

SEQ ID NO: 945055 - RNA, 19 nt, Artificial Sequence
  Description of Artificial Sequence: Synthetic oligonucleotide
  Antisense strand to SEQ ID NO: 945054
uucugagagacaugggcuc

SEQ ID NO: 945056 - RNA, 19 nt, Artificial Sequence
  Description of Artificial Sequence: Synthetic oligonucleotide
  Sense strand starting at position 555 of SEQ ID NO: 913671
ucauuaaguggcgaugagu

SEQ ID NO: 945057 - RNA, 19 nt, Artificial Sequence
  Description of Artificial Sequence: Synthetic oligonucleotide
  Antisense strand to SEQ ID NO: 945056
acucaucgccacuuaauga

SEQ ID NO: 945058 - RNA, 19 nt, Artificial Sequence
  Description of Artificial Sequence: Synthetic oligonucleotide
  Sense strand starting at position 812 of SEQ ID NO: 913671
cccugugauacuuggaggu

SEQ ID NO: 945059 - RNA, 19 nt, Artificial Sequence
  Description of Artificial Sequence: Synthetic oligonucleotide
  Antisense strand to SEQ ID NO: 945058
accuccaaguaucacaggg

SEQ ID NO: 945060 - RNA, 19 nt, Artificial Sequence
  Description of Artificial Sequence: Synthetic oligonucleotide
  Sense strand starting at position 2568 of SEQ ID NO: 913671
uguaaauuauagucauggu

SEQ ID NO: 945061 - RNA, 19 nt, Artificial Sequence
  Description of Artificial Sequence: Synthetic oligonucleotide
  Antisense strand to SEQ ID NO: 945060
accaugacuauaauuuaca

SEQ ID NO: 945062 - RNA, 19 nt, Artificial Sequence
  Description of Artificial Sequence: Synthetic oligonucleotide
  Sense strand starting at position 904 of SEQ ID NO: 913671
ugaugcauugcuuaaguau

SEQ ID NO: 945063 - RNA, 19 nt, Artificial Sequence
  Description of Artificial Sequence: Synthetic oligonucleotide
  Antisense strand to SEQ ID NO: 945062
auacuuaagcaaugcauca

SEQ ID NO: 945064 - RNA, 19 nt, Artificial Sequence
  Description of Artificial Sequence: Synthetic oligonucleotide
  Sense strand starting at position 2572 of SEQ ID NO: 913671
aauuauagucaugguaugu

SEQ ID NO: 945065 - RNA, 19 nt, Artificial Sequence
  Description of Artificial Sequence: Synthetic oligonucleotide
  Antisense strand to SEQ ID NO: 945064
acauaccaugacuauaauu

SEQ ID NO: 945066 - RNA, 19 nt, Artificial Sequence
  Description of Artificial Sequence: Synthetic oligonucleotide
  Sense strand starting at position 3331 of SEQ ID NO: 913671
gaagauaauuucggaucua

SEQ ID NO: 945067 - RNA, 19 nt, Artificial Sequence
  Description of Artificial Sequence: Synthetic oligonucleotide
  Antisense strand to SEQ ID NO: 945066
uagauccgaaauuaucuuc

SEQ ID NO: 945068 - RNA, 19 nt, Artificial Sequence
  Description of Artificial Sequence: Synthetic oligonucleotide
  Sense strand starting at position 3330 of SEQ ID NO: 913671
agaagauaauuucggaucu

SEQ ID NO: 945069 - RNA, 19 nt, Artificial Sequence
  Description of Artificial Sequence: Synthetic oligonucleotide
  Antisense strand to SEQ ID NO: 945068
agauccgaaauuaucuucu

SEQ ID NO: 945070 - RNA, 19 nt, Artificial Sequence
  Description of Artificial Sequence: Synthetic oligonucleotide
  Sense strand starting at position 2576 of SEQ ID NO: 913671
auagucaugguaugugauu

SEQ ID NO: 945071 - RNA, 19 nt, Artificial Sequence
  Description of Artificial Sequence: Synthetic oligonucleotide
  Antisense strand to SEQ ID NO: 945070
aaucacauaccaugacuau

SEQ ID NO: 945072 - RNA, 19 nt, Artificial Sequence
  Description of Artificial Sequence: Synthetic oligonucleotide
  Sense strand starting at position 2329 of SEQ ID NO: 913671
ggagaagugucuuucaguc

SEQ ID NO: 945073 - RNA, 19 nt, Artificial Sequence
  Description of Artificial Sequence: Synthetic oligonucleotide
  Antisense strand to SEQ ID NO: 945072
gacugaaagacacuucucc

SEQ ID NO: 945074 - RNA, 19 nt, Artificial Sequence
  Description of Artificial Sequence: Synthetic oligonucleotide
  Sense strand starting at position 2751 of SEQ ID NO: 913671
ucaguacucucugugacua

SEQ ID NO: 945075 - RNA, 19 nt, Artificial Sequence
  Description of Artificial Sequence: Synthetic oligonucleotide
  Antisense strand to SEQ ID NO: 945074
uagucacagagaguacuga

SEQ ID NO: 945076 - RNA, 19 nt, Artificial Sequence
  Description of Artificial Sequence: Synthetic oligonucleotide
  Sense strand starting at position 3124 of SEQ ID NO: 913671
ggugaaacggugugauuca

SEQ ID NO: 945077 - RNA, 19 nt, Artificial Sequence
  Description of Artificial Sequence: Synthetic oligonucleotide
  Antisense strand to SEQ ID NO: 945076
ugaaucacaccguuucacc

SEQ ID NO: 945078 - RNA, 19 nt, Artificial Sequence
  Description of Artificial Sequence: Synthetic oligonucleotide
  Sense strand starting at position 566 of SEQ ID NO: 913671
cgaugagugcugggaucug

SEQ ID NO: 945079 - RNA, 19 nt, Artificial Sequence
  Description of Artificial Sequence: Synthetic oligonucleotide
  Antisense strand to SEQ ID NO: 945078
cagaucccagcacucaucg

SEQ ID NO: 945080 - RNA, 19 nt, Artificial Sequence
  Description of Artificial Sequence: Synthetic oligonucleotide
  Sense strand starting at position 3454 of SEQ ID NO: 913671
aauccuaaguccucgcaga

SEQ ID NO: 945081 - RNA, 19 nt, Artificial Sequence
  Description of Artificial Sequence: Synthetic oligonucleotide
  Antisense strand to SEQ ID NO: 945080
ucugcgaggacuuaggauu

SEQ ID NO: 945082 - RNA, 19 nt, Artificial Sequence
  Description of Artificial Sequence: Synthetic oligonucleotide
  Sense strand starting at position 3355 of SEQ ID NO: 913671
acauacaugugggaggaaa

SEQ ID NO: 945083 - RNA, 19 nt, Artificial Sequence
  Description of Artificial Sequence: Synthetic oligonucleotide
  Antisense strand to SEQ ID NO: 945082
uuuccucccacauguaugu

SEQ ID NO: 945084 - RNA, 19 nt, Artificial Sequence
  Description of Artificial Sequence: Synthetic oligonucleotide
  Sense strand starting at position 902 of SEQ ID NO: 913671
gaugaugcauugcuuaagu

SEQ ID NO: 945085 - RNA, 19 nt, Artificial Sequence
  Description of Artificial Sequence: Synthetic oligonucleotide
  Antisense strand to SEQ ID NO: 945084
acuuaagcaaugcaucauc

SEQ ID NO: 945086 - RNA, 19 nt, Artificial Sequence
  Description of Artificial Sequence: Synthetic oligonucleotide
  Sense strand starting at position 2750 of SEQ ID NO: 913671
cucaguacucucugugacu

SEQ ID NO: 945087 - RNA, 19 nt, Artificial Sequence
  Description of Artificial Sequence: Synthetic oligonucleotide
  Antisense strand to SEQ ID NO: 945086
agucacagagaguacugag

SEQ ID NO: 945088 - RNA, 19 nt, Artificial Sequence
  Description of Artificial Sequence: Synthetic oligonucleotide
  Sense strand starting at position 1327 of SEQ ID NO: 913671
acgaucuggugcucuuaga

SEQ ID NO: 945089 - RNA, 19 nt, Artificial Sequence
  Description of Artificial Sequence: Synthetic oligonucleotide
  Antisense strand to SEQ ID NO: 945088
ucuaagagcaccagaucgu

SEQ ID NO: 945090 - RNA, 19 nt, Artificial Sequence
  Description of Artificial Sequence: Synthetic oligonucleotide
  Sense strand starting at position 889 of SEQ ID NO: 913671
ucugccacucugugaugau

SEQ ID NO: 945091 - RNA, 19 nt, Artificial Sequence
  Description of Artificial Sequence: Synthetic oligonucleotide
  Antisense strand to SEQ ID NO: 945090
aucaucacagaguggcaga

SEQ ID NO: 945092 - RNA, 19 nt, Artificial Sequence
  Description of Artificial Sequence: Synthetic oligonucleotide
  Sense strand starting at position 1593 of SEQ ID NO: 913671
ucuccauguggacguuaau

SEQ ID NO: 945093 - RNA, 19 nt, Artificial Sequence
  Description of Artificial Sequence: Synthetic oligonucleotide
  Antisense strand to SEQ ID NO: 945092
auuaacguccacauggaga

SEQ ID NO: 945094 - RNA, 19 nt, Artificial Sequence
  Description of Artificial Sequence: Synthetic oligonucleotide
  Sense strand starting at position 1795 of SEQ ID NO: 913671
ucucaaaugugcgcaaaca

SEQ ID NO: 945095 - RNA, 19 nt, Artificial Sequence
  Description of Artificial Sequence: Synthetic oligonucleotide
  Antisense strand to SEQ ID NO: 945094
uguuugcgcacauuugaga

SEQ ID NO: 945096 - RNA, 19 nt, Artificial Sequence
  Description of Artificial Sequence: Synthetic oligonucleotide
  Sense strand starting at position 907 of SEQ ID NO: 913671
ugcauugcuuaaguauuau

SEQ ID NO: 945097 - RNA, 19 nt, Artificial Sequence
  Description of Artificial Sequence: Synthetic oligonucleotide
  Antisense strand to SEQ ID NO: 945096
auaauacuuaagcaaugca

SEQ ID NO: 945098 - RNA, 19 nt, Artificial Sequence
  Description of Artificial Sequence: Synthetic oligonucleotide
  Sense strand starting at position 2090 of SEQ ID NO: 913671
aaaugcucggguuggcaua

SEQ ID NO: 945099 - RNA, 19 nt, Artificial Sequence
  Description of Artificial Sequence: Synthetic oligonucleotide
  Antisense strand to SEQ ID NO: 945098
uaugccaacccgagcauuu

SEQ ID NO: 945100 - RNA, 19 nt, Artificial Sequence
  Description of Artificial Sequence: Synthetic oligonucleotide
  Sense strand starting at position 2699 of SEQ ID NO: 913672
cugacaucugcgccgaagu

SEQ ID NO: 945101 - RNA, 19 nt, Artificial Sequence
  Description of Artificial Sequence: Synthetic oligonucleotide
  Antisense strand to SEQ ID NO: 945100
acuucggcgcagaugucag

SEQ ID NO: 945102 - RNA, 19 nt, Artificial Sequence
  Description of Artificial Sequence: Synthetic oligonucleotide
  Sense strand starting at position 3394 of SEQ ID NO: 913672
ccauuugagucagcgacuu

SEQ ID NO: 945103 - RNA, 19 nt, Artificial Sequence
  Description of Artificial Sequence: Synthetic oligonucleotide
  Antisense strand to SEQ ID NO: 945102
aagucgcugacucaaaugg

SEQ ID NO: 945104 - RNA, 19 nt, Artificial Sequence
  Description of Artificial Sequence: Synthetic oligonucleotide
  Sense strand starting at position 3361 of SEQ ID NO: 913672
gaggaaagaguuuggguuu

SEQ ID NO: 945105 - RNA, 19 nt, Artificial Sequence
  Description of Artificial Sequence: Synthetic oligonucleotide
  Antisense strand to SEQ ID NO: 945104
aaacccaaacucuuuccuc

SEQ ID NO: 945106 - RNA, 19 nt, Artificial Sequence
  Description of Artificial Sequence: Synthetic oligonucleotide
  Sense strand starting at position 1390 of SEQ ID NO: 913672
gagaaauuagguugucuaa

SEQ ID NO: 945107 - RNA, 19 nt, Artificial Sequence
  Description of Artificial Sequence: Synthetic oligonucleotide
  Antisense strand to SEQ ID NO: 945106
uuagacaaccuaauuucuc

SEQ ID NO: 945108 - RNA, 19 nt, Artificial Sequence
  Description of Artificial Sequence: Synthetic oligonucleotide
  Sense strand starting at position 1392 of SEQ ID NO: 913672
gaaauuagguugucuaagg

SEQ ID NO: 945109 - RNA, 19 nt, Artificial Sequence
  Description of Artificial Sequence: Synthetic oligonucleotide
  Antisense strand to SEQ ID NO: 945108
ccuuagacaaccuaauuuc

SEQ ID NO: 945110 - RNA, 19 nt, Artificial Sequence
  Description of Artificial Sequence: Synthetic oligonucleotide
  Sense strand starting at position 1388 of SEQ ID NO: 913672
gggagaaauuagguugucu

SEQ ID NO: 945111 - RNA, 19 nt, Artificial Sequence
  Description of Artificial Sequence: Synthetic oligonucleotide
  Antisense strand to SEQ ID NO: 945110
agacaaccuaauuucuccc

SEQ ID NO: 945112 - RNA, 19 nt, Artificial Sequence
  Description of Artificial Sequence: Synthetic oligonucleotide
  Sense strand starting at position 2568 of SEQ ID NO: 913672
caaugaaguccguagaucu

SEQ ID NO: 945113 - RNA, 19 nt, Artificial Sequence
  Description of Artificial Sequence: Synthetic oligonucleotide
  Antisense strand to SEQ ID NO: 945112
agaucuacggacuucauug

SEQ ID NO: 945114 - RNA, 19 nt, Artificial Sequence
  Description of Artificial Sequence: Synthetic oligonucleotide
  Sense strand starting at position 1187 of SEQ ID NO: 913672
gaaguugagucacucccaa

SEQ ID NO: 945115 - RNA, 19 nt, Artificial Sequence
  Description of Artificial Sequence: Synthetic oligonucleotide
  Antisense strand to SEQ ID NO: 945114
uugggagugacucaacuuc

SEQ ID NO: 945116 - RNA, 19 nt, Artificial Sequence
  Description of Artificial Sequence: Synthetic oligonucleotide
  Sense strand starting at position 747 of SEQ ID NO: 913672
ugccuuuaccugcagaaga

SEQ ID NO: 945117 - RNA, 19 nt, Artificial Sequence
  Description of Artificial Sequence: Synthetic oligonucleotide
  Antisense strand to SEQ ID NO: 945116
ucuucugcagguaaaggca

SEQ ID NO: 945118 - RNA, 19 nt, Artificial Sequence
  Description of Artificial Sequence: Synthetic oligonucleotide
  Sense strand starting at position 2559 of SEQ ID NO: 913672
aagagaucgcaaugaaguc

SEQ ID NO: 945119 - RNA, 19 nt, Artificial Sequence
  Description of Artificial Sequence: Synthetic oligonucleotide
  Antisense strand to SEQ ID NO: 945118
gacuucauugcgaucucuu

SEQ ID NO: 945120 - RNA, 19 nt, Artificial Sequence
  Description of Artificial Sequence: Synthetic oligonucleotide
  Sense strand starting at position 2820 of SEQ ID NO: 913672
agguuucuccgcgcuguga

SEQ ID NO: 945121 - RNA, 19 nt, Artificial Sequence
  Description of Artificial Sequence: Synthetic oligonucleotide
  Antisense strand to SEQ ID NO: 945120
ucacagcgcggagaaaccu

SEQ ID NO: 945122 - RNA, 19 nt, Artificial Sequence
  Description of Artificial Sequence: Synthetic oligonucleotide
  Sense strand starting at position 3143 of SEQ ID NO: 913672
gugcucaaggcucagagau

SEQ ID NO: 945123 - RNA, 19 nt, Artificial Sequence
  Description of Artificial Sequence: Synthetic oligonucleotide
  Antisense strand to SEQ ID NO: 945122
aucucugagccuugagcac

SEQ ID NO: 945124 - RNA, 19 nt, Artificial Sequence
  Description of Artificial Sequence: Synthetic oligonucleotide
  Sense strand starting at position 3510 of SEQ ID NO: 913672
gagagucccucuguuggga

SEQ ID NO: 945125 - RNA, 19 nt, Artificial Sequence
  Description of Artificial Sequence: Synthetic oligonucleotide
  Antisense strand to SEQ ID NO: 945124
ucccaacagagggacucuc

SEQ ID NO: 945126 - RNA, 19 nt, Artificial Sequence
  Description of Artificial Sequence: Synthetic oligonucleotide
  Sense strand starting at position 1393 of SEQ ID NO: 913672
aaauuagguugucuaaggu

SEQ ID NO: 945127 - RNA, 19 nt, Artificial Sequence
  Description of Artificial Sequence: Synthetic oligonucleotide
  Antisense strand to SEQ ID NO: 945126
accuuagacaaccuaauuu

SEQ ID NO: 945128 - RNA, 19 nt, Artificial Sequence
  Description of Artificial Sequence: Synthetic oligonucleotide
  Sense strand starting at position 3351 of SEQ ID NO: 913672
cgguucgaucgaggaaaga

SEQ ID NO: 945129 - RNA, 19 nt, Artificial Sequence
  Description of Artificial Sequence: Synthetic oligonucleotide
  Antisense strand to SEQ ID NO: 945128
ucuuuccucgaucgaaccg

SEQ ID NO: 945130 - RNA, 19 nt, Artificial Sequence
  Description of Artificial Sequence: Synthetic oligonucleotide
  Sense strand starting at position 3349 of SEQ ID NO: 913672
agcgguucgaucgaggaaa

SEQ ID NO: 945131 - RNA, 19 nt, Artificial Sequence
  Description of Artificial Sequence: Synthetic oligonucleotide
  Antisense strand to SEQ ID NO: 945130
uuuccucgaucgaaccgcu

SEQ ID NO: 945132 - RNA, 19 nt, Artificial Sequence
  Description of Artificial Sequence: Synthetic oligonucleotide
  Sense strand starting at position 3437 of SEQ ID NO: 913672
cccagaucguaguuccaaa

SEQ ID NO: 945133 - RNA, 19 nt, Artificial Sequence
  Description of Artificial Sequence: Synthetic oligonucleotide
  Antisense strand to SEQ ID NO: 945132
uuuggaacuacgaucuggg

SEQ ID NO: 945134 - RNA, 19 nt, Artificial Sequence
  Description of Artificial Sequence: Synthetic oligonucleotide
  Sense strand starting at position 3506 of SEQ ID NO: 913672
aagugagagucccucuguu

SEQ ID NO: 945135 - RNA, 19 nt, Artificial Sequence
  Description of Artificial Sequence: Synthetic oligonucleotide
  Antisense strand to SEQ ID NO: 945134
aacagagggacucucacuu

SEQ ID NO: 945136 - RNA, 19 nt, Artificial Sequence
  Description of Artificial Sequence: Synthetic oligonucleotide
  Sense strand starting at position 2578 of SEQ ID NO: 913672
cguagaucuccaggcugga

SEQ ID NO: 945137 - RNA, 19 nt, Artificial Sequence
  Description of Artificial Sequence: Synthetic oligonucleotide
  Antisense strand to SEQ ID NO: 945136
uccagccuggagaucuacg

SEQ ID NO: 945138 - RNA, 19 nt, Artificial Sequence
  Description of Artificial Sequence: Synthetic oligonucleotide
  Sense strand starting at position 2187 of SEQ ID NO: 913672
gagcgaaauccuuguccuc

SEQ ID NO: 945139 - RNA, 19 nt, Artificial Sequence
  Description of Artificial Sequence: Synthetic oligonucleotide
  Antisense strand to SEQ ID NO: 945138
gaggacaaggauuucgcuc

SEQ ID NO: 945140 - RNA, 19 nt, Artificial Sequence
  Description of Artificial Sequence: Synthetic oligonucleotide
  Sense strand starting at position 3533 of SEQ ID NO: 913672
ggccucucgccuuagaagu

SEQ ID NO: 945141 - RNA, 19 nt, Artificial Sequence
  Description of Artificial Sequence: Synthetic oligonucleotide
  Antisense strand to SEQ ID NO: 945140
acuucuaaggcgagaggcc

SEQ ID NO: 945142 - RNA, 19 nt, Artificial Sequence
  Description of Artificial Sequence: Synthetic oligonucleotide
  Sense strand starting at position 1230 of SEQ ID NO: 913672
cgcuucuuccuccgaagga

SEQ ID NO: 945143 - RNA, 19 nt, Artificial Sequence
  Description of Artificial Sequence: Synthetic oligonucleotide
  Antisense strand to SEQ ID NO: 945142
uccuucggaggaagaagcg

SEQ ID NO: 945144 - RNA, 19 nt, Artificial Sequence
  Description of Artificial Sequence: Synthetic oligonucleotide
  Sense strand starting at position 2697 of SEQ ID NO: 913672
gacugacaucugcgccgaa

SEQ ID NO: 945145 - RNA, 19 nt, Artificial Sequence
  Description of Artificial Sequence: Synthetic oligonucleotide
  Antisense strand to SEQ ID NO: 945144
uucggcgcagaugucaguc

SEQ ID NO: 945146 - RNA, 19 nt, Artificial Sequence
  Description of Artificial Sequence: Synthetic oligonucleotide
  Sense strand starting at position 2566 of SEQ ID NO: 913672
cgcaaugaaguccguagau

SEQ ID NO: 945147 - RNA, 19 nt, Artificial Sequence
  Description of Artificial Sequence: Synthetic oligonucleotide
  Antisense strand to SEQ ID NO: 945146
aucuacggacuucauugcg

SEQ ID NO: 945148 - RNA, 19 nt, Artificial Sequence
  Description of Artificial Sequence: Synthetic oligonucleotide
  Sense strand starting at position 1009 of SEQ ID NO: 913672
aggccugcgagaugcuaau

SEQ ID NO: 945149 - RNA, 19 nt, Artificial Sequence
  Description of Artificial Sequence: Synthetic oligonucleotide
  Antisense strand to SEQ ID NO: 945148
auuagcaucucgcaggccu

SEQ ID NO: 945150 - RNA, 19 nt, Artificial Sequence
  Description of Artificial Sequence: Synthetic oligonucleotide
  Sense strand starting at position 3350 of SEQ ID NO: 913672
gcgguucgaucgaggaaag

SEQ ID NO: 945151 - RNA, 19 nt, Artificial Sequence
  Description of Artificial Sequence: Synthetic oligonucleotide
  Antisense strand to SEQ ID NO: 945150
cuuuccucgaucgaaccgc

SEQ ID NO: 945152 - RNA, 19 nt, Artificial Sequence
  Description of Artificial Sequence: Synthetic oligonucleotide
  Sense strand starting at position 3145 of SEQ ID NO: 913672
gcucaaggcucagagauga

SEQ ID NO: 945153 - RNA, 19 nt, Artificial Sequence
  Description of Artificial Sequence: Synthetic oligonucleotide
  Antisense strand to SEQ ID NO: 945152
ucaucucugagccuugagc

SEQ ID NO: 945154 - RNA, 19 nt, Artificial Sequence
  Description of Artificial Sequence: Synthetic oligonucleotide
  Sense strand starting at position 3967 of SEQ ID NO: 913672
gugacuaccucuugaagaa

SEQ ID NO: 945155 - RNA, 19 nt, Artificial Sequence
  Description of Artificial Sequence: Synthetic oligonucleotide
  Antisense strand to SEQ ID NO: 945154
uucuucaagagguagucac

SEQ ID NO: 945156 - RNA, 19 nt, Artificial Sequence
  Description of Artificial Sequence: Synthetic oligonucleotide
  Sense strand starting at position 779 of SEQ ID NO: 913672
uucagaagguucgagcuuu

SEQ ID NO: 945157 - RNA, 19 nt, Artificial Sequence
  Description of Artificial Sequence: Synthetic oligonucleotide
  Antisense strand to SEQ ID NO: 945156
aaagcucgaaccuucugaa

SEQ ID NO: 945158 - RNA, 19 nt, Artificial Sequence
  Description of Artificial Sequence: Synthetic oligonucleotide
  Sense strand starting at position 3829 of SEQ ID NO: 913672
ugcugagucucaggugaac

SEQ ID NO: 945159 - RNA, 19 nt, Artificial Sequence
  Description of Artificial Sequence: Synthetic oligonucleotide
  Antisense strand to SEQ ID NO: 945158
guucaccugagacucagca

SEQ ID NO: 945160 - RNA, 19 nt, Artificial Sequence
  Description of Artificial Sequence: Synthetic oligonucleotide
  Sense strand starting at position 3820 of SEQ ID NO: 913672
gccucuucuugcugagucu

SEQ ID NO: 945161 - RNA, 19 nt, Artificial Sequence
  Description of Artificial Sequence: Synthetic oligonucleotide
  Antisense strand to SEQ ID NO: 945160
agacucagcaagaagaggc

SEQ ID NO: 945162 - RNA, 19 nt, Artificial Sequence
  Description of Artificial Sequence: Synthetic oligonucleotide
  Sense strand starting at position 2922 of SEQ ID NO: 913673
ugcccuaaacaguagauaa

SEQ ID NO: 945163 - RNA, 19 nt, Artificial Sequence
  Description of Artificial Sequence: Synthetic oligonucleotide
  Antisense strand to SEQ ID NO: 945162
uuaucuacuguuuagggca

SEQ ID NO: 945164 - RNA, 19 nt, Artificial Sequence
  Description of Artificial Sequence: Synthetic oligonucleotide
  Sense strand starting at position 2932 of SEQ ID NO: 913673
aguagauaacgauauccuu

SEQ ID NO: 945165 - RNA, 19 nt, Artificial Sequence
  Description of Artificial Sequence: Synthetic oligonucleotide
  Antisense strand to SEQ ID NO: 945164
aaggauaucguuaucuacu

SEQ ID NO: 945166 - RNA, 19 nt, Artificial Sequence
  Description of Artificial Sequence: Synthetic oligonucleotide
  Sense strand starting at position 1375 of SEQ ID NO: 913673
accucauacgaauggagau

SEQ ID NO: 945167 - RNA, 19 nt, Artificial Sequence
  Description of Artificial Sequence: Synthetic oligonucleotide
  Antisense strand to SEQ ID NO: 945166
aucuccauucguaugaggu

SEQ ID NO: 945168 - RNA, 19 nt, Artificial Sequence
  Description of Artificial Sequence: Synthetic oligonucleotide
  Sense strand starting at position 1438 of SEQ ID NO: 913673
agugaaacccaguaaaugu

SEQ ID NO: 945169 - RNA, 19 nt, Artificial Sequence
  Description of Artificial Sequence: Synthetic oligonucleotide
  Antisense strand to SEQ ID NO: 945168
acauuuacuggguuucacu

SEQ ID NO: 945170 - RNA, 19 nt, Artificial Sequence
  Description of Artificial Sequence: Synthetic oligonucleotide
  Sense strand starting at position 701 of SEQ ID NO: 913673
aggaacaguccagguuaaa

SEQ ID NO: 945171 - RNA, 19 nt, Artificial Sequence
  Description of Artificial Sequence: Synthetic oligonucleotide
  Antisense strand to SEQ ID NO: 945170
uuuaaccuggacuguuccu

SEQ ID NO: 945172 - RNA, 19 nt, Artificial Sequence
  Description of Artificial Sequence: Synthetic oligonucleotide
  Sense strand starting at position 3884 of SEQ ID NO: 913673
acagacaauguguggaaua

SEQ ID NO: 945173 - RNA, 19 nt, Artificial Sequence
  Description of Artificial Sequence: Synthetic oligonucleotide
  Antisense strand to SEQ ID NO: 945172
uauuccacacauugucugu

SEQ ID NO: 945174 - RNA, 19 nt, Artificial Sequence
  Description of Artificial Sequence: Synthetic oligonucleotide
  Sense strand starting at position 3883 of SEQ ID NO: 913673
gacagacaauguguggaau

SEQ ID NO: 945175 - RNA, 19 nt, Artificial Sequence
  Description of Artificial Sequence: Synthetic oligonucleotide
  Antisense strand to SEQ ID NO: 945174
auuccacacauugucuguc

SEQ ID NO: 945176 - RNA, 19 nt, Artificial Sequence
  Description of Artificial Sequence: Synthetic oligonucleotide
  Sense strand starting at position 3145 of SEQ ID NO: 913673
gacguuauaguauauggaa

SEQ ID NO: 945177 - RNA, 19 nt, Artificial Sequence
  Description of Artificial Sequence: Synthetic oligonucleotide
  Antisense strand to SEQ ID NO: 945176
uuccauauacuauaacguc

SEQ ID NO: 945178 - RNA, 19 nt, Artificial Sequence
  Description of Artificial Sequence: Synthetic oligonucleotide
  Sense strand starting at position 3830 of SEQ ID NO: 913673
caggguuacagguauguaa

SEQ ID NO: 945179 - RNA, 19 nt, Artificial Sequence
  Description of Artificial Sequence: Synthetic oligonucleotide
  Antisense strand to SEQ ID NO: 945178
uuacauaccuguaacccug

SEQ ID NO: 945180 - RNA, 19 nt, Artificial Sequence
  Description of Artificial Sequence: Synthetic oligonucleotide
  Sense strand starting at position 616 of SEQ ID NO: 913673
ccagcuuugcacugaauuu

SEQ ID NO: 945181 - RNA, 19 nt, Artificial Sequence
  Description of Artificial Sequence: Synthetic oligonucleotide
  Antisense strand to SEQ ID NO: 945180
aaauucagugcaaagcugg

SEQ ID NO: 945182 - RNA, 19 nt, Artificial Sequence
  Description of Artificial Sequence: Synthetic oligonucleotide
  Sense strand starting at position 3821 of SEQ ID NO: 913673
ccuagacaucaggguuaca

SEQ ID NO: 945183 - RNA, 19 nt, Artificial Sequence
  Description of Artificial Sequence: Synthetic oligonucleotide
  Antisense strand to SEQ ID NO: 945182
uguaacccugaugucuagg

SEQ ID NO: 945184 - RNA, 19 nt, Artificial Sequence
  Description of Artificial Sequence: Synthetic oligonucleotide
  Sense strand starting at position 1376 of SEQ ID NO: 913673
ccucauacgaauggagauu

SEQ ID NO: 945185 - RNA, 19 nt, Artificial Sequence
  Description of Artificial Sequence: Synthetic oligonucleotide
  Antisense strand to SEQ ID NO: 945184
aaucuccauucguaugagg

SEQ ID NO: 945186 - RNA, 19 nt, Artificial Sequence
  Description of Artificial Sequence: Synthetic oligonucleotide
  Sense strand starting at position 2490 of SEQ ID NO: 913673
ggcagaagagcucaucgaa

SEQ ID NO: 945187 - RNA, 19 nt, Artificial Sequence
  Description of Artificial Sequence: Synthetic oligonucleotide
  Antisense strand to SEQ ID NO: 945186
uucgaugagcucuucugcc

SEQ ID NO: 945188 - RNA, 19 nt, Artificial Sequence
  Description of Artificial Sequence: Synthetic oligonucleotide
  Sense strand starting at position 810 of SEQ ID NO: 913673
uaggguaaacgacauguuu

SEQ ID NO: 945189 - RNA, 19 nt, Artificial Sequence
  Description of Artificial Sequence: Synthetic oligonucleotide
  Antisense strand to SEQ ID NO: 945188
aaacaugucguuuacccua

SEQ ID NO: 945190 - RNA, 19 nt, Artificial Sequence
  Description of Artificial Sequence: Synthetic oligonucleotide
  Sense strand starting at position 798 of SEQ ID NO: 913673
uugcauuggaucuagggua

SEQ ID NO: 945191 - RNA, 19 nt, Artificial Sequence
  Description of Artificial Sequence: Synthetic oligonucleotide
  Antisense strand to SEQ ID NO: 945190
uacccuagauccaaugcaa

SEQ ID NO: 945192 - RNA, 19 nt, Artificial Sequence
  Description of Artificial Sequence: Synthetic oligonucleotide
  Sense strand starting at position 3431 of SEQ ID NO: 913673
ucgagaacuggguaguacu

SEQ ID NO: 945193 - RNA, 19 nt, Artificial Sequence
  Description of Artificial Sequence: Synthetic oligonucleotide
  Antisense strand to SEQ ID NO: 945192
aguacuacccaguucucga

SEQ ID NO: 945194 - RNA, 19 nt, Artificial Sequence
  Description of Artificial Sequence: Synthetic oligonucleotide
  Sense strand starting at position 3926 of SEQ ID NO: 913673
auaccaagugucuaguaca

SEQ ID NO: 945195 - RNA, 19 nt, Artificial Sequence
  Description of Artificial Sequence: Synthetic oligonucleotide
  Antisense strand to SEQ ID NO: 945194
uguacuagacacuugguau

SEQ ID NO: 945196 - RNA, 19 nt, Artificial Sequence
  Description of Artificial Sequence: Synthetic oligonucleotide
  Sense strand starting at position 3864 of SEQ ID NO: 913673
cuugaagguugacuaguaa

SEQ ID NO: 945197 - RNA, 19 nt, Artificial Sequence
  Description of Artificial Sequence: Synthetic oligonucleotide
  Antisense strand to SEQ ID NO: 945196
uuacuagucaaccuucaag

SEQ ID NO: 945198 - RNA, 19 nt, Artificial Sequence
  Description of Artificial Sequence: Synthetic oligonucleotide
  Sense strand starting at position 3855 of SEQ ID NO: 913673
cuccuuauccuugaagguu

SEQ ID NO: 945199 - RNA, 19 nt, Artificial Sequence
  Description of Artificial Sequence: Synthetic oligonucleotide
  Antisense strand to SEQ ID NO: 945198
aaccuucaaggauaaggag

SEQ ID NO: 945200 - RNA, 19 nt, Artificial Sequence
  Description of Artificial Sequence: Synthetic oligonucleotide
  Sense strand starting at position 2339 of SEQ ID NO: 913673
cucggaggauccucucaga

SEQ ID NO: 945201 - RNA, 19 nt, Artificial Sequence
  Description of Artificial Sequence: Synthetic oligonucleotide
  Antisense strand to SEQ ID NO: 945200
ucugagaggauccuccgag

SEQ ID NO: 945202 - RNA, 19 nt, Artificial Sequence
  Description of Artificial Sequence: Synthetic oligonucleotide
  Sense strand starting at position 2035 of SEQ ID NO: 913673
acguguuacaucuaaaugg

SEQ ID NO: 945203 - RNA, 19 nt, Artificial Sequence
  Description of Artificial Sequence: Synthetic oligonucleotide
  Antisense strand to SEQ ID NO: 945202
ccauuuagauguaacacgu

SEQ ID NO: 945204 - RNA, 19 nt, Artificial Sequence
  Description of Artificial Sequence: Synthetic oligonucleotide
  Sense strand starting at position 1566 of SEQ ID NO: 913673
uuaacucacugguugaacu

SEQ ID NO: 945205 - RNA, 19 nt, Artificial Sequence
  Description of Artificial Sequence: Synthetic oligonucleotide
  Antisense strand to SEQ ID NO: 945204
aguucaaccagugaguuaa

SEQ ID NO: 945206 - RNA, 19 nt, Artificial Sequence
  Description of Artificial Sequence: Synthetic oligonucleotide
  Sense strand starting at position 1563 of SEQ ID NO: 913673
aucuuaacucacugguuga

SEQ ID NO: 945207 - RNA, 19 nt, Artificial Sequence
  Description of Artificial Sequence: Synthetic oligonucleotide
  Antisense strand to SEQ ID NO: 945206
ucaaccagugaguuaagau

SEQ ID NO: 945208 - RNA, 19 nt, Artificial Sequence
  Description of Artificial Sequence: Synthetic oligonucleotide
  Sense strand starting at position 3536 of SEQ ID NO: 913673
auggauugugugggaagua

SEQ ID NO: 945209 - RNA, 19 nt, Artificial Sequence
  Description of Artificial Sequence: Synthetic oligonucleotide
  Antisense strand to SEQ ID NO: 945208
uacuucccacacaauccau

SEQ ID NO: 945210 - RNA, 19 nt, Artificial Sequence
  Description of Artificial Sequence: Synthetic oligonucleotide
  Sense strand starting at position 1016 of SEQ ID NO: 913673
ggaagaugcuaguuaaggu

SEQ ID NO: 945211 - RNA, 19 nt, Artificial Sequence
  Description of Artificial Sequence: Synthetic oligonucleotide
  Antisense strand to SEQ ID NO: 945210
accuuaacuagcaucuucc

SEQ ID NO: 945212 - RNA, 19 nt, Artificial Sequence
  Description of Artificial Sequence: Synthetic oligonucleotide
  Sense strand starting at position 2502 of SEQ ID NO: 913673
caucgaauuugugaggaaa

SEQ ID NO: 945213 - RNA, 19 nt, Artificial Sequence
  Description of Artificial Sequence: Synthetic oligonucleotide
  Antisense strand to SEQ ID NO: 945212
uuuccucacaaauucgaug

SEQ ID NO: 945214 - RNA, 19 nt, Artificial Sequence
  Description of Artificial Sequence: Synthetic oligonucleotide
  Sense strand starting at position 1398 of SEQ ID NO: 913673
agaguugccucaucuaaag

SEQ ID NO: 945215 - RNA, 19 nt, Artificial Sequence
  Description of Artificial Sequence: Synthetic oligonucleotide
  Antisense strand to SEQ ID NO: 945214
cuuuagaugaggcaacucu

SEQ ID NO: 945216 - RNA, 19 nt, Artificial Sequence
  Description of Artificial Sequence: Synthetic oligonucleotide
  Sense strand starting at position 3832 of SEQ ID NO: 913673
ggguuacagguauguaaca

SEQ ID NO: 945217 - RNA, 19 nt, Artificial Sequence
  Description of Artificial Sequence: Synthetic oligonucleotide
  Antisense strand to SEQ ID NO: 945216
uguuacauaccuguaaccc

SEQ ID NO: 945218 - RNA, 19 nt, Artificial Sequence
  Description of Artificial Sequence: Synthetic oligonucleotide
  Sense strand starting at position 657 of SEQ ID NO: 913673
gauggacuauuugauguca

SEQ ID NO: 945219 - RNA, 19 nt, Artificial Sequence
  Description of Artificial Sequence: Synthetic oligonucleotide
  Antisense strand to SEQ ID NO: 945218
ugacaucaaauaguccauc

SEQ ID NO: 945220 - RNA, 19 nt, Artificial Sequence
  Description of Artificial Sequence: Synthetic oligonucleotide
  Sense strand starting at position 3854 of SEQ ID NO: 913673
acuccuuauccuugaaggu

SEQ ID NO: 945221 - RNA, 19 nt, Artificial Sequence
  Description of Artificial Sequence: Synthetic oligonucleotide
  Antisense strand to SEQ ID NO: 945220
accuucaaggauaaggagu

SEQ ID NO: 945222 - RNA, 19 nt, Artificial Sequence
  Description of Artificial Sequence: Synthetic oligonucleotide
  Sense strand starting at position 933 of SEQ ID NO: 913673
accuuuaaagucuguaauu

SEQ ID NO: 945223 - RNA, 19 nt, Artificial Sequence
  Description of Artificial Sequence: Synthetic oligonucleotide
  Antisense strand to SEQ ID NO: 945222
aauuacagacuuuaaaggu

SEQ ID NO: 945224 - RNA, 19 nt, Artificial Sequence
  Description of Artificial Sequence: Synthetic oligonucleotide
  Sense strand starting at position 1085 of SEQ ID NO: 913673
cuguuauugccuuacacac

SEQ ID NO: 945225 - RNA, 19 nt, Artificial Sequence
  Description of Artificial Sequence: Synthetic oligonucleotide
  Antisense strand to SEQ ID NO: 945224
guguguaaggcaauaacag

SEQ ID NO: 945226 - RNA, 19 nt, Artificial Sequence
  Description of Artificial Sequence: Synthetic oligonucleotide
  Sense strand starting at position 2892 of SEQ ID NO: 913673
gcacuuaaugcacagucau

SEQ ID NO: 945227 - RNA, 19 nt, Artificial Sequence
  Description of Artificial Sequence: Synthetic oligonucleotide
  Antisense strand to SEQ ID NO: 945226
augacugugcauuaagugc

SEQ ID NO: 945228 - RNA, 19 nt, Artificial Sequence
  Description of Artificial Sequence: Synthetic oligonucleotide
  Sense strand starting at position 662 of SEQ ID NO: 913673
acuauuugaugucauacau

SEQ ID NO: 945229 - RNA, 19 nt, Artificial Sequence
  Description of Artificial Sequence: Synthetic oligonucleotide
  Antisense strand to SEQ ID NO: 945228
auguaugacaucaaauagu

SEQ ID NO: 945230 - RNA, 19 nt, Artificial Sequence
  Description of Artificial Sequence: Synthetic oligonucleotide
  Sense strand starting at position 1023 of SEQ ID NO: 913673
gcuaguuaagguuggagau

SEQ ID NO: 945231 - RNA, 19 nt, Artificial Sequence
  Description of Artificial Sequence: Synthetic oligonucleotide
  Antisense strand to SEQ ID NO: 945230
aucuccaaccuuaacuagc

SEQ ID NO: 945232 - RNA, 19 nt, Artificial Sequence
  Description of Artificial Sequence: Synthetic oligonucleotide
  Sense strand starting at position 2551 of SEQ ID NO: 913673
ugaggauucucugccgaca

SEQ ID NO: 945233 - RNA, 19 nt, Artificial Sequence
  Description of Artificial Sequence: Synthetic oligonucleotide
  Antisense strand to SEQ ID NO: 945232
ugucggcagagaauccuca

SEQ ID NO: 945234 - RNA, 19 nt, Artificial Sequence
  Description of Artificial Sequence: Synthetic oligonucleotide
  Sense strand starting at position 3147 of SEQ ID NO: 913673
cguuauaguauauggaauu

SEQ ID NO: 945235 - RNA, 19 nt, Artificial Sequence
  Description of Artificial Sequence: Synthetic oligonucleotide
  Antisense strand to SEQ ID NO: 945234
aauuccauauacuauaacg

SEQ ID NO: 945236 - RNA, 19 nt, Artificial Sequence
  Description of Artificial Sequence: Synthetic oligonucleotide
  Sense strand starting at position 1251 of SEQ ID NO: 913673
ggaucagccuacuagauuu

SEQ ID NO: 945237 - RNA, 19 nt, Artificial Sequence
  Description of Artificial Sequence: Synthetic oligonucleotide
  Antisense strand to SEQ ID NO: 945236
aaaucuaguaggcugaucc

SEQ ID NO: 945238 - RNA, 19 nt, Artificial Sequence
  Description of Artificial Sequence: Synthetic oligonucleotide
  Sense strand starting at position 934 of SEQ ID NO: 913673
ccuuuaaagucuguaauuc

SEQ ID NO: 945239 - RNA, 19 nt, Artificial Sequence
  Description of Artificial Sequence: Synthetic oligonucleotide
  Antisense strand to SEQ ID NO: 945238
gaauuacagacuuuaaagg

SEQ ID NO: 945240 - RNA, 19 nt, Artificial Sequence
  Description of Artificial Sequence: Synthetic oligonucleotide
  Sense strand starting at position 2940 of SEQ ID NO: 913673
acgauauccuuaucaguuc

SEQ ID NO: 945241 - RNA, 19 nt, Artificial Sequence
  Description of Artificial Sequence: Synthetic oligonucleotide
  Antisense strand to SEQ ID NO: 945240
gaacugauaaggauaucgu

SEQ ID NO: 945242 - RNA, 19 nt, Artificial Sequence
  Description of Artificial Sequence: Synthetic oligonucleotide
  Sense strand starting at position 3887 of SEQ ID NO: 913674
uugucaaguguggaggaaa

SEQ ID NO: 945243 - RNA, 19 nt, Artificial Sequence
  Description of Artificial Sequence: Synthetic oligonucleotide
  Antisense strand to SEQ ID NO: 945242
uuuccuccacacuugacaa

SEQ ID NO: 945244 - RNA, 19 nt, Artificial Sequence
  Description of Artificial Sequence: Synthetic oligonucleotide
  Sense strand starting at position 2238 of SEQ ID NO: 913674
gcgugaacccuguugguuu

SEQ ID NO: 945245 - RNA, 19 nt, Artificial Sequence
  Description of Artificial Sequence: Synthetic oligonucleotide
  Antisense strand to SEQ ID NO: 945244
aaaccaacaggguucacgc

SEQ ID NO: 945246 - RNA, 19 nt, Artificial Sequence
  Description of Artificial Sequence: Synthetic oligonucleotide
  Sense strand starting at position 3788 of SEQ ID NO: 913674
ggcaguuccaacgauaaua

SEQ ID NO: 945247 - RNA, 19 nt, Artificial Sequence
  Description of Artificial Sequence: Synthetic oligonucleotide
  Antisense strand to SEQ ID NO: 945246
uauuaucguuggaacugcc

SEQ ID NO: 945248 - RNA, 19 nt, Artificial Sequence
  Description of Artificial Sequence: Synthetic oligonucleotide
  Sense strand starting at position 3255 of SEQ ID NO: 913674
gggcuauguccagaaaguu

SEQ ID NO: 945249 - RNA, 19 nt, Artificial Sequence
  Description of Artificial Sequence: Synthetic oligonucleotide
  Antisense strand to SEQ ID NO: 945248
aacuuucuggacauagccc

SEQ ID NO: 945250 - RNA, 19 nt, Artificial Sequence
  Description of Artificial Sequence: Synthetic oligonucleotide
  Sense strand starting at position 3234 of SEQ ID NO: 913674
auagguuguuagucuuaag

SEQ ID NO: 945251 - RNA, 19 nt, Artificial Sequence
  Description of Artificial Sequence: Synthetic oligonucleotide
  Antisense strand to SEQ ID NO: 945250
cuuaagacuaacaaccuau

SEQ ID NO: 945252 - RNA, 19 nt, Artificial Sequence
  Description of Artificial Sequence: Synthetic oligonucleotide
  Sense strand starting at position 2010 of SEQ ID NO: 913674
cggguugauuuguaaacaa

SEQ ID NO: 945253 - RNA, 19 nt, Artificial Sequence
  Description of Artificial Sequence: Synthetic oligonucleotide
  Antisense strand to SEQ ID NO: 945252
uuguuuacaaaucaacccg

SEQ ID NO: 945254 - RNA, 19 nt, Artificial Sequence
  Description of Artificial Sequence: Synthetic oligonucleotide
  Sense strand starting at position 2412 of SEQ ID NO: 913674
agggauuuguacggagauu

SEQ ID NO: 945255 - RNA, 19 nt, Artificial Sequence
  Description of Artificial Sequence: Synthetic oligonucleotide
  Antisense strand to SEQ ID NO: 945254
aaucuccguacaaaucccu

SEQ ID NO: 945256 - RNA, 19 nt, Artificial Sequence
  Description of Artificial Sequence: Synthetic oligonucleotide
  Sense strand starting at position 2469 of SEQ ID NO: 913674
gaccuugucguucgaugga

SEQ ID NO: 945257 - RNA, 19 nt, Artificial Sequence
  Description of Artificial Sequence: Synthetic oligonucleotide
  Antisense strand to SEQ ID NO: 945256
uccaucgaacgacaagguc

SEQ ID NO: 945258 - RNA, 19 nt, Artificial Sequence
  Description of Artificial Sequence: Synthetic oligonucleotide
  Sense strand starting at position 3340 of SEQ ID NO: 913674
aauaccuguuuggaugaaa

SEQ ID NO: 945259 - RNA, 19 nt, Artificial Sequence
  Description of Artificial Sequence: Synthetic oligonucleotide
  Antisense strand to SEQ ID NO: 945258
uuucauccaaacagguauu

SEQ ID NO: 945260 - RNA, 19 nt, Artificial Sequence
  Description of Artificial Sequence: Synthetic oligonucleotide
  Sense strand starting at position 3705 of SEQ ID NO: 913674
uucugagcaugauauagaa

SEQ ID NO: 945261 - RNA, 19 nt, Artificial Sequence
  Description of Artificial Sequence: Synthetic oligonucleotide
  Antisense strand to SEQ ID NO: 945260
uucuauaucaugcucagaa

SEQ ID NO: 945262 - RNA, 19 nt, Artificial Sequence
  Description of Artificial Sequence: Synthetic oligonucleotide
  Sense strand starting at position 2435 of SEQ ID NO: 913674
aaaugaagcugacgggaau

SEQ ID NO: 945263 - RNA, 19 nt, Artificial Sequence
  Description of Artificial Sequence: Synthetic oligonucleotide
  Antisense strand to SEQ ID NO: 945262
auucccgucagcuucauuu

SEQ ID NO: 945264 - RNA, 19 nt, Artificial Sequence
  Description of Artificial Sequence: Synthetic oligonucleotide
  Sense strand starting at position 3237 of SEQ ID NO: 913674
gguuguuagucuuaagagg

SEQ ID NO: 945265 - RNA, 19 nt, Artificial Sequence
  Description of Artificial Sequence: Synthetic oligonucleotide
  Antisense strand to SEQ ID NO: 945264
ccucuuaagacuaacaacc

SEQ ID NO: 945266 - RNA, 19 nt, Artificial Sequence
  Description of Artificial Sequence: Synthetic oligonucleotide
  Sense strand starting at position 2587 of SEQ ID NO: 913674
agaggagguugcuagucuu

SEQ ID NO: 945267 - RNA, 19 nt, Artificial Sequence
  Description of Artificial Sequence: Synthetic oligonucleotide
  Antisense strand to SEQ ID NO: 945266
aagacuagcaaccuccucu

SEQ ID NO: 945268 - RNA, 19 nt, Artificial Sequence
  Description of Artificial Sequence: Synthetic oligonucleotide
  Sense strand starting at position 3231 of SEQ ID NO: 913674
gcuauagguuguuagucuu

SEQ ID NO: 945269 - RNA, 19 nt, Artificial Sequence
  Description of Artificial Sequence: Synthetic oligonucleotide
  Antisense strand to SEQ ID NO: 945268
aagacuaacaaccuauagc

SEQ ID NO: 945270 - RNA, 19 nt, Artificial Sequence
  Description of Artificial Sequence: Synthetic oligonucleotide
  Sense strand starting at position 3433 of SEQ ID NO: 913675
guguuauugcaugcacuuu

SEQ ID NO: 945271 - RNA, 19 nt, Artificial Sequence
  Description of Artificial Sequence: Synthetic oligonucleotide
  Antisense strand to SEQ ID NO: 945270
aaagugcaugcaauaacac

SEQ ID NO: 945272 - RNA, 19 nt, Artificial Sequence
  Description of Artificial Sequence: Synthetic oligonucleotide
  Sense strand starting at position 3669 of SEQ ID NO: 913675
ccaagaguuagguaaaugu

SEQ ID NO: 945273 - RNA, 19 nt, Artificial Sequence
  Description of Artificial Sequence: Synthetic oligonucleotide
  Antisense strand to SEQ ID NO: 945272
acauuuaccuaacucuugg

SEQ ID NO: 945274 - RNA, 19 nt, Artificial Sequence
  Description of Artificial Sequence: Synthetic oligonucleotide
  Sense strand starting at position 3588 of SEQ ID NO: 913675
gcauauucccaggagugga

SEQ ID NO: 945275 - RNA, 19 nt, Artificial Sequence
  Description of Artificial Sequence: Synthetic oligonucleotide
  Antisense strand to SEQ ID NO: 945274
uccacuccugggaauaugc

SEQ ID NO: 945276 - RNA, 19 nt, Artificial Sequence
  Description of Artificial Sequence: Synthetic oligonucleotide
  Sense strand starting at position 3798 of SEQ ID NO: 913675
guuugcauaucuuugauuu

SEQ ID NO: 945277 - RNA, 19 nt, Artificial Sequence
  Description of Artificial Sequence: Synthetic oligonucleotide
  Antisense strand to SEQ ID NO: 945276
aaaucaaagauaugcaaac

SEQ ID NO: 945278 - RNA, 19 nt, Artificial Sequence
  Description of Artificial Sequence: Synthetic oligonucleotide
  Sense strand starting at position 3767 of SEQ ID NO: 913675
gcggauuauauagggaaau

SEQ ID NO: 945279 - RNA, 19 nt, Artificial Sequence
  Description of Artificial Sequence: Synthetic oligonucleotide
  Antisense strand to SEQ ID NO: 945278
auuucccuauauaauccgc

SEQ ID NO: 945280 - RNA, 19 nt, Artificial Sequence
  Description of Artificial Sequence: Synthetic oligonucleotide
  Sense strand starting at position 3680 of SEQ ID NO: 913675
guaaauguacucuaccauc

SEQ ID NO: 945281 - RNA, 19 nt, Artificial Sequence
  Description of Artificial Sequence: Synthetic oligonucleotide
  Antisense strand to SEQ ID NO: 945280
gaugguagaguacauuuac

SEQ ID NO: 945282 - RNA, 19 nt, Artificial Sequence
  Description of Artificial Sequence: Synthetic oligonucleotide
  Sense strand starting at position 253 of SEQ ID NO: 913675
uuaugacuguuucugagaa

SEQ ID NO: 945283 - RNA, 19 nt, Artificial Sequence
  Description of Artificial Sequence: Synthetic oligonucleotide
  Antisense strand to SEQ ID NO: 945282
uucucagaaacagucauaa

SEQ ID NO: 945284 - RNA, 19 nt, Artificial Sequence
  Description of Artificial Sequence: Synthetic oligonucleotide
  Sense strand starting at position 749 of SEQ ID NO: 913675
aaauguaugcgugucguua

SEQ ID NO: 945285 - RNA, 19 nt, Artificial Sequence
  Description of Artificial Sequence: Synthetic oligonucleotide
  Antisense strand to SEQ ID NO: 945284
uaacgacacgcauacauuu

SEQ ID NO: 945286 - RNA, 19 nt, Artificial Sequence
  Description of Artificial Sequence: Synthetic oligonucleotide
  Sense strand starting at position 3572 of SEQ ID NO: 913675
ugauucuuuccuuagggca

SEQ ID NO: 945287 - RNA, 19 nt, Artificial Sequence
  Description of Artificial Sequence: Synthetic oligonucleotide
  Antisense strand to SEQ ID NO: 945286
ugcccuaaggaaagaauca

SEQ ID NO: 945288 - RNA, 19 nt, Artificial Sequence
  Description of Artificial Sequence: Synthetic oligonucleotide
  Sense strand starting at position 3657 of SEQ ID NO: 913675
ggaagugucuuuccaagag

SEQ ID NO: 945289 - RNA, 19 nt, Artificial Sequence
  Description of Artificial Sequence: Synthetic oligonucleotide
  Antisense strand to SEQ ID NO: 945288
cucuuggaaagacacuucc

SEQ ID NO: 945290 - RNA, 19 nt, Artificial Sequence
  Description of Artificial Sequence: Synthetic oligonucleotide
  Sense strand starting at position 2493 of SEQ ID NO: 913675
gcacguuacuuauuuacuu

SEQ ID NO: 945291 - RNA, 19 nt, Artificial Sequence
  Description of Artificial Sequence: Synthetic oligonucleotide
  Antisense strand to SEQ ID NO: 945290
aaguaaauaaguaacgugc

SEQ ID NO: 945292 - RNA, 19 nt, Artificial Sequence
  Description of Artificial Sequence: Synthetic oligonucleotide
  Sense strand starting at position 3678 of SEQ ID NO: 913675
agguaaauguacucuacca

SEQ ID NO: 945293 - RNA, 19 nt, Artificial Sequence
  Description of Artificial Sequence: Synthetic oligonucleotide
  Antisense strand to SEQ ID NO: 945292
ugguagaguacauuuaccu

SEQ ID NO: 945294 - RNA, 19 nt, Artificial Sequence
  Description of Artificial Sequence: Synthetic oligonucleotide
  Sense strand starting at position 750 of SEQ ID NO: 913675
aauguaugcgugucguuag

SEQ ID NO: 945295 - RNA, 19 nt, Artificial Sequence
  Description of Artificial Sequence: Synthetic oligonucleotide
  Antisense strand to SEQ ID NO: 945294
cuaacgacacgcauacauu

SEQ ID NO: 945296 - RNA, 19 nt, Artificial Sequence
  Description of Artificial Sequence: Synthetic oligonucleotide
  Sense strand starting at position 3697 of SEQ ID NO: 913675
ucauuaaugcuugagcaua

SEQ ID NO: 945297 - RNA, 19 nt, Artificial Sequence
  Description of Artificial Sequence: Synthetic oligonucleotide
  Antisense strand to SEQ ID NO: 945296
uaugcucaagcauuaauga

SEQ ID NO: 945298 - RNA, 19 nt, Artificial Sequence
  Description of Artificial Sequence: Synthetic oligonucleotide
  Sense strand starting at position 850 of SEQ ID NO: 913675
ggcuaagugagguacaagu

SEQ ID NO: 945299 - RNA, 19 nt, Artificial Sequence
  Description of Artificial Sequence: Synthetic oligonucleotide
  Antisense strand to SEQ ID NO: 945298
acuuguaccucacuuagcc

SEQ ID NO: 945300 - RNA, 19 nt, Artificial Sequence
  Description of Artificial Sequence: Synthetic oligonucleotide
  Sense strand starting at position 238 of SEQ ID NO: 913675
gacucaagagaucguuuau

SEQ ID NO: 945301 - RNA, 19 nt, Artificial Sequence
  Description of Artificial Sequence: Synthetic oligonucleotide
  Antisense strand to SEQ ID NO: 945300
auaaacgaucucuugaguc

SEQ ID NO: 945302 - RNA, 19 nt, Artificial Sequence
  Description of Artificial Sequence: Synthetic oligonucleotide
  Sense strand starting at position 2584 of SEQ ID NO: 913675
cgaacucuggcuuaaguaa

SEQ ID NO: 945303 - RNA, 19 nt, Artificial Sequence
  Description of Artificial Sequence: Synthetic oligonucleotide
  Antisense strand to SEQ ID NO: 945302
uuacuuaagccagaguucg

SEQ ID NO: 945304 - RNA, 19 nt, Artificial Sequence
  Description of Artificial Sequence: Synthetic oligonucleotide
  Sense strand starting at position 3655 of SEQ ID NO: 913675
caggaagugucuuuccaag

SEQ ID NO: 945305 - RNA, 19 nt, Artificial Sequence
  Description of Artificial Sequence: Synthetic oligonucleotide
  Antisense strand to SEQ ID NO: 945304
cuuggaaagacacuuccug

SEQ ID NO: 945306 - RNA, 19 nt, Artificial Sequence
  Description of Artificial Sequence: Synthetic oligonucleotide
  Sense strand starting at position 1016 of SEQ ID NO: 913675
aacuucucugguugagauc

SEQ ID NO: 945307 - RNA, 19 nt, Artificial Sequence
  Description of Artificial Sequence: Synthetic oligonucleotide
  Antisense strand to SEQ ID NO: 945306
gaucucaaccagagaaguu

SEQ ID NO: 945308 - RNA, 19 nt, Artificial Sequence
  Description of Artificial Sequence: Synthetic oligonucleotide
  Sense strand starting at position 1095 of SEQ ID NO: 913675
agcucagaguuaguaggaa

SEQ ID NO: 945309 - RNA, 19 nt, Artificial Sequence
  Description of Artificial Sequence: Synthetic oligonucleotide
  Antisense strand to SEQ ID NO: 945308
uuccuacuaacucugagcu

SEQ ID NO: 945310 - RNA, 19 nt, Artificial Sequence
  Description of Artificial Sequence: Synthetic oligonucleotide
  Sense strand starting at position 3661 of SEQ ID NO: 913675
gugucuuuccaagaguuag

SEQ ID NO: 945311 - RNA, 19 nt, Artificial Sequence
  Description of Artificial Sequence: Synthetic oligonucleotide
  Antisense strand to SEQ ID NO: 945310
cuaacucuuggaaagacac

SEQ ID NO: 945312 - RNA, 19 nt, Artificial Sequence
  Description of Artificial Sequence: Synthetic oligonucleotide
  Sense strand starting at position 919 of SEQ ID NO: 913675
uuggauggcccgggaaauu

SEQ ID NO: 945313 - RNA, 19 nt, Artificial Sequence
  Description of Artificial Sequence: Synthetic oligonucleotide
  Antisense strand to SEQ ID NO: 945312
aauuucccgggccauccaa

SEQ ID NO: 945314 - RNA, 19 nt, Artificial Sequence
  Description of Artificial Sequence: Synthetic oligonucleotide
  Sense strand starting at position 918 of SEQ ID NO: 913675
cuuggauggcccgggaaau

SEQ ID NO: 945315 - RNA, 19 nt, Artificial Sequence
  Description of Artificial Sequence: Synthetic oligonucleotide
  Antisense strand to SEQ ID NO: 945314
auuucccgggccauccaag

SEQ ID NO: 945316 - RNA, 19 nt, Artificial Sequence
  Description of Artificial Sequence: Synthetic oligonucleotide
  Sense strand starting at position 3699 of SEQ ID NO: 913675
auuaaugcuugagcauaca

SEQ ID NO: 945317 - RNA, 19 nt, Artificial Sequence
  Description of Artificial Sequence: Synthetic oligonucleotide
  Antisense strand to SEQ ID NO: 945316
uguaugcucaagcauuaau

SEQ ID NO: 945318 - RNA, 19 nt, Artificial Sequence
  Description of Artificial Sequence: Synthetic oligonucleotide
  Sense strand starting at position 3525 of SEQ ID NO: 913675
uuaaguguguaacuaacau

SEQ ID NO: 945319 - RNA, 19 nt, Artificial Sequence
  Description of Artificial Sequence: Synthetic oligonucleotide
  Antisense strand to SEQ ID NO: 945318
auguuaguuacacacuuaa

SEQ ID NO: 945320 - RNA, 19 nt, Artificial Sequence
  Description of Artificial Sequence: Synthetic oligonucleotide
  Sense strand starting at position 251 of SEQ ID NO: 913675
guuuaugacuguuucugag

SEQ ID NO: 945321 - RNA, 19 nt, Artificial Sequence
  Description of Artificial Sequence: Synthetic oligonucleotide
  Antisense strand to SEQ ID NO: 945320
cucagaaacagucauaaac

SEQ ID NO: 945322 - RNA, 19 nt, Artificial Sequence
  Description of Artificial Sequence: Synthetic oligonucleotide
  Sense strand starting at position 2899 of SEQ ID NO: 913675
gacauaucaugagaauagg

SEQ ID NO: 945323 - RNA, 19 nt, Artificial Sequence
  Description of Artificial Sequence: Synthetic oligonucleotide
  Antisense strand to SEQ ID NO: 945322
ccuauucucaugauauguc

SEQ ID NO: 945324 - RNA, 19 nt, Artificial Sequence
  Description of Artificial Sequence: Synthetic oligonucleotide
  Sense strand starting at position 3857 of SEQ ID NO: 913675
uguacuuccuuucuuauga

SEQ ID NO: 945325 - RNA, 19 nt, Artificial Sequence
  Description of Artificial Sequence: Synthetic oligonucleotide
  Antisense strand to SEQ ID NO: 945324
ucauaagaaaggaaguaca

SEQ ID NO: 945326 - RNA, 19 nt, Artificial Sequence
  Description of Artificial Sequence: Synthetic oligonucleotide
  Sense strand starting at position 412 of SEQ ID NO: 913675
agggcucuucuuggagcaa

SEQ ID NO: 945327 - RNA, 19 nt, Artificial Sequence
  Description of Artificial Sequence: Synthetic oligonucleotide
  Antisense strand to SEQ ID NO: 945326
uugcuccaagaagagcccu

SEQ ID NO: 945328 - RNA, 19 nt, Artificial Sequence
  Description of Artificial Sequence: Synthetic oligonucleotide
  Sense strand starting at position 3696 of SEQ ID NO: 913675
aucauuaaugcuugagcau

SEQ ID NO: 945329 - RNA, 19 nt, Artificial Sequence
  Description of Artificial Sequence: Synthetic oligonucleotide
  Antisense strand to SEQ ID NO: 945328
augcucaagcauuaaugau

SEQ ID NO: 945330 - RNA, 19 nt, Artificial Sequence
  Description of Artificial Sequence: Synthetic oligonucleotide
  Sense strand starting at position 1012 of SEQ ID NO: 913675
ugguaacuucucugguuga

SEQ ID NO: 945331 - RNA, 19 nt, Artificial Sequence
  Description of Artificial Sequence: Synthetic oligonucleotide
  Antisense strand to SEQ ID NO: 945330
ucaaccagagaaguuacca

SEQ ID NO: 945332 - RNA, 19 nt, Artificial Sequence
  Description of Artificial Sequence: Synthetic oligonucleotide
  Sense strand starting at position 3377 of SEQ ID NO: 913675
acaugcauacaguguuaca

SEQ ID NO: 945333 - RNA, 19 nt, Artificial Sequence
  Description of Artificial Sequence: Synthetic oligonucleotide
  Antisense strand to SEQ ID NO: 945332
uguaacacuguaugcaugu

SEQ ID NO: 945334 - RNA, 19 nt, Artificial Sequence
  Description of Artificial Sequence: Synthetic oligonucleotide
  Sense strand starting at position 2490 of SEQ ID NO: 913675
gcggcacguuacuuauuua

SEQ ID NO: 945335 - RNA, 19 nt, Artificial Sequence
  Description of Artificial Sequence: Synthetic oligonucleotide
  Antisense strand to SEQ ID NO: 945334
uaaauaaguaacgugccgc

SEQ ID NO: 945336 - RNA, 19 nt, Artificial Sequence
  Description of Artificial Sequence: Synthetic oligonucleotide
  Sense strand starting at position 3480 of SEQ ID NO: 913675
ccaucaagugccuauguuu

SEQ ID NO: 945337 - RNA, 19 nt, Artificial Sequence
  Description of Artificial Sequence: Synthetic oligonucleotide
  Antisense strand to SEQ ID NO: 945336
aaacauaggcacuugaugg

SEQ ID NO: 945338 - RNA, 19 nt, Artificial Sequence
  Description of Artificial Sequence: Synthetic oligonucleotide
  Sense strand starting at position 3522 of SEQ ID NO: 913675
ucguuaaguguguaacuaa

SEQ ID NO: 945339 - RNA, 19 nt, Artificial Sequence
  Description of Artificial Sequence: Synthetic oligonucleotide
  Antisense strand to SEQ ID NO: 945338
uuaguuacacacuuaacga

SEQ ID NO: 945340 - RNA, 19 nt, Artificial Sequence
  Description of Artificial Sequence: Synthetic oligonucleotide
  Sense strand starting at position 3351 of SEQ ID NO: 913675
guucuaugaaaguguagua

SEQ ID NO: 945341 - RNA, 19 nt, Artificial Sequence
  Description of Artificial Sequence: Synthetic oligonucleotide
  Antisense strand to SEQ ID NO: 945340
uacuacacuuucauagaac

SEQ ID NO: 945342 - RNA, 19 nt, Artificial Sequence
  Description of Artificial Sequence: Synthetic oligonucleotide
  Sense strand starting at position 385 of SEQ ID NO: 913675
gacuccaagcggugguaaa

SEQ ID NO: 945343 - RNA, 19 nt, Artificial Sequence
  Description of Artificial Sequence: Synthetic oligonucleotide
  Antisense strand to SEQ ID NO: 945342
uuuaccaccgcuuggaguc

SEQ ID NO: 945344 - RNA, 19 nt, Artificial Sequence
  Description of Artificial Sequence: Synthetic oligonucleotide
  Sense strand starting at position 13 of SEQ ID NO: 913675
gcuucuucucugggagagu

SEQ ID NO: 945345 - RNA, 19 nt, Artificial Sequence
  Description of Artificial Sequence: Synthetic oligonucleotide
  Antisense strand to SEQ ID NO: 945344
acucucccagagaagaagc

SEQ ID NO: 945346 - RNA, 19 nt, Artificial Sequence
  Description of Artificial Sequence: Synthetic oligonucleotide
  Sense strand starting at position 11 of SEQ ID NO: 913675
cggcuucuucucugggaga

SEQ ID NO: 945347 - RNA, 19 nt, Artificial Sequence
  Description of Artificial Sequence: Synthetic oligonucleotide
  Antisense strand to SEQ ID NO: 945346
ucucccagagaagaagccg

SEQ ID NO: 945348 - RNA, 19 nt, Artificial Sequence
  Description of Artificial Sequence: Synthetic oligonucleotide
  Sense strand starting at position 2039 of SEQ ID NO: 913675
cggguugauuuguaaacaa

SEQ ID NO: 945349 - RNA, 19 nt, Artificial Sequence
  Description of Artificial Sequence: Synthetic oligonucleotide
  Antisense strand to SEQ ID NO: 945348
uuguuuacaaaucaacccg

SEQ ID NO: 945350 - RNA, 19 nt, Artificial Sequence
  Description of Artificial Sequence: Synthetic oligonucleotide
  Sense strand starting at position 2820 of SEQ ID NO: 913676
cgucaaagcccacauuguu

SEQ ID NO: 945351 - RNA, 19 nt, Artificial Sequence
  Description of Artificial Sequence: Synthetic oligonucleotide
  Antisense strand to SEQ ID NO: 945350
aacaaugugggcuuugacg

SEQ ID NO: 945352 - RNA, 19 nt, Artificial Sequence
  Description of Artificial Sequence: Synthetic oligonucleotide
  Sense strand starting at position 3805 of SEQ ID NO: 913677
cugguagaaucauuaauga

SEQ ID NO: 945353 - RNA, 19 nt, Artificial Sequence
  Description of Artificial Sequence: Synthetic oligonucleotide
  Antisense strand to SEQ ID NO: 945352
ucauuaaugauucuaccag

SEQ ID NO: 945354 - RNA, 19 nt, Artificial Sequence
  Description of Artificial Sequence: Synthetic oligonucleotide
  Sense strand starting at position 1011 of SEQ ID NO: 913677
ccugcaagugcuuugucau

SEQ ID NO: 945355 - RNA, 19 nt, Artificial Sequence
  Description of Artificial Sequence: Synthetic oligonucleotide
  Antisense strand to SEQ ID NO: 945354
augacaaagcacuugcagg

SEQ ID NO: 945356 - RNA, 19 nt, Artificial Sequence
  Description of Artificial Sequence: Synthetic oligonucleotide
  Sense strand starting at position 2329 of SEQ ID NO: 913677
aagggcuuuccagagucaa

SEQ ID NO: 945357 - RNA, 19 nt, Artificial Sequence
  Description of Artificial Sequence: Synthetic oligonucleotide
  Antisense strand to SEQ ID NO: 945356
uugacucuggaaagcccuu

SEQ ID NO: 945358 - RNA, 19 nt, Artificial Sequence
  Description of Artificial Sequence: Synthetic oligonucleotide
  Sense strand starting at position 807 of SEQ ID NO: 913677
cacaguugcccugagaaga

SEQ ID NO: 945359 - RNA, 19 nt, Artificial Sequence
  Description of Artificial Sequence: Synthetic oligonucleotide
  Antisense strand to SEQ ID NO: 945358
ucuucucagggcaacugug

SEQ ID NO: 945360 - RNA, 19 nt, Artificial Sequence
  Description of Artificial Sequence: Synthetic oligonucleotide
  Sense strand starting at position 2002 of SEQ ID NO: 913677
uguucugugagcguucuga

SEQ ID NO: 945361 - RNA, 19 nt, Artificial Sequence
  Description of Artificial Sequence: Synthetic oligonucleotide
  Antisense strand to SEQ ID NO: 945360
ucagaacgcucacagaaca

SEQ ID NO: 945362 - RNA, 19 nt, Artificial Sequence
  Description of Artificial Sequence: Synthetic oligonucleotide
  Sense strand starting at position 2988 of SEQ ID NO: 913677
aguauuugcucaucacagu

SEQ ID NO: 945363 - RNA, 19 nt, Artificial Sequence
  Description of Artificial Sequence: Synthetic oligonucleotide
  Antisense strand to SEQ ID NO: 945362
acugugaugagcaaauacu

SEQ ID NO: 945364 - RNA, 19 nt, Artificial Sequence
  Description of Artificial Sequence: Synthetic oligonucleotide
  Sense strand starting at position 3972 of SEQ ID NO: 913677
cugauucuacauggacuau

SEQ ID NO: 945365 - RNA, 19 nt, Artificial Sequence
  Description of Artificial Sequence: Synthetic oligonucleotide
  Antisense strand to SEQ ID NO: 945364
auaguccauguagaaucag

SEQ ID NO: 945366 - RNA, 19 nt, Artificial Sequence
  Description of Artificial Sequence: Synthetic oligonucleotide
  Sense strand starting at position 2514 of SEQ ID NO: 913677
uuaacuagacagugugaaa

SEQ ID NO: 945367 - RNA, 19 nt, Artificial Sequence
  Description of Artificial Sequence: Synthetic oligonucleotide
  Antisense strand to SEQ ID NO: 945366
uuucacacugucuaguuaa

SEQ ID NO: 945368 - RNA, 19 nt, Artificial Sequence
  Description of Artificial Sequence: Synthetic oligonucleotide
  Sense strand starting at position 2428 of SEQ ID NO: 913677
augguuauuccugauacuu

SEQ ID NO: 945369 - RNA, 19 nt, Artificial Sequence
  Description of Artificial Sequence: Synthetic oligonucleotide
  Antisense strand to SEQ ID NO: 945368
aaguaucaggaauaaccau

SEQ ID NO: 945370 - RNA, 19 nt, Artificial Sequence
  Description of Artificial Sequence: Synthetic oligonucleotide
  Sense strand starting at position 339 of SEQ ID NO: 913677
guguaaaugcuggaaacau

SEQ ID NO: 945371 - RNA, 19 nt, Artificial Sequence
  Description of Artificial Sequence: Synthetic oligonucleotide
  Antisense strand to SEQ ID NO: 945370
auguuuccagcauuuacac

SEQ ID NO: 945372 - RNA, 19 nt, Artificial Sequence
  Description of Artificial Sequence: Synthetic oligonucleotide
  Sense strand starting at position 3614 of SEQ ID NO: 913677
gguggauugcaauacuauu

SEQ ID NO: 945373 - RNA, 19 nt, Artificial Sequence
  Description of Artificial Sequence: Synthetic oligonucleotide
  Antisense strand to SEQ ID NO: 945372
aauaguauugcaauccacc

SEQ ID NO: 945374 - RNA, 19 nt, Artificial Sequence
  Description of Artificial Sequence: Synthetic oligonucleotide
  Sense strand starting at position 396 of SEQ ID NO: 913677
gccaguauuaccguggugu

SEQ ID NO: 945375 - RNA, 19 nt, Artificial Sequence
  Description of Artificial Sequence: Synthetic oligonucleotide
  Antisense strand to SEQ ID NO: 945374
acaccacgguaauacuggc

SEQ ID NO: 945376 - RNA, 19 nt, Artificial Sequence
  Description of Artificial Sequence: Synthetic oligonucleotide
  Sense strand starting at position 2521 of SEQ ID NO: 913677
gacagugugaaauguagaa

SEQ ID NO: 945377 - RNA, 19 nt, Artificial Sequence
  Description of Artificial Sequence: Synthetic oligonucleotide
  Antisense strand to SEQ ID NO: 945376
uucuacauuucacacuguc

SEQ ID NO: 945378 - RNA, 19 nt, Artificial Sequence
  Description of Artificial Sequence: Synthetic oligonucleotide
  Sense strand starting at position 3233 of SEQ ID NO: 913677
guuccuagauacuugggau

SEQ ID NO: 945379 - RNA, 19 nt, Artificial Sequence
  Description of Artificial Sequence: Synthetic oligonucleotide
  Antisense strand to SEQ ID NO: 945378
aucccaaguaucuaggaac

SEQ ID NO: 945380 - RNA, 19 nt, Artificial Sequence
  Description of Artificial Sequence: Synthetic oligonucleotide
  Sense strand starting at position 970 of SEQ ID NO: 913677
agcaacaaguuucugaaau

SEQ ID NO: 945381 - RNA, 19 nt, Artificial Sequence
  Description of Artificial Sequence: Synthetic oligonucleotide
  Antisense strand to SEQ ID NO: 945380
auuucagaaacuuguugcu

SEQ ID NO: 945382 - RNA, 19 nt, Artificial Sequence
  Description of Artificial Sequence: Synthetic oligonucleotide
  Sense strand starting at position 78 of SEQ ID NO: 913677
agcagaggcccaugagaua

SEQ ID NO: 945383 - RNA, 19 nt, Artificial Sequence
  Description of Artificial Sequence: Synthetic oligonucleotide
  Antisense strand to SEQ ID NO: 945382
uaucucaugggccucugcu

SEQ ID NO: 945384 - RNA, 19 nt, Artificial Sequence
  Description of Artificial Sequence: Synthetic oligonucleotide
  Sense strand starting at position 3983 of SEQ ID NO: 913677
uggacuauguguuuggaaa

SEQ ID NO: 945385 - RNA, 19 nt, Artificial Sequence
  Description of Artificial Sequence: Synthetic oligonucleotide
  Antisense strand to SEQ ID NO: 945384
uuuccaaacacauagucca

SEQ ID NO: 945386 - RNA, 19 nt, Artificial Sequence
  Description of Artificial Sequence: Synthetic oligonucleotide
  Sense strand starting at position 489 of SEQ ID NO: 913677
gccaauuggguuggaacaa

SEQ ID NO: 945387 - RNA, 19 nt, Artificial Sequence
  Description of Artificial Sequence: Synthetic oligonucleotide
  Antisense strand to SEQ ID NO: 945386
uuguuccaacccaauuggc

SEQ ID NO: 945388 - RNA, 19 nt, Artificial Sequence
  Description of Artificial Sequence: Synthetic oligonucleotide
  Sense strand starting at position 488 of SEQ ID NO: 913677
agccaauuggguuggaaca

SEQ ID NO: 945389 - RNA, 19 nt, Artificial Sequence
  Description of Artificial Sequence: Synthetic oligonucleotide
  Antisense strand to SEQ ID NO: 945388
uguuccaacccaauuggcu

SEQ ID NO: 945390 - RNA, 19 nt, Artificial Sequence
  Description of Artificial Sequence: Synthetic oligonucleotide
  Sense strand starting at position 1073 of SEQ ID NO: 913677
gauaaagcggagcaauguu

SEQ ID NO: 945391 - RNA, 19 nt, Artificial Sequence
  Description of Artificial Sequence: Synthetic oligonucleotide
  Antisense strand to SEQ ID NO: 945390
aacauugcuccgcuuuauc

SEQ ID NO: 945392 - RNA, 19 nt, Artificial Sequence
  Description of Artificial Sequence: Synthetic oligonucleotide
  Sense strand starting at position 3108 of SEQ ID NO: 913677
gcagaucaccuauggucaa

SEQ ID NO: 945393 - RNA, 19 nt, Artificial Sequence
  Description of Artificial Sequence: Synthetic oligonucleotide
  Antisense strand to SEQ ID NO: 945392
uugaccauaggugaucugc

SEQ ID NO: 945394 - RNA, 19 nt, Artificial Sequence
  Description of Artificial Sequence: Synthetic oligonucleotide
  Sense strand starting at position 2871 of SEQ ID NO: 913677
gugggaggaucaguucagu

SEQ ID NO: 945395 - RNA, 19 nt, Artificial Sequence
  Description of Artificial Sequence: Synthetic oligonucleotide
  Antisense strand to SEQ ID NO: 945394
acugaacugauccucccac

SEQ ID NO: 945396 - RNA, 19 nt, Artificial Sequence
  Description of Artificial Sequence: Synthetic oligonucleotide
  Sense strand starting at position 338 of SEQ ID NO: 913677
uguguaaaugcuggaaaca

SEQ ID NO: 945397 - RNA, 19 nt, Artificial Sequence
  Description of Artificial Sequence: Synthetic oligonucleotide
  Antisense strand to SEQ ID NO: 945396
uguuuccagcauuuacaca

SEQ ID NO: 945398 - RNA, 19 nt, Artificial Sequence
  Description of Artificial Sequence: Synthetic oligonucleotide
  Sense strand starting at position 642 of SEQ ID NO: 913677
uuggccaucaaugguagau

SEQ ID NO: 945399 - RNA, 19 nt, Artificial Sequence
  Description of Artificial Sequence: Synthetic oligonucleotide
  Antisense strand to SEQ ID NO: 945398
aucuaccauugauggccaa

SEQ ID NO: 945400 - RNA, 19 nt, Artificial Sequence
  Description of Artificial Sequence: Synthetic oligonucleotide
  Sense strand starting at position 1690 of SEQ ID NO: 913677
gcaauucugcugcauaaac

SEQ ID NO: 945401 - RNA, 19 nt, Artificial Sequence
  Description of Artificial Sequence: Synthetic oligonucleotide
  Antisense strand to SEQ ID NO: 945400
guuuaugcagcagaauugc

SEQ ID NO: 945402 - RNA, 19 nt, Artificial Sequence
  Description of Artificial Sequence: Synthetic oligonucleotide
  Sense strand starting at position 641 of SEQ ID NO: 913677
guuggccaucaaugguaga

SEQ ID NO: 945403 - RNA, 19 nt, Artificial Sequence
  Description of Artificial Sequence: Synthetic oligonucleotide
  Antisense strand to SEQ ID NO: 945402
ucuaccauugauggccaac

SEQ ID NO: 945404 - RNA, 19 nt, Artificial Sequence
  Description of Artificial Sequence: Synthetic oligonucleotide
  Sense strand starting at position 522 of SEQ ID NO: 913677
ccuugugugcuuuaauaug

SEQ ID NO: 945405 - RNA, 19 nt, Artificial Sequence
  Description of Artificial Sequence: Synthetic oligonucleotide
  Antisense strand to SEQ ID NO: 945404
cauauuaaagcacacaagg

SEQ ID NO: 945406 - RNA, 19 nt, Artificial Sequence
  Description of Artificial Sequence: Synthetic oligonucleotide
  Sense strand starting at position 1466 of SEQ ID NO: 913677
uaggaagcugcagguuauu

SEQ ID NO: 945407 - RNA, 19 nt, Artificial Sequence
  Description of Artificial Sequence: Synthetic oligonucleotide
  Antisense strand to SEQ ID NO: 945406
aauaaccugcagcuuccua

SEQ ID NO: 945408 - RNA, 19 nt, Artificial Sequence
  Description of Artificial Sequence: Synthetic oligonucleotide
  Sense strand starting at position 2616 of SEQ ID NO: 913677
agcuacuguuccuuuauua

SEQ ID NO: 945409 - RNA, 19 nt, Artificial Sequence
  Description of Artificial Sequence: Synthetic oligonucleotide
  Antisense strand to SEQ ID NO: 945408
uaauaaaggaacaguagcu

SEQ ID NO: 945410 - RNA, 19 nt, Artificial Sequence
  Description of Artificial Sequence: Synthetic oligonucleotide
  Sense strand starting at position 11 of SEQ ID NO: 913677
gguaauuucucuggaaacu

SEQ ID NO: 945411 - RNA, 19 nt, Artificial Sequence
  Description of Artificial Sequence: Synthetic oligonucleotide
  Antisense strand to SEQ ID NO: 945410
aguuuccagagaaauuacc

SEQ ID NO: 945412 - RNA, 19 nt, Artificial Sequence
  Description of Artificial Sequence: Synthetic oligonucleotide
  Sense strand starting at position 1593 of SEQ ID NO: 913677
ggcagcaauucuuccuuua

SEQ ID NO: 945413 - RNA, 19 nt, Artificial Sequence
  Description of Artificial Sequence: Synthetic oligonucleotide
  Antisense strand to SEQ ID NO: 945412
uaaaggaagaauugcugcc

SEQ ID NO: 945414 - RNA, 19 nt, Artificial Sequence
  Description of Artificial Sequence: Synthetic oligonucleotide
  Sense strand starting at position 2298 of SEQ ID NO: 913677
ugccgaaucuuguuauaua

SEQ ID NO: 945415 - RNA, 19 nt, Artificial Sequence
  Description of Artificial Sequence: Synthetic oligonucleotide
  Antisense strand to SEQ ID NO: 945414
uauauaacaagauucggca

SEQ ID NO: 945416 - RNA, 19 nt, Artificial Sequence
  Description of Artificial Sequence: Synthetic oligonucleotide
  Sense strand starting at position 2389 of SEQ ID NO: 913677
gcuuguaucuucuucugga

SEQ ID NO: 945417 - RNA, 19 nt, Artificial Sequence
  Description of Artificial Sequence: Synthetic oligonucleotide
  Antisense strand to SEQ ID NO: 945416
uccagaagaagauacaagc

SEQ ID NO: 945418 - RNA, 19 nt, Artificial Sequence
  Description of Artificial Sequence: Synthetic oligonucleotide
  Sense strand starting at position 3687 of SEQ ID NO: 913677
ggucuauaauagugauuua

SEQ ID NO: 945419 - RNA, 19 nt, Artificial Sequence
  Description of Artificial Sequence: Synthetic oligonucleotide
  Antisense strand to SEQ ID NO: 945418
uaaaucacuauuauagacc

SEQ ID NO: 945420 - RNA, 19 nt, Artificial Sequence
  Description of Artificial Sequence: Synthetic oligonucleotide
  Sense strand starting at position 747 of SEQ ID NO: 913677
gcagauauaugggcgccua

SEQ ID NO: 945421 - RNA, 19 nt, Artificial Sequence
  Description of Artificial Sequence: Synthetic oligonucleotide
  Antisense strand to SEQ ID NO: 945420
uaggcgcccauauaucugc

SEQ ID NO: 945422 - RNA, 19 nt, Artificial Sequence
  Description of Artificial Sequence: Synthetic oligonucleotide
  Sense strand starting at position 1789 of SEQ ID NO: 913677
ucagauaucugggagugag

SEQ ID NO: 945423 - RNA, 19 nt, Artificial Sequence
  Description of Artificial Sequence: Synthetic oligonucleotide
  Antisense strand to SEQ ID NO: 945422
cucacucccagauaucuga

SEQ ID NO: 945424 - RNA, 19 nt, Artificial Sequence
  Description of Artificial Sequence: Synthetic oligonucleotide
  Sense strand starting at position 2598 of SEQ ID NO: 913677
guuccugugcacgagcaua

SEQ ID NO: 945425 - RNA, 19 nt, Artificial Sequence
  Description of Artificial Sequence: Synthetic oligonucleotide
  Antisense strand to SEQ ID NO: 945424
uaugcucgugcacaggaac

SEQ ID NO: 945426 - RNA, 19 nt, Artificial Sequence
  Description of Artificial Sequence: Synthetic oligonucleotide
  Sense strand starting at position 3225 of SEQ ID NO: 913677
gcacccguguuccuagaua

SEQ ID NO: 945427 - RNA, 19 nt, Artificial Sequence
  Description of Artificial Sequence: Synthetic oligonucleotide
  Antisense strand to SEQ ID NO: 945426
uaucuaggaacacgggugc

SEQ ID NO: 945428 - RNA, 19 nt, Artificial Sequence
  Description of Artificial Sequence: Synthetic oligonucleotide
  Sense strand starting at position 2262 of SEQ ID NO: 913677
cccggaagaugucaaugaa

SEQ ID NO: 945429 - RNA, 19 nt, Artificial Sequence
  Description of Artificial Sequence: Synthetic oligonucleotide
  Antisense strand to SEQ ID NO: 945428
uucauugacaucuuccggg

SEQ ID NO: 945430 - RNA, 19 nt, Artificial Sequence
  Description of Artificial Sequence: Synthetic oligonucleotide
  Sense strand starting at position 520 of SEQ ID NO: 913677
guccuugugugcuuuaaua

SEQ ID NO: 945431 - RNA, 19 nt, Artificial Sequence
  Description of Artificial Sequence: Synthetic oligonucleotide
  Antisense strand to SEQ ID NO: 945430
uauuaaagcacacaaggac

SEQ ID NO: 945432 - RNA, 19 nt, Artificial Sequence
  Description of Artificial Sequence: Synthetic oligonucleotide
  Sense strand starting at position 2801 of SEQ ID NO: 913678
gagaaugaguacucucaua

SEQ ID NO: 945433 - RNA, 19 nt, Artificial Sequence
  Description of Artificial Sequence: Synthetic oligonucleotide
  Antisense strand to SEQ ID NO: 945432
uaugagaguacucauucuc

SEQ ID NO: 945434 - RNA, 19 nt, Artificial Sequence
  Description of Artificial Sequence: Synthetic oligonucleotide
  Sense strand starting at position 2976 of SEQ ID NO: 913678
augcucuuugcaguguauu

SEQ ID NO: 945435 - RNA, 19 nt, Artificial Sequence
  Description of Artificial Sequence: Synthetic oligonucleotide
  Antisense strand to SEQ ID NO: 945434
aauacacugcaaagagcau

SEQ ID NO: 945436 - RNA, 19 nt, Artificial Sequence
  Description of Artificial Sequence: Synthetic oligonucleotide
  Sense strand starting at position 1479 of SEQ ID NO: 913678
gccaauggccuggaacaaa

SEQ ID NO: 945437 - RNA, 19 nt, Artificial Sequence
  Description of Artificial Sequence: Synthetic oligonucleotide
  Antisense strand to SEQ ID NO: 945436
uuuguuccaggccauuggc

SEQ ID NO: 945438 - RNA, 19 nt, Artificial Sequence
  Description of Artificial Sequence: Synthetic oligonucleotide
  Sense strand starting at position 738 of SEQ ID NO: 913678
uugcuaucaccgccaguuu

SEQ ID NO: 945439 - RNA, 19 nt, Artificial Sequence
  Description of Artificial Sequence: Synthetic oligonucleotide
  Antisense strand to SEQ ID NO: 945438
aaacuggcggugauagcaa

SEQ ID NO: 945440 - RNA, 19 nt, Artificial Sequence
  Description of Artificial Sequence: Synthetic oligonucleotide
  Sense strand starting at position 794 of SEQ ID NO: 913678
guccuacaaccuggaagau

SEQ ID NO: 945441 - RNA, 19 nt, Artificial Sequence
  Description of Artificial Sequence: Synthetic oligonucleotide
  Antisense strand to SEQ ID NO: 945440
aucuuccagguuguaggac

SEQ ID NO: 945442 - RNA, 19 nt, Artificial Sequence
  Description of Artificial Sequence: Synthetic oligonucleotide
  Sense strand starting at position 436 of SEQ ID NO: 913678
gggaccuucugagugaacu

SEQ ID NO: 945443 - RNA, 19 nt, Artificial Sequence
  Description of Artificial Sequence: Synthetic oligonucleotide
  Antisense strand to SEQ ID NO: 945442
aguucacucagaagguccc

SEQ ID NO: 945444 - RNA, 19 nt, Artificial Sequence
  Description of Artificial Sequence: Synthetic oligonucleotide
  Sense strand starting at position 3245 of SEQ ID NO: 913678
cuuuauacacuguaguaua

SEQ ID NO: 945445 - RNA, 19 nt, Artificial Sequence
  Description of Artificial Sequence: Synthetic oligonucleotide
  Antisense strand to SEQ ID NO: 945444
uauacuacaguguauaaag

SEQ ID NO: 945446 - RNA, 19 nt, Artificial Sequence
  Description of Artificial Sequence: Synthetic oligonucleotide
  Sense strand starting at position 105 of SEQ ID NO: 913678
gugagaaucaaauggcuau

SEQ ID NO: 945447 - RNA, 19 nt, Artificial Sequence
  Description of Artificial Sequence: Synthetic oligonucleotide
  Antisense strand to SEQ ID NO: 945446
auagccauuugauucucac

SEQ ID NO: 945448 - RNA, 19 nt, Artificial Sequence
  Description of Artificial Sequence: Synthetic oligonucleotide
  Sense strand starting at position 2846 of SEQ ID NO: 913678
gcaacuucucugcagggaa

SEQ ID NO: 945449 - RNA, 19 nt, Artificial Sequence
  Description of Artificial Sequence: Synthetic oligonucleotide
  Antisense strand to SEQ ID NO: 945448
uucccugcagagaaguugc

SEQ ID NO: 945450 - RNA, 19 nt, Artificial Sequence
  Description of Artificial Sequence: Synthetic oligonucleotide
  Sense strand starting at position 437 of SEQ ID NO: 913678
ggaccuucugagugaacuc

SEQ ID NO: 945451 - RNA, 19 nt, Artificial Sequence
  Description of Artificial Sequence: Synthetic oligonucleotide
  Antisense strand to SEQ ID NO: 945450
gaguucacucagaaggucc

SEQ ID NO: 945452 - RNA, 19 nt, Artificial Sequence
  Description of Artificial Sequence: Synthetic oligonucleotide
  Sense strand starting at position 2858 of SEQ ID NO: 913678
cagggaauuugguaauauu

SEQ ID NO: 945453 - RNA, 19 nt, Artificial Sequence
  Description of Artificial Sequence: Synthetic oligonucleotide
  Antisense strand to SEQ ID NO: 945452
aauauuaccaaauucccug

SEQ ID NO: 945454 - RNA, 19 nt, Artificial Sequence
  Description of Artificial Sequence: Synthetic oligonucleotide
  Sense strand starting at position 2216 of SEQ ID NO: 913678
uggaucugucugugagaaa

SEQ ID NO: 945455 - RNA, 19 nt, Artificial Sequence
  Description of Artificial Sequence: Synthetic oligonucleotide
  Antisense strand to SEQ ID NO: 945454
uuucucacagacagaucca

SEQ ID NO: 945456 - RNA, 19 nt, Artificial Sequence
  Description of Artificial Sequence: Synthetic oligonucleotide
  Sense strand starting at position 3546 of SEQ ID NO: 913678
uugucuucucaucagauuc

SEQ ID NO: 945457 - RNA, 19 nt, Artificial Sequence
  Description of Artificial Sequence: Synthetic oligonucleotide
  Antisense strand to SEQ ID NO: 945456
gaaucugaugagaagacaa

SEQ ID NO: 945458 - RNA, 19 nt, Artificial Sequence
  Description of Artificial Sequence: Synthetic oligonucleotide
  Sense strand starting at position 1555 of SEQ ID NO: 913678
cuucuuauuccggauaccu

SEQ ID NO: 945459 - RNA, 19 nt, Artificial Sequence
  Description of Artificial Sequence: Synthetic oligonucleotide
  Antisense strand to SEQ ID NO: 945458
agguauccggaauaagaag

SEQ ID NO: 945460 - RNA, 19 nt, Artificial Sequence
  Description of Artificial Sequence: Synthetic oligonucleotide
  Sense strand starting at position 1591 of SEQ ID NO: 913678
ugcccuuucccugaccaga

SEQ ID NO: 945461 - RNA, 19 nt, Artificial Sequence
  Description of Artificial Sequence: Synthetic oligonucleotide
  Antisense strand to SEQ ID NO: 945460
ucuggucagggaaagggca

SEQ ID NO: 945462 - RNA, 19 nt, Artificial Sequence
  Description of Artificial Sequence: Synthetic oligonucleotide
  Sense strand starting at position 871 of SEQ ID NO: 913678
uaaguucucguugaauuaa

SEQ ID NO: 945463 - RNA, 19 nt, Artificial Sequence
  Description of Artificial Sequence: Synthetic oligonucleotide
  Antisense strand to SEQ ID NO: 945462
uuaauucaacgagaacuua

SEQ ID NO: 945464 - RNA, 19 nt, Artificial Sequence
  Description of Artificial Sequence: Synthetic oligonucleotide
  Sense strand starting at position 3731 of SEQ ID NO: 913678
aguugacuucuccagucau

SEQ ID NO: 945465 - RNA, 19 nt, Artificial Sequence
  Description of Artificial Sequence: Synthetic oligonucleotide
  Antisense strand to SEQ ID NO: 945464
augacuggagaagucaacu

SEQ ID NO: 945466 - RNA, 19 nt, Artificial Sequence
  Description of Artificial Sequence: Synthetic oligonucleotide
  Sense strand starting at position 2337 of SEQ ID NO: 913678
aucauagcucuguaguaga

SEQ ID NO: 945467 - RNA, 19 nt, Artificial Sequence
  Description of Artificial Sequence: Synthetic oligonucleotide
  Antisense strand to SEQ ID NO: 945466
ucuacuacagagcuaugau

SEQ ID NO: 945468 - RNA, 19 nt, Artificial Sequence
  Description of Artificial Sequence: Synthetic oligonucleotide
  Sense strand starting at position 3787 of SEQ ID NO: 913678
gucaucugccaacagguaa

SEQ ID NO: 945469 - RNA, 19 nt, Artificial Sequence
  Description of Artificial Sequence: Synthetic oligonucleotide
  Antisense strand to SEQ ID NO: 945468
uuaccuguuggcagaugac

SEQ ID NO: 945470 - RNA, 19 nt, Artificial Sequence
  Description of Artificial Sequence: Synthetic oligonucleotide
  Sense strand starting at position 1106 of SEQ ID NO: 913678
uaggcauacccugagucuu

SEQ ID NO: 945471 - RNA, 19 nt, Artificial Sequence
  Description of Artificial Sequence: Synthetic oligonucleotide
  Antisense strand to SEQ ID NO: 945470
aagacucaggguaugccua

SEQ ID NO: 945472 - RNA, 19 nt, Artificial Sequence
  Description of Artificial Sequence: Synthetic oligonucleotide
  Sense strand starting at position 2215 of SEQ ID NO: 913678
cuggaucugucugugagaa

SEQ ID NO: 945473 - RNA, 19 nt, Artificial Sequence
  Description of Artificial Sequence: Synthetic oligonucleotide
  Antisense strand to SEQ ID NO: 945472
uucucacagacagauccag

SEQ ID NO: 945474 - RNA, 19 nt, Artificial Sequence
  Description of Artificial Sequence: Synthetic oligonucleotide
  Sense strand starting at position 446 of SEQ ID NO: 913678
gagugaacucugggccaua

SEQ ID NO: 945475 - RNA, 19 nt, Artificial Sequence
  Description of Artificial Sequence: Synthetic oligonucleotide
  Antisense strand to SEQ ID NO: 945474
uauggcccagaguucacuc

SEQ ID NO: 945476 - RNA, 19 nt, Artificial Sequence
  Description of Artificial Sequence: Synthetic oligonucleotide
  Sense strand starting at position 1094 of SEQ ID NO: 913678
cuggaagucagcuaggcau

SEQ ID NO: 945477 - RNA, 19 nt, Artificial Sequence
  Description of Artificial Sequence: Synthetic oligonucleotide
  Antisense strand to SEQ ID NO: 945476
augccuagcugacuuccag

SEQ ID NO: 945478 - RNA, 19 nt, Artificial Sequence
  Description of Artificial Sequence: Synthetic oligonucleotide
  Sense strand starting at position 3961 of SEQ ID NO: 913678
cuaauaguuucucucugag

SEQ ID NO: 945479 - RNA, 19 nt, Artificial Sequence
  Description of Artificial Sequence: Synthetic oligonucleotide
  Antisense strand to SEQ ID NO: 945478
cucagagagaaacuauuag

SEQ ID NO: 945480 - RNA, 19 nt, Artificial Sequence
  Description of Artificial Sequence: Synthetic oligonucleotide
  Sense strand starting at position 661 of SEQ ID NO: 913678
gcuaguguucgcuuagcau

SEQ ID NO: 945481 - RNA, 19 nt, Artificial Sequence
  Description of Artificial Sequence: Synthetic oligonucleotide
  Antisense strand to SEQ ID NO: 945480
augcuaagcgaacacuagc

SEQ ID NO: 945482 - RNA, 19 nt, Artificial Sequence
  Description of Artificial Sequence: Synthetic oligonucleotide
  Sense strand starting at position 2891 of SEQ ID NO: 913678
auguacauauccuuuguaa

SEQ ID NO: 945483 - RNA, 19 nt, Artificial Sequence
  Description of Artificial Sequence: Synthetic oligonucleotide
  Antisense strand to SEQ ID NO: 945482
uuacaaaggauauguacau

SEQ ID NO: 945484 - RNA, 19 nt, Artificial Sequence
  Description of Artificial Sequence: Synthetic oligonucleotide
  Sense strand starting at position 3656 of SEQ ID NO: 913678
ucagcaaguguccagguaa

SEQ ID NO: 945485 - RNA, 19 nt, Artificial Sequence
  Description of Artificial Sequence: Synthetic oligonucleotide
  Antisense strand to SEQ ID NO: 945484
uuaccuggacacuugcuga

SEQ ID NO: 945486 - RNA, 19 nt, Artificial Sequence
  Description of Artificial Sequence: Synthetic oligonucleotide
  Sense strand starting at position 2893 of SEQ ID NO: 913678
guacauauccuuuguaaac

SEQ ID NO: 945487 - RNA, 19 nt, Artificial Sequence
  Description of Artificial Sequence: Synthetic oligonucleotide
  Antisense strand to SEQ ID NO: 945486
guuuacaaaggauauguac

SEQ ID NO: 945488 - RNA, 19 nt, Artificial Sequence
  Description of Artificial Sequence: Synthetic oligonucleotide
  Sense strand starting at position 312 of SEQ ID NO: 913678
gccaucugucaucauucca

SEQ ID NO: 945489 - RNA, 19 nt, Artificial Sequence
  Description of Artificial Sequence: Synthetic oligonucleotide
  Antisense strand to SEQ ID NO: 945488
uggaaugaugacagauggc

SEQ ID NO: 945490 - RNA, 19 nt, Artificial Sequence
  Description of Artificial Sequence: Synthetic oligonucleotide
  Sense strand starting at position 3029 of SEQ ID NO: 913678
gcccaucaacagugauuau

SEQ ID NO: 945491 - RNA, 19 nt, Artificial Sequence
  Description of Artificial Sequence: Synthetic oligonucleotide
  Antisense strand to SEQ ID NO: 945490
auaaucacuguugaugggc

SEQ ID NO: 945492 - RNA, 19 nt, Artificial Sequence
  Description of Artificial Sequence: Synthetic oligonucleotide
  Sense strand starting at position 2214 of SEQ ID NO: 913678
ccuggaucugucugugaga

SEQ ID NO: 945493 - RNA, 19 nt, Artificial Sequence
  Description of Artificial Sequence: Synthetic oligonucleotide
  Antisense strand to SEQ ID NO: 945492
ucucacagacagauccagg

SEQ ID NO: 945494 - RNA, 19 nt, Artificial Sequence
  Description of Artificial Sequence: Synthetic oligonucleotide
  Sense strand starting at position 1465 of SEQ ID NO: 913678
gucuaucaggcuuagccaa

SEQ ID NO: 945495 - RNA, 19 nt, Artificial Sequence
  Description of Artificial Sequence: Synthetic oligonucleotide
  Antisense strand to SEQ ID NO: 945494
uuggcuaagccugauagac

SEQ ID NO: 945496 - RNA, 19 nt, Artificial Sequence
  Description of Artificial Sequence: Synthetic oligonucleotide
  Sense strand starting at position 94 of SEQ ID NO: 913678
aaaugcaugcugugagaau

SEQ ID NO: 945497 - RNA, 19 nt, Artificial Sequence
  Description of Artificial Sequence: Synthetic oligonucleotide
  Antisense strand to SEQ ID NO: 945496
auucucacagcaugcauuu

SEQ ID NO: 945498 - RNA, 19 nt, Artificial Sequence
  Description of Artificial Sequence: Synthetic oligonucleotide
  Sense strand starting at position 3545 of SEQ ID NO: 913678
cuugucuucucaucagauu

SEQ ID NO: 945499 - RNA, 19 nt, Artificial Sequence
  Description of Artificial Sequence: Synthetic oligonucleotide
  Antisense strand to SEQ ID NO: 945498
aaucugaugagaagacaag

SEQ ID NO: 945500 - RNA, 19 nt, Artificial Sequence
  Description of Artificial Sequence: Synthetic oligonucleotide
  Sense strand starting at position 3243 of SEQ ID NO: 913678
uucuuuauacacuguagua

SEQ ID NO: 945501 - RNA, 19 nt, Artificial Sequence
  Description of Artificial Sequence: Synthetic oligonucleotide
  Antisense strand to SEQ ID NO: 945500
uacuacaguguauaaagaa

SEQ ID NO: 945502 - RNA, 19 nt, Artificial Sequence
  Description of Artificial Sequence: Synthetic oligonucleotide
  Sense strand starting at position 2773 of SEQ ID NO: 913678
gaugaaacucagugcuggu

SEQ ID NO: 945503 - RNA, 19 nt, Artificial Sequence
  Description of Artificial Sequence: Synthetic oligonucleotide
  Antisense strand to SEQ ID NO: 945502
accagcacugaguuucauc

SEQ ID NO: 945504 - RNA, 19 nt, Artificial Sequence
  Description of Artificial Sequence: Synthetic oligonucleotide
  Sense strand starting at position 2332 of SEQ ID NO: 913678
aguagaucauagcucugua

SEQ ID NO: 945505 - RNA, 19 nt, Artificial Sequence
  Description of Artificial Sequence: Synthetic oligonucleotide
  Antisense strand to SEQ ID NO: 945504
uacagagcuaugaucuacu

SEQ ID NO: 945506 - RNA, 19 nt, Artificial Sequence
  Description of Artificial Sequence: Synthetic oligonucleotide
  Sense strand starting at position 3964 of SEQ ID NO: 913678
auaguuucucucugaguua

SEQ ID NO: 945507 - RNA, 19 nt, Artificial Sequence
  Description of Artificial Sequence: Synthetic oligonucleotide
  Antisense strand to SEQ ID NO: 945506
uaacucagagagaaacuau

SEQ ID NO: 945508 - RNA, 19 nt, Artificial Sequence
  Description of Artificial Sequence: Synthetic oligonucleotide
  Sense strand starting at position 2335 of SEQ ID NO: 913678
agaucauagcucuguagua

SEQ ID NO: 945509 - RNA, 19 nt, Artificial Sequence
  Description of Artificial Sequence: Synthetic oligonucleotide
  Antisense strand to SEQ ID NO: 945508
uacuacagagcuaugaucu

SEQ ID NO: 945510 - RNA, 19 nt, Artificial Sequence
  Description of Artificial Sequence: Synthetic oligonucleotide
  Sense strand starting at position 2336 of SEQ ID NO: 913678
gaucauagcucuguaguag

SEQ ID NO: 945511 - RNA, 19 nt, Artificial Sequence
  Description of Artificial Sequence: Synthetic oligonucleotide
  Antisense strand to SEQ ID NO: 945510
cuacuacagagcuaugauc

SEQ ID NO: 945512 - RNA, 19 nt, Artificial Sequence
  Description of Artificial Sequence: Synthetic oligonucleotide
  Sense strand starting at position 102 of SEQ ID NO: 913679
ccagauuucucagugcuua

SEQ ID NO: 945513 - RNA, 19 nt, Artificial Sequence
  Description of Artificial Sequence: Synthetic oligonucleotide
  Antisense strand to SEQ ID NO: 945512
uaagcacugagaaaucugg

SEQ ID NO: 945514 - RNA, 19 nt, Artificial Sequence
  Description of Artificial Sequence: Synthetic oligonucleotide
  Sense strand starting at position 859 of SEQ ID NO: 913679
uuagcaaaggucuaaauau

SEQ ID NO: 945515 - RNA, 19 nt, Artificial Sequence
  Description of Artificial Sequence: Synthetic oligonucleotide
  Antisense strand to SEQ ID NO: 945514
auauuuagaccuuugcuaa

SEQ ID NO: 945516 - RNA, 19 nt, Artificial Sequence
  Description of Artificial Sequence: Synthetic oligonucleotide
  Sense strand starting at position 2035 of SEQ ID NO: 913679
cuauuauuggcucacagaa

SEQ ID NO: 945517 - RNA, 19 nt, Artificial Sequence
  Description of Artificial Sequence: Synthetic oligonucleotide
  Antisense strand to SEQ ID NO: 945516
uucugugagccaauaauag

SEQ ID NO: 945518 - RNA, 19 nt, Artificial Sequence
  Description of Artificial Sequence: Synthetic oligonucleotide
  Sense strand starting at position 2365 of SEQ ID NO: 913679
gugcgagugaguuuaccga

SEQ ID NO: 945519 - RNA, 19 nt, Artificial Sequence
  Description of Artificial Sequence: Synthetic oligonucleotide
  Antisense strand to SEQ ID NO: 945518
ucgguaaacucacucgcac

SEQ ID NO: 945520 - RNA, 19 nt, Artificial Sequence
  Description of Artificial Sequence: Synthetic oligonucleotide
  Sense strand starting at position 2359 of SEQ ID NO: 913679
ccggaugugcgagugaguu

SEQ ID NO: 945521 - RNA, 19 nt, Artificial Sequence
  Description of Artificial Sequence: Synthetic oligonucleotide
  Antisense strand to SEQ ID NO: 945520
aacucacucgcacauccgg

SEQ ID NO: 945522 - RNA, 19 nt, Artificial Sequence
  Description of Artificial Sequence: Synthetic oligonucleotide
  Sense strand starting at position 2387 of SEQ ID NO: 913679
ccacuuguccuccaaggga

SEQ ID NO: 945523 - RNA, 19 nt, Artificial Sequence
  Description of Artificial Sequence: Synthetic oligonucleotide
  Antisense strand to SEQ ID NO: 945522
ucccuuggaggacaagugg

SEQ ID NO: 945524 - RNA, 19 nt, Artificial Sequence
  Description of Artificial Sequence: Synthetic oligonucleotide
  Sense strand starting at position 2950 of SEQ ID NO: 913679
gauuguauucuccacugag

SEQ ID NO: 945525 - RNA, 19 nt, Artificial Sequence
  Description of Artificial Sequence: Synthetic oligonucleotide
  Antisense strand to SEQ ID NO: 945524
cucaguggagaauacaauc

SEQ ID NO: 945526 - RNA, 19 nt, Artificial Sequence
  Description of Artificial Sequence: Synthetic oligonucleotide
  Sense strand starting at position 2667 of SEQ ID NO: 913679
cagaguucccaaugaggac

SEQ ID NO: 945527 - RNA, 19 nt, Artificial Sequence
  Description of Artificial Sequence: Synthetic oligonucleotide
  Antisense strand to SEQ ID NO: 945526
guccucauugggaacucug

SEQ ID NO: 945528 - RNA, 19 nt, Artificial Sequence
  Description of Artificial Sequence: Synthetic oligonucleotide
  Sense strand starting at position 2966 of SEQ ID NO: 913679
gagcaauaagauuaggugu

SEQ ID NO: 945529 - RNA, 19 nt, Artificial Sequence
  Description of Artificial Sequence: Synthetic oligonucleotide
  Antisense strand to SEQ ID NO: 945528
acaccuaaucuuauugcuc

SEQ ID NO: 945530 - RNA, 19 nt, Artificial Sequence
  Description of Artificial Sequence: Synthetic oligonucleotide
  Sense strand starting at position 3086 of SEQ ID NO: 913679
ccacuaucucuauauaggu

SEQ ID NO: 945531 - RNA, 19 nt, Artificial Sequence
  Description of Artificial Sequence: Synthetic oligonucleotide
  Antisense strand to SEQ ID NO: 945530
accuauauagagauagugg

SEQ ID NO: 945532 - RNA, 19 nt, Artificial Sequence
  Description of Artificial Sequence: Synthetic oligonucleotide
  Sense strand starting at position 3765 of SEQ ID NO: 913679
gguacauagcauuaucaca

SEQ ID NO: 945533 - RNA, 19 nt, Artificial Sequence
  Description of Artificial Sequence: Synthetic oligonucleotide
  Antisense strand to SEQ ID NO: 945532
ugugauaaugcuauguacc

SEQ ID NO: 945534 - RNA, 19 nt, Artificial Sequence
  Description of Artificial Sequence: Synthetic oligonucleotide
  Sense strand starting at position 2999 of SEQ ID NO: 913679
auagcaacuaugugagaga

SEQ ID NO: 945535 - RNA, 19 nt, Artificial Sequence
  Description of Artificial Sequence: Synthetic oligonucleotide
  Antisense strand to SEQ ID NO: 945534
ucucucacauaguugcuau

SEQ ID NO: 945536 - RNA, 19 nt, Artificial Sequence
  Description of Artificial Sequence: Synthetic oligonucleotide
  Sense strand starting at position 692 of SEQ ID NO: 913679
ccuggaagcuucucagaaa

SEQ ID NO: 945537 - RNA, 19 nt, Artificial Sequence
  Description of Artificial Sequence: Synthetic oligonucleotide
  Antisense strand to SEQ ID NO: 945536
uuucugagaagcuuccagg

SEQ ID NO: 945538 - RNA, 19 nt, Artificial Sequence
  Description of Artificial Sequence: Synthetic oligonucleotide
  Sense strand starting at position 3269 of SEQ ID NO: 913679
uuuguaugacaguaccauu

SEQ ID NO: 945539 - RNA, 19 nt, Artificial Sequence
  Description of Artificial Sequence: Synthetic oligonucleotide
  Antisense strand to SEQ ID NO: 945538
aaugguacugucauacaaa

SEQ ID NO: 945540 - RNA, 19 nt, Artificial Sequence
  Description of Artificial Sequence: Synthetic oligonucleotide
  Sense strand starting at position 901 of SEQ ID NO: 913679
cucuguucucaagauaggu

SEQ ID NO: 945541 - RNA, 19 nt, Artificial Sequence
  Description of Artificial Sequence: Synthetic oligonucleotide
  Antisense strand to SEQ ID NO: 945540
accuaucuugagaacagag

SEQ ID NO: 945542 - RNA, 19 nt, Artificial Sequence
  Description of Artificial Sequence: Synthetic oligonucleotide
  Sense strand starting at position 3932 of SEQ ID NO: 913679
gacccauuccagggucuga

SEQ ID NO: 945543 - RNA, 19 nt, Artificial Sequence
  Description of Artificial Sequence: Synthetic oligonucleotide
  Antisense strand to SEQ ID NO: 945542
ucagacccuggaauggguc

SEQ ID NO: 945544 - RNA, 19 nt, Artificial Sequence
  Description of Artificial Sequence: Synthetic oligonucleotide
  Sense strand starting at position 3859 of SEQ ID NO: 913679
ccuuacuuuggugggagau

SEQ ID NO: 945545 - RNA, 19 nt, Artificial Sequence
  Description of Artificial Sequence: Synthetic oligonucleotide
  Antisense strand to SEQ ID NO: 945544
aucucccaccaaaguaagg

SEQ ID NO: 945546 - RNA, 19 nt, Artificial Sequence
  Description of Artificial Sequence: Synthetic oligonucleotide
  Sense strand starting at position 2541 of SEQ ID NO: 913679
accuccuuuccaggugaga

SEQ ID NO: 945547 - RNA, 19 nt, Artificial Sequence
  Description of Artificial Sequence: Synthetic oligonucleotide
  Antisense strand to SEQ ID NO: 945546
ucucaccuggaaaggaggu

SEQ ID NO: 945548 - RNA, 19 nt, Artificial Sequence
  Description of Artificial Sequence: Synthetic oligonucleotide
  Sense strand starting at position 36 of SEQ ID NO: 913679
uucgaauccuuccuauaag

SEQ ID NO: 945549 - RNA, 19 nt, Artificial Sequence
  Description of Artificial Sequence: Synthetic oligonucleotide
  Antisense strand to SEQ ID NO: 945548
cuuauaggaaggauucgaa

SEQ ID NO: 945550 - RNA, 19 nt, Artificial Sequence
  Description of Artificial Sequence: Synthetic oligonucleotide
  Sense strand starting at position 312 of SEQ ID NO: 913679
ugguuucuaagaugugaac

SEQ ID NO: 945551 - RNA, 19 nt, Artificial Sequence
  Description of Artificial Sequence: Synthetic oligonucleotide
  Antisense strand to SEQ ID NO: 945550
guucacaucuuagaaacca

SEQ ID NO: 945552 - RNA, 19 nt, Artificial Sequence
  Description of Artificial Sequence: Synthetic oligonucleotide
  Sense strand starting at position 306 of SEQ ID NO: 913679
cccaucugguuucuaagau

SEQ ID NO: 945553 - RNA, 19 nt, Artificial Sequence
  Description of Artificial Sequence: Synthetic oligonucleotide
  Antisense strand to SEQ ID NO: 945552
aucuuagaaaccagauggg

SEQ ID NO: 945554 - RNA, 19 nt, Artificial Sequence
  Description of Artificial Sequence: Synthetic oligonucleotide
  Sense strand starting at position 1148 of SEQ ID NO: 913679
gugggauaacaucgaguca

SEQ ID NO: 945555 - RNA, 19 nt, Artificial Sequence
  Description of Artificial Sequence: Synthetic oligonucleotide
  Antisense strand to SEQ ID NO: 945554
ugacucgauguuaucccac

SEQ ID NO: 945556 - RNA, 19 nt, Artificial Sequence
  Description of Artificial Sequence: Synthetic oligonucleotide
  Sense strand starting at position 107 of SEQ ID NO: 913679
uuucucagugcuuauuaga

SEQ ID NO: 945557 - RNA, 19 nt, Artificial Sequence
  Description of Artificial Sequence: Synthetic oligonucleotide
  Antisense strand to SEQ ID NO: 945556
ucuaauaagcacugagaaa

SEQ ID NO: 945558 - RNA, 19 nt, Artificial Sequence
  Description of Artificial Sequence: Synthetic oligonucleotide
  Sense strand starting at position 2358 of SEQ ID NO: 913679
cccggaugugcgagugagu

SEQ ID NO: 945559 - RNA, 19 nt, Artificial Sequence
  Description of Artificial Sequence: Synthetic oligonucleotide
  Antisense strand to SEQ ID NO: 945558
acucacucgcacauccggg

SEQ ID NO: 945560 - RNA, 19 nt, Artificial Sequence
  Description of Artificial Sequence: Synthetic oligonucleotide
  Sense strand starting at position 3865 of SEQ ID NO: 913679
uuuggugggagaugucauu

SEQ ID NO: 945561 - RNA, 19 nt, Artificial Sequence
  Description of Artificial Sequence: Synthetic oligonucleotide
  Antisense strand to SEQ ID NO: 945560
aaugacaucucccaccaaa

SEQ ID NO: 945562 - RNA, 19 nt, Artificial Sequence
  Description of Artificial Sequence: Synthetic oligonucleotide
  Sense strand starting at position 2729 of SEQ ID NO: 913679
gcugguccuccaggaacaa

SEQ ID NO: 945563 - RNA, 19 nt, Artificial Sequence
  Description of Artificial Sequence: Synthetic oligonucleotide
  Antisense strand to SEQ ID NO: 945562
uuguuccuggaggaccagc

SEQ ID NO: 945564 - RNA, 19 nt, Artificial Sequence
  Description of Artificial Sequence: Synthetic oligonucleotide
  Sense strand starting at position 3010 of SEQ ID NO: 913679
gugagagaucugggcaugu

SEQ ID NO: 945565 - RNA, 19 nt, Artificial Sequence
  Description of Artificial Sequence: Synthetic oligonucleotide
  Antisense strand to SEQ ID NO: 945564
acaugcccagaucucucac

SEQ ID NO: 945566 - RNA, 19 nt, Artificial Sequence
  Description of Artificial Sequence: Synthetic oligonucleotide
  Sense strand starting at position 476 of SEQ ID NO: 913679
gccagugaauuggucuaag

SEQ ID NO: 945567 - RNA, 19 nt, Artificial Sequence
  Description of Artificial Sequence: Synthetic oligonucleotide
  Antisense strand to SEQ ID NO: 945566
cuuagaccaauucacuggc

SEQ ID NO: 945568 - RNA, 19 nt, Artificial Sequence
  Description of Artificial Sequence: Synthetic oligonucleotide
  Sense strand starting at position 3176 of SEQ ID NO: 913679
ggccaaaggauaugugcau

SEQ ID NO: 945569 - RNA, 19 nt, Artificial Sequence
  Description of Artificial Sequence: Synthetic oligonucleotide
  Antisense strand to SEQ ID NO: 945568
augcacauauccuuuggcc

SEQ ID NO: 945570 - RNA, 19 nt, Artificial Sequence
  Description of Artificial Sequence: Synthetic oligonucleotide
  Sense strand starting at position 3221 of SEQ ID NO: 913679
uugcaucccuaugugaaua

SEQ ID NO: 945571 - RNA, 19 nt, Artificial Sequence
  Description of Artificial Sequence: Synthetic oligonucleotide
  Antisense strand to SEQ ID NO: 945570
uauucacauagggaugcaa

SEQ ID NO: 945572 - RNA, 19 nt, Artificial Sequence
  Description of Artificial Sequence: Synthetic oligonucleotide
  Sense strand starting at position 897 of SEQ ID NO: 913679
auggcucuguucucaagau

SEQ ID NO: 945573 - RNA, 19 nt, Artificial Sequence
  Description of Artificial Sequence: Synthetic oligonucleotide
  Antisense strand to SEQ ID NO: 945572
aucuugagaacagagccau

SEQ ID NO: 945574 - RNA, 19 nt, Artificial Sequence
  Description of Artificial Sequence: Synthetic oligonucleotide
  Sense strand starting at position 3177 of SEQ ID NO: 913679
gccaaaggauaugugcauu

SEQ ID NO: 945575 - RNA, 19 nt, Artificial Sequence
  Description of Artificial Sequence: Synthetic oligonucleotide
  Antisense strand to SEQ ID NO: 945574
aaugcacauauccuuuggc

SEQ ID NO: 945576 - RNA, 19 nt, Artificial Sequence
  Description of Artificial Sequence: Synthetic oligonucleotide
  Sense strand starting at position 2361 of SEQ ID NO: 913679
ggaugugcgagugaguuua

SEQ ID NO: 945577 - RNA, 19 nt, Artificial Sequence
  Description of Artificial Sequence: Synthetic oligonucleotide
  Antisense strand to SEQ ID NO: 945576
uaaacucacucgcacaucc

SEQ ID NO: 945578 - RNA, 19 nt, Artificial Sequence
  Description of Artificial Sequence: Synthetic oligonucleotide
  Sense strand starting at position 3749 of SEQ ID NO: 913679
acauauucuugcucuaggu

SEQ ID NO: 945579 - RNA, 19 nt, Artificial Sequence
  Description of Artificial Sequence: Synthetic oligonucleotide
  Antisense strand to SEQ ID NO: 945578
accuagagcaagaauaugu

SEQ ID NO: 945580 - RNA, 19 nt, Artificial Sequence
  Description of Artificial Sequence: Synthetic oligonucleotide
  Sense strand starting at position 3753 of SEQ ID NO: 913679
auucuugcucuagguacau

SEQ ID NO: 945581 - RNA, 19 nt, Artificial Sequence
  Description of Artificial Sequence: Synthetic oligonucleotide
  Antisense strand to SEQ ID NO: 945580
auguaccuagagcaagaau

SEQ ID NO: 945582 - RNA, 19 nt, Artificial Sequence
  Description of Artificial Sequence: Synthetic oligonucleotide
  Sense strand starting at position 3263 of SEQ ID NO: 913679
accagcuuuguaugacagu

SEQ ID NO: 945583 - RNA, 19 nt, Artificial Sequence
  Description of Artificial Sequence: Synthetic oligonucleotide
  Antisense strand to SEQ ID NO: 945582
acugucauacaaagcuggu

SEQ ID NO: 945584 - RNA, 19 nt, Artificial Sequence
  Description of Artificial Sequence: Synthetic oligonucleotide
  Sense strand starting at position 1198 of SEQ ID NO: 913679
gaugaauggcucugcucuu

SEQ ID NO: 945585 - RNA, 19 nt, Artificial Sequence
  Description of Artificial Sequence: Synthetic oligonucleotide
  Antisense strand to SEQ ID NO: 945584
aagagcagagccauucauc

SEQ ID NO: 945586 - RNA, 19 nt, Artificial Sequence
  Description of Artificial Sequence: Synthetic oligonucleotide
  Sense strand starting at position 2229 of SEQ ID NO: 913679
ggagauaaguaagauccua

SEQ ID NO: 945587 - RNA, 19 nt, Artificial Sequence
  Description of Artificial Sequence: Synthetic oligonucleotide
  Antisense strand to SEQ ID NO: 945586
uaggaucuuacuuaucucc

SEQ ID NO: 945588 - RNA, 19 nt, Artificial Sequence
  Description of Artificial Sequence: Synthetic oligonucleotide
  Sense strand starting at position 474 of SEQ ID NO: 913679
cugccagugaauuggucua

SEQ ID NO: 945589 - RNA, 19 nt, Artificial Sequence
  Description of Artificial Sequence: Synthetic oligonucleotide
  Antisense strand to SEQ ID NO: 945588
uagaccaauucacuggcag

SEQ ID NO: 945590 - RNA, 19 nt, Artificial Sequence
  Description of Artificial Sequence: Synthetic oligonucleotide
  Sense strand starting at position 3164 of SEQ ID NO: 913679
ugugcuuugaugggccaaa

SEQ ID NO: 945591 - RNA, 19 nt, Artificial Sequence
  Description of Artificial Sequence: Synthetic oligonucleotide
  Antisense strand to SEQ ID NO: 945590
uuuggcccaucaaagcaca

SEQ ID NO: 945592 - RNA, 19 nt, Artificial Sequence
  Description of Artificial Sequence: Synthetic oligonucleotide
  Sense strand starting at position 1724 of SEQ ID NO: 913680
gucucaguucccuaaagaa

SEQ ID NO: 945593 - RNA, 19 nt, Artificial Sequence
  Description of Artificial Sequence: Synthetic oligonucleotide
  Antisense strand to SEQ ID NO: 945592
uucuuuagggaacugagac

SEQ ID NO: 945594 - RNA, 19 nt, Artificial Sequence
  Description of Artificial Sequence: Synthetic oligonucleotide
  Sense strand starting at position 1216 of SEQ ID NO: 913680
ucaaguccgcaagaacuaa

SEQ ID NO: 945595 - RNA, 19 nt, Artificial Sequence
  Description of Artificial Sequence: Synthetic oligonucleotide
  Antisense strand to SEQ ID NO: 945594
uuaguucuugcggacuuga

SEQ ID NO: 945596 - RNA, 19 nt, Artificial Sequence
  Description of Artificial Sequence: Synthetic oligonucleotide
  Sense strand starting at position 3930 of SEQ ID NO: 913680
guuccauugcuugaaauca

SEQ ID NO: 945597 - RNA, 19 nt, Artificial Sequence
  Description of Artificial Sequence: Synthetic oligonucleotide
  Antisense strand to SEQ ID NO: 945596
ugauuucaagcaauggaac

SEQ ID NO: 945598 - RNA, 19 nt, Artificial Sequence
  Description of Artificial Sequence: Synthetic oligonucleotide
  Sense strand starting at position 3199 of SEQ ID NO: 913680
caacuuguaaguggagagu

SEQ ID NO: 945599 - RNA, 19 nt, Artificial Sequence
  Description of Artificial Sequence: Synthetic oligonucleotide
  Antisense strand to SEQ ID NO: 945598
acucuccacuuacaaguug

SEQ ID NO: 945600 - RNA, 19 nt, Artificial Sequence
  Description of Artificial Sequence: Synthetic oligonucleotide
  Sense strand starting at position 1723 of SEQ ID NO: 913680
ggucucaguucccuaaaga

SEQ ID NO: 945601 - RNA, 19 nt, Artificial Sequence
  Description of Artificial Sequence: Synthetic oligonucleotide
  Antisense strand to SEQ ID NO: 945600
ucuuuagggaacugagacc

SEQ ID NO: 945602 - RNA, 19 nt, Artificial Sequence
  Description of Artificial Sequence: Synthetic oligonucleotide
  Sense strand starting at position 3927 of SEQ ID NO: 913680
gagguuccauugcuugaaa

SEQ ID NO: 945603 - RNA, 19 nt, Artificial Sequence
  Description of Artificial Sequence: Synthetic oligonucleotide
  Antisense strand to SEQ ID NO: 945602
uuucaagcaauggaaccuc

SEQ ID NO: 945604 - RNA, 19 nt, Artificial Sequence
  Description of Artificial Sequence: Synthetic oligonucleotide
  Sense strand starting at position 3928 of SEQ ID NO: 913680
agguuccauugcuugaaau

SEQ ID NO: 945605 - RNA, 19 nt, Artificial Sequence
  Description of Artificial Sequence: Synthetic oligonucleotide
  Antisense strand to SEQ ID NO: 945604
auuucaagcaauggaaccu

SEQ ID NO: 945606 - RNA, 19 nt, Artificial Sequence
  Description of Artificial Sequence: Synthetic oligonucleotide
  Sense strand starting at position 3929 of SEQ ID NO: 913680
gguuccauugcuugaaauc

SEQ ID NO: 945607 - RNA, 19 nt, Artificial Sequence
  Description of Artificial Sequence: Synthetic oligonucleotide
  Antisense strand to SEQ ID NO: 945606
gauuucaagcaauggaacc

SEQ ID NO: 945608 - RNA, 19 nt, Artificial Sequence
  Description of Artificial Sequence: Synthetic oligonucleotide
  Sense strand starting at position 3216 of SEQ ID NO: 913680
gucaccguuuacccaaaua

SEQ ID NO: 945609 - RNA, 19 nt, Artificial Sequence
  Description of Artificial Sequence: Synthetic oligonucleotide
  Antisense strand to SEQ ID NO: 945608
uauuuggguaaacggugac

SEQ ID NO: 945610 - RNA, 19 nt, Artificial Sequence
  Description of Artificial Sequence: Synthetic oligonucleotide
  Sense strand starting at position 3185 of SEQ ID NO: 913680
ggcaguuucuacuccaacu

SEQ ID NO: 945611 - RNA, 19 nt, Artificial Sequence
  Description of Artificial Sequence: Synthetic oligonucleotide
  Antisense strand to SEQ ID NO: 945610
aguuggaguagaaacugcc

SEQ ID NO: 945612 - RNA, 19 nt, Artificial Sequence
  Description of Artificial Sequence: Synthetic oligonucleotide
  Sense strand starting at position 3208 of SEQ ID NO: 913680
aguggagagucaccguuua

SEQ ID NO: 945613 - RNA, 19 nt, Artificial Sequence
  Description of Artificial Sequence: Synthetic oligonucleotide
  Antisense strand to SEQ ID NO: 945612
uaaacggugacucuccacu

SEQ ID NO: 945614 - RNA, 19 nt, Artificial Sequence
  Description of Artificial Sequence: Synthetic oligonucleotide
  Sense strand starting at position 1315 of SEQ ID NO: 913680
ggcagaucgugggucacaa

SEQ ID NO: 945615 - RNA, 19 nt, Artificial Sequence
  Description of Artificial Sequence: Synthetic oligonucleotide
  Antisense strand to SEQ ID NO: 945614
uugugacccacgaucugcc

SEQ ID NO: 945616 - RNA, 19 nt, Artificial Sequence
  Description of Artificial Sequence: Synthetic oligonucleotide
  Sense strand starting at position 3817 of SEQ ID NO: 913680
gacgcagcccucugagaug

SEQ ID NO: 945617 - RNA, 19 nt, Artificial Sequence
  Description of Artificial Sequence: Synthetic oligonucleotide
  Antisense strand to SEQ ID NO: 945616
caucucagagggcugcguc

SEQ ID NO: 945618 - RNA, 19 nt, Artificial Sequence
  Description of Artificial Sequence: Synthetic oligonucleotide
  Sense strand starting at position 2469 of SEQ ID NO: 913680
gcccuuaggccuggcagaa

SEQ ID NO: 945619 - RNA, 19 nt, Artificial Sequence
  Description of Artificial Sequence: Synthetic oligonucleotide
  Antisense strand to SEQ ID NO: 945618
uucugccaggccuaagggc

SEQ ID NO: 945620 - RNA, 19 nt, Artificial Sequence
  Description of Artificial Sequence: Synthetic oligonucleotide
  Sense strand starting at position 3778 of SEQ ID NO: 913680
gggugucugucccugccaa

SEQ ID NO: 945621 - RNA, 19 nt, Artificial Sequence
  Description of Artificial Sequence: Synthetic oligonucleotide
  Antisense strand to SEQ ID NO: 945620
uuggcagggacagacaccc

SEQ ID NO: 945622 - RNA, 19 nt, Artificial Sequence
  Description of Artificial Sequence: Synthetic oligonucleotide
  Sense strand starting at position 3647 of SEQ ID NO: 913680
ucaacuagcucaggaguga

SEQ ID NO: 945623 - RNA, 19 nt, Artificial Sequence
  Description of Artificial Sequence: Synthetic oligonucleotide
  Antisense strand to SEQ ID NO: 945622
ucacuccugagcuaguuga

SEQ ID NO: 945624 - RNA, 19 nt, Artificial Sequence
  Description of Artificial Sequence: Synthetic oligonucleotide
  Sense strand starting at position 370 of SEQ ID NO: 913681
gugauaauuuccuccugca

SEQ ID NO: 945625 - RNA, 19 nt, Artificial Sequence
  Description of Artificial Sequence: Synthetic oligonucleotide
  Antisense strand to SEQ ID NO: 945624
ugcaggaggaaauuaucac

SEQ ID NO: 945626 - RNA, 19 nt, Artificial Sequence
  Description of Artificial Sequence: Synthetic oligonucleotide
  Sense strand starting at position 151 of SEQ ID NO: 913681
auagccuugucccuauuua

SEQ ID NO: 945627 - RNA, 19 nt, Artificial Sequence
  Description of Artificial Sequence: Synthetic oligonucleotide
  Antisense strand to SEQ ID NO: 945626
uaaauagggacaaggcuau

SEQ ID NO: 945628 - RNA, 19 nt, Artificial Sequence
  Description of Artificial Sequence: Synthetic oligonucleotide
  Sense strand starting at position 3391 of SEQ ID NO: 913681
ccagaaaucucauuaggca

SEQ ID NO: 945629 - RNA, 19 nt, Artificial Sequence
  Description of Artificial Sequence: Synthetic oligonucleotide
  Antisense strand to SEQ ID NO: 945628
ugccuaaugagauuucugg

SEQ ID NO: 945630 - RNA, 19 nt, Artificial Sequence
  Description of Artificial Sequence: Synthetic oligonucleotide
  Sense strand starting at position 2101 of SEQ ID NO: 913681
agcuuucgggaguaaagau

SEQ ID NO: 945631 - RNA, 19 nt, Artificial Sequence
  Description of Artificial Sequence: Synthetic oligonucleotide
  Antisense strand to SEQ ID NO: 945630
aucuuuacucccgaaagcu

SEQ ID NO: 945632 - RNA, 19 nt, Artificial Sequence
  Description of Artificial Sequence: Synthetic oligonucleotide
  Sense strand starting at position 3650 of SEQ ID NO: 913681
acauguaugcaucaucuga

SEQ ID NO: 945633 - RNA, 19 nt, Artificial Sequence
  Description of Artificial Sequence: Synthetic oligonucleotide
  Antisense strand to SEQ ID NO: 945632
ucagaugaugcauacaugu

SEQ ID NO: 945634 - RNA, 19 nt, Artificial Sequence
  Description of Artificial Sequence: Synthetic oligonucleotide
  Sense strand starting at position 123 of SEQ ID NO: 913681
acuccugaaccugguauua

SEQ ID NO: 945635 - RNA, 19 nt, Artificial Sequence
  Description of Artificial Sequence: Synthetic oligonucleotide
  Antisense strand to SEQ ID NO: 945634
uaauaccagguucaggagu

SEQ ID NO: 945636 - RNA, 19 nt, Artificial Sequence
  Description of Artificial Sequence: Synthetic oligonucleotide
  Sense strand starting at position 87 of SEQ ID NO: 913681
gcucaaauagcugaguuga

SEQ ID NO: 945637 - RNA, 19 nt, Artificial Sequence
  Description of Artificial Sequence: Synthetic oligonucleotide
  Antisense strand to SEQ ID NO: 945636
ucaacucagcuauuugagc

SEQ ID NO: 945638 - RNA, 19 nt, Artificial Sequence
  Description of Artificial Sequence: Synthetic oligonucleotide
  Sense strand starting at position 3652 of SEQ ID NO: 913681
auguaugcaucaucugaaa

SEQ ID NO: 945639 - RNA, 19 nt, Artificial Sequence
  Description of Artificial Sequence: Synthetic oligonucleotide
  Antisense strand to SEQ ID NO: 945638
uuucagaugaugcauacau

SEQ ID NO: 945640 - RNA, 19 nt, Artificial Sequence
  Description of Artificial Sequence: Synthetic oligonucleotide
  Sense strand starting at position 89 of SEQ ID NO: 913681
ucaaauagcugaguugauu

SEQ ID NO: 945641 - RNA, 19 nt, Artificial Sequence
  Description of Artificial Sequence: Synthetic oligonucleotide
  Antisense strand to SEQ ID NO: 945640
aaucaacucagcuauuuga

SEQ ID NO: 945642 - RNA, 19 nt, Artificial Sequence
  Description of Artificial Sequence: Synthetic oligonucleotide
  Sense strand starting at position 2098 of SEQ ID NO: 913681
gugagcuuucgggaguaaa

SEQ ID NO: 945643 - RNA, 19 nt, Artificial Sequence
  Description of Artificial Sequence: Synthetic oligonucleotide
  Antisense strand to SEQ ID NO: 945642
uuuacucccgaaagcucac

SEQ ID NO: 945644 - RNA, 19 nt, Artificial Sequence
  Description of Artificial Sequence: Synthetic oligonucleotide
  Sense strand starting at position 270 of SEQ ID NO: 913681
auacguugccuugaauuau

SEQ ID NO: 945645 - RNA, 19 nt, Artificial Sequence
  Description of Artificial Sequence: Synthetic oligonucleotide
  Antisense strand to SEQ ID NO: 945644
auaauucaaggcaacguau

SEQ ID NO: 945646 - RNA, 19 nt, Artificial Sequence
  Description of Artificial Sequence: Synthetic oligonucleotide
  Sense strand starting at position 3333 of SEQ ID NO: 913681
guaagcuacggccagaauu

SEQ ID NO: 945647 - RNA, 19 nt, Artificial Sequence
  Description of Artificial Sequence: Synthetic oligonucleotide
  Antisense strand to SEQ ID NO: 945646
aauucuggccguagcuuac

SEQ ID NO: 945648 - RNA, 19 nt, Artificial Sequence
  Description of Artificial Sequence: Synthetic oligonucleotide
  Sense strand starting at position 3711 of SEQ ID NO: 913681
ccaaguguucccugauauu

SEQ ID NO: 945649 - RNA, 19 nt, Artificial Sequence
  Description of Artificial Sequence: Synthetic oligonucleotide
  Antisense strand to SEQ ID NO: 945648
aauaucagggaacacuugg

SEQ ID NO: 945650 - RNA, 19 nt, Artificial Sequence
  Description of Artificial Sequence: Synthetic oligonucleotide
  Sense strand starting at position 3646 of SEQ ID NO: 913681
gcauacauguaugcaucau

SEQ ID NO: 945651 - RNA, 19 nt, Artificial Sequence
  Description of Artificial Sequence: Synthetic oligonucleotide
  Antisense strand to SEQ ID NO: 945650
augaugcauacauguaugc

SEQ ID NO: 945652 - RNA, 19 nt, Artificial Sequence
  Description of Artificial Sequence: Synthetic oligonucleotide
  Sense strand starting at position 3714 of SEQ ID NO: 913681
aguguucccugauauuuga

SEQ ID NO: 945653 - RNA, 19 nt, Artificial Sequence
  Description of Artificial Sequence: Synthetic oligonucleotide
  Antisense strand to SEQ ID NO: 945652
ucaaauaucagggaacacu

SEQ ID NO: 945654 - RNA, 19 nt, Artificial Sequence
  Description of Artificial Sequence: Synthetic oligonucleotide
  Sense strand starting at position 3721 of SEQ ID NO: 913681
ccugauauuugaggguacu

SEQ ID NO: 945655 - RNA, 19 nt, Artificial Sequence
  Description of Artificial Sequence: Synthetic oligonucleotide
  Antisense strand to SEQ ID NO: 945654
aguacccucaaauaucagg

SEQ ID NO: 945656 - RNA, 19 nt, Artificial Sequence
  Description of Artificial Sequence: Synthetic oligonucleotide
  Sense strand starting at position 128 of SEQ ID NO: 913681
ugaaccugguauuaaugau

SEQ ID NO: 945657 - RNA, 19 nt, Artificial Sequence
  Description of Artificial Sequence: Synthetic oligonucleotide
  Antisense strand to SEQ ID NO: 945656
aucauuaauaccagguuca

SEQ ID NO: 945658 - RNA, 19 nt, Artificial Sequence
  Description of Artificial Sequence: Synthetic oligonucleotide
  Sense strand starting at position 125 of SEQ ID NO: 913681
uccugaaccugguauuaau

SEQ ID NO: 945659 - RNA, 19 nt, Artificial Sequence
  Description of Artificial Sequence: Synthetic oligonucleotide
  Antisense strand to SEQ ID NO: 945658
auuaauaccagguucagga

SEQ ID NO: 945660 - RNA, 19 nt, Artificial Sequence
  Description of Artificial Sequence: Synthetic oligonucleotide
  Sense strand starting at position 2110 of SEQ ID NO: 913681
gaguaaagaugaggcuaau

SEQ ID NO: 945661 - RNA, 19 nt, Artificial Sequence
  Description of Artificial Sequence: Synthetic oligonucleotide
  Antisense strand to SEQ ID NO: 945660
auuagccucaucuuuacuc

SEQ ID NO: 945662 - RNA, 19 nt, Artificial Sequence
  Description of Artificial Sequence: Synthetic oligonucleotide
  Sense strand starting at position 360 of SEQ ID NO: 913681
augagcccaugugauaauu

SEQ ID NO: 945663 - RNA, 19 nt, Artificial Sequence
  Description of Artificial Sequence: Synthetic oligonucleotide
  Antisense strand to SEQ ID NO: 945662
aauuaucacaugggcucau

SEQ ID NO: 945664 - RNA, 19 nt, Artificial Sequence
  Description of Artificial Sequence: Synthetic oligonucleotide
  Sense strand starting at position 116 of SEQ ID NO: 913681
agugcaaacuccugaaccu

SEQ ID NO: 945665 - RNA, 19 nt, Artificial Sequence
  Description of Artificial Sequence: Synthetic oligonucleotide
  Antisense strand to SEQ ID NO: 945664
agguucaggaguuugcacu

SEQ ID NO: 945666 - RNA, 19 nt, Artificial Sequence
  Description of Artificial Sequence: Synthetic oligonucleotide
  Sense strand starting at position 2096 of SEQ ID NO: 913681
aagugagcuuucgggagua

SEQ ID NO: 945667 - RNA, 19 nt, Artificial Sequence
  Description of Artificial Sequence: Synthetic oligonucleotide
  Antisense strand to SEQ ID NO: 945666
uacucccgaaagcucacuu

SEQ ID NO: 945668 - RNA, 19 nt, Artificial Sequence
  Description of Artificial Sequence: Synthetic oligonucleotide
  Sense strand starting at position 1683 of SEQ ID NO: 913682
aggugaucuccucaccuga

SEQ ID NO: 945669 - RNA, 19 nt, Artificial Sequence
  Description of Artificial Sequence: Synthetic oligonucleotide
  Antisense strand to SEQ ID NO: 945668
ucaggugaggagaucaccu

SEQ ID NO: 945670 - RNA, 19 nt, Artificial Sequence
  Description of Artificial Sequence: Synthetic oligonucleotide
  Sense strand starting at position 199 of SEQ ID NO: 913682
gcuguagaaggcguuguua

SEQ ID NO: 945671 - RNA, 19 nt, Artificial Sequence
  Description of Artificial Sequence: Synthetic oligonucleotide
  Antisense strand to SEQ ID NO: 945670
uaacaacgccuucuacagc

SEQ ID NO: 945672 - RNA, 19 nt, Artificial Sequence
  Description of Artificial Sequence: Synthetic oligonucleotide
  Sense strand starting at position 956 of SEQ ID NO: 913682
uaagguuauagcgauggaa

SEQ ID NO: 945673 - RNA, 19 nt, Artificial Sequence
  Description of Artificial Sequence: Synthetic oligonucleotide
  Antisense strand to SEQ ID NO: 945672
uuccaucgcuauaaccuua

SEQ ID NO: 945674 - RNA, 19 nt, Artificial Sequence
  Description of Artificial Sequence: Synthetic oligonucleotide
  Sense strand starting at position 467 of SEQ ID NO: 913682
cagucugaauucccagaga

SEQ ID NO: 945675 - RNA, 19 nt, Artificial Sequence
  Description of Artificial Sequence: Synthetic oligonucleotide
  Antisense strand to SEQ ID NO: 945674
ucucugggaauucagacug

SEQ ID NO: 945676 - RNA, 19 nt, Artificial Sequence
  Description of Artificial Sequence: Synthetic oligonucleotide
  Sense strand starting at position 135 of SEQ ID NO: 913682
gggaguuguguggauugag

SEQ ID NO: 945677 - RNA, 19 nt, Artificial Sequence
  Description of Artificial Sequence: Synthetic oligonucleotide
  Antisense strand to SEQ ID NO: 945676
cucaauccacacaacuccc

SEQ ID NO: 945678 - RNA, 19 nt, Artificial Sequence
  Description of Artificial Sequence: Synthetic oligonucleotide
  Sense strand starting at position 3645 of SEQ ID NO: 913682
ccugucaaucuacaauagu

SEQ ID NO: 945679 - RNA, 19 nt, Artificial Sequence
  Description of Artificial Sequence: Synthetic oligonucleotide
  Antisense strand to SEQ ID NO: 945678
acuauuguagauugacagg

SEQ ID NO: 945680 - RNA, 19 nt, Artificial Sequence
  Description of Artificial Sequence: Synthetic oligonucleotide
  Sense strand starting at position 960 of SEQ ID NO: 913682
guuauagcgauggaauuac

SEQ ID NO: 945681 - RNA, 19 nt, Artificial Sequence
  Description of Artificial Sequence: Synthetic oligonucleotide
  Antisense strand to SEQ ID NO: 945680
guaauuccaucgcuauaac

SEQ ID NO: 945682 - RNA, 19 nt, Artificial Sequence
  Description of Artificial Sequence: Synthetic oligonucleotide
  Sense strand starting at position 1515 of SEQ ID NO: 913682
ccuggaguuccuggaauac

SEQ ID NO: 945683 - RNA, 19 nt, Artificial Sequence
  Description of Artificial Sequence: Synthetic oligonucleotide
  Antisense strand to SEQ ID NO: 945682
guauuccaggaacuccagg

SEQ ID NO: 945684 - RNA, 19 nt, Artificial Sequence
  Description of Artificial Sequence: Synthetic oligonucleotide
  Sense strand starting at position 3599 of SEQ ID NO: 913682
gcaccuagcccucacagaa

SEQ ID NO: 945685 - RNA, 19 nt, Artificial Sequence
  Description of Artificial Sequence: Synthetic oligonucleotide
  Antisense strand to SEQ ID NO: 945684
uucugugagggcuaggugc

SEQ ID NO: 945686 - RNA, 19 nt, Artificial Sequence
  Description of Artificial Sequence: Synthetic oligonucleotide
  Sense strand starting at position 3611 of SEQ ID NO: 913682
cacagaagucuuuggaggu

SEQ ID NO: 945687 - RNA, 19 nt, Artificial Sequence
  Description of Artificial Sequence: Synthetic oligonucleotide
  Antisense strand to SEQ ID NO: 945686
accuccaaagacuucugug

SEQ ID NO: 945688 - RNA, 19 nt, Artificial Sequence
  Description of Artificial Sequence: Synthetic oligonucleotide
  Sense strand starting at position 304 of SEQ ID NO: 913682
ggagcuuagagagguguaa

SEQ ID NO: 945689 - RNA, 19 nt, Artificial Sequence
  Description of Artificial Sequence: Synthetic oligonucleotide
  Antisense strand to SEQ ID NO: 945688
uuacaccucucuaagcucc

SEQ ID NO: 945690 - RNA, 19 nt, Artificial Sequence
  Description of Artificial Sequence: Synthetic oligonucleotide
  Sense strand starting at position 1801 of SEQ ID NO: 913682
auaugauagugggugcaaa

SEQ ID NO: 945691 - RNA, 19 nt, Artificial Sequence
  Description of Artificial Sequence: Synthetic oligonucleotide
  Antisense strand to SEQ ID NO: 945690
uuugcacccacuaucauau

SEQ ID NO: 945692 - RNA, 19 nt, Artificial Sequence
  Description of Artificial Sequence: Synthetic oligonucleotide
  Sense strand starting at position 3354 of SEQ ID NO: 913682
cuaugucuggcccagacau

SEQ ID NO: 945693 - RNA, 19 nt, Artificial Sequence
  Description of Artificial Sequence: Synthetic oligonucleotide
  Antisense strand to SEQ ID NO: 945692
augucugggccagacauag

SEQ ID NO: 945694 - RNA, 19 nt, Artificial Sequence
  Description of Artificial Sequence: Synthetic oligonucleotide
  Sense strand starting at position 1875 of SEQ ID NO: 913682
ggcuccucauuacucagaa

SEQ ID NO: 945695 - RNA, 19 nt, Artificial Sequence
  Description of Artificial Sequence: Synthetic oligonucleotide
  Antisense strand to SEQ ID NO: 945694
uucugaguaaugaggagcc

SEQ ID NO: 945696 - RNA, 19 nt, Artificial Sequence
  Description of Artificial Sequence: Synthetic oligonucleotide
  Sense strand starting at position 3718 of SEQ ID NO: 913682
uggccugcucaggaaguaa

SEQ ID NO: 945697 - RNA, 19 nt, Artificial Sequence
  Description of Artificial Sequence: Synthetic oligonucleotide
  Antisense strand to SEQ ID NO: 945696
uuacuuccugagcaggcca

SEQ ID NO: 945698 - RNA, 19 nt, Artificial Sequence
  Description of Artificial Sequence: Synthetic oligonucleotide
  Sense strand starting at position 602 of SEQ ID NO: 913682
cccagauucugcucucaga

SEQ ID NO: 945699 - RNA, 19 nt, Artificial Sequence
  Description of Artificial Sequence: Synthetic oligonucleotide
  Antisense strand to SEQ ID NO: 945698
ucugagagcagaaucuggg

SEQ ID NO: 945700 - RNA, 19 nt, Artificial Sequence
  Description of Artificial Sequence: Synthetic oligonucleotide
  Sense strand starting at position 306 of SEQ ID NO: 913682
agcuuagagagguguaauc

SEQ ID NO: 945701 - RNA, 19 nt, Artificial Sequence
  Description of Artificial Sequence: Synthetic oligonucleotide
  Antisense strand to SEQ ID NO: 945700
gauuacaccucucuaagcu

SEQ ID NO: 945702 - RNA, 19 nt, Artificial Sequence
  Description of Artificial Sequence: Synthetic oligonucleotide
  Sense strand starting at position 959 of SEQ ID NO: 913682
gguuauagcgauggaauua

SEQ ID NO: 945703 - RNA, 19 nt, Artificial Sequence
  Description of Artificial Sequence: Synthetic oligonucleotide
  Antisense strand to SEQ ID NO: 945702
uaauuccaucgcuauaacc

SEQ ID NO: 945704 - RNA, 19 nt, Artificial Sequence
  Description of Artificial Sequence: Synthetic oligonucleotide
  Sense strand starting at position 958 of SEQ ID NO: 913682
agguuauagcgauggaauu

SEQ ID NO: 945705 - RNA, 19 nt, Artificial Sequence
  Description of Artificial Sequence: Synthetic oligonucleotide
  Antisense strand to SEQ ID NO: 945704
aauuccaucgcuauaaccu

SEQ ID NO: 945706 - RNA, 19 nt, Artificial Sequence
  Description of Artificial Sequence: Synthetic oligonucleotide
  Sense strand starting at position 1538 of SEQ ID NO: 913682
gucucaacucuaggucaca

SEQ ID NO: 945707 - RNA, 19 nt, Artificial Sequence
  Description of Artificial Sequence: Synthetic oligonucleotide
  Antisense strand to SEQ ID NO: 945706
ugugaccuagaguugagac

SEQ ID NO: 945708 - RNA, 19 nt, Artificial Sequence
  Description of Artificial Sequence: Synthetic oligonucleotide
  Sense strand starting at position 413 of SEQ ID NO: 913682
ccaggcuauuguucccaaa

SEQ ID NO: 945709 - RNA, 19 nt, Artificial Sequence
  Description of Artificial Sequence: Synthetic oligonucleotide
  Antisense strand to SEQ ID NO: 945708
uuugggaacaauagccugg

SEQ ID NO: 945710 - RNA, 19 nt, Artificial Sequence
  Description of Artificial Sequence: Synthetic oligonucleotide
  Sense strand starting at position 316 of SEQ ID NO: 913682
gguguaaucagaugcccag

SEQ ID NO: 945711 - RNA, 19 nt, Artificial Sequence
  Description of Artificial Sequence: Synthetic oligonucleotide
  Antisense strand to SEQ ID NO: 945710
cugggcaucugauuacacc

SEQ ID NO: 945712 - RNA, 19 nt, Artificial Sequence
  Description of Artificial Sequence: Synthetic oligonucleotide
  Sense strand starting at position 3038 of SEQ ID NO: 913682
gggcaaugaugguuuaguu

SEQ ID NO: 945713 - RNA, 19 nt, Artificial Sequence
  Description of Artificial Sequence: Synthetic oligonucleotide
  Antisense strand to SEQ ID NO: 945712
aacuaaaccaucauugccc

SEQ ID NO: 945714 - RNA, 19 nt, Artificial Sequence
  Description of Artificial Sequence: Synthetic oligonucleotide
  Sense strand starting at position 1685 of SEQ ID NO: 913682
gugaucuccucaccugagu

SEQ ID NO: 945715 - RNA, 19 nt, Artificial Sequence
  Description of Artificial Sequence: Synthetic oligonucleotide
  Antisense strand to SEQ ID NO: 945714
acucaggugaggagaucac

SEQ ID NO: 945716 - RNA, 19 nt, Artificial Sequence
  Description of Artificial Sequence: Synthetic oligonucleotide
  Sense strand starting at position 138 of SEQ ID NO: 913682
aguuguguggauugaguaa

SEQ ID NO: 945717 - RNA, 19 nt, Artificial Sequence
  Description of Artificial Sequence: Synthetic oligonucleotide
  Antisense strand to SEQ ID NO: 945716
uuacucaauccacacaacu

SEQ ID NO: 945718 - RNA, 19 nt, Artificial Sequence
  Description of Artificial Sequence: Synthetic oligonucleotide
  Sense strand starting at position 628 of SEQ ID NO: 913682
ccuccugugguaugacauu

SEQ ID NO: 945719 - RNA, 19 nt, Artificial Sequence
  Description of Artificial Sequence: Synthetic oligonucleotide
  Antisense strand to SEQ ID NO: 945718
aaugucauaccacaggagg

SEQ ID NO: 945720 - RNA, 19 nt, Artificial Sequence
  Description of Artificial Sequence: Synthetic oligonucleotide
  Sense strand starting at position 3731 of SEQ ID NO: 913682
aaguaaggaugguaaagaa

SEQ ID NO: 945721 - RNA, 19 nt, Artificial Sequence
  Description of Artificial Sequence: Synthetic oligonucleotide
  Antisense strand to SEQ ID NO: 945720
uucuuuaccauccuuacuu

SEQ ID NO: 945722 - RNA, 19 nt, Artificial Sequence
  Description of Artificial Sequence: Synthetic oligonucleotide
  Sense strand starting at position 927 of SEQ ID NO: 913682
ggaggaucaucagaauagu

SEQ ID NO: 945723 - RNA, 19 nt, Artificial Sequence
  Description of Artificial Sequence: Synthetic oligonucleotide
  Antisense strand to SEQ ID NO: 945722
acuauucugaugauccucc

SEQ ID NO: 945724 - RNA, 19 nt, Artificial Sequence
  Description of Artificial Sequence: Synthetic oligonucleotide
  Sense strand starting at position 201 of SEQ ID NO: 913682
uguagaaggcguuguuaaa

SEQ ID NO: 945725 - RNA, 19 nt, Artificial Sequence
  Description of Artificial Sequence: Synthetic oligonucleotide
  Antisense strand to SEQ ID NO: 945724
uuuaacaacgccuucuaca

SEQ ID NO: 945726 - RNA, 19 nt, Artificial Sequence
  Description of Artificial Sequence: Synthetic oligonucleotide
  Sense strand starting at position 3564 of SEQ ID NO: 913682
ccagcuguuuacuugaguu

SEQ ID NO: 945727 - RNA, 19 nt, Artificial Sequence
  Description of Artificial Sequence: Synthetic oligonucleotide
  Antisense strand to SEQ ID NO: 945726
aacucaaguaaacagcugg

SEQ ID NO: 945728 - RNA, 19 nt, Artificial Sequence
  Description of Artificial Sequence: Synthetic oligonucleotide
  Sense strand starting at position 340 of SEQ ID NO: 913682
gguggcugcuauucuaagu

SEQ ID NO: 945729 - RNA, 19 nt, Artificial Sequence
  Description of Artificial Sequence: Synthetic oligonucleotide
  Antisense strand to SEQ ID NO: 945728
acuuagaauagcagccacc

SEQ ID NO: 945730 - RNA, 19 nt, Artificial Sequence
  Description of Artificial Sequence: Synthetic oligonucleotide
  Sense strand starting at position 745 of SEQ ID NO: 913682
agccuaguguggucaaguu

SEQ ID NO: 945731 - RNA, 19 nt, Artificial Sequence
  Description of Artificial Sequence: Synthetic oligonucleotide
  Antisense strand to SEQ ID NO: 945730
aacuugaccacacuaggcu

SEQ ID NO: 945732 - RNA, 19 nt, Artificial Sequence
  Description of Artificial Sequence: Synthetic oligonucleotide
  Sense strand starting at position 734 of SEQ ID NO: 913682
ugcauauuguuagccuagu

SEQ ID NO: 945733 - RNA, 19 nt, Artificial Sequence
  Description of Artificial Sequence: Synthetic oligonucleotide
  Antisense strand to SEQ ID NO: 945732
acuaggcuaacaauaugca

SEQ ID NO: 945734 - RNA, 19 nt, Artificial Sequence
  Description of Artificial Sequence: Synthetic oligonucleotide
  Sense strand starting at position 3563 of SEQ ID NO: 913682
gccagcuguuuacuugagu

SEQ ID NO: 945735 - RNA, 19 nt, Artificial Sequence
  Description of Artificial Sequence: Synthetic oligonucleotide
  Antisense strand to SEQ ID NO: 945734
acucaaguaaacagcuggc

SEQ ID NO: 945736 - RNA, 19 nt, Artificial Sequence
  Description of Artificial Sequence: Synthetic oligonucleotide
  Sense strand starting at position 3548 of SEQ ID NO: 913682
cccgguguuuccucagcca

SEQ ID NO: 945737 - RNA, 19 nt, Artificial Sequence
  Description of Artificial Sequence: Synthetic oligonucleotide
  Antisense strand to SEQ ID NO: 945736
uggcugaggaaacaccggg

SEQ ID NO: 945738 - RNA, 19 nt, Artificial Sequence
  Description of Artificial Sequence: Synthetic oligonucleotide
  Sense strand starting at position 808 of SEQ ID NO: 913682
gccuccugaugagaucaca

SEQ ID NO: 945739 - RNA, 19 nt, Artificial Sequence
  Description of Artificial Sequence: Synthetic oligonucleotide
  Antisense strand to SEQ ID NO: 945738
ugugaucucaucaggaggc

SEQ ID NO: 945740 - RNA, 19 nt, Artificial Sequence
  Description of Artificial Sequence: Synthetic oligonucleotide
  Sense strand starting at position 605 of SEQ ID NO: 913682
agauucugcucucagagua

SEQ ID NO: 945741 - RNA, 19 nt, Artificial Sequence
  Description of Artificial Sequence: Synthetic oligonucleotide
  Antisense strand to SEQ ID NO: 945740
uacucugagagcagaaucu

SEQ ID NO: 945742 - RNA, 19 nt, Artificial Sequence
  Description of Artificial Sequence: Synthetic oligonucleotide
  Sense strand starting at position 3612 of SEQ ID NO: 913682
acagaagucuuuggagguu

SEQ ID NO: 945743 - RNA, 19 nt, Artificial Sequence
  Description of Artificial Sequence: Synthetic oligonucleotide
  Antisense strand to SEQ ID NO: 945742
aaccuccaaagacuucugu

SEQ ID NO: 945744 - RNA, 19 nt, Artificial Sequence
  Description of Artificial Sequence: Synthetic oligonucleotide
  Sense strand starting at position 944 of SEQ ID NO: 913682
guagcaaccucauaagguu

SEQ ID NO: 945745 - RNA, 19 nt, Artificial Sequence
  Description of Artificial Sequence: Synthetic oligonucleotide
  Antisense strand to SEQ ID NO: 945744
aaccuuaugagguugcuac

SEQ ID NO: 945746 - RNA, 19 nt, Artificial Sequence
  Description of Artificial Sequence: Synthetic oligonucleotide
  Sense strand starting at position 952 of SEQ ID NO: 913682
cucauaagguuauagcgau

SEQ ID NO: 945747 - RNA, 19 nt, Artificial Sequence
  Description of Artificial Sequence: Synthetic oligonucleotide
  Antisense strand to SEQ ID NO: 945746
aucgcuauaaccuuaugag

SEQ ID NO: 945748 - RNA, 19 nt, Artificial Sequence
  Description of Artificial Sequence: Synthetic oligonucleotide
  Sense strand starting at position 3601 of SEQ ID NO: 913683
uuugauaauuaggugagau

SEQ ID NO: 945749 - RNA, 19 nt, Artificial Sequence
  Description of Artificial Sequence: Synthetic oligonucleotide
  Antisense strand to SEQ ID NO: 945748
aucucaccuaauuaucaaa

SEQ ID NO: 945750 - RNA, 19 nt, Artificial Sequence
  Description of Artificial Sequence: Synthetic oligonucleotide
  Sense strand starting at position 1966 of SEQ ID NO: 913683
ggucacuuccaacagguaa

SEQ ID NO: 945751 - RNA, 19 nt, Artificial Sequence
  Description of Artificial Sequence: Synthetic oligonucleotide
  Antisense strand to SEQ ID NO: 945750
uuaccuguuggaagugacc

SEQ ID NO: 945752 - RNA, 19 nt, Artificial Sequence
  Description of Artificial Sequence: Synthetic oligonucleotide
  Sense strand starting at position 450 of SEQ ID NO: 913683
gcuugaugaccgagcggau

SEQ ID NO: 945753 - RNA, 19 nt, Artificial Sequence
  Description of Artificial Sequence: Synthetic oligonucleotide
  Antisense strand to SEQ ID NO: 945752
auccgcucggucaucaagc

SEQ ID NO: 945754 - RNA, 19 nt, Artificial Sequence
  Description of Artificial Sequence: Synthetic oligonucleotide
  Sense strand starting at position 3598 of SEQ ID NO: 913683
ggcuuugauaauuagguga

SEQ ID NO: 945755 - RNA, 19 nt, Artificial Sequence
  Description of Artificial Sequence: Synthetic oligonucleotide
  Antisense strand to SEQ ID NO: 945754
ucaccuaauuaucaaagcc

SEQ ID NO: 945756 - RNA, 19 nt, Artificial Sequence
  Description of Artificial Sequence: Synthetic oligonucleotide
  Sense strand starting at position 1235 of SEQ ID NO: 913683
gucuugacgcgguuguaga

SEQ ID NO: 945757 - RNA, 19 nt, Artificial Sequence
  Description of Artificial Sequence: Synthetic oligonucleotide
  Antisense strand to SEQ ID NO: 945756
ucuacaaccgcgucaagac

SEQ ID NO: 945758 - RNA, 19 nt, Artificial Sequence
  Description of Artificial Sequence: Synthetic oligonucleotide
  Sense strand starting at position 3375 of SEQ ID NO: 913683
guuucugagacuuggagau

SEQ ID NO: 945759 - RNA, 19 nt, Artificial Sequence
  Description of Artificial Sequence: Synthetic oligonucleotide
  Antisense strand to SEQ ID NO: 945758
aucuccaagucucagaaac

SEQ ID NO: 945760 - RNA, 19 nt, Artificial Sequence
  Description of Artificial Sequence: Synthetic oligonucleotide
  Sense strand starting at position 222 of SEQ ID NO: 913683
ugaaguacuugagcaugaa

SEQ ID NO: 945761 - RNA, 19 nt, Artificial Sequence
  Description of Artificial Sequence: Synthetic oligonucleotide
  Antisense strand to SEQ ID NO: 945760
uucaugcucaaguacuuca

SEQ ID NO: 945762 - RNA, 19 nt, Artificial Sequence
  Description of Artificial Sequence: Synthetic oligonucleotide
  Sense strand starting at position 3561 of SEQ ID NO: 913683
uagagaguugggugaucau

SEQ ID NO: 945763 - RNA, 19 nt, Artificial Sequence
  Description of Artificial Sequence: Synthetic oligonucleotide
  Antisense strand to SEQ ID NO: 945762
augaucacccaacucucua

SEQ ID NO: 945764 - RNA, 19 nt, Artificial Sequence
  Description of Artificial Sequence: Synthetic oligonucleotide
  Sense strand starting at position 1083 of SEQ ID NO: 913683
gcuccaugucgauaaggaa

SEQ ID NO: 945765 - RNA, 19 nt, Artificial Sequence
  Description of Artificial Sequence: Synthetic oligonucleotide
  Antisense strand to SEQ ID NO: 945764
uuccuuaucgacauggagc

SEQ ID NO: 945766 - RNA, 19 nt, Artificial Sequence
  Description of Artificial Sequence: Synthetic oligonucleotide
  Sense strand starting at position 3367 of SEQ ID NO: 913683
gaacgaugguuucugagac

SEQ ID NO: 945767 - RNA, 19 nt, Artificial Sequence
  Description of Artificial Sequence: Synthetic oligonucleotide
  Antisense strand to SEQ ID NO: 945766
gucucagaaaccaucguuc

SEQ ID NO: 945768 - RNA, 19 nt, Artificial Sequence
  Description of Artificial Sequence: Synthetic oligonucleotide
  Sense strand starting at position 3359 of SEQ ID NO: 913683
gguucucagaacgaugguu

SEQ ID NO: 945769 - RNA, 19 nt, Artificial Sequence
  Description of Artificial Sequence: Synthetic oligonucleotide
  Antisense strand to SEQ ID NO: 945768
aaccaucguucugagaacc

SEQ ID NO: 945770 - RNA, 19 nt, Artificial Sequence
  Description of Artificial Sequence: Synthetic oligonucleotide
  Sense strand starting at position 1174 of SEQ ID NO: 913683
gcgcucguccuggcugaaa

SEQ ID NO: 945771 - RNA, 19 nt, Artificial Sequence
  Description of Artificial Sequence: Synthetic oligonucleotide
  Antisense strand to SEQ ID NO: 945770
uuucagccaggacgagcgc

SEQ ID NO: 945772 - RNA, 19 nt, Artificial Sequence
  Description of Artificial Sequence: Synthetic oligonucleotide
  Sense strand starting at position 1824 of SEQ ID NO: 913683
ugaacugauugggcaugua

SEQ ID NO: 945773 - RNA, 19 nt, Artificial Sequence
  Description of Artificial Sequence: Synthetic oligonucleotide
  Antisense strand to SEQ ID NO: 945772
uacaugcccaaucaguuca

SEQ ID NO: 945774 - RNA, 19 nt, Artificial Sequence
  Description of Artificial Sequence: Synthetic oligonucleotide
  Sense strand starting at position 1821 of SEQ ID NO: 913683
gguugaacugauugggcau

SEQ ID NO: 945775 - RNA, 19 nt, Artificial Sequence
  Description of Artificial Sequence: Synthetic oligonucleotide
  Antisense strand to SEQ ID NO: 945774
augcccaaucaguucaacc

SEQ ID NO: 945776 - RNA, 19 nt, Artificial Sequence
  Description of Artificial Sequence: Synthetic oligonucleotide
  Sense strand starting at position 2449 of SEQ ID NO: 913683
cgcggugcgcagucaagau

SEQ ID NO: 945777 - RNA, 19 nt, Artificial Sequence
  Description of Artificial Sequence: Synthetic oligonucleotide
  Antisense strand to SEQ ID NO: 945776
aucuugacugcgcaccgcg

SEQ ID NO: 945778 - RNA, 19 nt, Artificial Sequence
  Description of Artificial Sequence: Synthetic oligonucleotide
  Sense strand starting at position 1695 of SEQ ID NO: 913683
uguaguccucuaggcagau

SEQ ID NO: 945779 - RNA, 19 nt, Artificial Sequence
  Description of Artificial Sequence: Synthetic oligonucleotide
  Antisense strand to SEQ ID NO: 945778
aucugccuagaggacuaca

SEQ ID NO: 945780 - RNA, 19 nt, Artificial Sequence
  Description of Artificial Sequence: Synthetic oligonucleotide
  Sense strand starting at position 3221 of SEQ ID NO: 913683
cgcaaaugugggugaucug

SEQ ID NO: 945781 - RNA, 19 nt, Artificial Sequence
  Description of Artificial Sequence: Synthetic oligonucleotide
  Antisense strand to SEQ ID NO: 945780
cagaucacccacauuugcg

SEQ ID NO: 945782 - RNA, 19 nt, Artificial Sequence
  Description of Artificial Sequence: Synthetic oligonucleotide
  Sense strand starting at position 3220 of SEQ ID NO: 913683
ccgcaaaugugggugaucu

SEQ ID NO: 945783 - RNA, 19 nt, Artificial Sequence
  Description of Artificial Sequence: Synthetic oligonucleotide
  Antisense strand to SEQ ID NO: 945782
agaucacccacauuugcgg

SEQ ID NO: 945784 - RNA, 19 nt, Artificial Sequence
  Description of Artificial Sequence: Synthetic oligonucleotide
  Sense strand starting at position 3695 of SEQ ID NO: 913683
ccucgaaacuuauaaauag

SEQ ID NO: 945785 - RNA, 19 nt, Artificial Sequence
  Description of Artificial Sequence: Synthetic oligonucleotide
  Antisense strand to SEQ ID NO: 945784
cuauuuauaaguuucgagg

SEQ ID NO: 945786 - RNA, 19 nt, Artificial Sequence
  Description of Artificial Sequence: Synthetic oligonucleotide
  Sense strand starting at position 1707 of SEQ ID NO: 913683
ggcagaugggcguguacau

SEQ ID NO: 945787 - RNA, 19 nt, Artificial Sequence
  Description of Artificial Sequence: Synthetic oligonucleotide
  Antisense strand to SEQ ID NO: 945786
auguacacgcccaucugcc

SEQ ID NO: 945788 - RNA, 19 nt, Artificial Sequence
  Description of Artificial Sequence: Synthetic oligonucleotide
  Sense strand starting at position 3377 of SEQ ID NO: 913683
uucugagacuuggagaugu

SEQ ID NO: 945789 - RNA, 19 nt, Artificial Sequence
  Description of Artificial Sequence: Synthetic oligonucleotide
  Antisense strand to SEQ ID NO: 945788
acaucuccaagucucagaa

SEQ ID NO: 945790 - RNA, 19 nt, Artificial Sequence
  Description of Artificial Sequence: Synthetic oligonucleotide
  Sense strand starting at position 3570 of SEQ ID NO: 913683
gggugaucauagcacagau

SEQ ID NO: 945791 - RNA, 19 nt, Artificial Sequence
  Description of Artificial Sequence: Synthetic oligonucleotide
  Antisense strand to SEQ ID NO: 945790
aucugugcuaugaucaccc

SEQ ID NO: 945792 - RNA, 19 nt, Artificial Sequence
  Description of Artificial Sequence: Synthetic oligonucleotide
  Sense strand starting at position 3068 of SEQ ID NO: 913683
gaguguuggccauggcugu

SEQ ID NO: 945793 - RNA, 19 nt, Artificial Sequence
  Description of Artificial Sequence: Synthetic oligonucleotide
  Antisense strand to SEQ ID NO: 945792
acagccauggccaacacuc

SEQ ID NO: 945794 - RNA, 19 nt, Artificial Sequence
  Description of Artificial Sequence: Synthetic oligonucleotide
  Sense strand starting at position 3600 of SEQ ID NO: 913683
cuuugauaauuaggugaga

SEQ ID NO: 945795 - RNA, 19 nt, Artificial Sequence
  Description of Artificial Sequence: Synthetic oligonucleotide
  Antisense strand to SEQ ID NO: 945794
ucucaccuaauuaucaaag

SEQ ID NO: 945796 - RNA, 19 nt, Artificial Sequence
  Description of Artificial Sequence: Synthetic oligonucleotide
  Sense strand starting at position 3641 of SEQ ID NO: 913683
cgccgugcuuucuuaggaa

SEQ ID NO: 945797 - RNA, 19 nt, Artificial Sequence
  Description of Artificial Sequence: Synthetic oligonucleotide
  Antisense strand to SEQ ID NO: 945796
uuccuaagaaagcacggcg

SEQ ID NO: 945798 - RNA, 19 nt, Artificial Sequence
  Description of Artificial Sequence: Synthetic oligonucleotide
  Sense strand starting at position 3038 of SEQ ID NO: 913683
uugguaaccuugggauuga

SEQ ID NO: 945799 - RNA, 19 nt, Artificial Sequence
  Description of Artificial Sequence: Synthetic oligonucleotide
  Antisense strand to SEQ ID NO: 945798
ucaaucccaagguuaccaa

SEQ ID NO: 945800 - RNA, 19 nt, Artificial Sequence
  Description of Artificial Sequence: Synthetic oligonucleotide
  Sense strand starting at position 324 of SEQ ID NO: 913683
gguugugcugcucguagaa

SEQ ID NO: 945801 - RNA, 19 nt, Artificial Sequence
  Description of Artificial Sequence: Synthetic oligonucleotide
  Antisense strand to SEQ ID NO: 945800
uucuacgagcagcacaacc

SEQ ID NO: 945802 - RNA, 19 nt, Artificial Sequence
  Description of Artificial Sequence: Synthetic oligonucleotide
  Sense strand starting at position 1233 of SEQ ID NO: 913683
cugucuugacgcgguugua

SEQ ID NO: 945803 - RNA, 19 nt, Artificial Sequence
  Description of Artificial Sequence: Synthetic oligonucleotide
  Antisense strand to SEQ ID NO: 945802
uacaaccgcgucaagacag

SEQ ID NO: 945804 - RNA, 19 nt, Artificial Sequence
  Description of Artificial Sequence: Synthetic oligonucleotide
  Sense strand starting at position 3368 of SEQ ID NO: 913683
aacgaugguuucugagacu

SEQ ID NO: 945805 - RNA, 19 nt, Artificial Sequence
  Description of Artificial Sequence: Synthetic oligonucleotide
  Antisense strand to SEQ ID NO: 945804
agucucagaaaccaucguu

SEQ ID NO: 945806 - RNA, 19 nt, Artificial Sequence
  Description of Artificial Sequence: Synthetic oligonucleotide
  Sense strand starting at position 1836 of SEQ ID NO: 913683
gcauguagguguaguugua

SEQ ID NO: 945807 - RNA, 19 nt, Artificial Sequence
  Description of Artificial Sequence: Synthetic oligonucleotide
  Antisense strand to SEQ ID NO: 945806
uacaacuacaccuacaugc

SEQ ID NO: 945808 - RNA, 19 nt, Artificial Sequence
  Description of Artificial Sequence: Synthetic oligonucleotide
  Sense strand starting at position 1809 of SEQ ID NO: 913683
cuugcgugucgugguugaa

SEQ ID NO: 945809 - RNA, 19 nt, Artificial Sequence
  Description of Artificial Sequence: Synthetic oligonucleotide
  Antisense strand to SEQ ID NO: 945808
uucaaccacgacacgcaag

SEQ ID NO: 945810 - RNA, 19 nt, Artificial Sequence
  Description of Artificial Sequence: Synthetic oligonucleotide
  Sense strand starting at position 323 of SEQ ID NO: 913683
cgguugugcugcucguaga

SEQ ID NO: 945811 - RNA, 19 nt, Artificial Sequence
  Description of Artificial Sequence: Synthetic oligonucleotide
  Antisense strand to SEQ ID NO: 945810
ucuacgagcagcacaaccg

SEQ ID NO: 945812 - RNA, 19 nt, Artificial Sequence
  Description of Artificial Sequence: Synthetic oligonucleotide
  Sense strand starting at position 326 of SEQ ID NO: 913683
uugugcugcucguagaaga

SEQ ID NO: 945813 - RNA, 19 nt, Artificial Sequence
  Description of Artificial Sequence: Synthetic oligonucleotide
  Antisense strand to SEQ ID NO: 945812
ucuucuacgagcagcacaa

SEQ ID NO: 945814 - RNA, 19 nt, Artificial Sequence
  Description of Artificial Sequence: Synthetic oligonucleotide
  Sense strand starting at position 3378 of SEQ ID NO: 913684
ugaggagucaugggaucca

SEQ ID NO: 945815 - RNA, 19 nt, Artificial Sequence
  Description of Artificial Sequence: Synthetic oligonucleotide
  Antisense strand to SEQ ID NO: 945814
uggaucccaugacuccuca

SEQ ID NO: 945816 - RNA, 19 nt, Artificial Sequence
  Description of Artificial Sequence: Synthetic oligonucleotide
  Sense strand starting at position 3293 of SEQ ID NO: 913684
cugugugcucgagcauaac

SEQ ID NO: 945817 - RNA, 19 nt, Artificial Sequence
  Description of Artificial Sequence: Synthetic oligonucleotide
  Antisense strand to SEQ ID NO: 945816
guuaugcucgagcacacag

SEQ ID NO: 945818 - RNA, 19 nt, Artificial Sequence
  Description of Artificial Sequence: Synthetic oligonucleotide
  Sense strand starting at position 3134 of SEQ ID NO: 913684
uuguguucacaagucguuu

SEQ ID NO: 945819 - RNA, 19 nt, Artificial Sequence
  Description of Artificial Sequence: Synthetic oligonucleotide
  Antisense strand to SEQ ID NO: 945818
aaacgacuugugaacacaa

SEQ ID NO: 945820 - RNA, 19 nt, Artificial Sequence
  Description of Artificial Sequence: Synthetic oligonucleotide
  Sense strand starting at position 756 of SEQ ID NO: 913684
ugugaaauuucguucuaug

SEQ ID NO: 945821 - RNA, 19 nt, Artificial Sequence
  Description of Artificial Sequence: Synthetic oligonucleotide
  Antisense strand to SEQ ID NO: 945820
cauagaacgaaauuucaca

SEQ ID NO: 945822 - RNA, 19 nt, Artificial Sequence
  Description of Artificial Sequence: Synthetic oligonucleotide
  Sense strand starting at position 315 of SEQ ID NO: 913684
accuguugcauggagaaac

SEQ ID NO: 945823 - RNA, 19 nt, Artificial Sequence
  Description of Artificial Sequence: Synthetic oligonucleotide
  Antisense strand to SEQ ID NO: 945822
guuucuccaugcaacaggu

SEQ ID NO: 945824 - RNA, 19 nt, Artificial Sequence
  Description of Artificial Sequence: Synthetic oligonucleotide
  Sense strand starting at position 1215 of SEQ ID NO: 913684
gagacuauuugggcgucuu

SEQ ID NO: 945825 - RNA, 19 nt, Artificial Sequence
  Description of Artificial Sequence: Synthetic oligonucleotide
  Antisense strand to SEQ ID NO: 945824
aagacgcccaaauagucuc

SEQ ID NO: 945826 - RNA, 19 nt, Artificial Sequence
  Description of Artificial Sequence: Synthetic oligonucleotide
  Sense strand starting at position 3946 of SEQ ID NO: 913684
uuuggaucuaauggugaua

SEQ ID NO: 945827 - RNA, 19 nt, Artificial Sequence
  Description of Artificial Sequence: Synthetic oligonucleotide
  Antisense strand to SEQ ID NO: 945826
uaucaccauuagauccaaa

SEQ ID NO: 945828 - RNA, 19 nt, Artificial Sequence
  Description of Artificial Sequence: Synthetic oligonucleotide
  Sense strand starting at position 3942 of SEQ ID NO: 913684
guacuuuggaucuaauggu

SEQ ID NO: 945829 - RNA, 19 nt, Artificial Sequence
  Description of Artificial Sequence: Synthetic oligonucleotide
  Antisense strand to SEQ ID NO: 945828
accauuagauccaaaguac

SEQ ID NO: 945830 - RNA, 19 nt, Artificial Sequence
  Description of Artificial Sequence: Synthetic oligonucleotide
  Sense strand starting at position 2545 of SEQ ID NO: 913684
cagagucggcaggauugau

SEQ ID NO: 945831 - RNA, 19 nt, Artificial Sequence
  Description of Artificial Sequence: Synthetic oligonucleotide
  Antisense strand to SEQ ID NO: 945830
aucaauccugccgacucug

SEQ ID NO: 945832 - RNA, 19 nt, Artificial Sequence
  Description of Artificial Sequence: Synthetic oligonucleotide
  Sense strand starting at position 755 of SEQ ID NO: 913684
gugugaaauuucguucuau

SEQ ID NO: 945833 - RNA, 19 nt, Artificial Sequence
  Description of Artificial Sequence: Synthetic oligonucleotide
  Antisense strand to SEQ ID NO: 945832
auagaacgaaauuucacac

SEQ ID NO: 945834 - RNA, 19 nt, Artificial Sequence
  Description of Artificial Sequence: Synthetic oligonucleotide
  Sense strand starting at position 2820 of SEQ ID NO: 913684
gagauugguucucucugag

SEQ ID NO: 945835 - RNA, 19 nt, Artificial Sequence
  Description of Artificial Sequence: Synthetic oligonucleotide
  Antisense strand to SEQ ID NO: 945834
cucagagagaaccaaucuc

SEQ ID NO: 945836 - RNA, 19 nt, Artificial Sequence
  Description of Artificial Sequence: Synthetic oligonucleotide
  Sense strand starting at position 3123 of SEQ ID NO: 913684
ugucauuuccauuguguuc

SEQ ID NO: 945837 - RNA, 19 nt, Artificial Sequence
  Description of Artificial Sequence: Synthetic oligonucleotide
  Antisense strand to SEQ ID NO: 945836
gaacacaauggaaaugaca

SEQ ID NO: 945838 - RNA, 19 nt, Artificial Sequence
  Description of Artificial Sequence: Synthetic oligonucleotide
  Sense strand starting at position 3936 of SEQ ID NO: 913684
ucuggaguacuuuggaucu

SEQ ID NO: 945839 - RNA, 19 nt, Artificial Sequence
  Description of Artificial Sequence: Synthetic oligonucleotide
  Antisense strand to SEQ ID NO: 945838
agauccaaaguacuccaga

SEQ ID NO: 945840 - RNA, 19 nt, Artificial Sequence
  Description of Artificial Sequence: Synthetic oligonucleotide
  Sense strand starting at position 744 of SEQ ID NO: 913684
aacagacggacgugugaaa

SEQ ID NO: 945841 - RNA, 19 nt, Artificial Sequence
  Description of Artificial Sequence: Synthetic oligonucleotide
  Antisense strand to SEQ ID NO: 945840
uuucacacguccgucuguu

SEQ ID NO: 945842 - RNA, 19 nt, Artificial Sequence
  Description of Artificial Sequence: Synthetic oligonucleotide
  Sense strand starting at position 906 of SEQ ID NO: 913684
ucuguuucccgaggagaag

SEQ ID NO: 945843 - RNA, 19 nt, Artificial Sequence
  Description of Artificial Sequence: Synthetic oligonucleotide
  Antisense strand to SEQ ID NO: 945842
cuucuccucgggaaacaga

SEQ ID NO: 945844 - RNA, 19 nt, Artificial Sequence
  Description of Artificial Sequence: Synthetic oligonucleotide
  Sense strand starting at position 3951 of SEQ ID NO: 913684
aucuaauggugauauuuac

SEQ ID NO: 945845 - RNA, 19 nt, Artificial Sequence
  Description of Artificial Sequence: Synthetic oligonucleotide
  Antisense strand to SEQ ID NO: 945844
guaaauaucaccauuagau

SEQ ID NO: 945846 - RNA, 19 nt, Artificial Sequence
  Description of Artificial Sequence: Synthetic oligonucleotide
  Sense strand starting at position 313 of SEQ ID NO: 913684
uuaccuguugcauggagaa

SEQ ID NO: 945847 - RNA, 19 nt, Artificial Sequence
  Description of Artificial Sequence: Synthetic oligonucleotide
  Antisense strand to SEQ ID NO: 945846
uucuccaugcaacagguaa

SEQ ID NO: 945848 - RNA, 19 nt, Artificial Sequence
  Description of Artificial Sequence: Synthetic oligonucleotide
  Sense strand starting at position 2886 of SEQ ID NO: 913684
aagucagaaucguucugau

SEQ ID NO: 945849 - RNA, 19 nt, Artificial Sequence
  Description of Artificial Sequence: Synthetic oligonucleotide
  Antisense strand to SEQ ID NO: 945848
aucagaacgauucugacuu

SEQ ID NO: 945850 - RNA, 19 nt, Artificial Sequence
  Description of Artificial Sequence: Synthetic oligonucleotide
  Sense strand starting at position 3307 of SEQ ID NO: 913684
auaacugucccuggucaau

SEQ ID NO: 945851 - RNA, 19 nt, Artificial Sequence
  Description of Artificial Sequence: Synthetic oligonucleotide
  Antisense strand to SEQ ID NO: 945850
auugaccagggacaguuau

SEQ ID NO: 945852 - RNA, 19 nt, Artificial Sequence
  Description of Artificial Sequence: Synthetic oligonucleotide
  Sense strand starting at position 3116 of SEQ ID NO: 913684
gagcgccugucauuuccau

SEQ ID NO: 945853 - RNA, 19 nt, Artificial Sequence
  Description of Artificial Sequence: Synthetic oligonucleotide
  Antisense strand to SEQ ID NO: 945852
auggaaaugacaggcgcuc

SEQ ID NO: 945854 - RNA, 19 nt, Artificial Sequence
  Description of Artificial Sequence: Synthetic oligonucleotide
  Sense strand starting at position 2819 of SEQ ID NO: 913684
cgagauugguucucucuga

SEQ ID NO: 945855 - RNA, 19 nt, Artificial Sequence
  Description of Artificial Sequence: Synthetic oligonucleotide
  Antisense strand to SEQ ID NO: 945854
ucagagagaaccaaucucg

SEQ ID NO: 945856 - RNA, 19 nt, Artificial Sequence
  Description of Artificial Sequence: Synthetic oligonucleotide
  Sense strand starting at position 2511 of SEQ ID NO: 913684
ggaaacuucuuggaagaga

SEQ ID NO: 945857 - RNA, 19 nt, Artificial Sequence
  Description of Artificial Sequence: Synthetic oligonucleotide
  Antisense strand to SEQ ID NO: 945856
ucucuuccaagaaguuucc

SEQ ID NO: 945858 - RNA, 19 nt, Artificial Sequence
  Description of Artificial Sequence: Synthetic oligonucleotide
  Sense strand starting at position 2955 of SEQ ID NO: 913684
uugggagcccuuugacagu

SEQ ID NO: 945859 - RNA, 19 nt, Artificial Sequence
  Description of Artificial Sequence: Synthetic oligonucleotide
  Antisense strand to SEQ ID NO: 945858
acugucaaagggcucccaa

SEQ ID NO: 945860 - RNA, 19 nt, Artificial Sequence
  Description of Artificial Sequence: Synthetic oligonucleotide
  Sense strand starting at position 2698 of SEQ ID NO: 913684
gcuuuacaaauccgaguag

SEQ ID NO: 945861 - RNA, 19 nt, Artificial Sequence
  Description of Artificial Sequence: Synthetic oligonucleotide
  Antisense strand to SEQ ID NO: 945860
cuacucggauuuguaaagc

SEQ ID NO: 945862 - RNA, 19 nt, Artificial Sequence
  Description of Artificial Sequence: Synthetic oligonucleotide
  Sense strand starting at position 3487 of SEQ ID NO: 913684
cuaggugaagucuguucca

SEQ ID NO: 945863 - RNA, 19 nt, Artificial Sequence
  Description of Artificial Sequence: Synthetic oligonucleotide
  Antisense strand to SEQ ID NO: 945862
uggaacagacuucaccuag

SEQ ID NO: 945864 - RNA, 19 nt, Artificial Sequence
  Description of Artificial Sequence: Synthetic oligonucleotide
  Sense strand starting at position 2783 of SEQ ID NO: 913684
cagagaaucuucgcgguag

SEQ ID NO: 945865 - RNA, 19 nt, Artificial Sequence
  Description of Artificial Sequence: Synthetic oligonucleotide
  Antisense strand to SEQ ID NO: 945864
cuaccgcgaagauucucug

SEQ ID NO: 945866 - RNA, 19 nt, Artificial Sequence
  Description of Artificial Sequence: Synthetic oligonucleotide
  Sense strand starting at position 3680 of SEQ ID NO: 913684
gaggcugguucuuuguuga

SEQ ID NO: 945867 - RNA, 19 nt, Artificial Sequence
  Description of Artificial Sequence: Synthetic oligonucleotide
  Antisense strand to SEQ ID NO: 945866
ucaacaaagaaccagccuc

SEQ ID NO: 945868 - RNA, 19 nt, Artificial Sequence
  Description of Artificial Sequence: Synthetic oligonucleotide
  Sense strand starting at position 3738 of SEQ ID NO: 913684
gcagucuaggguugcagaa

SEQ ID NO: 945869 - RNA, 19 nt, Artificial Sequence
  Description of Artificial Sequence: Synthetic oligonucleotide
  Antisense strand to SEQ ID NO: 945868
uucugcaacccuagacugc

SEQ ID NO: 945870 - RNA, 19 nt, Artificial Sequence
  Description of Artificial Sequence: Synthetic oligonucleotide
  Sense strand starting at position 3305 of SEQ ID NO: 913684
gcauaacugucccugguca

SEQ ID NO: 945871 - RNA, 19 nt, Artificial Sequence
  Description of Artificial Sequence: Synthetic oligonucleotide
  Antisense strand to SEQ ID NO: 945870
ugaccagggacaguuaugc

SEQ ID NO: 945872 - RNA, 19 nt, Artificial Sequence
  Description of Artificial Sequence: Synthetic oligonucleotide
  Sense strand starting at position 1025 of SEQ ID NO: 913684
cgcagacugucuuucuaga

SEQ ID NO: 945873 - RNA, 19 nt, Artificial Sequence
  Description of Artificial Sequence: Synthetic oligonucleotide
  Antisense strand to SEQ ID NO: 945872
ucuagaaagacagucugcg

SEQ ID NO: 945874 - RNA, 19 nt, Artificial Sequence
  Description of Artificial Sequence: Synthetic oligonucleotide
  Sense strand starting at position 3683 of SEQ ID NO: 913684
gcugguucuuuguugaaau

SEQ ID NO: 945875 - RNA, 19 nt, Artificial Sequence
  Description of Artificial Sequence: Synthetic oligonucleotide
  Antisense strand to SEQ ID NO: 945874
auuucaacaaagaaccagc

SEQ ID NO: 945876 - RNA, 19 nt, Artificial Sequence
  Description of Artificial Sequence: Synthetic oligonucleotide
  Sense strand starting at position 899 of SEQ ID NO: 913684
uccuuuaucuguuucccga

SEQ ID NO: 945877 - RNA, 19 nt, Artificial Sequence
  Description of Artificial Sequence: Synthetic oligonucleotide
  Antisense strand to SEQ ID NO: 945876
ucgggaaacagauaaagga

SEQ ID NO: 945878 - RNA, 19 nt, Artificial Sequence
  Description of Artificial Sequence: Synthetic oligonucleotide
  Sense strand starting at position 759 of SEQ ID NO: 913684
gaaauuucguucuauguga

SEQ ID NO: 945879 - RNA, 19 nt, Artificial Sequence
  Description of Artificial Sequence: Synthetic oligonucleotide
  Antisense strand to SEQ ID NO: 945878
ucacauagaacgaaauuuc

SEQ ID NO: 945880 - RNA, 19 nt, Artificial Sequence
  Description of Artificial Sequence: Synthetic oligonucleotide
  Sense strand starting at position 3231 of SEQ ID NO: 913684
ccucgacccucgcuuagaa

SEQ ID NO: 945881 - RNA, 19 nt, Artificial Sequence
  Description of Artificial Sequence: Synthetic oligonucleotide
  Antisense strand to SEQ ID NO: 945880
uucuaagcgagggucgagg

SEQ ID NO: 945882 - RNA, 19 nt, Artificial Sequence
  Description of Artificial Sequence: Synthetic oligonucleotide
  Sense strand starting at position 2685 of SEQ ID NO: 913684
cuaagcaaucucggcuuua

SEQ ID NO: 945883 - RNA, 19 nt, Artificial Sequence
  Description of Artificial Sequence: Synthetic oligonucleotide
  Antisense strand to SEQ ID NO: 945882
uaaagccgagauugcuuag

SEQ ID NO: 945884 - RNA, 19 nt, Artificial Sequence
  Description of Artificial Sequence: Synthetic oligonucleotide
  Sense strand starting at position 2828 of SEQ ID NO: 913684
uucucucugaggcguauua

SEQ ID NO: 945885 - RNA, 19 nt, Artificial Sequence
  Description of Artificial Sequence: Synthetic oligonucleotide
  Antisense strand to SEQ ID NO: 945884
uaauacgccucagagagaa

SEQ ID NO: 945886 - RNA, 19 nt, Artificial Sequence
  Description of Artificial Sequence: Synthetic oligonucleotide
  Sense strand starting at position 2509 of SEQ ID NO: 913684
auggaaacuucuuggaaga

SEQ ID NO: 945887 - RNA, 19 nt, Artificial Sequence
  Description of Artificial Sequence: Synthetic oligonucleotide
  Antisense strand to SEQ ID NO: 945886
ucuuccaagaaguuuccau

SEQ ID NO: 945888 - RNA, 19 nt, Artificial Sequence
  Description of Artificial Sequence: Synthetic oligonucleotide
  Sense strand starting at position 1227 of SEQ ID NO: 913684
gcgucuucccaggguacaa

SEQ ID NO: 945889 - RNA, 19 nt, Artificial Sequence
  Description of Artificial Sequence: Synthetic oligonucleotide
  Antisense strand to SEQ ID NO: 945888
uuguacccugggaagacgc

SEQ ID NO: 945890 - RNA, 19 nt, Artificial Sequence
  Description of Artificial Sequence: Synthetic oligonucleotide
  Sense strand starting at position 1226 of SEQ ID NO: 913684
ggcgucuucccaggguaca

SEQ ID NO: 945891 - RNA, 19 nt, Artificial Sequence
  Description of Artificial Sequence: Synthetic oligonucleotide
  Antisense strand to SEQ ID NO: 945890
uguacccugggaagacgcc

SEQ ID NO: 945892 - RNA, 19 nt, Artificial Sequence
  Description of Artificial Sequence: Synthetic oligonucleotide
  Sense strand starting at position 3291 of SEQ ID NO: 913684
uccugugugcucgagcaua

SEQ ID NO: 945893 - RNA, 19 nt, Artificial Sequence
  Description of Artificial Sequence: Synthetic oligonucleotide
  Antisense strand to SEQ ID NO: 945892
uaugcucgagcacacagga

SEQ ID NO: 945894 - RNA, 19 nt, Artificial Sequence
  Description of Artificial Sequence: Synthetic oligonucleotide
  Sense strand starting at position 2396 of SEQ ID NO: 913685
guucauuucgaugggcaga

SEQ ID NO: 945895 - RNA, 19 nt, Artificial Sequence
  Description of Artificial Sequence: Synthetic oligonucleotide
  Antisense strand to SEQ ID NO: 945894
ucugcccaucgaaaugaac

SEQ ID NO: 945896 - RNA, 19 nt, Artificial Sequence
  Description of Artificial Sequence: Synthetic oligonucleotide
  Sense strand starting at position 2672 of SEQ ID NO: 913685
gagccuucugcgcucucaa

SEQ ID NO: 945897 - RNA, 19 nt, Artificial Sequence
  Description of Artificial Sequence: Synthetic oligonucleotide
  Antisense strand to SEQ ID NO: 945896
uugagagcgcagaaggcuc

SEQ ID NO: 945898 - RNA, 19 nt, Artificial Sequence
  Description of Artificial Sequence: Synthetic oligonucleotide
  Sense strand starting at position 2298 of SEQ ID NO: 913685
gcgcucuggcccuuuaaau

SEQ ID NO: 945899 - RNA, 19 nt, Artificial Sequence
  Description of Artificial Sequence: Synthetic oligonucleotide
  Antisense strand to SEQ ID NO: 945898
auuuaaagggccagagcgc

SEQ ID NO: 945900 - RNA, 19 nt, Artificial Sequence
  Description of Artificial Sequence: Synthetic oligonucleotide
  Sense strand starting at position 2510 of SEQ ID NO: 913685
gugcgcguuaaauugauca

SEQ ID NO: 945901 - RNA, 19 nt, Artificial Sequence
  Description of Artificial Sequence: Synthetic oligonucleotide
  Antisense strand to SEQ ID NO: 945900
ugaucaauuuaacgcgcac

SEQ ID NO: 945902 - RNA, 19 nt, Artificial Sequence
  Description of Artificial Sequence: Synthetic oligonucleotide
  Sense strand starting at position 2504 of SEQ ID NO: 913685
ggaaacgugcgcguuaaau

SEQ ID NO: 945903 - RNA, 19 nt, Artificial Sequence
  Description of Artificial Sequence: Synthetic oligonucleotide
  Antisense strand to SEQ ID NO: 945902
auuuaacgcgcacguuucc

SEQ ID NO: 945904 - RNA, 19 nt, Artificial Sequence
  Description of Artificial Sequence: Synthetic oligonucleotide
  Sense strand starting at position 3626 of SEQ ID NO: 913685
agauuagugaaauguauug

SEQ ID NO: 945905 - RNA, 19 nt, Artificial Sequence
  Description of Artificial Sequence: Synthetic oligonucleotide
  Antisense strand to SEQ ID NO: 945904
caauacauuucacuaaucu

SEQ ID NO: 945906 - RNA, 19 nt, Artificial Sequence
  Description of Artificial Sequence: Synthetic oligonucleotide
  Sense strand starting at position 202 of SEQ ID NO: 913685
agguaagagaccugucuaa

SEQ ID NO: 945907 - RNA, 19 nt, Artificial Sequence
  Description of Artificial Sequence: Synthetic oligonucleotide
  Antisense strand to SEQ ID NO: 945906
uuagacaggucucuuaccu

SEQ ID NO: 945908 - RNA, 19 nt, Artificial Sequence
  Description of Artificial Sequence: Synthetic oligonucleotide
  Sense strand starting at position 3423 of SEQ ID NO: 913685
uuauuugaauuggagacau

SEQ ID NO: 945909 - RNA, 19 nt, Artificial Sequence
  Description of Artificial Sequence: Synthetic oligonucleotide
  Antisense strand to SEQ ID NO: 945908
augucuccaauucaaauaa

SEQ ID NO: 945910 - RNA, 19 nt, Artificial Sequence
  Description of Artificial Sequence: Synthetic oligonucleotide
  Sense strand starting at position 3671 of SEQ ID NO: 913685
ccuggucucgcguuuggau

SEQ ID NO: 945911 - RNA, 19 nt, Artificial Sequence
  Description of Artificial Sequence: Synthetic oligonucleotide
  Antisense strand to SEQ ID NO: 945910
auccaaacgcgagaccagg

SEQ ID NO: 945912 - RNA, 19 nt, Artificial Sequence
  Description of Artificial Sequence: Synthetic oligonucleotide
  Sense strand starting at position 3853 of SEQ ID NO: 913685
ccaguuaagaggcaucgau

SEQ ID NO: 945913 - RNA, 19 nt, Artificial Sequence
  Description of Artificial Sequence: Synthetic oligonucleotide
  Antisense strand to SEQ ID NO: 945912
aucgaugccucuuaacugg

SEQ ID NO: 945914 - RNA, 19 nt, Artificial Sequence
  Description of Artificial Sequence: Synthetic oligonucleotide
  Sense strand starting at position 3727 of SEQ ID NO: 913685
guuugaaaucagggcugaa

SEQ ID NO: 945915 - RNA, 19 nt, Artificial Sequence
  Description of Artificial Sequence: Synthetic oligonucleotide
  Antisense strand to SEQ ID NO: 945914
uucagcccugauuucaaac

SEQ ID NO: 945916 - RNA, 19 nt, Artificial Sequence
  Description of Artificial Sequence: Synthetic oligonucleotide
  Sense strand starting at position 2297 of SEQ ID NO: 913685
cgcgcucuggcccuuuaaa

SEQ ID NO: 945917 - RNA, 19 nt, Artificial Sequence
  Description of Artificial Sequence: Synthetic oligonucleotide
  Antisense strand to SEQ ID NO: 945916
uuuaaagggccagagcgcg

SEQ ID NO: 945918 - RNA, 19 nt, Artificial Sequence
  Description of Artificial Sequence: Synthetic oligonucleotide
  Sense strand starting at position 3538 of SEQ ID NO: 913685
cuuucaugcggugaaggaa

SEQ ID NO: 945919 - RNA, 19 nt, Artificial Sequence
  Description of Artificial Sequence: Synthetic oligonucleotide
  Antisense strand to SEQ ID NO: 945918
uuccuucaccgcaugaaag

SEQ ID NO: 945920 - RNA, 19 nt, Artificial Sequence
  Description of Artificial Sequence: Synthetic oligonucleotide
  Sense strand starting at position 3512 of SEQ ID NO: 913685
cccugaaaguaaguucuga

SEQ ID NO: 945921 - RNA, 19 nt, Artificial Sequence
  Description of Artificial Sequence: Synthetic oligonucleotide
  Antisense strand to SEQ ID NO: 945920
ucagaacuuacuuucaggg

SEQ ID NO: 945922 - RNA, 19 nt, Artificial Sequence
  Description of Artificial Sequence: Synthetic oligonucleotide
  Sense strand starting at position 2592 of SEQ ID NO: 913685
gggugagucaucggauaaa

SEQ ID NO: 945923 - RNA, 19 nt, Artificial Sequence
  Description of Artificial Sequence: Synthetic oligonucleotide
  Antisense strand to SEQ ID NO: 945922
uuuauccgaugacucaccc

SEQ ID NO: 945924 - RNA, 19 nt, Artificial Sequence
  Description of Artificial Sequence: Synthetic oligonucleotide
  Sense strand starting at position 2590 of SEQ ID NO: 913685
gagggugagucaucggaua

SEQ ID NO: 945925 - RNA, 19 nt, Artificial Sequence
  Description of Artificial Sequence: Synthetic oligonucleotide
  Antisense strand to SEQ ID NO: 945924
uauccgaugacucacccuc

SEQ ID NO: 945926 - RNA, 19 nt, Artificial Sequence
  Description of Artificial Sequence: Synthetic oligonucleotide
  Sense strand starting at position 228 of SEQ ID NO: 913685
aggcacuagcucugggaaa

SEQ ID NO: 945927 - RNA, 19 nt, Artificial Sequence
  Description of Artificial Sequence: Synthetic oligonucleotide
  Antisense strand to SEQ ID NO: 945926
uuucccagagcuagugccu

SEQ ID NO: 945928 - RNA, 19 nt, Artificial Sequence
  Description of Artificial Sequence: Synthetic oligonucleotide
  Sense strand starting at position 2514 of SEQ ID NO: 913685
gcguuaaauugaucagaaa

SEQ ID NO: 945929 - RNA, 19 nt, Artificial Sequence
  Description of Artificial Sequence: Synthetic oligonucleotide
  Antisense strand to SEQ ID NO: 945928
uuucugaucaauuuaacgc

SEQ ID NO: 945930 - RNA, 19 nt, Artificial Sequence
  Description of Artificial Sequence: Synthetic oligonucleotide
  Sense strand starting at position 3716 of SEQ ID NO: 913685
aucugauguuuguuugaaa

SEQ ID NO: 945931 - RNA, 19 nt, Artificial Sequence
  Description of Artificial Sequence: Synthetic oligonucleotide
  Antisense strand to SEQ ID NO: 945930
uuucaaacaaacaucagau

SEQ ID NO: 945932 - RNA, 19 nt, Artificial Sequence
  Description of Artificial Sequence: Synthetic oligonucleotide
  Sense strand starting at position 3714 of SEQ ID NO: 913685
aaaucugauguuuguuuga

SEQ ID NO: 945933 - RNA, 19 nt, Artificial Sequence
  Description of Artificial Sequence: Synthetic oligonucleotide
  Antisense strand to SEQ ID NO: 945932
ucaaacaaacaucagauuu

SEQ ID NO: 945934 - RNA, 19 nt, Artificial Sequence
  Description of Artificial Sequence: Synthetic oligonucleotide
  Sense strand starting at position 3683 of SEQ ID NO: 913685
uuuggaucuucuuuggagu

SEQ ID NO: 945935 - RNA, 19 nt, Artificial Sequence
  Description of Artificial Sequence: Synthetic oligonucleotide
  Antisense strand to SEQ ID NO: 945934
acuccaaagaagauccaaa

SEQ ID NO: 945936 - RNA, 19 nt, Artificial Sequence
  Description of Artificial Sequence: Synthetic oligonucleotide
  Sense strand starting at position 3504 of SEQ ID NO: 913685
gaagccgucccugaaagua

SEQ ID NO: 945937 - RNA, 19 nt, Artificial Sequence
  Description of Artificial Sequence: Synthetic oligonucleotide
  Antisense strand to SEQ ID NO: 945936
uacuuucagggacggcuuc

SEQ ID NO: 945938 - RNA, 19 nt, Artificial Sequence
  Description of Artificial Sequence: Synthetic oligonucleotide
  Sense strand starting at position 2628 of SEQ ID NO: 913685
uggagcguccgcgucaauu

SEQ ID NO: 945939 - RNA, 19 nt, Artificial Sequence
  Description of Artificial Sequence: Synthetic oligonucleotide
  Antisense strand to SEQ ID NO: 945938
aauugacgcggacgcucca

SEQ ID NO: 945940 - RNA, 19 nt, Artificial Sequence
  Description of Artificial Sequence: Synthetic oligonucleotide
  Sense strand starting at position 3717 of SEQ ID NO: 913685
ucugauguuuguuugaaau

SEQ ID NO: 945941 - RNA, 19 nt, Artificial Sequence
  Description of Artificial Sequence: Synthetic oligonucleotide
  Antisense strand to SEQ ID NO: 945940
auuucaaacaaacaucaga

SEQ ID NO: 945942 - RNA, 19 nt, Artificial Sequence
  Description of Artificial Sequence: Synthetic oligonucleotide
  Sense strand starting at position 2444 of SEQ ID NO: 913685
gcacgcauggaucauuauu

SEQ ID NO: 945943 - RNA, 19 nt, Artificial Sequence
  Description of Artificial Sequence: Synthetic oligonucleotide
  Antisense strand to SEQ ID NO: 945942
aauaaugauccaugcgugc

SEQ ID NO: 945944 - RNA, 19 nt, Artificial Sequence
  Description of Artificial Sequence: Synthetic oligonucleotide
  Sense strand starting at position 3966 of SEQ ID NO: 913685
uuaguugcugucuaacauu

SEQ ID NO: 945945 - RNA, 19 nt, Artificial Sequence
  Description of Artificial Sequence: Synthetic oligonucleotide
  Antisense strand to SEQ ID NO: 945944
aauguuagacagcaacuaa

SEQ ID NO: 945946 - RNA, 19 nt, Artificial Sequence
  Description of Artificial Sequence: Synthetic oligonucleotide
  Sense strand starting at position 3633 of SEQ ID NO: 913685
ugaaauguauuggaagaag

SEQ ID NO: 945947 - RNA, 19 nt, Artificial Sequence
  Description of Artificial Sequence: Synthetic oligonucleotide
  Antisense strand to SEQ ID NO: 945946
cuucuuccaauacauuuca

SEQ ID NO: 945948 - RNA, 19 nt, Artificial Sequence
  Description of Artificial Sequence: Synthetic oligonucleotide
  Sense strand starting at position 2465 of SEQ ID NO: 913685
gaucuaaugcaggguguuu

SEQ ID NO: 945949 - RNA, 19 nt, Artificial Sequence
  Description of Artificial Sequence: Synthetic oligonucleotide
  Antisense strand to SEQ ID NO: 945948
aaacacccugcauuagauc

SEQ ID NO: 945950 - RNA, 19 nt, Artificial Sequence
  Description of Artificial Sequence: Synthetic oligonucleotide
  Sense strand starting at position 3537 of SEQ ID NO: 913685
ccuuucaugcggugaagga

SEQ ID NO: 945951 - RNA, 19 nt, Artificial Sequence
  Description of Artificial Sequence: Synthetic oligonucleotide
  Antisense strand to SEQ ID NO: 945950
uccuucaccgcaugaaagg

SEQ ID NO: 945952 - RNA, 19 nt, Artificial Sequence
  Description of Artificial Sequence: Synthetic oligonucleotide
  Sense strand starting at position 3747 of SEQ ID NO: 913685
uuccauauauaggacagaa

SEQ ID NO: 945953 - RNA, 19 nt, Artificial Sequence
  Description of Artificial Sequence: Synthetic oligonucleotide
  Antisense strand to SEQ ID NO: 945952
uucuguccuauauauggaa

SEQ ID NO: 945954 - RNA, 19 nt, Artificial Sequence
  Description of Artificial Sequence: Synthetic oligonucleotide
  Sense strand starting at position 254 of SEQ ID NO: 913685
ggagaagggugugaauaaa

SEQ ID NO: 945955 - RNA, 19 nt, Artificial Sequence
  Description of Artificial Sequence: Synthetic oligonucleotide
  Antisense strand to SEQ ID NO: 945954
uuuauucacacccuucucc

SEQ ID NO: 945956 - RNA, 19 nt, Artificial Sequence
  Description of Artificial Sequence: Synthetic oligonucleotide
  Sense strand starting at position 3503 of SEQ ID NO: 913685
agaagccgucccugaaagu

SEQ ID NO: 945957 - RNA, 19 nt, Artificial Sequence
  Description of Artificial Sequence: Synthetic oligonucleotide
  Antisense strand to SEQ ID NO: 945956
acuuucagggacggcuucu

SEQ ID NO: 945958 - RNA, 19 nt, Artificial Sequence
  Description of Artificial Sequence: Synthetic oligonucleotide
  Sense strand starting at position 2512 of SEQ ID NO: 913685
gcgcguuaaauugaucaga

SEQ ID NO: 945959 - RNA, 19 nt, Artificial Sequence
  Description of Artificial Sequence: Synthetic oligonucleotide
  Antisense strand to SEQ ID NO: 945958
ucugaucaauuuaacgcgc

SEQ ID NO: 945960 - RNA, 19 nt, Artificial Sequence
  Description of Artificial Sequence: Synthetic oligonucleotide
  Sense strand starting at position 2938 of SEQ ID NO: 913685
gcguuucucccacagucaa

SEQ ID NO: 945961 - RNA, 19 nt, Artificial Sequence
  Description of Artificial Sequence: Synthetic oligonucleotide
  Antisense strand to SEQ ID NO: 945960
uugacugugggagaaacgc

SEQ ID NO: 945962 - RNA, 19 nt, Artificial Sequence
  Description of Artificial Sequence: Synthetic oligonucleotide
  Sense strand starting at position 3660 of SEQ ID NO: 913685
acgugaaucuuccuggucu

SEQ ID NO: 945963 - RNA, 19 nt, Artificial Sequence
  Description of Artificial Sequence: Synthetic oligonucleotide
  Antisense strand to SEQ ID NO: 945962
agaccaggaagauucacgu

SEQ ID NO: 945964 - RNA, 19 nt, Artificial Sequence
  Description of Artificial Sequence: Synthetic oligonucleotide
  Sense strand starting at position 3965 of SEQ ID NO: 913685
uuuaguugcugucuaacau

SEQ ID NO: 945965 - RNA, 19 nt, Artificial Sequence
  Description of Artificial Sequence: Synthetic oligonucleotide
  Antisense strand to SEQ ID NO: 945964
auguuagacagcaacuaaa

SEQ ID NO: 945966 - RNA, 19 nt, Artificial Sequence
  Description of Artificial Sequence: Synthetic oligonucleotide
  Sense strand starting at position 3621 of SEQ ID NO: 913685
uagaaagauuagugaaaug

SEQ ID NO: 945967 - RNA, 19 nt, Artificial Sequence
  Description of Artificial Sequence: Synthetic oligonucleotide
  Antisense strand to SEQ ID NO: 945966
cauuucacuaaucuuucua

SEQ ID NO: 945968 - RNA, 19 nt, Artificial Sequence
  Description of Artificial Sequence: Synthetic oligonucleotide
  Sense strand starting at position 116 of SEQ ID NO: 913685
ugggaaaucucagaucccu

SEQ ID NO: 945969 - RNA, 19 nt, Artificial Sequence
  Description of Artificial Sequence: Synthetic oligonucleotide
  Antisense strand to SEQ ID NO: 945968
agggaucugagauuuccca

SEQ ID NO: 945970 - RNA, 19 nt, Artificial Sequence
  Description of Artificial Sequence: Synthetic oligonucleotide
  Sense strand starting at position 3517 of SEQ ID NO: 913685
aaaguaaguucugaaggau

SEQ ID NO: 945971 - RNA, 19 nt, Artificial Sequence
  Description of Artificial Sequence: Synthetic oligonucleotide
  Antisense strand to SEQ ID NO: 945970
auccuucagaacuuacuuu

SEQ ID NO: 945972 - RNA, 19 nt, Artificial Sequence
  Description of Artificial Sequence: Synthetic oligonucleotide
  Sense strand starting at position 107 of SEQ ID NO: 913685
ccgggaaucugggaaaucu

SEQ ID NO: 945973 - RNA, 19 nt, Artificial Sequence
  Description of Artificial Sequence: Synthetic oligonucleotide
  Antisense strand to SEQ ID NO: 945972
agauuucccagauucccgg

SEQ ID NO: 945974 - RNA, 19 nt, Artificial Sequence
  Description of Artificial Sequence: Synthetic oligonucleotide
  Sense strand starting at position 1480 of SEQ ID NO: 913686
ccugcaaaggaucaguaau

SEQ ID NO: 945975 - RNA, 19 nt, Artificial Sequence
  Description of Artificial Sequence: Synthetic oligonucleotide
  Antisense strand to SEQ ID NO: 945974
auuacugauccuuugcagg

SEQ ID NO: 945976 - RNA, 19 nt, Artificial Sequence
  Description of Artificial Sequence: Synthetic oligonucleotide
  Sense strand starting at position 2530 of SEQ ID NO: 913686
caguuaugucugucacguc

SEQ ID NO: 945977 - RNA, 19 nt, Artificial Sequence
  Description of Artificial Sequence: Synthetic oligonucleotide
  Antisense strand to SEQ ID NO: 945976
gacgugacagacauaacug

SEQ ID NO: 945978 - RNA, 19 nt, Artificial Sequence
  Description of Artificial Sequence: Synthetic oligonucleotide
  Sense strand starting at position 2240 of SEQ ID NO: 913686
gguagaguucgguugcagu

SEQ ID NO: 945979 - RNA, 19 nt, Artificial Sequence
  Description of Artificial Sequence: Synthetic oligonucleotide
  Antisense strand to SEQ ID NO: 945978
acugcaaccgaacucuacc

SEQ ID NO: 945980 - RNA, 19 nt, Artificial Sequence
  Description of Artificial Sequence: Synthetic oligonucleotide
  Sense strand starting at position 2994 of SEQ ID NO: 913686
ccuugcaagagaugauaga

SEQ ID NO: 945981 - RNA, 19 nt, Artificial Sequence
  Description of Artificial Sequence: Synthetic oligonucleotide
  Antisense strand to SEQ ID NO: 945980
ucuaucaucucuugcaagg

SEQ ID NO: 945982 - RNA, 19 nt, Artificial Sequence
  Description of Artificial Sequence: Synthetic oligonucleotide
  Sense strand starting at position 3037 of SEQ ID NO: 913686
cuguauuaccuggaaguga

SEQ ID NO: 945983 - RNA, 19 nt, Artificial Sequence
  Description of Artificial Sequence: Synthetic oligonucleotide
  Antisense strand to SEQ ID NO: 945982
ucacuuccagguaauacag

SEQ ID NO: 945984 - RNA, 19 nt, Artificial Sequence
  Description of Artificial Sequence: Synthetic oligonucleotide
  Sense strand starting at position 1086 of SEQ ID NO: 913686
cccagaagauaaguauagu

SEQ ID NO: 945985 - RNA, 19 nt, Artificial Sequence
  Description of Artificial Sequence: Synthetic oligonucleotide
  Antisense strand to SEQ ID NO: 945984
acuauacuuaucuucuggg

SEQ ID NO: 945986 - RNA, 19 nt, Artificial Sequence
  Description of Artificial Sequence: Synthetic oligonucleotide
  Sense strand starting at position 657 of SEQ ID NO: 913686
ugaauuaaugcacaaguuu

SEQ ID NO: 945987 - RNA, 19 nt, Artificial Sequence
  Description of Artificial Sequence: Synthetic oligonucleotide
  Antisense strand to SEQ ID NO: 945986
aaacuugugcauuaauuca

SEQ ID NO: 945988 - RNA, 19 nt, Artificial Sequence
  Description of Artificial Sequence: Synthetic oligonucleotide
  Sense strand starting at position 1482 of SEQ ID NO: 913686
ugcaaaggaucaguaauga

SEQ ID NO: 945989 - RNA, 19 nt, Artificial Sequence
  Description of Artificial Sequence: Synthetic oligonucleotide
  Antisense strand to SEQ ID NO: 945988
ucauuacugauccuuugca

SEQ ID NO: 945990 - RNA, 19 nt, Artificial Sequence
  Description of Artificial Sequence: Synthetic oligonucleotide
  Sense strand starting at position 1213 of SEQ ID NO: 913686
ugcugacaaccugauucua

SEQ ID NO: 945991 - RNA, 19 nt, Artificial Sequence
  Description of Artificial Sequence: Synthetic oligonucleotide
  Antisense strand to SEQ ID NO: 945990
uagaaucagguugucagca

SEQ ID NO: 945992 - RNA, 19 nt, Artificial Sequence
  Description of Artificial Sequence: Synthetic oligonucleotide
  Sense strand starting at position 836 of SEQ ID NO: 913686
gggcucugacccuacaauu

SEQ ID NO: 945993 - RNA, 19 nt, Artificial Sequence
  Description of Artificial Sequence: Synthetic oligonucleotide
  Antisense strand to SEQ ID NO: 945992
aauuguagggucagagccc

SEQ ID NO: 945994 - RNA, 19 nt, Artificial Sequence
  Description of Artificial Sequence: Synthetic oligonucleotide
  Sense strand starting at position 1127 of SEQ ID NO: 913686
gcagcugagcuguccugua

SEQ ID NO: 945995 - RNA, 19 nt, Artificial Sequence
  Description of Artificial Sequence: Synthetic oligonucleotide
  Antisense strand to SEQ ID NO: 945994
uacaggacagcucagcugc

SEQ ID NO: 945996 - RNA, 19 nt, Artificial Sequence
  Description of Artificial Sequence: Synthetic oligonucleotide
  Sense strand starting at position 3052 of SEQ ID NO: 913686
gugagaaugcgugagaaga

SEQ ID NO: 945997 - RNA, 19 nt, Artificial Sequence
  Description of Artificial Sequence: Synthetic oligonucleotide
  Antisense strand to SEQ ID NO: 945996
ucuucucacgcauucucac

SEQ ID NO: 945998 - RNA, 19 nt, Artificial Sequence
  Description of Artificial Sequence: Synthetic oligonucleotide
  Sense strand starting at position 844 of SEQ ID NO: 913686
acccuacaauuggcugaaa

SEQ ID NO: 945999 - RNA, 19 nt, Artificial Sequence
  Description of Artificial Sequence: Synthetic oligonucleotide
  Antisense strand to SEQ ID NO: 945998
uuucagccaauuguagggu

SEQ ID NO: 946000 - RNA, 19 nt, Artificial Sequence
  Description of Artificial Sequence: Synthetic oligonucleotide
  Sense strand starting at position 3677 of SEQ ID NO: 913686
ucagauaucagacgugaag

SEQ ID NO: 946001 - RNA, 19 nt, Artificial Sequence
  Description of Artificial Sequence: Synthetic oligonucleotide
  Antisense strand to SEQ ID NO: 946000
cuucacgucugauaucuga

SEQ ID NO: 946002 - RNA, 19 nt, Artificial Sequence
  Description of Artificial Sequence: Synthetic oligonucleotide
  Sense strand starting at position 426 of SEQ ID NO: 913686
gccacaaguccugaucaca

SEQ ID NO: 946003 - RNA, 19 nt, Artificial Sequence
  Description of Artificial Sequence: Synthetic oligonucleotide
  Antisense strand to SEQ ID NO: 946002
ugugaucaggacuuguggc

SEQ ID NO: 946004 - RNA, 19 nt, Artificial Sequence
  Description of Artificial Sequence: Synthetic oligonucleotide
  Sense strand starting at position 2379 of SEQ ID NO: 913686
aaaguuaccugggccaaga

SEQ ID NO: 946005 - RNA, 19 nt, Artificial Sequence
  Description of Artificial Sequence: Synthetic oligonucleotide
  Antisense strand to SEQ ID NO: 946004
ucuuggcccagguaacuuu

SEQ ID NO: 946006 - RNA, 19 nt, Artificial Sequence
  Description of Artificial Sequence: Synthetic oligonucleotide
  Sense strand starting at position 28 of SEQ ID NO: 913686
uggguaccuccugagguau

SEQ ID NO: 946007 - RNA, 19 nt, Artificial Sequence
  Description of Artificial Sequence: Synthetic oligonucleotide
  Antisense strand to SEQ ID NO: 946006
auaccucaggagguaccca

SEQ ID NO: 946008 - RNA, 19 nt, Artificial Sequence
  Description of Artificial Sequence: Synthetic oligonucleotide
  Sense strand starting at position 947 of SEQ ID NO: 913686
ucagucaaauaugucauaa

SEQ ID NO: 946009 - RNA, 19 nt, Artificial Sequence
  Description of Artificial Sequence: Synthetic oligonucleotide
  Antisense strand to SEQ ID NO: 946008
uuaugacauauuugacuga

SEQ ID NO: 946010 - RNA, 19 nt, Artificial Sequence
  Description of Artificial Sequence: Synthetic oligonucleotide
  Sense strand starting at position 2613 of SEQ ID NO: 913686
gcagaagcccuggauaucu

SEQ ID NO: 946011 - RNA, 19 nt, Artificial Sequence
  Description of Artificial Sequence: Synthetic oligonucleotide
  Antisense strand to SEQ ID NO: 946010
agauauccagggcuucugc

SEQ ID NO: 946012 - RNA, 19 nt, Artificial Sequence
  Description of Artificial Sequence: Synthetic oligonucleotide
  Sense strand starting at position 1051 of SEQ ID NO: 913686
augccugugaaagauugua

SEQ ID NO: 946013 - RNA, 19 nt, Artificial Sequence
  Description of Artificial Sequence: Synthetic oligonucleotide
  Antisense strand to SEQ ID NO: 946012
uacaaucuuucacaggcau

SEQ ID NO: 946014 - RNA, 19 nt, Artificial Sequence
  Description of Artificial Sequence: Synthetic oligonucleotide
  Sense strand starting at position 1272 of SEQ ID NO: 913686
guauuagugaggcaaucac

SEQ ID NO: 946015 - RNA, 19 nt, Artificial Sequence
  Description of Artificial Sequence: Synthetic oligonucleotide
  Antisense strand to SEQ ID NO: 946014
gugauugccucacuaauac

SEQ ID NO: 946016 - RNA, 19 nt, Artificial Sequence
  Description of Artificial Sequence: Synthetic oligonucleotide
  Sense strand starting at position 2113 of SEQ ID NO: 913686
cgcgauuacaagggaaaga

SEQ ID NO: 946017 - RNA, 19 nt, Artificial Sequence
  Description of Artificial Sequence: Synthetic oligonucleotide
  Antisense strand to SEQ ID NO: 946016
ucuuucccuuguaaucgcg

SEQ ID NO: 946018 - RNA, 19 nt, Artificial Sequence
  Description of Artificial Sequence: Synthetic oligonucleotide
  Sense strand starting at position 1445 of SEQ ID NO: 913686
cuaggucaagccugggaaa

SEQ ID NO: 946019 - RNA, 19 nt, Artificial Sequence
  Description of Artificial Sequence: Synthetic oligonucleotide
  Antisense strand to SEQ ID NO: 946018
uuucccaggcuugaccuag

SEQ ID NO: 946020 - RNA, 19 nt, Artificial Sequence
  Description of Artificial Sequence: Synthetic oligonucleotide
  Sense strand starting at position 991 of SEQ ID NO: 913686
cucaucuccuuagugaaga

SEQ ID NO: 946021 - RNA, 19 nt, Artificial Sequence
  Description of Artificial Sequence: Synthetic oligonucleotide
  Antisense strand to SEQ ID NO: 946020
ucuucacuaaggagaugag

SEQ ID NO: 946022 - RNA, 19 nt, Artificial Sequence
  Description of Artificial Sequence: Synthetic oligonucleotide
  Sense strand starting at position 2230 of SEQ ID NO: 913686
gguggaguuagguagaguu

SEQ ID NO: 946023 - RNA, 19 nt, Artificial Sequence
  Description of Artificial Sequence: Synthetic oligonucleotide
  Antisense strand to SEQ ID NO: 946022
aacucuaccuaacuccacc

SEQ ID NO: 946024 - RNA, 19 nt, Artificial Sequence
  Description of Artificial Sequence: Synthetic oligonucleotide
  Sense strand starting at position 2299 of SEQ ID NO: 913686
ggcuacaauuggcuggaaa

SEQ ID NO: 946025 - RNA, 19 nt, Artificial Sequence
  Description of Artificial Sequence: Synthetic oligonucleotide
  Antisense strand to SEQ ID NO: 946024
uuuccagccaauuguagcc

SEQ ID NO: 946026 - RNA, 19 nt, Artificial Sequence
  Description of Artificial Sequence: Synthetic oligonucleotide
  Sense strand starting at position 1132 of SEQ ID NO: 913686
ugagcuguccuguaagagg

SEQ ID NO: 946027 - RNA, 19 nt, Artificial Sequence
  Description of Artificial Sequence: Synthetic oligonucleotide
  Antisense strand to SEQ ID NO: 946026
ccucuuacaggacagcuca

SEQ ID NO: 946028 - RNA, 19 nt, Artificial Sequence
  Description of Artificial Sequence: Synthetic oligonucleotide
  Sense strand starting at position 2157 of SEQ ID NO: 913686
ggauacgaguacucucuga

SEQ ID NO: 946029 - RNA, 19 nt, Artificial Sequence
  Description of Artificial Sequence: Synthetic oligonucleotide
  Antisense strand to SEQ ID NO: 946028
ucagagaguacucguaucc

SEQ ID NO: 946030 - RNA, 19 nt, Artificial Sequence
  Description of Artificial Sequence: Synthetic oligonucleotide
  Sense strand starting at position 2300 of SEQ ID NO: 913686
gcuacaauuggcuggaaag

SEQ ID NO: 946031 - RNA, 19 nt, Artificial Sequence
  Description of Artificial Sequence: Synthetic oligonucleotide
  Antisense strand to SEQ ID NO: 946030
cuuuccagccaauuguagc

SEQ ID NO: 946032 - RNA, 19 nt, Artificial Sequence
  Description of Artificial Sequence: Synthetic oligonucleotide
  Sense strand starting at position 501 of SEQ ID NO: 913686
aagguauuagguugauccu

SEQ ID NO: 946033 - RNA, 19 nt, Artificial Sequence
  Description of Artificial Sequence: Synthetic oligonucleotide
  Antisense strand to SEQ ID NO: 946032
aggaucaaccuaauaccuu

SEQ ID NO: 946034 - RNA, 19 nt, Artificial Sequence
  Description of Artificial Sequence: Synthetic oligonucleotide
  Sense strand starting at position 3050 of SEQ ID NO: 913686
aagugagaaugcgugagaa

SEQ ID NO: 946035 - RNA, 19 nt, Artificial Sequence
  Description of Artificial Sequence: Synthetic oligonucleotide
  Antisense strand to SEQ ID NO: 946034
uucucacgcauucucacuu

SEQ ID NO: 946036 - RNA, 19 nt, Artificial Sequence
  Description of Artificial Sequence: Synthetic oligonucleotide
  Sense strand starting at position 1268 of SEQ ID NO: 913686
cuuuguauuagugaggcaa

SEQ ID NO: 946037 - RNA, 19 nt, Artificial Sequence
  Description of Artificial Sequence: Synthetic oligonucleotide
  Antisense strand to SEQ ID NO: 946036
uugccucacuaauacaaag

SEQ ID NO: 946038 - RNA, 19 nt, Artificial Sequence
  Description of Artificial Sequence: Synthetic oligonucleotide
  Sense strand starting at position 301 of SEQ ID NO: 913686
uugaguuagucauuccaag

SEQ ID NO: 946039 - RNA, 19 nt, Artificial Sequence
  Description of Artificial Sequence: Synthetic oligonucleotide
  Antisense strand to SEQ ID NO: 946038
cuuggaaugacuaacucaa

SEQ ID NO: 946040 - RNA, 19 nt, Artificial Sequence
  Description of Artificial Sequence: Synthetic oligonucleotide
  Sense strand starting at position 962 of SEQ ID NO: 913686
auaauagagugguuuccuu

SEQ ID NO: 946041 - RNA, 19 nt, Artificial Sequence
  Description of Artificial Sequence: Synthetic oligonucleotide
  Antisense strand to SEQ ID NO: 946040
aaggaaaccacucuauuau

SEQ ID NO: 946042 - RNA, 19 nt, Artificial Sequence
  Description of Artificial Sequence: Synthetic oligonucleotide
  Sense strand starting at position 2911 of SEQ ID NO: 913686
ucuuguuugccuuagaaac

SEQ ID NO: 946043 - RNA, 19 nt, Artificial Sequence
  Description of Artificial Sequence: Synthetic oligonucleotide
  Antisense strand to SEQ ID NO: 946042
guuucuaaggcaaacaaga

SEQ ID NO: 946044 - RNA, 19 nt, Artificial Sequence
  Description of Artificial Sequence: Synthetic oligonucleotide
  Sense strand starting at position 989 of SEQ ID NO: 913686
gccucaucuccuuagugaa

SEQ ID NO: 946045 - RNA, 19 nt, Artificial Sequence
  Description of Artificial Sequence: Synthetic oligonucleotide
  Antisense strand to SEQ ID NO: 946044
uucacuaaggagaugaggc

SEQ ID NO: 946046 - RNA, 19 nt, Artificial Sequence
  Description of Artificial Sequence: Synthetic oligonucleotide
  Sense strand starting at position 2845 of SEQ ID NO: 913686
ggccuuauccaccaggcua

SEQ ID NO: 946047 - RNA, 19 nt, Artificial Sequence
  Description of Artificial Sequence: Synthetic oligonucleotide
  Antisense strand to SEQ ID NO: 946046
uagccugguggauaaggcc

SEQ ID NO: 946048 - RNA, 19 nt, Artificial Sequence
  Description of Artificial Sequence: Synthetic oligonucleotide
  Sense strand starting at position 2612 of SEQ ID NO: 913686
agcagaagcccuggauauc

SEQ ID NO: 946049 - RNA, 19 nt, Artificial Sequence
  Description of Artificial Sequence: Synthetic oligonucleotide
  Antisense strand to SEQ ID NO: 946048
gauauccagggcuucugcu

SEQ ID NO: 946050 - RNA, 19 nt, Artificial Sequence
  Description of Artificial Sequence: Synthetic oligonucleotide
  Sense strand starting at position 966 of SEQ ID NO: 913686
uagagugguuuccuuauga

SEQ ID NO: 946051 - RNA, 19 nt, Artificial Sequence
  Description of Artificial Sequence: Synthetic oligonucleotide
  Antisense strand to SEQ ID NO: 946050
ucauaaggaaaccacucua

SEQ ID NO: 946052 - RNA, 19 nt, Artificial Sequence
  Description of Artificial Sequence: Synthetic oligonucleotide
  Sense strand starting at position 3036 of SEQ ID NO: 913686
ccuguauuaccuggaagug

SEQ ID NO: 946053 - RNA, 19 nt, Artificial Sequence
  Description of Artificial Sequence: Synthetic oligonucleotide
  Antisense strand to SEQ ID NO: 946052
cacuuccagguaauacagg

SEQ ID NO: 946054 - RNA, 19 nt, Artificial Sequence
  Description of Artificial Sequence: Synthetic oligonucleotide
  Sense strand starting at position 3064 of SEQ ID NO: 913687
cguaauugucuuccuuugu

SEQ ID NO: 946055 - RNA, 19 nt, Artificial Sequence
  Description of Artificial Sequence: Synthetic oligonucleotide
  Antisense strand to SEQ ID NO: 946054
acaaaggaagacaauuacg

SEQ ID NO: 946056 - RNA, 19 nt, Artificial Sequence
  Description of Artificial Sequence: Synthetic oligonucleotide
  Sense strand starting at position 116 of SEQ ID NO: 913687
gaaaguuaugagugaggau

SEQ ID NO: 946057 - RNA, 19 nt, Artificial Sequence
  Description of Artificial Sequence: Synthetic oligonucleotide
  Antisense strand to SEQ ID NO: 946056
auccucacucauaacuuuc

SEQ ID NO: 946058 - RNA, 19 nt, Artificial Sequence
  Description of Artificial Sequence: Synthetic oligonucleotide
  Sense strand starting at position 1115 of SEQ ID NO: 913687
agugaaucauuagugaaag

SEQ ID NO: 946059 - RNA, 19 nt, Artificial Sequence
  Description of Artificial Sequence: Synthetic oligonucleotide
  Antisense strand to SEQ ID NO: 946058
cuuucacuaaugauucacu

SEQ ID NO: 946060 - RNA, 19 nt, Artificial Sequence
  Description of Artificial Sequence: Synthetic oligonucleotide
  Sense strand starting at position 123 of SEQ ID NO: 913687
augagugaggauggaguua

SEQ ID NO: 946061 - RNA, 19 nt, Artificial Sequence
  Description of Artificial Sequence: Synthetic oligonucleotide
  Antisense strand to SEQ ID NO: 946060
uaacuccauccucacucau

SEQ ID NO: 946062 - RNA, 19 nt, Artificial Sequence
  Description of Artificial Sequence: Synthetic oligonucleotide
  Sense strand starting at position 980 of SEQ ID NO: 913687
gugcuuacagccuugugua

SEQ ID NO: 946063 - RNA, 19 nt, Artificial Sequence
  Description of Artificial Sequence: Synthetic oligonucleotide
  Antisense strand to SEQ ID NO: 946062
uacacaaggcuguaagcac

SEQ ID NO: 946064 - RNA, 19 nt, Artificial Sequence
  Description of Artificial Sequence: Synthetic oligonucleotide
  Sense strand starting at position 441 of SEQ ID NO: 913687
uucugcaaccaggaguaau

SEQ ID NO: 946065 - RNA, 19 nt, Artificial Sequence
  Description of Artificial Sequence: Synthetic oligonucleotide
  Antisense strand to SEQ ID NO: 946064
auuacuccugguugcagaa

SEQ ID NO: 946066 - RNA, 19 nt, Artificial Sequence
  Description of Artificial Sequence: Synthetic oligonucleotide
  Sense strand starting at position 258 of SEQ ID NO: 913687
agauguuaccuugagucac

SEQ ID NO: 946067 - RNA, 19 nt, Artificial Sequence
  Description of Artificial Sequence: Synthetic oligonucleotide
  Antisense strand to SEQ ID NO: 946066
gugacucaagguaacaucu

SEQ ID NO: 946068 - RNA, 19 nt, Artificial Sequence
  Description of Artificial Sequence: Synthetic oligonucleotide
  Sense strand starting at position 50 of SEQ ID NO: 913687
gccagaugauucuuaaaug

SEQ ID NO: 946069 - RNA, 19 nt, Artificial Sequence
  Description of Artificial Sequence: Synthetic oligonucleotide
  Antisense strand to SEQ ID NO: 946068
cauuuaagaaucaucuggc

SEQ ID NO: 946070 - RNA, 19 nt, Artificial Sequence
  Description of Artificial Sequence: Synthetic oligonucleotide
  Sense strand starting at position 2633 of SEQ ID NO: 913687
aaggauucccagugaagug

SEQ ID NO: 946071 - RNA, 19 nt, Artificial Sequence
  Description of Artificial Sequence: Synthetic oligonucleotide
  Antisense strand to SEQ ID NO: 946070
cacuucacugggaauccuu

SEQ ID NO: 946072 - RNA, 19 nt, Artificial Sequence
  Description of Artificial Sequence: Synthetic oligonucleotide
  Sense strand starting at position 1112 of SEQ ID NO: 913687
aucagugaaucauuaguga

SEQ ID NO: 946073 - RNA, 19 nt, Artificial Sequence
  Description of Artificial Sequence: Synthetic oligonucleotide
  Antisense strand to SEQ ID NO: 946072
ucacuaaugauucacugau

SEQ ID NO: 946074 - RNA, 19 nt, Artificial Sequence
  Description of Artificial Sequence: Synthetic oligonucleotide
  Sense strand starting at position 3246 of SEQ ID NO: 913687
ccagauacagucuaugcua

SEQ ID NO: 946075 - RNA, 19 nt, Artificial Sequence
  Description of Artificial Sequence: Synthetic oligonucleotide
  Antisense strand to SEQ ID NO: 946074
uagcauagacuguaucugg

SEQ ID NO: 946076 - RNA, 19 nt, Artificial Sequence
  Description of Artificial Sequence: Synthetic oligonucleotide
  Sense strand starting at position 3479 of SEQ ID NO: 913687
gcuucugaaccucagacuu

SEQ ID NO: 946077 - RNA, 19 nt, Artificial Sequence
  Description of Artificial Sequence: Synthetic oligonucleotide
  Antisense strand to SEQ ID NO: 946076
aagucugagguucagaagc

SEQ ID NO: 946078 - RNA, 19 nt, Artificial Sequence
  Description of Artificial Sequence: Synthetic oligonucleotide
  Sense strand starting at position 3918 of SEQ ID NO: 913687
ggaauccguguccauuaaa

SEQ ID NO: 946079 - RNA, 19 nt, Artificial Sequence
  Description of Artificial Sequence: Synthetic oligonucleotide
  Antisense strand to SEQ ID NO: 946078
uuuaauggacacggauucc

SEQ ID NO: 946080 - RNA, 19 nt, Artificial Sequence
  Description of Artificial Sequence: Synthetic oligonucleotide
  Sense strand starting at position 2414 of SEQ ID NO: 913687
cuggaacaagaucgugauu

SEQ ID NO: 946081 - RNA, 19 nt, Artificial Sequence
  Description of Artificial Sequence: Synthetic oligonucleotide
  Antisense strand to SEQ ID NO: 946080
aaucacgaucuuguuccag

SEQ ID NO: 946082 - RNA, 19 nt, Artificial Sequence
  Description of Artificial Sequence: Synthetic oligonucleotide
  Sense strand starting at position 2699 of SEQ ID NO: 913687
gcagaagguccugaucuuu

SEQ ID NO: 946083 - RNA, 19 nt, Artificial Sequence
  Description of Artificial Sequence: Synthetic oligonucleotide
  Antisense strand to SEQ ID NO: 946082
aaagaucaggaccuucugc

SEQ ID NO: 946084 - RNA, 19 nt, Artificial Sequence
  Description of Artificial Sequence: Synthetic oligonucleotide
  Sense strand starting at position 110 of SEQ ID NO: 913687
gugcaagaaaguuaugagu

SEQ ID NO: 946085 - RNA, 19 nt, Artificial Sequence
  Description of Artificial Sequence: Synthetic oligonucleotide
  Antisense strand to SEQ ID NO: 946084
acucauaacuuucuugcac

SEQ ID NO: 946086 - RNA, 19 nt, Artificial Sequence
  Description of Artificial Sequence: Synthetic oligonucleotide
  Sense strand starting at position 895 of SEQ ID NO: 913687
gugcccuucucauuuguaa

SEQ ID NO: 946087 - RNA, 19 nt, Artificial Sequence
  Description of Artificial Sequence: Synthetic oligonucleotide
  Antisense strand to SEQ ID NO: 946086
uuacaaaugagaagggcac

SEQ ID NO: 946088 - RNA, 19 nt, Artificial Sequence
  Description of Artificial Sequence: Synthetic oligonucleotide
  Sense strand starting at position 3005 of SEQ ID NO: 913687
ggaacauaguuacuauguu

SEQ ID NO: 946089 - RNA, 19 nt, Artificial Sequence
  Description of Artificial Sequence: Synthetic oligonucleotide
  Antisense strand to SEQ ID NO: 946088
aacauaguaacuauguucc

SEQ ID NO: 946090 - RNA, 19 nt, Artificial Sequence
  Description of Artificial Sequence: Synthetic oligonucleotide
  Sense strand starting at position 3357 of SEQ ID NO: 913687
gagggcucacaaugcaaua

SEQ ID NO: 946091 - RNA, 19 nt, Artificial Sequence
  Description of Artificial Sequence: Synthetic oligonucleotide
  Antisense strand to SEQ ID NO: 946090
uauugcauugugagcccuc

SEQ ID NO: 946092 - RNA, 19 nt, Artificial Sequence
  Description of Artificial Sequence: Synthetic oligonucleotide
  Sense strand starting at position 3610 of SEQ ID NO: 913687
augguuugccuggaaguga

SEQ ID NO: 946093 - RNA, 19 nt, Artificial Sequence
  Description of Artificial Sequence: Synthetic oligonucleotide
  Antisense strand to SEQ ID NO: 946092
ucacuuccaggcaaaccau

SEQ ID NO: 946094 - RNA, 19 nt, Artificial Sequence
  Description of Artificial Sequence: Synthetic oligonucleotide
  Sense strand starting at position 76 of SEQ ID NO: 913687
uuaauaacguuccucaaga

SEQ ID NO: 946095 - RNA, 19 nt, Artificial Sequence
  Description of Artificial Sequence: Synthetic oligonucleotide
  Antisense strand to SEQ ID NO: 946094
ucuugaggaacguuauuaa

SEQ ID NO: 946096 - RNA, 19 nt, Artificial Sequence
  Description of Artificial Sequence: Synthetic oligonucleotide
  Sense strand starting at position 659 of SEQ ID NO: 913687
cggagauaggcagaguguu

SEQ ID NO: 946097 - RNA, 19 nt, Artificial Sequence
  Description of Artificial Sequence: Synthetic oligonucleotide
  Antisense strand to SEQ ID NO: 946096
aacacucugccuaucuccg

SEQ ID NO: 946098 - RNA, 19 nt, Artificial Sequence
  Description of Artificial Sequence: Synthetic oligonucleotide
  Sense strand starting at position 3248 of SEQ ID NO: 913687
agauacagucuaugcuaca

SEQ ID NO: 946099 - RNA, 19 nt, Artificial Sequence
  Description of Artificial Sequence: Synthetic oligonucleotide
  Antisense strand to SEQ ID NO: 946098
uguagcauagacuguaucu

SEQ ID NO: 946100 - RNA, 19 nt, Artificial Sequence
  Description of Artificial Sequence: Synthetic oligonucleotide
  Sense strand starting at position 255 of SEQ ID NO: 913687
cacagauguuaccuugagu

SEQ ID NO: 946101 - RNA, 19 nt, Artificial Sequence
  Description of Artificial Sequence: Synthetic oligonucleotide
  Antisense strand to SEQ ID NO: 946100
acucaagguaacaucugug

SEQ ID NO: 946102 - RNA, 19 nt, Artificial Sequence
  Description of Artificial Sequence: Synthetic oligonucleotide
  Sense strand starting at position 378 of SEQ ID NO: 913687
guugaauggccucaucuuc

SEQ ID NO: 946103 - RNA, 19 nt, Artificial Sequence
  Description of Artificial Sequence: Synthetic oligonucleotide
  Antisense strand to SEQ ID NO: 946102
gaagaugaggccauucaac

SEQ ID NO: 946104 - RNA, 19 nt, Artificial Sequence
  Description of Artificial Sequence: Synthetic oligonucleotide
  Sense strand starting at position 3855 of SEQ ID NO: 913687
acaaucgaggccuguugaa

SEQ ID NO: 946105 - RNA, 19 nt, Artificial Sequence
  Description of Artificial Sequence: Synthetic oligonucleotide
  Antisense strand to SEQ ID NO: 946104
uucaacaggccucgauugu

SEQ ID NO: 946106 - RNA, 19 nt, Artificial Sequence
  Description of Artificial Sequence: Synthetic oligonucleotide
  Sense strand starting at position 2358 of SEQ ID NO: 913687
ugggcugacuccguaaaga

SEQ ID NO: 946107 - RNA, 19 nt, Artificial Sequence
  Description of Artificial Sequence: Synthetic oligonucleotide
  Antisense strand to SEQ ID NO: 946106
ucuuuacggagucagccca

SEQ ID NO: 946108 - RNA, 19 nt, Artificial Sequence
  Description of Artificial Sequence: Synthetic oligonucleotide
  Sense strand starting at position 3222 of SEQ ID NO: 913687
agcccauguucuuccagaa

SEQ ID NO: 946109 - RNA, 19 nt, Artificial Sequence
  Description of Artificial Sequence: Synthetic oligonucleotide
  Antisense strand to SEQ ID NO: 946108
uucuggaagaacaugggcu

SEQ ID NO: 946110 - RNA, 19 nt, Artificial Sequence
  Description of Artificial Sequence: Synthetic oligonucleotide
  Sense strand starting at position 3637 of SEQ ID NO: 913687
ggucucagccugggacuua

SEQ ID NO: 946111 - RNA, 19 nt, Artificial Sequence
  Description of Artificial Sequence: Synthetic oligonucleotide
  Antisense strand to SEQ ID NO: 946110
uaagucccaggcugagacc

SEQ ID NO: 946112 - RNA, 19 nt, Artificial Sequence
  Description of Artificial Sequence: Synthetic oligonucleotide
  Sense strand starting at position 3917 of SEQ ID NO: 913687
uggaauccguguccauuaa

SEQ ID NO: 946113 - RNA, 19 nt, Artificial Sequence
  Description of Artificial Sequence: Synthetic oligonucleotide
  Antisense strand to SEQ ID NO: 946112
uuaauggacacggauucca

SEQ ID NO: 946114 - RNA, 19 nt, Artificial Sequence
  Description of Artificial Sequence: Synthetic oligonucleotide
  Sense strand starting at position 3609 of SEQ ID NO: 913687
aaugguuugccuggaagug

SEQ ID NO: 946115 - RNA, 19 nt, Artificial Sequence
  Description of Artificial Sequence: Synthetic oligonucleotide
  Antisense strand to SEQ ID NO: 946114
cacuuccaggcaaaccauu

SEQ ID NO: 946116 - RNA, 19 nt, Artificial Sequence
  Description of Artificial Sequence: Synthetic oligonucleotide
  Sense strand starting at position 2234 of SEQ ID NO: 913687
uggcuaugugauugcaaga

SEQ ID NO: 946117 - RNA, 19 nt, Artificial Sequence
  Description of Artificial Sequence: Synthetic oligonucleotide
  Antisense strand to SEQ ID NO: 946116
ucuugcaaucacauagcca

SEQ ID NO: 946118 - RNA, 19 nt, Artificial Sequence
  Description of Artificial Sequence: Synthetic oligonucleotide
  Sense strand starting at position 2615 of SEQ ID NO: 913687
agcaguggcuuuccuaaga

SEQ ID NO: 946119 - RNA, 19 nt, Artificial Sequence
  Description of Artificial Sequence: Synthetic oligonucleotide
  Antisense strand to SEQ ID NO: 946118
ucuuaggaaagccacugcu

SEQ ID NO: 946120 - RNA, 19 nt, Artificial Sequence
  Description of Artificial Sequence: Synthetic oligonucleotide
  Sense strand starting at position 2458 of SEQ ID NO: 913687
agcccuuuauuugacgaga

SEQ ID NO: 946121 - RNA, 19 nt, Artificial Sequence
  Description of Artificial Sequence: Synthetic oligonucleotide
  Antisense strand to SEQ ID NO: 946120
ucucgucaaauaaagggcu

SEQ ID NO: 946122 - RNA, 19 nt, Artificial Sequence
  Description of Artificial Sequence: Synthetic oligonucleotide
  Sense strand starting at position 3068 of SEQ ID NO: 913687
auugucuuccuuuguaacu

SEQ ID NO: 946123 - RNA, 19 nt, Artificial Sequence
  Description of Artificial Sequence: Synthetic oligonucleotide
  Antisense strand to SEQ ID NO: 946122
aguuacaaaggaagacaau

SEQ ID NO: 946124 - RNA, 19 nt, Artificial Sequence
  Description of Artificial Sequence: Synthetic oligonucleotide
  Sense strand starting at position 1010 of SEQ ID NO: 913687
guguauguccagcaaugug

SEQ ID NO: 946125 - RNA, 19 nt, Artificial Sequence
  Description of Artificial Sequence: Synthetic oligonucleotide
  Antisense strand to SEQ ID NO: 946124
cacauugcuggacauacac

SEQ ID NO: 946126 - RNA, 19 nt, Artificial Sequence
  Description of Artificial Sequence: Synthetic oligonucleotide
  Sense strand starting at position 671 of SEQ ID NO: 913687
gaguguucccacugccuaa

SEQ ID NO: 946127 - RNA, 19 nt, Artificial Sequence
  Description of Artificial Sequence: Synthetic oligonucleotide
  Antisense strand to SEQ ID NO: 946126
uuaggcagugggaacacuc

SEQ ID NO: 946128 - RNA, 19 nt, Artificial Sequence
  Description of Artificial Sequence: Synthetic oligonucleotide
  Sense strand starting at position 51 of SEQ ID NO: 913687
ccagaugauucuuaaaugg

SEQ ID NO: 946129 - RNA, 19 nt, Artificial Sequence
  Description of Artificial Sequence: Synthetic oligonucleotide
  Antisense strand to SEQ ID NO: 946128
ccauuuaagaaucaucugg

SEQ ID NO: 946130 - RNA, 19 nt, Artificial Sequence
  Description of Artificial Sequence: Synthetic oligonucleotide
  Sense strand starting at position 3572 of SEQ ID NO: 913687
uaggauagcucccauuugu

SEQ ID NO: 946131 - RNA, 19 nt, Artificial Sequence
  Description of Artificial Sequence: Synthetic oligonucleotide
  Antisense strand to SEQ ID NO: 946130
acaaaugggagcuauccua

SEQ ID NO: 946132 - RNA, 19 nt, Artificial Sequence
  Description of Artificial Sequence: Synthetic oligonucleotide
  Sense strand starting at position 2947 of SEQ ID NO: 913687
guaucauguuugcucauua

SEQ ID NO: 946133 - RNA, 19 nt, Artificial Sequence
  Description of Artificial Sequence: Synthetic oligonucleotide
  Antisense strand to SEQ ID NO: 946132
uaaugagcaaacaugauac

SEQ ID NO: 946134 - RNA, 19 nt, Artificial Sequence
  Description of Artificial Sequence: Synthetic oligonucleotide
  Sense strand starting at position 1242 of SEQ ID NO: 913688
cucaguaaccauggaaaug

SEQ ID NO: 946135 - RNA, 19 nt, Artificial Sequence
  Description of Artificial Sequence: Synthetic oligonucleotide
  Antisense strand to SEQ ID NO: 946134
cauuuccaugguuacugag

SEQ ID NO: 946136 - RNA, 19 nt, Artificial Sequence
  Description of Artificial Sequence: Synthetic oligonucleotide
  Sense strand starting at position 2472 of SEQ ID NO: 913688
aauuuagugcggugaugag

SEQ ID NO: 946137 - RNA, 19 nt, Artificial Sequence
  Description of Artificial Sequence: Synthetic oligonucleotide
  Antisense strand to SEQ ID NO: 946136
cucaucaccgcacuaaauu

SEQ ID NO: 946138 - RNA, 19 nt, Artificial Sequence
  Description of Artificial Sequence: Synthetic oligonucleotide
  Sense strand starting at position 2442 of SEQ ID NO: 913688
agagaucacgagugaauau

SEQ ID NO: 946139 - RNA, 19 nt, Artificial Sequence
  Description of Artificial Sequence: Synthetic oligonucleotide
  Antisense strand to SEQ ID NO: 946138
auauucacucgugaucucu

SEQ ID NO: 946140 - RNA, 19 nt, Artificial Sequence
  Description of Artificial Sequence: Synthetic oligonucleotide
  Sense strand starting at position 106 of SEQ ID NO: 913688
ucagauccugagugaagau

SEQ ID NO: 946141 - RNA, 19 nt, Artificial Sequence
  Description of Artificial Sequence: Synthetic oligonucleotide
  Antisense strand to SEQ ID NO: 946140
aucuucacucaggaucuga

SEQ ID NO: 946142 - RNA, 19 nt, Artificial Sequence
  Description of Artificial Sequence: Synthetic oligonucleotide
  Sense strand starting at position 686 of SEQ ID NO: 913688
ggcagacagguuuaacacu

SEQ ID NO: 946143 - RNA, 19 nt, Artificial Sequence
  Description of Artificial Sequence: Synthetic oligonucleotide
  Antisense strand to SEQ ID NO: 946142
aguguuaaaccugucugcc

SEQ ID NO: 946144 - RNA, 19 nt, Artificial Sequence
  Description of Artificial Sequence: Synthetic oligonucleotide
  Sense strand starting at position 103 of SEQ ID NO: 913688
cugucagauccugagugaa

SEQ ID NO: 946145 - RNA, 19 nt, Artificial Sequence
  Description of Artificial Sequence: Synthetic oligonucleotide
  Antisense strand to SEQ ID NO: 946144
uucacucaggaucugacag

SEQ ID NO: 946146 - RNA, 19 nt, Artificial Sequence
  Description of Artificial Sequence: Synthetic oligonucleotide
  Sense strand starting at position 1223 of SEQ ID NO: 913688
agaagugcugaguagaacu

SEQ ID NO: 946147 - RNA, 19 nt, Artificial Sequence
  Description of Artificial Sequence: Synthetic oligonucleotide
  Antisense strand to SEQ ID NO: 946146
aguucuacucagcacuucu

SEQ ID NO: 946148 - RNA, 19 nt, Artificial Sequence
  Description of Artificial Sequence: Synthetic oligonucleotide
  Sense strand starting at position 487 of SEQ ID NO: 913688
gacccugugcuauagggaa

SEQ ID NO: 946149 - RNA, 19 nt, Artificial Sequence
  Description of Artificial Sequence: Synthetic oligonucleotide
  Antisense strand to SEQ ID NO: 946148
uucccuauagcacaggguc

SEQ ID NO: 946150 - RNA, 19 nt, Artificial Sequence
  Description of Artificial Sequence: Synthetic oligonucleotide
  Sense strand starting at position 116 of SEQ ID NO: 913688
agugaagauccugagugua

SEQ ID NO: 946151 - RNA, 19 nt, Artificial Sequence
  Description of Artificial Sequence: Synthetic oligonucleotide
  Antisense strand to SEQ ID NO: 946150
uacacucaggaucuucacu

SEQ ID NO: 946152 - RNA, 19 nt, Artificial Sequence
  Description of Artificial Sequence: Synthetic oligonucleotide
  Sense strand starting at position 3249 of SEQ ID NO: 913688
auggcugggccugaauaga

SEQ ID NO: 946153 - RNA, 19 nt, Artificial Sequence
  Description of Artificial Sequence: Synthetic oligonucleotide
  Antisense strand to SEQ ID NO: 946152
ucuauucaggcccagccau

SEQ ID NO: 946154 - RNA, 19 nt, Artificial Sequence
  Description of Artificial Sequence: Synthetic oligonucleotide
  Sense strand starting at position 3639 of SEQ ID NO: 913688
auaacaguagucuauagua

SEQ ID NO: 946155 - RNA, 19 nt, Artificial Sequence
  Description of Artificial Sequence: Synthetic oligonucleotide
  Antisense strand to SEQ ID NO: 946154
uacuauagacuacuguuau

SEQ ID NO: 946156 - RNA, 19 nt, Artificial Sequence
  Description of Artificial Sequence: Synthetic oligonucleotide
  Sense strand starting at position 2429 of SEQ ID NO: 913688
acugcugagcauuagagau

SEQ ID NO: 946157 - RNA, 19 nt, Artificial Sequence
  Description of Artificial Sequence: Synthetic oligonucleotide
  Antisense strand to SEQ ID NO: 946156
aucucuaaugcucagcagu

SEQ ID NO: 946158 - RNA, 19 nt, Artificial Sequence
  Description of Artificial Sequence: Synthetic oligonucleotide
  Sense strand starting at position 2436 of SEQ ID NO: 913688
agcauuagagaucacgagu

SEQ ID NO: 946159 - RNA, 19 nt, Artificial Sequence
  Description of Artificial Sequence: Synthetic oligonucleotide
  Antisense strand to SEQ ID NO: 946158
acucgugaucucuaaugcu

SEQ ID NO: 946160 - RNA, 19 nt, Artificial Sequence
  Description of Artificial Sequence: Synthetic oligonucleotide
  Sense strand starting at position 105 of SEQ ID NO: 913688
gucagauccugagugaaga

SEQ ID NO: 946161 - RNA, 19 nt, Artificial Sequence
  Description of Artificial Sequence: Synthetic oligonucleotide
  Antisense strand to SEQ ID NO: 946160
ucuucacucaggaucugac

SEQ ID NO: 946162 - RNA, 19 nt, Artificial Sequence
  Description of Artificial Sequence: Synthetic oligonucleotide
  Sense strand starting at position 119 of SEQ ID NO: 913688
gaagauccugaguguauga

SEQ ID NO: 946163 - RNA, 19 nt, Artificial Sequence
  Description of Artificial Sequence: Synthetic oligonucleotide
  Antisense strand to SEQ ID NO: 946162
ucauacacucaggaucuuc

SEQ ID NO: 946164 - RNA, 19 nt, Artificial Sequence
  Description of Artificial Sequence: Synthetic oligonucleotide
  Sense strand starting at position 40 of SEQ ID NO: 913688
uuaaguauucugggacuua

SEQ ID NO: 946165 - RNA, 19 nt, Artificial Sequence
  Description of Artificial Sequence: Synthetic oligonucleotide
  Antisense strand to SEQ ID NO: 946164
uaagucccagaauacuuaa

SEQ ID NO: 946166 - RNA, 19 nt, Artificial Sequence
  Description of Artificial Sequence: Synthetic oligonucleotide
  Sense strand starting at position 975 of SEQ ID NO: 913688
aggaauagaugugcuuuga

SEQ ID NO: 946167 - RNA, 19 nt, Artificial Sequence
  Description of Artificial Sequence: Synthetic oligonucleotide
  Antisense strand to SEQ ID NO: 946166
ucaaagcacaucuauuccu

SEQ ID NO: 946168 - RNA, 19 nt, Artificial Sequence
  Description of Artificial Sequence: Synthetic oligonucleotide
  Sense strand starting at position 118 of SEQ ID NO: 913688
ugaagauccugaguguaug

SEQ ID NO: 946169 - RNA, 19 nt, Artificial Sequence
  Description of Artificial Sequence: Synthetic oligonucleotide
  Antisense strand to SEQ ID NO: 946168
cauacacucaggaucuuca

SEQ ID NO: 946170 - RNA, 19 nt, Artificial Sequence
  Description of Artificial Sequence: Synthetic oligonucleotide
  Sense strand starting at position 1234 of SEQ ID NO: 913688
guagaacucucaguaacca

SEQ ID NO: 946171 - RNA, 19 nt, Artificial Sequence
  Description of Artificial Sequence: Synthetic oligonucleotide
  Antisense strand to SEQ ID NO: 946170
ugguuacugagaguucuac

SEQ ID NO: 946172 - RNA, 19 nt, Artificial Sequence
  Description of Artificial Sequence: Synthetic oligonucleotide
  Sense strand starting at position 3421 of SEQ ID NO: 913688
gggugccaugcccaagaaa

SEQ ID NO: 946173 - RNA, 19 nt, Artificial Sequence
  Description of Artificial Sequence: Synthetic oligonucleotide
  Antisense strand to SEQ ID NO: 946172
uuucuugggcauggcaccc

SEQ ID NO: 946174 - RNA, 19 nt, Artificial Sequence
  Description of Artificial Sequence: Synthetic oligonucleotide
  Sense strand starting at position 3328 of SEQ ID NO: 913688
agaaaugcugcuugggaag

SEQ ID NO: 946175 - RNA, 19 nt, Artificial Sequence
  Description of Artificial Sequence: Synthetic oligonucleotide
  Antisense strand to SEQ ID NO: 946174
cuucccaagcagcauuucu

SEQ ID NO: 946176 - RNA, 19 nt, Artificial Sequence
  Description of Artificial Sequence: Synthetic oligonucleotide
  Sense strand starting at position 3839 of SEQ ID NO: 913688
guguauaugcaauaacauu

SEQ ID NO: 946177 - RNA, 19 nt, Artificial Sequence
  Description of Artificial Sequence: Synthetic oligonucleotide
  Antisense strand to SEQ ID NO: 946176
aauguuauugcauauacac

SEQ ID NO: 946178 - RNA, 19 nt, Artificial Sequence
  Description of Artificial Sequence: Synthetic oligonucleotide
  Sense strand starting at position 3776 of SEQ ID NO: 913688
aaaccauuguggccaggau

SEQ ID NO: 946179 - RNA, 19 nt, Artificial Sequence
  Description of Artificial Sequence: Synthetic oligonucleotide
  Antisense strand to SEQ ID NO: 946178
auccuggccacaaugguuu

SEQ ID NO: 946180 - RNA, 19 nt, Artificial Sequence
  Description of Artificial Sequence: Synthetic oligonucleotide
  Sense strand starting at position 1010 of SEQ ID NO: 913688
caguuaguuggaggugaaa

SEQ ID NO: 946181 - RNA, 19 nt, Artificial Sequence
  Description of Artificial Sequence: Synthetic oligonucleotide
  Antisense strand to SEQ ID NO: 946180
uuucaccuccaacuaacug

SEQ ID NO: 946182 - RNA, 19 nt, Artificial Sequence
  Description of Artificial Sequence: Synthetic oligonucleotide
  Sense strand starting at position 1012 of SEQ ID NO: 913688
guuaguuggaggugaaaua

SEQ ID NO: 946183 - RNA, 19 nt, Artificial Sequence
  Description of Artificial Sequence: Synthetic oligonucleotide
  Antisense strand to SEQ ID NO: 946182
uauuucaccuccaacuaac

SEQ ID NO: 946184 - RNA, 19 nt, Artificial Sequence
  Description of Artificial Sequence: Synthetic oligonucleotide
  Sense strand starting at position 3634 of SEQ ID NO: 913688
cuguuauaacaguagucua

SEQ ID NO: 946185 - RNA, 19 nt, Artificial Sequence
  Description of Artificial Sequence: Synthetic oligonucleotide
  Antisense strand to SEQ ID NO: 946184
uagacuacuguuauaacag

SEQ ID NO: 946186 - RNA, 19 nt, Artificial Sequence
  Description of Artificial Sequence: Synthetic oligonucleotide
  Sense strand starting at position 3327 of SEQ ID NO: 913688
cagaaaugcugcuugggaa

SEQ ID NO: 946187 - RNA, 19 nt, Artificial Sequence
  Description of Artificial Sequence: Synthetic oligonucleotide
  Antisense strand to SEQ ID NO: 946186
uucccaagcagcauuucug

SEQ ID NO: 946188 - RNA, 19 nt, Artificial Sequence
  Description of Artificial Sequence: Synthetic oligonucleotide
  Sense strand starting at position 36 of SEQ ID NO: 913688
cuaguuaaguauucuggga

SEQ ID NO: 946189 - RNA, 19 nt, Artificial Sequence
  Description of Artificial Sequence: Synthetic oligonucleotide
  Antisense strand to SEQ ID NO: 946188
ucccagaauacuuaacuag

SEQ ID NO: 946190 - RNA, 19 nt, Artificial Sequence
  Description of Artificial Sequence: Synthetic oligonucleotide
  Sense strand starting at position 2041 of SEQ ID NO: 913688
ggagccuuccguuaaugaa

SEQ ID NO: 946191 - RNA, 19 nt, Artificial Sequence
  Description of Artificial Sequence: Synthetic oligonucleotide
  Antisense strand to SEQ ID NO: 946190
uucauuaacggaaggcucc

SEQ ID NO: 946192 - RNA, 19 nt, Artificial Sequence
  Description of Artificial Sequence: Synthetic oligonucleotide
  Sense strand starting at position 3006 of SEQ ID NO: 913688
acacuuagacucuguccau

SEQ ID NO: 946193 - RNA, 19 nt, Artificial Sequence
  Description of Artificial Sequence: Synthetic oligonucleotide
  Antisense strand to SEQ ID NO: 946192
auggacagagucuaagugu

SEQ ID NO: 946194 - RNA, 19 nt, Artificial Sequence
  Description of Artificial Sequence: Synthetic oligonucleotide
  Sense strand starting at position 2535 of SEQ ID NO: 913688
cugcaaaugucaccuggaa

SEQ ID NO: 946195 - RNA, 19 nt, Artificial Sequence
  Description of Artificial Sequence: Synthetic oligonucleotide
  Antisense strand to SEQ ID NO: 946194
uuccaggugacauuugcag

SEQ ID NO: 946196 - RNA, 19 nt, Artificial Sequence
  Description of Artificial Sequence: Synthetic oligonucleotide
  Sense strand starting at position 821 of SEQ ID NO: 913688
gcuugucugaguuaggaca

SEQ ID NO: 946197 - RNA, 19 nt, Artificial Sequence
  Description of Artificial Sequence: Synthetic oligonucleotide
  Antisense strand to SEQ ID NO: 946196
uguccuaacucagacaagc

SEQ ID NO: 946198 - RNA, 19 nt, Artificial Sequence
  Description of Artificial Sequence: Synthetic oligonucleotide
  Sense strand starting at position 3373 of SEQ ID NO: 913688
uccagcucagugcaagaau

SEQ ID NO: 946199 - RNA, 19 nt, Artificial Sequence
  Description of Artificial Sequence: Synthetic oligonucleotide
  Antisense strand to SEQ ID NO: 946198
auucuugcacugagcugga

SEQ ID NO: 946200 - RNA, 19 nt, Artificial Sequence
  Description of Artificial Sequence: Synthetic oligonucleotide
  Sense strand starting at position 2995 of SEQ ID NO: 913688
gcaguauguccacacuuag

SEQ ID NO: 946201 - RNA, 19 nt, Artificial Sequence
  Description of Artificial Sequence: Synthetic oligonucleotide
  Antisense strand to SEQ ID NO: 946200
cuaaguguggacauacugc

SEQ ID NO: 946202 - RNA, 19 nt, Artificial Sequence
  Description of Artificial Sequence: Synthetic oligonucleotide
  Sense strand starting at position 347 of SEQ ID NO: 913688
ccacauaguuaucucgaua

SEQ ID NO: 946203 - RNA, 19 nt, Artificial Sequence
  Description of Artificial Sequence: Synthetic oligonucleotide
  Antisense strand to SEQ ID NO: 946202
uaucgagauaacuaugugg

SEQ ID NO: 946204 - RNA, 19 nt, Artificial Sequence
  Description of Artificial Sequence: Synthetic oligonucleotide
  Sense strand starting at position 3489 of SEQ ID NO: 913688
ggcagaugccugcaacaug

SEQ ID NO: 946205 - RNA, 19 nt, Artificial Sequence
  Description of Artificial Sequence: Synthetic oligonucleotide
  Antisense strand to SEQ ID NO: 946204
cauguugcaggcaucugcc

SEQ ID NO: 946206 - RNA, 19 nt, Artificial Sequence
  Description of Artificial Sequence: Synthetic oligonucleotide
  Sense strand starting at position 2469 of SEQ ID NO: 913688
ugcaauuuagugcggugau

SEQ ID NO: 946207 - RNA, 19 nt, Artificial Sequence
  Description of Artificial Sequence: Synthetic oligonucleotide
  Antisense strand to SEQ ID NO: 946206
aucaccgcacuaaauugca

SEQ ID NO: 946208 - RNA, 19 nt, Artificial Sequence
  Description of Artificial Sequence: Synthetic oligonucleotide
  Sense strand starting at position 2526 of SEQ ID NO: 913688
accgauucccugcaaaugu

SEQ ID NO: 946209 - RNA, 19 nt, Artificial Sequence
  Description of Artificial Sequence: Synthetic oligonucleotide
  Antisense strand to SEQ ID NO: 946208
acauuugcagggaaucggu

SEQ ID NO: 946210 - RNA, 19 nt, Artificial Sequence
  Description of Artificial Sequence: Synthetic oligonucleotide
  Sense strand starting at position 2426 of SEQ ID NO: 913688
ugcacugcugagcauuaga

SEQ ID NO: 946211 - RNA, 19 nt, Artificial Sequence
  Description of Artificial Sequence: Synthetic oligonucleotide
  Antisense strand to SEQ ID NO: 946210
ucuaaugcucagcagugca

SEQ ID NO: 946212 - RNA, 19 nt, Artificial Sequence
  Description of Artificial Sequence: Synthetic oligonucleotide
  Sense strand starting at position 3717 of SEQ ID NO: 913688
uccagugaugcccaugguu

SEQ ID NO: 946213 - RNA, 19 nt, Artificial Sequence
  Description of Artificial Sequence: Synthetic oligonucleotide
  Antisense strand to SEQ ID NO: 946212
aaccaugggcaucacugga

SEQ ID NO: 946214 - RNA, 19 nt, Artificial Sequence
  Description of Artificial Sequence: Synthetic oligonucleotide
  Sense strand starting at position 1172 of SEQ ID NO: 913689
auccaagacuugucaggaa

SEQ ID NO: 946215 - RNA, 19 nt, Artificial Sequence
  Description of Artificial Sequence: Synthetic oligonucleotide
  Antisense strand to SEQ ID NO: 946214
uuccugacaagucuuggau

SEQ ID NO: 946216 - RNA, 19 nt, Artificial Sequence
  Description of Artificial Sequence: Synthetic oligonucleotide
  Sense strand starting at position 202 of SEQ ID NO: 913689
ggauuauuccuggauuggu

SEQ ID NO: 946217 - RNA, 19 nt, Artificial Sequence
  Description of Artificial Sequence: Synthetic oligonucleotide
  Antisense strand to SEQ ID NO: 946216
accaauccaggaauaaucc

SEQ ID NO: 946218 - RNA, 19 nt, Artificial Sequence
  Description of Artificial Sequence: Synthetic oligonucleotide
  Sense strand starting at position 3740 of SEQ ID NO: 913689
uggacuaagccuuaacgga

SEQ ID NO: 946219 - RNA, 19 nt, Artificial Sequence
  Description of Artificial Sequence: Synthetic oligonucleotide
  Antisense strand to SEQ ID NO: 946218
uccguuaaggcuuagucca

SEQ ID NO: 946220 - RNA, 19 nt, Artificial Sequence
  Description of Artificial Sequence: Synthetic oligonucleotide
  Sense strand starting at position 972 of SEQ ID NO: 913689
ugcgaaagcauuugacgga

SEQ ID NO: 946221 - RNA, 19 nt, Artificial Sequence
  Description of Artificial Sequence: Synthetic oligonucleotide
  Antisense strand to SEQ ID NO: 946220
uccgucaaaugcuuucgca

SEQ ID NO: 946222 - RNA, 19 nt, Artificial Sequence
  Description of Artificial Sequence: Synthetic oligonucleotide
  Sense strand starting at position 1166 of SEQ ID NO: 913689
gugauuauccaagacuugu

SEQ ID NO: 946223 - RNA, 19 nt, Artificial Sequence
  Description of Artificial Sequence: Synthetic oligonucleotide
  Antisense strand to SEQ ID NO: 946222
acaagucuuggauaaucac

SEQ ID NO: 946224 - RNA, 19 nt, Artificial Sequence
  Description of Artificial Sequence: Synthetic oligonucleotide
  Sense strand starting at position 3589 of SEQ ID NO: 913689
auacucaagaguugugaga

SEQ ID NO: 946225 - RNA, 19 nt, Artificial Sequence
  Description of Artificial Sequence: Synthetic oligonucleotide
  Antisense strand to SEQ ID NO: 946224
ucucacaacucuugaguau

SEQ ID NO: 946226 - RNA, 19 nt, Artificial Sequence
  Description of Artificial Sequence: Synthetic oligonucleotide
  Sense strand starting at position 1021 of SEQ ID NO: 913689
acagaugcucaguaaguga

SEQ ID NO: 946227 - RNA, 19 nt, Artificial Sequence
  Description of Artificial Sequence: Synthetic oligonucleotide
  Antisense strand to SEQ ID NO: 946226
ucacuuacugagcaucugu

SEQ ID NO: 946228 - RNA, 19 nt, Artificial Sequence
  Description of Artificial Sequence: Synthetic oligonucleotide
  Sense strand starting at position 363 of SEQ ID NO: 913689
uucucuugccuagagacau

SEQ ID NO: 946229 - RNA, 19 nt, Artificial Sequence
  Description of Artificial Sequence: Synthetic oligonucleotide
  Antisense strand to SEQ ID NO: 946228
augucucuaggcaagagaa

SEQ ID NO: 946230 - RNA, 19 nt, Artificial Sequence
  Description of Artificial Sequence: Synthetic oligonucleotide
  Sense strand starting at position 3120 of SEQ ID NO: 913689
aaugaauuagugcacaguu

SEQ ID NO: 946231 - RNA, 19 nt, Artificial Sequence
  Description of Artificial Sequence: Synthetic oligonucleotide
  Antisense strand to SEQ ID NO: 946230
aacugugcacuaauucauu

SEQ ID NO: 946232 - RNA, 19 nt, Artificial Sequence
  Description of Artificial Sequence: Synthetic oligonucleotide
  Sense strand starting at position 1159 of SEQ ID NO: 913689
cgaagcagugauuauccaa

SEQ ID NO: 946233 - RNA, 19 nt, Artificial Sequence
  Description of Artificial Sequence: Synthetic oligonucleotide
  Antisense strand to SEQ ID NO: 946232
uuggauaaucacugcuucg

SEQ ID NO: 946234 - RNA, 19 nt, Artificial Sequence
  Description of Artificial Sequence: Synthetic oligonucleotide
  Sense strand starting at position 3638 of SEQ ID NO: 913689
auuuaaggcuaauaaggau

SEQ ID NO: 946235 - RNA, 19 nt, Artificial Sequence
  Description of Artificial Sequence: Synthetic oligonucleotide
  Antisense strand to SEQ ID NO: 946234
auccuuauuagccuuaaau

SEQ ID NO: 946236 - RNA, 19 nt, Artificial Sequence
  Description of Artificial Sequence: Synthetic oligonucleotide
  Sense strand starting at position 2876 of SEQ ID NO: 913689
cucaaauacuucucgauag

SEQ ID NO: 946237 - RNA, 19 nt, Artificial Sequence
  Description of Artificial Sequence: Synthetic oligonucleotide
  Antisense strand to SEQ ID NO: 946236
cuaucgagaaguauuugag

SEQ ID NO: 946238 - RNA, 19 nt, Artificial Sequence
  Description of Artificial Sequence: Synthetic oligonucleotide
  Sense strand starting at position 3585 of SEQ ID NO: 913689
aucgauacucaagaguugu

SEQ ID NO: 946239 - RNA, 19 nt, Artificial Sequence
  Description of Artificial Sequence: Synthetic oligonucleotide
  Antisense strand to SEQ ID NO: 946238
acaacucuugaguaucgau

SEQ ID NO: 946240 - RNA, 19 nt, Artificial Sequence
  Description of Artificial Sequence: Synthetic oligonucleotide
  Sense strand starting at position 2824 of SEQ ID NO: 913689
gugauaaaucugcagaguc

SEQ ID NO: 946241 - RNA, 19 nt, Artificial Sequence
  Description of Artificial Sequence: Synthetic oligonucleotide
  Antisense strand to SEQ ID NO: 946240
gacucugcagauuuaucac

SEQ ID NO: 946242 - RNA, 19 nt, Artificial Sequence
  Description of Artificial Sequence: Synthetic oligonucleotide
  Sense strand starting at position 3122 of SEQ ID NO: 913689
ugaauuagugcacaguuga

SEQ ID NO: 946243 - RNA, 19 nt, Artificial Sequence
  Description of Artificial Sequence: Synthetic oligonucleotide
  Antisense strand to SEQ ID NO: 946242
ucaacugugcacuaauuca

SEQ ID NO: 946244 - RNA, 19 nt, Artificial Sequence
  Description of Artificial Sequence: Synthetic oligonucleotide
  Sense strand starting at position 3246 of SEQ ID NO: 913689
gggucauacuaccuauauu

SEQ ID NO: 946245 - RNA, 19 nt, Artificial Sequence
  Description of Artificial Sequence: Synthetic oligonucleotide
  Antisense strand to SEQ ID NO: 946244
aauauagguaguaugaccc

SEQ ID NO: 946246 - RNA, 19 nt, Artificial Sequence
  Description of Artificial Sequence: Synthetic oligonucleotide
  Sense strand starting at position 1162 of SEQ ID NO: 913689
agcagugauuauccaagac

SEQ ID NO: 946247 - RNA, 19 nt, Artificial Sequence
  Description of Artificial Sequence: Synthetic oligonucleotide
  Antisense strand to SEQ ID NO: 946246
gucuuggauaaucacugcu

SEQ ID NO: 946248 - RNA, 19 nt, Artificial Sequence
  Description of Artificial Sequence: Synthetic oligonucleotide
  Sense strand starting at position 2377 of SEQ ID NO: 913689
ccgggaagaguucggaaau

SEQ ID NO: 946249 - RNA, 19 nt, Artificial Sequence
  Description of Artificial Sequence: Synthetic oligonucleotide
  Antisense strand to SEQ ID NO: 946248
auuuccgaacucuucccgg

SEQ ID NO: 946250 - RNA, 19 nt, Artificial Sequence
  Description of Artificial Sequence: Synthetic oligonucleotide
  Sense strand starting at position 396 of SEQ ID NO: 913689
uugggauguuaccuguaaa

SEQ ID NO: 946251 - RNA, 19 nt, Artificial Sequence
  Description of Artificial Sequence: Synthetic oligonucleotide
  Antisense strand to SEQ ID NO: 946250
uuuacagguaacaucccaa

SEQ ID NO: 946252 - RNA, 19 nt, Artificial Sequence
  Description of Artificial Sequence: Synthetic oligonucleotide
  Sense strand starting at position 205 of SEQ ID NO: 913689
uuauuccuggauuggucaa

SEQ ID NO: 946253 - RNA, 19 nt, Artificial Sequence
  Description of Artificial Sequence: Synthetic oligonucleotide
  Antisense strand to SEQ ID NO: 946252
uugaccaauccaggaauaa

SEQ ID NO: 946254 - RNA, 19 nt, Artificial Sequence
  Description of Artificial Sequence: Synthetic oligonucleotide
  Sense strand starting at position 1024 of SEQ ID NO: 913689
gaugcucaguaagugagaa

SEQ ID NO: 946255 - RNA, 19 nt, Artificial Sequence
  Description of Artificial Sequence: Synthetic oligonucleotide
  Antisense strand to SEQ ID NO: 946254
uucucacuuacugagcauc

SEQ ID NO: 946256 - RNA, 19 nt, Artificial Sequence
  Description of Artificial Sequence: Synthetic oligonucleotide
  Sense strand starting at position 2556 of SEQ ID NO: 913689
uaccgagggcuguaacuua

SEQ ID NO: 946257 - RNA, 19 nt, Artificial Sequence
  Description of Artificial Sequence: Synthetic oligonucleotide
  Antisense strand to SEQ ID NO: 946256
uaaguuacagcccucggua

SEQ ID NO: 946258 - RNA, 19 nt, Artificial Sequence
  Description of Artificial Sequence: Synthetic oligonucleotide
  Sense strand starting at position 835 of SEQ ID NO: 913689
ugaagaaagcuucggagua

SEQ ID NO: 946259 - RNA, 19 nt, Artificial Sequence
  Description of Artificial Sequence: Synthetic oligonucleotide
  Antisense strand to SEQ ID NO: 946258
uacuccgaagcuuucuuca

SEQ ID NO: 946260 - RNA, 19 nt, Artificial Sequence
  Description of Artificial Sequence: Synthetic oligonucleotide
  Sense strand starting at position 3205 of SEQ ID NO: 913689
uaaagaagguccuucuguu

SEQ ID NO: 946261 - RNA, 19 nt, Artificial Sequence
  Description of Artificial Sequence: Synthetic oligonucleotide
  Antisense strand to SEQ ID NO: 946260
aacagaaggaccuucuuua

SEQ ID NO: 946262 - RNA, 19 nt, Artificial Sequence
  Description of Artificial Sequence: Synthetic oligonucleotide
  Sense strand starting at position 487 of SEQ ID NO: 913689
uuaaaugacucaggaauuu

SEQ ID NO: 946263 - RNA, 19 nt, Artificial Sequence
  Description of Artificial Sequence: Synthetic oligonucleotide
  Antisense strand to SEQ ID NO: 946262
aaauuccugagucauuuaa

SEQ ID NO: 946264 - RNA, 19 nt, Artificial Sequence
  Description of Artificial Sequence: Synthetic oligonucleotide
  Sense strand starting at position 141 of SEQ ID NO: 913689
guggguagggccuauucau

SEQ ID NO: 946265 - RNA, 19 nt, Artificial Sequence
  Description of Artificial Sequence: Synthetic oligonucleotide
  Antisense strand to SEQ ID NO: 946264
augaauaggcccuacccac

SEQ ID NO: 946266 - RNA, 19 nt, Artificial Sequence
  Description of Artificial Sequence: Synthetic oligonucleotide
  Sense strand starting at position 1156 of SEQ ID NO: 913689
uuccgaagcagugauuauc

SEQ ID NO: 946267 - RNA, 19 nt, Artificial Sequence
  Description of Artificial Sequence: Synthetic oligonucleotide
  Antisense strand to SEQ ID NO: 946266
gauaaucacugcuucggaa

SEQ ID NO: 946268 - RNA, 19 nt, Artificial Sequence
  Description of Artificial Sequence: Synthetic oligonucleotide
  Sense strand starting at position 2822 of SEQ ID NO: 913689
acgugauaaaucugcagag

SEQ ID NO: 946269 - RNA, 19 nt, Artificial Sequence
  Description of Artificial Sequence: Synthetic oligonucleotide
  Antisense strand to SEQ ID NO: 946268
cucugcagauuuaucacgu

SEQ ID NO: 946270 - RNA, 19 nt, Artificial Sequence
  Description of Artificial Sequence: Synthetic oligonucleotide
  Sense strand starting at position 703 of SEQ ID NO: 913689
cugcguuaucuacagauua

SEQ ID NO: 946271 - RNA, 19 nt, Artificial Sequence
  Description of Artificial Sequence: Synthetic oligonucleotide
  Antisense strand to SEQ ID NO: 946270
uaaucuguagauaacgcag

SEQ ID NO: 946272 - RNA, 19 nt, Artificial Sequence
  Description of Artificial Sequence: Synthetic oligonucleotide
  Sense strand starting at position 1020 of SEQ ID NO: 913689
uacagaugcucaguaagug

SEQ ID NO: 946273 - RNA, 19 nt, Artificial Sequence
  Description of Artificial Sequence: Synthetic oligonucleotide
  Antisense strand to SEQ ID NO: 946272
cacuuacugagcaucugua

SEQ ID NO: 946274 - RNA, 19 nt, Artificial Sequence
  Description of Artificial Sequence: Synthetic oligonucleotide
  Sense strand starting at position 3103 of SEQ ID NO: 913689
guauauauuugugaccaaa

SEQ ID NO: 946275 - RNA, 19 nt, Artificial Sequence
  Description of Artificial Sequence: Synthetic oligonucleotide
  Antisense strand to SEQ ID NO: 946274
uuuggucacaaauauauac

SEQ ID NO: 946276 - RNA, 19 nt, Artificial Sequence
  Description of Artificial Sequence: Synthetic oligonucleotide
  Sense strand starting at position 2903 of SEQ ID NO: 913689
cagagccugccuugauaga

SEQ ID NO: 946277 - RNA, 19 nt, Artificial Sequence
  Description of Artificial Sequence: Synthetic oligonucleotide
  Antisense strand to SEQ ID NO: 946276
ucuaucaaggcaggcucug

SEQ ID NO: 946278 - RNA, 19 nt, Artificial Sequence
  Description of Artificial Sequence: Synthetic oligonucleotide
  Sense strand starting at position 2459 of SEQ ID NO: 913689
ggaaauugguaggaggaaa

SEQ ID NO: 946279 - RNA, 19 nt, Artificial Sequence
  Description of Artificial Sequence: Synthetic oligonucleotide
  Antisense strand to SEQ ID NO: 946278
uuuccuccuaccaauuucc

SEQ ID NO: 946280 - RNA, 19 nt, Artificial Sequence
  Description of Artificial Sequence: Synthetic oligonucleotide
  Sense strand starting at position 2613 of SEQ ID NO: 913689
agguuuaggcccuaagcuu

SEQ ID NO: 946281 - RNA, 19 nt, Artificial Sequence
  Description of Artificial Sequence: Synthetic oligonucleotide
  Antisense strand to SEQ ID NO: 946280
aagcuuagggccuaaaccu

SEQ ID NO: 946282 - RNA, 19 nt, Artificial Sequence
  Description of Artificial Sequence: Synthetic oligonucleotide
  Sense strand starting at position 3896 of SEQ ID NO: 913689
ugcuguagagccuagguaa

SEQ ID NO: 946283 - RNA, 19 nt, Artificial Sequence
  Description of Artificial Sequence: Synthetic oligonucleotide
  Antisense strand to SEQ ID NO: 946282
uuaccuaggcucuacagca

SEQ ID NO: 946284 - RNA, 19 nt, Artificial Sequence
  Description of Artificial Sequence: Synthetic oligonucleotide
  Sense strand starting at position 2783 of SEQ ID NO: 913689
cguaaagacguugacaguu

SEQ ID NO: 946285 - RNA, 19 nt, Artificial Sequence
  Description of Artificial Sequence: Synthetic oligonucleotide
  Antisense strand to SEQ ID NO: 946284
aacugucaacgucuuuacg

SEQ ID NO: 946286 - RNA, 19 nt, Artificial Sequence
  Description of Artificial Sequence: Synthetic oligonucleotide
  Sense strand starting at position 2773 of SEQ ID NO: 913689
aggugaauuucguaaagac

SEQ ID NO: 946287 - RNA, 19 nt, Artificial Sequence
  Description of Artificial Sequence: Synthetic oligonucleotide
  Antisense strand to SEQ ID NO: 946286
gucuuuacgaaauucaccu

SEQ ID NO: 946288 - RNA, 19 nt, Artificial Sequence
  Description of Artificial Sequence: Synthetic oligonucleotide
  Sense strand starting at position 2390 of SEQ ID NO: 913689
ggaaaucacacguguccuu

SEQ ID NO: 946289 - RNA, 19 nt, Artificial Sequence
  Description of Artificial Sequence: Synthetic oligonucleotide
  Antisense strand to SEQ ID NO: 946288
aaggacacgugugauuucc

SEQ ID NO: 946290 - RNA, 19 nt, Artificial Sequence
  Description of Artificial Sequence: Synthetic oligonucleotide
  Sense strand starting at position 975 of SEQ ID NO: 913689
gaaagcauuugacggacaa

SEQ ID NO: 946291 - RNA, 19 nt, Artificial Sequence
  Description of Artificial Sequence: Synthetic oligonucleotide
  Antisense strand to SEQ ID NO: 946290
uuguccgucaaaugcuuuc

SEQ ID NO: 946292 - RNA, 19 nt, Artificial Sequence
  Description of Artificial Sequence: Synthetic oligonucleotide
  Sense strand starting at position 2823 of SEQ ID NO: 913689
cgugauaaaucugcagagu

SEQ ID NO: 946293 - RNA, 19 nt, Artificial Sequence
  Description of Artificial Sequence: Synthetic oligonucleotide
  Antisense strand to SEQ ID NO: 946292
acucugcagauuuaucacg

SEQ ID NO: 946294 - RNA, 19 nt, Artificial Sequence
  Description of Artificial Sequence: Synthetic oligonucleotide
  Sense strand starting at position 2721 of SEQ ID NO: 913690
gcauuuaaacccggccaga

SEQ ID NO: 946295 - RNA, 19 nt, Artificial Sequence
  Description of Artificial Sequence: Synthetic oligonucleotide
  Antisense strand to SEQ ID NO: 946294
ucuggccggguuuaaaugc

SEQ ID NO: 946296 - RNA, 19 nt, Artificial Sequence
  Description of Artificial Sequence: Synthetic oligonucleotide
  Sense strand starting at position 871 of SEQ ID NO: 913690
gcuccauccagugaaagag

SEQ ID NO: 946297 - RNA, 19 nt, Artificial Sequence
  Description of Artificial Sequence: Synthetic oligonucleotide
  Antisense strand to SEQ ID NO: 946296
cucuuucacuggauggagc

SEQ ID NO: 946298 - RNA, 19 nt, Artificial Sequence
  Description of Artificial Sequence: Synthetic oligonucleotide
  Sense strand starting at position 1916 of SEQ ID NO: 913690
ccaguuuguuuauuuacuu

SEQ ID NO: 946299 - RNA, 19 nt, Artificial Sequence
  Description of Artificial Sequence: Synthetic oligonucleotide
  Antisense strand to SEQ ID NO: 946298
aaguaaauaaacaaacugg

SEQ ID NO: 946300 - RNA, 19 nt, Artificial Sequence
  Description of Artificial Sequence: Synthetic oligonucleotide
  Sense strand starting at position 1913 of SEQ ID NO: 913690
gagccaguuuguuuauuua

SEQ ID NO: 946301 - RNA, 19 nt, Artificial Sequence
  Description of Artificial Sequence: Synthetic oligonucleotide
  Antisense strand to SEQ ID NO: 946300
uaaauaaacaaacuggcuc

SEQ ID NO: 946302 - RNA, 19 nt, Artificial Sequence
  Description of Artificial Sequence: Synthetic oligonucleotide
  Sense strand starting at position 1912 of SEQ ID NO: 913690
ggagccaguuuguuuauuu

SEQ ID NO: 946303 - RNA, 19 nt, Artificial Sequence
  Description of Artificial Sequence: Synthetic oligonucleotide
  Antisense strand to SEQ ID NO: 946302
aaauaaacaaacuggcucc

SEQ ID NO: 946304 - RNA, 19 nt, Artificial Sequence
  Description of Artificial Sequence: Synthetic oligonucleotide
  Sense strand starting at position 1191 of SEQ ID NO: 913690
ugaagaggguuccuaaagu

SEQ ID NO: 946305 - RNA, 19 nt, Artificial Sequence
  Description of Artificial Sequence: Synthetic oligonucleotide
  Antisense strand to SEQ ID NO: 946304
acuuuaggaacccucuuca

SEQ ID NO: 946306 - RNA, 19 nt, Artificial Sequence
  Description of Artificial Sequence: Synthetic oligonucleotide
  Sense strand starting at position 3899 of SEQ ID NO: 913690
gugcuuaccggugcugauu

SEQ ID NO: 946307 - RNA, 19 nt, Artificial Sequence
  Description of Artificial Sequence: Synthetic oligonucleotide
  Antisense strand to SEQ ID NO: 946306
aaucagcaccgguaagcac

SEQ ID NO: 946308 - RNA, 19 nt, Artificial Sequence
  Description of Artificial Sequence: Synthetic oligonucleotide
  Sense strand starting at position 3836 of SEQ ID NO: 913690
ggaggagaaugucuucuuu

SEQ ID NO: 946309 - RNA, 19 nt, Artificial Sequence
  Description of Artificial Sequence: Synthetic oligonucleotide
  Antisense strand to SEQ ID NO: 946308
aaagaagacauucuccucc

SEQ ID NO: 946310 - RNA, 19 nt, Artificial Sequence
  Description of Artificial Sequence: Synthetic oligonucleotide
  Sense strand starting at position 3521 of SEQ ID NO: 913690
uugguuguugaguaaacaa

SEQ ID NO: 946311 - RNA, 19 nt, Artificial Sequence
  Description of Artificial Sequence: Synthetic oligonucleotide
  Antisense strand to SEQ ID NO: 946310
uuguuuacucaacaaccaa

SEQ ID NO: 946312 - RNA, 19 nt, Artificial Sequence
  Description of Artificial Sequence: Synthetic oligonucleotide
  Sense strand starting at position 3602 of SEQ ID NO: 913690
ucucuaacagucuaaguua

SEQ ID NO: 946313 - RNA, 19 nt, Artificial Sequence
  Description of Artificial Sequence: Synthetic oligonucleotide
  Antisense strand to SEQ ID NO: 946312
uaacuuagacuguuagaga

SEQ ID NO: 946314 - RNA, 19 nt, Artificial Sequence
  Description of Artificial Sequence: Synthetic oligonucleotide
  Sense strand starting at position 2151 of SEQ ID NO: 913690
gcguguuccgaggccagau

SEQ ID NO: 946315 - RNA, 19 nt, Artificial Sequence
  Description of Artificial Sequence: Synthetic oligonucleotide
  Antisense strand to SEQ ID NO: 946314
aucuggccucggaacacgc

SEQ ID NO: 946316 - RNA, 19 nt, Artificial Sequence
  Description of Artificial Sequence: Synthetic oligonucleotide
  Sense strand starting at position 3754 of SEQ ID NO: 913690
aacuaagacuuugugugaa

SEQ ID NO: 946317 - RNA, 19 nt, Artificial Sequence
  Description of Artificial Sequence: Synthetic oligonucleotide
  Antisense strand to SEQ ID NO: 946316
uucacacaaagucuuaguu

SEQ ID NO: 946318 - RNA, 19 nt, Artificial Sequence
  Description of Artificial Sequence: Synthetic oligonucleotide
  Sense strand starting at position 3756 of SEQ ID NO: 913690
cuaagacuuugugugaaga

SEQ ID NO: 946319 - RNA, 19 nt, Artificial Sequence
  Description of Artificial Sequence: Synthetic oligonucleotide
  Antisense strand to SEQ ID NO: 946318
ucuucacacaaagucuuag

SEQ ID NO: 946320 - RNA, 19 nt, Artificial Sequence
  Description of Artificial Sequence: Synthetic oligonucleotide
  Sense strand starting at position 311 of SEQ ID NO: 913690
ccagaagcuacucgggaaa

SEQ ID NO: 946321 - RNA, 19 nt, Artificial Sequence
  Description of Artificial Sequence: Synthetic oligonucleotide
  Antisense strand to SEQ ID NO: 946320
uuucccgaguagcuucugg

SEQ ID NO: 946322 - RNA, 19 nt, Artificial Sequence
  Description of Artificial Sequence: Synthetic oligonucleotide
  Sense strand starting at position 2116 of SEQ ID NO: 913690
gauguuagugguuauugga

SEQ ID NO: 946323 - RNA, 19 nt, Artificial Sequence
  Description of Artificial Sequence: Synthetic oligonucleotide
  Antisense strand to SEQ ID NO: 946322
uccaauaaccacuaacauc

SEQ ID NO: 946324 - RNA, 19 nt, Artificial Sequence
  Description of Artificial Sequence: Synthetic oligonucleotide
  Sense strand starting at position 2779 of SEQ ID NO: 913690
cuguuucgagaguaaauua

SEQ ID NO: 946325 - RNA, 19 nt, Artificial Sequence
  Description of Artificial Sequence: Synthetic oligonucleotide
  Antisense strand to SEQ ID NO: 946324
uaauuuacucucgaaacag

SEQ ID NO: 946326 - RNA, 19 nt, Artificial Sequence
  Description of Artificial Sequence: Synthetic oligonucleotide
  Sense strand starting at position 3757 of SEQ ID NO: 913690
uaagacuuugugugaagac

SEQ ID NO: 946327 - RNA, 19 nt, Artificial Sequence
  Description of Artificial Sequence: Synthetic oligonucleotide
  Antisense strand to SEQ ID NO: 946326
gucuucacacaaagucuua

SEQ ID NO: 946328 - RNA, 19 nt, Artificial Sequence
  Description of Artificial Sequence: Synthetic oligonucleotide
  Sense strand starting at position 3753 of SEQ ID NO: 913690
gaacuaagacuuuguguga

SEQ ID NO: 946329 - RNA, 19 nt, Artificial Sequence
  Description of Artificial Sequence: Synthetic oligonucleotide
  Antisense strand to SEQ ID NO: 946328
ucacacaaagucuuaguuc

SEQ ID NO: 946330 - RNA, 19 nt, Artificial Sequence
  Description of Artificial Sequence: Synthetic oligonucleotide
  Sense strand starting at position 3910 of SEQ ID NO: 913690
ugcugauuacuugggauag

SEQ ID NO: 946331 - RNA, 19 nt, Artificial Sequence
  Description of Artificial Sequence: Synthetic oligonucleotide
  Antisense strand to SEQ ID NO: 946330
cuaucccaaguaaucagca

SEQ ID NO: 946332 - RNA, 19 nt, Artificial Sequence
  Description of Artificial Sequence: Synthetic oligonucleotide
  Sense strand starting at position 3928 of SEQ ID NO: 913690
guuggauuacaaugagguu

SEQ ID NO: 946333 - RNA, 19 nt, Artificial Sequence
  Description of Artificial Sequence: Synthetic oligonucleotide
  Antisense strand to SEQ ID NO: 946332
aaccucauuguaauccaac

SEQ ID NO: 946334 - RNA, 19 nt, Artificial Sequence
  Description of Artificial Sequence: Synthetic oligonucleotide
  Sense strand starting at position 870 of SEQ ID NO: 913690
agcuccauccagugaaaga

SEQ ID NO: 946335 - RNA, 19 nt, Artificial Sequence
  Description of Artificial Sequence: Synthetic oligonucleotide
  Antisense strand to SEQ ID NO: 946334
ucuuucacuggauggagcu

SEQ ID NO: 946336 - RNA, 19 nt, Artificial Sequence
  Description of Artificial Sequence: Synthetic oligonucleotide
  Sense strand starting at position 1831 of SEQ ID NO: 913690
ggcaauggguucccaaaca

SEQ ID NO: 946337 - RNA, 19 nt, Artificial Sequence
  Description of Artificial Sequence: Synthetic oligonucleotide
  Antisense strand to SEQ ID NO: 946336
uguuugggaacccauugcc

SEQ ID NO: 946338 - RNA, 19 nt, Artificial Sequence
  Description of Artificial Sequence: Synthetic oligonucleotide
  Sense strand starting at position 3827 of SEQ ID NO: 913690
uucguaaguggaggagaau

SEQ ID NO: 946339 - RNA, 19 nt, Artificial Sequence
  Description of Artificial Sequence: Synthetic oligonucleotide
  Antisense strand to SEQ ID NO: 946338
auucuccuccacuuacgaa

SEQ ID NO: 946340 - RNA, 19 nt, Artificial Sequence
  Description of Artificial Sequence: Synthetic oligonucleotide
  Sense strand starting at position 3489 of SEQ ID NO: 913690
gggauacucuaguucagug

SEQ ID NO: 946341 - RNA, 19 nt, Artificial Sequence
  Description of Artificial Sequence: Synthetic oligonucleotide
  Antisense strand to SEQ ID NO: 946340
cacugaacuagaguauccc

SEQ ID NO: 946342 - RNA, 19 nt, Artificial Sequence
  Description of Artificial Sequence: Synthetic oligonucleotide
  Sense strand starting at position 3642 of SEQ ID NO: 913690
guaauuaagucaucugauc

SEQ ID NO: 946343 - RNA, 19 nt, Artificial Sequence
  Description of Artificial Sequence: Synthetic oligonucleotide
  Antisense strand to SEQ ID NO: 946342
gaucagaugacuuaauuac

SEQ ID NO: 946344 - RNA, 19 nt, Artificial Sequence
  Description of Artificial Sequence: Synthetic oligonucleotide
  Sense strand starting at position 3634 of SEQ ID NO: 913690
gcagaaauguaauuaaguc

SEQ ID NO: 946345 - RNA, 19 nt, Artificial Sequence
  Description of Artificial Sequence: Synthetic oligonucleotide
  Antisense strand to SEQ ID NO: 946344
gacuuaauuacauuucugc

SEQ ID NO: 946346 - RNA, 19 nt, Artificial Sequence
  Description of Artificial Sequence: Synthetic oligonucleotide
  Sense strand starting at position 3403 of SEQ ID NO: 913690
guuccuccaggguaaguau

SEQ ID NO: 946347 - RNA, 19 nt, Artificial Sequence
  Description of Artificial Sequence: Synthetic oligonucleotide
  Antisense strand to SEQ ID NO: 946346
auacuuacccuggaggaac

SEQ ID NO: 946348 - RNA, 19 nt, Artificial Sequence
  Description of Artificial Sequence: Synthetic oligonucleotide
  Sense strand starting at position 3908 of SEQ ID NO: 913690
ggugcugauuacuugggau

SEQ ID NO: 946349 - RNA, 19 nt, Artificial Sequence
  Description of Artificial Sequence: Synthetic oligonucleotide
  Antisense strand to SEQ ID NO: 946348
aucccaaguaaucagcacc

SEQ ID NO: 946350 - RNA, 19 nt, Artificial Sequence
  Description of Artificial Sequence: Synthetic oligonucleotide
  Sense strand starting at position 1990 of SEQ ID NO: 913690
cuuuaucugcgcuaggaaa

SEQ ID NO: 946351 - RNA, 19 nt, Artificial Sequence
  Description of Artificial Sequence: Synthetic oligonucleotide
  Antisense strand to SEQ ID NO: 946350
uuuccuagcgcagauaaag

SEQ ID NO: 946352 - RNA, 19 nt, Artificial Sequence
  Description of Artificial Sequence: Synthetic oligonucleotide
  Sense strand starting at position 2113 of SEQ ID NO: 913690
agggauguuagugguuauu

SEQ ID NO: 946353 - RNA, 19 nt, Artificial Sequence
  Description of Artificial Sequence: Synthetic oligonucleotide
  Antisense strand to SEQ ID NO: 946352
aauaaccacuaacaucccu

SEQ ID NO: 946354 - RNA, 19 nt, Artificial Sequence
  Description of Artificial Sequence: Synthetic oligonucleotide
  Sense strand starting at position 3520 of SEQ ID NO: 913690
cuugguuguugaguaaaca

SEQ ID NO: 946355 - RNA, 19 nt, Artificial Sequence
  Description of Artificial Sequence: Synthetic oligonucleotide
  Antisense strand to SEQ ID NO: 946354
uguuuacucaacaaccaag

SEQ ID NO: 946356 - RNA, 19 nt, Artificial Sequence
  Description of Artificial Sequence: Synthetic oligonucleotide
  Sense strand starting at position 3611 of SEQ ID NO: 913690
gucuaaguuacaggcugaa

SEQ ID NO: 946357 - RNA, 19 nt, Artificial Sequence
  Description of Artificial Sequence: Synthetic oligonucleotide
  Antisense strand to SEQ ID NO: 946356
uucagccuguaacuuagac

SEQ ID NO: 946358 - RNA, 19 nt, Artificial Sequence
  Description of Artificial Sequence: Synthetic oligonucleotide
  Sense strand starting at position 2480 of SEQ ID NO: 913690
gccagacccuucuucggaa

SEQ ID NO: 946359 - RNA, 19 nt, Artificial Sequence
  Description of Artificial Sequence: Synthetic oligonucleotide
  Antisense strand to SEQ ID NO: 946358
uuccgaagaagggucuggc

SEQ ID NO: 946360 - RNA, 19 nt, Artificial Sequence
  Description of Artificial Sequence: Synthetic oligonucleotide
  Sense strand starting at position 2104 of SEQ ID NO: 913690
augcucguuagggauguua

SEQ ID NO: 946361 - RNA, 19 nt, Artificial Sequence
  Description of Artificial Sequence: Synthetic oligonucleotide
  Antisense strand to SEQ ID NO: 946360
uaacaucccuaacgagcau

SEQ ID NO: 946362 - RNA, 19 nt, Artificial Sequence
  Description of Artificial Sequence: Synthetic oligonucleotide
  Sense strand starting at position 659 of SEQ ID NO: 913690
aggaaagacucagagggua

SEQ ID NO: 946363 - RNA, 19 nt, Artificial Sequence
  Description of Artificial Sequence: Synthetic oligonucleotide
  Antisense strand to SEQ ID NO: 946362
uacccucugagucuuuccu

SEQ ID NO: 946364 - RNA, 19 nt, Artificial Sequence
  Description of Artificial Sequence: Synthetic oligonucleotide
  Sense strand starting at position 2100 of SEQ ID NO: 913690
ucggaugcucguuagggau

SEQ ID NO: 946365 - RNA, 19 nt, Artificial Sequence
  Description of Artificial Sequence: Synthetic oligonucleotide
  Antisense strand to SEQ ID NO: 946364
aucccuaacgagcauccga

SEQ ID NO: 946366 - RNA, 19 nt, Artificial Sequence
  Description of Artificial Sequence: Synthetic oligonucleotide
  Sense strand starting at position 3516 of SEQ ID NO: 913690
uacacuugguuguugagua

SEQ ID NO: 946367 - RNA, 19 nt, Artificial Sequence
  Description of Artificial Sequence: Synthetic oligonucleotide
  Antisense strand to SEQ ID NO: 946366
uacucaacaaccaagugua

SEQ ID NO: 946368 - RNA, 19 nt, Artificial Sequence
  Description of Artificial Sequence: Synthetic oligonucleotide
  Sense strand starting at position 3826 of SEQ ID NO: 913690
uuucguaaguggaggagaa

SEQ ID NO: 946369 - RNA, 19 nt, Artificial Sequence
  Description of Artificial Sequence: Synthetic oligonucleotide
  Antisense strand to SEQ ID NO: 946368
uucuccuccacuuacgaaa

SEQ ID NO: 946370 - RNA, 19 nt, Artificial Sequence
  Description of Artificial Sequence: Synthetic oligonucleotide
  Sense strand starting at position 3650 of SEQ ID NO: 913690
gucaucugaucaguuucuu

SEQ ID NO: 946371 - RNA, 19 nt, Artificial Sequence
  Description of Artificial Sequence: Synthetic oligonucleotide
  Antisense strand to SEQ ID NO: 946370
aagaaacugaucagaugac

SEQ ID NO: 946372 - RNA, 19 nt, Artificial Sequence
  Description of Artificial Sequence: Synthetic oligonucleotide
  Sense strand starting at position 3656 of SEQ ID NO: 913690
ugaucaguuucuucgacuu

SEQ ID NO: 946373 - RNA, 19 nt, Artificial Sequence
  Description of Artificial Sequence: Synthetic oligonucleotide
  Antisense strand to SEQ ID NO: 946372
aagucgaagaaacugauca

SEQ ID NO: 946374 - RNA, 19 nt, Artificial Sequence
  Description of Artificial Sequence: Synthetic oligonucleotide
  Sense strand starting at position 2391 of SEQ ID NO: 913691
gcauuuaaacccggccaga

SEQ ID NO: 946375 - RNA, 19 nt, Artificial Sequence
  Description of Artificial Sequence: Synthetic oligonucleotide
  Antisense strand to SEQ ID NO: 946374
ucuggccggguuuaaaugc

SEQ ID NO: 946376 - RNA, 19 nt, Artificial Sequence
  Description of Artificial Sequence: Synthetic oligonucleotide
  Sense strand starting at position 541 of SEQ ID NO: 913691
gcuccauccagugaaagag

SEQ ID NO: 946377 - RNA, 19 nt, Artificial Sequence
  Description of Artificial Sequence: Synthetic oligonucleotide
  Antisense strand to SEQ ID NO: 946376
cucuuucacuggauggagc

SEQ ID NO: 946378 - RNA, 19 nt, Artificial Sequence
  Description of Artificial Sequence: Synthetic oligonucleotide
  Sense strand starting at position 1586 of SEQ ID NO: 913691
ccaguuuguuuauuuacuu

SEQ ID NO: 946379 - RNA, 19 nt, Artificial Sequence
  Description of Artificial Sequence: Synthetic oligonucleotide
  Antisense strand to SEQ ID NO: 946378
aaguaaauaaacaaacugg

SEQ ID NO: 946380 - RNA, 19 nt, Artificial Sequence
  Description of Artificial Sequence: Synthetic oligonucleotide
  Sense strand starting at position 1583 of SEQ ID NO: 913691
gagccaguuuguuuauuua

SEQ ID NO: 946381 - RNA, 19 nt, Artificial Sequence
  Description of Artificial Sequence: Synthetic oligonucleotide
  Antisense strand to SEQ ID NO: 946380
uaaauaaacaaacuggcuc

SEQ ID NO: 946382 - RNA, 19 nt, Artificial Sequence
  Description of Artificial Sequence: Synthetic oligonucleotide
  Sense strand starting at position 1582 of SEQ ID NO: 913691
ggagccaguuuguuuauuu

SEQ ID NO: 946383 - RNA, 19 nt, Artificial Sequence
  Description of Artificial Sequence: Synthetic oligonucleotide
  Antisense strand to SEQ ID NO: 946382
aaauaaacaaacuggcucc

SEQ ID NO: 946384 - RNA, 19 nt, Artificial Sequence
  Description of Artificial Sequence: Synthetic oligonucleotide
  Sense strand starting at position 861 of SEQ ID NO: 913691
ugaagaggguuccuaaagu

SEQ ID NO: 946385 - RNA, 19 nt, Artificial Sequence
  Description of Artificial Sequence: Synthetic oligonucleotide
  Antisense strand to SEQ ID NO: 946384
acuuuaggaacccucuuca

SEQ ID NO: 946386 - RNA, 19 nt, Artificial Sequence
  Description of Artificial Sequence: Synthetic oligonucleotide
  Sense strand starting at position 3569 of SEQ ID NO: 913691
gugcuuaccggugcugauu

SEQ ID NO: 946387 - RNA, 19 nt, Artificial Sequence
  Description of Artificial Sequence: Synthetic oligonucleotide
  Antisense strand to SEQ ID NO: 946386
aaucagcaccgguaagcac

SEQ ID NO: 946388 - RNA, 19 nt, Artificial Sequence
  Description of Artificial Sequence: Synthetic oligonucleotide
  Sense strand starting at position 3506 of SEQ ID NO: 913691
ggaggagaaugucuucuuu

SEQ ID NO: 946389 - RNA, 19 nt, Artificial Sequence
  Description of Artificial Sequence: Synthetic oligonucleotide
  Antisense strand to SEQ ID NO: 946388
aaagaagacauucuccucc

SEQ ID NO: 946390 - RNA, 19 nt, Artificial Sequence
  Description of Artificial Sequence: Synthetic oligonucleotide
  Sense strand starting at position 3191 of SEQ ID NO: 913691
uugguuguugaguaaacaa

SEQ ID NO: 946391 - RNA, 19 nt, Artificial Sequence
  Description of Artificial Sequence: Synthetic oligonucleotide
  Antisense strand to SEQ ID NO: 946390
uuguuuacucaacaaccaa

SEQ ID NO: 946392 - RNA, 19 nt, Artificial Sequence
  Description of Artificial Sequence: Synthetic oligonucleotide
  Sense strand starting at position 3272 of SEQ ID NO: 913691
ucucuaacagucuaaguua

SEQ ID NO: 946393 - RNA, 19 nt, Artificial Sequence
  Description of Artificial Sequence: Synthetic oligonucleotide
  Antisense strand to SEQ ID NO: 946392
uaacuuagacuguuagaga

SEQ ID NO: 946394 - RNA, 19 nt, Artificial Sequence
  Description of Artificial Sequence: Synthetic oligonucleotide
  Sense strand starting at position 1821 of SEQ ID NO: 913691
gcguguuccgaggccagau

SEQ ID NO: 946395 - RNA, 19 nt, Artificial Sequence
  Description of Artificial Sequence: Synthetic oligonucleotide
  Antisense strand to SEQ ID NO: 946394
aucuggccucggaacacgc

SEQ ID NO: 946396 - RNA, 19 nt, Artificial Sequence
  Description of Artificial Sequence: Synthetic oligonucleotide
  Sense strand starting at position 3424 of SEQ ID NO: 913691
aacuaagacuuugugugaa

SEQ ID NO: 946397 - RNA, 19 nt, Artificial Sequence
  Description of Artificial Sequence: Synthetic oligonucleotide
  Antisense strand to SEQ ID NO: 946396
uucacacaaagucuuaguu

SEQ ID NO: 946398 - RNA, 19 nt, Artificial Sequence
  Description of Artificial Sequence: Synthetic oligonucleotide
  Sense strand starting at position 3426 of SEQ ID NO: 913691
cuaagacuuugugugaaga

SEQ ID NO: 946399 - RNA, 19 nt, Artificial Sequence
  Description of Artificial Sequence: Synthetic oligonucleotide
  Antisense strand to SEQ ID NO: 946398
ucuucacacaaagucuuag

SEQ ID NO: 946400 - RNA, 19 nt, Artificial Sequence
  Description of Artificial Sequence: Synthetic oligonucleotide
  Sense strand starting at position 1786 of SEQ ID NO: 913691
gauguuagugguuauugga

SEQ ID NO: 946401 - RNA, 19 nt, Artificial Sequence
  Description of Artificial Sequence: Synthetic oligonucleotide
  Antisense strand to SEQ ID NO: 946400
uccaauaaccacuaacauc

SEQ ID NO: 946402 - RNA, 19 nt, Artificial Sequence
  Description of Artificial Sequence: Synthetic oligonucleotide
  Sense strand starting at position 2449 of SEQ ID NO: 913691
cuguuucgagaguaaauua

SEQ ID NO: 946403 - RNA, 19 nt, Artificial Sequence
  Description of Artificial Sequence: Synthetic oligonucleotide
  Antisense strand to SEQ ID NO: 946402
uaauuuacucucgaaacag

SEQ ID NO: 946404 - RNA, 19 nt, Artificial Sequence
  Description of Artificial Sequence: Synthetic oligonucleotide
  Sense strand starting at position 3427 of SEQ ID NO: 913691
uaagacuuugugugaagac

SEQ ID NO: 946405 - RNA, 19 nt, Artificial Sequence
  Description of Artificial Sequence: Synthetic oligonucleotide
  Antisense strand to SEQ ID NO: 946404
gucuucacacaaagucuua

SEQ ID NO: 946406 - RNA, 19 nt, Artificial Sequence
  Description of Artificial Sequence: Synthetic oligonucleotide
  Sense strand starting at position 3423 of SEQ ID NO: 913691
gaacuaagacuuuguguga

SEQ ID NO: 946407 - RNA, 19 nt, Artificial Sequence
  Description of Artificial Sequence: Synthetic oligonucleotide
  Antisense strand to SEQ ID NO: 946406
ucacacaaagucuuaguuc

SEQ ID NO: 946408 - RNA, 19 nt, Artificial Sequence
  Description of Artificial Sequence: Synthetic oligonucleotide
  Sense strand starting at position 3676 of SEQ ID NO: 913691
cuauauauuccacggaauu

SEQ ID NO: 946409 - RNA, 19 nt, Artificial Sequence
  Description of Artificial Sequence: Synthetic oligonucleotide
  Antisense strand to SEQ ID NO: 946408
aauuccguggaauauauag

SEQ ID NO: 946410 - RNA, 19 nt, Artificial Sequence
  Description of Artificial Sequence: Synthetic oligonucleotide
  Sense strand starting at position 3580 of SEQ ID NO: 913691
ugcugauuacuugggauag

SEQ ID NO: 946411 - RNA, 19 nt, Artificial Sequence
  Description of Artificial Sequence: Synthetic oligonucleotide
  Antisense strand to SEQ ID NO: 946410
cuaucccaaguaaucagca

SEQ ID NO: 946412 - RNA, 19 nt, Artificial Sequence
  Description of Artificial Sequence: Synthetic oligonucleotide
  Sense strand starting at position 3598 of SEQ ID NO: 913691
guuggauuacaaugagguu

SEQ ID NO: 946413 - RNA, 19 nt, Artificial Sequence
  Description of Artificial Sequence: Synthetic oligonucleotide
  Antisense strand to SEQ ID NO: 946412
aaccucauuguaauccaac

SEQ ID NO: 946414 - RNA, 19 nt, Artificial Sequence
  Description of Artificial Sequence: Synthetic oligonucleotide
  Sense strand starting at position 540 of SEQ ID NO: 913691
agcuccauccagugaaaga

SEQ ID NO: 946415 - RNA, 19 nt, Artificial Sequence
  Description of Artificial Sequence: Synthetic oligonucleotide
  Antisense strand to SEQ ID NO: 946414
ucuuucacuggauggagcu

SEQ ID NO: 946416 - RNA, 19 nt, Artificial Sequence
  Description of Artificial Sequence: Synthetic oligonucleotide
  Sense strand starting at position 1501 of SEQ ID NO: 913691
ggcaauggguucccaaaca

SEQ ID NO: 946417 - RNA, 19 nt, Artificial Sequence
  Description of Artificial Sequence: Synthetic oligonucleotide
  Antisense strand to SEQ ID NO: 946416
uguuugggaacccauugcc

SEQ ID NO: 946418 - RNA, 19 nt, Artificial Sequence
  Description of Artificial Sequence: Synthetic oligonucleotide
  Sense strand starting at position 3497 of SEQ ID NO: 913691
uucguaaguggaggagaau

SEQ ID NO: 946419 - RNA, 19 nt, Artificial Sequence
  Description of Artificial Sequence: Synthetic oligonucleotide
  Antisense strand to SEQ ID NO: 946418
auucuccuccacuuacgaa

SEQ ID NO: 946420 - RNA, 19 nt, Artificial Sequence
  Description of Artificial Sequence: Synthetic oligonucleotide
  Sense strand starting at position 3159 of SEQ ID NO: 913691
gggauacucuaguucagug

SEQ ID NO: 946421 - RNA, 19 nt, Artificial Sequence
  Description of Artificial Sequence: Synthetic oligonucleotide
  Antisense strand to SEQ ID NO: 946420
cacugaacuagaguauccc

SEQ ID NO: 946422 - RNA, 19 nt, Artificial Sequence
  Description of Artificial Sequence: Synthetic oligonucleotide
  Sense strand starting at position 3312 of SEQ ID NO: 913691
guaauuaagucaucugauc

SEQ ID NO: 946423 - RNA, 19 nt, Artificial Sequence
  Description of Artificial Sequence: Synthetic oligonucleotide
  Antisense strand to SEQ ID NO: 946422
gaucagaugacuuaauuac

SEQ ID NO: 946424 - RNA, 19 nt, Artificial Sequence
  Description of Artificial Sequence: Synthetic oligonucleotide
  Sense strand starting at position 3304 of SEQ ID NO: 913691
gcagaaauguaauuaaguc

SEQ ID NO: 946425 - RNA, 19 nt, Artificial Sequence
  Description of Artificial Sequence: Synthetic oligonucleotide
  Antisense strand to SEQ ID NO: 946424
gacuuaauuacauuucugc

SEQ ID NO: 946426 - RNA, 19 nt, Artificial Sequence
  Description of Artificial Sequence: Synthetic oligonucleotide
  Sense strand starting at position 3073 of SEQ ID NO: 913691
guuccuccaggguaaguau

SEQ ID NO: 946427 - RNA, 19 nt, Artificial Sequence
  Description of Artificial Sequence: Synthetic oligonucleotide
  Antisense strand to SEQ ID NO: 946426
auacuuacccuggaggaac

SEQ ID NO: 946428 - RNA, 19 nt, Artificial Sequence
  Description of Artificial Sequence: Synthetic oligonucleotide
  Sense strand starting at position 3819 of SEQ ID NO: 913691
agacuuuaccauggugcaa

SEQ ID NO: 946429 - RNA, 19 nt, Artificial Sequence
  Description of Artificial Sequence: Synthetic oligonucleotide
  Antisense strand to SEQ ID NO: 946428
uugcaccaugguaaagucu

SEQ ID NO: 946430 - RNA, 19 nt, Artificial Sequence
  Description of Artificial Sequence: Synthetic oligonucleotide
  Sense strand starting at position 3740 of SEQ ID NO: 913691
gcucucccaguguagaaua

SEQ ID NO: 946431 - RNA, 19 nt, Artificial Sequence
  Description of Artificial Sequence: Synthetic oligonucleotide
  Antisense strand to SEQ ID NO: 946430
uauucuacacugggagagc

SEQ ID NO: 946432 - RNA, 19 nt, Artificial Sequence
  Description of Artificial Sequence: Synthetic oligonucleotide
  Sense strand starting at position 3578 of SEQ ID NO: 913691
ggugcugauuacuugggau

SEQ ID NO: 946433 - RNA, 19 nt, Artificial Sequence
  Description of Artificial Sequence: Synthetic oligonucleotide
  Antisense strand to SEQ ID NO: 946432
aucccaaguaaucagcacc

SEQ ID NO: 946434 - RNA, 19 nt, Artificial Sequence
  Description of Artificial Sequence: Synthetic oligonucleotide
  Sense strand starting at position 3818 of SEQ ID NO: 913691
uagacuuuaccauggugca

SEQ ID NO: 946435 - RNA, 19 nt, Artificial Sequence
  Description of Artificial Sequence: Synthetic oligonucleotide
  Antisense strand to SEQ ID NO: 946434
ugcaccaugguaaagucua

SEQ ID NO: 946436 - RNA, 19 nt, Artificial Sequence
  Description of Artificial Sequence: Synthetic oligonucleotide
  Sense strand starting at position 1660 of SEQ ID NO: 913691
cuuuaucugcgcuaggaaa

SEQ ID NO: 946437 - RNA, 19 nt, Artificial Sequence
  Description of Artificial Sequence: Synthetic oligonucleotide
  Antisense strand to SEQ ID NO: 946436
uuuccuagcgcagauaaag

SEQ ID NO: 946438 - RNA, 19 nt, Artificial Sequence
  Description of Artificial Sequence: Synthetic oligonucleotide
  Sense strand starting at position 1783 of SEQ ID NO: 913691
agggauguuagugguuauu

SEQ ID NO: 946439 - RNA, 19 nt, Artificial Sequence
  Description of Artificial Sequence: Synthetic oligonucleotide
  Antisense strand to SEQ ID NO: 946438
aauaaccacuaacaucccu

SEQ ID NO: 946440 - RNA, 19 nt, Artificial Sequence
  Description of Artificial Sequence: Synthetic oligonucleotide
  Sense strand starting at position 3190 of SEQ ID NO: 913691
cuugguuguugaguaaaca

SEQ ID NO: 946441 - RNA, 19 nt, Artificial Sequence
  Description of Artificial Sequence: Synthetic oligonucleotide
  Antisense strand to SEQ ID NO: 946440
uguuuacucaacaaccaag

SEQ ID NO: 946442 - RNA, 19 nt, Artificial Sequence
  Description of Artificial Sequence: Synthetic oligonucleotide
  Sense strand starting at position 3281 of SEQ ID NO: 913691
gucuaaguuacaggcugaa

SEQ ID NO: 946443 - RNA, 19 nt, Artificial Sequence
  Description of Artificial Sequence: Synthetic oligonucleotide
  Antisense strand to SEQ ID NO: 946442
uucagccuguaacuuagac

SEQ ID NO: 946444 - RNA, 19 nt, Artificial Sequence
  Description of Artificial Sequence: Synthetic oligonucleotide
  Sense strand starting at position 2150 of SEQ ID NO: 913691
gccagacccuucuucggaa

SEQ ID NO: 946445 - RNA, 19 nt, Artificial Sequence
  Description of Artificial Sequence: Synthetic oligonucleotide
  Antisense strand to SEQ ID NO: 946444
uuccgaagaagggucuggc

SEQ ID NO: 946446 - RNA, 19 nt, Artificial Sequence
  Description of Artificial Sequence: Synthetic oligonucleotide
  Sense strand starting at position 1774 of SEQ ID NO: 913691
augcucguuagggauguua

SEQ ID NO: 946447 - RNA, 19 nt, Artificial Sequence
  Description of Artificial Sequence: Synthetic oligonucleotide
  Antisense strand to SEQ ID NO: 946446
uaacaucccuaacgagcau

SEQ ID NO: 946448 - RNA, 19 nt, Artificial Sequence
  Description of Artificial Sequence: Synthetic oligonucleotide
  Sense strand starting at position 329 of SEQ ID NO: 913691
aggaaagacucagagggua

SEQ ID NO: 946449 - RNA, 19 nt, Artificial Sequence
  Description of Artificial Sequence: Synthetic oligonucleotide
  Antisense strand to SEQ ID NO: 946448
uacccucugagucuuuccu

SEQ ID NO: 946450 - RNA, 19 nt, Artificial Sequence
  Description of Artificial Sequence: Synthetic oligonucleotide
  Sense strand starting at position 1770 of SEQ ID NO: 913691
ucggaugcucguuagggau

SEQ ID NO: 946451 - RNA, 19 nt, Artificial Sequence
  Description of Artificial Sequence: Synthetic oligonucleotide
  Antisense strand to SEQ ID NO: 946450
aucccuaacgagcauccga

SEQ ID NO: 946452 - RNA, 19 nt, Artificial Sequence
  Description of Artificial Sequence: Synthetic oligonucleotide
  Sense strand starting at position 3186 of SEQ ID NO: 913691
uacacuugguuguugagua

SEQ ID NO: 946453 - RNA, 19 nt, Artificial Sequence
  Description of Artificial Sequence: Synthetic oligonucleotide
  Antisense strand to SEQ ID NO: 946452
uacucaacaaccaagugua

SEQ ID NO: 946454 - RNA, 19 nt, Artificial Sequence
  Description of Artificial Sequence: Synthetic oligonucleotide
  Sense strand starting at position 3698 of SEQ ID NO: 913692
gcauuuaaacccggccaga

SEQ ID NO: 946455 - RNA, 19 nt, Artificial Sequence
  Description of Artificial Sequence: Synthetic oligonucleotide
  Antisense strand to SEQ ID NO: 946454
ucuggccggguuuaaaugc

SEQ ID NO: 946456 - RNA, 19 nt, Artificial Sequence
  Description of Artificial Sequence: Synthetic oligonucleotide
  Sense strand starting at position 1848 of SEQ ID NO: 913692
gcuccauccagugaaagag

SEQ ID NO: 946457 - RNA, 19 nt, Artificial Sequence
  Description of Artificial Sequence: Synthetic oligonucleotide
  Antisense strand to SEQ ID NO: 946456
cucuuucacuggauggagc

SEQ ID NO: 946458 - RNA, 19 nt, Artificial Sequence
  Description of Artificial Sequence: Synthetic oligonucleotide
  Sense strand starting at position 144 of SEQ ID NO: 913692
uuccuauuauuauugagag

SEQ ID NO: 946459 - RNA, 19 nt, Artificial Sequence
  Description of Artificial Sequence: Synthetic oligonucleotide
  Antisense strand to SEQ ID NO: 946458
cucucaauaauaauaggaa

SEQ ID NO: 946460 - RNA, 19 nt, Artificial Sequence
  Description of Artificial Sequence: Synthetic oligonucleotide
  Sense strand starting at position 2893 of SEQ ID NO: 913692
ccaguuuguuuauuuacuu

SEQ ID NO: 946461 - RNA, 19 nt, Artificial Sequence
  Description of Artificial Sequence: Synthetic oligonucleotide
  Antisense strand to SEQ ID NO: 946460
aaguaaauaaacaaacugg

SEQ ID NO: 946462 - RNA, 19 nt, Artificial Sequence
  Description of Artificial Sequence: Synthetic oligonucleotide
  Sense strand starting at position 388 of SEQ ID NO: 913692
aaggaaagguccucacucu

SEQ ID NO: 946463 - RNA, 19 nt, Artificial Sequence
  Description of Artificial Sequence: Synthetic oligonucleotide
  Antisense strand to SEQ ID NO: 946462
agagugaggaccuuuccuu

SEQ ID NO: 946464 - RNA, 19 nt, Artificial Sequence
  Description of Artificial Sequence: Synthetic oligonucleotide
  Sense strand starting at position 2890 of SEQ ID NO: 913692
gagccaguuuguuuauuua

SEQ ID NO: 946465 - RNA, 19 nt, Artificial Sequence
  Description of Artificial Sequence: Synthetic oligonucleotide
  Antisense strand to SEQ ID NO: 946464
uaaauaaacaaacuggcuc

SEQ ID NO: 946466 - RNA, 19 nt, Artificial Sequence
  Description of Artificial Sequence: Synthetic oligonucleotide
  Sense strand starting at position 2889 of SEQ ID NO: 913692
ggagccaguuuguuuauuu

SEQ ID NO: 946467 - RNA, 19 nt, Artificial Sequence
  Description of Artificial Sequence: Synthetic oligonucleotide
  Antisense strand to SEQ ID NO: 946466
aaauaaacaaacuggcucc

SEQ ID NO: 946468 - RNA, 19 nt, Artificial Sequence
  Description of Artificial Sequence: Synthetic oligonucleotide
  Sense strand starting at position 2168 of SEQ ID NO: 913692
ugaagaggguuccuaaagu

SEQ ID NO: 946469 - RNA, 19 nt, Artificial Sequence
  Description of Artificial Sequence: Synthetic oligonucleotide
  Antisense strand to SEQ ID NO: 946468
acuuuaggaacccucuuca

SEQ ID NO: 946470 - RNA, 19 nt, Artificial Sequence
  Description of Artificial Sequence: Synthetic oligonucleotide
  Sense strand starting at position 3128 of SEQ ID NO: 913692
gcguguuccgaggccagau

SEQ ID NO: 946471 - RNA, 19 nt, Artificial Sequence
  Description of Artificial Sequence: Synthetic oligonucleotide
  Antisense strand to SEQ ID NO: 946470
aucuggccucggaacacgc

SEQ ID NO: 946472 - RNA, 19 nt, Artificial Sequence
  Description of Artificial Sequence: Synthetic oligonucleotide
  Sense strand starting at position 82 of SEQ ID NO: 913692
uacaucagagcagguuaaa

SEQ ID NO: 946473 - RNA, 19 nt, Artificial Sequence
  Description of Artificial Sequence: Synthetic oligonucleotide
  Antisense strand to SEQ ID NO: 946472
uuuaaccugcucugaugua

SEQ ID NO: 946474 - RNA, 19 nt, Artificial Sequence
  Description of Artificial Sequence: Synthetic oligonucleotide
  Sense strand starting at position 1288 of SEQ ID NO: 913692
ccagaagcuacucgggaaa

SEQ ID NO: 946475 - RNA, 19 nt, Artificial Sequence
  Description of Artificial Sequence: Synthetic oligonucleotide
  Antisense strand to SEQ ID NO: 946474
uuucccgaguagcuucugg

SEQ ID NO: 946476 - RNA, 19 nt, Artificial Sequence
  Description of Artificial Sequence: Synthetic oligonucleotide
  Sense strand starting at position 3093 of SEQ ID NO: 913692
gauguuagugguuauugga

SEQ ID NO: 946477 - RNA, 19 nt, Artificial Sequence
  Description of Artificial Sequence: Synthetic oligonucleotide
  Antisense strand to SEQ ID NO: 946476
uccaauaaccacuaacauc

SEQ ID NO: 946478 - RNA, 19 nt, Artificial Sequence
  Description of Artificial Sequence: Synthetic oligonucleotide
  Sense strand starting at position 3756 of SEQ ID NO: 913692
cuguuucgagaguaaauua

SEQ ID NO: 946479 - RNA, 19 nt, Artificial Sequence
  Description of Artificial Sequence: Synthetic oligonucleotide
  Antisense strand to SEQ ID NO: 946478
uaauuuacucucgaaacag

SEQ ID NO: 946480 - RNA, 19 nt, Artificial Sequence
  Description of Artificial Sequence: Synthetic oligonucleotide
  Sense strand starting at position 1847 of SEQ ID NO: 913692
agcuccauccagugaaaga

SEQ ID NO: 946481 - RNA, 19 nt, Artificial Sequence
  Description of Artificial Sequence: Synthetic oligonucleotide
  Antisense strand to SEQ ID NO: 946480
ucuuucacuggauggagcu

SEQ ID NO: 946482 - RNA, 19 nt, Artificial Sequence
  Description of Artificial Sequence: Synthetic oligonucleotide
  Sense strand starting at position 2808 of SEQ ID NO: 913692
ggcaauggguucccaaaca

SEQ ID NO: 946483 - RNA, 19 nt, Artificial Sequence
  Description of Artificial Sequence: Synthetic oligonucleotide
  Antisense strand to SEQ ID NO: 946482
uguuugggaacccauugcc

SEQ ID NO: 946484 - RNA, 19 nt, Artificial Sequence
  Description of Artificial Sequence: Synthetic oligonucleotide
  Sense strand starting at position 526 of SEQ ID NO: 913692
ugguacaugcuccaguaaa

SEQ ID NO: 946485 - RNA, 19 nt, Artificial Sequence
  Description of Artificial Sequence: Synthetic oligonucleotide
  Antisense strand to SEQ ID NO: 946484
uuuacuggagcauguacca

SEQ ID NO: 946486 - RNA, 19 nt, Artificial Sequence
  Description of Artificial Sequence: Synthetic oligonucleotide
  Sense strand starting at position 47 of SEQ ID NO: 913692
cuggauucuccuggaccuu

SEQ ID NO: 946487 - RNA, 19 nt, Artificial Sequence
  Description of Artificial Sequence: Synthetic oligonucleotide
  Antisense strand to SEQ ID NO: 946486
aagguccaggagaauccag

SEQ ID NO: 946488 - RNA, 19 nt, Artificial Sequence
  Description of Artificial Sequence: Synthetic oligonucleotide
  Sense strand starting at position 181 of SEQ ID NO: 913692
cuggcucuccuuggaaaga

SEQ ID NO: 946489 - RNA, 19 nt, Artificial Sequence
  Description of Artificial Sequence: Synthetic oligonucleotide
  Antisense strand to SEQ ID NO: 946488
ucuuuccaaggagagccag

SEQ ID NO: 946490 - RNA, 19 nt, Artificial Sequence
  Description of Artificial Sequence: Synthetic oligonucleotide
  Sense strand starting at position 2967 of SEQ ID NO: 913692
cuuuaucugcgcuaggaaa

SEQ ID NO: 946491 - RNA, 19 nt, Artificial Sequence
  Description of Artificial Sequence: Synthetic oligonucleotide
  Antisense strand to SEQ ID NO: 946490
uuuccuagcgcagauaaag

SEQ ID NO: 946492 - RNA, 19 nt, Artificial Sequence
  Description of Artificial Sequence: Synthetic oligonucleotide
  Sense strand starting at position 3090 of SEQ ID NO: 913692
agggauguuagugguuauu

SEQ ID NO: 946493 - RNA, 19 nt, Artificial Sequence
  Description of Artificial Sequence: Synthetic oligonucleotide
  Antisense strand to SEQ ID NO: 946492
aauaaccacuaacaucccu

SEQ ID NO: 946494 - RNA, 19 nt, Artificial Sequence
  Description of Artificial Sequence: Synthetic oligonucleotide
  Sense strand starting at position 3457 of SEQ ID NO: 913692
gccagacccuucuucggaa

SEQ ID NO: 946495 - RNA, 19 nt, Artificial Sequence
  Description of Artificial Sequence: Synthetic oligonucleotide
  Antisense strand to SEQ ID NO: 946494
uuccgaagaagggucuggc

SEQ ID NO: 946496 - RNA, 19 nt, Artificial Sequence
  Description of Artificial Sequence: Synthetic oligonucleotide
  Sense strand starting at position 3081 of SEQ ID NO: 913692
augcucguuagggauguua

SEQ ID NO: 946497 - RNA, 19 nt, Artificial Sequence
  Description of Artificial Sequence: Synthetic oligonucleotide
  Antisense strand to SEQ ID NO: 946496
uaacaucccuaacgagcau

SEQ ID NO: 946498 - RNA, 19 nt, Artificial Sequence
  Description of Artificial Sequence: Synthetic oligonucleotide
  Sense strand starting at position 1636 of SEQ ID NO: 913692
aggaaagacucagagggua

SEQ ID NO: 946499 - RNA, 19 nt, Artificial Sequence
  Description of Artificial Sequence: Synthetic oligonucleotide
  Antisense strand to SEQ ID NO: 946498
uacccucugagucuuuccu

SEQ ID NO: 946500 - RNA, 19 nt, Artificial Sequence
  Description of Artificial Sequence: Synthetic oligonucleotide
  Sense strand starting at position 3077 of SEQ ID NO: 913692
ucggaugcucguuagggau

SEQ ID NO: 946501 - RNA, 19 nt, Artificial Sequence
  Description of Artificial Sequence: Synthetic oligonucleotide
  Antisense strand to SEQ ID NO: 946500
aucccuaacgagcauccga

SEQ ID NO: 946502 - RNA, 19 nt, Artificial Sequence
  Description of Artificial Sequence: Synthetic oligonucleotide
  Sense strand starting at position 180 of SEQ ID NO: 913692
gcuggcucuccuuggaaag

SEQ ID NO: 946503 - RNA, 19 nt, Artificial Sequence
  Description of Artificial Sequence: Synthetic oligonucleotide
  Antisense strand to SEQ ID NO: 946502
cuuuccaaggagagccagc

SEQ ID NO: 946504 - RNA, 19 nt, Artificial Sequence
  Description of Artificial Sequence: Synthetic oligonucleotide
  Sense strand starting at position 135 of SEQ ID NO: 913692
gggcaagccuuccuauuau

SEQ ID NO: 946505 - RNA, 19 nt, Artificial Sequence
  Description of Artificial Sequence: Synthetic oligonucleotide
  Antisense strand to SEQ ID NO: 946504
auaauaggaaggcuugccc

SEQ ID NO: 946506 - RNA, 19 nt, Artificial Sequence
  Description of Artificial Sequence: Synthetic oligonucleotide
  Sense strand starting at position 740 of SEQ ID NO: 913692
ggcacugaucacuggcuuu

SEQ ID NO: 946507 - RNA, 19 nt, Artificial Sequence
  Description of Artificial Sequence: Synthetic oligonucleotide
  Antisense strand to SEQ ID NO: 946506
aaagccagugaucagugcc

SEQ ID NO: 946508 - RNA, 19 nt, Artificial Sequence
  Description of Artificial Sequence: Synthetic oligonucleotide
  Sense strand starting at position 1188 of SEQ ID NO: 913692
gcgcuuuccgaggagaagu

SEQ ID NO: 946509 - RNA, 19 nt, Artificial Sequence
  Description of Artificial Sequence: Synthetic oligonucleotide
  Antisense strand to SEQ ID NO: 946508
acuucuccucggaaagcgc

SEQ ID NO: 946510 - RNA, 19 nt, Artificial Sequence
  Description of Artificial Sequence: Synthetic oligonucleotide
  Sense strand starting at position 3960 of SEQ ID NO: 913692
ggcagugcucgggaucuuu

SEQ ID NO: 946511 - RNA, 19 nt, Artificial Sequence
  Description of Artificial Sequence: Synthetic oligonucleotide
  Antisense strand to SEQ ID NO: 946510
aaagaucccgagcacugcc

SEQ ID NO: 946512 - RNA, 19 nt, Artificial Sequence
  Description of Artificial Sequence: Synthetic oligonucleotide
  Sense strand starting at position 1187 of SEQ ID NO: 913692
ggcgcuuuccgaggagaag

SEQ ID NO: 946513 - RNA, 19 nt, Artificial Sequence
  Description of Artificial Sequence: Synthetic oligonucleotide
  Antisense strand to SEQ ID NO: 946512
cuucuccucggaaagcgcc

SEQ ID NO: 946514 - RNA, 19 nt, Artificial Sequence
  Description of Artificial Sequence: Synthetic oligonucleotide
  Sense strand starting at position 3968 of SEQ ID NO: 913692
ucgggaucuuugcugaugu

SEQ ID NO: 946515 - RNA, 19 nt, Artificial Sequence
  Description of Artificial Sequence: Synthetic oligonucleotide
  Antisense strand to SEQ ID NO: 946514
acaucagcaaagaucccga

SEQ ID NO: 946516 - RNA, 19 nt, Artificial Sequence
  Description of Artificial Sequence: Synthetic oligonucleotide
  Sense strand starting at position 2965 of SEQ ID NO: 913692
cacuuuaucugcgcuagga

SEQ ID NO: 946517 - RNA, 19 nt, Artificial Sequence
  Description of Artificial Sequence: Synthetic oligonucleotide
  Antisense strand to SEQ ID NO: 946516
uccuagcgcagauaaagug

SEQ ID NO: 946518 - RNA, 19 nt, Artificial Sequence
  Description of Artificial Sequence: Synthetic oligonucleotide
  Sense strand starting at position 3076 of SEQ ID NO: 913692
cucggaugcucguuaggga

SEQ ID NO: 946519 - RNA, 19 nt, Artificial Sequence
  Description of Artificial Sequence: Synthetic oligonucleotide
  Antisense strand to SEQ ID NO: 946518
ucccuaacgagcauccgag

SEQ ID NO: 946520 - RNA, 19 nt, Artificial Sequence
  Description of Artificial Sequence: Synthetic oligonucleotide
  Sense strand starting at position 1436 of SEQ ID NO: 913692
ccgccaaguugggucauua

SEQ ID NO: 946521 - RNA, 19 nt, Artificial Sequence
  Description of Artificial Sequence: Synthetic oligonucleotide
  Antisense strand to SEQ ID NO: 946520
uaaugacccaacuuggcgg

SEQ ID NO: 946522 - RNA, 19 nt, Artificial Sequence
  Description of Artificial Sequence: Synthetic oligonucleotide
  Sense strand starting at position 3142 of SEQ ID NO: 913692
cagauuucuucuggccaga

SEQ ID NO: 946523 - RNA, 19 nt, Artificial Sequence
  Description of Artificial Sequence: Synthetic oligonucleotide
  Antisense strand to SEQ ID NO: 946522
ucuggccagaagaaaucug

SEQ ID NO: 946524 - RNA, 19 nt, Artificial Sequence
  Description of Artificial Sequence: Synthetic oligonucleotide
  Sense strand starting at position 3494 of SEQ ID NO: 913692
gucacuaguggcugugauu

SEQ ID NO: 946525 - RNA, 19 nt, Artificial Sequence
  Description of Artificial Sequence: Synthetic oligonucleotide
  Antisense strand to SEQ ID NO: 946524
aaucacagccacuagugac

SEQ ID NO: 946526 - RNA, 19 nt, Artificial Sequence
  Description of Artificial Sequence: Synthetic oligonucleotide
  Sense strand starting at position 3141 of SEQ ID NO: 913692
ccagauuucuucuggccag

SEQ ID NO: 946527 - RNA, 19 nt, Artificial Sequence
  Description of Artificial Sequence: Synthetic oligonucleotide
  Antisense strand to SEQ ID NO: 946526
cuggccagaagaaaucugg

SEQ ID NO: 946528 - RNA, 19 nt, Artificial Sequence
  Description of Artificial Sequence: Synthetic oligonucleotide
  Sense strand starting at position 148 of SEQ ID NO: 913692
uauuauuauugagaggcca

SEQ ID NO: 946529 - RNA, 19 nt, Artificial Sequence
  Description of Artificial Sequence: Synthetic oligonucleotide
  Antisense strand to SEQ ID NO: 946528
uggccucucaauaauaaua

SEQ ID NO: 946530 - RNA, 19 nt, Artificial Sequence
  Description of Artificial Sequence: Synthetic oligonucleotide
  Sense strand starting at position 3083 of SEQ ID NO: 913692
gcucguuagggauguuagu

SEQ ID NO: 946531 - RNA, 19 nt, Artificial Sequence
  Description of Artificial Sequence: Synthetic oligonucleotide
  Antisense strand to SEQ ID NO: 946530
acuaacaucccuaacgagc

SEQ ID NO: 946532 - RNA, 19 nt, Artificial Sequence
  Description of Artificial Sequence: Synthetic oligonucleotide
  Sense strand starting at position 182 of SEQ ID NO: 913692
uggcucuccuuggaaagaa

SEQ ID NO: 946533 - RNA, 19 nt, Artificial Sequence
  Description of Artificial Sequence: Synthetic oligonucleotide
  Antisense strand to SEQ ID NO: 946532
uucuuuccaaggagagcca

SEQ ID NO: 946534 - RNA, 19 nt, Artificial Sequence
  Description of Artificial Sequence: Synthetic oligonucleotide
  Sense strand starting at position 2082 of SEQ ID NO: 913693
gucauagucagcguccauu

SEQ ID NO: 946535 - RNA, 19 nt, Artificial Sequence
  Description of Artificial Sequence: Synthetic oligonucleotide
  Antisense strand to SEQ ID NO: 946534
aauggacgcugacuaugac

SEQ ID NO: 946536 - RNA, 19 nt, Artificial Sequence
  Description of Artificial Sequence: Synthetic oligonucleotide
  Sense strand starting at position 3149 of SEQ ID NO: 913693
gugauaaggugauuaacaa

SEQ ID NO: 946537 - RNA, 19 nt, Artificial Sequence
  Description of Artificial Sequence: Synthetic oligonucleotide
  Antisense strand to SEQ ID NO: 946536
uuguuaaucaccuuaucac

SEQ ID NO: 946538 - RNA, 19 nt, Artificial Sequence
  Description of Artificial Sequence: Synthetic oligonucleotide
  Sense strand starting at position 3857 of SEQ ID NO: 913693
uggaguuugcaggauugaa

SEQ ID NO: 946539 - RNA, 19 nt, Artificial Sequence
  Description of Artificial Sequence: Synthetic oligonucleotide
  Antisense strand to SEQ ID NO: 946538
uucaauccugcaaacucca

SEQ ID NO: 946540 - RNA, 19 nt, Artificial Sequence
  Description of Artificial Sequence: Synthetic oligonucleotide
  Sense strand starting at position 2464 of SEQ ID NO: 913693
uguaauaggccugauaaca

SEQ ID NO: 946541 - RNA, 19 nt, Artificial Sequence
  Description of Artificial Sequence: Synthetic oligonucleotide
  Antisense strand to SEQ ID NO: 946540
uguuaucaggccuauuaca

SEQ ID NO: 946542 - RNA, 19 nt, Artificial Sequence
  Description of Artificial Sequence: Synthetic oligonucleotide
  Sense strand starting at position 3682 of SEQ ID NO: 913693
uggucauaucauugggaaa

SEQ ID NO: 946543 - RNA, 19 nt, Artificial Sequence
  Description of Artificial Sequence: Synthetic oligonucleotide
  Antisense strand to SEQ ID NO: 946542
uuucccaaugauaugacca

SEQ ID NO: 946544 - RNA, 19 nt, Artificial Sequence
  Description of Artificial Sequence: Synthetic oligonucleotide
  Sense strand starting at position 3683 of SEQ ID NO: 913693
ggucauaucauugggaaau

SEQ ID NO: 946545 - RNA, 19 nt, Artificial Sequence
  Description of Artificial Sequence: Synthetic oligonucleotide
  Antisense strand to SEQ ID NO: 946544
auuucccaaugauaugacc

SEQ ID NO: 946546 - RNA, 19 nt, Artificial Sequence
  Description of Artificial Sequence: Synthetic oligonucleotide
  Sense strand starting at position 3673 of SEQ ID NO: 913693
ggaggaaucuggucauauc

SEQ ID NO: 946547 - RNA, 19 nt, Artificial Sequence
  Description of Artificial Sequence: Synthetic oligonucleotide
  Antisense strand to SEQ ID NO: 946546
gauaugaccagauuccucc

SEQ ID NO: 946548 - RNA, 19 nt, Artificial Sequence
  Description of Artificial Sequence: Synthetic oligonucleotide
  Sense strand starting at position 3927 of SEQ ID NO: 913693
uucugaacuggguggauaa

SEQ ID NO: 946549 - RNA, 19 nt, Artificial Sequence
  Description of Artificial Sequence: Synthetic oligonucleotide
  Antisense strand to SEQ ID NO: 946548
uuauccacccaguucagaa

SEQ ID NO: 946550 - RNA, 19 nt, Artificial Sequence
  Description of Artificial Sequence: Synthetic oligonucleotide
  Sense strand starting at position 3928 of SEQ ID NO: 913693
ucugaacuggguggauaau

SEQ ID NO: 946551 - RNA, 19 nt, Artificial Sequence
  Description of Artificial Sequence: Synthetic oligonucleotide
  Antisense strand to SEQ ID NO: 946550
auuauccacccaguucaga

SEQ ID NO: 946552 - RNA, 19 nt, Artificial Sequence
  Description of Artificial Sequence: Synthetic oligonucleotide
  Sense strand starting at position 427 of SEQ ID NO: 913693
guuauacugcauuacaaag

SEQ ID NO: 946553 - RNA, 19 nt, Artificial Sequence
  Description of Artificial Sequence: Synthetic oligonucleotide
  Antisense strand to SEQ ID NO: 946552
cuuuguaaugcaguauaac

SEQ ID NO: 946554 - RNA, 19 nt, Artificial Sequence
  Description of Artificial Sequence: Synthetic oligonucleotide
  Sense strand starting at position 718 of SEQ ID NO: 913693
gguggucaaccagaaguca

SEQ ID NO: 946555 - RNA, 19 nt, Artificial Sequence
  Description of Artificial Sequence: Synthetic oligonucleotide
  Antisense strand to SEQ ID NO: 946554
ugacuucugguugaccacc

SEQ ID NO: 946556 - RNA, 19 nt, Artificial Sequence
  Description of Artificial Sequence: Synthetic oligonucleotide
  Sense strand starting at position 3012 of SEQ ID NO: 913693
ccgugugugcuaccacuau

SEQ ID NO: 946557 - RNA, 19 nt, Artificial Sequence
  Description of Artificial Sequence: Synthetic oligonucleotide
  Antisense strand to SEQ ID NO: 946556
auagugguagcacacacgg

SEQ ID NO: 946558 - RNA, 19 nt, Artificial Sequence
  Description of Artificial Sequence: Synthetic oligonucleotide
  Sense strand starting at position 559 of SEQ ID NO: 913693
uacuauaaugcguaaagga

SEQ ID NO: 946559 - RNA, 19 nt, Artificial Sequence
  Description of Artificial Sequence: Synthetic oligonucleotide
  Antisense strand to SEQ ID NO: 946558
uccuuuacgcauuauagua

SEQ ID NO: 946560 - RNA, 19 nt, Artificial Sequence
  Description of Artificial Sequence: Synthetic oligonucleotide
  Sense strand starting at position 386 of SEQ ID NO: 913693
ggaauagugucauccaaag

SEQ ID NO: 946561 - RNA, 19 nt, Artificial Sequence
  Description of Artificial Sequence: Synthetic oligonucleotide
  Antisense strand to SEQ ID NO: 946560
cuuuggaugacacuauucc

SEQ ID NO: 946562 - RNA, 19 nt, Artificial Sequence
  Description of Artificial Sequence: Synthetic oligonucleotide
  Sense strand starting at position 3471 of SEQ ID NO: 913693
uucuguuaucagcaaagag

SEQ ID NO: 946563 - RNA, 19 nt, Artificial Sequence
  Description of Artificial Sequence: Synthetic oligonucleotide
  Antisense strand to SEQ ID NO: 946562
cucuuugcugauaacagaa

SEQ ID NO: 946564 - RNA, 19 nt, Artificial Sequence
  Description of Artificial Sequence: Synthetic oligonucleotide
  Sense strand starting at position 3681 of SEQ ID NO: 913693
cuggucauaucauugggaa

SEQ ID NO: 946565 - RNA, 19 nt, Artificial Sequence
  Description of Artificial Sequence: Synthetic oligonucleotide
  Antisense strand to SEQ ID NO: 946564
uucccaaugauaugaccag

SEQ ID NO: 946566 - RNA, 19 nt, Artificial Sequence
  Description of Artificial Sequence: Synthetic oligonucleotide
  Sense strand starting at position 768 of SEQ ID NO: 913693
gugacuacaauaggucaga

SEQ ID NO: 946567 - RNA, 19 nt, Artificial Sequence
  Description of Artificial Sequence: Synthetic oligonucleotide
  Antisense strand to SEQ ID NO: 946566
ucugaccuauuguagucac

SEQ ID NO: 946568 - RNA, 19 nt, Artificial Sequence
  Description of Artificial Sequence: Synthetic oligonucleotide
  Sense strand starting at position 3881 of SEQ ID NO: 913693
ggucaaauauagcugauaa

SEQ ID NO: 946569 - RNA, 19 nt, Artificial Sequence
  Description of Artificial Sequence: Synthetic oligonucleotide
  Antisense strand to SEQ ID NO: 946568
uuaucagcuauauuugacc

SEQ ID NO: 946570 - RNA, 19 nt, Artificial Sequence
  Description of Artificial Sequence: Synthetic oligonucleotide
  Sense strand starting at position 265 of SEQ ID NO: 913693
uguuaauaacuggacguga

SEQ ID NO: 946571 - RNA, 19 nt, Artificial Sequence
  Description of Artificial Sequence: Synthetic oligonucleotide
  Antisense strand to SEQ ID NO: 946570
ucacguccaguuauuaaca

SEQ ID NO: 946572 - RNA, 19 nt, Artificial Sequence
  Description of Artificial Sequence: Synthetic oligonucleotide
  Sense strand starting at position 708 of SEQ ID NO: 913693
auacuagauggguggucaa

SEQ ID NO: 946573 - RNA, 19 nt, Artificial Sequence
  Description of Artificial Sequence: Synthetic oligonucleotide
  Antisense strand to SEQ ID NO: 946572
uugaccacccaucuaguau

SEQ ID NO: 946574 - RNA, 19 nt, Artificial Sequence
  Description of Artificial Sequence: Synthetic oligonucleotide
  Sense strand starting at position 846 of SEQ ID NO: 913693
gugaauucuaggcaaguga

SEQ ID NO: 946575 - RNA, 19 nt, Artificial Sequence
  Description of Artificial Sequence: Synthetic oligonucleotide
  Antisense strand to SEQ ID NO: 946574
ucacuugccuagaauucac

SEQ ID NO: 946576 - RNA, 19 nt, Artificial Sequence
  Description of Artificial Sequence: Synthetic oligonucleotide
  Sense strand starting at position 2820 of SEQ ID NO: 913693
gcgugauuggugccuguaa

SEQ ID NO: 946577 - RNA, 19 nt, Artificial Sequence
  Description of Artificial Sequence: Synthetic oligonucleotide
  Antisense strand to SEQ ID NO: 946576
uuacaggcaccaaucacgc

SEQ ID NO: 946578 - RNA, 19 nt, Artificial Sequence
  Description of Artificial Sequence: Synthetic oligonucleotide
  Sense strand starting at position 619 of SEQ ID NO: 913693
ccagguuucccuuacauua

SEQ ID NO: 946579 - RNA, 19 nt, Artificial Sequence
  Description of Artificial Sequence: Synthetic oligonucleotide
  Antisense strand to SEQ ID NO: 946578
uaauguaagggaaaccugg

SEQ ID NO: 946580 - RNA, 19 nt, Artificial Sequence
  Description of Artificial Sequence: Synthetic oligonucleotide
  Sense strand starting at position 3522 of SEQ ID NO: 913693
ucuugaagucaaugacuca

SEQ ID NO: 946581 - RNA, 19 nt, Artificial Sequence
  Description of Artificial Sequence: Synthetic oligonucleotide
  Antisense strand to SEQ ID NO: 946580
ugagucauugacuucaaga

SEQ ID NO: 946582 - RNA, 19 nt, Artificial Sequence
  Description of Artificial Sequence: Synthetic oligonucleotide
  Sense strand starting at position 2647 of SEQ ID NO: 913693
agcucuguucuagaaauau

SEQ ID NO: 946583 - RNA, 19 nt, Artificial Sequence
  Description of Artificial Sequence: Synthetic oligonucleotide
  Antisense strand to SEQ ID NO: 946582
auauuucuagaacagagcu

SEQ ID NO: 946584 - RNA, 19 nt, Artificial Sequence
  Description of Artificial Sequence: Synthetic oligonucleotide
  Sense strand starting at position 2516 of SEQ ID NO: 913693
ggacuaagauguuuccauu

SEQ ID NO: 946585 - RNA, 19 nt, Artificial Sequence
  Description of Artificial Sequence: Synthetic oligonucleotide
  Antisense strand to SEQ ID NO: 946584
aauggaaacaucuuagucc

SEQ ID NO: 946586 - RNA, 19 nt, Artificial Sequence
  Description of Artificial Sequence: Synthetic oligonucleotide
  Sense strand starting at position 3839 of SEQ ID NO: 913693
agagauauauugcugaagu

SEQ ID NO: 946587 - RNA, 19 nt, Artificial Sequence
  Description of Artificial Sequence: Synthetic oligonucleotide
  Antisense strand to SEQ ID NO: 946586
acuucagcaauauaucucu

SEQ ID NO: 946588 - RNA, 19 nt, Artificial Sequence
  Description of Artificial Sequence: Synthetic oligonucleotide
  Sense strand starting at position 3788 of SEQ ID NO: 913693
gcaauaaaggcuggaauua

SEQ ID NO: 946589 - RNA, 19 nt, Artificial Sequence
  Description of Artificial Sequence: Synthetic oligonucleotide
  Antisense strand to SEQ ID NO: 946588
uaauuccagccuuuauugc

SEQ ID NO: 946590 - RNA, 19 nt, Artificial Sequence
  Description of Artificial Sequence: Synthetic oligonucleotide
  Sense strand starting at position 2819 of SEQ ID NO: 913693
ggcgugauuggugccugua

SEQ ID NO: 946591 - RNA, 19 nt, Artificial Sequence
  Description of Artificial Sequence: Synthetic oligonucleotide
  Antisense strand to SEQ ID NO: 946590
uacaggcaccaaucacgcc

SEQ ID NO: 946592 - RNA, 19 nt, Artificial Sequence
  Description of Artificial Sequence: Synthetic oligonucleotide
  Sense strand starting at position 3260 of SEQ ID NO: 913693
gccuucuauguggauaaua

SEQ ID NO: 946593 - RNA, 19 nt, Artificial Sequence
  Description of Artificial Sequence: Synthetic oligonucleotide
  Antisense strand to SEQ ID NO: 946592
uauuauccacauagaaggc

SEQ ID NO: 946594 - RNA, 19 nt, Artificial Sequence
  Description of Artificial Sequence: Synthetic oligonucleotide
  Sense strand starting at position 335 of SEQ ID NO: 913693
accagcauccagugggaaa

SEQ ID NO: 946595 - RNA, 19 nt, Artificial Sequence
  Description of Artificial Sequence: Synthetic oligonucleotide
  Antisense strand to SEQ ID NO: 946594
uuucccacuggaugcuggu

SEQ ID NO: 946596 - RNA, 19 nt, Artificial Sequence
  Description of Artificial Sequence: Synthetic oligonucleotide
  Sense strand starting at position 788 of SEQ ID NO: 913693
ugaaaugacgaguguaaac

SEQ ID NO: 946597 - RNA, 19 nt, Artificial Sequence
  Description of Artificial Sequence: Synthetic oligonucleotide
  Antisense strand to SEQ ID NO: 946596
guuuacacucgucauuuca

SEQ ID NO: 946598 - RNA, 19 nt, Artificial Sequence
  Description of Artificial Sequence: Synthetic oligonucleotide
  Sense strand starting at position 3787 of SEQ ID NO: 913693
ggcaauaaaggcuggaauu

SEQ ID NO: 946599 - RNA, 19 nt, Artificial Sequence
  Description of Artificial Sequence: Synthetic oligonucleotide
  Antisense strand to SEQ ID NO: 946598
aauuccagccuuuauugcc

SEQ ID NO: 946600 - RNA, 19 nt, Artificial Sequence
  Description of Artificial Sequence: Synthetic oligonucleotide
  Sense strand starting at position 1314 of SEQ ID NO: 913693
acagguuagaagugaccuu

SEQ ID NO: 946601 - RNA, 19 nt, Artificial Sequence
  Description of Artificial Sequence: Synthetic oligonucleotide
  Antisense strand to SEQ ID NO: 946600
aaggucacuucuaaccugu

SEQ ID NO: 946602 - RNA, 19 nt, Artificial Sequence
  Description of Artificial Sequence: Synthetic oligonucleotide
  Sense strand starting at position 1338 of SEQ ID NO: 913693
gaguguggaucucuaagac

SEQ ID NO: 946603 - RNA, 19 nt, Artificial Sequence
  Description of Artificial Sequence: Synthetic oligonucleotide
  Antisense strand to SEQ ID NO: 946602
gucuuagagauccacacuc

SEQ ID NO: 946604 - RNA, 19 nt, Artificial Sequence
  Description of Artificial Sequence: Synthetic oligonucleotide
  Sense strand starting at position 3904 of SEQ ID NO: 913693
gaggaaggcucccugagua

SEQ ID NO: 946605 - RNA, 19 nt, Artificial Sequence
  Description of Artificial Sequence: Synthetic oligonucleotide
  Antisense strand to SEQ ID NO: 946604
uacucagggagccuuccuc

SEQ ID NO: 946606 - RNA, 19 nt, Artificial Sequence
  Description of Artificial Sequence: Synthetic oligonucleotide
  Sense strand starting at position 2501 of SEQ ID NO: 913693
ccaggauugcucugaggac

SEQ ID NO: 946607 - RNA, 19 nt, Artificial Sequence
  Description of Artificial Sequence: Synthetic oligonucleotide
  Antisense strand to SEQ ID NO: 946606
guccucagagcaauccugg

SEQ ID NO: 946608 - RNA, 19 nt, Artificial Sequence
  Description of Artificial Sequence: Synthetic oligonucleotide
  Sense strand starting at position 1395 of SEQ ID NO: 913693
acccuaauccaagggcuua

SEQ ID NO: 946609 - RNA, 19 nt, Artificial Sequence
  Description of Artificial Sequence: Synthetic oligonucleotide
  Antisense strand to SEQ ID NO: 946608
uaagcccuuggauuagggu

SEQ ID NO: 946610 - RNA, 19 nt, Artificial Sequence
  Description of Artificial Sequence: Synthetic oligonucleotide
  Sense strand starting at position 2566 of SEQ ID NO: 913693
uggaauacgcgagagaguu

SEQ ID NO: 946611 - RNA, 19 nt, Artificial Sequence
  Description of Artificial Sequence: Synthetic oligonucleotide
  Antisense strand to SEQ ID NO: 946610
aacucucucgcguauucca

SEQ ID NO: 946612 - RNA, 19 nt, Artificial Sequence
  Description of Artificial Sequence: Synthetic oligonucleotide
  Sense strand starting at position 267 of SEQ ID NO: 913693
uuaauaacuggacgugauu

SEQ ID NO: 946613 - RNA, 19 nt, Artificial Sequence
  Description of Artificial Sequence: Synthetic oligonucleotide
  Antisense strand to SEQ ID NO: 946612
aaucacguccaguuauuaa

SEQ ID NO: 946614 - RNA, 19 nt, Artificial Sequence
  Description of Artificial Sequence: Synthetic oligonucleotide
  Sense strand starting at position 1548 of SEQ ID NO: 913694
gcaagacucccuuacauga

SEQ ID NO: 946615 - RNA, 19 nt, Artificial Sequence
  Description of Artificial Sequence: Synthetic oligonucleotide
  Antisense strand to SEQ ID NO: 946614
ucauguaagggagucuugc

SEQ ID NO: 946616 - RNA, 19 nt, Artificial Sequence
  Description of Artificial Sequence: Synthetic oligonucleotide
  Sense strand starting at position 814 of SEQ ID NO: 913694
ugaugagucauugaguuga

SEQ ID NO: 946617 - RNA, 19 nt, Artificial Sequence
  Description of Artificial Sequence: Synthetic oligonucleotide
  Antisense strand to SEQ ID NO: 946616
ucaacucaaugacucauca

SEQ ID NO: 946618 - RNA, 19 nt, Artificial Sequence
  Description of Artificial Sequence: Synthetic oligonucleotide
  Sense strand starting at position 54 of SEQ ID NO: 913694
cgccuuggccucuugagua

SEQ ID NO: 946619 - RNA, 19 nt, Artificial Sequence
  Description of Artificial Sequence: Synthetic oligonucleotide
  Antisense strand to SEQ ID NO: 946618
uacucaagaggccaaggcg

SEQ ID NO: 946620 - RNA, 19 nt, Artificial Sequence
  Description of Artificial Sequence: Synthetic oligonucleotide
  Sense strand starting at position 1018 of SEQ ID NO: 913694
guuuaaagugcacaagaga

SEQ ID NO: 946621 - RNA, 19 nt, Artificial Sequence
  Description of Artificial Sequence: Synthetic oligonucleotide
  Antisense strand to SEQ ID NO: 946620
ucucuugugcacuuuaaac

SEQ ID NO: 946622 - RNA, 19 nt, Artificial Sequence
  Description of Artificial Sequence: Synthetic oligonucleotide
  Sense strand starting at position 260 of SEQ ID NO: 913694
uaaugucuccuggacugau

SEQ ID NO: 946623 - RNA, 19 nt, Artificial Sequence
  Description of Artificial Sequence: Synthetic oligonucleotide
  Antisense strand to SEQ ID NO: 946622
aucaguccaggagacauua

SEQ ID NO: 946624 - RNA, 19 nt, Artificial Sequence
  Description of Artificial Sequence: Synthetic oligonucleotide
  Sense strand starting at position 369 of SEQ ID NO: 913694
ugguguauuucuguaacug

SEQ ID NO: 946625 - RNA, 19 nt, Artificial Sequence
  Description of Artificial Sequence: Synthetic oligonucleotide
  Antisense strand to SEQ ID NO: 946624
caguuacagaaauacacca

SEQ ID NO: 946626 - RNA, 19 nt, Artificial Sequence
  Description of Artificial Sequence: Synthetic oligonucleotide
  Sense strand starting at position 3524 of SEQ ID NO: 913694
ugugaccagagaugugaaa

SEQ ID NO: 946627 - RNA, 19 nt, Artificial Sequence
  Description of Artificial Sequence: Synthetic oligonucleotide
  Antisense strand to SEQ ID NO: 946626
uuucacaucucuggucaca

SEQ ID NO: 946628 - RNA, 19 nt, Artificial Sequence
  Description of Artificial Sequence: Synthetic oligonucleotide
  Sense strand starting at position 373 of SEQ ID NO: 913694
guauuucuguaacugccaa

SEQ ID NO: 946629 - RNA, 19 nt, Artificial Sequence
  Description of Artificial Sequence: Synthetic oligonucleotide
  Antisense strand to SEQ ID NO: 946628
uuggcaguuacagaaauac

SEQ ID NO: 946630 - RNA, 19 nt, Artificial Sequence
  Description of Artificial Sequence: Synthetic oligonucleotide
  Sense strand starting at position 3517 of SEQ ID NO: 913694
augcaaaugugaccagaga

SEQ ID NO: 946631 - RNA, 19 nt, Artificial Sequence
  Description of Artificial Sequence: Synthetic oligonucleotide
  Antisense strand to SEQ ID NO: 946630
ucucuggucacauuugcau

SEQ ID NO: 946632 - RNA, 19 nt, Artificial Sequence
  Description of Artificial Sequence: Synthetic oligonucleotide
  Sense strand starting at position 370 of SEQ ID NO: 913694
gguguauuucuguaacugc

SEQ ID NO: 946633 - RNA, 19 nt, Artificial Sequence
  Description of Artificial Sequence: Synthetic oligonucleotide
  Antisense strand to SEQ ID NO: 946632
gcaguuacagaaauacacc

SEQ ID NO: 946634 - RNA, 19 nt, Artificial Sequence
  Description of Artificial Sequence: Synthetic oligonucleotide
  Sense strand starting at position 3204 of SEQ ID NO: 913694
cgacaugagcaaggaaauu

SEQ ID NO: 946635 - RNA, 19 nt, Artificial Sequence
  Description of Artificial Sequence: Synthetic oligonucleotide
  Antisense strand to SEQ ID NO: 946634
aauuuccuugcucaugucg

SEQ ID NO: 946636 - RNA, 19 nt, Artificial Sequence
  Description of Artificial Sequence: Synthetic oligonucleotide
  Sense strand starting at position 1034 of SEQ ID NO: 913694
agaaauggcuacuccuuaa

SEQ ID NO: 946637 - RNA, 19 nt, Artificial Sequence
  Description of Artificial Sequence: Synthetic oligonucleotide
  Antisense strand to SEQ ID NO: 946636
uuaaggaguagccauuucu

SEQ ID NO: 946638 - RNA, 19 nt, Artificial Sequence
  Description of Artificial Sequence: Synthetic oligonucleotide
  Sense strand starting at position 806 of SEQ ID NO: 913694
ucauuaugugaugagucau

SEQ ID NO: 946639 - RNA, 19 nt, Artificial Sequence
  Description of Artificial Sequence: Synthetic oligonucleotide
  Antisense strand to SEQ ID NO: 946638
augacucaucacauaauga

SEQ ID NO: 946640 - RNA, 19 nt, Artificial Sequence
  Description of Artificial Sequence: Synthetic oligonucleotide
  Sense strand starting at position 819 of SEQ ID NO: 913694
agucauugaguugaacuuu

SEQ ID NO: 946641 - RNA, 19 nt, Artificial Sequence
  Description of Artificial Sequence: Synthetic oligonucleotide
  Antisense strand to SEQ ID NO: 946640
aaaguucaacucaaugacu

SEQ ID NO: 946642 - RNA, 19 nt, Artificial Sequence
  Description of Artificial Sequence: Synthetic oligonucleotide
  Sense strand starting at position 1016 of SEQ ID NO: 913694
ugguuuaaagugcacaaga

SEQ ID NO: 946643 - RNA, 19 nt, Artificial Sequence
  Description of Artificial Sequence: Synthetic oligonucleotide
  Antisense strand to SEQ ID NO: 946642
ucuugugcacuuuaaacca

SEQ ID NO: 946644 - RNA, 19 nt, Artificial Sequence
  Description of Artificial Sequence: Synthetic oligonucleotide
  Sense strand starting at position 3369 of SEQ ID NO: 913694
gugugauagaaauagccca

SEQ ID NO: 946645 - RNA, 19 nt, Artificial Sequence
  Description of Artificial Sequence: Synthetic oligonucleotide
  Antisense strand to SEQ ID NO: 946644
ugggcuauuucuaucacac

SEQ ID NO: 946646 - RNA, 19 nt, Artificial Sequence
  Description of Artificial Sequence: Synthetic oligonucleotide
  Sense strand starting at position 290 of SEQ ID NO: 913694
gaaaguuuggcugagcaaa

SEQ ID NO: 946647 - RNA, 19 nt, Artificial Sequence
  Description of Artificial Sequence: Synthetic oligonucleotide
  Antisense strand to SEQ ID NO: 946646
uuugcucagccaaacuuuc

SEQ ID NO: 946648 - RNA, 19 nt, Artificial Sequence
  Description of Artificial Sequence: Synthetic oligonucleotide
  Sense strand starting at position 733 of SEQ ID NO: 913694
agagaaacaucgccugaca

SEQ ID NO: 946649 - RNA, 19 nt, Artificial Sequence
  Description of Artificial Sequence: Synthetic oligonucleotide
  Antisense strand to SEQ ID NO: 946648
ugucaggcgauguuucucu

SEQ ID NO: 946650 - RNA, 19 nt, Artificial Sequence
  Description of Artificial Sequence: Synthetic oligonucleotide
  Sense strand starting at position 3365 of SEQ ID NO: 913694
ugcugugugauagaaauag

SEQ ID NO: 946651 - RNA, 19 nt, Artificial Sequence
  Description of Artificial Sequence: Synthetic oligonucleotide
  Antisense strand to SEQ ID NO: 946650
cuauuucuaucacacagca

SEQ ID NO: 946652 - RNA, 19 nt, Artificial Sequence
  Description of Artificial Sequence: Synthetic oligonucleotide
  Sense strand starting at position 3224 of SEQ ID NO: 913694
gagaaauuguaguuaagua

SEQ ID NO: 946653 - RNA, 19 nt, Artificial Sequence
  Description of Artificial Sequence: Synthetic oligonucleotide
  Antisense strand to SEQ ID NO: 946652
uacuuaacuacaauuucuc

SEQ ID NO: 946654 - RNA, 19 nt, Artificial Sequence
  Description of Artificial Sequence: Synthetic oligonucleotide
  Sense strand starting at position 816 of SEQ ID NO: 913694
augagucauugaguugaac

SEQ ID NO: 946655 - RNA, 19 nt, Artificial Sequence
  Description of Artificial Sequence: Synthetic oligonucleotide
  Antisense strand to SEQ ID NO: 946654
guucaacucaaugacucau

SEQ ID NO: 946656 - RNA, 19 nt, Artificial Sequence
  Description of Artificial Sequence: Synthetic oligonucleotide
  Sense strand starting at position 2303 of SEQ ID NO: 913694
gcaagaagcccuuaaagug

SEQ ID NO: 946657 - RNA, 19 nt, Artificial Sequence
  Description of Artificial Sequence: Synthetic oligonucleotide
  Antisense strand to SEQ ID NO: 946656
cacuuuaagggcuucuugc

SEQ ID NO: 946658 - RNA, 19 nt, Artificial Sequence
  Description of Artificial Sequence: Synthetic oligonucleotide
  Sense strand starting at position 367 of SEQ ID NO: 913694
guugguguauuucuguaac

SEQ ID NO: 946659 - RNA, 19 nt, Artificial Sequence
  Description of Artificial Sequence: Synthetic oligonucleotide
  Antisense strand to SEQ ID NO: 946658
guuacagaaauacaccaac

SEQ ID NO: 946660 - RNA, 19 nt, Artificial Sequence
  Description of Artificial Sequence: Synthetic oligonucleotide
  Sense strand starting at position 2041 of SEQ ID NO: 913694
ggcgaaacauuccugacaa

SEQ ID NO: 946661 - RNA, 19 nt, Artificial Sequence
  Description of Artificial Sequence: Synthetic oligonucleotide
  Antisense strand to SEQ ID NO: 946660
uugucaggaauguuucgcc

SEQ ID NO: 946662 - RNA, 19 nt, Artificial Sequence
  Description of Artificial Sequence: Synthetic oligonucleotide
  Sense strand starting at position 3251 of SEQ ID NO: 913694
gaaauagucacagggugua

SEQ ID NO: 946663 - RNA, 19 nt, Artificial Sequence
  Description of Artificial Sequence: Synthetic oligonucleotide
  Antisense strand to SEQ ID NO: 946662
uacacccugugacuauuuc

SEQ ID NO: 946664 - RNA, 19 nt, Artificial Sequence
  Description of Artificial Sequence: Synthetic oligonucleotide
  Sense strand starting at position 151 of SEQ ID NO: 913694
uuuacugagcacugaacau

SEQ ID NO: 946665 - RNA, 19 nt, Artificial Sequence
  Description of Artificial Sequence: Synthetic oligonucleotide
  Antisense strand to SEQ ID NO: 946664
auguucagugcucaguaaa

SEQ ID NO: 946666 - RNA, 19 nt, Artificial Sequence
  Description of Artificial Sequence: Synthetic oligonucleotide
  Sense strand starting at position 597 of SEQ ID NO: 913694
auguaucgugaaggaauga

SEQ ID NO: 946667 - RNA, 19 nt, Artificial Sequence
  Description of Artificial Sequence: Synthetic oligonucleotide
  Antisense strand to SEQ ID NO: 946666
ucauuccuucacgauacau

SEQ ID NO: 946668 - RNA, 19 nt, Artificial Sequence
  Description of Artificial Sequence: Synthetic oligonucleotide
  Sense strand starting at position 2573 of SEQ ID NO: 913694
gucauuggauccuuccaga

SEQ ID NO: 946669 - RNA, 19 nt, Artificial Sequence
  Description of Artificial Sequence: Synthetic oligonucleotide
  Antisense strand to SEQ ID NO: 946668
ucuggaaggauccaaugac

SEQ ID NO: 946670 - RNA, 19 nt, Artificial Sequence
  Description of Artificial Sequence: Synthetic oligonucleotide
  Sense strand starting at position 3499 of SEQ ID NO: 913694
acucacagugacugugaua

SEQ ID NO: 946671 - RNA, 19 nt, Artificial Sequence
  Description of Artificial Sequence: Synthetic oligonucleotide
  Antisense strand to SEQ ID NO: 946670
uaucacagucacugugagu

SEQ ID NO: 946672 - RNA, 19 nt, Artificial Sequence
  Description of Artificial Sequence: Synthetic oligonucleotide
  Sense strand starting at position 1721 of SEQ ID NO: 913694
ccaccauggcaguggaaau

SEQ ID NO: 946673 - RNA, 19 nt, Artificial Sequence
  Description of Artificial Sequence: Synthetic oligonucleotide
  Antisense strand to SEQ ID NO: 946672
auuuccacugccauggugg

SEQ ID NO: 946674 - RNA, 19 nt, Artificial Sequence
  Description of Artificial Sequence: Synthetic oligonucleotide
  Sense strand starting at position 735 of SEQ ID NO: 913694
agaaacaucgccugacauc

SEQ ID NO: 946675 - RNA, 19 nt, Artificial Sequence
  Description of Artificial Sequence: Synthetic oligonucleotide
  Antisense strand to SEQ ID NO: 946674
gaugucaggcgauguuucu

SEQ ID NO: 946676 - RNA, 19 nt, Artificial Sequence
  Description of Artificial Sequence: Synthetic oligonucleotide
  Sense strand starting at position 164 of SEQ ID NO: 913694
gaacauccuuguuuguaag

SEQ ID NO: 946677 - RNA, 19 nt, Artificial Sequence
  Description of Artificial Sequence: Synthetic oligonucleotide
  Antisense strand to SEQ ID NO: 946676
cuuacaaacaaggauguuc

SEQ ID NO: 946678 - RNA, 19 nt, Artificial Sequence
  Description of Artificial Sequence: Synthetic oligonucleotide
  Sense strand starting at position 2704 of SEQ ID NO: 913694
aacccauauccgugggauu

SEQ ID NO: 946679 - RNA, 19 nt, Artificial Sequence
  Description of Artificial Sequence: Synthetic oligonucleotide
  Antisense strand to SEQ ID NO: 946678
aaucccacggauauggguu

SEQ ID NO: 946680 - RNA, 19 nt, Artificial Sequence
  Description of Artificial Sequence: Synthetic oligonucleotide
  Sense strand starting at position 393 of SEQ ID NO: 913694
ucgagcugcugauuucagu

SEQ ID NO: 946681 - RNA, 19 nt, Artificial Sequence
  Description of Artificial Sequence: Synthetic oligonucleotide
  Antisense strand to SEQ ID NO: 946680
acugaaaucagcagcucga

SEQ ID NO: 946682 - RNA, 19 nt, Artificial Sequence
  Description of Artificial Sequence: Synthetic oligonucleotide
  Sense strand starting at position 3047 of SEQ ID NO: 913694
aucuauucuugacuuuagu

SEQ ID NO: 946683 - RNA, 19 nt, Artificial Sequence
  Description of Artificial Sequence: Synthetic oligonucleotide
  Antisense strand to SEQ ID NO: 946682
acuaaagucaagaauagau

SEQ ID NO: 946684 - RNA, 19 nt, Artificial Sequence
  Description of Artificial Sequence: Synthetic oligonucleotide
  Sense strand starting at position 163 of SEQ ID NO: 913694
ugaacauccuuguuuguaa

SEQ ID NO: 946685 - RNA, 19 nt, Artificial Sequence
  Description of Artificial Sequence: Synthetic oligonucleotide
  Antisense strand to SEQ ID NO: 946684
uuacaaacaaggauguuca

SEQ ID NO: 946686 - RNA, 19 nt, Artificial Sequence
  Description of Artificial Sequence: Synthetic oligonucleotide
  Sense strand starting at position 2829 of SEQ ID NO: 913694
ucuguuaaaucugucauga

SEQ ID NO: 946687 - RNA, 19 nt, Artificial Sequence
  Description of Artificial Sequence: Synthetic oligonucleotide
  Antisense strand to SEQ ID NO: 946686
ucaugacagauuuaacaga

SEQ ID NO: 946688 - RNA, 19 nt, Artificial Sequence
  Description of Artificial Sequence: Synthetic oligonucleotide
  Sense strand starting at position 166 of SEQ ID NO: 913694
acauccuuguuuguaagau

SEQ ID NO: 946689 - RNA, 19 nt, Artificial Sequence
  Description of Artificial Sequence: Synthetic oligonucleotide
  Antisense strand to SEQ ID NO: 946688
aucuuacaaacaaggaugu

SEQ ID NO: 946690 - RNA, 19 nt, Artificial Sequence
  Description of Artificial Sequence: Synthetic oligonucleotide
  Sense strand starting at position 3297 of SEQ ID NO: 913694
cuaauagacugcucauggu

SEQ ID NO: 946691 - RNA, 19 nt, Artificial Sequence
  Description of Artificial Sequence: Synthetic oligonucleotide
  Antisense strand to SEQ ID NO: 946690
accaugagcagucuauuag

SEQ ID NO: 946692 - RNA, 19 nt, Artificial Sequence
  Description of Artificial Sequence: Synthetic oligonucleotide
  Sense strand starting at position 3764 of SEQ ID NO: 913694
uuugcuuuacuuggaaauc

SEQ ID NO: 946693 - RNA, 19 nt, Artificial Sequence
  Description of Artificial Sequence: Synthetic oligonucleotide
  Antisense strand to SEQ ID NO: 946692
gauuuccaaguaaagcaaa

SEQ ID NO: 946694 - RNA, 19 nt, Artificial Sequence
  Description of Artificial Sequence: Synthetic oligonucleotide
  Sense strand starting at position 2890 of SEQ ID NO: 913695
auugcauaaaggugaggaa

SEQ ID NO: 946695 - RNA, 19 nt, Artificial Sequence
  Description of Artificial Sequence: Synthetic oligonucleotide
  Antisense strand to SEQ ID NO: 946694
uuccucaccuuuaugcaau

SEQ ID NO: 946696 - RNA, 19 nt, Artificial Sequence
  Description of Artificial Sequence: Synthetic oligonucleotide
  Sense strand starting at position 962 of SEQ ID NO: 913695
cuuggaguagucuacaaug

SEQ ID NO: 946697 - RNA, 19 nt, Artificial Sequence
  Description of Artificial Sequence: Synthetic oligonucleotide
  Antisense strand to SEQ ID NO: 946696
cauuguagacuacuccaag

SEQ ID NO: 946698 - RNA, 19 nt, Artificial Sequence
  Description of Artificial Sequence: Synthetic oligonucleotide
  Sense strand starting at position 3801 of SEQ ID NO: 913695
ugaggauauuuggauauau

SEQ ID NO: 946699 - RNA, 19 nt, Artificial Sequence
  Description of Artificial Sequence: Synthetic oligonucleotide
  Antisense strand to SEQ ID NO: 946698
auauauccaaauauccuca

SEQ ID NO: 946700 - RNA, 19 nt, Artificial Sequence
  Description of Artificial Sequence: Synthetic oligonucleotide
  Sense strand starting at position 569 of SEQ ID NO: 913695
agccgugaucgcuccacua

SEQ ID NO: 946701 - RNA, 19 nt, Artificial Sequence
  Description of Artificial Sequence: Synthetic oligonucleotide
  Antisense strand to SEQ ID NO: 946700
uaguggagcgaucacggcu

SEQ ID NO: 946702 - RNA, 19 nt, Artificial Sequence
  Description of Artificial Sequence: Synthetic oligonucleotide
  Sense strand starting at position 1041 of SEQ ID NO: 913695
guaagcauuuacucguaag

SEQ ID NO: 946703 - RNA, 19 nt, Artificial Sequence
  Description of Artificial Sequence: Synthetic oligonucleotide
  Antisense strand to SEQ ID NO: 946702
cuuacgaguaaaugcuuac

SEQ ID NO: 946704 - RNA, 19 nt, Artificial Sequence
  Description of Artificial Sequence: Synthetic oligonucleotide
  Sense strand starting at position 1228 of SEQ ID NO: 913695
acagguuaagucugaagac

SEQ ID NO: 946705 - RNA, 19 nt, Artificial Sequence
  Description of Artificial Sequence: Synthetic oligonucleotide
  Antisense strand to SEQ ID NO: 946704
gucuucagacuuaaccugu

SEQ ID NO: 946706 - RNA, 19 nt, Artificial Sequence
  Description of Artificial Sequence: Synthetic oligonucleotide
  Sense strand starting at position 898 of SEQ ID NO: 913695
ggcaauccgacauaagagu

SEQ ID NO: 946707 - RNA, 19 nt, Artificial Sequence
  Description of Artificial Sequence: Synthetic oligonucleotide
  Antisense strand to SEQ ID NO: 946706
acucuuaugucggauugcc

SEQ ID NO: 946708 - RNA, 19 nt, Artificial Sequence
  Description of Artificial Sequence: Synthetic oligonucleotide
  Sense strand starting at position 2933 of SEQ ID NO: 913695
gugguagaucuugaacuuc

SEQ ID NO: 946709 - RNA, 19 nt, Artificial Sequence
  Description of Artificial Sequence: Synthetic oligonucleotide
  Antisense strand to SEQ ID NO: 946708
gaaguucaagaucuaccac

SEQ ID NO: 946710 - RNA, 19 nt, Artificial Sequence
  Description of Artificial Sequence: Synthetic oligonucleotide
  Sense strand starting at position 652 of SEQ ID NO: 913695
cugugaauuccaugaacca

SEQ ID NO: 946711 - RNA, 19 nt, Artificial Sequence
  Description of Artificial Sequence: Synthetic oligonucleotide
  Antisense strand to SEQ ID NO: 946710
ugguucauggaauucacag

SEQ ID NO: 946712 - RNA, 19 nt, Artificial Sequence
  Description of Artificial Sequence: Synthetic oligonucleotide
  Sense strand starting at position 964 of SEQ ID NO: 913695
uggaguagucuacaaugug

SEQ ID NO: 946713 - RNA, 19 nt, Artificial Sequence
  Description of Artificial Sequence: Synthetic oligonucleotide
  Antisense strand to SEQ ID NO: 946712
cacauuguagacuacucca

SEQ ID NO: 946714 - RNA, 19 nt, Artificial Sequence
  Description of Artificial Sequence: Synthetic oligonucleotide
  Sense strand starting at position 987 of SEQ ID NO: 913695
gguauuaucacggagaguc

SEQ ID NO: 946715 - RNA, 19 nt, Artificial Sequence
  Description of Artificial Sequence: Synthetic oligonucleotide
  Antisense strand to SEQ ID NO: 946714
gacucuccgugauaauacc

SEQ ID NO: 946716 - RNA, 19 nt, Artificial Sequence
  Description of Artificial Sequence: Synthetic oligonucleotide
  Sense strand starting at position 2825 of SEQ ID NO: 913695
gagacaugugagugaaagu

SEQ ID NO: 946717 - RNA, 19 nt, Artificial Sequence
  Description of Artificial Sequence: Synthetic oligonucleotide
  Antisense strand to SEQ ID NO: 946716
acuuucacucacaugucuc

SEQ ID NO: 946718 - RNA, 19 nt, Artificial Sequence
  Description of Artificial Sequence: Synthetic oligonucleotide
  Sense strand starting at position 3738 of SEQ ID NO: 913695
aaagacuucguacgagaaa

SEQ ID NO: 946719 - RNA, 19 nt, Artificial Sequence
  Description of Artificial Sequence: Synthetic oligonucleotide
  Antisense strand to SEQ ID NO: 946718
uuucucguacgaagucuuu

SEQ ID NO: 946720 - RNA, 19 nt, Artificial Sequence
  Description of Artificial Sequence: Synthetic oligonucleotide
  Sense strand starting at position 3902 of SEQ ID NO: 913695
auucguggcccuugaauuu

SEQ ID NO: 946721 - RNA, 19 nt, Artificial Sequence
  Description of Artificial Sequence: Synthetic oligonucleotide
  Antisense strand to SEQ ID NO: 946720
aaauucaagggccacgaau

SEQ ID NO: 946722 - RNA, 19 nt, Artificial Sequence
  Description of Artificial Sequence: Synthetic oligonucleotide
  Sense strand starting at position 1131 of SEQ ID NO: 913695
uagucuucccagggauuga

SEQ ID NO: 946723 - RNA, 19 nt, Artificial Sequence
  Description of Artificial Sequence: Synthetic oligonucleotide
  Antisense strand to SEQ ID NO: 946722
ucaaucccugggaagacua

SEQ ID NO: 946724 - RNA, 19 nt, Artificial Sequence
  Description of Artificial Sequence: Synthetic oligonucleotide
  Sense strand starting at position 2821 of SEQ ID NO: 913695
gggugagacaugugaguga

SEQ ID NO: 946725 - RNA, 19 nt, Artificial Sequence
  Description of Artificial Sequence: Synthetic oligonucleotide
  Antisense strand to SEQ ID NO: 946724
ucacucacaugucucaccc

SEQ ID NO: 946726 - RNA, 19 nt, Artificial Sequence
  Description of Artificial Sequence: Synthetic oligonucleotide
  Sense strand starting at position 40 of SEQ ID NO: 913695
cuguaaucccgauacuuua

SEQ ID NO: 946727 - RNA, 19 nt, Artificial Sequence
  Description of Artificial Sequence: Synthetic oligonucleotide
  Antisense strand to SEQ ID NO: 946726
uaaaguaucgggauuacag

SEQ ID NO: 946728 - RNA, 19 nt, Artificial Sequence
  Description of Artificial Sequence: Synthetic oligonucleotide
  Sense strand starting at position 3240 of SEQ ID NO: 913695
accuucuggccugaguaau

SEQ ID NO: 946729 - RNA, 19 nt, Artificial Sequence
  Description of Artificial Sequence: Synthetic oligonucleotide
  Antisense strand to SEQ ID NO: 946728
auuacucaggccagaaggu

SEQ ID NO: 946730 - RNA, 19 nt, Artificial Sequence
  Description of Artificial Sequence: Synthetic oligonucleotide
  Sense strand starting at position 957 of SEQ ID NO: 913695
caguccuuggaguagucua

SEQ ID NO: 946731 - RNA, 19 nt, Artificial Sequence
  Description of Artificial Sequence: Synthetic oligonucleotide
  Antisense strand to SEQ ID NO: 946730
uagacuacuccaaggacug

SEQ ID NO: 946732 - RNA, 19 nt, Artificial Sequence
  Description of Artificial Sequence: Synthetic oligonucleotide
  Sense strand starting at position 2844 of SEQ ID NO: 913695
gaagucagauguguacauu

SEQ ID NO: 946733 - RNA, 19 nt, Artificial Sequence
  Description of Artificial Sequence: Synthetic oligonucleotide
  Antisense strand to SEQ ID NO: 946732
aauguacacaucugacuuc

SEQ ID NO: 946734 - RNA, 19 nt, Artificial Sequence
  Description of Artificial Sequence: Synthetic oligonucleotide
  Sense strand starting at position 952 of SEQ ID NO: 913695
caacucaguccuuggagua

SEQ ID NO: 946735 - RNA, 19 nt, Artificial Sequence
  Description of Artificial Sequence: Synthetic oligonucleotide
  Antisense strand to SEQ ID NO: 946734
uacuccaaggacugaguug

SEQ ID NO: 946736 - RNA, 19 nt, Artificial Sequence
  Description of Artificial Sequence: Synthetic oligonucleotide
  Sense strand starting at position 2843 of SEQ ID NO: 913695
ugaagucagauguguacau

SEQ ID NO: 946737 - RNA, 19 nt, Artificial Sequence
  Description of Artificial Sequence: Synthetic oligonucleotide
  Antisense strand to SEQ ID NO: 946736
auguacacaucugacuuca

SEQ ID NO: 946738 - RNA, 19 nt, Artificial Sequence
  Description of Artificial Sequence: Synthetic oligonucleotide
  Sense strand starting at position 1033 of SEQ ID NO: 913695
gcacgcuaguaagcauuua

SEQ ID NO: 946739 - RNA, 19 nt, Artificial Sequence
  Description of Artificial Sequence: Synthetic oligonucleotide
  Antisense strand to SEQ ID NO: 946738
uaaaugcuuacuagcgugc

SEQ ID NO: 946740 - RNA, 19 nt, Artificial Sequence
  Description of Artificial Sequence: Synthetic oligonucleotide
  Sense strand starting at position 974 of SEQ ID NO: 913695
uacaaugugaggugguauu

SEQ ID NO: 946741 - RNA, 19 nt, Artificial Sequence
  Description of Artificial Sequence: Synthetic oligonucleotide
  Antisense strand to SEQ ID NO: 946740
aauaccaccucacauugua

SEQ ID NO: 946742 - RNA, 19 nt, Artificial Sequence
  Description of Artificial Sequence: Synthetic oligonucleotide
  Sense strand starting at position 986 of SEQ ID NO: 913695
ugguauuaucacggagagu

SEQ ID NO: 946743 - RNA, 19 nt, Artificial Sequence
  Description of Artificial Sequence: Synthetic oligonucleotide
  Antisense strand to SEQ ID NO: 946742
acucuccgugauaauacca

SEQ ID NO: 946744 - RNA, 19 nt, Artificial Sequence
  Description of Artificial Sequence: Synthetic oligonucleotide
  Sense strand starting at position 1130 of SEQ ID NO: 913695
guagucuucccagggauug

SEQ ID NO: 946745 - RNA, 19 nt, Artificial Sequence
  Description of Artificial Sequence: Synthetic oligonucleotide
  Antisense strand to SEQ ID NO: 946744
caaucccugggaagacuac

SEQ ID NO: 946746 - RNA, 19 nt, Artificial Sequence
  Description of Artificial Sequence: Synthetic oligonucleotide
  Sense strand starting at position 1127 of SEQ ID NO: 913695
uuuguagucuucccaggga

SEQ ID NO: 946747 - RNA, 19 nt, Artificial Sequence
  Description of Artificial Sequence: Synthetic oligonucleotide
  Antisense strand to SEQ ID NO: 946746
ucccugggaagacuacaaa

SEQ ID NO: 946748 - RNA, 19 nt, Artificial Sequence
  Description of Artificial Sequence: Synthetic oligonucleotide
  Sense strand starting at position 789 of SEQ ID NO: 913695
gguacuaacaggugcuaau

SEQ ID NO: 946749 - RNA, 19 nt, Artificial Sequence
  Description of Artificial Sequence: Synthetic oligonucleotide
  Antisense strand to SEQ ID NO: 946748
auuagcaccuguuaguacc

SEQ ID NO: 946750 - RNA, 19 nt, Artificial Sequence
  Description of Artificial Sequence: Synthetic oligonucleotide
  Sense strand starting at position 3160 of SEQ ID NO: 913695
gucuuucucccuugggaau

SEQ ID NO: 946751 - RNA, 19 nt, Artificial Sequence
  Description of Artificial Sequence: Synthetic oligonucleotide
  Antisense strand to SEQ ID NO: 946750
auucccaagggagaaagac

SEQ ID NO: 946752 - RNA, 19 nt, Artificial Sequence
  Description of Artificial Sequence: Synthetic oligonucleotide
  Sense strand starting at position 2841 of SEQ ID NO: 913695
agugaagucagauguguac

SEQ ID NO: 946753 - RNA, 19 nt, Artificial Sequence
  Description of Artificial Sequence: Synthetic oligonucleotide
  Antisense strand to SEQ ID NO: 946752
guacacaucugacuucacu

SEQ ID NO: 946754 - RNA, 19 nt, Artificial Sequence
  Description of Artificial Sequence: Synthetic oligonucleotide
  Sense strand starting at position 3246 of SEQ ID NO: 913695
uggccugaguaaucuccau

SEQ ID NO: 946755 - RNA, 19 nt, Artificial Sequence
  Description of Artificial Sequence: Synthetic oligonucleotide
  Antisense strand to SEQ ID NO: 946754
auggagauuacucaggcca

SEQ ID NO: 946756 - RNA, 19 nt, Artificial Sequence
  Description of Artificial Sequence: Synthetic oligonucleotide
  Sense strand starting at position 749 of SEQ ID NO: 913695
uuacauacgucaucucauu

SEQ ID NO: 946757 - RNA, 19 nt, Artificial Sequence
  Description of Artificial Sequence: Synthetic oligonucleotide
  Antisense strand to SEQ ID NO: 946756
aaugagaugacguauguaa

SEQ ID NO: 946758 - RNA, 19 nt, Artificial Sequence
  Description of Artificial Sequence: Synthetic oligonucleotide
  Sense strand starting at position 3239 of SEQ ID NO: 913695
caccuucuggccugaguaa

SEQ ID NO: 946759 - RNA, 19 nt, Artificial Sequence
  Description of Artificial Sequence: Synthetic oligonucleotide
  Antisense strand to SEQ ID NO: 946758
uuacucaggccagaaggug

SEQ ID NO: 946760 - RNA, 19 nt, Artificial Sequence
  Description of Artificial Sequence: Synthetic oligonucleotide
  Sense strand starting at position 710 of SEQ ID NO: 913695
gagugcuuccugcauacua

SEQ ID NO: 946761 - RNA, 19 nt, Artificial Sequence
  Description of Artificial Sequence: Synthetic oligonucleotide
  Antisense strand to SEQ ID NO: 946760
uaguaugcaggaagcacuc

SEQ ID NO: 946762 - RNA, 19 nt, Artificial Sequence
  Description of Artificial Sequence: Synthetic oligonucleotide
  Sense strand starting at position 2065 of SEQ ID NO: 913695
gcugccgagccugagaaau

SEQ ID NO: 946763 - RNA, 19 nt, Artificial Sequence
  Description of Artificial Sequence: Synthetic oligonucleotide
  Antisense strand to SEQ ID NO: 946762
auuucucaggcucggcagc

SEQ ID NO: 946764 - RNA, 19 nt, Artificial Sequence
  Description of Artificial Sequence: Synthetic oligonucleotide
  Sense strand starting at position 808 of SEQ ID NO: 913695
cuaugucaccgucgggaaa

SEQ ID NO: 946765 - RNA, 19 nt, Artificial Sequence
  Description of Artificial Sequence: Synthetic oligonucleotide
  Antisense strand to SEQ ID NO: 946764
uuucccgacggugacauag

SEQ ID NO: 946766 - RNA, 19 nt, Artificial Sequence
  Description of Artificial Sequence: Synthetic oligonucleotide
  Sense strand starting at position 2780 of SEQ ID NO: 913695
gucuccugggucuguaaua

SEQ ID NO: 946767 - RNA, 19 nt, Artificial Sequence
  Description of Artificial Sequence: Synthetic oligonucleotide
  Antisense strand to SEQ ID NO: 946766
uauuacagacccaggagac

SEQ ID NO: 946768 - RNA, 19 nt, Artificial Sequence
  Description of Artificial Sequence: Synthetic oligonucleotide
  Sense strand starting at position 3639 of SEQ ID NO: 913695
ggagcugaucugugucuca

SEQ ID NO: 946769 - RNA, 19 nt, Artificial Sequence
  Description of Artificial Sequence: Synthetic oligonucleotide
  Antisense strand to SEQ ID NO: 946768
ugagacacagaucagcucc

SEQ ID NO: 946770 - RNA, 19 nt, Artificial Sequence
  Description of Artificial Sequence: Synthetic oligonucleotide
  Sense strand starting at position 3615 of SEQ ID NO: 913695
auuggccuguguucuuaaa

SEQ ID NO: 946771 - RNA, 19 nt, Artificial Sequence
  Description of Artificial Sequence: Synthetic oligonucleotide
  Antisense strand to SEQ ID NO: 946770
uuuaagaacacaggccaau

SEQ ID NO: 946772 - RNA, 19 nt, Artificial Sequence
  Description of Artificial Sequence: Synthetic oligonucleotide
  Sense strand starting at position 571 of SEQ ID NO: 913695
ccgugaucgcuccacuaca

SEQ ID NO: 946773 - RNA, 19 nt, Artificial Sequence
  Description of Artificial Sequence: Synthetic oligonucleotide
  Antisense strand to SEQ ID NO: 946772
uguaguggagcgaucacgg

SEQ ID NO: 946774 - RNA, 19 nt, Artificial Sequence
  Description of Artificial Sequence: Synthetic oligonucleotide
  Sense strand starting at position 1052 of SEQ ID NO: 913696
gcaagaucagcauauacag

SEQ ID NO: 946775 - RNA, 19 nt, Artificial Sequence
  Description of Artificial Sequence: Synthetic oligonucleotide
  Antisense strand to SEQ ID NO: 946774
cuguauaugcugaucuugc

SEQ ID NO: 946776 - RNA, 19 nt, Artificial Sequence
  Description of Artificial Sequence: Synthetic oligonucleotide
  Sense strand starting at position 837 of SEQ ID NO: 913696
aucaucugucacuauugga

SEQ ID NO: 946777 - RNA, 19 nt, Artificial Sequence
  Description of Artificial Sequence: Synthetic oligonucleotide
  Antisense strand to SEQ ID NO: 946776
uccaauagugacagaugau

SEQ ID NO: 946778 - RNA, 19 nt, Artificial Sequence
  Description of Artificial Sequence: Synthetic oligonucleotide
  Sense strand starting at position 2969 of SEQ ID NO: 913696
cuuucucaggaauauaugu

SEQ ID NO: 946779 - RNA, 19 nt, Artificial Sequence
  Description of Artificial Sequence: Synthetic oligonucleotide
  Antisense strand to SEQ ID NO: 946778
acauauauuccugagaaag

SEQ ID NO: 946780 - RNA, 19 nt, Artificial Sequence
  Description of Artificial Sequence: Synthetic oligonucleotide
  Sense strand starting at position 2934 of SEQ ID NO: 913696
ggaaacuagaaaugcgaua

SEQ ID NO: 946781 - RNA, 19 nt, Artificial Sequence
  Description of Artificial Sequence: Synthetic oligonucleotide
  Antisense strand to SEQ ID NO: 946780
uaucgcauuucuaguuucc

SEQ ID NO: 946782 - RNA, 19 nt, Artificial Sequence
  Description of Artificial Sequence: Synthetic oligonucleotide
  Sense strand starting at position 204 of SEQ ID NO: 913696
gguuuacugagacaugggu

SEQ ID NO: 946783 - RNA, 19 nt, Artificial Sequence
  Description of Artificial Sequence: Synthetic oligonucleotide
  Antisense strand to SEQ ID NO: 946782
acccaugucucaguaaacc

SEQ ID NO: 946784 - RNA, 19 nt, Artificial Sequence
  Description of Artificial Sequence: Synthetic oligonucleotide
  Sense strand starting at position 2959 of SEQ ID NO: 913696
ccaggaaauucuuucucag

SEQ ID NO: 946785 - RNA, 19 nt, Artificial Sequence
  Description of Artificial Sequence: Synthetic oligonucleotide
  Antisense strand to SEQ ID NO: 946784
cugagaaagaauuuccugg

SEQ ID NO: 946786 - RNA, 19 nt, Artificial Sequence
  Description of Artificial Sequence: Synthetic oligonucleotide
  Sense strand starting at position 361 of SEQ ID NO: 913696
agagguaugaugcaaugua

SEQ ID NO: 946787 - RNA, 19 nt, Artificial Sequence
  Description of Artificial Sequence: Synthetic oligonucleotide
  Antisense strand to SEQ ID NO: 946786
uacauugcaucauaccucu

SEQ ID NO: 946788 - RNA, 19 nt, Artificial Sequence
  Description of Artificial Sequence: Synthetic oligonucleotide
  Sense strand starting at position 352 of SEQ ID NO: 913696
uguuacuaaagagguauga

SEQ ID NO: 946789 - RNA, 19 nt, Artificial Sequence
  Description of Artificial Sequence: Synthetic oligonucleotide
  Antisense strand to SEQ ID NO: 946788
ucauaccucuuuaguaaca

SEQ ID NO: 946790 - RNA, 19 nt, Artificial Sequence
  Description of Artificial Sequence: Synthetic oligonucleotide
  Sense strand starting at position 3728 of SEQ ID NO: 913696
aagagaaaguucuuaguuc

SEQ ID NO: 946791 - RNA, 19 nt, Artificial Sequence
  Description of Artificial Sequence: Synthetic oligonucleotide
  Antisense strand to SEQ ID NO: 946790
gaacuaagaacuuucucuu

SEQ ID NO: 946792 - RNA, 19 nt, Artificial Sequence
  Description of Artificial Sequence: Synthetic oligonucleotide
  Sense strand starting at position 394 of SEQ ID NO: 913696
gcucuuauuugcucgaaga

SEQ ID NO: 946793 - RNA, 19 nt, Artificial Sequence
  Description of Artificial Sequence: Synthetic oligonucleotide
  Antisense strand to SEQ ID NO: 946792
ucuucgagcaaauaagagc

SEQ ID NO: 946794 - RNA, 19 nt, Artificial Sequence
  Description of Artificial Sequence: Synthetic oligonucleotide
  Sense strand starting at position 3737 of SEQ ID NO: 913696
uucuuaguucucgaaauau

SEQ ID NO: 946795 - RNA, 19 nt, Artificial Sequence
  Description of Artificial Sequence: Synthetic oligonucleotide
  Antisense strand to SEQ ID NO: 946794
auauuucgagaacuaagaa

SEQ ID NO: 946796 - RNA, 19 nt, Artificial Sequence
  Description of Artificial Sequence: Synthetic oligonucleotide
  Sense strand starting at position 3801 of SEQ ID NO: 913696
aucuaaguguacucucaaa

SEQ ID NO: 946797 - RNA, 19 nt, Artificial Sequence
  Description of Artificial Sequence: Synthetic oligonucleotide
  Antisense strand to SEQ ID NO: 946796
uuugagaguacacuuagau

SEQ ID NO: 946798 - RNA, 19 nt, Artificial Sequence
  Description of Artificial Sequence: Synthetic oligonucleotide
  Sense strand starting at position 3869 of SEQ ID NO: 913696
cuaaauaagucauugucau

SEQ ID NO: 946799 - RNA, 19 nt, Artificial Sequence
  Description of Artificial Sequence: Synthetic oligonucleotide
  Antisense strand to SEQ ID NO: 946798
augacaaugacuuauuuag

SEQ ID NO: 946800 - RNA, 19 nt, Artificial Sequence
  Description of Artificial Sequence: Synthetic oligonucleotide
  Sense strand starting at position 3320 of SEQ ID NO: 913696
cuggccucaguauaugauu

SEQ ID NO: 946801 - RNA, 19 nt, Artificial Sequence
  Description of Artificial Sequence: Synthetic oligonucleotide
  Antisense strand to SEQ ID NO: 946800
aaucauauacugaggccag

SEQ ID NO: 946802 - RNA, 19 nt, Artificial Sequence
  Description of Artificial Sequence: Synthetic oligonucleotide
  Sense strand starting at position 765 of SEQ ID NO: 913696
aguaaauuccuuugguuaa

SEQ ID NO: 946803 - RNA, 19 nt, Artificial Sequence
  Description of Artificial Sequence: Synthetic oligonucleotide
  Antisense strand to SEQ ID NO: 946802
uuaaccaaaggaauuuacu

SEQ ID NO: 946804 - RNA, 19 nt, Artificial Sequence
  Description of Artificial Sequence: Synthetic oligonucleotide
  Sense strand starting at position 3876 of SEQ ID NO: 913696
agucauugucauuaauugu

SEQ ID NO: 946805 - RNA, 19 nt, Artificial Sequence
  Description of Artificial Sequence: Synthetic oligonucleotide
  Antisense strand to SEQ ID NO: 946804
acaauuaaugacaaugacu

SEQ ID NO: 946806 - RNA, 19 nt, Artificial Sequence
  Description of Artificial Sequence: Synthetic oligonucleotide
  Sense strand starting at position 1103 of SEQ ID NO: 913696
ggccaaucgcaugaugauu

SEQ ID NO: 946807 - RNA, 19 nt, Artificial Sequence
  Description of Artificial Sequence: Synthetic oligonucleotide
  Antisense strand to SEQ ID NO: 946806
aaucaucaugcgauuggcc

SEQ ID NO: 946808 - RNA, 19 nt, Artificial Sequence
  Description of Artificial Sequence: Synthetic oligonucleotide
  Sense strand starting at position 3618 of SEQ ID NO: 913696
uagcguuagcggucucagu

SEQ ID NO: 946809 - RNA, 19 nt, Artificial Sequence
  Description of Artificial Sequence: Synthetic oligonucleotide
  Antisense strand to SEQ ID NO: 946808
acugagaccgcuaacgcua

SEQ ID NO: 946810 - RNA, 19 nt, Artificial Sequence
  Description of Artificial Sequence: Synthetic oligonucleotide
  Sense strand starting at position 832 of SEQ ID NO: 913696
cggauaucaucugucacua

SEQ ID NO: 946811 - RNA, 19 nt, Artificial Sequence
  Description of Artificial Sequence: Synthetic oligonucleotide
  Antisense strand to SEQ ID NO: 946810
uagugacagaugauauccg

SEQ ID NO: 946812 - RNA, 19 nt, Artificial Sequence
  Description of Artificial Sequence: Synthetic oligonucleotide
  Sense strand starting at position 659 of SEQ ID NO: 913696
gauauuacauugcuuguga

SEQ ID NO: 946813 - RNA, 19 nt, Artificial Sequence
  Description of Artificial Sequence: Synthetic oligonucleotide
  Antisense strand to SEQ ID NO: 946812
ucacaagcaauguaauauc

SEQ ID NO: 946814 - RNA, 19 nt, Artificial Sequence
  Description of Artificial Sequence: Synthetic oligonucleotide
  Sense strand starting at position 657 of SEQ ID NO: 913696
gagauauuacauugcuugu

SEQ ID NO: 946815 - RNA, 19 nt, Artificial Sequence
  Description of Artificial Sequence: Synthetic oligonucleotide
  Antisense strand to SEQ ID NO: 946814
acaagcaauguaauaucuc

SEQ ID NO: 946816 - RNA, 19 nt, Artificial Sequence
  Description of Artificial Sequence: Synthetic oligonucleotide
  Sense strand starting at position 283 of SEQ ID NO: 913696
cugggcucuuuauuccaua

SEQ ID NO: 946817 - RNA, 19 nt, Artificial Sequence
  Description of Artificial Sequence: Synthetic oligonucleotide
  Antisense strand to SEQ ID NO: 946816
uauggaauaaagagcccag

SEQ ID NO: 946818 - RNA, 19 nt, Artificial Sequence
  Description of Artificial Sequence: Synthetic oligonucleotide
  Sense strand starting at position 284 of SEQ ID NO: 913696
ugggcucuuuauuccauau

SEQ ID NO: 946819 - RNA, 19 nt, Artificial Sequence
  Description of Artificial Sequence: Synthetic oligonucleotide
  Antisense strand to SEQ ID NO: 946818
auauggaauaaagagccca

SEQ ID NO: 946820 - RNA, 19 nt, Artificial Sequence
  Description of Artificial Sequence: Synthetic oligonucleotide
  Sense strand starting at position 763 of SEQ ID NO: 913696
uuaguaaauuccuuugguu

SEQ ID NO: 946821 - RNA, 19 nt, Artificial Sequence
  Description of Artificial Sequence: Synthetic oligonucleotide
  Antisense strand to SEQ ID NO: 946820
aaccaaaggaauuuacuaa

SEQ ID NO: 946822 - RNA, 19 nt, Artificial Sequence
  Description of Artificial Sequence: Synthetic oligonucleotide
  Sense strand starting at position 3378 of SEQ ID NO: 913696
auacauacuugauaggaaa

SEQ ID NO: 946823 - RNA, 19 nt, Artificial Sequence
  Description of Artificial Sequence: Synthetic oligonucleotide
  Antisense strand to SEQ ID NO: 946822
uuuccuaucaaguauguau

SEQ ID NO: 946824 - RNA, 19 nt, Artificial Sequence
  Description of Artificial Sequence: Synthetic oligonucleotide
  Sense strand starting at position 3732 of SEQ ID NO: 913696
gaaaguucuuaguucucga

SEQ ID NO: 946825 - RNA, 19 nt, Artificial Sequence
  Description of Artificial Sequence: Synthetic oligonucleotide
  Antisense strand to SEQ ID NO: 946824
ucgagaacuaagaacuuuc

SEQ ID NO: 946826 - RNA, 19 nt, Artificial Sequence
  Description of Artificial Sequence: Synthetic oligonucleotide
  Sense strand starting at position 2619 of SEQ ID NO: 913696
gggagucacucgcccacaa

SEQ ID NO: 946827 - RNA, 19 nt, Artificial Sequence
  Description of Artificial Sequence: Synthetic oligonucleotide
  Antisense strand to SEQ ID NO: 946826
uugugggcgagugacuccc

SEQ ID NO: 946828 - RNA, 19 nt, Artificial Sequence
  Description of Artificial Sequence: Synthetic oligonucleotide
  Sense strand starting at position 1102 of SEQ ID NO: 913696
aggccaaucgcaugaugau

SEQ ID NO: 946829 - RNA, 19 nt, Artificial Sequence
  Description of Artificial Sequence: Synthetic oligonucleotide
  Antisense strand to SEQ ID NO: 946828
aucaucaugcgauuggccu

SEQ ID NO: 946830 - RNA, 19 nt, Artificial Sequence
  Description of Artificial Sequence: Synthetic oligonucleotide
  Sense strand starting at position 645 of SEQ ID NO: 913696
guuuauuugucagagauau

SEQ ID NO: 946831 - RNA, 19 nt, Artificial Sequence
  Description of Artificial Sequence: Synthetic oligonucleotide
  Antisense strand to SEQ ID NO: 946830
auaucucugacaaauaaac

SEQ ID NO: 946832 - RNA, 19 nt, Artificial Sequence
  Description of Artificial Sequence: Synthetic oligonucleotide
  Sense strand starting at position 3735 of SEQ ID NO: 913696
aguucuuaguucucgaaau

SEQ ID NO: 946833 - RNA, 19 nt, Artificial Sequence
  Description of Artificial Sequence: Synthetic oligonucleotide
  Antisense strand to SEQ ID NO: 946832
auuucgagaacuaagaacu

SEQ ID NO: 946834 - RNA, 19 nt, Artificial Sequence
  Description of Artificial Sequence: Synthetic oligonucleotide
  Sense strand starting at position 1411 of SEQ ID NO: 913696
gguugcagggcuugaugau

SEQ ID NO: 946835 - RNA, 19 nt, Artificial Sequence
  Description of Artificial Sequence: Synthetic oligonucleotide
  Antisense strand to SEQ ID NO: 946834
aucaucaagcccugcaacc

SEQ ID NO: 946836 - RNA, 19 nt, Artificial Sequence
  Description of Artificial Sequence: Synthetic oligonucleotide
  Sense strand starting at position 1420 of SEQ ID NO: 913696
gcuugaugauccgcaggau

SEQ ID NO: 946837 - RNA, 19 nt, Artificial Sequence
  Description of Artificial Sequence: Synthetic oligonucleotide
  Antisense strand to SEQ ID NO: 946836
auccugcggaucaucaagc

SEQ ID NO: 946838 - RNA, 19 nt, Artificial Sequence
  Description of Artificial Sequence: Synthetic oligonucleotide
  Sense strand starting at position 3536 of SEQ ID NO: 913696
cugggcucgucucuauaaa

SEQ ID NO: 946839 - RNA, 19 nt, Artificial Sequence
  Description of Artificial Sequence: Synthetic oligonucleotide
  Antisense strand to SEQ ID NO: 946838
uuuauagagacgagcccag

SEQ ID NO: 946840 - RNA, 19 nt, Artificial Sequence
  Description of Artificial Sequence: Synthetic oligonucleotide
  Sense strand starting at position 1039 of SEQ ID NO: 913696
gucuacucugcaugcaaga

SEQ ID NO: 946841 - RNA, 19 nt, Artificial Sequence
  Description of Artificial Sequence: Synthetic oligonucleotide
  Antisense strand to SEQ ID NO: 946840
ucuugcaugcagaguagac

SEQ ID NO: 946842 - RNA, 19 nt, Artificial Sequence
  Description of Artificial Sequence: Synthetic oligonucleotide
  Sense strand starting at position 3323 of SEQ ID NO: 913696
gccucaguauaugauuuau

SEQ ID NO: 946843 - RNA, 19 nt, Artificial Sequence
  Description of Artificial Sequence: Synthetic oligonucleotide
  Antisense strand to SEQ ID NO: 946842
auaaaucauauacugaggc

SEQ ID NO: 946844 - RNA, 19 nt, Artificial Sequence
  Description of Artificial Sequence: Synthetic oligonucleotide
  Sense strand starting at position 165 of SEQ ID NO: 913696
ucauaagucagcgggcaua

SEQ ID NO: 946845 - RNA, 19 nt, Artificial Sequence
  Description of Artificial Sequence: Synthetic oligonucleotide
  Antisense strand to SEQ ID NO: 946844
uaugcccgcugacuuauga

SEQ ID NO: 946846 - RNA, 19 nt, Artificial Sequence
  Description of Artificial Sequence: Synthetic oligonucleotide
  Sense strand starting at position 3684 of SEQ ID NO: 913696
ggugcuucccgauauguuc

SEQ ID NO: 946847 - RNA, 19 nt, Artificial Sequence
  Description of Artificial Sequence: Synthetic oligonucleotide
  Antisense strand to SEQ ID NO: 946846
gaacauaucgggaagcacc

SEQ ID NO: 946848 - RNA, 19 nt, Artificial Sequence
  Description of Artificial Sequence: Synthetic oligonucleotide
  Sense strand starting at position 751 of SEQ ID NO: 913696
auuaacgcgugauuaguaa

SEQ ID NO: 946849 - RNA, 19 nt, Artificial Sequence
  Description of Artificial Sequence: Synthetic oligonucleotide
  Antisense strand to SEQ ID NO: 946848
uuacuaaucacgcguuaau

SEQ ID NO: 946850 - RNA, 19 nt, Artificial Sequence
  Description of Artificial Sequence: Synthetic oligonucleotide
  Sense strand starting at position 643 of SEQ ID NO: 913696
guguuuauuugucagagau

SEQ ID NO: 946851 - RNA, 19 nt, Artificial Sequence
  Description of Artificial Sequence: Synthetic oligonucleotide
  Antisense strand to SEQ ID NO: 946850
aucucugacaaauaaacac

SEQ ID NO: 946852 - RNA, 19 nt, Artificial Sequence
  Description of Artificial Sequence: Synthetic oligonucleotide
  Sense strand starting at position 746 of SEQ ID NO: 913696
aaacgauuaacgcgugauu

SEQ ID NO: 946853 - RNA, 19 nt, Artificial Sequence
  Description of Artificial Sequence: Synthetic oligonucleotide
  Antisense strand to SEQ ID NO: 946852
aaucacgcguuaaucguuu

SEQ ID NO: 946854 - RNA, 19 nt, Artificial Sequence
  Description of Artificial Sequence: Synthetic oligonucleotide
  Sense strand starting at position 1222 of SEQ ID NO: 913697
gcauuauaccaagauucug

SEQ ID NO: 946855 - RNA, 19 nt, Artificial Sequence
  Description of Artificial Sequence: Synthetic oligonucleotide
  Antisense strand to SEQ ID NO: 946854
cagaaucuugguauaaugc

SEQ ID NO: 946856 - RNA, 19 nt, Artificial Sequence
  Description of Artificial Sequence: Synthetic oligonucleotide
  Sense strand starting at position 353 of SEQ ID NO: 913697
gggagagucacacaugucu

SEQ ID NO: 946857 - RNA, 19 nt, Artificial Sequence
  Description of Artificial Sequence: Synthetic oligonucleotide
  Antisense strand to SEQ ID NO: 946856
agacaugugugacucuccc

SEQ ID NO: 946858 - RNA, 19 nt, Artificial Sequence
  Description of Artificial Sequence: Synthetic oligonucleotide
  Sense strand starting at position 213 of SEQ ID NO: 913697
guuaauugggcauaauaac

SEQ ID NO: 946859 - RNA, 19 nt, Artificial Sequence
  Description of Artificial Sequence: Synthetic oligonucleotide
  Antisense strand to SEQ ID NO: 946858
guuauuaugcccaauuaac

SEQ ID NO: 946860 - RNA, 19 nt, Artificial Sequence
  Description of Artificial Sequence: Synthetic oligonucleotide
  Sense strand starting at position 285 of SEQ ID NO: 913697
ugcgauagugcuuuguaca

SEQ ID NO: 946861 - RNA, 19 nt, Artificial Sequence
  Description of Artificial Sequence: Synthetic oligonucleotide
  Antisense strand to SEQ ID NO: 946860
uguacaaagcacuaucgca

SEQ ID NO: 946862 - RNA, 19 nt, Artificial Sequence
  Description of Artificial Sequence: Synthetic oligonucleotide
  Sense strand starting at position 830 of SEQ ID NO: 913697
guggaaacuugaguggaau

SEQ ID NO: 946863 - RNA, 19 nt, Artificial Sequence
  Description of Artificial Sequence: Synthetic oligonucleotide
  Antisense strand to SEQ ID NO: 946862
auuccacucaaguuuccac

SEQ ID NO: 946864 - RNA, 19 nt, Artificial Sequence
  Description of Artificial Sequence: Synthetic oligonucleotide
  Sense strand starting at position 211 of SEQ ID NO: 913697
cuguuaauugggcauaaua

SEQ ID NO: 946865 - RNA, 19 nt, Artificial Sequence
  Description of Artificial Sequence: Synthetic oligonucleotide
  Antisense strand to SEQ ID NO: 946864
uauuaugcccaauuaacag

SEQ ID NO: 946866 - RNA, 19 nt, Artificial Sequence
  Description of Artificial Sequence: Synthetic oligonucleotide
  Sense strand starting at position 2874 of SEQ ID NO: 913697
caggcagcuccagaauuga

SEQ ID NO: 946867 - RNA, 19 nt, Artificial Sequence
  Description of Artificial Sequence: Synthetic oligonucleotide
  Antisense strand to SEQ ID NO: 946866
ucaauucuggagcugccug

SEQ ID NO: 946868 - RNA, 19 nt, Artificial Sequence
  Description of Artificial Sequence: Synthetic oligonucleotide
  Sense strand starting at position 392 of SEQ ID NO: 913697
gcugucuugacauagagau

SEQ ID NO: 946869 - RNA, 19 nt, Artificial Sequence
  Description of Artificial Sequence: Synthetic oligonucleotide
  Antisense strand to SEQ ID NO: 946868
aucucuaugucaagacagc

SEQ ID NO: 946870 - RNA, 19 nt, Artificial Sequence
  Description of Artificial Sequence: Synthetic oligonucleotide
  Sense strand starting at position 595 of SEQ ID NO: 913697
cagcccuaucuggaaggua

SEQ ID NO: 946871 - RNA, 19 nt, Artificial Sequence
  Description of Artificial Sequence: Synthetic oligonucleotide
  Antisense strand to SEQ ID NO: 946870
uaccuuccagauagggcug

SEQ ID NO: 946872 - RNA, 19 nt, Artificial Sequence
  Description of Artificial Sequence: Synthetic oligonucleotide
  Sense strand starting at position 292 of SEQ ID NO: 913697
gugcuuuguacacaggaaa

SEQ ID NO: 946873 - RNA, 19 nt, Artificial Sequence
  Description of Artificial Sequence: Synthetic oligonucleotide
  Antisense strand to SEQ ID NO: 946872
uuuccuguguacaaagcac

SEQ ID NO: 946874 - RNA, 19 nt, Artificial Sequence
  Description of Artificial Sequence: Synthetic oligonucleotide
  Sense strand starting at position 1297 of SEQ ID NO: 913697
aucagugcaccuugaagaa

SEQ ID NO: 946875 - RNA, 19 nt, Artificial Sequence
  Description of Artificial Sequence: Synthetic oligonucleotide
  Antisense strand to SEQ ID NO: 946874
uucuucaaggugcacugau

SEQ ID NO: 946876 - RNA, 19 nt, Artificial Sequence
  Description of Artificial Sequence: Synthetic oligonucleotide
  Sense strand starting at position 456 of SEQ ID NO: 913697
gacagaugggccuguugga

SEQ ID NO: 946877 - RNA, 19 nt, Artificial Sequence
  Description of Artificial Sequence: Synthetic oligonucleotide
  Antisense strand to SEQ ID NO: 946876
uccaacaggcccaucuguc

SEQ ID NO: 946878 - RNA, 19 nt, Artificial Sequence
  Description of Artificial Sequence: Synthetic oligonucleotide
  Sense strand starting at position 144 of SEQ ID NO: 913697
ggauaaugaugccuucuuu

SEQ ID NO: 946879 - RNA, 19 nt, Artificial Sequence
  Description of Artificial Sequence: Synthetic oligonucleotide
  Antisense strand to SEQ ID NO: 946878
aaagaaggcaucauuaucc

SEQ ID NO: 946880 - RNA, 19 nt, Artificial Sequence
  Description of Artificial Sequence: Synthetic oligonucleotide
  Sense strand starting at position 829 of SEQ ID NO: 913697
gguggaaacuugaguggaa

SEQ ID NO: 946881 - RNA, 19 nt, Artificial Sequence
  Description of Artificial Sequence: Synthetic oligonucleotide
  Antisense strand to SEQ ID NO: 946880
uuccacucaaguuuccacc

SEQ ID NO: 946882 - RNA, 19 nt, Artificial Sequence
  Description of Artificial Sequence: Synthetic oligonucleotide
  Sense strand starting at position 821 of SEQ ID NO: 913697
uguucugugguggaaacuu

SEQ ID NO: 946883 - RNA, 19 nt, Artificial Sequence
  Description of Artificial Sequence: Synthetic oligonucleotide
  Antisense strand to SEQ ID NO: 946882
aaguuuccaccacagaaca

SEQ ID NO: 946884 - RNA, 19 nt, Artificial Sequence
  Description of Artificial Sequence: Synthetic oligonucleotide
  Sense strand starting at position 257 of SEQ ID NO: 913697
ugcucugaggcuugaaaga

SEQ ID NO: 946885 - RNA, 19 nt, Artificial Sequence
  Description of Artificial Sequence: Synthetic oligonucleotide
  Antisense strand to SEQ ID NO: 946884
ucuuucaagccucagagca

SEQ ID NO: 946886 - RNA, 19 nt, Artificial Sequence
  Description of Artificial Sequence: Synthetic oligonucleotide
  Sense strand starting at position 1008 of SEQ ID NO: 913697
cccugauguccugaguuuc

SEQ ID NO: 946887 - RNA, 19 nt, Artificial Sequence
  Description of Artificial Sequence: Synthetic oligonucleotide
  Antisense strand to SEQ ID NO: 946886
gaaacucaggacaucaggg

SEQ ID NO: 946888 - RNA, 19 nt, Artificial Sequence
  Description of Artificial Sequence: Synthetic oligonucleotide
  Sense strand starting at position 466 of SEQ ID NO: 913697
ccuguuggaaucugucaga

SEQ ID NO: 946889 - RNA, 19 nt, Artificial Sequence
  Description of Artificial Sequence: Synthetic oligonucleotide
  Antisense strand to SEQ ID NO: 946888
ucugacagauuccaacagg

SEQ ID NO: 946890 - RNA, 19 nt, Artificial Sequence
  Description of Artificial Sequence: Synthetic oligonucleotide
  Sense strand starting at position 1275 of SEQ ID NO: 913697
agugcuugaaggugacaca

SEQ ID NO: 946891 - RNA, 19 nt, Artificial Sequence
  Description of Artificial Sequence: Synthetic oligonucleotide
  Antisense strand to SEQ ID NO: 946890
ugugucaccuucaagcacu

SEQ ID NO: 946892 - RNA, 19 nt, Artificial Sequence
  Description of Artificial Sequence: Synthetic oligonucleotide
  Sense strand starting at position 210 of SEQ ID NO: 913697
ucuguuaauugggcauaau

SEQ ID NO: 946893 - RNA, 19 nt, Artificial Sequence
  Description of Artificial Sequence: Synthetic oligonucleotide
  Antisense strand to SEQ ID NO: 946892
auuaugcccaauuaacaga

SEQ ID NO: 946894 - RNA, 19 nt, Artificial Sequence
  Description of Artificial Sequence: Synthetic oligonucleotide
  Sense strand starting at position 1436 of SEQ ID NO: 913697
ggguucucagccugaggau

SEQ ID NO: 946895 - RNA, 19 nt, Artificial Sequence
  Description of Artificial Sequence: Synthetic oligonucleotide
  Antisense strand to SEQ ID NO: 946894
auccucaggcugagaaccc

SEQ ID NO: 946896 - RNA, 19 nt, Artificial Sequence
  Description of Artificial Sequence: Synthetic oligonucleotide
  Sense strand starting at position 187 of SEQ ID NO: 913697
guuucugaaccuuaguugu

SEQ ID NO: 946897 - RNA, 19 nt, Artificial Sequence
  Description of Artificial Sequence: Synthetic oligonucleotide
  Antisense strand to SEQ ID NO: 946896
acaacuaagguucagaaac

SEQ ID NO: 946898 - RNA, 19 nt, Artificial Sequence
  Description of Artificial Sequence: Synthetic oligonucleotide
  Sense strand starting at position 3961 of SEQ ID NO: 913697
augguucucuuucuguaaa

SEQ ID NO: 946899 - RNA, 19 nt, Artificial Sequence
  Description of Artificial Sequence: Synthetic oligonucleotide
  Antisense strand to SEQ ID NO: 946898
uuuacagaaagagaaccau

SEQ ID NO: 946900 - RNA, 19 nt, Artificial Sequence
  Description of Artificial Sequence: Synthetic oligonucleotide
  Sense strand starting at position 275 of SEQ ID NO: 913697
agaucacuuaugcgauagu

SEQ ID NO: 946901 - RNA, 19 nt, Artificial Sequence
  Description of Artificial Sequence: Synthetic oligonucleotide
  Antisense strand to SEQ ID NO: 946900
acuaucgcauaagugaucu

SEQ ID NO: 946902 - RNA, 19 nt, Artificial Sequence
  Description of Artificial Sequence: Synthetic oligonucleotide
  Sense strand starting at position 385 of SEQ ID NO: 913697
uggaaacgcugucuugaca

SEQ ID NO: 946903 - RNA, 19 nt, Artificial Sequence
  Description of Artificial Sequence: Synthetic oligonucleotide
  Antisense strand to SEQ ID NO: 946902
ugucaagacagcguuucca

SEQ ID NO: 946904 - RNA, 19 nt, Artificial Sequence
  Description of Artificial Sequence: Synthetic oligonucleotide
  Sense strand starting at position 673 of SEQ ID NO: 913697
gugaguacucugcauuccu

SEQ ID NO: 946905 - RNA, 19 nt, Artificial Sequence
  Description of Artificial Sequence: Synthetic oligonucleotide
  Antisense strand to SEQ ID NO: 946904
aggaaugcagaguacucac

SEQ ID NO: 946906 - RNA, 19 nt, Artificial Sequence
  Description of Artificial Sequence: Synthetic oligonucleotide
  Sense strand starting at position 412 of SEQ ID NO: 913697
gaagccugcugguuggaau

SEQ ID NO: 946907 - RNA, 19 nt, Artificial Sequence
  Description of Artificial Sequence: Synthetic oligonucleotide
  Antisense strand to SEQ ID NO: 946906
auuccaaccagcaggcuuc

SEQ ID NO: 946908 - RNA, 19 nt, Artificial Sequence
  Description of Artificial Sequence: Synthetic oligonucleotide
  Sense strand starting at position 820 of SEQ ID NO: 913697
uuguucugugguggaaacu

SEQ ID NO: 946909 - RNA, 19 nt, Artificial Sequence
  Description of Artificial Sequence: Synthetic oligonucleotide
  Antisense strand to SEQ ID NO: 946908
aguuuccaccacagaacaa

SEQ ID NO: 946910 - RNA, 19 nt, Artificial Sequence
  Description of Artificial Sequence: Synthetic oligonucleotide
  Sense strand starting at position 1072 of SEQ ID NO: 913697
ugcuguguggaguagcaaa

SEQ ID NO: 946911 - RNA, 19 nt, Artificial Sequence
  Description of Artificial Sequence: Synthetic oligonucleotide
  Antisense strand to SEQ ID NO: 946910
uuugcuacuccacacagca

SEQ ID NO: 946912 - RNA, 19 nt, Artificial Sequence
  Description of Artificial Sequence: Synthetic oligonucleotide
  Sense strand starting at position 2822 of SEQ ID NO: 913697
uuaaauacgugcccacauu

SEQ ID NO: 946913 - RNA, 19 nt, Artificial Sequence
  Description of Artificial Sequence: Synthetic oligonucleotide
  Antisense strand to SEQ ID NO: 946912
aaugugggcacguauuuaa

SEQ ID NO: 946914 - RNA, 19 nt, Artificial Sequence
  Description of Artificial Sequence: Synthetic oligonucleotide
  Sense strand starting at position 444 of SEQ ID NO: 913697
cagacauccugggacagau

SEQ ID NO: 946915 - RNA, 19 nt, Artificial Sequence
  Description of Artificial Sequence: Synthetic oligonucleotide
  Antisense strand to SEQ ID NO: 946914
aucugucccaggaugucug

SEQ ID NO: 946916 - RNA, 19 nt, Artificial Sequence
  Description of Artificial Sequence: Synthetic oligonucleotide
  Sense strand starting at position 1498 of SEQ ID NO: 913697
guaagucugucaucccuua

SEQ ID NO: 946917 - RNA, 19 nt, Artificial Sequence
  Description of Artificial Sequence: Synthetic oligonucleotide
  Antisense strand to SEQ ID NO: 946916
uaagggaugacagacuuac

SEQ ID NO: 946918 - RNA, 19 nt, Artificial Sequence
  Description of Artificial Sequence: Synthetic oligonucleotide
  Sense strand starting at position 1067 of SEQ ID NO: 913697
ugacaugcuguguggagua

SEQ ID NO: 946919 - RNA, 19 nt, Artificial Sequence
  Description of Artificial Sequence: Synthetic oligonucleotide
  Antisense strand to SEQ ID NO: 946918
uacuccacacagcauguca

SEQ ID NO: 946920 - RNA, 19 nt, Artificial Sequence
  Description of Artificial Sequence: Synthetic oligonucleotide
  Sense strand starting at position 773 of SEQ ID NO: 913697
aaccuugugccuugucaga

SEQ ID NO: 946921 - RNA, 19 nt, Artificial Sequence
  Description of Artificial Sequence: Synthetic oligonucleotide
  Antisense strand to SEQ ID NO: 946920
ucugacaaggcacaagguu

SEQ ID NO: 946922 - RNA, 19 nt, Artificial Sequence
  Description of Artificial Sequence: Synthetic oligonucleotide
  Sense strand starting at position 3980 of SEQ ID NO: 913697
augugaguguuggauuuca

SEQ ID NO: 946923 - RNA, 19 nt, Artificial Sequence
  Description of Artificial Sequence: Synthetic oligonucleotide
  Antisense strand to SEQ ID NO: 946922
ugaaauccaacacucacau

SEQ ID NO: 946924 - RNA, 19 nt, Artificial Sequence
  Description of Artificial Sequence: Synthetic oligonucleotide
  Sense strand starting at position 278 of SEQ ID NO: 913697
ucacuuaugcgauagugcu

SEQ ID NO: 946925 - RNA, 19 nt, Artificial Sequence
  Description of Artificial Sequence: Synthetic oligonucleotide
  Antisense strand to SEQ ID NO: 946924
agcacuaucgcauaaguga

SEQ ID NO: 946926 - RNA, 19 nt, Artificial Sequence
  Description of Artificial Sequence: Synthetic oligonucleotide
  Sense strand starting at position 1016 of SEQ ID NO: 913697
uccugaguuucgcuccaaa

SEQ ID NO: 946927 - RNA, 19 nt, Artificial Sequence
  Description of Artificial Sequence: Synthetic oligonucleotide
  Antisense strand to SEQ ID NO: 946926
uuuggagcgaaacucagga

SEQ ID NO: 946928 - RNA, 19 nt, Artificial Sequence
  Description of Artificial Sequence: Synthetic oligonucleotide
  Sense strand starting at position 201 of SEQ ID NO: 913697
guugucucaucuguuaauu

SEQ ID NO: 946929 - RNA, 19 nt, Artificial Sequence
  Description of Artificial Sequence: Synthetic oligonucleotide
  Antisense strand to SEQ ID NO: 946928
aauuaacagaugagacaac

SEQ ID NO: 946930 - RNA, 19 nt, Artificial Sequence
  Description of Artificial Sequence: Synthetic oligonucleotide
  Sense strand starting at position 198 of SEQ ID NO: 913697
uuaguugucucaucuguua

SEQ ID NO: 946931 - RNA, 19 nt, Artificial Sequence
  Description of Artificial Sequence: Synthetic oligonucleotide
  Antisense strand to SEQ ID NO: 946930
uaacagaugagacaacuaa

SEQ ID NO: 946932 - RNA, 19 nt, Artificial Sequence
  Description of Artificial Sequence: Synthetic oligonucleotide
  Sense strand starting at position 775 of SEQ ID NO: 913697
ccuugugccuugucagaau

SEQ ID NO: 946933 - RNA, 19 nt, Artificial Sequence
  Description of Artificial Sequence: Synthetic oligonucleotide
  Antisense strand to SEQ ID NO: 946932
auucugacaaggcacaagg

SEQ ID NO: 946934 - RNA, 19 nt, Artificial Sequence
  Description of Artificial Sequence: Synthetic oligonucleotide
  Sense strand starting at position 616 of SEQ ID NO: 913698
aaacguuaucuaugagaaa

SEQ ID NO: 946935 - RNA, 19 nt, Artificial Sequence
  Description of Artificial Sequence: Synthetic oligonucleotide
  Antisense strand to SEQ ID NO: 946934
uuucucauagauaacguuu

SEQ ID NO: 946936 - RNA, 19 nt, Artificial Sequence
  Description of Artificial Sequence: Synthetic oligonucleotide
  Sense strand starting at position 3646 of SEQ ID NO: 913698
gacccaauacugggauugu

SEQ ID NO: 946937 - RNA, 19 nt, Artificial Sequence
  Description of Artificial Sequence: Synthetic oligonucleotide
  Antisense strand to SEQ ID NO: 946936
acaaucccaguauuggguc

SEQ ID NO: 946938 - RNA, 19 nt, Artificial Sequence
  Description of Artificial Sequence: Synthetic oligonucleotide
  Sense strand starting at position 261 of SEQ ID NO: 913698
ccauacuccuuagugaaga

SEQ ID NO: 946939 - RNA, 19 nt, Artificial Sequence
  Description of Artificial Sequence: Synthetic oligonucleotide
  Antisense strand to SEQ ID NO: 946938
ucuucacuaaggaguaugg

SEQ ID NO: 946940 - RNA, 19 nt, Artificial Sequence
  Description of Artificial Sequence: Synthetic oligonucleotide
  Sense strand starting at position 2966 of SEQ ID NO: 913698
uccugcucuguggaaauaa

SEQ ID NO: 946941 - RNA, 19 nt, Artificial Sequence
  Description of Artificial Sequence: Synthetic oligonucleotide
  Antisense strand to SEQ ID NO: 946940
uuauuuccacagagcagga

SEQ ID NO: 946942 - RNA, 19 nt, Artificial Sequence
  Description of Artificial Sequence: Synthetic oligonucleotide
  Sense strand starting at position 903 of SEQ ID NO: 913698
auauaaaucuucuuggcag

SEQ ID NO: 946943 - RNA, 19 nt, Artificial Sequence
  Description of Artificial Sequence: Synthetic oligonucleotide
  Antisense strand to SEQ ID NO: 946942
cugccaagaagauuuauau

SEQ ID NO: 946944 - RNA, 19 nt, Artificial Sequence
  Description of Artificial Sequence: Synthetic oligonucleotide
  Sense strand starting at position 1786 of SEQ ID NO: 913698
gugccauaucgagagacua

SEQ ID NO: 946945 - RNA, 19 nt, Artificial Sequence
  Description of Artificial Sequence: Synthetic oligonucleotide
  Antisense strand to SEQ ID NO: 946944
uagucucucgauauggcac

SEQ ID NO: 946946 - RNA, 19 nt, Artificial Sequence
  Description of Artificial Sequence: Synthetic oligonucleotide
  Sense strand starting at position 1206 of SEQ ID NO: 913698
uaauaagguggcugauuga

SEQ ID NO: 946947 - RNA, 19 nt, Artificial Sequence
  Description of Artificial Sequence: Synthetic oligonucleotide
  Antisense strand to SEQ ID NO: 946946
ucaaucagccaccuuauua

SEQ ID NO: 946948 - RNA, 19 nt, Artificial Sequence
  Description of Artificial Sequence: Synthetic oligonucleotide
  Sense strand starting at position 905 of SEQ ID NO: 913698
auaaaucuucuuggcagau

SEQ ID NO: 946949 - RNA, 19 nt, Artificial Sequence
  Description of Artificial Sequence: Synthetic oligonucleotide
  Antisense strand to SEQ ID NO: 946948
aucugccaagaagauuuau

SEQ ID NO: 946950 - RNA, 19 nt, Artificial Sequence
  Description of Artificial Sequence: Synthetic oligonucleotide
  Sense strand starting at position 2883 of SEQ ID NO: 913698
cggacuaucuagguuuaga

SEQ ID NO: 946951 - RNA, 19 nt, Artificial Sequence
  Description of Artificial Sequence: Synthetic oligonucleotide
  Antisense strand to SEQ ID NO: 946950
ucuaaaccuagauaguccg

SEQ ID NO: 946952 - RNA, 19 nt, Artificial Sequence
  Description of Artificial Sequence: Synthetic oligonucleotide
  Sense strand starting at position 2054 of SEQ ID NO: 913698
ugcaauuuccuccggcuga

SEQ ID NO: 946953 - RNA, 19 nt, Artificial Sequence
  Description of Artificial Sequence: Synthetic oligonucleotide
  Antisense strand to SEQ ID NO: 946952
ucagccggaggaaauugca

SEQ ID NO: 946954 - RNA, 19 nt, Artificial Sequence
  Description of Artificial Sequence: Synthetic oligonucleotide
  Sense strand starting at position 3185 of SEQ ID NO: 913698
auagauaaauugcuuguca

SEQ ID NO: 946955 - RNA, 19 nt, Artificial Sequence
  Description of Artificial Sequence: Synthetic oligonucleotide
  Antisense strand to SEQ ID NO: 946954
ugacaagcaauuuaucuau

SEQ ID NO: 946956 - RNA, 19 nt, Artificial Sequence
  Description of Artificial Sequence: Synthetic oligonucleotide
  Sense strand starting at position 1361 of SEQ ID NO: 913698
ccggcagccucauuucuua

SEQ ID NO: 946957 - RNA, 19 nt, Artificial Sequence
  Description of Artificial Sequence: Synthetic oligonucleotide
  Antisense strand to SEQ ID NO: 946956
uaagaaaugaggcugccgg

SEQ ID NO: 946958 - RNA, 19 nt, Artificial Sequence
  Description of Artificial Sequence: Synthetic oligonucleotide
  Sense strand starting at position 3042 of SEQ ID NO: 913698
guuaguugcauguaagaag

SEQ ID NO: 946959 - RNA, 19 nt, Artificial Sequence
  Description of Artificial Sequence: Synthetic oligonucleotide
  Antisense strand to SEQ ID NO: 946958
cuucuuacaugcaacuaac

SEQ ID NO: 946960 - RNA, 19 nt, Artificial Sequence
  Description of Artificial Sequence: Synthetic oligonucleotide
  Sense strand starting at position 3010 of SEQ ID NO: 913698
gggaguuugugaguuaaua

SEQ ID NO: 946961 - RNA, 19 nt, Artificial Sequence
  Description of Artificial Sequence: Synthetic oligonucleotide
  Antisense strand to SEQ ID NO: 946960
uauuaacucacaaacuccc

SEQ ID NO: 946962 - RNA, 19 nt, Artificial Sequence
  Description of Artificial Sequence: Synthetic oligonucleotide
  Sense strand starting at position 3187 of SEQ ID NO: 913698
agauaaauugcuugucaug

SEQ ID NO: 946963 - RNA, 19 nt, Artificial Sequence
  Description of Artificial Sequence: Synthetic oligonucleotide
  Antisense strand to SEQ ID NO: 946962
caugacaagcaauuuaucu

SEQ ID NO: 946964 - RNA, 19 nt, Artificial Sequence
  Description of Artificial Sequence: Synthetic oligonucleotide
  Sense strand starting at position 1116 of SEQ ID NO: 913698
gcauuaaccugucucaaag

SEQ ID NO: 946965 - RNA, 19 nt, Artificial Sequence
  Description of Artificial Sequence: Synthetic oligonucleotide
  Antisense strand to SEQ ID NO: 946964
cuuugagacagguuaaugc

SEQ ID NO: 946966 - RNA, 19 nt, Artificial Sequence
  Description of Artificial Sequence: Synthetic oligonucleotide
  Sense strand starting at position 943 of SEQ ID NO: 913698
cucugagcuguccaaggua

SEQ ID NO: 946967 - RNA, 19 nt, Artificial Sequence
  Description of Artificial Sequence: Synthetic oligonucleotide
  Antisense strand to SEQ ID NO: 946966
uaccuuggacagcucagag

SEQ ID NO: 946968 - RNA, 19 nt, Artificial Sequence
  Description of Artificial Sequence: Synthetic oligonucleotide
  Sense strand starting at position 3600 of SEQ ID NO: 913698
guacauauaucuuuauggu

SEQ ID NO: 946969 - RNA, 19 nt, Artificial Sequence
  Description of Artificial Sequence: Synthetic oligonucleotide
  Antisense strand to SEQ ID NO: 946968
accauaaagauauauguac

SEQ ID NO: 946970 - RNA, 19 nt, Artificial Sequence
  Description of Artificial Sequence: Synthetic oligonucleotide
  Sense strand starting at position 3875 of SEQ ID NO: 913698
gguuucucuagugauuagu

SEQ ID NO: 946971 - RNA, 19 nt, Artificial Sequence
  Description of Artificial Sequence: Synthetic oligonucleotide
  Antisense strand to SEQ ID NO: 946970
acuaaucacuagagaaacc

SEQ ID NO: 946972 - RNA, 19 nt, Artificial Sequence
  Description of Artificial Sequence: Synthetic oligonucleotide
  Sense strand starting at position 1002 of SEQ ID NO: 913698
uguggaaaguaagcuucua

SEQ ID NO: 946973 - RNA, 19 nt, Artificial Sequence
  Description of Artificial Sequence: Synthetic oligonucleotide
  Antisense strand to SEQ ID NO: 946972
uagaagcuuacuuuccaca

SEQ ID NO: 946974 - RNA, 19 nt, Artificial Sequence
  Description of Artificial Sequence: Synthetic oligonucleotide
  Sense strand starting at position 834 of SEQ ID NO: 913698
aaaugauagugagaagaau

SEQ ID NO: 946975 - RNA, 19 nt, Artificial Sequence
  Description of Artificial Sequence: Synthetic oligonucleotide
  Antisense strand to SEQ ID NO: 946974
auucuucucacuaucauuu
